United States Patent Application Publication US 2026/0021141 A1 - sequence listing, part 2

SEQ ID NO: 30238 - RNA, 20 nt, synthetic construct
  source 1..20: mol_type = other RNA
ccctgctggaacgaatattc

SEQ ID NO: 30239 - RNA, 20 nt, synthetic construct
  source 1..20: mol_type = other RNA
ccctgctgtggccgagggag

SEQ ID NO: 30240 - RNA, 20 nt, synthetic construct
  source 1..20: mol_type = other RNA
ccctgctgttcccaagcaag

SEQ ID NO: 30241 - RNA, 20 nt, synthetic construct
  source 1..20: mol_type = other RNA
ccctgcttcatctggaccag

SEQ ID NO: 30242 - RNA, 20 nt, synthetic construct
  source 1..20: mol_type = other RNA
ccctgcttggcgcagtgctt

SEQ ID NO: 30243 - RNA, 20 nt, synthetic construct
  source 1..20: mol_type = other RNA
ccctgctttaaaacactggc

SEQ ID NO: 30244 - RNA, 20 nt, synthetic construct
  source 1..20: mol_type = other RNA
ccctgctttcagttctttcg

SEQ ID NO: 30245 - RNA, 20 nt, synthetic construct
  source 1..20: mol_type = other RNA
ccctggaaataagtttcatg

SEQ ID NO: 30246 - RNA, 20 nt, synthetic construct
  source 1..20: mol_type = other RNA
ccctggaacaatcaaaccat

SEQ ID NO: 30247 - RNA, 20 nt, synthetic construct
  source 1..20: mol_type = other RNA
ccctggagaaagcccagccg

SEQ ID NO: 30248 - RNA, 20 nt, synthetic construct
  source 1..20: mol_type = other RNA
ccctggagaggcaaaggccg

SEQ ID NO: 30249 - RNA, 20 nt, synthetic construct
  source 1..20: mol_type = other RNA
ccctggagttaattccacaa

SEQ ID NO: 30250 - RNA, 20 nt, synthetic construct
  source 1..20: mol_type = other RNA
ccctggatcccccagcccct

SEQ ID NO: 30251 - RNA, 20 nt, synthetic construct
  source 1..20: mol_type = other RNA
ccctggcattgtcccggggg

SEQ ID NO: 30252 - RNA, 20 nt, synthetic construct
  source 1..20: mol_type = other RNA
ccctggcttgtgacatcaag

SEQ ID NO: 30253 - RNA, 20 nt, synthetic construct
  source 1..20: mol_type = other RNA
ccctgggaaagcctggcttt

SEQ ID NO: 30254 - RNA, 20 nt, synthetic construct
  source 1..20: mol_type = other RNA
ccctgggctcaagccatcct

SEQ ID NO: 30255 - RNA, 20 nt, synthetic construct
  source 1..20: mol_type = other RNA
ccctggggaataagatttta

SEQ ID NO: 30256 - RNA, 20 nt, synthetic construct
  source 1..20: mol_type = other RNA
ccctggggcctcagcatgtc

SEQ ID NO: 30257 - RNA, 20 nt, synthetic construct
  source 1..20: mol_type = other RNA
ccctggggtttccttacctt

SEQ ID NO: 30258 - RNA, 20 nt, synthetic construct
  source 1..20: mol_type = other RNA
ccctggtcgagctgggtgat

SEQ ID NO: 30259 - RNA, 20 nt, synthetic construct
  source 1..20: mol_type = other RNA
ccctggtgatctatgaattt

SEQ ID NO: 30260 - RNA, 20 nt, synthetic construct
  source 1..20: mol_type = other RNA
ccctggtgctttctatctct

SEQ ID NO: 30261 - RNA, 20 nt, synthetic construct
  source 1..20: mol_type = other RNA
ccctggttcaagctatgctc

SEQ ID NO: 30262 - RNA, 20 nt, synthetic construct
  source 1..20: mol_type = other RNA
ccctgtaattacatacttca

SEQ ID NO: 30263 - RNA, 20 nt, synthetic construct
  source 1..20: mol_type = other RNA
ccctgtacccattagacact

SEQ ID NO: 30264 - RNA, 20 nt, synthetic construct
  source 1..20: mol_type = other RNA
ccctgtagagatttttatca

SEQ ID NO: 30265 - RNA, 20 nt, synthetic construct
  source 1..20: mol_type = other RNA
ccctgtagcagacactgggt

SEQ ID NO: 30266 - RNA, 20 nt, synthetic construct
  source 1..20: mol_type = other RNA
ccctgtccaagtatttctca

SEQ ID NO: 30267 - RNA, 20 nt, synthetic construct
  source 1..20: mol_type = other RNA
ccctgtctctaaaaaatacc

SEQ ID NO: 30268 - RNA, 20 nt, synthetic construct
  source 1..20: mol_type = other RNA
ccctgtctgggaagttatgt

SEQ ID NO: 30269 - RNA, 20 nt, synthetic construct
  source 1..20: mol_type = other RNA
ccctgtctgtgatgtagagg

SEQ ID NO: 30270 - RNA, 20 nt, synthetic construct
  source 1..20: mol_type = other RNA
ccctgtctttctgtctgctt

SEQ ID NO: 30271 - RNA, 20 nt, synthetic construct
  source 1..20: mol_type = other RNA
ccctgtgaaaatcattttgg

SEQ ID NO: 30272 - RNA, 20 nt, synthetic construct
  source 1..20: mol_type = other RNA
ccctgtgcgtgaatctgttc

SEQ ID NO: 30273 - RNA, 20 nt, synthetic construct
  source 1..20: mol_type = other RNA
ccctgtgtatgtgtagtcag

SEQ ID NO: 30274 - RNA, 20 nt, synthetic construct
  source 1..20: mol_type = other RNA
ccctgttagtcccctagtgg

SEQ ID NO: 30275 - RNA, 20 nt, synthetic construct
  source 1..20: mol_type = other RNA
ccctgttggcctggacacac

SEQ ID NO: 30276 - RNA, 20 nt, synthetic construct
  source 1..20: mol_type = other RNA
ccctgttgggctattaagta

SEQ ID NO: 30277 - RNA, 20 nt, synthetic construct
  source 1..20: mol_type = other RNA
ccctgtttcccttaatgttg

SEQ ID NO: 30278 - RNA, 20 nt, synthetic construct
  source 1..20: mol_type = other RNA
ccctgttttgtagattaaaa

SEQ ID NO: 30279 - RNA, 20 nt, synthetic construct
  source 1..20: mol_type = other RNA
cccttaaaaggaactaattt

SEQ ID NO: 30280 - RNA, 20 nt, synthetic construct
  source 1..20: mol_type = other RNA
cccttaaattccaaaagtga

SEQ ID NO: 30281 - RNA, 20 nt, synthetic construct
  source 1..20: mol_type = other RNA
cccttaacctttttcttttc

SEQ ID NO: 30282 - RNA, 20 nt, synthetic construct
  source 1..20: mol_type = other RNA
cccttaacttcacctctaca

SEQ ID NO: 30283 - RNA, 20 nt, synthetic construct
  source 1..20: mol_type = other RNA
cccttaatgttgacatcttg

SEQ ID NO: 30284 - RNA, 20 nt, synthetic construct
  source 1..20: mol_type = other RNA
cccttaccttaaaccatata

SEQ ID NO: 30285 - RNA, 20 nt, synthetic construct
  source 1..20: mol_type = other RNA
cccttacgcgtggatgtgtg

SEQ ID NO: 30286 - RNA, 20 nt, synthetic construct
  source 1..20: mol_type = other RNA
cccttactaaattttgaggc

SEQ ID NO: 30287 - RNA, 20 nt, synthetic construct
  source 1..20: mol_type = other RNA
cccttagctctcatgtcaga

SEQ ID NO: 30288 - RNA, 20 nt, synthetic construct
  source 1..20: mol_type = other RNA
cccttataaaatgagggtaa

SEQ ID NO: 30289 - RNA, 20 nt, synthetic construct
  source 1..20: mol_type = other RNA
cccttatatgggatatctaa

SEQ ID NO: 30290 - RNA, 20 nt, synthetic construct
  source 1..20: mol_type = other RNA
cccttatcaggaaagtgcca

SEQ ID NO: 30291 - RNA, 20 nt, synthetic construct
  source 1..20: mol_type = other RNA
cccttatcctcttctgaaga

SEQ ID NO: 30292 - RNA, 20 nt, synthetic construct
  source 1..20: mol_type = other RNA
cccttatgtccagcccccag

SEQ ID NO: 30293 - RNA, 20 nt, synthetic construct
  source 1..20: mol_type = other RNA
cccttatgtgtgtataaccc

SEQ ID NO: 30294 - RNA, 20 nt, synthetic construct
  source 1..20: mol_type = other RNA
cccttatttaatgtgctgtc

SEQ ID NO: 30295 - RNA, 20 nt, synthetic construct
  source 1..20: mol_type = other RNA
cccttcacaaagccctcagg

SEQ ID NO: 30296 - RNA, 20 nt, synthetic construct
  source 1..20: mol_type = other RNA
cccttcagcctgtgtcagtg

SEQ ID NO: 30297 - RNA, 20 nt, synthetic construct
  source 1..20: mol_type = other RNA
cccttcagtgtagtcagaca

SEQ ID NO: 30298 - RNA, 20 nt, synthetic construct
  source 1..20: mol_type = other RNA
cccttcatcatttgtattat

SEQ ID NO: 30299 - RNA, 20 nt, synthetic construct
  source 1..20: mol_type = other RNA
cccttccagcgtgtgcatga

SEQ ID NO: 30300 - RNA, 20 nt, synthetic construct
  source 1..20: mol_type = other RNA
cccttccccacctttcctgc

SEQ ID NO: 30301 - RNA, 20 nt, synthetic construct
  source 1..20: mol_type = other RNA
cccttcctgttctttgttag

SEQ ID NO: 30302 - RNA, 20 nt, synthetic construct
  source 1..20: mol_type = other RNA
cccttccttgcttgtcttga

SEQ ID NO: 30303 - RNA, 20 nt, synthetic construct
  source 1..20: mol_type = other RNA
cccttctattccattgttct

SEQ ID NO: 30304 - RNA, 20 nt, synthetic construct
  source 1..20: mol_type = other RNA
cccttctcgaagtggtgctt

SEQ ID NO: 30305 - RNA, 20 nt, synthetic construct
  source 1..20: mol_type = other RNA
cccttctgctcggctctgtc

SEQ ID NO: 30306 - RNA, 20 nt, synthetic construct
  source 1..20: mol_type = other RNA
cccttctgttaatagatagg

SEQ ID NO: 30307 - RNA, 20 nt, synthetic construct
  source 1..20: mol_type = other RNA
cccttcttaaatgtgaatta

SEQ ID NO: 30308 - RNA, 20 nt, synthetic construct
  source 1..20: mol_type = other RNA
cccttgaaaatttccagcat

SEQ ID NO: 30309 - RNA, 20 nt, synthetic construct
  source 1..20: mol_type = other RNA
cccttgaaagatcatttagt

SEQ ID NO: 30310 - RNA, 20 nt, synthetic construct
  source 1..20: mol_type = other RNA
cccttgacgaagtcacattc

SEQ ID NO: 30311 - RNA, 20 nt, synthetic construct
  source 1..20: mol_type = other RNA
cccttgagtatttttgagct

SEQ ID NO: 30312 - RNA, 20 nt, synthetic construct
  source 1..20: mol_type = other RNA
cccttgatgtcacaagccag

SEQ ID NO: 30313 - RNA, 20 nt, synthetic construct
  source 1..20: mol_type = other RNA
cccttgccaaggcttgcttt

SEQ ID NO: 30314 - RNA, 20 nt, synthetic construct
  source 1..20: mol_type = other RNA
cccttgcctgacagcaaata

SEQ ID NO: 30315 - RNA, 20 nt, synthetic construct
  source 1..20: mol_type = other RNA
cccttgctgcttctacccac

SEQ ID NO: 30316 - RNA, 20 nt, synthetic construct
  source 1..20: mol_type = other RNA
cccttggctagactaagaaa

SEQ ID NO: 30317 - RNA, 20 nt, synthetic construct
  source 1..20: mol_type = other RNA
cccttgggatgcagcaaaag

SEQ ID NO: 30318 - RNA, 20 nt, synthetic construct
  source 1..20: mol_type = other RNA
cccttggtaaacagcagtct

SEQ ID NO: 30319 - RNA, 20 nt, synthetic construct
  source 1..20: mol_type = other RNA
cccttgtaatcaagtatctc

SEQ ID NO: 30320 - RNA, 20 nt, synthetic construct
  source 1..20: mol_type = other RNA
cccttgtgcacctcgggttc

SEQ ID NO: 30321 - RNA, 20 nt, synthetic construct
  source 1..20: mol_type = other RNA
cccttgttggacagctggga

SEQ ID NO: 30322 - RNA, 20 nt, synthetic construct
  source 1..20: mol_type = other RNA
ccctttaaaatgatagcatt

SEQ ID NO: 30323 - RNA, 20 nt, synthetic construct
  source 1..20: mol_type = other RNA
ccctttacccctgagaactt

SEQ ID NO: 30324 - RNA, 20 nt, synthetic construct
  source 1..20: mol_type = other RNA
ccctttactcagattcacca

SEQ ID NO: 30325 - RNA, 20 nt, synthetic construct
  source 1..20: mol_type = other RNA
ccctttagtgttctgtgttt

SEQ ID NO: 30326 - RNA, 20 nt, synthetic construct
  source 1..20: mol_type = other RNA
ccctttatcggataaggaag

SEQ ID NO: 30327 - RNA, 20 nt, synthetic construct
  source 1..20: mol_type = other RNA
ccctttattcaaagatcatt

SEQ ID NO: 30328 - RNA, 20 nt, synthetic construct
  source 1..20: mol_type = other RNA
ccctttcaagattgtttaat

SEQ ID NO: 30329 - RNA, 20 nt, synthetic construct
  source 1..20: mol_type = other RNA
ccctttccaaattcaaagca

SEQ ID NO: 30330 - RNA, 20 nt, synthetic construct
  source 1..20: mol_type = other RNA
ccctttcgctaatctcaatc

SEQ ID NO: 30331 - RNA, 20 nt, synthetic construct
  source 1..20: mol_type = other RNA
ccctttcttaggaagctatg

SEQ ID NO: 30332 - RNA, 20 nt, synthetic construct
  source 1..20: mol_type = other RNA
ccctttcttgttagtaggaa

SEQ ID NO: 30333 - RNA, 20 nt, synthetic construct
  source 1..20: mol_type = other RNA
ccctttctttggttttgact

SEQ ID NO: 30334 - RNA, 20 nt, synthetic construct
  source 1..20: mol_type = other RNA
ccctttgaagtatgtaatta

SEQ ID NO: 30335 - RNA, 20 nt, synthetic construct
  source 1..20: mol_type = other RNA
ccctttgagcagagtcctga

SEQ ID NO: 30336 - RNA, 20 nt, synthetic construct
  source 1..20: mol_type = other RNA
ccctttgttagtgccttcag

SEQ ID NO: 30337 - RNA, 20 nt, synthetic construct
  source 1..20: mol_type = other RNA
ccctttgttatctgaacgtc

SEQ ID NO: 30338 - RNA, 20 nt, synthetic construct
  source 1..20: mol_type = other RNA
cccttttggatgcagatttc

SEQ ID NO: 30339 - RNA, 20 nt, synthetic construct
  source 1..20: mol_type = other RNA
cccttttgtagctaatatct

SEQ ID NO: 30340 - RNA, 20 nt, synthetic construct
  source 1..20: mol_type = other RNA
ccctttttaggtagggataa

SEQ ID NO: 30341 - RNA, 20 nt, synthetic construct
  source 1..20: mol_type = other RNA
ccgaaagaactgaaagcagg

SEQ ID NO: 30342 - RNA, 20 nt, synthetic construct
  source 1..20: mol_type = other RNA
ccgaaatgcacttagcgctg

SEQ ID NO: 30343 - RNA, 20 nt, synthetic construct
  source 1..20: mol_type = other RNA
ccgaagaggacgatttttcc

SEQ ID NO: 30344 - RNA, 20 nt, synthetic construct
  source 1..20: mol_type = other RNA
ccgaatcctttgcttcccac

SEQ ID NO: 30345 - RNA, 20 nt, synthetic construct
  source 1..20: mol_type = other RNA
ccgaatgtggtggtatgcac

SEQ ID NO: 30346 - RNA, 20 nt, synthetic construct
  source 1..20: mol_type = other RNA
ccgacagcagataagatcca

SEQ ID NO: 30347 - RNA, 20 nt, synthetic construct
  source 1..20: mol_type = other RNA
ccgacccactagtgaagtcc

SEQ ID NO: 30348 - RNA, 20 nt, synthetic construct
  source 1..20: mol_type = other RNA
ccgacccagcccccaacccg

SEQ ID NO: 30349 - RNA, 20 nt, synthetic construct
  source 1..20: mol_type = other RNA
ccgacccccctacctccctc

SEQ ID NO: 30350 - RNA, 20 nt, synthetic construct
  source 1..20: mol_type = other RNA
ccgacctccagcgctaagca

SEQ ID NO: 30351 - RNA, 20 nt, synthetic construct
  source 1..20: mol_type = other RNA
ccgacctgtagattgggctt

SEQ ID NO: 30352 - RNA, 20 nt, synthetic construct
  source 1..20: mol_type = other RNA
ccgacgcctttcatttggcc

SEQ ID NO: 30353 - RNA, 20 nt, synthetic construct
  source 1..20: mol_type = other RNA
ccgacggctcaggcctgttg

SEQ ID NO: 30354 - RNA, 20 nt, synthetic construct
  source 1..20: mol_type = other RNA
ccgactgaaaggaaatgagt

SEQ ID NO: 30355 - RNA, 20 nt, synthetic construct
  source 1..20: mol_type = other RNA
ccgagaaatcggaactcctg

SEQ ID NO: 30356 - RNA, 20 nt, synthetic construct
  source 1..20: mol_type = other RNA
ccgagacaagttctcctgtg

SEQ ID NO: 30357 - RNA, 20 nt, synthetic construct
  source 1..20: mol_type = other RNA
ccgagatacttaagttttta

SEQ ID NO: 30358 - RNA, 20 nt, synthetic construct
  source 1..20: mol_type = other RNA
ccgagatcacgccactgcat

SEQ ID NO: 30359 - RNA, 20 nt, synthetic construct
  source 1..20: mol_type = other RNA
ccgagcagaagggaaaggat

SEQ ID NO: 30360 - RNA, 20 nt, synthetic construct
  source 1..20: mol_type = other RNA
ccgaggaaacccgctctggg

SEQ ID NO: 30361 - RNA, 20 nt, synthetic construct
  source 1..20: mol_type = other RNA
ccgaggcagagagagtaact

SEQ ID NO: 30362 - RNA, 20 nt, synthetic construct
  source 1..20: mol_type = other RNA
ccgaggcaggtggatcagga

SEQ ID NO: 30363 - RNA, 20 nt, synthetic construct
  source 1..20: mol_type = other RNA
ccgaggccagtccctagtgt

SEQ ID NO: 30364 - RNA, 20 nt, synthetic construct
  source 1..20: mol_type = other RNA
ccgagggagacggcgagctt

SEQ ID NO: 30365 - RNA, 20 nt, synthetic construct
  source 1..20: mol_type = other RNA
ccgagggttgaacatcaccc

SEQ ID NO: 30366 - RNA, 20 nt, synthetic construct
  source 1..20: mol_type = other RNA
ccgaggtgcacaagggaaga

SEQ ID NO: 30367 - RNA, 20 nt, synthetic construct
  source 1..20: mol_type = other RNA
ccgagtaatgggatggctgg

SEQ ID NO: 30368 - RNA, 20 nt, synthetic construct
  source 1..20: mol_type = other RNA
ccgagtagttgtaactacag

SEQ ID NO: 30369 - RNA, 20 nt, synthetic construct
  source 1..20: mol_type = other RNA
ccgagtatctaggagtacag

SEQ ID NO: 30370 - RNA, 20 nt, synthetic construct
  source 1..20: mol_type = other RNA
ccgataaagggtctggtatc

SEQ ID NO: 30371 - RNA, 20 nt, synthetic construct
  source 1..20: mol_type = other RNA
ccgatgataccttcttgaga

SEQ ID NO: 30372 - RNA, 20 nt, synthetic construct
  source 1..20: mol_type = other RNA
ccgatgccatgtgttttgtt

SEQ ID NO: 30373 - RNA, 20 nt, synthetic construct
  source 1..20: mol_type = other RNA
ccgatgcctgtgcttttctc

SEQ ID NO: 30374 - RNA, 20 nt, synthetic construct
  source 1..20: mol_type = other RNA
ccgatttcagttaacttatt

SEQ ID NO: 30375 - RNA, 20 nt, synthetic construct
  source 1..20: mol_type = other RNA
ccgatttctcggccgggcgc

SEQ ID NO: 30376 - RNA, 20 nt, synthetic construct
  source 1..20: mol_type = other RNA
ccgattttacttactagttg

SEQ ID NO: 30377 - RNA, 20 nt, synthetic construct
  source 1..20: mol_type = other RNA
ccgcaaataatcattcttct

SEQ ID NO: 30378 - RNA, 20 nt, synthetic construct
  source 1..20: mol_type = other RNA
ccgcaacatctgcctcccgg

SEQ ID NO: 30379 - RNA, 20 nt, synthetic construct
  source 1..20: mol_type = other RNA
ccgcaagagttccaactgta

SEQ ID NO: 30380 - RNA, 20 nt, synthetic construct
  source 1..20: mol_type = other RNA
ccgcacctggccgggattta

SEQ ID NO: 30381 - RNA, 20 nt, synthetic construct
  source 1..20: mol_type = other RNA
ccgcaccttgattttgataa

SEQ ID NO: 30382 - RNA, 20 nt, synthetic construct
  source 1..20: mol_type = other RNA
ccgcactcagcctgttggga

SEQ ID NO: 30383 - RNA, 20 nt, synthetic construct
  source 1..20: mol_type = other RNA
ccgcagagcaagcacgttag

SEQ ID NO: 30384 - RNA, 20 nt, synthetic construct
  source 1..20: mol_type = other RNA
ccgcagaggccaaatgaaag

SEQ ID NO: 30385 - RNA, 20 nt, synthetic construct
  source 1..20: mol_type = other RNA
ccgcagtgagccatggctgc

SEQ ID NO: 30386 - RNA, 20 nt, synthetic construct
  source 1..20: mol_type = other RNA
ccgcatactgtgcagtggat

SEQ ID NO: 30387 - RNA, 20 nt, synthetic construct
  source 1..20: mol_type = other RNA
ccgccacctcctccggggac

SEQ ID NO: 30388 - RNA, 20 nt, synthetic construct
  source 1..20: mol_type = other RNA
ccgcccctggagaaagccca

SEQ ID NO: 30389 - RNA, 20 nt, synthetic construct
  source 1..20: mol_type = other RNA
ccgcccgctgctccctctgc

SEQ ID NO: 30390 - RNA, 20 nt, synthetic construct
  source 1..20: mol_type = other RNA
ccgcccgtccctgcttggcg

SEQ ID NO: 30391 - RNA, 20 nt, synthetic construct
  source 1..20: mol_type = other RNA
ccgccctcccccgggacaat

SEQ ID NO: 30392 - RNA, 20 nt, synthetic construct
  source 1..20: mol_type = other RNA
ccgccgcagaggccaaatga

SEQ ID NO: 30393 - RNA, 20 nt, synthetic construct
  source 1..20: mol_type = other RNA
ccgccgctcgcaggtgggag

SEQ ID NO: 30394 - RNA, 20 nt, synthetic construct
  source 1..20: mol_type = other RNA
ccgcctccctggttcaagct

SEQ ID NO: 30395 - RNA, 20 nt, synthetic construct
  source 1..20: mol_type = other RNA
ccgcctcctggtgggttcat

SEQ ID NO: 30396 - RNA, 20 nt, synthetic construct
  source 1..20: mol_type = other RNA
ccgccttcctaccctgcctt

SEQ ID NO: 30397 - RNA, 20 nt, synthetic construct
  source 1..20: mol_type = other RNA
ccgcgaaggcgtgtaaactg

SEQ ID NO: 30398 - RNA, 20 nt, synthetic construct
  source 1..20: mol_type = other RNA
ccgcgcccggccaaatatcc

SEQ ID NO: 30399 - RNA, 20 nt, synthetic construct
  source 1..20: mol_type = other RNA
ccgcgcccggcccagattcc

SEQ ID NO: 30400 - RNA, 20 nt, synthetic construct
  source 1..20: mol_type = other RNA
ccgcgcccggccgagaaatc

SEQ ID NO: 30401 - RNA, 20 nt, synthetic construct
  source 1..20: mol_type = other RNA
ccgcgcctggtgattaaagt

SEQ ID NO: 30402 - RNA, 20 nt, synthetic construct
  source 1..20: mol_type = other RNA
ccgcgcgagggagcgtacgg

SEQ ID NO: 30403 - RNA, 20 nt, synthetic construct
  source 1..20: mol_type = other RNA
ccgcgcggaccccgtacgct

SEQ ID NO: 30404 - RNA, 20 nt, synthetic construct
  source 1..20: mol_type = other RNA
ccgcggactccggcgggaga

SEQ ID NO: 30405 - RNA, 20 nt, synthetic construct
  source 1..20: mol_type = other RNA
ccgcggctgggctttctcca

SEQ ID NO: 30406 - RNA, 20 nt, synthetic construct
  source 1..20: mol_type = other RNA
ccgcgtccacctggcaacaa

SEQ ID NO: 30407 - RNA, 20 nt, synthetic construct
  source 1..20: mol_type = other RNA
ccgcgtttattagaactaga

SEQ ID NO: 30408 - RNA, 20 nt, synthetic construct
  source 1..20: mol_type = other RNA
ccgcgttttttgtccaccag

SEQ ID NO: 30409 - RNA, 20 nt, synthetic construct
  source 1..20: mol_type = other RNA
ccgctaaacattttattagg

SEQ ID NO: 30410 - RNA, 20 nt, synthetic construct
  source 1..20: mol_type = other RNA
ccgctacacaagtattaacg

SEQ ID NO: 30411 - RNA, 20 nt, synthetic construct
  source 1..20: mol_type = other RNA
ccgctccacgcccattagga

SEQ ID NO: 30412 - RNA, 20 nt, synthetic construct
  source 1..20: mol_type = other RNA
ccgctcgcaggtgggaggcc

SEQ ID NO: 30413 - RNA, 20 nt, synthetic construct
  source 1..20: mol_type = other RNA
ccgctctgggtgcgttgacc

SEQ ID NO: 30414 - RNA, 20 nt, synthetic construct
  source 1..20: mol_type = other RNA
ccgctctggttttaaagaaa

SEQ ID NO: 30415 - RNA, 20 nt, synthetic construct
  source 1..20: mol_type = other RNA
ccgctcttgaccttgtgcat

SEQ ID NO: 30416 - RNA, 20 nt, synthetic construct
  source 1..20: mol_type = other RNA
ccgctgcgagaaaggcgaag

SEQ ID NO: 30417 - RNA, 20 nt, synthetic construct
  source 1..20: mol_type = other RNA
ccgctgctccctctgccgcc

SEQ ID NO: 30418 - RNA, 20 nt, synthetic construct
  source 1..20: mol_type = other RNA
ccgctggtgaaaaaatggtg

SEQ ID NO: 30419 - RNA, 20 nt, synthetic construct
  source 1..20: mol_type = other RNA
ccgctgtccatttccagtac

SEQ ID NO: 30420 - RNA, 20 nt, synthetic construct
  source 1..20: mol_type = other RNA
ccgcttcagttggtgaagag

SEQ ID NO: 30421 - RNA, 20 nt, synthetic construct
  source 1..20: mol_type = other RNA
ccgcttcgcctttctcgcag

SEQ ID NO: 30422 - RNA, 20 nt, synthetic construct
  source 1..20: mol_type = other RNA
ccgctttcgtgagggtttca

SEQ ID NO: 30423 - RNA, 20 nt, synthetic construct
  source 1..20: mol_type = other RNA
ccggaaaatgcttaacaaga

SEQ ID NO: 30424 - RNA, 20 nt, synthetic construct
  source 1..20: mol_type = other RNA
ccggaacttgagtttgttct

SEQ ID NO: 30425 - RNA, 20 nt, synthetic construct
  source 1..20: mol_type = other RNA
ccggaagctgggctagagcc

SEQ ID NO: 30426 - RNA, 20 nt, synthetic construct
  source 1..20: mol_type = other RNA
ccggagaggtgaactattag

SEQ ID NO: 30427 - RNA, 20 nt, synthetic construct
  source 1..20: mol_type = other RNA
ccggagcgggcagccttgga

SEQ ID NO: 30428 - RNA, 20 nt, synthetic construct
  source 1..20: mol_type = other RNA
ccggaggattgcttgagtgc

SEQ ID NO: 30429 - RNA, 20 nt, synthetic construct
  source 1..20: mol_type = other RNA
ccggagtagctgggattaca

SEQ ID NO: 30430 - RNA, 20 nt, synthetic construct
  source 1..20: mol_type = other RNA
ccggagtccgcggctgggct

SEQ ID NO: 30431 - RNA, 20 nt, synthetic construct
  source 1..20: mol_type = other RNA
ccggatgattctaatgtgca

SEQ ID NO: 30432 - RNA, 20 nt, synthetic construct
  source 1..20: mol_type = other RNA
ccggattcctttcaaagaga

SEQ ID NO: 30433 - RNA, 20 nt, synthetic construct
  source 1..20: mol_type = other RNA
ccggattggaaaactaggta

SEQ ID NO: 30434 - RNA, 20 nt, synthetic construct
  source 1..20: mol_type = other RNA
ccggcatatgtcactgtaag

SEQ ID NO: 30435 - RNA, 20 nt, synthetic construct
  source 1..20: mol_type = other RNA
ccggcatccgccaccacgcc

SEQ ID NO: 30436 - RNA, 20 nt, synthetic construct
  source 1..20: mol_type = other RNA
ccggcatgcctctcccacca

SEQ ID NO: 30437 - RNA, 20 nt, synthetic construct
  source 1..20: mol_type = other RNA
ccggccaaatatccatgttt

SEQ ID NO: 30438 - RNA, 20 nt, synthetic construct
  source 1..20: mol_type = other RNA
ccggccagacattttattta

SEQ ID NO: 30439 - RNA, 20 nt, synthetic construct
  source 1..20: mol_type = other RNA
ccggcccagattcctttttt

SEQ ID NO: 30440 - RNA, 20 nt, synthetic construct
  source 1..20: mol_type = other RNA
ccggcccatgacatgtgttt

SEQ ID NO: 30441 - RNA, 20 nt, synthetic construct
  source 1..20: mol_type = other RNA
ccggcccgttatttttatca

SEQ ID NO: 30442 - RNA, 20 nt, synthetic construct
  source 1..20: mol_type = other RNA
ccggccctgccgcttcgcct

SEQ ID NO: 30443 - RNA, 20 nt, synthetic construct
  source 1..20: mol_type = other RNA
ccggccgagaaatcggaact

SEQ ID NO: 30444 - RNA, 20 nt, synthetic construct
  source 1..20: mol_type = other RNA
ccggccgatgcctgtgcttt

SEQ ID NO: 30445 - RNA, 20 nt, synthetic construct
  source 1..20: mol_type = other RNA
ccggctaagatgaggtctca

SEQ ID NO: 30446 - RNA, 20 nt, synthetic construct
  source 1..20: mol_type = other RNA
ccggctaattaaacaaacat

SEQ ID NO: 30447 - RNA, 20 nt, synthetic construct
  source 1..20: mol_type = other RNA
ccggctctgcggcgggtctg

SEQ ID NO: 30448 - RNA, 20 nt, synthetic construct
  source 1..20: mol_type = other RNA
ccggctgttaggtattattt

SEQ ID NO: 30449 - RNA, 20 nt, synthetic construct
  source 1..20: mol_type = other RNA
ccggctttatgagacacacg

SEQ ID NO: 30450 - RNA, 20 nt, synthetic construct
  source 1..20: mol_type = other RNA
ccgggaacatgacatgtatt

SEQ ID NO: 30451 - RNA, 20 nt, synthetic construct
  source 1..20: mol_type = other RNA
ccgggacaagagtctgcaga

SEQ ID NO: 30452 - RNA, 20 nt, synthetic construct
  source 1..20: mol_type = other RNA
ccgggacaatgccagggcgc

SEQ ID NO: 30453 - RNA, 20 nt, synthetic construct
  source 1..20: mol_type = other RNA
ccgggacttggaagtgaagt

SEQ ID NO: 30454 - RNA, 20 nt, synthetic construct
  source 1..20: mol_type = other RNA
ccgggagacaaaggttgcag

SEQ ID NO: 30455 - RNA, 20 nt, synthetic construct
  source 1..20: mol_type = other RNA
ccgggaggagccaagtaaaa

SEQ ID NO: 30456 - RNA, 20 nt, synthetic construct
  source 1..20: mol_type = other RNA
ccgggaggcagatgttgcgg

SEQ ID NO: 30457 - RNA, 20 nt, synthetic construct
  source 1..20: mol_type = other RNA
ccgggatcctgtccaggcgc

SEQ ID NO: 30458 - RNA, 20 nt, synthetic construct
  source 1..20: mol_type = other RNA
ccgggatttacttctatatg

SEQ ID NO: 30459 - RNA, 20 nt, synthetic construct
  source 1..20: mol_type = other RNA
ccgggcctcccacctgcgag

SEQ ID NO: 30460 - RNA, 20 nt, synthetic construct
  source 1..20: mol_type = other RNA
ccgggcctggttagggagac

SEQ ID NO: 30461 - RNA, 20 nt, synthetic construct
  source 1..20: mol_type = other RNA
ccgggcttggtatgcatctt

SEQ ID NO: 30462 - RNA, 20 nt, synthetic construct
  source 1..20: mol_type = other RNA
ccggggactgcaacagatct

SEQ ID NO: 30463 - RNA, 20 nt, synthetic construct
  source 1..20: mol_type = other RNA
ccggggagcttttgaaactg

SEQ ID NO: 30464 - RNA, 20 nt, synthetic construct
  source 1..20: mol_type = other RNA
ccggggcagagaactgactg

SEQ ID NO: 30465 - RNA, 20 nt, synthetic construct
  source 1..20: mol_type = other RNA
ccggggctcgcagcatccct

SEQ ID NO: 30466 - RNA, 20 nt, synthetic construct
  source 1..20: mol_type = other RNA
ccgggtaaaaagcctgcttc

SEQ ID NO: 30467 - RNA, 20 nt, synthetic construct
  source 1..20: mol_type = other RNA
ccgggtccaggcagttctcc

SEQ ID NO: 30468 - RNA, 20 nt, synthetic construct
  source 1..20: mol_type = other RNA
ccgggtcgcggacgcgcatt

SEQ ID NO: 30469 - RNA, 20 nt, synthetic construct
  source 1..20: mol_type = other RNA
ccgggtgtagtggtgtgtga

SEQ ID NO: 30470 - RNA, 20 nt, synthetic construct
  source 1..20: mol_type = other RNA
ccgggtttaagcgattctcc

SEQ ID NO: 30471 - RNA, 20 nt, synthetic construct
  source 1..20: mol_type = other RNA
ccggtaatcacagctactca

SEQ ID NO: 30472 - RNA, 20 nt, synthetic construct
  source 1..20: mol_type = other RNA
ccggtcgttggatttatctt

SEQ ID NO: 30473 - RNA, 20 nt, synthetic construct
  source 1..20: mol_type = other RNA
ccggtctcagtttttaattt

SEQ ID NO: 30474 - RNA, 20 nt, synthetic construct
  source 1..20: mol_type = other RNA
ccggtctttcctgatcagca

SEQ ID NO: 30475 - RNA, 20 nt, synthetic construct
  source 1..20: mol_type = other RNA
ccggttctcaggagcctagt

SEQ ID NO: 30476 - RNA, 20 nt, synthetic construct
  source 1..20: mol_type = other RNA
ccggttgtatagcagtaaaa

SEQ ID NO: 30477 - RNA, 20 nt, synthetic construct
  source 1..20: mol_type = other RNA
ccgtaacttcttttcttaaa

SEQ ID NO: 30478 - RNA, 20 nt, synthetic construct
  source 1..20: mol_type = other RNA
ccgtacgctccctcgcgcgg

SEQ ID NO: 30479 - RNA, 20 nt, synthetic construct
  source 1..20: mol_type = other RNA
ccgtagaccgaggaaacccg

SEQ ID NO: 30480 - RNA, 20 nt, synthetic construct
  source 1..20: mol_type = other RNA
ccgtagctgtcgctctcctg

SEQ ID NO: 30481 - RNA, 20 nt, synthetic construct
  source 1..20: mol_type = other RNA
ccgtatatatttttatgcat

SEQ ID NO: 30482 - RNA, 20 nt, synthetic construct
  source 1..20: mol_type = other RNA
ccgtatccagtggttttttg

SEQ ID NO: 30483 - RNA, 20 nt, synthetic construct
  source 1..20: mol_type = other RNA
ccgtccaatttctttggctg

SEQ ID NO: 30484 - RNA, 20 nt, synthetic construct
  source 1..20: mol_type = other RNA
ccgtccctattttctacagg

SEQ ID NO: 30485 - RNA, 20 nt, synthetic construct
  source 1..20: mol_type = other RNA
ccgtccctgcttggcgcagt

SEQ ID NO: 30486 - RNA, 20 nt, synthetic construct
  source 1..20: mol_type = other RNA
ccgtcggtatgttaataacc

SEQ ID NO: 30487 - RNA, 20 nt, synthetic construct
  source 1..20: mol_type = other RNA
ccgtctagccacttcctatt

SEQ ID NO: 30488 - RNA, 20 nt, synthetic construct
  source 1..20: mol_type = other RNA
ccgtctcaaaaaattataat

SEQ ID NO: 30489 - RNA, 20 nt, synthetic construct
  source 1..20: mol_type = other RNA
ccgtctcaagattgtgtgat

SEQ ID NO: 30490 - RNA, 20 nt, synthetic construct
  source 1..20: mol_type = other RNA
ccgtctccctcggccacagc

SEQ ID NO: 30491 - RNA, 20 nt, synthetic construct
  source 1..20: mol_type = other RNA
ccgtctctgcaaaaaatgtt

SEQ ID NO: 30492 - RNA, 20 nt, synthetic construct
  source 1..20: mol_type = other RNA
ccgtgacagaacaaataaca

SEQ ID NO: 30493 - RNA, 20 nt, synthetic construct
  source 1..20: mol_type = other RNA
ccgtgcaactagagaaagca

SEQ ID NO: 30494 - RNA, 20 nt, synthetic construct
  source 1..20: mol_type = other RNA
ccgtgcatgcctctgttaca

SEQ ID NO: 30495 - RNA, 20 nt, synthetic construct
  source 1..20: mol_type = other RNA
ccgtgcccggccagacattt

SEQ ID NO: 30496 - RNA, 20 nt, synthetic construct
  source 1..20: mol_type = other RNA
ccgtgccgggcttggtatgc

SEQ ID NO: 30497 - RNA, 20 nt, synthetic construct
  source 1..20: mol_type = other RNA
ccgtggaaatacttgaacat

SEQ ID NO: 30498 - RNA, 20 nt, synthetic construct
  source 1..20: mol_type = other RNA
ccgtggaaggccttctcctc

SEQ ID NO: 30499 - RNA, 20 nt, synthetic construct
  source 1..20: mol_type = other RNA
ccgtgtgacaaaaagtaggg

SEQ ID NO: 30500 - RNA, 20 nt, synthetic construct
  source 1..20: mol_type = other RNA
ccgtgtgtttagaataatac

SEQ ID NO: 30501 - RNA, 20 nt, synthetic construct
  source 1..20: mol_type = other RNA
ccgtgtgttttgttgttgtt

SEQ ID NO: 30502 - RNA, 20 nt, synthetic construct
  source 1..20: mol_type = other RNA
ccgttatttttatcataact

SEQ ID NO: 30503 - RNA, 20 nt, synthetic construct
  source 1..20: mol_type = other RNA
ccgttccatcagagaggctt

SEQ ID NO: 30504 - RNA, 20 nt, synthetic construct
  source 1..20: mol_type = other RNA
ccgttgaagtctttggccca

SEQ ID NO: 30505 - RNA, 20 nt, synthetic construct
  source 1..20: mol_type = other RNA
ccgttgctgcatagtactcc

SEQ ID NO: 30506 - RNA, 20 nt, synthetic construct
  source 1..20: mol_type = other RNA
ccgttttgcaagatgcataa

SEQ ID NO: 30507 - RNA, 20 nt, synthetic construct
  source 1..20: mol_type = other RNA
ccgtttttcaggttcaagcg

SEQ ID NO: 30508 - RNA, 20 nt, synthetic construct
  source 1..20: mol_type = other RNA
ccgttttttccttcatttaa

SEQ ID NO: 30509 - RNA, 20 nt, synthetic construct
  source 1..20: mol_type = other RNA
cctaaaaagggagtcagtag

SEQ ID NO: 30510 - RNA, 20 nt, synthetic construct
  source 1..20: mol_type = other RNA
cctaaaacactggaagtaat

SEQ ID NO: 30511 - RNA, 20 nt, synthetic construct
  source 1..20: mol_type = other RNA
cctaaaacatggtccacaga

SEQ ID NO: 30512 - RNA, 20 nt, synthetic construct
  source 1..20: mol_type = other RNA
cctaaaactccccatgcagg

SEQ ID NO: 30513 - RNA, 20 nt, synthetic construct
  source 1..20: mol_type = other RNA
cctaaaaggttgcttaattg

SEQ ID NO: 30514 - RNA, 20 nt, synthetic construct
  source 1..20: mol_type = other RNA
cctaaaataggcctaggtgt

SEQ ID NO: 30515 - RNA, 20 nt, synthetic construct
  source 1..20: mol_type = other RNA
cctaaaatcttattccccag

SEQ ID NO: 30516 - RNA, 20 nt, synthetic construct
  source 1..20: mol_type = other RNA
cctaaaattccttcctttga

SEQ ID NO: 30517 - RNA, 20 nt, synthetic construct
  source 1..20: mol_type = other RNA
cctaaacactgtagttcagt

SEQ ID NO: 30518 - RNA, 20 nt, synthetic construct
  source 1..20: mol_type = other RNA
cctaaacacttagcatgttg

SEQ ID NO: 30519 - RNA, 20 nt, synthetic construct
  source 1..20: mol_type = other RNA
cctaaaccattttcaatctt

SEQ ID NO: 30520 - RNA, 20 nt, synthetic construct
  source 1..20: mol_type = other RNA
cctaaacctgctacgaatga

SEQ ID NO: 30521 - RNA, 20 nt, synthetic construct
  source 1..20: mol_type = other RNA
cctaaacctgtgatttccag

SEQ ID NO: 30522 - RNA, 20 nt, synthetic construct
  source 1..20: mol_type = other RNA
cctaaagagaatcttaaaat

SEQ ID NO: 30523 - RNA, 20 nt, synthetic construct
  source 1..20: mol_type = other RNA
cctaaagagagtgacagctg

SEQ ID NO: 30524 - RNA, 20 nt, synthetic construct
  source 1..20: mol_type = other RNA
cctaaagatatgtgtaggaa

SEQ ID NO: 30525 - RNA, 20 nt, synthetic construct
  source 1..20: mol_type = other RNA
cctaaagtccacagatcttt

SEQ ID NO: 30526 - RNA, 20 nt, synthetic construct
  source 1..20: mol_type = other RNA
cctaaagttgaggttgaaga

SEQ ID NO: 30527 - RNA, 20 nt, synthetic construct
  source 1..20: mol_type = other RNA
cctaaagttttaagaaaaga

SEQ ID NO: 30528 - RNA, 20 nt, synthetic construct
  source 1..20: mol_type = other RNA
cctaaataaaacacatgtca

SEQ ID NO: 30529 - RNA, 20 nt, synthetic construct
  source 1..20: mol_type = other RNA
cctaaatacacatgttgagt

SEQ ID NO: 30530 - RNA, 20 nt, synthetic construct
  source 1..20: mol_type = other RNA
cctaaatcaggatgtctttg

SEQ ID NO: 30531 - RNA, 20 nt, synthetic construct
  source 1..20: mol_type = other RNA
cctaaatgtccatcgagaga

SEQ ID NO: 30532 - RNA, 20 nt, synthetic construct
  source 1..20: mol_type = other RNA
cctaacaatgattatttcga

SEQ ID NO: 30533 - RNA, 20 nt, synthetic construct
  source 1..20: mol_type = other RNA
cctaacaccagtaagattct

SEQ ID NO: 30534 - RNA, 20 nt, synthetic construct
  source 1..20: mol_type = other RNA
cctaacagccggcatatgtc

SEQ ID NO: 30535 - RNA, 20 nt, synthetic construct
  source 1..20: mol_type = other RNA
cctaacagtctcgtgaattt

SEQ ID NO: 30536 - RNA, 20 nt, synthetic construct
  source 1..20: mol_type = other RNA
cctaacatgtcttggtgtgc

SEQ ID NO: 30537 - RNA, 20 nt, synthetic construct
  source 1..20: mol_type = other RNA
cctaaccactgttatctggg

SEQ ID NO: 30538 - RNA, 20 nt, synthetic construct
  source 1..20: mol_type = other RNA
cctaaccaggcccggggcag

SEQ ID NO: 30539 - RNA, 20 nt, synthetic construct
  source 1..20: mol_type = other RNA
cctaaccccagagattgtcg

SEQ ID NO: 30540 - RNA, 20 nt, synthetic construct
  source 1..20: mol_type = other RNA
cctaactactaataaatgca

SEQ ID NO: 30541 - RNA, 20 nt, synthetic construct
  source 1..20: mol_type = other RNA
cctaactcaagagttacttc

SEQ ID NO: 30542 - RNA, 20 nt, synthetic construct
  source 1..20: mol_type = other RNA
cctaactggtctcctttcta

SEQ ID NO: 30543 - RNA, 20 nt, synthetic construct
  source 1..20: mol_type = other RNA
cctaagaaagggtgtgtgaa

SEQ ID NO: 30544 - RNA, 20 nt, synthetic construct
  source 1..20: mol_type = other RNA
cctaagaaaggtctagtgtg

SEQ ID NO: 30545 - RNA, 20 nt, synthetic construct
  source 1..20: mol_type = other RNA
cctaagatggaaagtggact

SEQ ID NO: 30546 - RNA, 20 nt, synthetic construct
  source 1..20: mol_type = other RNA
cctaagcaaatgtaatgaaa

SEQ ID NO: 30547 - RNA, 20 nt, synthetic construct
  source 1..20: mol_type = other RNA
cctaagcaagttacatgctt

SEQ ID NO: 30548 - RNA, 20 nt, synthetic construct
  source 1..20: mol_type = other RNA
cctaagcatcgtgaagtctt

SEQ ID NO: 30549 - RNA, 20 nt, synthetic construct
  source 1..20: mol_type = other RNA
cctaagcatgagatactacg

SEQ ID NO: 30550 - RNA, 20 nt, synthetic construct
  source 1..20: mol_type = other RNA
cctaagccatctaattcaca

SEQ ID NO: 30551 - RNA, 20 nt, synthetic construct
  source 1..20: mol_type = other RNA
cctaagcttaagagctaaga

SEQ ID NO: 30552 - RNA, 20 nt, synthetic construct
  source 1..20: mol_type = other RNA
cctaagcttgggtaggaagc

SEQ ID NO: 30553 - RNA, 20 nt, synthetic construct
  source 1..20: mol_type = other RNA
cctaagtaatgctggccagt

SEQ ID NO: 30554 - RNA, 20 nt, synthetic construct
  source 1..20: mol_type = other RNA
cctaagtctcaggatacaaa

SEQ ID NO: 30555 - RNA, 20 nt, synthetic construct
  source 1..20: mol_type = other RNA
cctaagtcttcttctaagct

SEQ ID NO: 30556 - RNA, 20 nt, synthetic construct
  source 1..20: mol_type = other RNA
cctaagttttgggggaagag

SEQ ID NO: 30557 - RNA, 20 nt, synthetic construct
  source 1..20: mol_type = other RNA
cctaataaaatgtttagcgg

SEQ ID NO: 30558 - RNA, 20 nt, synthetic construct
  source 1..20: mol_type = other RNA
cctaataacaaaataggatt

SEQ ID NO: 30559 - RNA, 20 nt, synthetic construct
  source 1..20: mol_type = other RNA
cctaatacagtaaagcccca

SEQ ID NO: 30560 - RNA, 20 nt, synthetic construct
  source 1..20: mol_type = other RNA
cctaatctaacatgttacaa

SEQ ID NO: 30561 - RNA, 20 nt, synthetic construct
  source 1..20: mol_type = other RNA
cctaatctctaggcttaaaa

SEQ ID NO: 30562 - RNA, 20 nt, synthetic construct
  source 1..20: mol_type = other RNA
cctaatgaaatttaacattg

SEQ ID NO: 30563 - RNA, 20 nt, synthetic construct
  source 1..20: mol_type = other RNA
cctaatgggcgtggagcggt

SEQ ID NO: 30564 - RNA, 20 nt, synthetic construct
  source 1..20: mol_type = other RNA
cctaatgtgtaagaaatgcc

SEQ ID NO: 30565 - RNA, 20 nt, synthetic construct
  source 1..20: mol_type = other RNA
cctaattgtacacctcaaac

SEQ ID NO: 30566 - RNA, 20 nt, synthetic construct
  source 1..20: mol_type = other RNA
cctacacatatctttaggtg

SEQ ID NO: 30567 - RNA, 20 nt, synthetic construct
  source 1..20: mol_type = other RNA
cctacacccagttcaccagt

SEQ ID NO: 30568 - RNA, 20 nt, synthetic construct
  source 1..20: mol_type = other RNA
cctacacccatccacccact

SEQ ID NO: 30569 - RNA, 20 nt, synthetic construct
  source 1..20: mol_type = other RNA
cctacagactcaataaccac

SEQ ID NO: 30570 - RNA, 20 nt, synthetic construct
  source 1..20: mol_type = other RNA
cctacagtggttccatttgt

SEQ ID NO: 30571 - RNA, 20 nt, synthetic construct
  source 1..20: mol_type = other RNA
cctacatactgcactctcaa

SEQ ID NO: 30572 - RNA, 20 nt, synthetic construct
  source 1..20: mol_type = other RNA
cctacatagtccactttcca

SEQ ID NO: 30573 - RNA, 20 nt, synthetic construct
  source 1..20: mol_type = other RNA
cctacatatggcaattccat

SEQ ID NO: 30574 - RNA, 20 nt, synthetic construct
  source 1..20: mol_type = other RNA
cctacattaatctcatccac

SEQ ID NO: 30575 - RNA, 20 nt, synthetic construct
  source 1..20: mol_type = other RNA
cctacattgccttcaagttg

SEQ ID NO: 30576 - RNA, 20 nt, synthetic construct
  source 1..20: mol_type = other RNA
cctaccacccgtccaatttc

SEQ ID NO: 30577 - RNA, 20 nt, synthetic construct
  source 1..20: mol_type = other RNA
cctacccaagcttaggtcag

SEQ ID NO: 30578 - RNA, 20 nt, synthetic construct
  source 1..20: mol_type = other RNA
cctaccctgaggatataacg

SEQ ID NO: 30579 - RNA, 20 nt, synthetic construct
  source 1..20: mol_type = other RNA
cctaccctgccttccttggg

SEQ ID NO: 30580 - RNA, 20 nt, synthetic construct
  source 1..20: mol_type = other RNA
cctacctaaaaagggagtca

SEQ ID NO: 30581 - RNA, 20 nt, synthetic construct
  source 1..20: mol_type = other RNA
cctacctagggtgtaaaagg

SEQ ID NO: 30582 - RNA, 20 nt, synthetic construct
  source 1..20: mol_type = other RNA
cctacctcccttcacaaagc

SEQ ID NO: 30583 - RNA, 20 nt, synthetic construct
  source 1..20: mol_type = other RNA
cctacctggcagtctaggaa

SEQ ID NO: 30584 - RNA, 20 nt, synthetic construct
  source 1..20: mol_type = other RNA
cctaccttccaaagtatgca

SEQ ID NO: 30585 - RNA, 20 nt, synthetic construct
  source 1..20: mol_type = other RNA
cctactaaaagttgacaaat

SEQ ID NO: 30586 - RNA, 20 nt, synthetic construct
  source 1..20: mol_type = other RNA
cctactaacaagaaagggta

SEQ ID NO: 30587 - RNA, 20 nt, synthetic construct
  source 1..20: mol_type = other RNA
cctactagccagtgattgga

SEQ ID NO: 30588 - RNA, 20 nt, synthetic construct
  source 1..20: mol_type = other RNA
cctactagtatttattaaac

SEQ ID NO: 30589 - RNA, 20 nt, synthetic construct
  source 1..20: mol_type = other RNA
cctactcactgaaaccctca

SEQ ID NO: 30590 - RNA, 20 nt, synthetic construct
  source 1..20: mol_type = other RNA
cctactgctctgtcctgtca

SEQ ID NO: 30591 - RNA, 20 nt, synthetic construct
  source 1..20: mol_type = other RNA
cctactttaaatcagggcct

SEQ ID NO: 30592 - RNA, 20 nt, synthetic construct
  source 1..20: mol_type = other RNA
cctactttcttcaaccatac

SEQ ID NO: 30593 - RNA, 20 nt, synthetic construct
  source 1..20: mol_type = other RNA
cctactttttgtcacacgga

SEQ ID NO: 30594 - RNA, 20 nt, synthetic construct
  source 1..20: mol_type = other RNA
cctagaaaaacaccaaaaaa

SEQ ID NO: 30595 - RNA, 20 nt, synthetic construct
  source 1..20: mol_type = other RNA
cctagaaaatcatacatttt

SEQ ID NO: 30596 - RNA, 20 nt, synthetic construct
  source 1..20: mol_type = other RNA
cctagaaaggaattgtaatc

SEQ ID NO: 30597 - RNA, 20 nt, synthetic construct
  source 1..20: mol_type = other RNA
cctagaaatcatacacgagt

SEQ ID NO: 30598 - RNA, 20 nt, synthetic construct
  source 1..20: mol_type = other RNA
cctagaagaaatgggtaaat

SEQ ID NO: 30599 - RNA, 20 nt, synthetic construct
  source 1..20: mol_type = other RNA
cctagacctcaaattaatca

SEQ ID NO: 30600 - RNA, 20 nt, synthetic construct
  source 1..20: mol_type = other RNA
cctagactgccaggtaggga

SEQ ID NO: 30601 - RNA, 20 nt, synthetic construct
  source 1..20: mol_type = other RNA
cctagagattaggcagaacc

SEQ ID NO: 30602 - RNA, 20 nt, synthetic construct
  source 1..20: mol_type = other RNA
cctagataagaaaatgtgac

SEQ ID NO: 30603 - RNA, 20 nt, synthetic construct
  source 1..20: mol_type = other RNA
cctagatgattcgcattgct

SEQ ID NO: 30604 - RNA, 20 nt, synthetic construct
  source 1..20: mol_type = other RNA
cctagattccctctggcctt

SEQ ID NO: 30605 - RNA, 20 nt, synthetic construct
  source 1..20: mol_type = other RNA
cctagattgaccttctactt

SEQ ID NO: 30606 - RNA, 20 nt, synthetic construct
  source 1..20: mol_type = other RNA
cctagatttcaatctggaat

SEQ ID NO: 30607 - RNA, 20 nt, synthetic construct
  source 1..20: mol_type = other RNA
cctagattttaaaaatctgt

SEQ ID NO: 30608 - RNA, 20 nt, synthetic construct
  source 1..20: mol_type = other RNA
cctagcatgcagtagctcat

SEQ ID NO: 30609 - RNA, 20 nt, synthetic construct
  source 1..20: mol_type = other RNA
cctagcccagcacttccatt

SEQ ID NO: 30610 - RNA, 20 nt, synthetic construct
  source 1..20: mol_type = other RNA
cctagccccaaatacctctg

SEQ ID NO: 30611 - RNA, 20 nt, synthetic construct
  source 1..20: mol_type = other RNA
cctagcctctctgggcttca

SEQ ID NO: 30612 - RNA, 20 nt, synthetic construct
  source 1..20: mol_type = other RNA
cctagctgacttttaaaata

SEQ ID NO: 30613 - RNA, 20 nt, synthetic construct
  source 1..20: mol_type = other RNA
cctagctgttttcatgcgac

SEQ ID NO: 30614 - RNA, 20 nt, synthetic construct
  source 1..20: mol_type = other RNA
cctaggcaagagagcaagac

SEQ ID NO: 30615 - RNA, 20 nt, synthetic construct
  source 1..20: mol_type = other RNA
cctaggcctattttaggctc

SEQ ID NO: 30616 - RNA, 20 nt, synthetic construct
  source 1..20: mol_type = other RNA
cctagggtgtaaaaggctaa

SEQ ID NO: 30617 - RNA, 20 nt, synthetic construct
  source 1..20: mol_type = other RNA
cctaggtagggttggggtat

SEQ ID NO: 30618 - RNA, 20 nt, synthetic construct
  source 1..20: mol_type = other RNA
cctaggtgtgataactgata

SEQ ID NO: 30619 - RNA, 20 nt, synthetic construct
  source 1..20: mol_type = other RNA
cctagtacgtaacctaaagt

SEQ ID NO: 30620 - RNA, 20 nt, synthetic construct
  source 1..20: mol_type = other RNA
cctagtcatccactgcacag

SEQ ID NO: 30621 - RNA, 20 nt, synthetic construct
  source 1..20: mol_type = other RNA
cctagtggatgctggggacc

SEQ ID NO: 30622 - RNA, 20 nt, synthetic construct
  source 1..20: mol_type = other RNA
cctagtgtctccataccccc

SEQ ID NO: 30623 - RNA, 20 nt, synthetic construct
  source 1..20: mol_type = other RNA
cctagttttccaatccggga

SEQ ID NO: 30624 - RNA, 20 nt, synthetic construct
  source 1..20: mol_type = other RNA
cctataaaatgctggaaatt

SEQ ID NO: 30625 - RNA, 20 nt, synthetic construct
  source 1..20: mol_type = other RNA
cctataagacccagtggcta

SEQ ID NO: 30626 - RNA, 20 nt, synthetic construct
  source 1..20: mol_type = other RNA
cctataattcaattttcatg

SEQ ID NO: 30627 - RNA, 20 nt, synthetic construct
  source 1..20: mol_type = other RNA
cctatactgtaaccctgttt

SEQ ID NO: 30628 - RNA, 20 nt, synthetic construct
  source 1..20: mol_type = other RNA
cctatagaattcttcttctg

SEQ ID NO: 30629 - RNA, 20 nt, synthetic construct
  source 1..20: mol_type = other RNA
cctatagacagcatccccag

SEQ ID NO: 30630 - RNA, 20 nt, synthetic construct
  source 1..20: mol_type = other RNA
cctatagttaagtctgaaag

SEQ ID NO: 30631 - RNA, 20 nt, synthetic construct
  source 1..20: mol_type = other RNA
cctatattgtcaatggggaa

SEQ ID NO: 30632 - RNA, 20 nt, synthetic construct
  source 1..20: mol_type = other RNA
cctatatttttccacataaa

SEQ ID NO: 30633 - RNA, 20 nt, synthetic construct
  source 1..20: mol_type = other RNA
cctatcagaagcacaccaag

SEQ ID NO: 30634 - RNA, 20 nt, synthetic construct
  source 1..20: mol_type = other RNA
cctatcagagcatgtcccct

SEQ ID NO: 30635 - RNA, 20 nt, synthetic construct
  source 1..20: mol_type = other RNA
cctatctaagcctactgctc

SEQ ID NO: 30636 - RNA, 20 nt, synthetic construct
  source 1..20: mol_type = other RNA
cctatctattaacagaaggg

SEQ ID NO: 30637 - RNA, 20 nt, synthetic construct
  source 1..20: mol_type = other RNA
cctatgaaaatttagcttct

SEQ ID NO: 30638 - RNA, 20 nt, synthetic construct
  source 1..20: mol_type = other RNA
cctatgaaatcttgaagatg

SEQ ID NO: 30639 - RNA, 20 nt, synthetic construct
  source 1..20: mol_type = other RNA
cctatgaataggtgtgtgtt

SEQ ID NO: 30640 - RNA, 20 nt, synthetic construct
  source 1..20: mol_type = other RNA
cctatgcaataactcaaaat

SEQ ID NO: 30641 - RNA, 20 nt, synthetic construct
  source 1..20: mol_type = other RNA
cctatgccttcagtatgaat

SEQ ID NO: 30642 - RNA, 20 nt, synthetic construct
  source 1..20: mol_type = other RNA
cctatgtaagacaatgtctt

SEQ ID NO: 30643 - RNA, 20 nt, synthetic construct
  source 1..20: mol_type = other RNA
cctatgtggggaatgctcat

SEQ ID NO: 30644 - RNA, 20 nt, synthetic construct
  source 1..20: mol_type = other RNA
cctattagaagaatgattat

SEQ ID NO: 30645 - RNA, 20 nt, synthetic construct
  source 1..20: mol_type = other RNA
cctattatttagagtttgca

SEQ ID NO: 30646 - RNA, 20 nt, synthetic construct
  source 1..20: mol_type = other RNA
cctattcaacctataagacc

SEQ ID NO: 30647 - RNA, 20 nt, synthetic construct
  source 1..20: mol_type = other RNA
cctattcacactgctcctgc

SEQ ID NO: 30648 - RNA, 20 nt, synthetic construct
  source 1..20: mol_type = other RNA
cctattcataggtaatactc

SEQ ID NO: 30649 - RNA, 20 nt, synthetic construct
  source 1..20: mol_type = other RNA
cctattctggggctcaagta

SEQ ID NO: 30650 - RNA, 20 nt, synthetic construct
  source 1..20: mol_type = other RNA
cctattgtttaaaaacaaca

SEQ ID NO: 30651 - RNA, 20 nt, synthetic construct
  source 1..20: mol_type = other RNA
cctatttagagggatgaatg

SEQ ID NO: 30652 - RNA, 20 nt, synthetic construct
  source 1..20: mol_type = other RNA
cctatttatgttgcacaaaa

SEQ ID NO: 30653 - RNA, 20 nt, synthetic construct
  source 1..20: mol_type = other RNA
cctattttaggctctgtggt

SEQ ID NO: 30654 - RNA, 20 nt, synthetic construct
  source 1..20: mol_type = other RNA
cctattttataatgggcaat

SEQ ID NO: 30655 - RNA, 20 nt, synthetic construct
  source 1..20: mol_type = other RNA
cctattttctacaggtatat

SEQ ID NO: 30656 - RNA, 20 nt, synthetic construct
  source 1..20: mol_type = other RNA
cctattttgttattagggta

SEQ ID NO: 30657 - RNA, 20 nt, synthetic construct
  source 1..20: mol_type = other RNA
cctcaaaatcaacattgcct

SEQ ID NO: 30658 - RNA, 20 nt, synthetic construct
  source 1..20: mol_type = other RNA
cctcaaaatttagtaagggt

SEQ ID NO: 30659 - RNA, 20 nt, synthetic construct
  source 1..20: mol_type = other RNA
cctcaaacgaaccaattacc

SEQ ID NO: 30660 - RNA, 20 nt, synthetic construct
  source 1..20: mol_type = other RNA
cctcaaactagaaaaagaat

SEQ ID NO: 30661 - RNA, 20 nt, synthetic construct
  source 1..20: mol_type = other RNA
cctcaaaggagagaagaggg

SEQ ID NO: 30662 - RNA, 20 nt, synthetic construct
  source 1..20: mol_type = other RNA
cctcaaagtggaaacaactc

SEQ ID NO: 30663 - RNA, 20 nt, synthetic construct
  source 1..20: mol_type = other RNA
cctcaaatgccatagagctt

SEQ ID NO: 30664 - RNA, 20 nt, synthetic construct
  source 1..20: mol_type = other RNA
cctcaaatgtctcattgtgg

SEQ ID NO: 30665 - RNA, 20 nt, synthetic construct
  source 1..20: mol_type = other RNA
cctcaaattaatcagtctgt

SEQ ID NO: 30666 - RNA, 20 nt, synthetic construct
  source 1..20: mol_type = other RNA
cctcaaattagtcatagcag

SEQ ID NO: 30667 - RNA, 20 nt, synthetic construct
  source 1..20: mol_type = other RNA
cctcaaattctgagggaaat

SEQ ID NO: 30668 - RNA, 20 nt, synthetic construct
  source 1..20: mol_type = other RNA
cctcaaattgtgtgttctct

SEQ ID NO: 30669 - RNA, 20 nt, synthetic construct
  source 1..20: mol_type = other RNA
cctcaaatttcatttactga

SEQ ID NO: 30670 - RNA, 20 nt, synthetic construct
  source 1..20: mol_type = other RNA
cctcaacaagagaggacagt

SEQ ID NO: 30671 - RNA, 20 nt, synthetic construct
  source 1..20: mol_type = other RNA
cctcaacagcacttttgtac

SEQ ID NO: 30672 - RNA, 20 nt, synthetic construct
  source 1..20: mol_type = other RNA
cctcaactttaggttacgta

SEQ ID NO: 30673 - RNA, 20 nt, synthetic construct
  source 1..20: mol_type = other RNA
cctcaaggcagaacacactg

SEQ ID NO: 30674 - RNA, 20 nt, synthetic construct
  source 1..20: mol_type = other RNA
cctcaaggccaactgtcctc

SEQ ID NO: 30675 - RNA, 20 nt, synthetic construct
  source 1..20: mol_type = other RNA
cctcaagtcttttcctagac

SEQ ID NO: 30676 - RNA, 20 nt, synthetic construct
  source 1..20: mol_type = other RNA
cctcaagtgatgcaactcct

SEQ ID NO: 30677 - RNA, 20 nt, synthetic construct
  source 1..20: mol_type = other RNA
cctcaatcatgtcaagaatg

SEQ ID NO: 30678 - RNA, 20 nt, synthetic construct
  source 1..20: mol_type = other RNA
cctcaatccccatctgggat

SEQ ID NO: 30679 - RNA, 20 nt, synthetic construct
  source 1..20: mol_type = other RNA
cctcacaacaggcctgagcc

SEQ ID NO: 30680 - RNA, 20 nt, synthetic construct
  source 1..20: mol_type = other RNA
cctcacagtcacaaagcttt

SEQ ID NO: 30681 - RNA, 20 nt, synthetic construct
  source 1..20: mol_type = other RNA
cctcacagtccactcacctg

SEQ ID NO: 30682 - RNA, 20 nt, synthetic construct
  source 1..20: mol_type = other RNA
cctcacatcagttaccacca

SEQ ID NO: 30683 - RNA, 20 nt, synthetic construct
  source 1..20: mol_type = other RNA
cctcacatgtttggtcaatt

SEQ ID NO: 30684 - RNA, 20 nt, synthetic construct
  source 1..20: mol_type = other RNA
cctcacattcacagcgtgca

SEQ ID NO: 30685 - RNA, 20 nt, synthetic construct
  source 1..20: mol_type = other RNA
cctcacctcacattcacagc

SEQ ID NO: 30686 - RNA, 20 nt, synthetic construct
  source 1..20: mol_type = other RNA
cctcaccttctgctgggccc

SEQ ID NO: 30687 - RNA, 20 nt, synthetic construct
  source 1..20: mol_type = other RNA
cctcacgaaagcggtcaacg

SEQ ID NO: 30688 - RNA, 20 nt, synthetic construct
  source 1..20: mol_type = other RNA
cctcactaagtcagaattca

SEQ ID NO: 30689 - RNA, 20 nt, synthetic construct
  source 1..20: mol_type = other RNA
cctcactgtgatacctagta

SEQ ID NO: 30690 - RNA, 20 nt, synthetic construct
  source 1..20: mol_type = other RNA
cctcagaaacaaacaaaaaa

SEQ ID NO: 30691 - RNA, 20 nt, synthetic construct
  source 1..20: mol_type = other RNA
cctcagaaggccaaggcagg

SEQ ID NO: 30692 - RNA, 20 nt, synthetic construct
  source 1..20: mol_type = other RNA
cctcagaattaatataagat

SEQ ID NO: 30693 - RNA, 20 nt, synthetic construct
  source 1..20: mol_type = other RNA
cctcagaatttgaggtcttc

SEQ ID NO: 30694 - RNA, 20 nt, synthetic construct
  source 1..20: mol_type = other RNA
cctcagcaaaagcaattatt

SEQ ID NO: 30695 - RNA, 20 nt, synthetic construct
  source 1..20: mol_type = other RNA
cctcagcatgtcttcagagg

SEQ ID NO: 30696 - RNA, 20 nt, synthetic construct
  source 1..20: mol_type = other RNA
cctcagccccctccctacca

SEQ ID NO: 30697 - RNA, 20 nt, synthetic construct
  source 1..20: mol_type = other RNA
cctcagccgccgcagaggcc

SEQ ID NO: 30698 - RNA, 20 nt, synthetic construct
  source 1..20: mol_type = other RNA
cctcagcctcccgagtagtt

SEQ ID NO: 30699 - RNA, 20 nt, synthetic construct
  source 1..20: mol_type = other RNA
cctcagcctcccgagtatct

SEQ ID NO: 30700 - RNA, 20 nt, synthetic construct
  source 1..20: mol_type = other RNA
cctcaggaccaggcagtcct

SEQ ID NO: 30701 - RNA, 20 nt, synthetic construct
  source 1..20: mol_type = other RNA
cctcaggactctgctcaaag

SEQ ID NO: 30702 - RNA, 20 nt, synthetic construct
  source 1..20: mol_type = other RNA
cctcaggatctacattaaaa

SEQ ID NO: 30703 - RNA, 20 nt, synthetic construct
  source 1..20: mol_type = other RNA
cctcaggcagtctagtccat

SEQ ID NO: 30704 - RNA, 20 nt, synthetic construct
  source 1..20: mol_type = other RNA
cctcaggctccaggtagaat

SEQ ID NO: 30705 - RNA, 20 nt, synthetic construct
  source 1..20: mol_type = other RNA
cctcagggtaggaaaagact

SEQ ID NO: 30706 - RNA, 20 nt, synthetic construct
  source 1..20: mol_type = other RNA
cctcaggtgtcactggatag

SEQ ID NO: 30707 - RNA, 20 nt, synthetic construct
  source 1..20: mol_type = other RNA
cctcaggtttagaatatatt

SEQ ID NO: 30708 - RNA, 20 nt, synthetic construct
  source 1..20: mol_type = other RNA
cctcagtggtagttacacaa

SEQ ID NO: 30709 - RNA, 20 nt, synthetic construct
  source 1..20: mol_type = other RNA
cctcagttaaacccaacaaa

SEQ ID NO: 30710 - RNA, 20 nt, synthetic construct
  source 1..20: mol_type = other RNA
cctcagttgacatcctttaa

SEQ ID NO: 30711 - RNA, 20 nt, synthetic construct
  source 1..20: mol_type = other RNA
cctcataagaactcctggtc

SEQ ID NO: 30712 - RNA, 20 nt, synthetic construct
  source 1..20: mol_type = other RNA
cctcatatcagttatcacac

SEQ ID NO: 30713 - RNA, 20 nt, synthetic construct
  source 1..20: mol_type = other RNA
cctcatccctcatatcagtt

SEQ ID NO: 30714 - RNA, 20 nt, synthetic construct
  source 1..20: mol_type = other RNA
cctcatccggtctcagtttt

SEQ ID NO: 30715 - RNA, 20 nt, synthetic construct
  source 1..20: mol_type = other RNA
cctcatcctccgtagctgtc

SEQ ID NO: 30716 - RNA, 20 nt, synthetic construct
  source 1..20: mol_type = other RNA
cctcatctctgcaaaacatt

SEQ ID NO: 30717 - RNA, 20 nt, synthetic construct
  source 1..20: mol_type = other RNA
cctcatcttagccgggagga

SEQ ID NO: 30718 - RNA, 20 nt, synthetic construct
  source 1..20: mol_type = other RNA
cctcatgcatccacattttg

SEQ ID NO: 30719 - RNA, 20 nt, synthetic construct
  source 1..20: mol_type = other RNA
cctcatgtaactaattactg

SEQ ID NO: 30720 - RNA, 20 nt, synthetic construct
  source 1..20: mol_type = other RNA
cctcatgtattttcctaacc

SEQ ID NO: 30721 - RNA, 20 nt, synthetic construct
  source 1..20: mol_type = other RNA
cctcatgtccatagttaatg

SEQ ID NO: 30722 - RNA, 20 nt, synthetic construct
  source 1..20: mol_type = other RNA
cctcattcacactagtcacc

SEQ ID NO: 30723 - RNA, 20 nt, synthetic construct
  source 1..20: mol_type = other RNA
cctcattgaagctactattc

SEQ ID NO: 30724 - RNA, 20 nt, synthetic construct
  source 1..20: mol_type = other RNA
cctcatttgaactttccaga

SEQ ID NO: 30725 - RNA, 20 nt, synthetic construct
  source 1..20: mol_type = other RNA
cctcatttgcagagcaaact

SEQ ID NO: 30726 - RNA, 20 nt, synthetic construct
  source 1..20: mol_type = other RNA
cctcattttataagggtgat

SEQ ID NO: 30727 - RNA, 20 nt, synthetic construct
  source 1..20: mol_type = other RNA
cctccaacccattccaggtt

SEQ ID NO: 30728 - RNA, 20 nt, synthetic construct
  source 1..20: mol_type = other RNA
cctccaaggctgcccgctcc

SEQ ID NO: 30729 - RNA, 20 nt, synthetic construct
  source 1..20: mol_type = other RNA
cctccaatgtttttaattct

SEQ ID NO: 30730 - RNA, 20 nt, synthetic construct
  source 1..20: mol_type = other RNA
cctccacacctggccccttt

SEQ ID NO: 30731 - RNA, 20 nt, synthetic construct
  source 1..20: mol_type = other RNA
cctccacaggctttgacttc

SEQ ID NO: 30732 - RNA, 20 nt, synthetic construct
  source 1..20: mol_type = other RNA
cctccagaaaaccagaaaag

SEQ ID NO: 30733 - RNA, 20 nt, synthetic construct
  source 1..20: mol_type = other RNA
cctccagccttaatctcctg

SEQ ID NO: 30734 - RNA, 20 nt, synthetic construct
  source 1..20: mol_type = other RNA
cctccagcgctaagcactgc

SEQ ID NO: 30735 - RNA, 20 nt, synthetic construct
  source 1..20: mol_type = other RNA
cctccaggatccagtctcta

SEQ ID NO: 30736 - RNA, 20 nt, synthetic construct
  source 1..20: mol_type = other RNA
cctccagtccagcaccaccc

SEQ ID NO: 30737 - RNA, 20 nt, synthetic construct
  source 1..20: mol_type = other RNA
cctccagtgtcctgaatgat

SEQ ID NO: 30738 - RNA, 20 nt, synthetic construct
  source 1..20: mol_type = other RNA
cctccatatgggatgcttaa

SEQ ID NO: 30739 - RNA, 20 nt, synthetic construct
  source 1..20: mol_type = other RNA
cctccatcactgactggctg

SEQ ID NO: 30740 - RNA, 20 nt, synthetic construct
  source 1..20: mol_type = other RNA
cctccatggaaactacaatt

SEQ ID NO: 30741 - RNA, 20 nt, synthetic construct
  source 1..20: mol_type = other RNA
cctccatttccctgcttcat

SEQ ID NO: 30742 - RNA, 20 nt, synthetic construct
  source 1..20: mol_type = other RNA
cctcccaaaggactgggatc

SEQ ID NO: 30743 - RNA, 20 nt, synthetic construct
  source 1..20: mol_type = other RNA
cctcccaacaggctgagtgc

SEQ ID NO: 30744 - RNA, 20 nt, synthetic construct
  source 1..20: mol_type = other RNA
cctcccacctgcgagcggcg

SEQ ID NO: 30745 - RNA, 20 nt, synthetic construct
  source 1..20: mol_type = other RNA
cctcccacttacatcagcag

SEQ ID NO: 30746 - RNA, 20 nt, synthetic construct
  source 1..20: mol_type = other RNA
cctcccatgcattcgtccct

SEQ ID NO: 30747 - RNA, 20 nt, synthetic construct
  source 1..20: mol_type = other RNA
cctccccaacccccggccct

SEQ ID NO: 30748 - RNA, 20 nt, synthetic construct
  source 1..20: mol_type = other RNA
cctcccccgggacaatgcca

SEQ ID NO: 30749 - RNA, 20 nt, synthetic construct
  source 1..20: mol_type = other RNA
cctccccctccccctccctc

SEQ ID NO: 30750 - RNA, 20 nt, synthetic construct
  source 1..20: mol_type = other RNA
cctccccctccctcccccca

SEQ ID NO: 30751 - RNA, 20 nt, synthetic construct
  source 1..20: mol_type = other RNA
cctcccgagtagttgtaact

SEQ ID NO: 30752 - RNA, 20 nt, synthetic construct
  source 1..20: mol_type = other RNA
cctcccgagtatctaggagt

SEQ ID NO: 30753 - RNA, 20 nt, synthetic construct
  source 1..20: mol_type = other RNA
cctcccgcggcctccccaac

SEQ ID NO: 30754 - RNA, 20 nt, synthetic construct
  source 1..20: mol_type = other RNA
cctcccggctaagatgaggt

SEQ ID NO: 30755 - RNA, 20 nt, synthetic construct
  source 1..20: mol_type = other RNA
cctcccgggtccaggcagtt

SEQ ID NO: 30756 - RNA, 20 nt, synthetic construct
  source 1..20: mol_type = other RNA
cctccctaccacccgtccaa

SEQ ID NO: 30757 - RNA, 20 nt, synthetic construct
  source 1..20: mol_type = other RNA
cctccctacctggcagtcta

SEQ ID NO: 30758 - RNA, 20 nt, synthetic construct
  source 1..20: mol_type = other RNA
cctccctcactaagtcagaa

SEQ ID NO: 30759 - RNA, 20 nt, synthetic construct
  source 1..20: mol_type = other RNA
cctccctccccccacggtct

SEQ ID NO: 30760 - RNA, 20 nt, synthetic construct
  source 1..20: mol_type = other RNA
cctccctgctttaaaacact

SEQ ID NO: 30761 - RNA, 20 nt, synthetic construct
  source 1..20: mol_type = other RNA
cctccctggagaggcaaagg

SEQ ID NO: 30762 - RNA, 20 nt, synthetic construct
  source 1..20: mol_type = other RNA
cctccctggttcaagctatg

SEQ ID NO: 30763 - RNA, 20 nt, synthetic construct
  source 1..20: mol_type = other RNA
cctcccttcacaaagccctc

SEQ ID NO: 30764 - RNA, 20 nt, synthetic construct
  source 1..20: mol_type = other RNA
cctcccttcagcctgtgtca

SEQ ID NO: 30765 - RNA, 20 nt, synthetic construct
  source 1..20: mol_type = other RNA
cctccgcctccctggttcaa

SEQ ID NO: 30766 - RNA, 20 nt, synthetic construct
  source 1..20: mol_type = other RNA
cctccggggacccagtgccc

SEQ ID NO: 30767 - RNA, 20 nt, synthetic construct
  source 1..20: mol_type = other RNA
cctccgtagctgtcgctctc

SEQ ID NO: 30768 - RNA, 20 nt, synthetic construct
  source 1..20: mol_type = other RNA
cctccgtttttcaggttcaa

SEQ ID NO: 30769 - RNA, 20 nt, synthetic construct
  source 1..20: mol_type = other RNA
cctcctaagttttgggggaa

SEQ ID NO: 30770 - RNA, 20 nt, synthetic construct
  source 1..20: mol_type = other RNA
cctcctaccttccaaagtat

SEQ ID NO: 30771 - RNA, 20 nt, synthetic construct
  source 1..20: mol_type = other RNA
cctcctagattgaccttcta

SEQ ID NO: 30772 - RNA, 20 nt, synthetic construct
  source 1..20: mol_type = other RNA
cctcctcccacttacatcag

SEQ ID NO: 30773 - RNA, 20 nt, synthetic construct
  source 1..20: mol_type = other RNA
cctcctccggggacccagtg

SEQ ID NO: 30774 - RNA, 20 nt, synthetic construct
  source 1..20: mol_type = other RNA
cctcctcctcctggccacat

SEQ ID NO: 30775 - RNA, 20 nt, synthetic construct
  source 1..20: mol_type = other RNA
cctcctcctctacaagtttt

SEQ ID NO: 30776 - RNA, 20 nt, synthetic construct
  source 1..20: mol_type = other RNA
cctcctcctggccacatgct

SEQ ID NO: 30777 - RNA, 20 nt, synthetic construct
  source 1..20: mol_type = other RNA
cctcctctacaagttttaac

SEQ ID NO: 30778 - RNA, 20 nt, synthetic construct
  source 1..20: mol_type = other RNA
cctcctctggacattatcct

SEQ ID NO: 30779 - RNA, 20 nt, synthetic construct
  source 1..20: mol_type = other RNA
cctcctctggccctccattt

SEQ ID NO: 30780 - RNA, 20 nt, synthetic construct
  source 1..20: mol_type = other RNA
cctcctgccttcctgacctc

SEQ ID NO: 30781 - RNA, 20 nt, synthetic construct
  source 1..20: mol_type = other RNA
cctcctgccttggccttctg

SEQ ID NO: 30782 - RNA, 20 nt, synthetic construct
  source 1..20: mol_type = other RNA
cctcctggccacatgcttcc

SEQ ID NO: 30783 - RNA, 20 nt, synthetic construct
  source 1..20: mol_type = other RNA
cctcctgggttcaggtgcct

SEQ ID NO: 30784 - RNA, 20 nt, synthetic construct
  source 1..20: mol_type = other RNA
cctcctggtgggttcatgcc

SEQ ID NO: 30785 - RNA, 20 nt, synthetic construct
  source 1..20: mol_type = other RNA
cctcctggttttgatcatcg

SEQ ID NO: 30786 - RNA, 20 nt, synthetic construct
  source 1..20: mol_type = other RNA
cctccttctgctcactttgg

SEQ ID NO: 30787 - RNA, 20 nt, synthetic construct
  source 1..20: mol_type = other RNA
cctcctttctagaatgcatc

SEQ ID NO: 30788 - RNA, 20 nt, synthetic construct
  source 1..20: mol_type = other RNA
cctccttttgtagagggaat

SEQ ID NO: 30789 - RNA, 20 nt, synthetic construct
  source 1..20: mol_type = other RNA
cctcctttttatcaccctta

SEQ ID NO: 30790 - RNA, 20 nt, synthetic construct
  source 1..20: mol_type = other RNA
cctcgaagagaccacaggct

SEQ ID NO: 30791 - RNA, 20 nt, synthetic construct
  source 1..20: mol_type = other RNA
cctcgaagcacaaccactga

SEQ ID NO: 30792 - RNA, 20 nt, synthetic construct
  source 1..20: mol_type = other RNA
cctcgaaggcctgcttcatt

SEQ ID NO: 30793 - RNA, 20 nt, synthetic construct
  source 1..20: mol_type = other RNA
cctcgagtaaaaagaatgaa

SEQ ID NO: 30794 - RNA, 20 nt, synthetic construct
  source 1..20: mol_type = other RNA
cctcgctcttggcttttggc

SEQ ID NO: 30795 - RNA, 20 nt, synthetic construct
  source 1..20: mol_type = other RNA
cctcggcacagctctcatga

SEQ ID NO: 30796 - RNA, 20 nt, synthetic construct
  source 1..20: mol_type = other RNA
cctcggccaaccattactct

SEQ ID NO: 30797 - RNA, 20 nt, synthetic construct
  source 1..20: mol_type = other RNA
cctcggccacagcagggctc

SEQ ID NO: 30798 - RNA, 20 nt, synthetic construct
  source 1..20: mol_type = other RNA
cctcggcctctactgactcc

SEQ ID NO: 30799 - RNA, 20 nt, synthetic construct
  source 1..20: mol_type = other RNA
cctcggctccgggcctccca

SEQ ID NO: 30800 - RNA, 20 nt, synthetic construct
  source 1..20: mol_type = other RNA
cctcgggttcaagccccagt

SEQ ID NO: 30801 - RNA, 20 nt, synthetic construct
  source 1..20: mol_type = other RNA
cctcggtctacggacgcagg

SEQ ID NO: 30802 - RNA, 20 nt, synthetic construct
  source 1..20: mol_type = other RNA
cctcgtaaaagctaatctac

SEQ ID NO: 30803 - RNA, 20 nt, synthetic construct
  source 1..20: mol_type = other RNA
cctcgttttcaacaaaggtt

SEQ ID NO: 30804 - RNA, 20 nt, synthetic construct
  source 1..20: mol_type = other RNA
cctctaaataggtattcatg

SEQ ID NO: 30805 - RNA, 20 nt, synthetic construct
  source 1..20: mol_type = other RNA
cctctaagtcagcctgggca

SEQ ID NO: 30806 - RNA, 20 nt, synthetic construct
  source 1..20: mol_type = other RNA
cctctaatcaggttgggctt

SEQ ID NO: 30807 - RNA, 20 nt, synthetic construct
  source 1..20: mol_type = other RNA
cctctacaaaaggaggaact

SEQ ID NO: 30808 - RNA, 20 nt, synthetic construct
  source 1..20: mol_type = other RNA
cctctacaagttttaactta

SEQ ID NO: 30809 - RNA, 20 nt, synthetic construct
  source 1..20: mol_type = other RNA
cctctacacaaaaatccaga

SEQ ID NO: 30810 - RNA, 20 nt, synthetic construct
  source 1..20: mol_type = other RNA
cctctacatcacagacaggg

SEQ ID NO: 30811 - RNA, 20 nt, synthetic construct
  source 1..20: mol_type = other RNA
cctctactgactcccttttt

SEQ ID NO: 30812 - RNA, 20 nt, synthetic construct
  source 1..20: mol_type = other RNA
cctctactttcacataaggt

SEQ ID NO: 30813 - RNA, 20 nt, synthetic construct
  source 1..20: mol_type = other RNA
cctctagctccccattccct

SEQ ID NO: 30814 - RNA, 20 nt, synthetic construct
  source 1..20: mol_type = other RNA
cctctataattctgccttca

SEQ ID NO: 30815 - RNA, 20 nt, synthetic construct
  source 1..20: mol_type = other RNA
cctctatggcaggcaccttc

SEQ ID NO: 30816 - RNA, 20 nt, synthetic construct
  source 1..20: mol_type = other RNA
cctctattaaatcatgatgt

SEQ ID NO: 30817 - RNA, 20 nt, synthetic construct
  source 1..20: mol_type = other RNA
cctctatttttgtctggtgg

SEQ ID NO: 30818 - RNA, 20 nt, synthetic construct
  source 1..20: mol_type = other RNA
cctctcaacacttcagtggt

SEQ ID NO: 30819 - RNA, 20 nt, synthetic construct
  source 1..20: mol_type = other RNA
cctctcactccaaagcaaac

SEQ ID NO: 30820 - RNA, 20 nt, synthetic construct
  source 1..20: mol_type = other RNA
cctctcagtggtgcttttgc

SEQ ID NO: 30821 - RNA, 20 nt, synthetic construct
  source 1..20: mol_type = other RNA
cctctccagggaggaatcct

SEQ ID NO: 30822 - RNA, 20 nt, synthetic construct
  source 1..20: mol_type = other RNA
cctctcccaccatctctctg

SEQ ID NO: 30823 - RNA, 20 nt, synthetic construct
  source 1..20: mol_type = other RNA
cctctccccttgacgaagtc

SEQ ID NO: 30824 - RNA, 20 nt, synthetic construct
  source 1..20: mol_type = other RNA
cctctcccgccggagtccgc

SEQ ID NO: 30825 - RNA, 20 nt, synthetic construct
  source 1..20: mol_type = other RNA
cctctccgggtaaaaagcct

SEQ ID NO: 30826 - RNA, 20 nt, synthetic construct
  source 1..20: mol_type = other RNA
cctctctctttctggggatg

SEQ ID NO: 30827 - RNA, 20 nt, synthetic construct
  source 1..20: mol_type = other RNA
cctctctgatggaacggctt

SEQ ID NO: 30828 - RNA, 20 nt, synthetic construct
  source 1..20: mol_type = other RNA
cctctctgggcttcactttc

SEQ ID NO: 30829 - RNA, 20 nt, synthetic construct
  source 1..20: mol_type = other RNA
cctctcttaaatccgagaca

SEQ ID NO: 30830 - RNA, 20 nt, synthetic construct
  source 1..20: mol_type = other RNA
cctctcttggaatgtgcacc

SEQ ID NO: 30831 - RNA, 20 nt, synthetic construct
  source 1..20: mol_type = other RNA
cctctcttgttgaggatgac

SEQ ID NO: 30832 - RNA, 20 nt, synthetic construct
  source 1..20: mol_type = other RNA
cctctgaagacatgctgagg

SEQ ID NO: 30833 - RNA, 20 nt, synthetic construct
  source 1..20: mol_type = other RNA
cctctgaagagtctatcttt

SEQ ID NO: 30834 - RNA, 20 nt, synthetic construct
  source 1..20: mol_type = other RNA
cctctgactttatggtatca

SEQ ID NO: 30835 - RNA, 20 nt, synthetic construct
  source 1..20: mol_type = other RNA
cctctgagagaagtcagact

SEQ ID NO: 30836 - RNA, 20 nt, synthetic construct
  source 1..20: mol_type = other RNA
cctctgcagttagcatgcct

SEQ ID NO: 30837 - RNA, 20 nt, synthetic construct
  source 1..20: mol_type = other RNA
cctctgcggcggctgaggca

SEQ ID NO: 30838 - RNA, 20 nt, synthetic construct
  source 1..20: mol_type = other RNA
cctctggaaaggacttgatc

SEQ ID NO: 30839 - RNA, 20 nt, synthetic construct
  source 1..20: mol_type = other RNA
cctctggaatgcccatcctc

SEQ ID NO: 30840 - RNA, 20 nt, synthetic construct
  source 1..20: mol_type = other RNA
cctctggacattatcctatc

SEQ ID NO: 30841 - RNA, 20 nt, synthetic construct
  source 1..20: mol_type = other RNA
cctctggactcagggtcact

SEQ ID NO: 30842 - RNA, 20 nt, synthetic construct
  source 1..20: mol_type = other RNA
cctctggccctccatttccc

SEQ ID NO: 30843 - RNA, 20 nt, synthetic construct
  source 1..20: mol_type = other RNA
cctctggccttctatatttt

SEQ ID NO: 30844 - RNA, 20 nt, synthetic construct
  source 1..20: mol_type = other RNA
cctctggctgacctggtact

SEQ ID NO: 30845 - RNA, 20 nt, synthetic construct
  source 1..20: mol_type = other RNA
cctctgggatgctcagtttc

SEQ ID NO: 30846 - RNA, 20 nt, synthetic construct
  source 1..20: mol_type = other RNA
cctctggtattttaagattc

SEQ ID NO: 30847 - RNA, 20 nt, synthetic construct
  source 1..20: mol_type = other RNA
cctctgtagataaacgttaa

SEQ ID NO: 30848 - RNA, 20 nt, synthetic construct
  source 1..20: mol_type = other RNA
cctctgtcaccaggctggaa

SEQ ID NO: 30849 - RNA, 20 nt, synthetic construct
  source 1..20: mol_type = other RNA
cctctgtgctagccttcttg

SEQ ID NO: 30850 - RNA, 20 nt, synthetic construct
  source 1..20: mol_type = other RNA
cctctgtggaccatgtttta

SEQ ID NO: 30851 - RNA, 20 nt, synthetic construct
  source 1..20: mol_type = other RNA
cctctgtgtgcatgcatgtc

SEQ ID NO: 30852 - RNA, 20 nt, synthetic construct
  source 1..20: mol_type = other RNA
cctctgttacagctcttctc

SEQ ID NO: 30853 - RNA, 20 nt, synthetic construct
  source 1..20: mol_type = other RNA
cctcttactaaaaagaaaaa

SEQ ID NO: 30854 - RNA, 20 nt, synthetic construct
  source 1..20: mol_type = other RNA
cctcttcaatattttggaag

SEQ ID NO: 30855 - RNA, 20 nt, synthetic construct
  source 1..20: mol_type = other RNA
cctcttcagaagaggataag

SEQ ID NO: 30856 - RNA, 20 nt, synthetic construct
  source 1..20: mol_type = other RNA
cctcttcccttgtgcacctc

SEQ ID NO: 30857 - RNA, 20 nt, synthetic construct
  source 1..20: mol_type = other RNA
cctcttcctcatccctcata

SEQ ID NO: 30858 - RNA, 20 nt, synthetic construct
  source 1..20: mol_type = other RNA
cctcttcctgttgctttaac

SEQ ID NO: 30859 - RNA, 20 nt, synthetic construct
  source 1..20: mol_type = other RNA
cctcttcgctcttttaaaaa

SEQ ID NO: 30860 - RNA, 20 nt, synthetic construct
  source 1..20: mol_type = other RNA
cctcttcgggtgtcagaatt

SEQ ID NO: 30861 - RNA, 20 nt, synthetic construct
  source 1..20: mol_type = other RNA
cctcttctctcctttgaggt

SEQ ID NO: 30862 - RNA, 20 nt, synthetic construct
  source 1..20: mol_type = other RNA
cctcttctgaagaggctttc

SEQ ID NO: 30863 - RNA, 20 nt, synthetic construct
  source 1..20: mol_type = other RNA
cctcttgaagtcagttacag

SEQ ID NO: 30864 - RNA, 20 nt, synthetic construct
  source 1..20: mol_type = other RNA
cctctttcatatctgatttt

SEQ ID NO: 30865 - RNA, 20 nt, synthetic construct
  source 1..20: mol_type = other RNA
cctctttctcaacttcctgt

SEQ ID NO: 30866 - RNA, 20 nt, synthetic construct
  source 1..20: mol_type = other RNA
cctctttgctaataagtgag

SEQ ID NO: 30867 - RNA, 20 nt, synthetic construct
  source 1..20: mol_type = other RNA
cctgaaaaacggaggttgca

SEQ ID NO: 30868 - RNA, 20 nt, synthetic construct
  source 1..20: mol_type = other RNA
cctgaaaaatgagaaaccta

SEQ ID NO: 30869 - RNA, 20 nt, synthetic construct
  source 1..20: mol_type = other RNA
cctgaaaagtgtattattct

SEQ ID NO: 30870 - RNA, 20 nt, synthetic construct
  source 1..20: mol_type = other RNA
cctgaaaattccttcccctt

SEQ ID NO: 30871 - RNA, 20 nt, synthetic construct
  source 1..20: mol_type = other RNA
cctgaaatctgatttgttta

SEQ ID NO: 30872 - RNA, 20 nt, synthetic construct
  source 1..20: mol_type = other RNA
cctgaaatgaaccaaacttg

SEQ ID NO: 30873 - RNA, 20 nt, synthetic construct
  source 1..20: mol_type = other RNA
cctgaaatggcttaaggaaa

SEQ ID NO: 30874 - RNA, 20 nt, synthetic construct
  source 1..20: mol_type = other RNA
cctgaaattctcaaatgaac

SEQ ID NO: 30875 - RNA, 20 nt, synthetic construct
  source 1..20: mol_type = other RNA
cctgaaattgtcagaaaaga

SEQ ID NO: 30876 - RNA, 20 nt, synthetic construct
  source 1..20: mol_type = other RNA
cctgaacaaaatttttgcaa

SEQ ID NO: 30877 - RNA, 20 nt, synthetic construct
  source 1..20: mol_type = other RNA
cctgaacaatgattttctta

SEQ ID NO: 30878 - RNA, 20 nt, synthetic construct
  source 1..20: mol_type = other RNA
cctgaacccaggaggcaaag

SEQ ID NO: 30879 - RNA, 20 nt, synthetic construct
  source 1..20: mol_type = other RNA
cctgaactcgtggcctcaag

SEQ ID NO: 30880 - RNA, 20 nt, synthetic construct
  source 1..20: mol_type = other RNA
cctgaagactggatttgatt

SEQ ID NO: 30881 - RNA, 20 nt, synthetic construct
  source 1..20: mol_type = other RNA
cctgaagtctttggtgatcc

SEQ ID NO: 30882 - RNA, 20 nt, synthetic construct
  source 1..20: mol_type = other RNA
cctgaatacccctccctacc

SEQ ID NO: 30883 - RNA, 20 nt, synthetic construct
  source 1..20: mol_type = other RNA
cctgaatactattcctattg

SEQ ID NO: 30884 - RNA, 20 nt, synthetic construct
  source 1..20: mol_type = other RNA
cctgaatgactgttgcctct

SEQ ID NO: 30885 - RNA, 20 nt, synthetic construct
  source 1..20: mol_type = other RNA
cctgaatgatttccctgcat

SEQ ID NO: 30886 - RNA, 20 nt, synthetic construct
  source 1..20: mol_type = other RNA
cctgaattctaacattatct

SEQ ID NO: 30887 - RNA, 20 nt, synthetic construct
  source 1..20: mol_type = other RNA
cctgaattctaatgaactcc

SEQ ID NO: 30888 - RNA, 20 nt, synthetic construct
  source 1..20: mol_type = other RNA
cctgacaaagtatgagaaat

SEQ ID NO: 30889 - RNA, 20 nt, synthetic construct
  source 1..20: mol_type = other RNA
cctgacaagtagtacaaaag

SEQ ID NO: 30890 - RNA, 20 nt, synthetic construct
  source 1..20: mol_type = other RNA
cctgacagcaaataaacaaa

SEQ ID NO: 30891 - RNA, 20 nt, synthetic construct
  source 1..20: mol_type = other RNA
cctgacctcaagcgatccag

SEQ ID NO: 30892 - RNA, 20 nt, synthetic construct
  source 1..20: mol_type = other RNA
cctgacctcagatatccacc

SEQ ID NO: 30893 - RNA, 20 nt, synthetic construct
  source 1..20: mol_type = other RNA
cctgacctctgcagttagca

SEQ ID NO: 30894 - RNA, 20 nt, synthetic construct
  source 1..20: mol_type = other RNA
cctgacttcaaactatactt

SEQ ID NO: 30895 - RNA, 20 nt, synthetic construct
  source 1..20: mol_type = other RNA
cctgagaaccggaacttgag

SEQ ID NO: 30896 - RNA, 20 nt, synthetic construct
  source 1..20: mol_type = other RNA
cctgagaacttcagtatata

SEQ ID NO: 30897 - RNA, 20 nt, synthetic construct
  source 1..20: mol_type = other RNA
cctgagaagtcaaagcctgt

SEQ ID NO: 30898 - RNA, 20 nt, synthetic construct
  source 1..20: mol_type = other RNA
cctgagacttaggcaaagga

SEQ ID NO: 30899 - RNA, 20 nt, synthetic construct
  source 1..20: mol_type = other RNA
cctgagcaaggaaggaaagg

SEQ ID NO: 30900 - RNA, 20 nt, synthetic construct
  source 1..20: mol_type = other RNA
cctgagcatccccgctgcga

SEQ ID NO: 30901 - RNA, 20 nt, synthetic construct
  source 1..20: mol_type = other RNA
cctgagccgtcggtatgtta

SEQ ID NO: 30902 - RNA, 20 nt, synthetic construct
  source 1..20: mol_type = other RNA
cctgagctctcagtggccct

SEQ ID NO: 30903 - RNA, 20 nt, synthetic construct
  source 1..20: mol_type = other RNA
cctgagctttccttagttcg

SEQ ID NO: 30904 - RNA, 20 nt, synthetic construct
  source 1..20: mol_type = other RNA
cctgaggaagctaatcaagc

SEQ ID NO: 30905 - RNA, 20 nt, synthetic construct
  source 1..20: mol_type = other RNA
cctgaggacactagcaatcc

SEQ ID NO: 30906 - RNA, 20 nt, synthetic construct
  source 1..20: mol_type = other RNA
cctgaggatataacgatagt

SEQ ID NO: 30907 - RNA, 20 nt, synthetic construct
  source 1..20: mol_type = other RNA
cctgagggctttgtgaaggg

SEQ ID NO: 30908 - RNA, 20 nt, synthetic construct
  source 1..20: mol_type = other RNA
cctgaggggtcttatgctgg

SEQ ID NO: 30909 - RNA, 20 nt, synthetic construct
  source 1..20: mol_type = other RNA
cctgagggtgagaccaccac

SEQ ID NO: 30910 - RNA, 20 nt, synthetic construct
  source 1..20: mol_type = other RNA
cctgaggtctcaaaatttaa

SEQ ID NO: 30911 - RNA, 20 nt, synthetic construct
  source 1..20: mol_type = other RNA
cctgaggtctttaaaagaaa

SEQ ID NO: 30912 - RNA, 20 nt, synthetic construct
  source 1..20: mol_type = other RNA
cctgagtagctgtgattacc

SEQ ID NO: 30913 - RNA, 20 nt, synthetic construct
  source 1..20: mol_type = other RNA
cctgagtccagaggtgagct

SEQ ID NO: 30914 - RNA, 20 nt, synthetic construct
  source 1..20: mol_type = other RNA
cctgataagctcccagccaa

SEQ ID NO: 30915 - RNA, 20 nt, synthetic construct
  source 1..20: mol_type = other RNA
cctgataaggggctatcttt

SEQ ID NO: 30916 - RNA, 20 nt, synthetic construct
  source 1..20: mol_type = other RNA
cctgataatcacagacgcaa

SEQ ID NO: 30917 - RNA, 20 nt, synthetic construct
  source 1..20: mol_type = other RNA
cctgatagatattggcaaca

SEQ ID NO: 30918 - RNA, 20 nt, synthetic construct
  source 1..20: mol_type = other RNA
cctgatagctgtggaagcac

SEQ ID NO: 30919 - RNA, 20 nt, synthetic construct
  source 1..20: mol_type = other RNA
cctgatatgtcgcatgaaaa

SEQ ID NO: 30920 - RNA, 20 nt, synthetic construct
  source 1..20: mol_type = other RNA
cctgatcaagttgcttggca

SEQ ID NO: 30921 - RNA, 20 nt, synthetic construct
  source 1..20: mol_type = other RNA
cctgatcacaccctcctacc

SEQ ID NO: 30922 - RNA, 20 nt, synthetic construct
  source 1..20: mol_type = other RNA
cctgatcagcaccctcaaat

SEQ ID NO: 30923 - RNA, 20 nt, synthetic construct
  source 1..20: mol_type = other RNA
cctgatgatgatggtgatgc

SEQ ID NO: 30924 - RNA, 20 nt, synthetic construct
  source 1..20: mol_type = other RNA
cctgatggacattctgcttc

SEQ ID NO: 30925 - RNA, 20 nt, synthetic construct
  source 1..20: mol_type = other RNA
cctgattagaggctgcaccc

SEQ ID NO: 30926 - RNA, 20 nt, synthetic construct
  source 1..20: mol_type = other RNA
cctgattcttccactagtgg

SEQ ID NO: 30927 - RNA, 20 nt, synthetic construct
  source 1..20: mol_type = other RNA
cctgattgagattagcgaaa

SEQ ID NO: 30928 - RNA, 20 nt, synthetic construct
  source 1..20: mol_type = other RNA
cctgatttaaagtaggttga

SEQ ID NO: 30929 - RNA, 20 nt, synthetic construct
  source 1..20: mol_type = other RNA
cctgatttaggccactctca

SEQ ID NO: 30930 - RNA, 20 nt, synthetic construct
  source 1..20: mol_type = other RNA
cctgcacaaaggattgggaa

SEQ ID NO: 30931 - RNA, 20 nt, synthetic construct
  source 1..20: mol_type = other RNA
cctgcacatgcacaaggtca

SEQ ID NO: 30932 - RNA, 20 nt, synthetic construct
  source 1..20: mol_type = other RNA
cctgcaccatttattgtcaa

SEQ ID NO: 30933 - RNA, 20 nt, synthetic construct
  source 1..20: mol_type = other RNA
cctgcactcaagcaatcctc

SEQ ID NO: 30934 - RNA, 20 nt, synthetic construct
  source 1..20: mol_type = other RNA
cctgcagaaggagaaaccat

SEQ ID NO: 30935 - RNA, 20 nt, synthetic construct
  source 1..20: mol_type = other RNA
cctgcagacatgcacgagaa

SEQ ID NO: 30936 - RNA, 20 nt, synthetic construct
  source 1..20: mol_type = other RNA
cctgcagactgcaggtcttc

SEQ ID NO: 30937 - RNA, 20 nt, synthetic construct
  source 1..20: mol_type = other RNA
cctgcagccagatttgatcc

SEQ ID NO: 30938 - RNA, 20 nt, synthetic construct
  source 1..20: mol_type = other RNA
cctgcaggtatttctaaatc

SEQ ID NO: 30939 - RNA, 20 nt, synthetic construct
  source 1..20: mol_type = other RNA
cctgcaggttgatactagtt

SEQ ID NO: 30940 - RNA, 20 nt, synthetic construct
  source 1..20: mol_type = other RNA
cctgcagtctgcaggcagaa

SEQ ID NO: 30941 - RNA, 20 nt, synthetic construct
  source 1..20: mol_type = other RNA
cctgcagtggcgtgtgccca

SEQ ID NO: 30942 - RNA, 20 nt, synthetic construct
  source 1..20: mol_type = other RNA
cctgcatacactcatttcct

SEQ ID NO: 30943 - RNA, 20 nt, synthetic construct
  source 1..20: mol_type = other RNA
cctgcatatgtttttattag

SEQ ID NO: 30944 - RNA, 20 nt, synthetic construct
  source 1..20: mol_type = other RNA
cctgcatggggagttttagg

SEQ ID NO: 30945 - RNA, 20 nt, synthetic construct
  source 1..20: mol_type = other RNA
cctgcatggtgtaaaataca

SEQ ID NO: 30946 - RNA, 20 nt, synthetic construct
  source 1..20: mol_type = other RNA
cctgcattgcatttacttgt

SEQ ID NO: 30947 - RNA, 20 nt, synthetic construct
  source 1..20: mol_type = other RNA
cctgccacactccagcatcc

SEQ ID NO: 30948 - RNA, 20 nt, synthetic construct
  source 1..20: mol_type = other RNA
cctgccagagttggcacagc

SEQ ID NO: 30949 - RNA, 20 nt, synthetic construct
  source 1..20: mol_type = other RNA
cctgccatagagggagcatc

SEQ ID NO: 30950 - RNA, 20 nt, synthetic construct
  source 1..20: mol_type = other RNA
cctgccatggtgttaaatat

SEQ ID NO: 30951 - RNA, 20 nt, synthetic construct
  source 1..20: mol_type = other RNA
cctgcccctccactccacaa

SEQ ID NO: 30952 - RNA, 20 nt, synthetic construct
  source 1..20: mol_type = other RNA
cctgccccttatcctcttct

SEQ ID NO: 30953 - RNA, 20 nt, synthetic construct
  source 1..20: mol_type = other RNA
cctgccctgtgaaaatcatt

SEQ ID NO: 30954 - RNA, 20 nt, synthetic construct
  source 1..20: mol_type = other RNA
cctgccgcagagcaagcacg

SEQ ID NO: 30955 - RNA, 20 nt, synthetic construct
  source 1..20: mol_type = other RNA
cctgccgcttcgcctttctc

SEQ ID NO: 30956 - RNA, 20 nt, synthetic construct
  source 1..20: mol_type = other RNA
cctgccttaaaacatttttt

SEQ ID NO: 30957 - RNA, 20 nt, synthetic construct
  source 1..20: mol_type = other RNA
cctgccttcctgacctctgc

SEQ ID NO: 30958 - RNA, 20 nt, synthetic construct
  source 1..20: mol_type = other RNA
cctgccttccttgggcacac

SEQ ID NO: 30959 - RNA, 20 nt, synthetic construct
  source 1..20: mol_type = other RNA
cctgccttggccttctgagg

SEQ ID NO: 30960 - RNA, 20 nt, synthetic construct
  source 1..20: mol_type = other RNA
cctgcctttgttcatcatct

SEQ ID NO: 30961 - RNA, 20 nt, synthetic construct
  source 1..20: mol_type = other RNA
cctgcgaaggcaatgtaaca

SEQ ID NO: 30962 - RNA, 20 nt, synthetic construct
  source 1..20: mol_type = other RNA
cctgcgagcggcgggcttcg

SEQ ID NO: 30963 - RNA, 20 nt, synthetic construct
  source 1..20: mol_type = other RNA
cctgcgattggttggactcc

SEQ ID NO: 30964 - RNA, 20 nt, synthetic construct
  source 1..20: mol_type = other RNA
cctgcgtccgtagaccgagg

SEQ ID NO: 30965 - RNA, 20 nt, synthetic construct
  source 1..20: mol_type = other RNA
cctgctaacaccttgaactg

SEQ ID NO: 30966 - RNA, 20 nt, synthetic construct
  source 1..20: mol_type = other RNA
cctgctacgaatgaactcct

SEQ ID NO: 30967 - RNA, 20 nt, synthetic construct
  source 1..20: mol_type = other RNA
cctgctactcaggagattaa

SEQ ID NO: 30968 - RNA, 20 nt, synthetic construct
  source 1..20: mol_type = other RNA
cctgctacttgtggggctga

SEQ ID NO: 30969 - RNA, 20 nt, synthetic construct
  source 1..20: mol_type = other RNA
cctgctatgcatactttgga

SEQ ID NO: 30970 - RNA, 20 nt, synthetic construct
  source 1..20: mol_type = other RNA
cctgctattttattagatag

SEQ ID NO: 30971 - RNA, 20 nt, synthetic construct
  source 1..20: mol_type = other RNA
cctgctccagtatgacctcc

SEQ ID NO: 30972 - RNA, 20 nt, synthetic construct
  source 1..20: mol_type = other RNA
cctgctctgcacgtactagt

SEQ ID NO: 30973 - RNA, 20 nt, synthetic construct
  source 1..20: mol_type = other RNA
cctgctctgcagagactgtg

SEQ ID NO: 30974 - RNA, 20 nt, synthetic construct
  source 1..20: mol_type = other RNA
cctgctctttatctccacat

SEQ ID NO: 30975 - RNA, 20 nt, synthetic construct
  source 1..20: mol_type = other RNA
cctgctgccagatgttctaa

SEQ ID NO: 30976 - RNA, 20 nt, synthetic construct
  source 1..20: mol_type = other RNA
cctgctggaacgaatattca

SEQ ID NO: 30977 - RNA, 20 nt, synthetic construct
  source 1..20: mol_type = other RNA
cctgctgggctattgttttg

SEQ ID NO: 30978 - RNA, 20 nt, synthetic construct
  source 1..20: mol_type = other RNA
cctgctgtcgtttatgcatt

SEQ ID NO: 30979 - RNA, 20 nt, synthetic construct
  source 1..20: mol_type = other RNA
cctgctgtggccgagggaga

SEQ ID NO: 30980 - RNA, 20 nt, synthetic construct
  source 1..20: mol_type = other RNA
cctgctgttcccaagcaagt

SEQ ID NO: 30981 - RNA, 20 nt, synthetic construct
  source 1..20: mol_type = other RNA
cctgcttcagcctaagcaag

SEQ ID NO: 30982 - RNA, 20 nt, synthetic construct
  source 1..20: mol_type = other RNA
cctgcttcatctggaccagt

SEQ ID NO: 30983 - RNA, 20 nt, synthetic construct
  source 1..20: mol_type = other RNA
cctgcttcattccgcgttta

SEQ ID NO: 30984 - RNA, 20 nt, synthetic construct
  source 1..20: mol_type = other RNA
cctgcttcccccaaagaagg

SEQ ID NO: 30985 - RNA, 20 nt, synthetic construct
  source 1..20: mol_type = other RNA
cctgcttggcgcagtgctta

SEQ ID NO: 30986 - RNA, 20 nt, synthetic construct
  source 1..20: mol_type = other RNA
cctgctttaaaacactggca

SEQ ID NO: 30987 - RNA, 20 nt, synthetic construct
  source 1..20: mol_type = other RNA
cctgctttcagttctttcgg

SEQ ID NO: 30988 - RNA, 20 nt, synthetic construct
  source 1..20: mol_type = other RNA
cctgctttcctcatgtccat

SEQ ID NO: 30989 - RNA, 20 nt, synthetic construct
  source 1..20: mol_type = other RNA
cctgctttctactagtataa

SEQ ID NO: 30990 - RNA, 20 nt, synthetic construct
  source 1..20: mol_type = other RNA
cctgctttcttggggctcta

SEQ ID NO: 30991 - RNA, 20 nt, synthetic construct
  source 1..20: mol_type = other RNA
cctgcttttggaagcatgtg

SEQ ID NO: 30992 - RNA, 20 nt, synthetic construct
  source 1..20: mol_type = other RNA
cctggaaaaagaccataata

SEQ ID NO: 30993 - RNA, 20 nt, synthetic construct
  source 1..20: mol_type = other RNA
cctggaaaacttctctggag

SEQ ID NO: 30994 - RNA, 20 nt, synthetic construct
  source 1..20: mol_type = other RNA
cctggaaataagtttcatgg

SEQ ID NO: 30995 - RNA, 20 nt, synthetic construct
  source 1..20: mol_type = other RNA
cctggaaattattcaatatg

SEQ ID NO: 30996 - RNA, 20 nt, synthetic construct
  source 1..20: mol_type = other RNA
cctggaacaatcaaaccatc

SEQ ID NO: 30997 - RNA, 20 nt, synthetic construct
  source 1..20: mol_type = other RNA
cctggaacaggccctttgtt

SEQ ID NO: 30998 - RNA, 20 nt, synthetic construct
  source 1..20: mol_type = other RNA
cctggaagttcaaggttata

SEQ ID NO: 30999 - RNA, 20 nt, synthetic construct
  source 1..20: mol_type = other RNA
cctggaatagtagcttcaat

SEQ ID NO: 31000 - RNA, 20 nt, synthetic construct
  source 1..20: mol_type = other RNA
cctggaatcctctaccaaaa

SEQ ID NO: 31001 - RNA, 20 nt, synthetic construct
  source 1..20: mol_type = other RNA
cctggaatgggttggaggag

SEQ ID NO: 31002 - RNA, 20 nt, synthetic construct
  source 1..20: mol_type = other RNA
cctggacaacagtgtgagac

SEQ ID NO: 31003 - RNA, 20 nt, synthetic construct
  source 1..20: mol_type = other RNA
cctggacacacacagtcctg

SEQ ID NO: 31004 - RNA, 20 nt, synthetic construct
  source 1..20: mol_type = other RNA
cctggacaggatcccggaac

SEQ ID NO: 31005 - RNA, 20 nt, synthetic construct
  source 1..20: mol_type = other RNA
cctggacccgggaggcagat

SEQ ID NO: 31006 - RNA, 20 nt, synthetic construct
  source 1..20: mol_type = other RNA
cctggactgtgatgactgta

SEQ ID NO: 31007 - RNA, 20 nt, synthetic construct
  source 1..20: mol_type = other RNA
cctggagaaagcccagccgc

SEQ ID NO: 31008 - RNA, 20 nt, synthetic construct
  source 1..20: mol_type = other RNA
cctggagaggcaaaggccgc

SEQ ID NO: 31009 - RNA, 20 nt, synthetic construct
  source 1..20: mol_type = other RNA
cctggagcctgaggacacta

SEQ ID NO: 31010 - RNA, 20 nt, synthetic construct
  source 1..20: mol_type = other RNA
cctggagggctcccagtgcc

SEQ ID NO: 31011 - RNA, 20 nt, synthetic construct
  source 1..20: mol_type = other RNA
cctggagttaattccacaac

SEQ ID NO: 31012 - RNA, 20 nt, synthetic construct
  source 1..20: mol_type = other RNA
cctggatcaagtgggattta

SEQ ID NO: 31013 - RNA, 20 nt, synthetic construct
  source 1..20: mol_type = other RNA
cctggatcccccagcccctg

SEQ ID NO: 31014 - RNA, 20 nt, synthetic construct
  source 1..20: mol_type = other RNA
cctggatgaatgcagtggct

SEQ ID NO: 31015 - RNA, 20 nt, synthetic construct
  source 1..20: mol_type = other RNA
cctggattgctagtgtcctc

SEQ ID NO: 31016 - RNA, 20 nt, synthetic construct
  source 1..20: mol_type = other RNA
cctggatttgggaaggatgg

SEQ ID NO: 31017 - RNA, 20 nt, synthetic construct
  source 1..20: mol_type = other RNA
cctggcaacaaaggcgaagc

SEQ ID NO: 31018 - RNA, 20 nt, synthetic construct
  source 1..20: mol_type = other RNA
cctggcaatactctcagaaa

SEQ ID NO: 31019 - RNA, 20 nt, synthetic construct
  source 1..20: mol_type = other RNA
cctggcagatcaattgacca

SEQ ID NO: 31020 - RNA, 20 nt, synthetic construct
  source 1..20: mol_type = other RNA
cctggcagtctaggaaaaga

SEQ ID NO: 31021 - RNA, 20 nt, synthetic construct
  source 1..20: mol_type = other RNA
cctggcattgtcccggggga

SEQ ID NO: 31022 - RNA, 20 nt, synthetic construct
  source 1..20: mol_type = other RNA
cctggccaacatcgtaaaac

SEQ ID NO: 31023 - RNA, 20 nt, synthetic construct
  source 1..20: mol_type = other RNA
cctggccacatgcttccaaa

SEQ ID NO: 31024 - RNA, 20 nt, synthetic construct
  source 1..20: mol_type = other RNA
cctggcccctttcaagattg

SEQ ID NO: 31025 - RNA, 20 nt, synthetic construct
  source 1..20: mol_type = other RNA
cctggccgggatttacttct

SEQ ID NO: 31026 - RNA, 20 nt, synthetic construct
  source 1..20: mol_type = other RNA
cctggctctagcccagcttc

SEQ ID NO: 31027 - RNA, 20 nt, synthetic construct
  source 1..20: mol_type = other RNA
cctggcttgtgacatcaagg

SEQ ID NO: 31028 - RNA, 20 nt, synthetic construct
  source 1..20: mol_type = other RNA
cctggctttagatggtaaaa

SEQ ID NO: 31029 - RNA, 20 nt, synthetic construct
  source 1..20: mol_type = other RNA
cctgggaaaaggatttgttt

SEQ ID NO: 31030 - RNA, 20 nt, synthetic construct
  source 1..20: mol_type = other RNA
cctgggaaagcctggcttta

SEQ ID NO: 31031 - RNA, 20 nt, synthetic construct
  source 1..20: mol_type = other RNA
cctgggacagagcgagactc

SEQ ID NO: 31032 - RNA, 20 nt, synthetic construct
  source 1..20: mol_type = other RNA
cctgggagaaagaccaagag

SEQ ID NO: 31033 - RNA, 20 nt, synthetic construct
  source 1..20: mol_type = other RNA
cctgggatgcaagaatggtt

SEQ ID NO: 31034 - RNA, 20 nt, synthetic construct
  source 1..20: mol_type = other RNA
cctgggcacacgccactgca

SEQ ID NO: 31035 - RNA, 20 nt, synthetic construct
  source 1..20: mol_type = other RNA
cctgggcgacaagagcagaa

SEQ ID NO: 31036 - RNA, 20 nt, synthetic construct
  source 1..20: mol_type = other RNA
cctgggcgacagagtgaaac

SEQ ID NO: 31037 - RNA, 20 nt, synthetic construct
  source 1..20: mol_type = other RNA
cctgggctcatctaagccta

SEQ ID NO: 31038 - RNA, 20 nt, synthetic construct
  source 1..20: mol_type = other RNA
cctggggaataagattttag

SEQ ID NO: 31039 - RNA, 20 nt, synthetic construct
  source 1..20: mol_type = other RNA
cctggggcctcagcatgtct

SEQ ID NO: 31040 - RNA, 20 nt, synthetic construct
  source 1..20: mol_type = other RNA
cctgggggagactgtgcaat

SEQ ID NO: 31041 - RNA, 20 nt, synthetic construct
  source 1..20: mol_type = other RNA
cctggggtttccttaccttt

SEQ ID NO: 31042 - RNA, 20 nt, synthetic construct
  source 1..20: mol_type = other RNA
cctgggtaattaaacatttt

SEQ ID NO: 31043 - RNA, 20 nt, synthetic construct
  source 1..20: mol_type = other RNA
cctgggtatacagcaaaaga

SEQ ID NO: 31044 - RNA, 20 nt, synthetic construct
  source 1..20: mol_type = other RNA
cctgggttcaggtgcctcct

SEQ ID NO: 31045 - RNA, 20 nt, synthetic construct
  source 1..20: mol_type = other RNA
cctgggttctcccttctatt

SEQ ID NO: 31046 - RNA, 20 nt, synthetic construct
  source 1..20: mol_type = other RNA
cctggtaataatgaaagctc

SEQ ID NO: 31047 - RNA, 20 nt, synthetic construct
  source 1..20: mol_type = other RNA
cctggtaatgaatagaaaat

SEQ ID NO: 31048 - RNA, 20 nt, synthetic construct
  source 1..20: mol_type = other RNA
cctggtactctatgatatat

SEQ ID NO: 31049 - RNA, 20 nt, synthetic construct
  source 1..20: mol_type = other RNA
cctggtatgagtgtttccct

SEQ ID NO: 31050 - RNA, 20 nt, synthetic construct
  source 1..20: mol_type = other RNA
cctggtcaacagggtaagat

SEQ ID NO: 31051 - RNA, 20 nt, synthetic construct
  source 1..20: mol_type = other RNA
cctggtcctgagggctttgt

SEQ ID NO: 31052 - RNA, 20 nt, synthetic construct
  source 1..20: mol_type = other RNA
cctggtccttaaatttctaa

SEQ ID NO: 31053 - RNA, 20 nt, synthetic construct
  source 1..20: mol_type = other RNA
cctggtcgagctgggtgatg

SEQ ID NO: 31054 - RNA, 20 nt, synthetic construct
  source 1..20: mol_type = other RNA
cctggtctcccagcatgaag

SEQ ID NO: 31055 - RNA, 20 nt, synthetic construct
  source 1..20: mol_type = other RNA
cctggtgatctatgaatttg

SEQ ID NO: 31056 - RNA, 20 nt, synthetic construct
  source 1..20: mol_type = other RNA
cctggtgattaaagttattt

SEQ ID NO: 31057 - RNA, 20 nt, synthetic construct
  source 1..20: mol_type = other RNA
cctggtgctttctatctctc

SEQ ID NO: 31058 - RNA, 20 nt, synthetic construct
  source 1..20: mol_type = other RNA
cctggtgggttcatgccatt

SEQ ID NO: 31059 - RNA, 20 nt, synthetic construct
  source 1..20: mol_type = other RNA
cctggttagggagactttca

SEQ ID NO: 31060 - RNA, 20 nt, synthetic construct
  source 1..20: mol_type = other RNA
cctggttcaagctatgctcc

SEQ ID NO: 31061 - RNA, 20 nt, synthetic construct
  source 1..20: mol_type = other RNA
cctggttttgatcatcgcat

SEQ ID NO: 31062 - RNA, 20 nt, synthetic construct
  source 1..20: mol_type = other RNA
cctgtaaacctggaatcctc

SEQ ID NO: 31063 - RNA, 20 nt, synthetic construct
  source 1..20: mol_type = other RNA
cctgtaattacatacttcaa

SEQ ID NO: 31064 - RNA, 20 nt, synthetic construct
  source 1..20: mol_type = other RNA
cctgtaatttttctcttttt

SEQ ID NO: 31065 - RNA, 20 nt, synthetic construct
  source 1..20: mol_type = other RNA
cctgtacccattagacacta

SEQ ID NO: 31066 - RNA, 20 nt, synthetic construct
  source 1..20: mol_type = other RNA
cctgtagaaaatagggacgg

SEQ ID NO: 31067 - RNA, 20 nt, synthetic construct
  source 1..20: mol_type = other RNA
cctgtagagatttttatcaa

SEQ ID NO: 31068 - RNA, 20 nt, synthetic construct
  source 1..20: mol_type = other RNA
cctgtagattgggcttttca

SEQ ID NO: 31069 - RNA, 20 nt, synthetic construct
  source 1..20: mol_type = other RNA
cctgtagcagacactgggtt

SEQ ID NO: 31070 - RNA, 20 nt, synthetic construct
  source 1..20: mol_type = other RNA
cctgtagttttggtgtcatt

SEQ ID NO: 31071 - RNA, 20 nt, synthetic construct
  source 1..20: mol_type = other RNA
cctgtataaataaaatgtct

SEQ ID NO: 31072 - RNA, 20 nt, synthetic construct
  source 1..20: mol_type = other RNA
cctgtatatctccttttaag

SEQ ID NO: 31073 - RNA, 20 nt, synthetic construct
  source 1..20: mol_type = other RNA
cctgtatgccgctggtgaaa

SEQ ID NO: 31074 - RNA, 20 nt, synthetic construct
  source 1..20: mol_type = other RNA
cctgtcagaaacaccaacac

SEQ ID NO: 31075 - RNA, 20 nt, synthetic construct
  source 1..20: mol_type = other RNA
cctgtcagtgtggttcatat

SEQ ID NO: 31076 - RNA, 20 nt, synthetic construct
  source 1..20: mol_type = other RNA
cctgtcagtttctgatttat

SEQ ID NO: 31077 - RNA, 20 nt, synthetic construct
  source 1..20: mol_type = other RNA
cctgtcatgtcaaatttttc

SEQ ID NO: 31078 - RNA, 20 nt, synthetic construct
  source 1..20: mol_type = other RNA
cctgtccaagtatttctcat

SEQ ID NO: 31079 - RNA, 20 nt, synthetic construct
  source 1..20: mol_type = other RNA
cctgtccaggcgcctgcatt

SEQ ID NO: 31080 - RNA, 20 nt, synthetic construct
  source 1..20: mol_type = other RNA
cctgtccttgtgttttattt

SEQ ID NO: 31081 - RNA, 20 nt, synthetic construct
  source 1..20: mol_type = other RNA
cctgtctcagagtatatatg

SEQ ID NO: 31082 - RNA, 20 nt, synthetic construct
  source 1..20: mol_type = other RNA
cctgtctctaaaaaatacca

SEQ ID NO: 31083 - RNA, 20 nt, synthetic construct
  source 1..20: mol_type = other RNA
cctgtctgggaagttatgta

SEQ ID NO: 31084 - RNA, 20 nt, synthetic construct
  source 1..20: mol_type = other RNA
cctgtctgtgatgtagaggc

SEQ ID NO: 31085 - RNA, 20 nt, synthetic construct
  source 1..20: mol_type = other RNA
cctgtcttggacccatgccc

SEQ ID NO: 31086 - RNA, 20 nt, synthetic construct
  source 1..20: mol_type = other RNA
cctgtctttcccattaccaa

SEQ ID NO: 31087 - RNA, 20 nt, synthetic construct
  source 1..20: mol_type = other RNA
cctgtctttctgtctgcttt

SEQ ID NO: 31088 - RNA, 20 nt, synthetic construct
  source 1..20: mol_type = other RNA
cctgtgaaaatcattttggc

SEQ ID NO: 31089 - RNA, 20 nt, synthetic construct
  source 1..20: mol_type = other RNA
cctgtgacagtatgtcagac

SEQ ID NO: 31090 - RNA, 20 nt, synthetic construct
  source 1..20: mol_type = other RNA
cctgtgatttatgtggcatt

SEQ ID NO: 31091 - RNA, 20 nt, synthetic construct
  source 1..20: mol_type = other RNA
cctgtgatttccagtgtttg

SEQ ID NO: 31092 - RNA, 20 nt, synthetic construct
  source 1..20: mol_type = other RNA
cctgtgccaagtccgtgcat

SEQ ID NO: 31093 - RNA, 20 nt, synthetic construct
  source 1..20: mol_type = other RNA
cctgtgcgtgaatctgttcc

SEQ ID NO: 31094 - RNA, 20 nt, synthetic construct
  source 1..20: mol_type = other RNA
cctgtgcttgtctctctctt

SEQ ID NO: 31095 - RNA, 20 nt, synthetic construct
  source 1..20: mol_type = other RNA
cctgtgcttttctcgtgcat

SEQ ID NO: 31096 - RNA, 20 nt, synthetic construct
  source 1..20: mol_type = other RNA
cctgtggaggcagtaccatt

SEQ ID NO: 31097 - RNA, 20 nt, synthetic construct
  source 1..20: mol_type = other RNA
cctgtggtccctgctactca

SEQ ID NO: 31098 - RNA, 20 nt, synthetic construct
  source 1..20: mol_type = other RNA
cctgtggtctcttcgagggg

SEQ ID NO: 31099 - RNA, 20 nt, synthetic construct
  source 1..20: mol_type = other RNA
cctgtgtatgtgtagtcagt

SEQ ID NO: 31100 - RNA, 20 nt, synthetic construct
  source 1..20: mol_type = other RNA
cctgtgtcagtgacagttct

SEQ ID NO: 31101 - RNA, 20 nt, synthetic construct
  source 1..20: mol_type = other RNA
cctgtgtgcatgctcccatt

SEQ ID NO: 31102 - RNA, 20 nt, synthetic construct
  source 1..20: mol_type = other RNA
cctgtgtttctgctattctc

SEQ ID NO: 31103 - RNA, 20 nt, synthetic construct
  source 1..20: mol_type = other RNA
cctgttacatggttctgtgc

SEQ ID NO: 31104 - RNA, 20 nt, synthetic construct
  source 1..20: mol_type = other RNA
cctgttagtcccctagtgga

SEQ ID NO: 31105 - RNA, 20 nt, synthetic construct
  source 1..20: mol_type = other RNA
cctgttcatttgagaatttc

SEQ ID NO: 31106 - RNA, 20 nt, synthetic construct
  source 1..20: mol_type = other RNA
cctgttccaggcctcgctct

SEQ ID NO: 31107 - RNA, 20 nt, synthetic construct
  source 1..20: mol_type = other RNA
cctgttccgattttacttac

SEQ ID NO: 31108 - RNA, 20 nt, synthetic construct
  source 1..20: mol_type = other RNA
cctgttccgggatcctgtcc

SEQ ID NO: 31109 - RNA, 20 nt, synthetic construct
  source 1..20: mol_type = other RNA
cctgttctttggagctgtat

SEQ ID NO: 31110 - RNA, 20 nt, synthetic construct
  source 1..20: mol_type = other RNA
cctgttctttgttagtttat

SEQ ID NO: 31111 - RNA, 20 nt, synthetic construct
  source 1..20: mol_type = other RNA
cctgttcttttgtaatctaa

SEQ ID NO: 31112 - RNA, 20 nt, synthetic construct
  source 1..20: mol_type = other RNA
cctgttgaatagcaactgtt

SEQ ID NO: 31113 - RNA, 20 nt, synthetic construct
  source 1..20: mol_type = other RNA
cctgttgattgttgccatca

SEQ ID NO: 31114 - RNA, 20 nt, synthetic construct
  source 1..20: mol_type = other RNA
cctgttgctttaacctctgg

SEQ ID NO: 31115 - RNA, 20 nt, synthetic construct
  source 1..20: mol_type = other RNA
cctgttggcctggacacaca

SEQ ID NO: 31116 - RNA, 20 nt, synthetic construct
  source 1..20: mol_type = other RNA
cctgttgggctattaagtat

SEQ ID NO: 31117 - RNA, 20 nt, synthetic construct
  source 1..20: mol_type = other RNA
cctgttgtgaggattcgatt

SEQ ID NO: 31118 - RNA, 20 nt, synthetic construct
  source 1..20: mol_type = other RNA
cctgtttaaaaagaaaaagc

SEQ ID NO: 31119 - RNA, 20 nt, synthetic construct
  source 1..20: mol_type = other RNA
cctgtttcccttaatgttga

SEQ ID NO: 31120 - RNA, 20 nt, synthetic construct
  source 1..20: mol_type = other RNA
cctgtttctctacatctgga

SEQ ID NO: 31121 - RNA, 20 nt, synthetic construct
  source 1..20: mol_type = other RNA
cctgtttgagaagtcttttc

SEQ ID NO: 31122 - RNA, 20 nt, synthetic construct
  source 1..20: mol_type = other RNA
cctgttttagtggctcacag

SEQ ID NO: 31123 - RNA, 20 nt, synthetic construct
  source 1..20: mol_type = other RNA
cctgttttgtagattaaaaa

SEQ ID NO: 31124 - RNA, 20 nt, synthetic construct
  source 1..20: mol_type = other RNA
ccttaaaaaaggtttttgaa

SEQ ID NO: 31125 - RNA, 20 nt, synthetic construct
  source 1..20: mol_type = other RNA
ccttaaaagagtgaaatgat

SEQ ID NO: 31126 - RNA, 20 nt, synthetic construct
  source 1..20: mol_type = other RNA
ccttaaaaggaactaatttc

SEQ ID NO: 31127 - RNA, 20 nt, synthetic construct
  source 1..20: mol_type = other RNA
ccttaaaagtgctgcagtat

SEQ ID NO: 31128 - RNA, 20 nt, synthetic construct
  source 1..20: mol_type = other RNA
ccttaaaccatatacaaaac

SEQ ID NO: 31129 - RNA, 20 nt, synthetic construct
  source 1..20: mol_type = other RNA
ccttaaagccacactcttgg

SEQ ID NO: 31130 - RNA, 20 nt, synthetic construct
  source 1..20: mol_type = other RNA
ccttaaattccaaaagtgaa

SEQ ID NO: 31131 - RNA, 20 nt, synthetic construct
  source 1..20: mol_type = other RNA
ccttaaatttctaaggttct

SEQ ID NO: 31132 - RNA, 20 nt, synthetic construct
  source 1..20: mol_type = other RNA
ccttaacctttttcttttca

SEQ ID NO: 31133 - RNA, 20 nt, synthetic construct
  source 1..20: mol_type = other RNA
ccttaacttcacctctacac

SEQ ID NO: 31134 - RNA, 20 nt, synthetic construct
  source 1..20: mol_type = other RNA
ccttaagcacagactgtgcc

SEQ ID NO: 31135 - RNA, 20 nt, synthetic construct
  source 1..20: mol_type = other RNA
ccttaagccatttcaggttt

SEQ ID NO: 31136 - RNA, 20 nt, synthetic construct
  source 1..20: mol_type = other RNA
ccttaatctcctgagtagca

SEQ ID NO: 31137 - RNA, 20 nt, synthetic construct
  source 1..20: mol_type = other RNA
ccttaatgccaccgaattgt

SEQ ID NO: 31138 - RNA, 20 nt, synthetic construct
  source 1..20: mol_type = other RNA
ccttaatgttgacatcttgc

SEQ ID NO: 31139 - RNA, 20 nt, synthetic construct
  source 1..20: mol_type = other RNA
ccttaatgtttagtagaatt

SEQ ID NO: 31140 - RNA, 20 nt, synthetic construct
  source 1..20: mol_type = other RNA
ccttacactcaaaagccata

SEQ ID NO: 31141 - RNA, 20 nt, synthetic construct
  source 1..20: mol_type = other RNA
ccttacattgtaatcctgtt

SEQ ID NO: 31142 - RNA, 20 nt, synthetic construct
  source 1..20: mol_type = other RNA
ccttaccactataatccaga

SEQ ID NO: 31143 - RNA, 20 nt, synthetic construct
  source 1..20: mol_type = other RNA
ccttaccactgaagtgttga

SEQ ID NO: 31144 - RNA, 20 nt, synthetic construct
  source 1..20: mol_type = other RNA
ccttaccagtgcttgcagcc

SEQ ID NO: 31145 - RNA, 20 nt, synthetic construct
  source 1..20: mol_type = other RNA
ccttaccttaaaccatatac

SEQ ID NO: 31146 - RNA, 20 nt, synthetic construct
  source 1..20: mol_type = other RNA
ccttacctttatctttggat

SEQ ID NO: 31147 - RNA, 20 nt, synthetic construct
  source 1..20: mol_type = other RNA
ccttacgcgtggatgtgtgc

SEQ ID NO: 31148 - RNA, 20 nt, synthetic construct
  source 1..20: mol_type = other RNA
ccttactaaattttgaggct

SEQ ID NO: 31149 - RNA, 20 nt, synthetic construct
  source 1..20: mol_type = other RNA
ccttactaccaccactaatg

SEQ ID NO: 31150 - RNA, 20 nt, synthetic construct
  source 1..20: mol_type = other RNA
ccttactgtaatattgtata

SEQ ID NO: 31151 - RNA, 20 nt, synthetic construct
  source 1..20: mol_type = other RNA
ccttacttccagctcacgtt

SEQ ID NO: 31152 - RNA, 20 nt, synthetic construct
  source 1..20: mol_type = other RNA
ccttagaaatttaaggacca

SEQ ID NO: 31153 - RNA, 20 nt, synthetic construct
  source 1..20: mol_type = other RNA
ccttagattacaaaagaaca

SEQ ID NO: 31154 - RNA, 20 nt, synthetic construct
  source 1..20: mol_type = other RNA
ccttagcccaagctaccatt

SEQ ID NO: 31155 - RNA, 20 nt, synthetic construct
  source 1..20: mol_type = other RNA
ccttagctctcatgtcagag

SEQ ID NO: 31156 - RNA, 20 nt, synthetic construct
  source 1..20: mol_type = other RNA
ccttagtggttgacccataa

SEQ ID NO: 31157 - RNA, 20 nt, synthetic construct
  source 1..20: mol_type = other RNA
ccttagttttcacttttgtg

SEQ ID NO: 31158 - RNA, 20 nt, synthetic construct
  source 1..20: mol_type = other RNA
ccttataaaatgagggtaaa

SEQ ID NO: 31159 - RNA, 20 nt, synthetic construct
  source 1..20: mol_type = other RNA
ccttatagatgacgaaagtg

SEQ ID NO: 31160 - RNA, 20 nt, synthetic construct
  source 1..20: mol_type = other RNA
ccttatagtattacctccca

SEQ ID NO: 31161 - RNA, 20 nt, synthetic construct
  source 1..20: mol_type = other RNA
ccttatatgggatatctaac

SEQ ID NO: 31162 - RNA, 20 nt, synthetic construct
  source 1..20: mol_type = other RNA
ccttatcaggaaagtgccag

SEQ ID NO: 31163 - RNA, 20 nt, synthetic construct
  source 1..20: mol_type = other RNA
ccttatccattcatctctcg

SEQ ID NO: 31164 - RNA, 20 nt, synthetic construct
  source 1..20: mol_type = other RNA
ccttatccgataaagggtct

SEQ ID NO: 31165 - RNA, 20 nt, synthetic construct
  source 1..20: mol_type = other RNA
ccttatcctcttctgaagag

SEQ ID NO: 31166 - RNA, 20 nt, synthetic construct
  source 1..20: mol_type = other RNA
ccttatggatatctggcctg

SEQ ID NO: 31167 - RNA, 20 nt, synthetic construct
  source 1..20: mol_type = other RNA
ccttatgtccagcccccagt

SEQ ID NO: 31168 - RNA, 20 nt, synthetic construct
  source 1..20: mol_type = other RNA
ccttatgtgaaagtagagga

SEQ ID NO: 31169 - RNA, 20 nt, synthetic construct
  source 1..20: mol_type = other RNA
ccttatgtgtgtataacccg

SEQ ID NO: 31170 - RNA, 20 nt, synthetic construct
  source 1..20: mol_type = other RNA
ccttattcaaataattgctg

SEQ ID NO: 31171 - RNA, 20 nt, synthetic construct
  source 1..20: mol_type = other RNA
ccttattgagaagcagaaaa

SEQ ID NO: 31172 - RNA, 20 nt, synthetic construct
  source 1..20: mol_type = other RNA
ccttatttaatgtgctgtcc

SEQ ID NO: 31173 - RNA, 20 nt, synthetic construct
  source 1..20: mol_type = other RNA
ccttatttggaaatatggtc

SEQ ID NO: 31174 - RNA, 20 nt, synthetic construct
  source 1..20: mol_type = other RNA
ccttcaagttgctttttctt

SEQ ID NO: 31175 - RNA, 20 nt, synthetic construct
  source 1..20: mol_type = other RNA
ccttcaatgtttggtagatt

SEQ ID NO: 31176 - RNA, 20 nt, synthetic construct
  source 1..20: mol_type = other RNA
ccttcacaaagccctcagga

SEQ ID NO: 31177 - RNA, 20 nt, synthetic construct
  source 1..20: mol_type = other RNA
ccttcaccaaagatttacta

SEQ ID NO: 31178 - RNA, 20 nt, synthetic construct
  source 1..20: mol_type = other RNA
ccttcagaactcttctccaa

SEQ ID NO: 31179 - RNA, 20 nt, synthetic construct
  source 1..20: mol_type = other RNA
ccttcagaagccctgcagcc

SEQ ID NO: 31180 - RNA, 20 nt, synthetic construct
  source 1..20: mol_type = other RNA
ccttcagaaggagtccagtc

SEQ ID NO: 31181 - RNA, 20 nt, synthetic construct
  source 1..20: mol_type = other RNA
ccttcagcctgtgtcagtga

SEQ ID NO: 31182 - RNA, 20 nt, synthetic construct
  source 1..20: mol_type = other RNA
ccttcagctatggtgttatt

SEQ ID NO: 31183 - RNA, 20 nt, synthetic construct
  source 1..20: mol_type = other RNA
ccttcagtatgaatgcacgt

SEQ ID NO: 31184 - RNA, 20 nt, synthetic construct
  source 1..20: mol_type = other RNA
ccttcagtcagttctctgcc

SEQ ID NO: 31185 - RNA, 20 nt, synthetic construct
  source 1..20: mol_type = other RNA
ccttcagtgtagtcagacac

SEQ ID NO: 31186 - RNA, 20 nt, synthetic construct
  source 1..20: mol_type = other RNA
ccttcatactattttctata

SEQ ID NO: 31187 - RNA, 20 nt, synthetic construct
  source 1..20: mol_type = other RNA
ccttcatcatttgtattatt

SEQ ID NO: 31188 - RNA, 20 nt, synthetic construct
  source 1..20: mol_type = other RNA
ccttcatgtcccctgtccaa

SEQ ID NO: 31189 - RNA, 20 nt, synthetic construct
  source 1..20: mol_type = other RNA
ccttcatttaacatattgaa

SEQ ID NO: 31190 - RNA, 20 nt, synthetic construct
  source 1..20: mol_type = other RNA
ccttccaaagtatgcatagc

SEQ ID NO: 31191 - RNA, 20 nt, synthetic construct
  source 1..20: mol_type = other RNA
ccttccacctgctctttatc

SEQ ID NO: 31192 - RNA, 20 nt, synthetic construct
  source 1..20: mol_type = other RNA
ccttccacggaatgcccctt

SEQ ID NO: 31193 - RNA, 20 nt, synthetic construct
  source 1..20: mol_type = other RNA
ccttccagagacaaagcata

SEQ ID NO: 31194 - RNA, 20 nt, synthetic construct
  source 1..20: mol_type = other RNA
ccttccagatgttttacaca

SEQ ID NO: 31195 - RNA, 20 nt, synthetic construct
  source 1..20: mol_type = other RNA
ccttccagcgtgtgcatgac

SEQ ID NO: 31196 - RNA, 20 nt, synthetic construct
  source 1..20: mol_type = other RNA
ccttccagtatgatgccact

SEQ ID NO: 31197 - RNA, 20 nt, synthetic construct
  source 1..20: mol_type = other RNA
ccttccagtttatatgccta

SEQ ID NO: 31198 - RNA, 20 nt, synthetic construct
  source 1..20: mol_type = other RNA
ccttcccaaagacatcctga

SEQ ID NO: 31199 - RNA, 20 nt, synthetic construct
  source 1..20: mol_type = other RNA
ccttcccaaatccaggatgg

SEQ ID NO: 31200 - RNA, 20 nt, synthetic construct
  source 1..20: mol_type = other RNA
ccttccccacctttcctgcc

SEQ ID NO: 31201 - RNA, 20 nt, synthetic construct
  source 1..20: mol_type = other RNA
ccttcccctgctgttcccaa

SEQ ID NO: 31202 - RNA, 20 nt, synthetic construct
  source 1..20: mol_type = other RNA
ccttcccctggtcgagctgg

SEQ ID NO: 31203 - RNA, 20 nt, synthetic construct
  source 1..20: mol_type = other RNA
ccttcccctttctttggttt

SEQ ID NO: 31204 - RNA, 20 nt, synthetic construct
  source 1..20: mol_type = other RNA
ccttccctactcactgaaac

SEQ ID NO: 31205 - RNA, 20 nt, synthetic construct
  source 1..20: mol_type = other RNA
ccttccctgaacaatgattt

SEQ ID NO: 31206 - RNA, 20 nt, synthetic construct
  source 1..20: mol_type = other RNA
ccttccgacctgtagattgg

SEQ ID NO: 31207 - RNA, 20 nt, synthetic construct
  source 1..20: mol_type = other RNA
ccttcctacacatatcttta

SEQ ID NO: 31208 - RNA, 20 nt, synthetic construct
  source 1..20: mol_type = other RNA
ccttcctaccctgccttcct

SEQ ID NO: 31209 - RNA, 20 nt, synthetic construct
  source 1..20: mol_type = other RNA
ccttcctcttcctcatccct

SEQ ID NO: 31210 - RNA, 20 nt, synthetic construct
  source 1..20: mol_type = other RNA
ccttcctgacctctgcagtt

SEQ ID NO: 31211 - RNA, 20 nt, synthetic construct
  source 1..20: mol_type = other RNA
ccttcctgttctttgttagt

SEQ ID NO: 31212 - RNA, 20 nt, synthetic construct
  source 1..20: mol_type = other RNA
ccttccttcatgtcccctgt

SEQ ID NO: 31213 - RNA, 20 nt, synthetic construct
  source 1..20: mol_type = other RNA
ccttccttgctcaggagtaa

SEQ ID NO: 31214 - RNA, 20 nt, synthetic construct
  source 1..20: mol_type = other RNA
ccttccttgcttgtcttgaa

SEQ ID NO: 31215 - RNA, 20 nt, synthetic construct
  source 1..20: mol_type = other RNA
ccttccttgggcacactccc

SEQ ID NO: 31216 - RNA, 20 nt, synthetic construct
  source 1..20: mol_type = other RNA
ccttccttgtgtcttaaatt

SEQ ID NO: 31217 - RNA, 20 nt, synthetic construct
  source 1..20: mol_type = other RNA
ccttcctttgatgacttaca

SEQ ID NO: 31218 - RNA, 20 nt, synthetic construct
  source 1..20: mol_type = other RNA
ccttcgaggcatctagttac

SEQ ID NO: 31219 - RNA, 20 nt, synthetic construct
  source 1..20: mol_type = other RNA
ccttcgcagggtgaaacttg

SEQ ID NO: 31220 - RNA, 20 nt, synthetic construct
  source 1..20: mol_type = other RNA
ccttcgcgcgcggcagggat

SEQ ID NO: 31221 - RNA, 20 nt, synthetic construct
  source 1..20: mol_type = other RNA
ccttcgcgggcaccttccct

SEQ ID NO: 31222 - RNA, 20 nt, synthetic construct
  source 1..20: mol_type = other RNA
ccttctaaaatcatcacagt

SEQ ID NO: 31223 - RNA, 20 nt, synthetic construct
  source 1..20: mol_type = other RNA
ccttctaatcagtaacttaa

SEQ ID NO: 31224 - RNA, 20 nt, synthetic construct
  source 1..20: mol_type = other RNA
ccttctacatccccccaccc

SEQ ID NO: 31225 - RNA, 20 nt, synthetic construct
  source 1..20: mol_type = other RNA
ccttctacttatcttttcta

SEQ ID NO: 31226 - RNA, 20 nt, synthetic construct
  source 1..20: mol_type = other RNA
ccttctactttaataaatga

SEQ ID NO: 31227 - RNA, 20 nt, synthetic construct
  source 1..20: mol_type = other RNA
ccttctattccattgttctc

SEQ ID NO: 31228 - RNA, 20 nt, synthetic construct
  source 1..20: mol_type = other RNA
ccttctcagaaggacaccag

SEQ ID NO: 31229 - RNA, 20 nt, synthetic construct
  source 1..20: mol_type = other RNA
ccttctcatagtcttccaaa

SEQ ID NO: 31230 - RNA, 20 nt, synthetic construct
  source 1..20: mol_type = other RNA
ccttctcctccaacccattc

SEQ ID NO: 31231 - RNA, 20 nt, synthetic construct
  source 1..20: mol_type = other RNA
ccttctcgaagtggtgcttg

SEQ ID NO: 31232 - RNA, 20 nt, synthetic construct
  source 1..20: mol_type = other RNA
ccttctcgtgtgagctctag

SEQ ID NO: 31233 - RNA, 20 nt, synthetic construct
  source 1..20: mol_type = other RNA
ccttctctactctgcctcag

SEQ ID NO: 31234 - RNA, 20 nt, synthetic construct
  source 1..20: mol_type = other RNA
ccttctctcttccaaataat

SEQ ID NO: 31235 - RNA, 20 nt, synthetic construct
  source 1..20: mol_type = other RNA
ccttctcttatactagtaga

SEQ ID NO: 31236 - RNA, 20 nt, synthetic construct
  source 1..20: mol_type = other RNA
ccttctgaaggcactaacaa

SEQ ID NO: 31237 - RNA, 20 nt, synthetic construct
  source 1..20: mol_type = other RNA
ccttctgagaaggcgaaatg

SEQ ID NO: 31238 - RNA, 20 nt, synthetic construct
  source 1..20: mol_type = other RNA
ccttctgaggagctgagacc

SEQ ID NO: 31239 - RNA, 20 nt, synthetic construct
  source 1..20: mol_type = other RNA
ccttctgcaggctgaactgc

SEQ ID NO: 31240 - RNA, 20 nt, synthetic construct
  source 1..20: mol_type = other RNA
ccttctgccttgacctccca

SEQ ID NO: 31241 - RNA, 20 nt, synthetic construct
  source 1..20: mol_type = other RNA
ccttctgctcactttgggat

SEQ ID NO: 31242 - RNA, 20 nt, synthetic construct
  source 1..20: mol_type = other RNA
ccttctgctcggctctgtca

SEQ ID NO: 31243 - RNA, 20 nt, synthetic construct
  source 1..20: mol_type = other RNA
ccttctgctgggcccactct

SEQ ID NO: 31244 - RNA, 20 nt, synthetic construct
  source 1..20: mol_type = other RNA
ccttctggaagatttctact

SEQ ID NO: 31245 - RNA, 20 nt, synthetic construct
  source 1..20: mol_type = other RNA
ccttctggggttcaaaccac

SEQ ID NO: 31246 - RNA, 20 nt, synthetic construct
  source 1..20: mol_type = other RNA
ccttctgttaatagataggt

SEQ ID NO: 31247 - RNA, 20 nt, synthetic construct
  source 1..20: mol_type = other RNA
ccttcttaaatgtgaattag

SEQ ID NO: 31248 - RNA, 20 nt, synthetic construct
  source 1..20: mol_type = other RNA
ccttcttaagacatttggga

SEQ ID NO: 31249 - RNA, 20 nt, synthetic construct
  source 1..20: mol_type = other RNA
ccttcttatttccttccagt

SEQ ID NO: 31250 - RNA, 20 nt, synthetic construct
  source 1..20: mol_type = other RNA
ccttcttcacacattaacta

SEQ ID NO: 31251 - RNA, 20 nt, synthetic construct
  source 1..20: mol_type = other RNA
ccttcttgagagtctcttaa

SEQ ID NO: 31252 - RNA, 20 nt, synthetic construct
  source 1..20: mol_type = other RNA
ccttcttggagtaaacctgc

SEQ ID NO: 31253 - RNA, 20 nt, synthetic construct
  source 1..20: mol_type = other RNA
ccttctttctttcaaatgtg

SEQ ID NO: 31254 - RNA, 20 nt, synthetic construct
  source 1..20: mol_type = other RNA
ccttctttgggggaagcagg

SEQ ID NO: 31255 - RNA, 20 nt, synthetic construct
  source 1..20: mol_type = other RNA
ccttgaaaatgcccttattt

SEQ ID NO: 31256 - RNA, 20 nt, synthetic construct
  source 1..20: mol_type = other RNA
ccttgaaaatttccagcatt

SEQ ID NO: 31257 - RNA, 20 nt, synthetic construct
  source 1..20: mol_type = other RNA
ccttgaaagatcatttagta

SEQ ID NO: 31258 - RNA, 20 nt, synthetic construct
  source 1..20: mol_type = other RNA
ccttgaaaggatactgagaa

SEQ ID NO: 31259 - RNA, 20 nt, synthetic construct
  source 1..20: mol_type = other RNA
ccttgaacatgaacgagaac

SEQ ID NO: 31260 - RNA, 20 nt, synthetic construct
  source 1..20: mol_type = other RNA
ccttgaactgggacttctag

SEQ ID NO: 31261 - RNA, 20 nt, synthetic construct
  source 1..20: mol_type = other RNA
ccttgaagtacttcagcgct

SEQ ID NO: 31262 - RNA, 20 nt, synthetic construct
  source 1..20: mol_type = other RNA
ccttgacaataaatggtgca

SEQ ID NO: 31263 - RNA, 20 nt, synthetic construct
  source 1..20: mol_type = other RNA
ccttgacctcccaaaggact

SEQ ID NO: 31264 - RNA, 20 nt, synthetic construct
  source 1..20: mol_type = other RNA
ccttgacgaagtcacattct

SEQ ID NO: 31265 - RNA, 20 nt, synthetic construct
  source 1..20: mol_type = other RNA
ccttgaggtgagacagaccc

SEQ ID NO: 31266 - RNA, 20 nt, synthetic construct
  source 1..20: mol_type = other RNA
ccttgaggtgattcagagtg

SEQ ID NO: 31267 - RNA, 20 nt, synthetic construct
  source 1..20: mol_type = other RNA
ccttgagtatttttgagctt

SEQ ID NO: 31268 - RNA, 20 nt, synthetic construct
  source 1..20: mol_type = other RNA
ccttgatcagcttcctaccc

SEQ ID NO: 31269 - RNA, 20 nt, synthetic construct
  source 1..20: mol_type = other RNA
ccttgatccattacatcaac

SEQ ID NO: 31270 - RNA, 20 nt, synthetic construct
  source 1..20: mol_type = other RNA
ccttgatgtcacaagccagg

SEQ ID NO: 31271 - RNA, 20 nt, synthetic construct
  source 1..20: mol_type = other RNA
ccttgatttatggcctaaga

SEQ ID NO: 31272 - RNA, 20 nt, synthetic construct
  source 1..20: mol_type = other RNA
ccttgattttgataaaaatc

SEQ ID NO: 31273 - RNA, 20 nt, synthetic construct
  source 1..20: mol_type = other RNA
ccttgcaagccacattagcc

SEQ ID NO: 31274 - RNA, 20 nt, synthetic construct
  source 1..20: mol_type = other RNA
ccttgcacattagaatcatc

SEQ ID NO: 31275 - RNA, 20 nt, synthetic construct
  source 1..20: mol_type = other RNA
ccttgcaccaactccacatt

SEQ ID NO: 31276 - RNA, 20 nt, synthetic construct
  source 1..20: mol_type = other RNA
ccttgccaacagttactttc

SEQ ID NO: 31277 - RNA, 20 nt, synthetic construct
  source 1..20: mol_type = other RNA
ccttgccaaggcttgctttg

SEQ ID NO: 31278 - RNA, 20 nt, synthetic construct
  source 1..20: mol_type = other RNA
ccttgccattctcccagttg

SEQ ID NO: 31279 - RNA, 20 nt, synthetic construct
  source 1..20: mol_type = other RNA
ccttgcctgacagcaaataa

SEQ ID NO: 31280 - RNA, 20 nt, synthetic construct
  source 1..20: mol_type = other RNA
ccttgctatgtaatctcatg

SEQ ID NO: 31281 - RNA, 20 nt, synthetic construct
  source 1..20: mol_type = other RNA
ccttgctcaggagtaactgc

SEQ ID NO: 31282 - RNA, 20 nt, synthetic construct
  source 1..20: mol_type = other RNA
ccttgctcattcatctgcag

SEQ ID NO: 31283 - RNA, 20 nt, synthetic construct
  source 1..20: mol_type = other RNA
ccttgctgaagaataactgt

SEQ ID NO: 31284 - RNA, 20 nt, synthetic construct
  source 1..20: mol_type = other RNA
ccttgctgcttctacccact

SEQ ID NO: 31285 - RNA, 20 nt, synthetic construct
  source 1..20: mol_type = other RNA
ccttgctgttgtaatgttac

SEQ ID NO: 31286 - RNA, 20 nt, synthetic construct
  source 1..20: mol_type = other RNA
ccttgcttgtcttgaatagc

SEQ ID NO: 31287 - RNA, 20 nt, synthetic construct
  source 1..20: mol_type = other RNA
ccttggagaagagttctgaa

SEQ ID NO: 31288 - RNA, 20 nt, synthetic construct
  source 1..20: mol_type = other RNA
ccttggagagaaaccttggt

SEQ ID NO: 31289 - RNA, 20 nt, synthetic construct
  source 1..20: mol_type = other RNA
ccttggaggagccctgctgt

SEQ ID NO: 31290 - RNA, 20 nt, synthetic construct
  source 1..20: mol_type = other RNA
ccttggattgctaaactgtt

SEQ ID NO: 31291 - RNA, 20 nt, synthetic construct
  source 1..20: mol_type = other RNA
ccttggcaaggggaatggta

SEQ ID NO: 31292 - RNA, 20 nt, synthetic construct
  source 1..20: mol_type = other RNA
ccttggccttctgaggagct

SEQ ID NO: 31293 - RNA, 20 nt, synthetic construct
  source 1..20: mol_type = other RNA
ccttggctagactaagaaaa

SEQ ID NO: 31294 - RNA, 20 nt, synthetic construct
  source 1..20: mol_type = other RNA
ccttgggagaaaatttttac

SEQ ID NO: 31295 - RNA, 20 nt, synthetic construct
  source 1..20: mol_type = other RNA
ccttgggaggctgaggctgg

SEQ ID NO: 31296 - RNA, 20 nt, synthetic construct
  source 1..20: mol_type = other RNA
ccttgggatgcagcaaaagc

SEQ ID NO: 31297 - RNA, 20 nt, synthetic construct
  source 1..20: mol_type = other RNA
ccttgggcacactccccagt

SEQ ID NO: 31298 - RNA, 20 nt, synthetic construct
  source 1..20: mol_type = other RNA
ccttggtaaaatcactaatt

SEQ ID NO: 31299 - RNA, 20 nt, synthetic construct
  source 1..20: mol_type = other RNA
ccttggtaaacagcagtctt

SEQ ID NO: 31300 - RNA, 20 nt, synthetic construct
  source 1..20: mol_type = other RNA
ccttggtaagagtgagaccc

SEQ ID NO: 31301 - RNA, 20 nt, synthetic construct
  source 1..20: mol_type = other RNA
ccttggtgtgcttctgatag

SEQ ID NO: 31302 - RNA, 20 nt, synthetic construct
  source 1..20: mol_type = other RNA
ccttgtaacttttatttctt

SEQ ID NO: 31303 - RNA, 20 nt, synthetic construct
  source 1..20: mol_type = other RNA
ccttgtaatcaagtatctcc

SEQ ID NO: 31304 - RNA, 20 nt, synthetic construct
  source 1..20: mol_type = other RNA
ccttgtactgtgtggcttct

SEQ ID NO: 31305 - RNA, 20 nt, synthetic construct
  source 1..20: mol_type = other RNA
ccttgtatccagtaatcttg

SEQ ID NO: 31306 - RNA, 20 nt, synthetic construct
  source 1..20: mol_type = other RNA
ccttgtatggagactagtac

SEQ ID NO: 31307 - RNA, 20 nt, synthetic construct
  source 1..20: mol_type = other RNA
ccttgtcctaaaattccttc

SEQ ID NO: 31308 - RNA, 20 nt, synthetic construct
  source 1..20: mol_type = other RNA
ccttgtgatctatgcatact

SEQ ID NO: 31309 - RNA, 20 nt, synthetic construct
  source 1..20: mol_type = other RNA
ccttgtgcacctcgggttca

SEQ ID NO: 31310 - RNA, 20 nt, synthetic construct
  source 1..20: mol_type = other RNA
ccttgtgcatgtgcaggaaa

SEQ ID NO: 31311 - RNA, 20 nt, synthetic construct
  source 1..20: mol_type = other RNA
ccttgtggtcttaagagact

SEQ ID NO: 31312 - RNA, 20 nt, synthetic construct
  source 1..20: mol_type = other RNA
ccttgtgtcttaaattcaaa

SEQ ID NO: 31313 - RNA, 20 nt, synthetic construct
  source 1..20: mol_type = other RNA
ccttgtgttttatttggctg

SEQ ID NO: 31314 - RNA, 20 nt, synthetic construct
  source 1..20: mol_type = other RNA
ccttgttggacagctgggag

SEQ ID NO: 31315 - RNA, 20 nt, synthetic construct
  source 1..20: mol_type = other RNA
cctttaaaatgatagcatta

SEQ ID NO: 31316 - RNA, 20 nt, synthetic construct
  source 1..20: mol_type = other RNA
cctttaacgtatctgggaaa

SEQ ID NO: 31317 - RNA, 20 nt, synthetic construct
  source 1..20: mol_type = other RNA
cctttaagttctccaagtta

SEQ ID NO: 31318 - RNA, 20 nt, synthetic construct
  source 1..20: mol_type = other RNA
cctttaatcacctcaagtga

SEQ ID NO: 31319 - RNA, 20 nt, synthetic construct
  source 1..20: mol_type = other RNA
cctttaatttagcgttcatc

SEQ ID NO: 31320 - RNA, 20 nt, synthetic construct
  source 1..20: mol_type = other RNA
cctttaatttgggtttgagt

SEQ ID NO: 31321 - RNA, 20 nt, synthetic construct
  source 1..20: mol_type = other RNA
cctttacccctgagaacttc

SEQ ID NO: 31322 - RNA, 20 nt, synthetic construct
  source 1..20: mol_type = other RNA
cctttactcagattcaccaa

SEQ ID NO: 31323 - RNA, 20 nt, synthetic construct
  source 1..20: mol_type = other RNA
cctttagtgttctgtgttta

SEQ ID NO: 31324 - RNA, 20 nt, synthetic construct
  source 1..20: mol_type = other RNA
cctttataccttttaatgat

SEQ ID NO: 31325 - RNA, 20 nt, synthetic construct
  source 1..20: mol_type = other RNA
cctttatcggataaggaaga

SEQ ID NO: 31326 - RNA, 20 nt, synthetic construct
  source 1..20: mol_type = other RNA
cctttatctttggatatccc

SEQ ID NO: 31327 - RNA, 20 nt, synthetic construct
  source 1..20: mol_type = other RNA
cctttattaactagaattga

SEQ ID NO: 31328 - RNA, 20 nt, synthetic construct
  source 1..20: mol_type = other RNA
cctttattcaaagatcattt

SEQ ID NO: 31329 - RNA, 20 nt, synthetic construct
  source 1..20: mol_type = other RNA
cctttattttttcttcccat

SEQ ID NO: 31330 - RNA, 20 nt, synthetic construct
  source 1..20: mol_type = other RNA
cctttcaaagagacctgatt

SEQ ID NO: 31331 - RNA, 20 nt, synthetic construct
  source 1..20: mol_type = other RNA
cctttcaagattgtttaatt

SEQ ID NO: 31332 - RNA, 20 nt, synthetic construct
  source 1..20: mol_type = other RNA
cctttcaaggtatctcccca

SEQ ID NO: 31333 - RNA, 20 nt, synthetic construct
  source 1..20: mol_type = other RNA
cctttcactttgatcataca

SEQ ID NO: 31334 - RNA, 20 nt, synthetic construct
  source 1..20: mol_type = other RNA
cctttcagcatagcagaacc

SEQ ID NO: 31335 - RNA, 20 nt, synthetic construct
  source 1..20: mol_type = other RNA
cctttcagtcggttcttcac

SEQ ID NO: 31336 - RNA, 20 nt, synthetic construct
  source 1..20: mol_type = other RNA
cctttcatttggcctctgcg

SEQ ID NO: 31337 - RNA, 20 nt, synthetic construct
  source 1..20: mol_type = other RNA
cctttccaaattcaaagcaa

SEQ ID NO: 31338 - RNA, 20 nt, synthetic construct
  source 1..20: mol_type = other RNA
cctttccagaggttctttta

SEQ ID NO: 31339 - RNA, 20 nt, synthetic construct
  source 1..20: mol_type = other RNA
cctttcccttctgctcggct

SEQ ID NO: 31340 - RNA, 20 nt, synthetic construct
  source 1..20: mol_type = other RNA
cctttcctgcccctccactc

SEQ ID NO: 31341 - RNA, 20 nt, synthetic construct
  source 1..20: mol_type = other RNA
cctttccttccttgctcagg

SEQ ID NO: 31342 - RNA, 20 nt, synthetic construct
  source 1..20: mol_type = other RNA
cctttccttgtcctaaaatt

SEQ ID NO: 31343 - RNA, 20 nt, synthetic construct
  source 1..20: mol_type = other RNA
cctttcgctaatctcaatca

SEQ ID NO: 31344 - RNA, 20 nt, synthetic construct
  source 1..20: mol_type = other RNA
cctttcgctatcagtagttt

SEQ ID NO: 31345 - RNA, 20 nt, synthetic construct
  source 1..20: mol_type = other RNA
cctttcgcttttggagctat

SEQ ID NO: 31346 - RNA, 20 nt, synthetic construct
  source 1..20: mol_type = other RNA
cctttctagaatgcatccct

SEQ ID NO: 31347 - RNA, 20 nt, synthetic construct
  source 1..20: mol_type = other RNA
cctttctaggcatctatttc

SEQ ID NO: 31348 - RNA, 20 nt, synthetic construct
  source 1..20: mol_type = other RNA
cctttctatacttcatcttt

SEQ ID NO: 31349 - RNA, 20 nt, synthetic construct
  source 1..20: mol_type = other RNA
cctttctcaaagcccaccag

SEQ ID NO: 31350 - RNA, 20 nt, synthetic construct
  source 1..20: mol_type = other RNA
cctttctcgcagcggggatg

SEQ ID NO: 31351 - RNA, 20 nt, synthetic construct
  source 1..20: mol_type = other RNA
cctttctgtttgtttgtttt

SEQ ID NO: 31352 - RNA, 20 nt, synthetic construct
  source 1..20: mol_type = other RNA
cctttcttaccctcacagtc

SEQ ID NO: 31353 - RNA, 20 nt, synthetic construct
  source 1..20: mol_type = other RNA
cctttcttaggaagctatgg

SEQ ID NO: 31354 - RNA, 20 nt, synthetic construct
  source 1..20: mol_type = other RNA
cctttcttaggtttctcatt

SEQ ID NO: 31355 - RNA, 20 nt, synthetic construct
  source 1..20: mol_type = other RNA
cctttcttggtctgcagact

SEQ ID NO: 31356 - RNA, 20 nt, synthetic construct
  source 1..20: mol_type = other RNA
cctttcttgttagtaggaaa

SEQ ID NO: 31357 - RNA, 20 nt, synthetic construct
  source 1..20: mol_type = other RNA
cctttctttggttttgactc

SEQ ID NO: 31358 - RNA, 20 nt, synthetic construct
  source 1..20: mol_type = other RNA
cctttgaagtatgtaattac

SEQ ID NO: 31359 - RNA, 20 nt, synthetic construct
  source 1..20: mol_type = other RNA
cctttgagcagagtcctgag

SEQ ID NO: 31360 - RNA, 20 nt, synthetic construct
  source 1..20: mol_type = other RNA
cctttgaggtaagaacttgt

SEQ ID NO: 31361 - RNA, 20 nt, synthetic construct
  source 1..20: mol_type = other RNA
cctttgatgacttacagata

SEQ ID NO: 31362 - RNA, 20 nt, synthetic construct
  source 1..20: mol_type = other RNA
cctttgatgcacaaaagttt

SEQ ID NO: 31363 - RNA, 20 nt, synthetic construct
  source 1..20: mol_type = other RNA
cctttgcacacaccaaatca

SEQ ID NO: 31364 - RNA, 20 nt, synthetic construct
  source 1..20: mol_type = other RNA
cctttgcctaagtctcagga

SEQ ID NO: 31365 - RNA, 20 nt, synthetic construct
  source 1..20: mol_type = other RNA
cctttgcctcctgggttcag

SEQ ID NO: 31366 - RNA, 20 nt, synthetic construct
  source 1..20: mol_type = other RNA
cctttgcctctccagggagg

SEQ ID NO: 31367 - RNA, 20 nt, synthetic construct
  source 1..20: mol_type = other RNA
cctttgcctttcactttgat

SEQ ID NO: 31368 - RNA, 20 nt, synthetic construct
  source 1..20: mol_type = other RNA
cctttgcgtctgtgattatc

SEQ ID NO: 31369 - RNA, 20 nt, synthetic construct
  source 1..20: mol_type = other RNA
cctttgcttcccacttcgaa

SEQ ID NO: 31370 - RNA, 20 nt, synthetic construct
  source 1..20: mol_type = other RNA
cctttggctactgtaaacaa

SEQ ID NO: 31371 - RNA, 20 nt, synthetic construct
  source 1..20: mol_type = other RNA
cctttgggaggtcaaggcag

SEQ ID NO: 31372 - RNA, 20 nt, synthetic construct
  source 1..20: mol_type = other RNA
cctttgtattcatccagttt

SEQ ID NO: 31373 - RNA, 20 nt, synthetic construct
  source 1..20: mol_type = other RNA
cctttgtccactgtcagtgg

SEQ ID NO: 31374 - RNA, 20 nt, synthetic construct
  source 1..20: mol_type = other RNA
cctttgtgcaggtctgggtt

SEQ ID NO: 31375 - RNA, 20 nt, synthetic construct
  source 1..20: mol_type = other RNA
cctttgtgtcaagtacaact

SEQ ID NO: 31376 - RNA, 20 nt, synthetic construct
  source 1..20: mol_type = other RNA
cctttgttagtgccttcaga

SEQ ID NO: 31377 - RNA, 20 nt, synthetic construct
  source 1..20: mol_type = other RNA
cctttgttatctgaacgtct

SEQ ID NO: 31378 - RNA, 20 nt, synthetic construct
  source 1..20: mol_type = other RNA
cctttgttcatcatcttttg

SEQ ID NO: 31379 - RNA, 20 nt, synthetic construct
  source 1..20: mol_type = other RNA
cctttgttgaaaacgaggaa

SEQ ID NO: 31380 - RNA, 20 nt, synthetic construct
  source 1..20: mol_type = other RNA
cctttgttgccaggtggacg

SEQ ID NO: 31381 - RNA, 20 nt, synthetic construct
  source 1..20: mol_type = other RNA
ccttttaagagtgaagaaac

SEQ ID NO: 31382 - RNA, 20 nt, synthetic construct
  source 1..20: mol_type = other RNA
ccttttaagggaaacactca

SEQ ID NO: 31383 - RNA, 20 nt, synthetic construct
  source 1..20: mol_type = other RNA
ccttttaatgatttgtttga

SEQ ID NO: 31384 - RNA, 20 nt, synthetic construct
  source 1..20: mol_type = other RNA
ccttttacaccctaggtagg

SEQ ID NO: 31385 - RNA, 20 nt, synthetic construct
  source 1..20: mol_type = other RNA
ccttttaggtgccccactcc

SEQ ID NO: 31386 - RNA, 20 nt, synthetic construct
  source 1..20: mol_type = other RNA
ccttttatgtgcagtctaac

SEQ ID NO: 31387 - RNA, 20 nt, synthetic construct
  source 1..20: mol_type = other RNA
ccttttcactcttagtgatg

SEQ ID NO: 31388 - RNA, 20 nt, synthetic construct
  source 1..20: mol_type = other RNA
ccttttcccaggagctagaa

SEQ ID NO: 31389 - RNA, 20 nt, synthetic construct
  source 1..20: mol_type = other RNA
ccttttcctgttccgggatc

SEQ ID NO: 31390 - RNA, 20 nt, synthetic construct
  source 1..20: mol_type = other RNA
ccttttcgagactgagtaat

SEQ ID NO: 31391 - RNA, 20 nt, synthetic construct
  source 1..20: mol_type = other RNA
ccttttctgatttgctggct

SEQ ID NO: 31392 - RNA, 20 nt, synthetic construct
  source 1..20: mol_type = other RNA
ccttttgagtttggtgtatt

SEQ ID NO: 31393 - RNA, 20 nt, synthetic construct
  source 1..20: mol_type = other RNA
ccttttggatgcagatttct

SEQ ID NO: 31394 - RNA, 20 nt, synthetic construct
  source 1..20: mol_type = other RNA
ccttttgtagaccctgttag

SEQ ID NO: 31395 - RNA, 20 nt, synthetic construct
  source 1..20: mol_type = other RNA
ccttttgtagagggaatttg

SEQ ID NO: 31396 - RNA, 20 nt, synthetic construct
  source 1..20: mol_type = other RNA
ccttttgtagctaatatctt

SEQ ID NO: 31397 - RNA, 20 nt, synthetic construct
  source 1..20: mol_type = other RNA
ccttttgtcaagctatcaga

SEQ ID NO: 31398 - RNA, 20 nt, synthetic construct
  source 1..20: mol_type = other RNA
ccttttgttattaaaatggt

SEQ ID NO: 31399 - RNA, 20 nt, synthetic construct
  source 1..20: mol_type = other RNA
cctttttaggtagggataag

SEQ ID NO: 31400 - RNA, 20 nt, synthetic construct
  source 1..20: mol_type = other RNA
cctttttatcacccttataa

SEQ ID NO: 31401 - RNA, 20 nt, synthetic construct
  source 1..20: mol_type = other RNA
cctttttcaaataatagcta

SEQ ID NO: 31402 - RNA, 20 nt, synthetic construct
  source 1..20: mol_type = other RNA
cctttttcttttcacataaa

SEQ ID NO: 31403 - RNA, 20 nt, synthetic construct
  source 1..20: mol_type = other RNA
cctttttgggatctgtcatg

SEQ ID NO: 31404 - RNA, 20 nt, synthetic construct
  source 1..20: mol_type = other RNA
ccttttttaaggaaaagtca

SEQ ID NO: 31405 - RNA, 20 nt, synthetic construct
  source 1..20: mol_type = other RNA
ccttttttactgacttttcc

SEQ ID NO: 31406 - RNA, 20 nt, synthetic construct
  source 1..20: mol_type = other RNA
ccttttttatgtgctttctc

SEQ ID NO: 31407 - RNA, 20 nt, synthetic construct
  source 1..20: mol_type = other RNA
ccttttttggtattttttag

SEQ ID NO: 31408 - RNA, 20 nt, synthetic construct
  source 1..20: mol_type = other RNA
cgaaaacctgaaatggctta

SEQ ID NO: 31409 - RNA, 20 nt, synthetic construct
  source 1..20: mol_type = other RNA
cgaaaaggaatggaattctg

SEQ ID NO: 31410 - RNA, 20 nt, synthetic construct
  source 1..20: mol_type = other RNA
cgaaaatatccctggggttt

SEQ ID NO: 31411 - RNA, 20 nt, synthetic construct
  source 1..20: mol_type = other RNA
cgaaaatgggccaaagactt

SEQ ID NO: 31412 - RNA, 20 nt, synthetic construct
  source 1..20: mol_type = other RNA
cgaaacacactcgtgtatga

SEQ ID NO: 31413 - RNA, 20 nt, synthetic construct
  source 1..20: mol_type = other RNA
cgaaagaactgaaagcaggg

SEQ ID NO: 31414 - RNA, 20 nt, synthetic construct
  source 1..20: mol_type = other RNA
cgaaagcctttattttttct

SEQ ID NO: 31415 - RNA, 20 nt, synthetic construct
  source 1..20: mol_type = other RNA
cgaaagcggtcaacgcaccc

SEQ ID NO: 31416 - RNA, 20 nt, synthetic construct
  source 1..20: mol_type = other RNA
cgaaagggattctggccaaa

SEQ ID NO: 31417 - RNA, 20 nt, synthetic construct
  source 1..20: mol_type = other RNA
cgaaaggtacgacgctcttg

SEQ ID NO: 31418 - RNA, 20 nt, synthetic construct
  source 1..20: mol_type = other RNA
cgaaagtgaagcccagagag

SEQ ID NO: 31419 - RNA, 20 nt, synthetic construct
  source 1..20: mol_type = other RNA
cgaaagtgctctaccctttc

SEQ ID NO: 31420 - RNA, 20 nt, synthetic construct
  source 1..20: mol_type = other RNA
cgaaagttcagatagaatta

SEQ ID NO: 31421 - RNA, 20 nt, synthetic construct
  source 1..20: mol_type = other RNA
cgaaataatcattgttaggt

SEQ ID NO: 31422 - RNA, 20 nt, synthetic construct
  source 1..20: mol_type = other RNA
cgaaatagtagttgctcaga

SEQ ID NO: 31423 - RNA, 20 nt, synthetic construct
  source 1..20: mol_type = other RNA
cgaaatatctccctcacagt

SEQ ID NO: 31424 - RNA, 20 nt, synthetic construct
  source 1..20: mol_type = other RNA
cgaaatgcacttagcgctga

SEQ ID NO: 31425 - RNA, 20 nt, synthetic construct
  source 1..20: mol_type = other RNA
cgaaatgtgaacagacagac

SEQ ID NO: 31426 - RNA, 20 nt, synthetic construct
  source 1..20: mol_type = other RNA
cgaaccaattaccataaagt

SEQ ID NO: 31427 - RNA, 20 nt, synthetic construct
  source 1..20: mol_type = other RNA
cgaactaaggaaagctcagg

SEQ ID NO: 31428 - RNA, 20 nt, synthetic construct
  source 1..20: mol_type = other RNA
cgaactctcgacctcgtgat

SEQ ID NO: 31429 - RNA, 20 nt, synthetic construct
  source 1..20: mol_type = other RNA
cgaagagaccacaggctctc

SEQ ID NO: 31430 - RNA, 20 nt, synthetic construct
  source 1..20: mol_type = other RNA
cgaagaggacgatttttcca

SEQ ID NO: 31431 - RNA, 20 nt, synthetic construct
  source 1..20: mol_type = other RNA
cgaagagggagaagaaataa

SEQ ID NO: 31432 - RNA, 20 nt, synthetic construct
  source 1..20: mol_type = other RNA
cgaagcaaaacatatgtcag

SEQ ID NO: 31433 - RNA, 20 nt, synthetic construct
  source 1..20: mol_type = other RNA
cgaagcacaaccactgatgg

SEQ ID NO: 31434 - RNA, 20 nt, synthetic construct
  source 1..20: mol_type = other RNA
cgaagcccgccgctcgcagg

SEQ ID NO: 31435 - RNA, 20 nt, synthetic construct
  source 1..20: mol_type = other RNA
cgaagccttcccctgctgtt

SEQ ID NO: 31436 - RNA, 20 nt, synthetic construct
  source 1..20: mol_type = other RNA
cgaagctacagtaatcaaac

SEQ ID NO: 31437 - RNA, 20 nt, synthetic construct
  source 1..20: mol_type = other RNA
cgaagcttaatttagatgag

SEQ ID NO: 31438 - RNA, 20 nt, synthetic construct
  source 1..20: mol_type = other RNA
cgaagcttattaaaatgaac

SEQ ID NO: 31439 - RNA, 20 nt, synthetic construct
  source 1..20: mol_type = other RNA
cgaaggcaatgtaacacagt

SEQ ID NO: 31440 - RNA, 20 nt, synthetic construct
  source 1..20: mol_type = other RNA
cgaaggcctgcttcattccg

SEQ ID NO: 31441 - RNA, 20 nt, synthetic construct
  source 1..20: mol_type = other RNA
cgaaggcgtgtaaactgttg

SEQ ID NO: 31442 - RNA, 20 nt, synthetic construct
  source 1..20: mol_type = other RNA
cgaagtcacattctagtgat

SEQ ID NO: 31443 - RNA, 20 nt, synthetic construct
  source 1..20: mol_type = other RNA
cgaagtgggaagcaaaggat

SEQ ID NO: 31444 - RNA, 20 nt, synthetic construct
  source 1..20: mol_type = other RNA
cgaagtggtgcttgaactgc

SEQ ID NO: 31445 - RNA, 20 nt, synthetic construct
  source 1..20: mol_type = other RNA
cgaatcatctaggcatataa

SEQ ID NO: 31446 - RNA, 20 nt, synthetic construct
  source 1..20: mol_type = other RNA
cgaatcctcacaacaggcct

SEQ ID NO: 31447 - RNA, 20 nt, synthetic construct
  source 1..20: mol_type = other RNA
cgaatcctttgcttcccact

SEQ ID NO: 31448 - RNA, 20 nt, synthetic construct
  source 1..20: mol_type = other RNA
cgaatgaaaacacaacatac

SEQ ID NO: 31449 - RNA, 20 nt, synthetic construct
  source 1..20: mol_type = other RNA
cgaatgaactcctatagtta

SEQ ID NO: 31450 - RNA, 20 nt, synthetic construct
  source 1..20: mol_type = other RNA
cgaatgcatgggaggtaata

SEQ ID NO: 31451 - RNA, 20 nt, synthetic construct
  source 1..20: mol_type = other RNA
cgaatgtggtggtatgcact

SEQ ID NO: 31452 - RNA, 20 nt, synthetic construct
  source 1..20: mol_type = other RNA
cgaattagattgttttgttg

SEQ ID NO: 31453 - RNA, 20 nt, synthetic construct
  source 1..20: mol_type = other RNA
cgaattatgctaacatgaac

SEQ ID NO: 31454 - RNA, 20 nt, synthetic construct
  source 1..20: mol_type = other RNA
cgaattctttaaaactgctg

SEQ ID NO: 31455 - RNA, 20 nt, synthetic construct
  source 1..20: mol_type = other RNA
cgaatttacttttaaactgt

SEQ ID NO: 31456 - RNA, 20 nt, synthetic construct
  source 1..20: mol_type = other RNA
cgacaagagcagaactccac

SEQ ID NO: 31457 - RNA, 20 nt, synthetic construct
  source 1..20: mol_type = other RNA
cgacaatctctggggttagg

SEQ ID NO: 31458 - RNA, 20 nt, synthetic construct
  source 1..20: mol_type = other RNA
cgacacacaatccaagtttc

SEQ ID NO: 31459 - RNA, 20 nt, synthetic construct
  source 1..20: mol_type = other RNA
cgacaccagaactacacatt

SEQ ID NO: 31460 - RNA, 20 nt, synthetic construct
  source 1..20: mol_type = other RNA
cgacagagtgaaactctggc

SEQ ID NO: 31461 - RNA, 20 nt, synthetic construct
  source 1..20: mol_type = other RNA
cgacagcagataagatccaa

SEQ ID NO: 31462 - RNA, 20 nt, synthetic construct
  source 1..20: mol_type = other RNA
cgacagcaggaaaagctacc

SEQ ID NO: 31463 - RNA, 20 nt, synthetic construct
  source 1..20: mol_type = other RNA
cgacagctacggaggatgag

SEQ ID NO: 31464 - RNA, 20 nt, synthetic construct
  source 1..20: mol_type = other RNA
cgacagtcccttgcctgaca

SEQ ID NO: 31465 - RNA, 20 nt, synthetic construct
  source 1..20: mol_type = other RNA
cgacatatcagggatcacag

SEQ ID NO: 31466 - RNA, 20 nt, synthetic construct
  source 1..20: mol_type = other RNA
cgaccaagttactagaagca

SEQ ID NO: 31467 - RNA, 20 nt, synthetic construct
  source 1..20: mol_type = other RNA
cgaccaggggaaggagtctg

SEQ ID NO: 31468 - RNA, 20 nt, synthetic construct
  source 1..20: mol_type = other RNA
cgacccactagtgaagtccc

SEQ ID NO: 31469 - RNA, 20 nt, synthetic construct
  source 1..20: mol_type = other RNA
cgacccagcccccaacccgc

SEQ ID NO: 31470 - RNA, 20 nt, synthetic construct
  source 1..20: mol_type = other RNA
cgacccccctacctccctcc

SEQ ID NO: 31471 - RNA, 20 nt, synthetic construct
  source 1..20: mol_type = other RNA
cgaccccctgggctcaagcc

SEQ ID NO: 31472 - RNA, 20 nt, synthetic construct
  source 1..20: mol_type = other RNA
cgaccggacgtggtggctca

SEQ ID NO: 31473 - RNA, 20 nt, synthetic construct
  source 1..20: mol_type = other RNA
cgacctccagcgctaagcac

SEQ ID NO: 31474 - RNA, 20 nt, synthetic construct
  source 1..20: mol_type = other RNA
cgacctcgaagcacaaccac

SEQ ID NO: 31475 - RNA, 20 nt, synthetic construct
  source 1..20: mol_type = other RNA
cgacctgtagattgggcttt

SEQ ID NO: 31476 - RNA, 20 nt, synthetic construct
  source 1..20: mol_type = other RNA
cgaccttgctcattcatctg

SEQ ID NO: 31477 - RNA, 20 nt, synthetic construct
  source 1..20: mol_type = other RNA
cgacgcctttcatttggcct

SEQ ID NO: 31478 - RNA, 20 nt, synthetic construct
  source 1..20: mol_type = other RNA
cgacgctcttgttcaaaaac

SEQ ID NO: 31479 - RNA, 20 nt, synthetic construct
  source 1..20: mol_type = other RNA
cgacggctcaggcctgttgt

SEQ ID NO: 31480 - RNA, 20 nt, synthetic construct
  source 1..20: mol_type = other RNA
cgacgtatgcaacttactct

SEQ ID NO: 31481 - RNA, 20 nt, synthetic construct
  source 1..20: mol_type = other RNA
cgactcatgcctgtaattct

SEQ ID NO: 31482 - RNA, 20 nt, synthetic construct
  source 1..20: mol_type = other RNA
cgactgaaaggaaatgagtg

SEQ ID NO: 31483 - RNA, 20 nt, synthetic construct
  source 1..20: mol_type = other RNA
cgagaaaaatggggatatcc

SEQ ID NO: 31484 - RNA, 20 nt, synthetic construct
  source 1..20: mol_type = other RNA
cgagaaaagcacaggcatcg

SEQ ID NO: 31485 - RNA, 20 nt, synthetic construct
  source 1..20: mol_type = other RNA
cgagaaaggcgaagcggcag

SEQ ID NO: 31486 - RNA, 20 nt, synthetic construct
  source 1..20: mol_type = other RNA
cgagaaatcggaactcctgt

SEQ ID NO: 31487 - RNA, 20 nt, synthetic construct
  source 1..20: mol_type = other RNA
cgagaacaaaacaagaagaa

SEQ ID NO: 31488 - RNA, 20 nt, synthetic construct
  source 1..20: mol_type = other RNA
cgagaaggacagcttccacc

SEQ ID NO: 31489 - RNA, 20 nt, synthetic construct
  source 1..20: mol_type = other RNA
cgagaagggaagtaaagatc

SEQ ID NO: 31490 - RNA, 20 nt, synthetic construct
  source 1..20: mol_type = other RNA
cgagacaagttctcctgtgt

SEQ ID NO: 31491 - RNA, 20 nt, synthetic construct
  source 1..20: mol_type = other RNA
cgagacctcatctctgcaaa

SEQ ID NO: 31492 - RNA, 20 nt, synthetic construct
  source 1..20: mol_type = other RNA
cgagactccatctcaagaaa

SEQ ID NO: 31493 - RNA, 20 nt, synthetic construct
  source 1..20: mol_type = other RNA
cgagactgagtaatattcca

SEQ ID NO: 31494 - RNA, 20 nt, synthetic construct
  source 1..20: mol_type = other RNA
cgagactgtaatgagctgag

SEQ ID NO: 31495 - RNA, 20 nt, synthetic construct
  source 1..20: mol_type = other RNA
cgagactgttagggacttat

SEQ ID NO: 31496 - RNA, 20 nt, synthetic construct
  source 1..20: mol_type = other RNA
cgagagatgaatggataagg

SEQ ID NO: 31497 - RNA, 20 nt, synthetic construct
  source 1..20: mol_type = other RNA
cgagatacttaagtttttaa

SEQ ID NO: 31498 - RNA, 20 nt, synthetic construct
  source 1..20: mol_type = other RNA
cgagatcacgccactgcatt

SEQ ID NO: 31499 - RNA, 20 nt, synthetic construct
  source 1..20: mol_type = other RNA
cgagatggcgtgcgcctgta

SEQ ID NO: 31500 - RNA, 20 nt, synthetic construct
  source 1..20: mol_type = other RNA
cgagcagaagggaaaggatg

SEQ ID NO: 31501 - RNA, 20 nt, synthetic construct
  source 1..20: mol_type = other RNA
cgagcggcgggcttcgcctt

SEQ ID NO: 31502 - RNA, 20 nt, synthetic construct
  source 1..20: mol_type = other RNA
cgagctcctgacctcagata

SEQ ID NO: 31503 - RNA, 20 nt, synthetic construct
  source 1..20: mol_type = other RNA
cgagctgggtgatgttcaac

SEQ ID NO: 31504 - RNA, 20 nt, synthetic construct
  source 1..20: mol_type = other RNA
cgagcttgatctttacttcc

SEQ ID NO: 31505 - RNA, 20 nt, synthetic construct
  source 1..20: mol_type = other RNA
cgaggaaaagagaacattgg

SEQ ID NO: 31506 - RNA, 20 nt, synthetic construct
  source 1..20: mol_type = other RNA
cgaggaaacccgctctgggt

SEQ ID NO: 31507 - RNA, 20 nt, synthetic construct
  source 1..20: mol_type = other RNA
cgaggacagactgcagttgg

SEQ ID NO: 31508 - RNA, 20 nt, synthetic construct
  source 1..20: mol_type = other RNA
cgaggcagagagagtaactg

SEQ ID NO: 31509 - RNA, 20 nt, synthetic construct
  source 1..20: mol_type = other RNA
cgaggcaggtggatcaggag

SEQ ID NO: 31510 - RNA, 20 nt, synthetic construct
  source 1..20: mol_type = other RNA
cgaggcatctagttaccact

SEQ ID NO: 31511 - RNA, 20 nt, synthetic construct
  source 1..20: mol_type = other RNA
cgaggccagtccctagtgtc

SEQ ID NO: 31512 - RNA, 20 nt, synthetic construct
  source 1..20: mol_type = other RNA
cgaggcctggaacaggccct

SEQ ID NO: 31513 - RNA, 20 nt, synthetic construct
  source 1..20: mol_type = other RNA
cgagggagacggcgagcttg

SEQ ID NO: 31514 - RNA, 20 nt, synthetic construct
  source 1..20: mol_type = other RNA
cgagggagcgtacggggtcc

SEQ ID NO: 31515 - RNA, 20 nt, synthetic construct
  source 1..20: mol_type = other RNA
cgagggggctgagtatgggt

SEQ ID NO: 31516 - RNA, 20 nt, synthetic construct
  source 1..20: mol_type = other RNA
cgagggtagcttttcctgct

SEQ ID NO: 31517 - RNA, 20 nt, synthetic construct
  source 1..20: mol_type = other RNA
cgagggttgaacatcaccca

SEQ ID NO: 31518 - RNA, 20 nt, synthetic construct
  source 1..20: mol_type = other RNA
cgaggtcgcaccctgagcat

SEQ ID NO: 31519 - RNA, 20 nt, synthetic construct
  source 1..20: mol_type = other RNA
cgaggtgcacaagggaagag

SEQ ID NO: 31520 - RNA, 20 nt, synthetic construct
  source 1..20: mol_type = other RNA
cgagtaaaaagaatgaataa

SEQ ID NO: 31521 - RNA, 20 nt, synthetic construct
  source 1..20: mol_type = other RNA
cgagtaatggatgtttttag

SEQ ID NO: 31522 - RNA, 20 nt, synthetic construct
  source 1..20: mol_type = other RNA
cgagtaatgggatggctggg

SEQ ID NO: 31523 - RNA, 20 nt, synthetic construct
  source 1..20: mol_type = other RNA
cgagtagttgtaactacaga

SEQ ID NO: 31524 - RNA, 20 nt, synthetic construct
  source 1..20: mol_type = other RNA
cgagtatcatataaattgca

SEQ ID NO: 31525 - RNA, 20 nt, synthetic construct
  source 1..20: mol_type = other RNA
cgagtatctaggagtacagt

SEQ ID NO: 31526 - RNA, 20 nt, synthetic construct
  source 1..20: mol_type = other RNA
cgagtattcaagtttcaccc

SEQ ID NO: 31527 - RNA, 20 nt, synthetic construct
  source 1..20: mol_type = other RNA
cgagtgtgaacgatggtttc

SEQ ID NO: 31528 - RNA, 20 nt, synthetic construct
  source 1..20: mol_type = other RNA
cgagtgtgtttcgcaaagta

SEQ ID NO: 31529 - RNA, 20 nt, synthetic construct
  source 1..20: mol_type = other RNA
cgagttatgcaagatgtcaa

SEQ ID NO: 31530 - RNA, 20 nt, synthetic construct
  source 1..20: mol_type = other RNA
cgagttcaggaccagcttgg

SEQ ID NO: 31531 - RNA, 20 nt, synthetic construct
  source 1..20: mol_type = other RNA
cgagttctgggagttcatta

SEQ ID NO: 31532 - RNA, 20 nt, synthetic construct
  source 1..20: mol_type = other RNA
cgataaacttcagttttatc

SEQ ID NO: 31533 - RNA, 20 nt, synthetic construct
  source 1..20: mol_type = other RNA
cgataaagggtctggtatct

SEQ ID NO: 31534 - RNA, 20 nt, synthetic construct
  source 1..20: mol_type = other RNA
cgatactttttattttcatg

SEQ ID NO: 31535 - RNA, 20 nt, synthetic construct
  source 1..20: mol_type = other RNA
cgatagtctcctatattgtc

SEQ ID NO: 31536 - RNA, 20 nt, synthetic construct
  source 1..20: mol_type = other RNA
cgatattcctatcagaagca

SEQ ID NO: 31537 - RNA, 20 nt, synthetic construct
  source 1..20: mol_type = other RNA
cgatccttactaccaccact

SEQ ID NO: 31538 - RNA, 20 nt, synthetic construct
  source 1..20: mol_type = other RNA
cgatgaaattgaccattcca

SEQ ID NO: 31539 - RNA, 20 nt, synthetic construct
  source 1..20: mol_type = other RNA
cgatgataccttcttgagag

SEQ ID NO: 31540 - RNA, 20 nt, synthetic construct
  source 1..20: mol_type = other RNA
cgatgatcaaaaccaggagg

SEQ ID NO: 31541 - RNA, 20 nt, synthetic construct
  source 1..20: mol_type = other RNA
cgatgcattccagattgaaa

SEQ ID NO: 31542 - RNA, 20 nt, synthetic construct
  source 1..20: mol_type = other RNA
cgatgccatgtgttttgttt

SEQ ID NO: 31543 - RNA, 20 nt, synthetic construct
  source 1..20: mol_type = other RNA
cgatgcctgtgcttttctcg

SEQ ID NO: 31544 - RNA, 20 nt, synthetic construct
  source 1..20: mol_type = other RNA
cgatgcttaggtaagaaaaa

SEQ ID NO: 31545 - RNA, 20 nt, synthetic construct
  source 1..20: mol_type = other RNA
cgatggacatttaggttgtt

SEQ ID NO: 31546 - RNA, 20 nt, synthetic construct
  source 1..20: mol_type = other RNA
cgatggtttctgacacccga

SEQ ID NO: 31547 - RNA, 20 nt, synthetic construct
  source 1..20: mol_type = other RNA
cgattaaaataacacgcaga

SEQ ID NO: 31548 - RNA, 20 nt, synthetic construct
  source 1..20: mol_type = other RNA
cgattctgacccagagccta

SEQ ID NO: 31549 - RNA, 20 nt, synthetic construct
  source 1..20: mol_type = other RNA
cgattggttggactccaccc

SEQ ID NO: 31550 - RNA, 20 nt, synthetic construct
  source 1..20: mol_type = other RNA
cgattgtttcagtgtgtcca

SEQ ID NO: 31551 - RNA, 20 nt, synthetic construct
  source 1..20: mol_type = other RNA
cgatttcagttaacttattg

SEQ ID NO: 31552 - RNA, 20 nt, synthetic construct
  source 1..20: mol_type = other RNA
cgatttctcggccgggcgcg

SEQ ID NO: 31553 - RNA, 20 nt, synthetic construct
  source 1..20: mol_type = other RNA
cgatttcttaaaaatgacac

SEQ ID NO: 31554 - RNA, 20 nt, synthetic construct
  source 1..20: mol_type = other RNA
cgattttacttactagttgt

SEQ ID NO: 31555 - RNA, 20 nt, synthetic construct
  source 1..20: mol_type = other RNA
cgatttttccaacagtttac

SEQ ID NO: 31556 - RNA, 20 nt, synthetic construct
  source 1..20: mol_type = other RNA
cgcaaagcaacatgctaagt

SEQ ID NO: 31557 - RNA, 20 nt, synthetic construct
  source 1..20: mol_type = other RNA
cgcaaaggatgtcaacaaaa

SEQ ID NO: 31558 - RNA, 20 nt, synthetic construct
  source 1..20: mol_type = other RNA
cgcaaagtaaaaagcactat

SEQ ID NO: 31559 - RNA, 20 nt, synthetic construct
  source 1..20: mol_type = other RNA
cgcaaataatcattcttcta

SEQ ID NO: 31560 - RNA, 20 nt, synthetic construct
  source 1..20: mol_type = other RNA
cgcaacaattcaacagctac

SEQ ID NO: 31561 - RNA, 20 nt, synthetic construct
  source 1..20: mol_type = other RNA
cgcaacatctgcctcccggg

SEQ ID NO: 31562 - RNA, 20 nt, synthetic construct
  source 1..20: mol_type = other RNA
cgcaagagttccaactgtat

SEQ ID NO: 31563 - RNA, 20 nt, synthetic construct
  source 1..20: mol_type = other RNA
cgcaatccaaaatcctctgt

SEQ ID NO: 31564 - RNA, 20 nt, synthetic construct
  source 1..20: mol_type = other RNA
cgcaattgcagccagagagt

SEQ ID NO: 31565 - RNA, 20 nt, synthetic construct
  source 1..20: mol_type = other RNA
cgcacagggagatacttgat

SEQ ID NO: 31566 - RNA, 20 nt, synthetic construct
  source 1..20: mol_type = other RNA
cgcacccagagcgggtttcc

SEQ ID NO: 31567 - RNA, 20 nt, synthetic construct
  source 1..20: mol_type = other RNA
cgcaccctgagcatccccgc

SEQ ID NO: 31568 - RNA, 20 nt, synthetic construct
  source 1..20: mol_type = other RNA
cgcacctggccgggatttac

SEQ ID NO: 31569 - RNA, 20 nt, synthetic construct
  source 1..20: mol_type = other RNA
cgcaccttgattttgataaa

SEQ ID NO: 31570 - RNA, 20 nt, synthetic construct
  source 1..20: mol_type = other RNA
cgcacgccatctcgcccagc

SEQ ID NO: 31571 - RNA, 20 nt, synthetic construct
  source 1..20: mol_type = other RNA
cgcactcagcctgttgggag

SEQ ID NO: 31572 - RNA, 20 nt, synthetic construct
  source 1..20: mol_type = other RNA
cgcactccacttcccactgc

SEQ ID NO: 31573 - RNA, 20 nt, synthetic construct
  source 1..20: mol_type = other RNA
cgcagaacagtgtttacaca

SEQ ID NO: 31574 - RNA, 20 nt, synthetic construct
  source 1..20: mol_type = other RNA
cgcagaaccactgagcacaa

SEQ ID NO: 31575 - RNA, 20 nt, synthetic construct
  source 1..20: mol_type = other RNA
cgcagaactggggcttgaac

SEQ ID NO: 31576 - RNA, 20 nt, synthetic construct
  source 1..20: mol_type = other RNA
cgcagacacaccatgacaga

SEQ ID NO: 31577 - RNA, 20 nt, synthetic construct
  source 1..20: mol_type = other RNA
cgcagagcaagcacgttagc

SEQ ID NO: 31578 - RNA, 20 nt, synthetic construct
  source 1..20: mol_type = other RNA
cgcagaggccaaatgaaagg

SEQ ID NO: 31579 - RNA, 20 nt, synthetic construct
  source 1..20: mol_type = other RNA
cgcagcatccctgccgcgcg

SEQ ID NO: 31580 - RNA, 20 nt, synthetic construct
  source 1..20: mol_type = other RNA
cgcagccatggctcactgcg

SEQ ID NO: 31581 - RNA, 20 nt, synthetic construct
  source 1..20: mol_type = other RNA
cgcagcggggatgctcaggg

SEQ ID NO: 31582 - RNA, 20 nt, synthetic construct
  source 1..20: mol_type = other RNA
cgcaggcaaacagcgccact

SEQ ID NO: 31583 - RNA, 20 nt, synthetic construct
  source 1..20: mol_type = other RNA
cgcagggccattctgctatg

SEQ ID NO: 31584 - RNA, 20 nt, synthetic construct
  source 1..20: mol_type = other RNA
cgcagggtgaaacttgaata

SEQ ID NO: 31585 - RNA, 20 nt, synthetic construct
  source 1..20: mol_type = other RNA
cgcaggtgggaggcccggag

SEQ ID NO: 31586 - RNA, 20 nt, synthetic construct
  source 1..20: mol_type = other RNA
cgcagtgagccatggctgcg

SEQ ID NO: 31587 - RNA, 20 nt, synthetic construct
  source 1..20: mol_type = other RNA
cgcagtgcttagcgctggag

SEQ ID NO: 31588 - RNA, 20 nt, synthetic construct
  source 1..20: mol_type = other RNA
cgcagtttgttctgctgttg

SEQ ID NO: 31589 - RNA, 20 nt, synthetic construct
  source 1..20: mol_type = other RNA
cgcataaccaaattatttca

SEQ ID NO: 31590 - RNA, 20 nt, synthetic construct
  source 1..20: mol_type = other RNA
cgcatactgtgcagtggatg

SEQ ID NO: 31591 - RNA, 20 nt, synthetic construct
  source 1..20: mol_type = other RNA
cgcatcattcaaatgatatt

SEQ ID NO: 31592 - RNA, 20 nt, synthetic construct
  source 1..20: mol_type = other RNA
cgcatctggtctatctcatt

SEQ ID NO: 31593 - RNA, 20 nt, synthetic construct
  source 1..20: mol_type = other RNA
cgcatgaaaacagctaggtg

SEQ ID NO: 31594 - RNA, 20 nt, synthetic construct
  source 1..20: mol_type = other RNA
cgcattacgagttatgcaag

SEQ ID NO: 31595 - RNA, 20 nt, synthetic construct
  source 1..20: mol_type = other RNA
cgcattgcattgactaccaa

SEQ ID NO: 31596 - RNA, 20 nt, synthetic construct
  source 1..20: mol_type = other RNA
cgcattgctaattcattgta

SEQ ID NO: 31597 - RNA, 20 nt, synthetic construct
  source 1..20: mol_type = other RNA
cgcattgtgatgtctcagat

SEQ ID NO: 31598 - RNA, 20 nt, synthetic construct
  source 1..20: mol_type = other RNA
cgcattttttaagtggcgct

SEQ ID NO: 31599 - RNA, 20 nt, synthetic construct
  source 1..20: mol_type = other RNA
cgccaagcagggacgggcgg

SEQ ID NO: 31600 - RNA, 20 nt, synthetic construct
  source 1..20: mol_type = other RNA
cgccaattttcatagcagca

SEQ ID NO: 31601 - RNA, 20 nt, synthetic construct
  source 1..20: mol_type = other RNA
cgccacctcctccggggacc

SEQ ID NO: 31602 - RNA, 20 nt, synthetic construct
  source 1..20: mol_type = other RNA
cgccacgtgaagatggagtt

SEQ ID NO: 31603 - RNA, 20 nt, synthetic construct
  source 1..20: mol_type = other RNA
cgccactgcactccagcctt

SEQ ID NO: 31604 - RNA, 20 nt, synthetic construct
  source 1..20: mol_type = other RNA
cgccactgcaggtgttggtg

SEQ ID NO: 31605 - RNA, 20 nt, synthetic construct
  source 1..20: mol_type = other RNA
cgccactgcattccgcctgg

SEQ ID NO: 31606 - RNA, 20 nt, synthetic construct
  source 1..20: mol_type = other RNA
cgccacttaaaaaatgcgcg

SEQ ID NO: 31607 - RNA, 20 nt, synthetic construct
  source 1..20: mol_type = other RNA
cgccagacccgccgcagagc

SEQ ID NO: 31608 - RNA, 20 nt, synthetic construct
  source 1..20: mol_type = other RNA
cgccatacctggtccttaaa

SEQ ID NO: 31609 - RNA, 20 nt, synthetic construct
  source 1..20: mol_type = other RNA
cgccatcacacccagtatac

SEQ ID NO: 31610 - RNA, 20 nt, synthetic construct
  source 1..20: mol_type = other RNA
cgcccagcccgtgtgtttag

SEQ ID NO: 31611 - RNA, 20 nt, synthetic construct
  source 1..20: mol_type = other RNA
cgcccaggcggaatgcagtg

SEQ ID NO: 31612 - RNA, 20 nt, synthetic construct
  source 1..20: mol_type = other RNA
cgcccaggctggagctcact

SEQ ID NO: 31613 - RNA, 20 nt, synthetic construct
  source 1..20: mol_type = other RNA
cgcccattaggatagctatt

SEQ ID NO: 31614 - RNA, 20 nt, synthetic construct
  source 1..20: mol_type = other RNA
cgcccctggagaaagcccag

SEQ ID NO: 31615 - RNA, 20 nt, synthetic construct
  source 1..20: mol_type = other RNA
cgcccgctgctccctctgcc

SEQ ID NO: 31616 - RNA, 20 nt, synthetic construct
  source 1..20: mol_type = other RNA
cgcccggccaaatatccatg

SEQ ID NO: 31617 - RNA, 20 nt, synthetic construct
  source 1..20: mol_type = other RNA
cgcccggcccagattccttt

SEQ ID NO: 31618 - RNA, 20 nt, synthetic construct
  source 1..20: mol_type = other RNA
cgcccggcccatgacatgtg

SEQ ID NO: 31619 - RNA, 20 nt, synthetic construct
  source 1..20: mol_type = other RNA
cgcccggcccgttattttta

SEQ ID NO: 31620 - RNA, 20 nt, synthetic construct
  source 1..20: mol_type = other RNA
cgcccggccgagaaatcgga

SEQ ID NO: 31621 - RNA, 20 nt, synthetic construct
  source 1..20: mol_type = other RNA
cgcccggccgatgcctgtgc

SEQ ID NO: 31622 - RNA, 20 nt, synthetic construct
  source 1..20: mol_type = other RNA
cgcccgtccctgcttggcgc

SEQ ID NO: 31623 - RNA, 20 nt, synthetic construct
  source 1..20: mol_type = other RNA
cgccctcccccgggacaatg

SEQ ID NO: 31624 - RNA, 20 nt, synthetic construct
  source 1..20: mol_type = other RNA
cgccctggcattgtcccggg

SEQ ID NO: 31625 - RNA, 20 nt, synthetic construct
  source 1..20: mol_type = other RNA
cgccgcagaggccaaatgaa

SEQ ID NO: 31626 - RNA, 20 nt, synthetic construct
  source 1..20: mol_type = other RNA
cgccgctcgcaggtgggagg

SEQ ID NO: 31627 - RNA, 20 nt, synthetic construct
  source 1..20: mol_type = other RNA
cgccgtctccctcggccaca

SEQ ID NO: 31628 - RNA, 20 nt, synthetic construct
  source 1..20: mol_type = other RNA
cgcctagataagaaaatgtg

SEQ ID NO: 31629 - RNA, 20 nt, synthetic construct
  source 1..20: mol_type = other RNA
cgcctagctgacttttaaaa

SEQ ID NO: 31630 - RNA, 20 nt, synthetic construct
  source 1..20: mol_type = other RNA
cgcctccctggttcaagcta

SEQ ID NO: 31631 - RNA, 20 nt, synthetic construct
  source 1..20: mol_type = other RNA
cgcctcctggtgggttcatg

SEQ ID NO: 31632 - RNA, 20 nt, synthetic construct
  source 1..20: mol_type = other RNA
cgcctgcattgcatttactt

SEQ ID NO: 31633 - RNA, 20 nt, synthetic construct
  source 1..20: mol_type = other RNA
cgcctggacaggatcccgga

SEQ ID NO: 31634 - RNA, 20 nt, synthetic construct
  source 1..20: mol_type = other RNA
cgcctggtgattaaagttat

SEQ ID NO: 31635 - RNA, 20 nt, synthetic construct
  source 1..20: mol_type = other RNA
cgccttaaagccacactctt

SEQ ID NO: 31636 - RNA, 20 nt, synthetic construct
  source 1..20: mol_type = other RNA
cgccttcctaccctgccttc

SEQ ID NO: 31637 - RNA, 20 nt, synthetic construct
  source 1..20: mol_type = other RNA
cgccttcgcgggcaccttcc

SEQ ID NO: 31638 - RNA, 20 nt, synthetic construct
  source 1..20: mol_type = other RNA
cgccttctcagaaggacacc

SEQ ID NO: 31639 - RNA, 20 nt, synthetic construct
  source 1..20: mol_type = other RNA
cgcctttcatttggcctctg

SEQ ID NO: 31640 - RNA, 20 nt, synthetic construct
  source 1..20: mol_type = other RNA
cgcctttctcgcagcgggga

SEQ ID NO: 31641 - RNA, 20 nt, synthetic construct
  source 1..20: mol_type = other RNA
cgcctttgttgccaggtgga

SEQ ID NO: 31642 - RNA, 20 nt, synthetic construct
  source 1..20: mol_type = other RNA
cgcgaaggcgtgtaaactgt

SEQ ID NO: 31643 - RNA, 20 nt, synthetic construct
  source 1..20: mol_type = other RNA
cgcgagggagcgtacggggt

SEQ ID NO: 31644 - RNA, 20 nt, synthetic construct
  source 1..20: mol_type = other RNA
cgcgcaacaattcaacagct

SEQ ID NO: 31645 - RNA, 20 nt, synthetic construct
  source 1..20: mol_type = other RNA
cgcgcattttttaagtggcg

SEQ ID NO: 31646 - RNA, 20 nt, synthetic construct
  source 1..20: mol_type = other RNA
cgcgccagacccgccgcaga

SEQ ID NO: 31647 - RNA, 20 nt, synthetic construct
  source 1..20: mol_type = other RNA
cgcgcccagcccgtgtgttt

SEQ ID NO: 31648 - RNA, 20 nt, synthetic construct
  source 1..20: mol_type = other RNA
cgcgcccggccaaatatcca

SEQ ID NO: 31649 - RNA, 20 nt, synthetic construct
  source 1..20: mol_type = other RNA
cgcgcccggcccagattcct

SEQ ID NO: 31650 - RNA, 20 nt, synthetic construct
  source 1..20: mol_type = other RNA
cgcgcccggccgagaaatcg

SEQ ID NO: 31651 - RNA, 20 nt, synthetic construct
  source 1..20: mol_type = other RNA
cgcgcctggtgattaaagtt

SEQ ID NO: 31652 - RNA, 20 nt, synthetic construct
  source 1..20: mol_type = other RNA
cgcgcgagggagcgtacggg

SEQ ID NO: 31653 - RNA, 20 nt, synthetic construct
  source 1..20: mol_type = other RNA
cgcgcgcggcagggatgctg

SEQ ID NO: 31654 - RNA, 20 nt, synthetic construct
  source 1..20: mol_type = other RNA
cgcgcggaccccgtacgctc

SEQ ID NO: 31655 - RNA, 20 nt, synthetic construct
  source 1..20: mol_type = other RNA
cgcgcggcagggatgctgcg

SEQ ID NO: 31656 - RNA, 20 nt, synthetic construct
  source 1..20: mol_type = other RNA
cgcggaatgaagcaggcctt

SEQ ID NO: 31657 - RNA, 20 nt, synthetic construct
  source 1..20: mol_type = other RNA
cgcggaccccgtacgctccc

SEQ ID NO: 31658 - RNA, 20 nt, synthetic construct
  source 1..20: mol_type = other RNA
cgcggacgcgcattttttaa

SEQ ID NO: 31659 - RNA, 20 nt, synthetic construct
  source 1..20: mol_type = other RNA
cgcggactccggcgggagag

SEQ ID NO: 31660 - RNA, 20 nt, synthetic construct
  source 1..20: mol_type = other RNA
cgcggcacttggtaagctgt

SEQ ID NO: 31661 - RNA, 20 nt, synthetic construct
  source 1..20: mol_type = other RNA
cgcggcagggatgctgcgag

SEQ ID NO: 31662 - RNA, 20 nt, synthetic construct
  source 1..20: mol_type = other RNA
cgcggctgggctttctccag

SEQ ID NO: 31663 - RNA, 20 nt, synthetic construct
  source 1..20: mol_type = other RNA
cgcgggaggctgaggcagga

SEQ ID NO: 31664 - RNA, 20 nt, synthetic construct
  source 1..20: mol_type = other RNA
cgcgggcaccttccctactc

SEQ ID NO: 31665 - RNA, 20 nt, synthetic construct
  source 1..20: mol_type = other RNA
cgcgtaagggtacagaactg

SEQ ID NO: 31666 - RNA, 20 nt, synthetic construct
  source 1..20: mol_type = other RNA
cgcgtcaaaagatgctggtg

SEQ ID NO: 31667 - RNA, 20 nt, synthetic construct
  source 1..20: mol_type = other RNA
cgcgtccacctggcaacaaa

SEQ ID NO: 31668 - RNA, 20 nt, synthetic construct
  source 1..20: mol_type = other RNA
cgcgtgcctatggtcctagc

SEQ ID NO: 31669 - RNA, 20 nt, synthetic construct
  source 1..20: mol_type = other RNA
cgcgtgcctgcaatcgcagg

SEQ ID NO: 31670 - RNA, 20 nt, synthetic construct
  source 1..20: mol_type = other RNA
cgcgtggatgtgtgcacaac

SEQ ID NO: 31671 - RNA, 20 nt, synthetic construct
  source 1..20: mol_type = other RNA
cgcgtttattagaactagaa

SEQ ID NO: 31672 - RNA, 20 nt, synthetic construct
  source 1..20: mol_type = other RNA
cgcgttttttgtccaccaga

SEQ ID NO: 31673 - RNA, 20 nt, synthetic construct
  source 1..20: mol_type = other RNA
cgctaaacattttattaggt

SEQ ID NO: 31674 - RNA, 20 nt, synthetic construct
  source 1..20: mol_type = other RNA
cgctaaattaaaggctggaa

SEQ ID NO: 31675 - RNA, 20 nt, synthetic construct
  source 1..20: mol_type = other RNA
cgctaagcactgcgccaagc

SEQ ID NO: 31676 - RNA, 20 nt, synthetic construct
  source 1..20: mol_type = other RNA
cgctaagtgcatttcggctc

SEQ ID NO: 31677 - RNA, 20 nt, synthetic construct
  source 1..20: mol_type = other RNA
cgctaatctcaatcagggcc

SEQ ID NO: 31678 - RNA, 20 nt, synthetic construct
  source 1..20: mol_type = other RNA
cgctacacaagtattaacga

SEQ ID NO: 31679 - RNA, 20 nt, synthetic construct
  source 1..20: mol_type = other RNA
cgctactcagctgtcactct

SEQ ID NO: 31680 - RNA, 20 nt, synthetic construct
  source 1..20: mol_type = other RNA
cgctatcagtagtttgctag

SEQ ID NO: 31681 - RNA, 20 nt, synthetic construct
  source 1..20: mol_type = other RNA
cgctccacgcccattaggat

SEQ ID NO: 31682 - RNA, 20 nt, synthetic construct
  source 1..20: mol_type = other RNA
cgctccctctgtgtgcatgc

SEQ ID NO: 31683 - RNA, 20 nt, synthetic construct
  source 1..20: mol_type = other RNA
cgctcctctcccgccggagt

SEQ ID NO: 31684 - RNA, 20 nt, synthetic construct
  source 1..20: mol_type = other RNA
cgctcgcaggtgggaggccc

SEQ ID NO: 31685 - RNA, 20 nt, synthetic construct
  source 1..20: mol_type = other RNA
cgctctcctgtgccaagtcc

SEQ ID NO: 31686 - RNA, 20 nt, synthetic construct
  source 1..20: mol_type = other RNA
cgctctgggtgcgttgaccg

SEQ ID NO: 31687 - RNA, 20 nt, synthetic construct
  source 1..20: mol_type = other RNA
cgctctggttttaaagaaat

SEQ ID NO: 31688 - RNA, 20 nt, synthetic construct
  source 1..20: mol_type = other RNA
cgctctgtcgcccaggcgga

SEQ ID NO: 31689 - RNA, 20 nt, synthetic construct
  source 1..20: mol_type = other RNA
cgctcttcaagcattgggag

SEQ ID NO: 31690 - RNA, 20 nt, synthetic construct
  source 1..20: mol_type = other RNA
cgctcttgaccttgtgcatg

SEQ ID NO: 31691 - RNA, 20 nt, synthetic construct
  source 1..20: mol_type = other RNA
cgctcttggcttttggcagc

SEQ ID NO: 31692 - RNA, 20 nt, synthetic construct
  source 1..20: mol_type = other RNA
cgctcttgttcaaaaacctt

SEQ ID NO: 31693 - RNA, 20 nt, synthetic construct
  source 1..20: mol_type = other RNA
cgctcttttaaaaattacaa

SEQ ID NO: 31694 - RNA, 20 nt, synthetic construct
  source 1..20: mol_type = other RNA
cgctgaagtacttcaaggtt

SEQ ID NO: 31695 - RNA, 20 nt, synthetic construct
  source 1..20: mol_type = other RNA
cgctgatgacagttactcta

SEQ ID NO: 31696 - RNA, 20 nt, synthetic construct
  source 1..20: mol_type = other RNA
cgctgatgtgttgaccttag

SEQ ID NO: 31697 - RNA, 20 nt, synthetic construct
  source 1..20: mol_type = other RNA
cgctgccaaaagccaagagc

SEQ ID NO: 31698 - RNA, 20 nt, synthetic construct
  source 1..20: mol_type = other RNA
cgctgcgagaaaggcgaagc

SEQ ID NO: 31699 - RNA, 20 nt, synthetic construct
  source 1..20: mol_type = other RNA
cgctgctccctctgccgcct

SEQ ID NO: 31700 - RNA, 20 nt, synthetic construct
  source 1..20: mol_type = other RNA
cgctggaagggagcccaagc

SEQ ID NO: 31701 - RNA, 20 nt, synthetic construct
  source 1..20: mol_type = other RNA
cgctggaggtcgggctgcct

SEQ ID NO: 31702 - RNA, 20 nt, synthetic construct
  source 1..20: mol_type = other RNA
cgctggtgaaaaaatggtgc

SEQ ID NO: 31703 - RNA, 20 nt, synthetic construct
  source 1..20: mol_type = other RNA
cgctgtccatttccagtact

SEQ ID NO: 31704 - RNA, 20 nt, synthetic construct
  source 1..20: mol_type = other RNA
cgctgtgaatgtgaggtgag

SEQ ID NO: 31705 - RNA, 20 nt, synthetic construct
  source 1..20: mol_type = other RNA
cgctgtggctaacaatcaaa

SEQ ID NO: 31706 - RNA, 20 nt, synthetic construct
  source 1..20: mol_type = other RNA
cgctgtggcttgggtgacct

SEQ ID NO: 31707 - RNA, 20 nt, synthetic construct
  source 1..20: mol_type = other RNA
cgctgtttgcctgcgtccgt

SEQ ID NO: 31708 - RNA, 20 nt, synthetic construct
  source 1..20: mol_type = other RNA
cgcttcagttggtgaagaga

SEQ ID NO: 31709 - RNA, 20 nt, synthetic construct
  source 1..20: mol_type = other RNA
cgcttcgcctttctcgcagc

SEQ ID NO: 31710 - RNA, 20 nt, synthetic construct
  source 1..20: mol_type = other RNA
cgcttctatgtgacaaacac

SEQ ID NO: 31711 - RNA, 20 nt, synthetic construct
  source 1..20: mol_type = other RNA
cgcttgaacaaatatgaatg

SEQ ID NO: 31712 - RNA, 20 nt, synthetic construct
  source 1..20: mol_type = other RNA
cgcttgaacctgaaaaacgg

SEQ ID NO: 31713 - RNA, 20 nt, synthetic construct
  source 1..20: mol_type = other RNA
cgctttaagcatcccatatg

SEQ ID NO: 31714 - RNA, 20 nt, synthetic construct
  source 1..20: mol_type = other RNA
cgctttcgtgagggtttcag

SEQ ID NO: 31715 - RNA, 20 nt, synthetic construct
  source 1..20: mol_type = other RNA
cgcttttatgttataatgag

SEQ ID NO: 31716 - RNA, 20 nt, synthetic construct
  source 1..20: mol_type = other RNA
cgcttttggagctataattt

SEQ ID NO: 31717 - RNA, 20 nt, synthetic construct
  source 1..20: mol_type = other RNA
cgctttttatggaaacatgg

SEQ ID NO: 31718 - RNA, 20 nt, synthetic construct
  source 1..20: mol_type = other RNA
cggaaaaacattctacagta

SEQ ID NO: 31719 - RNA, 20 nt, synthetic construct
  source 1..20: mol_type = other RNA
cggaaaacattattttcttt

SEQ ID NO: 31720 - RNA, 20 nt, synthetic construct
  source 1..20: mol_type = other RNA
cggaaaatgcttaacaagaa

SEQ ID NO: 31721 - RNA, 20 nt, synthetic construct
  source 1..20: mol_type = other RNA
cggaaactttatacctgttg

SEQ ID NO: 31722 - RNA, 20 nt, synthetic construct
  source 1..20: mol_type = other RNA
cggaaatataaaaagcctct

SEQ ID NO: 31723 - RNA, 20 nt, synthetic construct
  source 1..20: mol_type = other RNA
cggaaatataacattaccaa

SEQ ID NO: 31724 - RNA, 20 nt, synthetic construct
  source 1..20: mol_type = other RNA
cggaaatgagtgagccacag

SEQ ID NO: 31725 - RNA, 20 nt, synthetic construct
  source 1..20: mol_type = other RNA
cggaacaggaaaaggacatt

SEQ ID NO: 31726 - RNA, 20 nt, synthetic construct
  source 1..20: mol_type = other RNA
cggaacaggctcaatacctg

SEQ ID NO: 31727 - RNA, 20 nt, synthetic construct
  source 1..20: mol_type = other RNA
cggaactcctgtatgccgct

SEQ ID NO: 31728 - RNA, 20 nt, synthetic construct
  source 1..20: mol_type = other RNA
cggaacttgagtttgttctg

SEQ ID NO: 31729 - RNA, 20 nt, synthetic construct
  source 1..20: mol_type = other RNA
cggaagactcatacttcctg

SEQ ID NO: 31730 - RNA, 20 nt, synthetic construct
  source 1..20: mol_type = other RNA
cggaagctgggctagagcca

SEQ ID NO: 31731 - RNA, 20 nt, synthetic construct
  source 1..20: mol_type = other RNA
cggaaggaatgtgcttccta

SEQ ID NO: 31732 - RNA, 20 nt, synthetic construct
  source 1..20: mol_type = other RNA
cggaaggattgcctaacacc

SEQ ID NO: 31733 - RNA, 20 nt, synthetic construct
  source 1..20: mol_type = other RNA
cggaaggcggaagttgcagt

SEQ ID NO: 31734 - RNA, 20 nt, synthetic construct
  source 1..20: mol_type = other RNA
cggaagttgcagtgagccca

SEQ ID NO: 31735 - RNA, 20 nt, synthetic construct
  source 1..20: mol_type = other RNA
cggaatcttaccctgttgac

SEQ ID NO: 31736 - RNA, 20 nt, synthetic construct
  source 1..20: mol_type = other RNA
cggaatgaagcaggccttcg

SEQ ID NO: 31737 - RNA, 20 nt, synthetic construct
  source 1..20: mol_type = other RNA
cggaatgactatagaaattt

SEQ ID NO: 31738 - RNA, 20 nt, synthetic construct
  source 1..20: mol_type = other RNA
cggaatgattccacttatat

SEQ ID NO: 31739 - RNA, 20 nt, synthetic construct
  source 1..20: mol_type = other RNA
cggaatgcccctttgagcag

SEQ ID NO: 31740 - RNA, 20 nt, synthetic construct
  source 1..20: mol_type = other RNA
cggacatttttccaaagata

SEQ ID NO: 31741 - RNA, 20 nt, synthetic construct
  source 1..20: mol_type = other RNA
cggaccccgtacgctccctc

SEQ ID NO: 31742 - RNA, 20 nt, synthetic construct
  source 1..20: mol_type = other RNA
cggacgcaggcaaacagcgc

SEQ ID NO: 31743 - RNA, 20 nt, synthetic construct
  source 1..20: mol_type = other RNA
cggacgcgcattttttaagt

SEQ ID NO: 31744 - RNA, 20 nt, synthetic construct
  source 1..20: mol_type = other RNA
cggactccggcgggagagga

SEQ ID NO: 31745 - RNA, 20 nt, synthetic construct
  source 1..20: mol_type = other RNA
cggacttggcacaggagagc

SEQ ID NO: 31746 - RNA, 20 nt, synthetic construct
  source 1..20: mol_type = other RNA
cggagaggtgaactattaga

SEQ ID NO: 31747 - RNA, 20 nt, synthetic construct
  source 1..20: mol_type = other RNA
cggagcgggcagccttggag

SEQ ID NO: 31748 - RNA, 20 nt, synthetic construct
  source 1..20: mol_type = other RNA
cggaggatgaggggctgagc

SEQ ID NO: 31749 - RNA, 20 nt, synthetic construct
  source 1..20: mol_type = other RNA
cggaggttgcggtgacgtga

SEQ ID NO: 31750 - RNA, 20 nt, synthetic construct
  source 1..20: mol_type = other RNA
cggagtagctgggattacac

SEQ ID NO: 31751 - RNA, 20 nt, synthetic construct
  source 1..20: mol_type = other RNA
cggagtccgcggctgggctt

SEQ ID NO: 31752 - RNA, 20 nt, synthetic construct
  source 1..20: mol_type = other RNA
cggataaggaagagtttata

SEQ ID NO: 31753 - RNA, 20 nt, synthetic construct
  source 1..20: mol_type = other RNA
cggatatttactaagaagtg

SEQ ID NO: 31754 - RNA, 20 nt, synthetic construct
  source 1..20: mol_type = other RNA
cggatgattctaatgtgcaa

SEQ ID NO: 31755 - RNA, 20 nt, synthetic construct
  source 1..20: mol_type = other RNA
cggatgccggtaatcacagc

SEQ ID NO: 31756 - RNA, 20 nt, synthetic construct
  source 1..20: mol_type = other RNA
cggattcctttcaaagagac

SEQ ID NO: 31757 - RNA, 20 nt, synthetic construct
  source 1..20: mol_type = other RNA
cggattggaaaactaggtat

SEQ ID NO: 31758 - RNA, 20 nt, synthetic construct
  source 1..20: mol_type = other RNA
cggatttaagagaggaagtg

SEQ ID NO: 31759 - RNA, 20 nt, synthetic construct
  source 1..20: mol_type = other RNA
cggcacagctctcatgagtc

SEQ ID NO: 31760 - RNA, 20 nt, synthetic construct
  source 1..20: mol_type = other RNA
cggcacttggtaagctgtga

SEQ ID NO: 31761 - RNA, 20 nt, synthetic construct
  source 1..20: mol_type = other RNA
cggcagagggagcagcgggc

SEQ ID NO: 31762 - RNA, 20 nt, synthetic construct
  source 1..20: mol_type = other RNA
cggcaggcattgtgctcagt

SEQ ID NO: 31763 - RNA, 20 nt, synthetic construct
  source 1..20: mol_type = other RNA
cggcagggatgctgcgagcc

SEQ ID NO: 31764 - RNA, 20 nt, synthetic construct
  source 1..20: mol_type = other RNA
cggcatacaggagttccgat

SEQ ID NO: 31765 - RNA, 20 nt, synthetic construct
  source 1..20: mol_type = other RNA
cggcatatgtcactgtaaga

SEQ ID NO: 31766 - RNA, 20 nt, synthetic construct
  source 1..20: mol_type = other RNA
cggcatccgccaccacgcct

SEQ ID NO: 31767 - RNA, 20 nt, synthetic construct
  source 1..20: mol_type = other RNA
cggcatgcctctcccaccat

SEQ ID NO: 31768 - RNA, 20 nt, synthetic construct
  source 1..20: mol_type = other RNA
cggccaaatatccatgtttt

SEQ ID NO: 31769 - RNA, 20 nt, synthetic construct
  source 1..20: mol_type = other RNA
cggccaaccattactcttct

SEQ ID NO: 31770 - RNA, 20 nt, synthetic construct
  source 1..20: mol_type = other RNA
cggccaagatctgtttttca

SEQ ID NO: 31771 - RNA, 20 nt, synthetic construct
  source 1..20: mol_type = other RNA
cggccacagcagggctcctc

SEQ ID NO: 31772 - RNA, 20 nt, synthetic construct
  source 1..20: mol_type = other RNA
cggccagacattttatttat

SEQ ID NO: 31773 - RNA, 20 nt, synthetic construct
  source 1..20: mol_type = other RNA
cggcccagattcctttttta

SEQ ID NO: 31774 - RNA, 20 nt, synthetic construct
  source 1..20: mol_type = other RNA
cggcccatgacatgtgtttt

SEQ ID NO: 31775 - RNA, 20 nt, synthetic construct
  source 1..20: mol_type = other RNA
cggcccgttatttttatcat

SEQ ID NO: 31776 - RNA, 20 nt, synthetic construct
  source 1..20: mol_type = other RNA
cggccctgccgcttcgcctt

SEQ ID NO: 31777 - RNA, 20 nt, synthetic construct
  source 1..20: mol_type = other RNA
cggccgacccagcccccaac

SEQ ID NO: 31778 - RNA, 20 nt, synthetic construct
  source 1..20: mol_type = other RNA
cggccgagaaatcggaactc

SEQ ID NO: 31779 - RNA, 20 nt, synthetic construct
  source 1..20: mol_type = other RNA
cggccgatgcctgtgctttt

SEQ ID NO: 31780 - RNA, 20 nt, synthetic construct
  source 1..20: mol_type = other RNA
cggcctcagcctcccgagta

SEQ ID NO: 31781 - RNA, 20 nt, synthetic construct
  source 1..20: mol_type = other RNA
cggcctctactgactccctt

SEQ ID NO: 31782 - RNA, 20 nt, synthetic construct
  source 1..20: mol_type = other RNA
cggcctttgcctctccaggg

SEQ ID NO: 31783 - RNA, 20 nt, synthetic construct
  source 1..20: mol_type = other RNA
cggcgagcttgatctttact

SEQ ID NO: 31784 - RNA, 20 nt, synthetic construct
  source 1..20: mol_type = other RNA
cggcggctgaggcagcccga

SEQ ID NO: 31785 - RNA, 20 nt, synthetic construct
  source 1..20: mol_type = other RNA
cggcgggagaggagcgccct

SEQ ID NO: 31786 - RNA, 20 nt, synthetic construct
  source 1..20: mol_type = other RNA
cggcgggcttcgcctttgtt

SEQ ID NO: 31787 - RNA, 20 nt, synthetic construct
  source 1..20: mol_type = other RNA
cggcgtttcgccatgttggc

SEQ ID NO: 31788 - RNA, 20 nt, synthetic construct
  source 1..20: mol_type = other RNA
cggctaagatgaggtctcag

SEQ ID NO: 31789 - RNA, 20 nt, synthetic construct
  source 1..20: mol_type = other RNA
cggctaattaaacaaacatt

SEQ ID NO: 31790 - RNA, 20 nt, synthetic construct
  source 1..20: mol_type = other RNA
cggctcaggcctgttgtgag

SEQ ID NO: 31791 - RNA, 20 nt, synthetic construct
  source 1..20: mol_type = other RNA
cggctccgggcctcccacct

SEQ ID NO: 31792 - RNA, 20 nt, synthetic construct
  source 1..20: mol_type = other RNA
cggctctgcggcgggtctgg

SEQ ID NO: 31793 - RNA, 20 nt, synthetic construct
  source 1..20: mol_type = other RNA
cggctctgtcacccttgtaa

SEQ ID NO: 31794 - RNA, 20 nt, synthetic construct
  source 1..20: mol_type = other RNA
cggctctgtgctgagatggt

SEQ ID NO: 31795 - RNA, 20 nt, synthetic construct
  source 1..20: mol_type = other RNA
cggctgaggcagcccgacct

SEQ ID NO: 31796 - RNA, 20 nt, synthetic construct
  source 1..20: mol_type = other RNA
cggctgattataaccttgaa

SEQ ID NO: 31797 - RNA, 20 nt, synthetic construct
  source 1..20: mol_type = other RNA
cggctggatcgcttgaggtc

SEQ ID NO: 31798 - RNA, 20 nt, synthetic construct
  source 1..20: mol_type = other RNA
cggctgggctttctccaggg

SEQ ID NO: 31799 - RNA, 20 nt, synthetic construct
  source 1..20: mol_type = other RNA
cggctgttaggtattatttt

SEQ ID NO: 31800 - RNA, 20 nt, synthetic construct
  source 1..20: mol_type = other RNA
cggcttaacacctttgtatt

SEQ ID NO: 31801 - RNA, 20 nt, synthetic construct
  source 1..20: mol_type = other RNA
cggcttactgcaacctccgt

SEQ ID NO: 31802 - RNA, 20 nt, synthetic construct
  source 1..20: mol_type = other RNA
cggcttgattagcttcctca

SEQ ID NO: 31803 - RNA, 20 nt, synthetic construct
  source 1..20: mol_type = other RNA
cggctttatgagacacacga

SEQ ID NO: 31804 - RNA, 20 nt, synthetic construct
  source 1..20: mol_type = other RNA
cggctttgtggagtggaggg

SEQ ID NO: 31805 - RNA, 20 nt, synthetic construct
  source 1..20: mol_type = other RNA
cgggaaaaaataatatgaga

SEQ ID NO: 31806 - RNA, 20 nt, synthetic construct
  source 1..20: mol_type = other RNA
cgggaacatgacatgtattt

SEQ ID NO: 31807 - RNA, 20 nt, synthetic construct
  source 1..20: mol_type = other RNA
cgggacaagagtctgcagac

SEQ ID NO: 31808 - RNA, 20 nt, synthetic construct
  source 1..20: mol_type = other RNA
cgggacaatgccagggcgct

SEQ ID NO: 31809 - RNA, 20 nt, synthetic construct
  source 1..20: mol_type = other RNA
cgggacttggaagtgaagtc

SEQ ID NO: 31810 - RNA, 20 nt, synthetic construct
  source 1..20: mol_type = other RNA
cgggagacaaaggttgcagt

SEQ ID NO: 31811 - RNA, 20 nt, synthetic construct
  source 1..20: mol_type = other RNA
cgggagaggagcgccctggc

SEQ ID NO: 31812 - RNA, 20 nt, synthetic construct
  source 1..20: mol_type = other RNA
cgggaggagccaagtaaaag

SEQ ID NO: 31813 - RNA, 20 nt, synthetic construct
  source 1..20: mol_type = other RNA
cgggaggcagatgttgcggt

SEQ ID NO: 31814 - RNA, 20 nt, synthetic construct
  source 1..20: mol_type = other RNA
cgggagtaacagacctctga

SEQ ID NO: 31815 - RNA, 20 nt, synthetic construct
  source 1..20: mol_type = other RNA
cgggatcctgtccaggcgcc

SEQ ID NO: 31816 - RNA, 20 nt, synthetic construct
  source 1..20: mol_type = other RNA
cgggattatttggaagagag

SEQ ID NO: 31817 - RNA, 20 nt, synthetic construct
  source 1..20: mol_type = other RNA
cgggatttacttctatatgt

SEQ ID NO: 31818 - RNA, 20 nt, synthetic construct
  source 1..20: mol_type = other RNA
cgggcaccttccctactcac

SEQ ID NO: 31819 - RNA, 20 nt, synthetic construct
  source 1..20: mol_type = other RNA
cgggcagccttggaggagcc

SEQ ID NO: 31820 - RNA, 20 nt, synthetic construct
  source 1..20: mol_type = other RNA
cgggcccagctcttttgtgt

SEQ ID NO: 31821 - RNA, 20 nt, synthetic construct
  source 1..20: mol_type = other RNA
cgggcctcccacctgcgagc

SEQ ID NO: 31822 - RNA, 20 nt, synthetic construct
  source 1..20: mol_type = other RNA
cgggcctggttagggagact

SEQ ID NO: 31823 - RNA, 20 nt, synthetic construct
  source 1..20: mol_type = other RNA
cgggcttcgcctttgttgcc

SEQ ID NO: 31824 - RNA, 20 nt, synthetic construct
  source 1..20: mol_type = other RNA
cgggcttggtatgcatcttg

SEQ ID NO: 31825 - RNA, 20 nt, synthetic construct
  source 1..20: mol_type = other RNA
cggggactgcaacagatctg

SEQ ID NO: 31826 - RNA, 20 nt, synthetic construct
  source 1..20: mol_type = other RNA
cggggagcttttgaaactga

SEQ ID NO: 31827 - RNA, 20 nt, synthetic construct
  source 1..20: mol_type = other RNA
cggggatgctcagggtgcga

SEQ ID NO: 31828 - RNA, 20 nt, synthetic construct
  source 1..20: mol_type = other RNA
cggggatggttgcacaatgt

SEQ ID NO: 31829 - RNA, 20 nt, synthetic construct
  source 1..20: mol_type = other RNA
cggggcagagaactgactga

SEQ ID NO: 31830 - RNA, 20 nt, synthetic construct
  source 1..20: mol_type = other RNA
cggggccgcccctggagaaa

SEQ ID NO: 31831 - RNA, 20 nt, synthetic construct
  source 1..20: mol_type = other RNA
cggggcctacagtggttcca

SEQ ID NO: 31832 - RNA, 20 nt, synthetic construct
  source 1..20: mol_type = other RNA
cggggctcgcagcatccctg

SEQ ID NO: 31833 - RNA, 20 nt, synthetic construct
  source 1..20: mol_type = other RNA
cggggctgccactacttagc

SEQ ID NO: 31834 - RNA, 20 nt, synthetic construct
  source 1..20: mol_type = other RNA
cgggggagagcactggtttc

SEQ ID NO: 31835 - RNA, 20 nt, synthetic construct
  source 1..20: mol_type = other RNA
cggggtttcagcacaatact

SEQ ID NO: 31836 - RNA, 20 nt, synthetic construct
  source 1..20: mol_type = other RNA
cgggtaaaaagcctgcttca

SEQ ID NO: 31837 - RNA, 20 nt, synthetic construct
  source 1..20: mol_type = other RNA
cgggtaaaaataaatctaat

SEQ ID NO: 31838 - RNA, 20 nt, synthetic construct
  source 1..20: mol_type = other RNA
cgggtacacatcctaataca

SEQ ID NO: 31839 - RNA, 20 nt, synthetic construct
  source 1..20: mol_type = other RNA
cgggtccaggcagttctcct

SEQ ID NO: 31840 - RNA, 20 nt, synthetic construct
  source 1..20: mol_type = other RNA
cgggtcgcggacgcgcattt

SEQ ID NO: 31841 - RNA, 20 nt, synthetic construct
  source 1..20: mol_type = other RNA
cgggtggtagggagggggct

SEQ ID NO: 31842 - RNA, 20 nt, synthetic construct
  source 1..20: mol_type = other RNA
cgggtgtagtggtgtgtgac

SEQ ID NO: 31843 - RNA, 20 nt, synthetic construct
  source 1..20: mol_type = other RNA
cgggtgtcagaaaccatcgt

SEQ ID NO: 31844 - RNA, 20 nt, synthetic construct
  source 1..20: mol_type = other RNA
cgggtgtcagaattccatca

SEQ ID NO: 31845 - RNA, 20 nt, synthetic construct
  source 1..20: mol_type = other RNA
cgggttatacacacataagg

SEQ ID NO: 31846 - RNA, 20 nt, synthetic construct
  source 1..20: mol_type = other RNA
cgggttcaagccccagttct

SEQ ID NO: 31847 - RNA, 20 nt, synthetic construct
  source 1..20: mol_type = other RNA
cgggttgggggctgggtcgg

SEQ ID NO: 31848 - RNA, 20 nt, synthetic construct
  source 1..20: mol_type = other RNA
cgggtttaagcgattctcct

SEQ ID NO: 31849 - RNA, 20 nt, synthetic construct
  source 1..20: mol_type = other RNA
cgggtttcctcggtctacgg

SEQ ID NO: 31850 - RNA, 20 nt, synthetic construct
  source 1..20: mol_type = other RNA
cggtaatcacagctactcag

SEQ ID NO: 31851 - RNA, 20 nt, synthetic construct
  source 1..20: mol_type = other RNA
cggtatgtacccaatggatt

SEQ ID NO: 31852 - RNA, 20 nt, synthetic construct
  source 1..20: mol_type = other RNA
cggtatgttaataaccctgt

SEQ ID NO: 31853 - RNA, 20 nt, synthetic construct
  source 1..20: mol_type = other RNA
cggtcaacgcacccagagcg

SEQ ID NO: 31854 - RNA, 20 nt, synthetic construct
  source 1..20: mol_type = other RNA
cggtcattctggagtgtttt

SEQ ID NO: 31855 - RNA, 20 nt, synthetic construct
  source 1..20: mol_type = other RNA
cggtcgttggatttatcttt

SEQ ID NO: 31856 - RNA, 20 nt, synthetic construct
  source 1..20: mol_type = other RNA
cggtctacggacgcaggcaa

SEQ ID NO: 31857 - RNA, 20 nt, synthetic construct
  source 1..20: mol_type = other RNA
cggtctcaaaacaaacaaac

SEQ ID NO: 31858 - RNA, 20 nt, synthetic construct
  source 1..20: mol_type = other RNA
cggtctcacactgttgtcca

SEQ ID NO: 31859 - RNA, 20 nt, synthetic construct
  source 1..20: mol_type = other RNA
cggtctcagtttttaattta

SEQ ID NO: 31860 - RNA, 20 nt, synthetic construct
  source 1..20: mol_type = other RNA
cggtctgtatttctgctttg

SEQ ID NO: 31861 - RNA, 20 nt, synthetic construct
  source 1..20: mol_type = other RNA
cggtctttcctgatcagcac

SEQ ID NO: 31862 - RNA, 20 nt, synthetic construct
  source 1..20: mol_type = other RNA
cggtcttttagccaacaacc

SEQ ID NO: 31863 - RNA, 20 nt, synthetic construct
  source 1..20: mol_type = other RNA
cggtgaagaaccgactgaaa

SEQ ID NO: 31864 - RNA, 20 nt, synthetic construct
  source 1..20: mol_type = other RNA
cggtgacgtgagatcatgcc

SEQ ID NO: 31865 - RNA, 20 nt, synthetic construct
  source 1..20: mol_type = other RNA
cggtgccctacatatggcaa

SEQ ID NO: 31866 - RNA, 20 nt, synthetic construct
  source 1..20: mol_type = other RNA
cggtggcattaaggacatcc

SEQ ID NO: 31867 - RNA, 20 nt, synthetic construct
  source 1..20: mol_type = other RNA
cggtggggacagctcaatta

SEQ ID NO: 31868 - RNA, 20 nt, synthetic construct
  source 1..20: mol_type = other RNA
cggtgtcttattgttttgat

SEQ ID NO: 31869 - RNA, 20 nt, synthetic construct
  source 1..20: mol_type = other RNA
cggttccctgtagagatttt

SEQ ID NO: 31870 - RNA, 20 nt, synthetic construct
  source 1..20: mol_type = other RNA
cggttctcaggagcctagtc

SEQ ID NO: 31871 - RNA, 20 nt, synthetic construct
  source 1..20: mol_type = other RNA
cggttcttcaccgtgcaact

SEQ ID NO: 31872 - RNA, 20 nt, synthetic construct
  source 1..20: mol_type = other RNA
cggttgtatagcagtaaaat

SEQ ID NO: 31873 - RNA, 20 nt, synthetic construct
  source 1..20: mol_type = other RNA
cggttttctagttagtttgt

SEQ ID NO: 31874 - RNA, 20 nt, synthetic construct
  source 1..20: mol_type = other RNA
cgtaaaaagccatttatcag

SEQ ID NO: 31875 - RNA, 20 nt, synthetic construct
  source 1..20: mol_type = other RNA
cgtaaaacctcatctctact

SEQ ID NO: 31876 - RNA, 20 nt, synthetic construct
  source 1..20: mol_type = other RNA
cgtaaaagctaatctacttt

SEQ ID NO: 31877 - RNA, 20 nt, synthetic construct
  source 1..20: mol_type = other RNA
cgtaacctaaagttgaggtt

SEQ ID NO: 31878 - RNA, 20 nt, synthetic construct
  source 1..20: mol_type = other RNA
cgtaactccatcttcacgtg

SEQ ID NO: 31879 - RNA, 20 nt, synthetic construct
  source 1..20: mol_type = other RNA
cgtaacttcttttcttaaaa

SEQ ID NO: 31880 - RNA, 20 nt, synthetic construct
  source 1..20: mol_type = other RNA
cgtaagggtacagaactgct

SEQ ID NO: 31881 - RNA, 20 nt, synthetic construct
  source 1..20: mol_type = other RNA
cgtaatgcgatgatcaaaac

SEQ ID NO: 31882 - RNA, 20 nt, synthetic construct
  source 1..20: mol_type = other RNA
cgtacatgtagatatgggag

SEQ ID NO: 31883 - RNA, 20 nt, synthetic construct
  source 1..20: mol_type = other RNA
cgtacctttcgctatcagta

SEQ ID NO: 31884 - RNA, 20 nt, synthetic construct
  source 1..20: mol_type = other RNA
cgtacgctccctcgcgcggc

SEQ ID NO: 31885 - RNA, 20 nt, synthetic construct
  source 1..20: mol_type = other RNA
cgtactaggtatcacagtga

SEQ ID NO: 31886 - RNA, 20 nt, synthetic construct
  source 1..20: mol_type = other RNA
cgtactagtcagcacactct

SEQ ID NO: 31887 - RNA, 20 nt, synthetic construct
  source 1..20: mol_type = other RNA
cgtactgtgattacaattcc

SEQ ID NO: 31888 - RNA, 20 nt, synthetic construct
  source 1..20: mol_type = other RNA
cgtagaccgaggaaacccgc

SEQ ID NO: 31889 - RNA, 20 nt, synthetic construct
  source 1..20: mol_type = other RNA
cgtagcaggtttaggaagca

SEQ ID NO: 31890 - RNA, 20 nt, synthetic construct
  source 1..20: mol_type = other RNA
cgtagctgtcgctctcctgt

SEQ ID NO: 31891 - RNA, 20 nt, synthetic construct
  source 1..20: mol_type = other RNA
cgtagtatctcatgcttagg

SEQ ID NO: 31892 - RNA, 20 nt, synthetic construct
  source 1..20: mol_type = other RNA
cgtagttttttggtagatac

SEQ ID NO: 31893 - RNA, 20 nt, synthetic construct
  source 1..20: mol_type = other RNA
cgtatatgaaaagcccaatc

SEQ ID NO: 31894 - RNA, 20 nt, synthetic construct
  source 1..20: mol_type = other RNA
cgtatccagtggttttttgt

SEQ ID NO: 31895 - RNA, 20 nt, synthetic construct
  source 1..20: mol_type = other RNA
cgtatctgggaaaaaataag

SEQ ID NO: 31896 - RNA, 20 nt, synthetic construct
  source 1..20: mol_type = other RNA
cgtatcttttaacagatggt

SEQ ID NO: 31897 - RNA, 20 nt, synthetic construct
  source 1..20: mol_type = other RNA
cgtatgaataaactaacaaa

SEQ ID NO: 31898 - RNA, 20 nt, synthetic construct
  source 1..20: mol_type = other RNA
cgtatgcaacttactctcaa

SEQ ID NO: 31899 - RNA, 20 nt, synthetic construct
  source 1..20: mol_type = other RNA
cgtatggaagatgggacttc

SEQ ID NO: 31900 - RNA, 20 nt, synthetic construct
  source 1..20: mol_type = other RNA
cgtatttatattttggtaga

SEQ ID NO: 31901 - RNA, 20 nt, synthetic construct
  source 1..20: mol_type = other RNA
cgtatttatcatgtcttctt

SEQ ID NO: 31902 - RNA, 20 nt, synthetic construct
  source 1..20: mol_type = other RNA
cgtcaaaagatgctggtgga

SEQ ID NO: 31903 - RNA, 20 nt, synthetic construct
  source 1..20: mol_type = other RNA
cgtcaaggggagaggcctca

SEQ ID NO: 31904 - RNA, 20 nt, synthetic construct
  source 1..20: mol_type = other RNA
cgtcaccgcaacctccgcct

SEQ ID NO: 31905 - RNA, 20 nt, synthetic construct
  source 1..20: mol_type = other RNA
cgtcagagcagcactgatgt

SEQ ID NO: 31906 - RNA, 20 nt, synthetic construct
  source 1..20: mol_type = other RNA
cgtcatctataaggtaatga

SEQ ID NO: 31907 - RNA, 20 nt, synthetic construct
  source 1..20: mol_type = other RNA
cgtccaatttctttggctgt

SEQ ID NO: 31908 - RNA, 20 nt, synthetic construct
  source 1..20: mol_type = other RNA
cgtccacctggcaacaaagg

SEQ ID NO: 31909 - RNA, 20 nt, synthetic construct
  source 1..20: mol_type = other RNA
cgtccatcaacagcagaaca

SEQ ID NO: 31910 - RNA, 20 nt, synthetic construct
  source 1..20: mol_type = other RNA
cgtcccccatcccctttacc

SEQ ID NO: 31911 - RNA, 20 nt, synthetic construct
  source 1..20: mol_type = other RNA
cgtccctaaacactgtagtt

SEQ ID NO: 31912 - RNA, 20 nt, synthetic construct
  source 1..20: mol_type = other RNA
cgtccctattttctacaggt

SEQ ID NO: 31913 - RNA, 20 nt, synthetic construct
  source 1..20: mol_type = other RNA
cgtccctgcttggcgcagtg

SEQ ID NO: 31914 - RNA, 20 nt, synthetic construct
  source 1..20: mol_type = other RNA
cgtccgcctcggccgaccca

SEQ ID NO: 31915 - RNA, 20 nt, synthetic construct
  source 1..20: mol_type = other RNA
cgtccggtcgttggatttat

SEQ ID NO: 31916 - RNA, 20 nt, synthetic construct
  source 1..20: mol_type = other RNA
cgtccgtagaccgaggaaac

SEQ ID NO: 31917 - RNA, 20 nt, synthetic construct
  source 1..20: mol_type = other RNA
cgtcctcactgtgataccta

SEQ ID NO: 31918 - RNA, 20 nt, synthetic construct
  source 1..20: mol_type = other RNA
cgtcctcttcgggtgtcaga

SEQ ID NO: 31919 - RNA, 20 nt, synthetic construct
  source 1..20: mol_type = other RNA
cgtcggtatgttaataaccc

SEQ ID NO: 31920 - RNA, 20 nt, synthetic construct
  source 1..20: mol_type = other RNA
cgtcgtacctttcgctatca

SEQ ID NO: 31921 - RNA, 20 nt, synthetic construct
  source 1..20: mol_type = other RNA
cgtcgtcccccatccccttt

SEQ ID NO: 31922 - RNA, 20 nt, synthetic construct
  source 1..20: mol_type = other RNA
cgtctagccacttcctatta

SEQ ID NO: 31923 - RNA, 20 nt, synthetic construct
  source 1..20: mol_type = other RNA
cgtctcaagattgtgtgatt

SEQ ID NO: 31924 - RNA, 20 nt, synthetic construct
  source 1..20: mol_type = other RNA
cgtctccctcggccacagca

SEQ ID NO: 31925 - RNA, 20 nt, synthetic construct
  source 1..20: mol_type = other RNA
cgtctctgcaaaaaatgttt

SEQ ID NO: 31926 - RNA, 20 nt, synthetic construct
  source 1..20: mol_type = other RNA
cgtctgtgattatcagggat

SEQ ID NO: 31927 - RNA, 20 nt, synthetic construct
  source 1..20: mol_type = other RNA
cgtctgtggtctcagctcct

SEQ ID NO: 31928 - RNA, 20 nt, synthetic construct
  source 1..20: mol_type = other RNA
cgtcttgtcaataatttgga

SEQ ID NO: 31929 - RNA, 20 nt, synthetic construct
  source 1..20: mol_type = other RNA
cgtctttaaatttcaaacaa

SEQ ID NO: 31930 - RNA, 20 nt, synthetic construct
  source 1..20: mol_type = other RNA
cgtgaagatggagttacgct

SEQ ID NO: 31931 - RNA, 20 nt, synthetic construct
  source 1..20: mol_type = other RNA
cgtgaagctacagactaata

SEQ ID NO: 31932 - RNA, 20 nt, synthetic construct
  source 1..20: mol_type = other RNA
cgtgaagtctttatttttat

SEQ ID NO: 31933 - RNA, 20 nt, synthetic construct
  source 1..20: mol_type = other RNA
cgtgaatctgttcctgggtt

SEQ ID NO: 31934 - RNA, 20 nt, synthetic construct
  source 1..20: mol_type = other RNA
cgtgaatttggtattcttat

SEQ ID NO: 31935 - RNA, 20 nt, synthetic construct
  source 1..20: mol_type = other RNA
cgtgacagaacaaataacac

SEQ ID NO: 31936 - RNA, 20 nt, synthetic construct
  source 1..20: mol_type = other RNA
cgtgagactattatgagcag

SEQ ID NO: 31937 - RNA, 20 nt, synthetic construct
  source 1..20: mol_type = other RNA
cgtgagatcatgccactcca

SEQ ID NO: 31938 - RNA, 20 nt, synthetic construct
  source 1..20: mol_type = other RNA
cgtgagccaccacgtccggt

SEQ ID NO: 31939 - RNA, 20 nt, synthetic construct
  source 1..20: mol_type = other RNA
cgtgagccaccactcccggc

SEQ ID NO: 31940 - RNA, 20 nt, synthetic construct
  source 1..20: mol_type = other RNA
cgtgagccaccgcgcctggt

SEQ ID NO: 31941 - RNA, 20 nt, synthetic construct
  source 1..20: mol_type = other RNA
cgtgagccacctcatccggt

SEQ ID NO: 31942 - RNA, 20 nt, synthetic construct
  source 1..20: mol_type = other RNA
cgtgagccatcgcgcccagc

SEQ ID NO: 31943 - RNA, 20 nt, synthetic construct
  source 1..20: mol_type = other RNA
cgtgagcctccacacctggc

SEQ ID NO: 31944 - RNA, 20 nt, synthetic construct
  source 1..20: mol_type = other RNA
cgtgagctggaagtaaggat

SEQ ID NO: 31945 - RNA, 20 nt, synthetic construct
  source 1..20: mol_type = other RNA
cgtgagggtttcagtgagta

SEQ ID NO: 31946 - RNA, 20 nt, synthetic construct
  source 1..20: mol_type = other RNA
cgtgatagtcttccaattgc

SEQ ID NO: 31947 - RNA, 20 nt, synthetic construct
  source 1..20: mol_type = other RNA
cgtgcaaactaccaagactg

SEQ ID NO: 31948 - RNA, 20 nt, synthetic construct
  source 1..20: mol_type = other RNA
cgtgcaactagagaaagcat

SEQ ID NO: 31949 - RNA, 20 nt, synthetic construct
  source 1..20: mol_type = other RNA
cgtgcacacccagttatctc

SEQ ID NO: 31950 - RNA, 20 nt, synthetic construct
  source 1..20: mol_type = other RNA
cgtgcaccttacattgtaat

SEQ ID NO: 31951 - RNA, 20 nt, synthetic construct
  source 1..20: mol_type = other RNA
cgtgcagagcaggggtgggg

SEQ ID NO: 31952 - RNA, 20 nt, synthetic construct
  source 1..20: mol_type = other RNA
cgtgcatgcctctgttacag

SEQ ID NO: 31953 - RNA, 20 nt, synthetic construct
  source 1..20: mol_type = other RNA
cgtgcatgtctgcaggagcc

SEQ ID NO: 31954 - RNA, 20 nt, synthetic construct
  source 1..20: mol_type = other RNA
cgtgcattcatactgaaggc

SEQ ID NO: 31955 - RNA, 20 nt, synthetic construct
  source 1..20: mol_type = other RNA
cgtgcccggccagacatttt

SEQ ID NO: 31956 - RNA, 20 nt, synthetic construct
  source 1..20: mol_type = other RNA
cgtgccgggcttggtatgca

SEQ ID NO: 31957 - RNA, 20 nt, synthetic construct
  source 1..20: mol_type = other RNA
cgtgcttgctctgcggcagg

SEQ ID NO: 31958 - RNA, 20 nt, synthetic construct
  source 1..20: mol_type = other RNA
cgtgctttccttattgagaa

SEQ ID NO: 31959 - RNA, 20 nt, synthetic construct
  source 1..20: mol_type = other RNA
cgtggaaatacttgaacatt

SEQ ID NO: 31960 - RNA, 20 nt, synthetic construct
  source 1..20: mol_type = other RNA
cgtggaaggccttctcctcc

SEQ ID NO: 31961 - RNA, 20 nt, synthetic construct
  source 1..20: mol_type = other RNA
cgtggaatggtcaatttcat

SEQ ID NO: 31962 - RNA, 20 nt, synthetic construct
  source 1..20: mol_type = other RNA
cgtggagcggtgtcttattg

SEQ ID NO: 31963 - RNA, 20 nt, synthetic construct
  source 1..20: mol_type = other RNA
cgtggagtgcaatggggcaa

SEQ ID NO: 31964 - RNA, 20 nt, synthetic construct
  source 1..20: mol_type = other RNA
cgtggatgtgtgcacaacac

SEQ ID NO: 31965 - RNA, 20 nt, synthetic construct
  source 1..20: mol_type = other RNA
cgtggcctcaagcagtcctg

SEQ ID NO: 31966 - RNA, 20 nt, synthetic construct
  source 1..20: mol_type = other RNA
cgtggcgctccctctgtgtg

SEQ ID NO: 31967 - RNA, 20 nt, synthetic construct
  source 1..20: mol_type = other RNA
cgtggctgtcaaaaatgtgt

SEQ ID NO: 31968 - RNA, 20 nt, synthetic construct
  source 1..20: mol_type = other RNA
cgtgggcaacacaatgagac

SEQ ID NO: 31969 - RNA, 20 nt, synthetic construct
  source 1..20: mol_type = other RNA
cgtgggggctcacatctgta

SEQ ID NO: 31970 - RNA, 20 nt, synthetic construct
  source 1..20: mol_type = other RNA
cgtggggggagggaggggga

SEQ ID NO: 31971 - RNA, 20 nt, synthetic construct
  source 1..20: mol_type = other RNA
cgtggtggcggatgccggta

SEQ ID NO: 31972 - RNA, 20 nt, synthetic construct
  source 1..20: mol_type = other RNA
cgtggttatagccataagag

SEQ ID NO: 31973 - RNA, 20 nt, synthetic construct
  source 1..20: mol_type = other RNA
cgtggttcacacctgtagtc

SEQ ID NO: 31974 - RNA, 20 nt, synthetic construct
  source 1..20: mol_type = other RNA
cgtggtttattcatataatg

SEQ ID NO: 31975 - RNA, 20 nt, synthetic construct
  source 1..20: mol_type = other RNA
cgtgtaaactgttggaaaaa

SEQ ID NO: 31976 - RNA, 20 nt, synthetic construct
  source 1..20: mol_type = other RNA
cgtgtacataaaataaaaac

SEQ ID NO: 31977 - RNA, 20 nt, synthetic construct
  source 1..20: mol_type = other RNA
cgtgtactgaaaccagtgct

SEQ ID NO: 31978 - RNA, 20 nt, synthetic construct
  source 1..20: mol_type = other RNA
cgtgtatactgggtgtgatg

SEQ ID NO: 31979 - RNA, 20 nt, synthetic construct
  source 1..20: mol_type = other RNA
cgtgtatgatttctaggccc

SEQ ID NO: 31980 - RNA, 20 nt, synthetic construct
  source 1..20: mol_type = other RNA
cgtgtattgagtgtagctgt

SEQ ID NO: 31981 - RNA, 20 nt, synthetic construct
  source 1..20: mol_type = other RNA
cgtgtgaaaccaagcaagta

SEQ ID NO: 31982 - RNA, 20 nt, synthetic construct
  source 1..20: mol_type = other RNA
cgtgtgacaaaaagtagggg

SEQ ID NO: 31983 - RNA, 20 nt, synthetic construct
  source 1..20: mol_type = other RNA
cgtgtgagctctagccttgt

SEQ ID NO: 31984 - RNA, 20 nt, synthetic construct
  source 1..20: mol_type = other RNA
cgtgtgcatgaccctgctat

SEQ ID NO: 31985 - RNA, 20 nt, synthetic construct
  source 1..20: mol_type = other RNA
cgtgtgcccaggctgactta

SEQ ID NO: 31986 - RNA, 20 nt, synthetic construct
  source 1..20: mol_type = other RNA
cgtgtgtctcataaagccgg

SEQ ID NO: 31987 - RNA, 20 nt, synthetic construct
  source 1..20: mol_type = other RNA
cgtgtgtggagtggggcacc

SEQ ID NO: 31988 - RNA, 20 nt, synthetic construct
  source 1..20: mol_type = other RNA
cgtgtgtgtaagcacacatg

SEQ ID NO: 31989 - RNA, 20 nt, synthetic construct
  source 1..20: mol_type = other RNA
cgtgtgtttagaataataca

SEQ ID NO: 31990 - RNA, 20 nt, synthetic construct
  source 1..20: mol_type = other RNA
cgtgtgttttgttgttgttg

SEQ ID NO: 31991 - RNA, 20 nt, synthetic construct
  source 1..20: mol_type = other RNA
cgtgttattttaatcgaatc

SEQ ID NO: 31992 - RNA, 20 nt, synthetic construct
  source 1..20: mol_type = other RNA
cgttaaaggaaaagagatct

SEQ ID NO: 31993 - RNA, 20 nt, synthetic construct
  source 1..20: mol_type = other RNA
cgttaactatttctctttaa

SEQ ID NO: 31994 - RNA, 20 nt, synthetic construct
  source 1..20: mol_type = other RNA
cgttaactgtattgcaaact

SEQ ID NO: 31995 - RNA, 20 nt, synthetic construct
  source 1..20: mol_type = other RNA
cgttaatacttgtgtagcgg

SEQ ID NO: 31996 - RNA, 20 nt, synthetic construct
  source 1..20: mol_type = other RNA
cgttacaaaatatgtaatga

SEQ ID NO: 31997 - RNA, 20 nt, synthetic construct
  source 1..20: mol_type = other RNA
cgttaccctctggaatgccc

SEQ ID NO: 31998 - RNA, 20 nt, synthetic construct
  source 1..20: mol_type = other RNA
cgttagcatcaccatcatca

SEQ ID NO: 31999 - RNA, 20 nt, synthetic construct
  source 1..20: mol_type = other RNA
cgttagtattttcacatatt

SEQ ID NO: 32000 - RNA, 20 nt, synthetic construct
  source 1..20: mol_type = other RNA
cgttatatcctcagggtagg

SEQ ID NO: 32001 - RNA, 20 nt, synthetic construct
  source 1..20: mol_type = other RNA
cgttcaaaacatcatctaat

SEQ ID NO: 32002 - RNA, 20 nt, synthetic construct
  source 1..20: mol_type = other RNA
cgttcacactcgcactccac

SEQ ID NO: 32003 - RNA, 20 nt, synthetic construct
  source 1..20: mol_type = other RNA
cgttcagataacaaagggtt

SEQ ID NO: 32004 - RNA, 20 nt, synthetic construct
  source 1..20: mol_type = other RNA
cgttcagtttagtaaatctt

SEQ ID NO: 32005 - RNA, 20 nt, synthetic construct
  source 1..20: mol_type = other RNA
cgttcatccaaattattgac

SEQ ID NO: 32006 - RNA, 20 nt, synthetic construct
  source 1..20: mol_type = other RNA
cgttcatgttcaaggtgttc

SEQ ID NO: 32007 - RNA, 20 nt, synthetic construct
  source 1..20: mol_type = other RNA
cgttccagcagggtaaagtc

SEQ ID NO: 32008 - RNA, 20 nt, synthetic construct
  source 1..20: mol_type = other RNA
cgttccatcagagaggcttt

SEQ ID NO: 32009 - RNA, 20 nt, synthetic construct
  source 1..20: mol_type = other RNA
cgttgaagtctttggcccat

SEQ ID NO: 32010 - RNA, 20 nt, synthetic construct
  source 1..20: mol_type = other RNA
cgttgaccgctttcgtgagg

SEQ ID NO: 32011 - RNA, 20 nt, synthetic construct
  source 1..20: mol_type = other RNA
cgttgagccatcatgcctgg

SEQ ID NO: 32012 - RNA, 20 nt, synthetic construct
  source 1..20: mol_type = other RNA
cgttgagtacctctgggatg

SEQ ID NO: 32013 - RNA, 20 nt, synthetic construct
  source 1..20: mol_type = other RNA
cgttgctgcatagtactcca

SEQ ID NO: 32014 - RNA, 20 nt, synthetic construct
  source 1..20: mol_type = other RNA
cgttggagacagcctaaacc

SEQ ID NO: 32015 - RNA, 20 nt, synthetic construct
  source 1..20: mol_type = other RNA
cgttggatttatctttctag

SEQ ID NO: 32016 - RNA, 20 nt, synthetic construct
  source 1..20: mol_type = other RNA
cgttgtgaaatataatgtta

SEQ ID NO: 32017 - RNA, 20 nt, synthetic construct
  source 1..20: mol_type = other RNA
cgttgttcagttgaaaagta

SEQ ID NO: 32018 - RNA, 20 nt, synthetic construct
  source 1..20: mol_type = other RNA
cgtttagatgaatgatttaa

SEQ ID NO: 32019 - RNA, 20 nt, synthetic construct
  source 1..20: mol_type = other RNA
cgtttatattccttttattc

SEQ ID NO: 32020 - RNA, 20 nt, synthetic construct
  source 1..20: mol_type = other RNA
cgtttatctacagaggattt

SEQ ID NO: 32021 - RNA, 20 nt, synthetic construct
  source 1..20: mol_type = other RNA
cgtttatgcatttattagta

SEQ ID NO: 32022 - RNA, 20 nt, synthetic construct
  source 1..20: mol_type = other RNA
cgtttattagaactagaact

SEQ ID NO: 32023 - RNA, 20 nt, synthetic construct
  source 1..20: mol_type = other RNA
cgtttatttcttctccctct

SEQ ID NO: 32024 - RNA, 20 nt, synthetic construct
  source 1..20: mol_type = other RNA
cgtttcaatattaagagtct

SEQ ID NO: 32025 - RNA, 20 nt, synthetic construct
  source 1..20: mol_type = other RNA
cgtttcagattgcttgagag

SEQ ID NO: 32026 - RNA, 20 nt, synthetic construct
  source 1..20: mol_type = other RNA
cgtttgaggcttttcatagt

SEQ ID NO: 32027 - RNA, 20 nt, synthetic construct
  source 1..20: mol_type = other RNA
cgtttgagttgtttccactt

SEQ ID NO: 32028 - RNA, 20 nt, synthetic construct
  source 1..20: mol_type = other RNA
cgtttgatctggtcacaaac

SEQ ID NO: 32029 - RNA, 20 nt, synthetic construct
  source 1..20: mol_type = other RNA
cgtttgctttggagtgagag

SEQ ID NO: 32030 - RNA, 20 nt, synthetic construct
  source 1..20: mol_type = other RNA
cgtttggtgactgaattccc

SEQ ID NO: 32031 - RNA, 20 nt, synthetic construct
  source 1..20: mol_type = other RNA
cgtttgttagatctgggata

SEQ ID NO: 32032 - RNA, 20 nt, synthetic construct
  source 1..20: mol_type = other RNA
cgttttcaacaaaggttgaa

SEQ ID NO: 32033 - RNA, 20 nt, synthetic construct
  source 1..20: mol_type = other RNA
cgttttgcaagatgcataag

SEQ ID NO: 32034 - RNA, 20 nt, synthetic construct
  source 1..20: mol_type = other RNA
cgtttttagaaatttaccca

SEQ ID NO: 32035 - RNA, 20 nt, synthetic construct
  source 1..20: mol_type = other RNA
cgtttttcaggttcaagcga

SEQ ID NO: 32036 - RNA, 20 nt, synthetic construct
  source 1..20: mol_type = other RNA
cgttttttccttcatttaac

SEQ ID NO: 32037 - RNA, 20 nt, synthetic construct
  source 1..20: mol_type = other RNA
cgttttttgtccaccagaca

SEQ ID NO: 32038 - RNA, 20 nt, synthetic construct
  source 1..20: mol_type = other RNA
ctaaaaaataccaaaaaagg

SEQ ID NO: 32039 - RNA, 20 nt, synthetic construct
  source 1..20: mol_type = other RNA
ctaaaaacatccattactcg

SEQ ID NO: 32040 - RNA, 20 nt, synthetic construct
  source 1..20: mol_type = other RNA
ctaaaaacgtgcaaactacc

SEQ ID NO: 32041 - RNA, 20 nt, synthetic construct
  source 1..20: mol_type = other RNA
ctaaaaagaaaaagttgggc

SEQ ID NO: 32042 - RNA, 20 nt, synthetic construct
  source 1..20: mol_type = other RNA
ctaaaaagggagtcagtaga

SEQ ID NO: 32043 - RNA, 20 nt, synthetic construct
  source 1..20: mol_type = other RNA
ctaaaaatcagattaagcat

SEQ ID NO: 32044 - RNA, 20 nt, synthetic construct
  source 1..20: mol_type = other RNA
ctaaaacactggaagtaatt

SEQ ID NO: 32045 - RNA, 20 nt, synthetic construct
  source 1..20: mol_type = other RNA
ctaaaacaggaagttgagaa

SEQ ID NO: 32046 - RNA, 20 nt, synthetic construct
  source 1..20: mol_type = other RNA
ctaaaacatacatgagaaat

SEQ ID NO: 32047 - RNA, 20 nt, synthetic construct
  source 1..20: mol_type = other RNA
ctaaaacatggtccacagag

SEQ ID NO: 32048 - RNA, 20 nt, synthetic construct
  source 1..20: mol_type = other RNA
ctaaaactccccatgcagga

SEQ ID NO: 32049 - RNA, 20 nt, synthetic construct
  source 1..20: mol_type = other RNA
ctaaaagaataaaattcacc

SEQ ID NO: 32050 - RNA, 20 nt, synthetic construct
  source 1..20: mol_type = other RNA
ctaaaagaccgcaagagttc

SEQ ID NO: 32051 - RNA, 20 nt, synthetic construct
  source 1..20: mol_type = other RNA
ctaaaaggttgcttaattga

SEQ ID NO: 32052 - RNA, 20 nt, synthetic construct
  source 1..20: mol_type = other RNA
ctaaaagtaattgtattctg

SEQ ID NO: 32053 - RNA, 20 nt, synthetic construct
  source 1..20: mol_type = other RNA
ctaaaataacagaagaagaa

SEQ ID NO: 32054 - RNA, 20 nt, synthetic construct
  source 1..20: mol_type = other RNA
ctaaaataggcctaggtgtg

SEQ ID NO: 32055 - RNA, 20 nt, synthetic construct
  source 1..20: mol_type = other RNA
ctaaaatcatcacagtatgc

SEQ ID NO: 32056 - RNA, 20 nt, synthetic construct
  source 1..20: mol_type = other RNA
ctaaaatcttattccccagg

SEQ ID NO: 32057 - RNA, 20 nt, synthetic construct
  source 1..20: mol_type = other RNA
ctaaaatggaagactttatg

SEQ ID NO: 32058 - RNA, 20 nt, synthetic construct
  source 1..20: mol_type = other RNA
ctaaaatgttcagatagaaa

SEQ ID NO: 32059 - RNA, 20 nt, synthetic construct
  source 1..20: mol_type = other RNA
ctaaaattccttcctttgat

SEQ ID NO: 32060 - RNA, 20 nt, synthetic construct
  source 1..20: mol_type = other RNA
ctaaacaaatcagatttcag

SEQ ID NO: 32061 - RNA, 20 nt, synthetic construct
  source 1..20: mol_type = other RNA
ctaaacacacgggctgggcg

SEQ ID NO: 32062 - RNA, 20 nt, synthetic construct
  source 1..20: mol_type = other RNA
ctaaacactgtagttcagtt

SEQ ID NO: 32063 - RNA, 20 nt, synthetic construct
  source 1..20: mol_type = other RNA
ctaaacacttagcatgttgc

SEQ ID NO: 32064 - RNA, 20 nt, synthetic construct
  source 1..20: mol_type = other RNA
ctaaacagtacagtagtaaa

SEQ ID NO: 32065 - RNA, 20 nt, synthetic construct
  source 1..20: mol_type = other RNA
ctaaacattaaggaagaatt

SEQ ID NO: 32066 - RNA, 20 nt, synthetic construct
  source 1..20: mol_type = other RNA
ctaaacattttattaggtgc

SEQ ID NO: 32067 - RNA, 20 nt, synthetic construct
  source 1..20: mol_type = other RNA
ctaaaccattttcaatcttg

SEQ ID NO: 32068 - RNA, 20 nt, synthetic construct
  source 1..20: mol_type = other RNA
ctaaacctgaggtctttaaa

SEQ ID NO: 32069 - RNA, 20 nt, synthetic construct
  source 1..20: mol_type = other RNA
ctaaacctgctacgaatgaa

SEQ ID NO: 32070 - RNA, 20 nt, synthetic construct
  source 1..20: mol_type = other RNA
ctaaacctgtgatttccagt

SEQ ID NO: 32071 - RNA, 20 nt, synthetic construct
  source 1..20: mol_type = other RNA
ctaaaccttaaaagagtgaa

SEQ ID NO: 32072 - RNA, 20 nt, synthetic construct
  source 1..20: mol_type = other RNA
ctaaacgtttggtgactgaa

SEQ ID NO: 32073 - RNA, 20 nt, synthetic construct
  source 1..20: mol_type = other RNA
ctaaactagtatcaacctgc

SEQ ID NO: 32074 - RNA, 20 nt, synthetic construct
  source 1..20: mol_type = other RNA
ctaaactagttcaaccattg

SEQ ID NO: 32075 - RNA, 20 nt, synthetic construct
  source 1..20: mol_type = other RNA
ctaaactattgtatgaacat

SEQ ID NO: 32076 - RNA, 20 nt, synthetic construct
  source 1..20: mol_type = other RNA
ctaaactgaacgaagtgaaa

SEQ ID NO: 32077 - RNA, 20 nt, synthetic construct
  source 1..20: mol_type = other RNA
ctaaactggttttcctgatg

SEQ ID NO: 32078 - RNA, 20 nt, synthetic construct
  source 1..20: mol_type = other RNA
ctaaactgttccccaagcca

SEQ ID NO: 32079 - RNA, 20 nt, synthetic construct
  source 1..20: mol_type = other RNA
ctaaactttgagtagcaccc

SEQ ID NO: 32080 - RNA, 20 nt, synthetic construct
  source 1..20: mol_type = other RNA
ctaaagagagtgacagctga

SEQ ID NO: 32081 - RNA, 20 nt, synthetic construct
  source 1..20: mol_type = other RNA
ctaaagatatgtgtaggaag

SEQ ID NO: 32082 - RNA, 20 nt, synthetic construct
  source 1..20: mol_type = other RNA
ctaaagatttgccaatcaat

SEQ ID NO: 32083 - RNA, 20 nt, synthetic construct
  source 1..20: mol_type = other RNA
ctaaagccaatcttcccaat

SEQ ID NO: 32084 - RNA, 20 nt, synthetic construct
  source 1..20: mol_type = other RNA
ctaaagccaggctttcccag

SEQ ID NO: 32085 - RNA, 20 nt, synthetic construct
  source 1..20: mol_type = other RNA
ctaaaggggatttcatgaac

SEQ ID NO: 32086 - RNA, 20 nt, synthetic construct
  source 1..20: mol_type = other RNA
ctaaagtccacagatctttt

SEQ ID NO: 32087 - RNA, 20 nt, synthetic construct
  source 1..20: mol_type = other RNA
ctaaagtctatgctcttggt

SEQ ID NO: 32088 - RNA, 20 nt, synthetic construct
  source 1..20: mol_type = other RNA
ctaaagttagaagtatccca

SEQ ID NO: 32089 - RNA, 20 nt, synthetic construct
  source 1..20: mol_type = other RNA
ctaaagttgaggttgaagac

SEQ ID NO: 32090 - RNA, 20 nt, synthetic construct
  source 1..20: mol_type = other RNA
ctaaataaaacacatgtcat

SEQ ID NO: 32091 - RNA, 20 nt, synthetic construct
  source 1..20: mol_type = other RNA
ctaaataaatctaagtctca

SEQ ID NO: 32092 - RNA, 20 nt, synthetic construct
  source 1..20: mol_type = other RNA
ctaaatacacatgttgagtc

SEQ ID NO: 32093 - RNA, 20 nt, synthetic construct
  source 1..20: mol_type = other RNA
ctaaatacaccaaactcaaa

SEQ ID NO: 32094 - RNA, 20 nt, synthetic construct
  source 1..20: mol_type = other RNA
ctaaataggtattcatgctg

SEQ ID NO: 32095 - RNA, 20 nt, synthetic construct
  source 1..20: mol_type = other RNA
ctaaatcaacagtgtactag

SEQ ID NO: 32096 - RNA, 20 nt, synthetic construct
  source 1..20: mol_type = other RNA
ctaaatcaggatgtctttgg

SEQ ID NO: 32097 - RNA, 20 nt, synthetic construct
  source 1..20: mol_type = other RNA
ctaaatgatctttcaagggg

SEQ ID NO: 32098 - RNA, 20 nt, synthetic construct
  source 1..20: mol_type = other RNA
ctaaatgctcacatttagtt

SEQ ID NO: 32099 - RNA, 20 nt, synthetic construct
  source 1..20: mol_type = other RNA
ctaaatggtgtgaagttggg

SEQ ID NO: 32100 - RNA, 20 nt, synthetic construct
  source 1..20: mol_type = other RNA
ctaaatgtagatcaagtatt

SEQ ID NO: 32101 - RNA, 20 nt, synthetic construct
  source 1..20: mol_type = other RNA
ctaaatgtccatcgagagat

SEQ ID NO: 32102 - RNA, 20 nt, synthetic construct
  source 1..20: mol_type = other RNA
ctaaatgtgagcatttagcc

SEQ ID NO: 32103 - RNA, 20 nt, synthetic construct
  source 1..20: mol_type = other RNA
ctaaattaaaggctggaaat

SEQ ID NO: 32104 - RNA, 20 nt, synthetic construct
  source 1..20: mol_type = other RNA
ctaaattaagcttcgacagt

SEQ ID NO: 32105 - RNA, 20 nt, synthetic construct
  source 1..20: mol_type = other RNA
ctaaattgaacagcctaaag

SEQ ID NO: 32106 - RNA, 20 nt, synthetic construct
  source 1..20: mol_type = other RNA
ctaaattgcctataattcaa

SEQ ID NO: 32107 - RNA, 20 nt, synthetic construct
  source 1..20: mol_type = other RNA
ctaaattttaagtgcacaat

SEQ ID NO: 32108 - RNA, 20 nt, synthetic construct
  source 1..20: mol_type = other RNA
ctaaattttgaggcttttgg

SEQ ID NO: 32109 - RNA, 20 nt, synthetic construct
  source 1..20: mol_type = other RNA
ctaacaaaaatacttaagag

SEQ ID NO: 32110 - RNA, 20 nt, synthetic construct
  source 1..20: mol_type = other RNA
ctaacaaaactaggctgtcc

SEQ ID NO: 32111 - RNA, 20 nt, synthetic construct
  source 1..20: mol_type = other RNA
ctaacaaaagatacacaaga

SEQ ID NO: 32112 - RNA, 20 nt, synthetic construct
  source 1..20: mol_type = other RNA
ctaacaaacgcattgtgatg

SEQ ID NO: 32113 - RNA, 20 nt, synthetic construct
  source 1..20: mol_type = other RNA
ctaacaaagaacaggaaggg

SEQ ID NO: 32114 - RNA, 20 nt, synthetic construct
  source 1..20: mol_type = other RNA
ctaacaaagggcctgttcca

SEQ ID NO: 32115 - RNA, 20 nt, synthetic construct
  source 1..20: mol_type = other RNA
ctaacaagaaagggtagctt

SEQ ID NO: 32116 - RNA, 20 nt, synthetic construct
  source 1..20: mol_type = other RNA
ctaacaagaagctgttttgg

SEQ ID NO: 32117 - RNA, 20 nt, synthetic construct
  source 1..20: mol_type = other RNA
ctaacaatcaaatttaacac

SEQ ID NO: 32118 - RNA, 20 nt, synthetic construct
  source 1..20: mol_type = other RNA
ctaacaatgattatttcgaa

SEQ ID NO: 32119 - RNA, 20 nt, synthetic construct
  source 1..20: mol_type = other RNA
ctaacaccagtaagattctg

SEQ ID NO: 32120 - RNA, 20 nt, synthetic construct
  source 1..20: mol_type = other RNA
ctaacaccttgaactgggac

SEQ ID NO: 32121 - RNA, 20 nt, synthetic construct
  source 1..20: mol_type = other RNA
ctaacagccaaagaaattgg

SEQ ID NO: 32122 - RNA, 20 nt, synthetic construct
  source 1..20: mol_type = other RNA
ctaacagccggcatatgtca

SEQ ID NO: 32123 - RNA, 20 nt, synthetic construct
  source 1..20: mol_type = other RNA
ctaacagggtctacaaaagg

SEQ ID NO: 32124 - RNA, 20 nt, synthetic construct
  source 1..20: mol_type = other RNA
ctaacagtctcgtgaatttg

SEQ ID NO: 32125 - RNA, 20 nt, synthetic construct
  source 1..20: mol_type = other RNA
ctaacataatcaaattcaca

SEQ ID NO: 32126 - RNA, 20 nt, synthetic construct
  source 1..20: mol_type = other RNA
ctaacatgaactactcaaag

SEQ ID NO: 32127 - RNA, 20 nt, synthetic construct
  source 1..20: mol_type = other RNA
ctaacatgtcttggtgtgct

SEQ ID NO: 32128 - RNA, 20 nt, synthetic construct
  source 1..20: mol_type = other RNA
ctaacattatcttctacctt

SEQ ID NO: 32129 - RNA, 20 nt, synthetic construct
  source 1..20: mol_type = other RNA
ctaaccaacattgagtttca

SEQ ID NO: 32130 - RNA, 20 nt, synthetic construct
  source 1..20: mol_type = other RNA
ctaaccactgttatctggga

SEQ ID NO: 32131 - RNA, 20 nt, synthetic construct
  source 1..20: mol_type = other RNA
ctaaccaggcccggggcaga

SEQ ID NO: 32132 - RNA, 20 nt, synthetic construct
  source 1..20: mol_type = other RNA
ctaaccattaacagctcaga

SEQ ID NO: 32133 - RNA, 20 nt, synthetic construct
  source 1..20: mol_type = other RNA
ctaaccccagagattgtcgt

SEQ ID NO: 32134 - RNA, 20 nt, synthetic construct
  source 1..20: mol_type = other RNA
ctaaccctcaaatgccatag

SEQ ID NO: 32135 - RNA, 20 nt, synthetic construct
  source 1..20: mol_type = other RNA
ctaaccctcaatccccatct

SEQ ID NO: 32136 - RNA, 20 nt, synthetic construct
  source 1..20: mol_type = other RNA
ctaaccctcctcctctacaa

SEQ ID NO: 32137 - RNA, 20 nt, synthetic construct
  source 1..20: mol_type = other RNA
ctaacgatccttactaccac

SEQ ID NO: 32138 - RNA, 20 nt, synthetic construct
  source 1..20: mol_type = other RNA
ctaacgtgcttgctctgcgg

SEQ ID NO: 32139 - RNA, 20 nt, synthetic construct
  source 1..20: mol_type = other RNA
ctaactactaataaatgcat

SEQ ID NO: 32140 - RNA, 20 nt, synthetic construct
  source 1..20: mol_type = other RNA
ctaactagaaaaccgacagc

SEQ ID NO: 32141 - RNA, 20 nt, synthetic construct
  source 1..20: mol_type = other RNA
ctaactcaagagttacttct

SEQ ID NO: 32142 - RNA, 20 nt, synthetic construct
  source 1..20: mol_type = other RNA
ctaactgcagaggtcaggaa

SEQ ID NO: 32143 - RNA, 20 nt, synthetic construct
  source 1..20: mol_type = other RNA
ctaactggtctcctttctat

SEQ ID NO: 32144 - RNA, 20 nt, synthetic construct
  source 1..20: mol_type = other RNA
ctaactttaaattttgagac

SEQ ID NO: 32145 - RNA, 20 nt, synthetic construct
  source 1..20: mol_type = other RNA
ctaactttctattcccctgg

SEQ ID NO: 32146 - RNA, 20 nt, synthetic construct
  source 1..20: mol_type = other RNA
ctaacttttaacccacagat

SEQ ID NO: 32147 - RNA, 20 nt, synthetic construct
  source 1..20: mol_type = other RNA
ctaagaaaaacagaagacac

SEQ ID NO: 32148 - RNA, 20 nt, synthetic construct
  source 1..20: mol_type = other RNA
ctaagaaacagtaattagtt

SEQ ID NO: 32149 - RNA, 20 nt, synthetic construct
  source 1..20: mol_type = other RNA
ctaagaaagggtgtgtgaat

SEQ ID NO: 32150 - RNA, 20 nt, synthetic construct
  source 1..20: mol_type = other RNA
ctaagaaaggtctagtgtgc

SEQ ID NO: 32151 - RNA, 20 nt, synthetic construct
  source 1..20: mol_type = other RNA
ctaagaagatggttggaagt

SEQ ID NO: 32152 - RNA, 20 nt, synthetic construct
  source 1..20: mol_type = other RNA
ctaagaagtgaaactgctgg

SEQ ID NO: 32153 - RNA, 20 nt, synthetic construct
  source 1..20: mol_type = other RNA
ctaagacactagctattgtc

SEQ ID NO: 32154 - RNA, 20 nt, synthetic construct
  source 1..20: mol_type = other RNA
ctaagaccccagtagaaatc

SEQ ID NO: 32155 - RNA, 20 nt, synthetic construct
  source 1..20: mol_type = other RNA
ctaagactataaaactctta

SEQ ID NO: 32156 - RNA, 20 nt, synthetic construct
  source 1..20: mol_type = other RNA
ctaagagataactaatgaga

SEQ ID NO: 32157 - RNA, 20 nt, synthetic construct
  source 1..20: mol_type = other RNA
ctaagagccaaagacattgt

SEQ ID NO: 32158 - RNA, 20 nt, synthetic construct
  source 1..20: mol_type = other RNA
ctaagagtgaaaaggcaaac

SEQ ID NO: 32159 - RNA, 20 nt, synthetic construct
  source 1..20: mol_type = other RNA
ctaagatgaggtctcagcct

SEQ ID NO: 32160 - RNA, 20 nt, synthetic construct
  source 1..20: mol_type = other RNA
ctaagatgctattcaagaca

SEQ ID NO: 32161 - RNA, 20 nt, synthetic construct
  source 1..20: mol_type = other RNA
ctaagatggaaagtggacta

SEQ ID NO: 32162 - RNA, 20 nt, synthetic construct
  source 1..20: mol_type = other RNA
ctaagcaaatgtaatgaaaa

SEQ ID NO: 32163 - RNA, 20 nt, synthetic construct
  source 1..20: mol_type = other RNA
ctaagcaagttacatgctta

SEQ ID NO: 32164 - RNA, 20 nt, synthetic construct
  source 1..20: mol_type = other RNA
ctaagcaccaacagatcctc

SEQ ID NO: 32165 - RNA, 20 nt, synthetic construct
  source 1..20: mol_type = other RNA
ctaagcactgcgccaagcag

SEQ ID NO: 32166 - RNA, 20 nt, synthetic construct
  source 1..20: mol_type = other RNA
ctaagcagaaatgacaagta

SEQ ID NO: 32167 - RNA, 20 nt, synthetic construct
  source 1..20: mol_type = other RNA
ctaagcatcgtgaagtcttt

SEQ ID NO: 32168 - RNA, 20 nt, synthetic construct
  source 1..20: mol_type = other RNA
ctaagcatgagatactacgc

SEQ ID NO: 32169 - RNA, 20 nt, synthetic construct
  source 1..20: mol_type = other RNA
ctaagcatgtaacttgctta

SEQ ID NO: 32170 - RNA, 20 nt, synthetic construct
  source 1..20: mol_type = other RNA
ctaagccatctaattcacat

SEQ ID NO: 32171 - RNA, 20 nt, synthetic construct
  source 1..20: mol_type = other RNA
ctaagccatgtttctcctgc

SEQ ID NO: 32172 - RNA, 20 nt, synthetic construct
  source 1..20: mol_type = other RNA
ctaagcctacctcccttcac

SEQ ID NO: 32173 - RNA, 20 nt, synthetic construct
  source 1..20: mol_type = other RNA
ctaagcctactgctctgtcc

SEQ ID NO: 32174 - RNA, 20 nt, synthetic construct
  source 1..20: mol_type = other RNA
ctaagcctatgtaagacaat

SEQ ID NO: 32175 - RNA, 20 nt, synthetic construct
  source 1..20: mol_type = other RNA
ctaagctaagagttttatag

SEQ ID NO: 32176 - RNA, 20 nt, synthetic construct
  source 1..20: mol_type = other RNA
ctaagcttaagagctaagac

SEQ ID NO: 32177 - RNA, 20 nt, synthetic construct
  source 1..20: mol_type = other RNA
ctaagcttgggtaggaagct

SEQ ID NO: 32178 - RNA, 20 nt, synthetic construct
  source 1..20: mol_type = other RNA
ctaaggaaagctcaggacca

SEQ ID NO: 32179 - RNA, 20 nt, synthetic construct
  source 1..20: mol_type = other RNA
ctaaggattatggctagaaa

SEQ ID NO: 32180 - RNA, 20 nt, synthetic construct
  source 1..20: mol_type = other RNA
ctaagggaagttttttcaaa

SEQ ID NO: 32181 - RNA, 20 nt, synthetic construct
  source 1..20: mol_type = other RNA
ctaaggtcaacacatcagcg

SEQ ID NO: 32182 - RNA, 20 nt, synthetic construct
  source 1..20: mol_type = other RNA
ctaaggtcaagagagattaa

SEQ ID NO: 32183 - RNA, 20 nt, synthetic construct
  source 1..20: mol_type = other RNA
ctaaggtggagtggtggata

SEQ ID NO: 32184 - RNA, 20 nt, synthetic construct
  source 1..20: mol_type = other RNA
ctaaggttctgctatgctga

SEQ ID NO: 32185 - RNA, 20 nt, synthetic construct
  source 1..20: mol_type = other RNA
ctaagtaaaataaacaagtc

SEQ ID NO: 32186 - RNA, 20 nt, synthetic construct
  source 1..20: mol_type = other RNA
ctaagtaatgctggccagtg

SEQ ID NO: 32187 - RNA, 20 nt, synthetic construct
  source 1..20: mol_type = other RNA
ctaagtagtggcagccccgc

SEQ ID NO: 32188 - RNA, 20 nt, synthetic construct
  source 1..20: mol_type = other RNA
ctaagtatgcagaaaccagt

SEQ ID NO: 32189 - RNA, 20 nt, synthetic construct
  source 1..20: mol_type = other RNA
ctaagtcagaattcactgtg

SEQ ID NO: 32190 - RNA, 20 nt, synthetic construct
  source 1..20: mol_type = other RNA
ctaagtcagcctgggcacac

SEQ ID NO: 32191 - RNA, 20 nt, synthetic construct
  source 1..20: mol_type = other RNA
ctaagtctcaacctacttta

SEQ ID NO: 32192 - RNA, 20 nt, synthetic construct
  source 1..20: mol_type = other RNA
ctaagtcttcttctaagcta

SEQ ID NO: 32193 - RNA, 20 nt, synthetic construct
  source 1..20: mol_type = other RNA
ctaagtgcatttcggctctg

SEQ ID NO: 32194 - RNA, 20 nt, synthetic construct
  source 1..20: mol_type = other RNA
ctaagtggtattctatcatc

SEQ ID NO: 32195 - RNA, 20 nt, synthetic construct
  source 1..20: mol_type = other RNA
ctaagtgtgaagattaagca

SEQ ID NO: 32196 - RNA, 20 nt, synthetic construct
  source 1..20: mol_type = other RNA
ctaagtgtttaggatataag

SEQ ID NO: 32197 - RNA, 20 nt, synthetic construct
  source 1..20: mol_type = other RNA
ctaagttgagaaactatcca

SEQ ID NO: 32198 - RNA, 20 nt, synthetic construct
  source 1..20: mol_type = other RNA
ctaagtttgccaaagattct

SEQ ID NO: 32199 - RNA, 20 nt, synthetic construct
  source 1..20: mol_type = other RNA
ctaagttttgggggaagaga

SEQ ID NO: 32200 - RNA, 20 nt, synthetic construct
  source 1..20: mol_type = other RNA
ctaataaaaacatatgcagg

SEQ ID NO: 32201 - RNA, 20 nt, synthetic construct
  source 1..20: mol_type = other RNA
ctaataaaaagcctctctga

SEQ ID NO: 32202 - RNA, 20 nt, synthetic construct
  source 1..20: mol_type = other RNA
ctaataaaagctggagttat

SEQ ID NO: 32203 - RNA, 20 nt, synthetic construct
  source 1..20: mol_type = other RNA
ctaataaaatagcaggattc

SEQ ID NO: 32204 - RNA, 20 nt, synthetic construct
  source 1..20: mol_type = other RNA
ctaataaaatgtttagcgga

SEQ ID NO: 32205 - RNA, 20 nt, synthetic construct
  source 1..20: mol_type = other RNA
ctaataaacgcggaatgaag

SEQ ID NO: 32206 - RNA, 20 nt, synthetic construct
  source 1..20: mol_type = other RNA
ctaataaatgcataaacgac

SEQ ID NO: 32207 - RNA, 20 nt, synthetic construct
  source 1..20: mol_type = other RNA
ctaataacagcctaagcaaa

SEQ ID NO: 32208 - RNA, 20 nt, synthetic construct
  source 1..20: mol_type = other RNA
ctaataagtgagtttgacct

SEQ ID NO: 32209 - RNA, 20 nt, synthetic construct
  source 1..20: mol_type = other RNA
ctaataatgatgactatgaa

SEQ ID NO: 32210 - RNA, 20 nt, synthetic construct
  source 1..20: mol_type = other RNA
ctaataattgcttttgctga

SEQ ID NO: 32211 - RNA, 20 nt, synthetic construct
  source 1..20: mol_type = other RNA
ctaataatttatcagatccc

SEQ ID NO: 32212 - RNA, 20 nt, synthetic construct
  source 1..20: mol_type = other RNA
ctaatacagtaaagccccat

SEQ ID NO: 32213 - RNA, 20 nt, synthetic construct
  source 1..20: mol_type = other RNA
ctaatagccagtgcagcaag

SEQ ID NO: 32214 - RNA, 20 nt, synthetic construct
  source 1..20: mol_type = other RNA
ctaatagctagtgatgttga

SEQ ID NO: 32215 - RNA, 20 nt, synthetic construct
  source 1..20: mol_type = other RNA
ctaataggaagtggctagac

SEQ ID NO: 32216 - RNA, 20 nt, synthetic construct
  source 1..20: mol_type = other RNA
ctaatagttcacctctccgg

SEQ ID NO: 32217 - RNA, 20 nt, synthetic construct
  source 1..20: mol_type = other RNA
ctaatatctttggggagata

SEQ ID NO: 32218 - RNA, 20 nt, synthetic construct
  source 1..20: mol_type = other RNA
ctaatatgagttcctgcttc

SEQ ID NO: 32219 - RNA, 20 nt, synthetic construct
  source 1..20: mol_type = other RNA
ctaatatgctgtagtgattc

SEQ ID NO: 32220 - RNA, 20 nt, synthetic construct
  source 1..20: mol_type = other RNA
ctaatatggttcctagaaaa

SEQ ID NO: 32221 - RNA, 20 nt, synthetic construct
  source 1..20: mol_type = other RNA
ctaatcaaacataccccaac

SEQ ID NO: 32222 - RNA, 20 nt, synthetic construct
  source 1..20: mol_type = other RNA
ctaatcaagccgcaaataat

SEQ ID NO: 32223 - RNA, 20 nt, synthetic construct
  source 1..20: mol_type = other RNA
ctaatcaggttgggcttatc

SEQ ID NO: 32224 - RNA, 20 nt, synthetic construct
  source 1..20: mol_type = other RNA
ctaatcccaaagtgagcaga

SEQ ID NO: 32225 - RNA, 20 nt, synthetic construct
  source 1..20: mol_type = other RNA
ctaatccttctcatagtctt

SEQ ID NO: 32226 - RNA, 20 nt, synthetic construct
  source 1..20: mol_type = other RNA
ctaatcctttgcacacacca

SEQ ID NO: 32227 - RNA, 20 nt, synthetic construct
  source 1..20: mol_type = other RNA
ctaatctaacatgttacaaa

SEQ ID NO: 32228 - RNA, 20 nt, synthetic construct
  source 1..20: mol_type = other RNA
ctaatctactttctaatcct

SEQ ID NO: 32229 - RNA, 20 nt, synthetic construct
  source 1..20: mol_type = other RNA
ctaatctcaatcagggcctt

SEQ ID NO: 32230 - RNA, 20 nt, synthetic construct
  source 1..20: mol_type = other RNA
ctaatctctaggcttaaaat

SEQ ID NO: 32231 - RNA, 20 nt, synthetic construct
  source 1..20: mol_type = other RNA
ctaatgaactcccagaactc

SEQ ID NO: 32232 - RNA, 20 nt, synthetic construct
  source 1..20: mol_type = other RNA
ctaatgagaatttcagaaag

SEQ ID NO: 32233 - RNA, 20 nt, synthetic construct
  source 1..20: mol_type = other RNA
ctaatgcaagagttaaaact

SEQ ID NO: 32234 - RNA, 20 nt, synthetic construct
  source 1..20: mol_type = other RNA
ctaatgcccattaaaaccat

SEQ ID NO: 32235 - RNA, 20 nt, synthetic construct
  source 1..20: mol_type = other RNA
ctaatgcctcaaattagtca

SEQ ID NO: 32236 - RNA, 20 nt, synthetic construct
  source 1..20: mol_type = other RNA
ctaatgggcgtggagcggtg

SEQ ID NO: 32237 - RNA, 20 nt, synthetic construct
  source 1..20: mol_type = other RNA
ctaatggggaaatagatgcc

SEQ ID NO: 32238 - RNA, 20 nt, synthetic construct
  source 1..20: mol_type = other RNA
ctaatgggtacagggtttct

SEQ ID NO: 32239 - RNA, 20 nt, synthetic construct
  source 1..20: mol_type = other RNA
ctaatggtccttgctgaaga

SEQ ID NO: 32240 - RNA, 20 nt, synthetic construct
  source 1..20: mol_type = other RNA
ctaatgtaaacagcatactg

SEQ ID NO: 32241 - RNA, 20 nt, synthetic construct
  source 1..20: mol_type = other RNA
ctaatgtcacattttcttat

SEQ ID NO: 32242 - RNA, 20 nt, synthetic construct
  source 1..20: mol_type = other RNA
ctaatgtccttttcctgttc

SEQ ID NO: 32243 - RNA, 20 nt, synthetic construct
  source 1..20: mol_type = other RNA
ctaatgtgcaaggagagaaa

SEQ ID NO: 32244 - RNA, 20 nt, synthetic construct
  source 1..20: mol_type = other RNA
ctaatgtggcttgcaaggcc

SEQ ID NO: 32245 - RNA, 20 nt, synthetic construct
  source 1..20: mol_type = other RNA
ctaatgtgtaagaaatgcca

SEQ ID NO: 32246 - RNA, 20 nt, synthetic construct
  source 1..20: mol_type = other RNA
ctaatgtgtgttccagacaa

SEQ ID NO: 32247 - RNA, 20 nt, synthetic construct
  source 1..20: mol_type = other RNA
ctaattaacatccagaatat

SEQ ID NO: 32248 - RNA, 20 nt, synthetic construct
  source 1..20: mol_type = other RNA
ctaattactgtttcttagct

SEQ ID NO: 32249 - RNA, 20 nt, synthetic construct
  source 1..20: mol_type = other RNA
ctaattagaaactggtgaac

SEQ ID NO: 32250 - RNA, 20 nt, synthetic construct
  source 1..20: mol_type = other RNA
ctaattcacatttaagaagg

SEQ ID NO: 32251 - RNA, 20 nt, synthetic construct
  source 1..20: mol_type = other RNA
ctaattcattgtacatgaag

SEQ ID NO: 32252 - RNA, 20 nt, synthetic construct
  source 1..20: mol_type = other RNA
ctaattcgaaaatgggccaa

SEQ ID NO: 32253 - RNA, 20 nt, synthetic construct
  source 1..20: mol_type = other RNA
ctaattctgacaactgggag

SEQ ID NO: 32254 - RNA, 20 nt, synthetic construct
  source 1..20: mol_type = other RNA
ctaattgataaaactgaagt

SEQ ID NO: 32255 - RNA, 20 nt, synthetic construct
  source 1..20: mol_type = other RNA
ctaattgtacacctcaaact

SEQ ID NO: 32256 - RNA, 20 nt, synthetic construct
  source 1..20: mol_type = other RNA
ctaattgtttgttgggttta

SEQ ID NO: 32257 - RNA, 20 nt, synthetic construct
  source 1..20: mol_type = other RNA
ctaatttcagagagacctga

SEQ ID NO: 32258 - RNA, 20 nt, synthetic construct
  source 1..20: mol_type = other RNA
ctaatttcatacaagttgtg

SEQ ID NO: 32259 - RNA, 20 nt, synthetic construct
  source 1..20: mol_type = other RNA
ctaatttccaagaacccttt

SEQ ID NO: 32260 - RNA, 20 nt, synthetic construct
  source 1..20: mol_type = other RNA
ctaatttcccatttgatttc

SEQ ID NO: 32261 - RNA, 20 nt, synthetic construct
  source 1..20: mol_type = other RNA
ctaatttctttaaaaccaga

SEQ ID NO: 32262 - RNA, 20 nt, synthetic construct
  source 1..20: mol_type = other RNA
ctaatttgaggcattagtga

SEQ ID NO: 32263 - RNA, 20 nt, synthetic construct
  source 1..20: mol_type = other RNA
ctaatttgtgaaccttgaag

SEQ ID NO: 32264 - RNA, 20 nt, synthetic construct
  source 1..20: mol_type = other RNA
ctaattttctaatcttcatc

SEQ ID NO: 32265 - RNA, 20 nt, synthetic construct
  source 1..20: mol_type = other RNA
ctaattttttagtcttgtct

SEQ ID NO: 32266 - RNA, 20 nt, synthetic construct
  source 1..20: mol_type = other RNA
ctacaaaacagggttattaa

SEQ ID NO: 32267 - RNA, 20 nt, synthetic construct
  source 1..20: mol_type = other RNA
ctacaaaagatcatttcaaa

SEQ ID NO: 32268 - RNA, 20 nt, synthetic construct
  source 1..20: mol_type = other RNA
ctacaaaaggaggaactaat

SEQ ID NO: 32269 - RNA, 20 nt, synthetic construct
  source 1..20: mol_type = other RNA
ctacaaaagggaaaacaatt

SEQ ID NO: 32270 - RNA, 20 nt, synthetic construct
  source 1..20: mol_type = other RNA
ctacaaaaggtttccagtgg

SEQ ID NO: 32271 - RNA, 20 nt, synthetic construct
  source 1..20: mol_type = other RNA
ctacaaaccttcttatttcc

SEQ ID NO: 32272 - RNA, 20 nt, synthetic construct
  source 1..20: mol_type = other RNA
ctacaaactccaaaccttta

SEQ ID NO: 32273 - RNA, 20 nt, synthetic construct
  source 1..20: mol_type = other RNA
ctacaaatcacatatctaat

SEQ ID NO: 32274 - RNA, 20 nt, synthetic construct
  source 1..20: mol_type = other RNA
ctacaagagttcccctatac

SEQ ID NO: 32275 - RNA, 20 nt, synthetic construct
  source 1..20: mol_type = other RNA
ctacaagttttaacttaaga

SEQ ID NO: 32276 - RNA, 20 nt, synthetic construct
  source 1..20: mol_type = other RNA
ctacaatggttgaactagtt

SEQ ID NO: 32277 - RNA, 20 nt, synthetic construct
  source 1..20: mol_type = other RNA
ctacaattactgtacaaaga

SEQ ID NO: 32278 - RNA, 20 nt, synthetic construct
  source 1..20: mol_type = other RNA
ctacacaaaaatccagataa

SEQ ID NO: 32279 - RNA, 20 nt, synthetic construct
  source 1..20: mol_type = other RNA
ctacacaacatgttttattt

SEQ ID NO: 32280 - RNA, 20 nt, synthetic construct
  source 1..20: mol_type = other RNA
ctacacaagtattaacgaat

SEQ ID NO: 32281 - RNA, 20 nt, synthetic construct
  source 1..20: mol_type = other RNA
ctacacagacatgaacaatc

SEQ ID NO: 32282 - RNA, 20 nt, synthetic construct
  source 1..20: mol_type = other RNA
ctacacatacacagggaaaa

SEQ ID NO: 32283 - RNA, 20 nt, synthetic construct
  source 1..20: mol_type = other RNA
ctacacatatctttaggtgt

SEQ ID NO: 32284 - RNA, 20 nt, synthetic construct
  source 1..20: mol_type = other RNA
ctacacatcagtgctgctct

SEQ ID NO: 32285 - RNA, 20 nt, synthetic construct
  source 1..20: mol_type = other RNA
ctacacattccagaccagca

SEQ ID NO: 32286 - RNA, 20 nt, synthetic construct
  source 1..20: mol_type = other RNA
ctacacccagttcaccagtt

SEQ ID NO: 32287 - RNA, 20 nt, synthetic construct
  source 1..20: mol_type = other RNA
ctacacccatccacccactt

SEQ ID NO: 32288 - RNA, 20 nt, synthetic construct
  source 1..20: mol_type = other RNA
ctacacccggctaattaaac

SEQ ID NO: 32289 - RNA, 20 nt, synthetic construct
  source 1..20: mol_type = other RNA
ctacaccctgggaaagcctg

SEQ ID NO: 32290 - RNA, 20 nt, synthetic construct
  source 1..20: mol_type = other RNA
ctacactcaatacacgtggc

SEQ ID NO: 32291 - RNA, 20 nt, synthetic construct
  source 1..20: mol_type = other RNA
ctacactgaagggaatttta

SEQ ID NO: 32292 - RNA, 20 nt, synthetic construct
  source 1..20: mol_type = other RNA
ctacagaaaacccttcatca

SEQ ID NO: 32293 - RNA, 20 nt, synthetic construct
  source 1..20: mol_type = other RNA
ctacagaatgttcaagtatt

SEQ ID NO: 32294 - RNA, 20 nt, synthetic construct
  source 1..20: mol_type = other RNA
ctacagacatgccacaccac

SEQ ID NO: 32295 - RNA, 20 nt, synthetic construct
  source 1..20: mol_type = other RNA
ctacagactaatatgagttc

SEQ ID NO: 32296 - RNA, 20 nt, synthetic construct
  source 1..20: mol_type = other RNA
ctacagactcaataaccaca

SEQ ID NO: 32297 - RNA, 20 nt, synthetic construct
  source 1..20: mol_type = other RNA
ctacagaggattttggattg

SEQ ID NO: 32298 - RNA, 20 nt, synthetic construct
  source 1..20: mol_type = other RNA
ctacagattcaatgcaatac

SEQ ID NO: 32299 - RNA, 20 nt, synthetic construct
  source 1..20: mol_type = other RNA
ctacagcatattagctgtct

SEQ ID NO: 32300 - RNA, 20 nt, synthetic construct
  source 1..20: mol_type = other RNA
ctacaggcaacaaaagaaaa

SEQ ID NO: 32301 - RNA, 20 nt, synthetic construct
  source 1..20: mol_type = other RNA
ctacagggaaccgtaacttc

SEQ ID NO: 32302 - RNA, 20 nt, synthetic construct
  source 1..20: mol_type = other RNA
ctacaggggcattccctgtc

SEQ ID NO: 32303 - RNA, 20 nt, synthetic construct
  source 1..20: mol_type = other RNA
ctacaggtcggaaggaatgt

SEQ ID NO: 32304 - RNA, 20 nt, synthetic construct
  source 1..20: mol_type = other RNA
ctacaggtgtgaaccacgca

SEQ ID NO: 32305 - RNA, 20 nt, synthetic construct
  source 1..20: mol_type = other RNA
ctacagtaatcaaacagtgt

SEQ ID NO: 32306 - RNA, 20 nt, synthetic construct
  source 1..20: mol_type = other RNA
ctacagtattacacagaaag

SEQ ID NO: 32307 - RNA, 20 nt, synthetic construct
  source 1..20: mol_type = other RNA
ctacagtcacacaccactac

SEQ ID NO: 32308 - RNA, 20 nt, synthetic construct
  source 1..20: mol_type = other RNA
ctacagtggttccatttgtt

SEQ ID NO: 32309 - RNA, 20 nt, synthetic construct
  source 1..20: mol_type = other RNA
ctacagtgtttagggacgaa

SEQ ID NO: 32310 - RNA, 20 nt, synthetic construct
  source 1..20: mol_type = other RNA
ctacagttaacaatactgca

SEQ ID NO: 32311 - RNA, 20 nt, synthetic construct
  source 1..20: mol_type = other RNA
ctacataacttcccagacag

SEQ ID NO: 32312 - RNA, 20 nt, synthetic construct
  source 1..20: mol_type = other RNA
ctacatactgcactctcaaa

SEQ ID NO: 32313 - RNA, 20 nt, synthetic construct
  source 1..20: mol_type = other RNA
ctacatagtccactttccat

SEQ ID NO: 32314 - RNA, 20 nt, synthetic construct
  source 1..20: mol_type = other RNA
ctacatatggcaattccata

SEQ ID NO: 32315 - RNA, 20 nt, synthetic construct
  source 1..20: mol_type = other RNA
ctacatcacagacagggaat

SEQ ID NO: 32316 - RNA, 20 nt, synthetic construct
  source 1..20: mol_type = other RNA
ctacatccccccacccctgc

SEQ ID NO: 32317 - RNA, 20 nt, synthetic construct
  source 1..20: mol_type = other RNA
ctacatctggatcctgtctc

SEQ ID NO: 32318 - RNA, 20 nt, synthetic construct
  source 1..20: mol_type = other RNA
ctacatgtaaaaactgtttg

SEQ ID NO: 32319 - RNA, 20 nt, synthetic construct
  source 1..20: mol_type = other RNA
ctacatgtacgccaattttc

SEQ ID NO: 32320 - RNA, 20 nt, synthetic construct
  source 1..20: mol_type = other RNA
ctacattaatctcatccaca

SEQ ID NO: 32321 - RNA, 20 nt, synthetic construct
  source 1..20: mol_type = other RNA
ctacattgccttcaagttgc

SEQ ID NO: 32322 - RNA, 20 nt, synthetic construct
  source 1..20: mol_type = other RNA
ctaccaaaaaactacgagta

SEQ ID NO: 32323 - RNA, 20 nt, synthetic construct
  source 1..20: mol_type = other RNA
ctaccaaaatataaatacgt

SEQ ID NO: 32324 - RNA, 20 nt, synthetic construct
  source 1..20: mol_type = other RNA
ctaccaaacattgaaggcag

SEQ ID NO: 32325 - RNA, 20 nt, synthetic construct
  source 1..20: mol_type = other RNA
ctaccaattctccctgaaat

SEQ ID NO: 32326 - RNA, 20 nt, synthetic construct
  source 1..20: mol_type = other RNA
ctaccaccactaatgtcaca

SEQ ID NO: 32327 - RNA, 20 nt, synthetic construct
  source 1..20: mol_type = other RNA
ctaccacccgtccaatttct

SEQ ID NO: 32328 - RNA, 20 nt, synthetic construct
  source 1..20: mol_type = other RNA
ctaccactgaggtcaagaaa

SEQ ID NO: 32329 - RNA, 20 nt, synthetic construct
  source 1..20: mol_type = other RNA
ctaccatctctccaacagaa

SEQ ID NO: 32330 - RNA, 20 nt, synthetic construct
  source 1..20: mol_type = other RNA
ctaccatgttgttcttttca

SEQ ID NO: 32331 - RNA, 20 nt, synthetic construct
  source 1..20: mol_type = other RNA
ctaccatttattcctctctt

SEQ ID NO: 32332 - RNA, 20 nt, synthetic construct
  source 1..20: mol_type = other RNA
ctacccaagcttaggtcaga

SEQ ID NO: 32333 - RNA, 20 nt, synthetic construct
  source 1..20: mol_type = other RNA
ctacccactattgaaagccc

SEQ ID NO: 32334 - RNA, 20 nt, synthetic construct
  source 1..20: mol_type = other RNA
ctacccagcactctgaatca

SEQ ID NO: 32335 - RNA, 20 nt, synthetic construct
  source 1..20: mol_type = other RNA
ctaccctcgagtaaaaagaa

SEQ ID NO: 32336 - RNA, 20 nt, synthetic construct
  source 1..20: mol_type = other RNA
ctaccctgaggatataacga

SEQ ID NO: 32337 - RNA, 20 nt, synthetic construct
  source 1..20: mol_type = other RNA
ctaccctgccttccttgggc

SEQ ID NO: 32338 - RNA, 20 nt, synthetic construct
  source 1..20: mol_type = other RNA
ctaccctttccaaattcaaa

SEQ ID NO: 32339 - RNA, 20 nt, synthetic construct
  source 1..20: mol_type = other RNA
ctaccctttcttgttagtag

SEQ ID NO: 32340 - RNA, 20 nt, synthetic construct
  source 1..20: mol_type = other RNA
ctacctaaaaagggagtcag

SEQ ID NO: 32341 - RNA, 20 nt, synthetic construct
  source 1..20: mol_type = other RNA
ctacctagaaaaacaccaaa

SEQ ID NO: 32342 - RNA, 20 nt, synthetic construct
  source 1..20: mol_type = other RNA
ctacctagggtgtaaaaggc

SEQ ID NO: 32343 - RNA, 20 nt, synthetic construct
  source 1..20: mol_type = other RNA
ctacctatagaattcttctt

SEQ ID NO: 32344 - RNA, 20 nt, synthetic construct
  source 1..20: mol_type = other RNA
ctacctcaaattgtgtgttc

SEQ ID NO: 32345 - RNA, 20 nt, synthetic construct
  source 1..20: mol_type = other RNA
ctacctcccttcacaaagcc

SEQ ID NO: 32346 - RNA, 20 nt, synthetic construct
  source 1..20: mol_type = other RNA
ctacctggagcctgaggaca

SEQ ID NO: 32347 - RNA, 20 nt, synthetic construct
  source 1..20: mol_type = other RNA
ctacctggcagtctaggaaa

SEQ ID NO: 32348 - RNA, 20 nt, synthetic construct
  source 1..20: mol_type = other RNA
ctacctgtctttcccattac

SEQ ID NO: 32349 - RNA, 20 nt, synthetic construct
  source 1..20: mol_type = other RNA
ctacctgttgattgttgcca

SEQ ID NO: 32350 - RNA, 20 nt, synthetic construct
  source 1..20: mol_type = other RNA
ctaccttccaaagtatgcat

SEQ ID NO: 32351 - RNA, 20 nt, synthetic construct
  source 1..20: mol_type = other RNA
ctaccttgaaaatgccctta

SEQ ID NO: 32352 - RNA, 20 nt, synthetic construct
  source 1..20: mol_type = other RNA
ctacctttggctactgtaaa

SEQ ID NO: 32353 - RNA, 20 nt, synthetic construct
  source 1..20: mol_type = other RNA
ctacgaagctacagtaatca

SEQ ID NO: 32354 - RNA, 20 nt, synthetic construct
  source 1..20: mol_type = other RNA
ctacgaatgaactcctatag

SEQ ID NO: 32355 - RNA, 20 nt, synthetic construct
  source 1..20: mol_type = other RNA
ctacgagtatcatataaatt

SEQ ID NO: 32356 - RNA, 20 nt, synthetic construct
  source 1..20: mol_type = other RNA
ctacgcccggcccatgacat

SEQ ID NO: 32357 - RNA, 20 nt, synthetic construct
  source 1..20: mol_type = other RNA
ctacgcctagctgactttta

SEQ ID NO: 32358 - RNA, 20 nt, synthetic construct
  source 1..20: mol_type = other RNA
ctacggacgcaggcaaacag

SEQ ID NO: 32359 - RNA, 20 nt, synthetic construct
  source 1..20: mol_type = other RNA
ctacggaggatgaggggctg

SEQ ID NO: 32360 - RNA, 20 nt, synthetic construct
  source 1..20: mol_type = other RNA
ctactaaaagttgacaaatt

SEQ ID NO: 32361 - RNA, 20 nt, synthetic construct
  source 1..20: mol_type = other RNA
ctactaaacaaatcagattt

SEQ ID NO: 32362 - RNA, 20 nt, synthetic construct
  source 1..20: mol_type = other RNA
ctactaaacattaaggaaga

SEQ ID NO: 32363 - RNA, 20 nt, synthetic construct
  source 1..20: mol_type = other RNA
ctactaacaagaaagggtag

SEQ ID NO: 32364 - RNA, 20 nt, synthetic construct
  source 1..20: mol_type = other RNA
ctactaataaatgcataaac

SEQ ID NO: 32365 - RNA, 20 nt, synthetic construct
  source 1..20: mol_type = other RNA
ctactagcaagctaataatt

SEQ ID NO: 32366 - RNA, 20 nt, synthetic construct
  source 1..20: mol_type = other RNA
ctactagccagtgattggat

SEQ ID NO: 32367 - RNA, 20 nt, synthetic construct
  source 1..20: mol_type = other RNA
ctactagtataagagaagga

SEQ ID NO: 32368 - RNA, 20 nt, synthetic construct
  source 1..20: mol_type = other RNA
ctactagtatttattaaacc

SEQ ID NO: 32369 - RNA, 20 nt, synthetic construct
  source 1..20: mol_type = other RNA
ctactatgaatatactggaa

SEQ ID NO: 32370 - RNA, 20 nt, synthetic construct
  source 1..20: mol_type = other RNA
ctactattccaggatcaaat

SEQ ID NO: 32371 - RNA, 20 nt, synthetic construct
  source 1..20: mol_type = other RNA
ctactatttcgcaaagcaac

SEQ ID NO: 32372 - RNA, 20 nt, synthetic construct
  source 1..20: mol_type = other RNA
ctactcaaagaaaataatgt

SEQ ID NO: 32373 - RNA, 20 nt, synthetic construct
  source 1..20: mol_type = other RNA
ctactcaaagtttagttatt

SEQ ID NO: 32374 - RNA, 20 nt, synthetic construct
  source 1..20: mol_type = other RNA
ctactcactgaaaccctcac

SEQ ID NO: 32375 - RNA, 20 nt, synthetic construct
  source 1..20: mol_type = other RNA
ctactcactgtactactgac

SEQ ID NO: 32376 - RNA, 20 nt, synthetic construct
  source 1..20: mol_type = other RNA
ctactcagctgtcactctct

SEQ ID NO: 32377 - RNA, 20 nt, synthetic construct
  source 1..20: mol_type = other RNA
ctactcaggagattaaggct

SEQ ID NO: 32378 - RNA, 20 nt, synthetic construct
  source 1..20: mol_type = other RNA
ctactctgcctcagttgaca

SEQ ID NO: 32379 - RNA, 20 nt, synthetic construct
  source 1..20: mol_type = other RNA
ctactcttttgtttttgggg

SEQ ID NO: 32380 - RNA, 20 nt, synthetic construct
  source 1..20: mol_type = other RNA
ctactgacctgggagaaaga

SEQ ID NO: 32381 - RNA, 20 nt, synthetic construct
  source 1..20: mol_type = other RNA
ctactgactccctttttagg

SEQ ID NO: 32382 - RNA, 20 nt, synthetic construct
  source 1..20: mol_type = other RNA
ctactgatagcgaaaggtac

SEQ ID NO: 32383 - RNA, 20 nt, synthetic construct
  source 1..20: mol_type = other RNA
ctactgcaaatatccaatca

SEQ ID NO: 32384 - RNA, 20 nt, synthetic construct
  source 1..20: mol_type = other RNA
ctactgcatgctaggggctg

SEQ ID NO: 32385 - RNA, 20 nt, synthetic construct
  source 1..20: mol_type = other RNA
ctactgcattttttgccaaa

SEQ ID NO: 32386 - RNA, 20 nt, synthetic construct
  source 1..20: mol_type = other RNA
ctactgctctgtcctgtcag

SEQ ID NO: 32387 - RNA, 20 nt, synthetic construct
  source 1..20: mol_type = other RNA
ctactggggtcttagttctg

SEQ ID NO: 32388 - RNA, 20 nt, synthetic construct
  source 1..20: mol_type = other RNA
ctactgtaaacaatgctgct

SEQ ID NO: 32389 - RNA, 20 nt, synthetic construct
  source 1..20: mol_type = other RNA
ctactgtactgtttagcatc

SEQ ID NO: 32390 - RNA, 20 nt, synthetic construct
  source 1..20: mol_type = other RNA
ctactgtgaattcactaatg

SEQ ID NO: 32391 - RNA, 20 nt, synthetic construct
  source 1..20: mol_type = other RNA
ctacttagcccctgctgcca

SEQ ID NO: 32392 - RNA, 20 nt, synthetic construct
  source 1..20: mol_type = other RNA
ctacttatcttttctagttt

SEQ ID NO: 32393 - RNA, 20 nt, synthetic construct
  source 1..20: mol_type = other RNA
ctacttcgtgtgtggagtgg

SEQ ID NO: 32394 - RNA, 20 nt, synthetic construct
  source 1..20: mol_type = other RNA
ctacttgtcaggtgggcact

SEQ ID NO: 32395 - RNA, 20 nt, synthetic construct
  source 1..20: mol_type = other RNA
ctactttaaatcagggcctt

SEQ ID NO: 32396 - RNA, 20 nt, synthetic construct
  source 1..20: mol_type = other RNA
ctactttcacataaggtata

SEQ ID NO: 32397 - RNA, 20 nt, synthetic construct
  source 1..20: mol_type = other RNA
ctactttctaatcctttgca

SEQ ID NO: 32398 - RNA, 20 nt, synthetic construct
  source 1..20: mol_type = other RNA
ctactttcttcaaccatact

SEQ ID NO: 32399 - RNA, 20 nt, synthetic construct
  source 1..20: mol_type = other RNA
ctactttttgtcacacggaa

SEQ ID NO: 32400 - RNA, 20 nt, synthetic construct
  source 1..20: mol_type = other RNA
ctagaaaaacaccaaaaaag

SEQ ID NO: 32401 - RNA, 20 nt, synthetic construct
  source 1..20: mol_type = other RNA
ctagaaaaagaataagctaa

SEQ ID NO: 32402 - RNA, 20 nt, synthetic construct
  source 1..20: mol_type = other RNA
ctagaaaaccgacagcagat

SEQ ID NO: 32403 - RNA, 20 nt, synthetic construct
  source 1..20: mol_type = other RNA
ctagaaaagataagtagaag

SEQ ID NO: 32404 - RNA, 20 nt, synthetic construct
  source 1..20: mol_type = other RNA
ctagaaaatcatacattttc

SEQ ID NO: 32405 - RNA, 20 nt, synthetic construct
  source 1..20: mol_type = other RNA
ctagaaacttcttctgttgg

SEQ ID NO: 32406 - RNA, 20 nt, synthetic construct
  source 1..20: mol_type = other RNA
ctagaaacttggattgtgtg

SEQ ID NO: 32407 - RNA, 20 nt, synthetic construct
  source 1..20: mol_type = other RNA
ctagaaagataaatccaacg

SEQ ID NO: 32408 - RNA, 20 nt, synthetic construct
  source 1..20: mol_type = other RNA
ctagaaaggaattgtaatca

SEQ ID NO: 32409 - RNA, 20 nt, synthetic construct
  source 1..20: mol_type = other RNA
ctagaaaggagggactgaaa

SEQ ID NO: 32410 - RNA, 20 nt, synthetic construct
  source 1..20: mol_type = other RNA
ctagaaatcatacacgagtg

SEQ ID NO: 32411 - RNA, 20 nt, synthetic construct
  source 1..20: mol_type = other RNA
ctagaacagaataaaaagtg

SEQ ID NO: 32412 - RNA, 20 nt, synthetic construct
  source 1..20: mol_type = other RNA
ctagaactagaatactccac

SEQ ID NO: 32413 - RNA, 20 nt, synthetic construct
  source 1..20: mol_type = other RNA
ctagaactgtgttacattgc

SEQ ID NO: 32414 - RNA, 20 nt, synthetic construct
  source 1..20: mol_type = other RNA
ctagaacttatgcatcttgc

SEQ ID NO: 32415 - RNA, 20 nt, synthetic construct
  source 1..20: mol_type = other RNA
ctagaagaaatgggtaaatt

SEQ ID NO: 32416 - RNA, 20 nt, synthetic construct
  source 1..20: mol_type = other RNA
ctagaagaaatgttaacaat

SEQ ID NO: 32417 - RNA, 20 nt, synthetic construct
  source 1..20: mol_type = other RNA
ctagaagacctcaaattctg

SEQ ID NO: 32418 - RNA, 20 nt, synthetic construct
  source 1..20: mol_type = other RNA
ctagaagcactttttaccaa

SEQ ID NO: 32419 - RNA, 20 nt, synthetic construct
  source 1..20: mol_type = other RNA
ctagaagcatctgatacact

SEQ ID NO: 32420 - RNA, 20 nt, synthetic construct
  source 1..20: mol_type = other RNA
ctagaagtcccagttcaagg

SEQ ID NO: 32421 - RNA, 20 nt, synthetic construct
  source 1..20: mol_type = other RNA
ctagaatactccaccagcat

SEQ ID NO: 32422 - RNA, 20 nt, synthetic construct
  source 1..20: mol_type = other RNA
ctagaatgcatccctcctct

SEQ ID NO: 32423 - RNA, 20 nt, synthetic construct
  source 1..20: mol_type = other RNA
ctagaatgtgacttcgtcaa

SEQ ID NO: 32424 - RNA, 20 nt, synthetic construct
  source 1..20: mol_type = other RNA
ctagaattgactttaccctg

SEQ ID NO: 32425 - RNA, 20 nt, synthetic construct
  source 1..20: mol_type = other RNA
ctagacacatttttgacagc

SEQ ID NO: 32426 - RNA, 20 nt, synthetic construct
  source 1..20: mol_type = other RNA
ctagacctcaaattaatcag

SEQ ID NO: 32427 - RNA, 20 nt, synthetic construct
  source 1..20: mol_type = other RNA
ctagacctttcttaggtttc

SEQ ID NO: 32428 - RNA, 20 nt, synthetic construct
  source 1..20: mol_type = other RNA
ctagacggaaaaacattcta

SEQ ID NO: 32429 - RNA, 20 nt, synthetic construct
  source 1..20: mol_type = other RNA
ctagactaagaaaaacagaa

SEQ ID NO: 32430 - RNA, 20 nt, synthetic construct
  source 1..20: mol_type = other RNA
ctagactgccaggtagggag

SEQ ID NO: 32431 - RNA, 20 nt, synthetic construct
  source 1..20: mol_type = other RNA
ctagactgcctgaggtctca

SEQ ID NO: 32432 - RNA, 20 nt, synthetic construct
  source 1..20: mol_type = other RNA
ctagagaaagcatcagagct

SEQ ID NO: 32433 - RNA, 20 nt, synthetic construct
  source 1..20: mol_type = other RNA
ctagagatgggaaagtattc

SEQ ID NO: 32434 - RNA, 20 nt, synthetic construct
  source 1..20: mol_type = other RNA
ctagagattaggcagaacca

SEQ ID NO: 32435 - RNA, 20 nt, synthetic construct
  source 1..20: mol_type = other RNA
ctagagatttgctgtataac

SEQ ID NO: 32436 - RNA, 20 nt, synthetic construct
  source 1..20: mol_type = other RNA
ctagagccaggaagtcagca

SEQ ID NO: 32437 - RNA, 20 nt, synthetic construct
  source 1..20: mol_type = other RNA
ctagagctcacacgagaagg

SEQ ID NO: 32438 - RNA, 20 nt, synthetic construct
  source 1..20: mol_type = other RNA
ctagagctgctgtaacaaag

SEQ ID NO: 32439 - RNA, 20 nt, synthetic construct
  source 1..20: mol_type = other RNA
ctagagcttcaacctcctgg

SEQ ID NO: 32440 - RNA, 20 nt, synthetic construct
  source 1..20: mol_type = other RNA
ctagagggtaagaccaaaat

SEQ ID NO: 32441 - RNA, 20 nt, synthetic construct
  source 1..20: mol_type = other RNA
ctagagtattacctatgaat

SEQ ID NO: 32442 - RNA, 20 nt, synthetic construct
  source 1..20: mol_type = other RNA
ctagataagaaaatgtgaca

SEQ ID NO: 32443 - RNA, 20 nt, synthetic construct
  source 1..20: mol_type = other RNA
ctagatcaagcccttccttg

SEQ ID NO: 32444 - RNA, 20 nt, synthetic construct
  source 1..20: mol_type = other RNA
ctagatctcttttcctttaa

SEQ ID NO: 32445 - RNA, 20 nt, synthetic construct
  source 1..20: mol_type = other RNA
ctagatgattcgcattgcta

SEQ ID NO: 32446 - RNA, 20 nt, synthetic construct
  source 1..20: mol_type = other RNA
ctagatgcctcgaaggcctg

SEQ ID NO: 32447 - RNA, 20 nt, synthetic construct
  source 1..20: mol_type = other RNA
ctagatgctaaacagtacag

SEQ ID NO: 32448 - RNA, 20 nt, synthetic construct
  source 1..20: mol_type = other RNA
ctagattaccttgaagttta

SEQ ID NO: 32449 - RNA, 20 nt, synthetic construct
  source 1..20: mol_type = other RNA
ctagattcatatgctttgag

SEQ ID NO: 32450 - RNA, 20 nt, synthetic construct
  source 1..20: mol_type = other RNA
ctagattccctctggccttc

SEQ ID NO: 32451 - RNA, 20 nt, synthetic construct
  source 1..20: mol_type = other RNA
ctagattgaccttctactta

SEQ ID NO: 32452 - RNA, 20 nt, synthetic construct
  source 1..20: mol_type = other RNA
ctagatttcaatctggaatg

SEQ ID NO: 32453 - RNA, 20 nt, synthetic construct
  source 1..20: mol_type = other RNA
ctagcaaacaaacacactgg

SEQ ID NO: 32454 - RNA, 20 nt, synthetic construct
  source 1..20: mol_type = other RNA
ctagcaaactactgatagcg

SEQ ID NO: 32455 - RNA, 20 nt, synthetic construct
  source 1..20: mol_type = other RNA
ctagcaaactgaatcagaca

SEQ ID NO: 32456 - RNA, 20 nt, synthetic construct
  source 1..20: mol_type = other RNA
ctagcaagctaataatttat

SEQ ID NO: 32457 - RNA, 20 nt, synthetic construct
  source 1..20: mol_type = other RNA
ctagcaatccaggatcttac

SEQ ID NO: 32458 - RNA, 20 nt, synthetic construct
  source 1..20: mol_type = other RNA
ctagcacagaaccatgtaac

SEQ ID NO: 32459 - RNA, 20 nt, synthetic construct
  source 1..20: mol_type = other RNA
ctagcacagaggcaacagtc

SEQ ID NO: 32460 - RNA, 20 nt, synthetic construct
  source 1..20: mol_type = other RNA
ctagcatgcagtagctcatc

SEQ ID NO: 32461 - RNA, 20 nt, synthetic construct
  source 1..20: mol_type = other RNA
ctagccaaagcaagccttgg

SEQ ID NO: 32462 - RNA, 20 nt, synthetic construct
  source 1..20: mol_type = other RNA
ctagccaagggtttgtcaat

SEQ ID NO: 32463 - RNA, 20 nt, synthetic construct
  source 1..20: mol_type = other RNA
ctagccactgggtcttatag

SEQ ID NO: 32464 - RNA, 20 nt, synthetic construct
  source 1..20: mol_type = other RNA
ctagccacttcctattagaa

SEQ ID NO: 32465 - RNA, 20 nt, synthetic construct
  source 1..20: mol_type = other RNA
ctagccagtgattggatatt

SEQ ID NO: 32466 - RNA, 20 nt, synthetic construct
  source 1..20: mol_type = other RNA
ctagccataatccttagatt

SEQ ID NO: 32467 - RNA, 20 nt, synthetic construct
  source 1..20: mol_type = other RNA
ctagcccagcacttccattt

SEQ ID NO: 32468 - RNA, 20 nt, synthetic construct
  source 1..20: mol_type = other RNA
ctagcccagcttccgggact

SEQ ID NO: 32469 - RNA, 20 nt, synthetic construct
  source 1..20: mol_type = other RNA
ctagccccaaatacctctga

SEQ ID NO: 32470 - RNA, 20 nt, synthetic construct
  source 1..20: mol_type = other RNA
ctagcctccagaaaaccaga

SEQ ID NO: 32471 - RNA, 20 nt, synthetic construct
  source 1..20: mol_type = other RNA
ctagcctctctgggcttcac

SEQ ID NO: 32472 - RNA, 20 nt, synthetic construct
  source 1..20: mol_type = other RNA
ctagccttcttggagtaaac

SEQ ID NO: 32473 - RNA, 20 nt, synthetic construct
  source 1..20: mol_type = other RNA
ctagccttgtactgtgtggc

SEQ ID NO: 32474 - RNA, 20 nt, synthetic construct
  source 1..20: mol_type = other RNA
ctagctacttgggaggctga

SEQ ID NO: 32475 - RNA, 20 nt, synthetic construct
  source 1..20: mol_type = other RNA
ctagctattagagaaatgca

SEQ ID NO: 32476 - RNA, 20 nt, synthetic construct
  source 1..20: mol_type = other RNA
ctagctattgtcttttctat

SEQ ID NO: 32477 - RNA, 20 nt, synthetic construct
  source 1..20: mol_type = other RNA
ctagctccccattccctgtc

SEQ ID NO: 32478 - RNA, 20 nt, synthetic construct
  source 1..20: mol_type = other RNA
ctagctcctgggaaaaggat

SEQ ID NO: 32479 - RNA, 20 nt, synthetic construct
  source 1..20: mol_type = other RNA
ctagctgacccactggtttc

SEQ ID NO: 32480 - RNA, 20 nt, synthetic construct
  source 1..20: mol_type = other RNA
ctagctgacttttaaaatat

SEQ ID NO: 32481 - RNA, 20 nt, synthetic construct
  source 1..20: mol_type = other RNA
ctagctgttttcatgcgaca

SEQ ID NO: 32482 - RNA, 20 nt, synthetic construct
  source 1..20: mol_type = other RNA
ctagctttcagcactgctat

SEQ ID NO: 32483 - RNA, 20 nt, synthetic construct
  source 1..20: mol_type = other RNA
ctaggaaaagacttgaggtt

SEQ ID NO: 32484 - RNA, 20 nt, synthetic construct
  source 1..20: mol_type = other RNA
ctaggaaacactgctcagaa

SEQ ID NO: 32485 - RNA, 20 nt, synthetic construct
  source 1..20: mol_type = other RNA
ctaggaaccatattagagtg

SEQ ID NO: 32486 - RNA, 20 nt, synthetic construct
  source 1..20: mol_type = other RNA
ctaggaccataggcacgcgc

SEQ ID NO: 32487 - RNA, 20 nt, synthetic construct
  source 1..20: mol_type = other RNA
ctaggaggtctaagagataa

SEQ ID NO: 32488 - RNA, 20 nt, synthetic construct
  source 1..20: mol_type = other RNA
ctaggagtacagtgcatacc

SEQ ID NO: 32489 - RNA, 20 nt, synthetic construct
  source 1..20: mol_type = other RNA
ctaggatttcagtaaatgaa

SEQ ID NO: 32490 - RNA, 20 nt, synthetic construct
  source 1..20: mol_type = other RNA
ctaggcaagagagcaagact

SEQ ID NO: 32491 - RNA, 20 nt, synthetic construct
  source 1..20: mol_type = other RNA
ctaggcatataaactggaag

SEQ ID NO: 32492 - RNA, 20 nt, synthetic construct
  source 1..20: mol_type = other RNA
ctaggcatataataagcaga

SEQ ID NO: 32493 - RNA, 20 nt, synthetic construct
  source 1..20: mol_type = other RNA
ctaggcatctatttccccat

SEQ ID NO: 32494 - RNA, 20 nt, synthetic construct
  source 1..20: mol_type = other RNA
ctaggccctaaccccagaga

SEQ ID NO: 32495 - RNA, 20 nt, synthetic construct
  source 1..20: mol_type = other RNA
ctaggcctattttaggctct

SEQ ID NO: 32496 - RNA, 20 nt, synthetic construct
  source 1..20: mol_type = other RNA
ctaggcgaaatatctccctc

SEQ ID NO: 32497 - RNA, 20 nt, synthetic construct
  source 1..20: mol_type = other RNA
ctaggcgtagtatctcatgc

SEQ ID NO: 32498 - RNA, 20 nt, synthetic construct
  source 1..20: mol_type = other RNA
ctaggctaatgtgtgttcca

SEQ ID NO: 32499 - RNA, 20 nt, synthetic construct
  source 1..20: mol_type = other RNA
ctaggctcctgagaaccgga

SEQ ID NO: 32500 - RNA, 20 nt, synthetic construct
  source 1..20: mol_type = other RNA
ctaggctgtcccaaatgcac

SEQ ID NO: 32501 - RNA, 20 nt, synthetic construct
  source 1..20: mol_type = other RNA
ctaggcttaaaattcttcca

SEQ ID NO: 32502 - RNA, 20 nt, synthetic construct
  source 1..20: mol_type = other RNA
ctagggaagcagttgatgca

SEQ ID NO: 32503 - RNA, 20 nt, synthetic construct
  source 1..20: mol_type = other RNA
ctagggactggcctcggcca

SEQ ID NO: 32504 - RNA, 20 nt, synthetic construct
  source 1..20: mol_type = other RNA
ctaggggactaacagggtct

SEQ ID NO: 32505 - RNA, 20 nt, synthetic construct
  source 1..20: mol_type = other RNA
ctaggggctgttcccagata

SEQ ID NO: 32506 - RNA, 20 nt, synthetic construct
  source 1..20: mol_type = other RNA
ctagggtgtaaaaggctaat

SEQ ID NO: 32507 - RNA, 20 nt, synthetic construct
  source 1..20: mol_type = other RNA
ctaggtagggttggggtatg

SEQ ID NO: 32508 - RNA, 20 nt, synthetic construct
  source 1..20: mol_type = other RNA
ctaggtagtttctttgaact

SEQ ID NO: 32509 - RNA, 20 nt, synthetic construct
  source 1..20: mol_type = other RNA
ctaggtatcacagtgaggac

SEQ ID NO: 32510 - RNA, 20 nt, synthetic construct
  source 1..20: mol_type = other RNA
ctaggtatttgaaaaatgtc

SEQ ID NO: 32511 - RNA, 20 nt, synthetic construct
  source 1..20: mol_type = other RNA
ctaggtgacctgccagagtt

SEQ ID NO: 32512 - RNA, 20 nt, synthetic construct
  source 1..20: mol_type = other RNA
ctaggtgagtgagatgggaa

SEQ ID NO: 32513 - RNA, 20 nt, synthetic construct
  source 1..20: mol_type = other RNA
ctaggtgtgataactgatat

SEQ ID NO: 32514 - RNA, 20 nt, synthetic construct
  source 1..20: mol_type = other RNA
ctaggttatctgttttctta

SEQ ID NO: 32515 - RNA, 20 nt, synthetic construct
  source 1..20: mol_type = other RNA
ctagtaacttggtcgaaaac

SEQ ID NO: 32516 - RNA, 20 nt, synthetic construct
  source 1..20: mol_type = other RNA
ctagtaagtaaaatcggaac

SEQ ID NO: 32517 - RNA, 20 nt, synthetic construct
  source 1..20: mol_type = other RNA
ctagtacactgttgatttag

SEQ ID NO: 32518 - RNA, 20 nt, synthetic construct
  source 1..20: mol_type = other RNA
ctagtacgtaacctaaagtt

SEQ ID NO: 32519 - RNA, 20 nt, synthetic construct
  source 1..20: mol_type = other RNA
ctagtacgtgcagagcaggg

SEQ ID NO: 32520 - RNA, 20 nt, synthetic construct
  source 1..20: mol_type = other RNA
ctagtagaaagcaggttcat

SEQ ID NO: 32521 - RNA, 20 nt, synthetic construct
  source 1..20: mol_type = other RNA
ctagtagcagaatccccaaa

SEQ ID NO: 32522 - RNA, 20 nt, synthetic construct
  source 1..20: mol_type = other RNA
ctagtaggatgaattacaaa

SEQ ID NO: 32523 - RNA, 20 nt, synthetic construct
  source 1..20: mol_type = other RNA
ctagtaggcaacatccctat

SEQ ID NO: 32524 - RNA, 20 nt, synthetic construct
  source 1..20: mol_type = other RNA
ctagtataagagaaggaagc

SEQ ID NO: 32525 - RNA, 20 nt, synthetic construct
  source 1..20: mol_type = other RNA
ctagtatcaacctgcaggta

SEQ ID NO: 32526 - RNA, 20 nt, synthetic construct
  source 1..20: mol_type = other RNA
ctagtatttattaaacctgt

SEQ ID NO: 32527 - RNA, 20 nt, synthetic construct
  source 1..20: mol_type = other RNA
ctagtattttgttgacatcc

SEQ ID NO: 32528 - RNA, 20 nt, synthetic construct
  source 1..20: mol_type = other RNA
ctagtcacatttgctttact

SEQ ID NO: 32529 - RNA, 20 nt, synthetic construct
  source 1..20: mol_type = other RNA
ctagtcaccctacagactca

SEQ ID NO: 32530 - RNA, 20 nt, synthetic construct
  source 1..20: mol_type = other RNA
ctagtcagcacactcttaat

SEQ ID NO: 32531 - RNA, 20 nt, synthetic construct
  source 1..20: mol_type = other RNA
ctagtcagtatatttactgc

SEQ ID NO: 32532 - RNA, 20 nt, synthetic construct
  source 1..20: mol_type = other RNA
ctagtcatccactgcacagt

SEQ ID NO: 32533 - RNA, 20 nt, synthetic construct
  source 1..20: mol_type = other RNA
ctagtccatgaagaaaacac

SEQ ID NO: 32534 - RNA, 20 nt, synthetic construct
  source 1..20: mol_type = other RNA
ctagtctccatacaaggaga

SEQ ID NO: 32535 - RNA, 20 nt, synthetic construct
  source 1..20: mol_type = other RNA
ctagtgaagtcaatttcaga

SEQ ID NO: 32536 - RNA, 20 nt, synthetic construct
  source 1..20: mol_type = other RNA
ctagtgaagtcccatcttcc

SEQ ID NO: 32537 - RNA, 20 nt, synthetic construct
  source 1..20: mol_type = other RNA
ctagtgaatgagaccaaatg

SEQ ID NO: 32538 - RNA, 20 nt, synthetic construct
  source 1..20: mol_type = other RNA
ctagtgatgggagatggaca

SEQ ID NO: 32539 - RNA, 20 nt, synthetic construct
  source 1..20: mol_type = other RNA
ctagtggaagaatcaggtct

SEQ ID NO: 32540 - RNA, 20 nt, synthetic construct
  source 1..20: mol_type = other RNA
ctagtggatgctggggaccc

SEQ ID NO: 32541 - RNA, 20 nt, synthetic construct
  source 1..20: mol_type = other RNA
ctagtggctcatacttgctt

SEQ ID NO: 32542 - RNA, 20 nt, synthetic construct
  source 1..20: mol_type = other RNA
ctagtgggatcaaaccatgt

SEQ ID NO: 32543 - RNA, 20 nt, synthetic construct
  source 1..20: mol_type = other RNA
ctagtgggtcgggtgtcaga

SEQ ID NO: 32544 - RNA, 20 nt, synthetic construct
  source 1..20: mol_type = other RNA
ctagtggtaactagatgcct

SEQ ID NO: 32545 - RNA, 20 nt, synthetic construct
  source 1..20: mol_type = other RNA
ctagtggtgcttaattcaaa

SEQ ID NO: 32546 - RNA, 20 nt, synthetic construct
  source 1..20: mol_type = other RNA
ctagtgtcctcaggctccag

SEQ ID NO: 32547 - RNA, 20 nt, synthetic construct
  source 1..20: mol_type = other RNA
ctagtgtctccataccccct

SEQ ID NO: 32548 - RNA, 20 nt, synthetic construct
  source 1..20: mol_type = other RNA
ctagtgtcttagtctgactt

SEQ ID NO: 32549 - RNA, 20 nt, synthetic construct
  source 1..20: mol_type = other RNA
ctagtgtgaatgaggagtga

SEQ ID NO: 32550 - RNA, 20 nt, synthetic construct
  source 1..20: mol_type = other RNA
ctagtgtgcatgtgttgtgc

SEQ ID NO: 32551 - RNA, 20 nt, synthetic construct
  source 1..20: mol_type = other RNA
ctagtgtgtctgactacact

SEQ ID NO: 32552 - RNA, 20 nt, synthetic construct
  source 1..20: mol_type = other RNA
ctagtgtgttgactgacata

SEQ ID NO: 32553 - RNA, 20 nt, synthetic construct
  source 1..20: mol_type = other RNA
ctagttaataaaggtgctaa

SEQ ID NO: 32554 - RNA, 20 nt, synthetic construct
  source 1..20: mol_type = other RNA
ctagttaccactagcaaact

SEQ ID NO: 32555 - RNA, 20 nt, synthetic construct
  source 1..20: mol_type = other RNA
ctagttagtttgttgaccca

SEQ ID NO: 32556 - RNA, 20 nt, synthetic construct
  source 1..20: mol_type = other RNA
ctagttctaataaacgcgga

SEQ ID NO: 32557 - RNA, 20 nt, synthetic construct
  source 1..20: mol_type = other RNA
ctagttctagctctgtcttt

SEQ ID NO: 32558 - RNA, 20 nt, synthetic construct
  source 1..20: mol_type = other RNA
ctagttgcacggtgaagaac

SEQ ID NO: 32559 - RNA, 20 nt, synthetic construct
  source 1..20: mol_type = other RNA
ctagttgtgctacctcaaat

SEQ ID NO: 32560 - RNA, 20 nt, synthetic construct
  source 1..20: mol_type = other RNA
ctagtttagtgcagtatctt

SEQ ID NO: 32561 - RNA, 20 nt, synthetic construct
  source 1..20: mol_type = other RNA
ctagtttctttttgttttct

SEQ ID NO: 32562 - RNA, 20 nt, synthetic construct
  source 1..20: mol_type = other RNA
ctagtttgaggtgtacaatt

SEQ ID NO: 32563 - RNA, 20 nt, synthetic construct
  source 1..20: mol_type = other RNA
ctagttttccaatccgggaa

SEQ ID NO: 32564 - RNA, 20 nt, synthetic construct
  source 1..20: mol_type = other RNA
ctagttttccagtatattca

SEQ ID NO: 32565 - RNA, 20 nt, synthetic construct
  source 1..20: mol_type = other RNA
ctataaaactcttagcttag

SEQ ID NO: 32566 - RNA, 20 nt, synthetic construct
  source 1..20: mol_type = other RNA
ctataaaatgctggaaattt

SEQ ID NO: 32567 - RNA, 20 nt, synthetic construct
  source 1..20: mol_type = other RNA
ctataaacttccctctcagt

SEQ ID NO: 32568 - RNA, 20 nt, synthetic construct
  source 1..20: mol_type = other RNA
ctataaagaacatgattggg

SEQ ID NO: 32569 - RNA, 20 nt, synthetic construct
  source 1..20: mol_type = other RNA
ctataaatcagtaagaaaac

SEQ ID NO: 32570 - RNA, 20 nt, synthetic construct
  source 1..20: mol_type = other RNA
ctataacagatggaactcta

SEQ ID NO: 32571 - RNA, 20 nt, synthetic construct
  source 1..20: mol_type = other RNA
ctataaccacgagtaatgga

SEQ ID NO: 32572 - RNA, 20 nt, synthetic construct
  source 1..20: mol_type = other RNA
ctataagacccagtggctag

SEQ ID NO: 32573 - RNA, 20 nt, synthetic construct
  source 1..20: mol_type = other RNA
ctataagccaatatccctga

SEQ ID NO: 32574 - RNA, 20 nt, synthetic construct
  source 1..20: mol_type = other RNA
ctataaggaaatacaaaaag

SEQ ID NO: 32575 - RNA, 20 nt, synthetic construct
  source 1..20: mol_type = other RNA
ctataaggtaatgacaataa

SEQ ID NO: 32576 - RNA, 20 nt, synthetic construct
  source 1..20: mol_type = other RNA
ctataatccagatggacaaa

SEQ ID NO: 32577 - RNA, 20 nt, synthetic construct
  source 1..20: mol_type = other RNA
ctataattcaattttcatgg

SEQ ID NO: 32578 - RNA, 20 nt, synthetic construct
  source 1..20: mol_type = other RNA
ctataattctgccttcaatg

SEQ ID NO: 32579 - RNA, 20 nt, synthetic construct
  source 1..20: mol_type = other RNA
ctatacaaccggaaaatgct

SEQ ID NO: 32580 - RNA, 20 nt, synthetic construct
  source 1..20: mol_type = other RNA
ctatacacgttacaaaatat

SEQ ID NO: 32581 - RNA, 20 nt, synthetic construct
  source 1..20: mol_type = other RNA
ctatactgtaaccctgtttc

SEQ ID NO: 32582 - RNA, 20 nt, synthetic construct
  source 1..20: mol_type = other RNA
ctatacttcaatgctacagt

SEQ ID NO: 32583 - RNA, 20 nt, synthetic construct
  source 1..20: mol_type = other RNA
ctatacttcatctttcctga

SEQ ID NO: 32584 - RNA, 20 nt, synthetic construct
  source 1..20: mol_type = other RNA
ctatagaaaatagtatgaag

SEQ ID NO: 32585 - RNA, 20 nt, synthetic construct
  source 1..20: mol_type = other RNA
ctatagaattcttcttctgt

SEQ ID NO: 32586 - RNA, 20 nt, synthetic construct
  source 1..20: mol_type = other RNA
ctatagacagcatccccaga

SEQ ID NO: 32587 - RNA, 20 nt, synthetic construct
  source 1..20: mol_type = other RNA
ctatagacccaaagcaaaag

SEQ ID NO: 32588 - RNA, 20 nt, synthetic construct
  source 1..20: mol_type = other RNA
ctatagctgagaagtaacat

SEQ ID NO: 32589 - RNA, 20 nt, synthetic construct
  source 1..20: mol_type = other RNA
ctatagcttctgagctgtta

SEQ ID NO: 32590 - RNA, 20 nt, synthetic construct
  source 1..20: mol_type = other RNA
ctataggagttcattcgtag

SEQ ID NO: 32591 - RNA, 20 nt, synthetic construct
  source 1..20: mol_type = other RNA
ctataggcaatgagtctgac

SEQ ID NO: 32592 - RNA, 20 nt, synthetic construct
  source 1..20: mol_type = other RNA
ctataggtagtacatattca

SEQ ID NO: 32593 - RNA, 20 nt, synthetic construct
  source 1..20: mol_type = other RNA
ctatagtcattccgctaaac

SEQ ID NO: 32594 - RNA, 20 nt, synthetic construct
  source 1..20: mol_type = other RNA
ctatagtggctgcaccattt

SEQ ID NO: 32595 - RNA, 20 nt, synthetic construct
  source 1..20: mol_type = other RNA
ctatagttaagtctgaaagc

SEQ ID NO: 32596 - RNA, 20 nt, synthetic construct
  source 1..20: mol_type = other RNA
ctatagtttaattgggggaa

SEQ ID NO: 32597 - RNA, 20 nt, synthetic construct
  source 1..20: mol_type = other RNA
ctatatcccaaattggcatt

SEQ ID NO: 32598 - RNA, 20 nt, synthetic construct
  source 1..20: mol_type = other RNA
ctatatgatccagcagtttc

SEQ ID NO: 32599 - RNA, 20 nt, synthetic construct
  source 1..20: mol_type = other RNA
ctatattcacttttggaatt

SEQ ID NO: 32600 - RNA, 20 nt, synthetic construct
  source 1..20: mol_type = other RNA
ctatattgtcaatggggaac

SEQ ID NO: 32601 - RNA, 20 nt, synthetic construct
  source 1..20: mol_type = other RNA
ctatatttttccacataaag

SEQ ID NO: 32602 - RNA, 20 nt, synthetic construct
  source 1..20: mol_type = other RNA
ctatcaaaacacttctgtga

SEQ ID NO: 32603 - RNA, 20 nt, synthetic construct
  source 1..20: mol_type = other RNA
ctatcaatctcacacctggg

SEQ ID NO: 32604 - RNA, 20 nt, synthetic construct
  source 1..20: mol_type = other RNA
ctatcacgattctgacccag

SEQ ID NO: 32605 - RNA, 20 nt, synthetic construct
  source 1..20: mol_type = other RNA
ctatcagaagcacaccaagg

SEQ ID NO: 32606 - RNA, 20 nt, synthetic construct
  source 1..20: mol_type = other RNA
ctatcagagcatgtcccctg

SEQ ID NO: 32607 - RNA, 20 nt, synthetic construct
  source 1..20: mol_type = other RNA
ctatcaggccttccacctgc

SEQ ID NO: 32608 - RNA, 20 nt, synthetic construct
  source 1..20: mol_type = other RNA
ctatcagggctgaaaaacac

SEQ ID NO: 32609 - RNA, 20 nt, synthetic construct
  source 1..20: mol_type = other RNA
ctatcagtagtttgctagtg

SEQ ID NO: 32610 - RNA, 20 nt, synthetic construct
  source 1..20: mol_type = other RNA
ctatcatcaagacagagctc

SEQ ID NO: 32611 - RNA, 20 nt, synthetic construct
  source 1..20: mol_type = other RNA
ctatcattttaaagggataa

SEQ ID NO: 32612 - RNA, 20 nt, synthetic construct
  source 1..20: mol_type = other RNA
ctatccaacatgccagcttt

SEQ ID NO: 32613 - RNA, 20 nt, synthetic construct
  source 1..20: mol_type = other RNA
ctatccacatttggttttac

SEQ ID NO: 32614 - RNA, 20 nt, synthetic construct
  source 1..20: mol_type = other RNA
ctatccaccactccacctta

SEQ ID NO: 32615 - RNA, 20 nt, synthetic construct
  source 1..20: mol_type = other RNA
ctatccagaagagaatggct

SEQ ID NO: 32616 - RNA, 20 nt, synthetic construct
  source 1..20: mol_type = other RNA
ctatccagtctctgcaacat

SEQ ID NO: 32617 - RNA, 20 nt, synthetic construct
  source 1..20: mol_type = other RNA
ctatccagtgacacctgagg

SEQ ID NO: 32618 - RNA, 20 nt, synthetic construct
  source 1..20: mol_type = other RNA
ctatcctaatgggcgtggag

SEQ ID NO: 32619 - RNA, 20 nt, synthetic construct
  source 1..20: mol_type = other RNA
ctatcctatgtggggaatgc

SEQ ID NO: 32620 - RNA, 20 nt, synthetic construct
  source 1..20: mol_type = other RNA
ctatcgttatatcctcaggg

SEQ ID NO: 32621 - RNA, 20 nt, synthetic construct
  source 1..20: mol_type = other RNA
ctatctaagcctactgctct

SEQ ID NO: 32622 - RNA, 20 nt, synthetic construct
  source 1..20: mol_type = other RNA
ctatctaataaaatagcagg

SEQ ID NO: 32623 - RNA, 20 nt, synthetic construct
  source 1..20: mol_type = other RNA
ctatctattaacagaagggt

SEQ ID NO: 32624 - RNA, 20 nt, synthetic construct
  source 1..20: mol_type = other RNA
ctatctctcagatctgagtt

SEQ ID NO: 32625 - RNA, 20 nt, synthetic construct
  source 1..20: mol_type = other RNA
ctatctcttcctcctctgga

SEQ ID NO: 32626 - RNA, 20 nt, synthetic construct
  source 1..20: mol_type = other RNA
ctatctgaacattttagctg

SEQ ID NO: 32627 - RNA, 20 nt, synthetic construct
  source 1..20: mol_type = other RNA
ctatctgaactttcgaagtg

SEQ ID NO: 32628 - RNA, 20 nt, synthetic construct
  source 1..20: mol_type = other RNA
ctatcttccctaaagagaat

SEQ ID NO: 32629 - RNA, 20 nt, synthetic construct
  source 1..20: mol_type = other RNA
ctatctttactttcagctca

SEQ ID NO: 32630 - RNA, 20 nt, synthetic construct
  source 1..20: mol_type = other RNA
ctatctttgggaaaatctct

SEQ ID NO: 32631 - RNA, 20 nt, synthetic construct
  source 1..20: mol_type = other RNA
ctatgaaaagcctcaaacga

SEQ ID NO: 32632 - RNA, 20 nt, synthetic construct
  source 1..20: mol_type = other RNA
ctatgaaaattggcgtacat

SEQ ID NO: 32633 - RNA, 20 nt, synthetic construct
  source 1..20: mol_type = other RNA
ctatgaaaatttagcttctg

SEQ ID NO: 32634 - RNA, 20 nt, synthetic construct
  source 1..20: mol_type = other RNA
ctatgaaatcttgaagatgg

SEQ ID NO: 32635 - RNA, 20 nt, synthetic construct
  source 1..20: mol_type = other RNA
ctatgaaatgtggtttttgg

SEQ ID NO: 32636 - RNA, 20 nt, synthetic construct
  source 1..20: mol_type = other RNA
ctatgaagtaattgtttgaa

SEQ ID NO: 32637 - RNA, 20 nt, synthetic construct
  source 1..20: mol_type = other RNA
ctatgaataggtgtgtgttc

SEQ ID NO: 32638 - RNA, 20 nt, synthetic construct
  source 1..20: mol_type = other RNA
ctatgaatatactggaaaac

SEQ ID NO: 32639 - RNA, 20 nt, synthetic construct
  source 1..20: mol_type = other RNA
ctatgaatttgcctattctg

SEQ ID NO: 32640 - RNA, 20 nt, synthetic construct
  source 1..20: mol_type = other RNA
ctatgactaatttgaggcat

SEQ ID NO: 32641 - RNA, 20 nt, synthetic construct
  source 1..20: mol_type = other RNA
ctatgagaaggattagtgtt

SEQ ID NO: 32642 - RNA, 20 nt, synthetic construct
  source 1..20: mol_type = other RNA
ctatgcaataactcaaaatg

SEQ ID NO: 32643 - RNA, 20 nt, synthetic construct
  source 1..20: mol_type = other RNA
ctatgcagaaatctaccaaa

SEQ ID NO: 32644 - RNA, 20 nt, synthetic construct
  source 1..20: mol_type = other RNA
ctatgcagcaacggaaatga

SEQ ID NO: 32645 - RNA, 20 nt, synthetic construct
  source 1..20: mol_type = other RNA
ctatgcatactgcagcactt

SEQ ID NO: 32646 - RNA, 20 nt, synthetic construct
  source 1..20: mol_type = other RNA
ctatgcatactttggaaggt

SEQ ID NO: 32647 - RNA, 20 nt, synthetic construct
  source 1..20: mol_type = other RNA
ctatgccttcagtatgaatg

SEQ ID NO: 32648 - RNA, 20 nt, synthetic construct
  source 1..20: mol_type = other RNA
ctatgctcctgcctcagcct

SEQ ID NO: 32649 - RNA, 20 nt, synthetic construct
  source 1..20: mol_type = other RNA
ctatgctcttggtttcttca

SEQ ID NO: 32650 - RNA, 20 nt, synthetic construct
  source 1..20: mol_type = other RNA
ctatgctgaaaggcatgaaa

SEQ ID NO: 32651 - RNA, 20 nt, synthetic construct
  source 1..20: mol_type = other RNA
ctatgcttaatctgattttt

SEQ ID NO: 32652 - RNA, 20 nt, synthetic construct
  source 1..20: mol_type = other RNA
ctatggacatgaggaaagca

SEQ ID NO: 32653 - RNA, 20 nt, synthetic construct
  source 1..20: mol_type = other RNA
ctatggagcactgtgagcca

SEQ ID NO: 32654 - RNA, 20 nt, synthetic construct
  source 1..20: mol_type = other RNA
ctatggcaggcaccttcaga

SEQ ID NO: 32655 - RNA, 20 nt, synthetic construct
  source 1..20: mol_type = other RNA
ctatggcatttgagggttag

SEQ ID NO: 32656 - RNA, 20 nt, synthetic construct
  source 1..20: mol_type = other RNA
ctatggcttttgagtgtaag

SEQ ID NO: 32657 - RNA, 20 nt, synthetic construct
  source 1..20: mol_type = other RNA
ctatggtgttatttgttctg

SEQ ID NO: 32658 - RNA, 20 nt, synthetic construct
  source 1..20: mol_type = other RNA
ctatgtaagacaatgtcttt

SEQ ID NO: 32659 - RNA, 20 nt, synthetic construct
  source 1..20: mol_type = other RNA
ctatgtaatctcatggaagt

SEQ ID NO: 32660 - RNA, 20 nt, synthetic construct
  source 1..20: mol_type = other RNA
ctatgtaggcacattcaagc

SEQ ID NO: 32661 - RNA, 20 nt, synthetic construct
  source 1..20: mol_type = other RNA
ctatgtatgtggctcacatt

SEQ ID NO: 32662 - RNA, 20 nt, synthetic construct
  source 1..20: mol_type = other RNA
ctatgtcccctggggcctca

SEQ ID NO: 32663 - RNA, 20 nt, synthetic construct
  source 1..20: mol_type = other RNA
ctatgtgacaaacacttttc

SEQ ID NO: 32664 - RNA, 20 nt, synthetic construct
  source 1..20: mol_type = other RNA
ctatgtgacagaatgcatct

SEQ ID NO: 32665 - RNA, 20 nt, synthetic construct
  source 1..20: mol_type = other RNA
ctatgtggggaatgctcata

SEQ ID NO: 32666 - RNA, 20 nt, synthetic construct
  source 1..20: mol_type = other RNA
ctatgtgttgataaatatgt

SEQ ID NO: 32667 - RNA, 20 nt, synthetic construct
  source 1..20: mol_type = other RNA
ctattaaatcatgatgtttg

SEQ ID NO: 32668 - RNA, 20 nt, synthetic construct
  source 1..20: mol_type = other RNA
ctattaacagaagggtatat

SEQ ID NO: 32669 - RNA, 20 nt, synthetic construct
  source 1..20: mol_type = other RNA
ctattaaccatatggtttac

SEQ ID NO: 32670 - RNA, 20 nt, synthetic construct
  source 1..20: mol_type = other RNA
ctattaactttgaaatcaga

SEQ ID NO: 32671 - RNA, 20 nt, synthetic construct
  source 1..20: mol_type = other RNA
ctattaagtattgcattgaa

SEQ ID NO: 32672 - RNA, 20 nt, synthetic construct
  source 1..20: mol_type = other RNA
ctattagagaaatgcaaatc

SEQ ID NO: 32673 - RNA, 20 nt, synthetic construct
  source 1..20: mol_type = other RNA
ctattagttaaccttctggg

SEQ ID NO: 32674 - RNA, 20 nt, synthetic construct
  source 1..20: mol_type = other RNA
ctattataaatggcatcttt

SEQ ID NO: 32675 - RNA, 20 nt, synthetic construct
  source 1..20: mol_type = other RNA
ctattatgagcagttgtatg

SEQ ID NO: 32676 - RNA, 20 nt, synthetic construct
  source 1..20: mol_type = other RNA
ctattatttagagtttgcat

SEQ ID NO: 32677 - RNA, 20 nt, synthetic construct
  source 1..20: mol_type = other RNA
ctattcaacaggtataaagt

SEQ ID NO: 32678 - RNA, 20 nt, synthetic construct
  source 1..20: mol_type = other RNA
ctattcaacctataagaccc

SEQ ID NO: 32679 - RNA, 20 nt, synthetic construct
  source 1..20: mol_type = other RNA
ctattcaagacaagcaagga

SEQ ID NO: 32680 - RNA, 20 nt, synthetic construct
  source 1..20: mol_type = other RNA
ctattcacactgctcctgcc

SEQ ID NO: 32681 - RNA, 20 nt, synthetic construct
  source 1..20: mol_type = other RNA
ctattcataggtaatactct

SEQ ID NO: 32682 - RNA, 20 nt, synthetic construct
  source 1..20: mol_type = other RNA
ctattcattaccaggctgga

SEQ ID NO: 32683 - RNA, 20 nt, synthetic construct
  source 1..20: mol_type = other RNA
ctattccaaatgtctgtctt

SEQ ID NO: 32684 - RNA, 20 nt, synthetic construct
  source 1..20: mol_type = other RNA
ctattccagagaattcagag

SEQ ID NO: 32685 - RNA, 20 nt, synthetic construct
  source 1..20: mol_type = other RNA
ctattccaggatcaaatctg

SEQ ID NO: 32686 - RNA, 20 nt, synthetic construct
  source 1..20: mol_type = other RNA
ctattccataagatctgtct

SEQ ID NO: 32687 - RNA, 20 nt, synthetic construct
  source 1..20: mol_type = other RNA
ctattccattgttctctttg

SEQ ID NO: 32688 - RNA, 20 nt, synthetic construct
  source 1..20: mol_type = other RNA
ctattcccctggatccccca

SEQ ID NO: 32689 - RNA, 20 nt, synthetic construct
  source 1..20: mol_type = other RNA
ctattccctacattgccttc

SEQ ID NO: 32690 - RNA, 20 nt, synthetic construct
  source 1..20: mol_type = other RNA
ctattctctttctgaaattc

SEQ ID NO: 32691 - RNA, 20 nt, synthetic construct
  source 1..20: mol_type = other RNA
ctattctggggctcaagtaa

SEQ ID NO: 32692 - RNA, 20 nt, synthetic construct
  source 1..20: mol_type = other RNA
ctattgaaagcccttgagta

SEQ ID NO: 32693 - RNA, 20 nt, synthetic construct
  source 1..20: mol_type = other RNA
ctattgagagtgaaaacaca

SEQ ID NO: 32694 - RNA, 20 nt, synthetic construct
  source 1..20: mol_type = other RNA
ctattgataaatctaaagcc

SEQ ID NO: 32695 - RNA, 20 nt, synthetic construct
  source 1..20: mol_type = other RNA
ctattgtatgaacattttga

SEQ ID NO: 32696 - RNA, 20 nt, synthetic construct
  source 1..20: mol_type = other RNA
ctattgtcagtaattctgca

SEQ ID NO: 32697 - RNA, 20 nt, synthetic construct
  source 1..20: mol_type = other RNA
ctattgtcttttctatctga

SEQ ID NO: 32698 - RNA, 20 nt, synthetic construct
  source 1..20: mol_type = other RNA
ctattgttgaattgttggag

SEQ ID NO: 32699 - RNA, 20 nt, synthetic construct
  source 1..20: mol_type = other RNA
ctattgtttaaaaacaacac

SEQ ID NO: 32700 - RNA, 20 nt, synthetic construct
  source 1..20: mol_type = other RNA
ctattgttttgcaagattaa

SEQ ID NO: 32701 - RNA, 20 nt, synthetic construct
  source 1..20: mol_type = other RNA
ctatttagagggatgaatgt

SEQ ID NO: 32702 - RNA, 20 nt, synthetic construct
  source 1..20: mol_type = other RNA
ctatttatgttgcacaaaag

SEQ ID NO: 32703 - RNA, 20 nt, synthetic construct
  source 1..20: mol_type = other RNA
ctatttcactaaataaacac

SEQ ID NO: 32704 - RNA, 20 nt, synthetic construct
  source 1..20: mol_type = other RNA
ctatttccccattagagtaa

SEQ ID NO: 32705 - RNA, 20 nt, synthetic construct
  source 1..20: mol_type = other RNA
ctatttcgcaaagcaacatg

SEQ ID NO: 32706 - RNA, 20 nt, synthetic construct
  source 1..20: mol_type = other RNA
ctatttctctttaaagctga

SEQ ID NO: 32707 - RNA, 20 nt, synthetic construct
  source 1..20: mol_type = other RNA
ctatttctgaacaaatatca

SEQ ID NO: 32708 - RNA, 20 nt, synthetic construct
  source 1..20: mol_type = other RNA
ctatttctttccattcaatc

SEQ ID NO: 32709 - RNA, 20 nt, synthetic construct
  source 1..20: mol_type = other RNA
ctatttgtatcttcacaaac

SEQ ID NO: 32710 - RNA, 20 nt, synthetic construct
  source 1..20: mol_type = other RNA
ctattttaccctcattttat

SEQ ID NO: 32711 - RNA, 20 nt, synthetic construct
  source 1..20: mol_type = other RNA
ctattttaggctctgtggtt

SEQ ID NO: 32712 - RNA, 20 nt, synthetic construct
  source 1..20: mol_type = other RNA
ctattttataatgggcaatc

SEQ ID NO: 32713 - RNA, 20 nt, synthetic construct
  source 1..20: mol_type = other RNA
ctattttattagatagtggt

SEQ ID NO: 32714 - RNA, 20 nt, synthetic construct
  source 1..20: mol_type = other RNA
ctattttcataacaaagctc

SEQ ID NO: 32715 - RNA, 20 nt, synthetic construct
  source 1..20: mol_type = other RNA
ctattttcctaaaactcccc

SEQ ID NO: 32716 - RNA, 20 nt, synthetic construct
  source 1..20: mol_type = other RNA
ctattttctacaggtatatt

SEQ ID NO: 32717 - RNA, 20 nt, synthetic construct
  source 1..20: mol_type = other RNA
ctattttctatagtggctgc

SEQ ID NO: 32718 - RNA, 20 nt, synthetic construct
  source 1..20: mol_type = other RNA
ctattttgttattagggtaa

SEQ ID NO: 32719 - RNA, 20 nt, synthetic construct
  source 1..20: mol_type = other RNA
ctatttttctgcaattggaa

SEQ ID NO: 32720 - RNA, 20 nt, synthetic construct
  source 1..20: mol_type = other RNA
ctatttttgtctggtggaca

SEQ ID NO: 32721 - RNA, 20 nt, synthetic construct
  source 1..20: mol_type = other RNA
ctcaaaaatactcaagggct

SEQ ID NO: 32722 - RNA, 20 nt, synthetic construct
  source 1..20: mol_type = other RNA
ctcaaaaatttaagcacaga

SEQ ID NO: 32723 - RNA, 20 nt, synthetic construct
  source 1..20: mol_type = other RNA
ctcaaaacaaacaaacagaa

SEQ ID NO: 32724 - RNA, 20 nt, synthetic construct
  source 1..20: mol_type = other RNA
ctcaaaactgaagtttatca

SEQ ID NO: 32725 - RNA, 20 nt, synthetic construct
  source 1..20: mol_type = other RNA
ctcaaaagatgcagaaaaag

SEQ ID NO: 32726 - RNA, 20 nt, synthetic construct
  source 1..20: mol_type = other RNA
ctcaaaagccatagtgtaaa

SEQ ID NO: 32727 - RNA, 20 nt, synthetic construct
  source 1..20: mol_type = other RNA
ctcaaaaggacatattttat

SEQ ID NO: 32728 - RNA, 20 nt, synthetic construct
  source 1..20: mol_type = other RNA
ctcaaaagtgaatcactaca

SEQ ID NO: 32729 - RNA, 20 nt, synthetic construct
  source 1..20: mol_type = other RNA
ctcaaaatcaacattgcctc

SEQ ID NO: 32730 - RNA, 20 nt, synthetic construct
  source 1..20: mol_type = other RNA
ctcaaaatggatcaaagacc

SEQ ID NO: 32731 - RNA, 20 nt, synthetic construct
  source 1..20: mol_type = other RNA
ctcaaaatgttcatacaata

SEQ ID NO: 32732 - RNA, 20 nt, synthetic construct
  source 1..20: mol_type = other RNA
ctcaaaatttaaagttagtg

SEQ ID NO: 32733 - RNA, 20 nt, synthetic construct
  source 1..20: mol_type = other RNA
ctcaaaatttagtaagggta

SEQ ID NO: 32734 - RNA, 20 nt, synthetic construct
  source 1..20: mol_type = other RNA
ctcaaacagcctaattgtac

SEQ ID NO: 32735 - RNA, 20 nt, synthetic construct
  source 1..20: mol_type = other RNA
ctcaaacagcttgacattct

SEQ ID NO: 32736 - RNA, 20 nt, synthetic construct
  source 1..20: mol_type = other RNA
ctcaaacaggatacaaaaag

SEQ ID NO: 32737 - RNA, 20 nt, synthetic construct
  source 1..20: mol_type = other RNA
ctcaaacccaaattaaagga

SEQ ID NO: 32738 - RNA, 20 nt, synthetic construct
  source 1..20: mol_type = other RNA
ctcaaacgaaccaattacca

SEQ ID NO: 32739 - RNA, 20 nt, synthetic construct
  source 1..20: mol_type = other RNA
ctcaaacgtccatcaacagc

SEQ ID NO: 32740 - RNA, 20 nt, synthetic construct
  source 1..20: mol_type = other RNA
ctcaaactagaaaaagaata

SEQ ID NO: 32741 - RNA, 20 nt, synthetic construct
  source 1..20: mol_type = other RNA
ctcaaactatgcttaatctg

SEQ ID NO: 32742 - RNA, 20 nt, synthetic construct
  source 1..20: mol_type = other RNA
ctcaaactccaagtctcatg

SEQ ID NO: 32743 - RNA, 20 nt, synthetic construct
  source 1..20: mol_type = other RNA
ctcaaactgtgtgcttggag

SEQ ID NO: 32744 - RNA, 20 nt, synthetic construct
  source 1..20: mol_type = other RNA
ctcaaagcatatgaatctag

SEQ ID NO: 32745 - RNA, 20 nt, synthetic construct
  source 1..20: mol_type = other RNA
ctcaaagcccaccagcataa

SEQ ID NO: 32746 - RNA, 20 nt, synthetic construct
  source 1..20: mol_type = other RNA
ctcaaaggagagaagagggg

SEQ ID NO: 32747 - RNA, 20 nt, synthetic construct
  source 1..20: mol_type = other RNA
ctcaaaggggcattccgtgg

SEQ ID NO: 32748 - RNA, 20 nt, synthetic construct
  source 1..20: mol_type = other RNA
ctcaaagtggaaacaactca

SEQ ID NO: 32749 - RNA, 20 nt, synthetic construct
  source 1..20: mol_type = other RNA
ctcaaataatttggcaaaaa

SEQ ID NO: 32750 - RNA, 20 nt, synthetic construct
  source 1..20: mol_type = other RNA
ctcaaatccaaattcacagc

SEQ ID NO: 32751 - RNA, 20 nt, synthetic construct
  source 1..20: mol_type = other RNA
ctcaaatgaacaggttcttc

SEQ ID NO: 32752 - RNA, 20 nt, synthetic construct
  source 1..20: mol_type = other RNA
ctcaaatgccatagagcttt

SEQ ID NO: 32753 - RNA, 20 nt, synthetic construct
  source 1..20: mol_type = other RNA
ctcaaatgtctcattgtgga

SEQ ID NO: 32754 - RNA, 20 nt, synthetic construct
  source 1..20: mol_type = other RNA
ctcaaattaatcagtctgta

SEQ ID NO: 32755 - RNA, 20 nt, synthetic construct
  source 1..20: mol_type = other RNA
ctcaaattagtcatagcagt

SEQ ID NO: 32756 - RNA, 20 nt, synthetic construct
  source 1..20: mol_type = other RNA
ctcaaattctgagggaaatt

SEQ ID NO: 32757 - RNA, 20 nt, synthetic construct
  source 1..20: mol_type = other RNA
ctcaaattgtgtgttctctt

SEQ ID NO: 32758 - RNA, 20 nt, synthetic construct
  source 1..20: mol_type = other RNA
ctcaaatttcatttactgaa

SEQ ID NO: 32759 - RNA, 20 nt, synthetic construct
  source 1..20: mol_type = other RNA
ctcaacaagagaggacagtt

SEQ ID NO: 32760 - RNA, 20 nt, synthetic construct
  source 1..20: mol_type = other RNA
ctcaacactgtgttcttttc

SEQ ID NO: 32761 - RNA, 20 nt, synthetic construct
  source 1..20: mol_type = other RNA
ctcaacacttcagtggtaag

SEQ ID NO: 32762 - RNA, 20 nt, synthetic construct
  source 1..20: mol_type = other RNA
ctcaacagcacttttgtact

SEQ ID NO: 32763 - RNA, 20 nt, synthetic construct
  source 1..20: mol_type = other RNA
ctcaacatcactagctatta

SEQ ID NO: 32764 - RNA, 20 nt, synthetic construct
  source 1..20: mol_type = other RNA
ctcaacatgtgtatttaggg

SEQ ID NO: 32765 - RNA, 20 nt, synthetic construct
  source 1..20: mol_type = other RNA
ctcaacattcattcatgaca

SEQ ID NO: 32766 - RNA, 20 nt, synthetic construct
  source 1..20: mol_type = other RNA
ctcaacctactttaaatcag

SEQ ID NO: 32767 - RNA, 20 nt, synthetic construct
  source 1..20: mol_type = other RNA
ctcaacctttgcctcctggg

SEQ ID NO: 32768 - RNA, 20 nt, synthetic construct
  source 1..20: mol_type = other RNA
ctcaacgacaatctctgggg

SEQ ID NO: 32769 - RNA, 20 nt, synthetic construct
  source 1..20: mol_type = other RNA
ctcaacgcctgtgatcccag

SEQ ID NO: 32770 - RNA, 20 nt, synthetic construct
  source 1..20: mol_type = other RNA
ctcaactgcctctacatcac

SEQ ID NO: 32771 - RNA, 20 nt, synthetic construct
  source 1..20: mol_type = other RNA
ctcaactggcccctccatgg

SEQ ID NO: 32772 - RNA, 20 nt, synthetic construct
  source 1..20: mol_type = other RNA
ctcaacttagccttggtaaa

SEQ ID NO: 32773 - RNA, 20 nt, synthetic construct
  source 1..20: mol_type = other RNA
ctcaacttcctgttttagtg

SEQ ID NO: 32774 - RNA, 20 nt, synthetic construct
  source 1..20: mol_type = other RNA
ctcaactttaggttacgtac

SEQ ID NO: 32775 - RNA, 20 nt, synthetic construct
  source 1..20: mol_type = other RNA
ctcaagaaaacaagaataaa

SEQ ID NO: 32776 - RNA, 20 nt, synthetic construct
  source 1..20: mol_type = other RNA
ctcaagaaggtatcatcgga

SEQ ID NO: 32777 - RNA, 20 nt, synthetic construct
  source 1..20: mol_type = other RNA
ctcaagagttacttctggaa

SEQ ID NO: 32778 - RNA, 20 nt, synthetic construct
  source 1..20: mol_type = other RNA
ctcaagattgtgtgatttca

SEQ ID NO: 32779 - RNA, 20 nt, synthetic construct
  source 1..20: mol_type = other RNA
ctcaagcaatctgaaacgac

SEQ ID NO: 32780 - RNA, 20 nt, synthetic construct
  source 1..20: mol_type = other RNA
ctcaagccatcctccagcct

SEQ ID NO: 32781 - RNA, 20 nt, synthetic construct
  source 1..20: mol_type = other RNA
ctcaagcctgataagctccc

SEQ ID NO: 32782 - RNA, 20 nt, synthetic construct
  source 1..20: mol_type = other RNA
ctcaaggcagaacacactgc

SEQ ID NO: 32783 - RNA, 20 nt, synthetic construct
  source 1..20: mol_type = other RNA
ctcaaggccaactgtcctct

SEQ ID NO: 32784 - RNA, 20 nt, synthetic construct
  source 1..20: mol_type = other RNA
ctcaagggctttcaatagtg

SEQ ID NO: 32785 - RNA, 20 nt, synthetic construct
  source 1..20: mol_type = other RNA
ctcaagtaagtgaaatcata

SEQ ID NO: 32786 - RNA, 20 nt, synthetic construct
  source 1..20: mol_type = other RNA
ctcaagtaattgttttccct

SEQ ID NO: 32787 - RNA, 20 nt, synthetic construct
  source 1..20: mol_type = other RNA
ctcaagtcttttcctagact

SEQ ID NO: 32788 - RNA, 20 nt, synthetic construct
  source 1..20: mol_type = other RNA
ctcaagtgatgcaactcctg

SEQ ID NO: 32789 - RNA, 20 nt, synthetic construct
  source 1..20: mol_type = other RNA
ctcaagttccggttctcagg

SEQ ID NO: 32790 - RNA, 20 nt, synthetic construct
  source 1..20: mol_type = other RNA
ctcaataaggaaagcacgtt

SEQ ID NO: 32791 - RNA, 20 nt, synthetic construct
  source 1..20: mol_type = other RNA
ctcaatacacgtggctgtca

SEQ ID NO: 32792 - RNA, 20 nt, synthetic construct
  source 1..20: mol_type = other RNA
ctcaatacctgaaaagtgta

SEQ ID NO: 32793 - RNA, 20 nt, synthetic construct
  source 1..20: mol_type = other RNA
ctcaatagtgtcctttgatg

SEQ ID NO: 32794 - RNA, 20 nt, synthetic construct
  source 1..20: mol_type = other RNA
ctcaatcagggccttcccaa

SEQ ID NO: 32795 - RNA, 20 nt, synthetic construct
  source 1..20: mol_type = other RNA
ctcaatcagtggccagtgac

SEQ ID NO: 32796 - RNA, 20 nt, synthetic construct
  source 1..20: mol_type = other RNA
ctcaatcatgtcaagaatga

SEQ ID NO: 32797 - RNA, 20 nt, synthetic construct
  source 1..20: mol_type = other RNA
ctcaatccccatctgggata

SEQ ID NO: 32798 - RNA, 20 nt, synthetic construct
  source 1..20: mol_type = other RNA
ctcaatcccttccccacctt

SEQ ID NO: 32799 - RNA, 20 nt, synthetic construct
  source 1..20: mol_type = other RNA
ctcaatctcctgatccacct

SEQ ID NO: 32800 - RNA, 20 nt, synthetic construct
  source 1..20: mol_type = other RNA
ctcaatcttcttatttgtta

SEQ ID NO: 32801 - RNA, 20 nt, synthetic construct
  source 1..20: mol_type = other RNA
ctcaatggttaagactgctg

SEQ ID NO: 32802 - RNA, 20 nt, synthetic construct
  source 1..20: mol_type = other RNA
ctcaatgttggttagtgttg

SEQ ID NO: 32803 - RNA, 20 nt, synthetic construct
  source 1..20: mol_type = other RNA
ctcaattaagcaacctttta

SEQ ID NO: 32804 - RNA, 20 nt, synthetic construct
  source 1..20: mol_type = other RNA
ctcaattaatgcccaatcaa

SEQ ID NO: 32805 - RNA, 20 nt, synthetic construct
  source 1..20: mol_type = other RNA
ctcaattcagaagctaaatt

SEQ ID NO: 32806 - RNA, 20 nt, synthetic construct
  source 1..20: mol_type = other RNA
ctcaatttttgtattgacta

SEQ ID NO: 32807 - RNA, 20 nt, synthetic construct
  source 1..20: mol_type = other RNA
ctcacaaaaagtgtgaccac

SEQ ID NO: 32808 - RNA, 20 nt, synthetic construct
  source 1..20: mol_type = other RNA
ctcacaacaggcctgagccg

SEQ ID NO: 32809 - RNA, 20 nt, synthetic construct
  source 1..20: mol_type = other RNA
ctcacacctgggtatacagc

SEQ ID NO: 32810 - RNA, 20 nt, synthetic construct
  source 1..20: mol_type = other RNA
ctcacacgagaaggacagct

SEQ ID NO: 32811 - RNA, 20 nt, synthetic construct
  source 1..20: mol_type = other RNA
ctcacactgttgtccaggcc

SEQ ID NO: 32812 - RNA, 20 nt, synthetic construct
  source 1..20: mol_type = other RNA
ctcacacttactaaatgatc

SEQ ID NO: 32813 - RNA, 20 nt, synthetic construct
  source 1..20: mol_type = other RNA
ctcacagcttaccaagtgcc

SEQ ID NO: 32814 - RNA, 20 nt, synthetic construct
  source 1..20: mol_type = other RNA
ctcacagtcacaaagcttta

SEQ ID NO: 32815 - RNA, 20 nt, synthetic construct
  source 1..20: mol_type = other RNA
ctcacagtccactcacctgt

SEQ ID NO: 32816 - RNA, 20 nt, synthetic construct
  source 1..20: mol_type = other RNA
ctcacagtgctccatagctt

SEQ ID NO: 32817 - RNA, 20 nt, synthetic construct
  source 1..20: mol_type = other RNA
ctcacatcagttaccaccaa

SEQ ID NO: 32818 - RNA, 20 nt, synthetic construct
  source 1..20: mol_type = other RNA
ctcacatgtttggtcaattg

SEQ ID NO: 32819 - RNA, 20 nt, synthetic construct
  source 1..20: mol_type = other RNA
ctcacattcacagcgtgcac

SEQ ID NO: 32820 - RNA, 20 nt, synthetic construct
  source 1..20: mol_type = other RNA
ctcacattgtatttctgtta

SEQ ID NO: 32821 - RNA, 20 nt, synthetic construct
  source 1..20: mol_type = other RNA
ctcacatttagtttcatcta

SEQ ID NO: 32822 - RNA, 20 nt, synthetic construct
  source 1..20: mol_type = other RNA
ctcaccaacatccacagctt

SEQ ID NO: 32823 - RNA, 20 nt, synthetic construct
  source 1..20: mol_type = other RNA
ctcaccctcaggactctgct

SEQ ID NO: 32824 - RNA, 20 nt, synthetic construct
  source 1..20: mol_type = other RNA
ctcacctagctgttttcatg

SEQ ID NO: 32825 - RNA, 20 nt, synthetic construct
  source 1..20: mol_type = other RNA
ctcacctcaaggccaactgt

SEQ ID NO: 32826 - RNA, 20 nt, synthetic construct
  source 1..20: mol_type = other RNA
ctcacctcacattcacagcg

SEQ ID NO: 32827 - RNA, 20 nt, synthetic construct
  source 1..20: mol_type = other RNA
ctcacctctggactcagggt

SEQ ID NO: 32828 - RNA, 20 nt, synthetic construct
  source 1..20: mol_type = other RNA
ctcacctgtcatgtcaaatt

SEQ ID NO: 32829 - RNA, 20 nt, synthetic construct
  source 1..20: mol_type = other RNA
ctcaccttctgctgggccca

SEQ ID NO: 32830 - RNA, 20 nt, synthetic construct
  source 1..20: mol_type = other RNA
ctcacgaaagcggtcaacgc

SEQ ID NO: 32831 - RNA, 20 nt, synthetic construct
  source 1..20: mol_type = other RNA
ctcacgatactttttatttt

SEQ ID NO: 32832 - RNA, 20 nt, synthetic construct
  source 1..20: mol_type = other RNA
ctcacgtcaccgcaacctcc

SEQ ID NO: 32833 - RNA, 20 nt, synthetic construct
  source 1..20: mol_type = other RNA
ctcacgttaccctctggaat

SEQ ID NO: 32834 - RNA, 20 nt, synthetic construct
  source 1..20: mol_type = other RNA
ctcactaagtcagaattcac

SEQ ID NO: 32835 - RNA, 20 nt, synthetic construct
  source 1..20: mol_type = other RNA
ctcactagagcttcaacctc

SEQ ID NO: 32836 - RNA, 20 nt, synthetic construct
  source 1..20: mol_type = other RNA
ctcactcacctagctgtttt

SEQ ID NO: 32837 - RNA, 20 nt, synthetic construct
  source 1..20: mol_type = other RNA
ctcactcatttccgttgctg

SEQ ID NO: 32838 - RNA, 20 nt, synthetic construct
  source 1..20: mol_type = other RNA
ctcactccaaagcaaacgtg

SEQ ID NO: 32839 - RNA, 20 nt, synthetic construct
  source 1..20: mol_type = other RNA
ctcactcttaccaaggctgg

SEQ ID NO: 32840 - RNA, 20 nt, synthetic construct
  source 1..20: mol_type = other RNA
ctcactgaaaccctcacgaa

SEQ ID NO: 32841 - RNA, 20 nt, synthetic construct
  source 1..20: mol_type = other RNA
ctcactggccagcattactt

SEQ ID NO: 32842 - RNA, 20 nt, synthetic construct
  source 1..20: mol_type = other RNA
ctcactggcctgagctctca

SEQ ID NO: 32843 - RNA, 20 nt, synthetic construct
  source 1..20: mol_type = other RNA
ctcactgtactactgacctg

SEQ ID NO: 32844 - RNA, 20 nt, synthetic construct
  source 1..20: mol_type = other RNA
ctcactgtctccatgtcctc

SEQ ID NO: 32845 - RNA, 20 nt, synthetic construct
  source 1..20: mol_type = other RNA
ctcactgtgatacctagtac

SEQ ID NO: 32846 - RNA, 20 nt, synthetic construct
  source 1..20: mol_type = other RNA
ctcacttattagcaaagagg

SEQ ID NO: 32847 - RNA, 20 nt, synthetic construct
  source 1..20: mol_type = other RNA
ctcactttgggattagctta

SEQ ID NO: 32848 - RNA, 20 nt, synthetic construct
  source 1..20: mol_type = other RNA
ctcagaaaattttcttttgt

SEQ ID NO: 32849 - RNA, 20 nt, synthetic construct
  source 1..20: mol_type = other RNA
ctcagaaacaacaacaacaa

SEQ ID NO: 32850 - RNA, 20 nt, synthetic construct
  source 1..20: mol_type = other RNA
ctcagaaattataagcttcc

SEQ ID NO: 32851 - RNA, 20 nt, synthetic construct
  source 1..20: mol_type = other RNA
ctcagaagctatagctgaga

SEQ ID NO: 32852 - RNA, 20 nt, synthetic construct
  source 1..20: mol_type = other RNA
ctcagaagctttcagactta

SEQ ID NO: 32853 - RNA, 20 nt, synthetic construct
  source 1..20: mol_type = other RNA
ctcagaagtactactcatta

SEQ ID NO: 32854 - RNA, 20 nt, synthetic construct
  source 1..20: mol_type = other RNA
ctcagaattaatataagatg

SEQ ID NO: 32855 - RNA, 20 nt, synthetic construct
  source 1..20: mol_type = other RNA
ctcagaatttgaggtcttct

SEQ ID NO: 32856 - RNA, 20 nt, synthetic construct
  source 1..20: mol_type = other RNA
ctcagagggaaactgttttt

SEQ ID NO: 32857 - RNA, 20 nt, synthetic construct
  source 1..20: mol_type = other RNA
ctcagagtatatatgctccc

SEQ ID NO: 32858 - RNA, 20 nt, synthetic construct
  source 1..20: mol_type = other RNA
ctcagatatcaatctggata

SEQ ID NO: 32859 - RNA, 20 nt, synthetic construct
  source 1..20: mol_type = other RNA
ctcagatctgagagatagaa

SEQ ID NO: 32860 - RNA, 20 nt, synthetic construct
  source 1..20: mol_type = other RNA
ctcagatctgagtttgctct

SEQ ID NO: 32861 - RNA, 20 nt, synthetic construct
  source 1..20: mol_type = other RNA
ctcagatctgttgcagtccc

SEQ ID NO: 32862 - RNA, 20 nt, synthetic construct
  source 1..20: mol_type = other RNA
ctcagatgtctccattttgc

SEQ ID NO: 32863 - RNA, 20 nt, synthetic construct
  source 1..20: mol_type = other RNA
ctcagattcaccaattgtta

SEQ ID NO: 32864 - RNA, 20 nt, synthetic construct
  source 1..20: mol_type = other RNA
ctcagcaaaagcaattatta

SEQ ID NO: 32865 - RNA, 20 nt, synthetic construct
  source 1..20: mol_type = other RNA
ctcagcacagagccgaaatg

SEQ ID NO: 32866 - RNA, 20 nt, synthetic construct
  source 1..20: mol_type = other RNA
ctcagcagttttaaagaatt

SEQ ID NO: 32867 - RNA, 20 nt, synthetic construct
  source 1..20: mol_type = other RNA
ctcagcataattggttaaac

SEQ ID NO: 32868 - RNA, 20 nt, synthetic construct
  source 1..20: mol_type = other RNA
ctcagcatgtcttcagaggc

SEQ ID NO: 32869 - RNA, 20 nt, synthetic construct
  source 1..20: mol_type = other RNA
ctcagccccctccctaccac

SEQ ID NO: 32870 - RNA, 20 nt, synthetic construct
  source 1..20: mol_type = other RNA
ctcagccccctcgaagagac

SEQ ID NO: 32871 - RNA, 20 nt, synthetic construct
  source 1..20: mol_type = other RNA
ctcagcccctcatcctccgt

SEQ ID NO: 32872 - RNA, 20 nt, synthetic construct
  source 1..20: mol_type = other RNA
ctcagccgccgcagaggcca

SEQ ID NO: 32873 - RNA, 20 nt, synthetic construct
  source 1..20: mol_type = other RNA
ctcagcctcccgagtagttg

SEQ ID NO: 32874 - RNA, 20 nt, synthetic construct
  source 1..20: mol_type = other RNA
ctcagcctgttgggaggttt

SEQ ID NO: 32875 - RNA, 20 nt, synthetic construct
  source 1..20: mol_type = other RNA
ctcagccttttctgatttgc

SEQ ID NO: 32876 - RNA, 20 nt, synthetic construct
  source 1..20: mol_type = other RNA
ctcagctatagcttctgagc

SEQ ID NO: 32877 - RNA, 20 nt, synthetic construct
  source 1..20: mol_type = other RNA
ctcagctcattacagtctcg

SEQ ID NO: 32878 - RNA, 20 nt, synthetic construct
  source 1..20: mol_type = other RNA
ctcagctcctcagaaggcca

SEQ ID NO: 32879 - RNA, 20 nt, synthetic construct
  source 1..20: mol_type = other RNA
ctcagctgtcactctcttta

SEQ ID NO: 32880 - RNA, 20 nt, synthetic construct
  source 1..20: mol_type = other RNA
ctcaggaccagatgacttca

SEQ ID NO: 32881 - RNA, 20 nt, synthetic construct
  source 1..20: mol_type = other RNA
ctcaggaccaggcagtcctc

SEQ ID NO: 32882 - RNA, 20 nt, synthetic construct
  source 1..20: mol_type = other RNA
ctcaggactctgctcaaagg

SEQ ID NO: 32883 - RNA, 20 nt, synthetic construct
  source 1..20: mol_type = other RNA
ctcaggagattaaggctgga

SEQ ID NO: 32884 - RNA, 20 nt, synthetic construct
  source 1..20: mol_type = other RNA
ctcaggagcctagtcatcca

SEQ ID NO: 32885 - RNA, 20 nt, synthetic construct
  source 1..20: mol_type = other RNA
ctcaggaggctgaggcagga

SEQ ID NO: 32886 - RNA, 20 nt, synthetic construct
  source 1..20: mol_type = other RNA
ctcaggagtaactgctcctc

SEQ ID NO: 32887 - RNA, 20 nt, synthetic construct
  source 1..20: mol_type = other RNA
ctcaggatctacattaaaaa

SEQ ID NO: 32888 - RNA, 20 nt, synthetic construct
  source 1..20: mol_type = other RNA
ctcaggcagtctagtccatg

SEQ ID NO: 32889 - RNA, 20 nt, synthetic construct
  source 1..20: mol_type = other RNA
ctcaggccagtgagtgatga

SEQ ID NO: 32890 - RNA, 20 nt, synthetic construct
  source 1..20: mol_type = other RNA
ctcaggcctgttgtgaggat

SEQ ID NO: 32891 - RNA, 20 nt, synthetic construct
  source 1..20: mol_type = other RNA
ctcaggctccaggtagaatg

SEQ ID NO: 32892 - RNA, 20 nt, synthetic construct
  source 1..20: mol_type = other RNA
ctcagggcctgcttttggaa

SEQ ID NO: 32893 - RNA, 20 nt, synthetic construct
  source 1..20: mol_type = other RNA
ctcaggggtaaaggggatgg

SEQ ID NO: 32894 - RNA, 20 nt, synthetic construct
  source 1..20: mol_type = other RNA
ctcagggtaggaaaagactt

SEQ ID NO: 32895 - RNA, 20 nt, synthetic construct
  source 1..20: mol_type = other RNA
ctcagggtcacttcctctct

SEQ ID NO: 32896 - RNA, 20 nt, synthetic construct
  source 1..20: mol_type = other RNA
ctcagggtgcgacctcgaag

SEQ ID NO: 32897 - RNA, 20 nt, synthetic construct
  source 1..20: mol_type = other RNA
ctcaggtgtcactggataga

SEQ ID NO: 32898 - RNA, 20 nt, synthetic construct
  source 1..20: mol_type = other RNA
ctcaggtttagaatatattt

SEQ ID NO: 32899 - RNA, 20 nt, synthetic construct
  source 1..20: mol_type = other RNA
ctcagtacttccctctttct

SEQ ID NO: 32900 - RNA, 20 nt, synthetic construct
  source 1..20: mol_type = other RNA
ctcagtatcctttcaaggta

SEQ ID NO: 32901 - RNA, 20 nt, synthetic construct
  source 1..20: mol_type = other RNA
ctcagtcataatttgtgtcc

SEQ ID NO: 32902 - RNA, 20 nt, synthetic construct
  source 1..20: mol_type = other RNA
ctcagtcccaaatgggagca

SEQ ID NO: 32903 - RNA, 20 nt, synthetic construct
  source 1..20: mol_type = other RNA
ctcagtccctcaccttctgc

SEQ ID NO: 32904 - RNA, 20 nt, synthetic construct
  source 1..20: mol_type = other RNA
ctcagtctcgaaaaggaatg

SEQ ID NO: 32905 - RNA, 20 nt, synthetic construct
  source 1..20: mol_type = other RNA
ctcagtctgtttgccatctt

SEQ ID NO: 32906 - RNA, 20 nt, synthetic construct
  source 1..20: mol_type = other RNA
ctcagtggccctgttggcct

SEQ ID NO: 32907 - RNA, 20 nt, synthetic construct
  source 1..20: mol_type = other RNA
ctcagtgggttcaattatgt

SEQ ID NO: 32908 - RNA, 20 nt, synthetic construct
  source 1..20: mol_type = other RNA
ctcagtggtagttacacaag

SEQ ID NO: 32909 - RNA, 20 nt, synthetic construct
  source 1..20: mol_type = other RNA
ctcagtggtgcttttgctgc

SEQ ID NO: 32910 - RNA, 20 nt, synthetic construct
  source 1..20: mol_type = other RNA
ctcagtggttctgcgtgtta

SEQ ID NO: 32911 - RNA, 20 nt, synthetic construct
  source 1..20: mol_type = other RNA
ctcagtgtgtttttgtaaat

SEQ ID NO: 32912 - RNA, 20 nt, synthetic construct
  source 1..20: mol_type = other RNA
ctcagttaaacccaacaaac

SEQ ID NO: 32913 - RNA, 20 nt, synthetic construct
  source 1..20: mol_type = other RNA
ctcagttgacatcctttaat

SEQ ID NO: 32914 - RNA, 20 nt, synthetic construct
  source 1..20: mol_type = other RNA
ctcagttgcagcatgctcac

SEQ ID NO: 32915 - RNA, 20 nt, synthetic construct
  source 1..20: mol_type = other RNA
ctcagtttcaaaagctcccc

SEQ ID NO: 32916 - RNA, 20 nt, synthetic construct
  source 1..20: mol_type = other RNA
ctcataaagccggattcctt

SEQ ID NO: 32917 - RNA, 20 nt, synthetic construct
  source 1..20: mol_type = other RNA
ctcataagaactcctggtct

SEQ ID NO: 32918 - RNA, 20 nt, synthetic construct
  source 1..20: mol_type = other RNA
ctcataatagtctcacgata

SEQ ID NO: 32919 - RNA, 20 nt, synthetic construct
  source 1..20: mol_type = other RNA
ctcataattaaagagagtaa

SEQ ID NO: 32920 - RNA, 20 nt, synthetic construct
  source 1..20: mol_type = other RNA
ctcataccaggttttggtaa

SEQ ID NO: 32921 - RNA, 20 nt, synthetic construct
  source 1..20: mol_type = other RNA
ctcatacttgctttattact

SEQ ID NO: 32922 - RNA, 20 nt, synthetic construct
  source 1..20: mol_type = other RNA
ctcatactttgtcaggcatg

SEQ ID NO: 32923 - RNA, 20 nt, synthetic construct
  source 1..20: mol_type = other RNA
ctcatagtcttccaaaatat

SEQ ID NO: 32924 - RNA, 20 nt, synthetic construct
  source 1..20: mol_type = other RNA
ctcatatcagttatcacacc

SEQ ID NO: 32925 - RNA, 20 nt, synthetic construct
  source 1..20: mol_type = other RNA
ctcatattagtctgtagctt

SEQ ID NO: 32926 - RNA, 20 nt, synthetic construct
  source 1..20: mol_type = other RNA
ctcatattattttttcccgc

SEQ ID NO: 32927 - RNA, 20 nt, synthetic construct
  source 1..20: mol_type = other RNA
ctcatcatttatacccaagt

SEQ ID NO: 32928 - RNA, 20 nt, synthetic construct
  source 1..20: mol_type = other RNA
ctcatccacaatgagacatt

SEQ ID NO: 32929 - RNA, 20 nt, synthetic construct
  source 1..20: mol_type = other RNA
ctcatccctcatatcagtta

SEQ ID NO: 32930 - RNA, 20 nt, synthetic construct
  source 1..20: mol_type = other RNA
ctcatccggtctcagttttt

SEQ ID NO: 32931 - RNA, 20 nt, synthetic construct
  source 1..20: mol_type = other RNA
ctcatcctccgtagctgtcg

SEQ ID NO: 32932 - RNA, 20 nt, synthetic construct
  source 1..20: mol_type = other RNA
ctcatctaaattaagcttcg

SEQ ID NO: 32933 - RNA, 20 nt, synthetic construct
  source 1..20: mol_type = other RNA
ctcatctaagcctacctccc

SEQ ID NO: 32934 - RNA, 20 nt, synthetic construct
  source 1..20: mol_type = other RNA
ctcatctctgcaaaacattt

SEQ ID NO: 32935 - RNA, 20 nt, synthetic construct
  source 1..20: mol_type = other RNA
ctcatctgtcaaaaagagaa

SEQ ID NO: 32936 - RNA, 20 nt, synthetic construct
  source 1..20: mol_type = other RNA
ctcatctgtcactttcctat

SEQ ID NO: 32937 - RNA, 20 nt, synthetic construct
  source 1..20: mol_type = other RNA
ctcatcttagccgggaggag

SEQ ID NO: 32938 - RNA, 20 nt, synthetic construct
  source 1..20: mol_type = other RNA
ctcatgagagctgtgccgag

SEQ ID NO: 32939 - RNA, 20 nt, synthetic construct
  source 1..20: mol_type = other RNA
ctcatgagtcctgaaaattc

SEQ ID NO: 32940 - RNA, 20 nt, synthetic construct
  source 1..20: mol_type = other RNA
ctcatgcaattccccagcct

SEQ ID NO: 32941 - RNA, 20 nt, synthetic construct
  source 1..20: mol_type = other RNA
ctcatgcatccacattttgt

SEQ ID NO: 32942 - RNA, 20 nt, synthetic construct
  source 1..20: mol_type = other RNA
ctcatgcttaggatcccagt

SEQ ID NO: 32943 - RNA, 20 nt, synthetic construct
  source 1..20: mol_type = other RNA
ctcatgcttgctccagagaa

SEQ ID NO: 32944 - RNA, 20 nt, synthetic construct
  source 1..20: mol_type = other RNA
ctcatggaagttatttaatc

SEQ ID NO: 32945 - RNA, 20 nt, synthetic construct
  source 1..20: mol_type = other RNA
ctcatgtaactaattactgt

SEQ ID NO: 32946 - RNA, 20 nt, synthetic construct
  source 1..20: mol_type = other RNA
ctcatgtatgttttagcctt

SEQ ID NO: 32947 - RNA, 20 nt, synthetic construct
  source 1..20: mol_type = other RNA
ctcatgtattttcctaacca

SEQ ID NO: 32948 - RNA, 20 nt, synthetic construct
  source 1..20: mol_type = other RNA
ctcatgtcagagacacatac

SEQ ID NO: 32949 - RNA, 20 nt, synthetic construct
  source 1..20: mol_type = other RNA
ctcatgtccatagttaatgt

SEQ ID NO: 32950 - RNA, 20 nt, synthetic construct
  source 1..20: mol_type = other RNA
ctcatgtctacctgtctttc

SEQ ID NO: 32951 - RNA, 20 nt, synthetic construct
  source 1..20: mol_type = other RNA
ctcatgttgggtaaaaataa

SEQ ID NO: 32952 - RNA, 20 nt, synthetic construct
  source 1..20: mol_type = other RNA
ctcattaaaaatcaacccat

SEQ ID NO: 32953 - RNA, 20 nt, synthetic construct
  source 1..20: mol_type = other RNA
ctcattacagtctcgacccc

SEQ ID NO: 32954 - RNA, 20 nt, synthetic construct
  source 1..20: mol_type = other RNA
ctcattagttatctcttaga

SEQ ID NO: 32955 - RNA, 20 nt, synthetic construct
  source 1..20: mol_type = other RNA
ctcattataacataaaagcg

SEQ ID NO: 32956 - RNA, 20 nt, synthetic construct
  source 1..20: mol_type = other RNA
ctcattatcccagacagata

SEQ ID NO: 32957 - RNA, 20 nt, synthetic construct
  source 1..20: mol_type = other RNA
ctcattatggttgttggcta

SEQ ID NO: 32958 - RNA, 20 nt, synthetic construct
  source 1..20: mol_type = other RNA
ctcattcacactagtcaccc

SEQ ID NO: 32959 - RNA, 20 nt, synthetic construct
  source 1..20: mol_type = other RNA
ctcattcactagacacattt

SEQ ID NO: 32960 - RNA, 20 nt, synthetic construct
  source 1..20: mol_type = other RNA
ctcattcatctgcagtgtcc

SEQ ID NO: 32961 - RNA, 20 nt, synthetic construct
  source 1..20: mol_type = other RNA
ctcattccaatccttccttc

SEQ ID NO: 32962 - RNA, 20 nt, synthetic construct
  source 1..20: mol_type = other RNA
ctcattcttctctaatgtaa

SEQ ID NO: 32963 - RNA, 20 nt, synthetic construct
  source 1..20: mol_type = other RNA
ctcattgaagctactattcc

SEQ ID NO: 32964 - RNA, 20 nt, synthetic construct
  source 1..20: mol_type = other RNA
ctcattgcctatagacagca

SEQ ID NO: 32965 - RNA, 20 nt, synthetic construct
  source 1..20: mol_type = other RNA
ctcattgtggatgagattaa

SEQ ID NO: 32966 - RNA, 20 nt, synthetic construct
  source 1..20: mol_type = other RNA
ctcatttaaacgtcagagca

SEQ ID NO: 32967 - RNA, 20 nt, synthetic construct
  source 1..20: mol_type = other RNA
ctcatttccgttgctgcata

SEQ ID NO: 32968 - RNA, 20 nt, synthetic construct
  source 1..20: mol_type = other RNA
ctcatttcctttcagtcggt

SEQ ID NO: 32969 - RNA, 20 nt, synthetic construct
  source 1..20: mol_type = other RNA
ctcatttctgcttgaatgtg

SEQ ID NO: 32970 - RNA, 20 nt, synthetic construct
  source 1..20: mol_type = other RNA
ctcatttgaactttccagaa

SEQ ID NO: 32971 - RNA, 20 nt, synthetic construct
  source 1..20: mol_type = other RNA
ctcatttgcagagcaaactc

SEQ ID NO: 32972 - RNA, 20 nt, synthetic construct
  source 1..20: mol_type = other RNA
ctcattttataagggtgata

SEQ ID NO: 32973 - RNA, 20 nt, synthetic construct
  source 1..20: mol_type = other RNA
ctcattttgaaaaacagatc

SEQ ID NO: 32974 - RNA, 20 nt, synthetic construct
  source 1..20: mol_type = other RNA
ctcatttttcaggggggcca

SEQ ID NO: 32975 - RNA, 20 nt, synthetic construct
  source 1..20: mol_type = other RNA
ctccaaaagcgaaaggcaaa

SEQ ID NO: 32976 - RNA, 20 nt, synthetic construct
  source 1..20: mol_type = other RNA
ctccaaacctttaagttctc

SEQ ID NO: 32977 - RNA, 20 nt, synthetic construct
  source 1..20: mol_type = other RNA
ctccaaagaacaggagttac

SEQ ID NO: 32978 - RNA, 20 nt, synthetic construct
  source 1..20: mol_type = other RNA
ctccaaagcaaaccagacat

SEQ ID NO: 32979 - RNA, 20 nt, synthetic construct
  source 1..20: mol_type = other RNA
ctccaaagcaaacgtgcaca

SEQ ID NO: 32980 - RNA, 20 nt, synthetic construct
  source 1..20: mol_type = other RNA
ctccaacaattcaacaatag

SEQ ID NO: 32981 - RNA, 20 nt, synthetic construct
  source 1..20: mol_type = other RNA
ctccaacagaagaagtttct

SEQ ID NO: 32982 - RNA, 20 nt, synthetic construct
  source 1..20: mol_type = other RNA
ctccaacccattccaggttt

SEQ ID NO: 32983 - RNA, 20 nt, synthetic construct
  source 1..20: mol_type = other RNA
ctccaacgctttttatggaa

SEQ ID NO: 32984 - RNA, 20 nt, synthetic construct
  source 1..20: mol_type = other RNA
ctccaactcaaaaaagaaaa

SEQ ID NO: 32985 - RNA, 20 nt, synthetic construct
  source 1..20: mol_type = other RNA
ctccaagaaggctagcacag

SEQ ID NO: 32986 - RNA, 20 nt, synthetic construct
  source 1..20: mol_type = other RNA
ctccaagcacacagtttgag

SEQ ID NO: 32987 - RNA, 20 nt, synthetic construct
  source 1..20: mol_type = other RNA
ctccaaggaaagtgtgcttg

SEQ ID NO: 32988 - RNA, 20 nt, synthetic construct
  source 1..20: mol_type = other RNA
ctccaaggctgcccgctccg

SEQ ID NO: 32989 - RNA, 20 nt, synthetic construct
  source 1..20: mol_type = other RNA
ctccaaggtacaattacaca

SEQ ID NO: 32990 - RNA, 20 nt, synthetic construct
  source 1..20: mol_type = other RNA
ctccaagtctcatgcaattc

SEQ ID NO: 32991 - RNA, 20 nt, synthetic construct
  source 1..20: mol_type = other RNA
ctccaagtgtaaaaagacat

SEQ ID NO: 32992 - RNA, 20 nt, synthetic construct
  source 1..20: mol_type = other RNA
ctccaagttattacaaaaaa

SEQ ID NO: 32993 - RNA, 20 nt, synthetic construct
  source 1..20: mol_type = other RNA
ctccaatcctcagccccctc

SEQ ID NO: 32994 - RNA, 20 nt, synthetic construct
  source 1..20: mol_type = other RNA
ctccaatgtttttaattctt

SEQ ID NO: 32995 - RNA, 20 nt, synthetic construct
  source 1..20: mol_type = other RNA
ctccacacacgaagtagttt

SEQ ID NO: 32996 - RNA, 20 nt, synthetic construct
  source 1..20: mol_type = other RNA
ctccacacctggcccctttc

SEQ ID NO: 32997 - RNA, 20 nt, synthetic construct
  source 1..20: mol_type = other RNA
ctccacagagttcagcttac

SEQ ID NO: 32998 - RNA, 20 nt, synthetic construct
  source 1..20: mol_type = other RNA
ctccacaggctttgacttct

SEQ ID NO: 32999 - RNA, 20 nt, synthetic construct
  source 1..20: mol_type = other RNA
ctccacatccttgccaacag

SEQ ID NO: 33000 - RNA, 20 nt, synthetic construct
  source 1..20: mol_type = other RNA
ctccacattgtcttaattat

SEQ ID NO: 33001 - RNA, 20 nt, synthetic construct
  source 1..20: mol_type = other RNA
ctccacatttctacacaaca

SEQ ID NO: 33002 - RNA, 20 nt, synthetic construct
  source 1..20: mol_type = other RNA
ctccaccagcatcttttgac

SEQ ID NO: 33003 - RNA, 20 nt, synthetic construct
  source 1..20: mol_type = other RNA
ctccaccctgccccttatcc

SEQ ID NO: 33004 - RNA, 20 nt, synthetic construct
  source 1..20: mol_type = other RNA
ctccacctcagaaacaaaca

SEQ ID NO: 33005 - RNA, 20 nt, synthetic construct
  source 1..20: mol_type = other RNA
ctccaccttagcccaagcta

SEQ ID NO: 33006 - RNA, 20 nt, synthetic construct
  source 1..20: mol_type = other RNA
ctccacgcccattaggatag

SEQ ID NO: 33007 - RNA, 20 nt, synthetic construct
  source 1..20: mol_type = other RNA
ctccacgtgggtgacagagc

SEQ ID NO: 33008 - RNA, 20 nt, synthetic construct
  source 1..20: mol_type = other RNA
ctccactccagcctgagcaa

SEQ ID NO: 33009 - RNA, 20 nt, synthetic construct
  source 1..20: mol_type = other RNA
ctccacttcccactgctatg

SEQ ID NO: 33010 - RNA, 20 nt, synthetic construct
  source 1..20: mol_type = other RNA
ctccacttgggtggaagctg

SEQ ID NO: 33011 - RNA, 20 nt, synthetic construct
  source 1..20: mol_type = other RNA
ctccactttcatgatttggt

SEQ ID NO: 33012 - RNA, 20 nt, synthetic construct
  source 1..20: mol_type = other RNA
ctccagaaaaccagaaaagt

SEQ ID NO: 33013 - RNA, 20 nt, synthetic construct
  source 1..20: mol_type = other RNA
ctccagaatgaccgagatac

SEQ ID NO: 33014 - RNA, 20 nt, synthetic construct
  source 1..20: mol_type = other RNA
ctccagactgggcaacagag

SEQ ID NO: 33015 - RNA, 20 nt, synthetic construct
  source 1..20: mol_type = other RNA
ctccagagaagttttccagg

SEQ ID NO: 33016 - RNA, 20 nt, synthetic construct
  source 1..20: mol_type = other RNA
ctccagcatccctccagtcc

SEQ ID NO: 33017 - RNA, 20 nt, synthetic construct
  source 1..20: mol_type = other RNA
ctccagcctggtcaacaggg

SEQ ID NO: 33018 - RNA, 20 nt, synthetic construct
  source 1..20: mol_type = other RNA
ctccagccttaatctcctga

SEQ ID NO: 33019 - RNA, 20 nt, synthetic construct
  source 1..20: mol_type = other RNA
ctccagccttggtaagagtg

SEQ ID NO: 33020 - RNA, 20 nt, synthetic construct
  source 1..20: mol_type = other RNA
ctccagcgctaagcactgcg

SEQ ID NO: 33021 - RNA, 20 nt, synthetic construct
  source 1..20: mol_type = other RNA
ctccagcttttattagagct

SEQ ID NO: 33022 - RNA, 20 nt, synthetic construct
  source 1..20: mol_type = other RNA
ctccaggatccagtctctac

SEQ ID NO: 33023 - RNA, 20 nt, synthetic construct
  source 1..20: mol_type = other RNA
ctccagggaggaatccttca

SEQ ID NO: 33024 - RNA, 20 nt, synthetic construct
  source 1..20: mol_type = other RNA
ctccaggggacatgctctga

SEQ ID NO: 33025 - RNA, 20 nt, synthetic construct
  source 1..20: mol_type = other RNA
ctccaggtagaatgaaaatt

SEQ ID NO: 33026 - RNA, 20 nt, synthetic construct
  source 1..20: mol_type = other RNA
ctccaggttcatccatgttg

SEQ ID NO: 33027 - RNA, 20 nt, synthetic construct
  source 1..20: mol_type = other RNA
ctccagtatgacctcctccc

SEQ ID NO: 33028 - RNA, 20 nt, synthetic construct
  source 1..20: mol_type = other RNA
ctccagtccagcaccaccct

SEQ ID NO: 33029 - RNA, 20 nt, synthetic construct
  source 1..20: mol_type = other RNA
ctccagtcccactgacagtg

SEQ ID NO: 33030 - RNA, 20 nt, synthetic construct
  source 1..20: mol_type = other RNA
ctccagtgaagtcatctggt

SEQ ID NO: 33031 - RNA, 20 nt, synthetic construct
  source 1..20: mol_type = other RNA
ctccagtgtcctgaatgatt

SEQ ID NO: 33032 - RNA, 20 nt, synthetic construct
  source 1..20: mol_type = other RNA
ctccataagtccctaacagt

SEQ ID NO: 33033 - RNA, 20 nt, synthetic construct
  source 1..20: mol_type = other RNA
ctccatacaaggagacctac

SEQ ID NO: 33034 - RNA, 20 nt, synthetic construct
  source 1..20: mol_type = other RNA
ctccataccccctggaaata

SEQ ID NO: 33035 - RNA, 20 nt, synthetic construct
  source 1..20: mol_type = other RNA
ctccatagcttcctaagaaa

SEQ ID NO: 33036 - RNA, 20 nt, synthetic construct
  source 1..20: mol_type = other RNA
ctccatatgggatgcttaaa

SEQ ID NO: 33037 - RNA, 20 nt, synthetic construct
  source 1..20: mol_type = other RNA
ctccatcactgactggctgt

SEQ ID NO: 33038 - RNA, 20 nt, synthetic construct
  source 1..20: mol_type = other RNA
ctccatctcaagaaaacaag

SEQ ID NO: 33039 - RNA, 20 nt, synthetic construct
  source 1..20: mol_type = other RNA
ctccatcttcacgtggcgct

SEQ ID NO: 33040 - RNA, 20 nt, synthetic construct
  source 1..20: mol_type = other RNA
ctccatggaaactacaatta

SEQ ID NO: 33041 - RNA, 20 nt, synthetic construct
  source 1..20: mol_type = other RNA
ctccatgtcctcacctcaca

SEQ ID NO: 33042 - RNA, 20 nt, synthetic construct
  source 1..20: mol_type = other RNA
ctccattatatgaataaacc

SEQ ID NO: 33043 - RNA, 20 nt, synthetic construct
  source 1..20: mol_type = other RNA
ctccatttccctgcttcatc

SEQ ID NO: 33044 - RNA, 20 nt, synthetic construct
  source 1..20: mol_type = other RNA
ctccatttgtggcatctttg

SEQ ID NO: 33045 - RNA, 20 nt, synthetic construct
  source 1..20: mol_type = other RNA
ctccattttgccagctaact

SEQ ID NO: 33046 - RNA, 20 nt, synthetic construct
  source 1..20: mol_type = other RNA
ctccattttggtcttaccct

SEQ ID NO: 33047 - RNA, 20 nt, synthetic construct
  source 1..20: mol_type = other RNA
ctcccaaaggactgggatcc

SEQ ID NO: 33048 - RNA, 20 nt, synthetic construct
  source 1..20: mol_type = other RNA
ctcccaacaggctgagtgcg

SEQ ID NO: 33049 - RNA, 20 nt, synthetic construct
  source 1..20: mol_type = other RNA
ctcccaacttataatattaa

SEQ ID NO: 33050 - RNA, 20 nt, synthetic construct
  source 1..20: mol_type = other RNA
ctcccaaggttgcctgttca

SEQ ID NO: 33051 - RNA, 20 nt, synthetic construct
  source 1..20: mol_type = other RNA
ctcccaatgcttgaagagcg

SEQ ID NO: 33052 - RNA, 20 nt, synthetic construct
  source 1..20: mol_type = other RNA
ctcccaccatctctctgcct

SEQ ID NO: 33053 - RNA, 20 nt, synthetic construct
  source 1..20: mol_type = other RNA
ctcccacctcagccccacaa

SEQ ID NO: 33054 - RNA, 20 nt, synthetic construct
  source 1..20: mol_type = other RNA
ctcccacctgcgagcggcgg

SEQ ID NO: 33055 - RNA, 20 nt, synthetic construct
  source 1..20: mol_type = other RNA
ctcccacttacatcagcagt

SEQ ID NO: 33056 - RNA, 20 nt, synthetic construct
  source 1..20: mol_type = other RNA
ctcccagaactcgaagcctt

SEQ ID NO: 33057 - RNA, 20 nt, synthetic construct
  source 1..20: mol_type = other RNA
ctcccagcatgaagccctct

SEQ ID NO: 33058 - RNA, 20 nt, synthetic construct
  source 1..20: mol_type = other RNA
ctcccagccaaacagttttt

SEQ ID NO: 33059 - RNA, 20 nt, synthetic construct
  source 1..20: mol_type = other RNA
ctcccagcctcaaacaatcc

SEQ ID NO: 33060 - RNA, 20 nt, synthetic construct
  source 1..20: mol_type = other RNA
ctcccagctgtccaacaagg

SEQ ID NO: 33061 - RNA, 20 nt, synthetic construct
  source 1..20: mol_type = other RNA
ctcccaggtcagtagtacag

SEQ ID NO: 33062 - RNA, 20 nt, synthetic construct
  source 1..20: mol_type = other RNA
ctcccagtgcccacctgaca

SEQ ID NO: 33063 - RNA, 20 nt, synthetic construct
  source 1..20: mol_type = other RNA
ctcccagttgtcagaattag

SEQ ID NO: 33064 - RNA, 20 nt, synthetic construct
  source 1..20: mol_type = other RNA
ctcccataccacctgtcaga

SEQ ID NO: 33065 - RNA, 20 nt, synthetic construct
  source 1..20: mol_type = other RNA
ctcccatatctacatgtacg

SEQ ID NO: 33066 - RNA, 20 nt, synthetic construct
  source 1..20: mol_type = other RNA
ctcccatcactagaatgtga

SEQ ID NO: 33067 - RNA, 20 nt, synthetic construct
  source 1..20: mol_type = other RNA
ctcccatgattcaaaatgtg

SEQ ID NO: 33068 - RNA, 20 nt, synthetic construct
  source 1..20: mol_type = other RNA
ctcccatgcattcgtcccta

SEQ ID NO: 33069 - RNA, 20 nt, synthetic construct
  source 1..20: mol_type = other RNA
ctcccatttgggactgagac

SEQ ID NO: 33070 - RNA, 20 nt, synthetic construct
  source 1..20: mol_type = other RNA
ctccccaaagatattagcta

SEQ ID NO: 33071 - RNA, 20 nt, synthetic construct
  source 1..20: mol_type = other RNA
ctccccaacccccggccctg

SEQ ID NO: 33072 - RNA, 20 nt, synthetic construct
  source 1..20: mol_type = other RNA
ctccccaagtaaacctcaag

SEQ ID NO: 33073 - RNA, 20 nt, synthetic construct
  source 1..20: mol_type = other RNA
ctccccagtggttgtggaat

SEQ ID NO: 33074 - RNA, 20 nt, synthetic construct
  source 1..20: mol_type = other RNA
ctccccatgcaggagaaaca

SEQ ID NO: 33075 - RNA, 20 nt, synthetic construct
  source 1..20: mol_type = other RNA
ctccccattccctgtctgtg

SEQ ID NO: 33076 - RNA, 20 nt, synthetic construct
  source 1..20: mol_type = other RNA
ctcccccaggtggttctgcc

SEQ ID NO: 33077 - RNA, 20 nt, synthetic construct
  source 1..20: mol_type = other RNA
ctcccccgaatcctttgctt

SEQ ID NO: 33078 - RNA, 20 nt, synthetic construct
  source 1..20: mol_type = other RNA
ctcccccgcccgtccctgct

SEQ ID NO: 33079 - RNA, 20 nt, synthetic construct
  source 1..20: mol_type = other RNA
ctcccccgggacaatgccag

SEQ ID NO: 33080 - RNA, 20 nt, synthetic construct
  source 1..20: mol_type = other RNA
ctcccccggggctcgcagca

SEQ ID NO: 33081 - RNA, 20 nt, synthetic construct
  source 1..20: mol_type = other RNA
ctccccctccccctccctcc

SEQ ID NO: 33082 - RNA, 20 nt, synthetic construct
  source 1..20: mol_type = other RNA
ctccccctccctccccccac

SEQ ID NO: 33083 - RNA, 20 nt, synthetic construct
  source 1..20: mol_type = other RNA
ctccccggatgattctaatg

SEQ ID NO: 33084 - RNA, 20 nt, synthetic construct
  source 1..20: mol_type = other RNA
ctccccttgacgaagtcaca

SEQ ID NO: 33085 - RNA, 20 nt, synthetic construct
  source 1..20: mol_type = other RNA
ctcccgagtagttgtaacta

SEQ ID NO: 33086 - RNA, 20 nt, synthetic construct
  source 1..20: mol_type = other RNA
ctcccgagtatctaggagta

SEQ ID NO: 33087 - RNA, 20 nt, synthetic construct
  source 1..20: mol_type = other RNA
ctcccgatttcagttaactt

SEQ ID NO: 33088 - RNA, 20 nt, synthetic construct
  source 1..20: mol_type = other RNA
ctcccgcggcctccccaacc

SEQ ID NO: 33089 - RNA, 20 nt, synthetic construct
  source 1..20: mol_type = other RNA
ctcccggctaagatgaggtc

SEQ ID NO: 33090 - RNA, 20 nt, synthetic construct
  source 1..20: mol_type = other RNA
ctcccgggtccaggcagttc

SEQ ID NO: 33091 - RNA, 20 nt, synthetic construct
  source 1..20: mol_type = other RNA
ctcccgggtttaagcgattc

SEQ ID NO: 33092 - RNA, 20 nt, synthetic construct
  source 1..20: mol_type = other RNA
ctccctaaatacacatgttg

SEQ ID NO: 33093 - RNA, 20 nt, synthetic construct
  source 1..20: mol_type = other RNA
ctccctaaccaggcccgggg

SEQ ID NO: 33094 - RNA, 20 nt, synthetic construct
  source 1..20: mol_type = other RNA
ctccctaccacccgtccaat

SEQ ID NO: 33095 - RNA, 20 nt, synthetic construct
  source 1..20: mol_type = other RNA
ctccctacctggcagtctag

SEQ ID NO: 33096 - RNA, 20 nt, synthetic construct
  source 1..20: mol_type = other RNA
ctccctcacagtccactcac

SEQ ID NO: 33097 - RNA, 20 nt, synthetic construct
  source 1..20: mol_type = other RNA
ctccctcactaagtcagaat

SEQ ID NO: 33098 - RNA, 20 nt, synthetic construct
  source 1..20: mol_type = other RNA
ctccctccccccacggtctc

SEQ ID NO: 33099 - RNA, 20 nt, synthetic construct
  source 1..20: mol_type = other RNA
ctccctcggccacagcaggg

SEQ ID NO: 33100 - RNA, 20 nt, synthetic construct
  source 1..20: mol_type = other RNA
ctccctctatggcaggcacc

SEQ ID NO: 33101 - RNA, 20 nt, synthetic construct
  source 1..20: mol_type = other RNA
ctccctctgccgcctggggc

SEQ ID NO: 33102 - RNA, 20 nt, synthetic construct
  source 1..20: mol_type = other RNA
ctccctctgtgtgcatgcat

SEQ ID NO: 33103 - RNA, 20 nt, synthetic construct
  source 1..20: mol_type = other RNA
ctccctcttcgctcttttaa

SEQ ID NO: 33104 - RNA, 20 nt, synthetic construct
  source 1..20: mol_type = other RNA
ctccctgaaattgtcagaaa

SEQ ID NO: 33105 - RNA, 20 nt, synthetic construct
  source 1..20: mol_type = other RNA
ctccctgccctgtgaaaatc

SEQ ID NO: 33106 - RNA, 20 nt, synthetic construct
  source 1..20: mol_type = other RNA
ctccctgctttaaaacactg

SEQ ID NO: 33107 - RNA, 20 nt, synthetic construct
  source 1..20: mol_type = other RNA
ctccctggagaggcaaaggc

SEQ ID NO: 33108 - RNA, 20 nt, synthetic construct
  source 1..20: mol_type = other RNA
ctccctggttcaagctatgc

SEQ ID NO: 33109 - RNA, 20 nt, synthetic construct
  source 1..20: mol_type = other RNA
ctccctgtctttctgtctgc

SEQ ID NO: 33110 - RNA, 20 nt, synthetic construct
  source 1..20: mol_type = other RNA
ctccctgtgcgtgaatctgt

SEQ ID NO: 33111 - RNA, 20 nt, synthetic construct
  source 1..20: mol_type = other RNA
ctcccttcacaaagccctca

SEQ ID NO: 33112 - RNA, 20 nt, synthetic construct
  source 1..20: mol_type = other RNA
ctcccttcagcctgtgtcag

SEQ ID NO: 33113 - RNA, 20 nt, synthetic construct
  source 1..20: mol_type = other RNA
ctcccttccagcgtgtgcat

SEQ ID NO: 33114 - RNA, 20 nt, synthetic construct
  source 1..20: mol_type = other RNA
ctcccttcctgttctttgtt

SEQ ID NO: 33115 - RNA, 20 nt, synthetic construct
  source 1..20: mol_type = other RNA
ctcccttctattccattgtt

SEQ ID NO: 33116 - RNA, 20 nt, synthetic construct
  source 1..20: mol_type = other RNA
ctccctttttaggtagggat

SEQ ID NO: 33117 - RNA, 20 nt, synthetic construct
  source 1..20: mol_type = other RNA
ctccgcctccctggttcaag

SEQ ID NO: 33118 - RNA, 20 nt, synthetic construct
  source 1..20: mol_type = other RNA
ctccgcctcctggtgggttc

SEQ ID NO: 33119 - RNA, 20 nt, synthetic construct
  source 1..20: mol_type = other RNA
ctccggcgggagaggagcgc

SEQ ID NO: 33120 - RNA, 20 nt, synthetic construct
  source 1..20: mol_type = other RNA
ctccgggcctcccacctgcg

SEQ ID NO: 33121 - RNA, 20 nt, synthetic construct
  source 1..20: mol_type = other RNA
ctccggggacccagtgcccc

SEQ ID NO: 33122 - RNA, 20 nt, synthetic construct
  source 1..20: mol_type = other RNA
ctccgggtaaaaagcctgct

SEQ ID NO: 33123 - RNA, 20 nt, synthetic construct
  source 1..20: mol_type = other RNA
ctccgtagctgtcgctctcc

SEQ ID NO: 33124 - RNA, 20 nt, synthetic construct
  source 1..20: mol_type = other RNA
ctccgtttttcaggttcaag

SEQ ID NO: 33125 - RNA, 20 nt, synthetic construct
  source 1..20: mol_type = other RNA
ctcctaaaacatggtccaca

SEQ ID NO: 33126 - RNA, 20 nt, synthetic construct
  source 1..20: mol_type = other RNA
ctcctaagtcttcttctaag

SEQ ID NO: 33127 - RNA, 20 nt, synthetic construct
  source 1..20: mol_type = other RNA
ctcctaagttttgggggaag

SEQ ID NO: 33128 - RNA, 20 nt, synthetic construct
  source 1..20: mol_type = other RNA
ctcctaccttccaaagtatg

SEQ ID NO: 33129 - RNA, 20 nt, synthetic construct
  source 1..20: mol_type = other RNA
ctcctagatactcgggaggc

SEQ ID NO: 33130 - RNA, 20 nt, synthetic construct
  source 1..20: mol_type = other RNA
ctcctagattgaccttctac

SEQ ID NO: 33131 - RNA, 20 nt, synthetic construct
  source 1..20: mol_type = other RNA
ctcctatagttaagtctgaa

SEQ ID NO: 33132 - RNA, 20 nt, synthetic construct
  source 1..20: mol_type = other RNA
ctcctatattgtcaatgggg

SEQ ID NO: 33133 - RNA, 20 nt, synthetic construct
  source 1..20: mol_type = other RNA
ctcctcagaaggccaaggca

SEQ ID NO: 33134 - RNA, 20 nt, synthetic construct
  source 1..20: mol_type = other RNA
ctcctcattcacactagtca

SEQ ID NO: 33135 - RNA, 20 nt, synthetic construct
  source 1..20: mol_type = other RNA
ctcctccaacccattccagg

SEQ ID NO: 33136 - RNA, 20 nt, synthetic construct
  source 1..20: mol_type = other RNA
ctcctccaaggctgcccgct

SEQ ID NO: 33137 - RNA, 20 nt, synthetic construct
  source 1..20: mol_type = other RNA
ctcctcccacttacatcagc

SEQ ID NO: 33138 - RNA, 20 nt, synthetic construct
  source 1..20: mol_type = other RNA
ctcctcccggctaagatgag

SEQ ID NO: 33139 - RNA, 20 nt, synthetic construct
  source 1..20: mol_type = other RNA
ctcctccggggacccagtgc

SEQ ID NO: 33140 - RNA, 20 nt, synthetic construct
  source 1..20: mol_type = other RNA
ctcctcctcctggccacatg

SEQ ID NO: 33141 - RNA, 20 nt, synthetic construct
  source 1..20: mol_type = other RNA
ctcctcctctacaagtttta

SEQ ID NO: 33142 - RNA, 20 nt, synthetic construct
  source 1..20: mol_type = other RNA
ctcctcctggccacatgctt

SEQ ID NO: 33143 - RNA, 20 nt, synthetic construct
  source 1..20: mol_type = other RNA
ctcctctacaagttttaact

SEQ ID NO: 33144 - RNA, 20 nt, synthetic construct
  source 1..20: mol_type = other RNA
ctcctctcccgccggagtcc

SEQ ID NO: 33145 - RNA, 20 nt, synthetic construct
  source 1..20: mol_type = other RNA
ctcctctgactttatggtat

SEQ ID NO: 33146 - RNA, 20 nt, synthetic construct
  source 1..20: mol_type = other RNA
ctcctctggacattatccta

SEQ ID NO: 33147 - RNA, 20 nt, synthetic construct
  source 1..20: mol_type = other RNA
ctcctctggccctccatttc

SEQ ID NO: 33148 - RNA, 20 nt, synthetic construct
  source 1..20: mol_type = other RNA
ctcctctttcatatctgatt

SEQ ID NO: 33149 - RNA, 20 nt, synthetic construct
  source 1..20: mol_type = other RNA
ctcctgaacaaaatttttgc

SEQ ID NO: 33150 - RNA, 20 nt, synthetic construct
  source 1..20: mol_type = other RNA
ctcctgacctcaagcgatcc

SEQ ID NO: 33151 - RNA, 20 nt, synthetic construct
  source 1..20: mol_type = other RNA
ctcctgacctcagatatcca

SEQ ID NO: 33152 - RNA, 20 nt, synthetic construct
  source 1..20: mol_type = other RNA
ctcctgagaaccggaacttg

SEQ ID NO: 33153 - RNA, 20 nt, synthetic construct
  source 1..20: mol_type = other RNA
ctcctgagcaaggaaggaaa

SEQ ID NO: 33154 - RNA, 20 nt, synthetic construct
  source 1..20: mol_type = other RNA
ctcctgcactcaagcaatcc

SEQ ID NO: 33155 - RNA, 20 nt, synthetic construct
  source 1..20: mol_type = other RNA
ctcctgcagacatgcacgag

SEQ ID NO: 33156 - RNA, 20 nt, synthetic construct
  source 1..20: mol_type = other RNA
ctcctgcatggggagtttta

SEQ ID NO: 33157 - RNA, 20 nt, synthetic construct
  source 1..20: mol_type = other RNA
ctcctgccttcctgacctct

SEQ ID NO: 33158 - RNA, 20 nt, synthetic construct
  source 1..20: mol_type = other RNA
ctcctgccttggccttctga

SEQ ID NO: 33159 - RNA, 20 nt, synthetic construct
  source 1..20: mol_type = other RNA
ctcctgcctttgttcatcat

SEQ ID NO: 33160 - RNA, 20 nt, synthetic construct
  source 1..20: mol_type = other RNA
ctcctggccacatgcttcca

SEQ ID NO: 33161 - RNA, 20 nt, synthetic construct
  source 1..20: mol_type = other RNA
ctcctgggaaaaggatttgt

SEQ ID NO: 33162 - RNA, 20 nt, synthetic construct
  source 1..20: mol_type = other RNA
ctcctgggctcatctaagcc

SEQ ID NO: 33163 - RNA, 20 nt, synthetic construct
  source 1..20: mol_type = other RNA
ctcctgggttcaggtgcctc

SEQ ID NO: 33164 - RNA, 20 nt, synthetic construct
  source 1..20: mol_type = other RNA
ctcctggtctcccagcatga

SEQ ID NO: 33165 - RNA, 20 nt, synthetic construct
  source 1..20: mol_type = other RNA
ctcctggtgggttcatgcca

SEQ ID NO: 33166 - RNA, 20 nt, synthetic construct
  source 1..20: mol_type = other RNA
ctcctggttttgatcatcgc

SEQ ID NO: 33167 - RNA, 20 nt, synthetic construct
  source 1..20: mol_type = other RNA
ctcctgtatgccgctggtga

SEQ ID NO: 33168 - RNA, 20 nt, synthetic construct
  source 1..20: mol_type = other RNA
ctcctgtgccaagtccgtgc

SEQ ID NO: 33169 - RNA, 20 nt, synthetic construct
  source 1..20: mol_type = other RNA
ctcctgtgtgcatgctccca

SEQ ID NO: 33170 - RNA, 20 nt, synthetic construct
  source 1..20: mol_type = other RNA
ctcctgttctttggagctgt

SEQ ID NO: 33171 - RNA, 20 nt, synthetic construct
  source 1..20: mol_type = other RNA
ctccttaatccagtctatca

SEQ ID NO: 33172 - RNA, 20 nt, synthetic construct
  source 1..20: mol_type = other RNA
ctccttaccactataatcca

SEQ ID NO: 33173 - RNA, 20 nt, synthetic construct
  source 1..20: mol_type = other RNA
ctccttcccctggtcgagct

SEQ ID NO: 33174 - RNA, 20 nt, synthetic construct
  source 1..20: mol_type = other RNA
ctccttctgaaggcactaac

SEQ ID NO: 33175 - RNA, 20 nt, synthetic construct
  source 1..20: mol_type = other RNA
ctccttctgcaggctgaact

SEQ ID NO: 33176 - RNA, 20 nt, synthetic construct
  source 1..20: mol_type = other RNA
ctccttctgctcactttggg

SEQ ID NO: 33177 - RNA, 20 nt, synthetic construct
  source 1..20: mol_type = other RNA
ctccttctggaagatttcta

SEQ ID NO: 33178 - RNA, 20 nt, synthetic construct
  source 1..20: mol_type = other RNA
ctccttgcacattagaatca

SEQ ID NO: 33179 - RNA, 20 nt, synthetic construct
  source 1..20: mol_type = other RNA
ctccttgtatggagactagt

SEQ ID NO: 33180 - RNA, 20 nt, synthetic construct
  source 1..20: mol_type = other RNA
ctcctttccttccttgctca

SEQ ID NO: 33181 - RNA, 20 nt, synthetic construct
  source 1..20: mol_type = other RNA
ctcctttctagaatgcatcc

SEQ ID NO: 33182 - RNA, 20 nt, synthetic construct
  source 1..20: mol_type = other RNA
ctcctttctatacttcatct

SEQ ID NO: 33183 - RNA, 20 nt, synthetic construct
  source 1..20: mol_type = other RNA
ctcctttcttaccctcacag

SEQ ID NO: 33184 - RNA, 20 nt, synthetic construct
  source 1..20: mol_type = other RNA
ctcctttgaggtaagaactt

SEQ ID NO: 33185 - RNA, 20 nt, synthetic construct
  source 1..20: mol_type = other RNA
ctccttttaagagtgaagaa

SEQ ID NO: 33186 - RNA, 20 nt, synthetic construct
  source 1..20: mol_type = other RNA
ctccttttgtagagggaatt

SEQ ID NO: 33187 - RNA, 20 nt, synthetic construct
  source 1..20: mol_type = other RNA
ctcctttttatcacccttat

SEQ ID NO: 33188 - RNA, 20 nt, synthetic construct
  source 1..20: mol_type = other RNA
ctcgaaaaggaatggaattc

SEQ ID NO: 33189 - RNA, 20 nt, synthetic construct
  source 1..20: mol_type = other RNA
ctcgaactctcgacctcgtg

SEQ ID NO: 33190 - RNA, 20 nt, synthetic construct
  source 1..20: mol_type = other RNA
ctcgaagagaccacaggctc

SEQ ID NO: 33191 - RNA, 20 nt, synthetic construct
  source 1..20: mol_type = other RNA
ctcgaagcacaaccactgat

SEQ ID NO: 33192 - RNA, 20 nt, synthetic construct
  source 1..20: mol_type = other RNA
ctcgaagccttcccctgctg

SEQ ID NO: 33193 - RNA, 20 nt, synthetic construct
  source 1..20: mol_type = other RNA
ctcgaaggcctgcttcattc

SEQ ID NO: 33194 - RNA, 20 nt, synthetic construct
  source 1..20: mol_type = other RNA
ctcgaagtggtgcttgaact

SEQ ID NO: 33195 - RNA, 20 nt, synthetic construct
  source 1..20: mol_type = other RNA
ctcgacacacaatccaagtt

SEQ ID NO: 33196 - RNA, 20 nt, synthetic construct
  source 1..20: mol_type = other RNA
ctcgaccaggggaaggagtc

SEQ ID NO: 33197 - RNA, 20 nt, synthetic construct
  source 1..20: mol_type = other RNA
ctcgaccccctgggctcaag

SEQ ID NO: 33198 - RNA, 20 nt, synthetic construct
  source 1..20: mol_type = other RNA
ctcgagctcctgacctcaga

SEQ ID NO: 33199 - RNA, 20 nt, synthetic construct
  source 1..20: mol_type = other RNA
ctcgagggtagcttttcctg

SEQ ID NO: 33200 - RNA, 20 nt, synthetic construct
  source 1..20: mol_type = other RNA
ctcgagtaaaaagaatgaat

SEQ ID NO: 33201 - RNA, 20 nt, synthetic construct
  source 1..20: mol_type = other RNA
ctcgatggacatttaggttg

SEQ ID NO: 33202 - RNA, 20 nt, synthetic construct
  source 1..20: mol_type = other RNA
ctcgcactccacttcccact

SEQ ID NO: 33203 - RNA, 20 nt, synthetic construct
  source 1..20: mol_type = other RNA
ctcgcagcatccctgccgcg

SEQ ID NO: 33204 - RNA, 20 nt, synthetic construct
  source 1..20: mol_type = other RNA
ctcgcagcggggatgctcag

SEQ ID NO: 33205 - RNA, 20 nt, synthetic construct
  source 1..20: mol_type = other RNA
ctcgcaggtgggaggcccgg

SEQ ID NO: 33206 - RNA, 20 nt, synthetic construct
  source 1..20: mol_type = other RNA
ctcgccgtctccctcggcca

SEQ ID NO: 33207 - RNA, 20 nt, synthetic construct
  source 1..20: mol_type = other RNA
ctcgctctgtcgcccaggcg

SEQ ID NO: 33208 - RNA, 20 nt, synthetic construct
  source 1..20: mol_type = other RNA
ctcgctcttggcttttggca

SEQ ID NO: 33209 - RNA, 20 nt, synthetic construct
  source 1..20: mol_type = other RNA
ctcggatttaagagaggaag

SEQ ID NO: 33210 - RNA, 20 nt, synthetic construct
  source 1..20: mol_type = other RNA
ctcggcacagctctcatgag

SEQ ID NO: 33211 - RNA, 20 nt, synthetic construct
  source 1..20: mol_type = other RNA
ctcggccaaccattactctt

SEQ ID NO: 33212 - RNA, 20 nt, synthetic construct
  source 1..20: mol_type = other RNA
ctcggccacagcagggctcc

SEQ ID NO: 33213 - RNA, 20 nt, synthetic construct
  source 1..20: mol_type = other RNA
ctcggccgacccagccccca

SEQ ID NO: 33214 - RNA, 20 nt, synthetic construct
  source 1..20: mol_type = other RNA
ctcggcctctactgactccc

SEQ ID NO: 33215 - RNA, 20 nt, synthetic construct
  source 1..20: mol_type = other RNA
ctcggctccgggcctcccac

SEQ ID NO: 33216 - RNA, 20 nt, synthetic construct
  source 1..20: mol_type = other RNA
ctcggctctgtcacccttgt

SEQ ID NO: 33217 - RNA, 20 nt, synthetic construct
  source 1..20: mol_type = other RNA
ctcggcttactgcaacctcc

SEQ ID NO: 33218 - RNA, 20 nt, synthetic construct
  source 1..20: mol_type = other RNA
ctcgggttcaagccccagtt

SEQ ID NO: 33219 - RNA, 20 nt, synthetic construct
  source 1..20: mol_type = other RNA
ctcggtatgtacccaatgga

SEQ ID NO: 33220 - RNA, 20 nt, synthetic construct
  source 1..20: mol_type = other RNA
ctcggtcattctggagtgtt

SEQ ID NO: 33221 - RNA, 20 nt, synthetic construct
  source 1..20: mol_type = other RNA
ctcggtctacggacgcaggc

SEQ ID NO: 33222 - RNA, 20 nt, synthetic construct
  source 1..20: mol_type = other RNA
ctcggtctcaaaacaaacaa

SEQ ID NO: 33223 - RNA, 20 nt, synthetic construct
  source 1..20: mol_type = other RNA
ctcgtaaaagctaatctact

SEQ ID NO: 33224 - RNA, 20 nt, synthetic construct
  source 1..20: mol_type = other RNA
ctcgtaatgcgatgatcaaa

SEQ ID NO: 33225 - RNA, 20 nt, synthetic construct
  source 1..20: mol_type = other RNA
ctcgtagttttttggtagat

SEQ ID NO: 33226 - RNA, 20 nt, synthetic construct
  source 1..20: mol_type = other RNA
ctcgtgaatttggtattctt

SEQ ID NO: 33227 - RNA, 20 nt, synthetic construct
  source 1..20: mol_type = other RNA
ctcgtgcatgtctgcaggag

SEQ ID NO: 33228 - RNA, 20 nt, synthetic construct
  source 1..20: mol_type = other RNA
ctcgtggcctcaagcagtcc

SEQ ID NO: 33229 - RNA, 20 nt, synthetic construct
  source 1..20: mol_type = other RNA
ctcgtggttatagccataag

SEQ ID NO: 33230 - RNA, 20 nt, synthetic construct
  source 1..20: mol_type = other RNA
ctcgtgtatgatttctaggc

SEQ ID NO: 33231 - RNA, 20 nt, synthetic construct
  source 1..20: mol_type = other RNA
ctcgtgtgagctctagcctt

SEQ ID NO: 33232 - RNA, 20 nt, synthetic construct
  source 1..20: mol_type = other RNA
ctcgtgtgtctcataaagcc

SEQ ID NO: 33233 - RNA, 20 nt, synthetic construct
  source 1..20: mol_type = other RNA
ctcgttcatgttcaaggtgt

SEQ ID NO: 33234 - RNA, 20 nt, synthetic construct
  source 1..20: mol_type = other RNA
ctcgttttcaacaaaggttg

SEQ ID NO: 33235 - RNA, 20 nt, synthetic construct
  source 1..20: mol_type = other RNA
ctctaaaaacatccattact

SEQ ID NO: 33236 - RNA, 20 nt, synthetic construct
  source 1..20: mol_type = other RNA
ctctaaactagttcaaccat

SEQ ID NO: 33237 - RNA, 20 nt, synthetic construct
  source 1..20: mol_type = other RNA
ctctaaagtctatgctcttg

SEQ ID NO: 33238 - RNA, 20 nt, synthetic construct
  source 1..20: mol_type = other RNA
ctctaaataggtattcatgc

SEQ ID NO: 33239 - RNA, 20 nt, synthetic construct
  source 1..20: mol_type = other RNA
ctctaagtcagcctgggcac

SEQ ID NO: 33240 - RNA, 20 nt, synthetic construct
  source 1..20: mol_type = other RNA
ctctaataaaagctggagtt

SEQ ID NO: 33241 - RNA, 20 nt, synthetic construct
  source 1..20: mol_type = other RNA
ctctaataacagcctaagca

SEQ ID NO: 33242 - RNA, 20 nt, synthetic construct
  source 1..20: mol_type = other RNA
ctctaatagctagtgatgtt

SEQ ID NO: 33243 - RNA, 20 nt, synthetic construct
  source 1..20: mol_type = other RNA
ctctaatagttcacctctcc

SEQ ID NO: 33244 - RNA, 20 nt, synthetic construct
  source 1..20: mol_type = other RNA
ctctaatatggttcctagaa

SEQ ID NO: 33245 - RNA, 20 nt, synthetic construct
  source 1..20: mol_type = other RNA
ctctaatcaggttgggctta

SEQ ID NO: 33246 - RNA, 20 nt, synthetic construct
  source 1..20: mol_type = other RNA
ctctaatgcaagagttaaaa

SEQ ID NO: 33247 - RNA, 20 nt, synthetic construct
  source 1..20: mol_type = other RNA
ctctaatggggaaatagatg

SEQ ID NO: 33248 - RNA, 20 nt, synthetic construct
  source 1..20: mol_type = other RNA
ctctaatgtaaacagcatac

SEQ ID NO: 33249 - RNA, 20 nt, synthetic construct
  source 1..20: mol_type = other RNA
ctctacaaaaggaggaacta

SEQ ID NO: 33250 - RNA, 20 nt, synthetic construct
  source 1..20: mol_type = other RNA
ctctacaaaccttcttattt

SEQ ID NO: 33251 - RNA, 20 nt, synthetic construct
  source 1..20: mol_type = other RNA
ctctacaagttttaacttaa

SEQ ID NO: 33252 - RNA, 20 nt, synthetic construct
  source 1..20: mol_type = other RNA
ctctacacaaaaatccagat

SEQ ID NO: 33253 - RNA, 20 nt, synthetic construct
  source 1..20: mol_type = other RNA
ctctacagggaaccgtaact

SEQ ID NO: 33254 - RNA, 20 nt, synthetic construct
  source 1..20: mol_type = other RNA
ctctacagttaacaatactg

SEQ ID NO: 33255 - RNA, 20 nt, synthetic construct
  source 1..20: mol_type = other RNA
ctctacatcacagacaggga

SEQ ID NO: 33256 - RNA, 20 nt, synthetic construct
  source 1..20: mol_type = other RNA
ctctacatctggatcctgtc

SEQ ID NO: 33257 - RNA, 20 nt, synthetic construct
  source 1..20: mol_type = other RNA
ctctaccaaaatataaatac

SEQ ID NO: 33258 - RNA, 20 nt, synthetic construct
  source 1..20: mol_type = other RNA
ctctacccagcactctgaat

SEQ ID NO: 33259 - RNA, 20 nt, synthetic construct
  source 1..20: mol_type = other RNA
ctctaccctttccaaattca

SEQ ID NO: 33260 - RNA, 20 nt, synthetic construct
  source 1..20: mol_type = other RNA
ctctactctgcctcagttga

SEQ ID NO: 33261 - RNA, 20 nt, synthetic construct
  source 1..20: mol_type = other RNA
ctctactgactcccttttta

SEQ ID NO: 33262 - RNA, 20 nt, synthetic construct
  source 1..20: mol_type = other RNA
ctctactttcacataaggta

SEQ ID NO: 33263 - RNA, 20 nt, synthetic construct
  source 1..20: mol_type = other RNA
ctctagaacttatgcatctt

SEQ ID NO: 33264 - RNA, 20 nt, synthetic construct
  source 1..20: mol_type = other RNA
ctctagcaaacaaacacact

SEQ ID NO: 33265 - RNA, 20 nt, synthetic construct
  source 1..20: mol_type = other RNA
ctctagcccagcttccggga

SEQ ID NO: 33266 - RNA, 20 nt, synthetic construct
  source 1..20: mol_type = other RNA
ctctagccttgtactgtgtg

SEQ ID NO: 33267 - RNA, 20 nt, synthetic construct
  source 1..20: mol_type = other RNA
ctctagctccccattccctg

SEQ ID NO: 33268 - RNA, 20 nt, synthetic construct
  source 1..20: mol_type = other RNA
ctctaggcttaaaattcttc

SEQ ID NO: 33269 - RNA, 20 nt, synthetic construct
  source 1..20: mol_type = other RNA
ctctagtggtgcttaattca

SEQ ID NO: 33270 - RNA, 20 nt, synthetic construct
  source 1..20: mol_type = other RNA
ctctagttgcacggtgaaga

SEQ ID NO: 33271 - RNA, 20 nt, synthetic construct
  source 1..20: mol_type = other RNA
ctctagttttccagtatatt

SEQ ID NO: 33272 - RNA, 20 nt, synthetic construct
  source 1..20: mol_type = other RNA
ctctataattctgccttcaa

SEQ ID NO: 33273 - RNA, 20 nt, synthetic construct
  source 1..20: mol_type = other RNA
ctctatccaccactccacct

SEQ ID NO: 33274 - RNA, 20 nt, synthetic construct
  source 1..20: mol_type = other RNA
ctctatgatatatactttgt

SEQ ID NO: 33275 - RNA, 20 nt, synthetic construct
  source 1..20: mol_type = other RNA
ctctatgcagaaatctacca

SEQ ID NO: 33276 - RNA, 20 nt, synthetic construct
  source 1..20: mol_type = other RNA
ctctatggcaggcaccttca

SEQ ID NO: 33277 - RNA, 20 nt, synthetic construct
  source 1..20: mol_type = other RNA
ctctatggcatttgagggtt

SEQ ID NO: 33278 - RNA, 20 nt, synthetic construct
  source 1..20: mol_type = other RNA
ctctattaaatcatgatgtt

SEQ ID NO: 33279 - RNA, 20 nt, synthetic construct
  source 1..20: mol_type = other RNA
ctctattccaaatgtctgtc

SEQ ID NO: 33280 - RNA, 20 nt, synthetic construct
  source 1..20: mol_type = other RNA
ctctattttcctaaaactcc

SEQ ID NO: 33281 - RNA, 20 nt, synthetic construct
  source 1..20: mol_type = other RNA
ctctatttttgtctggtgga

SEQ ID NO: 33282 - RNA, 20 nt, synthetic construct
  source 1..20: mol_type = other RNA
ctctcaaataatttggcaaa

SEQ ID NO: 33283 - RNA, 20 nt, synthetic construct
  source 1..20: mol_type = other RNA
ctctcaacacttcagtggta

SEQ ID NO: 33284 - RNA, 20 nt, synthetic construct
  source 1..20: mol_type = other RNA
ctctcaactggcccctccat

SEQ ID NO: 33285 - RNA, 20 nt, synthetic construct
  source 1..20: mol_type = other RNA
ctctcaagaaggtatcatcg

SEQ ID NO: 33286 - RNA, 20 nt, synthetic construct
  source 1..20: mol_type = other RNA
ctctcaagcaatctgaaacg

SEQ ID NO: 33287 - RNA, 20 nt, synthetic construct
  source 1..20: mol_type = other RNA
ctctcaagtaattgttttcc

SEQ ID NO: 33288 - RNA, 20 nt, synthetic construct
  source 1..20: mol_type = other RNA
ctctcaatagtgtcctttga

SEQ ID NO: 33289 - RNA, 20 nt, synthetic construct
  source 1..20: mol_type = other RNA
ctctcaattaatgcccaatc

SEQ ID NO: 33290 - RNA, 20 nt, synthetic construct
  source 1..20: mol_type = other RNA
ctctcactccaaagcaaacg

SEQ ID NO: 33291 - RNA, 20 nt, synthetic construct
  source 1..20: mol_type = other RNA
ctctcagaaattataagctt

SEQ ID NO: 33292 - RNA, 20 nt, synthetic construct
  source 1..20: mol_type = other RNA
ctctcagagggaaactgttt

SEQ ID NO: 33293 - RNA, 20 nt, synthetic construct
  source 1..20: mol_type = other RNA
ctctcagatctgagtttgct

SEQ ID NO: 33294 - RNA, 20 nt, synthetic construct
  source 1..20: mol_type = other RNA
ctctcagtggccctgttggc

SEQ ID NO: 33295 - RNA, 20 nt, synthetic construct
  source 1..20: mol_type = other RNA
ctctcagtggtgcttttgct

SEQ ID NO: 33296 - RNA, 20 nt, synthetic construct
  source 1..20: mol_type = other RNA
ctctcatctaaattaagctt

SEQ ID NO: 33297 - RNA, 20 nt, synthetic construct
  source 1..20: mol_type = other RNA
ctctcatgagtcctgaaaat

SEQ ID NO: 33298 - RNA, 20 nt, synthetic construct
  source 1..20: mol_type = other RNA
ctctcatgtcagagacacat

SEQ ID NO: 33299 - RNA, 20 nt, synthetic construct
  source 1..20: mol_type = other RNA
ctctcatgttgggtaaaaat

SEQ ID NO: 33300 - RNA, 20 nt, synthetic construct
  source 1..20: mol_type = other RNA
ctctccaacagaagaagttt

SEQ ID NO: 33301 - RNA, 20 nt, synthetic construct
  source 1..20: mol_type = other RNA
ctctccaaggtacaattaca

SEQ ID NO: 33302 - RNA, 20 nt, synthetic construct
  source 1..20: mol_type = other RNA
ctctccagggaggaatcctt

SEQ ID NO: 33303 - RNA, 20 nt, synthetic construct
  source 1..20: mol_type = other RNA
ctctcccaccatctctctgc

SEQ ID NO: 33304 - RNA, 20 nt, synthetic construct
  source 1..20: mol_type = other RNA
ctctccccaagtaaacctca

SEQ ID NO: 33305 - RNA, 20 nt, synthetic construct
  source 1..20: mol_type = other RNA
ctctcccccgaatcctttgc

SEQ ID NO: 33306 - RNA, 20 nt, synthetic construct
  source 1..20: mol_type = other RNA
ctctccccttgacgaagtca

SEQ ID NO: 33307 - RNA, 20 nt, synthetic construct
  source 1..20: mol_type = other RNA
ctctcccgccggagtccgcg

SEQ ID NO: 33308 - RNA, 20 nt, synthetic construct
  source 1..20: mol_type = other RNA
ctctccctgccctgtgaaaa

SEQ ID NO: 33309 - RNA, 20 nt, synthetic construct
  source 1..20: mol_type = other RNA
ctctccctgtctttctgtct

SEQ ID NO: 33310 - RNA, 20 nt, synthetic construct
  source 1..20: mol_type = other RNA
ctctcccttcctgttctttg

SEQ ID NO: 33311 - RNA, 20 nt, synthetic construct
  source 1..20: mol_type = other RNA
ctctccgggtaaaaagcctg

SEQ ID NO: 33312 - RNA, 20 nt, synthetic construct
  source 1..20: mol_type = other RNA
ctctcctgtgccaagtccgt

SEQ ID NO: 33313 - RNA, 20 nt, synthetic construct
  source 1..20: mol_type = other RNA
ctctccttgcacattagaat

SEQ ID NO: 33314 - RNA, 20 nt, synthetic construct
  source 1..20: mol_type = other RNA
ctctcctttgaggtaagaac

SEQ ID NO: 33315 - RNA, 20 nt, synthetic construct
  source 1..20: mol_type = other RNA
ctctcgatggacatttaggt

SEQ ID NO: 33316 - RNA, 20 nt, synthetic construct
  source 1..20: mol_type = other RNA
ctctctaaaaacatccatta

SEQ ID NO: 33317 - RNA, 20 nt, synthetic construct
  source 1..20: mol_type = other RNA
ctctctatccaccactccac

SEQ ID NO: 33318 - RNA, 20 nt, synthetic construct
  source 1..20: mol_type = other RNA
ctctctattccaaatgtctg

SEQ ID NO: 33319 - RNA, 20 nt, synthetic construct
  source 1..20: mol_type = other RNA
ctctctcaactggcccctcc

SEQ ID NO: 33320 - RNA, 20 nt, synthetic construct
  source 1..20: mol_type = other RNA
ctctctcaagcaatctgaaa

SEQ ID NO: 33321 - RNA, 20 nt, synthetic construct
  source 1..20: mol_type = other RNA
ctctctccctgccctgtgaa

SEQ ID NO: 33322 - RNA, 20 nt, synthetic construct
  source 1..20: mol_type = other RNA
ctctctccctgtctttctgt

SEQ ID NO: 33323 - RNA, 20 nt, synthetic construct
  source 1..20: mol_type = other RNA
ctctctctccctgtctttct

SEQ ID NO: 33324 - RNA, 20 nt, synthetic construct
  source 1..20: mol_type = other RNA
ctctctctgcctcggcacag

SEQ ID NO: 33325 - RNA, 20 nt, synthetic construct
  source 1..20: mol_type = other RNA
ctctctctgcttcactaact

SEQ ID NO: 33326 - RNA, 20 nt, synthetic construct
  source 1..20: mol_type = other RNA
ctctctctttctggggatgc

SEQ ID NO: 33327 - RNA, 20 nt, synthetic construct
  source 1..20: mol_type = other RNA
ctctctgaaattagctaagt

SEQ ID NO: 33328 - RNA, 20 nt, synthetic construct
  source 1..20: mol_type = other RNA
ctctctgatggaacggctta

SEQ ID NO: 33329 - RNA, 20 nt, synthetic construct
  source 1..20: mol_type = other RNA
ctctctgcctcaaaatcaac

SEQ ID NO: 33330 - RNA, 20 nt, synthetic construct
  source 1..20: mol_type = other RNA
ctctctgcctcggcacagct

SEQ ID NO: 33331 - RNA, 20 nt, synthetic construct
  source 1..20: mol_type = other RNA
ctctctgcttcactaacttt

SEQ ID NO: 33332 - RNA, 20 nt, synthetic construct
  source 1..20: mol_type = other RNA
ctctctggctgcaattgcgc

SEQ ID NO: 33333 - RNA, 20 nt, synthetic construct
  source 1..20: mol_type = other RNA
ctctctgggcttcactttcg

SEQ ID NO: 33334 - RNA, 20 nt, synthetic construct
  source 1..20: mol_type = other RNA
ctctcttaaatccgagacaa

SEQ ID NO: 33335 - RNA, 20 nt, synthetic construct
  source 1..20: mol_type = other RNA
ctctcttcaccaactgaagc

SEQ ID NO: 33336 - RNA, 20 nt, synthetic construct
  source 1..20: mol_type = other RNA
ctctcttccaaataatcccg

SEQ ID NO: 33337 - RNA, 20 nt, synthetic construct
  source 1..20: mol_type = other RNA
ctctcttcccccaaaactta

SEQ ID NO: 33338 - RNA, 20 nt, synthetic construct
  source 1..20: mol_type = other RNA
ctctcttgaccttagttttc

SEQ ID NO: 33339 - RNA, 20 nt, synthetic construct
  source 1..20: mol_type = other RNA
ctctcttgcccaagctggtc

SEQ ID NO: 33340 - RNA, 20 nt, synthetic construct
  source 1..20: mol_type = other RNA
ctctcttggaatgtgcacct

SEQ ID NO: 33341 - RNA, 20 nt, synthetic construct
  source 1..20: mol_type = other RNA
ctctcttgttgaggatgact

SEQ ID NO: 33342 - RNA, 20 nt, synthetic construct
  source 1..20: mol_type = other RNA
ctctctttaattatgagcat

SEQ ID NO: 33343 - RNA, 20 nt, synthetic construct
  source 1..20: mol_type = other RNA
ctctctttaggaagcttcct

SEQ ID NO: 33344 - RNA, 20 nt, synthetic construct
  source 1..20: mol_type = other RNA
ctctctttctggggatgctg

SEQ ID NO: 33345 - RNA, 20 nt, synthetic construct
  source 1..20: mol_type = other RNA
ctctgaaattagctaagtat

SEQ ID NO: 33346 - RNA, 20 nt, synthetic construct
  source 1..20: mol_type = other RNA
ctctgaagacatgctgaggc

SEQ ID NO: 33347 - RNA, 20 nt, synthetic construct
  source 1..20: mol_type = other RNA
ctctgaagagtctatctttg

SEQ ID NO: 33348 - RNA, 20 nt, synthetic construct
  source 1..20: mol_type = other RNA
ctctgaatcacctcaaggca

SEQ ID NO: 33349 - RNA, 20 nt, synthetic construct
  source 1..20: mol_type = other RNA
ctctgaattctctggaatag

SEQ ID NO: 33350 - RNA, 20 nt, synthetic construct
  source 1..20: mol_type = other RNA
ctctgacatgagagctaagg

SEQ ID NO: 33351 - RNA, 20 nt, synthetic construct
  source 1..20: mol_type = other RNA
ctctgacattggttattcat

SEQ ID NO: 33352 - RNA, 20 nt, synthetic construct
  source 1..20: mol_type = other RNA
ctctgaccattgtgtggaca

SEQ ID NO: 33353 - RNA, 20 nt, synthetic construct
  source 1..20: mol_type = other RNA
ctctgacgtttaaatgagtt

SEQ ID NO: 33354 - RNA, 20 nt, synthetic construct
  source 1..20: mol_type = other RNA
ctctgacttcattcttgaca

SEQ ID NO: 33355 - RNA, 20 nt, synthetic construct
  source 1..20: mol_type = other RNA
ctctgactttatggtatcac

SEQ ID NO: 33356 - RNA, 20 nt, synthetic construct
  source 1..20: mol_type = other RNA
ctctgagacaggatccagat

SEQ ID NO: 33357 - RNA, 20 nt, synthetic construct
  source 1..20: mol_type = other RNA
ctctgagagaagtcagacta

SEQ ID NO: 33358 - RNA, 20 nt, synthetic construct
  source 1..20: mol_type = other RNA
ctctgataggataatgtcca

SEQ ID NO: 33359 - RNA, 20 nt, synthetic construct
  source 1..20: mol_type = other RNA
ctctgatgctttctctagtt

SEQ ID NO: 33360 - RNA, 20 nt, synthetic construct
  source 1..20: mol_type = other RNA
ctctgatggaacggcttaac

SEQ ID NO: 33361 - RNA, 20 nt, synthetic construct
  source 1..20: mol_type = other RNA
ctctgcaaaaaatgtttgtt

SEQ ID NO: 33362 - RNA, 20 nt, synthetic construct
  source 1..20: mol_type = other RNA
ctctgcaaatgaggttgctt

SEQ ID NO: 33363 - RNA, 20 nt, synthetic construct
  source 1..20: mol_type = other RNA
ctctgcaacatttgttgcat

SEQ ID NO: 33364 - RNA, 20 nt, synthetic construct
  source 1..20: mol_type = other RNA
ctctgcaattttaaatgtac

SEQ ID NO: 33365 - RNA, 20 nt, synthetic construct
  source 1..20: mol_type = other RNA
ctctgcacgtactagtcagc

SEQ ID NO: 33366 - RNA, 20 nt, synthetic construct
  source 1..20: mol_type = other RNA
ctctgcagagactgtgcttc

SEQ ID NO: 33367 - RNA, 20 nt, synthetic construct
  source 1..20: mol_type = other RNA
ctctgcagagcaggctccac

SEQ ID NO: 33368 - RNA, 20 nt, synthetic construct
  source 1..20: mol_type = other RNA
ctctgcagttagcatgcctg

SEQ ID NO: 33369 - RNA, 20 nt, synthetic construct
  source 1..20: mol_type = other RNA
ctctgccccgggcctggtta

SEQ ID NO: 33370 - RNA, 20 nt, synthetic construct
  source 1..20: mol_type = other RNA
ctctgccctcattgaagcta

SEQ ID NO: 33371 - RNA, 20 nt, synthetic construct
  source 1..20: mol_type = other RNA
ctctgcctcaaaatcaacat

SEQ ID NO: 33372 - RNA, 20 nt, synthetic construct
  source 1..20: mol_type = other RNA
ctctgcctcagttgacatcc

SEQ ID NO: 33373 - RNA, 20 nt, synthetic construct
  source 1..20: mol_type = other RNA
ctctgcctcggcacagctct

SEQ ID NO: 33374 - RNA, 20 nt, synthetic construct
  source 1..20: mol_type = other RNA
ctctgcggcaggcattgtgc

SEQ ID NO: 33375 - RNA, 20 nt, synthetic construct
  source 1..20: mol_type = other RNA
ctctgcggcggctgaggcag

SEQ ID NO: 33376 - RNA, 20 nt, synthetic construct
  source 1..20: mol_type = other RNA
ctctgcggcgggtctggcgc

SEQ ID NO: 33377 - RNA, 20 nt, synthetic construct
  source 1..20: mol_type = other RNA
ctctgctcaaaggggcattc

SEQ ID NO: 33378 - RNA, 20 nt, synthetic construct
  source 1..20: mol_type = other RNA
ctctgctctcaagtaattgt

SEQ ID NO: 33379 - RNA, 20 nt, synthetic construct
  source 1..20: mol_type = other RNA
ctctgctgctgaaaaagata

SEQ ID NO: 33380 - RNA, 20 nt, synthetic construct
  source 1..20: mol_type = other RNA
ctctgcttcactaactttaa

SEQ ID NO: 33381 - RNA, 20 nt, synthetic construct
  source 1..20: mol_type = other RNA
ctctgctttttcttggtggt

SEQ ID NO: 33382 - RNA, 20 nt, synthetic construct
  source 1..20: mol_type = other RNA
ctctggaaaggacttgatct

SEQ ID NO: 33383 - RNA, 20 nt, synthetic construct
  source 1..20: mol_type = other RNA
ctctggaaggctaagcatgt

SEQ ID NO: 33384 - RNA, 20 nt, synthetic construct
  source 1..20: mol_type = other RNA
ctctggaatagaagagcagt

SEQ ID NO: 33385 - RNA, 20 nt, synthetic construct
  source 1..20: mol_type = other RNA
ctctggaatgcccatcctct

SEQ ID NO: 33386 - RNA, 20 nt, synthetic construct
  source 1..20: mol_type = other RNA
ctctggacattatcctatca

SEQ ID NO: 33387 - RNA, 20 nt, synthetic construct
  source 1..20: mol_type = other RNA
ctctggactcagggtcactt

SEQ ID NO: 33388 - RNA, 20 nt, synthetic construct
  source 1..20: mol_type = other RNA
ctctggagcaagcatgagta

SEQ ID NO: 33389 - RNA, 20 nt, synthetic construct
  source 1..20: mol_type = other RNA
ctctggcaggtcacctagcc

SEQ ID NO: 33390 - RNA, 20 nt, synthetic construct
  source 1..20: mol_type = other RNA
ctctggccctccatttccct

SEQ ID NO: 33391 - RNA, 20 nt, synthetic construct
  source 1..20: mol_type = other RNA
ctctggcctggacaacagtg

SEQ ID NO: 33392 - RNA, 20 nt, synthetic construct
  source 1..20: mol_type = other RNA
ctctggccttctatattttt

SEQ ID NO: 33393 - RNA, 20 nt, synthetic construct
  source 1..20: mol_type = other RNA
ctctggctcagaaacaacaa

SEQ ID NO: 33394 - RNA, 20 nt, synthetic construct
  source 1..20: mol_type = other RNA
ctctggctgacctggtactc

SEQ ID NO: 33395 - RNA, 20 nt, synthetic construct
  source 1..20: mol_type = other RNA
ctctggctgcaattgcgcag

SEQ ID NO: 33396 - RNA, 20 nt, synthetic construct
  source 1..20: mol_type = other RNA
ctctgggatgctcagtttca

SEQ ID NO: 33397 - RNA, 20 nt, synthetic construct
  source 1..20: mol_type = other RNA
ctctgggcttcactttcgtc

SEQ ID NO: 33398 - RNA, 20 nt, synthetic construct
  source 1..20: mol_type = other RNA
ctctggggttagggcctaga

SEQ ID NO: 33399 - RNA, 20 nt, synthetic construct
  source 1..20: mol_type = other RNA
ctctgggtcagaatcgtgat

SEQ ID NO: 33400 - RNA, 20 nt, synthetic construct
  source 1..20: mol_type = other RNA
ctctgggtgcgttgaccgct

SEQ ID NO: 33401 - RNA, 20 nt, synthetic construct
  source 1..20: mol_type = other RNA
ctctggtattctgaactttc

SEQ ID NO: 33402 - RNA, 20 nt, synthetic construct
  source 1..20: mol_type = other RNA
ctctggtattttaagattct

SEQ ID NO: 33403 - RNA, 20 nt, synthetic construct
  source 1..20: mol_type = other RNA
ctctggttttaaagaaatta

SEQ ID NO: 33404 - RNA, 20 nt, synthetic construct
  source 1..20: mol_type = other RNA
ctctgtagataaacgttaac

SEQ ID NO: 33405 - RNA, 20 nt, synthetic construct
  source 1..20: mol_type = other RNA
ctctgtcacccacgtggagt

SEQ ID NO: 33406 - RNA, 20 nt, synthetic construct
  source 1..20: mol_type = other RNA
ctctgtcacccttgtaatca

SEQ ID NO: 33407 - RNA, 20 nt, synthetic construct
  source 1..20: mol_type = other RNA
ctctgtcatggtgtgtctgc

SEQ ID NO: 33408 - RNA, 20 nt, synthetic construct
  source 1..20: mol_type = other RNA
ctctgtcctgtcagtgtggt

SEQ ID NO: 33409 - RNA, 20 nt, synthetic construct
  source 1..20: mol_type = other RNA
ctctgtcgcccaggcggaat

SEQ ID NO: 33410 - RNA, 20 nt, synthetic construct
  source 1..20: mol_type = other RNA
ctctgtctctgttgcccagt

SEQ ID NO: 33411 - RNA, 20 nt, synthetic construct
  source 1..20: mol_type = other RNA
ctctgtcttgatgatagaat

SEQ ID NO: 33412 - RNA, 20 nt, synthetic construct
  source 1..20: mol_type = other RNA
ctctgtgctagccttcttgg

SEQ ID NO: 33413 - RNA, 20 nt, synthetic construct
  source 1..20: mol_type = other RNA
ctctgtgctgagatggtcag

SEQ ID NO: 33414 - RNA, 20 nt, synthetic construct
  source 1..20: mol_type = other RNA
ctctgtgcttgtgcttttaa

SEQ ID NO: 33415 - RNA, 20 nt, synthetic construct
  source 1..20: mol_type = other RNA
ctctgtggaccatgttttag

SEQ ID NO: 33416 - RNA, 20 nt, synthetic construct
  source 1..20: mol_type = other RNA
ctctgtggagtcctgtcagt

SEQ ID NO: 33417 - RNA, 20 nt, synthetic construct
  source 1..20: mol_type = other RNA
ctctgtggtttcttgaatct

SEQ ID NO: 33418 - RNA, 20 nt, synthetic construct
  source 1..20: mol_type = other RNA
ctctgtgtgcatgcatgtct

SEQ ID NO: 33419 - RNA, 20 nt, synthetic construct
  source 1..20: mol_type = other RNA
ctctgtgtggtttgcctttt

SEQ ID NO: 33420 - RNA, 20 nt, synthetic construct
  source 1..20: mol_type = other RNA
ctctgttacagctcttctca

SEQ ID NO: 33421 - RNA, 20 nt, synthetic construct
  source 1..20: mol_type = other RNA
ctctgttgcccagactggag

SEQ ID NO: 33422 - RNA, 20 nt, synthetic construct
  source 1..20: mol_type = other RNA
ctctgtttccttaccagtgc

SEQ ID NO: 33423 - RNA, 20 nt, synthetic construct
  source 1..20: mol_type = other RNA
ctcttaaaaggagatataca

SEQ ID NO: 33424 - RNA, 20 nt, synthetic construct
  source 1..20: mol_type = other RNA
ctcttaaagtttcaaactgt

SEQ ID NO: 33425 - RNA, 20 nt, synthetic construct
  source 1..20: mol_type = other RNA
ctcttaaatccgagacaagt

SEQ ID NO: 33426 - RNA, 20 nt, synthetic construct
  source 1..20: mol_type = other RNA
ctcttaagaccacaaggatt

SEQ ID NO: 33427 - RNA, 20 nt, synthetic construct
  source 1..20: mol_type = other RNA
ctcttaagcttaggtctttg

SEQ ID NO: 33428 - RNA, 20 nt, synthetic construct
  source 1..20: mol_type = other RNA
ctcttaagtatttttgttag

SEQ ID NO: 33429 - RNA, 20 nt, synthetic construct
  source 1..20: mol_type = other RNA
ctcttaataactgcctaagt

SEQ ID NO: 33430 - RNA, 20 nt, synthetic construct
  source 1..20: mol_type = other RNA
ctcttaatattgaaacgatg

SEQ ID NO: 33431 - RNA, 20 nt, synthetic construct
  source 1..20: mol_type = other RNA
ctcttacacctgtttaaaaa

SEQ ID NO: 33432 - RNA, 20 nt, synthetic construct
  source 1..20: mol_type = other RNA
ctcttactaaaaagaaaaag

SEQ ID NO: 33433 - RNA, 20 nt, synthetic construct
  source 1..20: mol_type = other RNA
ctcttagaaaatatatactg

SEQ ID NO: 33434 - RNA, 20 nt, synthetic construct
  source 1..20: mol_type = other RNA
ctcttagacctcctagattg

SEQ ID NO: 33435 - RNA, 20 nt, synthetic construct
  source 1..20: mol_type = other RNA
ctcttagcttagaagaagac

SEQ ID NO: 33436 - RNA, 20 nt, synthetic construct
  source 1..20: mol_type = other RNA
ctcttagtgatgtcttttga

SEQ ID NO: 33437 - RNA, 20 nt, synthetic construct
  source 1..20: mol_type = other RNA
ctcttatactagtagaaagc

SEQ ID NO: 33438 - RNA, 20 nt, synthetic construct
  source 1..20: mol_type = other RNA
ctcttatatcctaaacactt

SEQ ID NO: 33439 - RNA, 20 nt, synthetic construct
  source 1..20: mol_type = other RNA
ctcttatggctataaccacg

SEQ ID NO: 33440 - RNA, 20 nt, synthetic construct
  source 1..20: mol_type = other RNA
ctcttcaagcattgggagct

SEQ ID NO: 33441 - RNA, 20 nt, synthetic construct
  source 1..20: mol_type = other RNA
ctcttcaatattttggaaga

SEQ ID NO: 33442 - RNA, 20 nt, synthetic construct
  source 1..20: mol_type = other RNA
ctcttcaccaactgaagcgg

SEQ ID NO: 33443 - RNA, 20 nt, synthetic construct
  source 1..20: mol_type = other RNA
ctcttcagaagaggataagg

SEQ ID NO: 33444 - RNA, 20 nt, synthetic construct
  source 1..20: mol_type = other RNA
ctcttcagaggtctgttact

SEQ ID NO: 33445 - RNA, 20 nt, synthetic construct
  source 1..20: mol_type = other RNA
ctcttccaaataatcccgca

SEQ ID NO: 33446 - RNA, 20 nt, synthetic construct
  source 1..20: mol_type = other RNA
ctcttcccccaaaacttagg

SEQ ID NO: 33447 - RNA, 20 nt, synthetic construct
  source 1..20: mol_type = other RNA
ctcttcccttaacctttttc

SEQ ID NO: 33448 - RNA, 20 nt, synthetic construct
  source 1..20: mol_type = other RNA
ctcttcccttgtgcacctcg

SEQ ID NO: 33449 - RNA, 20 nt, synthetic construct
  source 1..20: mol_type = other RNA
ctcttcctcatccctcatat

SEQ ID NO: 33450 - RNA, 20 nt, synthetic construct
  source 1..20: mol_type = other RNA
ctcttcctcctctggacatt

SEQ ID NO: 33451 - RNA, 20 nt, synthetic construct
  source 1..20: mol_type = other RNA
ctcttcctgtatatctcctt

SEQ ID NO: 33452 - RNA, 20 nt, synthetic construct
  source 1..20: mol_type = other RNA
ctcttcctgttgctttaacc

SEQ ID NO: 33453 - RNA, 20 nt, synthetic construct
  source 1..20: mol_type = other RNA
ctcttccttatccgataaag

SEQ ID NO: 33454 - RNA, 20 nt, synthetic construct
  source 1..20: mol_type = other RNA
ctcttcgagggggctgagta

SEQ ID NO: 33455 - RNA, 20 nt, synthetic construct
  source 1..20: mol_type = other RNA
ctcttcgctcttttaaaaat

SEQ ID NO: 33456 - RNA, 20 nt, synthetic construct
  source 1..20: mol_type = other RNA
ctcttcgggtgtcagaattc

SEQ ID NO: 33457 - RNA, 20 nt, synthetic construct
  source 1..20: mol_type = other RNA
ctcttctactcactgtacta

SEQ ID NO: 33458 - RNA, 20 nt, synthetic construct
  source 1..20: mol_type = other RNA
ctcttctattccagagaatt

SEQ ID NO: 33459 - RNA, 20 nt, synthetic construct
  source 1..20: mol_type = other RNA
ctcttctcagttgcagcatg

SEQ ID NO: 33460 - RNA, 20 nt, synthetic construct
  source 1..20: mol_type = other RNA
ctcttctccaaggaaagtgt

SEQ ID NO: 33461 - RNA, 20 nt, synthetic construct
  source 1..20: mol_type = other RNA
ctcttctctcctttgaggta

SEQ ID NO: 33462 - RNA, 20 nt, synthetic construct
  source 1..20: mol_type = other RNA
ctcttctgaagaggctttct

SEQ ID NO: 33463 - RNA, 20 nt, synthetic construct
  source 1..20: mol_type = other RNA
ctcttctgatcacagaagtg

SEQ ID NO: 33464 - RNA, 20 nt, synthetic construct
  source 1..20: mol_type = other RNA
ctcttctgcaagttgctatc

SEQ ID NO: 33465 - RNA, 20 nt, synthetic construct
  source 1..20: mol_type = other RNA
ctcttctggatagcattatc

SEQ ID NO: 33466 - RNA, 20 nt, synthetic construct
  source 1..20: mol_type = other RNA
ctcttgaagtcagttacagc

SEQ ID NO: 33467 - RNA, 20 nt, synthetic construct
  source 1..20: mol_type = other RNA
ctcttgaccttagttttcac

SEQ ID NO: 33468 - RNA, 20 nt, synthetic construct
  source 1..20: mol_type = other RNA
ctcttgaccttgtgcatgtg

SEQ ID NO: 33469 - RNA, 20 nt, synthetic construct
  source 1..20: mol_type = other RNA
ctcttgagttaggaatttac

SEQ ID NO: 33470 - RNA, 20 nt, synthetic construct
  source 1..20: mol_type = other RNA
ctcttgcattagagccccaa

SEQ ID NO: 33471 - RNA, 20 nt, synthetic construct
  source 1..20: mol_type = other RNA
ctcttgcccaagctggtcct

SEQ ID NO: 33472 - RNA, 20 nt, synthetic construct
  source 1..20: mol_type = other RNA
ctcttgcctaggctggagtg

SEQ ID NO: 33473 - RNA, 20 nt, synthetic construct
  source 1..20: mol_type = other RNA
ctcttgcggtcttttagcca

SEQ ID NO: 33474 - RNA, 20 nt, synthetic construct
  source 1..20: mol_type = other RNA
ctcttggaatgtgcacctcc

SEQ ID NO: 33475 - RNA, 20 nt, synthetic construct
  source 1..20: mol_type = other RNA
ctcttggccattttctttta

SEQ ID NO: 33476 - RNA, 20 nt, synthetic construct
  source 1..20: mol_type = other RNA
ctcttggcttttggcagcgt

SEQ ID NO: 33477 - RNA, 20 nt, synthetic construct
  source 1..20: mol_type = other RNA
ctcttggtctttctcccagg

SEQ ID NO: 33478 - RNA, 20 nt, synthetic construct
  source 1..20: mol_type = other RNA
ctcttggtttcttcaagata

SEQ ID NO: 33479 - RNA, 20 nt, synthetic construct
  source 1..20: mol_type = other RNA
ctcttgtagtatttttgcaa

SEQ ID NO: 33480 - RNA, 20 nt, synthetic construct
  source 1..20: mol_type = other RNA
ctcttgtcccggcatgcctc

SEQ ID NO: 33481 - RNA, 20 nt, synthetic construct
  source 1..20: mol_type = other RNA
ctcttgttcaaaaacctttt

SEQ ID NO: 33482 - RNA, 20 nt, synthetic construct
  source 1..20: mol_type = other RNA
ctcttgttgaggatgactgt

SEQ ID NO: 33483 - RNA, 20 nt, synthetic construct
  source 1..20: mol_type = other RNA
ctctttaaagctgaactcct

SEQ ID NO: 33484 - RNA, 20 nt, synthetic construct
  source 1..20: mol_type = other RNA
ctctttaattatgagcattc

SEQ ID NO: 33485 - RNA, 20 nt, synthetic construct
  source 1..20: mol_type = other RNA
ctctttaggaagcttccttg

SEQ ID NO: 33486 - RNA, 20 nt, synthetic construct
  source 1..20: mol_type = other RNA
ctctttagggaagatagtac

SEQ ID NO: 33487 - RNA, 20 nt, synthetic construct
  source 1..20: mol_type = other RNA
ctctttatctccacatttct

SEQ ID NO: 33488 - RNA, 20 nt, synthetic construct
  source 1..20: mol_type = other RNA
ctctttcagccatcccagct

SEQ ID NO: 33489 - RNA, 20 nt, synthetic construct
  source 1..20: mol_type = other RNA
ctctttcatatctgattttg

SEQ ID NO: 33490 - RNA, 20 nt, synthetic construct
  source 1..20: mol_type = other RNA
ctctttccactctctggctg

SEQ ID NO: 33491 - RNA, 20 nt, synthetic construct
  source 1..20: mol_type = other RNA
ctctttctcaacttcctgtt

SEQ ID NO: 33492 - RNA, 20 nt, synthetic construct
  source 1..20: mol_type = other RNA
ctctttctgaaattctcatt

SEQ ID NO: 33493 - RNA, 20 nt, synthetic construct
  source 1..20: mol_type = other RNA
ctctttctggggatgctgtc

SEQ ID NO: 33494 - RNA, 20 nt, synthetic construct
  source 1..20: mol_type = other RNA
ctctttgaaaggaatccggc

SEQ ID NO: 33495 - RNA, 20 nt, synthetic construct
  source 1..20: mol_type = other RNA
ctctttgctaataagtgagt

SEQ ID NO: 33496 - RNA, 20 nt, synthetic construct
  source 1..20: mol_type = other RNA
ctctttgtttatccttgcac

SEQ ID NO: 33497 - RNA, 20 nt, synthetic construct
  source 1..20: mol_type = other RNA
ctcttttaaacccatttcat

SEQ ID NO: 33498 - RNA, 20 nt, synthetic construct
  source 1..20: mol_type = other RNA
ctcttttaaggtttagaaaa

SEQ ID NO: 33499 - RNA, 20 nt, synthetic construct
  source 1..20: mol_type = other RNA
ctcttttcatcactcactgg

SEQ ID NO: 33500 - RNA, 20 nt, synthetic construct
  source 1..20: mol_type = other RNA
ctcttttcctcgttttcaac

SEQ ID NO: 33501 - RNA, 20 nt, synthetic construct
  source 1..20: mol_type = other RNA
ctcttttcctttaacgtatc

SEQ ID NO: 33502 - RNA, 20 nt, synthetic construct
  source 1..20: mol_type = other RNA
ctcttttgtgtctttttata

SEQ ID NO: 33503 - RNA, 20 nt, synthetic construct
  source 1..20: mol_type = other RNA
ctctttttgacagatgagac

SEQ ID NO: 33504 - RNA, 20 nt, synthetic construct
  source 1..20: mol_type = other RNA
ctctttttgtaatatacttg

SEQ ID NO: 33505 - RNA, 20 nt, synthetic construct
  source 1..20: mol_type = other RNA
ctgaaaaacacctcagttaa

SEQ ID NO: 33506 - RNA, 20 nt, synthetic construct
  source 1..20: mol_type = other RNA
ctgaaaaacggaggttgcag

SEQ ID NO: 33507 - RNA, 20 nt, synthetic construct
  source 1..20: mol_type = other RNA
ctgaaaaagatactcttaaa

SEQ ID NO: 33508 - RNA, 20 nt, synthetic construct
  source 1..20: mol_type = other RNA
ctgaaaaatgagaaacctaa

SEQ ID NO: 33509 - RNA, 20 nt, synthetic construct
  source 1..20: mol_type = other RNA
ctgaaaaatggttttatggt

SEQ ID NO: 33510 - RNA, 20 nt, synthetic construct
  source 1..20: mol_type = other RNA
ctgaaaagatacagaaataa

SEQ ID NO: 33511 - RNA, 20 nt, synthetic construct
  source 1..20: mol_type = other RNA
ctgaaaagtgtattattcta

SEQ ID NO: 33512 - RNA, 20 nt, synthetic construct
  source 1..20: mol_type = other RNA
ctgaaaattccttccccttt

SEQ ID NO: 33513 - RNA, 20 nt, synthetic construct
  source 1..20: mol_type = other RNA
ctgaaacaatcgcaatccaa

SEQ ID NO: 33514 - RNA, 20 nt, synthetic construct
  source 1..20: mol_type = other RNA
ctgaaaccagtgctctcccc

SEQ ID NO: 33515 - RNA, 20 nt, synthetic construct
  source 1..20: mol_type = other RNA
ctgaaaccagtgggtcagct

SEQ ID NO: 33516 - RNA, 20 nt, synthetic construct
  source 1..20: mol_type = other RNA
ctgaaaccccgcatactgtg

SEQ ID NO: 33517 - RNA, 20 nt, synthetic construct
  source 1..20: mol_type = other RNA
ctgaaaccctcacgaaagcg

SEQ ID NO: 33518 - RNA, 20 nt, synthetic construct
  source 1..20: mol_type = other RNA
ctgaaacgaccttgctcatt

SEQ ID NO: 33519 - RNA, 20 nt, synthetic construct
  source 1..20: mol_type = other RNA
ctgaaacttttcttttcttt

SEQ ID NO: 33520 - RNA, 20 nt, synthetic construct
  source 1..20: mol_type = other RNA
ctgaaagacagacctctatt

SEQ ID NO: 33521 - RNA, 20 nt, synthetic construct
  source 1..20: mol_type = other RNA
ctgaaagagaaagaagtaat

SEQ ID NO: 33522 - RNA, 20 nt, synthetic construct
  source 1..20: mol_type = other RNA
ctgaaagcagggactcccat

SEQ ID NO: 33523 - RNA, 20 nt, synthetic construct
  source 1..20: mol_type = other RNA
ctgaaagctagaagacctca

SEQ ID NO: 33524 - RNA, 20 nt, synthetic construct
  source 1..20: mol_type = other RNA
ctgaaagcttctgagcagtg

SEQ ID NO: 33525 - RNA, 20 nt, synthetic construct
  source 1..20: mol_type = other RNA
ctgaaaggaaatgagtgtat

SEQ ID NO: 33526 - RNA, 20 nt, synthetic construct
  source 1..20: mol_type = other RNA
ctgaaaggcatgaaattctt

SEQ ID NO: 33527 - RNA, 20 nt, synthetic construct
  source 1..20: mol_type = other RNA
ctgaaagtaaagatagcccc

SEQ ID NO: 33528 - RNA, 20 nt, synthetic construct
  source 1..20: mol_type = other RNA
ctgaaataatttggttatgc

SEQ ID NO: 33529 - RNA, 20 nt, synthetic construct
  source 1..20: mol_type = other RNA
ctgaaatcctagccccaaat

SEQ ID NO: 33530 - RNA, 20 nt, synthetic construct
  source 1..20: mol_type = other RNA
ctgaaatcgggagtaacaga

SEQ ID NO: 33531 - RNA, 20 nt, synthetic construct
  source 1..20: mol_type = other RNA
ctgaaatctgatttgtttag

SEQ ID NO: 33532 - RNA, 20 nt, synthetic construct
  source 1..20: mol_type = other RNA
ctgaaatgaaccaaacttgg

SEQ ID NO: 33533 - RNA, 20 nt, synthetic construct
  source 1..20: mol_type = other RNA
ctgaaatgctgtaactgact

SEQ ID NO: 33534 - RNA, 20 nt, synthetic construct
  source 1..20: mol_type = other RNA
ctgaaatggcttaaggaaat

SEQ ID NO: 33535 - RNA, 20 nt, synthetic construct
  source 1..20: mol_type = other RNA
ctgaaattagctaagtatgc

SEQ ID NO: 33536 - RNA, 20 nt, synthetic construct
  source 1..20: mol_type = other RNA
ctgaaattctcaaatgaaca

SEQ ID NO: 33537 - RNA, 20 nt, synthetic construct
  source 1..20: mol_type = other RNA
ctgaaattctcattagttat

SEQ ID NO: 33538 - RNA, 20 nt, synthetic construct
  source 1..20: mol_type = other RNA
ctgaaattgacttcactaga

SEQ ID NO: 33539 - RNA, 20 nt, synthetic construct
  source 1..20: mol_type = other RNA
ctgaaattgtcagaaaagat

SEQ ID NO: 33540 - RNA, 20 nt, synthetic construct
  source 1..20: mol_type = other RNA
ctgaacaaaatttttgcaaa

SEQ ID NO: 33541 - RNA, 20 nt, synthetic construct
  source 1..20: mol_type = other RNA
ctgaacaaatatcaaaagaa

SEQ ID NO: 33542 - RNA, 20 nt, synthetic construct
  source 1..20: mol_type = other RNA
ctgaacaacgctgtggctaa

SEQ ID NO: 33543 - RNA, 20 nt, synthetic construct
  source 1..20: mol_type = other RNA
ctgaacaatattccatttta

SEQ ID NO: 33544 - RNA, 20 nt, synthetic construct
  source 1..20: mol_type = other RNA
ctgaacaatgattttcttaa

SEQ ID NO: 33545 - RNA, 20 nt, synthetic construct
  source 1..20: mol_type = other RNA
ctgaacatgtatgtttctca

SEQ ID NO: 33546 - RNA, 20 nt, synthetic construct
  source 1..20: mol_type = other RNA
ctgaacatttatacagttgg

SEQ ID NO: 33547 - RNA, 20 nt, synthetic construct
  source 1..20: mol_type = other RNA
ctgaacattttagctggggc

SEQ ID NO: 33548 - RNA, 20 nt, synthetic construct
  source 1..20: mol_type = other RNA
ctgaacccaggaggcaaagg

SEQ ID NO: 33549 - RNA, 20 nt, synthetic construct
  source 1..20: mol_type = other RNA
ctgaacgtctttaaatttca

SEQ ID NO: 33550 - RNA, 20 nt, synthetic construct
  source 1..20: mol_type = other RNA
ctgaactacagtgtttaggg

SEQ ID NO: 33551 - RNA, 20 nt, synthetic construct
  source 1..20: mol_type = other RNA
ctgaactcaaaagtgaatca

SEQ ID NO: 33552 - RNA, 20 nt, synthetic construct
  source 1..20: mol_type = other RNA
ctgaactcaaaatggatcaa

SEQ ID NO: 33553 - RNA, 20 nt, synthetic construct
  source 1..20: mol_type = other RNA
ctgaactcctttcttaccct

SEQ ID NO: 33554 - RNA, 20 nt, synthetic construct
  source 1..20: mol_type = other RNA
ctgaactcgtggcctcaagc

SEQ ID NO: 33555 - RNA, 20 nt, synthetic construct
  source 1..20: mol_type = other RNA
ctgaactctgtggagtcctg

SEQ ID NO: 33556 - RNA, 20 nt, synthetic construct
  source 1..20: mol_type = other RNA
ctgaactgctgacagattaa

SEQ ID NO: 33557 - RNA, 20 nt, synthetic construct
  source 1..20: mol_type = other RNA
ctgaacttgtcacaaaatgt

SEQ ID NO: 33558 - RNA, 20 nt, synthetic construct
  source 1..20: mol_type = other RNA
ctgaactttcaacctaacat

SEQ ID NO: 33559 - RNA, 20 nt, synthetic construct
  source 1..20: mol_type = other RNA
ctgaactttcgaagtgggaa

SEQ ID NO: 33560 - RNA, 20 nt, synthetic construct
  source 1..20: mol_type = other RNA
ctgaagaaattatctgtggg

SEQ ID NO: 33561 - RNA, 20 nt, synthetic construct
  source 1..20: mol_type = other RNA
ctgaagaataactgtcctga

SEQ ID NO: 33562 - RNA, 20 nt, synthetic construct
  source 1..20: mol_type = other RNA
ctgaagacatgctgaggccc

SEQ ID NO: 33563 - RNA, 20 nt, synthetic construct
  source 1..20: mol_type = other RNA
ctgaagactggatttgattg

SEQ ID NO: 33564 - RNA, 20 nt, synthetic construct
  source 1..20: mol_type = other RNA
ctgaagaggctttctgtgta

SEQ ID NO: 33565 - RNA, 20 nt, synthetic construct
  source 1..20: mol_type = other RNA
ctgaagagtctatctttggg

SEQ ID NO: 33566 - RNA, 20 nt, synthetic construct
  source 1..20: mol_type = other RNA
ctgaagcaggctttttaccc

SEQ ID NO: 33567 - RNA, 20 nt, synthetic construct
  source 1..20: mol_type = other RNA
ctgaagccagtccttgtgat

SEQ ID NO: 33568 - RNA, 20 nt, synthetic construct
  source 1..20: mol_type = other RNA
ctgaagcggggctgccacta

SEQ ID NO: 33569 - RNA, 20 nt, synthetic construct
  source 1..20: mol_type = other RNA
ctgaaggattcctccctgga

SEQ ID NO: 33570 - RNA, 20 nt, synthetic construct
  source 1..20: mol_type = other RNA
ctgaaggcactaacaaaggg

SEQ ID NO: 33571 - RNA, 20 nt, synthetic construct
  source 1..20: mol_type = other RNA
ctgaaggcactgtatggttc

SEQ ID NO: 33572 - RNA, 20 nt, synthetic construct
  source 1..20: mol_type = other RNA
ctgaaggcatagggccttct

SEQ ID NO: 33573 - RNA, 20 nt, synthetic construct
  source 1..20: mol_type = other RNA
ctgaaggctcagcccctcat

SEQ ID NO: 33574 - RNA, 20 nt, synthetic construct
  source 1..20: mol_type = other RNA
ctgaagggaattttactgat

SEQ ID NO: 33575 - RNA, 20 nt, synthetic construct
  source 1..20: mol_type = other RNA
ctgaagggaggaaaaaacag

SEQ ID NO: 33576 - RNA, 20 nt, synthetic construct
  source 1..20: mol_type = other RNA
ctgaaggtgcctgccataga

SEQ ID NO: 33577 - RNA, 20 nt, synthetic construct
  source 1..20: mol_type = other RNA
ctgaagtaataaagcaagta

SEQ ID NO: 33578 - RNA, 20 nt, synthetic construct
  source 1..20: mol_type = other RNA
ctgaagtacttcaaggttca

SEQ ID NO: 33579 - RNA, 20 nt, synthetic construct
  source 1..20: mol_type = other RNA
ctgaagtcctttcttggtct

SEQ ID NO: 33580 - RNA, 20 nt, synthetic construct
  source 1..20: mol_type = other RNA
ctgaagtctttggtgatcct

SEQ ID NO: 33581 - RNA, 20 nt, synthetic construct
  source 1..20: mol_type = other RNA
ctgaagtgttgagaggcttt

SEQ ID NO: 33582 - RNA, 20 nt, synthetic construct
  source 1..20: mol_type = other RNA
ctgaagttctcaggggtaaa

SEQ ID NO: 33583 - RNA, 20 nt, synthetic construct
  source 1..20: mol_type = other RNA
ctgaagtttatcagtctcca

SEQ ID NO: 33584 - RNA, 20 nt, synthetic construct
  source 1..20: mol_type = other RNA
ctgaagtttatcgtatttat

SEQ ID NO: 33585 - RNA, 20 nt, synthetic construct
  source 1..20: mol_type = other RNA
ctgaatacccctccctacct

SEQ ID NO: 33586 - RNA, 20 nt, synthetic construct
  source 1..20: mol_type = other RNA
ctgaatactattcctattgt

SEQ ID NO: 33587 - RNA, 20 nt, synthetic construct
  source 1..20: mol_type = other RNA
ctgaatcaataagaatgatt

SEQ ID NO: 33588 - RNA, 20 nt, synthetic construct
  source 1..20: mol_type = other RNA
ctgaatcacctcaaggcaga

SEQ ID NO: 33589 - RNA, 20 nt, synthetic construct
  source 1..20: mol_type = other RNA
ctgaatcagacaacacatta

SEQ ID NO: 33590 - RNA, 20 nt, synthetic construct
  source 1..20: mol_type = other RNA
ctgaatcagattttaaatgt

SEQ ID NO: 33591 - RNA, 20 nt, synthetic construct
  source 1..20: mol_type = other RNA
ctgaatgactgttgcctctg

SEQ ID NO: 33592 - RNA, 20 nt, synthetic construct
  source 1..20: mol_type = other RNA
ctgaatgatttccctgcata

SEQ ID NO: 33593 - RNA, 20 nt, synthetic construct
  source 1..20: mol_type = other RNA
ctgaatgtgaccttatttgg

SEQ ID NO: 33594 - RNA, 20 nt, synthetic construct
  source 1..20: mol_type = other RNA
ctgaattaatctcttacacc

SEQ ID NO: 33595 - RNA, 20 nt, synthetic construct
  source 1..20: mol_type = other RNA
ctgaattcaagttacaataa

SEQ ID NO: 33596 - RNA, 20 nt, synthetic construct
  source 1..20: mol_type = other RNA
ctgaattcccacaaaatatg

SEQ ID NO: 33597 - RNA, 20 nt, synthetic construct
  source 1..20: mol_type = other RNA
ctgaattctaacattatctt

SEQ ID NO: 33598 - RNA, 20 nt, synthetic construct
  source 1..20: mol_type = other RNA
ctgaattctaatgaactccc

SEQ ID NO: 33599 - RNA, 20 nt, synthetic construct
  source 1..20: mol_type = other RNA
ctgaattctctggaatagaa

SEQ ID NO: 33600 - RNA, 20 nt, synthetic construct
  source 1..20: mol_type = other RNA
ctgaattgagatgtactgga

SEQ ID NO: 33601 - RNA, 20 nt, synthetic construct
  source 1..20: mol_type = other RNA
ctgacaaagtatgagaaatg

SEQ ID NO: 33602 - RNA, 20 nt, synthetic construct
  source 1..20: mol_type = other RNA
ctgacaactgggagaatggc

SEQ ID NO: 33603 - RNA, 20 nt, synthetic construct
  source 1..20: mol_type = other RNA
ctgacaagtagtacaaaagt

SEQ ID NO: 33604 - RNA, 20 nt, synthetic construct
  source 1..20: mol_type = other RNA
ctgacaatagccaagacatg

SEQ ID NO: 33605 - RNA, 20 nt, synthetic construct
  source 1..20: mol_type = other RNA
ctgacaatttcagggagaat

SEQ ID NO: 33606 - RNA, 20 nt, synthetic construct
  source 1..20: mol_type = other RNA
ctgacaatttgccaaaatga

SEQ ID NO: 33607 - RNA, 20 nt, synthetic construct
  source 1..20: mol_type = other RNA
ctgacacaggctgaagggag

SEQ ID NO: 33608 - RNA, 20 nt, synthetic construct
  source 1..20: mol_type = other RNA
ctgacacccgaagaggacga

SEQ ID NO: 33609 - RNA, 20 nt, synthetic construct
  source 1..20: mol_type = other RNA
ctgacacccgacccactagt

SEQ ID NO: 33610 - RNA, 20 nt, synthetic construct
  source 1..20: mol_type = other RNA
ctgacagattaaataccacc

SEQ ID NO: 33611 - RNA, 20 nt, synthetic construct
  source 1..20: mol_type = other RNA
ctgacagcaaataaacaaaa

SEQ ID NO: 33612 - RNA, 20 nt, synthetic construct
  source 1..20: mol_type = other RNA
ctgacaggacagagcagtag

SEQ ID NO: 33613 - RNA, 20 nt, synthetic construct
  source 1..20: mol_type = other RNA
ctgacaggactccacagagt

SEQ ID NO: 33614 - RNA, 20 nt, synthetic construct
  source 1..20: mol_type = other RNA
ctgacaggtggtatgggaga

SEQ ID NO: 33615 - RNA, 20 nt, synthetic construct
  source 1..20: mol_type = other RNA
ctgacagtggacaaaggttc

SEQ ID NO: 33616 - RNA, 20 nt, synthetic construct
  source 1..20: mol_type = other RNA
ctgacataactgtaaagtaa

SEQ ID NO: 33617 - RNA, 20 nt, synthetic construct
  source 1..20: mol_type = other RNA
ctgacatactgtcacaggct

SEQ ID NO: 33618 - RNA, 20 nt, synthetic construct
  source 1..20: mol_type = other RNA
ctgacatatgttttgcttcg

SEQ ID NO: 33619 - RNA, 20 nt, synthetic construct
  source 1..20: mol_type = other RNA
ctgacatgagagctaaggga

SEQ ID NO: 33620 - RNA, 20 nt, synthetic construct
  source 1..20: mol_type = other RNA
ctgacatgtgtaaaacatct

SEQ ID NO: 33621 - RNA, 20 nt, synthetic construct
  source 1..20: mol_type = other RNA
ctgacattggttattcatgt

SEQ ID NO: 33622 - RNA, 20 nt, synthetic construct
  source 1..20: mol_type = other RNA
ctgaccaactatttcactaa

SEQ ID NO: 33623 - RNA, 20 nt, synthetic construct
  source 1..20: mol_type = other RNA
ctgaccatctcagcacagag

SEQ ID NO: 33624 - RNA, 20 nt, synthetic construct
  source 1..20: mol_type = other RNA
ctgaccattgtgtggacaca

SEQ ID NO: 33625 - RNA, 20 nt, synthetic construct
  source 1..20: mol_type = other RNA
ctgacccactggtttcagtc

SEQ ID NO: 33626 - RNA, 20 nt, synthetic construct
  source 1..20: mol_type = other RNA
ctgacccagagcctaatgtg

SEQ ID NO: 33627 - RNA, 20 nt, synthetic construct
  source 1..20: mol_type = other RNA
ctgaccctttattcaaagat

SEQ ID NO: 33628 - RNA, 20 nt, synthetic construct
  source 1..20: mol_type = other RNA
ctgacctaaagttttaagaa

SEQ ID NO: 33629 - RNA, 20 nt, synthetic construct
  source 1..20: mol_type = other RNA
ctgacctaagcttgggtagg

SEQ ID NO: 33630 - RNA, 20 nt, synthetic construct
  source 1..20: mol_type = other RNA
ctgacctcaagcgatccagc

SEQ ID NO: 33631 - RNA, 20 nt, synthetic construct
  source 1..20: mol_type = other RNA
ctgacctctgcagttagcat

SEQ ID NO: 33632 - RNA, 20 nt, synthetic construct
  source 1..20: mol_type = other RNA
ctgacctgggagaaagacca

SEQ ID NO: 33633 - RNA, 20 nt, synthetic construct
  source 1..20: mol_type = other RNA
ctgacctggtactctatgat

SEQ ID NO: 33634 - RNA, 20 nt, synthetic construct
  source 1..20: mol_type = other RNA
ctgacgtttaaatgagttaa

SEQ ID NO: 33635 - RNA, 20 nt, synthetic construct
  source 1..20: mol_type = other RNA
ctgactacacatacacaggg

SEQ ID NO: 33636 - RNA, 20 nt, synthetic construct
  source 1..20: mol_type = other RNA
ctgactacactgaagggaat

SEQ ID NO: 33637 - RNA, 20 nt, synthetic construct
  source 1..20: mol_type = other RNA
ctgactagtacgtgcagagc

SEQ ID NO: 33638 - RNA, 20 nt, synthetic construct
  source 1..20: mol_type = other RNA
ctgactagtggctcatactt

SEQ ID NO: 33639 - RNA, 20 nt, synthetic construct
  source 1..20: mol_type = other RNA
ctgactcaatcttcttattt

SEQ ID NO: 33640 - RNA, 20 nt, synthetic construct
  source 1..20: mol_type = other RNA
ctgactccctttttaggtag

SEQ ID NO: 33641 - RNA, 20 nt, synthetic construct
  source 1..20: mol_type = other RNA
ctgactctaaagtctatgct

SEQ ID NO: 33642 - RNA, 20 nt, synthetic construct
  source 1..20: mol_type = other RNA
ctgactctgtgcttgtgctt

SEQ ID NO: 33643 - RNA, 20 nt, synthetic construct
  source 1..20: mol_type = other RNA
ctgactgaaggattcctccc

SEQ ID NO: 33644 - RNA, 20 nt, synthetic construct
  source 1..20: mol_type = other RNA
ctgactggctgtgccaactc

SEQ ID NO: 33645 - RNA, 20 nt, synthetic construct
  source 1..20: mol_type = other RNA
ctgacttacagaccttattc

SEQ ID NO: 33646 - RNA, 20 nt, synthetic construct
  source 1..20: mol_type = other RNA
ctgacttagagggcttcatg

SEQ ID NO: 33647 - RNA, 20 nt, synthetic construct
  source 1..20: mol_type = other RNA
ctgacttagtgagggaggcc

SEQ ID NO: 33648 - RNA, 20 nt, synthetic construct
  source 1..20: mol_type = other RNA
ctgacttcaaactatacttc

SEQ ID NO: 33649 - RNA, 20 nt, synthetic construct
  source 1..20: mol_type = other RNA
ctgacttcaagaggttaaaa

SEQ ID NO: 33650 - RNA, 20 nt, synthetic construct
  source 1..20: mol_type = other RNA
ctgacttcattcttgacatg

SEQ ID NO: 33651 - RNA, 20 nt, synthetic construct
  source 1..20: mol_type = other RNA
ctgacttcctggctctagcc

SEQ ID NO: 33652 - RNA, 20 nt, synthetic construct
  source 1..20: mol_type = other RNA
ctgacttctctcagagggaa

SEQ ID NO: 33653 - RNA, 20 nt, synthetic construct
  source 1..20: mol_type = other RNA
ctgactttatggtatcactt

SEQ ID NO: 33654 - RNA, 20 nt, synthetic construct
  source 1..20: mol_type = other RNA
ctgactttcatttgtaattc

SEQ ID NO: 33655 - RNA, 20 nt, synthetic construct
  source 1..20: mol_type = other RNA
ctgacttttaaaatatgtgg

SEQ ID NO: 33656 - RNA, 20 nt, synthetic construct
  source 1..20: mol_type = other RNA
ctgacttttccttaaaaaag

SEQ ID NO: 33657 - RNA, 20 nt, synthetic construct
  source 1..20: mol_type = other RNA
ctgagaaccggaacttgagt

SEQ ID NO: 33658 - RNA, 20 nt, synthetic construct
  source 1..20: mol_type = other RNA
ctgagaacttcagtatatat

SEQ ID NO: 33659 - RNA, 20 nt, synthetic construct
  source 1..20: mol_type = other RNA
ctgagaagactaagcagaaa

SEQ ID NO: 33660 - RNA, 20 nt, synthetic construct
  source 1..20: mol_type = other RNA
ctgagaagagctgtaacaga

SEQ ID NO: 33661 - RNA, 20 nt, synthetic construct
  source 1..20: mol_type = other RNA
ctgagaaggcgaaatgtgaa

SEQ ID NO: 33662 - RNA, 20 nt, synthetic construct
  source 1..20: mol_type = other RNA
ctgagaagtaacattacaac

SEQ ID NO: 33663 - RNA, 20 nt, synthetic construct
  source 1..20: mol_type = other RNA
ctgagaagtcaaagcctgtg

SEQ ID NO: 33664 - RNA, 20 nt, synthetic construct
  source 1..20: mol_type = other RNA
ctgagacaggatccagatgt

SEQ ID NO: 33665 - RNA, 20 nt, synthetic construct
  source 1..20: mol_type = other RNA
ctgagacagtattgtgctga

SEQ ID NO: 33666 - RNA, 20 nt, synthetic construct
  source 1..20: mol_type = other RNA
ctgagacatcacaatgcgtt

SEQ ID NO: 33667 - RNA, 20 nt, synthetic construct
  source 1..20: mol_type = other RNA
ctgagaccacagacgtgcag

SEQ ID NO: 33668 - RNA, 20 nt, synthetic construct
  source 1..20: mol_type = other RNA
ctgagaccggatgaggtggc

SEQ ID NO: 33669 - RNA, 20 nt, synthetic construct
  source 1..20: mol_type = other RNA
ctgagacctcatcttagccg

SEQ ID NO: 33670 - RNA, 20 nt, synthetic construct
  source 1..20: mol_type = other RNA
ctgagacttaggcaaaggaa

SEQ ID NO: 33671 - RNA, 20 nt, synthetic construct
  source 1..20: mol_type = other RNA
ctgagagaagtcagactaag

SEQ ID NO: 33672 - RNA, 20 nt, synthetic construct
  source 1..20: mol_type = other RNA
ctgagagatagaaagcacca

SEQ ID NO: 33673 - RNA, 20 nt, synthetic construct
  source 1..20: mol_type = other RNA
ctgagagctcaggccagtga

SEQ ID NO: 33674 - RNA, 20 nt, synthetic construct
  source 1..20: mol_type = other RNA
ctgagagtattgccaggttt

SEQ ID NO: 33675 - RNA, 20 nt, synthetic construct
  source 1..20: mol_type = other RNA
ctgagatacttaagttttta

SEQ ID NO: 33676 - RNA, 20 nt, synthetic construct
  source 1..20: mol_type = other RNA
ctgagatggtcagtactatc

SEQ ID NO: 33677 - RNA, 20 nt, synthetic construct
  source 1..20: mol_type = other RNA
ctgagattacagatgtgagc

SEQ ID NO: 33678 - RNA, 20 nt, synthetic construct
  source 1..20: mol_type = other RNA
ctgagattgccccattgcac

SEQ ID NO: 33679 - RNA, 20 nt, synthetic construct
  source 1..20: mol_type = other RNA
ctgagattgtgccagtgaac

SEQ ID NO: 33680 - RNA, 20 nt, synthetic construct
  source 1..20: mol_type = other RNA
ctgagcaactactatttcgc

SEQ ID NO: 33681 - RNA, 20 nt, synthetic construct
  source 1..20: mol_type = other RNA
ctgagcaaggaaggaaagga

SEQ ID NO: 33682 - RNA, 20 nt, synthetic construct
  source 1..20: mol_type = other RNA
ctgagcacaatgcctgccgc

SEQ ID NO: 33683 - RNA, 20 nt, synthetic construct
  source 1..20: mol_type = other RNA
ctgagcagtgaaagtctccc

SEQ ID NO: 33684 - RNA, 20 nt, synthetic construct
  source 1..20: mol_type = other RNA
ctgagcagtgtttcctagat

SEQ ID NO: 33685 - RNA, 20 nt, synthetic construct
  source 1..20: mol_type = other RNA
ctgagcatcccagaggtact

SEQ ID NO: 33686 - RNA, 20 nt, synthetic construct
  source 1..20: mol_type = other RNA
ctgagcatccccgctgcgag

SEQ ID NO: 33687 - RNA, 20 nt, synthetic construct
  source 1..20: mol_type = other RNA
ctgagcatttatataagttc

SEQ ID NO: 33688 - RNA, 20 nt, synthetic construct
  source 1..20: mol_type = other RNA
ctgagccagagtttcactct

SEQ ID NO: 33689 - RNA, 20 nt, synthetic construct
  source 1..20: mol_type = other RNA
ctgagccagcaaatcagaaa

SEQ ID NO: 33690 - RNA, 20 nt, synthetic construct
  source 1..20: mol_type = other RNA
ctgagccgtcggtatgttaa

SEQ ID NO: 33691 - RNA, 20 nt, synthetic construct
  source 1..20: mol_type = other RNA
ctgagccttcagaactcttc

SEQ ID NO: 33692 - RNA, 20 nt, synthetic construct
  source 1..20: mol_type = other RNA
ctgagctctcagtggccctg

SEQ ID NO: 33693 - RNA, 20 nt, synthetic construct
  source 1..20: mol_type = other RNA
ctgagctgttaatggttaga

SEQ ID NO: 33694 - RNA, 20 nt, synthetic construct
  source 1..20: mol_type = other RNA
ctgagctttccttagttcga

SEQ ID NO: 33695 - RNA, 20 nt, synthetic construct
  source 1..20: mol_type = other RNA
ctgaggaagctaatcaagcc

SEQ ID NO: 33696 - RNA, 20 nt, synthetic construct
  source 1..20: mol_type = other RNA
ctgaggacactagcaatcca

SEQ ID NO: 33697 - RNA, 20 nt, synthetic construct
  source 1..20: mol_type = other RNA
ctgaggagctgagaccacag

SEQ ID NO: 33698 - RNA, 20 nt, synthetic construct
  source 1..20: mol_type = other RNA
ctgaggatataacgatagtc

SEQ ID NO: 33699 - RNA, 20 nt, synthetic construct
  source 1..20: mol_type = other RNA
ctgaggattggagactgata

SEQ ID NO: 33700 - RNA, 20 nt, synthetic construct
  source 1..20: mol_type = other RNA
ctgaggcagagtagagaagg

SEQ ID NO: 33701 - RNA, 20 nt, synthetic construct
  source 1..20: mol_type = other RNA
ctgaggcagcccgacctcca

SEQ ID NO: 33702 - RNA, 20 nt, synthetic construct
  source 1..20: mol_type = other RNA
ctgaggcaggagaactgcct

SEQ ID NO: 33703 - RNA, 20 nt, synthetic construct
  source 1..20: mol_type = other RNA
ctgaggcaggagcatagctt

SEQ ID NO: 33704 - RNA, 20 nt, synthetic construct
  source 1..20: mol_type = other RNA
ctgaggcaggaggcacctga

SEQ ID NO: 33705 - RNA, 20 nt, synthetic construct
  source 1..20: mol_type = other RNA
ctgaggccccaggggacata

SEQ ID NO: 33706 - RNA, 20 nt, synthetic construct
  source 1..20: mol_type = other RNA
ctgaggccggaggattgctt

SEQ ID NO: 33707 - RNA, 20 nt, synthetic construct
  source 1..20: mol_type = other RNA
ctgaggcctcctgccttcct

SEQ ID NO: 33708 - RNA, 20 nt, synthetic construct
  source 1..20: mol_type = other RNA
ctgaggcggaaggattgcct

SEQ ID NO: 33709 - RNA, 20 nt, synthetic construct
  source 1..20: mol_type = other RNA
ctgaggcggctggatcgctt

SEQ ID NO: 33710 - RNA, 20 nt, synthetic construct
  source 1..20: mol_type = other RNA
ctgaggctggggaattgcat

SEQ ID NO: 33711 - RNA, 20 nt, synthetic construct
  source 1..20: mol_type = other RNA
ctgagggaaattatttccag

SEQ ID NO: 33712 - RNA, 20 nt, synthetic construct
  source 1..20: mol_type = other RNA
ctgagggaatttttcttacc

SEQ ID NO: 33713 - RNA, 20 nt, synthetic construct
  source 1..20: mol_type = other RNA
ctgagggctttgtgaaggga

SEQ ID NO: 33714 - RNA, 20 nt, synthetic construct
  source 1..20: mol_type = other RNA
ctgaggggtcttatgctggt

SEQ ID NO: 33715 - RNA, 20 nt, synthetic construct
  source 1..20: mol_type = other RNA
ctgagggtgagaccaccaca

SEQ ID NO: 33716 - RNA, 20 nt, synthetic construct
  source 1..20: mol_type = other RNA
ctgaggtcaagaaataaaac

SEQ ID NO: 33717 - RNA, 20 nt, synthetic construct
  source 1..20: mol_type = other RNA
ctgaggtctcaaaatttaaa

SEQ ID NO: 33718 - RNA, 20 nt, synthetic construct
  source 1..20: mol_type = other RNA
ctgaggtctttaaaagaaag

SEQ ID NO: 33719 - RNA, 20 nt, synthetic construct
  source 1..20: mol_type = other RNA
ctgaggtggagttctgctct

SEQ ID NO: 33720 - RNA, 20 nt, synthetic construct
  source 1..20: mol_type = other RNA
ctgaggtgtttttcagccct

SEQ ID NO: 33721 - RNA, 20 nt, synthetic construct
  source 1..20: mol_type = other RNA
ctgagtaaagggtaagaaaa

SEQ ID NO: 33722 - RNA, 20 nt, synthetic construct
  source 1..20: mol_type = other RNA
ctgagtagcgctttaagcat

SEQ ID NO: 33723 - RNA, 20 nt, synthetic construct
  source 1..20: mol_type = other RNA
ctgagtagctgtgattaccg

SEQ ID NO: 33724 - RNA, 20 nt, synthetic construct
  source 1..20: mol_type = other RNA
ctgagtatattctgtgaatt

SEQ ID NO: 33725 - RNA, 20 nt, synthetic construct
  source 1..20: mol_type = other RNA
ctgagtatgggtctccattt

SEQ ID NO: 33726 - RNA, 20 nt, synthetic construct
  source 1..20: mol_type = other RNA
ctgagtcaaaaccaaagaaa

SEQ ID NO: 33727 - RNA, 20 nt, synthetic construct
  source 1..20: mol_type = other RNA
ctgagtccagaggtgagctt

SEQ ID NO: 33728 - RNA, 20 nt, synthetic construct
  source 1..20: mol_type = other RNA
ctgagtcttctactgtgaat

SEQ ID NO: 33729 - RNA, 20 nt, synthetic construct
  source 1..20: mol_type = other RNA
ctgagtgaatggggtaattt

SEQ ID NO: 33730 - RNA, 20 nt, synthetic construct
  source 1..20: mol_type = other RNA
ctgagtgttacttgaaatca

SEQ ID NO: 33731 - RNA, 20 nt, synthetic construct
  source 1..20: mol_type = other RNA
ctgagtgttgtgtgcaccta

SEQ ID NO: 33732 - RNA, 20 nt, synthetic construct
  source 1..20: mol_type = other RNA
ctgagtttgctctgcaaatg

SEQ ID NO: 33733 - RNA, 20 nt, synthetic construct
  source 1..20: mol_type = other RNA
ctgataaacttcagttttga

SEQ ID NO: 33734 - RNA, 20 nt, synthetic construct
  source 1..20: mol_type = other RNA
ctgataaatggctttttacg

SEQ ID NO: 33735 - RNA, 20 nt, synthetic construct
  source 1..20: mol_type = other RNA
ctgataaattattagcttgc

SEQ ID NO: 33736 - RNA, 20 nt, synthetic construct
  source 1..20: mol_type = other RNA
ctgataagcccaacctgatt

SEQ ID NO: 33737 - RNA, 20 nt, synthetic construct
  source 1..20: mol_type = other RNA
ctgataagctcccagccaaa

SEQ ID NO: 33738 - RNA, 20 nt, synthetic construct
  source 1..20: mol_type = other RNA
ctgataaggggctatcttta

SEQ ID NO: 33739 - RNA, 20 nt, synthetic construct
  source 1..20: mol_type = other RNA
ctgataatcacagacgcaaa

SEQ ID NO: 33740 - RNA, 20 nt, synthetic construct
  source 1..20: mol_type = other RNA
ctgatacacttctatccagt

SEQ ID NO: 33741 - RNA, 20 nt, synthetic construct
  source 1..20: mol_type = other RNA
ctgatagatattggcaacat

SEQ ID NO: 33742 - RNA, 20 nt, synthetic construct
  source 1..20: mol_type = other RNA
ctgatagcgaaaggtacgac

SEQ ID NO: 33743 - RNA, 20 nt, synthetic construct
  source 1..20: mol_type = other RNA
ctgatagctgtggaagcaca

SEQ ID NO: 33744 - RNA, 20 nt, synthetic construct
  source 1..20: mol_type = other RNA
ctgatagcttgacaaaaggc

SEQ ID NO: 33745 - RNA, 20 nt, synthetic construct
  source 1..20: mol_type = other RNA
ctgataggaatatcgtcttt

SEQ ID NO: 33746 - RNA, 20 nt, synthetic construct
  source 1..20: mol_type = other RNA
ctgataggataatgtccaga

SEQ ID NO: 33747 - RNA, 20 nt, synthetic construct
  source 1..20: mol_type = other RNA
ctgatatcctgtaaacctgg

SEQ ID NO: 33748 - RNA, 20 nt, synthetic construct
  source 1..20: mol_type = other RNA
ctgatatgagggatgaggaa

SEQ ID NO: 33749 - RNA, 20 nt, synthetic construct
  source 1..20: mol_type = other RNA
ctgatatgtcgcatgaaaac

SEQ ID NO: 33750 - RNA, 20 nt, synthetic construct
  source 1..20: mol_type = other RNA
ctgatcaaggaagcttccta

SEQ ID NO: 33751 - RNA, 20 nt, synthetic construct
  source 1..20: mol_type = other RNA
ctgatcaagttgcttggcac

SEQ ID NO: 33752 - RNA, 20 nt, synthetic construct
  source 1..20: mol_type = other RNA
ctgatcacaccctcctacct

SEQ ID NO: 33753 - RNA, 20 nt, synthetic construct
  source 1..20: mol_type = other RNA
ctgatcacagaagtgttttg

SEQ ID NO: 33754 - RNA, 20 nt, synthetic construct
  source 1..20: mol_type = other RNA
ctgatcagcaccctcaaatg

SEQ ID NO: 33755 - RNA, 20 nt, synthetic construct
  source 1..20: mol_type = other RNA
ctgatcaggaaagaccgggg

SEQ ID NO: 33756 - RNA, 20 nt, synthetic construct
  source 1..20: mol_type = other RNA
ctgatctgctcaagttttct

SEQ ID NO: 33757 - RNA, 20 nt, synthetic construct
  source 1..20: mol_type = other RNA
ctgatcttttctgacaattt

SEQ ID NO: 33758 - RNA, 20 nt, synthetic construct
  source 1..20: mol_type = other RNA
ctgatgaactacacagacat

SEQ ID NO: 33759 - RNA, 20 nt, synthetic construct
  source 1..20: mol_type = other RNA
ctgatgaagaacctgttcat

SEQ ID NO: 33760 - RNA, 20 nt, synthetic construct
  source 1..20: mol_type = other RNA
ctgatgacagttactctaaa

SEQ ID NO: 33761 - RNA, 20 nt, synthetic construct
  source 1..20: mol_type = other RNA
ctgatgatgatggtgatgct

SEQ ID NO: 33762 - RNA, 20 nt, synthetic construct
  source 1..20: mol_type = other RNA
ctgatgcacaagccttgaaa

SEQ ID NO: 33763 - RNA, 20 nt, synthetic construct
  source 1..20: mol_type = other RNA
ctgatgctttctctagttgc

SEQ ID NO: 33764 - RNA, 20 nt, synthetic construct
  source 1..20: mol_type = other RNA
ctgatggaacggcttaacac

SEQ ID NO: 33765 - RNA, 20 nt, synthetic construct
  source 1..20: mol_type = other RNA
ctgatggaattctgacaccc

SEQ ID NO: 33766 - RNA, 20 nt, synthetic construct
  source 1..20: mol_type = other RNA
ctgatggacattctgcttcc

SEQ ID NO: 33767 - RNA, 20 nt, synthetic construct
  source 1..20: mol_type = other RNA
ctgatgtaagtgggaggagg

SEQ ID NO: 33768 - RNA, 20 nt, synthetic construct
  source 1..20: mol_type = other RNA
ctgatgtgaggatctgttgg

SEQ ID NO: 33769 - RNA, 20 nt, synthetic construct
  source 1..20: mol_type = other RNA
ctgatgtgtagttattattg

SEQ ID NO: 33770 - RNA, 20 nt, synthetic construct
  source 1..20: mol_type = other RNA
ctgatgtgtatgttacactt

SEQ ID NO: 33771 - RNA, 20 nt, synthetic construct
  source 1..20: mol_type = other RNA
ctgatgtgtgtctctgctct

SEQ ID NO: 33772 - RNA, 20 nt, synthetic construct
  source 1..20: mol_type = other RNA
ctgatgtgttgaccttagtg

SEQ ID NO: 33773 - RNA, 20 nt, synthetic construct
  source 1..20: mol_type = other RNA
ctgattaatttgaggtctag

SEQ ID NO: 33774 - RNA, 20 nt, synthetic construct
  source 1..20: mol_type = other RNA
ctgattagaaggattgttca

SEQ ID NO: 33775 - RNA, 20 nt, synthetic construct
  source 1..20: mol_type = other RNA
ctgattagaggctgcaccct

SEQ ID NO: 33776 - RNA, 20 nt, synthetic construct
  source 1..20: mol_type = other RNA
ctgattataaccttgaactt

SEQ ID NO: 33777 - RNA, 20 nt, synthetic construct
  source 1..20: mol_type = other RNA
ctgattcagtggttggaaaa

SEQ ID NO: 33778 - RNA, 20 nt, synthetic construct
  source 1..20: mol_type = other RNA
ctgattcttccactagtggg

SEQ ID NO: 33779 - RNA, 20 nt, synthetic construct
  source 1..20: mol_type = other RNA
ctgattgagattagcgaaag

SEQ ID NO: 33780 - RNA, 20 nt, synthetic construct
  source 1..20: mol_type = other RNA
ctgattgagtatctggtgct

SEQ ID NO: 33781 - RNA, 20 nt, synthetic construct
  source 1..20: mol_type = other RNA
ctgattgcccattataaaat

SEQ ID NO: 33782 - RNA, 20 nt, synthetic construct
  source 1..20: mol_type = other RNA
ctgatttaaagtaggttgag

SEQ ID NO: 33783 - RNA, 20 nt, synthetic construct
  source 1..20: mol_type = other RNA
ctgatttaggccactctcat

SEQ ID NO: 33784 - RNA, 20 nt, synthetic construct
  source 1..20: mol_type = other RNA
ctgatttatagtgtttcctt

SEQ ID NO: 33785 - RNA, 20 nt, synthetic construct
  source 1..20: mol_type = other RNA
ctgatttcaaagttaatagc

SEQ ID NO: 33786 - RNA, 20 nt, synthetic construct
  source 1..20: mol_type = other RNA
ctgatttgctggctcagtct

SEQ ID NO: 33787 - RNA, 20 nt, synthetic construct
  source 1..20: mol_type = other RNA
ctgatttgtttagtagctgt

SEQ ID NO: 33788 - RNA, 20 nt, synthetic construct
  source 1..20: mol_type = other RNA
ctgattttaatctgtcctga

SEQ ID NO: 33789 - RNA, 20 nt, synthetic construct
  source 1..20: mol_type = other RNA
ctgattttctgcttctcaat

SEQ ID NO: 33790 - RNA, 20 nt, synthetic construct
  source 1..20: mol_type = other RNA
ctgattttgtgtcttctgtt

SEQ ID NO: 33791 - RNA, 20 nt, synthetic construct
  source 1..20: mol_type = other RNA
ctgatttttagtgactggct

SEQ ID NO: 33792 - RNA, 20 nt, synthetic construct
  source 1..20: mol_type = other RNA
ctgcaaaaaatgtttgttta

SEQ ID NO: 33793 - RNA, 20 nt, synthetic construct
  source 1..20: mol_type = other RNA
ctgcaaaactttcttcaaaa

SEQ ID NO: 33794 - RNA, 20 nt, synthetic construct
  source 1..20: mol_type = other RNA
ctgcaaatatccaatcactg

SEQ ID NO: 33795 - RNA, 20 nt, synthetic construct
  source 1..20: mol_type = other RNA
ctgcaaatgaggttgctttt

SEQ ID NO: 33796 - RNA, 20 nt, synthetic construct
  source 1..20: mol_type = other RNA
ctgcaacagatctgagaaga

SEQ ID NO: 33797 - RNA, 20 nt, synthetic construct
  source 1..20: mol_type = other RNA
ctgcaacatttgttgcatcc

SEQ ID NO: 33798 - RNA, 20 nt, synthetic construct
  source 1..20: mol_type = other RNA
ctgcaacctccgtttttcag

SEQ ID NO: 33799 - RNA, 20 nt, synthetic construct
  source 1..20: mol_type = other RNA
ctgcaactatcaaaacactt

SEQ ID NO: 33800 - RNA, 20 nt, synthetic construct
  source 1..20: mol_type = other RNA
ctgcaactgagaagagctgt

SEQ ID NO: 33801 - RNA, 20 nt, synthetic construct
  source 1..20: mol_type = other RNA
ctgcaagcactggtaaggaa

SEQ ID NO: 33802 - RNA, 20 nt, synthetic construct
  source 1..20: mol_type = other RNA
ctgcaagcagatctgctgta

SEQ ID NO: 33803 - RNA, 20 nt, synthetic construct
  source 1..20: mol_type = other RNA
ctgcaagctccgcctcctgg

SEQ ID NO: 33804 - RNA, 20 nt, synthetic construct
  source 1..20: mol_type = other RNA
ctgcaagttgctatccagtc

SEQ ID NO: 33805 - RNA, 20 nt, synthetic construct
  source 1..20: mol_type = other RNA
ctgcaatcacagcacttggg

SEQ ID NO: 33806 - RNA, 20 nt, synthetic construct
  source 1..20: mol_type = other RNA
ctgcaattgcgcagaactgg

SEQ ID NO: 33807 - RNA, 20 nt, synthetic construct
  source 1..20: mol_type = other RNA
ctgcaattggaagactatca

SEQ ID NO: 33808 - RNA, 20 nt, synthetic construct
  source 1..20: mol_type = other RNA
ctgcaattttaaatgtacaa

SEQ ID NO: 33809 - RNA, 20 nt, synthetic construct
  source 1..20: mol_type = other RNA
ctgcacaaaggattgggaag

SEQ ID NO: 33810 - RNA, 20 nt, synthetic construct
  source 1..20: mol_type = other RNA
ctgcacagtatgcggggttt

SEQ ID NO: 33811 - RNA, 20 nt, synthetic construct
  source 1..20: mol_type = other RNA
ctgcacataaaaggatatgg

SEQ ID NO: 33812 - RNA, 20 nt, synthetic construct
  source 1..20: mol_type = other RNA
ctgcacatgcacaaggtcaa

SEQ ID NO: 33813 - RNA, 20 nt, synthetic construct
  source 1..20: mol_type = other RNA
ctgcaccatttattgtcaag

SEQ ID NO: 33814 - RNA, 20 nt, synthetic construct
  source 1..20: mol_type = other RNA
ctgcaccattttttcaccag

SEQ ID NO: 33815 - RNA, 20 nt, synthetic construct
  source 1..20: mol_type = other RNA
ctgcaccctcctcctcctgg

SEQ ID NO: 33816 - RNA, 20 nt, synthetic construct
  source 1..20: mol_type = other RNA
ctgcacgtactagtcagcac

SEQ ID NO: 33817 - RNA, 20 nt, synthetic construct
  source 1..20: mol_type = other RNA
ctgcacgtctgtggtctcag

SEQ ID NO: 33818 - RNA, 20 nt, synthetic construct
  source 1..20: mol_type = other RNA
ctgcactaaactagtatcaa

SEQ ID NO: 33819 - RNA, 20 nt, synthetic construct
  source 1..20: mol_type = other RNA
ctgcactcaagcaatcctcc

SEQ ID NO: 33820 - RNA, 20 nt, synthetic construct
  source 1..20: mol_type = other RNA
ctgcactccagccttggtaa

SEQ ID NO: 33821 - RNA, 20 nt, synthetic construct
  source 1..20: mol_type = other RNA
ctgcactctcaaaattaaat

SEQ ID NO: 33822 - RNA, 20 nt, synthetic construct
  source 1..20: mol_type = other RNA
ctgcactctggcctggacaa

SEQ ID NO: 33823 - RNA, 20 nt, synthetic construct
  source 1..20: mol_type = other RNA
ctgcactggctattagttaa

SEQ ID NO: 33824 - RNA, 20 nt, synthetic construct
  source 1..20: mol_type = other RNA
ctgcagaaggagaaaccatt

SEQ ID NO: 33825 - RNA, 20 nt, synthetic construct
  source 1..20: mol_type = other RNA
ctgcagaatgacagaaaata

SEQ ID NO: 33826 - RNA, 20 nt, synthetic construct
  source 1..20: mol_type = other RNA
ctgcagaattactgacaata

SEQ ID NO: 33827 - RNA, 20 nt, synthetic construct
  source 1..20: mol_type = other RNA
ctgcagacatgcacgagaaa

SEQ ID NO: 33828 - RNA, 20 nt, synthetic construct
  source 1..20: mol_type = other RNA
ctgcagaccaagaaaggact

SEQ ID NO: 33829 - RNA, 20 nt, synthetic construct
  source 1..20: mol_type = other RNA
ctgcagactcttgtcccggc

SEQ ID NO: 33830 - RNA, 20 nt, synthetic construct
  source 1..20: mol_type = other RNA
ctgcagactgcaggtcttca

SEQ ID NO: 33831 - RNA, 20 nt, synthetic construct
  source 1..20: mol_type = other RNA
ctgcagagactgtgcttcca

SEQ ID NO: 33832 - RNA, 20 nt, synthetic construct
  source 1..20: mol_type = other RNA
ctgcagagcaggctccactt

SEQ ID NO: 33833 - RNA, 20 nt, synthetic construct
  source 1..20: mol_type = other RNA
ctgcagaggtcaggaaggca

SEQ ID NO: 33834 - RNA, 20 nt, synthetic construct
  source 1..20: mol_type = other RNA
ctgcagatgaatgagcaagg

SEQ ID NO: 33835 - RNA, 20 nt, synthetic construct
  source 1..20: mol_type = other RNA
ctgcagcaattatttgaata

SEQ ID NO: 33836 - RNA, 20 nt, synthetic construct
  source 1..20: mol_type = other RNA
ctgcagccagatttgatcct

SEQ ID NO: 33837 - RNA, 20 nt, synthetic construct
  source 1..20: mol_type = other RNA
ctgcaggagccttgctgttg

SEQ ID NO: 33838 - RNA, 20 nt, synthetic construct
  source 1..20: mol_type = other RNA
ctgcaggcagaatgtgacct

SEQ ID NO: 33839 - RNA, 20 nt, synthetic construct
  source 1..20: mol_type = other RNA
ctgcaggctgaactgctgac

SEQ ID NO: 33840 - RNA, 20 nt, synthetic construct
  source 1..20: mol_type = other RNA
ctgcagggcttctgaaggtg

SEQ ID NO: 33841 - RNA, 20 nt, synthetic construct
  source 1..20: mol_type = other RNA
ctgcaggtatttctaaatca

SEQ ID NO: 33842 - RNA, 20 nt, synthetic construct
  source 1..20: mol_type = other RNA
ctgcaggtcttcaacctcaa

SEQ ID NO: 33843 - RNA, 20 nt, synthetic construct
  source 1..20: mol_type = other RNA
ctgcaggtgttggtgcattt

SEQ ID NO: 33844 - RNA, 20 nt, synthetic construct
  source 1..20: mol_type = other RNA
ctgcaggttgatactagttt

SEQ ID NO: 33845 - RNA, 20 nt, synthetic construct
  source 1..20: mol_type = other RNA
ctgcagtatgcatagatcac

SEQ ID NO: 33846 - RNA, 20 nt, synthetic construct
  source 1..20: mol_type = other RNA
ctgcagtctcaaactcctgc

SEQ ID NO: 33847 - RNA, 20 nt, synthetic construct
  source 1..20: mol_type = other RNA
ctgcagtctgcaggcagaat

SEQ ID NO: 33848 - RNA, 20 nt, synthetic construct
  source 1..20: mol_type = other RNA
ctgcagtctgtcctcgtaaa

SEQ ID NO: 33849 - RNA, 20 nt, synthetic construct
  source 1..20: mol_type = other RNA
ctgcagtgaacatgggaatg

SEQ ID NO: 33850 - RNA, 20 nt, synthetic construct
  source 1..20: mol_type = other RNA
ctgcagtggcgtgtgcccag

SEQ ID NO: 33851 - RNA, 20 nt, synthetic construct
  source 1..20: mol_type = other RNA
ctgcagtgtccatctcccat

SEQ ID NO: 33852 - RNA, 20 nt, synthetic construct
  source 1..20: mol_type = other RNA
ctgcagttagcatgcctgac

SEQ ID NO: 33853 - RNA, 20 nt, synthetic construct
  source 1..20: mol_type = other RNA
ctgcagttggattatatgtt

SEQ ID NO: 33854 - RNA, 20 nt, synthetic construct
  source 1..20: mol_type = other RNA
ctgcagtttgtgttttcact

SEQ ID NO: 33855 - RNA, 20 nt, synthetic construct
  source 1..20: mol_type = other RNA
ctgcagtttttccactaatg

SEQ ID NO: 33856 - RNA, 20 nt, synthetic construct
  source 1..20: mol_type = other RNA
ctgcatacactcatttcctt

SEQ ID NO: 33857 - RNA, 20 nt, synthetic construct
  source 1..20: mol_type = other RNA
ctgcatacttagctaatttc

SEQ ID NO: 33858 - RNA, 20 nt, synthetic construct
  source 1..20: mol_type = other RNA
ctgcatagagatcttgtgta

SEQ ID NO: 33859 - RNA, 20 nt, synthetic construct
  source 1..20: mol_type = other RNA
ctgcatagtactccattata

SEQ ID NO: 33860 - RNA, 20 nt, synthetic construct
  source 1..20: mol_type = other RNA
ctgcatatgtttttattagc

SEQ ID NO: 33861 - RNA, 20 nt, synthetic construct
  source 1..20: mol_type = other RNA
ctgcatattgaagccagcac

SEQ ID NO: 33862 - RNA, 20 nt, synthetic construct
  source 1..20: mol_type = other RNA
ctgcatcatggtgggccttg

SEQ ID NO: 33863 - RNA, 20 nt, synthetic construct
  source 1..20: mol_type = other RNA
ctgcatccaaaagggaaata

SEQ ID NO: 33864 - RNA, 20 nt, synthetic construct
  source 1..20: mol_type = other RNA
ctgcatcccaagggttttgg

SEQ ID NO: 33865 - RNA, 20 nt, synthetic construct
  source 1..20: mol_type = other RNA
ctgcatcttcttttacttgc

SEQ ID NO: 33866 - RNA, 20 nt, synthetic construct
  source 1..20: mol_type = other RNA
ctgcatcttttgagggtatc

SEQ ID NO: 33867 - RNA, 20 nt, synthetic construct
  source 1..20: mol_type = other RNA
ctgcatgattccccttatat

SEQ ID NO: 33868 - RNA, 20 nt, synthetic construct
  source 1..20: mol_type = other RNA
ctgcatgctaggggctgttc

SEQ ID NO: 33869 - RNA, 20 nt, synthetic construct
  source 1..20: mol_type = other RNA
ctgcatggggagttttagga

SEQ ID NO: 33870 - RNA, 20 nt, synthetic construct
  source 1..20: mol_type = other RNA
ctgcatggtgtaaaatacaa

SEQ ID NO: 33871 - RNA, 20 nt, synthetic construct
  source 1..20: mol_type = other RNA
ctgcattcatccaggcaaaa

SEQ ID NO: 33872 - RNA, 20 nt, synthetic construct
  source 1..20: mol_type = other RNA
ctgcattccgcctgggcgac

SEQ ID NO: 33873 - RNA, 20 nt, synthetic construct
  source 1..20: mol_type = other RNA
ctgcattgcatttacttgtc

SEQ ID NO: 33874 - RNA, 20 nt, synthetic construct
  source 1..20: mol_type = other RNA
ctgcattgtgcacttaaaat

SEQ ID NO: 33875 - RNA, 20 nt, synthetic construct
  source 1..20: mol_type = other RNA
ctgcatttggtttgcaaaaa

SEQ ID NO: 33876 - RNA, 20 nt, synthetic construct
  source 1..20: mol_type = other RNA
ctgcattttttgccaaatta

SEQ ID NO: 33877 - RNA, 20 nt, synthetic construct
  source 1..20: mol_type = other RNA
ctgccaaaagccaagagcga

SEQ ID NO: 33878 - RNA, 20 nt, synthetic construct
  source 1..20: mol_type = other RNA
ctgccaaaccctacacccat

SEQ ID NO: 33879 - RNA, 20 nt, synthetic construct
  source 1..20: mol_type = other RNA
ctgccaagtcagcacttctg

SEQ ID NO: 33880 - RNA, 20 nt, synthetic construct
  source 1..20: mol_type = other RNA
ctgccacactccagcatccc

SEQ ID NO: 33881 - RNA, 20 nt, synthetic construct
  source 1..20: mol_type = other RNA
ctgccacattcaacaacatg

SEQ ID NO: 33882 - RNA, 20 nt, synthetic construct
  source 1..20: mol_type = other RNA
ctgccactacttagcccctg

SEQ ID NO: 33883 - RNA, 20 nt, synthetic construct
  source 1..20: mol_type = other RNA
ctgccagagttggcacagcc

SEQ ID NO: 33884 - RNA, 20 nt, synthetic construct
  source 1..20: mol_type = other RNA
ctgccagatgttctaatttc

SEQ ID NO: 33885 - RNA, 20 nt, synthetic construct
  source 1..20: mol_type = other RNA
ctgccagcaccagatactca

SEQ ID NO: 33886 - RNA, 20 nt, synthetic construct
  source 1..20: mol_type = other RNA
ctgccaggacaattgaatgg

SEQ ID NO: 33887 - RNA, 20 nt, synthetic construct
  source 1..20: mol_type = other RNA
ctgccaggtagggaggggta

SEQ ID NO: 33888 - RNA, 20 nt, synthetic construct
  source 1..20: mol_type = other RNA
ctgccatagagggagcatct

SEQ ID NO: 33889 - RNA, 20 nt, synthetic construct
  source 1..20: mol_type = other RNA
ctgccatggtgttaaatatt

SEQ ID NO: 33890 - RNA, 20 nt, synthetic construct
  source 1..20: mol_type = other RNA
ctgcccatcctatctaagcc

SEQ ID NO: 33891 - RNA, 20 nt, synthetic construct
  source 1..20: mol_type = other RNA
ctgccccagctaaaatgttc

SEQ ID NO: 33892 - RNA, 20 nt, synthetic construct
  source 1..20: mol_type = other RNA
ctgccccgggcctggttagg

SEQ ID NO: 33893 - RNA, 20 nt, synthetic construct
  source 1..20: mol_type = other RNA
ctgcccctccactccacaaa

SEQ ID NO: 33894 - RNA, 20 nt, synthetic construct
  source 1..20: mol_type = other RNA
ctgccccttatcctcttctg

SEQ ID NO: 33895 - RNA, 20 nt, synthetic construct
  source 1..20: mol_type = other RNA
ctgccctcattgaagctact

SEQ ID NO: 33896 - RNA, 20 nt, synthetic construct
  source 1..20: mol_type = other RNA
ctgccctgtgaaaatcattt

SEQ ID NO: 33897 - RNA, 20 nt, synthetic construct
  source 1..20: mol_type = other RNA
ctgccgcagagcaagcacgt

SEQ ID NO: 33898 - RNA, 20 nt, synthetic construct
  source 1..20: mol_type = other RNA
ctgccgcttcgcctttctcg

SEQ ID NO: 33899 - RNA, 20 nt, synthetic construct
  source 1..20: mol_type = other RNA
ctgcctaagtaatgctggcc

SEQ ID NO: 33900 - RNA, 20 nt, synthetic construct
  source 1..20: mol_type = other RNA
ctgcctaatctctaggctta

SEQ ID NO: 33901 - RNA, 20 nt, synthetic construct
  source 1..20: mol_type = other RNA
ctgcctattttgtaatttat

SEQ ID NO: 33902 - RNA, 20 nt, synthetic construct
  source 1..20: mol_type = other RNA
ctgcctcaaaatcaacattg

SEQ ID NO: 33903 - RNA, 20 nt, synthetic construct
  source 1..20: mol_type = other RNA
ctgcctcagccgccgcagag

SEQ ID NO: 33904 - RNA, 20 nt, synthetic construct
  source 1..20: mol_type = other RNA
ctgcctcagttgacatcctt

SEQ ID NO: 33905 - RNA, 20 nt, synthetic construct
  source 1..20: mol_type = other RNA
ctgcctccacaggctttgac

SEQ ID NO: 33906 - RNA, 20 nt, synthetic construct
  source 1..20: mol_type = other RNA
ctgcctcccgggtccaggca

SEQ ID NO: 33907 - RNA, 20 nt, synthetic construct
  source 1..20: mol_type = other RNA
ctgcctcggcacagctctca

SEQ ID NO: 33908 - RNA, 20 nt, synthetic construct
  source 1..20: mol_type = other RNA
ctgcctctacatcacagaca

SEQ ID NO: 33909 - RNA, 20 nt, synthetic construct
  source 1..20: mol_type = other RNA
ctgcctcttcctgttgcttt

SEQ ID NO: 33910 - RNA, 20 nt, synthetic construct
  source 1..20: mol_type = other RNA
ctgcctgaggtctcaaaatt

SEQ ID NO: 33911 - RNA, 20 nt, synthetic construct
  source 1..20: mol_type = other RNA
ctgcctgcagactgcaggtc

SEQ ID NO: 33912 - RNA, 20 nt, synthetic construct
  source 1..20: mol_type = other RNA
ctgcctggacccgggaggca

SEQ ID NO: 33913 - RNA, 20 nt, synthetic construct
  source 1..20: mol_type = other RNA
ctgcctggtcctgagggctt

SEQ ID NO: 33914 - RNA, 20 nt, synthetic construct
  source 1..20: mol_type = other RNA
ctgccttcaatgtttggtag

SEQ ID NO: 33915 - RNA, 20 nt, synthetic construct
  source 1..20: mol_type = other RNA
ctgccttcctgacctctgca

SEQ ID NO: 33916 - RNA, 20 nt, synthetic construct
  source 1..20: mol_type = other RNA
ctgccttccttgggcacact

SEQ ID NO: 33917 - RNA, 20 nt, synthetic construct
  source 1..20: mol_type = other RNA
ctgccttgacctcccaaagg

SEQ ID NO: 33918 - RNA, 20 nt, synthetic construct
  source 1..20: mol_type = other RNA
ctgccttgaggtgattcaga

SEQ ID NO: 33919 - RNA, 20 nt, synthetic construct
  source 1..20: mol_type = other RNA
ctgccttggccttctgagga

SEQ ID NO: 33920 - RNA, 20 nt, synthetic construct
  source 1..20: mol_type = other RNA
ctgcctttgttcatcatctt

SEQ ID NO: 33921 - RNA, 20 nt, synthetic construct
  source 1..20: mol_type = other RNA
ctgcgaaggcaatgtaacac

SEQ ID NO: 33922 - RNA, 20 nt, synthetic construct
  source 1..20: mol_type = other RNA
ctgcgagaaaggcgaagcgg

SEQ ID NO: 33923 - RNA, 20 nt, synthetic construct
  source 1..20: mol_type = other RNA
ctgcgagccccgggggagct

SEQ ID NO: 33924 - RNA, 20 nt, synthetic construct
  source 1..20: mol_type = other RNA
ctgcgagcggcgggcttcgc

SEQ ID NO: 33925 - RNA, 20 nt, synthetic construct
  source 1..20: mol_type = other RNA
ctgcgattggttggactcca

SEQ ID NO: 33926 - RNA, 20 nt, synthetic construct
  source 1..20: mol_type = other RNA
ctgcgcaattgcagccagag

SEQ ID NO: 33927 - RNA, 20 nt, synthetic construct
  source 1..20: mol_type = other RNA
ctgcgccaagcagggacggg

SEQ ID NO: 33928 - RNA, 20 nt, synthetic construct
  source 1..20: mol_type = other RNA
ctgcgccttaaagccacact

SEQ ID NO: 33929 - RNA, 20 nt, synthetic construct
  source 1..20: mol_type = other RNA
ctgcggcaggcattgtgctc

SEQ ID NO: 33930 - RNA, 20 nt, synthetic construct
  source 1..20: mol_type = other RNA
ctgcggcggctgaggcagcc

SEQ ID NO: 33931 - RNA, 20 nt, synthetic construct
  source 1..20: mol_type = other RNA
ctgcgggcccagctcttttg

SEQ ID NO: 33932 - RNA, 20 nt, synthetic construct
  source 1..20: mol_type = other RNA
ctgcgtccgtagaccgagga

SEQ ID NO: 33933 - RNA, 20 nt, synthetic construct
  source 1..20: mol_type = other RNA
ctgcgtggtttattcatata

SEQ ID NO: 33934 - RNA, 20 nt, synthetic construct
  source 1..20: mol_type = other RNA
ctgcgtgttattttaatcga

SEQ ID NO: 33935 - RNA, 20 nt, synthetic construct
  source 1..20: mol_type = other RNA
ctgctaacaccttgaactgg

SEQ ID NO: 33936 - RNA, 20 nt, synthetic construct
  source 1..20: mol_type = other RNA
ctgctaataaaaacatatgc

SEQ ID NO: 33937 - RNA, 20 nt, synthetic construct
  source 1..20: mol_type = other RNA
ctgctaatggtccttgctga

SEQ ID NO: 33938 - RNA, 20 nt, synthetic construct
  source 1..20: mol_type = other RNA
ctgctacaggggcattccct

SEQ ID NO: 33939 - RNA, 20 nt, synthetic construct
  source 1..20: mol_type = other RNA
ctgctacgaatgaactccta

SEQ ID NO: 33940 - RNA, 20 nt, synthetic construct
  source 1..20: mol_type = other RNA
ctgctactagcaagctaata

SEQ ID NO: 33941 - RNA, 20 nt, synthetic construct
  source 1..20: mol_type = other RNA
ctgctactcaggagattaag

SEQ ID NO: 33942 - RNA, 20 nt, synthetic construct
  source 1..20: mol_type = other RNA
ctgctacttgtggggctgag

SEQ ID NO: 33943 - RNA, 20 nt, synthetic construct
  source 1..20: mol_type = other RNA
ctgctataaacttccctctc

SEQ ID NO: 33944 - RNA, 20 nt, synthetic construct
  source 1..20: mol_type = other RNA
ctgctatacaaccggaaaat

SEQ ID NO: 33945 - RNA, 20 nt, synthetic construct
  source 1..20: mol_type = other RNA
ctgctatgaaaattggcgta

SEQ ID NO: 33946 - RNA, 20 nt, synthetic construct
  source 1..20: mol_type = other RNA
ctgctatgaaatgtggtttt

SEQ ID NO: 33947 - RNA, 20 nt, synthetic construct
  source 1..20: mol_type = other RNA
ctgctatgactaatttgagg

SEQ ID NO: 33948 - RNA, 20 nt, synthetic construct
  source 1..20: mol_type = other RNA
ctgctatgcatactttggaa

SEQ ID NO: 33949 - RNA, 20 nt, synthetic construct
  source 1..20: mol_type = other RNA
ctgctatgctgaaaggcatg

SEQ ID NO: 33950 - RNA, 20 nt, synthetic construct
  source 1..20: mol_type = other RNA
ctgctattctctttctgaaa

SEQ ID NO: 33951 - RNA, 20 nt, synthetic construct
  source 1..20: mol_type = other RNA
ctgctattgataaatctaaa

SEQ ID NO: 33952 - RNA, 20 nt, synthetic construct
  source 1..20: mol_type = other RNA
ctgctattttattagatagt

SEQ ID NO: 33953 - RNA, 20 nt, synthetic construct
  source 1..20: mol_type = other RNA
ctgctcaaaggggcattccg

SEQ ID NO: 33954 - RNA, 20 nt, synthetic construct
  source 1..20: mol_type = other RNA
ctgctcaccgcaacatctgc

SEQ ID NO: 33955 - RNA, 20 nt, synthetic construct
  source 1..20: mol_type = other RNA
ctgctcactgcaacctttgt

SEQ ID NO: 33956 - RNA, 20 nt, synthetic construct
  source 1..20: mol_type = other RNA
ctgctcactttgggattagc

SEQ ID NO: 33957 - RNA, 20 nt, synthetic construct
  source 1..20: mol_type = other RNA
ctgctcagaagctttcagac

SEQ ID NO: 33958 - RNA, 20 nt, synthetic construct
  source 1..20: mol_type = other RNA
ctgctcagtccctcaccttc

SEQ ID NO: 33959 - RNA, 20 nt, synthetic construct
  source 1..20: mol_type = other RNA
ctgctcataatagtctcacg

SEQ ID NO: 33960 - RNA, 20 nt, synthetic construct
  source 1..20: mol_type = other RNA
ctgctccagtatgacctcct

SEQ ID NO: 33961 - RNA, 20 nt, synthetic construct
  source 1..20: mol_type = other RNA
ctgctccctctgccgcctgg

SEQ ID NO: 33962 - RNA, 20 nt, synthetic construct
  source 1..20: mol_type = other RNA
ctgctcctctgactttatgg

SEQ ID NO: 33963 - RNA, 20 nt, synthetic construct
  source 1..20: mol_type = other RNA
ctgctcctgcctttgttcat

SEQ ID NO: 33964 - RNA, 20 nt, synthetic construct
  source 1..20: mol_type = other RNA
ctgctcggctctgtcaccct

SEQ ID NO: 33965 - RNA, 20 nt, synthetic construct
  source 1..20: mol_type = other RNA
ctgctctcaagtaattgttt

SEQ ID NO: 33966 - RNA, 20 nt, synthetic construct
  source 1..20: mol_type = other RNA
ctgctctgacgtttaaatga

SEQ ID NO: 33967 - RNA, 20 nt, synthetic construct
  source 1..20: mol_type = other RNA
ctgctctgcacgtactagtc

SEQ ID NO: 33968 - RNA, 20 nt, synthetic construct
  source 1..20: mol_type = other RNA
ctgctctgcagagactgtgc

SEQ ID NO: 33969 - RNA, 20 nt, synthetic construct
  source 1..20: mol_type = other RNA
ctgctctgtcctgtcagtgt

SEQ ID NO: 33970 - RNA, 20 nt, synthetic construct
  source 1..20: mol_type = other RNA
ctgctcttctattccagaga

SEQ ID NO: 33971 - RNA, 20 nt, synthetic construct
  source 1..20: mol_type = other RNA
ctgctctttatctccacatt

SEQ ID NO: 33972 - RNA, 20 nt, synthetic construct
  source 1..20: mol_type = other RNA
ctgctgaaaaagatactctt

SEQ ID NO: 33973 - RNA, 20 nt, synthetic construct
  source 1..20: mol_type = other RNA
ctgctgacagattaaatacc

SEQ ID NO: 33974 - RNA, 20 nt, synthetic construct
  source 1..20: mol_type = other RNA
ctgctgagtcttctactgtg

SEQ ID NO: 33975 - RNA, 20 nt, synthetic construct
  source 1..20: mol_type = other RNA
ctgctgatgtaagtgggagg

SEQ ID NO: 33976 - RNA, 20 nt, synthetic construct
  source 1..20: mol_type = other RNA
ctgctgccagatgttctaat

SEQ ID NO: 33977 - RNA, 20 nt, synthetic construct
  source 1..20: mol_type = other RNA
ctgctgctgaaaaagatact

SEQ ID NO: 33978 - RNA, 20 nt, synthetic construct
  source 1..20: mol_type = other RNA
ctgctggaacgaatattcat

SEQ ID NO: 33979 - RNA, 20 nt, synthetic construct
  source 1..20: mol_type = other RNA
ctgctggatcatatagtaat

SEQ ID NO: 33980 - RNA, 20 nt, synthetic construct
  source 1..20: mol_type = other RNA
ctgctgggcccactctcccc

SEQ ID NO: 33981 - RNA, 20 nt, synthetic construct
  source 1..20: mol_type = other RNA
ctgctgggctattgttttgc

SEQ ID NO: 33982 - RNA, 20 nt, synthetic construct
  source 1..20: mol_type = other RNA
ctgctggtctggaatgtgta

SEQ ID NO: 33983 - RNA, 20 nt, synthetic construct
  source 1..20: mol_type = other RNA
ctgctgtaacaaagatgcca

SEQ ID NO: 33984 - RNA, 20 nt, synthetic construct
  source 1..20: mol_type = other RNA
ctgctgtaagctggtaatac

SEQ ID NO: 33985 - RNA, 20 nt, synthetic construct
  source 1..20: mol_type = other RNA
ctgctgtcggttttctagtt

SEQ ID NO: 33986 - RNA, 20 nt, synthetic construct
  source 1..20: mol_type = other RNA
ctgctgtcgtttatgcattt

SEQ ID NO: 33987 - RNA, 20 nt, synthetic construct
  source 1..20: mol_type = other RNA
ctgctgtggccgagggagac

SEQ ID NO: 33988 - RNA, 20 nt, synthetic construct
  source 1..20: mol_type = other RNA
ctgctgttcccaagcaagtg

SEQ ID NO: 33989 - RNA, 20 nt, synthetic construct
  source 1..20: mol_type = other RNA
ctgctgttgatggacgtttg

SEQ ID NO: 33990 - RNA, 20 nt, synthetic construct
  source 1..20: mol_type = other RNA
ctgctgtttaccaagggtgt

SEQ ID NO: 33991 - RNA, 20 nt, synthetic construct
  source 1..20: mol_type = other RNA
ctgcttaaagcctctcaaca

SEQ ID NO: 33992 - RNA, 20 nt, synthetic construct
  source 1..20: mol_type = other RNA
ctgcttagtcttctcagatc

SEQ ID NO: 33993 - RNA, 20 nt, synthetic construct
  source 1..20: mol_type = other RNA
ctgcttattatatgcctaga

SEQ ID NO: 33994 - RNA, 20 nt, synthetic construct
  source 1..20: mol_type = other RNA
ctgcttcactaactttaaat

SEQ ID NO: 33995 - RNA, 20 nt, synthetic construct
  source 1..20: mol_type = other RNA
ctgcttcagcctaagcaagt

SEQ ID NO: 33996 - RNA, 20 nt, synthetic construct
  source 1..20: mol_type = other RNA
ctgcttcatctggaccagtt

SEQ ID NO: 33997 - RNA, 20 nt, synthetic construct
  source 1..20: mol_type = other RNA
ctgcttcattccgcgtttat

SEQ ID NO: 33998 - RNA, 20 nt, synthetic construct
  source 1..20: mol_type = other RNA
ctgcttccacatttctaatt

SEQ ID NO: 33999 - RNA, 20 nt, synthetic construct
  source 1..20: mol_type = other RNA
ctgcttcccccaaagaagga

SEQ ID NO: 34000 - RNA, 20 nt, synthetic construct
  source 1..20: mol_type = other RNA
ctgcttccctagcccagcac

SEQ ID NO: 34001 - RNA, 20 nt, synthetic construct
  source 1..20: mol_type = other RNA
ctgcttccttgctatgtaat

SEQ ID NO: 34002 - RNA, 20 nt, synthetic construct
  source 1..20: mol_type = other RNA
ctgcttctacccactattga

SEQ ID NO: 34003 - RNA, 20 nt, synthetic construct
  source 1..20: mol_type = other RNA
ctgcttctcaataaggaaag

SEQ ID NO: 34004 - RNA, 20 nt, synthetic construct
  source 1..20: mol_type = other RNA
ctgcttgaatgtgcctacat

SEQ ID NO: 34005 - RNA, 20 nt, synthetic construct
  source 1..20: mol_type = other RNA
ctgcttgaggccacgagttc

SEQ ID NO: 34006 - RNA, 20 nt, synthetic construct
  source 1..20: mol_type = other RNA
ctgcttgcagacaataattc

SEQ ID NO: 34007 - RNA, 20 nt, synthetic construct
  source 1..20: mol_type = other RNA
ctgcttgctgcactggctat

SEQ ID NO: 34008 - RNA, 20 nt, synthetic construct
  source 1..20: mol_type = other RNA
ctgcttggcgcagtgcttag

SEQ ID NO: 34009 - RNA, 20 nt, synthetic construct
  source 1..20: mol_type = other RNA
ctgctttaaaacactggcaa

SEQ ID NO: 34010 - RNA, 20 nt, synthetic construct
  source 1..20: mol_type = other RNA
ctgctttcagttctttcgga

SEQ ID NO: 34011 - RNA, 20 nt, synthetic construct
  source 1..20: mol_type = other RNA
ctgctttcctcatgtccata

SEQ ID NO: 34012 - RNA, 20 nt, synthetic construct
  source 1..20: mol_type = other RNA
ctgctttctactagtataag

SEQ ID NO: 34013 - RNA, 20 nt, synthetic construct
  source 1..20: mol_type = other RNA
ctgctttcttggggctctaa

SEQ ID NO: 34014 - RNA, 20 nt, synthetic construct
  source 1..20: mol_type = other RNA
ctgcttttggaagcatgtgg

SEQ ID NO: 34015 - RNA, 20 nt, synthetic construct
  source 1..20: mol_type = other RNA
ctgctttttcttggtggtaa

SEQ ID NO: 34016 - RNA, 20 nt, synthetic construct
  source 1..20: mol_type = other RNA
ctggaaaaagaccataatat

SEQ ID NO: 34017 - RNA, 20 nt, synthetic construct
  source 1..20: mol_type = other RNA
ctggaaaactagagatggga

SEQ ID NO: 34018 - RNA, 20 nt, synthetic construct
  source 1..20: mol_type = other RNA
ctggaaaacttctctggagc

SEQ ID NO: 34019 - RNA, 20 nt, synthetic construct
  source 1..20: mol_type = other RNA
ctggaaaagtgttgactacc

SEQ ID NO: 34020 - RNA, 20 nt, synthetic construct
  source 1..20: mol_type = other RNA
ctggaaaccttttgtagacc

SEQ ID NO: 34021 - RNA, 20 nt, synthetic construct
  source 1..20: mol_type = other RNA
ctggaaactcaaacccaaat

SEQ ID NO: 34022 - RNA, 20 nt, synthetic construct
  source 1..20: mol_type = other RNA
ctggaaaggacttgatctaa

SEQ ID NO: 34023 - RNA, 20 nt, synthetic construct
  source 1..20: mol_type = other RNA
ctggaaagttcaaatgaggc

SEQ ID NO: 34024 - RNA, 20 nt, synthetic construct
  source 1..20: mol_type = other RNA
ctggaaataagtttcatgga

SEQ ID NO: 34025 - RNA, 20 nt, synthetic construct
  source 1..20: mol_type = other RNA
ctggaaataatttccctcag

SEQ ID NO: 34026 - RNA, 20 nt, synthetic construct
  source 1..20: mol_type = other RNA
ctggaaatcacaggtttagg

SEQ ID NO: 34027 - RNA, 20 nt, synthetic construct
  source 1..20: mol_type = other RNA
ctggaaatggacagcgggga

SEQ ID NO: 34028 - RNA, 20 nt, synthetic construct
  source 1..20: mol_type = other RNA
ctggaaattattcaatatgt

SEQ ID NO: 34029 - RNA, 20 nt, synthetic construct
  source 1..20: mol_type = other RNA
ctggaaattttcaagggtgt

SEQ ID NO: 34030 - RNA, 20 nt, synthetic construct
  source 1..20: mol_type = other RNA
ctggaacaatcaaaccatcc

SEQ ID NO: 34031 - RNA, 20 nt, synthetic construct
  source 1..20: mol_type = other RNA
ctggaacacacattagccta

SEQ ID NO: 34032 - RNA, 20 nt, synthetic construct
  source 1..20: mol_type = other RNA
ctggaacaggccctttgtta

SEQ ID NO: 34033 - RNA, 20 nt, synthetic construct
  source 1..20: mol_type = other RNA
ctggaacgaatattcattta

SEQ ID NO: 34034 - RNA, 20 nt, synthetic construct
  source 1..20: mol_type = other RNA
ctggaactcatttctgcttg

SEQ ID NO: 34035 - RNA, 20 nt, synthetic construct
  source 1..20: mol_type = other RNA
ctggaagaattttaagccta

SEQ ID NO: 34036 - RNA, 20 nt, synthetic construct
  source 1..20: mol_type = other RNA
ctggaagatttctactgggg

SEQ ID NO: 34037 - RNA, 20 nt, synthetic construct
  source 1..20: mol_type = other RNA
ctggaaggaaacactataaa

SEQ ID NO: 34038 - RNA, 20 nt, synthetic construct
  source 1..20: mol_type = other RNA
ctggaaggaaataagaaggt

SEQ ID NO: 34039 - RNA, 20 nt, synthetic construct
  source 1..20: mol_type = other RNA
ctggaaggactcacagctta

SEQ ID NO: 34040 - RNA, 20 nt, synthetic construct
  source 1..20: mol_type = other RNA
ctggaaggctaagcatgtaa

SEQ ID NO: 34041 - RNA, 20 nt, synthetic construct
  source 1..20: mol_type = other RNA
ctggaagggagcccaagcac

SEQ ID NO: 34042 - RNA, 20 nt, synthetic construct
  source 1..20: mol_type = other RNA
ctggaagtaaggattttcta

SEQ ID NO: 34043 - RNA, 20 nt, synthetic construct
  source 1..20: mol_type = other RNA
ctggaagtaattgggatctg

SEQ ID NO: 34044 - RNA, 20 nt, synthetic construct
  source 1..20: mol_type = other RNA
ctggaagtgtaacatacaca

SEQ ID NO: 34045 - RNA, 20 nt, synthetic construct
  source 1..20: mol_type = other RNA
ctggaagttcaaggttataa

SEQ ID NO: 34046 - RNA, 20 nt, synthetic construct
  source 1..20: mol_type = other RNA
ctggaagttggcccaacatg

SEQ ID NO: 34047 - RNA, 20 nt, synthetic construct
  source 1..20: mol_type = other RNA
ctggaagtttcctgcacatg

SEQ ID NO: 34048 - RNA, 20 nt, synthetic construct
  source 1..20: mol_type = other RNA
ctggaatagaagagcagtgt

SEQ ID NO: 34049 - RNA, 20 nt, synthetic construct
  source 1..20: mol_type = other RNA
ctggaatagtagcttcaatg

SEQ ID NO: 34050 - RNA, 20 nt, synthetic construct
  source 1..20: mol_type = other RNA
ctggaatcaatccagacagc

SEQ ID NO: 34051 - RNA, 20 nt, synthetic construct
  source 1..20: mol_type = other RNA
ctggaatcctctaccaaaaa

SEQ ID NO: 34052 - RNA, 20 nt, synthetic construct
  source 1..20: mol_type = other RNA
ctggaatgcatcgtttcaat

SEQ ID NO: 34053 - RNA, 20 nt, synthetic construct
  source 1..20: mol_type = other RNA
ctggaatgcccatcctctat

SEQ ID NO: 34054 - RNA, 20 nt, synthetic construct
  source 1..20: mol_type = other RNA
ctggaatgggttggaggaga

SEQ ID NO: 34055 - RNA, 20 nt, synthetic construct
  source 1..20: mol_type = other RNA
ctggaatggtgaagaatgtg

SEQ ID NO: 34056 - RNA, 20 nt, synthetic construct
  source 1..20: mol_type = other RNA
ctggaatgtgtagttctggt

SEQ ID NO: 34057 - RNA, 20 nt, synthetic construct
  source 1..20: mol_type = other RNA
ctggaattcatcaaagttaa

SEQ ID NO: 34058 - RNA, 20 nt, synthetic construct
  source 1..20: mol_type = other RNA
ctggacaacagtgtgagacc

SEQ ID NO: 34059 - RNA, 20 nt, synthetic construct
  source 1..20: mol_type = other RNA
ctggacacacacagtcctgt

SEQ ID NO: 34060 - RNA, 20 nt, synthetic construct
  source 1..20: mol_type = other RNA
ctggacaggatcccggaaca

SEQ ID NO: 34061 - RNA, 20 nt, synthetic construct
  source 1..20: mol_type = other RNA
ctggacataagggtctgttt

SEQ ID NO: 34062 - RNA, 20 nt, synthetic construct
  source 1..20: mol_type = other RNA
ctggacattatcctatcaga

SEQ ID NO: 34063 - RNA, 20 nt, synthetic construct
  source 1..20: mol_type = other RNA
ctggaccacaatcttacccc

SEQ ID NO: 34064 - RNA, 20 nt, synthetic construct
  source 1..20: mol_type = other RNA
ctggaccagttactctctct

SEQ ID NO: 34065 - RNA, 20 nt, synthetic construct
  source 1..20: mol_type = other RNA
ctggacccgggaggcagatg

SEQ ID NO: 34066 - RNA, 20 nt, synthetic construct
  source 1..20: mol_type = other RNA
ctggacccttaccttaaacc

SEQ ID NO: 34067 - RNA, 20 nt, synthetic construct
  source 1..20: mol_type = other RNA
ctggactcagggtcacttcc

SEQ ID NO: 34068 - RNA, 20 nt, synthetic construct
  source 1..20: mol_type = other RNA
ctggactcattccaatcctt

SEQ ID NO: 34069 - RNA, 20 nt, synthetic construct
  source 1..20: mol_type = other RNA
ctggactccttctgaaggca

SEQ ID NO: 34070 - RNA, 20 nt, synthetic construct
  source 1..20: mol_type = other RNA
ctggactgaaaagatacaga

SEQ ID NO: 34071 - RNA, 20 nt, synthetic construct
  source 1..20: mol_type = other RNA
ctggactggagggatgctgg

SEQ ID NO: 34072 - RNA, 20 nt, synthetic construct
  source 1..20: mol_type = other RNA
ctggactgtgatgactgtaa

SEQ ID NO: 34073 - RNA, 20 nt, synthetic construct
  source 1..20: mol_type = other RNA
ctggagaaagcccagccgcg

SEQ ID NO: 34074 - RNA, 20 nt, synthetic construct
  source 1..20: mol_type = other RNA
ctggagaacagtaaagtcac

SEQ ID NO: 34075 - RNA, 20 nt, synthetic construct
  source 1..20: mol_type = other RNA
ctggagaattctactaaaca

SEQ ID NO: 34076 - RNA, 20 nt, synthetic construct
  source 1..20: mol_type = other RNA
ctggagaggcaaaggccgct

SEQ ID NO: 34077 - RNA, 20 nt, synthetic construct
  source 1..20: mol_type = other RNA
ctggagcaagcatgagtatc

SEQ ID NO: 34078 - RNA, 20 nt, synthetic construct
  source 1..20: mol_type = other RNA
ctggagcagggtgggccctt

SEQ ID NO: 34079 - RNA, 20 nt, synthetic construct
  source 1..20: mol_type = other RNA
ctggagcctgaggacactag

SEQ ID NO: 34080 - RNA, 20 nt, synthetic construct
  source 1..20: mol_type = other RNA
ctggagctcactgcagcctc

SEQ ID NO: 34081 - RNA, 20 nt, synthetic construct
  source 1..20: mol_type = other RNA
ctggaggatggcttgagccc

SEQ ID NO: 34082 - RNA, 20 nt, synthetic construct
  source 1..20: mol_type = other RNA
ctggaggctagaagtcccag

SEQ ID NO: 34083 - RNA, 20 nt, synthetic construct
  source 1..20: mol_type = other RNA
ctggagggatgctggagtgt

SEQ ID NO: 34084 - RNA, 20 nt, synthetic construct
  source 1..20: mol_type = other RNA
ctggagggctcccagtgccc

SEQ ID NO: 34085 - RNA, 20 nt, synthetic construct
  source 1..20: mol_type = other RNA
ctggaggtcgggctgcctca

SEQ ID NO: 34086 - RNA, 20 nt, synthetic construct
  source 1..20: mol_type = other RNA
ctggaggtgcacattccaag

SEQ ID NO: 34087 - RNA, 20 nt, synthetic construct
  source 1..20: mol_type = other RNA
ctggagtgcaatggtgggat

SEQ ID NO: 34088 - RNA, 20 nt, synthetic construct
  source 1..20: mol_type = other RNA
ctggagtggagtggcatgat

SEQ ID NO: 34089 - RNA, 20 nt, synthetic construct
  source 1..20: mol_type = other RNA
ctggagtgtggcaggggctg

SEQ ID NO: 34090 - RNA, 20 nt, synthetic construct
  source 1..20: mol_type = other RNA
ctggagtgttttcttcatgg

SEQ ID NO: 34091 - RNA, 20 nt, synthetic construct
  source 1..20: mol_type = other RNA
ctggagttaattccacaacc

SEQ ID NO: 34092 - RNA, 20 nt, synthetic construct
  source 1..20: mol_type = other RNA
ctggagttatttgtataaat

SEQ ID NO: 34093 - RNA, 20 nt, synthetic construct
  source 1..20: mol_type = other RNA
ctggatacaaggtcaatctg

SEQ ID NO: 34094 - RNA, 20 nt, synthetic construct
  source 1..20: mol_type = other RNA
ctggatacggaaatataaca

SEQ ID NO: 34095 - RNA, 20 nt, synthetic construct
  source 1..20: mol_type = other RNA
ctggatagaagtgtatcaga

SEQ ID NO: 34096 - RNA, 20 nt, synthetic construct
  source 1..20: mol_type = other RNA
ctggatagcaacttgcagaa

SEQ ID NO: 34097 - RNA, 20 nt, synthetic construct
  source 1..20: mol_type = other RNA
ctggatagcattatcccttt

SEQ ID NO: 34098 - RNA, 20 nt, synthetic construct
  source 1..20: mol_type = other RNA
ctggatataacaaatcaatt

SEQ ID NO: 34099 - RNA, 20 nt, synthetic construct
  source 1..20: mol_type = other RNA
ctggatcaagtgggatttat

SEQ ID NO: 34100 - RNA, 20 nt, synthetic construct
  source 1..20: mol_type = other RNA
ctggatcatatagtaattct

SEQ ID NO: 34101 - RNA, 20 nt, synthetic construct
  source 1..20: mol_type = other RNA
ctggatcccccagcccctgg

SEQ ID NO: 34102 - RNA, 20 nt, synthetic construct
  source 1..20: mol_type = other RNA
ctggatcctggagggctccc

SEQ ID NO: 34103 - RNA, 20 nt, synthetic construct
  source 1..20: mol_type = other RNA
ctggatcctgtctcagagta

SEQ ID NO: 34104 - RNA, 20 nt, synthetic construct
  source 1..20: mol_type = other RNA
ctggatgaatacaaaggtgt

SEQ ID NO: 34105 - RNA, 20 nt, synthetic construct
  source 1..20: mol_type = other RNA
ctggatgaatgcagtggctt

SEQ ID NO: 34106 - RNA, 20 nt, synthetic construct
  source 1..20: mol_type = other RNA
ctggatgtggtgtggcatgt

SEQ ID NO: 34107 - RNA, 20 nt, synthetic construct
  source 1..20: mol_type = other RNA
ctggatgtgtatgatcaaag

SEQ ID NO: 34108 - RNA, 20 nt, synthetic construct
  source 1..20: mol_type = other RNA
ctggatgttaattagatatg

SEQ ID NO: 34109 - RNA, 20 nt, synthetic construct
  source 1..20: mol_type = other RNA
ctggattaaggagatggcac

SEQ ID NO: 34110 - RNA, 20 nt, synthetic construct
  source 1..20: mol_type = other RNA
ctggattatagtggtaagga

SEQ ID NO: 34111 - RNA, 20 nt, synthetic construct
  source 1..20: mol_type = other RNA
ctggattgattccagtttct

SEQ ID NO: 34112 - RNA, 20 nt, synthetic construct
  source 1..20: mol_type = other RNA
ctggattgctagtgtcctca

SEQ ID NO: 34113 - RNA, 20 nt, synthetic construct
  source 1..20: mol_type = other RNA
ctggatttgattgggcatta

SEQ ID NO: 34114 - RNA, 20 nt, synthetic construct
  source 1..20: mol_type = other RNA
ctggatttgggaaggatggc

SEQ ID NO: 34115 - RNA, 20 nt, synthetic construct
  source 1..20: mol_type = other RNA
ctggatttttgtgtagaggt

SEQ ID NO: 34116 - RNA, 20 nt, synthetic construct
  source 1..20: mol_type = other RNA
ctggcaaaaatcatcatata

SEQ ID NO: 34117 - RNA, 20 nt, synthetic construct
  source 1..20: mol_type = other RNA
ctggcaaaatggagacatct

SEQ ID NO: 34118 - RNA, 20 nt, synthetic construct
  source 1..20: mol_type = other RNA
ctggcaacaaaggcgaagcc

SEQ ID NO: 34119 - RNA, 20 nt, synthetic construct
  source 1..20: mol_type = other RNA
ctggcaatactctcagaaat

SEQ ID NO: 34120 - RNA, 20 nt, synthetic construct
  source 1..20: mol_type = other RNA
ctggcaatcaaatggccttc

SEQ ID NO: 34121 - RNA, 20 nt, synthetic construct
  source 1..20: mol_type = other RNA
ctggcacagcactgttaact

SEQ ID NO: 34122 - RNA, 20 nt, synthetic construct
  source 1..20: mol_type = other RNA
ctggcactttcctgataagg

SEQ ID NO: 34123 - RNA, 20 nt, synthetic construct
  source 1..20: mol_type = other RNA
ctggcagatcaattgaccaa

SEQ ID NO: 34124 - RNA, 20 nt, synthetic construct
  source 1..20: mol_type = other RNA
ctggcagcaggggctaagta

SEQ ID NO: 34125 - RNA, 20 nt, synthetic construct
  source 1..20: mol_type = other RNA
ctggcagccttctctcttcc

SEQ ID NO: 34126 - RNA, 20 nt, synthetic construct
  source 1..20: mol_type = other RNA
ctggcaggtcacctagcctc

SEQ ID NO: 34127 - RNA, 20 nt, synthetic construct
  source 1..20: mol_type = other RNA
ctggcagtctaggaaaagac

SEQ ID NO: 34128 - RNA, 20 nt, synthetic construct
  source 1..20: mol_type = other RNA
ctggcatgttggatagtttc

SEQ ID NO: 34129 - RNA, 20 nt, synthetic construct
  source 1..20: mol_type = other RNA
ctggcattgtcccgggggag

SEQ ID NO: 34130 - RNA, 20 nt, synthetic construct
  source 1..20: mol_type = other RNA
ctggccaaatccctgatcaa

SEQ ID NO: 34131 - RNA, 20 nt, synthetic construct
  source 1..20: mol_type = other RNA
ctggccaacatcgtaaaacc

SEQ ID NO: 34132 - RNA, 20 nt, synthetic construct
  source 1..20: mol_type = other RNA
ctggccacatgcttccaaaa

SEQ ID NO: 34133 - RNA, 20 nt, synthetic construct
  source 1..20: mol_type = other RNA
ctggccactgattgagtatc

SEQ ID NO: 34134 - RNA, 20 nt, synthetic construct
  source 1..20: mol_type = other RNA
ctggccagcattacttaggc

SEQ ID NO: 34135 - RNA, 20 nt, synthetic construct
  source 1..20: mol_type = other RNA
ctggccagtgagttcaaatg

SEQ ID NO: 34136 - RNA, 20 nt, synthetic construct
  source 1..20: mol_type = other RNA
ctggccatccttcccaaatc

SEQ ID NO: 34137 - RNA, 20 nt, synthetic construct
  source 1..20: mol_type = other RNA
ctggccatgttttatttctt

SEQ ID NO: 34138 - RNA, 20 nt, synthetic construct
  source 1..20: mol_type = other RNA
ctggcccctccatggaaact

SEQ ID NO: 34139 - RNA, 20 nt, synthetic construct
  source 1..20: mol_type = other RNA
ctggcccctttcaagattgt

SEQ ID NO: 34140 - RNA, 20 nt, synthetic construct
  source 1..20: mol_type = other RNA
ctggccctccatttccctgc

SEQ ID NO: 34141 - RNA, 20 nt, synthetic construct
  source 1..20: mol_type = other RNA
ctggccgggatttacttcta

SEQ ID NO: 34142 - RNA, 20 nt, synthetic construct
  source 1..20: mol_type = other RNA
ctggcctcggccaaccatta

SEQ ID NO: 34143 - RNA, 20 nt, synthetic construct
  source 1..20: mol_type = other RNA
ctggcctgagctctcagtgg

SEQ ID NO: 34144 - RNA, 20 nt, synthetic construct
  source 1..20: mol_type = other RNA
ctggcctgcaccatttattg

SEQ ID NO: 34145 - RNA, 20 nt, synthetic construct
  source 1..20: mol_type = other RNA
ctggcctggacaacagtgtg

SEQ ID NO: 34146 - RNA, 20 nt, synthetic construct
  source 1..20: mol_type = other RNA
ctggccttctatatttttac

SEQ ID NO: 34147 - RNA, 20 nt, synthetic construct
  source 1..20: mol_type = other RNA
ctggctagtaggcaacatcc

SEQ ID NO: 34148 - RNA, 20 nt, synthetic construct
  source 1..20: mol_type = other RNA
ctggctattagttaaccttc

SEQ ID NO: 34149 - RNA, 20 nt, synthetic construct
  source 1..20: mol_type = other RNA
ctggctcagaaacaacaaca

SEQ ID NO: 34150 - RNA, 20 nt, synthetic construct
  source 1..20: mol_type = other RNA
ctggctcagtctgtttgcca

SEQ ID NO: 34151 - RNA, 20 nt, synthetic construct
  source 1..20: mol_type = other RNA
ctggctctagcccagcttcc

SEQ ID NO: 34152 - RNA, 20 nt, synthetic construct
  source 1..20: mol_type = other RNA
ctggctctttccactctctg

SEQ ID NO: 34153 - RNA, 20 nt, synthetic construct
  source 1..20: mol_type = other RNA
ctggctgacctggtactcta

SEQ ID NO: 34154 - RNA, 20 nt, synthetic construct
  source 1..20: mol_type = other RNA
ctggctgcaattgcgcagaa

SEQ ID NO: 34155 - RNA, 20 nt, synthetic construct
  source 1..20: mol_type = other RNA
ctggctgcagggcttctgaa

SEQ ID NO: 34156 - RNA, 20 nt, synthetic construct
  source 1..20: mol_type = other RNA
ctggctgtgccaactctggc

SEQ ID NO: 34157 - RNA, 20 nt, synthetic construct
  source 1..20: mol_type = other RNA
ctggcttaatgcatataaaa

SEQ ID NO: 34158 - RNA, 20 nt, synthetic construct
  source 1..20: mol_type = other RNA
ctggcttcaatatgcagtat

SEQ ID NO: 34159 - RNA, 20 nt, synthetic construct
  source 1..20: mol_type = other RNA
ctggcttcagtgccaacaca

SEQ ID NO: 34160 - RNA, 20 nt, synthetic construct
  source 1..20: mol_type = other RNA
ctggcttcatgggtggaaat

SEQ ID NO: 34161 - RNA, 20 nt, synthetic construct
  source 1..20: mol_type = other RNA
ctggcttgtgacatcaaggg

SEQ ID NO: 34162 - RNA, 20 nt, synthetic construct
  source 1..20: mol_type = other RNA
ctggctttagatggtaaaac

SEQ ID NO: 34163 - RNA, 20 nt, synthetic construct
  source 1..20: mol_type = other RNA
ctgggaaaaaataagaaaac

SEQ ID NO: 34164 - RNA, 20 nt, synthetic construct
  source 1..20: mol_type = other RNA
ctgggaaaaggatttgtttg

SEQ ID NO: 34165 - RNA, 20 nt, synthetic construct
  source 1..20: mol_type = other RNA
ctgggaaagcctggctttag

SEQ ID NO: 34166 - RNA, 20 nt, synthetic construct
  source 1..20: mol_type = other RNA
ctgggaacagcccctagcat

SEQ ID NO: 34167 - RNA, 20 nt, synthetic construct
  source 1..20: mol_type = other RNA
ctgggaagttatgtagctgg

SEQ ID NO: 34168 - RNA, 20 nt, synthetic construct
  source 1..20: mol_type = other RNA
ctgggacagagcgagactcc

SEQ ID NO: 34169 - RNA, 20 nt, synthetic construct
  source 1..20: mol_type = other RNA
ctgggactacaggtgtgaac

SEQ ID NO: 34170 - RNA, 20 nt, synthetic construct
  source 1..20: mol_type = other RNA
ctgggacttctagcctccag

SEQ ID NO: 34171 - RNA, 20 nt, synthetic construct
  source 1..20: mol_type = other RNA
ctgggagaaagaccaagagt

SEQ ID NO: 34172 - RNA, 20 nt, synthetic construct
  source 1..20: mol_type = other RNA
ctgggagaaagctaatttgg

SEQ ID NO: 34173 - RNA, 20 nt, synthetic construct
  source 1..20: mol_type = other RNA
ctgggagaatggcaaggcta

SEQ ID NO: 34174 - RNA, 20 nt, synthetic construct
  source 1..20: mol_type = other RNA
ctgggagaccaggagttctt

SEQ ID NO: 34175 - RNA, 20 nt, synthetic construct
  source 1..20: mol_type = other RNA
ctgggagccctccaggatcc

SEQ ID NO: 34176 - RNA, 20 nt, synthetic construct
  source 1..20: mol_type = other RNA
ctgggagcttatcaggcttg

SEQ ID NO: 34177 - RNA, 20 nt, synthetic construct
  source 1..20: mol_type = other RNA
ctgggagtacaagaccagcc

SEQ ID NO: 34178 - RNA, 20 nt, synthetic construct
  source 1..20: mol_type = other RNA
ctgggagttcattagaattc

SEQ ID NO: 34179 - RNA, 20 nt, synthetic construct
  source 1..20: mol_type = other RNA
ctgggataatgagtttaatt

SEQ ID NO: 34180 - RNA, 20 nt, synthetic construct
  source 1..20: mol_type = other RNA
ctgggataatgctatcattt

SEQ ID NO: 34181 - RNA, 20 nt, synthetic construct
  source 1..20: mol_type = other RNA
ctgggatacttctaacttta

SEQ ID NO: 34182 - RNA, 20 nt, synthetic construct
  source 1..20: mol_type = other RNA
ctgggatcacaggcgttgag

SEQ ID NO: 34183 - RNA, 20 nt, synthetic construct
  source 1..20: mol_type = other RNA
ctgggatcctaagcatgaga

SEQ ID NO: 34184 - RNA, 20 nt, synthetic construct
  source 1..20: mol_type = other RNA
ctgggatgcaagaatggttt

SEQ ID NO: 34185 - RNA, 20 nt, synthetic construct
  source 1..20: mol_type = other RNA
ctgggatgctcagtttcaaa

SEQ ID NO: 34186 - RNA, 20 nt, synthetic construct
  source 1..20: mol_type = other RNA
ctgggatggctgaaagagaa

SEQ ID NO: 34187 - RNA, 20 nt, synthetic construct
  source 1..20: mol_type = other RNA
ctgggattacacacacctac

SEQ ID NO: 34188 - RNA, 20 nt, synthetic construct
  source 1..20: mol_type = other RNA
ctgggattacaggcgcacgc

SEQ ID NO: 34189 - RNA, 20 nt, synthetic construct
  source 1..20: mol_type = other RNA
ctgggcaacagagacagaga

SEQ ID NO: 34190 - RNA, 20 nt, synthetic construct
  source 1..20: mol_type = other RNA
ctgggcacacgccactgcag

SEQ ID NO: 34191 - RNA, 20 nt, synthetic construct
  source 1..20: mol_type = other RNA
ctgggcccactctccccaag

SEQ ID NO: 34192 - RNA, 20 nt, synthetic construct
  source 1..20: mol_type = other RNA
ctgggcccgcagtggctcat

SEQ ID NO: 34193 - RNA, 20 nt, synthetic construct
  source 1..20: mol_type = other RNA
ctgggcgacaagagcagaac

SEQ ID NO: 34194 - RNA, 20 nt, synthetic construct
  source 1..20: mol_type = other RNA
ctgggcgacagagtgaaact

SEQ ID NO: 34195 - RNA, 20 nt, synthetic construct
  source 1..20: mol_type = other RNA
ctgggcgagatggcgtgcgc

SEQ ID NO: 34196 - RNA, 20 nt, synthetic construct
  source 1..20: mol_type = other RNA
ctgggctagagccaggaagt

SEQ ID NO: 34197 - RNA, 20 nt, synthetic construct
  source 1..20: mol_type = other RNA
ctgggctagggaagcagttg

SEQ ID NO: 34198 - RNA, 20 nt, synthetic construct
  source 1..20: mol_type = other RNA
ctgggctattgttttgcaag

SEQ ID NO: 34199 - RNA, 20 nt, synthetic construct
  source 1..20: mol_type = other RNA
ctgggctcactgcaacttcc

SEQ ID NO: 34200 - RNA, 20 nt, synthetic construct
  source 1..20: mol_type = other RNA
ctgggctcatctaagcctac

SEQ ID NO: 34201 - RNA, 20 nt, synthetic construct
  source 1..20: mol_type = other RNA
ctgggctctctattccaaat

SEQ ID NO: 34202 - RNA, 20 nt, synthetic construct
  source 1..20: mol_type = other RNA
ctgggcttcactttcgtcat

SEQ ID NO: 34203 - RNA, 20 nt, synthetic construct
  source 1..20: mol_type = other RNA
ctgggctttctccaggggcg

SEQ ID NO: 34204 - RNA, 20 nt, synthetic construct
  source 1..20: mol_type = other RNA
ctggggaataagattttagg

SEQ ID NO: 34205 - RNA, 20 nt, synthetic construct
  source 1..20: mol_type = other RNA
ctggggaattgcatgagact

SEQ ID NO: 34206 - RNA, 20 nt, synthetic construct
  source 1..20: mol_type = other RNA
ctggggacccctccctgctt

SEQ ID NO: 34207 - RNA, 20 nt, synthetic construct
  source 1..20: mol_type = other RNA
ctggggagtgtgcccaagga

SEQ ID NO: 34208 - RNA, 20 nt, synthetic construct
  source 1..20: mol_type = other RNA
ctggggatgctgtctatagg

SEQ ID NO: 34209 - RNA, 20 nt, synthetic construct
  source 1..20: mol_type = other RNA
ctggggcagcaaagcaagaa

SEQ ID NO: 34210 - RNA, 20 nt, synthetic construct
  source 1..20: mol_type = other RNA
ctggggcctcagcatgtctt

SEQ ID NO: 34211 - RNA, 20 nt, synthetic construct
  source 1..20: mol_type = other RNA
ctggggctcaagtaagtgaa

SEQ ID NO: 34212 - RNA, 20 nt, synthetic construct
  source 1..20: mol_type = other RNA
ctggggcttgaacccgaggt

SEQ ID NO: 34213 - RNA, 20 nt, synthetic construct
  source 1..20: mol_type = other RNA
ctgggggagactgtgcaatg

SEQ ID NO: 34214 - RNA, 20 nt, synthetic construct
  source 1..20: mol_type = other RNA
ctgggggatccaggggaata

SEQ ID NO: 34215 - RNA, 20 nt, synthetic construct
  source 1..20: mol_type = other RNA
ctgggggctggacataaggg

SEQ ID NO: 34216 - RNA, 20 nt, synthetic construct
  source 1..20: mol_type = other RNA
ctggggtcttagttctgctt

SEQ ID NO: 34217 - RNA, 20 nt, synthetic construct
  source 1..20: mol_type = other RNA
ctggggttagggcctagaaa

SEQ ID NO: 34218 - RNA, 20 nt, synthetic construct
  source 1..20: mol_type = other RNA
ctggggttcaaaccacctaa

SEQ ID NO: 34219 - RNA, 20 nt, synthetic construct
  source 1..20: mol_type = other RNA
ctggggtttccttaccttta

SEQ ID NO: 34220 - RNA, 20 nt, synthetic construct
  source 1..20: mol_type = other RNA
ctgggtaaacaagactcaac

SEQ ID NO: 34221 - RNA, 20 nt, synthetic construct
  source 1..20: mol_type = other RNA
ctgggtaattaaacattttt

SEQ ID NO: 34222 - RNA, 20 nt, synthetic construct
  source 1..20: mol_type = other RNA
ctgggtagagactggatcct

SEQ ID NO: 34223 - RNA, 20 nt, synthetic construct
  source 1..20: mol_type = other RNA
ctgggtatacagcaaaagaa

SEQ ID NO: 34224 - RNA, 20 nt, synthetic construct
  source 1..20: mol_type = other RNA
ctgggtcagaatcgtgatag

SEQ ID NO: 34225 - RNA, 20 nt, synthetic construct
  source 1..20: mol_type = other RNA
ctgggtccccggaggaggtg

SEQ ID NO: 34226 - RNA, 20 nt, synthetic construct
  source 1..20: mol_type = other RNA
ctgggtcggccgaggcggac

SEQ ID NO: 34227 - RNA, 20 nt, synthetic construct
  source 1..20: mol_type = other RNA
ctgggtcttataggttgaat

SEQ ID NO: 34228 - RNA, 20 nt, synthetic construct
  source 1..20: mol_type = other RNA
ctgggtgatatctgtaagtc

SEQ ID NO: 34229 - RNA, 20 nt, synthetic construct
  source 1..20: mol_type = other RNA
ctgggtgatgttcaaccctc

SEQ ID NO: 34230 - RNA, 20 nt, synthetic construct
  source 1..20: mol_type = other RNA
ctgggtgcgttgaccgcttt

SEQ ID NO: 34231 - RNA, 20 nt, synthetic construct
  source 1..20: mol_type = other RNA
ctgggtgtagggggaaaact

SEQ ID NO: 34232 - RNA, 20 nt, synthetic construct
  source 1..20: mol_type = other RNA
ctgggtgtgcacgtttgctt

SEQ ID NO: 34233 - RNA, 20 nt, synthetic construct
  source 1..20: mol_type = other RNA
ctgggttcaggtgcctcctg

SEQ ID NO: 34234 - RNA, 20 nt, synthetic construct
  source 1..20: mol_type = other RNA
ctgggttctcaccaacatcc

SEQ ID NO: 34235 - RNA, 20 nt, synthetic construct
  source 1..20: mol_type = other RNA
ctgggttctcccttctattc

SEQ ID NO: 34236 - RNA, 20 nt, synthetic construct
  source 1..20: mol_type = other RNA
ctggtaaggaaacagagttt

SEQ ID NO: 34237 - RNA, 20 nt, synthetic construct
  source 1..20: mol_type = other RNA
ctggtaataatgaaagctcc

SEQ ID NO: 34238 - RNA, 20 nt, synthetic construct
  source 1..20: mol_type = other RNA
ctggtaatacagtctgattt

SEQ ID NO: 34239 - RNA, 20 nt, synthetic construct
  source 1..20: mol_type = other RNA
ctggtaatgaatagaaaatc

SEQ ID NO: 34240 - RNA, 20 nt, synthetic construct
  source 1..20: mol_type = other RNA
ctggtaccaaagcagaaata

SEQ ID NO: 34241 - RNA, 20 nt, synthetic construct
  source 1..20: mol_type = other RNA
ctggtactctatgatatata

SEQ ID NO: 34242 - RNA, 20 nt, synthetic construct
  source 1..20: mol_type = other RNA
ctggtatctaccaaaaaact

SEQ ID NO: 34243 - RNA, 20 nt, synthetic construct
  source 1..20: mol_type = other RNA
ctggtatgagtgtttccctt

SEQ ID NO: 34244 - RNA, 20 nt, synthetic construct
  source 1..20: mol_type = other RNA
ctggtattctgaactttcaa

SEQ ID NO: 34245 - RNA, 20 nt, synthetic construct
  source 1..20: mol_type = other RNA
ctggtattttaagattctct

SEQ ID NO: 34246 - RNA, 20 nt, synthetic construct
  source 1..20: mol_type = other RNA
ctggtcaacagggtaagatt

SEQ ID NO: 34247 - RNA, 20 nt, synthetic construct
  source 1..20: mol_type = other RNA
ctggtcacaaacacaaaaca

SEQ ID NO: 34248 - RNA, 20 nt, synthetic construct
  source 1..20: mol_type = other RNA
ctggtcactggccactgatt

SEQ ID NO: 34249 - RNA, 20 nt, synthetic construct
  source 1..20: mol_type = other RNA
ctggtccagatgaagcaggg

SEQ ID NO: 34250 - RNA, 20 nt, synthetic construct
  source 1..20: mol_type = other RNA
ctggtcctgaactcgtggcc

SEQ ID NO: 34251 - RNA, 20 nt, synthetic construct
  source 1..20: mol_type = other RNA
ctggtcctgagctttcctta

SEQ ID NO: 34252 - RNA, 20 nt, synthetic construct
  source 1..20: mol_type = other RNA
ctggtcctgagggctttgtg

SEQ ID NO: 34253 - RNA, 20 nt, synthetic construct
  source 1..20: mol_type = other RNA
ctggtccttaaatttctaag

SEQ ID NO: 34254 - RNA, 20 nt, synthetic construct
  source 1..20: mol_type = other RNA
ctggtcgagctgggtgatgt

SEQ ID NO: 34255 - RNA, 20 nt, synthetic construct
  source 1..20: mol_type = other RNA
ctggtctatctcattataac

SEQ ID NO: 34256 - RNA, 20 nt, synthetic construct
  source 1..20: mol_type = other RNA
ctggtctcaaactccaagtc

SEQ ID NO: 34257 - RNA, 20 nt, synthetic construct
  source 1..20: mol_type = other RNA
ctggtctcccagcatgaagc

SEQ ID NO: 34258 - RNA, 20 nt, synthetic construct
  source 1..20: mol_type = other RNA
ctggtctcctttctatactt

SEQ ID NO: 34259 - RNA, 20 nt, synthetic construct
  source 1..20: mol_type = other RNA
ctggtctggaatgtgtagtt

SEQ ID NO: 34260 - RNA, 20 nt, synthetic construct
  source 1..20: mol_type = other RNA
ctggtcttgtactcccagcc

SEQ ID NO: 34261 - RNA, 20 nt, synthetic construct
  source 1..20: mol_type = other RNA
ctggtgaaaaaatggtgcag

SEQ ID NO: 34262 - RNA, 20 nt, synthetic construct
  source 1..20: mol_type = other RNA
ctggtgaactgggtgtaggg

SEQ ID NO: 34263 - RNA, 20 nt, synthetic construct
  source 1..20: mol_type = other RNA
ctggtgatctatgaatttgc

SEQ ID NO: 34264 - RNA, 20 nt, synthetic construct
  source 1..20: mol_type = other RNA
ctggtgattaaagttatttc

SEQ ID NO: 34265 - RNA, 20 nt, synthetic construct
  source 1..20: mol_type = other RNA
ctggtgctggcagccttctc

SEQ ID NO: 34266 - RNA, 20 nt, synthetic construct
  source 1..20: mol_type = other RNA
ctggtgctttctatctctca

SEQ ID NO: 34267 - RNA, 20 nt, synthetic construct
  source 1..20: mol_type = other RNA
ctggtgcttttttggtgttt

SEQ ID NO: 34268 - RNA, 20 nt, synthetic construct
  source 1..20: mol_type = other RNA
ctggtggacaaaaaacgcgg

SEQ ID NO: 34269 - RNA, 20 nt, synthetic construct
  source 1..20: mol_type = other RNA
ctggtggagtattctagttc

SEQ ID NO: 34270 - RNA, 20 nt, synthetic construct
  source 1..20: mol_type = other RNA
ctggtgggctttgagaaagg

SEQ ID NO: 34271 - RNA, 20 nt, synthetic construct
  source 1..20: mol_type = other RNA
ctggtgggttcatgccattc

SEQ ID NO: 34272 - RNA, 20 nt, synthetic construct
  source 1..20: mol_type = other RNA
ctggtgtccttctgagaagg

SEQ ID NO: 34273 - RNA, 20 nt, synthetic construct
  source 1..20: mol_type = other RNA
ctggtgtcgtttatttcttc

SEQ ID NO: 34274 - RNA, 20 nt, synthetic construct
  source 1..20: mol_type = other RNA
ctggtgttaggcaatccttc

SEQ ID NO: 34275 - RNA, 20 nt, synthetic construct
  source 1..20: mol_type = other RNA
ctggtgttgcttgctctaca

SEQ ID NO: 34276 - RNA, 20 nt, synthetic construct
  source 1..20: mol_type = other RNA
ctggttagggagactttcac

SEQ ID NO: 34277 - RNA, 20 nt, synthetic construct
  source 1..20: mol_type = other RNA
ctggttcaagctatgctcct

SEQ ID NO: 34278 - RNA, 20 nt, synthetic construct
  source 1..20: mol_type = other RNA
ctggttccaaacttctgacc

SEQ ID NO: 34279 - RNA, 20 nt, synthetic construct
  source 1..20: mol_type = other RNA
ctggtttcagtacacgaaaa

SEQ ID NO: 34280 - RNA, 20 nt, synthetic construct
  source 1..20: mol_type = other RNA
ctggtttcagtccctccttt

SEQ ID NO: 34281 - RNA, 20 nt, synthetic construct
  source 1..20: mol_type = other RNA
ctggtttctgcatacttagc

SEQ ID NO: 34282 - RNA, 20 nt, synthetic construct
  source 1..20: mol_type = other RNA
ctggtttgctttggagtcac

SEQ ID NO: 34283 - RNA, 20 nt, synthetic construct
  source 1..20: mol_type = other RNA
ctggttttaaagaaattaga

SEQ ID NO: 34284 - RNA, 20 nt, synthetic construct
  source 1..20: mol_type = other RNA
ctggttttcctgatggacat

SEQ ID NO: 34285 - RNA, 20 nt, synthetic construct
  source 1..20: mol_type = other RNA
ctggttttctggaggctaga

SEQ ID NO: 34286 - RNA, 20 nt, synthetic construct
  source 1..20: mol_type = other RNA
ctggttttgatcatcgcatt

SEQ ID NO: 34287 - RNA, 20 nt, synthetic construct
  source 1..20: mol_type = other RNA
ctgtaaaaattttctcccaa

SEQ ID NO: 34288 - RNA, 20 nt, synthetic construct
  source 1..20: mol_type = other RNA
ctgtaaacaatgctgctatg

SEQ ID NO: 34289 - RNA, 20 nt, synthetic construct
  source 1..20: mol_type = other RNA
ctgtaaacatgaacaagtta

SEQ ID NO: 34290 - RNA, 20 nt, synthetic construct
  source 1..20: mol_type = other RNA
ctgtaaacctggaatcctct

SEQ ID NO: 34291 - RNA, 20 nt, synthetic construct
  source 1..20: mol_type = other RNA
ctgtaaagtaatcaagtgaa

SEQ ID NO: 34292 - RNA, 20 nt, synthetic construct
  source 1..20: mol_type = other RNA
ctgtaacaaagatgccacaa

SEQ ID NO: 34293 - RNA, 20 nt, synthetic construct
  source 1..20: mol_type = other RNA
ctgtaacagaggcatgcacg

SEQ ID NO: 34294 - RNA, 20 nt, synthetic construct
  source 1..20: mol_type = other RNA
ctgtaaccctgtttccctta

SEQ ID NO: 34295 - RNA, 20 nt, synthetic construct
  source 1..20: mol_type = other RNA
ctgtaacctccacctcccag

SEQ ID NO: 34296 - RNA, 20 nt, synthetic construct
  source 1..20: mol_type = other RNA
ctgtaactgacttcaagagg

SEQ ID NO: 34297 - RNA, 20 nt, synthetic construct
  source 1..20: mol_type = other RNA
ctgtaagaataatgtctttt

SEQ ID NO: 34298 - RNA, 20 nt, synthetic construct
  source 1..20: mol_type = other RNA
ctgtaagcacctgtataaat

SEQ ID NO: 34299 - RNA, 20 nt, synthetic construct
  source 1..20: mol_type = other RNA
ctgtaagctgaactctgtgg

SEQ ID NO: 34300 - RNA, 20 nt, synthetic construct
  source 1..20: mol_type = other RNA
ctgtaagctggtaatacagt

SEQ ID NO: 34301 - RNA, 20 nt, synthetic construct
  source 1..20: mol_type = other RNA
ctgtaagtcagttaacagtg

SEQ ID NO: 34302 - RNA, 20 nt, synthetic construct
  source 1..20: mol_type = other RNA
ctgtaagtcatcaaaggaag

SEQ ID NO: 34303 - RNA, 20 nt, synthetic construct
  source 1..20: mol_type = other RNA
ctgtaagttcctggactgtg

SEQ ID NO: 34304 - RNA, 20 nt, synthetic construct
  source 1..20: mol_type = other RNA
ctgtaatattaaccaagaac

SEQ ID NO: 34305 - RNA, 20 nt, synthetic construct
  source 1..20: mol_type = other RNA
ctgtaatattgtatataccc

SEQ ID NO: 34306 - RNA, 20 nt, synthetic construct
  source 1..20: mol_type = other RNA
ctgtaatgagctgagattgc

SEQ ID NO: 34307 - RNA, 20 nt, synthetic construct
  source 1..20: mol_type = other RNA
ctgtaatgtttgtacttcta

SEQ ID NO: 34308 - RNA, 20 nt, synthetic construct
  source 1..20: mol_type = other RNA
ctgtaattacatacttcaaa

SEQ ID NO: 34309 - RNA, 20 nt, synthetic construct
  source 1..20: mol_type = other RNA
ctgtaatttttctctttttg

SEQ ID NO: 34310 - RNA, 20 nt, synthetic construct
  source 1..20: mol_type = other RNA
ctgtacaaagatttacccct

SEQ ID NO: 34311 - RNA, 20 nt, synthetic construct
  source 1..20: mol_type = other RNA
ctgtacattttatgaaatct

SEQ ID NO: 34312 - RNA, 20 nt, synthetic construct
  source 1..20: mol_type = other RNA
ctgtacccattagacactaa

SEQ ID NO: 34313 - RNA, 20 nt, synthetic construct
  source 1..20: mol_type = other RNA
ctgtacccttacgcgtggat

SEQ ID NO: 34314 - RNA, 20 nt, synthetic construct
  source 1..20: mol_type = other RNA
ctgtactaagcctatgtaag

SEQ ID NO: 34315 - RNA, 20 nt, synthetic construct
  source 1..20: mol_type = other RNA
ctgtactactgacctgggag

SEQ ID NO: 34316 - RNA, 20 nt, synthetic construct
  source 1..20: mol_type = other RNA
ctgtactgtttagcatctag

SEQ ID NO: 34317 - RNA, 20 nt, synthetic construct
  source 1..20: mol_type = other RNA
ctgtagaaaatagggacggc

SEQ ID NO: 34318 - RNA, 20 nt, synthetic construct
  source 1..20: mol_type = other RNA
ctgtagaagtaaatatattc

SEQ ID NO: 34319 - RNA, 20 nt, synthetic construct
  source 1..20: mol_type = other RNA
ctgtagaatatccaagcaca

SEQ ID NO: 34320 - RNA, 20 nt, synthetic construct
  source 1..20: mol_type = other RNA
ctgtagaatgtttttccgtc

SEQ ID NO: 34321 - RNA, 20 nt, synthetic construct
  source 1..20: mol_type = other RNA
ctgtagagaaaatgttatac

SEQ ID NO: 34322 - RNA, 20 nt, synthetic construct
  source 1..20: mol_type = other RNA
ctgtagagatttttatcaaa

SEQ ID NO: 34323 - RNA, 20 nt, synthetic construct
  source 1..20: mol_type = other RNA
ctgtagataaacgttaacta

SEQ ID NO: 34324 - RNA, 20 nt, synthetic construct
  source 1..20: mol_type = other RNA
ctgtagattgggcttttcat

SEQ ID NO: 34325 - RNA, 20 nt, synthetic construct
  source 1..20: mol_type = other RNA
ctgtagattgttttaggtag

SEQ ID NO: 34326 - RNA, 20 nt, synthetic construct
  source 1..20: mol_type = other RNA
ctgtagcagacactgggttc

SEQ ID NO: 34327 - RNA, 20 nt, synthetic construct
  source 1..20: mol_type = other RNA
ctgtagcttcacgtgcattc

SEQ ID NO: 34328 - RNA, 20 nt, synthetic construct
  source 1..20: mol_type = other RNA
ctgtaggccccgatgccatg

SEQ ID NO: 34329 - RNA, 20 nt, synthetic construct
  source 1..20: mol_type = other RNA
ctgtagggtgactagtgtga

SEQ ID NO: 34330 - RNA, 20 nt, synthetic construct
  source 1..20: mol_type = other RNA
ctgtagtgattcacttttga

SEQ ID NO: 34331 - RNA, 20 nt, synthetic construct
  source 1..20: mol_type = other RNA
ctgtagttacaactactcgg

SEQ ID NO: 34332 - RNA, 20 nt, synthetic construct
  source 1..20: mol_type = other RNA
ctgtagttcagtttttcttt

SEQ ID NO: 34333 - RNA, 20 nt, synthetic construct
  source 1..20: mol_type = other RNA
ctgtagttttggtgtcattt

SEQ ID NO: 34334 - RNA, 20 nt, synthetic construct
  source 1..20: mol_type = other RNA
ctgtataaataaaatgtctg

SEQ ID NO: 34335 - RNA, 20 nt, synthetic construct
  source 1..20: mol_type = other RNA
ctgtataaatgttcagttta

SEQ ID NO: 34336 - RNA, 20 nt, synthetic construct
  source 1..20: mol_type = other RNA
ctgtataacattttctctac

SEQ ID NO: 34337 - RNA, 20 nt, synthetic construct
  source 1..20: mol_type = other RNA
ctgtatacccaggtgtgaga

SEQ ID NO: 34338 - RNA, 20 nt, synthetic construct
  source 1..20: mol_type = other RNA
ctgtatatctccttttaaga

SEQ ID NO: 34339 - RNA, 20 nt, synthetic construct
  source 1..20: mol_type = other RNA
ctgtatatgaaaagcttccc

SEQ ID NO: 34340 - RNA, 20 nt, synthetic construct
  source 1..20: mol_type = other RNA
ctgtatcttttcagtccaga

SEQ ID NO: 34341 - RNA, 20 nt, synthetic construct
  source 1..20: mol_type = other RNA
ctgtatgagaagactggaaa

SEQ ID NO: 34342 - RNA, 20 nt, synthetic construct
  source 1..20: mol_type = other RNA
ctgtatgccgctggtgaaaa

SEQ ID NO: 34343 - RNA, 20 nt, synthetic construct
  source 1..20: mol_type = other RNA
ctgtatggttcttaagatga

SEQ ID NO: 34344 - RNA, 20 nt, synthetic construct
  source 1..20: mol_type = other RNA
ctgtattaccagcttacagc

SEQ ID NO: 34345 - RNA, 20 nt, synthetic construct
  source 1..20: mol_type = other RNA
ctgtattaggatgtgtaccc

SEQ ID NO: 34346 - RNA, 20 nt, synthetic construct
  source 1..20: mol_type = other RNA
ctgtattgcaaactaagtgg

SEQ ID NO: 34347 - RNA, 20 nt, synthetic construct
  source 1..20: mol_type = other RNA
ctgtattgtaggaaagcctg

SEQ ID NO: 34348 - RNA, 20 nt, synthetic construct
  source 1..20: mol_type = other RNA
ctgtatttctgctttggtac

SEQ ID NO: 34349 - RNA, 20 nt, synthetic construct
  source 1..20: mol_type = other RNA
ctgtatttttgctcacactt

SEQ ID NO: 34350 - RNA, 20 nt, synthetic construct
  source 1..20: mol_type = other RNA
ctgtcaaaaagagaacacac

SEQ ID NO: 34351 - RNA, 20 nt, synthetic construct
  source 1..20: mol_type = other RNA
ctgtcaaaaatgtgtctagt

SEQ ID NO: 34352 - RNA, 20 nt, synthetic construct
  source 1..20: mol_type = other RNA
ctgtcacaattcacagaata

SEQ ID NO: 34353 - RNA, 20 nt, synthetic construct
  source 1..20: mol_type = other RNA
ctgtcacaggctttcctaca

SEQ ID NO: 34354 - RNA, 20 nt, synthetic construct
  source 1..20: mol_type = other RNA
ctgtcacatagacctgaatg

SEQ ID NO: 34355 - RNA, 20 nt, synthetic construct
  source 1..20: mol_type = other RNA
ctgtcacatttgaaagaaag

SEQ ID NO: 34356 - RNA, 20 nt, synthetic construct
  source 1..20: mol_type = other RNA
ctgtcacccacgtggagtgc

SEQ ID NO: 34357 - RNA, 20 nt, synthetic construct
  source 1..20: mol_type = other RNA
ctgtcacccttgtaatcaag

SEQ ID NO: 34358 - RNA, 20 nt, synthetic construct
  source 1..20: mol_type = other RNA
ctgtcacggtgccctacata

SEQ ID NO: 34359 - RNA, 20 nt, synthetic construct
  source 1..20: mol_type = other RNA
ctgtcactctctttaggaag

SEQ ID NO: 34360 - RNA, 20 nt, synthetic construct
  source 1..20: mol_type = other RNA
ctgtcactgacacaggctga

SEQ ID NO: 34361 - RNA, 20 nt, synthetic construct
  source 1..20: mol_type = other RNA
ctgtcactttcctattcaca

SEQ ID NO: 34362 - RNA, 20 nt, synthetic construct
  source 1..20: mol_type = other RNA
ctgtcagaaacaccaacaca

SEQ ID NO: 34363 - RNA, 20 nt, synthetic construct
  source 1..20: mol_type = other RNA
ctgtcagcagttcagcctgc

SEQ ID NO: 34364 - RNA, 20 nt, synthetic construct
  source 1..20: mol_type = other RNA
ctgtcaggcaagggactgtc

SEQ ID NO: 34365 - RNA, 20 nt, synthetic construct
  source 1..20: mol_type = other RNA
ctgtcagtgggactggagaa

SEQ ID NO: 34366 - RNA, 20 nt, synthetic construct
  source 1..20: mol_type = other RNA
ctgtcagtgtggttcatatt

SEQ ID NO: 34367 - RNA, 20 nt, synthetic construct
  source 1..20: mol_type = other RNA
ctgtcagtttctgatttatc

SEQ ID NO: 34368 - RNA, 20 nt, synthetic construct
  source 1..20: mol_type = other RNA
ctgtcatcagcgtcctcact

SEQ ID NO: 34369 - RNA, 20 nt, synthetic construct
  source 1..20: mol_type = other RNA
ctgtcatctgaatcaataag

SEQ ID NO: 34370 - RNA, 20 nt, synthetic construct
  source 1..20: mol_type = other RNA
ctgtcatggtgtgtctgcgc

SEQ ID NO: 34371 - RNA, 20 nt, synthetic construct
  source 1..20: mol_type = other RNA
ctgtcatgtcaaatttttca

SEQ ID NO: 34372 - RNA, 20 nt, synthetic construct
  source 1..20: mol_type = other RNA
ctgtcatgtttgaattttcc

SEQ ID NO: 34373 - RNA, 20 nt, synthetic construct
  source 1..20: mol_type = other RNA
ctgtcattctgcagtttgtg

SEQ ID NO: 34374 - RNA, 20 nt, synthetic construct
  source 1..20: mol_type = other RNA
ctgtccaaacagtgaccaca

SEQ ID NO: 34375 - RNA, 20 nt, synthetic construct
  source 1..20: mol_type = other RNA
ctgtccaacaagggttggtg

SEQ ID NO: 34376 - RNA, 20 nt, synthetic construct
  source 1..20: mol_type = other RNA
ctgtccaacatggcaaaacc

SEQ ID NO: 34377 - RNA, 20 nt, synthetic construct
  source 1..20: mol_type = other RNA
ctgtccaagtatttctcatc

SEQ ID NO: 34378 - RNA, 20 nt, synthetic construct
  source 1..20: mol_type = other RNA
ctgtccaggcgcctgcattg

SEQ ID NO: 34379 - RNA, 20 nt, synthetic construct
  source 1..20: mol_type = other RNA
ctgtccatttccagtacttt

SEQ ID NO: 34380 - RNA, 20 nt, synthetic construct
  source 1..20: mol_type = other RNA
ctgtccatttccttaagcac

SEQ ID NO: 34381 - RNA, 20 nt, synthetic construct
  source 1..20: mol_type = other RNA
ctgtcccaaatgcaccaaca

SEQ ID NO: 34382 - RNA, 20 nt, synthetic construct
  source 1..20: mol_type = other RNA
ctgtccccaccgccttccta

SEQ ID NO: 34383 - RNA, 20 nt, synthetic construct
  source 1..20: mol_type = other RNA
ctgtcctcgtaaaagctaat

SEQ ID NO: 34384 - RNA, 20 nt, synthetic construct
  source 1..20: mol_type = other RNA
ctgtcctctcttgttgagga

SEQ ID NO: 34385 - RNA, 20 nt, synthetic construct
  source 1..20: mol_type = other RNA
ctgtcctgaatactattcct

SEQ ID NO: 34386 - RNA, 20 nt, synthetic construct
  source 1..20: mol_type = other RNA
ctgtcctgaattctaacatt

SEQ ID NO: 34387 - RNA, 20 nt, synthetic construct
  source 1..20: mol_type = other RNA
ctgtcctgaattctaatgaa

SEQ ID NO: 34388 - RNA, 20 nt, synthetic construct
  source 1..20: mol_type = other RNA
ctgtcctgtcagtgtggttc

SEQ ID NO: 34389 - RNA, 20 nt, synthetic construct
  source 1..20: mol_type = other RNA
ctgtccttctcgtgtgagct

SEQ ID NO: 34390 - RNA, 20 nt, synthetic construct
  source 1..20: mol_type = other RNA
ctgtccttggattgctaaac

SEQ ID NO: 34391 - RNA, 20 nt, synthetic construct
  source 1..20: mol_type = other RNA
ctgtccttgtgttttatttg

SEQ ID NO: 34392 - RNA, 20 nt, synthetic construct
  source 1..20: mol_type = other RNA
ctgtcgaagcttaatttaga

SEQ ID NO: 34393 - RNA, 20 nt, synthetic construct
  source 1..20: mol_type = other RNA
ctgtcgcccaggcggaatgc

SEQ ID NO: 34394 - RNA, 20 nt, synthetic construct
  source 1..20: mol_type = other RNA
ctgtcgctctcctgtgccaa

SEQ ID NO: 34395 - RNA, 20 nt, synthetic construct
  source 1..20: mol_type = other RNA
ctgtcggttttctagttagt

SEQ ID NO: 34396 - RNA, 20 nt, synthetic construct
  source 1..20: mol_type = other RNA
ctgtcgtttatgcatttatt

SEQ ID NO: 34397 - RNA, 20 nt, synthetic construct
  source 1..20: mol_type = other RNA
ctgtctataggcaatgagtc

SEQ ID NO: 34398 - RNA, 20 nt, synthetic construct
  source 1..20: mol_type = other RNA
ctgtctcacctcaaggccaa

SEQ ID NO: 34399 - RNA, 20 nt, synthetic construct
  source 1..20: mol_type = other RNA
ctgtctcagagtatatatgc

SEQ ID NO: 34400 - RNA, 20 nt, synthetic construct
  source 1..20: mol_type = other RNA
ctgtctcagtcccaaatggg

SEQ ID NO: 34401 - RNA, 20 nt, synthetic construct
  source 1..20: mol_type = other RNA
ctgtctccaacgctttttat

SEQ ID NO: 34402 - RNA, 20 nt, synthetic construct
  source 1..20: mol_type = other RNA
ctgtctccatgtcctcacct

SEQ ID NO: 34403 - RNA, 20 nt, synthetic construct
  source 1..20: mol_type = other RNA
ctgtctctaaaaaataccaa

SEQ ID NO: 34404 - RNA, 20 nt, synthetic construct
  source 1..20: mol_type = other RNA
ctgtctggattgattccagt

SEQ ID NO: 34405 - RNA, 20 nt, synthetic construct
  source 1..20: mol_type = other RNA
ctgtctgggaagttatgtag

SEQ ID NO: 34406 - RNA, 20 nt, synthetic construct
  source 1..20: mol_type = other RNA
ctgtctgggataatgagttt

SEQ ID NO: 34407 - RNA, 20 nt, synthetic construct
  source 1..20: mol_type = other RNA
ctgtctgtgaaaataatacc

SEQ ID NO: 34408 - RNA, 20 nt, synthetic construct
  source 1..20: mol_type = other RNA
ctgtctgtgatgtagaggca

SEQ ID NO: 34409 - RNA, 20 nt, synthetic construct
  source 1..20: mol_type = other RNA
ctgtctgttcacatttcgcc

SEQ ID NO: 34410 - RNA, 20 nt, synthetic construct
  source 1..20: mol_type = other RNA
ctgtcttgatgatagaatac

SEQ ID NO: 34411 - RNA, 20 nt, synthetic construct
  source 1..20: mol_type = other RNA
ctgtcttggacccatgccca

SEQ ID NO: 34412 - RNA, 20 nt, synthetic construct
  source 1..20: mol_type = other RNA
ctgtcttgtgcatcctttat

SEQ ID NO: 34413 - RNA, 20 nt, synthetic construct
  source 1..20: mol_type = other RNA
ctgtctttcagtatgtgtct

SEQ ID NO: 34414 - RNA, 20 nt, synthetic construct
  source 1..20: mol_type = other RNA
ctgtctttcccattaccaaa

SEQ ID NO: 34415 - RNA, 20 nt, synthetic construct
  source 1..20: mol_type = other RNA
ctgtctttctgtctgctttt

SEQ ID NO: 34416 - RNA, 20 nt, synthetic construct
  source 1..20: mol_type = other RNA
ctgtctttggcccatatcct

SEQ ID NO: 34417 - RNA, 20 nt, synthetic construct
  source 1..20: mol_type = other RNA
ctgtgaaaaaacaaaacaaa

SEQ ID NO: 34418 - RNA, 20 nt, synthetic construct
  source 1..20: mol_type = other RNA
ctgtgaaaataatacctaac

SEQ ID NO: 34419 - RNA, 20 nt, synthetic construct
  source 1..20: mol_type = other RNA
ctgtgaaaatcattttggca

SEQ ID NO: 34420 - RNA, 20 nt, synthetic construct
  source 1..20: mol_type = other RNA
ctgtgaatgtgaggtgagga

SEQ ID NO: 34421 - RNA, 20 nt, synthetic construct
  source 1..20: mol_type = other RNA
ctgtgaattcactaatgcct

SEQ ID NO: 34422 - RNA, 20 nt, synthetic construct
  source 1..20: mol_type = other RNA
ctgtgaattgtgacagttct

SEQ ID NO: 34423 - RNA, 20 nt, synthetic construct
  source 1..20: mol_type = other RNA
ctgtgaatttgattatgtta

SEQ ID NO: 34424 - RNA, 20 nt, synthetic construct
  source 1..20: mol_type = other RNA
ctgtgaatttggatttgagt

SEQ ID NO: 34425 - RNA, 20 nt, synthetic construct
  source 1..20: mol_type = other RNA
ctgtgacagtatgtcagact

SEQ ID NO: 34426 - RNA, 20 nt, synthetic construct
  source 1..20: mol_type = other RNA
ctgtgactccaaagcaaacc

SEQ ID NO: 34427 - RNA, 20 nt, synthetic construct
  source 1..20: mol_type = other RNA
ctgtgagccactaaaacagg

SEQ ID NO: 34428 - RNA, 20 nt, synthetic construct
  source 1..20: mol_type = other RNA
ctgtgagggagatatttcgc

SEQ ID NO: 34429 - RNA, 20 nt, synthetic construct
  source 1..20: mol_type = other RNA
ctgtgagggtaagaaaggag

SEQ ID NO: 34430 - RNA, 20 nt, synthetic construct
  source 1..20: mol_type = other RNA
ctgtgagtccttccagtatg

SEQ ID NO: 34431 - RNA, 20 nt, synthetic construct
  source 1..20: mol_type = other RNA
ctgtgatacctagtacgtaa

SEQ ID NO: 34432 - RNA, 20 nt, synthetic construct
  source 1..20: mol_type = other RNA
ctgtgatcagaagagcacta

SEQ ID NO: 34433 - RNA, 20 nt, synthetic construct
  source 1..20: mol_type = other RNA
ctgtgatccctgatatgtcg

SEQ ID NO: 34434 - RNA, 20 nt, synthetic construct
  source 1..20: mol_type = other RNA
ctgtgatgactgtaagctga

SEQ ID NO: 34435 - RNA, 20 nt, synthetic construct
  source 1..20: mol_type = other RNA
ctgtgatgattttagaaggt

SEQ ID NO: 34436 - RNA, 20 nt, synthetic construct
  source 1..20: mol_type = other RNA
ctgtgatgtagaggcagttg

SEQ ID NO: 34437 - RNA, 20 nt, synthetic construct
  source 1..20: mol_type = other RNA
ctgtgattacaattcctttc

SEQ ID NO: 34438 - RNA, 20 nt, synthetic construct
  source 1..20: mol_type = other RNA
ctgtgattaccggcatccgc

SEQ ID NO: 34439 - RNA, 20 nt, synthetic construct
  source 1..20: mol_type = other RNA
ctgtgattatcagggatatt

SEQ ID NO: 34440 - RNA, 20 nt, synthetic construct
  source 1..20: mol_type = other RNA
ctgtgattgcaggtgtgggc

SEQ ID NO: 34441 - RNA, 20 nt, synthetic construct
  source 1..20: mol_type = other RNA
ctgtgatttatgtggcattt

SEQ ID NO: 34442 - RNA, 20 nt, synthetic construct
  source 1..20: mol_type = other RNA
ctgtgatttccagtgtttgg

SEQ ID NO: 34443 - RNA, 20 nt, synthetic construct
  source 1..20: mol_type = other RNA
ctgtgcagtggatgactagg

SEQ ID NO: 34444 - RNA, 20 nt, synthetic construct
  source 1..20: mol_type = other RNA
ctgtgccaactctggcaggt

SEQ ID NO: 34445 - RNA, 20 nt, synthetic construct
  source 1..20: mol_type = other RNA
ctgtgccaagcaacttgatc

SEQ ID NO: 34446 - RNA, 20 nt, synthetic construct
  source 1..20: mol_type = other RNA
ctgtgccaagtccgtgcatg

SEQ ID NO: 34447 - RNA, 20 nt, synthetic construct
  source 1..20: mol_type = other RNA
ctgtgccagtgcaaacctcc

SEQ ID NO: 34448 - RNA, 20 nt, synthetic construct
  source 1..20: mol_type = other RNA
ctgtgccgaggcagagagag

SEQ ID NO: 34449 - RNA, 20 nt, synthetic construct
  source 1..20: mol_type = other RNA
ctgtgccttgatccattaca

SEQ ID NO: 34450 - RNA, 20 nt, synthetic construct
  source 1..20: mol_type = other RNA
ctgtgcgtgaatctgttcct

SEQ ID NO: 34451 - RNA, 20 nt, synthetic construct
  source 1..20: mol_type = other RNA
ctgtgctagatgctaaacag

SEQ ID NO: 34452 - RNA, 20 nt, synthetic construct
  source 1..20: mol_type = other RNA
ctgtgctagccttcttggag

SEQ ID NO: 34453 - RNA, 20 nt, synthetic construct
  source 1..20: mol_type = other RNA
ctgtgctctgtatttaatct

SEQ ID NO: 34454 - RNA, 20 nt, synthetic construct
  source 1..20: mol_type = other RNA
ctgtgctgagatggtcagta

SEQ ID NO: 34455 - RNA, 20 nt, synthetic construct
  source 1..20: mol_type = other RNA
ctgtgcttaaatttttgaga

SEQ ID NO: 34456 - RNA, 20 nt, synthetic construct
  source 1..20: mol_type = other RNA
ctgtgcttaaggaaatggac

SEQ ID NO: 34457 - RNA, 20 nt, synthetic construct
  source 1..20: mol_type = other RNA
ctgtgcttccacagctatca

SEQ ID NO: 34458 - RNA, 20 nt, synthetic construct
  source 1..20: mol_type = other RNA
ctgtgcttgtctctctcttt

SEQ ID NO: 34459 - RNA, 20 nt, synthetic construct
  source 1..20: mol_type = other RNA
ctgtgcttgtgcttttaata

SEQ ID NO: 34460 - RNA, 20 nt, synthetic construct
  source 1..20: mol_type = other RNA
ctgtgcttttctcgtgcatg

SEQ ID NO: 34461 - RNA, 20 nt, synthetic construct
  source 1..20: mol_type = other RNA
ctgtggaagcacagtctctg

SEQ ID NO: 34462 - RNA, 20 nt, synthetic construct
  source 1..20: mol_type = other RNA
ctgtggaccatgttttagga

SEQ ID NO: 34463 - RNA, 20 nt, synthetic construct
  source 1..20: mol_type = other RNA
ctgtggactttaggctgttc

SEQ ID NO: 34464 - RNA, 20 nt, synthetic construct
  source 1..20: mol_type = other RNA
ctgtggaggcagtaccattc

SEQ ID NO: 34465 - RNA, 20 nt, synthetic construct
  source 1..20: mol_type = other RNA
ctgtggagtcctgtcagttt

SEQ ID NO: 34466 - RNA, 20 nt, synthetic construct
  source 1..20: mol_type = other RNA
ctgtggatatcttttaaaaa

SEQ ID NO: 34467 - RNA, 20 nt, synthetic construct
  source 1..20: mol_type = other RNA
ctgtggatgttggtgagaac

SEQ ID NO: 34468 - RNA, 20 nt, synthetic construct
  source 1..20: mol_type = other RNA
ctgtggccgagggagacggc

SEQ ID NO: 34469 - RNA, 20 nt, synthetic construct
  source 1..20: mol_type = other RNA
ctgtggctaacaatcaaatt

SEQ ID NO: 34470 - RNA, 20 nt, synthetic construct
  source 1..20: mol_type = other RNA
ctgtggctcactcatttccg

SEQ ID NO: 34471 - RNA, 20 nt, synthetic construct
  source 1..20: mol_type = other RNA
ctgtggcttgggtgacctca

SEQ ID NO: 34472 - RNA, 20 nt, synthetic construct
  source 1..20: mol_type = other RNA
ctgtgggttaaaagttagct

SEQ ID NO: 34473 - RNA, 20 nt, synthetic construct
  source 1..20: mol_type = other RNA
ctgtggtcactgtttggaca

SEQ ID NO: 34474 - RNA, 20 nt, synthetic construct
  source 1..20: mol_type = other RNA
ctgtggtccctgctactcag

SEQ ID NO: 34475 - RNA, 20 nt, synthetic construct
  source 1..20: mol_type = other RNA
ctgtggtctcagctcctcag

SEQ ID NO: 34476 - RNA, 20 nt, synthetic construct
  source 1..20: mol_type = other RNA
ctgtggtctcttcgaggggg

SEQ ID NO: 34477 - RNA, 20 nt, synthetic construct
  source 1..20: mol_type = other RNA
ctgtggtttcttgaatctct

SEQ ID NO: 34478 - RNA, 20 nt, synthetic construct
  source 1..20: mol_type = other RNA
ctgtgtaatactgtagaatg

SEQ ID NO: 34479 - RNA, 20 nt, synthetic construct
  source 1..20: mol_type = other RNA
ctgtgtagttcatcagcata

SEQ ID NO: 34480 - RNA, 20 nt, synthetic construct
  source 1..20: mol_type = other RNA
ctgtgtatgtgtagtcagtg

SEQ ID NO: 34481 - RNA, 20 nt, synthetic construct
  source 1..20: mol_type = other RNA
ctgtgtcagtgacagttctg

SEQ ID NO: 34482 - RNA, 20 nt, synthetic construct
  source 1..20: mol_type = other RNA
ctgtgtgcatgcatgtctgt

SEQ ID NO: 34483 - RNA, 20 nt, synthetic construct
  source 1..20: mol_type = other RNA
ctgtgtgcatgctcccattt

SEQ ID NO: 34484 - RNA, 20 nt, synthetic construct
  source 1..20: mol_type = other RNA
ctgtgtgcttggagtcactt

SEQ ID NO: 34485 - RNA, 20 nt, synthetic construct
  source 1..20: mol_type = other RNA
ctgtgtggcttctcaaactg

SEQ ID NO: 34486 - RNA, 20 nt, synthetic construct
  source 1..20: mol_type = other RNA
ctgtgtggtttgccttttca

SEQ ID NO: 34487 - RNA, 20 nt, synthetic construct
  source 1..20: mol_type = other RNA
ctgtgtgtgtccaggccaac

SEQ ID NO: 34488 - RNA, 20 nt, synthetic construct
  source 1..20: mol_type = other RNA
ctgtgttacattgccttcgc

SEQ ID NO: 34489 - RNA, 20 nt, synthetic construct
  source 1..20: mol_type = other RNA
ctgtgttcttttccttctta

SEQ ID NO: 34490 - RNA, 20 nt, synthetic construct
  source 1..20: mol_type = other RNA
ctgtgtttatgaatgatgcc

SEQ ID NO: 34491 - RNA, 20 nt, synthetic construct
  source 1..20: mol_type = other RNA
ctgtgtttctgctattctct

SEQ ID NO: 34492 - RNA, 20 nt, synthetic construct
  source 1..20: mol_type = other RNA
ctgttaaaagatacgaaaat

SEQ ID NO: 34493 - RNA, 20 nt, synthetic construct
  source 1..20: mol_type = other RNA
ctgttaactgacttacagac

SEQ ID NO: 34494 - RNA, 20 nt, synthetic construct
  source 1..20: mol_type = other RNA
ctgttaatagataggtcatg

SEQ ID NO: 34495 - RNA, 20 nt, synthetic construct
  source 1..20: mol_type = other RNA
ctgttaatgggcacttggga

SEQ ID NO: 34496 - RNA, 20 nt, synthetic construct
  source 1..20: mol_type = other RNA
ctgttaatggttagactgca

SEQ ID NO: 34497 - RNA, 20 nt, synthetic construct
  source 1..20: mol_type = other RNA
ctgttaatgtgatatgccac

SEQ ID NO: 34498 - RNA, 20 nt, synthetic construct
  source 1..20: mol_type = other RNA
ctgttacagctcttctcagt

SEQ ID NO: 34499 - RNA, 20 nt, synthetic construct
  source 1..20: mol_type = other RNA
ctgttacatggttctgtgct

SEQ ID NO: 34500 - RNA, 20 nt, synthetic construct
  source 1..20: mol_type = other RNA
ctgttaccatttgaccttcc

SEQ ID NO: 34501 - RNA, 20 nt, synthetic construct
  source 1..20: mol_type = other RNA
ctgttactcccgatttcagt

SEQ ID NO: 34502 - RNA, 20 nt, synthetic construct
  source 1..20: mol_type = other RNA
ctgttacttgactattttac

SEQ ID NO: 34503 - RNA, 20 nt, synthetic construct
  source 1..20: mol_type = other RNA
ctgttagatggtgctgattt

SEQ ID NO: 34504 - RNA, 20 nt, synthetic construct
  source 1..20: mol_type = other RNA
ctgttagccttgccattctc

SEQ ID NO: 34505 - RNA, 20 nt, synthetic construct
  source 1..20: mol_type = other RNA
ctgttagggacttatggaga

SEQ ID NO: 34506 - RNA, 20 nt, synthetic construct
  source 1..20: mol_type = other RNA
ctgttaggtattattttcac

SEQ ID NO: 34507 - RNA, 20 nt, synthetic construct
  source 1..20: mol_type = other RNA
ctgttagtcccctagtggat

SEQ ID NO: 34508 - RNA, 20 nt, synthetic construct
  source 1..20: mol_type = other RNA
ctgttatctgggaacagccc

SEQ ID NO: 34509 - RNA, 20 nt, synthetic construct
  source 1..20: mol_type = other RNA
ctgttatgacaagactacct

SEQ ID NO: 34510 - RNA, 20 nt, synthetic construct
  source 1..20: mol_type = other RNA
ctgttattagagttgtaaca

SEQ ID NO: 34511 - RNA, 20 nt, synthetic construct
  source 1..20: mol_type = other RNA
ctgttcaatttagaaaatgc

SEQ ID NO: 34512 - RNA, 20 nt, synthetic construct
  source 1..20: mol_type = other RNA
ctgttcacatttcgccttct

SEQ ID NO: 34513 - RNA, 20 nt, synthetic construct
  source 1..20: mol_type = other RNA
ctgttcatttgagaatttca

SEQ ID NO: 34514 - RNA, 20 nt, synthetic construct
  source 1..20: mol_type = other RNA
ctgttccaggcctcgctctt

SEQ ID NO: 34515 - RNA, 20 nt, synthetic construct
  source 1..20: mol_type = other RNA
ctgttccatcggtctgtatt

SEQ ID NO: 34516 - RNA, 20 nt, synthetic construct
  source 1..20: mol_type = other RNA
ctgttcccaagcaagtgtgg

SEQ ID NO: 34517 - RNA, 20 nt, synthetic construct
  source 1..20: mol_type = other RNA
ctgttcccagataacagtgg

SEQ ID NO: 34518 - RNA, 20 nt, synthetic construct
  source 1..20: mol_type = other RNA
ctgttccccaagccaaatta

SEQ ID NO: 34519 - RNA, 20 nt, synthetic construct
  source 1..20: mol_type = other RNA
ctgttccgattttacttact

SEQ ID NO: 34520 - RNA, 20 nt, synthetic construct
  source 1..20: mol_type = other RNA
ctgttccgggatcctgtcca

SEQ ID NO: 34521 - RNA, 20 nt, synthetic construct
  source 1..20: mol_type = other RNA
ctgttcctgggttctccctt

SEQ ID NO: 34522 - RNA, 20 nt, synthetic construct
  source 1..20: mol_type = other RNA
ctgttctagctcctgggaaa

SEQ ID NO: 34523 - RNA, 20 nt, synthetic construct
  source 1..20: mol_type = other RNA
ctgttctcagtatcctttca

SEQ ID NO: 34524 - RNA, 20 nt, synthetic construct
  source 1..20: mol_type = other RNA
ctgttctccagtcccactga

SEQ ID NO: 34525 - RNA, 20 nt, synthetic construct
  source 1..20: mol_type = other RNA
ctgttctctgtgtggtttgc

SEQ ID NO: 34526 - RNA, 20 nt, synthetic construct
  source 1..20: mol_type = other RNA
ctgttctgttccatcggtct

SEQ ID NO: 34527 - RNA, 20 nt, synthetic construct
  source 1..20: mol_type = other RNA
ctgttctttggagctgtatt

SEQ ID NO: 34528 - RNA, 20 nt, synthetic construct
  source 1..20: mol_type = other RNA
ctgttctttgttagtttatt

SEQ ID NO: 34529 - RNA, 20 nt, synthetic construct
  source 1..20: mol_type = other RNA
ctgttcttttgtaatctaag

SEQ ID NO: 34530 - RNA, 20 nt, synthetic construct
  source 1..20: mol_type = other RNA
ctgttgaatagcaactgttt

SEQ ID NO: 34531 - RNA, 20 nt, synthetic construct
  source 1..20: mol_type = other RNA
ctgttgaattgttgcgcgtc

SEQ ID NO: 34532 - RNA, 20 nt, synthetic construct
  source 1..20: mol_type = other RNA
ctgttgaggctgggccctgt

SEQ ID NO: 34533 - RNA, 20 nt, synthetic construct
  source 1..20: mol_type = other RNA
ctgttgatggacgtttgagt

SEQ ID NO: 34534 - RNA, 20 nt, synthetic construct
  source 1..20: mol_type = other RNA
ctgttgattgttgccatcat

SEQ ID NO: 34535 - RNA, 20 nt, synthetic construct
  source 1..20: mol_type = other RNA
ctgttgatttagaaatacct

SEQ ID NO: 34536 - RNA, 20 nt, synthetic construct
  source 1..20: mol_type = other RNA
ctgttgcaaattattttcct

SEQ ID NO: 34537 - RNA, 20 nt, synthetic construct
  source 1..20: mol_type = other RNA
ctgttgcagtccccggtctt

SEQ ID NO: 34538 - RNA, 20 nt, synthetic construct
  source 1..20: mol_type = other RNA
ctgttgcccagactggagtt

SEQ ID NO: 34539 - RNA, 20 nt, synthetic construct
  source 1..20: mol_type = other RNA
ctgttgcctctgtgctagcc

SEQ ID NO: 34540 - RNA, 20 nt, synthetic construct
  source 1..20: mol_type = other RNA
ctgttgcttaagtcactcca

SEQ ID NO: 34541 - RNA, 20 nt, synthetic construct
  source 1..20: mol_type = other RNA
ctgttgctttaacctctggt

SEQ ID NO: 34542 - RNA, 20 nt, synthetic construct
  source 1..20: mol_type = other RNA
ctgttggaaaaatcgtcctc

SEQ ID NO: 34543 - RNA, 20 nt, synthetic construct
  source 1..20: mol_type = other RNA
ctgttggagagatggtagtc

SEQ ID NO: 34544 - RNA, 20 nt, synthetic construct
  source 1..20: mol_type = other RNA
ctgttggcctggacacacac

SEQ ID NO: 34545 - RNA, 20 nt, synthetic construct
  source 1..20: mol_type = other RNA
ctgttgggaggtttttgatt

SEQ ID NO: 34546 - RNA, 20 nt, synthetic construct
  source 1..20: mol_type = other RNA
ctgttgggctattaagtatt

SEQ ID NO: 34547 - RNA, 20 nt, synthetic construct
  source 1..20: mol_type = other RNA
ctgttggtgcttagctgcct

SEQ ID NO: 34548 - RNA, 20 nt, synthetic construct
  source 1..20: mol_type = other RNA
ctgttgtaatgttacttctc

SEQ ID NO: 34549 - RNA, 20 nt, synthetic construct
  source 1..20: mol_type = other RNA
ctgttgtattttacaccatg

SEQ ID NO: 34550 - RNA, 20 nt, synthetic construct
  source 1..20: mol_type = other RNA
ctgttgtgaggattcgatta

SEQ ID NO: 34551 - RNA, 20 nt, synthetic construct
  source 1..20: mol_type = other RNA
ctgtttaaaaagaaaaagct

SEQ ID NO: 34552 - RNA, 20 nt, synthetic construct
  source 1..20: mol_type = other RNA
ctgtttacattagagaagaa

SEQ ID NO: 34553 - RNA, 20 nt, synthetic construct
  source 1..20: mol_type = other RNA
ctgtttaccaagggtgtgtt

SEQ ID NO: 34554 - RNA, 20 nt, synthetic construct
  source 1..20: mol_type = other RNA
ctgtttacccttactaaatt

SEQ ID NO: 34555 - RNA, 20 nt, synthetic construct
  source 1..20: mol_type = other RNA
ctgtttagcatctagcacag

SEQ ID NO: 34556 - RNA, 20 nt, synthetic construct
  source 1..20: mol_type = other RNA
ctgtttcccttaatgttgac

SEQ ID NO: 34557 - RNA, 20 nt, synthetic construct
  source 1..20: mol_type = other RNA
ctgtttcctaatctaacatg

SEQ ID NO: 34558 - RNA, 20 nt, synthetic construct
  source 1..20: mol_type = other RNA
ctgtttccttaccagtgctt

SEQ ID NO: 34559 - RNA, 20 nt, synthetic construct
  source 1..20: mol_type = other RNA
ctgtttctctacatctggat

SEQ ID NO: 34560 - RNA, 20 nt, synthetic construct
  source 1..20: mol_type = other RNA
ctgtttctgtgaaaaaacaa

SEQ ID NO: 34561 - RNA, 20 nt, synthetic construct
  source 1..20: mol_type = other RNA
ctgtttcttagctatattca

SEQ ID NO: 34562 - RNA, 20 nt, synthetic construct
  source 1..20: mol_type = other RNA
ctgtttgagaagtcttttcc

SEQ ID NO: 34563 - RNA, 20 nt, synthetic construct
  source 1..20: mol_type = other RNA
ctgtttgagatctttcttat

SEQ ID NO: 34564 - RNA, 20 nt, synthetic construct
  source 1..20: mol_type = other RNA
ctgtttgagctgaaagtaaa

SEQ ID NO: 34565 - RNA, 20 nt, synthetic construct
  source 1..20: mol_type = other RNA
ctgtttgattactgtagctt

SEQ ID NO: 34566 - RNA, 20 nt, synthetic construct
  source 1..20: mol_type = other RNA
ctgtttgccatcttcaagat

SEQ ID NO: 34567 - RNA, 20 nt, synthetic construct
  source 1..20: mol_type = other RNA
ctgtttgcctgcgtccgtag

SEQ ID NO: 34568 - RNA, 20 nt, synthetic construct
  source 1..20: mol_type = other RNA
ctgtttggatgaaaaagtac

SEQ ID NO: 34569 - RNA, 20 nt, synthetic construct
  source 1..20: mol_type = other RNA
ctgtttggctgggagcttat

SEQ ID NO: 34570 - RNA, 20 nt, synthetic construct
  source 1..20: mol_type = other RNA
ctgtttgtttgttttgagac

SEQ ID NO: 34571 - RNA, 20 nt, synthetic construct
  source 1..20: mol_type = other RNA
ctgttttacatgtttaacta

SEQ ID NO: 34572 - RNA, 20 nt, synthetic construct
  source 1..20: mol_type = other RNA
ctgttttagtggctcacagt

SEQ ID NO: 34573 - RNA, 20 nt, synthetic construct
  source 1..20: mol_type = other RNA
ctgttttcatgcgacatatc

SEQ ID NO: 34574 - RNA, 20 nt, synthetic construct
  source 1..20: mol_type = other RNA
ctgttttcatttattctgtt

SEQ ID NO: 34575 - RNA, 20 nt, synthetic construct
  source 1..20: mol_type = other RNA
ctgttttccacagtgacttt

SEQ ID NO: 34576 - RNA, 20 nt, synthetic construct
  source 1..20: mol_type = other RNA
ctgttttcttactgatttat

SEQ ID NO: 34577 - RNA, 20 nt, synthetic construct
  source 1..20: mol_type = other RNA
ctgttttgcttactgtagca

SEQ ID NO: 34578 - RNA, 20 nt, synthetic construct
  source 1..20: mol_type = other RNA
ctgttttggtaaaatgtggc

SEQ ID NO: 34579 - RNA, 20 nt, synthetic construct
  source 1..20: mol_type = other RNA
ctgtttttcaaaatgagatc

SEQ ID NO: 34580 - RNA, 20 nt, synthetic construct
  source 1..20: mol_type = other RNA
ctgtttttcttagtctagcc

SEQ ID NO: 34581 - RNA, 20 nt, synthetic construct
  source 1..20: mol_type = other RNA
ctgtttttgaaaagaacaac

SEQ ID NO: 34582 - RNA, 20 nt, synthetic construct
  source 1..20: mol_type = other RNA
ctgtttttgcaatttatatg

SEQ ID NO: 34583 - RNA, 20 nt, synthetic construct
  source 1..20: mol_type = other RNA
ctgttttttcctcccttcag

SEQ ID NO: 34584 - RNA, 20 nt, synthetic construct
  source 1..20: mol_type = other RNA
cttaaaaaaggtttttgaac

SEQ ID NO: 34585 - RNA, 20 nt, synthetic construct
  source 1..20: mol_type = other RNA
cttaaaaaatgcgcgtccgc

SEQ ID NO: 34586 - RNA, 20 nt, synthetic construct
  source 1..20: mol_type = other RNA
cttaaaaatgacaccaaaac

SEQ ID NO: 34587 - RNA, 20 nt, synthetic construct
  source 1..20: mol_type = other RNA
cttaaaactttaggtcagaa

SEQ ID NO: 34588 - RNA, 20 nt, synthetic construct
  source 1..20: mol_type = other RNA
cttaaaagagtgaaatgatt

SEQ ID NO: 34589 - RNA, 20 nt, synthetic construct
  source 1..20: mol_type = other RNA
cttaaaaggaactaatttca

SEQ ID NO: 34590 - RNA, 20 nt, synthetic construct
  source 1..20: mol_type = other RNA
cttaaaaggagatatacagg

SEQ ID NO: 34591 - RNA, 20 nt, synthetic construct
  source 1..20: mol_type = other RNA
cttaaaagtgctgcagtatg

SEQ ID NO: 34592 - RNA, 20 nt, synthetic construct
  source 1..20: mol_type = other RNA
cttaaaataccagaggttaa

SEQ ID NO: 34593 - RNA, 20 nt, synthetic construct
  source 1..20: mol_type = other RNA
cttaaaattcttccagcctg

SEQ ID NO: 34594 - RNA, 20 nt, synthetic construct
  source 1..20: mol_type = other RNA
cttaaaatttagatctcatg

SEQ ID NO: 34595 - RNA, 20 nt, synthetic construct
  source 1..20: mol_type = other RNA
cttaaaccatatacaaaact

SEQ ID NO: 34596 - RNA, 20 nt, synthetic construct
  source 1..20: mol_type = other RNA
cttaaactgccaaaccctac

SEQ ID NO: 34597 - RNA, 20 nt, synthetic construct
  source 1..20: mol_type = other RNA
cttaaagatgccatttataa

SEQ ID NO: 34598 - RNA, 20 nt, synthetic construct
  source 1..20: mol_type = other RNA
cttaaagccacactcttggt

SEQ ID NO: 34599 - RNA, 20 nt, synthetic construct
  source 1..20: mol_type = other RNA
cttaaagcctctcaacactt

SEQ ID NO: 34600 - RNA, 20 nt, synthetic construct
  source 1..20: mol_type = other RNA
cttaaagcgctactcagctg

SEQ ID NO: 34601 - RNA, 20 nt, synthetic construct
  source 1..20: mol_type = other RNA
cttaaaggtttggagtttgt

SEQ ID NO: 34602 - RNA, 20 nt, synthetic construct
  source 1..20: mol_type = other RNA
cttaaagttggtcctgcata

SEQ ID NO: 34603 - RNA, 20 nt, synthetic construct
  source 1..20: mol_type = other RNA
cttaaagtttcaaactgtgg

SEQ ID NO: 34604 - RNA, 20 nt, synthetic construct
  source 1..20: mol_type = other RNA
cttaaatccgagacaagttc

SEQ ID NO: 34605 - RNA, 20 nt, synthetic construct
  source 1..20: mol_type = other RNA
cttaaatgtgaattagatgg

SEQ ID NO: 34606 - RNA, 20 nt, synthetic construct
  source 1..20: mol_type = other RNA
cttaaattccaaaagtgaat

SEQ ID NO: 34607 - RNA, 20 nt, synthetic construct
  source 1..20: mol_type = other RNA
cttaaatttctaaggttctg

SEQ ID NO: 34608 - RNA, 20 nt, synthetic construct
  source 1..20: mol_type = other RNA
cttaacaagaatcctgctat

SEQ ID NO: 34609 - RNA, 20 nt, synthetic construct
  source 1..20: mol_type = other RNA
cttaacacctttgtattcat

SEQ ID NO: 34610 - RNA, 20 nt, synthetic construct
  source 1..20: mol_type = other RNA
cttaacatgagatctaaatt

SEQ ID NO: 34611 - RNA, 20 nt, synthetic construct
  source 1..20: mol_type = other RNA
cttaacatttctcatgtatg

SEQ ID NO: 34612 - RNA, 20 nt, synthetic construct
  source 1..20: mol_type = other RNA
cttaacatttgaactcactg

SEQ ID NO: 34613 - RNA, 20 nt, synthetic construct
  source 1..20: mol_type = other RNA
cttaaccattgagccaaaga

SEQ ID NO: 34614 - RNA, 20 nt, synthetic construct
  source 1..20: mol_type = other RNA
cttaacctttttcttttcac

SEQ ID NO: 34615 - RNA, 20 nt, synthetic construct
  source 1..20: mol_type = other RNA
cttaactataggagttcatt

SEQ ID NO: 34616 - RNA, 20 nt, synthetic construct
  source 1..20: mol_type = other RNA
cttaacttcacctctacaca

SEQ ID NO: 34617 - RNA, 20 nt, synthetic construct
  source 1..20: mol_type = other RNA
cttaagaaccatacagtgcc

SEQ ID NO: 34618 - RNA, 20 nt, synthetic construct
  source 1..20: mol_type = other RNA
cttaagaactgttatttgtt

SEQ ID NO: 34619 - RNA, 20 nt, synthetic construct
  source 1..20: mol_type = other RNA
cttaagaaggaaaagaacac

SEQ ID NO: 34620 - RNA, 20 nt, synthetic construct
  source 1..20: mol_type = other RNA
cttaagacatttgggaatgt

SEQ ID NO: 34621 - RNA, 20 nt, synthetic construct
  source 1..20: mol_type = other RNA
cttaagaccacaaggattaa

SEQ ID NO: 34622 - RNA, 20 nt, synthetic construct
  source 1..20: mol_type = other RNA
cttaagagactctcaagaag

SEQ ID NO: 34623 - RNA, 20 nt, synthetic construct
  source 1..20: mol_type = other RNA
cttaagagcatgttgggcca

SEQ ID NO: 34624 - RNA, 20 nt, synthetic construct
  source 1..20: mol_type = other RNA
cttaagagctaagactataa

SEQ ID NO: 34625 - RNA, 20 nt, synthetic construct
  source 1..20: mol_type = other RNA
cttaagcaacagaaatttat

SEQ ID NO: 34626 - RNA, 20 nt, synthetic construct
  source 1..20: mol_type = other RNA
cttaagcacagactgtgcct

SEQ ID NO: 34627 - RNA, 20 nt, synthetic construct
  source 1..20: mol_type = other RNA
cttaagccatttcaggtttt

SEQ ID NO: 34628 - RNA, 20 nt, synthetic construct
  source 1..20: mol_type = other RNA
cttaagcttaggtctttgat

SEQ ID NO: 34629 - RNA, 20 nt, synthetic construct
  source 1..20: mol_type = other RNA
cttaaggaaatggacagcac

SEQ ID NO: 34630 - RNA, 20 nt, synthetic construct
  source 1..20: mol_type = other RNA
cttaagtatctcagtcataa

SEQ ID NO: 34631 - RNA, 20 nt, synthetic construct
  source 1..20: mol_type = other RNA
cttaagtatctcggtcattc

SEQ ID NO: 34632 - RNA, 20 nt, synthetic construct
  source 1..20: mol_type = other RNA
cttaagtcactccatttgtg

SEQ ID NO: 34633 - RNA, 20 nt, synthetic construct
  source 1..20: mol_type = other RNA
cttaagttaaaacttgtaga

SEQ ID NO: 34634 - RNA, 20 nt, synthetic construct
  source 1..20: mol_type = other RNA
cttaataacctcaaagtgga

SEQ ID NO: 34635 - RNA, 20 nt, synthetic construct
  source 1..20: mol_type = other RNA
cttaataactgcctaagtaa

SEQ ID NO: 34636 - RNA, 20 nt, synthetic construct
  source 1..20: mol_type = other RNA
cttaatagcccaacagggtt

SEQ ID NO: 34637 - RNA, 20 nt, synthetic construct
  source 1..20: mol_type = other RNA
cttaatattgaaacgatgca

SEQ ID NO: 34638 - RNA, 20 nt, synthetic construct
  source 1..20: mol_type = other RNA
cttaatctcctgagtagcag

SEQ ID NO: 34639 - RNA, 20 nt, synthetic construct
  source 1..20: mol_type = other RNA
cttaatctgatttttagtga

SEQ ID NO: 34640 - RNA, 20 nt, synthetic construct
  source 1..20: mol_type = other RNA
cttaatcttcacacttagtt

SEQ ID NO: 34641 - RNA, 20 nt, synthetic construct
  source 1..20: mol_type = other RNA
cttaatgttgacatcttgca

SEQ ID NO: 34642 - RNA, 20 nt, synthetic construct
  source 1..20: mol_type = other RNA
cttaatgtttagtagaattc

SEQ ID NO: 34643 - RNA, 20 nt, synthetic construct
  source 1..20: mol_type = other RNA
cttaattgagctgtccccac

SEQ ID NO: 34644 - RNA, 20 nt, synthetic construct
  source 1..20: mol_type = other RNA
cttaatttacccacaaaaga

SEQ ID NO: 34645 - RNA, 20 nt, synthetic construct
  source 1..20: mol_type = other RNA
cttaatttagatgagagtgg

SEQ ID NO: 34646 - RNA, 20 nt, synthetic construct
  source 1..20: mol_type = other RNA
cttacaatgaatatgtacta

SEQ ID NO: 34647 - RNA, 20 nt, synthetic construct
  source 1..20: mol_type = other RNA
cttacacacacgtttatatt

SEQ ID NO: 34648 - RNA, 20 nt, synthetic construct
  source 1..20: mol_type = other RNA
cttacacattaggctctggg

SEQ ID NO: 34649 - RNA, 20 nt, synthetic construct
  source 1..20: mol_type = other RNA
cttacacctgtttaaaaaga

SEQ ID NO: 34650 - RNA, 20 nt, synthetic construct
  source 1..20: mol_type = other RNA
cttacactcaaaagccatag

SEQ ID NO: 34651 - RNA, 20 nt, synthetic construct
  source 1..20: mol_type = other RNA
cttacagaccttattcaaat

SEQ ID NO: 34652 - RNA, 20 nt, synthetic construct
  source 1..20: mol_type = other RNA
cttacagactgattaatttg

SEQ ID NO: 34653 - RNA, 20 nt, synthetic construct
  source 1..20: mol_type = other RNA
cttacagatatcacccagac

SEQ ID NO: 34654 - RNA, 20 nt, synthetic construct
  source 1..20: mol_type = other RNA
cttacagcagatctgcttgc

SEQ ID NO: 34655 - RNA, 20 nt, synthetic construct
  source 1..20: mol_type = other RNA
cttacagtaagatcctggat

SEQ ID NO: 34656 - RNA, 20 nt, synthetic construct
  source 1..20: mol_type = other RNA
cttacagtcatcacagtcca

SEQ ID NO: 34657 - RNA, 20 nt, synthetic construct
  source 1..20: mol_type = other RNA
cttacagtgacatatgccgg

SEQ ID NO: 34658 - RNA, 20 nt, synthetic construct
  source 1..20: mol_type = other RNA
cttacataggcttagtacag

SEQ ID NO: 34659 - RNA, 20 nt, synthetic construct
  source 1..20: mol_type = other RNA
cttacatcagcagtgaccat

SEQ ID NO: 34660 - RNA, 20 nt, synthetic construct
  source 1..20: mol_type = other RNA
cttacattgtaatcctgttt

SEQ ID NO: 34661 - RNA, 20 nt, synthetic construct
  source 1..20: mol_type = other RNA
cttaccaaggctggagtgca

SEQ ID NO: 34662 - RNA, 20 nt, synthetic construct
  source 1..20: mol_type = other RNA
cttaccaagtgccgcgtttt

SEQ ID NO: 34663 - RNA, 20 nt, synthetic construct
  source 1..20: mol_type = other RNA
cttaccactataatccagat

SEQ ID NO: 34664 - RNA, 20 nt, synthetic construct
  source 1..20: mol_type = other RNA
cttaccactgaagtgttgag

SEQ ID NO: 34665 - RNA, 20 nt, synthetic construct
  source 1..20: mol_type = other RNA
cttaccagtgcttgcagcct

SEQ ID NO: 34666 - RNA, 20 nt, synthetic construct
  source 1..20: mol_type = other RNA
cttacccccatcacactggt

SEQ ID NO: 34667 - RNA, 20 nt, synthetic construct
  source 1..20: mol_type = other RNA
cttaccctcacagtcacaaa

SEQ ID NO: 34668 - RNA, 20 nt, synthetic construct
  source 1..20: mol_type = other RNA
cttaccctctagctccccat

SEQ ID NO: 34669 - RNA, 20 nt, synthetic construct
  source 1..20: mol_type = other RNA
cttaccctttactcagattc

SEQ ID NO: 34670 - RNA, 20 nt, synthetic construct
  source 1..20: mol_type = other RNA
cttacctaagcatcgtgaag

SEQ ID NO: 34671 - RNA, 20 nt, synthetic construct
  source 1..20: mol_type = other RNA
cttacctcaaaggagagaag

SEQ ID NO: 34672 - RNA, 20 nt, synthetic construct
  source 1..20: mol_type = other RNA
cttaccttaaaccatataca

SEQ ID NO: 34673 - RNA, 20 nt, synthetic construct
  source 1..20: mol_type = other RNA
cttaccttctaaaatcatca

SEQ ID NO: 34674 - RNA, 20 nt, synthetic construct
  source 1..20: mol_type = other RNA
cttacctttatctttggata

SEQ ID NO: 34675 - RNA, 20 nt, synthetic construct
  source 1..20: mol_type = other RNA
cttacgcgtggatgtgtgca

SEQ ID NO: 34676 - RNA, 20 nt, synthetic construct
  source 1..20: mol_type = other RNA
cttactaaatgatctttcaa

SEQ ID NO: 34677 - RNA, 20 nt, synthetic construct
  source 1..20: mol_type = other RNA
cttactaaattttgaggctt

SEQ ID NO: 34678 - RNA, 20 nt, synthetic construct
  source 1..20: mol_type = other RNA
cttactaccaccactaatgt

SEQ ID NO: 34679 - RNA, 20 nt, synthetic construct
  source 1..20: mol_type = other RNA
cttactagttgtgctacctc

SEQ ID NO: 34680 - RNA, 20 nt, synthetic construct
  source 1..20: mol_type = other RNA
cttactctaatggggaaata

SEQ ID NO: 34681 - RNA, 20 nt, synthetic construct
  source 1..20: mol_type = other RNA
cttactctcaaataatttgg

SEQ ID NO: 34682 - RNA, 20 nt, synthetic construct
  source 1..20: mol_type = other RNA
cttactgatttatagtgttt

SEQ ID NO: 34683 - RNA, 20 nt, synthetic construct
  source 1..20: mol_type = other RNA
cttactgcaacctccgtttt

SEQ ID NO: 34684 - RNA, 20 nt, synthetic construct
  source 1..20: mol_type = other RNA
cttactggtgttaggcaatc

SEQ ID NO: 34685 - RNA, 20 nt, synthetic construct
  source 1..20: mol_type = other RNA
cttactgtaagttcctggac

SEQ ID NO: 34686 - RNA, 20 nt, synthetic construct
  source 1..20: mol_type = other RNA
cttactgtagcattgaagta

SEQ ID NO: 34687 - RNA, 20 nt, synthetic construct
  source 1..20: mol_type = other RNA
cttacttccagctcacgtta

SEQ ID NO: 34688 - RNA, 20 nt, synthetic construct
  source 1..20: mol_type = other RNA
cttacttgagccccagaata

SEQ ID NO: 34689 - RNA, 20 nt, synthetic construct
  source 1..20: mol_type = other RNA
cttagaaatgaagatggcct

SEQ ID NO: 34690 - RNA, 20 nt, synthetic construct
  source 1..20: mol_type = other RNA
cttagaaatttaaggaccag

SEQ ID NO: 34691 - RNA, 20 nt, synthetic construct
  source 1..20: mol_type = other RNA
cttagaagaagacttaggag

SEQ ID NO: 34692 - RNA, 20 nt, synthetic construct
  source 1..20: mol_type = other RNA
cttagaatataaactcttcc

SEQ ID NO: 34693 - RNA, 20 nt, synthetic construct
  source 1..20: mol_type = other RNA
cttagacctcctagattgac

SEQ ID NO: 34694 - RNA, 20 nt, synthetic construct
  source 1..20: mol_type = other RNA
cttagagggcttcatgctgg

SEQ ID NO: 34695 - RNA, 20 nt, synthetic construct
  source 1..20: mol_type = other RNA
cttagataggatgggcagac

SEQ ID NO: 34696 - RNA, 20 nt, synthetic construct
  source 1..20: mol_type = other RNA
cttagatgagcccaggagtt

SEQ ID NO: 34697 - RNA, 20 nt, synthetic construct
  source 1..20: mol_type = other RNA
cttagattacaaaagaacag

SEQ ID NO: 34698 - RNA, 20 nt, synthetic construct
  source 1..20: mol_type = other RNA
cttagcatgttgctttgcga

SEQ ID NO: 34699 - RNA, 20 nt, synthetic construct
  source 1..20: mol_type = other RNA
cttagcccaagctaccattt

SEQ ID NO: 34700 - RNA, 20 nt, synthetic construct
  source 1..20: mol_type = other RNA
cttagcccacttgttgatgg

SEQ ID NO: 34701 - RNA, 20 nt, synthetic construct
  source 1..20: mol_type = other RNA
cttagcccctgctgccagat

SEQ ID NO: 34702 - RNA, 20 nt, synthetic construct
  source 1..20: mol_type = other RNA
cttagccgggaggagccaag

SEQ ID NO: 34703 - RNA, 20 nt, synthetic construct
  source 1..20: mol_type = other RNA
cttagccttccagagacaaa

SEQ ID NO: 34704 - RNA, 20 nt, synthetic construct
  source 1..20: mol_type = other RNA
cttagccttggtaaaatcac

SEQ ID NO: 34705 - RNA, 20 nt, synthetic construct
  source 1..20: mol_type = other RNA
cttagcgctgatgtgttgac

SEQ ID NO: 34706 - RNA, 20 nt, synthetic construct
  source 1..20: mol_type = other RNA
cttagcgctggaggtcgggc

SEQ ID NO: 34707 - RNA, 20 nt, synthetic construct
  source 1..20: mol_type = other RNA
cttagctaatttcagagaga

SEQ ID NO: 34708 - RNA, 20 nt, synthetic construct
  source 1..20: mol_type = other RNA
cttagctatattcacttttg

SEQ ID NO: 34709 - RNA, 20 nt, synthetic construct
  source 1..20: mol_type = other RNA
cttagctctcatgtcagaga

SEQ ID NO: 34710 - RNA, 20 nt, synthetic construct
  source 1..20: mol_type = other RNA
cttagctcttaagcttaggt

SEQ ID NO: 34711 - RNA, 20 nt, synthetic construct
  source 1..20: mol_type = other RNA
cttagctcttcccttaacct

SEQ ID NO: 34712 - RNA, 20 nt, synthetic construct
  source 1..20: mol_type = other RNA
cttagctgcctcttcctgtt

SEQ ID NO: 34713 - RNA, 20 nt, synthetic construct
  source 1..20: mol_type = other RNA
cttagcttagaagaagactt

SEQ ID NO: 34714 - RNA, 20 nt, synthetic construct
  source 1..20: mol_type = other RNA
cttaggaagctatggagcac

SEQ ID NO: 34715 - RNA, 20 nt, synthetic construct
  source 1..20: mol_type = other RNA
cttaggagaaaagcttcata

SEQ ID NO: 34716 - RNA, 20 nt, synthetic construct
  source 1..20: mol_type = other RNA
cttaggaggctattaacttt

SEQ ID NO: 34717 - RNA, 20 nt, synthetic construct
  source 1..20: mol_type = other RNA
cttaggatcaccaaagactt

SEQ ID NO: 34718 - RNA, 20 nt, synthetic construct
  source 1..20: mol_type = other RNA
cttaggatcccagtcctttg

SEQ ID NO: 34719 - RNA, 20 nt, synthetic construct
  source 1..20: mol_type = other RNA
cttaggcaaaggaaaaatct

SEQ ID NO: 34720 - RNA, 20 nt, synthetic construct
  source 1..20: mol_type = other RNA
cttaggcagttattaagagt

SEQ ID NO: 34721 - RNA, 20 nt, synthetic construct
  source 1..20: mol_type = other RNA
cttaggccataaatcaaggt

SEQ ID NO: 34722 - RNA, 20 nt, synthetic construct
  source 1..20: mol_type = other RNA
cttaggctgaagcaggcttt

SEQ ID NO: 34723 - RNA, 20 nt, synthetic construct
  source 1..20: mol_type = other RNA
cttaggctgttattagagtt

SEQ ID NO: 34724 - RNA, 20 nt, synthetic construct
  source 1..20: mol_type = other RNA
cttaggtaagaaaaattccc

SEQ ID NO: 34725 - RNA, 20 nt, synthetic construct
  source 1..20: mol_type = other RNA
cttaggtcagattccttttt

SEQ ID NO: 34726 - RNA, 20 nt, synthetic construct
  source 1..20: mol_type = other RNA
cttaggtttctcatttttca

SEQ ID NO: 34727 - RNA, 20 nt, synthetic construct
  source 1..20: mol_type = other RNA
cttagtaaatatccgaaaga

SEQ ID NO: 34728 - RNA, 20 nt, synthetic construct
  source 1..20: mol_type = other RNA
cttagtacagccatcaacct

SEQ ID NO: 34729 - RNA, 20 nt, synthetic construct
  source 1..20: mol_type = other RNA
cttagtctgacttctctcag

SEQ ID NO: 34730 - RNA, 20 nt, synthetic construct
  source 1..20: mol_type = other RNA
cttagtcttctcagatctgt

SEQ ID NO: 34731 - RNA, 20 nt, synthetic construct
  source 1..20: mol_type = other RNA
cttagtgagggaggccatct

SEQ ID NO: 34732 - RNA, 20 nt, synthetic construct
  source 1..20: mol_type = other RNA
cttagtgatgtcttttgaag

SEQ ID NO: 34733 - RNA, 20 nt, synthetic construct
  source 1..20: mol_type = other RNA
cttagtggttgacccataaa

SEQ ID NO: 34734 - RNA, 20 nt, synthetic construct
  source 1..20: mol_type = other RNA
cttagtgttcccttcttaaa

SEQ ID NO: 34735 - RNA, 20 nt, synthetic construct
  source 1..20: mol_type = other RNA
cttagttcaagatgcatacc

SEQ ID NO: 34736 - RNA, 20 nt, synthetic construct
  source 1..20: mol_type = other RNA
cttagttccattattccata

SEQ ID NO: 34737 - RNA, 20 nt, synthetic construct
  source 1..20: mol_type = other RNA
cttagttctgcttccacatt

SEQ ID NO: 34738 - RNA, 20 nt, synthetic construct
  source 1..20: mol_type = other RNA
cttagtttgcaatacagtta

SEQ ID NO: 34739 - RNA, 20 nt, synthetic construct
  source 1..20: mol_type = other RNA
cttagttttcacttttgtgc

SEQ ID NO: 34740 - RNA, 20 nt, synthetic construct
  source 1..20: mol_type = other RNA
cttataaaatgagggtaaaa

SEQ ID NO: 34741 - RNA, 20 nt, synthetic construct
  source 1..20: mol_type = other RNA
cttataacaagaaaatctga

SEQ ID NO: 34742 - RNA, 20 nt, synthetic construct
  source 1..20: mol_type = other RNA
cttataatttctgagagtat

SEQ ID NO: 34743 - RNA, 20 nt, synthetic construct
  source 1..20: mol_type = other RNA
cttatactagtagaaagcag

SEQ ID NO: 34744 - RNA, 20 nt, synthetic construct
  source 1..20: mol_type = other RNA
cttatagatgacgaaagtga

SEQ ID NO: 34745 - RNA, 20 nt, synthetic construct
  source 1..20: mol_type = other RNA
cttataggttgaatagggcc

SEQ ID NO: 34746 - RNA, 20 nt, synthetic construct
  source 1..20: mol_type = other RNA
cttatagtattacctcccat

SEQ ID NO: 34747 - RNA, 20 nt, synthetic construct
  source 1..20: mol_type = other RNA
cttatataaatgctcagtgg

SEQ ID NO: 34748 - RNA, 20 nt, synthetic construct
  source 1..20: mol_type = other RNA
cttatatcctaaacacttag

SEQ ID NO: 34749 - RNA, 20 nt, synthetic construct
  source 1..20: mol_type = other RNA
cttatatgggatatctaaca

SEQ ID NO: 34750 - RNA, 20 nt, synthetic construct
  source 1..20: mol_type = other RNA
cttatattaattctgaggcc

SEQ ID NO: 34751 - RNA, 20 nt, synthetic construct
  source 1..20: mol_type = other RNA
cttatcagatggtgatacct

SEQ ID NO: 34752 - RNA, 20 nt, synthetic construct
  source 1..20: mol_type = other RNA
cttatcaggaaagtgccagc

SEQ ID NO: 34753 - RNA, 20 nt, synthetic construct
  source 1..20: mol_type = other RNA
cttatcaggcttgagtctgt

SEQ ID NO: 34754 - RNA, 20 nt, synthetic construct
  source 1..20: mol_type = other RNA
cttatccattcatctctcga

SEQ ID NO: 34755 - RNA, 20 nt, synthetic construct
  source 1..20: mol_type = other RNA
cttatccctacctaaaaagg

SEQ ID NO: 34756 - RNA, 20 nt, synthetic construct
  source 1..20: mol_type = other RNA
cttatccgataaagggtctg

SEQ ID NO: 34757 - RNA, 20 nt, synthetic construct
  source 1..20: mol_type = other RNA
cttatcctcttctgaagagg

SEQ ID NO: 34758 - RNA, 20 nt, synthetic construct
  source 1..20: mol_type = other RNA
cttatctaggcgaaatatct

SEQ ID NO: 34759 - RNA, 20 nt, synthetic construct
  source 1..20: mol_type = other RNA
cttatctgctgtcggttttc

SEQ ID NO: 34760 - RNA, 20 nt, synthetic construct
  source 1..20: mol_type = other RNA
cttatcttttctagtttctt

SEQ ID NO: 34761 - RNA, 20 nt, synthetic construct
  source 1..20: mol_type = other RNA
cttatgaggttattcaaaac

SEQ ID NO: 34762 - RNA, 20 nt, synthetic construct
  source 1..20: mol_type = other RNA
cttatgatcttgggaatact

SEQ ID NO: 34763 - RNA, 20 nt, synthetic construct
  source 1..20: mol_type = other RNA
cttatgcaagatggcaagtt

SEQ ID NO: 34764 - RNA, 20 nt, synthetic construct
  source 1..20: mol_type = other RNA
cttatgcatcttgcaaaacg

SEQ ID NO: 34765 - RNA, 20 nt, synthetic construct
  source 1..20: mol_type = other RNA
cttatgctggtgggctttga

SEQ ID NO: 34766 - RNA, 20 nt, synthetic construct
  source 1..20: mol_type = other RNA
cttatggaatagttgattat

SEQ ID NO: 34767 - RNA, 20 nt, synthetic construct
  source 1..20: mol_type = other RNA
cttatggagataaattaccc

SEQ ID NO: 34768 - RNA, 20 nt, synthetic construct
  source 1..20: mol_type = other RNA
cttatggatatctggcctgc

SEQ ID NO: 34769 - RNA, 20 nt, synthetic construct
  source 1..20: mol_type = other RNA
cttatggctataaccacgag

SEQ ID NO: 34770 - RNA, 20 nt, synthetic construct
  source 1..20: mol_type = other RNA
cttatgtccagcccccagtt

SEQ ID NO: 34771 - RNA, 20 nt, synthetic construct
  source 1..20: mol_type = other RNA
cttatgtcttgtggctgaca

SEQ ID NO: 34772 - RNA, 20 nt, synthetic construct
  source 1..20: mol_type = other RNA
cttatgtgaaagtagaggac

SEQ ID NO: 34773 - RNA, 20 nt, synthetic construct
  source 1..20: mol_type = other RNA
cttatgtgtgtataacccgt

SEQ ID NO: 34774 - RNA, 20 nt, synthetic construct
  source 1..20: mol_type = other RNA
cttattaaaatgaacctgct

SEQ ID NO: 34775 - RNA, 20 nt, synthetic construct
  source 1..20: mol_type = other RNA
cttattaatgtgttgtctga

SEQ ID NO: 34776 - RNA, 20 nt, synthetic construct
  source 1..20: mol_type = other RNA
cttattagcaaagaggcaaa

SEQ ID NO: 34777 - RNA, 20 nt, synthetic construct
  source 1..20: mol_type = other RNA
cttattatatgcctagattt

SEQ ID NO: 34778 - RNA, 20 nt, synthetic construct
  source 1..20: mol_type = other RNA
cttattcaaataattgctgc

SEQ ID NO: 34779 - RNA, 20 nt, synthetic construct
  source 1..20: mol_type = other RNA
cttattccccagggaaacct

SEQ ID NO: 34780 - RNA, 20 nt, synthetic construct
  source 1..20: mol_type = other RNA
cttattctttttctagtttg

SEQ ID NO: 34781 - RNA, 20 nt, synthetic construct
  source 1..20: mol_type = other RNA
cttattgagaagcagaaaat

SEQ ID NO: 34782 - RNA, 20 nt, synthetic construct
  source 1..20: mol_type = other RNA
cttattgattcagatgacag

SEQ ID NO: 34783 - RNA, 20 nt, synthetic construct
  source 1..20: mol_type = other RNA
cttattggaaaactctgttt

SEQ ID NO: 34784 - RNA, 20 nt, synthetic construct
  source 1..20: mol_type = other RNA
cttattggttatctgtactt

SEQ ID NO: 34785 - RNA, 20 nt, synthetic construct
  source 1..20: mol_type = other RNA
cttatttaatgtgctgtcca

SEQ ID NO: 34786 - RNA, 20 nt, synthetic construct
  source 1..20: mol_type = other RNA
cttatttccagggggtatgg

SEQ ID NO: 34787 - RNA, 20 nt, synthetic construct
  source 1..20: mol_type = other RNA
cttatttccttccagtttat

SEQ ID NO: 34788 - RNA, 20 nt, synthetic construct
  source 1..20: mol_type = other RNA
cttatttggaaatatggtca

SEQ ID NO: 34789 - RNA, 20 nt, synthetic construct
  source 1..20: mol_type = other RNA
cttatttgttactgatctgc

SEQ ID NO: 34790 - RNA, 20 nt, synthetic construct
  source 1..20: mol_type = other RNA
cttattttttcccagatacg

SEQ ID NO: 34791 - RNA, 20 nt, synthetic construct
  source 1..20: mol_type = other RNA
cttcaaaagacatcactaag

SEQ ID NO: 34792 - RNA, 20 nt, synthetic construct
  source 1..20: mol_type = other RNA
cttcaaaatctgatgtgtat

SEQ ID NO: 34793 - RNA, 20 nt, synthetic construct
  source 1..20: mol_type = other RNA
cttcaaaccactatctaata

SEQ ID NO: 34794 - RNA, 20 nt, synthetic construct
  source 1..20: mol_type = other RNA
cttcaaagagaacaaaatac

SEQ ID NO: 34795 - RNA, 20 nt, synthetic construct
  source 1..20: mol_type = other RNA
cttcaaagggtcactattaa

SEQ ID NO: 34796 - RNA, 20 nt, synthetic construct
  source 1..20: mol_type = other RNA
cttcaaagttatgtttatga

SEQ ID NO: 34797 - RNA, 20 nt, synthetic construct
  source 1..20: mol_type = other RNA
cttcaaccatacttttcaac

SEQ ID NO: 34798 - RNA, 20 nt, synthetic construct
  source 1..20: mol_type = other RNA
cttcaacctcaactttaggt

SEQ ID NO: 34799 - RNA, 20 nt, synthetic construct
  source 1..20: mol_type = other RNA
cttcaacctcctgggctcaa

SEQ ID NO: 34800 - RNA, 20 nt, synthetic construct
  source 1..20: mol_type = other RNA
cttcaacggacatttttcca

SEQ ID NO: 34801 - RNA, 20 nt, synthetic construct
  source 1..20: mol_type = other RNA
cttcaagaggttaaaaccac

SEQ ID NO: 34802 - RNA, 20 nt, synthetic construct
  source 1..20: mol_type = other RNA
cttcaagatactgcactaaa

SEQ ID NO: 34803 - RNA, 20 nt, synthetic construct
  source 1..20: mol_type = other RNA
cttcaagatttcataggcat

SEQ ID NO: 34804 - RNA, 20 nt, synthetic construct
  source 1..20: mol_type = other RNA
cttcaagcattgggagcttt

SEQ ID NO: 34805 - RNA, 20 nt, synthetic construct
  source 1..20: mol_type = other RNA
cttcaaggtaatctagttta

SEQ ID NO: 34806 - RNA, 20 nt, synthetic construct
  source 1..20: mol_type = other RNA
cttcaaggttcacaaattag

SEQ ID NO: 34807 - RNA, 20 nt, synthetic construct
  source 1..20: mol_type = other RNA
cttcaagttgctttttcttc

SEQ ID NO: 34808 - RNA, 20 nt, synthetic construct
  source 1..20: mol_type = other RNA
cttcaatatgcagtatgtgc

SEQ ID NO: 34809 - RNA, 20 nt, synthetic construct
  source 1..20: mol_type = other RNA
cttcaatattttggaagact

SEQ ID NO: 34810 - RNA, 20 nt, synthetic construct
  source 1..20: mol_type = other RNA
cttcaatgagggcagagata

SEQ ID NO: 34811 - RNA, 20 nt, synthetic construct
  source 1..20: mol_type = other RNA
cttcaatgctacagtaagca

SEQ ID NO: 34812 - RNA, 20 nt, synthetic construct
  source 1..20: mol_type = other RNA
cttcaatgtttggtagattt

SEQ ID NO: 34813 - RNA, 20 nt, synthetic construct
  source 1..20: mol_type = other RNA
cttcacaaacaaatcctttt

SEQ ID NO: 34814 - RNA, 20 nt, synthetic construct
  source 1..20: mol_type = other RNA
cttcacaaagccctcaggac

SEQ ID NO: 34815 - RNA, 20 nt, synthetic construct
  source 1..20: mol_type = other RNA
cttcacacattaactatgga

SEQ ID NO: 34816 - RNA, 20 nt, synthetic construct
  source 1..20: mol_type = other RNA
cttcacaccatttagatcat

SEQ ID NO: 34817 - RNA, 20 nt, synthetic construct
  source 1..20: mol_type = other RNA
cttcacacttagttcaagat

SEQ ID NO: 34818 - RNA, 20 nt, synthetic construct
  source 1..20: mol_type = other RNA
cttcaccaaagatttactaa

SEQ ID NO: 34819 - RNA, 20 nt, synthetic construct
  source 1..20: mol_type = other RNA
cttcaccaactgaagcgggg

SEQ ID NO: 34820 - RNA, 20 nt, synthetic construct
  source 1..20: mol_type = other RNA
cttcaccattccagccattc

SEQ ID NO: 34821 - RNA, 20 nt, synthetic construct
  source 1..20: mol_type = other RNA
cttcaccgtgcaactagaga

SEQ ID NO: 34822 - RNA, 20 nt, synthetic construct
  source 1..20: mol_type = other RNA
cttcacctctacacaaaaat

SEQ ID NO: 34823 - RNA, 20 nt, synthetic construct
  source 1..20: mol_type = other RNA
cttcacgatgcttaggtaag

SEQ ID NO: 34824 - RNA, 20 nt, synthetic construct
  source 1..20: mol_type = other RNA
cttcacgtgcattcatactg

SEQ ID NO: 34825 - RNA, 20 nt, synthetic construct
  source 1..20: mol_type = other RNA
cttcacgtggcgctccctct

SEQ ID NO: 34826 - RNA, 20 nt, synthetic construct
  source 1..20: mol_type = other RNA
cttcactagatctcttttcc

SEQ ID NO: 34827 - RNA, 20 nt, synthetic construct
  source 1..20: mol_type = other RNA
cttcactagtgggtcgggtg

SEQ ID NO: 34828 - RNA, 20 nt, synthetic construct
  source 1..20: mol_type = other RNA
cttcactcttaaaaggagat

SEQ ID NO: 34829 - RNA, 20 nt, synthetic construct
  source 1..20: mol_type = other RNA
cttcactcttctgcaagttg

SEQ ID NO: 34830 - RNA, 20 nt, synthetic construct
  source 1..20: mol_type = other RNA
cttcactgactacacataca

SEQ ID NO: 34831 - RNA, 20 nt, synthetic construct
  source 1..20: mol_type = other RNA
cttcacttccaagtcccgga

SEQ ID NO: 34832 - RNA, 20 nt, synthetic construct
  source 1..20: mol_type = other RNA
cttcacttctctgctgctga

SEQ ID NO: 34833 - RNA, 20 nt, synthetic construct
  source 1..20: mol_type = other RNA
cttcactttcgtcatctata

SEQ ID NO: 34834 - RNA, 20 nt, synthetic construct
  source 1..20: mol_type = other RNA
cttcagaactcttctccaag

SEQ ID NO: 34835 - RNA, 20 nt, synthetic construct
  source 1..20: mol_type = other RNA
cttcagaagaaattacttct

SEQ ID NO: 34836 - RNA, 20 nt, synthetic construct
  source 1..20: mol_type = other RNA
cttcagaagaggataagggg

SEQ ID NO: 34837 - RNA, 20 nt, synthetic construct
  source 1..20: mol_type = other RNA
cttcagaagccctgcagcca

SEQ ID NO: 34838 - RNA, 20 nt, synthetic construct
  source 1..20: mol_type = other RNA
cttcagaaggagtccagtcc

SEQ ID NO: 34839 - RNA, 20 nt, synthetic construct
  source 1..20: mol_type = other RNA
cttcagaggccctggtgctt

SEQ ID NO: 34840 - RNA, 20 nt, synthetic construct
  source 1..20: mol_type = other RNA
cttcagaggtctgttactcc

SEQ ID NO: 34841 - RNA, 20 nt, synthetic construct
  source 1..20: mol_type = other RNA
cttcagcaaggaccattagc

SEQ ID NO: 34842 - RNA, 20 nt, synthetic construct
  source 1..20: mol_type = other RNA
cttcagcctaagcaagttac

SEQ ID NO: 34843 - RNA, 20 nt, synthetic construct
  source 1..20: mol_type = other RNA
cttcagcctgtgtcagtgac

SEQ ID NO: 34844 - RNA, 20 nt, synthetic construct
  source 1..20: mol_type = other RNA
cttcagcgcttgaacaaata

SEQ ID NO: 34845 - RNA, 20 nt, synthetic construct
  source 1..20: mol_type = other RNA
cttcagctatggtgttattt

SEQ ID NO: 34846 - RNA, 20 nt, synthetic construct
  source 1..20: mol_type = other RNA
cttcaggaacaccttgaaca

SEQ ID NO: 34847 - RNA, 20 nt, synthetic construct
  source 1..20: mol_type = other RNA
cttcaggtctctctgaaatt

SEQ ID NO: 34848 - RNA, 20 nt, synthetic construct
  source 1..20: mol_type = other RNA
cttcagtatgaatgcacgtg

SEQ ID NO: 34849 - RNA, 20 nt, synthetic construct
  source 1..20: mol_type = other RNA
cttcagtcagttctctgccc

SEQ ID NO: 34850 - RNA, 20 nt, synthetic construct
  source 1..20: mol_type = other RNA
cttcagtccttaccactgaa

SEQ ID NO: 34851 - RNA, 20 nt, synthetic construct
  source 1..20: mol_type = other RNA
cttcagtgccaacacatggg

SEQ ID NO: 34852 - RNA, 20 nt, synthetic construct
  source 1..20: mol_type = other RNA
cttcagtggtaaggactgaa

SEQ ID NO: 34853 - RNA, 20 nt, synthetic construct
  source 1..20: mol_type = other RNA
cttcagtgtagtcagacaca

SEQ ID NO: 34854 - RNA, 20 nt, synthetic construct
  source 1..20: mol_type = other RNA
cttcagttggtgaagagagc

SEQ ID NO: 34855 - RNA, 20 nt, synthetic construct
  source 1..20: mol_type = other RNA
cttcagttttatcaattagt

SEQ ID NO: 34856 - RNA, 20 nt, synthetic construct
  source 1..20: mol_type = other RNA
cttcagttttgagtggcatc

SEQ ID NO: 34857 - RNA, 20 nt, synthetic construct
  source 1..20: mol_type = other RNA
cttcatactattttctatag

SEQ ID NO: 34858 - RNA, 20 nt, synthetic construct
  source 1..20: mol_type = other RNA
cttcatagatgttatgcccc

SEQ ID NO: 34859 - RNA, 20 nt, synthetic construct
  source 1..20: mol_type = other RNA
cttcatataagtggaatcat

SEQ ID NO: 34860 - RNA, 20 nt, synthetic construct
  source 1..20: mol_type = other RNA
cttcatattttgtgggaatt

SEQ ID NO: 34861 - RNA, 20 nt, synthetic construct
  source 1..20: mol_type = other RNA
cttcatcagtccctgtgttt

SEQ ID NO: 34862 - RNA, 20 nt, synthetic construct
  source 1..20: mol_type = other RNA
cttcatctggaccagttact

SEQ ID NO: 34863 - RNA, 20 nt, synthetic construct
  source 1..20: mol_type = other RNA
cttcatctttcctgatcaca

SEQ ID NO: 34864 - RNA, 20 nt, synthetic construct
  source 1..20: mol_type = other RNA
cttcatgctgggagaccagg

SEQ ID NO: 34865 - RNA, 20 nt, synthetic construct
  source 1..20: mol_type = other RNA
cttcatggactagactgcct

SEQ ID NO: 34866 - RNA, 20 nt, synthetic construct
  source 1..20: mol_type = other RNA
cttcatgggtggaaattaaa

SEQ ID NO: 34867 - RNA, 20 nt, synthetic construct
  source 1..20: mol_type = other RNA
cttcatgtacaatgaattag

SEQ ID NO: 34868 - RNA, 20 nt, synthetic construct
  source 1..20: mol_type = other RNA
cttcatgtcccctgtccaag

SEQ ID NO: 34869 - RNA, 20 nt, synthetic construct
  source 1..20: mol_type = other RNA
cttcattccgcgtttattag

SEQ ID NO: 34870 - RNA, 20 nt, synthetic construct
  source 1..20: mol_type = other RNA
cttcattcttgacatgattg

SEQ ID NO: 34871 - RNA, 20 nt, synthetic construct
  source 1..20: mol_type = other RNA
cttcatttaattctatctga

SEQ ID NO: 34872 - RNA, 20 nt, synthetic construct
  source 1..20: mol_type = other RNA
cttcatttccattgtaatta

SEQ ID NO: 34873 - RNA, 20 nt, synthetic construct
  source 1..20: mol_type = other RNA
cttcatttctaagccatgtt

SEQ ID NO: 34874 - RNA, 20 nt, synthetic construct
  source 1..20: mol_type = other RNA
cttccaaaagcaggccctga

SEQ ID NO: 34875 - RNA, 20 nt, synthetic construct
  source 1..20: mol_type = other RNA
cttccaaaatattgaagagg

SEQ ID NO: 34876 - RNA, 20 nt, synthetic construct
  source 1..20: mol_type = other RNA
cttccaaagtatgcatagca

SEQ ID NO: 34877 - RNA, 20 nt, synthetic construct
  source 1..20: mol_type = other RNA
cttccaaataatcccgcacc

SEQ ID NO: 34878 - RNA, 20 nt, synthetic construct
  source 1..20: mol_type = other RNA
cttccaaccatcttcttagt

SEQ ID NO: 34879 - RNA, 20 nt, synthetic construct
  source 1..20: mol_type = other RNA
cttccaagtcccggaagctg

SEQ ID NO: 34880 - RNA, 20 nt, synthetic construct
  source 1..20: mol_type = other RNA
cttccaattgcagaaaaata

SEQ ID NO: 34881 - RNA, 20 nt, synthetic construct
  source 1..20: mol_type = other RNA
cttccacagctatcaggcct

SEQ ID NO: 34882 - RNA, 20 nt, synthetic construct
  source 1..20: mol_type = other RNA
cttccacatttctaatttcc

SEQ ID NO: 34883 - RNA, 20 nt, synthetic construct
  source 1..20: mol_type = other RNA
cttccacccaagtggagcct

SEQ ID NO: 34884 - RNA, 20 nt, synthetic construct
  source 1..20: mol_type = other RNA
cttccacctgctctttatct

SEQ ID NO: 34885 - RNA, 20 nt, synthetic construct
  source 1..20: mol_type = other RNA
cttccacggaatgccccttt

SEQ ID NO: 34886 - RNA, 20 nt, synthetic construct
  source 1..20: mol_type = other RNA
cttccactagtgggatcaaa

SEQ ID NO: 34887 - RNA, 20 nt, synthetic construct
  source 1..20: mol_type = other RNA
cttccagaaacttccaacca

SEQ ID NO: 34888 - RNA, 20 nt, synthetic construct
  source 1..20: mol_type = other RNA
cttccagaaggagaaaacaa

SEQ ID NO: 34889 - RNA, 20 nt, synthetic construct
  source 1..20: mol_type = other RNA
cttccagagacaaagcataa

SEQ ID NO: 34890 - RNA, 20 nt, synthetic construct
  source 1..20: mol_type = other RNA
cttccagatgttttacacat

SEQ ID NO: 34891 - RNA, 20 nt, synthetic construct
  source 1..20: mol_type = other RNA
cttccagcaagactttatgt

SEQ ID NO: 34892 - RNA, 20 nt, synthetic construct
  source 1..20: mol_type = other RNA
cttccagcctggtaatgaat

SEQ ID NO: 34893 - RNA, 20 nt, synthetic construct
  source 1..20: mol_type = other RNA
cttccagcgtgtgcatgacc

SEQ ID NO: 34894 - RNA, 20 nt, synthetic construct
  source 1..20: mol_type = other RNA
cttccagctcacgttaccct

SEQ ID NO: 34895 - RNA, 20 nt, synthetic construct
  source 1..20: mol_type = other RNA
cttccagtacatctcaattc

SEQ ID NO: 34896 - RNA, 20 nt, synthetic construct
  source 1..20: mol_type = other RNA
cttccagtatgatgccactc

SEQ ID NO: 34897 - RNA, 20 nt, synthetic construct
  source 1..20: mol_type = other RNA
cttccagtgttttagggggg

SEQ ID NO: 34898 - RNA, 20 nt, synthetic construct
  source 1..20: mol_type = other RNA
cttccagtttatatgcctag

SEQ ID NO: 34899 - RNA, 20 nt, synthetic construct
  source 1..20: mol_type = other RNA
cttccatacgaaagccttta

SEQ ID NO: 34900 - RNA, 20 nt, synthetic construct
  source 1..20: mol_type = other RNA
cttccatgagattacatagc

SEQ ID NO: 34901 - RNA, 20 nt, synthetic construct
  source 1..20: mol_type = other RNA
cttccattttagatcaagtc

SEQ ID NO: 34902 - RNA, 20 nt, synthetic construct
  source 1..20: mol_type = other RNA
cttccattttgcttaataat

SEQ ID NO: 34903 - RNA, 20 nt, synthetic construct
  source 1..20: mol_type = other RNA
cttcccaaagacatcctgat

SEQ ID NO: 34904 - RNA, 20 nt, synthetic construct
  source 1..20: mol_type = other RNA
cttcccaaatccaggatggc

SEQ ID NO: 34905 - RNA, 20 nt, synthetic construct
  source 1..20: mol_type = other RNA
cttcccaatcctttgtgcag

SEQ ID NO: 34906 - RNA, 20 nt, synthetic construct
  source 1..20: mol_type = other RNA
cttcccactgctatgactaa

SEQ ID NO: 34907 - RNA, 20 nt, synthetic construct
  source 1..20: mol_type = other RNA
cttcccacttcgaaagttca

SEQ ID NO: 34908 - RNA, 20 nt, synthetic construct
  source 1..20: mol_type = other RNA
cttcccagacagggaatgcc

SEQ ID NO: 34909 - RNA, 20 nt, synthetic construct
  source 1..20: mol_type = other RNA
cttcccatctcactcaccta

SEQ ID NO: 34910 - RNA, 20 nt, synthetic construct
  source 1..20: mol_type = other RNA
cttcccatgaacatggtttg

SEQ ID NO: 34911 - RNA, 20 nt, synthetic construct
  source 1..20: mol_type = other RNA
cttccccacctttcctgccc

SEQ ID NO: 34912 - RNA, 20 nt, synthetic construct
  source 1..20: mol_type = other RNA
cttcccccaaaacttaggag

SEQ ID NO: 34913 - RNA, 20 nt, synthetic construct
  source 1..20: mol_type = other RNA
cttcccccaaagaaggaaaa

SEQ ID NO: 34914 - RNA, 20 nt, synthetic construct
  source 1..20: mol_type = other RNA
cttcccccctctctctttct

SEQ ID NO: 34915 - RNA, 20 nt, synthetic construct
  source 1..20: mol_type = other RNA
cttcccctgctgttcccaag

SEQ ID NO: 34916 - RNA, 20 nt, synthetic construct
  source 1..20: mol_type = other RNA
cttcccctggtcgagctggg

SEQ ID NO: 34917 - RNA, 20 nt, synthetic construct
  source 1..20: mol_type = other RNA
cttcccctttctttggtttt

SEQ ID NO: 34918 - RNA, 20 nt, synthetic construct
  source 1..20: mol_type = other RNA
cttccctaaagagaatctta

SEQ ID NO: 34919 - RNA, 20 nt, synthetic construct
  source 1..20: mol_type = other RNA
cttccctactcactgaaacc

SEQ ID NO: 34920 - RNA, 20 nt, synthetic construct
  source 1..20: mol_type = other RNA
cttccctagcccagcacttc

SEQ ID NO: 34921 - RNA, 20 nt, synthetic construct
  source 1..20: mol_type = other RNA
cttccctctcagtggtgctt

SEQ ID NO: 34922 - RNA, 20 nt, synthetic construct
  source 1..20: mol_type = other RNA
cttccctctttctcaacttc

SEQ ID NO: 34923 - RNA, 20 nt, synthetic construct
  source 1..20: mol_type = other RNA
cttccctgaacaatgatttt

SEQ ID NO: 34924 - RNA, 20 nt, synthetic construct
  source 1..20: mol_type = other RNA
cttcccttaacctttttctt

SEQ ID NO: 34925 - RNA, 20 nt, synthetic construct
  source 1..20: mol_type = other RNA
cttcccttagctctcatgtc

SEQ ID NO: 34926 - RNA, 20 nt, synthetic construct
  source 1..20: mol_type = other RNA
cttcccttctcgaagtggtg

SEQ ID NO: 34927 - RNA, 20 nt, synthetic construct
  source 1..20: mol_type = other RNA
cttcccttgtgcacctcggg

SEQ ID NO: 34928 - RNA, 20 nt, synthetic construct
  source 1..20: mol_type = other RNA
cttccgacctgtagattggg

SEQ ID NO: 34929 - RNA, 20 nt, synthetic construct
  source 1..20: mol_type = other RNA
cttccgggacttggaagtga

SEQ ID NO: 34930 - RNA, 20 nt, synthetic construct
  source 1..20: mol_type = other RNA
cttccgtctcaagattgtgt

SEQ ID NO: 34931 - RNA, 20 nt, synthetic construct
  source 1..20: mol_type = other RNA
cttcctaaacctgctacgaa

SEQ ID NO: 34932 - RNA, 20 nt, synthetic construct
  source 1..20: mol_type = other RNA
cttcctaaagagagtgacag

SEQ ID NO: 34933 - RNA, 20 nt, synthetic construct
  source 1..20: mol_type = other RNA
cttcctaactggtctccttt

SEQ ID NO: 34934 - RNA, 20 nt, synthetic construct
  source 1..20: mol_type = other RNA
cttcctaagaaagggtgtgt

SEQ ID NO: 34935 - RNA, 20 nt, synthetic construct
  source 1..20: mol_type = other RNA
cttcctacacatatctttag

SEQ ID NO: 34936 - RNA, 20 nt, synthetic construct
  source 1..20: mol_type = other RNA
cttcctacccaagcttaggt

SEQ ID NO: 34937 - RNA, 20 nt, synthetic construct
  source 1..20: mol_type = other RNA
cttcctaccctgccttcctt

SEQ ID NO: 34938 - RNA, 20 nt, synthetic construct
  source 1..20: mol_type = other RNA
cttcctattagaagaatgat

SEQ ID NO: 34939 - RNA, 20 nt, synthetic construct
  source 1..20: mol_type = other RNA
cttcctattttataatgggc

SEQ ID NO: 34940 - RNA, 20 nt, synthetic construct
  source 1..20: mol_type = other RNA
cttcctcaggatctacatta

SEQ ID NO: 34941 - RNA, 20 nt, synthetic construct
  source 1..20: mol_type = other RNA
cttcctcatccctcatatca

SEQ ID NO: 34942 - RNA, 20 nt, synthetic construct
  source 1..20: mol_type = other RNA
cttcctcctctggacattat

SEQ ID NO: 34943 - RNA, 20 nt, synthetic construct
  source 1..20: mol_type = other RNA
cttcctctcttaaatccgag

SEQ ID NO: 34944 - RNA, 20 nt, synthetic construct
  source 1..20: mol_type = other RNA
cttcctctggctgacctggt

SEQ ID NO: 34945 - RNA, 20 nt, synthetic construct
  source 1..20: mol_type = other RNA
cttcctcttcctcatccctc

SEQ ID NO: 34946 - RNA, 20 nt, synthetic construct
  source 1..20: mol_type = other RNA
cttcctgacctctgcagtta

SEQ ID NO: 34947 - RNA, 20 nt, synthetic construct
  source 1..20: mol_type = other RNA
cttcctggctctagcccagc

SEQ ID NO: 34948 - RNA, 20 nt, synthetic construct
  source 1..20: mol_type = other RNA
cttcctgtatatctcctttt

SEQ ID NO: 34949 - RNA, 20 nt, synthetic construct
  source 1..20: mol_type = other RNA
cttcctgtcttggacccatg

SEQ ID NO: 34950 - RNA, 20 nt, synthetic construct
  source 1..20: mol_type = other RNA
cttcctgttctttgttagtt

SEQ ID NO: 34951 - RNA, 20 nt, synthetic construct
  source 1..20: mol_type = other RNA
cttcctgttgctttaacctc

SEQ ID NO: 34952 - RNA, 20 nt, synthetic construct
  source 1..20: mol_type = other RNA
cttcctgttttagtggctca

SEQ ID NO: 34953 - RNA, 20 nt, synthetic construct
  source 1..20: mol_type = other RNA
cttccttaatgtttagtaga

SEQ ID NO: 34954 - RNA, 20 nt, synthetic construct
  source 1..20: mol_type = other RNA
cttccttatccgataaaggg

SEQ ID NO: 34955 - RNA, 20 nt, synthetic construct
  source 1..20: mol_type = other RNA
cttccttcatgtcccctgtc

SEQ ID NO: 34956 - RNA, 20 nt, synthetic construct
  source 1..20: mol_type = other RNA
cttccttctcttatactagt

SEQ ID NO: 34957 - RNA, 20 nt, synthetic construct
  source 1..20: mol_type = other RNA
cttccttgatcagcttccta

SEQ ID NO: 34958 - RNA, 20 nt, synthetic construct
  source 1..20: mol_type = other RNA
cttccttgctatgtaatctc

SEQ ID NO: 34959 - RNA, 20 nt, synthetic construct
  source 1..20: mol_type = other RNA
cttccttgctcaggagtaac

SEQ ID NO: 34960 - RNA, 20 nt, synthetic construct
  source 1..20: mol_type = other RNA
cttccttgcttgtcttgaat

SEQ ID NO: 34961 - RNA, 20 nt, synthetic construct
  source 1..20: mol_type = other RNA
cttccttgggcacactcccc

SEQ ID NO: 34962 - RNA, 20 nt, synthetic construct
  source 1..20: mol_type = other RNA
cttccttgtgtcttaaattc

SEQ ID NO: 34963 - RNA, 20 nt, synthetic construct
  source 1..20: mol_type = other RNA
cttcctttgatgacttacag

SEQ ID NO: 34964 - RNA, 20 nt, synthetic construct
  source 1..20: mol_type = other RNA
cttcgaaagttcagatagaa

SEQ ID NO: 34965 - RNA, 20 nt, synthetic construct
  source 1..20: mol_type = other RNA
cttcgaactaaggaaagctc

SEQ ID NO: 34966 - RNA, 20 nt, synthetic construct
  source 1..20: mol_type = other RNA
cttcgaagcaaaacatatgt

SEQ ID NO: 34967 - RNA, 20 nt, synthetic construct
  source 1..20: mol_type = other RNA
cttcgaagcttattaaaatg

SEQ ID NO: 34968 - RNA, 20 nt, synthetic construct
  source 1..20: mol_type = other RNA
cttcgacagtcccttgcctg

SEQ ID NO: 34969 - RNA, 20 nt, synthetic construct
  source 1..20: mol_type = other RNA
cttcgagaagggaagtaaag

SEQ ID NO: 34970 - RNA, 20 nt, synthetic construct
  source 1..20: mol_type = other RNA
cttcgaggcatctagttacc

SEQ ID NO: 34971 - RNA, 20 nt, synthetic construct
  source 1..20: mol_type = other RNA
cttcgagggggctgagtatg

SEQ ID NO: 34972 - RNA, 20 nt, synthetic construct
  source 1..20: mol_type = other RNA
cttcgaggtcgcaccctgag

SEQ ID NO: 34973 - RNA, 20 nt, synthetic construct
  source 1..20: mol_type = other RNA
cttcgagttctgggagttca

SEQ ID NO: 34974 - RNA, 20 nt, synthetic construct
  source 1..20: mol_type = other RNA
cttcgcagggtgaaacttga

SEQ ID NO: 34975 - RNA, 20 nt, synthetic construct
  source 1..20: mol_type = other RNA
cttcgcctttctcgcagcgg

SEQ ID NO: 34976 - RNA, 20 nt, synthetic construct
  source 1..20: mol_type = other RNA
cttcgcctttgttgccaggt

SEQ ID NO: 34977 - RNA, 20 nt, synthetic construct
  source 1..20: mol_type = other RNA
cttcgcgcgcggcagggatg

SEQ ID NO: 34978 - RNA, 20 nt, synthetic construct
  source 1..20: mol_type = other RNA
cttcgcgggcaccttcccta

SEQ ID NO: 34979 - RNA, 20 nt, synthetic construct
  source 1..20: mol_type = other RNA
cttcgctcttttaaaaatta

SEQ ID NO: 34980 - RNA, 20 nt, synthetic construct
  source 1..20: mol_type = other RNA
cttcgggtgtcagaattcca

SEQ ID NO: 34981 - RNA, 20 nt, synthetic construct
  source 1..20: mol_type = other RNA
cttcgtcaaggggagaggcc

SEQ ID NO: 34982 - RNA, 20 nt, synthetic construct
  source 1..20: mol_type = other RNA
cttcgtgtgtggagtggggc

SEQ ID NO: 34983 - RNA, 20 nt, synthetic construct
  source 1..20: mol_type = other RNA
cttcgttcagtttagtaaat

SEQ ID NO: 34984 - RNA, 20 nt, synthetic construct
  source 1..20: mol_type = other RNA
cttctaaaatcatcacagta

SEQ ID NO: 34985 - RNA, 20 nt, synthetic construct
  source 1..20: mol_type = other RNA
cttctaaccctcaaatgcca

SEQ ID NO: 34986 - RNA, 20 nt, synthetic construct
  source 1..20: mol_type = other RNA
cttctaactttagaacatat

SEQ ID NO: 34987 - RNA, 20 nt, synthetic construct
  source 1..20: mol_type = other RNA
cttctaagctaagagtttta

SEQ ID NO: 34988 - RNA, 20 nt, synthetic construct
  source 1..20: mol_type = other RNA
cttctaataggaagtggcta

SEQ ID NO: 34989 - RNA, 20 nt, synthetic construct
  source 1..20: mol_type = other RNA
cttctaatcagtaacttaaa

SEQ ID NO: 34990 - RNA, 20 nt, synthetic construct
  source 1..20: mol_type = other RNA
cttctaatgcccattaaaac

SEQ ID NO: 34991 - RNA, 20 nt, synthetic construct
  source 1..20: mol_type = other RNA
cttctacaatggttgaacta

SEQ ID NO: 34992 - RNA, 20 nt, synthetic construct
  source 1..20: mol_type = other RNA
cttctacagaatgttcaagt

SEQ ID NO: 34993 - RNA, 20 nt, synthetic construct
  source 1..20: mol_type = other RNA
cttctacatccccccacccc

SEQ ID NO: 34994 - RNA, 20 nt, synthetic construct
  source 1..20: mol_type = other RNA
cttctacccactattgaaag

SEQ ID NO: 34995 - RNA, 20 nt, synthetic construct
  source 1..20: mol_type = other RNA
cttctaccttgaaaatgccc

SEQ ID NO: 34996 - RNA, 20 nt, synthetic construct
  source 1..20: mol_type = other RNA
cttctaccttttgttattaa

SEQ ID NO: 34997 - RNA, 20 nt, synthetic construct
  source 1..20: mol_type = other RNA
cttctactcactgtactact

SEQ ID NO: 34998 - RNA, 20 nt, synthetic construct
  source 1..20: mol_type = other RNA
cttctactgtgaattcacta

SEQ ID NO: 34999 - RNA, 20 nt, synthetic construct
  source 1..20: mol_type = other RNA
cttctacttatcttttctag

SEQ ID NO: 35000 - RNA, 20 nt, synthetic construct
  source 1..20: mol_type = other RNA
cttctagccaaagcaagcct

SEQ ID NO: 35001 - RNA, 20 nt, synthetic construct
  source 1..20: mol_type = other RNA
cttctagcctccagaaaacc

SEQ ID NO: 35002 - RNA, 20 nt, synthetic construct
  source 1..20: mol_type = other RNA
cttctagctttcagcactgc

SEQ ID NO: 35003 - RNA, 20 nt, synthetic construct
  source 1..20: mol_type = other RNA
cttctagtaacttggtcgaa

SEQ ID NO: 35004 - RNA, 20 nt, synthetic construct
  source 1..20: mol_type = other RNA
cttctagtcacatttgcttt

SEQ ID NO: 35005 - RNA, 20 nt, synthetic construct
  source 1..20: mol_type = other RNA
cttctatccagtgacacctg

SEQ ID NO: 35006 - RNA, 20 nt, synthetic construct
  source 1..20: mol_type = other RNA
cttctatgtgacaaacactt

SEQ ID NO: 35007 - RNA, 20 nt, synthetic construct
  source 1..20: mol_type = other RNA
cttctattccagagaattca

SEQ ID NO: 35008 - RNA, 20 nt, synthetic construct
  source 1..20: mol_type = other RNA
cttctattccattgttctct

SEQ ID NO: 35009 - RNA, 20 nt, synthetic construct
  source 1..20: mol_type = other RNA
cttctcaaacaggatacaaa

SEQ ID NO: 35010 - RNA, 20 nt, synthetic construct
  source 1..20: mol_type = other RNA
cttctcaaactgtgtgcttg

SEQ ID NO: 35011 - RNA, 20 nt, synthetic construct
  source 1..20: mol_type = other RNA
cttctcaataaggaaagcac

SEQ ID NO: 35012 - RNA, 20 nt, synthetic construct
  source 1..20: mol_type = other RNA
cttctcagaaggacaccagt

SEQ ID NO: 35013 - RNA, 20 nt, synthetic construct
  source 1..20: mol_type = other RNA
cttctcagatctgttgcagt

SEQ ID NO: 35014 - RNA, 20 nt, synthetic construct
  source 1..20: mol_type = other RNA
cttctcagctatagcttctg

SEQ ID NO: 35015 - RNA, 20 nt, synthetic construct
  source 1..20: mol_type = other RNA
cttctcagggcctgcttttg

SEQ ID NO: 35016 - RNA, 20 nt, synthetic construct
  source 1..20: mol_type = other RNA
cttctcagttgcagcatgct

SEQ ID NO: 35017 - RNA, 20 nt, synthetic construct
  source 1..20: mol_type = other RNA
cttctcatacagattttatt

SEQ ID NO: 35018 - RNA, 20 nt, synthetic construct
  source 1..20: mol_type = other RNA
cttctcatagtcttccaaaa

SEQ ID NO: 35019 - RNA, 20 nt, synthetic construct
  source 1..20: mol_type = other RNA
cttctccaaggaaagtgtgc

SEQ ID NO: 35020 - RNA, 20 nt, synthetic construct
  source 1..20: mol_type = other RNA
cttctccctcttcgctcttt

SEQ ID NO: 35021 - RNA, 20 nt, synthetic construct
  source 1..20: mol_type = other RNA
cttctcctccaacccattcc

SEQ ID NO: 35022 - RNA, 20 nt, synthetic construct
  source 1..20: mol_type = other RNA
cttctcgaagtggtgcttga

SEQ ID NO: 35023 - RNA, 20 nt, synthetic construct
  source 1..20: mol_type = other RNA
cttctcgtgtgagctctagc

SEQ ID NO: 35024 - RNA, 20 nt, synthetic construct
  source 1..20: mol_type = other RNA
cttctctaatgtaaacagca

SEQ ID NO: 35025 - RNA, 20 nt, synthetic construct
  source 1..20: mol_type = other RNA
cttctctactctgcctcagt

SEQ ID NO: 35026 - RNA, 20 nt, synthetic construct
  source 1..20: mol_type = other RNA
cttctctcagagggaaactg

SEQ ID NO: 35027 - RNA, 20 nt, synthetic construct
  source 1..20: mol_type = other RNA
cttctctcctttgaggtaag

SEQ ID NO: 35028 - RNA, 20 nt, synthetic construct
  source 1..20: mol_type = other RNA
cttctctctctgcttcacta

SEQ ID NO: 35029 - RNA, 20 nt, synthetic construct
  source 1..20: mol_type = other RNA
cttctctcttccaaataatc

SEQ ID NO: 35030 - RNA, 20 nt, synthetic construct
  source 1..20: mol_type = other RNA
cttctctgctgctgaaaaag

SEQ ID NO: 35031 - RNA, 20 nt, synthetic construct
  source 1..20: mol_type = other RNA
cttctctggagcaagcatga

SEQ ID NO: 35032 - RNA, 20 nt, synthetic construct
  source 1..20: mol_type = other RNA
cttctcttatactagtagaa

SEQ ID NO: 35033 - RNA, 20 nt, synthetic construct
  source 1..20: mol_type = other RNA
cttctgaagaaattatctgt

SEQ ID NO: 35034 - RNA, 20 nt, synthetic construct
  source 1..20: mol_type = other RNA
cttctgaagaggctttctgt

SEQ ID NO: 35035 - RNA, 20 nt, synthetic construct
  source 1..20: mol_type = other RNA
cttctgaaggcactaacaaa

SEQ ID NO: 35036 - RNA, 20 nt, synthetic construct
  source 1..20: mol_type = other RNA
cttctgaaggtgcctgccat

SEQ ID NO: 35037 - RNA, 20 nt, synthetic construct
  source 1..20: mol_type = other RNA
cttctgaattgagatgtact

SEQ ID NO: 35038 - RNA, 20 nt, synthetic construct
  source 1..20: mol_type = other RNA
cttctgagaaggcgaaatgt

SEQ ID NO: 35039 - RNA, 20 nt, synthetic construct
  source 1..20: mol_type = other RNA
cttctgagcagtgtttccta

SEQ ID NO: 35040 - RNA, 20 nt, synthetic construct
  source 1..20: mol_type = other RNA
cttctgagctgttaatggtt

SEQ ID NO: 35041 - RNA, 20 nt, synthetic construct
  source 1..20: mol_type = other RNA
cttctgaggagctgagacca

SEQ ID NO: 35042 - RNA, 20 nt, synthetic construct
  source 1..20: mol_type = other RNA
cttctgagtgttacttgaaa

SEQ ID NO: 35043 - RNA, 20 nt, synthetic construct
  source 1..20: mol_type = other RNA
cttctgataggaatatcgtc

SEQ ID NO: 35044 - RNA, 20 nt, synthetic construct
  source 1..20: mol_type = other RNA
cttctgatatcctgtaaacc

SEQ ID NO: 35045 - RNA, 20 nt, synthetic construct
  source 1..20: mol_type = other RNA
cttctgatcacagaagtgtt

SEQ ID NO: 35046 - RNA, 20 nt, synthetic construct
  source 1..20: mol_type = other RNA
cttctgcaagttgctatcca

SEQ ID NO: 35047 - RNA, 20 nt, synthetic construct
  source 1..20: mol_type = other RNA
cttctgcaggctgaactgct

SEQ ID NO: 35048 - RNA, 20 nt, synthetic construct
  source 1..20: mol_type = other RNA
cttctgccttgacctcccaa

SEQ ID NO: 35049 - RNA, 20 nt, synthetic construct
  source 1..20: mol_type = other RNA
cttctgctcactttgggatt

SEQ ID NO: 35050 - RNA, 20 nt, synthetic construct
  source 1..20: mol_type = other RNA
cttctgctcggctctgtcac

SEQ ID NO: 35051 - RNA, 20 nt, synthetic construct
  source 1..20: mol_type = other RNA
cttctgctgggcccactctc

SEQ ID NO: 35052 - RNA, 20 nt, synthetic construct
  source 1..20: mol_type = other RNA
cttctggaaagttcaaatga

SEQ ID NO: 35053 - RNA, 20 nt, synthetic construct
  source 1..20: mol_type = other RNA
cttctggaagatttctactg

SEQ ID NO: 35054 - RNA, 20 nt, synthetic construct
  source 1..20: mol_type = other RNA
cttctggatagcattatccc

SEQ ID NO: 35055 - RNA, 20 nt, synthetic construct
  source 1..20: mol_type = other RNA
cttctggatgtgtatgatca

SEQ ID NO: 35056 - RNA, 20 nt, synthetic construct
  source 1..20: mol_type = other RNA
cttctggggttcaaaccacc

SEQ ID NO: 35057 - RNA, 20 nt, synthetic construct
  source 1..20: mol_type = other RNA
cttctgtaatattaaccaag

SEQ ID NO: 35058 - RNA, 20 nt, synthetic construct
  source 1..20: mol_type = other RNA
cttctgtattaaatcttcaa

SEQ ID NO: 35059 - RNA, 20 nt, synthetic construct
  source 1..20: mol_type = other RNA
cttctgtgatcagaagagca

SEQ ID NO: 35060 - RNA, 20 nt, synthetic construct
  source 1..20: mol_type = other RNA
cttctgttaatagataggtc

SEQ ID NO: 35061 - RNA, 20 nt, synthetic construct
  source 1..20: mol_type = other RNA
cttctgttattttagaaaga

SEQ ID NO: 35062 - RNA, 20 nt, synthetic construct
  source 1..20: mol_type = other RNA
cttctgttggagagatggta

SEQ ID NO: 35063 - RNA, 20 nt, synthetic construct
  source 1..20: mol_type = other RNA
cttctgtttttcttagtcta

SEQ ID NO: 35064 - RNA, 20 nt, synthetic construct
  source 1..20: mol_type = other RNA
cttcttaaatgtgaattaga

SEQ ID NO: 35065 - RNA, 20 nt, synthetic construct
  source 1..20: mol_type = other RNA
cttcttaagacatttgggaa

SEQ ID NO: 35066 - RNA, 20 nt, synthetic construct
  source 1..20: mol_type = other RNA
cttcttagtaaatatccgaa

SEQ ID NO: 35067 - RNA, 20 nt, synthetic construct
  source 1..20: mol_type = other RNA
cttcttagtgttcccttctt

SEQ ID NO: 35068 - RNA, 20 nt, synthetic construct
  source 1..20: mol_type = other RNA
cttcttattggttatctgta

SEQ ID NO: 35069 - RNA, 20 nt, synthetic construct
  source 1..20: mol_type = other RNA
cttcttatttccttccagtt

SEQ ID NO: 35070 - RNA, 20 nt, synthetic construct
  source 1..20: mol_type = other RNA
cttcttatttgttactgatc

SEQ ID NO: 35071 - RNA, 20 nt, synthetic construct
  source 1..20: mol_type = other RNA
cttcttcaaaagacatcact

SEQ ID NO: 35072 - RNA, 20 nt, synthetic construct
  source 1..20: mol_type = other RNA
cttcttcacacattaactat

SEQ ID NO: 35073 - RNA, 20 nt, synthetic construct
  source 1..20: mol_type = other RNA
cttcttctaagctaagagtt

SEQ ID NO: 35074 - RNA, 20 nt, synthetic construct
  source 1..20: mol_type = other RNA
cttcttctgttattttagaa

SEQ ID NO: 35075 - RNA, 20 nt, synthetic construct
  source 1..20: mol_type = other RNA
cttcttctgttggagagatg

SEQ ID NO: 35076 - RNA, 20 nt, synthetic construct
  source 1..20: mol_type = other RNA
cttcttgagagtctcttaag

SEQ ID NO: 35077 - RNA, 20 nt, synthetic construct
  source 1..20: mol_type = other RNA
cttcttggagtaaacctgca

SEQ ID NO: 35078 - RNA, 20 nt, synthetic construct
  source 1..20: mol_type = other RNA
cttcttggattttcttcatt

SEQ ID NO: 35079 - RNA, 20 nt, synthetic construct
  source 1..20: mol_type = other RNA
cttcttgttagaattttgct

SEQ ID NO: 35080 - RNA, 20 nt, synthetic construct
  source 1..20: mol_type = other RNA
cttcttgttttgttctcgtt

SEQ ID NO: 35081 - RNA, 20 nt, synthetic construct
  source 1..20: mol_type = other RNA
cttctttctctttcagccat

SEQ ID NO: 35082 - RNA, 20 nt, synthetic construct
  source 1..20: mol_type = other RNA
cttctttctttcaaatgtga

SEQ ID NO: 35083 - RNA, 20 nt, synthetic construct
  source 1..20: mol_type = other RNA
cttctttggctcaatggtta

SEQ ID NO: 35084 - RNA, 20 nt, synthetic construct
  source 1..20: mol_type = other RNA
cttctttgggggaagcagga

SEQ ID NO: 35085 - RNA, 20 nt, synthetic construct
  source 1..20: mol_type = other RNA
cttcttttacttgcttggtt

SEQ ID NO: 35086 - RNA, 20 nt, synthetic construct
  source 1..20: mol_type = other RNA
cttgaaaatgcccttattta

SEQ ID NO: 35087 - RNA, 20 nt, synthetic construct
  source 1..20: mol_type = other RNA
cttgaaaatttccagcattt

SEQ ID NO: 35088 - RNA, 20 nt, synthetic construct
  source 1..20: mol_type = other RNA
cttgaaacctgccatggtgt

SEQ ID NO: 35089 - RNA, 20 nt, synthetic construct
  source 1..20: mol_type = other RNA
cttgaaagatcatttagtaa

SEQ ID NO: 35090 - RNA, 20 nt, synthetic construct
  source 1..20: mol_type = other RNA
cttgaaaggatactgagaac

SEQ ID NO: 35091 - RNA, 20 nt, synthetic construct
  source 1..20: mol_type = other RNA
cttgaaaggggccaggtgtg

SEQ ID NO: 35092 - RNA, 20 nt, synthetic construct
  source 1..20: mol_type = other RNA
cttgaaatcatttcactctt

SEQ ID NO: 35093 - RNA, 20 nt, synthetic construct
  source 1..20: mol_type = other RNA
cttgaacaaatatgaatgaa

SEQ ID NO: 35094 - RNA, 20 nt, synthetic construct
  source 1..20: mol_type = other RNA
cttgaacatgaacgagaaca

SEQ ID NO: 35095 - RNA, 20 nt, synthetic construct
  source 1..20: mol_type = other RNA
cttgaacattctgtagaagt

SEQ ID NO: 35096 - RNA, 20 nt, synthetic construct
  source 1..20: mol_type = other RNA
cttgaacccgaggtgcacaa

SEQ ID NO: 35097 - RNA, 20 nt, synthetic construct
  source 1..20: mol_type = other RNA
cttgaacctgaaaaacggag

SEQ ID NO: 35098 - RNA, 20 nt, synthetic construct
  source 1..20: mol_type = other RNA
cttgaaccttcctcttcctc

SEQ ID NO: 35099 - RNA, 20 nt, synthetic construct
  source 1..20: mol_type = other RNA
cttgaactaagtgtgaagat

SEQ ID NO: 35100 - RNA, 20 nt, synthetic construct
  source 1..20: mol_type = other RNA
cttgaactgctggtctggaa

SEQ ID NO: 35101 - RNA, 20 nt, synthetic construct
  source 1..20: mol_type = other RNA
cttgaactgggacttctagc

SEQ ID NO: 35102 - RNA, 20 nt, synthetic construct
  source 1..20: mol_type = other RNA
cttgaagaaaccaagagcat

SEQ ID NO: 35103 - RNA, 20 nt, synthetic construct
  source 1..20: mol_type = other RNA
cttgaagagcgcttctatgt

SEQ ID NO: 35104 - RNA, 20 nt, synthetic construct
  source 1..20: mol_type = other RNA
cttgaagatggcaaacagac

SEQ ID NO: 35105 - RNA, 20 nt, synthetic construct
  source 1..20: mol_type = other RNA
cttgaaggcaatgtagggaa

SEQ ID NO: 35106 - RNA, 20 nt, synthetic construct
  source 1..20: mol_type = other RNA
cttgaagtacttcagcgctt

SEQ ID NO: 35107 - RNA, 20 nt, synthetic construct
  source 1..20: mol_type = other RNA
cttgaagtcagttacagcat

SEQ ID NO: 35108 - RNA, 20 nt, synthetic construct
  source 1..20: mol_type = other RNA
cttgaatactcgtgtgtctc

SEQ ID NO: 35109 - RNA, 20 nt, synthetic construct
  source 1..20: mol_type = other RNA
cttgaatagcatcttagctc

SEQ ID NO: 35110 - RNA, 20 nt, synthetic construct
  source 1..20: mol_type = other RNA
cttgaatctctctatccacc

SEQ ID NO: 35111 - RNA, 20 nt, synthetic construct
  source 1..20: mol_type = other RNA
cttgaatgtgcctacatagt

SEQ ID NO: 35112 - RNA, 20 nt, synthetic construct
  source 1..20: mol_type = other RNA
cttgaattagtgattttacc

SEQ ID NO: 35113 - RNA, 20 nt, synthetic construct
  source 1..20: mol_type = other RNA
cttgaattcagatggcccca

SEQ ID NO: 35114 - RNA, 20 nt, synthetic construct
  source 1..20: mol_type = other RNA
cttgacaaaaggccccttga

SEQ ID NO: 35115 - RNA, 20 nt, synthetic construct
  source 1..20: mol_type = other RNA
cttgacaagtatattacaaa

SEQ ID NO: 35116 - RNA, 20 nt, synthetic construct
  source 1..20: mol_type = other RNA
cttgacaataaatggtgcag

SEQ ID NO: 35117 - RNA, 20 nt, synthetic construct
  source 1..20: mol_type = other RNA
cttgacacaaaggactggaa

SEQ ID NO: 35118 - RNA, 20 nt, synthetic construct
  source 1..20: mol_type = other RNA
cttgacatgattgaggactt

SEQ ID NO: 35119 - RNA, 20 nt, synthetic construct
  source 1..20: mol_type = other RNA
cttgacattcttaccttcta

SEQ ID NO: 35120 - RNA, 20 nt, synthetic construct
  source 1..20: mol_type = other RNA
cttgacctcagtggtagtta

SEQ ID NO: 35121 - RNA, 20 nt, synthetic construct
  source 1..20: mol_type = other RNA
cttgacctcccaaaggactg

SEQ ID NO: 35122 - RNA, 20 nt, synthetic construct
  source 1..20: mol_type = other RNA
cttgaccttagttttcactt

SEQ ID NO: 35123 - RNA, 20 nt, synthetic construct
  source 1..20: mol_type = other RNA
cttgaccttgtgcatgtgca

SEQ ID NO: 35124 - RNA, 20 nt, synthetic construct
  source 1..20: mol_type = other RNA
cttgacgaagtcacattcta

SEQ ID NO: 35125 - RNA, 20 nt, synthetic construct
  source 1..20: mol_type = other RNA
cttgactattttaccctcat

SEQ ID NO: 35126 - RNA, 20 nt, synthetic construct
  source 1..20: mol_type = other RNA
cttgacttcacttccaagtc

SEQ ID NO: 35127 - RNA, 20 nt, synthetic construct
  source 1..20: mol_type = other RNA
cttgagacggaagactcata

SEQ ID NO: 35128 - RNA, 20 nt, synthetic construct
  source 1..20: mol_type = other RNA
cttgagagagataaaacctg

SEQ ID NO: 35129 - RNA, 20 nt, synthetic construct
  source 1..20: mol_type = other RNA
cttgagagcagagacacaca

SEQ ID NO: 35130 - RNA, 20 nt, synthetic construct
  source 1..20: mol_type = other RNA
cttgagagtctcttaagacc

SEQ ID NO: 35131 - RNA, 20 nt, synthetic construct
  source 1..20: mol_type = other RNA
cttgagcagatcagtaacaa

SEQ ID NO: 35132 - RNA, 20 nt, synthetic construct
  source 1..20: mol_type = other RNA
cttgagccccagaataggca

SEQ ID NO: 35133 - RNA, 20 nt, synthetic construct
  source 1..20: mol_type = other RNA
cttgaggtgagacagaccct

SEQ ID NO: 35134 - RNA, 20 nt, synthetic construct
  source 1..20: mol_type = other RNA
cttgaggtgattaaaggccc

SEQ ID NO: 35135 - RNA, 20 nt, synthetic construct
  source 1..20: mol_type = other RNA
cttgaggtgattcagagtgc

SEQ ID NO: 35136 - RNA, 20 nt, synthetic construct
  source 1..20: mol_type = other RNA
cttgaggtttacttggggag

SEQ ID NO: 35137 - RNA, 20 nt, synthetic construct
  source 1..20: mol_type = other RNA
cttgagtatttttgagcttt

SEQ ID NO: 35138 - RNA, 20 nt, synthetic construct
  source 1..20: mol_type = other RNA
cttgagtctgtgctctgtat

SEQ ID NO: 35139 - RNA, 20 nt, synthetic construct
  source 1..20: mol_type = other RNA
cttgagtgcaggagtttgag

SEQ ID NO: 35140 - RNA, 20 nt, synthetic construct
  source 1..20: mol_type = other RNA
cttgagttaggaatttacat

SEQ ID NO: 35141 - RNA, 20 nt, synthetic construct
  source 1..20: mol_type = other RNA
cttgagtttgttctgtcaca

SEQ ID NO: 35142 - RNA, 20 nt, synthetic construct
  source 1..20: mol_type = other RNA
cttgatcagcttcctaccca

SEQ ID NO: 35143 - RNA, 20 nt, synthetic construct
  source 1..20: mol_type = other RNA
cttgatcagggatttggcca

SEQ ID NO: 35144 - RNA, 20 nt, synthetic construct
  source 1..20: mol_type = other RNA
cttgatccaggtgtatgatc

SEQ ID NO: 35145 - RNA, 20 nt, synthetic construct
  source 1..20: mol_type = other RNA
cttgatccattacatcaaca

SEQ ID NO: 35146 - RNA, 20 nt, synthetic construct
  source 1..20: mol_type = other RNA
cttgatctaaaatggaagac

SEQ ID NO: 35147 - RNA, 20 nt, synthetic construct
  source 1..20: mol_type = other RNA
cttgatctacatttagattt

SEQ ID NO: 35148 - RNA, 20 nt, synthetic construct
  source 1..20: mol_type = other RNA
cttgatctttacttcccttc

SEQ ID NO: 35149 - RNA, 20 nt, synthetic construct
  source 1..20: mol_type = other RNA
cttgatgatagaataccact

SEQ ID NO: 35150 - RNA, 20 nt, synthetic construct
  source 1..20: mol_type = other RNA
cttgatggtttggggctttt

SEQ ID NO: 35151 - RNA, 20 nt, synthetic construct
  source 1..20: mol_type = other RNA
cttgatgtcacaagccaggg

SEQ ID NO: 35152 - RNA, 20 nt, synthetic construct
  source 1..20: mol_type = other RNA
cttgattacaagggtgacag

SEQ ID NO: 35153 - RNA, 20 nt, synthetic construct
  source 1..20: mol_type = other RNA
cttgattactttacagttat

SEQ ID NO: 35154 - RNA, 20 nt, synthetic construct
  source 1..20: mol_type = other RNA
cttgattagcttcctcagga

SEQ ID NO: 35155 - RNA, 20 nt, synthetic construct
  source 1..20: mol_type = other RNA
cttgatttatggcctaagat

SEQ ID NO: 35156 - RNA, 20 nt, synthetic construct
  source 1..20: mol_type = other RNA
cttgcaaaacaatagcccag

SEQ ID NO: 35157 - RNA, 20 nt, synthetic construct
  source 1..20: mol_type = other RNA
cttgcaaaacggaaacttta

SEQ ID NO: 35158 - RNA, 20 nt, synthetic construct
  source 1..20: mol_type = other RNA
cttgcaagccacattagcca

SEQ ID NO: 35159 - RNA, 20 nt, synthetic construct
  source 1..20: mol_type = other RNA
cttgcaaggcccaccatgat

SEQ ID NO: 35160 - RNA, 20 nt, synthetic construct
  source 1..20: mol_type = other RNA
cttgcacataatataaaaag

SEQ ID NO: 35161 - RNA, 20 nt, synthetic construct
  source 1..20: mol_type = other RNA
cttgcacattagaatcatcc

SEQ ID NO: 35162 - RNA, 20 nt, synthetic construct
  source 1..20: mol_type = other RNA
cttgcaccaactccacattg

SEQ ID NO: 35163 - RNA, 20 nt, synthetic construct
  source 1..20: mol_type = other RNA
cttgcagaagagtgaagctg

SEQ ID NO: 35164 - RNA, 20 nt, synthetic construct
  source 1..20: mol_type = other RNA
cttgcagacaataattcttc

SEQ ID NO: 35165 - RNA, 20 nt, synthetic construct
  source 1..20: mol_type = other RNA
cttgcagccttccctgaaca

SEQ ID NO: 35166 - RNA, 20 nt, synthetic construct
  source 1..20: mol_type = other RNA
cttgcataactcgtaatgcg

SEQ ID NO: 35167 - RNA, 20 nt, synthetic construct
  source 1..20: mol_type = other RNA
cttgcattagagccccaaga

SEQ ID NO: 35168 - RNA, 20 nt, synthetic construct
  source 1..20: mol_type = other RNA
cttgccaacagttactttcc

SEQ ID NO: 35169 - RNA, 20 nt, synthetic construct
  source 1..20: mol_type = other RNA
cttgccaaggcttgctttgg

SEQ ID NO: 35170 - RNA, 20 nt, synthetic construct
  source 1..20: mol_type = other RNA
cttgccatcttgcataagtt

SEQ ID NO: 35171 - RNA, 20 nt, synthetic construct
  source 1..20: mol_type = other RNA
cttgccattctcccagttgt

SEQ ID NO: 35172 - RNA, 20 nt, synthetic construct
  source 1..20: mol_type = other RNA
cttgcccaagctggtcctga

SEQ ID NO: 35173 - RNA, 20 nt, synthetic construct
  source 1..20: mol_type = other RNA
cttgcctaggctggagtgca

SEQ ID NO: 35174 - RNA, 20 nt, synthetic construct
  source 1..20: mol_type = other RNA
cttgcctgacagcaaataaa

SEQ ID NO: 35175 - RNA, 20 nt, synthetic construct
  source 1..20: mol_type = other RNA
cttgcggtcttttagccaac

SEQ ID NO: 35176 - RNA, 20 nt, synthetic construct
  source 1..20: mol_type = other RNA
cttgctaaacatgtatacta

SEQ ID NO: 35177 - RNA, 20 nt, synthetic construct
  source 1..20: mol_type = other RNA
cttgctagtagcagaatccc

SEQ ID NO: 35178 - RNA, 20 nt, synthetic construct
  source 1..20: mol_type = other RNA
cttgctatgtaatctcatgg

SEQ ID NO: 35179 - RNA, 20 nt, synthetic construct
  source 1..20: mol_type = other RNA
cttgctcaggagtaactgct

SEQ ID NO: 35180 - RNA, 20 nt, synthetic construct
  source 1..20: mol_type = other RNA
cttgctcattcatctgcagt

SEQ ID NO: 35181 - RNA, 20 nt, synthetic construct
  source 1..20: mol_type = other RNA
cttgctccagagaagttttc

SEQ ID NO: 35182 - RNA, 20 nt, synthetic construct
  source 1..20: mol_type = other RNA
cttgctctacaaaccttctt

SEQ ID NO: 35183 - RNA, 20 nt, synthetic construct
  source 1..20: mol_type = other RNA
cttgctctcttgcccaagct

SEQ ID NO: 35184 - RNA, 20 nt, synthetic construct
  source 1..20: mol_type = other RNA
cttgctctgcggcaggcatt

SEQ ID NO: 35185 - RNA, 20 nt, synthetic construct
  source 1..20: mol_type = other RNA
cttgctctgtcacccacgtg

SEQ ID NO: 35186 - RNA, 20 nt, synthetic construct
  source 1..20: mol_type = other RNA
cttgctgaagaataactgtc

SEQ ID NO: 35187 - RNA, 20 nt, synthetic construct
  source 1..20: mol_type = other RNA
cttgctgcactggctattag

SEQ ID NO: 35188 - RNA, 20 nt, synthetic construct
  source 1..20: mol_type = other RNA
cttgctgcttctacccacta

SEQ ID NO: 35189 - RNA, 20 nt, synthetic construct
  source 1..20: mol_type = other RNA
cttgctggaagttggcccaa

SEQ ID NO: 35190 - RNA, 20 nt, synthetic construct
  source 1..20: mol_type = other RNA
cttgctgttgtaatgttact

SEQ ID NO: 35191 - RNA, 20 nt, synthetic construct
  source 1..20: mol_type = other RNA
cttgcttaggctgaagcagg

SEQ ID NO: 35192 - RNA, 20 nt, synthetic construct
  source 1..20: mol_type = other RNA
cttgcttgggaacagcaggg

SEQ ID NO: 35193 - RNA, 20 nt, synthetic construct
  source 1..20: mol_type = other RNA
cttgcttggtttcacacgca

SEQ ID NO: 35194 - RNA, 20 nt, synthetic construct
  source 1..20: mol_type = other RNA
cttgcttgtcttgaatagca

SEQ ID NO: 35195 - RNA, 20 nt, synthetic construct
  source 1..20: mol_type = other RNA
cttgctttattacttcagtt

SEQ ID NO: 35196 - RNA, 20 nt, synthetic construct
  source 1..20: mol_type = other RNA
cttgctttgaatttggaaag

SEQ ID NO: 35197 - RNA, 20 nt, synthetic construct
  source 1..20: mol_type = other RNA
cttgctttgctgccccagct

SEQ ID NO: 35198 - RNA, 20 nt, synthetic construct
  source 1..20: mol_type = other RNA
cttgctttggctagaagcat

SEQ ID NO: 35199 - RNA, 20 nt, synthetic construct
  source 1..20: mol_type = other RNA
cttggaaaacaaattgcatc

SEQ ID NO: 35200 - RNA, 20 nt, synthetic construct
  source 1..20: mol_type = other RNA
cttggaaatgatacctcatt

SEQ ID NO: 35201 - RNA, 20 nt, synthetic construct
  source 1..20: mol_type = other RNA
cttggaaattagaaatgtgg

SEQ ID NO: 35202 - RNA, 20 nt, synthetic construct
  source 1..20: mol_type = other RNA
cttggaagtgaagtcaagat

SEQ ID NO: 35203 - RNA, 20 nt, synthetic construct
  source 1..20: mol_type = other RNA
cttggaatgtgcacctccag

SEQ ID NO: 35204 - RNA, 20 nt, synthetic construct
  source 1..20: mol_type = other RNA
cttggacaggggacatgaag

SEQ ID NO: 35205 - RNA, 20 nt, synthetic construct
  source 1..20: mol_type = other RNA
cttggacccatgcccatgtg

SEQ ID NO: 35206 - RNA, 20 nt, synthetic construct
  source 1..20: mol_type = other RNA
cttggagaacttaaaggttt

SEQ ID NO: 35207 - RNA, 20 nt, synthetic construct
  source 1..20: mol_type = other RNA
cttggagaagagttctgaag

SEQ ID NO: 35208 - RNA, 20 nt, synthetic construct
  source 1..20: mol_type = other RNA
cttggagagaaaccttggtg

SEQ ID NO: 35209 - RNA, 20 nt, synthetic construct
  source 1..20: mol_type = other RNA
cttggaggagccctgctgtg

SEQ ID NO: 35210 - RNA, 20 nt, synthetic construct
  source 1..20: mol_type = other RNA
cttggagtaaacctgcaatt

SEQ ID NO: 35211 - RNA, 20 nt, synthetic construct
  source 1..20: mol_type = other RNA
cttggagtcacttgacaaaa

SEQ ID NO: 35212 - RNA, 20 nt, synthetic construct
  source 1..20: mol_type = other RNA
cttggagttttccccctaca

SEQ ID NO: 35213 - RNA, 20 nt, synthetic construct
  source 1..20: mol_type = other RNA
cttggatattctacagaaaa

SEQ ID NO: 35214 - RNA, 20 nt, synthetic construct
  source 1..20: mol_type = other RNA
cttggatcttatctgctgtc

SEQ ID NO: 35215 - RNA, 20 nt, synthetic construct
  source 1..20: mol_type = other RNA
cttggattgctaaactgttc

SEQ ID NO: 35216 - RNA, 20 nt, synthetic construct
  source 1..20: mol_type = other RNA
cttggattgtgtgtcgagaa

SEQ ID NO: 35217 - RNA, 20 nt, synthetic construct
  source 1..20: mol_type = other RNA
cttggattttcttcatttaa

SEQ ID NO: 35218 - RNA, 20 nt, synthetic construct
  source 1..20: mol_type = other RNA
cttggcaaggggaatggtac

SEQ ID NO: 35219 - RNA, 20 nt, synthetic construct
  source 1..20: mol_type = other RNA
cttggcacagaattattgat

SEQ ID NO: 35220 - RNA, 20 nt, synthetic construct
  source 1..20: mol_type = other RNA
cttggcacaggagagcgaca

SEQ ID NO: 35221 - RNA, 20 nt, synthetic construct
  source 1..20: mol_type = other RNA
cttggccaacatggcgaaac

SEQ ID NO: 35222 - RNA, 20 nt, synthetic construct
  source 1..20: mol_type = other RNA
cttggccattttcttttaaa

SEQ ID NO: 35223 - RNA, 20 nt, synthetic construct
  source 1..20: mol_type = other RNA
cttggccgaatgtggtggta

SEQ ID NO: 35224 - RNA, 20 nt, synthetic construct
  source 1..20: mol_type = other RNA
cttggcctccccaagtgctg

SEQ ID NO: 35225 - RNA, 20 nt, synthetic construct
  source 1..20: mol_type = other RNA
cttggccttctgaggagctg

SEQ ID NO: 35226 - RNA, 20 nt, synthetic construct
  source 1..20: mol_type = other RNA
cttggcgcagtgcttagcgc

SEQ ID NO: 35227 - RNA, 20 nt, synthetic construct
  source 1..20: mol_type = other RNA
cttggctagactaagaaaaa

SEQ ID NO: 35228 - RNA, 20 nt, synthetic construct
  source 1..20: mol_type = other RNA
cttggctattgtcagtaatt

SEQ ID NO: 35229 - RNA, 20 nt, synthetic construct
  source 1..20: mol_type = other RNA
cttggctcctcccggctaag

SEQ ID NO: 35230 - RNA, 20 nt, synthetic construct
  source 1..20: mol_type = other RNA
cttggcttttggcagcgtaa

SEQ ID NO: 35231 - RNA, 20 nt, synthetic construct
  source 1..20: mol_type = other RNA
cttgggaacagcaggggaag

SEQ ID NO: 35232 - RNA, 20 nt, synthetic construct
  source 1..20: mol_type = other RNA
cttgggaatactttcccatc

SEQ ID NO: 35233 - RNA, 20 nt, synthetic construct
  source 1..20: mol_type = other RNA
cttgggagaaaatttttaca

SEQ ID NO: 35234 - RNA, 20 nt, synthetic construct
  source 1..20: mol_type = other RNA
cttgggatgcagcaaaagca

SEQ ID NO: 35235 - RNA, 20 nt, synthetic construct
  source 1..20: mol_type = other RNA
cttgggatgtttctaccttt

SEQ ID NO: 35236 - RNA, 20 nt, synthetic construct
  source 1..20: mol_type = other RNA
cttgggcaagagagcaagtc

SEQ ID NO: 35237 - RNA, 20 nt, synthetic construct
  source 1..20: mol_type = other RNA
cttgggcacactccccagtg

SEQ ID NO: 35238 - RNA, 20 nt, synthetic construct
  source 1..20: mol_type = other RNA
cttgggctaaggtggagtgg

SEQ ID NO: 35239 - RNA, 20 nt, synthetic construct
  source 1..20: mol_type = other RNA
cttgggctcccttccagcgt

SEQ ID NO: 35240 - RNA, 20 nt, synthetic construct
  source 1..20: mol_type = other RNA
cttggggaacagtttagcaa

SEQ ID NO: 35241 - RNA, 20 nt, synthetic construct
  source 1..20: mol_type = other RNA
cttggggagagtgggcccag

SEQ ID NO: 35242 - RNA, 20 nt, synthetic construct
  source 1..20: mol_type = other RNA
cttggggaggccaaggcagg

SEQ ID NO: 35243 - RNA, 20 nt, synthetic construct
  source 1..20: mol_type = other RNA
cttggggctctaatgcaaga

SEQ ID NO: 35244 - RNA, 20 nt, synthetic construct
  source 1..20: mol_type = other RNA
cttgggtaggaagctgatca

SEQ ID NO: 35245 - RNA, 20 nt, synthetic construct
  source 1..20: mol_type = other RNA
cttgggtataaatgatgagc

SEQ ID NO: 35246 - RNA, 20 nt, synthetic construct
  source 1..20: mol_type = other RNA
cttgggtgaataacccatat

SEQ ID NO: 35247 - RNA, 20 nt, synthetic construct
  source 1..20: mol_type = other RNA
cttgggtgacctcatgtaac

SEQ ID NO: 35248 - RNA, 20 nt, synthetic construct
  source 1..20: mol_type = other RNA
cttgggtggaagctgtcctt

SEQ ID NO: 35249 - RNA, 20 nt, synthetic construct
  source 1..20: mol_type = other RNA
cttggtaaaaagtgcttcta

SEQ ID NO: 35250 - RNA, 20 nt, synthetic construct
  source 1..20: mol_type = other RNA
cttggtaaaatcactaattc

SEQ ID NO: 35251 - RNA, 20 nt, synthetic construct
  source 1..20: mol_type = other RNA
cttggtaaacagcagtctta

SEQ ID NO: 35252 - RNA, 20 nt, synthetic construct
  source 1..20: mol_type = other RNA
cttggtaagagtgagaccct

SEQ ID NO: 35253 - RNA, 20 nt, synthetic construct
  source 1..20: mol_type = other RNA
cttggtaagctgtgagtcct

SEQ ID NO: 35254 - RNA, 20 nt, synthetic construct
  source 1..20: mol_type = other RNA
cttggtagtttgcacgtttt

SEQ ID NO: 35255 - RNA, 20 nt, synthetic construct
  source 1..20: mol_type = other RNA
cttggtatgcatcttgaact

SEQ ID NO: 35256 - RNA, 20 nt, synthetic construct
  source 1..20: mol_type = other RNA
cttggtcgaaaacctgaaat

SEQ ID NO: 35257 - RNA, 20 nt, synthetic construct
  source 1..20: mol_type = other RNA
cttggtctgcagactcttgt

SEQ ID NO: 35258 - RNA, 20 nt, synthetic construct
  source 1..20: mol_type = other RNA
cttggtctgggtgatatctg

SEQ ID NO: 35259 - RNA, 20 nt, synthetic construct
  source 1..20: mol_type = other RNA
cttggtctttctcccaggtc

SEQ ID NO: 35260 - RNA, 20 nt, synthetic construct
  source 1..20: mol_type = other RNA
cttggtcttttgatttttta

SEQ ID NO: 35261 - RNA, 20 nt, synthetic construct
  source 1..20: mol_type = other RNA
cttggtggcccacacctgca

SEQ ID NO: 35262 - RNA, 20 nt, synthetic construct
  source 1..20: mol_type = other RNA
cttggtggtaactgatgtga

SEQ ID NO: 35263 - RNA, 20 nt, synthetic construct
  source 1..20: mol_type = other RNA
cttggtgtgctcttttcatc

SEQ ID NO: 35264 - RNA, 20 nt, synthetic construct
  source 1..20: mol_type = other RNA
cttggtgtgcttctgatagg

SEQ ID NO: 35265 - RNA, 20 nt, synthetic construct
  source 1..20: mol_type = other RNA
cttggtgttgactgaattaa

SEQ ID NO: 35266 - RNA, 20 nt, synthetic construct
  source 1..20: mol_type = other RNA
cttggttaatattacagaag

SEQ ID NO: 35267 - RNA, 20 nt, synthetic construct
  source 1..20: mol_type = other RNA
cttggttggaaaagaaagct

SEQ ID NO: 35268 - RNA, 20 nt, synthetic construct
  source 1..20: mol_type = other RNA
cttggtttattttctgcatt

SEQ ID NO: 35269 - RNA, 20 nt, synthetic construct
  source 1..20: mol_type = other RNA
cttggtttcacacgcattgc

SEQ ID NO: 35270 - RNA, 20 nt, synthetic construct
  source 1..20: mol_type = other RNA
cttggtttcttcaagatact

SEQ ID NO: 35271 - RNA, 20 nt, synthetic construct
  source 1..20: mol_type = other RNA
cttgtaaaaaattacacttc

SEQ ID NO: 35272 - RNA, 20 nt, synthetic construct
  source 1..20: mol_type = other RNA
cttgtaatcaagtatctccc

SEQ ID NO: 35273 - RNA, 20 nt, synthetic construct
  source 1..20: mol_type = other RNA
cttgtactcccagcctcaaa

SEQ ID NO: 35274 - RNA, 20 nt, synthetic construct
  source 1..20: mol_type = other RNA
cttgtactgtgtggcttctc

SEQ ID NO: 35275 - RNA, 20 nt, synthetic construct
  source 1..20: mol_type = other RNA
cttgtagaggaggagggtta

SEQ ID NO: 35276 - RNA, 20 nt, synthetic construct
  source 1..20: mol_type = other RNA
cttgtagtatttttgcaact

SEQ ID NO: 35277 - RNA, 20 nt, synthetic construct
  source 1..20: mol_type = other RNA
cttgtatccagtaatcttgc

SEQ ID NO: 35278 - RNA, 20 nt, synthetic construct
  source 1..20: mol_type = other RNA
cttgtatgaaattagttcct

SEQ ID NO: 35279 - RNA, 20 nt, synthetic construct
  source 1..20: mol_type = other RNA
cttgtatggagactagtaca

SEQ ID NO: 35280 - RNA, 20 nt, synthetic construct
  source 1..20: mol_type = other RNA
cttgtcaagttctgatttca

SEQ ID NO: 35281 - RNA, 20 nt, synthetic construct
  source 1..20: mol_type = other RNA
cttgtcaataatttggatga

SEQ ID NO: 35282 - RNA, 20 nt, synthetic construct
  source 1..20: mol_type = other RNA
cttgtcacaaaatgtggatg

SEQ ID NO: 35283 - RNA, 20 nt, synthetic construct
  source 1..20: mol_type = other RNA
cttgtcaggtgggcactggg

SEQ ID NO: 35284 - RNA, 20 nt, synthetic construct
  source 1..20: mol_type = other RNA
cttgtcataacagtattgtc

SEQ ID NO: 35285 - RNA, 20 nt, synthetic construct
  source 1..20: mol_type = other RNA
cttgtcatgaatgaatgttg

SEQ ID NO: 35286 - RNA, 20 nt, synthetic construct
  source 1..20: mol_type = other RNA
cttgtcatttctgcttagtc

SEQ ID NO: 35287 - RNA, 20 nt, synthetic construct
  source 1..20: mol_type = other RNA
cttgtcccatggtcaaatca

SEQ ID NO: 35288 - RNA, 20 nt, synthetic construct
  source 1..20: mol_type = other RNA
cttgtcccggcatgcctctc

SEQ ID NO: 35289 - RNA, 20 nt, synthetic construct
  source 1..20: mol_type = other RNA
cttgtcctaaaattccttcc

SEQ ID NO: 35290 - RNA, 20 nt, synthetic construct
  source 1..20: mol_type = other RNA
cttgtctcaacctttgcctc

SEQ ID NO: 35291 - RNA, 20 nt, synthetic construct
  source 1..20: mol_type = other RNA
cttgtctcggatttaagaga

SEQ ID NO: 35292 - RNA, 20 nt, synthetic construct
  source 1..20: mol_type = other RNA
cttgtcttgaatagcatctt

SEQ ID NO: 35293 - RNA, 20 nt, synthetic construct
  source 1..20: mol_type = other RNA
cttgtctttgtctattccct

SEQ ID NO: 35294 - RNA, 20 nt, synthetic construct
  source 1..20: mol_type = other RNA
cttgtcttttctttttcttt

SEQ ID NO: 35295 - RNA, 20 nt, synthetic construct
  source 1..20: mol_type = other RNA
cttgtctttttgtgacttgt

SEQ ID NO: 35296 - RNA, 20 nt, synthetic construct
  source 1..20: mol_type = other RNA
cttgtgaattgataaaagtc

SEQ ID NO: 35297 - RNA, 20 nt, synthetic construct
  source 1..20: mol_type = other RNA
cttgtgacatcaagggtggt

SEQ ID NO: 35298 - RNA, 20 nt, synthetic construct
  source 1..20: mol_type = other RNA
cttgtgatctatgcatactg

SEQ ID NO: 35299 - RNA, 20 nt, synthetic construct
  source 1..20: mol_type = other RNA
cttgtgcacctcgggttcaa

SEQ ID NO: 35300 - RNA, 20 nt, synthetic construct
  source 1..20: mol_type = other RNA
cttgtgcatcagaattccat

SEQ ID NO: 35301 - RNA, 20 nt, synthetic construct
  source 1..20: mol_type = other RNA
cttgtgcatcctttatacct

SEQ ID NO: 35302 - RNA, 20 nt, synthetic construct
  source 1..20: mol_type = other RNA
cttgtgcatgtgcaggaaac

SEQ ID NO: 35303 - RNA, 20 nt, synthetic construct
  source 1..20: mol_type = other RNA
cttgtgcttttaatactttc

SEQ ID NO: 35304 - RNA, 20 nt, synthetic construct
  source 1..20: mol_type = other RNA
cttgtggctacaccctggga

SEQ ID NO: 35305 - RNA, 20 nt, synthetic construct
  source 1..20: mol_type = other RNA
cttgtggctgacatgtgtaa

SEQ ID NO: 35306 - RNA, 20 nt, synthetic construct
  source 1..20: mol_type = other RNA
cttgtgggtattttgttgtt

SEQ ID NO: 35307 - RNA, 20 nt, synthetic construct
  source 1..20: mol_type = other RNA
cttgtggtcttaagagactc

SEQ ID NO: 35308 - RNA, 20 nt, synthetic construct
  source 1..20: mol_type = other RNA
cttgtgtaactaccactgag

SEQ ID NO: 35309 - RNA, 20 nt, synthetic construct
  source 1..20: mol_type = other RNA
cttgtgtagcgggaaaaaat

SEQ ID NO: 35310 - RNA, 20 nt, synthetic construct
  source 1..20: mol_type = other RNA
cttgtgtatcttttgttaga

SEQ ID NO: 35311 - RNA, 20 nt, synthetic construct
  source 1..20: mol_type = other RNA
cttgtgtcttaaattcaaag

SEQ ID NO: 35312 - RNA, 20 nt, synthetic construct
  source 1..20: mol_type = other RNA
cttgtgttttatttggctgt

SEQ ID NO: 35313 - RNA, 20 nt, synthetic construct
  source 1..20: mol_type = other RNA
cttgttaagcattttccggt

SEQ ID NO: 35314 - RNA, 20 nt, synthetic construct
  source 1..20: mol_type = other RNA
cttgttagaattttgctttt

SEQ ID NO: 35315 - RNA, 20 nt, synthetic construct
  source 1..20: mol_type = other RNA
cttgttagtaggaaaaccat

SEQ ID NO: 35316 - RNA, 20 nt, synthetic construct
  source 1..20: mol_type = other RNA
cttgttataagcaaagatat

SEQ ID NO: 35317 - RNA, 20 nt, synthetic construct
  source 1..20: mol_type = other RNA
cttgttcaaaaacctttttt

SEQ ID NO: 35318 - RNA, 20 nt, synthetic construct
  source 1..20: mol_type = other RNA
cttgttcatgtttacagaaa

SEQ ID NO: 35319 - RNA, 20 nt, synthetic construct
  source 1..20: mol_type = other RNA
cttgttgaggatgactgtcc

SEQ ID NO: 35320 - RNA, 20 nt, synthetic construct
  source 1..20: mol_type = other RNA
cttgttggacagctgggaga

SEQ ID NO: 35321 - RNA, 20 nt, synthetic construct
  source 1..20: mol_type = other RNA
cttgtttacccagtgtgttt

SEQ ID NO: 35322 - RNA, 20 nt, synthetic construct
  source 1..20: mol_type = other RNA
cttgtttcttttcactctaa

SEQ ID NO: 35323 - RNA, 20 nt, synthetic construct
  source 1..20: mol_type = other RNA
cttgttttcttgagatggag

SEQ ID NO: 35324 - RNA, 20 nt, synthetic construct
  source 1..20: mol_type = other RNA
cttgttttgttctcgttcat

SEQ ID NO: 35325 - RNA, 20 nt, synthetic construct
  source 1..20: mol_type = other RNA
ctttaaaacactggcaaaaa

SEQ ID NO: 35326 - RNA, 20 nt, synthetic construct
  source 1..20: mol_type = other RNA
ctttaaaaccagagcggaat

SEQ ID NO: 35327 - RNA, 20 nt, synthetic construct
  source 1..20: mol_type = other RNA
ctttaaaactgctgagtctt

SEQ ID NO: 35328 - RNA, 20 nt, synthetic construct
  source 1..20: mol_type = other RNA
ctttaaaagaaagctctcaa

SEQ ID NO: 35329 - RNA, 20 nt, synthetic construct
  source 1..20: mol_type = other RNA
ctttaaactggatgaataca

SEQ ID NO: 35330 - RNA, 20 nt, synthetic construct
  source 1..20: mol_type = other RNA
ctttaaagctctatggcatt

SEQ ID NO: 35331 - RNA, 20 nt, synthetic construct
  source 1..20: mol_type = other RNA
ctttaaagctgaactccttt

SEQ ID NO: 35332 - RNA, 20 nt, synthetic construct
  source 1..20: mol_type = other RNA
ctttaaatcagggcctttaa

SEQ ID NO: 35333 - RNA, 20 nt, synthetic construct
  source 1..20: mol_type = other RNA
ctttaaattttgagacctca

SEQ ID NO: 35334 - RNA, 20 nt, synthetic construct
  source 1..20: mol_type = other RNA
ctttaacctctggtatttta

SEQ ID NO: 35335 - RNA, 20 nt, synthetic construct
  source 1..20: mol_type = other RNA
ctttaacgtatctgggaaaa

SEQ ID NO: 35336 - RNA, 20 nt, synthetic construct
  source 1..20: mol_type = other RNA
ctttaagagtatctttttca

SEQ ID NO: 35337 - RNA, 20 nt, synthetic construct
  source 1..20: mol_type = other RNA
ctttaagcagaaagttacta

SEQ ID NO: 35338 - RNA, 20 nt, synthetic construct
  source 1..20: mol_type = other RNA
ctttaagcatcccatatgga

SEQ ID NO: 35339 - RNA, 20 nt, synthetic construct
  source 1..20: mol_type = other RNA
ctttaaggcgcagacacacc

SEQ ID NO: 35340 - RNA, 20 nt, synthetic construct
  source 1..20: mol_type = other RNA
ctttaagttctccaagttat

SEQ ID NO: 35341 - RNA, 20 nt, synthetic construct
  source 1..20: mol_type = other RNA
ctttaatcaccaggcgcggt

SEQ ID NO: 35342 - RNA, 20 nt, synthetic construct
  source 1..20: mol_type = other RNA
ctttaatcacctcaagtgat

SEQ ID NO: 35343 - RNA, 20 nt, synthetic construct
  source 1..20: mol_type = other RNA
ctttaattatgagcattccc

SEQ ID NO: 35344 - RNA, 20 nt, synthetic construct
  source 1..20: mol_type = other RNA
ctttaatttagcgttcatcc

SEQ ID NO: 35345 - RNA, 20 nt, synthetic construct
  source 1..20: mol_type = other RNA
ctttaatttgggtttgagtt

SEQ ID NO: 35346 - RNA, 20 nt, synthetic construct
  source 1..20: mol_type = other RNA
ctttacagttatgtcagtca

SEQ ID NO: 35347 - RNA, 20 nt, synthetic construct
  source 1..20: mol_type = other RNA
ctttacccctgagaacttca

SEQ ID NO: 35348 - RNA, 20 nt, synthetic construct
  source 1..20: mol_type = other RNA
ctttaccctgctggaacgaa

SEQ ID NO: 35349 - RNA, 20 nt, synthetic construct
  source 1..20: mol_type = other RNA
ctttactactgcattttttg

SEQ ID NO: 35350 - RNA, 20 nt, synthetic construct
  source 1..20: mol_type = other RNA
ctttactcagattcaccaat

SEQ ID NO: 35351 - RNA, 20 nt, synthetic construct
  source 1..20: mol_type = other RNA
ctttactgtattaggatgtg

SEQ ID NO: 35352 - RNA, 20 nt, synthetic construct
  source 1..20: mol_type = other RNA
ctttactgttctccagtccc

SEQ ID NO: 35353 - RNA, 20 nt, synthetic construct
  source 1..20: mol_type = other RNA
ctttacttcccttctcgaag

SEQ ID NO: 35354 - RNA, 20 nt, synthetic construct
  source 1..20: mol_type = other RNA
ctttactttcagctcaaaca

SEQ ID NO: 35355 - RNA, 20 nt, synthetic construct
  source 1..20: mol_type = other RNA
ctttagaacatataatccaa

SEQ ID NO: 35356 - RNA, 20 nt, synthetic construct
  source 1..20: mol_type = other RNA
ctttagacatgggctaaata

SEQ ID NO: 35357 - RNA, 20 nt, synthetic construct
  source 1..20: mol_type = other RNA
ctttagagtcagttgtttac

SEQ ID NO: 35358 - RNA, 20 nt, synthetic construct
  source 1..20: mol_type = other RNA
ctttagatggtaaaacaaat

SEQ ID NO: 35359 - RNA, 20 nt, synthetic construct
  source 1..20: mol_type = other RNA
ctttagatttatcaatagca

SEQ ID NO: 35360 - RNA, 20 nt, synthetic construct
  source 1..20: mol_type = other RNA
ctttaggaagcttccttgat

SEQ ID NO: 35361 - RNA, 20 nt, synthetic construct
  source 1..20: mol_type = other RNA
ctttaggctgttcaatttag

SEQ ID NO: 35362 - RNA, 20 nt, synthetic construct
  source 1..20: mol_type = other RNA
ctttagggaagatagtactg

SEQ ID NO: 35363 - RNA, 20 nt, synthetic construct
  source 1..20: mol_type = other RNA
ctttaggtcagaatacaaaa

SEQ ID NO: 35364 - RNA, 20 nt, synthetic construct
  source 1..20: mol_type = other RNA
ctttaggtgttttttccttc

SEQ ID NO: 35365 - RNA, 20 nt, synthetic construct
  source 1..20: mol_type = other RNA
ctttaggttacgtactaggt

SEQ ID NO: 35366 - RNA, 20 nt, synthetic construct
  source 1..20: mol_type = other RNA
ctttagtgttctgtgtttat

SEQ ID NO: 35367 - RNA, 20 nt, synthetic construct
  source 1..20: mol_type = other RNA
ctttagtgttgcttggtgtt

SEQ ID NO: 35368 - RNA, 20 nt, synthetic construct
  source 1..20: mol_type = other RNA
ctttatacctgttgaatagc

SEQ ID NO: 35369 - RNA, 20 nt, synthetic construct
  source 1..20: mol_type = other RNA
ctttatagcatttgaaaaca

SEQ ID NO: 35370 - RNA, 20 nt, synthetic construct
  source 1..20: mol_type = other RNA
ctttatatattctggatgtt

SEQ ID NO: 35371 - RNA, 20 nt, synthetic construct
  source 1..20: mol_type = other RNA
ctttatcggataaggaagag

SEQ ID NO: 35372 - RNA, 20 nt, synthetic construct
  source 1..20: mol_type = other RNA
ctttatctccacatttctac

SEQ ID NO: 35373 - RNA, 20 nt, synthetic construct
  source 1..20: mol_type = other RNA
ctttatctttggatatcccc

SEQ ID NO: 35374 - RNA, 20 nt, synthetic construct
  source 1..20: mol_type = other RNA
ctttatgagacacacgagta

SEQ ID NO: 35375 - RNA, 20 nt, synthetic construct
  source 1..20: mol_type = other RNA
ctttatgccaatatcacact

SEQ ID NO: 35376 - RNA, 20 nt, synthetic construct
  source 1..20: mol_type = other RNA
ctttatggtaattggttcgt

SEQ ID NO: 35377 - RNA, 20 nt, synthetic construct
  source 1..20: mol_type = other RNA
ctttatggtatcactttttg

SEQ ID NO: 35378 - RNA, 20 nt, synthetic construct
  source 1..20: mol_type = other RNA
ctttatgtggaaaaatatag

SEQ ID NO: 35379 - RNA, 20 nt, synthetic construct
  source 1..20: mol_type = other RNA
ctttattaactagaattgac

SEQ ID NO: 35380 - RNA, 20 nt, synthetic construct
  source 1..20: mol_type = other RNA
ctttattcaaagatcatttc

SEQ ID NO: 35381 - RNA, 20 nt, synthetic construct
  source 1..20: mol_type = other RNA
ctttattttttcttcccatc

SEQ ID NO: 35382 - RNA, 20 nt, synthetic construct
  source 1..20: mol_type = other RNA
ctttcaaagagacctgattc

SEQ ID NO: 35383 - RNA, 20 nt, synthetic construct
  source 1..20: mol_type = other RNA
ctttcaaatgtgacagaaca

SEQ ID NO: 35384 - RNA, 20 nt, synthetic construct
  source 1..20: mol_type = other RNA
ctttcaacctaacatgtctt

SEQ ID NO: 35385 - RNA, 20 nt, synthetic construct
  source 1..20: mol_type = other RNA
ctttcaagattgtttaattc

SEQ ID NO: 35386 - RNA, 20 nt, synthetic construct
  source 1..20: mol_type = other RNA
ctttcaaggggccttttgtc

SEQ ID NO: 35387 - RNA, 20 nt, synthetic construct
  source 1..20: mol_type = other RNA
ctttcaaggtatctccccaa

SEQ ID NO: 35388 - RNA, 20 nt, synthetic construct
  source 1..20: mol_type = other RNA
ctttcaatagtgggtagaag

SEQ ID NO: 35389 - RNA, 20 nt, synthetic construct
  source 1..20: mol_type = other RNA
ctttcacactgattttctgc

SEQ ID NO: 35390 - RNA, 20 nt, synthetic construct
  source 1..20: mol_type = other RNA
ctttcacataaggtatattt

SEQ ID NO: 35391 - RNA, 20 nt, synthetic construct
  source 1..20: mol_type = other RNA
ctttcactgctcagtccctc

SEQ ID NO: 35392 - RNA, 20 nt, synthetic construct
  source 1..20: mol_type = other RNA
ctttcactttgatcatacac

SEQ ID NO: 35393 - RNA, 20 nt, synthetic construct
  source 1..20: mol_type = other RNA
ctttcagacttaactatagg

SEQ ID NO: 35394 - RNA, 20 nt, synthetic construct
  source 1..20: mol_type = other RNA
ctttcagcactgctattgat

SEQ ID NO: 35395 - RNA, 20 nt, synthetic construct
  source 1..20: mol_type = other RNA
ctttcagcatagcagaacct

SEQ ID NO: 35396 - RNA, 20 nt, synthetic construct
  source 1..20: mol_type = other RNA
ctttcagccatcccagctac

SEQ ID NO: 35397 - RNA, 20 nt, synthetic construct
  source 1..20: mol_type = other RNA
ctttcagctcaaacagcttg

SEQ ID NO: 35398 - RNA, 20 nt, synthetic construct
  source 1..20: mol_type = other RNA
ctttcagtatgtgtctctga

SEQ ID NO: 35399 - RNA, 20 nt, synthetic construct
  source 1..20: mol_type = other RNA
ctttcagtcggttcttcacc

SEQ ID NO: 35400 - RNA, 20 nt, synthetic construct
  source 1..20: mol_type = other RNA
ctttcagttctttcggatat

SEQ ID NO: 35401 - RNA, 20 nt, synthetic construct
  source 1..20: mol_type = other RNA
ctttcatatctgattttgtg

SEQ ID NO: 35402 - RNA, 20 nt, synthetic construct
  source 1..20: mol_type = other RNA
ctttcatgatttggtgtgtg

SEQ ID NO: 35403 - RNA, 20 nt, synthetic construct
  source 1..20: mol_type = other RNA
ctttcattattaccaggttt

SEQ ID NO: 35404 - RNA, 20 nt, synthetic construct
  source 1..20: mol_type = other RNA
ctttcatttggcctctgcgg

SEQ ID NO: 35405 - RNA, 20 nt, synthetic construct
  source 1..20: mol_type = other RNA
ctttcatttgtaattcatcc

SEQ ID NO: 35406 - RNA, 20 nt, synthetic construct
  source 1..20: mol_type = other RNA
ctttccaaattcaaagcaag

SEQ ID NO: 35407 - RNA, 20 nt, synthetic construct
  source 1..20: mol_type = other RNA
ctttccactctctggctgca

SEQ ID NO: 35408 - RNA, 20 nt, synthetic construct
  source 1..20: mol_type = other RNA
ctttccagaagtaactcttg

SEQ ID NO: 35409 - RNA, 20 nt, synthetic construct
  source 1..20: mol_type = other RNA
ctttccagaggttcttttaa

SEQ ID NO: 35410 - RNA, 20 nt, synthetic construct
  source 1..20: mol_type = other RNA
ctttccatcttaggccataa

SEQ ID NO: 35411 - RNA, 20 nt, synthetic construct
  source 1..20: mol_type = other RNA
ctttccattcaatccttgta

SEQ ID NO: 35412 - RNA, 20 nt, synthetic construct
  source 1..20: mol_type = other RNA
ctttcccagggtgtagccac

SEQ ID NO: 35413 - RNA, 20 nt, synthetic construct
  source 1..20: mol_type = other RNA
ctttcccatctctagttttc

SEQ ID NO: 35414 - RNA, 20 nt, synthetic construct
  source 1..20: mol_type = other RNA
ctttcccattaccaaaacct

SEQ ID NO: 35415 - RNA, 20 nt, synthetic construct
  source 1..20: mol_type = other RNA
ctttcccttctgctcggctc

SEQ ID NO: 35416 - RNA, 20 nt, synthetic construct
  source 1..20: mol_type = other RNA
ctttcctattcacactgctc

SEQ ID NO: 35417 - RNA, 20 nt, synthetic construct
  source 1..20: mol_type = other RNA
ctttcctcatgtccatagtt

SEQ ID NO: 35418 - RNA, 20 nt, synthetic construct
  source 1..20: mol_type = other RNA
ctttcctgataaggggctat

SEQ ID NO: 35419 - RNA, 20 nt, synthetic construct
  source 1..20: mol_type = other RNA
ctttcctgatcacaccctcc

SEQ ID NO: 35420 - RNA, 20 nt, synthetic construct
  source 1..20: mol_type = other RNA
ctttcctgatcagcaccctc

SEQ ID NO: 35421 - RNA, 20 nt, synthetic construct
  source 1..20: mol_type = other RNA
ctttcctgcccctccactcc

SEQ ID NO: 35422 - RNA, 20 nt, synthetic construct
  source 1..20: mol_type = other RNA
ctttcctgtgatttatgtgg

SEQ ID NO: 35423 - RNA, 20 nt, synthetic construct
  source 1..20: mol_type = other RNA
ctttccttagttcgaagttt

SEQ ID NO: 35424 - RNA, 20 nt, synthetic construct
  source 1..20: mol_type = other RNA
ctttccttattgagaagcag

SEQ ID NO: 35425 - RNA, 20 nt, synthetic construct
  source 1..20: mol_type = other RNA
ctttccttccttgctcagga

SEQ ID NO: 35426 - RNA, 20 nt, synthetic construct
  source 1..20: mol_type = other RNA
ctttccttggagaagagttc

SEQ ID NO: 35427 - RNA, 20 nt, synthetic construct
  source 1..20: mol_type = other RNA
ctttccttgtcctaaaattc

SEQ ID NO: 35428 - RNA, 20 nt, synthetic construct
  source 1..20: mol_type = other RNA
ctttcgaagtgggaagcaaa

SEQ ID NO: 35429 - RNA, 20 nt, synthetic construct
  source 1..20: mol_type = other RNA
ctttcgcatcattcaaatga

SEQ ID NO: 35430 - RNA, 20 nt, synthetic construct
  source 1..20: mol_type = other RNA
ctttcgctaatctcaatcag

SEQ ID NO: 35431 - RNA, 20 nt, synthetic construct
  source 1..20: mol_type = other RNA
ctttcgctatcagtagtttg

SEQ ID NO: 35432 - RNA, 20 nt, synthetic construct
  source 1..20: mol_type = other RNA
ctttcgcttttggagctata

SEQ ID NO: 35433 - RNA, 20 nt, synthetic construct
  source 1..20: mol_type = other RNA
ctttcggatatttactaaga

SEQ ID NO: 35434 - RNA, 20 nt, synthetic construct
  source 1..20: mol_type = other RNA
ctttcgtatggaagatggga

SEQ ID NO: 35435 - RNA, 20 nt, synthetic construct
  source 1..20: mol_type = other RNA
ctttcgtcatctataaggta

SEQ ID NO: 35436 - RNA, 20 nt, synthetic construct
  source 1..20: mol_type = other RNA
ctttcgtgagggtttcagtg

SEQ ID NO: 35437 - RNA, 20 nt, synthetic construct
  source 1..20: mol_type = other RNA
ctttctaaaataacagaaga

SEQ ID NO: 35438 - RNA, 20 nt, synthetic construct
  source 1..20: mol_type = other RNA
ctttctaatcctttgcacac

SEQ ID NO: 35439 - RNA, 20 nt, synthetic construct
  source 1..20: mol_type = other RNA
ctttctaattctgacaactg

SEQ ID NO: 35440 - RNA, 20 nt, synthetic construct
  source 1..20: mol_type = other RNA
ctttctactagtataagaga

SEQ ID NO: 35441 - RNA, 20 nt, synthetic construct
  source 1..20: mol_type = other RNA
ctttctagaatgcatccctc

SEQ ID NO: 35442 - RNA, 20 nt, synthetic construct
  source 1..20: mol_type = other RNA
ctttctagattcatatgctt

SEQ ID NO: 35443 - RNA, 20 nt, synthetic construct
  source 1..20: mol_type = other RNA
ctttctaggcatctatttcc

SEQ ID NO: 35444 - RNA, 20 nt, synthetic construct
  source 1..20: mol_type = other RNA
ctttctatacttcatctttc

SEQ ID NO: 35445 - RNA, 20 nt, synthetic construct
  source 1..20: mol_type = other RNA
ctttctatctctcagatctg

SEQ ID NO: 35446 - RNA, 20 nt, synthetic construct
  source 1..20: mol_type = other RNA
ctttctattcccctggatcc

SEQ ID NO: 35447 - RNA, 20 nt, synthetic construct
  source 1..20: mol_type = other RNA
ctttctcaaagcccaccagc

SEQ ID NO: 35448 - RNA, 20 nt, synthetic construct
  source 1..20: mol_type = other RNA
ctttctcaacactgtgttct

SEQ ID NO: 35449 - RNA, 20 nt, synthetic construct
  source 1..20: mol_type = other RNA
ctttctcaacttcctgtttt

SEQ ID NO: 35450 - RNA, 20 nt, synthetic construct
  source 1..20: mol_type = other RNA
ctttctccaggggcggcccc

SEQ ID NO: 35451 - RNA, 20 nt, synthetic construct
  source 1..20: mol_type = other RNA
ctttctcccagctgtccaac

SEQ ID NO: 35452 - RNA, 20 nt, synthetic construct
  source 1..20: mol_type = other RNA
ctttctcccaggtcagtagt

SEQ ID NO: 35453 - RNA, 20 nt, synthetic construct
  source 1..20: mol_type = other RNA
ctttctcgcagcggggatgc

SEQ ID NO: 35454 - RNA, 20 nt, synthetic construct
  source 1..20: mol_type = other RNA
ctttctctagttgcacggtg

SEQ ID NO: 35455 - RNA, 20 nt, synthetic construct
  source 1..20: mol_type = other RNA
ctttctctttcagccatccc

SEQ ID NO: 35456 - RNA, 20 nt, synthetic construct
  source 1..20: mol_type = other RNA
ctttctgaaattctcattag

SEQ ID NO: 35457 - RNA, 20 nt, synthetic construct
  source 1..20: mol_type = other RNA
ctttctgaactcaaaagtga

SEQ ID NO: 35458 - RNA, 20 nt, synthetic construct
  source 1..20: mol_type = other RNA
ctttctgcttaaagcctctc

SEQ ID NO: 35459 - RNA, 20 nt, synthetic construct
  source 1..20: mol_type = other RNA
ctttctggggatgctgtcta

SEQ ID NO: 35460 - RNA, 20 nt, synthetic construct
  source 1..20: mol_type = other RNA
ctttctgtgtaatactgtag

SEQ ID NO: 35461 - RNA, 20 nt, synthetic construct
  source 1..20: mol_type = other RNA
ctttctgtttgtttgttttg

SEQ ID NO: 35462 - RNA, 20 nt, synthetic construct
  source 1..20: mol_type = other RNA
ctttcttaccctcacagtca

SEQ ID NO: 35463 - RNA, 20 nt, synthetic construct
  source 1..20: mol_type = other RNA
ctttcttaggaagctatgga

SEQ ID NO: 35464 - RNA, 20 nt, synthetic construct
  source 1..20: mol_type = other RNA
ctttcttaggtttctcattt

SEQ ID NO: 35465 - RNA, 20 nt, synthetic construct
  source 1..20: mol_type = other RNA
ctttcttcaaccatactttt

SEQ ID NO: 35466 - RNA, 20 nt, synthetic construct
  source 1..20: mol_type = other RNA
ctttcttggggctctaatgc

SEQ ID NO: 35467 - RNA, 20 nt, synthetic construct
  source 1..20: mol_type = other RNA
ctttcttggtctgcagactc

SEQ ID NO: 35468 - RNA, 20 nt, synthetic construct
  source 1..20: mol_type = other RNA
ctttcttgttagtaggaaaa

SEQ ID NO: 35469 - RNA, 20 nt, synthetic construct
  source 1..20: mol_type = other RNA
ctttctttcaaatgtgacag

SEQ ID NO: 35470 - RNA, 20 nt, synthetic construct
  source 1..20: mol_type = other RNA
ctttctttggttttgactca

SEQ ID NO: 35471 - RNA, 20 nt, synthetic construct
  source 1..20: mol_type = other RNA
ctttcttttaaagacctcag

SEQ ID NO: 35472 - RNA, 20 nt, synthetic construct
  source 1..20: mol_type = other RNA
ctttcttttccaaccaagcc

SEQ ID NO: 35473 - RNA, 20 nt, synthetic construct
  source 1..20: mol_type = other RNA
ctttgaaaggaatccggctt

SEQ ID NO: 35474 - RNA, 20 nt, synthetic construct
  source 1..20: mol_type = other RNA
ctttgaaatcagaacttgac

SEQ ID NO: 35475 - RNA, 20 nt, synthetic construct
  source 1..20: mol_type = other RNA
ctttgaacttatataaatgc

SEQ ID NO: 35476 - RNA, 20 nt, synthetic construct
  source 1..20: mol_type = other RNA
ctttgaagtatgtaattaca

SEQ ID NO: 35477 - RNA, 20 nt, synthetic construct
  source 1..20: mol_type = other RNA
ctttgaataaagggtcagaa

SEQ ID NO: 35478 - RNA, 20 nt, synthetic construct
  source 1..20: mol_type = other RNA
ctttgaatttaagacacaag

SEQ ID NO: 35479 - RNA, 20 nt, synthetic construct
  source 1..20: mol_type = other RNA
ctttgaatttggaaagggta

SEQ ID NO: 35480 - RNA, 20 nt, synthetic construct
  source 1..20: mol_type = other RNA
ctttgacttctcagggcctg

SEQ ID NO: 35481 - RNA, 20 nt, synthetic construct
  source 1..20: mol_type = other RNA
ctttgagaaaggtttcttca

SEQ ID NO: 35482 - RNA, 20 nt, synthetic construct
  source 1..20: mol_type = other RNA
ctttgagcagagtcctgagg

SEQ ID NO: 35483 - RNA, 20 nt, synthetic construct
  source 1..20: mol_type = other RNA
ctttgagctacaaactccaa

SEQ ID NO: 35484 - RNA, 20 nt, synthetic construct
  source 1..20: mol_type = other RNA
ctttgaggtaagaacttgtc

SEQ ID NO: 35485 - RNA, 20 nt, synthetic construct
  source 1..20: mol_type = other RNA
ctttgaggttattaagataa

SEQ ID NO: 35486 - RNA, 20 nt, synthetic construct
  source 1..20: mol_type = other RNA
ctttgagtagcaccctattt

SEQ ID NO: 35487 - RNA, 20 nt, synthetic construct
  source 1..20: mol_type = other RNA
ctttgagtagttcatgttag

SEQ ID NO: 35488 - RNA, 20 nt, synthetic construct
  source 1..20: mol_type = other RNA
ctttgatcatacacatccag

SEQ ID NO: 35489 - RNA, 20 nt, synthetic construct
  source 1..20: mol_type = other RNA
ctttgatccattttgagttc

SEQ ID NO: 35490 - RNA, 20 nt, synthetic construct
  source 1..20: mol_type = other RNA
ctttgatgaattccagttta

SEQ ID NO: 35491 - RNA, 20 nt, synthetic construct
  source 1..20: mol_type = other RNA
ctttgatgacttacagatat

SEQ ID NO: 35492 - RNA, 20 nt, synthetic construct
  source 1..20: mol_type = other RNA
ctttgatgcacaaaagttta

SEQ ID NO: 35493 - RNA, 20 nt, synthetic construct
  source 1..20: mol_type = other RNA
ctttgatgcccccacccttt

SEQ ID NO: 35494 - RNA, 20 nt, synthetic construct
  source 1..20: mol_type = other RNA
ctttgatgttttacattttc

SEQ ID NO: 35495 - RNA, 20 nt, synthetic construct
  source 1..20: mol_type = other RNA
ctttgcacacaccaaatcat

SEQ ID NO: 35496 - RNA, 20 nt, synthetic construct
  source 1..20: mol_type = other RNA
ctttgcattcctgaaatgaa

SEQ ID NO: 35497 - RNA, 20 nt, synthetic construct
  source 1..20: mol_type = other RNA
ctttgcctaagtctcaggat

SEQ ID NO: 35498 - RNA, 20 nt, synthetic construct
  source 1..20: mol_type = other RNA
ctttgcctcctgggttcagg

SEQ ID NO: 35499 - RNA, 20 nt, synthetic construct
  source 1..20: mol_type = other RNA
ctttgcctctccagggagga

SEQ ID NO: 35500 - RNA, 20 nt, synthetic construct
  source 1..20: mol_type = other RNA
ctttgcctttcactttgatc

SEQ ID NO: 35501 - RNA, 20 nt, synthetic construct
  source 1..20: mol_type = other RNA
ctttgcgaaacacactcgtg

SEQ ID NO: 35502 - RNA, 20 nt, synthetic construct
  source 1..20: mol_type = other RNA
ctttgcgaaatagtagttgc

SEQ ID NO: 35503 - RNA, 20 nt, synthetic construct
  source 1..20: mol_type = other RNA
ctttgcgtctgtgattatca

SEQ ID NO: 35504 - RNA, 20 nt, synthetic construct
  source 1..20: mol_type = other RNA
ctttgctaataagtgagttt

SEQ ID NO: 35505 - RNA, 20 nt, synthetic construct
  source 1..20: mol_type = other RNA
ctttgctgccccagctaaaa

SEQ ID NO: 35506 - RNA, 20 nt, synthetic construct
  source 1..20: mol_type = other RNA
ctttgcttataacaagaaaa

SEQ ID NO: 35507 - RNA, 20 nt, synthetic construct
  source 1..20: mol_type = other RNA
ctttgcttcccacttcgaaa

SEQ ID NO: 35508 - RNA, 20 nt, synthetic construct
  source 1..20: mol_type = other RNA
ctttggaaaaatgtccgttg

SEQ ID NO: 35509 - RNA, 20 nt, synthetic construct
  source 1..20: mol_type = other RNA
ctttggaaggtaggagggtg

SEQ ID NO: 35510 - RNA, 20 nt, synthetic construct
  source 1..20: mol_type = other RNA
ctttggagctgtatttttgc

SEQ ID NO: 35511 - RNA, 20 nt, synthetic construct
  source 1..20: mol_type = other RNA
ctttggagtcacagtgaatt

SEQ ID NO: 35512 - RNA, 20 nt, synthetic construct
  source 1..20: mol_type = other RNA
ctttggagtgagaggactgc

SEQ ID NO: 35513 - RNA, 20 nt, synthetic construct
  source 1..20: mol_type = other RNA
ctttggatatccccattttt

SEQ ID NO: 35514 - RNA, 20 nt, synthetic construct
  source 1..20: mol_type = other RNA
ctttggcaaacttagaatat

SEQ ID NO: 35515 - RNA, 20 nt, synthetic construct
  source 1..20: mol_type = other RNA
ctttggcccatatcctttta

SEQ ID NO: 35516 - RNA, 20 nt, synthetic construct
  source 1..20: mol_type = other RNA
ctttggcccattttcgaatt

SEQ ID NO: 35517 - RNA, 20 nt, synthetic construct
  source 1..20: mol_type = other RNA
ctttggctactgtaaacaat

SEQ ID NO: 35518 - RNA, 20 nt, synthetic construct
  source 1..20: mol_type = other RNA
ctttggctagaagcatctga

SEQ ID NO: 35519 - RNA, 20 nt, synthetic construct
  source 1..20: mol_type = other RNA
ctttggctcaatggttaaga

SEQ ID NO: 35520 - RNA, 20 nt, synthetic construct
  source 1..20: mol_type = other RNA
ctttggctcttagaaaatat

SEQ ID NO: 35521 - RNA, 20 nt, synthetic construct
  source 1..20: mol_type = other RNA
ctttggctgaaatgctgtaa

SEQ ID NO: 35522 - RNA, 20 nt, synthetic construct
  source 1..20: mol_type = other RNA
ctttggctgttagccttgcc

SEQ ID NO: 35523 - RNA, 20 nt, synthetic construct
  source 1..20: mol_type = other RNA
ctttgggaaaatctctgact

SEQ ID NO: 35524 - RNA, 20 nt, synthetic construct
  source 1..20: mol_type = other RNA
ctttgggaaggccctgattg

SEQ ID NO: 35525 - RNA, 20 nt, synthetic construct
  source 1..20: mol_type = other RNA
ctttgggattagcttattct

SEQ ID NO: 35526 - RNA, 20 nt, synthetic construct
  source 1..20: mol_type = other RNA
ctttggggagataccttgaa

SEQ ID NO: 35527 - RNA, 20 nt, synthetic construct
  source 1..20: mol_type = other RNA
ctttgggggaagcaggaact

SEQ ID NO: 35528 - RNA, 20 nt, synthetic construct
  source 1..20: mol_type = other RNA
ctttgggtaatttatctcca

SEQ ID NO: 35529 - RNA, 20 nt, synthetic construct
  source 1..20: mol_type = other RNA
ctttgggtctatagtttaat

SEQ ID NO: 35530 - RNA, 20 nt, synthetic construct
  source 1..20: mol_type = other RNA
ctttggtgaaggttcatgaa

SEQ ID NO: 35531 - RNA, 20 nt, synthetic construct
  source 1..20: mol_type = other RNA
ctttggtgatcctaagccat

SEQ ID NO: 35532 - RNA, 20 nt, synthetic construct
  source 1..20: mol_type = other RNA
ctttggtgctgataaatggc

SEQ ID NO: 35533 - RNA, 20 nt, synthetic construct
  source 1..20: mol_type = other RNA
ctttggttttgactcagtac

SEQ ID NO: 35534 - RNA, 20 nt, synthetic construct
  source 1..20: mol_type = other RNA
ctttgtacagtaattgtagt

SEQ ID NO: 35535 - RNA, 20 nt, synthetic construct
  source 1..20: mol_type = other RNA
ctttgtattcatccagttta

SEQ ID NO: 35536 - RNA, 20 nt, synthetic construct
  source 1..20: mol_type = other RNA
ctttgtcaggcatgctaact

SEQ ID NO: 35537 - RNA, 20 nt, synthetic construct
  source 1..20: mol_type = other RNA
ctttgtccactgtcagtggg

SEQ ID NO: 35538 - RNA, 20 nt, synthetic construct
  source 1..20: mol_type = other RNA
ctttgtctattccctacatt

SEQ ID NO: 35539 - RNA, 20 nt, synthetic construct
  source 1..20: mol_type = other RNA
ctttgtctctggaaggctaa

SEQ ID NO: 35540 - RNA, 20 nt, synthetic construct
  source 1..20: mol_type = other RNA
ctttgtgaagggaggtaggc

SEQ ID NO: 35541 - RNA, 20 nt, synthetic construct
  source 1..20: mol_type = other RNA
ctttgtgactgtgagggtaa

SEQ ID NO: 35542 - RNA, 20 nt, synthetic construct
  source 1..20: mol_type = other RNA
ctttgtgcaggtctgggttt

SEQ ID NO: 35543 - RNA, 20 nt, synthetic construct
  source 1..20: mol_type = other RNA
ctttgtggagtggaggggca

SEQ ID NO: 35544 - RNA, 20 nt, synthetic construct
  source 1..20: mol_type = other RNA
ctttgtggcctcttcccttg

SEQ ID NO: 35545 - RNA, 20 nt, synthetic construct
  source 1..20: mol_type = other RNA
ctttgtgtcaagtacaacta

SEQ ID NO: 35546 - RNA, 20 nt, synthetic construct
  source 1..20: mol_type = other RNA
ctttgtgttggtgtttctga

SEQ ID NO: 35547 - RNA, 20 nt, synthetic construct
  source 1..20: mol_type = other RNA
ctttgttacagcagctctag

SEQ ID NO: 35548 - RNA, 20 nt, synthetic construct
  source 1..20: mol_type = other RNA
ctttgttagtgccttcagaa

SEQ ID NO: 35549 - RNA, 20 nt, synthetic construct
  source 1..20: mol_type = other RNA
ctttgttagtttattcatac

SEQ ID NO: 35550 - RNA, 20 nt, synthetic construct
  source 1..20: mol_type = other RNA
ctttgttatctgaacgtctt

SEQ ID NO: 35551 - RNA, 20 nt, synthetic construct
  source 1..20: mol_type = other RNA
ctttgttcatcatcttttgc

SEQ ID NO: 35552 - RNA, 20 nt, synthetic construct
  source 1..20: mol_type = other RNA
ctttgttgaaaacgaggaaa

SEQ ID NO: 35553 - RNA, 20 nt, synthetic construct
  source 1..20: mol_type = other RNA
ctttgttgccaggtggacgc

SEQ ID NO: 35554 - RNA, 20 nt, synthetic construct
  source 1..20: mol_type = other RNA
ctttgtttatccttgcacca

SEQ ID NO: 35555 - RNA, 20 nt, synthetic construct
  source 1..20: mol_type = other RNA
ctttgttttgtttttctctc

SEQ ID NO: 35556 - RNA, 20 nt, synthetic construct
  source 1..20: mol_type = other RNA
cttttaaaaattacaactgg

SEQ ID NO: 35557 - RNA, 20 nt, synthetic construct
  source 1..20: mol_type = other RNA
cttttaaacccatttcatgc

SEQ ID NO: 35558 - RNA, 20 nt, synthetic construct
  source 1..20: mol_type = other RNA
cttttaaagaaaggtctctc

SEQ ID NO: 35559 - RNA, 20 nt, synthetic construct
  source 1..20: mol_type = other RNA
cttttaaagacctcaggttt

SEQ ID NO: 35560 - RNA, 20 nt, synthetic construct
  source 1..20: mol_type = other RNA
cttttaaatgccaatttggg

SEQ ID NO: 35561 - RNA, 20 nt, synthetic construct
  source 1..20: mol_type = other RNA
cttttaaatttaaatgccac

SEQ ID NO: 35562 - RNA, 20 nt, synthetic construct
  source 1..20: mol_type = other RNA
cttttaacagatggtccttt

SEQ ID NO: 35563 - RNA, 20 nt, synthetic construct
  source 1..20: mol_type = other RNA
cttttaacccacagataatt

SEQ ID NO: 35564 - RNA, 20 nt, synthetic construct
  source 1..20: mol_type = other RNA
cttttaacttgctttgaatt

SEQ ID NO: 35565 - RNA, 20 nt, synthetic construct
  source 1..20: mol_type = other RNA
cttttaagagtgaagaaacc

SEQ ID NO: 35566 - RNA, 20 nt, synthetic construct
  source 1..20: mol_type = other RNA
cttttaaggcttggaaaaca

SEQ ID NO: 35567 - RNA, 20 nt, synthetic construct
  source 1..20: mol_type = other RNA
cttttaagggaaacactcat

SEQ ID NO: 35568 - RNA, 20 nt, synthetic construct
  source 1..20: mol_type = other RNA
cttttaaggtttagaaaaca

SEQ ID NO: 35569 - RNA, 20 nt, synthetic construct
  source 1..20: mol_type = other RNA
cttttaatactttcacactg

SEQ ID NO: 35570 - RNA, 20 nt, synthetic construct
  source 1..20: mol_type = other RNA
cttttacaccctaggtaggg

SEQ ID NO: 35571 - RNA, 20 nt, synthetic construct
  source 1..20: mol_type = other RNA
cttttacgaggacagactgc

SEQ ID NO: 35572 - RNA, 20 nt, synthetic construct
  source 1..20: mol_type = other RNA
cttttacttgcttggtttca

SEQ ID NO: 35573 - RNA, 20 nt, synthetic construct
  source 1..20: mol_type = other RNA
cttttacttggctcctcccg

SEQ ID NO: 35574 - RNA, 20 nt, synthetic construct
  source 1..20: mol_type = other RNA
cttttagagtaactgtcatc

SEQ ID NO: 35575 - RNA, 20 nt, synthetic construct
  source 1..20: mol_type = other RNA
cttttagccaacaaccataa

SEQ ID NO: 35576 - RNA, 20 nt, synthetic construct
  source 1..20: mol_type = other RNA
cttttaggtgccccactcca

SEQ ID NO: 35577 - RNA, 20 nt, synthetic construct
  source 1..20: mol_type = other RNA
cttttagtaggtctccttgt

SEQ ID NO: 35578 - RNA, 20 nt, synthetic construct
  source 1..20: mol_type = other RNA
cttttagtttacactatggc

SEQ ID NO: 35579 - RNA, 20 nt, synthetic construct
  source 1..20: mol_type = other RNA
cttttataactgaacatgta

SEQ ID NO: 35580 - RNA, 20 nt, synthetic construct
  source 1..20: mol_type = other RNA
cttttatcaattcacaagat

SEQ ID NO: 35581 - RNA, 20 nt, synthetic construct
  source 1..20: mol_type = other RNA
cttttatgtgcagtctaacc

SEQ ID NO: 35582 - RNA, 20 nt, synthetic construct
  source 1..20: mol_type = other RNA
cttttatttctttttcttgc

SEQ ID NO: 35583 - RNA, 20 nt, synthetic construct
  source 1..20: mol_type = other RNA
cttttcaaaaacagcatata

SEQ ID NO: 35584 - RNA, 20 nt, synthetic construct
  source 1..20: mol_type = other RNA
cttttcaaaaacccaactct

SEQ ID NO: 35585 - RNA, 20 nt, synthetic construct
  source 1..20: mol_type = other RNA
cttttcaaacacttaacata

SEQ ID NO: 35586 - RNA, 20 nt, synthetic construct
  source 1..20: mol_type = other RNA
cttttcaactgaacaacgct

SEQ ID NO: 35587 - RNA, 20 nt, synthetic construct
  source 1..20: mol_type = other RNA
cttttcacataaatttgcca

SEQ ID NO: 35588 - RNA, 20 nt, synthetic construct
  source 1..20: mol_type = other RNA
cttttcactctaatatggtt

SEQ ID NO: 35589 - RNA, 20 nt, synthetic construct
  source 1..20: mol_type = other RNA
cttttcactcttagtgatgt

SEQ ID NO: 35590 - RNA, 20 nt, synthetic construct
  source 1..20: mol_type = other RNA
cttttcaggtattgagcctg

SEQ ID NO: 35591 - RNA, 20 nt, synthetic construct
  source 1..20: mol_type = other RNA
cttttcagtccagatattat

SEQ ID NO: 35592 - RNA, 20 nt, synthetic construct
  source 1..20: mol_type = other RNA
cttttcatagtcatcattat

SEQ ID NO: 35593 - RNA, 20 nt, synthetic construct
  source 1..20: mol_type = other RNA
cttttcatcactcactggcc

SEQ ID NO: 35594 - RNA, 20 nt, synthetic construct
  source 1..20: mol_type = other RNA
cttttcatgttgaccatttt

SEQ ID NO: 35595 - RNA, 20 nt, synthetic construct
  source 1..20: mol_type = other RNA
cttttccaaccaagcccaac

SEQ ID NO: 35596 - RNA, 20 nt, synthetic construct
  source 1..20: mol_type = other RNA
cttttccagtcttctcatac

SEQ ID NO: 35597 - RNA, 20 nt, synthetic construct
  source 1..20: mol_type = other RNA
cttttcccaggagctagaac

SEQ ID NO: 35598 - RNA, 20 nt, synthetic construct
  source 1..20: mol_type = other RNA
cttttcctaccctgaggata

SEQ ID NO: 35599 - RNA, 20 nt, synthetic construct
  source 1..20: mol_type = other RNA
cttttcctagactgccaggt

SEQ ID NO: 35600 - RNA, 20 nt, synthetic construct
  source 1..20: mol_type = other RNA
cttttcctcgttttcaacaa

SEQ ID NO: 35601 - RNA, 20 nt, synthetic construct
  source 1..20: mol_type = other RNA
cttttcctgctgtcgtttat

SEQ ID NO: 35602 - RNA, 20 nt, synthetic construct
  source 1..20: mol_type = other RNA
cttttcctggaaaacttctc

SEQ ID NO: 35603 - RNA, 20 nt, synthetic construct
  source 1..20: mol_type = other RNA
cttttcctgttccgggatcc

SEQ ID NO: 35604 - RNA, 20 nt, synthetic construct
  source 1..20: mol_type = other RNA
cttttccttaaaaaaggttt

SEQ ID NO: 35605 - RNA, 20 nt, synthetic construct
  source 1..20: mol_type = other RNA
cttttccttcttaagacatt

SEQ ID NO: 35606 - RNA, 20 nt, synthetic construct
  source 1..20: mol_type = other RNA
cttttcctttaacgtatctg

SEQ ID NO: 35607 - RNA, 20 nt, synthetic construct
  source 1..20: mol_type = other RNA
cttttcgagactgagtaata

SEQ ID NO: 35608 - RNA, 20 nt, synthetic construct
  source 1..20: mol_type = other RNA
cttttctagtttctttttgt

SEQ ID NO: 35609 - RNA, 20 nt, synthetic construct
  source 1..20: mol_type = other RNA
cttttctatctgaacatttt

SEQ ID NO: 35610 - RNA, 20 nt, synthetic construct
  source 1..20: mol_type = other RNA
cttttctcctaagtcttctt

SEQ ID NO: 35611 - RNA, 20 nt, synthetic construct
  source 1..20: mol_type = other RNA
cttttctcgtgcatgtctgc

SEQ ID NO: 35612 - RNA, 20 nt, synthetic construct
  source 1..20: mol_type = other RNA
cttttctgacaatttcaggg

SEQ ID NO: 35613 - RNA, 20 nt, synthetic construct
  source 1..20: mol_type = other RNA
cttttctgatttgctggctc

SEQ ID NO: 35614 - RNA, 20 nt, synthetic construct
  source 1..20: mol_type = other RNA
cttttctggttttctggagg

SEQ ID NO: 35615 - RNA, 20 nt, synthetic construct
  source 1..20: mol_type = other RNA
cttttcttaaaactttaggt

SEQ ID NO: 35616 - RNA, 20 nt, synthetic construct
  source 1..20: mol_type = other RNA
cttttgaaactgagcatccc

SEQ ID NO: 35617 - RNA, 20 nt, synthetic construct
  source 1..20: mol_type = other RNA
cttttgaacactctgcaatt

SEQ ID NO: 35618 - RNA, 20 nt, synthetic construct
  source 1..20: mol_type = other RNA
cttttgaagaagttcttaat

SEQ ID NO: 35619 - RNA, 20 nt, synthetic construct
  source 1..20: mol_type = other RNA
cttttgacgcgcaacaattc

SEQ ID NO: 35620 - RNA, 20 nt, synthetic construct
  source 1..20: mol_type = other RNA
cttttgagggtatcatatta

SEQ ID NO: 35621 - RNA, 20 nt, synthetic construct
  source 1..20: mol_type = other RNA
cttttgagtgtaaggtgttt

SEQ ID NO: 35622 - RNA, 20 nt, synthetic construct
  source 1..20: mol_type = other RNA
cttttgagttcagaaagatt

SEQ ID NO: 35623 - RNA, 20 nt, synthetic construct
  source 1..20: mol_type = other RNA
cttttgagtttggtgtattt

SEQ ID NO: 35624 - RNA, 20 nt, synthetic construct
  source 1..20: mol_type = other RNA
cttttgatatttgttcagaa

SEQ ID NO: 35625 - RNA, 20 nt, synthetic construct
  source 1..20: mol_type = other RNA
cttttgcctggatgaatgca

SEQ ID NO: 35626 - RNA, 20 nt, synthetic construct
  source 1..20: mol_type = other RNA
cttttgctgagggaattttt

SEQ ID NO: 35627 - RNA, 20 nt, synthetic construct
  source 1..20: mol_type = other RNA
cttttgctgcatcccaaggg

SEQ ID NO: 35628 - RNA, 20 nt, synthetic construct
  source 1..20: mol_type = other RNA
cttttgctgtatacccaggt

SEQ ID NO: 35629 - RNA, 20 nt, synthetic construct
  source 1..20: mol_type = other RNA
cttttgctttgggtctatag

SEQ ID NO: 35630 - RNA, 20 nt, synthetic construct
  source 1..20: mol_type = other RNA
cttttggaagcatgtggcca

SEQ ID NO: 35631 - RNA, 20 nt, synthetic construct
  source 1..20: mol_type = other RNA
cttttggaatttaaggggta

SEQ ID NO: 35632 - RNA, 20 nt, synthetic construct
  source 1..20: mol_type = other RNA
cttttggagctataatttat

SEQ ID NO: 35633 - RNA, 20 nt, synthetic construct
  source 1..20: mol_type = other RNA
cttttggatgcagatttctt

SEQ ID NO: 35634 - RNA, 20 nt, synthetic construct
  source 1..20: mol_type = other RNA
cttttggattttctttctaa

SEQ ID NO: 35635 - RNA, 20 nt, synthetic construct
  source 1..20: mol_type = other RNA
cttttggcagcgtaactcca

SEQ ID NO: 35636 - RNA, 20 nt, synthetic construct
  source 1..20: mol_type = other RNA
cttttggtacacatcttttt

SEQ ID NO: 35637 - RNA, 20 nt, synthetic construct
  source 1..20: mol_type = other RNA
cttttgtaatctaaggatta

SEQ ID NO: 35638 - RNA, 20 nt, synthetic construct
  source 1..20: mol_type = other RNA
cttttgtactacttgtcagg

SEQ ID NO: 35639 - RNA, 20 nt, synthetic construct
  source 1..20: mol_type = other RNA
cttttgtagaccctgttagt

SEQ ID NO: 35640 - RNA, 20 nt, synthetic construct
  source 1..20: mol_type = other RNA
cttttgtagagggaatttgt

SEQ ID NO: 35641 - RNA, 20 nt, synthetic construct
  source 1..20: mol_type = other RNA
cttttgtagctaatatcttt

SEQ ID NO: 35642 - RNA, 20 nt, synthetic construct
  source 1..20: mol_type = other RNA
cttttgtcaagctatcagaa

SEQ ID NO: 35643 - RNA, 20 nt, synthetic construct
  source 1..20: mol_type = other RNA
cttttgtgcaacataaatag

SEQ ID NO: 35644 - RNA, 20 nt, synthetic construct
  source 1..20: mol_type = other RNA
cttttgtgggtaaattaagt

SEQ ID NO: 35645 - RNA, 20 nt, synthetic construct
  source 1..20: mol_type = other RNA
cttttgttgcctgtagtttt

SEQ ID NO: 35646 - RNA, 20 nt, synthetic construct
  source 1..20: mol_type = other RNA
ctttttaaacaggtgtaaga

SEQ ID NO: 35647 - RNA, 20 nt, synthetic construct
  source 1..20: mol_type = other RNA
ctttttacacttggagtttt

SEQ ID NO: 35648 - RNA, 20 nt, synthetic construct
  source 1..20: mol_type = other RNA
ctttttaccaagttgaattt

SEQ ID NO: 35649 - RNA, 20 nt, synthetic construct
  source 1..20: mol_type = other RNA
ctttttacccggagaggtga

SEQ ID NO: 35650 - RNA, 20 nt, synthetic construct
  source 1..20: mol_type = other RNA
ctttttacgatgaaattgac

SEQ ID NO: 35651 - RNA, 20 nt, synthetic construct
  source 1..20: mol_type = other RNA
ctttttactcatgtctacct

SEQ ID NO: 35652 - RNA, 20 nt, synthetic construct
  source 1..20: mol_type = other RNA
ctttttactcgagggtagct

SEQ ID NO: 35653 - RNA, 20 nt, synthetic construct
  source 1..20: mol_type = other RNA
ctttttactttgcgaaacac

SEQ ID NO: 35654 - RNA, 20 nt, synthetic construct
  source 1..20: mol_type = other RNA
ctttttaggtagggataaga

SEQ ID NO: 35655 - RNA, 20 nt, synthetic construct
  source 1..20: mol_type = other RNA
ctttttagtaagaggtatca

SEQ ID NO: 35656 - RNA, 20 nt, synthetic construct
  source 1..20: mol_type = other RNA
ctttttatattatgtgcaag

SEQ ID NO: 35657 - RNA, 20 nt, synthetic construct
  source 1..20: mol_type = other RNA
ctttttatatttccgatgat

SEQ ID NO: 35658 - RNA, 20 nt, synthetic construct
  source 1..20: mol_type = other RNA
ctttttatcacccttataaa

SEQ ID NO: 35659 - RNA, 20 nt, synthetic construct
  source 1..20: mol_type = other RNA
ctttttatggaaacatggta

SEQ ID NO: 35660 - RNA, 20 nt, synthetic construct
  source 1..20: mol_type = other RNA
ctttttattctgttctagct

SEQ ID NO: 35661 - RNA, 20 nt, synthetic construct
  source 1..20: mol_type = other RNA
ctttttattttcatggtatc

SEQ ID NO: 35662 - RNA, 20 nt, synthetic construct
  source 1..20: mol_type = other RNA
ctttttcagcagcagagaag

SEQ ID NO: 35663 - RNA, 20 nt, synthetic construct
  source 1..20: mol_type = other RNA
ctttttcatccaaacagaaa

SEQ ID NO: 35664 - RNA, 20 nt, synthetic construct
  source 1..20: mol_type = other RNA
ctttttccaggaccaattta

SEQ ID NO: 35665 - RNA, 20 nt, synthetic construct
  source 1..20: mol_type = other RNA
ctttttctagtttgaggtgt

SEQ ID NO: 35666 - RNA, 20 nt, synthetic construct
  source 1..20: mol_type = other RNA
ctttttctgcatcttttgag

SEQ ID NO: 35667 - RNA, 20 nt, synthetic construct
  source 1..20: mol_type = other RNA
ctttttcttcttgttttgtt

SEQ ID NO: 35668 - RNA, 20 nt, synthetic construct
  source 1..20: mol_type = other RNA
ctttttcttgctttgctgcc

SEQ ID NO: 35669 - RNA, 20 nt, synthetic construct
  source 1..20: mol_type = other RNA
ctttttcttggtggtaactg

SEQ ID NO: 35670 - RNA, 20 nt, synthetic construct
  source 1..20: mol_type = other RNA
ctttttctttttaaacaggt

SEQ ID NO: 35671 - RNA, 20 nt, synthetic construct
  source 1..20: mol_type = other RNA
ctttttctttttagtaagag

SEQ ID NO: 35672 - RNA, 20 nt, synthetic construct
  source 1..20: mol_type = other RNA
ctttttgacagatgagactc

SEQ ID NO: 35673 - RNA, 20 nt, synthetic construct
  source 1..20: mol_type = other RNA
ctttttgggatctgtcatgt

SEQ ID NO: 35674 - RNA, 20 nt, synthetic construct
  source 1..20: mol_type = other RNA
ctttttgggcctttctgttt

SEQ ID NO: 35675 - RNA, 20 nt, synthetic construct
  source 1..20: mol_type = other RNA
ctttttgtaatatacttgtc

SEQ ID NO: 35676 - RNA, 20 nt, synthetic construct
  source 1..20: mol_type = other RNA
ctttttgtatcctgtttgag

SEQ ID NO: 35677 - RNA, 20 nt, synthetic construct
  source 1..20: mol_type = other RNA
ctttttgtatttccttatag

SEQ ID NO: 35678 - RNA, 20 nt, synthetic construct
  source 1..20: mol_type = other RNA
ctttttgtcacacggaaaac

SEQ ID NO: 35679 - RNA, 20 nt, synthetic construct
  source 1..20: mol_type = other RNA
ctttttgtgacttgtttatt

SEQ ID NO: 35680 - RNA, 20 nt, synthetic construct
  source 1..20: mol_type = other RNA
ctttttgtgagttttaactc

SEQ ID NO: 35681 - RNA, 20 nt, synthetic construct
  source 1..20: mol_type = other RNA
ctttttgtgtatatggtaaa

SEQ ID NO: 35682 - RNA, 20 nt, synthetic construct
  source 1..20: mol_type = other RNA
ctttttgttttctccttctg

SEQ ID NO: 35683 - RNA, 20 nt, synthetic construct
  source 1..20: mol_type = other RNA
cttttttaaggaaaagtcag

SEQ ID NO: 35684 - RNA, 20 nt, synthetic construct
  source 1..20: mol_type = other RNA
cttttttactgacttttcct

SEQ ID NO: 35685 - RNA, 20 nt, synthetic construct
  source 1..20: mol_type = other RNA
cttttttatgtgctttctca

SEQ ID NO: 35686 - RNA, 20 nt, synthetic construct
  source 1..20: mol_type = other RNA
cttttttgcccactcttata

SEQ ID NO: 35687 - RNA, 20 nt, synthetic construct
  source 1..20: mol_type = other RNA
cttttttggtgtttttctag

SEQ ID NO: 35688 - RNA, 20 nt, synthetic construct
  source 1..20: mol_type = other RNA
cttttttgtagagacagaat

SEQ ID NO: 35689 - RNA, 20 nt, synthetic construct
  source 1..20: mol_type = other RNA
gaaaaaacaaaacaaaaccc

SEQ ID NO: 35690 - RNA, 20 nt, synthetic construct
  source 1..20: mol_type = other RNA
gaaaaaacacctaaagatat

SEQ ID NO: 35691 - RNA, 20 nt, synthetic construct
  source 1..20: mol_type = other RNA
gaaaaaacagttgctattca

SEQ ID NO: 35692 - RNA, 20 nt, synthetic construct
  source 1..20: mol_type = other RNA
gaaaaaacgggttatacaca

SEQ ID NO: 35693 - RNA, 20 nt, synthetic construct
  source 1..20: mol_type = other RNA
gaaaaaacttcccttagctc

SEQ ID NO: 35694 - RNA, 20 nt, synthetic construct
  source 1..20: mol_type = other RNA
gaaaaaataaaggctttcgt

SEQ ID NO: 35695 - RNA, 20 nt, synthetic construct
  source 1..20: mol_type = other RNA
gaaaaaatggtgcagccact

SEQ ID NO: 35696 - RNA, 20 nt, synthetic construct
  source 1..20: mol_type = other RNA
gaaaaaattagccttttaca

SEQ ID NO: 35697 - RNA, 20 nt, synthetic construct
  source 1..20: mol_type = other RNA
gaaaaacaaaacaaagtctt

SEQ ID NO: 35698 - RNA, 20 nt, synthetic construct
  source 1..20: mol_type = other RNA
gaaaaacaccaaaaaagcac

SEQ ID NO: 35699 - RNA, 20 nt, synthetic construct
  source 1..20: mol_type = other RNA
gaaaaacacctcagttaaac

SEQ ID NO: 35700 - RNA, 20 nt, synthetic construct
  source 1..20: mol_type = other RNA
gaaaaacagaagacacaaaa

SEQ ID NO: 35701 - RNA, 20 nt, synthetic construct
  source 1..20: mol_type = other RNA
gaaaaacagatcttggccga

SEQ ID NO: 35702 - RNA, 20 nt, synthetic construct
  source 1..20: mol_type = other RNA
gaaaaacattctacagtatt

SEQ ID NO: 35703 - RNA, 20 nt, synthetic construct
  source 1..20: mol_type = other RNA
gaaaaacctaaacctgtgat

SEQ ID NO: 35704 - RNA, 20 nt, synthetic construct
  source 1..20: mol_type = other RNA
gaaaaacggaggttgcagta

SEQ ID NO: 35705 - RNA, 20 nt, synthetic construct
  source 1..20: mol_type = other RNA
gaaaaactgaactacagtgt

SEQ ID NO: 35706 - RNA, 20 nt, synthetic construct
  source 1..20: mol_type = other RNA
gaaaaactgcagcaattatt

SEQ ID NO: 35707 - RNA, 20 nt, synthetic construct
  source 1..20: mol_type = other RNA
gaaaaagaaaagacaagact

SEQ ID NO: 35708 - RNA, 20 nt, synthetic construct
  source 1..20: mol_type = other RNA
gaaaaagaataagctaatcc

SEQ ID NO: 35709 - RNA, 20 nt, synthetic construct
  source 1..20: mol_type = other RNA
gaaaaagatactcttaaagt

SEQ ID NO: 35710 - RNA, 20 nt, synthetic construct
  source 1..20: mol_type = other RNA
gaaaaagcaacttgaaggca

SEQ ID NO: 35711 - RNA, 20 nt, synthetic construct
  source 1..20: mol_type = other RNA
gaaaaagcagagaaactgga

SEQ ID NO: 35712 - RNA, 20 nt, synthetic construct
  source 1..20: mol_type = other RNA
gaaaaagctcacctctggac

SEQ ID NO: 35713 - RNA, 20 nt, synthetic construct
  source 1..20: mol_type = other RNA
gaaaaaggaaagtaactgtt

SEQ ID NO: 35714 - RNA, 20 nt, synthetic construct
  source 1..20: mol_type = other RNA
gaaaaaggttaagggaagag

SEQ ID NO: 35715 - RNA, 20 nt, synthetic construct
  source 1..20: mol_type = other RNA
gaaaaagtactggaaatgga

SEQ ID NO: 35716 - RNA, 20 nt, synthetic construct
  source 1..20: mol_type = other RNA
gaaaaagttgggcttggttg

SEQ ID NO: 35717 - RNA, 20 nt, synthetic construct
  source 1..20: mol_type = other RNA
gaaaaatcgtcctcttcggg

SEQ ID NO: 35718 - RNA, 20 nt, synthetic construct
  source 1..20: mol_type = other RNA
gaaaaatctaaccctcaatc

SEQ ID NO: 35719 - RNA, 20 nt, synthetic construct
  source 1..20: mol_type = other RNA
gaaaaatgacctaaaatctt

SEQ ID NO: 35720 - RNA, 20 nt, synthetic construct
  source 1..20: mol_type = other RNA
gaaaaatgagaaacctaaga

SEQ ID NO: 35721 - RNA, 20 nt, synthetic construct
  source 1..20: mol_type = other RNA
gaaaaatggggatatccaaa

SEQ ID NO: 35722 - RNA, 20 nt, synthetic construct
  source 1..20: mol_type = other RNA
gaaaaatggttttatggtaa

SEQ ID NO: 35723 - RNA, 20 nt, synthetic construct
  source 1..20: mol_type = other RNA
gaaaaatgtcaattttcccc

SEQ ID NO: 35724 - RNA, 20 nt, synthetic construct
  source 1..20: mol_type = other RNA
gaaaaatgtccgttgaagtc

SEQ ID NO: 35725 - RNA, 20 nt, synthetic construct
  source 1..20: mol_type = other RNA
gaaaaattacaggtcaaact

SEQ ID NO: 35726 - RNA, 20 nt, synthetic construct
  source 1..20: mol_type = other RNA
gaaaaattcactcctcattc

SEQ ID NO: 35727 - RNA, 20 nt, synthetic construct
  source 1..20: mol_type = other RNA
gaaaaattccctcagcaaaa

SEQ ID NO: 35728 - RNA, 20 nt, synthetic construct
  source 1..20: mol_type = other RNA
gaaaaatttgacatgacagg

SEQ ID NO: 35729 - RNA, 20 nt, synthetic construct
  source 1..20: mol_type = other RNA
gaaaacaaaaagaaactaga

SEQ ID NO: 35730 - RNA, 20 nt, synthetic construct
  source 1..20: mol_type = other RNA
gaaaacaaattcatgcaact

SEQ ID NO: 35731 - RNA, 20 nt, synthetic construct
  source 1..20: mol_type = other RNA
gaaaacaaattgcatcaact

SEQ ID NO: 35732 - RNA, 20 nt, synthetic construct
  source 1..20: mol_type = other RNA
gaaaacaattacttgagagc

SEQ ID NO: 35733 - RNA, 20 nt, synthetic construct
  source 1..20: mol_type = other RNA
gaaaacacaaactgcagaat

SEQ ID NO: 35734 - RNA, 20 nt, synthetic construct
  source 1..20: mol_type = other RNA
gaaaacacaacataccaaaa

SEQ ID NO: 35735 - RNA, 20 nt, synthetic construct
  source 1..20: mol_type = other RNA
gaaaacacccttgaaaattt

SEQ ID NO: 35736 - RNA, 20 nt, synthetic construct
  source 1..20: mol_type = other RNA
gaaaacactccagaatgacc

SEQ ID NO: 35737 - RNA, 20 nt, synthetic construct
  source 1..20: mol_type = other RNA
gaaaacagataacctagatt

SEQ ID NO: 35738 - RNA, 20 nt, synthetic construct
  source 1..20: mol_type = other RNA
gaaaacagctaggtgagtga

SEQ ID NO: 35739 - RNA, 20 nt, synthetic construct
  source 1..20: mol_type = other RNA
gaaaacatatccttctacat

SEQ ID NO: 35740 - RNA, 20 nt, synthetic construct
  source 1..20: mol_type = other RNA
gaaaacatgttttgttgttg

SEQ ID NO: 35741 - RNA, 20 nt, synthetic construct
  source 1..20: mol_type = other RNA
gaaaaccagaaaagtgaaac

SEQ ID NO: 35742 - RNA, 20 nt, synthetic construct
  source 1..20: mol_type = other RNA
gaaaaccagtttagaaaaat

SEQ ID NO: 35743 - RNA, 20 nt, synthetic construct
  source 1..20: mol_type = other RNA
gaaaaccatgtcatgtatat

SEQ ID NO: 35744 - RNA, 20 nt, synthetic construct
  source 1..20: mol_type = other RNA
gaaaacccttcatcatttgt

SEQ ID NO: 35745 - RNA, 20 nt, synthetic construct
  source 1..20: mol_type = other RNA
gaaaaccgacagcagataag

SEQ ID NO: 35746 - RNA, 20 nt, synthetic construct
  source 1..20: mol_type = other RNA
gaaaacctgaaatggcttaa

SEQ ID NO: 35747 - RNA, 20 nt, synthetic construct
  source 1..20: mol_type = other RNA
gaaaacgaggaaaagagaac

SEQ ID NO: 35748 - RNA, 20 nt, synthetic construct
  source 1..20: mol_type = other RNA
gaaaactaaggtcaagagag

SEQ ID NO: 35749 - RNA, 20 nt, synthetic construct
  source 1..20: mol_type = other RNA
gaaaactacatgtaaaaact

SEQ ID NO: 35750 - RNA, 20 nt, synthetic construct
  source 1..20: mol_type = other RNA
gaaaactagagatgggaaag

SEQ ID NO: 35751 - RNA, 20 nt, synthetic construct
  source 1..20: mol_type = other RNA
gaaaactaggtatttgaaaa

SEQ ID NO: 35752 - RNA, 20 nt, synthetic construct
  source 1..20: mol_type = other RNA
gaaaactcaactgcctctac

SEQ ID NO: 35753 - RNA, 20 nt, synthetic construct
  source 1..20: mol_type = other RNA
gaaaactccaagtgtaaaaa

SEQ ID NO: 35754 - RNA, 20 nt, synthetic construct
  source 1..20: mol_type = other RNA
gaaaactctgtttccttacc

SEQ ID NO: 35755 - RNA, 20 nt, synthetic construct
  source 1..20: mol_type = other RNA
gaaaactggcaatcaaatgg

SEQ ID NO: 35756 - RNA, 20 nt, synthetic construct
  source 1..20: mol_type = other RNA
gaaaacttctctggagcaag

SEQ ID NO: 35757 - RNA, 20 nt, synthetic construct
  source 1..20: mol_type = other RNA
gaaaacttgagcagatcagt

SEQ ID NO: 35758 - RNA, 20 nt, synthetic construct
  source 1..20: mol_type = other RNA
gaaaagaaaaaggttaaggg

SEQ ID NO: 35759 - RNA, 20 nt, synthetic construct
  source 1..20: mol_type = other RNA
gaaaagaaaagtttcagtgg

SEQ ID NO: 35760 - RNA, 20 nt, synthetic construct
  source 1..20: mol_type = other RNA
gaaaagaaagctgtggatgt

SEQ ID NO: 35761 - RNA, 20 nt, synthetic construct
  source 1..20: mol_type = other RNA
gaaaagaacaacatggtaga

SEQ ID NO: 35762 - RNA, 20 nt, synthetic construct
  source 1..20: mol_type = other RNA
gaaaagaacacagtgttgag

SEQ ID NO: 35763 - RNA, 20 nt, synthetic construct
  source 1..20: mol_type = other RNA
gaaaagaagttacggttccc

SEQ ID NO: 35764 - RNA, 20 nt, synthetic construct
  source 1..20: mol_type = other RNA
gaaaagacaagactaaaaaa

SEQ ID NO: 35765 - RNA, 20 nt, synthetic construct
  source 1..20: mol_type = other RNA
gaaaagacaatagctagtgt

SEQ ID NO: 35766 - RNA, 20 nt, synthetic construct
  source 1..20: mol_type = other RNA
gaaaagacttctcaaacagg

SEQ ID NO: 35767 - RNA, 20 nt, synthetic construct
  source 1..20: mol_type = other RNA
gaaaagacttgaggtttact

SEQ ID NO: 35768 - RNA, 20 nt, synthetic construct
  source 1..20: mol_type = other RNA
gaaaagagaacattggtttg

SEQ ID NO: 35769 - RNA, 20 nt, synthetic construct
  source 1..20: mol_type = other RNA
gaaaagagatctagtgaagt

SEQ ID NO: 35770 - RNA, 20 nt, synthetic construct
  source 1..20: mol_type = other RNA
gaaaagagcacaccaagaca

SEQ ID NO: 35771 - RNA, 20 nt, synthetic construct
  source 1..20: mol_type = other RNA
gaaaagataagtagaaggtc

SEQ ID NO: 35772 - RNA, 20 nt, synthetic construct
  source 1..20: mol_type = other RNA
gaaaagatactcaacatcac

SEQ ID NO: 35773 - RNA, 20 nt, synthetic construct
  source 1..20: mol_type = other RNA
gaaaagatcagtaaaattcc

SEQ ID NO: 35774 - RNA, 20 nt, synthetic construct
  source 1..20: mol_type = other RNA
gaaaagcaaatgtcatcttc

SEQ ID NO: 35775 - RNA, 20 nt, synthetic construct
  source 1..20: mol_type = other RNA
gaaaagcacaggcatcggcc

SEQ ID NO: 35776 - RNA, 20 nt, synthetic construct
  source 1..20: mol_type = other RNA
gaaaagcccaatctacaggt

SEQ ID NO: 35777 - RNA, 20 nt, synthetic construct
  source 1..20: mol_type = other RNA
gaaaagcctcaaacgaacca

SEQ ID NO: 35778 - RNA, 20 nt, synthetic construct
  source 1..20: mol_type = other RNA
gaaaagctaccctcgagtaa

SEQ ID NO: 35779 - RNA, 20 nt, synthetic construct
  source 1..20: mol_type = other RNA
gaaaagctcaaaaatactca

SEQ ID NO: 35780 - RNA, 20 nt, synthetic construct
  source 1..20: mol_type = other RNA
gaaaagcttcataacattat

SEQ ID NO: 35781 - RNA, 20 nt, synthetic construct
  source 1..20: mol_type = other RNA
gaaaagcttcccccctctct

SEQ ID NO: 35782 - RNA, 20 nt, synthetic construct
  source 1..20: mol_type = other RNA
gaaaaggaatggaattctga

SEQ ID NO: 35783 - RNA, 20 nt, synthetic construct
  source 1..20: mol_type = other RNA
gaaaaggacattagtggaaa

SEQ ID NO: 35784 - RNA, 20 nt, synthetic construct
  source 1..20: mol_type = other RNA
gaaaaggatttgtttgtgaa

SEQ ID NO: 35785 - RNA, 20 nt, synthetic construct
  source 1..20: mol_type = other RNA
gaaaaggcaaaccacacaga

SEQ ID NO: 35786 - RNA, 20 nt, synthetic construct
  source 1..20: mol_type = other RNA
gaaaaggctgagacctcatc

SEQ ID NO: 35787 - RNA, 20 nt, synthetic construct
  source 1..20: mol_type = other RNA
gaaaagtatggttgaagaaa

SEQ ID NO: 35788 - RNA, 20 nt, synthetic construct
  source 1..20: mol_type = other RNA
gaaaagtcagtaaaaaagga

SEQ ID NO: 35789 - RNA, 20 nt, synthetic construct
  source 1..20: mol_type = other RNA
gaaaagtgttgactaccatc

SEQ ID NO: 35790 - RNA, 20 nt, synthetic construct
  source 1..20: mol_type = other RNA
gaaaagtgtttgtcacatag

SEQ ID NO: 35791 - RNA, 20 nt, synthetic construct
  source 1..20: mol_type = other RNA
gaaaagtttcagtggttaat

SEQ ID NO: 35792 - RNA, 20 nt, synthetic construct
  source 1..20: mol_type = other RNA
gaaaataaaaagtatcgtga

SEQ ID NO: 35793 - RNA, 20 nt, synthetic construct
  source 1..20: mol_type = other RNA
gaaaataaaattctgaccct

SEQ ID NO: 35794 - RNA, 20 nt, synthetic construct
  source 1..20: mol_type = other RNA
gaaaataaaccaagtttggt

SEQ ID NO: 35795 - RNA, 20 nt, synthetic construct
  source 1..20: mol_type = other RNA
gaaaataatacctaacagcc

SEQ ID NO: 35796 - RNA, 20 nt, synthetic construct
  source 1..20: mol_type = other RNA
gaaaataatgttttccgtgt

SEQ ID NO: 35797 - RNA, 20 nt, synthetic construct
  source 1..20: mol_type = other RNA
gaaaataatttgcaacagaa

SEQ ID NO: 35798 - RNA, 20 nt, synthetic construct
  source 1..20: mol_type = other RNA
gaaaatacagttttgaccaa

SEQ ID NO: 35799 - RNA, 20 nt, synthetic construct
  source 1..20: mol_type = other RNA
gaaaatacatgaggcctctc

SEQ ID NO: 35800 - RNA, 20 nt, synthetic construct
  source 1..20: mol_type = other RNA
gaaaatactaacgatcctta

SEQ ID NO: 35801 - RNA, 20 nt, synthetic construct
  source 1..20: mol_type = other RNA
gaaaatagagttccatctgt

SEQ ID NO: 35802 - RNA, 20 nt, synthetic construct
  source 1..20: mol_type = other RNA
gaaaatagggacggccttct

SEQ ID NO: 35803 - RNA, 20 nt, synthetic construct
  source 1..20: mol_type = other RNA
gaaaatagtaactttctgct

SEQ ID NO: 35804 - RNA, 20 nt, synthetic construct
  source 1..20: mol_type = other RNA
gaaaatagtatgaaggttct

SEQ ID NO: 35805 - RNA, 20 nt, synthetic construct
  source 1..20: mol_type = other RNA
gaaaatatactaaatacacc

SEQ ID NO: 35806 - RNA, 20 nt, synthetic construct
  source 1..20: mol_type = other RNA
gaaaatatatactgaagttc

SEQ ID NO: 35807 - RNA, 20 nt, synthetic construct
  source 1..20: mol_type = other RNA
gaaaatatccctggggtttc

SEQ ID NO: 35808 - RNA, 20 nt, synthetic construct
  source 1..20: mol_type = other RNA
gaaaatatctacaaatcaca

SEQ ID NO: 35809 - RNA, 20 nt, synthetic construct
  source 1..20: mol_type = other RNA
gaaaatatgaatggaaatgt

SEQ ID NO: 35810 - RNA, 20 nt, synthetic construct
  source 1..20: mol_type = other RNA
gaaaatcagtgtgaaagtat

SEQ ID NO: 35811 - RNA, 20 nt, synthetic construct
  source 1..20: mol_type = other RNA
gaaaatcatacattttccac

SEQ ID NO: 35812 - RNA, 20 nt, synthetic construct
  source 1..20: mol_type = other RNA
gaaaatcattgttcagggaa

SEQ ID NO: 35813 - RNA, 20 nt, synthetic construct
  source 1..20: mol_type = other RNA
gaaaatcattttggcaaatt

SEQ ID NO: 35814 - RNA, 20 nt, synthetic construct
  source 1..20: mol_type = other RNA
gaaaatccaaaagcctcaaa

SEQ ID NO: 35815 - RNA, 20 nt, synthetic construct
  source 1..20: mol_type = other RNA
gaaaatccaagaagacatga

SEQ ID NO: 35816 - RNA, 20 nt, synthetic construct
  source 1..20: mol_type = other RNA
gaaaatccttacttccagct

SEQ ID NO: 35817 - RNA, 20 nt, synthetic construct
  source 1..20: mol_type = other RNA
gaaaatctctgacttcattc

SEQ ID NO: 35818 - RNA, 20 nt, synthetic construct
  source 1..20: mol_type = other RNA
gaaaatctgacaatttgcca

SEQ ID NO: 35819 - RNA, 20 nt, synthetic construct
  source 1..20: mol_type = other RNA
gaaaatcttggaacttttat

SEQ ID NO: 35820 - RNA, 20 nt, synthetic construct
  source 1..20: mol_type = other RNA
gaaaatgcccttatttaatg

SEQ ID NO: 35821 - RNA, 20 nt, synthetic construct
  source 1..20: mol_type = other RNA
gaaaatgcttaacaagaatc

SEQ ID NO: 35822 - RNA, 20 nt, synthetic construct
  source 1..20: mol_type = other RNA
gaaaatgcttatgtcttgtg

SEQ ID NO: 35823 - RNA, 20 nt, synthetic construct
  source 1..20: mol_type = other RNA
gaaaatggccaagagttgct

SEQ ID NO: 35824 - RNA, 20 nt, synthetic construct
  source 1..20: mol_type = other RNA
gaaaatgggccaaagacttc

SEQ ID NO: 35825 - RNA, 20 nt, synthetic construct
  source 1..20: mol_type = other RNA
gaaaatggtttaggctgtct

SEQ ID NO: 35826 - RNA, 20 nt, synthetic construct
  source 1..20: mol_type = other RNA
gaaaatgtaaaacatcaaag

SEQ ID NO: 35827 - RNA, 20 nt, synthetic construct
  source 1..20: mol_type = other RNA
gaaaatgtatgattttctag

SEQ ID NO: 35828 - RNA, 20 nt, synthetic construct
  source 1..20: mol_type = other RNA
gaaaatgtgacattagtggt

SEQ ID NO: 35829 - RNA, 20 nt, synthetic construct
  source 1..20: mol_type = other RNA
gaaaatgttatacagcaaat

SEQ ID NO: 35830 - RNA, 20 nt, synthetic construct
  source 1..20: mol_type = other RNA
gaaaatgttccctcttcaat

SEQ ID NO: 35831 - RNA, 20 nt, synthetic construct
  source 1..20: mol_type = other RNA
gaaaattagctgactttcat

SEQ ID NO: 35832 - RNA, 20 nt, synthetic construct
  source 1..20: mol_type = other RNA
gaaaattagctggatgtggt

SEQ ID NO: 35833 - RNA, 20 nt, synthetic construct
  source 1..20: mol_type = other RNA
gaaaattcaaacatgacaga

SEQ ID NO: 35834 - RNA, 20 nt, synthetic construct
  source 1..20: mol_type = other RNA
gaaaattccttcccctttct

SEQ ID NO: 35835 - RNA, 20 nt, synthetic construct
  source 1..20: mol_type = other RNA
gaaaattcttggtcttttga

SEQ ID NO: 35836 - RNA, 20 nt, synthetic construct
  source 1..20: mol_type = other RNA
gaaaattgaattataggcaa

SEQ ID NO: 35837 - RNA, 20 nt, synthetic construct
  source 1..20: mol_type = other RNA
gaaaattggcgtacatgtag

SEQ ID NO: 35838 - RNA, 20 nt, synthetic construct
  source 1..20: mol_type = other RNA
gaaaattgtacaatttttgc

SEQ ID NO: 35839 - RNA, 20 nt, synthetic construct
  source 1..20: mol_type = other RNA
gaaaattgttcatgaaatcc

SEQ ID NO: 35840 - RNA, 20 nt, synthetic construct
  source 1..20: mol_type = other RNA
gaaaatttccagcattttat

SEQ ID NO: 35841 - RNA, 20 nt, synthetic construct
  source 1..20: mol_type = other RNA
gaaaattttctgagcaacta

SEQ ID NO: 35842 - RNA, 20 nt, synthetic construct
  source 1..20: mol_type = other RNA
gaaaattttcttttgtgggt

SEQ ID NO: 35843 - RNA, 20 nt, synthetic construct
  source 1..20: mol_type = other RNA
gaaaatttttgtctggaaca

SEQ ID NO: 35844 - RNA, 20 nt, synthetic construct
  source 1..20: mol_type = other RNA
gaaacaacaacaacaaaata

SEQ ID NO: 35845 - RNA, 20 nt, synthetic construct
  source 1..20: mol_type = other RNA
gaaacaacctaaatgtccat

SEQ ID NO: 35846 - RNA, 20 nt, synthetic construct
  source 1..20: mol_type = other RNA
gaaacaactcaaacgtccat

SEQ ID NO: 35847 - RNA, 20 nt, synthetic construct
  source 1..20: mol_type = other RNA
gaaacaataaatttctgttg

SEQ ID NO: 35848 - RNA, 20 nt, synthetic construct
  source 1..20: mol_type = other RNA
gaaacaatactttagacatg

SEQ ID NO: 35849 - RNA, 20 nt, synthetic construct
  source 1..20: mol_type = other RNA
gaaacaatcgcaatccaaaa

SEQ ID NO: 35850 - RNA, 20 nt, synthetic construct
  source 1..20: mol_type = other RNA
gaaacacactcgtgtatgat

SEQ ID NO: 35851 - RNA, 20 nt, synthetic construct
  source 1..20: mol_type = other RNA
gaaacacaggactgtgtgtg

SEQ ID NO: 35852 - RNA, 20 nt, synthetic construct
  source 1..20: mol_type = other RNA
gaaacaccaacacaaagcct

SEQ ID NO: 35853 - RNA, 20 nt, synthetic construct
  source 1..20: mol_type = other RNA
gaaacactataaatcagtaa

SEQ ID NO: 35854 - RNA, 20 nt, synthetic construct
  source 1..20: mol_type = other RNA
gaaacactcataccaggttt

SEQ ID NO: 35855 - RNA, 20 nt, synthetic construct
  source 1..20: mol_type = other RNA
gaaacactgctcagaagctt

SEQ ID NO: 35856 - RNA, 20 nt, synthetic construct
  source 1..20: mol_type = other RNA
gaaacacttgtgtaactacc

SEQ ID NO: 35857 - RNA, 20 nt, synthetic construct
  source 1..20: mol_type = other RNA
gaaacagaaaaatccatctt

SEQ ID NO: 35858 - RNA, 20 nt, synthetic construct
  source 1..20: mol_type = other RNA
gaaacagagttttccaataa

SEQ ID NO: 35859 - RNA, 20 nt, synthetic construct
  source 1..20: mol_type = other RNA
gaaacagattgatttatatg

SEQ ID NO: 35860 - RNA, 20 nt, synthetic construct
  source 1..20: mol_type = other RNA
gaaacaggattacaatgtaa

SEQ ID NO: 35861 - RNA, 20 nt, synthetic construct
  source 1..20: mol_type = other RNA
gaaacagggttacagtatag

SEQ ID NO: 35862 - RNA, 20 nt, synthetic construct
  source 1..20: mol_type = other RNA
gaaacagtaattagttacat

SEQ ID NO: 35863 - RNA, 20 nt, synthetic construct
  source 1..20: mol_type = other RNA
gaaacatacatgttcagtta

SEQ ID NO: 35864 - RNA, 20 nt, synthetic construct
  source 1..20: mol_type = other RNA
gaaacatcccaagtgcccat

SEQ ID NO: 35865 - RNA, 20 nt, synthetic construct
  source 1..20: mol_type = other RNA
gaaacatggcttagaaatga

SEQ ID NO: 35866 - RNA, 20 nt, synthetic construct
  source 1..20: mol_type = other RNA
gaaacatggtaatttgtcca

SEQ ID NO: 35867 - RNA, 20 nt, synthetic construct
  source 1..20: mol_type = other RNA
gaaaccaagagcatagactt

SEQ ID NO: 35868 - RNA, 20 nt, synthetic construct
  source 1..20: mol_type = other RNA
gaaaccaagcaagtaaaaga

SEQ ID NO: 35869 - RNA, 20 nt, synthetic construct
  source 1..20: mol_type = other RNA
gaaaccacagagcctaaaat

SEQ ID NO: 35870 - RNA, 20 nt, synthetic construct
  source 1..20: mol_type = other RNA
gaaaccagtgctctcccccg

SEQ ID NO: 35871 - RNA, 20 nt, synthetic construct
  source 1..20: mol_type = other RNA
gaaaccagtgggtcagctag

SEQ ID NO: 35872 - RNA, 20 nt, synthetic construct
  source 1..20: mol_type = other RNA
gaaaccagttgtaattttta

SEQ ID NO: 35873 - RNA, 20 nt, synthetic construct
  source 1..20: mol_type = other RNA
gaaaccatcgttcacactcg

SEQ ID NO: 35874 - RNA, 20 nt, synthetic construct
  source 1..20: mol_type = other RNA
gaaaccatttaccccttaaa

SEQ ID NO: 35875 - RNA, 20 nt, synthetic construct
  source 1..20: mol_type = other RNA
gaaaccccagggatattttc

SEQ ID NO: 35876 - RNA, 20 nt, synthetic construct
  source 1..20: mol_type = other RNA
gaaaccccgcatactgtgca

SEQ ID NO: 35877 - RNA, 20 nt, synthetic construct
  source 1..20: mol_type = other RNA
gaaacccgctctgggtgcgt

SEQ ID NO: 35878 - RNA, 20 nt, synthetic construct
  source 1..20: mol_type = other RNA
gaaaccctcacgaaagcggt

SEQ ID NO: 35879 - RNA, 20 nt, synthetic construct
  source 1..20: mol_type = other RNA
gaaaccctgtacccattaga

SEQ ID NO: 35880 - RNA, 20 nt, synthetic construct
  source 1..20: mol_type = other RNA
gaaacctaagaaaggtctag

SEQ ID NO: 35881 - RNA, 20 nt, synthetic construct
  source 1..20: mol_type = other RNA
gaaacctgccatggtgttaa

SEQ ID NO: 35882 - RNA, 20 nt, synthetic construct
  source 1..20: mol_type = other RNA
gaaaccttactgtaatattg

SEQ ID NO: 35883 - RNA, 20 nt, synthetic construct
  source 1..20: mol_type = other RNA
gaaaccttggtgtgcttctg

SEQ ID NO: 35884 - RNA, 20 nt, synthetic construct
  source 1..20: mol_type = other RNA
gaaacctttctcaaagccca

SEQ ID NO: 35885 - RNA, 20 nt, synthetic construct
  source 1..20: mol_type = other RNA
gaaaccttttgtagaccctg

SEQ ID NO: 35886 - RNA, 20 nt, synthetic construct
  source 1..20: mol_type = other RNA
gaaacgaccttgctcattca

SEQ ID NO: 35887 - RNA, 20 nt, synthetic construct
  source 1..20: mol_type = other RNA
gaaacgatgcattccagatt

SEQ ID NO: 35888 - RNA, 20 nt, synthetic construct
  source 1..20: mol_type = other RNA
gaaactaaatgtgagcattt

SEQ ID NO: 35889 - RNA, 20 nt, synthetic construct
  source 1..20: mol_type = other RNA
gaaactacaattactgtaca

SEQ ID NO: 35890 - RNA, 20 nt, synthetic construct
  source 1..20: mol_type = other RNA
gaaactacctagaaaaacac

SEQ ID NO: 35891 - RNA, 20 nt, synthetic construct
  source 1..20: mol_type = other RNA
gaaactagaaaagataagta

SEQ ID NO: 35892 - RNA, 20 nt, synthetic construct
  source 1..20: mol_type = other RNA
gaaactatccaacatgccag

SEQ ID NO: 35893 - RNA, 20 nt, synthetic construct
  source 1..20: mol_type = other RNA
gaaactcaaacccaaattaa

SEQ ID NO: 35894 - RNA, 20 nt, synthetic construct
  source 1..20: mol_type = other RNA
gaaactcaatgttggttagt

SEQ ID NO: 35895 - RNA, 20 nt, synthetic construct
  source 1..20: mol_type = other RNA
gaaactctggctcagaaaca

SEQ ID NO: 35896 - RNA, 20 nt, synthetic construct
  source 1..20: mol_type = other RNA
gaaactgacaggactccaca

SEQ ID NO: 35897 - RNA, 20 nt, synthetic construct
  source 1..20: mol_type = other RNA
gaaactgagcatcccagagg

SEQ ID NO: 35898 - RNA, 20 nt, synthetic construct
  source 1..20: mol_type = other RNA
gaaactggaatcaatccaga

SEQ ID NO: 35899 - RNA, 20 nt, synthetic construct
  source 1..20: mol_type = other RNA
gaaactggtgaactgggtgt

SEQ ID NO: 35900 - RNA, 20 nt, synthetic construct
  source 1..20: mol_type = other RNA
gaaactgtttttgcaattta

SEQ ID NO: 35901 - RNA, 20 nt, synthetic construct
  source 1..20: mol_type = other RNA
gaaacttatttccagggggt

SEQ ID NO: 35902 - RNA, 20 nt, synthetic construct
  source 1..20: mol_type = other RNA
gaaacttccaaccatcttct

SEQ ID NO: 35903 - RNA, 20 nt, synthetic construct
  source 1..20: mol_type = other RNA
gaaacttccagaaacttcca

SEQ ID NO: 35904 - RNA, 20 nt, synthetic construct
  source 1..20: mol_type = other RNA
gaaacttcttctgttggaga

SEQ ID NO: 35905 - RNA, 20 nt, synthetic construct
  source 1..20: mol_type = other RNA
gaaacttgaatactcgtgtg

SEQ ID NO: 35906 - RNA, 20 nt, synthetic construct
  source 1..20: mol_type = other RNA
gaaacttgccatcttgcata

SEQ ID NO: 35907 - RNA, 20 nt, synthetic construct
  source 1..20: mol_type = other RNA
gaaacttggattgtgtgtcg

SEQ ID NO: 35908 - RNA, 20 nt, synthetic construct
  source 1..20: mol_type = other RNA
gaaactttaagagtatcttt

SEQ ID NO: 35909 - RNA, 20 nt, synthetic construct
  source 1..20: mol_type = other RNA
gaaactttgcattcctgaaa

SEQ ID NO: 35910 - RNA, 20 nt, synthetic construct
  source 1..20: mol_type = other RNA
gaaagaaaaactgaactaca

SEQ ID NO: 35911 - RNA, 20 nt, synthetic construct
  source 1..20: mol_type = other RNA
gaaagaaaatccaaaagcct

SEQ ID NO: 35912 - RNA, 20 nt, synthetic construct
  source 1..20: mol_type = other RNA
gaaagaaagaaggccatttg

SEQ ID NO: 35913 - RNA, 20 nt, synthetic construct
  source 1..20: mol_type = other RNA
gaaagaaatagaactgtcac

SEQ ID NO: 35914 - RNA, 20 nt, synthetic construct
  source 1..20: mol_type = other RNA
gaaagaactgaaagcaggga

SEQ ID NO: 35915 - RNA, 20 nt, synthetic construct
  source 1..20: mol_type = other RNA
gaaagaaggccatttgattg

SEQ ID NO: 35916 - RNA, 20 nt, synthetic construct
  source 1..20: mol_type = other RNA
gaaagaagtaatttcttctg

SEQ ID NO: 35917 - RNA, 20 nt, synthetic construct
  source 1..20: mol_type = other RNA
gaaagacagacctctattaa

SEQ ID NO: 35918 - RNA, 20 nt, synthetic construct
  source 1..20: mol_type = other RNA
gaaagacagggagagagaga

SEQ ID NO: 35919 - RNA, 20 nt, synthetic construct
  source 1..20: mol_type = other RNA
gaaagacaggtagacatgag

SEQ ID NO: 35920 - RNA, 20 nt, synthetic construct
  source 1..20: mol_type = other RNA
gaaagaccaagagtgtggct

SEQ ID NO: 35921 - RNA, 20 nt, synthetic construct
  source 1..20: mol_type = other RNA
gaaagaccggggactgcaac

SEQ ID NO: 35922 - RNA, 20 nt, synthetic construct
  source 1..20: mol_type = other RNA
gaaagagaaagaagtaattt

SEQ ID NO: 35923 - RNA, 20 nt, synthetic construct
  source 1..20: mol_type = other RNA
gaaagagaatagcagaaaca

SEQ ID NO: 35924 - RNA, 20 nt, synthetic construct
  source 1..20: mol_type = other RNA
gaaagagagagacaagcaca

SEQ ID NO: 35925 - RNA, 20 nt, synthetic construct
  source 1..20: mol_type = other RNA
gaaagagagaggggggaagc

SEQ ID NO: 35926 - RNA, 20 nt, synthetic construct
  source 1..20: mol_type = other RNA
gaaagagccagcctgatgat

SEQ ID NO: 35927 - RNA, 20 nt, synthetic construct
  source 1..20: mol_type = other RNA
gaaagagggaagtactgagt

SEQ ID NO: 35928 - RNA, 20 nt, synthetic construct
  source 1..20: mol_type = other RNA
gaaagagttgggtttttgaa

SEQ ID NO: 35929 - RNA, 20 nt, synthetic construct
  source 1..20: mol_type = other RNA
gaaagataaatcagaaactg

SEQ ID NO: 35930 - RNA, 20 nt, synthetic construct
  source 1..20: mol_type = other RNA
gaaagataaatccaacgacc

SEQ ID NO: 35931 - RNA, 20 nt, synthetic construct
  source 1..20: mol_type = other RNA
gaaagatcatttagtaagtg

SEQ ID NO: 35932 - RNA, 20 nt, synthetic construct
  source 1..20: mol_type = other RNA
gaaagatctcaaacagccta

SEQ ID NO: 35933 - RNA, 20 nt, synthetic construct
  source 1..20: mol_type = other RNA
gaaagatgaagtatagaaag

SEQ ID NO: 35934 - RNA, 20 nt, synthetic construct
  source 1..20: mol_type = other RNA
gaaagatgtcttttaacttg

SEQ ID NO: 35935 - RNA, 20 nt, synthetic construct
  source 1..20: mol_type = other RNA
gaaagattaatccttgtggt

SEQ ID NO: 35936 - RNA, 20 nt, synthetic construct
  source 1..20: mol_type = other RNA
gaaagcacataaaaaaggaa

SEQ ID NO: 35937 - RNA, 20 nt, synthetic construct
  source 1..20: mol_type = other RNA
gaaagcaccagggcctctga

SEQ ID NO: 35938 - RNA, 20 nt, synthetic construct
  source 1..20: mol_type = other RNA
gaaagcacgtttgatctggt

SEQ ID NO: 35939 - RNA, 20 nt, synthetic construct
  source 1..20: mol_type = other RNA
gaaagcagggactcccatat

SEQ ID NO: 35940 - RNA, 20 nt, synthetic construct
  source 1..20: mol_type = other RNA
gaaagcaggtcatgactttt

SEQ ID NO: 35941 - RNA, 20 nt, synthetic construct
  source 1..20: mol_type = other RNA
gaaagcaggttcattttaat

SEQ ID NO: 35942 - RNA, 20 nt, synthetic construct
  source 1..20: mol_type = other RNA
gaaagcaggttgcattaatg

SEQ ID NO: 35943 - RNA, 20 nt, synthetic construct
  source 1..20: mol_type = other RNA
gaaagcatcagagctttgtt

SEQ ID NO: 35944 - RNA, 20 nt, synthetic construct
  source 1..20: mol_type = other RNA
gaaagcccagccgcggactc

SEQ ID NO: 35945 - RNA, 20 nt, synthetic construct
  source 1..20: mol_type = other RNA
gaaagcccttgagtattttt

SEQ ID NO: 35946 - RNA, 20 nt, synthetic construct
  source 1..20: mol_type = other RNA
gaaagcctcttcagaagagg

SEQ ID NO: 35947 - RNA, 20 nt, synthetic construct
  source 1..20: mol_type = other RNA
gaaagcctggctttagatgg

SEQ ID NO: 35948 - RNA, 20 nt, synthetic construct
  source 1..20: mol_type = other RNA
gaaagcctgtgacagtatgt

SEQ ID NO: 35949 - RNA, 20 nt, synthetic construct
  source 1..20: mol_type = other RNA
gaaagcctttattttttctt

SEQ ID NO: 35950 - RNA, 20 nt, synthetic construct
  source 1..20: mol_type = other RNA
gaaagcggtcaacgcaccca

SEQ ID NO: 35951 - RNA, 20 nt, synthetic construct
  source 1..20: mol_type = other RNA
gaaagctaatttggaattaa

SEQ ID NO: 35952 - RNA, 20 nt, synthetic construct
  source 1..20: mol_type = other RNA
gaaagctagaagacctcaaa

SEQ ID NO: 35953 - RNA, 20 nt, synthetic construct
  source 1..20: mol_type = other RNA
gaaagctcaggaccagatga

SEQ ID NO: 35954 - RNA, 20 nt, synthetic construct
  source 1..20: mol_type = other RNA
gaaagctcccaatgcttgaa

SEQ ID NO: 35955 - RNA, 20 nt, synthetic construct
  source 1..20: mol_type = other RNA
gaaagctctcaattaatgcc

SEQ ID NO: 35956 - RNA, 20 nt, synthetic construct
  source 1..20: mol_type = other RNA
gaaagctggactcattccaa

SEQ ID NO: 35957 - RNA, 20 nt, synthetic construct
  source 1..20: mol_type = other RNA
gaaagctgtggatgttggtg

SEQ ID NO: 35958 - RNA, 20 nt, synthetic construct
  source 1..20: mol_type = other RNA
gaaagcttctgagcagtgtt

SEQ ID NO: 35959 - RNA, 20 nt, synthetic construct
  source 1..20: mol_type = other RNA
gaaaggaaatgagtgtatgc

SEQ ID NO: 35960 - RNA, 20 nt, synthetic construct
  source 1..20: mol_type = other RNA
gaaaggaatccggctttatg

SEQ ID NO: 35961 - RNA, 20 nt, synthetic construct
  source 1..20: mol_type = other RNA
gaaaggaattgtaatcacag

SEQ ID NO: 35962 - RNA, 20 nt, synthetic construct
  source 1..20: mol_type = other RNA
gaaaggacttcagtccttac

SEQ ID NO: 35963 - RNA, 20 nt, synthetic construct
  source 1..20: mol_type = other RNA
gaaaggacttgatctaaaat

SEQ ID NO: 35964 - RNA, 20 nt, synthetic construct
  source 1..20: mol_type = other RNA
gaaaggagaccagttaggaa

SEQ ID NO: 35965 - RNA, 20 nt, synthetic construct
  source 1..20: mol_type = other RNA
gaaaggagatactggccatg

SEQ ID NO: 35966 - RNA, 20 nt, synthetic construct
  source 1..20: mol_type = other RNA
gaaaggagggactgaaacca

SEQ ID NO: 35967 - RNA, 20 nt, synthetic construct
  source 1..20: mol_type = other RNA
gaaaggagttcagctttaaa

SEQ ID NO: 35968 - RNA, 20 nt, synthetic construct
  source 1..20: mol_type = other RNA
gaaaggatactgagaacaga

SEQ ID NO: 35969 - RNA, 20 nt, synthetic construct
  source 1..20: mol_type = other RNA
gaaaggatgaccttgacaat

SEQ ID NO: 35970 - RNA, 20 nt, synthetic construct
  source 1..20: mol_type = other RNA
gaaaggatggtttgattgtt

SEQ ID NO: 35971 - RNA, 20 nt, synthetic construct
  source 1..20: mol_type = other RNA
gaaaggcaaaggaaaaaact

SEQ ID NO: 35972 - RNA, 20 nt, synthetic construct
  source 1..20: mol_type = other RNA
gaaaggcatgaaattcttgg

SEQ ID NO: 35973 - RNA, 20 nt, synthetic construct
  source 1..20: mol_type = other RNA
gaaaggcccaaaaagttttt

SEQ ID NO: 35974 - RNA, 20 nt, synthetic construct
  source 1..20: mol_type = other RNA
gaaaggcgaagcggcagggc

SEQ ID NO: 35975 - RNA, 20 nt, synthetic construct
  source 1..20: mol_type = other RNA
gaaaggcgtcggggctgctg

SEQ ID NO: 35976 - RNA, 20 nt, synthetic construct
  source 1..20: mol_type = other RNA
gaaagggattctggccaaat

SEQ ID NO: 35977 - RNA, 20 nt, synthetic construct
  source 1..20: mol_type = other RNA
gaaaggggaaggaattttca

SEQ ID NO: 35978 - RNA, 20 nt, synthetic construct
  source 1..20: mol_type = other RNA
gaaaggggccaggtgtggag

SEQ ID NO: 35979 - RNA, 20 nt, synthetic construct
  source 1..20: mol_type = other RNA
gaaagggtagagcactttcg

SEQ ID NO: 35980 - RNA, 20 nt, synthetic construct
  source 1..20: mol_type = other RNA
gaaagggtagctttgatgcc

SEQ ID NO: 35981 - RNA, 20 nt, synthetic construct
  source 1..20: mol_type = other RNA
gaaagggtgtgtgaatggaa

SEQ ID NO: 35982 - RNA, 20 nt, synthetic construct
  source 1..20: mol_type = other RNA
gaaaggtacgacgctcttgt

SEQ ID NO: 35983 - RNA, 20 nt, synthetic construct
  source 1..20: mol_type = other RNA
gaaaggtctagtgtgcatgt

SEQ ID NO: 35984 - RNA, 20 nt, synthetic construct
  source 1..20: mol_type = other RNA
gaaaggtctctctctgtcac

SEQ ID NO: 35985 - RNA, 20 nt, synthetic construct
  source 1..20: mol_type = other RNA
gaaaggtttcttcactctta

SEQ ID NO: 35986 - RNA, 20 nt, synthetic construct
  source 1..20: mol_type = other RNA
gaaagtaaagatagcccctt

SEQ ID NO: 35987 - RNA, 20 nt, synthetic construct
  source 1..20: mol_type = other RNA
gaaagtaactgttggcaagg

SEQ ID NO: 35988 - RNA, 20 nt, synthetic construct
  source 1..20: mol_type = other RNA
gaaagtagaggactgcctat

SEQ ID NO: 35989 - RNA, 20 nt, synthetic construct
  source 1..20: mol_type = other RNA
gaaagtagattagcttttac

SEQ ID NO: 35990 - RNA, 20 nt, synthetic construct
  source 1..20: mol_type = other RNA
gaaagtaggaattaaacatt

SEQ ID NO: 35991 - RNA, 20 nt, synthetic construct
  source 1..20: mol_type = other RNA
gaaagtattaaaagcacaag

SEQ ID NO: 35992 - RNA, 20 nt, synthetic construct
  source 1..20: mol_type = other RNA
gaaagtattcccaagatcat

SEQ ID NO: 35993 - RNA, 20 nt, synthetic construct
  source 1..20: mol_type = other RNA
gaaagtcagctaattttcta

SEQ ID NO: 35994 - RNA, 20 nt, synthetic construct
  source 1..20: mol_type = other RNA
gaaagtctccctaaccaggc

SEQ ID NO: 35995 - RNA, 20 nt, synthetic construct
  source 1..20: mol_type = other RNA
gaaagtgaagcccagagagg

SEQ ID NO: 35996 - RNA, 20 nt, synthetic construct
  source 1..20: mol_type = other RNA
gaaagtgacagatgagaaat

SEQ ID NO: 35997 - RNA, 20 nt, synthetic construct
  source 1..20: mol_type = other RNA
gaaagtgccagccacccttg

SEQ ID NO: 35998 - RNA, 20 nt, synthetic construct
  source 1..20: mol_type = other RNA
gaaagtgctctaccctttcc

SEQ ID NO: 35999 - RNA, 20 nt, synthetic construct
  source 1..20: mol_type = other RNA
gaaagtggactatgtaggca

SEQ ID NO: 36000 - RNA, 20 nt, synthetic construct
  source 1..20: mol_type = other RNA
gaaagtggagaattactaaa

SEQ ID NO: 36001 - RNA, 20 nt, synthetic construct
  source 1..20: mol_type = other RNA
gaaagtgtgcttgggctccc

SEQ ID NO: 36002 - RNA, 20 nt, synthetic construct
  source 1..20: mol_type = other RNA
gaaagttagtgtctaatggg

SEQ ID NO: 36003 - RNA, 20 nt, synthetic construct
  source 1..20: mol_type = other RNA
gaaagttcaaatgaggcttt

SEQ ID NO: 36004 - RNA, 20 nt, synthetic construct
  source 1..20: mol_type = other RNA
gaaagttcagaataccagag

SEQ ID NO: 36005 - RNA, 20 nt, synthetic construct
  source 1..20: mol_type = other RNA
gaaagttcagatagaattaa

SEQ ID NO: 36006 - RNA, 20 nt, synthetic construct
  source 1..20: mol_type = other RNA
gaaagttttgcagttgggga

SEQ ID NO: 36007 - RNA, 20 nt, synthetic construct
  source 1..20: mol_type = other RNA
gaaataaaacatggccagta

SEQ ID NO: 36008 - RNA, 20 nt, synthetic construct
  source 1..20: mol_type = other RNA
gaaataaaacatgttgtgta

SEQ ID NO: 36009 - RNA, 20 nt, synthetic construct
  source 1..20: mol_type = other RNA
gaaataaaagttacaaggat

SEQ ID NO: 36010 - RNA, 20 nt, synthetic construct
  source 1..20: mol_type = other RNA
gaaataaacgacaccagaac

SEQ ID NO: 36011 - RNA, 20 nt, synthetic construct
  source 1..20: mol_type = other RNA
gaaataaatcctcacatgtt

SEQ ID NO: 36012 - RNA, 20 nt, synthetic construct
  source 1..20: mol_type = other RNA
gaaataactttaatcaccag

SEQ ID NO: 36013 - RNA, 20 nt, synthetic construct
  source 1..20: mol_type = other RNA
gaaataagaaggtttgtaga

SEQ ID NO: 36014 - RNA, 20 nt, synthetic construct
  source 1..20: mol_type = other RNA
gaaataagtttcatggactt

SEQ ID NO: 36015 - RNA, 20 nt, synthetic construct
  source 1..20: mol_type = other RNA
gaaataatcattgttaggtg

SEQ ID NO: 36016 - RNA, 20 nt, synthetic construct
  source 1..20: mol_type = other RNA
gaaataatttccctcagaat

SEQ ID NO: 36017 - RNA, 20 nt, synthetic construct
  source 1..20: mol_type = other RNA
gaaataatttggttatgcga

SEQ ID NO: 36018 - RNA, 20 nt, synthetic construct
  source 1..20: mol_type = other RNA
gaaatacaaaaagtgatacc

SEQ ID NO: 36019 - RNA, 20 nt, synthetic construct
  source 1..20: mol_type = other RNA
gaaatacagaccgatggaac

SEQ ID NO: 36020 - RNA, 20 nt, synthetic construct
  source 1..20: mol_type = other RNA
gaaatacctgcaggttgata

SEQ ID NO: 36021 - RNA, 20 nt, synthetic construct
  source 1..20: mol_type = other RNA
gaaatactcaaactatgctt

SEQ ID NO: 36022 - RNA, 20 nt, synthetic construct
  source 1..20: mol_type = other RNA
gaaatacttgaacattctgt

SEQ ID NO: 36023 - RNA, 20 nt, synthetic construct
  source 1..20: mol_type = other RNA
gaaatacttgatctacattt

SEQ ID NO: 36024 - RNA, 20 nt, synthetic construct
  source 1..20: mol_type = other RNA
gaaatacttggacaggggac

SEQ ID NO: 36025 - RNA, 20 nt, synthetic construct
  source 1..20: mol_type = other RNA
gaaatagaaaacttgagcag

SEQ ID NO: 36026 - RNA, 20 nt, synthetic construct
  source 1..20: mol_type = other RNA
gaaatagaactgtcacaatt

SEQ ID NO: 36027 - RNA, 20 nt, synthetic construct
  source 1..20: mol_type = other RNA
gaaatagactcccaacttat

SEQ ID NO: 36028 - RNA, 20 nt, synthetic construct
  source 1..20: mol_type = other RNA
gaaatagatgcctagaaagg

SEQ ID NO: 36029 - RNA, 20 nt, synthetic construct
  source 1..20: mol_type = other RNA
gaaatagtagttgctcagaa

SEQ ID NO: 36030 - RNA, 20 nt, synthetic construct
  source 1..20: mol_type = other RNA
gaaatagttaacgtttatct

SEQ ID NO: 36031 - RNA, 20 nt, synthetic construct
  source 1..20: mol_type = other RNA
gaaatagttggtcagaaaaa

SEQ ID NO: 36032 - RNA, 20 nt, synthetic construct
  source 1..20: mol_type = other RNA
gaaatataaaaagcctctgt

SEQ ID NO: 36033 - RNA, 20 nt, synthetic construct
  source 1..20: mol_type = other RNA
gaaatataatgttatgaagc

SEQ ID NO: 36034 - RNA, 20 nt, synthetic construct
  source 1..20: mol_type = other RNA
gaaatataccttatgtgaaa

SEQ ID NO: 36035 - RNA, 20 nt, synthetic construct
  source 1..20: mol_type = other RNA
gaaatatctccctcacagtc

SEQ ID NO: 36036 - RNA, 20 nt, synthetic construct
  source 1..20: mol_type = other RNA
gaaatatgaaccacactgac

SEQ ID NO: 36037 - RNA, 20 nt, synthetic construct
  source 1..20: mol_type = other RNA
gaaatatggtcactgctgat

SEQ ID NO: 36038 - RNA, 20 nt, synthetic construct
  source 1..20: mol_type = other RNA
gaaatcaaatgggaaattag

SEQ ID NO: 36039 - RNA, 20 nt, synthetic construct
  source 1..20: mol_type = other RNA
gaaatcacacaatcttgaga

SEQ ID NO: 36040 - RNA, 20 nt, synthetic construct
  source 1..20: mol_type = other RNA
gaaatcacaggtttaggttt

SEQ ID NO: 36041 - RNA, 20 nt, synthetic construct
  source 1..20: mol_type = other RNA
gaaatcagaacttgacaagt

SEQ ID NO: 36042 - RNA, 20 nt, synthetic construct
  source 1..20: mol_type = other RNA
gaaatcaggaagtatgagtc

SEQ ID NO: 36043 - RNA, 20 nt, synthetic construct
  source 1..20: mol_type = other RNA
gaaatcataaaatatgtcct

SEQ ID NO: 36044 - RNA, 20 nt, synthetic construct
  source 1..20: mol_type = other RNA
gaaatcatacacgagtgtgt

SEQ ID NO: 36045 - RNA, 20 nt, synthetic construct
  source 1..20: mol_type = other RNA
gaaatcattcaggacactgg

SEQ ID NO: 36046 - RNA, 20 nt, synthetic construct
  source 1..20: mol_type = other RNA
gaaatcatttcactctttta

SEQ ID NO: 36047 - RNA, 20 nt, synthetic construct
  source 1..20: mol_type = other RNA
gaaatcccctttagtgttct

SEQ ID NO: 36048 - RNA, 20 nt, synthetic construct
  source 1..20: mol_type = other RNA
gaaatcctagccccaaatac

SEQ ID NO: 36049 - RNA, 20 nt, synthetic construct
  source 1..20: mol_type = other RNA
gaaatcggaactcctgtatg

SEQ ID NO: 36050 - RNA, 20 nt, synthetic construct
  source 1..20: mol_type = other RNA
gaaatcgggagtaacagacc

SEQ ID NO: 36051 - RNA, 20 nt, synthetic construct
  source 1..20: mol_type = other RNA
gaaatcgttgtgaaatataa

SEQ ID NO: 36052 - RNA, 20 nt, synthetic construct
  source 1..20: mol_type = other RNA
gaaatctaaatgtagatcaa

SEQ ID NO: 36053 - RNA, 20 nt, synthetic construct
  source 1..20: mol_type = other RNA
gaaatctaccaaacattgaa

SEQ ID NO: 36054 - RNA, 20 nt, synthetic construct
  source 1..20: mol_type = other RNA
gaaatctaggcatataataa

SEQ ID NO: 36055 - RNA, 20 nt, synthetic construct
  source 1..20: mol_type = other RNA
gaaatctgatttgtttagta

SEQ ID NO: 36056 - RNA, 20 nt, synthetic construct
  source 1..20: mol_type = other RNA
gaaatctgcatccaaaaggg

SEQ ID NO: 36057 - RNA, 20 nt, synthetic construct
  source 1..20: mol_type = other RNA
gaaatcttccagaaggagaa

SEQ ID NO: 36058 - RNA, 20 nt, synthetic construct
  source 1..20: mol_type = other RNA
gaaatcttgaagatggcaaa

SEQ ID NO: 36059 - RNA, 20 nt, synthetic construct
  source 1..20: mol_type = other RNA
gaaatgaaatggcccttaac

SEQ ID NO: 36060 - RNA, 20 nt, synthetic construct
  source 1..20: mol_type = other RNA
gaaatgaaccaaacttggtt

SEQ ID NO: 36061 - RNA, 20 nt, synthetic construct
  source 1..20: mol_type = other RNA
gaaatgaagatggcctccct

SEQ ID NO: 36062 - RNA, 20 nt, synthetic construct
  source 1..20: mol_type = other RNA
gaaatgaagtattgatttga

SEQ ID NO: 36063 - RNA, 20 nt, synthetic construct
  source 1..20: mol_type = other RNA
gaaatgacaagtaaatgcaa

SEQ ID NO: 36064 - RNA, 20 nt, synthetic construct
  source 1..20: mol_type = other RNA
gaaatgagtgagccacagct

SEQ ID NO: 36065 - RNA, 20 nt, synthetic construct
  source 1..20: mol_type = other RNA
gaaatgagtgtatgcaggga

SEQ ID NO: 36066 - RNA, 20 nt, synthetic construct
  source 1..20: mol_type = other RNA
gaaatgagttccagtccttt

SEQ ID NO: 36067 - RNA, 20 nt, synthetic construct
  source 1..20: mol_type = other RNA
gaaatgatacctcatttata

SEQ ID NO: 36068 - RNA, 20 nt, synthetic construct
  source 1..20: mol_type = other RNA
gaaatgatctttgaataaag

SEQ ID NO: 36069 - RNA, 20 nt, synthetic construct
  source 1..20: mol_type = other RNA
gaaatgatcttttgtagtaa

SEQ ID NO: 36070 - RNA, 20 nt, synthetic construct
  source 1..20: mol_type = other RNA
gaaatgatttcaagtaacac

SEQ ID NO: 36071 - RNA, 20 nt, synthetic construct
  source 1..20: mol_type = other RNA
gaaatgcaaatcaaaacaat

SEQ ID NO: 36072 - RNA, 20 nt, synthetic construct
  source 1..20: mol_type = other RNA
gaaatgcacttagcgctgat

SEQ ID NO: 36073 - RNA, 20 nt, synthetic construct
  source 1..20: mol_type = other RNA
gaaatgctgtaactgacttc

SEQ ID NO: 36074 - RNA, 20 nt, synthetic construct
  source 1..20: mol_type = other RNA
gaaatggacagcacattaaa

SEQ ID NO: 36075 - RNA, 20 nt, synthetic construct
  source 1..20: mol_type = other RNA
gaaatggacagcggggatgg

SEQ ID NO: 36076 - RNA, 20 nt, synthetic construct
  source 1..20: mol_type = other RNA
gaaatggagggccagaggag

SEQ ID NO: 36077 - RNA, 20 nt, synthetic construct
  source 1..20: mol_type = other RNA
gaaatggcccttaacttcac

SEQ ID NO: 36078 - RNA, 20 nt, synthetic construct
  source 1..20: mol_type = other RNA
gaaatggcttaaggaaataa

SEQ ID NO: 36079 - RNA, 20 nt, synthetic construct
  source 1..20: mol_type = other RNA
gaaatgggtaaatttctaaa

SEQ ID NO: 36080 - RNA, 20 nt, synthetic construct
  source 1..20: mol_type = other RNA
gaaatgggtttaaaagagtg

SEQ ID NO: 36081 - RNA, 20 nt, synthetic construct
  source 1..20: mol_type = other RNA
gaaatgtaaattcctaactc

SEQ ID NO: 36082 - RNA, 20 nt, synthetic construct
  source 1..20: mol_type = other RNA
gaaatgtctggtttgctttg

SEQ ID NO: 36083 - RNA, 20 nt, synthetic construct
  source 1..20: mol_type = other RNA
gaaatgtgaacagacagaca

SEQ ID NO: 36084 - RNA, 20 nt, synthetic construct
  source 1..20: mol_type = other RNA
gaaatgtggaagcagaacta

SEQ ID NO: 36085 - RNA, 20 nt, synthetic construct
  source 1..20: mol_type = other RNA
gaaatgtggagataaagagc

SEQ ID NO: 36086 - RNA, 20 nt, synthetic construct
  source 1..20: mol_type = other RNA
gaaatgtggtttttggttca

SEQ ID NO: 36087 - RNA, 20 nt, synthetic construct
  source 1..20: mol_type = other RNA
gaaatgttaacaattggtga

SEQ ID NO: 36088 - RNA, 20 nt, synthetic construct
  source 1..20: mol_type = other RNA
gaaatgttaagattcaacaa

SEQ ID NO: 36089 - RNA, 20 nt, synthetic construct
  source 1..20: mol_type = other RNA
gaaatgtttaattcctactt

SEQ ID NO: 36090 - RNA, 20 nt, synthetic construct
  source 1..20: mol_type = other RNA
gaaattaaacacacccttgg

SEQ ID NO: 36091 - RNA, 20 nt, synthetic construct
  source 1..20: mol_type = other RNA
gaaattacttctttctcttt

SEQ ID NO: 36092 - RNA, 20 nt, synthetic construct
  source 1..20: mol_type = other RNA
gaaattagaaatgtggaagc

SEQ ID NO: 36093 - RNA, 20 nt, synthetic construct
  source 1..20: mol_type = other RNA
gaaattagaacatctggcag

SEQ ID NO: 36094 - RNA, 20 nt, synthetic construct
  source 1..20: mol_type = other RNA
gaaattagatgatgttttga

SEQ ID NO: 36095 - RNA, 20 nt, synthetic construct
  source 1..20: mol_type = other RNA
gaaattagctaagtatgcag

SEQ ID NO: 36096 - RNA, 20 nt, synthetic construct
  source 1..20: mol_type = other RNA
gaaattagttccttttaagg

SEQ ID NO: 36097 - RNA, 20 nt, synthetic construct
  source 1..20: mol_type = other RNA
gaaattataagcttcctctg

SEQ ID NO: 36098 - RNA, 20 nt, synthetic construct
  source 1..20: mol_type = other RNA
gaaattatctgtgggttaaa

SEQ ID NO: 36099 - RNA, 20 nt, synthetic construct
  source 1..20: mol_type = other RNA
gaaattatttccagccttta

SEQ ID NO: 36100 - RNA, 20 nt, synthetic construct
  source 1..20: mol_type = other RNA
gaaattcaacttggtaaaaa

SEQ ID NO: 36101 - RNA, 20 nt, synthetic construct
  source 1..20: mol_type = other RNA
gaaattctcaaatgaacagg

SEQ ID NO: 36102 - RNA, 20 nt, synthetic construct
  source 1..20: mol_type = other RNA
gaaattctcattagttatct

SEQ ID NO: 36103 - RNA, 20 nt, synthetic construct
  source 1..20: mol_type = other RNA
gaaattcttgggtgaataac

SEQ ID NO: 36104 - RNA, 20 nt, synthetic construct
  source 1..20: mol_type = other RNA
gaaattgaccattccacgct

SEQ ID NO: 36105 - RNA, 20 nt, synthetic construct
  source 1..20: mol_type = other RNA
gaaattgacttcactagatc

SEQ ID NO: 36106 - RNA, 20 nt, synthetic construct
  source 1..20: mol_type = other RNA
gaaattggaacctttgtcca

SEQ ID NO: 36107 - RNA, 20 nt, synthetic construct
  source 1..20: mol_type = other RNA
gaaattggacgggtggtagg

SEQ ID NO: 36108 - RNA, 20 nt, synthetic construct
  source 1..20: mol_type = other RNA
gaaattgtcagaaaagatca

SEQ ID NO: 36109 - RNA, 20 nt, synthetic construct
  source 1..20: mol_type = other RNA
gaaatttaaagacgttcaga

SEQ ID NO: 36110 - RNA, 20 nt, synthetic construct
  source 1..20: mol_type = other RNA
gaaatttaaggaccaggtat

SEQ ID NO: 36111 - RNA, 20 nt, synthetic construct
  source 1..20: mol_type = other RNA
gaaatttgaggccctattca

SEQ ID NO: 36112 - RNA, 20 nt, synthetic construct
  source 1..20: mol_type = other RNA
gaaattttcaagggtgtttt

SEQ ID NO: 36113 - RNA, 20 nt, synthetic construct
  source 1..20: mol_type = other RNA
gaacaaaacaagaagaaaaa

SEQ ID NO: 36114 - RNA, 20 nt, synthetic construct
  source 1..20: mol_type = other RNA
gaacaaaatgtggtatatat

SEQ ID NO: 36115 - RNA, 20 nt, synthetic construct
  source 1..20: mol_type = other RNA
gaacaaaatttttgcaaacc

SEQ ID NO: 36116 - RNA, 20 nt, synthetic construct
  source 1..20: mol_type = other RNA
gaacaaactcaagttccggt

SEQ ID NO: 36117 - RNA, 20 nt, synthetic construct
  source 1..20: mol_type = other RNA
gaacaaactgcgtggtttat

SEQ ID NO: 36118 - RNA, 20 nt, synthetic construct
  source 1..20: mol_type = other RNA
gaacaaaggcaggagcagtg

SEQ ID NO: 36119 - RNA, 20 nt, synthetic construct
  source 1..20: mol_type = other RNA
gaacaaataacaccatagct

SEQ ID NO: 36120 - RNA, 20 nt, synthetic construct
  source 1..20: mol_type = other RNA
gaacaaatttatgttcatga

SEQ ID NO: 36121 - RNA, 20 nt, synthetic construct
  source 1..20: mol_type = other RNA
gaacaacatggtagaccata

SEQ ID NO: 36122 - RNA, 20 nt, synthetic construct
  source 1..20: mol_type = other RNA
gaacaaccttatctatttaa

SEQ ID NO: 36123 - RNA, 20 nt, synthetic construct
  source 1..20: mol_type = other RNA
gaacaacgctgtggctaaca

SEQ ID NO: 36124 - RNA, 20 nt, synthetic construct
  source 1..20: mol_type = other RNA
gaacaagagcgtcgtacctt

SEQ ID NO: 36125 - RNA, 20 nt, synthetic construct
  source 1..20: mol_type = other RNA
gaacaagttacaaacatatg

SEQ ID NO: 36126 - RNA, 20 nt, synthetic construct
  source 1..20: mol_type = other RNA
gaacaatattccattttatg

SEQ ID NO: 36127 - RNA, 20 nt, synthetic construct
  source 1..20: mol_type = other RNA
gaacaatcaaaccatccttt

SEQ ID NO: 36128 - RNA, 20 nt, synthetic construct
  source 1..20: mol_type = other RNA
gaacaatccttctaatcagt

SEQ ID NO: 36129 - RNA, 20 nt, synthetic construct
  source 1..20: mol_type = other RNA
gaacaatggaatagaaggga

SEQ ID NO: 36130 - RNA, 20 nt, synthetic construct
  source 1..20: mol_type = other RNA
gaacaattttctctcatgtt

SEQ ID NO: 36131 - RNA, 20 nt, synthetic construct
  source 1..20: mol_type = other RNA
gaacaattttgaatgtgttg

SEQ ID NO: 36132 - RNA, 20 nt, synthetic construct
  source 1..20: mol_type = other RNA
gaacacacaatttgaggtag

SEQ ID NO: 36133 - RNA, 20 nt, synthetic construct
  source 1..20: mol_type = other RNA
gaacacacacctattcatag

SEQ ID NO: 36134 - RNA, 20 nt, synthetic construct
  source 1..20: mol_type = other RNA
gaacacacattagcctagac

SEQ ID NO: 36135 - RNA, 20 nt, synthetic construct
  source 1..20: mol_type = other RNA
gaacacactgctcttctatt

SEQ ID NO: 36136 - RNA, 20 nt, synthetic construct
  source 1..20: mol_type = other RNA
gaacacagtgttgagaaagc

SEQ ID NO: 36137 - RNA, 20 nt, synthetic construct
  source 1..20: mol_type = other RNA
gaacaccttgaacatgaacg

SEQ ID NO: 36138 - RNA, 20 nt, synthetic construct
  source 1..20: mol_type = other RNA
gaacactaaaggggatttca

SEQ ID NO: 36139 - RNA, 20 nt, synthetic construct
  source 1..20: mol_type = other RNA
gaacactaagaagatggttg

SEQ ID NO: 36140 - RNA, 20 nt, synthetic construct
  source 1..20: mol_type = other RNA
gaacactataagccaatatc

SEQ ID NO: 36141 - RNA, 20 nt, synthetic construct
  source 1..20: mol_type = other RNA
gaacactctgcaattttaaa

SEQ ID NO: 36142 - RNA, 20 nt, synthetic construct
  source 1..20: mol_type = other RNA
gaacacttaacatgagatct

SEQ ID NO: 36143 - RNA, 20 nt, synthetic construct
  source 1..20: mol_type = other RNA
gaacagaataaaaagtgact

SEQ ID NO: 36144 - RNA, 20 nt, synthetic construct
  source 1..20: mol_type = other RNA
gaacagacagacatgcatgc

SEQ ID NO: 36145 - RNA, 20 nt, synthetic construct
  source 1..20: mol_type = other RNA
gaacagattcacgcacaggg

SEQ ID NO: 36146 - RNA, 20 nt, synthetic construct
  source 1..20: mol_type = other RNA
gaacagcaggggaaggcttc

SEQ ID NO: 36147 - RNA, 20 nt, synthetic construct
  source 1..20: mol_type = other RNA
gaacagcattatcttaataa

SEQ ID NO: 36148 - RNA, 20 nt, synthetic construct
  source 1..20: mol_type = other RNA
gaacagcccctagcatgcag

SEQ ID NO: 36149 - RNA, 20 nt, synthetic construct
  source 1..20: mol_type = other RNA
gaacagcctaaagtccacag

SEQ ID NO: 36150 - RNA, 20 nt, synthetic construct
  source 1..20: mol_type = other RNA
gaacaggaagggagagatgc

SEQ ID NO: 36151 - RNA, 20 nt, synthetic construct
  source 1..20: mol_type = other RNA
gaacaggacttttggtacac

SEQ ID NO: 36152 - RNA, 20 nt, synthetic construct
  source 1..20: mol_type = other RNA
gaacaggagttaccataaaa

SEQ ID NO: 36153 - RNA, 20 nt, synthetic construct
  source 1..20: mol_type = other RNA
gaacaggcaaccttgggaga

SEQ ID NO: 36154 - RNA, 20 nt, synthetic construct
  source 1..20: mol_type = other RNA
gaacaggccctttgttagtg

SEQ ID NO: 36155 - RNA, 20 nt, synthetic construct
  source 1..20: mol_type = other RNA
gaacaggctcaatacctgaa

SEQ ID NO: 36156 - RNA, 20 nt, synthetic construct
  source 1..20: mol_type = other RNA
gaacaggttcttcatcagtc

SEQ ID NO: 36157 - RNA, 20 nt, synthetic construct
  source 1..20: mol_type = other RNA
gaacagtaaagtcactgtgg

SEQ ID NO: 36158 - RNA, 20 nt, synthetic construct
  source 1..20: mol_type = other RNA
gaacagtgtttacacacctg

SEQ ID NO: 36159 - RNA, 20 nt, synthetic construct
  source 1..20: mol_type = other RNA
gaacagtttagcaatccaag

SEQ ID NO: 36160 - RNA, 20 nt, synthetic construct
  source 1..20: mol_type = other RNA
gaacataatctttggtgctg

SEQ ID NO: 36161 - RNA, 20 nt, synthetic construct
  source 1..20: mol_type = other RNA
gaacatataatccaactgca

SEQ ID NO: 36162 - RNA, 20 nt, synthetic construct
  source 1..20: mol_type = other RNA
gaacatcacccagctcgacc

SEQ ID NO: 36163 - RNA, 20 nt, synthetic construct
  source 1..20: mol_type = other RNA
gaacatctggcagcaggggc

SEQ ID NO: 36164 - RNA, 20 nt, synthetic construct
  source 1..20: mol_type = other RNA
gaacatgaacgagaacaaaa

SEQ ID NO: 36165 - RNA, 20 nt, synthetic construct
  source 1..20: mol_type = other RNA
gaacatgacatgtatttttt

SEQ ID NO: 36166 - RNA, 20 nt, synthetic construct
  source 1..20: mol_type = other RNA
gaacatgattgggtcaacaa

SEQ ID NO: 36167 - RNA, 20 nt, synthetic construct
  source 1..20: mol_type = other RNA
gaacatgggaatgcatatat

SEQ ID NO: 36168 - RNA, 20 nt, synthetic construct
  source 1..20: mol_type = other RNA
gaacatggtttgatcccact

SEQ ID NO: 36169 - RNA, 20 nt, synthetic construct
  source 1..20: mol_type = other RNA
gaacatgtatgtttctcatt

SEQ ID NO: 36170 - RNA, 20 nt, synthetic construct
  source 1..20: mol_type = other RNA
gaacattctgtagaagtaaa

SEQ ID NO: 36171 - RNA, 20 nt, synthetic construct
  source 1..20: mol_type = other RNA
gaacattggtttgaaatgat

SEQ ID NO: 36172 - RNA, 20 nt, synthetic construct
  source 1..20: mol_type = other RNA
gaacatttatacagttggaa

SEQ ID NO: 36173 - RNA, 20 nt, synthetic construct
  source 1..20: mol_type = other RNA
gaacattttagctggggcag

SEQ ID NO: 36174 - RNA, 20 nt, synthetic construct
  source 1..20: mol_type = other RNA
gaacattttcattttaactg

SEQ ID NO: 36175 - RNA, 20 nt, synthetic construct
  source 1..20: mol_type = other RNA
gaacattttgagttattgca

SEQ ID NO: 36176 - RNA, 20 nt, synthetic construct
  source 1..20: mol_type = other RNA
gaaccaaaaaccacatttca

SEQ ID NO: 36177 - RNA, 20 nt, synthetic construct
  source 1..20: mol_type = other RNA
gaaccaaacttggtttattt

SEQ ID NO: 36178 - RNA, 20 nt, synthetic construct
  source 1..20: mol_type = other RNA
gaaccaattaccataaagtc

SEQ ID NO: 36179 - RNA, 20 nt, synthetic construct
  source 1..20: mol_type = other RNA
gaaccacactgacaggacag

SEQ ID NO: 36180 - RNA, 20 nt, synthetic construct
  source 1..20: mol_type = other RNA
gaaccacctgggggagactg

SEQ ID NO: 36181 - RNA, 20 nt, synthetic construct
  source 1..20: mol_type = other RNA
gaaccacgcatctggtctat

SEQ ID NO: 36182 - RNA, 20 nt, synthetic construct
  source 1..20: mol_type = other RNA
gaaccactgagcacaatgcc

SEQ ID NO: 36183 - RNA, 20 nt, synthetic construct
  source 1..20: mol_type = other RNA
gaaccactgtaggccccgat

SEQ ID NO: 36184 - RNA, 20 nt, synthetic construct
  source 1..20: mol_type = other RNA
gaaccatacagtgccttcag

SEQ ID NO: 36185 - RNA, 20 nt, synthetic construct
  source 1..20: mol_type = other RNA
gaaccatattagagtgaaaa

SEQ ID NO: 36186 - RNA, 20 nt, synthetic construct
  source 1..20: mol_type = other RNA
gaaccatgtaacaggtttaa

SEQ ID NO: 36187 - RNA, 20 nt, synthetic construct
  source 1..20: mol_type = other RNA
gaaccattgtaaaccatatg

SEQ ID NO: 36188 - RNA, 20 nt, synthetic construct
  source 1..20: mol_type = other RNA
gaacccaccaggaggcggag

SEQ ID NO: 36189 - RNA, 20 nt, synthetic construct
  source 1..20: mol_type = other RNA
gaacccactgagcatttata

SEQ ID NO: 36190 - RNA, 20 nt, synthetic construct
  source 1..20: mol_type = other RNA
gaacccaggaacagattcac

SEQ ID NO: 36191 - RNA, 20 nt, synthetic construct
  source 1..20: mol_type = other RNA
gaacccaggaggcaaaggtt

SEQ ID NO: 36192 - RNA, 20 nt, synthetic construct
  source 1..20: mol_type = other RNA
gaacccagtgtctgctacag

SEQ ID NO: 36193 - RNA, 20 nt, synthetic construct
  source 1..20: mol_type = other RNA
gaaccccagaaggttaacta

SEQ ID NO: 36194 - RNA, 20 nt, synthetic construct
  source 1..20: mol_type = other RNA
gaacccgaggtgcacaaggg

SEQ ID NO: 36195 - RNA, 20 nt, synthetic construct
  source 1..20: mol_type = other RNA
gaaccctttgttatctgaac

SEQ ID NO: 36196 - RNA, 20 nt, synthetic construct
  source 1..20: mol_type = other RNA
gaaccgactgaaaggaaatg

SEQ ID NO: 36197 - RNA, 20 nt, synthetic construct
  source 1..20: mol_type = other RNA
gaaccggaacttgagtttgt

SEQ ID NO: 36198 - RNA, 20 nt, synthetic construct
  source 1..20: mol_type = other RNA
gaaccgtaacttcttttctt

SEQ ID NO: 36199 - RNA, 20 nt, synthetic construct
  source 1..20: mol_type = other RNA
gaacctctggaaaggacttg

SEQ ID NO: 36200 - RNA, 20 nt, synthetic construct
  source 1..20: mol_type = other RNA
gaacctgaaaaacggaggtt

SEQ ID NO: 36201 - RNA, 20 nt, synthetic construct
  source 1..20: mol_type = other RNA
gaacctgcatggtgtaaaat

SEQ ID NO: 36202 - RNA, 20 nt, synthetic construct
  source 1..20: mol_type = other RNA
gaacctgctttctactagta

SEQ ID NO: 36203 - RNA, 20 nt, synthetic construct
  source 1..20: mol_type = other RNA
gaacctgttcatttgagaat

SEQ ID NO: 36204 - RNA, 20 nt, synthetic construct
  source 1..20: mol_type = other RNA
gaaccttagaaatttaagga

SEQ ID NO: 36205 - RNA, 20 nt, synthetic construct
  source 1..20: mol_type = other RNA
gaaccttcaccaaagattta

SEQ ID NO: 36206 - RNA, 20 nt, synthetic construct
  source 1..20: mol_type = other RNA
gaaccttcatactattttct

SEQ ID NO: 36207 - RNA, 20 nt, synthetic construct
  source 1..20: mol_type = other RNA
gaaccttcctcttcctcatc

SEQ ID NO: 36208 - RNA, 20 nt, synthetic construct
  source 1..20: mol_type = other RNA
gaaccttgaagtacttcagc

SEQ ID NO: 36209 - RNA, 20 nt, synthetic construct
  source 1..20: mol_type = other RNA
gaacctttgtccactgtcag

SEQ ID NO: 36210 - RNA, 20 nt, synthetic construct
  source 1..20: mol_type = other RNA
gaacgaatgaaaacacaaca

SEQ ID NO: 36211 - RNA, 20 nt, synthetic construct
  source 1..20: mol_type = other RNA
gaacgagaacaaaacaagaa

SEQ ID NO: 36212 - RNA, 20 nt, synthetic construct
  source 1..20: mol_type = other RNA
gaacgatggtttctgacacc

SEQ ID NO: 36213 - RNA, 20 nt, synthetic construct
  source 1..20: mol_type = other RNA
gaacgctaaattaaaggctg

SEQ ID NO: 36214 - RNA, 20 nt, synthetic construct
  source 1..20: mol_type = other RNA
gaacggcttaacacctttgt

SEQ ID NO: 36215 - RNA, 20 nt, synthetic construct
  source 1..20: mol_type = other RNA
gaacgtctttaaatttcaaa

SEQ ID NO: 36216 - RNA, 20 nt, synthetic construct
  source 1..20: mol_type = other RNA
gaactaagaccccagtagaa

SEQ ID NO: 36217 - RNA, 20 nt, synthetic construct
  source 1..20: mol_type = other RNA
gaactaaggaaagctcagga

SEQ ID NO: 36218 - RNA, 20 nt, synthetic construct
  source 1..20: mol_type = other RNA
gaactaagtgtgaagattaa

SEQ ID NO: 36219 - RNA, 20 nt, synthetic construct
  source 1..20: mol_type = other RNA
gaactaattgataaaactga

SEQ ID NO: 36220 - RNA, 20 nt, synthetic construct
  source 1..20: mol_type = other RNA
gaactaatttcatacaagtt

SEQ ID NO: 36221 - RNA, 20 nt, synthetic construct
  source 1..20: mol_type = other RNA
gaactacacagacatgaaca

SEQ ID NO: 36222 - RNA, 20 nt, synthetic construct
  source 1..20: mol_type = other RNA
gaactacacattccagacca

SEQ ID NO: 36223 - RNA, 20 nt, synthetic construct
  source 1..20: mol_type = other RNA
gaactacagtgtttagggac

SEQ ID NO: 36224 - RNA, 20 nt, synthetic construct
  source 1..20: mol_type = other RNA
gaactactcaaagaaaataa

SEQ ID NO: 36225 - RNA, 20 nt, synthetic construct
  source 1..20: mol_type = other RNA
gaactagaactgtgttacat

SEQ ID NO: 36226 - RNA, 20 nt, synthetic construct
  source 1..20: mol_type = other RNA
gaactagaatactccaccag

SEQ ID NO: 36227 - RNA, 20 nt, synthetic construct
  source 1..20: mol_type = other RNA
gaactattagagcttttatt

SEQ ID NO: 36228 - RNA, 20 nt, synthetic construct
  source 1..20: mol_type = other RNA
gaactcaaaagtgaatcact

SEQ ID NO: 36229 - RNA, 20 nt, synthetic construct
  source 1..20: mol_type = other RNA
gaactcactggccagcatta

SEQ ID NO: 36230 - RNA, 20 nt, synthetic construct
  source 1..20: mol_type = other RNA
gaactcatattagtctgtag

SEQ ID NO: 36231 - RNA, 20 nt, synthetic construct
  source 1..20: mol_type = other RNA
gaactcatttctgcttgaat

SEQ ID NO: 36232 - RNA, 20 nt, synthetic construct
  source 1..20: mol_type = other RNA
gaactccaacaattcaacaa

SEQ ID NO: 36233 - RNA, 20 nt, synthetic construct
  source 1..20: mol_type = other RNA
gaactccacctcagaaacaa

SEQ ID NO: 36234 - RNA, 20 nt, synthetic construct
  source 1..20: mol_type = other RNA
gaactcccagaactcgaagc

SEQ ID NO: 36235 - RNA, 20 nt, synthetic construct
  source 1..20: mol_type = other RNA
gaactcctatagttaagtct

SEQ ID NO: 36236 - RNA, 20 nt, synthetic construct
  source 1..20: mol_type = other RNA
gaactcctggtctcccagca

SEQ ID NO: 36237 - RNA, 20 nt, synthetic construct
  source 1..20: mol_type = other RNA
gaactcctgtatgccgctgg

SEQ ID NO: 36238 - RNA, 20 nt, synthetic construct
  source 1..20: mol_type = other RNA
gaactcctttcttaccctca

SEQ ID NO: 36239 - RNA, 20 nt, synthetic construct
  source 1..20: mol_type = other RNA
gaactcgaagccttcccctg

SEQ ID NO: 36240 - RNA, 20 nt, synthetic construct
  source 1..20: mol_type = other RNA
gaactcgtggcctcaagcag

SEQ ID NO: 36241 - RNA, 20 nt, synthetic construct
  source 1..20: mol_type = other RNA
gaactctattttcctaaaac

SEQ ID NO: 36242 - RNA, 20 nt, synthetic construct
  source 1..20: mol_type = other RNA
gaactctcgacctcgtgatc

SEQ ID NO: 36243 - RNA, 20 nt, synthetic construct
  source 1..20: mol_type = other RNA
gaactctgtcatggtgtgtc

SEQ ID NO: 36244 - RNA, 20 nt, synthetic construct
  source 1..20: mol_type = other RNA
gaactctgtggagtcctgtc

SEQ ID NO: 36245 - RNA, 20 nt, synthetic construct
  source 1..20: mol_type = other RNA
gaactcttctccaaggaaag

SEQ ID NO: 36246 - RNA, 20 nt, synthetic construct
  source 1..20: mol_type = other RNA
gaactcttgcggtcttttag

SEQ ID NO: 36247 - RNA, 20 nt, synthetic construct
  source 1..20: mol_type = other RNA
gaactcttgtagtatttttg

SEQ ID NO: 36248 - RNA, 20 nt, synthetic construct
  source 1..20: mol_type = other RNA
gaactgaaagcagggactcc

SEQ ID NO: 36249 - RNA, 20 nt, synthetic construct
  source 1..20: mol_type = other RNA
gaactgactgaaggattcct

SEQ ID NO: 36250 - RNA, 20 nt, synthetic construct
  source 1..20: mol_type = other RNA
gaactgcctggacccgggag

SEQ ID NO: 36251 - RNA, 20 nt, synthetic construct
  source 1..20: mol_type = other RNA
gaactgctaatggtccttgc

SEQ ID NO: 36252 - RNA, 20 nt, synthetic construct
  source 1..20: mol_type = other RNA
gaactgctgacagattaaat

SEQ ID NO: 36253 - RNA, 20 nt, synthetic construct
  source 1..20: mol_type = other RNA
gaactgctggtctggaatgt

SEQ ID NO: 36254 - RNA, 20 nt, synthetic construct
  source 1..20: mol_type = other RNA
gaactgggacttctagcctc

SEQ ID NO: 36255 - RNA, 20 nt, synthetic construct
  source 1..20: mol_type = other RNA
gaactggggcttgaacccga

SEQ ID NO: 36256 - RNA, 20 nt, synthetic construct
  source 1..20: mol_type = other RNA
gaactgggtgtagggggaaa

SEQ ID NO: 36257 - RNA, 20 nt, synthetic construct
  source 1..20: mol_type = other RNA
gaactgtcacaattcacaga

SEQ ID NO: 36258 - RNA, 20 nt, synthetic construct
  source 1..20: mol_type = other RNA
gaactgtcactgacacaggc

SEQ ID NO: 36259 - RNA, 20 nt, synthetic construct
  source 1..20: mol_type = other RNA
gaactgtgttacattgcctt

SEQ ID NO: 36260 - RNA, 20 nt, synthetic construct
  source 1..20: mol_type = other RNA
gaactgttacttgactattt

SEQ ID NO: 36261 - RNA, 20 nt, synthetic construct
  source 1..20: mol_type = other RNA
gaacttaaaggtttggagtt

SEQ ID NO: 36262 - RNA, 20 nt, synthetic construct
  source 1..20: mol_type = other RNA
gaacttacagtaagatcctg

SEQ ID NO: 36263 - RNA, 20 nt, synthetic construct
  source 1..20: mol_type = other RNA
gaacttatataaatgctcag

SEQ ID NO: 36264 - RNA, 20 nt, synthetic construct
  source 1..20: mol_type = other RNA
gaacttatgcatcttgcaaa

SEQ ID NO: 36265 - RNA, 20 nt, synthetic construct
  source 1..20: mol_type = other RNA
gaacttcagtatatattttc

SEQ ID NO: 36266 - RNA, 20 nt, synthetic construct
  source 1..20: mol_type = other RNA
gaacttcttcaaaagacatc

SEQ ID NO: 36267 - RNA, 20 nt, synthetic construct
  source 1..20: mol_type = other RNA
gaacttgacaagtatattac

SEQ ID NO: 36268 - RNA, 20 nt, synthetic construct
  source 1..20: mol_type = other RNA
gaacttgagtttgttctgtc

SEQ ID NO: 36269 - RNA, 20 nt, synthetic construct
  source 1..20: mol_type = other RNA
gaacttgcacataatataaa

SEQ ID NO: 36270 - RNA, 20 nt, synthetic construct
  source 1..20: mol_type = other RNA
gaacttgtcacaaaatgtgg

SEQ ID NO: 36271 - RNA, 20 nt, synthetic construct
  source 1..20: mol_type = other RNA
gaacttgtctcggatttaag

SEQ ID NO: 36272 - RNA, 20 nt, synthetic construct
  source 1..20: mol_type = other RNA
gaacttgtctttgtctattc

SEQ ID NO: 36273 - RNA, 20 nt, synthetic construct
  source 1..20: mol_type = other RNA
gaactttcaacctaacatgt

SEQ ID NO: 36274 - RNA, 20 nt, synthetic construct
  source 1..20: mol_type = other RNA
gaactttccagaagtaactc

SEQ ID NO: 36275 - RNA, 20 nt, synthetic construct
  source 1..20: mol_type = other RNA
gaactttcgaagtgggaagc

SEQ ID NO: 36276 - RNA, 20 nt, synthetic construct
  source 1..20: mol_type = other RNA
gaagaaaaaataaaggcttt

SEQ ID NO: 36277 - RNA, 20 nt, synthetic construct
  source 1..20: mol_type = other RNA
gaagaaaaagcaacttgaag

SEQ ID NO: 36278 - RNA, 20 nt, synthetic construct
  source 1..20: mol_type = other RNA
gaagaaaacactccagaatg

SEQ ID NO: 36279 - RNA, 20 nt, synthetic construct
  source 1..20: mol_type = other RNA
gaagaaaataaaattctgac

SEQ ID NO: 36280 - RNA, 20 nt, synthetic construct
  source 1..20: mol_type = other RNA
gaagaaaatccaagaagaca

SEQ ID NO: 36281 - RNA, 20 nt, synthetic construct
  source 1..20: mol_type = other RNA
gaagaaaccaagagcataga

SEQ ID NO: 36282 - RNA, 20 nt, synthetic construct
  source 1..20: mol_type = other RNA
gaagaaacctttctcaaagc

SEQ ID NO: 36283 - RNA, 20 nt, synthetic construct
  source 1..20: mol_type = other RNA
gaagaaagtaggaattaaac

SEQ ID NO: 36284 - RNA, 20 nt, synthetic construct
  source 1..20: mol_type = other RNA
gaagaaagttttgcagttgg

SEQ ID NO: 36285 - RNA, 20 nt, synthetic construct
  source 1..20: mol_type = other RNA
gaagaaataaacgacaccag

SEQ ID NO: 36286 - RNA, 20 nt, synthetic construct
  source 1..20: mol_type = other RNA
gaagaaatagaaaacttgag

SEQ ID NO: 36287 - RNA, 20 nt, synthetic construct
  source 1..20: mol_type = other RNA
gaagaaatcaaatgggaaat

SEQ ID NO: 36288 - RNA, 20 nt, synthetic construct
  source 1..20: mol_type = other RNA
gaagaaatgggtaaatttct

SEQ ID NO: 36289 - RNA, 20 nt, synthetic construct
  source 1..20: mol_type = other RNA
gaagaaatgttaacaattgg

SEQ ID NO: 36290 - RNA, 20 nt, synthetic construct
  source 1..20: mol_type = other RNA
gaagaaattacttctttctc

SEQ ID NO: 36291 - RNA, 20 nt, synthetic construct
  source 1..20: mol_type = other RNA
gaagaaattatctgtgggtt

SEQ ID NO: 36292 - RNA, 20 nt, synthetic construct
  source 1..20: mol_type = other RNA
gaagaaccgactgaaaggaa

SEQ ID NO: 36293 - RNA, 20 nt, synthetic construct
  source 1..20: mol_type = other RNA
gaagaacctgttcatttgag

SEQ ID NO: 36294 - RNA, 20 nt, synthetic construct
  source 1..20: mol_type = other RNA
gaagaagaattctataggta

SEQ ID NO: 36295 - RNA, 20 nt, synthetic construct
  source 1..20: mol_type = other RNA
gaagaagacttaggagaaaa

SEQ ID NO: 36296 - RNA, 20 nt, synthetic construct
  source 1..20: mol_type = other RNA
gaagaaggaatgtgcactct

SEQ ID NO: 36297 - RNA, 20 nt, synthetic construct
  source 1..20: mol_type = other RNA
gaagaagtttctagttatta

SEQ ID NO: 36298 - RNA, 20 nt, synthetic construct
  source 1..20: mol_type = other RNA
gaagaataactgtcctgaat

SEQ ID NO: 36299 - RNA, 20 nt, synthetic construct
  source 1..20: mol_type = other RNA
gaagaatcaggtctctttga

SEQ ID NO: 36300 - RNA, 20 nt, synthetic construct
  source 1..20: mol_type = other RNA
gaagaatgagaaacatacat

SEQ ID NO: 36301 - RNA, 20 nt, synthetic construct
  source 1..20: mol_type = other RNA
gaagaatgattatttgcggc

SEQ ID NO: 36302 - RNA, 20 nt, synthetic construct
  source 1..20: mol_type = other RNA
gaagaatgtgaaaaatttga

SEQ ID NO: 36303 - RNA, 20 nt, synthetic construct
  source 1..20: mol_type = other RNA
gaagaattaacactaatcct

SEQ ID NO: 36304 - RNA, 20 nt, synthetic construct
  source 1..20: mol_type = other RNA
gaagaattattgtctgcaag

SEQ ID NO: 36305 - RNA, 20 nt, synthetic construct
  source 1..20: mol_type = other RNA
gaagaattctataggtagta

SEQ ID NO: 36306 - RNA, 20 nt, synthetic construct
  source 1..20: mol_type = other RNA
gaagaattttaagcctagag

SEQ ID NO: 36307 - RNA, 20 nt, synthetic construct
  source 1..20: mol_type = other RNA
gaagacaatactgttatgac

SEQ ID NO: 36308 - RNA, 20 nt, synthetic construct
  source 1..20: mol_type = other RNA
gaagacacaaaatcagatat

SEQ ID NO: 36309 - RNA, 20 nt, synthetic construct
  source 1..20: mol_type = other RNA
gaagacatgataaatacgta

SEQ ID NO: 36310 - RNA, 20 nt, synthetic construct
  source 1..20: mol_type = other RNA
gaagacatgctgaggcccca

SEQ ID NO: 36311 - RNA, 20 nt, synthetic construct
  source 1..20: mol_type = other RNA
gaagacctcaaattctgagg

SEQ ID NO: 36312 - RNA, 20 nt, synthetic construct
  source 1..20: mol_type = other RNA
gaagacctgcagtctgcagg

SEQ ID NO: 36313 - RNA, 20 nt, synthetic construct
  source 1..20: mol_type = other RNA
gaagactaagcagaaatgac

SEQ ID NO: 36314 - RNA, 20 nt, synthetic construct
  source 1..20: mol_type = other RNA
gaagactatcacgattctga

SEQ ID NO: 36315 - RNA, 20 nt, synthetic construct
  source 1..20: mol_type = other RNA
gaagactatgagaaggatta

SEQ ID NO: 36316 - RNA, 20 nt, synthetic construct
  source 1..20: mol_type = other RNA
gaagactcagcagttttaaa

SEQ ID NO: 36317 - RNA, 20 nt, synthetic construct
  source 1..20: mol_type = other RNA
gaagactggaaaagtgttga

SEQ ID NO: 36318 - RNA, 20 nt, synthetic construct
  source 1..20: mol_type = other RNA
gaagactggatttgattggg

SEQ ID NO: 36319 - RNA, 20 nt, synthetic construct
  source 1..20: mol_type = other RNA
gaagacttaggagaaaagct

SEQ ID NO: 36320 - RNA, 20 nt, synthetic construct
  source 1..20: mol_type = other RNA
gaagactttatggtaattgg

SEQ ID NO: 36321 - RNA, 20 nt, synthetic construct
  source 1..20: mol_type = other RNA
gaagagaatggctggaatgg

SEQ ID NO: 36322 - RNA, 20 nt, synthetic construct
  source 1..20: mol_type = other RNA
gaagagaccacaggctctct

SEQ ID NO: 36323 - RNA, 20 nt, synthetic construct
  source 1..20: mol_type = other RNA
gaagagactatctcttcctc

SEQ ID NO: 36324 - RNA, 20 nt, synthetic construct
  source 1..20: mol_type = other RNA
gaagagagaaggctgccagc

SEQ ID NO: 36325 - RNA, 20 nt, synthetic construct
  source 1..20: mol_type = other RNA
gaagagagcattgcctttat

SEQ ID NO: 36326 - RNA, 20 nt, synthetic construct
  source 1..20: mol_type = other RNA
gaagagagcctgtggtctct

SEQ ID NO: 36327 - RNA, 20 nt, synthetic construct
  source 1..20: mol_type = other RNA
gaagagatagtctcttcctg

SEQ ID NO: 36328 - RNA, 20 nt, synthetic construct
  source 1..20: mol_type = other RNA
gaagagcactatgtaaatta

SEQ ID NO: 36329 - RNA, 20 nt, synthetic construct
  source 1..20: mol_type = other RNA
gaagagcagtgtgttctgcc

SEQ ID NO: 36330 - RNA, 20 nt, synthetic construct
  source 1..20: mol_type = other RNA
gaagagcgcttctatgtgac

SEQ ID NO: 36331 - RNA, 20 nt, synthetic construct
  source 1..20: mol_type = other RNA
gaagagctaagatgctattc

SEQ ID NO: 36332 - RNA, 20 nt, synthetic construct
  source 1..20: mol_type = other RNA
gaagagctgtaacagaggca

SEQ ID NO: 36333 - RNA, 20 nt, synthetic construct
  source 1..20: mol_type = other RNA
gaagaggaaggttcaagttt

SEQ ID NO: 36334 - RNA, 20 nt, synthetic construct
  source 1..20: mol_type = other RNA
gaagaggacgatttttccaa

SEQ ID NO: 36335 - RNA, 20 nt, synthetic construct
  source 1..20: mol_type = other RNA
gaagaggataaggggcaggg

SEQ ID NO: 36336 - RNA, 20 nt, synthetic construct
  source 1..20: mol_type = other RNA
gaagaggcagctaagcacca

SEQ ID NO: 36337 - RNA, 20 nt, synthetic construct
  source 1..20: mol_type = other RNA
gaagaggccacaaagtcccc

SEQ ID NO: 36338 - RNA, 20 nt, synthetic construct
  source 1..20: mol_type = other RNA
gaagaggctttctgtgtaat

SEQ ID NO: 36339 - RNA, 20 nt, synthetic construct
  source 1..20: mol_type = other RNA
gaagagggaacattttcatt

SEQ ID NO: 36340 - RNA, 20 nt, synthetic construct
  source 1..20: mol_type = other RNA
gaagagggagaagaaataaa

SEQ ID NO: 36341 - RNA, 20 nt, synthetic construct
  source 1..20: mol_type = other RNA
gaagagggggcataacatct

SEQ ID NO: 36342 - RNA, 20 nt, synthetic construct
  source 1..20: mol_type = other RNA
gaagagtaatggttggccga

SEQ ID NO: 36343 - RNA, 20 nt, synthetic construct
  source 1..20: mol_type = other RNA
gaagagtctatctttgggaa

SEQ ID NO: 36344 - RNA, 20 nt, synthetic construct
  source 1..20: mol_type = other RNA
gaagagtgaagctggaccct

SEQ ID NO: 36345 - RNA, 20 nt, synthetic construct
  source 1..20: mol_type = other RNA
gaagagttctgaaggctcag

SEQ ID NO: 36346 - RNA, 20 nt, synthetic construct
  source 1..20: mol_type = other RNA
gaagagtttatattctaagt

SEQ ID NO: 36347 - RNA, 20 nt, synthetic construct
  source 1..20: mol_type = other RNA
gaagataatgttagaattca

SEQ ID NO: 36348 - RNA, 20 nt, synthetic construct
  source 1..20: mol_type = other RNA
gaagatagtactgaccatct

SEQ ID NO: 36349 - RNA, 20 nt, synthetic construct
  source 1..20: mol_type = other RNA
gaagatgacatttgcttttc

SEQ ID NO: 36350 - RNA, 20 nt, synthetic construct
  source 1..20: mol_type = other RNA
gaagatgcagttgcttactc

SEQ ID NO: 36351 - RNA, 20 nt, synthetic construct
  source 1..20: mol_type = other RNA
gaagatgctccctctatggc

SEQ ID NO: 36352 - RNA, 20 nt, synthetic construct
  source 1..20: mol_type = other RNA
gaagatgctgaacttgtcac

SEQ ID NO: 36353 - RNA, 20 nt, synthetic construct
  source 1..20: mol_type = other RNA
gaagatggagttacgctgcc

SEQ ID NO: 36354 - RNA, 20 nt, synthetic construct
  source 1..20: mol_type = other RNA
gaagatggcaaacagactga

SEQ ID NO: 36355 - RNA, 20 nt, synthetic construct
  source 1..20: mol_type = other RNA
gaagatggcctccctcacta

SEQ ID NO: 36356 - RNA, 20 nt, synthetic construct
  source 1..20: mol_type = other RNA
gaagatgggacttcactagt

SEQ ID NO: 36357 - RNA, 20 nt, synthetic construct
  source 1..20: mol_type = other RNA
gaagatggttggaagtttct

SEQ ID NO: 36358 - RNA, 20 nt, synthetic construct
  source 1..20: mol_type = other RNA
gaagattaagcacatctgtc

SEQ ID NO: 36359 - RNA, 20 nt, synthetic construct
  source 1..20: mol_type = other RNA
gaagattagaaaattagctg

SEQ ID NO: 36360 - RNA, 20 nt, synthetic construct
  source 1..20: mol_type = other RNA
gaagattgagtcagtaatca

SEQ ID NO: 36361 - RNA, 20 nt, synthetic construct
  source 1..20: mol_type = other RNA
gaagattggctttagattta

SEQ ID NO: 36362 - RNA, 20 nt, synthetic construct
  source 1..20: mol_type = other RNA
gaagatttaatacagaagaa

SEQ ID NO: 36363 - RNA, 20 nt, synthetic construct
  source 1..20: mol_type = other RNA
gaagatttctactggggtct

SEQ ID NO: 36364 - RNA, 20 nt, synthetic construct
  source 1..20: mol_type = other RNA
gaagcaaaacatatgtcaga

SEQ ID NO: 36365 - RNA, 20 nt, synthetic construct
  source 1..20: mol_type = other RNA
gaagcaaaggattcggggga

SEQ ID NO: 36366 - RNA, 20 nt, synthetic construct
  source 1..20: mol_type = other RNA
gaagcacaaccactgatgga

SEQ ID NO: 36367 - RNA, 20 nt, synthetic construct
  source 1..20: mol_type = other RNA
gaagcacaccaaggtttctc

SEQ ID NO: 36368 - RNA, 20 nt, synthetic construct
  source 1..20: mol_type = other RNA
gaagcacagtctctgcagag

SEQ ID NO: 36369 - RNA, 20 nt, synthetic construct
  source 1..20: mol_type = other RNA
gaagcacattccttccgacc

SEQ ID NO: 36370 - RNA, 20 nt, synthetic construct
  source 1..20: mol_type = other RNA
gaagcaccaacccttgttgg

SEQ ID NO: 36371 - RNA, 20 nt, synthetic construct
  source 1..20: mol_type = other RNA
gaagcactttttaccaagtt

SEQ ID NO: 36372 - RNA, 20 nt, synthetic construct
  source 1..20: mol_type = other RNA
gaagcagaaaatcagtgtga

SEQ ID NO: 36373 - RNA, 20 nt, synthetic construct
  source 1..20: mol_type = other RNA
gaagcagaactaagacccca

SEQ ID NO: 36374 - RNA, 20 nt, synthetic construct
  source 1..20: mol_type = other RNA
gaagcagaatgtccatcagg

SEQ ID NO: 36375 - RNA, 20 nt, synthetic construct
  source 1..20: mol_type = other RNA
gaagcagagagagaagatga

SEQ ID NO: 36376 - RNA, 20 nt, synthetic construct
  source 1..20: mol_type = other RNA
gaagcagcaagggtggctgg

SEQ ID NO: 36377 - RNA, 20 nt, synthetic construct
  source 1..20: mol_type = other RNA
gaagcaggaactcatattag

SEQ ID NO: 36378 - RNA, 20 nt, synthetic construct
  source 1..20: mol_type = other RNA
gaagcaggccttcgaggcat

SEQ ID NO: 36379 - RNA, 20 nt, synthetic construct
  source 1..20: mol_type = other RNA
gaagcaggctttttacccgg

SEQ ID NO: 36380 - RNA, 20 nt, synthetic construct
  source 1..20: mol_type = other RNA
gaagcagggaaatggagggc

SEQ ID NO: 36381 - RNA, 20 nt, synthetic construct
  source 1..20: mol_type = other RNA
gaagcagttgatgcaatttg

SEQ ID NO: 36382 - RNA, 20 nt, synthetic construct
  source 1..20: mol_type = other RNA
gaagcatctgatacacttct

SEQ ID NO: 36383 - RNA, 20 nt, synthetic construct
  source 1..20: mol_type = other RNA
gaagcatgtggccaggagga

SEQ ID NO: 36384 - RNA, 20 nt, synthetic construct
  source 1..20: mol_type = other RNA
gaagcattaatgcaacctgc

SEQ ID NO: 36385 - RNA, 20 nt, synthetic construct
  source 1..20: mol_type = other RNA
gaagccacacagtacaaggc

SEQ ID NO: 36386 - RNA, 20 nt, synthetic construct
  source 1..20: mol_type = other RNA
gaagccactgcattcatcca

SEQ ID NO: 36387 - RNA, 20 nt, synthetic construct
  source 1..20: mol_type = other RNA
gaagccagcacctaacaatg

SEQ ID NO: 36388 - RNA, 20 nt, synthetic construct
  source 1..20: mol_type = other RNA
gaagccagtccttgtgatct

SEQ ID NO: 36389 - RNA, 20 nt, synthetic construct
  source 1..20: mol_type = other RNA
gaagcccagagaggctaggt

SEQ ID NO: 36390 - RNA, 20 nt, synthetic construct
  source 1..20: mol_type = other RNA
gaagcccgccgctcgcaggt

SEQ ID NO: 36391 - RNA, 20 nt, synthetic construct
  source 1..20: mol_type = other RNA
gaagccctctaagtcagcct

SEQ ID NO: 36392 - RNA, 20 nt, synthetic construct
  source 1..20: mol_type = other RNA
gaagccctgcagccagattt

SEQ ID NO: 36393 - RNA, 20 nt, synthetic construct
  source 1..20: mol_type = other RNA
gaagccttcccctgctgttc

SEQ ID NO: 36394 - RNA, 20 nt, synthetic construct
  source 1..20: mol_type = other RNA
gaagcgctcttcaagcattg

SEQ ID NO: 36395 - RNA, 20 nt, synthetic construct
  source 1..20: mol_type = other RNA
gaagcggcagggccgggggt

SEQ ID NO: 36396 - RNA, 20 nt, synthetic construct
  source 1..20: mol_type = other RNA
gaagcggggctgccactact

SEQ ID NO: 36397 - RNA, 20 nt, synthetic construct
  source 1..20: mol_type = other RNA
gaagctaaattttcatagga

SEQ ID NO: 36398 - RNA, 20 nt, synthetic construct
  source 1..20: mol_type = other RNA
gaagctaatcaagccgcaaa

SEQ ID NO: 36399 - RNA, 20 nt, synthetic construct
  source 1..20: mol_type = other RNA
gaagctacagactaatatga

SEQ ID NO: 36400 - RNA, 20 nt, synthetic construct
  source 1..20: mol_type = other RNA
gaagctacagtaatcaaaca

SEQ ID NO: 36401 - RNA, 20 nt, synthetic construct
  source 1..20: mol_type = other RNA
gaagctactattccaggatc

SEQ ID NO: 36402 - RNA, 20 nt, synthetic construct
  source 1..20: mol_type = other RNA
gaagctatagctgagaagta

SEQ ID NO: 36403 - RNA, 20 nt, synthetic construct
  source 1..20: mol_type = other RNA
gaagctatggagcactgtga

SEQ ID NO: 36404 - RNA, 20 nt, synthetic construct
  source 1..20: mol_type = other RNA
gaagctctagtgagctatga

SEQ ID NO: 36405 - RNA, 20 nt, synthetic construct
  source 1..20: mol_type = other RNA
gaagctgatcaaggaagctt

SEQ ID NO: 36406 - RNA, 20 nt, synthetic construct
  source 1..20: mol_type = other RNA
gaagctggacccttacctta

SEQ ID NO: 36407 - RNA, 20 nt, synthetic construct
  source 1..20: mol_type = other RNA
gaagctgggctagagccagg

SEQ ID NO: 36408 - RNA, 20 nt, synthetic construct
  source 1..20: mol_type = other RNA
gaagctgtccttctcgtgtg

SEQ ID NO: 36409 - RNA, 20 nt, synthetic construct
  source 1..20: mol_type = other RNA
gaagctgttttggtaaaatg

SEQ ID NO: 36410 - RNA, 20 nt, synthetic construct
  source 1..20: mol_type = other RNA
gaagcttaatttagatgaga

SEQ ID NO: 36411 - RNA, 20 nt, synthetic construct
  source 1..20: mol_type = other RNA
gaagcttataatttctgaga

SEQ ID NO: 36412 - RNA, 20 nt, synthetic construct
  source 1..20: mol_type = other RNA
gaagcttattaaaatgaacc

SEQ ID NO: 36413 - RNA, 20 nt, synthetic construct
  source 1..20: mol_type = other RNA
gaagcttcaaaccactatct

SEQ ID NO: 36414 - RNA, 20 nt, synthetic construct
  source 1..20: mol_type = other RNA
gaagcttcacttctctgctg

SEQ ID NO: 36415 - RNA, 20 nt, synthetic construct
  source 1..20: mol_type = other RNA
gaagcttcctaaagagagtg

SEQ ID NO: 36416 - RNA, 20 nt, synthetic construct
  source 1..20: mol_type = other RNA
gaagcttccttgatcagctt

SEQ ID NO: 36417 - RNA, 20 nt, synthetic construct
  source 1..20: mol_type = other RNA
gaagctttcagacttaacta

SEQ ID NO: 36418 - RNA, 20 nt, synthetic construct
  source 1..20: mol_type = other RNA
gaagcttttcatatacagat

SEQ ID NO: 36419 - RNA, 20 nt, synthetic construct
  source 1..20: mol_type = other RNA
gaagcttttctcctaagtct

SEQ ID NO: 36420 - RNA, 20 nt, synthetic construct
  source 1..20: mol_type = other RNA
gaaggaaaaaacacctaaag

SEQ ID NO: 36421 - RNA, 20 nt, synthetic construct
  source 1..20: mol_type = other RNA
gaaggaaaaaacgggttata

SEQ ID NO: 36422 - RNA, 20 nt, synthetic construct
  source 1..20: mol_type = other RNA
gaaggaaaagaacacagtgt

SEQ ID NO: 36423 - RNA, 20 nt, synthetic construct
  source 1..20: mol_type = other RNA
gaaggaaacactataaatca

SEQ ID NO: 36424 - RNA, 20 nt, synthetic construct
  source 1..20: mol_type = other RNA
gaaggaaaggagatactggc

SEQ ID NO: 36425 - RNA, 20 nt, synthetic construct
  source 1..20: mol_type = other RNA
gaaggaaataagaaggtttg

SEQ ID NO: 36426 - RNA, 20 nt, synthetic construct
  source 1..20: mol_type = other RNA
gaaggaacacacacctattc

SEQ ID NO: 36427 - RNA, 20 nt, synthetic construct
  source 1..20: mol_type = other RNA
gaaggaagcaccaacccttg

SEQ ID NO: 36428 - RNA, 20 nt, synthetic construct
  source 1..20: mol_type = other RNA
gaaggaaggattggaatgag

SEQ ID NO: 36429 - RNA, 20 nt, synthetic construct
  source 1..20: mol_type = other RNA
gaaggaatgtgcactctttt

SEQ ID NO: 36430 - RNA, 20 nt, synthetic construct
  source 1..20: mol_type = other RNA
gaaggaatgtgcttcctaaa

SEQ ID NO: 36431 - RNA, 20 nt, synthetic construct
  source 1..20: mol_type = other RNA
gaaggaattttaggacaagg

SEQ ID NO: 36432 - RNA, 20 nt, synthetic construct
  source 1..20: mol_type = other RNA
gaaggaattttcaggactca

SEQ ID NO: 36433 - RNA, 20 nt, synthetic construct
  source 1..20: mol_type = other RNA
gaaggacaaaaataatatga

SEQ ID NO: 36434 - RNA, 20 nt, synthetic construct
  source 1..20: mol_type = other RNA
gaaggacagcttccacccaa

SEQ ID NO: 36435 - RNA, 20 nt, synthetic construct
  source 1..20: mol_type = other RNA
gaaggactcacagcttacca

SEQ ID NO: 36436 - RNA, 20 nt, synthetic construct
  source 1..20: mol_type = other RNA
gaaggagaaaacaaaaagaa

SEQ ID NO: 36437 - RNA, 20 nt, synthetic construct
  source 1..20: mol_type = other RNA
gaaggagaaaccatttaccc

SEQ ID NO: 36438 - RNA, 20 nt, synthetic construct
  source 1..20: mol_type = other RNA
gaaggagaatcgcttaaacc

SEQ ID NO: 36439 - RNA, 20 nt, synthetic construct
  source 1..20: mol_type = other RNA
gaaggaggaaaataatttgc

SEQ ID NO: 36440 - RNA, 20 nt, synthetic construct
  source 1..20: mol_type = other RNA
gaaggagtccagtcctgcta

SEQ ID NO: 36441 - RNA, 20 nt, synthetic construct
  source 1..20: mol_type = other RNA
gaaggagtctgcccatccta

SEQ ID NO: 36442 - RNA, 20 nt, synthetic construct
  source 1..20: mol_type = other RNA
gaaggatatgttttctaaac

SEQ ID NO: 36443 - RNA, 20 nt, synthetic construct
  source 1..20: mol_type = other RNA
gaaggatggccagtcatgtg

SEQ ID NO: 36444 - RNA, 20 nt, synthetic construct
  source 1..20: mol_type = other RNA
gaaggattcctccctggaga

SEQ ID NO: 36445 - RNA, 20 nt, synthetic construct
  source 1..20: mol_type = other RNA
gaaggattgcctaacaccag

SEQ ID NO: 36446 - RNA, 20 nt, synthetic construct
  source 1..20: mol_type = other RNA
gaaggattggaatgagtcca

SEQ ID NO: 36447 - RNA, 20 nt, synthetic construct
  source 1..20: mol_type = other RNA
gaaggattgttcatgtctgt

SEQ ID NO: 36448 - RNA, 20 nt, synthetic construct
  source 1..20: mol_type = other RNA
gaaggcaatgtaacacagtt

SEQ ID NO: 36449 - RNA, 20 nt, synthetic construct
  source 1..20: mol_type = other RNA
gaaggcaatgtagggaatag

SEQ ID NO: 36450 - RNA, 20 nt, synthetic construct
  source 1..20: mol_type = other RNA
gaaggcactaacaaagggcc

SEQ ID NO: 36451 - RNA, 20 nt, synthetic construct
  source 1..20: mol_type = other RNA
gaaggcactgtatggttctt

SEQ ID NO: 36452 - RNA, 20 nt, synthetic construct
  source 1..20: mol_type = other RNA
gaaggcagaattatagaggg

SEQ ID NO: 36453 - RNA, 20 nt, synthetic construct
  source 1..20: mol_type = other RNA
gaaggcaggaggcctcagaa

SEQ ID NO: 36454 - RNA, 20 nt, synthetic construct
  source 1..20: mol_type = other RNA
gaaggcagggtaggaaggcg

SEQ ID NO: 36455 - RNA, 20 nt, synthetic construct
  source 1..20: mol_type = other RNA
gaaggcatagggccttctac

SEQ ID NO: 36456 - RNA, 20 nt, synthetic construct
  source 1..20: mol_type = other RNA
gaaggccagagggaatctag

SEQ ID NO: 36457 - RNA, 20 nt, synthetic construct
  source 1..20: mol_type = other RNA
gaaggccatttgattgccag

SEQ ID NO: 36458 - RNA, 20 nt, synthetic construct
  source 1..20: mol_type = other RNA
gaaggccctatgccttcagt

SEQ ID NO: 36459 - RNA, 20 nt, synthetic construct
  source 1..20: mol_type = other RNA
gaaggccctgattgagatta

SEQ ID NO: 36460 - RNA, 20 nt, synthetic construct
  source 1..20: mol_type = other RNA
gaaggccggggccgcgtcca

SEQ ID NO: 36461 - RNA, 20 nt, synthetic construct
  source 1..20: mol_type = other RNA
gaaggccgtccctattttct

SEQ ID NO: 36462 - RNA, 20 nt, synthetic construct
  source 1..20: mol_type = other RNA
gaaggcctgatagctgtgga

SEQ ID NO: 36463 - RNA, 20 nt, synthetic construct
  source 1..20: mol_type = other RNA
gaaggcctgcttcattccgc

SEQ ID NO: 36464 - RNA, 20 nt, synthetic construct
  source 1..20: mol_type = other RNA
gaaggccttccacggaatgc

SEQ ID NO: 36465 - RNA, 20 nt, synthetic construct
  source 1..20: mol_type = other RNA
gaaggccttctcctccaacc

SEQ ID NO: 36466 - RNA, 20 nt, synthetic construct
  source 1..20: mol_type = other RNA
gaaggcgaaatgtgaacaga

SEQ ID NO: 36467 - RNA, 20 nt, synthetic construct
  source 1..20: mol_type = other RNA
gaaggcggaagttgcagtga

SEQ ID NO: 36468 - RNA, 20 nt, synthetic construct
  source 1..20: mol_type = other RNA
gaaggcggtggggacagctc

SEQ ID NO: 36469 - RNA, 20 nt, synthetic construct
  source 1..20: mol_type = other RNA
gaaggcgtgtaaactgttgg

SEQ ID NO: 36470 - RNA, 20 nt, synthetic construct
  source 1..20: mol_type = other RNA
gaaggctaagcatgtaactt

SEQ ID NO: 36471 - RNA, 20 nt, synthetic construct
  source 1..20: mol_type = other RNA
gaaggctagcacagaggcaa

SEQ ID NO: 36472 - RNA, 20 nt, synthetic construct
  source 1..20: mol_type = other RNA
gaaggctcagcccctcatcc

SEQ ID NO: 36473 - RNA, 20 nt, synthetic construct
  source 1..20: mol_type = other RNA
gaaggctgcaagcactggta

SEQ ID NO: 36474 - RNA, 20 nt, synthetic construct
  source 1..20: mol_type = other RNA
gaaggctgccagcaccagat

SEQ ID NO: 36475 - RNA, 20 nt, synthetic construct
  source 1..20: mol_type = other RNA
gaaggcttcgagttctggga

SEQ ID NO: 36476 - RNA, 20 nt, synthetic construct
  source 1..20: mol_type = other RNA
gaaggctttgtgttggtgtt

SEQ ID NO: 36477 - RNA, 20 nt, synthetic construct
  source 1..20: mol_type = other RNA
gaagggaaaggatgaccttg

SEQ ID NO: 36478 - RNA, 20 nt, synthetic construct
  source 1..20: mol_type = other RNA
gaagggaacactaagaagat

SEQ ID NO: 36479 - RNA, 20 nt, synthetic construct
  source 1..20: mol_type = other RNA
gaagggaagtaaagatcaag

SEQ ID NO: 36480 - RNA, 20 nt, synthetic construct
  source 1..20: mol_type = other RNA
gaagggaattttactgatct

SEQ ID NO: 36481 - RNA, 20 nt, synthetic construct
  source 1..20: mol_type = other RNA
gaagggagaacccaggaaca

SEQ ID NO: 36482 - RNA, 20 nt, synthetic construct
  source 1..20: mol_type = other RNA
gaagggagagatgcctatga

SEQ ID NO: 36483 - RNA, 20 nt, synthetic construct
  source 1..20: mol_type = other RNA
gaagggagcccaagcacact

SEQ ID NO: 36484 - RNA, 20 nt, synthetic construct
  source 1..20: mol_type = other RNA
gaagggaggaaaaaacagtt

SEQ ID NO: 36485 - RNA, 20 nt, synthetic construct
  source 1..20: mol_type = other RNA
gaagggaggtaggcttagat

SEQ ID NO: 36486 - RNA, 20 nt, synthetic construct
  source 1..20: mol_type = other RNA
gaagggcttgatctagtaaa

SEQ ID NO: 36487 - RNA, 20 nt, synthetic construct
  source 1..20: mol_type = other RNA
gaagggtatatacaatatta

SEQ ID NO: 36488 - RNA, 20 nt, synthetic construct
  source 1..20: mol_type = other RNA
gaagggttttctgtagaata

SEQ ID NO: 36489 - RNA, 20 nt, synthetic construct
  source 1..20: mol_type = other RNA
gaaggtaagaatgtcaagct

SEQ ID NO: 36490 - RNA, 20 nt, synthetic construct
  source 1..20: mol_type = other RNA
gaaggtaggagggtgtgatc

SEQ ID NO: 36491 - RNA, 20 nt, synthetic construct
  source 1..20: mol_type = other RNA
gaaggtatcatcggaaatat

SEQ ID NO: 36492 - RNA, 20 nt, synthetic construct
  source 1..20: mol_type = other RNA
gaaggtcaaatggtaacagc

SEQ ID NO: 36493 - RNA, 20 nt, synthetic construct
  source 1..20: mol_type = other RNA
gaaggtcaatctaggaggtc

SEQ ID NO: 36494 - RNA, 20 nt, synthetic construct
  source 1..20: mol_type = other RNA
gaaggtgagggactgagcag

SEQ ID NO: 36495 - RNA, 20 nt, synthetic construct
  source 1..20: mol_type = other RNA
gaaggtgcccgcgaaggcgt

SEQ ID NO: 36496 - RNA, 20 nt, synthetic construct
  source 1..20: mol_type = other RNA
gaaggtgcctgccatagagg

SEQ ID NO: 36497 - RNA, 20 nt, synthetic construct
  source 1..20: mol_type = other RNA
gaaggttaactaatagccag

SEQ ID NO: 36498 - RNA, 20 nt, synthetic construct
  source 1..20: mol_type = other RNA
gaaggttcaagtttggctcc

SEQ ID NO: 36499 - RNA, 20 nt, synthetic construct
  source 1..20: mol_type = other RNA
gaaggttcatgaacataaat

SEQ ID NO: 36500 - RNA, 20 nt, synthetic construct
  source 1..20: mol_type = other RNA
gaaggtttgtagagcaagca

SEQ ID NO: 36501 - RNA, 20 nt, synthetic construct
  source 1..20: mol_type = other RNA
gaagtaaagatcaagctcgc

SEQ ID NO: 36502 - RNA, 20 nt, synthetic construct
  source 1..20: mol_type = other RNA
gaagtaaatcccggccaggt

SEQ ID NO: 36503 - RNA, 20 nt, synthetic construct
  source 1..20: mol_type = other RNA
gaagtaacattacaacagca

SEQ ID NO: 36504 - RNA, 20 nt, synthetic construct
  source 1..20: mol_type = other RNA
gaagtaactcttgagttagg

SEQ ID NO: 36505 - RNA, 20 nt, synthetic construct
  source 1..20: mol_type = other RNA
gaagtaaggattttctattc

SEQ ID NO: 36506 - RNA, 20 nt, synthetic construct
  source 1..20: mol_type = other RNA
gaagtaataaagcaagtatg

SEQ ID NO: 36507 - RNA, 20 nt, synthetic construct
  source 1..20: mol_type = other RNA
gaagtaattgggatctgata

SEQ ID NO: 36508 - RNA, 20 nt, synthetic construct
  source 1..20: mol_type = other RNA
gaagtaatttcttctgaaga

SEQ ID NO: 36509 - RNA, 20 nt, synthetic construct
  source 1..20: mol_type = other RNA
gaagtacaaacattacagaa

SEQ ID NO: 36510 - RNA, 20 nt, synthetic construct
  source 1..20: mol_type = other RNA
gaagtactactcattaaata

SEQ ID NO: 36511 - RNA, 20 nt, synthetic construct
  source 1..20: mol_type = other RNA
gaagtactgagtcaaaacca

SEQ ID NO: 36512 - RNA, 20 nt, synthetic construct
  source 1..20: mol_type = other RNA
gaagtacttcaaggttcaca

SEQ ID NO: 36513 - RNA, 20 nt, synthetic construct
  source 1..20: mol_type = other RNA
gaagtacttcagcgcttgaa

SEQ ID NO: 36514 - RNA, 20 nt, synthetic construct
  source 1..20: mol_type = other RNA
gaagtatagaaaggagacca

SEQ ID NO: 36515 - RNA, 20 nt, synthetic construct
  source 1..20: mol_type = other RNA
gaagtatcccagatggggat

SEQ ID NO: 36516 - RNA, 20 nt, synthetic construct
  source 1..20: mol_type = other RNA
gaagtatgagtcttccgtct

SEQ ID NO: 36517 - RNA, 20 nt, synthetic construct
  source 1..20: mol_type = other RNA
gaagtatgtaattacagggg

SEQ ID NO: 36518 - RNA, 20 nt, synthetic construct
  source 1..20: mol_type = other RNA
gaagtattgatttgaccatg

SEQ ID NO: 36519 - RNA, 20 nt, synthetic construct
  source 1..20: mol_type = other RNA
gaagtcaaagcctgtggagg

SEQ ID NO: 36520 - RNA, 20 nt, synthetic construct
  source 1..20: mol_type = other RNA
gaagtcaagatgaatctgca

SEQ ID NO: 36521 - RNA, 20 nt, synthetic construct
  source 1..20: mol_type = other RNA
gaagtcaatttcagatctct

SEQ ID NO: 36522 - RNA, 20 nt, synthetic construct
  source 1..20: mol_type = other RNA
gaagtcacattctagtgatg

SEQ ID NO: 36523 - RNA, 20 nt, synthetic construct
  source 1..20: mol_type = other RNA
gaagtcactttttattctgt

SEQ ID NO: 36524 - RNA, 20 nt, synthetic construct
  source 1..20: mol_type = other RNA
gaagtcagactaagacacta

SEQ ID NO: 36525 - RNA, 20 nt, synthetic construct
  source 1..20: mol_type = other RNA
gaagtcagagattttcccaa

SEQ ID NO: 36526 - RNA, 20 nt, synthetic construct
  source 1..20: mol_type = other RNA
gaagtcagcaactcttggcc

SEQ ID NO: 36527 - RNA, 20 nt, synthetic construct
  source 1..20: mol_type = other RNA
gaagtcagttacagcatttc

SEQ ID NO: 36528 - RNA, 20 nt, synthetic construct
  source 1..20: mol_type = other RNA
gaagtcatctggtcctgagc

SEQ ID NO: 36529 - RNA, 20 nt, synthetic construct
  source 1..20: mol_type = other RNA
gaagtccatgaaacttattt

SEQ ID NO: 36530 - RNA, 20 nt, synthetic construct
  source 1..20: mol_type = other RNA
gaagtcccagttcaaggtgt

SEQ ID NO: 36531 - RNA, 20 nt, synthetic construct
  source 1..20: mol_type = other RNA
gaagtcccatcttccatacg

SEQ ID NO: 36532 - RNA, 20 nt, synthetic construct
  source 1..20: mol_type = other RNA
gaagtcctcaatcatgtcaa

SEQ ID NO: 36533 - RNA, 20 nt, synthetic construct
  source 1..20: mol_type = other RNA
gaagtcctttcttggtctgc

SEQ ID NO: 36534 - RNA, 20 nt, synthetic construct
  source 1..20: mol_type = other RNA
gaagtctttggcccattttc

SEQ ID NO: 36535 - RNA, 20 nt, synthetic construct
  source 1..20: mol_type = other RNA
gaagtctttggtgatcctaa

SEQ ID NO: 36536 - RNA, 20 nt, synthetic construct
  source 1..20: mol_type = other RNA
gaagtcttttcctaccctga

SEQ ID NO: 36537 - RNA, 20 nt, synthetic construct
  source 1..20: mol_type = other RNA
gaagtgaaaaatgacctaaa

SEQ ID NO: 36538 - RNA, 20 nt, synthetic construct
  source 1..20: mol_type = other RNA
gaagtgaaactgctggatca

SEQ ID NO: 36539 - RNA, 20 nt, synthetic construct
  source 1..20: mol_type = other RNA
gaagtgaagcttcaaaccac

SEQ ID NO: 36540 - RNA, 20 nt, synthetic construct
  source 1..20: mol_type = other RNA
gaagtgaagtcaagatgaat

SEQ ID NO: 36541 - RNA, 20 nt, synthetic construct
  source 1..20: mol_type = other RNA
gaagtgaccctgagtccaga

SEQ ID NO: 36542 - RNA, 20 nt, synthetic construct
  source 1..20: mol_type = other RNA
gaagtgctgggctagggaag

SEQ ID NO: 36543 - RNA, 20 nt, synthetic construct
  source 1..20: mol_type = other RNA
gaagtggagtgcgagtgtga

SEQ ID NO: 36544 - RNA, 20 nt, synthetic construct
  source 1..20: mol_type = other RNA
gaagtggctagacggaaaaa

SEQ ID NO: 36545 - RNA, 20 nt, synthetic construct
  source 1..20: mol_type = other RNA
gaagtgggaagcaaaggatt

SEQ ID NO: 36546 - RNA, 20 nt, synthetic construct
  source 1..20: mol_type = other RNA
gaagtggtgcttgaactgct

SEQ ID NO: 36547 - RNA, 20 nt, synthetic construct
  source 1..20: mol_type = other RNA
gaagtgtaacatacacatca

SEQ ID NO: 36548 - RNA, 20 nt, synthetic construct
  source 1..20: mol_type = other RNA
gaagtgtaattttttacaag

SEQ ID NO: 36549 - RNA, 20 nt, synthetic construct
  source 1..20: mol_type = other RNA
gaagtgtatcagatgcttct

SEQ ID NO: 36550 - RNA, 20 nt, synthetic construct
  source 1..20: mol_type = other RNA
gaagtgttgagaggctttaa

SEQ ID NO: 36551 - RNA, 20 nt, synthetic construct
  source 1..20: mol_type = other RNA
gaagtgttttgatagttgca

SEQ ID NO: 36552 - RNA, 20 nt, synthetic construct
  source 1..20: mol_type = other RNA
gaagttaagggccatttcat

SEQ ID NO: 36553 - RNA, 20 nt, synthetic construct
  source 1..20: mol_type = other RNA
gaagttacggttccctgtag

SEQ ID NO: 36554 - RNA, 20 nt, synthetic construct
  source 1..20: mol_type = other RNA
gaagttatgtagctgggatg

SEQ ID NO: 36555 - RNA, 20 nt, synthetic construct
  source 1..20: mol_type = other RNA
gaagttatttaatctctctt

SEQ ID NO: 36556 - RNA, 20 nt, synthetic construct
  source 1..20: mol_type = other RNA
gaagttcaaggttataatca

SEQ ID NO: 36557 - RNA, 20 nt, synthetic construct
  source 1..20: mol_type = other RNA
gaagttctcaggggtaaagg

SEQ ID NO: 36558 - RNA, 20 nt, synthetic construct
  source 1..20: mol_type = other RNA
gaagttgagaaagagggaag

SEQ ID NO: 36559 - RNA, 20 nt, synthetic construct
  source 1..20: mol_type = other RNA
gaagttgcagtgagcccaga

SEQ ID NO: 36560 - RNA, 20 nt, synthetic construct
  source 1..20: mol_type = other RNA
gaagttggcccaacatgctc

SEQ ID NO: 36561 - RNA, 20 nt, synthetic construct
  source 1..20: mol_type = other RNA
gaagttgggcttaacatttg

SEQ ID NO: 36562 - RNA, 20 nt, synthetic construct
  source 1..20: mol_type = other RNA
gaagttgtggtgagccaaga

SEQ ID NO: 36563 - RNA, 20 nt, synthetic construct
  source 1..20: mol_type = other RNA
gaagtttatcagtctccaat

SEQ ID NO: 36564 - RNA, 20 nt, synthetic construct
  source 1..20: mol_type = other RNA
gaagtttatcgtatttatca

SEQ ID NO: 36565 - RNA, 20 nt, synthetic construct
  source 1..20: mol_type = other RNA
gaagtttcctgcacatgcac

SEQ ID NO: 36566 - RNA, 20 nt, synthetic construct
  source 1..20: mol_type = other RNA
gaagtttctggaagtttcct

SEQ ID NO: 36567 - RNA, 20 nt, synthetic construct
  source 1..20: mol_type = other RNA
gaagtttggaaccagcctgg

SEQ ID NO: 36568 - RNA, 20 nt, synthetic construct
  source 1..20: mol_type = other RNA
gaagttttccaggaaaagca

SEQ ID NO: 36569 - RNA, 20 nt, synthetic construct
  source 1..20: mol_type = other RNA
gaataaaaagtgacttctgg

SEQ ID NO: 36570 - RNA, 20 nt, synthetic construct
  source 1..20: mol_type = other RNA
gaataaaaggaatataaacg

SEQ ID NO: 36571 - RNA, 20 nt, synthetic construct
  source 1..20: mol_type = other RNA
gaataaaattcaccaaacac

SEQ ID NO: 36572 - RNA, 20 nt, synthetic construct
  source 1..20: mol_type = other RNA
gaataaaattctgatagctt

SEQ ID NO: 36573 - RNA, 20 nt, synthetic construct
  source 1..20: mol_type = other RNA
gaataaaccacgcagtttgt

SEQ ID NO: 36574 - RNA, 20 nt, synthetic construct
  source 1..20: mol_type = other RNA
gaataaactaacaaagaaca

SEQ ID NO: 36575 - RNA, 20 nt, synthetic construct
  source 1..20: mol_type = other RNA
gaataaagggtcagaatttt

SEQ ID NO: 36576 - RNA, 20 nt, synthetic construct
  source 1..20: mol_type = other RNA
gaataaatggtagcttgggc

SEQ ID NO: 36577 - RNA, 20 nt, synthetic construct
  source 1..20: mol_type = other RNA
gaataaccaatgtcagagat

SEQ ID NO: 36578 - RNA, 20 nt, synthetic construct
  source 1..20: mol_type = other RNA
gaataacccatatctttgct

SEQ ID NO: 36579 - RNA, 20 nt, synthetic construct
  source 1..20: mol_type = other RNA
gaataacctcataagaactc

SEQ ID NO: 36580 - RNA, 20 nt, synthetic construct
  source 1..20: mol_type = other RNA
gaataactgtcctgaattct

SEQ ID NO: 36581 - RNA, 20 nt, synthetic construct
  source 1..20: mol_type = other RNA
gaataagattttaggtcatt

SEQ ID NO: 36582 - RNA, 20 nt, synthetic construct
  source 1..20: mol_type = other RNA
gaataagctaatcccaaagt

SEQ ID NO: 36583 - RNA, 20 nt, synthetic construct
  source 1..20: mol_type = other RNA
gaataaggtctgtaagtcag

SEQ ID NO: 36584 - RNA, 20 nt, synthetic construct
  source 1..20: mol_type = other RNA
gaataatacacttttcaggt

SEQ ID NO: 36585 - RNA, 20 nt, synthetic construct
  source 1..20: mol_type = other RNA
gaataatggaactaagaaaa

SEQ ID NO: 36586 - RNA, 20 nt, synthetic construct
  source 1..20: mol_type = other RNA
gaataatgtctttttacact

SEQ ID NO: 36587 - RNA, 20 nt, synthetic construct
  source 1..20: mol_type = other RNA
gaataatttccaggtcatta

SEQ ID NO: 36588 - RNA, 20 nt, synthetic construct
  source 1..20: mol_type = other RNA
gaatacaaaaatgacacaac

SEQ ID NO: 36589 - RNA, 20 nt, synthetic construct
  source 1..20: mol_type = other RNA
gaatacaaaggtgttaagcc

SEQ ID NO: 36590 - RNA, 20 nt, synthetic construct
  source 1..20: mol_type = other RNA
gaataccaaattcacgagac

SEQ ID NO: 36591 - RNA, 20 nt, synthetic construct
  source 1..20: mol_type = other RNA
gaataccacttagtttgcaa

SEQ ID NO: 36592 - RNA, 20 nt, synthetic construct
  source 1..20: mol_type = other RNA
gaataccagagattgggaaa

SEQ ID NO: 36593 - RNA, 20 nt, synthetic construct
  source 1..20: mol_type = other RNA
gaatacccctccctacctgg

SEQ ID NO: 36594 - RNA, 20 nt, synthetic construct
  source 1..20: mol_type = other RNA
gaatacctatttagagggat

SEQ ID NO: 36595 - RNA, 20 nt, synthetic construct
  source 1..20: mol_type = other RNA
gaatactattcctattgttt

SEQ ID NO: 36596 - RNA, 20 nt, synthetic construct
  source 1..20: mol_type = other RNA
gaatactccaccagcatctt

SEQ ID NO: 36597 - RNA, 20 nt, synthetic construct
  source 1..20: mol_type = other RNA
gaatactcgtgtgtctcata

SEQ ID NO: 36598 - RNA, 20 nt, synthetic construct
  source 1..20: mol_type = other RNA
gaatactttcccatctctag

SEQ ID NO: 36599 - RNA, 20 nt, synthetic construct
  source 1..20: mol_type = other RNA
gaatagaaaatccttacttc

SEQ ID NO: 36600 - RNA, 20 nt, synthetic construct
  source 1..20: mol_type = other RNA
gaatagaaagttagtgtcta

SEQ ID NO: 36601 - RNA, 20 nt, synthetic construct
  source 1..20: mol_type = other RNA
gaatagaagagcagtgtgtt

SEQ ID NO: 36602 - RNA, 20 nt, synthetic construct
  source 1..20: mol_type = other RNA
gaatagaagggagaacccag

SEQ ID NO: 36603 - RNA, 20 nt, synthetic construct
  source 1..20: mol_type = other RNA
gaatagacaaagacaagttc

SEQ ID NO: 36604 - RNA, 20 nt, synthetic construct
  source 1..20: mol_type = other RNA
gaatagcaactgttttttcc

SEQ ID NO: 36605 - RNA, 20 nt, synthetic construct
  source 1..20: mol_type = other RNA
gaatagcagaaacacaggac

SEQ ID NO: 36606 - RNA, 20 nt, synthetic construct
  source 1..20: mol_type = other RNA
gaatagcatcttagctcttc

SEQ ID NO: 36607 - RNA, 20 nt, synthetic construct
  source 1..20: mol_type = other RNA
gaataggaaagtgacagatg

SEQ ID NO: 36608 - RNA, 20 nt, synthetic construct
  source 1..20: mol_type = other RNA
gaataggcaaattcatagat

SEQ ID NO: 36609 - RNA, 20 nt, synthetic construct
  source 1..20: mol_type = other RNA
gaatagggcctcaaatttca

SEQ ID NO: 36610 - RNA, 20 nt, synthetic construct
  source 1..20: mol_type = other RNA
gaataggtgtgtgttccttc

SEQ ID NO: 36611 - RNA, 20 nt, synthetic construct
  source 1..20: mol_type = other RNA
gaatagtagcttcaatgagg

SEQ ID NO: 36612 - RNA, 20 nt, synthetic construct
  source 1..20: mol_type = other RNA
gaatagtattcaggacagat

SEQ ID NO: 36613 - RNA, 20 nt, synthetic construct
  source 1..20: mol_type = other RNA
gaatataaacgtgtgtgtaa

SEQ ID NO: 36614 - RNA, 20 nt, synthetic construct
  source 1..20: mol_type = other RNA
gaatataaactcttccttat

SEQ ID NO: 36615 - RNA, 20 nt, synthetic construct
  source 1..20: mol_type = other RNA
gaatatactggaaaactaga

SEQ ID NO: 36616 - RNA, 20 nt, synthetic construct
  source 1..20: mol_type = other RNA
gaatatagctaagaaacagt

SEQ ID NO: 36617 - RNA, 20 nt, synthetic construct
  source 1..20: mol_type = other RNA
gaatatataaagaactccaa

SEQ ID NO: 36618 - RNA, 20 nt, synthetic construct
  source 1..20: mol_type = other RNA
gaatatatttacttctacag

SEQ ID NO: 36619 - RNA, 20 nt, synthetic construct
  source 1..20: mol_type = other RNA
gaatatcatttgaatgatgc

SEQ ID NO: 36620 - RNA, 20 nt, synthetic construct
  source 1..20: mol_type = other RNA
gaatatccaagcacaaacct

SEQ ID NO: 36621 - RNA, 20 nt, synthetic construct
  source 1..20: mol_type = other RNA
gaatatgtactacctataga

SEQ ID NO: 36622 - RNA, 20 nt, synthetic construct
  source 1..20: mol_type = other RNA
gaatattactcagtctcgaa

SEQ ID NO: 36623 - RNA, 20 nt, synthetic construct
  source 1..20: mol_type = other RNA
gaatattcgttccagcaggg

SEQ ID NO: 36624 - RNA, 20 nt, synthetic construct
  source 1..20: mol_type = other RNA
gaatattgttcagccttaaa

SEQ ID NO: 36625 - RNA, 20 nt, synthetic construct
  source 1..20: mol_type = other RNA
gaatcaatccagacagctaa

SEQ ID NO: 36626 - RNA, 20 nt, synthetic construct
  source 1..20: mol_type = other RNA
gaatcacctcaaggcagaac

SEQ ID NO: 36627 - RNA, 20 nt, synthetic construct
  source 1..20: mol_type = other RNA
gaatcactacagcatattag

SEQ ID NO: 36628 - RNA, 20 nt, synthetic construct
  source 1..20: mol_type = other RNA
gaatcagacaacacattaat

SEQ ID NO: 36629 - RNA, 20 nt, synthetic construct
  source 1..20: mol_type = other RNA
gaatcaggtctctttgaaag

SEQ ID NO: 36630 - RNA, 20 nt, synthetic construct
  source 1..20: mol_type = other RNA
gaatcatccggggagctttt

SEQ ID NO: 36631 - RNA, 20 nt, synthetic construct
  source 1..20: mol_type = other RNA
gaatcatctaggcatataaa

SEQ ID NO: 36632 - RNA, 20 nt, synthetic construct
  source 1..20: mol_type = other RNA
gaatcatgggagccaaactt

SEQ ID NO: 36633 - RNA, 20 nt, synthetic construct
  source 1..20: mol_type = other RNA
gaatcattccgtatatattt

SEQ ID NO: 36634 - RNA, 20 nt, synthetic construct
  source 1..20: mol_type = other RNA
gaatccccaaataacatgca

SEQ ID NO: 36635 - RNA, 20 nt, synthetic construct
  source 1..20: mol_type = other RNA
gaatccctttcgctaatctc

SEQ ID NO: 36636 - RNA, 20 nt, synthetic construct
  source 1..20: mol_type = other RNA
gaatccggctttatgagaca

SEQ ID NO: 36637 - RNA, 20 nt, synthetic construct
  source 1..20: mol_type = other RNA
gaatcctcacaacaggcctg

SEQ ID NO: 36638 - RNA, 20 nt, synthetic construct
  source 1..20: mol_type = other RNA
gaatcctgctattttattag

SEQ ID NO: 36639 - RNA, 20 nt, synthetic construct
  source 1..20: mol_type = other RNA
gaatccttcagtcagttctc

SEQ ID NO: 36640 - RNA, 20 nt, synthetic construct
  source 1..20: mol_type = other RNA
gaatcctttgcttcccactt

SEQ ID NO: 36641 - RNA, 20 nt, synthetic construct
  source 1..20: mol_type = other RNA
gaatcgtgatagtcttccaa

SEQ ID NO: 36642 - RNA, 20 nt, synthetic construct
  source 1..20: mol_type = other RNA
gaatctactcttttgttttt

SEQ ID NO: 36643 - RNA, 20 nt, synthetic construct
  source 1..20: mol_type = other RNA
gaatctagaaagataaatcc

SEQ ID NO: 36644 - RNA, 20 nt, synthetic construct
  source 1..20: mol_type = other RNA
gaatctaggaaacactgctc

SEQ ID NO: 36645 - RNA, 20 nt, synthetic construct
  source 1..20: mol_type = other RNA
gaatctctctatccaccact

SEQ ID NO: 36646 - RNA, 20 nt, synthetic construct
  source 1..20: mol_type = other RNA
gaatctgacctaagcttggg

SEQ ID NO: 36647 - RNA, 20 nt, synthetic construct
  source 1..20: mol_type = other RNA
gaatctgagtaaagggtaag

SEQ ID NO: 36648 - RNA, 20 nt, synthetic construct
  source 1..20: mol_type = other RNA
gaatctgcaactatcaaaac

SEQ ID NO: 36649 - RNA, 20 nt, synthetic construct
  source 1..20: mol_type = other RNA
gaatctgtagattgttttag

SEQ ID NO: 36650 - RNA, 20 nt, synthetic construct
  source 1..20: mol_type = other RNA
gaatctgttcctgggttctc

SEQ ID NO: 36651 - RNA, 20 nt, synthetic construct
  source 1..20: mol_type = other RNA
gaatcttaaaataccagagg

SEQ ID NO: 36652 - RNA, 20 nt, synthetic construct
  source 1..20: mol_type = other RNA
gaatcttaacatttctcatg

SEQ ID NO: 36653 - RNA, 20 nt, synthetic construct
  source 1..20: mol_type = other RNA
gaatcttaccctgttgacca

SEQ ID NO: 36654 - RNA, 20 nt, synthetic construct
  source 1..20: mol_type = other RNA
gaatcttactggtgttaggc

SEQ ID NO: 36655 - RNA, 20 nt, synthetic construct
  source 1..20: mol_type = other RNA
gaatctttggcaaacttaga

SEQ ID NO: 36656 - RNA, 20 nt, synthetic construct
  source 1..20: mol_type = other RNA
gaatgaaaatttttgtctgg

SEQ ID NO: 36657 - RNA, 20 nt, synthetic construct
  source 1..20: mol_type = other RNA
gaatgaacaaaatgtggtat

SEQ ID NO: 36658 - RNA, 20 nt, synthetic construct
  source 1..20: mol_type = other RNA
gaatgaactcctatagttaa

SEQ ID NO: 36659 - RNA, 20 nt, synthetic construct
  source 1..20: mol_type = other RNA
gaatgaagcaggccttcgag

SEQ ID NO: 36660 - RNA, 20 nt, synthetic construct
  source 1..20: mol_type = other RNA
gaatgaaggacaaaaataat

SEQ ID NO: 36661 - RNA, 20 nt, synthetic construct
  source 1..20: mol_type = other RNA
gaatgaagtcagagattttc

SEQ ID NO: 36662 - RNA, 20 nt, synthetic construct
  source 1..20: mol_type = other RNA
gaatgaatgttgagtttttt

SEQ ID NO: 36663 - RNA, 20 nt, synthetic construct
  source 1..20: mol_type = other RNA
gaatgacagaaaatatctac

SEQ ID NO: 36664 - RNA, 20 nt, synthetic construct
  source 1..20: mol_type = other RNA
gaatgaccgagatacttaag

SEQ ID NO: 36665 - RNA, 20 nt, synthetic construct
  source 1..20: mol_type = other RNA
gaatgactatagaaatttgt

SEQ ID NO: 36666 - RNA, 20 nt, synthetic construct
  source 1..20: mol_type = other RNA
gaatgactgttgcctctgtg

SEQ ID NO: 36667 - RNA, 20 nt, synthetic construct
  source 1..20: mol_type = other RNA
gaatgagaaacatacatgtt

SEQ ID NO: 36668 - RNA, 20 nt, synthetic construct
  source 1..20: mol_type = other RNA
gaatgagaccaaatgcataa

SEQ ID NO: 36669 - RNA, 20 nt, synthetic construct
  source 1..20: mol_type = other RNA
gaatgagcaaggtcgtttca

SEQ ID NO: 36670 - RNA, 20 nt, synthetic construct
  source 1..20: mol_type = other RNA
gaatgaggagtgaatttttc

SEQ ID NO: 36671 - RNA, 20 nt, synthetic construct
  source 1..20: mol_type = other RNA
gaatgagtccagctttctaa

SEQ ID NO: 36672 - RNA, 20 nt, synthetic construct
  source 1..20: mol_type = other RNA
gaatgatgccatcacatttt

SEQ ID NO: 36673 - RNA, 20 nt, synthetic construct
  source 1..20: mol_type = other RNA
gaatgatgcgaaagaaaaaa

SEQ ID NO: 36674 - RNA, 20 nt, synthetic construct
  source 1..20: mol_type = other RNA
gaatgattatttgcggcttg

SEQ ID NO: 36675 - RNA, 20 nt, synthetic construct
  source 1..20: mol_type = other RNA
gaatgattccacttatatga

SEQ ID NO: 36676 - RNA, 20 nt, synthetic construct
  source 1..20: mol_type = other RNA
gaatgatttccctgcataca

SEQ ID NO: 36677 - RNA, 20 nt, synthetic construct
  source 1..20: mol_type = other RNA
gaatgcaaagtttcctacat

SEQ ID NO: 36678 - RNA, 20 nt, synthetic construct
  source 1..20: mol_type = other RNA
gaatgcacgtgaagctacag

SEQ ID NO: 36679 - RNA, 20 nt, synthetic construct
  source 1..20: mol_type = other RNA
gaatgcagtggcttcctaac

SEQ ID NO: 36680 - RNA, 20 nt, synthetic construct
  source 1..20: mol_type = other RNA
gaatgcatatatctgtctgg

SEQ ID NO: 36681 - RNA, 20 nt, synthetic construct
  source 1..20: mol_type = other RNA
gaatgcatccctcctctggc

SEQ ID NO: 36682 - RNA, 20 nt, synthetic construct
  source 1..20: mol_type = other RNA
gaatgcatcgtttcaatatt

SEQ ID NO: 36683 - RNA, 20 nt, synthetic construct
  source 1..20: mol_type = other RNA
gaatgcatcttttaaaaacc

SEQ ID NO: 36684 - RNA, 20 nt, synthetic construct
  source 1..20: mol_type = other RNA
gaatgcatgggaggtaatac

SEQ ID NO: 36685 - RNA, 20 nt, synthetic construct
  source 1..20: mol_type = other RNA
gaatgcccatcctctatttt

SEQ ID NO: 36686 - RNA, 20 nt, synthetic construct
  source 1..20: mol_type = other RNA
gaatgcccctgtagcagaca

SEQ ID NO: 36687 - RNA, 20 nt, synthetic construct
  source 1..20: mol_type = other RNA
gaatgcccctttgagcagag

SEQ ID NO: 36688 - RNA, 20 nt, synthetic construct
  source 1..20: mol_type = other RNA
gaatgcctataaaatgctgg

SEQ ID NO: 36689 - RNA, 20 nt, synthetic construct
  source 1..20: mol_type = other RNA
gaatgctcataattaaagag

SEQ ID NO: 36690 - RNA, 20 nt, synthetic construct
  source 1..20: mol_type = other RNA
gaatggaaaattcaaacatg

SEQ ID NO: 36691 - RNA, 20 nt, synthetic construct
  source 1..20: mol_type = other RNA
gaatggaaaattcttggtct

SEQ ID NO: 36692 - RNA, 20 nt, synthetic construct
  source 1..20: mol_type = other RNA
gaatggaaacttgccatctt

SEQ ID NO: 36693 - RNA, 20 nt, synthetic construct
  source 1..20: mol_type = other RNA
gaatggaaagaaatagaact

SEQ ID NO: 36694 - RNA, 20 nt, synthetic construct
  source 1..20: mol_type = other RNA
gaatggaaatgtaaattcct

SEQ ID NO: 36695 - RNA, 20 nt, synthetic construct
  source 1..20: mol_type = other RNA
gaatggaattctgatgcaca

SEQ ID NO: 36696 - RNA, 20 nt, synthetic construct
  source 1..20: mol_type = other RNA
gaatggataaggaaaatatg

SEQ ID NO: 36697 - RNA, 20 nt, synthetic construct
  source 1..20: mol_type = other RNA
gaatggcaaggctaacagcc

SEQ ID NO: 36698 - RNA, 20 nt, synthetic construct
  source 1..20: mol_type = other RNA
gaatggcatgaacccaccag

SEQ ID NO: 36699 - RNA, 20 nt, synthetic construct
  source 1..20: mol_type = other RNA
gaatggccctgcgattggtt

SEQ ID NO: 36700 - RNA, 20 nt, synthetic construct
  source 1..20: mol_type = other RNA
gaatggctggaatggtgaag

SEQ ID NO: 36701 - RNA, 20 nt, synthetic construct
  source 1..20: mol_type = other RNA
gaatggggagctagagggta

SEQ ID NO: 36702 - RNA, 20 nt, synthetic construct
  source 1..20: mol_type = other RNA
gaatggggatgcaacaaatg

SEQ ID NO: 36703 - RNA, 20 nt, synthetic construct
  source 1..20: mol_type = other RNA
gaatggggtaattttggggc

SEQ ID NO: 36704 - RNA, 20 nt, synthetic construct
  source 1..20: mol_type = other RNA
gaatgggttggaggagaagg

SEQ ID NO: 36705 - RNA, 20 nt, synthetic construct
  source 1..20: mol_type = other RNA
gaatggtactgcctccacag

SEQ ID NO: 36706 - RNA, 20 nt, synthetic construct
  source 1..20: mol_type = other RNA
gaatggtcaatttcatcgta

SEQ ID NO: 36707 - RNA, 20 nt, synthetic construct
  source 1..20: mol_type = other RNA
gaatggtgaagaatgtgaaa

SEQ ID NO: 36708 - RNA, 20 nt, synthetic construct
  source 1..20: mol_type = other RNA
gaatggtttaacacatacaa

SEQ ID NO: 36709 - RNA, 20 nt, synthetic construct
  source 1..20: mol_type = other RNA
gaatgtcaagctgtttgagc

SEQ ID NO: 36710 - RNA, 20 nt, synthetic construct
  source 1..20: mol_type = other RNA
gaatgtccatcaggaaaacc

SEQ ID NO: 36711 - RNA, 20 nt, synthetic construct
  source 1..20: mol_type = other RNA
gaatgtgaaaaatttgacat

SEQ ID NO: 36712 - RNA, 20 nt, synthetic construct
  source 1..20: mol_type = other RNA
gaatgtgacctgtccttgtg

SEQ ID NO: 36713 - RNA, 20 nt, synthetic construct
  source 1..20: mol_type = other RNA
gaatgtgacttcgtcaaggg

SEQ ID NO: 36714 - RNA, 20 nt, synthetic construct
  source 1..20: mol_type = other RNA
gaatgtgaggtgaggacatg

SEQ ID NO: 36715 - RNA, 20 nt, synthetic construct
  source 1..20: mol_type = other RNA
gaatgtgcacctccagtgtc

SEQ ID NO: 36716 - RNA, 20 nt, synthetic construct
  source 1..20: mol_type = other RNA
gaatgtgcactcttttaaac

SEQ ID NO: 36717 - RNA, 20 nt, synthetic construct
  source 1..20: mol_type = other RNA
gaatgtgcctacatagtcca

SEQ ID NO: 36718 - RNA, 20 nt, synthetic construct
  source 1..20: mol_type = other RNA
gaatgtgcttcctaaacctg

SEQ ID NO: 36719 - RNA, 20 nt, synthetic construct
  source 1..20: mol_type = other RNA
gaatgtggcagaatttacat

SEQ ID NO: 36720 - RNA, 20 nt, synthetic construct
  source 1..20: mol_type = other RNA
gaatgtggtcacactttttg

SEQ ID NO: 36721 - RNA, 20 nt, synthetic construct
  source 1..20: mol_type = other RNA
gaatgtggtggtatgcactg

SEQ ID NO: 36722 - RNA, 20 nt, synthetic construct
  source 1..20: mol_type = other RNA
gaatgtgtagttctggtgtc

SEQ ID NO: 36723 - RNA, 20 nt, synthetic construct
  source 1..20: mol_type = other RNA
gaatgtgttgatttttaaac

SEQ ID NO: 36724 - RNA, 20 nt, synthetic construct
  source 1..20: mol_type = other RNA
gaatgttcaagtatttccac

SEQ ID NO: 36725 - RNA, 20 nt, synthetic construct
  source 1..20: mol_type = other RNA
gaatgtttttccgtctagcc

SEQ ID NO: 36726 - RNA, 20 nt, synthetic construct
  source 1..20: mol_type = other RNA
gaattaaaaacattggagga

SEQ ID NO: 36727 - RNA, 20 nt, synthetic construct
  source 1..20: mol_type = other RNA
gaattaaaatgttgccaata

SEQ ID NO: 36728 - RNA, 20 nt, synthetic construct
  source 1..20: mol_type = other RNA
gaattaaacaatcttgaaag

SEQ ID NO: 36729 - RNA, 20 nt, synthetic construct
  source 1..20: mol_type = other RNA
gaattaaactcattatccca

SEQ ID NO: 36730 - RNA, 20 nt, synthetic construct
  source 1..20: mol_type = other RNA
gaattaaatgaagaaaatcc

SEQ ID NO: 36731 - RNA, 20 nt, synthetic construct
  source 1..20: mol_type = other RNA
gaattaacactaatccttct

SEQ ID NO: 36732 - RNA, 20 nt, synthetic construct
  source 1..20: mol_type = other RNA
gaattaactccaggggacat

SEQ ID NO: 36733 - RNA, 20 nt, synthetic construct
  source 1..20: mol_type = other RNA
gaattaagcaccactagagt

SEQ ID NO: 36734 - RNA, 20 nt, synthetic construct
  source 1..20: mol_type = other RNA
gaattaatctcttacacctg

SEQ ID NO: 36735 - RNA, 20 nt, synthetic construct
  source 1..20: mol_type = other RNA
gaattacaaatgaaagtcag

SEQ ID NO: 36736 - RNA, 20 nt, synthetic construct
  source 1..20: mol_type = other RNA
gaattacaggcatgagtcgc

SEQ ID NO: 36737 - RNA, 20 nt, synthetic construct
  source 1..20: mol_type = other RNA
gaattactgacaatagccaa

SEQ ID NO: 36738 - RNA, 20 nt, synthetic construct
  source 1..20: mol_type = other RNA
gaattagaaagctggactca

SEQ ID NO: 36739 - RNA, 20 nt, synthetic construct
  source 1..20: mol_type = other RNA
gaattagatggcttaggatc

SEQ ID NO: 36740 - RNA, 20 nt, synthetic construct
  source 1..20: mol_type = other RNA
gaattagattgttttgttgc

SEQ ID NO: 36741 - RNA, 20 nt, synthetic construct
  source 1..20: mol_type = other RNA
gaattagcaatgcgaatcat

SEQ ID NO: 36742 - RNA, 20 nt, synthetic construct
  source 1..20: mol_type = other RNA
gaattagtgattttaccaag

SEQ ID NO: 36743 - RNA, 20 nt, synthetic construct
  source 1..20: mol_type = other RNA
gaattatagagggcctaaat

SEQ ID NO: 36744 - RNA, 20 nt, synthetic construct
  source 1..20: mol_type = other RNA
gaattataggcaatttagaa

SEQ ID NO: 36745 - RNA, 20 nt, synthetic construct
  source 1..20: mol_type = other RNA
gaattatcatatgatctatc

SEQ ID NO: 36746 - RNA, 20 nt, synthetic construct
  source 1..20: mol_type = other RNA
gaattatgctaacatgaact

SEQ ID NO: 36747 - RNA, 20 nt, synthetic construct
  source 1..20: mol_type = other RNA
gaattattaagcaaaatgga

SEQ ID NO: 36748 - RNA, 20 nt, synthetic construct
  source 1..20: mol_type = other RNA
gaattattgattggcaaatc

SEQ ID NO: 36749 - RNA, 20 nt, synthetic construct
  source 1..20: mol_type = other RNA
gaattattgtctgcaagcag

SEQ ID NO: 36750 - RNA, 20 nt, synthetic construct
  source 1..20: mol_type = other RNA
gaattcaaaaacactgtatt

SEQ ID NO: 36751 - RNA, 20 nt, synthetic construct
  source 1..20: mol_type = other RNA
gaattcacagtagaagactc

SEQ ID NO: 36752 - RNA, 20 nt, synthetic construct
  source 1..20: mol_type = other RNA
gaattcactaatgcctcaaa

SEQ ID NO: 36753 - RNA, 20 nt, synthetic construct
  source 1..20: mol_type = other RNA
gaattcactgtgactccaaa

SEQ ID NO: 36754 - RNA, 20 nt, synthetic construct
  source 1..20: mol_type = other RNA
gaattcagagtggctaatgt

SEQ ID NO: 36755 - RNA, 20 nt, synthetic construct
  source 1..20: mol_type = other RNA
gaattcagatggccccaaaa

SEQ ID NO: 36756 - RNA, 20 nt, synthetic construct
  source 1..20: mol_type = other RNA
gaattcaggacagtcatcct

SEQ ID NO: 36757 - RNA, 20 nt, synthetic construct
  source 1..20: mol_type = other RNA
gaattcaggacagttattct

SEQ ID NO: 36758 - RNA, 20 nt, synthetic construct
  source 1..20: mol_type = other RNA
gaattcagtcaccaaacgtt

SEQ ID NO: 36759 - RNA, 20 nt, synthetic construct
  source 1..20: mol_type = other RNA
gaattcatcaaagttaaact

SEQ ID NO: 36760 - RNA, 20 nt, synthetic construct
  source 1..20: mol_type = other RNA
gaattcattgttgtgtgtta

SEQ ID NO: 36761 - RNA, 20 nt, synthetic construct
  source 1..20: mol_type = other RNA
gaattccagtttatctattt

SEQ ID NO: 36762 - RNA, 20 nt, synthetic construct
  source 1..20: mol_type = other RNA
gaattccatcagtggttgtg

SEQ ID NO: 36763 - RNA, 20 nt, synthetic construct
  source 1..20: mol_type = other RNA
gaattccattccttttcgag

SEQ ID NO: 36764 - RNA, 20 nt, synthetic construct
  source 1..20: mol_type = other RNA
gaattcccacaaaatatgaa

SEQ ID NO: 36765 - RNA, 20 nt, synthetic construct
  source 1..20: mol_type = other RNA
gaattcgttaatacttgtgt

SEQ ID NO: 36766 - RNA, 20 nt, synthetic construct
  source 1..20: mol_type = other RNA
gaattctaaattgcctataa

SEQ ID NO: 36767 - RNA, 20 nt, synthetic construct
  source 1..20: mol_type = other RNA
gaattctaacattatcttct

SEQ ID NO: 36768 - RNA, 20 nt, synthetic construct
  source 1..20: mol_type = other RNA
gaattctaatgaactcccag

SEQ ID NO: 36769 - RNA, 20 nt, synthetic construct
  source 1..20: mol_type = other RNA
gaattctactaaacattaag

SEQ ID NO: 36770 - RNA, 20 nt, synthetic construct
  source 1..20: mol_type = other RNA
gaattctataggtagtacat

SEQ ID NO: 36771 - RNA, 20 nt, synthetic construct
  source 1..20: mol_type = other RNA
gaattctctctcaactggcc

SEQ ID NO: 36772 - RNA, 20 nt, synthetic construct
  source 1..20: mol_type = other RNA
gaattctctggaatagaaga

SEQ ID NO: 36773 - RNA, 20 nt, synthetic construct
  source 1..20: mol_type = other RNA
gaattctgacacccgaagag

SEQ ID NO: 36774 - RNA, 20 nt, synthetic construct
  source 1..20: mol_type = other RNA
gaattctgacttagtgaggg

SEQ ID NO: 36775 - RNA, 20 nt, synthetic construct
  source 1..20: mol_type = other RNA
gaattctgatgcacaagcct

SEQ ID NO: 36776 - RNA, 20 nt, synthetic construct
  source 1..20: mol_type = other RNA
gaattctgcttattatatgc

SEQ ID NO: 36777 - RNA, 20 nt, synthetic construct
  source 1..20: mol_type = other RNA
gaattcttcttctgttattt

SEQ ID NO: 36778 - RNA, 20 nt, synthetic construct
  source 1..20: mol_type = other RNA
gaattcttgacctcaaatga

SEQ ID NO: 36779 - RNA, 20 nt, synthetic construct
  source 1..20: mol_type = other RNA
gaattctttaaaactgctga

SEQ ID NO: 36780 - RNA, 20 nt, synthetic construct
  source 1..20: mol_type = other RNA
gaattgactttaccctgctg

SEQ ID NO: 36781 - RNA, 20 nt, synthetic construct
  source 1..20: mol_type = other RNA
gaattgagatgtactggaag

SEQ ID NO: 36782 - RNA, 20 nt, synthetic construct
  source 1..20: mol_type = other RNA
gaattgataaaagtcattga

SEQ ID NO: 36783 - RNA, 20 nt, synthetic construct
  source 1..20: mol_type = other RNA
gaattgcatgagacttggag

SEQ ID NO: 36784 - RNA, 20 nt, synthetic construct
  source 1..20: mol_type = other RNA
gaattgccatatgtagggca

SEQ ID NO: 36785 - RNA, 20 nt, synthetic construct
  source 1..20: mol_type = other RNA
gaattggtagtcaatgcaat

SEQ ID NO: 36786 - RNA, 20 nt, synthetic construct
  source 1..20: mol_type = other RNA
gaattgtaatcacagtacgc

SEQ ID NO: 36787 - RNA, 20 nt, synthetic construct
  source 1..20: mol_type = other RNA
gaattgtgacagttctattt

SEQ ID NO: 36788 - RNA, 20 nt, synthetic construct
  source 1..20: mol_type = other RNA
gaattgttgcgcgtcaaaag

SEQ ID NO: 36789 - RNA, 20 nt, synthetic construct
  source 1..20: mol_type = other RNA
gaattgttggagttctttat

SEQ ID NO: 36790 - RNA, 20 nt, synthetic construct
  source 1..20: mol_type = other RNA
gaatttaagacacaaggaag

SEQ ID NO: 36791 - RNA, 20 nt, synthetic construct
  source 1..20: mol_type = other RNA
gaatttaaggggtaaatggt

SEQ ID NO: 36792 - RNA, 20 nt, synthetic construct
  source 1..20: mol_type = other RNA
gaatttaattttgagagtgc

SEQ ID NO: 36793 - RNA, 20 nt, synthetic construct
  source 1..20: mol_type = other RNA
gaatttacatttccattcat

SEQ ID NO: 36794 - RNA, 20 nt, synthetic construct
  source 1..20: mol_type = other RNA
gaatttcagaaagagaatag

SEQ ID NO: 36795 - RNA, 20 nt, synthetic construct
  source 1..20: mol_type = other RNA
gaatttcaggtgtgtaaaca

SEQ ID NO: 36796 - RNA, 20 nt, synthetic construct
  source 1..20: mol_type = other RNA
gaatttcatgcctttcagca

SEQ ID NO: 36797 - RNA, 20 nt, synthetic construct
  source 1..20: mol_type = other RNA
gaatttctgtccttggattg

SEQ ID NO: 36798 - RNA, 20 nt, synthetic construct
  source 1..20: mol_type = other RNA
gaatttgaggtcttctagct

SEQ ID NO: 36799 - RNA, 20 nt, synthetic construct
  source 1..20: mol_type = other RNA
gaatttgcctattctggggc

SEQ ID NO: 36800 - RNA, 20 nt, synthetic construct
  source 1..20: mol_type = other RNA
gaatttggaaagggtagagc

SEQ ID NO: 36801 - RNA, 20 nt, synthetic construct
  source 1..20: mol_type = other RNA
gaatttggatttgagtaact

SEQ ID NO: 36802 - RNA, 20 nt, synthetic construct
  source 1..20: mol_type = other RNA
gaatttggtattcttatccc

SEQ ID NO: 36803 - RNA, 20 nt, synthetic construct
  source 1..20: mol_type = other RNA
gaatttgttttaccatctaa

SEQ ID NO: 36804 - RNA, 20 nt, synthetic construct
  source 1..20: mol_type = other RNA
gaattttaagcctagagatt

SEQ ID NO: 36805 - RNA, 20 nt, synthetic construct
  source 1..20: mol_type = other RNA
gaattttactgatcttttct

SEQ ID NO: 36806 - RNA, 20 nt, synthetic construct
  source 1..20: mol_type = other RNA
gaattttaggacaaggaaag

SEQ ID NO: 36807 - RNA, 20 nt, synthetic construct
  source 1..20: mol_type = other RNA
gaattttagtaattctccac

SEQ ID NO: 36808 - RNA, 20 nt, synthetic construct
  source 1..20: mol_type = other RNA
gaattttcaggactcatgag

SEQ ID NO: 36809 - RNA, 20 nt, synthetic construct
  source 1..20: mol_type = other RNA
gaattttccattcacacacc

SEQ ID NO: 36810 - RNA, 20 nt, synthetic construct
  source 1..20: mol_type = other RNA
gaattttccattcatgtaat

SEQ ID NO: 36811 - RNA, 20 nt, synthetic construct
  source 1..20: mol_type = other RNA
gaattttgcttttgctttgg

SEQ ID NO: 36812 - RNA, 20 nt, synthetic construct
  source 1..20: mol_type = other RNA
gaatttttcttacctaagca

SEQ ID NO: 36813 - RNA, 20 nt, synthetic construct
  source 1..20: mol_type = other RNA
gacaaaaaacgcggcacttg

SEQ ID NO: 36814 - RNA, 20 nt, synthetic construct
  source 1..20: mol_type = other RNA
gacaaaaagtaggggtaaat

SEQ ID NO: 36815 - RNA, 20 nt, synthetic construct
  source 1..20: mol_type = other RNA
gacaaaaataatatgatacc

SEQ ID NO: 36816 - RNA, 20 nt, synthetic construct
  source 1..20: mol_type = other RNA
gacaaaaatagaggatgggc

SEQ ID NO: 36817 - RNA, 20 nt, synthetic construct
  source 1..20: mol_type = other RNA
gacaaaaattttcattctac

SEQ ID NO: 36818 - RNA, 20 nt, synthetic construct
  source 1..20: mol_type = other RNA
gacaaaaggccccttgaaag

SEQ ID NO: 36819 - RNA, 20 nt, synthetic construct
  source 1..20: mol_type = other RNA
gacaaacacttttcaaacac

SEQ ID NO: 36820 - RNA, 20 nt, synthetic construct
  source 1..20: mol_type = other RNA
gacaaagacaagttcttacc

SEQ ID NO: 36821 - RNA, 20 nt, synthetic construct
  source 1..20: mol_type = other RNA
gacaaagcataaaatatgtg

SEQ ID NO: 36822 - RNA, 20 nt, synthetic construct
  source 1..20: mol_type = other RNA
gacaaaggttgcagtgagca

SEQ ID NO: 36823 - RNA, 20 nt, synthetic construct
  source 1..20: mol_type = other RNA
gacaaagtatgagaaatgtc

SEQ ID NO: 36824 - RNA, 20 nt, synthetic construct
  source 1..20: mol_type = other RNA
gacaaataaaagcttatgat

SEQ ID NO: 36825 - RNA, 20 nt, synthetic construct
  source 1..20: mol_type = other RNA
gacaaattaccatgtttcca

SEQ ID NO: 36826 - RNA, 20 nt, synthetic construct
  source 1..20: mol_type = other RNA
gacaacacattaataagatc

SEQ ID NO: 36827 - RNA, 20 nt, synthetic construct
  source 1..20: mol_type = other RNA
gacaacagtgtgagaccgtg

SEQ ID NO: 36828 - RNA, 20 nt, synthetic construct
  source 1..20: mol_type = other RNA
gacaactgggagaatggcaa

SEQ ID NO: 36829 - RNA, 20 nt, synthetic construct
  source 1..20: mol_type = other RNA
gacaagaatctttggcaaac

SEQ ID NO: 36830 - RNA, 20 nt, synthetic construct
  source 1..20: mol_type = other RNA
gacaagacgtgtacataaaa

SEQ ID NO: 36831 - RNA, 20 nt, synthetic construct
  source 1..20: mol_type = other RNA
gacaagactaaaaaattaga

SEQ ID NO: 36832 - RNA, 20 nt, synthetic construct
  source 1..20: mol_type = other RNA
gacaagactacctaaaacaa

SEQ ID NO: 36833 - RNA, 20 nt, synthetic construct
  source 1..20: mol_type = other RNA
gacaagagcagaactccacc

SEQ ID NO: 36834 - RNA, 20 nt, synthetic construct
  source 1..20: mol_type = other RNA
gacaagagtctgcagaccaa

SEQ ID NO: 36835 - RNA, 20 nt, synthetic construct
  source 1..20: mol_type = other RNA
gacaagcaaggaagggcttg

SEQ ID NO: 36836 - RNA, 20 nt, synthetic construct
  source 1..20: mol_type = other RNA
gacaagcacaggcatctctc

SEQ ID NO: 36837 - RNA, 20 nt, synthetic construct
  source 1..20: mol_type = other RNA
gacaaggaaaggatggtttg

SEQ ID NO: 36838 - RNA, 20 nt, synthetic construct
  source 1..20: mol_type = other RNA
gacaagtaaatgcaatgcag

SEQ ID NO: 36839 - RNA, 20 nt, synthetic construct
  source 1..20: mol_type = other RNA
gacaagtactgcatgattcc

SEQ ID NO: 36840 - RNA, 20 nt, synthetic construct
  source 1..20: mol_type = other RNA
gacaagtagtacaaaagtgc

SEQ ID NO: 36841 - RNA, 20 nt, synthetic construct
  source 1..20: mol_type = other RNA
gacaagtatattacaaaaag

SEQ ID NO: 36842 - RNA, 20 nt, synthetic construct
  source 1..20: mol_type = other RNA
gacaagtgggtggatgggtg

SEQ ID NO: 36843 - RNA, 20 nt, synthetic construct
  source 1..20: mol_type = other RNA
gacaagttcagcatcttcac

SEQ ID NO: 36844 - RNA, 20 nt, synthetic construct
  source 1..20: mol_type = other RNA
gacaagttctcctgtgtgca

SEQ ID NO: 36845 - RNA, 20 nt, synthetic construct
  source 1..20: mol_type = other RNA
gacaagttcttacctcaaag

SEQ ID NO: 36846 - RNA, 20 nt, synthetic construct
  source 1..20: mol_type = other RNA
gacaataaatggtgcaggcc

SEQ ID NO: 36847 - RNA, 20 nt, synthetic construct
  source 1..20: mol_type = other RNA
gacaataataactacacatc

SEQ ID NO: 36848 - RNA, 20 nt, synthetic construct
  source 1..20: mol_type = other RNA
gacaataattcttcctgtct

SEQ ID NO: 36849 - RNA, 20 nt, synthetic construct
  source 1..20: mol_type = other RNA
gacaatactgttatgacaag

SEQ ID NO: 36850 - RNA, 20 nt, synthetic construct
  source 1..20: mol_type = other RNA
gacaatagccaagacatgga

SEQ ID NO: 36851 - RNA, 20 nt, synthetic construct
  source 1..20: mol_type = other RNA
gacaatagctagtgtcttag

SEQ ID NO: 36852 - RNA, 20 nt, synthetic construct
  source 1..20: mol_type = other RNA
gacaatataggagactatcg

SEQ ID NO: 36853 - RNA, 20 nt, synthetic construct
  source 1..20: mol_type = other RNA
gacaatctctggggttaggg

SEQ ID NO: 36854 - RNA, 20 nt, synthetic construct
  source 1..20: mol_type = other RNA
gacaatgccagggcgctcct

SEQ ID NO: 36855 - RNA, 20 nt, synthetic construct
  source 1..20: mol_type = other RNA
gacaatgtctttggctctta

SEQ ID NO: 36856 - RNA, 20 nt, synthetic construct
  source 1..20: mol_type = other RNA
gacaatgtggagttggtgca

SEQ ID NO: 36857 - RNA, 20 nt, synthetic construct
  source 1..20: mol_type = other RNA
gacaattgaatggggatgca

SEQ ID NO: 36858 - RNA, 20 nt, synthetic construct
  source 1..20: mol_type = other RNA
gacaatttcagggagaattg

SEQ ID NO: 36859 - RNA, 20 nt, synthetic construct
  source 1..20: mol_type = other RNA
gacaatttgccaaaatgatt

SEQ ID NO: 36860 - RNA, 20 nt, synthetic construct
  source 1..20: mol_type = other RNA
gacacaaaagagctgggccc

SEQ ID NO: 36861 - RNA, 20 nt, synthetic construct
  source 1..20: mol_type = other RNA
gacacaaaatcagatatgaa

SEQ ID NO: 36862 - RNA, 20 nt, synthetic construct
  source 1..20: mol_type = other RNA
gacacaaaggactggaactc

SEQ ID NO: 36863 - RNA, 20 nt, synthetic construct
  source 1..20: mol_type = other RNA
gacacaaattatgactgaga

SEQ ID NO: 36864 - RNA, 20 nt, synthetic construct
  source 1..20: mol_type = other RNA
gacacaacttactactaaaa

SEQ ID NO: 36865 - RNA, 20 nt, synthetic construct
  source 1..20: mol_type = other RNA
gacacaaggaaggtcaaatg

SEQ ID NO: 36866 - RNA, 20 nt, synthetic construct
  source 1..20: mol_type = other RNA
gacacacaatccaagtttct

SEQ ID NO: 36867 - RNA, 20 nt, synthetic construct
  source 1..20: mol_type = other RNA
gacacacacagtcctgtgtt

SEQ ID NO: 36868 - RNA, 20 nt, synthetic construct
  source 1..20: mol_type = other RNA
gacacacatcagacacctac

SEQ ID NO: 36869 - RNA, 20 nt, synthetic construct
  source 1..20: mol_type = other RNA
gacacaccatgacagagttc

SEQ ID NO: 36870 - RNA, 20 nt, synthetic construct
  source 1..20: mol_type = other RNA
gacacacgagtattcaagtt

SEQ ID NO: 36871 - RNA, 20 nt, synthetic construct
  source 1..20: mol_type = other RNA
gacacactagctgacccact

SEQ ID NO: 36872 - RNA, 20 nt, synthetic construct
  source 1..20: mol_type = other RNA
gacacactgaaacaatcgca

SEQ ID NO: 36873 - RNA, 20 nt, synthetic construct
  source 1..20: mol_type = other RNA
gacacaggctgaagggagga

SEQ ID NO: 36874 - RNA, 20 nt, synthetic construct
  source 1..20: mol_type = other RNA
gacacatactgaaagacaga

SEQ ID NO: 36875 - RNA, 20 nt, synthetic construct
  source 1..20: mol_type = other RNA
gacacatttttgacagccac

SEQ ID NO: 36876 - RNA, 20 nt, synthetic construct
  source 1..20: mol_type = other RNA
gacaccaaaactacaggcaa

SEQ ID NO: 36877 - RNA, 20 nt, synthetic construct
  source 1..20: mol_type = other RNA
gacaccagaactacacattc

SEQ ID NO: 36878 - RNA, 20 nt, synthetic construct
  source 1..20: mol_type = other RNA
gacacccgaagaggacgatt

SEQ ID NO: 36879 - RNA, 20 nt, synthetic construct
  source 1..20: mol_type = other RNA
gacacccgacccactagtga

SEQ ID NO: 36880 - RNA, 20 nt, synthetic construct
  source 1..20: mol_type = other RNA
gacaccgctccacgcccatt

SEQ ID NO: 36881 - RNA, 20 nt, synthetic construct
  source 1..20: mol_type = other RNA
gacacctacaatattaactt

SEQ ID NO: 36882 - RNA, 20 nt, synthetic construct
  source 1..20: mol_type = other RNA
gacacctacattaatctcat

SEQ ID NO: 36883 - RNA, 20 nt, synthetic construct
  source 1..20: mol_type = other RNA
gacacctgaggggtcttatg

SEQ ID NO: 36884 - RNA, 20 nt, synthetic construct
  source 1..20: mol_type = other RNA
gacacggtctcacactgttg

SEQ ID NO: 36885 - RNA, 20 nt, synthetic construct
  source 1..20: mol_type = other RNA
gacactaactttctattccc

SEQ ID NO: 36886 - RNA, 20 nt, synthetic construct
  source 1..20: mol_type = other RNA
gacactagcaatccaggatc

SEQ ID NO: 36887 - RNA, 20 nt, synthetic construct
  source 1..20: mol_type = other RNA
gacactagctattgtctttt

SEQ ID NO: 36888 - RNA, 20 nt, synthetic construct
  source 1..20: mol_type = other RNA
gacactagggactggcctcg

SEQ ID NO: 36889 - RNA, 20 nt, synthetic construct
  source 1..20: mol_type = other RNA
gacactattgagagtgaaaa

SEQ ID NO: 36890 - RNA, 20 nt, synthetic construct
  source 1..20: mol_type = other RNA
gacactgcagatgaatgagc

SEQ ID NO: 36891 - RNA, 20 nt, synthetic construct
  source 1..20: mol_type = other RNA
gacactggaggtgcacattc

SEQ ID NO: 36892 - RNA, 20 nt, synthetic construct
  source 1..20: mol_type = other RNA
gacactgggttctcaccaac

SEQ ID NO: 36893 - RNA, 20 nt, synthetic construct
  source 1..20: mol_type = other RNA
gacagaaaatatctacaaat

SEQ ID NO: 36894 - RNA, 20 nt, synthetic construct
  source 1..20: mol_type = other RNA
gacagaaataatacaaatga

SEQ ID NO: 36895 - RNA, 20 nt, synthetic construct
  source 1..20: mol_type = other RNA
gacagaaattcaacttggta

SEQ ID NO: 36896 - RNA, 20 nt, synthetic construct
  source 1..20: mol_type = other RNA
gacagaacaaactcaagttc

SEQ ID NO: 36897 - RNA, 20 nt, synthetic construct
  source 1..20: mol_type = other RNA
gacagaacaaataacaccat

SEQ ID NO: 36898 - RNA, 20 nt, synthetic construct
  source 1..20: mol_type = other RNA
gacagaatcttactggtgtt

SEQ ID NO: 36899 - RNA, 20 nt, synthetic construct
  source 1..20: mol_type = other RNA
gacagaatgcatcttttaaa

SEQ ID NO: 36900 - RNA, 20 nt, synthetic construct
  source 1..20: mol_type = other RNA
gacagacatgcatgcacaca

SEQ ID NO: 36901 - RNA, 20 nt, synthetic construct
  source 1..20: mol_type = other RNA
gacagacatttggaatagag

SEQ ID NO: 36902 - RNA, 20 nt, synthetic construct
  source 1..20: mol_type = other RNA
gacagaccctggcttgtgac

SEQ ID NO: 36903 - RNA, 20 nt, synthetic construct
  source 1..20: mol_type = other RNA
gacagacctctattaaatca

SEQ ID NO: 36904 - RNA, 20 nt, synthetic construct
  source 1..20: mol_type = other RNA
gacagactgcagttggatta

SEQ ID NO: 36905 - RNA, 20 nt, synthetic construct
  source 1..20: mol_type = other RNA
gacagagagagacctttctt

SEQ ID NO: 36906 - RNA, 20 nt, synthetic construct
  source 1..20: mol_type = other RNA
gacagagcagtaggcttaga

SEQ ID NO: 36907 - RNA, 20 nt, synthetic construct
  source 1..20: mol_type = other RNA
gacagagccgagcagaaggg

SEQ ID NO: 36908 - RNA, 20 nt, synthetic construct
  source 1..20: mol_type = other RNA
gacagagctagaactagaat

SEQ ID NO: 36909 - RNA, 20 nt, synthetic construct
  source 1..20: mol_type = other RNA
gacagagctccctctccctc

SEQ ID NO: 36910 - RNA, 20 nt, synthetic construct
  source 1..20: mol_type = other RNA
gacagagtgaaactctggct

SEQ ID NO: 36911 - RNA, 20 nt, synthetic construct
  source 1..20: mol_type = other RNA
gacagagttccacctccatc

SEQ ID NO: 36912 - RNA, 20 nt, synthetic construct
  source 1..20: mol_type = other RNA
gacagatatatgcattccca

SEQ ID NO: 36913 - RNA, 20 nt, synthetic construct
  source 1..20: mol_type = other RNA
gacagatcccaaaaaggttt

SEQ ID NO: 36914 - RNA, 20 nt, synthetic construct
  source 1..20: mol_type = other RNA
gacagatcttatggaatagt

SEQ ID NO: 36915 - RNA, 20 nt, synthetic construct
  source 1..20: mol_type = other RNA
gacagatgagaaatacttgg

SEQ ID NO: 36916 - RNA, 20 nt, synthetic construct
  source 1..20: mol_type = other RNA
gacagatgagactcttaata

SEQ ID NO: 36917 - RNA, 20 nt, synthetic construct
  source 1..20: mol_type = other RNA
gacagatgtgcttaatcttc

SEQ ID NO: 36918 - RNA, 20 nt, synthetic construct
  source 1..20: mol_type = other RNA
gacagattaaaatcagatta

SEQ ID NO: 36919 - RNA, 20 nt, synthetic construct
  source 1..20: mol_type = other RNA
gacagattaaataccacctg

SEQ ID NO: 36920 - RNA, 20 nt, synthetic construct
  source 1..20: mol_type = other RNA
gacagattctctgtctctgt

SEQ ID NO: 36921 - RNA, 20 nt, synthetic construct
  source 1..20: mol_type = other RNA
gacagcaaataaacaaaatc

SEQ ID NO: 36922 - RNA, 20 nt, synthetic construct
  source 1..20: mol_type = other RNA
gacagcacattaaataaggg

SEQ ID NO: 36923 - RNA, 20 nt, synthetic construct
  source 1..20: mol_type = other RNA
gacagcagataagatccaag

SEQ ID NO: 36924 - RNA, 20 nt, synthetic construct
  source 1..20: mol_type = other RNA
gacagcaggaaaagctaccc

SEQ ID NO: 36925 - RNA, 20 nt, synthetic construct
  source 1..20: mol_type = other RNA
gacagcatccccagaaagag

SEQ ID NO: 36926 - RNA, 20 nt, synthetic construct
  source 1..20: mol_type = other RNA
gacagccacgtgtattgagt

SEQ ID NO: 36927 - RNA, 20 nt, synthetic construct
  source 1..20: mol_type = other RNA
gacagcctaaaccattttca

SEQ ID NO: 36928 - RNA, 20 nt, synthetic construct
  source 1..20: mol_type = other RNA
gacagcggggatggttgcac

SEQ ID NO: 36929 - RNA, 20 nt, synthetic construct
  source 1..20: mol_type = other RNA
gacagctaatatgctgtagt

SEQ ID NO: 36930 - RNA, 20 nt, synthetic construct
  source 1..20: mol_type = other RNA
gacagctacggaggatgagg

SEQ ID NO: 36931 - RNA, 20 nt, synthetic construct
  source 1..20: mol_type = other RNA
gacagctactaaacaaatca

SEQ ID NO: 36932 - RNA, 20 nt, synthetic construct
  source 1..20: mol_type = other RNA
gacagctcaattaagcaacc

SEQ ID NO: 36933 - RNA, 20 nt, synthetic construct
  source 1..20: mol_type = other RNA
gacagctgagtagcgcttta

SEQ ID NO: 36934 - RNA, 20 nt, synthetic construct
  source 1..20: mol_type = other RNA
gacagctgggagaaagctaa

SEQ ID NO: 36935 - RNA, 20 nt, synthetic construct
  source 1..20: mol_type = other RNA
gacagcttccacccaagtgg

SEQ ID NO: 36936 - RNA, 20 nt, synthetic construct
  source 1..20: mol_type = other RNA
gacaggaagaattattgtct

SEQ ID NO: 36937 - RNA, 20 nt, synthetic construct
  source 1..20: mol_type = other RNA
gacaggacagagcagtaggc

SEQ ID NO: 36938 - RNA, 20 nt, synthetic construct
  source 1..20: mol_type = other RNA
gacaggactccacagagttc

SEQ ID NO: 36939 - RNA, 20 nt, synthetic construct
  source 1..20: mol_type = other RNA
gacaggatccagatgtagag

SEQ ID NO: 36940 - RNA, 20 nt, synthetic construct
  source 1..20: mol_type = other RNA
gacaggatcccggaacagga

SEQ ID NO: 36941 - RNA, 20 nt, synthetic construct
  source 1..20: mol_type = other RNA
gacagggaatgcccctgtag

SEQ ID NO: 36942 - RNA, 20 nt, synthetic construct
  source 1..20: mol_type = other RNA
gacagggaatggggagctag

SEQ ID NO: 36943 - RNA, 20 nt, synthetic construct
  source 1..20: mol_type = other RNA
gacaggggacatgaaggaag

SEQ ID NO: 36944 - RNA, 20 nt, synthetic construct
  source 1..20: mol_type = other RNA
gacagggtctcactcttacc

SEQ ID NO: 36945 - RNA, 20 nt, synthetic construct
  source 1..20: mol_type = other RNA
gacaggtagacatgagtaaa

SEQ ID NO: 36946 - RNA, 20 nt, synthetic construct
  source 1..20: mol_type = other RNA
gacaggtcacattctgcctg

SEQ ID NO: 36947 - RNA, 20 nt, synthetic construct
  source 1..20: mol_type = other RNA
gacaggtgagtggactgtga

SEQ ID NO: 36948 - RNA, 20 nt, synthetic construct
  source 1..20: mol_type = other RNA
gacaggtggtatgggagatg

SEQ ID NO: 36949 - RNA, 20 nt, synthetic construct
  source 1..20: mol_type = other RNA
gacagtatgtcagactcatt

SEQ ID NO: 36950 - RNA, 20 nt, synthetic construct
  source 1..20: mol_type = other RNA
gacagtattgtgctgaaacc

SEQ ID NO: 36951 - RNA, 20 nt, synthetic construct
  source 1..20: mol_type = other RNA
gacagtcatcctcaacaaga

SEQ ID NO: 36952 - RNA, 20 nt, synthetic construct
  source 1..20: mol_type = other RNA
gacagtcccttgcctgacag

SEQ ID NO: 36953 - RNA, 20 nt, synthetic construct
  source 1..20: mol_type = other RNA
gacagtgagcatgctgcaac

SEQ ID NO: 36954 - RNA, 20 nt, synthetic construct
  source 1..20: mol_type = other RNA
gacagtggacaaaggttcca

SEQ ID NO: 36955 - RNA, 20 nt, synthetic construct
  source 1..20: mol_type = other RNA
gacagttactctaaaagaat

SEQ ID NO: 36956 - RNA, 20 nt, synthetic construct
  source 1..20: mol_type = other RNA
gacagttattcttcagcaag

SEQ ID NO: 36957 - RNA, 20 nt, synthetic construct
  source 1..20: mol_type = other RNA
gacagttctatttctttcca

SEQ ID NO: 36958 - RNA, 20 nt, synthetic construct
  source 1..20: mol_type = other RNA
gacagttctgtgaatttgat

SEQ ID NO: 36959 - RNA, 20 nt, synthetic construct
  source 1..20: mol_type = other RNA
gacagttggccttgaggtga

SEQ ID NO: 36960 - RNA, 20 nt, synthetic construct
  source 1..20: mol_type = other RNA
gacataactgtaaagtaatc

SEQ ID NO: 36961 - RNA, 20 nt, synthetic construct
  source 1..20: mol_type = other RNA
gacataagcattttctaaat

SEQ ID NO: 36962 - RNA, 20 nt, synthetic construct
  source 1..20: mol_type = other RNA
gacataagggtctgttttac

SEQ ID NO: 36963 - RNA, 20 nt, synthetic construct
  source 1..20: mol_type = other RNA
gacatactgtcacaggcttt

SEQ ID NO: 36964 - RNA, 20 nt, synthetic construct
  source 1..20: mol_type = other RNA
gacatagatgaaactaaatg

SEQ ID NO: 36965 - RNA, 20 nt, synthetic construct
  source 1..20: mol_type = other RNA
gacatatcagggatcacaga

SEQ ID NO: 36966 - RNA, 20 nt, synthetic construct
  source 1..20: mol_type = other RNA
gacatatgccggctgttagg

SEQ ID NO: 36967 - RNA, 20 nt, synthetic construct
  source 1..20: mol_type = other RNA
gacatatgttttgcttcgaa

SEQ ID NO: 36968 - RNA, 20 nt, synthetic construct
  source 1..20: mol_type = other RNA
gacatattttatgatttcac

SEQ ID NO: 36969 - RNA, 20 nt, synthetic construct
  source 1..20: mol_type = other RNA
gacatcaagggtggtgctgg

SEQ ID NO: 36970 - RNA, 20 nt, synthetic construct
  source 1..20: mol_type = other RNA
gacatcacaatgcgtttgtt

SEQ ID NO: 36971 - RNA, 20 nt, synthetic construct
  source 1..20: mol_type = other RNA
gacatcactaagagtgaaaa

SEQ ID NO: 36972 - RNA, 20 nt, synthetic construct
  source 1..20: mol_type = other RNA
gacatccacaacattgtgca

SEQ ID NO: 36973 - RNA, 20 nt, synthetic construct
  source 1..20: mol_type = other RNA
gacatcctgatttaggccac

SEQ ID NO: 36974 - RNA, 20 nt, synthetic construct
  source 1..20: mol_type = other RNA
gacatcctttaatttgggtt

SEQ ID NO: 36975 - RNA, 20 nt, synthetic construct
  source 1..20: mol_type = other RNA
gacatcctttgcgtctgtga

SEQ ID NO: 36976 - RNA, 20 nt, synthetic construct
  source 1..20: mol_type = other RNA
gacatctgagacatcacaat

SEQ ID NO: 36977 - RNA, 20 nt, synthetic construct
  source 1..20: mol_type = other RNA
gacatcttgcataactcgta

SEQ ID NO: 36978 - RNA, 20 nt, synthetic construct
  source 1..20: mol_type = other RNA
gacatctttcctgtgattta

SEQ ID NO: 36979 - RNA, 20 nt, synthetic construct
  source 1..20: mol_type = other RNA
gacatgaacaatccttctaa

SEQ ID NO: 36980 - RNA, 20 nt, synthetic construct
  source 1..20: mol_type = other RNA
gacatgaaggaaggattgga

SEQ ID NO: 36981 - RNA, 20 nt, synthetic construct
  source 1..20: mol_type = other RNA
gacatgacaggtgagtggac

SEQ ID NO: 36982 - RNA, 20 nt, synthetic construct
  source 1..20: mol_type = other RNA
gacatgagagctaagggaag

SEQ ID NO: 36983 - RNA, 20 nt, synthetic construct
  source 1..20: mol_type = other RNA
gacatgaggaaagcaggttg

SEQ ID NO: 36984 - RNA, 20 nt, synthetic construct
  source 1..20: mol_type = other RNA
gacatgagtaaaaagaaatc

SEQ ID NO: 36985 - RNA, 20 nt, synthetic construct
  source 1..20: mol_type = other RNA
gacatgataaatacgtatat

SEQ ID NO: 36986 - RNA, 20 nt, synthetic construct
  source 1..20: mol_type = other RNA
gacatgattgaggacttcat

SEQ ID NO: 36987 - RNA, 20 nt, synthetic construct
  source 1..20: mol_type = other RNA
gacatgcacgagaaaagcac

SEQ ID NO: 36988 - RNA, 20 nt, synthetic construct
  source 1..20: mol_type = other RNA
gacatgcatgcacacagagg

SEQ ID NO: 36989 - RNA, 20 nt, synthetic construct
  source 1..20: mol_type = other RNA
gacatgccacaccacatcca

SEQ ID NO: 36990 - RNA, 20 nt, synthetic construct
  source 1..20: mol_type = other RNA
gacatgctctgataggataa

SEQ ID NO: 36991 - RNA, 20 nt, synthetic construct
  source 1..20: mol_type = other RNA
gacatgctgaggccccaggg

SEQ ID NO: 36992 - RNA, 20 nt, synthetic construct
  source 1..20: mol_type = other RNA
gacatggagacagtgagcat

SEQ ID NO: 36993 - RNA, 20 nt, synthetic construct
  source 1..20: mol_type = other RNA
gacatgggctaaataaaaca

SEQ ID NO: 36994 - RNA, 20 nt, synthetic construct
  source 1..20: mol_type = other RNA
gacatggttttcctactaac

SEQ ID NO: 36995 - RNA, 20 nt, synthetic construct
  source 1..20: mol_type = other RNA
gacatgtgtaaaacatctgg

SEQ ID NO: 36996 - RNA, 20 nt, synthetic construct
  source 1..20: mol_type = other RNA
gacatgtgttttatttaggc

SEQ ID NO: 36997 - RNA, 20 nt, synthetic construct
  source 1..20: mol_type = other RNA
gacatgttaggttgaaagtt

SEQ ID NO: 36998 - RNA, 20 nt, synthetic construct
  source 1..20: mol_type = other RNA
gacattacaattgataccat

SEQ ID NO: 36999 - RNA, 20 nt, synthetic construct
  source 1..20: mol_type = other RNA
gacattagtggaaaaactgc

SEQ ID NO: 37000 - RNA, 20 nt, synthetic construct
  source 1..20: mol_type = other RNA
gacattagtggtggtagtaa

SEQ ID NO: 37001 - RNA, 20 nt, synthetic construct
  source 1..20: mol_type = other RNA
gacattatcctatcagagca

SEQ ID NO: 37002 - RNA, 20 nt, synthetic construct
  source 1..20: mol_type = other RNA
gacattattcttacagtgac

SEQ ID NO: 37003 - RNA, 20 nt, synthetic construct
  source 1..20: mol_type = other RNA
gacattctgcttccttgcta

SEQ ID NO: 37004 - RNA, 20 nt, synthetic construct
  source 1..20: mol_type = other RNA
gacattcttaccttctaaaa

SEQ ID NO: 37005 - RNA, 20 nt, synthetic construct
  source 1..20: mol_type = other RNA
gacattggttattcatgttt

SEQ ID NO: 37006 - RNA, 20 nt, synthetic construct
  source 1..20: mol_type = other RNA
gacattgtcttacataggct

SEQ ID NO: 37007 - RNA, 20 nt, synthetic construct
  source 1..20: mol_type = other RNA
gacatttctcatactttgtc

SEQ ID NO: 37008 - RNA, 20 nt, synthetic construct
  source 1..20: mol_type = other RNA
gacatttgagggtgctgatc

SEQ ID NO: 37009 - RNA, 20 nt, synthetic construct
  source 1..20: mol_type = other RNA
gacatttgcttttcctggaa

SEQ ID NO: 37010 - RNA, 20 nt, synthetic construct
  source 1..20: mol_type = other RNA
gacatttggaatagagagcc

SEQ ID NO: 37011 - RNA, 20 nt, synthetic construct
  source 1..20: mol_type = other RNA
gacatttgggaatgtggtca

SEQ ID NO: 37012 - RNA, 20 nt, synthetic construct
  source 1..20: mol_type = other RNA
gacattttatttatacaggt

SEQ ID NO: 37013 - RNA, 20 nt, synthetic construct
  source 1..20: mol_type = other RNA
gacatttttcaaatacctag

SEQ ID NO: 37014 - RNA, 20 nt, synthetic construct
  source 1..20: mol_type = other RNA
gacatttttccaaagatata

SEQ ID NO: 37015 - RNA, 20 nt, synthetic construct
  source 1..20: mol_type = other RNA
gaccaaaacaaaaaacaaac

SEQ ID NO: 37016 - RNA, 20 nt, synthetic construct
  source 1..20: mol_type = other RNA
gaccaaaatggagacccata

SEQ ID NO: 37017 - RNA, 20 nt, synthetic construct
  source 1..20: mol_type = other RNA
gaccaaacatgtgaggattt

SEQ ID NO: 37018 - RNA, 20 nt, synthetic construct
  source 1..20: mol_type = other RNA
gaccaaatgcataaaaatat

SEQ ID NO: 37019 - RNA, 20 nt, synthetic construct
  source 1..20: mol_type = other RNA
gaccaactatttcactaaat

SEQ ID NO: 37020 - RNA, 20 nt, synthetic construct
  source 1..20: mol_type = other RNA
gaccaactttaagcaaaatt

SEQ ID NO: 37021 - RNA, 20 nt, synthetic construct
  source 1..20: mol_type = other RNA
gaccaagaaaggacttcagt

SEQ ID NO: 37022 - RNA, 20 nt, synthetic construct
  source 1..20: mol_type = other RNA
gaccaagaattttccattca

SEQ ID NO: 37023 - RNA, 20 nt, synthetic construct
  source 1..20: mol_type = other RNA
gaccaagagtgtggctttaa

SEQ ID NO: 37024 - RNA, 20 nt, synthetic construct
  source 1..20: mol_type = other RNA
gaccaagttactagaagcac

SEQ ID NO: 37025 - RNA, 20 nt, synthetic construct
  source 1..20: mol_type = other RNA
gaccaagtttaaccaattat

SEQ ID NO: 37026 - RNA, 20 nt, synthetic construct
  source 1..20: mol_type = other RNA
gaccaatttaccatctgaca

SEQ ID NO: 37027 - RNA, 20 nt, synthetic construct
  source 1..20: mol_type = other RNA
gaccacaaggattaatcttt

SEQ ID NO: 37028 - RNA, 20 nt, synthetic construct
  source 1..20: mol_type = other RNA
gaccacaatcttacccccat

SEQ ID NO: 37029 - RNA, 20 nt, synthetic construct
  source 1..20: mol_type = other RNA
gaccacaggctctcttcacc

SEQ ID NO: 37030 - RNA, 20 nt, synthetic construct
  source 1..20: mol_type = other RNA
gaccacagtttgaaacttta

SEQ ID NO: 37031 - RNA, 20 nt, synthetic construct
  source 1..20: mol_type = other RNA
gaccacattcccaaatgtct

SEQ ID NO: 37032 - RNA, 20 nt, synthetic construct
  source 1..20: mol_type = other RNA
gaccaccacacttgcttggg

SEQ ID NO: 37033 - RNA, 20 nt, synthetic construct
  source 1..20: mol_type = other RNA
gaccagatcaaacgtgcttt

SEQ ID NO: 37034 - RNA, 20 nt, synthetic construct
  source 1..20: mol_type = other RNA
gaccagatgcgtggttcaca

SEQ ID NO: 37035 - RNA, 20 nt, synthetic construct
  source 1..20: mol_type = other RNA
gaccagcagttcaagcacca

SEQ ID NO: 37036 - RNA, 20 nt, synthetic construct
  source 1..20: mol_type = other RNA
gaccagcttgggcaagagag

SEQ ID NO: 37037 - RNA, 20 nt, synthetic construct
  source 1..20: mol_type = other RNA
gaccaggagttcttatgagg

SEQ ID NO: 37038 - RNA, 20 nt, synthetic construct
  source 1..20: mol_type = other RNA
gaccaggcagtcctctcact

SEQ ID NO: 37039 - RNA, 20 nt, synthetic construct
  source 1..20: mol_type = other RNA
gaccaggggaaggagtctgc

SEQ ID NO: 37040 - RNA, 20 nt, synthetic construct
  source 1..20: mol_type = other RNA
gaccaggtatggcgactcat

SEQ ID NO: 37041 - RNA, 20 nt, synthetic construct
  source 1..20: mol_type = other RNA
gaccagtgtgatgggggtaa

SEQ ID NO: 37042 - RNA, 20 nt, synthetic construct
  source 1..20: mol_type = other RNA
gaccagttactctctctgcc

SEQ ID NO: 37043 - RNA, 20 nt, synthetic construct
  source 1..20: mol_type = other RNA
gaccagttaggaagccactg

SEQ ID NO: 37044 - RNA, 20 nt, synthetic construct
  source 1..20: mol_type = other RNA
gaccataatatatttcacaa

SEQ ID NO: 37045 - RNA, 20 nt, synthetic construct
  source 1..20: mol_type = other RNA
gaccataggcacgcgccccc

SEQ ID NO: 37046 - RNA, 20 nt, synthetic construct
  source 1..20: mol_type = other RNA
gaccatataatctaaccctc

SEQ ID NO: 37047 - RNA, 20 nt, synthetic construct
  source 1..20: mol_type = other RNA
gaccatctcagcacagagcc

SEQ ID NO: 37048 - RNA, 20 nt, synthetic construct
  source 1..20: mol_type = other RNA
gaccatctgttaaaagatac

SEQ ID NO: 37049 - RNA, 20 nt, synthetic construct
  source 1..20: mol_type = other RNA
gaccatgggacaagtgggtg

SEQ ID NO: 37050 - RNA, 20 nt, synthetic construct
  source 1..20: mol_type = other RNA
gaccatgttttaggagtcaa

SEQ ID NO: 37051 - RNA, 20 nt, synthetic construct
  source 1..20: mol_type = other RNA
gaccattagcagttctgtac

SEQ ID NO: 37052 - RNA, 20 nt, synthetic construct
  source 1..20: mol_type = other RNA
gaccattccacgctgtggct

SEQ ID NO: 37053 - RNA, 20 nt, synthetic construct
  source 1..20: mol_type = other RNA
gaccattgtgtggacacact

SEQ ID NO: 37054 - RNA, 20 nt, synthetic construct
  source 1..20: mol_type = other RNA
gaccatttttatatctttgg

SEQ ID NO: 37055 - RNA, 20 nt, synthetic construct
  source 1..20: mol_type = other RNA
gacccaaagcaaaagcaaaa

SEQ ID NO: 37056 - RNA, 20 nt, synthetic construct
  source 1..20: mol_type = other RNA
gacccaatcatgttctttat

SEQ ID NO: 37057 - RNA, 20 nt, synthetic construct
  source 1..20: mol_type = other RNA
gacccactagtgaagtccca

SEQ ID NO: 37058 - RNA, 20 nt, synthetic construct
  source 1..20: mol_type = other RNA
gacccactggtttcagtccc

SEQ ID NO: 37059 - RNA, 20 nt, synthetic construct
  source 1..20: mol_type = other RNA
gacccagagcctaatgtgta

SEQ ID NO: 37060 - RNA, 20 nt, synthetic construct
  source 1..20: mol_type = other RNA
gacccagcccccaacccgcc

SEQ ID NO: 37061 - RNA, 20 nt, synthetic construct
  source 1..20: mol_type = other RNA
gacccagtggctagtgtgtt

SEQ ID NO: 37062 - RNA, 20 nt, synthetic construct
  source 1..20: mol_type = other RNA
gacccataaactgaacattt

SEQ ID NO: 37063 - RNA, 20 nt, synthetic construct
  source 1..20: mol_type = other RNA
gacccatactcagccccctc

SEQ ID NO: 37064 - RNA, 20 nt, synthetic construct
  source 1..20: mol_type = other RNA
gacccatgcccatgtgcatt

SEQ ID NO: 37065 - RNA, 20 nt, synthetic construct
  source 1..20: mol_type = other RNA
gaccccagtagaaatcttcc

SEQ ID NO: 37066 - RNA, 20 nt, synthetic construct
  source 1..20: mol_type = other RNA
gaccccatctctaccaaaat

SEQ ID NO: 37067 - RNA, 20 nt, synthetic construct
  source 1..20: mol_type = other RNA
gaccccgtacgctccctcgc

SEQ ID NO: 37068 - RNA, 20 nt, synthetic construct
  source 1..20: mol_type = other RNA
gaccccgtctctgcaaaaaa

SEQ ID NO: 37069 - RNA, 20 nt, synthetic construct
  source 1..20: mol_type = other RNA
gacccctcaggtgtcactgg

SEQ ID NO: 37070 - RNA, 20 nt, synthetic construct
  source 1..20: mol_type = other RNA
gacccctccctgctttaaaa

SEQ ID NO: 37071 - RNA, 20 nt, synthetic construct
  source 1..20: mol_type = other RNA
gacccgccgcagagccggac

SEQ ID NO: 37072 - RNA, 20 nt, synthetic construct
  source 1..20: mol_type = other RNA
gacccgggaggcagatgttg

SEQ ID NO: 37073 - RNA, 20 nt, synthetic construct
  source 1..20: mol_type = other RNA
gaccctgagtccagaggtga

SEQ ID NO: 37074 - RNA, 20 nt, synthetic construct
  source 1..20: mol_type = other RNA
gaccctgctatgcatacttt

SEQ ID NO: 37075 - RNA, 20 nt, synthetic construct
  source 1..20: mol_type = other RNA
gaccctggcttgtgacatca

SEQ ID NO: 37076 - RNA, 20 nt, synthetic construct
  source 1..20: mol_type = other RNA
gaccctgtctctaaaaaata

SEQ ID NO: 37077 - RNA, 20 nt, synthetic construct
  source 1..20: mol_type = other RNA
gaccctgttagtcccctagt

SEQ ID NO: 37078 - RNA, 20 nt, synthetic construct
  source 1..20: mol_type = other RNA
gacccttaccttaaaccata

SEQ ID NO: 37079 - RNA, 20 nt, synthetic construct
  source 1..20: mol_type = other RNA
gacccttatgtccagccccc

SEQ ID NO: 37080 - RNA, 20 nt, synthetic construct
  source 1..20: mol_type = other RNA
gaccctttatcggataagga

SEQ ID NO: 37081 - RNA, 20 nt, synthetic construct
  source 1..20: mol_type = other RNA
gaccctttattcaaagatca

SEQ ID NO: 37082 - RNA, 20 nt, synthetic construct
  source 1..20: mol_type = other RNA
gaccctttgaagtatgtaat

SEQ ID NO: 37083 - RNA, 20 nt, synthetic construct
  source 1..20: mol_type = other RNA
gaccgagatacttaagtttt

SEQ ID NO: 37084 - RNA, 20 nt, synthetic construct
  source 1..20: mol_type = other RNA
gaccgaggaaacccgctctg

SEQ ID NO: 37085 - RNA, 20 nt, synthetic construct
  source 1..20: mol_type = other RNA
gaccgcaagagttccaactg

SEQ ID NO: 37086 - RNA, 20 nt, synthetic construct
  source 1..20: mol_type = other RNA
gaccgctttcgtgagggttt

SEQ ID NO: 37087 - RNA, 20 nt, synthetic construct
  source 1..20: mol_type = other RNA
gaccggatgaggtggctcac

SEQ ID NO: 37088 - RNA, 20 nt, synthetic construct
  source 1..20: mol_type = other RNA
gaccggggactgcaacagat

SEQ ID NO: 37089 - RNA, 20 nt, synthetic construct
  source 1..20: mol_type = other RNA
gaccgtggggggagggaggg

SEQ ID NO: 37090 - RNA, 20 nt, synthetic construct
  source 1..20: mol_type = other RNA
gacctaaaatcttattcccc

SEQ ID NO: 37091 - RNA, 20 nt, synthetic construct
  source 1..20: mol_type = other RNA
gacctaaagttttaagaaaa

SEQ ID NO: 37092 - RNA, 20 nt, synthetic construct
  source 1..20: mol_type = other RNA
gacctaagcttaagagctaa

SEQ ID NO: 37093 - RNA, 20 nt, synthetic construct
  source 1..20: mol_type = other RNA
gacctaagcttgggtaggaa

SEQ ID NO: 37094 - RNA, 20 nt, synthetic construct
  source 1..20: mol_type = other RNA
gacctactaaaagttgacaa

SEQ ID NO: 37095 - RNA, 20 nt, synthetic construct
  source 1..20: mol_type = other RNA
gacctatctattaacagaag

SEQ ID NO: 37096 - RNA, 20 nt, synthetic construct
  source 1..20: mol_type = other RNA
gacctcaaattaatcagtct

SEQ ID NO: 37097 - RNA, 20 nt, synthetic construct
  source 1..20: mol_type = other RNA
gacctcaaattctgagggaa

SEQ ID NO: 37098 - RNA, 20 nt, synthetic construct
  source 1..20: mol_type = other RNA
gacctcaagcgatccagccg

SEQ ID NO: 37099 - RNA, 20 nt, synthetic construct
  source 1..20: mol_type = other RNA
gacctcaggcagtctagtcc

SEQ ID NO: 37100 - RNA, 20 nt, synthetic construct
  source 1..20: mol_type = other RNA
gacctcaggtttagaatata

SEQ ID NO: 37101 - RNA, 20 nt, synthetic construct
  source 1..20: mol_type = other RNA
gacctcagtggtagttacac

SEQ ID NO: 37102 - RNA, 20 nt, synthetic construct
  source 1..20: mol_type = other RNA
gacctcatctctgcaaaaca

SEQ ID NO: 37103 - RNA, 20 nt, synthetic construct
  source 1..20: mol_type = other RNA
gacctcatcttagccgggag

SEQ ID NO: 37104 - RNA, 20 nt, synthetic construct
  source 1..20: mol_type = other RNA
gacctcatgtaactaattac

SEQ ID NO: 37105 - RNA, 20 nt, synthetic construct
  source 1..20: mol_type = other RNA
gacctccagcgctaagcact

SEQ ID NO: 37106 - RNA, 20 nt, synthetic construct
  source 1..20: mol_type = other RNA
gacctcccaaaggactggga

SEQ ID NO: 37107 - RNA, 20 nt, synthetic construct
  source 1..20: mol_type = other RNA
gacctcctagattgaccttc

SEQ ID NO: 37108 - RNA, 20 nt, synthetic construct
  source 1..20: mol_type = other RNA
gacctcctcccacttacatc

SEQ ID NO: 37109 - RNA, 20 nt, synthetic construct
  source 1..20: mol_type = other RNA
gacctcgaagcacaaccact

SEQ ID NO: 37110 - RNA, 20 nt, synthetic construct
  source 1..20: mol_type = other RNA
gacctctattaaatcatgat

SEQ ID NO: 37111 - RNA, 20 nt, synthetic construct
  source 1..20: mol_type = other RNA
gacctctgaagagtctatct

SEQ ID NO: 37112 - RNA, 20 nt, synthetic construct
  source 1..20: mol_type = other RNA
gacctctgcagttagcatgc

SEQ ID NO: 37113 - RNA, 20 nt, synthetic construct
  source 1..20: mol_type = other RNA
gacctgaagactggatttga

SEQ ID NO: 37114 - RNA, 20 nt, synthetic construct
  source 1..20: mol_type = other RNA
gacctgaatgactgttgcct

SEQ ID NO: 37115 - RNA, 20 nt, synthetic construct
  source 1..20: mol_type = other RNA
gacctgattcttccactagt

SEQ ID NO: 37116 - RNA, 20 nt, synthetic construct
  source 1..20: mol_type = other RNA
gacctgcacaaaggattggg

SEQ ID NO: 37117 - RNA, 20 nt, synthetic construct
  source 1..20: mol_type = other RNA
gacctgcagtctgcaggcag

SEQ ID NO: 37118 - RNA, 20 nt, synthetic construct
  source 1..20: mol_type = other RNA
gacctgccagagttggcaca

SEQ ID NO: 37119 - RNA, 20 nt, synthetic construct
  source 1..20: mol_type = other RNA
gacctgctttcttggggctc

SEQ ID NO: 37120 - RNA, 20 nt, synthetic construct
  source 1..20: mol_type = other RNA
gacctggaaattattcaata

SEQ ID NO: 37121 - RNA, 20 nt, synthetic construct
  source 1..20: mol_type = other RNA
gacctgggagaaagaccaag

SEQ ID NO: 37122 - RNA, 20 nt, synthetic construct
  source 1..20: mol_type = other RNA
gacctggtactctatgatat

SEQ ID NO: 37123 - RNA, 20 nt, synthetic construct
  source 1..20: mol_type = other RNA
gacctgtaatttttctcttt

SEQ ID NO: 37124 - RNA, 20 nt, synthetic construct
  source 1..20: mol_type = other RNA
gacctgtagattgggctttt

SEQ ID NO: 37125 - RNA, 20 nt, synthetic construct
  source 1..20: mol_type = other RNA
gacctgtccttgtgttttat

SEQ ID NO: 37126 - RNA, 20 nt, synthetic construct
  source 1..20: mol_type = other RNA
gaccttagtggttgacccat

SEQ ID NO: 37127 - RNA, 20 nt, synthetic construct
  source 1..20: mol_type = other RNA
gaccttagttttcacttttg

SEQ ID NO: 37128 - RNA, 20 nt, synthetic construct
  source 1..20: mol_type = other RNA
gaccttattcaaataattgc

SEQ ID NO: 37129 - RNA, 20 nt, synthetic construct
  source 1..20: mol_type = other RNA
gaccttccttgtgtcttaaa

SEQ ID NO: 37130 - RNA, 20 nt, synthetic construct
  source 1..20: mol_type = other RNA
gaccttctacttatcttttc

SEQ ID NO: 37131 - RNA, 20 nt, synthetic construct
  source 1..20: mol_type = other RNA
gaccttgacaataaatggtg

SEQ ID NO: 37132 - RNA, 20 nt, synthetic construct
  source 1..20: mol_type = other RNA
gaccttgctcattcatctgc

SEQ ID NO: 37133 - RNA, 20 nt, synthetic construct
  source 1..20: mol_type = other RNA
gaccttgtatccagtaatct

SEQ ID NO: 37134 - RNA, 20 nt, synthetic construct
  source 1..20: mol_type = other RNA
gaccttgtgcatgtgcagga

SEQ ID NO: 37135 - RNA, 20 nt, synthetic construct
  source 1..20: mol_type = other RNA
gacctttcttaggtttctca

SEQ ID NO: 37136 - RNA, 20 nt, synthetic construct
  source 1..20: mol_type = other RNA
gacctttctttaaaagtaat

SEQ ID NO: 37137 - RNA, 20 nt, synthetic construct
  source 1..20: mol_type = other RNA
gacgaaagtgaagcccagag

SEQ ID NO: 37138 - RNA, 20 nt, synthetic construct
  source 1..20: mol_type = other RNA
gacgaagtcacattctagtg

SEQ ID NO: 37139 - RNA, 20 nt, synthetic construct
  source 1..20: mol_type = other RNA
gacgaatgcatgggaggtaa

SEQ ID NO: 37140 - RNA, 20 nt, synthetic construct
  source 1..20: mol_type = other RNA
gacgacgtatgcaacttact

SEQ ID NO: 37141 - RNA, 20 nt, synthetic construct
  source 1..20: mol_type = other RNA
gacgatattcctatcagaag

SEQ ID NO: 37142 - RNA, 20 nt, synthetic construct
  source 1..20: mol_type = other RNA
gacgatttttccaacagttt

SEQ ID NO: 37143 - RNA, 20 nt, synthetic construct
  source 1..20: mol_type = other RNA
gacgcaaaggatgtcaacaa

SEQ ID NO: 37144 - RNA, 20 nt, synthetic construct
  source 1..20: mol_type = other RNA
gacgcaggcaaacagcgcca

SEQ ID NO: 37145 - RNA, 20 nt, synthetic construct
  source 1..20: mol_type = other RNA
gacgcctttcatttggcctc

SEQ ID NO: 37146 - RNA, 20 nt, synthetic construct
  source 1..20: mol_type = other RNA
gacgcgcaacaattcaacag

SEQ ID NO: 37147 - RNA, 20 nt, synthetic construct
  source 1..20: mol_type = other RNA
gacgcgcattttttaagtgg

SEQ ID NO: 37148 - RNA, 20 nt, synthetic construct
  source 1..20: mol_type = other RNA
gacgctcttgttcaaaaacc

SEQ ID NO: 37149 - RNA, 20 nt, synthetic construct
  source 1..20: mol_type = other RNA
gacgctgatgacagttactc

SEQ ID NO: 37150 - RNA, 20 nt, synthetic construct
  source 1..20: mol_type = other RNA
gacggaaaaacattctacag

SEQ ID NO: 37151 - RNA, 20 nt, synthetic construct
  source 1..20: mol_type = other RNA
gacggaagactcatacttcc

SEQ ID NO: 37152 - RNA, 20 nt, synthetic construct
  source 1..20: mol_type = other RNA
gacggaatcttaccctgttg

SEQ ID NO: 37153 - RNA, 20 nt, synthetic construct
  source 1..20: mol_type = other RNA
gacggcgagcttgatcttta

SEQ ID NO: 37154 - RNA, 20 nt, synthetic construct
  source 1..20: mol_type = other RNA
gacggcgtttcgccatgttg

SEQ ID NO: 37155 - RNA, 20 nt, synthetic construct
  source 1..20: mol_type = other RNA
gacggctcaggcctgttgtg

SEQ ID NO: 37156 - RNA, 20 nt, synthetic construct
  source 1..20: mol_type = other RNA
gacgggtggtagggaggggg

SEQ ID NO: 37157 - RNA, 20 nt, synthetic construct
  source 1..20: mol_type = other RNA
gacgtatgcaacttactctc

SEQ ID NO: 37158 - RNA, 20 nt, synthetic construct
  source 1..20: mol_type = other RNA
gacgtgagatcatgccactc

SEQ ID NO: 37159 - RNA, 20 nt, synthetic construct
  source 1..20: mol_type = other RNA
gacgtgtacataaaataaaa

SEQ ID NO: 37160 - RNA, 20 nt, synthetic construct
  source 1..20: mol_type = other RNA
gacgttcagataacaaaggg

SEQ ID NO: 37161 - RNA, 20 nt, synthetic construct
  source 1..20: mol_type = other RNA
gacgtttaaatgagttaata

SEQ ID NO: 37162 - RNA, 20 nt, synthetic construct
  source 1..20: mol_type = other RNA
gacgtttgagttgtttccac

SEQ ID NO: 37163 - RNA, 20 nt, synthetic construct
  source 1..20: mol_type = other RNA
gactaaattgaaacaatact

SEQ ID NO: 37164 - RNA, 20 nt, synthetic construct
  source 1..20: mol_type = other RNA
gactaacagggtctacaaaa

SEQ ID NO: 37165 - RNA, 20 nt, synthetic construct
  source 1..20: mol_type = other RNA
gactaagaaaaacagaagac

SEQ ID NO: 37166 - RNA, 20 nt, synthetic construct
  source 1..20: mol_type = other RNA
gactaagacactagctattg

SEQ ID NO: 37167 - RNA, 20 nt, synthetic construct
  source 1..20: mol_type = other RNA
gactaagcagaaatgacaag

SEQ ID NO: 37168 - RNA, 20 nt, synthetic construct
  source 1..20: mol_type = other RNA
gactaatatgagttcctgct

SEQ ID NO: 37169 - RNA, 20 nt, synthetic construct
  source 1..20: mol_type = other RNA
gactaatttgaggcattagt

SEQ ID NO: 37170 - RNA, 20 nt, synthetic construct
  source 1..20: mol_type = other RNA
gactacacatacacagggaa

SEQ ID NO: 37171 - RNA, 20 nt, synthetic construct
  source 1..20: mol_type = other RNA
gactacactgaagggaattt

SEQ ID NO: 37172 - RNA, 20 nt, synthetic construct
  source 1..20: mol_type = other RNA
gactacaggtgtgaaccacg

SEQ ID NO: 37173 - RNA, 20 nt, synthetic construct
  source 1..20: mol_type = other RNA
gactaccaattctccctgaa

SEQ ID NO: 37174 - RNA, 20 nt, synthetic construct
  source 1..20: mol_type = other RNA
gactaccatctctccaacag

SEQ ID NO: 37175 - RNA, 20 nt, synthetic construct
  source 1..20: mol_type = other RNA
gactacctaaaacaatctac

SEQ ID NO: 37176 - RNA, 20 nt, synthetic construct
  source 1..20: mol_type = other RNA
gactagaagaaatgttaaca

SEQ ID NO: 37177 - RNA, 20 nt, synthetic construct
  source 1..20: mol_type = other RNA
gactagactgcctgaggtct

SEQ ID NO: 37178 - RNA, 20 nt, synthetic construct
  source 1..20: mol_type = other RNA
gactaggctcctgagaaccg

SEQ ID NO: 37179 - RNA, 20 nt, synthetic construct
  source 1..20: mol_type = other RNA
gactagtacactgttgattt

SEQ ID NO: 37180 - RNA, 20 nt, synthetic construct
  source 1..20: mol_type = other RNA
gactagtacgtgcagagcag

SEQ ID NO: 37181 - RNA, 20 nt, synthetic construct
  source 1..20: mol_type = other RNA
gactagtggctcatacttgc

SEQ ID NO: 37182 - RNA, 20 nt, synthetic construct
  source 1..20: mol_type = other RNA
gactagtgtgaatgaggagt

SEQ ID NO: 37183 - RNA, 20 nt, synthetic construct
  source 1..20: mol_type = other RNA
gactataaaactcttagctt

SEQ ID NO: 37184 - RNA, 20 nt, synthetic construct
  source 1..20: mol_type = other RNA
gactatcacgattctgaccc

SEQ ID NO: 37185 - RNA, 20 nt, synthetic construct
  source 1..20: mol_type = other RNA
gactatcgttatatcctcag

SEQ ID NO: 37186 - RNA, 20 nt, synthetic construct
  source 1..20: mol_type = other RNA
gactatctcttcctcctctg

SEQ ID NO: 37187 - RNA, 20 nt, synthetic construct
  source 1..20: mol_type = other RNA
gactatgaaaagcctcaaac

SEQ ID NO: 37188 - RNA, 20 nt, synthetic construct
  source 1..20: mol_type = other RNA
gactatgaataaatctaaca

SEQ ID NO: 37189 - RNA, 20 nt, synthetic construct
  source 1..20: mol_type = other RNA
gactatgagaaggattagtg

SEQ ID NO: 37190 - RNA, 20 nt, synthetic construct
  source 1..20: mol_type = other RNA
gactatgtaggcacattcaa

SEQ ID NO: 37191 - RNA, 20 nt, synthetic construct
  source 1..20: mol_type = other RNA
gactattatgagcagttgta

SEQ ID NO: 37192 - RNA, 20 nt, synthetic construct
  source 1..20: mol_type = other RNA
gactattttaccctcatttt

SEQ ID NO: 37193 - RNA, 20 nt, synthetic construct
  source 1..20: mol_type = other RNA
gactcaacatgtgtatttag

SEQ ID NO: 37194 - RNA, 20 nt, synthetic construct
  source 1..20: mol_type = other RNA
gactcaagcctgataagctc

SEQ ID NO: 37195 - RNA, 20 nt, synthetic construct
  source 1..20: mol_type = other RNA
gactcaataaccacatgtgg

SEQ ID NO: 37196 - RNA, 20 nt, synthetic construct
  source 1..20: mol_type = other RNA
gactcaatcttcttatttgt

SEQ ID NO: 37197 - RNA, 20 nt, synthetic construct
  source 1..20: mol_type = other RNA
gactcacagcttaccaagtg

SEQ ID NO: 37198 - RNA, 20 nt, synthetic construct
  source 1..20: mol_type = other RNA
gactcagcagttttaaagaa

SEQ ID NO: 37199 - RNA, 20 nt, synthetic construct
  source 1..20: mol_type = other RNA
gactcagggtcacttcctct

SEQ ID NO: 37200 - RNA, 20 nt, synthetic construct
  source 1..20: mol_type = other RNA
gactcagtacttccctcttt

SEQ ID NO: 37201 - RNA, 20 nt, synthetic construct
  source 1..20: mol_type = other RNA
gactcatgagagctgtgccg

SEQ ID NO: 37202 - RNA, 20 nt, synthetic construct
  source 1..20: mol_type = other RNA
gactcattccaatccttcct

SEQ ID NO: 37203 - RNA, 20 nt, synthetic construct
  source 1..20: mol_type = other RNA
gactcattgcctatagacag

SEQ ID NO: 37204 - RNA, 20 nt, synthetic construct
  source 1..20: mol_type = other RNA
gactccaaagcaaaccagac

SEQ ID NO: 37205 - RNA, 20 nt, synthetic construct
  source 1..20: mol_type = other RNA
gactccaactcaaaaaagaa

SEQ ID NO: 37206 - RNA, 20 nt, synthetic construct
  source 1..20: mol_type = other RNA
gactccaagcacacagtttg

SEQ ID NO: 37207 - RNA, 20 nt, synthetic construct
  source 1..20: mol_type = other RNA
gactccacagagttcagctt

SEQ ID NO: 37208 - RNA, 20 nt, synthetic construct
  source 1..20: mol_type = other RNA
gactccaccctgccccttat

SEQ ID NO: 37209 - RNA, 20 nt, synthetic construct
  source 1..20: mol_type = other RNA
gactccatctcaagaaaaca

SEQ ID NO: 37210 - RNA, 20 nt, synthetic construct
  source 1..20: mol_type = other RNA
gactcccaacttataatatt

SEQ ID NO: 37211 - RNA, 20 nt, synthetic construct
  source 1..20: mol_type = other RNA
gactcccatatctacatgta

SEQ ID NO: 37212 - RNA, 20 nt, synthetic construct
  source 1..20: mol_type = other RNA
gactccctttttaggtaggg

SEQ ID NO: 37213 - RNA, 20 nt, synthetic construct
  source 1..20: mol_type = other RNA
gactccggcgggagaggagc

SEQ ID NO: 37214 - RNA, 20 nt, synthetic construct
  source 1..20: mol_type = other RNA
gactcctaaaacatggtcca

SEQ ID NO: 37215 - RNA, 20 nt, synthetic construct
  source 1..20: mol_type = other RNA
gactccttcccctggtcgag

SEQ ID NO: 37216 - RNA, 20 nt, synthetic construct
  source 1..20: mol_type = other RNA
gactccttctgaaggcacta

SEQ ID NO: 37217 - RNA, 20 nt, synthetic construct
  source 1..20: mol_type = other RNA
gactcggtctcaaaacaaac

SEQ ID NO: 37218 - RNA, 20 nt, synthetic construct
  source 1..20: mol_type = other RNA
gactctaaactagttcaacc

SEQ ID NO: 37219 - RNA, 20 nt, synthetic construct
  source 1..20: mol_type = other RNA
gactctaaagtctatgctct

SEQ ID NO: 37220 - RNA, 20 nt, synthetic construct
  source 1..20: mol_type = other RNA
gactctcaagaaggtatcat

SEQ ID NO: 37221 - RNA, 20 nt, synthetic construct
  source 1..20: mol_type = other RNA
gactctgctcaaaggggcat

SEQ ID NO: 37222 - RNA, 20 nt, synthetic construct
  source 1..20: mol_type = other RNA
gactctgtgcttgtgctttt

SEQ ID NO: 37223 - RNA, 20 nt, synthetic construct
  source 1..20: mol_type = other RNA
gactcttaatattgaaacga

SEQ ID NO: 37224 - RNA, 20 nt, synthetic construct
  source 1..20: mol_type = other RNA
gactcttatggctataacca

SEQ ID NO: 37225 - RNA, 20 nt, synthetic construct
  source 1..20: mol_type = other RNA
gactcttcagaggtctgtta

SEQ ID NO: 37226 - RNA, 20 nt, synthetic construct
  source 1..20: mol_type = other RNA
gactcttgtcccggcatgcc

SEQ ID NO: 37227 - RNA, 20 nt, synthetic construct
  source 1..20: mol_type = other RNA
gactgaaaagatacagaaat

SEQ ID NO: 37228 - RNA, 20 nt, synthetic construct
  source 1..20: mol_type = other RNA
gactgaaaccagtgggtcag

SEQ ID NO: 37229 - RNA, 20 nt, synthetic construct
  source 1..20: mol_type = other RNA
gactgaaaggaaatgagtgt

SEQ ID NO: 37230 - RNA, 20 nt, synthetic construct
  source 1..20: mol_type = other RNA
gactgaaggattcctccctg

SEQ ID NO: 37231 - RNA, 20 nt, synthetic construct
  source 1..20: mol_type = other RNA
gactgaagtcctttcttggt

SEQ ID NO: 37232 - RNA, 20 nt, synthetic construct
  source 1..20: mol_type = other RNA
gactgaattaatctcttaca

SEQ ID NO: 37233 - RNA, 20 nt, synthetic construct
  source 1..20: mol_type = other RNA
gactgaattcccacaaaata

SEQ ID NO: 37234 - RNA, 20 nt, synthetic construct
  source 1..20: mol_type = other RNA
gactgacataactgtaaagt

SEQ ID NO: 37235 - RNA, 20 nt, synthetic construct
  source 1..20: mol_type = other RNA
gactgaccaacatggacaaa

SEQ ID NO: 37236 - RNA, 20 nt, synthetic construct
  source 1..20: mol_type = other RNA
gactgagacagtattgtgct

SEQ ID NO: 37237 - RNA, 20 nt, synthetic construct
  source 1..20: mol_type = other RNA
gactgagatacttaagtttt

SEQ ID NO: 37238 - RNA, 20 nt, synthetic construct
  source 1..20: mol_type = other RNA
gactgagcagtgaaagtctc

SEQ ID NO: 37239 - RNA, 20 nt, synthetic construct
  source 1..20: mol_type = other RNA
gactgagccagcaaatcaga

SEQ ID NO: 37240 - RNA, 20 nt, synthetic construct
  source 1..20: mol_type = other RNA
gactgagtaatattccattg

SEQ ID NO: 37241 - RNA, 20 nt, synthetic construct
  source 1..20: mol_type = other RNA
gactgataaacttcagtttt

SEQ ID NO: 37242 - RNA, 20 nt, synthetic construct
  source 1..20: mol_type = other RNA
gactgatgaagaacctgttc

SEQ ID NO: 37243 - RNA, 20 nt, synthetic construct
  source 1..20: mol_type = other RNA
gactgattaatttgaggtct

SEQ ID NO: 37244 - RNA, 20 nt, synthetic construct
  source 1..20: mol_type = other RNA
gactgcaacagatctgagaa

SEQ ID NO: 37245 - RNA, 20 nt, synthetic construct
  source 1..20: mol_type = other RNA
gactgcacataaaaggatat

SEQ ID NO: 37246 - RNA, 20 nt, synthetic construct
  source 1..20: mol_type = other RNA
gactgcaggtcttcaacctc

SEQ ID NO: 37247 - RNA, 20 nt, synthetic construct
  source 1..20: mol_type = other RNA
gactgcagtgacctatcatt

SEQ ID NO: 37248 - RNA, 20 nt, synthetic construct
  source 1..20: mol_type = other RNA
gactgcagttggattatatg

SEQ ID NO: 37249 - RNA, 20 nt, synthetic construct
  source 1..20: mol_type = other RNA
gactgccaggtagggagggg

SEQ ID NO: 37250 - RNA, 20 nt, synthetic construct
  source 1..20: mol_type = other RNA
gactgcctattttgtaattt

SEQ ID NO: 37251 - RNA, 20 nt, synthetic construct
  source 1..20: mol_type = other RNA
gactgcctgaggtctcaaaa

SEQ ID NO: 37252 - RNA, 20 nt, synthetic construct
  source 1..20: mol_type = other RNA
gactgcctggtcctgagggc

SEQ ID NO: 37253 - RNA, 20 nt, synthetic construct
  source 1..20: mol_type = other RNA
gactgctgtttaccaagggt

SEQ ID NO: 37254 - RNA, 20 nt, synthetic construct
  source 1..20: mol_type = other RNA
gactgcttgaggccacgagt

SEQ ID NO: 37255 - RNA, 20 nt, synthetic construct
  source 1..20: mol_type = other RNA
gactggaaaagtgttgacta

SEQ ID NO: 37256 - RNA, 20 nt, synthetic construct
  source 1..20: mol_type = other RNA
gactggaactcatttctgct

SEQ ID NO: 37257 - RNA, 20 nt, synthetic construct
  source 1..20: mol_type = other RNA
gactggactccttctgaagg

SEQ ID NO: 37258 - RNA, 20 nt, synthetic construct
  source 1..20: mol_type = other RNA
gactggagaacagtaaagtc

SEQ ID NO: 37259 - RNA, 20 nt, synthetic construct
  source 1..20: mol_type = other RNA
gactggagggatgctggagt

SEQ ID NO: 37260 - RNA, 20 nt, synthetic construct
  source 1..20: mol_type = other RNA
gactggagttcactggcaca

SEQ ID NO: 37261 - RNA, 20 nt, synthetic construct
  source 1..20: mol_type = other RNA
gactggatagcaacttgcag

SEQ ID NO: 37262 - RNA, 20 nt, synthetic construct
  source 1..20: mol_type = other RNA
gactggatcctggagggctc

SEQ ID NO: 37263 - RNA, 20 nt, synthetic construct
  source 1..20: mol_type = other RNA
gactggattaaggagatggc

SEQ ID NO: 37264 - RNA, 20 nt, synthetic construct
  source 1..20: mol_type = other RNA
gactggatttgattgggcat

SEQ ID NO: 37265 - RNA, 20 nt, synthetic construct
  source 1..20: mol_type = other RNA
gactggccatccttcccaaa

SEQ ID NO: 37266 - RNA, 20 nt, synthetic construct
  source 1..20: mol_type = other RNA
gactggcctcggccaaccat

SEQ ID NO: 37267 - RNA, 20 nt, synthetic construct
  source 1..20: mol_type = other RNA
gactggctgtgccaactctg

SEQ ID NO: 37268 - RNA, 20 nt, synthetic construct
  source 1..20: mol_type = other RNA
gactggcttaatgcatataa

SEQ ID NO: 37269 - RNA, 20 nt, synthetic construct
  source 1..20: mol_type = other RNA
gactggcttcagtgccaaca

SEQ ID NO: 37270 - RNA, 20 nt, synthetic construct
  source 1..20: mol_type = other RNA
gactgggatcctaagcatga

SEQ ID NO: 37271 - RNA, 20 nt, synthetic construct
  source 1..20: mol_type = other RNA
gactgggcaacagagacaga

SEQ ID NO: 37272 - RNA, 20 nt, synthetic construct
  source 1..20: mol_type = other RNA
gactggtgtccttctgagaa

SEQ ID NO: 37273 - RNA, 20 nt, synthetic construct
  source 1..20: mol_type = other RNA
gactgtaaaaattttctccc

SEQ ID NO: 37274 - RNA, 20 nt, synthetic construct
  source 1..20: mol_type = other RNA
gactgtaagctgaactctgt

SEQ ID NO: 37275 - RNA, 20 nt, synthetic construct
  source 1..20: mol_type = other RNA
gactgtaatgagctgagatt

SEQ ID NO: 37276 - RNA, 20 nt, synthetic construct
  source 1..20: mol_type = other RNA
gactgtagtccctgctactt

SEQ ID NO: 37277 - RNA, 20 nt, synthetic construct
  source 1..20: mol_type = other RNA
gactgtattaccagcttaca

SEQ ID NO: 37278 - RNA, 20 nt, synthetic construct
  source 1..20: mol_type = other RNA
gactgtcctgaattctaatg

SEQ ID NO: 37279 - RNA, 20 nt, synthetic construct
  source 1..20: mol_type = other RNA
gactgtcgaagcttaattta

SEQ ID NO: 37280 - RNA, 20 nt, synthetic construct
  source 1..20: mol_type = other RNA
gactgtgagggagatatttc

SEQ ID NO: 37281 - RNA, 20 nt, synthetic construct
  source 1..20: mol_type = other RNA
gactgtgagggtaagaaagg

SEQ ID NO: 37282 - RNA, 20 nt, synthetic construct
  source 1..20: mol_type = other RNA
gactgtgatgactgtaagct

SEQ ID NO: 37283 - RNA, 20 nt, synthetic construct
  source 1..20: mol_type = other RNA
gactgtgcaatgtgaaaaaa

SEQ ID NO: 37284 - RNA, 20 nt, synthetic construct
  source 1..20: mol_type = other RNA
gactgtgccttgatccatta

SEQ ID NO: 37285 - RNA, 20 nt, synthetic construct
  source 1..20: mol_type = other RNA
gactgtgcttccacagctat

SEQ ID NO: 37286 - RNA, 20 nt, synthetic construct
  source 1..20: mol_type = other RNA
gactgtgtgtgtccaggcca

SEQ ID NO: 37287 - RNA, 20 nt, synthetic construct
  source 1..20: mol_type = other RNA
gactgttagggacttatgga

SEQ ID NO: 37288 - RNA, 20 nt, synthetic construct
  source 1..20: mol_type = other RNA
gactgttgcctctgtgctag

SEQ ID NO: 37289 - RNA, 20 nt, synthetic construct
  source 1..20: mol_type = other RNA
gacttaactataggagttca

SEQ ID NO: 37290 - RNA, 20 nt, synthetic construct
  source 1..20: mol_type = other RNA
gacttaagcaacagaaattt

SEQ ID NO: 37291 - RNA, 20 nt, synthetic construct
  source 1..20: mol_type = other RNA
gacttacagaccttattcaa

SEQ ID NO: 37292 - RNA, 20 nt, synthetic construct
  source 1..20: mol_type = other RNA
gacttacagatatcacccag

SEQ ID NO: 37293 - RNA, 20 nt, synthetic construct
  source 1..20: mol_type = other RNA
gacttagagggcttcatgct

SEQ ID NO: 37294 - RNA, 20 nt, synthetic construct
  source 1..20: mol_type = other RNA
gacttaggagaaaagcttca

SEQ ID NO: 37295 - RNA, 20 nt, synthetic construct
  source 1..20: mol_type = other RNA
gacttaggcaaaggaaaaat

SEQ ID NO: 37296 - RNA, 20 nt, synthetic construct
  source 1..20: mol_type = other RNA
gacttagtgagggaggccat

SEQ ID NO: 37297 - RNA, 20 nt, synthetic construct
  source 1..20: mol_type = other RNA
gacttatggagataaattac

SEQ ID NO: 37298 - RNA, 20 nt, synthetic construct
  source 1..20: mol_type = other RNA
gacttcaaactatacttcaa

SEQ ID NO: 37299 - RNA, 20 nt, synthetic construct
  source 1..20: mol_type = other RNA
gacttcaacggacatttttc

SEQ ID NO: 37300 - RNA, 20 nt, synthetic construct
  source 1..20: mol_type = other RNA
gacttcaagaggttaaaacc

SEQ ID NO: 37301 - RNA, 20 nt, synthetic construct
  source 1..20: mol_type = other RNA
gacttcacgatgcttaggta

SEQ ID NO: 37302 - RNA, 20 nt, synthetic construct
  source 1..20: mol_type = other RNA
gacttcactagatctctttt

SEQ ID NO: 37303 - RNA, 20 nt, synthetic construct
  source 1..20: mol_type = other RNA
gacttcactagtgggtcggg

SEQ ID NO: 37304 - RNA, 20 nt, synthetic construct
  source 1..20: mol_type = other RNA
gacttcactggagaattcta

SEQ ID NO: 37305 - RNA, 20 nt, synthetic construct
  source 1..20: mol_type = other RNA
gacttcacttccaagtcccg

SEQ ID NO: 37306 - RNA, 20 nt, synthetic construct
  source 1..20: mol_type = other RNA
gacttcaggaacaccttgaa

SEQ ID NO: 37307 - RNA, 20 nt, synthetic construct
  source 1..20: mol_type = other RNA
gacttcagtccttaccactg

SEQ ID NO: 37308 - RNA, 20 nt, synthetic construct
  source 1..20: mol_type = other RNA
gacttcatgtacaatgaatt

SEQ ID NO: 37309 - RNA, 20 nt, synthetic construct
  source 1..20: mol_type = other RNA
gacttcattcttgacatgat

SEQ ID NO: 37310 - RNA, 20 nt, synthetic construct
  source 1..20: mol_type = other RNA
gacttcctattttataatgg

SEQ ID NO: 37311 - RNA, 20 nt, synthetic construct
  source 1..20: mol_type = other RNA
gacttcctggctctagccca

SEQ ID NO: 37312 - RNA, 20 nt, synthetic construct
  source 1..20: mol_type = other RNA
gacttcgtcaaggggagagg

SEQ ID NO: 37313 - RNA, 20 nt, synthetic construct
  source 1..20: mol_type = other RNA
gacttctagcctccagaaaa

SEQ ID NO: 37314 - RNA, 20 nt, synthetic construct
  source 1..20: mol_type = other RNA
gacttctcaaacaggataca

SEQ ID NO: 37315 - RNA, 20 nt, synthetic construct
  source 1..20: mol_type = other RNA
gacttctcagggcctgcttt

SEQ ID NO: 37316 - RNA, 20 nt, synthetic construct
  source 1..20: mol_type = other RNA
gacttctctcagagggaaac

SEQ ID NO: 37317 - RNA, 20 nt, synthetic construct
  source 1..20: mol_type = other RNA
gacttctggatgtgtatgat

SEQ ID NO: 37318 - RNA, 20 nt, synthetic construct
  source 1..20: mol_type = other RNA
gacttgaggtttacttgggg

SEQ ID NO: 37319 - RNA, 20 nt, synthetic construct
  source 1..20: mol_type = other RNA
gacttgatctaaaatggaag

SEQ ID NO: 37320 - RNA, 20 nt, synthetic construct
  source 1..20: mol_type = other RNA
gacttgctctcttgcccaag

SEQ ID NO: 37321 - RNA, 20 nt, synthetic construct
  source 1..20: mol_type = other RNA
gacttggaagtgaagtcaag

SEQ ID NO: 37322 - RNA, 20 nt, synthetic construct
  source 1..20: mol_type = other RNA
gacttggcacaggagagcga

SEQ ID NO: 37323 - RNA, 20 nt, synthetic construct
  source 1..20: mol_type = other RNA
gacttgtttattttacttag

SEQ ID NO: 37324 - RNA, 20 nt, synthetic construct
  source 1..20: mol_type = other RNA
gactttaccctgctggaacg

SEQ ID NO: 37325 - RNA, 20 nt, synthetic construct
  source 1..20: mol_type = other RNA
gactttactgttctccagtc

SEQ ID NO: 37326 - RNA, 20 nt, synthetic construct
  source 1..20: mol_type = other RNA
gactttagagtcagttgttt

SEQ ID NO: 37327 - RNA, 20 nt, synthetic construct
  source 1..20: mol_type = other RNA
gactttaggctgttcaattt

SEQ ID NO: 37328 - RNA, 20 nt, synthetic construct
  source 1..20: mol_type = other RNA
gactttatggtaattggttc

SEQ ID NO: 37329 - RNA, 20 nt, synthetic construct
  source 1..20: mol_type = other RNA
gactttatggtatcactttt

SEQ ID NO: 37330 - RNA, 20 nt, synthetic construct
  source 1..20: mol_type = other RNA
gactttatgtggaaaaatat

SEQ ID NO: 37331 - RNA, 20 nt, synthetic construct
  source 1..20: mol_type = other RNA
gactttcactgctcagtccc

SEQ ID NO: 37332 - RNA, 20 nt, synthetic construct
  source 1..20: mol_type = other RNA
gactttcatttgtaattcat

SEQ ID NO: 37333 - RNA, 20 nt, synthetic construct
  source 1..20: mol_type = other RNA
gactttgatgttttacattt

SEQ ID NO: 37334 - RNA, 20 nt, synthetic construct
  source 1..20: mol_type = other RNA
gactttgtggcctcttccct

SEQ ID NO: 37335 - RNA, 20 nt, synthetic construct
  source 1..20: mol_type = other RNA
gactttgttttgtttttctc

SEQ ID NO: 37336 - RNA, 20 nt, synthetic construct
  source 1..20: mol_type = other RNA
gacttttaaaatatgtggaa

SEQ ID NO: 37337 - RNA, 20 nt, synthetic construct
  source 1..20: mol_type = other RNA
gacttttatcaattcacaag

SEQ ID NO: 37338 - RNA, 20 nt, synthetic construct
  source 1..20: mol_type = other RNA
gacttttccttaaaaaaggt

SEQ ID NO: 37339 - RNA, 20 nt, synthetic construct
  source 1..20: mol_type = other RNA
gacttttggtacacatcttt

SEQ ID NO: 37340 - RNA, 20 nt, synthetic construct
  source 1..20: mol_type = other RNA
gacttttttgcccactctta

SEQ ID NO: 37341 - RNA, 20 nt, synthetic construct
  source 1..20: mol_type = other RNA
gagaaaaacaaaacaaagtc

SEQ ID NO: 37342 - RNA, 20 nt, synthetic construct
  source 1..20: mol_type = other RNA
gagaaaaatggggatatcca

SEQ ID NO: 37343 - RNA, 20 nt, synthetic construct
  source 1..20: mol_type = other RNA
gagaaaaattacaggtcaaa

SEQ ID NO: 37344 - RNA, 20 nt, synthetic construct
  source 1..20: mol_type = other RNA
gagaaaacaaaaagaaacta

SEQ ID NO: 37345 - RNA, 20 nt, synthetic construct
  source 1..20: mol_type = other RNA
gagaaaagcacaggcatcgg

SEQ ID NO: 37346 - RNA, 20 nt, synthetic construct
  source 1..20: mol_type = other RNA
gagaaaagcttcataacatt

SEQ ID NO: 37347 - RNA, 20 nt, synthetic construct
  source 1..20: mol_type = other RNA
gagaaaatgttatacagcaa

SEQ ID NO: 37348 - RNA, 20 nt, synthetic construct
  source 1..20: mol_type = other RNA
gagaaaattgttcatgaaat

SEQ ID NO: 37349 - RNA, 20 nt, synthetic construct
  source 1..20: mol_type = other RNA
gagaaacaggattacaatgt

SEQ ID NO: 37350 - RNA, 20 nt, synthetic construct
  source 1..20: mol_type = other RNA
gagaaacatacatgttcagt

SEQ ID NO: 37351 - RNA, 20 nt, synthetic construct
  source 1..20: mol_type = other RNA
gagaaacatggcttagaaat

SEQ ID NO: 37352 - RNA, 20 nt, synthetic construct
  source 1..20: mol_type = other RNA
gagaaaccatttacccctta

SEQ ID NO: 37353 - RNA, 20 nt, synthetic construct
  source 1..20: mol_type = other RNA
gagaaacctaagaaaggtct

SEQ ID NO: 37354 - RNA, 20 nt, synthetic construct
  source 1..20: mol_type = other RNA
gagaaaccttggtgtgcttc

SEQ ID NO: 37355 - RNA, 20 nt, synthetic construct
  source 1..20: mol_type = other RNA
gagaaactatccaacatgcc

SEQ ID NO: 37356 - RNA, 20 nt, synthetic construct
  source 1..20: mol_type = other RNA
gagaaactggaatcaatcca

SEQ ID NO: 37357 - RNA, 20 nt, synthetic construct
  source 1..20: mol_type = other RNA
gagaaactttacactttaaa

SEQ ID NO: 37358 - RNA, 20 nt, synthetic construct
  source 1..20: mol_type = other RNA
gagaaagaagtaatttcttc

SEQ ID NO: 37359 - RNA, 20 nt, synthetic construct
  source 1..20: mol_type = other RNA
gagaaagaccaagagtgtgg

SEQ ID NO: 37360 - RNA, 20 nt, synthetic construct
  source 1..20: mol_type = other RNA
gagaaagagagagacaagca

SEQ ID NO: 37361 - RNA, 20 nt, synthetic construct
  source 1..20: mol_type = other RNA
gagaaagagggaagtactga

SEQ ID NO: 37362 - RNA, 20 nt, synthetic construct
  source 1..20: mol_type = other RNA
gagaaagcacataaaaaagg

SEQ ID NO: 37363 - RNA, 20 nt, synthetic construct
  source 1..20: mol_type = other RNA
gagaaagcatcagagctttg

SEQ ID NO: 37364 - RNA, 20 nt, synthetic construct
  source 1..20: mol_type = other RNA
gagaaagcccagccgcggac

SEQ ID NO: 37365 - RNA, 20 nt, synthetic construct
  source 1..20: mol_type = other RNA
gagaaagctaatttggaatt

SEQ ID NO: 37366 - RNA, 20 nt, synthetic construct
  source 1..20: mol_type = other RNA
gagaaaggcgaagcggcagg

SEQ ID NO: 37367 - RNA, 20 nt, synthetic construct
  source 1..20: mol_type = other RNA
gagaaaggtttcttcactct

SEQ ID NO: 37368 - RNA, 20 nt, synthetic construct
  source 1..20: mol_type = other RNA
gagaaatacttggacagggg

SEQ ID NO: 37369 - RNA, 20 nt, synthetic construct
  source 1..20: mol_type = other RNA
gagaaatagttaacgtttat

SEQ ID NO: 37370 - RNA, 20 nt, synthetic construct
  source 1..20: mol_type = other RNA
gagaaatcggaactcctgta

SEQ ID NO: 37371 - RNA, 20 nt, synthetic construct
  source 1..20: mol_type = other RNA
gagaaatgtctggtttgctt

SEQ ID NO: 37372 - RNA, 20 nt, synthetic construct
  source 1..20: mol_type = other RNA
gagaaatgttaagattcaac

SEQ ID NO: 37373 - RNA, 20 nt, synthetic construct
  source 1..20: mol_type = other RNA
gagaacaaaacaagaagaaa

SEQ ID NO: 37374 - RNA, 20 nt, synthetic construct
  source 1..20: mol_type = other RNA
gagaacaaaatacctgggaa

SEQ ID NO: 37375 - RNA, 20 nt, synthetic construct
  source 1..20: mol_type = other RNA
gagaacaatggaatagaagg

SEQ ID NO: 37376 - RNA, 20 nt, synthetic construct
  source 1..20: mol_type = other RNA
gagaacacacaatttgaggt

SEQ ID NO: 37377 - RNA, 20 nt, synthetic construct
  source 1..20: mol_type = other RNA
gagaacagcattatcttaat

SEQ ID NO: 37378 - RNA, 20 nt, synthetic construct
  source 1..20: mol_type = other RNA
gagaacagtaaagtcactgt

SEQ ID NO: 37379 - RNA, 20 nt, synthetic construct
  source 1..20: mol_type = other RNA
gagaacattggtttgaaatg

SEQ ID NO: 37380 - RNA, 20 nt, synthetic construct
  source 1..20: mol_type = other RNA
gagaacccaggaacagattc

SEQ ID NO: 37381 - RNA, 20 nt, synthetic construct
  source 1..20: mol_type = other RNA
gagaacccagtgtctgctac

SEQ ID NO: 37382 - RNA, 20 nt, synthetic construct
  source 1..20: mol_type = other RNA
gagaaccggaacttgagttt

SEQ ID NO: 37383 - RNA, 20 nt, synthetic construct
  source 1..20: mol_type = other RNA
gagaactgactgaaggattc

SEQ ID NO: 37384 - RNA, 20 nt, synthetic construct
  source 1..20: mol_type = other RNA
gagaactgcctggacccggg

SEQ ID NO: 37385 - RNA, 20 nt, synthetic construct
  source 1..20: mol_type = other RNA
gagaacttaaaggtttggag

SEQ ID NO: 37386 - RNA, 20 nt, synthetic construct
  source 1..20: mol_type = other RNA
gagaacttcagtatatattt

SEQ ID NO: 37387 - RNA, 20 nt, synthetic construct
  source 1..20: mol_type = other RNA
gagaacttgcacataatata

SEQ ID NO: 37388 - RNA, 20 nt, synthetic construct
  source 1..20: mol_type = other RNA
gagaacttgtctcggattta

SEQ ID NO: 37389 - RNA, 20 nt, synthetic construct
  source 1..20: mol_type = other RNA
gagaagaaataaacgacacc

SEQ ID NO: 37390 - RNA, 20 nt, synthetic construct
  source 1..20: mol_type = other RNA
gagaagaatgagaaacatac

SEQ ID NO: 37391 - RNA, 20 nt, synthetic construct
  source 1..20: mol_type = other RNA
gagaagactaagcagaaatg

SEQ ID NO: 37392 - RNA, 20 nt, synthetic construct
  source 1..20: mol_type = other RNA
gagaagactggaaaagtgtt

SEQ ID NO: 37393 - RNA, 20 nt, synthetic construct
  source 1..20: mol_type = other RNA
gagaagagctgtaacagagg

SEQ ID NO: 37394 - RNA, 20 nt, synthetic construct
  source 1..20: mol_type = other RNA
gagaagagggggcataacat

SEQ ID NO: 37395 - RNA, 20 nt, synthetic construct
  source 1..20: mol_type = other RNA
gagaagagttctgaaggctc

SEQ ID NO: 37396 - RNA, 20 nt, synthetic construct
  source 1..20: mol_type = other RNA
gagaagatgacatttgcttt

SEQ ID NO: 37397 - RNA, 20 nt, synthetic construct
  source 1..20: mol_type = other RNA
gagaagcagaaaatcagtgt

SEQ ID NO: 37398 - RNA, 20 nt, synthetic construct
  source 1..20: mol_type = other RNA
gagaagccacacagtacaag

SEQ ID NO: 37399 - RNA, 20 nt, synthetic construct
  source 1..20: mol_type = other RNA
gagaaggaagcaccaaccct

SEQ ID NO: 37400 - RNA, 20 nt, synthetic construct
  source 1..20: mol_type = other RNA
gagaaggacagcttccaccc

SEQ ID NO: 37401 - RNA, 20 nt, synthetic construct
  source 1..20: mol_type = other RNA
gagaaggccttccacggaat

SEQ ID NO: 37402 - RNA, 20 nt, synthetic construct
  source 1..20: mol_type = other RNA
gagaaggcgaaatgtgaaca

SEQ ID NO: 37403 - RNA, 20 nt, synthetic construct
  source 1..20: mol_type = other RNA
gagaaggctgccagcaccag

SEQ ID NO: 37404 - RNA, 20 nt, synthetic construct
  source 1..20: mol_type = other RNA
gagaaggctttgtgttggtg

SEQ ID NO: 37405 - RNA, 20 nt, synthetic construct
  source 1..20: mol_type = other RNA
gagaagggaagtaaagatca

SEQ ID NO: 37406 - RNA, 20 nt, synthetic construct
  source 1..20: mol_type = other RNA
gagaagtaacattacaacag

SEQ ID NO: 37407 - RNA, 20 nt, synthetic construct
  source 1..20: mol_type = other RNA
gagaagtcaaagcctgtgga

SEQ ID NO: 37408 - RNA, 20 nt, synthetic construct
  source 1..20: mol_type = other RNA
gagaagtcagactaagacac

SEQ ID NO: 37409 - RNA, 20 nt, synthetic construct
  source 1..20: mol_type = other RNA
gagaagtcttttcctaccct

SEQ ID NO: 37410 - RNA, 20 nt, synthetic construct
  source 1..20: mol_type = other RNA
gagaagtgaagcttcaaacc

SEQ ID NO: 37411 - RNA, 20 nt, synthetic construct
  source 1..20: mol_type = other RNA
gagaagttttccaggaaaag

SEQ ID NO: 37412 - RNA, 20 nt, synthetic construct
  source 1..20: mol_type = other RNA
gagaatagcagaaacacagg

SEQ ID NO: 37413 - RNA, 20 nt, synthetic construct
  source 1..20: mol_type = other RNA
gagaatctgggaggtggagg

SEQ ID NO: 37414 - RNA, 20 nt, synthetic construct
  source 1..20: mol_type = other RNA
gagaatcttaaaataccaga

SEQ ID NO: 37415 - RNA, 20 nt, synthetic construct
  source 1..20: mol_type = other RNA
gagaatggaaacttgccatc

SEQ ID NO: 37416 - RNA, 20 nt, synthetic construct
  source 1..20: mol_type = other RNA
gagaatggcaaggctaacag

SEQ ID NO: 37417 - RNA, 20 nt, synthetic construct
  source 1..20: mol_type = other RNA
gagaatggcatgaacccacc

SEQ ID NO: 37418 - RNA, 20 nt, synthetic construct
  source 1..20: mol_type = other RNA
gagaatggctggaatggtga

SEQ ID NO: 37419 - RNA, 20 nt, synthetic construct
  source 1..20: mol_type = other RNA
gagaattactaaaattccaa

SEQ ID NO: 37420 - RNA, 20 nt, synthetic construct
  source 1..20: mol_type = other RNA
gagaattcagagtggctaat

SEQ ID NO: 37421 - RNA, 20 nt, synthetic construct
  source 1..20: mol_type = other RNA
gagaattcattgttgtgtgt

SEQ ID NO: 37422 - RNA, 20 nt, synthetic construct
  source 1..20: mol_type = other RNA
gagaattctaaattgcctat

SEQ ID NO: 37423 - RNA, 20 nt, synthetic construct
  source 1..20: mol_type = other RNA
gagaattctactaaacatta

SEQ ID NO: 37424 - RNA, 20 nt, synthetic construct
  source 1..20: mol_type = other RNA
gagaattggtagtcaatgca

SEQ ID NO: 37425 - RNA, 20 nt, synthetic construct
  source 1..20: mol_type = other RNA
gagaatttcagaaagagaat

SEQ ID NO: 37426 - RNA, 20 nt, synthetic construct
  source 1..20: mol_type = other RNA
gagaatttcaggtgtgtaaa

SEQ ID NO: 37427 - RNA, 20 nt, synthetic construct
  source 1..20: mol_type = other RNA
gagacaaagcataaaatatg

SEQ ID NO: 37428 - RNA, 20 nt, synthetic construct
  source 1..20: mol_type = other RNA
gagacaagcacaggcatctc

SEQ ID NO: 37429 - RNA, 20 nt, synthetic construct
  source 1..20: mol_type = other RNA
gagacaagttctcctgtgtg

SEQ ID NO: 37430 - RNA, 20 nt, synthetic construct
  source 1..20: mol_type = other RNA
gagacacacatcagacacct

SEQ ID NO: 37431 - RNA, 20 nt, synthetic construct
  source 1..20: mol_type = other RNA
gagacacacgagtattcaag

SEQ ID NO: 37432 - RNA, 20 nt, synthetic construct
  source 1..20: mol_type = other RNA
gagacacatactgaaagaca

SEQ ID NO: 37433 - RNA, 20 nt, synthetic construct
  source 1..20: mol_type = other RNA
gagacacctacaatattaac

SEQ ID NO: 37434 - RNA, 20 nt, synthetic construct
  source 1..20: mol_type = other RNA
gagacacggtctcacactgt

SEQ ID NO: 37435 - RNA, 20 nt, synthetic construct
  source 1..20: mol_type = other RNA
gagacactagggactggcct

SEQ ID NO: 37436 - RNA, 20 nt, synthetic construct
  source 1..20: mol_type = other RNA
gagacagaatcttactggtg

SEQ ID NO: 37437 - RNA, 20 nt, synthetic construct
  source 1..20: mol_type = other RNA
gagacagaccctggcttgtg

SEQ ID NO: 37438 - RNA, 20 nt, synthetic construct
  source 1..20: mol_type = other RNA
gagacagattctctgtctct

SEQ ID NO: 37439 - RNA, 20 nt, synthetic construct
  source 1..20: mol_type = other RNA
gagacagcctaaaccatttt

SEQ ID NO: 37440 - RNA, 20 nt, synthetic construct
  source 1..20: mol_type = other RNA
gagacaggatccagatgtag

SEQ ID NO: 37441 - RNA, 20 nt, synthetic construct
  source 1..20: mol_type = other RNA
gagacagggtctcactctta

SEQ ID NO: 37442 - RNA, 20 nt, synthetic construct
  source 1..20: mol_type = other RNA
gagacagtattgtgctgaaa

SEQ ID NO: 37443 - RNA, 20 nt, synthetic construct
  source 1..20: mol_type = other RNA
gagacagtgagcatgctgca

SEQ ID NO: 37444 - RNA, 20 nt, synthetic construct
  source 1..20: mol_type = other RNA
gagacatcacaatgcgtttg

SEQ ID NO: 37445 - RNA, 20 nt, synthetic construct
  source 1..20: mol_type = other RNA
gagacatctgagacatcaca

SEQ ID NO: 37446 - RNA, 20 nt, synthetic construct
  source 1..20: mol_type = other RNA
gagacattacaattgatacc

SEQ ID NO: 37447 - RNA, 20 nt, synthetic construct
  source 1..20: mol_type = other RNA
gagacatttgagggtgctga

SEQ ID NO: 37448 - RNA, 20 nt, synthetic construct
  source 1..20: mol_type = other RNA
gagaccaaatgcataaaaat

SEQ ID NO: 37449 - RNA, 20 nt, synthetic construct
  source 1..20: mol_type = other RNA
gagaccacagacgtgcagca

SEQ ID NO: 37450 - RNA, 20 nt, synthetic construct
  source 1..20: mol_type = other RNA
gagaccacaggctctcttca

SEQ ID NO: 37451 - RNA, 20 nt, synthetic construct
  source 1..20: mol_type = other RNA
gagaccaccacacttgcttg

SEQ ID NO: 37452 - RNA, 20 nt, synthetic construct
  source 1..20: mol_type = other RNA
gagaccaggagttcttatga

SEQ ID NO: 37453 - RNA, 20 nt, synthetic construct
  source 1..20: mol_type = other RNA
gagaccagttaggaagccac

SEQ ID NO: 37454 - RNA, 20 nt, synthetic construct
  source 1..20: mol_type = other RNA
gagacccatactcagccccc

SEQ ID NO: 37455 - RNA, 20 nt, synthetic construct
  source 1..20: mol_type = other RNA
gagaccccatctctaccaaa

SEQ ID NO: 37456 - RNA, 20 nt, synthetic construct
  source 1..20: mol_type = other RNA
gagaccggatgaggtggctc

SEQ ID NO: 37457 - RNA, 20 nt, synthetic construct
  source 1..20: mol_type = other RNA
gagaccgtggggggagggag

SEQ ID NO: 37458 - RNA, 20 nt, synthetic construct
  source 1..20: mol_type = other RNA
gagacctactaaaagttgac

SEQ ID NO: 37459 - RNA, 20 nt, synthetic construct
  source 1..20: mol_type = other RNA
gagacctcaggcagtctagt

SEQ ID NO: 37460 - RNA, 20 nt, synthetic construct
  source 1..20: mol_type = other RNA
gagacctcatctctgcaaaa

SEQ ID NO: 37461 - RNA, 20 nt, synthetic construct
  source 1..20: mol_type = other RNA
gagacctcatcttagccggg

SEQ ID NO: 37462 - RNA, 20 nt, synthetic construct
  source 1..20: mol_type = other RNA
gagacctgaagactggattt

SEQ ID NO: 37463 - RNA, 20 nt, synthetic construct
  source 1..20: mol_type = other RNA
gagacctgattcttccacta

SEQ ID NO: 37464 - RNA, 20 nt, synthetic construct
  source 1..20: mol_type = other RNA
gagacctttctttaaaagta

SEQ ID NO: 37465 - RNA, 20 nt, synthetic construct
  source 1..20: mol_type = other RNA
gagacggaagactcatactt

SEQ ID NO: 37466 - RNA, 20 nt, synthetic construct
  source 1..20: mol_type = other RNA
gagacggaatcttaccctgt

SEQ ID NO: 37467 - RNA, 20 nt, synthetic construct
  source 1..20: mol_type = other RNA
gagacggcgagcttgatctt

SEQ ID NO: 37468 - RNA, 20 nt, synthetic construct
  source 1..20: mol_type = other RNA
gagactagtacactgttgat

SEQ ID NO: 37469 - RNA, 20 nt, synthetic construct
  source 1..20: mol_type = other RNA
gagactatcgttatatcctc

SEQ ID NO: 37470 - RNA, 20 nt, synthetic construct
  source 1..20: mol_type = other RNA
gagactatctcttcctcctc

SEQ ID NO: 37471 - RNA, 20 nt, synthetic construct
  source 1..20: mol_type = other RNA
gagactattatgagcagttg

SEQ ID NO: 37472 - RNA, 20 nt, synthetic construct
  source 1..20: mol_type = other RNA
gagactccaactcaaaaaag

SEQ ID NO: 37473 - RNA, 20 nt, synthetic construct
  source 1..20: mol_type = other RNA
gagactctcaagaaggtatc

SEQ ID NO: 37474 - RNA, 20 nt, synthetic construct
  source 1..20: mol_type = other RNA
gagactcttaatattgaaac

SEQ ID NO: 37475 - RNA, 20 nt, synthetic construct
  source 1..20: mol_type = other RNA
gagactgagtaatattccat

SEQ ID NO: 37476 - RNA, 20 nt, synthetic construct
  source 1..20: mol_type = other RNA
gagactgataaacttcagtt

SEQ ID NO: 37477 - RNA, 20 nt, synthetic construct
  source 1..20: mol_type = other RNA
gagactgcagtgacctatca

SEQ ID NO: 37478 - RNA, 20 nt, synthetic construct
  source 1..20: mol_type = other RNA
gagactggatagcaacttgc

SEQ ID NO: 37479 - RNA, 20 nt, synthetic construct
  source 1..20: mol_type = other RNA
gagactggatcctggagggc

SEQ ID NO: 37480 - RNA, 20 nt, synthetic construct
  source 1..20: mol_type = other RNA
gagactgtaatgagctgaga

SEQ ID NO: 37481 - RNA, 20 nt, synthetic construct
  source 1..20: mol_type = other RNA
gagactgtgcaatgtgaaaa

SEQ ID NO: 37482 - RNA, 20 nt, synthetic construct
  source 1..20: mol_type = other RNA
gagactgtgcttccacagct

SEQ ID NO: 37483 - RNA, 20 nt, synthetic construct
  source 1..20: mol_type = other RNA
gagactgttagggacttatg

SEQ ID NO: 37484 - RNA, 20 nt, synthetic construct
  source 1..20: mol_type = other RNA
gagacttagatttatttaga

SEQ ID NO: 37485 - RNA, 20 nt, synthetic construct
  source 1..20: mol_type = other RNA
gagacttaggcaaaggaaaa

SEQ ID NO: 37486 - RNA, 20 nt, synthetic construct
  source 1..20: mol_type = other RNA
gagactttcactgctcagtc

SEQ ID NO: 37487 - RNA, 20 nt, synthetic construct
  source 1..20: mol_type = other RNA
gagagaaaaacaaaacaaag

SEQ ID NO: 37488 - RNA, 20 nt, synthetic construct
  source 1..20: mol_type = other RNA
gagagaaaattgttcatgaa

SEQ ID NO: 37489 - RNA, 20 nt, synthetic construct
  source 1..20: mol_type = other RNA
gagagaaaccttggtgtgct

SEQ ID NO: 37490 - RNA, 20 nt, synthetic construct
  source 1..20: mol_type = other RNA
gagagaaactttacacttta

SEQ ID NO: 37491 - RNA, 20 nt, synthetic construct
  source 1..20: mol_type = other RNA
gagagaaagagagagacaag

SEQ ID NO: 37492 - RNA, 20 nt, synthetic construct
  source 1..20: mol_type = other RNA
gagagaagagggggcataac

SEQ ID NO: 37493 - RNA, 20 nt, synthetic construct
  source 1..20: mol_type = other RNA
gagagaagatgacatttgct

SEQ ID NO: 37494 - RNA, 20 nt, synthetic construct
  source 1..20: mol_type = other RNA
gagagaaggctgccagcacc

SEQ ID NO: 37495 - RNA, 20 nt, synthetic construct
  source 1..20: mol_type = other RNA
gagagaagtcagactaagac

SEQ ID NO: 37496 - RNA, 20 nt, synthetic construct
  source 1..20: mol_type = other RNA
gagagaattctaaattgcct

SEQ ID NO: 37497 - RNA, 20 nt, synthetic construct
  source 1..20: mol_type = other RNA
gagagacaagcacaggcatc

SEQ ID NO: 37498 - RNA, 20 nt, synthetic construct
  source 1..20: mol_type = other RNA
gagagacctgaagactggat

SEQ ID NO: 37499 - RNA, 20 nt, synthetic construct
  source 1..20: mol_type = other RNA
gagagacctttctttaaaag

SEQ ID NO: 37500 - RNA, 20 nt, synthetic construct
  source 1..20: mol_type = other RNA
gagagagaaactttacactt

SEQ ID NO: 37501 - RNA, 20 nt, synthetic construct
  source 1..20: mol_type = other RNA
gagagagaaagagagagaca

SEQ ID NO: 37502 - RNA, 20 nt, synthetic construct
  source 1..20: mol_type = other RNA
gagagagaagatgacatttg

SEQ ID NO: 37503 - RNA, 20 nt, synthetic construct
  source 1..20: mol_type = other RNA
gagagagaattctaaattgc

SEQ ID NO: 37504 - RNA, 20 nt, synthetic construct
  source 1..20: mol_type = other RNA
gagagagacaagcacaggca

SEQ ID NO: 37505 - RNA, 20 nt, synthetic construct
  source 1..20: mol_type = other RNA
gagagagacctttctttaaa

SEQ ID NO: 37506 - RNA, 20 nt, synthetic construct
  source 1..20: mol_type = other RNA
gagagagagaaagagagaga

SEQ ID NO: 37507 - RNA, 20 nt, synthetic construct
  source 1..20: mol_type = other RNA
gagagagataaaacctggaa

SEQ ID NO: 37508 - RNA, 20 nt, synthetic construct
  source 1..20: mol_type = other RNA
gagagaggggggaagctttt

SEQ ID NO: 37509 - RNA, 20 nt, synthetic construct
  source 1..20: mol_type = other RNA
gagagagtaactggtccaga

SEQ ID NO: 37510 - RNA, 20 nt, synthetic construct
  source 1..20: mol_type = other RNA
gagagataaaacctggaatg

SEQ ID NO: 37511 - RNA, 20 nt, synthetic construct
  source 1..20: mol_type = other RNA
gagagatagaaagcaccagg

SEQ ID NO: 37512 - RNA, 20 nt, synthetic construct
  source 1..20: mol_type = other RNA
gagagatgaatggataagga

SEQ ID NO: 37513 - RNA, 20 nt, synthetic construct
  source 1..20: mol_type = other RNA
gagagatgcctatgaaatct

SEQ ID NO: 37514 - RNA, 20 nt, synthetic construct
  source 1..20: mol_type = other RNA
gagagatgcctgtgcttgtc

SEQ ID NO: 37515 - RNA, 20 nt, synthetic construct
  source 1..20: mol_type = other RNA
gagagatggtagtcaacact

SEQ ID NO: 37516 - RNA, 20 nt, synthetic construct
  source 1..20: mol_type = other RNA
gagagatggtgggagaggca

SEQ ID NO: 37517 - RNA, 20 nt, synthetic construct
  source 1..20: mol_type = other RNA
gagagattaaataacttcca

SEQ ID NO: 37518 - RNA, 20 nt, synthetic construct
  source 1..20: mol_type = other RNA
gagagattcaagaaaccaca

SEQ ID NO: 37519 - RNA, 20 nt, synthetic construct
  source 1..20: mol_type = other RNA
gagagcaagactcaaatctc

SEQ ID NO: 37520 - RNA, 20 nt, synthetic construct
  source 1..20: mol_type = other RNA
gagagcaagtccccatctcc

SEQ ID NO: 37521 - RNA, 20 nt, synthetic construct
  source 1..20: mol_type = other RNA
gagagcactggtttcagtac

SEQ ID NO: 37522 - RNA, 20 nt, synthetic construct
  source 1..20: mol_type = other RNA
gagagcagagacacacatca

SEQ ID NO: 37523 - RNA, 20 nt, synthetic construct
  source 1..20: mol_type = other RNA
gagagcattgcctttattac

SEQ ID NO: 37524 - RNA, 20 nt, synthetic construct
  source 1..20: mol_type = other RNA
gagagcctgtggtctcttcg

SEQ ID NO: 37525 - RNA, 20 nt, synthetic construct
  source 1..20: mol_type = other RNA
gagagcgacagctacggagg

SEQ ID NO: 37526 - RNA, 20 nt, synthetic construct
  source 1..20: mol_type = other RNA
gagagctaagggaagttttt

SEQ ID NO: 37527 - RNA, 20 nt, synthetic construct
  source 1..20: mol_type = other RNA
gagagctcaggccagtgagt

SEQ ID NO: 37528 - RNA, 20 nt, synthetic construct
  source 1..20: mol_type = other RNA
gagagctgtgccgaggcaga

SEQ ID NO: 37529 - RNA, 20 nt, synthetic construct
  source 1..20: mol_type = other RNA
gagagctttcttttaaagac

SEQ ID NO: 37530 - RNA, 20 nt, synthetic construct
  source 1..20: mol_type = other RNA
gagaggaagtgaccctgagt

SEQ ID NO: 37531 - RNA, 20 nt, synthetic construct
  source 1..20: mol_type = other RNA
gagaggaataaatggtagct

SEQ ID NO: 37532 - RNA, 20 nt, synthetic construct
  source 1..20: mol_type = other RNA
gagaggacagttggccttga

SEQ ID NO: 37533 - RNA, 20 nt, synthetic construct
  source 1..20: mol_type = other RNA
gagaggactgcctggtcctg

SEQ ID NO: 37534 - RNA, 20 nt, synthetic construct
  source 1..20: mol_type = other RNA
gagaggagcgccctggcatt

SEQ ID NO: 37535 - RNA, 20 nt, synthetic construct
  source 1..20: mol_type = other RNA
gagaggcaaaggccgctctt

SEQ ID NO: 37536 - RNA, 20 nt, synthetic construct
  source 1..20: mol_type = other RNA
gagaggcatgccgggacaag

SEQ ID NO: 37537 - RNA, 20 nt, synthetic construct
  source 1..20: mol_type = other RNA
gagaggcctcatgtattttc

SEQ ID NO: 37538 - RNA, 20 nt, synthetic construct
  source 1..20: mol_type = other RNA
gagaggctaggtgacctgcc

SEQ ID NO: 37539 - RNA, 20 nt, synthetic construct
  source 1..20: mol_type = other RNA
gagaggctttaagcagaaag

SEQ ID NO: 37540 - RNA, 20 nt, synthetic construct
  source 1..20: mol_type = other RNA
gagaggctttttattagatt

SEQ ID NO: 37541 - RNA, 20 nt, synthetic construct
  source 1..20: mol_type = other RNA
gagagggaagtttatagcag

SEQ ID NO: 37542 - RNA, 20 nt, synthetic construct
  source 1..20: mol_type = other RNA
gagagggagaccgtgggggg

SEQ ID NO: 37543 - RNA, 20 nt, synthetic construct
  source 1..20: mol_type = other RNA
gagagggagctctgtcttga

SEQ ID NO: 37544 - RNA, 20 nt, synthetic construct
  source 1..20: mol_type = other RNA
gagaggggggaagcttttca

SEQ ID NO: 37545 - RNA, 20 nt, synthetic construct
  source 1..20: mol_type = other RNA
gagaggtgaactattagagc

SEQ ID NO: 37546 - RNA, 20 nt, synthetic construct
  source 1..20: mol_type = other RNA
gagagtaaaataaaagctct

SEQ ID NO: 37547 - RNA, 20 nt, synthetic construct
  source 1..20: mol_type = other RNA
gagagtaactggtccagatg

SEQ ID NO: 37548 - RNA, 20 nt, synthetic construct
  source 1..20: mol_type = other RNA
gagagtaagttgcatacgtc

SEQ ID NO: 37549 - RNA, 20 nt, synthetic construct
  source 1..20: mol_type = other RNA
gagagtattgccaggtttgt

SEQ ID NO: 37550 - RNA, 20 nt, synthetic construct
  source 1..20: mol_type = other RNA
gagagtcgcttgaacctgaa

SEQ ID NO: 37551 - RNA, 20 nt, synthetic construct
  source 1..20: mol_type = other RNA
gagagtctcttaagaccaca

SEQ ID NO: 37552 - RNA, 20 nt, synthetic construct
  source 1..20: mol_type = other RNA
gagagtgaaaacacaaactg

SEQ ID NO: 37553 - RNA, 20 nt, synthetic construct
  source 1..20: mol_type = other RNA
gagagtgacagctgagtagc

SEQ ID NO: 37554 - RNA, 20 nt, synthetic construct
  source 1..20: mol_type = other RNA
gagagtgcagtatgtaggaa

SEQ ID NO: 37555 - RNA, 20 nt, synthetic construct
  source 1..20: mol_type = other RNA
gagagtggaaagagccagcc

SEQ ID NO: 37556 - RNA, 20 nt, synthetic construct
  source 1..20: mol_type = other RNA
gagagtggcctaaatcagga

SEQ ID NO: 37557 - RNA, 20 nt, synthetic construct
  source 1..20: mol_type = other RNA
gagagtgggcccagcagaag

SEQ ID NO: 37558 - RNA, 20 nt, synthetic construct
  source 1..20: mol_type = other RNA
gagataaaacctggaatggg

SEQ ID NO: 37559 - RNA, 20 nt, synthetic construct
  source 1..20: mol_type = other RNA
gagataaactagattacctt

SEQ ID NO: 37560 - RNA, 20 nt, synthetic construct
  source 1..20: mol_type = other RNA
gagataaagagcaggtggaa

SEQ ID NO: 37561 - RNA, 20 nt, synthetic construct
  source 1..20: mol_type = other RNA
gagataaattacccaaagac

SEQ ID NO: 37562 - RNA, 20 nt, synthetic construct
  source 1..20: mol_type = other RNA
gagataactaatgagaattt

SEQ ID NO: 37563 - RNA, 20 nt, synthetic construct
  source 1..20: mol_type = other RNA
gagataactgggtgtgcacg

SEQ ID NO: 37564 - RNA, 20 nt, synthetic construct
  source 1..20: mol_type = other RNA
gagataccttgaaaggatac

SEQ ID NO: 37565 - RNA, 20 nt, synthetic construct
  source 1..20: mol_type = other RNA
gagatactacgcctagctga

SEQ ID NO: 37566 - RNA, 20 nt, synthetic construct
  source 1..20: mol_type = other RNA
gagatactggccatgtttta

SEQ ID NO: 37567 - RNA, 20 nt, synthetic construct
  source 1..20: mol_type = other RNA
gagatacttgattacaaggg

SEQ ID NO: 37568 - RNA, 20 nt, synthetic construct
  source 1..20: mol_type = other RNA
gagatagaaagcaccagggc

SEQ ID NO: 37569 - RNA, 20 nt, synthetic construct
  source 1..20: mol_type = other RNA
gagatagaccagatgcgtgg

SEQ ID NO: 37570 - RNA, 20 nt, synthetic construct
  source 1..20: mol_type = other RNA
gagatagtctcttcctgtat

SEQ ID NO: 37571 - RNA, 20 nt, synthetic construct
  source 1..20: mol_type = other RNA
gagatatacaggaagagact

SEQ ID NO: 37572 - RNA, 20 nt, synthetic construct
  source 1..20: mol_type = other RNA
gagatatttcgcctagataa

SEQ ID NO: 37573 - RNA, 20 nt, synthetic construct
  source 1..20: mol_type = other RNA
gagatcacgccactgcattc

SEQ ID NO: 37574 - RNA, 20 nt, synthetic construct
  source 1..20: mol_type = other RNA
gagatctaaattttaagtgc

SEQ ID NO: 37575 - RNA, 20 nt, synthetic construct
  source 1..20: mol_type = other RNA
gagatctagtgaagtcaatt

SEQ ID NO: 37576 - RNA, 20 nt, synthetic construct
  source 1..20: mol_type = other RNA
gagatctgaaattgacttca

SEQ ID NO: 37577 - RNA, 20 nt, synthetic construct
  source 1..20: mol_type = other RNA
gagatcttgtgtatcttttg

SEQ ID NO: 37578 - RNA, 20 nt, synthetic construct
  source 1..20: mol_type = other RNA
gagatcttttaaaacataac

SEQ ID NO: 37579 - RNA, 20 nt, synthetic construct
  source 1..20: mol_type = other RNA
gagatgaatggataaggaaa

SEQ ID NO: 37580 - RNA, 20 nt, synthetic construct
  source 1..20: mol_type = other RNA
gagatgaggttttacgatgt

SEQ ID NO: 37581 - RNA, 20 nt, synthetic construct
  source 1..20: mol_type = other RNA
gagatgcctatgaaatcttg

SEQ ID NO: 37582 - RNA, 20 nt, synthetic construct
  source 1..20: mol_type = other RNA
gagatgcctgtgcttgtctc

SEQ ID NO: 37583 - RNA, 20 nt, synthetic construct
  source 1..20: mol_type = other RNA
gagatggacactgcagatga

SEQ ID NO: 37584 - RNA, 20 nt, synthetic construct
  source 1..20: mol_type = other RNA
gagatggcacataccatgga

SEQ ID NO: 37585 - RNA, 20 nt, synthetic construct
  source 1..20: mol_type = other RNA
gagatggcgtgcgcctgtaa

SEQ ID NO: 37586 - RNA, 20 nt, synthetic construct
  source 1..20: mol_type = other RNA
gagatgggaaagtattccca

SEQ ID NO: 37587 - RNA, 20 nt, synthetic construct
  source 1..20: mol_type = other RNA
gagatgggaagaaaaaataa

SEQ ID NO: 37588 - RNA, 20 nt, synthetic construct
  source 1..20: mol_type = other RNA
gagatggggacttgctctct

SEQ ID NO: 37589 - RNA, 20 nt, synthetic construct
  source 1..20: mol_type = other RNA
gagatggtagtcaacacttt

SEQ ID NO: 37590 - RNA, 20 nt, synthetic construct
  source 1..20: mol_type = other RNA
gagatggtcagtactatctt

SEQ ID NO: 37591 - RNA, 20 nt, synthetic construct
  source 1..20: mol_type = other RNA
gagatggtgggagaggcatg

SEQ ID NO: 37592 - RNA, 20 nt, synthetic construct
  source 1..20: mol_type = other RNA
gagatgtactggaagtgtaa

SEQ ID NO: 37593 - RNA, 20 nt, synthetic construct
  source 1..20: mol_type = other RNA
gagatgtgtaattgtacctt

SEQ ID NO: 37594 - RNA, 20 nt, synthetic construct
  source 1..20: mol_type = other RNA
gagattaaataacttccatg

SEQ ID NO: 37595 - RNA, 20 nt, synthetic construct
  source 1..20: mol_type = other RNA
gagattaaggctggaggatg

SEQ ID NO: 37596 - RNA, 20 nt, synthetic construct
  source 1..20: mol_type = other RNA
gagattaatgtaggtgtctg

SEQ ID NO: 37597 - RNA, 20 nt, synthetic construct
  source 1..20: mol_type = other RNA
gagattaattcagtcaacac

SEQ ID NO: 37598 - RNA, 20 nt, synthetic construct
  source 1..20: mol_type = other RNA
gagattacagatgtgagccc

SEQ ID NO: 37599 - RNA, 20 nt, synthetic construct
  source 1..20: mol_type = other RNA
gagattacatagcaaggaag

SEQ ID NO: 37600 - RNA, 20 nt, synthetic construct
  source 1..20: mol_type = other RNA
gagattagcgaaagggattc

SEQ ID NO: 37601 - RNA, 20 nt, synthetic construct
  source 1..20: mol_type = other RNA
gagattaggcagaaccacct

SEQ ID NO: 37602 - RNA, 20 nt, synthetic construct
  source 1..20: mol_type = other RNA
gagattcaagaaaccacaga

SEQ ID NO: 37603 - RNA, 20 nt, synthetic construct
  source 1..20: mol_type = other RNA
gagattgatagatcatatga

SEQ ID NO: 37604 - RNA, 20 nt, synthetic construct
  source 1..20: mol_type = other RNA
gagattgccccattgcactc

SEQ ID NO: 37605 - RNA, 20 nt, synthetic construct
  source 1..20: mol_type = other RNA
gagattgggaaaatcttgga

SEQ ID NO: 37606 - RNA, 20 nt, synthetic construct
  source 1..20: mol_type = other RNA
gagattgtcgttgagtacct

SEQ ID NO: 37607 - RNA, 20 nt, synthetic construct
  source 1..20: mol_type = other RNA
gagattgtgccagtgaactc

SEQ ID NO: 37608 - RNA, 20 nt, synthetic construct
  source 1..20: mol_type = other RNA
gagatttgagtcttgctctc

SEQ ID NO: 37609 - RNA, 20 nt, synthetic construct
  source 1..20: mol_type = other RNA
gagatttgctgtataacatt

SEQ ID NO: 37610 - RNA, 20 nt, synthetic construct
  source 1..20: mol_type = other RNA
gagattttaattcttctgta

SEQ ID NO: 37611 - RNA, 20 nt, synthetic construct
  source 1..20: mol_type = other RNA
gagattttcccaaagataga

SEQ ID NO: 37612 - RNA, 20 nt, synthetic construct
  source 1..20: mol_type = other RNA
gagcaaaaatacagctccaa

SEQ ID NO: 37613 - RNA, 20 nt, synthetic construct
  source 1..20: mol_type = other RNA
gagcaaactcagatctgaga

SEQ ID NO: 37614 - RNA, 20 nt, synthetic construct
  source 1..20: mol_type = other RNA
gagcaacaacctgtctcaaa

SEQ ID NO: 37615 - RNA, 20 nt, synthetic construct
  source 1..20: mol_type = other RNA
gagcaactactatttcgcaa

SEQ ID NO: 37616 - RNA, 20 nt, synthetic construct
  source 1..20: mol_type = other RNA
gagcaagactcaaatctcaa

SEQ ID NO: 37617 - RNA, 20 nt, synthetic construct
  source 1..20: mol_type = other RNA
gagcaagcaacaccagatac

SEQ ID NO: 37618 - RNA, 20 nt, synthetic construct
  source 1..20: mol_type = other RNA
gagcaagcacgttagcatca

SEQ ID NO: 37619 - RNA, 20 nt, synthetic construct
  source 1..20: mol_type = other RNA
gagcaagcatgagtatctgg

SEQ ID NO: 37620 - RNA, 20 nt, synthetic construct
  source 1..20: mol_type = other RNA
gagcaaggaaggaaaggaga

SEQ ID NO: 37621 - RNA, 20 nt, synthetic construct
  source 1..20: mol_type = other RNA
gagcaaggtcgtttcagatt

SEQ ID NO: 37622 - RNA, 20 nt, synthetic construct
  source 1..20: mol_type = other RNA
gagcaagtccccatctccac

SEQ ID NO: 37623 - RNA, 20 nt, synthetic construct
  source 1..20: mol_type = other RNA
gagcacaatgcctgccgcag

SEQ ID NO: 37624 - RNA, 20 nt, synthetic construct
  source 1..20: mol_type = other RNA
gagcacaccaagacatgtta

SEQ ID NO: 37625 - RNA, 20 nt, synthetic construct
  source 1..20: mol_type = other RNA
gagcacagactcaagcctga

SEQ ID NO: 37626 - RNA, 20 nt, synthetic construct
  source 1..20: mol_type = other RNA
gagcactatgtaaattattt

SEQ ID NO: 37627 - RNA, 20 nt, synthetic construct
  source 1..20: mol_type = other RNA
gagcactggtttcagtacac

SEQ ID NO: 37628 - RNA, 20 nt, synthetic construct
  source 1..20: mol_type = other RNA
gagcactgtgagccactaaa

SEQ ID NO: 37629 - RNA, 20 nt, synthetic construct
  source 1..20: mol_type = other RNA
gagcactttcgtatttttgt

SEQ ID NO: 37630 - RNA, 20 nt, synthetic construct
  source 1..20: mol_type = other RNA
gagcagaactccacctcaga

SEQ ID NO: 37631 - RNA, 20 nt, synthetic construct
  source 1..20: mol_type = other RNA
gagcagaaggaggaaaataa

SEQ ID NO: 37632 - RNA, 20 nt, synthetic construct
  source 1..20: mol_type = other RNA
gagcagaagggaaaggatga

SEQ ID NO: 37633 - RNA, 20 nt, synthetic construct
  source 1..20: mol_type = other RNA
gagcagagacacacatcaga

SEQ ID NO: 37634 - RNA, 20 nt, synthetic construct
  source 1..20: mol_type = other RNA
gagcagagtcctgagggtga

SEQ ID NO: 37635 - RNA, 20 nt, synthetic construct
  source 1..20: mol_type = other RNA
gagcagatcagtaacaaata

SEQ ID NO: 37636 - RNA, 20 nt, synthetic construct
  source 1..20: mol_type = other RNA
gagcagcactgatgtgtagt

SEQ ID NO: 37637 - RNA, 20 nt, synthetic construct
  source 1..20: mol_type = other RNA
gagcaggctccacttgggtg

SEQ ID NO: 37638 - RNA, 20 nt, synthetic construct
  source 1..20: mol_type = other RNA
gagcaggggtggggggatgt

SEQ ID NO: 37639 - RNA, 20 nt, synthetic construct
  source 1..20: mol_type = other RNA
gagcagggtgggcccttaat

SEQ ID NO: 37640 - RNA, 20 nt, synthetic construct
  source 1..20: mol_type = other RNA
gagcaggtggaaggcctgat

SEQ ID NO: 37641 - RNA, 20 nt, synthetic construct
  source 1..20: mol_type = other RNA
gagcagtaggcttagatagg

SEQ ID NO: 37642 - RNA, 20 nt, synthetic construct
  source 1..20: mol_type = other RNA
gagcagtgaaagtctcccta

SEQ ID NO: 37643 - RNA, 20 nt, synthetic construct
  source 1..20: mol_type = other RNA
gagcagtgtgaataggaaag

SEQ ID NO: 37644 - RNA, 20 nt, synthetic construct
  source 1..20: mol_type = other RNA
gagcagtgtgttctgccttg

SEQ ID NO: 37645 - RNA, 20 nt, synthetic construct
  source 1..20: mol_type = other RNA
gagcagtgtttcctagattc

SEQ ID NO: 37646 - RNA, 20 nt, synthetic construct
  source 1..20: mol_type = other RNA
gagcagttactcctgagcaa

SEQ ID NO: 37647 - RNA, 20 nt, synthetic construct
  source 1..20: mol_type = other RNA
gagcagttgtatgccaaaaa

SEQ ID NO: 37648 - RNA, 20 nt, synthetic construct
  source 1..20: mol_type = other RNA
gagcatagactttagagtca

SEQ ID NO: 37649 - RNA, 20 nt, synthetic construct
  source 1..20: mol_type = other RNA
gagcatagcttgaaccaggg

SEQ ID NO: 37650 - RNA, 20 nt, synthetic construct
  source 1..20: mol_type = other RNA
gagcatatatactctgagac

SEQ ID NO: 37651 - RNA, 20 nt, synthetic construct
  source 1..20: mol_type = other RNA
gagcatcccagaggtactca

SEQ ID NO: 37652 - RNA, 20 nt, synthetic construct
  source 1..20: mol_type = other RNA
gagcatccccgctgcgagaa

SEQ ID NO: 37653 - RNA, 20 nt, synthetic construct
  source 1..20: mol_type = other RNA
gagcatcttcccatgaacat

SEQ ID NO: 37654 - RNA, 20 nt, synthetic construct
  source 1..20: mol_type = other RNA
gagcatgcacacaggagaac

SEQ ID NO: 37655 - RNA, 20 nt, synthetic construct
  source 1..20: mol_type = other RNA
gagcatgctgcaactgagaa

SEQ ID NO: 37656 - RNA, 20 nt, synthetic construct
  source 1..20: mol_type = other RNA
gagcatgtcccctggagtta

SEQ ID NO: 37657 - RNA, 20 nt, synthetic construct
  source 1..20: mol_type = other RNA
gagcatgttgggccaacttc

SEQ ID NO: 37658 - RNA, 20 nt, synthetic construct
  source 1..20: mol_type = other RNA
gagcattccccacataggat

SEQ ID NO: 37659 - RNA, 20 nt, synthetic construct
  source 1..20: mol_type = other RNA
gagcattgcctttattacta

SEQ ID NO: 37660 - RNA, 20 nt, synthetic construct
  source 1..20: mol_type = other RNA
gagcatttagccccctgaat

SEQ ID NO: 37661 - RNA, 20 nt, synthetic construct
  source 1..20: mol_type = other RNA
gagcatttatataagttcaa

SEQ ID NO: 37662 - RNA, 20 nt, synthetic construct
  source 1..20: mol_type = other RNA
gagccaaacatcatgattta

SEQ ID NO: 37663 - RNA, 20 nt, synthetic construct
  source 1..20: mol_type = other RNA
gagccaaacttgaaccttcc

SEQ ID NO: 37664 - RNA, 20 nt, synthetic construct
  source 1..20: mol_type = other RNA
gagccaaagaagaaatcaaa

SEQ ID NO: 37665 - RNA, 20 nt, synthetic construct
  source 1..20: mol_type = other RNA
gagccaaagacattgtctta

SEQ ID NO: 37666 - RNA, 20 nt, synthetic construct
  source 1..20: mol_type = other RNA
gagccaagtaaaagcaacct

SEQ ID NO: 37667 - RNA, 20 nt, synthetic construct
  source 1..20: mol_type = other RNA
gagccacagctacactcaat

SEQ ID NO: 37668 - RNA, 20 nt, synthetic construct
  source 1..20: mol_type = other RNA
gagccacagggcccagcctc

SEQ ID NO: 37669 - RNA, 20 nt, synthetic construct
  source 1..20: mol_type = other RNA
gagccacatacatagtatta

SEQ ID NO: 37670 - RNA, 20 nt, synthetic construct
  source 1..20: mol_type = other RNA
gagccaccacgtccggtcgt

SEQ ID NO: 37671 - RNA, 20 nt, synthetic construct
  source 1..20: mol_type = other RNA
gagccaccactcccggccgt

SEQ ID NO: 37672 - RNA, 20 nt, synthetic construct
  source 1..20: mol_type = other RNA
gagccaccgcacctggccgg

SEQ ID NO: 37673 - RNA, 20 nt, synthetic construct
  source 1..20: mol_type = other RNA
gagccaccgcgcccggccaa

SEQ ID NO: 37674 - RNA, 20 nt, synthetic construct
  source 1..20: mol_type = other RNA
gagccaccgcgcctggtgat

SEQ ID NO: 37675 - RNA, 20 nt, synthetic construct
  source 1..20: mol_type = other RNA
gagccaccgtgccgggcttg

SEQ ID NO: 37676 - RNA, 20 nt, synthetic construct
  source 1..20: mol_type = other RNA
gagccacctcatccggtctc

SEQ ID NO: 37677 - RNA, 20 nt, synthetic construct
  source 1..20: mol_type = other RNA
gagccactaaaacaggaagt

SEQ ID NO: 37678 - RNA, 20 nt, synthetic construct
  source 1..20: mol_type = other RNA
gagccactacgcccggccca

SEQ ID NO: 37679 - RNA, 20 nt, synthetic construct
  source 1..20: mol_type = other RNA
gagccactagtcagtatatt

SEQ ID NO: 37680 - RNA, 20 nt, synthetic construct
  source 1..20: mol_type = other RNA
gagccactgcgggcccagct

SEQ ID NO: 37681 - RNA, 20 nt, synthetic construct
  source 1..20: mol_type = other RNA
gagccagagtttcactctgt

SEQ ID NO: 37682 - RNA, 20 nt, synthetic construct
  source 1..20: mol_type = other RNA
gagccagcaaatcagaaaag

SEQ ID NO: 37683 - RNA, 20 nt, synthetic construct
  source 1..20: mol_type = other RNA
gagccagcctgatgatgatg

SEQ ID NO: 37684 - RNA, 20 nt, synthetic construct
  source 1..20: mol_type = other RNA
gagccaggaagtcagcaact

SEQ ID NO: 37685 - RNA, 20 nt, synthetic construct
  source 1..20: mol_type = other RNA
gagccaggcatggtggtggg

SEQ ID NO: 37686 - RNA, 20 nt, synthetic construct
  source 1..20: mol_type = other RNA
gagccatcatgcctgggtaa

SEQ ID NO: 37687 - RNA, 20 nt, synthetic construct
  source 1..20: mol_type = other RNA
gagccatcgcgcccagcccg

SEQ ID NO: 37688 - RNA, 20 nt, synthetic construct
  source 1..20: mol_type = other RNA
gagcccaagcacactttcct

SEQ ID NO: 37689 - RNA, 20 nt, synthetic construct
  source 1..20: mol_type = other RNA
gagcccaccaccatgcctgg

SEQ ID NO: 37690 - RNA, 20 nt, synthetic construct
  source 1..20: mol_type = other RNA
gagcccagaaataaatcctc

SEQ ID NO: 37691 - RNA, 20 nt, synthetic construct
  source 1..20: mol_type = other RNA
gagcccagagatcccaccat

SEQ ID NO: 37692 - RNA, 20 nt, synthetic construct
  source 1..20: mol_type = other RNA
gagcccaggaggttgaagct

SEQ ID NO: 37693 - RNA, 20 nt, synthetic construct
  source 1..20: mol_type = other RNA
gagcccaggagttgcatcac

SEQ ID NO: 37694 - RNA, 20 nt, synthetic construct
  source 1..20: mol_type = other RNA
gagcccagggggtcgagact

SEQ ID NO: 37695 - RNA, 20 nt, synthetic construct
  source 1..20: mol_type = other RNA
gagccccaagaaagcaggtc

SEQ ID NO: 37696 - RNA, 20 nt, synthetic construct
  source 1..20: mol_type = other RNA
gagccccagaataggcaaat

SEQ ID NO: 37697 - RNA, 20 nt, synthetic construct
  source 1..20: mol_type = other RNA
gagccctccaggatccagtc

SEQ ID NO: 37698 - RNA, 20 nt, synthetic construct
  source 1..20: mol_type = other RNA
gagccctgctgtggccgagg

SEQ ID NO: 37699 - RNA, 20 nt, synthetic construct
  source 1..20: mol_type = other RNA
gagccgaaatgcacttagcg

SEQ ID NO: 37700 - RNA, 20 nt, synthetic construct
  source 1..20: mol_type = other RNA
gagccgagcagaagggaaag

SEQ ID NO: 37701 - RNA, 20 nt, synthetic construct
  source 1..20: mol_type = other RNA
gagccgtcggtatgttaata

SEQ ID NO: 37702 - RNA, 20 nt, synthetic construct
  source 1..20: mol_type = other RNA
gagcctaaaataggcctagg

SEQ ID NO: 37703 - RNA, 20 nt, synthetic construct
  source 1..20: mol_type = other RNA
gagcctaatgtgtaagaaat

SEQ ID NO: 37704 - RNA, 20 nt, synthetic construct
  source 1..20: mol_type = other RNA
gagcctagtcatccactgca

SEQ ID NO: 37705 - RNA, 20 nt, synthetic construct
  source 1..20: mol_type = other RNA
gagcctccacacctggcccc

SEQ ID NO: 37706 - RNA, 20 nt, synthetic construct
  source 1..20: mol_type = other RNA
gagcctgaggacactagcaa

SEQ ID NO: 37707 - RNA, 20 nt, synthetic construct
  source 1..20: mol_type = other RNA
gagcctgctctgcagagact

SEQ ID NO: 37708 - RNA, 20 nt, synthetic construct
  source 1..20: mol_type = other RNA
gagcctggaagttcaaggtt

SEQ ID NO: 37709 - RNA, 20 nt, synthetic construct
  source 1..20: mol_type = other RNA
gagcctgtggtctcttcgag

SEQ ID NO: 37710 - RNA, 20 nt, synthetic construct
  source 1..20: mol_type = other RNA
gagcctgttccgattttact

SEQ ID NO: 37711 - RNA, 20 nt, synthetic construct
  source 1..20: mol_type = other RNA
gagccttcagaactcttctc

SEQ ID NO: 37712 - RNA, 20 nt, synthetic construct
  source 1..20: mol_type = other RNA
gagccttgctgttgtaatgt

SEQ ID NO: 37713 - RNA, 20 nt, synthetic construct
  source 1..20: mol_type = other RNA
gagcgaagagggagaagaaa

SEQ ID NO: 37714 - RNA, 20 nt, synthetic construct
  source 1..20: mol_type = other RNA
gagcgacagctacggaggat

SEQ ID NO: 37715 - RNA, 20 nt, synthetic construct
  source 1..20: mol_type = other RNA
gagcgaggcctggaacaggc

SEQ ID NO: 37716 - RNA, 20 nt, synthetic construct
  source 1..20: mol_type = other RNA
gagcgccacgtgaagatgga

SEQ ID NO: 37717 - RNA, 20 nt, synthetic construct
  source 1..20: mol_type = other RNA
gagcgccctggcattgtccc

SEQ ID NO: 37718 - RNA, 20 nt, synthetic construct
  source 1..20: mol_type = other RNA
gagcgcttctatgtgacaaa

SEQ ID NO: 37719 - RNA, 20 nt, synthetic construct
  source 1..20: mol_type = other RNA
gagcggaatttttatattaa

SEQ ID NO: 37720 - RNA, 20 nt, synthetic construct
  source 1..20: mol_type = other RNA
gagcggcctttgcctctcca

SEQ ID NO: 37721 - RNA, 20 nt, synthetic construct
  source 1..20: mol_type = other RNA
gagcggcgggcttcgccttt

SEQ ID NO: 37722 - RNA, 20 nt, synthetic construct
  source 1..20: mol_type = other RNA
gagcgggcagccttggagga

SEQ ID NO: 37723 - RNA, 20 nt, synthetic construct
  source 1..20: mol_type = other RNA
gagcgggtttcctcggtcta

SEQ ID NO: 37724 - RNA, 20 nt, synthetic construct
  source 1..20: mol_type = other RNA
gagcggtgtcttattgtttt

SEQ ID NO: 37725 - RNA, 20 nt, synthetic construct
  source 1..20: mol_type = other RNA
gagcgtacggggtccgcgcg

SEQ ID NO: 37726 - RNA, 20 nt, synthetic construct
  source 1..20: mol_type = other RNA
gagcgtcgtacctttcgcta

SEQ ID NO: 37727 - RNA, 20 nt, synthetic construct
  source 1..20: mol_type = other RNA
gagctaagactataaaactc

SEQ ID NO: 37728 - RNA, 20 nt, synthetic construct
  source 1..20: mol_type = other RNA
gagctaagatgctattcaag

SEQ ID NO: 37729 - RNA, 20 nt, synthetic construct
  source 1..20: mol_type = other RNA
gagctaagggaagttttttc

SEQ ID NO: 37730 - RNA, 20 nt, synthetic construct
  source 1..20: mol_type = other RNA
gagctacaaactccaaacct

SEQ ID NO: 37731 - RNA, 20 nt, synthetic construct
  source 1..20: mol_type = other RNA
gagctactgcatgctagggg

SEQ ID NO: 37732 - RNA, 20 nt, synthetic construct
  source 1..20: mol_type = other RNA
gagctagaacagaataaaaa

SEQ ID NO: 37733 - RNA, 20 nt, synthetic construct
  source 1..20: mol_type = other RNA
gagctagaactagaatactc

SEQ ID NO: 37734 - RNA, 20 nt, synthetic construct
  source 1..20: mol_type = other RNA
gagctagagggtaagaccaa

SEQ ID NO: 37735 - RNA, 20 nt, synthetic construct
  source 1..20: mol_type = other RNA
gagctataatttatctggat

SEQ ID NO: 37736 - RNA, 20 nt, synthetic construct
  source 1..20: mol_type = other RNA
gagctcacacgagaaggaca

SEQ ID NO: 37737 - RNA, 20 nt, synthetic construct
  source 1..20: mol_type = other RNA
gagctcaggccagtgagtga

SEQ ID NO: 37738 - RNA, 20 nt, synthetic construct
  source 1..20: mol_type = other RNA
gagctcccccggggctcgca

SEQ ID NO: 37739 - RNA, 20 nt, synthetic construct
  source 1..20: mol_type = other RNA
gagctcctgacctcagatat

SEQ ID NO: 37740 - RNA, 20 nt, synthetic construct
  source 1..20: mol_type = other RNA
gagctctagccttgtactgt

SEQ ID NO: 37741 - RNA, 20 nt, synthetic construct
  source 1..20: mol_type = other RNA
gagctctcagtggccctgtt

SEQ ID NO: 37742 - RNA, 20 nt, synthetic construct
  source 1..20: mol_type = other RNA
gagctctgtcttgatgatag

SEQ ID NO: 37743 - RNA, 20 nt, synthetic construct
  source 1..20: mol_type = other RNA
gagctgaaagtaaagatagc

SEQ ID NO: 37744 - RNA, 20 nt, synthetic construct
  source 1..20: mol_type = other RNA
gagctgagaccacagacgtg

SEQ ID NO: 37745 - RNA, 20 nt, synthetic construct
  source 1..20: mol_type = other RNA
gagctgctgtaacaaagatg

SEQ ID NO: 37746 - RNA, 20 nt, synthetic construct
  source 1..20: mol_type = other RNA
gagctggaagtaaggatttt

SEQ ID NO: 37747 - RNA, 20 nt, synthetic construct
  source 1..20: mol_type = other RNA
gagctgggcccgcagtggct

SEQ ID NO: 37748 - RNA, 20 nt, synthetic construct
  source 1..20: mol_type = other RNA
gagctgggtgatgttcaacc

SEQ ID NO: 37749 - RNA, 20 nt, synthetic construct
  source 1..20: mol_type = other RNA
gagctgtaacagaggcatgc

SEQ ID NO: 37750 - RNA, 20 nt, synthetic construct
  source 1..20: mol_type = other RNA
gagctgtatttttgctcaca

SEQ ID NO: 37751 - RNA, 20 nt, synthetic construct
  source 1..20: mol_type = other RNA
gagctgtccccaccgccttc

SEQ ID NO: 37752 - RNA, 20 nt, synthetic construct
  source 1..20: mol_type = other RNA
gagctgtgccgaggcagaga

SEQ ID NO: 37753 - RNA, 20 nt, synthetic construct
  source 1..20: mol_type = other RNA
gagctgttaatggttagact

SEQ ID NO: 37754 - RNA, 20 nt, synthetic construct
  source 1..20: mol_type = other RNA
gagcttatcaggcttgagtc

SEQ ID NO: 37755 - RNA, 20 nt, synthetic construct
  source 1..20: mol_type = other RNA
gagcttcaacctcctgggct

SEQ ID NO: 37756 - RNA, 20 nt, synthetic construct
  source 1..20: mol_type = other RNA
gagcttgatctttacttccc

SEQ ID NO: 37757 - RNA, 20 nt, synthetic construct
  source 1..20: mol_type = other RNA
gagctttcattattaccagg

SEQ ID NO: 37758 - RNA, 20 nt, synthetic construct
  source 1..20: mol_type = other RNA
gagctttccttagttcgaag

SEQ ID NO: 37759 - RNA, 20 nt, synthetic construct
  source 1..20: mol_type = other RNA
gagctttcttttaaagacct

SEQ ID NO: 37760 - RNA, 20 nt, synthetic construct
  source 1..20: mol_type = other RNA
gagctttgttatgaaaatag

SEQ ID NO: 37761 - RNA, 20 nt, synthetic construct
  source 1..20: mol_type = other RNA
gagcttttattttactctct

SEQ ID NO: 37762 - RNA, 20 nt, synthetic construct
  source 1..20: mol_type = other RNA
gagcttttgaaactgagcat

SEQ ID NO: 37763 - RNA, 20 nt, synthetic construct
  source 1..20: mol_type = other RNA
gagctttttctttttaaaca

SEQ ID NO: 37764 - RNA, 20 nt, synthetic construct
  source 1..20: mol_type = other RNA
gaggaaaaaacagttgctat

SEQ ID NO: 37765 - RNA, 20 nt, synthetic construct
  source 1..20: mol_type = other RNA
gaggaaaagagaacattggt

SEQ ID NO: 37766 - RNA, 20 nt, synthetic construct
  source 1..20: mol_type = other RNA
gaggaaaataatttgcaaca

SEQ ID NO: 37767 - RNA, 20 nt, synthetic construct
  source 1..20: mol_type = other RNA
gaggaaacccgctctgggtg

SEQ ID NO: 37768 - RNA, 20 nt, synthetic construct
  source 1..20: mol_type = other RNA
gaggaaagcaggttgcatta

SEQ ID NO: 37769 - RNA, 20 nt, synthetic construct
  source 1..20: mol_type = other RNA
gaggaactaattgataaaac

SEQ ID NO: 37770 - RNA, 20 nt, synthetic construct
  source 1..20: mol_type = other RNA
gaggaagagatagtctcttc

SEQ ID NO: 37771 - RNA, 20 nt, synthetic construct
  source 1..20: mol_type = other RNA
gaggaagaggaaggttcaag

SEQ ID NO: 37772 - RNA, 20 nt, synthetic construct
  source 1..20: mol_type = other RNA
gaggaagctaatcaagccgc

SEQ ID NO: 37773 - RNA, 20 nt, synthetic construct
  source 1..20: mol_type = other RNA
gaggaagcttataatttctg

SEQ ID NO: 37774 - RNA, 20 nt, synthetic construct
  source 1..20: mol_type = other RNA
gaggaaggagaatcgcttaa

SEQ ID NO: 37775 - RNA, 20 nt, synthetic construct
  source 1..20: mol_type = other RNA
gaggaaggttcaagtttggc

SEQ ID NO: 37776 - RNA, 20 nt, synthetic construct
  source 1..20: mol_type = other RNA
gaggaagtgaccctgagtcc

SEQ ID NO: 37777 - RNA, 20 nt, synthetic construct
  source 1..20: mol_type = other RNA
gaggaataaatggtagcttg

SEQ ID NO: 37778 - RNA, 20 nt, synthetic construct
  source 1..20: mol_type = other RNA
gaggaatccttcagtcagtt

SEQ ID NO: 37779 - RNA, 20 nt, synthetic construct
  source 1..20: mol_type = other RNA
gaggacactagcaatccagg

SEQ ID NO: 37780 - RNA, 20 nt, synthetic construct
  source 1..20: mol_type = other RNA
gaggacagactgcagttgga

SEQ ID NO: 37781 - RNA, 20 nt, synthetic construct
  source 1..20: mol_type = other RNA
gaggacagttggccttgagg

SEQ ID NO: 37782 - RNA, 20 nt, synthetic construct
  source 1..20: mol_type = other RNA
gaggacatggagacagtgag

SEQ ID NO: 37783 - RNA, 20 nt, synthetic construct
  source 1..20: mol_type = other RNA
gaggacgatttttccaacag

SEQ ID NO: 37784 - RNA, 20 nt, synthetic construct
  source 1..20: mol_type = other RNA
gaggacgctgatgacagtta

SEQ ID NO: 37785 - RNA, 20 nt, synthetic construct
  source 1..20: mol_type = other RNA
gaggactgcctattttgtaa

SEQ ID NO: 37786 - RNA, 20 nt, synthetic construct
  source 1..20: mol_type = other RNA
gaggactgcctggtcctgag

SEQ ID NO: 37787 - RNA, 20 nt, synthetic construct
  source 1..20: mol_type = other RNA
gaggacttcatgtacaatga

SEQ ID NO: 37788 - RNA, 20 nt, synthetic construct
  source 1..20: mol_type = other RNA
gaggagaaggccttccacgg

SEQ ID NO: 37789 - RNA, 20 nt, synthetic construct
  source 1..20: mol_type = other RNA
gaggagacattacaattgat

SEQ ID NO: 37790 - RNA, 20 nt, synthetic construct
  source 1..20: mol_type = other RNA
gaggagcagttactcctgag

SEQ ID NO: 37791 - RNA, 20 nt, synthetic construct
  source 1..20: mol_type = other RNA
gaggagccaagtaaaagcaa

SEQ ID NO: 37792 - RNA, 20 nt, synthetic construct
  source 1..20: mol_type = other RNA
gaggagccctgctgtggccg

SEQ ID NO: 37793 - RNA, 20 nt, synthetic construct
  source 1..20: mol_type = other RNA
gaggagcgccctggcattgt

SEQ ID NO: 37794 - RNA, 20 nt, synthetic construct
  source 1..20: mol_type = other RNA
gaggagctgagaccacagac

SEQ ID NO: 37795 - RNA, 20 nt, synthetic construct
  source 1..20: mol_type = other RNA
gaggaggaagagatagtctc

SEQ ID NO: 37796 - RNA, 20 nt, synthetic construct
  source 1..20: mol_type = other RNA
gaggaggagggtgcagcctc

SEQ ID NO: 37797 - RNA, 20 nt, synthetic construct
  source 1..20: mol_type = other RNA
gaggaggagggttagattat

SEQ ID NO: 37798 - RNA, 20 nt, synthetic construct
  source 1..20: mol_type = other RNA
gaggagggatgcattctaga

SEQ ID NO: 37799 - RNA, 20 nt, synthetic construct
  source 1..20: mol_type = other RNA
gaggagggtgcagcctctaa

SEQ ID NO: 37800 - RNA, 20 nt, synthetic construct
  source 1..20: mol_type = other RNA
gaggagggttagattatatg

SEQ ID NO: 37801 - RNA, 20 nt, synthetic construct
  source 1..20: mol_type = other RNA
gaggaggtcatactggagca

SEQ ID NO: 37802 - RNA, 20 nt, synthetic construct
  source 1..20: mol_type = other RNA
gaggagtgaatttttcattt

SEQ ID NO: 37803 - RNA, 20 nt, synthetic construct
  source 1..20: mol_type = other RNA
gaggataaggggcagggtgg

SEQ ID NO: 37804 - RNA, 20 nt, synthetic construct
  source 1..20: mol_type = other RNA
gaggataatatctggactga

SEQ ID NO: 37805 - RNA, 20 nt, synthetic construct
  source 1..20: mol_type = other RNA
gaggatataacgatagtctc

SEQ ID NO: 37806 - RNA, 20 nt, synthetic construct
  source 1..20: mol_type = other RNA
gaggatctgttggtgcttag

SEQ ID NO: 37807 - RNA, 20 nt, synthetic construct
  source 1..20: mol_type = other RNA
gaggatgactgtcctgaatt

SEQ ID NO: 37808 - RNA, 20 nt, synthetic construct
  source 1..20: mol_type = other RNA
gaggatgaggggctgagcct

SEQ ID NO: 37809 - RNA, 20 nt, synthetic construct
  source 1..20: mol_type = other RNA
gaggatggcttgagcccagg

SEQ ID NO: 37810 - RNA, 20 nt, synthetic construct
  source 1..20: mol_type = other RNA
gaggatgggcattccagagg

SEQ ID NO: 37811 - RNA, 20 nt, synthetic construct
  source 1..20: mol_type = other RNA
gaggattccaggtttacagg

SEQ ID NO: 37812 - RNA, 20 nt, synthetic construct
  source 1..20: mol_type = other RNA
gaggattcgattaaaataac

SEQ ID NO: 37813 - RNA, 20 nt, synthetic construct
  source 1..20: mol_type = other RNA
gaggattggagactgataaa

SEQ ID NO: 37814 - RNA, 20 nt, synthetic construct
  source 1..20: mol_type = other RNA
gaggattgtttgaggctggg

SEQ ID NO: 37815 - RNA, 20 nt, synthetic construct
  source 1..20: mol_type = other RNA
gaggattttggattgcgatt

SEQ ID NO: 37816 - RNA, 20 nt, synthetic construct
  source 1..20: mol_type = other RNA
gaggcaaaactcctgaacaa

SEQ ID NO: 37817 - RNA, 20 nt, synthetic construct
  source 1..20: mol_type = other RNA
gaggcaaaggccgctcttga

SEQ ID NO: 37818 - RNA, 20 nt, synthetic construct
  source 1..20: mol_type = other RNA
gaggcaaaggttgagacaag

SEQ ID NO: 37819 - RNA, 20 nt, synthetic construct
  source 1..20: mol_type = other RNA
gaggcaacagtcattcaggt

SEQ ID NO: 37820 - RNA, 20 nt, synthetic construct
  source 1..20: mol_type = other RNA
gaggcaatgttgattttgag

SEQ ID NO: 37821 - RNA, 20 nt, synthetic construct
  source 1..20: mol_type = other RNA
gaggcacctgaacccaggag

SEQ ID NO: 37822 - RNA, 20 nt, synthetic construct
  source 1..20: mol_type = other RNA
gaggcagagagagtaactgg

SEQ ID NO: 37823 - RNA, 20 nt, synthetic construct
  source 1..20: mol_type = other RNA
gaggcagagagatggtggga

SEQ ID NO: 37824 - RNA, 20 nt, synthetic construct
  source 1..20: mol_type = other RNA
gaggcagagtagagaaggct

SEQ ID NO: 37825 - RNA, 20 nt, synthetic construct
  source 1..20: mol_type = other RNA
gaggcagcccgacctccagc

SEQ ID NO: 37826 - RNA, 20 nt, synthetic construct
  source 1..20: mol_type = other RNA
gaggcagctaagcaccaaca

SEQ ID NO: 37827 - RNA, 20 nt, synthetic construct
  source 1..20: mol_type = other RNA
gaggcaggagaactgcctgg

SEQ ID NO: 37828 - RNA, 20 nt, synthetic construct
  source 1..20: mol_type = other RNA
gaggcaggagcatagcttga

SEQ ID NO: 37829 - RNA, 20 nt, synthetic construct
  source 1..20: mol_type = other RNA
gaggcaggaggcacctgaac

SEQ ID NO: 37830 - RNA, 20 nt, synthetic construct
  source 1..20: mol_type = other RNA
gaggcaggtggatatctgag

SEQ ID NO: 37831 - RNA, 20 nt, synthetic construct
  source 1..20: mol_type = other RNA
gaggcaggtggatcaggaga

SEQ ID NO: 37832 - RNA, 20 nt, synthetic construct
  source 1..20: mol_type = other RNA
gaggcagtaccattcccctt

SEQ ID NO: 37833 - RNA, 20 nt, synthetic construct
  source 1..20: mol_type = other RNA
gaggcagttgagttttcaac

SEQ ID NO: 37834 - RNA, 20 nt, synthetic construct
  source 1..20: mol_type = other RNA
gaggcatattattgtaactt

SEQ ID NO: 37835 - RNA, 20 nt, synthetic construct
  source 1..20: mol_type = other RNA
gaggcatctagttaccacta

SEQ ID NO: 37836 - RNA, 20 nt, synthetic construct
  source 1..20: mol_type = other RNA
gaggcatgcacggacttggc

SEQ ID NO: 37837 - RNA, 20 nt, synthetic construct
  source 1..20: mol_type = other RNA
gaggcatgccgggacaagag

SEQ ID NO: 37838 - RNA, 20 nt, synthetic construct
  source 1..20: mol_type = other RNA
gaggcattagtgaattcaca

SEQ ID NO: 37839 - RNA, 20 nt, synthetic construct
  source 1..20: mol_type = other RNA
gaggccaaatgaaaggcgtc

SEQ ID NO: 37840 - RNA, 20 nt, synthetic construct
  source 1..20: mol_type = other RNA
gaggccacaaagtccccaca

SEQ ID NO: 37841 - RNA, 20 nt, synthetic construct
  source 1..20: mol_type = other RNA
gaggccagtccctagtgtct

SEQ ID NO: 37842 - RNA, 20 nt, synthetic construct
  source 1..20: mol_type = other RNA
gaggccatcttcatttctaa

SEQ ID NO: 37843 - RNA, 20 nt, synthetic construct
  source 1..20: mol_type = other RNA
gaggccccaggggacataga

SEQ ID NO: 37844 - RNA, 20 nt, synthetic construct
  source 1..20: mol_type = other RNA
gaggccctattcaacctata

SEQ ID NO: 37845 - RNA, 20 nt, synthetic construct
  source 1..20: mol_type = other RNA
gaggccctggtgctttctat

SEQ ID NO: 37846 - RNA, 20 nt, synthetic construct
  source 1..20: mol_type = other RNA
gaggccgagggttgaacatc

SEQ ID NO: 37847 - RNA, 20 nt, synthetic construct
  source 1..20: mol_type = other RNA
gaggccgcagtgagccatgg

SEQ ID NO: 37848 - RNA, 20 nt, synthetic construct
  source 1..20: mol_type = other RNA
gaggccggaggattgcttga

SEQ ID NO: 37849 - RNA, 20 nt, synthetic construct
  source 1..20: mol_type = other RNA
gaggcctcagaattaatata

SEQ ID NO: 37850 - RNA, 20 nt, synthetic construct
  source 1..20: mol_type = other RNA
gaggcctcatgtattttcct

SEQ ID NO: 37851 - RNA, 20 nt, synthetic construct
  source 1..20: mol_type = other RNA
gaggcctcctgccttcctga

SEQ ID NO: 37852 - RNA, 20 nt, synthetic construct
  source 1..20: mol_type = other RNA
gaggcctctccccttgacga

SEQ ID NO: 37853 - RNA, 20 nt, synthetic construct
  source 1..20: mol_type = other RNA
gaggcctggaacaggccctt

SEQ ID NO: 37854 - RNA, 20 nt, synthetic construct
  source 1..20: mol_type = other RNA
gaggcggaaggattgcctaa

SEQ ID NO: 37855 - RNA, 20 nt, synthetic construct
  source 1..20: mol_type = other RNA
gaggcggaggttgcggtgac

SEQ ID NO: 37856 - RNA, 20 nt, synthetic construct
  source 1..20: mol_type = other RNA
gaggcggctggatcgcttga

SEQ ID NO: 37857 - RNA, 20 nt, synthetic construct
  source 1..20: mol_type = other RNA
gaggctagaagtcccagttc

SEQ ID NO: 37858 - RNA, 20 nt, synthetic construct
  source 1..20: mol_type = other RNA
gaggctaggtgacctgccag

SEQ ID NO: 37859 - RNA, 20 nt, synthetic construct
  source 1..20: mol_type = other RNA
gaggctattaactttgaaat

SEQ ID NO: 37860 - RNA, 20 nt, synthetic construct
  source 1..20: mol_type = other RNA
gaggctgaggcaggaggcac

SEQ ID NO: 37861 - RNA, 20 nt, synthetic construct
  source 1..20: mol_type = other RNA
gaggctgaggcggaaggatt

SEQ ID NO: 37862 - RNA, 20 nt, synthetic construct
  source 1..20: mol_type = other RNA
gaggctgaggctggggaatt

SEQ ID NO: 37863 - RNA, 20 nt, synthetic construct
  source 1..20: mol_type = other RNA
gaggctgcaccctcctcctc

SEQ ID NO: 37864 - RNA, 20 nt, synthetic construct
  source 1..20: mol_type = other RNA
gaggctggggaattgcatga

SEQ ID NO: 37865 - RNA, 20 nt, synthetic construct
  source 1..20: mol_type = other RNA
gaggctgtattgtaggaaag

SEQ ID NO: 37866 - RNA, 20 nt, synthetic construct
  source 1..20: mol_type = other RNA
gaggctttaagcagaaagtt

SEQ ID NO: 37867 - RNA, 20 nt, synthetic construct
  source 1..20: mol_type = other RNA
gaggctttctgtgtaatact

SEQ ID NO: 37868 - RNA, 20 nt, synthetic construct
  source 1..20: mol_type = other RNA
gaggcttttattggtaatgt

SEQ ID NO: 37869 - RNA, 20 nt, synthetic construct
  source 1..20: mol_type = other RNA
gaggcttttcatagtcatca

SEQ ID NO: 37870 - RNA, 20 nt, synthetic construct
  source 1..20: mol_type = other RNA
gaggcttttggattttcttt

SEQ ID NO: 37871 - RNA, 20 nt, synthetic construct
  source 1..20: mol_type = other RNA
gaggctttttatatttccga

SEQ ID NO: 37872 - RNA, 20 nt, synthetic construct
  source 1..20: mol_type = other RNA
gaggctttttattagattta

SEQ ID NO: 37873 - RNA, 20 nt, synthetic construct
  source 1..20: mol_type = other RNA
gagggaaaatgtttatttta

SEQ ID NO: 37874 - RNA, 20 nt, synthetic construct
  source 1..20: mol_type = other RNA
gagggaaactgtttttgcaa

SEQ ID NO: 37875 - RNA, 20 nt, synthetic construct
  source 1..20: mol_type = other RNA
gagggaaattatttccagcc

SEQ ID NO: 37876 - RNA, 20 nt, synthetic construct
  source 1..20: mol_type = other RNA
gagggaacattttcatttta

SEQ ID NO: 37877 - RNA, 20 nt, synthetic construct
  source 1..20: mol_type = other RNA
gagggaagtactgagtcaaa

SEQ ID NO: 37878 - RNA, 20 nt, synthetic construct
  source 1..20: mol_type = other RNA
gagggaatctaggaaacact

SEQ ID NO: 37879 - RNA, 20 nt, synthetic construct
  source 1..20: mol_type = other RNA
gagggaatttgttttaccat

SEQ ID NO: 37880 - RNA, 20 nt, synthetic construct
  source 1..20: mol_type = other RNA
gagggaatttttcttaccta

SEQ ID NO: 37881 - RNA, 20 nt, synthetic construct
  source 1..20: mol_type = other RNA
gagggactgaaaccagtggg

SEQ ID NO: 37882 - RNA, 20 nt, synthetic construct
  source 1..20: mol_type = other RNA
gagggactgagcagtgaaag

SEQ ID NO: 37883 - RNA, 20 nt, synthetic construct
  source 1..20: mol_type = other RNA
gagggagaagaaataaacga

SEQ ID NO: 37884 - RNA, 20 nt, synthetic construct
  source 1..20: mol_type = other RNA
gagggagaccgtggggggag

SEQ ID NO: 37885 - RNA, 20 nt, synthetic construct
  source 1..20: mol_type = other RNA
gagggagacggcgagcttga

SEQ ID NO: 37886 - RNA, 20 nt, synthetic construct
  source 1..20: mol_type = other RNA
gagggagagggagctctgtc

SEQ ID NO: 37887 - RNA, 20 nt, synthetic construct
  source 1..20: mol_type = other RNA
gagggagatatttcgcctag

SEQ ID NO: 37888 - RNA, 20 nt, synthetic construct
  source 1..20: mol_type = other RNA
gagggagcagcgggcggcct

SEQ ID NO: 37889 - RNA, 20 nt, synthetic construct
  source 1..20: mol_type = other RNA
gagggagcatcttcccatga

SEQ ID NO: 37890 - RNA, 20 nt, synthetic construct
  source 1..20: mol_type = other RNA
gagggagcgccacgtgaaga

SEQ ID NO: 37891 - RNA, 20 nt, synthetic construct
  source 1..20: mol_type = other RNA
gagggagcgtacggggtccg

SEQ ID NO: 37892 - RNA, 20 nt, synthetic construct
  source 1..20: mol_type = other RNA
gagggagctctgtcttgatg

SEQ ID NO: 37893 - RNA, 20 nt, synthetic construct
  source 1..20: mol_type = other RNA
gagggaggattgtttgaggc

SEQ ID NO: 37894 - RNA, 20 nt, synthetic construct
  source 1..20: mol_type = other RNA
gagggaggccatcttcattt

SEQ ID NO: 37895 - RNA, 20 nt, synthetic construct
  source 1..20: mol_type = other RNA
gagggatgaatgttgtacat

SEQ ID NO: 37896 - RNA, 20 nt, synthetic construct
  source 1..20: mol_type = other RNA
gagggatgaggaagaggaag

SEQ ID NO: 37897 - RNA, 20 nt, synthetic construct
  source 1..20: mol_type = other RNA
gagggatgcattctagaaag

SEQ ID NO: 37898 - RNA, 20 nt, synthetic construct
  source 1..20: mol_type = other RNA
gagggatgctggagtgtggc

SEQ ID NO: 37899 - RNA, 20 nt, synthetic construct
  source 1..20: mol_type = other RNA
gagggcagagataactgggt

SEQ ID NO: 37900 - RNA, 20 nt, synthetic construct
  source 1..20: mol_type = other RNA
gagggccagaggagggatgc

SEQ ID NO: 37901 - RNA, 20 nt, synthetic construct
  source 1..20: mol_type = other RNA
gagggcctaaataaaacaca

SEQ ID NO: 37902 - RNA, 20 nt, synthetic construct
  source 1..20: mol_type = other RNA
gagggctcccagtgcccacc

SEQ ID NO: 37903 - RNA, 20 nt, synthetic construct
  source 1..20: mol_type = other RNA
gagggcttcatgctgggaga

SEQ ID NO: 37904 - RNA, 20 nt, synthetic construct
  source 1..20: mol_type = other RNA
gagggctttgtgaagggagg

SEQ ID NO: 37905 - RNA, 20 nt, synthetic construct
  source 1..20: mol_type = other RNA
gaggggcaggaaaggtgggg

SEQ ID NO: 37906 - RNA, 20 nt, synthetic construct
  source 1..20: mol_type = other RNA
gaggggccagttgagagaga

SEQ ID NO: 37907 - RNA, 20 nt, synthetic construct
  source 1..20: mol_type = other RNA
gaggggctgagccttcagaa

SEQ ID NO: 37908 - RNA, 20 nt, synthetic construct
  source 1..20: mol_type = other RNA
gagggggagggagagggagc

SEQ ID NO: 37909 - RNA, 20 nt, synthetic construct
  source 1..20: mol_type = other RNA
gagggggcataacatctatg

SEQ ID NO: 37910 - RNA, 20 nt, synthetic construct
  source 1..20: mol_type = other RNA
gagggggctgaggattggag

SEQ ID NO: 37911 - RNA, 20 nt, synthetic construct
  source 1..20: mol_type = other RNA
gagggggctgagtatgggtc

SEQ ID NO: 37912 - RNA, 20 nt, synthetic construct
  source 1..20: mol_type = other RNA
gaggggggaagcttttcata

SEQ ID NO: 37913 - RNA, 20 nt, synthetic construct
  source 1..20: mol_type = other RNA
gaggggtattcagggggcta

SEQ ID NO: 37914 - RNA, 20 nt, synthetic construct
  source 1..20: mol_type = other RNA
gaggggtccccagcatccac

SEQ ID NO: 37915 - RNA, 20 nt, synthetic construct
  source 1..20: mol_type = other RNA
gaggggtcttatgctggtgg

SEQ ID NO: 37916 - RNA, 20 nt, synthetic construct
  source 1..20: mol_type = other RNA
gagggtaaaatagtcaagta

SEQ ID NO: 37917 - RNA, 20 nt, synthetic construct
  source 1..20: mol_type = other RNA
gagggtaacgtgagctggaa

SEQ ID NO: 37918 - RNA, 20 nt, synthetic construct
  source 1..20: mol_type = other RNA
gagggtaagaaaggagttca

SEQ ID NO: 37919 - RNA, 20 nt, synthetic construct
  source 1..20: mol_type = other RNA
gagggtaagaccaaaatgga

SEQ ID NO: 37920 - RNA, 20 nt, synthetic construct
  source 1..20: mol_type = other RNA
gagggtagcttttcctgctg

SEQ ID NO: 37921 - RNA, 20 nt, synthetic construct
  source 1..20: mol_type = other RNA
gagggtatcatattattttt

SEQ ID NO: 37922 - RNA, 20 nt, synthetic construct
  source 1..20: mol_type = other RNA
gagggtgagaccaccacact

SEQ ID NO: 37923 - RNA, 20 nt, synthetic construct
  source 1..20: mol_type = other RNA
gagggtgcagcctctaatca

SEQ ID NO: 37924 - RNA, 20 nt, synthetic construct
  source 1..20: mol_type = other RNA
gagggtgctgatcaggaaag

SEQ ID NO: 37925 - RNA, 20 nt, synthetic construct
  source 1..20: mol_type = other RNA
gagggtgtgatcaggaaaga

SEQ ID NO: 37926 - RNA, 20 nt, synthetic construct
  source 1..20: mol_type = other RNA
gagggttagaagacaatact

SEQ ID NO: 37927 - RNA, 20 nt, synthetic construct
  source 1..20: mol_type = other RNA
gagggttagattatatggtc

SEQ ID NO: 37928 - RNA, 20 nt, synthetic construct
  source 1..20: mol_type = other RNA
gagggttagatttttccttt

SEQ ID NO: 37929 - RNA, 20 nt, synthetic construct
  source 1..20: mol_type = other RNA
gagggttgaacatcacccag

SEQ ID NO: 37930 - RNA, 20 nt, synthetic construct
  source 1..20: mol_type = other RNA
gagggtttcagtgagtaggg

SEQ ID NO: 37931 - RNA, 20 nt, synthetic construct
  source 1..20: mol_type = other RNA
gaggtaagaacttgtctttg

SEQ ID NO: 37932 - RNA, 20 nt, synthetic construct
  source 1..20: mol_type = other RNA
gaggtaatactataaggaaa

SEQ ID NO: 37933 - RNA, 20 nt, synthetic construct
  source 1..20: mol_type = other RNA
gaggtactcaacgacaatct

SEQ ID NO: 37934 - RNA, 20 nt, synthetic construct
  source 1..20: mol_type = other RNA
gaggtagcacaactagtaag

SEQ ID NO: 37935 - RNA, 20 nt, synthetic construct
  source 1..20: mol_type = other RNA
gaggtaggcttagatgagcc

SEQ ID NO: 37936 - RNA, 20 nt, synthetic construct
  source 1..20: mol_type = other RNA
gaggtatcaccatctgataa

SEQ ID NO: 37937 - RNA, 20 nt, synthetic construct
  source 1..20: mol_type = other RNA
gaggtatcatttccaagatt

SEQ ID NO: 37938 - RNA, 20 nt, synthetic construct
  source 1..20: mol_type = other RNA
gaggtatttggggctaggat

SEQ ID NO: 37939 - RNA, 20 nt, synthetic construct
  source 1..20: mol_type = other RNA
gaggtcaagaaataaaacat

SEQ ID NO: 37940 - RNA, 20 nt, synthetic construct
  source 1..20: mol_type = other RNA
gaggtcacccaagccacagc

SEQ ID NO: 37941 - RNA, 20 nt, synthetic construct
  source 1..20: mol_type = other RNA
gaggtcaggaaggcaggagg

SEQ ID NO: 37942 - RNA, 20 nt, synthetic construct
  source 1..20: mol_type = other RNA
gaggtcgcaccctgagcatc

SEQ ID NO: 37943 - RNA, 20 nt, synthetic construct
  source 1..20: mol_type = other RNA
gaggtcgggctgcctcagcc

SEQ ID NO: 37944 - RNA, 20 nt, synthetic construct
  source 1..20: mol_type = other RNA
gaggtctaagagataactaa

SEQ ID NO: 37945 - RNA, 20 nt, synthetic construct
  source 1..20: mol_type = other RNA
gaggtctaggctaatgtgtg

SEQ ID NO: 37946 - RNA, 20 nt, synthetic construct
  source 1..20: mol_type = other RNA
gaggtctcaaaatttaaagt

SEQ ID NO: 37947 - RNA, 20 nt, synthetic construct
  source 1..20: mol_type = other RNA
gaggtctcagccttttctga

SEQ ID NO: 37948 - RNA, 20 nt, synthetic construct
  source 1..20: mol_type = other RNA
gaggtctgtctttcagtatg

SEQ ID NO: 37949 - RNA, 20 nt, synthetic construct
  source 1..20: mol_type = other RNA
gaggtctgttactcccgatt

SEQ ID NO: 37950 - RNA, 20 nt, synthetic construct
  source 1..20: mol_type = other RNA
gaggtcttctagctttcagc

SEQ ID NO: 37951 - RNA, 20 nt, synthetic construct
  source 1..20: mol_type = other RNA
gaggtctttaaaagaaagct

SEQ ID NO: 37952 - RNA, 20 nt, synthetic construct
  source 1..20: mol_type = other RNA
gaggtgaactattagagctt

SEQ ID NO: 37953 - RNA, 20 nt, synthetic construct
  source 1..20: mol_type = other RNA
gaggtgaagttaagggccat

SEQ ID NO: 37954 - RNA, 20 nt, synthetic construct
  source 1..20: mol_type = other RNA
gaggtgagacagaccctggc

SEQ ID NO: 37955 - RNA, 20 nt, synthetic construct
  source 1..20: mol_type = other RNA
gaggtgagctttttcttttt

SEQ ID NO: 37956 - RNA, 20 nt, synthetic construct
  source 1..20: mol_type = other RNA
gaggtgaggacatggagaca

SEQ ID NO: 37957 - RNA, 20 nt, synthetic construct
  source 1..20: mol_type = other RNA
gaggtgattaaaggccctga

SEQ ID NO: 37958 - RNA, 20 nt, synthetic construct
  source 1..20: mol_type = other RNA
gaggtgattcagagtgctgg

SEQ ID NO: 37959 - RNA, 20 nt, synthetic construct
  source 1..20: mol_type = other RNA
gaggtgcacaagggaagagg

SEQ ID NO: 37960 - RNA, 20 nt, synthetic construct
  source 1..20: mol_type = other RNA
gaggtgcacattccaagaga

SEQ ID NO: 37961 - RNA, 20 nt, synthetic construct
  source 1..20: mol_type = other RNA
gaggtggaactctgtcatgg

SEQ ID NO: 37962 - RNA, 20 nt, synthetic construct
  source 1..20: mol_type = other RNA
gaggtggagttctgctcttg

SEQ ID NO: 37963 - RNA, 20 nt, synthetic construct
  source 1..20: mol_type = other RNA
gaggtgtacaattaggctgt

SEQ ID NO: 37964 - RNA, 20 nt, synthetic construct
  source 1..20: mol_type = other RNA
gaggtgtttttcagccctga

SEQ ID NO: 37965 - RNA, 20 nt, synthetic construct
  source 1..20: mol_type = other RNA
gaggttaaaaccacaaacat

SEQ ID NO: 37966 - RNA, 20 nt, synthetic construct
  source 1..20: mol_type = other RNA
gaggttaaagcaacaggaag

SEQ ID NO: 37967 - RNA, 20 nt, synthetic construct
  source 1..20: mol_type = other RNA
gaggttattaagataatgct

SEQ ID NO: 37968 - RNA, 20 nt, synthetic construct
  source 1..20: mol_type = other RNA
gaggttattcaaaacaaaac

SEQ ID NO: 37969 - RNA, 20 nt, synthetic construct
  source 1..20: mol_type = other RNA
gaggttcttttaaatgccaa

SEQ ID NO: 37970 - RNA, 20 nt, synthetic construct
  source 1..20: mol_type = other RNA
gaggttgaagacctgcagtc

SEQ ID NO: 37971 - RNA, 20 nt, synthetic construct
  source 1..20: mol_type = other RNA
gaggttgaagctctagtgag

SEQ ID NO: 37972 - RNA, 20 nt, synthetic construct
  source 1..20: mol_type = other RNA
gaggttgaggctgcagtgag

SEQ ID NO: 37973 - RNA, 20 nt, synthetic construct
  source 1..20: mol_type = other RNA
gaggttgcggtgacgtgaga

SEQ ID NO: 37974 - RNA, 20 nt, synthetic construct
  source 1..20: mol_type = other RNA
gaggttgcttttacttggct

SEQ ID NO: 37975 - RNA, 20 nt, synthetic construct
  source 1..20: mol_type = other RNA
gaggtttacttggggagagt

SEQ ID NO: 37976 - RNA, 20 nt, synthetic construct
  source 1..20: mol_type = other RNA
gaggtttgcactggcacagc

SEQ ID NO: 37977 - RNA, 20 nt, synthetic construct
  source 1..20: mol_type = other RNA
gaggttttacgatgttggcc

SEQ ID NO: 37978 - RNA, 20 nt, synthetic construct
  source 1..20: mol_type = other RNA
gagtaaaaagaaatctgcat

SEQ ID NO: 37979 - RNA, 20 nt, synthetic construct
  source 1..20: mol_type = other RNA
gagtaaaataaaagctctaa

SEQ ID NO: 37980 - RNA, 20 nt, synthetic construct
  source 1..20: mol_type = other RNA
gagtaaacctgcaatttttt

SEQ ID NO: 37981 - RNA, 20 nt, synthetic construct
  source 1..20: mol_type = other RNA
gagtaaagggtaagaaaatt

SEQ ID NO: 37982 - RNA, 20 nt, synthetic construct
  source 1..20: mol_type = other RNA
gagtaacagacctctgaaga

SEQ ID NO: 37983 - RNA, 20 nt, synthetic construct
  source 1..20: mol_type = other RNA
gagtaacatgtggaacataa

SEQ ID NO: 37984 - RNA, 20 nt, synthetic construct
  source 1..20: mol_type = other RNA
gagtaactaaactattgtat

SEQ ID NO: 37985 - RNA, 20 nt, synthetic construct
  source 1..20: mol_type = other RNA
gagtaactgctcctctgact

SEQ ID NO: 37986 - RNA, 20 nt, synthetic construct
  source 1..20: mol_type = other RNA
gagtaactggtccagatgaa

SEQ ID NO: 37987 - RNA, 20 nt, synthetic construct
  source 1..20: mol_type = other RNA
gagtaactgtcatcagcgtc

SEQ ID NO: 37988 - RNA, 20 nt, synthetic construct
  source 1..20: mol_type = other RNA
gagtaagcaactgcatcttc

SEQ ID NO: 37989 - RNA, 20 nt, synthetic construct
  source 1..20: mol_type = other RNA
gagtaagttgcatacgtcgt

SEQ ID NO: 37990 - RNA, 20 nt, synthetic construct
  source 1..20: mol_type = other RNA
gagtaatggatgtttttaga

SEQ ID NO: 37991 - RNA, 20 nt, synthetic construct
  source 1..20: mol_type = other RNA
gagtaatgggatggctgggc

SEQ ID NO: 37992 - RNA, 20 nt, synthetic construct
  source 1..20: mol_type = other RNA
gagtaatggttggccgaggc

SEQ ID NO: 37993 - RNA, 20 nt, synthetic construct
  source 1..20: mol_type = other RNA
gagtacagtgcataccacca

SEQ ID NO: 37994 - RNA, 20 nt, synthetic construct
  source 1..20: mol_type = other RNA
gagtaccaggtcagccagag

SEQ ID NO: 37995 - RNA, 20 nt, synthetic construct
  source 1..20: mol_type = other RNA
gagtacctctgggatgctca

SEQ ID NO: 37996 - RNA, 20 nt, synthetic construct
  source 1..20: mol_type = other RNA
gagtactatgcagcaacgga

SEQ ID NO: 37997 - RNA, 20 nt, synthetic construct
  source 1..20: mol_type = other RNA
gagtagaagagtaatggttg

SEQ ID NO: 37998 - RNA, 20 nt, synthetic construct
  source 1..20: mol_type = other RNA
gagtagagaaggctttgtgt

SEQ ID NO: 37999 - RNA, 20 nt, synthetic construct
  source 1..20: mol_type = other RNA
gagtagattcccccttatgt

SEQ ID NO: 38000 - RNA, 20 nt, synthetic construct
  source 1..20: mol_type = other RNA
gagtagcaccctatttatgt

SEQ ID NO: 38001 - RNA, 20 nt, synthetic construct
  source 1..20: mol_type = other RNA
gagtagcgctttaagcatcc

SEQ ID NO: 38002 - RNA, 20 nt, synthetic construct
  source 1..20: mol_type = other RNA
gagtagctgggattacacac

SEQ ID NO: 38003 - RNA, 20 nt, synthetic construct
  source 1..20: mol_type = other RNA
gagtagctgtgattaccggc

SEQ ID NO: 38004 - RNA, 20 nt, synthetic construct
  source 1..20: mol_type = other RNA
gagtagggaaggtgcccgcg

SEQ ID NO: 38005 - RNA, 20 nt, synthetic construct
  source 1..20: mol_type = other RNA
gagtagtacttctgagtgtt

SEQ ID NO: 38006 - RNA, 20 nt, synthetic construct
  source 1..20: mol_type = other RNA
gagtagttcatgttagcata

SEQ ID NO: 38007 - RNA, 20 nt, synthetic construct
  source 1..20: mol_type = other RNA
gagtagttgtaactacagac

SEQ ID NO: 38008 - RNA, 20 nt, synthetic construct
  source 1..20: mol_type = other RNA
gagtatatatgctccctaaa

SEQ ID NO: 38009 - RNA, 20 nt, synthetic construct
  source 1..20: mol_type = other RNA
gagtatattctgtgaattgt

SEQ ID NO: 38010 - RNA, 20 nt, synthetic construct
  source 1..20: mol_type = other RNA
gagtatcatataaattgcaa

SEQ ID NO: 38011 - RNA, 20 nt, synthetic construct
  source 1..20: mol_type = other RNA
gagtatctaggagtacagtg

SEQ ID NO: 38012 - RNA, 20 nt, synthetic construct
  source 1..20: mol_type = other RNA
gagtatctggtgctggcagc

SEQ ID NO: 38013 - RNA, 20 nt, synthetic construct
  source 1..20: mol_type = other RNA
gagtatctggtgttgcttgc

SEQ ID NO: 38014 - RNA, 20 nt, synthetic construct
  source 1..20: mol_type = other RNA
gagtatcttttcatgttgac

SEQ ID NO: 38015 - RNA, 20 nt, synthetic construct
  source 1..20: mol_type = other RNA
gagtatctttttcagcagca

SEQ ID NO: 38016 - RNA, 20 nt, synthetic construct
  source 1..20: mol_type = other RNA
gagtatgggtctccattttg

SEQ ID NO: 38017 - RNA, 20 nt, synthetic construct
  source 1..20: mol_type = other RNA
gagtattacctatgaatagg

SEQ ID NO: 38018 - RNA, 20 nt, synthetic construct
  source 1..20: mol_type = other RNA
gagtattcaagtttcaccct

SEQ ID NO: 38019 - RNA, 20 nt, synthetic construct
  source 1..20: mol_type = other RNA
gagtattctagttctagctc

SEQ ID NO: 38020 - RNA, 20 nt, synthetic construct
  source 1..20: mol_type = other RNA
gagtattgccaggtttgtgc

SEQ ID NO: 38021 - RNA, 20 nt, synthetic construct
  source 1..20: mol_type = other RNA
gagtatttcatgtacttgta

SEQ ID NO: 38022 - RNA, 20 nt, synthetic construct
  source 1..20: mol_type = other RNA
gagtatttttgagcttttca

SEQ ID NO: 38023 - RNA, 20 nt, synthetic construct
  source 1..20: mol_type = other RNA
gagtcaaaaccaaagaaagg

SEQ ID NO: 38024 - RNA, 20 nt, synthetic construct
  source 1..20: mol_type = other RNA
gagtcaactaatcaaacata

SEQ ID NO: 38025 - RNA, 20 nt, synthetic construct
  source 1..20: mol_type = other RNA
gagtcacagtgaattctgac

SEQ ID NO: 38026 - RNA, 20 nt, synthetic construct
  source 1..20: mol_type = other RNA
gagtcacttgacaaaaatta

SEQ ID NO: 38027 - RNA, 20 nt, synthetic construct
  source 1..20: mol_type = other RNA
gagtcagtaatcaaaaacct

SEQ ID NO: 38028 - RNA, 20 nt, synthetic construct
  source 1..20: mol_type = other RNA
gagtcagtagaggccgaggg

SEQ ID NO: 38029 - RNA, 20 nt, synthetic construct
  source 1..20: mol_type = other RNA
gagtcagttgtttacttggg

SEQ ID NO: 38030 - RNA, 20 nt, synthetic construct
  source 1..20: mol_type = other RNA
gagtcatttgagcccaggag

SEQ ID NO: 38031 - RNA, 20 nt, synthetic construct
  source 1..20: mol_type = other RNA
gagtccaaccaatcgcaggg

SEQ ID NO: 38032 - RNA, 20 nt, synthetic construct
  source 1..20: mol_type = other RNA
gagtccagaggtgagctttt

SEQ ID NO: 38033 - RNA, 20 nt, synthetic construct
  source 1..20: mol_type = other RNA
gagtccagctttctaattct

SEQ ID NO: 38034 - RNA, 20 nt, synthetic construct
  source 1..20: mol_type = other RNA
gagtccagtcctgctaacac

SEQ ID NO: 38035 - RNA, 20 nt, synthetic construct
  source 1..20: mol_type = other RNA
gagtccccaactgcaaaact

SEQ ID NO: 38036 - RNA, 20 nt, synthetic construct
  source 1..20: mol_type = other RNA
gagtccctgctttcagttct

SEQ ID NO: 38037 - RNA, 20 nt, synthetic construct
  source 1..20: mol_type = other RNA
gagtccgcggctgggctttc

SEQ ID NO: 38038 - RNA, 20 nt, synthetic construct
  source 1..20: mol_type = other RNA
gagtcctgaaaattccttcc

SEQ ID NO: 38039 - RNA, 20 nt, synthetic construct
  source 1..20: mol_type = other RNA
gagtcctgagggtgagacca

SEQ ID NO: 38040 - RNA, 20 nt, synthetic construct
  source 1..20: mol_type = other RNA
gagtcctgtcagtttctgat

SEQ ID NO: 38041 - RNA, 20 nt, synthetic construct
  source 1..20: mol_type = other RNA
gagtccttccagtatgatgc

SEQ ID NO: 38042 - RNA, 20 nt, synthetic construct
  source 1..20: mol_type = other RNA
gagtcgccatacctggtcct

SEQ ID NO: 38043 - RNA, 20 nt, synthetic construct
  source 1..20: mol_type = other RNA
gagtcgcttgaacctgaaaa

SEQ ID NO: 38044 - RNA, 20 nt, synthetic construct
  source 1..20: mol_type = other RNA
gagtctatctttgggaaaat

SEQ ID NO: 38045 - RNA, 20 nt, synthetic construct
  source 1..20: mol_type = other RNA
gagtctatttctgaacaaat

SEQ ID NO: 38046 - RNA, 20 nt, synthetic construct
  source 1..20: mol_type = other RNA
gagtctcatctgtcaaaaag

SEQ ID NO: 38047 - RNA, 20 nt, synthetic construct
  source 1..20: mol_type = other RNA
gagtctcttaagaccacaag

SEQ ID NO: 38048 - RNA, 20 nt, synthetic construct
  source 1..20: mol_type = other RNA
gagtctgacatactgtcaca

SEQ ID NO: 38049 - RNA, 20 nt, synthetic construct
  source 1..20: mol_type = other RNA
gagtctgcagaccaagaaag

SEQ ID NO: 38050 - RNA, 20 nt, synthetic construct
  source 1..20: mol_type = other RNA
gagtctgcccatcctatcta

SEQ ID NO: 38051 - RNA, 20 nt, synthetic construct
  source 1..20: mol_type = other RNA
gagtctgtagggtgactagt

SEQ ID NO: 38052 - RNA, 20 nt, synthetic construct
  source 1..20: mol_type = other RNA
gagtctgtgctctgtattta

SEQ ID NO: 38053 - RNA, 20 nt, synthetic construct
  source 1..20: mol_type = other RNA
gagtcttccgtctcaagatt

SEQ ID NO: 38054 - RNA, 20 nt, synthetic construct
  source 1..20: mol_type = other RNA
gagtcttctactgtgaattc

SEQ ID NO: 38055 - RNA, 20 nt, synthetic construct
  source 1..20: mol_type = other RNA
gagtcttgtttacccagtgt

SEQ ID NO: 38056 - RNA, 20 nt, synthetic construct
  source 1..20: mol_type = other RNA
gagtgaaaacacaaactgca

SEQ ID NO: 38057 - RNA, 20 nt, synthetic construct
  source 1..20: mol_type = other RNA
gagtgaaaagaaacaagtga

SEQ ID NO: 38058 - RNA, 20 nt, synthetic construct
  source 1..20: mol_type = other RNA
gagtgaaaaggcaaaccaca

SEQ ID NO: 38059 - RNA, 20 nt, synthetic construct
  source 1..20: mol_type = other RNA
gagtgaaactctggctcaga

SEQ ID NO: 38060 - RNA, 20 nt, synthetic construct
  source 1..20: mol_type = other RNA
gagtgaaatgatttcaagta

SEQ ID NO: 38061 - RNA, 20 nt, synthetic construct
  source 1..20: mol_type = other RNA
gagtgaacaggcaaccttgg

SEQ ID NO: 38062 - RNA, 20 nt, synthetic construct
  source 1..20: mol_type = other RNA
gagtgaagaaacctttctca

SEQ ID NO: 38063 - RNA, 20 nt, synthetic construct
  source 1..20: mol_type = other RNA
gagtgaagctggacccttac

SEQ ID NO: 38064 - RNA, 20 nt, synthetic construct
  source 1..20: mol_type = other RNA
gagtgaatggggtaattttg

SEQ ID NO: 38065 - RNA, 20 nt, synthetic construct
  source 1..20: mol_type = other RNA
gagtgacagctgagtagcgc

SEQ ID NO: 38066 - RNA, 20 nt, synthetic construct
  source 1..20: mol_type = other RNA
gagtgagaggactgcctggt

SEQ ID NO: 38067 - RNA, 20 nt, synthetic construct
  source 1..20: mol_type = other RNA
gagtgagatgggaagaaaaa

SEQ ID NO: 38068 - RNA, 20 nt, synthetic construct
  source 1..20: mol_type = other RNA
gagtgagccacagctacact

SEQ ID NO: 38069 - RNA, 20 nt, synthetic construct
  source 1..20: mol_type = other RNA
gagtgatgaaaagagcacac

SEQ ID NO: 38070 - RNA, 20 nt, synthetic construct
  source 1..20: mol_type = other RNA
gagtgcaatggtgggatctc

SEQ ID NO: 38071 - RNA, 20 nt, synthetic construct
  source 1..20: mol_type = other RNA
gagtgcacattccttcttca

SEQ ID NO: 38072 - RNA, 20 nt, synthetic construct
  source 1..20: mol_type = other RNA
gagtgcagtatgtaggaaac

SEQ ID NO: 38073 - RNA, 20 nt, synthetic construct
  source 1..20: mol_type = other RNA
gagtgcgagtgtgaacgatg

SEQ ID NO: 38074 - RNA, 20 nt, synthetic construct
  source 1..20: mol_type = other RNA
gagtgctgggtagagactgg

SEQ ID NO: 38075 - RNA, 20 nt, synthetic construct
  source 1..20: mol_type = other RNA
gagtggaaagagccagcctg

SEQ ID NO: 38076 - RNA, 20 nt, synthetic construct
  source 1..20: mol_type = other RNA
gagtggactgtgagggagat

SEQ ID NO: 38077 - RNA, 20 nt, synthetic construct
  source 1..20: mol_type = other RNA
gagtggaggggcaggaaagg

SEQ ID NO: 38078 - RNA, 20 nt, synthetic construct
  source 1..20: mol_type = other RNA
gagtggagtggcatgatctc

SEQ ID NO: 38079 - RNA, 20 nt, synthetic construct
  source 1..20: mol_type = other RNA
gagtggatcatttgaggtca

SEQ ID NO: 38080 - RNA, 20 nt, synthetic construct
  source 1..20: mol_type = other RNA
gagtggcatcatactggaag

SEQ ID NO: 38081 - RNA, 20 nt, synthetic construct
  source 1..20: mol_type = other RNA
gagtggcatgatctcacgtc

SEQ ID NO: 38082 - RNA, 20 nt, synthetic construct
  source 1..20: mol_type = other RNA
gagtggcctaaatcaggatg

SEQ ID NO: 38083 - RNA, 20 nt, synthetic construct
  source 1..20: mol_type = other RNA
gagtggctaatgtggcttgc

SEQ ID NO: 38084 - RNA, 20 nt, synthetic construct
  source 1..20: mol_type = other RNA
gagtgggcaaaaaagtcatg

SEQ ID NO: 38085 - RNA, 20 nt, synthetic construct
  source 1..20: mol_type = other RNA
gagtgggcccagcagaaggt

SEQ ID NO: 38086 - RNA, 20 nt, synthetic construct
  source 1..20: mol_type = other RNA
gagtggggcacctaaaaggt

SEQ ID NO: 38087 - RNA, 20 nt, synthetic construct
  source 1..20: mol_type = other RNA
gagtggtggatagagagatt

SEQ ID NO: 38088 - RNA, 20 nt, synthetic construct
  source 1..20: mol_type = other RNA
gagtgtaaggtgtttggtga

SEQ ID NO: 38089 - RNA, 20 nt, synthetic construct
  source 1..20: mol_type = other RNA
gagtgtagctgtggctcact

SEQ ID NO: 38090 - RNA, 20 nt, synthetic construct
  source 1..20: mol_type = other RNA
gagtgtatgcagggaaatca

SEQ ID NO: 38091 - RNA, 20 nt, synthetic construct
  source 1..20: mol_type = other RNA
gagtgtgaacgatggtttct

SEQ ID NO: 38092 - RNA, 20 nt, synthetic construct
  source 1..20: mol_type = other RNA
gagtgtgcccaaggaaggca

SEQ ID NO: 38093 - RNA, 20 nt, synthetic construct
  source 1..20: mol_type = other RNA
gagtgtgctgactagtacgt

SEQ ID NO: 38094 - RNA, 20 nt, synthetic construct
  source 1..20: mol_type = other RNA
gagtgtggcaggggctgcat

SEQ ID NO: 38095 - RNA, 20 nt, synthetic construct
  source 1..20: mol_type = other RNA
gagtgtggctttaaggcgca

SEQ ID NO: 38096 - RNA, 20 nt, synthetic construct
  source 1..20: mol_type = other RNA
gagtgtgtttcgcaaagtaa

SEQ ID NO: 38097 - RNA, 20 nt, synthetic construct
  source 1..20: mol_type = other RNA
gagtgttacttgaaatcatt

SEQ ID NO: 38098 - RNA, 20 nt, synthetic construct
  source 1..20: mol_type = other RNA
gagtgttcaaaagccccaaa

SEQ ID NO: 38099 - RNA, 20 nt, synthetic construct
  source 1..20: mol_type = other RNA
gagtgttgtgtgcacctaat

SEQ ID NO: 38100 - RNA, 20 nt, synthetic construct
  source 1..20: mol_type = other RNA
gagtgtttcccttaaaagga

SEQ ID NO: 38101 - RNA, 20 nt, synthetic construct
  source 1..20: mol_type = other RNA
gagtgttttcttcatggact

SEQ ID NO: 38102 - RNA, 20 nt, synthetic construct
  source 1..20: mol_type = other RNA
gagttaaaactcacaaaaag

SEQ ID NO: 38103 - RNA, 20 nt, synthetic construct
  source 1..20: mol_type = other RNA
gagttaatatatgttaagtg

SEQ ID NO: 38104 - RNA, 20 nt, synthetic construct
  source 1..20: mol_type = other RNA
gagttaattccacaaccact

SEQ ID NO: 38105 - RNA, 20 nt, synthetic construct
  source 1..20: mol_type = other RNA
gagttaccataaaaccattt

SEQ ID NO: 38106 - RNA, 20 nt, synthetic construct
  source 1..20: mol_type = other RNA
gagttacgctgccaaaagcc

SEQ ID NO: 38107 - RNA, 20 nt, synthetic construct
  source 1..20: mol_type = other RNA
gagttacttctggaaagttc

SEQ ID NO: 38108 - RNA, 20 nt, synthetic construct
  source 1..20: mol_type = other RNA
gagttaggaatttacatttc

SEQ ID NO: 38109 - RNA, 20 nt, synthetic construct
  source 1..20: mol_type = other RNA
gagttatgcaagatgtcaac

SEQ ID NO: 38110 - RNA, 20 nt, synthetic construct
  source 1..20: mol_type = other RNA
gagttattgcatagggatgt

SEQ ID NO: 38111 - RNA, 20 nt, synthetic construct
  source 1..20: mol_type = other RNA
gagttcaaatgttaagccca

SEQ ID NO: 38112 - RNA, 20 nt, synthetic construct
  source 1..20: mol_type = other RNA
gagttcagaaagattaatcc

SEQ ID NO: 38113 - RNA, 20 nt, synthetic construct
  source 1..20: mol_type = other RNA
gagttcagcttacagtcatc

SEQ ID NO: 38114 - RNA, 20 nt, synthetic construct
  source 1..20: mol_type = other RNA
gagttcagctttaaagagaa

SEQ ID NO: 38115 - RNA, 20 nt, synthetic construct
  source 1..20: mol_type = other RNA
gagttcaggaccagcttggg

SEQ ID NO: 38116 - RNA, 20 nt, synthetic construct
  source 1..20: mol_type = other RNA
gagttcagtggtgcaatcac

SEQ ID NO: 38117 - RNA, 20 nt, synthetic construct
  source 1..20: mol_type = other RNA
gagttcagttttgtatatgg

SEQ ID NO: 38118 - RNA, 20 nt, synthetic construct
  source 1..20: mol_type = other RNA
gagttcattagaattcagga

SEQ ID NO: 38119 - RNA, 20 nt, synthetic construct
  source 1..20: mol_type = other RNA
gagttcattcgtagcaggtt

SEQ ID NO: 38120 - RNA, 20 nt, synthetic construct
  source 1..20: mol_type = other RNA
gagttccaactgtataaatg

SEQ ID NO: 38121 - RNA, 20 nt, synthetic construct
  source 1..20: mol_type = other RNA
gagttccacctccatcactg

SEQ ID NO: 38122 - RNA, 20 nt, synthetic construct
  source 1..20: mol_type = other RNA
gagttccagtcctttgtgtc

SEQ ID NO: 38123 - RNA, 20 nt, synthetic construct
  source 1..20: mol_type = other RNA
gagttccatctgttatagtg

SEQ ID NO: 38124 - RNA, 20 nt, synthetic construct
  source 1..20: mol_type = other RNA
gagttcccctatactgtaac

SEQ ID NO: 38125 - RNA, 20 nt, synthetic construct
  source 1..20: mol_type = other RNA
gagttccgatttctcggccg

SEQ ID NO: 38126 - RNA, 20 nt, synthetic construct
  source 1..20: mol_type = other RNA
gagttcctgcttcccccaaa

SEQ ID NO: 38127 - RNA, 20 nt, synthetic construct
  source 1..20: mol_type = other RNA
gagttctgaaggctcagccc

SEQ ID NO: 38128 - RNA, 20 nt, synthetic construct
  source 1..20: mol_type = other RNA
gagttctgggagttcattag

SEQ ID NO: 38129 - RNA, 20 nt, synthetic construct
  source 1..20: mol_type = other RNA
gagttcttatgaggttattc

SEQ ID NO: 38130 - RNA, 20 nt, synthetic construct
  source 1..20: mol_type = other RNA
gagttgcatcacttgaggtg

SEQ ID NO: 38131 - RNA, 20 nt, synthetic construct
  source 1..20: mol_type = other RNA
gagttgctgacttcctggct

SEQ ID NO: 38132 - RNA, 20 nt, synthetic construct
  source 1..20: mol_type = other RNA
gagttggcacagccagtcag

SEQ ID NO: 38133 - RNA, 20 nt, synthetic construct
  source 1..20: mol_type = other RNA
gagttggtgcaaggataaac

SEQ ID NO: 38134 - RNA, 20 nt, synthetic construct
  source 1..20: mol_type = other RNA
gagttgtaacacatatttat

SEQ ID NO: 38135 - RNA, 20 nt, synthetic construct
  source 1..20: mol_type = other RNA
gagttgtatctgtgatccct

SEQ ID NO: 38136 - RNA, 20 nt, synthetic construct
  source 1..20: mol_type = other RNA
gagttgtttccactttgagg

SEQ ID NO: 38137 - RNA, 20 nt, synthetic construct
  source 1..20: mol_type = other RNA
gagtttaattcttttgctgt

SEQ ID NO: 38138 - RNA, 20 nt, synthetic construct
  source 1..20: mol_type = other RNA
gagtttatattctaagtttg

SEQ ID NO: 38139 - RNA, 20 nt, synthetic construct
  source 1..20: mol_type = other RNA
gagtttcaatgacttttatc

SEQ ID NO: 38140 - RNA, 20 nt, synthetic construct
  source 1..20: mol_type = other RNA
gagtttccagaaaactggca

SEQ ID NO: 38141 - RNA, 20 nt, synthetic construct
  source 1..20: mol_type = other RNA
gagtttgacctgtaattttt

SEQ ID NO: 38142 - RNA, 20 nt, synthetic construct
  source 1..20: mol_type = other RNA
gagtttgagactgcagtgac

SEQ ID NO: 38143 - RNA, 20 nt, synthetic construct
  source 1..20: mol_type = other RNA
gagtttgaggccgcagtgag

SEQ ID NO: 38144 - RNA, 20 nt, synthetic construct
  source 1..20: mol_type = other RNA
gagtttgcattacatgaatg

SEQ ID NO: 38145 - RNA, 20 nt, synthetic construct
  source 1..20: mol_type = other RNA
gagtttgctctgcaaatgag

SEQ ID NO: 38146 - RNA, 20 nt, synthetic construct
  source 1..20: mol_type = other RNA
gagtttggtgtatttagtat

SEQ ID NO: 38147 - RNA, 20 nt, synthetic construct
  source 1..20: mol_type = other RNA
gagtttgtagctcaaagcat

SEQ ID NO: 38148 - RNA, 20 nt, synthetic construct
  source 1..20: mol_type = other RNA
gagtttgttctgtcacattt

SEQ ID NO: 38149 - RNA, 20 nt, synthetic construct
  source 1..20: mol_type = other RNA
gagttttaactcttgcatta

SEQ ID NO: 38150 - RNA, 20 nt, synthetic construct
  source 1..20: mol_type = other RNA
gagttttaggaaaatagagt

SEQ ID NO: 38151 - RNA, 20 nt, synthetic construct
  source 1..20: mol_type = other RNA
gagttttatagtcttagctc

SEQ ID NO: 38152 - RNA, 20 nt, synthetic construct
  source 1..20: mol_type = other RNA
gagttttcaacctttgttga

SEQ ID NO: 38153 - RNA, 20 nt, synthetic construct
  source 1..20: mol_type = other RNA
gagttttccaataagttaac

SEQ ID NO: 38154 - RNA, 20 nt, synthetic construct
  source 1..20: mol_type = other RNA
gagttttccccctacaccca

SEQ ID NO: 38155 - RNA, 20 nt, synthetic construct
  source 1..20: mol_type = other RNA
gagttttgcctctttgctaa

SEQ ID NO: 38156 - RNA, 20 nt, synthetic construct
  source 1..20: mol_type = other RNA
gataaaaaggagggaaaatg

SEQ ID NO: 38157 - RNA, 20 nt, synthetic construct
  source 1..20: mol_type = other RNA
gataaaaataacgggccggg

SEQ ID NO: 38158 - RNA, 20 nt, synthetic construct
  source 1..20: mol_type = other RNA
gataaaaatctctacaggga

SEQ ID NO: 38159 - RNA, 20 nt, synthetic construct
  source 1..20: mol_type = other RNA
gataaaacctggaatgggtt

SEQ ID NO: 38160 - RNA, 20 nt, synthetic construct
  source 1..20: mol_type = other RNA
gataaaactgaagtttatcg

SEQ ID NO: 38161 - RNA, 20 nt, synthetic construct
  source 1..20: mol_type = other RNA
gataaaagtcattgaaactc

SEQ ID NO: 38162 - RNA, 20 nt, synthetic construct
  source 1..20: mol_type = other RNA
gataaacaaagagaacaatg

SEQ ID NO: 38163 - RNA, 20 nt, synthetic construct
  source 1..20: mol_type = other RNA
gataaacgttaactatttct

SEQ ID NO: 38164 - RNA, 20 nt, synthetic construct
  source 1..20: mol_type = other RNA
gataaactagattaccttga

SEQ ID NO: 38165 - RNA, 20 nt, synthetic construct
  source 1..20: mol_type = other RNA
gataaactggaattcatcaa

SEQ ID NO: 38166 - RNA, 20 nt, synthetic construct
  source 1..20: mol_type = other RNA
gataaacttcagttttatca

SEQ ID NO: 38167 - RNA, 20 nt, synthetic construct
  source 1..20: mol_type = other RNA
gataaacttcagttttgagt

SEQ ID NO: 38168 - RNA, 20 nt, synthetic construct
  source 1..20: mol_type = other RNA
gataaagagcaggtggaagg

SEQ ID NO: 38169 - RNA, 20 nt, synthetic construct
  source 1..20: mol_type = other RNA
gataaagggtctggtatcta

SEQ ID NO: 38170 - RNA, 20 nt, synthetic construct
  source 1..20: mol_type = other RNA
gataaaggtaaggaaacccc

SEQ ID NO: 38171 - RNA, 20 nt, synthetic construct
  source 1..20: mol_type = other RNA
gataaatacgataaacttca

SEQ ID NO: 38172 - RNA, 20 nt, synthetic construct
  source 1..20: mol_type = other RNA
gataaatatgtgttacaact

SEQ ID NO: 38173 - RNA, 20 nt, synthetic construct
  source 1..20: mol_type = other RNA
gataaatcagaaactgacag

SEQ ID NO: 38174 - RNA, 20 nt, synthetic construct
  source 1..20: mol_type = other RNA
gataaatccaacgaccggac

SEQ ID NO: 38175 - RNA, 20 nt, synthetic construct
  source 1..20: mol_type = other RNA
gataaatcccacttgatcca

SEQ ID NO: 38176 - RNA, 20 nt, synthetic construct
  source 1..20: mol_type = other RNA
gataaatctaaagccaatct

SEQ ID NO: 38177 - RNA, 20 nt, synthetic construct
  source 1..20: mol_type = other RNA
gataaatggctttttacgat

SEQ ID NO: 38178 - RNA, 20 nt, synthetic construct
  source 1..20: mol_type = other RNA
gataaattacccaaagactt

SEQ ID NO: 38179 - RNA, 20 nt, synthetic construct
  source 1..20: mol_type = other RNA
gataaattatagctccaaaa

SEQ ID NO: 38180 - RNA, 20 nt, synthetic construct
  source 1..20: mol_type = other RNA
gataaattattagcttgcta

SEQ ID NO: 38181 - RNA, 20 nt, synthetic construct
  source 1..20: mol_type = other RNA
gataacaaagggttcttgga

SEQ ID NO: 38182 - RNA, 20 nt, synthetic construct
  source 1..20: mol_type = other RNA
gataacagtggttaggaaaa

SEQ ID NO: 38183 - RNA, 20 nt, synthetic construct
  source 1..20: mol_type = other RNA
gataaccaataagaagtgaa

SEQ ID NO: 38184 - RNA, 20 nt, synthetic construct
  source 1..20: mol_type = other RNA
gataactaatgagaatttca

SEQ ID NO: 38185 - RNA, 20 nt, synthetic construct
  source 1..20: mol_type = other RNA
gataactgatatgagggatg

SEQ ID NO: 38186 - RNA, 20 nt, synthetic construct
  source 1..20: mol_type = other RNA
gataactgggtgtgcacgtt

SEQ ID NO: 38187 - RNA, 20 nt, synthetic construct
  source 1..20: mol_type = other RNA
gataactggtgcttttttgg

SEQ ID NO: 38188 - RNA, 20 nt, synthetic construct
  source 1..20: mol_type = other RNA
gataagaaaatgtgacatta

SEQ ID NO: 38189 - RNA, 20 nt, synthetic construct
  source 1..20: mol_type = other RNA
gataagaataccaaattcac

SEQ ID NO: 38190 - RNA, 20 nt, synthetic construct
  source 1..20: mol_type = other RNA
gataagatccaagtattgta

SEQ ID NO: 38191 - RNA, 20 nt, synthetic construct
  source 1..20: mol_type = other RNA
gataagcaaaattgacaaac

SEQ ID NO: 38192 - RNA, 20 nt, synthetic construct
  source 1..20: mol_type = other RNA
gataagcacatggtgataac

SEQ ID NO: 38193 - RNA, 20 nt, synthetic construct
  source 1..20: mol_type = other RNA
gataagcccaacctgattag

SEQ ID NO: 38194 - RNA, 20 nt, synthetic construct
  source 1..20: mol_type = other RNA
gataagctcccagccaaaca

SEQ ID NO: 38195 - RNA, 20 nt, synthetic construct
  source 1..20: mol_type = other RNA
gataaggaagagtttatatt

SEQ ID NO: 38196 - RNA, 20 nt, synthetic construct
  source 1..20: mol_type = other RNA
gataaggggcagggtggagt

SEQ ID NO: 38197 - RNA, 20 nt, synthetic construct
  source 1..20: mol_type = other RNA
gataaggggctatctttact

SEQ ID NO: 38198 - RNA, 20 nt, synthetic construct
  source 1..20: mol_type = other RNA
gataaggttgttcttggtta

SEQ ID NO: 38199 - RNA, 20 nt, synthetic construct
  source 1..20: mol_type = other RNA
gataagtagaaggtcaatct

SEQ ID NO: 38200 - RNA, 20 nt, synthetic construct
  source 1..20: mol_type = other RNA
gataatatctggactgaaaa

SEQ ID NO: 38201 - RNA, 20 nt, synthetic construct
  source 1..20: mol_type = other RNA
gataatcacagacgcaaagg

SEQ ID NO: 38202 - RNA, 20 nt, synthetic construct
  source 1..20: mol_type = other RNA
gataatgctatccagaagag

SEQ ID NO: 38203 - RNA, 20 nt, synthetic construct
  source 1..20: mol_type = other RNA
gataatgctgttctctgtgt

SEQ ID NO: 38204 - RNA, 20 nt, synthetic construct
  source 1..20: mol_type = other RNA
gataatgtccagaggaggaa

SEQ ID NO: 38205 - RNA, 20 nt, synthetic construct
  source 1..20: mol_type = other RNA
gataatgttagaattcagga

SEQ ID NO: 38206 - RNA, 20 nt, synthetic construct
  source 1..20: mol_type = other RNA
gataattacaataatgcaca

SEQ ID NO: 38207 - RNA, 20 nt, synthetic construct
  source 1..20: mol_type = other RNA
gataatttcttcagaagaaa

SEQ ID NO: 38208 - RNA, 20 nt, synthetic construct
  source 1..20: mol_type = other RNA
gatacaaaaagcacctacca

SEQ ID NO: 38209 - RNA, 20 nt, synthetic construct
  source 1..20: mol_type = other RNA
gatacaactctgaccattgt

SEQ ID NO: 38210 - RNA, 20 nt, synthetic construct
  source 1..20: mol_type = other RNA
gatacaaggtcaatctgaaa

SEQ ID NO: 38211 - RNA, 20 nt, synthetic construct
  source 1..20: mol_type = other RNA
gatacaatacttggatctta

SEQ ID NO: 38212 - RNA, 20 nt, synthetic construct
  source 1..20: mol_type = other RNA
gatacacaagatctctatgc

SEQ ID NO: 38213 - RNA, 20 nt, synthetic construct
  source 1..20: mol_type = other RNA
gatacacttctatccagtga

SEQ ID NO: 38214 - RNA, 20 nt, synthetic construct
  source 1..20: mol_type = other RNA
gatacagaaataaaacatgt

SEQ ID NO: 38215 - RNA, 20 nt, synthetic construct
  source 1..20: mol_type = other RNA
gataccagaccctttatcgg

SEQ ID NO: 38216 - RNA, 20 nt, synthetic construct
  source 1..20: mol_type = other RNA
gataccataaagtcagagga

SEQ ID NO: 38217 - RNA, 20 nt, synthetic construct
  source 1..20: mol_type = other RNA
gataccatgaaaataaaaag

SEQ ID NO: 38218 - RNA, 20 nt, synthetic construct
  source 1..20: mol_type = other RNA
gataccctcaaaagatgcag

SEQ ID NO: 38219 - RNA, 20 nt, synthetic construct
  source 1..20: mol_type = other RNA
gatacctagtacgtaaccta

SEQ ID NO: 38220 - RNA, 20 nt, synthetic construct
  source 1..20: mol_type = other RNA
gatacctcatttatacttta

SEQ ID NO: 38221 - RNA, 20 nt, synthetic construct
  source 1..20: mol_type = other RNA
gatacctcttactaaaaaga

SEQ ID NO: 38222 - RNA, 20 nt, synthetic construct
  source 1..20: mol_type = other RNA
gataccttcttgagagtctc

SEQ ID NO: 38223 - RNA, 20 nt, synthetic construct
  source 1..20: mol_type = other RNA
gataccttgaaaggatactg

SEQ ID NO: 38224 - RNA, 20 nt, synthetic construct
  source 1..20: mol_type = other RNA
gatacgaaaatcctatatat

SEQ ID NO: 38225 - RNA, 20 nt, synthetic construct
  source 1..20: mol_type = other RNA
gatacggaaatataacatta

SEQ ID NO: 38226 - RNA, 20 nt, synthetic construct
  source 1..20: mol_type = other RNA
gatacggagtctcgctctgt

SEQ ID NO: 38227 - RNA, 20 nt, synthetic construct
  source 1..20: mol_type = other RNA
gatacgttaaaggaaaagag

SEQ ID NO: 38228 - RNA, 20 nt, synthetic construct
  source 1..20: mol_type = other RNA
gatactacgcctagctgact

SEQ ID NO: 38229 - RNA, 20 nt, synthetic construct
  source 1..20: mol_type = other RNA
gatactagtttagtgcagta

SEQ ID NO: 38230 - RNA, 20 nt, synthetic construct
  source 1..20: mol_type = other RNA
gatactcaacatcactagct

SEQ ID NO: 38231 - RNA, 20 nt, synthetic construct
  source 1..20: mol_type = other RNA
gatactcaatcagtggccag

SEQ ID NO: 38232 - RNA, 20 nt, synthetic construct
  source 1..20: mol_type = other RNA
gatactcatgcttgctccag

SEQ ID NO: 38233 - RNA, 20 nt, synthetic construct
  source 1..20: mol_type = other RNA
gatactcgtagttttttggt

SEQ ID NO: 38234 - RNA, 20 nt, synthetic construct
  source 1..20: mol_type = other RNA
gatactcttaaagtttcaaa

SEQ ID NO: 38235 - RNA, 20 nt, synthetic construct
  source 1..20: mol_type = other RNA
gatactgagaacagaatttt

SEQ ID NO: 38236 - RNA, 20 nt, synthetic construct
  source 1..20: mol_type = other RNA
gatactgcactaaactagta

SEQ ID NO: 38237 - RNA, 20 nt, synthetic construct
  source 1..20: mol_type = other RNA
gatacttctaactttagaac

SEQ ID NO: 38238 - RNA, 20 nt, synthetic construct
  source 1..20: mol_type = other RNA
gatacttgattacaagggtg

SEQ ID NO: 38239 - RNA, 20 nt, synthetic construct
  source 1..20: mol_type = other RNA
gatactttttattttcatgg

SEQ ID NO: 38240 - RNA, 20 nt, synthetic construct
  source 1..20: mol_type = other RNA
gatagaaaagacaatagcta

SEQ ID NO: 38241 - RNA, 20 nt, synthetic construct
  source 1..20: mol_type = other RNA
gatagaaagcaccagggcct

SEQ ID NO: 38242 - RNA, 20 nt, synthetic construct
  source 1..20: mol_type = other RNA
gatagaagtgtatcagatgc

SEQ ID NO: 38243 - RNA, 20 nt, synthetic construct
  source 1..20: mol_type = other RNA
gatagaataccacttagttt

SEQ ID NO: 38244 - RNA, 20 nt, synthetic construct
  source 1..20: mol_type = other RNA
gatagaccagatgcgtggtt

SEQ ID NO: 38245 - RNA, 20 nt, synthetic construct
  source 1..20: mol_type = other RNA
gatagactcttcagaggtct

SEQ ID NO: 38246 - RNA, 20 nt, synthetic construct
  source 1..20: mol_type = other RNA
gatagactggattaaggaga

SEQ ID NO: 38247 - RNA, 20 nt, synthetic construct
  source 1..20: mol_type = other RNA
gatagagagattcaagaaac

SEQ ID NO: 38248 - RNA, 20 nt, synthetic construct
  source 1..20: mol_type = other RNA
gatagatattggcaacattt

SEQ ID NO: 38249 - RNA, 20 nt, synthetic construct
  source 1..20: mol_type = other RNA
gatagatcatatgataattc

SEQ ID NO: 38250 - RNA, 20 nt, synthetic construct
  source 1..20: mol_type = other RNA
gatagcaacttgcagaagag

SEQ ID NO: 38251 - RNA, 20 nt, synthetic construct
  source 1..20: mol_type = other RNA
gatagcattatcccagatct

SEQ ID NO: 38252 - RNA, 20 nt, synthetic construct
  source 1..20: mol_type = other RNA
gatagcattatccctttaaa

SEQ ID NO: 38253 - RNA, 20 nt, synthetic construct
  source 1..20: mol_type = other RNA
gatagccccttatcaggaaa

SEQ ID NO: 38254 - RNA, 20 nt, synthetic construct
  source 1..20: mol_type = other RNA
gatagcgaaaggtacgacgc

SEQ ID NO: 38255 - RNA, 20 nt, synthetic construct
  source 1..20: mol_type = other RNA
gatagctgtggaagcacagt

SEQ ID NO: 38256 - RNA, 20 nt, synthetic construct
  source 1..20: mol_type = other RNA
gatagcttgacaaaaggccc

SEQ ID NO: 38257 - RNA, 20 nt, synthetic construct
  source 1..20: mol_type = other RNA
gataggaatatcgtcttttt

SEQ ID NO: 38258 - RNA, 20 nt, synthetic construct
  source 1..20: mol_type = other RNA
gataggataatgtccagagg

SEQ ID NO: 38259 - RNA, 20 nt, synthetic construct
  source 1..20: mol_type = other RNA
gataggatgggcagactcct

SEQ ID NO: 38260 - RNA, 20 nt, synthetic construct
  source 1..20: mol_type = other RNA
gataggtcactgcagtctca

SEQ ID NO: 38261 - RNA, 20 nt, synthetic construct
  source 1..20: mol_type = other RNA
gataggtcatgtacataaat

SEQ ID NO: 38262 - RNA, 20 nt, synthetic construct
  source 1..20: mol_type = other RNA
gatagtactgaccatctcag

SEQ ID NO: 38263 - RNA, 20 nt, synthetic construct
  source 1..20: mol_type = other RNA
gatagtctcctatattgtca

SEQ ID NO: 38264 - RNA, 20 nt, synthetic construct
  source 1..20: mol_type = other RNA
gatagtctcttcctgtatat

SEQ ID NO: 38265 - RNA, 20 nt, synthetic construct
  source 1..20: mol_type = other RNA
gatagtcttccaattgcaga

SEQ ID NO: 38266 - RNA, 20 nt, synthetic construct
  source 1..20: mol_type = other RNA
gatagtgctttttactttgc

SEQ ID NO: 38267 - RNA, 20 nt, synthetic construct
  source 1..20: mol_type = other RNA
gatagtggtttgaagcttca

SEQ ID NO: 38268 - RNA, 20 nt, synthetic construct
  source 1..20: mol_type = other RNA
gatagttaaacatgtaaaac

SEQ ID NO: 38269 - RNA, 20 nt, synthetic construct
  source 1..20: mol_type = other RNA
gatagttgcagattcatctt

SEQ ID NO: 38270 - RNA, 20 nt, synthetic construct
  source 1..20: mol_type = other RNA
gatagtttctcaacttagcc

SEQ ID NO: 38271 - RNA, 20 nt, synthetic construct
  source 1..20: mol_type = other RNA
gatataaaaatggtcaacat

SEQ ID NO: 38272 - RNA, 20 nt, synthetic construct
  source 1..20: mol_type = other RNA
gatataacgatagtctccta

SEQ ID NO: 38273 - RNA, 20 nt, synthetic construct
  source 1..20: mol_type = other RNA
gatataagagtgggcaaaaa

SEQ ID NO: 38274 - RNA, 20 nt, synthetic construct
  source 1..20: mol_type = other RNA
gatatacaggaagagactat

SEQ ID NO: 38275 - RNA, 20 nt, synthetic construct
  source 1..20: mol_type = other RNA
gatatagctacaatgatttt

SEQ ID NO: 38276 - RNA, 20 nt, synthetic construct
  source 1..20: mol_type = other RNA
gatatatgcattcccatgtt

SEQ ID NO: 38277 - RNA, 20 nt, synthetic construct
  source 1..20: mol_type = other RNA
gatatattatgaaccattgt

SEQ ID NO: 38278 - RNA, 20 nt, synthetic construct
  source 1..20: mol_type = other RNA
gatatcaatctggatataac

SEQ ID NO: 38279 - RNA, 20 nt, synthetic construct
  source 1..20: mol_type = other RNA
gatatcacccagaccaagtt

SEQ ID NO: 38280 - RNA, 20 nt, synthetic construct
  source 1..20: mol_type = other RNA
gatatcagaagtgctgactt

SEQ ID NO: 38281 - RNA, 20 nt, synthetic construct
  source 1..20: mol_type = other RNA
gatatccaaagataaaggta

SEQ ID NO: 38282 - RNA, 20 nt, synthetic construct
  source 1..20: mol_type = other RNA
gatatccacagtatgctgtt

SEQ ID NO: 38283 - RNA, 20 nt, synthetic construct
  source 1..20: mol_type = other RNA
gatatcccatataaggggaa

SEQ ID NO: 38284 - RNA, 20 nt, synthetic construct
  source 1..20: mol_type = other RNA
gatatccccatttttctcga

SEQ ID NO: 38285 - RNA, 20 nt, synthetic construct
  source 1..20: mol_type = other RNA
gatatcctgtaaacctggaa

SEQ ID NO: 38286 - RNA, 20 nt, synthetic construct
  source 1..20: mol_type = other RNA
gatatctgaggtcaggagct

SEQ ID NO: 38287 - RNA, 20 nt, synthetic construct
  source 1..20: mol_type = other RNA
gatatctgagtgttgtgtgc

SEQ ID NO: 38288 - RNA, 20 nt, synthetic construct
  source 1..20: mol_type = other RNA
gatatctggcctgcaccatt

SEQ ID NO: 38289 - RNA, 20 nt, synthetic construct
  source 1..20: mol_type = other RNA
gatatctgtaagtcatcaaa

SEQ ID NO: 38290 - RNA, 20 nt, synthetic construct
  source 1..20: mol_type = other RNA
gatatgaaagaggagacatt

SEQ ID NO: 38291 - RNA, 20 nt, synthetic construct
  source 1..20: mol_type = other RNA
gatatgagggatgaggaaga

SEQ ID NO: 38292 - RNA, 20 nt, synthetic construct
  source 1..20: mol_type = other RNA
gatatgccacattttttggt

SEQ ID NO: 38293 - RNA, 20 nt, synthetic construct
  source 1..20: mol_type = other RNA
gatatgggagtccctgcttt

SEQ ID NO: 38294 - RNA, 20 nt, synthetic construct
  source 1..20: mol_type = other RNA
gatatgggccaaagacagat

SEQ ID NO: 38295 - RNA, 20 nt, synthetic construct
  source 1..20: mol_type = other RNA
gatatgggttattcacccaa

SEQ ID NO: 38296 - RNA, 20 nt, synthetic construct
  source 1..20: mol_type = other RNA
gatatgtcgcatgaaaacag

SEQ ID NO: 38297 - RNA, 20 nt, synthetic construct
  source 1..20: mol_type = other RNA
gatatgtgatttgtagatat

SEQ ID NO: 38298 - RNA, 20 nt, synthetic construct
  source 1..20: mol_type = other RNA
gatatgtgtaggaaggaaca

SEQ ID NO: 38299 - RNA, 20 nt, synthetic construct
  source 1..20: mol_type = other RNA
gatatgttttctaaacctta

SEQ ID NO: 38300 - RNA, 20 nt, synthetic construct
  source 1..20: mol_type = other RNA
gatattagctacaaaaggga

SEQ ID NO: 38301 - RNA, 20 nt, synthetic construct
  source 1..20: mol_type = other RNA
gatattatcctccaatgttt

SEQ ID NO: 38302 - RNA, 20 nt, synthetic construct
  source 1..20: mol_type = other RNA
gatattcctatcagaagcac

SEQ ID NO: 38303 - RNA, 20 nt, synthetic construct
  source 1..20: mol_type = other RNA
gatattctacagaaaaccct

SEQ ID NO: 38304 - RNA, 20 nt, synthetic construct
  source 1..20: mol_type = other RNA
gatattggcaacattttaat

SEQ ID NO: 38305 - RNA, 20 nt, synthetic construct
  source 1..20: mol_type = other RNA
gatattggcataaagacaga

SEQ ID NO: 38306 - RNA, 20 nt, synthetic construct
  source 1..20: mol_type = other RNA
gatattggcttatagtgttc

SEQ ID NO: 38307 - RNA, 20 nt, synthetic construct
  source 1..20: mol_type = other RNA
gatatttactaagaagtgaa

SEQ ID NO: 38308 - RNA, 20 nt, synthetic construct
  source 1..20: mol_type = other RNA
gatatttcgcctagataaga

SEQ ID NO: 38309 - RNA, 20 nt, synthetic construct
  source 1..20: mol_type = other RNA
gatatttgcagtagtattga

SEQ ID NO: 38310 - RNA, 20 nt, synthetic construct
  source 1..20: mol_type = other RNA
gatatttgttcagaaataga

SEQ ID NO: 38311 - RNA, 20 nt, synthetic construct
  source 1..20: mol_type = other RNA
gatattttcgtgtactgaaa

SEQ ID NO: 38312 - RNA, 20 nt, synthetic construct
  source 1..20: mol_type = other RNA
gatattttctgtcattctgc

SEQ ID NO: 38313 - RNA, 20 nt, synthetic construct
  source 1..20: mol_type = other RNA
gatatttttcagattgacct

SEQ ID NO: 38314 - RNA, 20 nt, synthetic construct
  source 1..20: mol_type = other RNA
gatcaaaaccaggaggtttg

SEQ ID NO: 38315 - RNA, 20 nt, synthetic construct
  source 1..20: mol_type = other RNA
gatcaaaccatgttcatggg

SEQ ID NO: 38316 - RNA, 20 nt, synthetic construct
  source 1..20: mol_type = other RNA
gatcaaacgtgctttcctta

SEQ ID NO: 38317 - RNA, 20 nt, synthetic construct
  source 1..20: mol_type = other RNA
gatcaaagacctaagcttaa

SEQ ID NO: 38318 - RNA, 20 nt, synthetic construct
  source 1..20: mol_type = other RNA
gatcaaagtgaaaggcaaag

SEQ ID NO: 38319 - RNA, 20 nt, synthetic construct
  source 1..20: mol_type = other RNA
gatcaaatctggctgcaggg

SEQ ID NO: 38320 - RNA, 20 nt, synthetic construct
  source 1..20: mol_type = other RNA
gatcaaatgactatgaataa

SEQ ID NO: 38321 - RNA, 20 nt, synthetic construct
  source 1..20: mol_type = other RNA
gatcaagcccttccttgctt

SEQ ID NO: 38322 - RNA, 20 nt, synthetic construct
  source 1..20: mol_type = other RNA
gatcaagctcgccgtctccc

SEQ ID NO: 38323 - RNA, 20 nt, synthetic construct
  source 1..20: mol_type = other RNA
gatcaaggaagcttcctaaa

SEQ ID NO: 38324 - RNA, 20 nt, synthetic construct
  source 1..20: mol_type = other RNA
gatcaaggcacagtctgtgc

SEQ ID NO: 38325 - RNA, 20 nt, synthetic construct
  source 1..20: mol_type = other RNA
gatcaagtatttcctatgaa

SEQ ID NO: 38326 - RNA, 20 nt, synthetic construct
  source 1..20: mol_type = other RNA
gatcaagtcctttccagagg

SEQ ID NO: 38327 - RNA, 20 nt, synthetic construct
  source 1..20: mol_type = other RNA
gatcaagttgcttggcacag

SEQ ID NO: 38328 - RNA, 20 nt, synthetic construct
  source 1..20: mol_type = other RNA
gatcaattgaccaaacatgt

SEQ ID NO: 38329 - RNA, 20 nt, synthetic construct
  source 1..20: mol_type = other RNA
gatcacaaggactggcttca

SEQ ID NO: 38330 - RNA, 20 nt, synthetic construct
  source 1..20: mol_type = other RNA
gatcacaaggtcagaagttt

SEQ ID NO: 38331 - RNA, 20 nt, synthetic construct
  source 1..20: mol_type = other RNA
gatcacaccctcctaccttc

SEQ ID NO: 38332 - RNA, 20 nt, synthetic construct
  source 1..20: mol_type = other RNA
gatcacacttgatggtttgg

SEQ ID NO: 38333 - RNA, 20 nt, synthetic construct
  source 1..20: mol_type = other RNA
gatcacagaagtgttttgat

SEQ ID NO: 38334 - RNA, 20 nt, synthetic construct
  source 1..20: mol_type = other RNA
gatcacagatacaactctga

SEQ ID NO: 38335 - RNA, 20 nt, synthetic construct
  source 1..20: mol_type = other RNA
gatcacaggcgttgagccat

SEQ ID NO: 38336 - RNA, 20 nt, synthetic construct
  source 1..20: mol_type = other RNA
gatcaccaaagacttcagga

SEQ ID NO: 38337 - RNA, 20 nt, synthetic construct
  source 1..20: mol_type = other RNA
gatcaccaggggctggggga

SEQ ID NO: 38338 - RNA, 20 nt, synthetic construct
  source 1..20: mol_type = other RNA
gatcacgccactgcattccg

SEQ ID NO: 38339 - RNA, 20 nt, synthetic construct
  source 1..20: mol_type = other RNA
gatcagaagagcactatgta

SEQ ID NO: 38340 - RNA, 20 nt, synthetic construct
  source 1..20: mol_type = other RNA
gatcagcaccctcaaatgtc

SEQ ID NO: 38341 - RNA, 20 nt, synthetic construct
  source 1..20: mol_type = other RNA
gatcagcttcctacccaagc

SEQ ID NO: 38342 - RNA, 20 nt, synthetic construct
  source 1..20: mol_type = other RNA
gatcaggaaagaccggggac

SEQ ID NO: 38343 - RNA, 20 nt, synthetic construct
  source 1..20: mol_type = other RNA
gatcaggaaagatgaagtat

SEQ ID NO: 38344 - RNA, 20 nt, synthetic construct
  source 1..20: mol_type = other RNA
gatcagggatttggccagaa

SEQ ID NO: 38345 - RNA, 20 nt, synthetic construct
  source 1..20: mol_type = other RNA
gatcagtaaaattcccttca

SEQ ID NO: 38346 - RNA, 20 nt, synthetic construct
  source 1..20: mol_type = other RNA
gatcagtaacaaataagaag

SEQ ID NO: 38347 - RNA, 20 nt, synthetic construct
  source 1..20: mol_type = other RNA
gatcataagcttttatttgt

SEQ ID NO: 38348 - RNA, 20 nt, synthetic construct
  source 1..20: mol_type = other RNA
gatcatacacatccagaagt

SEQ ID NO: 38349 - RNA, 20 nt, synthetic construct
  source 1..20: mol_type = other RNA
gatcatacacctggatcaag

SEQ ID NO: 38350 - RNA, 20 nt, synthetic construct
  source 1..20: mol_type = other RNA
gatcatatagtaattctgtg

SEQ ID NO: 38351 - RNA, 20 nt, synthetic construct
  source 1..20: mol_type = other RNA
gatcatcgcattacgagtta

SEQ ID NO: 38352 - RNA, 20 nt, synthetic construct
  source 1..20: mol_type = other RNA
gatcatgggttttaatataa

SEQ ID NO: 38353 - RNA, 20 nt, synthetic construct
  source 1..20: mol_type = other RNA
gatcatttagtaagtgtgag

SEQ ID NO: 38354 - RNA, 20 nt, synthetic construct
  source 1..20: mol_type = other RNA
gatcatttcaaaccaatgtt

SEQ ID NO: 38355 - RNA, 20 nt, synthetic construct
  source 1..20: mol_type = other RNA
gatcatttcacttgattact

SEQ ID NO: 38356 - RNA, 20 nt, synthetic construct
  source 1..20: mol_type = other RNA
gatccaagtattgtatcaat

SEQ ID NO: 38357 - RNA, 20 nt, synthetic construct
  source 1..20: mol_type = other RNA
gatccagatgtagagaaaca

SEQ ID NO: 38358 - RNA, 20 nt, synthetic construct
  source 1..20: mol_type = other RNA
gatccagcagtttcacttct

SEQ ID NO: 38359 - RNA, 20 nt, synthetic construct
  source 1..20: mol_type = other RNA
gatccaggggaatagaaagt

SEQ ID NO: 38360 - RNA, 20 nt, synthetic construct
  source 1..20: mol_type = other RNA
gatccaggtgtatgatctta

SEQ ID NO: 38361 - RNA, 20 nt, synthetic construct
  source 1..20: mol_type = other RNA
gatccagtctctacccagca

SEQ ID NO: 38362 - RNA, 20 nt, synthetic construct
  source 1..20: mol_type = other RNA
gatccattacatcaacatat

SEQ ID NO: 38363 - RNA, 20 nt, synthetic construct
  source 1..20: mol_type = other RNA
gatcccaaaaaggtttttat

SEQ ID NO: 38364 - RNA, 20 nt, synthetic construct
  source 1..20: mol_type = other RNA
gatcccaattacttccagtg

SEQ ID NO: 38365 - RNA, 20 nt, synthetic construct
  source 1..20: mol_type = other RNA
gatcccactagtggaagaat

SEQ ID NO: 38366 - RNA, 20 nt, synthetic construct
  source 1..20: mol_type = other RNA
gatcccagtcctttgggagg

SEQ ID NO: 38367 - RNA, 20 nt, synthetic construct
  source 1..20: mol_type = other RNA
gatcccccagcccctggtga

SEQ ID NO: 38368 - RNA, 20 nt, synthetic construct
  source 1..20: mol_type = other RNA
gatcccggaacaggaaaagg

SEQ ID NO: 38369 - RNA, 20 nt, synthetic construct
  source 1..20: mol_type = other RNA
gatccctgatatgtcgcatg

SEQ ID NO: 38370 - RNA, 20 nt, synthetic construct
  source 1..20: mol_type = other RNA
gatcctaagcatgagatact

SEQ ID NO: 38371 - RNA, 20 nt, synthetic construct
  source 1..20: mol_type = other RNA
gatcctaagccatctaattc

SEQ ID NO: 38372 - RNA, 20 nt, synthetic construct
  source 1..20: mol_type = other RNA
gatcctcacatcagttacca

SEQ ID NO: 38373 - RNA, 20 nt, synthetic construct
  source 1..20: mol_type = other RNA
gatcctcctgccttggcctt

SEQ ID NO: 38374 - RNA, 20 nt, synthetic construct
  source 1..20: mol_type = other RNA
gatcctgaggaagctaatca

SEQ ID NO: 38375 - RNA, 20 nt, synthetic construct
  source 1..20: mol_type = other RNA
gatcctggaatagtagcttc

SEQ ID NO: 38376 - RNA, 20 nt, synthetic construct
  source 1..20: mol_type = other RNA
gatcctggagggctcccagt

SEQ ID NO: 38377 - RNA, 20 nt, synthetic construct
  source 1..20: mol_type = other RNA
gatcctggattgctagtgtc

SEQ ID NO: 38378 - RNA, 20 nt, synthetic construct
  source 1..20: mol_type = other RNA
gatcctgtccaggcgcctgc

SEQ ID NO: 38379 - RNA, 20 nt, synthetic construct
  source 1..20: mol_type = other RNA
gatcctgtctcagagtatat

SEQ ID NO: 38380 - RNA, 20 nt, synthetic construct
  source 1..20: mol_type = other RNA
gatccttactaccaccacta

SEQ ID NO: 38381 - RNA, 20 nt, synthetic construct
  source 1..20: mol_type = other RNA
gatcgttagtattttcacat

SEQ ID NO: 38382 - RNA, 20 nt, synthetic construct
  source 1..20: mol_type = other RNA
gatctaaaatggaagacttt

SEQ ID NO: 38383 - RNA, 20 nt, synthetic construct
  source 1..20: mol_type = other RNA
gatctaaatggtgtgaagtt

SEQ ID NO: 38384 - RNA, 20 nt, synthetic construct
  source 1..20: mol_type = other RNA
gatctaaattttaagtgcac

SEQ ID NO: 38385 - RNA, 20 nt, synthetic construct
  source 1..20: mol_type = other RNA
gatctaacaaacgcattgtg

SEQ ID NO: 38386 - RNA, 20 nt, synthetic construct
  source 1..20: mol_type = other RNA
gatctacatttagatttcat

SEQ ID NO: 38387 - RNA, 20 nt, synthetic construct
  source 1..20: mol_type = other RNA
gatctagtgaagtcaatttc

SEQ ID NO: 38388 - RNA, 20 nt, synthetic construct
  source 1..20: mol_type = other RNA
gatctatcaatctcacacct

SEQ ID NO: 38389 - RNA, 20 nt, synthetic construct
  source 1..20: mol_type = other RNA
gatctatgaatttgcctatt

SEQ ID NO: 38390 - RNA, 20 nt, synthetic construct
  source 1..20: mol_type = other RNA
gatctatgcatactgcagca

SEQ ID NO: 38391 - RNA, 20 nt, synthetic construct
  source 1..20: mol_type = other RNA
gatctcaaacagcctaattg

SEQ ID NO: 38392 - RNA, 20 nt, synthetic construct
  source 1..20: mol_type = other RNA
gatctcacgtcaccgcaacc

SEQ ID NO: 38393 - RNA, 20 nt, synthetic construct
  source 1..20: mol_type = other RNA
gatctcattttgaaaaacag

SEQ ID NO: 38394 - RNA, 20 nt, synthetic construct
  source 1..20: mol_type = other RNA
gatctctatgcagaaatcta

SEQ ID NO: 38395 - RNA, 20 nt, synthetic construct
  source 1..20: mol_type = other RNA
gatctctgacattggttatt

SEQ ID NO: 38396 - RNA, 20 nt, synthetic construct
  source 1..20: mol_type = other RNA
gatctctgctcaccgcaaca

SEQ ID NO: 38397 - RNA, 20 nt, synthetic construct
  source 1..20: mol_type = other RNA
gatctctgggctcactgcaa

SEQ ID NO: 38398 - RNA, 20 nt, synthetic construct
  source 1..20: mol_type = other RNA
gatctcttttcctttaacgt

SEQ ID NO: 38399 - RNA, 20 nt, synthetic construct
  source 1..20: mol_type = other RNA
gatctgaaattgacttcact

SEQ ID NO: 38400 - RNA, 20 nt, synthetic construct
  source 1..20: mol_type = other RNA
gatctgagaagactaagcag

SEQ ID NO: 38401 - RNA, 20 nt, synthetic construct
  source 1..20: mol_type = other RNA
gatctgagagatagaaagca

SEQ ID NO: 38402 - RNA, 20 nt, synthetic construct
  source 1..20: mol_type = other RNA
gatctgagtttgctctgcaa

SEQ ID NO: 38403 - RNA, 20 nt, synthetic construct
  source 1..20: mol_type = other RNA
gatctgataaattattagct

SEQ ID NO: 38404 - RNA, 20 nt, synthetic construct
  source 1..20: mol_type = other RNA
gatctgccaggacaattgaa

SEQ ID NO: 38405 - RNA, 20 nt, synthetic construct
  source 1..20: mol_type = other RNA
gatctgctcaagttttctat

SEQ ID NO: 38406 - RNA, 20 nt, synthetic construct
  source 1..20: mol_type = other RNA
gatctgctgtaagctggtaa

SEQ ID NO: 38407 - RNA, 20 nt, synthetic construct
  source 1..20: mol_type = other RNA
gatctgcttgcagacaataa

SEQ ID NO: 38408 - RNA, 20 nt, synthetic construct
  source 1..20: mol_type = other RNA
gatctgggataatgctatca

SEQ ID NO: 38409 - RNA, 20 nt, synthetic construct
  source 1..20: mol_type = other RNA
gatctggtcacaaacacaaa

SEQ ID NO: 38410 - RNA, 20 nt, synthetic construct
  source 1..20: mol_type = other RNA
gatctgtcatgtttgaattt

SEQ ID NO: 38411 - RNA, 20 nt, synthetic construct
  source 1..20: mol_type = other RNA
gatctgtctttggcccatat

SEQ ID NO: 38412 - RNA, 20 nt, synthetic construct
  source 1..20: mol_type = other RNA
gatctgtggactttaggctg

SEQ ID NO: 38413 - RNA, 20 nt, synthetic construct
  source 1..20: mol_type = other RNA
gatctgttgcagtccccggt

SEQ ID NO: 38414 - RNA, 20 nt, synthetic construct
  source 1..20: mol_type = other RNA
gatctgttggtgcttagctg

SEQ ID NO: 38415 - RNA, 20 nt, synthetic construct
  source 1..20: mol_type = other RNA
gatctgtttttcaaaatgag

SEQ ID NO: 38416 - RNA, 20 nt, synthetic construct
  source 1..20: mol_type = other RNA
gatcttactgtaagttcctg

SEQ ID NO: 38417 - RNA, 20 nt, synthetic construct
  source 1..20: mol_type = other RNA
gatcttatctgctgtcggtt

SEQ ID NO: 38418 - RNA, 20 nt, synthetic construct
  source 1..20: mol_type = other RNA
gatcttatggaatagttgat

SEQ ID NO: 38419 - RNA, 20 nt, synthetic construct
  source 1..20: mol_type = other RNA
gatcttattaatgtgttgtc

SEQ ID NO: 38420 - RNA, 20 nt, synthetic construct
  source 1..20: mol_type = other RNA
gatcttggccgaatgtggtg

SEQ ID NO: 38421 - RNA, 20 nt, synthetic construct
  source 1..20: mol_type = other RNA
gatcttgggaatactttccc

SEQ ID NO: 38422 - RNA, 20 nt, synthetic construct
  source 1..20: mol_type = other RNA
gatcttgtgtatcttttgtt

SEQ ID NO: 38423 - RNA, 20 nt, synthetic construct
  source 1..20: mol_type = other RNA
gatctttacttcccttctcg

SEQ ID NO: 38424 - RNA, 20 nt, synthetic construct
  source 1..20: mol_type = other RNA
gatctttcaaggggcctttt

SEQ ID NO: 38425 - RNA, 20 nt, synthetic construct
  source 1..20: mol_type = other RNA
gatctttgaataaagggtca

SEQ ID NO: 38426 - RNA, 20 nt, synthetic construct
  source 1..20: mol_type = other RNA
gatctttggaaatgaatata

SEQ ID NO: 38427 - RNA, 20 nt, synthetic construct
  source 1..20: mol_type = other RNA
gatcttttctgacaatttca

SEQ ID NO: 38428 - RNA, 20 nt, synthetic construct
  source 1..20: mol_type = other RNA
gatctttttgtgtatatggt

SEQ ID NO: 38429 - RNA, 20 nt, synthetic construct
  source 1..20: mol_type = other RNA
gatgaaaaagtactggaaat

SEQ ID NO: 38430 - RNA, 20 nt, synthetic construct
  source 1..20: mol_type = other RNA
gatgaaaagagcacaccaag

SEQ ID NO: 38431 - RNA, 20 nt, synthetic construct
  source 1..20: mol_type = other RNA
gatgaaactaaatgtgagca

SEQ ID NO: 38432 - RNA, 20 nt, synthetic construct
  source 1..20: mol_type = other RNA
gatgaaattgaccattccac

SEQ ID NO: 38433 - RNA, 20 nt, synthetic construct
  source 1..20: mol_type = other RNA
gatgaacaaaggcaggagca

SEQ ID NO: 38434 - RNA, 20 nt, synthetic construct
  source 1..20: mol_type = other RNA
gatgaacgctaaattaaagg

SEQ ID NO: 38435 - RNA, 20 nt, synthetic construct
  source 1..20: mol_type = other RNA
gatgaactacacagacatga

SEQ ID NO: 38436 - RNA, 20 nt, synthetic construct
  source 1..20: mol_type = other RNA
gatgaagaacctgttcattt

SEQ ID NO: 38437 - RNA, 20 nt, synthetic construct
  source 1..20: mol_type = other RNA
gatgaagattagaaaattag

SEQ ID NO: 38438 - RNA, 20 nt, synthetic construct
  source 1..20: mol_type = other RNA
gatgaagcagggaaatggag

SEQ ID NO: 38439 - RNA, 20 nt, synthetic construct
  source 1..20: mol_type = other RNA
gatgaagggttttctgtaga

SEQ ID NO: 38440 - RNA, 20 nt, synthetic construct
  source 1..20: mol_type = other RNA
gatgaagtatagaaaggaga

SEQ ID NO: 38441 - RNA, 20 nt, synthetic construct
  source 1..20: mol_type = other RNA
gatgaatacaaaggtgttaa

SEQ ID NO: 38442 - RNA, 20 nt, synthetic construct
  source 1..20: mol_type = other RNA
gatgaatctgcaactatcaa

SEQ ID NO: 38443 - RNA, 20 nt, synthetic construct
  source 1..20: mol_type = other RNA
gatgaatgaacaaaatgtgg

SEQ ID NO: 38444 - RNA, 20 nt, synthetic construct
  source 1..20: mol_type = other RNA
gatgaatgagcaaggtcgtt

SEQ ID NO: 38445 - RNA, 20 nt, synthetic construct
  source 1..20: mol_type = other RNA
gatgaatgcagtggcttcct

SEQ ID NO: 38446 - RNA, 20 nt, synthetic construct
  source 1..20: mol_type = other RNA
gatgaatggataaggaaaat

SEQ ID NO: 38447 - RNA, 20 nt, synthetic construct
  source 1..20: mol_type = other RNA
gatgaatgttgtacatttaa

SEQ ID NO: 38448 - RNA, 20 nt, synthetic construct
  source 1..20: mol_type = other RNA
gatgaattacaaatgaaagt

SEQ ID NO: 38449 - RNA, 20 nt, synthetic construct
  source 1..20: mol_type = other RNA
gatgaattccagtttatcta

SEQ ID NO: 38450 - RNA, 20 nt, synthetic construct
  source 1..20: mol_type = other RNA
gatgacagaaataatacaaa

SEQ ID NO: 38451 - RNA, 20 nt, synthetic construct
  source 1..20: mol_type = other RNA
gatgacagttactctaaaag

SEQ ID NO: 38452 - RNA, 20 nt, synthetic construct
  source 1..20: mol_type = other RNA
gatgacatttgcttttcctg

SEQ ID NO: 38453 - RNA, 20 nt, synthetic construct
  source 1..20: mol_type = other RNA
gatgaccttgacaataaatg

SEQ ID NO: 38454 - RNA, 20 nt, synthetic construct
  source 1..20: mol_type = other RNA
gatgacgaaagtgaagccca

SEQ ID NO: 38455 - RNA, 20 nt, synthetic construct
  source 1..20: mol_type = other RNA
gatgactaggctcctgagaa

SEQ ID NO: 38456 - RNA, 20 nt, synthetic construct
  source 1..20: mol_type = other RNA
gatgactatgaaaagcctca

SEQ ID NO: 38457 - RNA, 20 nt, synthetic construct
  source 1..20: mol_type = other RNA
gatgactgtaagctgaactc

SEQ ID NO: 38458 - RNA, 20 nt, synthetic construct
  source 1..20: mol_type = other RNA
gatgactgtcctgaattcta

SEQ ID NO: 38459 - RNA, 20 nt, synthetic construct
  source 1..20: mol_type = other RNA
gatgacttacagatatcacc

SEQ ID NO: 38460 - RNA, 20 nt, synthetic construct
  source 1..20: mol_type = other RNA
gatgacttcactggagaatt

SEQ ID NO: 38461 - RNA, 20 nt, synthetic construct
  source 1..20: mol_type = other RNA
gatgagaaatacttggacag

SEQ ID NO: 38462 - RNA, 20 nt, synthetic construct
  source 1..20: mol_type = other RNA
gatgagactcttaatattga

SEQ ID NO: 38463 - RNA, 20 nt, synthetic construct
  source 1..20: mol_type = other RNA
gatgagagtggcctaaatca

SEQ ID NO: 38464 - RNA, 20 nt, synthetic construct
  source 1..20: mol_type = other RNA
gatgagattaatgtaggtgt

SEQ ID NO: 38465 - RNA, 20 nt, synthetic construct
  source 1..20: mol_type = other RNA
gatgagcccaggagttgcat

SEQ ID NO: 38466 - RNA, 20 nt, synthetic construct
  source 1..20: mol_type = other RNA
gatgagctactgcatgctag

SEQ ID NO: 38467 - RNA, 20 nt, synthetic construct
  source 1..20: mol_type = other RNA
gatgaggaagaggaaggttc

SEQ ID NO: 38468 - RNA, 20 nt, synthetic construct
  source 1..20: mol_type = other RNA
gatgaggggctgagccttca

SEQ ID NO: 38469 - RNA, 20 nt, synthetic construct
  source 1..20: mol_type = other RNA
gatgaggtctcagccttttc

SEQ ID NO: 38470 - RNA, 20 nt, synthetic construct
  source 1..20: mol_type = other RNA
gatgaggttttacgatgttg

SEQ ID NO: 38471 - RNA, 20 nt, synthetic construct
  source 1..20: mol_type = other RNA
gatgataccttcttgagagt

SEQ ID NO: 38472 - RNA, 20 nt, synthetic construct
  source 1..20: mol_type = other RNA
gatgatagaataccacttag

SEQ ID NO: 38473 - RNA, 20 nt, synthetic construct
  source 1..20: mol_type = other RNA
gatgatcaaaaccaggaggt

SEQ ID NO: 38474 - RNA, 20 nt, synthetic construct
  source 1..20: mol_type = other RNA
gatgatcctcccgccttggc

SEQ ID NO: 38475 - RNA, 20 nt, synthetic construct
  source 1..20: mol_type = other RNA
gatgatctaaatggtgtgaa

SEQ ID NO: 38476 - RNA, 20 nt, synthetic construct
  source 1..20: mol_type = other RNA
gatgatgaacaaaggcagga

SEQ ID NO: 38477 - RNA, 20 nt, synthetic construct
  source 1..20: mol_type = other RNA
gatgatgatggtgatgctaa

SEQ ID NO: 38478 - RNA, 20 nt, synthetic construct
  source 1..20: mol_type = other RNA
gatgatggtgatgctaacgt

SEQ ID NO: 38479 - RNA, 20 nt, synthetic construct
  source 1..20: mol_type = other RNA
gatgatgttttgaacgaatg

SEQ ID NO: 38480 - RNA, 20 nt, synthetic construct
  source 1..20: mol_type = other RNA
gatgattcgcattgctaatt

SEQ ID NO: 38481 - RNA, 20 nt, synthetic construct
  source 1..20: mol_type = other RNA
gatgattctaatgtgcaagg

SEQ ID NO: 38482 - RNA, 20 nt, synthetic construct
  source 1..20: mol_type = other RNA
gatgattttagaaggtaaga

SEQ ID NO: 38483 - RNA, 20 nt, synthetic construct
  source 1..20: mol_type = other RNA
gatgatttttgccagtgttt

SEQ ID NO: 38484 - RNA, 20 nt, synthetic construct
  source 1..20: mol_type = other RNA
gatgcaacaaatgttgcaga

SEQ ID NO: 38485 - RNA, 20 nt, synthetic construct
  source 1..20: mol_type = other RNA
gatgcaactcctgggctcat

SEQ ID NO: 38486 - RNA, 20 nt, synthetic construct
  source 1..20: mol_type = other RNA
gatgcaagaatggtttaaca

SEQ ID NO: 38487 - RNA, 20 nt, synthetic construct
  source 1..20: mol_type = other RNA
gatgcaatttgttttccaag

SEQ ID NO: 38488 - RNA, 20 nt, synthetic construct
  source 1..20: mol_type = other RNA
gatgcacaaaagtttaactt

SEQ ID NO: 38489 - RNA, 20 nt, synthetic construct
  source 1..20: mol_type = other RNA
gatgcacaagacagatgtgc

SEQ ID NO: 38490 - RNA, 20 nt, synthetic construct
  source 1..20: mol_type = other RNA
gatgcacaagccttgaaaat

SEQ ID NO: 38491 - RNA, 20 nt, synthetic construct
  source 1..20: mol_type = other RNA
gatgcagaaaaagcattttt

SEQ ID NO: 38492 - RNA, 20 nt, synthetic construct
  source 1..20: mol_type = other RNA
gatgcagatttctttttact

SEQ ID NO: 38493 - RNA, 20 nt, synthetic construct
  source 1..20: mol_type = other RNA
gatgcagcaaaagcaccact

SEQ ID NO: 38494 - RNA, 20 nt, synthetic construct
  source 1..20: mol_type = other RNA
gatgcagcccctgccacact

SEQ ID NO: 38495 - RNA, 20 nt, synthetic construct
  source 1..20: mol_type = other RNA
gatgcagttgcttactctaa

SEQ ID NO: 38496 - RNA, 20 nt, synthetic construct
  source 1..20: mol_type = other RNA
gatgcataagttctagagat

SEQ ID NO: 38497 - RNA, 20 nt, synthetic construct
  source 1..20: mol_type = other RNA
gatgcataccaagcccggca

SEQ ID NO: 38498 - RNA, 20 nt, synthetic construct
  source 1..20: mol_type = other RNA
gatgcatgaggcatattatt

SEQ ID NO: 38499 - RNA, 20 nt, synthetic construct
  source 1..20: mol_type = other RNA
gatgcattccagattgaaat

SEQ ID NO: 38500 - RNA, 20 nt, synthetic construct
  source 1..20: mol_type = other RNA
gatgcattctagaaaggagg

SEQ ID NO: 38501 - RNA, 20 nt, synthetic construct
  source 1..20: mol_type = other RNA
gatgcattctgtcacataga

SEQ ID NO: 38502 - RNA, 20 nt, synthetic construct
  source 1..20: mol_type = other RNA
gatgccacaaatggagtgac

SEQ ID NO: 38503 - RNA, 20 nt, synthetic construct
  source 1..20: mol_type = other RNA
gatgccactcaaaactgaag

SEQ ID NO: 38504 - RNA, 20 nt, synthetic construct
  source 1..20: mol_type = other RNA
gatgccatcacattttgaat

SEQ ID NO: 38505 - RNA, 20 nt, synthetic construct
  source 1..20: mol_type = other RNA
gatgccatgtgttttgtttt

SEQ ID NO: 38506 - RNA, 20 nt, synthetic construct
  source 1..20: mol_type = other RNA
gatgccatttataatagcat

SEQ ID NO: 38507 - RNA, 20 nt, synthetic construct
  source 1..20: mol_type = other RNA
gatgccggtaatcacagcta

SEQ ID NO: 38508 - RNA, 20 nt, synthetic construct
  source 1..20: mol_type = other RNA
gatgcctagaaaggaattgt

SEQ ID NO: 38509 - RNA, 20 nt, synthetic construct
  source 1..20: mol_type = other RNA
gatgcctatgaaatcttgaa

SEQ ID NO: 38510 - RNA, 20 nt, synthetic construct
  source 1..20: mol_type = other RNA
gatgcctcgaaggcctgctt

SEQ ID NO: 38511 - RNA, 20 nt, synthetic construct
  source 1..20: mol_type = other RNA
gatgcctgtgcttgtctctc

SEQ ID NO: 38512 - RNA, 20 nt, synthetic construct
  source 1..20: mol_type = other RNA
gatgcctgtgcttttctcgt

SEQ ID NO: 38513 - RNA, 20 nt, synthetic construct
  source 1..20: mol_type = other RNA
gatgcgtggttcacacctgt

SEQ ID NO: 38514 - RNA, 20 nt, synthetic construct
  source 1..20: mol_type = other RNA
gatgctaaacagtacagtag

SEQ ID NO: 38515 - RNA, 20 nt, synthetic construct
  source 1..20: mol_type = other RNA
gatgctaacgtgcttgctct

SEQ ID NO: 38516 - RNA, 20 nt, synthetic construct
  source 1..20: mol_type = other RNA
gatgctattcaagacaagca

SEQ ID NO: 38517 - RNA, 20 nt, synthetic construct
  source 1..20: mol_type = other RNA
gatgctcagggtgcgacctc

SEQ ID NO: 38518 - RNA, 20 nt, synthetic construct
  source 1..20: mol_type = other RNA
gatgctcagtttcaaaagct

SEQ ID NO: 38519 - RNA, 20 nt, synthetic construct
  source 1..20: mol_type = other RNA
gatgctccctctatggcagg

SEQ ID NO: 38520 - RNA, 20 nt, synthetic construct
  source 1..20: mol_type = other RNA
gatgctgaacttgtcacaaa

SEQ ID NO: 38521 - RNA, 20 nt, synthetic construct
  source 1..20: mol_type = other RNA
gatgctgcgagccccggggg

SEQ ID NO: 38522 - RNA, 20 nt, synthetic construct
  source 1..20: mol_type = other RNA
gatgctggagtgtggcaggg

SEQ ID NO: 38523 - RNA, 20 nt, synthetic construct
  source 1..20: mol_type = other RNA
gatgctggggacccctccct

SEQ ID NO: 38524 - RNA, 20 nt, synthetic construct
  source 1..20: mol_type = other RNA
gatgctggtggagtattcta

SEQ ID NO: 38525 - RNA, 20 nt, synthetic construct
  source 1..20: mol_type = other RNA
gatgctgtctataggcaatg

SEQ ID NO: 38526 - RNA, 20 nt, synthetic construct
  source 1..20: mol_type = other RNA
gatgcttaaagcgctactca

SEQ ID NO: 38527 - RNA, 20 nt, synthetic construct
  source 1..20: mol_type = other RNA
gatgcttaggtaagaaaaat

SEQ ID NO: 38528 - RNA, 20 nt, synthetic construct
  source 1..20: mol_type = other RNA
gatgcttctagccaaagcaa

SEQ ID NO: 38529 - RNA, 20 nt, synthetic construct
  source 1..20: mol_type = other RNA
gatgctttctctagttgcac

SEQ ID NO: 38530 - RNA, 20 nt, synthetic construct
  source 1..20: mol_type = other RNA
gatggaaagtggactatgta

SEQ ID NO: 38531 - RNA, 20 nt, synthetic construct
  source 1..20: mol_type = other RNA
gatggaacggcttaacacct

SEQ ID NO: 38532 - RNA, 20 nt, synthetic construct
  source 1..20: mol_type = other RNA
gatggaactctattttccta

SEQ ID NO: 38533 - RNA, 20 nt, synthetic construct
  source 1..20: mol_type = other RNA
gatggaattctgacacccga

SEQ ID NO: 38534 - RNA, 20 nt, synthetic construct
  source 1..20: mol_type = other RNA
gatggacaaattaccatgtt

SEQ ID NO: 38535 - RNA, 20 nt, synthetic construct
  source 1..20: mol_type = other RNA
gatggacactgcagatgaat

SEQ ID NO: 38536 - RNA, 20 nt, synthetic construct
  source 1..20: mol_type = other RNA
gatggacattctgcttcctt

SEQ ID NO: 38537 - RNA, 20 nt, synthetic construct
  source 1..20: mol_type = other RNA
gatggaggtggaactctgtc

SEQ ID NO: 38538 - RNA, 20 nt, synthetic construct
  source 1..20: mol_type = other RNA
gatggagttacgctgccaaa

SEQ ID NO: 38539 - RNA, 20 nt, synthetic construct
  source 1..20: mol_type = other RNA
gatggatttttctgtttctg

SEQ ID NO: 38540 - RNA, 20 nt, synthetic construct
  source 1..20: mol_type = other RNA
gatggcaaacagactgagcc

SEQ ID NO: 38541 - RNA, 20 nt, synthetic construct
  source 1..20: mol_type = other RNA
gatggcaacaatcaacaggt

SEQ ID NO: 38542 - RNA, 20 nt, synthetic construct
  source 1..20: mol_type = other RNA
gatggcaagtttccattctc

SEQ ID NO: 38543 - RNA, 20 nt, synthetic construct
  source 1..20: mol_type = other RNA
gatggcacataccatggaat

SEQ ID NO: 38544 - RNA, 20 nt, synthetic construct
  source 1..20: mol_type = other RNA
gatggcatcattcataaaca

SEQ ID NO: 38545 - RNA, 20 nt, synthetic construct
  source 1..20: mol_type = other RNA
gatggcatgaaatgggttta

SEQ ID NO: 38546 - RNA, 20 nt, synthetic construct
  source 1..20: mol_type = other RNA
gatggccagtcatgtgggga

SEQ ID NO: 38547 - RNA, 20 nt, synthetic construct
  source 1..20: mol_type = other RNA
gatggccccaaaattacccc

SEQ ID NO: 38548 - RNA, 20 nt, synthetic construct
  source 1..20: mol_type = other RNA
gatggcctccctcactaagt

SEQ ID NO: 38549 - RNA, 20 nt, synthetic construct
  source 1..20: mol_type = other RNA
gatggcgcatgcctgtggtc

SEQ ID NO: 38550 - RNA, 20 nt, synthetic construct
  source 1..20: mol_type = other RNA
gatggctcaacgcctgtgat

SEQ ID NO: 38551 - RNA, 20 nt, synthetic construct
  source 1..20: mol_type = other RNA
gatggctgaaagagaaagaa

SEQ ID NO: 38552 - RNA, 20 nt, synthetic construct
  source 1..20: mol_type = other RNA
gatggctgtactaagcctat

SEQ ID NO: 38553 - RNA, 20 nt, synthetic construct
  source 1..20: mol_type = other RNA
gatggcttaggatcaccaaa

SEQ ID NO: 38554 - RNA, 20 nt, synthetic construct
  source 1..20: mol_type = other RNA
gatggcttgagcccaggggg

SEQ ID NO: 38555 - RNA, 20 nt, synthetic construct
  source 1..20: mol_type = other RNA
gatgggaaagtattcccaag

SEQ ID NO: 38556 - RNA, 20 nt, synthetic construct
  source 1..20: mol_type = other RNA
gatgggaagaaaaaataaag

SEQ ID NO: 38557 - RNA, 20 nt, synthetic construct
  source 1..20: mol_type = other RNA
gatgggacttcactagtggg

SEQ ID NO: 38558 - RNA, 20 nt, synthetic construct
  source 1..20: mol_type = other RNA
gatgggagatggacactgca

SEQ ID NO: 38559 - RNA, 20 nt, synthetic construct
  source 1..20: mol_type = other RNA
gatgggcagactccttcccc

SEQ ID NO: 38560 - RNA, 20 nt, synthetic construct
  source 1..20: mol_type = other RNA
gatgggcattccagagggta

SEQ ID NO: 38561 - RNA, 20 nt, synthetic construct
  source 1..20: mol_type = other RNA
gatggggacttgctctcttg

SEQ ID NO: 38562 - RNA, 20 nt, synthetic construct
  source 1..20: mol_type = other RNA
gatggggattgagggttaga

SEQ ID NO: 38563 - RNA, 20 nt, synthetic construct
  source 1..20: mol_type = other RNA
gatgggggacgacgtatgca

SEQ ID NO: 38564 - RNA, 20 nt, synthetic construct
  source 1..20: mol_type = other RNA
gatgggggtaagattgtggt

SEQ ID NO: 38565 - RNA, 20 nt, synthetic construct
  source 1..20: mol_type = other RNA
gatggggtctcattgtgttg

SEQ ID NO: 38566 - RNA, 20 nt, synthetic construct
  source 1..20: mol_type = other RNA
gatggggtttgtccatgttg

SEQ ID NO: 38567 - RNA, 20 nt, synthetic construct
  source 1..20: mol_type = other RNA
gatgggtgtagggtttggca

SEQ ID NO: 38568 - RNA, 20 nt, synthetic construct
  source 1..20: mol_type = other RNA
gatggtaaaacaaattccct

SEQ ID NO: 38569 - RNA, 20 nt, synthetic construct
  source 1..20: mol_type = other RNA
gatggtaaattggtcctgga

SEQ ID NO: 38570 - RNA, 20 nt, synthetic construct
  source 1..20: mol_type = other RNA
gatggtagtcaacacttttc

SEQ ID NO: 38571 - RNA, 20 nt, synthetic construct
  source 1..20: mol_type = other RNA
gatggtcagtactatcttcc

SEQ ID NO: 38572 - RNA, 20 nt, synthetic construct
  source 1..20: mol_type = other RNA
gatggtccttttttactgac

SEQ ID NO: 38573 - RNA, 20 nt, synthetic construct
  source 1..20: mol_type = other RNA
gatggtctcaatctcctgat

SEQ ID NO: 38574 - RNA, 20 nt, synthetic construct
  source 1..20: mol_type = other RNA
gatggtgatacctcttacta

SEQ ID NO: 38575 - RNA, 20 nt, synthetic construct
  source 1..20: mol_type = other RNA
gatggtgatgctaacgtgct

SEQ ID NO: 38576 - RNA, 20 nt, synthetic construct
  source 1..20: mol_type = other RNA
gatggtgctgatttaaaatt

SEQ ID NO: 38577 - RNA, 20 nt, synthetic construct
  source 1..20: mol_type = other RNA
gatggtgggagaggcatgcc

SEQ ID NO: 38578 - RNA, 20 nt, synthetic construct
  source 1..20: mol_type = other RNA
gatggttgcacaatgttgtg

SEQ ID NO: 38579 - RNA, 20 nt, synthetic construct
  source 1..20: mol_type = other RNA
gatggttggaagtttctgga

SEQ ID NO: 38580 - RNA, 20 nt, synthetic construct
  source 1..20: mol_type = other RNA
gatggtttctgacacccgac

SEQ ID NO: 38581 - RNA, 20 nt, synthetic construct
  source 1..20: mol_type = other RNA
gatggtttgattgttccagg

SEQ ID NO: 38582 - RNA, 20 nt, synthetic construct
  source 1..20: mol_type = other RNA
gatggtttggggcttttgaa

SEQ ID NO: 38583 - RNA, 20 nt, synthetic construct
  source 1..20: mol_type = other RNA
gatgtaagtgggaggaggtc

SEQ ID NO: 38584 - RNA, 20 nt, synthetic construct
  source 1..20: mol_type = other RNA
gatgtaatggatcaaggcac

SEQ ID NO: 38585 - RNA, 20 nt, synthetic construct
  source 1..20: mol_type = other RNA
gatgtactggaagtgtaaca

SEQ ID NO: 38586 - RNA, 20 nt, synthetic construct
  source 1..20: mol_type = other RNA
gatgtagaaggatatgtttt

SEQ ID NO: 38587 - RNA, 20 nt, synthetic construct
  source 1..20: mol_type = other RNA
gatgtagagaaacaggatta

SEQ ID NO: 38588 - RNA, 20 nt, synthetic construct
  source 1..20: mol_type = other RNA
gatgtagaggcagttgagtt

SEQ ID NO: 38589 - RNA, 20 nt, synthetic construct
  source 1..20: mol_type = other RNA
gatgtcaacaaaatactagc

SEQ ID NO: 38590 - RNA, 20 nt, synthetic construct
  source 1..20: mol_type = other RNA
gatgtcaacattaagggaaa

SEQ ID NO: 38591 - RNA, 20 nt, synthetic construct
  source 1..20: mol_type = other RNA
gatgtcaactgaggcagagt

SEQ ID NO: 38592 - RNA, 20 nt, synthetic construct
  source 1..20: mol_type = other RNA
gatgtcacaagccagggtct

SEQ ID NO: 38593 - RNA, 20 nt, synthetic construct
  source 1..20: mol_type = other RNA
gatgtccttaatgccaccga

SEQ ID NO: 38594 - RNA, 20 nt, synthetic construct
  source 1..20: mol_type = other RNA
gatgtctcagatgtctccat

SEQ ID NO: 38595 - RNA, 20 nt, synthetic construct
  source 1..20: mol_type = other RNA
gatgtctccattttgccagc

SEQ ID NO: 38596 - RNA, 20 nt, synthetic construct
  source 1..20: mol_type = other RNA
gatgtctttgggaaggccct

SEQ ID NO: 38597 - RNA, 20 nt, synthetic construct
  source 1..20: mol_type = other RNA
gatgtcttttaacttgcttt

SEQ ID NO: 38598 - RNA, 20 nt, synthetic construct
  source 1..20: mol_type = other RNA
gatgtcttttgaagaagttc

SEQ ID NO: 38599 - RNA, 20 nt, synthetic construct
  source 1..20: mol_type = other RNA
gatgtgagcccccacgcccg

SEQ ID NO: 38600 - RNA, 20 nt, synthetic construct
  source 1..20: mol_type = other RNA
gatgtgaggatctgttggtg

SEQ ID NO: 38601 - RNA, 20 nt, synthetic construct
  source 1..20: mol_type = other RNA
gatgtgcttaatcttcacac

SEQ ID NO: 38602 - RNA, 20 nt, synthetic construct
  source 1..20: mol_type = other RNA
gatgtggtgtggcatgtctg

SEQ ID NO: 38603 - RNA, 20 nt, synthetic construct
  source 1..20: mol_type = other RNA
gatgtgtaattgtaccttgg

SEQ ID NO: 38604 - RNA, 20 nt, synthetic construct
  source 1..20: mol_type = other RNA
gatgtgtaccaaaagtcctg

SEQ ID NO: 38605 - RNA, 20 nt, synthetic construct
  source 1..20: mol_type = other RNA
gatgtgtacccgtgtgtttt

SEQ ID NO: 38606 - RNA, 20 nt, synthetic construct
  source 1..20: mol_type = other RNA
gatgtgtagttattattgtc

SEQ ID NO: 38607 - RNA, 20 nt, synthetic construct
  source 1..20: mol_type = other RNA
gatgtgtatgatcaaagtga

SEQ ID NO: 38608 - RNA, 20 nt, synthetic construct
  source 1..20: mol_type = other RNA
gatgtgtatgttacacttcc

SEQ ID NO: 38609 - RNA, 20 nt, synthetic construct
  source 1..20: mol_type = other RNA
gatgtgtgcacaacacatgc

SEQ ID NO: 38610 - RNA, 20 nt, synthetic construct
  source 1..20: mol_type = other RNA
gatgtgtgtctctgctctca

SEQ ID NO: 38611 - RNA, 20 nt, synthetic construct
  source 1..20: mol_type = other RNA
gatgtgttgaccttagtggt

SEQ ID NO: 38612 - RNA, 20 nt, synthetic construct
  source 1..20: mol_type = other RNA
gatgttaattagatatgtga

SEQ ID NO: 38613 - RNA, 20 nt, synthetic construct
  source 1..20: mol_type = other RNA
gatgttatgccccctcttct

SEQ ID NO: 38614 - RNA, 20 nt, synthetic construct
  source 1..20: mol_type = other RNA
gatgttcaaccctcggcctc

SEQ ID NO: 38615 - RNA, 20 nt, synthetic construct
  source 1..20: mol_type = other RNA
gatgttgagtatcttttcat

SEQ ID NO: 38616 - RNA, 20 nt, synthetic construct
  source 1..20: mol_type = other RNA
gatgttgcctactagccagt

SEQ ID NO: 38617 - RNA, 20 nt, synthetic construct
  source 1..20: mol_type = other RNA
gatgttgcggtgagcagaga

SEQ ID NO: 38618 - RNA, 20 nt, synthetic construct
  source 1..20: mol_type = other RNA
gatgttggtgagaacccagt

SEQ ID NO: 38619 - RNA, 20 nt, synthetic construct
  source 1..20: mol_type = other RNA
gatgtttctacctttggcta

SEQ ID NO: 38620 - RNA, 20 nt, synthetic construct
  source 1..20: mol_type = other RNA
gatgtttggctccttaccac

SEQ ID NO: 38621 - RNA, 20 nt, synthetic construct
  source 1..20: mol_type = other RNA
gatgttttacacatgtcagc

SEQ ID NO: 38622 - RNA, 20 nt, synthetic construct
  source 1..20: mol_type = other RNA
gatgttttacattttccatt

SEQ ID NO: 38623 - RNA, 20 nt, synthetic construct
  source 1..20: mol_type = other RNA
gatgttttcagttgcatgaa

SEQ ID NO: 38624 - RNA, 20 nt, synthetic construct
  source 1..20: mol_type = other RNA
gatgttttgaacgaatgaaa

SEQ ID NO: 38625 - RNA, 20 nt, synthetic construct
  source 1..20: mol_type = other RNA
gatgtttttagagagatgcc

SEQ ID NO: 38626 - RNA, 20 nt, synthetic construct
  source 1..20: mol_type = other RNA
gattaaaataacacgcagaa

SEQ ID NO: 38627 - RNA, 20 nt, synthetic construct
  source 1..20: mol_type = other RNA
gattaaaggccctgatttaa

SEQ ID NO: 38628 - RNA, 20 nt, synthetic construct
  source 1..20: mol_type = other RNA
gattaaataacttccatgag

SEQ ID NO: 38629 - RNA, 20 nt, synthetic construct
  source 1..20: mol_type = other RNA
gattaaatacagagcacaga

SEQ ID NO: 38630 - RNA, 20 nt, synthetic construct
  source 1..20: mol_type = other RNA
gattaaataccacctgaaat

SEQ ID NO: 38631 - RNA, 20 nt, synthetic construct
  source 1..20: mol_type = other RNA
gattaagacactacaaaaaa

SEQ ID NO: 38632 - RNA, 20 nt, synthetic construct
  source 1..20: mol_type = other RNA
gattaagcacatctgtcttg

SEQ ID NO: 38633 - RNA, 20 nt, synthetic construct
  source 1..20: mol_type = other RNA
gattaagcatagtttgagta

SEQ ID NO: 38634 - RNA, 20 nt, synthetic construct
  source 1..20: mol_type = other RNA
gattaaggagatggcacata

SEQ ID NO: 38635 - RNA, 20 nt, synthetic construct
  source 1..20: mol_type = other RNA
gattaaggctggaggatggc

SEQ ID NO: 38636 - RNA, 20 nt, synthetic construct
  source 1..20: mol_type = other RNA
gattaatccttgtggtctta

SEQ ID NO: 38637 - RNA, 20 nt, synthetic construct
  source 1..20: mol_type = other RNA
gattaatcttgcaaaacaat

SEQ ID NO: 38638 - RNA, 20 nt, synthetic construct
  source 1..20: mol_type = other RNA
gattaatcttgtgaattgat

SEQ ID NO: 38639 - RNA, 20 nt, synthetic construct
  source 1..20: mol_type = other RNA
gattaatctttctgaactca

SEQ ID NO: 38640 - RNA, 20 nt, synthetic construct
  source 1..20: mol_type = other RNA
gattaatgtaggtgtctgat

SEQ ID NO: 38641 - RNA, 20 nt, synthetic construct
  source 1..20: mol_type = other RNA
gattaattcagtcaacacca

SEQ ID NO: 38642 - RNA, 20 nt, synthetic construct
  source 1..20: mol_type = other RNA
gattaatttgaggtctaggc

SEQ ID NO: 38643 - RNA, 20 nt, synthetic construct
  source 1..20: mol_type = other RNA
gattacaaaagaacaggact

SEQ ID NO: 38644 - RNA, 20 nt, synthetic construct
  source 1..20: mol_type = other RNA
gattacaagggtgacagagc

SEQ ID NO: 38645 - RNA, 20 nt, synthetic construct
  source 1..20: mol_type = other RNA
gattacaatgtaaggtgcac

SEQ ID NO: 38646 - RNA, 20 nt, synthetic construct
  source 1..20: mol_type = other RNA
gattacaattcctttctagg

SEQ ID NO: 38647 - RNA, 20 nt, synthetic construct
  source 1..20: mol_type = other RNA
gattacacacacctaccacc

SEQ ID NO: 38648 - RNA, 20 nt, synthetic construct
  source 1..20: mol_type = other RNA
gattacaggcgcacgccatc

SEQ ID NO: 38649 - RNA, 20 nt, synthetic construct
  source 1..20: mol_type = other RNA
gattacatagcaaggaagca

SEQ ID NO: 38650 - RNA, 20 nt, synthetic construct
  source 1..20: mol_type = other RNA
gattaccggcatccgccacc

SEQ ID NO: 38651 - RNA, 20 nt, synthetic construct
  source 1..20: mol_type = other RNA
gattaccttgaagtttaatt

SEQ ID NO: 38652 - RNA, 20 nt, synthetic construct
  source 1..20: mol_type = other RNA
gattactgactcaatcttct

SEQ ID NO: 38653 - RNA, 20 nt, synthetic construct
  source 1..20: mol_type = other RNA
gattactggatacaaggtca

SEQ ID NO: 38654 - RNA, 20 nt, synthetic construct
  source 1..20: mol_type = other RNA
gattactttacagttatgtc

SEQ ID NO: 38655 - RNA, 20 nt, synthetic construct
  source 1..20: mol_type = other RNA
gattagaaaattagctgact

SEQ ID NO: 38656 - RNA, 20 nt, synthetic construct
  source 1..20: mol_type = other RNA
gattagaaagtagattagct

SEQ ID NO: 38657 - RNA, 20 nt, synthetic construct
  source 1..20: mol_type = other RNA
gattagaaggattgttcatg

SEQ ID NO: 38658 - RNA, 20 nt, synthetic construct
  source 1..20: mol_type = other RNA
gattagaggctgcaccctcc

SEQ ID NO: 38659 - RNA, 20 nt, synthetic construct
  source 1..20: mol_type = other RNA
gattagcgaaagggattctg

SEQ ID NO: 38660 - RNA, 20 nt, synthetic construct
  source 1..20: mol_type = other RNA
gattagcttattctttttct

SEQ ID NO: 38661 - RNA, 20 nt, synthetic construct
  source 1..20: mol_type = other RNA
gattagcttcctcaggatct

SEQ ID NO: 38662 - RNA, 20 nt, synthetic construct
  source 1..20: mol_type = other RNA
gattagcttttacgaggaca

SEQ ID NO: 38663 - RNA, 20 nt, synthetic construct
  source 1..20: mol_type = other RNA
gattaggaaacagattgatt

SEQ ID NO: 38664 - RNA, 20 nt, synthetic construct
  source 1..20: mol_type = other RNA
gattaggcagaaccacctgg

SEQ ID NO: 38665 - RNA, 20 nt, synthetic construct
  source 1..20: mol_type = other RNA
gattagtgttaattcttcct

SEQ ID NO: 38666 - RNA, 20 nt, synthetic construct
  source 1..20: mol_type = other RNA
gattagttgactcctaaaac

SEQ ID NO: 38667 - RNA, 20 nt, synthetic construct
  source 1..20: mol_type = other RNA
gattataaccttgaacttcc

SEQ ID NO: 38668 - RNA, 20 nt, synthetic construct
  source 1..20: mol_type = other RNA
gattatagtggtaaggagcc

SEQ ID NO: 38669 - RNA, 20 nt, synthetic construct
  source 1..20: mol_type = other RNA
gattatatggtctaccatgt

SEQ ID NO: 38670 - RNA, 20 nt, synthetic construct
  source 1..20: mol_type = other RNA
gattatcagggatattggct

SEQ ID NO: 38671 - RNA, 20 nt, synthetic construct
  source 1..20: mol_type = other RNA
gattatggctagaaacttgg

SEQ ID NO: 38672 - RNA, 20 nt, synthetic construct
  source 1..20: mol_type = other RNA
gattatgttagatatcccat

SEQ ID NO: 38673 - RNA, 20 nt, synthetic construct
  source 1..20: mol_type = other RNA
gattatgttccacatgttac

SEQ ID NO: 38674 - RNA, 20 nt, synthetic construct
  source 1..20: mol_type = other RNA
gattatttcgaattatgcta

SEQ ID NO: 38675 - RNA, 20 nt, synthetic construct
  source 1..20: mol_type = other RNA
gattatttgcggcttgatta

SEQ ID NO: 38676 - RNA, 20 nt, synthetic construct
  source 1..20: mol_type = other RNA
gattatttggaagagagaag

SEQ ID NO: 38677 - RNA, 20 nt, synthetic construct
  source 1..20: mol_type = other RNA
gattatttttacccaacatg

SEQ ID NO: 38678 - RNA, 20 nt, synthetic construct
  source 1..20: mol_type = other RNA
gattcaaaatgtgatggcat

SEQ ID NO: 38679 - RNA, 20 nt, synthetic construct
  source 1..20: mol_type = other RNA
gattcaacaaaactgggggc

SEQ ID NO: 38680 - RNA, 20 nt, synthetic construct
  source 1..20: mol_type = other RNA
gattcaagaaaccacagagc

SEQ ID NO: 38681 - RNA, 20 nt, synthetic construct
  source 1..20: mol_type = other RNA
gattcaatgcaatacttaat

SEQ ID NO: 38682 - RNA, 20 nt, synthetic construct
  source 1..20: mol_type = other RNA
gattcaccaattgttaacat

SEQ ID NO: 38683 - RNA, 20 nt, synthetic construct
  source 1..20: mol_type = other RNA
gattcacgcacagggagata

SEQ ID NO: 38684 - RNA, 20 nt, synthetic construct
  source 1..20: mol_type = other RNA
gattcacttttgagttcaga

SEQ ID NO: 38685 - RNA, 20 nt, synthetic construct
  source 1..20: mol_type = other RNA
gattcagagtgctgggtaga

SEQ ID NO: 38686 - RNA, 20 nt, synthetic construct
  source 1..20: mol_type = other RNA
gattcagatgacagaaataa

SEQ ID NO: 38687 - RNA, 20 nt, synthetic construct
  source 1..20: mol_type = other RNA
gattcagtcttggtagtttg

SEQ ID NO: 38688 - RNA, 20 nt, synthetic construct
  source 1..20: mol_type = other RNA
gattcagtggttggaaaact

SEQ ID NO: 38689 - RNA, 20 nt, synthetic construct
  source 1..20: mol_type = other RNA
gattcatatgctttgagcta

SEQ ID NO: 38690 - RNA, 20 nt, synthetic construct
  source 1..20: mol_type = other RNA
gattcatcttgacttcactt

SEQ ID NO: 38691 - RNA, 20 nt, synthetic construct
  source 1..20: mol_type = other RNA
gattccacttatatgaagct

SEQ ID NO: 38692 - RNA, 20 nt, synthetic construct
  source 1..20: mol_type = other RNA
gattccaggtttacaggata

SEQ ID NO: 38693 - RNA, 20 nt, synthetic construct
  source 1..20: mol_type = other RNA
gattccagtttctctgcttt

SEQ ID NO: 38694 - RNA, 20 nt, synthetic construct
  source 1..20: mol_type = other RNA
gattcccaggtattttgttc

SEQ ID NO: 38695 - RNA, 20 nt, synthetic construct
  source 1..20: mol_type = other RNA
gattcccccttatgtgtgta

SEQ ID NO: 38696 - RNA, 20 nt, synthetic construct
  source 1..20: mol_type = other RNA
gattccccttatatgggata

SEQ ID NO: 38697 - RNA, 20 nt, synthetic construct
  source 1..20: mol_type = other RNA
gattccctctggccttctat

SEQ ID NO: 38698 - RNA, 20 nt, synthetic construct
  source 1..20: mol_type = other RNA
gattccgtctcaaaaaatta

SEQ ID NO: 38699 - RNA, 20 nt, synthetic construct
  source 1..20: mol_type = other RNA
gattcctccctggagaggca

SEQ ID NO: 38700 - RNA, 20 nt, synthetic construct
  source 1..20: mol_type = other RNA
gattcctttcaaagagacct

SEQ ID NO: 38701 - RNA, 20 nt, synthetic construct
  source 1..20: mol_type = other RNA
gattccttttttatgtgctt

SEQ ID NO: 38702 - RNA, 20 nt, synthetic construct
  source 1..20: mol_type = other RNA
gattcgattaaaataacacg

SEQ ID NO: 38703 - RNA, 20 nt, synthetic construct
  source 1..20: mol_type = other RNA
gattcgcattgctaattcat

SEQ ID NO: 38704 - RNA, 20 nt, synthetic construct
  source 1..20: mol_type = other RNA
gattcgggggagagcactgg

SEQ ID NO: 38705 - RNA, 20 nt, synthetic construct
  source 1..20: mol_type = other RNA
gattctaatgtgcaaggaga

SEQ ID NO: 38706 - RNA, 20 nt, synthetic construct
  source 1..20: mol_type = other RNA
gattctctgtctctgttgcc

SEQ ID NO: 38707 - RNA, 20 nt, synthetic construct
  source 1..20: mol_type = other RNA
gattctctttagggaagata

SEQ ID NO: 38708 - RNA, 20 nt, synthetic construct
  source 1..20: mol_type = other RNA
gattctgacccagagcctaa

SEQ ID NO: 38709 - RNA, 20 nt, synthetic construct
  source 1..20: mol_type = other RNA
gattctgctactagcaagct

SEQ ID NO: 38710 - RNA, 20 nt, synthetic construct
  source 1..20: mol_type = other RNA
gattctggccaaatccctga

SEQ ID NO: 38711 - RNA, 20 nt, synthetic construct
  source 1..20: mol_type = other RNA
gattctgtctctacaaaaaa

SEQ ID NO: 38712 - RNA, 20 nt, synthetic construct
  source 1..20: mol_type = other RNA
gattcttccactagtgggat

SEQ ID NO: 38713 - RNA, 20 nt, synthetic construct
  source 1..20: mol_type = other RNA
gattcttgtcatgaatgaat

SEQ ID NO: 38714 - RNA, 20 nt, synthetic construct
  source 1..20: mol_type = other RNA
gattcttgttaagcattttc

SEQ ID NO: 38715 - RNA, 20 nt, synthetic construct
  source 1..20: mol_type = other RNA
gattcttttataactgaaca

SEQ ID NO: 38716 - RNA, 20 nt, synthetic construct
  source 1..20: mol_type = other RNA
gattgaaaatggtttaggct

SEQ ID NO: 38717 - RNA, 20 nt, synthetic construct
  source 1..20: mol_type = other RNA
gattgaaatctaggcatata

SEQ ID NO: 38718 - RNA, 20 nt, synthetic construct
  source 1..20: mol_type = other RNA
gattgaatggaaagaaatag

SEQ ID NO: 38719 - RNA, 20 nt, synthetic construct
  source 1..20: mol_type = other RNA
gattgaccttctacttatct

SEQ ID NO: 38720 - RNA, 20 nt, synthetic construct
  source 1..20: mol_type = other RNA
gattgaccttgtatccagta

SEQ ID NO: 38721 - RNA, 20 nt, synthetic construct
  source 1..20: mol_type = other RNA
gattgagattagcgaaaggg

SEQ ID NO: 38722 - RNA, 20 nt, synthetic construct
  source 1..20: mol_type = other RNA
gattgaggacttcatgtaca

SEQ ID NO: 38723 - RNA, 20 nt, synthetic construct
  source 1..20: mol_type = other RNA
gattgagggttagatttttc

SEQ ID NO: 38724 - RNA, 20 nt, synthetic construct
  source 1..20: mol_type = other RNA
gattgagtatctggtgctgg

SEQ ID NO: 38725 - RNA, 20 nt, synthetic construct
  source 1..20: mol_type = other RNA
gattgatagatcatatgata

SEQ ID NO: 38726 - RNA, 20 nt, synthetic construct
  source 1..20: mol_type = other RNA
gattgatatctgagtgttgt

SEQ ID NO: 38727 - RNA, 20 nt, synthetic construct
  source 1..20: mol_type = other RNA
gattgattccagtttctctg

SEQ ID NO: 38728 - RNA, 20 nt, synthetic construct
  source 1..20: mol_type = other RNA
gattgatttatatgttgatg

SEQ ID NO: 38729 - RNA, 20 nt, synthetic construct
  source 1..20: mol_type = other RNA
gattgcaggtgtgggccacc

SEQ ID NO: 38730 - RNA, 20 nt, synthetic construct
  source 1..20: mol_type = other RNA
gattgccagttttctggaaa

SEQ ID NO: 38731 - RNA, 20 nt, synthetic construct
  source 1..20: mol_type = other RNA
gattgcccattataaaatag

SEQ ID NO: 38732 - RNA, 20 nt, synthetic construct
  source 1..20: mol_type = other RNA
gattgccccattgcactcca

SEQ ID NO: 38733 - RNA, 20 nt, synthetic construct
  source 1..20: mol_type = other RNA
gattgcctaacaccagtaag

SEQ ID NO: 38734 - RNA, 20 nt, synthetic construct
  source 1..20: mol_type = other RNA
gattgcgattgtttcagtgt

SEQ ID NO: 38735 - RNA, 20 nt, synthetic construct
  source 1..20: mol_type = other RNA
gattgctaaactgttcccca

SEQ ID NO: 38736 - RNA, 20 nt, synthetic construct
  source 1..20: mol_type = other RNA
gattgctagtgtcctcaggc

SEQ ID NO: 38737 - RNA, 20 nt, synthetic construct
  source 1..20: mol_type = other RNA
gattgcttgagagagataaa

SEQ ID NO: 38738 - RNA, 20 nt, synthetic construct
  source 1..20: mol_type = other RNA
gattggaaaactaggtattt

SEQ ID NO: 38739 - RNA, 20 nt, synthetic construct
  source 1..20: mol_type = other RNA
gattggaatgagtccagctt

SEQ ID NO: 38740 - RNA, 20 nt, synthetic construct
  source 1..20: mol_type = other RNA
gattggagactgataaactt

SEQ ID NO: 38741 - RNA, 20 nt, synthetic construct
  source 1..20: mol_type = other RNA
gattggatatttgcagtagt

SEQ ID NO: 38742 - RNA, 20 nt, synthetic construct
  source 1..20: mol_type = other RNA
gattggcaaatctttagtgt

SEQ ID NO: 38743 - RNA, 20 nt, synthetic construct
  source 1..20: mol_type = other RNA
gattggctttagatttatca

SEQ ID NO: 38744 - RNA, 20 nt, synthetic construct
  source 1..20: mol_type = other RNA
gattgggaaaatcttggaac

SEQ ID NO: 38745 - RNA, 20 nt, synthetic construct
  source 1..20: mol_type = other RNA
gattgggaagattggcttta

SEQ ID NO: 38746 - RNA, 20 nt, synthetic construct
  source 1..20: mol_type = other RNA
gattgggcattaattgagag

SEQ ID NO: 38747 - RNA, 20 nt, synthetic construct
  source 1..20: mol_type = other RNA
gattgggcttttcatatacg

SEQ ID NO: 38748 - RNA, 20 nt, synthetic construct
  source 1..20: mol_type = other RNA
gattgggtcaacaaactaac

SEQ ID NO: 38749 - RNA, 20 nt, synthetic construct
  source 1..20: mol_type = other RNA
gattggttggactccaccct

SEQ ID NO: 38750 - RNA, 20 nt, synthetic construct
  source 1..20: mol_type = other RNA
gattgtcgttgagtacctct

SEQ ID NO: 38751 - RNA, 20 nt, synthetic construct
  source 1..20: mol_type = other RNA
gattgtgaaatatattatgg

SEQ ID NO: 38752 - RNA, 20 nt, synthetic construct
  source 1..20: mol_type = other RNA
gattgtgccagtgaactcca

SEQ ID NO: 38753 - RNA, 20 nt, synthetic construct
  source 1..20: mol_type = other RNA
gattgtgtgatttcatatga

SEQ ID NO: 38754 - RNA, 20 nt, synthetic construct
  source 1..20: mol_type = other RNA
gattgtgtgtcgagaaaaat

SEQ ID NO: 38755 - RNA, 20 nt, synthetic construct
  source 1..20: mol_type = other RNA
gattgttagccacagcgttg

SEQ ID NO: 38756 - RNA, 20 nt, synthetic construct
  source 1..20: mol_type = other RNA
gattgttcatgtctgtgtag

SEQ ID NO: 38757 - RNA, 20 nt, synthetic construct
  source 1..20: mol_type = other RNA
gattgttccaggggggaaaa

SEQ ID NO: 38758 - RNA, 20 nt, synthetic construct
  source 1..20: mol_type = other RNA
gattgttgccatcattttat

SEQ ID NO: 38759 - RNA, 20 nt, synthetic construct
  source 1..20: mol_type = other RNA
gattgtttaattctgtttac

SEQ ID NO: 38760 - RNA, 20 nt, synthetic construct
  source 1..20: mol_type = other RNA
gattgtttcagtgtgtccac

SEQ ID NO: 38761 - RNA, 20 nt, synthetic construct
  source 1..20: mol_type = other RNA
gattgtttgaggctgggagt

SEQ ID NO: 38762 - RNA, 20 nt, synthetic construct
  source 1..20: mol_type = other RNA
gattgttttaggtagtcttg

SEQ ID NO: 38763 - RNA, 20 nt, synthetic construct
  source 1..20: mol_type = other RNA
gattgttttgttgctattgt

SEQ ID NO: 38764 - RNA, 20 nt, synthetic construct
  source 1..20: mol_type = other RNA
gatttaaagtaggttgagac

SEQ ID NO: 38765 - RNA, 20 nt, synthetic construct
  source 1..20: mol_type = other RNA
gatttaagagaggaagtgac

SEQ ID NO: 38766 - RNA, 20 nt, synthetic construct
  source 1..20: mol_type = other RNA
gatttaatagaggtctgtct

SEQ ID NO: 38767 - RNA, 20 nt, synthetic construct
  source 1..20: mol_type = other RNA
gatttacccctactttttgt

SEQ ID NO: 38768 - RNA, 20 nt, synthetic construct
  source 1..20: mol_type = other RNA
gatttactaaactgaacgaa

SEQ ID NO: 38769 - RNA, 20 nt, synthetic construct
  source 1..20: mol_type = other RNA
gatttagaaatacctgcagg

SEQ ID NO: 38770 - RNA, 20 nt, synthetic construct
  source 1..20: mol_type = other RNA
gatttaggccactctcatct

SEQ ID NO: 38771 - RNA, 20 nt, synthetic construct
  source 1..20: mol_type = other RNA
gatttataatccattgggta

SEQ ID NO: 38772 - RNA, 20 nt, synthetic construct
  source 1..20: mol_type = other RNA
gatttatagtgtttccttcc

SEQ ID NO: 38773 - RNA, 20 nt, synthetic construct
  source 1..20: mol_type = other RNA
gatttatcaatagcagtgct

SEQ ID NO: 38774 - RNA, 20 nt, synthetic construct
  source 1..20: mol_type = other RNA
gatttatctttctagattca

SEQ ID NO: 38775 - RNA, 20 nt, synthetic construct
  source 1..20: mol_type = other RNA
gatttatggcctaagatgga

SEQ ID NO: 38776 - RNA, 20 nt, synthetic construct
  source 1..20: mol_type = other RNA
gatttatgtggcatttaaat

SEQ ID NO: 38777 - RNA, 20 nt, synthetic construct
  source 1..20: mol_type = other RNA
gatttattcatagtcatttg

SEQ ID NO: 38778 - RNA, 20 nt, synthetic construct
  source 1..20: mol_type = other RNA
gatttatttttacccgtgga

SEQ ID NO: 38779 - RNA, 20 nt, synthetic construct
  source 1..20: mol_type = other RNA
gatttcaaagttaatagcct

SEQ ID NO: 38780 - RNA, 20 nt, synthetic construct
  source 1..20: mol_type = other RNA
gatttcaagtaacactcaga

SEQ ID NO: 38781 - RNA, 20 nt, synthetic construct
  source 1..20: mol_type = other RNA
gatttcaatctggaatgcat

SEQ ID NO: 38782 - RNA, 20 nt, synthetic construct
  source 1..20: mol_type = other RNA
gatttcacttacttgagccc

SEQ ID NO: 38783 - RNA, 20 nt, synthetic construct
  source 1..20: mol_type = other RNA
gatttcaggtggtatttaat

SEQ ID NO: 38784 - RNA, 20 nt, synthetic construct
  source 1..20: mol_type = other RNA
gatttcagttaacttattgg

SEQ ID NO: 38785 - RNA, 20 nt, synthetic construct
  source 1..20: mol_type = other RNA
gatttcataaaatgtacagt

SEQ ID NO: 38786 - RNA, 20 nt, synthetic construct
  source 1..20: mol_type = other RNA
gatttcataggcatctctcc

SEQ ID NO: 38787 - RNA, 20 nt, synthetic construct
  source 1..20: mol_type = other RNA
gatttcatgaacaattttct

SEQ ID NO: 38788 - RNA, 20 nt, synthetic construct
  source 1..20: mol_type = other RNA
gatttccagtgtttggtttt

SEQ ID NO: 38789 - RNA, 20 nt, synthetic construct
  source 1..20: mol_type = other RNA
gatttccctgcatacactca

SEQ ID NO: 38790 - RNA, 20 nt, synthetic construct
  source 1..20: mol_type = other RNA
gatttctactggggtcttag

SEQ ID NO: 38791 - RNA, 20 nt, synthetic construct
  source 1..20: mol_type = other RNA
gatttctaggccctaacccc

SEQ ID NO: 38792 - RNA, 20 nt, synthetic construct
  source 1..20: mol_type = other RNA
gatttctcggccgggcgcgg

SEQ ID NO: 38793 - RNA, 20 nt, synthetic construct
  source 1..20: mol_type = other RNA
gatttctgcatagagatctt

SEQ ID NO: 38794 - RNA, 20 nt, synthetic construct
  source 1..20: mol_type = other RNA
gatttcttaaaaatgacacc

SEQ ID NO: 38795 - RNA, 20 nt, synthetic construct
  source 1..20: mol_type = other RNA
gatttcttctttggctcaat

SEQ ID NO: 38796 - RNA, 20 nt, synthetic construct
  source 1..20: mol_type = other RNA
gatttctttttactcatgtc

SEQ ID NO: 38797 - RNA, 20 nt, synthetic construct
  source 1..20: mol_type = other RNA
gatttgaccatgggacaagt

SEQ ID NO: 38798 - RNA, 20 nt, synthetic construct
  source 1..20: mol_type = other RNA
gatttgagtaactaaactat

SEQ ID NO: 38799 - RNA, 20 nt, synthetic construct
  source 1..20: mol_type = other RNA
gatttgagtcttgctctctt

SEQ ID NO: 38800 - RNA, 20 nt, synthetic construct
  source 1..20: mol_type = other RNA
gatttgatcctggaatagta

SEQ ID NO: 38801 - RNA, 20 nt, synthetic construct
  source 1..20: mol_type = other RNA
gatttgattgggcattaatt

SEQ ID NO: 38802 - RNA, 20 nt, synthetic construct
  source 1..20: mol_type = other RNA
gatttgcatttctctaatag

SEQ ID NO: 38803 - RNA, 20 nt, synthetic construct
  source 1..20: mol_type = other RNA
gatttgccaatcaataattc

SEQ ID NO: 38804 - RNA, 20 nt, synthetic construct
  source 1..20: mol_type = other RNA
gatttgctggctcagtctgt

SEQ ID NO: 38805 - RNA, 20 nt, synthetic construct
  source 1..20: mol_type = other RNA
gatttgctgtataacatttt

SEQ ID NO: 38806 - RNA, 20 nt, synthetic construct
  source 1..20: mol_type = other RNA
gatttggccagaatcccttt

SEQ ID NO: 38807 - RNA, 20 nt, synthetic construct
  source 1..20: mol_type = other RNA
gatttgggaaggatggccag

SEQ ID NO: 38808 - RNA, 20 nt, synthetic construct
  source 1..20: mol_type = other RNA
gatttggtgtgtgcaaagga

SEQ ID NO: 38809 - RNA, 20 nt, synthetic construct
  source 1..20: mol_type = other RNA
gatttgtagatattttctgt

SEQ ID NO: 38810 - RNA, 20 nt, synthetic construct
  source 1..20: mol_type = other RNA
gatttgttatatccagattg

SEQ ID NO: 38811 - RNA, 20 nt, synthetic construct
  source 1..20: mol_type = other RNA
gatttgtttagtagctgtct

SEQ ID NO: 38812 - RNA, 20 nt, synthetic construct
  source 1..20: mol_type = other RNA
gatttgtttgaattaagcac

SEQ ID NO: 38813 - RNA, 20 nt, synthetic construct
  source 1..20: mol_type = other RNA
gatttgtttgtgaagataca

SEQ ID NO: 38814 - RNA, 20 nt, synthetic construct
  source 1..20: mol_type = other RNA
gattttaatctgtcctgaat

SEQ ID NO: 38815 - RNA, 20 nt, synthetic construct
  source 1..20: mol_type = other RNA
gattttaccaaggctaagtt

SEQ ID NO: 38816 - RNA, 20 nt, synthetic construct
  source 1..20: mol_type = other RNA
gattttacttactagttgtg

SEQ ID NO: 38817 - RNA, 20 nt, synthetic construct
  source 1..20: mol_type = other RNA
gattttagaaggtaagaatg

SEQ ID NO: 38818 - RNA, 20 nt, synthetic construct
  source 1..20: mol_type = other RNA
gattttaggtcatttttcac

SEQ ID NO: 38819 - RNA, 20 nt, synthetic construct
  source 1..20: mol_type = other RNA
gattttcacagggcagggag

SEQ ID NO: 38820 - RNA, 20 nt, synthetic construct
  source 1..20: mol_type = other RNA
gattttcccaaagatagact

SEQ ID NO: 38821 - RNA, 20 nt, synthetic construct
  source 1..20: mol_type = other RNA
gattttcccaatctctggta

SEQ ID NO: 38822 - RNA, 20 nt, synthetic construct
  source 1..20: mol_type = other RNA
gattttcgtatcttttaaca

SEQ ID NO: 38823 - RNA, 20 nt, synthetic construct
  source 1..20: mol_type = other RNA
gattttctaggaaactttaa

SEQ ID NO: 38824 - RNA, 20 nt, synthetic construct
  source 1..20: mol_type = other RNA
gattttctattcattaccag

SEQ ID NO: 38825 - RNA, 20 nt, synthetic construct
  source 1..20: mol_type = other RNA
gattttctgcttctcaataa

SEQ ID NO: 38826 - RNA, 20 nt, synthetic construct
  source 1..20: mol_type = other RNA
gattttcttgttataagcaa

SEQ ID NO: 38827 - RNA, 20 nt, synthetic construct
  source 1..20: mol_type = other RNA
gattttgaggcagagagatg

SEQ ID NO: 38828 - RNA, 20 nt, synthetic construct
  source 1..20: mol_type = other RNA
gattttgctgccaagtcagc

SEQ ID NO: 38829 - RNA, 20 nt, synthetic construct
  source 1..20: mol_type = other RNA
gattttggattgcgattgtt

SEQ ID NO: 38830 - RNA, 20 nt, synthetic construct
  source 1..20: mol_type = other RNA
gattttgtatcctgagactt

SEQ ID NO: 38831 - RNA, 20 nt, synthetic construct
  source 1..20: mol_type = other RNA
gattttgtgtcttctgtttt

SEQ ID NO: 38832 - RNA, 20 nt, synthetic construct
  source 1..20: mol_type = other RNA
gattttgtttatttgctgtc

SEQ ID NO: 38833 - RNA, 20 nt, synthetic construct
  source 1..20: mol_type = other RNA
gatttttagtgactggctta

SEQ ID NO: 38834 - RNA, 20 nt, synthetic construct
  source 1..20: mol_type = other RNA
gatttttatcaaaatcaagg

SEQ ID NO: 38835 - RNA, 20 nt, synthetic construct
  source 1..20: mol_type = other RNA
gatttttccaacagtttaca

SEQ ID NO: 38836 - RNA, 20 nt, synthetic construct
  source 1..20: mol_type = other RNA
gatttttcctttgcctaagt

SEQ ID NO: 38837 - RNA, 20 nt, synthetic construct
  source 1..20: mol_type = other RNA
gatttttctgtttctgtgaa

SEQ ID NO: 38838 - RNA, 20 nt, synthetic construct
  source 1..20: mol_type = other RNA
gatttttgccagtgttttaa

SEQ ID NO: 38839 - RNA, 20 nt, synthetic construct
  source 1..20: mol_type = other RNA
gatttttgtgtagaggtgaa

SEQ ID NO: 38840 - RNA, 20 nt, synthetic construct
  source 1..20: mol_type = other RNA
gattttttgttgttggtttg

SEQ ID NO: 38841 - RNA, 20 nt, synthetic construct
  source 1..20: mol_type = other RNA
gcaaaaaagtcatgacctgc

SEQ ID NO: 38842 - RNA, 20 nt, synthetic construct
  source 1..20: mol_type = other RNA
gcaaaaaatgcagtagtaaa

SEQ ID NO: 38843 - RNA, 20 nt, synthetic construct
  source 1..20: mol_type = other RNA
gcaaaaacagtttccctctg

SEQ ID NO: 38844 - RNA, 20 nt, synthetic construct
  source 1..20: mol_type = other RNA
gcaaaaatacagctccaaag

SEQ ID NO: 38845 - RNA, 20 nt, synthetic construct
  source 1..20: mol_type = other RNA
gcaaaaatactacaagagtt

SEQ ID NO: 38846 - RNA, 20 nt, synthetic construct
  source 1..20: mol_type = other RNA
gcaaaaattgtacaattttc

SEQ ID NO: 38847 - RNA, 20 nt, synthetic construct
  source 1..20: mol_type = other RNA
gcaaaaattttgttcaggag

SEQ ID NO: 38848 - RNA, 20 nt, synthetic construct
  source 1..20: mol_type = other RNA
gcaaaacaatagcccagcag

SEQ ID NO: 38849 - RNA, 20 nt, synthetic construct
  source 1..20: mol_type = other RNA
gcaaaacatatgtcagatgg

SEQ ID NO: 38850 - RNA, 20 nt, synthetic construct
  source 1..20: mol_type = other RNA
gcaaaacggaaactttatac

SEQ ID NO: 38851 - RNA, 20 nt, synthetic construct
  source 1..20: mol_type = other RNA
gcaaaactcctgaacaaaat

SEQ ID NO: 38852 - RNA, 20 nt, synthetic construct
  source 1..20: mol_type = other RNA
gcaaaactttcttcaaaatt

SEQ ID NO: 38853 - RNA, 20 nt, synthetic construct
  source 1..20: mol_type = other RNA
gcaaaagaattaaactcatt

SEQ ID NO: 38854 - RNA, 20 nt, synthetic construct
  source 1..20: mol_type = other RNA
gcaaaagatgatgaacaaag

SEQ ID NO: 38855 - RNA, 20 nt, synthetic construct
  source 1..20: mol_type = other RNA
gcaaaagcaaaattctaaca

SEQ ID NO: 38856 - RNA, 20 nt, synthetic construct
  source 1..20: mol_type = other RNA
gcaaaagcaattattagttg

SEQ ID NO: 38857 - RNA, 20 nt, synthetic construct
  source 1..20: mol_type = other RNA
gcaaaagcaccactgagagg

SEQ ID NO: 38858 - RNA, 20 nt, synthetic construct
  source 1..20: mol_type = other RNA
gcaaaatggaagtgctgggc

SEQ ID NO: 38859 - RNA, 20 nt, synthetic construct
  source 1..20: mol_type = other RNA
gcaaaatggagacatctgag

SEQ ID NO: 38860 - RNA, 20 nt, synthetic construct
  source 1..20: mol_type = other RNA
gcaaaattctaacaagaagc

SEQ ID NO: 38861 - RNA, 20 nt, synthetic construct
  source 1..20: mol_type = other RNA
gcaaaattgacaaacccttg

SEQ ID NO: 38862 - RNA, 20 nt, synthetic construct
  source 1..20: mol_type = other RNA
gcaaaattttaaatcagcac

SEQ ID NO: 38863 - RNA, 20 nt, synthetic construct
  source 1..20: mol_type = other RNA
gcaaacaaacacactgggta

SEQ ID NO: 38864 - RNA, 20 nt, synthetic construct
  source 1..20: mol_type = other RNA
gcaaacagactgagccagca

SEQ ID NO: 38865 - RNA, 20 nt, synthetic construct
  source 1..20: mol_type = other RNA
gcaaacagcgccacttaaaa

SEQ ID NO: 38866 - RNA, 20 nt, synthetic construct
  source 1..20: mol_type = other RNA
gcaaacatttatggaattgc

SEQ ID NO: 38867 - RNA, 20 nt, synthetic construct
  source 1..20: mol_type = other RNA
gcaaaccaaatgcagaaaat

SEQ ID NO: 38868 - RNA, 20 nt, synthetic construct
  source 1..20: mol_type = other RNA
gcaaaccacacagagaacag

SEQ ID NO: 38869 - RNA, 20 nt, synthetic construct
  source 1..20: mol_type = other RNA
gcaaaccagacatttctcat

SEQ ID NO: 38870 - RNA, 20 nt, synthetic construct
  source 1..20: mol_type = other RNA
gcaaacctcctggttttgat

SEQ ID NO: 38871 - RNA, 20 nt, synthetic construct
  source 1..20: mol_type = other RNA
gcaaacgtgcacacccagtt

SEQ ID NO: 38872 - RNA, 20 nt, synthetic construct
  source 1..20: mol_type = other RNA
gcaaactaagtggtattcta

SEQ ID NO: 38873 - RNA, 20 nt, synthetic construct
  source 1..20: mol_type = other RNA
gcaaactaccaagactgaat

SEQ ID NO: 38874 - RNA, 20 nt, synthetic construct
  source 1..20: mol_type = other RNA
gcaaactactgatagcgaaa

SEQ ID NO: 38875 - RNA, 20 nt, synthetic construct
  source 1..20: mol_type = other RNA
gcaaactcagatctgagaga

SEQ ID NO: 38876 - RNA, 20 nt, synthetic construct
  source 1..20: mol_type = other RNA
gcaaactctaaataataggt

SEQ ID NO: 38877 - RNA, 20 nt, synthetic construct
  source 1..20: mol_type = other RNA
gcaaactgaatcagacaaca

SEQ ID NO: 38878 - RNA, 20 nt, synthetic construct
  source 1..20: mol_type = other RNA
gcaaacttagaatataaact

SEQ ID NO: 38879 - RNA, 20 nt, synthetic construct
  source 1..20: mol_type = other RNA
gcaaagaggcaaaactcctg

SEQ ID NO: 38880 - RNA, 20 nt, synthetic construct
  source 1..20: mol_type = other RNA
gcaaagatatgggttattca

SEQ ID NO: 38881 - RNA, 20 nt, synthetic construct
  source 1..20: mol_type = other RNA
gcaaagcaacatgctaagtg

SEQ ID NO: 38882 - RNA, 20 nt, synthetic construct
  source 1..20: mol_type = other RNA
gcaaagcaagaaaaagaaat

SEQ ID NO: 38883 - RNA, 20 nt, synthetic construct
  source 1..20: mol_type = other RNA
gcaaaggaaaaaactttttt

SEQ ID NO: 38884 - RNA, 20 nt, synthetic construct
  source 1..20: mol_type = other RNA
gcaaaggaaaaatctaaccc

SEQ ID NO: 38885 - RNA, 20 nt, synthetic construct
  source 1..20: mol_type = other RNA
gcaaaggatgtcaacaaaat

SEQ ID NO: 38886 - RNA, 20 nt, synthetic construct
  source 1..20: mol_type = other RNA
gcaaaggattagaaagtaga

SEQ ID NO: 38887 - RNA, 20 nt, synthetic construct
  source 1..20: mol_type = other RNA
gcaaaggattcgggggagag

SEQ ID NO: 38888 - RNA, 20 nt, synthetic construct
  source 1..20: mol_type = other RNA
gcaaaggccgctcttgacct

SEQ ID NO: 38889 - RNA, 20 nt, synthetic construct
  source 1..20: mol_type = other RNA
gcaaaggttgagacaagacc

SEQ ID NO: 38890 - RNA, 20 nt, synthetic construct
  source 1..20: mol_type = other RNA
gcaaagtaaaaagcactatc

SEQ ID NO: 38891 - RNA, 20 nt, synthetic construct
  source 1..20: mol_type = other RNA
gcaaagtttcctacatactg

SEQ ID NO: 38892 - RNA, 20 nt, synthetic construct
  source 1..20: mol_type = other RNA
gcaaataatcattcttctaa

SEQ ID NO: 38893 - RNA, 20 nt, synthetic construct
  source 1..20: mol_type = other RNA
gcaaatatccaatcactggc

SEQ ID NO: 38894 - RNA, 20 nt, synthetic construct
  source 1..20: mol_type = other RNA
gcaaatcaaaacaataagac

SEQ ID NO: 38895 - RNA, 20 nt, synthetic construct
  source 1..20: mol_type = other RNA
gcaaatcagaaaaggctgag

SEQ ID NO: 38896 - RNA, 20 nt, synthetic construct
  source 1..20: mol_type = other RNA
gcaaatctctagaacttatg

SEQ ID NO: 38897 - RNA, 20 nt, synthetic construct
  source 1..20: mol_type = other RNA
gcaaatctttagtgttgctt

SEQ ID NO: 38898 - RNA, 20 nt, synthetic construct
  source 1..20: mol_type = other RNA
gcaaatgaggttgcttttac

SEQ ID NO: 38899 - RNA, 20 nt, synthetic construct
  source 1..20: mol_type = other RNA
gcaaatgtaatgaaaatatg

SEQ ID NO: 38900 - RNA, 20 nt, synthetic construct
  source 1..20: mol_type = other RNA
gcaaatgtcatcttctctct

SEQ ID NO: 38901 - RNA, 20 nt, synthetic construct
  source 1..20: mol_type = other RNA
gcaaatgtgactagaagaaa

SEQ ID NO: 38902 - RNA, 20 nt, synthetic construct
  source 1..20: mol_type = other RNA
gcaaattattttcctccttc

SEQ ID NO: 38903 - RNA, 20 nt, synthetic construct
  source 1..20: mol_type = other RNA
gcaaattcatagatcaccag

SEQ ID NO: 38904 - RNA, 20 nt, synthetic construct
  source 1..20: mol_type = other RNA
gcaaattgtcagattttctt

SEQ ID NO: 38905 - RNA, 20 nt, synthetic construct
  source 1..20: mol_type = other RNA
gcaaatttatgtgaaaagaa

SEQ ID NO: 38906 - RNA, 20 nt, synthetic construct
  source 1..20: mol_type = other RNA
gcaacaaaacaatctaattc

SEQ ID NO: 38907 - RNA, 20 nt, synthetic construct
  source 1..20: mol_type = other RNA
gcaacaaaggcgaagcccgc

SEQ ID NO: 38908 - RNA, 20 nt, synthetic construct
  source 1..20: mol_type = other RNA
gcaacaaatgttgcagagac

SEQ ID NO: 38909 - RNA, 20 nt, synthetic construct
  source 1..20: mol_type = other RNA
gcaacaatcaacaggtagct

SEQ ID NO: 38910 - RNA, 20 nt, synthetic construct
  source 1..20: mol_type = other RNA
gcaacaattcaacagctact

SEQ ID NO: 38911 - RNA, 20 nt, synthetic construct
  source 1..20: mol_type = other RNA
gcaacaccagatactcatgc

SEQ ID NO: 38912 - RNA, 20 nt, synthetic construct
  source 1..20: mol_type = other RNA
gcaacactaaagatttgcca

SEQ ID NO: 38913 - RNA, 20 nt, synthetic construct
  source 1..20: mol_type = other RNA
gcaacagaaatttattgttt

SEQ ID NO: 38914 - RNA, 20 nt, synthetic construct
  source 1..20: mol_type = other RNA
gcaacagaataaatgaaaac

SEQ ID NO: 38915 - RNA, 20 nt, synthetic construct
  source 1..20: mol_type = other RNA
gcaacagagacagagaatct

SEQ ID NO: 38916 - RNA, 20 nt, synthetic construct
  source 1..20: mol_type = other RNA
gcaacagatctgagaagact

SEQ ID NO: 38917 - RNA, 20 nt, synthetic construct
  source 1..20: mol_type = other RNA
gcaacaggaagaggcagcta

SEQ ID NO: 38918 - RNA, 20 nt, synthetic construct
  source 1..20: mol_type = other RNA
gcaacagtcattcaggtcta

SEQ ID NO: 38919 - RNA, 20 nt, synthetic construct
  source 1..20: mol_type = other RNA
gcaacataaatagggtgcta

SEQ ID NO: 38920 - RNA, 20 nt, synthetic construct
  source 1..20: mol_type = other RNA
gcaacatccctatgcaataa

SEQ ID NO: 38921 - RNA, 20 nt, synthetic construct
  source 1..20: mol_type = other RNA
gcaacatctgcctcccgggt

SEQ ID NO: 38922 - RNA, 20 nt, synthetic construct
  source 1..20: mol_type = other RNA
gcaacatgctaagtgtttag

SEQ ID NO: 38923 - RNA, 20 nt, synthetic construct
  source 1..20: mol_type = other RNA
gcaacatttgttgcatcccc

SEQ ID NO: 38924 - RNA, 20 nt, synthetic construct
  source 1..20: mol_type = other RNA
gcaacattttaattccaaat

SEQ ID NO: 38925 - RNA, 20 nt, synthetic construct
  source 1..20: mol_type = other RNA
gcaaccatccccgctgtcca

SEQ ID NO: 38926 - RNA, 20 nt, synthetic construct
  source 1..20: mol_type = other RNA
gcaacctcatttgcagagca

SEQ ID NO: 38927 - RNA, 20 nt, synthetic construct
  source 1..20: mol_type = other RNA
gcaacctccgtttttcaggt

SEQ ID NO: 38928 - RNA, 20 nt, synthetic construct
  source 1..20: mol_type = other RNA
gcaacctgctttcctcatgt

SEQ ID NO: 38929 - RNA, 20 nt, synthetic construct
  source 1..20: mol_type = other RNA
gcaaccttgggagaaaattt

SEQ ID NO: 38930 - RNA, 20 nt, synthetic construct
  source 1..20: mol_type = other RNA
gcaaccttttaggtgcccca

SEQ ID NO: 38931 - RNA, 20 nt, synthetic construct
  source 1..20: mol_type = other RNA
gcaacggaaatgagtgagcc

SEQ ID NO: 38932 - RNA, 20 nt, synthetic construct
  source 1..20: mol_type = other RNA
gcaactactatttcgcaaag

SEQ ID NO: 38933 - RNA, 20 nt, synthetic construct
  source 1..20: mol_type = other RNA
gcaactagagaaagcatcag

SEQ ID NO: 38934 - RNA, 20 nt, synthetic construct
  source 1..20: mol_type = other RNA
gcaactatcaaaacacttct

SEQ ID NO: 38935 - RNA, 20 nt, synthetic construct
  source 1..20: mol_type = other RNA
gcaactcctgggctcatcta

SEQ ID NO: 38936 - RNA, 20 nt, synthetic construct
  source 1..20: mol_type = other RNA
gcaactcttggccattttct

SEQ ID NO: 38937 - RNA, 20 nt, synthetic construct
  source 1..20: mol_type = other RNA
gcaactgaaaacatcttttt

SEQ ID NO: 38938 - RNA, 20 nt, synthetic construct
  source 1..20: mol_type = other RNA
gcaactgagaagagctgtaa

SEQ ID NO: 38939 - RNA, 20 nt, synthetic construct
  source 1..20: mol_type = other RNA
gcaactgcatcttcttttac

SEQ ID NO: 38940 - RNA, 20 nt, synthetic construct
  source 1..20: mol_type = other RNA
gcaactgttttttcctccct

SEQ ID NO: 38941 - RNA, 20 nt, synthetic construct
  source 1..20: mol_type = other RNA
gcaacttactctcaaataat

SEQ ID NO: 38942 - RNA, 20 nt, synthetic construct
  source 1..20: mol_type = other RNA
gcaacttgaaggcaatgtag

SEQ ID NO: 38943 - RNA, 20 nt, synthetic construct
  source 1..20: mol_type = other RNA
gcaacttgatcagggatttg

SEQ ID NO: 38944 - RNA, 20 nt, synthetic construct
  source 1..20: mol_type = other RNA
gcaacttgcagaagagtgaa

SEQ ID NO: 38945 - RNA, 20 nt, synthetic construct
  source 1..20: mol_type = other RNA
gcaagaaaaagaaataaaag

SEQ ID NO: 38946 - RNA, 20 nt, synthetic construct
  source 1..20: mol_type = other RNA
gcaagaatggtttaacacat

SEQ ID NO: 38947 - RNA, 20 nt, synthetic construct
  source 1..20: mol_type = other RNA
gcaagaccctgtctctaaaa

SEQ ID NO: 38948 - RNA, 20 nt, synthetic construct
  source 1..20: mol_type = other RNA
gcaagactcaaatctcaaaa

SEQ ID NO: 38949 - RNA, 20 nt, synthetic construct
  source 1..20: mol_type = other RNA
gcaagactttatgtggaaaa

SEQ ID NO: 38950 - RNA, 20 nt, synthetic construct
  source 1..20: mol_type = other RNA
gcaagagagcaagactcaaa

SEQ ID NO: 38951 - RNA, 20 nt, synthetic construct
  source 1..20: mol_type = other RNA
gcaagagagcaagtccccat

SEQ ID NO: 38952 - RNA, 20 nt, synthetic construct
  source 1..20: mol_type = other RNA
gcaagagttaaaactcacaa

SEQ ID NO: 38953 - RNA, 20 nt, synthetic construct
  source 1..20: mol_type = other RNA
gcaagagttccaactgtata

SEQ ID NO: 38954 - RNA, 20 nt, synthetic construct
  source 1..20: mol_type = other RNA
gcaagatgcataagttctag

SEQ ID NO: 38955 - RNA, 20 nt, synthetic construct
  source 1..20: mol_type = other RNA
gcaagatggcaagtttccat

SEQ ID NO: 38956 - RNA, 20 nt, synthetic construct
  source 1..20: mol_type = other RNA
gcaagatgtcaacattaagg

SEQ ID NO: 38957 - RNA, 20 nt, synthetic construct
  source 1..20: mol_type = other RNA
gcaagattaatcttgtgaat

SEQ ID NO: 38958 - RNA, 20 nt, synthetic construct
  source 1..20: mol_type = other RNA
gcaagattactggatacaag

SEQ ID NO: 38959 - RNA, 20 nt, synthetic construct
  source 1..20: mol_type = other RNA
gcaagcaacaccagatactc

SEQ ID NO: 38960 - RNA, 20 nt, synthetic construct
  source 1..20: mol_type = other RNA
gcaagcacgttagcatcacc

SEQ ID NO: 38961 - RNA, 20 nt, synthetic construct
  source 1..20: mol_type = other RNA
gcaagcactggtaaggaaac

SEQ ID NO: 38962 - RNA, 20 nt, synthetic construct
  source 1..20: mol_type = other RNA
gcaagcagatctgctgtaag

SEQ ID NO: 38963 - RNA, 20 nt, synthetic construct
  source 1..20: mol_type = other RNA
gcaagcagtaaatatactga

SEQ ID NO: 38964 - RNA, 20 nt, synthetic construct
  source 1..20: mol_type = other RNA
gcaagcatgagtatctggtg

SEQ ID NO: 38965 - RNA, 20 nt, synthetic construct
  source 1..20: mol_type = other RNA
gcaagccacattagccactc

SEQ ID NO: 38966 - RNA, 20 nt, synthetic construct
  source 1..20: mol_type = other RNA
gcaagccttggcaaggggaa

SEQ ID NO: 38967 - RNA, 20 nt, synthetic construct
  source 1..20: mol_type = other RNA
gcaagctaataatttatcag

SEQ ID NO: 38968 - RNA, 20 nt, synthetic construct
  source 1..20: mol_type = other RNA
gcaagctccgcctcctggtg

SEQ ID NO: 38969 - RNA, 20 nt, synthetic construct
  source 1..20: mol_type = other RNA
gcaaggaagcagaatgtcca

SEQ ID NO: 38970 - RNA, 20 nt, synthetic construct
  source 1..20: mol_type = other RNA
gcaaggaaggaaaggagata

SEQ ID NO: 38971 - RNA, 20 nt, synthetic construct
  source 1..20: mol_type = other RNA
gcaaggaagggcttgatcta

SEQ ID NO: 38972 - RNA, 20 nt, synthetic construct
  source 1..20: mol_type = other RNA
gcaaggaccattagcagttc

SEQ ID NO: 38973 - RNA, 20 nt, synthetic construct
  source 1..20: mol_type = other RNA
gcaaggagagaaaaacaaaa

SEQ ID NO: 38974 - RNA, 20 nt, synthetic construct
  source 1..20: mol_type = other RNA
gcaaggataaacaaagagaa

SEQ ID NO: 38975 - RNA, 20 nt, synthetic construct
  source 1..20: mol_type = other RNA
gcaaggcccaccatgatgca

SEQ ID NO: 38976 - RNA, 20 nt, synthetic construct
  source 1..20: mol_type = other RNA
gcaaggctaacagccaaaga

SEQ ID NO: 38977 - RNA, 20 nt, synthetic construct
  source 1..20: mol_type = other RNA
gcaaggctcctgcagacatg

SEQ ID NO: 38978 - RNA, 20 nt, synthetic construct
  source 1..20: mol_type = other RNA
gcaagggactgtcgaagctt

SEQ ID NO: 38979 - RNA, 20 nt, synthetic construct
  source 1..20: mol_type = other RNA
gcaaggggaatggtactgcc

SEQ ID NO: 38980 - RNA, 20 nt, synthetic construct
  source 1..20: mol_type = other RNA
gcaagggtggctggcacttt

SEQ ID NO: 38981 - RNA, 20 nt, synthetic construct
  source 1..20: mol_type = other RNA
gcaaggtcgtttcagattgc

SEQ ID NO: 38982 - RNA, 20 nt, synthetic construct
  source 1..20: mol_type = other RNA
gcaagtaaaagaagatgcag

SEQ ID NO: 38983 - RNA, 20 nt, synthetic construct
  source 1..20: mol_type = other RNA
gcaagtatgagccactagtc

SEQ ID NO: 38984 - RNA, 20 nt, synthetic construct
  source 1..20: mol_type = other RNA
gcaagtccccatctccacaa

SEQ ID NO: 38985 - RNA, 20 nt, synthetic construct
  source 1..20: mol_type = other RNA
gcaagtgtggtggtctcacc

SEQ ID NO: 38986 - RNA, 20 nt, synthetic construct
  source 1..20: mol_type = other RNA
gcaagttaaaagacatcttt

SEQ ID NO: 38987 - RNA, 20 nt, synthetic construct
  source 1..20: mol_type = other RNA
gcaagttacatgcttagcct

SEQ ID NO: 38988 - RNA, 20 nt, synthetic construct
  source 1..20: mol_type = other RNA
gcaagttgctatccagtctc

SEQ ID NO: 38989 - RNA, 20 nt, synthetic construct
  source 1..20: mol_type = other RNA
gcaagtttccattctcttaa

SEQ ID NO: 38990 - RNA, 20 nt, synthetic construct
  source 1..20: mol_type = other RNA
gcaataactcaaaatgttca

SEQ ID NO: 38991 - RNA, 20 nt, synthetic construct
  source 1..20: mol_type = other RNA
gcaatacagttaacgtatga

SEQ ID NO: 38992 - RNA, 20 nt, synthetic construct
  source 1..20: mol_type = other RNA
gcaatactctcagaaattat

SEQ ID NO: 38993 - RNA, 20 nt, synthetic construct
  source 1..20: mol_type = other RNA
gcaatacttaatagcccaac

SEQ ID NO: 38994 - RNA, 20 nt, synthetic construct
  source 1..20: mol_type = other RNA
gcaatatagtgggaccccgt

SEQ ID NO: 38995 - RNA, 20 nt, synthetic construct
  source 1..20: mol_type = other RNA
gcaatcaaatggccttcttt

SEQ ID NO: 38996 - RNA, 20 nt, synthetic construct
  source 1..20: mol_type = other RNA
gcaatcacagcacttgggga

SEQ ID NO: 38997 - RNA, 20 nt, synthetic construct
  source 1..20: mol_type = other RNA
gcaatcacggctgattataa

SEQ ID NO: 38998 - RNA, 20 nt, synthetic construct
  source 1..20: mol_type = other RNA
gcaatccaaaatcctctgta

SEQ ID NO: 38999 - RNA, 20 nt, synthetic construct
  source 1..20: mol_type = other RNA
gcaatccaaggacagaaatt

SEQ ID NO: 39000 - RNA, 20 nt, synthetic construct
  source 1..20: mol_type = other RNA
gcaatccaggatcttactgt

SEQ ID NO: 39001 - RNA, 20 nt, synthetic construct
  source 1..20: mol_type = other RNA
gcaatctcagctcattacag

SEQ ID NO: 39002 - RNA, 20 nt, synthetic construct
  source 1..20: mol_type = other RNA
gcaatctcggcttcactgca

SEQ ID NO: 39003 - RNA, 20 nt, synthetic construct
  source 1..20: mol_type = other RNA
gcaatctgaaacgaccttgc

SEQ ID NO: 39004 - RNA, 20 nt, synthetic construct
  source 1..20: mol_type = other RNA
gcaatgagtctgacatactg

SEQ ID NO: 39005 - RNA, 20 nt, synthetic construct
  source 1..20: mol_type = other RNA
gcaatgataggtcactgcag

SEQ ID NO: 39006 - RNA, 20 nt, synthetic construct
  source 1..20: mol_type = other RNA
gcaatgcaggcgcctggaca

SEQ ID NO: 39007 - RNA, 20 nt, synthetic construct
  source 1..20: mol_type = other RNA
gcaatgcgaatcatctaggc

SEQ ID NO: 39008 - RNA, 20 nt, synthetic construct
  source 1..20: mol_type = other RNA
gcaatgcgtgtgaaaccaag

SEQ ID NO: 39009 - RNA, 20 nt, synthetic construct
  source 1..20: mol_type = other RNA
gcaatgctctcttcccccaa

SEQ ID NO: 39010 - RNA, 20 nt, synthetic construct
  source 1..20: mol_type = other RNA
gcaatggggcaatctcagct

SEQ ID NO: 39011 - RNA, 20 nt, synthetic construct
  source 1..20: mol_type = other RNA
gcaatggtgggatctctggg

SEQ ID NO: 39012 - RNA, 20 nt, synthetic construct
  source 1..20: mol_type = other RNA
gcaatgtaacacagttctag

SEQ ID NO: 39013 - RNA, 20 nt, synthetic construct
  source 1..20: mol_type = other RNA
gcaatgtagggaatagacaa

SEQ ID NO: 39014 - RNA, 20 nt, synthetic construct
  source 1..20: mol_type = other RNA
gcaatgttgattttgaggca

SEQ ID NO: 39015 - RNA, 20 nt, synthetic construct
  source 1..20: mol_type = other RNA
gcaattattagttgtacttg

SEQ ID NO: 39016 - RNA, 20 nt, synthetic construct
  source 1..20: mol_type = other RNA
gcaattatttgaataaggtc

SEQ ID NO: 39017 - RNA, 20 nt, synthetic construct
  source 1..20: mol_type = other RNA
gcaattccataaatgtttgc

SEQ ID NO: 39018 - RNA, 20 nt, synthetic construct
  source 1..20: mol_type = other RNA
gcaattgcagccagagagtg

SEQ ID NO: 39019 - RNA, 20 nt, synthetic construct
  source 1..20: mol_type = other RNA
gcaattgcgcagaactgggg

SEQ ID NO: 39020 - RNA, 20 nt, synthetic construct
  source 1..20: mol_type = other RNA
gcaattggaagactatcacg

SEQ ID NO: 39021 - RNA, 20 nt, synthetic construct
  source 1..20: mol_type = other RNA
gcaatttagaattctctctc

SEQ ID NO: 39022 - RNA, 20 nt, synthetic construct
  source 1..20: mol_type = other RNA
gcaatttatatgatactcgt

SEQ ID NO: 39023 - RNA, 20 nt, synthetic construct
  source 1..20: mol_type = other RNA
gcaatttgttttccaagcct

SEQ ID NO: 39024 - RNA, 20 nt, synthetic construct
  source 1..20: mol_type = other RNA
gcaattttaaatgtacaaca

SEQ ID NO: 39025 - RNA, 20 nt, synthetic construct
  source 1..20: mol_type = other RNA
gcacaaaagtgaaaactaag

SEQ ID NO: 39026 - RNA, 20 nt, synthetic construct
  source 1..20: mol_type = other RNA
gcacaaaagtttaactttga

SEQ ID NO: 39027 - RNA, 20 nt, synthetic construct
  source 1..20: mol_type = other RNA
gcacaaacctggcaatactc

SEQ ID NO: 39028 - RNA, 20 nt, synthetic construct
  source 1..20: mol_type = other RNA
gcacaaaggattgggaagat

SEQ ID NO: 39029 - RNA, 20 nt, synthetic construct
  source 1..20: mol_type = other RNA
gcacaaataattaacactat

SEQ ID NO: 39030 - RNA, 20 nt, synthetic construct
  source 1..20: mol_type = other RNA
gcacaacacatgcacactag

SEQ ID NO: 39031 - RNA, 20 nt, synthetic construct
  source 1..20: mol_type = other RNA
gcacaaccactgatggaatt

SEQ ID NO: 39032 - RNA, 20 nt, synthetic construct
  source 1..20: mol_type = other RNA
gcacaactagtaagtaaaat

SEQ ID NO: 39033 - RNA, 20 nt, synthetic construct
  source 1..20: mol_type = other RNA
gcacaagacagatgtgctta

SEQ ID NO: 39034 - RNA, 20 nt, synthetic construct
  source 1..20: mol_type = other RNA
gcacaagcacagagtcagaa

SEQ ID NO: 39035 - RNA, 20 nt, synthetic construct
  source 1..20: mol_type = other RNA
gcacaagccttgaaaatata

SEQ ID NO: 39036 - RNA, 20 nt, synthetic construct
  source 1..20: mol_type = other RNA
gcacaagggaagaggccaca

SEQ ID NO: 39037 - RNA, 20 nt, synthetic construct
  source 1..20: mol_type = other RNA
gcacaaggtcaagagcggcc

SEQ ID NO: 39038 - RNA, 20 nt, synthetic construct
  source 1..20: mol_type = other RNA
gcacaatactgtctcagtcc

SEQ ID NO: 39039 - RNA, 20 nt, synthetic construct
  source 1..20: mol_type = other RNA
gcacaatcatagctcactag

SEQ ID NO: 39040 - RNA, 20 nt, synthetic construct
  source 1..20: mol_type = other RNA
gcacaatgcagtattgttaa

SEQ ID NO: 39041 - RNA, 20 nt, synthetic construct
  source 1..20: mol_type = other RNA
gcacaatgcctgccgcagag

SEQ ID NO: 39042 - RNA, 20 nt, synthetic construct
  source 1..20: mol_type = other RNA
gcacaatggaatattactca

SEQ ID NO: 39043 - RNA, 20 nt, synthetic construct
  source 1..20: mol_type = other RNA
gcacaatgttgtggatgtcc

SEQ ID NO: 39044 - RNA, 20 nt, synthetic construct
  source 1..20: mol_type = other RNA
gcacacaacactcagatatc

SEQ ID NO: 39045 - RNA, 20 nt, synthetic construct
  source 1..20: mol_type = other RNA
gcacacaccaaatcatgaaa

SEQ ID NO: 39046 - RNA, 20 nt, synthetic construct
  source 1..20: mol_type = other RNA
gcacacagagggagcgccac

SEQ ID NO: 39047 - RNA, 20 nt, synthetic construct
  source 1..20: mol_type = other RNA
gcacacaggagaacttgtct

SEQ ID NO: 39048 - RNA, 20 nt, synthetic construct
  source 1..20: mol_type = other RNA
gcacacagtttgagaagcca

SEQ ID NO: 39049 - RNA, 20 nt, synthetic construct
  source 1..20: mol_type = other RNA
gcacacatccacgcgtaagg

SEQ ID NO: 39050 - RNA, 20 nt, synthetic construct
  source 1..20: mol_type = other RNA
gcacacatgaacctgcatgg

SEQ ID NO: 39051 - RNA, 20 nt, synthetic construct
  source 1..20: mol_type = other RNA
gcacaccaacatggcacatg

SEQ ID NO: 39052 - RNA, 20 nt, synthetic construct
  source 1..20: mol_type = other RNA
gcacaccaagacatgttagg

SEQ ID NO: 39053 - RNA, 20 nt, synthetic construct
  source 1..20: mol_type = other RNA
gcacaccaaggtttctctcc

SEQ ID NO: 39054 - RNA, 20 nt, synthetic construct
  source 1..20: mol_type = other RNA
gcacacccagttatctctgc

SEQ ID NO: 39055 - RNA, 20 nt, synthetic construct
  source 1..20: mol_type = other RNA
gcacacgccactgcaggtgt

SEQ ID NO: 39056 - RNA, 20 nt, synthetic construct
  source 1..20: mol_type = other RNA
gcacacgctggaagggagcc

SEQ ID NO: 39057 - RNA, 20 nt, synthetic construct
  source 1..20: mol_type = other RNA
gcacactagacctttcttag

SEQ ID NO: 39058 - RNA, 20 nt, synthetic construct
  source 1..20: mol_type = other RNA
gcacactccccagtggttgt

SEQ ID NO: 39059 - RNA, 20 nt, synthetic construct
  source 1..20: mol_type = other RNA
gcacactcttaataactgcc

SEQ ID NO: 39060 - RNA, 20 nt, synthetic construct
  source 1..20: mol_type = other RNA
gcacactttccttggagaag

SEQ ID NO: 39061 - RNA, 20 nt, synthetic construct
  source 1..20: mol_type = other RNA
gcacagaaccatgtaacagg

SEQ ID NO: 39062 - RNA, 20 nt, synthetic construct
  source 1..20: mol_type = other RNA
gcacagaattactatatgat

SEQ ID NO: 39063 - RNA, 20 nt, synthetic construct
  source 1..20: mol_type = other RNA
gcacagaattattgattggc

SEQ ID NO: 39064 - RNA, 20 nt, synthetic construct
  source 1..20: mol_type = other RNA
gcacagactcaagcctgata

SEQ ID NO: 39065 - RNA, 20 nt, synthetic construct
  source 1..20: mol_type = other RNA
gcacagactgtgccttgatc

SEQ ID NO: 39066 - RNA, 20 nt, synthetic construct
  source 1..20: mol_type = other RNA
gcacagagccgaaatgcact

SEQ ID NO: 39067 - RNA, 20 nt, synthetic construct
  source 1..20: mol_type = other RNA
gcacagaggcaacagtcatt

SEQ ID NO: 39068 - RNA, 20 nt, synthetic construct
  source 1..20: mol_type = other RNA
gcacagagtcagaaaattaa

SEQ ID NO: 39069 - RNA, 20 nt, synthetic construct
  source 1..20: mol_type = other RNA
gcacagcactgttaactgac

SEQ ID NO: 39070 - RNA, 20 nt, synthetic construct
  source 1..20: mol_type = other RNA
gcacagccagtcagtgatgg

SEQ ID NO: 39071 - RNA, 20 nt, synthetic construct
  source 1..20: mol_type = other RNA
gcacagctctcatgagtcct

SEQ ID NO: 39072 - RNA, 20 nt, synthetic construct
  source 1..20: mol_type = other RNA
gcacaggagagcgacagcta

SEQ ID NO: 39073 - RNA, 20 nt, synthetic construct
  source 1..20: mol_type = other RNA
gcacaggcatcggccgggcg

SEQ ID NO: 39074 - RNA, 20 nt, synthetic construct
  source 1..20: mol_type = other RNA
gcacaggcatctctctaaaa

SEQ ID NO: 39075 - RNA, 20 nt, synthetic construct
  source 1..20: mol_type = other RNA
gcacagggagatacttgatt

SEQ ID NO: 39076 - RNA, 20 nt, synthetic construct
  source 1..20: mol_type = other RNA
gcacagtatgcggggtttca

SEQ ID NO: 39077 - RNA, 20 nt, synthetic construct
  source 1..20: mol_type = other RNA
gcacagtctcccccaggtgg

SEQ ID NO: 39078 - RNA, 20 nt, synthetic construct
  source 1..20: mol_type = other RNA
gcacagtctctgcagagcag

SEQ ID NO: 39079 - RNA, 20 nt, synthetic construct
  source 1..20: mol_type = other RNA
gcacagtctgtgcttaagga

SEQ ID NO: 39080 - RNA, 20 nt, synthetic construct
  source 1..20: mol_type = other RNA
gcacataaaaaaggaatctg

SEQ ID NO: 39081 - RNA, 20 nt, synthetic construct
  source 1..20: mol_type = other RNA
gcacataaaaggatatgggc

SEQ ID NO: 39082 - RNA, 20 nt, synthetic construct
  source 1..20: mol_type = other RNA
gcacataatataaaaagaca

SEQ ID NO: 39083 - RNA, 20 nt, synthetic construct
  source 1..20: mol_type = other RNA
gcacatactgcatattgaag

SEQ ID NO: 39084 - RNA, 20 nt, synthetic construct
  source 1..20: mol_type = other RNA
gcacatctgtcttgtgcatc

SEQ ID NO: 39085 - RNA, 20 nt, synthetic construct
  source 1..20: mol_type = other RNA
gcacatgcacaaggtcaaga

SEQ ID NO: 39086 - RNA, 20 nt, synthetic construct
  source 1..20: mol_type = other RNA
gcacatgggcatgggtccaa

SEQ ID NO: 39087 - RNA, 20 nt, synthetic construct
  source 1..20: mol_type = other RNA
gcacatggtgataactggtg

SEQ ID NO: 39088 - RNA, 20 nt, synthetic construct
  source 1..20: mol_type = other RNA
gcacatgttccctagaactt

SEQ ID NO: 39089 - RNA, 20 nt, synthetic construct
  source 1..20: mol_type = other RNA
gcacattaaataagggcatt

SEQ ID NO: 39090 - RNA, 20 nt, synthetic construct
  source 1..20: mol_type = other RNA
gcacattagaatcatccggg

SEQ ID NO: 39091 - RNA, 20 nt, synthetic construct
  source 1..20: mol_type = other RNA
gcacattcaagcagaaatga

SEQ ID NO: 39092 - RNA, 20 nt, synthetic construct
  source 1..20: mol_type = other RNA
gcacattccaagagaggaat

SEQ ID NO: 39093 - RNA, 20 nt, synthetic construct
  source 1..20: mol_type = other RNA
gcacattccttccgacctgt

SEQ ID NO: 39094 - RNA, 20 nt, synthetic construct
  source 1..20: mol_type = other RNA
gcacattccttcttcacaca

SEQ ID NO: 39095 - RNA, 20 nt, synthetic construct
  source 1..20: mol_type = other RNA
gcaccaaagattatgttcca

SEQ ID NO: 39096 - RNA, 20 nt, synthetic construct
  source 1..20: mol_type = other RNA
gcaccaacacctgcagtggc

SEQ ID NO: 39097 - RNA, 20 nt, synthetic construct
  source 1..20: mol_type = other RNA
gcaccaacagatcctcacat

SEQ ID NO: 39098 - RNA, 20 nt, synthetic construct
  source 1..20: mol_type = other RNA
gcaccaacccttgttggaca

SEQ ID NO: 39099 - RNA, 20 nt, synthetic construct
  source 1..20: mol_type = other RNA
gcaccaactccacattgtct

SEQ ID NO: 39100 - RNA, 20 nt, synthetic construct
  source 1..20: mol_type = other RNA
gcaccacccttgatgtcaca

SEQ ID NO: 39101 - RNA, 20 nt, synthetic construct
  source 1..20: mol_type = other RNA
gcaccactagagtattacct

SEQ ID NO: 39102 - RNA, 20 nt, synthetic construct
  source 1..20: mol_type = other RNA
gcaccactgagagggaagtt

SEQ ID NO: 39103 - RNA, 20 nt, synthetic construct
  source 1..20: mol_type = other RNA
gcaccacttcgagaagggaa

SEQ ID NO: 39104 - RNA, 20 nt, synthetic construct
  source 1..20: mol_type = other RNA
gcaccagatactcaatcagt

SEQ ID NO: 39105 - RNA, 20 nt, synthetic construct
  source 1..20: mol_type = other RNA
gcaccagggcctctgaagac

SEQ ID NO: 39106 - RNA, 20 nt, synthetic construct
  source 1..20: mol_type = other RNA
gcaccagttatcaccatgtg

SEQ ID NO: 39107 - RNA, 20 nt, synthetic construct
  source 1..20: mol_type = other RNA
gcaccatctaacagaaatac

SEQ ID NO: 39108 - RNA, 20 nt, synthetic construct
  source 1..20: mol_type = other RNA
gcaccatttattgtcaaggt

SEQ ID NO: 39109 - RNA, 20 nt, synthetic construct
  source 1..20: mol_type = other RNA
gcaccattttttcaccagcg

SEQ ID NO: 39110 - RNA, 20 nt, synthetic construct
  source 1..20: mol_type = other RNA
gcacccagagcgggtttcct

SEQ ID NO: 39111 - RNA, 20 nt, synthetic construct
  source 1..20: mol_type = other RNA
gcaccctatttatgttgcac

SEQ ID NO: 39112 - RNA, 20 nt, synthetic construct
  source 1..20: mol_type = other RNA
gcaccctcaaatgtctcatt

SEQ ID NO: 39113 - RNA, 20 nt, synthetic construct
  source 1..20: mol_type = other RNA
gcaccctcctcctcctggcc

SEQ ID NO: 39114 - RNA, 20 nt, synthetic construct
  source 1..20: mol_type = other RNA
gcaccctgagcatccccgct

SEQ ID NO: 39115 - RNA, 20 nt, synthetic construct
  source 1..20: mol_type = other RNA
gcaccgcgcccggccgagaa

SEQ ID NO: 39116 - RNA, 20 nt, synthetic construct
  source 1..20: mol_type = other RNA
gcaccgtgacagaacaaata

SEQ ID NO: 39117 - RNA, 20 nt, synthetic construct
  source 1..20: mol_type = other RNA
gcacctaaaaggttgcttaa

SEQ ID NO: 39118 - RNA, 20 nt, synthetic construct
  source 1..20: mol_type = other RNA
gcacctaacaatgattattt

SEQ ID NO: 39119 - RNA, 20 nt, synthetic construct
  source 1..20: mol_type = other RNA
gcacctaataaaatgtttag

SEQ ID NO: 39120 - RNA, 20 nt, synthetic construct
  source 1..20: mol_type = other RNA
gcacctaccataacaaaaaa

SEQ ID NO: 39121 - RNA, 20 nt, synthetic construct
  source 1..20: mol_type = other RNA
gcacctccagtgtcctgaat

SEQ ID NO: 39122 - RNA, 20 nt, synthetic construct
  source 1..20: mol_type = other RNA
gcacctcgggttcaagcccc

SEQ ID NO: 39123 - RNA, 20 nt, synthetic construct
  source 1..20: mol_type = other RNA
gcacctgaacccaggaggca

SEQ ID NO: 39124 - RNA, 20 nt, synthetic construct
  source 1..20: mol_type = other RNA
gcacctggccgggatttact

SEQ ID NO: 39125 - RNA, 20 nt, synthetic construct
  source 1..20: mol_type = other RNA
gcacctgtataaataaaatg

SEQ ID NO: 39126 - RNA, 20 nt, synthetic construct
  source 1..20: mol_type = other RNA
gcaccttacattgtaatcct

SEQ ID NO: 39127 - RNA, 20 nt, synthetic construct
  source 1..20: mol_type = other RNA
gcaccttcagaagccctgca

SEQ ID NO: 39128 - RNA, 20 nt, synthetic construct
  source 1..20: mol_type = other RNA
gcaccttccctactcactga

SEQ ID NO: 39129 - RNA, 20 nt, synthetic construct
  source 1..20: mol_type = other RNA
gcaccttgattttgataaaa

SEQ ID NO: 39130 - RNA, 20 nt, synthetic construct
  source 1..20: mol_type = other RNA
gcacctttattaactagaat

SEQ ID NO: 39131 - RNA, 20 nt, synthetic construct
  source 1..20: mol_type = other RNA
gcaccttttttggtattttt

SEQ ID NO: 39132 - RNA, 20 nt, synthetic construct
  source 1..20: mol_type = other RNA
gcacgagaaaagcacaggca

SEQ ID NO: 39133 - RNA, 20 nt, synthetic construct
  source 1..20: mol_type = other RNA
gcacgccatctcgcccagct

SEQ ID NO: 39134 - RNA, 20 nt, synthetic construct
  source 1..20: mol_type = other RNA
gcacgctgtgaatgtgaggt

SEQ ID NO: 39135 - RNA, 20 nt, synthetic construct
  source 1..20: mol_type = other RNA
gcacggacttggcacaggag

SEQ ID NO: 39136 - RNA, 20 nt, synthetic construct
  source 1..20: mol_type = other RNA
gcacggtgaagaaccgactg

SEQ ID NO: 39137 - RNA, 20 nt, synthetic construct
  source 1..20: mol_type = other RNA
gcacgtactagtcagcacac

SEQ ID NO: 39138 - RNA, 20 nt, synthetic construct
  source 1..20: mol_type = other RNA
gcacgtctgtggtctcagct

SEQ ID NO: 39139 - RNA, 20 nt, synthetic construct
  source 1..20: mol_type = other RNA
gcacgtgaagctacagacta

SEQ ID NO: 39140 - RNA, 20 nt, synthetic construct
  source 1..20: mol_type = other RNA
gcacgttagcatcaccatca

SEQ ID NO: 39141 - RNA, 20 nt, synthetic construct
  source 1..20: mol_type = other RNA
gcacgtttgatctggtcaca

SEQ ID NO: 39142 - RNA, 20 nt, synthetic construct
  source 1..20: mol_type = other RNA
gcacgtttgctttggagtga

SEQ ID NO: 39143 - RNA, 20 nt, synthetic construct
  source 1..20: mol_type = other RNA
gcacgtttttagaaatttac

SEQ ID NO: 39144 - RNA, 20 nt, synthetic construct
  source 1..20: mol_type = other RNA
gcactaaactagtatcaacc

SEQ ID NO: 39145 - RNA, 20 nt, synthetic construct
  source 1..20: mol_type = other RNA
gcactaacaaagggcctgtt

SEQ ID NO: 39146 - RNA, 20 nt, synthetic construct
  source 1..20: mol_type = other RNA
gcactatccacatttggttt

SEQ ID NO: 39147 - RNA, 20 nt, synthetic construct
  source 1..20: mol_type = other RNA
gcactcaagcaatcctccgg

SEQ ID NO: 39148 - RNA, 20 nt, synthetic construct
  source 1..20: mol_type = other RNA
gcactcagcctgttgggagg

SEQ ID NO: 39149 - RNA, 20 nt, synthetic construct
  source 1..20: mol_type = other RNA
gcactccacgtgggtgacag

SEQ ID NO: 39150 - RNA, 20 nt, synthetic construct
  source 1..20: mol_type = other RNA
gcactccacttcccactgct

SEQ ID NO: 39151 - RNA, 20 nt, synthetic construct
  source 1..20: mol_type = other RNA
gcactccagccttggtaaga

SEQ ID NO: 39152 - RNA, 20 nt, synthetic construct
  source 1..20: mol_type = other RNA
gcactctcaaaattaaattc

SEQ ID NO: 39153 - RNA, 20 nt, synthetic construct
  source 1..20: mol_type = other RNA
gcactctgaatcacctcaag

SEQ ID NO: 39154 - RNA, 20 nt, synthetic construct
  source 1..20: mol_type = other RNA
gcactctggcctggacaaca

SEQ ID NO: 39155 - RNA, 20 nt, synthetic construct
  source 1..20: mol_type = other RNA
gcactcttttaaacccattt

SEQ ID NO: 39156 - RNA, 20 nt, synthetic construct
  source 1..20: mol_type = other RNA
gcactgaagccagtccttgt

SEQ ID NO: 39157 - RNA, 20 nt, synthetic construct
  source 1..20: mol_type = other RNA
gcactgatgtgtagttatta

SEQ ID NO: 39158 - RNA, 20 nt, synthetic construct
  source 1..20: mol_type = other RNA
gcactgcgccaagcagggac

SEQ ID NO: 39159 - RNA, 20 nt, synthetic construct
  source 1..20: mol_type = other RNA
gcactgctattgataaatct

SEQ ID NO: 39160 - RNA, 20 nt, synthetic construct
  source 1..20: mol_type = other RNA
gcactggcacagcactgtta

SEQ ID NO: 39161 - RNA, 20 nt, synthetic construct
  source 1..20: mol_type = other RNA
gcactggctattagttaacc

SEQ ID NO: 39162 - RNA, 20 nt, synthetic construct
  source 1..20: mol_type = other RNA
gcactgggagccctccagga

SEQ ID NO: 39163 - RNA, 20 nt, synthetic construct
  source 1..20: mol_type = other RNA
gcactgggtccccggaggag

SEQ ID NO: 39164 - RNA, 20 nt, synthetic construct
  source 1..20: mol_type = other RNA
gcactggtaaggaaacagag

SEQ ID NO: 39165 - RNA, 20 nt, synthetic construct
  source 1..20: mol_type = other RNA
gcactggtttcagtacacga

SEQ ID NO: 39166 - RNA, 20 nt, synthetic construct
  source 1..20: mol_type = other RNA
gcactgtactcctagatact

SEQ ID NO: 39167 - RNA, 20 nt, synthetic construct
  source 1..20: mol_type = other RNA
gcactgtatggttcttaaga

SEQ ID NO: 39168 - RNA, 20 nt, synthetic construct
  source 1..20: mol_type = other RNA
gcactgtgagccactaaaac

SEQ ID NO: 39169 - RNA, 20 nt, synthetic construct
  source 1..20: mol_type = other RNA
gcactgttaactgacttaca

SEQ ID NO: 39170 - RNA, 20 nt, synthetic construct
  source 1..20: mol_type = other RNA
gcacttaaaatttagatctc

SEQ ID NO: 39171 - RNA, 20 nt, synthetic construct
  source 1..20: mol_type = other RNA
gcacttagcgctgatgtgtt

SEQ ID NO: 39172 - RNA, 20 nt, synthetic construct
  source 1..20: mol_type = other RNA
gcacttccattttgcttaat

SEQ ID NO: 39173 - RNA, 20 nt, synthetic construct
  source 1..20: mol_type = other RNA
gcacttctgatatcctgtaa

SEQ ID NO: 39174 - RNA, 20 nt, synthetic construct
  source 1..20: mol_type = other RNA
gcacttgggatgtttctacc

SEQ ID NO: 39175 - RNA, 20 nt, synthetic construct
  source 1..20: mol_type = other RNA
gcacttggggaggccaaggc

SEQ ID NO: 39176 - RNA, 20 nt, synthetic construct
  source 1..20: mol_type = other RNA
gcacttggtaagctgtgagt

SEQ ID NO: 39177 - RNA, 20 nt, synthetic construct
  source 1..20: mol_type = other RNA
gcactttcctgataaggggc

SEQ ID NO: 39178 - RNA, 20 nt, synthetic construct
  source 1..20: mol_type = other RNA
gcactttcgtatttttgtta

SEQ ID NO: 39179 - RNA, 20 nt, synthetic construct
  source 1..20: mol_type = other RNA
gcacttttaaggcttggaaa

SEQ ID NO: 39180 - RNA, 20 nt, synthetic construct
  source 1..20: mol_type = other RNA
gcacttttgtactacttgtc

SEQ ID NO: 39181 - RNA, 20 nt, synthetic construct
  source 1..20: mol_type = other RNA
gcactttttaccaagttgaa

SEQ ID NO: 39182 - RNA, 20 nt, synthetic construct
  source 1..20: mol_type = other RNA
gcagaaaataaaccaagttt

SEQ ID NO: 39183 - RNA, 20 nt, synthetic construct
  source 1..20: mol_type = other RNA
gcagaaaatcagtgtgaaag

SEQ ID NO: 39184 - RNA, 20 nt, synthetic construct
  source 1..20: mol_type = other RNA
gcagaaacacaggactgtgt

SEQ ID NO: 39185 - RNA, 20 nt, synthetic construct
  source 1..20: mol_type = other RNA
gcagaaaccagttgtaattt

SEQ ID NO: 39186 - RNA, 20 nt, synthetic construct
  source 1..20: mol_type = other RNA
gcagaaagttactattttca

SEQ ID NO: 39187 - RNA, 20 nt, synthetic construct
  source 1..20: mol_type = other RNA
gcagaaatacagaccgatgg

SEQ ID NO: 39188 - RNA, 20 nt, synthetic construct
  source 1..20: mol_type = other RNA
gcagaaatctaccaaacatt

SEQ ID NO: 39189 - RNA, 20 nt, synthetic construct
  source 1..20: mol_type = other RNA
gcagaaatgacaagtaaatg

SEQ ID NO: 39190 - RNA, 20 nt, synthetic construct
  source 1..20: mol_type = other RNA
gcagaaatgagttccagtcc

SEQ ID NO: 39191 - RNA, 20 nt, synthetic construct
  source 1..20: mol_type = other RNA
gcagaacaaactgcgtggtt

SEQ ID NO: 39192 - RNA, 20 nt, synthetic construct
  source 1..20: mol_type = other RNA
gcagaacacactgctcttct

SEQ ID NO: 39193 - RNA, 20 nt, synthetic construct
  source 1..20: mol_type = other RNA
gcagaacagtgtttacacac

SEQ ID NO: 39194 - RNA, 20 nt, synthetic construct
  source 1..20: mol_type = other RNA
gcagaaccacctgggggaga

SEQ ID NO: 39195 - RNA, 20 nt, synthetic construct
  source 1..20: mol_type = other RNA
gcagaaccactgagcacaat

SEQ ID NO: 39196 - RNA, 20 nt, synthetic construct
  source 1..20: mol_type = other RNA
gcagaaccttagaaatttaa

SEQ ID NO: 39197 - RNA, 20 nt, synthetic construct
  source 1..20: mol_type = other RNA
gcagaactaagaccccagta

SEQ ID NO: 39198 - RNA, 20 nt, synthetic construct
  source 1..20: mol_type = other RNA
gcagaactccacctcagaaa

SEQ ID NO: 39199 - RNA, 20 nt, synthetic construct
  source 1..20: mol_type = other RNA
gcagaactggggcttgaacc

SEQ ID NO: 39200 - RNA, 20 nt, synthetic construct
  source 1..20: mol_type = other RNA
gcagaagagtgaagctggac

SEQ ID NO: 39201 - RNA, 20 nt, synthetic construct
  source 1..20: mol_type = other RNA
gcagaaggagaaaccattta

SEQ ID NO: 39202 - RNA, 20 nt, synthetic construct
  source 1..20: mol_type = other RNA
gcagaaggaggaaaataatt

SEQ ID NO: 39203 - RNA, 20 nt, synthetic construct
  source 1..20: mol_type = other RNA
gcagaagggaaaggatgacc

SEQ ID NO: 39204 - RNA, 20 nt, synthetic construct
  source 1..20: mol_type = other RNA
gcagaaggtgagggactgag

SEQ ID NO: 39205 - RNA, 20 nt, synthetic construct
  source 1..20: mol_type = other RNA
gcagaatccccaaataacat

SEQ ID NO: 39206 - RNA, 20 nt, synthetic construct
  source 1..20: mol_type = other RNA
gcagaatgacagaaaatatc

SEQ ID NO: 39207 - RNA, 20 nt, synthetic construct
  source 1..20: mol_type = other RNA
gcagaatggccctgcgattg

SEQ ID NO: 39208 - RNA, 20 nt, synthetic construct
  source 1..20: mol_type = other RNA
gcagaatgtccatcaggaaa

SEQ ID NO: 39209 - RNA, 20 nt, synthetic construct
  source 1..20: mol_type = other RNA
gcagaatgtgacctgtcctt

SEQ ID NO: 39210 - RNA, 20 nt, synthetic construct
  source 1..20: mol_type = other RNA
gcagaattactgacaatagc

SEQ ID NO: 39211 - RNA, 20 nt, synthetic construct
  source 1..20: mol_type = other RNA
gcagaattatagagggccta

SEQ ID NO: 39212 - RNA, 20 nt, synthetic construct
  source 1..20: mol_type = other RNA
gcagaattcaaaaacactgt

SEQ ID NO: 39213 - RNA, 20 nt, synthetic construct
  source 1..20: mol_type = other RNA
gcagacaataattcttcctg

SEQ ID NO: 39214 - RNA, 20 nt, synthetic construct
  source 1..20: mol_type = other RNA
gcagacacaccatgacagag

SEQ ID NO: 39215 - RNA, 20 nt, synthetic construct
  source 1..20: mol_type = other RNA
gcagacactgggttctcacc

SEQ ID NO: 39216 - RNA, 20 nt, synthetic construct
  source 1..20: mol_type = other RNA
gcagacagaaagacagggag

SEQ ID NO: 39217 - RNA, 20 nt, synthetic construct
  source 1..20: mol_type = other RNA
gcagacatgcacgagaaaag

SEQ ID NO: 39218 - RNA, 20 nt, synthetic construct
  source 1..20: mol_type = other RNA
gcagaccaagaaaggacttc

SEQ ID NO: 39219 - RNA, 20 nt, synthetic construct
  source 1..20: mol_type = other RNA
gcagactccttcccctggtc

SEQ ID NO: 39220 - RNA, 20 nt, synthetic construct
  source 1..20: mol_type = other RNA
gcagactcttgtcccggcat

SEQ ID NO: 39221 - RNA, 20 nt, synthetic construct
  source 1..20: mol_type = other RNA
gcagactgcaggtcttcaac

SEQ ID NO: 39222 - RNA, 20 nt, synthetic construct
  source 1..20: mol_type = other RNA
gcagagaaactggaatcaat

SEQ ID NO: 39223 - RNA, 20 nt, synthetic construct
  source 1..20: mol_type = other RNA
gcagagaactgactgaagga

SEQ ID NO: 39224 - RNA, 20 nt, synthetic construct
  source 1..20: mol_type = other RNA
gcagagaagtgaagcttcaa

SEQ ID NO: 39225 - RNA, 20 nt, synthetic construct
  source 1..20: mol_type = other RNA
gcagagacacacatcagaca

SEQ ID NO: 39226 - RNA, 20 nt, synthetic construct
  source 1..20: mol_type = other RNA
gcagagacggggtcccacta

SEQ ID NO: 39227 - RNA, 20 nt, synthetic construct
  source 1..20: mol_type = other RNA
gcagagactggatagcaact

SEQ ID NO: 39228 - RNA, 20 nt, synthetic construct
  source 1..20: mol_type = other RNA
gcagagactgtgcttccaca

SEQ ID NO: 39229 - RNA, 20 nt, synthetic construct
  source 1..20: mol_type = other RNA
gcagagagagaagatgacat

SEQ ID NO: 39230 - RNA, 20 nt, synthetic construct
  source 1..20: mol_type = other RNA
gcagagagagtaactggtcc

SEQ ID NO: 39231 - RNA, 20 nt, synthetic construct
  source 1..20: mol_type = other RNA
gcagagagatggtgggagag

SEQ ID NO: 39232 - RNA, 20 nt, synthetic construct
  source 1..20: mol_type = other RNA
gcagagataactgggtgtgc

SEQ ID NO: 39233 - RNA, 20 nt, synthetic construct
  source 1..20: mol_type = other RNA
gcagagcaaactcagatctg

SEQ ID NO: 39234 - RNA, 20 nt, synthetic construct
  source 1..20: mol_type = other RNA
gcagagcaagcacgttagca

SEQ ID NO: 39235 - RNA, 20 nt, synthetic construct
  source 1..20: mol_type = other RNA
gcagagcaggctccacttgg

SEQ ID NO: 39236 - RNA, 20 nt, synthetic construct
  source 1..20: mol_type = other RNA
gcagagcaggggtgggggga

SEQ ID NO: 39237 - RNA, 20 nt, synthetic construct
  source 1..20: mol_type = other RNA
gcagaggccaaatgaaaggc

SEQ ID NO: 39238 - RNA, 20 nt, synthetic construct
  source 1..20: mol_type = other RNA
gcagagggagcagcgggcgg

SEQ ID NO: 39239 - RNA, 20 nt, synthetic construct
  source 1..20: mol_type = other RNA
gcagaggtcaggaaggcagg

SEQ ID NO: 39240 - RNA, 20 nt, synthetic construct
  source 1..20: mol_type = other RNA
gcagagtagagaaggctttg

SEQ ID NO: 39241 - RNA, 20 nt, synthetic construct
  source 1..20: mol_type = other RNA
gcagagtcctgagggtgaga

SEQ ID NO: 39242 - RNA, 20 nt, synthetic construct
  source 1..20: mol_type = other RNA
gcagagtgttcaaaagcccc

SEQ ID NO: 39243 - RNA, 20 nt, synthetic construct
  source 1..20: mol_type = other RNA
gcagataagatccaagtatt

SEQ ID NO: 39244 - RNA, 20 nt, synthetic construct
  source 1..20: mol_type = other RNA
gcagatcaattgaccaaaca

SEQ ID NO: 39245 - RNA, 20 nt, synthetic construct
  source 1..20: mol_type = other RNA
gcagatcacaaggtcagaag

SEQ ID NO: 39246 - RNA, 20 nt, synthetic construct
  source 1..20: mol_type = other RNA
gcagatcacgaggtcgagag

SEQ ID NO: 39247 - RNA, 20 nt, synthetic construct
  source 1..20: mol_type = other RNA
gcagatcagtaacaaataag

SEQ ID NO: 39248 - RNA, 20 nt, synthetic construct
  source 1..20: mol_type = other RNA
gcagatctgctgtaagctgg

SEQ ID NO: 39249 - RNA, 20 nt, synthetic construct
  source 1..20: mol_type = other RNA
gcagatctgcttgcagacaa

SEQ ID NO: 39250 - RNA, 20 nt, synthetic construct
  source 1..20: mol_type = other RNA
gcagatgaatgagcaaggtc

SEQ ID NO: 39251 - RNA, 20 nt, synthetic construct
  source 1..20: mol_type = other RNA
gcagatgttgcggtgagcag

SEQ ID NO: 39252 - RNA, 20 nt, synthetic construct
  source 1..20: mol_type = other RNA
gcagattcatcttgacttca

SEQ ID NO: 39253 - RNA, 20 nt, synthetic construct
  source 1..20: mol_type = other RNA
gcagatttctttttactcat

SEQ ID NO: 39254 - RNA, 20 nt, synthetic construct
  source 1..20: mol_type = other RNA
gcagcaaaagcaccactgag

SEQ ID NO: 39255 - RNA, 20 nt, synthetic construct
  source 1..20: mol_type = other RNA
gcagcaaagcaagaaaaaga

SEQ ID NO: 39256 - RNA, 20 nt, synthetic construct
  source 1..20: mol_type = other RNA
gcagcaacggaaatgagtga

SEQ ID NO: 39257 - RNA, 20 nt, synthetic construct
  source 1..20: mol_type = other RNA
gcagcaagcagtaaatatac

SEQ ID NO: 39258 - RNA, 20 nt, synthetic construct
  source 1..20: mol_type = other RNA
gcagcaagggtggctggcac

SEQ ID NO: 39259 - RNA, 20 nt, synthetic construct
  source 1..20: mol_type = other RNA
gcagcaattatttgaataag

SEQ ID NO: 39260 - RNA, 20 nt, synthetic construct
  source 1..20: mol_type = other RNA
gcagcactgatgtgtagtta

SEQ ID NO: 39261 - RNA, 20 nt, synthetic construct
  source 1..20: mol_type = other RNA
gcagcagagaagtgaagctt

SEQ ID NO: 39262 - RNA, 20 nt, synthetic construct
  source 1..20: mol_type = other RNA
gcagcaggggctaagtagtg

SEQ ID NO: 39263 - RNA, 20 nt, synthetic construct
  source 1..20: mol_type = other RNA
gcagcatccctgccgcgcgc

SEQ ID NO: 39264 - RNA, 20 nt, synthetic construct
  source 1..20: mol_type = other RNA
gcagcatgctcactgtctcc

SEQ ID NO: 39265 - RNA, 20 nt, synthetic construct
  source 1..20: mol_type = other RNA
gcagcattgtttacagtagc

SEQ ID NO: 39266 - RNA, 20 nt, synthetic construct
  source 1..20: mol_type = other RNA
gcagccactatagaaaatag

SEQ ID NO: 39267 - RNA, 20 nt, synthetic construct
  source 1..20: mol_type = other RNA
gcagccagagagtggaaaga

SEQ ID NO: 39268 - RNA, 20 nt, synthetic construct
  source 1..20: mol_type = other RNA
gcagccagatttgatcctgg

SEQ ID NO: 39269 - RNA, 20 nt, synthetic construct
  source 1..20: mol_type = other RNA
gcagccatggctcactgcgg

SEQ ID NO: 39270 - RNA, 20 nt, synthetic construct
  source 1..20: mol_type = other RNA
gcagccccgacgcctttcat

SEQ ID NO: 39271 - RNA, 20 nt, synthetic construct
  source 1..20: mol_type = other RNA
gcagccccgcttcagttggt

SEQ ID NO: 39272 - RNA, 20 nt, synthetic construct
  source 1..20: mol_type = other RNA
gcagcccctgccacactcca

SEQ ID NO: 39273 - RNA, 20 nt, synthetic construct
  source 1..20: mol_type = other RNA
gcagcccgacctccagcgct

SEQ ID NO: 39274 - RNA, 20 nt, synthetic construct
  source 1..20: mol_type = other RNA
gcagcctctaatcaggttgg

SEQ ID NO: 39275 - RNA, 20 nt, synthetic construct
  source 1..20: mol_type = other RNA
gcagccttccctgaacaatg

SEQ ID NO: 39276 - RNA, 20 nt, synthetic construct
  source 1..20: mol_type = other RNA
gcagccttctctcttccaaa

SEQ ID NO: 39277 - RNA, 20 nt, synthetic construct
  source 1..20: mol_type = other RNA
gcagccttggaggagccctg

SEQ ID NO: 39278 - RNA, 20 nt, synthetic construct
  source 1..20: mol_type = other RNA
gcagcggggatgctcagggt

SEQ ID NO: 39279 - RNA, 20 nt, synthetic construct
  source 1..20: mol_type = other RNA
gcagcgtaactccatcttca

SEQ ID NO: 39280 - RNA, 20 nt, synthetic construct
  source 1..20: mol_type = other RNA
gcagctaagcaccaacagat

SEQ ID NO: 39281 - RNA, 20 nt, synthetic construct
  source 1..20: mol_type = other RNA
gcagctacctgttgattgtt

SEQ ID NO: 39282 - RNA, 20 nt, synthetic construct
  source 1..20: mol_type = other RNA
gcagctctagcaaacaaaca

SEQ ID NO: 39283 - RNA, 20 nt, synthetic construct
  source 1..20: mol_type = other RNA
gcaggaaaagctaccctcga

SEQ ID NO: 39284 - RNA, 20 nt, synthetic construct
  source 1..20: mol_type = other RNA
gcaggaaacttccagaaact

SEQ ID NO: 39285 - RNA, 20 nt, synthetic construct
  source 1..20: mol_type = other RNA
gcaggaaaggtggggaaggg

SEQ ID NO: 39286 - RNA, 20 nt, synthetic construct
  source 1..20: mol_type = other RNA
gcaggaactcatattagtct

SEQ ID NO: 39287 - RNA, 20 nt, synthetic construct
  source 1..20: mol_type = other RNA
gcaggaccaactttaagcaa

SEQ ID NO: 39288 - RNA, 20 nt, synthetic construct
  source 1..20: mol_type = other RNA
gcaggactgcttgaggccac

SEQ ID NO: 39289 - RNA, 20 nt, synthetic construct
  source 1..20: mol_type = other RNA
gcaggactggactccttctg

SEQ ID NO: 39290 - RNA, 20 nt, synthetic construct
  source 1..20: mol_type = other RNA
gcaggagaaacatggcttag

SEQ ID NO: 39291 - RNA, 20 nt, synthetic construct
  source 1..20: mol_type = other RNA
gcaggagaactgcctggacc

SEQ ID NO: 39292 - RNA, 20 nt, synthetic construct
  source 1..20: mol_type = other RNA
gcaggagaatggcatgaacc

SEQ ID NO: 39293 - RNA, 20 nt, synthetic construct
  source 1..20: mol_type = other RNA
gcaggagagtcgcttgaacc

SEQ ID NO: 39294 - RNA, 20 nt, synthetic construct
  source 1..20: mol_type = other RNA
gcaggagcagtgtgaatagg

SEQ ID NO: 39295 - RNA, 20 nt, synthetic construct
  source 1..20: mol_type = other RNA
gcaggagcatagcttgaacc

SEQ ID NO: 39296 - RNA, 20 nt, synthetic construct
  source 1..20: mol_type = other RNA
gcaggagccttgctgttgta

SEQ ID NO: 39297 - RNA, 20 nt, synthetic construct
  source 1..20: mol_type = other RNA
gcaggaggcacctgaaccca

SEQ ID NO: 39298 - RNA, 20 nt, synthetic construct
  source 1..20: mol_type = other RNA
gcaggaggcctcagaattaa

SEQ ID NO: 39299 - RNA, 20 nt, synthetic construct
  source 1..20: mol_type = other RNA
gcaggagtttgagactgcag

SEQ ID NO: 39300 - RNA, 20 nt, synthetic construct
  source 1..20: mol_type = other RNA
gcaggattcttgttaagcat

SEQ ID NO: 39301 - RNA, 20 nt, synthetic construct
  source 1..20: mol_type = other RNA
gcaggcaaacagcgccactt

SEQ ID NO: 39302 - RNA, 20 nt, synthetic construct
  source 1..20: mol_type = other RNA
gcaggcaccttcagaagccc

SEQ ID NO: 39303 - RNA, 20 nt, synthetic construct
  source 1..20: mol_type = other RNA
gcaggcagaatgtgacctgt

SEQ ID NO: 39304 - RNA, 20 nt, synthetic construct
  source 1..20: mol_type = other RNA
gcaggcagatcacgaggtcg

SEQ ID NO: 39305 - RNA, 20 nt, synthetic construct
  source 1..20: mol_type = other RNA
gcaggcattgtgctcagtgg

SEQ ID NO: 39306 - RNA, 20 nt, synthetic construct
  source 1..20: mol_type = other RNA
gcaggccagatatccataag

SEQ ID NO: 39307 - RNA, 20 nt, synthetic construct
  source 1..20: mol_type = other RNA
gcaggccctgagaagtcaaa

SEQ ID NO: 39308 - RNA, 20 nt, synthetic construct
  source 1..20: mol_type = other RNA
gcaggccttcgaggcatcta

SEQ ID NO: 39309 - RNA, 20 nt, synthetic construct
  source 1..20: mol_type = other RNA
gcaggcgcctggacaggatc

SEQ ID NO: 39310 - RNA, 20 nt, synthetic construct
  source 1..20: mol_type = other RNA
gcaggctccacttgggtgga

SEQ ID NO: 39311 - RNA, 20 nt, synthetic construct
  source 1..20: mol_type = other RNA
gcaggctgaactgctgacag

SEQ ID NO: 39312 - RNA, 20 nt, synthetic construct
  source 1..20: mol_type = other RNA
gcaggctttttacccggaga

SEQ ID NO: 39313 - RNA, 20 nt, synthetic construct
  source 1..20: mol_type = other RNA
gcagggaaatcattcaggac

SEQ ID NO: 39314 - RNA, 20 nt, synthetic construct
  source 1..20: mol_type = other RNA
gcagggaaatggagggccag

SEQ ID NO: 39315 - RNA, 20 nt, synthetic construct
  source 1..20: mol_type = other RNA
gcagggaccacaggcatgcg

SEQ ID NO: 39316 - RNA, 20 nt, synthetic construct
  source 1..20: mol_type = other RNA
gcagggactacagtcacaca

SEQ ID NO: 39317 - RNA, 20 nt, synthetic construct
  source 1..20: mol_type = other RNA
gcagggactcccatatctac

SEQ ID NO: 39318 - RNA, 20 nt, synthetic construct
  source 1..20: mol_type = other RNA
gcagggagagagaaacttta

SEQ ID NO: 39319 - RNA, 20 nt, synthetic construct
  source 1..20: mol_type = other RNA
gcagggaggggtccccagca

SEQ ID NO: 39320 - RNA, 20 nt, synthetic construct
  source 1..20: mol_type = other RNA
gcagggatgctgcgagcccc

SEQ ID NO: 39321 - RNA, 20 nt, synthetic construct
  source 1..20: mol_type = other RNA
gcagggccattctgctatga

SEQ ID NO: 39322 - RNA, 20 nt, synthetic construct
  source 1..20: mol_type = other RNA
gcagggccgggggttgggga

SEQ ID NO: 39323 - RNA, 20 nt, synthetic construct
  source 1..20: mol_type = other RNA
gcagggctcctccaaggctg

SEQ ID NO: 39324 - RNA, 20 nt, synthetic construct
  source 1..20: mol_type = other RNA
gcagggcttctgaaggtgcc

SEQ ID NO: 39325 - RNA, 20 nt, synthetic construct
  source 1..20: mol_type = other RNA
gcagggcttggtggcccaca

SEQ ID NO: 39326 - RNA, 20 nt, synthetic construct
  source 1..20: mol_type = other RNA
gcaggggaaggcttcgagtt

SEQ ID NO: 39327 - RNA, 20 nt, synthetic construct
  source 1..20: mol_type = other RNA
gcaggggctaagtagtggca

SEQ ID NO: 39328 - RNA, 20 nt, synthetic construct
  source 1..20: mol_type = other RNA
gcaggggctgcatcatggtg

SEQ ID NO: 39329 - RNA, 20 nt, synthetic construct
  source 1..20: mol_type = other RNA
gcaggggtggggggatgtag

SEQ ID NO: 39330 - RNA, 20 nt, synthetic construct
  source 1..20: mol_type = other RNA
gcagggtaaagtcaattcta

SEQ ID NO: 39331 - RNA, 20 nt, synthetic construct
  source 1..20: mol_type = other RNA
gcagggtaggaaggcggtgg

SEQ ID NO: 39332 - RNA, 20 nt, synthetic construct
  source 1..20: mol_type = other RNA
gcagggtcatgcacacgctg

SEQ ID NO: 39333 - RNA, 20 nt, synthetic construct
  source 1..20: mol_type = other RNA
gcagggtgaaacttgaatac

SEQ ID NO: 39334 - RNA, 20 nt, synthetic construct
  source 1..20: mol_type = other RNA
gcagggtggagtccaaccaa

SEQ ID NO: 39335 - RNA, 20 nt, synthetic construct
  source 1..20: mol_type = other RNA
gcagggtgggcccttaatcc

SEQ ID NO: 39336 - RNA, 20 nt, synthetic construct
  source 1..20: mol_type = other RNA
gcaggtatttctaaatcaac

SEQ ID NO: 39337 - RNA, 20 nt, synthetic construct
  source 1..20: mol_type = other RNA
gcaggtcacctagcctctct

SEQ ID NO: 39338 - RNA, 20 nt, synthetic construct
  source 1..20: mol_type = other RNA
gcaggtcatgacttttttgc

SEQ ID NO: 39339 - RNA, 20 nt, synthetic construct
  source 1..20: mol_type = other RNA
gcaggtcttcaacctcaact

SEQ ID NO: 39340 - RNA, 20 nt, synthetic construct
  source 1..20: mol_type = other RNA
gcaggtggaaggcctgatag

SEQ ID NO: 39341 - RNA, 20 nt, synthetic construct
  source 1..20: mol_type = other RNA
gcaggtggatatctgaggtc

SEQ ID NO: 39342 - RNA, 20 nt, synthetic construct
  source 1..20: mol_type = other RNA
gcaggtggatcaggagattg

SEQ ID NO: 39343 - RNA, 20 nt, synthetic construct
  source 1..20: mol_type = other RNA
gcaggtgggaggcccggagc

SEQ ID NO: 39344 - RNA, 20 nt, synthetic construct
  source 1..20: mol_type = other RNA
gcaggtgtgggccaccaagc

SEQ ID NO: 39345 - RNA, 20 nt, synthetic construct
  source 1..20: mol_type = other RNA
gcaggtgttggtgcatttgg

SEQ ID NO: 39346 - RNA, 20 nt, synthetic construct
  source 1..20: mol_type = other RNA
gcaggttcatgtgtgcttac

SEQ ID NO: 39347 - RNA, 20 nt, synthetic construct
  source 1..20: mol_type = other RNA
gcaggttcattttaataagc

SEQ ID NO: 39348 - RNA, 20 nt, synthetic construct
  source 1..20: mol_type = other RNA
gcaggttgatactagtttag

SEQ ID NO: 39349 - RNA, 20 nt, synthetic construct
  source 1..20: mol_type = other RNA
gcaggttgcattaatgcttc

SEQ ID NO: 39350 - RNA, 20 nt, synthetic construct
  source 1..20: mol_type = other RNA
gcaggtttactccaagaagg

SEQ ID NO: 39351 - RNA, 20 nt, synthetic construct
  source 1..20: mol_type = other RNA
gcaggtttaggaagcacatt

SEQ ID NO: 39352 - RNA, 20 nt, synthetic construct
  source 1..20: mol_type = other RNA
gcaggtttcaagtgaaccaa

SEQ ID NO: 39353 - RNA, 20 nt, synthetic construct
  source 1..20: mol_type = other RNA
gcagtaaaatgaaaaaacct

SEQ ID NO: 39354 - RNA, 20 nt, synthetic construct
  source 1..20: mol_type = other RNA
gcagtaaatatactgactag

SEQ ID NO: 39355 - RNA, 20 nt, synthetic construct
  source 1..20: mol_type = other RNA
gcagtaaatgcctacattaa

SEQ ID NO: 39356 - RNA, 20 nt, synthetic construct
  source 1..20: mol_type = other RNA
gcagtaccattccccttgcc

SEQ ID NO: 39357 - RNA, 20 nt, synthetic construct
  source 1..20: mol_type = other RNA
gcagtacttgtctttttgtg

SEQ ID NO: 39358 - RNA, 20 nt, synthetic construct
  source 1..20: mol_type = other RNA
gcagtagctcatcatttata

SEQ ID NO: 39359 - RNA, 20 nt, synthetic construct
  source 1..20: mol_type = other RNA
gcagtaggcttagataggat

SEQ ID NO: 39360 - RNA, 20 nt, synthetic construct
  source 1..20: mol_type = other RNA
gcagtagtaaagcaaatgtg

SEQ ID NO: 39361 - RNA, 20 nt, synthetic construct
  source 1..20: mol_type = other RNA
gcagtagtattgaactgtta

SEQ ID NO: 39362 - RNA, 20 nt, synthetic construct
  source 1..20: mol_type = other RNA
gcagtatcttgaagaaacca

SEQ ID NO: 39363 - RNA, 20 nt, synthetic construct
  source 1..20: mol_type = other RNA
gcagtatgcatagatcacaa

SEQ ID NO: 39364 - RNA, 20 nt, synthetic construct
  source 1..20: mol_type = other RNA
gcagtatgtaggaaactttg

SEQ ID NO: 39365 - RNA, 20 nt, synthetic construct
  source 1..20: mol_type = other RNA
gcagtatgtgccatttttat

SEQ ID NO: 39366 - RNA, 20 nt, synthetic construct
  source 1..20: mol_type = other RNA
gcagtattgttaactgtaga

SEQ ID NO: 39367 - RNA, 20 nt, synthetic construct
  source 1..20: mol_type = other RNA
gcagtccccggtctttcctg

SEQ ID NO: 39368 - RNA, 20 nt, synthetic construct
  source 1..20: mol_type = other RNA
gcagtcctctactttcacat

SEQ ID NO: 39369 - RNA, 20 nt, synthetic construct
  source 1..20: mol_type = other RNA
gcagtcctctcactccaaag

SEQ ID NO: 39370 - RNA, 20 nt, synthetic construct
  source 1..20: mol_type = other RNA
gcagtcctgccttggcctcc

SEQ ID NO: 39371 - RNA, 20 nt, synthetic construct
  source 1..20: mol_type = other RNA
gcagtctaaccattaacagc

SEQ ID NO: 39372 - RNA, 20 nt, synthetic construct
  source 1..20: mol_type = other RNA
gcagtctaggaaaagacttg

SEQ ID NO: 39373 - RNA, 20 nt, synthetic construct
  source 1..20: mol_type = other RNA
gcagtctagtccatgaagaa

SEQ ID NO: 39374 - RNA, 20 nt, synthetic construct
  source 1..20: mol_type = other RNA
gcagtctcaaactcctgcac

SEQ ID NO: 39375 - RNA, 20 nt, synthetic construct
  source 1..20: mol_type = other RNA
gcagtctgcaggcagaatgt

SEQ ID NO: 39376 - RNA, 20 nt, synthetic construct
  source 1..20: mol_type = other RNA
gcagtctgtcctcgtaaaag

SEQ ID NO: 39377 - RNA, 20 nt, synthetic construct
  source 1..20: mol_type = other RNA
gcagtcttaaccattgagcc

SEQ ID NO: 39378 - RNA, 20 nt, synthetic construct
  source 1..20: mol_type = other RNA
gcagtgaaagtctccctaac

SEQ ID NO: 39379 - RNA, 20 nt, synthetic construct
  source 1..20: mol_type = other RNA
gcagtgaacatgggaatgca

SEQ ID NO: 39380 - RNA, 20 nt, synthetic construct
  source 1..20: mol_type = other RNA
gcagtgagcccagagatccc

SEQ ID NO: 39381 - RNA, 20 nt, synthetic construct
  source 1..20: mol_type = other RNA
gcagtgctgaaagctagaag

SEQ ID NO: 39382 - RNA, 20 nt, synthetic construct
  source 1..20: mol_type = other RNA
gcagtgcttagcgctggagg

SEQ ID NO: 39383 - RNA, 20 nt, synthetic construct
  source 1..20: mol_type = other RNA
gcagtggatgactaggctcc

SEQ ID NO: 39384 - RNA, 20 nt, synthetic construct
  source 1..20: mol_type = other RNA
gcagtggcgtgtgcccaggc

SEQ ID NO: 39385 - RNA, 20 nt, synthetic construct
  source 1..20: mol_type = other RNA
gcagtggcttcctaactggt

SEQ ID NO: 39386 - RNA, 20 nt, synthetic construct
  source 1..20: mol_type = other RNA
gcagtgggaagtggagtgcg

SEQ ID NO: 39387 - RNA, 20 nt, synthetic construct
  source 1..20: mol_type = other RNA
gcagtggtgtggtcttgtct

SEQ ID NO: 39388 - RNA, 20 nt, synthetic construct
  source 1..20: mol_type = other RNA
gcagtgtccatctcccatca

SEQ ID NO: 39389 - RNA, 20 nt, synthetic construct
  source 1..20: mol_type = other RNA
gcagtgtgaataggaaagtg

SEQ ID NO: 39390 - RNA, 20 nt, synthetic construct
  source 1..20: mol_type = other RNA
gcagtgtgttctgccttgag

SEQ ID NO: 39391 - RNA, 20 nt, synthetic construct
  source 1..20: mol_type = other RNA
gcagtgtttcctagattccc

SEQ ID NO: 39392 - RNA, 20 nt, synthetic construct
  source 1..20: mol_type = other RNA
gcagttactcctgagcaagg

SEQ ID NO: 39393 - RNA, 20 nt, synthetic construct
  source 1..20: mol_type = other RNA
gcagttagcatgcctgacaa

SEQ ID NO: 39394 - RNA, 20 nt, synthetic construct
  source 1..20: mol_type = other RNA
gcagttattaagagtgtgct

SEQ ID NO: 39395 - RNA, 20 nt, synthetic construct
  source 1..20: mol_type = other RNA
gcagttcaagcaccacttcg

SEQ ID NO: 39396 - RNA, 20 nt, synthetic construct
  source 1..20: mol_type = other RNA
gcagttcagcctgcagaagg

SEQ ID NO: 39397 - RNA, 20 nt, synthetic construct
  source 1..20: mol_type = other RNA
gcagttctgtacccttacgc

SEQ ID NO: 39398 - RNA, 20 nt, synthetic construct
  source 1..20: mol_type = other RNA
gcagttgagttttcaacctt

SEQ ID NO: 39399 - RNA, 20 nt, synthetic construct
  source 1..20: mol_type = other RNA
gcagttgatgcaatttgttt

SEQ ID NO: 39400 - RNA, 20 nt, synthetic construct
  source 1..20: mol_type = other RNA
gcagttgcttactctaatgg

SEQ ID NO: 39401 - RNA, 20 nt, synthetic construct
  source 1..20: mol_type = other RNA
gcagttggattatatgttct

SEQ ID NO: 39402 - RNA, 20 nt, synthetic construct
  source 1..20: mol_type = other RNA
gcagttggggactcttatgg

SEQ ID NO: 39403 - RNA, 20 nt, synthetic construct
  source 1..20: mol_type = other RNA
gcagttgtatgccaaaaaat

SEQ ID NO: 39404 - RNA, 20 nt, synthetic construct
  source 1..20: mol_type = other RNA
gcagtttaagaattaaaaac

SEQ ID NO: 39405 - RNA, 20 nt, synthetic construct
  source 1..20: mol_type = other RNA
gcagtttcacttcttagtaa

SEQ ID NO: 39406 - RNA, 20 nt, synthetic construct
  source 1..20: mol_type = other RNA
gcagtttgtgttttcactct

SEQ ID NO: 39407 - RNA, 20 nt, synthetic construct
  source 1..20: mol_type = other RNA
gcagtttgttctgctgttga

SEQ ID NO: 39408 - RNA, 20 nt, synthetic construct
  source 1..20: mol_type = other RNA
gcagttttaaagaattcgtt

SEQ ID NO: 39409 - RNA, 20 nt, synthetic construct
  source 1..20: mol_type = other RNA
gcagtttttccactaatgtc

SEQ ID NO: 39410 - RNA, 20 nt, synthetic construct
  source 1..20: mol_type = other RNA
gcataaaaaagatcaaatga

SEQ ID NO: 39411 - RNA, 20 nt, synthetic construct
  source 1..20: mol_type = other RNA
gcataaaaatatatacggaa

SEQ ID NO: 39412 - RNA, 20 nt, synthetic construct
  source 1..20: mol_type = other RNA
gcataaacgacagcaggaaa

SEQ ID NO: 39413 - RNA, 20 nt, synthetic construct
  source 1..20: mol_type = other RNA
gcataaagacagacatttgg

SEQ ID NO: 39414 - RNA, 20 nt, synthetic construct
  source 1..20: mol_type = other RNA
gcataacatctatgaagtaa

SEQ ID NO: 39415 - RNA, 20 nt, synthetic construct
  source 1..20: mol_type = other RNA
gcataaccaaattatttcag

SEQ ID NO: 39416 - RNA, 20 nt, synthetic construct
  source 1..20: mol_type = other RNA
gcataactcgtaatgcgatg

SEQ ID NO: 39417 - RNA, 20 nt, synthetic construct
  source 1..20: mol_type = other RNA
gcataagacccctcaggtgt

SEQ ID NO: 39418 - RNA, 20 nt, synthetic construct
  source 1..20: mol_type = other RNA
gcataagccaccgcactcag

SEQ ID NO: 39419 - RNA, 20 nt, synthetic construct
  source 1..20: mol_type = other RNA
gcataagttctagagatttg

SEQ ID NO: 39420 - RNA, 20 nt, synthetic construct
  source 1..20: mol_type = other RNA
gcataattcgaaataatcat

SEQ ID NO: 39421 - RNA, 20 nt, synthetic construct
  source 1..20: mol_type = other RNA
gcataattggttaaacttgg

SEQ ID NO: 39422 - RNA, 20 nt, synthetic construct
  source 1..20: mol_type = other RNA
gcatacaactgctcataata

SEQ ID NO: 39423 - RNA, 20 nt, synthetic construct
  source 1..20: mol_type = other RNA
gcatacactcatttcctttc

SEQ ID NO: 39424 - RNA, 20 nt, synthetic construct
  source 1..20: mol_type = other RNA
gcatacaggagttccgattt

SEQ ID NO: 39425 - RNA, 20 nt, synthetic construct
  source 1..20: mol_type = other RNA
gcataccaagcccggcacgg

SEQ ID NO: 39426 - RNA, 20 nt, synthetic construct
  source 1..20: mol_type = other RNA
gcataccaccacattcggcc

SEQ ID NO: 39427 - RNA, 20 nt, synthetic construct
  source 1..20: mol_type = other RNA
gcatacgtcgtcccccatcc

SEQ ID NO: 39428 - RNA, 20 nt, synthetic construct
  source 1..20: mol_type = other RNA
gcatactgcagcacttttaa

SEQ ID NO: 39429 - RNA, 20 nt, synthetic construct
  source 1..20: mol_type = other RNA
gcatactgtgatgattttag

SEQ ID NO: 39430 - RNA, 20 nt, synthetic construct
  source 1..20: mol_type = other RNA
gcatactgtgcagtggatga

SEQ ID NO: 39431 - RNA, 20 nt, synthetic construct
  source 1..20: mol_type = other RNA
gcatactgtggatatctttt

SEQ ID NO: 39432 - RNA, 20 nt, synthetic construct
  source 1..20: mol_type = other RNA
gcatacttagctaatttcag

SEQ ID NO: 39433 - RNA, 20 nt, synthetic construct
  source 1..20: mol_type = other RNA
gcatactttggaaggtagga

SEQ ID NO: 39434 - RNA, 20 nt, synthetic construct
  source 1..20: mol_type = other RNA
gcatagactttagagtcagt

SEQ ID NO: 39435 - RNA, 20 nt, synthetic construct
  source 1..20: mol_type = other RNA
gcatagagatcttgtgtatc

SEQ ID NO: 39436 - RNA, 20 nt, synthetic construct
  source 1..20: mol_type = other RNA
gcatagatcacaaggactgg

SEQ ID NO: 39437 - RNA, 20 nt, synthetic construct
  source 1..20: mol_type = other RNA
gcatagcagaaccttagaaa

SEQ ID NO: 39438 - RNA, 20 nt, synthetic construct
  source 1..20: mol_type = other RNA
gcatagcagggtcatgcaca

SEQ ID NO: 39439 - RNA, 20 nt, synthetic construct
  source 1..20: mol_type = other RNA
gcatagcttgaaccagggag

SEQ ID NO: 39440 - RNA, 20 nt, synthetic construct
  source 1..20: mol_type = other RNA
gcatagggatgttgcctact

SEQ ID NO: 39441 - RNA, 20 nt, synthetic construct
  source 1..20: mol_type = other RNA
gcatagggccttctacttta

SEQ ID NO: 39442 - RNA, 20 nt, synthetic construct
  source 1..20: mol_type = other RNA
gcatagtactccattatatg

SEQ ID NO: 39443 - RNA, 20 nt, synthetic construct
  source 1..20: mol_type = other RNA
gcatagtttgagtatttcat

SEQ ID NO: 39444 - RNA, 20 nt, synthetic construct
  source 1..20: mol_type = other RNA
gcatataaactggaaggaaa

SEQ ID NO: 39445 - RNA, 20 nt, synthetic construct
  source 1..20: mol_type = other RNA
gcatataataagcagaattc

SEQ ID NO: 39446 - RNA, 20 nt, synthetic construct
  source 1..20: mol_type = other RNA
gcatatacatgacatggttt

SEQ ID NO: 39447 - RNA, 20 nt, synthetic construct
  source 1..20: mol_type = other RNA
gcatatataccacattttgt

SEQ ID NO: 39448 - RNA, 20 nt, synthetic construct
  source 1..20: mol_type = other RNA
gcatatatactctgagacag

SEQ ID NO: 39449 - RNA, 20 nt, synthetic construct
  source 1..20: mol_type = other RNA
gcatatatctgtctgggata

SEQ ID NO: 39450 - RNA, 20 nt, synthetic construct
  source 1..20: mol_type = other RNA
gcatatgaatctagaaagat

SEQ ID NO: 39451 - RNA, 20 nt, synthetic construct
  source 1..20: mol_type = other RNA
gcatatgtcactgtaagaat

SEQ ID NO: 39452 - RNA, 20 nt, synthetic construct
  source 1..20: mol_type = other RNA
gcatatgtttgtaacttgtt

SEQ ID NO: 39453 - RNA, 20 nt, synthetic construct
  source 1..20: mol_type = other RNA
gcatatgtttttattagcag

SEQ ID NO: 39454 - RNA, 20 nt, synthetic construct
  source 1..20: mol_type = other RNA
gcatattagctgtctggatt

SEQ ID NO: 39455 - RNA, 20 nt, synthetic construct
  source 1..20: mol_type = other RNA
gcatattattgtaacttgaa

SEQ ID NO: 39456 - RNA, 20 nt, synthetic construct
  source 1..20: mol_type = other RNA
gcatattgaagccagcacct

SEQ ID NO: 39457 - RNA, 20 nt, synthetic construct
  source 1..20: mol_type = other RNA
gcatcaaagctaccctttct

SEQ ID NO: 39458 - RNA, 20 nt, synthetic construct
  source 1..20: mol_type = other RNA
gcatcaaaggacactattga

SEQ ID NO: 39459 - RNA, 20 nt, synthetic construct
  source 1..20: mol_type = other RNA
gcatcaactgcttccctagc

SEQ ID NO: 39460 - RNA, 20 nt, synthetic construct
  source 1..20: mol_type = other RNA
gcatcaccatcatcatcagg

SEQ ID NO: 39461 - RNA, 20 nt, synthetic construct
  source 1..20: mol_type = other RNA
gcatcacttgaggtgattaa

SEQ ID NO: 39462 - RNA, 20 nt, synthetic construct
  source 1..20: mol_type = other RNA
gcatcagaattccattcctt

SEQ ID NO: 39463 - RNA, 20 nt, synthetic construct
  source 1..20: mol_type = other RNA
gcatcagagctttgttatga

SEQ ID NO: 39464 - RNA, 20 nt, synthetic construct
  source 1..20: mol_type = other RNA
gcatcatactggaaggactc

SEQ ID NO: 39465 - RNA, 20 nt, synthetic construct
  source 1..20: mol_type = other RNA
gcatcatggtgggccttgca

SEQ ID NO: 39466 - RNA, 20 nt, synthetic construct
  source 1..20: mol_type = other RNA
gcatcattcaaatgatattc

SEQ ID NO: 39467 - RNA, 20 nt, synthetic construct
  source 1..20: mol_type = other RNA
gcatcattcataaacacaga

SEQ ID NO: 39468 - RNA, 20 nt, synthetic construct
  source 1..20: mol_type = other RNA
gcatccaaaagggaaatatg

SEQ ID NO: 39469 - RNA, 20 nt, synthetic construct
  source 1..20: mol_type = other RNA
gcatccacattttgtgacaa

SEQ ID NO: 39470 - RNA, 20 nt, synthetic construct
  source 1..20: mol_type = other RNA
gcatccactaggggactaac

SEQ ID NO: 39471 - RNA, 20 nt, synthetic construct
  source 1..20: mol_type = other RNA
gcatcccaagggttttggta

SEQ ID NO: 39472 - RNA, 20 nt, synthetic construct
  source 1..20: mol_type = other RNA
gcatcccagaggtactcaac

SEQ ID NO: 39473 - RNA, 20 nt, synthetic construct
  source 1..20: mol_type = other RNA
gcatcccatatggaggcaat

SEQ ID NO: 39474 - RNA, 20 nt, synthetic construct
  source 1..20: mol_type = other RNA
gcatccccagaaagagagag

SEQ ID NO: 39475 - RNA, 20 nt, synthetic construct
  source 1..20: mol_type = other RNA
gcatccccattcaattgtcc

SEQ ID NO: 39476 - RNA, 20 nt, synthetic construct
  source 1..20: mol_type = other RNA
gcatccccgctgcgagaaag

SEQ ID NO: 39477 - RNA, 20 nt, synthetic construct
  source 1..20: mol_type = other RNA
gcatccctccagtccagcac

SEQ ID NO: 39478 - RNA, 20 nt, synthetic construct
  source 1..20: mol_type = other RNA
gcatccctcctctggccctc

SEQ ID NO: 39479 - RNA, 20 nt, synthetic construct
  source 1..20: mol_type = other RNA
gcatccctgccgcgcgcgaa

SEQ ID NO: 39480 - RNA, 20 nt, synthetic construct
  source 1..20: mol_type = other RNA
gcatcctttataccttttaa

SEQ ID NO: 39481 - RNA, 20 nt, synthetic construct
  source 1..20: mol_type = other RNA
gcatcggggcctacagtggt

SEQ ID NO: 39482 - RNA, 20 nt, synthetic construct
  source 1..20: mol_type = other RNA
gcatcgtgaagtctttattt

SEQ ID NO: 39483 - RNA, 20 nt, synthetic construct
  source 1..20: mol_type = other RNA
gcatcgtttcaatattaaga

SEQ ID NO: 39484 - RNA, 20 nt, synthetic construct
  source 1..20: mol_type = other RNA
gcatctagcacagaaccatg

SEQ ID NO: 39485 - RNA, 20 nt, synthetic construct
  source 1..20: mol_type = other RNA
gcatctagttaccactagca

SEQ ID NO: 39486 - RNA, 20 nt, synthetic construct
  source 1..20: mol_type = other RNA
gcatctatttccccattaga

SEQ ID NO: 39487 - RNA, 20 nt, synthetic construct
  source 1..20: mol_type = other RNA
gcatctctcccttcctgttc

SEQ ID NO: 39488 - RNA, 20 nt, synthetic construct
  source 1..20: mol_type = other RNA
gcatctctctaaaaacatcc

SEQ ID NO: 39489 - RNA, 20 nt, synthetic construct
  source 1..20: mol_type = other RNA
gcatctgatacacttctatc

SEQ ID NO: 39490 - RNA, 20 nt, synthetic construct
  source 1..20: mol_type = other RNA
gcatctggtctatctcatta

SEQ ID NO: 39491 - RNA, 20 nt, synthetic construct
  source 1..20: mol_type = other RNA
gcatcttagctcttccctta

SEQ ID NO: 39492 - RNA, 20 nt, synthetic construct
  source 1..20: mol_type = other RNA
gcatcttcactgactacaca

SEQ ID NO: 39493 - RNA, 20 nt, synthetic construct
  source 1..20: mol_type = other RNA
gcatcttcccatgaacatgg

SEQ ID NO: 39494 - RNA, 20 nt, synthetic construct
  source 1..20: mol_type = other RNA
gcatcttcttttacttgctt

SEQ ID NO: 39495 - RNA, 20 nt, synthetic construct
  source 1..20: mol_type = other RNA
gcatcttgaactaagtgtga

SEQ ID NO: 39496 - RNA, 20 nt, synthetic construct
  source 1..20: mol_type = other RNA
gcatcttgcaaaacggaaac

SEQ ID NO: 39497 - RNA, 20 nt, synthetic construct
  source 1..20: mol_type = other RNA
gcatctttaagattttttgt

SEQ ID NO: 39498 - RNA, 20 nt, synthetic construct
  source 1..20: mol_type = other RNA
gcatctttgttacagcagct

SEQ ID NO: 39499 - RNA, 20 nt, synthetic construct
  source 1..20: mol_type = other RNA
gcatcttttaaaaaccttaa

SEQ ID NO: 39500 - RNA, 20 nt, synthetic construct
  source 1..20: mol_type = other RNA
gcatcttttgacgcgcaaca

SEQ ID NO: 39501 - RNA, 20 nt, synthetic construct
  source 1..20: mol_type = other RNA
gcatcttttgagggtatcat

SEQ ID NO: 39502 - RNA, 20 nt, synthetic construct
  source 1..20: mol_type = other RNA
gcatgaaaacagctaggtga

SEQ ID NO: 39503 - RNA, 20 nt, synthetic construct
  source 1..20: mol_type = other RNA
gcatgaaatgggtttaaaag

SEQ ID NO: 39504 - RNA, 20 nt, synthetic construct
  source 1..20: mol_type = other RNA
gcatgaaattcttgggtgaa

SEQ ID NO: 39505 - RNA, 20 nt, synthetic construct
  source 1..20: mol_type = other RNA
gcatgaacccaccaggaggc

SEQ ID NO: 39506 - RNA, 20 nt, synthetic construct
  source 1..20: mol_type = other RNA
gcatgaagccctctaagtca

SEQ ID NO: 39507 - RNA, 20 nt, synthetic construct
  source 1..20: mol_type = other RNA
gcatgaatacctatttagag

SEQ ID NO: 39508 - RNA, 20 nt, synthetic construct
  source 1..20: mol_type = other RNA
gcatgaatttgttttcttat

SEQ ID NO: 39509 - RNA, 20 nt, synthetic construct
  source 1..20: mol_type = other RNA
gcatgaccctgctatgcata

SEQ ID NO: 39510 - RNA, 20 nt, synthetic construct
  source 1..20: mol_type = other RNA
gcatgagacttggagtttga

SEQ ID NO: 39511 - RNA, 20 nt, synthetic construct
  source 1..20: mol_type = other RNA
gcatgagatactacgcctag

SEQ ID NO: 39512 - RNA, 20 nt, synthetic construct
  source 1..20: mol_type = other RNA
gcatgagccacagggcccag

SEQ ID NO: 39513 - RNA, 20 nt, synthetic construct
  source 1..20: mol_type = other RNA
gcatgagccactgcgggccc

SEQ ID NO: 39514 - RNA, 20 nt, synthetic construct
  source 1..20: mol_type = other RNA
gcatgaggcatattattgta

SEQ ID NO: 39515 - RNA, 20 nt, synthetic construct
  source 1..20: mol_type = other RNA
gcatgagtatctggtgttgc

SEQ ID NO: 39516 - RNA, 20 nt, synthetic construct
  source 1..20: mol_type = other RNA
gcatgagtcgccatacctgg

SEQ ID NO: 39517 - RNA, 20 nt, synthetic construct
  source 1..20: mol_type = other RNA
gcatgatctcacgtcaccgc

SEQ ID NO: 39518 - RNA, 20 nt, synthetic construct
  source 1..20: mol_type = other RNA
gcatgatggctcaacgcctg

SEQ ID NO: 39519 - RNA, 20 nt, synthetic construct
  source 1..20: mol_type = other RNA
gcatgattccccttatatgg

SEQ ID NO: 39520 - RNA, 20 nt, synthetic construct
  source 1..20: mol_type = other RNA
gcatgatttataatccattg

SEQ ID NO: 39521 - RNA, 20 nt, synthetic construct
  source 1..20: mol_type = other RNA
gcatgcacacagagggagcg

SEQ ID NO: 39522 - RNA, 20 nt, synthetic construct
  source 1..20: mol_type = other RNA
gcatgcacacaggagaactt

SEQ ID NO: 39523 - RNA, 20 nt, synthetic construct
  source 1..20: mol_type = other RNA
gcatgcacggacttggcaca

SEQ ID NO: 39524 - RNA, 20 nt, synthetic construct
  source 1..20: mol_type = other RNA
gcatgcagtagctcatcatt

SEQ ID NO: 39525 - RNA, 20 nt, synthetic construct
  source 1..20: mol_type = other RNA
gcatgcatgtctgtctgttc

SEQ ID NO: 39526 - RNA, 20 nt, synthetic construct
  source 1..20: mol_type = other RNA
gcatgccgggacaagagtct

SEQ ID NO: 39527 - RNA, 20 nt, synthetic construct
  source 1..20: mol_type = other RNA
gcatgcctctcccaccatct

SEQ ID NO: 39528 - RNA, 20 nt, synthetic construct
  source 1..20: mol_type = other RNA
gcatgcctctgttacagctc

SEQ ID NO: 39529 - RNA, 20 nt, synthetic construct
  source 1..20: mol_type = other RNA
gcatgcctgacaaagtatga

SEQ ID NO: 39530 - RNA, 20 nt, synthetic construct
  source 1..20: mol_type = other RNA
gcatgcgccatcacacccag

SEQ ID NO: 39531 - RNA, 20 nt, synthetic construct
  source 1..20: mol_type = other RNA
gcatgctaactgcagaggtc

SEQ ID NO: 39532 - RNA, 20 nt, synthetic construct
  source 1..20: mol_type = other RNA
gcatgctaggggctgttccc

SEQ ID NO: 39533 - RNA, 20 nt, synthetic construct
  source 1..20: mol_type = other RNA
gcatgctcactgtctccatg

SEQ ID NO: 39534 - RNA, 20 nt, synthetic construct
  source 1..20: mol_type = other RNA
gcatgctcccatttgggact

SEQ ID NO: 39535 - RNA, 20 nt, synthetic construct
  source 1..20: mol_type = other RNA
gcatgctgcaactgagaaga

SEQ ID NO: 39536 - RNA, 20 nt, synthetic construct
  source 1..20: mol_type = other RNA
gcatgggaggtaatactata

SEQ ID NO: 39537 - RNA, 20 nt, synthetic construct
  source 1..20: mol_type = other RNA
gcatggggagttttaggaaa

SEQ ID NO: 39538 - RNA, 20 nt, synthetic construct
  source 1..20: mol_type = other RNA
gcatgggggcgcgtgcctat

SEQ ID NO: 39539 - RNA, 20 nt, synthetic construct
  source 1..20: mol_type = other RNA
gcatgggtccaagacaggaa

SEQ ID NO: 39540 - RNA, 20 nt, synthetic construct
  source 1..20: mol_type = other RNA
gcatggtggtaggtgtgtgt

SEQ ID NO: 39541 - RNA, 20 nt, synthetic construct
  source 1..20: mol_type = other RNA
gcatggtgtaaaatacaaca

SEQ ID NO: 39542 - RNA, 20 nt, synthetic construct
  source 1..20: mol_type = other RNA
gcatgtaacttgcttaggct

SEQ ID NO: 39543 - RNA, 20 nt, synthetic construct
  source 1..20: mol_type = other RNA
gcatgtcccctggagttaat

SEQ ID NO: 39544 - RNA, 20 nt, synthetic construct
  source 1..20: mol_type = other RNA
gcatgtctgcaggagccttg

SEQ ID NO: 39545 - RNA, 20 nt, synthetic construct
  source 1..20: mol_type = other RNA
gcatgtctgtagttacaact

SEQ ID NO: 39546 - RNA, 20 nt, synthetic construct
  source 1..20: mol_type = other RNA
gcatgtctgtctgttcacat

SEQ ID NO: 39547 - RNA, 20 nt, synthetic construct
  source 1..20: mol_type = other RNA
gcatgtcttcagaggccctg

SEQ ID NO: 39548 - RNA, 20 nt, synthetic construct
  source 1..20: mol_type = other RNA
gcatgtgcaggaaacttcca

SEQ ID NO: 39549 - RNA, 20 nt, synthetic construct
  source 1..20: mol_type = other RNA
gcatgtggccaggaggagga

SEQ ID NO: 39550 - RNA, 20 nt, synthetic construct
  source 1..20: mol_type = other RNA
gcatgtgttgtgcacacatc

SEQ ID NO: 39551 - RNA, 20 nt, synthetic construct
  source 1..20: mol_type = other RNA
gcatgttatttggggattct

SEQ ID NO: 39552 - RNA, 20 nt, synthetic construct
  source 1..20: mol_type = other RNA
gcatgttgctttgcgaaata

SEQ ID NO: 39553 - RNA, 20 nt, synthetic construct
  source 1..20: mol_type = other RNA
gcatgttggatagtttctca

SEQ ID NO: 39554 - RNA, 20 nt, synthetic construct
  source 1..20: mol_type = other RNA
gcatgttgggccaacttcca

SEQ ID NO: 39555 - RNA, 20 nt, synthetic construct
  source 1..20: mol_type = other RNA
gcattaagccagtcactaaa

SEQ ID NO: 39556 - RNA, 20 nt, synthetic construct
  source 1..20: mol_type = other RNA
gcattaaggacatccacaac

SEQ ID NO: 39557 - RNA, 20 nt, synthetic construct
  source 1..20: mol_type = other RNA
gcattaatgcaacctgcttt

SEQ ID NO: 39558 - RNA, 20 nt, synthetic construct
  source 1..20: mol_type = other RNA
gcattaatgcttcatatttt

SEQ ID NO: 39559 - RNA, 20 nt, synthetic construct
  source 1..20: mol_type = other RNA
gcattaattgagagctttct

SEQ ID NO: 39560 - RNA, 20 nt, synthetic construct
  source 1..20: mol_type = other RNA
gcattacatgaatggaaaat

SEQ ID NO: 39561 - RNA, 20 nt, synthetic construct
  source 1..20: mol_type = other RNA
gcattaccctaataacaaaa

SEQ ID NO: 39562 - RNA, 20 nt, synthetic construct
  source 1..20: mol_type = other RNA
gcattacgagttatgcaaga

SEQ ID NO: 39563 - RNA, 20 nt, synthetic construct
  source 1..20: mol_type = other RNA
gcattacttaggcagttatt

SEQ ID NO: 39564 - RNA, 20 nt, synthetic construct
  source 1..20: mol_type = other RNA
gcattagaagttaaattgat

SEQ ID NO: 39565 - RNA, 20 nt, synthetic construct
  source 1..20: mol_type = other RNA
gcattagagccccaagaaag

SEQ ID NO: 39566 - RNA, 20 nt, synthetic construct
  source 1..20: mol_type = other RNA
gcattagtgaattcacagta

SEQ ID NO: 39567 - RNA, 20 nt, synthetic construct
  source 1..20: mol_type = other RNA
gcattatcccagatctaaca

SEQ ID NO: 39568 - RNA, 20 nt, synthetic construct
  source 1..20: mol_type = other RNA
gcattatccctttaaaatga

SEQ ID NO: 39569 - RNA, 20 nt, synthetic construct
  source 1..20: mol_type = other RNA
gcattatcttaataacctca

SEQ ID NO: 39570 - RNA, 20 nt, synthetic construct
  source 1..20: mol_type = other RNA
gcattattgtaattatcaac

SEQ ID NO: 39571 - RNA, 20 nt, synthetic construct
  source 1..20: mol_type = other RNA
gcattcatactgaaggcata

SEQ ID NO: 39572 - RNA, 20 nt, synthetic construct
  source 1..20: mol_type = other RNA
gcattcatccaggcaaaaga

SEQ ID NO: 39573 - RNA, 20 nt, synthetic construct
  source 1..20: mol_type = other RNA
gcattccagagggtaacgtg

SEQ ID NO: 39574 - RNA, 20 nt, synthetic construct
  source 1..20: mol_type = other RNA
gcattccagattgaaatcta

SEQ ID NO: 39575 - RNA, 20 nt, synthetic construct
  source 1..20: mol_type = other RNA
gcattccccacataggatag

SEQ ID NO: 39576 - RNA, 20 nt, synthetic construct
  source 1..20: mol_type = other RNA
gcattccctgtctgggaagt

SEQ ID NO: 39577 - RNA, 20 nt, synthetic construct
  source 1..20: mol_type = other RNA
gcattccgcctgggcgacag

SEQ ID NO: 39578 - RNA, 20 nt, synthetic construct
  source 1..20: mol_type = other RNA
gcattccgtggaaggccttc

SEQ ID NO: 39579 - RNA, 20 nt, synthetic construct
  source 1..20: mol_type = other RNA
gcattcctgaaatgaaccaa

SEQ ID NO: 39580 - RNA, 20 nt, synthetic construct
  source 1..20: mol_type = other RNA
gcattcgtccctaaacactg

SEQ ID NO: 39581 - RNA, 20 nt, synthetic construct
  source 1..20: mol_type = other RNA
gcattctagaaaggagggac

SEQ ID NO: 39582 - RNA, 20 nt, synthetic construct
  source 1..20: mol_type = other RNA
gcattctgtcacatagacct

SEQ ID NO: 39583 - RNA, 20 nt, synthetic construct
  source 1..20: mol_type = other RNA
gcattgaagtatagtttgaa

SEQ ID NO: 39584 - RNA, 20 nt, synthetic construct
  source 1..20: mol_type = other RNA
gcattgactaccaattctcc

SEQ ID NO: 39585 - RNA, 20 nt, synthetic construct
  source 1..20: mol_type = other RNA
gcattgcattgactaccaat

SEQ ID NO: 39586 - RNA, 20 nt, synthetic construct
  source 1..20: mol_type = other RNA
gcattgcatttacttgtcat

SEQ ID NO: 39587 - RNA, 20 nt, synthetic construct
  source 1..20: mol_type = other RNA
gcattgcctttattactatt

SEQ ID NO: 39588 - RNA, 20 nt, synthetic construct
  source 1..20: mol_type = other RNA
gcattgctaattcattgtac

SEQ ID NO: 39589 - RNA, 20 nt, synthetic construct
  source 1..20: mol_type = other RNA
gcattgggagctttcattat

SEQ ID NO: 39590 - RNA, 20 nt, synthetic construct
  source 1..20: mol_type = other RNA
gcattgtcccgggggagggc

SEQ ID NO: 39591 - RNA, 20 nt, synthetic construct
  source 1..20: mol_type = other RNA
gcattgtgatgtctcagatg

SEQ ID NO: 39592 - RNA, 20 nt, synthetic construct
  source 1..20: mol_type = other RNA
gcattgtgcacttaaaattt

SEQ ID NO: 39593 - RNA, 20 nt, synthetic construct
  source 1..20: mol_type = other RNA
gcattgtgctcagtggttct

SEQ ID NO: 39594 - RNA, 20 nt, synthetic construct
  source 1..20: mol_type = other RNA
gcattgtttacagtagccaa

SEQ ID NO: 39595 - RNA, 20 nt, synthetic construct
  source 1..20: mol_type = other RNA
gcatttaaaagaacctctgg

SEQ ID NO: 39596 - RNA, 20 nt, synthetic construct
  source 1..20: mol_type = other RNA
gcatttacttgtcatttctg

SEQ ID NO: 39597 - RNA, 20 nt, synthetic construct
  source 1..20: mol_type = other RNA
gcatttagccccctgaatac

SEQ ID NO: 39598 - RNA, 20 nt, synthetic construct
  source 1..20: mol_type = other RNA
gcatttatataagttcaaag

SEQ ID NO: 39599 - RNA, 20 nt, synthetic construct
  source 1..20: mol_type = other RNA
gcatttattagtagttaggt

SEQ ID NO: 39600 - RNA, 20 nt, synthetic construct
  source 1..20: mol_type = other RNA
gcatttcagccaaagctggc

SEQ ID NO: 39601 - RNA, 20 nt, synthetic construct
  source 1..20: mol_type = other RNA
gcatttcggctctgtgctga

SEQ ID NO: 39602 - RNA, 20 nt, synthetic construct
  source 1..20: mol_type = other RNA
gcatttctctaatagctagt

SEQ ID NO: 39603 - RNA, 20 nt, synthetic construct
  source 1..20: mol_type = other RNA
gcatttcttacacattaggc

SEQ ID NO: 39604 - RNA, 20 nt, synthetic construct
  source 1..20: mol_type = other RNA
gcatttgaaaacatgttttg

SEQ ID NO: 39605 - RNA, 20 nt, synthetic construct
  source 1..20: mol_type = other RNA
gcatttgagggttagaagac

SEQ ID NO: 39606 - RNA, 20 nt, synthetic construct
  source 1..20: mol_type = other RNA
gcatttgggacagcctagtt

SEQ ID NO: 39607 - RNA, 20 nt, synthetic construct
  source 1..20: mol_type = other RNA
gcatttggtctcattcacta

SEQ ID NO: 39608 - RNA, 20 nt, synthetic construct
  source 1..20: mol_type = other RNA
gcatttggtttgcaaaaatt

SEQ ID NO: 39609 - RNA, 20 nt, synthetic construct
  source 1..20: mol_type = other RNA
gcattttataggcattcctt

SEQ ID NO: 39610 - RNA, 20 nt, synthetic construct
  source 1..20: mol_type = other RNA
gcattttcaaggtagaagta

SEQ ID NO: 39611 - RNA, 20 nt, synthetic construct
  source 1..20: mol_type = other RNA
gcattttccggttgtatagc

SEQ ID NO: 39612 - RNA, 20 nt, synthetic construct
  source 1..20: mol_type = other RNA
gcattttctaaattgaacag

SEQ ID NO: 39613 - RNA, 20 nt, synthetic construct
  source 1..20: mol_type = other RNA
gcattttttaagtggcgctg

SEQ ID NO: 39614 - RNA, 20 nt, synthetic construct
  source 1..20: mol_type = other RNA
gcattttttgccaaattatt

SEQ ID NO: 39615 - RNA, 20 nt, synthetic construct
  source 1..20: mol_type = other RNA
gccaaaagccaagagcgagg

SEQ ID NO: 39616 - RNA, 20 nt, synthetic construct
  source 1..20: mol_type = other RNA
gccaaaatgattttcacagg

SEQ ID NO: 39617 - RNA, 20 nt, synthetic construct
  source 1..20: mol_type = other RNA
gccaaacagtttttacatgt

SEQ ID NO: 39618 - RNA, 20 nt, synthetic construct
  source 1..20: mol_type = other RNA
gccaaacatcatgatttaat

SEQ ID NO: 39619 - RNA, 20 nt, synthetic construct
  source 1..20: mol_type = other RNA
gccaaaccctacacccatcc

SEQ ID NO: 39620 - RNA, 20 nt, synthetic construct
  source 1..20: mol_type = other RNA
gccaaactgttttccacagt

SEQ ID NO: 39621 - RNA, 20 nt, synthetic construct
  source 1..20: mol_type = other RNA
gccaaacttgaaccttcctc

SEQ ID NO: 39622 - RNA, 20 nt, synthetic construct
  source 1..20: mol_type = other RNA
gccaaagaaattggacgggt

SEQ ID NO: 39623 - RNA, 20 nt, synthetic construct
  source 1..20: mol_type = other RNA
gccaaagaagaaatcaaatg

SEQ ID NO: 39624 - RNA, 20 nt, synthetic construct
  source 1..20: mol_type = other RNA
gccaaagacagatcttatgg

SEQ ID NO: 39625 - RNA, 20 nt, synthetic construct
  source 1..20: mol_type = other RNA
gccaaagacattgtcttaca

SEQ ID NO: 39626 - RNA, 20 nt, synthetic construct
  source 1..20: mol_type = other RNA
gccaaagacttcaacggaca

SEQ ID NO: 39627 - RNA, 20 nt, synthetic construct
  source 1..20: mol_type = other RNA
gccaaagattcttgtcatga

SEQ ID NO: 39628 - RNA, 20 nt, synthetic construct
  source 1..20: mol_type = other RNA
gccaaagcaagccttggcaa

SEQ ID NO: 39629 - RNA, 20 nt, synthetic construct
  source 1..20: mol_type = other RNA
gccaaagctggcatgttgga

SEQ ID NO: 39630 - RNA, 20 nt, synthetic construct
  source 1..20: mol_type = other RNA
gccaaaggtagaaacatccc

SEQ ID NO: 39631 - RNA, 20 nt, synthetic construct
  source 1..20: mol_type = other RNA
gccaaataaaacacaaggac

SEQ ID NO: 39632 - RNA, 20 nt, synthetic construct
  source 1..20: mol_type = other RNA
gccaaatatccatgttttaa

SEQ ID NO: 39633 - RNA, 20 nt, synthetic construct
  source 1..20: mol_type = other RNA
gccaaatccctgatcaagtt

SEQ ID NO: 39634 - RNA, 20 nt, synthetic construct
  source 1..20: mol_type = other RNA
gccaaatgaaaggcgtcggg

SEQ ID NO: 39635 - RNA, 20 nt, synthetic construct
  source 1..20: mol_type = other RNA
gccaaattaataaaatggaa

SEQ ID NO: 39636 - RNA, 20 nt, synthetic construct
  source 1..20: mol_type = other RNA
gccaaattatttgagagtaa

SEQ ID NO: 39637 - RNA, 20 nt, synthetic construct
  source 1..20: mol_type = other RNA
gccaacaaccataatgagta

SEQ ID NO: 39638 - RNA, 20 nt, synthetic construct
  source 1..20: mol_type = other RNA
gccaacacatggggcattaa

SEQ ID NO: 39639 - RNA, 20 nt, synthetic construct
  source 1..20: mol_type = other RNA
gccaacagggccactgagag

SEQ ID NO: 39640 - RNA, 20 nt, synthetic construct
  source 1..20: mol_type = other RNA
gccaacagttactttccttt

SEQ ID NO: 39641 - RNA, 20 nt, synthetic construct
  source 1..20: mol_type = other RNA
gccaacatcgtaaaacctca

SEQ ID NO: 39642 - RNA, 20 nt, synthetic construct
  source 1..20: mol_type = other RNA
gccaaccattactcttctac

SEQ ID NO: 39643 - RNA, 20 nt, synthetic construct
  source 1..20: mol_type = other RNA
gccaactctggcaggtcacc

SEQ ID NO: 39644 - RNA, 20 nt, synthetic construct
  source 1..20: mol_type = other RNA
gccaactgtcctctcttgtt

SEQ ID NO: 39645 - RNA, 20 nt, synthetic construct
  source 1..20: mol_type = other RNA
gccaacttccagcaagactt

SEQ ID NO: 39646 - RNA, 20 nt, synthetic construct
  source 1..20: mol_type = other RNA
gccaagagcgaggcctggaa

SEQ ID NO: 39647 - RNA, 20 nt, synthetic construct
  source 1..20: mol_type = other RNA
gccaagagttgctgacttcc

SEQ ID NO: 39648 - RNA, 20 nt, synthetic construct
  source 1..20: mol_type = other RNA
gccaagatctgtttttcaaa

SEQ ID NO: 39649 - RNA, 20 nt, synthetic construct
  source 1..20: mol_type = other RNA
gccaagcaacttgatcaggg

SEQ ID NO: 39650 - RNA, 20 nt, synthetic construct
  source 1..20: mol_type = other RNA
gccaagcagggacgggcggg

SEQ ID NO: 39651 - RNA, 20 nt, synthetic construct
  source 1..20: mol_type = other RNA
gccaagcatggtggtaggtg

SEQ ID NO: 39652 - RNA, 20 nt, synthetic construct
  source 1..20: mol_type = other RNA
gccaaggcaggactgcttga

SEQ ID NO: 39653 - RNA, 20 nt, synthetic construct
  source 1..20: mol_type = other RNA
gccaaggcttgctttggcta

SEQ ID NO: 39654 - RNA, 20 nt, synthetic construct
  source 1..20: mol_type = other RNA
gccaagggtttgtcaatttt

SEQ ID NO: 39655 - RNA, 20 nt, synthetic construct
  source 1..20: mol_type = other RNA
gccaagtaaaagcaacctca

SEQ ID NO: 39656 - RNA, 20 nt, synthetic construct
  source 1..20: mol_type = other RNA
gccaagtataagatgatgat

SEQ ID NO: 39657 - RNA, 20 nt, synthetic construct
  source 1..20: mol_type = other RNA
gccaagtcagcacttctgat

SEQ ID NO: 39658 - RNA, 20 nt, synthetic construct
  source 1..20: mol_type = other RNA
gccaagtccgtgcatgcctc

SEQ ID NO: 39659 - RNA, 20 nt, synthetic construct
  source 1..20: mol_type = other RNA
gccaatatcacactgtttga

SEQ ID NO: 39660 - RNA, 20 nt, synthetic construct
  source 1..20: mol_type = other RNA
gccaatatccctgataatca

SEQ ID NO: 39661 - RNA, 20 nt, synthetic construct
  source 1..20: mol_type = other RNA
gccaatatctatcagggctg

SEQ ID NO: 39662 - RNA, 20 nt, synthetic construct
  source 1..20: mol_type = other RNA
gccaatcaataattctgtgc

SEQ ID NO: 39663 - RNA, 20 nt, synthetic construct
  source 1..20: mol_type = other RNA
gccaatcttcccaatccttt

SEQ ID NO: 39664 - RNA, 20 nt, synthetic construct
  source 1..20: mol_type = other RNA
gccaatttgggatatagcta

SEQ ID NO: 39665 - RNA, 20 nt, synthetic construct
  source 1..20: mol_type = other RNA
gccaattttcatagcagcat

SEQ ID NO: 39666 - RNA, 20 nt, synthetic construct
  source 1..20: mol_type = other RNA
gccacaaagtccccacatga

SEQ ID NO: 39667 - RNA, 20 nt, synthetic construct
  source 1..20: mol_type = other RNA
gccacaaatggagtgactta

SEQ ID NO: 39668 - RNA, 20 nt, synthetic construct
  source 1..20: mol_type = other RNA
gccacaagacataagcattt

SEQ ID NO: 39669 - RNA, 20 nt, synthetic construct
  source 1..20: mol_type = other RNA
gccacacagtacaaggctag

SEQ ID NO: 39670 - RNA, 20 nt, synthetic construct
  source 1..20: mol_type = other RNA
gccacaccacatccagctaa

SEQ ID NO: 39671 - RNA, 20 nt, synthetic construct
  source 1..20: mol_type = other RNA
gccacactccagcatccctc

SEQ ID NO: 39672 - RNA, 20 nt, synthetic construct
  source 1..20: mol_type = other RNA
gccacactcttggtctttct

SEQ ID NO: 39673 - RNA, 20 nt, synthetic construct
  source 1..20: mol_type = other RNA
gccacagcagggctcctcca

SEQ ID NO: 39674 - RNA, 20 nt, synthetic construct
  source 1..20: mol_type = other RNA
gccacagcgcccggcccgtt

SEQ ID NO: 39675 - RNA, 20 nt, synthetic construct
  source 1..20: mol_type = other RNA
gccacagcgtggaatggtca

SEQ ID NO: 39676 - RNA, 20 nt, synthetic construct
  source 1..20: mol_type = other RNA
gccacagcgttgttcagttg

SEQ ID NO: 39677 - RNA, 20 nt, synthetic construct
  source 1..20: mol_type = other RNA
gccacagctacactcaatac

SEQ ID NO: 39678 - RNA, 20 nt, synthetic construct
  source 1..20: mol_type = other RNA
gccacagggcccagcctcaa

SEQ ID NO: 39679 - RNA, 20 nt, synthetic construct
  source 1..20: mol_type = other RNA
gccacataaatcacaggaaa

SEQ ID NO: 39680 - RNA, 20 nt, synthetic construct
  source 1..20: mol_type = other RNA
gccacatacatagtattaaa

SEQ ID NO: 39681 - RNA, 20 nt, synthetic construct
  source 1..20: mol_type = other RNA
gccacatgcttccaaaagca

SEQ ID NO: 39682 - RNA, 20 nt, synthetic construct
  source 1..20: mol_type = other RNA
gccacatgtggttattgagt

SEQ ID NO: 39683 - RNA, 20 nt, synthetic construct
  source 1..20: mol_type = other RNA
gccacattagccactctgaa

SEQ ID NO: 39684 - RNA, 20 nt, synthetic construct
  source 1..20: mol_type = other RNA
gccacattcaacaacatgga

SEQ ID NO: 39685 - RNA, 20 nt, synthetic construct
  source 1..20: mol_type = other RNA
gccacattttaccaaaacag

SEQ ID NO: 39686 - RNA, 20 nt, synthetic construct
  source 1..20: mol_type = other RNA
gccacattttttggtttgta

SEQ ID NO: 39687 - RNA, 20 nt, synthetic construct
  source 1..20: mol_type = other RNA
gccaccaagccctgccttaa

SEQ ID NO: 39688 - RNA, 20 nt, synthetic construct
  source 1..20: mol_type = other RNA
gccaccacgtccggtcgttg

SEQ ID NO: 39689 - RNA, 20 nt, synthetic construct
  source 1..20: mol_type = other RNA
gccaccactcccggccgtat

SEQ ID NO: 39690 - RNA, 20 nt, synthetic construct
  source 1..20: mol_type = other RNA
gccacccttgctgcttctac

SEQ ID NO: 39691 - RNA, 20 nt, synthetic construct
  source 1..20: mol_type = other RNA
gccaccgcacctggccggga

SEQ ID NO: 39692 - RNA, 20 nt, synthetic construct
  source 1..20: mol_type = other RNA
gccaccgcactcagcctgtt

SEQ ID NO: 39693 - RNA, 20 nt, synthetic construct
  source 1..20: mol_type = other RNA
gccaccgcgcccggccaaat

SEQ ID NO: 39694 - RNA, 20 nt, synthetic construct
  source 1..20: mol_type = other RNA
gccaccgcgcctggtgatta

SEQ ID NO: 39695 - RNA, 20 nt, synthetic construct
  source 1..20: mol_type = other RNA
gccaccgtgccgggcttggt

SEQ ID NO: 39696 - RNA, 20 nt, synthetic construct
  source 1..20: mol_type = other RNA
gccacctcatccggtctcag

SEQ ID NO: 39697 - RNA, 20 nt, synthetic construct
  source 1..20: mol_type = other RNA
gccacctcctccggggaccc

SEQ ID NO: 39698 - RNA, 20 nt, synthetic construct
  source 1..20: mol_type = other RNA
gccacgtgaagatggagtta

SEQ ID NO: 39699 - RNA, 20 nt, synthetic construct
  source 1..20: mol_type = other RNA
gccacgtgtattgagtgtag

SEQ ID NO: 39700 - RNA, 20 nt, synthetic construct
  source 1..20: mol_type = other RNA
gccactaaaacaggaagttg

SEQ ID NO: 39701 - RNA, 20 nt, synthetic construct
  source 1..20: mol_type = other RNA
gccactacgcccggcccatg

SEQ ID NO: 39702 - RNA, 20 nt, synthetic construct
  source 1..20: mol_type = other RNA
gccactacttagcccctgct

SEQ ID NO: 39703 - RNA, 20 nt, synthetic construct
  source 1..20: mol_type = other RNA
gccactagtcagtatattta

SEQ ID NO: 39704 - RNA, 20 nt, synthetic construct
  source 1..20: mol_type = other RNA
gccactatagaaaatagtat

SEQ ID NO: 39705 - RNA, 20 nt, synthetic construct
  source 1..20: mol_type = other RNA
gccactcaaaactgaagttt

SEQ ID NO: 39706 - RNA, 20 nt, synthetic construct
  source 1..20: mol_type = other RNA
gccactctcatctaaattaa

SEQ ID NO: 39707 - RNA, 20 nt, synthetic construct
  source 1..20: mol_type = other RNA
gccactctgaattctctgga

SEQ ID NO: 39708 - RNA, 20 nt, synthetic construct
  source 1..20: mol_type = other RNA
gccactgagagctcaggcca

SEQ ID NO: 39709 - RNA, 20 nt, synthetic construct
  source 1..20: mol_type = other RNA
gccactgattgagtatctgg

SEQ ID NO: 39710 - RNA, 20 nt, synthetic construct
  source 1..20: mol_type = other RNA
gccactgcaggtgttggtgc

SEQ ID NO: 39711 - RNA, 20 nt, synthetic construct
  source 1..20: mol_type = other RNA
gccactgcattcatccaggc

SEQ ID NO: 39712 - RNA, 20 nt, synthetic construct
  source 1..20: mol_type = other RNA
gccactgcattccgcctggg

SEQ ID NO: 39713 - RNA, 20 nt, synthetic construct
  source 1..20: mol_type = other RNA
gccactgcgggcccagctct

SEQ ID NO: 39714 - RNA, 20 nt, synthetic construct
  source 1..20: mol_type = other RNA
gccactggaaaccttttgta

SEQ ID NO: 39715 - RNA, 20 nt, synthetic construct
  source 1..20: mol_type = other RNA
gccactgggtcttataggtt

SEQ ID NO: 39716 - RNA, 20 nt, synthetic construct
  source 1..20: mol_type = other RNA
gccacttaaaaaatgcgcgt

SEQ ID NO: 39717 - RNA, 20 nt, synthetic construct
  source 1..20: mol_type = other RNA
gccacttcctattagaagaa

SEQ ID NO: 39718 - RNA, 20 nt, synthetic construct
  source 1..20: mol_type = other RNA
gccagaatccctttcgctaa

SEQ ID NO: 39719 - RNA, 20 nt, synthetic construct
  source 1..20: mol_type = other RNA
gccagacattttatttatac

SEQ ID NO: 39720 - RNA, 20 nt, synthetic construct
  source 1..20: mol_type = other RNA
gccagacccgccgcagagcc

SEQ ID NO: 39721 - RNA, 20 nt, synthetic construct
  source 1..20: mol_type = other RNA
gccagagagtggaaagagcc

SEQ ID NO: 39722 - RNA, 20 nt, synthetic construct
  source 1..20: mol_type = other RNA
gccagaggaagcttataatt

SEQ ID NO: 39723 - RNA, 20 nt, synthetic construct
  source 1..20: mol_type = other RNA
gccagaggagggatgcattc

SEQ ID NO: 39724 - RNA, 20 nt, synthetic construct
  source 1..20: mol_type = other RNA
gccagagggaatctaggaaa

SEQ ID NO: 39725 - RNA, 20 nt, synthetic construct
  source 1..20: mol_type = other RNA
gccagagttggcacagccag

SEQ ID NO: 39726 - RNA, 20 nt, synthetic construct
  source 1..20: mol_type = other RNA
gccagagtttcactctgtcg

SEQ ID NO: 39727 - RNA, 20 nt, synthetic construct
  source 1..20: mol_type = other RNA
gccagatatccataaggaaa

SEQ ID NO: 39728 - RNA, 20 nt, synthetic construct
  source 1..20: mol_type = other RNA
gccagatgttctaatttctt

SEQ ID NO: 39729 - RNA, 20 nt, synthetic construct
  source 1..20: mol_type = other RNA
gccagatttgatcctggaat

SEQ ID NO: 39730 - RNA, 20 nt, synthetic construct
  source 1..20: mol_type = other RNA
gccagcaaatcagaaaaggc

SEQ ID NO: 39731 - RNA, 20 nt, synthetic construct
  source 1..20: mol_type = other RNA
gccagcaccagatactcaat

SEQ ID NO: 39732 - RNA, 20 nt, synthetic construct
  source 1..20: mol_type = other RNA
gccagcacctaacaatgatt

SEQ ID NO: 39733 - RNA, 20 nt, synthetic construct
  source 1..20: mol_type = other RNA
gccagcattaccctaataac

SEQ ID NO: 39734 - RNA, 20 nt, synthetic construct
  source 1..20: mol_type = other RNA
gccagcattacttaggcagt

SEQ ID NO: 39735 - RNA, 20 nt, synthetic construct
  source 1..20: mol_type = other RNA
gccagccacccttgctgctt

SEQ ID NO: 39736 - RNA, 20 nt, synthetic construct
  source 1..20: mol_type = other RNA
gccagcctgatgatgatggt

SEQ ID NO: 39737 - RNA, 20 nt, synthetic construct
  source 1..20: mol_type = other RNA
gccagctaacttttaaccca

SEQ ID NO: 39738 - RNA, 20 nt, synthetic construct
  source 1..20: mol_type = other RNA
gccagctttggctgaaatgc

SEQ ID NO: 39739 - RNA, 20 nt, synthetic construct
  source 1..20: mol_type = other RNA
gccaggaagtcagcaactct

SEQ ID NO: 39740 - RNA, 20 nt, synthetic construct
  source 1..20: mol_type = other RNA
gccaggacaattgaatgggg

SEQ ID NO: 39741 - RNA, 20 nt, synthetic construct
  source 1..20: mol_type = other RNA
gccaggaggaggagggtgca

SEQ ID NO: 39742 - RNA, 20 nt, synthetic construct
  source 1..20: mol_type = other RNA
gccaggcatgggggcgcgtg

SEQ ID NO: 39743 - RNA, 20 nt, synthetic construct
  source 1..20: mol_type = other RNA
gccaggcgtggtggcggatg

SEQ ID NO: 39744 - RNA, 20 nt, synthetic construct
  source 1..20: mol_type = other RNA
gccaggctggttccaaactt

SEQ ID NO: 39745 - RNA, 20 nt, synthetic construct
  source 1..20: mol_type = other RNA
gccaggctttcccagggtgt

SEQ ID NO: 39746 - RNA, 20 nt, synthetic construct
  source 1..20: mol_type = other RNA
gccagggcgctcctctcccg

SEQ ID NO: 39747 - RNA, 20 nt, synthetic construct
  source 1..20: mol_type = other RNA
gccagggtctgtctcacctc

SEQ ID NO: 39748 - RNA, 20 nt, synthetic construct
  source 1..20: mol_type = other RNA
gccaggtagggaggggtatt

SEQ ID NO: 39749 - RNA, 20 nt, synthetic construct
  source 1..20: mol_type = other RNA
gccaggtttgtgcttggata

SEQ ID NO: 39750 - RNA, 20 nt, synthetic construct
  source 1..20: mol_type = other RNA
gccagtatctcctttccttc

SEQ ID NO: 39751 - RNA, 20 nt, synthetic construct
  source 1..20: mol_type = other RNA
gccagtcactaaaaatcaga

SEQ ID NO: 39752 - RNA, 20 nt, synthetic construct
  source 1..20: mol_type = other RNA
gccagtcagtgatggaggtg

SEQ ID NO: 39753 - RNA, 20 nt, synthetic construct
  source 1..20: mol_type = other RNA
gccagtcatgtggggacttt

SEQ ID NO: 39754 - RNA, 20 nt, synthetic construct
  source 1..20: mol_type = other RNA
gccagtccctagtgtctcca

SEQ ID NO: 39755 - RNA, 20 nt, synthetic construct
  source 1..20: mol_type = other RNA
gccagtccttgtgatctatg

SEQ ID NO: 39756 - RNA, 20 nt, synthetic construct
  source 1..20: mol_type = other RNA
gccagtgaactccagtctgg

SEQ ID NO: 39757 - RNA, 20 nt, synthetic construct
  source 1..20: mol_type = other RNA
gccagtgaccagtgtgatgg

SEQ ID NO: 39758 - RNA, 20 nt, synthetic construct
  source 1..20: mol_type = other RNA
gccagtgagtgatgaaaaga

SEQ ID NO: 39759 - RNA, 20 nt, synthetic construct
  source 1..20: mol_type = other RNA
gccagtgagttcaaatgtta

SEQ ID NO: 39760 - RNA, 20 nt, synthetic construct
  source 1..20: mol_type = other RNA
gccagtgattggatatttgc

SEQ ID NO: 39761 - RNA, 20 nt, synthetic construct
  source 1..20: mol_type = other RNA
gccagtgcaaacctcctggt

SEQ ID NO: 39762 - RNA, 20 nt, synthetic construct
  source 1..20: mol_type = other RNA
gccagtgcagcaagcagtaa

SEQ ID NO: 39763 - RNA, 20 nt, synthetic construct
  source 1..20: mol_type = other RNA
gccagtgttttaaagcaggg

SEQ ID NO: 39764 - RNA, 20 nt, synthetic construct
  source 1..20: mol_type = other RNA
gccagttgagagagaattct

SEQ ID NO: 39765 - RNA, 20 nt, synthetic construct
  source 1..20: mol_type = other RNA
gccagttttctggaaactca

SEQ ID NO: 39766 - RNA, 20 nt, synthetic construct
  source 1..20: mol_type = other RNA
gccataaatcaaggtacaat

SEQ ID NO: 39767 - RNA, 20 nt, synthetic construct
  source 1..20: mol_type = other RNA
gccataagagtccccaactg

SEQ ID NO: 39768 - RNA, 20 nt, synthetic construct
  source 1..20: mol_type = other RNA
gccataatccttagattaca

SEQ ID NO: 39769 - RNA, 20 nt, synthetic construct
  source 1..20: mol_type = other RNA
gccatacctggtccttaaat

SEQ ID NO: 39770 - RNA, 20 nt, synthetic construct
  source 1..20: mol_type = other RNA
gccatagagctttaaagtta

SEQ ID NO: 39771 - RNA, 20 nt, synthetic construct
  source 1..20: mol_type = other RNA
gccatagagggagcatcttc

SEQ ID NO: 39772 - RNA, 20 nt, synthetic construct
  source 1..20: mol_type = other RNA
gccatagtgtaaactaaaag

SEQ ID NO: 39773 - RNA, 20 nt, synthetic construct
  source 1..20: mol_type = other RNA
gccatatgtagggcaccgtg

SEQ ID NO: 39774 - RNA, 20 nt, synthetic construct
  source 1..20: mol_type = other RNA
gccatcaacctaatgaaatt

SEQ ID NO: 39775 - RNA, 20 nt, synthetic construct
  source 1..20: mol_type = other RNA
gccatcacacccagtataca

SEQ ID NO: 39776 - RNA, 20 nt, synthetic construct
  source 1..20: mol_type = other RNA
gccatcacattttgaatcat

SEQ ID NO: 39777 - RNA, 20 nt, synthetic construct
  source 1..20: mol_type = other RNA
gccatcatgcctgggtaatt

SEQ ID NO: 39778 - RNA, 20 nt, synthetic construct
  source 1..20: mol_type = other RNA
gccatcattttatgaaacca

SEQ ID NO: 39779 - RNA, 20 nt, synthetic construct
  source 1..20: mol_type = other RNA
gccatcccagctacataact

SEQ ID NO: 39780 - RNA, 20 nt, synthetic construct
  source 1..20: mol_type = other RNA
gccatcctccagccttaatc

SEQ ID NO: 39781 - RNA, 20 nt, synthetic construct
  source 1..20: mol_type = other RNA
gccatcctggatttgggaag

SEQ ID NO: 39782 - RNA, 20 nt, synthetic construct
  source 1..20: mol_type = other RNA
gccatccttcccaaatccag

SEQ ID NO: 39783 - RNA, 20 nt, synthetic construct
  source 1..20: mol_type = other RNA
gccatcgcgcccagcccgtg

SEQ ID NO: 39784 - RNA, 20 nt, synthetic construct
  source 1..20: mol_type = other RNA
gccatctaattcacatttaa

SEQ ID NO: 39785 - RNA, 20 nt, synthetic construct
  source 1..20: mol_type = other RNA
gccatctccttaatccagtc

SEQ ID NO: 39786 - RNA, 20 nt, synthetic construct
  source 1..20: mol_type = other RNA
gccatctgaattcaagttac

SEQ ID NO: 39787 - RNA, 20 nt, synthetic construct
  source 1..20: mol_type = other RNA
gccatcttcaagatttcata

SEQ ID NO: 39788 - RNA, 20 nt, synthetic construct
  source 1..20: mol_type = other RNA
gccatcttcatttctaagcc

SEQ ID NO: 39789 - RNA, 20 nt, synthetic construct
  source 1..20: mol_type = other RNA
gccatcttgcataagttttt

SEQ ID NO: 39790 - RNA, 20 nt, synthetic construct
  source 1..20: mol_type = other RNA
gccatggctcactgcggcct

SEQ ID NO: 39791 - RNA, 20 nt, synthetic construct
  source 1..20: mol_type = other RNA
gccatggtgttaaatattta

SEQ ID NO: 39792 - RNA, 20 nt, synthetic construct
  source 1..20: mol_type = other RNA
gccatgtgttttgttttgaa

SEQ ID NO: 39793 - RNA, 20 nt, synthetic construct
  source 1..20: mol_type = other RNA
gccatgtttctcctgcatgg

SEQ ID NO: 39794 - RNA, 20 nt, synthetic construct
  source 1..20: mol_type = other RNA
gccatgttttatttcttgac

SEQ ID NO: 39795 - RNA, 20 nt, synthetic construct
  source 1..20: mol_type = other RNA
gccattctcccagttgtcag

SEQ ID NO: 39796 - RNA, 20 nt, synthetic construct
  source 1..20: mol_type = other RNA
gccattctcttctggatagc

SEQ ID NO: 39797 - RNA, 20 nt, synthetic construct
  source 1..20: mol_type = other RNA
gccattctgctatgaaatgt

SEQ ID NO: 39798 - RNA, 20 nt, synthetic construct
  source 1..20: mol_type = other RNA
gccatttataatagcataaa

SEQ ID NO: 39799 - RNA, 20 nt, synthetic construct
  source 1..20: mol_type = other RNA
gccatttatcagcaccaaag

SEQ ID NO: 39800 - RNA, 20 nt, synthetic construct
  source 1..20: mol_type = other RNA
gccatttcaggttttcgacc

SEQ ID NO: 39801 - RNA, 20 nt, synthetic construct
  source 1..20: mol_type = other RNA
gccatttcatttctgttttt

SEQ ID NO: 39802 - RNA, 20 nt, synthetic construct
  source 1..20: mol_type = other RNA
gccatttgattgccagtttt

SEQ ID NO: 39803 - RNA, 20 nt, synthetic construct
  source 1..20: mol_type = other RNA
gccattttcttttaaatgta

SEQ ID NO: 39804 - RNA, 20 nt, synthetic construct
  source 1..20: mol_type = other RNA
gcccaaaaagtttttaaaaa

SEQ ID NO: 39805 - RNA, 20 nt, synthetic construct
  source 1..20: mol_type = other RNA
gcccaacagggttttgtttt

SEQ ID NO: 39806 - RNA, 20 nt, synthetic construct
  source 1..20: mol_type = other RNA
gcccaacatgctcttaagta

SEQ ID NO: 39807 - RNA, 20 nt, synthetic construct
  source 1..20: mol_type = other RNA
gcccaacctgattagaggct

SEQ ID NO: 39808 - RNA, 20 nt, synthetic construct
  source 1..20: mol_type = other RNA
gcccaacttcacaccattta

SEQ ID NO: 39809 - RNA, 20 nt, synthetic construct
  source 1..20: mol_type = other RNA
gcccaactttttctttttag

SEQ ID NO: 39810 - RNA, 20 nt, synthetic construct
  source 1..20: mol_type = other RNA
gcccaagcacactttccttg

SEQ ID NO: 39811 - RNA, 20 nt, synthetic construct
  source 1..20: mol_type = other RNA
gcccaagctaccatttattc

SEQ ID NO: 39812 - RNA, 20 nt, synthetic construct
  source 1..20: mol_type = other RNA
gcccaaggaaggcagggtag

SEQ ID NO: 39813 - RNA, 20 nt, synthetic construct
  source 1..20: mol_type = other RNA
gcccaatcaaatccagtctt

SEQ ID NO: 39814 - RNA, 20 nt, synthetic construct
  source 1..20: mol_type = other RNA
gcccaatctacaggtcggaa

SEQ ID NO: 39815 - RNA, 20 nt, synthetic construct
  source 1..20: mol_type = other RNA
gcccacacctgcaatcacag

SEQ ID NO: 39816 - RNA, 20 nt, synthetic construct
  source 1..20: mol_type = other RNA
gcccaccagcataagacccc

SEQ ID NO: 39817 - RNA, 20 nt, synthetic construct
  source 1..20: mol_type = other RNA
gcccaccatgatgcagcccc

SEQ ID NO: 39818 - RNA, 20 nt, synthetic construct
  source 1..20: mol_type = other RNA
gcccaccctgctccagtatg

SEQ ID NO: 39819 - RNA, 20 nt, synthetic construct
  source 1..20: mol_type = other RNA
gcccacctgacaagtagtac

SEQ ID NO: 39820 - RNA, 20 nt, synthetic construct
  source 1..20: mol_type = other RNA
gcccactctccccaagtaaa

SEQ ID NO: 39821 - RNA, 20 nt, synthetic construct
  source 1..20: mol_type = other RNA
gcccactcttatatcctaaa

SEQ ID NO: 39822 - RNA, 20 nt, synthetic construct
  source 1..20: mol_type = other RNA
gcccagaaataaatcctcac

SEQ ID NO: 39823 - RNA, 20 nt, synthetic construct
  source 1..20: mol_type = other RNA
gcccagactggagttcactg

SEQ ID NO: 39824 - RNA, 20 nt, synthetic construct
  source 1..20: mol_type = other RNA
gcccagagaggctaggtgac

SEQ ID NO: 39825 - RNA, 20 nt, synthetic construct
  source 1..20: mol_type = other RNA
gcccagagatcccaccattg

SEQ ID NO: 39826 - RNA, 20 nt, synthetic construct
  source 1..20: mol_type = other RNA
gcccagattccttttttatg

SEQ ID NO: 39827 - RNA, 20 nt, synthetic construct
  source 1..20: mol_type = other RNA
gcccagcacttccattttgc

SEQ ID NO: 39828 - RNA, 20 nt, synthetic construct
  source 1..20: mol_type = other RNA
gcccagcagaaggtgaggga

SEQ ID NO: 39829 - RNA, 20 nt, synthetic construct
  source 1..20: mol_type = other RNA
gcccagccatcccattactc

SEQ ID NO: 39830 - RNA, 20 nt, synthetic construct
  source 1..20: mol_type = other RNA
gcccagcccgtgtgtttaga

SEQ ID NO: 39831 - RNA, 20 nt, synthetic construct
  source 1..20: mol_type = other RNA
gcccagcctcaacagcactt

SEQ ID NO: 39832 - RNA, 20 nt, synthetic construct
  source 1..20: mol_type = other RNA
gcccagctcttttgtgtctt

SEQ ID NO: 39833 - RNA, 20 nt, synthetic construct
  source 1..20: mol_type = other RNA
gcccagcttccgggacttgg

SEQ ID NO: 39834 - RNA, 20 nt, synthetic construct
  source 1..20: mol_type = other RNA
gcccaggaggttgaagctct

SEQ ID NO: 39835 - RNA, 20 nt, synthetic construct
  source 1..20: mol_type = other RNA
gcccaggagttgcatcactt

SEQ ID NO: 39836 - RNA, 20 nt, synthetic construct
  source 1..20: mol_type = other RNA
gcccaggcggaatgcagtgg

SEQ ID NO: 39837 - RNA, 20 nt, synthetic construct
  source 1..20: mol_type = other RNA
gcccaggctgacttagaggg

SEQ ID NO: 39838 - RNA, 20 nt, synthetic construct
  source 1..20: mol_type = other RNA
gcccaggctggagctcactg

SEQ ID NO: 39839 - RNA, 20 nt, synthetic construct
  source 1..20: mol_type = other RNA
gcccaggctggtcttgtact

SEQ ID NO: 39840 - RNA, 20 nt, synthetic construct
  source 1..20: mol_type = other RNA
gcccagggggtcgagactgt

SEQ ID NO: 39841 - RNA, 20 nt, synthetic construct
  source 1..20: mol_type = other RNA
gcccatatccttttatgtgc

SEQ ID NO: 39842 - RNA, 20 nt, synthetic construct
  source 1..20: mol_type = other RNA
gcccatcctatctaagccta

SEQ ID NO: 39843 - RNA, 20 nt, synthetic construct
  source 1..20: mol_type = other RNA
gcccatcctctatttttgtc

SEQ ID NO: 39844 - RNA, 20 nt, synthetic construct
  source 1..20: mol_type = other RNA
gcccatgacatgtgttttat

SEQ ID NO: 39845 - RNA, 20 nt, synthetic construct
  source 1..20: mol_type = other RNA
gcccatgtctaaagtattgt

SEQ ID NO: 39846 - RNA, 20 nt, synthetic construct
  source 1..20: mol_type = other RNA
gcccatgtgcattattgtaa

SEQ ID NO: 39847 - RNA, 20 nt, synthetic construct
  source 1..20: mol_type = other RNA
gcccattaaaaccatgaaaa

SEQ ID NO: 39848 - RNA, 20 nt, synthetic construct
  source 1..20: mol_type = other RNA
gcccattaacagatgaatga

SEQ ID NO: 39849 - RNA, 20 nt, synthetic construct
  source 1..20: mol_type = other RNA
gcccattaggatagctatta

SEQ ID NO: 39850 - RNA, 20 nt, synthetic construct
  source 1..20: mol_type = other RNA
gcccattataaaataggaag

SEQ ID NO: 39851 - RNA, 20 nt, synthetic construct
  source 1..20: mol_type = other RNA
gcccattttcgaattagatt

SEQ ID NO: 39852 - RNA, 20 nt, synthetic construct
  source 1..20: mol_type = other RNA
gccccaaaattaccccattc

SEQ ID NO: 39853 - RNA, 20 nt, synthetic construct
  source 1..20: mol_type = other RNA
gccccaaaccatcaagtgtg

SEQ ID NO: 39854 - RNA, 20 nt, synthetic construct
  source 1..20: mol_type = other RNA
gccccaaatacctctgaatg

SEQ ID NO: 39855 - RNA, 20 nt, synthetic construct
  source 1..20: mol_type = other RNA
gccccaagaaagcaggtcat

SEQ ID NO: 39856 - RNA, 20 nt, synthetic construct
  source 1..20: mol_type = other RNA
gccccacaagtagcagggac

SEQ ID NO: 39857 - RNA, 20 nt, synthetic construct
  source 1..20: mol_type = other RNA
gccccactccacacacgaag

SEQ ID NO: 39858 - RNA, 20 nt, synthetic construct
  source 1..20: mol_type = other RNA
gccccagaataggcaaattc

SEQ ID NO: 39859 - RNA, 20 nt, synthetic construct
  source 1..20: mol_type = other RNA
gccccagctaaaatgttcag

SEQ ID NO: 39860 - RNA, 20 nt, synthetic construct
  source 1..20: mol_type = other RNA
gccccaggcggcagagggag

SEQ ID NO: 39861 - RNA, 20 nt, synthetic construct
  source 1..20: mol_type = other RNA
gccccaggggacatagatga

SEQ ID NO: 39862 - RNA, 20 nt, synthetic construct
  source 1..20: mol_type = other RNA
gccccagttctgcgcaattg

SEQ ID NO: 39863 - RNA, 20 nt, synthetic construct
  source 1..20: mol_type = other RNA
gccccatgtgttggcactga

SEQ ID NO: 39864 - RNA, 20 nt, synthetic construct
  source 1..20: mol_type = other RNA
gccccattgcactccacgtg

SEQ ID NO: 39865 - RNA, 20 nt, synthetic construct
  source 1..20: mol_type = other RNA
gccccattgtacacatatta

SEQ ID NO: 39866 - RNA, 20 nt, synthetic construct
  source 1..20: mol_type = other RNA
gcccccagttttgttgaatc

SEQ ID NO: 39867 - RNA, 20 nt, synthetic construct
  source 1..20: mol_type = other RNA
gcccccctgaaaaatgagaa

SEQ ID NO: 39868 - RNA, 20 nt, synthetic construct
  source 1..20: mol_type = other RNA
gccccctccctaccacccgt

SEQ ID NO: 39869 - RNA, 20 nt, synthetic construct
  source 1..20: mol_type = other RNA
gccccctcgaagagaccaca

SEQ ID NO: 39870 - RNA, 20 nt, synthetic construct
  source 1..20: mol_type = other RNA
gccccctcttctctcctttg

SEQ ID NO: 39871 - RNA, 20 nt, synthetic construct
  source 1..20: mol_type = other RNA
gccccctgaatacccctccc

SEQ ID NO: 39872 - RNA, 20 nt, synthetic construct
  source 1..20: mol_type = other RNA
gccccctgagtagctgtgat

SEQ ID NO: 39873 - RNA, 20 nt, synthetic construct
  source 1..20: mol_type = other RNA
gccccgacgcctttcatttg

SEQ ID NO: 39874 - RNA, 20 nt, synthetic construct
  source 1..20: mol_type = other RNA
gccccgatgccatgtgtttt

SEQ ID NO: 39875 - RNA, 20 nt, synthetic construct
  source 1..20: mol_type = other RNA
gccccgcttcagttggtgaa

SEQ ID NO: 39876 - RNA, 20 nt, synthetic construct
  source 1..20: mol_type = other RNA
gccccgggcctggttaggga

SEQ ID NO: 39877 - RNA, 20 nt, synthetic construct
  source 1..20: mol_type = other RNA
gcccctagcatgcagtagct

SEQ ID NO: 39878 - RNA, 20 nt, synthetic construct
  source 1..20: mol_type = other RNA
gcccctcatcctccgtagct

SEQ ID NO: 39879 - RNA, 20 nt, synthetic construct
  source 1..20: mol_type = other RNA
gcccctccactccacaaagc

SEQ ID NO: 39880 - RNA, 20 nt, synthetic construct
  source 1..20: mol_type = other RNA
gcccctccatggaaactaca

SEQ ID NO: 39881 - RNA, 20 nt, synthetic construct
  source 1..20: mol_type = other RNA
gcccctgccacactccagca

SEQ ID NO: 39882 - RNA, 20 nt, synthetic construct
  source 1..20: mol_type = other RNA
gcccctgctgccagatgttc

SEQ ID NO: 39883 - RNA, 20 nt, synthetic construct
  source 1..20: mol_type = other RNA
gcccctggagaaagcccagc

SEQ ID NO: 39884 - RNA, 20 nt, synthetic construct
  source 1..20: mol_type = other RNA
gcccctggtgatctatgaat

SEQ ID NO: 39885 - RNA, 20 nt, synthetic construct
  source 1..20: mol_type = other RNA
gcccctgtagcagacactgg

SEQ ID NO: 39886 - RNA, 20 nt, synthetic construct
  source 1..20: mol_type = other RNA
gccccttatcaggaaagtgc

SEQ ID NO: 39887 - RNA, 20 nt, synthetic construct
  source 1..20: mol_type = other RNA
gccccttatcctcttctgaa

SEQ ID NO: 39888 - RNA, 20 nt, synthetic construct
  source 1..20: mol_type = other RNA
gccccttgaaagatcattta

SEQ ID NO: 39889 - RNA, 20 nt, synthetic construct
  source 1..20: mol_type = other RNA
gcccctttcaagattgttta

SEQ ID NO: 39890 - RNA, 20 nt, synthetic construct
  source 1..20: mol_type = other RNA
gcccctttgagcagagtcct

SEQ ID NO: 39891 - RNA, 20 nt, synthetic construct
  source 1..20: mol_type = other RNA
gcccgacctccagcgctaag

SEQ ID NO: 39892 - RNA, 20 nt, synthetic construct
  source 1..20: mol_type = other RNA
gcccgcgaaggcgtgtaaac

SEQ ID NO: 39893 - RNA, 20 nt, synthetic construct
  source 1..20: mol_type = other RNA
gcccgctgctccctctgccg

SEQ ID NO: 39894 - RNA, 20 nt, synthetic construct
  source 1..20: mol_type = other RNA
gcccggccaaatatccatgt

SEQ ID NO: 39895 - RNA, 20 nt, synthetic construct
  source 1..20: mol_type = other RNA
gcccggccagacattttatt

SEQ ID NO: 39896 - RNA, 20 nt, synthetic construct
  source 1..20: mol_type = other RNA
gcccggcccagattcctttt

SEQ ID NO: 39897 - RNA, 20 nt, synthetic construct
  source 1..20: mol_type = other RNA
gcccggcccatgacatgtgt

SEQ ID NO: 39898 - RNA, 20 nt, synthetic construct
  source 1..20: mol_type = other RNA
gcccggcccgttatttttat

SEQ ID NO: 39899 - RNA, 20 nt, synthetic construct
  source 1..20: mol_type = other RNA
gcccggccgagaaatcggaa

SEQ ID NO: 39900 - RNA, 20 nt, synthetic construct
  source 1..20: mol_type = other RNA
gcccggccgatgcctgtgct

SEQ ID NO: 39901 - RNA, 20 nt, synthetic construct
  source 1..20: mol_type = other RNA
gcccggggcagagaactgac

SEQ ID NO: 39902 - RNA, 20 nt, synthetic construct
  source 1..20: mol_type = other RNA
gcccgtccctgcttggcgca

SEQ ID NO: 39903 - RNA, 20 nt, synthetic construct
  source 1..20: mol_type = other RNA
gcccgtgtgtttagaataat

SEQ ID NO: 39904 - RNA, 20 nt, synthetic construct
  source 1..20: mol_type = other RNA
gcccgttatttttatcataa

SEQ ID NO: 39905 - RNA, 20 nt, synthetic construct
  source 1..20: mol_type = other RNA
gccctaaccccagagattgt

SEQ ID NO: 39906 - RNA, 20 nt, synthetic construct
  source 1..20: mol_type = other RNA
gccctacatatggcaattcc

SEQ ID NO: 39907 - RNA, 20 nt, synthetic construct
  source 1..20: mol_type = other RNA
gccctatgccttcagtatga

SEQ ID NO: 39908 - RNA, 20 nt, synthetic construct
  source 1..20: mol_type = other RNA
gccctattcaacctataaga

SEQ ID NO: 39909 - RNA, 20 nt, synthetic construct
  source 1..20: mol_type = other RNA
gccctcaggaccaggcagtc

SEQ ID NO: 39910 - RNA, 20 nt, synthetic construct
  source 1..20: mol_type = other RNA
gccctcattgaagctactat

SEQ ID NO: 39911 - RNA, 20 nt, synthetic construct
  source 1..20: mol_type = other RNA
gccctccaggatccagtctc

SEQ ID NO: 39912 - RNA, 20 nt, synthetic construct
  source 1..20: mol_type = other RNA
gccctccatttccctgcttc

SEQ ID NO: 39913 - RNA, 20 nt, synthetic construct
  source 1..20: mol_type = other RNA
gccctcccccgggacaatgc

SEQ ID NO: 39914 - RNA, 20 nt, synthetic construct
  source 1..20: mol_type = other RNA
gccctctaagtcagcctggg

SEQ ID NO: 39915 - RNA, 20 nt, synthetic construct
  source 1..20: mol_type = other RNA
gccctctataattctgcctt

SEQ ID NO: 39916 - RNA, 20 nt, synthetic construct
  source 1..20: mol_type = other RNA
gccctgagaagtcaaagcct

SEQ ID NO: 39917 - RNA, 20 nt, synthetic construct
  source 1..20: mol_type = other RNA
gccctgatagatattggcaa

SEQ ID NO: 39918 - RNA, 20 nt, synthetic construct
  source 1..20: mol_type = other RNA
gccctgattgagattagcga

SEQ ID NO: 39919 - RNA, 20 nt, synthetic construct
  source 1..20: mol_type = other RNA
gccctgatttaaagtaggtt

SEQ ID NO: 39920 - RNA, 20 nt, synthetic construct
  source 1..20: mol_type = other RNA
gccctgcagccagatttgat

SEQ ID NO: 39921 - RNA, 20 nt, synthetic construct
  source 1..20: mol_type = other RNA
gccctgccgcttcgcctttc

SEQ ID NO: 39922 - RNA, 20 nt, synthetic construct
  source 1..20: mol_type = other RNA
gccctgccttaaaacatttt

SEQ ID NO: 39923 - RNA, 20 nt, synthetic construct
  source 1..20: mol_type = other RNA
gccctgcgattggttggact

SEQ ID NO: 39924 - RNA, 20 nt, synthetic construct
  source 1..20: mol_type = other RNA
gccctgctgtggccgaggga

SEQ ID NO: 39925 - RNA, 20 nt, synthetic construct
  source 1..20: mol_type = other RNA
gccctggcattgtcccgggg

SEQ ID NO: 39926 - RNA, 20 nt, synthetic construct
  source 1..20: mol_type = other RNA
gccctggtgctttctatctc

SEQ ID NO: 39927 - RNA, 20 nt, synthetic construct
  source 1..20: mol_type = other RNA
gccctgtgaaaatcattttg

SEQ ID NO: 39928 - RNA, 20 nt, synthetic construct
  source 1..20: mol_type = other RNA
gccctgttggcctggacaca

SEQ ID NO: 39929 - RNA, 20 nt, synthetic construct
  source 1..20: mol_type = other RNA
gcccttaacttcacctctac

SEQ ID NO: 39930 - RNA, 20 nt, synthetic construct
  source 1..20: mol_type = other RNA
gcccttatttaatgtgctgt

SEQ ID NO: 39931 - RNA, 20 nt, synthetic construct
  source 1..20: mol_type = other RNA
gcccttccttgcttgtcttg

SEQ ID NO: 39932 - RNA, 20 nt, synthetic construct
  source 1..20: mol_type = other RNA
gcccttgagtatttttgagc

SEQ ID NO: 39933 - RNA, 20 nt, synthetic construct
  source 1..20: mol_type = other RNA
gccctttgttagtgccttca

SEQ ID NO: 39934 - RNA, 20 nt, synthetic construct
  source 1..20: mol_type = other RNA
gccgaaatgcacttagcgct

SEQ ID NO: 39935 - RNA, 20 nt, synthetic construct
  source 1..20: mol_type = other RNA
gccgaatgtggtggtatgca

SEQ ID NO: 39936 - RNA, 20 nt, synthetic construct
  source 1..20: mol_type = other RNA
gccgacccagcccccaaccc

SEQ ID NO: 39937 - RNA, 20 nt, synthetic construct
  source 1..20: mol_type = other RNA
gccgagaaatcggaactcct

SEQ ID NO: 39938 - RNA, 20 nt, synthetic construct
  source 1..20: mol_type = other RNA
gccgagatcacgccactgca

SEQ ID NO: 39939 - RNA, 20 nt, synthetic construct
  source 1..20: mol_type = other RNA
gccgagcagaagggaaagga

SEQ ID NO: 39940 - RNA, 20 nt, synthetic construct
  source 1..20: mol_type = other RNA
gccgaggcagagagagtaac

SEQ ID NO: 39941 - RNA, 20 nt, synthetic construct
  source 1..20: mol_type = other RNA
gccgaggcaggtggatcagg

SEQ ID NO: 39942 - RNA, 20 nt, synthetic construct
  source 1..20: mol_type = other RNA
gccgaggccagtccctagtg

SEQ ID NO: 39943 - RNA, 20 nt, synthetic construct
  source 1..20: mol_type = other RNA
gccgagggagacggcgagct

SEQ ID NO: 39944 - RNA, 20 nt, synthetic construct
  source 1..20: mol_type = other RNA
gccgagggttgaacatcacc

SEQ ID NO: 39945 - RNA, 20 nt, synthetic construct
  source 1..20: mol_type = other RNA
gccgatgcctgtgcttttct

SEQ ID NO: 39946 - RNA, 20 nt, synthetic construct
  source 1..20: mol_type = other RNA
gccgcaaataatcattcttc

SEQ ID NO: 39947 - RNA, 20 nt, synthetic construct
  source 1..20: mol_type = other RNA
gccgcagagcaagcacgtta

SEQ ID NO: 39948 - RNA, 20 nt, synthetic construct
  source 1..20: mol_type = other RNA
gccgcagaggccaaatgaaa

SEQ ID NO: 39949 - RNA, 20 nt, synthetic construct
  source 1..20: mol_type = other RNA
gccgcagtgagccatggctg

SEQ ID NO: 39950 - RNA, 20 nt, synthetic construct
  source 1..20: mol_type = other RNA
gccgccacctcctccgggga

SEQ ID NO: 39951 - RNA, 20 nt, synthetic construct
  source 1..20: mol_type = other RNA
gccgcccctggagaaagccc

SEQ ID NO: 39952 - RNA, 20 nt, synthetic construct
  source 1..20: mol_type = other RNA
gccgcccgctgctccctctg

SEQ ID NO: 39953 - RNA, 20 nt, synthetic construct
  source 1..20: mol_type = other RNA
gccgccgcagaggccaaatg

SEQ ID NO: 39954 - RNA, 20 nt, synthetic construct
  source 1..20: mol_type = other RNA
gccgcgcgagggagcgtacg

SEQ ID NO: 39955 - RNA, 20 nt, synthetic construct
  source 1..20: mol_type = other RNA
gccgcgtccacctggcaaca

SEQ ID NO: 39956 - RNA, 20 nt, synthetic construct
  source 1..20: mol_type = other RNA
gccgcgttttttgtccacca

SEQ ID NO: 39957 - RNA, 20 nt, synthetic construct
  source 1..20: mol_type = other RNA
gccgctcgcaggtgggaggc

SEQ ID NO: 39958 - RNA, 20 nt, synthetic construct
  source 1..20: mol_type = other RNA
gccgctcttgaccttgtgca

SEQ ID NO: 39959 - RNA, 20 nt, synthetic construct
  source 1..20: mol_type = other RNA
gccgctggtgaaaaaatggt

SEQ ID NO: 39960 - RNA, 20 nt, synthetic construct
  source 1..20: mol_type = other RNA
gccgcttcgcctttctcgca

SEQ ID NO: 39961 - RNA, 20 nt, synthetic construct
  source 1..20: mol_type = other RNA
gccggagcgggcagccttgg

SEQ ID NO: 39962 - RNA, 20 nt, synthetic construct
  source 1..20: mol_type = other RNA
gccggaggattgcttgagtg

SEQ ID NO: 39963 - RNA, 20 nt, synthetic construct
  source 1..20: mol_type = other RNA
gccggattcctttcaaagag

SEQ ID NO: 39964 - RNA, 20 nt, synthetic construct
  source 1..20: mol_type = other RNA
gccggcatatgtcactgtaa

SEQ ID NO: 39965 - RNA, 20 nt, synthetic construct
  source 1..20: mol_type = other RNA
gccggctgttaggtattatt

SEQ ID NO: 39966 - RNA, 20 nt, synthetic construct
  source 1..20: mol_type = other RNA
gccgggacaagagtctgcag

SEQ ID NO: 39967 - RNA, 20 nt, synthetic construct
  source 1..20: mol_type = other RNA
gccgggaggagccaagtaaa

SEQ ID NO: 39968 - RNA, 20 nt, synthetic construct
  source 1..20: mol_type = other RNA
gccgggatttacttctatat

SEQ ID NO: 39969 - RNA, 20 nt, synthetic construct
  source 1..20: mol_type = other RNA
gccgggcttggtatgcatct

SEQ ID NO: 39970 - RNA, 20 nt, synthetic construct
  source 1..20: mol_type = other RNA
gccgggtcgcggacgcgcat

SEQ ID NO: 39971 - RNA, 20 nt, synthetic construct
  source 1..20: mol_type = other RNA
gccgggtgtagtggtgtgtg

SEQ ID NO: 39972 - RNA, 20 nt, synthetic construct
  source 1..20: mol_type = other RNA
gccggtaatcacagctactc

SEQ ID NO: 39973 - RNA, 20 nt, synthetic construct
  source 1..20: mol_type = other RNA
gccgtccctattttctacag

SEQ ID NO: 39974 - RNA, 20 nt, synthetic construct
  source 1..20: mol_type = other RNA
gccgtcggtatgttaataac

SEQ ID NO: 39975 - RNA, 20 nt, synthetic construct
  source 1..20: mol_type = other RNA
gccgtctccctcggccacag

SEQ ID NO: 39976 - RNA, 20 nt, synthetic construct
  source 1..20: mol_type = other RNA
gccgttccatcagagaggct

SEQ ID NO: 39977 - RNA, 20 nt, synthetic construct
  source 1..20: mol_type = other RNA
gcctaaaataggcctaggtg

SEQ ID NO: 39978 - RNA, 20 nt, synthetic construct
  source 1..20: mol_type = other RNA
gcctaaaccattttcaatct

SEQ ID NO: 39979 - RNA, 20 nt, synthetic construct
  source 1..20: mol_type = other RNA
gcctaaagtccacagatctt

SEQ ID NO: 39980 - RNA, 20 nt, synthetic construct
  source 1..20: mol_type = other RNA
gcctaaataaaacacatgtc

SEQ ID NO: 39981 - RNA, 20 nt, synthetic construct
  source 1..20: mol_type = other RNA
gcctaaatcaggatgtcttt

SEQ ID NO: 39982 - RNA, 20 nt, synthetic construct
  source 1..20: mol_type = other RNA
gcctaacaccagtaagattc

SEQ ID NO: 39983 - RNA, 20 nt, synthetic construct
  source 1..20: mol_type = other RNA
gcctaagatggaaagtggac

SEQ ID NO: 39984 - RNA, 20 nt, synthetic construct
  source 1..20: mol_type = other RNA
gcctaagcaaatgtaatgaa

SEQ ID NO: 39985 - RNA, 20 nt, synthetic construct
  source 1..20: mol_type = other RNA
gcctaagcaagttacatgct

SEQ ID NO: 39986 - RNA, 20 nt, synthetic construct
  source 1..20: mol_type = other RNA
gcctaagtaatgctggccag

SEQ ID NO: 39987 - RNA, 20 nt, synthetic construct
  source 1..20: mol_type = other RNA
gcctaagtctcaggatacaa

SEQ ID NO: 39988 - RNA, 20 nt, synthetic construct
  source 1..20: mol_type = other RNA
gcctaatctctaggcttaaa

SEQ ID NO: 39989 - RNA, 20 nt, synthetic construct
  source 1..20: mol_type = other RNA
gcctaatgtgtaagaaatgc

SEQ ID NO: 39990 - RNA, 20 nt, synthetic construct
  source 1..20: mol_type = other RNA
gcctaattgtacacctcaaa

SEQ ID NO: 39991 - RNA, 20 nt, synthetic construct
  source 1..20: mol_type = other RNA
gcctacagtggttccatttg

SEQ ID NO: 39992 - RNA, 20 nt, synthetic construct
  source 1..20: mol_type = other RNA
gcctacatagtccactttcc

SEQ ID NO: 39993 - RNA, 20 nt, synthetic construct
  source 1..20: mol_type = other RNA
gcctacctcccttcacaaag

SEQ ID NO: 39994 - RNA, 20 nt, synthetic construct
  source 1..20: mol_type = other RNA
gcctactagccagtgattgg

SEQ ID NO: 39995 - RNA, 20 nt, synthetic construct
  source 1..20: mol_type = other RNA
gcctactgctctgtcctgtc

SEQ ID NO: 39996 - RNA, 20 nt, synthetic construct
  source 1..20: mol_type = other RNA
gcctagaaaggaattgtaat

SEQ ID NO: 39997 - RNA, 20 nt, synthetic construct
  source 1..20: mol_type = other RNA
gcctagaaatcatacacgag

SEQ ID NO: 39998 - RNA, 20 nt, synthetic construct
  source 1..20: mol_type = other RNA
gcctagacctcaaattaatc

SEQ ID NO: 39999 - RNA, 20 nt, synthetic construct
  source 1..20: mol_type = other RNA
gcctagagattaggcagaac

SEQ ID NO: 40000 - RNA, 20 nt, synthetic construct
  source 1..20: mol_type = other RNA
gcctagataagaaaatgtga

SEQ ID NO: 40001 - RNA, 20 nt, synthetic construct
  source 1..20: mol_type = other RNA
gcctagatgattcgcattgc

SEQ ID NO: 40002 - RNA, 20 nt, synthetic construct
  source 1..20: mol_type = other RNA
gcctagatttcaatctggaa

SEQ ID NO: 40003 - RNA, 20 nt, synthetic construct
  source 1..20: mol_type = other RNA
gcctagctgacttttaaaat

SEQ ID NO: 40004 - RNA, 20 nt, synthetic construct
  source 1..20: mol_type = other RNA
gcctaggcaagagagcaaga

SEQ ID NO: 40005 - RNA, 20 nt, synthetic construct
  source 1..20: mol_type = other RNA
gcctaggtgtgataactgat

SEQ ID NO: 40006 - RNA, 20 nt, synthetic construct
  source 1..20: mol_type = other RNA
gcctagtcatccactgcaca

SEQ ID NO: 40007 - RNA, 20 nt, synthetic construct
  source 1..20: mol_type = other RNA
gcctataaaatgctggaaat

SEQ ID NO: 40008 - RNA, 20 nt, synthetic construct
  source 1..20: mol_type = other RNA
gcctataattcaattttcat

SEQ ID NO: 40009 - RNA, 20 nt, synthetic construct
  source 1..20: mol_type = other RNA
gcctatagacagcatcccca

SEQ ID NO: 40010 - RNA, 20 nt, synthetic construct
  source 1..20: mol_type = other RNA
gcctatgaaatcttgaagat

SEQ ID NO: 40011 - RNA, 20 nt, synthetic construct
  source 1..20: mol_type = other RNA
gcctatgtaagacaatgtct

SEQ ID NO: 40012 - RNA, 20 nt, synthetic construct
  source 1..20: mol_type = other RNA
gcctattctggggctcaagt

SEQ ID NO: 40013 - RNA, 20 nt, synthetic construct
  source 1..20: mol_type = other RNA
gcctattttaggctctgtgg

SEQ ID NO: 40014 - RNA, 20 nt, synthetic construct
  source 1..20: mol_type = other RNA
gcctcaaaatcaacattgcc

SEQ ID NO: 40015 - RNA, 20 nt, synthetic construct
  source 1..20: mol_type = other RNA
gcctcaaaatttagtaaggg

SEQ ID NO: 40016 - RNA, 20 nt, synthetic construct
  source 1..20: mol_type = other RNA
gcctcaaacgaaccaattac

SEQ ID NO: 40017 - RNA, 20 nt, synthetic construct
  source 1..20: mol_type = other RNA
gcctcaaattagtcatagca

SEQ ID NO: 40018 - RNA, 20 nt, synthetic construct
  source 1..20: mol_type = other RNA
gcctcaaatttcatttactg

SEQ ID NO: 40019 - RNA, 20 nt, synthetic construct
  source 1..20: mol_type = other RNA
gcctcaacagcacttttgta

SEQ ID NO: 40020 - RNA, 20 nt, synthetic construct
  source 1..20: mol_type = other RNA
gcctcagaattaatataaga

SEQ ID NO: 40021 - RNA, 20 nt, synthetic construct
  source 1..20: mol_type = other RNA
gcctcagcatgtcttcagag

SEQ ID NO: 40022 - RNA, 20 nt, synthetic construct
  source 1..20: mol_type = other RNA
gcctcagccgccgcagaggc

SEQ ID NO: 40023 - RNA, 20 nt, synthetic construct
  source 1..20: mol_type = other RNA
gcctcagcctcccgagtagt

SEQ ID NO: 40024 - RNA, 20 nt, synthetic construct
  source 1..20: mol_type = other RNA
gcctcagcctcccgagtatc

SEQ ID NO: 40025 - RNA, 20 nt, synthetic construct
  source 1..20: mol_type = other RNA
gcctcagttgacatccttta

SEQ ID NO: 40026 - RNA, 20 nt, synthetic construct
  source 1..20: mol_type = other RNA
gcctcatgcatccacatttt

SEQ ID NO: 40027 - RNA, 20 nt, synthetic construct
  source 1..20: mol_type = other RNA
gcctcatgtattttcctaac

SEQ ID NO: 40028 - RNA, 20 nt, synthetic construct
  source 1..20: mol_type = other RNA
gcctcatttgaactttccag

SEQ ID NO: 40029 - RNA, 20 nt, synthetic construct
  source 1..20: mol_type = other RNA
gcctccacacctggcccctt

SEQ ID NO: 40030 - RNA, 20 nt, synthetic construct
  source 1..20: mol_type = other RNA
gcctccacaggctttgactt

SEQ ID NO: 40031 - RNA, 20 nt, synthetic construct
  source 1..20: mol_type = other RNA
gcctccagaaaaccagaaaa

SEQ ID NO: 40032 - RNA, 20 nt, synthetic construct
  source 1..20: mol_type = other RNA
gcctccatatgggatgctta

SEQ ID NO: 40033 - RNA, 20 nt, synthetic construct
  source 1..20: mol_type = other RNA
gcctcccacctgcgagcggc

SEQ ID NO: 40034 - RNA, 20 nt, synthetic construct
  source 1..20: mol_type = other RNA
gcctcccgagtagttgtaac

SEQ ID NO: 40035 - RNA, 20 nt, synthetic construct
  source 1..20: mol_type = other RNA
gcctcccgagtatctaggag

SEQ ID NO: 40036 - RNA, 20 nt, synthetic construct
  source 1..20: mol_type = other RNA
gcctcccgggtccaggcagt

SEQ ID NO: 40037 - RNA, 20 nt, synthetic construct
  source 1..20: mol_type = other RNA
gcctccctcactaagtcaga

SEQ ID NO: 40038 - RNA, 20 nt, synthetic construct
  source 1..20: mol_type = other RNA
gcctccctggttcaagctat

SEQ ID NO: 40039 - RNA, 20 nt, synthetic construct
  source 1..20: mol_type = other RNA
gcctcctaagttttggggga

SEQ ID NO: 40040 - RNA, 20 nt, synthetic construct
  source 1..20: mol_type = other RNA
gcctcctgccttcctgacct

SEQ ID NO: 40041 - RNA, 20 nt, synthetic construct
  source 1..20: mol_type = other RNA
gcctcctgggttcaggtgcc

SEQ ID NO: 40042 - RNA, 20 nt, synthetic construct
  source 1..20: mol_type = other RNA
gcctcctggtgggttcatgc

SEQ ID NO: 40043 - RNA, 20 nt, synthetic construct
  source 1..20: mol_type = other RNA
gcctcgaaggcctgcttcat

SEQ ID NO: 40044 - RNA, 20 nt, synthetic construct
  source 1..20: mol_type = other RNA
gcctcgctcttggcttttgg

SEQ ID NO: 40045 - RNA, 20 nt, synthetic construct
  source 1..20: mol_type = other RNA
gcctcggcacagctctcatg

SEQ ID NO: 40046 - RNA, 20 nt, synthetic construct
  source 1..20: mol_type = other RNA
gcctcggccaaccattactc

SEQ ID NO: 40047 - RNA, 20 nt, synthetic construct
  source 1..20: mol_type = other RNA
gcctctaatcaggttgggct

SEQ ID NO: 40048 - RNA, 20 nt, synthetic construct
  source 1..20: mol_type = other RNA
gcctctacatcacagacagg

SEQ ID NO: 40049 - RNA, 20 nt, synthetic construct
  source 1..20: mol_type = other RNA
gcctctactgactccctttt

SEQ ID NO: 40050 - RNA, 20 nt, synthetic construct
  source 1..20: mol_type = other RNA
gcctctcaacacttcagtgg

SEQ ID NO: 40051 - RNA, 20 nt, synthetic construct
  source 1..20: mol_type = other RNA
gcctctccagggaggaatcc

SEQ ID NO: 40052 - RNA, 20 nt, synthetic construct
  source 1..20: mol_type = other RNA
gcctctcccaccatctctct

SEQ ID NO: 40053 - RNA, 20 nt, synthetic construct
  source 1..20: mol_type = other RNA
gcctctccccttgacgaagt

SEQ ID NO: 40054 - RNA, 20 nt, synthetic construct
  source 1..20: mol_type = other RNA
gcctctctgatggaacggct

SEQ ID NO: 40055 - RNA, 20 nt, synthetic construct
  source 1..20: mol_type = other RNA
gcctctctgggcttcacttt

SEQ ID NO: 40056 - RNA, 20 nt, synthetic construct
  source 1..20: mol_type = other RNA
gcctctgaagacatgctgag

SEQ ID NO: 40057 - RNA, 20 nt, synthetic construct
  source 1..20: mol_type = other RNA
gcctctgcggcggctgaggc

SEQ ID NO: 40058 - RNA, 20 nt, synthetic construct
  source 1..20: mol_type = other RNA
gcctctgtgctagccttctt

SEQ ID NO: 40059 - RNA, 20 nt, synthetic construct
  source 1..20: mol_type = other RNA
gcctctgtggaccatgtttt

SEQ ID NO: 40060 - RNA, 20 nt, synthetic construct
  source 1..20: mol_type = other RNA
gcctctgttacagctcttct

SEQ ID NO: 40061 - RNA, 20 nt, synthetic construct
  source 1..20: mol_type = other RNA
gcctcttcagaagaggataa

SEQ ID NO: 40062 - RNA, 20 nt, synthetic construct
  source 1..20: mol_type = other RNA
gcctcttcccttgtgcacct

SEQ ID NO: 40063 - RNA, 20 nt, synthetic construct
  source 1..20: mol_type = other RNA
gcctcttcctgttgctttaa

SEQ ID NO: 40064 - RNA, 20 nt, synthetic construct
  source 1..20: mol_type = other RNA
gcctctttgctaataagtga

SEQ ID NO: 40065 - RNA, 20 nt, synthetic construct
  source 1..20: mol_type = other RNA
gcctgacaaagtatgagaaa

SEQ ID NO: 40066 - RNA, 20 nt, synthetic construct
  source 1..20: mol_type = other RNA
gcctgacagcaaataaacaa

SEQ ID NO: 40067 - RNA, 20 nt, synthetic construct
  source 1..20: mol_type = other RNA
gcctgagccgtcggtatgtt

SEQ ID NO: 40068 - RNA, 20 nt, synthetic construct
  source 1..20: mol_type = other RNA
gcctgagctctcagtggccc

SEQ ID NO: 40069 - RNA, 20 nt, synthetic construct
  source 1..20: mol_type = other RNA
gcctgaggacactagcaatc

SEQ ID NO: 40070 - RNA, 20 nt, synthetic construct
  source 1..20: mol_type = other RNA
gcctgaggtctcaaaattta

SEQ ID NO: 40071 - RNA, 20 nt, synthetic construct
  source 1..20: mol_type = other RNA
gcctgataagctcccagcca

SEQ ID NO: 40072 - RNA, 20 nt, synthetic construct
  source 1..20: mol_type = other RNA
gcctgatagctgtggaagca

SEQ ID NO: 40073 - RNA, 20 nt, synthetic construct
  source 1..20: mol_type = other RNA
gcctgatgatgatggtgatg

SEQ ID NO: 40074 - RNA, 20 nt, synthetic construct
  source 1..20: mol_type = other RNA
gcctgcaccatttattgtca

SEQ ID NO: 40075 - RNA, 20 nt, synthetic construct
  source 1..20: mol_type = other RNA
gcctgcagaaggagaaacca

SEQ ID NO: 40076 - RNA, 20 nt, synthetic construct
  source 1..20: mol_type = other RNA
gcctgcagactgcaggtctt

SEQ ID NO: 40077 - RNA, 20 nt, synthetic construct
  source 1..20: mol_type = other RNA
gcctgcattgcatttacttg

SEQ ID NO: 40078 - RNA, 20 nt, synthetic construct
  source 1..20: mol_type = other RNA
gcctgccatagagggagcat

SEQ ID NO: 40079 - RNA, 20 nt, synthetic construct
  source 1..20: mol_type = other RNA
gcctgccgcagagcaagcac

SEQ ID NO: 40080 - RNA, 20 nt, synthetic construct
  source 1..20: mol_type = other RNA
gcctgcgtccgtagaccgag

SEQ ID NO: 40081 - RNA, 20 nt, synthetic construct
  source 1..20: mol_type = other RNA
gcctgctctgcagagactgt

SEQ ID NO: 40082 - RNA, 20 nt, synthetic construct
  source 1..20: mol_type = other RNA
gcctgcttcagcctaagcaa

SEQ ID NO: 40083 - RNA, 20 nt, synthetic construct
  source 1..20: mol_type = other RNA
gcctgcttcattccgcgttt

SEQ ID NO: 40084 - RNA, 20 nt, synthetic construct
  source 1..20: mol_type = other RNA
gcctgcttttggaagcatgt

SEQ ID NO: 40085 - RNA, 20 nt, synthetic construct
  source 1..20: mol_type = other RNA
gcctggaacaggccctttgt

SEQ ID NO: 40086 - RNA, 20 nt, synthetic construct
  source 1..20: mol_type = other RNA
gcctggaagttcaaggttat

SEQ ID NO: 40087 - RNA, 20 nt, synthetic construct
  source 1..20: mol_type = other RNA
gcctggacaacagtgtgaga

SEQ ID NO: 40088 - RNA, 20 nt, synthetic construct
  source 1..20: mol_type = other RNA
gcctggacacacacagtcct

SEQ ID NO: 40089 - RNA, 20 nt, synthetic construct
  source 1..20: mol_type = other RNA
gcctggacaggatcccggaa

SEQ ID NO: 40090 - RNA, 20 nt, synthetic construct
  source 1..20: mol_type = other RNA
gcctggacccgggaggcaga

SEQ ID NO: 40091 - RNA, 20 nt, synthetic construct
  source 1..20: mol_type = other RNA
gcctggatgaatgcagtggc

SEQ ID NO: 40092 - RNA, 20 nt, synthetic construct
  source 1..20: mol_type = other RNA
gcctggccaacatcgtaaaa

SEQ ID NO: 40093 - RNA, 20 nt, synthetic construct
  source 1..20: mol_type = other RNA
gcctggctttagatggtaaa

SEQ ID NO: 40094 - RNA, 20 nt, synthetic construct
  source 1..20: mol_type = other RNA
gcctgggacagagcgagact

SEQ ID NO: 40095 - RNA, 20 nt, synthetic construct
  source 1..20: mol_type = other RNA
gcctgggcacacgccactgc

SEQ ID NO: 40096 - RNA, 20 nt, synthetic construct
  source 1..20: mol_type = other RNA
gcctgggcgacagagtgaaa

SEQ ID NO: 40097 - RNA, 20 nt, synthetic construct
  source 1..20: mol_type = other RNA
gcctgggtaattaaacattt

SEQ ID NO: 40098 - RNA, 20 nt, synthetic construct
  source 1..20: mol_type = other RNA
gcctggtaatgaatagaaaa

SEQ ID NO: 40099 - RNA, 20 nt, synthetic construct
  source 1..20: mol_type = other RNA
gcctggtcaacagggtaaga

SEQ ID NO: 40100 - RNA, 20 nt, synthetic construct
  source 1..20: mol_type = other RNA
gcctggtcctgagggctttg

SEQ ID NO: 40101 - RNA, 20 nt, synthetic construct
  source 1..20: mol_type = other RNA
gcctggtgattaaagttatt

SEQ ID NO: 40102 - RNA, 20 nt, synthetic construct
  source 1..20: mol_type = other RNA
gcctggttagggagactttc

SEQ ID NO: 40103 - RNA, 20 nt, synthetic construct
  source 1..20: mol_type = other RNA
gcctgtagttttggtgtcat

SEQ ID NO: 40104 - RNA, 20 nt, synthetic construct
  source 1..20: mol_type = other RNA
gcctgtgacagtatgtcaga

SEQ ID NO: 40105 - RNA, 20 nt, synthetic construct
  source 1..20: mol_type = other RNA
gcctgtgcttgtctctctct

SEQ ID NO: 40106 - RNA, 20 nt, synthetic construct
  source 1..20: mol_type = other RNA
gcctgtgcttttctcgtgca

SEQ ID NO: 40107 - RNA, 20 nt, synthetic construct
  source 1..20: mol_type = other RNA
gcctgtggaggcagtaccat

SEQ ID NO: 40108 - RNA, 20 nt, synthetic construct
  source 1..20: mol_type = other RNA
gcctgtggtctcttcgaggg

SEQ ID NO: 40109 - RNA, 20 nt, synthetic construct
  source 1..20: mol_type = other RNA
gcctgtgtcagtgacagttc

SEQ ID NO: 40110 - RNA, 20 nt, synthetic construct
  source 1..20: mol_type = other RNA
gcctgttccaggcctcgctc

SEQ ID NO: 40111 - RNA, 20 nt, synthetic construct
  source 1..20: mol_type = other RNA
gcctgttccgattttactta

SEQ ID NO: 40112 - RNA, 20 nt, synthetic construct
  source 1..20: mol_type = other RNA
gcctgttgtgaggattcgat

SEQ ID NO: 40113 - RNA, 20 nt, synthetic construct
  source 1..20: mol_type = other RNA
gccttaaaagtgctgcagta

SEQ ID NO: 40114 - RNA, 20 nt, synthetic construct
  source 1..20: mol_type = other RNA
gccttaaagccacactcttg

SEQ ID NO: 40115 - RNA, 20 nt, synthetic construct
  source 1..20: mol_type = other RNA
gccttaatctcctgagtagc

SEQ ID NO: 40116 - RNA, 20 nt, synthetic construct
  source 1..20: mol_type = other RNA
gccttcaagttgctttttct

SEQ ID NO: 40117 - RNA, 20 nt, synthetic construct
  source 1..20: mol_type = other RNA
gccttcaatgtttggtagat

SEQ ID NO: 40118 - RNA, 20 nt, synthetic construct
  source 1..20: mol_type = other RNA
gccttcagaactcttctcca

SEQ ID NO: 40119 - RNA, 20 nt, synthetic construct
  source 1..20: mol_type = other RNA
gccttcagaaggagtccagt

SEQ ID NO: 40120 - RNA, 20 nt, synthetic construct
  source 1..20: mol_type = other RNA
gccttcagctatggtgttat

SEQ ID NO: 40121 - RNA, 20 nt, synthetic construct
  source 1..20: mol_type = other RNA
gccttcagtatgaatgcacg

SEQ ID NO: 40122 - RNA, 20 nt, synthetic construct
  source 1..20: mol_type = other RNA
gccttccacctgctctttat

SEQ ID NO: 40123 - RNA, 20 nt, synthetic construct
  source 1..20: mol_type = other RNA
gccttccacggaatgcccct

SEQ ID NO: 40124 - RNA, 20 nt, synthetic construct
  source 1..20: mol_type = other RNA
gccttccagagacaaagcat

SEQ ID NO: 40125 - RNA, 20 nt, synthetic construct
  source 1..20: mol_type = other RNA
gccttcccaaagacatcctg

SEQ ID NO: 40126 - RNA, 20 nt, synthetic construct
  source 1..20: mol_type = other RNA
gccttcccctgctgttccca

SEQ ID NO: 40127 - RNA, 20 nt, synthetic construct
  source 1..20: mol_type = other RNA
gccttccctgaacaatgatt

SEQ ID NO: 40128 - RNA, 20 nt, synthetic construct
  source 1..20: mol_type = other RNA
gccttcctaccctgccttcc

SEQ ID NO: 40129 - RNA, 20 nt, synthetic construct
  source 1..20: mol_type = other RNA
gccttcctgacctctgcagt

SEQ ID NO: 40130 - RNA, 20 nt, synthetic construct
  source 1..20: mol_type = other RNA
gccttccttgggcacactcc

SEQ ID NO: 40131 - RNA, 20 nt, synthetic construct
  source 1..20: mol_type = other RNA
gccttcgaggcatctagtta

SEQ ID NO: 40132 - RNA, 20 nt, synthetic construct
  source 1..20: mol_type = other RNA
gccttcgcagggtgaaactt

SEQ ID NO: 40133 - RNA, 20 nt, synthetic construct
  source 1..20: mol_type = other RNA
gccttcgcgcgcggcaggga

SEQ ID NO: 40134 - RNA, 20 nt, synthetic construct
  source 1..20: mol_type = other RNA
gccttcgcgggcaccttccc

SEQ ID NO: 40135 - RNA, 20 nt, synthetic construct
  source 1..20: mol_type = other RNA
gccttctactttaataaatg

SEQ ID NO: 40136 - RNA, 20 nt, synthetic construct
  source 1..20: mol_type = other RNA
gccttctatatttttacatt

SEQ ID NO: 40137 - RNA, 20 nt, synthetic construct
  source 1..20: mol_type = other RNA
gccttctcagaaggacacca

SEQ ID NO: 40138 - RNA, 20 nt, synthetic construct
  source 1..20: mol_type = other RNA
gccttctcctccaacccatt

SEQ ID NO: 40139 - RNA, 20 nt, synthetic construct
  source 1..20: mol_type = other RNA
gccttctctactctgcctca

SEQ ID NO: 40140 - RNA, 20 nt, synthetic construct
  source 1..20: mol_type = other RNA
gccttctctcttccaaataa

SEQ ID NO: 40141 - RNA, 20 nt, synthetic construct
  source 1..20: mol_type = other RNA
gccttctgaggagctgagac

SEQ ID NO: 40142 - RNA, 20 nt, synthetic construct
  source 1..20: mol_type = other RNA
gccttcttggagtaaacctg

SEQ ID NO: 40143 - RNA, 20 nt, synthetic construct
  source 1..20: mol_type = other RNA
gccttctttctttcaaatgt

SEQ ID NO: 40144 - RNA, 20 nt, synthetic construct
  source 1..20: mol_type = other RNA
gccttgaaaatatactaaat

SEQ ID NO: 40145 - RNA, 20 nt, synthetic construct
  source 1..20: mol_type = other RNA
gccttgacctcccaaaggac

SEQ ID NO: 40146 - RNA, 20 nt, synthetic construct
  source 1..20: mol_type = other RNA
gccttgaggtgagacagacc

SEQ ID NO: 40147 - RNA, 20 nt, synthetic construct
  source 1..20: mol_type = other RNA
gccttgaggtgattcagagt

SEQ ID NO: 40148 - RNA, 20 nt, synthetic construct
  source 1..20: mol_type = other RNA
gccttgatccattacatcaa

SEQ ID NO: 40149 - RNA, 20 nt, synthetic construct
  source 1..20: mol_type = other RNA
gccttgcaagccacattagc

SEQ ID NO: 40150 - RNA, 20 nt, synthetic construct
  source 1..20: mol_type = other RNA
gccttgccattctcccagtt

SEQ ID NO: 40151 - RNA, 20 nt, synthetic construct
  source 1..20: mol_type = other RNA
gccttgctgttgtaatgtta

SEQ ID NO: 40152 - RNA, 20 nt, synthetic construct
  source 1..20: mol_type = other RNA
gccttggaggagccctgctg

SEQ ID NO: 40153 - RNA, 20 nt, synthetic construct
  source 1..20: mol_type = other RNA
gccttggcaaggggaatggt

SEQ ID NO: 40154 - RNA, 20 nt, synthetic construct
  source 1..20: mol_type = other RNA
gccttggccttctgaggagc

SEQ ID NO: 40155 - RNA, 20 nt, synthetic construct
  source 1..20: mol_type = other RNA
gccttggtaaaatcactaat

SEQ ID NO: 40156 - RNA, 20 nt, synthetic construct
  source 1..20: mol_type = other RNA
gccttggtaagagtgagacc

SEQ ID NO: 40157 - RNA, 20 nt, synthetic construct
  source 1..20: mol_type = other RNA
gccttgtactgtgtggcttc

SEQ ID NO: 40158 - RNA, 20 nt, synthetic construct
  source 1..20: mol_type = other RNA
gcctttaatcacctcaagtg

SEQ ID NO: 40159 - RNA, 20 nt, synthetic construct
  source 1..20: mol_type = other RNA
gcctttaatttagcgttcat

SEQ ID NO: 40160 - RNA, 20 nt, synthetic construct
  source 1..20: mol_type = other RNA
gcctttattttttcttccca

SEQ ID NO: 40161 - RNA, 20 nt, synthetic construct
  source 1..20: mol_type = other RNA
gcctttcactttgatcatac

SEQ ID NO: 40162 - RNA, 20 nt, synthetic construct
  source 1..20: mol_type = other RNA
gcctttcagcatagcagaac

SEQ ID NO: 40163 - RNA, 20 nt, synthetic construct
  source 1..20: mol_type = other RNA
gcctttcatttggcctctgc

SEQ ID NO: 40164 - RNA, 20 nt, synthetic construct
  source 1..20: mol_type = other RNA
gcctttcgcttttggagcta

SEQ ID NO: 40165 - RNA, 20 nt, synthetic construct
  source 1..20: mol_type = other RNA
gcctttctcgcagcggggat

SEQ ID NO: 40166 - RNA, 20 nt, synthetic construct
  source 1..20: mol_type = other RNA
gcctttctgtttgtttgttt

SEQ ID NO: 40167 - RNA, 20 nt, synthetic construct
  source 1..20: mol_type = other RNA
gcctttgcctctccagggag

SEQ ID NO: 40168 - RNA, 20 nt, synthetic construct
  source 1..20: mol_type = other RNA
gcctttgttcatcatctttt

SEQ ID NO: 40169 - RNA, 20 nt, synthetic construct
  source 1..20: mol_type = other RNA
gcctttgttgccaggtggac

SEQ ID NO: 40170 - RNA, 20 nt, synthetic construct
  source 1..20: mol_type = other RNA
gccttttacaccctaggtag

SEQ ID NO: 40171 - RNA, 20 nt, synthetic construct
  source 1..20: mol_type = other RNA
gccttttcactcttagtgat

SEQ ID NO: 40172 - RNA, 20 nt, synthetic construct
  source 1..20: mol_type = other RNA
gccttttctgatttgctggc

SEQ ID NO: 40173 - RNA, 20 nt, synthetic construct
  source 1..20: mol_type = other RNA
gccttttgtcaagctatcag

SEQ ID NO: 40174 - RNA, 20 nt, synthetic construct
  source 1..20: mol_type = other RNA
gcgaaacacactcgtgtatg

SEQ ID NO: 40175 - RNA, 20 nt, synthetic construct
  source 1..20: mol_type = other RNA
gcgaaagggattctggccaa

SEQ ID NO: 40176 - RNA, 20 nt, synthetic construct
  source 1..20: mol_type = other RNA
gcgaaaggtacgacgctctt

SEQ ID NO: 40177 - RNA, 20 nt, synthetic construct
  source 1..20: mol_type = other RNA
gcgaaatagtagttgctcag

SEQ ID NO: 40178 - RNA, 20 nt, synthetic construct
  source 1..20: mol_type = other RNA
gcgaaatatctccctcacag

SEQ ID NO: 40179 - RNA, 20 nt, synthetic construct
  source 1..20: mol_type = other RNA
gcgaaatgtgaacagacaga

SEQ ID NO: 40180 - RNA, 20 nt, synthetic construct
  source 1..20: mol_type = other RNA
gcgaagagggagaagaaata

SEQ ID NO: 40181 - RNA, 20 nt, synthetic construct
  source 1..20: mol_type = other RNA
gcgaagcccgccgctcgcag

SEQ ID NO: 40182 - RNA, 20 nt, synthetic construct
  source 1..20: mol_type = other RNA
gcgaaggcaatgtaacacag

SEQ ID NO: 40183 - RNA, 20 nt, synthetic construct
  source 1..20: mol_type = other RNA
gcgaaggcgtgtaaactgtt

SEQ ID NO: 40184 - RNA, 20 nt, synthetic construct
  source 1..20: mol_type = other RNA
gcgaatcatctaggcatata

SEQ ID NO: 40185 - RNA, 20 nt, synthetic construct
  source 1..20: mol_type = other RNA
gcgaatttacttttaaactg

SEQ ID NO: 40186 - RNA, 20 nt, synthetic construct
  source 1..20: mol_type = other RNA
gcgacaagagcagaactcca

SEQ ID NO: 40187 - RNA, 20 nt, synthetic construct
  source 1..20: mol_type = other RNA
gcgacagagtgaaactctgg

SEQ ID NO: 40188 - RNA, 20 nt, synthetic construct
  source 1..20: mol_type = other RNA
gcgacagctacggaggatga

SEQ ID NO: 40189 - RNA, 20 nt, synthetic construct
  source 1..20: mol_type = other RNA
gcgacatatcagggatcaca

SEQ ID NO: 40190 - RNA, 20 nt, synthetic construct
  source 1..20: mol_type = other RNA
gcgacctcgaagcacaacca

SEQ ID NO: 40191 - RNA, 20 nt, synthetic construct
  source 1..20: mol_type = other RNA
gcgactcatgcctgtaattc

SEQ ID NO: 40192 - RNA, 20 nt, synthetic construct
  source 1..20: mol_type = other RNA
gcgagaaaggcgaagcggca

SEQ ID NO: 40193 - RNA, 20 nt, synthetic construct
  source 1..20: mol_type = other RNA
gcgagacctcatctctgcaa

SEQ ID NO: 40194 - RNA, 20 nt, synthetic construct
  source 1..20: mol_type = other RNA
gcgagactccatctcaagaa

SEQ ID NO: 40195 - RNA, 20 nt, synthetic construct
  source 1..20: mol_type = other RNA
gcgagatggcgtgcgcctgt

SEQ ID NO: 40196 - RNA, 20 nt, synthetic construct
  source 1..20: mol_type = other RNA
gcgagcggcgggcttcgcct

SEQ ID NO: 40197 - RNA, 20 nt, synthetic construct
  source 1..20: mol_type = other RNA
gcgagcttgatctttacttc

SEQ ID NO: 40198 - RNA, 20 nt, synthetic construct
  source 1..20: mol_type = other RNA
gcgaggcctggaacaggccc

SEQ ID NO: 40199 - RNA, 20 nt, synthetic construct
  source 1..20: mol_type = other RNA
gcgagggagcgtacggggtc

SEQ ID NO: 40200 - RNA, 20 nt, synthetic construct
  source 1..20: mol_type = other RNA
gcgagtgtgaacgatggttt

SEQ ID NO: 40201 - RNA, 20 nt, synthetic construct
  source 1..20: mol_type = other RNA
gcgatgatcaaaaccaggag

SEQ ID NO: 40202 - RNA, 20 nt, synthetic construct
  source 1..20: mol_type = other RNA
gcgattggttggactccacc

SEQ ID NO: 40203 - RNA, 20 nt, synthetic construct
  source 1..20: mol_type = other RNA
gcgattgtttcagtgtgtcc

SEQ ID NO: 40204 - RNA, 20 nt, synthetic construct
  source 1..20: mol_type = other RNA
gcgcaacaattcaacagcta

SEQ ID NO: 40205 - RNA, 20 nt, synthetic construct
  source 1..20: mol_type = other RNA
gcgcaattgcagccagagag

SEQ ID NO: 40206 - RNA, 20 nt, synthetic construct
  source 1..20: mol_type = other RNA
gcgcacgccatctcgcccag

SEQ ID NO: 40207 - RNA, 20 nt, synthetic construct
  source 1..20: mol_type = other RNA
gcgcagaactggggcttgaa

SEQ ID NO: 40208 - RNA, 20 nt, synthetic construct
  source 1..20: mol_type = other RNA
gcgcagacacaccatgacag

SEQ ID NO: 40209 - RNA, 20 nt, synthetic construct
  source 1..20: mol_type = other RNA
gcgcagccatggctcactgc

SEQ ID NO: 40210 - RNA, 20 nt, synthetic construct
  source 1..20: mol_type = other RNA
gcgcagtgcttagcgctgga

SEQ ID NO: 40211 - RNA, 20 nt, synthetic construct
  source 1..20: mol_type = other RNA
gcgcattttttaagtggcgc

SEQ ID NO: 40212 - RNA, 20 nt, synthetic construct
  source 1..20: mol_type = other RNA
gcgccaagcagggacgggcg

SEQ ID NO: 40213 - RNA, 20 nt, synthetic construct
  source 1..20: mol_type = other RNA
gcgccacgtgaagatggagt

SEQ ID NO: 40214 - RNA, 20 nt, synthetic construct
  source 1..20: mol_type = other RNA
gcgccacttaaaaaatgcgc

SEQ ID NO: 40215 - RNA, 20 nt, synthetic construct
  source 1..20: mol_type = other RNA
gcgccagacccgccgcagag

SEQ ID NO: 40216 - RNA, 20 nt, synthetic construct
  source 1..20: mol_type = other RNA
gcgccatcacacccagtata

SEQ ID NO: 40217 - RNA, 20 nt, synthetic construct
  source 1..20: mol_type = other RNA
gcgcccagcccgtgtgttta

SEQ ID NO: 40218 - RNA, 20 nt, synthetic construct
  source 1..20: mol_type = other RNA
gcgcccggccaaatatccat

SEQ ID NO: 40219 - RNA, 20 nt, synthetic construct
  source 1..20: mol_type = other RNA
gcgcccggcccagattcctt

SEQ ID NO: 40220 - RNA, 20 nt, synthetic construct
  source 1..20: mol_type = other RNA
gcgcccggcccgttattttt

SEQ ID NO: 40221 - RNA, 20 nt, synthetic construct
  source 1..20: mol_type = other RNA
gcgcccggccgagaaatcgg

SEQ ID NO: 40222 - RNA, 20 nt, synthetic construct
  source 1..20: mol_type = other RNA
gcgccctggcattgtcccgg

SEQ ID NO: 40223 - RNA, 20 nt, synthetic construct
  source 1..20: mol_type = other RNA
gcgcctgcattgcatttact

SEQ ID NO: 40224 - RNA, 20 nt, synthetic construct
  source 1..20: mol_type = other RNA
gcgcctggacaggatcccgg

SEQ ID NO: 40225 - RNA, 20 nt, synthetic construct
  source 1..20: mol_type = other RNA
gcgcctggtgattaaagtta

SEQ ID NO: 40226 - RNA, 20 nt, synthetic construct
  source 1..20: mol_type = other RNA
gcgccttaaagccacactct

SEQ ID NO: 40227 - RNA, 20 nt, synthetic construct
  source 1..20: mol_type = other RNA
gcgcgagggagcgtacgggg

SEQ ID NO: 40228 - RNA, 20 nt, synthetic construct
  source 1..20: mol_type = other RNA
gcgcgcggcagggatgctgc

SEQ ID NO: 40229 - RNA, 20 nt, synthetic construct
  source 1..20: mol_type = other RNA
gcgcggaccccgtacgctcc

SEQ ID NO: 40230 - RNA, 20 nt, synthetic construct
  source 1..20: mol_type = other RNA
gcgcggcagggatgctgcga

SEQ ID NO: 40231 - RNA, 20 nt, synthetic construct
  source 1..20: mol_type = other RNA
gcgcgtcaaaagatgctggt

SEQ ID NO: 40232 - RNA, 20 nt, synthetic construct
  source 1..20: mol_type = other RNA
gcgcgtgcctatggtcctag

SEQ ID NO: 40233 - RNA, 20 nt, synthetic construct
  source 1..20: mol_type = other RNA
gcgcgtgcctgcaatcgcag

SEQ ID NO: 40234 - RNA, 20 nt, synthetic construct
  source 1..20: mol_type = other RNA
gcgctaagcactgcgccaag

SEQ ID NO: 40235 - RNA, 20 nt, synthetic construct
  source 1..20: mol_type = other RNA
gcgctaagtgcatttcggct

SEQ ID NO: 40236 - RNA, 20 nt, synthetic construct
  source 1..20: mol_type = other RNA
gcgctactcagctgtcactc

SEQ ID NO: 40237 - RNA, 20 nt, synthetic construct
  source 1..20: mol_type = other RNA
gcgctccctctgtgtgcatg

SEQ ID NO: 40238 - RNA, 20 nt, synthetic construct
  source 1..20: mol_type = other RNA
gcgctcctctcccgccggag

SEQ ID NO: 40239 - RNA, 20 nt, synthetic construct
  source 1..20: mol_type = other RNA
gcgctcttcaagcattggga

SEQ ID NO: 40240 - RNA, 20 nt, synthetic construct
  source 1..20: mol_type = other RNA
gcgctgaagtacttcaaggt

SEQ ID NO: 40241 - RNA, 20 nt, synthetic construct
  source 1..20: mol_type = other RNA
gcgctgatgtgttgacctta

SEQ ID NO: 40242 - RNA, 20 nt, synthetic construct
  source 1..20: mol_type = other RNA
gcgctggaggtcgggctgcc

SEQ ID NO: 40243 - RNA, 20 nt, synthetic construct
  source 1..20: mol_type = other RNA
gcgctgtttgcctgcgtccg

SEQ ID NO: 40244 - RNA, 20 nt, synthetic construct
  source 1..20: mol_type = other RNA
gcgcttctatgtgacaaaca

SEQ ID NO: 40245 - RNA, 20 nt, synthetic construct
  source 1..20: mol_type = other RNA
gcgcttgaacaaatatgaat

SEQ ID NO: 40246 - RNA, 20 nt, synthetic construct
  source 1..20: mol_type = other RNA
gcgctttaagcatcccatat

SEQ ID NO: 40247 - RNA, 20 nt, synthetic construct
  source 1..20: mol_type = other RNA
gcggaaggattgcctaacac

SEQ ID NO: 40248 - RNA, 20 nt, synthetic construct
  source 1..20: mol_type = other RNA
gcggaagttgcagtgagccc

SEQ ID NO: 40249 - RNA, 20 nt, synthetic construct
  source 1..20: mol_type = other RNA
gcggaatgaagcaggccttc

SEQ ID NO: 40250 - RNA, 20 nt, synthetic construct
  source 1..20: mol_type = other RNA
gcggaatgactatagaaatt

SEQ ID NO: 40251 - RNA, 20 nt, synthetic construct
  source 1..20: mol_type = other RNA
gcggaatgcagtggcgtgat

SEQ ID NO: 40252 - RNA, 20 nt, synthetic construct
  source 1..20: mol_type = other RNA
gcggaccccgtacgctccct

SEQ ID NO: 40253 - RNA, 20 nt, synthetic construct
  source 1..20: mol_type = other RNA
gcggacgcgcattttttaag

SEQ ID NO: 40254 - RNA, 20 nt, synthetic construct
  source 1..20: mol_type = other RNA
gcggactccggcgggagagg

SEQ ID NO: 40255 - RNA, 20 nt, synthetic construct
  source 1..20: mol_type = other RNA
gcggaggttgcggtgacgtg

SEQ ID NO: 40256 - RNA, 20 nt, synthetic construct
  source 1..20: mol_type = other RNA
gcggatgccggtaatcacag

SEQ ID NO: 40257 - RNA, 20 nt, synthetic construct
  source 1..20: mol_type = other RNA
gcggcacttggtaagctgtg

SEQ ID NO: 40258 - RNA, 20 nt, synthetic construct
  source 1..20: mol_type = other RNA
gcggcagagggagcagcggg

SEQ ID NO: 40259 - RNA, 20 nt, synthetic construct
  source 1..20: mol_type = other RNA
gcggcaggcattgtgctcag

SEQ ID NO: 40260 - RNA, 20 nt, synthetic construct
  source 1..20: mol_type = other RNA
gcggcagggatgctgcgagc

SEQ ID NO: 40261 - RNA, 20 nt, synthetic construct
  source 1..20: mol_type = other RNA
gcggcatacaggagttccga

SEQ ID NO: 40262 - RNA, 20 nt, synthetic construct
  source 1..20: mol_type = other RNA
gcggcctttgcctctccagg

SEQ ID NO: 40263 - RNA, 20 nt, synthetic construct
  source 1..20: mol_type = other RNA
gcggcgggcttcgcctttgt

SEQ ID NO: 40264 - RNA, 20 nt, synthetic construct
  source 1..20: mol_type = other RNA
gcggctgaggcagcccgacc

SEQ ID NO: 40265 - RNA, 20 nt, synthetic construct
  source 1..20: mol_type = other RNA
gcggctggatcgcttgaggt

SEQ ID NO: 40266 - RNA, 20 nt, synthetic construct
  source 1..20: mol_type = other RNA
gcggctgggctttctccagg

SEQ ID NO: 40267 - RNA, 20 nt, synthetic construct
  source 1..20: mol_type = other RNA
gcggcttgattagcttcctc

SEQ ID NO: 40268 - RNA, 20 nt, synthetic construct
  source 1..20: mol_type = other RNA
gcggctttgtggagtggagg

SEQ ID NO: 40269 - RNA, 20 nt, synthetic construct
  source 1..20: mol_type = other RNA
gcgggaaaaaataatatgag

SEQ ID NO: 40270 - RNA, 20 nt, synthetic construct
  source 1..20: mol_type = other RNA
gcgggagaggagcgccctgg

SEQ ID NO: 40271 - RNA, 20 nt, synthetic construct
  source 1..20: mol_type = other RNA
gcgggaggctgaggcaggag

SEQ ID NO: 40272 - RNA, 20 nt, synthetic construct
  source 1..20: mol_type = other RNA
gcgggattatttggaagaga

SEQ ID NO: 40273 - RNA, 20 nt, synthetic construct
  source 1..20: mol_type = other RNA
gcgggcaccttccctactca

SEQ ID NO: 40274 - RNA, 20 nt, synthetic construct
  source 1..20: mol_type = other RNA
gcgggcagccttggaggagc

SEQ ID NO: 40275 - RNA, 20 nt, synthetic construct
  source 1..20: mol_type = other RNA
gcgggcccagctcttttgtg

SEQ ID NO: 40276 - RNA, 20 nt, synthetic construct
  source 1..20: mol_type = other RNA
gcgggcttcgcctttgttgc

SEQ ID NO: 40277 - RNA, 20 nt, synthetic construct
  source 1..20: mol_type = other RNA
gcggggatgctcagggtgcg

SEQ ID NO: 40278 - RNA, 20 nt, synthetic construct
  source 1..20: mol_type = other RNA
gcggggatggttgcacaatg

SEQ ID NO: 40279 - RNA, 20 nt, synthetic construct
  source 1..20: mol_type = other RNA
gcggggccgcccctggagaa

SEQ ID NO: 40280 - RNA, 20 nt, synthetic construct
  source 1..20: mol_type = other RNA
gcggggctgccactacttag

SEQ ID NO: 40281 - RNA, 20 nt, synthetic construct
  source 1..20: mol_type = other RNA
gcggggtttcagcacaatac

SEQ ID NO: 40282 - RNA, 20 nt, synthetic construct
  source 1..20: mol_type = other RNA
gcgggttgggggctgggtcg

SEQ ID NO: 40283 - RNA, 20 nt, synthetic construct
  source 1..20: mol_type = other RNA
gcgggtttcctcggtctacg

SEQ ID NO: 40284 - RNA, 20 nt, synthetic construct
  source 1..20: mol_type = other RNA
gcggtcaacgcacccagagc

SEQ ID NO: 40285 - RNA, 20 nt, synthetic construct
  source 1..20: mol_type = other RNA
gcggtcttttagccaacaac

SEQ ID NO: 40286 - RNA, 20 nt, synthetic construct
  source 1..20: mol_type = other RNA
gcggtgacgtgagatcatgc

SEQ ID NO: 40287 - RNA, 20 nt, synthetic construct
  source 1..20: mol_type = other RNA
gcggtggggacagctcaatt

SEQ ID NO: 40288 - RNA, 20 nt, synthetic construct
  source 1..20: mol_type = other RNA
gcggtgtcttattgttttga

SEQ ID NO: 40289 - RNA, 20 nt, synthetic construct
  source 1..20: mol_type = other RNA
gcgtaactccatcttcacgt

SEQ ID NO: 40290 - RNA, 20 nt, synthetic construct
  source 1..20: mol_type = other RNA
gcgtaagggtacagaactgc

SEQ ID NO: 40291 - RNA, 20 nt, synthetic construct
  source 1..20: mol_type = other RNA
gcgtacatgtagatatggga

SEQ ID NO: 40292 - RNA, 20 nt, synthetic construct
  source 1..20: mol_type = other RNA
gcgtactgtgattacaattc

SEQ ID NO: 40293 - RNA, 20 nt, synthetic construct
  source 1..20: mol_type = other RNA
gcgtagtatctcatgcttag

SEQ ID NO: 40294 - RNA, 20 nt, synthetic construct
  source 1..20: mol_type = other RNA
gcgtcaaaagatgctggtgg

SEQ ID NO: 40295 - RNA, 20 nt, synthetic construct
  source 1..20: mol_type = other RNA
gcgtccacctggcaacaaag

SEQ ID NO: 40296 - RNA, 20 nt, synthetic construct
  source 1..20: mol_type = other RNA
gcgtccgtagaccgaggaaa

SEQ ID NO: 40297 - RNA, 20 nt, synthetic construct
  source 1..20: mol_type = other RNA
gcgtcctcactgtgatacct

SEQ ID NO: 40298 - RNA, 20 nt, synthetic construct
  source 1..20: mol_type = other RNA
gcgtcgtacctttcgctatc

SEQ ID NO: 40299 - RNA, 20 nt, synthetic construct
  source 1..20: mol_type = other RNA
gcgtctgtgattatcaggga

SEQ ID NO: 40300 - RNA, 20 nt, synthetic construct
  source 1..20: mol_type = other RNA
gcgtgaatctgttcctgggt

SEQ ID NO: 40301 - RNA, 20 nt, synthetic construct
  source 1..20: mol_type = other RNA
gcgtgagccaccacgtccgg

SEQ ID NO: 40302 - RNA, 20 nt, synthetic construct
  source 1..20: mol_type = other RNA
gcgtgagccaccgcgcctgg

SEQ ID NO: 40303 - RNA, 20 nt, synthetic construct
  source 1..20: mol_type = other RNA
gcgtgagccacctcatccgg

SEQ ID NO: 40304 - RNA, 20 nt, synthetic construct
  source 1..20: mol_type = other RNA
gcgtgagccatcgcgcccag

SEQ ID NO: 40305 - RNA, 20 nt, synthetic construct
  source 1..20: mol_type = other RNA
gcgtgagcctccacacctgg

SEQ ID NO: 40306 - RNA, 20 nt, synthetic construct
  source 1..20: mol_type = other RNA
gcgtgcaccttacattgtaa

SEQ ID NO: 40307 - RNA, 20 nt, synthetic construct
  source 1..20: mol_type = other RNA
gcgtgcctgcaatcgcaggc

SEQ ID NO: 40308 - RNA, 20 nt, synthetic construct
  source 1..20: mol_type = other RNA
gcgtggaatggtcaatttca

SEQ ID NO: 40309 - RNA, 20 nt, synthetic construct
  source 1..20: mol_type = other RNA
gcgtggagcggtgtcttatt

SEQ ID NO: 40310 - RNA, 20 nt, synthetic construct
  source 1..20: mol_type = other RNA
gcgtggatgtgtgcacaaca

SEQ ID NO: 40311 - RNA, 20 nt, synthetic construct
  source 1..20: mol_type = other RNA
gcgtgggcaacacaatgaga

SEQ ID NO: 40312 - RNA, 20 nt, synthetic construct
  source 1..20: mol_type = other RNA
gcgtgggggctcacatctgt

SEQ ID NO: 40313 - RNA, 20 nt, synthetic construct
  source 1..20: mol_type = other RNA
gcgtggtggcggatgccggt

SEQ ID NO: 40314 - RNA, 20 nt, synthetic construct
  source 1..20: mol_type = other RNA
gcgtggttcacacctgtagt

SEQ ID NO: 40315 - RNA, 20 nt, synthetic construct
  source 1..20: mol_type = other RNA
gcgtggtttattcatataat

SEQ ID NO: 40316 - RNA, 20 nt, synthetic construct
  source 1..20: mol_type = other RNA
gcgtgtaaactgttggaaaa

SEQ ID NO: 40317 - RNA, 20 nt, synthetic construct
  source 1..20: mol_type = other RNA
gcgtgtgaaaccaagcaagt

SEQ ID NO: 40318 - RNA, 20 nt, synthetic construct
  source 1..20: mol_type = other RNA
gcgtgtgcatgaccctgcta

SEQ ID NO: 40319 - RNA, 20 nt, synthetic construct
  source 1..20: mol_type = other RNA
gcgtgtgcccaggctgactt

SEQ ID NO: 40320 - RNA, 20 nt, synthetic construct
  source 1..20: mol_type = other RNA
gcgtgttattttaatcgaat

SEQ ID NO: 40321 - RNA, 20 nt, synthetic construct
  source 1..20: mol_type = other RNA
gcgttcatccaaattattga

SEQ ID NO: 40322 - RNA, 20 nt, synthetic construct
  source 1..20: mol_type = other RNA
gcgttgaccgctttcgtgag

SEQ ID NO: 40323 - RNA, 20 nt, synthetic construct
  source 1..20: mol_type = other RNA
gcgttgagccatcatgcctg

SEQ ID NO: 40324 - RNA, 20 nt, synthetic construct
  source 1..20: mol_type = other RNA
gcgttggagacagcctaaac

SEQ ID NO: 40325 - RNA, 20 nt, synthetic construct
  source 1..20: mol_type = other RNA
gcgttgttcagttgaaaagt

SEQ ID NO: 40326 - RNA, 20 nt, synthetic construct
  source 1..20: mol_type = other RNA
gcgtttattagaactagaac

SEQ ID NO: 40327 - RNA, 20 nt, synthetic construct
  source 1..20: mol_type = other RNA
gcgtttgttagatctgggat

SEQ ID NO: 40328 - RNA, 20 nt, synthetic construct
  source 1..20: mol_type = other RNA
gcgttttttgtccaccagac

SEQ ID NO: 40329 - RNA, 20 nt, synthetic construct
  source 1..20: mol_type = other RNA
gctaaaacatacatgagaaa

SEQ ID NO: 40330 - RNA, 20 nt, synthetic construct
  source 1..20: mol_type = other RNA
gctaaaagaccgcaagagtt

SEQ ID NO: 40331 - RNA, 20 nt, synthetic construct
  source 1..20: mol_type = other RNA
gctaaaatgttcagatagaa

SEQ ID NO: 40332 - RNA, 20 nt, synthetic construct
  source 1..20: mol_type = other RNA
gctaaacagtacagtagtaa

SEQ ID NO: 40333 - RNA, 20 nt, synthetic construct
  source 1..20: mol_type = other RNA
gctaaacatgtatactaatt

SEQ ID NO: 40334 - RNA, 20 nt, synthetic construct
  source 1..20: mol_type = other RNA
gctaaacattttattaggtg

SEQ ID NO: 40335 - RNA, 20 nt, synthetic construct
  source 1..20: mol_type = other RNA
gctaaactgttccccaagcc

SEQ ID NO: 40336 - RNA, 20 nt, synthetic construct
  source 1..20: mol_type = other RNA
gctaaatgctcacatttagt

SEQ ID NO: 40337 - RNA, 20 nt, synthetic construct
  source 1..20: mol_type = other RNA
gctaaattaaaggctggaaa

SEQ ID NO: 40338 - RNA, 20 nt, synthetic construct
  source 1..20: mol_type = other RNA
gctaaattttcataggaaat

SEQ ID NO: 40339 - RNA, 20 nt, synthetic construct
  source 1..20: mol_type = other RNA
gctaacaatcaaatttaaca

SEQ ID NO: 40340 - RNA, 20 nt, synthetic construct
  source 1..20: mol_type = other RNA
gctaacaccttgaactggga

SEQ ID NO: 40341 - RNA, 20 nt, synthetic construct
  source 1..20: mol_type = other RNA
gctaacagccaaagaaattg

SEQ ID NO: 40342 - RNA, 20 nt, synthetic construct
  source 1..20: mol_type = other RNA
gctaacatgaactactcaaa

SEQ ID NO: 40343 - RNA, 20 nt, synthetic construct
  source 1..20: mol_type = other RNA
gctaacgtgcttgctctgcg

SEQ ID NO: 40344 - RNA, 20 nt, synthetic construct
  source 1..20: mol_type = other RNA
gctaactgcagaggtcagga

SEQ ID NO: 40345 - RNA, 20 nt, synthetic construct
  source 1..20: mol_type = other RNA
gctaacttttaacccacaga

SEQ ID NO: 40346 - RNA, 20 nt, synthetic construct
  source 1..20: mol_type = other RNA
gctaagaaacagtaattagt

SEQ ID NO: 40347 - RNA, 20 nt, synthetic construct
  source 1..20: mol_type = other RNA
gctaagactataaaactctt

SEQ ID NO: 40348 - RNA, 20 nt, synthetic construct
  source 1..20: mol_type = other RNA
gctaagagttttatagtctt

SEQ ID NO: 40349 - RNA, 20 nt, synthetic construct
  source 1..20: mol_type = other RNA
gctaagatgaggtctcagcc

SEQ ID NO: 40350 - RNA, 20 nt, synthetic construct
  source 1..20: mol_type = other RNA
gctaagatgctattcaagac

SEQ ID NO: 40351 - RNA, 20 nt, synthetic construct
  source 1..20: mol_type = other RNA
gctaagcaccaacagatcct

SEQ ID NO: 40352 - RNA, 20 nt, synthetic construct
  source 1..20: mol_type = other RNA
gctaagcactgcgccaagca

SEQ ID NO: 40353 - RNA, 20 nt, synthetic construct
  source 1..20: mol_type = other RNA
gctaagcatgtaacttgctt

SEQ ID NO: 40354 - RNA, 20 nt, synthetic construct
  source 1..20: mol_type = other RNA
gctaagggaagttttttcaa

SEQ ID NO: 40355 - RNA, 20 nt, synthetic construct
  source 1..20: mol_type = other RNA
gctaaggtggagtggtggat

SEQ ID NO: 40356 - RNA, 20 nt, synthetic construct
  source 1..20: mol_type = other RNA
gctaagtaaaataaacaagt

SEQ ID NO: 40357 - RNA, 20 nt, synthetic construct
  source 1..20: mol_type = other RNA
gctaagtagtggcagccccg

SEQ ID NO: 40358 - RNA, 20 nt, synthetic construct
  source 1..20: mol_type = other RNA
gctaagtatgcagaaaccag

SEQ ID NO: 40359 - RNA, 20 nt, synthetic construct
  source 1..20: mol_type = other RNA
gctaagtgcatttcggctct

SEQ ID NO: 40360 - RNA, 20 nt, synthetic construct
  source 1..20: mol_type = other RNA
gctaagtgtttaggatataa

SEQ ID NO: 40361 - RNA, 20 nt, synthetic construct
  source 1..20: mol_type = other RNA
gctaagttgagaaactatcc

SEQ ID NO: 40362 - RNA, 20 nt, synthetic construct
  source 1..20: mol_type = other RNA
gctaataaaaacatatgcag

SEQ ID NO: 40363 - RNA, 20 nt, synthetic construct
  source 1..20: mol_type = other RNA
gctaataagtgagtttgacc

SEQ ID NO: 40364 - RNA, 20 nt, synthetic construct
  source 1..20: mol_type = other RNA
gctaataatgatgactatga

SEQ ID NO: 40365 - RNA, 20 nt, synthetic construct
  source 1..20: mol_type = other RNA
gctaataatttatcagatcc

SEQ ID NO: 40366 - RNA, 20 nt, synthetic construct
  source 1..20: mol_type = other RNA
gctaatatctttggggagat

SEQ ID NO: 40367 - RNA, 20 nt, synthetic construct
  source 1..20: mol_type = other RNA
gctaatatgctgtagtgatt

SEQ ID NO: 40368 - RNA, 20 nt, synthetic construct
  source 1..20: mol_type = other RNA
gctaatcaagccgcaaataa

SEQ ID NO: 40369 - RNA, 20 nt, synthetic construct
  source 1..20: mol_type = other RNA
gctaatcccaaagtgagcag

SEQ ID NO: 40370 - RNA, 20 nt, synthetic construct
  source 1..20: mol_type = other RNA
gctaatctactttctaatcc

SEQ ID NO: 40371 - RNA, 20 nt, synthetic construct
  source 1..20: mol_type = other RNA
gctaatctcaatcagggcct

SEQ ID NO: 40372 - RNA, 20 nt, synthetic construct
  source 1..20: mol_type = other RNA
gctaatggtccttgctgaag

SEQ ID NO: 40373 - RNA, 20 nt, synthetic construct
  source 1..20: mol_type = other RNA
gctaatgtggcttgcaaggc

SEQ ID NO: 40374 - RNA, 20 nt, synthetic construct
  source 1..20: mol_type = other RNA
gctaatgtgtgttccagaca

SEQ ID NO: 40375 - RNA, 20 nt, synthetic construct
  source 1..20: mol_type = other RNA
gctaattcattgtacatgaa

SEQ ID NO: 40376 - RNA, 20 nt, synthetic construct
  source 1..20: mol_type = other RNA
gctaattgtttgttgggttt

SEQ ID NO: 40377 - RNA, 20 nt, synthetic construct
  source 1..20: mol_type = other RNA
gctaatttcagagagacctg

SEQ ID NO: 40378 - RNA, 20 nt, synthetic construct
  source 1..20: mol_type = other RNA
gctaatttggaattaaaatg

SEQ ID NO: 40379 - RNA, 20 nt, synthetic construct
  source 1..20: mol_type = other RNA
gctaattttctaatcttcat

SEQ ID NO: 40380 - RNA, 20 nt, synthetic construct
  source 1..20: mol_type = other RNA
gctaattttttctgtaatgt

SEQ ID NO: 40381 - RNA, 20 nt, synthetic construct
  source 1..20: mol_type = other RNA
gctacaaaagggaaaacaat

SEQ ID NO: 40382 - RNA, 20 nt, synthetic construct
  source 1..20: mol_type = other RNA
gctacaaactccaaaccttt

SEQ ID NO: 40383 - RNA, 20 nt, synthetic construct
  source 1..20: mol_type = other RNA
gctacacaagtattaacgaa

SEQ ID NO: 40384 - RNA, 20 nt, synthetic construct
  source 1..20: mol_type = other RNA
gctacaccctgggaaagcct

SEQ ID NO: 40385 - RNA, 20 nt, synthetic construct
  source 1..20: mol_type = other RNA
gctacactcaatacacgtgg

SEQ ID NO: 40386 - RNA, 20 nt, synthetic construct
  source 1..20: mol_type = other RNA
gctacagactaatatgagtt

SEQ ID NO: 40387 - RNA, 20 nt, synthetic construct
  source 1..20: mol_type = other RNA
gctacaggggcattccctgt

SEQ ID NO: 40388 - RNA, 20 nt, synthetic construct
  source 1..20: mol_type = other RNA
gctacagtaatcaaacagtg

SEQ ID NO: 40389 - RNA, 20 nt, synthetic construct
  source 1..20: mol_type = other RNA
gctacataacttcccagaca

SEQ ID NO: 40390 - RNA, 20 nt, synthetic construct
  source 1..20: mol_type = other RNA
gctaccatttattcctctct

SEQ ID NO: 40391 - RNA, 20 nt, synthetic construct
  source 1..20: mol_type = other RNA
gctaccctcgagtaaaaaga

SEQ ID NO: 40392 - RNA, 20 nt, synthetic construct
  source 1..20: mol_type = other RNA
gctaccctttcttgttagta

SEQ ID NO: 40393 - RNA, 20 nt, synthetic construct
  source 1..20: mol_type = other RNA
gctacctcaaattgtgtgtt

SEQ ID NO: 40394 - RNA, 20 nt, synthetic construct
  source 1..20: mol_type = other RNA
gctacctgttgattgttgcc

SEQ ID NO: 40395 - RNA, 20 nt, synthetic construct
  source 1..20: mol_type = other RNA
gctacgaatgaactcctata

SEQ ID NO: 40396 - RNA, 20 nt, synthetic construct
  source 1..20: mol_type = other RNA
gctacggaggatgaggggct

SEQ ID NO: 40397 - RNA, 20 nt, synthetic construct
  source 1..20: mol_type = other RNA
gctactaaacaaatcagatt

SEQ ID NO: 40398 - RNA, 20 nt, synthetic construct
  source 1..20: mol_type = other RNA
gctactagcaagctaataat

SEQ ID NO: 40399 - RNA, 20 nt, synthetic construct
  source 1..20: mol_type = other RNA
gctactatgaatatactgga

SEQ ID NO: 40400 - RNA, 20 nt, synthetic construct
  source 1..20: mol_type = other RNA
gctactattccaggatcaaa

SEQ ID NO: 40401 - RNA, 20 nt, synthetic construct
  source 1..20: mol_type = other RNA
gctactcaaagtttagttat

SEQ ID NO: 40402 - RNA, 20 nt, synthetic construct
  source 1..20: mol_type = other RNA
gctactcagctgtcactctc

SEQ ID NO: 40403 - RNA, 20 nt, synthetic construct
  source 1..20: mol_type = other RNA
gctactcaggagattaaggc

SEQ ID NO: 40404 - RNA, 20 nt, synthetic construct
  source 1..20: mol_type = other RNA
gctactgcatgctaggggct

SEQ ID NO: 40405 - RNA, 20 nt, synthetic construct
  source 1..20: mol_type = other RNA
gctactgtaaacaatgctgc

SEQ ID NO: 40406 - RNA, 20 nt, synthetic construct
  source 1..20: mol_type = other RNA
gctagaaacttggattgtgt

SEQ ID NO: 40407 - RNA, 20 nt, synthetic construct
  source 1..20: mol_type = other RNA
gctagaacagaataaaaagt

SEQ ID NO: 40408 - RNA, 20 nt, synthetic construct
  source 1..20: mol_type = other RNA
gctagaactagaatactcca

SEQ ID NO: 40409 - RNA, 20 nt, synthetic construct
  source 1..20: mol_type = other RNA
gctagaagacctcaaattct

SEQ ID NO: 40410 - RNA, 20 nt, synthetic construct
  source 1..20: mol_type = other RNA
gctagaagcatctgatacac

SEQ ID NO: 40411 - RNA, 20 nt, synthetic construct
  source 1..20: mol_type = other RNA
gctagaagtcccagttcaag

SEQ ID NO: 40412 - RNA, 20 nt, synthetic construct
  source 1..20: mol_type = other RNA
gctagacggaaaaacattct

SEQ ID NO: 40413 - RNA, 20 nt, synthetic construct
  source 1..20: mol_type = other RNA
gctagactaagaaaaacaga

SEQ ID NO: 40414 - RNA, 20 nt, synthetic construct
  source 1..20: mol_type = other RNA
gctagagccaggaagtcagc

SEQ ID NO: 40415 - RNA, 20 nt, synthetic construct
  source 1..20: mol_type = other RNA
gctagagctcacacgagaag

SEQ ID NO: 40416 - RNA, 20 nt, synthetic construct
  source 1..20: mol_type = other RNA
gctagagctgctgtaacaaa

SEQ ID NO: 40417 - RNA, 20 nt, synthetic construct
  source 1..20: mol_type = other RNA
gctagagggtaagaccaaaa

SEQ ID NO: 40418 - RNA, 20 nt, synthetic construct
  source 1..20: mol_type = other RNA
gctagatgctaaacagtaca

SEQ ID NO: 40419 - RNA, 20 nt, synthetic construct
  source 1..20: mol_type = other RNA
gctagcacagaggcaacagt

SEQ ID NO: 40420 - RNA, 20 nt, synthetic construct
  source 1..20: mol_type = other RNA
gctagccttcttggagtaaa

SEQ ID NO: 40421 - RNA, 20 nt, synthetic construct
  source 1..20: mol_type = other RNA
gctaggaccataggcacgcg

SEQ ID NO: 40422 - RNA, 20 nt, synthetic construct
  source 1..20: mol_type = other RNA
gctaggatttcagtaaatga

SEQ ID NO: 40423 - RNA, 20 nt, synthetic construct
  source 1..20: mol_type = other RNA
gctaggcgtagtatctcatg

SEQ ID NO: 40424 - RNA, 20 nt, synthetic construct
  source 1..20: mol_type = other RNA
gctagggaagcagttgatgc

SEQ ID NO: 40425 - RNA, 20 nt, synthetic construct
  source 1..20: mol_type = other RNA
gctaggggctgttcccagat

SEQ ID NO: 40426 - RNA, 20 nt, synthetic construct
  source 1..20: mol_type = other RNA
gctaggtgacctgccagagt

SEQ ID NO: 40427 - RNA, 20 nt, synthetic construct
  source 1..20: mol_type = other RNA
gctaggtgagtgagatggga

SEQ ID NO: 40428 - RNA, 20 nt, synthetic construct
  source 1..20: mol_type = other RNA
gctagtagcagaatccccaa

SEQ ID NO: 40429 - RNA, 20 nt, synthetic construct
  source 1..20: mol_type = other RNA
gctagtaggcaacatcccta

SEQ ID NO: 40430 - RNA, 20 nt, synthetic construct
  source 1..20: mol_type = other RNA
gctagtattttgttgacatc

SEQ ID NO: 40431 - RNA, 20 nt, synthetic construct
  source 1..20: mol_type = other RNA
gctagtggtaactagatgcc

SEQ ID NO: 40432 - RNA, 20 nt, synthetic construct
  source 1..20: mol_type = other RNA
gctagtgtcctcaggctcca

SEQ ID NO: 40433 - RNA, 20 nt, synthetic construct
  source 1..20: mol_type = other RNA
gctagtgtcttagtctgact

SEQ ID NO: 40434 - RNA, 20 nt, synthetic construct
  source 1..20: mol_type = other RNA
gctagtgtgtctgactacac

SEQ ID NO: 40435 - RNA, 20 nt, synthetic construct
  source 1..20: mol_type = other RNA
gctagtgtgttgactgacat

SEQ ID NO: 40436 - RNA, 20 nt, synthetic construct
  source 1..20: mol_type = other RNA
gctataaacttccctctcag

SEQ ID NO: 40437 - RNA, 20 nt, synthetic construct
  source 1..20: mol_type = other RNA
gctataaagaacatgattgg

SEQ ID NO: 40438 - RNA, 20 nt, synthetic construct
  source 1..20: mol_type = other RNA
gctataaccacgagtaatgg

SEQ ID NO: 40439 - RNA, 20 nt, synthetic construct
  source 1..20: mol_type = other RNA
gctataatttatctggattt

SEQ ID NO: 40440 - RNA, 20 nt, synthetic construct
  source 1..20: mol_type = other RNA
gctatacaaccggaaaatgc

SEQ ID NO: 40441 - RNA, 20 nt, synthetic construct
  source 1..20: mol_type = other RNA
gctatacacgttacaaaata

SEQ ID NO: 40442 - RNA, 20 nt, synthetic construct
  source 1..20: mol_type = other RNA
gctatagctgagaagtaaca

SEQ ID NO: 40443 - RNA, 20 nt, synthetic construct
  source 1..20: mol_type = other RNA
gctatagcttctgagctgtt

SEQ ID NO: 40444 - RNA, 20 nt, synthetic construct
  source 1..20: mol_type = other RNA
gctatatcccaaattggcat

SEQ ID NO: 40445 - RNA, 20 nt, synthetic construct
  source 1..20: mol_type = other RNA
gctatattcacttttggaat

SEQ ID NO: 40446 - RNA, 20 nt, synthetic construct
  source 1..20: mol_type = other RNA
gctatcagaattttattcat

SEQ ID NO: 40447 - RNA, 20 nt, synthetic construct
  source 1..20: mol_type = other RNA
gctatcaggccttccacctg

SEQ ID NO: 40448 - RNA, 20 nt, synthetic construct
  source 1..20: mol_type = other RNA
gctatcagtagtttgctagt

SEQ ID NO: 40449 - RNA, 20 nt, synthetic construct
  source 1..20: mol_type = other RNA
gctatcattttaaagggata

SEQ ID NO: 40450 - RNA, 20 nt, synthetic construct
  source 1..20: mol_type = other RNA
gctatccagaagagaatggc

SEQ ID NO: 40451 - RNA, 20 nt, synthetic construct
  source 1..20: mol_type = other RNA
gctatccagtctctgcaaca

SEQ ID NO: 40452 - RNA, 20 nt, synthetic construct
  source 1..20: mol_type = other RNA
gctatcctaatgggcgtgga

SEQ ID NO: 40453 - RNA, 20 nt, synthetic construct
  source 1..20: mol_type = other RNA
gctatctttactttcagctc

SEQ ID NO: 40454 - RNA, 20 nt, synthetic construct
  source 1..20: mol_type = other RNA
gctatgaaaattggcgtaca

SEQ ID NO: 40455 - RNA, 20 nt, synthetic construct
  source 1..20: mol_type = other RNA
gctatgaaatgtggtttttg

SEQ ID NO: 40456 - RNA, 20 nt, synthetic construct
  source 1..20: mol_type = other RNA
gctatgactaatttgaggca

SEQ ID NO: 40457 - RNA, 20 nt, synthetic construct
  source 1..20: mol_type = other RNA
gctatgcatactttggaagg

SEQ ID NO: 40458 - RNA, 20 nt, synthetic construct
  source 1..20: mol_type = other RNA
gctatgctcctgcctcagcc

SEQ ID NO: 40459 - RNA, 20 nt, synthetic construct
  source 1..20: mol_type = other RNA
gctatgctgaaaggcatgaa

SEQ ID NO: 40460 - RNA, 20 nt, synthetic construct
  source 1..20: mol_type = other RNA
gctatggagcactgtgagcc

SEQ ID NO: 40461 - RNA, 20 nt, synthetic construct
  source 1..20: mol_type = other RNA
gctatggtgttatttgttct

SEQ ID NO: 40462 - RNA, 20 nt, synthetic construct
  source 1..20: mol_type = other RNA
gctatgtaatctcatggaag

SEQ ID NO: 40463 - RNA, 20 nt, synthetic construct
  source 1..20: mol_type = other RNA
gctattaactttgaaatcag

SEQ ID NO: 40464 - RNA, 20 nt, synthetic construct
  source 1..20: mol_type = other RNA
gctattaagtattgcattga

SEQ ID NO: 40465 - RNA, 20 nt, synthetic construct
  source 1..20: mol_type = other RNA
gctattagttaaccttctgg

SEQ ID NO: 40466 - RNA, 20 nt, synthetic construct
  source 1..20: mol_type = other RNA
gctattataaatggcatctt

SEQ ID NO: 40467 - RNA, 20 nt, synthetic construct
  source 1..20: mol_type = other RNA
gctattatttgaaaaaggaa

SEQ ID NO: 40468 - RNA, 20 nt, synthetic construct
  source 1..20: mol_type = other RNA
gctattcaacaggtataaag

SEQ ID NO: 40469 - RNA, 20 nt, synthetic construct
  source 1..20: mol_type = other RNA
gctattcaagacaagcaagg

SEQ ID NO: 40470 - RNA, 20 nt, synthetic construct
  source 1..20: mol_type = other RNA
gctattctctttctgaaatt

SEQ ID NO: 40471 - RNA, 20 nt, synthetic construct
  source 1..20: mol_type = other RNA
gctattgataaatctaaagc

SEQ ID NO: 40472 - RNA, 20 nt, synthetic construct
  source 1..20: mol_type = other RNA
gctattgtcagtaattctgc

SEQ ID NO: 40473 - RNA, 20 nt, synthetic construct
  source 1..20: mol_type = other RNA
gctattgtcttttctatctg

SEQ ID NO: 40474 - RNA, 20 nt, synthetic construct
  source 1..20: mol_type = other RNA
gctattgttgaattgttgga

SEQ ID NO: 40475 - RNA, 20 nt, synthetic construct
  source 1..20: mol_type = other RNA
gctattgttttgcaagatta

SEQ ID NO: 40476 - RNA, 20 nt, synthetic construct
  source 1..20: mol_type = other RNA
gctattttattagatagtgg

SEQ ID NO: 40477 - RNA, 20 nt, synthetic construct
  source 1..20: mol_type = other RNA
gctcaaaaatactcaagggc

SEQ ID NO: 40478 - RNA, 20 nt, synthetic construct
  source 1..20: mol_type = other RNA
gctcaaacagcttgacattc

SEQ ID NO: 40479 - RNA, 20 nt, synthetic construct
  source 1..20: mol_type = other RNA
gctcaaagcatatgaatcta

SEQ ID NO: 40480 - RNA, 20 nt, synthetic construct
  source 1..20: mol_type = other RNA
gctcaaaggggcattccgtg

SEQ ID NO: 40481 - RNA, 20 nt, synthetic construct
  source 1..20: mol_type = other RNA
gctcaacgcctgtgatccca

SEQ ID NO: 40482 - RNA, 20 nt, synthetic construct
  source 1..20: mol_type = other RNA
gctcaagccatcctccagcc

SEQ ID NO: 40483 - RNA, 20 nt, synthetic construct
  source 1..20: mol_type = other RNA
gctcaagtaagtgaaatcat

SEQ ID NO: 40484 - RNA, 20 nt, synthetic construct
  source 1..20: mol_type = other RNA
gctcaatacctgaaaagtgt

SEQ ID NO: 40485 - RNA, 20 nt, synthetic construct
  source 1..20: mol_type = other RNA
gctcaatggttaagactgct

SEQ ID NO: 40486 - RNA, 20 nt, synthetic construct
  source 1..20: mol_type = other RNA
gctcaattaagcaacctttt

SEQ ID NO: 40487 - RNA, 20 nt, synthetic construct
  source 1..20: mol_type = other RNA
gctcacacgagaaggacagc

SEQ ID NO: 40488 - RNA, 20 nt, synthetic construct
  source 1..20: mol_type = other RNA
gctcacacttactaaatgat

SEQ ID NO: 40489 - RNA, 20 nt, synthetic construct
  source 1..20: mol_type = other RNA
gctcacagtgctccatagct

SEQ ID NO: 40490 - RNA, 20 nt, synthetic construct
  source 1..20: mol_type = other RNA
gctcacattgtatttctgtt

SEQ ID NO: 40491 - RNA, 20 nt, synthetic construct
  source 1..20: mol_type = other RNA
gctcacatttagtttcatct

SEQ ID NO: 40492 - RNA, 20 nt, synthetic construct
  source 1..20: mol_type = other RNA
gctcacctctggactcaggg

SEQ ID NO: 40493 - RNA, 20 nt, synthetic construct
  source 1..20: mol_type = other RNA
gctcacgttaccctctggaa

SEQ ID NO: 40494 - RNA, 20 nt, synthetic construct
  source 1..20: mol_type = other RNA
gctcactagagcttcaacct

SEQ ID NO: 40495 - RNA, 20 nt, synthetic construct
  source 1..20: mol_type = other RNA
gctcactcatttccgttgct

SEQ ID NO: 40496 - RNA, 20 nt, synthetic construct
  source 1..20: mol_type = other RNA
gctcactgtctccatgtcct

SEQ ID NO: 40497 - RNA, 20 nt, synthetic construct
  source 1..20: mol_type = other RNA
gctcactttgggattagctt

SEQ ID NO: 40498 - RNA, 20 nt, synthetic construct
  source 1..20: mol_type = other RNA
gctcagaaaattttcttttg

SEQ ID NO: 40499 - RNA, 20 nt, synthetic construct
  source 1..20: mol_type = other RNA
gctcagaaacaacaacaaca

SEQ ID NO: 40500 - RNA, 20 nt, synthetic construct
  source 1..20: mol_type = other RNA
gctcagaagctatagctgag

SEQ ID NO: 40501 - RNA, 20 nt, synthetic construct
  source 1..20: mol_type = other RNA
gctcagaagctttcagactt

SEQ ID NO: 40502 - RNA, 20 nt, synthetic construct
  source 1..20: mol_type = other RNA
gctcagcccctcatcctccg

SEQ ID NO: 40503 - RNA, 20 nt, synthetic construct
  source 1..20: mol_type = other RNA
gctcaggaccagatgacttc

SEQ ID NO: 40504 - RNA, 20 nt, synthetic construct
  source 1..20: mol_type = other RNA
gctcaggagtaactgctcct

SEQ ID NO: 40505 - RNA, 20 nt, synthetic construct
  source 1..20: mol_type = other RNA
gctcaggccagtgagtgatg

SEQ ID NO: 40506 - RNA, 20 nt, synthetic construct
  source 1..20: mol_type = other RNA
gctcaggcctgttgtgagga

SEQ ID NO: 40507 - RNA, 20 nt, synthetic construct
  source 1..20: mol_type = other RNA
gctcagggtgcgacctcgaa

SEQ ID NO: 40508 - RNA, 20 nt, synthetic construct
  source 1..20: mol_type = other RNA
gctcagtccctcaccttctg

SEQ ID NO: 40509 - RNA, 20 nt, synthetic construct
  source 1..20: mol_type = other RNA
gctcagtctgtttgccatct

SEQ ID NO: 40510 - RNA, 20 nt, synthetic construct
  source 1..20: mol_type = other RNA
gctcagtgggttcaattatg

SEQ ID NO: 40511 - RNA, 20 nt, synthetic construct
  source 1..20: mol_type = other RNA
gctcagtggttctgcgtgtt

SEQ ID NO: 40512 - RNA, 20 nt, synthetic construct
  source 1..20: mol_type = other RNA
gctcagtgtgtttttgtaaa

SEQ ID NO: 40513 - RNA, 20 nt, synthetic construct
  source 1..20: mol_type = other RNA
gctcagtttcaaaagctccc

SEQ ID NO: 40514 - RNA, 20 nt, synthetic construct
  source 1..20: mol_type = other RNA
gctcataatagtctcacgat

SEQ ID NO: 40515 - RNA, 20 nt, synthetic construct
  source 1..20: mol_type = other RNA
gctcataattaaagagagta

SEQ ID NO: 40516 - RNA, 20 nt, synthetic construct
  source 1..20: mol_type = other RNA
gctcatacttgctttattac

SEQ ID NO: 40517 - RNA, 20 nt, synthetic construct
  source 1..20: mol_type = other RNA
gctcatcatttatacccaag

SEQ ID NO: 40518 - RNA, 20 nt, synthetic construct
  source 1..20: mol_type = other RNA
gctcatctaagcctacctcc

SEQ ID NO: 40519 - RNA, 20 nt, synthetic construct
  source 1..20: mol_type = other RNA
gctcattacagtctcgaccc

SEQ ID NO: 40520 - RNA, 20 nt, synthetic construct
  source 1..20: mol_type = other RNA
gctcattcatctgcagtgtc

SEQ ID NO: 40521 - RNA, 20 nt, synthetic construct
  source 1..20: mol_type = other RNA
gctccaaaagcgaaaggcaa

SEQ ID NO: 40522 - RNA, 20 nt, synthetic construct
  source 1..20: mol_type = other RNA
gctccaaagaacaggagtta

SEQ ID NO: 40523 - RNA, 20 nt, synthetic construct
  source 1..20: mol_type = other RNA
gctccacgcccattaggata

SEQ ID NO: 40524 - RNA, 20 nt, synthetic construct
  source 1..20: mol_type = other RNA
gctccacttgggtggaagct

SEQ ID NO: 40525 - RNA, 20 nt, synthetic construct
  source 1..20: mol_type = other RNA
gctccagagaagttttccag

SEQ ID NO: 40526 - RNA, 20 nt, synthetic construct
  source 1..20: mol_type = other RNA
gctccaggtagaatgaaaat

SEQ ID NO: 40527 - RNA, 20 nt, synthetic construct
  source 1..20: mol_type = other RNA
gctccagtatgacctcctcc

SEQ ID NO: 40528 - RNA, 20 nt, synthetic construct
  source 1..20: mol_type = other RNA
gctccatagcttcctaagaa

SEQ ID NO: 40529 - RNA, 20 nt, synthetic construct
  source 1..20: mol_type = other RNA
gctcccaatgcttgaagagc

SEQ ID NO: 40530 - RNA, 20 nt, synthetic construct
  source 1..20: mol_type = other RNA
gctcccagccaaacagtttt

SEQ ID NO: 40531 - RNA, 20 nt, synthetic construct
  source 1..20: mol_type = other RNA
gctcccagtgcccacctgac

SEQ ID NO: 40532 - RNA, 20 nt, synthetic construct
  source 1..20: mol_type = other RNA
gctcccatgattcaaaatgt

SEQ ID NO: 40533 - RNA, 20 nt, synthetic construct
  source 1..20: mol_type = other RNA
gctcccatttgggactgaga

SEQ ID NO: 40534 - RNA, 20 nt, synthetic construct
  source 1..20: mol_type = other RNA
gctccccattccctgtctgt

SEQ ID NO: 40535 - RNA, 20 nt, synthetic construct
  source 1..20: mol_type = other RNA
gctccccggatgattctaat

SEQ ID NO: 40536 - RNA, 20 nt, synthetic construct
  source 1..20: mol_type = other RNA
gctccctaaatacacatgtt

SEQ ID NO: 40537 - RNA, 20 nt, synthetic construct
  source 1..20: mol_type = other RNA
gctccctctatggcaggcac

SEQ ID NO: 40538 - RNA, 20 nt, synthetic construct
  source 1..20: mol_type = other RNA
gctccctctgccgcctgggg

SEQ ID NO: 40539 - RNA, 20 nt, synthetic construct
  source 1..20: mol_type = other RNA
gctccctctgtgtgcatgca

SEQ ID NO: 40540 - RNA, 20 nt, synthetic construct
  source 1..20: mol_type = other RNA
gctcccttccagcgtgtgca

SEQ ID NO: 40541 - RNA, 20 nt, synthetic construct
  source 1..20: mol_type = other RNA
gctccgcctcctggtgggtt

SEQ ID NO: 40542 - RNA, 20 nt, synthetic construct
  source 1..20: mol_type = other RNA
gctccgggcctcccacctgc

SEQ ID NO: 40543 - RNA, 20 nt, synthetic construct
  source 1..20: mol_type = other RNA
gctcctcagaaggccaaggc

SEQ ID NO: 40544 - RNA, 20 nt, synthetic construct
  source 1..20: mol_type = other RNA
gctcctccaaggctgcccgc

SEQ ID NO: 40545 - RNA, 20 nt, synthetic construct
  source 1..20: mol_type = other RNA
gctcctcccggctaagatga

SEQ ID NO: 40546 - RNA, 20 nt, synthetic construct
  source 1..20: mol_type = other RNA
gctcctctcccgccggagtc

SEQ ID NO: 40547 - RNA, 20 nt, synthetic construct
  source 1..20: mol_type = other RNA
gctcctctgactttatggta

SEQ ID NO: 40548 - RNA, 20 nt, synthetic construct
  source 1..20: mol_type = other RNA
gctcctgacctcagatatcc

SEQ ID NO: 40549 - RNA, 20 nt, synthetic construct
  source 1..20: mol_type = other RNA
gctcctgagaaccggaactt

SEQ ID NO: 40550 - RNA, 20 nt, synthetic construct
  source 1..20: mol_type = other RNA
gctcctgcagacatgcacga

SEQ ID NO: 40551 - RNA, 20 nt, synthetic construct
  source 1..20: mol_type = other RNA
gctcctgcctttgttcatca

SEQ ID NO: 40552 - RNA, 20 nt, synthetic construct
  source 1..20: mol_type = other RNA
gctcctgggaaaaggatttg

SEQ ID NO: 40553 - RNA, 20 nt, synthetic construct
  source 1..20: mol_type = other RNA
gctccttaccactataatcc

SEQ ID NO: 40554 - RNA, 20 nt, synthetic construct
  source 1..20: mol_type = other RNA
gctcgaccaggggaaggagt

SEQ ID NO: 40555 - RNA, 20 nt, synthetic construct
  source 1..20: mol_type = other RNA
gctcgcagcatccctgccgc

SEQ ID NO: 40556 - RNA, 20 nt, synthetic construct
  source 1..20: mol_type = other RNA
gctcgcaggtgggaggcccg

SEQ ID NO: 40557 - RNA, 20 nt, synthetic construct
  source 1..20: mol_type = other RNA
gctcgccgtctccctcggcc

SEQ ID NO: 40558 - RNA, 20 nt, synthetic construct
  source 1..20: mol_type = other RNA
gctcggctctgtcacccttg

SEQ ID NO: 40559 - RNA, 20 nt, synthetic construct
  source 1..20: mol_type = other RNA
gctctaataaaagctggagt

SEQ ID NO: 40560 - RNA, 20 nt, synthetic construct
  source 1..20: mol_type = other RNA
gctctaatagttcacctctc

SEQ ID NO: 40561 - RNA, 20 nt, synthetic construct
  source 1..20: mol_type = other RNA
gctctaatgcaagagttaaa

SEQ ID NO: 40562 - RNA, 20 nt, synthetic construct
  source 1..20: mol_type = other RNA
gctctacaaaccttcttatt

SEQ ID NO: 40563 - RNA, 20 nt, synthetic construct
  source 1..20: mol_type = other RNA
gctctaccctttccaaattc

SEQ ID NO: 40564 - RNA, 20 nt, synthetic construct
  source 1..20: mol_type = other RNA
gctctagcaaacaaacacac

SEQ ID NO: 40565 - RNA, 20 nt, synthetic construct
  source 1..20: mol_type = other RNA
gctctagcccagcttccggg

SEQ ID NO: 40566 - RNA, 20 nt, synthetic construct
  source 1..20: mol_type = other RNA
gctctagccttgtactgtgt

SEQ ID NO: 40567 - RNA, 20 nt, synthetic construct
  source 1..20: mol_type = other RNA
gctctatggcatttgagggt

SEQ ID NO: 40568 - RNA, 20 nt, synthetic construct
  source 1..20: mol_type = other RNA
gctctcaagtaattgttttc

SEQ ID NO: 40569 - RNA, 20 nt, synthetic construct
  source 1..20: mol_type = other RNA
gctctcaattaatgcccaat

SEQ ID NO: 40570 - RNA, 20 nt, synthetic construct
  source 1..20: mol_type = other RNA
gctctcagtggccctgttgg

SEQ ID NO: 40571 - RNA, 20 nt, synthetic construct
  source 1..20: mol_type = other RNA
gctctcatgagtcctgaaaa

SEQ ID NO: 40572 - RNA, 20 nt, synthetic construct
  source 1..20: mol_type = other RNA
gctctcatgtcagagacaca

SEQ ID NO: 40573 - RNA, 20 nt, synthetic construct
  source 1..20: mol_type = other RNA
gctctcccccgaatcctttg

SEQ ID NO: 40574 - RNA, 20 nt, synthetic construct
  source 1..20: mol_type = other RNA
gctctcctgtgccaagtccg

SEQ ID NO: 40575 - RNA, 20 nt, synthetic construct
  source 1..20: mol_type = other RNA
gctctctattccaaatgtct

SEQ ID NO: 40576 - RNA, 20 nt, synthetic construct
  source 1..20: mol_type = other RNA
gctctcttcaccaactgaag

SEQ ID NO: 40577 - RNA, 20 nt, synthetic construct
  source 1..20: mol_type = other RNA
gctctcttcccccaaaactt

SEQ ID NO: 40578 - RNA, 20 nt, synthetic construct
  source 1..20: mol_type = other RNA
gctctcttgcccaagctggt

SEQ ID NO: 40579 - RNA, 20 nt, synthetic construct
  source 1..20: mol_type = other RNA
gctctgacgtttaaatgagt

SEQ ID NO: 40580 - RNA, 20 nt, synthetic construct
  source 1..20: mol_type = other RNA
gctctgataggataatgtcc

SEQ ID NO: 40581 - RNA, 20 nt, synthetic construct
  source 1..20: mol_type = other RNA
gctctgatgctttctctagt

SEQ ID NO: 40582 - RNA, 20 nt, synthetic construct
  source 1..20: mol_type = other RNA
gctctgcaaatgaggttgct

SEQ ID NO: 40583 - RNA, 20 nt, synthetic construct
  source 1..20: mol_type = other RNA
gctctgcacgtactagtcag

SEQ ID NO: 40584 - RNA, 20 nt, synthetic construct
  source 1..20: mol_type = other RNA
gctctgcagagactgtgctt

SEQ ID NO: 40585 - RNA, 20 nt, synthetic construct
  source 1..20: mol_type = other RNA
gctctgcggcaggcattgtg

SEQ ID NO: 40586 - RNA, 20 nt, synthetic construct
  source 1..20: mol_type = other RNA
gctctgcggcgggtctggcg

SEQ ID NO: 40587 - RNA, 20 nt, synthetic construct
  source 1..20: mol_type = other RNA
gctctgggtcagaatcgtga

SEQ ID NO: 40588 - RNA, 20 nt, synthetic construct
  source 1..20: mol_type = other RNA
gctctgggtgcgttgaccgc

SEQ ID NO: 40589 - RNA, 20 nt, synthetic construct
  source 1..20: mol_type = other RNA
gctctggttttaaagaaatt

SEQ ID NO: 40590 - RNA, 20 nt, synthetic construct
  source 1..20: mol_type = other RNA
gctctgtatttaatctttta

SEQ ID NO: 40591 - RNA, 20 nt, synthetic construct
  source 1..20: mol_type = other RNA
gctctgtcacccacgtggag

SEQ ID NO: 40592 - RNA, 20 nt, synthetic construct
  source 1..20: mol_type = other RNA
gctctgtcacccttgtaatc

SEQ ID NO: 40593 - RNA, 20 nt, synthetic construct
  source 1..20: mol_type = other RNA
gctctgtcctgtcagtgtgg

SEQ ID NO: 40594 - RNA, 20 nt, synthetic construct
  source 1..20: mol_type = other RNA
gctctgtcgcccaggcggaa

SEQ ID NO: 40595 - RNA, 20 nt, synthetic construct
  source 1..20: mol_type = other RNA
gctctgtcttgatgatagaa

SEQ ID NO: 40596 - RNA, 20 nt, synthetic construct
  source 1..20: mol_type = other RNA
gctctgtgctgagatggtca

SEQ ID NO: 40597 - RNA, 20 nt, synthetic construct
  source 1..20: mol_type = other RNA
gctctgtggtttcttgaatc

SEQ ID NO: 40598 - RNA, 20 nt, synthetic construct
  source 1..20: mol_type = other RNA
gctctgttgcccagactgga

SEQ ID NO: 40599 - RNA, 20 nt, synthetic construct
  source 1..20: mol_type = other RNA
gctcttaagcttaggtcttt

SEQ ID NO: 40600 - RNA, 20 nt, synthetic construct
  source 1..20: mol_type = other RNA
gctcttaagtatttttgtta

SEQ ID NO: 40601 - RNA, 20 nt, synthetic construct
  source 1..20: mol_type = other RNA
gctcttagaaaatatatact

SEQ ID NO: 40602 - RNA, 20 nt, synthetic construct
  source 1..20: mol_type = other RNA
gctcttcaagcattgggagc

SEQ ID NO: 40603 - RNA, 20 nt, synthetic construct
  source 1..20: mol_type = other RNA
gctcttcccttaaccttttt

SEQ ID NO: 40604 - RNA, 20 nt, synthetic construct
  source 1..20: mol_type = other RNA
gctcttctattccagagaat

SEQ ID NO: 40605 - RNA, 20 nt, synthetic construct
  source 1..20: mol_type = other RNA
gctcttctcagttgcagcat

SEQ ID NO: 40606 - RNA, 20 nt, synthetic construct
  source 1..20: mol_type = other RNA
gctcttctgatcacagaagt

SEQ ID NO: 40607 - RNA, 20 nt, synthetic construct
  source 1..20: mol_type = other RNA
gctcttgaccttgtgcatgt

SEQ ID NO: 40608 - RNA, 20 nt, synthetic construct
  source 1..20: mol_type = other RNA
gctcttggcttttggcagcg

SEQ ID NO: 40609 - RNA, 20 nt, synthetic construct
  source 1..20: mol_type = other RNA
gctcttggtttcttcaagat

SEQ ID NO: 40610 - RNA, 20 nt, synthetic construct
  source 1..20: mol_type = other RNA
gctcttgttcaaaaaccttt

SEQ ID NO: 40611 - RNA, 20 nt, synthetic construct
  source 1..20: mol_type = other RNA
gctctttatctccacatttc

SEQ ID NO: 40612 - RNA, 20 nt, synthetic construct
  source 1..20: mol_type = other RNA
gctctttccactctctggct

SEQ ID NO: 40613 - RNA, 20 nt, synthetic construct
  source 1..20: mol_type = other RNA
gctcttttaaaaattacaac

SEQ ID NO: 40614 - RNA, 20 nt, synthetic construct
  source 1..20: mol_type = other RNA
gctcttttcatcactcactg

SEQ ID NO: 40615 - RNA, 20 nt, synthetic construct
  source 1..20: mol_type = other RNA
gctcttttgtgtctttttat

SEQ ID NO: 40616 - RNA, 20 nt, synthetic construct
  source 1..20: mol_type = other RNA
gctgaaaaacacctcagtta

SEQ ID NO: 40617 - RNA, 20 nt, synthetic construct
  source 1..20: mol_type = other RNA
gctgaaaaagatactcttaa

SEQ ID NO: 40618 - RNA, 20 nt, synthetic construct
  source 1..20: mol_type = other RNA
gctgaaaccccgcatactgt

SEQ ID NO: 40619 - RNA, 20 nt, synthetic construct
  source 1..20: mol_type = other RNA
gctgaaagagaaagaagtaa

SEQ ID NO: 40620 - RNA, 20 nt, synthetic construct
  source 1..20: mol_type = other RNA
gctgaaagctagaagacctc

SEQ ID NO: 40621 - RNA, 20 nt, synthetic construct
  source 1..20: mol_type = other RNA
gctgaaaggcatgaaattct

SEQ ID NO: 40622 - RNA, 20 nt, synthetic construct
  source 1..20: mol_type = other RNA
gctgaaagtaaagatagccc

SEQ ID NO: 40623 - RNA, 20 nt, synthetic construct
  source 1..20: mol_type = other RNA
gctgaaatgctgtaactgac

SEQ ID NO: 40624 - RNA, 20 nt, synthetic construct
  source 1..20: mol_type = other RNA
gctgaactcctttcttaccc

SEQ ID NO: 40625 - RNA, 20 nt, synthetic construct
  source 1..20: mol_type = other RNA
gctgaactctgtggagtcct

SEQ ID NO: 40626 - RNA, 20 nt, synthetic construct
  source 1..20: mol_type = other RNA
gctgaactgctgacagatta

SEQ ID NO: 40627 - RNA, 20 nt, synthetic construct
  source 1..20: mol_type = other RNA
gctgaacttgtcacaaaatg

SEQ ID NO: 40628 - RNA, 20 nt, synthetic construct
  source 1..20: mol_type = other RNA
gctgaagaataactgtcctg

SEQ ID NO: 40629 - RNA, 20 nt, synthetic construct
  source 1..20: mol_type = other RNA
gctgaagcaggctttttacc

SEQ ID NO: 40630 - RNA, 20 nt, synthetic construct
  source 1..20: mol_type = other RNA
gctgaaggcactgtatggtt

SEQ ID NO: 40631 - RNA, 20 nt, synthetic construct
  source 1..20: mol_type = other RNA
gctgaagggaggaaaaaaca

SEQ ID NO: 40632 - RNA, 20 nt, synthetic construct
  source 1..20: mol_type = other RNA
gctgaagtacttcaaggttc

SEQ ID NO: 40633 - RNA, 20 nt, synthetic construct
  source 1..20: mol_type = other RNA
gctgacagattaaataccac

SEQ ID NO: 40634 - RNA, 20 nt, synthetic construct
  source 1..20: mol_type = other RNA
gctgacatgtgtaaaacatc

SEQ ID NO: 40635 - RNA, 20 nt, synthetic construct
  source 1..20: mol_type = other RNA
gctgacccactggtttcagt

SEQ ID NO: 40636 - RNA, 20 nt, synthetic construct
  source 1..20: mol_type = other RNA
gctgacctggtactctatga

SEQ ID NO: 40637 - RNA, 20 nt, synthetic construct
  source 1..20: mol_type = other RNA
gctgactagtacgtgcagag

SEQ ID NO: 40638 - RNA, 20 nt, synthetic construct
  source 1..20: mol_type = other RNA
gctgacttagagggcttcat

SEQ ID NO: 40639 - RNA, 20 nt, synthetic construct
  source 1..20: mol_type = other RNA
gctgacttcctggctctagc

SEQ ID NO: 40640 - RNA, 20 nt, synthetic construct
  source 1..20: mol_type = other RNA
gctgactttcatttgtaatt

SEQ ID NO: 40641 - RNA, 20 nt, synthetic construct
  source 1..20: mol_type = other RNA
gctgacttttaaaatatgtg

SEQ ID NO: 40642 - RNA, 20 nt, synthetic construct
  source 1..20: mol_type = other RNA
gctgagaagtaacattacaa

SEQ ID NO: 40643 - RNA, 20 nt, synthetic construct
  source 1..20: mol_type = other RNA
gctgagaccacagacgtgca

SEQ ID NO: 40644 - RNA, 20 nt, synthetic construct
  source 1..20: mol_type = other RNA
gctgagacctcatcttagcc

SEQ ID NO: 40645 - RNA, 20 nt, synthetic construct
  source 1..20: mol_type = other RNA
gctgagatggtcagtactat

SEQ ID NO: 40646 - RNA, 20 nt, synthetic construct
  source 1..20: mol_type = other RNA
gctgagattacagatgtgag

SEQ ID NO: 40647 - RNA, 20 nt, synthetic construct
  source 1..20: mol_type = other RNA
gctgagccttcagaactctt

SEQ ID NO: 40648 - RNA, 20 nt, synthetic construct
  source 1..20: mol_type = other RNA
gctgaggattggagactgat

SEQ ID NO: 40649 - RNA, 20 nt, synthetic construct
  source 1..20: mol_type = other RNA
gctgaggcagcccgacctcc

SEQ ID NO: 40650 - RNA, 20 nt, synthetic construct
  source 1..20: mol_type = other RNA
gctgaggcaggaggcacctg

SEQ ID NO: 40651 - RNA, 20 nt, synthetic construct
  source 1..20: mol_type = other RNA
gctgaggccccaggggacat

SEQ ID NO: 40652 - RNA, 20 nt, synthetic construct
  source 1..20: mol_type = other RNA
gctgaggccggaggattgct

SEQ ID NO: 40653 - RNA, 20 nt, synthetic construct
  source 1..20: mol_type = other RNA
gctgaggcggaaggattgcc

SEQ ID NO: 40654 - RNA, 20 nt, synthetic construct
  source 1..20: mol_type = other RNA
gctgaggcggctggatcgct

SEQ ID NO: 40655 - RNA, 20 nt, synthetic construct
  source 1..20: mol_type = other RNA
gctgaggctggggaattgca

SEQ ID NO: 40656 - RNA, 20 nt, synthetic construct
  source 1..20: mol_type = other RNA
gctgagggaatttttcttac

SEQ ID NO: 40657 - RNA, 20 nt, synthetic construct
  source 1..20: mol_type = other RNA
gctgagtagcgctttaagca

SEQ ID NO: 40658 - RNA, 20 nt, synthetic construct
  source 1..20: mol_type = other RNA
gctgagtatgggtctccatt

SEQ ID NO: 40659 - RNA, 20 nt, synthetic construct
  source 1..20: mol_type = other RNA
gctgagtcttctactgtgaa

SEQ ID NO: 40660 - RNA, 20 nt, synthetic construct
  source 1..20: mol_type = other RNA
gctgagtgaatggggtaatt

SEQ ID NO: 40661 - RNA, 20 nt, synthetic construct
  source 1..20: mol_type = other RNA
gctgataaatggctttttac

SEQ ID NO: 40662 - RNA, 20 nt, synthetic construct
  source 1..20: mol_type = other RNA
gctgatcaaggaagcttcct

SEQ ID NO: 40663 - RNA, 20 nt, synthetic construct
  source 1..20: mol_type = other RNA
gctgatcaggaaagaccggg

SEQ ID NO: 40664 - RNA, 20 nt, synthetic construct
  source 1..20: mol_type = other RNA
gctgatgaactacacagaca

SEQ ID NO: 40665 - RNA, 20 nt, synthetic construct
  source 1..20: mol_type = other RNA
gctgatgacagttactctaa

SEQ ID NO: 40666 - RNA, 20 nt, synthetic construct
  source 1..20: mol_type = other RNA
gctgatgtaagtgggaggag

SEQ ID NO: 40667 - RNA, 20 nt, synthetic construct
  source 1..20: mol_type = other RNA
gctgatgtgttgaccttagt

SEQ ID NO: 40668 - RNA, 20 nt, synthetic construct
  source 1..20: mol_type = other RNA
gctgattataaccttgaact

SEQ ID NO: 40669 - RNA, 20 nt, synthetic construct
  source 1..20: mol_type = other RNA
gctgatttaaaattttgctt

SEQ ID NO: 40670 - RNA, 20 nt, synthetic construct
  source 1..20: mol_type = other RNA
gctgcaactgagaagagctg

SEQ ID NO: 40671 - RNA, 20 nt, synthetic construct
  source 1..20: mol_type = other RNA
gctgcaagcactggtaagga

SEQ ID NO: 40672 - RNA, 20 nt, synthetic construct
  source 1..20: mol_type = other RNA
gctgcaattgcgcagaactg

SEQ ID NO: 40673 - RNA, 20 nt, synthetic construct
  source 1..20: mol_type = other RNA
gctgcaccattttttcacca

SEQ ID NO: 40674 - RNA, 20 nt, synthetic construct
  source 1..20: mol_type = other RNA
gctgcaccctcctcctcctg

SEQ ID NO: 40675 - RNA, 20 nt, synthetic construct
  source 1..20: mol_type = other RNA
gctgcacgtctgtggtctca

SEQ ID NO: 40676 - RNA, 20 nt, synthetic construct
  source 1..20: mol_type = other RNA
gctgcactggctattagtta

SEQ ID NO: 40677 - RNA, 20 nt, synthetic construct
  source 1..20: mol_type = other RNA
gctgcagggcttctgaaggt

SEQ ID NO: 40678 - RNA, 20 nt, synthetic construct
  source 1..20: mol_type = other RNA
gctgcagtatgcatagatca

SEQ ID NO: 40679 - RNA, 20 nt, synthetic construct
  source 1..20: mol_type = other RNA
gctgcagtgagctccagcct

SEQ ID NO: 40680 - RNA, 20 nt, synthetic construct
  source 1..20: mol_type = other RNA
gctgcagtttttccactaat

SEQ ID NO: 40681 - RNA, 20 nt, synthetic construct
  source 1..20: mol_type = other RNA
gctgcatagtactccattat

SEQ ID NO: 40682 - RNA, 20 nt, synthetic construct
  source 1..20: mol_type = other RNA
gctgcatcatggtgggcctt

SEQ ID NO: 40683 - RNA, 20 nt, synthetic construct
  source 1..20: mol_type = other RNA
gctgcatcccaagggttttg

SEQ ID NO: 40684 - RNA, 20 nt, synthetic construct
  source 1..20: mol_type = other RNA
gctgcattccagcctggtga

SEQ ID NO: 40685 - RNA, 20 nt, synthetic construct
  source 1..20: mol_type = other RNA
gctgccaaaagccaagagcg

SEQ ID NO: 40686 - RNA, 20 nt, synthetic construct
  source 1..20: mol_type = other RNA
gctgccaagtcagcacttct

SEQ ID NO: 40687 - RNA, 20 nt, synthetic construct
  source 1..20: mol_type = other RNA
gctgccactacttagcccct

SEQ ID NO: 40688 - RNA, 20 nt, synthetic construct
  source 1..20: mol_type = other RNA
gctgccagatgttctaattt

SEQ ID NO: 40689 - RNA, 20 nt, synthetic construct
  source 1..20: mol_type = other RNA
gctgccagcaccagatactc

SEQ ID NO: 40690 - RNA, 20 nt, synthetic construct
  source 1..20: mol_type = other RNA
gctgccccagctaaaatgtt

SEQ ID NO: 40691 - RNA, 20 nt, synthetic construct
  source 1..20: mol_type = other RNA
gctgcctcagccgccgcaga

SEQ ID NO: 40692 - RNA, 20 nt, synthetic construct
  source 1..20: mol_type = other RNA
gctgcctcttcctgttgctt

SEQ ID NO: 40693 - RNA, 20 nt, synthetic construct
  source 1..20: mol_type = other RNA
gctgcgagaaaggcgaagcg

SEQ ID NO: 40694 - RNA, 20 nt, synthetic construct
  source 1..20: mol_type = other RNA
gctgcgccactgcactccag

SEQ ID NO: 40695 - RNA, 20 nt, synthetic construct
  source 1..20: mol_type = other RNA
gctgctatgaaaattggcgt

SEQ ID NO: 40696 - RNA, 20 nt, synthetic construct
  source 1..20: mol_type = other RNA
gctgctccctctgccgcctg

SEQ ID NO: 40697 - RNA, 20 nt, synthetic construct
  source 1..20: mol_type = other RNA
gctgctctgacgtttaaatg

SEQ ID NO: 40698 - RNA, 20 nt, synthetic construct
  source 1..20: mol_type = other RNA
gctgctgaaaaagatactct

SEQ ID NO: 40699 - RNA, 20 nt, synthetic construct
  source 1..20: mol_type = other RNA
gctgctgtaacaaagatgcc

SEQ ID NO: 40700 - RNA, 20 nt, synthetic construct
  source 1..20: mol_type = other RNA
gctgcttctacccactattg

SEQ ID NO: 40701 - RNA, 20 nt, synthetic construct
  source 1..20: mol_type = other RNA
gctggaaataatttccctca

SEQ ID NO: 40702 - RNA, 20 nt, synthetic construct
  source 1..20: mol_type = other RNA
gctggaaattttcaagggtg

SEQ ID NO: 40703 - RNA, 20 nt, synthetic construct
  source 1..20: mol_type = other RNA
gctggaacgaatattcattt

SEQ ID NO: 40704 - RNA, 20 nt, synthetic construct
  source 1..20: mol_type = other RNA
gctggaagaattttaagcct

SEQ ID NO: 40705 - RNA, 20 nt, synthetic construct
  source 1..20: mol_type = other RNA
gctggaagggagcccaagca

SEQ ID NO: 40706 - RNA, 20 nt, synthetic construct
  source 1..20: mol_type = other RNA
gctggaagtaaggattttct

SEQ ID NO: 40707 - RNA, 20 nt, synthetic construct
  source 1..20: mol_type = other RNA
gctggaagttggcccaacat

SEQ ID NO: 40708 - RNA, 20 nt, synthetic construct
  source 1..20: mol_type = other RNA
gctggaatggtgaagaatgt

SEQ ID NO: 40709 - RNA, 20 nt, synthetic construct
  source 1..20: mol_type = other RNA
gctggacataagggtctgtt

SEQ ID NO: 40710 - RNA, 20 nt, synthetic construct
  source 1..20: mol_type = other RNA
gctggacccttaccttaaac

SEQ ID NO: 40711 - RNA, 20 nt, synthetic construct
  source 1..20: mol_type = other RNA
gctggactcattccaatcct

SEQ ID NO: 40712 - RNA, 20 nt, synthetic construct
  source 1..20: mol_type = other RNA
gctggactggagggatgctg

SEQ ID NO: 40713 - RNA, 20 nt, synthetic construct
  source 1..20: mol_type = other RNA
gctggagctcactgcagcct

SEQ ID NO: 40714 - RNA, 20 nt, synthetic construct
  source 1..20: mol_type = other RNA
gctggaggtcgggctgcctc

SEQ ID NO: 40715 - RNA, 20 nt, synthetic construct
  source 1..20: mol_type = other RNA
gctggagtggagtggcatga

SEQ ID NO: 40716 - RNA, 20 nt, synthetic construct
  source 1..20: mol_type = other RNA
gctggagtgtggcaggggct

SEQ ID NO: 40717 - RNA, 20 nt, synthetic construct
  source 1..20: mol_type = other RNA
gctggagttatttgtataaa

SEQ ID NO: 40718 - RNA, 20 nt, synthetic construct
  source 1..20: mol_type = other RNA
gctggatcatatagtaattc

SEQ ID NO: 40719 - RNA, 20 nt, synthetic construct
  source 1..20: mol_type = other RNA
gctggatgtggtgtggcatg

SEQ ID NO: 40720 - RNA, 20 nt, synthetic construct
  source 1..20: mol_type = other RNA
gctggcaaaatggagacatc

SEQ ID NO: 40721 - RNA, 20 nt, synthetic construct
  source 1..20: mol_type = other RNA
gctggcactttcctgataag

SEQ ID NO: 40722 - RNA, 20 nt, synthetic construct
  source 1..20: mol_type = other RNA
gctggcagccttctctcttc

SEQ ID NO: 40723 - RNA, 20 nt, synthetic construct
  source 1..20: mol_type = other RNA
gctggcatgttggatagttt

SEQ ID NO: 40724 - RNA, 20 nt, synthetic construct
  source 1..20: mol_type = other RNA
gctggccagtgagttcaaat

SEQ ID NO: 40725 - RNA, 20 nt, synthetic construct
  source 1..20: mol_type = other RNA
gctggctcagtctgtttgcc

SEQ ID NO: 40726 - RNA, 20 nt, synthetic construct
  source 1..20: mol_type = other RNA
gctggctctttccactctct

SEQ ID NO: 40727 - RNA, 20 nt, synthetic construct
  source 1..20: mol_type = other RNA
gctggcttcaatatgcagta

SEQ ID NO: 40728 - RNA, 20 nt, synthetic construct
  source 1..20: mol_type = other RNA
gctggcttcatgggtggaaa

SEQ ID NO: 40729 - RNA, 20 nt, synthetic construct
  source 1..20: mol_type = other RNA
gctgggactacaggtgtgaa

SEQ ID NO: 40730 - RNA, 20 nt, synthetic construct
  source 1..20: mol_type = other RNA
gctgggagaaagctaatttg

SEQ ID NO: 40731 - RNA, 20 nt, synthetic construct
  source 1..20: mol_type = other RNA
gctgggagaccaggagttct

SEQ ID NO: 40732 - RNA, 20 nt, synthetic construct
  source 1..20: mol_type = other RNA
gctgggagcttatcaggctt

SEQ ID NO: 40733 - RNA, 20 nt, synthetic construct
  source 1..20: mol_type = other RNA
gctgggagtacaagaccagc

SEQ ID NO: 40734 - RNA, 20 nt, synthetic construct
  source 1..20: mol_type = other RNA
gctgggatcacaggcgttga

SEQ ID NO: 40735 - RNA, 20 nt, synthetic construct
  source 1..20: mol_type = other RNA
gctgggatggctgaaagaga

SEQ ID NO: 40736 - RNA, 20 nt, synthetic construct
  source 1..20: mol_type = other RNA
gctgggattacacacaccta

SEQ ID NO: 40737 - RNA, 20 nt, synthetic construct
  source 1..20: mol_type = other RNA
gctgggattacaggcgcacg

SEQ ID NO: 40738 - RNA, 20 nt, synthetic construct
  source 1..20: mol_type = other RNA
gctgggcccactctccccaa

SEQ ID NO: 40739 - RNA, 20 nt, synthetic construct
  source 1..20: mol_type = other RNA
gctgggcccgcagtggctca

SEQ ID NO: 40740 - RNA, 20 nt, synthetic construct
  source 1..20: mol_type = other RNA
gctgggcgagatggcgtgcg

SEQ ID NO: 40741 - RNA, 20 nt, synthetic construct
  source 1..20: mol_type = other RNA
gctgggctagagccaggaag

SEQ ID NO: 40742 - RNA, 20 nt, synthetic construct
  source 1..20: mol_type = other RNA
gctgggctagggaagcagtt

SEQ ID NO: 40743 - RNA, 20 nt, synthetic construct
  source 1..20: mol_type = other RNA
gctgggctattgttttgcaa

SEQ ID NO: 40744 - RNA, 20 nt, synthetic construct
  source 1..20: mol_type = other RNA
gctgggctttctccaggggc

SEQ ID NO: 40745 - RNA, 20 nt, synthetic construct
  source 1..20: mol_type = other RNA
gctggggaattgcatgagac

SEQ ID NO: 40746 - RNA, 20 nt, synthetic construct
  source 1..20: mol_type = other RNA
gctggggacccctccctgct

SEQ ID NO: 40747 - RNA, 20 nt, synthetic construct
  source 1..20: mol_type = other RNA
gctggggcagcaaagcaaga

SEQ ID NO: 40748 - RNA, 20 nt, synthetic construct
  source 1..20: mol_type = other RNA
gctgggggatccaggggaat

SEQ ID NO: 40749 - RNA, 20 nt, synthetic construct
  source 1..20: mol_type = other RNA
gctgggtagagactggatcc

SEQ ID NO: 40750 - RNA, 20 nt, synthetic construct
  source 1..20: mol_type = other RNA
gctgggtcggccgaggcgga

SEQ ID NO: 40751 - RNA, 20 nt, synthetic construct
  source 1..20: mol_type = other RNA
gctgggtgatgttcaaccct

SEQ ID NO: 40752 - RNA, 20 nt, synthetic construct
  source 1..20: mol_type = other RNA
gctggtaatacagtctgatt

SEQ ID NO: 40753 - RNA, 20 nt, synthetic construct
  source 1..20: mol_type = other RNA
gctggtctcaaactccaagt

SEQ ID NO: 40754 - RNA, 20 nt, synthetic construct
  source 1..20: mol_type = other RNA
gctggtctggaatgtgtagt

SEQ ID NO: 40755 - RNA, 20 nt, synthetic construct
  source 1..20: mol_type = other RNA
gctggtcttgtactcccagc

SEQ ID NO: 40756 - RNA, 20 nt, synthetic construct
  source 1..20: mol_type = other RNA
gctggtgaaaaaatggtgca

SEQ ID NO: 40757 - RNA, 20 nt, synthetic construct
  source 1..20: mol_type = other RNA
gctggtggagtattctagtt

SEQ ID NO: 40758 - RNA, 20 nt, synthetic construct
  source 1..20: mol_type = other RNA
gctggtgggctttgagaaag

SEQ ID NO: 40759 - RNA, 20 nt, synthetic construct
  source 1..20: mol_type = other RNA
gctggttccaaacttctgac

SEQ ID NO: 40760 - RNA, 20 nt, synthetic construct
  source 1..20: mol_type = other RNA
gctgtaacaaagatgccaca

SEQ ID NO: 40761 - RNA, 20 nt, synthetic construct
  source 1..20: mol_type = other RNA
gctgtaacagaggcatgcac

SEQ ID NO: 40762 - RNA, 20 nt, synthetic construct
  source 1..20: mol_type = other RNA
gctgtaactgacttcaagag

SEQ ID NO: 40763 - RNA, 20 nt, synthetic construct
  source 1..20: mol_type = other RNA
gctgtaagctggtaatacag

SEQ ID NO: 40764 - RNA, 20 nt, synthetic construct
  source 1..20: mol_type = other RNA
gctgtactaagcctatgtaa

SEQ ID NO: 40765 - RNA, 20 nt, synthetic construct
  source 1..20: mol_type = other RNA
gctgtagtgattcacttttg

SEQ ID NO: 40766 - RNA, 20 nt, synthetic construct
  source 1..20: mol_type = other RNA
gctgtataacattttctcta

SEQ ID NO: 40767 - RNA, 20 nt, synthetic construct
  source 1..20: mol_type = other RNA
gctgtatacccaggtgtgag

SEQ ID NO: 40768 - RNA, 20 nt, synthetic construct
  source 1..20: mol_type = other RNA
gctgtattgtaggaaagcct

SEQ ID NO: 40769 - RNA, 20 nt, synthetic construct
  source 1..20: mol_type = other RNA
gctgtatttttgctcacact

SEQ ID NO: 40770 - RNA, 20 nt, synthetic construct
  source 1..20: mol_type = other RNA
gctgtcaaaaatgtgtctag

SEQ ID NO: 40771 - RNA, 20 nt, synthetic construct
  source 1..20: mol_type = other RNA
gctgtcactctctttaggaa

SEQ ID NO: 40772 - RNA, 20 nt, synthetic construct
  source 1..20: mol_type = other RNA
gctgtcaggcaagggactgt

SEQ ID NO: 40773 - RNA, 20 nt, synthetic construct
  source 1..20: mol_type = other RNA
gctgtccaacaagggttggt

SEQ ID NO: 40774 - RNA, 20 nt, synthetic construct
  source 1..20: mol_type = other RNA
gctgtccatttccagtactt

SEQ ID NO: 40775 - RNA, 20 nt, synthetic construct
  source 1..20: mol_type = other RNA
gctgtccatttccttaagca

SEQ ID NO: 40776 - RNA, 20 nt, synthetic construct
  source 1..20: mol_type = other RNA
gctgtcccaaatgcaccaac

SEQ ID NO: 40777 - RNA, 20 nt, synthetic construct
  source 1..20: mol_type = other RNA
gctgtccccaccgccttcct

SEQ ID NO: 40778 - RNA, 20 nt, synthetic construct
  source 1..20: mol_type = other RNA
gctgtccttctcgtgtgagc

SEQ ID NO: 40779 - RNA, 20 nt, synthetic construct
  source 1..20: mol_type = other RNA
gctgtcgctctcctgtgcca

SEQ ID NO: 40780 - RNA, 20 nt, synthetic construct
  source 1..20: mol_type = other RNA
gctgtcggttttctagttag

SEQ ID NO: 40781 - RNA, 20 nt, synthetic construct
  source 1..20: mol_type = other RNA
gctgtcgtttatgcatttat

SEQ ID NO: 40782 - RNA, 20 nt, synthetic construct
  source 1..20: mol_type = other RNA
gctgtctataggcaatgagt

SEQ ID NO: 40783 - RNA, 20 nt, synthetic construct
  source 1..20: mol_type = other RNA
gctgtctccaacgcttttta

SEQ ID NO: 40784 - RNA, 20 nt, synthetic construct
  source 1..20: mol_type = other RNA
gctgtctggattgattccag

SEQ ID NO: 40785 - RNA, 20 nt, synthetic construct
  source 1..20: mol_type = other RNA
gctgtctttaatgtaaaaat

SEQ ID NO: 40786 - RNA, 20 nt, synthetic construct
  source 1..20: mol_type = other RNA
gctgtgaatgtgaggtgagg

SEQ ID NO: 40787 - RNA, 20 nt, synthetic construct
  source 1..20: mol_type = other RNA
gctgtgaatttggatttgag

SEQ ID NO: 40788 - RNA, 20 nt, synthetic construct
  source 1..20: mol_type = other RNA
gctgtgagtccttccagtat

SEQ ID NO: 40789 - RNA, 20 nt, synthetic construct
  source 1..20: mol_type = other RNA
gctgtgattaccggcatccg

SEQ ID NO: 40790 - RNA, 20 nt, synthetic construct
  source 1..20: mol_type = other RNA
gctgtgattgcaggtgtggg

SEQ ID NO: 40791 - RNA, 20 nt, synthetic construct
  source 1..20: mol_type = other RNA
gctgtgccaactctggcagg

SEQ ID NO: 40792 - RNA, 20 nt, synthetic construct
  source 1..20: mol_type = other RNA
gctgtgccagtgcaaacctc

SEQ ID NO: 40793 - RNA, 20 nt, synthetic construct
  source 1..20: mol_type = other RNA
gctgtgccgaggcagagaga

SEQ ID NO: 40794 - RNA, 20 nt, synthetic construct
  source 1..20: mol_type = other RNA
gctgtggaagcacagtctct

SEQ ID NO: 40795 - RNA, 20 nt, synthetic construct
  source 1..20: mol_type = other RNA
gctgtggatgttggtgagaa

SEQ ID NO: 40796 - RNA, 20 nt, synthetic construct
  source 1..20: mol_type = other RNA
gctgtggccgagggagacgg

SEQ ID NO: 40797 - RNA, 20 nt, synthetic construct
  source 1..20: mol_type = other RNA
gctgtggctaacaatcaaat

SEQ ID NO: 40798 - RNA, 20 nt, synthetic construct
  source 1..20: mol_type = other RNA
gctgtggctcactcatttcc

SEQ ID NO: 40799 - RNA, 20 nt, synthetic construct
  source 1..20: mol_type = other RNA
gctgtggcttgggtgacctc

SEQ ID NO: 40800 - RNA, 20 nt, synthetic construct
  source 1..20: mol_type = other RNA
gctgttaatggttagactgc

SEQ ID NO: 40801 - RNA, 20 nt, synthetic construct
  source 1..20: mol_type = other RNA
gctgttaccatttgaccttc

SEQ ID NO: 40802 - RNA, 20 nt, synthetic construct
  source 1..20: mol_type = other RNA
gctgttagccttgccattct

SEQ ID NO: 40803 - RNA, 20 nt, synthetic construct
  source 1..20: mol_type = other RNA
gctgttaggtattattttca

SEQ ID NO: 40804 - RNA, 20 nt, synthetic construct
  source 1..20: mol_type = other RNA
gctgttattagagttgtaac

SEQ ID NO: 40805 - RNA, 20 nt, synthetic construct
  source 1..20: mol_type = other RNA
gctgttcaatttagaaaatg

SEQ ID NO: 40806 - RNA, 20 nt, synthetic construct
  source 1..20: mol_type = other RNA
gctgttcccaagcaagtgtg

SEQ ID NO: 40807 - RNA, 20 nt, synthetic construct
  source 1..20: mol_type = other RNA
gctgttcccagataacagtg

SEQ ID NO: 40808 - RNA, 20 nt, synthetic construct
  source 1..20: mol_type = other RNA
gctgttctctgtgtggtttg

SEQ ID NO: 40809 - RNA, 20 nt, synthetic construct
  source 1..20: mol_type = other RNA
gctgttgaattgttgcgcgt

SEQ ID NO: 40810 - RNA, 20 nt, synthetic construct
  source 1..20: mol_type = other RNA
gctgttgaggctgggccctg

SEQ ID NO: 40811 - RNA, 20 nt, synthetic construct
  source 1..20: mol_type = other RNA
gctgttgatggacgtttgag

SEQ ID NO: 40812 - RNA, 20 nt, synthetic construct
  source 1..20: mol_type = other RNA
gctgttgtaatgttacttct

SEQ ID NO: 40813 - RNA, 20 nt, synthetic construct
  source 1..20: mol_type = other RNA
gctgttgtattttacaccat

SEQ ID NO: 40814 - RNA, 20 nt, synthetic construct
  source 1..20: mol_type = other RNA
gctgtttacattagagaaga

SEQ ID NO: 40815 - RNA, 20 nt, synthetic construct
  source 1..20: mol_type = other RNA
gctgtttaccaagggtgtgt

SEQ ID NO: 40816 - RNA, 20 nt, synthetic construct
  source 1..20: mol_type = other RNA
gctgtttgagatctttctta

SEQ ID NO: 40817 - RNA, 20 nt, synthetic construct
  source 1..20: mol_type = other RNA
gctgtttgagctgaaagtaa

SEQ ID NO: 40818 - RNA, 20 nt, synthetic construct
  source 1..20: mol_type = other RNA
gctgtttgcctgcgtccgta

SEQ ID NO: 40819 - RNA, 20 nt, synthetic construct
  source 1..20: mol_type = other RNA
gctgttttcatgcgacatat

SEQ ID NO: 40820 - RNA, 20 nt, synthetic construct
  source 1..20: mol_type = other RNA
gctgttttgcttactgtagc

SEQ ID NO: 40821 - RNA, 20 nt, synthetic construct
  source 1..20: mol_type = other RNA
gctgttttggtaaaatgtgg

SEQ ID NO: 40822 - RNA, 20 nt, synthetic construct
  source 1..20: mol_type = other RNA
gctgtttttgaaaagaacaa

SEQ ID NO: 40823 - RNA, 20 nt, synthetic construct
  source 1..20: mol_type = other RNA
gcttaaaattcttccagcct

SEQ ID NO: 40824 - RNA, 20 nt, synthetic construct
  source 1..20: mol_type = other RNA
gcttaaagcctctcaacact

SEQ ID NO: 40825 - RNA, 20 nt, synthetic construct
  source 1..20: mol_type = other RNA
gcttaaagcgctactcagct

SEQ ID NO: 40826 - RNA, 20 nt, synthetic construct
  source 1..20: mol_type = other RNA
gcttaaagttggtcctgcat

SEQ ID NO: 40827 - RNA, 20 nt, synthetic construct
  source 1..20: mol_type = other RNA
gcttaacaagaatcctgcta

SEQ ID NO: 40828 - RNA, 20 nt, synthetic construct
  source 1..20: mol_type = other RNA
gcttaacacctttgtattca

SEQ ID NO: 40829 - RNA, 20 nt, synthetic construct
  source 1..20: mol_type = other RNA
gcttaacatttgaactcact

SEQ ID NO: 40830 - RNA, 20 nt, synthetic construct
  source 1..20: mol_type = other RNA
gcttaagagctaagactata

SEQ ID NO: 40831 - RNA, 20 nt, synthetic construct
  source 1..20: mol_type = other RNA
gcttaaggaaataaatatgt

SEQ ID NO: 40832 - RNA, 20 nt, synthetic construct
  source 1..20: mol_type = other RNA
gcttaaggaaatggacagca

SEQ ID NO: 40833 - RNA, 20 nt, synthetic construct
  source 1..20: mol_type = other RNA
gcttaagtcactccatttgt

SEQ ID NO: 40834 - RNA, 20 nt, synthetic construct
  source 1..20: mol_type = other RNA
gcttaatctgatttttagtg

SEQ ID NO: 40835 - RNA, 20 nt, synthetic construct
  source 1..20: mol_type = other RNA
gcttaatcttcacacttagt

SEQ ID NO: 40836 - RNA, 20 nt, synthetic construct
  source 1..20: mol_type = other RNA
gcttaatgcatataaaaaca

SEQ ID NO: 40837 - RNA, 20 nt, synthetic construct
  source 1..20: mol_type = other RNA
gcttaattcaaacaaatcat

SEQ ID NO: 40838 - RNA, 20 nt, synthetic construct
  source 1..20: mol_type = other RNA
gcttaattgagctgtcccca

SEQ ID NO: 40839 - RNA, 20 nt, synthetic construct
  source 1..20: mol_type = other RNA
gcttaatttagatgagagtg

SEQ ID NO: 40840 - RNA, 20 nt, synthetic construct
  source 1..20: mol_type = other RNA
gcttacacacacgtttatat

SEQ ID NO: 40841 - RNA, 20 nt, synthetic construct
  source 1..20: mol_type = other RNA
gcttacagactgattaattt

SEQ ID NO: 40842 - RNA, 20 nt, synthetic construct
  source 1..20: mol_type = other RNA
gcttacagcagatctgcttg

SEQ ID NO: 40843 - RNA, 20 nt, synthetic construct
  source 1..20: mol_type = other RNA
gcttacagtcatcacagtcc

SEQ ID NO: 40844 - RNA, 20 nt, synthetic construct
  source 1..20: mol_type = other RNA
gcttaccaagtgccgcgttt

SEQ ID NO: 40845 - RNA, 20 nt, synthetic construct
  source 1..20: mol_type = other RNA
gcttactctaatggggaaat

SEQ ID NO: 40846 - RNA, 20 nt, synthetic construct
  source 1..20: mol_type = other RNA
gcttactgcaacctccgttt

SEQ ID NO: 40847 - RNA, 20 nt, synthetic construct
  source 1..20: mol_type = other RNA
gcttactgtagcattgaagt

SEQ ID NO: 40848 - RNA, 20 nt, synthetic construct
  source 1..20: mol_type = other RNA
gcttagaaatgaagatggcc

SEQ ID NO: 40849 - RNA, 20 nt, synthetic construct
  source 1..20: mol_type = other RNA
gcttagaagaagacttagga

SEQ ID NO: 40850 - RNA, 20 nt, synthetic construct
  source 1..20: mol_type = other RNA
gcttagataggatgggcaga

SEQ ID NO: 40851 - RNA, 20 nt, synthetic construct
  source 1..20: mol_type = other RNA
gcttagatgagcccaggagt

SEQ ID NO: 40852 - RNA, 20 nt, synthetic construct
  source 1..20: mol_type = other RNA
gcttagccttccagagacaa

SEQ ID NO: 40853 - RNA, 20 nt, synthetic construct
  source 1..20: mol_type = other RNA
gcttagcgctggaggtcggg

SEQ ID NO: 40854 - RNA, 20 nt, synthetic construct
  source 1..20: mol_type = other RNA
gcttagctgcctcttcctgt

SEQ ID NO: 40855 - RNA, 20 nt, synthetic construct
  source 1..20: mol_type = other RNA
gcttaggatcaccaaagact

SEQ ID NO: 40856 - RNA, 20 nt, synthetic construct
  source 1..20: mol_type = other RNA
gcttaggatcccagtccttt

SEQ ID NO: 40857 - RNA, 20 nt, synthetic construct
  source 1..20: mol_type = other RNA
gcttaggctgaagcaggctt

SEQ ID NO: 40858 - RNA, 20 nt, synthetic construct
  source 1..20: mol_type = other RNA
gcttaggctgttattagagt

SEQ ID NO: 40859 - RNA, 20 nt, synthetic construct
  source 1..20: mol_type = other RNA
gcttaggtaagaaaaattcc

SEQ ID NO: 40860 - RNA, 20 nt, synthetic construct
  source 1..20: mol_type = other RNA
gcttaggtcagattcctttt

SEQ ID NO: 40861 - RNA, 20 nt, synthetic construct
  source 1..20: mol_type = other RNA
gcttagtacagccatcaacc

SEQ ID NO: 40862 - RNA, 20 nt, synthetic construct
  source 1..20: mol_type = other RNA
gcttagtcttctcagatctg

SEQ ID NO: 40863 - RNA, 20 nt, synthetic construct
  source 1..20: mol_type = other RNA
gcttataacaagaaaatctg

SEQ ID NO: 40864 - RNA, 20 nt, synthetic construct
  source 1..20: mol_type = other RNA
gcttataatttctgagagta

SEQ ID NO: 40865 - RNA, 20 nt, synthetic construct
  source 1..20: mol_type = other RNA
gcttatcagatggtgatacc

SEQ ID NO: 40866 - RNA, 20 nt, synthetic construct
  source 1..20: mol_type = other RNA
gcttatcaggcttgagtctg

SEQ ID NO: 40867 - RNA, 20 nt, synthetic construct
  source 1..20: mol_type = other RNA
gcttatgatcttgggaatac

SEQ ID NO: 40868 - RNA, 20 nt, synthetic construct
  source 1..20: mol_type = other RNA
gcttatgtcttgtggctgac

SEQ ID NO: 40869 - RNA, 20 nt, synthetic construct
  source 1..20: mol_type = other RNA
gcttattaaaatgaacctgc

SEQ ID NO: 40870 - RNA, 20 nt, synthetic construct
  source 1..20: mol_type = other RNA
gcttattatatgcctagatt

SEQ ID NO: 40871 - RNA, 20 nt, synthetic construct
  source 1..20: mol_type = other RNA
gcttattctttttctagttt

SEQ ID NO: 40872 - RNA, 20 nt, synthetic construct
  source 1..20: mol_type = other RNA
gcttcaaaccactatctaat

SEQ ID NO: 40873 - RNA, 20 nt, synthetic construct
  source 1..20: mol_type = other RNA
gcttcaaagagaacaaaata

SEQ ID NO: 40874 - RNA, 20 nt, synthetic construct
  source 1..20: mol_type = other RNA
gcttcaacctcctgggctca

SEQ ID NO: 40875 - RNA, 20 nt, synthetic construct
  source 1..20: mol_type = other RNA
gcttcaatatgcagtatgtg

SEQ ID NO: 40876 - RNA, 20 nt, synthetic construct
  source 1..20: mol_type = other RNA
gcttcaatgagggcagagat

SEQ ID NO: 40877 - RNA, 20 nt, synthetic construct
  source 1..20: mol_type = other RNA
gcttcacgtgcattcatact

SEQ ID NO: 40878 - RNA, 20 nt, synthetic construct
  source 1..20: mol_type = other RNA
gcttcactaactttaaattt

SEQ ID NO: 40879 - RNA, 20 nt, synthetic construct
  source 1..20: mol_type = other RNA
gcttcactcttctgcaagtt

SEQ ID NO: 40880 - RNA, 20 nt, synthetic construct
  source 1..20: mol_type = other RNA
gcttcacttctctgctgctg

SEQ ID NO: 40881 - RNA, 20 nt, synthetic construct
  source 1..20: mol_type = other RNA
gcttcactttcgtcatctat

SEQ ID NO: 40882 - RNA, 20 nt, synthetic construct
  source 1..20: mol_type = other RNA
gcttcagcctaagcaagtta

SEQ ID NO: 40883 - RNA, 20 nt, synthetic construct
  source 1..20: mol_type = other RNA
gcttcagtgccaacacatgg

SEQ ID NO: 40884 - RNA, 20 nt, synthetic construct
  source 1..20: mol_type = other RNA
gcttcagttggtgaagagag

SEQ ID NO: 40885 - RNA, 20 nt, synthetic construct
  source 1..20: mol_type = other RNA
gcttcataacattatatttc

SEQ ID NO: 40886 - RNA, 20 nt, synthetic construct
  source 1..20: mol_type = other RNA
gcttcatataagtggaatca

SEQ ID NO: 40887 - RNA, 20 nt, synthetic construct
  source 1..20: mol_type = other RNA
gcttcatattttgtgggaat

SEQ ID NO: 40888 - RNA, 20 nt, synthetic construct
  source 1..20: mol_type = other RNA
gcttcatctggaccagttac

SEQ ID NO: 40889 - RNA, 20 nt, synthetic construct
  source 1..20: mol_type = other RNA
gcttcatgctgggagaccag

SEQ ID NO: 40890 - RNA, 20 nt, synthetic construct
  source 1..20: mol_type = other RNA
gcttcatgggtggaaattaa

SEQ ID NO: 40891 - RNA, 20 nt, synthetic construct
  source 1..20: mol_type = other RNA
gcttcattccgcgtttatta

SEQ ID NO: 40892 - RNA, 20 nt, synthetic construct
  source 1..20: mol_type = other RNA
gcttccaaaagcaggccctg

SEQ ID NO: 40893 - RNA, 20 nt, synthetic construct
  source 1..20: mol_type = other RNA
gcttccacagctatcaggcc

SEQ ID NO: 40894 - RNA, 20 nt, synthetic construct
  source 1..20: mol_type = other RNA
gcttccacatttctaatttc

SEQ ID NO: 40895 - RNA, 20 nt, synthetic construct
  source 1..20: mol_type = other RNA
gcttccacccaagtggagcc

SEQ ID NO: 40896 - RNA, 20 nt, synthetic construct
  source 1..20: mol_type = other RNA
gcttcccacttcgaaagttc

SEQ ID NO: 40897 - RNA, 20 nt, synthetic construct
  source 1..20: mol_type = other RNA
gcttcccccaaagaaggaaa

SEQ ID NO: 40898 - RNA, 20 nt, synthetic construct
  source 1..20: mol_type = other RNA
gcttcccccctctctctttc

SEQ ID NO: 40899 - RNA, 20 nt, synthetic construct
  source 1..20: mol_type = other RNA
gcttccctagcccagcactt

SEQ ID NO: 40900 - RNA, 20 nt, synthetic construct
  source 1..20: mol_type = other RNA
gcttccgggacttggaagtg

SEQ ID NO: 40901 - RNA, 20 nt, synthetic construct
  source 1..20: mol_type = other RNA
gcttcctaaacctgctacga

SEQ ID NO: 40902 - RNA, 20 nt, synthetic construct
  source 1..20: mol_type = other RNA
gcttcctaaagagagtgaca

SEQ ID NO: 40903 - RNA, 20 nt, synthetic construct
  source 1..20: mol_type = other RNA
gcttcctaactggtctcctt

SEQ ID NO: 40904 - RNA, 20 nt, synthetic construct
  source 1..20: mol_type = other RNA
gcttcctaagaaagggtgtg

SEQ ID NO: 40905 - RNA, 20 nt, synthetic construct
  source 1..20: mol_type = other RNA
gcttcctacccaagcttagg

SEQ ID NO: 40906 - RNA, 20 nt, synthetic construct
  source 1..20: mol_type = other RNA
gcttcctcaggatctacatt

SEQ ID NO: 40907 - RNA, 20 nt, synthetic construct
  source 1..20: mol_type = other RNA
gcttcctctggctgacctgg

SEQ ID NO: 40908 - RNA, 20 nt, synthetic construct
  source 1..20: mol_type = other RNA
gcttccttctcttatactag

SEQ ID NO: 40909 - RNA, 20 nt, synthetic construct
  source 1..20: mol_type = other RNA
gcttccttgatcagcttcct

SEQ ID NO: 40910 - RNA, 20 nt, synthetic construct
  source 1..20: mol_type = other RNA
gcttccttgctatgtaatct

SEQ ID NO: 40911 - RNA, 20 nt, synthetic construct
  source 1..20: mol_type = other RNA
gcttcgaagcaaaacatatg

SEQ ID NO: 40912 - RNA, 20 nt, synthetic construct
  source 1..20: mol_type = other RNA
gcttcgaagcttattaaaat

SEQ ID NO: 40913 - RNA, 20 nt, synthetic construct
  source 1..20: mol_type = other RNA
gcttcgacagtcccttgcct

SEQ ID NO: 40914 - RNA, 20 nt, synthetic construct
  source 1..20: mol_type = other RNA
gcttcgaggtcgcaccctga

SEQ ID NO: 40915 - RNA, 20 nt, synthetic construct
  source 1..20: mol_type = other RNA
gcttcgagttctgggagttc

SEQ ID NO: 40916 - RNA, 20 nt, synthetic construct
  source 1..20: mol_type = other RNA
gcttcgcctttctcgcagcg

SEQ ID NO: 40917 - RNA, 20 nt, synthetic construct
  source 1..20: mol_type = other RNA
gcttcgcctttgttgccagg

SEQ ID NO: 40918 - RNA, 20 nt, synthetic construct
  source 1..20: mol_type = other RNA
gcttctacccactattgaaa

SEQ ID NO: 40919 - RNA, 20 nt, synthetic construct
  source 1..20: mol_type = other RNA
gcttctagccaaagcaagcc

SEQ ID NO: 40920 - RNA, 20 nt, synthetic construct
  source 1..20: mol_type = other RNA
gcttctagtaacttggtcga

SEQ ID NO: 40921 - RNA, 20 nt, synthetic construct
  source 1..20: mol_type = other RNA
gcttctatgtgacaaacact

SEQ ID NO: 40922 - RNA, 20 nt, synthetic construct
  source 1..20: mol_type = other RNA
gcttctcaaactgtgtgctt

SEQ ID NO: 40923 - RNA, 20 nt, synthetic construct
  source 1..20: mol_type = other RNA
gcttctcaataaggaaagca

SEQ ID NO: 40924 - RNA, 20 nt, synthetic construct
  source 1..20: mol_type = other RNA
gcttctgaaggtgcctgcca

SEQ ID NO: 40925 - RNA, 20 nt, synthetic construct
  source 1..20: mol_type = other RNA
gcttctgaattgagatgtac

SEQ ID NO: 40926 - RNA, 20 nt, synthetic construct
  source 1..20: mol_type = other RNA
gcttctgagcagtgtttcct

SEQ ID NO: 40927 - RNA, 20 nt, synthetic construct
  source 1..20: mol_type = other RNA
gcttctgagctgttaatggt

SEQ ID NO: 40928 - RNA, 20 nt, synthetic construct
  source 1..20: mol_type = other RNA
gcttctgataggaatatcgt

SEQ ID NO: 40929 - RNA, 20 nt, synthetic construct
  source 1..20: mol_type = other RNA
gcttcttgttagaattttgc

SEQ ID NO: 40930 - RNA, 20 nt, synthetic construct
  source 1..20: mol_type = other RNA
gcttgaacaaatatgaatga

SEQ ID NO: 40931 - RNA, 20 nt, synthetic construct
  source 1..20: mol_type = other RNA
gcttgaacccgaggtgcaca

SEQ ID NO: 40932 - RNA, 20 nt, synthetic construct
  source 1..20: mol_type = other RNA
gcttgaacctgaaaaacgga

SEQ ID NO: 40933 - RNA, 20 nt, synthetic construct
  source 1..20: mol_type = other RNA
gcttgaactgctggtctgga

SEQ ID NO: 40934 - RNA, 20 nt, synthetic construct
  source 1..20: mol_type = other RNA
gcttgaagagcgcttctatg

SEQ ID NO: 40935 - RNA, 20 nt, synthetic construct
  source 1..20: mol_type = other RNA
gcttgaatgtgcctacatag

SEQ ID NO: 40936 - RNA, 20 nt, synthetic construct
  source 1..20: mol_type = other RNA
gcttgacaaaaggccccttg

SEQ ID NO: 40937 - RNA, 20 nt, synthetic construct
  source 1..20: mol_type = other RNA
gcttgacattcttaccttct

SEQ ID NO: 40938 - RNA, 20 nt, synthetic construct
  source 1..20: mol_type = other RNA
gcttgagagagataaaacct

SEQ ID NO: 40939 - RNA, 20 nt, synthetic construct
  source 1..20: mol_type = other RNA
gcttgagcccagggggtcga

SEQ ID NO: 40940 - RNA, 20 nt, synthetic construct
  source 1..20: mol_type = other RNA
gcttgaggccacgagttcag

SEQ ID NO: 40941 - RNA, 20 nt, synthetic construct
  source 1..20: mol_type = other RNA
gcttgagtctgtgctctgta

SEQ ID NO: 40942 - RNA, 20 nt, synthetic construct
  source 1..20: mol_type = other RNA
gcttgagtgcaggagtttga

SEQ ID NO: 40943 - RNA, 20 nt, synthetic construct
  source 1..20: mol_type = other RNA
gcttgatctagtaaatataa

SEQ ID NO: 40944 - RNA, 20 nt, synthetic construct
  source 1..20: mol_type = other RNA
gcttgatctttacttccctt

SEQ ID NO: 40945 - RNA, 20 nt, synthetic construct
  source 1..20: mol_type = other RNA
gcttgattagcttcctcagg

SEQ ID NO: 40946 - RNA, 20 nt, synthetic construct
  source 1..20: mol_type = other RNA
gcttgcaaggcccaccatga

SEQ ID NO: 40947 - RNA, 20 nt, synthetic construct
  source 1..20: mol_type = other RNA
gcttgcagacaataattctt

SEQ ID NO: 40948 - RNA, 20 nt, synthetic construct
  source 1..20: mol_type = other RNA
gcttgcagccttccctgaac

SEQ ID NO: 40949 - RNA, 20 nt, synthetic construct
  source 1..20: mol_type = other RNA
gcttgctagtagcagaatcc

SEQ ID NO: 40950 - RNA, 20 nt, synthetic construct
  source 1..20: mol_type = other RNA
gcttgctccagagaagtttt

SEQ ID NO: 40951 - RNA, 20 nt, synthetic construct
  source 1..20: mol_type = other RNA
gcttgctctacaaaccttct

SEQ ID NO: 40952 - RNA, 20 nt, synthetic construct
  source 1..20: mol_type = other RNA
gcttgctctgcggcaggcat

SEQ ID NO: 40953 - RNA, 20 nt, synthetic construct
  source 1..20: mol_type = other RNA
gcttgctgcactggctatta

SEQ ID NO: 40954 - RNA, 20 nt, synthetic construct
  source 1..20: mol_type = other RNA
gcttgctttggctagaagca

SEQ ID NO: 40955 - RNA, 20 nt, synthetic construct
  source 1..20: mol_type = other RNA
gcttggaaaacaaattgcat

SEQ ID NO: 40956 - RNA, 20 nt, synthetic construct
  source 1..20: mol_type = other RNA
gcttggagtcacttgacaaa

SEQ ID NO: 40957 - RNA, 20 nt, synthetic construct
  source 1..20: mol_type = other RNA
gcttggatattctacagaaa

SEQ ID NO: 40958 - RNA, 20 nt, synthetic construct
  source 1..20: mol_type = other RNA
gcttggcacagaattattga

SEQ ID NO: 40959 - RNA, 20 nt, synthetic construct
  source 1..20: mol_type = other RNA
gcttggccaacatggcgaaa

SEQ ID NO: 40960 - RNA, 20 nt, synthetic construct
  source 1..20: mol_type = other RNA
gcttggcgcagtgcttagcg

SEQ ID NO: 40961 - RNA, 20 nt, synthetic construct
  source 1..20: mol_type = other RNA
gcttgggaacagcaggggaa

SEQ ID NO: 40962 - RNA, 20 nt, synthetic construct
  source 1..20: mol_type = other RNA
gcttgggcaagagagcaagt

SEQ ID NO: 40963 - RNA, 20 nt, synthetic construct
  source 1..20: mol_type = other RNA
gcttgggctaaggtggagtg

SEQ ID NO: 40964 - RNA, 20 nt, synthetic construct
  source 1..20: mol_type = other RNA
gcttgggctcccttccagcg

SEQ ID NO: 40965 - RNA, 20 nt, synthetic construct
  source 1..20: mol_type = other RNA
gcttggggaacagtttagca

SEQ ID NO: 40966 - RNA, 20 nt, synthetic construct
  source 1..20: mol_type = other RNA
gcttgggtaggaagctgatc

SEQ ID NO: 40967 - RNA, 20 nt, synthetic construct
  source 1..20: mol_type = other RNA
gcttgggtgacctcatgtaa

SEQ ID NO: 40968 - RNA, 20 nt, synthetic construct
  source 1..20: mol_type = other RNA
gcttggtatgcatcttgaac

SEQ ID NO: 40969 - RNA, 20 nt, synthetic construct
  source 1..20: mol_type = other RNA
gcttggtggcccacacctgc

SEQ ID NO: 40970 - RNA, 20 nt, synthetic construct
  source 1..20: mol_type = other RNA
gcttggtgttgactgaatta

SEQ ID NO: 40971 - RNA, 20 nt, synthetic construct
  source 1..20: mol_type = other RNA
gcttggttggaaaagaaagc

SEQ ID NO: 40972 - RNA, 20 nt, synthetic construct
  source 1..20: mol_type = other RNA
gcttggtttcacacgcattg

SEQ ID NO: 40973 - RNA, 20 nt, synthetic construct
  source 1..20: mol_type = other RNA
gcttgtctctctctttctct

SEQ ID NO: 40974 - RNA, 20 nt, synthetic construct
  source 1..20: mol_type = other RNA
gcttgtcttgaatagcatct

SEQ ID NO: 40975 - RNA, 20 nt, synthetic construct
  source 1..20: mol_type = other RNA
gcttgtgacatcaagggtgg

SEQ ID NO: 40976 - RNA, 20 nt, synthetic construct
  source 1..20: mol_type = other RNA
gcttgtgcatcagaattcca

SEQ ID NO: 40977 - RNA, 20 nt, synthetic construct
  source 1..20: mol_type = other RNA
gcttgtgcttttaatacttt

SEQ ID NO: 40978 - RNA, 20 nt, synthetic construct
  source 1..20: mol_type = other RNA
gcttgtggctacaccctggg

SEQ ID NO: 40979 - RNA, 20 nt, synthetic construct
  source 1..20: mol_type = other RNA
gctttaaaacactggcaaaa

SEQ ID NO: 40980 - RNA, 20 nt, synthetic construct
  source 1..20: mol_type = other RNA
gctttaaactggatgaatac

SEQ ID NO: 40981 - RNA, 20 nt, synthetic construct
  source 1..20: mol_type = other RNA
gctttaaagagaaatagtta

SEQ ID NO: 40982 - RNA, 20 nt, synthetic construct
  source 1..20: mol_type = other RNA
gctttaacctctggtatttt

SEQ ID NO: 40983 - RNA, 20 nt, synthetic construct
  source 1..20: mol_type = other RNA
gctttaagcagaaagttact

SEQ ID NO: 40984 - RNA, 20 nt, synthetic construct
  source 1..20: mol_type = other RNA
gctttaagcatcccatatgg

SEQ ID NO: 40985 - RNA, 20 nt, synthetic construct
  source 1..20: mol_type = other RNA
gctttaaggcgcagacacac

SEQ ID NO: 40986 - RNA, 20 nt, synthetic construct
  source 1..20: mol_type = other RNA
gctttactactgcatttttt

SEQ ID NO: 40987 - RNA, 20 nt, synthetic construct
  source 1..20: mol_type = other RNA
gctttactgtattaggatgt

SEQ ID NO: 40988 - RNA, 20 nt, synthetic construct
  source 1..20: mol_type = other RNA
gctttagatggtaaaacaaa

SEQ ID NO: 40989 - RNA, 20 nt, synthetic construct
  source 1..20: mol_type = other RNA
gctttagatttatcaatagc

SEQ ID NO: 40990 - RNA, 20 nt, synthetic construct
  source 1..20: mol_type = other RNA
gctttatgagacacacgagt

SEQ ID NO: 40991 - RNA, 20 nt, synthetic construct
  source 1..20: mol_type = other RNA
gctttattacttcagttttt

SEQ ID NO: 40992 - RNA, 20 nt, synthetic construct
  source 1..20: mol_type = other RNA
gctttcaatagtgggtagaa

SEQ ID NO: 40993 - RNA, 20 nt, synthetic construct
  source 1..20: mol_type = other RNA
gctttcagacttaactatag

SEQ ID NO: 40994 - RNA, 20 nt, synthetic construct
  source 1..20: mol_type = other RNA
gctttcagcactgctattga

SEQ ID NO: 40995 - RNA, 20 nt, synthetic construct
  source 1..20: mol_type = other RNA
gctttcagttctttcggata

SEQ ID NO: 40996 - RNA, 20 nt, synthetic construct
  source 1..20: mol_type = other RNA
gctttcattattaccaggtt

SEQ ID NO: 40997 - RNA, 20 nt, synthetic construct
  source 1..20: mol_type = other RNA
gctttcccagggtgtagcca

SEQ ID NO: 40998 - RNA, 20 nt, synthetic construct
  source 1..20: mol_type = other RNA
gctttcctcatgtccatagt

SEQ ID NO: 40999 - RNA, 20 nt, synthetic construct
  source 1..20: mol_type = other RNA
gctttccttagttcgaagtt

SEQ ID NO: 41000 - RNA, 20 nt, synthetic construct
  source 1..20: mol_type = other RNA
gctttccttattgagaagca

SEQ ID NO: 41001 - RNA, 20 nt, synthetic construct
  source 1..20: mol_type = other RNA
gctttcgtatggaagatggg

SEQ ID NO: 41002 - RNA, 20 nt, synthetic construct
  source 1..20: mol_type = other RNA
gctttcgtgagggtttcagt

SEQ ID NO: 41003 - RNA, 20 nt, synthetic construct
  source 1..20: mol_type = other RNA
gctttctaattctgacaact

SEQ ID NO: 41004 - RNA, 20 nt, synthetic construct
  source 1..20: mol_type = other RNA
gctttctactagtataagag

SEQ ID NO: 41005 - RNA, 20 nt, synthetic construct
  source 1..20: mol_type = other RNA
gctttctatctctcagatct

SEQ ID NO: 41006 - RNA, 20 nt, synthetic construct
  source 1..20: mol_type = other RNA
gctttctcaacactgtgttc

SEQ ID NO: 41007 - RNA, 20 nt, synthetic construct
  source 1..20: mol_type = other RNA
gctttctccaggggcggccc

SEQ ID NO: 41008 - RNA, 20 nt, synthetic construct
  source 1..20: mol_type = other RNA
gctttctcccagctgtccaa

SEQ ID NO: 41009 - RNA, 20 nt, synthetic construct
  source 1..20: mol_type = other RNA
gctttctctagttgcacggt

SEQ ID NO: 41010 - RNA, 20 nt, synthetic construct
  source 1..20: mol_type = other RNA
gctttctgtgtaatactgta

SEQ ID NO: 41011 - RNA, 20 nt, synthetic construct
  source 1..20: mol_type = other RNA
gctttcttggggctctaatg

SEQ ID NO: 41012 - RNA, 20 nt, synthetic construct
  source 1..20: mol_type = other RNA
gctttcttttaaagacctca

SEQ ID NO: 41013 - RNA, 20 nt, synthetic construct
  source 1..20: mol_type = other RNA
gctttcttttccaaccaagc

SEQ ID NO: 41014 - RNA, 20 nt, synthetic construct
  source 1..20: mol_type = other RNA
gctttgaatttggaaagggt

SEQ ID NO: 41015 - RNA, 20 nt, synthetic construct
  source 1..20: mol_type = other RNA
gctttgacttctcagggcct

SEQ ID NO: 41016 - RNA, 20 nt, synthetic construct
  source 1..20: mol_type = other RNA
gctttgagaaaggtttcttc

SEQ ID NO: 41017 - RNA, 20 nt, synthetic construct
  source 1..20: mol_type = other RNA
gctttgagctacaaactcca

SEQ ID NO: 41018 - RNA, 20 nt, synthetic construct
  source 1..20: mol_type = other RNA
gctttgatgcccccaccctt

SEQ ID NO: 41019 - RNA, 20 nt, synthetic construct
  source 1..20: mol_type = other RNA
gctttgcgaaatagtagttg

SEQ ID NO: 41020 - RNA, 20 nt, synthetic construct
  source 1..20: mol_type = other RNA
gctttgctgccccagctaaa

SEQ ID NO: 41021 - RNA, 20 nt, synthetic construct
  source 1..20: mol_type = other RNA
gctttggagtcacagtgaat

SEQ ID NO: 41022 - RNA, 20 nt, synthetic construct
  source 1..20: mol_type = other RNA
gctttggagtgagaggactg

SEQ ID NO: 41023 - RNA, 20 nt, synthetic construct
  source 1..20: mol_type = other RNA
gctttggctagaagcatctg

SEQ ID NO: 41024 - RNA, 20 nt, synthetic construct
  source 1..20: mol_type = other RNA
gctttggctgaaatgctgta

SEQ ID NO: 41025 - RNA, 20 nt, synthetic construct
  source 1..20: mol_type = other RNA
gctttgggtctatagtttaa

SEQ ID NO: 41026 - RNA, 20 nt, synthetic construct
  source 1..20: mol_type = other RNA
gctttgtctctggaaggcta

SEQ ID NO: 41027 - RNA, 20 nt, synthetic construct
  source 1..20: mol_type = other RNA
gctttgtgaagggaggtagg

SEQ ID NO: 41028 - RNA, 20 nt, synthetic construct
  source 1..20: mol_type = other RNA
gctttgtgactgtgagggta

SEQ ID NO: 41029 - RNA, 20 nt, synthetic construct
  source 1..20: mol_type = other RNA
gctttgtggagtggaggggc

SEQ ID NO: 41030 - RNA, 20 nt, synthetic construct
  source 1..20: mol_type = other RNA
gctttgtgttggtgtttctg

SEQ ID NO: 41031 - RNA, 20 nt, synthetic construct
  source 1..20: mol_type = other RNA
gctttgttatgaaaatagta

SEQ ID NO: 41032 - RNA, 20 nt, synthetic construct
  source 1..20: mol_type = other RNA
gcttttaatactttcacact

SEQ ID NO: 41033 - RNA, 20 nt, synthetic construct
  source 1..20: mol_type = other RNA
gcttttacgaggacagactg

SEQ ID NO: 41034 - RNA, 20 nt, synthetic construct
  source 1..20: mol_type = other RNA
gcttttacttggctcctccc

SEQ ID NO: 41035 - RNA, 20 nt, synthetic construct
  source 1..20: mol_type = other RNA
gcttttatgttataatgaga

SEQ ID NO: 41036 - RNA, 20 nt, synthetic construct
  source 1..20: mol_type = other RNA
gcttttattagagctttaaa

SEQ ID NO: 41037 - RNA, 20 nt, synthetic construct
  source 1..20: mol_type = other RNA
gcttttattggtaatgttat

SEQ ID NO: 41038 - RNA, 20 nt, synthetic construct
  source 1..20: mol_type = other RNA
gcttttatttgtcataaaca

SEQ ID NO: 41039 - RNA, 20 nt, synthetic construct
  source 1..20: mol_type = other RNA
gcttttattttactctcttt

SEQ ID NO: 41040 - RNA, 20 nt, synthetic construct
  source 1..20: mol_type = other RNA
gcttttcatagtcatcatta

SEQ ID NO: 41041 - RNA, 20 nt, synthetic construct
  source 1..20: mol_type = other RNA
gcttttcatatacagatttt

SEQ ID NO: 41042 - RNA, 20 nt, synthetic construct
  source 1..20: mol_type = other RNA
gcttttcatatacgtattta

SEQ ID NO: 41043 - RNA, 20 nt, synthetic construct
  source 1..20: mol_type = other RNA
gcttttcctgctgtcgttta

SEQ ID NO: 41044 - RNA, 20 nt, synthetic construct
  source 1..20: mol_type = other RNA
gcttttcctggaaaacttct

SEQ ID NO: 41045 - RNA, 20 nt, synthetic construct
  source 1..20: mol_type = other RNA
gcttttctcctaagtcttct

SEQ ID NO: 41046 - RNA, 20 nt, synthetic construct
  source 1..20: mol_type = other RNA
gcttttctcgtgcatgtctg

SEQ ID NO: 41047 - RNA, 20 nt, synthetic construct
  source 1..20: mol_type = other RNA
gcttttgaaactgagcatcc

SEQ ID NO: 41048 - RNA, 20 nt, synthetic construct
  source 1..20: mol_type = other RNA
gcttttgaacactctgcaat

SEQ ID NO: 41049 - RNA, 20 nt, synthetic construct
  source 1..20: mol_type = other RNA
gcttttgagtgtaaggtgtt

SEQ ID NO: 41050 - RNA, 20 nt, synthetic construct
  source 1..20: mol_type = other RNA
gcttttgctgagggaatttt

SEQ ID NO: 41051 - RNA, 20 nt, synthetic construct
  source 1..20: mol_type = other RNA
gcttttgctgcatcccaagg

SEQ ID NO: 41052 - RNA, 20 nt, synthetic construct
  source 1..20: mol_type = other RNA
gcttttgctttgggtctata

SEQ ID NO: 41053 - RNA, 20 nt, synthetic construct
  source 1..20: mol_type = other RNA
gcttttggaagcatgtggcc

SEQ ID NO: 41054 - RNA, 20 nt, synthetic construct
  source 1..20: mol_type = other RNA
gcttttggagctataattta

SEQ ID NO: 41055 - RNA, 20 nt, synthetic construct
  source 1..20: mol_type = other RNA
gcttttggattttctttcta

SEQ ID NO: 41056 - RNA, 20 nt, synthetic construct
  source 1..20: mol_type = other RNA
gcttttggcagcgtaactcc

SEQ ID NO: 41057 - RNA, 20 nt, synthetic construct
  source 1..20: mol_type = other RNA
gctttttacccggagaggtg

SEQ ID NO: 41058 - RNA, 20 nt, synthetic construct
  source 1..20: mol_type = other RNA
gctttttacgatgaaattga

SEQ ID NO: 41059 - RNA, 20 nt, synthetic construct
  source 1..20: mol_type = other RNA
gctttttactttgcgaaaca

SEQ ID NO: 41060 - RNA, 20 nt, synthetic construct
  source 1..20: mol_type = other RNA
gctttttatatttccgatga

SEQ ID NO: 41061 - RNA, 20 nt, synthetic construct
  source 1..20: mol_type = other RNA
gctttttatggaaacatggt

SEQ ID NO: 41062 - RNA, 20 nt, synthetic construct
  source 1..20: mol_type = other RNA
gctttttctgcatcttttga

SEQ ID NO: 41063 - RNA, 20 nt, synthetic construct
  source 1..20: mol_type = other RNA
gctttttcttcttgttttgt

SEQ ID NO: 41064 - RNA, 20 nt, synthetic construct
  source 1..20: mol_type = other RNA
gctttttcttggtggtaact

SEQ ID NO: 41065 - RNA, 20 nt, synthetic construct
  source 1..20: mol_type = other RNA
gctttttctttttaaacagg

SEQ ID NO: 41066 - RNA, 20 nt, synthetic construct
  source 1..20: mol_type = other RNA
gctttttgtatcctgtttga

SEQ ID NO: 41067 - RNA, 20 nt, synthetic construct
  source 1..20: mol_type = other RNA
gcttttttggtgtttttcta

SEQ ID NO: 41068 - RNA, 20 nt, synthetic construct
  source 1..20: mol_type = other RNA
ggaaaaaacacctaaagata

SEQ ID NO: 41069 - RNA, 20 nt, synthetic construct
  source 1..20: mol_type = other RNA
ggaaaaaacagttgctattc

SEQ ID NO: 41070 - RNA, 20 nt, synthetic construct
  source 1..20: mol_type = other RNA
ggaaaaaacgggttatacac

SEQ ID NO: 41071 - RNA, 20 nt, synthetic construct
  source 1..20: mol_type = other RNA
ggaaaaacattctacagtat

SEQ ID NO: 41072 - RNA, 20 nt, synthetic construct
  source 1..20: mol_type = other RNA
ggaaaaactgcagcaattat

SEQ ID NO: 41073 - RNA, 20 nt, synthetic construct
  source 1..20: mol_type = other RNA
ggaaaaagaccataatatat

SEQ ID NO: 41074 - RNA, 20 nt, synthetic construct
  source 1..20: mol_type = other RNA
ggaaaaatataggaacatat

SEQ ID NO: 41075 - RNA, 20 nt, synthetic construct
  source 1..20: mol_type = other RNA
ggaaaaatcgtcctcttcgg

SEQ ID NO: 41076 - RNA, 20 nt, synthetic construct
  source 1..20: mol_type = other RNA
ggaaaaatctaaccctcaat

SEQ ID NO: 41077 - RNA, 20 nt, synthetic construct
  source 1..20: mol_type = other RNA
ggaaaaatgtccgttgaagt

SEQ ID NO: 41078 - RNA, 20 nt, synthetic construct
  source 1..20: mol_type = other RNA
ggaaaacaaattgcatcaac

SEQ ID NO: 41079 - RNA, 20 nt, synthetic construct
  source 1..20: mol_type = other RNA
ggaaaacaattacttgagag

SEQ ID NO: 41080 - RNA, 20 nt, synthetic construct
  source 1..20: mol_type = other RNA
ggaaaacacccttgaaaatt

SEQ ID NO: 41081 - RNA, 20 nt, synthetic construct
  source 1..20: mol_type = other RNA
ggaaaacattattttctttg

SEQ ID NO: 41082 - RNA, 20 nt, synthetic construct
  source 1..20: mol_type = other RNA
ggaaaaccagtttagaaaaa

SEQ ID NO: 41083 - RNA, 20 nt, synthetic construct
  source 1..20: mol_type = other RNA
ggaaaaccatgtcatgtata

SEQ ID NO: 41084 - RNA, 20 nt, synthetic construct
  source 1..20: mol_type = other RNA
ggaaaactacatgtaaaaac

SEQ ID NO: 41085 - RNA, 20 nt, synthetic construct
  source 1..20: mol_type = other RNA
ggaaaactagagatgggaaa

SEQ ID NO: 41086 - RNA, 20 nt, synthetic construct
  source 1..20: mol_type = other RNA
ggaaaactaggtatttgaaa

SEQ ID NO: 41087 - RNA, 20 nt, synthetic construct
  source 1..20: mol_type = other RNA
ggaaaactccaagtgtaaaa

SEQ ID NO: 41088 - RNA, 20 nt, synthetic construct
  source 1..20: mol_type = other RNA
ggaaaactctgtttccttac

SEQ ID NO: 41089 - RNA, 20 nt, synthetic construct
  source 1..20: mol_type = other RNA
ggaaaacttctctggagcaa

SEQ ID NO: 41090 - RNA, 20 nt, synthetic construct
  source 1..20: mol_type = other RNA
ggaaaacttttaactgaaat

SEQ ID NO: 41091 - RNA, 20 nt, synthetic construct
  source 1..20: mol_type = other RNA
ggaaaagaaagctgtggatg

SEQ ID NO: 41092 - RNA, 20 nt, synthetic construct
  source 1..20: mol_type = other RNA
ggaaaagaacacagtgttga

SEQ ID NO: 41093 - RNA, 20 nt, synthetic construct
  source 1..20: mol_type = other RNA
ggaaaagacttctcaaacag

SEQ ID NO: 41094 - RNA, 20 nt, synthetic construct
  source 1..20: mol_type = other RNA
ggaaaagacttgaggtttac

SEQ ID NO: 41095 - RNA, 20 nt, synthetic construct
  source 1..20: mol_type = other RNA
ggaaaagagaacattggttt

SEQ ID NO: 41096 - RNA, 20 nt, synthetic construct
  source 1..20: mol_type = other RNA
ggaaaagagatctagtgaag

SEQ ID NO: 41097 - RNA, 20 nt, synthetic construct
  source 1..20: mol_type = other RNA
ggaaaagcaaatgtcatctt

SEQ ID NO: 41098 - RNA, 20 nt, synthetic construct
  source 1..20: mol_type = other RNA
ggaaaagctaccctcgagta

SEQ ID NO: 41099 - RNA, 20 nt, synthetic construct
  source 1..20: mol_type = other RNA
ggaaaaggatttgtttgtga

SEQ ID NO: 41100 - RNA, 20 nt, synthetic construct
  source 1..20: mol_type = other RNA
ggaaaagtcagtaaaaaagg

SEQ ID NO: 41101 - RNA, 20 nt, synthetic construct
  source 1..20: mol_type = other RNA
ggaaaagtgttgactaccat

SEQ ID NO: 41102 - RNA, 20 nt, synthetic construct
  source 1..20: mol_type = other RNA
ggaaaataatttgcaacaga

SEQ ID NO: 41103 - RNA, 20 nt, synthetic construct
  source 1..20: mol_type = other RNA
ggaaaatacatgaggcctct

SEQ ID NO: 41104 - RNA, 20 nt, synthetic construct
  source 1..20: mol_type = other RNA
ggaaaatagagttccatctg

SEQ ID NO: 41105 - RNA, 20 nt, synthetic construct
  source 1..20: mol_type = other RNA
ggaaaatctctgacttcatt

SEQ ID NO: 41106 - RNA, 20 nt, synthetic construct
  source 1..20: mol_type = other RNA
ggaaaatcttggaactttta

SEQ ID NO: 41107 - RNA, 20 nt, synthetic construct
  source 1..20: mol_type = other RNA
ggaaaatgcttaacaagaat

SEQ ID NO: 41108 - RNA, 20 nt, synthetic construct
  source 1..20: mol_type = other RNA
ggaaaatgtaaaacatcaaa

SEQ ID NO: 41109 - RNA, 20 nt, synthetic construct
  source 1..20: mol_type = other RNA
ggaaaatgtatgattttcta

SEQ ID NO: 41110 - RNA, 20 nt, synthetic construct
  source 1..20: mol_type = other RNA
ggaaaattcaaacatgacag

SEQ ID NO: 41111 - RNA, 20 nt, synthetic construct
  source 1..20: mol_type = other RNA
ggaaaattcttggtcttttg

SEQ ID NO: 41112 - RNA, 20 nt, synthetic construct
  source 1..20: mol_type = other RNA
ggaaaattgacatttttcaa

SEQ ID NO: 41113 - RNA, 20 nt, synthetic construct
  source 1..20: mol_type = other RNA
ggaaacaacctaaatgtcca

SEQ ID NO: 41114 - RNA, 20 nt, synthetic construct
  source 1..20: mol_type = other RNA
ggaaacaactcaaacgtcca

SEQ ID NO: 41115 - RNA, 20 nt, synthetic construct
  source 1..20: mol_type = other RNA
ggaaacactataaatcagta

SEQ ID NO: 41116 - RNA, 20 nt, synthetic construct
  source 1..20: mol_type = other RNA
ggaaacactcataccaggtt

SEQ ID NO: 41117 - RNA, 20 nt, synthetic construct
  source 1..20: mol_type = other RNA
ggaaacactgctcagaagct

SEQ ID NO: 41118 - RNA, 20 nt, synthetic construct
  source 1..20: mol_type = other RNA
ggaaacagagttttccaata

SEQ ID NO: 41119 - RNA, 20 nt, synthetic construct
  source 1..20: mol_type = other RNA
ggaaacagattgatttatat

SEQ ID NO: 41120 - RNA, 20 nt, synthetic construct
  source 1..20: mol_type = other RNA
ggaaacagggttacagtata

SEQ ID NO: 41121 - RNA, 20 nt, synthetic construct
  source 1..20: mol_type = other RNA
ggaaacatggtaatttgtcc

SEQ ID NO: 41122 - RNA, 20 nt, synthetic construct
  source 1..20: mol_type = other RNA
ggaaaccccagggatatttt

SEQ ID NO: 41123 - RNA, 20 nt, synthetic construct
  source 1..20: mol_type = other RNA
ggaaacccgctctgggtgcg

SEQ ID NO: 41124 - RNA, 20 nt, synthetic construct
  source 1..20: mol_type = other RNA
ggaaaccttactgtaatatt

SEQ ID NO: 41125 - RNA, 20 nt, synthetic construct
  source 1..20: mol_type = other RNA
ggaaaccttttgtagaccct

SEQ ID NO: 41126 - RNA, 20 nt, synthetic construct
  source 1..20: mol_type = other RNA
ggaaactacaattactgtac

SEQ ID NO: 41127 - RNA, 20 nt, synthetic construct
  source 1..20: mol_type = other RNA
ggaaactcaaacccaaatta

SEQ ID NO: 41128 - RNA, 20 nt, synthetic construct
  source 1..20: mol_type = other RNA
ggaaactgtttttgcaattt

SEQ ID NO: 41129 - RNA, 20 nt, synthetic construct
  source 1..20: mol_type = other RNA
ggaaacttccagaaacttcc

SEQ ID NO: 41130 - RNA, 20 nt, synthetic construct
  source 1..20: mol_type = other RNA
ggaaacttgccatcttgcat

SEQ ID NO: 41131 - RNA, 20 nt, synthetic construct
  source 1..20: mol_type = other RNA
ggaaactttatacctgttga

SEQ ID NO: 41132 - RNA, 20 nt, synthetic construct
  source 1..20: mol_type = other RNA
ggaaactttgcattcctgaa

SEQ ID NO: 41133 - RNA, 20 nt, synthetic construct
  source 1..20: mol_type = other RNA
ggaaagaaatagaactgtca

SEQ ID NO: 41134 - RNA, 20 nt, synthetic construct
  source 1..20: mol_type = other RNA
ggaaagacaggtagacatga

SEQ ID NO: 41135 - RNA, 20 nt, synthetic construct
  source 1..20: mol_type = other RNA
ggaaagaccggggactgcaa

SEQ ID NO: 41136 - RNA, 20 nt, synthetic construct
  source 1..20: mol_type = other RNA
ggaaagagccagcctgatga

SEQ ID NO: 41137 - RNA, 20 nt, synthetic construct
  source 1..20: mol_type = other RNA
ggaaagatgaagtatagaaa

SEQ ID NO: 41138 - RNA, 20 nt, synthetic construct
  source 1..20: mol_type = other RNA
ggaaagatgtcttttaactt

SEQ ID NO: 41139 - RNA, 20 nt, synthetic construct
  source 1..20: mol_type = other RNA
ggaaagcacgtttgatctgg

SEQ ID NO: 41140 - RNA, 20 nt, synthetic construct
  source 1..20: mol_type = other RNA
ggaaagcaggttgcattaat

SEQ ID NO: 41141 - RNA, 20 nt, synthetic construct
  source 1..20: mol_type = other RNA
ggaaagcctggctttagatg

SEQ ID NO: 41142 - RNA, 20 nt, synthetic construct
  source 1..20: mol_type = other RNA
ggaaagcctgtgacagtatg

SEQ ID NO: 41143 - RNA, 20 nt, synthetic construct
  source 1..20: mol_type = other RNA
ggaaagctcaggaccagatg

SEQ ID NO: 41144 - RNA, 20 nt, synthetic construct
  source 1..20: mol_type = other RNA
ggaaaggacttgatctaaaa

SEQ ID NO: 41145 - RNA, 20 nt, synthetic construct
  source 1..20: mol_type = other RNA
ggaaaggagatactggccat

SEQ ID NO: 41146 - RNA, 20 nt, synthetic construct
  source 1..20: mol_type = other RNA
ggaaaggatgaccttgacaa

SEQ ID NO: 41147 - RNA, 20 nt, synthetic construct
  source 1..20: mol_type = other RNA
ggaaaggatggtttgattgt

SEQ ID NO: 41148 - RNA, 20 nt, synthetic construct
  source 1..20: mol_type = other RNA
ggaaagggtagagcactttc

SEQ ID NO: 41149 - RNA, 20 nt, synthetic construct
  source 1..20: mol_type = other RNA
ggaaagtaactgttggcaag

SEQ ID NO: 41150 - RNA, 20 nt, synthetic construct
  source 1..20: mol_type = other RNA
ggaaagtattcccaagatca

SEQ ID NO: 41151 - RNA, 20 nt, synthetic construct
  source 1..20: mol_type = other RNA
ggaaagtgacagatgagaaa

SEQ ID NO: 41152 - RNA, 20 nt, synthetic construct
  source 1..20: mol_type = other RNA
ggaaagtgccagccaccctt

SEQ ID NO: 41153 - RNA, 20 nt, synthetic construct
  source 1..20: mol_type = other RNA
ggaaagtggactatgtaggc

SEQ ID NO: 41154 - RNA, 20 nt, synthetic construct
  source 1..20: mol_type = other RNA
ggaaagtgtgcttgggctcc

SEQ ID NO: 41155 - RNA, 20 nt, synthetic construct
  source 1..20: mol_type = other RNA
ggaaagttcaaatgaggctt

SEQ ID NO: 41156 - RNA, 20 nt, synthetic construct
  source 1..20: mol_type = other RNA
ggaaataagaaggtttgtag

SEQ ID NO: 41157 - RNA, 20 nt, synthetic construct
  source 1..20: mol_type = other RNA
ggaaataagtttcatggact

SEQ ID NO: 41158 - RNA, 20 nt, synthetic construct
  source 1..20: mol_type = other RNA
ggaaataatttccctcagaa

SEQ ID NO: 41159 - RNA, 20 nt, synthetic construct
  source 1..20: mol_type = other RNA
ggaaatacaaaaagtgatac

SEQ ID NO: 41160 - RNA, 20 nt, synthetic construct
  source 1..20: mol_type = other RNA
ggaaatacttgaacattctg

SEQ ID NO: 41161 - RNA, 20 nt, synthetic construct
  source 1..20: mol_type = other RNA
ggaaatacttgatctacatt

SEQ ID NO: 41162 - RNA, 20 nt, synthetic construct
  source 1..20: mol_type = other RNA
ggaaatagatgcctagaaag

SEQ ID NO: 41163 - RNA, 20 nt, synthetic construct
  source 1..20: mol_type = other RNA
ggaaatataaaaagcctctg

SEQ ID NO: 41164 - RNA, 20 nt, synthetic construct
  source 1..20: mol_type = other RNA
ggaaatataacattaccaat

SEQ ID NO: 41165 - RNA, 20 nt, synthetic construct
  source 1..20: mol_type = other RNA
ggaaatatgaaccacactga

SEQ ID NO: 41166 - RNA, 20 nt, synthetic construct
  source 1..20: mol_type = other RNA
ggaaatatggtcactgctga

SEQ ID NO: 41167 - RNA, 20 nt, synthetic construct
  source 1..20: mol_type = other RNA
ggaaatcacaggtttaggtt

SEQ ID NO: 41168 - RNA, 20 nt, synthetic construct
  source 1..20: mol_type = other RNA
ggaaatcattcaggacactg

SEQ ID NO: 41169 - RNA, 20 nt, synthetic construct
  source 1..20: mol_type = other RNA
ggaaatgaagtattgatttg

SEQ ID NO: 41170 - RNA, 20 nt, synthetic construct
  source 1..20: mol_type = other RNA
ggaaatgagtgagccacagc

SEQ ID NO: 41171 - RNA, 20 nt, synthetic construct
  source 1..20: mol_type = other RNA
ggaaatgagtgtatgcaggg

SEQ ID NO: 41172 - RNA, 20 nt, synthetic construct
  source 1..20: mol_type = other RNA
ggaaatgatacctcatttat

SEQ ID NO: 41173 - RNA, 20 nt, synthetic construct
  source 1..20: mol_type = other RNA
ggaaatggacagcacattaa

SEQ ID NO: 41174 - RNA, 20 nt, synthetic construct
  source 1..20: mol_type = other RNA
ggaaatggacagcggggatg

SEQ ID NO: 41175 - RNA, 20 nt, synthetic construct
  source 1..20: mol_type = other RNA
ggaaatggagggccagagga

SEQ ID NO: 41176 - RNA, 20 nt, synthetic construct
  source 1..20: mol_type = other RNA
ggaaatgtaaattcctaact

SEQ ID NO: 41177 - RNA, 20 nt, synthetic construct
  source 1..20: mol_type = other RNA
ggaaattaaacacacccttg

SEQ ID NO: 41178 - RNA, 20 nt, synthetic construct
  source 1..20: mol_type = other RNA
ggaaattagaaatgtggaag

SEQ ID NO: 41179 - RNA, 20 nt, synthetic construct
  source 1..20: mol_type = other RNA
ggaaattagatgatgttttg

SEQ ID NO: 41180 - RNA, 20 nt, synthetic construct
  source 1..20: mol_type = other RNA
ggaaattatttccagccttt

SEQ ID NO: 41181 - RNA, 20 nt, synthetic construct
  source 1..20: mol_type = other RNA
ggaaattttcaagggtgttt

SEQ ID NO: 41182 - RNA, 20 nt, synthetic construct
  source 1..20: mol_type = other RNA
ggaacaatcaaaccatcctt

SEQ ID NO: 41183 - RNA, 20 nt, synthetic construct
  source 1..20: mol_type = other RNA
ggaacacacacctattcata

SEQ ID NO: 41184 - RNA, 20 nt, synthetic construct
  source 1..20: mol_type = other RNA
ggaacacacattagcctaga

SEQ ID NO: 41185 - RNA, 20 nt, synthetic construct
  source 1..20: mol_type = other RNA
ggaacaccttgaacatgaac

SEQ ID NO: 41186 - RNA, 20 nt, synthetic construct
  source 1..20: mol_type = other RNA
ggaacactaagaagatggtt

SEQ ID NO: 41187 - RNA, 20 nt, synthetic construct
  source 1..20: mol_type = other RNA
ggaacagattcacgcacagg

SEQ ID NO: 41188 - RNA, 20 nt, synthetic construct
  source 1..20: mol_type = other RNA
ggaacagcaggggaaggctt

SEQ ID NO: 41189 - RNA, 20 nt, synthetic construct
  source 1..20: mol_type = other RNA
ggaacagcccctagcatgca

SEQ ID NO: 41190 - RNA, 20 nt, synthetic construct
  source 1..20: mol_type = other RNA
ggaacaggccctttgttagt

SEQ ID NO: 41191 - RNA, 20 nt, synthetic construct
  source 1..20: mol_type = other RNA
ggaacaggctcaatacctga

SEQ ID NO: 41192 - RNA, 20 nt, synthetic construct
  source 1..20: mol_type = other RNA
ggaacagtttagcaatccaa

SEQ ID NO: 41193 - RNA, 20 nt, synthetic construct
  source 1..20: mol_type = other RNA
ggaacataatctttggtgct

SEQ ID NO: 41194 - RNA, 20 nt, synthetic construct
  source 1..20: mol_type = other RNA
ggaacatgacatgtattttt

SEQ ID NO: 41195 - RNA, 20 nt, synthetic construct
  source 1..20: mol_type = other RNA
ggaacattttcattttaact

SEQ ID NO: 41196 - RNA, 20 nt, synthetic construct
  source 1..20: mol_type = other RNA
ggaaccactgtaggccccga

SEQ ID NO: 41197 - RNA, 20 nt, synthetic construct
  source 1..20: mol_type = other RNA
ggaaccatattagagtgaaa

SEQ ID NO: 41198 - RNA, 20 nt, synthetic construct
  source 1..20: mol_type = other RNA
ggaaccgtaacttcttttct

SEQ ID NO: 41199 - RNA, 20 nt, synthetic construct
  source 1..20: mol_type = other RNA
ggaacctttgtccactgtca

SEQ ID NO: 41200 - RNA, 20 nt, synthetic construct
  source 1..20: mol_type = other RNA
ggaacgaatattcatttatt

SEQ ID NO: 41201 - RNA, 20 nt, synthetic construct
  source 1..20: mol_type = other RNA
ggaacggcttaacacctttg

SEQ ID NO: 41202 - RNA, 20 nt, synthetic construct
  source 1..20: mol_type = other RNA
ggaactaagaaaaatgtttt

SEQ ID NO: 41203 - RNA, 20 nt, synthetic construct
  source 1..20: mol_type = other RNA
ggaactaattgataaaactg

SEQ ID NO: 41204 - RNA, 20 nt, synthetic construct
  source 1..20: mol_type = other RNA
ggaactaatttcatacaagt

SEQ ID NO: 41205 - RNA, 20 nt, synthetic construct
  source 1..20: mol_type = other RNA
ggaactcatattagtctgta

SEQ ID NO: 41206 - RNA, 20 nt, synthetic construct
  source 1..20: mol_type = other RNA
ggaactcatttctgcttgaa

SEQ ID NO: 41207 - RNA, 20 nt, synthetic construct
  source 1..20: mol_type = other RNA
ggaactcctgtatgccgctg

SEQ ID NO: 41208 - RNA, 20 nt, synthetic construct
  source 1..20: mol_type = other RNA
ggaactctattttcctaaaa

SEQ ID NO: 41209 - RNA, 20 nt, synthetic construct
  source 1..20: mol_type = other RNA
ggaactctgtcatggtgtgt

SEQ ID NO: 41210 - RNA, 20 nt, synthetic construct
  source 1..20: mol_type = other RNA
ggaactcttgcggtctttta

SEQ ID NO: 41211 - RNA, 20 nt, synthetic construct
  source 1..20: mol_type = other RNA
ggaactcttgtagtattttt

SEQ ID NO: 41212 - RNA, 20 nt, synthetic construct
  source 1..20: mol_type = other RNA
ggaacttacagtaagatcct

SEQ ID NO: 41213 - RNA, 20 nt, synthetic construct
  source 1..20: mol_type = other RNA
ggaacttgagtttgttctgt

SEQ ID NO: 41214 - RNA, 20 nt, synthetic construct
  source 1..20: mol_type = other RNA
ggaagaaaaaataaaggctt

SEQ ID NO: 41215 - RNA, 20 nt, synthetic construct
  source 1..20: mol_type = other RNA
ggaagaatcaggtctctttg

SEQ ID NO: 41216 - RNA, 20 nt, synthetic construct
  source 1..20: mol_type = other RNA
ggaagaattattgtctgcaa

SEQ ID NO: 41217 - RNA, 20 nt, synthetic construct
  source 1..20: mol_type = other RNA
ggaagaattttaagcctaga

SEQ ID NO: 41218 - RNA, 20 nt, synthetic construct
  source 1..20: mol_type = other RNA
ggaagactatcacgattctg

SEQ ID NO: 41219 - RNA, 20 nt, synthetic construct
  source 1..20: mol_type = other RNA
ggaagactatgagaaggatt

SEQ ID NO: 41220 - RNA, 20 nt, synthetic construct
  source 1..20: mol_type = other RNA
ggaagactttatggtaattg

SEQ ID NO: 41221 - RNA, 20 nt, synthetic construct
  source 1..20: mol_type = other RNA
ggaagagactatctcttcct

SEQ ID NO: 41222 - RNA, 20 nt, synthetic construct
  source 1..20: mol_type = other RNA
ggaagagagaaggctgccag

SEQ ID NO: 41223 - RNA, 20 nt, synthetic construct
  source 1..20: mol_type = other RNA
ggaagagagcattgccttta

SEQ ID NO: 41224 - RNA, 20 nt, synthetic construct
  source 1..20: mol_type = other RNA
ggaagagatagtctcttcct

SEQ ID NO: 41225 - RNA, 20 nt, synthetic construct
  source 1..20: mol_type = other RNA
ggaagagctaagatgctatt

SEQ ID NO: 41226 - RNA, 20 nt, synthetic construct
  source 1..20: mol_type = other RNA
ggaagaggaaggttcaagtt

SEQ ID NO: 41227 - RNA, 20 nt, synthetic construct
  source 1..20: mol_type = other RNA
ggaagaggcagctaagcacc

SEQ ID NO: 41228 - RNA, 20 nt, synthetic construct
  source 1..20: mol_type = other RNA
ggaagaggccacaaagtccc

SEQ ID NO: 41229 - RNA, 20 nt, synthetic construct
  source 1..20: mol_type = other RNA
ggaagagtttatattctaag

SEQ ID NO: 41230 - RNA, 20 nt, synthetic construct
  source 1..20: mol_type = other RNA
ggaagatagtactgaccatc

SEQ ID NO: 41231 - RNA, 20 nt, synthetic construct
  source 1..20: mol_type = other RNA
ggaagatgctccctctatgg

SEQ ID NO: 41232 - RNA, 20 nt, synthetic construct
  source 1..20: mol_type = other RNA
ggaagatgggacttcactag

SEQ ID NO: 41233 - RNA, 20 nt, synthetic construct
  source 1..20: mol_type = other RNA
ggaagattggctttagattt

SEQ ID NO: 41234 - RNA, 20 nt, synthetic construct
  source 1..20: mol_type = other RNA
ggaagatttctactggggtc

SEQ ID NO: 41235 - RNA, 20 nt, synthetic construct
  source 1..20: mol_type = other RNA
ggaagcaaaggattcggggg

SEQ ID NO: 41236 - RNA, 20 nt, synthetic construct
  source 1..20: mol_type = other RNA
ggaagcacagtctctgcaga

SEQ ID NO: 41237 - RNA, 20 nt, synthetic construct
  source 1..20: mol_type = other RNA
ggaagcacattccttccgac

SEQ ID NO: 41238 - RNA, 20 nt, synthetic construct
  source 1..20: mol_type = other RNA
ggaagcaccaacccttgttg

SEQ ID NO: 41239 - RNA, 20 nt, synthetic construct
  source 1..20: mol_type = other RNA
ggaagcagaactaagacccc

SEQ ID NO: 41240 - RNA, 20 nt, synthetic construct
  source 1..20: mol_type = other RNA
ggaagcagaatgtccatcag

SEQ ID NO: 41241 - RNA, 20 nt, synthetic construct
  source 1..20: mol_type = other RNA
ggaagcaggaactcatatta

SEQ ID NO: 41242 - RNA, 20 nt, synthetic construct
  source 1..20: mol_type = other RNA
ggaagcagttgatgcaattt

SEQ ID NO: 41243 - RNA, 20 nt, synthetic construct
  source 1..20: mol_type = other RNA
ggaagcatgtggccaggagg

SEQ ID NO: 41244 - RNA, 20 nt, synthetic construct
  source 1..20: mol_type = other RNA
ggaagccactgcattcatcc

SEQ ID NO: 41245 - RNA, 20 nt, synthetic construct
  source 1..20: mol_type = other RNA
ggaagctaatcaagccgcaa

SEQ ID NO: 41246 - RNA, 20 nt, synthetic construct
  source 1..20: mol_type = other RNA
ggaagctatggagcactgtg

SEQ ID NO: 41247 - RNA, 20 nt, synthetic construct
  source 1..20: mol_type = other RNA
ggaagctgatcaaggaagct

SEQ ID NO: 41248 - RNA, 20 nt, synthetic construct
  source 1..20: mol_type = other RNA
ggaagctgggctagagccag

SEQ ID NO: 41249 - RNA, 20 nt, synthetic construct
  source 1..20: mol_type = other RNA
ggaagctgtccttctcgtgt

SEQ ID NO: 41250 - RNA, 20 nt, synthetic construct
  source 1..20: mol_type = other RNA
ggaagcttataatttctgag

SEQ ID NO: 41251 - RNA, 20 nt, synthetic construct
  source 1..20: mol_type = other RNA
ggaagcttcctaaagagagt

SEQ ID NO: 41252 - RNA, 20 nt, synthetic construct
  source 1..20: mol_type = other RNA
ggaagcttccttgatcagct

SEQ ID NO: 41253 - RNA, 20 nt, synthetic construct
  source 1..20: mol_type = other RNA
ggaagcttttcatatacaga

SEQ ID NO: 41254 - RNA, 20 nt, synthetic construct
  source 1..20: mol_type = other RNA
ggaaggaaacactataaatc

SEQ ID NO: 41255 - RNA, 20 nt, synthetic construct
  source 1..20: mol_type = other RNA
ggaaggaaaggagatactgg

SEQ ID NO: 41256 - RNA, 20 nt, synthetic construct
  source 1..20: mol_type = other RNA
ggaaggaaataagaaggttt

SEQ ID NO: 41257 - RNA, 20 nt, synthetic construct
  source 1..20: mol_type = other RNA
ggaaggaacacacacctatt

SEQ ID NO: 41258 - RNA, 20 nt, synthetic construct
  source 1..20: mol_type = other RNA
ggaaggaatgtgcttcctaa

SEQ ID NO: 41259 - RNA, 20 nt, synthetic construct
  source 1..20: mol_type = other RNA
ggaaggaattttaggacaag

SEQ ID NO: 41260 - RNA, 20 nt, synthetic construct
  source 1..20: mol_type = other RNA
ggaaggaattttcaggactc

SEQ ID NO: 41261 - RNA, 20 nt, synthetic construct
  source 1..20: mol_type = other RNA
ggaaggactcacagcttacc

SEQ ID NO: 41262 - RNA, 20 nt, synthetic construct
  source 1..20: mol_type = other RNA
ggaaggagaatcgcttaaac

SEQ ID NO: 41263 - RNA, 20 nt, synthetic construct
  source 1..20: mol_type = other RNA
ggaaggagtctgcccatcct

SEQ ID NO: 41264 - RNA, 20 nt, synthetic construct
  source 1..20: mol_type = other RNA
ggaaggatggccagtcatgt

SEQ ID NO: 41265 - RNA, 20 nt, synthetic construct
  source 1..20: mol_type = other RNA
ggaaggattgcctaacacca

SEQ ID NO: 41266 - RNA, 20 nt, synthetic construct
  source 1..20: mol_type = other RNA
ggaaggattggaatgagtcc

SEQ ID NO: 41267 - RNA, 20 nt, synthetic construct
  source 1..20: mol_type = other RNA
ggaaggcaggaggcctcaga

SEQ ID NO: 41268 - RNA, 20 nt, synthetic construct
  source 1..20: mol_type = other RNA
ggaaggcagggtaggaaggc

SEQ ID NO: 41269 - RNA, 20 nt, synthetic construct
  source 1..20: mol_type = other RNA
ggaaggccctgattgagatt

SEQ ID NO: 41270 - RNA, 20 nt, synthetic construct
  source 1..20: mol_type = other RNA
ggaaggcctgatagctgtgg

SEQ ID NO: 41271 - RNA, 20 nt, synthetic construct
  source 1..20: mol_type = other RNA
ggaaggccttctcctccaac

SEQ ID NO: 41272 - RNA, 20 nt, synthetic construct
  source 1..20: mol_type = other RNA
ggaaggcggaagttgcagtg

SEQ ID NO: 41273 - RNA, 20 nt, synthetic construct
  source 1..20: mol_type = other RNA
ggaaggcggtggggacagct

SEQ ID NO: 41274 - RNA, 20 nt, synthetic construct
  source 1..20: mol_type = other RNA
ggaaggctaagcatgtaact

SEQ ID NO: 41275 - RNA, 20 nt, synthetic construct
  source 1..20: mol_type = other RNA
ggaaggctgcaagcactggt

SEQ ID NO: 41276 - RNA, 20 nt, synthetic construct
  source 1..20: mol_type = other RNA
ggaaggcttcgagttctggg

SEQ ID NO: 41277 - RNA, 20 nt, synthetic construct
  source 1..20: mol_type = other RNA
ggaagggagagatgcctatg

SEQ ID NO: 41278 - RNA, 20 nt, synthetic construct
  source 1..20: mol_type = other RNA
ggaagggagcccaagcacac

SEQ ID NO: 41279 - RNA, 20 nt, synthetic construct
  source 1..20: mol_type = other RNA
ggaagggcttgatctagtaa

SEQ ID NO: 41280 - RNA, 20 nt, synthetic construct
  source 1..20: mol_type = other RNA
ggaaggtaggagggtgtgat

SEQ ID NO: 41281 - RNA, 20 nt, synthetic construct
  source 1..20: mol_type = other RNA
ggaaggtcaaatggtaacag

SEQ ID NO: 41282 - RNA, 20 nt, synthetic construct
  source 1..20: mol_type = other RNA
ggaaggtgcccgcgaaggcg

SEQ ID NO: 41283 - RNA, 20 nt, synthetic construct
  source 1..20: mol_type = other RNA
ggaaggttcaagtttggctc

SEQ ID NO: 41284 - RNA, 20 nt, synthetic construct
  source 1..20: mol_type = other RNA
ggaagtaaagatcaagctcg

SEQ ID NO: 41285 - RNA, 20 nt, synthetic construct
  source 1..20: mol_type = other RNA
ggaagtaaggattttctatt

SEQ ID NO: 41286 - RNA, 20 nt, synthetic construct
  source 1..20: mol_type = other RNA
ggaagtaattgggatctgat

SEQ ID NO: 41287 - RNA, 20 nt, synthetic construct
  source 1..20: mol_type = other RNA
ggaagtactgagtcaaaacc

SEQ ID NO: 41288 - RNA, 20 nt, synthetic construct
  source 1..20: mol_type = other RNA
ggaagtatgagtcttccgtc

SEQ ID NO: 41289 - RNA, 20 nt, synthetic construct
  source 1..20: mol_type = other RNA
ggaagtcagcaactcttggc

SEQ ID NO: 41290 - RNA, 20 nt, synthetic construct
  source 1..20: mol_type = other RNA
ggaagtccatgaaacttatt

SEQ ID NO: 41291 - RNA, 20 nt, synthetic construct
  source 1..20: mol_type = other RNA
ggaagtgaagtcaagatgaa

SEQ ID NO: 41292 - RNA, 20 nt, synthetic construct
  source 1..20: mol_type = other RNA
ggaagtgaccctgagtccag

SEQ ID NO: 41293 - RNA, 20 nt, synthetic construct
  source 1..20: mol_type = other RNA
ggaagtgctgggctagggaa

SEQ ID NO: 41294 - RNA, 20 nt, synthetic construct
  source 1..20: mol_type = other RNA
ggaagtggagtgcgagtgtg

SEQ ID NO: 41295 - RNA, 20 nt, synthetic construct
  source 1..20: mol_type = other RNA
ggaagtggctagacggaaaa

SEQ ID NO: 41296 - RNA, 20 nt, synthetic construct
  source 1..20: mol_type = other RNA
ggaagtgtaacatacacatc

SEQ ID NO: 41297 - RNA, 20 nt, synthetic construct
  source 1..20: mol_type = other RNA
ggaagttatgtagctgggat

SEQ ID NO: 41298 - RNA, 20 nt, synthetic construct
  source 1..20: mol_type = other RNA
ggaagttatttaatctctct

SEQ ID NO: 41299 - RNA, 20 nt, synthetic construct
  source 1..20: mol_type = other RNA
ggaagttcaaggttataatc

SEQ ID NO: 41300 - RNA, 20 nt, synthetic construct
  source 1..20: mol_type = other RNA
ggaagttgagaaagagggaa

SEQ ID NO: 41301 - RNA, 20 nt, synthetic construct
  source 1..20: mol_type = other RNA
ggaagttgcagtgagcccag

SEQ ID NO: 41302 - RNA, 20 nt, synthetic construct
  source 1..20: mol_type = other RNA
ggaagttggcccaacatgct

SEQ ID NO: 41303 - RNA, 20 nt, synthetic construct
  source 1..20: mol_type = other RNA
ggaagtttcctgcacatgca

SEQ ID NO: 41304 - RNA, 20 nt, synthetic construct
  source 1..20: mol_type = other RNA
ggaagtttctggaagtttcc

SEQ ID NO: 41305 - RNA, 20 nt, synthetic construct
  source 1..20: mol_type = other RNA
ggaataaatggtagcttggg

SEQ ID NO: 41306 - RNA, 20 nt, synthetic construct
  source 1..20: mol_type = other RNA
ggaataagattttaggtcat

SEQ ID NO: 41307 - RNA, 20 nt, synthetic construct
  source 1..20: mol_type = other RNA
ggaataatggaactaagaaa

SEQ ID NO: 41308 - RNA, 20 nt, synthetic construct
  source 1..20: mol_type = other RNA
ggaatactttcccatctcta

SEQ ID NO: 41309 - RNA, 20 nt, synthetic construct
  source 1..20: mol_type = other RNA
ggaatagaaagttagtgtct

SEQ ID NO: 41310 - RNA, 20 nt, synthetic construct
  source 1..20: mol_type = other RNA
ggaatagaagagcagtgtgt

SEQ ID NO: 41311 - RNA, 20 nt, synthetic construct
  source 1..20: mol_type = other RNA
ggaatagaagggagaaccca

SEQ ID NO: 41312 - RNA, 20 nt, synthetic construct
  source 1..20: mol_type = other RNA
ggaatagacaaagacaagtt

SEQ ID NO: 41313 - RNA, 20 nt, synthetic construct
  source 1..20: mol_type = other RNA
ggaatagtagcttcaatgag

SEQ ID NO: 41314 - RNA, 20 nt, synthetic construct
  source 1..20: mol_type = other RNA
ggaatagtattcaggacaga

SEQ ID NO: 41315 - RNA, 20 nt, synthetic construct
  source 1..20: mol_type = other RNA
ggaatataaacgtgtgtgta

SEQ ID NO: 41316 - RNA, 20 nt, synthetic construct
  source 1..20: mol_type = other RNA
ggaatattactcagtctcga

SEQ ID NO: 41317 - RNA, 20 nt, synthetic construct
  source 1..20: mol_type = other RNA
ggaatattgttcagccttaa

SEQ ID NO: 41318 - RNA, 20 nt, synthetic construct
  source 1..20: mol_type = other RNA
ggaatcaatccagacagcta

SEQ ID NO: 41319 - RNA, 20 nt, synthetic construct
  source 1..20: mol_type = other RNA
ggaatcattccgtatatatt

SEQ ID NO: 41320 - RNA, 20 nt, synthetic construct
  source 1..20: mol_type = other RNA
ggaatccggctttatgagac

SEQ ID NO: 41321 - RNA, 20 nt, synthetic construct
  source 1..20: mol_type = other RNA
ggaatccttcagtcagttct

SEQ ID NO: 41322 - RNA, 20 nt, synthetic construct
  source 1..20: mol_type = other RNA
ggaatctactcttttgtttt

SEQ ID NO: 41323 - RNA, 20 nt, synthetic construct
  source 1..20: mol_type = other RNA
ggaatctaggaaacactgct

SEQ ID NO: 41324 - RNA, 20 nt, synthetic construct
  source 1..20: mol_type = other RNA
ggaatctgacctaagcttgg

SEQ ID NO: 41325 - RNA, 20 nt, synthetic construct
  source 1..20: mol_type = other RNA
ggaatcttaccctgttgacc

SEQ ID NO: 41326 - RNA, 20 nt, synthetic construct
  source 1..20: mol_type = other RNA
ggaatgaagcaggccttcga

SEQ ID NO: 41327 - RNA, 20 nt, synthetic construct
  source 1..20: mol_type = other RNA
ggaatgactatagaaatttg

SEQ ID NO: 41328 - RNA, 20 nt, synthetic construct
  source 1..20: mol_type = other RNA
ggaatgagtccagctttcta

SEQ ID NO: 41329 - RNA, 20 nt, synthetic construct
  source 1..20: mol_type = other RNA
ggaatgattccacttatatg

SEQ ID NO: 41330 - RNA, 20 nt, synthetic construct
  source 1..20: mol_type = other RNA
ggaatgcaaagtttcctaca

SEQ ID NO: 41331 - RNA, 20 nt, synthetic construct
  source 1..20: mol_type = other RNA
ggaatgcatatatctgtctg

SEQ ID NO: 41332 - RNA, 20 nt, synthetic construct
  source 1..20: mol_type = other RNA
ggaatgcatcgtttcaatat

SEQ ID NO: 41333 - RNA, 20 nt, synthetic construct
  source 1..20: mol_type = other RNA
ggaatgcccatcctctattt

SEQ ID NO: 41334 - RNA, 20 nt, synthetic construct
  source 1..20: mol_type = other RNA
ggaatgcccctgtagcagac

SEQ ID NO: 41335 - RNA, 20 nt, synthetic construct
  source 1..20: mol_type = other RNA
ggaatgcccctttgagcaga

SEQ ID NO: 41336 - RNA, 20 nt, synthetic construct
  source 1..20: mol_type = other RNA
ggaatgcctataaaatgctg

SEQ ID NO: 41337 - RNA, 20 nt, synthetic construct
  source 1..20: mol_type = other RNA
ggaatgctcataattaaaga

SEQ ID NO: 41338 - RNA, 20 nt, synthetic construct
  source 1..20: mol_type = other RNA
ggaatggaattctgatgcac

SEQ ID NO: 41339 - RNA, 20 nt, synthetic construct
  source 1..20: mol_type = other RNA
ggaatggggagctagagggt

SEQ ID NO: 41340 - RNA, 20 nt, synthetic construct
  source 1..20: mol_type = other RNA
ggaatgggttggaggagaag

SEQ ID NO: 41341 - RNA, 20 nt, synthetic construct
  source 1..20: mol_type = other RNA
ggaatggtactgcctccaca

SEQ ID NO: 41342 - RNA, 20 nt, synthetic construct
  source 1..20: mol_type = other RNA
ggaatggtcaatttcatcgt

SEQ ID NO: 41343 - RNA, 20 nt, synthetic construct
  source 1..20: mol_type = other RNA
ggaatggtgaagaatgtgaa

SEQ ID NO: 41344 - RNA, 20 nt, synthetic construct
  source 1..20: mol_type = other RNA
ggaatgtgcacctccagtgt

SEQ ID NO: 41345 - RNA, 20 nt, synthetic construct
  source 1..20: mol_type = other RNA
ggaatgtgcactcttttaaa

SEQ ID NO: 41346 - RNA, 20 nt, synthetic construct
  source 1..20: mol_type = other RNA
ggaatgtgcttcctaaacct

SEQ ID NO: 41347 - RNA, 20 nt, synthetic construct
  source 1..20: mol_type = other RNA
ggaatgtggtcacacttttt

SEQ ID NO: 41348 - RNA, 20 nt, synthetic construct
  source 1..20: mol_type = other RNA
ggaatgtgtagttctggtgt

SEQ ID NO: 41349 - RNA, 20 nt, synthetic construct
  source 1..20: mol_type = other RNA
ggaattaaaatgttgccaat

SEQ ID NO: 41350 - RNA, 20 nt, synthetic construct
  source 1..20: mol_type = other RNA
ggaattaaacatttctgaaa

SEQ ID NO: 41351 - RNA, 20 nt, synthetic construct
  source 1..20: mol_type = other RNA
ggaattaactccaggggaca

SEQ ID NO: 41352 - RNA, 20 nt, synthetic construct
  source 1..20: mol_type = other RNA
ggaattcagtcaccaaacgt

SEQ ID NO: 41353 - RNA, 20 nt, synthetic construct
  source 1..20: mol_type = other RNA
ggaattcatcaaagttaaac

SEQ ID NO: 41354 - RNA, 20 nt, synthetic construct
  source 1..20: mol_type = other RNA
ggaattctgacacccgaaga

SEQ ID NO: 41355 - RNA, 20 nt, synthetic construct
  source 1..20: mol_type = other RNA
ggaattctgatgcacaagcc

SEQ ID NO: 41356 - RNA, 20 nt, synthetic construct
  source 1..20: mol_type = other RNA
ggaattgcatgagacttgga

SEQ ID NO: 41357 - RNA, 20 nt, synthetic construct
  source 1..20: mol_type = other RNA
ggaattgccatatgtagggc

SEQ ID NO: 41358 - RNA, 20 nt, synthetic construct
  source 1..20: mol_type = other RNA
ggaattgtaatcacagtacg

SEQ ID NO: 41359 - RNA, 20 nt, synthetic construct
  source 1..20: mol_type = other RNA
ggaatttaaggggtaaatgg

SEQ ID NO: 41360 - RNA, 20 nt, synthetic construct
  source 1..20: mol_type = other RNA
ggaatttacatttccattca

SEQ ID NO: 41361 - RNA, 20 nt, synthetic construct
  source 1..20: mol_type = other RNA
ggaatttcttattaagaatg

SEQ ID NO: 41362 - RNA, 20 nt, synthetic construct
  source 1..20: mol_type = other RNA
ggaatttgttttaccatcta

SEQ ID NO: 41363 - RNA, 20 nt, synthetic construct
  source 1..20: mol_type = other RNA
ggaattttactgatcttttc

SEQ ID NO: 41364 - RNA, 20 nt, synthetic construct
  source 1..20: mol_type = other RNA
ggaattttaggacaaggaaa

SEQ ID NO: 41365 - RNA, 20 nt, synthetic construct
  source 1..20: mol_type = other RNA
ggaattttagtaattctcca

SEQ ID NO: 41366 - RNA, 20 nt, synthetic construct
  source 1..20: mol_type = other RNA
ggaattttcaggactcatga

SEQ ID NO: 41367 - RNA, 20 nt, synthetic construct
  source 1..20: mol_type = other RNA
ggaatttttcttacctaagc

SEQ ID NO: 41368 - RNA, 20 nt, synthetic construct
  source 1..20: mol_type = other RNA
ggacaaaaaacgcggcactt

SEQ ID NO: 41369 - RNA, 20 nt, synthetic construct
  source 1..20: mol_type = other RNA
ggacaaaaataatatgatac

SEQ ID NO: 41370 - RNA, 20 nt, synthetic construct
  source 1..20: mol_type = other RNA
ggacaaattaccatgtttcc

SEQ ID NO: 41371 - RNA, 20 nt, synthetic construct
  source 1..20: mol_type = other RNA
ggacaacagtgtgagaccgt

SEQ ID NO: 41372 - RNA, 20 nt, synthetic construct
  source 1..20: mol_type = other RNA
ggacaagagtctgcagacca

SEQ ID NO: 41373 - RNA, 20 nt, synthetic construct
  source 1..20: mol_type = other RNA
ggacaaggaaaggatggttt

SEQ ID NO: 41374 - RNA, 20 nt, synthetic construct
  source 1..20: mol_type = other RNA
ggacaagtgggtggatgggt

SEQ ID NO: 41375 - RNA, 20 nt, synthetic construct
  source 1..20: mol_type = other RNA
ggacaatgccagggcgctcc

SEQ ID NO: 41376 - RNA, 20 nt, synthetic construct
  source 1..20: mol_type = other RNA
ggacaattgaatggggatgc

SEQ ID NO: 41377 - RNA, 20 nt, synthetic construct
  source 1..20: mol_type = other RNA
ggacacaaattatgactgag

SEQ ID NO: 41378 - RNA, 20 nt, synthetic construct
  source 1..20: mol_type = other RNA
ggacacacacagtcctgtgt

SEQ ID NO: 41379 - RNA, 20 nt, synthetic construct
  source 1..20: mol_type = other RNA
ggacacactgaaacaatcgc

SEQ ID NO: 41380 - RNA, 20 nt, synthetic construct
  source 1..20: mol_type = other RNA
ggacactagcaatccaggat

SEQ ID NO: 41381 - RNA, 20 nt, synthetic construct
  source 1..20: mol_type = other RNA
ggacactattgagagtgaaa

SEQ ID NO: 41382 - RNA, 20 nt, synthetic construct
  source 1..20: mol_type = other RNA
ggacactgcagatgaatgag

SEQ ID NO: 41383 - RNA, 20 nt, synthetic construct
  source 1..20: mol_type = other RNA
ggacactggaggtgcacatt

SEQ ID NO: 41384 - RNA, 20 nt, synthetic construct
  source 1..20: mol_type = other RNA
ggacagaaattcaacttggt

SEQ ID NO: 41385 - RNA, 20 nt, synthetic construct
  source 1..20: mol_type = other RNA
ggacagactgcagttggatt

SEQ ID NO: 41386 - RNA, 20 nt, synthetic construct
  source 1..20: mol_type = other RNA
ggacagagcagtaggcttag

SEQ ID NO: 41387 - RNA, 20 nt, synthetic construct
  source 1..20: mol_type = other RNA
ggacagattaaaatcagatt

SEQ ID NO: 41388 - RNA, 20 nt, synthetic construct
  source 1..20: mol_type = other RNA
ggacagcacattaaataagg

SEQ ID NO: 41389 - RNA, 20 nt, synthetic construct
  source 1..20: mol_type = other RNA
ggacagcggggatggttgca

SEQ ID NO: 41390 - RNA, 20 nt, synthetic construct
  source 1..20: mol_type = other RNA
ggacagctcaattaagcaac

SEQ ID NO: 41391 - RNA, 20 nt, synthetic construct
  source 1..20: mol_type = other RNA
ggacagctgggagaaagcta

SEQ ID NO: 41392 - RNA, 20 nt, synthetic construct
  source 1..20: mol_type = other RNA
ggacagcttccacccaagtg

SEQ ID NO: 41393 - RNA, 20 nt, synthetic construct
  source 1..20: mol_type = other RNA
ggacaggatcccggaacagg

SEQ ID NO: 41394 - RNA, 20 nt, synthetic construct
  source 1..20: mol_type = other RNA
ggacaggggacatgaaggaa

SEQ ID NO: 41395 - RNA, 20 nt, synthetic construct
  source 1..20: mol_type = other RNA
ggacaggtcacattctgcct

SEQ ID NO: 41396 - RNA, 20 nt, synthetic construct
  source 1..20: mol_type = other RNA
ggacagtcatcctcaacaag

SEQ ID NO: 41397 - RNA, 20 nt, synthetic construct
  source 1..20: mol_type = other RNA
ggacagttattcttcagcaa

SEQ ID NO: 41398 - RNA, 20 nt, synthetic construct
  source 1..20: mol_type = other RNA
ggacagttggccttgaggtg

SEQ ID NO: 41399 - RNA, 20 nt, synthetic construct
  source 1..20: mol_type = other RNA
ggacataagggtctgtttta

SEQ ID NO: 41400 - RNA, 20 nt, synthetic construct
  source 1..20: mol_type = other RNA
ggacatagatgaaactaaat

SEQ ID NO: 41401 - RNA, 20 nt, synthetic construct
  source 1..20: mol_type = other RNA
ggacatattttatgatttca

SEQ ID NO: 41402 - RNA, 20 nt, synthetic construct
  source 1..20: mol_type = other RNA
ggacatccacaacattgtgc

SEQ ID NO: 41403 - RNA, 20 nt, synthetic construct
  source 1..20: mol_type = other RNA
ggacatgaaggaaggattgg

SEQ ID NO: 41404 - RNA, 20 nt, synthetic construct
  source 1..20: mol_type = other RNA
ggacatgaggaaagcaggtt

SEQ ID NO: 41405 - RNA, 20 nt, synthetic construct
  source 1..20: mol_type = other RNA
ggacatgctctgataggata

SEQ ID NO: 41406 - RNA, 20 nt, synthetic construct
  source 1..20: mol_type = other RNA
ggacatggagacagtgagca

SEQ ID NO: 41407 - RNA, 20 nt, synthetic construct
  source 1..20: mol_type = other RNA
ggacattagtggaaaaactg

SEQ ID NO: 41408 - RNA, 20 nt, synthetic construct
  source 1..20: mol_type = other RNA
ggacattatcctatcagagc

SEQ ID NO: 41409 - RNA, 20 nt, synthetic construct
  source 1..20: mol_type = other RNA
ggacattatgctaagtaaaa

SEQ ID NO: 41410 - RNA, 20 nt, synthetic construct
  source 1..20: mol_type = other RNA
ggacattctgcttccttgct

SEQ ID NO: 41411 - RNA, 20 nt, synthetic construct
  source 1..20: mol_type = other RNA
ggacatttttccaaagatat

SEQ ID NO: 41412 - RNA, 20 nt, synthetic construct
  source 1..20: mol_type = other RNA
ggaccaactttaagcaaaat

SEQ ID NO: 41413 - RNA, 20 nt, synthetic construct
  source 1..20: mol_type = other RNA
ggaccaatttaccatctgac

SEQ ID NO: 41414 - RNA, 20 nt, synthetic construct
  source 1..20: mol_type = other RNA
ggaccacaatcttaccccca

SEQ ID NO: 41415 - RNA, 20 nt, synthetic construct
  source 1..20: mol_type = other RNA
ggaccagcttgggcaagaga

SEQ ID NO: 41416 - RNA, 20 nt, synthetic construct
  source 1..20: mol_type = other RNA
ggaccaggcagtcctctcac

SEQ ID NO: 41417 - RNA, 20 nt, synthetic construct
  source 1..20: mol_type = other RNA
ggaccaggtatggcgactca

SEQ ID NO: 41418 - RNA, 20 nt, synthetic construct
  source 1..20: mol_type = other RNA
ggaccagttactctctctgc

SEQ ID NO: 41419 - RNA, 20 nt, synthetic construct
  source 1..20: mol_type = other RNA
ggaccataggcacgcgcccc

SEQ ID NO: 41420 - RNA, 20 nt, synthetic construct
  source 1..20: mol_type = other RNA
ggaccatctgttaaaagata

SEQ ID NO: 41421 - RNA, 20 nt, synthetic construct
  source 1..20: mol_type = other RNA
ggaccatgttttaggagtca

SEQ ID NO: 41422 - RNA, 20 nt, synthetic construct
  source 1..20: mol_type = other RNA
ggaccattagcagttctgta

SEQ ID NO: 41423 - RNA, 20 nt, synthetic construct
  source 1..20: mol_type = other RNA
ggacccatgcccatgtgcat

SEQ ID NO: 41424 - RNA, 20 nt, synthetic construct
  source 1..20: mol_type = other RNA
ggaccccgtacgctccctcg

SEQ ID NO: 41425 - RNA, 20 nt, synthetic construct
  source 1..20: mol_type = other RNA
ggaccccgtctctgcaaaaa

SEQ ID NO: 41426 - RNA, 20 nt, synthetic construct
  source 1..20: mol_type = other RNA
ggacccctccctgctttaaa

SEQ ID NO: 41427 - RNA, 20 nt, synthetic construct
  source 1..20: mol_type = other RNA
ggacccgggaggcagatgtt

SEQ ID NO: 41428 - RNA, 20 nt, synthetic construct
  source 1..20: mol_type = other RNA
ggacccttaccttaaaccat

SEQ ID NO: 41429 - RNA, 20 nt, synthetic construct
  source 1..20: mol_type = other RNA
ggacgaatgcatgggaggta

SEQ ID NO: 41430 - RNA, 20 nt, synthetic construct
  source 1..20: mol_type = other RNA
ggacgacgtatgcaacttac

SEQ ID NO: 41431 - RNA, 20 nt, synthetic construct
  source 1..20: mol_type = other RNA
ggacgatttttccaacagtt

SEQ ID NO: 41432 - RNA, 20 nt, synthetic construct
  source 1..20: mol_type = other RNA
ggacgcaggcaaacagcgcc

SEQ ID NO: 41433 - RNA, 20 nt, synthetic construct
  source 1..20: mol_type = other RNA
ggacgcgcattttttaagtg

SEQ ID NO: 41434 - RNA, 20 nt, synthetic construct
  source 1..20: mol_type = other RNA
ggacgctgatgacagttact

SEQ ID NO: 41435 - RNA, 20 nt, synthetic construct
  source 1..20: mol_type = other RNA
ggacggggttttgccatgtt

SEQ ID NO: 41436 - RNA, 20 nt, synthetic construct
  source 1..20: mol_type = other RNA
ggacgggtggtagggagggg

SEQ ID NO: 41437 - RNA, 20 nt, synthetic construct
  source 1..20: mol_type = other RNA
ggacgtttgagttgtttcca

SEQ ID NO: 41438 - RNA, 20 nt, synthetic construct
  source 1..20: mol_type = other RNA
ggactaacagggtctacaaa

SEQ ID NO: 41439 - RNA, 20 nt, synthetic construct
  source 1..20: mol_type = other RNA
ggactacaggtgtgaaccac

SEQ ID NO: 41440 - RNA, 20 nt, synthetic construct
  source 1..20: mol_type = other RNA
ggactagactgcctgaggtc

SEQ ID NO: 41441 - RNA, 20 nt, synthetic construct
  source 1..20: mol_type = other RNA
ggactatgtaggcacattca

SEQ ID NO: 41442 - RNA, 20 nt, synthetic construct
  source 1..20: mol_type = other RNA
ggactcacagcttaccaagt

SEQ ID NO: 41443 - RNA, 20 nt, synthetic construct
  source 1..20: mol_type = other RNA
ggactcagggtcacttcctc

SEQ ID NO: 41444 - RNA, 20 nt, synthetic construct
  source 1..20: mol_type = other RNA
ggactcatgagagctgtgcc

SEQ ID NO: 41445 - RNA, 20 nt, synthetic construct
  source 1..20: mol_type = other RNA
ggactcattccaatccttcc

SEQ ID NO: 41446 - RNA, 20 nt, synthetic construct
  source 1..20: mol_type = other RNA
ggactccacagagttcagct

SEQ ID NO: 41447 - RNA, 20 nt, synthetic construct
  source 1..20: mol_type = other RNA
ggactccaccctgcccctta

SEQ ID NO: 41448 - RNA, 20 nt, synthetic construct
  source 1..20: mol_type = other RNA
ggactcccatatctacatgt

SEQ ID NO: 41449 - RNA, 20 nt, synthetic construct
  source 1..20: mol_type = other RNA
ggactccggcgggagaggag

SEQ ID NO: 41450 - RNA, 20 nt, synthetic construct
  source 1..20: mol_type = other RNA
ggactccttctgaaggcact

SEQ ID NO: 41451 - RNA, 20 nt, synthetic construct
  source 1..20: mol_type = other RNA
ggactctgctcaaaggggca

SEQ ID NO: 41452 - RNA, 20 nt, synthetic construct
  source 1..20: mol_type = other RNA
ggactcttatggctataacc

SEQ ID NO: 41453 - RNA, 20 nt, synthetic construct
  source 1..20: mol_type = other RNA
ggactgaaaagatacagaaa

SEQ ID NO: 41454 - RNA, 20 nt, synthetic construct
  source 1..20: mol_type = other RNA
ggactgaaaccagtgggtca

SEQ ID NO: 41455 - RNA, 20 nt, synthetic construct
  source 1..20: mol_type = other RNA
ggactgaagtcctttcttgg

SEQ ID NO: 41456 - RNA, 20 nt, synthetic construct
  source 1..20: mol_type = other RNA
ggactgagacagtattgtgc

SEQ ID NO: 41457 - RNA, 20 nt, synthetic construct
  source 1..20: mol_type = other RNA
ggactgagcagtgaaagtct

SEQ ID NO: 41458 - RNA, 20 nt, synthetic construct
  source 1..20: mol_type = other RNA
ggactgatgaagaacctgtt

SEQ ID NO: 41459 - RNA, 20 nt, synthetic construct
  source 1..20: mol_type = other RNA
ggactgcaacagatctgaga

SEQ ID NO: 41460 - RNA, 20 nt, synthetic construct
  source 1..20: mol_type = other RNA
ggactgcctattttgtaatt

SEQ ID NO: 41461 - RNA, 20 nt, synthetic construct
  source 1..20: mol_type = other RNA
ggactgcctggtcctgaggg

SEQ ID NO: 41462 - RNA, 20 nt, synthetic construct
  source 1..20: mol_type = other RNA
ggactgcttgaggccacgag

SEQ ID NO: 41463 - RNA, 20 nt, synthetic construct
  source 1..20: mol_type = other RNA
ggactggaactcatttctgc

SEQ ID NO: 41464 - RNA, 20 nt, synthetic construct
  source 1..20: mol_type = other RNA
ggactggactccttctgaag

SEQ ID NO: 41465 - RNA, 20 nt, synthetic construct
  source 1..20: mol_type = other RNA
ggactggagaacagtaaagt

SEQ ID NO: 41466 - RNA, 20 nt, synthetic construct
  source 1..20: mol_type = other RNA
ggactggagggatgctggag

SEQ ID NO: 41467 - RNA, 20 nt, synthetic construct
  source 1..20: mol_type = other RNA
ggactggcctcggccaacca

SEQ ID NO: 41468 - RNA, 20 nt, synthetic construct
  source 1..20: mol_type = other RNA
ggactggcttcagtgccaac

SEQ ID NO: 41469 - RNA, 20 nt, synthetic construct
  source 1..20: mol_type = other RNA
ggactgggatcctaagcatg

SEQ ID NO: 41470 - RNA, 20 nt, synthetic construct
  source 1..20: mol_type = other RNA
ggactgtcgaagcttaattt

SEQ ID NO: 41471 - RNA, 20 nt, synthetic construct
  source 1..20: mol_type = other RNA
ggactgtgagggagatattt

SEQ ID NO: 41472 - RNA, 20 nt, synthetic construct
  source 1..20: mol_type = other RNA
ggactgtgatgactgtaagc

SEQ ID NO: 41473 - RNA, 20 nt, synthetic construct
  source 1..20: mol_type = other RNA
ggactgtgtgtgtccaggcc

SEQ ID NO: 41474 - RNA, 20 nt, synthetic construct
  source 1..20: mol_type = other RNA
ggacttatggagataaatta

SEQ ID NO: 41475 - RNA, 20 nt, synthetic construct
  source 1..20: mol_type = other RNA
ggacttcactagtgggtcgg

SEQ ID NO: 41476 - RNA, 20 nt, synthetic construct
  source 1..20: mol_type = other RNA
ggacttcagtccttaccact

SEQ ID NO: 41477 - RNA, 20 nt, synthetic construct
  source 1..20: mol_type = other RNA
ggacttcatgtacaatgaat

SEQ ID NO: 41478 - RNA, 20 nt, synthetic construct
  source 1..20: mol_type = other RNA
ggacttcctattttataatg

SEQ ID NO: 41479 - RNA, 20 nt, synthetic construct
  source 1..20: mol_type = other RNA
ggacttctagcctccagaaa

SEQ ID NO: 41480 - RNA, 20 nt, synthetic construct
  source 1..20: mol_type = other RNA
ggacttgatctaaaatggaa

SEQ ID NO: 41481 - RNA, 20 nt, synthetic construct
  source 1..20: mol_type = other RNA
ggacttgctctcttgcccaa

SEQ ID NO: 41482 - RNA, 20 nt, synthetic construct
  source 1..20: mol_type = other RNA
ggacttggaagtgaagtcaa

SEQ ID NO: 41483 - RNA, 20 nt, synthetic construct
  source 1..20: mol_type = other RNA
ggacttggcacaggagagcg

SEQ ID NO: 41484 - RNA, 20 nt, synthetic construct
  source 1..20: mol_type = other RNA
ggactttaggctgttcaatt

SEQ ID NO: 41485 - RNA, 20 nt, synthetic construct
  source 1..20: mol_type = other RNA
ggactttgatgttttacatt

SEQ ID NO: 41486 - RNA, 20 nt, synthetic construct
  source 1..20: mol_type = other RNA
ggactttgtggcctcttccc

SEQ ID NO: 41487 - RNA, 20 nt, synthetic construct
  source 1..20: mol_type = other RNA
ggacttttggtacacatctt

SEQ ID NO: 41488 - RNA, 20 nt, synthetic construct
  source 1..20: mol_type = other RNA
ggagaaaacaaaaagaaact

SEQ ID NO: 41489 - RNA, 20 nt, synthetic construct
  source 1..20: mol_type = other RNA
ggagaaaagcttcataacat

SEQ ID NO: 41490 - RNA, 20 nt, synthetic construct
  source 1..20: mol_type = other RNA
ggagaaacatggcttagaaa

SEQ ID NO: 41491 - RNA, 20 nt, synthetic construct
  source 1..20: mol_type = other RNA
ggagaaaccatttacccctt

SEQ ID NO: 41492 - RNA, 20 nt, synthetic construct
  source 1..20: mol_type = other RNA
ggagaaagaccaagagtgtg

SEQ ID NO: 41493 - RNA, 20 nt, synthetic construct
  source 1..20: mol_type = other RNA
ggagaaagcccagccgcgga

SEQ ID NO: 41494 - RNA, 20 nt, synthetic construct
  source 1..20: mol_type = other RNA
ggagaaagctaatttggaat

SEQ ID NO: 41495 - RNA, 20 nt, synthetic construct
  source 1..20: mol_type = other RNA
ggagaacagtaaagtcactg

SEQ ID NO: 41496 - RNA, 20 nt, synthetic construct
  source 1..20: mol_type = other RNA
ggagaacccaggaacagatt

SEQ ID NO: 41497 - RNA, 20 nt, synthetic construct
  source 1..20: mol_type = other RNA
ggagaactgcctggacccgg

SEQ ID NO: 41498 - RNA, 20 nt, synthetic construct
  source 1..20: mol_type = other RNA
ggagaacttaaaggtttgga

SEQ ID NO: 41499 - RNA, 20 nt, synthetic construct
  source 1..20: mol_type = other RNA
ggagaacttgtctcggattt

SEQ ID NO: 41500 - RNA, 20 nt, synthetic construct
  source 1..20: mol_type = other RNA
ggagaagaaataaacgacac

SEQ ID NO: 41501 - RNA, 20 nt, synthetic construct
  source 1..20: mol_type = other RNA
ggagaagagttctgaaggct

SEQ ID NO: 41502 - RNA, 20 nt, synthetic construct
  source 1..20: mol_type = other RNA
ggagaaggccttccacggaa

SEQ ID NO: 41503 - RNA, 20 nt, synthetic construct
  source 1..20: mol_type = other RNA
ggagaatctgggaggtggag

SEQ ID NO: 41504 - RNA, 20 nt, synthetic construct
  source 1..20: mol_type = other RNA
ggagaatggcaaggctaaca

SEQ ID NO: 41505 - RNA, 20 nt, synthetic construct
  source 1..20: mol_type = other RNA
ggagaatggcatgaacccac

SEQ ID NO: 41506 - RNA, 20 nt, synthetic construct
  source 1..20: mol_type = other RNA
ggagaattactaaaattcca

SEQ ID NO: 41507 - RNA, 20 nt, synthetic construct
  source 1..20: mol_type = other RNA
ggagaattctactaaacatt

SEQ ID NO: 41508 - RNA, 20 nt, synthetic construct
  source 1..20: mol_type = other RNA
ggagaattggtagtcaatgc

SEQ ID NO: 41509 - RNA, 20 nt, synthetic construct
  source 1..20: mol_type = other RNA
ggagacactagggactggcc

SEQ ID NO: 41510 - RNA, 20 nt, synthetic construct
  source 1..20: mol_type = other RNA
ggagacagcctaaaccattt

SEQ ID NO: 41511 - RNA, 20 nt, synthetic construct
  source 1..20: mol_type = other RNA
ggagacagtgagcatgctgc

SEQ ID NO: 41512 - RNA, 20 nt, synthetic construct
  source 1..20: mol_type = other RNA
ggagacatctgagacatcac

SEQ ID NO: 41513 - RNA, 20 nt, synthetic construct
  source 1..20: mol_type = other RNA
ggagacattacaattgatac

SEQ ID NO: 41514 - RNA, 20 nt, synthetic construct
  source 1..20: mol_type = other RNA
ggagaccaggagttcttatg

SEQ ID NO: 41515 - RNA, 20 nt, synthetic construct
  source 1..20: mol_type = other RNA
ggagaccagttaggaagcca

SEQ ID NO: 41516 - RNA, 20 nt, synthetic construct
  source 1..20: mol_type = other RNA
ggagacccatactcagcccc

SEQ ID NO: 41517 - RNA, 20 nt, synthetic construct
  source 1..20: mol_type = other RNA
ggagaccgtggggggaggga

SEQ ID NO: 41518 - RNA, 20 nt, synthetic construct
  source 1..20: mol_type = other RNA
ggagacctactaaaagttga

SEQ ID NO: 41519 - RNA, 20 nt, synthetic construct
  source 1..20: mol_type = other RNA
ggagacggcgagcttgatct

SEQ ID NO: 41520 - RNA, 20 nt, synthetic construct
  source 1..20: mol_type = other RNA
ggagactagtacactgttga

SEQ ID NO: 41521 - RNA, 20 nt, synthetic construct
  source 1..20: mol_type = other RNA
ggagactatcgttatatcct

SEQ ID NO: 41522 - RNA, 20 nt, synthetic construct
  source 1..20: mol_type = other RNA
ggagactgataaacttcagt

SEQ ID NO: 41523 - RNA, 20 nt, synthetic construct
  source 1..20: mol_type = other RNA
ggagactgtgcaatgtgaaa

SEQ ID NO: 41524 - RNA, 20 nt, synthetic construct
  source 1..20: mol_type = other RNA
ggagactttcactgctcagt

SEQ ID NO: 41525 - RNA, 20 nt, synthetic construct
  source 1..20: mol_type = other RNA
ggagagaaaaacaaaacaaa

SEQ ID NO: 41526 - RNA, 20 nt, synthetic construct
  source 1..20: mol_type = other RNA
ggagagaaaccttggtgtgc

SEQ ID NO: 41527 - RNA, 20 nt, synthetic construct
  source 1..20: mol_type = other RNA
ggagagaagagggggcataa

SEQ ID NO: 41528 - RNA, 20 nt, synthetic construct
  source 1..20: mol_type = other RNA
ggagagagaaactttacact

SEQ ID NO: 41529 - RNA, 20 nt, synthetic construct
  source 1..20: mol_type = other RNA
ggagagatgcctatgaaatc

SEQ ID NO: 41530 - RNA, 20 nt, synthetic construct
  source 1..20: mol_type = other RNA
ggagagatggtagtcaacac

SEQ ID NO: 41531 - RNA, 20 nt, synthetic construct
  source 1..20: mol_type = other RNA
ggagagcactggtttcagta

SEQ ID NO: 41532 - RNA, 20 nt, synthetic construct
  source 1..20: mol_type = other RNA
ggagagcgacagctacggag

SEQ ID NO: 41533 - RNA, 20 nt, synthetic construct
  source 1..20: mol_type = other RNA
ggagaggagcgccctggcat

SEQ ID NO: 41534 - RNA, 20 nt, synthetic construct
  source 1..20: mol_type = other RNA
ggagaggcaaaggccgctct

SEQ ID NO: 41535 - RNA, 20 nt, synthetic construct
  source 1..20: mol_type = other RNA
ggagaggcatgccgggacaa

SEQ ID NO: 41536 - RNA, 20 nt, synthetic construct
  source 1..20: mol_type = other RNA
ggagaggcctcatgtatttt

SEQ ID NO: 41537 - RNA, 20 nt, synthetic construct
  source 1..20: mol_type = other RNA
ggagagggagctctgtcttg

SEQ ID NO: 41538 - RNA, 20 nt, synthetic construct
  source 1..20: mol_type = other RNA
ggagaggtgaactattagag

SEQ ID NO: 41539 - RNA, 20 nt, synthetic construct
  source 1..20: mol_type = other RNA
ggagagtcgcttgaacctga

SEQ ID NO: 41540 - RNA, 20 nt, synthetic construct
  source 1..20: mol_type = other RNA
ggagagtgggcccagcagaa

SEQ ID NO: 41541 - RNA, 20 nt, synthetic construct
  source 1..20: mol_type = other RNA
ggagataaagagcaggtgga

SEQ ID NO: 41542 - RNA, 20 nt, synthetic construct
  source 1..20: mol_type = other RNA
ggagataaattacccaaaga

SEQ ID NO: 41543 - RNA, 20 nt, synthetic construct
  source 1..20: mol_type = other RNA
ggagataccttgaaaggata

SEQ ID NO: 41544 - RNA, 20 nt, synthetic construct
  source 1..20: mol_type = other RNA
ggagatactggccatgtttt

SEQ ID NO: 41545 - RNA, 20 nt, synthetic construct
  source 1..20: mol_type = other RNA
ggagatacttgattacaagg

SEQ ID NO: 41546 - RNA, 20 nt, synthetic construct
  source 1..20: mol_type = other RNA
ggagatatacaggaagagac

SEQ ID NO: 41547 - RNA, 20 nt, synthetic construct
  source 1..20: mol_type = other RNA
ggagatatttcgcctagata

SEQ ID NO: 41548 - RNA, 20 nt, synthetic construct
  source 1..20: mol_type = other RNA
ggagatggacactgcagatg

SEQ ID NO: 41549 - RNA, 20 nt, synthetic construct
  source 1..20: mol_type = other RNA
ggagatggcacataccatgg

SEQ ID NO: 41550 - RNA, 20 nt, synthetic construct
  source 1..20: mol_type = other RNA
ggagatggggacttgctctc

SEQ ID NO: 41551 - RNA, 20 nt, synthetic construct
  source 1..20: mol_type = other RNA
ggagatgtgtaattgtacct

SEQ ID NO: 41552 - RNA, 20 nt, synthetic construct
  source 1..20: mol_type = other RNA
ggagattaaggctggaggat

SEQ ID NO: 41553 - RNA, 20 nt, synthetic construct
  source 1..20: mol_type = other RNA
ggagcaagcatgagtatctg

SEQ ID NO: 41554 - RNA, 20 nt, synthetic construct
  source 1..20: mol_type = other RNA
ggagcactgtgagccactaa

SEQ ID NO: 41555 - RNA, 20 nt, synthetic construct
  source 1..20: mol_type = other RNA
ggagcagggtgggcccttaa

SEQ ID NO: 41556 - RNA, 20 nt, synthetic construct
  source 1..20: mol_type = other RNA
ggagcagtgtgaataggaaa

SEQ ID NO: 41557 - RNA, 20 nt, synthetic construct
  source 1..20: mol_type = other RNA
ggagcagttactcctgagca

SEQ ID NO: 41558 - RNA, 20 nt, synthetic construct
  source 1..20: mol_type = other RNA
ggagcatagcttgaaccagg

SEQ ID NO: 41559 - RNA, 20 nt, synthetic construct
  source 1..20: mol_type = other RNA
ggagcatatatactctgaga

SEQ ID NO: 41560 - RNA, 20 nt, synthetic construct
  source 1..20: mol_type = other RNA
ggagcatcttcccatgaaca

SEQ ID NO: 41561 - RNA, 20 nt, synthetic construct
  source 1..20: mol_type = other RNA
ggagcatgcacacaggagaa

SEQ ID NO: 41562 - RNA, 20 nt, synthetic construct
  source 1..20: mol_type = other RNA
ggagccaaacatcatgattt

SEQ ID NO: 41563 - RNA, 20 nt, synthetic construct
  source 1..20: mol_type = other RNA
ggagccaaacttgaaccttc

SEQ ID NO: 41564 - RNA, 20 nt, synthetic construct
  source 1..20: mol_type = other RNA
ggagccaagtaaaagcaacc

SEQ ID NO: 41565 - RNA, 20 nt, synthetic construct
  source 1..20: mol_type = other RNA
ggagcccaagcacactttcc

SEQ ID NO: 41566 - RNA, 20 nt, synthetic construct
  source 1..20: mol_type = other RNA
ggagcccaccaccatgcctg

SEQ ID NO: 41567 - RNA, 20 nt, synthetic construct
  source 1..20: mol_type = other RNA
ggagccctccaggatccagt

SEQ ID NO: 41568 - RNA, 20 nt, synthetic construct
  source 1..20: mol_type = other RNA
ggagccctgctgtggccgag

SEQ ID NO: 41569 - RNA, 20 nt, synthetic construct
  source 1..20: mol_type = other RNA
ggagcctagtcatccactgc

SEQ ID NO: 41570 - RNA, 20 nt, synthetic construct
  source 1..20: mol_type = other RNA
ggagcctgaggacactagca

SEQ ID NO: 41571 - RNA, 20 nt, synthetic construct
  source 1..20: mol_type = other RNA
ggagcctgctctgcagagac

SEQ ID NO: 41572 - RNA, 20 nt, synthetic construct
  source 1..20: mol_type = other RNA
ggagccttgctgttgtaatg

SEQ ID NO: 41573 - RNA, 20 nt, synthetic construct
  source 1..20: mol_type = other RNA
ggagcgccacgtgaagatgg

SEQ ID NO: 41574 - RNA, 20 nt, synthetic construct
  source 1..20: mol_type = other RNA
ggagcgccctggcattgtcc

SEQ ID NO: 41575 - RNA, 20 nt, synthetic construct
  source 1..20: mol_type = other RNA
ggagcgggcagccttggagg

SEQ ID NO: 41576 - RNA, 20 nt, synthetic construct
  source 1..20: mol_type = other RNA
ggagcggtgtcttattgttt

SEQ ID NO: 41577 - RNA, 20 nt, synthetic construct
  source 1..20: mol_type = other RNA
ggagcgtacggggtccgcgc

SEQ ID NO: 41578 - RNA, 20 nt, synthetic construct
  source 1..20: mol_type = other RNA
ggagctagaacagaataaaa

SEQ ID NO: 41579 - RNA, 20 nt, synthetic construct
  source 1..20: mol_type = other RNA
ggagctagagggtaagacca

SEQ ID NO: 41580 - RNA, 20 nt, synthetic construct
  source 1..20: mol_type = other RNA
ggagctataatttatctgga

SEQ ID NO: 41581 - RNA, 20 nt, synthetic construct
  source 1..20: mol_type = other RNA
ggagctcactgcagcctcaa

SEQ ID NO: 41582 - RNA, 20 nt, synthetic construct
  source 1..20: mol_type = other RNA
ggagctctgtcttgatgata

SEQ ID NO: 41583 - RNA, 20 nt, synthetic construct
  source 1..20: mol_type = other RNA
ggagctgagaccacagacgt

SEQ ID NO: 41584 - RNA, 20 nt, synthetic construct
  source 1..20: mol_type = other RNA
ggagctgtatttttgctcac

SEQ ID NO: 41585 - RNA, 20 nt, synthetic construct
  source 1..20: mol_type = other RNA
ggagcttatcaggcttgagt

SEQ ID NO: 41586 - RNA, 20 nt, synthetic construct
  source 1..20: mol_type = other RNA
ggagctttcattattaccag

SEQ ID NO: 41587 - RNA, 20 nt, synthetic construct
  source 1..20: mol_type = other RNA
ggagcttttgaaactgagca

SEQ ID NO: 41588 - RNA, 20 nt, synthetic construct
  source 1..20: mol_type = other RNA
ggaggaaaaaacagttgcta

SEQ ID NO: 41589 - RNA, 20 nt, synthetic construct
  source 1..20: mol_type = other RNA
ggaggaaaataatttgcaac

SEQ ID NO: 41590 - RNA, 20 nt, synthetic construct
  source 1..20: mol_type = other RNA
ggaggaactaattgataaaa

SEQ ID NO: 41591 - RNA, 20 nt, synthetic construct
  source 1..20: mol_type = other RNA
ggaggaagagatagtctctt

SEQ ID NO: 41592 - RNA, 20 nt, synthetic construct
  source 1..20: mol_type = other RNA
ggaggaatccttcagtcagt

SEQ ID NO: 41593 - RNA, 20 nt, synthetic construct
  source 1..20: mol_type = other RNA
ggaggagaaggccttccacg

SEQ ID NO: 41594 - RNA, 20 nt, synthetic construct
  source 1..20: mol_type = other RNA
ggaggagccaagtaaaagca

SEQ ID NO: 41595 - RNA, 20 nt, synthetic construct
  source 1..20: mol_type = other RNA
ggaggagccctgctgtggcc

SEQ ID NO: 41596 - RNA, 20 nt, synthetic construct
  source 1..20: mol_type = other RNA
ggaggaggagggtgcagcct

SEQ ID NO: 41597 - RNA, 20 nt, synthetic construct
  source 1..20: mol_type = other RNA
ggaggagggtgcagcctcta

SEQ ID NO: 41598 - RNA, 20 nt, synthetic construct
  source 1..20: mol_type = other RNA
ggaggagggttagattatat

SEQ ID NO: 41599 - RNA, 20 nt, synthetic construct
  source 1..20: mol_type = other RNA
ggaggaggtcatactggagc

SEQ ID NO: 41600 - RNA, 20 nt, synthetic construct
  source 1..20: mol_type = other RNA
ggaggataatatctggactg

SEQ ID NO: 41601 - RNA, 20 nt, synthetic construct
  source 1..20: mol_type = other RNA
ggaggatgaggggctgagcc

SEQ ID NO: 41602 - RNA, 20 nt, synthetic construct
  source 1..20: mol_type = other RNA
ggaggattgtttgaggctgg

SEQ ID NO: 41603 - RNA, 20 nt, synthetic construct
  source 1..20: mol_type = other RNA
ggaggcaaaggttgagacaa

SEQ ID NO: 41604 - RNA, 20 nt, synthetic construct
  source 1..20: mol_type = other RNA
ggaggcaatgttgattttga

SEQ ID NO: 41605 - RNA, 20 nt, synthetic construct
  source 1..20: mol_type = other RNA
ggaggcacctgaacccagga

SEQ ID NO: 41606 - RNA, 20 nt, synthetic construct
  source 1..20: mol_type = other RNA
ggaggcagtaccattcccct

SEQ ID NO: 41607 - RNA, 20 nt, synthetic construct
  source 1..20: mol_type = other RNA
ggaggccatcttcatttcta

SEQ ID NO: 41608 - RNA, 20 nt, synthetic construct
  source 1..20: mol_type = other RNA
ggaggcctcagaattaatat

SEQ ID NO: 41609 - RNA, 20 nt, synthetic construct
  source 1..20: mol_type = other RNA
ggaggcggaggttgcggtga

SEQ ID NO: 41610 - RNA, 20 nt, synthetic construct
  source 1..20: mol_type = other RNA
ggaggctagaagtcccagtt

SEQ ID NO: 41611 - RNA, 20 nt, synthetic construct
  source 1..20: mol_type = other RNA
ggaggctattaactttgaaa

SEQ ID NO: 41612 - RNA, 20 nt, synthetic construct
  source 1..20: mol_type = other RNA
ggaggctgaggcaggaggca

SEQ ID NO: 41613 - RNA, 20 nt, synthetic construct
  source 1..20: mol_type = other RNA
ggaggctgaggcggaaggat

SEQ ID NO: 41614 - RNA, 20 nt, synthetic construct
  source 1..20: mol_type = other RNA
ggaggctgaggctggggaat

SEQ ID NO: 41615 - RNA, 20 nt, synthetic construct
  source 1..20: mol_type = other RNA
ggagggaaaatgtttatttt

SEQ ID NO: 41616 - RNA, 20 nt, synthetic construct
  source 1..20: mol_type = other RNA
ggagggactgaaaccagtgg

SEQ ID NO: 41617 - RNA, 20 nt, synthetic construct
  source 1..20: mol_type = other RNA
ggagggagagggagctctgt

SEQ ID NO: 41618 - RNA, 20 nt, synthetic construct
  source 1..20: mol_type = other RNA
ggagggaggattgtttgagg

SEQ ID NO: 41619 - RNA, 20 nt, synthetic construct
  source 1..20: mol_type = other RNA
ggagggatgcattctagaaa

SEQ ID NO: 41620 - RNA, 20 nt, synthetic construct
  source 1..20: mol_type = other RNA
ggagggatgctggagtgtgg

SEQ ID NO: 41621 - RNA, 20 nt, synthetic construct
  source 1..20: mol_type = other RNA
ggagggccagaggagggatg

SEQ ID NO: 41622 - RNA, 20 nt, synthetic construct
  source 1..20: mol_type = other RNA
ggagggctcccagtgcccac

SEQ ID NO: 41623 - RNA, 20 nt, synthetic construct
  source 1..20: mol_type = other RNA
ggaggggcaggaaaggtggg

SEQ ID NO: 41624 - RNA, 20 nt, synthetic construct
  source 1..20: mol_type = other RNA
ggaggggccagttgagagag

SEQ ID NO: 41625 - RNA, 20 nt, synthetic construct
  source 1..20: mol_type = other RNA
ggagggggagggagagggag

SEQ ID NO: 41626 - RNA, 20 nt, synthetic construct
  source 1..20: mol_type = other RNA
ggagggggctgaggattgga

SEQ ID NO: 41627 - RNA, 20 nt, synthetic construct
  source 1..20: mol_type = other RNA
ggaggggtattcagggggct

SEQ ID NO: 41628 - RNA, 20 nt, synthetic construct
  source 1..20: mol_type = other RNA
ggaggggtccccagcatcca

SEQ ID NO: 41629 - RNA, 20 nt, synthetic construct
  source 1..20: mol_type = other RNA
ggagggtgcagcctctaatc

SEQ ID NO: 41630 - RNA, 20 nt, synthetic construct
  source 1..20: mol_type = other RNA
ggagggtgtgatcaggaaag

SEQ ID NO: 41631 - RNA, 20 nt, synthetic construct
  source 1..20: mol_type = other RNA
ggagggttagattatatggt

SEQ ID NO: 41632 - RNA, 20 nt, synthetic construct
  source 1..20: mol_type = other RNA
ggaggtaatactataaggaa

SEQ ID NO: 41633 - RNA, 20 nt, synthetic construct
  source 1..20: mol_type = other RNA
ggaggtaggcttagatgagc

SEQ ID NO: 41634 - RNA, 20 nt, synthetic construct
  source 1..20: mol_type = other RNA
ggaggtcatactggagcagg

SEQ ID NO: 41635 - RNA, 20 nt, synthetic construct
  source 1..20: mol_type = other RNA
ggaggtcgggctgcctcagc

SEQ ID NO: 41636 - RNA, 20 nt, synthetic construct
  source 1..20: mol_type = other RNA
ggaggtctaagagataacta

SEQ ID NO: 41637 - RNA, 20 nt, synthetic construct
  source 1..20: mol_type = other RNA
ggaggtgcacattccaagag

SEQ ID NO: 41638 - RNA, 20 nt, synthetic construct
  source 1..20: mol_type = other RNA
ggaggtggaactctgtcatg

SEQ ID NO: 41639 - RNA, 20 nt, synthetic construct
  source 1..20: mol_type = other RNA
ggaggttgaagctctagtga

SEQ ID NO: 41640 - RNA, 20 nt, synthetic construct
  source 1..20: mol_type = other RNA
ggaggttgaggctgcagtga

SEQ ID NO: 41641 - RNA, 20 nt, synthetic construct
  source 1..20: mol_type = other RNA
ggaggttgcggtgacgtgag

SEQ ID NO: 41642 - RNA, 20 nt, synthetic construct
  source 1..20: mol_type = other RNA
ggaggtttgcactggcacag

SEQ ID NO: 41643 - RNA, 20 nt, synthetic construct
  source 1..20: mol_type = other RNA
ggagtaaacctgcaattttt

SEQ ID NO: 41644 - RNA, 20 nt, synthetic construct
  source 1..20: mol_type = other RNA
ggagtaacagacctctgaag

SEQ ID NO: 41645 - RNA, 20 nt, synthetic construct
  source 1..20: mol_type = other RNA
ggagtaactgctcctctgac

SEQ ID NO: 41646 - RNA, 20 nt, synthetic construct
  source 1..20: mol_type = other RNA
ggagtacagtgcataccacc

SEQ ID NO: 41647 - RNA, 20 nt, synthetic construct
  source 1..20: mol_type = other RNA
ggagtactatgcagcaacgg

SEQ ID NO: 41648 - RNA, 20 nt, synthetic construct
  source 1..20: mol_type = other RNA
ggagtagctgggattacaca

SEQ ID NO: 41649 - RNA, 20 nt, synthetic construct
  source 1..20: mol_type = other RNA
ggagtattctagttctagct

SEQ ID NO: 41650 - RNA, 20 nt, synthetic construct
  source 1..20: mol_type = other RNA
ggagtcaactaatcaaacat

SEQ ID NO: 41651 - RNA, 20 nt, synthetic construct
  source 1..20: mol_type = other RNA
ggagtcacagtgaattctga

SEQ ID NO: 41652 - RNA, 20 nt, synthetic construct
  source 1..20: mol_type = other RNA
ggagtcacttgacaaaaatt

SEQ ID NO: 41653 - RNA, 20 nt, synthetic construct
  source 1..20: mol_type = other RNA
ggagtcagtagaggccgagg

SEQ ID NO: 41654 - RNA, 20 nt, synthetic construct
  source 1..20: mol_type = other RNA
ggagtccaaccaatcgcagg

SEQ ID NO: 41655 - RNA, 20 nt, synthetic construct
  source 1..20: mol_type = other RNA
ggagtccagtcctgctaaca

SEQ ID NO: 41656 - RNA, 20 nt, synthetic construct
  source 1..20: mol_type = other RNA
ggagtccctgctttcagttc

SEQ ID NO: 41657 - RNA, 20 nt, synthetic construct
  source 1..20: mol_type = other RNA
ggagtccgcggctgggcttt

SEQ ID NO: 41658 - RNA, 20 nt, synthetic construct
  source 1..20: mol_type = other RNA
ggagtcctgtcagtttctga

SEQ ID NO: 41659 - RNA, 20 nt, synthetic construct
  source 1..20: mol_type = other RNA
ggagtctatttctgaacaaa

SEQ ID NO: 41660 - RNA, 20 nt, synthetic construct
  source 1..20: mol_type = other RNA
ggagtctgcccatcctatct

SEQ ID NO: 41661 - RNA, 20 nt, synthetic construct
  source 1..20: mol_type = other RNA
ggagtgaatttttcatttta

SEQ ID NO: 41662 - RNA, 20 nt, synthetic construct
  source 1..20: mol_type = other RNA
ggagtgacttaagcaacaga

SEQ ID NO: 41663 - RNA, 20 nt, synthetic construct
  source 1..20: mol_type = other RNA
ggagtgagaggactgcctgg

SEQ ID NO: 41664 - RNA, 20 nt, synthetic construct
  source 1..20: mol_type = other RNA
ggagtgcaatggtgggatct

SEQ ID NO: 41665 - RNA, 20 nt, synthetic construct
  source 1..20: mol_type = other RNA
ggagtgcgagtgtgaacgat

SEQ ID NO: 41666 - RNA, 20 nt, synthetic construct
  source 1..20: mol_type = other RNA
ggagtggaggggcaggaaag

SEQ ID NO: 41667 - RNA, 20 nt, synthetic construct
  source 1..20: mol_type = other RNA
ggagtggagtggcatgatct

SEQ ID NO: 41668 - RNA, 20 nt, synthetic construct
  source 1..20: mol_type = other RNA
ggagtggcatgatctcacgt

SEQ ID NO: 41669 - RNA, 20 nt, synthetic construct
  source 1..20: mol_type = other RNA
ggagtggggcacctaaaagg

SEQ ID NO: 41670 - RNA, 20 nt, synthetic construct
  source 1..20: mol_type = other RNA
ggagtggtggatagagagat

SEQ ID NO: 41671 - RNA, 20 nt, synthetic construct
  source 1..20: mol_type = other RNA
ggagtgtgcccaaggaaggc

SEQ ID NO: 41672 - RNA, 20 nt, synthetic construct
  source 1..20: mol_type = other RNA
ggagtgtggcaggggctgca

SEQ ID NO: 41673 - RNA, 20 nt, synthetic construct
  source 1..20: mol_type = other RNA
ggagtgttttcttcatggac

SEQ ID NO: 41674 - RNA, 20 nt, synthetic construct
  source 1..20: mol_type = other RNA
ggagttaattccacaaccac

SEQ ID NO: 41675 - RNA, 20 nt, synthetic construct
  source 1..20: mol_type = other RNA
ggagttaccataaaaccatt

SEQ ID NO: 41676 - RNA, 20 nt, synthetic construct
  source 1..20: mol_type = other RNA
ggagttacgctgccaaaagc

SEQ ID NO: 41677 - RNA, 20 nt, synthetic construct
  source 1..20: mol_type = other RNA
ggagttcagctttaaagaga

SEQ ID NO: 41678 - RNA, 20 nt, synthetic construct
  source 1..20: mol_type = other RNA
ggagttcagtggtgcaatca

SEQ ID NO: 41679 - RNA, 20 nt, synthetic construct
  source 1..20: mol_type = other RNA
ggagttcattagaattcagg

SEQ ID NO: 41680 - RNA, 20 nt, synthetic construct
  source 1..20: mol_type = other RNA
ggagttcattcgtagcaggt

SEQ ID NO: 41681 - RNA, 20 nt, synthetic construct
  source 1..20: mol_type = other RNA
ggagttccgatttctcggcc

SEQ ID NO: 41682 - RNA, 20 nt, synthetic construct
  source 1..20: mol_type = other RNA
ggagttcttatgaggttatt

SEQ ID NO: 41683 - RNA, 20 nt, synthetic construct
  source 1..20: mol_type = other RNA
ggagttgcatcacttgaggt

SEQ ID NO: 41684 - RNA, 20 nt, synthetic construct
  source 1..20: mol_type = other RNA
ggagttggtgcaaggataaa

SEQ ID NO: 41685 - RNA, 20 nt, synthetic construct
  source 1..20: mol_type = other RNA
ggagtttgagactgcagtga

SEQ ID NO: 41686 - RNA, 20 nt, synthetic construct
  source 1..20: mol_type = other RNA
ggagtttgtagctcaaagca

SEQ ID NO: 41687 - RNA, 20 nt, synthetic construct
  source 1..20: mol_type = other RNA
ggagttttaggaaaatagag

SEQ ID NO: 41688 - RNA, 20 nt, synthetic construct
  source 1..20: mol_type = other RNA
ggagttttccccctacaccc

SEQ ID NO: 41689 - RNA, 20 nt, synthetic construct
  source 1..20: mol_type = other RNA
ggagttttgcctctttgcta

SEQ ID NO: 41690 - RNA, 20 nt, synthetic construct
  source 1..20: mol_type = other RNA
ggataaacaaagagaacaat

SEQ ID NO: 41691 - RNA, 20 nt, synthetic construct
  source 1..20: mol_type = other RNA
ggataaatcccacttgatcc

SEQ ID NO: 41692 - RNA, 20 nt, synthetic construct
  source 1..20: mol_type = other RNA
ggataagaataccaaattca

SEQ ID NO: 41693 - RNA, 20 nt, synthetic construct
  source 1..20: mol_type = other RNA
ggataaggaaaatatgatat

SEQ ID NO: 41694 - RNA, 20 nt, synthetic construct
  source 1..20: mol_type = other RNA
ggataaggaagagtttatat

SEQ ID NO: 41695 - RNA, 20 nt, synthetic construct
  source 1..20: mol_type = other RNA
ggataaggggcagggtggag

SEQ ID NO: 41696 - RNA, 20 nt, synthetic construct
  source 1..20: mol_type = other RNA
ggataatatctggactgaaa

SEQ ID NO: 41697 - RNA, 20 nt, synthetic construct
  source 1..20: mol_type = other RNA
ggataatgagtttaattctt

SEQ ID NO: 41698 - RNA, 20 nt, synthetic construct
  source 1..20: mol_type = other RNA
ggataatgctatcattttaa

SEQ ID NO: 41699 - RNA, 20 nt, synthetic construct
  source 1..20: mol_type = other RNA
ggataatgctatccagaaga

SEQ ID NO: 41700 - RNA, 20 nt, synthetic construct
  source 1..20: mol_type = other RNA
ggataatgtccagaggagga

SEQ ID NO: 41701 - RNA, 20 nt, synthetic construct
  source 1..20: mol_type = other RNA
ggatacaaaaagcacctacc

SEQ ID NO: 41702 - RNA, 20 nt, synthetic construct
  source 1..20: mol_type = other RNA
ggatacaaggtcaatctgaa

SEQ ID NO: 41703 - RNA, 20 nt, synthetic construct
  source 1..20: mol_type = other RNA
ggatacggaaatataacatt

SEQ ID NO: 41704 - RNA, 20 nt, synthetic construct
  source 1..20: mol_type = other RNA
ggatactgagaacagaattt

SEQ ID NO: 41705 - RNA, 20 nt, synthetic construct
  source 1..20: mol_type = other RNA
ggatacttctaactttagaa

SEQ ID NO: 41706 - RNA, 20 nt, synthetic construct
  source 1..20: mol_type = other RNA
ggatagaagtgtatcagatg

SEQ ID NO: 41707 - RNA, 20 nt, synthetic construct
  source 1..20: mol_type = other RNA
ggatagagagattcaagaaa

SEQ ID NO: 41708 - RNA, 20 nt, synthetic construct
  source 1..20: mol_type = other RNA
ggatagcaacttgcagaaga

SEQ ID NO: 41709 - RNA, 20 nt, synthetic construct
  source 1..20: mol_type = other RNA
ggatagcattatccctttaa

SEQ ID NO: 41710 - RNA, 20 nt, synthetic construct
  source 1..20: mol_type = other RNA
ggatagctattatttgaaaa

SEQ ID NO: 41711 - RNA, 20 nt, synthetic construct
  source 1..20: mol_type = other RNA
ggatagtgctttttactttg

SEQ ID NO: 41712 - RNA, 20 nt, synthetic construct
  source 1..20: mol_type = other RNA
ggatagttaaacatgtaaaa

SEQ ID NO: 41713 - RNA, 20 nt, synthetic construct
  source 1..20: mol_type = other RNA
ggatagtttctcaacttagc

SEQ ID NO: 41714 - RNA, 20 nt, synthetic construct
  source 1..20: mol_type = other RNA
ggatataacgatagtctcct

SEQ ID NO: 41715 - RNA, 20 nt, synthetic construct
  source 1..20: mol_type = other RNA
ggatataagagtgggcaaaa

SEQ ID NO: 41716 - RNA, 20 nt, synthetic construct
  source 1..20: mol_type = other RNA
ggatatagctacaatgattt

SEQ ID NO: 41717 - RNA, 20 nt, synthetic construct
  source 1..20: mol_type = other RNA
ggatatcagaagtgctgact

SEQ ID NO: 41718 - RNA, 20 nt, synthetic construct
  source 1..20: mol_type = other RNA
ggatatccaaagataaaggt

SEQ ID NO: 41719 - RNA, 20 nt, synthetic construct
  source 1..20: mol_type = other RNA
ggatatccccatttttctcg

SEQ ID NO: 41720 - RNA, 20 nt, synthetic construct
  source 1..20: mol_type = other RNA
ggatatctaacataatcaaa

SEQ ID NO: 41721 - RNA, 20 nt, synthetic construct
  source 1..20: mol_type = other RNA
ggatatctgaggtcaggagc

SEQ ID NO: 41722 - RNA, 20 nt, synthetic construct
  source 1..20: mol_type = other RNA
ggatatctggcctgcaccat

SEQ ID NO: 41723 - RNA, 20 nt, synthetic construct
  source 1..20: mol_type = other RNA
ggatatgggccaaagacaga

SEQ ID NO: 41724 - RNA, 20 nt, synthetic construct
  source 1..20: mol_type = other RNA
ggatatgttttctaaacctt

SEQ ID NO: 41725 - RNA, 20 nt, synthetic construct
  source 1..20: mol_type = other RNA
ggatattctacagaaaaccc

SEQ ID NO: 41726 - RNA, 20 nt, synthetic construct
  source 1..20: mol_type = other RNA
ggatattggcttatagtgtt

SEQ ID NO: 41727 - RNA, 20 nt, synthetic construct
  source 1..20: mol_type = other RNA
ggatatttactaagaagtga

SEQ ID NO: 41728 - RNA, 20 nt, synthetic construct
  source 1..20: mol_type = other RNA
ggatatttgcagtagtattg

SEQ ID NO: 41729 - RNA, 20 nt, synthetic construct
  source 1..20: mol_type = other RNA
ggatatttggccgggcgcgg

SEQ ID NO: 41730 - RNA, 20 nt, synthetic construct
  source 1..20: mol_type = other RNA
ggatattttcgtgtactgaa

SEQ ID NO: 41731 - RNA, 20 nt, synthetic construct
  source 1..20: mol_type = other RNA
ggatcaaaccatgttcatgg

SEQ ID NO: 41732 - RNA, 20 nt, synthetic construct
  source 1..20: mol_type = other RNA
ggatcaaagacctaagctta

SEQ ID NO: 41733 - RNA, 20 nt, synthetic construct
  source 1..20: mol_type = other RNA
ggatcaaatctggctgcagg

SEQ ID NO: 41734 - RNA, 20 nt, synthetic construct
  source 1..20: mol_type = other RNA
ggatcaaggcacagtctgtg

SEQ ID NO: 41735 - RNA, 20 nt, synthetic construct
  source 1..20: mol_type = other RNA
ggatcacacttgatggtttg

SEQ ID NO: 41736 - RNA, 20 nt, synthetic construct
  source 1..20: mol_type = other RNA
ggatcacagatacaactctg

SEQ ID NO: 41737 - RNA, 20 nt, synthetic construct
  source 1..20: mol_type = other RNA
ggatcacaggcgttgagcca

SEQ ID NO: 41738 - RNA, 20 nt, synthetic construct
  source 1..20: mol_type = other RNA
ggatcaccaaagacttcagg

SEQ ID NO: 41739 - RNA, 20 nt, synthetic construct
  source 1..20: mol_type = other RNA
ggatcatatagtaattctgt

SEQ ID NO: 41740 - RNA, 20 nt, synthetic construct
  source 1..20: mol_type = other RNA
ggatccagatgtagagaaac

SEQ ID NO: 41741 - RNA, 20 nt, synthetic construct
  source 1..20: mol_type = other RNA
ggatccaggggaatagaaag

SEQ ID NO: 41742 - RNA, 20 nt, synthetic construct
  source 1..20: mol_type = other RNA
ggatccagtctctacccagc

SEQ ID NO: 41743 - RNA, 20 nt, synthetic construct
  source 1..20: mol_type = other RNA
ggatcccagtcctttgggag

SEQ ID NO: 41744 - RNA, 20 nt, synthetic construct
  source 1..20: mol_type = other RNA
ggatcccccagcccctggtg

SEQ ID NO: 41745 - RNA, 20 nt, synthetic construct
  source 1..20: mol_type = other RNA
ggatcccggaacaggaaaag

SEQ ID NO: 41746 - RNA, 20 nt, synthetic construct
  source 1..20: mol_type = other RNA
ggatcctaagcatgagatac

SEQ ID NO: 41747 - RNA, 20 nt, synthetic construct
  source 1..20: mol_type = other RNA
ggatcctggagggctcccag

SEQ ID NO: 41748 - RNA, 20 nt, synthetic construct
  source 1..20: mol_type = other RNA
ggatcctgtccaggcgcctg

SEQ ID NO: 41749 - RNA, 20 nt, synthetic construct
  source 1..20: mol_type = other RNA
ggatcctgtctcagagtata

SEQ ID NO: 41750 - RNA, 20 nt, synthetic construct
  source 1..20: mol_type = other RNA
ggatcgttagtattttcaca

SEQ ID NO: 41751 - RNA, 20 nt, synthetic construct
  source 1..20: mol_type = other RNA
ggatctctgggctcactgca

SEQ ID NO: 41752 - RNA, 20 nt, synthetic construct
  source 1..20: mol_type = other RNA
ggatctgataaattattagc

SEQ ID NO: 41753 - RNA, 20 nt, synthetic construct
  source 1..20: mol_type = other RNA
ggatctgtcatgtttgaatt

SEQ ID NO: 41754 - RNA, 20 nt, synthetic construct
  source 1..20: mol_type = other RNA
ggatctgttggtgcttagct

SEQ ID NO: 41755 - RNA, 20 nt, synthetic construct
  source 1..20: mol_type = other RNA
ggatcttactgtaagttcct

SEQ ID NO: 41756 - RNA, 20 nt, synthetic construct
  source 1..20: mol_type = other RNA
ggatcttatctgctgtcggt

SEQ ID NO: 41757 - RNA, 20 nt, synthetic construct
  source 1..20: mol_type = other RNA
ggatgaaaaagtactggaaa

SEQ ID NO: 41758 - RNA, 20 nt, synthetic construct
  source 1..20: mol_type = other RNA
ggatgaacgctaaattaaag

SEQ ID NO: 41759 - RNA, 20 nt, synthetic construct
  source 1..20: mol_type = other RNA
ggatgaatacaaaggtgtta

SEQ ID NO: 41760 - RNA, 20 nt, synthetic construct
  source 1..20: mol_type = other RNA
ggatgaatgcagtggcttcc

SEQ ID NO: 41761 - RNA, 20 nt, synthetic construct
  source 1..20: mol_type = other RNA
ggatgaatgttgtacattta

SEQ ID NO: 41762 - RNA, 20 nt, synthetic construct
  source 1..20: mol_type = other RNA
ggatgaattacaaatgaaag

SEQ ID NO: 41763 - RNA, 20 nt, synthetic construct
  source 1..20: mol_type = other RNA
ggatgaccttgacaataaat

SEQ ID NO: 41764 - RNA, 20 nt, synthetic construct
  source 1..20: mol_type = other RNA
ggatgactaggctcctgaga

SEQ ID NO: 41765 - RNA, 20 nt, synthetic construct
  source 1..20: mol_type = other RNA
ggatgactgtcctgaattct

SEQ ID NO: 41766 - RNA, 20 nt, synthetic construct
  source 1..20: mol_type = other RNA
ggatgagattaatgtaggtg

SEQ ID NO: 41767 - RNA, 20 nt, synthetic construct
  source 1..20: mol_type = other RNA
ggatgaggaagaggaaggtt

SEQ ID NO: 41768 - RNA, 20 nt, synthetic construct
  source 1..20: mol_type = other RNA
ggatgaggggctgagccttc

SEQ ID NO: 41769 - RNA, 20 nt, synthetic construct
  source 1..20: mol_type = other RNA
ggatgattctaatgtgcaag

SEQ ID NO: 41770 - RNA, 20 nt, synthetic construct
  source 1..20: mol_type = other RNA
ggatgcaacaaatgttgcag

SEQ ID NO: 41771 - RNA, 20 nt, synthetic construct
  source 1..20: mol_type = other RNA
ggatgcaagaatggtttaac

SEQ ID NO: 41772 - RNA, 20 nt, synthetic construct
  source 1..20: mol_type = other RNA
ggatgcacaagacagatgtg

SEQ ID NO: 41773 - RNA, 20 nt, synthetic construct
  source 1..20: mol_type = other RNA
ggatgcagatttctttttac

SEQ ID NO: 41774 - RNA, 20 nt, synthetic construct
  source 1..20: mol_type = other RNA
ggatgcagcaaaagcaccac

SEQ ID NO: 41775 - RNA, 20 nt, synthetic construct
  source 1..20: mol_type = other RNA
ggatgcatgaggcatattat

SEQ ID NO: 41776 - RNA, 20 nt, synthetic construct
  source 1..20: mol_type = other RNA
ggatgcattctagaaaggag

SEQ ID NO: 41777 - RNA, 20 nt, synthetic construct
  source 1..20: mol_type = other RNA
ggatgccggtaatcacagct

SEQ ID NO: 41778 - RNA, 20 nt, synthetic construct
  source 1..20: mol_type = other RNA
ggatgctcagggtgcgacct

SEQ ID NO: 41779 - RNA, 20 nt, synthetic construct
  source 1..20: mol_type = other RNA
ggatgctcagtttcaaaagc

SEQ ID NO: 41780 - RNA, 20 nt, synthetic construct
  source 1..20: mol_type = other RNA
ggatgctgcgagccccgggg

SEQ ID NO: 41781 - RNA, 20 nt, synthetic construct
  source 1..20: mol_type = other RNA
ggatgctggagtgtggcagg

SEQ ID NO: 41782 - RNA, 20 nt, synthetic construct
  source 1..20: mol_type = other RNA
ggatgctggggacccctccc

SEQ ID NO: 41783 - RNA, 20 nt, synthetic construct
  source 1..20: mol_type = other RNA
ggatgctgtctataggcaat

SEQ ID NO: 41784 - RNA, 20 nt, synthetic construct
  source 1..20: mol_type = other RNA
ggatgcttaaagcgctactc

SEQ ID NO: 41785 - RNA, 20 nt, synthetic construct
  source 1..20: mol_type = other RNA
ggatggcatgaaatgggttt

SEQ ID NO: 41786 - RNA, 20 nt, synthetic construct
  source 1..20: mol_type = other RNA
ggatggccagtcatgtgggg

SEQ ID NO: 41787 - RNA, 20 nt, synthetic construct
  source 1..20: mol_type = other RNA
ggatggctgaaagagaaaga

SEQ ID NO: 41788 - RNA, 20 nt, synthetic construct
  source 1..20: mol_type = other RNA
ggatggcttgagcccagggg

SEQ ID NO: 41789 - RNA, 20 nt, synthetic construct
  source 1..20: mol_type = other RNA
ggatgggcagactccttccc

SEQ ID NO: 41790 - RNA, 20 nt, synthetic construct
  source 1..20: mol_type = other RNA
ggatgggcattccagagggt

SEQ ID NO: 41791 - RNA, 20 nt, synthetic construct
  source 1..20: mol_type = other RNA
ggatgggggacgacgtatgc

SEQ ID NO: 41792 - RNA, 20 nt, synthetic construct
  source 1..20: mol_type = other RNA
ggatgggtgtagggtttggc

SEQ ID NO: 41793 - RNA, 20 nt, synthetic construct
  source 1..20: mol_type = other RNA
ggatggttgcacaatgttgt

SEQ ID NO: 41794 - RNA, 20 nt, synthetic construct
  source 1..20: mol_type = other RNA
ggatggtttgattgttccag

SEQ ID NO: 41795 - RNA, 20 nt, synthetic construct
  source 1..20: mol_type = other RNA
ggatgtagaaggatatgttt

SEQ ID NO: 41796 - RNA, 20 nt, synthetic construct
  source 1..20: mol_type = other RNA
ggatgtcaacaaaatactag

SEQ ID NO: 41797 - RNA, 20 nt, synthetic construct
  source 1..20: mol_type = other RNA
ggatgtcaactgaggcagag

SEQ ID NO: 41798 - RNA, 20 nt, synthetic construct
  source 1..20: mol_type = other RNA
ggatgtccttaatgccaccg

SEQ ID NO: 41799 - RNA, 20 nt, synthetic construct
  source 1..20: mol_type = other RNA
ggatgtctttgggaaggccc

SEQ ID NO: 41800 - RNA, 20 nt, synthetic construct
  source 1..20: mol_type = other RNA
ggatgtggtgtggcatgtct

SEQ ID NO: 41801 - RNA, 20 nt, synthetic construct
  source 1..20: mol_type = other RNA
ggatgtgtacccgtgtgttt

SEQ ID NO: 41802 - RNA, 20 nt, synthetic construct
  source 1..20: mol_type = other RNA
ggatgtgtatgatcaaagtg

SEQ ID NO: 41803 - RNA, 20 nt, synthetic construct
  source 1..20: mol_type = other RNA
ggatgtgtgcacaacacatg

SEQ ID NO: 41804 - RNA, 20 nt, synthetic construct
  source 1..20: mol_type = other RNA
ggatgttaattagatatgtg

SEQ ID NO: 41805 - RNA, 20 nt, synthetic construct
  source 1..20: mol_type = other RNA
ggatgttgcctactagccag

SEQ ID NO: 41806 - RNA, 20 nt, synthetic construct
  source 1..20: mol_type = other RNA
ggatgttggtgagaacccag

SEQ ID NO: 41807 - RNA, 20 nt, synthetic construct
  source 1..20: mol_type = other RNA
ggatgtttctacctttggct

SEQ ID NO: 41808 - RNA, 20 nt, synthetic construct
  source 1..20: mol_type = other RNA
ggatgtttttagagagatgc

SEQ ID NO: 41809 - RNA, 20 nt, synthetic construct
  source 1..20: mol_type = other RNA
ggattaagacactacaaaaa

SEQ ID NO: 41810 - RNA, 20 nt, synthetic construct
  source 1..20: mol_type = other RNA
ggattaaggagatggcacat

SEQ ID NO: 41811 - RNA, 20 nt, synthetic construct
  source 1..20: mol_type = other RNA
ggattaatctttctgaactc

SEQ ID NO: 41812 - RNA, 20 nt, synthetic construct
  source 1..20: mol_type = other RNA
ggattacaatgtaaggtgca

SEQ ID NO: 41813 - RNA, 20 nt, synthetic construct
  source 1..20: mol_type = other RNA
ggattacacacacctaccac

SEQ ID NO: 41814 - RNA, 20 nt, synthetic construct
  source 1..20: mol_type = other RNA
ggattacaggcgcacgccat

SEQ ID NO: 41815 - RNA, 20 nt, synthetic construct
  source 1..20: mol_type = other RNA
ggattagaaagtagattagc

SEQ ID NO: 41816 - RNA, 20 nt, synthetic construct
  source 1..20: mol_type = other RNA
ggattagcttattctttttc

SEQ ID NO: 41817 - RNA, 20 nt, synthetic construct
  source 1..20: mol_type = other RNA
ggattagtgttaattcttcc

SEQ ID NO: 41818 - RNA, 20 nt, synthetic construct
  source 1..20: mol_type = other RNA
ggattatagtggtaaggagc

SEQ ID NO: 41819 - RNA, 20 nt, synthetic construct
  source 1..20: mol_type = other RNA
ggattatatgttctaaagtt

SEQ ID NO: 41820 - RNA, 20 nt, synthetic construct
  source 1..20: mol_type = other RNA
ggattatggctagaaacttg

SEQ ID NO: 41821 - RNA, 20 nt, synthetic construct
  source 1..20: mol_type = other RNA
ggattatttggaagagagaa

SEQ ID NO: 41822 - RNA, 20 nt, synthetic construct
  source 1..20: mol_type = other RNA
ggattccaggtttacaggat

SEQ ID NO: 41823 - RNA, 20 nt, synthetic construct
  source 1..20: mol_type = other RNA
ggattcccaggtattttgtt

SEQ ID NO: 41824 - RNA, 20 nt, synthetic construct
  source 1..20: mol_type = other RNA
ggattcctccctggagaggc

SEQ ID NO: 41825 - RNA, 20 nt, synthetic construct
  source 1..20: mol_type = other RNA
ggattcctttcaaagagacc

SEQ ID NO: 41826 - RNA, 20 nt, synthetic construct
  source 1..20: mol_type = other RNA
ggattcgattaaaataacac

SEQ ID NO: 41827 - RNA, 20 nt, synthetic construct
  source 1..20: mol_type = other RNA
ggattcgggggagagcactg

SEQ ID NO: 41828 - RNA, 20 nt, synthetic construct
  source 1..20: mol_type = other RNA
ggattctgctactagcaagc

SEQ ID NO: 41829 - RNA, 20 nt, synthetic construct
  source 1..20: mol_type = other RNA
ggattctggccaaatccctg

SEQ ID NO: 41830 - RNA, 20 nt, synthetic construct
  source 1..20: mol_type = other RNA
ggattcttgttaagcatttt

SEQ ID NO: 41831 - RNA, 20 nt, synthetic construct
  source 1..20: mol_type = other RNA
ggattgaatggaaagaaata

SEQ ID NO: 41832 - RNA, 20 nt, synthetic construct
  source 1..20: mol_type = other RNA
ggattgagggttagattttt

SEQ ID NO: 41833 - RNA, 20 nt, synthetic construct
  source 1..20: mol_type = other RNA
ggattgattccagtttctct

SEQ ID NO: 41834 - RNA, 20 nt, synthetic construct
  source 1..20: mol_type = other RNA
ggattgcctaacaccagtaa

SEQ ID NO: 41835 - RNA, 20 nt, synthetic construct
  source 1..20: mol_type = other RNA
ggattgcgattgtttcagtg

SEQ ID NO: 41836 - RNA, 20 nt, synthetic construct
  source 1..20: mol_type = other RNA
ggattgctaaactgttcccc

SEQ ID NO: 41837 - RNA, 20 nt, synthetic construct
  source 1..20: mol_type = other RNA
ggattgctagtgtcctcagg

SEQ ID NO: 41838 - RNA, 20 nt, synthetic construct
  source 1..20: mol_type = other RNA
ggattggaaaactaggtatt

SEQ ID NO: 41839 - RNA, 20 nt, synthetic construct
  source 1..20: mol_type = other RNA
ggattggaatgagtccagct

SEQ ID NO: 41840 - RNA, 20 nt, synthetic construct
  source 1..20: mol_type = other RNA
ggattggagactgataaact

SEQ ID NO: 41841 - RNA, 20 nt, synthetic construct
  source 1..20: mol_type = other RNA
ggattgggaagattggcttt

SEQ ID NO: 41842 - RNA, 20 nt, synthetic construct
  source 1..20: mol_type = other RNA
ggattgtgtgtcgagaaaaa

SEQ ID NO: 41843 - RNA, 20 nt, synthetic construct
  source 1..20: mol_type = other RNA
ggattgttcatgtctgtgta

SEQ ID NO: 41844 - RNA, 20 nt, synthetic construct
  source 1..20: mol_type = other RNA
ggattgtttgaggctgggag

SEQ ID NO: 41845 - RNA, 20 nt, synthetic construct
  source 1..20: mol_type = other RNA
ggatttaagagaggaagtga

SEQ ID NO: 41846 - RNA, 20 nt, synthetic construct
  source 1..20: mol_type = other RNA
ggatttacttctatatgtaa

SEQ ID NO: 41847 - RNA, 20 nt, synthetic construct
  source 1..20: mol_type = other RNA
ggatttatctttctagattc

SEQ ID NO: 41848 - RNA, 20 nt, synthetic construct
  source 1..20: mol_type = other RNA
ggatttcagtaaatgaaatt

SEQ ID NO: 41849 - RNA, 20 nt, synthetic construct
  source 1..20: mol_type = other RNA
ggatttcatgaacaattttc

SEQ ID NO: 41850 - RNA, 20 nt, synthetic construct
  source 1..20: mol_type = other RNA
ggatttgagtaactaaacta

SEQ ID NO: 41851 - RNA, 20 nt, synthetic construct
  source 1..20: mol_type = other RNA
ggatttgattgggcattaat

SEQ ID NO: 41852 - RNA, 20 nt, synthetic construct
  source 1..20: mol_type = other RNA
ggatttggccagaatccctt

SEQ ID NO: 41853 - RNA, 20 nt, synthetic construct
  source 1..20: mol_type = other RNA
ggatttgggaaggatggcca

SEQ ID NO: 41854 - RNA, 20 nt, synthetic construct
  source 1..20: mol_type = other RNA
ggatttgtttgtgaagatac

SEQ ID NO: 41855 - RNA, 20 nt, synthetic construct
  source 1..20: mol_type = other RNA
ggattttcgtatcttttaac

SEQ ID NO: 41856 - RNA, 20 nt, synthetic construct
  source 1..20: mol_type = other RNA
ggattttctattcattacca

SEQ ID NO: 41857 - RNA, 20 nt, synthetic construct
  source 1..20: mol_type = other RNA
ggattttcttcatttaattc

SEQ ID NO: 41858 - RNA, 20 nt, synthetic construct
  source 1..20: mol_type = other RNA
ggattttggattgcgattgt

SEQ ID NO: 41859 - RNA, 20 nt, synthetic construct
  source 1..20: mol_type = other RNA
ggatttttctgtttctgtga

SEQ ID NO: 41860 - RNA, 20 nt, synthetic construct
  source 1..20: mol_type = other RNA
ggatttttgtgtagaggtga

SEQ ID NO: 41861 - RNA, 20 nt, synthetic construct
  source 1..20: mol_type = other RNA
ggcaaaaaagtcatgacctg

SEQ ID NO: 41862 - RNA, 20 nt, synthetic construct
  source 1..20: mol_type = other RNA
ggcaaaaaatgcagtagtaa

SEQ ID NO: 41863 - RNA, 20 nt, synthetic construct
  source 1..20: mol_type = other RNA
ggcaaaaatcatcatatata

SEQ ID NO: 41864 - RNA, 20 nt, synthetic construct
  source 1..20: mol_type = other RNA
ggcaaaactcctgaacaaaa

SEQ ID NO: 41865 - RNA, 20 nt, synthetic construct
  source 1..20: mol_type = other RNA
ggcaaaagatgatgaacaaa

SEQ ID NO: 41866 - RNA, 20 nt, synthetic construct
  source 1..20: mol_type = other RNA
ggcaaaatggagacatctga

SEQ ID NO: 41867 - RNA, 20 nt, synthetic construct
  source 1..20: mol_type = other RNA
ggcaaacagactgagccagc

SEQ ID NO: 41868 - RNA, 20 nt, synthetic construct
  source 1..20: mol_type = other RNA
ggcaaacagcgccacttaaa

SEQ ID NO: 41869 - RNA, 20 nt, synthetic construct
  source 1..20: mol_type = other RNA
ggcaaaccacacagagaaca

SEQ ID NO: 41870 - RNA, 20 nt, synthetic construct
  source 1..20: mol_type = other RNA
ggcaaacttagaatataaac

SEQ ID NO: 41871 - RNA, 20 nt, synthetic construct
  source 1..20: mol_type = other RNA
ggcaaaggaaaaaacttttt

SEQ ID NO: 41872 - RNA, 20 nt, synthetic construct
  source 1..20: mol_type = other RNA
ggcaaaggaaaaatctaacc

SEQ ID NO: 41873 - RNA, 20 nt, synthetic construct
  source 1..20: mol_type = other RNA
ggcaaaggccgctcttgacc

SEQ ID NO: 41874 - RNA, 20 nt, synthetic construct
  source 1..20: mol_type = other RNA
ggcaaaggttgagacaagac

SEQ ID NO: 41875 - RNA, 20 nt, synthetic construct
  source 1..20: mol_type = other RNA
ggcaaatctttagtgttgct

SEQ ID NO: 41876 - RNA, 20 nt, synthetic construct
  source 1..20: mol_type = other RNA
ggcaaattcatagatcacca

SEQ ID NO: 41877 - RNA, 20 nt, synthetic construct
  source 1..20: mol_type = other RNA
ggcaaattgtcagattttct

SEQ ID NO: 41878 - RNA, 20 nt, synthetic construct
  source 1..20: mol_type = other RNA
ggcaaatttatgtgaaaaga

SEQ ID NO: 41879 - RNA, 20 nt, synthetic construct
  source 1..20: mol_type = other RNA
ggcaacaaaggcgaagcccg

SEQ ID NO: 41880 - RNA, 20 nt, synthetic construct
  source 1..20: mol_type = other RNA
ggcaacaatcaacaggtagc

SEQ ID NO: 41881 - RNA, 20 nt, synthetic construct
  source 1..20: mol_type = other RNA
ggcaacagagacagagaatc

SEQ ID NO: 41882 - RNA, 20 nt, synthetic construct
  source 1..20: mol_type = other RNA
ggcaacagtcattcaggtct

SEQ ID NO: 41883 - RNA, 20 nt, synthetic construct
  source 1..20: mol_type = other RNA
ggcaacatccctatgcaata

SEQ ID NO: 41884 - RNA, 20 nt, synthetic construct
  source 1..20: mol_type = other RNA
ggcaacattttaattccaaa

SEQ ID NO: 41885 - RNA, 20 nt, synthetic construct
  source 1..20: mol_type = other RNA
ggcaaccttgggagaaaatt

SEQ ID NO: 41886 - RNA, 20 nt, synthetic construct
  source 1..20: mol_type = other RNA
ggcaagagagcaagactcaa

SEQ ID NO: 41887 - RNA, 20 nt, synthetic construct
  source 1..20: mol_type = other RNA
ggcaagagagcaagtcccca

SEQ ID NO: 41888 - RNA, 20 nt, synthetic construct
  source 1..20: mol_type = other RNA
ggcaaggctaacagccaaag

SEQ ID NO: 41889 - RNA, 20 nt, synthetic construct
  source 1..20: mol_type = other RNA
ggcaagggactgtcgaagct

SEQ ID NO: 41890 - RNA, 20 nt, synthetic construct
  source 1..20: mol_type = other RNA
ggcaaggggaatggtactgc

SEQ ID NO: 41891 - RNA, 20 nt, synthetic construct
  source 1..20: mol_type = other RNA
ggcaagtttccattctctta

SEQ ID NO: 41892 - RNA, 20 nt, synthetic construct
  source 1..20: mol_type = other RNA
ggcaatactctcagaaatta

SEQ ID NO: 41893 - RNA, 20 nt, synthetic construct
  source 1..20: mol_type = other RNA
ggcaatatagtgggaccccg

SEQ ID NO: 41894 - RNA, 20 nt, synthetic construct
  source 1..20: mol_type = other RNA
ggcaatcaaatggccttctt

SEQ ID NO: 41895 - RNA, 20 nt, synthetic construct
  source 1..20: mol_type = other RNA
ggcaatccttccgcctcagc

SEQ ID NO: 41896 - RNA, 20 nt, synthetic construct
  source 1..20: mol_type = other RNA
ggcaatctcagctcattaca

SEQ ID NO: 41897 - RNA, 20 nt, synthetic construct
  source 1..20: mol_type = other RNA
ggcaatgagtctgacatact

SEQ ID NO: 41898 - RNA, 20 nt, synthetic construct
  source 1..20: mol_type = other RNA
ggcaatgctctcttccccca

SEQ ID NO: 41899 - RNA, 20 nt, synthetic construct
  source 1..20: mol_type = other RNA
ggcaatgtaacacagttcta

SEQ ID NO: 41900 - RNA, 20 nt, synthetic construct
  source 1..20: mol_type = other RNA
ggcaatgtagggaatagaca

SEQ ID NO: 41901 - RNA, 20 nt, synthetic construct
  source 1..20: mol_type = other RNA
ggcaatgttgattttgaggc

SEQ ID NO: 41902 - RNA, 20 nt, synthetic construct
  source 1..20: mol_type = other RNA
ggcaattccataaatgtttg

SEQ ID NO: 41903 - RNA, 20 nt, synthetic construct
  source 1..20: mol_type = other RNA
ggcaatttagaattctctct

SEQ ID NO: 41904 - RNA, 20 nt, synthetic construct
  source 1..20: mol_type = other RNA
ggcaatttctcaaaaattta

SEQ ID NO: 41905 - RNA, 20 nt, synthetic construct
  source 1..20: mol_type = other RNA
ggcacaatcatagctcacta

SEQ ID NO: 41906 - RNA, 20 nt, synthetic construct
  source 1..20: mol_type = other RNA
ggcacacgccactgcaggtg

SEQ ID NO: 41907 - RNA, 20 nt, synthetic construct
  source 1..20: mol_type = other RNA
ggcacactccccagtggttg

SEQ ID NO: 41908 - RNA, 20 nt, synthetic construct
  source 1..20: mol_type = other RNA
ggcacagaattattgattgg

SEQ ID NO: 41909 - RNA, 20 nt, synthetic construct
  source 1..20: mol_type = other RNA
ggcacagcactgttaactga

SEQ ID NO: 41910 - RNA, 20 nt, synthetic construct
  source 1..20: mol_type = other RNA
ggcacagccagtcagtgatg

SEQ ID NO: 41911 - RNA, 20 nt, synthetic construct
  source 1..20: mol_type = other RNA
ggcacagctctcatgagtcc

SEQ ID NO: 41912 - RNA, 20 nt, synthetic construct
  source 1..20: mol_type = other RNA
ggcacaggagagcgacagct

SEQ ID NO: 41913 - RNA, 20 nt, synthetic construct
  source 1..20: mol_type = other RNA
ggcacagtctgtgcttaagg

SEQ ID NO: 41914 - RNA, 20 nt, synthetic construct
  source 1..20: mol_type = other RNA
ggcacatactgcatattgaa

SEQ ID NO: 41915 - RNA, 20 nt, synthetic construct
  source 1..20: mol_type = other RNA
ggcacattcaagcagaaatg

SEQ ID NO: 41916 - RNA, 20 nt, synthetic construct
  source 1..20: mol_type = other RNA
ggcaccgtgacagaacaaat

SEQ ID NO: 41917 - RNA, 20 nt, synthetic construct
  source 1..20: mol_type = other RNA
ggcacctaaaaggttgctta

SEQ ID NO: 41918 - RNA, 20 nt, synthetic construct
  source 1..20: mol_type = other RNA
ggcacctgaacccaggaggc

SEQ ID NO: 41919 - RNA, 20 nt, synthetic construct
  source 1..20: mol_type = other RNA
ggcaccttcagaagccctgc

SEQ ID NO: 41920 - RNA, 20 nt, synthetic construct
  source 1..20: mol_type = other RNA
ggcaccttccctactcactg

SEQ ID NO: 41921 - RNA, 20 nt, synthetic construct
  source 1..20: mol_type = other RNA
ggcactaacaaagggcctgt

SEQ ID NO: 41922 - RNA, 20 nt, synthetic construct
  source 1..20: mol_type = other RNA
ggcactgaagccagtccttg

SEQ ID NO: 41923 - RNA, 20 nt, synthetic construct
  source 1..20: mol_type = other RNA
ggcactgggagccctccagg

SEQ ID NO: 41924 - RNA, 20 nt, synthetic construct
  source 1..20: mol_type = other RNA
ggcactgggtccccggagga

SEQ ID NO: 41925 - RNA, 20 nt, synthetic construct
  source 1..20: mol_type = other RNA
ggcactgtatggttcttaag

SEQ ID NO: 41926 - RNA, 20 nt, synthetic construct
  source 1..20: mol_type = other RNA
ggcacttgggatgtttctac

SEQ ID NO: 41927 - RNA, 20 nt, synthetic construct
  source 1..20: mol_type = other RNA
ggcacttggtaagctgtgag

SEQ ID NO: 41928 - RNA, 20 nt, synthetic construct
  source 1..20: mol_type = other RNA
ggcactttcctgataagggg

SEQ ID NO: 41929 - RNA, 20 nt, synthetic construct
  source 1..20: mol_type = other RNA
ggcagaacacactgctcttc

SEQ ID NO: 41930 - RNA, 20 nt, synthetic construct
  source 1..20: mol_type = other RNA
ggcagaaccacctgggggag

SEQ ID NO: 41931 - RNA, 20 nt, synthetic construct
  source 1..20: mol_type = other RNA
ggcagaatgtgacctgtcct

SEQ ID NO: 41932 - RNA, 20 nt, synthetic construct
  source 1..20: mol_type = other RNA
ggcagaattatagagggcct

SEQ ID NO: 41933 - RNA, 20 nt, synthetic construct
  source 1..20: mol_type = other RNA
ggcagactccttcccctggt

SEQ ID NO: 41934 - RNA, 20 nt, synthetic construct
  source 1..20: mol_type = other RNA
ggcagagaactgactgaagg

SEQ ID NO: 41935 - RNA, 20 nt, synthetic construct
  source 1..20: mol_type = other RNA
ggcagagagagtaactggtc

SEQ ID NO: 41936 - RNA, 20 nt, synthetic construct
  source 1..20: mol_type = other RNA
ggcagagagatggtgggaga

SEQ ID NO: 41937 - RNA, 20 nt, synthetic construct
  source 1..20: mol_type = other RNA
ggcagagataactgggtgtg

SEQ ID NO: 41938 - RNA, 20 nt, synthetic construct
  source 1..20: mol_type = other RNA
ggcagagggagcagcgggcg

SEQ ID NO: 41939 - RNA, 20 nt, synthetic construct
  source 1..20: mol_type = other RNA
ggcagagtagagaaggcttt

SEQ ID NO: 41940 - RNA, 20 nt, synthetic construct
  source 1..20: mol_type = other RNA
ggcagatcaattgaccaaac

SEQ ID NO: 41941 - RNA, 20 nt, synthetic construct
  source 1..20: mol_type = other RNA
ggcagatcacaaggtcagaa

SEQ ID NO: 41942 - RNA, 20 nt, synthetic construct
  source 1..20: mol_type = other RNA
ggcagatcacgaggtcgaga

SEQ ID NO: 41943 - RNA, 20 nt, synthetic construct
  source 1..20: mol_type = other RNA
ggcagatgttgcggtgagca

SEQ ID NO: 41944 - RNA, 20 nt, synthetic construct
  source 1..20: mol_type = other RNA
ggcagcaaagcaagaaaaag

SEQ ID NO: 41945 - RNA, 20 nt, synthetic construct
  source 1..20: mol_type = other RNA
ggcagcaggggctaagtagt

SEQ ID NO: 41946 - RNA, 20 nt, synthetic construct
  source 1..20: mol_type = other RNA
ggcagccccgcttcagttgg

SEQ ID NO: 41947 - RNA, 20 nt, synthetic construct
  source 1..20: mol_type = other RNA
ggcagcccgacctccagcgc

SEQ ID NO: 41948 - RNA, 20 nt, synthetic construct
  source 1..20: mol_type = other RNA
ggcagccttctctcttccaa

SEQ ID NO: 41949 - RNA, 20 nt, synthetic construct
  source 1..20: mol_type = other RNA
ggcagccttggaggagccct

SEQ ID NO: 41950 - RNA, 20 nt, synthetic construct
  source 1..20: mol_type = other RNA
ggcagcgtaactccatcttc

SEQ ID NO: 41951 - RNA, 20 nt, synthetic construct
  source 1..20: mol_type = other RNA
ggcagctaagcaccaacaga

SEQ ID NO: 41952 - RNA, 20 nt, synthetic construct
  source 1..20: mol_type = other RNA
ggcaggaaaggtggggaagg

SEQ ID NO: 41953 - RNA, 20 nt, synthetic construct
  source 1..20: mol_type = other RNA
ggcaggactgcttgaggcca

SEQ ID NO: 41954 - RNA, 20 nt, synthetic construct
  source 1..20: mol_type = other RNA
ggcaggagaactgcctggac

SEQ ID NO: 41955 - RNA, 20 nt, synthetic construct
  source 1..20: mol_type = other RNA
ggcaggagaatggcatgaac

SEQ ID NO: 41956 - RNA, 20 nt, synthetic construct
  source 1..20: mol_type = other RNA
ggcaggagagtcgcttgaac

SEQ ID NO: 41957 - RNA, 20 nt, synthetic construct
  source 1..20: mol_type = other RNA
ggcaggagcagtgtgaatag

SEQ ID NO: 41958 - RNA, 20 nt, synthetic construct
  source 1..20: mol_type = other RNA
ggcaggagcatagcttgaac

SEQ ID NO: 41959 - RNA, 20 nt, synthetic construct
  source 1..20: mol_type = other RNA
ggcaggaggcacctgaaccc

SEQ ID NO: 41960 - RNA, 20 nt, synthetic construct
  source 1..20: mol_type = other RNA
ggcaggaggcctcagaatta

SEQ ID NO: 41961 - RNA, 20 nt, synthetic construct
  source 1..20: mol_type = other RNA
ggcaggcaccttcagaagcc

SEQ ID NO: 41962 - RNA, 20 nt, synthetic construct
  source 1..20: mol_type = other RNA
ggcaggcagatcacgaggtc

SEQ ID NO: 41963 - RNA, 20 nt, synthetic construct
  source 1..20: mol_type = other RNA
ggcaggcattgtgctcagtg

SEQ ID NO: 41964 - RNA, 20 nt, synthetic construct
  source 1..20: mol_type = other RNA
ggcagggagagagaaacttt

SEQ ID NO: 41965 - RNA, 20 nt, synthetic construct
  source 1..20: mol_type = other RNA
ggcagggatgctgcgagccc

SEQ ID NO: 41966 - RNA, 20 nt, synthetic construct
  source 1..20: mol_type = other RNA
ggcagggcttggtggcccac

SEQ ID NO: 41967 - RNA, 20 nt, synthetic construct
  source 1..20: mol_type = other RNA
ggcaggggctgcatcatggt

SEQ ID NO: 41968 - RNA, 20 nt, synthetic construct
  source 1..20: mol_type = other RNA
ggcagggtaggaaggcggtg

SEQ ID NO: 41969 - RNA, 20 nt, synthetic construct
  source 1..20: mol_type = other RNA
ggcagggtggagtccaacca

SEQ ID NO: 41970 - RNA, 20 nt, synthetic construct
  source 1..20: mol_type = other RNA
ggcaggtcacctagcctctc

SEQ ID NO: 41971 - RNA, 20 nt, synthetic construct
  source 1..20: mol_type = other RNA
ggcaggtggatatctgaggt

SEQ ID NO: 41972 - RNA, 20 nt, synthetic construct
  source 1..20: mol_type = other RNA
ggcaggtggatcaggagatt

SEQ ID NO: 41973 - RNA, 20 nt, synthetic construct
  source 1..20: mol_type = other RNA
ggcaggtttcaagtgaacca

SEQ ID NO: 41974 - RNA, 20 nt, synthetic construct
  source 1..20: mol_type = other RNA
ggcagtaccattccccttgc

SEQ ID NO: 41975 - RNA, 20 nt, synthetic construct
  source 1..20: mol_type = other RNA
ggcagtcctctactttcaca

SEQ ID NO: 41976 - RNA, 20 nt, synthetic construct
  source 1..20: mol_type = other RNA
ggcagtcctctcactccaaa

SEQ ID NO: 41977 - RNA, 20 nt, synthetic construct
  source 1..20: mol_type = other RNA
ggcagtctaggaaaagactt

SEQ ID NO: 41978 - RNA, 20 nt, synthetic construct
  source 1..20: mol_type = other RNA
ggcagtctagtccatgaaga

SEQ ID NO: 41979 - RNA, 20 nt, synthetic construct
  source 1..20: mol_type = other RNA
ggcagttattaagagtgtgc

SEQ ID NO: 41980 - RNA, 20 nt, synthetic construct
  source 1..20: mol_type = other RNA
ggcagttgagttttcaacct

SEQ ID NO: 41981 - RNA, 20 nt, synthetic construct
  source 1..20: mol_type = other RNA
ggcagtttaagaattaaaaa

SEQ ID NO: 41982 - RNA, 20 nt, synthetic construct
  source 1..20: mol_type = other RNA
ggcataaagacagacatttg

SEQ ID NO: 41983 - RNA, 20 nt, synthetic construct
  source 1..20: mol_type = other RNA
ggcataacatctatgaagta

SEQ ID NO: 41984 - RNA, 20 nt, synthetic construct
  source 1..20: mol_type = other RNA
ggcataagccaccgcactca

SEQ ID NO: 41985 - RNA, 20 nt, synthetic construct
  source 1..20: mol_type = other RNA
ggcatacaactgctcataat

SEQ ID NO: 41986 - RNA, 20 nt, synthetic construct
  source 1..20: mol_type = other RNA
ggcatacaggagttccgatt

SEQ ID NO: 41987 - RNA, 20 nt, synthetic construct
  source 1..20: mol_type = other RNA
ggcatagggccttctacttt

SEQ ID NO: 41988 - RNA, 20 nt, synthetic construct
  source 1..20: mol_type = other RNA
ggcatataaactggaaggaa

SEQ ID NO: 41989 - RNA, 20 nt, synthetic construct
  source 1..20: mol_type = other RNA
ggcatataataagcagaatt

SEQ ID NO: 41990 - RNA, 20 nt, synthetic construct
  source 1..20: mol_type = other RNA
ggcatatgtcactgtaagaa

SEQ ID NO: 41991 - RNA, 20 nt, synthetic construct
  source 1..20: mol_type = other RNA
ggcatattattgtaacttga

SEQ ID NO: 41992 - RNA, 20 nt, synthetic construct
  source 1..20: mol_type = other RNA
ggcatcaaagctaccctttc

SEQ ID NO: 41993 - RNA, 20 nt, synthetic construct
  source 1..20: mol_type = other RNA
ggcatcatactggaaggact

SEQ ID NO: 41994 - RNA, 20 nt, synthetic construct
  source 1..20: mol_type = other RNA
ggcatcattcataaacacag

SEQ ID NO: 41995 - RNA, 20 nt, synthetic construct
  source 1..20: mol_type = other RNA
ggcatcggggcctacagtgg

SEQ ID NO: 41996 - RNA, 20 nt, synthetic construct
  source 1..20: mol_type = other RNA
ggcatctagttaccactagc

SEQ ID NO: 41997 - RNA, 20 nt, synthetic construct
  source 1..20: mol_type = other RNA
ggcatctatttccccattag

SEQ ID NO: 41998 - RNA, 20 nt, synthetic construct
  source 1..20: mol_type = other RNA
ggcatctctcccttcctgtt

SEQ ID NO: 41999 - RNA, 20 nt, synthetic construct
  source 1..20: mol_type = other RNA
ggcatctctctaaaaacatc

SEQ ID NO: 42000 - RNA, 20 nt, synthetic construct
  source 1..20: mol_type = other RNA
ggcatctttaagattttttg

SEQ ID NO: 42001 - RNA, 20 nt, synthetic construct
  source 1..20: mol_type = other RNA
ggcatctttgttacagcagc

SEQ ID NO: 42002 - RNA, 20 nt, synthetic construct
  source 1..20: mol_type = other RNA
ggcatgaaatgggtttaaaa

SEQ ID NO: 42003 - RNA, 20 nt, synthetic construct
  source 1..20: mol_type = other RNA
ggcatgaaattcttgggtga

SEQ ID NO: 42004 - RNA, 20 nt, synthetic construct
  source 1..20: mol_type = other RNA
ggcatgaacccaccaggagg

SEQ ID NO: 42005 - RNA, 20 nt, synthetic construct
  source 1..20: mol_type = other RNA
ggcatgagccacagggccca

SEQ ID NO: 42006 - RNA, 20 nt, synthetic construct
  source 1..20: mol_type = other RNA
ggcatgagccactgcgggcc

SEQ ID NO: 42007 - RNA, 20 nt, synthetic construct
  source 1..20: mol_type = other RNA
ggcatgagtcgccatacctg

SEQ ID NO: 42008 - RNA, 20 nt, synthetic construct
  source 1..20: mol_type = other RNA
ggcatgatctcacgtcaccg

SEQ ID NO: 42009 - RNA, 20 nt, synthetic construct
  source 1..20: mol_type = other RNA
ggcatgatggctcaacgcct

SEQ ID NO: 42010 - RNA, 20 nt, synthetic construct
  source 1..20: mol_type = other RNA
ggcatgcacggacttggcac

SEQ ID NO: 42011 - RNA, 20 nt, synthetic construct
  source 1..20: mol_type = other RNA
ggcatgccgggacaagagtc

SEQ ID NO: 42012 - RNA, 20 nt, synthetic construct
  source 1..20: mol_type = other RNA
ggcatgcctctcccaccatc

SEQ ID NO: 42013 - RNA, 20 nt, synthetic construct
  source 1..20: mol_type = other RNA
ggcatgcgccatcacaccca

SEQ ID NO: 42014 - RNA, 20 nt, synthetic construct
  source 1..20: mol_type = other RNA
ggcatgctaactgcagaggt

SEQ ID NO: 42015 - RNA, 20 nt, synthetic construct
  source 1..20: mol_type = other RNA
ggcatgggggcgcgtgccta

SEQ ID NO: 42016 - RNA, 20 nt, synthetic construct
  source 1..20: mol_type = other RNA
ggcatgggtccaagacagga

SEQ ID NO: 42017 - RNA, 20 nt, synthetic construct
  source 1..20: mol_type = other RNA
ggcatgtctgtagttacaac

SEQ ID NO: 42018 - RNA, 20 nt, synthetic construct
  source 1..20: mol_type = other RNA
ggcatgttggatagtttctc

SEQ ID NO: 42019 - RNA, 20 nt, synthetic construct
  source 1..20: mol_type = other RNA
ggcattaaggacatccacaa

SEQ ID NO: 42020 - RNA, 20 nt, synthetic construct
  source 1..20: mol_type = other RNA
ggcattaattgagagctttc

SEQ ID NO: 42021 - RNA, 20 nt, synthetic construct
  source 1..20: mol_type = other RNA
ggcattagaagttaaattga

SEQ ID NO: 42022 - RNA, 20 nt, synthetic construct
  source 1..20: mol_type = other RNA
ggcattagtgaattcacagt

SEQ ID NO: 42023 - RNA, 20 nt, synthetic construct
  source 1..20: mol_type = other RNA
ggcattccagagggtaacgt

SEQ ID NO: 42024 - RNA, 20 nt, synthetic construct
  source 1..20: mol_type = other RNA
ggcattccctgtctgggaag

SEQ ID NO: 42025 - RNA, 20 nt, synthetic construct
  source 1..20: mol_type = other RNA
ggcattccgtggaaggcctt

SEQ ID NO: 42026 - RNA, 20 nt, synthetic construct
  source 1..20: mol_type = other RNA
ggcattgtcccgggggaggg

SEQ ID NO: 42027 - RNA, 20 nt, synthetic construct
  source 1..20: mol_type = other RNA
ggcattgtgctcagtggttc

SEQ ID NO: 42028 - RNA, 20 nt, synthetic construct
  source 1..20: mol_type = other RNA
ggcatttaaaagaacctctg

SEQ ID NO: 42029 - RNA, 20 nt, synthetic construct
  source 1..20: mol_type = other RNA
ggcatttcttacacattagg

SEQ ID NO: 42030 - RNA, 20 nt, synthetic construct
  source 1..20: mol_type = other RNA
ggcatttgagggttagaaga

SEQ ID NO: 42031 - RNA, 20 nt, synthetic construct
  source 1..20: mol_type = other RNA
ggcattttcaaggtagaagt

SEQ ID NO: 42032 - RNA, 20 nt, synthetic construct
  source 1..20: mol_type = other RNA
ggccaaagacagatcttatg

SEQ ID NO: 42033 - RNA, 20 nt, synthetic construct
  source 1..20: mol_type = other RNA
ggccaaagacttcaacggac

SEQ ID NO: 42034 - RNA, 20 nt, synthetic construct
  source 1..20: mol_type = other RNA
ggccaaatatccatgtttta

SEQ ID NO: 42035 - RNA, 20 nt, synthetic construct
  source 1..20: mol_type = other RNA
ggccaaatccctgatcaagt

SEQ ID NO: 42036 - RNA, 20 nt, synthetic construct
  source 1..20: mol_type = other RNA
ggccaaatgaaaggcgtcgg

SEQ ID NO: 42037 - RNA, 20 nt, synthetic construct
  source 1..20: mol_type = other RNA
ggccaacagggccactgaga

SEQ ID NO: 42038 - RNA, 20 nt, synthetic construct
  source 1..20: mol_type = other RNA
ggccaacatcgtaaaacctc

SEQ ID NO: 42039 - RNA, 20 nt, synthetic construct
  source 1..20: mol_type = other RNA
ggccaaccattactcttcta

SEQ ID NO: 42040 - RNA, 20 nt, synthetic construct
  source 1..20: mol_type = other RNA
ggccaactgtcctctcttgt

SEQ ID NO: 42041 - RNA, 20 nt, synthetic construct
  source 1..20: mol_type = other RNA
ggccaacttccagcaagact

SEQ ID NO: 42042 - RNA, 20 nt, synthetic construct
  source 1..20: mol_type = other RNA
ggccaagagttgctgacttc

SEQ ID NO: 42043 - RNA, 20 nt, synthetic construct
  source 1..20: mol_type = other RNA
ggccaagatctgtttttcaa

SEQ ID NO: 42044 - RNA, 20 nt, synthetic construct
  source 1..20: mol_type = other RNA
ggccacaaagtccccacatg

SEQ ID NO: 42045 - RNA, 20 nt, synthetic construct
  source 1..20: mol_type = other RNA
ggccacagcagggctcctcc

SEQ ID NO: 42046 - RNA, 20 nt, synthetic construct
  source 1..20: mol_type = other RNA
ggccacatgcttccaaaagc

SEQ ID NO: 42047 - RNA, 20 nt, synthetic construct
  source 1..20: mol_type = other RNA
ggccaccaagccctgcctta

SEQ ID NO: 42048 - RNA, 20 nt, synthetic construct
  source 1..20: mol_type = other RNA
ggccactctcatctaaatta

SEQ ID NO: 42049 - RNA, 20 nt, synthetic construct
  source 1..20: mol_type = other RNA
ggccactgagagctcaggcc

SEQ ID NO: 42050 - RNA, 20 nt, synthetic construct
  source 1..20: mol_type = other RNA
ggccactgattgagtatctg

SEQ ID NO: 42051 - RNA, 20 nt, synthetic construct
  source 1..20: mol_type = other RNA
ggccactggaaaccttttgt

SEQ ID NO: 42052 - RNA, 20 nt, synthetic construct
  source 1..20: mol_type = other RNA
ggccagaatccctttcgcta

SEQ ID NO: 42053 - RNA, 20 nt, synthetic construct
  source 1..20: mol_type = other RNA
ggccagacattttatttata

SEQ ID NO: 42054 - RNA, 20 nt, synthetic construct
  source 1..20: mol_type = other RNA
ggccagaggagggatgcatt

SEQ ID NO: 42055 - RNA, 20 nt, synthetic construct
  source 1..20: mol_type = other RNA
ggccagagggaatctaggaa

SEQ ID NO: 42056 - RNA, 20 nt, synthetic construct
  source 1..20: mol_type = other RNA
ggccagatatccataaggaa

SEQ ID NO: 42057 - RNA, 20 nt, synthetic construct
  source 1..20: mol_type = other RNA
ggccagcattacttaggcag

SEQ ID NO: 42058 - RNA, 20 nt, synthetic construct
  source 1..20: mol_type = other RNA
ggccaggaggaggagggtgc

SEQ ID NO: 42059 - RNA, 20 nt, synthetic construct
  source 1..20: mol_type = other RNA
ggccaggctggttccaaact

SEQ ID NO: 42060 - RNA, 20 nt, synthetic construct
  source 1..20: mol_type = other RNA
ggccagtatctcctttcctt

SEQ ID NO: 42061 - RNA, 20 nt, synthetic construct
  source 1..20: mol_type = other RNA
ggccagtcatgtggggactt

SEQ ID NO: 42062 - RNA, 20 nt, synthetic construct
  source 1..20: mol_type = other RNA
ggccagtccctagtgtctcc

SEQ ID NO: 42063 - RNA, 20 nt, synthetic construct
  source 1..20: mol_type = other RNA
ggccagtgaccagtgtgatg

SEQ ID NO: 42064 - RNA, 20 nt, synthetic construct
  source 1..20: mol_type = other RNA
ggccagtgagtgatgaaaag

SEQ ID NO: 42065 - RNA, 20 nt, synthetic construct
  source 1..20: mol_type = other RNA
ggccagtgagttcaaatgtt

SEQ ID NO: 42066 - RNA, 20 nt, synthetic construct
  source 1..20: mol_type = other RNA
ggccagttgagagagaattc

SEQ ID NO: 42067 - RNA, 20 nt, synthetic construct
  source 1..20: mol_type = other RNA
ggccataaatcaaggtacaa

SEQ ID NO: 42068 - RNA, 20 nt, synthetic construct
  source 1..20: mol_type = other RNA
ggccatccttcccaaatcca

SEQ ID NO: 42069 - RNA, 20 nt, synthetic construct
  source 1..20: mol_type = other RNA
ggccatctgaattcaagtta

SEQ ID NO: 42070 - RNA, 20 nt, synthetic construct
  source 1..20: mol_type = other RNA
ggccatcttcatttctaagc

SEQ ID NO: 42071 - RNA, 20 nt, synthetic construct
  source 1..20: mol_type = other RNA
ggccatgttttatttcttga

SEQ ID NO: 42072 - RNA, 20 nt, synthetic construct
  source 1..20: mol_type = other RNA
ggccattctgctatgaaatg

SEQ ID NO: 42073 - RNA, 20 nt, synthetic construct
  source 1..20: mol_type = other RNA
ggccatttcatttctgtttt

SEQ ID NO: 42074 - RNA, 20 nt, synthetic construct
  source 1..20: mol_type = other RNA
ggccatttgattgccagttt

SEQ ID NO: 42075 - RNA, 20 nt, synthetic construct
  source 1..20: mol_type = other RNA
ggccattttcttttaaatgt

SEQ ID NO: 42076 - RNA, 20 nt, synthetic construct
  source 1..20: mol_type = other RNA
ggcccaaaaagtttttaaaa

SEQ ID NO: 42077 - RNA, 20 nt, synthetic construct
  source 1..20: mol_type = other RNA
ggcccaacatgctcttaagt

SEQ ID NO: 42078 - RNA, 20 nt, synthetic construct
  source 1..20: mol_type = other RNA
ggcccacacctgcaatcaca

SEQ ID NO: 42079 - RNA, 20 nt, synthetic construct
  source 1..20: mol_type = other RNA
ggcccaccatgatgcagccc

SEQ ID NO: 42080 - RNA, 20 nt, synthetic construct
  source 1..20: mol_type = other RNA
ggcccactctccccaagtaa

SEQ ID NO: 42081 - RNA, 20 nt, synthetic construct
  source 1..20: mol_type = other RNA
ggcccagattccttttttat

SEQ ID NO: 42082 - RNA, 20 nt, synthetic construct
  source 1..20: mol_type = other RNA
ggcccagcagaaggtgaggg

SEQ ID NO: 42083 - RNA, 20 nt, synthetic construct
  source 1..20: mol_type = other RNA
ggcccagccatcccattact

SEQ ID NO: 42084 - RNA, 20 nt, synthetic construct
  source 1..20: mol_type = other RNA
ggcccagcctcaacagcact

SEQ ID NO: 42085 - RNA, 20 nt, synthetic construct
  source 1..20: mol_type = other RNA
ggcccagctcttttgtgtct

SEQ ID NO: 42086 - RNA, 20 nt, synthetic construct
  source 1..20: mol_type = other RNA
ggcccatatccttttatgtg

SEQ ID NO: 42087 - RNA, 20 nt, synthetic construct
  source 1..20: mol_type = other RNA
ggcccatgacatgtgtttta

SEQ ID NO: 42088 - RNA, 20 nt, synthetic construct
  source 1..20: mol_type = other RNA
ggcccattttcgaattagat

SEQ ID NO: 42089 - RNA, 20 nt, synthetic construct
  source 1..20: mol_type = other RNA
ggccccaaaattaccccatt

SEQ ID NO: 42090 - RNA, 20 nt, synthetic construct
  source 1..20: mol_type = other RNA
ggccccaggcggcagaggga

SEQ ID NO: 42091 - RNA, 20 nt, synthetic construct
  source 1..20: mol_type = other RNA
ggccccaggggacatagatg

SEQ ID NO: 42092 - RNA, 20 nt, synthetic construct
  source 1..20: mol_type = other RNA
ggcccccctgaaaaatgaga

SEQ ID NO: 42093 - RNA, 20 nt, synthetic construct
  source 1..20: mol_type = other RNA
ggccccgatgccatgtgttt

SEQ ID NO: 42094 - RNA, 20 nt, synthetic construct
  source 1..20: mol_type = other RNA
ggcccctccatggaaactac

SEQ ID NO: 42095 - RNA, 20 nt, synthetic construct
  source 1..20: mol_type = other RNA
ggccccttgaaagatcattt

SEQ ID NO: 42096 - RNA, 20 nt, synthetic construct
  source 1..20: mol_type = other RNA
ggcccctttcaagattgttt

SEQ ID NO: 42097 - RNA, 20 nt, synthetic construct
  source 1..20: mol_type = other RNA
ggcccgcagtggctcatgcc

SEQ ID NO: 42098 - RNA, 20 nt, synthetic construct
  source 1..20: mol_type = other RNA
ggcccggggcagagaactga

SEQ ID NO: 42099 - RNA, 20 nt, synthetic construct
  source 1..20: mol_type = other RNA
ggcccgttatttttatcata

SEQ ID NO: 42100 - RNA, 20 nt, synthetic construct
  source 1..20: mol_type = other RNA
ggccctaaccccagagattg

SEQ ID NO: 42101 - RNA, 20 nt, synthetic construct
  source 1..20: mol_type = other RNA
ggccctatgccttcagtatg

SEQ ID NO: 42102 - RNA, 20 nt, synthetic construct
  source 1..20: mol_type = other RNA
ggccctattcaacctataag

SEQ ID NO: 42103 - RNA, 20 nt, synthetic construct
  source 1..20: mol_type = other RNA
ggccctccatttccctgctt

SEQ ID NO: 42104 - RNA, 20 nt, synthetic construct
  source 1..20: mol_type = other RNA
ggccctctataattctgcct

SEQ ID NO: 42105 - RNA, 20 nt, synthetic construct
  source 1..20: mol_type = other RNA
ggccctgagaagtcaaagcc

SEQ ID NO: 42106 - RNA, 20 nt, synthetic construct
  source 1..20: mol_type = other RNA
ggccctgattgagattagcg

SEQ ID NO: 42107 - RNA, 20 nt, synthetic construct
  source 1..20: mol_type = other RNA
ggccctgatttaaagtaggt

SEQ ID NO: 42108 - RNA, 20 nt, synthetic construct
  source 1..20: mol_type = other RNA
ggccctgccgcttcgccttt

SEQ ID NO: 42109 - RNA, 20 nt, synthetic construct
  source 1..20: mol_type = other RNA
ggccctgcgattggttggac

SEQ ID NO: 42110 - RNA, 20 nt, synthetic construct
  source 1..20: mol_type = other RNA
ggccctggtgctttctatct

SEQ ID NO: 42111 - RNA, 20 nt, synthetic construct
  source 1..20: mol_type = other RNA
ggccctgttggcctggacac

SEQ ID NO: 42112 - RNA, 20 nt, synthetic construct
  source 1..20: mol_type = other RNA
ggcccttaacttcacctcta

SEQ ID NO: 42113 - RNA, 20 nt, synthetic construct
  source 1..20: mol_type = other RNA
ggccctttgttagtgccttc

SEQ ID NO: 42114 - RNA, 20 nt, synthetic construct
  source 1..20: mol_type = other RNA
ggccgaatgtggtggtatgc

SEQ ID NO: 42115 - RNA, 20 nt, synthetic construct
  source 1..20: mol_type = other RNA
ggccgacccagcccccaacc

SEQ ID NO: 42116 - RNA, 20 nt, synthetic construct
  source 1..20: mol_type = other RNA
ggccgagaaatcggaactcc

SEQ ID NO: 42117 - RNA, 20 nt, synthetic construct
  source 1..20: mol_type = other RNA
ggccgaggcaggtggatcag

SEQ ID NO: 42118 - RNA, 20 nt, synthetic construct
  source 1..20: mol_type = other RNA
ggccgaggccagtccctagt

SEQ ID NO: 42119 - RNA, 20 nt, synthetic construct
  source 1..20: mol_type = other RNA
ggccgagggagacggcgagc

SEQ ID NO: 42120 - RNA, 20 nt, synthetic construct
  source 1..20: mol_type = other RNA
ggccgagggttgaacatcac

SEQ ID NO: 42121 - RNA, 20 nt, synthetic construct
  source 1..20: mol_type = other RNA
ggccgatgcctgtgcttttc

SEQ ID NO: 42122 - RNA, 20 nt, synthetic construct
  source 1..20: mol_type = other RNA
ggccgcagtgagccatggct

SEQ ID NO: 42123 - RNA, 20 nt, synthetic construct
  source 1..20: mol_type = other RNA
ggccgcccctggagaaagcc

SEQ ID NO: 42124 - RNA, 20 nt, synthetic construct
  source 1..20: mol_type = other RNA
ggccgcccgctgctccctct

SEQ ID NO: 42125 - RNA, 20 nt, synthetic construct
  source 1..20: mol_type = other RNA
ggccgcgtccacctggcaac

SEQ ID NO: 42126 - RNA, 20 nt, synthetic construct
  source 1..20: mol_type = other RNA
ggccgctcttgaccttgtgc

SEQ ID NO: 42127 - RNA, 20 nt, synthetic construct
  source 1..20: mol_type = other RNA
ggccggagcgggcagccttg

SEQ ID NO: 42128 - RNA, 20 nt, synthetic construct
  source 1..20: mol_type = other RNA
ggccggaggattgcttgagt

SEQ ID NO: 42129 - RNA, 20 nt, synthetic construct
  source 1..20: mol_type = other RNA
ggccgggatttacttctata

SEQ ID NO: 42130 - RNA, 20 nt, synthetic construct
  source 1..20: mol_type = other RNA
ggccgtccctattttctaca

SEQ ID NO: 42131 - RNA, 20 nt, synthetic construct
  source 1..20: mol_type = other RNA
ggcctaaataaaacacatgt

SEQ ID NO: 42132 - RNA, 20 nt, synthetic construct
  source 1..20: mol_type = other RNA
ggcctaaatcaggatgtctt

SEQ ID NO: 42133 - RNA, 20 nt, synthetic construct
  source 1..20: mol_type = other RNA
ggcctaagatggaaagtgga

SEQ ID NO: 42134 - RNA, 20 nt, synthetic construct
  source 1..20: mol_type = other RNA
ggcctacagtggttccattt

SEQ ID NO: 42135 - RNA, 20 nt, synthetic construct
  source 1..20: mol_type = other RNA
ggcctagaaatcatacacga

SEQ ID NO: 42136 - RNA, 20 nt, synthetic construct
  source 1..20: mol_type = other RNA
ggcctaggtgtgataactga

SEQ ID NO: 42137 - RNA, 20 nt, synthetic construct
  source 1..20: mol_type = other RNA
ggcctattttaggctctgtg

SEQ ID NO: 42138 - RNA, 20 nt, synthetic construct
  source 1..20: mol_type = other RNA
ggcctcaaatttcatttact

SEQ ID NO: 42139 - RNA, 20 nt, synthetic construct
  source 1..20: mol_type = other RNA
ggcctcagaattaatataag

SEQ ID NO: 42140 - RNA, 20 nt, synthetic construct
  source 1..20: mol_type = other RNA
ggcctcagcatgtcttcaga

SEQ ID NO: 42141 - RNA, 20 nt, synthetic construct
  source 1..20: mol_type = other RNA
ggcctcagcctcccgagtag

SEQ ID NO: 42142 - RNA, 20 nt, synthetic construct
  source 1..20: mol_type = other RNA
ggcctcatgtattttcctaa

SEQ ID NO: 42143 - RNA, 20 nt, synthetic construct
  source 1..20: mol_type = other RNA
ggcctcccacctgcgagcgg

SEQ ID NO: 42144 - RNA, 20 nt, synthetic construct
  source 1..20: mol_type = other RNA
ggcctccccaagtgctgtga

SEQ ID NO: 42145 - RNA, 20 nt, synthetic construct
  source 1..20: mol_type = other RNA
ggcctccctcactaagtcag

SEQ ID NO: 42146 - RNA, 20 nt, synthetic construct
  source 1..20: mol_type = other RNA
ggcctcctgccttcctgacc

SEQ ID NO: 42147 - RNA, 20 nt, synthetic construct
  source 1..20: mol_type = other RNA
ggcctcgctcttggcttttg

SEQ ID NO: 42148 - RNA, 20 nt, synthetic construct
  source 1..20: mol_type = other RNA
ggcctcggccaaccattact

SEQ ID NO: 42149 - RNA, 20 nt, synthetic construct
  source 1..20: mol_type = other RNA
ggcctctactgactcccttt

SEQ ID NO: 42150 - RNA, 20 nt, synthetic construct
  source 1..20: mol_type = other RNA
ggcctctccccttgacgaag

SEQ ID NO: 42151 - RNA, 20 nt, synthetic construct
  source 1..20: mol_type = other RNA
ggcctctgaagacatgctga

SEQ ID NO: 42152 - RNA, 20 nt, synthetic construct
  source 1..20: mol_type = other RNA
ggcctctgcggcggctgagg

SEQ ID NO: 42153 - RNA, 20 nt, synthetic construct
  source 1..20: mol_type = other RNA
ggcctcttcccttgtgcacc

SEQ ID NO: 42154 - RNA, 20 nt, synthetic construct
  source 1..20: mol_type = other RNA
ggcctgagccgtcggtatgt

SEQ ID NO: 42155 - RNA, 20 nt, synthetic construct
  source 1..20: mol_type = other RNA
ggcctgagctctcagtggcc

SEQ ID NO: 42156 - RNA, 20 nt, synthetic construct
  source 1..20: mol_type = other RNA
ggcctgatagctgtggaagc

SEQ ID NO: 42157 - RNA, 20 nt, synthetic construct
  source 1..20: mol_type = other RNA
ggcctgcaccatttattgtc

SEQ ID NO: 42158 - RNA, 20 nt, synthetic construct
  source 1..20: mol_type = other RNA
ggcctgcttcattccgcgtt

SEQ ID NO: 42159 - RNA, 20 nt, synthetic construct
  source 1..20: mol_type = other RNA
ggcctgcttttggaagcatg

SEQ ID NO: 42160 - RNA, 20 nt, synthetic construct
  source 1..20: mol_type = other RNA
ggcctggaacaggccctttg

SEQ ID NO: 42161 - RNA, 20 nt, synthetic construct
  source 1..20: mol_type = other RNA
ggcctggacaacagtgtgag

SEQ ID NO: 42162 - RNA, 20 nt, synthetic construct
  source 1..20: mol_type = other RNA
ggcctggacacacacagtcc

SEQ ID NO: 42163 - RNA, 20 nt, synthetic construct
  source 1..20: mol_type = other RNA
ggcctggttagggagacttt

SEQ ID NO: 42164 - RNA, 20 nt, synthetic construct
  source 1..20: mol_type = other RNA
ggcctgttccaggcctcgct

SEQ ID NO: 42165 - RNA, 20 nt, synthetic construct
  source 1..20: mol_type = other RNA
ggcctgttgtgaggattcga

SEQ ID NO: 42166 - RNA, 20 nt, synthetic construct
  source 1..20: mol_type = other RNA
ggccttccacctgctcttta

SEQ ID NO: 42167 - RNA, 20 nt, synthetic construct
  source 1..20: mol_type = other RNA
ggccttccacggaatgcccc

SEQ ID NO: 42168 - RNA, 20 nt, synthetic construct
  source 1..20: mol_type = other RNA
ggccttcccaaagacatcct

SEQ ID NO: 42169 - RNA, 20 nt, synthetic construct
  source 1..20: mol_type = other RNA
ggccttcgaggcatctagtt

SEQ ID NO: 42170 - RNA, 20 nt, synthetic construct
  source 1..20: mol_type = other RNA
ggccttctactttaataaat

SEQ ID NO: 42171 - RNA, 20 nt, synthetic construct
  source 1..20: mol_type = other RNA
ggccttctatatttttacat

SEQ ID NO: 42172 - RNA, 20 nt, synthetic construct
  source 1..20: mol_type = other RNA
ggccttctcctccaacccat

SEQ ID NO: 42173 - RNA, 20 nt, synthetic construct
  source 1..20: mol_type = other RNA
ggccttctgaggagctgaga

SEQ ID NO: 42174 - RNA, 20 nt, synthetic construct
  source 1..20: mol_type = other RNA
ggccttctttctttcaaatg

SEQ ID NO: 42175 - RNA, 20 nt, synthetic construct
  source 1..20: mol_type = other RNA
ggccttgaggtgagacagac

SEQ ID NO: 42176 - RNA, 20 nt, synthetic construct
  source 1..20: mol_type = other RNA
ggccttgcaagccacattag

SEQ ID NO: 42177 - RNA, 20 nt, synthetic construct
  source 1..20: mol_type = other RNA
ggcctttaatcacctcaagt

SEQ ID NO: 42178 - RNA, 20 nt, synthetic construct
  source 1..20: mol_type = other RNA
ggcctttctgtttgtttgtt

SEQ ID NO: 42179 - RNA, 20 nt, synthetic construct
  source 1..20: mol_type = other RNA
ggcctttgcctctccaggga

SEQ ID NO: 42180 - RNA, 20 nt, synthetic construct
  source 1..20: mol_type = other RNA
ggccttttgtcaagctatca

SEQ ID NO: 42181 - RNA, 20 nt, synthetic construct
  source 1..20: mol_type = other RNA
ggcgaaatatctccctcaca

SEQ ID NO: 42182 - RNA, 20 nt, synthetic construct
  source 1..20: mol_type = other RNA
ggcgaaatgtgaacagacag

SEQ ID NO: 42183 - RNA, 20 nt, synthetic construct
  source 1..20: mol_type = other RNA
ggcgaagcccgccgctcgca

SEQ ID NO: 42184 - RNA, 20 nt, synthetic construct
  source 1..20: mol_type = other RNA
ggcgacaagagcagaactcc

SEQ ID NO: 42185 - RNA, 20 nt, synthetic construct
  source 1..20: mol_type = other RNA
ggcgacagagtgaaactctg

SEQ ID NO: 42186 - RNA, 20 nt, synthetic construct
  source 1..20: mol_type = other RNA
ggcgactcatgcctgtaatt

SEQ ID NO: 42187 - RNA, 20 nt, synthetic construct
  source 1..20: mol_type = other RNA
ggcgagatggcgtgcgcctg

SEQ ID NO: 42188 - RNA, 20 nt, synthetic construct
  source 1..20: mol_type = other RNA
ggcgagcttgatctttactt

SEQ ID NO: 42189 - RNA, 20 nt, synthetic construct
  source 1..20: mol_type = other RNA
ggcgatcttggctcaccaca

SEQ ID NO: 42190 - RNA, 20 nt, synthetic construct
  source 1..20: mol_type = other RNA
ggcgcacgccatctcgccca

SEQ ID NO: 42191 - RNA, 20 nt, synthetic construct
  source 1..20: mol_type = other RNA
ggcgcagacacaccatgaca

SEQ ID NO: 42192 - RNA, 20 nt, synthetic construct
  source 1..20: mol_type = other RNA
ggcgcagccatggctcactg

SEQ ID NO: 42193 - RNA, 20 nt, synthetic construct
  source 1..20: mol_type = other RNA
ggcgcagtgcttagcgctgg

SEQ ID NO: 42194 - RNA, 20 nt, synthetic construct
  source 1..20: mol_type = other RNA
ggcgcctgcattgcatttac

SEQ ID NO: 42195 - RNA, 20 nt, synthetic construct
  source 1..20: mol_type = other RNA
ggcgcctggacaggatcccg

SEQ ID NO: 42196 - RNA, 20 nt, synthetic construct
  source 1..20: mol_type = other RNA
ggcgcgtgcctatggtccta

SEQ ID NO: 42197 - RNA, 20 nt, synthetic construct
  source 1..20: mol_type = other RNA
ggcgctccctctgtgtgcat

SEQ ID NO: 42198 - RNA, 20 nt, synthetic construct
  source 1..20: mol_type = other RNA
ggcgctcctctcccgccgga

SEQ ID NO: 42199 - RNA, 20 nt, synthetic construct
  source 1..20: mol_type = other RNA
ggcgctgtttgcctgcgtcc

SEQ ID NO: 42200 - RNA, 20 nt, synthetic construct
  source 1..20: mol_type = other RNA
ggcggaaggattgcctaaca

SEQ ID NO: 42201 - RNA, 20 nt, synthetic construct
  source 1..20: mol_type = other RNA
ggcggaagttgcagtgagcc

SEQ ID NO: 42202 - RNA, 20 nt, synthetic construct
  source 1..20: mol_type = other RNA
ggcggaatgcagtggcgtga

SEQ ID NO: 42203 - RNA, 20 nt, synthetic construct
  source 1..20: mol_type = other RNA
ggcggaggttgcggtgacgt

SEQ ID NO: 42204 - RNA, 20 nt, synthetic construct
  source 1..20: mol_type = other RNA
ggcggatgccggtaatcaca

SEQ ID NO: 42205 - RNA, 20 nt, synthetic construct
  source 1..20: mol_type = other RNA
ggcggcagagggagcagcgg

SEQ ID NO: 42206 - RNA, 20 nt, synthetic construct
  source 1..20: mol_type = other RNA
ggcggctgaggcagcccgac

SEQ ID NO: 42207 - RNA, 20 nt, synthetic construct
  source 1..20: mol_type = other RNA
ggcggctggatcgcttgagg

SEQ ID NO: 42208 - RNA, 20 nt, synthetic construct
  source 1..20: mol_type = other RNA
ggcggctttgtggagtggag

SEQ ID NO: 42209 - RNA, 20 nt, synthetic construct
  source 1..20: mol_type = other RNA
ggcgggagaggagcgccctg

SEQ ID NO: 42210 - RNA, 20 nt, synthetic construct
  source 1..20: mol_type = other RNA
ggcgggcttcgcctttgttg

SEQ ID NO: 42211 - RNA, 20 nt, synthetic construct
  source 1..20: mol_type = other RNA
ggcgggttgggggctgggtc

SEQ ID NO: 42212 - RNA, 20 nt, synthetic construct
  source 1..20: mol_type = other RNA
ggcggtggggacagctcaat

SEQ ID NO: 42213 - RNA, 20 nt, synthetic construct
  source 1..20: mol_type = other RNA
ggcgtacatgtagatatggg

SEQ ID NO: 42214 - RNA, 20 nt, synthetic construct
  source 1..20: mol_type = other RNA
ggcgtagtatctcatgctta

SEQ ID NO: 42215 - RNA, 20 nt, synthetic construct
  source 1..20: mol_type = other RNA
ggcgtgagccaccacgtccg

SEQ ID NO: 42216 - RNA, 20 nt, synthetic construct
  source 1..20: mol_type = other RNA
ggcgtgagccaccgcgcctg

SEQ ID NO: 42217 - RNA, 20 nt, synthetic construct
  source 1..20: mol_type = other RNA
ggcgtgagccacctcatccg

SEQ ID NO: 42218 - RNA, 20 nt, synthetic construct
  source 1..20: mol_type = other RNA
ggcgtgagcctccacacctg

SEQ ID NO: 42219 - RNA, 20 nt, synthetic construct
  source 1..20: mol_type = other RNA
ggcgtggagcggtgtcttat

SEQ ID NO: 42220 - RNA, 20 nt, synthetic construct
  source 1..20: mol_type = other RNA
ggcgtggtggcggatgccgg

SEQ ID NO: 42221 - RNA, 20 nt, synthetic construct
  source 1..20: mol_type = other RNA
ggcgtgtaaactgttggaaa

SEQ ID NO: 42222 - RNA, 20 nt, synthetic construct
  source 1..20: mol_type = other RNA
ggcgtgtgcccaggctgact

SEQ ID NO: 42223 - RNA, 20 nt, synthetic construct
  source 1..20: mol_type = other RNA
ggcgttgagccatcatgcct

SEQ ID NO: 42224 - RNA, 20 nt, synthetic construct
  source 1..20: mol_type = other RNA
ggcgtttcgccatgttggcc

SEQ ID NO: 42225 - RNA, 20 nt, synthetic construct
  source 1..20: mol_type = other RNA
ggctaaaacatacatgagaa

SEQ ID NO: 42226 - RNA, 20 nt, synthetic construct
  source 1..20: mol_type = other RNA
ggctaaaagaccgcaagagt

SEQ ID NO: 42227 - RNA, 20 nt, synthetic construct
  source 1..20: mol_type = other RNA
ggctaaatgctcacatttag

SEQ ID NO: 42228 - RNA, 20 nt, synthetic construct
  source 1..20: mol_type = other RNA
ggctaaattaataaaatctg

SEQ ID NO: 42229 - RNA, 20 nt, synthetic construct
  source 1..20: mol_type = other RNA
ggctaacaatcaaatttaac

SEQ ID NO: 42230 - RNA, 20 nt, synthetic construct
  source 1..20: mol_type = other RNA
ggctaacagccaaagaaatt

SEQ ID NO: 42231 - RNA, 20 nt, synthetic construct
  source 1..20: mol_type = other RNA
ggctaagatgaggtctcagc

SEQ ID NO: 42232 - RNA, 20 nt, synthetic construct
  source 1..20: mol_type = other RNA
ggctaagcatgtaacttgct

SEQ ID NO: 42233 - RNA, 20 nt, synthetic construct
  source 1..20: mol_type = other RNA
ggctaaggtggagtggtgga

SEQ ID NO: 42234 - RNA, 20 nt, synthetic construct
  source 1..20: mol_type = other RNA
ggctaagtagtggcagcccc

SEQ ID NO: 42235 - RNA, 20 nt, synthetic construct
  source 1..20: mol_type = other RNA
ggctaagttgagaaactatc

SEQ ID NO: 42236 - RNA, 20 nt, synthetic construct
  source 1..20: mol_type = other RNA
ggctaatgtggcttgcaagg

SEQ ID NO: 42237 - RNA, 20 nt, synthetic construct
  source 1..20: mol_type = other RNA
ggctaatgtgtgttccagac

SEQ ID NO: 42238 - RNA, 20 nt, synthetic construct
  source 1..20: mol_type = other RNA
ggctaattaaacaaacattt

SEQ ID NO: 42239 - RNA, 20 nt, synthetic construct
  source 1..20: mol_type = other RNA
ggctaattttttctgtaatg

SEQ ID NO: 42240 - RNA, 20 nt, synthetic construct
  source 1..20: mol_type = other RNA
ggctacaccctgggaaagcc

SEQ ID NO: 42241 - RNA, 20 nt, synthetic construct
  source 1..20: mol_type = other RNA
ggctactgtaaacaatgctg

SEQ ID NO: 42242 - RNA, 20 nt, synthetic construct
  source 1..20: mol_type = other RNA
ggctagaaacttggattgtg

SEQ ID NO: 42243 - RNA, 20 nt, synthetic construct
  source 1..20: mol_type = other RNA
ggctagaagcatctgataca

SEQ ID NO: 42244 - RNA, 20 nt, synthetic construct
  source 1..20: mol_type = other RNA
ggctagaagtcccagttcaa

SEQ ID NO: 42245 - RNA, 20 nt, synthetic construct
  source 1..20: mol_type = other RNA
ggctagacggaaaaacattc

SEQ ID NO: 42246 - RNA, 20 nt, synthetic construct
  source 1..20: mol_type = other RNA
ggctagactaagaaaaacag

SEQ ID NO: 42247 - RNA, 20 nt, synthetic construct
  source 1..20: mol_type = other RNA
ggctagagccaggaagtcag

SEQ ID NO: 42248 - RNA, 20 nt, synthetic construct
  source 1..20: mol_type = other RNA
ggctagagctcacacgagaa

SEQ ID NO: 42249 - RNA, 20 nt, synthetic construct
  source 1..20: mol_type = other RNA
ggctagcacagaggcaacag

SEQ ID NO: 42250 - RNA, 20 nt, synthetic construct
  source 1..20: mol_type = other RNA
ggctaggatttcagtaaatg

SEQ ID NO: 42251 - RNA, 20 nt, synthetic construct
  source 1..20: mol_type = other RNA
ggctagggaagcagttgatg

SEQ ID NO: 42252 - RNA, 20 nt, synthetic construct
  source 1..20: mol_type = other RNA
ggctaggtgacctgccagag

SEQ ID NO: 42253 - RNA, 20 nt, synthetic construct
  source 1..20: mol_type = other RNA
ggctagtaggcaacatccct

SEQ ID NO: 42254 - RNA, 20 nt, synthetic construct
  source 1..20: mol_type = other RNA
ggctagtgtgttgactgaca

SEQ ID NO: 42255 - RNA, 20 nt, synthetic construct
  source 1..20: mol_type = other RNA
ggctataaccacgagtaatg

SEQ ID NO: 42256 - RNA, 20 nt, synthetic construct
  source 1..20: mol_type = other RNA
ggctatctttactttcagct

SEQ ID NO: 42257 - RNA, 20 nt, synthetic construct
  source 1..20: mol_type = other RNA
ggctattaactttgaaatca

SEQ ID NO: 42258 - RNA, 20 nt, synthetic construct
  source 1..20: mol_type = other RNA
ggctattaagtattgcattg

SEQ ID NO: 42259 - RNA, 20 nt, synthetic construct
  source 1..20: mol_type = other RNA
ggctattagttaaccttctg

SEQ ID NO: 42260 - RNA, 20 nt, synthetic construct
  source 1..20: mol_type = other RNA
ggctattgtcagtaattctg

SEQ ID NO: 42261 - RNA, 20 nt, synthetic construct
  source 1..20: mol_type = other RNA
ggctattgttttgcaagatt

SEQ ID NO: 42262 - RNA, 20 nt, synthetic construct
  source 1..20: mol_type = other RNA
ggctcaacgcctgtgatccc

SEQ ID NO: 42263 - RNA, 20 nt, synthetic construct
  source 1..20: mol_type = other RNA
ggctcaagccatcctccagc

SEQ ID NO: 42264 - RNA, 20 nt, synthetic construct
  source 1..20: mol_type = other RNA
ggctcaagtaagtgaaatca

SEQ ID NO: 42265 - RNA, 20 nt, synthetic construct
  source 1..20: mol_type = other RNA
ggctcaatacctgaaaagtg

SEQ ID NO: 42266 - RNA, 20 nt, synthetic construct
  source 1..20: mol_type = other RNA
ggctcaatggttaagactgc

SEQ ID NO: 42267 - RNA, 20 nt, synthetic construct
  source 1..20: mol_type = other RNA
ggctcacagtgctccatagc

SEQ ID NO: 42268 - RNA, 20 nt, synthetic construct
  source 1..20: mol_type = other RNA
ggctcacattgtatttctgt

SEQ ID NO: 42269 - RNA, 20 nt, synthetic construct
  source 1..20: mol_type = other RNA
ggctcactcatttccgttgc

SEQ ID NO: 42270 - RNA, 20 nt, synthetic construct
  source 1..20: mol_type = other RNA
ggctcagaaacaacaacaac

SEQ ID NO: 42271 - RNA, 20 nt, synthetic construct
  source 1..20: mol_type = other RNA
ggctcagcccctcatcctcc

SEQ ID NO: 42272 - RNA, 20 nt, synthetic construct
  source 1..20: mol_type = other RNA
ggctcaggcctgttgtgagg

SEQ ID NO: 42273 - RNA, 20 nt, synthetic construct
  source 1..20: mol_type = other RNA
ggctcagtctgtttgccatc

SEQ ID NO: 42274 - RNA, 20 nt, synthetic construct
  source 1..20: mol_type = other RNA
ggctcatacttgctttatta

SEQ ID NO: 42275 - RNA, 20 nt, synthetic construct
  source 1..20: mol_type = other RNA
ggctcatctaagcctacctc

SEQ ID NO: 42276 - RNA, 20 nt, synthetic construct
  source 1..20: mol_type = other RNA
ggctccacttgggtggaagc

SEQ ID NO: 42277 - RNA, 20 nt, synthetic construct
  source 1..20: mol_type = other RNA
ggctccaggtagaatgaaaa

SEQ ID NO: 42278 - RNA, 20 nt, synthetic construct
  source 1..20: mol_type = other RNA
ggctcccagtgcccacctga

SEQ ID NO: 42279 - RNA, 20 nt, synthetic construct
  source 1..20: mol_type = other RNA
ggctcccatgattcaaaatg

SEQ ID NO: 42280 - RNA, 20 nt, synthetic construct
  source 1..20: mol_type = other RNA
ggctcccttccagcgtgtgc

SEQ ID NO: 42281 - RNA, 20 nt, synthetic construct
  source 1..20: mol_type = other RNA
ggctccgggcctcccacctg

SEQ ID NO: 42282 - RNA, 20 nt, synthetic construct
  source 1..20: mol_type = other RNA
ggctcctccaaggctgcccg

SEQ ID NO: 42283 - RNA, 20 nt, synthetic construct
  source 1..20: mol_type = other RNA
ggctcctcccggctaagatg

SEQ ID NO: 42284 - RNA, 20 nt, synthetic construct
  source 1..20: mol_type = other RNA
ggctcctgagaaccggaact

SEQ ID NO: 42285 - RNA, 20 nt, synthetic construct
  source 1..20: mol_type = other RNA
ggctcctgcagacatgcacg

SEQ ID NO: 42286 - RNA, 20 nt, synthetic construct
  source 1..20: mol_type = other RNA
ggctccttaccactataatc

SEQ ID NO: 42287 - RNA, 20 nt, synthetic construct
  source 1..20: mol_type = other RNA
ggctcgcagcatccctgccg

SEQ ID NO: 42288 - RNA, 20 nt, synthetic construct
  source 1..20: mol_type = other RNA
ggctctaatgcaagagttaa

SEQ ID NO: 42289 - RNA, 20 nt, synthetic construct
  source 1..20: mol_type = other RNA
ggctctagcccagcttccgg

SEQ ID NO: 42290 - RNA, 20 nt, synthetic construct
  source 1..20: mol_type = other RNA
ggctctctattccaaatgtc

SEQ ID NO: 42291 - RNA, 20 nt, synthetic construct
  source 1..20: mol_type = other RNA
ggctctcttcaccaactgaa

SEQ ID NO: 42292 - RNA, 20 nt, synthetic construct
  source 1..20: mol_type = other RNA
ggctctgcggcgggtctggc

SEQ ID NO: 42293 - RNA, 20 nt, synthetic construct
  source 1..20: mol_type = other RNA
ggctctgggtcagaatcgtg

SEQ ID NO: 42294 - RNA, 20 nt, synthetic construct
  source 1..20: mol_type = other RNA
ggctctgtcacccttgtaat

SEQ ID NO: 42295 - RNA, 20 nt, synthetic construct
  source 1..20: mol_type = other RNA
ggctctgtgctgagatggtc

SEQ ID NO: 42296 - RNA, 20 nt, synthetic construct
  source 1..20: mol_type = other RNA
ggctctgtggtttcttgaat

SEQ ID NO: 42297 - RNA, 20 nt, synthetic construct
  source 1..20: mol_type = other RNA
ggctcttagaaaatatatac

SEQ ID NO: 42298 - RNA, 20 nt, synthetic construct
  source 1..20: mol_type = other RNA
ggctctttccactctctggc

SEQ ID NO: 42299 - RNA, 20 nt, synthetic construct
  source 1..20: mol_type = other RNA
ggctgaaaaacacctcagtt

SEQ ID NO: 42300 - RNA, 20 nt, synthetic construct
  source 1..20: mol_type = other RNA
ggctgaaagagaaagaagta

SEQ ID NO: 42301 - RNA, 20 nt, synthetic construct
  source 1..20: mol_type = other RNA
ggctgaaatgctgtaactga

SEQ ID NO: 42302 - RNA, 20 nt, synthetic construct
  source 1..20: mol_type = other RNA
ggctgaactgctgacagatt

SEQ ID NO: 42303 - RNA, 20 nt, synthetic construct
  source 1..20: mol_type = other RNA
ggctgaagcaggctttttac

SEQ ID NO: 42304 - RNA, 20 nt, synthetic construct
  source 1..20: mol_type = other RNA
ggctgaagggaggaaaaaac

SEQ ID NO: 42305 - RNA, 20 nt, synthetic construct
  source 1..20: mol_type = other RNA
ggctgacatgtgtaaaacat

SEQ ID NO: 42306 - RNA, 20 nt, synthetic construct
  source 1..20: mol_type = other RNA
ggctgacctggtactctatg

SEQ ID NO: 42307 - RNA, 20 nt, synthetic construct
  source 1..20: mol_type = other RNA
ggctgacttagagggcttca

SEQ ID NO: 42308 - RNA, 20 nt, synthetic construct
  source 1..20: mol_type = other RNA
ggctgagacctcatcttagc

SEQ ID NO: 42309 - RNA, 20 nt, synthetic construct
  source 1..20: mol_type = other RNA
ggctgagccttcagaactct

SEQ ID NO: 42310 - RNA, 20 nt, synthetic construct
  source 1..20: mol_type = other RNA
ggctgaggattggagactga

SEQ ID NO: 42311 - RNA, 20 nt, synthetic construct
  source 1..20: mol_type = other RNA
ggctgaggcagcccgacctc

SEQ ID NO: 42312 - RNA, 20 nt, synthetic construct
  source 1..20: mol_type = other RNA
ggctgaggcaggaggcacct

SEQ ID NO: 42313 - RNA, 20 nt, synthetic construct
  source 1..20: mol_type = other RNA
ggctgaggcggaaggattgc

SEQ ID NO: 42314 - RNA, 20 nt, synthetic construct
  source 1..20: mol_type = other RNA
ggctgaggctggggaattgc

SEQ ID NO: 42315 - RNA, 20 nt, synthetic construct
  source 1..20: mol_type = other RNA
ggctgagtatgggtctccat

SEQ ID NO: 42316 - RNA, 20 nt, synthetic construct
  source 1..20: mol_type = other RNA
ggctgattataaccttgaac

SEQ ID NO: 42317 - RNA, 20 nt, synthetic construct
  source 1..20: mol_type = other RNA
ggctgcaagcactggtaagg

SEQ ID NO: 42318 - RNA, 20 nt, synthetic construct
  source 1..20: mol_type = other RNA
ggctgcaattgcgcagaact

SEQ ID NO: 42319 - RNA, 20 nt, synthetic construct
  source 1..20: mol_type = other RNA
ggctgcaccattttttcacc

SEQ ID NO: 42320 - RNA, 20 nt, synthetic construct
  source 1..20: mol_type = other RNA
ggctgcaccctcctcctcct

SEQ ID NO: 42321 - RNA, 20 nt, synthetic construct
  source 1..20: mol_type = other RNA
ggctgcagggcttctgaagg

SEQ ID NO: 42322 - RNA, 20 nt, synthetic construct
  source 1..20: mol_type = other RNA
ggctgcagtgagctccagcc

SEQ ID NO: 42323 - RNA, 20 nt, synthetic construct
  source 1..20: mol_type = other RNA
ggctgcatcatggtgggcct

SEQ ID NO: 42324 - RNA, 20 nt, synthetic construct
  source 1..20: mol_type = other RNA
ggctgccactacttagcccc

SEQ ID NO: 42325 - RNA, 20 nt, synthetic construct
  source 1..20: mol_type = other RNA
ggctgccagcaccagatact

SEQ ID NO: 42326 - RNA, 20 nt, synthetic construct
  source 1..20: mol_type = other RNA
ggctgcctcagccgccgcag

SEQ ID NO: 42327 - RNA, 20 nt, synthetic construct
  source 1..20: mol_type = other RNA
ggctgcgccactgcactcca

SEQ ID NO: 42328 - RNA, 20 nt, synthetic construct
  source 1..20: mol_type = other RNA
ggctggaaataatttccctc

SEQ ID NO: 42329 - RNA, 20 nt, synthetic construct
  source 1..20: mol_type = other RNA
ggctggaagaattttaagcc

SEQ ID NO: 42330 - RNA, 20 nt, synthetic construct
  source 1..20: mol_type = other RNA
ggctggaatggtgaagaatg

SEQ ID NO: 42331 - RNA, 20 nt, synthetic construct
  source 1..20: mol_type = other RNA
ggctggacataagggtctgt

SEQ ID NO: 42332 - RNA, 20 nt, synthetic construct
  source 1..20: mol_type = other RNA
ggctggagctcactgcagcc

SEQ ID NO: 42333 - RNA, 20 nt, synthetic construct
  source 1..20: mol_type = other RNA
ggctggaggatggcttgagc

SEQ ID NO: 42334 - RNA, 20 nt, synthetic construct
  source 1..20: mol_type = other RNA
ggctggcactttcctgataa

SEQ ID NO: 42335 - RNA, 20 nt, synthetic construct
  source 1..20: mol_type = other RNA
ggctggctctttccactctc

SEQ ID NO: 42336 - RNA, 20 nt, synthetic construct
  source 1..20: mol_type = other RNA
ggctgggagcttatcaggct

SEQ ID NO: 42337 - RNA, 20 nt, synthetic construct
  source 1..20: mol_type = other RNA
ggctgggagtacaagaccag

SEQ ID NO: 42338 - RNA, 20 nt, synthetic construct
  source 1..20: mol_type = other RNA
ggctgggctttctccagggg

SEQ ID NO: 42339 - RNA, 20 nt, synthetic construct
  source 1..20: mol_type = other RNA
ggctggggaattgcatgaga

SEQ ID NO: 42340 - RNA, 20 nt, synthetic construct
  source 1..20: mol_type = other RNA
ggctgggggatccaggggaa

SEQ ID NO: 42341 - RNA, 20 nt, synthetic construct
  source 1..20: mol_type = other RNA
ggctggtctcaaactccaag

SEQ ID NO: 42342 - RNA, 20 nt, synthetic construct
  source 1..20: mol_type = other RNA
ggctggtcttgtactcccag

SEQ ID NO: 42343 - RNA, 20 nt, synthetic construct
  source 1..20: mol_type = other RNA
ggctggttccaaacttctga

SEQ ID NO: 42344 - RNA, 20 nt, synthetic construct
  source 1..20: mol_type = other RNA
ggctgtactaagcctatgta

SEQ ID NO: 42345 - RNA, 20 nt, synthetic construct
  source 1..20: mol_type = other RNA
ggctgtattgtaggaaagcc

SEQ ID NO: 42346 - RNA, 20 nt, synthetic construct
  source 1..20: mol_type = other RNA
ggctgtcaaaaatgtgtcta

SEQ ID NO: 42347 - RNA, 20 nt, synthetic construct
  source 1..20: mol_type = other RNA
ggctgtcccaaatgcaccaa

SEQ ID NO: 42348 - RNA, 20 nt, synthetic construct
  source 1..20: mol_type = other RNA
ggctgtctccaacgcttttt

SEQ ID NO: 42349 - RNA, 20 nt, synthetic construct
  source 1..20: mol_type = other RNA
ggctgtgccaactctggcag

SEQ ID NO: 42350 - RNA, 20 nt, synthetic construct
  source 1..20: mol_type = other RNA
ggctgttaccatttgacctt

SEQ ID NO: 42351 - RNA, 20 nt, synthetic construct
  source 1..20: mol_type = other RNA
ggctgttagccttgccattc

SEQ ID NO: 42352 - RNA, 20 nt, synthetic construct
  source 1..20: mol_type = other RNA
ggctgttaggtattattttc

SEQ ID NO: 42353 - RNA, 20 nt, synthetic construct
  source 1..20: mol_type = other RNA
ggctgttattagagttgtaa

SEQ ID NO: 42354 - RNA, 20 nt, synthetic construct
  source 1..20: mol_type = other RNA
ggctgttcaatttagaaaat

SEQ ID NO: 42355 - RNA, 20 nt, synthetic construct
  source 1..20: mol_type = other RNA
ggctgttcccagataacagt

SEQ ID NO: 42356 - RNA, 20 nt, synthetic construct
  source 1..20: mol_type = other RNA
ggctgtttgagatctttctt

SEQ ID NO: 42357 - RNA, 20 nt, synthetic construct
  source 1..20: mol_type = other RNA
ggcttaaaattcttccagcc

SEQ ID NO: 42358 - RNA, 20 nt, synthetic construct
  source 1..20: mol_type = other RNA
ggcttaacacctttgtattc

SEQ ID NO: 42359 - RNA, 20 nt, synthetic construct
  source 1..20: mol_type = other RNA
ggcttaacatttgaactcac

SEQ ID NO: 42360 - RNA, 20 nt, synthetic construct
  source 1..20: mol_type = other RNA
ggcttaaggaaataaatatg

SEQ ID NO: 42361 - RNA, 20 nt, synthetic construct
  source 1..20: mol_type = other RNA
ggcttaatgcatataaaaac

SEQ ID NO: 42362 - RNA, 20 nt, synthetic construct
  source 1..20: mol_type = other RNA
ggcttactgcaacctccgtt

SEQ ID NO: 42363 - RNA, 20 nt, synthetic construct
  source 1..20: mol_type = other RNA
ggcttagaaatgaagatggc

SEQ ID NO: 42364 - RNA, 20 nt, synthetic construct
  source 1..20: mol_type = other RNA
ggcttagataggatgggcag

SEQ ID NO: 42365 - RNA, 20 nt, synthetic construct
  source 1..20: mol_type = other RNA
ggcttagatgagcccaggag

SEQ ID NO: 42366 - RNA, 20 nt, synthetic construct
  source 1..20: mol_type = other RNA
ggcttaggatcaccaaagac

SEQ ID NO: 42367 - RNA, 20 nt, synthetic construct
  source 1..20: mol_type = other RNA
ggcttagtacagccatcaac

SEQ ID NO: 42368 - RNA, 20 nt, synthetic construct
  source 1..20: mol_type = other RNA
ggcttatagtgttctttttt

SEQ ID NO: 42369 - RNA, 20 nt, synthetic construct
  source 1..20: mol_type = other RNA
ggcttatcagatggtgatac

SEQ ID NO: 42370 - RNA, 20 nt, synthetic construct
  source 1..20: mol_type = other RNA
ggcttcaatatgcagtatgt

SEQ ID NO: 42371 - RNA, 20 nt, synthetic construct
  source 1..20: mol_type = other RNA
ggcttcactttcgtcatcta

SEQ ID NO: 42372 - RNA, 20 nt, synthetic construct
  source 1..20: mol_type = other RNA
ggcttcagtgccaacacatg

SEQ ID NO: 42373 - RNA, 20 nt, synthetic construct
  source 1..20: mol_type = other RNA
ggcttcatgctgggagacca

SEQ ID NO: 42374 - RNA, 20 nt, synthetic construct
  source 1..20: mol_type = other RNA
ggcttcatgggtggaaatta

SEQ ID NO: 42375 - RNA, 20 nt, synthetic construct
  source 1..20: mol_type = other RNA
ggcttcctaactggtctcct

SEQ ID NO: 42376 - RNA, 20 nt, synthetic construct
  source 1..20: mol_type = other RNA
ggcttcgagttctgggagtt

SEQ ID NO: 42377 - RNA, 20 nt, synthetic construct
  source 1..20: mol_type = other RNA
ggcttcgcctttgttgccag

SEQ ID NO: 42378 - RNA, 20 nt, synthetic construct
  source 1..20: mol_type = other RNA
ggcttctcaaactgtgtgct

SEQ ID NO: 42379 - RNA, 20 nt, synthetic construct
  source 1..20: mol_type = other RNA
ggcttctgaaggtgcctgcc

SEQ ID NO: 42380 - RNA, 20 nt, synthetic construct
  source 1..20: mol_type = other RNA
ggcttgaacccgaggtgcac

SEQ ID NO: 42381 - RNA, 20 nt, synthetic construct
  source 1..20: mol_type = other RNA
ggcttgagcccagggggtcg

SEQ ID NO: 42382 - RNA, 20 nt, synthetic construct
  source 1..20: mol_type = other RNA
ggcttgagtctgtgctctgt

SEQ ID NO: 42383 - RNA, 20 nt, synthetic construct
  source 1..20: mol_type = other RNA
ggcttgatctagtaaatata

SEQ ID NO: 42384 - RNA, 20 nt, synthetic construct
  source 1..20: mol_type = other RNA
ggcttgattagcttcctcag

SEQ ID NO: 42385 - RNA, 20 nt, synthetic construct
  source 1..20: mol_type = other RNA
ggcttgcaaggcccaccatg

SEQ ID NO: 42386 - RNA, 20 nt, synthetic construct
  source 1..20: mol_type = other RNA
ggcttgctttggctagaagc

SEQ ID NO: 42387 - RNA, 20 nt, synthetic construct
  source 1..20: mol_type = other RNA
ggcttggaaaacaaattgca

SEQ ID NO: 42388 - RNA, 20 nt, synthetic construct
  source 1..20: mol_type = other RNA
ggcttggggaacagtttagc

SEQ ID NO: 42389 - RNA, 20 nt, synthetic construct
  source 1..20: mol_type = other RNA
ggcttgggtgacctcatgta

SEQ ID NO: 42390 - RNA, 20 nt, synthetic construct
  source 1..20: mol_type = other RNA
ggcttggtatgcatcttgaa

SEQ ID NO: 42391 - RNA, 20 nt, synthetic construct
  source 1..20: mol_type = other RNA
ggcttggtggcccacacctg

SEQ ID NO: 42392 - RNA, 20 nt, synthetic construct
  source 1..20: mol_type = other RNA
ggcttggttggaaaagaaag

SEQ ID NO: 42393 - RNA, 20 nt, synthetic construct
  source 1..20: mol_type = other RNA
ggcttgtgacatcaagggtg

SEQ ID NO: 42394 - RNA, 20 nt, synthetic construct
  source 1..20: mol_type = other RNA
ggcttgtgcatcagaattcc

SEQ ID NO: 42395 - RNA, 20 nt, synthetic construct
  source 1..20: mol_type = other RNA
ggcttgtggctacaccctgg

SEQ ID NO: 42396 - RNA, 20 nt, synthetic construct
  source 1..20: mol_type = other RNA
ggctttaagcagaaagttac

SEQ ID NO: 42397 - RNA, 20 nt, synthetic construct
  source 1..20: mol_type = other RNA
ggctttaaggcgcagacaca

SEQ ID NO: 42398 - RNA, 20 nt, synthetic construct
  source 1..20: mol_type = other RNA
ggctttactgtattaggatg

SEQ ID NO: 42399 - RNA, 20 nt, synthetic construct
  source 1..20: mol_type = other RNA
ggctttagatggtaaaacaa

SEQ ID NO: 42400 - RNA, 20 nt, synthetic construct
  source 1..20: mol_type = other RNA
ggctttagatttatcaatag

SEQ ID NO: 42401 - RNA, 20 nt, synthetic construct
  source 1..20: mol_type = other RNA
ggctttatgagacacacgag

SEQ ID NO: 42402 - RNA, 20 nt, synthetic construct
  source 1..20: mol_type = other RNA
ggctttcaatagtgggtaga

SEQ ID NO: 42403 - RNA, 20 nt, synthetic construct
  source 1..20: mol_type = other RNA
ggctttcccagggtgtagcc

SEQ ID NO: 42404 - RNA, 20 nt, synthetic construct
  source 1..20: mol_type = other RNA
ggctttcgtatggaagatgg

SEQ ID NO: 42405 - RNA, 20 nt, synthetic construct
  source 1..20: mol_type = other RNA
ggctttctccaggggcggcc

SEQ ID NO: 42406 - RNA, 20 nt, synthetic construct
  source 1..20: mol_type = other RNA
ggctttctgtgtaatactgt

SEQ ID NO: 42407 - RNA, 20 nt, synthetic construct
  source 1..20: mol_type = other RNA
ggctttgacttctcagggcc

SEQ ID NO: 42408 - RNA, 20 nt, synthetic construct
  source 1..20: mol_type = other RNA
ggctttgagaaaggtttctt

SEQ ID NO: 42409 - RNA, 20 nt, synthetic construct
  source 1..20: mol_type = other RNA
ggctttgtgaagggaggtag

SEQ ID NO: 42410 - RNA, 20 nt, synthetic construct
  source 1..20: mol_type = other RNA
ggctttgtggagtggagggg

SEQ ID NO: 42411 - RNA, 20 nt, synthetic construct
  source 1..20: mol_type = other RNA
ggctttgtgttggtgtttct

SEQ ID NO: 42412 - RNA, 20 nt, synthetic construct
  source 1..20: mol_type = other RNA
ggcttttattggtaatgtta

SEQ ID NO: 42413 - RNA, 20 nt, synthetic construct
  source 1..20: mol_type = other RNA
ggcttttcatagtcatcatt

SEQ ID NO: 42414 - RNA, 20 nt, synthetic construct
  source 1..20: mol_type = other RNA
ggcttttcatatacgtattt

SEQ ID NO: 42415 - RNA, 20 nt, synthetic construct
  source 1..20: mol_type = other RNA
ggcttttgaacactctgcaa

SEQ ID NO: 42416 - RNA, 20 nt, synthetic construct
  source 1..20: mol_type = other RNA
ggcttttgagtgtaaggtgt

SEQ ID NO: 42417 - RNA, 20 nt, synthetic construct
  source 1..20: mol_type = other RNA
ggcttttggattttctttct

SEQ ID NO: 42418 - RNA, 20 nt, synthetic construct
  source 1..20: mol_type = other RNA
ggcttttggcagcgtaactc

SEQ ID NO: 42419 - RNA, 20 nt, synthetic construct
  source 1..20: mol_type = other RNA
ggctttttacccggagaggt

SEQ ID NO: 42420 - RNA, 20 nt, synthetic construct
  source 1..20: mol_type = other RNA
ggctttttacgatgaaattg

SEQ ID NO: 42421 - RNA, 20 nt, synthetic construct
  source 1..20: mol_type = other RNA
ggctttttatatttccgatg

SEQ ID NO: 42422 - RNA, 20 nt, synthetic construct
  source 1..20: mol_type = other RNA
gggaaaaaaccataaaattt

SEQ ID NO: 42423 - RNA, 20 nt, synthetic construct
  source 1..20: mol_type = other RNA
gggaaaaaataagaaaacaa

SEQ ID NO: 42424 - RNA, 20 nt, synthetic construct
  source 1..20: mol_type = other RNA
gggaaaaaataatatgagaa

SEQ ID NO: 42425 - RNA, 20 nt, synthetic construct
  source 1..20: mol_type = other RNA
gggaaaacaattacttgaga

SEQ ID NO: 42426 - RNA, 20 nt, synthetic construct
  source 1..20: mol_type = other RNA
gggaaaacacccttgaaaat

SEQ ID NO: 42427 - RNA, 20 nt, synthetic construct
  source 1..20: mol_type = other RNA
gggaaaactacatgtaaaaa

SEQ ID NO: 42428 - RNA, 20 nt, synthetic construct
  source 1..20: mol_type = other RNA
gggaaaactccaagtgtaaa

SEQ ID NO: 42429 - RNA, 20 nt, synthetic construct
  source 1..20: mol_type = other RNA
gggaaaaggatttgtttgtg

SEQ ID NO: 42430 - RNA, 20 nt, synthetic construct
  source 1..20: mol_type = other RNA
gggaaaatctctgacttcat

SEQ ID NO: 42431 - RNA, 20 nt, synthetic construct
  source 1..20: mol_type = other RNA
gggaaaatcttggaactttt

SEQ ID NO: 42432 - RNA, 20 nt, synthetic construct
  source 1..20: mol_type = other RNA
gggaaaattgacatttttca

SEQ ID NO: 42433 - RNA, 20 nt, synthetic construct
  source 1..20: mol_type = other RNA
gggaaacactcataccaggt

SEQ ID NO: 42434 - RNA, 20 nt, synthetic construct
  source 1..20: mol_type = other RNA
gggaaacagggttacagtat

SEQ ID NO: 42435 - RNA, 20 nt, synthetic construct
  source 1..20: mol_type = other RNA
gggaaaccttactgtaatat

SEQ ID NO: 42436 - RNA, 20 nt, synthetic construct
  source 1..20: mol_type = other RNA
gggaaactgtttttgcaatt

SEQ ID NO: 42437 - RNA, 20 nt, synthetic construct
  source 1..20: mol_type = other RNA
gggaaagacaggtagacatg

SEQ ID NO: 42438 - RNA, 20 nt, synthetic construct
  source 1..20: mol_type = other RNA
gggaaagcctggctttagat

SEQ ID NO: 42439 - RNA, 20 nt, synthetic construct
  source 1..20: mol_type = other RNA
gggaaaggatgaccttgaca

SEQ ID NO: 42440 - RNA, 20 nt, synthetic construct
  source 1..20: mol_type = other RNA
gggaaagtattcccaagatc

SEQ ID NO: 42441 - RNA, 20 nt, synthetic construct
  source 1..20: mol_type = other RNA
gggaaatagatgcctagaaa

SEQ ID NO: 42442 - RNA, 20 nt, synthetic construct
  source 1..20: mol_type = other RNA
gggaaatatgaaccacactg

SEQ ID NO: 42443 - RNA, 20 nt, synthetic construct
  source 1..20: mol_type = other RNA
gggaaatcattcaggacact

SEQ ID NO: 42444 - RNA, 20 nt, synthetic construct
  source 1..20: mol_type = other RNA
gggaaatggagggccagagg

SEQ ID NO: 42445 - RNA, 20 nt, synthetic construct
  source 1..20: mol_type = other RNA
gggaaattagatgatgtttt

SEQ ID NO: 42446 - RNA, 20 nt, synthetic construct
  source 1..20: mol_type = other RNA
gggaaattatttccagcctt

SEQ ID NO: 42447 - RNA, 20 nt, synthetic construct
  source 1..20: mol_type = other RNA
gggaacactaagaagatggt

SEQ ID NO: 42448 - RNA, 20 nt, synthetic construct
  source 1..20: mol_type = other RNA
gggaacagcaggggaaggct

SEQ ID NO: 42449 - RNA, 20 nt, synthetic construct
  source 1..20: mol_type = other RNA
gggaacagcccctagcatgc

SEQ ID NO: 42450 - RNA, 20 nt, synthetic construct
  source 1..20: mol_type = other RNA
gggaacagtttagcaatcca

SEQ ID NO: 42451 - RNA, 20 nt, synthetic construct
  source 1..20: mol_type = other RNA
gggaacatgacatgtatttt

SEQ ID NO: 42452 - RNA, 20 nt, synthetic construct
  source 1..20: mol_type = other RNA
gggaacattttcattttaac

SEQ ID NO: 42453 - RNA, 20 nt, synthetic construct
  source 1..20: mol_type = other RNA
gggaaccgtaacttcttttc

SEQ ID NO: 42454 - RNA, 20 nt, synthetic construct
  source 1..20: mol_type = other RNA
gggaactcttgtagtatttt

SEQ ID NO: 42455 - RNA, 20 nt, synthetic construct
  source 1..20: mol_type = other RNA
gggaagaaaaaataaaggct

SEQ ID NO: 42456 - RNA, 20 nt, synthetic construct
  source 1..20: mol_type = other RNA
gggaagagagcattgccttt

SEQ ID NO: 42457 - RNA, 20 nt, synthetic construct
  source 1..20: mol_type = other RNA
gggaagagctaagatgctat

SEQ ID NO: 42458 - RNA, 20 nt, synthetic construct
  source 1..20: mol_type = other RNA
gggaagaggccacaaagtcc

SEQ ID NO: 42459 - RNA, 20 nt, synthetic construct
  source 1..20: mol_type = other RNA
gggaagatagtactgaccat

SEQ ID NO: 42460 - RNA, 20 nt, synthetic construct
  source 1..20: mol_type = other RNA
gggaagatgctccctctatg

SEQ ID NO: 42461 - RNA, 20 nt, synthetic construct
  source 1..20: mol_type = other RNA
gggaagattggctttagatt

SEQ ID NO: 42462 - RNA, 20 nt, synthetic construct
  source 1..20: mol_type = other RNA
gggaagcaaaggattcgggg

SEQ ID NO: 42463 - RNA, 20 nt, synthetic construct
  source 1..20: mol_type = other RNA
gggaagcaggaactcatatt

SEQ ID NO: 42464 - RNA, 20 nt, synthetic construct
  source 1..20: mol_type = other RNA
gggaagcagttgatgcaatt

SEQ ID NO: 42465 - RNA, 20 nt, synthetic construct
  source 1..20: mol_type = other RNA
gggaagcttttcatatacag

SEQ ID NO: 42466 - RNA, 20 nt, synthetic construct
  source 1..20: mol_type = other RNA
gggaaggaattttcaggact

SEQ ID NO: 42467 - RNA, 20 nt, synthetic construct
  source 1..20: mol_type = other RNA
gggaaggagtctgcccatcc

SEQ ID NO: 42468 - RNA, 20 nt, synthetic construct
  source 1..20: mol_type = other RNA
gggaaggatggccagtcatg

SEQ ID NO: 42469 - RNA, 20 nt, synthetic construct
  source 1..20: mol_type = other RNA
gggaaggccctgattgagat

SEQ ID NO: 42470 - RNA, 20 nt, synthetic construct
  source 1..20: mol_type = other RNA
gggaaggctgcaagcactgg

SEQ ID NO: 42471 - RNA, 20 nt, synthetic construct
  source 1..20: mol_type = other RNA
gggaaggcttcgagttctgg

SEQ ID NO: 42472 - RNA, 20 nt, synthetic construct
  source 1..20: mol_type = other RNA
gggaaggtgcccgcgaaggc

SEQ ID NO: 42473 - RNA, 20 nt, synthetic construct
  source 1..20: mol_type = other RNA
gggaagtaaagatcaagctc

SEQ ID NO: 42474 - RNA, 20 nt, synthetic construct
  source 1..20: mol_type = other RNA
gggaagtactgagtcaaaac

SEQ ID NO: 42475 - RNA, 20 nt, synthetic construct
  source 1..20: mol_type = other RNA
gggaagtggagtgcgagtgt

SEQ ID NO: 42476 - RNA, 20 nt, synthetic construct
  source 1..20: mol_type = other RNA
gggaagttatgtagctggga

SEQ ID NO: 42477 - RNA, 20 nt, synthetic construct
  source 1..20: mol_type = other RNA
gggaagttttttcaaaatat

SEQ ID NO: 42478 - RNA, 20 nt, synthetic construct
  source 1..20: mol_type = other RNA
gggaataagattttaggtca

SEQ ID NO: 42479 - RNA, 20 nt, synthetic construct
  source 1..20: mol_type = other RNA
gggaatactttcccatctct

SEQ ID NO: 42480 - RNA, 20 nt, synthetic construct
  source 1..20: mol_type = other RNA
gggaatagaaagttagtgtc

SEQ ID NO: 42481 - RNA, 20 nt, synthetic construct
  source 1..20: mol_type = other RNA
gggaatagacaaagacaagt

SEQ ID NO: 42482 - RNA, 20 nt, synthetic construct
  source 1..20: mol_type = other RNA
gggaatcatgcagtacttgt

SEQ ID NO: 42483 - RNA, 20 nt, synthetic construct
  source 1..20: mol_type = other RNA
gggaatctactcttttgttt

SEQ ID NO: 42484 - RNA, 20 nt, synthetic construct
  source 1..20: mol_type = other RNA
gggaatctaggaaacactgc

SEQ ID NO: 42485 - RNA, 20 nt, synthetic construct
  source 1..20: mol_type = other RNA
gggaatgcatatatctgtct

SEQ ID NO: 42486 - RNA, 20 nt, synthetic construct
  source 1..20: mol_type = other RNA
gggaatgcccctgtagcaga

SEQ ID NO: 42487 - RNA, 20 nt, synthetic construct
  source 1..20: mol_type = other RNA
gggaatgctcataattaaag

SEQ ID NO: 42488 - RNA, 20 nt, synthetic construct
  source 1..20: mol_type = other RNA
gggaatggggagctagaggg

SEQ ID NO: 42489 - RNA, 20 nt, synthetic construct
  source 1..20: mol_type = other RNA
gggaatggtactgcctccac

SEQ ID NO: 42490 - RNA, 20 nt, synthetic construct
  source 1..20: mol_type = other RNA
gggaatgtggtcacactttt

SEQ ID NO: 42491 - RNA, 20 nt, synthetic construct
  source 1..20: mol_type = other RNA
gggaattcagtcaccaaacg

SEQ ID NO: 42492 - RNA, 20 nt, synthetic construct
  source 1..20: mol_type = other RNA
gggaattgcatgagacttgg

SEQ ID NO: 42493 - RNA, 20 nt, synthetic construct
  source 1..20: mol_type = other RNA
gggaatttgttttaccatct

SEQ ID NO: 42494 - RNA, 20 nt, synthetic construct
  source 1..20: mol_type = other RNA
gggaattttactgatctttt

SEQ ID NO: 42495 - RNA, 20 nt, synthetic construct
  source 1..20: mol_type = other RNA
gggaatttttcttacctaag

SEQ ID NO: 42496 - RNA, 20 nt, synthetic construct
  source 1..20: mol_type = other RNA
gggacaagagtctgcagacc

SEQ ID NO: 42497 - RNA, 20 nt, synthetic construct
  source 1..20: mol_type = other RNA
gggacaagtgggtggatggg

SEQ ID NO: 42498 - RNA, 20 nt, synthetic construct
  source 1..20: mol_type = other RNA
gggacaatgccagggcgctc

SEQ ID NO: 42499 - RNA, 20 nt, synthetic construct
  source 1..20: mol_type = other RNA
gggacagctcaattaagcaa

SEQ ID NO: 42500 - RNA, 20 nt, synthetic construct
  source 1..20: mol_type = other RNA
gggacatagatgaaactaaa

SEQ ID NO: 42501 - RNA, 20 nt, synthetic construct
  source 1..20: mol_type = other RNA
gggacatgaaggaaggattg

SEQ ID NO: 42502 - RNA, 20 nt, synthetic construct
  source 1..20: mol_type = other RNA
gggacatgctctgataggat

SEQ ID NO: 42503 - RNA, 20 nt, synthetic construct
  source 1..20: mol_type = other RNA
gggaccccgtctctgcaaaa

SEQ ID NO: 42504 - RNA, 20 nt, synthetic construct
  source 1..20: mol_type = other RNA
gggacccctccctgctttaa

SEQ ID NO: 42505 - RNA, 20 nt, synthetic construct
  source 1..20: mol_type = other RNA
gggacgaatgcatgggaggt

SEQ ID NO: 42506 - RNA, 20 nt, synthetic construct
  source 1..20: mol_type = other RNA
gggacgacgtatgcaactta

SEQ ID NO: 42507 - RNA, 20 nt, synthetic construct
  source 1..20: mol_type = other RNA
gggacggggttttgccatgt

SEQ ID NO: 42508 - RNA, 20 nt, synthetic construct
  source 1..20: mol_type = other RNA
gggactaacagggtctacaa

SEQ ID NO: 42509 - RNA, 20 nt, synthetic construct
  source 1..20: mol_type = other RNA
gggactacaggtgtgaacca

SEQ ID NO: 42510 - RNA, 20 nt, synthetic construct
  source 1..20: mol_type = other RNA
gggactcccatatctacatg

SEQ ID NO: 42511 - RNA, 20 nt, synthetic construct
  source 1..20: mol_type = other RNA
gggactcttatggctataac

SEQ ID NO: 42512 - RNA, 20 nt, synthetic construct
  source 1..20: mol_type = other RNA
gggactgaaaccagtgggtc

SEQ ID NO: 42513 - RNA, 20 nt, synthetic construct
  source 1..20: mol_type = other RNA
gggactgagacagtattgtg

SEQ ID NO: 42514 - RNA, 20 nt, synthetic construct
  source 1..20: mol_type = other RNA
gggactgagcagtgaaagtc

SEQ ID NO: 42515 - RNA, 20 nt, synthetic construct
  source 1..20: mol_type = other RNA
gggactgatgaagaacctgt

SEQ ID NO: 42516 - RNA, 20 nt, synthetic construct
  source 1..20: mol_type = other RNA
gggactgcaacagatctgag

SEQ ID NO: 42517 - RNA, 20 nt, synthetic construct
  source 1..20: mol_type = other RNA
gggactggagaacagtaaag

SEQ ID NO: 42518 - RNA, 20 nt, synthetic construct
  source 1..20: mol_type = other RNA
gggactggcctcggccaacc

SEQ ID NO: 42519 - RNA, 20 nt, synthetic construct
  source 1..20: mol_type = other RNA
gggactgtcgaagcttaatt

SEQ ID NO: 42520 - RNA, 20 nt, synthetic construct
  source 1..20: mol_type = other RNA
gggacttatggagataaatt

SEQ ID NO: 42521 - RNA, 20 nt, synthetic construct
  source 1..20: mol_type = other RNA
gggacttcactagtgggtcg

SEQ ID NO: 42522 - RNA, 20 nt, synthetic construct
  source 1..20: mol_type = other RNA
gggacttctagcctccagaa

SEQ ID NO: 42523 - RNA, 20 nt, synthetic construct
  source 1..20: mol_type = other RNA
gggacttgctctcttgccca

SEQ ID NO: 42524 - RNA, 20 nt, synthetic construct
  source 1..20: mol_type = other RNA
gggacttggaagtgaagtca

SEQ ID NO: 42525 - RNA, 20 nt, synthetic construct
  source 1..20: mol_type = other RNA
gggactttgatgttttacat

SEQ ID NO: 42526 - RNA, 20 nt, synthetic construct
  source 1..20: mol_type = other RNA
gggactttgtggcctcttcc

SEQ ID NO: 42527 - RNA, 20 nt, synthetic construct
  source 1..20: mol_type = other RNA
gggagaaagaccaagagtgt

SEQ ID NO: 42528 - RNA, 20 nt, synthetic construct
  source 1..20: mol_type = other RNA
gggagaaagctaatttggaa

SEQ ID NO: 42529 - RNA, 20 nt, synthetic construct
  source 1..20: mol_type = other RNA
gggagaacccaggaacagat

SEQ ID NO: 42530 - RNA, 20 nt, synthetic construct
  source 1..20: mol_type = other RNA
gggagaagaaataaacgaca

SEQ ID NO: 42531 - RNA, 20 nt, synthetic construct
  source 1..20: mol_type = other RNA
gggagaatggcaaggctaac

SEQ ID NO: 42532 - RNA, 20 nt, synthetic construct
  source 1..20: mol_type = other RNA
gggagaattggtagtcaatg

SEQ ID NO: 42533 - RNA, 20 nt, synthetic construct
  source 1..20: mol_type = other RNA
gggagaccaggagttcttat

SEQ ID NO: 42534 - RNA, 20 nt, synthetic construct
  source 1..20: mol_type = other RNA
gggagaccgtggggggaggg

SEQ ID NO: 42535 - RNA, 20 nt, synthetic construct
  source 1..20: mol_type = other RNA
gggagacggcgagcttgatc

SEQ ID NO: 42536 - RNA, 20 nt, synthetic construct
  source 1..20: mol_type = other RNA
gggagactgtgcaatgtgaa

SEQ ID NO: 42537 - RNA, 20 nt, synthetic construct
  source 1..20: mol_type = other RNA
gggagactttcactgctcag

SEQ ID NO: 42538 - RNA, 20 nt, synthetic construct
  source 1..20: mol_type = other RNA
gggagagagaaactttacac

SEQ ID NO: 42539 - RNA, 20 nt, synthetic construct
  source 1..20: mol_type = other RNA
gggagagatgcctatgaaat

SEQ ID NO: 42540 - RNA, 20 nt, synthetic construct
  source 1..20: mol_type = other RNA
gggagagcactggtttcagt

SEQ ID NO: 42541 - RNA, 20 nt, synthetic construct
  source 1..20: mol_type = other RNA
gggagaggagcgccctggca

SEQ ID NO: 42542 - RNA, 20 nt, synthetic construct
  source 1..20: mol_type = other RNA
gggagaggcatgccgggaca

SEQ ID NO: 42543 - RNA, 20 nt, synthetic construct
  source 1..20: mol_type = other RNA
gggagaggcctcatgtattt

SEQ ID NO: 42544 - RNA, 20 nt, synthetic construct
  source 1..20: mol_type = other RNA
gggagagggagctctgtctt

SEQ ID NO: 42545 - RNA, 20 nt, synthetic construct
  source 1..20: mol_type = other RNA
gggagagtgggcccagcaga

SEQ ID NO: 42546 - RNA, 20 nt, synthetic construct
  source 1..20: mol_type = other RNA
gggagataccttgaaaggat

SEQ ID NO: 42547 - RNA, 20 nt, synthetic construct
  source 1..20: mol_type = other RNA
gggagatacttgattacaag

SEQ ID NO: 42548 - RNA, 20 nt, synthetic construct
  source 1..20: mol_type = other RNA
gggagatatttcgcctagat

SEQ ID NO: 42549 - RNA, 20 nt, synthetic construct
  source 1..20: mol_type = other RNA
gggagatggacactgcagat

SEQ ID NO: 42550 - RNA, 20 nt, synthetic construct
  source 1..20: mol_type = other RNA
gggagatgtgtaattgtacc

SEQ ID NO: 42551 - RNA, 20 nt, synthetic construct
  source 1..20: mol_type = other RNA
gggagcatatatactctgag

SEQ ID NO: 42552 - RNA, 20 nt, synthetic construct
  source 1..20: mol_type = other RNA
gggagcatcttcccatgaac

SEQ ID NO: 42553 - RNA, 20 nt, synthetic construct
  source 1..20: mol_type = other RNA
gggagcatgcacacaggaga

SEQ ID NO: 42554 - RNA, 20 nt, synthetic construct
  source 1..20: mol_type = other RNA
gggagccaaacttgaacctt

SEQ ID NO: 42555 - RNA, 20 nt, synthetic construct
  source 1..20: mol_type = other RNA
gggagcccaagcacactttc

SEQ ID NO: 42556 - RNA, 20 nt, synthetic construct
  source 1..20: mol_type = other RNA
gggagccctccaggatccag

SEQ ID NO: 42557 - RNA, 20 nt, synthetic construct
  source 1..20: mol_type = other RNA
gggagcgccacgtgaagatg

SEQ ID NO: 42558 - RNA, 20 nt, synthetic construct
  source 1..20: mol_type = other RNA
gggagcgtacggggtccgcg

SEQ ID NO: 42559 - RNA, 20 nt, synthetic construct
  source 1..20: mol_type = other RNA
gggagctagagggtaagacc

SEQ ID NO: 42560 - RNA, 20 nt, synthetic construct
  source 1..20: mol_type = other RNA
gggagctctgtcttgatgat

SEQ ID NO: 42561 - RNA, 20 nt, synthetic construct
  source 1..20: mol_type = other RNA
gggagcttatcaggcttgag

SEQ ID NO: 42562 - RNA, 20 nt, synthetic construct
  source 1..20: mol_type = other RNA
gggagctttcattattacca

SEQ ID NO: 42563 - RNA, 20 nt, synthetic construct
  source 1..20: mol_type = other RNA
gggagcttttgaaactgagc

SEQ ID NO: 42564 - RNA, 20 nt, synthetic construct
  source 1..20: mol_type = other RNA
gggaggaaaaaacagttgct

SEQ ID NO: 42565 - RNA, 20 nt, synthetic construct
  source 1..20: mol_type = other RNA
gggaggaatccttcagtcag

SEQ ID NO: 42566 - RNA, 20 nt, synthetic construct
  source 1..20: mol_type = other RNA
gggaggagccaagtaaaagc

SEQ ID NO: 42567 - RNA, 20 nt, synthetic construct
  source 1..20: mol_type = other RNA
gggaggaggtcatactggag

SEQ ID NO: 42568 - RNA, 20 nt, synthetic construct
  source 1..20: mol_type = other RNA
gggaggattgtttgaggctg

SEQ ID NO: 42569 - RNA, 20 nt, synthetic construct
  source 1..20: mol_type = other RNA
gggaggcagatgttgcggtg

SEQ ID NO: 42570 - RNA, 20 nt, synthetic construct
  source 1..20: mol_type = other RNA
gggaggccatcttcatttct

SEQ ID NO: 42571 - RNA, 20 nt, synthetic construct
  source 1..20: mol_type = other RNA
gggaggcggaggttgcggtg

SEQ ID NO: 42572 - RNA, 20 nt, synthetic construct
  source 1..20: mol_type = other RNA
gggaggctgaggcaggtgga

SEQ ID NO: 42573 - RNA, 20 nt, synthetic construct
  source 1..20: mol_type = other RNA
gggaggctgaggcggaagga

SEQ ID NO: 42574 - RNA, 20 nt, synthetic construct
  source 1..20: mol_type = other RNA
gggaggctgaggctggggaa

SEQ ID NO: 42575 - RNA, 20 nt, synthetic construct
  source 1..20: mol_type = other RNA
gggagggagagggagctctg

SEQ ID NO: 42576 - RNA, 20 nt, synthetic construct
  source 1..20: mol_type = other RNA
gggagggggagggagaggga

SEQ ID NO: 42577 - RNA, 20 nt, synthetic construct
  source 1..20: mol_type = other RNA
gggagggggctgaggattgg

SEQ ID NO: 42578 - RNA, 20 nt, synthetic construct
  source 1..20: mol_type = other RNA
gggaggggtattcagggggc

SEQ ID NO: 42579 - RNA, 20 nt, synthetic construct
  source 1..20: mol_type = other RNA
gggaggggtccccagcatcc

SEQ ID NO: 42580 - RNA, 20 nt, synthetic construct
  source 1..20: mol_type = other RNA
gggaggtaatactataagga

SEQ ID NO: 42581 - RNA, 20 nt, synthetic construct
  source 1..20: mol_type = other RNA
gggaggtaggcttagatgag

SEQ ID NO: 42582 - RNA, 20 nt, synthetic construct
  source 1..20: mol_type = other RNA
gggaggttgaggctgcagtg

SEQ ID NO: 42583 - RNA, 20 nt, synthetic construct
  source 1..20: mol_type = other RNA
gggagtaacagacctctgaa

SEQ ID NO: 42584 - RNA, 20 nt, synthetic construct
  source 1..20: mol_type = other RNA
gggagtacaagaccagcctg

SEQ ID NO: 42585 - RNA, 20 nt, synthetic construct
  source 1..20: mol_type = other RNA
gggagtcagtagaggccgag

SEQ ID NO: 42586 - RNA, 20 nt, synthetic construct
  source 1..20: mol_type = other RNA
gggagtccctgctttcagtt

SEQ ID NO: 42587 - RNA, 20 nt, synthetic construct
  source 1..20: mol_type = other RNA
gggagtctatttctgaacaa

SEQ ID NO: 42588 - RNA, 20 nt, synthetic construct
  source 1..20: mol_type = other RNA
gggagtgtgcccaaggaagg

SEQ ID NO: 42589 - RNA, 20 nt, synthetic construct
  source 1..20: mol_type = other RNA
gggagttcattagaattcag

SEQ ID NO: 42590 - RNA, 20 nt, synthetic construct
  source 1..20: mol_type = other RNA
gggagttttaggaaaataga

SEQ ID NO: 42591 - RNA, 20 nt, synthetic construct
  source 1..20: mol_type = other RNA
gggataaatcccacttgatc

SEQ ID NO: 42592 - RNA, 20 nt, synthetic construct
  source 1..20: mol_type = other RNA
gggataagaataccaaattc

SEQ ID NO: 42593 - RNA, 20 nt, synthetic construct
  source 1..20: mol_type = other RNA
gggataatgagtttaattct

SEQ ID NO: 42594 - RNA, 20 nt, synthetic construct
  source 1..20: mol_type = other RNA
gggataatgctatcatttta

SEQ ID NO: 42595 - RNA, 20 nt, synthetic construct
  source 1..20: mol_type = other RNA
gggataatgctatccagaag

SEQ ID NO: 42596 - RNA, 20 nt, synthetic construct
  source 1..20: mol_type = other RNA
gggatacttctaactttaga

SEQ ID NO: 42597 - RNA, 20 nt, synthetic construct
  source 1..20: mol_type = other RNA
gggatatagctacaatgatt

SEQ ID NO: 42598 - RNA, 20 nt, synthetic construct
  source 1..20: mol_type = other RNA
gggatatccaaagataaagg

SEQ ID NO: 42599 - RNA, 20 nt, synthetic construct
  source 1..20: mol_type = other RNA
gggatatctaacataatcaa

SEQ ID NO: 42600 - RNA, 20 nt, synthetic construct
  source 1..20: mol_type = other RNA
gggatattggcttatagtgt

SEQ ID NO: 42601 - RNA, 20 nt, synthetic construct
  source 1..20: mol_type = other RNA
gggatattttcgtgtactga

SEQ ID NO: 42602 - RNA, 20 nt, synthetic construct
  source 1..20: mol_type = other RNA
gggatcaaaccatgttcatg

SEQ ID NO: 42603 - RNA, 20 nt, synthetic construct
  source 1..20: mol_type = other RNA
gggatcacacttgatggttt

SEQ ID NO: 42604 - RNA, 20 nt, synthetic construct
  source 1..20: mol_type = other RNA
gggatcacagatacaactct

SEQ ID NO: 42605 - RNA, 20 nt, synthetic construct
  source 1..20: mol_type = other RNA
gggatcacaggcgttgagcc

SEQ ID NO: 42606 - RNA, 20 nt, synthetic construct
  source 1..20: mol_type = other RNA
gggatccaggggaatagaaa

SEQ ID NO: 42607 - RNA, 20 nt, synthetic construct
  source 1..20: mol_type = other RNA
gggatcctaagcatgagata

SEQ ID NO: 42608 - RNA, 20 nt, synthetic construct
  source 1..20: mol_type = other RNA
gggatcctgtccaggcgcct

SEQ ID NO: 42609 - RNA, 20 nt, synthetic construct
  source 1..20: mol_type = other RNA
gggatctctgggctcactgc

SEQ ID NO: 42610 - RNA, 20 nt, synthetic construct
  source 1..20: mol_type = other RNA
gggatctgataaattattag

SEQ ID NO: 42611 - RNA, 20 nt, synthetic construct
  source 1..20: mol_type = other RNA
gggatctgtcatgtttgaat

SEQ ID NO: 42612 - RNA, 20 nt, synthetic construct
  source 1..20: mol_type = other RNA
gggatgaatgttgtacattt

SEQ ID NO: 42613 - RNA, 20 nt, synthetic construct
  source 1..20: mol_type = other RNA
gggatgaggaagaggaaggt

SEQ ID NO: 42614 - RNA, 20 nt, synthetic construct
  source 1..20: mol_type = other RNA
gggatgcaacaaatgttgca

SEQ ID NO: 42615 - RNA, 20 nt, synthetic construct
  source 1..20: mol_type = other RNA
gggatgcaagaatggtttaa

SEQ ID NO: 42616 - RNA, 20 nt, synthetic construct
  source 1..20: mol_type = other RNA
gggatgcagcaaaagcacca

SEQ ID NO: 42617 - RNA, 20 nt, synthetic construct
  source 1..20: mol_type = other RNA
gggatgcattctagaaagga

SEQ ID NO: 42618 - RNA, 20 nt, synthetic construct
  source 1..20: mol_type = other RNA
gggatgctcagggtgcgacc

SEQ ID NO: 42619 - RNA, 20 nt, synthetic construct
  source 1..20: mol_type = other RNA
gggatgctcagtttcaaaag

SEQ ID NO: 42620 - RNA, 20 nt, synthetic construct
  source 1..20: mol_type = other RNA
gggatgctgcgagccccggg

SEQ ID NO: 42621 - RNA, 20 nt, synthetic construct
  source 1..20: mol_type = other RNA
gggatgctggagtgtggcag

SEQ ID NO: 42622 - RNA, 20 nt, synthetic construct
  source 1..20: mol_type = other RNA
gggatgctgtctataggcaa

SEQ ID NO: 42623 - RNA, 20 nt, synthetic construct
  source 1..20: mol_type = other RNA
gggatgcttaaagcgctact

SEQ ID NO: 42624 - RNA, 20 nt, synthetic construct
  source 1..20: mol_type = other RNA
gggatggctgaaagagaaag

SEQ ID NO: 42625 - RNA, 20 nt, synthetic construct
  source 1..20: mol_type = other RNA
gggatgggggacgacgtatg

SEQ ID NO: 42626 - RNA, 20 nt, synthetic construct
  source 1..20: mol_type = other RNA
gggatggttgcacaatgttg

SEQ ID NO: 42627 - RNA, 20 nt, synthetic construct
  source 1..20: mol_type = other RNA
gggatgtagaaggatatgtt

SEQ ID NO: 42628 - RNA, 20 nt, synthetic construct
  source 1..20: mol_type = other RNA
gggatgttgcctactagcca

SEQ ID NO: 42629 - RNA, 20 nt, synthetic construct
  source 1..20: mol_type = other RNA
gggatgtttctacctttggc

SEQ ID NO: 42630 - RNA, 20 nt, synthetic construct
  source 1..20: mol_type = other RNA
gggattacacacacctacca

SEQ ID NO: 42631 - RNA, 20 nt, synthetic construct
  source 1..20: mol_type = other RNA
gggattacaggcgcacgcca

SEQ ID NO: 42632 - RNA, 20 nt, synthetic construct
  source 1..20: mol_type = other RNA
gggattagcttattcttttt

SEQ ID NO: 42633 - RNA, 20 nt, synthetic construct
  source 1..20: mol_type = other RNA
gggattatttggaagagaga

SEQ ID NO: 42634 - RNA, 20 nt, synthetic construct
  source 1..20: mol_type = other RNA
gggattctgctactagcaag

SEQ ID NO: 42635 - RNA, 20 nt, synthetic construct
  source 1..20: mol_type = other RNA
gggattctggccaaatccct

SEQ ID NO: 42636 - RNA, 20 nt, synthetic construct
  source 1..20: mol_type = other RNA
gggattgagggttagatttt

SEQ ID NO: 42637 - RNA, 20 nt, synthetic construct
  source 1..20: mol_type = other RNA
gggatttacttctatatgta

SEQ ID NO: 42638 - RNA, 20 nt, synthetic construct
  source 1..20: mol_type = other RNA
gggatttcatgaacaatttt

SEQ ID NO: 42639 - RNA, 20 nt, synthetic construct
  source 1..20: mol_type = other RNA
gggatttggccagaatccct

SEQ ID NO: 42640 - RNA, 20 nt, synthetic construct
  source 1..20: mol_type = other RNA
gggcaaaaaagtcatgacct

SEQ ID NO: 42641 - RNA, 20 nt, synthetic construct
  source 1..20: mol_type = other RNA
gggcaacagagacagagaat

SEQ ID NO: 42642 - RNA, 20 nt, synthetic construct
  source 1..20: mol_type = other RNA
gggcaagagagcaagtcccc

SEQ ID NO: 42643 - RNA, 20 nt, synthetic construct
  source 1..20: mol_type = other RNA
gggcaatctcagctcattac

SEQ ID NO: 42644 - RNA, 20 nt, synthetic construct
  source 1..20: mol_type = other RNA
gggcacacgccactgcaggt

SEQ ID NO: 42645 - RNA, 20 nt, synthetic construct
  source 1..20: mol_type = other RNA
gggcacactccccagtggtt

SEQ ID NO: 42646 - RNA, 20 nt, synthetic construct
  source 1..20: mol_type = other RNA
gggcaccgtgacagaacaaa

SEQ ID NO: 42647 - RNA, 20 nt, synthetic construct
  source 1..20: mol_type = other RNA
gggcacctaaaaggttgctt

SEQ ID NO: 42648 - RNA, 20 nt, synthetic construct
  source 1..20: mol_type = other RNA
gggcaccttccctactcact

SEQ ID NO: 42649 - RNA, 20 nt, synthetic construct
  source 1..20: mol_type = other RNA
gggcactgggagccctccag

SEQ ID NO: 42650 - RNA, 20 nt, synthetic construct
  source 1..20: mol_type = other RNA
gggcactgggtccccggagg

SEQ ID NO: 42651 - RNA, 20 nt, synthetic construct
  source 1..20: mol_type = other RNA
gggcacttgggatgtttcta

SEQ ID NO: 42652 - RNA, 20 nt, synthetic construct
  source 1..20: mol_type = other RNA
gggcagactccttcccctgg

SEQ ID NO: 42653 - RNA, 20 nt, synthetic construct
  source 1..20: mol_type = other RNA
gggcagagaactgactgaag

SEQ ID NO: 42654 - RNA, 20 nt, synthetic construct
  source 1..20: mol_type = other RNA
gggcagagataactgggtgt

SEQ ID NO: 42655 - RNA, 20 nt, synthetic construct
  source 1..20: mol_type = other RNA
gggcagcaaagcaagaaaaa

SEQ ID NO: 42656 - RNA, 20 nt, synthetic construct
  source 1..20: mol_type = other RNA
gggcagccttggaggagccc

SEQ ID NO: 42657 - RNA, 20 nt, synthetic construct
  source 1..20: mol_type = other RNA
gggcaggaaaggtggggaag

SEQ ID NO: 42658 - RNA, 20 nt, synthetic construct
  source 1..20: mol_type = other RNA
gggcagggagagagaaactt

SEQ ID NO: 42659 - RNA, 20 nt, synthetic construct
  source 1..20: mol_type = other RNA
gggcagggtggagtccaacc

SEQ ID NO: 42660 - RNA, 20 nt, synthetic construct
  source 1..20: mol_type = other RNA
gggcataacatctatgaagt

SEQ ID NO: 42661 - RNA, 20 nt, synthetic construct
  source 1..20: mol_type = other RNA
gggcatcaaagctacccttt

SEQ ID NO: 42662 - RNA, 20 nt, synthetic construct
  source 1..20: mol_type = other RNA
gggcatgggtccaagacagg

SEQ ID NO: 42663 - RNA, 20 nt, synthetic construct
  source 1..20: mol_type = other RNA
gggcattaattgagagcttt

SEQ ID NO: 42664 - RNA, 20 nt, synthetic construct
  source 1..20: mol_type = other RNA
gggcattagaagttaaattg

SEQ ID NO: 42665 - RNA, 20 nt, synthetic construct
  source 1..20: mol_type = other RNA
gggcattccagagggtaacg

SEQ ID NO: 42666 - RNA, 20 nt, synthetic construct
  source 1..20: mol_type = other RNA
gggcattccctgtctgggaa

SEQ ID NO: 42667 - RNA, 20 nt, synthetic construct
  source 1..20: mol_type = other RNA
gggcattccgtggaaggcct

SEQ ID NO: 42668 - RNA, 20 nt, synthetic construct
  source 1..20: mol_type = other RNA
gggcattttcaaggtagaag

SEQ ID NO: 42669 - RNA, 20 nt, synthetic construct
  source 1..20: mol_type = other RNA
gggccaaagacagatcttat

SEQ ID NO: 42670 - RNA, 20 nt, synthetic construct
  source 1..20: mol_type = other RNA
gggccaaagacttcaacgga

SEQ ID NO: 42671 - RNA, 20 nt, synthetic construct
  source 1..20: mol_type = other RNA
gggccaacttccagcaagac

SEQ ID NO: 42672 - RNA, 20 nt, synthetic construct
  source 1..20: mol_type = other RNA
gggccaccaagccctgcctt

SEQ ID NO: 42673 - RNA, 20 nt, synthetic construct
  source 1..20: mol_type = other RNA
gggccactgagagctcaggc

SEQ ID NO: 42674 - RNA, 20 nt, synthetic construct
  source 1..20: mol_type = other RNA
gggccactggaaaccttttg

SEQ ID NO: 42675 - RNA, 20 nt, synthetic construct
  source 1..20: mol_type = other RNA
gggccagaggagggatgcat

SEQ ID NO: 42676 - RNA, 20 nt, synthetic construct
  source 1..20: mol_type = other RNA
gggccagttgagagagaatt

SEQ ID NO: 42677 - RNA, 20 nt, synthetic construct
  source 1..20: mol_type = other RNA
gggccatctgaattcaagtt

SEQ ID NO: 42678 - RNA, 20 nt, synthetic construct
  source 1..20: mol_type = other RNA
gggccattctgctatgaaat

SEQ ID NO: 42679 - RNA, 20 nt, synthetic construct
  source 1..20: mol_type = other RNA
gggccatttcatttctgttt

SEQ ID NO: 42680 - RNA, 20 nt, synthetic construct
  source 1..20: mol_type = other RNA
gggcccactctccccaagta

SEQ ID NO: 42681 - RNA, 20 nt, synthetic construct
  source 1..20: mol_type = other RNA
gggcccagcagaaggtgagg

SEQ ID NO: 42682 - RNA, 20 nt, synthetic construct
  source 1..20: mol_type = other RNA
gggcccagcctcaacagcac

SEQ ID NO: 42683 - RNA, 20 nt, synthetic construct
  source 1..20: mol_type = other RNA
gggcccagctcttttgtgtc

SEQ ID NO: 42684 - RNA, 20 nt, synthetic construct
  source 1..20: mol_type = other RNA
gggcccgcagtggctcatgc

SEQ ID NO: 42685 - RNA, 20 nt, synthetic construct
  source 1..20: mol_type = other RNA
gggccgcccctggagaaagc

SEQ ID NO: 42686 - RNA, 20 nt, synthetic construct
  source 1..20: mol_type = other RNA
gggccgcgtccacctggcaa

SEQ ID NO: 42687 - RNA, 20 nt, synthetic construct
  source 1..20: mol_type = other RNA
gggccggagcgggcagcctt

SEQ ID NO: 42688 - RNA, 20 nt, synthetic construct
  source 1..20: mol_type = other RNA
gggcctaaataaaacacatg

SEQ ID NO: 42689 - RNA, 20 nt, synthetic construct
  source 1..20: mol_type = other RNA
gggcctacagtggttccatt

SEQ ID NO: 42690 - RNA, 20 nt, synthetic construct
  source 1..20: mol_type = other RNA
gggcctagaaatcatacacg

SEQ ID NO: 42691 - RNA, 20 nt, synthetic construct
  source 1..20: mol_type = other RNA
gggcctcaaatttcatttac

SEQ ID NO: 42692 - RNA, 20 nt, synthetic construct
  source 1..20: mol_type = other RNA
gggcctcagcatgtcttcag

SEQ ID NO: 42693 - RNA, 20 nt, synthetic construct
  source 1..20: mol_type = other RNA
gggcctcccacctgcgagcg

SEQ ID NO: 42694 - RNA, 20 nt, synthetic construct
  source 1..20: mol_type = other RNA
gggcctctgaagacatgctg

SEQ ID NO: 42695 - RNA, 20 nt, synthetic construct
  source 1..20: mol_type = other RNA
gggcctgcttttggaagcat

SEQ ID NO: 42696 - RNA, 20 nt, synthetic construct
  source 1..20: mol_type = other RNA
gggcctggttagggagactt

SEQ ID NO: 42697 - RNA, 20 nt, synthetic construct
  source 1..20: mol_type = other RNA
gggcctgttccaggcctcgc

SEQ ID NO: 42698 - RNA, 20 nt, synthetic construct
  source 1..20: mol_type = other RNA
gggccttcccaaagacatcc

SEQ ID NO: 42699 - RNA, 20 nt, synthetic construct
  source 1..20: mol_type = other RNA
gggccttctactttaataaa

SEQ ID NO: 42700 - RNA, 20 nt, synthetic construct
  source 1..20: mol_type = other RNA
gggccttgcaagccacatta

SEQ ID NO: 42701 - RNA, 20 nt, synthetic construct
  source 1..20: mol_type = other RNA
gggcctttaatcacctcaag

SEQ ID NO: 42702 - RNA, 20 nt, synthetic construct
  source 1..20: mol_type = other RNA
gggcctttctgtttgtttgt

SEQ ID NO: 42703 - RNA, 20 nt, synthetic construct
  source 1..20: mol_type = other RNA
gggccttttgtcaagctatc

SEQ ID NO: 42704 - RNA, 20 nt, synthetic construct
  source 1..20: mol_type = other RNA
gggcgacaagagcagaactc

SEQ ID NO: 42705 - RNA, 20 nt, synthetic construct
  source 1..20: mol_type = other RNA
gggcgacagagtgaaactct

SEQ ID NO: 42706 - RNA, 20 nt, synthetic construct
  source 1..20: mol_type = other RNA
gggcgagatggcgtgcgcct

SEQ ID NO: 42707 - RNA, 20 nt, synthetic construct
  source 1..20: mol_type = other RNA
gggcgatcttggctcaccac

SEQ ID NO: 42708 - RNA, 20 nt, synthetic construct
  source 1..20: mol_type = other RNA
gggcgcgtgcctatggtcct

SEQ ID NO: 42709 - RNA, 20 nt, synthetic construct
  source 1..20: mol_type = other RNA
gggcgggttgggggctgggt

SEQ ID NO: 42710 - RNA, 20 nt, synthetic construct
  source 1..20: mol_type = other RNA
gggcgtggagcggtgtctta

SEQ ID NO: 42711 - RNA, 20 nt, synthetic construct
  source 1..20: mol_type = other RNA
gggctaaataaaacattaaa

SEQ ID NO: 42712 - RNA, 20 nt, synthetic construct
  source 1..20: mol_type = other RNA
gggctaaatgctcacattta

SEQ ID NO: 42713 - RNA, 20 nt, synthetic construct
  source 1..20: mol_type = other RNA
gggctaaggtggagtggtgg

SEQ ID NO: 42714 - RNA, 20 nt, synthetic construct
  source 1..20: mol_type = other RNA
gggctaagtagtggcagccc

SEQ ID NO: 42715 - RNA, 20 nt, synthetic construct
  source 1..20: mol_type = other RNA
gggctagagccaggaagtca

SEQ ID NO: 42716 - RNA, 20 nt, synthetic construct
  source 1..20: mol_type = other RNA
gggctaggatttcagtaaat

SEQ ID NO: 42717 - RNA, 20 nt, synthetic construct
  source 1..20: mol_type = other RNA
gggctagggaagcagttgat

SEQ ID NO: 42718 - RNA, 20 nt, synthetic construct
  source 1..20: mol_type = other RNA
gggctatctttactttcagc

SEQ ID NO: 42719 - RNA, 20 nt, synthetic construct
  source 1..20: mol_type = other RNA
gggctattaagtattgcatt

SEQ ID NO: 42720 - RNA, 20 nt, synthetic construct
  source 1..20: mol_type = other RNA
gggctattgttttgcaagat

SEQ ID NO: 42721 - RNA, 20 nt, synthetic construct
  source 1..20: mol_type = other RNA
gggctcaagccatcctccag

SEQ ID NO: 42722 - RNA, 20 nt, synthetic construct
  source 1..20: mol_type = other RNA
gggctcaagtaagtgaaatc

SEQ ID NO: 42723 - RNA, 20 nt, synthetic construct
  source 1..20: mol_type = other RNA
gggctcactgcaacttccgc

SEQ ID NO: 42724 - RNA, 20 nt, synthetic construct
  source 1..20: mol_type = other RNA
gggctcatctaagcctacct

SEQ ID NO: 42725 - RNA, 20 nt, synthetic construct
  source 1..20: mol_type = other RNA
gggctcccagtgcccacctg

SEQ ID NO: 42726 - RNA, 20 nt, synthetic construct
  source 1..20: mol_type = other RNA
gggctcccttccagcgtgtg

SEQ ID NO: 42727 - RNA, 20 nt, synthetic construct
  source 1..20: mol_type = other RNA
gggctcctccaaggctgccc

SEQ ID NO: 42728 - RNA, 20 nt, synthetic construct
  source 1..20: mol_type = other RNA
gggctcgcagcatccctgcc

SEQ ID NO: 42729 - RNA, 20 nt, synthetic construct
  source 1..20: mol_type = other RNA
gggctctaatgcaagagtta

SEQ ID NO: 42730 - RNA, 20 nt, synthetic construct
  source 1..20: mol_type = other RNA
gggctctctattccaaatgt

SEQ ID NO: 42731 - RNA, 20 nt, synthetic construct
  source 1..20: mol_type = other RNA
gggctgaaaaacacctcagt

SEQ ID NO: 42732 - RNA, 20 nt, synthetic construct
  source 1..20: mol_type = other RNA
gggctgagccttcagaactc

SEQ ID NO: 42733 - RNA, 20 nt, synthetic construct
  source 1..20: mol_type = other RNA
gggctgaggattggagactg

SEQ ID NO: 42734 - RNA, 20 nt, synthetic construct
  source 1..20: mol_type = other RNA
gggctgagtatgggtctcca

SEQ ID NO: 42735 - RNA, 20 nt, synthetic construct
  source 1..20: mol_type = other RNA
gggctgcatcatggtgggcc

SEQ ID NO: 42736 - RNA, 20 nt, synthetic construct
  source 1..20: mol_type = other RNA
gggctgccactacttagccc

SEQ ID NO: 42737 - RNA, 20 nt, synthetic construct
  source 1..20: mol_type = other RNA
gggctgcctcagccgccgca

SEQ ID NO: 42738 - RNA, 20 nt, synthetic construct
  source 1..20: mol_type = other RNA
gggctggacataagggtctg

SEQ ID NO: 42739 - RNA, 20 nt, synthetic construct
  source 1..20: mol_type = other RNA
gggctgggggatccagggga

SEQ ID NO: 42740 - RNA, 20 nt, synthetic construct
  source 1..20: mol_type = other RNA
gggctgttcccagataacag

SEQ ID NO: 42741 - RNA, 20 nt, synthetic construct
  source 1..20: mol_type = other RNA
gggcttaacatttgaactca

SEQ ID NO: 42742 - RNA, 20 nt, synthetic construct
  source 1..20: mol_type = other RNA
gggcttatcagatggtgata

SEQ ID NO: 42743 - RNA, 20 nt, synthetic construct
  source 1..20: mol_type = other RNA
gggcttcactttcgtcatct

SEQ ID NO: 42744 - RNA, 20 nt, synthetic construct
  source 1..20: mol_type = other RNA
gggcttcatgctgggagacc

SEQ ID NO: 42745 - RNA, 20 nt, synthetic construct
  source 1..20: mol_type = other RNA
gggcttcgcctttgttgcca

SEQ ID NO: 42746 - RNA, 20 nt, synthetic construct
  source 1..20: mol_type = other RNA
gggcttctgaaggtgcctgc

SEQ ID NO: 42747 - RNA, 20 nt, synthetic construct
  source 1..20: mol_type = other RNA
gggcttgaacccgaggtgca

SEQ ID NO: 42748 - RNA, 20 nt, synthetic construct
  source 1..20: mol_type = other RNA
gggcttgatctagtaaatat

SEQ ID NO: 42749 - RNA, 20 nt, synthetic construct
  source 1..20: mol_type = other RNA
gggcttggtatgcatcttga

SEQ ID NO: 42750 - RNA, 20 nt, synthetic construct
  source 1..20: mol_type = other RNA
gggcttggtggcccacacct

SEQ ID NO: 42751 - RNA, 20 nt, synthetic construct
  source 1..20: mol_type = other RNA
gggcttggttggaaaagaaa

SEQ ID NO: 42752 - RNA, 20 nt, synthetic construct
  source 1..20: mol_type = other RNA
gggctttactgtattaggat

SEQ ID NO: 42753 - RNA, 20 nt, synthetic construct
  source 1..20: mol_type = other RNA
gggctttcaatagtgggtag

SEQ ID NO: 42754 - RNA, 20 nt, synthetic construct
  source 1..20: mol_type = other RNA
gggctttctccaggggcggc

SEQ ID NO: 42755 - RNA, 20 nt, synthetic construct
  source 1..20: mol_type = other RNA
gggctttgagaaaggtttct

SEQ ID NO: 42756 - RNA, 20 nt, synthetic construct
  source 1..20: mol_type = other RNA
gggctttgtgaagggaggta

SEQ ID NO: 42757 - RNA, 20 nt, synthetic construct
  source 1..20: mol_type = other RNA
gggcttttcatatacgtatt

SEQ ID NO: 42758 - RNA, 20 nt, synthetic construct
  source 1..20: mol_type = other RNA
gggcttttgaacactctgca

SEQ ID NO: 42759 - RNA, 20 nt, synthetic construct
  source 1..20: mol_type = other RNA
ggggaaaaaaccataaaatt

SEQ ID NO: 42760 - RNA, 20 nt, synthetic construct
  source 1..20: mol_type = other RNA
ggggaaaacacccttgaaaa

SEQ ID NO: 42761 - RNA, 20 nt, synthetic construct
  source 1..20: mol_type = other RNA
ggggaaaactccaagtgtaa

SEQ ID NO: 42762 - RNA, 20 nt, synthetic construct
  source 1..20: mol_type = other RNA
ggggaaaattgacatttttc

SEQ ID NO: 42763 - RNA, 20 nt, synthetic construct
  source 1..20: mol_type = other RNA
ggggaaatagatgcctagaa

SEQ ID NO: 42764 - RNA, 20 nt, synthetic construct
  source 1..20: mol_type = other RNA
ggggaacagtttagcaatcc

SEQ ID NO: 42765 - RNA, 20 nt, synthetic construct
  source 1..20: mol_type = other RNA
ggggaactcttgtagtattt

SEQ ID NO: 42766 - RNA, 20 nt, synthetic construct
  source 1..20: mol_type = other RNA
ggggaagagagcattgcctt

SEQ ID NO: 42767 - RNA, 20 nt, synthetic construct
  source 1..20: mol_type = other RNA
ggggaagcaggaactcatat

SEQ ID NO: 42768 - RNA, 20 nt, synthetic construct
  source 1..20: mol_type = other RNA
ggggaagcttttcatataca

SEQ ID NO: 42769 - RNA, 20 nt, synthetic construct
  source 1..20: mol_type = other RNA
ggggaaggaattttcaggac

SEQ ID NO: 42770 - RNA, 20 nt, synthetic construct
  source 1..20: mol_type = other RNA
ggggaaggagtctgcccatc

SEQ ID NO: 42771 - RNA, 20 nt, synthetic construct
  source 1..20: mol_type = other RNA
ggggaaggcttcgagttctg

SEQ ID NO: 42772 - RNA, 20 nt, synthetic construct
  source 1..20: mol_type = other RNA
ggggaataagattttaggtc

SEQ ID NO: 42773 - RNA, 20 nt, synthetic construct
  source 1..20: mol_type = other RNA
ggggaatagaaagttagtgt

SEQ ID NO: 42774 - RNA, 20 nt, synthetic construct
  source 1..20: mol_type = other RNA
ggggaatcatgcagtacttg

SEQ ID NO: 42775 - RNA, 20 nt, synthetic construct
  source 1..20: mol_type = other RNA
ggggaatctactcttttgtt

SEQ ID NO: 42776 - RNA, 20 nt, synthetic construct
  source 1..20: mol_type = other RNA
ggggaatgctcataattaaa

SEQ ID NO: 42777 - RNA, 20 nt, synthetic construct
  source 1..20: mol_type = other RNA
ggggaatggtactgcctcca

SEQ ID NO: 42778 - RNA, 20 nt, synthetic construct
  source 1..20: mol_type = other RNA
ggggaattgcatgagacttg

SEQ ID NO: 42779 - RNA, 20 nt, synthetic construct
  source 1..20: mol_type = other RNA
ggggacagctcaattaagca

SEQ ID NO: 42780 - RNA, 20 nt, synthetic construct
  source 1..20: mol_type = other RNA
ggggacatagatgaaactaa

SEQ ID NO: 42781 - RNA, 20 nt, synthetic construct
  source 1..20: mol_type = other RNA
ggggacatgaaggaaggatt

SEQ ID NO: 42782 - RNA, 20 nt, synthetic construct
  source 1..20: mol_type = other RNA
ggggacatgctctgatagga

SEQ ID NO: 42783 - RNA, 20 nt, synthetic construct
  source 1..20: mol_type = other RNA
ggggacccctccctgcttta

SEQ ID NO: 42784 - RNA, 20 nt, synthetic construct
  source 1..20: mol_type = other RNA
ggggacgacgtatgcaactt

SEQ ID NO: 42785 - RNA, 20 nt, synthetic construct
  source 1..20: mol_type = other RNA
ggggactaacagggtctaca

SEQ ID NO: 42786 - RNA, 20 nt, synthetic construct
  source 1..20: mol_type = other RNA
ggggactcttatggctataa

SEQ ID NO: 42787 - RNA, 20 nt, synthetic construct
  source 1..20: mol_type = other RNA
ggggactgcaacagatctga

SEQ ID NO: 42788 - RNA, 20 nt, synthetic construct
  source 1..20: mol_type = other RNA
ggggacttgctctcttgccc

SEQ ID NO: 42789 - RNA, 20 nt, synthetic construct
  source 1..20: mol_type = other RNA
ggggactttgatgttttaca

SEQ ID NO: 42790 - RNA, 20 nt, synthetic construct
  source 1..20: mol_type = other RNA
ggggactttgtggcctcttc

SEQ ID NO: 42791 - RNA, 20 nt, synthetic construct
  source 1..20: mol_type = other RNA
ggggagactgtgcaatgtga

SEQ ID NO: 42792 - RNA, 20 nt, synthetic construct
  source 1..20: mol_type = other RNA
ggggagagcactggtttcag

SEQ ID NO: 42793 - RNA, 20 nt, synthetic construct
  source 1..20: mol_type = other RNA
ggggagaggcctcatgtatt

SEQ ID NO: 42794 - RNA, 20 nt, synthetic construct
  source 1..20: mol_type = other RNA
ggggagagtgggcccagcag

SEQ ID NO: 42795 - RNA, 20 nt, synthetic construct
  source 1..20: mol_type = other RNA
ggggagataccttgaaagga

SEQ ID NO: 42796 - RNA, 20 nt, synthetic construct
  source 1..20: mol_type = other RNA
ggggagctagagggtaagac

SEQ ID NO: 42797 - RNA, 20 nt, synthetic construct
  source 1..20: mol_type = other RNA
ggggagcttttgaaactgag

SEQ ID NO: 42798 - RNA, 20 nt, synthetic construct
  source 1..20: mol_type = other RNA
ggggaggccaaggcaggact

SEQ ID NO: 42799 - RNA, 20 nt, synthetic construct
  source 1..20: mol_type = other RNA
ggggagggagagggagctct

SEQ ID NO: 42800 - RNA, 20 nt, synthetic construct
  source 1..20: mol_type = other RNA
ggggagtgtgcccaaggaag

SEQ ID NO: 42801 - RNA, 20 nt, synthetic construct
  source 1..20: mol_type = other RNA
ggggagttttaggaaaatag

SEQ ID NO: 42802 - RNA, 20 nt, synthetic construct
  source 1..20: mol_type = other RNA
ggggatatccaaagataaag

SEQ ID NO: 42803 - RNA, 20 nt, synthetic construct
  source 1..20: mol_type = other RNA
ggggatccaggggaatagaa

SEQ ID NO: 42804 - RNA, 20 nt, synthetic construct
  source 1..20: mol_type = other RNA
ggggatgcaacaaatgttgc

SEQ ID NO: 42805 - RNA, 20 nt, synthetic construct
  source 1..20: mol_type = other RNA
ggggatgctcagggtgcgac

SEQ ID NO: 42806 - RNA, 20 nt, synthetic construct
  source 1..20: mol_type = other RNA
ggggatgctgtctataggca

SEQ ID NO: 42807 - RNA, 20 nt, synthetic construct
  source 1..20: mol_type = other RNA
ggggatgggggacgacgtat

SEQ ID NO: 42808 - RNA, 20 nt, synthetic construct
  source 1..20: mol_type = other RNA
ggggatggttgcacaatgtt

SEQ ID NO: 42809 - RNA, 20 nt, synthetic construct
  source 1..20: mol_type = other RNA
ggggatgtagaaggatatgt

SEQ ID NO: 42810 - RNA, 20 nt, synthetic construct
  source 1..20: mol_type = other RNA
ggggattctgctactagcaa

SEQ ID NO: 42811 - RNA, 20 nt, synthetic construct
  source 1..20: mol_type = other RNA
ggggattgagggttagattt

SEQ ID NO: 42812 - RNA, 20 nt, synthetic construct
  source 1..20: mol_type = other RNA
ggggatttcatgaacaattt

SEQ ID NO: 42813 - RNA, 20 nt, synthetic construct
  source 1..20: mol_type = other RNA
ggggcaatctcagctcatta

SEQ ID NO: 42814 - RNA, 20 nt, synthetic construct
  source 1..20: mol_type = other RNA
ggggcacctaaaaggttgct

SEQ ID NO: 42815 - RNA, 20 nt, synthetic construct
  source 1..20: mol_type = other RNA
ggggcactgggtccccggag

SEQ ID NO: 42816 - RNA, 20 nt, synthetic construct
  source 1..20: mol_type = other RNA
ggggcagagaactgactgaa

SEQ ID NO: 42817 - RNA, 20 nt, synthetic construct
  source 1..20: mol_type = other RNA
ggggcagcaaagcaagaaaa

SEQ ID NO: 42818 - RNA, 20 nt, synthetic construct
  source 1..20: mol_type = other RNA
ggggcaggaaaggtggggaa

SEQ ID NO: 42819 - RNA, 20 nt, synthetic construct
  source 1..20: mol_type = other RNA
ggggcagggtggagtccaac

SEQ ID NO: 42820 - RNA, 20 nt, synthetic construct
  source 1..20: mol_type = other RNA
ggggcataacatctatgaag

SEQ ID NO: 42821 - RNA, 20 nt, synthetic construct
  source 1..20: mol_type = other RNA
ggggcatcaaagctaccctt

SEQ ID NO: 42822 - RNA, 20 nt, synthetic construct
  source 1..20: mol_type = other RNA
ggggcattccctgtctggga

SEQ ID NO: 42823 - RNA, 20 nt, synthetic construct
  source 1..20: mol_type = other RNA
ggggcattccgtggaaggcc

SEQ ID NO: 42824 - RNA, 20 nt, synthetic construct
  source 1..20: mol_type = other RNA
ggggccactggaaacctttt

SEQ ID NO: 42825 - RNA, 20 nt, synthetic construct
  source 1..20: mol_type = other RNA
ggggccaggtgtggaggctc

SEQ ID NO: 42826 - RNA, 20 nt, synthetic construct
  source 1..20: mol_type = other RNA
ggggccagttgagagagaat

SEQ ID NO: 42827 - RNA, 20 nt, synthetic construct
  source 1..20: mol_type = other RNA
ggggccatctgaattcaagt

SEQ ID NO: 42828 - RNA, 20 nt, synthetic construct
  source 1..20: mol_type = other RNA
ggggccgcccctggagaaag

SEQ ID NO: 42829 - RNA, 20 nt, synthetic construct
  source 1..20: mol_type = other RNA
ggggccgcgtccacctggca

SEQ ID NO: 42830 - RNA, 20 nt, synthetic construct
  source 1..20: mol_type = other RNA
ggggcctacagtggttccat

SEQ ID NO: 42831 - RNA, 20 nt, synthetic construct
  source 1..20: mol_type = other RNA
ggggcctcagcatgtcttca

SEQ ID NO: 42832 - RNA, 20 nt, synthetic construct
  source 1..20: mol_type = other RNA
ggggccttttgtcaagctat

SEQ ID NO: 42833 - RNA, 20 nt, synthetic construct
  source 1..20: mol_type = other RNA
ggggcgatcttggctcacca

SEQ ID NO: 42834 - RNA, 20 nt, synthetic construct
  source 1..20: mol_type = other RNA
ggggcgcgtgcctatggtcc

SEQ ID NO: 42835 - RNA, 20 nt, synthetic construct
  source 1..20: mol_type = other RNA
ggggctaaatgctcacattt

SEQ ID NO: 42836 - RNA, 20 nt, synthetic construct
  source 1..20: mol_type = other RNA
ggggctaagtagtggcagcc

SEQ ID NO: 42837 - RNA, 20 nt, synthetic construct
  source 1..20: mol_type = other RNA
ggggctaggatttcagtaaa

SEQ ID NO: 42838 - RNA, 20 nt, synthetic construct
  source 1..20: mol_type = other RNA
ggggctatctttactttcag

SEQ ID NO: 42839 - RNA, 20 nt, synthetic construct
  source 1..20: mol_type = other RNA
ggggctcaagtaagtgaaat

SEQ ID NO: 42840 - RNA, 20 nt, synthetic construct
  source 1..20: mol_type = other RNA
ggggctcgcagcatccctgc

SEQ ID NO: 42841 - RNA, 20 nt, synthetic construct
  source 1..20: mol_type = other RNA
ggggctctaatgcaagagtt

SEQ ID NO: 42842 - RNA, 20 nt, synthetic construct
  source 1..20: mol_type = other RNA
ggggctgagccttcagaact

SEQ ID NO: 42843 - RNA, 20 nt, synthetic construct
  source 1..20: mol_type = other RNA
ggggctgaggattggagact

SEQ ID NO: 42844 - RNA, 20 nt, synthetic construct
  source 1..20: mol_type = other RNA
ggggctgagtatgggtctcc

SEQ ID NO: 42845 - RNA, 20 nt, synthetic construct
  source 1..20: mol_type = other RNA
ggggctgcatcatggtgggc

SEQ ID NO: 42846 - RNA, 20 nt, synthetic construct
  source 1..20: mol_type = other RNA
ggggctgccactacttagcc

SEQ ID NO: 42847 - RNA, 20 nt, synthetic construct
  source 1..20: mol_type = other RNA
ggggctggacataagggtct

SEQ ID NO: 42848 - RNA, 20 nt, synthetic construct
  source 1..20: mol_type = other RNA
ggggctgggggatccagggg

SEQ ID NO: 42849 - RNA, 20 nt, synthetic construct
  source 1..20: mol_type = other RNA
ggggctgttcccagataaca

SEQ ID NO: 42850 - RNA, 20 nt, synthetic construct
  source 1..20: mol_type = other RNA
ggggcttgaacccgaggtgc

SEQ ID NO: 42851 - RNA, 20 nt, synthetic construct
  source 1..20: mol_type = other RNA
ggggctttactgtattagga

SEQ ID NO: 42852 - RNA, 20 nt, synthetic construct
  source 1..20: mol_type = other RNA
ggggcttttgaacactctgc

SEQ ID NO: 42853 - RNA, 20 nt, synthetic construct
  source 1..20: mol_type = other RNA
gggggaaaaaaccataaaat

SEQ ID NO: 42854 - RNA, 20 nt, synthetic construct
  source 1..20: mol_type = other RNA
gggggaaaacacccttgaaa

SEQ ID NO: 42855 - RNA, 20 nt, synthetic construct
  source 1..20: mol_type = other RNA
gggggaaaactccaagtgta

SEQ ID NO: 42856 - RNA, 20 nt, synthetic construct
  source 1..20: mol_type = other RNA
gggggaaaattgacattttt

SEQ ID NO: 42857 - RNA, 20 nt, synthetic construct
  source 1..20: mol_type = other RNA
gggggaagagagcattgcct

SEQ ID NO: 42858 - RNA, 20 nt, synthetic construct
  source 1..20: mol_type = other RNA
gggggaagcaggaactcata

SEQ ID NO: 42859 - RNA, 20 nt, synthetic construct
  source 1..20: mol_type = other RNA
gggggaagcttttcatatac

SEQ ID NO: 42860 - RNA, 20 nt, synthetic construct
  source 1..20: mol_type = other RNA
gggggaatctactcttttgt

SEQ ID NO: 42861 - RNA, 20 nt, synthetic construct
  source 1..20: mol_type = other RNA
gggggacgacgtatgcaact

SEQ ID NO: 42862 - RNA, 20 nt, synthetic construct
  source 1..20: mol_type = other RNA
gggggagactgtgcaatgtg

SEQ ID NO: 42863 - RNA, 20 nt, synthetic construct
  source 1..20: mol_type = other RNA
gggggagagcactggtttca

SEQ ID NO: 42864 - RNA, 20 nt, synthetic construct
  source 1..20: mol_type = other RNA
gggggagggagagggagctc

SEQ ID NO: 42865 - RNA, 20 nt, synthetic construct
  source 1..20: mol_type = other RNA
gggggatccaggggaataga

SEQ ID NO: 42866 - RNA, 20 nt, synthetic construct
  source 1..20: mol_type = other RNA
gggggatgtagaaggatatg

SEQ ID NO: 42867 - RNA, 20 nt, synthetic construct
  source 1..20: mol_type = other RNA
gggggcactgggtccccgga

SEQ ID NO: 42868 - RNA, 20 nt, synthetic construct
  source 1..20: mol_type = other RNA
gggggcataacatctatgaa

SEQ ID NO: 42869 - RNA, 20 nt, synthetic construct
  source 1..20: mol_type = other RNA
gggggcatcaaagctaccct

SEQ ID NO: 42870 - RNA, 20 nt, synthetic construct
  source 1..20: mol_type = other RNA
gggggccactggaaaccttt

SEQ ID NO: 42871 - RNA, 20 nt, synthetic construct
  source 1..20: mol_type = other RNA
gggggcgcgtgcctatggtc

SEQ ID NO: 42872 - RNA, 20 nt, synthetic construct
  source 1..20: mol_type = other RNA
gggggctaaatgctcacatt

SEQ ID NO: 42873 - RNA, 20 nt, synthetic construct
  source 1..20: mol_type = other RNA
gggggctcacatctgtaatc

SEQ ID NO: 42874 - RNA, 20 nt, synthetic construct
  source 1..20: mol_type = other RNA
gggggctgaggattggagac

SEQ ID NO: 42875 - RNA, 20 nt, synthetic construct
  source 1..20: mol_type = other RNA
gggggctgagtatgggtctc

SEQ ID NO: 42876 - RNA, 20 nt, synthetic construct
  source 1..20: mol_type = other RNA
gggggctggacataagggtc

SEQ ID NO: 42877 - RNA, 20 nt, synthetic construct
  source 1..20: mol_type = other RNA
ggggggaaaaaaccataaaa

SEQ ID NO: 42878 - RNA, 20 nt, synthetic construct
  source 1..20: mol_type = other RNA
ggggggaaaacacccttgaa

SEQ ID NO: 42879 - RNA, 20 nt, synthetic construct
  source 1..20: mol_type = other RNA
ggggggaagcttttcatata

SEQ ID NO: 42880 - RNA, 20 nt, synthetic construct
  source 1..20: mol_type = other RNA
ggggggatgtagaaggatat

SEQ ID NO: 42881 - RNA, 20 nt, synthetic construct
  source 1..20: mol_type = other RNA
ggggggccactggaaacctt

SEQ ID NO: 42882 - RNA, 20 nt, synthetic construct
  source 1..20: mol_type = other RNA
ggggggtttgttttttgttt

SEQ ID NO: 42883 - RNA, 20 nt, synthetic construct
  source 1..20: mol_type = other RNA
gggggtaagattgtggtcca

SEQ ID NO: 42884 - RNA, 20 nt, synthetic construct
  source 1..20: mol_type = other RNA
gggggtatggagacactagg

SEQ ID NO: 42885 - RNA, 20 nt, synthetic construct
  source 1..20: mol_type = other RNA
gggggtcgagactgtaatga

SEQ ID NO: 42886 - RNA, 20 nt, synthetic construct
  source 1..20: mol_type = other RNA
gggggtttgttttttgtttt

SEQ ID NO: 42887 - RNA, 20 nt, synthetic construct
  source 1..20: mol_type = other RNA
ggggtaaaggggatggggga

SEQ ID NO: 42888 - RNA, 20 nt, synthetic construct
  source 1..20: mol_type = other RNA
ggggtaaatctttgtacagt

SEQ ID NO: 42889 - RNA, 20 nt, synthetic construct
  source 1..20: mol_type = other RNA
ggggtaaatggtttctcctt

SEQ ID NO: 42890 - RNA, 20 nt, synthetic construct
  source 1..20: mol_type = other RNA
ggggtaagattgtggtccag

SEQ ID NO: 42891 - RNA, 20 nt, synthetic construct
  source 1..20: mol_type = other RNA
ggggtaattttggggccatc

SEQ ID NO: 42892 - RNA, 20 nt, synthetic construct
  source 1..20: mol_type = other RNA
ggggtatggagacactaggg

SEQ ID NO: 42893 - RNA, 20 nt, synthetic construct
  source 1..20: mol_type = other RNA
ggggtatgtttgattagttg

SEQ ID NO: 42894 - RNA, 20 nt, synthetic construct
  source 1..20: mol_type = other RNA
ggggtattcagggggctaaa

SEQ ID NO: 42895 - RNA, 20 nt, synthetic construct
  source 1..20: mol_type = other RNA
ggggtccccagcatccacta

SEQ ID NO: 42896 - RNA, 20 nt, synthetic construct
  source 1..20: mol_type = other RNA
ggggtcgagactgtaatgag

SEQ ID NO: 42897 - RNA, 20 nt, synthetic construct
  source 1..20: mol_type = other RNA
ggggtcttagttctgcttcc

SEQ ID NO: 42898 - RNA, 20 nt, synthetic construct
  source 1..20: mol_type = other RNA
ggggtcttatgctggtgggc

SEQ ID NO: 42899 - RNA, 20 nt, synthetic construct
  source 1..20: mol_type = other RNA
ggggtggggggatgtagaag

SEQ ID NO: 42900 - RNA, 20 nt, synthetic construct
  source 1..20: mol_type = other RNA
ggggttagggcctagaaatc

SEQ ID NO: 42901 - RNA, 20 nt, synthetic construct
  source 1..20: mol_type = other RNA
ggggttcaaaccacctaact

SEQ ID NO: 42902 - RNA, 20 nt, synthetic construct
  source 1..20: mol_type = other RNA
ggggtttcagcacaatactg

SEQ ID NO: 42903 - RNA, 20 nt, synthetic construct
  source 1..20: mol_type = other RNA
ggggtttccttacctttatc

SEQ ID NO: 42904 - RNA, 20 nt, synthetic construct
  source 1..20: mol_type = other RNA
ggggtttgtccatgttggtc

SEQ ID NO: 42905 - RNA, 20 nt, synthetic construct
  source 1..20: mol_type = other RNA
ggggtttgttttttgttttg

SEQ ID NO: 42906 - RNA, 20 nt, synthetic construct
  source 1..20: mol_type = other RNA
ggggtttttatggttttaag

SEQ ID NO: 42907 - RNA, 20 nt, synthetic construct
  source 1..20: mol_type = other RNA
gggtaaaaagcctgcttcag

SEQ ID NO: 42908 - RNA, 20 nt, synthetic construct
  source 1..20: mol_type = other RNA
gggtaaaaataatcaactat

SEQ ID NO: 42909 - RNA, 20 nt, synthetic construct
  source 1..20: mol_type = other RNA
gggtaaaatagtcaagtaac

SEQ ID NO: 42910 - RNA, 20 nt, synthetic construct
  source 1..20: mol_type = other RNA
gggtaaacaagactcaacat

SEQ ID NO: 42911 - RNA, 20 nt, synthetic construct
  source 1..20: mol_type = other RNA
gggtaaacagaattaaacaa

SEQ ID NO: 42912 - RNA, 20 nt, synthetic construct
  source 1..20: mol_type = other RNA
gggtaaaggggatgggggac

SEQ ID NO: 42913 - RNA, 20 nt, synthetic construct
  source 1..20: mol_type = other RNA
gggtaaagtcaattctagtt

SEQ ID NO: 42914 - RNA, 20 nt, synthetic construct
  source 1..20: mol_type = other RNA
gggtaaatctttgtacagta

SEQ ID NO: 42915 - RNA, 20 nt, synthetic construct
  source 1..20: mol_type = other RNA
gggtaaatggtttctccttc

SEQ ID NO: 42916 - RNA, 20 nt, synthetic construct
  source 1..20: mol_type = other RNA
gggtaaatttctaaaaacgt

SEQ ID NO: 42917 - RNA, 20 nt, synthetic construct
  source 1..20: mol_type = other RNA
gggtaacgtgagctggaagt

SEQ ID NO: 42918 - RNA, 20 nt, synthetic construct
  source 1..20: mol_type = other RNA
gggtaagaaaattgtacaat

SEQ ID NO: 42919 - RNA, 20 nt, synthetic construct
  source 1..20: mol_type = other RNA
gggtaagaaaggagttcagc

SEQ ID NO: 42920 - RNA, 20 nt, synthetic construct
  source 1..20: mol_type = other RNA
gggtaagaccaaaatggaga

SEQ ID NO: 42921 - RNA, 20 nt, synthetic construct
  source 1..20: mol_type = other RNA
gggtaagattccgtctcaaa

SEQ ID NO: 42922 - RNA, 20 nt, synthetic construct
  source 1..20: mol_type = other RNA
gggtaagattgtggtccaga

SEQ ID NO: 42923 - RNA, 20 nt, synthetic construct
  source 1..20: mol_type = other RNA
gggtaatgctggcttcatgg

SEQ ID NO: 42924 - RNA, 20 nt, synthetic construct
  source 1..20: mol_type = other RNA
gggtaatttatctccataag

SEQ ID NO: 42925 - RNA, 20 nt, synthetic construct
  source 1..20: mol_type = other RNA
gggtaattttggggccatct

SEQ ID NO: 42926 - RNA, 20 nt, synthetic construct
  source 1..20: mol_type = other RNA
gggtacacatcctaatacag

SEQ ID NO: 42927 - RNA, 20 nt, synthetic construct
  source 1..20: mol_type = other RNA
gggtacagaactgctaatgg

SEQ ID NO: 42928 - RNA, 20 nt, synthetic construct
  source 1..20: mol_type = other RNA
gggtacagggtttctgtttg

SEQ ID NO: 42929 - RNA, 20 nt, synthetic construct
  source 1..20: mol_type = other RNA
gggtagaagcagcaagggtg

SEQ ID NO: 42930 - RNA, 20 nt, synthetic construct
  source 1..20: mol_type = other RNA
gggtagagactggatcctgg

SEQ ID NO: 42931 - RNA, 20 nt, synthetic construct
  source 1..20: mol_type = other RNA
gggtagagcactttcgtatt

SEQ ID NO: 42932 - RNA, 20 nt, synthetic construct
  source 1..20: mol_type = other RNA
gggtagctttgatgccccca

SEQ ID NO: 42933 - RNA, 20 nt, synthetic construct
  source 1..20: mol_type = other RNA
gggtagcttttcctgctgtc

SEQ ID NO: 42934 - RNA, 20 nt, synthetic construct
  source 1..20: mol_type = other RNA
gggtaggaaaagacttctca

SEQ ID NO: 42935 - RNA, 20 nt, synthetic construct
  source 1..20: mol_type = other RNA
gggtaggaagctgatcaagg

SEQ ID NO: 42936 - RNA, 20 nt, synthetic construct
  source 1..20: mol_type = other RNA
gggtaggaaggcggtgggga

SEQ ID NO: 42937 - RNA, 20 nt, synthetic construct
  source 1..20: mol_type = other RNA
gggtataaatgatgagctac

SEQ ID NO: 42938 - RNA, 20 nt, synthetic construct
  source 1..20: mol_type = other RNA
gggtatacagcaaaagaatt

SEQ ID NO: 42939 - RNA, 20 nt, synthetic construct
  source 1..20: mol_type = other RNA
gggtatatacaatattacag

SEQ ID NO: 42940 - RNA, 20 nt, synthetic construct
  source 1..20: mol_type = other RNA
gggtatcatattatttttgt

SEQ ID NO: 42941 - RNA, 20 nt, synthetic construct
  source 1..20: mol_type = other RNA
gggtatggagacactaggga

SEQ ID NO: 42942 - RNA, 20 nt, synthetic construct
  source 1..20: mol_type = other RNA
gggtatgtttgattagttga

SEQ ID NO: 42943 - RNA, 20 nt, synthetic construct
  source 1..20: mol_type = other RNA
gggtattcagggggctaaat

SEQ ID NO: 42944 - RNA, 20 nt, synthetic construct
  source 1..20: mol_type = other RNA
gggtattttgttgttgttgt

SEQ ID NO: 42945 - RNA, 20 nt, synthetic construct
  source 1..20: mol_type = other RNA
gggtcaacaaactaactaga

SEQ ID NO: 42946 - RNA, 20 nt, synthetic construct
  source 1..20: mol_type = other RNA
gggtcaaccactaaggtcaa

SEQ ID NO: 42947 - RNA, 20 nt, synthetic construct
  source 1..20: mol_type = other RNA
gggtcactattaaccatatg

SEQ ID NO: 42948 - RNA, 20 nt, synthetic construct
  source 1..20: mol_type = other RNA
gggtcacttcctctcttaaa

SEQ ID NO: 42949 - RNA, 20 nt, synthetic construct
  source 1..20: mol_type = other RNA
gggtcagaatcgtgatagtc

SEQ ID NO: 42950 - RNA, 20 nt, synthetic construct
  source 1..20: mol_type = other RNA
gggtcagaattttattttct

SEQ ID NO: 42951 - RNA, 20 nt, synthetic construct
  source 1..20: mol_type = other RNA
gggtcagctagtgtgtctga

SEQ ID NO: 42952 - RNA, 20 nt, synthetic construct
  source 1..20: mol_type = other RNA
gggtcatgcacacgctggaa

SEQ ID NO: 42953 - RNA, 20 nt, synthetic construct
  source 1..20: mol_type = other RNA
gggtccaagacaggaagaat

SEQ ID NO: 42954 - RNA, 20 nt, synthetic construct
  source 1..20: mol_type = other RNA
gggtccagcttcactcttct

SEQ ID NO: 42955 - RNA, 20 nt, synthetic construct
  source 1..20: mol_type = other RNA
gggtccaggcagttctcctg

SEQ ID NO: 42956 - RNA, 20 nt, synthetic construct
  source 1..20: mol_type = other RNA
gggtccccagcatccactag

SEQ ID NO: 42957 - RNA, 20 nt, synthetic construct
  source 1..20: mol_type = other RNA
gggtccccggaggaggtggc

SEQ ID NO: 42958 - RNA, 20 nt, synthetic construct
  source 1..20: mol_type = other RNA
gggtcgagactgtaatgagc

SEQ ID NO: 42959 - RNA, 20 nt, synthetic construct
  source 1..20: mol_type = other RNA
gggtcgcggacgcgcatttt

SEQ ID NO: 42960 - RNA, 20 nt, synthetic construct
  source 1..20: mol_type = other RNA
gggtcgggtgtcagaaacca

SEQ ID NO: 42961 - RNA, 20 nt, synthetic construct
  source 1..20: mol_type = other RNA
gggtctacaaaaggtttcca

SEQ ID NO: 42962 - RNA, 20 nt, synthetic construct
  source 1..20: mol_type = other RNA
gggtctatagtttaattggg

SEQ ID NO: 42963 - RNA, 20 nt, synthetic construct
  source 1..20: mol_type = other RNA
gggtctcactcttaccaagg

SEQ ID NO: 42964 - RNA, 20 nt, synthetic construct
  source 1..20: mol_type = other RNA
gggtctccattttggtctta

SEQ ID NO: 42965 - RNA, 20 nt, synthetic construct
  source 1..20: mol_type = other RNA
gggtctggtatctaccaaaa

SEQ ID NO: 42966 - RNA, 20 nt, synthetic construct
  source 1..20: mol_type = other RNA
gggtctgtctcacctcaagg

SEQ ID NO: 42967 - RNA, 20 nt, synthetic construct
  source 1..20: mol_type = other RNA
gggtctgttttacatgttta

SEQ ID NO: 42968 - RNA, 20 nt, synthetic construct
  source 1..20: mol_type = other RNA
gggtcttagttctgcttcca

SEQ ID NO: 42969 - RNA, 20 nt, synthetic construct
  source 1..20: mol_type = other RNA
gggtcttataggttgaatag

SEQ ID NO: 42970 - RNA, 20 nt, synthetic construct
  source 1..20: mol_type = other RNA
gggtcttatgctggtgggct

SEQ ID NO: 42971 - RNA, 20 nt, synthetic construct
  source 1..20: mol_type = other RNA
gggtcttgctctgtcaccca

SEQ ID NO: 42972 - RNA, 20 nt, synthetic construct
  source 1..20: mol_type = other RNA
gggtgaaacttgaatactcg

SEQ ID NO: 42973 - RNA, 20 nt, synthetic construct
  source 1..20: mol_type = other RNA
gggtgaataacccatatctt

SEQ ID NO: 42974 - RNA, 20 nt, synthetic construct
  source 1..20: mol_type = other RNA
gggtgacagagagagacctt

SEQ ID NO: 42975 - RNA, 20 nt, synthetic construct
  source 1..20: mol_type = other RNA
gggtgacagagccgagcaga

SEQ ID NO: 42976 - RNA, 20 nt, synthetic construct
  source 1..20: mol_type = other RNA
gggtgacctcatgtaactaa

SEQ ID NO: 42977 - RNA, 20 nt, synthetic construct
  source 1..20: mol_type = other RNA
gggtgactagtgtgaatgag

SEQ ID NO: 42978 - RNA, 20 nt, synthetic construct
  source 1..20: mol_type = other RNA
gggtgagaccaccacacttg

SEQ ID NO: 42979 - RNA, 20 nt, synthetic construct
  source 1..20: mol_type = other RNA
gggtgataaaaaggagggaa

SEQ ID NO: 42980 - RNA, 20 nt, synthetic construct
  source 1..20: mol_type = other RNA
gggtgatatctgtaagtcat

SEQ ID NO: 42981 - RNA, 20 nt, synthetic construct
  source 1..20: mol_type = other RNA
gggtgatgttcaaccctcgg

SEQ ID NO: 42982 - RNA, 20 nt, synthetic construct
  source 1..20: mol_type = other RNA
gggtgcagcctctaatcagg

SEQ ID NO: 42983 - RNA, 20 nt, synthetic construct
  source 1..20: mol_type = other RNA
gggtgcgacctcgaagcaca

SEQ ID NO: 42984 - RNA, 20 nt, synthetic construct
  source 1..20: mol_type = other RNA
gggtgcgttgaccgctttcg

SEQ ID NO: 42985 - RNA, 20 nt, synthetic construct
  source 1..20: mol_type = other RNA
gggtgctactcaaagtttag

SEQ ID NO: 42986 - RNA, 20 nt, synthetic construct
  source 1..20: mol_type = other RNA
gggtgctgatcaggaaagac

SEQ ID NO: 42987 - RNA, 20 nt, synthetic construct
  source 1..20: mol_type = other RNA
gggtggaaattaaacacacc

SEQ ID NO: 42988 - RNA, 20 nt, synthetic construct
  source 1..20: mol_type = other RNA
gggtggaagctgtccttctc

SEQ ID NO: 42989 - RNA, 20 nt, synthetic construct
  source 1..20: mol_type = other RNA
gggtggagtccaaccaatcg

SEQ ID NO: 42990 - RNA, 20 nt, synthetic construct
  source 1..20: mol_type = other RNA
gggtggatgggtgtagggtt

SEQ ID NO: 42991 - RNA, 20 nt, synthetic construct
  source 1..20: mol_type = other RNA
gggtggctggcactttcctg

SEQ ID NO: 42992 - RNA, 20 nt, synthetic construct
  source 1..20: mol_type = other RNA
gggtgggggcatcaaagcta

SEQ ID NO: 42993 - RNA, 20 nt, synthetic construct
  source 1..20: mol_type = other RNA
gggtggggggatgtagaagg

SEQ ID NO: 42994 - RNA, 20 nt, synthetic construct
  source 1..20: mol_type = other RNA
gggtggtagggagggggctg

SEQ ID NO: 42995 - RNA, 20 nt, synthetic construct
  source 1..20: mol_type = other RNA
gggtggtgctggactggagg

SEQ ID NO: 42996 - RNA, 20 nt, synthetic construct
  source 1..20: mol_type = other RNA
gggtgtaaaaggctaatttt

SEQ ID NO: 42997 - RNA, 20 nt, synthetic construct
  source 1..20: mol_type = other RNA
gggtgtagccacaagccaca

SEQ ID NO: 42998 - RNA, 20 nt, synthetic construct
  source 1..20: mol_type = other RNA
gggtgtagggggaaaactcc

SEQ ID NO: 42999 - RNA, 20 nt, synthetic construct
  source 1..20: mol_type = other RNA
gggtgtagggtttggcagtt

SEQ ID NO: 43000 - RNA, 20 nt, synthetic construct
  source 1..20: mol_type = other RNA
gggtgtcagaaaccatcgtt

SEQ ID NO: 43001 - RNA, 20 nt, synthetic construct
  source 1..20: mol_type = other RNA
gggtgtcagaattccatcag

SEQ ID NO: 43002 - RNA, 20 nt, synthetic construct
  source 1..20: mol_type = other RNA
gggtgtgatcaggaaagatg

SEQ ID NO: 43003 - RNA, 20 nt, synthetic construct
  source 1..20: mol_type = other RNA
gggtgtgcacgtttgctttg

SEQ ID NO: 43004 - RNA, 20 nt, synthetic construct
  source 1..20: mol_type = other RNA
gggtgtgtgaatggaaaatt

SEQ ID NO: 43005 - RNA, 20 nt, synthetic construct
  source 1..20: mol_type = other RNA
gggtgtgtttaatttccacc

SEQ ID NO: 43006 - RNA, 20 nt, synthetic construct
  source 1..20: mol_type = other RNA
gggtgttttcccccctaaaa

SEQ ID NO: 43007 - RNA, 20 nt, synthetic construct
  source 1..20: mol_type = other RNA
gggttaaaagttagctggca

SEQ ID NO: 43008 - RNA, 20 nt, synthetic construct
  source 1..20: mol_type = other RNA
gggttacagtataggggaac

SEQ ID NO: 43009 - RNA, 20 nt, synthetic construct
  source 1..20: mol_type = other RNA
gggttagaagacaatactgt

SEQ ID NO: 43010 - RNA, 20 nt, synthetic construct
  source 1..20: mol_type = other RNA
gggttagattatatggtcta

SEQ ID NO: 43011 - RNA, 20 nt, synthetic construct
  source 1..20: mol_type = other RNA
gggttagatttttcctttgc

SEQ ID NO: 43012 - RNA, 20 nt, synthetic construct
  source 1..20: mol_type = other RNA
gggttagggcctagaaatca

SEQ ID NO: 43013 - RNA, 20 nt, synthetic construct
  source 1..20: mol_type = other RNA
gggttatacacacataaggg

SEQ ID NO: 43014 - RNA, 20 nt, synthetic construct
  source 1..20: mol_type = other RNA
gggttattaacataccgacg

SEQ ID NO: 43015 - RNA, 20 nt, synthetic construct
  source 1..20: mol_type = other RNA
gggttattcacccaagaatt

SEQ ID NO: 43016 - RNA, 20 nt, synthetic construct
  source 1..20: mol_type = other RNA
gggttcaaaccacctaacta

SEQ ID NO: 43017 - RNA, 20 nt, synthetic construct
  source 1..20: mol_type = other RNA
gggttcaagccccagttctg

SEQ ID NO: 43018 - RNA, 20 nt, synthetic construct
  source 1..20: mol_type = other RNA
gggttcaattatgtggaaaa

SEQ ID NO: 43019 - RNA, 20 nt, synthetic construct
  source 1..20: mol_type = other RNA
gggttcaggtgcctcctgcc

SEQ ID NO: 43020 - RNA, 20 nt, synthetic construct
  source 1..20: mol_type = other RNA
gggttctcaccaacatccac

SEQ ID NO: 43021 - RNA, 20 nt, synthetic construct
  source 1..20: mol_type = other RNA
gggttctcccttctattcca

SEQ ID NO: 43022 - RNA, 20 nt, synthetic construct
  source 1..20: mol_type = other RNA
gggttcttggaaattagaaa

SEQ ID NO: 43023 - RNA, 20 nt, synthetic construct
  source 1..20: mol_type = other RNA
gggttgaacatcacccagct

SEQ ID NO: 43024 - RNA, 20 nt, synthetic construct
  source 1..20: mol_type = other RNA
gggttgatttttaatgagat

SEQ ID NO: 43025 - RNA, 20 nt, synthetic construct
  source 1..20: mol_type = other RNA
gggttggaggagaaggcctt

SEQ ID NO: 43026 - RNA, 20 nt, synthetic construct
  source 1..20: mol_type = other RNA
gggttggggaggccgcggga

SEQ ID NO: 43027 - RNA, 20 nt, synthetic construct
  source 1..20: mol_type = other RNA
gggttgggggctgggtcggc

SEQ ID NO: 43028 - RNA, 20 nt, synthetic construct
  source 1..20: mol_type = other RNA
gggttggggtatgtttgatt

SEQ ID NO: 43029 - RNA, 20 nt, synthetic construct
  source 1..20: mol_type = other RNA
gggttggtgcttccttctct

SEQ ID NO: 43030 - RNA, 20 nt, synthetic construct
  source 1..20: mol_type = other RNA
gggtttaaaagagtgcacat

SEQ ID NO: 43031 - RNA, 20 nt, synthetic construct
  source 1..20: mol_type = other RNA
gggtttaactgaggtgtttt

SEQ ID NO: 43032 - RNA, 20 nt, synthetic construct
  source 1..20: mol_type = other RNA
gggtttcagcacaatactgt

SEQ ID NO: 43033 - RNA, 20 nt, synthetic construct
  source 1..20: mol_type = other RNA
gggtttcagtgagtagggaa

SEQ ID NO: 43034 - RNA, 20 nt, synthetic construct
  source 1..20: mol_type = other RNA
gggtttcctcggtctacgga

SEQ ID NO: 43035 - RNA, 20 nt, synthetic construct
  source 1..20: mol_type = other RNA
gggtttccttacctttatct

SEQ ID NO: 43036 - RNA, 20 nt, synthetic construct
  source 1..20: mol_type = other RNA
gggtttctgtttggatgaaa

SEQ ID NO: 43037 - RNA, 20 nt, synthetic construct
  source 1..20: mol_type = other RNA
gggtttgagtttccagaaaa

SEQ ID NO: 43038 - RNA, 20 nt, synthetic construct
  source 1..20: mol_type = other RNA
gggtttggcagtttaagaat

SEQ ID NO: 43039 - RNA, 20 nt, synthetic construct
  source 1..20: mol_type = other RNA
gggtttgttttttgttttgg

SEQ ID NO: 43040 - RNA, 20 nt, synthetic construct
  source 1..20: mol_type = other RNA
gggttttctgtagaatatcc

SEQ ID NO: 43041 - RNA, 20 nt, synthetic construct
  source 1..20: mol_type = other RNA
gggttttgttttgttttttc

SEQ ID NO: 43042 - RNA, 20 nt, synthetic construct
  source 1..20: mol_type = other RNA
ggtaaaaagcctgcttcagc

SEQ ID NO: 43043 - RNA, 20 nt, synthetic construct
  source 1..20: mol_type = other RNA
ggtaaaaagtgcttctagta

SEQ ID NO: 43044 - RNA, 20 nt, synthetic construct
  source 1..20: mol_type = other RNA
ggtaaaacaaattccctcta

SEQ ID NO: 43045 - RNA, 20 nt, synthetic construct
  source 1..20: mol_type = other RNA
ggtaaaatagtcaagtaaca

SEQ ID NO: 43046 - RNA, 20 nt, synthetic construct
  source 1..20: mol_type = other RNA
ggtaaaatcactaattcaag

SEQ ID NO: 43047 - RNA, 20 nt, synthetic construct
  source 1..20: mol_type = other RNA
ggtaaaatgtacataacaaa

SEQ ID NO: 43048 - RNA, 20 nt, synthetic construct
  source 1..20: mol_type = other RNA
ggtaaaatgtggcaaattta

SEQ ID NO: 43049 - RNA, 20 nt, synthetic construct
  source 1..20: mol_type = other RNA
ggtaaacaagactcaacatg

SEQ ID NO: 43050 - RNA, 20 nt, synthetic construct
  source 1..20: mol_type = other RNA
ggtaaacagaattaaacaat

SEQ ID NO: 43051 - RNA, 20 nt, synthetic construct
  source 1..20: mol_type = other RNA
ggtaaacagcagtcttaacc

SEQ ID NO: 43052 - RNA, 20 nt, synthetic construct
  source 1..20: mol_type = other RNA
ggtaaaggggatgggggacg

SEQ ID NO: 43053 - RNA, 20 nt, synthetic construct
  source 1..20: mol_type = other RNA
ggtaaagtcaattctagtta

SEQ ID NO: 43054 - RNA, 20 nt, synthetic construct
  source 1..20: mol_type = other RNA
ggtaaatctttgtacagtaa

SEQ ID NO: 43055 - RNA, 20 nt, synthetic construct
  source 1..20: mol_type = other RNA
ggtaaatggtttctccttct

SEQ ID NO: 43056 - RNA, 20 nt, synthetic construct
  source 1..20: mol_type = other RNA
ggtaaattggtcctggaaaa

SEQ ID NO: 43057 - RNA, 20 nt, synthetic construct
  source 1..20: mol_type = other RNA
ggtaaatttctaaaaacgtg

SEQ ID NO: 43058 - RNA, 20 nt, synthetic construct
  source 1..20: mol_type = other RNA
ggtaacagccaaataaaaca

SEQ ID NO: 43059 - RNA, 20 nt, synthetic construct
  source 1..20: mol_type = other RNA
ggtaacgtgagctggaagta

SEQ ID NO: 43060 - RNA, 20 nt, synthetic construct
  source 1..20: mol_type = other RNA
ggtaactagatgcctcgaag

SEQ ID NO: 43061 - RNA, 20 nt, synthetic construct
  source 1..20: mol_type = other RNA
ggtaactcctgttctttgga

SEQ ID NO: 43062 - RNA, 20 nt, synthetic construct
  source 1..20: mol_type = other RNA
ggtaactgatgtgaggatct

SEQ ID NO: 43063 - RNA, 20 nt, synthetic construct
  source 1..20: mol_type = other RNA
ggtaagaaaaattccctcag

SEQ ID NO: 43064 - RNA, 20 nt, synthetic construct
  source 1..20: mol_type = other RNA
ggtaagaaaattgtacaatt

SEQ ID NO: 43065 - RNA, 20 nt, synthetic construct
  source 1..20: mol_type = other RNA
ggtaagaaaggagttcagct

SEQ ID NO: 43066 - RNA, 20 nt, synthetic construct
  source 1..20: mol_type = other RNA
ggtaagaacttgtctttgtc

SEQ ID NO: 43067 - RNA, 20 nt, synthetic construct
  source 1..20: mol_type = other RNA
ggtaagaatgtcaagctgtt

SEQ ID NO: 43068 - RNA, 20 nt, synthetic construct
  source 1..20: mol_type = other RNA
ggtaagaccaaaatggagac

SEQ ID NO: 43069 - RNA, 20 nt, synthetic construct
  source 1..20: mol_type = other RNA
ggtaagattccgtctcaaaa

SEQ ID NO: 43070 - RNA, 20 nt, synthetic construct
  source 1..20: mol_type = other RNA
ggtaagattgtggtccagaa

SEQ ID NO: 43071 - RNA, 20 nt, synthetic construct
  source 1..20: mol_type = other RNA
ggtaagctgtgagtccttcc

SEQ ID NO: 43072 - RNA, 20 nt, synthetic construct
  source 1..20: mol_type = other RNA
ggtaaggaaacagagttttc

SEQ ID NO: 43073 - RNA, 20 nt, synthetic construct
  source 1..20: mol_type = other RNA
ggtaaggaaaccccagggat

SEQ ID NO: 43074 - RNA, 20 nt, synthetic construct
  source 1..20: mol_type = other RNA
ggtaaggactgaagtccttt

SEQ ID NO: 43075 - RNA, 20 nt, synthetic construct
  source 1..20: mol_type = other RNA
ggtaaggagccaaacatcat

SEQ ID NO: 43076 - RNA, 20 nt, synthetic construct
  source 1..20: mol_type = other RNA
ggtaagggtccagcttcact

SEQ ID NO: 43077 - RNA, 20 nt, synthetic construct
  source 1..20: mol_type = other RNA
ggtaataatgaaagctccca

SEQ ID NO: 43078 - RNA, 20 nt, synthetic construct
  source 1..20: mol_type = other RNA
ggtaatacagtctgatttac

SEQ ID NO: 43079 - RNA, 20 nt, synthetic construct
  source 1..20: mol_type = other RNA
ggtaatactataaggaaata

SEQ ID NO: 43080 - RNA, 20 nt, synthetic construct
  source 1..20: mol_type = other RNA
ggtaatactctagtggtgct

SEQ ID NO: 43081 - RNA, 20 nt, synthetic construct
  source 1..20: mol_type = other RNA
ggtaatcacagctactcagg

SEQ ID NO: 43082 - RNA, 20 nt, synthetic construct
  source 1..20: mol_type = other RNA
ggtaatctagtttatctcat

SEQ ID NO: 43083 - RNA, 20 nt, synthetic construct
  source 1..20: mol_type = other RNA
ggtaatgaatagaaaatcct

SEQ ID NO: 43084 - RNA, 20 nt, synthetic construct
  source 1..20: mol_type = other RNA
ggtaatgacaataataacta

SEQ ID NO: 43085 - RNA, 20 nt, synthetic construct
  source 1..20: mol_type = other RNA
ggtaatgctggcttcatggg

SEQ ID NO: 43086 - RNA, 20 nt, synthetic construct
  source 1..20: mol_type = other RNA
ggtaatgggaaagacaggta

SEQ ID NO: 43087 - RNA, 20 nt, synthetic construct
  source 1..20: mol_type = other RNA
ggtaatgttatatttccgta

SEQ ID NO: 43088 - RNA, 20 nt, synthetic construct
  source 1..20: mol_type = other RNA
ggtaattggttcgtttgagg

SEQ ID NO: 43089 - RNA, 20 nt, synthetic construct
  source 1..20: mol_type = other RNA
ggtaatttatctccataagt

SEQ ID NO: 43090 - RNA, 20 nt, synthetic construct
  source 1..20: mol_type = other RNA
ggtaatttgtccatctggat

SEQ ID NO: 43091 - RNA, 20 nt, synthetic construct
  source 1..20: mol_type = other RNA
ggtaattttggggccatctg

SEQ ID NO: 43092 - RNA, 20 nt, synthetic construct
  source 1..20: mol_type = other RNA
ggtacaatacactaaattta

SEQ ID NO: 43093 - RNA, 20 nt, synthetic construct
  source 1..20: mol_type = other RNA
ggtacaattacacatctccc

SEQ ID NO: 43094 - RNA, 20 nt, synthetic construct
  source 1..20: mol_type = other RNA
ggtacacatcctaatacagt

SEQ ID NO: 43095 - RNA, 20 nt, synthetic construct
  source 1..20: mol_type = other RNA
ggtacagaactgctaatggt

SEQ ID NO: 43096 - RNA, 20 nt, synthetic construct
  source 1..20: mol_type = other RNA
ggtacagggtttctgtttgg

SEQ ID NO: 43097 - RNA, 20 nt, synthetic construct
  source 1..20: mol_type = other RNA
ggtaccaaagcagaaataca

SEQ ID NO: 43098 - RNA, 20 nt, synthetic construct
  source 1..20: mol_type = other RNA
ggtacgacgctcttgttcaa

SEQ ID NO: 43099 - RNA, 20 nt, synthetic construct
  source 1..20: mol_type = other RNA
ggtactcaacgacaatctct

SEQ ID NO: 43100 - RNA, 20 nt, synthetic construct
  source 1..20: mol_type = other RNA
ggtactctatgatatatact

SEQ ID NO: 43101 - RNA, 20 nt, synthetic construct
  source 1..20: mol_type = other RNA
ggtactgcctccacaggctt

SEQ ID NO: 43102 - RNA, 20 nt, synthetic construct
  source 1..20: mol_type = other RNA
ggtactggtaccaaagcaga

SEQ ID NO: 43103 - RNA, 20 nt, synthetic construct
  source 1..20: mol_type = other RNA
ggtagaaacatcccaagtgc

SEQ ID NO: 43104 - RNA, 20 nt, synthetic construct
  source 1..20: mol_type = other RNA
ggtagaagataatgttagaa

SEQ ID NO: 43105 - RNA, 20 nt, synthetic construct
  source 1..20: mol_type = other RNA
ggtagaagcagcaagggtgg

SEQ ID NO: 43106 - RNA, 20 nt, synthetic construct
  source 1..20: mol_type = other RNA
ggtagaagtacaaacattac

SEQ ID NO: 43107 - RNA, 20 nt, synthetic construct
  source 1..20: mol_type = other RNA
ggtagaatgaaaatttttgt

SEQ ID NO: 43108 - RNA, 20 nt, synthetic construct
  source 1..20: mol_type = other RNA
ggtagacatgagtaaaaaga

SEQ ID NO: 43109 - RNA, 20 nt, synthetic construct
  source 1..20: mol_type = other RNA
ggtagacatgtgccatgttg

SEQ ID NO: 43110 - RNA, 20 nt, synthetic construct
  source 1..20: mol_type = other RNA
ggtagaccatataatctaac

SEQ ID NO: 43111 - RNA, 20 nt, synthetic construct
  source 1..20: mol_type = other RNA
ggtagactgtaaaaattttc

SEQ ID NO: 43112 - RNA, 20 nt, synthetic construct
  source 1..20: mol_type = other RNA
ggtagagactggatcctgga

SEQ ID NO: 43113 - RNA, 20 nt, synthetic construct
  source 1..20: mol_type = other RNA
ggtagagcactttcgtattt

SEQ ID NO: 43114 - RNA, 20 nt, synthetic construct
  source 1..20: mol_type = other RNA
ggtagaggattccaggttta

SEQ ID NO: 43115 - RNA, 20 nt, synthetic construct
  source 1..20: mol_type = other RNA
ggtagataccagacccttta

SEQ ID NO: 43116 - RNA, 20 nt, synthetic construct
  source 1..20: mol_type = other RNA
ggtagatttctgcatagaga

SEQ ID NO: 43117 - RNA, 20 nt, synthetic construct
  source 1..20: mol_type = other RNA
ggtagcacaactagtaagta

SEQ ID NO: 43118 - RNA, 20 nt, synthetic construct
  source 1..20: mol_type = other RNA
ggtagctgctttttaaaaat

SEQ ID NO: 43119 - RNA, 20 nt, synthetic construct
  source 1..20: mol_type = other RNA
ggtagcttgggctaaggtgg

SEQ ID NO: 43120 - RNA, 20 nt, synthetic construct
  source 1..20: mol_type = other RNA
ggtagctttgatgcccccac

SEQ ID NO: 43121 - RNA, 20 nt, synthetic construct
  source 1..20: mol_type = other RNA
ggtagcttttcctgctgtcg

SEQ ID NO: 43122 - RNA, 20 nt, synthetic construct
  source 1..20: mol_type = other RNA
ggtaggaaaagacttctcaa

SEQ ID NO: 43123 - RNA, 20 nt, synthetic construct
  source 1..20: mol_type = other RNA
ggtaggaagctgatcaagga

SEQ ID NO: 43124 - RNA, 20 nt, synthetic construct
  source 1..20: mol_type = other RNA
ggtaggaaggcggtggggac

SEQ ID NO: 43125 - RNA, 20 nt, synthetic construct
  source 1..20: mol_type = other RNA
ggtaggagggtgtgatcagg

SEQ ID NO: 43126 - RNA, 20 nt, synthetic construct
  source 1..20: mol_type = other RNA
ggtaggccaaggcgggagga

SEQ ID NO: 43127 - RNA, 20 nt, synthetic construct
  source 1..20: mol_type = other RNA
ggtaggcttagatgagccca

SEQ ID NO: 43128 - RNA, 20 nt, synthetic construct
  source 1..20: mol_type = other RNA
ggtagggagggggctgagga

SEQ ID NO: 43129 - RNA, 20 nt, synthetic construct
  source 1..20: mol_type = other RNA
ggtagggaggggtattcagg

SEQ ID NO: 43130 - RNA, 20 nt, synthetic construct
  source 1..20: mol_type = other RNA
ggtagggataagaataccaa

SEQ ID NO: 43131 - RNA, 20 nt, synthetic construct
  source 1..20: mol_type = other RNA
ggtagggttggggtatgttt

SEQ ID NO: 43132 - RNA, 20 nt, synthetic construct
  source 1..20: mol_type = other RNA
ggtaggtgctttttgtatcc

SEQ ID NO: 43133 - RNA, 20 nt, synthetic construct
  source 1..20: mol_type = other RNA
ggtaggtgtgtgtaatccca

SEQ ID NO: 43134 - RNA, 20 nt, synthetic construct
  source 1..20: mol_type = other RNA
ggtagtaaggatcgttagta

SEQ ID NO: 43135 - RNA, 20 nt, synthetic construct
  source 1..20: mol_type = other RNA
ggtagtacatattcattgta

SEQ ID NO: 43136 - RNA, 20 nt, synthetic construct
  source 1..20: mol_type = other RNA
ggtagtcaacacttttccag

SEQ ID NO: 43137 - RNA, 20 nt, synthetic construct
  source 1..20: mol_type = other RNA
ggtagtcaatgcaatgcgtg

SEQ ID NO: 43138 - RNA, 20 nt, synthetic construct
  source 1..20: mol_type = other RNA
ggtagtcttgtcataacagt

SEQ ID NO: 43139 - RNA, 20 nt, synthetic construct
  source 1..20: mol_type = other RNA
ggtagttacacaagtgtttc

SEQ ID NO: 43140 - RNA, 20 nt, synthetic construct
  source 1..20: mol_type = other RNA
ggtagtttctttgaacttat

SEQ ID NO: 43141 - RNA, 20 nt, synthetic construct
  source 1..20: mol_type = other RNA
ggtagtttgcacgtttttag

SEQ ID NO: 43142 - RNA, 20 nt, synthetic construct
  source 1..20: mol_type = other RNA
ggtataaaggatgcacaaga

SEQ ID NO: 43143 - RNA, 20 nt, synthetic construct
  source 1..20: mol_type = other RNA
ggtataaagtttccgttttg

SEQ ID NO: 43144 - RNA, 20 nt, synthetic construct
  source 1..20: mol_type = other RNA
ggtataaatgatgagctact

SEQ ID NO: 43145 - RNA, 20 nt, synthetic construct
  source 1..20: mol_type = other RNA
ggtatacagcaaaagaatta

SEQ ID NO: 43146 - RNA, 20 nt, synthetic construct
  source 1..20: mol_type = other RNA
ggtatatacaatattacagt

SEQ ID NO: 43147 - RNA, 20 nt, synthetic construct
  source 1..20: mol_type = other RNA
ggtatatttctgtaaacatg

SEQ ID NO: 43148 - RNA, 20 nt, synthetic construct
  source 1..20: mol_type = other RNA
ggtatcacagtgaggacgct

SEQ ID NO: 43149 - RNA, 20 nt, synthetic construct
  source 1..20: mol_type = other RNA
ggtatcaccatctgataagc

SEQ ID NO: 43150 - RNA, 20 nt, synthetic construct
  source 1..20: mol_type = other RNA
ggtatcactttttgtatttc

SEQ ID NO: 43151 - RNA, 20 nt, synthetic construct
  source 1..20: mol_type = other RNA
ggtatcatattatttttgtc

SEQ ID NO: 43152 - RNA, 20 nt, synthetic construct
  source 1..20: mol_type = other RNA
ggtatcatcggaaatataaa

SEQ ID NO: 43153 - RNA, 20 nt, synthetic construct
  source 1..20: mol_type = other RNA
ggtatcatttccaagattga

SEQ ID NO: 43154 - RNA, 20 nt, synthetic construct
  source 1..20: mol_type = other RNA
ggtatctaccaaaaaactac

SEQ ID NO: 43155 - RNA, 20 nt, synthetic construct
  source 1..20: mol_type = other RNA
ggtatctccccaaagatatt

SEQ ID NO: 43156 - RNA, 20 nt, synthetic construct
  source 1..20: mol_type = other RNA
ggtatgagtgtttcccttaa

SEQ ID NO: 43157 - RNA, 20 nt, synthetic construct
  source 1..20: mol_type = other RNA
ggtatgcactgtactcctag

SEQ ID NO: 43158 - RNA, 20 nt, synthetic construct
  source 1..20: mol_type = other RNA
ggtatgcatcttgaactaag

SEQ ID NO: 43159 - RNA, 20 nt, synthetic construct
  source 1..20: mol_type = other RNA
ggtatggagacactagggac

SEQ ID NO: 43160 - RNA, 20 nt, synthetic construct
  source 1..20: mol_type = other RNA
ggtatggcgactcatgcctg

SEQ ID NO: 43161 - RNA, 20 nt, synthetic construct
  source 1..20: mol_type = other RNA
ggtatgggagatgtgtaatt

SEQ ID NO: 43162 - RNA, 20 nt, synthetic construct
  source 1..20: mol_type = other RNA
ggtatgtacccaatggatta

SEQ ID NO: 43163 - RNA, 20 nt, synthetic construct
  source 1..20: mol_type = other RNA
ggtatgtgccatctccttaa

SEQ ID NO: 43164 - RNA, 20 nt, synthetic construct
  source 1..20: mol_type = other RNA
ggtatgttaataaccctgtt

SEQ ID NO: 43165 - RNA, 20 nt, synthetic construct
  source 1..20: mol_type = other RNA
ggtatgttgtgttttcattc

SEQ ID NO: 43166 - RNA, 20 nt, synthetic construct
  source 1..20: mol_type = other RNA
ggtatgtttgattagttgac

SEQ ID NO: 43167 - RNA, 20 nt, synthetic construct
  source 1..20: mol_type = other RNA
ggtattattttcacagacag

SEQ ID NO: 43168 - RNA, 20 nt, synthetic construct
  source 1..20: mol_type = other RNA
ggtattcagggggctaaatg

SEQ ID NO: 43169 - RNA, 20 nt, synthetic construct
  source 1..20: mol_type = other RNA
ggtattcatgctgtgaattt

SEQ ID NO: 43170 - RNA, 20 nt, synthetic construct
  source 1..20: mol_type = other RNA
ggtattctatcatcaagaca

SEQ ID NO: 43171 - RNA, 20 nt, synthetic construct
  source 1..20: mol_type = other RNA
ggtattctgaactttcaacc

SEQ ID NO: 43172 - RNA, 20 nt, synthetic construct
  source 1..20: mol_type = other RNA
ggtattcttatccctaccta

SEQ ID NO: 43173 - RNA, 20 nt, synthetic construct
  source 1..20: mol_type = other RNA
ggtattgagcctgttccgat

SEQ ID NO: 43174 - RNA, 20 nt, synthetic construct
  source 1..20: mol_type = other RNA
ggtatttaatctgtcagcag

SEQ ID NO: 43175 - RNA, 20 nt, synthetic construct
  source 1..20: mol_type = other RNA
ggtatttctaaatcaacagt

SEQ ID NO: 43176 - RNA, 20 nt, synthetic construct
  source 1..20: mol_type = other RNA
ggtatttgaaaaatgtcaat

SEQ ID NO: 43177 - RNA, 20 nt, synthetic construct
  source 1..20: mol_type = other RNA
ggtatttggggctaggattt

SEQ ID NO: 43178 - RNA, 20 nt, synthetic construct
  source 1..20: mol_type = other RNA
ggtattttaagattctcttt

SEQ ID NO: 43179 - RNA, 20 nt, synthetic construct
  source 1..20: mol_type = other RNA
ggtattttgttgttgttgtt

SEQ ID NO: 43180 - RNA, 20 nt, synthetic construct
  source 1..20: mol_type = other RNA
ggtattttttagagacaggg

SEQ ID NO: 43181 - RNA, 20 nt, synthetic construct
  source 1..20: mol_type = other RNA
ggtcaaaactgtattttcta

SEQ ID NO: 43182 - RNA, 20 nt, synthetic construct
  source 1..20: mol_type = other RNA
ggtcaaactcacttattagc

SEQ ID NO: 43183 - RNA, 20 nt, synthetic construct
  source 1..20: mol_type = other RNA
ggtcaaatcaatacttcatt

SEQ ID NO: 43184 - RNA, 20 nt, synthetic construct
  source 1..20: mol_type = other RNA
ggtcaaatggtaacagccaa

SEQ ID NO: 43185 - RNA, 20 nt, synthetic construct
  source 1..20: mol_type = other RNA
ggtcaacaaactaactagaa

SEQ ID NO: 43186 - RNA, 20 nt, synthetic construct
  source 1..20: mol_type = other RNA
ggtcaacacatcagcgctaa

SEQ ID NO: 43187 - RNA, 20 nt, synthetic construct
  source 1..20: mol_type = other RNA
ggtcaacagggtaagattcc

SEQ ID NO: 43188 - RNA, 20 nt, synthetic construct
  source 1..20: mol_type = other RNA
ggtcaacatgaaaagatact

SEQ ID NO: 43189 - RNA, 20 nt, synthetic construct
  source 1..20: mol_type = other RNA
ggtcaaccactaaggtcaac

SEQ ID NO: 43190 - RNA, 20 nt, synthetic construct
  source 1..20: mol_type = other RNA
ggtcaacgcacccagagcgg

SEQ ID NO: 43191 - RNA, 20 nt, synthetic construct
  source 1..20: mol_type = other RNA
ggtcaagaaataaaacatgg

SEQ ID NO: 43192 - RNA, 20 nt, synthetic construct
  source 1..20: mol_type = other RNA
ggtcaagagagattaaataa

SEQ ID NO: 43193 - RNA, 20 nt, synthetic construct
  source 1..20: mol_type = other RNA
ggtcaagagcggcctttgcc

SEQ ID NO: 43194 - RNA, 20 nt, synthetic construct
  source 1..20: mol_type = other RNA
ggtcaatctaggaggtctaa

SEQ ID NO: 43195 - RNA, 20 nt, synthetic construct
  source 1..20: mol_type = other RNA
ggtcaatctgaaaaatatca

SEQ ID NO: 43196 - RNA, 20 nt, synthetic construct
  source 1..20: mol_type = other RNA
ggtcaattgatctgccagga

SEQ ID NO: 43197 - RNA, 20 nt, synthetic construct
  source 1..20: mol_type = other RNA
ggtcaatttcatcgtaaaaa

SEQ ID NO: 43198 - RNA, 20 nt, synthetic construct
  source 1..20: mol_type = other RNA
ggtcacaaacacaaaacaaa

SEQ ID NO: 43199 - RNA, 20 nt, synthetic construct
  source 1..20: mol_type = other RNA
ggtcacactttttgtgagtt

SEQ ID NO: 43200 - RNA, 20 nt, synthetic construct
  source 1..20: mol_type = other RNA
ggtcacattcagaggtattt

SEQ ID NO: 43201 - RNA, 20 nt, synthetic construct
  source 1..20: mol_type = other RNA
ggtcacattctgcctgcaga

SEQ ID NO: 43202 - RNA, 20 nt, synthetic construct
  source 1..20: mol_type = other RNA
ggtcacccaagccacagcgt

SEQ ID NO: 43203 - RNA, 20 nt, synthetic construct
  source 1..20: mol_type = other RNA
ggtcacctagcctctctggg

SEQ ID NO: 43204 - RNA, 20 nt, synthetic construct
  source 1..20: mol_type = other RNA
ggtcactattaaccatatgg

SEQ ID NO: 43205 - RNA, 20 nt, synthetic construct
  source 1..20: mol_type = other RNA
ggtcactgcagtctcaaact

SEQ ID NO: 43206 - RNA, 20 nt, synthetic construct
  source 1..20: mol_type = other RNA
ggtcactgctgatgtaagtg

SEQ ID NO: 43207 - RNA, 20 nt, synthetic construct
  source 1..20: mol_type = other RNA
ggtcactggccactgattga

SEQ ID NO: 43208 - RNA, 20 nt, synthetic construct
  source 1..20: mol_type = other RNA
ggtcactgtttggacagtaa

SEQ ID NO: 43209 - RNA, 20 nt, synthetic construct
  source 1..20: mol_type = other RNA
ggtcacttcctctcttaaat

SEQ ID NO: 43210 - RNA, 20 nt, synthetic construct
  source 1..20: mol_type = other RNA
ggtcagaaaaatggaatatt

SEQ ID NO: 43211 - RNA, 20 nt, synthetic construct
  source 1..20: mol_type = other RNA
ggtcagaagtttggaaccag

SEQ ID NO: 43212 - RNA, 20 nt, synthetic construct
  source 1..20: mol_type = other RNA
ggtcagaatacaaaaatgac

SEQ ID NO: 43213 - RNA, 20 nt, synthetic construct
  source 1..20: mol_type = other RNA
ggtcagaatcgtgatagtct

SEQ ID NO: 43214 - RNA, 20 nt, synthetic construct
  source 1..20: mol_type = other RNA
ggtcagaattttattttctt

SEQ ID NO: 43215 - RNA, 20 nt, synthetic construct
  source 1..20: mol_type = other RNA
ggtcagagttgtatctgtga

SEQ ID NO: 43216 - RNA, 20 nt, synthetic construct
  source 1..20: mol_type = other RNA
ggtcagccagaggaagctta

SEQ ID NO: 43217 - RNA, 20 nt, synthetic construct
  source 1..20: mol_type = other RNA
ggtcagctagtgtgtctgac

SEQ ID NO: 43218 - RNA, 20 nt, synthetic construct
  source 1..20: mol_type = other RNA
ggtcaggaaggcaggaggcc

SEQ ID NO: 43219 - RNA, 20 nt, synthetic construct
  source 1..20: mol_type = other RNA
ggtcagtactatcttcccta

SEQ ID NO: 43220 - RNA, 20 nt, synthetic construct
  source 1..20: mol_type = other RNA
ggtcagtagtacagtgagta

SEQ ID NO: 43221 - RNA, 20 nt, synthetic construct
  source 1..20: mol_type = other RNA
ggtcatcctttcccttctgc

SEQ ID NO: 43222 - RNA, 20 nt, synthetic construct
  source 1..20: mol_type = other RNA
ggtcatgacttttttgccca

SEQ ID NO: 43223 - RNA, 20 nt, synthetic construct
  source 1..20: mol_type = other RNA
ggtcatgcacacgctggaag

SEQ ID NO: 43224 - RNA, 20 nt, synthetic construct
  source 1..20: mol_type = other RNA
ggtcatgtacataaatttta

SEQ ID NO: 43225 - RNA, 20 nt, synthetic construct
  source 1..20: mol_type = other RNA
ggtcattacatattttgtaa

SEQ ID NO: 43226 - RNA, 20 nt, synthetic construct
  source 1..20: mol_type = other RNA
ggtcattctggagtgttttc

SEQ ID NO: 43227 - RNA, 20 nt, synthetic construct
  source 1..20: mol_type = other RNA
ggtcatttttcacttcttat

SEQ ID NO: 43228 - RNA, 20 nt, synthetic construct
  source 1..20: mol_type = other RNA
ggtccaagacaggaagaatt

SEQ ID NO: 43229 - RNA, 20 nt, synthetic construct
  source 1..20: mol_type = other RNA
ggtccacagaggctttttat

SEQ ID NO: 43230 - RNA, 20 nt, synthetic construct
  source 1..20: mol_type = other RNA
ggtccagatgaagcagggaa

SEQ ID NO: 43231 - RNA, 20 nt, synthetic construct
  source 1..20: mol_type = other RNA
ggtccagcttcactcttctg

SEQ ID NO: 43232 - RNA, 20 nt, synthetic construct
  source 1..20: mol_type = other RNA
ggtccccagcatccactagg

SEQ ID NO: 43233 - RNA, 20 nt, synthetic construct
  source 1..20: mol_type = other RNA
ggtccccggaggaggtggcg

SEQ ID NO: 43234 - RNA, 20 nt, synthetic construct
  source 1..20: mol_type = other RNA
ggtccctacaaaggacatga

SEQ ID NO: 43235 - RNA, 20 nt, synthetic construct
  source 1..20: mol_type = other RNA
ggtccctgctactcaggaga

SEQ ID NO: 43236 - RNA, 20 nt, synthetic construct
  source 1..20: mol_type = other RNA
ggtccggctctgcggcgggt

SEQ ID NO: 43237 - RNA, 20 nt, synthetic construct
  source 1..20: mol_type = other RNA
ggtcctgaactcgtggcctc

SEQ ID NO: 43238 - RNA, 20 nt, synthetic construct
  source 1..20: mol_type = other RNA
ggtcctgagctttccttagt

SEQ ID NO: 43239 - RNA, 20 nt, synthetic construct
  source 1..20: mol_type = other RNA
ggtcctgagggctttgtgaa

SEQ ID NO: 43240 - RNA, 20 nt, synthetic construct
  source 1..20: mol_type = other RNA
ggtcctgcatatgtttttat

SEQ ID NO: 43241 - RNA, 20 nt, synthetic construct
  source 1..20: mol_type = other RNA
ggtcctggaaaaagaccata

SEQ ID NO: 43242 - RNA, 20 nt, synthetic construct
  source 1..20: mol_type = other RNA
ggtccttaaatttctaaggt

SEQ ID NO: 43243 - RNA, 20 nt, synthetic construct
  source 1..20: mol_type = other RNA
ggtccttgctgaagaataac

SEQ ID NO: 43244 - RNA, 20 nt, synthetic construct
  source 1..20: mol_type = other RNA
ggtccttttttactgacttt

SEQ ID NO: 43245 - RNA, 20 nt, synthetic construct
  source 1..20: mol_type = other RNA
ggtcgaaaacctgaaatggc

SEQ ID NO: 43246 - RNA, 20 nt, synthetic construct
  source 1..20: mol_type = other RNA
ggtcgagactgtaatgagct

SEQ ID NO: 43247 - RNA, 20 nt, synthetic construct
  source 1..20: mol_type = other RNA
ggtcgagctgggtgatgttc

SEQ ID NO: 43248 - RNA, 20 nt, synthetic construct
  source 1..20: mol_type = other RNA
ggtcgcaccctgagcatccc

SEQ ID NO: 43249 - RNA, 20 nt, synthetic construct
  source 1..20: mol_type = other RNA
ggtcgcggacgcgcattttt

SEQ ID NO: 43250 - RNA, 20 nt, synthetic construct
  source 1..20: mol_type = other RNA
ggtcggaaggaatgtgcttc

SEQ ID NO: 43251 - RNA, 20 nt, synthetic construct
  source 1..20: mol_type = other RNA
ggtcgggctgcctcagccgc

SEQ ID NO: 43252 - RNA, 20 nt, synthetic construct
  source 1..20: mol_type = other RNA
ggtcgggtgtcagaaaccat

SEQ ID NO: 43253 - RNA, 20 nt, synthetic construct
  source 1..20: mol_type = other RNA
ggtcgttggatttatctttc

SEQ ID NO: 43254 - RNA, 20 nt, synthetic construct
  source 1..20: mol_type = other RNA
ggtcgtttcagattgcttga

SEQ ID NO: 43255 - RNA, 20 nt, synthetic construct
  source 1..20: mol_type = other RNA
ggtctaagagataactaatg

SEQ ID NO: 43256 - RNA, 20 nt, synthetic construct
  source 1..20: mol_type = other RNA
ggtctacaaaaggtttccag

SEQ ID NO: 43257 - RNA, 20 nt, synthetic construct
  source 1..20: mol_type = other RNA
ggtctaccatgttgttcttt

SEQ ID NO: 43258 - RNA, 20 nt, synthetic construct
  source 1..20: mol_type = other RNA
ggtctacggacgcaggcaaa

SEQ ID NO: 43259 - RNA, 20 nt, synthetic construct
  source 1..20: mol_type = other RNA
ggtctaggctaatgtgtgtt

SEQ ID NO: 43260 - RNA, 20 nt, synthetic construct
  source 1..20: mol_type = other RNA
ggtctagtgtgcatgtgttg

SEQ ID NO: 43261 - RNA, 20 nt, synthetic construct
  source 1..20: mol_type = other RNA
ggtctatagtttaattgggg

SEQ ID NO: 43262 - RNA, 20 nt, synthetic construct
  source 1..20: mol_type = other RNA
ggtctatctcattataacat

SEQ ID NO: 43263 - RNA, 20 nt, synthetic construct
  source 1..20: mol_type = other RNA
ggtctatgtgacagaatgca

SEQ ID NO: 43264 - RNA, 20 nt, synthetic construct
  source 1..20: mol_type = other RNA
ggtctcaaaacaaacaaaca

SEQ ID NO: 43265 - RNA, 20 nt, synthetic construct
  source 1..20: mol_type = other RNA
ggtctcaaaatttaaagtta

SEQ ID NO: 43266 - RNA, 20 nt, synthetic construct
  source 1..20: mol_type = other RNA
ggtctcaaactccaagtctc

SEQ ID NO: 43267 - RNA, 20 nt, synthetic construct
  source 1..20: mol_type = other RNA
ggtctcaatctcctgatcca

SEQ ID NO: 43268 - RNA, 20 nt, synthetic construct
  source 1..20: mol_type = other RNA
ggtctcacactgttgtccag

SEQ ID NO: 43269 - RNA, 20 nt, synthetic construct
  source 1..20: mol_type = other RNA
ggtctcaccctcaggactct

SEQ ID NO: 43270 - RNA, 20 nt, synthetic construct
  source 1..20: mol_type = other RNA
ggtctcactcttaccaaggc

SEQ ID NO: 43271 - RNA, 20 nt, synthetic construct
  source 1..20: mol_type = other RNA
ggtctcagccttttctgatt

SEQ ID NO: 43272 - RNA, 20 nt, synthetic construct
  source 1..20: mol_type = other RNA
ggtctcagctcctcagaagg

SEQ ID NO: 43273 - RNA, 20 nt, synthetic construct
  source 1..20: mol_type = other RNA
ggtctcagtttttaatttaa

SEQ ID NO: 43274 - RNA, 20 nt, synthetic construct
  source 1..20: mol_type = other RNA
ggtctcattcactagacaca

SEQ ID NO: 43275 - RNA, 20 nt, synthetic construct
  source 1..20: mol_type = other RNA
ggtctccattttggtcttac

SEQ ID NO: 43276 - RNA, 20 nt, synthetic construct
  source 1..20: mol_type = other RNA
ggtctcccagcatgaagccc

SEQ ID NO: 43277 - RNA, 20 nt, synthetic construct
  source 1..20: mol_type = other RNA
ggtctccttgtatggagact

SEQ ID NO: 43278 - RNA, 20 nt, synthetic construct
  source 1..20: mol_type = other RNA
ggtctcctttctatacttca

SEQ ID NO: 43279 - RNA, 20 nt, synthetic construct
  source 1..20: mol_type = other RNA
ggtctcgagctcctgacctc

SEQ ID NO: 43280 - RNA, 20 nt, synthetic construct
  source 1..20: mol_type = other RNA
ggtctctctgaaattagcta

SEQ ID NO: 43281 - RNA, 20 nt, synthetic construct
  source 1..20: mol_type = other RNA
ggtctcttcgagggggctga

SEQ ID NO: 43282 - RNA, 20 nt, synthetic construct
  source 1..20: mol_type = other RNA
ggtctctttgaaaggaatcc

SEQ ID NO: 43283 - RNA, 20 nt, synthetic construct
  source 1..20: mol_type = other RNA
ggtctgcagactcttgtccc

SEQ ID NO: 43284 - RNA, 20 nt, synthetic construct
  source 1..20: mol_type = other RNA
ggtctggaatgtgtagttct

SEQ ID NO: 43285 - RNA, 20 nt, synthetic construct
  source 1..20: mol_type = other RNA
ggtctgggtgatatctgtaa

SEQ ID NO: 43286 - RNA, 20 nt, synthetic construct
  source 1..20: mol_type = other RNA
ggtctggtatctaccaaaaa

SEQ ID NO: 43287 - RNA, 20 nt, synthetic construct
  source 1..20: mol_type = other RNA
ggtctgtaagtcagttaaca

SEQ ID NO: 43288 - RNA, 20 nt, synthetic construct
  source 1..20: mol_type = other RNA
ggtctgtatttctgctttgg

SEQ ID NO: 43289 - RNA, 20 nt, synthetic construct
  source 1..20: mol_type = other RNA
ggtctgtctcacctcaaggc

SEQ ID NO: 43290 - RNA, 20 nt, synthetic construct
  source 1..20: mol_type = other RNA
ggtctgtctttcagtatgtg

SEQ ID NO: 43291 - RNA, 20 nt, synthetic construct
  source 1..20: mol_type = other RNA
ggtctgttactcccgatttc

SEQ ID NO: 43292 - RNA, 20 nt, synthetic construct
  source 1..20: mol_type = other RNA
ggtctgttttacatgtttaa

SEQ ID NO: 43293 - RNA, 20 nt, synthetic construct
  source 1..20: mol_type = other RNA
ggtcttaagagactctcaag

SEQ ID NO: 43294 - RNA, 20 nt, synthetic construct
  source 1..20: mol_type = other RNA
ggtcttaccctctagctccc

SEQ ID NO: 43295 - RNA, 20 nt, synthetic construct
  source 1..20: mol_type = other RNA
ggtcttagttctgcttccac

SEQ ID NO: 43296 - RNA, 20 nt, synthetic construct
  source 1..20: mol_type = other RNA
ggtcttataggttgaatagg

SEQ ID NO: 43297 - RNA, 20 nt, synthetic construct
  source 1..20: mol_type = other RNA
ggtcttatgctggtgggctt

SEQ ID NO: 43298 - RNA, 20 nt, synthetic construct
  source 1..20: mol_type = other RNA
ggtcttcaacctcaacttta

SEQ ID NO: 43299 - RNA, 20 nt, synthetic construct
  source 1..20: mol_type = other RNA
ggtcttctagctttcagcac

SEQ ID NO: 43300 - RNA, 20 nt, synthetic construct
  source 1..20: mol_type = other RNA
ggtcttgctctgtcacccac

SEQ ID NO: 43301 - RNA, 20 nt, synthetic construct
  source 1..20: mol_type = other RNA
ggtcttgtactcccagcctc

SEQ ID NO: 43302 - RNA, 20 nt, synthetic construct
  source 1..20: mol_type = other RNA
ggtcttgtctcaacctttgc

SEQ ID NO: 43303 - RNA, 20 nt, synthetic construct
  source 1..20: mol_type = other RNA
ggtctttaaaagaaagctct

SEQ ID NO: 43304 - RNA, 20 nt, synthetic construct
  source 1..20: mol_type = other RNA
ggtctttcctgatcagcacc

SEQ ID NO: 43305 - RNA, 20 nt, synthetic construct
  source 1..20: mol_type = other RNA
ggtctttctcccaggtcagt

SEQ ID NO: 43306 - RNA, 20 nt, synthetic construct
  source 1..20: mol_type = other RNA
ggtctttgatccattttgag

SEQ ID NO: 43307 - RNA, 20 nt, synthetic construct
  source 1..20: mol_type = other RNA
ggtcttttagccaacaacca

SEQ ID NO: 43308 - RNA, 20 nt, synthetic construct
  source 1..20: mol_type = other RNA
ggtcttttgattttttaaca

SEQ ID NO: 43309 - RNA, 20 nt, synthetic construct
  source 1..20: mol_type = other RNA
ggtctttttccaggaccaat

SEQ ID NO: 43310 - RNA, 20 nt, synthetic construct
  source 1..20: mol_type = other RNA
ggtgaaaaaatggtgcagcc

SEQ ID NO: 43311 - RNA, 20 nt, synthetic construct
  source 1..20: mol_type = other RNA
ggtgaaacttgaatactcgt

SEQ ID NO: 43312 - RNA, 20 nt, synthetic construct
  source 1..20: mol_type = other RNA
ggtgaactattagagctttt

SEQ ID NO: 43313 - RNA, 20 nt, synthetic construct
  source 1..20: mol_type = other RNA
ggtgaactgggtgtaggggg

SEQ ID NO: 43314 - RNA, 20 nt, synthetic construct
  source 1..20: mol_type = other RNA
ggtgaagaaccgactgaaag

SEQ ID NO: 43315 - RNA, 20 nt, synthetic construct
  source 1..20: mol_type = other RNA
ggtgaagaatgtgaaaaatt

SEQ ID NO: 43316 - RNA, 20 nt, synthetic construct
  source 1..20: mol_type = other RNA
ggtgaagagagcctgtggtc

SEQ ID NO: 43317 - RNA, 20 nt, synthetic construct
  source 1..20: mol_type = other RNA
ggtgaaggttcatgaacata

SEQ ID NO: 43318 - RNA, 20 nt, synthetic construct
  source 1..20: mol_type = other RNA
ggtgaagttaagggccattt

SEQ ID NO: 43319 - RNA, 20 nt, synthetic construct
  source 1..20: mol_type = other RNA
ggtgaataacccatatcttt

SEQ ID NO: 43320 - RNA, 20 nt, synthetic construct
  source 1..20: mol_type = other RNA
ggtgaatctgagtaaagggt

SEQ ID NO: 43321 - RNA, 20 nt, synthetic construct
  source 1..20: mol_type = other RNA
ggtgaattttattcttttag

SEQ ID NO: 43322 - RNA, 20 nt, synthetic construct
  source 1..20: mol_type = other RNA
ggtgacagagagagaccttt

SEQ ID NO: 43323 - RNA, 20 nt, synthetic construct
  source 1..20: mol_type = other RNA
ggtgacagagccgagcagaa

SEQ ID NO: 43324 - RNA, 20 nt, synthetic construct
  source 1..20: mol_type = other RNA
ggtgacctcatgtaactaat

SEQ ID NO: 43325 - RNA, 20 nt, synthetic construct
  source 1..20: mol_type = other RNA
ggtgacctgccagagttggc

SEQ ID NO: 43326 - RNA, 20 nt, synthetic construct
  source 1..20: mol_type = other RNA
ggtgacgtgagatcatgcca

SEQ ID NO: 43327 - RNA, 20 nt, synthetic construct
  source 1..20: mol_type = other RNA
ggtgactagtgtgaatgagg

SEQ ID NO: 43328 - RNA, 20 nt, synthetic construct
  source 1..20: mol_type = other RNA
ggtgactgaattcccacaaa

SEQ ID NO: 43329 - RNA, 20 nt, synthetic construct
  source 1..20: mol_type = other RNA
ggtgagaacccagtgtctgc

SEQ ID NO: 43330 - RNA, 20 nt, synthetic construct
  source 1..20: mol_type = other RNA
ggtgagacagaccctggctt

SEQ ID NO: 43331 - RNA, 20 nt, synthetic construct
  source 1..20: mol_type = other RNA
ggtgagaccaccacacttgc

SEQ ID NO: 43332 - RNA, 20 nt, synthetic construct
  source 1..20: mol_type = other RNA
ggtgagctttttctttttaa

SEQ ID NO: 43333 - RNA, 20 nt, synthetic construct
  source 1..20: mol_type = other RNA
ggtgaggacatggagacagt

SEQ ID NO: 43334 - RNA, 20 nt, synthetic construct
  source 1..20: mol_type = other RNA
ggtgagggactgagcagtga

SEQ ID NO: 43335 - RNA, 20 nt, synthetic construct
  source 1..20: mol_type = other RNA
ggtgagtgagatgggaagaa

SEQ ID NO: 43336 - RNA, 20 nt, synthetic construct
  source 1..20: mol_type = other RNA
ggtgagtggactgtgaggga

SEQ ID NO: 43337 - RNA, 20 nt, synthetic construct
  source 1..20: mol_type = other RNA
ggtgataaaaaggagggaaa

SEQ ID NO: 43338 - RNA, 20 nt, synthetic construct
  source 1..20: mol_type = other RNA
ggtgataactggtgcttttt

SEQ ID NO: 43339 - RNA, 20 nt, synthetic construct
  source 1..20: mol_type = other RNA
ggtgatacctcttactaaaa

SEQ ID NO: 43340 - RNA, 20 nt, synthetic construct
  source 1..20: mol_type = other RNA
ggtgatatctgtaagtcatc

SEQ ID NO: 43341 - RNA, 20 nt, synthetic construct
  source 1..20: mol_type = other RNA
ggtgatcctaagccatctaa

SEQ ID NO: 43342 - RNA, 20 nt, synthetic construct
  source 1..20: mol_type = other RNA
ggtgatctatgaatttgcct

SEQ ID NO: 43343 - RNA, 20 nt, synthetic construct
  source 1..20: mol_type = other RNA
ggtgatgctaacgtgcttgc

SEQ ID NO: 43344 - RNA, 20 nt, synthetic construct
  source 1..20: mol_type = other RNA
ggtgatgttcaaccctcggc

SEQ ID NO: 43345 - RNA, 20 nt, synthetic construct
  source 1..20: mol_type = other RNA
ggtgattaaaggccctgatt

SEQ ID NO: 43346 - RNA, 20 nt, synthetic construct
  source 1..20: mol_type = other RNA
ggtgattaaagttatttcta

SEQ ID NO: 43347 - RNA, 20 nt, synthetic construct
  source 1..20: mol_type = other RNA
ggtgattcagagtgctgggt

SEQ ID NO: 43348 - RNA, 20 nt, synthetic construct
  source 1..20: mol_type = other RNA
ggtgcaaggataaacaaaga

SEQ ID NO: 43349 - RNA, 20 nt, synthetic construct
  source 1..20: mol_type = other RNA
ggtgcaatcacggctgatta

SEQ ID NO: 43350 - RNA, 20 nt, synthetic construct
  source 1..20: mol_type = other RNA
ggtgcaatgataggtcactg

SEQ ID NO: 43351 - RNA, 20 nt, synthetic construct
  source 1..20: mol_type = other RNA
ggtgcacaagggaagaggcc

SEQ ID NO: 43352 - RNA, 20 nt, synthetic construct
  source 1..20: mol_type = other RNA
ggtgcacacaacactcagat

SEQ ID NO: 43353 - RNA, 20 nt, synthetic construct
  source 1..20: mol_type = other RNA
ggtgcacattccaagagagg

SEQ ID NO: 43354 - RNA, 20 nt, synthetic construct
  source 1..20: mol_type = other RNA
ggtgcacgctgtgaatgtga

SEQ ID NO: 43355 - RNA, 20 nt, synthetic construct
  source 1..20: mol_type = other RNA
ggtgcagccactatagaaaa

SEQ ID NO: 43356 - RNA, 20 nt, synthetic construct
  source 1..20: mol_type = other RNA
ggtgcagcctctaatcaggt

SEQ ID NO: 43357 - RNA, 20 nt, synthetic construct
  source 1..20: mol_type = other RNA
ggtgcaggccagatatccat

SEQ ID NO: 43358 - RNA, 20 nt, synthetic construct
  source 1..20: mol_type = other RNA
ggtgcatttgggacagccta

SEQ ID NO: 43359 - RNA, 20 nt, synthetic construct
  source 1..20: mol_type = other RNA
ggtgccccactccacacacg

SEQ ID NO: 43360 - RNA, 20 nt, synthetic construct
  source 1..20: mol_type = other RNA
ggtgcccgcgaaggcgtgta

SEQ ID NO: 43361 - RNA, 20 nt, synthetic construct
  source 1..20: mol_type = other RNA
ggtgccctacatatggcaat

SEQ ID NO: 43362 - RNA, 20 nt, synthetic construct
  source 1..20: mol_type = other RNA
ggtgccgcgcgagggagcgt

SEQ ID NO: 43363 - RNA, 20 nt, synthetic construct
  source 1..20: mol_type = other RNA
ggtgcctcctgcctcagcct

SEQ ID NO: 43364 - RNA, 20 nt, synthetic construct
  source 1..20: mol_type = other RNA
ggtgcctgccatagagggag

SEQ ID NO: 43365 - RNA, 20 nt, synthetic construct
  source 1..20: mol_type = other RNA
ggtgcgacctcgaagcacaa

SEQ ID NO: 43366 - RNA, 20 nt, synthetic construct
  source 1..20: mol_type = other RNA
ggtgcgggattatttggaag

SEQ ID NO: 43367 - RNA, 20 nt, synthetic construct
  source 1..20: mol_type = other RNA
ggtgcgttgaccgctttcgt

SEQ ID NO: 43368 - RNA, 20 nt, synthetic construct
  source 1..20: mol_type = other RNA
ggtgctaattgtttgttggg

SEQ ID NO: 43369 - RNA, 20 nt, synthetic construct
  source 1..20: mol_type = other RNA
ggtgctactcaaagtttagt

SEQ ID NO: 43370 - RNA, 20 nt, synthetic construct
  source 1..20: mol_type = other RNA
ggtgctgataaatggctttt

SEQ ID NO: 43371 - RNA, 20 nt, synthetic construct
  source 1..20: mol_type = other RNA
ggtgctgatcaggaaagacc

SEQ ID NO: 43372 - RNA, 20 nt, synthetic construct
  source 1..20: mol_type = other RNA
ggtgctgatttaaaattttg

SEQ ID NO: 43373 - RNA, 20 nt, synthetic construct
  source 1..20: mol_type = other RNA
ggtgctgcacgtctgtggtc

SEQ ID NO: 43374 - RNA, 20 nt, synthetic construct
  source 1..20: mol_type = other RNA
ggtgctggactggagggatg

SEQ ID NO: 43375 - RNA, 20 nt, synthetic construct
  source 1..20: mol_type = other RNA
ggtgctggcagccttctctc

SEQ ID NO: 43376 - RNA, 20 nt, synthetic construct
  source 1..20: mol_type = other RNA
ggtgctggcttcaatatgca

SEQ ID NO: 43377 - RNA, 20 nt, synthetic construct
  source 1..20: mol_type = other RNA
ggtgctgttgtattttacac

SEQ ID NO: 43378 - RNA, 20 nt, synthetic construct
  source 1..20: mol_type = other RNA
ggtgcttaattcaaacaaat

SEQ ID NO: 43379 - RNA, 20 nt, synthetic construct
  source 1..20: mol_type = other RNA
ggtgcttacagactgattaa

SEQ ID NO: 43380 - RNA, 20 nt, synthetic construct
  source 1..20: mol_type = other RNA
ggtgcttagctgcctcttcc

SEQ ID NO: 43381 - RNA, 20 nt, synthetic construct
  source 1..20: mol_type = other RNA
ggtgcttccttctcttatac

SEQ ID NO: 43382 - RNA, 20 nt, synthetic construct
  source 1..20: mol_type = other RNA
ggtgcttgaactgctggtct

SEQ ID NO: 43383 - RNA, 20 nt, synthetic construct
  source 1..20: mol_type = other RNA
ggtgctttctatctctcaga

SEQ ID NO: 43384 - RNA, 20 nt, synthetic construct
  source 1..20: mol_type = other RNA
ggtgcttttgctgcatccca

SEQ ID NO: 43385 - RNA, 20 nt, synthetic construct
  source 1..20: mol_type = other RNA
ggtgctttttgtatcctgtt

SEQ ID NO: 43386 - RNA, 20 nt, synthetic construct
  source 1..20: mol_type = other RNA
ggtgcttttttggtgttttt

SEQ ID NO: 43387 - RNA, 20 nt, synthetic construct
  source 1..20: mol_type = other RNA
ggtggaaattaaacacaccc

SEQ ID NO: 43388 - RNA, 20 nt, synthetic construct
  source 1..20: mol_type = other RNA
ggtggaactctgtcatggtg

SEQ ID NO: 43389 - RNA, 20 nt, synthetic construct
  source 1..20: mol_type = other RNA
ggtggaagctgtccttctcg

SEQ ID NO: 43390 - RNA, 20 nt, synthetic construct
  source 1..20: mol_type = other RNA
ggtggaaggcctgatagctg

SEQ ID NO: 43391 - RNA, 20 nt, synthetic construct
  source 1..20: mol_type = other RNA
ggtggacaaaaaacgcggca

SEQ ID NO: 43392 - RNA, 20 nt, synthetic construct
  source 1..20: mol_type = other RNA
ggtggagtattctagttcta

SEQ ID NO: 43393 - RNA, 20 nt, synthetic construct
  source 1..20: mol_type = other RNA
ggtggagtccaaccaatcgc

SEQ ID NO: 43394 - RNA, 20 nt, synthetic construct
  source 1..20: mol_type = other RNA
ggtggagtggtggatagaga

SEQ ID NO: 43395 - RNA, 20 nt, synthetic construct
  source 1..20: mol_type = other RNA
ggtggagttctgctcttgtc

SEQ ID NO: 43396 - RNA, 20 nt, synthetic construct
  source 1..20: mol_type = other RNA
ggtggatagagagattcaag

SEQ ID NO: 43397 - RNA, 20 nt, synthetic construct
  source 1..20: mol_type = other RNA
ggtggatatctgaggtcagg

SEQ ID NO: 43398 - RNA, 20 nt, synthetic construct
  source 1..20: mol_type = other RNA
ggtggatgggtgtagggttt

SEQ ID NO: 43399 - RNA, 20 nt, synthetic construct
  source 1..20: mol_type = other RNA
ggtggcattaaggacatcca

SEQ ID NO: 43400 - RNA, 20 nt, synthetic construct
  source 1..20: mol_type = other RNA
ggtggcccacacctgcaatc

SEQ ID NO: 43401 - RNA, 20 nt, synthetic construct
  source 1..20: mol_type = other RNA
ggtggcggatgccggtaatc

SEQ ID NO: 43402 - RNA, 20 nt, synthetic construct
  source 1..20: mol_type = other RNA
ggtggctggcactttcctga

SEQ ID NO: 43403 - RNA, 20 nt, synthetic construct
  source 1..20: mol_type = other RNA
ggtgggagaggcatgccggg

SEQ ID NO: 43404 - RNA, 20 nt, synthetic construct
  source 1..20: mol_type = other RNA
ggtgggaggcccggagccga

SEQ ID NO: 43405 - RNA, 20 nt, synthetic construct
  source 1..20: mol_type = other RNA
ggtgggatctctgggctcac

SEQ ID NO: 43406 - RNA, 20 nt, synthetic construct
  source 1..20: mol_type = other RNA
ggtgggcactgggagccctc

SEQ ID NO: 43407 - RNA, 20 nt, synthetic construct
  source 1..20: mol_type = other RNA
ggtgggccttgcaagccaca

SEQ ID NO: 43408 - RNA, 20 nt, synthetic construct
  source 1..20: mol_type = other RNA
ggtgggctttgagaaaggtt

SEQ ID NO: 43409 - RNA, 20 nt, synthetic construct
  source 1..20: mol_type = other RNA
ggtggggacagctcaattaa

SEQ ID NO: 43410 - RNA, 20 nt, synthetic construct
  source 1..20: mol_type = other RNA
ggtgggggcatcaaagctac

SEQ ID NO: 43411 - RNA, 20 nt, synthetic construct
  source 1..20: mol_type = other RNA
ggtggggggatgtagaagga

SEQ ID NO: 43412 - RNA, 20 nt, synthetic construct
  source 1..20: mol_type = other RNA
ggtggtaactgatgtgagga

SEQ ID NO: 43413 - RNA, 20 nt, synthetic construct
  source 1..20: mol_type = other RNA
ggtggtagggagggggctga

SEQ ID NO: 43414 - RNA, 20 nt, synthetic construct
  source 1..20: mol_type = other RNA
ggtggtaggtgtgtgtaatc

SEQ ID NO: 43415 - RNA, 20 nt, synthetic construct
  source 1..20: mol_type = other RNA
ggtggtagtaaggatcgtta

SEQ ID NO: 43416 - RNA, 20 nt, synthetic construct
  source 1..20: mol_type = other RNA
ggtggtatgcactgtactcc

SEQ ID NO: 43417 - RNA, 20 nt, synthetic construct
  source 1..20: mol_type = other RNA
ggtggtatgggagatgtgta

SEQ ID NO: 43418 - RNA, 20 nt, synthetic construct
  source 1..20: mol_type = other RNA
ggtggtatttaatctgtcag

SEQ ID NO: 43419 - RNA, 20 nt, synthetic construct
  source 1..20: mol_type = other RNA
ggtggtctcaccctcaggac

SEQ ID NO: 43420 - RNA, 20 nt, synthetic construct
  source 1..20: mol_type = other RNA
ggtggtgctggactggaggg

SEQ ID NO: 43421 - RNA, 20 nt, synthetic construct
  source 1..20: mol_type = other RNA
ggtggttctgcctaatctct

SEQ ID NO: 43422 - RNA, 20 nt, synthetic construct
  source 1..20: mol_type = other RNA
ggtggtttgaaccccagaag

SEQ ID NO: 43423 - RNA, 20 nt, synthetic construct
  source 1..20: mol_type = other RNA
ggtgtaaaaggctaattttt

SEQ ID NO: 43424 - RNA, 20 nt, synthetic construct
  source 1..20: mol_type = other RNA
ggtgtaaaatacaacagcac

SEQ ID NO: 43425 - RNA, 20 nt, synthetic construct
  source 1..20: mol_type = other RNA
ggtgtaagagattaattcag

SEQ ID NO: 43426 - RNA, 20 nt, synthetic construct
  source 1..20: mol_type = other RNA
ggtgtacaattaggctgttt

SEQ ID NO: 43427 - RNA, 20 nt, synthetic construct
  source 1..20: mol_type = other RNA
ggtgtagccacaagccacat

SEQ ID NO: 43428 - RNA, 20 nt, synthetic construct
  source 1..20: mol_type = other RNA
ggtgtagggggaaaactcca

SEQ ID NO: 43429 - RNA, 20 nt, synthetic construct
  source 1..20: mol_type = other RNA
ggtgtagggtttggcagttt

SEQ ID NO: 43430 - RNA, 20 nt, synthetic construct
  source 1..20: mol_type = other RNA
ggtgtatgatcttattaatg

SEQ ID NO: 43431 - RNA, 20 nt, synthetic construct
  source 1..20: mol_type = other RNA
ggtgtatttagtatattttc

SEQ ID NO: 43432 - RNA, 20 nt, synthetic construct
  source 1..20: mol_type = other RNA
ggtgtcactggatagaagtg

SEQ ID NO: 43433 - RNA, 20 nt, synthetic construct
  source 1..20: mol_type = other RNA
ggtgtcagaaaccatcgttc

SEQ ID NO: 43434 - RNA, 20 nt, synthetic construct
  source 1..20: mol_type = other RNA
ggtgtcagaattccatcagt

SEQ ID NO: 43435 - RNA, 20 nt, synthetic construct
  source 1..20: mol_type = other RNA
ggtgtcatttttaagaaatc

SEQ ID NO: 43436 - RNA, 20 nt, synthetic construct
  source 1..20: mol_type = other RNA
ggtgtccttctgagaaggcg

SEQ ID NO: 43437 - RNA, 20 nt, synthetic construct
  source 1..20: mol_type = other RNA
ggtgtcgtttatttcttctc

SEQ ID NO: 43438 - RNA, 20 nt, synthetic construct
  source 1..20: mol_type = other RNA
ggtgtctcatttaataacta

SEQ ID NO: 43439 - RNA, 20 nt, synthetic construct
  source 1..20: mol_type = other RNA
ggtgtctgatgtgtgtctct

SEQ ID NO: 43440 - RNA, 20 nt, synthetic construct
  source 1..20: mol_type = other RNA
ggtgtcttattgttttgatt

SEQ ID NO: 43441 - RNA, 20 nt, synthetic construct
  source 1..20: mol_type = other RNA
ggtgtgaaccacgcatctgg

SEQ ID NO: 43442 - RNA, 20 nt, synthetic construct
  source 1..20: mol_type = other RNA
ggtgtgaagttgggcttaac

SEQ ID NO: 43443 - RNA, 20 nt, synthetic construct
  source 1..20: mol_type = other RNA
ggtgtgagattgatagatca

SEQ ID NO: 43444 - RNA, 20 nt, synthetic construct
  source 1..20: mol_type = other RNA
ggtgtgagccaccgtgccgg

SEQ ID NO: 43445 - RNA, 20 nt, synthetic construct
  source 1..20: mol_type = other RNA
ggtgtgataactgatatgag

SEQ ID NO: 43446 - RNA, 20 nt, synthetic construct
  source 1..20: mol_type = other RNA
ggtgtgatcaggaaagatga

SEQ ID NO: 43447 - RNA, 20 nt, synthetic construct
  source 1..20: mol_type = other RNA
ggtgtgatctctgctcaccg

SEQ ID NO: 43448 - RNA, 20 nt, synthetic construct
  source 1..20: mol_type = other RNA
ggtgtgcacgtttgctttgg

SEQ ID NO: 43449 - RNA, 20 nt, synthetic construct
  source 1..20: mol_type = other RNA
ggtgtgctcttttcatcact

SEQ ID NO: 43450 - RNA, 20 nt, synthetic construct
  source 1..20: mol_type = other RNA
ggtgtgcttctgataggaat

SEQ ID NO: 43451 - RNA, 20 nt, synthetic construct
  source 1..20: mol_type = other RNA
ggtgtggcatgtctgtagtt

SEQ ID NO: 43452 - RNA, 20 nt, synthetic construct
  source 1..20: mol_type = other RNA
ggtgtgggccaccaagccct

SEQ ID NO: 43453 - RNA, 20 nt, synthetic construct
  source 1..20: mol_type = other RNA
ggtgtggtcttgtctcaacc

SEQ ID NO: 43454 - RNA, 20 nt, synthetic construct
  source 1..20: mol_type = other RNA
ggtgtggtgctgcacgtctg

SEQ ID NO: 43455 - RNA, 20 nt, synthetic construct
  source 1..20: mol_type = other RNA
ggtgtgtaaacactgttctg

SEQ ID NO: 43456 - RNA, 20 nt, synthetic construct
  source 1..20: mol_type = other RNA
ggtgtgtctgcgccttaaag

SEQ ID NO: 43457 - RNA, 20 nt, synthetic construct
  source 1..20: mol_type = other RNA
ggtgtgtgaatggaaaattc

SEQ ID NO: 43458 - RNA, 20 nt, synthetic construct
  source 1..20: mol_type = other RNA
ggtgtgtgactgtagtccct

SEQ ID NO: 43459 - RNA, 20 nt, synthetic construct
  source 1..20: mol_type = other RNA
ggtgtgtgcaaaggattaga

SEQ ID NO: 43460 - RNA, 20 nt, synthetic construct
  source 1..20: mol_type = other RNA
ggtgtgtgtaatcccagcta

SEQ ID NO: 43461 - RNA, 20 nt, synthetic construct
  source 1..20: mol_type = other RNA
ggtgtgtgttccttcctaca

SEQ ID NO: 43462 - RNA, 20 nt, synthetic construct
  source 1..20: mol_type = other RNA
ggtgtgtttaatttccaccc

SEQ ID NO: 43463 - RNA, 20 nt, synthetic construct
  source 1..20: mol_type = other RNA
ggtgttaaatatttactaca

SEQ ID NO: 43464 - RNA, 20 nt, synthetic construct
  source 1..20: mol_type = other RNA
ggtgttaagccgttccatca

SEQ ID NO: 43465 - RNA, 20 nt, synthetic construct
  source 1..20: mol_type = other RNA
ggtgttagcaggactggact

SEQ ID NO: 43466 - RNA, 20 nt, synthetic construct
  source 1..20: mol_type = other RNA
ggtgttaggcaatccttccg

SEQ ID NO: 43467 - RNA, 20 nt, synthetic construct
  source 1..20: mol_type = other RNA
ggtgttatttgttctgtcac

SEQ ID NO: 43468 - RNA, 20 nt, synthetic construct
  source 1..20: mol_type = other RNA
ggtgttcctgaagtctttgg

SEQ ID NO: 43469 - RNA, 20 nt, synthetic construct
  source 1..20: mol_type = other RNA
ggtgttgactgaattaatct

SEQ ID NO: 43470 - RNA, 20 nt, synthetic construct
  source 1..20: mol_type = other RNA
ggtgttgcttgctctacaaa

SEQ ID NO: 43471 - RNA, 20 nt, synthetic construct
  source 1..20: mol_type = other RNA
ggtgttggtgcatttgggac

SEQ ID NO: 43472 - RNA, 20 nt, synthetic construct
  source 1..20: mol_type = other RNA
ggtgtttctgacaggtggta

SEQ ID NO: 43473 - RNA, 20 nt, synthetic construct
  source 1..20: mol_type = other RNA
ggtgtttggtgaattttatt

SEQ ID NO: 43474 - RNA, 20 nt, synthetic construct
  source 1..20: mol_type = other RNA
ggtgttttcccccctaaaac

SEQ ID NO: 43475 - RNA, 20 nt, synthetic construct
  source 1..20: mol_type = other RNA
ggtgtttttcagccctgata

SEQ ID NO: 43476 - RNA, 20 nt, synthetic construct
  source 1..20: mol_type = other RNA
ggtgtttttctaggtagttt

SEQ ID NO: 43477 - RNA, 20 nt, synthetic construct
  source 1..20: mol_type = other RNA
ggtgttttttccttctttgg

SEQ ID NO: 43478 - RNA, 20 nt, synthetic construct
  source 1..20: mol_type = other RNA
ggttaaaaccacaaacatga

SEQ ID NO: 43479 - RNA, 20 nt, synthetic construct
  source 1..20: mol_type = other RNA
ggttaaaagttagctggcaa

SEQ ID NO: 43480 - RNA, 20 nt, synthetic construct
  source 1..20: mol_type = other RNA
ggttaaacttggtctgggtg

SEQ ID NO: 43481 - RNA, 20 nt, synthetic construct
  source 1..20: mol_type = other RNA
ggttaaagcaacaggaagag

SEQ ID NO: 43482 - RNA, 20 nt, synthetic construct
  source 1..20: mol_type = other RNA
ggttaactaatagccagtgc

SEQ ID NO: 43483 - RNA, 20 nt, synthetic construct
  source 1..20: mol_type = other RNA
ggttaagactgctgtttacc

SEQ ID NO: 43484 - RNA, 20 nt, synthetic construct
  source 1..20: mol_type = other RNA
ggttaagggaagagctaaga

SEQ ID NO: 43485 - RNA, 20 nt, synthetic construct
  source 1..20: mol_type = other RNA
ggttaatagtgaccctttga

SEQ ID NO: 43486 - RNA, 20 nt, synthetic construct
  source 1..20: mol_type = other RNA
ggttaatattacagaagaat

SEQ ID NO: 43487 - RNA, 20 nt, synthetic construct
  source 1..20: mol_type = other RNA
ggttacagtataggggaact

SEQ ID NO: 43488 - RNA, 20 nt, synthetic construct
  source 1..20: mol_type = other RNA
ggttacgtactaggtatcac

SEQ ID NO: 43489 - RNA, 20 nt, synthetic construct
  source 1..20: mol_type = other RNA
ggttagaagacaatactgtt

SEQ ID NO: 43490 - RNA, 20 nt, synthetic construct
  source 1..20: mol_type = other RNA
ggttagactgcacataaaag

SEQ ID NO: 43491 - RNA, 20 nt, synthetic construct
  source 1..20: mol_type = other RNA
ggttagattatatggtctac

SEQ ID NO: 43492 - RNA, 20 nt, synthetic construct
  source 1..20: mol_type = other RNA
ggttagatttttcctttgcc

SEQ ID NO: 43493 - RNA, 20 nt, synthetic construct
  source 1..20: mol_type = other RNA
ggttaggaaaatacatgagg

SEQ ID NO: 43494 - RNA, 20 nt, synthetic construct
  source 1..20: mol_type = other RNA
ggttagggagactttcactg

SEQ ID NO: 43495 - RNA, 20 nt, synthetic construct
  source 1..20: mol_type = other RNA
ggttagggcctagaaatcat

SEQ ID NO: 43496 - RNA, 20 nt, synthetic construct
  source 1..20: mol_type = other RNA
ggttagtgttgtttttaaac

SEQ ID NO: 43497 - RNA, 20 nt, synthetic construct
  source 1..20: mol_type = other RNA
ggttataatcagccgtgatt

SEQ ID NO: 43498 - RNA, 20 nt, synthetic construct
  source 1..20: mol_type = other RNA
ggttatacacacataagggg

SEQ ID NO: 43499 - RNA, 20 nt, synthetic construct
  source 1..20: mol_type = other RNA
ggttatagccataagagtcc

SEQ ID NO: 43500 - RNA, 20 nt, synthetic construct
  source 1..20: mol_type = other RNA
ggttatccaattttttggca

SEQ ID NO: 43501 - RNA, 20 nt, synthetic construct
  source 1..20: mol_type = other RNA
ggttatctgtacttttaaat

SEQ ID NO: 43502 - RNA, 20 nt, synthetic construct
  source 1..20: mol_type = other RNA
ggttatctgttttcttactg

SEQ ID NO: 43503 - RNA, 20 nt, synthetic construct
  source 1..20: mol_type = other RNA
ggttatgcgaatttactttt

SEQ ID NO: 43504 - RNA, 20 nt, synthetic construct
  source 1..20: mol_type = other RNA
ggttattaacataccgacgg

SEQ ID NO: 43505 - RNA, 20 nt, synthetic construct
  source 1..20: mol_type = other RNA
ggttattaagataatgctgt

SEQ ID NO: 43506 - RNA, 20 nt, synthetic construct
  source 1..20: mol_type = other RNA
ggttattcaaaacaaaacac

SEQ ID NO: 43507 - RNA, 20 nt, synthetic construct
  source 1..20: mol_type = other RNA
ggttattcacccaagaattt

SEQ ID NO: 43508 - RNA, 20 nt, synthetic construct
  source 1..20: mol_type = other RNA
ggttattcatgtttgtggtt

SEQ ID NO: 43509 - RNA, 20 nt, synthetic construct
  source 1..20: mol_type = other RNA
ggttattgagtctgtagggt

SEQ ID NO: 43510 - RNA, 20 nt, synthetic construct
  source 1..20: mol_type = other RNA
ggttcaaaccacctaactac

SEQ ID NO: 43511 - RNA, 20 nt, synthetic construct
  source 1..20: mol_type = other RNA
ggttcaagccccagttctgc

SEQ ID NO: 43512 - RNA, 20 nt, synthetic construct
  source 1..20: mol_type = other RNA
ggttcaagtttggctcccat

SEQ ID NO: 43513 - RNA, 20 nt, synthetic construct
  source 1..20: mol_type = other RNA
ggttcaattatgtggaaaaa

SEQ ID NO: 43514 - RNA, 20 nt, synthetic construct
  source 1..20: mol_type = other RNA
ggttcacaaattagaacaaa

SEQ ID NO: 43515 - RNA, 20 nt, synthetic construct
  source 1..20: mol_type = other RNA
ggttcacacctgtagtccca

SEQ ID NO: 43516 - RNA, 20 nt, synthetic construct
  source 1..20: mol_type = other RNA
ggttcacttgaaacctgcca

SEQ ID NO: 43517 - RNA, 20 nt, synthetic construct
  source 1..20: mol_type = other RNA
ggttcaggtgcctcctgcct

SEQ ID NO: 43518 - RNA, 20 nt, synthetic construct
  source 1..20: mol_type = other RNA
ggttcataatatatcacaac

SEQ ID NO: 43519 - RNA, 20 nt, synthetic construct
  source 1..20: mol_type = other RNA
ggttcatatttcccttttgg

SEQ ID NO: 43520 - RNA, 20 nt, synthetic construct
  source 1..20: mol_type = other RNA
ggttcatccatgttgttgaa

SEQ ID NO: 43521 - RNA, 20 nt, synthetic construct
  source 1..20: mol_type = other RNA
ggttcatgaacataaatttg

SEQ ID NO: 43522 - RNA, 20 nt, synthetic construct
  source 1..20: mol_type = other RNA
ggttcatgtgtgcttacaca

SEQ ID NO: 43523 - RNA, 20 nt, synthetic construct
  source 1..20: mol_type = other RNA
ggttcatttcaggaatgcaa

SEQ ID NO: 43524 - RNA, 20 nt, synthetic construct
  source 1..20: mol_type = other RNA
ggttcattttaataagcttc

SEQ ID NO: 43525 - RNA, 20 nt, synthetic construct
  source 1..20: mol_type = other RNA
ggttccaaacttctgacctt

SEQ ID NO: 43526 - RNA, 20 nt, synthetic construct
  source 1..20: mol_type = other RNA
ggttccatttgttttgtgtt

SEQ ID NO: 43527 - RNA, 20 nt, synthetic construct
  source 1..20: mol_type = other RNA
ggttccctgtagagattttt

SEQ ID NO: 43528 - RNA, 20 nt, synthetic construct
  source 1..20: mol_type = other RNA
ggttcctagaaaatttaata

SEQ ID NO: 43529 - RNA, 20 nt, synthetic construct
  source 1..20: mol_type = other RNA
ggttcgtttgaggcttttca

SEQ ID NO: 43530 - RNA, 20 nt, synthetic construct
  source 1..20: mol_type = other RNA
ggttctcaccaacatccaca

SEQ ID NO: 43531 - RNA, 20 nt, synthetic construct
  source 1..20: mol_type = other RNA
ggttctcaggagcctagtca

SEQ ID NO: 43532 - RNA, 20 nt, synthetic construct
  source 1..20: mol_type = other RNA
ggttctcccttctattccat

SEQ ID NO: 43533 - RNA, 20 nt, synthetic construct
  source 1..20: mol_type = other RNA
ggttctgcctaatctctagg

SEQ ID NO: 43534 - RNA, 20 nt, synthetic construct
  source 1..20: mol_type = other RNA
ggttctgcgtgttattttaa

SEQ ID NO: 43535 - RNA, 20 nt, synthetic construct
  source 1..20: mol_type = other RNA
ggttctgctatgctgaaagg

SEQ ID NO: 43536 - RNA, 20 nt, synthetic construct
  source 1..20: mol_type = other RNA
ggttctgtgctagatgctaa

SEQ ID NO: 43537 - RNA, 20 nt, synthetic construct
  source 1..20: mol_type = other RNA
ggttcttaagatgatataat

SEQ ID NO: 43538 - RNA, 20 nt, synthetic construct
  source 1..20: mol_type = other RNA
ggttcttcaccgtgcaacta

SEQ ID NO: 43539 - RNA, 20 nt, synthetic construct
  source 1..20: mol_type = other RNA
ggttcttcatcagtccctgt

SEQ ID NO: 43540 - RNA, 20 nt, synthetic construct
  source 1..20: mol_type = other RNA
ggttcttggaaattagaaat

SEQ ID NO: 43541 - RNA, 20 nt, synthetic construct
  source 1..20: mol_type = other RNA
ggttcttttaaatgccaatt

SEQ ID NO: 43542 - RNA, 20 nt, synthetic construct
  source 1..20: mol_type = other RNA
ggttgaaaactcaactgcct

SEQ ID NO: 43543 - RNA, 20 nt, synthetic construct
  source 1..20: mol_type = other RNA
ggttgaaagttcagaatacc

SEQ ID NO: 43544 - RNA, 20 nt, synthetic construct
  source 1..20: mol_type = other RNA
ggttgaacatcacccagctc

SEQ ID NO: 43545 - RNA, 20 nt, synthetic construct
  source 1..20: mol_type = other RNA
ggttgaagaaagtaggaatt

SEQ ID NO: 43546 - RNA, 20 nt, synthetic construct
  source 1..20: mol_type = other RNA
ggttgaagacctgcagtctg

SEQ ID NO: 43547 - RNA, 20 nt, synthetic construct
  source 1..20: mol_type = other RNA
ggttgaagctctagtgagct

SEQ ID NO: 43548 - RNA, 20 nt, synthetic construct
  source 1..20: mol_type = other RNA
ggttgaatagggcctcaaat

SEQ ID NO: 43549 - RNA, 20 nt, synthetic construct
  source 1..20: mol_type = other RNA
ggttgacccataaactgaac

SEQ ID NO: 43550 - RNA, 20 nt, synthetic construct
  source 1..20: mol_type = other RNA
ggttgagacaagaccacacc

SEQ ID NO: 43551 - RNA, 20 nt, synthetic construct
  source 1..20: mol_type = other RNA
ggttgagacttagatttatt

SEQ ID NO: 43552 - RNA, 20 nt, synthetic construct
  source 1..20: mol_type = other RNA
ggttgaggctgcagtgagct

SEQ ID NO: 43553 - RNA, 20 nt, synthetic construct
  source 1..20: mol_type = other RNA
ggttgatactagtttagtgc

SEQ ID NO: 43554 - RNA, 20 nt, synthetic construct
  source 1..20: mol_type = other RNA
ggttgatggctgtactaagc

SEQ ID NO: 43555 - RNA, 20 nt, synthetic construct
  source 1..20: mol_type = other RNA
ggttgatttttaatgagata

SEQ ID NO: 43556 - RNA, 20 nt, synthetic construct
  source 1..20: mol_type = other RNA
ggttgcacaatgttgtggat

SEQ ID NO: 43557 - RNA, 20 nt, synthetic construct
  source 1..20: mol_type = other RNA
ggttgcattaatgcttcata

SEQ ID NO: 43558 - RNA, 20 nt, synthetic construct
  source 1..20: mol_type = other RNA
ggttgcggtgacgtgagatc

SEQ ID NO: 43559 - RNA, 20 nt, synthetic construct
  source 1..20: mol_type = other RNA
ggttgcttaattgagctgtc

SEQ ID NO: 43560 - RNA, 20 nt, synthetic construct
  source 1..20: mol_type = other RNA
ggttgcttttacttggctcc

SEQ ID NO: 43561 - RNA, 20 nt, synthetic construct
  source 1..20: mol_type = other RNA
ggttggaaaacttttaactg

SEQ ID NO: 43562 - RNA, 20 nt, synthetic construct
  source 1..20: mol_type = other RNA
ggttggaaaagaaagctgtg

SEQ ID NO: 43563 - RNA, 20 nt, synthetic construct
  source 1..20: mol_type = other RNA
ggttggaagtttctggaagt

SEQ ID NO: 43564 - RNA, 20 nt, synthetic construct
  source 1..20: mol_type = other RNA
ggttggactccaccctgccc

SEQ ID NO: 43565 - RNA, 20 nt, synthetic construct
  source 1..20: mol_type = other RNA
ggttggaggagaaggccttc

SEQ ID NO: 43566 - RNA, 20 nt, synthetic construct
  source 1..20: mol_type = other RNA
ggttggccgaggccagtccc

SEQ ID NO: 43567 - RNA, 20 nt, synthetic construct
  source 1..20: mol_type = other RNA
ggttgggcttatcagatggt

SEQ ID NO: 43568 - RNA, 20 nt, synthetic construct
  source 1..20: mol_type = other RNA
ggttggggaggccgcgggag

SEQ ID NO: 43569 - RNA, 20 nt, synthetic construct
  source 1..20: mol_type = other RNA
ggttgggggctgggtcggcc

SEQ ID NO: 43570 - RNA, 20 nt, synthetic construct
  source 1..20: mol_type = other RNA
ggttggggtatgtttgatta

SEQ ID NO: 43571 - RNA, 20 nt, synthetic construct
  source 1..20: mol_type = other RNA
ggttggtgcttccttctctt

SEQ ID NO: 43572 - RNA, 20 nt, synthetic construct
  source 1..20: mol_type = other RNA
ggttgtatagcagtaaaatg

SEQ ID NO: 43573 - RNA, 20 nt, synthetic construct
  source 1..20: mol_type = other RNA
ggttgtgcttcgaggtcgca

SEQ ID NO: 43574 - RNA, 20 nt, synthetic construct
  source 1..20: mol_type = other RNA
ggttgtggaattaactccag

SEQ ID NO: 43575 - RNA, 20 nt, synthetic construct
  source 1..20: mol_type = other RNA
ggttgttcttggttaatatt

SEQ ID NO: 43576 - RNA, 20 nt, synthetic construct
  source 1..20: mol_type = other RNA
ggttgttggctaaaagaccg

SEQ ID NO: 43577 - RNA, 20 nt, synthetic construct
  source 1..20: mol_type = other RNA
ggtttaaaagagtgcacatt

SEQ ID NO: 43578 - RNA, 20 nt, synthetic construct
  source 1..20: mol_type = other RNA
ggtttaacacatacaaacca

SEQ ID NO: 43579 - RNA, 20 nt, synthetic construct
  source 1..20: mol_type = other RNA
ggtttaactgaggtgttttt

SEQ ID NO: 43580 - RNA, 20 nt, synthetic construct
  source 1..20: mol_type = other RNA
ggtttaaggtaagggtccag

SEQ ID NO: 43581 - RNA, 20 nt, synthetic construct
  source 1..20: mol_type = other RNA
ggtttaataaatactagtag

SEQ ID NO: 43582 - RNA, 20 nt, synthetic construct
  source 1..20: mol_type = other RNA
ggtttacaatggttcataat

SEQ ID NO: 43583 - RNA, 20 nt, synthetic construct
  source 1..20: mol_type = other RNA
ggtttacaggatatcagaag

SEQ ID NO: 43584 - RNA, 20 nt, synthetic construct
  source 1..20: mol_type = other RNA
ggtttactccaagaaggcta

SEQ ID NO: 43585 - RNA, 20 nt, synthetic construct
  source 1..20: mol_type = other RNA
ggtttacttggggagagtgg

SEQ ID NO: 43586 - RNA, 20 nt, synthetic construct
  source 1..20: mol_type = other RNA
ggtttagaaaacatatcctt

SEQ ID NO: 43587 - RNA, 20 nt, synthetic construct
  source 1..20: mol_type = other RNA
ggtttaggaagcacattcct

SEQ ID NO: 43588 - RNA, 20 nt, synthetic construct
  source 1..20: mol_type = other RNA
ggtttaggctgtctccaacg

SEQ ID NO: 43589 - RNA, 20 nt, synthetic construct
  source 1..20: mol_type = other RNA
ggtttaggtttttcttgtgg

SEQ ID NO: 43590 - RNA, 20 nt, synthetic construct
  source 1..20: mol_type = other RNA
ggtttattcatataatggag

SEQ ID NO: 43591 - RNA, 20 nt, synthetic construct
  source 1..20: mol_type = other RNA
ggtttattttctgcatttgg

SEQ ID NO: 43592 - RNA, 20 nt, synthetic construct
  source 1..20: mol_type = other RNA
ggtttcaagtgaaccaaaaa

SEQ ID NO: 43593 - RNA, 20 nt, synthetic construct
  source 1..20: mol_type = other RNA
ggtttcacacgcattgcatt

SEQ ID NO: 43594 - RNA, 20 nt, synthetic construct
  source 1..20: mol_type = other RNA
ggtttcagcacaatactgtc

SEQ ID NO: 43595 - RNA, 20 nt, synthetic construct
  source 1..20: mol_type = other RNA
ggtttcagtacacgaaaata

SEQ ID NO: 43596 - RNA, 20 nt, synthetic construct
  source 1..20: mol_type = other RNA
ggtttcagtccctcctttct

SEQ ID NO: 43597 - RNA, 20 nt, synthetic construct
  source 1..20: mol_type = other RNA
ggtttcagtgagtagggaag

SEQ ID NO: 43598 - RNA, 20 nt, synthetic construct
  source 1..20: mol_type = other RNA
ggtttcataaaatgatggca

SEQ ID NO: 43599 - RNA, 20 nt, synthetic construct
  source 1..20: mol_type = other RNA
ggtttccagtggcccccctg

SEQ ID NO: 43600 - RNA, 20 nt, synthetic construct
  source 1..20: mol_type = other RNA
ggtttccctggggaataaga

SEQ ID NO: 43601 - RNA, 20 nt, synthetic construct
  source 1..20: mol_type = other RNA
ggtttcctcggtctacggac

SEQ ID NO: 43602 - RNA, 20 nt, synthetic construct
  source 1..20: mol_type = other RNA
ggtttccttacctttatctt

SEQ ID NO: 43603 - RNA, 20 nt, synthetic construct
  source 1..20: mol_type = other RNA
ggtttctcatttttcagggg

SEQ ID NO: 43604 - RNA, 20 nt, synthetic construct
  source 1..20: mol_type = other RNA
ggtttctccttctgcaggct

SEQ ID NO: 43605 - RNA, 20 nt, synthetic construct
  source 1..20: mol_type = other RNA
ggtttctctccaaggtacaa

SEQ ID NO: 43606 - RNA, 20 nt, synthetic construct
  source 1..20: mol_type = other RNA
ggtttctgacacccgaccca

SEQ ID NO: 43607 - RNA, 20 nt, synthetic construct
  source 1..20: mol_type = other RNA
ggtttctgcatacttagcta

SEQ ID NO: 43608 - RNA, 20 nt, synthetic construct
  source 1..20: mol_type = other RNA
ggtttctgtttggatgaaaa

SEQ ID NO: 43609 - RNA, 20 nt, synthetic construct
  source 1..20: mol_type = other RNA
ggtttcttcaagatactgca

SEQ ID NO: 43610 - RNA, 20 nt, synthetic construct
  source 1..20: mol_type = other RNA
ggtttcttcactcttaaaag

SEQ ID NO: 43611 - RNA, 20 nt, synthetic construct
  source 1..20: mol_type = other RNA
ggtttcttgaatctctctat

SEQ ID NO: 43612 - RNA, 20 nt, synthetic construct
  source 1..20: mol_type = other RNA
ggtttgaaatgatcttttgt

SEQ ID NO: 43613 - RNA, 20 nt, synthetic construct
  source 1..20: mol_type = other RNA
ggtttgaaccccagaaggtt

SEQ ID NO: 43614 - RNA, 20 nt, synthetic construct
  source 1..20: mol_type = other RNA
ggtttgaagcttcacttctc

SEQ ID NO: 43615 - RNA, 20 nt, synthetic construct
  source 1..20: mol_type = other RNA
ggtttgagtttccagaaaac

SEQ ID NO: 43616 - RNA, 20 nt, synthetic construct
  source 1..20: mol_type = other RNA
ggtttgatcccactagtgga

SEQ ID NO: 43617 - RNA, 20 nt, synthetic construct
  source 1..20: mol_type = other RNA
ggtttgattgttccaggggg

SEQ ID NO: 43618 - RNA, 20 nt, synthetic construct
  source 1..20: mol_type = other RNA
ggtttgcaaaaattttgttc

SEQ ID NO: 43619 - RNA, 20 nt, synthetic construct
  source 1..20: mol_type = other RNA
ggtttgcactggcacagcac

SEQ ID NO: 43620 - RNA, 20 nt, synthetic construct
  source 1..20: mol_type = other RNA
ggtttgccttttcactctta

SEQ ID NO: 43621 - RNA, 20 nt, synthetic construct
  source 1..20: mol_type = other RNA
ggtttgctttggagtcacag

SEQ ID NO: 43622 - RNA, 20 nt, synthetic construct
  source 1..20: mol_type = other RNA
ggtttggagtttgtagctca

SEQ ID NO: 43623 - RNA, 20 nt, synthetic construct
  source 1..20: mol_type = other RNA
ggtttggcagtttaagaatt

SEQ ID NO: 43624 - RNA, 20 nt, synthetic construct
  source 1..20: mol_type = other RNA
ggtttggggcttttgaacac

SEQ ID NO: 43625 - RNA, 20 nt, synthetic construct
  source 1..20: mol_type = other RNA
ggtttgtagagcaagcaaca

SEQ ID NO: 43626 - RNA, 20 nt, synthetic construct
  source 1..20: mol_type = other RNA
ggtttgtatgtgttaaacca

SEQ ID NO: 43627 - RNA, 20 nt, synthetic construct
  source 1..20: mol_type = other RNA
ggtttgtgcttggatattct

SEQ ID NO: 43628 - RNA, 20 nt, synthetic construct
  source 1..20: mol_type = other RNA
ggtttgtgtgtttgtgaaaa

SEQ ID NO: 43629 - RNA, 20 nt, synthetic construct
  source 1..20: mol_type = other RNA
ggtttgttttttgttttggt

SEQ ID NO: 43630 - RNA, 20 nt, synthetic construct
  source 1..20: mol_type = other RNA
ggttttaaagaaattagaac

SEQ ID NO: 43631 - RNA, 20 nt, synthetic construct
  source 1..20: mol_type = other RNA
ggttttaacctcttgaagtc

SEQ ID NO: 43632 - RNA, 20 nt, synthetic construct
  source 1..20: mol_type = other RNA
ggttttaatgggcattagaa

SEQ ID NO: 43633 - RNA, 20 nt, synthetic construct
  source 1..20: mol_type = other RNA
ggttttactactgtactgtt

SEQ ID NO: 43634 - RNA, 20 nt, synthetic construct
  source 1..20: mol_type = other RNA
ggttttatctctctcaagca

SEQ ID NO: 43635 - RNA, 20 nt, synthetic construct
  source 1..20: mol_type = other RNA
ggttttatggtaactcctgt

SEQ ID NO: 43636 - RNA, 20 nt, synthetic construct
  source 1..20: mol_type = other RNA
ggttttcctactaacaagaa

SEQ ID NO: 43637 - RNA, 20 nt, synthetic construct
  source 1..20: mol_type = other RNA
ggttttcctgatggacattc

SEQ ID NO: 43638 - RNA, 20 nt, synthetic construct
  source 1..20: mol_type = other RNA
ggttttcgaccaagttacta

SEQ ID NO: 43639 - RNA, 20 nt, synthetic construct
  source 1..20: mol_type = other RNA
ggttttctagttagtttgtt

SEQ ID NO: 43640 - RNA, 20 nt, synthetic construct
  source 1..20: mol_type = other RNA
ggttttctggaggctagaag

SEQ ID NO: 43641 - RNA, 20 nt, synthetic construct
  source 1..20: mol_type = other RNA
ggttttctgtagaatatcca

SEQ ID NO: 43642 - RNA, 20 nt, synthetic construct
  source 1..20: mol_type = other RNA
ggttttgactcagtacttcc

SEQ ID NO: 43643 - RNA, 20 nt, synthetic construct
  source 1..20: mol_type = other RNA
ggttttgatcatcgcattac

SEQ ID NO: 43644 - RNA, 20 nt, synthetic construct
  source 1..20: mol_type = other RNA
ggttttggtaatgggaaaga

SEQ ID NO: 43645 - RNA, 20 nt, synthetic construct
  source 1..20: mol_type = other RNA
ggttttgttttgttttttca

SEQ ID NO: 43646 - RNA, 20 nt, synthetic construct
  source 1..20: mol_type = other RNA
ggtttttaaaagatgcattc

SEQ ID NO: 43647 - RNA, 20 nt, synthetic construct
  source 1..20: mol_type = other RNA
ggtttttatggaataatgga

SEQ ID NO: 43648 - RNA, 20 nt, synthetic construct
  source 1..20: mol_type = other RNA
ggtttttattttatgtacac

SEQ ID NO: 43649 - RNA, 20 nt, synthetic construct
  source 1..20: mol_type = other RNA
ggtttttcttgtgggtattt

SEQ ID NO: 43650 - RNA, 20 nt, synthetic construct
  source 1..20: mol_type = other RNA
ggtttttgaacaagagcgtc

SEQ ID NO: 43651 - RNA, 20 nt, synthetic construct
  source 1..20: mol_type = other RNA
ggtttttgattactgactca

SEQ ID NO: 43652 - RNA, 20 nt, synthetic construct
  source 1..20: mol_type = other RNA
ggtttttggttcacttgaaa

SEQ ID NO: 43653 - RNA, 20 nt, synthetic construct
  source 1..20: mol_type = other RNA
ggttttttcattttactgct

SEQ ID NO: 43654 - RNA, 20 nt, synthetic construct
  source 1..20: mol_type = other RNA
ggttttttcccccctggaac

SEQ ID NO: 43655 - RNA, 20 nt, synthetic construct
  source 1..20: mol_type = other RNA
gtaaaaaaggaccatctgtt

SEQ ID NO: 43656 - RNA, 20 nt, synthetic construct
  source 1..20: mol_type = other RNA
gtaaaaactgtttggctggg

SEQ ID NO: 43657 - RNA, 20 nt, synthetic construct
  source 1..20: mol_type = other RNA
gtaaaaagaaatctgcatcc

SEQ ID NO: 43658 - RNA, 20 nt, synthetic construct
  source 1..20: mol_type = other RNA
gtaaaaagcactatccacat

SEQ ID NO: 43659 - RNA, 20 nt, synthetic construct
  source 1..20: mol_type = other RNA
gtaaaaagccatttatcagc

SEQ ID NO: 43660 - RNA, 20 nt, synthetic construct
  source 1..20: mol_type = other RNA
gtaaaaagcctgcttcagcc

SEQ ID NO: 43661 - RNA, 20 nt, synthetic construct
  source 1..20: mol_type = other RNA
gtaaaaagtgcttctagtaa

SEQ ID NO: 43662 - RNA, 20 nt, synthetic construct
  source 1..20: mol_type = other RNA
gtaaaaatatagaaggccag

SEQ ID NO: 43663 - RNA, 20 nt, synthetic construct
  source 1..20: mol_type = other RNA
gtaaaaattttctcccaagg

SEQ ID NO: 43664 - RNA, 20 nt, synthetic construct
  source 1..20: mol_type = other RNA
gtaaaacaaattccctctac

SEQ ID NO: 43665 - RNA, 20 nt, synthetic construct
  source 1..20: mol_type = other RNA
gtaaaacagacccttatgtc

SEQ ID NO: 43666 - RNA, 20 nt, synthetic construct
  source 1..20: mol_type = other RNA
gtaaaacatcaaagtcccct

SEQ ID NO: 43667 - RNA, 20 nt, synthetic construct
  source 1..20: mol_type = other RNA
gtaaaacatctggaaggaaa

SEQ ID NO: 43668 - RNA, 20 nt, synthetic construct
  source 1..20: mol_type = other RNA
gtaaaaccaaatgtggatag

SEQ ID NO: 43669 - RNA, 20 nt, synthetic construct
  source 1..20: mol_type = other RNA
gtaaaagaagatgcagttgc

SEQ ID NO: 43670 - RNA, 20 nt, synthetic construct
  source 1..20: mol_type = other RNA
gtaaaagcaacctcatttgc

SEQ ID NO: 43671 - RNA, 20 nt, synthetic construct
  source 1..20: mol_type = other RNA
gtaaaagctaatctactttc

SEQ ID NO: 43672 - RNA, 20 nt, synthetic construct
  source 1..20: mol_type = other RNA
gtaaaaggctaattttttct

SEQ ID NO: 43673 - RNA, 20 nt, synthetic construct
  source 1..20: mol_type = other RNA
gtaaaataaacaagtcacaa

SEQ ID NO: 43674 - RNA, 20 nt, synthetic construct
  source 1..20: mol_type = other RNA
gtaaaatacaacagcacctt

SEQ ID NO: 43675 - RNA, 20 nt, synthetic construct
  source 1..20: mol_type = other RNA
gtaaaatagtcaagtaacag

SEQ ID NO: 43676 - RNA, 20 nt, synthetic construct
  source 1..20: mol_type = other RNA
gtaaaatcactaattcaagt

SEQ ID NO: 43677 - RNA, 20 nt, synthetic construct
  source 1..20: mol_type = other RNA
gtaaaatcggaacaggctca

SEQ ID NO: 43678 - RNA, 20 nt, synthetic construct
  source 1..20: mol_type = other RNA
gtaaaatgtggcaaatttat

SEQ ID NO: 43679 - RNA, 20 nt, synthetic construct
  source 1..20: mol_type = other RNA
gtaaaattcccttcagtgta

SEQ ID NO: 43680 - RNA, 20 nt, synthetic construct
  source 1..20: mol_type = other RNA
gtaaacaactgactctaaag

SEQ ID NO: 43681 - RNA, 20 nt, synthetic construct
  source 1..20: mol_type = other RNA
gtaaacaagactcaacatgt

SEQ ID NO: 43682 - RNA, 20 nt, synthetic construct
  source 1..20: mol_type = other RNA
gtaaacaatgctgctatgaa

SEQ ID NO: 43683 - RNA, 20 nt, synthetic construct
  source 1..20: mol_type = other RNA
gtaaacactgttctgcgtgg

SEQ ID NO: 43684 - RNA, 20 nt, synthetic construct
  source 1..20: mol_type = other RNA
gtaaacagaattaaacaatc

SEQ ID NO: 43685 - RNA, 20 nt, synthetic construct
  source 1..20: mol_type = other RNA
gtaaacagcagtcttaacca

SEQ ID NO: 43686 - RNA, 20 nt, synthetic construct
  source 1..20: mol_type = other RNA
gtaaacagcatactgtggat

SEQ ID NO: 43687 - RNA, 20 nt, synthetic construct
  source 1..20: mol_type = other RNA
gtaaacatgaacaagttaca

SEQ ID NO: 43688 - RNA, 20 nt, synthetic construct
  source 1..20: mol_type = other RNA
gtaaaccatatggttaatag

SEQ ID NO: 43689 - RNA, 20 nt, synthetic construct
  source 1..20: mol_type = other RNA
gtaaacctcaagtcttttcc

SEQ ID NO: 43690 - RNA, 20 nt, synthetic construct
  source 1..20: mol_type = other RNA
gtaaacctggaatcctctac

SEQ ID NO: 43691 - RNA, 20 nt, synthetic construct
  source 1..20: mol_type = other RNA
gtaaactgttggaaaaatcg

SEQ ID NO: 43692 - RNA, 20 nt, synthetic construct
  source 1..20: mol_type = other RNA
gtaaagatagccccttatca

SEQ ID NO: 43693 - RNA, 20 nt, synthetic construct
  source 1..20: mol_type = other RNA
gtaaagatcaagctcgccgt

SEQ ID NO: 43694 - RNA, 20 nt, synthetic construct
  source 1..20: mol_type = other RNA
gtaaagcaaatgtgactaga

SEQ ID NO: 43695 - RNA, 20 nt, synthetic construct
  source 1..20: mol_type = other RNA
gtaaagccccattgtacaca

SEQ ID NO: 43696 - RNA, 20 nt, synthetic construct
  source 1..20: mol_type = other RNA
gtaaaggggatgggggacga

SEQ ID NO: 43697 - RNA, 20 nt, synthetic construct
  source 1..20: mol_type = other RNA
gtaaagggtaagaaaattgt

SEQ ID NO: 43698 - RNA, 20 nt, synthetic construct
  source 1..20: mol_type = other RNA
gtaaagtaatcaagtgaaat

SEQ ID NO: 43699 - RNA, 20 nt, synthetic construct
  source 1..20: mol_type = other RNA
gtaaagtcaattctagttaa

SEQ ID NO: 43700 - RNA, 20 nt, synthetic construct
  source 1..20: mol_type = other RNA
gtaaagtcactgtggaaaac

SEQ ID NO: 43701 - RNA, 20 nt, synthetic construct
  source 1..20: mol_type = other RNA
gtaaagtttctctctccctg

SEQ ID NO: 43702 - RNA, 20 nt, synthetic construct
  source 1..20: mol_type = other RNA
gtaaatatactgactagtgg

SEQ ID NO: 43703 - RNA, 20 nt, synthetic construct
  source 1..20: mol_type = other RNA
gtaaatatattctaaacctg

SEQ ID NO: 43704 - RNA, 20 nt, synthetic construct
  source 1..20: mol_type = other RNA
gtaaatatccgaaagaactg

SEQ ID NO: 43705 - RNA, 20 nt, synthetic construct
  source 1..20: mol_type = other RNA
gtaaatatttaacaccatgg

SEQ ID NO: 43706 - RNA, 20 nt, synthetic construct
  source 1..20: mol_type = other RNA
gtaaatcagactgtattacc

SEQ ID NO: 43707 - RNA, 20 nt, synthetic construct
  source 1..20: mol_type = other RNA
gtaaatcccggccaggtgcg

SEQ ID NO: 43708 - RNA, 20 nt, synthetic construct
  source 1..20: mol_type = other RNA
gtaaatctttggtgaaggtt

SEQ ID NO: 43709 - RNA, 20 nt, synthetic construct
  source 1..20: mol_type = other RNA
gtaaatctttgtacagtaat

SEQ ID NO: 43710 - RNA, 20 nt, synthetic construct
  source 1..20: mol_type = other RNA
gtaaatgaaacacttgtgta

SEQ ID NO: 43711 - RNA, 20 nt, synthetic construct
  source 1..20: mol_type = other RNA
gtaaatgaaatttgaggccc

SEQ ID NO: 43712 - RNA, 20 nt, synthetic construct
  source 1..20: mol_type = other RNA
gtaaatgcaatgcaggcgcc

SEQ ID NO: 43713 - RNA, 20 nt, synthetic construct
  source 1..20: mol_type = other RNA
gtaaatgcctacattaaaaa

SEQ ID NO: 43714 - RNA, 20 nt, synthetic construct
  source 1..20: mol_type = other RNA
gtaaatggtttctccttctg

SEQ ID NO: 43715 - RNA, 20 nt, synthetic construct
  source 1..20: mol_type = other RNA
gtaaattcctaactcaagag

SEQ ID NO: 43716 - RNA, 20 nt, synthetic construct
  source 1..20: mol_type = other RNA
gtaaattcgcataaccaaat

SEQ ID NO: 43717 - RNA, 20 nt, synthetic construct
  source 1..20: mol_type = other RNA
gtaaattctgccacattcaa

SEQ ID NO: 43718 - RNA, 20 nt, synthetic construct
  source 1..20: mol_type = other RNA
gtaaattggtcctggaaaaa

SEQ ID NO: 43719 - RNA, 20 nt, synthetic construct
  source 1..20: mol_type = other RNA
gtaaatttctaaaaacgtgc

SEQ ID NO: 43720 - RNA, 20 nt, synthetic construct
  source 1..20: mol_type = other RNA
gtaacaaagatgccacaaat

SEQ ID NO: 43721 - RNA, 20 nt, synthetic construct
  source 1..20: mol_type = other RNA
gtaacaaataagaagattga

SEQ ID NO: 43722 - RNA, 20 nt, synthetic construct
  source 1..20: mol_type = other RNA
gtaacacagttctagttcta

SEQ ID NO: 43723 - RNA, 20 nt, synthetic construct
  source 1..20: mol_type = other RNA
gtaacacatatttatcaaca

SEQ ID NO: 43724 - RNA, 20 nt, synthetic construct
  source 1..20: mol_type = other RNA
gtaacactcagaagtactac

SEQ ID NO: 43725 - RNA, 20 nt, synthetic construct
  source 1..20: mol_type = other RNA
gtaacagacctctgaagagt

SEQ ID NO: 43726 - RNA, 20 nt, synthetic construct
  source 1..20: mol_type = other RNA
gtaacagaggcatgcacgga

SEQ ID NO: 43727 - RNA, 20 nt, synthetic construct
  source 1..20: mol_type = other RNA
gtaacagccaaataaaacac

SEQ ID NO: 43728 - RNA, 20 nt, synthetic construct
  source 1..20: mol_type = other RNA
gtaacaggtttaataaatac

SEQ ID NO: 43729 - RNA, 20 nt, synthetic construct
  source 1..20: mol_type = other RNA
gtaacagttcaatactactg

SEQ ID NO: 43730 - RNA, 20 nt, synthetic construct
  source 1..20: mol_type = other RNA
gtaacatacacatcagattt

SEQ ID NO: 43731 - RNA, 20 nt, synthetic construct
  source 1..20: mol_type = other RNA
gtaacatgtggaacataatc

SEQ ID NO: 43732 - RNA, 20 nt, synthetic construct
  source 1..20: mol_type = other RNA
gtaacatgttagattaggaa

SEQ ID NO: 43733 - RNA, 20 nt, synthetic construct
  source 1..20: mol_type = other RNA
gtaacattacaacagcaagg

SEQ ID NO: 43734 - RNA, 20 nt, synthetic construct
  source 1..20: mol_type = other RNA
gtaaccctgtttcccttaat

SEQ ID NO: 43735 - RNA, 20 nt, synthetic construct
  source 1..20: mol_type = other RNA
gtaacctaaagttgaggttg

SEQ ID NO: 43736 - RNA, 20 nt, synthetic construct
  source 1..20: mol_type = other RNA
gtaacctccacctcccagat

SEQ ID NO: 43737 - RNA, 20 nt, synthetic construct
  source 1..20: mol_type = other RNA
gtaacgtgagctggaagtaa

SEQ ID NO: 43738 - RNA, 20 nt, synthetic construct
  source 1..20: mol_type = other RNA
gtaacgtgtatagctttttt

SEQ ID NO: 43739 - RNA, 20 nt, synthetic construct
  source 1..20: mol_type = other RNA
gtaactaaactattgtatga

SEQ ID NO: 43740 - RNA, 20 nt, synthetic construct
  source 1..20: mol_type = other RNA
gtaactaattactgtttctt

SEQ ID NO: 43741 - RNA, 20 nt, synthetic construct
  source 1..20: mol_type = other RNA
gtaactacagacatgccaca

SEQ ID NO: 43742 - RNA, 20 nt, synthetic construct
  source 1..20: mol_type = other RNA
gtaactagatgcctcgaagg

SEQ ID NO: 43743 - RNA, 20 nt, synthetic construct
  source 1..20: mol_type = other RNA
gtaactccatcttcacgtgg

SEQ ID NO: 43744 - RNA, 20 nt, synthetic construct
  source 1..20: mol_type = other RNA
gtaactcctgttctttggag

SEQ ID NO: 43745 - RNA, 20 nt, synthetic construct
  source 1..20: mol_type = other RNA
gtaactcttgagttaggaat

SEQ ID NO: 43746 - RNA, 20 nt, synthetic construct
  source 1..20: mol_type = other RNA
gtaactgacttcaagaggtt

SEQ ID NO: 43747 - RNA, 20 nt, synthetic construct
  source 1..20: mol_type = other RNA
gtaactgatgtgaggatctg

SEQ ID NO: 43748 - RNA, 20 nt, synthetic construct
  source 1..20: mol_type = other RNA
gtaactgctcctctgacttt

SEQ ID NO: 43749 - RNA, 20 nt, synthetic construct
  source 1..20: mol_type = other RNA
gtaactggtccagatgaagc

SEQ ID NO: 43750 - RNA, 20 nt, synthetic construct
  source 1..20: mol_type = other RNA
gtaactgtcatcagcgtcct

SEQ ID NO: 43751 - RNA, 20 nt, synthetic construct
  source 1..20: mol_type = other RNA
gtaactgttggcaaggatgt

SEQ ID NO: 43752 - RNA, 20 nt, synthetic construct
  source 1..20: mol_type = other RNA
gtaacttaaatttgattgtg

SEQ ID NO: 43753 - RNA, 20 nt, synthetic construct
  source 1..20: mol_type = other RNA
gtaacttcttttcttaaaac

SEQ ID NO: 43754 - RNA, 20 nt, synthetic construct
  source 1..20: mol_type = other RNA
gtaacttgaattcagatggc

SEQ ID NO: 43755 - RNA, 20 nt, synthetic construct
  source 1..20: mol_type = other RNA
gtaacttgcttaggctgaag

SEQ ID NO: 43756 - RNA, 20 nt, synthetic construct
  source 1..20: mol_type = other RNA
gtaacttggtcgaaaacctg

SEQ ID NO: 43757 - RNA, 20 nt, synthetic construct
  source 1..20: mol_type = other RNA
gtaacttgttcatgtttaca

SEQ ID NO: 43758 - RNA, 20 nt, synthetic construct
  source 1..20: mol_type = other RNA
gtaactttctgcttaaagcc

SEQ ID NO: 43759 - RNA, 20 nt, synthetic construct
  source 1..20: mol_type = other RNA
gtaagaaaaattccctcagc

SEQ ID NO: 43760 - RNA, 20 nt, synthetic construct
  source 1..20: mol_type = other RNA
gtaagaaaacagataaccta

SEQ ID NO: 43761 - RNA, 20 nt, synthetic construct
  source 1..20: mol_type = other RNA
gtaagaaaggagttcagctt

SEQ ID NO: 43762 - RNA, 20 nt, synthetic construct
  source 1..20: mol_type = other RNA
gtaagaaatgccacattttt

SEQ ID NO: 43763 - RNA, 20 nt, synthetic construct
  source 1..20: mol_type = other RNA
gtaagaacttgtctttgtct

SEQ ID NO: 43764 - RNA, 20 nt, synthetic construct
  source 1..20: mol_type = other RNA
gtaagaatgtcaagctgttt

SEQ ID NO: 43765 - RNA, 20 nt, synthetic construct
  source 1..20: mol_type = other RNA
gtaagacaatgtctttggct

SEQ ID NO: 43766 - RNA, 20 nt, synthetic construct
  source 1..20: mol_type = other RNA
gtaagaccaaaatggagacc

SEQ ID NO: 43767 - RNA, 20 nt, synthetic construct
  source 1..20: mol_type = other RNA
gtaagagattaattcagtca

SEQ ID NO: 43768 - RNA, 20 nt, synthetic construct
  source 1..20: mol_type = other RNA
gtaagaggtatcaccatctg

SEQ ID NO: 43769 - RNA, 20 nt, synthetic construct
  source 1..20: mol_type = other RNA
gtaagatcctggattgctag

SEQ ID NO: 43770 - RNA, 20 nt, synthetic construct
  source 1..20: mol_type = other RNA
gtaagattccgtctcaaaaa

SEQ ID NO: 43771 - RNA, 20 nt, synthetic construct
  source 1..20: mol_type = other RNA
gtaagattctgtctctacaa

SEQ ID NO: 43772 - RNA, 20 nt, synthetic construct
  source 1..20: mol_type = other RNA
gtaagattgtggtccagaaa

SEQ ID NO: 43773 - RNA, 20 nt, synthetic construct
  source 1..20: mol_type = other RNA
gtaagcaactgcatcttctt

SEQ ID NO: 43774 - RNA, 20 nt, synthetic construct
  source 1..20: mol_type = other RNA
gtaagcacacatgaacctgc

SEQ ID NO: 43775 - RNA, 20 nt, synthetic construct
  source 1..20: mol_type = other RNA
gtaagcacctgtataaataa

SEQ ID NO: 43776 - RNA, 20 nt, synthetic construct
  source 1..20: mol_type = other RNA
gtaagctgaactctgtggag

SEQ ID NO: 43777 - RNA, 20 nt, synthetic construct
  source 1..20: mol_type = other RNA
gtaagctggtaatacagtct

SEQ ID NO: 43778 - RNA, 20 nt, synthetic construct
  source 1..20: mol_type = other RNA
gtaagctgtgagtccttcca

SEQ ID NO: 43779 - RNA, 20 nt, synthetic construct
  source 1..20: mol_type = other RNA
gtaaggaaacagagttttcc

SEQ ID NO: 43780 - RNA, 20 nt, synthetic construct
  source 1..20: mol_type = other RNA
gtaaggaaaccccagggata

SEQ ID NO: 43781 - RNA, 20 nt, synthetic construct
  source 1..20: mol_type = other RNA
gtaaggactgaagtcctttc

SEQ ID NO: 43782 - RNA, 20 nt, synthetic construct
  source 1..20: mol_type = other RNA
gtaaggagccaaacatcatg

SEQ ID NO: 43783 - RNA, 20 nt, synthetic construct
  source 1..20: mol_type = other RNA
gtaaggatcgttagtatttt

SEQ ID NO: 43784 - RNA, 20 nt, synthetic construct
  source 1..20: mol_type = other RNA
gtaaggattttctattcatt

SEQ ID NO: 43785 - RNA, 20 nt, synthetic construct
  source 1..20: mol_type = other RNA
gtaagggtaaacagaattaa

SEQ ID NO: 43786 - RNA, 20 nt, synthetic construct
  source 1..20: mol_type = other RNA
gtaagggtacagaactgcta

SEQ ID NO: 43787 - RNA, 20 nt, synthetic construct
  source 1..20: mol_type = other RNA
gtaagggtccagcttcactc

SEQ ID NO: 43788 - RNA, 20 nt, synthetic construct
  source 1..20: mol_type = other RNA
gtaaggtgcacgctgtgaat

SEQ ID NO: 43789 - RNA, 20 nt, synthetic construct
  source 1..20: mol_type = other RNA
gtaaggtgtttggtgaattt

SEQ ID NO: 43790 - RNA, 20 nt, synthetic construct
  source 1..20: mol_type = other RNA
gtaaggtttccctggggaat

SEQ ID NO: 43791 - RNA, 20 nt, synthetic construct
  source 1..20: mol_type = other RNA
gtaagtaaaatcggaacagg

SEQ ID NO: 43792 - RNA, 20 nt, synthetic construct
  source 1..20: mol_type = other RNA
gtaagtcagttaacagtgct

SEQ ID NO: 43793 - RNA, 20 nt, synthetic construct
  source 1..20: mol_type = other RNA
gtaagtcatcaaaggaagga

SEQ ID NO: 43794 - RNA, 20 nt, synthetic construct
  source 1..20: mol_type = other RNA
gtaagtgggaggaggtcata

SEQ ID NO: 43795 - RNA, 20 nt, synthetic construct
  source 1..20: mol_type = other RNA
gtaagtgtgagcaaaaatac

SEQ ID NO: 43796 - RNA, 20 nt, synthetic construct
  source 1..20: mol_type = other RNA
gtaagttcctggactgtgat

SEQ ID NO: 43797 - RNA, 20 nt, synthetic construct
  source 1..20: mol_type = other RNA
gtaagttgcatacgtcgtcc

SEQ ID NO: 43798 - RNA, 20 nt, synthetic construct
  source 1..20: mol_type = other RNA
gtaagttggattcccaggta

SEQ ID NO: 43799 - RNA, 20 nt, synthetic construct
  source 1..20: mol_type = other RNA
gtaagttgtgtcatttttgt

SEQ ID NO: 43800 - RNA, 20 nt, synthetic construct
  source 1..20: mol_type = other RNA
gtaataaagcaagtatgagc

SEQ ID NO: 43801 - RNA, 20 nt, synthetic construct
  source 1..20: mol_type = other RNA
gtaataaaggcaatgctctc

SEQ ID NO: 43802 - RNA, 20 nt, synthetic construct
  source 1..20: mol_type = other RNA
gtaataacttggagaactta

SEQ ID NO: 43803 - RNA, 20 nt, synthetic construct
  source 1..20: mol_type = other RNA
gtaataatgaaagctcccaa

SEQ ID NO: 43804 - RNA, 20 nt, synthetic construct
  source 1..20: mol_type = other RNA
gtaatacagtctgatttact

SEQ ID NO: 43805 - RNA, 20 nt, synthetic construct
  source 1..20: mol_type = other RNA
gtaatactataaggaaatac

SEQ ID NO: 43806 - RNA, 20 nt, synthetic construct
  source 1..20: mol_type = other RNA
gtaatactctagtggtgctt

SEQ ID NO: 43807 - RNA, 20 nt, synthetic construct
  source 1..20: mol_type = other RNA
gtaatactgtagaatgtttt

SEQ ID NO: 43808 - RNA, 20 nt, synthetic construct
  source 1..20: mol_type = other RNA
gtaatatacttgtcaagttc

SEQ ID NO: 43809 - RNA, 20 nt, synthetic construct
  source 1..20: mol_type = other RNA
gtaatattaaccaagaacaa

SEQ ID NO: 43810 - RNA, 20 nt, synthetic construct
  source 1..20: mol_type = other RNA
gtaatattgtatataccctt

SEQ ID NO: 43811 - RNA, 20 nt, synthetic construct
  source 1..20: mol_type = other RNA
gtaatcaaacagtgtgatat

SEQ ID NO: 43812 - RNA, 20 nt, synthetic construct
  source 1..20: mol_type = other RNA
gtaatcaagtatctccctgt

SEQ ID NO: 43813 - RNA, 20 nt, synthetic construct
  source 1..20: mol_type = other RNA
gtaatcaagtgaaatgatct

SEQ ID NO: 43814 - RNA, 20 nt, synthetic construct
  source 1..20: mol_type = other RNA
gtaatcacagtacgctttta

SEQ ID NO: 43815 - RNA, 20 nt, synthetic construct
  source 1..20: mol_type = other RNA
gtaatcctgtttctctacat

SEQ ID NO: 43816 - RNA, 20 nt, synthetic construct
  source 1..20: mol_type = other RNA
gtaatctaaggattatggct

SEQ ID NO: 43817 - RNA, 20 nt, synthetic construct
  source 1..20: mol_type = other RNA
gtaatctagtttatctcatt

SEQ ID NO: 43818 - RNA, 20 nt, synthetic construct
  source 1..20: mol_type = other RNA
gtaatctcatggaagttatt

SEQ ID NO: 43819 - RNA, 20 nt, synthetic construct
  source 1..20: mol_type = other RNA
gtaatcttgctaaacatgta

SEQ ID NO: 43820 - RNA, 20 nt, synthetic construct
  source 1..20: mol_type = other RNA
gtaatgaaaatatgaatgga

SEQ ID NO: 43821 - RNA, 20 nt, synthetic construct
  source 1..20: mol_type = other RNA
gtaatgaaaattagctggat

SEQ ID NO: 43822 - RNA, 20 nt, synthetic construct
  source 1..20: mol_type = other RNA
gtaatgaatagaaaatcctt

SEQ ID NO: 43823 - RNA, 20 nt, synthetic construct
  source 1..20: mol_type = other RNA
gtaatgacaataataactac

SEQ ID NO: 43824 - RNA, 20 nt, synthetic construct
  source 1..20: mol_type = other RNA
gtaatgacctggaaattatt

SEQ ID NO: 43825 - RNA, 20 nt, synthetic construct
  source 1..20: mol_type = other RNA
gtaatgagctgagattgccc

SEQ ID NO: 43826 - RNA, 20 nt, synthetic construct
  source 1..20: mol_type = other RNA
gtaatgcaaactctaaataa

SEQ ID NO: 43827 - RNA, 20 nt, synthetic construct
  source 1..20: mol_type = other RNA
gtaatgcgatgatcaaaacc

SEQ ID NO: 43828 - RNA, 20 nt, synthetic construct
  source 1..20: mol_type = other RNA
gtaatgctggccagtgagtt

SEQ ID NO: 43829 - RNA, 20 nt, synthetic construct
  source 1..20: mol_type = other RNA
gtaatgctggcttcatgggt

SEQ ID NO: 43830 - RNA, 20 nt, synthetic construct
  source 1..20: mol_type = other RNA
gtaatggatcaaggcacagt

SEQ ID NO: 43831 - RNA, 20 nt, synthetic construct
  source 1..20: mol_type = other RNA
gtaatggatgtttttagaga

SEQ ID NO: 43832 - RNA, 20 nt, synthetic construct
  source 1..20: mol_type = other RNA
gtaatgggaaagacaggtag

SEQ ID NO: 43833 - RNA, 20 nt, synthetic construct
  source 1..20: mol_type = other RNA
gtaatggttggccgaggcca

SEQ ID NO: 43834 - RNA, 20 nt, synthetic construct
  source 1..20: mol_type = other RNA
gtaatgtctcctctttcata

SEQ ID NO: 43835 - RNA, 20 nt, synthetic construct
  source 1..20: mol_type = other RNA
gtaatgttacttctcagcta

SEQ ID NO: 43836 - RNA, 20 nt, synthetic construct
  source 1..20: mol_type = other RNA
gtaatgttatatttccgtat

SEQ ID NO: 43837 - RNA, 20 nt, synthetic construct
  source 1..20: mol_type = other RNA
gtaatgtttgtacttctacc

SEQ ID NO: 43838 - RNA, 20 nt, synthetic construct
  source 1..20: mol_type = other RNA
gtaattacaggggactttga

SEQ ID NO: 43839 - RNA, 20 nt, synthetic construct
  source 1..20: mol_type = other RNA
gtaattacatacttcaaagg

SEQ ID NO: 43840 - RNA, 20 nt, synthetic construct
  source 1..20: mol_type = other RNA
gtaattagttacatgaggtc

SEQ ID NO: 43841 - RNA, 20 nt, synthetic construct
  source 1..20: mol_type = other RNA
gtaattcatcctactagtat

SEQ ID NO: 43842 - RNA, 20 nt, synthetic construct
  source 1..20: mol_type = other RNA
gtaattctccactttcatga

SEQ ID NO: 43843 - RNA, 20 nt, synthetic construct
  source 1..20: mol_type = other RNA
gtaattctgcagtgaacatg

SEQ ID NO: 43844 - RNA, 20 nt, synthetic construct
  source 1..20: mol_type = other RNA
gtaattctgtgcttaaattt

SEQ ID NO: 43845 - RNA, 20 nt, synthetic construct
  source 1..20: mol_type = other RNA
gtaattgggatctgataaat

SEQ ID NO: 43846 - RNA, 20 nt, synthetic construct
  source 1..20: mol_type = other RNA
gtaattggttcgtttgaggc

SEQ ID NO: 43847 - RNA, 20 nt, synthetic construct
  source 1..20: mol_type = other RNA
gtaattgtaccttggagaga

SEQ ID NO: 43848 - RNA, 20 nt, synthetic construct
  source 1..20: mol_type = other RNA
gtaattgtagtttccatgga

SEQ ID NO: 43849 - RNA, 20 nt, synthetic construct
  source 1..20: mol_type = other RNA
gtaattgttttcccttttgt

SEQ ID NO: 43850 - RNA, 20 nt, synthetic construct
  source 1..20: mol_type = other RNA
gtaatttatctccataagtc

SEQ ID NO: 43851 - RNA, 20 nt, synthetic construct
  source 1..20: mol_type = other RNA
gtaatttcttctgaagaaat

SEQ ID NO: 43852 - RNA, 20 nt, synthetic construct
  source 1..20: mol_type = other RNA
gtaatttgtccatctggatt

SEQ ID NO: 43853 - RNA, 20 nt, synthetic construct
  source 1..20: mol_type = other RNA
gtaattttggggccatctga

SEQ ID NO: 43854 - RNA, 20 nt, synthetic construct
  source 1..20: mol_type = other RNA
gtaatttttaaaagagcgaa

SEQ ID NO: 43855 - RNA, 20 nt, synthetic construct
  source 1..20: mol_type = other RNA
gtacaaaagtgctgttgagg

SEQ ID NO: 43856 - RNA, 20 nt, synthetic construct
  source 1..20: mol_type = other RNA
gtacaaacattacagaaaaa

SEQ ID NO: 43857 - RNA, 20 nt, synthetic construct
  source 1..20: mol_type = other RNA
gtacaaagatttacccctac

SEQ ID NO: 43858 - RNA, 20 nt, synthetic construct
  source 1..20: mol_type = other RNA
gtacaacattcatccctcta

SEQ ID NO: 43859 - RNA, 20 nt, synthetic construct
  source 1..20: mol_type = other RNA
gtacaactaataattgcttt

SEQ ID NO: 43860 - RNA, 20 nt, synthetic construct
  source 1..20: mol_type = other RNA
gtacaaggctagagctcaca

SEQ ID NO: 43861 - RNA, 20 nt, synthetic construct
  source 1..20: mol_type = other RNA
gtacaatgaattagcaatgc

SEQ ID NO: 43862 - RNA, 20 nt, synthetic construct
  source 1..20: mol_type = other RNA
gtacaatggggctttactgt

SEQ ID NO: 43863 - RNA, 20 nt, synthetic construct
  source 1..20: mol_type = other RNA
gtacaattacacatctccca

SEQ ID NO: 43864 - RNA, 20 nt, synthetic construct
  source 1..20: mol_type = other RNA
gtacaattaggctgtttgag

SEQ ID NO: 43865 - RNA, 20 nt, synthetic construct
  source 1..20: mol_type = other RNA
gtacaattcggtggcattaa

SEQ ID NO: 43866 - RNA, 20 nt, synthetic construct
  source 1..20: mol_type = other RNA
gtacaattttcttacccttt

SEQ ID NO: 43867 - RNA, 20 nt, synthetic construct
  source 1..20: mol_type = other RNA
gtacacatcctaatacagta

SEQ ID NO: 43868 - RNA, 20 nt, synthetic construct
  source 1..20: mol_type = other RNA
gtacacctcaaactagaaaa

SEQ ID NO: 43869 - RNA, 20 nt, synthetic construct
  source 1..20: mol_type = other RNA
gtacacgaaaatatccctgg

SEQ ID NO: 43870 - RNA, 20 nt, synthetic construct
  source 1..20: mol_type = other RNA
gtacacgtcttgtcaataat

SEQ ID NO: 43871 - RNA, 20 nt, synthetic construct
  source 1..20: mol_type = other RNA
gtacactgttgatttagaaa

SEQ ID NO: 43872 - RNA, 20 nt, synthetic construct
  source 1..20: mol_type = other RNA
gtacacttaaaaacagttaa

SEQ ID NO: 43873 - RNA, 20 nt, synthetic construct
  source 1..20: mol_type = other RNA
gtacagaactgctaatggtc

SEQ ID NO: 43874 - RNA, 20 nt, synthetic construct
  source 1..20: mol_type = other RNA
gtacagataaccaataagaa

SEQ ID NO: 43875 - RNA, 20 nt, synthetic construct
  source 1..20: mol_type = other RNA
gtacagccatcaacctaatg

SEQ ID NO: 43876 - RNA, 20 nt, synthetic construct
  source 1..20: mol_type = other RNA
gtacagggtttctgtttgga

SEQ ID NO: 43877 - RNA, 20 nt, synthetic construct
  source 1..20: mol_type = other RNA
gtacagtaattgtagtttcc

SEQ ID NO: 43878 - RNA, 20 nt, synthetic construct
  source 1..20: mol_type = other RNA
gtacagtagtaaaaccaaat

SEQ ID NO: 43879 - RNA, 20 nt, synthetic construct
  source 1..20: mol_type = other RNA
gtacagtgagtagaagagta

SEQ ID NO: 43880 - RNA, 20 nt, synthetic construct
  source 1..20: mol_type = other RNA
gtacagtgcataccaccaca

SEQ ID NO: 43881 - RNA, 20 nt, synthetic construct
  source 1..20: mol_type = other RNA
gtacatattcattgtaagaa

SEQ ID NO: 43882 - RNA, 20 nt, synthetic construct
  source 1..20: mol_type = other RNA
gtacatctcaattcagaagc

SEQ ID NO: 43883 - RNA, 20 nt, synthetic construct
  source 1..20: mol_type = other RNA
gtacatgaaatactcaaact

SEQ ID NO: 43884 - RNA, 20 nt, synthetic construct
  source 1..20: mol_type = other RNA
gtacatgaagtcctcaatca

SEQ ID NO: 43885 - RNA, 20 nt, synthetic construct
  source 1..20: mol_type = other RNA
gtacatgacctatctattaa

SEQ ID NO: 43886 - RNA, 20 nt, synthetic construct
  source 1..20: mol_type = other RNA
gtacatgtagatatgggagt

SEQ ID NO: 43887 - RNA, 20 nt, synthetic construct
  source 1..20: mol_type = other RNA
gtacatttaaaattgcagag

SEQ ID NO: 43888 - RNA, 20 nt, synthetic construct
  source 1..20: mol_type = other RNA
gtacattttaccatatacac

SEQ ID NO: 43889 - RNA, 20 nt, synthetic construct
  source 1..20: mol_type = other RNA
gtaccaaaagtcctgttctt

SEQ ID NO: 43890 - RNA, 20 nt, synthetic construct
  source 1..20: mol_type = other RNA
gtaccaaagcagaaatacag

SEQ ID NO: 43891 - RNA, 20 nt, synthetic construct
  source 1..20: mol_type = other RNA
gtaccaggtcagccagagga

SEQ ID NO: 43892 - RNA, 20 nt, synthetic construct
  source 1..20: mol_type = other RNA
gtaccattccccttgccaag

SEQ ID NO: 43893 - RNA, 20 nt, synthetic construct
  source 1..20: mol_type = other RNA
gtacccaatggattataaat

SEQ ID NO: 43894 - RNA, 20 nt, synthetic construct
  source 1..20: mol_type = other RNA
gtacccattagacactaact

SEQ ID NO: 43895 - RNA, 20 nt, synthetic construct
  source 1..20: mol_type = other RNA
gtacccgtgtgttttgttgt

SEQ ID NO: 43896 - RNA, 20 nt, synthetic construct
  source 1..20: mol_type = other RNA
gtacccttacgcgtggatgt

SEQ ID NO: 43897 - RNA, 20 nt, synthetic construct
  source 1..20: mol_type = other RNA
gtacctctgggatgctcagt

SEQ ID NO: 43898 - RNA, 20 nt, synthetic construct
  source 1..20: mol_type = other RNA
gtaccttgatttatggccta

SEQ ID NO: 43899 - RNA, 20 nt, synthetic construct
  source 1..20: mol_type = other RNA
gtaccttggagagaaacctt

SEQ ID NO: 43900 - RNA, 20 nt, synthetic construct
  source 1..20: mol_type = other RNA
gtacctttcgctatcagtag

SEQ ID NO: 43901 - RNA, 20 nt, synthetic construct
  source 1..20: mol_type = other RNA
gtacgacgctcttgttcaaa

SEQ ID NO: 43902 - RNA, 20 nt, synthetic construct
  source 1..20: mol_type = other RNA
gtacgccaattttcatagca

SEQ ID NO: 43903 - RNA, 20 nt, synthetic construct
  source 1..20: mol_type = other RNA
gtacgctccctcgcgcggca

SEQ ID NO: 43904 - RNA, 20 nt, synthetic construct
  source 1..20: mol_type = other RNA
gtacgcttttatgttataat

SEQ ID NO: 43905 - RNA, 20 nt, synthetic construct
  source 1..20: mol_type = other RNA
gtacgtaacctaaagttgag

SEQ ID NO: 43906 - RNA, 20 nt, synthetic construct
  source 1..20: mol_type = other RNA
gtacgtgcagagcaggggtg

SEQ ID NO: 43907 - RNA, 20 nt, synthetic construct
  source 1..20: mol_type = other RNA
gtactaagcctatgtaagac

SEQ ID NO: 43908 - RNA, 20 nt, synthetic construct
  source 1..20: mol_type = other RNA
gtactacctatagaattctt

SEQ ID NO: 43909 - RNA, 20 nt, synthetic construct
  source 1..20: mol_type = other RNA
gtactactgacctgggagaa

SEQ ID NO: 43910 - RNA, 20 nt, synthetic construct
  source 1..20: mol_type = other RNA
gtactacttgtcaggtgggc

SEQ ID NO: 43911 - RNA, 20 nt, synthetic construct
  source 1..20: mol_type = other RNA
gtactaggtatcacagtgag

SEQ ID NO: 43912 - RNA, 20 nt, synthetic construct
  source 1..20: mol_type = other RNA
gtactagtcagcacactctt

SEQ ID NO: 43913 - RNA, 20 nt, synthetic construct
  source 1..20: mol_type = other RNA
gtactagtctccatacaagg

SEQ ID NO: 43914 - RNA, 20 nt, synthetic construct
  source 1..20: mol_type = other RNA
gtactatcttccctaaagag

SEQ ID NO: 43915 - RNA, 20 nt, synthetic construct
  source 1..20: mol_type = other RNA
gtactatgcagcaacggaaa

SEQ ID NO: 43916 - RNA, 20 nt, synthetic construct
  source 1..20: mol_type = other RNA
gtactcaacgacaatctctg

SEQ ID NO: 43917 - RNA, 20 nt, synthetic construct
  source 1..20: mol_type = other RNA
gtactccattatatgaataa

SEQ ID NO: 43918 - RNA, 20 nt, synthetic construct
  source 1..20: mol_type = other RNA
gtactcccagcctcaaacaa

SEQ ID NO: 43919 - RNA, 20 nt, synthetic construct
  source 1..20: mol_type = other RNA
gtactctatgatatatactt

SEQ ID NO: 43920 - RNA, 20 nt, synthetic construct
  source 1..20: mol_type = other RNA
gtactgaaaccagtgctctc

SEQ ID NO: 43921 - RNA, 20 nt, synthetic construct
  source 1..20: mol_type = other RNA
gtactgaccatctcagcaca

SEQ ID NO: 43922 - RNA, 20 nt, synthetic construct
  source 1..20: mol_type = other RNA
gtactgagtcaaaaccaaag

SEQ ID NO: 43923 - RNA, 20 nt, synthetic construct
  source 1..20: mol_type = other RNA
gtactgcatgattcccctta

SEQ ID NO: 43924 - RNA, 20 nt, synthetic construct
  source 1..20: mol_type = other RNA
gtactgcctccacaggcttt

SEQ ID NO: 43925 - RNA, 20 nt, synthetic construct
  source 1..20: mol_type = other RNA
gtactggaaatggacagcgg

SEQ ID NO: 43926 - RNA, 20 nt, synthetic construct
  source 1..20: mol_type = other RNA
gtactggaagtgtaacatac

SEQ ID NO: 43927 - RNA, 20 nt, synthetic construct
  source 1..20: mol_type = other RNA
gtactggtaccaaagcagaa

SEQ ID NO: 43928 - RNA, 20 nt, synthetic construct
  source 1..20: mol_type = other RNA
gtactgtgattacaattcct

SEQ ID NO: 43929 - RNA, 20 nt, synthetic construct
  source 1..20: mol_type = other RNA
gtactgtgtggcttctcaaa

SEQ ID NO: 43930 - RNA, 20 nt, synthetic construct
  source 1..20: mol_type = other RNA
gtactgtttagcatctagca

SEQ ID NO: 43931 - RNA, 20 nt, synthetic construct
  source 1..20: mol_type = other RNA
gtacttcaaggttcacaaat

SEQ ID NO: 43932 - RNA, 20 nt, synthetic construct
  source 1..20: mol_type = other RNA
gtacttcagcgcttgaacaa

SEQ ID NO: 43933 - RNA, 20 nt, synthetic construct
  source 1..20: mol_type = other RNA
gtacttccctctttctcaac

SEQ ID NO: 43934 - RNA, 20 nt, synthetic construct
  source 1..20: mol_type = other RNA
gtacttctaccttgaaaatg

SEQ ID NO: 43935 - RNA, 20 nt, synthetic construct
  source 1..20: mol_type = other RNA
gtacttctgagtgttacttg

SEQ ID NO: 43936 - RNA, 20 nt, synthetic construct
  source 1..20: mol_type = other RNA
gtacttgacacaaaggactg

SEQ ID NO: 43937 - RNA, 20 nt, synthetic construct
  source 1..20: mol_type = other RNA
gtacttgtaaaaaattacac

SEQ ID NO: 43938 - RNA, 20 nt, synthetic construct
  source 1..20: mol_type = other RNA
gtacttgtctttttgtgact

SEQ ID NO: 43939 - RNA, 20 nt, synthetic construct
  source 1..20: mol_type = other RNA
gtactttttcatccaaacag

SEQ ID NO: 43940 - RNA, 20 nt, synthetic construct
  source 1..20: mol_type = other RNA
gtagaaaatagggacggcct

SEQ ID NO: 43941 - RNA, 20 nt, synthetic construct
  source 1..20: mol_type = other RNA
gtagaaacatcccaagtgcc

SEQ ID NO: 43942 - RNA, 20 nt, synthetic construct
  source 1..20: mol_type = other RNA
gtagaaagcaggttcatttt

SEQ ID NO: 43943 - RNA, 20 nt, synthetic construct
  source 1..20: mol_type = other RNA
gtagaaatcttccagaagga

SEQ ID NO: 43944 - RNA, 20 nt, synthetic construct
  source 1..20: mol_type = other RNA
gtagaaatgtggagataaag

SEQ ID NO: 43945 - RNA, 20 nt, synthetic construct
  source 1..20: mol_type = other RNA
gtagaagactcagcagtttt

SEQ ID NO: 43946 - RNA, 20 nt, synthetic construct
  source 1..20: mol_type = other RNA
gtagaagagtaatggttggc

SEQ ID NO: 43947 - RNA, 20 nt, synthetic construct
  source 1..20: mol_type = other RNA
gtagaagataatgttagaat

SEQ ID NO: 43948 - RNA, 20 nt, synthetic construct
  source 1..20: mol_type = other RNA
gtagaagcagcaagggtggc

SEQ ID NO: 43949 - RNA, 20 nt, synthetic construct
  source 1..20: mol_type = other RNA
gtagaaggatatgttttcta

SEQ ID NO: 43950 - RNA, 20 nt, synthetic construct
  source 1..20: mol_type = other RNA
gtagaaggccctatgccttc

SEQ ID NO: 43951 - RNA, 20 nt, synthetic construct
  source 1..20: mol_type = other RNA
gtagaaggtcaatctaggag

SEQ ID NO: 43952 - RNA, 20 nt, synthetic construct
  source 1..20: mol_type = other RNA
gtagaagtacaaacattaca

SEQ ID NO: 43953 - RNA, 20 nt, synthetic construct
  source 1..20: mol_type = other RNA
gtagaatatccaagcacaaa

SEQ ID NO: 43954 - RNA, 20 nt, synthetic construct
  source 1..20: mol_type = other RNA
gtagaatgaaaatttttgtc

SEQ ID NO: 43955 - RNA, 20 nt, synthetic construct
  source 1..20: mol_type = other RNA
gtagaatgtttttccgtcta

SEQ ID NO: 43956 - RNA, 20 nt, synthetic construct
  source 1..20: mol_type = other RNA
gtagaattatcatatgatct

SEQ ID NO: 43957 - RNA, 20 nt, synthetic construct
  source 1..20: mol_type = other RNA
gtagacatgagtaaaaagaa

SEQ ID NO: 43958 - RNA, 20 nt, synthetic construct
  source 1..20: mol_type = other RNA
gtagaccatataatctaacc

SEQ ID NO: 43959 - RNA, 20 nt, synthetic construct
  source 1..20: mol_type = other RNA
gtagaccctgttagtcccct

SEQ ID NO: 43960 - RNA, 20 nt, synthetic construct
  source 1..20: mol_type = other RNA
gtagaccgaggaaacccgct

SEQ ID NO: 43961 - RNA, 20 nt, synthetic construct
  source 1..20: mol_type = other RNA
gtagactgtaaaaattttct

SEQ ID NO: 43962 - RNA, 20 nt, synthetic construct
  source 1..20: mol_type = other RNA
gtagagaaaatgttatacag

SEQ ID NO: 43963 - RNA, 20 nt, synthetic construct
  source 1..20: mol_type = other RNA
gtagagaaacaggattacaa

SEQ ID NO: 43964 - RNA, 20 nt, synthetic construct
  source 1..20: mol_type = other RNA
gtagagaaggctttgtgttg

SEQ ID NO: 43965 - RNA, 20 nt, synthetic construct
  source 1..20: mol_type = other RNA
gtagagacagaatcttactg

SEQ ID NO: 43966 - RNA, 20 nt, synthetic construct
  source 1..20: mol_type = other RNA
gtagagactggatcctggag

SEQ ID NO: 43967 - RNA, 20 nt, synthetic construct
  source 1..20: mol_type = other RNA
gtagagatgaggttttacga

SEQ ID NO: 43968 - RNA, 20 nt, synthetic construct
  source 1..20: mol_type = other RNA
gtagagcaagcaacaccaga

SEQ ID NO: 43969 - RNA, 20 nt, synthetic construct
  source 1..20: mol_type = other RNA
gtagagcactttcgtatttt

SEQ ID NO: 43970 - RNA, 20 nt, synthetic construct
  source 1..20: mol_type = other RNA
gtagaggactgcctattttg

SEQ ID NO: 43971 - RNA, 20 nt, synthetic construct
  source 1..20: mol_type = other RNA
gtagaggaggagggttagat

SEQ ID NO: 43972 - RNA, 20 nt, synthetic construct
  source 1..20: mol_type = other RNA
gtagaggattccaggtttac

SEQ ID NO: 43973 - RNA, 20 nt, synthetic construct
  source 1..20: mol_type = other RNA
gtagaggcagttgagttttc

SEQ ID NO: 43974 - RNA, 20 nt, synthetic construct
  source 1..20: mol_type = other RNA
gtagaggccgagggttgaac

SEQ ID NO: 43975 - RNA, 20 nt, synthetic construct
  source 1..20: mol_type = other RNA
gtagagggaatttgttttac

SEQ ID NO: 43976 - RNA, 20 nt, synthetic construct
  source 1..20: mol_type = other RNA
gtagaggtgaagttaagggc

SEQ ID NO: 43977 - RNA, 20 nt, synthetic construct
  source 1..20: mol_type = other RNA
gtagataaacgttaactatt

SEQ ID NO: 43978 - RNA, 20 nt, synthetic construct
  source 1..20: mol_type = other RNA
gtagataccagaccctttat

SEQ ID NO: 43979 - RNA, 20 nt, synthetic construct
  source 1..20: mol_type = other RNA
gtagatatgggagtccctgc

SEQ ID NO: 43980 - RNA, 20 nt, synthetic construct
  source 1..20: mol_type = other RNA
gtagatattttctgtcattc

SEQ ID NO: 43981 - RNA, 20 nt, synthetic construct
  source 1..20: mol_type = other RNA
gtagatcaagtatttcctat

SEQ ID NO: 43982 - RNA, 20 nt, synthetic construct
  source 1..20: mol_type = other RNA
gtagatcctgaggaagctaa

SEQ ID NO: 43983 - RNA, 20 nt, synthetic construct
  source 1..20: mol_type = other RNA
gtagattagcttttacgagg

SEQ ID NO: 43984 - RNA, 20 nt, synthetic construct
  source 1..20: mol_type = other RNA
gtagattcccccttatgtgt

SEQ ID NO: 43985 - RNA, 20 nt, synthetic construct
  source 1..20: mol_type = other RNA
gtagattgggcttttcatat

SEQ ID NO: 43986 - RNA, 20 nt, synthetic construct
  source 1..20: mol_type = other RNA
gtagattgttttaggtagtc

SEQ ID NO: 43987 - RNA, 20 nt, synthetic construct
  source 1..20: mol_type = other RNA
gtagatttctgcatagagat

SEQ ID NO: 43988 - RNA, 20 nt, synthetic construct
  source 1..20: mol_type = other RNA
gtagcacaactagtaagtaa

SEQ ID NO: 43989 - RNA, 20 nt, synthetic construct
  source 1..20: mol_type = other RNA
gtagcaccctatttatgttg

SEQ ID NO: 43990 - RNA, 20 nt, synthetic construct
  source 1..20: mol_type = other RNA
gtagcagaatccccaaataa

SEQ ID NO: 43991 - RNA, 20 nt, synthetic construct
  source 1..20: mol_type = other RNA
gtagcagacactgggttctc

SEQ ID NO: 43992 - RNA, 20 nt, synthetic construct
  source 1..20: mol_type = other RNA
gtagcagggactacagtcac

SEQ ID NO: 43993 - RNA, 20 nt, synthetic construct
  source 1..20: mol_type = other RNA
gtagcaggtttaggaagcac

SEQ ID NO: 43994 - RNA, 20 nt, synthetic construct
  source 1..20: mol_type = other RNA
gtagcattgaagtatagttt

SEQ ID NO: 43995 - RNA, 20 nt, synthetic construct
  source 1..20: mol_type = other RNA
gtagccaaaggtagaaacat

SEQ ID NO: 43996 - RNA, 20 nt, synthetic construct
  source 1..20: mol_type = other RNA
gtagcgctttaagcatccca

SEQ ID NO: 43997 - RNA, 20 nt, synthetic construct
  source 1..20: mol_type = other RNA
gtagcgggaaaaaataatat

SEQ ID NO: 43998 - RNA, 20 nt, synthetic construct
  source 1..20: mol_type = other RNA
gtagctaatatctttgggga

SEQ ID NO: 43999 - RNA, 20 nt, synthetic construct
  source 1..20: mol_type = other RNA
gtagctaggaccataggcac

SEQ ID NO: 44000 - RNA, 20 nt, synthetic construct
  source 1..20: mol_type = other RNA
gtagctatatcccaaattgg

SEQ ID NO: 44001 - RNA, 20 nt, synthetic construct
  source 1..20: mol_type = other RNA
gtagctcaaagcatatgaat

SEQ ID NO: 44002 - RNA, 20 nt, synthetic construct
  source 1..20: mol_type = other RNA
gtagctcatcatttataccc

SEQ ID NO: 44003 - RNA, 20 nt, synthetic construct
  source 1..20: mol_type = other RNA
gtagctgctttttaaaaatt

SEQ ID NO: 44004 - RNA, 20 nt, synthetic construct
  source 1..20: mol_type = other RNA
gtagctgggatcacaggcgt

SEQ ID NO: 44005 - RNA, 20 nt, synthetic construct
  source 1..20: mol_type = other RNA
gtagctgggatggctgaaag

SEQ ID NO: 44006 - RNA, 20 nt, synthetic construct
  source 1..20: mol_type = other RNA
gtagctgggattacacacac

SEQ ID NO: 44007 - RNA, 20 nt, synthetic construct
  source 1..20: mol_type = other RNA
gtagctgtcgctctcctgtg

SEQ ID NO: 44008 - RNA, 20 nt, synthetic construct
  source 1..20: mol_type = other RNA
gtagctgtctttaatgtaaa

SEQ ID NO: 44009 - RNA, 20 nt, synthetic construct
  source 1..20: mol_type = other RNA
gtagctgtgattaccggcat

SEQ ID NO: 44010 - RNA, 20 nt, synthetic construct
  source 1..20: mol_type = other RNA
gtagctgtggctcactcatt

SEQ ID NO: 44011 - RNA, 20 nt, synthetic construct
  source 1..20: mol_type = other RNA
gtagctgttgaattgttgcg

SEQ ID NO: 44012 - RNA, 20 nt, synthetic construct
  source 1..20: mol_type = other RNA
gtagcttcaatgagggcaga

SEQ ID NO: 44013 - RNA, 20 nt, synthetic construct
  source 1..20: mol_type = other RNA
gtagcttcacgtgcattcat

SEQ ID NO: 44014 - RNA, 20 nt, synthetic construct
  source 1..20: mol_type = other RNA
gtagcttgggctaaggtgga

SEQ ID NO: 44015 - RNA, 20 nt, synthetic construct
  source 1..20: mol_type = other RNA
gtagctttgatgcccccacc

SEQ ID NO: 44016 - RNA, 20 nt, synthetic construct
  source 1..20: mol_type = other RNA
gtagcttttcctgctgtcgt

SEQ ID NO: 44017 - RNA, 20 nt, synthetic construct
  source 1..20: mol_type = other RNA
gtaggaaaaccatgtcatgt

SEQ ID NO: 44018 - RNA, 20 nt, synthetic construct
  source 1..20: mol_type = other RNA
gtaggaaaagacttctcaaa

SEQ ID NO: 44019 - RNA, 20 nt, synthetic construct
  source 1..20: mol_type = other RNA
gtaggaaactttgcattcct

SEQ ID NO: 44020 - RNA, 20 nt, synthetic construct
  source 1..20: mol_type = other RNA
gtaggaaagcctgtgacagt

SEQ ID NO: 44021 - RNA, 20 nt, synthetic construct
  source 1..20: mol_type = other RNA
gtaggaagctgatcaaggaa

SEQ ID NO: 44022 - RNA, 20 nt, synthetic construct
  source 1..20: mol_type = other RNA
gtaggaaggaacacacacct

SEQ ID NO: 44023 - RNA, 20 nt, synthetic construct
  source 1..20: mol_type = other RNA
gtaggaaggcggtggggaca

SEQ ID NO: 44024 - RNA, 20 nt, synthetic construct
  source 1..20: mol_type = other RNA
gtaggaattaaacatttctg

SEQ ID NO: 44025 - RNA, 20 nt, synthetic construct
  source 1..20: mol_type = other RNA
gtaggagggtgtgatcagga

SEQ ID NO: 44026 - RNA, 20 nt, synthetic construct
  source 1..20: mol_type = other RNA
gtaggatgaattacaaatga

SEQ ID NO: 44027 - RNA, 20 nt, synthetic construct
  source 1..20: mol_type = other RNA
gtaggcaacatccctatgca

SEQ ID NO: 44028 - RNA, 20 nt, synthetic construct
  source 1..20: mol_type = other RNA
gtaggcacattcaagcagaa

SEQ ID NO: 44029 - RNA, 20 nt, synthetic construct
  source 1..20: mol_type = other RNA
gtaggccaaggcgggaggat

SEQ ID NO: 44030 - RNA, 20 nt, synthetic construct
  source 1..20: mol_type = other RNA
gtaggccccgatgccatgtg

SEQ ID NO: 44031 - RNA, 20 nt, synthetic construct
  source 1..20: mol_type = other RNA
gtaggcttagataggatggg

SEQ ID NO: 44032 - RNA, 20 nt, synthetic construct
  source 1..20: mol_type = other RNA
gtaggcttagatgagcccag

SEQ ID NO: 44033 - RNA, 20 nt, synthetic construct
  source 1..20: mol_type = other RNA
gtagggaaggtgcccgcgaa

SEQ ID NO: 44034 - RNA, 20 nt, synthetic construct
  source 1..20: mol_type = other RNA
gtagggaatagacaaagaca

SEQ ID NO: 44035 - RNA, 20 nt, synthetic construct
  source 1..20: mol_type = other RNA
gtagggagggggctgaggat

SEQ ID NO: 44036 - RNA, 20 nt, synthetic construct
  source 1..20: mol_type = other RNA
gtagggaggggtattcaggg

SEQ ID NO: 44037 - RNA, 20 nt, synthetic construct
  source 1..20: mol_type = other RNA
gtagggataagaataccaaa

SEQ ID NO: 44038 - RNA, 20 nt, synthetic construct
  source 1..20: mol_type = other RNA
gtagggcaccgtgacagaac

SEQ ID NO: 44039 - RNA, 20 nt, synthetic construct
  source 1..20: mol_type = other RNA
gtagggggaaaactccaagt

SEQ ID NO: 44040 - RNA, 20 nt, synthetic construct
  source 1..20: mol_type = other RNA
gtaggggtaaatctttgtac

SEQ ID NO: 44041 - RNA, 20 nt, synthetic construct
  source 1..20: mol_type = other RNA
gtagggtgactagtgtgaat

SEQ ID NO: 44042 - RNA, 20 nt, synthetic construct
  source 1..20: mol_type = other RNA
gtagggttggggtatgtttg

SEQ ID NO: 44043 - RNA, 20 nt, synthetic construct
  source 1..20: mol_type = other RNA
gtagggtttggcagtttaag

SEQ ID NO: 44044 - RNA, 20 nt, synthetic construct
  source 1..20: mol_type = other RNA
gtaggtctccttgtatggag

SEQ ID NO: 44045 - RNA, 20 nt, synthetic construct
  source 1..20: mol_type = other RNA
gtaggtgctttttgtatcct

SEQ ID NO: 44046 - RNA, 20 nt, synthetic construct
  source 1..20: mol_type = other RNA
gtaggtgtctcatttaataa

SEQ ID NO: 44047 - RNA, 20 nt, synthetic construct
  source 1..20: mol_type = other RNA
gtaggtgtctgatgtgtgtc

SEQ ID NO: 44048 - RNA, 20 nt, synthetic construct
  source 1..20: mol_type = other RNA
gtaggtgtgtgtaatcccag

SEQ ID NO: 44049 - RNA, 20 nt, synthetic construct
  source 1..20: mol_type = other RNA
gtaggttgagacttagattt

SEQ ID NO: 44050 - RNA, 20 nt, synthetic construct
  source 1..20: mol_type = other RNA
gtagtaaaaccaaatgtgga

SEQ ID NO: 44051 - RNA, 20 nt, synthetic construct
  source 1..20: mol_type = other RNA
gtagtaaagcaaatgtgact

SEQ ID NO: 44052 - RNA, 20 nt, synthetic construct
  source 1..20: mol_type = other RNA
gtagtaaatatttaacacca

SEQ ID NO: 44053 - RNA, 20 nt, synthetic construct
  source 1..20: mol_type = other RNA
gtagtaaggatcgttagtat

SEQ ID NO: 44054 - RNA, 20 nt, synthetic construct
  source 1..20: mol_type = other RNA
gtagtaagttgtgtcatttt

SEQ ID NO: 44055 - RNA, 20 nt, synthetic construct
  source 1..20: mol_type = other RNA
gtagtacaaaagtgctgttg

SEQ ID NO: 44056 - RNA, 20 nt, synthetic construct
  source 1..20: mol_type = other RNA
gtagtacagtgagtagaaga

SEQ ID NO: 44057 - RNA, 20 nt, synthetic construct
  source 1..20: mol_type = other RNA
gtagtacatattcattgtaa

SEQ ID NO: 44058 - RNA, 20 nt, synthetic construct
  source 1..20: mol_type = other RNA
gtagtacttctgagtgttac

SEQ ID NO: 44059 - RNA, 20 nt, synthetic construct
  source 1..20: mol_type = other RNA
gtagtatctcatgcttagga

SEQ ID NO: 44060 - RNA, 20 nt, synthetic construct
  source 1..20: mol_type = other RNA
gtagtattgaactgttactt

SEQ ID NO: 44061 - RNA, 20 nt, synthetic construct
  source 1..20: mol_type = other RNA
gtagtatttttgcaactttt

SEQ ID NO: 44062 - RNA, 20 nt, synthetic construct
  source 1..20: mol_type = other RNA
gtagtcaacacttttccagt

SEQ ID NO: 44063 - RNA, 20 nt, synthetic construct
  source 1..20: mol_type = other RNA
gtagtcaatgcaatgcgtgt

SEQ ID NO: 44064 - RNA, 20 nt, synthetic construct
  source 1..20: mol_type = other RNA
gtagtcagacacactagctg

SEQ ID NO: 44065 - RNA, 20 nt, synthetic construct
  source 1..20: mol_type = other RNA
gtagtcagtgaagatgctga

SEQ ID NO: 44066 - RNA, 20 nt, synthetic construct
  source 1..20: mol_type = other RNA
gtagtcttgtcataacagta

SEQ ID NO: 44067 - RNA, 20 nt, synthetic construct
  source 1..20: mol_type = other RNA
gtagtgagccaaaatcgtgc

SEQ ID NO: 44068 - RNA, 20 nt, synthetic construct
  source 1..20: mol_type = other RNA
gtagtgattcacttttgagt

SEQ ID NO: 44069 - RNA, 20 nt, synthetic construct
  source 1..20: mol_type = other RNA
gtagtggcagccccgcttca

SEQ ID NO: 44070 - RNA, 20 nt, synthetic construct
  source 1..20: mol_type = other RNA
gtagtggtgtgtgactgtag

SEQ ID NO: 44071 - RNA, 20 nt, synthetic construct
  source 1..20: mol_type = other RNA
gtagtgtcttaatcctattt

SEQ ID NO: 44072 - RNA, 20 nt, synthetic construct
  source 1..20: mol_type = other RNA
gtagttacaactactcggga

SEQ ID NO: 44073 - RNA, 20 nt, synthetic construct
  source 1..20: mol_type = other RNA
gtagttacacaagtgtttca

SEQ ID NO: 44074 - RNA, 20 nt, synthetic construct
  source 1..20: mol_type = other RNA
gtagttaggtggtttgaacc

SEQ ID NO: 44075 - RNA, 20 nt, synthetic construct
  source 1..20: mol_type = other RNA
gtagttattattgtcattac

SEQ ID NO: 44076 - RNA, 20 nt, synthetic construct
  source 1..20: mol_type = other RNA
gtagttcagtttttctttct

SEQ ID NO: 44077 - RNA, 20 nt, synthetic construct
  source 1..20: mol_type = other RNA
gtagttcatcagcataaata

SEQ ID NO: 44078 - RNA, 20 nt, synthetic construct
  source 1..20: mol_type = other RNA
gtagttcatgttagcataat

SEQ ID NO: 44079 - RNA, 20 nt, synthetic construct
  source 1..20: mol_type = other RNA
gtagttctggtgtcgtttat

SEQ ID NO: 44080 - RNA, 20 nt, synthetic construct
  source 1..20: mol_type = other RNA
gtagttgctcagaaaatttt

SEQ ID NO: 44081 - RNA, 20 nt, synthetic construct
  source 1..20: mol_type = other RNA
gtagttgtaactacagacat

SEQ ID NO: 44082 - RNA, 20 nt, synthetic construct
  source 1..20: mol_type = other RNA
gtagtttccatggaggggcc

SEQ ID NO: 44083 - RNA, 20 nt, synthetic construct
  source 1..20: mol_type = other RNA
gtagtttctttgaacttata

SEQ ID NO: 44084 - RNA, 20 nt, synthetic construct
  source 1..20: mol_type = other RNA
gtagtttgcacgtttttaga

SEQ ID NO: 44085 - RNA, 20 nt, synthetic construct
  source 1..20: mol_type = other RNA
gtagtttgctagtggtaact

SEQ ID NO: 44086 - RNA, 20 nt, synthetic construct
  source 1..20: mol_type = other RNA
gtagttttccctgtgtatgt

SEQ ID NO: 44087 - RNA, 20 nt, synthetic construct
  source 1..20: mol_type = other RNA
gtagttttggtgtcattttt

SEQ ID NO: 44088 - RNA, 20 nt, synthetic construct
  source 1..20: mol_type = other RNA
gtagttttttggtagatacc

SEQ ID NO: 44089 - RNA, 20 nt, synthetic construct
  source 1..20: mol_type = other RNA
gtataaaggatgcacaagac

SEQ ID NO: 44090 - RNA, 20 nt, synthetic construct
  source 1..20: mol_type = other RNA
gtataaagtttccgttttgc

SEQ ID NO: 44091 - RNA, 20 nt, synthetic construct
  source 1..20: mol_type = other RNA
gtataaataaaatgtctggc

SEQ ID NO: 44092 - RNA, 20 nt, synthetic construct
  source 1..20: mol_type = other RNA
gtataaatgaggtatcattt

SEQ ID NO: 44093 - RNA, 20 nt, synthetic construct
  source 1..20: mol_type = other RNA
gtataaatgatgagctactg

SEQ ID NO: 44094 - RNA, 20 nt, synthetic construct
  source 1..20: mol_type = other RNA
gtataaatgttcagtttatg

SEQ ID NO: 44095 - RNA, 20 nt, synthetic construct
  source 1..20: mol_type = other RNA
gtataaattactgtctgtga

SEQ ID NO: 44096 - RNA, 20 nt, synthetic construct
  source 1..20: mol_type = other RNA
gtataacattttctctacag

SEQ ID NO: 44097 - RNA, 20 nt, synthetic construct
  source 1..20: mol_type = other RNA
gtataacccgttttttcctt

SEQ ID NO: 44098 - RNA, 20 nt, synthetic construct
  source 1..20: mol_type = other RNA
gtataagagaaggaagcacc

SEQ ID NO: 44099 - RNA, 20 nt, synthetic construct
  source 1..20: mol_type = other RNA
gtataagatgatgatatgaa

SEQ ID NO: 44100 - RNA, 20 nt, synthetic construct
  source 1..20: mol_type = other RNA
gtatacagcaaaagaattaa

SEQ ID NO: 44101 - RNA, 20 nt, synthetic construct
  source 1..20: mol_type = other RNA
gtatacatgtttagcaagat

SEQ ID NO: 44102 - RNA, 20 nt, synthetic construct
  source 1..20: mol_type = other RNA
gtatacccaggtgtgagatt

SEQ ID NO: 44103 - RNA, 20 nt, synthetic construct
  source 1..20: mol_type = other RNA
gtatactgggtgtgatggcg

SEQ ID NO: 44104 - RNA, 20 nt, synthetic construct
  source 1..20: mol_type = other RNA
gtatagaaaggagaccagtt

SEQ ID NO: 44105 - RNA, 20 nt, synthetic construct
  source 1..20: mol_type = other RNA
gtatagcagtaaaatgaaaa

SEQ ID NO: 44106 - RNA, 20 nt, synthetic construct
  source 1..20: mol_type = other RNA
gtataggggaactcttgtag

SEQ ID NO: 44107 - RNA, 20 nt, synthetic construct
  source 1..20: mol_type = other RNA
gtatatacccttctgttaat

SEQ ID NO: 44108 - RNA, 20 nt, synthetic construct
  source 1..20: mol_type = other RNA
gtatatatcatagagtacca

SEQ ID NO: 44109 - RNA, 20 nt, synthetic construct
  source 1..20: mol_type = other RNA
gtatatatgctccctaaata

SEQ ID NO: 44110 - RNA, 20 nt, synthetic construct
  source 1..20: mol_type = other RNA
gtatatattttctaagagcc

SEQ ID NO: 44111 - RNA, 20 nt, synthetic construct
  source 1..20: mol_type = other RNA
gtatatctccttttaagagt

SEQ ID NO: 44112 - RNA, 20 nt, synthetic construct
  source 1..20: mol_type = other RNA
gtatatgaaaagcccaatct

SEQ ID NO: 44113 - RNA, 20 nt, synthetic construct
  source 1..20: mol_type = other RNA
gtatatgaaaagcttccccc

SEQ ID NO: 44114 - RNA, 20 nt, synthetic construct
  source 1..20: mol_type = other RNA
gtatatgctgtttttgaaaa

SEQ ID NO: 44115 - RNA, 20 nt, synthetic construct
  source 1..20: mol_type = other RNA
gtatatggtaaaatgtacat

SEQ ID NO: 44116 - RNA, 20 nt, synthetic construct
  source 1..20: mol_type = other RNA
gtatatggtttaaggtaagg

SEQ ID NO: 44117 - RNA, 20 nt, synthetic construct
  source 1..20: mol_type = other RNA
gtatattcatagtagctgtt

SEQ ID NO: 44118 - RNA, 20 nt, synthetic construct
  source 1..20: mol_type = other RNA
gtatattctgtgaattgtga

SEQ ID NO: 44119 - RNA, 20 nt, synthetic construct
  source 1..20: mol_type = other RNA
gtatatttactgcttgctgc

SEQ ID NO: 44120 - RNA, 20 nt, synthetic construct
  source 1..20: mol_type = other RNA
gtatatttctgtaaacatga

SEQ ID NO: 44121 - RNA, 20 nt, synthetic construct
  source 1..20: mol_type = other RNA
gtatattttcaaggcttgtg

SEQ ID NO: 44122 - RNA, 20 nt, synthetic construct
  source 1..20: mol_type = other RNA
gtatcaacctgcaggtattt

SEQ ID NO: 44123 - RNA, 20 nt, synthetic construct
  source 1..20: mol_type = other RNA
gtatcacagtgaggacgctg

SEQ ID NO: 44124 - RNA, 20 nt, synthetic construct
  source 1..20: mol_type = other RNA
gtatcaccatctgataagcc

SEQ ID NO: 44125 - RNA, 20 nt, synthetic construct
  source 1..20: mol_type = other RNA
gtatcactttttgtatttcc

SEQ ID NO: 44126 - RNA, 20 nt, synthetic construct
  source 1..20: mol_type = other RNA
gtatcagatgcttctagcca

SEQ ID NO: 44127 - RNA, 20 nt, synthetic construct
  source 1..20: mol_type = other RNA
gtatcatattatttttgtcc

SEQ ID NO: 44128 - RNA, 20 nt, synthetic construct
  source 1..20: mol_type = other RNA
gtatcatcggaaatataaaa

SEQ ID NO: 44129 - RNA, 20 nt, synthetic construct
  source 1..20: mol_type = other RNA
gtatcatttccaagattgaa

SEQ ID NO: 44130 - RNA, 20 nt, synthetic construct
  source 1..20: mol_type = other RNA
gtatccagtaatcttgctaa

SEQ ID NO: 44131 - RNA, 20 nt, synthetic construct
  source 1..20: mol_type = other RNA
gtatccagtggttttttgtt

SEQ ID NO: 44132 - RNA, 20 nt, synthetic construct
  source 1..20: mol_type = other RNA
gtatcccagatggggattga

SEQ ID NO: 44133 - RNA, 20 nt, synthetic construct
  source 1..20: mol_type = other RNA
gtatcctgagacttaggcaa

SEQ ID NO: 44134 - RNA, 20 nt, synthetic construct
  source 1..20: mol_type = other RNA
gtatcctgtttgagaagtct

SEQ ID NO: 44135 - RNA, 20 nt, synthetic construct
  source 1..20: mol_type = other RNA
gtatcctttcaaggtatctc

SEQ ID NO: 44136 - RNA, 20 nt, synthetic construct
  source 1..20: mol_type = other RNA
gtatcgtgagactattatga

SEQ ID NO: 44137 - RNA, 20 nt, synthetic construct
  source 1..20: mol_type = other RNA
gtatctaccaaaaaactacg

SEQ ID NO: 44138 - RNA, 20 nt, synthetic construct
  source 1..20: mol_type = other RNA
gtatctaggagtacagtgca

SEQ ID NO: 44139 - RNA, 20 nt, synthetic construct
  source 1..20: mol_type = other RNA
gtatctcagtcataatttgt

SEQ ID NO: 44140 - RNA, 20 nt, synthetic construct
  source 1..20: mol_type = other RNA
gtatctcatgcttaggatcc

SEQ ID NO: 44141 - RNA, 20 nt, synthetic construct
  source 1..20: mol_type = other RNA
gtatctccccaaagatatta

SEQ ID NO: 44142 - RNA, 20 nt, synthetic construct
  source 1..20: mol_type = other RNA
gtatctccctgtgcgtgaat

SEQ ID NO: 44143 - RNA, 20 nt, synthetic construct
  source 1..20: mol_type = other RNA
gtatctcctttccttccttg

SEQ ID NO: 44144 - RNA, 20 nt, synthetic construct
  source 1..20: mol_type = other RNA
gtatctcggtcattctggag

SEQ ID NO: 44145 - RNA, 20 nt, synthetic construct
  source 1..20: mol_type = other RNA
gtatctgggaaaaaataaga

SEQ ID NO: 44146 - RNA, 20 nt, synthetic construct
  source 1..20: mol_type = other RNA
gtatctggtgctggcagcct

SEQ ID NO: 44147 - RNA, 20 nt, synthetic construct
  source 1..20: mol_type = other RNA
gtatctggtgttgcttgctc

SEQ ID NO: 44148 - RNA, 20 nt, synthetic construct
  source 1..20: mol_type = other RNA
gtatctgtgatccctgatat

SEQ ID NO: 44149 - RNA, 20 nt, synthetic construct
  source 1..20: mol_type = other RNA
gtatcttcacaaacaaatcc

SEQ ID NO: 44150 - RNA, 20 nt, synthetic construct
  source 1..20: mol_type = other RNA
gtatcttgaagaaaccaaga

SEQ ID NO: 44151 - RNA, 20 nt, synthetic construct
  source 1..20: mol_type = other RNA
gtatcttttaacagatggtc

SEQ ID NO: 44152 - RNA, 20 nt, synthetic construct
  source 1..20: mol_type = other RNA
gtatcttttcagtccagata

SEQ ID NO: 44153 - RNA, 20 nt, synthetic construct
  source 1..20: mol_type = other RNA
gtatcttttcatgttgacca

SEQ ID NO: 44154 - RNA, 20 nt, synthetic construct
  source 1..20: mol_type = other RNA
gtatctttttcagcagcaga

SEQ ID NO: 44155 - RNA, 20 nt, synthetic construct
  source 1..20: mol_type = other RNA
gtatgaaattagttcctttt

SEQ ID NO: 44156 - RNA, 20 nt, synthetic construct
  source 1..20: mol_type = other RNA
gtatgaacattttgagttat

SEQ ID NO: 44157 - RNA, 20 nt, synthetic construct
  source 1..20: mol_type = other RNA
gtatgaataaactaacaaag

SEQ ID NO: 44158 - RNA, 20 nt, synthetic construct
  source 1..20: mol_type = other RNA
gtatgaatgcacgtgaagct

SEQ ID NO: 44159 - RNA, 20 nt, synthetic construct
  source 1..20: mol_type = other RNA
gtatgacctcctcccactta

SEQ ID NO: 44160 - RNA, 20 nt, synthetic construct
  source 1..20: mol_type = other RNA
gtatgagaaatgtctggttt

SEQ ID NO: 44161 - RNA, 20 nt, synthetic construct
  source 1..20: mol_type = other RNA
gtatgagaagactggaaaag

SEQ ID NO: 44162 - RNA, 20 nt, synthetic construct
  source 1..20: mol_type = other RNA
gtatgagccactagtcagta

SEQ ID NO: 44163 - RNA, 20 nt, synthetic construct
  source 1..20: mol_type = other RNA
gtatgagtcttccgtctcaa

SEQ ID NO: 44164 - RNA, 20 nt, synthetic construct
  source 1..20: mol_type = other RNA
gtatgagtgtttcccttaaa

SEQ ID NO: 44165 - RNA, 20 nt, synthetic construct
  source 1..20: mol_type = other RNA
gtatgatcaaagtgaaaggc

SEQ ID NO: 44166 - RNA, 20 nt, synthetic construct
  source 1..20: mol_type = other RNA
gtatgatcttattaatgtgt

SEQ ID NO: 44167 - RNA, 20 nt, synthetic construct
  source 1..20: mol_type = other RNA
gtatgatgccactcaaaact

SEQ ID NO: 44168 - RNA, 20 nt, synthetic construct
  source 1..20: mol_type = other RNA
gtatgatttctaggccctaa

SEQ ID NO: 44169 - RNA, 20 nt, synthetic construct
  source 1..20: mol_type = other RNA
gtatgattttctaggaaact

SEQ ID NO: 44170 - RNA, 20 nt, synthetic construct
  source 1..20: mol_type = other RNA
gtatgcaacttactctcaaa

SEQ ID NO: 44171 - RNA, 20 nt, synthetic construct
  source 1..20: mol_type = other RNA
gtatgcacaaataattaaca

SEQ ID NO: 44172 - RNA, 20 nt, synthetic construct
  source 1..20: mol_type = other RNA
gtatgcactgtactcctaga

SEQ ID NO: 44173 - RNA, 20 nt, synthetic construct
  source 1..20: mol_type = other RNA
gtatgcagaaaccagttgta

SEQ ID NO: 44174 - RNA, 20 nt, synthetic construct
  source 1..20: mol_type = other RNA
gtatgcagggaaatcattca

SEQ ID NO: 44175 - RNA, 20 nt, synthetic construct
  source 1..20: mol_type = other RNA
gtatgcatagatcacaagga

SEQ ID NO: 44176 - RNA, 20 nt, synthetic construct
  source 1..20: mol_type = other RNA
gtatgcatagcagggtcatg

SEQ ID NO: 44177 - RNA, 20 nt, synthetic construct
  source 1..20: mol_type = other RNA
gtatgcatcttgaactaagt

SEQ ID NO: 44178 - RNA, 20 nt, synthetic construct
  source 1..20: mol_type = other RNA
gtatgccgctggtgaaaaaa

SEQ ID NO: 44179 - RNA, 20 nt, synthetic construct
  source 1..20: mol_type = other RNA
gtatgcggggtttcagcaca

SEQ ID NO: 44180 - RNA, 20 nt, synthetic construct
  source 1..20: mol_type = other RNA
gtatgctgtttacattagag

SEQ ID NO: 44181 - RNA, 20 nt, synthetic construct
  source 1..20: mol_type = other RNA
gtatggaagatgggacttca

SEQ ID NO: 44182 - RNA, 20 nt, synthetic construct
  source 1..20: mol_type = other RNA
gtatggagacactagggact

SEQ ID NO: 44183 - RNA, 20 nt, synthetic construct
  source 1..20: mol_type = other RNA
gtatggagactagtacactg

SEQ ID NO: 44184 - RNA, 20 nt, synthetic construct
  source 1..20: mol_type = other RNA
gtatggcgactcatgcctgt

SEQ ID NO: 44185 - RNA, 20 nt, synthetic construct
  source 1..20: mol_type = other RNA
gtatgggagatgtgtaattg

SEQ ID NO: 44186 - RNA, 20 nt, synthetic construct
  source 1..20: mol_type = other RNA
gtatgggtctccattttggt

SEQ ID NO: 44187 - RNA, 20 nt, synthetic construct
  source 1..20: mol_type = other RNA
gtatggttcttaagatgata

SEQ ID NO: 44188 - RNA, 20 nt, synthetic construct
  source 1..20: mol_type = other RNA
gtatggttgaagaaagtagg

SEQ ID NO: 44189 - RNA, 20 nt, synthetic construct
  source 1..20: mol_type = other RNA
gtatgtaattacaggggact

SEQ ID NO: 44190 - RNA, 20 nt, synthetic construct
  source 1..20: mol_type = other RNA
gtatgtacccaatggattat

SEQ ID NO: 44191 - RNA, 20 nt, synthetic construct
  source 1..20: mol_type = other RNA
gtatgtaggaaactttgcat

SEQ ID NO: 44192 - RNA, 20 nt, synthetic construct
  source 1..20: mol_type = other RNA
gtatgtcagactcattgcct

SEQ ID NO: 44193 - RNA, 20 nt, synthetic construct
  source 1..20: mol_type = other RNA
gtatgtgccatctccttaat

SEQ ID NO: 44194 - RNA, 20 nt, synthetic construct
  source 1..20: mol_type = other RNA
gtatgtgccatttttataaa

SEQ ID NO: 44195 - RNA, 20 nt, synthetic construct
  source 1..20: mol_type = other RNA
gtatgtgtagtcagtgaaga

SEQ ID NO: 44196 - RNA, 20 nt, synthetic construct
  source 1..20: mol_type = other RNA
gtatgtgtctctgacatgag

SEQ ID NO: 44197 - RNA, 20 nt, synthetic construct
  source 1..20: mol_type = other RNA
gtatgtgttaaaccattctt

SEQ ID NO: 44198 - RNA, 20 nt, synthetic construct
  source 1..20: mol_type = other RNA
gtatgttaataaccctgttt

SEQ ID NO: 44199 - RNA, 20 nt, synthetic construct
  source 1..20: mol_type = other RNA
gtatgttacacttccagtac

SEQ ID NO: 44200 - RNA, 20 nt, synthetic construct
  source 1..20: mol_type = other RNA
gtatgttgtgttttcattcg

SEQ ID NO: 44201 - RNA, 20 nt, synthetic construct
  source 1..20: mol_type = other RNA
gtatgtttctcattcttctc

SEQ ID NO: 44202 - RNA, 20 nt, synthetic construct
  source 1..20: mol_type = other RNA
gtatgtttgattagttgact

SEQ ID NO: 44203 - RNA, 20 nt, synthetic construct
  source 1..20: mol_type = other RNA
gtatgttttagccttaaaaa

SEQ ID NO: 44204 - RNA, 20 nt, synthetic construct
  source 1..20: mol_type = other RNA
gtattaaaagcacaagcaca

SEQ ID NO: 44205 - RNA, 20 nt, synthetic construct
  source 1..20: mol_type = other RNA
gtattaaattttctaggaac

SEQ ID NO: 44206 - RNA, 20 nt, synthetic construct
  source 1..20: mol_type = other RNA
gtattacacagaaagcctct

SEQ ID NO: 44207 - RNA, 20 nt, synthetic construct
  source 1..20: mol_type = other RNA
gtattaccagcttacagcag

SEQ ID NO: 44208 - RNA, 20 nt, synthetic construct
  source 1..20: mol_type = other RNA
gtattacctatgaataggtg

SEQ ID NO: 44209 - RNA, 20 nt, synthetic construct
  source 1..20: mol_type = other RNA
gtattacctcccatgcattc

SEQ ID NO: 44210 - RNA, 20 nt, synthetic construct
  source 1..20: mol_type = other RNA
gtattaggatgtgtacccgt

SEQ ID NO: 44211 - RNA, 20 nt, synthetic construct
  source 1..20: mol_type = other RNA
gtattattctaaacacacgg

SEQ ID NO: 44212 - RNA, 20 nt, synthetic construct
  source 1..20: mol_type = other RNA
gtattatttctgtcatctga

SEQ ID NO: 44213 - RNA, 20 nt, synthetic construct
  source 1..20: mol_type = other RNA
gtattattttcacagacagt

SEQ ID NO: 44214 - RNA, 20 nt, synthetic construct
  source 1..20: mol_type = other RNA
gtattcaagtttcaccctgc

SEQ ID NO: 44215 - RNA, 20 nt, synthetic construct
  source 1..20: mol_type = other RNA
gtattcaggacagattaaaa

SEQ ID NO: 44216 - RNA, 20 nt, synthetic construct
  source 1..20: mol_type = other RNA
gtattcagggggctaaatgc

SEQ ID NO: 44217 - RNA, 20 nt, synthetic construct
  source 1..20: mol_type = other RNA
gtattcatccagtttaaagc

SEQ ID NO: 44218 - RNA, 20 nt, synthetic construct
  source 1..20: mol_type = other RNA
gtattcatgctgtgaatttg

SEQ ID NO: 44219 - RNA, 20 nt, synthetic construct
  source 1..20: mol_type = other RNA
gtattccatggtatgtgcca

SEQ ID NO: 44220 - RNA, 20 nt, synthetic construct
  source 1..20: mol_type = other RNA
gtattcccaagatcataagc

SEQ ID NO: 44221 - RNA, 20 nt, synthetic construct
  source 1..20: mol_type = other RNA
gtattctagttctagctctg

SEQ ID NO: 44222 - RNA, 20 nt, synthetic construct
  source 1..20: mol_type = other RNA
gtattctatcatcaagacag

SEQ ID NO: 44223 - RNA, 20 nt, synthetic construct
  source 1..20: mol_type = other RNA
gtattctgaactttcaacct

SEQ ID NO: 44224 - RNA, 20 nt, synthetic construct
  source 1..20: mol_type = other RNA
gtattctgacctaaagtttt

SEQ ID NO: 44225 - RNA, 20 nt, synthetic construct
  source 1..20: mol_type = other RNA
gtattcttatccctacctaa

SEQ ID NO: 44226 - RNA, 20 nt, synthetic construct
  source 1..20: mol_type = other RNA
gtattgaactgttacttgac

SEQ ID NO: 44227 - RNA, 20 nt, synthetic construct
  source 1..20: mol_type = other RNA
gtattgactaaattgaaaca

SEQ ID NO: 44228 - RNA, 20 nt, synthetic construct
  source 1..20: mol_type = other RNA
gtattgagcctgttccgatt

SEQ ID NO: 44229 - RNA, 20 nt, synthetic construct
  source 1..20: mol_type = other RNA
gtattgagtgtagctgtggc

SEQ ID NO: 44230 - RNA, 20 nt, synthetic construct
  source 1..20: mol_type = other RNA
gtattgatttgaccatggga

SEQ ID NO: 44231 - RNA, 20 nt, synthetic construct
  source 1..20: mol_type = other RNA
gtattgcaaactaagtggta

SEQ ID NO: 44232 - RNA, 20 nt, synthetic construct
  source 1..20: mol_type = other RNA
gtattgcattgaatctgtag

SEQ ID NO: 44233 - RNA, 20 nt, synthetic construct
  source 1..20: mol_type = other RNA
gtattgccaggtttgtgctt

SEQ ID NO: 44234 - RNA, 20 nt, synthetic construct
  source 1..20: mol_type = other RNA
gtattgtaccttgatttatg

SEQ ID NO: 44235 - RNA, 20 nt, synthetic construct
  source 1..20: mol_type = other RNA
gtattgtaggaaagcctgtg

SEQ ID NO: 44236 - RNA, 20 nt, synthetic construct
  source 1..20: mol_type = other RNA
gtattgtcttctaaccctca

SEQ ID NO: 44237 - RNA, 20 nt, synthetic construct
  source 1..20: mol_type = other RNA
gtattgtgctgaaaccccgc

SEQ ID NO: 44238 - RNA, 20 nt, synthetic construct
  source 1..20: mol_type = other RNA
gtattgttaactgtagagaa

SEQ ID NO: 44239 - RNA, 20 nt, synthetic construct
  source 1..20: mol_type = other RNA
gtattgtttcaatttagtca

SEQ ID NO: 44240 - RNA, 20 nt, synthetic construct
  source 1..20: mol_type = other RNA
gtatttaatctgtcagcagt

SEQ ID NO: 44241 - RNA, 20 nt, synthetic construct
  source 1..20: mol_type = other RNA
gtatttagggagcatatata

SEQ ID NO: 44242 - RNA, 20 nt, synthetic construct
  source 1..20: mol_type = other RNA
gtatttatattttggtagag

SEQ ID NO: 44243 - RNA, 20 nt, synthetic construct
  source 1..20: mol_type = other RNA
gtatttatcatgtcttcttg

SEQ ID NO: 44244 - RNA, 20 nt, synthetic construct
  source 1..20: mol_type = other RNA
gtatttattaaacctgttac

SEQ ID NO: 44245 - RNA, 20 nt, synthetic construct
  source 1..20: mol_type = other RNA
gtatttcatgtacttgtaaa

SEQ ID NO: 44246 - RNA, 20 nt, synthetic construct
  source 1..20: mol_type = other RNA
gtatttccacgggtaaaaat

SEQ ID NO: 44247 - RNA, 20 nt, synthetic construct
  source 1..20: mol_type = other RNA
gtatttccttatagtattac

SEQ ID NO: 44248 - RNA, 20 nt, synthetic construct
  source 1..20: mol_type = other RNA
gtatttctaaatcaacagtg

SEQ ID NO: 44249 - RNA, 20 nt, synthetic construct
  source 1..20: mol_type = other RNA
gtatttctcatctgtcactt

SEQ ID NO: 44250 - RNA, 20 nt, synthetic construct
  source 1..20: mol_type = other RNA
gtatttctgctttggtacca

SEQ ID NO: 44251 - RNA, 20 nt, synthetic construct
  source 1..20: mol_type = other RNA
gtatttctgttagatggtgc

SEQ ID NO: 44252 - RNA, 20 nt, synthetic construct
  source 1..20: mol_type = other RNA
gtatttggggctaggatttc

SEQ ID NO: 44253 - RNA, 20 nt, synthetic construct
  source 1..20: mol_type = other RNA
gtattttacaccatgcaggt

SEQ ID NO: 44254 - RNA, 20 nt, synthetic construct
  source 1..20: mol_type = other RNA
gtattttcctaaccactgtt

SEQ ID NO: 44255 - RNA, 20 nt, synthetic construct
  source 1..20: mol_type = other RNA
gtattttgttgacatccttt

SEQ ID NO: 44256 - RNA, 20 nt, synthetic construct
  source 1..20: mol_type = other RNA
gtattttgttgttgttgttt

SEQ ID NO: 44257 - RNA, 20 nt, synthetic construct
  source 1..20: mol_type = other RNA
gtatttttcacaaacacaca

SEQ ID NO: 44258 - RNA, 20 nt, synthetic construct
  source 1..20: mol_type = other RNA
gtatttttgagcttttcaaa

SEQ ID NO: 44259 - RNA, 20 nt, synthetic construct
  source 1..20: mol_type = other RNA
gtatttttgctcacacttac

SEQ ID NO: 44260 - RNA, 20 nt, synthetic construct
  source 1..20: mol_type = other RNA
gtcaaaaagagaacacacaa

SEQ ID NO: 44261 - RNA, 20 nt, synthetic construct
  source 1..20: mol_type = other RNA
gtcaaaaatgtgtctagtga

SEQ ID NO: 44262 - RNA, 20 nt, synthetic construct
  source 1..20: mol_type = other RNA
gtcaaaaccaaagaaagggg

SEQ ID NO: 44263 - RNA, 20 nt, synthetic construct
  source 1..20: mol_type = other RNA
gtcaaaactgtattttctaa

SEQ ID NO: 44264 - RNA, 20 nt, synthetic construct
  source 1..20: mol_type = other RNA
gtcaaaagatgctggtggag

SEQ ID NO: 44265 - RNA, 20 nt, synthetic construct
  source 1..20: mol_type = other RNA
gtcaaactcacttattagca

SEQ ID NO: 44266 - RNA, 20 nt, synthetic construct
  source 1..20: mol_type = other RNA
gtcaaagcctgtggaggcag

SEQ ID NO: 44267 - RNA, 20 nt, synthetic construct
  source 1..20: mol_type = other RNA
gtcaaatcaatacttcattt

SEQ ID NO: 44268 - RNA, 20 nt, synthetic construct
  source 1..20: mol_type = other RNA
gtcaaatggtaacagccaaa

SEQ ID NO: 44269 - RNA, 20 nt, synthetic construct
  source 1..20: mol_type = other RNA
gtcaaatttttcacattctt

SEQ ID NO: 44270 - RNA, 20 nt, synthetic construct
  source 1..20: mol_type = other RNA
gtcaacaaactaactagaaa

SEQ ID NO: 44271 - RNA, 20 nt, synthetic construct
  source 1..20: mol_type = other RNA
gtcaacacactagccactgg

SEQ ID NO: 44272 - RNA, 20 nt, synthetic construct
  source 1..20: mol_type = other RNA
gtcaacacatcagcgctaag

SEQ ID NO: 44273 - RNA, 20 nt, synthetic construct
  source 1..20: mol_type = other RNA
gtcaacaccaagcaacacta

SEQ ID NO: 44274 - RNA, 20 nt, synthetic construct
  source 1..20: mol_type = other RNA
gtcaacacttttccagtctt

SEQ ID NO: 44275 - RNA, 20 nt, synthetic construct
  source 1..20: mol_type = other RNA
gtcaacagggtaagattccg

SEQ ID NO: 44276 - RNA, 20 nt, synthetic construct
  source 1..20: mol_type = other RNA
gtcaacatgaaaagatactc

SEQ ID NO: 44277 - RNA, 20 nt, synthetic construct
  source 1..20: mol_type = other RNA
gtcaacattaagggaaacag

SEQ ID NO: 44278 - RNA, 20 nt, synthetic construct
  source 1..20: mol_type = other RNA
gtcaaccactaaggtcaaca

SEQ ID NO: 44279 - RNA, 20 nt, synthetic construct
  source 1..20: mol_type = other RNA
gtcaacgcacccagagcggg

SEQ ID NO: 44280 - RNA, 20 nt, synthetic construct
  source 1..20: mol_type = other RNA
gtcaactaatcaaacatacc

SEQ ID NO: 44281 - RNA, 20 nt, synthetic construct
  source 1..20: mol_type = other RNA
gtcaactgaggcagagtaga

SEQ ID NO: 44282 - RNA, 20 nt, synthetic construct
  source 1..20: mol_type = other RNA
gtcaacttttagtaggtctc

SEQ ID NO: 44283 - RNA, 20 nt, synthetic construct
  source 1..20: mol_type = other RNA
gtcaagaaataaaacatggc

SEQ ID NO: 44284 - RNA, 20 nt, synthetic construct
  source 1..20: mol_type = other RNA
gtcaagaatgaagtcagaga

SEQ ID NO: 44285 - RNA, 20 nt, synthetic construct
  source 1..20: mol_type = other RNA
gtcaagagagattaaataac

SEQ ID NO: 44286 - RNA, 20 nt, synthetic construct
  source 1..20: mol_type = other RNA
gtcaagagcggcctttgcct

SEQ ID NO: 44287 - RNA, 20 nt, synthetic construct
  source 1..20: mol_type = other RNA
gtcaagatgaatctgcaact

SEQ ID NO: 44288 - RNA, 20 nt, synthetic construct
  source 1..20: mol_type = other RNA
gtcaagctatcagaatttta

SEQ ID NO: 44289 - RNA, 20 nt, synthetic construct
  source 1..20: mol_type = other RNA
gtcaagctgtttgagctgaa

SEQ ID NO: 44290 - RNA, 20 nt, synthetic construct
  source 1..20: mol_type = other RNA
gtcaaggggagaggcctcat

SEQ ID NO: 44291 - RNA, 20 nt, synthetic construct
  source 1..20: mol_type = other RNA
gtcaaggtcatcctttccct

SEQ ID NO: 44292 - RNA, 20 nt, synthetic construct
  source 1..20: mol_type = other RNA
gtcaagtaacagttcaatac

SEQ ID NO: 44293 - RNA, 20 nt, synthetic construct
  source 1..20: mol_type = other RNA
gtcaagtacaactaataatt

SEQ ID NO: 44294 - RNA, 20 nt, synthetic construct
  source 1..20: mol_type = other RNA
gtcaagtgactccaagcaca

SEQ ID NO: 44295 - RNA, 20 nt, synthetic construct
  source 1..20: mol_type = other RNA
gtcaagttctgatttcaaag

SEQ ID NO: 44296 - RNA, 20 nt, synthetic construct
  source 1..20: mol_type = other RNA
gtcaataatttggatgaacg

SEQ ID NO: 44297 - RNA, 20 nt, synthetic construct
  source 1..20: mol_type = other RNA
gtcaatacaaaaattgagat

SEQ ID NO: 44298 - RNA, 20 nt, synthetic construct
  source 1..20: mol_type = other RNA
gtcaatctaggaggtctaag

SEQ ID NO: 44299 - RNA, 20 nt, synthetic construct
  source 1..20: mol_type = other RNA
gtcaatctgaaaaatatcaa

SEQ ID NO: 44300 - RNA, 20 nt, synthetic construct
  source 1..20: mol_type = other RNA
gtcaatgcaatgcgtgtgaa

SEQ ID NO: 44301 - RNA, 20 nt, synthetic construct
  source 1..20: mol_type = other RNA
gtcaatggggaactttattt

SEQ ID NO: 44302 - RNA, 20 nt, synthetic construct
  source 1..20: mol_type = other RNA
gtcaattctagttaataaag

SEQ ID NO: 44303 - RNA, 20 nt, synthetic construct
  source 1..20: mol_type = other RNA
gtcaattgatctgccaggac

SEQ ID NO: 44304 - RNA, 20 nt, synthetic construct
  source 1..20: mol_type = other RNA
gtcaatttcagatctctgac

SEQ ID NO: 44305 - RNA, 20 nt, synthetic construct
  source 1..20: mol_type = other RNA
gtcaatttcatcgtaaaaag

SEQ ID NO: 44306 - RNA, 20 nt, synthetic construct
  source 1..20: mol_type = other RNA
gtcaattttcccccaattaa

SEQ ID NO: 44307 - RNA, 20 nt, synthetic construct
  source 1..20: mol_type = other RNA
gtcacaaaaagacaagtact

SEQ ID NO: 44308 - RNA, 20 nt, synthetic construct
  source 1..20: mol_type = other RNA
gtcacaaaatgtggatgcat

SEQ ID NO: 44309 - RNA, 20 nt, synthetic construct
  source 1..20: mol_type = other RNA
gtcacaaacacaaaacaaat

SEQ ID NO: 44310 - RNA, 20 nt, synthetic construct
  source 1..20: mol_type = other RNA
gtcacaaagctttaaactgg

SEQ ID NO: 44311 - RNA, 20 nt, synthetic construct
  source 1..20: mol_type = other RNA
gtcacaagccagggtctgtc

SEQ ID NO: 44312 - RNA, 20 nt, synthetic construct
  source 1..20: mol_type = other RNA
gtcacaattcacagaatata

SEQ ID NO: 44313 - RNA, 20 nt, synthetic construct
  source 1..20: mol_type = other RNA
gtcacacaccactacacccg

SEQ ID NO: 44314 - RNA, 20 nt, synthetic construct
  source 1..20: mol_type = other RNA
gtcacacggaaaacattatt

SEQ ID NO: 44315 - RNA, 20 nt, synthetic construct
  source 1..20: mol_type = other RNA
gtcacactttttgtgagttt

SEQ ID NO: 44316 - RNA, 20 nt, synthetic construct
  source 1..20: mol_type = other RNA
gtcacaggctttcctacaat

SEQ ID NO: 44317 - RNA, 20 nt, synthetic construct
  source 1..20: mol_type = other RNA
gtcacagtgaattctgactt

SEQ ID NO: 44318 - RNA, 20 nt, synthetic construct
  source 1..20: mol_type = other RNA
gtcacatagaagcgctcttc

SEQ ID NO: 44319 - RNA, 20 nt, synthetic construct
  source 1..20: mol_type = other RNA
gtcacatagacctgaatgac

SEQ ID NO: 44320 - RNA, 20 nt, synthetic construct
  source 1..20: mol_type = other RNA
gtcacattcagaggtatttg

SEQ ID NO: 44321 - RNA, 20 nt, synthetic construct
  source 1..20: mol_type = other RNA
gtcacattctagtgatggga

SEQ ID NO: 44322 - RNA, 20 nt, synthetic construct
  source 1..20: mol_type = other RNA
gtcacattctgcctgcagac

SEQ ID NO: 44323 - RNA, 20 nt, synthetic construct
  source 1..20: mol_type = other RNA
gtcacatttgaaagaaagaa

SEQ ID NO: 44324 - RNA, 20 nt, synthetic construct
  source 1..20: mol_type = other RNA
gtcacatttgctttactact

SEQ ID NO: 44325 - RNA, 20 nt, synthetic construct
  source 1..20: mol_type = other RNA
gtcacattttcttatctagg

SEQ ID NO: 44326 - RNA, 20 nt, synthetic construct
  source 1..20: mol_type = other RNA
gtcaccaaacgtttagatga

SEQ ID NO: 44327 - RNA, 20 nt, synthetic construct
  source 1..20: mol_type = other RNA
gtcaccaggctggaatgcag

SEQ ID NO: 44328 - RNA, 20 nt, synthetic construct
  source 1..20: mol_type = other RNA
gtcacccaagccacagcgtg

SEQ ID NO: 44329 - RNA, 20 nt, synthetic construct
  source 1..20: mol_type = other RNA
gtcacccacgtggagtgcaa

SEQ ID NO: 44330 - RNA, 20 nt, synthetic construct
  source 1..20: mol_type = other RNA
gtcaccctacagactcaata

SEQ ID NO: 44331 - RNA, 20 nt, synthetic construct
  source 1..20: mol_type = other RNA
gtcacccttgtaatcaagta

SEQ ID NO: 44332 - RNA, 20 nt, synthetic construct
  source 1..20: mol_type = other RNA
gtcaccgcaacctccgcctc

SEQ ID NO: 44333 - RNA, 20 nt, synthetic construct
  source 1..20: mol_type = other RNA
gtcacctagcctctctgggc

SEQ ID NO: 44334 - RNA, 20 nt, synthetic construct
  source 1..20: mol_type = other RNA
gtcacggtgccctacatatg

SEQ ID NO: 44335 - RNA, 20 nt, synthetic construct
  source 1..20: mol_type = other RNA
gtcactaaaaatcagattaa

SEQ ID NO: 44336 - RNA, 20 nt, synthetic construct
  source 1..20: mol_type = other RNA
gtcactattaaccatatggt

SEQ ID NO: 44337 - RNA, 20 nt, synthetic construct
  source 1..20: mol_type = other RNA
gtcactccatttgtggcatc

SEQ ID NO: 44338 - RNA, 20 nt, synthetic construct
  source 1..20: mol_type = other RNA
gtcactctctttaggaagct

SEQ ID NO: 44339 - RNA, 20 nt, synthetic construct
  source 1..20: mol_type = other RNA
gtcactgacacaggctgaag

SEQ ID NO: 44340 - RNA, 20 nt, synthetic construct
  source 1..20: mol_type = other RNA
gtcactgcagtctcaaactc

SEQ ID NO: 44341 - RNA, 20 nt, synthetic construct
  source 1..20: mol_type = other RNA
gtcactgctgatgtaagtgg

SEQ ID NO: 44342 - RNA, 20 nt, synthetic construct
  source 1..20: mol_type = other RNA
gtcactggatagaagtgtat

SEQ ID NO: 44343 - RNA, 20 nt, synthetic construct
  source 1..20: mol_type = other RNA
gtcactggccactgattgag

SEQ ID NO: 44344 - RNA, 20 nt, synthetic construct
  source 1..20: mol_type = other RNA
gtcactgtaagaataatgtc

SEQ ID NO: 44345 - RNA, 20 nt, synthetic construct
  source 1..20: mol_type = other RNA
gtcactgtggaaaacagttt

SEQ ID NO: 44346 - RNA, 20 nt, synthetic construct
  source 1..20: mol_type = other RNA
gtcactgtttggacagtaaa

SEQ ID NO: 44347 - RNA, 20 nt, synthetic construct
  source 1..20: mol_type = other RNA
gtcacttcctctcttaaatc

SEQ ID NO: 44348 - RNA, 20 nt, synthetic construct
  source 1..20: mol_type = other RNA
gtcacttgacaaaaattaaa

SEQ ID NO: 44349 - RNA, 20 nt, synthetic construct
  source 1..20: mol_type = other RNA
gtcactttcctattcacact

SEQ ID NO: 44350 - RNA, 20 nt, synthetic construct
  source 1..20: mol_type = other RNA
gtcactttttattctgttct

SEQ ID NO: 44351 - RNA, 20 nt, synthetic construct
  source 1..20: mol_type = other RNA
gtcagaaaaatggaatattt

SEQ ID NO: 44352 - RNA, 20 nt, synthetic construct
  source 1..20: mol_type = other RNA
gtcagaaaagatcagtaaaa

SEQ ID NO: 44353 - RNA, 20 nt, synthetic construct
  source 1..20: mol_type = other RNA
gtcagaaacaccaacacaaa

SEQ ID NO: 44354 - RNA, 20 nt, synthetic construct
  source 1..20: mol_type = other RNA
gtcagaaaccatcgttcaca

SEQ ID NO: 44355 - RNA, 20 nt, synthetic construct
  source 1..20: mol_type = other RNA
gtcagaagtttggaaccagc

SEQ ID NO: 44356 - RNA, 20 nt, synthetic construct
  source 1..20: mol_type = other RNA
gtcagaatacaaaaatgaca

SEQ ID NO: 44357 - RNA, 20 nt, synthetic construct
  source 1..20: mol_type = other RNA
gtcagaatcgtgatagtctt

SEQ ID NO: 44358 - RNA, 20 nt, synthetic construct
  source 1..20: mol_type = other RNA
gtcagaattagaaagctgga

SEQ ID NO: 44359 - RNA, 20 nt, synthetic construct
  source 1..20: mol_type = other RNA
gtcagaattcactgtgactc

SEQ ID NO: 44360 - RNA, 20 nt, synthetic construct
  source 1..20: mol_type = other RNA
gtcagaattccatcagtggt

SEQ ID NO: 44361 - RNA, 20 nt, synthetic construct
  source 1..20: mol_type = other RNA
gtcagaattttattttcttc

SEQ ID NO: 44362 - RNA, 20 nt, synthetic construct
  source 1..20: mol_type = other RNA
gtcagacacactagctgacc

SEQ ID NO: 44363 - RNA, 20 nt, synthetic construct
  source 1..20: mol_type = other RNA
gtcagactaagacactagct

SEQ ID NO: 44364 - RNA, 20 nt, synthetic construct
  source 1..20: mol_type = other RNA
gtcagactcattgcctatag

SEQ ID NO: 44365 - RNA, 20 nt, synthetic construct
  source 1..20: mol_type = other RNA
gtcagagacacatactgaaa

SEQ ID NO: 44366 - RNA, 20 nt, synthetic construct
  source 1..20: mol_type = other RNA
gtcagagatctgaaattgac

SEQ ID NO: 44367 - RNA, 20 nt, synthetic construct
  source 1..20: mol_type = other RNA
gtcagagattttcccaaaga

SEQ ID NO: 44368 - RNA, 20 nt, synthetic construct
  source 1..20: mol_type = other RNA
gtcagagcagcactgatgtg

SEQ ID NO: 44369 - RNA, 20 nt, synthetic construct
  source 1..20: mol_type = other RNA
gtcagaggagcagttactcc

SEQ ID NO: 44370 - RNA, 20 nt, synthetic construct
  source 1..20: mol_type = other RNA
gtcagagttgtatctgtgat

SEQ ID NO: 44371 - RNA, 20 nt, synthetic construct
  source 1..20: mol_type = other RNA
gtcagatggtaaattggtcc

SEQ ID NO: 44372 - RNA, 20 nt, synthetic construct
  source 1..20: mol_type = other RNA
gtcagattttcttgttataa

SEQ ID NO: 44373 - RNA, 20 nt, synthetic construct
  source 1..20: mol_type = other RNA
gtcagcaactcttggccatt

SEQ ID NO: 44374 - RNA, 20 nt, synthetic construct
  source 1..20: mol_type = other RNA
gtcagcacactcttaataac

SEQ ID NO: 44375 - RNA, 20 nt, synthetic construct
  source 1..20: mol_type = other RNA
gtcagcacttctgatatcct

SEQ ID NO: 44376 - RNA, 20 nt, synthetic construct
  source 1..20: mol_type = other RNA
gtcagcagttcagcctgcag

SEQ ID NO: 44377 - RNA, 20 nt, synthetic construct
  source 1..20: mol_type = other RNA
gtcagccacaagacataagc

SEQ ID NO: 44378 - RNA, 20 nt, synthetic construct
  source 1..20: mol_type = other RNA
gtcagccagaggaagcttat

SEQ ID NO: 44379 - RNA, 20 nt, synthetic construct
  source 1..20: mol_type = other RNA
gtcagcctgggcacacgcca

SEQ ID NO: 44380 - RNA, 20 nt, synthetic construct
  source 1..20: mol_type = other RNA
gtcagctaattttctaatct

SEQ ID NO: 44381 - RNA, 20 nt, synthetic construct
  source 1..20: mol_type = other RNA
gtcagctaggcgtagtatct

SEQ ID NO: 44382 - RNA, 20 nt, synthetic construct
  source 1..20: mol_type = other RNA
gtcagctagtgtgtctgact

SEQ ID NO: 44383 - RNA, 20 nt, synthetic construct
  source 1..20: mol_type = other RNA
gtcaggaaggcaggaggcct

SEQ ID NO: 44384 - RNA, 20 nt, synthetic construct
  source 1..20: mol_type = other RNA
gtcaggcaagggactgtcga

SEQ ID NO: 44385 - RNA, 20 nt, synthetic construct
  source 1..20: mol_type = other RNA
gtcaggcatgctaactgcag

SEQ ID NO: 44386 - RNA, 20 nt, synthetic construct
  source 1..20: mol_type = other RNA
gtcaggtgggcactgggagc

SEQ ID NO: 44387 - RNA, 20 nt, synthetic construct
  source 1..20: mol_type = other RNA
gtcagtaaaaaaggaccatc

SEQ ID NO: 44388 - RNA, 20 nt, synthetic construct
  source 1..20: mol_type = other RNA
gtcagtaatcaaaaacctcc

SEQ ID NO: 44389 - RNA, 20 nt, synthetic construct
  source 1..20: mol_type = other RNA
gtcagtaattctgcagtgaa

SEQ ID NO: 44390 - RNA, 20 nt, synthetic construct
  source 1..20: mol_type = other RNA
gtcagtactatcttccctaa

SEQ ID NO: 44391 - RNA, 20 nt, synthetic construct
  source 1..20: mol_type = other RNA
gtcagtagaggccgagggtt

SEQ ID NO: 44392 - RNA, 20 nt, synthetic construct
  source 1..20: mol_type = other RNA
gtcagtagtacagtgagtag

SEQ ID NO: 44393 - RNA, 20 nt, synthetic construct
  source 1..20: mol_type = other RNA
gtcagtatatttactgcttg

SEQ ID NO: 44394 - RNA, 20 nt, synthetic construct
  source 1..20: mol_type = other RNA
gtcagtcaacacactagcca

SEQ ID NO: 44395 - RNA, 20 nt, synthetic construct
  source 1..20: mol_type = other RNA
gtcagtgaagatgctgaact

SEQ ID NO: 44396 - RNA, 20 nt, synthetic construct
  source 1..20: mol_type = other RNA
gtcagtgacagttctgtgaa

SEQ ID NO: 44397 - RNA, 20 nt, synthetic construct
  source 1..20: mol_type = other RNA
gtcagtgatggaggtggaac

SEQ ID NO: 44398 - RNA, 20 nt, synthetic construct
  source 1..20: mol_type = other RNA
gtcagtgggactggagaaca

SEQ ID NO: 44399 - RNA, 20 nt, synthetic construct
  source 1..20: mol_type = other RNA
gtcagtgtggttcatatttc

SEQ ID NO: 44400 - RNA, 20 nt, synthetic construct
  source 1..20: mol_type = other RNA
gtcagttaacagtgctgtgc

SEQ ID NO: 44401 - RNA, 20 nt, synthetic construct
  source 1..20: mol_type = other RNA
gtcagttacagcatttcagc

SEQ ID NO: 44402 - RNA, 20 nt, synthetic construct
  source 1..20: mol_type = other RNA
gtcagttctctgccccgggc

SEQ ID NO: 44403 - RNA, 20 nt, synthetic construct
  source 1..20: mol_type = other RNA
gtcagttgtttacttgggta

SEQ ID NO: 44404 - RNA, 20 nt, synthetic construct
  source 1..20: mol_type = other RNA
gtcagtttctgatttatctt

SEQ ID NO: 44405 - RNA, 20 nt, synthetic construct
  source 1..20: mol_type = other RNA
gtcataaacataactttgaa

SEQ ID NO: 44406 - RNA, 20 nt, synthetic construct
  source 1..20: mol_type = other RNA
gtcataacagtattgtcttc

SEQ ID NO: 44407 - RNA, 20 nt, synthetic construct
  source 1..20: mol_type = other RNA
gtcataatttgtgtcctttt

SEQ ID NO: 44408 - RNA, 20 nt, synthetic construct
  source 1..20: mol_type = other RNA
gtcatagcagtgggaagtgg

SEQ ID NO: 44409 - RNA, 20 nt, synthetic construct
  source 1..20: mol_type = other RNA
gtcatcaaaggaaggaattt

SEQ ID NO: 44410 - RNA, 20 nt, synthetic construct
  source 1..20: mol_type = other RNA
gtcatcacagtccaggaact

SEQ ID NO: 44411 - RNA, 20 nt, synthetic construct
  source 1..20: mol_type = other RNA
gtcatcagcgtcctcactgt

SEQ ID NO: 44412 - RNA, 20 nt, synthetic construct
  source 1..20: mol_type = other RNA
gtcatcattattagcaaaca

SEQ ID NO: 44413 - RNA, 20 nt, synthetic construct
  source 1..20: mol_type = other RNA
gtcatccactgcacagtatg

SEQ ID NO: 44414 - RNA, 20 nt, synthetic construct
  source 1..20: mol_type = other RNA
gtcatcctcaacaagagagg

SEQ ID NO: 44415 - RNA, 20 nt, synthetic construct
  source 1..20: mol_type = other RNA
gtcatcctttcccttctgct

SEQ ID NO: 44416 - RNA, 20 nt, synthetic construct
  source 1..20: mol_type = other RNA
gtcatctataaggtaatgac

SEQ ID NO: 44417 - RNA, 20 nt, synthetic construct
  source 1..20: mol_type = other RNA
gtcatctgaatcaataagaa

SEQ ID NO: 44418 - RNA, 20 nt, synthetic construct
  source 1..20: mol_type = other RNA
gtcatctggtcctgagcttt

SEQ ID NO: 44419 - RNA, 20 nt, synthetic construct
  source 1..20: mol_type = other RNA
gtcatcttctctctctgctt

SEQ ID NO: 44420 - RNA, 20 nt, synthetic construct
  source 1..20: mol_type = other RNA
gtcatgaatgaatgttgagt

SEQ ID NO: 44421 - RNA, 20 nt, synthetic construct
  source 1..20: mol_type = other RNA
gtcatgacctgctttcttgg

SEQ ID NO: 44422 - RNA, 20 nt, synthetic construct
  source 1..20: mol_type = other RNA
gtcatgacttttttgcccac

SEQ ID NO: 44423 - RNA, 20 nt, synthetic construct
  source 1..20: mol_type = other RNA
gtcatgcacacgctggaagg

SEQ ID NO: 44424 - RNA, 20 nt, synthetic construct
  source 1..20: mol_type = other RNA
gtcatgggccgggcgtagtg

SEQ ID NO: 44425 - RNA, 20 nt, synthetic construct
  source 1..20: mol_type = other RNA
gtcatggtgtgtctgcgcct

SEQ ID NO: 44426 - RNA, 20 nt, synthetic construct
  source 1..20: mol_type = other RNA
gtcatgtatatgctgttttt

SEQ ID NO: 44427 - RNA, 20 nt, synthetic construct
  source 1..20: mol_type = other RNA
gtcatgtcaaatttttcaca

SEQ ID NO: 44428 - RNA, 20 nt, synthetic construct
  source 1..20: mol_type = other RNA
gtcatgtggggactttgtgg

SEQ ID NO: 44429 - RNA, 20 nt, synthetic construct
  source 1..20: mol_type = other RNA
gtcatgttcccggattggaa

SEQ ID NO: 44430 - RNA, 20 nt, synthetic construct
  source 1..20: mol_type = other RNA
gtcatgtttgaattttccat

SEQ ID NO: 44431 - RNA, 20 nt, synthetic construct
  source 1..20: mol_type = other RNA
gtcattacatattttgtaac

SEQ ID NO: 44432 - RNA, 20 nt, synthetic construct
  source 1..20: mol_type = other RNA
gtcattaccttatagatgac

SEQ ID NO: 44433 - RNA, 20 nt, synthetic construct
  source 1..20: mol_type = other RNA
gtcattcaggtctatgtgac

SEQ ID NO: 44434 - RNA, 20 nt, synthetic construct
  source 1..20: mol_type = other RNA
gtcattccgctaaacatttt

SEQ ID NO: 44435 - RNA, 20 nt, synthetic construct
  source 1..20: mol_type = other RNA
gtcattctgcagtttgtgtt

SEQ ID NO: 44436 - RNA, 20 nt, synthetic construct
  source 1..20: mol_type = other RNA
gtcattctggagtgttttct

SEQ ID NO: 44437 - RNA, 20 nt, synthetic construct
  source 1..20: mol_type = other RNA
gtcattgaaactcaatgttg

SEQ ID NO: 44438 - RNA, 20 nt, synthetic construct
  source 1..20: mol_type = other RNA
gtcatttaatttgtcaactt

SEQ ID NO: 44439 - RNA, 20 nt, synthetic construct
  source 1..20: mol_type = other RNA
gtcatttctgcttagtcttc

SEQ ID NO: 44440 - RNA, 20 nt, synthetic construct
  source 1..20: mol_type = other RNA
gtcatttgagcccaggaggt

SEQ ID NO: 44441 - RNA, 20 nt, synthetic construct
  source 1..20: mol_type = other RNA
gtcatttgatcttttttatg

SEQ ID NO: 44442 - RNA, 20 nt, synthetic construct
  source 1..20: mol_type = other RNA
gtcatttttaagaaatcgtt

SEQ ID NO: 44443 - RNA, 20 nt, synthetic construct
  source 1..20: mol_type = other RNA
gtcatttttcacttcttatt

SEQ ID NO: 44444 - RNA, 20 nt, synthetic construct
  source 1..20: mol_type = other RNA
gtcatttttgtattctgacc

SEQ ID NO: 44445 - RNA, 20 nt, synthetic construct
  source 1..20: mol_type = other RNA
gtccaaacagtgaccacagt

SEQ ID NO: 44446 - RNA, 20 nt, synthetic construct
  source 1..20: mol_type = other RNA
gtccaacaagggttggtgct

SEQ ID NO: 44447 - RNA, 20 nt, synthetic construct
  source 1..20: mol_type = other RNA
gtccaacatggcaaaacccc

SEQ ID NO: 44448 - RNA, 20 nt, synthetic construct
  source 1..20: mol_type = other RNA
gtccaaccaatcgcagggcc

SEQ ID NO: 44449 - RNA, 20 nt, synthetic construct
  source 1..20: mol_type = other RNA
gtccaagacaggaagaatta

SEQ ID NO: 44450 - RNA, 20 nt, synthetic construct
  source 1..20: mol_type = other RNA
gtccaagtatttctcatctg

SEQ ID NO: 44451 - RNA, 20 nt, synthetic construct
  source 1..20: mol_type = other RNA
gtccaatttctttggctgtt

SEQ ID NO: 44452 - RNA, 20 nt, synthetic construct
  source 1..20: mol_type = other RNA
gtccacacaatggtcagagt

SEQ ID NO: 44453 - RNA, 20 nt, synthetic construct
  source 1..20: mol_type = other RNA
gtccacagaggctttttata

SEQ ID NO: 44454 - RNA, 20 nt, synthetic construct
  source 1..20: mol_type = other RNA
gtccacagatctttttgtgt

SEQ ID NO: 44455 - RNA, 20 nt, synthetic construct
  source 1..20: mol_type = other RNA
gtccaccagacaaaaataga

SEQ ID NO: 44456 - RNA, 20 nt, synthetic construct
  source 1..20: mol_type = other RNA
gtccacctggcaacaaaggc

SEQ ID NO: 44457 - RNA, 20 nt, synthetic construct
  source 1..20: mol_type = other RNA
gtccactcacctgtcatgtc

SEQ ID NO: 44458 - RNA, 20 nt, synthetic construct
  source 1..20: mol_type = other RNA
gtccactgtcagtgggactg

SEQ ID NO: 44459 - RNA, 20 nt, synthetic construct
  source 1..20: mol_type = other RNA
gtccactttccatcttaggc

SEQ ID NO: 44460 - RNA, 20 nt, synthetic construct
  source 1..20: mol_type = other RNA
gtccagaggaggaagagata

SEQ ID NO: 44461 - RNA, 20 nt, synthetic construct
  source 1..20: mol_type = other RNA
gtccagaggtgagctttttc

SEQ ID NO: 44462 - RNA, 20 nt, synthetic construct
  source 1..20: mol_type = other RNA
gtccagatattatcctccaa

SEQ ID NO: 44463 - RNA, 20 nt, synthetic construct
  source 1..20: mol_type = other RNA
gtccagatgaagcagggaaa

SEQ ID NO: 44464 - RNA, 20 nt, synthetic construct
  source 1..20: mol_type = other RNA
gtccagcaccacccttgatg

SEQ ID NO: 44465 - RNA, 20 nt, synthetic construct
  source 1..20: mol_type = other RNA
gtccagcccccagttttgtt

SEQ ID NO: 44466 - RNA, 20 nt, synthetic construct
  source 1..20: mol_type = other RNA
gtccagcttcactcttctgc

SEQ ID NO: 44467 - RNA, 20 nt, synthetic construct
  source 1..20: mol_type = other RNA
gtccagctttctaattctga

SEQ ID NO: 44468 - RNA, 20 nt, synthetic construct
  source 1..20: mol_type = other RNA
gtccaggaacttacagtaag

SEQ ID NO: 44469 - RNA, 20 nt, synthetic construct
  source 1..20: mol_type = other RNA
gtccaggccaacagggccac

SEQ ID NO: 44470 - RNA, 20 nt, synthetic construct
  source 1..20: mol_type = other RNA
gtccaggcgcctgcattgca

SEQ ID NO: 44471 - RNA, 20 nt, synthetic construct
  source 1..20: mol_type = other RNA
gtccagtcctgctaacacct

SEQ ID NO: 44472 - RNA, 20 nt, synthetic construct
  source 1..20: mol_type = other RNA
gtccatagttaatgtgtgaa

SEQ ID NO: 44473 - RNA, 20 nt, synthetic construct
  source 1..20: mol_type = other RNA
gtccatcaacagcagaacaa

SEQ ID NO: 44474 - RNA, 20 nt, synthetic construct
  source 1..20: mol_type = other RNA
gtccatcaggaaaaccagtt

SEQ ID NO: 44475 - RNA, 20 nt, synthetic construct
  source 1..20: mol_type = other RNA
gtccatcgagagatgaatgg

SEQ ID NO: 44476 - RNA, 20 nt, synthetic construct
  source 1..20: mol_type = other RNA
gtccatctcccatcactaga

SEQ ID NO: 44477 - RNA, 20 nt, synthetic construct
  source 1..20: mol_type = other RNA
gtccatctggattatagtgg

SEQ ID NO: 44478 - RNA, 20 nt, synthetic construct
  source 1..20: mol_type = other RNA
gtccatgaaacttatttcca

SEQ ID NO: 44479 - RNA, 20 nt, synthetic construct
  source 1..20: mol_type = other RNA
gtccatgaagaaaacactcc

SEQ ID NO: 44480 - RNA, 20 nt, synthetic construct
  source 1..20: mol_type = other RNA
gtccatttccagtacttttt

SEQ ID NO: 44481 - RNA, 20 nt, synthetic construct
  source 1..20: mol_type = other RNA
gtccatttccttaagcacag

SEQ ID NO: 44482 - RNA, 20 nt, synthetic construct
  source 1..20: mol_type = other RNA
gtcccaaatgcaccaacacc

SEQ ID NO: 44483 - RNA, 20 nt, synthetic construct
  source 1..20: mol_type = other RNA
gtcccaaatgggagcatgca

SEQ ID NO: 44484 - RNA, 20 nt, synthetic construct
  source 1..20: mol_type = other RNA
gtcccactgacagtggacaa

SEQ ID NO: 44485 - RNA, 20 nt, synthetic construct
  source 1..20: mol_type = other RNA
gtcccagttcaaggtgttag

SEQ ID NO: 44486 - RNA, 20 nt, synthetic construct
  source 1..20: mol_type = other RNA
gtcccatcttccatacgaaa

SEQ ID NO: 44487 - RNA, 20 nt, synthetic construct
  source 1..20: mol_type = other RNA
gtcccatggtcaaatcaata

SEQ ID NO: 44488 - RNA, 20 nt, synthetic construct
  source 1..20: mol_type = other RNA
gtccccaactgcaaaacttt

SEQ ID NO: 44489 - RNA, 20 nt, synthetic construct
  source 1..20: mol_type = other RNA
gtccccacatgactggccat

SEQ ID NO: 44490 - RNA, 20 nt, synthetic construct
  source 1..20: mol_type = other RNA
gtccccaccgccttcctacc

SEQ ID NO: 44491 - RNA, 20 nt, synthetic construct
  source 1..20: mol_type = other RNA
gtccccagcatccactaggg

SEQ ID NO: 44492 - RNA, 20 nt, synthetic construct
  source 1..20: mol_type = other RNA
gtccccatctccacaaaaaa

SEQ ID NO: 44493 - RNA, 20 nt, synthetic construct
  source 1..20: mol_type = other RNA
gtcccccatcccctttaccc

SEQ ID NO: 44494 - RNA, 20 nt, synthetic construct
  source 1..20: mol_type = other RNA
gtccccggaggaggtggcgg

SEQ ID NO: 44495 - RNA, 20 nt, synthetic construct
  source 1..20: mol_type = other RNA
gtccccggtctttcctgatc

SEQ ID NO: 44496 - RNA, 20 nt, synthetic construct
  source 1..20: mol_type = other RNA
gtcccctagtggatgctggg

SEQ ID NO: 44497 - RNA, 20 nt, synthetic construct
  source 1..20: mol_type = other RNA
gtcccctggagttaattcca

SEQ ID NO: 44498 - RNA, 20 nt, synthetic construct
  source 1..20: mol_type = other RNA
gtcccctggggcctcagcat

SEQ ID NO: 44499 - RNA, 20 nt, synthetic construct
  source 1..20: mol_type = other RNA
gtcccctgtaattacatact

SEQ ID NO: 44500 - RNA, 20 nt, synthetic construct
  source 1..20: mol_type = other RNA
gtcccctgtccaagtatttc

SEQ ID NO: 44501 - RNA, 20 nt, synthetic construct
  source 1..20: mol_type = other RNA
gtcccggaagctgggctaga

SEQ ID NO: 44502 - RNA, 20 nt, synthetic construct
  source 1..20: mol_type = other RNA
gtcccggcatgcctctccca

SEQ ID NO: 44503 - RNA, 20 nt, synthetic construct
  source 1..20: mol_type = other RNA
gtccctaaacactgtagttc

SEQ ID NO: 44504 - RNA, 20 nt, synthetic construct
  source 1..20: mol_type = other RNA
gtccctaacagtctcgtgaa

SEQ ID NO: 44505 - RNA, 20 nt, synthetic construct
  source 1..20: mol_type = other RNA
gtccctagtgtctccatacc

SEQ ID NO: 44506 - RNA, 20 nt, synthetic construct
  source 1..20: mol_type = other RNA
gtccctattttctacaggta

SEQ ID NO: 44507 - RNA, 20 nt, synthetic construct
  source 1..20: mol_type = other RNA
gtccctcaccttctgctggg

SEQ ID NO: 44508 - RNA, 20 nt, synthetic construct
  source 1..20: mol_type = other RNA
gtccctcctttctagaatgc

SEQ ID NO: 44509 - RNA, 20 nt, synthetic construct
  source 1..20: mol_type = other RNA
gtccctgctactcaggagat

SEQ ID NO: 44510 - RNA, 20 nt, synthetic construct
  source 1..20: mol_type = other RNA
gtccctgctacttgtggggc

SEQ ID NO: 44511 - RNA, 20 nt, synthetic construct
  source 1..20: mol_type = other RNA
gtccctgcttggcgcagtgc

SEQ ID NO: 44512 - RNA, 20 nt, synthetic construct
  source 1..20: mol_type = other RNA
gtccctgctttcagttcttt

SEQ ID NO: 44513 - RNA, 20 nt, synthetic construct
  source 1..20: mol_type = other RNA
gtcccttgcctgacagcaaa

SEQ ID NO: 44514 - RNA, 20 nt, synthetic construct
  source 1..20: mol_type = other RNA
gtccgcctcggccgacccag

SEQ ID NO: 44515 - RNA, 20 nt, synthetic construct
  source 1..20: mol_type = other RNA
gtccgcggctgggctttctc

SEQ ID NO: 44516 - RNA, 20 nt, synthetic construct
  source 1..20: mol_type = other RNA
gtccggctctgcggcgggtc

SEQ ID NO: 44517 - RNA, 20 nt, synthetic construct
  source 1..20: mol_type = other RNA
gtccggtcgttggatttatc

SEQ ID NO: 44518 - RNA, 20 nt, synthetic construct
  source 1..20: mol_type = other RNA
gtccgtagaccgaggaaacc

SEQ ID NO: 44519 - RNA, 20 nt, synthetic construct
  source 1..20: mol_type = other RNA
gtccgtgcatgcctctgtta

SEQ ID NO: 44520 - RNA, 20 nt, synthetic construct
  source 1..20: mol_type = other RNA
gtccgttgaagtctttggcc

SEQ ID NO: 44521 - RNA, 20 nt, synthetic construct
  source 1..20: mol_type = other RNA
gtcctaaaattccttccttt

SEQ ID NO: 44522 - RNA, 20 nt, synthetic construct
  source 1..20: mol_type = other RNA
gtcctcaatcatgtcaagaa

SEQ ID NO: 44523 - RNA, 20 nt, synthetic construct
  source 1..20: mol_type = other RNA
gtcctcacctcacattcaca

SEQ ID NO: 44524 - RNA, 20 nt, synthetic construct
  source 1..20: mol_type = other RNA
gtcctcactgtgatacctag

SEQ ID NO: 44525 - RNA, 20 nt, synthetic construct
  source 1..20: mol_type = other RNA
gtcctcaggctccaggtaga

SEQ ID NO: 44526 - RNA, 20 nt, synthetic construct
  source 1..20: mol_type = other RNA
gtcctcgtaaaagctaatct

SEQ ID NO: 44527 - RNA, 20 nt, synthetic construct
  source 1..20: mol_type = other RNA
gtcctctactttcacataag

SEQ ID NO: 44528 - RNA, 20 nt, synthetic construct
  source 1..20: mol_type = other RNA
gtcctctcactccaaagcaa

SEQ ID NO: 44529 - RNA, 20 nt, synthetic construct
  source 1..20: mol_type = other RNA
gtcctctcttgttgaggatg

SEQ ID NO: 44530 - RNA, 20 nt, synthetic construct
  source 1..20: mol_type = other RNA
gtcctcttcgggtgtcagaa

SEQ ID NO: 44531 - RNA, 20 nt, synthetic construct
  source 1..20: mol_type = other RNA
gtcctgaaaattccttcccc

SEQ ID NO: 44532 - RNA, 20 nt, synthetic construct
  source 1..20: mol_type = other RNA
gtcctgaactcgtggcctca

SEQ ID NO: 44533 - RNA, 20 nt, synthetic construct
  source 1..20: mol_type = other RNA
gtcctgaatactattcctat

SEQ ID NO: 44534 - RNA, 20 nt, synthetic construct
  source 1..20: mol_type = other RNA
gtcctgaatgatttccctgc

SEQ ID NO: 44535 - RNA, 20 nt, synthetic construct
  source 1..20: mol_type = other RNA
gtcctgaattctaacattat

SEQ ID NO: 44536 - RNA, 20 nt, synthetic construct
  source 1..20: mol_type = other RNA
gtcctgaattctaatgaact

SEQ ID NO: 44537 - RNA, 20 nt, synthetic construct
  source 1..20: mol_type = other RNA
gtcctgagctttccttagtt

SEQ ID NO: 44538 - RNA, 20 nt, synthetic construct
  source 1..20: mol_type = other RNA
gtcctgagggctttgtgaag

SEQ ID NO: 44539 - RNA, 20 nt, synthetic construct
  source 1..20: mol_type = other RNA
gtcctgagggtgagaccacc

SEQ ID NO: 44540 - RNA, 20 nt, synthetic construct
  source 1..20: mol_type = other RNA
gtcctgcatatgtttttatt

SEQ ID NO: 44541 - RNA, 20 nt, synthetic construct
  source 1..20: mol_type = other RNA
gtcctgccttggcctcccca

SEQ ID NO: 44542 - RNA, 20 nt, synthetic construct
  source 1..20: mol_type = other RNA
gtcctgctaacaccttgaac

SEQ ID NO: 44543 - RNA, 20 nt, synthetic construct
  source 1..20: mol_type = other RNA
gtcctggaaaaagaccataa

SEQ ID NO: 44544 - RNA, 20 nt, synthetic construct
  source 1..20: mol_type = other RNA
gtcctggcagatcaattgac

SEQ ID NO: 44545 - RNA, 20 nt, synthetic construct
  source 1..20: mol_type = other RNA
gtcctgtcagtgtggttcat

SEQ ID NO: 44546 - RNA, 20 nt, synthetic construct
  source 1..20: mol_type = other RNA
gtcctgtcagtttctgattt

SEQ ID NO: 44547 - RNA, 20 nt, synthetic construct
  source 1..20: mol_type = other RNA
gtcctgtgtttctgctattc

SEQ ID NO: 44548 - RNA, 20 nt, synthetic construct
  source 1..20: mol_type = other RNA
gtcctgttcttttgtaatct

SEQ ID NO: 44549 - RNA, 20 nt, synthetic construct
  source 1..20: mol_type = other RNA
gtccttaaatttctaaggtt

SEQ ID NO: 44550 - RNA, 20 nt, synthetic construct
  source 1..20: mol_type = other RNA
gtccttaatgccaccgaatt

SEQ ID NO: 44551 - RNA, 20 nt, synthetic construct
  source 1..20: mol_type = other RNA
gtccttaccactgaagtgtt

SEQ ID NO: 44552 - RNA, 20 nt, synthetic construct
  source 1..20: mol_type = other RNA
gtccttccagtatgatgcca

SEQ ID NO: 44553 - RNA, 20 nt, synthetic construct
  source 1..20: mol_type = other RNA
gtccttctcgtgtgagctct

SEQ ID NO: 44554 - RNA, 20 nt, synthetic construct
  source 1..20: mol_type = other RNA
gtccttctgagaaggcgaaa

SEQ ID NO: 44555 - RNA, 20 nt, synthetic construct
  source 1..20: mol_type = other RNA
gtccttgctgaagaataact

SEQ ID NO: 44556 - RNA, 20 nt, synthetic construct
  source 1..20: mol_type = other RNA
gtccttggattgctaaactg

SEQ ID NO: 44557 - RNA, 20 nt, synthetic construct
  source 1..20: mol_type = other RNA
gtccttgtgatctatgcata

SEQ ID NO: 44558 - RNA, 20 nt, synthetic construct
  source 1..20: mol_type = other RNA
gtccttgtgttttatttggc

SEQ ID NO: 44559 - RNA, 20 nt, synthetic construct
  source 1..20: mol_type = other RNA
gtcctttccagaggttcttt

SEQ ID NO: 44560 - RNA, 20 nt, synthetic construct
  source 1..20: mol_type = other RNA
gtcctttcttggtctgcaga

SEQ ID NO: 44561 - RNA, 20 nt, synthetic construct
  source 1..20: mol_type = other RNA
gtcctttgatgcacaaaagt

SEQ ID NO: 44562 - RNA, 20 nt, synthetic construct
  source 1..20: mol_type = other RNA
gtcctttgggaggtcaaggc

SEQ ID NO: 44563 - RNA, 20 nt, synthetic construct
  source 1..20: mol_type = other RNA
gtcctttgtgtcaagtacaa

SEQ ID NO: 44564 - RNA, 20 nt, synthetic construct
  source 1..20: mol_type = other RNA
gtccttttcctgttccggga

SEQ ID NO: 44565 - RNA, 20 nt, synthetic construct
  source 1..20: mol_type = other RNA
gtccttttgagtttggtgta

SEQ ID NO: 44566 - RNA, 20 nt, synthetic construct
  source 1..20: mol_type = other RNA
gtccttttttactgactttt

SEQ ID NO: 44567 - RNA, 20 nt, synthetic construct
  source 1..20: mol_type = other RNA
gtcgaaaacctgaaatggct

SEQ ID NO: 44568 - RNA, 20 nt, synthetic construct
  source 1..20: mol_type = other RNA
gtcgaagcttaatttagatg

SEQ ID NO: 44569 - RNA, 20 nt, synthetic construct
  source 1..20: mol_type = other RNA
gtcgagaaaaatggggatat

SEQ ID NO: 44570 - RNA, 20 nt, synthetic construct
  source 1..20: mol_type = other RNA
gtcgagactgtaatgagctg

SEQ ID NO: 44571 - RNA, 20 nt, synthetic construct
  source 1..20: mol_type = other RNA
gtcgagctgggtgatgttca

SEQ ID NO: 44572 - RNA, 20 nt, synthetic construct
  source 1..20: mol_type = other RNA
gtcgcaccctgagcatcccc

SEQ ID NO: 44573 - RNA, 20 nt, synthetic construct
  source 1..20: mol_type = other RNA
gtcgcatgaaaacagctagg

SEQ ID NO: 44574 - RNA, 20 nt, synthetic construct
  source 1..20: mol_type = other RNA
gtcgccatacctggtcctta

SEQ ID NO: 44575 - RNA, 20 nt, synthetic construct
  source 1..20: mol_type = other RNA
gtcgcccaggcggaatgcag

SEQ ID NO: 44576 - RNA, 20 nt, synthetic construct
  source 1..20: mol_type = other RNA
gtcgcggacgcgcatttttt

SEQ ID NO: 44577 - RNA, 20 nt, synthetic construct
  source 1..20: mol_type = other RNA
gtcgctctcctgtgccaagt

SEQ ID NO: 44578 - RNA, 20 nt, synthetic construct
  source 1..20: mol_type = other RNA
gtcgcttgaacctgaaaaac

SEQ ID NO: 44579 - RNA, 20 nt, synthetic construct
  source 1..20: mol_type = other RNA
gtcggaaggaatgtgcttcc

SEQ ID NO: 44580 - RNA, 20 nt, synthetic construct
  source 1..20: mol_type = other RNA
gtcgggctgcctcagccgcc

SEQ ID NO: 44581 - RNA, 20 nt, synthetic construct
  source 1..20: mol_type = other RNA
gtcgggtgtcagaaaccatc

SEQ ID NO: 44582 - RNA, 20 nt, synthetic construct
  source 1..20: mol_type = other RNA
gtcggtatgttaataaccct

SEQ ID NO: 44583 - RNA, 20 nt, synthetic construct
  source 1..20: mol_type = other RNA
gtcggttcttcaccgtgcaa

SEQ ID NO: 44584 - RNA, 20 nt, synthetic construct
  source 1..20: mol_type = other RNA
gtcggttttctagttagttt

SEQ ID NO: 44585 - RNA, 20 nt, synthetic construct
  source 1..20: mol_type = other RNA
gtcgtacctttcgctatcag

SEQ ID NO: 44586 - RNA, 20 nt, synthetic construct
  source 1..20: mol_type = other RNA
gtcgtcccccatccccttta

SEQ ID NO: 44587 - RNA, 20 nt, synthetic construct
  source 1..20: mol_type = other RNA
gtcgttgagtacctctggga

SEQ ID NO: 44588 - RNA, 20 nt, synthetic construct
  source 1..20: mol_type = other RNA
gtcgttggatttatctttct

SEQ ID NO: 44589 - RNA, 20 nt, synthetic construct
  source 1..20: mol_type = other RNA
gtcgtttatgcatttattag

SEQ ID NO: 44590 - RNA, 20 nt, synthetic construct
  source 1..20: mol_type = other RNA
gtcgtttatttcttctccct

SEQ ID NO: 44591 - RNA, 20 nt, synthetic construct
  source 1..20: mol_type = other RNA
gtcgtttcagattgcttgag

SEQ ID NO: 44592 - RNA, 20 nt, synthetic construct
  source 1..20: mol_type = other RNA
gtctaaagtattgtttcaat

SEQ ID NO: 44593 - RNA, 20 nt, synthetic construct
  source 1..20: mol_type = other RNA
gtctaaccattaacagctca

SEQ ID NO: 44594 - RNA, 20 nt, synthetic construct
  source 1..20: mol_type = other RNA
gtctaagagataactaatga

SEQ ID NO: 44595 - RNA, 20 nt, synthetic construct
  source 1..20: mol_type = other RNA
gtctaatgggtacagggttt

SEQ ID NO: 44596 - RNA, 20 nt, synthetic construct
  source 1..20: mol_type = other RNA
gtctaattttttagtcttgt

SEQ ID NO: 44597 - RNA, 20 nt, synthetic construct
  source 1..20: mol_type = other RNA
gtctacaaaaggtttccagt

SEQ ID NO: 44598 - RNA, 20 nt, synthetic construct
  source 1..20: mol_type = other RNA
gtctaccatgttgttctttt

SEQ ID NO: 44599 - RNA, 20 nt, synthetic construct
  source 1..20: mol_type = other RNA
gtctacctgtctttcccatt

SEQ ID NO: 44600 - RNA, 20 nt, synthetic construct
  source 1..20: mol_type = other RNA
gtctacggacgcaggcaaac

SEQ ID NO: 44601 - RNA, 20 nt, synthetic construct
  source 1..20: mol_type = other RNA
gtctagccacttcctattag

SEQ ID NO: 44602 - RNA, 20 nt, synthetic construct
  source 1..20: mol_type = other RNA
gtctaggaaaagacttgagg

SEQ ID NO: 44603 - RNA, 20 nt, synthetic construct
  source 1..20: mol_type = other RNA
gtctaggctaatgtgtgttc

SEQ ID NO: 44604 - RNA, 20 nt, synthetic construct
  source 1..20: mol_type = other RNA
gtctagtccatgaagaaaac

SEQ ID NO: 44605 - RNA, 20 nt, synthetic construct
  source 1..20: mol_type = other RNA
gtctagtgaatgagaccaaa

SEQ ID NO: 44606 - RNA, 20 nt, synthetic construct
  source 1..20: mol_type = other RNA
gtctagtgtgcatgtgttgt

SEQ ID NO: 44607 - RNA, 20 nt, synthetic construct
  source 1..20: mol_type = other RNA
gtctataggcaatgagtctg

SEQ ID NO: 44608 - RNA, 20 nt, synthetic construct
  source 1..20: mol_type = other RNA
gtctatagtttaattggggg

SEQ ID NO: 44609 - RNA, 20 nt, synthetic construct
  source 1..20: mol_type = other RNA
gtctatctcattataacata

SEQ ID NO: 44610 - RNA, 20 nt, synthetic construct
  source 1..20: mol_type = other RNA
gtctatctttgggaaaatct

SEQ ID NO: 44611 - RNA, 20 nt, synthetic construct
  source 1..20: mol_type = other RNA
gtctatgctcttggtttctt

SEQ ID NO: 44612 - RNA, 20 nt, synthetic construct
  source 1..20: mol_type = other RNA
gtctatgtgacagaatgcat

SEQ ID NO: 44613 - RNA, 20 nt, synthetic construct
  source 1..20: mol_type = other RNA
gtctattccctacattgcct

SEQ ID NO: 44614 - RNA, 20 nt, synthetic construct
  source 1..20: mol_type = other RNA
gtctatttctgaacaaatat

SEQ ID NO: 44615 - RNA, 20 nt, synthetic construct
  source 1..20: mol_type = other RNA
gtctcaaaacaaacaaacag

SEQ ID NO: 44616 - RNA, 20 nt, synthetic construct
  source 1..20: mol_type = other RNA
gtctcaaaatttaaagttag

SEQ ID NO: 44617 - RNA, 20 nt, synthetic construct
  source 1..20: mol_type = other RNA
gtctcaaactccaagtctca

SEQ ID NO: 44618 - RNA, 20 nt, synthetic construct
  source 1..20: mol_type = other RNA
gtctcaacctactttaaatc

SEQ ID NO: 44619 - RNA, 20 nt, synthetic construct
  source 1..20: mol_type = other RNA
gtctcaacctttgcctcctg

SEQ ID NO: 44620 - RNA, 20 nt, synthetic construct
  source 1..20: mol_type = other RNA
gtctcaagattgtgtgattt

SEQ ID NO: 44621 - RNA, 20 nt, synthetic construct
  source 1..20: mol_type = other RNA
gtctcaatctcctgatccac

SEQ ID NO: 44622 - RNA, 20 nt, synthetic construct
  source 1..20: mol_type = other RNA
gtctcacactgttgtccagg

SEQ ID NO: 44623 - RNA, 20 nt, synthetic construct
  source 1..20: mol_type = other RNA
gtctcaccctcaggactctg

SEQ ID NO: 44624 - RNA, 20 nt, synthetic construct
  source 1..20: mol_type = other RNA
gtctcacctcaaggccaact

SEQ ID NO: 44625 - RNA, 20 nt, synthetic construct
  source 1..20: mol_type = other RNA
gtctcacgatactttttatt

SEQ ID NO: 44626 - RNA, 20 nt, synthetic construct
  source 1..20: mol_type = other RNA
gtctcactcttaccaaggct

SEQ ID NO: 44627 - RNA, 20 nt, synthetic construct
  source 1..20: mol_type = other RNA
gtctcagagtatatatgctc

SEQ ID NO: 44628 - RNA, 20 nt, synthetic construct
  source 1..20: mol_type = other RNA
gtctcagatgtctccatttt

SEQ ID NO: 44629 - RNA, 20 nt, synthetic construct
  source 1..20: mol_type = other RNA
gtctcagccttttctgattt

SEQ ID NO: 44630 - RNA, 20 nt, synthetic construct
  source 1..20: mol_type = other RNA
gtctcagctcctcagaaggc

SEQ ID NO: 44631 - RNA, 20 nt, synthetic construct
  source 1..20: mol_type = other RNA
gtctcagtcccaaatgggag

SEQ ID NO: 44632 - RNA, 20 nt, synthetic construct
  source 1..20: mol_type = other RNA
gtctcataaagccggattcc

SEQ ID NO: 44633 - RNA, 20 nt, synthetic construct
  source 1..20: mol_type = other RNA
gtctcatctgtcaaaaagag

SEQ ID NO: 44634 - RNA, 20 nt, synthetic construct
  source 1..20: mol_type = other RNA
gtctcatgcaattccccagc

SEQ ID NO: 44635 - RNA, 20 nt, synthetic construct
  source 1..20: mol_type = other RNA
gtctcattcactagacacat

SEQ ID NO: 44636 - RNA, 20 nt, synthetic construct
  source 1..20: mol_type = other RNA
gtctcattgtggatgagatt

SEQ ID NO: 44637 - RNA, 20 nt, synthetic construct
  source 1..20: mol_type = other RNA
gtctcatttaataactaaac

SEQ ID NO: 44638 - RNA, 20 nt, synthetic construct
  source 1..20: mol_type = other RNA
gtctccaacgctttttatgg

SEQ ID NO: 44639 - RNA, 20 nt, synthetic construct
  source 1..20: mol_type = other RNA
gtctccaatcctcagccccc

SEQ ID NO: 44640 - RNA, 20 nt, synthetic construct
  source 1..20: mol_type = other RNA
gtctccatacaaggagacct

SEQ ID NO: 44641 - RNA, 20 nt, synthetic construct
  source 1..20: mol_type = other RNA
gtctccataccccctggaaa

SEQ ID NO: 44642 - RNA, 20 nt, synthetic construct
  source 1..20: mol_type = other RNA
gtctccatgtcctcacctca

SEQ ID NO: 44643 - RNA, 20 nt, synthetic construct
  source 1..20: mol_type = other RNA
gtctccattttgccagctaa

SEQ ID NO: 44644 - RNA, 20 nt, synthetic construct
  source 1..20: mol_type = other RNA
gtctccattttggtcttacc

SEQ ID NO: 44645 - RNA, 20 nt, synthetic construct
  source 1..20: mol_type = other RNA
gtctcccagcatgaagccct

SEQ ID NO: 44646 - RNA, 20 nt, synthetic construct
  source 1..20: mol_type = other RNA
gtctcccccaggtggttctg

SEQ ID NO: 44647 - RNA, 20 nt, synthetic construct
  source 1..20: mol_type = other RNA
gtctccctaaccaggcccgg

SEQ ID NO: 44648 - RNA, 20 nt, synthetic construct
  source 1..20: mol_type = other RNA
gtctccctcggccacagcag

SEQ ID NO: 44649 - RNA, 20 nt, synthetic construct
  source 1..20: mol_type = other RNA
gtctcctatattgtcaatgg

SEQ ID NO: 44650 - RNA, 20 nt, synthetic construct
  source 1..20: mol_type = other RNA
gtctcctctttcatatctga

SEQ ID NO: 44651 - RNA, 20 nt, synthetic construct
  source 1..20: mol_type = other RNA
gtctccttgtatggagacta

SEQ ID NO: 44652 - RNA, 20 nt, synthetic construct
  source 1..20: mol_type = other RNA
gtctcctttctatacttcat

SEQ ID NO: 44653 - RNA, 20 nt, synthetic construct
  source 1..20: mol_type = other RNA
gtctcgaaaaggaatggaat

SEQ ID NO: 44654 - RNA, 20 nt, synthetic construct
  source 1..20: mol_type = other RNA
gtctcgaactctcgacctcg

SEQ ID NO: 44655 - RNA, 20 nt, synthetic construct
  source 1..20: mol_type = other RNA
gtctcgaccccctgggctca

SEQ ID NO: 44656 - RNA, 20 nt, synthetic construct
  source 1..20: mol_type = other RNA
gtctcgagctcctgacctca

SEQ ID NO: 44657 - RNA, 20 nt, synthetic construct
  source 1..20: mol_type = other RNA
gtctcgctctgtcgcccagg

SEQ ID NO: 44658 - RNA, 20 nt, synthetic construct
  source 1..20: mol_type = other RNA
gtctcggatttaagagagga

SEQ ID NO: 44659 - RNA, 20 nt, synthetic construct
  source 1..20: mol_type = other RNA
gtctcgtgaatttggtattc

SEQ ID NO: 44660 - RNA, 20 nt, synthetic construct
  source 1..20: mol_type = other RNA
gtctctaaaaaataccaaaa

SEQ ID NO: 44661 - RNA, 20 nt, synthetic construct
  source 1..20: mol_type = other RNA
gtctctacccagcactctga

SEQ ID NO: 44662 - RNA, 20 nt, synthetic construct
  source 1..20: mol_type = other RNA
gtctctctgaaattagctaa

SEQ ID NO: 44663 - RNA, 20 nt, synthetic construct
  source 1..20: mol_type = other RNA
gtctctgacatgagagctaa

SEQ ID NO: 44664 - RNA, 20 nt, synthetic construct
  source 1..20: mol_type = other RNA
gtctctgcaaaaaatgtttg

SEQ ID NO: 44665 - RNA, 20 nt, synthetic construct
  source 1..20: mol_type = other RNA
gtctctgcaacatttgttgc

SEQ ID NO: 44666 - RNA, 20 nt, synthetic construct
  source 1..20: mol_type = other RNA
gtctctgcagagcaggctcc

SEQ ID NO: 44667 - RNA, 20 nt, synthetic construct
  source 1..20: mol_type = other RNA
gtctctgctcactgcaacct

SEQ ID NO: 44668 - RNA, 20 nt, synthetic construct
  source 1..20: mol_type = other RNA
gtctctgctctcaagtaatt

SEQ ID NO: 44669 - RNA, 20 nt, synthetic construct
  source 1..20: mol_type = other RNA
gtctctggaaggctaagcat

SEQ ID NO: 44670 - RNA, 20 nt, synthetic construct
  source 1..20: mol_type = other RNA
gtctcttaagaccacaagga

SEQ ID NO: 44671 - RNA, 20 nt, synthetic construct
  source 1..20: mol_type = other RNA
gtctcttcctgtatatctcc

SEQ ID NO: 44672 - RNA, 20 nt, synthetic construct
  source 1..20: mol_type = other RNA
gtctcttcgagggggctgag

SEQ ID NO: 44673 - RNA, 20 nt, synthetic construct
  source 1..20: mol_type = other RNA
gtctctttgaaaggaatccg

SEQ ID NO: 44674 - RNA, 20 nt, synthetic construct
  source 1..20: mol_type = other RNA
gtctgaaagcttctgagcag

SEQ ID NO: 44675 - RNA, 20 nt, synthetic construct
  source 1..20: mol_type = other RNA
gtctgacatactgtcacagg

SEQ ID NO: 44676 - RNA, 20 nt, synthetic construct
  source 1..20: mol_type = other RNA
gtctgactacactgaaggga

SEQ ID NO: 44677 - RNA, 20 nt, synthetic construct
  source 1..20: mol_type = other RNA
gtctgacttctctcagaggg

SEQ ID NO: 44678 - RNA, 20 nt, synthetic construct
  source 1..20: mol_type = other RNA
gtctgatgtgtgtctctgct

SEQ ID NO: 44679 - RNA, 20 nt, synthetic construct
  source 1..20: mol_type = other RNA
gtctgcaagcagatctgctg

SEQ ID NO: 44680 - RNA, 20 nt, synthetic construct
  source 1..20: mol_type = other RNA
gtctgcagaccaagaaagga

SEQ ID NO: 44681 - RNA, 20 nt, synthetic construct
  source 1..20: mol_type = other RNA
gtctgcagactcttgtcccg

SEQ ID NO: 44682 - RNA, 20 nt, synthetic construct
  source 1..20: mol_type = other RNA
gtctgcaggagccttgctgt

SEQ ID NO: 44683 - RNA, 20 nt, synthetic construct
  source 1..20: mol_type = other RNA
gtctgcaggcagaatgtgac

SEQ ID NO: 44684 - RNA, 20 nt, synthetic construct
  source 1..20: mol_type = other RNA
gtctgcccatcctatctaag

SEQ ID NO: 44685 - RNA, 20 nt, synthetic construct
  source 1..20: mol_type = other RNA
gtctgcgccttaaagccaca

SEQ ID NO: 44686 - RNA, 20 nt, synthetic construct
  source 1..20: mol_type = other RNA
gtctgctacaggggcattcc

SEQ ID NO: 44687 - RNA, 20 nt, synthetic construct
  source 1..20: mol_type = other RNA
gtctggaacacacattagcc

SEQ ID NO: 44688 - RNA, 20 nt, synthetic construct
  source 1..20: mol_type = other RNA
gtctggaatgtgtagttctg

SEQ ID NO: 44689 - RNA, 20 nt, synthetic construct
  source 1..20: mol_type = other RNA
gtctggattgattccagttt

SEQ ID NO: 44690 - RNA, 20 nt, synthetic construct
  source 1..20: mol_type = other RNA
gtctgggaagttatgtagct

SEQ ID NO: 44691 - RNA, 20 nt, synthetic construct
  source 1..20: mol_type = other RNA
gtctgggataatgagtttaa

SEQ ID NO: 44692 - RNA, 20 nt, synthetic construct
  source 1..20: mol_type = other RNA
gtctgggtgatatctgtaag

SEQ ID NO: 44693 - RNA, 20 nt, synthetic construct
  source 1..20: mol_type = other RNA
gtctggtatctaccaaaaaa

SEQ ID NO: 44694 - RNA, 20 nt, synthetic construct
  source 1..20: mol_type = other RNA
gtctggtggacaaaaaacgc

SEQ ID NO: 44695 - RNA, 20 nt, synthetic construct
  source 1..20: mol_type = other RNA
gtctggtttgctttggagtc

SEQ ID NO: 44696 - RNA, 20 nt, synthetic construct
  source 1..20: mol_type = other RNA
gtctgtaagcacctgtataa

SEQ ID NO: 44697 - RNA, 20 nt, synthetic construct
  source 1..20: mol_type = other RNA
gtctgtaagtcagttaacag

SEQ ID NO: 44698 - RNA, 20 nt, synthetic construct
  source 1..20: mol_type = other RNA
gtctgtagcttcacgtgcat

SEQ ID NO: 44699 - RNA, 20 nt, synthetic construct
  source 1..20: mol_type = other RNA
gtctgtagggtgactagtgt

SEQ ID NO: 44700 - RNA, 20 nt, synthetic construct
  source 1..20: mol_type = other RNA
gtctgtagttacaactactc

SEQ ID NO: 44701 - RNA, 20 nt, synthetic construct
  source 1..20: mol_type = other RNA
gtctgtatttctgctttggt

SEQ ID NO: 44702 - RNA, 20 nt, synthetic construct
  source 1..20: mol_type = other RNA
gtctgtcctcgtaaaagcta

SEQ ID NO: 44703 - RNA, 20 nt, synthetic construct
  source 1..20: mol_type = other RNA
gtctgtctcacctcaaggcc

SEQ ID NO: 44704 - RNA, 20 nt, synthetic construct
  source 1..20: mol_type = other RNA
gtctgtctgttcacatttcg

SEQ ID NO: 44705 - RNA, 20 nt, synthetic construct
  source 1..20: mol_type = other RNA
gtctgtctttcagtatgtgt

SEQ ID NO: 44706 - RNA, 20 nt, synthetic construct
  source 1..20: mol_type = other RNA
gtctgtgaaaataataccta

SEQ ID NO: 44707 - RNA, 20 nt, synthetic construct
  source 1..20: mol_type = other RNA
gtctgtgatgtagaggcagt

SEQ ID NO: 44708 - RNA, 20 nt, synthetic construct
  source 1..20: mol_type = other RNA
gtctgtgattatcagggata

SEQ ID NO: 44709 - RNA, 20 nt, synthetic construct
  source 1..20: mol_type = other RNA
gtctgtgctctgtatttaat

SEQ ID NO: 44710 - RNA, 20 nt, synthetic construct
  source 1..20: mol_type = other RNA
gtctgtgcttaaggaaatgg

SEQ ID NO: 44711 - RNA, 20 nt, synthetic construct
  source 1..20: mol_type = other RNA
gtctgtggtctcagctcctc

SEQ ID NO: 44712 - RNA, 20 nt, synthetic construct
  source 1..20: mol_type = other RNA
gtctgtgtagttcatcagca

SEQ ID NO: 44713 - RNA, 20 nt, synthetic construct
  source 1..20: mol_type = other RNA
gtctgttactcccgatttca

SEQ ID NO: 44714 - RNA, 20 nt, synthetic construct
  source 1..20: mol_type = other RNA
gtctgttcacatttcgcctt

SEQ ID NO: 44715 - RNA, 20 nt, synthetic construct
  source 1..20: mol_type = other RNA
gtctgtttgccatcttcaag

SEQ ID NO: 44716 - RNA, 20 nt, synthetic construct
  source 1..20: mol_type = other RNA
gtctgttttacatgtttaac

SEQ ID NO: 44717 - RNA, 20 nt, synthetic construct
  source 1..20: mol_type = other RNA
gtcttaaccattgagccaaa

SEQ ID NO: 44718 - RNA, 20 nt, synthetic construct
  source 1..20: mol_type = other RNA
gtcttaagaaggaaaagaac

SEQ ID NO: 44719 - RNA, 20 nt, synthetic construct
  source 1..20: mol_type = other RNA
gtcttaagagactctcaaga

SEQ ID NO: 44720 - RNA, 20 nt, synthetic construct
  source 1..20: mol_type = other RNA
gtcttaatcctattttgtta

SEQ ID NO: 44721 - RNA, 20 nt, synthetic construct
  source 1..20: mol_type = other RNA
gtcttacataggcttagtac

SEQ ID NO: 44722 - RNA, 20 nt, synthetic construct
  source 1..20: mol_type = other RNA
gtcttaccctctagctcccc

SEQ ID NO: 44723 - RNA, 20 nt, synthetic construct
  source 1..20: mol_type = other RNA
gtcttagctcttaagcttag

SEQ ID NO: 44724 - RNA, 20 nt, synthetic construct
  source 1..20: mol_type = other RNA
gtcttagtctgacttctctc

SEQ ID NO: 44725 - RNA, 20 nt, synthetic construct
  source 1..20: mol_type = other RNA
gtcttagttctgcttccaca

SEQ ID NO: 44726 - RNA, 20 nt, synthetic construct
  source 1..20: mol_type = other RNA
gtcttataggttgaataggg

SEQ ID NO: 44727 - RNA, 20 nt, synthetic construct
  source 1..20: mol_type = other RNA
gtcttatgctggtgggcttt

SEQ ID NO: 44728 - RNA, 20 nt, synthetic construct
  source 1..20: mol_type = other RNA
gtcttattgttttgatttgc

SEQ ID NO: 44729 - RNA, 20 nt, synthetic construct
  source 1..20: mol_type = other RNA
gtcttcaacctcaactttag

SEQ ID NO: 44730 - RNA, 20 nt, synthetic construct
  source 1..20: mol_type = other RNA
gtcttcagaggccctggtgc

SEQ ID NO: 44731 - RNA, 20 nt, synthetic construct
  source 1..20: mol_type = other RNA
gtcttcaggtctctctgaaa

SEQ ID NO: 44732 - RNA, 20 nt, synthetic construct
  source 1..20: mol_type = other RNA
gtcttccaaaatattgaaga

SEQ ID NO: 44733 - RNA, 20 nt, synthetic construct
  source 1..20: mol_type = other RNA
gtcttccaattgcagaaaaa

SEQ ID NO: 44734 - RNA, 20 nt, synthetic construct
  source 1..20: mol_type = other RNA
gtcttccattttagatcaag

SEQ ID NO: 44735 - RNA, 20 nt, synthetic construct
  source 1..20: mol_type = other RNA
gtcttccgtctcaagattgt

SEQ ID NO: 44736 - RNA, 20 nt, synthetic construct
  source 1..20: mol_type = other RNA
gtcttctaaccctcaaatgc

SEQ ID NO: 44737 - RNA, 20 nt, synthetic construct
  source 1..20: mol_type = other RNA
gtcttctactgtgaattcac

SEQ ID NO: 44738 - RNA, 20 nt, synthetic construct
  source 1..20: mol_type = other RNA
gtcttctagctttcagcact

SEQ ID NO: 44739 - RNA, 20 nt, synthetic construct
  source 1..20: mol_type = other RNA
gtcttctcagatctgttgca

SEQ ID NO: 44740 - RNA, 20 nt, synthetic construct
  source 1..20: mol_type = other RNA
gtcttctcatacagatttta

SEQ ID NO: 44741 - RNA, 20 nt, synthetic construct
  source 1..20: mol_type = other RNA
gtcttctgtttttcttagtc

SEQ ID NO: 44742 - RNA, 20 nt, synthetic construct
  source 1..20: mol_type = other RNA
gtcttcttctaagctaagag

SEQ ID NO: 44743 - RNA, 20 nt, synthetic construct
  source 1..20: mol_type = other RNA
gtcttcttggattttcttca

SEQ ID NO: 44744 - RNA, 20 nt, synthetic construct
  source 1..20: mol_type = other RNA
gtcttgaatagcatcttagc

SEQ ID NO: 44745 - RNA, 20 nt, synthetic construct
  source 1..20: mol_type = other RNA
gtcttgatgatagaatacca

SEQ ID NO: 44746 - RNA, 20 nt, synthetic construct
  source 1..20: mol_type = other RNA
gtcttgctctgtcacccacg

SEQ ID NO: 44747 - RNA, 20 nt, synthetic construct
  source 1..20: mol_type = other RNA
gtcttgctggaagttggccc

SEQ ID NO: 44748 - RNA, 20 nt, synthetic construct
  source 1..20: mol_type = other RNA
gtcttggacccatgcccatg

SEQ ID NO: 44749 - RNA, 20 nt, synthetic construct
  source 1..20: mol_type = other RNA
gtcttggctattgtcagtaa

SEQ ID NO: 44750 - RNA, 20 nt, synthetic construct
  source 1..20: mol_type = other RNA
gtcttggtagtttgcacgtt

SEQ ID NO: 44751 - RNA, 20 nt, synthetic construct
  source 1..20: mol_type = other RNA
gtcttggtgtgctcttttca

SEQ ID NO: 44752 - RNA, 20 nt, synthetic construct
  source 1..20: mol_type = other RNA
gtcttgtactcccagcctca

SEQ ID NO: 44753 - RNA, 20 nt, synthetic construct
  source 1..20: mol_type = other RNA
gtcttgtcaataatttggat

SEQ ID NO: 44754 - RNA, 20 nt, synthetic construct
  source 1..20: mol_type = other RNA
gtcttgtcataacagtattg

SEQ ID NO: 44755 - RNA, 20 nt, synthetic construct
  source 1..20: mol_type = other RNA
gtcttgtctcaacctttgcc

SEQ ID NO: 44756 - RNA, 20 nt, synthetic construct
  source 1..20: mol_type = other RNA
gtcttgtgcatcctttatac

SEQ ID NO: 44757 - RNA, 20 nt, synthetic construct
  source 1..20: mol_type = other RNA
gtcttgtggctgacatgtgt

SEQ ID NO: 44758 - RNA, 20 nt, synthetic construct
  source 1..20: mol_type = other RNA
gtcttgtttacccagtgtgt

SEQ ID NO: 44759 - RNA, 20 nt, synthetic construct
  source 1..20: mol_type = other RNA
gtctttaaaagaaagctctc

SEQ ID NO: 44760 - RNA, 20 nt, synthetic construct
  source 1..20: mol_type = other RNA
gtctttcagtatgtgtctct

SEQ ID NO: 44761 - RNA, 20 nt, synthetic construct
  source 1..20: mol_type = other RNA
gtctttcccattaccaaaac

SEQ ID NO: 44762 - RNA, 20 nt, synthetic construct
  source 1..20: mol_type = other RNA
gtctttcctgatcagcaccc

SEQ ID NO: 44763 - RNA, 20 nt, synthetic construct
  source 1..20: mol_type = other RNA
gtctttctcccaggtcagta

SEQ ID NO: 44764 - RNA, 20 nt, synthetic construct
  source 1..20: mol_type = other RNA
gtctttctgtctgctttttt

SEQ ID NO: 44765 - RNA, 20 nt, synthetic construct
  source 1..20: mol_type = other RNA
gtctttgatccattttgagt

SEQ ID NO: 44766 - RNA, 20 nt, synthetic construct
  source 1..20: mol_type = other RNA
gtctttggcccatatccttt

SEQ ID NO: 44767 - RNA, 20 nt, synthetic construct
  source 1..20: mol_type = other RNA
gtctttggcccattttcgaa

SEQ ID NO: 44768 - RNA, 20 nt, synthetic construct
  source 1..20: mol_type = other RNA
gtctttggctcttagaaaat

SEQ ID NO: 44769 - RNA, 20 nt, synthetic construct
  source 1..20: mol_type = other RNA
gtctttgggaaggccctgat

SEQ ID NO: 44770 - RNA, 20 nt, synthetic construct
  source 1..20: mol_type = other RNA
gtctttgggtaatttatctc

SEQ ID NO: 44771 - RNA, 20 nt, synthetic construct
  source 1..20: mol_type = other RNA
gtctttggtgatcctaagcc

SEQ ID NO: 44772 - RNA, 20 nt, synthetic construct
  source 1..20: mol_type = other RNA
gtctttgtctattccctaca

SEQ ID NO: 44773 - RNA, 20 nt, synthetic construct
  source 1..20: mol_type = other RNA
gtcttttaacttgctttgaa

SEQ ID NO: 44774 - RNA, 20 nt, synthetic construct
  source 1..20: mol_type = other RNA
gtcttttagccaacaaccat

SEQ ID NO: 44775 - RNA, 20 nt, synthetic construct
  source 1..20: mol_type = other RNA
gtcttttcctaccctgagga

SEQ ID NO: 44776 - RNA, 20 nt, synthetic construct
  source 1..20: mol_type = other RNA
gtcttttcctagactgccag

SEQ ID NO: 44777 - RNA, 20 nt, synthetic construct
  source 1..20: mol_type = other RNA
gtcttttctatctgaacatt

SEQ ID NO: 44778 - RNA, 20 nt, synthetic construct
  source 1..20: mol_type = other RNA
gtcttttgaagaagttctta

SEQ ID NO: 44779 - RNA, 20 nt, synthetic construct
  source 1..20: mol_type = other RNA
gtctttttacacttggagtt

SEQ ID NO: 44780 - RNA, 20 nt, synthetic construct
  source 1..20: mol_type = other RNA
gtctttttatattatgtgca

SEQ ID NO: 44781 - RNA, 20 nt, synthetic construct
  source 1..20: mol_type = other RNA
gtctttttccaggaccaatt

SEQ ID NO: 44782 - RNA, 20 nt, synthetic construct
  source 1..20: mol_type = other RNA
gtctttttgtgacttgttta

SEQ ID NO: 44783 - RNA, 20 nt, synthetic construct
  source 1..20: mol_type = other RNA
gtgaaaaaacaaaacaaaac

SEQ ID NO: 44784 - RNA, 20 nt, synthetic construct
  source 1..20: mol_type = other RNA
gtgaaaaaatggtgcagcca

SEQ ID NO: 44785 - RNA, 20 nt, synthetic construct
  source 1..20: mol_type = other RNA
gtgaaaaatgacctaaaatc

SEQ ID NO: 44786 - RNA, 20 nt, synthetic construct
  source 1..20: mol_type = other RNA
gtgaaaaatttgacatgaca

SEQ ID NO: 44787 - RNA, 20 nt, synthetic construct
  source 1..20: mol_type = other RNA
gtgaaaacacaaactgcaga

SEQ ID NO: 44788 - RNA, 20 nt, synthetic construct
  source 1..20: mol_type = other RNA
gtgaaaactaaggtcaagag

SEQ ID NO: 44789 - RNA, 20 nt, synthetic construct
  source 1..20: mol_type = other RNA
gtgaaaagaaaaaggttaag

SEQ ID NO: 44790 - RNA, 20 nt, synthetic construct
  source 1..20: mol_type = other RNA
gtgaaaagaaacaagtgaaa

SEQ ID NO: 44791 - RNA, 20 nt, synthetic construct
  source 1..20: mol_type = other RNA
gtgaaaaggcaaaccacaca

SEQ ID NO: 44792 - RNA, 20 nt, synthetic construct
  source 1..20: mol_type = other RNA
gtgaaaataatacctaacag

SEQ ID NO: 44793 - RNA, 20 nt, synthetic construct
  source 1..20: mol_type = other RNA
gtgaaaatactaacgatcct

SEQ ID NO: 44794 - RNA, 20 nt, synthetic construct
  source 1..20: mol_type = other RNA
gtgaaaatcattttggcaaa

SEQ ID NO: 44795 - RNA, 20 nt, synthetic construct
  source 1..20: mol_type = other RNA
gtgaaaccaagcaagtaaaa

SEQ ID NO: 44796 - RNA, 20 nt, synthetic construct
  source 1..20: mol_type = other RNA
gtgaaactctggctcagaaa

SEQ ID NO: 44797 - RNA, 20 nt, synthetic construct
  source 1..20: mol_type = other RNA
gtgaaacttgaatactcgtg

SEQ ID NO: 44798 - RNA, 20 nt, synthetic construct
  source 1..20: mol_type = other RNA
gtgaaaggcaaaggaaaaaa

SEQ ID NO: 44799 - RNA, 20 nt, synthetic construct
  source 1..20: mol_type = other RNA
gtgaaagtagaggactgcct

SEQ ID NO: 44800 - RNA, 20 nt, synthetic construct
  source 1..20: mol_type = other RNA
gtgaaagtattaaaagcaca

SEQ ID NO: 44801 - RNA, 20 nt, synthetic construct
  source 1..20: mol_type = other RNA
gtgaaagtctccctaaccag

SEQ ID NO: 44802 - RNA, 20 nt, synthetic construct
  source 1..20: mol_type = other RNA
gtgaaatagttggtcagaaa

SEQ ID NO: 44803 - RNA, 20 nt, synthetic construct
  source 1..20: mol_type = other RNA
gtgaaatatattatggtctt

SEQ ID NO: 44804 - RNA, 20 nt, synthetic construct
  source 1..20: mol_type = other RNA
gtgaaatcataaaatatgtc

SEQ ID NO: 44805 - RNA, 20 nt, synthetic construct
  source 1..20: mol_type = other RNA
gtgaaatgatctttgaataa

SEQ ID NO: 44806 - RNA, 20 nt, synthetic construct
  source 1..20: mol_type = other RNA
gtgaaatgatttcaagtaac

SEQ ID NO: 44807 - RNA, 20 nt, synthetic construct
  source 1..20: mol_type = other RNA
gtgaacagacagacatgcat

SEQ ID NO: 44808 - RNA, 20 nt, synthetic construct
  source 1..20: mol_type = other RNA
gtgaacaggcaaccttggga

SEQ ID NO: 44809 - RNA, 20 nt, synthetic construct
  source 1..20: mol_type = other RNA
gtgaacatgggaatgcatat

SEQ ID NO: 44810 - RNA, 20 nt, synthetic construct
  source 1..20: mol_type = other RNA
gtgaaccaaaaaccacattt

SEQ ID NO: 44811 - RNA, 20 nt, synthetic construct
  source 1..20: mol_type = other RNA
gtgaaccacgcatctggtct

SEQ ID NO: 44812 - RNA, 20 nt, synthetic construct
  source 1..20: mol_type = other RNA
gtgaaccttgaagtacttca

SEQ ID NO: 44813 - RNA, 20 nt, synthetic construct
  source 1..20: mol_type = other RNA
gtgaacgatggtttctgaca

SEQ ID NO: 44814 - RNA, 20 nt, synthetic construct
  source 1..20: mol_type = other RNA
gtgaactattagagctttta

SEQ ID NO: 44815 - RNA, 20 nt, synthetic construct
  source 1..20: mol_type = other RNA
gtgaactccagtctgggcaa

SEQ ID NO: 44816 - RNA, 20 nt, synthetic construct
  source 1..20: mol_type = other RNA
gtgaactgggtgtaggggga

SEQ ID NO: 44817 - RNA, 20 nt, synthetic construct
  source 1..20: mol_type = other RNA
gtgaagaaacctttctcaaa

SEQ ID NO: 44818 - RNA, 20 nt, synthetic construct
  source 1..20: mol_type = other RNA
gtgaagaaccgactgaaagg

SEQ ID NO: 44819 - RNA, 20 nt, synthetic construct
  source 1..20: mol_type = other RNA
gtgaagaaggaatgtgcact

SEQ ID NO: 44820 - RNA, 20 nt, synthetic construct
  source 1..20: mol_type = other RNA
gtgaagaatgtgaaaaattt

SEQ ID NO: 44821 - RNA, 20 nt, synthetic construct
  source 1..20: mol_type = other RNA
gtgaagagagcctgtggtct

SEQ ID NO: 44822 - RNA, 20 nt, synthetic construct
  source 1..20: mol_type = other RNA
gtgaagatacaaatagtaaa

SEQ ID NO: 44823 - RNA, 20 nt, synthetic construct
  source 1..20: mol_type = other RNA
gtgaagatgctgaacttgtc

SEQ ID NO: 44824 - RNA, 20 nt, synthetic construct
  source 1..20: mol_type = other RNA
gtgaagatggagttacgctg

SEQ ID NO: 44825 - RNA, 20 nt, synthetic construct
  source 1..20: mol_type = other RNA
gtgaagattaagcacatctg

SEQ ID NO: 44826 - RNA, 20 nt, synthetic construct
  source 1..20: mol_type = other RNA
gtgaagcagagagagaagat

SEQ ID NO: 44827 - RNA, 20 nt, synthetic construct
  source 1..20: mol_type = other RNA
gtgaagcccagagaggctag

SEQ ID NO: 44828 - RNA, 20 nt, synthetic construct
  source 1..20: mol_type = other RNA
gtgaagctacagactaatat

SEQ ID NO: 44829 - RNA, 20 nt, synthetic construct
  source 1..20: mol_type = other RNA
gtgaagctggacccttacct

SEQ ID NO: 44830 - RNA, 20 nt, synthetic construct
  source 1..20: mol_type = other RNA
gtgaagcttcaaaccactat

SEQ ID NO: 44831 - RNA, 20 nt, synthetic construct
  source 1..20: mol_type = other RNA
gtgaagggaggtaggcttag

SEQ ID NO: 44832 - RNA, 20 nt, synthetic construct
  source 1..20: mol_type = other RNA
gtgaaggttcatgaacataa

SEQ ID NO: 44833 - RNA, 20 nt, synthetic construct
  source 1..20: mol_type = other RNA
gtgaagtcaagatgaatctg

SEQ ID NO: 44834 - RNA, 20 nt, synthetic construct
  source 1..20: mol_type = other RNA
gtgaagtcaatttcagatct

SEQ ID NO: 44835 - RNA, 20 nt, synthetic construct
  source 1..20: mol_type = other RNA
gtgaagtcatctggtcctga

SEQ ID NO: 44836 - RNA, 20 nt, synthetic construct
  source 1..20: mol_type = other RNA
gtgaagtcccatcttccata

SEQ ID NO: 44837 - RNA, 20 nt, synthetic construct
  source 1..20: mol_type = other RNA
gtgaagttaagggccatttc

SEQ ID NO: 44838 - RNA, 20 nt, synthetic construct
  source 1..20: mol_type = other RNA
gtgaagttgggcttaacatt

SEQ ID NO: 44839 - RNA, 20 nt, synthetic construct
  source 1..20: mol_type = other RNA
gtgaataacccatatctttg

SEQ ID NO: 44840 - RNA, 20 nt, synthetic construct
  source 1..20: mol_type = other RNA
gtgaataggaaagtgacaga

SEQ ID NO: 44841 - RNA, 20 nt, synthetic construct
  source 1..20: mol_type = other RNA
gtgaatatagctaagaaaca

SEQ ID NO: 44842 - RNA, 20 nt, synthetic construct
  source 1..20: mol_type = other RNA
gtgaatatcatttgaatgat

SEQ ID NO: 44843 - RNA, 20 nt, synthetic construct
  source 1..20: mol_type = other RNA
gtgaatcactacagcatatt

SEQ ID NO: 44844 - RNA, 20 nt, synthetic construct
  source 1..20: mol_type = other RNA
gtgaatctgagtaaagggta

SEQ ID NO: 44845 - RNA, 20 nt, synthetic construct
  source 1..20: mol_type = other RNA
gtgaatctgttcctgggttc

SEQ ID NO: 44846 - RNA, 20 nt, synthetic construct
  source 1..20: mol_type = other RNA
gtgaatgagaccaaatgcat

SEQ ID NO: 44847 - RNA, 20 nt, synthetic construct
  source 1..20: mol_type = other RNA
gtgaatgaggagtgaatttt

SEQ ID NO: 44848 - RNA, 20 nt, synthetic construct
  source 1..20: mol_type = other RNA
gtgaatggaaaattcaaaca

SEQ ID NO: 44849 - RNA, 20 nt, synthetic construct
  source 1..20: mol_type = other RNA
gtgaatggggtaattttggg

SEQ ID NO: 44850 - RNA, 20 nt, synthetic construct
  source 1..20: mol_type = other RNA
gtgaatgtgaggtgaggaca

SEQ ID NO: 44851 - RNA, 20 nt, synthetic construct
  source 1..20: mol_type = other RNA
gtgaattagatggcttagga

SEQ ID NO: 44852 - RNA, 20 nt, synthetic construct
  source 1..20: mol_type = other RNA
gtgaattcacagtagaagac

SEQ ID NO: 44853 - RNA, 20 nt, synthetic construct
  source 1..20: mol_type = other RNA
gtgaattcactaatgcctca

SEQ ID NO: 44854 - RNA, 20 nt, synthetic construct
  source 1..20: mol_type = other RNA
gtgaattctgacttagtgag

SEQ ID NO: 44855 - RNA, 20 nt, synthetic construct
  source 1..20: mol_type = other RNA
gtgaattgataaaagtcatt

SEQ ID NO: 44856 - RNA, 20 nt, synthetic construct
  source 1..20: mol_type = other RNA
gtgaattgtgacagttctat

SEQ ID NO: 44857 - RNA, 20 nt, synthetic construct
  source 1..20: mol_type = other RNA
gtgaatttgattatgttaga

SEQ ID NO: 44858 - RNA, 20 nt, synthetic construct
  source 1..20: mol_type = other RNA
gtgaatttggatttgagtaa

SEQ ID NO: 44859 - RNA, 20 nt, synthetic construct
  source 1..20: mol_type = other RNA
gtgaatttggtattcttatc

SEQ ID NO: 44860 - RNA, 20 nt, synthetic construct
  source 1..20: mol_type = other RNA
gtgacaaaaagtaggggtaa

SEQ ID NO: 44861 - RNA, 20 nt, synthetic construct
  source 1..20: mol_type = other RNA
gtgacaaacacttttcaaac

SEQ ID NO: 44862 - RNA, 20 nt, synthetic construct
  source 1..20: mol_type = other RNA
gtgacaagttcagcatcttc

SEQ ID NO: 44863 - RNA, 20 nt, synthetic construct
  source 1..20: mol_type = other RNA
gtgacacctgaggggtctta

SEQ ID NO: 44864 - RNA, 20 nt, synthetic construct
  source 1..20: mol_type = other RNA
gtgacagaacaaactcaagt

SEQ ID NO: 44865 - RNA, 20 nt, synthetic construct
  source 1..20: mol_type = other RNA
gtgacagaacaaataacacc

SEQ ID NO: 44866 - RNA, 20 nt, synthetic construct
  source 1..20: mol_type = other RNA
gtgacagaatgcatctttta

SEQ ID NO: 44867 - RNA, 20 nt, synthetic construct
  source 1..20: mol_type = other RNA
gtgacagagagagacctttc

SEQ ID NO: 44868 - RNA, 20 nt, synthetic construct
  source 1..20: mol_type = other RNA
gtgacagagccgagcagaag

SEQ ID NO: 44869 - RNA, 20 nt, synthetic construct
  source 1..20: mol_type = other RNA
gtgacagatgagaaatactt

SEQ ID NO: 44870 - RNA, 20 nt, synthetic construct
  source 1..20: mol_type = other RNA
gtgacagctgagtagcgctt

SEQ ID NO: 44871 - RNA, 20 nt, synthetic construct
  source 1..20: mol_type = other RNA
gtgacagtatgtcagactca

SEQ ID NO: 44872 - RNA, 20 nt, synthetic construct
  source 1..20: mol_type = other RNA
gtgacagttctatttctttc

SEQ ID NO: 44873 - RNA, 20 nt, synthetic construct
  source 1..20: mol_type = other RNA
gtgacagttctgtgaatttg

SEQ ID NO: 44874 - RNA, 20 nt, synthetic construct
  source 1..20: mol_type = other RNA
gtgacatatgccggctgtta

SEQ ID NO: 44875 - RNA, 20 nt, synthetic construct
  source 1..20: mol_type = other RNA
gtgacatcaagggtggtgct

SEQ ID NO: 44876 - RNA, 20 nt, synthetic construct
  source 1..20: mol_type = other RNA
gtgacattagtggtggtagt

SEQ ID NO: 44877 - RNA, 20 nt, synthetic construct
  source 1..20: mol_type = other RNA
gtgaccacagtttgaaactt

SEQ ID NO: 44878 - RNA, 20 nt, synthetic construct
  source 1..20: mol_type = other RNA
gtgaccacattcccaaatgt

SEQ ID NO: 44879 - RNA, 20 nt, synthetic construct
  source 1..20: mol_type = other RNA
gtgaccagatcaaacgtgct

SEQ ID NO: 44880 - RNA, 20 nt, synthetic construct
  source 1..20: mol_type = other RNA
gtgaccagtgtgatgggggt

SEQ ID NO: 44881 - RNA, 20 nt, synthetic construct
  source 1..20: mol_type = other RNA
gtgaccctgagtccagaggt

SEQ ID NO: 44882 - RNA, 20 nt, synthetic construct
  source 1..20: mol_type = other RNA
gtgaccctttgaagtatgta

SEQ ID NO: 44883 - RNA, 20 nt, synthetic construct
  source 1..20: mol_type = other RNA
gtgacctcatgtaactaatt

SEQ ID NO: 44884 - RNA, 20 nt, synthetic construct
  source 1..20: mol_type = other RNA
gtgacctgccagagttggca

SEQ ID NO: 44885 - RNA, 20 nt, synthetic construct
  source 1..20: mol_type = other RNA
gtgacctgtccttgtgtttt

SEQ ID NO: 44886 - RNA, 20 nt, synthetic construct
  source 1..20: mol_type = other RNA
gtgacgtgagatcatgccac

SEQ ID NO: 44887 - RNA, 20 nt, synthetic construct
  source 1..20: mol_type = other RNA
gtgactagaagaaatgttaa

SEQ ID NO: 44888 - RNA, 20 nt, synthetic construct
  source 1..20: mol_type = other RNA
gtgactagtgtgaatgagga

SEQ ID NO: 44889 - RNA, 20 nt, synthetic construct
  source 1..20: mol_type = other RNA
gtgactccaaagcaaaccag

SEQ ID NO: 44890 - RNA, 20 nt, synthetic construct
  source 1..20: mol_type = other RNA
gtgactccaagcacacagtt

SEQ ID NO: 44891 - RNA, 20 nt, synthetic construct
  source 1..20: mol_type = other RNA
gtgactgaattcccacaaaa

SEQ ID NO: 44892 - RNA, 20 nt, synthetic construct
  source 1..20: mol_type = other RNA
gtgactggcttaatgcatat

SEQ ID NO: 44893 - RNA, 20 nt, synthetic construct
  source 1..20: mol_type = other RNA
gtgactgtagtccctgctac

SEQ ID NO: 44894 - RNA, 20 nt, synthetic construct
  source 1..20: mol_type = other RNA
gtgactgtgagggtaagaaa

SEQ ID NO: 44895 - RNA, 20 nt, synthetic construct
  source 1..20: mol_type = other RNA
gtgacttaagcaacagaaat

SEQ ID NO: 44896 - RNA, 20 nt, synthetic construct
  source 1..20: mol_type = other RNA
gtgacttcgtcaaggggaga

SEQ ID NO: 44897 - RNA, 20 nt, synthetic construct
  source 1..20: mol_type = other RNA
gtgacttctggatgtgtatg

SEQ ID NO: 44898 - RNA, 20 nt, synthetic construct
  source 1..20: mol_type = other RNA
gtgacttgtttattttactt

SEQ ID NO: 44899 - RNA, 20 nt, synthetic construct
  source 1..20: mol_type = other RNA
gtgactttactgttctccag

SEQ ID NO: 44900 - RNA, 20 nt, synthetic construct
  source 1..20: mol_type = other RNA
gtgagaacccagtgtctgct

SEQ ID NO: 44901 - RNA, 20 nt, synthetic construct
  source 1..20: mol_type = other RNA
gtgagacagaccctggcttg

SEQ ID NO: 44902 - RNA, 20 nt, synthetic construct
  source 1..20: mol_type = other RNA
gtgagaccaccacacttgct

SEQ ID NO: 44903 - RNA, 20 nt, synthetic construct
  source 1..20: mol_type = other RNA
gtgagactattatgagcagt

SEQ ID NO: 44904 - RNA, 20 nt, synthetic construct
  source 1..20: mol_type = other RNA
gtgagaggactgcctggtcc

SEQ ID NO: 44905 - RNA, 20 nt, synthetic construct
  source 1..20: mol_type = other RNA
gtgagatcatgccactccac

SEQ ID NO: 44906 - RNA, 20 nt, synthetic construct
  source 1..20: mol_type = other RNA
gtgagatgggaagaaaaaat

SEQ ID NO: 44907 - RNA, 20 nt, synthetic construct
  source 1..20: mol_type = other RNA
gtgagattgatagatcatat

SEQ ID NO: 44908 - RNA, 20 nt, synthetic construct
  source 1..20: mol_type = other RNA
gtgagcaaaaatacagctcc

SEQ ID NO: 44909 - RNA, 20 nt, synthetic construct
  source 1..20: mol_type = other RNA
gtgagcagaaggaggaaaat

SEQ ID NO: 44910 - RNA, 20 nt, synthetic construct
  source 1..20: mol_type = other RNA
gtgagcatgctgcaactgag

SEQ ID NO: 44911 - RNA, 20 nt, synthetic construct
  source 1..20: mol_type = other RNA
gtgagcatttagccccctga

SEQ ID NO: 44912 - RNA, 20 nt, synthetic construct
  source 1..20: mol_type = other RNA
gtgagccacagcgcccggcc

SEQ ID NO: 44913 - RNA, 20 nt, synthetic construct
  source 1..20: mol_type = other RNA
gtgagccacagctacactca

SEQ ID NO: 44914 - RNA, 20 nt, synthetic construct
  source 1..20: mol_type = other RNA
gtgagccacatacatagtat

SEQ ID NO: 44915 - RNA, 20 nt, synthetic construct
  source 1..20: mol_type = other RNA
gtgagccaccacgtccggtc

SEQ ID NO: 44916 - RNA, 20 nt, synthetic construct
  source 1..20: mol_type = other RNA
gtgagccaccactcccggcc

SEQ ID NO: 44917 - RNA, 20 nt, synthetic construct
  source 1..20: mol_type = other RNA
gtgagccaccgcgcctggtg

SEQ ID NO: 44918 - RNA, 20 nt, synthetic construct
  source 1..20: mol_type = other RNA
gtgagccaccgtgccgggct

SEQ ID NO: 44919 - RNA, 20 nt, synthetic construct
  source 1..20: mol_type = other RNA
gtgagccacctcatccggtc

SEQ ID NO: 44920 - RNA, 20 nt, synthetic construct
  source 1..20: mol_type = other RNA
gtgagccactaaaacaggaa

SEQ ID NO: 44921 - RNA, 20 nt, synthetic construct
  source 1..20: mol_type = other RNA
gtgagccactacgcccggcc

SEQ ID NO: 44922 - RNA, 20 nt, synthetic construct
  source 1..20: mol_type = other RNA
gtgagccatcgcgcccagcc

SEQ ID NO: 44923 - RNA, 20 nt, synthetic construct
  source 1..20: mol_type = other RNA
gtgagcccagagatcccacc

SEQ ID NO: 44924 - RNA, 20 nt, synthetic construct
  source 1..20: mol_type = other RNA
gtgagcctccacacctggcc

SEQ ID NO: 44925 - RNA, 20 nt, synthetic construct
  source 1..20: mol_type = other RNA
gtgagctccagcctgggcga

SEQ ID NO: 44926 - RNA, 20 nt, synthetic construct
  source 1..20: mol_type = other RNA
gtgagctctagccttgtact

SEQ ID NO: 44927 - RNA, 20 nt, synthetic construct
  source 1..20: mol_type = other RNA
gtgagctggaagtaaggatt

SEQ ID NO: 44928 - RNA, 20 nt, synthetic construct
  source 1..20: mol_type = other RNA
gtgagctttttctttttaaa

SEQ ID NO: 44929 - RNA, 20 nt, synthetic construct
  source 1..20: mol_type = other RNA
gtgaggacatggagacagtg

SEQ ID NO: 44930 - RNA, 20 nt, synthetic construct
  source 1..20: mol_type = other RNA
gtgaggacgctgatgacagt

SEQ ID NO: 44931 - RNA, 20 nt, synthetic construct
  source 1..20: mol_type = other RNA
gtgaggatctgttggtgctt

SEQ ID NO: 44932 - RNA, 20 nt, synthetic construct
  source 1..20: mol_type = other RNA
gtgaggattcgattaaaata

SEQ ID NO: 44933 - RNA, 20 nt, synthetic construct
  source 1..20: mol_type = other RNA
gtgagggactgagcagtgaa

SEQ ID NO: 44934 - RNA, 20 nt, synthetic construct
  source 1..20: mol_type = other RNA
gtgagggagatatttcgcct

SEQ ID NO: 44935 - RNA, 20 nt, synthetic construct
  source 1..20: mol_type = other RNA
gtgagggaggccatcttcat

SEQ ID NO: 44936 - RNA, 20 nt, synthetic construct
  source 1..20: mol_type = other RNA
gtgagggtaagaaaggagtt

SEQ ID NO: 44937 - RNA, 20 nt, synthetic construct
  source 1..20: mol_type = other RNA
gtgagggtttcagtgagtag

SEQ ID NO: 44938 - RNA, 20 nt, synthetic construct
  source 1..20: mol_type = other RNA
gtgaggtgaggacatggaga

SEQ ID NO: 44939 - RNA, 20 nt, synthetic construct
  source 1..20: mol_type = other RNA
gtgagtagaagagtaatggt

SEQ ID NO: 44940 - RNA, 20 nt, synthetic construct
  source 1..20: mol_type = other RNA
gtgagtagggaaggtgcccg

SEQ ID NO: 44941 - RNA, 20 nt, synthetic construct
  source 1..20: mol_type = other RNA
gtgagtccttccagtatgat

SEQ ID NO: 44942 - RNA, 20 nt, synthetic construct
  source 1..20: mol_type = other RNA
gtgagtgagatgggaagaaa

SEQ ID NO: 44943 - RNA, 20 nt, synthetic construct
  source 1..20: mol_type = other RNA
gtgagtgatgaaaagagcac

SEQ ID NO: 44944 - RNA, 20 nt, synthetic construct
  source 1..20: mol_type = other RNA
gtgagtggactgtgagggag

SEQ ID NO: 44945 - RNA, 20 nt, synthetic construct
  source 1..20: mol_type = other RNA
gtgagtggatcatttgaggt

SEQ ID NO: 44946 - RNA, 20 nt, synthetic construct
  source 1..20: mol_type = other RNA
gtgagttcaaatgttaagcc

SEQ ID NO: 44947 - RNA, 20 nt, synthetic construct
  source 1..20: mol_type = other RNA
gtgagtttgacctgtaattt

SEQ ID NO: 44948 - RNA, 20 nt, synthetic construct
  source 1..20: mol_type = other RNA
gtgagttttaactcttgcat

SEQ ID NO: 44949 - RNA, 20 nt, synthetic construct
  source 1..20: mol_type = other RNA
gtgataaaaaggagggaaaa

SEQ ID NO: 44950 - RNA, 20 nt, synthetic construct
  source 1..20: mol_type = other RNA
gtgataactgatatgaggga

SEQ ID NO: 44951 - RNA, 20 nt, synthetic construct
  source 1..20: mol_type = other RNA
gtgataactggtgctttttt

SEQ ID NO: 44952 - RNA, 20 nt, synthetic construct
  source 1..20: mol_type = other RNA
gtgataccataaagtcagag

SEQ ID NO: 44953 - RNA, 20 nt, synthetic construct
  source 1..20: mol_type = other RNA
gtgatacctagtacgtaacc

SEQ ID NO: 44954 - RNA, 20 nt, synthetic construct
  source 1..20: mol_type = other RNA
gtgatacctcttactaaaaa

SEQ ID NO: 44955 - RNA, 20 nt, synthetic construct
  source 1..20: mol_type = other RNA
gtgatagtcttccaattgca

SEQ ID NO: 44956 - RNA, 20 nt, synthetic construct
  source 1..20: mol_type = other RNA
gtgatatattatgaaccatt

SEQ ID NO: 44957 - RNA, 20 nt, synthetic construct
  source 1..20: mol_type = other RNA
gtgatatctgtaagtcatca

SEQ ID NO: 44958 - RNA, 20 nt, synthetic construct
  source 1..20: mol_type = other RNA
gtgatatgccacattttttg

SEQ ID NO: 44959 - RNA, 20 nt, synthetic construct
  source 1..20: mol_type = other RNA
gtgatattggcataaagaca

SEQ ID NO: 44960 - RNA, 20 nt, synthetic construct
  source 1..20: mol_type = other RNA
gtgatcagaagagcactatg

SEQ ID NO: 44961 - RNA, 20 nt, synthetic construct
  source 1..20: mol_type = other RNA
gtgatcaggaaagatgaagt

SEQ ID NO: 44962 - RNA, 20 nt, synthetic construct
  source 1..20: mol_type = other RNA
gtgatccctgatatgtcgca

SEQ ID NO: 44963 - RNA, 20 nt, synthetic construct
  source 1..20: mol_type = other RNA
gtgatcctaagccatctaat

SEQ ID NO: 44964 - RNA, 20 nt, synthetic construct
  source 1..20: mol_type = other RNA
gtgatctatgaatttgccta

SEQ ID NO: 44965 - RNA, 20 nt, synthetic construct
  source 1..20: mol_type = other RNA
gtgatctatgcatactgcag

SEQ ID NO: 44966 - RNA, 20 nt, synthetic construct
  source 1..20: mol_type = other RNA
gtgatctctgctcaccgcaa

SEQ ID NO: 44967 - RNA, 20 nt, synthetic construct
  source 1..20: mol_type = other RNA
gtgatgaaaagagcacacca

SEQ ID NO: 44968 - RNA, 20 nt, synthetic construct
  source 1..20: mol_type = other RNA
gtgatgactgtaagctgaac

SEQ ID NO: 44969 - RNA, 20 nt, synthetic construct
  source 1..20: mol_type = other RNA
gtgatgattttagaaggtaa

SEQ ID NO: 44970 - RNA, 20 nt, synthetic construct
  source 1..20: mol_type = other RNA
gtgatgcaactcctgggctc

SEQ ID NO: 44971 - RNA, 20 nt, synthetic construct
  source 1..20: mol_type = other RNA
gtgatgctaacgtgcttgct

SEQ ID NO: 44972 - RNA, 20 nt, synthetic construct
  source 1..20: mol_type = other RNA
gtgatggaggtggaactctg

SEQ ID NO: 44973 - RNA, 20 nt, synthetic construct
  source 1..20: mol_type = other RNA
gtgatggcatcattcataaa

SEQ ID NO: 44974 - RNA, 20 nt, synthetic construct
  source 1..20: mol_type = other RNA
gtgatggcgcatgcctgtgg

SEQ ID NO: 44975 - RNA, 20 nt, synthetic construct
  source 1..20: mol_type = other RNA
gtgatgggagatggacactg

SEQ ID NO: 44976 - RNA, 20 nt, synthetic construct
  source 1..20: mol_type = other RNA
gtgatgggggtaagattgtg

SEQ ID NO: 44977 - RNA, 20 nt, synthetic construct
  source 1..20: mol_type = other RNA
gtgatgtagaggcagttgag

SEQ ID NO: 44978 - RNA, 20 nt, synthetic construct
  source 1..20: mol_type = other RNA
gtgatgtctcagatgtctcc

SEQ ID NO: 44979 - RNA, 20 nt, synthetic construct
  source 1..20: mol_type = other RNA
gtgatgtcttttgaagaagt

SEQ ID NO: 44980 - RNA, 20 nt, synthetic construct
  source 1..20: mol_type = other RNA
gtgatgttcaaccctcggcc

SEQ ID NO: 44981 - RNA, 20 nt, synthetic construct
  source 1..20: mol_type = other RNA
gtgatgttgagtatcttttc

SEQ ID NO: 44982 - RNA, 20 nt, synthetic construct
  source 1..20: mol_type = other RNA
gtgattaaaggccctgattt

SEQ ID NO: 44983 - RNA, 20 nt, synthetic construct
  source 1..20: mol_type = other RNA
gtgattacaattcctttcta

SEQ ID NO: 44984 - RNA, 20 nt, synthetic construct
  source 1..20: mol_type = other RNA
gtgattaccggcatccgcca

SEQ ID NO: 44985 - RNA, 20 nt, synthetic construct
  source 1..20: mol_type = other RNA
gtgattatcagggatattgg

SEQ ID NO: 44986 - RNA, 20 nt, synthetic construct
  source 1..20: mol_type = other RNA
gtgattcacttttgagttca

SEQ ID NO: 44987 - RNA, 20 nt, synthetic construct
  source 1..20: mol_type = other RNA
gtgattcagagtgctgggta

SEQ ID NO: 44988 - RNA, 20 nt, synthetic construct
  source 1..20: mol_type = other RNA
gtgattgcaggtgtgggcca

SEQ ID NO: 44989 - RNA, 20 nt, synthetic construct
  source 1..20: mol_type = other RNA
gtgattggatatttgcagta

SEQ ID NO: 44990 - RNA, 20 nt, synthetic construct
  source 1..20: mol_type = other RNA
gtgatttatgtggcatttaa

SEQ ID NO: 44991 - RNA, 20 nt, synthetic construct
  source 1..20: mol_type = other RNA
gtgatttccagtgtttggtt

SEQ ID NO: 44992 - RNA, 20 nt, synthetic construct
  source 1..20: mol_type = other RNA
gtgatttgtagatattttct

SEQ ID NO: 44993 - RNA, 20 nt, synthetic construct
  source 1..20: mol_type = other RNA
gtgattttaccaaggctaag

SEQ ID NO: 44994 - RNA, 20 nt, synthetic construct
  source 1..20: mol_type = other RNA
gtgcaaacctcctggttttg

SEQ ID NO: 44995 - RNA, 20 nt, synthetic construct
  source 1..20: mol_type = other RNA
gtgcaaactaccaagactga

SEQ ID NO: 44996 - RNA, 20 nt, synthetic construct
  source 1..20: mol_type = other RNA
gtgcaaaggattagaaagta

SEQ ID NO: 44997 - RNA, 20 nt, synthetic construct
  source 1..20: mol_type = other RNA
gtgcaacataaatagggtgc

SEQ ID NO: 44998 - RNA, 20 nt, synthetic construct
  source 1..20: mol_type = other RNA
gtgcaaccatccccgctgtc

SEQ ID NO: 44999 - RNA, 20 nt, synthetic construct
  source 1..20: mol_type = other RNA
gtgcaactagagaaagcatc

SEQ ID NO: 45000 - RNA, 20 nt, synthetic construct
  source 1..20: mol_type = other RNA
gtgcaaggagagaaaaacaa

SEQ ID NO: 45001 - RNA, 20 nt, synthetic construct
  source 1..20: mol_type = other RNA
gtgcaaggataaacaaagag

SEQ ID NO: 45002 - RNA, 20 nt, synthetic construct
  source 1..20: mol_type = other RNA
gtgcaatcacggctgattat

SEQ ID NO: 45003 - RNA, 20 nt, synthetic construct
  source 1..20: mol_type = other RNA
gtgcaatgataggtcactgc

SEQ ID NO: 45004 - RNA, 20 nt, synthetic construct
  source 1..20: mol_type = other RNA
gtgcaatggtgggatctctg

SEQ ID NO: 45005 - RNA, 20 nt, synthetic construct
  source 1..20: mol_type = other RNA
gtgcacaacacatgcacact

SEQ ID NO: 45006 - RNA, 20 nt, synthetic construct
  source 1..20: mol_type = other RNA
gtgcacaagggaagaggcca

SEQ ID NO: 45007 - RNA, 20 nt, synthetic construct
  source 1..20: mol_type = other RNA
gtgcacaatgcagtattgtt

SEQ ID NO: 45008 - RNA, 20 nt, synthetic construct
  source 1..20: mol_type = other RNA
gtgcacacaacactcagata

SEQ ID NO: 45009 - RNA, 20 nt, synthetic construct
  source 1..20: mol_type = other RNA
gtgcacacatccacgcgtaa

SEQ ID NO: 45010 - RNA, 20 nt, synthetic construct
  source 1..20: mol_type = other RNA
gtgcacacccagttatctct

SEQ ID NO: 45011 - RNA, 20 nt, synthetic construct
  source 1..20: mol_type = other RNA
gtgcacatgttccctagaac

SEQ ID NO: 45012 - RNA, 20 nt, synthetic construct
  source 1..20: mol_type = other RNA
gtgcacattccaagagagga

SEQ ID NO: 45013 - RNA, 20 nt, synthetic construct
  source 1..20: mol_type = other RNA
gtgcacattccttcttcaca

SEQ ID NO: 45014 - RNA, 20 nt, synthetic construct
  source 1..20: mol_type = other RNA
gtgcacctaataaaatgttt

SEQ ID NO: 45015 - RNA, 20 nt, synthetic construct
  source 1..20: mol_type = other RNA
gtgcacctccagtgtcctga

SEQ ID NO: 45016 - RNA, 20 nt, synthetic construct
  source 1..20: mol_type = other RNA
gtgcacctcgggttcaagcc

SEQ ID NO: 45017 - RNA, 20 nt, synthetic construct
  source 1..20: mol_type = other RNA
gtgcaccttacattgtaatc

SEQ ID NO: 45018 - RNA, 20 nt, synthetic construct
  source 1..20: mol_type = other RNA
gtgcacgctgtgaatgtgag

SEQ ID NO: 45019 - RNA, 20 nt, synthetic construct
  source 1..20: mol_type = other RNA
gtgcacgtttgctttggagt

SEQ ID NO: 45020 - RNA, 20 nt, synthetic construct
  source 1..20: mol_type = other RNA
gtgcactcttttaaacccat

SEQ ID NO: 45021 - RNA, 20 nt, synthetic construct
  source 1..20: mol_type = other RNA
gtgcacttaaaatttagatc

SEQ ID NO: 45022 - RNA, 20 nt, synthetic construct
  source 1..20: mol_type = other RNA
gtgcagagcaggggtggggg

SEQ ID NO: 45023 - RNA, 20 nt, synthetic construct
  source 1..20: mol_type = other RNA
gtgcagcaagcagtaaatat

SEQ ID NO: 45024 - RNA, 20 nt, synthetic construct
  source 1..20: mol_type = other RNA
gtgcagccactatagaaaat

SEQ ID NO: 45025 - RNA, 20 nt, synthetic construct
  source 1..20: mol_type = other RNA
gtgcagcctctaatcaggtt

SEQ ID NO: 45026 - RNA, 20 nt, synthetic construct
  source 1..20: mol_type = other RNA
gtgcaggaaacttccagaaa

SEQ ID NO: 45027 - RNA, 20 nt, synthetic construct
  source 1..20: mol_type = other RNA
gtgcaggagtttgagactgc

SEQ ID NO: 45028 - RNA, 20 nt, synthetic construct
  source 1..20: mol_type = other RNA
gtgcaggccagatatccata

SEQ ID NO: 45029 - RNA, 20 nt, synthetic construct
  source 1..20: mol_type = other RNA
gtgcagtatcttgaagaaac

SEQ ID NO: 45030 - RNA, 20 nt, synthetic construct
  source 1..20: mol_type = other RNA
gtgcagtatgtaggaaactt

SEQ ID NO: 45031 - RNA, 20 nt, synthetic construct
  source 1..20: mol_type = other RNA
gtgcagtctaaccattaaca

SEQ ID NO: 45032 - RNA, 20 nt, synthetic construct
  source 1..20: mol_type = other RNA
gtgcagtggatgactaggct

SEQ ID NO: 45033 - RNA, 20 nt, synthetic construct
  source 1..20: mol_type = other RNA
gtgcagtggtgtggtcttgt

SEQ ID NO: 45034 - RNA, 20 nt, synthetic construct
  source 1..20: mol_type = other RNA
gtgcataccaccacattcgg

SEQ ID NO: 45035 - RNA, 20 nt, synthetic construct
  source 1..20: mol_type = other RNA
gtgcatactgtgatgatttt

SEQ ID NO: 45036 - RNA, 20 nt, synthetic construct
  source 1..20: mol_type = other RNA
gtgcatatataccacatttt

SEQ ID NO: 45037 - RNA, 20 nt, synthetic construct
  source 1..20: mol_type = other RNA
gtgcatcaaaggacactatt

SEQ ID NO: 45038 - RNA, 20 nt, synthetic construct
  source 1..20: mol_type = other RNA
gtgcatcagaattccattcc

SEQ ID NO: 45039 - RNA, 20 nt, synthetic construct
  source 1..20: mol_type = other RNA
gtgcatcctttatacctttt

SEQ ID NO: 45040 - RNA, 20 nt, synthetic construct
  source 1..20: mol_type = other RNA
gtgcatgaccctgctatgca

SEQ ID NO: 45041 - RNA, 20 nt, synthetic construct
  source 1..20: mol_type = other RNA
gtgcatgcatgtctgtctgt

SEQ ID NO: 45042 - RNA, 20 nt, synthetic construct
  source 1..20: mol_type = other RNA
gtgcatgcctctgttacagc

SEQ ID NO: 45043 - RNA, 20 nt, synthetic construct
  source 1..20: mol_type = other RNA
gtgcatgctcccatttggga

SEQ ID NO: 45044 - RNA, 20 nt, synthetic construct
  source 1..20: mol_type = other RNA
gtgcatgtctgcaggagcct

SEQ ID NO: 45045 - RNA, 20 nt, synthetic construct
  source 1..20: mol_type = other RNA
gtgcatgtgcaggaaacttc

SEQ ID NO: 45046 - RNA, 20 nt, synthetic construct
  source 1..20: mol_type = other RNA
gtgcatgtgttgtgcacaca

SEQ ID NO: 45047 - RNA, 20 nt, synthetic construct
  source 1..20: mol_type = other RNA
gtgcattattgtaattatca

SEQ ID NO: 45048 - RNA, 20 nt, synthetic construct
  source 1..20: mol_type = other RNA
gtgcattcatactgaaggca

SEQ ID NO: 45049 - RNA, 20 nt, synthetic construct
  source 1..20: mol_type = other RNA
gtgcatttcggctctgtgct

SEQ ID NO: 45050 - RNA, 20 nt, synthetic construct
  source 1..20: mol_type = other RNA
gtgcatttgggacagcctag

SEQ ID NO: 45051 - RNA, 20 nt, synthetic construct
  source 1..20: mol_type = other RNA
gtgccaacacatggggcatt

SEQ ID NO: 45052 - RNA, 20 nt, synthetic construct
  source 1..20: mol_type = other RNA
gtgccaactctggcaggtca

SEQ ID NO: 45053 - RNA, 20 nt, synthetic construct
  source 1..20: mol_type = other RNA
gtgccaagcaacttgatcag

SEQ ID NO: 45054 - RNA, 20 nt, synthetic construct
  source 1..20: mol_type = other RNA
gtgccaagtccgtgcatgcc

SEQ ID NO: 45055 - RNA, 20 nt, synthetic construct
  source 1..20: mol_type = other RNA
gtgccagccacccttgctgc

SEQ ID NO: 45056 - RNA, 20 nt, synthetic construct
  source 1..20: mol_type = other RNA
gtgccagtgaactccagtct

SEQ ID NO: 45057 - RNA, 20 nt, synthetic construct
  source 1..20: mol_type = other RNA
gtgccagtgcaaacctcctg

SEQ ID NO: 45058 - RNA, 20 nt, synthetic construct
  source 1..20: mol_type = other RNA
gtgccatctccttaatccag

SEQ ID NO: 45059 - RNA, 20 nt, synthetic construct
  source 1..20: mol_type = other RNA
gtgcccaaggaaggcagggt

SEQ ID NO: 45060 - RNA, 20 nt, synthetic construct
  source 1..20: mol_type = other RNA
gtgcccacctgacaagtagt

SEQ ID NO: 45061 - RNA, 20 nt, synthetic construct
  source 1..20: mol_type = other RNA
gtgcccaggctgacttagag

SEQ ID NO: 45062 - RNA, 20 nt, synthetic construct
  source 1..20: mol_type = other RNA
gtgcccattaacagatgaat

SEQ ID NO: 45063 - RNA, 20 nt, synthetic construct
  source 1..20: mol_type = other RNA
gtgccccactccacacacga

SEQ ID NO: 45064 - RNA, 20 nt, synthetic construct
  source 1..20: mol_type = other RNA
gtgcccgcgaaggcgtgtaa

SEQ ID NO: 45065 - RNA, 20 nt, synthetic construct
  source 1..20: mol_type = other RNA
gtgcccggccagacatttta

SEQ ID NO: 45066 - RNA, 20 nt, synthetic construct
  source 1..20: mol_type = other RNA
gtgccctacatatggcaatt

SEQ ID NO: 45067 - RNA, 20 nt, synthetic construct
  source 1..20: mol_type = other RNA
gtgccgaggcagagagagta

SEQ ID NO: 45068 - RNA, 20 nt, synthetic construct
  source 1..20: mol_type = other RNA
gtgccgcgcgagggagcgta

SEQ ID NO: 45069 - RNA, 20 nt, synthetic construct
  source 1..20: mol_type = other RNA
gtgccgcgttttttgtccac

SEQ ID NO: 45070 - RNA, 20 nt, synthetic construct
  source 1..20: mol_type = other RNA
gtgccgggcttggtatgcat

SEQ ID NO: 45071 - RNA, 20 nt, synthetic construct
  source 1..20: mol_type = other RNA
gtgcctacatagtccacttt

SEQ ID NO: 45072 - RNA, 20 nt, synthetic construct
  source 1..20: mol_type = other RNA
gtgcctgccatagagggagc

SEQ ID NO: 45073 - RNA, 20 nt, synthetic construct
  source 1..20: mol_type = other RNA
gtgccttcagaaggagtcca

SEQ ID NO: 45074 - RNA, 20 nt, synthetic construct
  source 1..20: mol_type = other RNA
gtgccttcagctatggtgtt

SEQ ID NO: 45075 - RNA, 20 nt, synthetic construct
  source 1..20: mol_type = other RNA
gtgccttgatccattacatc

SEQ ID NO: 45076 - RNA, 20 nt, synthetic construct
  source 1..20: mol_type = other RNA
gtgcgacctcgaagcacaac

SEQ ID NO: 45077 - RNA, 20 nt, synthetic construct
  source 1..20: mol_type = other RNA
gtgcgagtgtgaacgatggt

SEQ ID NO: 45078 - RNA, 20 nt, synthetic construct
  source 1..20: mol_type = other RNA
gtgcgggattatttggaaga

SEQ ID NO: 45079 - RNA, 20 nt, synthetic construct
  source 1..20: mol_type = other RNA
gtgcgtgaatctgttcctgg

SEQ ID NO: 45080 - RNA, 20 nt, synthetic construct
  source 1..20: mol_type = other RNA
gtgcgttgaccgctttcgtg

SEQ ID NO: 45081 - RNA, 20 nt, synthetic construct
  source 1..20: mol_type = other RNA
gtgctaattgtttgttgggt

SEQ ID NO: 45082 - RNA, 20 nt, synthetic construct
  source 1..20: mol_type = other RNA
gtgctacctcaaattgtgtg

SEQ ID NO: 45083 - RNA, 20 nt, synthetic construct
  source 1..20: mol_type = other RNA
gtgctactcaaagtttagtt

SEQ ID NO: 45084 - RNA, 20 nt, synthetic construct
  source 1..20: mol_type = other RNA
gtgctagatgctaaacagta

SEQ ID NO: 45085 - RNA, 20 nt, synthetic construct
  source 1..20: mol_type = other RNA
gtgctagccttcttggagta

SEQ ID NO: 45086 - RNA, 20 nt, synthetic construct
  source 1..20: mol_type = other RNA
gtgctcagtggttctgcgtg

SEQ ID NO: 45087 - RNA, 20 nt, synthetic construct
  source 1..20: mol_type = other RNA
gtgctccatagcttcctaag

SEQ ID NO: 45088 - RNA, 20 nt, synthetic construct
  source 1..20: mol_type = other RNA
gtgctctaccctttccaaat

SEQ ID NO: 45089 - RNA, 20 nt, synthetic construct
  source 1..20: mol_type = other RNA
gtgctctcccccgaatcctt

SEQ ID NO: 45090 - RNA, 20 nt, synthetic construct
  source 1..20: mol_type = other RNA
gtgctctgtatttaatcttt

SEQ ID NO: 45091 - RNA, 20 nt, synthetic construct
  source 1..20: mol_type = other RNA
gtgctcttctgatcacagaa

SEQ ID NO: 45092 - RNA, 20 nt, synthetic construct
  source 1..20: mol_type = other RNA
gtgctcttttcatcactcac

SEQ ID NO: 45093 - RNA, 20 nt, synthetic construct
  source 1..20: mol_type = other RNA
gtgctgaaaccccgcatact

SEQ ID NO: 45094 - RNA, 20 nt, synthetic construct
  source 1..20: mol_type = other RNA
gtgctgaaagctagaagacc

SEQ ID NO: 45095 - RNA, 20 nt, synthetic construct
  source 1..20: mol_type = other RNA
gtgctgactagtacgtgcag

SEQ ID NO: 45096 - RNA, 20 nt, synthetic construct
  source 1..20: mol_type = other RNA
gtgctgagatggtcagtact

SEQ ID NO: 45097 - RNA, 20 nt, synthetic construct
  source 1..20: mol_type = other RNA
gtgctgataaatggcttttt

SEQ ID NO: 45098 - RNA, 20 nt, synthetic construct
  source 1..20: mol_type = other RNA
gtgctgatcaggaaagaccg

SEQ ID NO: 45099 - RNA, 20 nt, synthetic construct
  source 1..20: mol_type = other RNA
gtgctgatttaaaattttgc

SEQ ID NO: 45100 - RNA, 20 nt, synthetic construct
  source 1..20: mol_type = other RNA
gtgctgcacgtctgtggtct

SEQ ID NO: 45101 - RNA, 20 nt, synthetic construct
  source 1..20: mol_type = other RNA
gtgctgcagtatgcatagat

SEQ ID NO: 45102 - RNA, 20 nt, synthetic construct
  source 1..20: mol_type = other RNA
gtgctgctctgacgtttaaa

SEQ ID NO: 45103 - RNA, 20 nt, synthetic construct
  source 1..20: mol_type = other RNA
gtgctggactggagggatgc

SEQ ID NO: 45104 - RNA, 20 nt, synthetic construct
  source 1..20: mol_type = other RNA
gtgctggcagccttctctct

SEQ ID NO: 45105 - RNA, 20 nt, synthetic construct
  source 1..20: mol_type = other RNA
gtgctggcttcaatatgcag

SEQ ID NO: 45106 - RNA, 20 nt, synthetic construct
  source 1..20: mol_type = other RNA
gtgctgggctagggaagcag

SEQ ID NO: 45107 - RNA, 20 nt, synthetic construct
  source 1..20: mol_type = other RNA
gtgctgggtagagactggat

SEQ ID NO: 45108 - RNA, 20 nt, synthetic construct
  source 1..20: mol_type = other RNA
gtgctgtccatttccttaag

SEQ ID NO: 45109 - RNA, 20 nt, synthetic construct
  source 1..20: mol_type = other RNA
gtgctgtgattgcaggtgtg

SEQ ID NO: 45110 - RNA, 20 nt, synthetic construct
  source 1..20: mol_type = other RNA
gtgctgtgccagtgcaaacc

SEQ ID NO: 45111 - RNA, 20 nt, synthetic construct
  source 1..20: mol_type = other RNA
gtgctgttgaggctgggccc

SEQ ID NO: 45112 - RNA, 20 nt, synthetic construct
  source 1..20: mol_type = other RNA
gtgctgttgtattttacacc

SEQ ID NO: 45113 - RNA, 20 nt, synthetic construct
  source 1..20: mol_type = other RNA
gtgcttaaatttttgagaaa

SEQ ID NO: 45114 - RNA, 20 nt, synthetic construct
  source 1..20: mol_type = other RNA
gtgcttaaggaaatggacag

SEQ ID NO: 45115 - RNA, 20 nt, synthetic construct
  source 1..20: mol_type = other RNA
gtgcttaatcttcacactta

SEQ ID NO: 45116 - RNA, 20 nt, synthetic construct
  source 1..20: mol_type = other RNA
gtgcttaattcaaacaaatc

SEQ ID NO: 45117 - RNA, 20 nt, synthetic construct
  source 1..20: mol_type = other RNA
gtgcttacacacacgtttat

SEQ ID NO: 45118 - RNA, 20 nt, synthetic construct
  source 1..20: mol_type = other RNA
gtgcttacagactgattaat

SEQ ID NO: 45119 - RNA, 20 nt, synthetic construct
  source 1..20: mol_type = other RNA
gtgcttagcgctggaggtcg

SEQ ID NO: 45120 - RNA, 20 nt, synthetic construct
  source 1..20: mol_type = other RNA
gtgcttagctgcctcttcct

SEQ ID NO: 45121 - RNA, 20 nt, synthetic construct
  source 1..20: mol_type = other RNA
gtgcttccacagctatcagg

SEQ ID NO: 45122 - RNA, 20 nt, synthetic construct
  source 1..20: mol_type = other RNA
gtgcttcctaaacctgctac

SEQ ID NO: 45123 - RNA, 20 nt, synthetic construct
  source 1..20: mol_type = other RNA
gtgcttccttctcttatact

SEQ ID NO: 45124 - RNA, 20 nt, synthetic construct
  source 1..20: mol_type = other RNA
gtgcttcgaggtcgcaccct

SEQ ID NO: 45125 - RNA, 20 nt, synthetic construct
  source 1..20: mol_type = other RNA
gtgcttctagtaacttggtc

SEQ ID NO: 45126 - RNA, 20 nt, synthetic construct
  source 1..20: mol_type = other RNA
gtgcttctgataggaatatc

SEQ ID NO: 45127 - RNA, 20 nt, synthetic construct
  source 1..20: mol_type = other RNA
gtgcttgaactgctggtctg

SEQ ID NO: 45128 - RNA, 20 nt, synthetic construct
  source 1..20: mol_type = other RNA
gtgcttgcagccttccctga

SEQ ID NO: 45129 - RNA, 20 nt, synthetic construct
  source 1..20: mol_type = other RNA
gtgcttgctctgcggcaggc

SEQ ID NO: 45130 - RNA, 20 nt, synthetic construct
  source 1..20: mol_type = other RNA
gtgcttggagtcacttgaca

SEQ ID NO: 45131 - RNA, 20 nt, synthetic construct
  source 1..20: mol_type = other RNA
gtgcttggatattctacaga

SEQ ID NO: 45132 - RNA, 20 nt, synthetic construct
  source 1..20: mol_type = other RNA
gtgcttgggctcccttccag

SEQ ID NO: 45133 - RNA, 20 nt, synthetic construct
  source 1..20: mol_type = other RNA
gtgcttgtctctctctttct

SEQ ID NO: 45134 - RNA, 20 nt, synthetic construct
  source 1..20: mol_type = other RNA
gtgcttgtgcttttaatact

SEQ ID NO: 45135 - RNA, 20 nt, synthetic construct
  source 1..20: mol_type = other RNA
gtgctttccttattgagaag

SEQ ID NO: 45136 - RNA, 20 nt, synthetic construct
  source 1..20: mol_type = other RNA
gtgctttctatctctcagat

SEQ ID NO: 45137 - RNA, 20 nt, synthetic construct
  source 1..20: mol_type = other RNA
gtgctttctcaacactgtgt

SEQ ID NO: 45138 - RNA, 20 nt, synthetic construct
  source 1..20: mol_type = other RNA
gtgcttttaatactttcaca

SEQ ID NO: 45139 - RNA, 20 nt, synthetic construct
  source 1..20: mol_type = other RNA
gtgcttttctcgtgcatgtc

SEQ ID NO: 45140 - RNA, 20 nt, synthetic construct
  source 1..20: mol_type = other RNA
gtgcttttgctgcatcccaa

SEQ ID NO: 45141 - RNA, 20 nt, synthetic construct
  source 1..20: mol_type = other RNA
gtgctttttactttgcgaaa

SEQ ID NO: 45142 - RNA, 20 nt, synthetic construct
  source 1..20: mol_type = other RNA
gtgctttttgtatcctgttt

SEQ ID NO: 45143 - RNA, 20 nt, synthetic construct
  source 1..20: mol_type = other RNA
gtgcttttttggtgtttttc

SEQ ID NO: 45144 - RNA, 20 nt, synthetic construct
  source 1..20: mol_type = other RNA
gtggaaaaactgcagcaatt

SEQ ID NO: 45145 - RNA, 20 nt, synthetic construct
  source 1..20: mol_type = other RNA
gtggaaaaatataggaacat

SEQ ID NO: 45146 - RNA, 20 nt, synthetic construct
  source 1..20: mol_type = other RNA
gtggaaaatgtatgattttc

SEQ ID NO: 45147 - RNA, 20 nt, synthetic construct
  source 1..20: mol_type = other RNA
gtggaaagagccagcctgat

SEQ ID NO: 45148 - RNA, 20 nt, synthetic construct
  source 1..20: mol_type = other RNA
gtggaaatacttgaacattc

SEQ ID NO: 45149 - RNA, 20 nt, synthetic construct
  source 1..20: mol_type = other RNA
gtggaaattaaacacaccct

SEQ ID NO: 45150 - RNA, 20 nt, synthetic construct
  source 1..20: mol_type = other RNA
gtggaacataatctttggtg

SEQ ID NO: 45151 - RNA, 20 nt, synthetic construct
  source 1..20: mol_type = other RNA
gtggaactctgtcatggtgt

SEQ ID NO: 45152 - RNA, 20 nt, synthetic construct
  source 1..20: mol_type = other RNA
gtggaagaatcaggtctctt

SEQ ID NO: 45153 - RNA, 20 nt, synthetic construct
  source 1..20: mol_type = other RNA
gtggaagcacagtctctgca

SEQ ID NO: 45154 - RNA, 20 nt, synthetic construct
  source 1..20: mol_type = other RNA
gtggaagcagaactaagacc

SEQ ID NO: 45155 - RNA, 20 nt, synthetic construct
  source 1..20: mol_type = other RNA
gtggaagctgtccttctcgt

SEQ ID NO: 45156 - RNA, 20 nt, synthetic construct
  source 1..20: mol_type = other RNA
gtggaaggcctgatagctgt

SEQ ID NO: 45157 - RNA, 20 nt, synthetic construct
  source 1..20: mol_type = other RNA
gtggaaggccttctcctcca

SEQ ID NO: 45158 - RNA, 20 nt, synthetic construct
  source 1..20: mol_type = other RNA
gtggaatcattccgtatata

SEQ ID NO: 45159 - RNA, 20 nt, synthetic construct
  source 1..20: mol_type = other RNA
gtggaatggtcaatttcatc

SEQ ID NO: 45160 - RNA, 20 nt, synthetic construct
  source 1..20: mol_type = other RNA
gtggaattaactccagggga

SEQ ID NO: 45161 - RNA, 20 nt, synthetic construct
  source 1..20: mol_type = other RNA
gtggacaaaaaacgcggcac

SEQ ID NO: 45162 - RNA, 20 nt, synthetic construct
  source 1..20: mol_type = other RNA
gtggacacactgaaacaatc

SEQ ID NO: 45163 - RNA, 20 nt, synthetic construct
  source 1..20: mol_type = other RNA
gtggaccatgttttaggagt

SEQ ID NO: 45164 - RNA, 20 nt, synthetic construct
  source 1..20: mol_type = other RNA
gtggacgcggccccggcctt

SEQ ID NO: 45165 - RNA, 20 nt, synthetic construct
  source 1..20: mol_type = other RNA
gtggactatgtaggcacatt

SEQ ID NO: 45166 - RNA, 20 nt, synthetic construct
  source 1..20: mol_type = other RNA
gtggactgtgagggagatat

SEQ ID NO: 45167 - RNA, 20 nt, synthetic construct
  source 1..20: mol_type = other RNA
gtggactttaggctgttcaa

SEQ ID NO: 45168 - RNA, 20 nt, synthetic construct
  source 1..20: mol_type = other RNA
gtggagaattactaaaattc

SEQ ID NO: 45169 - RNA, 20 nt, synthetic construct
  source 1..20: mol_type = other RNA
gtggagataaagagcaggtg

SEQ ID NO: 45170 - RNA, 20 nt, synthetic construct
  source 1..20: mol_type = other RNA
gtggagatggggacttgctc

SEQ ID NO: 45171 - RNA, 20 nt, synthetic construct
  source 1..20: mol_type = other RNA
gtggagcctgctctgcagag

SEQ ID NO: 45172 - RNA, 20 nt, synthetic construct
  source 1..20: mol_type = other RNA
gtggagcggtgtcttattgt

SEQ ID NO: 45173 - RNA, 20 nt, synthetic construct
  source 1..20: mol_type = other RNA
gtggaggcagtaccattccc

SEQ ID NO: 45174 - RNA, 20 nt, synthetic construct
  source 1..20: mol_type = other RNA
gtggaggggcaggaaaggtg

SEQ ID NO: 45175 - RNA, 20 nt, synthetic construct
  source 1..20: mol_type = other RNA
gtggagtattctagttctag

SEQ ID NO: 45176 - RNA, 20 nt, synthetic construct
  source 1..20: mol_type = other RNA
gtggagtccaaccaatcgca

SEQ ID NO: 45177 - RNA, 20 nt, synthetic construct
  source 1..20: mol_type = other RNA
gtggagtcctgtcagtttct

SEQ ID NO: 45178 - RNA, 20 nt, synthetic construct
  source 1..20: mol_type = other RNA
gtggagtgcgagtgtgaacg

SEQ ID NO: 45179 - RNA, 20 nt, synthetic construct
  source 1..20: mol_type = other RNA
gtggagtggaggggcaggaa

SEQ ID NO: 45180 - RNA, 20 nt, synthetic construct
  source 1..20: mol_type = other RNA
gtggagtggcatgatctcac

SEQ ID NO: 45181 - RNA, 20 nt, synthetic construct
  source 1..20: mol_type = other RNA
gtggagtggggcacctaaaa

SEQ ID NO: 45182 - RNA, 20 nt, synthetic construct
  source 1..20: mol_type = other RNA
gtggagtggtggatagagag

SEQ ID NO: 45183 - RNA, 20 nt, synthetic construct
  source 1..20: mol_type = other RNA
gtggagttctgctcttgtcg

SEQ ID NO: 45184 - RNA, 20 nt, synthetic construct
  source 1..20: mol_type = other RNA
gtggagttggtgcaaggata

SEQ ID NO: 45185 - RNA, 20 nt, synthetic construct
  source 1..20: mol_type = other RNA
gtggatagagagattcaaga

SEQ ID NO: 45186 - RNA, 20 nt, synthetic construct
  source 1..20: mol_type = other RNA
gtggatagtgctttttactt

SEQ ID NO: 45187 - RNA, 20 nt, synthetic construct
  source 1..20: mol_type = other RNA
gtggatatctgaggtcagga

SEQ ID NO: 45188 - RNA, 20 nt, synthetic construct
  source 1..20: mol_type = other RNA
gtggatgactaggctcctga

SEQ ID NO: 45189 - RNA, 20 nt, synthetic construct
  source 1..20: mol_type = other RNA
gtggatgagattaatgtagg

SEQ ID NO: 45190 - RNA, 20 nt, synthetic construct
  source 1..20: mol_type = other RNA
gtggatgcatgaggcatatt

SEQ ID NO: 45191 - RNA, 20 nt, synthetic construct
  source 1..20: mol_type = other RNA
gtggatgctggggacccctc

SEQ ID NO: 45192 - RNA, 20 nt, synthetic construct
  source 1..20: mol_type = other RNA
gtggatgggtgtagggtttg

SEQ ID NO: 45193 - RNA, 20 nt, synthetic construct
  source 1..20: mol_type = other RNA
gtggatgtccttaatgccac

SEQ ID NO: 45194 - RNA, 20 nt, synthetic construct
  source 1..20: mol_type = other RNA
gtggatgtgtgcacaacaca

SEQ ID NO: 45195 - RNA, 20 nt, synthetic construct
  source 1..20: mol_type = other RNA
gtggatgttggtgagaaccc

SEQ ID NO: 45196 - RNA, 20 nt, synthetic construct
  source 1..20: mol_type = other RNA
gtggcaaatttatgtgaaaa

SEQ ID NO: 45197 - RNA, 20 nt, synthetic construct
  source 1..20: mol_type = other RNA
gtggcagaatttacattttt

SEQ ID NO: 45198 - RNA, 20 nt, synthetic construct
  source 1..20: mol_type = other RNA
gtggcagccccgcttcagtt

SEQ ID NO: 45199 - RNA, 20 nt, synthetic construct
  source 1..20: mol_type = other RNA
gtggcaggggctgcatcatg

SEQ ID NO: 45200 - RNA, 20 nt, synthetic construct
  source 1..20: mol_type = other RNA
gtggcatcatactggaagga

SEQ ID NO: 45201 - RNA, 20 nt, synthetic construct
  source 1..20: mol_type = other RNA
gtggcatctttgttacagca

SEQ ID NO: 45202 - RNA, 20 nt, synthetic construct
  source 1..20: mol_type = other RNA
gtggcatgatctcacgtcac

SEQ ID NO: 45203 - RNA, 20 nt, synthetic construct
  source 1..20: mol_type = other RNA
gtggcatgtctgtagttaca

SEQ ID NO: 45204 - RNA, 20 nt, synthetic construct
  source 1..20: mol_type = other RNA
gtggcattaaggacatccac

SEQ ID NO: 45205 - RNA, 20 nt, synthetic construct
  source 1..20: mol_type = other RNA
gtggcatttaaatttaaaag

SEQ ID NO: 45206 - RNA, 20 nt, synthetic construct
  source 1..20: mol_type = other RNA
gtggcatttcttacacatta

SEQ ID NO: 45207 - RNA, 20 nt, synthetic construct
  source 1..20: mol_type = other RNA
gtggccaggaggaggagggt

SEQ ID NO: 45208 - RNA, 20 nt, synthetic construct
  source 1..20: mol_type = other RNA
gtggccagtgaccagtgtga

SEQ ID NO: 45209 - RNA, 20 nt, synthetic construct
  source 1..20: mol_type = other RNA
gtggcccacacctgcaatca

SEQ ID NO: 45210 - RNA, 20 nt, synthetic construct
  source 1..20: mol_type = other RNA
gtggcccccctgaaaaatga

SEQ ID NO: 45211 - RNA, 20 nt, synthetic construct
  source 1..20: mol_type = other RNA
gtggccctgttggcctggac

SEQ ID NO: 45212 - RNA, 20 nt, synthetic construct
  source 1..20: mol_type = other RNA
gtggccgagggagacggcga

SEQ ID NO: 45213 - RNA, 20 nt, synthetic construct
  source 1..20: mol_type = other RNA
gtggcctaaatcaggatgtc

SEQ ID NO: 45214 - RNA, 20 nt, synthetic construct
  source 1..20: mol_type = other RNA
gtggcctcaagcagtcctgc

SEQ ID NO: 45215 - RNA, 20 nt, synthetic construct
  source 1..20: mol_type = other RNA
gtggcctcttcccttgtgca

SEQ ID NO: 45216 - RNA, 20 nt, synthetic construct
  source 1..20: mol_type = other RNA
gtggcgcagccatggctcac

SEQ ID NO: 45217 - RNA, 20 nt, synthetic construct
  source 1..20: mol_type = other RNA
gtggcgctccctctgtgtgc

SEQ ID NO: 45218 - RNA, 20 nt, synthetic construct
  source 1..20: mol_type = other RNA
gtggcgctgtttgcctgcgt

SEQ ID NO: 45219 - RNA, 20 nt, synthetic construct
  source 1..20: mol_type = other RNA
gtggcggatgccggtaatca

SEQ ID NO: 45220 - RNA, 20 nt, synthetic construct
  source 1..20: mol_type = other RNA
gtggcgtgtgcccaggctga

SEQ ID NO: 45221 - RNA, 20 nt, synthetic construct
  source 1..20: mol_type = other RNA
gtggctaacaatcaaattta

SEQ ID NO: 45222 - RNA, 20 nt, synthetic construct
  source 1..20: mol_type = other RNA
gtggctaatgtggcttgcaa

SEQ ID NO: 45223 - RNA, 20 nt, synthetic construct
  source 1..20: mol_type = other RNA
gtggctacaccctgggaaag

SEQ ID NO: 45224 - RNA, 20 nt, synthetic construct
  source 1..20: mol_type = other RNA
gtggctagacggaaaaacat

SEQ ID NO: 45225 - RNA, 20 nt, synthetic construct
  source 1..20: mol_type = other RNA
gtggctagtgtgttgactga

SEQ ID NO: 45226 - RNA, 20 nt, synthetic construct
  source 1..20: mol_type = other RNA
gtggctcacagtgctccata

SEQ ID NO: 45227 - RNA, 20 nt, synthetic construct
  source 1..20: mol_type = other RNA
gtggctcacattgtatttct

SEQ ID NO: 45228 - RNA, 20 nt, synthetic construct
  source 1..20: mol_type = other RNA
gtggctcactcatttccgtt

SEQ ID NO: 45229 - RNA, 20 nt, synthetic construct
  source 1..20: mol_type = other RNA
gtggctcatacttgctttat

SEQ ID NO: 45230 - RNA, 20 nt, synthetic construct
  source 1..20: mol_type = other RNA
gtggctgacatgtgtaaaac

SEQ ID NO: 45231 - RNA, 20 nt, synthetic construct
  source 1..20: mol_type = other RNA
gtggctgcaccattttttca

SEQ ID NO: 45232 - RNA, 20 nt, synthetic construct
  source 1..20: mol_type = other RNA
gtggctggcactttcctgat

SEQ ID NO: 45233 - RNA, 20 nt, synthetic construct
  source 1..20: mol_type = other RNA
gtggctgtcaaaaatgtgtc

SEQ ID NO: 45234 - RNA, 20 nt, synthetic construct
  source 1..20: mol_type = other RNA
gtggcttcctaactggtctc

SEQ ID NO: 45235 - RNA, 20 nt, synthetic construct
  source 1..20: mol_type = other RNA
gtggcttctcaaactgtgtg

SEQ ID NO: 45236 - RNA, 20 nt, synthetic construct
  source 1..20: mol_type = other RNA
gtggcttgcaaggcccacca

SEQ ID NO: 45237 - RNA, 20 nt, synthetic construct
  source 1..20: mol_type = other RNA
gtggcttgggtgacctcatg

SEQ ID NO: 45238 - RNA, 20 nt, synthetic construct
  source 1..20: mol_type = other RNA
gtggcttgtggctacaccct

SEQ ID NO: 45239 - RNA, 20 nt, synthetic construct
  source 1..20: mol_type = other RNA
gtggctttaaggcgcagaca

SEQ ID NO: 45240 - RNA, 20 nt, synthetic construct
  source 1..20: mol_type = other RNA
gtgggaagcaaaggattcgg

SEQ ID NO: 45241 - RNA, 20 nt, synthetic construct
  source 1..20: mol_type = other RNA
gtgggaagtggagtgcgagt

SEQ ID NO: 45242 - RNA, 20 nt, synthetic construct
  source 1..20: mol_type = other RNA
gtgggaattcagtcaccaaa

SEQ ID NO: 45243 - RNA, 20 nt, synthetic construct
  source 1..20: mol_type = other RNA
gtgggaccccgtctctgcaa

SEQ ID NO: 45244 - RNA, 20 nt, synthetic construct
  source 1..20: mol_type = other RNA
gtgggactggagaacagtaa

SEQ ID NO: 45245 - RNA, 20 nt, synthetic construct
  source 1..20: mol_type = other RNA
gtgggagaggcatgccggga

SEQ ID NO: 45246 - RNA, 20 nt, synthetic construct
  source 1..20: mol_type = other RNA
gtgggaggaggtcatactgg

SEQ ID NO: 45247 - RNA, 20 nt, synthetic construct
  source 1..20: mol_type = other RNA
gtgggaggcccggagccgag

SEQ ID NO: 45248 - RNA, 20 nt, synthetic construct
  source 1..20: mol_type = other RNA
gtgggatcaaaccatgttca

SEQ ID NO: 45249 - RNA, 20 nt, synthetic construct
  source 1..20: mol_type = other RNA
gtgggatctctgggctcact

SEQ ID NO: 45250 - RNA, 20 nt, synthetic construct
  source 1..20: mol_type = other RNA
gtgggcaaaaaagtcatgac

SEQ ID NO: 45251 - RNA, 20 nt, synthetic construct
  source 1..20: mol_type = other RNA
gtgggcaacacaatgagacc

SEQ ID NO: 45252 - RNA, 20 nt, synthetic construct
  source 1..20: mol_type = other RNA
gtgggcactgggagccctcc

SEQ ID NO: 45253 - RNA, 20 nt, synthetic construct
  source 1..20: mol_type = other RNA
gtgggccaccaagccctgcc

SEQ ID NO: 45254 - RNA, 20 nt, synthetic construct
  source 1..20: mol_type = other RNA
gtgggcccagcagaaggtga

SEQ ID NO: 45255 - RNA, 20 nt, synthetic construct
  source 1..20: mol_type = other RNA
gtgggccttgcaagccacat

SEQ ID NO: 45256 - RNA, 20 nt, synthetic construct
  source 1..20: mol_type = other RNA
gtgggctttgagaaaggttt

SEQ ID NO: 45257 - RNA, 20 nt, synthetic construct
  source 1..20: mol_type = other RNA
gtggggaatgctcataatta

SEQ ID NO: 45258 - RNA, 20 nt, synthetic construct
  source 1..20: mol_type = other RNA
gtggggacagctcaattaag

SEQ ID NO: 45259 - RNA, 20 nt, synthetic construct
  source 1..20: mol_type = other RNA
gtggggactttgtggcctct

SEQ ID NO: 45260 - RNA, 20 nt, synthetic construct
  source 1..20: mol_type = other RNA
gtggggcacctaaaaggttg

SEQ ID NO: 45261 - RNA, 20 nt, synthetic construct
  source 1..20: mol_type = other RNA
gtgggggcatcaaagctacc

SEQ ID NO: 45262 - RNA, 20 nt, synthetic construct
  source 1..20: mol_type = other RNA
gtgggggctcacatctgtaa

SEQ ID NO: 45263 - RNA, 20 nt, synthetic construct
  source 1..20: mol_type = other RNA
gtggggggagggagggggag

SEQ ID NO: 45264 - RNA, 20 nt, synthetic construct
  source 1..20: mol_type = other RNA
gtggggggatgtagaaggat

SEQ ID NO: 45265 - RNA, 20 nt, synthetic construct
  source 1..20: mol_type = other RNA
gtgggtaaattaagtaaaat

SEQ ID NO: 45266 - RNA, 20 nt, synthetic construct
  source 1..20: mol_type = other RNA
gtgggtagaagcagcaaggg

SEQ ID NO: 45267 - RNA, 20 nt, synthetic construct
  source 1..20: mol_type = other RNA
gtgggtattttgttgttgtt

SEQ ID NO: 45268 - RNA, 20 nt, synthetic construct
  source 1..20: mol_type = other RNA
gtgggtcagctagtgtgtct

SEQ ID NO: 45269 - RNA, 20 nt, synthetic construct
  source 1..20: mol_type = other RNA
gtgggtcgggtgtcagaaac

SEQ ID NO: 45270 - RNA, 20 nt, synthetic construct
  source 1..20: mol_type = other RNA
gtgggtggatgggtgtaggg

SEQ ID NO: 45271 - RNA, 20 nt, synthetic construct
  source 1..20: mol_type = other RNA
gtgggttaaaagttagctgg

SEQ ID NO: 45272 - RNA, 20 nt, synthetic construct
  source 1..20: mol_type = other RNA
gtgggttcaattatgtggaa

SEQ ID NO: 45273 - RNA, 20 nt, synthetic construct
  source 1..20: mol_type = other RNA
gtggtaactagatgcctcga

SEQ ID NO: 45274 - RNA, 20 nt, synthetic construct
  source 1..20: mol_type = other RNA
gtggtaactgatgtgaggat

SEQ ID NO: 45275 - RNA, 20 nt, synthetic construct
  source 1..20: mol_type = other RNA
gtggtaaggactgaagtcct

SEQ ID NO: 45276 - RNA, 20 nt, synthetic construct
  source 1..20: mol_type = other RNA
gtggtaaggagccaaacatc

SEQ ID NO: 45277 - RNA, 20 nt, synthetic construct
  source 1..20: mol_type = other RNA
gtggtagggagggggctgag

SEQ ID NO: 45278 - RNA, 20 nt, synthetic construct
  source 1..20: mol_type = other RNA
gtggtaggtgtgtgtaatcc

SEQ ID NO: 45279 - RNA, 20 nt, synthetic construct
  source 1..20: mol_type = other RNA
gtggtagtaaggatcgttag

SEQ ID NO: 45280 - RNA, 20 nt, synthetic construct
  source 1..20: mol_type = other RNA
gtggtagttacacaagtgtt

SEQ ID NO: 45281 - RNA, 20 nt, synthetic construct
  source 1..20: mol_type = other RNA
gtggtatgcactgtactcct

SEQ ID NO: 45282 - RNA, 20 nt, synthetic construct
  source 1..20: mol_type = other RNA
gtggtatgggagatgtgtaa

SEQ ID NO: 45283 - RNA, 20 nt, synthetic construct
  source 1..20: mol_type = other RNA
gtggtattctatcatcaaga

SEQ ID NO: 45284 - RNA, 20 nt, synthetic construct
  source 1..20: mol_type = other RNA
gtggtatttaatctgtcagc

SEQ ID NO: 45285 - RNA, 20 nt, synthetic construct
  source 1..20: mol_type = other RNA
gtggtcacactttttgtgag

SEQ ID NO: 45286 - RNA, 20 nt, synthetic construct
  source 1..20: mol_type = other RNA
gtggtcactgtttggacagt

SEQ ID NO: 45287 - RNA, 20 nt, synthetic construct
  source 1..20: mol_type = other RNA
gtggtccctgctactcagga

SEQ ID NO: 45288 - RNA, 20 nt, synthetic construct
  source 1..20: mol_type = other RNA
gtggtctcaccctcaggact

SEQ ID NO: 45289 - RNA, 20 nt, synthetic construct
  source 1..20: mol_type = other RNA
gtggtctcagctcctcagaa

SEQ ID NO: 45290 - RNA, 20 nt, synthetic construct
  source 1..20: mol_type = other RNA
gtggtctcttcgagggggct

SEQ ID NO: 45291 - RNA, 20 nt, synthetic construct
  source 1..20: mol_type = other RNA
gtggtcttaagagactctca

SEQ ID NO: 45292 - RNA, 20 nt, synthetic construct
  source 1..20: mol_type = other RNA
gtggtcttgtctcaaccttt

SEQ ID NO: 45293 - RNA, 20 nt, synthetic construct
  source 1..20: mol_type = other RNA
gtggtgcaatcacggctgat

SEQ ID NO: 45294 - RNA, 20 nt, synthetic construct
  source 1..20: mol_type = other RNA
gtggtgcaatgataggtcac

SEQ ID NO: 45295 - RNA, 20 nt, synthetic construct
  source 1..20: mol_type = other RNA
gtggtgctgcacgtctgtgg

SEQ ID NO: 45296 - RNA, 20 nt, synthetic construct
  source 1..20: mol_type = other RNA
gtggtgctggactggaggga

SEQ ID NO: 45297 - RNA, 20 nt, synthetic construct
  source 1..20: mol_type = other RNA
gtggtgcttaattcaaacaa

SEQ ID NO: 45298 - RNA, 20 nt, synthetic construct
  source 1..20: mol_type = other RNA
gtggtgcttgaactgctggt

SEQ ID NO: 45299 - RNA, 20 nt, synthetic construct
  source 1..20: mol_type = other RNA
gtggtgcttttgctgcatcc

SEQ ID NO: 45300 - RNA, 20 nt, synthetic construct
  source 1..20: mol_type = other RNA
gtggtggatagagagattca

SEQ ID NO: 45301 - RNA, 20 nt, synthetic construct
  source 1..20: mol_type = other RNA
gtggtggcggatgccggtaa

SEQ ID NO: 45302 - RNA, 20 nt, synthetic construct
  source 1..20: mol_type = other RNA
gtggtggtagtaaggatcgt

SEQ ID NO: 45303 - RNA, 20 nt, synthetic construct
  source 1..20: mol_type = other RNA
gtggtggtatgcactgtact

SEQ ID NO: 45304 - RNA, 20 nt, synthetic construct
  source 1..20: mol_type = other RNA
gtggtggtctcaccctcagg

SEQ ID NO: 45305 - RNA, 20 nt, synthetic construct
  source 1..20: mol_type = other RNA
gtggtgtggcatgtctgtag

SEQ ID NO: 45306 - RNA, 20 nt, synthetic construct
  source 1..20: mol_type = other RNA
gtggtgtggtcttgtctcaa

SEQ ID NO: 45307 - RNA, 20 nt, synthetic construct
  source 1..20: mol_type = other RNA
gtggtgtgtgactgtagtcc

SEQ ID NO: 45308 - RNA, 20 nt, synthetic construct
  source 1..20: mol_type = other RNA
gtggttaggaaaatacatga

SEQ ID NO: 45309 - RNA, 20 nt, synthetic construct
  source 1..20: mol_type = other RNA
gtggttatagccataagagt

SEQ ID NO: 45310 - RNA, 20 nt, synthetic construct
  source 1..20: mol_type = other RNA
gtggttattgagtctgtagg

SEQ ID NO: 45311 - RNA, 20 nt, synthetic construct
  source 1..20: mol_type = other RNA
gtggttcatatttccctttt

SEQ ID NO: 45312 - RNA, 20 nt, synthetic construct
  source 1..20: mol_type = other RNA
gtggttccatttgttttgtg

SEQ ID NO: 45313 - RNA, 20 nt, synthetic construct
  source 1..20: mol_type = other RNA
gtggttctgcctaatctcta

SEQ ID NO: 45314 - RNA, 20 nt, synthetic construct
  source 1..20: mol_type = other RNA
gtggttctgcgtgttatttt

SEQ ID NO: 45315 - RNA, 20 nt, synthetic construct
  source 1..20: mol_type = other RNA
gtggttgacccataaactga

SEQ ID NO: 45316 - RNA, 20 nt, synthetic construct
  source 1..20: mol_type = other RNA
gtggttggaaaacttttaac

SEQ ID NO: 45317 - RNA, 20 nt, synthetic construct
  source 1..20: mol_type = other RNA
gtggttgtgcttcgaggtcg

SEQ ID NO: 45318 - RNA, 20 nt, synthetic construct
  source 1..20: mol_type = other RNA
gtggttgtggaattaactcc

SEQ ID NO: 45319 - RNA, 20 nt, synthetic construct
  source 1..20: mol_type = other RNA
gtggtttattcatataatgg

SEQ ID NO: 45320 - RNA, 20 nt, synthetic construct
  source 1..20: mol_type = other RNA
gtggtttcttgaatctctct

SEQ ID NO: 45321 - RNA, 20 nt, synthetic construct
  source 1..20: mol_type = other RNA
gtggtttgaaccccagaagg

SEQ ID NO: 45322 - RNA, 20 nt, synthetic construct
  source 1..20: mol_type = other RNA
gtggtttgaagcttcacttc

SEQ ID NO: 45323 - RNA, 20 nt, synthetic construct
  source 1..20: mol_type = other RNA
gtggtttgccttttcactct

SEQ ID NO: 45324 - RNA, 20 nt, synthetic construct
  source 1..20: mol_type = other RNA
gtggttttaacctcttgaag

SEQ ID NO: 45325 - RNA, 20 nt, synthetic construct
  source 1..20: mol_type = other RNA
gtggtttttggttcacttga

SEQ ID NO: 45326 - RNA, 20 nt, synthetic construct
  source 1..20: mol_type = other RNA
gtgtaaaaagacattattct

SEQ ID NO: 45327 - RNA, 20 nt, synthetic construct
  source 1..20: mol_type = other RNA
gtgtaaaacatctggaagga

SEQ ID NO: 45328 - RNA, 20 nt, synthetic construct
  source 1..20: mol_type = other RNA
gtgtaaaaggctaatttttt

SEQ ID NO: 45329 - RNA, 20 nt, synthetic construct
  source 1..20: mol_type = other RNA
gtgtaaaatacaacagcacc

SEQ ID NO: 45330 - RNA, 20 nt, synthetic construct
  source 1..20: mol_type = other RNA
gtgtaaacactgttctgcgt

SEQ ID NO: 45331 - RNA, 20 nt, synthetic construct
  source 1..20: mol_type = other RNA
gtgtaaactaaaagtaattg

SEQ ID NO: 45332 - RNA, 20 nt, synthetic construct
  source 1..20: mol_type = other RNA
gtgtaaactgttggaaaaat

SEQ ID NO: 45333 - RNA, 20 nt, synthetic construct
  source 1..20: mol_type = other RNA
gtgtaaagtttctctctccc

SEQ ID NO: 45334 - RNA, 20 nt, synthetic construct
  source 1..20: mol_type = other RNA
gtgtaacatacacatcagat

SEQ ID NO: 45335 - RNA, 20 nt, synthetic construct
  source 1..20: mol_type = other RNA
gtgtaactaccactgaggtc

SEQ ID NO: 45336 - RNA, 20 nt, synthetic construct
  source 1..20: mol_type = other RNA
gtgtaagaaatgccacattt

SEQ ID NO: 45337 - RNA, 20 nt, synthetic construct
  source 1..20: mol_type = other RNA
gtgtaagagattaattcagt

SEQ ID NO: 45338 - RNA, 20 nt, synthetic construct
  source 1..20: mol_type = other RNA
gtgtaagcacacatgaacct

SEQ ID NO: 45339 - RNA, 20 nt, synthetic construct
  source 1..20: mol_type = other RNA
gtgtaaggtgtttggtgaat

SEQ ID NO: 45340 - RNA, 20 nt, synthetic construct
  source 1..20: mol_type = other RNA
gtgtaatactgtagaatgtt

SEQ ID NO: 45341 - RNA, 20 nt, synthetic construct
  source 1..20: mol_type = other RNA
gtgtaattgtaccttggaga

SEQ ID NO: 45342 - RNA, 20 nt, synthetic construct
  source 1..20: mol_type = other RNA
gtgtaattttttacaagtac

SEQ ID NO: 45343 - RNA, 20 nt, synthetic construct
  source 1..20: mol_type = other RNA
gtgtacaatggggctttact

SEQ ID NO: 45344 - RNA, 20 nt, synthetic construct
  source 1..20: mol_type = other RNA
gtgtacaattaggctgtttg

SEQ ID NO: 45345 - RNA, 20 nt, synthetic construct
  source 1..20: mol_type = other RNA
gtgtacaattcggtggcatt

SEQ ID NO: 45346 - RNA, 20 nt, synthetic construct
  source 1..20: mol_type = other RNA
gtgtacataaaataaaaacc

SEQ ID NO: 45347 - RNA, 20 nt, synthetic construct
  source 1..20: mol_type = other RNA
gtgtaccaaaagtcctgttc

SEQ ID NO: 45348 - RNA, 20 nt, synthetic construct
  source 1..20: mol_type = other RNA
gtgtacccgtgtgttttgtt

SEQ ID NO: 45349 - RNA, 20 nt, synthetic construct
  source 1..20: mol_type = other RNA
gtgtactagtctccatacaa

SEQ ID NO: 45350 - RNA, 20 nt, synthetic construct
  source 1..20: mol_type = other RNA
gtgtactgaaaccagtgctc

SEQ ID NO: 45351 - RNA, 20 nt, synthetic construct
  source 1..20: mol_type = other RNA
gtgtagaaatgtggagataa

SEQ ID NO: 45352 - RNA, 20 nt, synthetic construct
  source 1..20: mol_type = other RNA
gtgtagaggtgaagttaagg

SEQ ID NO: 45353 - RNA, 20 nt, synthetic construct
  source 1..20: mol_type = other RNA
gtgtagccacaagccacatg

SEQ ID NO: 45354 - RNA, 20 nt, synthetic construct
  source 1..20: mol_type = other RNA
gtgtagcgggaaaaaataat

SEQ ID NO: 45355 - RNA, 20 nt, synthetic construct
  source 1..20: mol_type = other RNA
gtgtagctgtggctcactca

SEQ ID NO: 45356 - RNA, 20 nt, synthetic construct
  source 1..20: mol_type = other RNA
gtgtaggaaggaacacacac

SEQ ID NO: 45357 - RNA, 20 nt, synthetic construct
  source 1..20: mol_type = other RNA
gtgtagggggaaaactccaa

SEQ ID NO: 45358 - RNA, 20 nt, synthetic construct
  source 1..20: mol_type = other RNA
gtgtagggtttggcagttta

SEQ ID NO: 45359 - RNA, 20 nt, synthetic construct
  source 1..20: mol_type = other RNA
gtgtagtcagacacactagc

SEQ ID NO: 45360 - RNA, 20 nt, synthetic construct
  source 1..20: mol_type = other RNA
gtgtagtcagtgaagatgct

SEQ ID NO: 45361 - RNA, 20 nt, synthetic construct
  source 1..20: mol_type = other RNA
gtgtagttattattgtcatt

SEQ ID NO: 45362 - RNA, 20 nt, synthetic construct
  source 1..20: mol_type = other RNA
gtgtagttcatcagcataaa

SEQ ID NO: 45363 - RNA, 20 nt, synthetic construct
  source 1..20: mol_type = other RNA
gtgtagttctggtgtcgttt

SEQ ID NO: 45364 - RNA, 20 nt, synthetic construct
  source 1..20: mol_type = other RNA
gtgtataacccgttttttcc

SEQ ID NO: 45365 - RNA, 20 nt, synthetic construct
  source 1..20: mol_type = other RNA
gtgtatactgggtgtgatgg

SEQ ID NO: 45366 - RNA, 20 nt, synthetic construct
  source 1..20: mol_type = other RNA
gtgtatatggtaaaatgtac

SEQ ID NO: 45367 - RNA, 20 nt, synthetic construct
  source 1..20: mol_type = other RNA
gtgtatcagatgcttctagc

SEQ ID NO: 45368 - RNA, 20 nt, synthetic construct
  source 1..20: mol_type = other RNA
gtgtatcttttgttagattt

SEQ ID NO: 45369 - RNA, 20 nt, synthetic construct
  source 1..20: mol_type = other RNA
gtgtatgatcaaagtgaaag

SEQ ID NO: 45370 - RNA, 20 nt, synthetic construct
  source 1..20: mol_type = other RNA
gtgtatgatcttattaatgt

SEQ ID NO: 45371 - RNA, 20 nt, synthetic construct
  source 1..20: mol_type = other RNA
gtgtatgatttctaggccct

SEQ ID NO: 45372 - RNA, 20 nt, synthetic construct
  source 1..20: mol_type = other RNA
gtgtatgcagggaaatcatt

SEQ ID NO: 45373 - RNA, 20 nt, synthetic construct
  source 1..20: mol_type = other RNA
gtgtatgtgtagtcagtgaa

SEQ ID NO: 45374 - RNA, 20 nt, synthetic construct
  source 1..20: mol_type = other RNA
gtgtatgttacacttccagt

SEQ ID NO: 45375 - RNA, 20 nt, synthetic construct
  source 1..20: mol_type = other RNA
gtgtattattctaaacacac

SEQ ID NO: 45376 - RNA, 20 nt, synthetic construct
  source 1..20: mol_type = other RNA
gtgtattgagtgtagctgtg

SEQ ID NO: 45377 - RNA, 20 nt, synthetic construct
  source 1..20: mol_type = other RNA
gtgtattgtaccttgattta

SEQ ID NO: 45378 - RNA, 20 nt, synthetic construct
  source 1..20: mol_type = other RNA
gtgtatttagggagcatata

SEQ ID NO: 45379 - RNA, 20 nt, synthetic construct
  source 1..20: mol_type = other RNA
gtgtcaagtacaactaataa

SEQ ID NO: 45380 - RNA, 20 nt, synthetic construct
  source 1..20: mol_type = other RNA
gtgtcactggatagaagtgt

SEQ ID NO: 45381 - RNA, 20 nt, synthetic construct
  source 1..20: mol_type = other RNA
gtgtcagaaaccatcgttca

SEQ ID NO: 45382 - RNA, 20 nt, synthetic construct
  source 1..20: mol_type = other RNA
gtgtcagaattccatcagtg

SEQ ID NO: 45383 - RNA, 20 nt, synthetic construct
  source 1..20: mol_type = other RNA
gtgtcagtgacagttctgtg

SEQ ID NO: 45384 - RNA, 20 nt, synthetic construct
  source 1..20: mol_type = other RNA
gtgtcatttttaagaaatcg

SEQ ID NO: 45385 - RNA, 20 nt, synthetic construct
  source 1..20: mol_type = other RNA
gtgtcatttttgtattctga

SEQ ID NO: 45386 - RNA, 20 nt, synthetic construct
  source 1..20: mol_type = other RNA
gtgtccacacaatggtcaga

SEQ ID NO: 45387 - RNA, 20 nt, synthetic construct
  source 1..20: mol_type = other RNA
gtgtccaggccaacagggcc

SEQ ID NO: 45388 - RNA, 20 nt, synthetic construct
  source 1..20: mol_type = other RNA
gtgtccatctcccatcacta

SEQ ID NO: 45389 - RNA, 20 nt, synthetic construct
  source 1..20: mol_type = other RNA
gtgtcctcaggctccaggta

SEQ ID NO: 45390 - RNA, 20 nt, synthetic construct
  source 1..20: mol_type = other RNA
gtgtcctgaatgatttccct

SEQ ID NO: 45391 - RNA, 20 nt, synthetic construct
  source 1..20: mol_type = other RNA
gtgtccttctgagaaggcga

SEQ ID NO: 45392 - RNA, 20 nt, synthetic construct
  source 1..20: mol_type = other RNA
gtgtcgagaaaaatggggat

SEQ ID NO: 45393 - RNA, 20 nt, synthetic construct
  source 1..20: mol_type = other RNA
gtgtcgtttatttcttctcc

SEQ ID NO: 45394 - RNA, 20 nt, synthetic construct
  source 1..20: mol_type = other RNA
gtgtctaatgggtacagggt

SEQ ID NO: 45395 - RNA, 20 nt, synthetic construct
  source 1..20: mol_type = other RNA
gtgtctagtgaatgagacca

SEQ ID NO: 45396 - RNA, 20 nt, synthetic construct
  source 1..20: mol_type = other RNA
gtgtctcataaagccggatt

SEQ ID NO: 45397 - RNA, 20 nt, synthetic construct
  source 1..20: mol_type = other RNA
gtgtctcatttaataactaa

SEQ ID NO: 45398 - RNA, 20 nt, synthetic construct
  source 1..20: mol_type = other RNA
gtgtctccataccccctgga

SEQ ID NO: 45399 - RNA, 20 nt, synthetic construct
  source 1..20: mol_type = other RNA
gtgtctctgacatgagagct

SEQ ID NO: 45400 - RNA, 20 nt, synthetic construct
  source 1..20: mol_type = other RNA
gtgtctctgctctcaagtaa

SEQ ID NO: 45401 - RNA, 20 nt, synthetic construct
  source 1..20: mol_type = other RNA
gtgtctgactacactgaagg

SEQ ID NO: 45402 - RNA, 20 nt, synthetic construct
  source 1..20: mol_type = other RNA
gtgtctgatgtgtgtctctg

SEQ ID NO: 45403 - RNA, 20 nt, synthetic construct
  source 1..20: mol_type = other RNA
gtgtctgcgccttaaagcca

SEQ ID NO: 45404 - RNA, 20 nt, synthetic construct
  source 1..20: mol_type = other RNA
gtgtctgctacaggggcatt

SEQ ID NO: 45405 - RNA, 20 nt, synthetic construct
  source 1..20: mol_type = other RNA
gtgtcttaaattcaaagtaa

SEQ ID NO: 45406 - RNA, 20 nt, synthetic construct
  source 1..20: mol_type = other RNA
gtgtcttaatcctattttgt

SEQ ID NO: 45407 - RNA, 20 nt, synthetic construct
  source 1..20: mol_type = other RNA
gtgtcttagtctgacttctc

SEQ ID NO: 45408 - RNA, 20 nt, synthetic construct
  source 1..20: mol_type = other RNA
gtgtcttattgttttgattt

SEQ ID NO: 45409 - RNA, 20 nt, synthetic construct
  source 1..20: mol_type = other RNA
gtgtcttctgtttttcttag

SEQ ID NO: 45410 - RNA, 20 nt, synthetic construct
  source 1..20: mol_type = other RNA
gtgtctttttatattatgtg

SEQ ID NO: 45411 - RNA, 20 nt, synthetic construct
  source 1..20: mol_type = other RNA
gtgtgaaaccaagcaagtaa

SEQ ID NO: 45412 - RNA, 20 nt, synthetic construct
  source 1..20: mol_type = other RNA
gtgtgaaagtattaaaagca

SEQ ID NO: 45413 - RNA, 20 nt, synthetic construct
  source 1..20: mol_type = other RNA
gtgtgaaccacgcatctggt

SEQ ID NO: 45414 - RNA, 20 nt, synthetic construct
  source 1..20: mol_type = other RNA
gtgtgaacgatggtttctga

SEQ ID NO: 45415 - RNA, 20 nt, synthetic construct
  source 1..20: mol_type = other RNA
gtgtgaagaaggaatgtgca

SEQ ID NO: 45416 - RNA, 20 nt, synthetic construct
  source 1..20: mol_type = other RNA
gtgtgaagattaagcacatc

SEQ ID NO: 45417 - RNA, 20 nt, synthetic construct
  source 1..20: mol_type = other RNA
gtgtgaagttgggcttaaca

SEQ ID NO: 45418 - RNA, 20 nt, synthetic construct
  source 1..20: mol_type = other RNA
gtgtgaataggaaagtgaca

SEQ ID NO: 45419 - RNA, 20 nt, synthetic construct
  source 1..20: mol_type = other RNA
gtgtgaatgaggagtgaatt

SEQ ID NO: 45420 - RNA, 20 nt, synthetic construct
  source 1..20: mol_type = other RNA
gtgtgaatggaaaattcaaa

SEQ ID NO: 45421 - RNA, 20 nt, synthetic construct
  source 1..20: mol_type = other RNA
gtgtgacaaaaagtaggggt

SEQ ID NO: 45422 - RNA, 20 nt, synthetic construct
  source 1..20: mol_type = other RNA
gtgtgaccacattcccaaat

SEQ ID NO: 45423 - RNA, 20 nt, synthetic construct
  source 1..20: mol_type = other RNA
gtgtgactgtagtccctgct

SEQ ID NO: 45424 - RNA, 20 nt, synthetic construct
  source 1..20: mol_type = other RNA
gtgtgagattgatagatcat

SEQ ID NO: 45425 - RNA, 20 nt, synthetic construct
  source 1..20: mol_type = other RNA
gtgtgagcaaaaatacagct

SEQ ID NO: 45426 - RNA, 20 nt, synthetic construct
  source 1..20: mol_type = other RNA
gtgtgagccaccgtgccggg

SEQ ID NO: 45427 - RNA, 20 nt, synthetic construct
  source 1..20: mol_type = other RNA
gtgtgagccactacgcccgg

SEQ ID NO: 45428 - RNA, 20 nt, synthetic construct
  source 1..20: mol_type = other RNA
gtgtgagctctagccttgta

SEQ ID NO: 45429 - RNA, 20 nt, synthetic construct
  source 1..20: mol_type = other RNA
gtgtgataactgatatgagg

SEQ ID NO: 45430 - RNA, 20 nt, synthetic construct
  source 1..20: mol_type = other RNA
gtgtgatcaggaaagatgaa

SEQ ID NO: 45431 - RNA, 20 nt, synthetic construct
  source 1..20: mol_type = other RNA
gtgtgatctctgctcaccgc

SEQ ID NO: 45432 - RNA, 20 nt, synthetic construct
  source 1..20: mol_type = other RNA
gtgtgatgggggtaagattg

SEQ ID NO: 45433 - RNA, 20 nt, synthetic construct
  source 1..20: mol_type = other RNA
gtgtgatttcatatgaattt

SEQ ID NO: 45434 - RNA, 20 nt, synthetic construct
  source 1..20: mol_type = other RNA
gtgtgcaaaggattagaaag

SEQ ID NO: 45435 - RNA, 20 nt, synthetic construct
  source 1..20: mol_type = other RNA
gtgtgcacaacacatgcaca

SEQ ID NO: 45436 - RNA, 20 nt, synthetic construct
  source 1..20: mol_type = other RNA
gtgtgcacctaataaaatgt

SEQ ID NO: 45437 - RNA, 20 nt, synthetic construct
  source 1..20: mol_type = other RNA
gtgtgcacgtttgctttgga

SEQ ID NO: 45438 - RNA, 20 nt, synthetic construct
  source 1..20: mol_type = other RNA
gtgtgcatgaccctgctatg

SEQ ID NO: 45439 - RNA, 20 nt, synthetic construct
  source 1..20: mol_type = other RNA
gtgtgcatgcatgtctgtct

SEQ ID NO: 45440 - RNA, 20 nt, synthetic construct
  source 1..20: mol_type = other RNA
gtgtgcatgctcccatttgg

SEQ ID NO: 45441 - RNA, 20 nt, synthetic construct
  source 1..20: mol_type = other RNA
gtgtgcatgtgttgtgcaca

SEQ ID NO: 45442 - RNA, 20 nt, synthetic construct
  source 1..20: mol_type = other RNA
gtgtgcccaaggaaggcagg

SEQ ID NO: 45443 - RNA, 20 nt, synthetic construct
  source 1..20: mol_type = other RNA
gtgtgcccaggctgacttag

SEQ ID NO: 45444 - RNA, 20 nt, synthetic construct
  source 1..20: mol_type = other RNA
gtgtgctcttttcatcactc

SEQ ID NO: 45445 - RNA, 20 nt, synthetic construct
  source 1..20: mol_type = other RNA
gtgtgctgactagtacgtgc

SEQ ID NO: 45446 - RNA, 20 nt, synthetic construct
  source 1..20: mol_type = other RNA
gtgtgcttacacacacgttt

SEQ ID NO: 45447 - RNA, 20 nt, synthetic construct
  source 1..20: mol_type = other RNA
gtgtgcttctgataggaata

SEQ ID NO: 45448 - RNA, 20 nt, synthetic construct
  source 1..20: mol_type = other RNA
gtgtgcttggagtcacttga

SEQ ID NO: 45449 - RNA, 20 nt, synthetic construct
  source 1..20: mol_type = other RNA
gtgtgcttgggctcccttcc

SEQ ID NO: 45450 - RNA, 20 nt, synthetic construct
  source 1..20: mol_type = other RNA
gtgtggacacactgaaacaa

SEQ ID NO: 45451 - RNA, 20 nt, synthetic construct
  source 1..20: mol_type = other RNA
gtgtggagtggggcacctaa

SEQ ID NO: 45452 - RNA, 20 nt, synthetic construct
  source 1..20: mol_type = other RNA
gtgtggcaggggctgcatca

SEQ ID NO: 45453 - RNA, 20 nt, synthetic construct
  source 1..20: mol_type = other RNA
gtgtggcatgtctgtagtta

SEQ ID NO: 45454 - RNA, 20 nt, synthetic construct
  source 1..20: mol_type = other RNA
gtgtggcttctcaaactgtg

SEQ ID NO: 45455 - RNA, 20 nt, synthetic construct
  source 1..20: mol_type = other RNA
gtgtggctttaaggcgcaga

SEQ ID NO: 45456 - RNA, 20 nt, synthetic construct
  source 1..20: mol_type = other RNA
gtgtgggccaccaagccctg

SEQ ID NO: 45457 - RNA, 20 nt, synthetic construct
  source 1..20: mol_type = other RNA
gtgtggtcttgtctcaacct

SEQ ID NO: 45458 - RNA, 20 nt, synthetic construct
  source 1..20: mol_type = other RNA
gtgtggtgctgcacgtctgt

SEQ ID NO: 45459 - RNA, 20 nt, synthetic construct
  source 1..20: mol_type = other RNA
gtgtggtggtctcaccctca

SEQ ID NO: 45460 - RNA, 20 nt, synthetic construct
  source 1..20: mol_type = other RNA
gtgtggttcatatttccctt

SEQ ID NO: 45461 - RNA, 20 nt, synthetic construct
  source 1..20: mol_type = other RNA
gtgtggtttgccttttcact

SEQ ID NO: 45462 - RNA, 20 nt, synthetic construct
  source 1..20: mol_type = other RNA
gtgtgtaaacactgttctgc

SEQ ID NO: 45463 - RNA, 20 nt, synthetic construct
  source 1..20: mol_type = other RNA
gtgtgtaagcacacatgaac

SEQ ID NO: 45464 - RNA, 20 nt, synthetic construct
  source 1..20: mol_type = other RNA
gtgtgtataacccgtttttt

SEQ ID NO: 45465 - RNA, 20 nt, synthetic construct
  source 1..20: mol_type = other RNA
gtgtgtccacacaatggtca

SEQ ID NO: 45466 - RNA, 20 nt, synthetic construct
  source 1..20: mol_type = other RNA
gtgtgtccaggccaacaggg

SEQ ID NO: 45467 - RNA, 20 nt, synthetic construct
  source 1..20: mol_type = other RNA
gtgtgtcgagaaaaatgggg

SEQ ID NO: 45468 - RNA, 20 nt, synthetic construct
  source 1..20: mol_type = other RNA
gtgtgtctcataaagccgga

SEQ ID NO: 45469 - RNA, 20 nt, synthetic construct
  source 1..20: mol_type = other RNA
gtgtgtctctgctctcaagt

SEQ ID NO: 45470 - RNA, 20 nt, synthetic construct
  source 1..20: mol_type = other RNA
gtgtgtctgactacactgaa

SEQ ID NO: 45471 - RNA, 20 nt, synthetic construct
  source 1..20: mol_type = other RNA
gtgtgtctgcgccttaaagc

SEQ ID NO: 45472 - RNA, 20 nt, synthetic construct
  source 1..20: mol_type = other RNA
gtgtgtgaatggaaaattca

SEQ ID NO: 45473 - RNA, 20 nt, synthetic construct
  source 1..20: mol_type = other RNA
gtgtgtgactgtagtccctg

SEQ ID NO: 45474 - RNA, 20 nt, synthetic construct
  source 1..20: mol_type = other RNA
gtgtgtgcaaaggattagaa

SEQ ID NO: 45475 - RNA, 20 nt, synthetic construct
  source 1..20: mol_type = other RNA
gtgtgtggagtggggcacct

SEQ ID NO: 45476 - RNA, 20 nt, synthetic construct
  source 1..20: mol_type = other RNA
gtgtgtgtaagcacacatga

SEQ ID NO: 45477 - RNA, 20 nt, synthetic construct
  source 1..20: mol_type = other RNA
gtgtgtgtccaggccaacag

SEQ ID NO: 45478 - RNA, 20 nt, synthetic construct
  source 1..20: mol_type = other RNA
gtgtgtgttccttcctacac

SEQ ID NO: 45479 - RNA, 20 nt, synthetic construct
  source 1..20: mol_type = other RNA
gtgtgttaaatttgattgtt

SEQ ID NO: 45480 - RNA, 20 nt, synthetic construct
  source 1..20: mol_type = other RNA
gtgtgttccagacaaaaatt

SEQ ID NO: 45481 - RNA, 20 nt, synthetic construct
  source 1..20: mol_type = other RNA
gtgtgttccttcctacacat

SEQ ID NO: 45482 - RNA, 20 nt, synthetic construct
  source 1..20: mol_type = other RNA
gtgtgttctctttttgacag

SEQ ID NO: 45483 - RNA, 20 nt, synthetic construct
  source 1..20: mol_type = other RNA
gtgtgttctgccttgaggtg

SEQ ID NO: 45484 - RNA, 20 nt, synthetic construct
  source 1..20: mol_type = other RNA
gtgtgttgactgacataact

SEQ ID NO: 45485 - RNA, 20 nt, synthetic construct
  source 1..20: mol_type = other RNA
gtgtgtttaatttccaccca

SEQ ID NO: 45486 - RNA, 20 nt, synthetic construct
  source 1..20: mol_type = other RNA
gtgtgtttagaataatacac

SEQ ID NO: 45487 - RNA, 20 nt, synthetic construct
  source 1..20: mol_type = other RNA
gtgtgtttcgcaaagtaaaa

SEQ ID NO: 45488 - RNA, 20 nt, synthetic construct
  source 1..20: mol_type = other RNA
gtgtgtttgtgaaaaataca

SEQ ID NO: 45489 - RNA, 20 nt, synthetic construct
  source 1..20: mol_type = other RNA
gtgtgtttgtttgctagagc

SEQ ID NO: 45490 - RNA, 20 nt, synthetic construct
  source 1..20: mol_type = other RNA
gtgtgtttttgtaaatgaaa

SEQ ID NO: 45491 - RNA, 20 nt, synthetic construct
  source 1..20: mol_type = other RNA
gtgttaaaccattcttgcat

SEQ ID NO: 45492 - RNA, 20 nt, synthetic construct
  source 1..20: mol_type = other RNA
gtgttaaatttgattgttag

SEQ ID NO: 45493 - RNA, 20 nt, synthetic construct
  source 1..20: mol_type = other RNA
gtgttaagccgttccatcag

SEQ ID NO: 45494 - RNA, 20 nt, synthetic construct
  source 1..20: mol_type = other RNA
gtgttaattatttgtgcata

SEQ ID NO: 45495 - RNA, 20 nt, synthetic construct
  source 1..20: mol_type = other RNA
gtgttaattcttccttaatg

SEQ ID NO: 45496 - RNA, 20 nt, synthetic construct
  source 1..20: mol_type = other RNA
gtgttacaactctaataaca

SEQ ID NO: 45497 - RNA, 20 nt, synthetic construct
  source 1..20: mol_type = other RNA
gtgttacattgccttcgcag

SEQ ID NO: 45498 - RNA, 20 nt, synthetic construct
  source 1..20: mol_type = other RNA
gtgttacttgaaatcatttc

SEQ ID NO: 45499 - RNA, 20 nt, synthetic construct
  source 1..20: mol_type = other RNA
gtgttagaattacaggcatg

SEQ ID NO: 45500 - RNA, 20 nt, synthetic construct
  source 1..20: mol_type = other RNA
gtgttagcaggactggactc

SEQ ID NO: 45501 - RNA, 20 nt, synthetic construct
  source 1..20: mol_type = other RNA
gtgttaggcaatccttccgc

SEQ ID NO: 45502 - RNA, 20 nt, synthetic construct
  source 1..20: mol_type = other RNA
gtgttatttgttctgtcacg

SEQ ID NO: 45503 - RNA, 20 nt, synthetic construct
  source 1..20: mol_type = other RNA
gtgttattttaatcgaatcc

SEQ ID NO: 45504 - RNA, 20 nt, synthetic construct
  source 1..20: mol_type = other RNA
gtgttcaaaagccccaaacc

SEQ ID NO: 45505 - RNA, 20 nt, synthetic construct
  source 1..20: mol_type = other RNA
gtgttccagacaaaaatttt

SEQ ID NO: 45506 - RNA, 20 nt, synthetic construct
  source 1..20: mol_type = other RNA
gtgttcccttcttaaatgtg

SEQ ID NO: 45507 - RNA, 20 nt, synthetic construct
  source 1..20: mol_type = other RNA
gtgttcctgaagtctttggt

SEQ ID NO: 45508 - RNA, 20 nt, synthetic construct
  source 1..20: mol_type = other RNA
gtgttccttcctacacatat

SEQ ID NO: 45509 - RNA, 20 nt, synthetic construct
  source 1..20: mol_type = other RNA
gtgttctctttttgacagat

SEQ ID NO: 45510 - RNA, 20 nt, synthetic construct
  source 1..20: mol_type = other RNA
gtgttctgccttgaggtgat

SEQ ID NO: 45511 - RNA, 20 nt, synthetic construct
  source 1..20: mol_type = other RNA
gtgttctgtgtttatgaatg

SEQ ID NO: 45512 - RNA, 20 nt, synthetic construct
  source 1..20: mol_type = other RNA
gtgttcttttccttcttaag

SEQ ID NO: 45513 - RNA, 20 nt, synthetic construct
  source 1..20: mol_type = other RNA
gtgttgaccttagtggttga

SEQ ID NO: 45514 - RNA, 20 nt, synthetic construct
  source 1..20: mol_type = other RNA
gtgttgactaccatctctcc

SEQ ID NO: 45515 - RNA, 20 nt, synthetic construct
  source 1..20: mol_type = other RNA
gtgttgactgaattaatctc

SEQ ID NO: 45516 - RNA, 20 nt, synthetic construct
  source 1..20: mol_type = other RNA
gtgttgactgacataactgt

SEQ ID NO: 45517 - RNA, 20 nt, synthetic construct
  source 1..20: mol_type = other RNA
gtgttgagaaagcacataaa

SEQ ID NO: 45518 - RNA, 20 nt, synthetic construct
  source 1..20: mol_type = other RNA
gtgttgagaggctttaagca

SEQ ID NO: 45519 - RNA, 20 nt, synthetic construct
  source 1..20: mol_type = other RNA
gtgttgataaatatgtgtta

SEQ ID NO: 45520 - RNA, 20 nt, synthetic construct
  source 1..20: mol_type = other RNA
gtgttgcttgctctacaaac

SEQ ID NO: 45521 - RNA, 20 nt, synthetic construct
  source 1..20: mol_type = other RNA
gtgttgcttggtgttgactg

SEQ ID NO: 45522 - RNA, 20 nt, synthetic construct
  source 1..20: mol_type = other RNA
gtgttggcactgaagccagt

SEQ ID NO: 45523 - RNA, 20 nt, synthetic construct
  source 1..20: mol_type = other RNA
gtgttggtgcatttgggaca

SEQ ID NO: 45524 - RNA, 20 nt, synthetic construct
  source 1..20: mol_type = other RNA
gtgttggtgtttctgacagg

SEQ ID NO: 45525 - RNA, 20 nt, synthetic construct
  source 1..20: mol_type = other RNA
gtgttgtctgattcagtttg

SEQ ID NO: 45526 - RNA, 20 nt, synthetic construct
  source 1..20: mol_type = other RNA
gtgttgtgcacacatccacg

SEQ ID NO: 45527 - RNA, 20 nt, synthetic construct
  source 1..20: mol_type = other RNA
gtgttgtgtgcacctaataa

SEQ ID NO: 45528 - RNA, 20 nt, synthetic construct
  source 1..20: mol_type = other RNA
gtgttgtttttaaacaatag

SEQ ID NO: 45529 - RNA, 20 nt, synthetic construct
  source 1..20: mol_type = other RNA
gtgtttaatttccacccatg

SEQ ID NO: 45530 - RNA, 20 nt, synthetic construct
  source 1..20: mol_type = other RNA
gtgtttacacacctgaaatt

SEQ ID NO: 45531 - RNA, 20 nt, synthetic construct
  source 1..20: mol_type = other RNA
gtgtttagaataatacactt

SEQ ID NO: 45532 - RNA, 20 nt, synthetic construct
  source 1..20: mol_type = other RNA
gtgtttaggatataagagtg

SEQ ID NO: 45533 - RNA, 20 nt, synthetic construct
  source 1..20: mol_type = other RNA
gtgtttagggacgaatgcat

SEQ ID NO: 45534 - RNA, 20 nt, synthetic construct
  source 1..20: mol_type = other RNA
gtgtttatgaatgatgccat

SEQ ID NO: 45535 - RNA, 20 nt, synthetic construct
  source 1..20: mol_type = other RNA
gtgtttatttagtgaaatag

SEQ ID NO: 45536 - RNA, 20 nt, synthetic construct
  source 1..20: mol_type = other RNA
gtgtttcatttacaaaaaca

SEQ ID NO: 45537 - RNA, 20 nt, synthetic construct
  source 1..20: mol_type = other RNA
gtgtttcccttaaaaggaac

SEQ ID NO: 45538 - RNA, 20 nt, synthetic construct
  source 1..20: mol_type = other RNA
gtgtttcctagattccctct

SEQ ID NO: 45539 - RNA, 20 nt, synthetic construct
  source 1..20: mol_type = other RNA
gtgtttccttccagatgttt

SEQ ID NO: 45540 - RNA, 20 nt, synthetic construct
  source 1..20: mol_type = other RNA
gtgtttcgcaaagtaaaaag

SEQ ID NO: 45541 - RNA, 20 nt, synthetic construct
  source 1..20: mol_type = other RNA
gtgtttctgacaggtggtat

SEQ ID NO: 45542 - RNA, 20 nt, synthetic construct
  source 1..20: mol_type = other RNA
gtgtttctgctattctcttt

SEQ ID NO: 45543 - RNA, 20 nt, synthetic construct
  source 1..20: mol_type = other RNA
gtgtttgaaaagtgtttgtc

SEQ ID NO: 45544 - RNA, 20 nt, synthetic construct
  source 1..20: mol_type = other RNA
gtgtttggtgaattttattc

SEQ ID NO: 45545 - RNA, 20 nt, synthetic construct
  source 1..20: mol_type = other RNA
gtgtttggtttttatggaat

SEQ ID NO: 45546 - RNA, 20 nt, synthetic construct
  source 1..20: mol_type = other RNA
gtgtttgtcacatagaagcg

SEQ ID NO: 45547 - RNA, 20 nt, synthetic construct
  source 1..20: mol_type = other RNA
gtgtttgtgaaaaatacaat

SEQ ID NO: 45548 - RNA, 20 nt, synthetic construct
  source 1..20: mol_type = other RNA
gtgtttgtgaccagatcaaa

SEQ ID NO: 45549 - RNA, 20 nt, synthetic construct
  source 1..20: mol_type = other RNA
gtgtttgtttgctagagctg

SEQ ID NO: 45550 - RNA, 20 nt, synthetic construct
  source 1..20: mol_type = other RNA
gtgttttaaagcagggaggg

SEQ ID NO: 45551 - RNA, 20 nt, synthetic construct
  source 1..20: mol_type = other RNA
gtgttttaggggggaaaaca

SEQ ID NO: 45552 - RNA, 20 nt, synthetic construct
  source 1..20: mol_type = other RNA
gtgttttatttaggccctct

SEQ ID NO: 45553 - RNA, 20 nt, synthetic construct
  source 1..20: mol_type = other RNA
gtgttttatttggctgttac

SEQ ID NO: 45554 - RNA, 20 nt, synthetic construct
  source 1..20: mol_type = other RNA
gtgttttcactctcaatagt

SEQ ID NO: 45555 - RNA, 20 nt, synthetic construct
  source 1..20: mol_type = other RNA
gtgttttcattcgttcaaaa

SEQ ID NO: 45556 - RNA, 20 nt, synthetic construct
  source 1..20: mol_type = other RNA
gtgttttcccccctaaaaca

SEQ ID NO: 45557 - RNA, 20 nt, synthetic construct
  source 1..20: mol_type = other RNA
gtgttttcttcatggactag

SEQ ID NO: 45558 - RNA, 20 nt, synthetic construct
  source 1..20: mol_type = other RNA
gtgttttgatagttgcagat

SEQ ID NO: 45559 - RNA, 20 nt, synthetic construct
  source 1..20: mol_type = other RNA
gtgttttgttttgaataacc

SEQ ID NO: 45560 - RNA, 20 nt, synthetic construct
  source 1..20: mol_type = other RNA
gtgtttttcagccctgatag

SEQ ID NO: 45561 - RNA, 20 nt, synthetic construct
  source 1..20: mol_type = other RNA
gtgtttttctaggtagtttc

SEQ ID NO: 45562 - RNA, 20 nt, synthetic construct
  source 1..20: mol_type = other RNA
gtgtttttgaattctgctta

SEQ ID NO: 45563 - RNA, 20 nt, synthetic construct
  source 1..20: mol_type = other RNA
gtgtttttgtaaatgaaaca

SEQ ID NO: 45564 - RNA, 20 nt, synthetic construct
  source 1..20: mol_type = other RNA
gtgttttttccttctttggg

SEQ ID NO: 45565 - RNA, 20 nt, synthetic construct
  source 1..20: mol_type = other RNA
gttaaaaaatcaaaagacca

SEQ ID NO: 45566 - RNA, 20 nt, synthetic construct
  source 1..20: mol_type = other RNA
gttaaaaacttaagtatctc

SEQ ID NO: 45567 - RNA, 20 nt, synthetic construct
  source 1..20: mol_type = other RNA
gttaaaaccacaaacatgaa

SEQ ID NO: 45568 - RNA, 20 nt, synthetic construct
  source 1..20: mol_type = other RNA
gttaaaactcacaaaaagtg

SEQ ID NO: 45569 - RNA, 20 nt, synthetic construct
  source 1..20: mol_type = other RNA
gttaaaacttgtagaggagg

SEQ ID NO: 45570 - RNA, 20 nt, synthetic construct
  source 1..20: mol_type = other RNA
gttaaaagacatctttcctg

SEQ ID NO: 45571 - RNA, 20 nt, synthetic construct
  source 1..20: mol_type = other RNA
gttaaaagatacgaaaatcc

SEQ ID NO: 45572 - RNA, 20 nt, synthetic construct
  source 1..20: mol_type = other RNA
gttaaaagttagctggcaaa

SEQ ID NO: 45573 - RNA, 20 nt, synthetic construct
  source 1..20: mol_type = other RNA
gttaaaagttttccaaccac

SEQ ID NO: 45574 - RNA, 20 nt, synthetic construct
  source 1..20: mol_type = other RNA
gttaaaatgaaaatgttccc

SEQ ID NO: 45575 - RNA, 20 nt, synthetic construct
  source 1..20: mol_type = other RNA
gttaaacatgtaaaacagac

SEQ ID NO: 45576 - RNA, 20 nt, synthetic construct
  source 1..20: mol_type = other RNA
gttaaacccaacaaacaatt

SEQ ID NO: 45577 - RNA, 20 nt, synthetic construct
  source 1..20: mol_type = other RNA
gttaaacttggtctgggtga

SEQ ID NO: 45578 - RNA, 20 nt, synthetic construct
  source 1..20: mol_type = other RNA
gttaaacttttgtgcatcaa

SEQ ID NO: 45579 - RNA, 20 nt, synthetic construct
  source 1..20: mol_type = other RNA
gttaaagcaacaggaagagg

SEQ ID NO: 45580 - RNA, 20 nt, synthetic construct
  source 1..20: mol_type = other RNA
gttaaaggaaaagagatcta

SEQ ID NO: 45581 - RNA, 20 nt, synthetic construct
  source 1..20: mol_type = other RNA
gttaaatgaaggaaaaaacg

SEQ ID NO: 45582 - RNA, 20 nt, synthetic construct
  source 1..20: mol_type = other RNA
gttaaatttcattaggttga

SEQ ID NO: 45583 - RNA, 20 nt, synthetic construct
  source 1..20: mol_type = other RNA
gttaaatttgattgttagcc

SEQ ID NO: 45584 - RNA, 20 nt, synthetic construct
  source 1..20: mol_type = other RNA
gttaacaatactgcattgtg

SEQ ID NO: 45585 - RNA, 20 nt, synthetic construct
  source 1..20: mol_type = other RNA
gttaacaattggtgaatctg

SEQ ID NO: 45586 - RNA, 20 nt, synthetic construct
  source 1..20: mol_type = other RNA
gttaacagtgctgtgccagt

SEQ ID NO: 45587 - RNA, 20 nt, synthetic construct
  source 1..20: mol_type = other RNA
gttaacatttcttctagtca

SEQ ID NO: 45588 - RNA, 20 nt, synthetic construct
  source 1..20: mol_type = other RNA
gttaaccttctggggttcaa

SEQ ID NO: 45589 - RNA, 20 nt, synthetic construct
  source 1..20: mol_type = other RNA
gttaacgtatgaataaacta

SEQ ID NO: 45590 - RNA, 20 nt, synthetic construct
  source 1..20: mol_type = other RNA
gttaacgtttatctacagag

SEQ ID NO: 45591 - RNA, 20 nt, synthetic construct
  source 1..20: mol_type = other RNA
gttaactaatagccagtgca

SEQ ID NO: 45592 - RNA, 20 nt, synthetic construct
  source 1..20: mol_type = other RNA
gttaactgaaatcgggagta

SEQ ID NO: 45593 - RNA, 20 nt, synthetic construct
  source 1..20: mol_type = other RNA
gttaactgacttacagacct

SEQ ID NO: 45594 - RNA, 20 nt, synthetic construct
  source 1..20: mol_type = other RNA
gttaactgtagagaaaatgt

SEQ ID NO: 45595 - RNA, 20 nt, synthetic construct
  source 1..20: mol_type = other RNA
gttaactgtattgcaaacta

SEQ ID NO: 45596 - RNA, 20 nt, synthetic construct
  source 1..20: mol_type = other RNA
gttaacttattggaaaactc

SEQ ID NO: 45597 - RNA, 20 nt, synthetic construct
  source 1..20: mol_type = other RNA
gttaagactgctgtttacca

SEQ ID NO: 45598 - RNA, 20 nt, synthetic construct
  source 1..20: mol_type = other RNA
gttaagattcaacaaaactg

SEQ ID NO: 45599 - RNA, 20 nt, synthetic construct
  source 1..20: mol_type = other RNA
gttaagcattttccggttgt

SEQ ID NO: 45600 - RNA, 20 nt, synthetic construct
  source 1..20: mol_type = other RNA
gttaagcccaacttcacacc

SEQ ID NO: 45601 - RNA, 20 nt, synthetic construct
  source 1..20: mol_type = other RNA
gttaagccgttccatcagag

SEQ ID NO: 45602 - RNA, 20 nt, synthetic construct
  source 1..20: mol_type = other RNA
gttaagggaagagctaagat

SEQ ID NO: 45603 - RNA, 20 nt, synthetic construct
  source 1..20: mol_type = other RNA
gttaagggccatttcatttc

SEQ ID NO: 45604 - RNA, 20 nt, synthetic construct
  source 1..20: mol_type = other RNA
gttaagtctgaaagcttctg

SEQ ID NO: 45605 - RNA, 20 nt, synthetic construct
  source 1..20: mol_type = other RNA
gttaagtgtttgaaaagtgt

SEQ ID NO: 45606 - RNA, 20 nt, synthetic construct
  source 1..20: mol_type = other RNA
gttaataaaggtgctaattg

SEQ ID NO: 45607 - RNA, 20 nt, synthetic construct
  source 1..20: mol_type = other RNA
gttaataaccctgttttgta

SEQ ID NO: 45608 - RNA, 20 nt, synthetic construct
  source 1..20: mol_type = other RNA
gttaatacttgtgtagcggg

SEQ ID NO: 45609 - RNA, 20 nt, synthetic construct
  source 1..20: mol_type = other RNA
gttaatagataggtcatgta

SEQ ID NO: 45610 - RNA, 20 nt, synthetic construct
  source 1..20: mol_type = other RNA
gttaatagcctcctaagttt

SEQ ID NO: 45611 - RNA, 20 nt, synthetic construct
  source 1..20: mol_type = other RNA
gttaatagtgaccctttgaa

SEQ ID NO: 45612 - RNA, 20 nt, synthetic construct
  source 1..20: mol_type = other RNA
gttaatattgtaggtgtctc

SEQ ID NO: 45613 - RNA, 20 nt, synthetic construct
  source 1..20: mol_type = other RNA
gttaatgggcacttgggatg

SEQ ID NO: 45614 - RNA, 20 nt, synthetic construct
  source 1..20: mol_type = other RNA
gttaatggttagactgcaca

SEQ ID NO: 45615 - RNA, 20 nt, synthetic construct
  source 1..20: mol_type = other RNA
gttaatgtgatatgccacat

SEQ ID NO: 45616 - RNA, 20 nt, synthetic construct
  source 1..20: mol_type = other RNA
gttaatgtgtgaagaaggaa

SEQ ID NO: 45617 - RNA, 20 nt, synthetic construct
  source 1..20: mol_type = other RNA
gttaattatttgtgcatact

SEQ ID NO: 45618 - RNA, 20 nt, synthetic construct
  source 1..20: mol_type = other RNA
gttaattccacaaccactgg

SEQ ID NO: 45619 - RNA, 20 nt, synthetic construct
  source 1..20: mol_type = other RNA
gttaattcttccttaatgtt

SEQ ID NO: 45620 - RNA, 20 nt, synthetic construct
  source 1..20: mol_type = other RNA
gttacaaaatatgtaatgac

SEQ ID NO: 45621 - RNA, 20 nt, synthetic construct
  source 1..20: mol_type = other RNA
gttacaaacatatgcatgtt

SEQ ID NO: 45622 - RNA, 20 nt, synthetic construct
  source 1..20: mol_type = other RNA
gttacaactactcgggaggc

SEQ ID NO: 45623 - RNA, 20 nt, synthetic construct
  source 1..20: mol_type = other RNA
gttacaactctaataacagc

SEQ ID NO: 45624 - RNA, 20 nt, synthetic construct
  source 1..20: mol_type = other RNA
gttacaaggattgaatggaa

SEQ ID NO: 45625 - RNA, 20 nt, synthetic construct
  source 1..20: mol_type = other RNA
gttacaataatatgcctcat

SEQ ID NO: 45626 - RNA, 20 nt, synthetic construct
  source 1..20: mol_type = other RNA
gttacacaagtgtttcattt

SEQ ID NO: 45627 - RNA, 20 nt, synthetic construct
  source 1..20: mol_type = other RNA
gttacacaggtagacatgtg

SEQ ID NO: 45628 - RNA, 20 nt, synthetic construct
  source 1..20: mol_type = other RNA
gttacacttccagtacatct

SEQ ID NO: 45629 - RNA, 20 nt, synthetic construct
  source 1..20: mol_type = other RNA
gttacagcagctctagcaaa

SEQ ID NO: 45630 - RNA, 20 nt, synthetic construct
  source 1..20: mol_type = other RNA
gttacagcatttcagccaaa

SEQ ID NO: 45631 - RNA, 20 nt, synthetic construct
  source 1..20: mol_type = other RNA
gttacagctcttctcagttg

SEQ ID NO: 45632 - RNA, 20 nt, synthetic construct
  source 1..20: mol_type = other RNA
gttacagtataggggaactc

SEQ ID NO: 45633 - RNA, 20 nt, synthetic construct
  source 1..20: mol_type = other RNA
gttacatgaggtcacccaag

SEQ ID NO: 45634 - RNA, 20 nt, synthetic construct
  source 1..20: mol_type = other RNA
gttacatgcttagccttcca

SEQ ID NO: 45635 - RNA, 20 nt, synthetic construct
  source 1..20: mol_type = other RNA
gttacatggttctgtgctag

SEQ ID NO: 45636 - RNA, 20 nt, synthetic construct
  source 1..20: mol_type = other RNA
gttacattgccttcgcaggg

SEQ ID NO: 45637 - RNA, 20 nt, synthetic construct
  source 1..20: mol_type = other RNA
gttaccaccaagaaaaagca

SEQ ID NO: 45638 - RNA, 20 nt, synthetic construct
  source 1..20: mol_type = other RNA
gttaccactagcaaactact

SEQ ID NO: 45639 - RNA, 20 nt, synthetic construct
  source 1..20: mol_type = other RNA
gttaccataaaaccattttt

SEQ ID NO: 45640 - RNA, 20 nt, synthetic construct
  source 1..20: mol_type = other RNA
gttaccatttgaccttcctt

SEQ ID NO: 45641 - RNA, 20 nt, synthetic construct
  source 1..20: mol_type = other RNA
gttaccctctggaatgccca

SEQ ID NO: 45642 - RNA, 20 nt, synthetic construct
  source 1..20: mol_type = other RNA
gttacgctgccaaaagccaa

SEQ ID NO: 45643 - RNA, 20 nt, synthetic construct
  source 1..20: mol_type = other RNA
gttacggttccctgtagaga

SEQ ID NO: 45644 - RNA, 20 nt, synthetic construct
  source 1..20: mol_type = other RNA
gttacgtactaggtatcaca

SEQ ID NO: 45645 - RNA, 20 nt, synthetic construct
  source 1..20: mol_type = other RNA
gttactagaagcacttttta

SEQ ID NO: 45646 - RNA, 20 nt, synthetic construct
  source 1..20: mol_type = other RNA
gttactcaaatccaaattca

SEQ ID NO: 45647 - RNA, 20 nt, synthetic construct
  source 1..20: mol_type = other RNA
gttactcattatggttgttg

SEQ ID NO: 45648 - RNA, 20 nt, synthetic construct
  source 1..20: mol_type = other RNA
gttactcccgatttcagtta

SEQ ID NO: 45649 - RNA, 20 nt, synthetic construct
  source 1..20: mol_type = other RNA
gttactcctgagcaaggaag

SEQ ID NO: 45650 - RNA, 20 nt, synthetic construct
  source 1..20: mol_type = other RNA
gttactctctctgcctcggc

SEQ ID NO: 45651 - RNA, 20 nt, synthetic construct
  source 1..20: mol_type = other RNA
gttactgatctgctcaagtt

SEQ ID NO: 45652 - RNA, 20 nt, synthetic construct
  source 1..20: mol_type = other RNA
gttactgattagaaggattg

SEQ ID NO: 45653 - RNA, 20 nt, synthetic construct
  source 1..20: mol_type = other RNA
gttacttctcagctatagct

SEQ ID NO: 45654 - RNA, 20 nt, synthetic construct
  source 1..20: mol_type = other RNA
gttacttctggaaagttcaa

SEQ ID NO: 45655 - RNA, 20 nt, synthetic construct
  source 1..20: mol_type = other RNA
gttacttgaaatcatttcac

SEQ ID NO: 45656 - RNA, 20 nt, synthetic construct
  source 1..20: mol_type = other RNA
gttacttgactattttaccc

SEQ ID NO: 45657 - RNA, 20 nt, synthetic construct
  source 1..20: mol_type = other RNA
gttactttcctttttcaaat

SEQ ID NO: 45658 - RNA, 20 nt, synthetic construct
  source 1..20: mol_type = other RNA
gttagaacaattttgaatgt

SEQ ID NO: 45659 - RNA, 20 nt, synthetic construct
  source 1..20: mol_type = other RNA
gttagaagacaatactgtta

SEQ ID NO: 45660 - RNA, 20 nt, synthetic construct
  source 1..20: mol_type = other RNA
gttagaagtatcccagatgg

SEQ ID NO: 45661 - RNA, 20 nt, synthetic construct
  source 1..20: mol_type = other RNA
gttagaattacaggcatgag

SEQ ID NO: 45662 - RNA, 20 nt, synthetic construct
  source 1..20: mol_type = other RNA
gttagaattcaggacagtta

SEQ ID NO: 45663 - RNA, 20 nt, synthetic construct
  source 1..20: mol_type = other RNA
gttagaattttgcttttgct

SEQ ID NO: 45664 - RNA, 20 nt, synthetic construct
  source 1..20: mol_type = other RNA
gttagactgcacataaaagg

SEQ ID NO: 45665 - RNA, 20 nt, synthetic construct
  source 1..20: mol_type = other RNA
gttagacttaaaaccataaa

SEQ ID NO: 45666 - RNA, 20 nt, synthetic construct
  source 1..20: mol_type = other RNA
gttagatatcccatataagg

SEQ ID NO: 45667 - RNA, 20 nt, synthetic construct
  source 1..20: mol_type = other RNA
gttagatctgggataatgct

SEQ ID NO: 45668 - RNA, 20 nt, synthetic construct
  source 1..20: mol_type = other RNA
gttagatggtgctgatttaa

SEQ ID NO: 45669 - RNA, 20 nt, synthetic construct
  source 1..20: mol_type = other RNA
gttagattaggaaacagatt

SEQ ID NO: 45670 - RNA, 20 nt, synthetic construct
  source 1..20: mol_type = other RNA
gttagattatatggtctacc

SEQ ID NO: 45671 - RNA, 20 nt, synthetic construct
  source 1..20: mol_type = other RNA
gttagatttattcatagtca

SEQ ID NO: 45672 - RNA, 20 nt, synthetic construct
  source 1..20: mol_type = other RNA
gttagatttttcctttgcct

SEQ ID NO: 45673 - RNA, 20 nt, synthetic construct
  source 1..20: mol_type = other RNA
gttagcaggactggactcct

SEQ ID NO: 45674 - RNA, 20 nt, synthetic construct
  source 1..20: mol_type = other RNA
gttagcataattcgaaataa

SEQ ID NO: 45675 - RNA, 20 nt, synthetic construct
  source 1..20: mol_type = other RNA
gttagcatcaccatcatcat

SEQ ID NO: 45676 - RNA, 20 nt, synthetic construct
  source 1..20: mol_type = other RNA
gttagcatgcctgacaaagt

SEQ ID NO: 45677 - RNA, 20 nt, synthetic construct
  source 1..20: mol_type = other RNA
gttagccacagcgttgttca

SEQ ID NO: 45678 - RNA, 20 nt, synthetic construct
  source 1..20: mol_type = other RNA
gttagccttgccattctccc

SEQ ID NO: 45679 - RNA, 20 nt, synthetic construct
  source 1..20: mol_type = other RNA
gttagctggcaaaatggaga

SEQ ID NO: 45680 - RNA, 20 nt, synthetic construct
  source 1..20: mol_type = other RNA
gttaggaaaatacatgaggc

SEQ ID NO: 45681 - RNA, 20 nt, synthetic construct
  source 1..20: mol_type = other RNA
gttaggaagccactgcattc

SEQ ID NO: 45682 - RNA, 20 nt, synthetic construct
  source 1..20: mol_type = other RNA
gttaggaatttacatttcca

SEQ ID NO: 45683 - RNA, 20 nt, synthetic construct
  source 1..20: mol_type = other RNA
gttaggcaatccttccgcct

SEQ ID NO: 45684 - RNA, 20 nt, synthetic construct
  source 1..20: mol_type = other RNA
gttagggacttatggagata

SEQ ID NO: 45685 - RNA, 20 nt, synthetic construct
  source 1..20: mol_type = other RNA
gttagggagactttcactgc

SEQ ID NO: 45686 - RNA, 20 nt, synthetic construct
  source 1..20: mol_type = other RNA
gttagggcctagaaatcata

SEQ ID NO: 45687 - RNA, 20 nt, synthetic construct
  source 1..20: mol_type = other RNA
gttaggtattattttcacag

SEQ ID NO: 45688 - RNA, 20 nt, synthetic construct
  source 1..20: mol_type = other RNA
gttaggtgctggcttcaata

SEQ ID NO: 45689 - RNA, 20 nt, synthetic construct
  source 1..20: mol_type = other RNA
gttaggtggtttgaacccca

SEQ ID NO: 45690 - RNA, 20 nt, synthetic construct
  source 1..20: mol_type = other RNA
gttaggttgaaagttcagaa

SEQ ID NO: 45691 - RNA, 20 nt, synthetic construct
  source 1..20: mol_type = other RNA
gttagtaggaaaaccatgtc

SEQ ID NO: 45692 - RNA, 20 nt, synthetic construct
  source 1..20: mol_type = other RNA
gttagtcccctagtggatgc

SEQ ID NO: 45693 - RNA, 20 nt, synthetic construct
  source 1..20: mol_type = other RNA
gttagtgaagcagagagaga

SEQ ID NO: 45694 - RNA, 20 nt, synthetic construct
  source 1..20: mol_type = other RNA
gttagtgccttcagaaggag

SEQ ID NO: 45695 - RNA, 20 nt, synthetic construct
  source 1..20: mol_type = other RNA
gttagtgtctaatgggtaca

SEQ ID NO: 45696 - RNA, 20 nt, synthetic construct
  source 1..20: mol_type = other RNA
gttagtgttgtttttaaaca

SEQ ID NO: 45697 - RNA, 20 nt, synthetic construct
  source 1..20: mol_type = other RNA
gttagtttattcatacgtta

SEQ ID NO: 45698 - RNA, 20 nt, synthetic construct
  source 1..20: mol_type = other RNA
gttagtttgttgacccaatc

SEQ ID NO: 45699 - RNA, 20 nt, synthetic construct
  source 1..20: mol_type = other RNA
gttataagcaaagatatggg

SEQ ID NO: 45700 - RNA, 20 nt, synthetic construct
  source 1..20: mol_type = other RNA
gttataatcagccgtgattg

SEQ ID NO: 45701 - RNA, 20 nt, synthetic construct
  source 1..20: mol_type = other RNA
gttataatgagatagaccag

SEQ ID NO: 45702 - RNA, 20 nt, synthetic construct
  source 1..20: mol_type = other RNA
gttatacacacataaggggg

SEQ ID NO: 45703 - RNA, 20 nt, synthetic construct
  source 1..20: mol_type = other RNA
gttatagccataagagtccc

SEQ ID NO: 45704 - RNA, 20 nt, synthetic construct
  source 1..20: mol_type = other RNA
gttatatccagattgatatc

SEQ ID NO: 45705 - RNA, 20 nt, synthetic construct
  source 1..20: mol_type = other RNA
gttatatcctcagggtagga

SEQ ID NO: 45706 - RNA, 20 nt, synthetic construct
  source 1..20: mol_type = other RNA
gttatatttccgtatccagt

SEQ ID NO: 45707 - RNA, 20 nt, synthetic construct
  source 1..20: mol_type = other RNA
gttatcacacctaggcctat

SEQ ID NO: 45708 - RNA, 20 nt, synthetic construct
  source 1..20: mol_type = other RNA
gttatcaccatgtgcttatc

SEQ ID NO: 45709 - RNA, 20 nt, synthetic construct
  source 1..20: mol_type = other RNA
gttatccaattttttggcat

SEQ ID NO: 45710 - RNA, 20 nt, synthetic construct
  source 1..20: mol_type = other RNA
gttatctctgccctcattga

SEQ ID NO: 45711 - RNA, 20 nt, synthetic construct
  source 1..20: mol_type = other RNA
gttatctcttagacctccta

SEQ ID NO: 45712 - RNA, 20 nt, synthetic construct
  source 1..20: mol_type = other RNA
gttatctgaacgtctttaaa

SEQ ID NO: 45713 - RNA, 20 nt, synthetic construct
  source 1..20: mol_type = other RNA
gttatctgggaacagcccct

SEQ ID NO: 45714 - RNA, 20 nt, synthetic construct
  source 1..20: mol_type = other RNA
gttatctgttttcttactga

SEQ ID NO: 45715 - RNA, 20 nt, synthetic construct
  source 1..20: mol_type = other RNA
gttatgaagcttttctccta

SEQ ID NO: 45716 - RNA, 20 nt, synthetic construct
  source 1..20: mol_type = other RNA
gttatgacaagactacctaa

SEQ ID NO: 45717 - RNA, 20 nt, synthetic construct
  source 1..20: mol_type = other RNA
gttatgataaaaataacggg

SEQ ID NO: 45718 - RNA, 20 nt, synthetic construct
  source 1..20: mol_type = other RNA
gttatgcaagatgtcaacat

SEQ ID NO: 45719 - RNA, 20 nt, synthetic construct
  source 1..20: mol_type = other RNA
gttatgccccctcttctctc

SEQ ID NO: 45720 - RNA, 20 nt, synthetic construct
  source 1..20: mol_type = other RNA
gttatgcgaatttactttta

SEQ ID NO: 45721 - RNA, 20 nt, synthetic construct
  source 1..20: mol_type = other RNA
gttatggtaggtgctttttg

SEQ ID NO: 45722 - RNA, 20 nt, synthetic construct
  source 1..20: mol_type = other RNA
gttatgtacattttaccata

SEQ ID NO: 45723 - RNA, 20 nt, synthetic construct
  source 1..20: mol_type = other RNA
gttatgtagctgggatggct

SEQ ID NO: 45724 - RNA, 20 nt, synthetic construct
  source 1..20: mol_type = other RNA
gttatgtcagtcaacacact

SEQ ID NO: 45725 - RNA, 20 nt, synthetic construct
  source 1..20: mol_type = other RNA
gttatgttttaaaagatctc

SEQ ID NO: 45726 - RNA, 20 nt, synthetic construct
  source 1..20: mol_type = other RNA
gttattaaatgagacaccta

SEQ ID NO: 45727 - RNA, 20 nt, synthetic construct
  source 1..20: mol_type = other RNA
gttattaacataccgacggc

SEQ ID NO: 45728 - RNA, 20 nt, synthetic construct
  source 1..20: mol_type = other RNA
gttattaagagtgtgctgac

SEQ ID NO: 45729 - RNA, 20 nt, synthetic construct
  source 1..20: mol_type = other RNA
gttattaagataatgctgtt

SEQ ID NO: 45730 - RNA, 20 nt, synthetic construct
  source 1..20: mol_type = other RNA
gttattagagttgtaacaca

SEQ ID NO: 45731 - RNA, 20 nt, synthetic construct
  source 1..20: mol_type = other RNA
gttattagggtaatgctggc

SEQ ID NO: 45732 - RNA, 20 nt, synthetic construct
  source 1..20: mol_type = other RNA
gttattattgtcattacctt

SEQ ID NO: 45733 - RNA, 20 nt, synthetic construct
  source 1..20: mol_type = other RNA
gttattcaaaacaaaacaca

SEQ ID NO: 45734 - RNA, 20 nt, synthetic construct
  source 1..20: mol_type = other RNA
gttattcacccaagaatttc

SEQ ID NO: 45735 - RNA, 20 nt, synthetic construct
  source 1..20: mol_type = other RNA
gttattcatgtttgtggttt

SEQ ID NO: 45736 - RNA, 20 nt, synthetic construct
  source 1..20: mol_type = other RNA
gttattcttcagcaaggacc

SEQ ID NO: 45737 - RNA, 20 nt, synthetic construct
  source 1..20: mol_type = other RNA
gttattgagtctgtagggtg

SEQ ID NO: 45738 - RNA, 20 nt, synthetic construct
  source 1..20: mol_type = other RNA
gttattgcatagggatgttg

SEQ ID NO: 45739 - RNA, 20 nt, synthetic construct
  source 1..20: mol_type = other RNA
gttatttaatctctcttgac

SEQ ID NO: 45740 - RNA, 20 nt, synthetic construct
  source 1..20: mol_type = other RNA
gttatttggggattctgcta

SEQ ID NO: 45741 - RNA, 20 nt, synthetic construct
  source 1..20: mol_type = other RNA
gttatttgttctgtcacggt

SEQ ID NO: 45742 - RNA, 20 nt, synthetic construct
  source 1..20: mol_type = other RNA
gttattttaatcgaatcctc

SEQ ID NO: 45743 - RNA, 20 nt, synthetic construct
  source 1..20: mol_type = other RNA
gttcaaaaaccttttttaag

SEQ ID NO: 45744 - RNA, 20 nt, synthetic construct
  source 1..20: mol_type = other RNA
gttcaaaacatcatctaatt

SEQ ID NO: 45745 - RNA, 20 nt, synthetic construct
  source 1..20: mol_type = other RNA
gttcaaaagccccaaaccat

SEQ ID NO: 45746 - RNA, 20 nt, synthetic construct
  source 1..20: mol_type = other RNA
gttcaaaatacagtgttttt

SEQ ID NO: 45747 - RNA, 20 nt, synthetic construct
  source 1..20: mol_type = other RNA
gttcaaaccacctaactact

SEQ ID NO: 45748 - RNA, 20 nt, synthetic construct
  source 1..20: mol_type = other RNA
gttcaaagaaactacctaga

SEQ ID NO: 45749 - RNA, 20 nt, synthetic construct
  source 1..20: mol_type = other RNA
gttcaaatgaggcttttatt

SEQ ID NO: 45750 - RNA, 20 nt, synthetic construct
  source 1..20: mol_type = other RNA
gttcaaatgttaagcccaac

SEQ ID NO: 45751 - RNA, 20 nt, synthetic construct
  source 1..20: mol_type = other RNA
gttcaaccctcggcctctac

SEQ ID NO: 45752 - RNA, 20 nt, synthetic construct
  source 1..20: mol_type = other RNA
gttcaagatgcataccaagc

SEQ ID NO: 45753 - RNA, 20 nt, synthetic construct
  source 1..20: mol_type = other RNA
gttcaagcaccacttcgaga

SEQ ID NO: 45754 - RNA, 20 nt, synthetic construct
  source 1..20: mol_type = other RNA
gttcaagccccagttctgcg

SEQ ID NO: 45755 - RNA, 20 nt, synthetic construct
  source 1..20: mol_type = other RNA
gttcaagcgctgaagtactt

SEQ ID NO: 45756 - RNA, 20 nt, synthetic construct
  source 1..20: mol_type = other RNA
gttcaaggtgttagcaggac

SEQ ID NO: 45757 - RNA, 20 nt, synthetic construct
  source 1..20: mol_type = other RNA
gttcaaggtgttcctgaagt

SEQ ID NO: 45758 - RNA, 20 nt, synthetic construct
  source 1..20: mol_type = other RNA
gttcaaggttataatcagcc

SEQ ID NO: 45759 - RNA, 20 nt, synthetic construct
  source 1..20: mol_type = other RNA
gttcaagtatttccacgggt

SEQ ID NO: 45760 - RNA, 20 nt, synthetic construct
  source 1..20: mol_type = other RNA
gttcaagtttggctcccatg

SEQ ID NO: 45761 - RNA, 20 nt, synthetic construct
  source 1..20: mol_type = other RNA
gttcaatactactgcaaata

SEQ ID NO: 45762 - RNA, 20 nt, synthetic construct
  source 1..20: mol_type = other RNA
gttcaattatgtggaaaaaa

SEQ ID NO: 45763 - RNA, 20 nt, synthetic construct
  source 1..20: mol_type = other RNA
gttcaatttagaaaatgctt

SEQ ID NO: 45764 - RNA, 20 nt, synthetic construct
  source 1..20: mol_type = other RNA
gttcacaaattagaacaaat

SEQ ID NO: 45765 - RNA, 20 nt, synthetic construct
  source 1..20: mol_type = other RNA
gttcacacctgtagtcccag

SEQ ID NO: 45766 - RNA, 20 nt, synthetic construct
  source 1..20: mol_type = other RNA
gttcacactcgcactccact

SEQ ID NO: 45767 - RNA, 20 nt, synthetic construct
  source 1..20: mol_type = other RNA
gttcacatttcgccttctca

SEQ ID NO: 45768 - RNA, 20 nt, synthetic construct
  source 1..20: mol_type = other RNA
gttcaccagtttctaattag

SEQ ID NO: 45769 - RNA, 20 nt, synthetic construct
  source 1..20: mol_type = other RNA
gttcacctctccgggtaaaa

SEQ ID NO: 45770 - RNA, 20 nt, synthetic construct
  source 1..20: mol_type = other RNA
gttcactgcagaattactga

SEQ ID NO: 45771 - RNA, 20 nt, synthetic construct
  source 1..20: mol_type = other RNA
gttcacttgaaacctgccat

SEQ ID NO: 45772 - RNA, 20 nt, synthetic construct
  source 1..20: mol_type = other RNA
gttcagaaagattaatcctt

SEQ ID NO: 45773 - RNA, 20 nt, synthetic construct
  source 1..20: mol_type = other RNA
gttcagaaatagactcccaa

SEQ ID NO: 45774 - RNA, 20 nt, synthetic construct
  source 1..20: mol_type = other RNA
gttcagaataccagagattg

SEQ ID NO: 45775 - RNA, 20 nt, synthetic construct
  source 1..20: mol_type = other RNA
gttcagataacaaagggttc

SEQ ID NO: 45776 - RNA, 20 nt, synthetic construct
  source 1..20: mol_type = other RNA
gttcagatagaaaagacaat

SEQ ID NO: 45777 - RNA, 20 nt, synthetic construct
  source 1..20: mol_type = other RNA
gttcagatagaattaaatga

SEQ ID NO: 45778 - RNA, 20 nt, synthetic construct
  source 1..20: mol_type = other RNA
gttcagcatcttcactgact

SEQ ID NO: 45779 - RNA, 20 nt, synthetic construct
  source 1..20: mol_type = other RNA
gttcagcctgcagaaggaga

SEQ ID NO: 45780 - RNA, 20 nt, synthetic construct
  source 1..20: mol_type = other RNA
gttcagcttacagtcatcac

SEQ ID NO: 45781 - RNA, 20 nt, synthetic construct
  source 1..20: mol_type = other RNA
gttcagctttaaagagaaat

SEQ ID NO: 45782 - RNA, 20 nt, synthetic construct
  source 1..20: mol_type = other RNA
gttcaggaccagcttgggca

SEQ ID NO: 45783 - RNA, 20 nt, synthetic construct
  source 1..20: mol_type = other RNA
gttcaggagttttgcctctt

SEQ ID NO: 45784 - RNA, 20 nt, synthetic construct
  source 1..20: mol_type = other RNA
gttcagggaaggctgcaagc

SEQ ID NO: 45785 - RNA, 20 nt, synthetic construct
  source 1..20: mol_type = other RNA
gttcaggtgcctcctgcctc

SEQ ID NO: 45786 - RNA, 20 nt, synthetic construct
  source 1..20: mol_type = other RNA
gttcagtggtgcaatcacgg

SEQ ID NO: 45787 - RNA, 20 nt, synthetic construct
  source 1..20: mol_type = other RNA
gttcagttataaaagaatca

SEQ ID NO: 45788 - RNA, 20 nt, synthetic construct
  source 1..20: mol_type = other RNA
gttcagttgaaaagtatggt

SEQ ID NO: 45789 - RNA, 20 nt, synthetic construct
  source 1..20: mol_type = other RNA
gttcagtttagtaaatcttt

SEQ ID NO: 45790 - RNA, 20 nt, synthetic construct
  source 1..20: mol_type = other RNA
gttcagtttatgggtcaacc

SEQ ID NO: 45791 - RNA, 20 nt, synthetic construct
  source 1..20: mol_type = other RNA
gttcagttttgtatatggtt

SEQ ID NO: 45792 - RNA, 20 nt, synthetic construct
  source 1..20: mol_type = other RNA
gttcagtttttctttctttt

SEQ ID NO: 45793 - RNA, 20 nt, synthetic construct
  source 1..20: mol_type = other RNA
gttcataatatatcacaact

SEQ ID NO: 45794 - RNA, 20 nt, synthetic construct
  source 1..20: mol_type = other RNA
gttcatacaatagtttagtt

SEQ ID NO: 45795 - RNA, 20 nt, synthetic construct
  source 1..20: mol_type = other RNA
gttcatatttcccttttgga

SEQ ID NO: 45796 - RNA, 20 nt, synthetic construct
  source 1..20: mol_type = other RNA
gttcatcagcataaataaat

SEQ ID NO: 45797 - RNA, 20 nt, synthetic construct
  source 1..20: mol_type = other RNA
gttcatcatcttttgcctgg

SEQ ID NO: 45798 - RNA, 20 nt, synthetic construct
  source 1..20: mol_type = other RNA
gttcatccaaattattgaca

SEQ ID NO: 45799 - RNA, 20 nt, synthetic construct
  source 1..20: mol_type = other RNA
gttcatccatgttgttgaat

SEQ ID NO: 45800 - RNA, 20 nt, synthetic construct
  source 1..20: mol_type = other RNA
gttcatgaaatcccctttag

SEQ ID NO: 45801 - RNA, 20 nt, synthetic construct
  source 1..20: mol_type = other RNA
gttcatgaacataaatttgt

SEQ ID NO: 45802 - RNA, 20 nt, synthetic construct
  source 1..20: mol_type = other RNA
gttcatgaaccttcaccaaa

SEQ ID NO: 45803 - RNA, 20 nt, synthetic construct
  source 1..20: mol_type = other RNA
gttcatgggaagatgctccc

SEQ ID NO: 45804 - RNA, 20 nt, synthetic construct
  source 1..20: mol_type = other RNA
gttcatgtctgtgtagttca

SEQ ID NO: 45805 - RNA, 20 nt, synthetic construct
  source 1..20: mol_type = other RNA
gttcatgtgtgcttacacac

SEQ ID NO: 45806 - RNA, 20 nt, synthetic construct
  source 1..20: mol_type = other RNA
gttcatgttagcataattcg

SEQ ID NO: 45807 - RNA, 20 nt, synthetic construct
  source 1..20: mol_type = other RNA
gttcatgttcaaggtgttcc

SEQ ID NO: 45808 - RNA, 20 nt, synthetic construct
  source 1..20: mol_type = other RNA
gttcatgtttacagaaatat

SEQ ID NO: 45809 - RNA, 20 nt, synthetic construct
  source 1..20: mol_type = other RNA
gttcattagaattcaggaca

SEQ ID NO: 45810 - RNA, 20 nt, synthetic construct
  source 1..20: mol_type = other RNA
gttcattcatctgttaatgg

SEQ ID NO: 45811 - RNA, 20 nt, synthetic construct
  source 1..20: mol_type = other RNA
gttcattcgtagcaggttta

SEQ ID NO: 45812 - RNA, 20 nt, synthetic construct
  source 1..20: mol_type = other RNA
gttcatttcaggaatgcaaa

SEQ ID NO: 45813 - RNA, 20 nt, synthetic construct
  source 1..20: mol_type = other RNA
gttcatttgagaatttcagg

SEQ ID NO: 45814 - RNA, 20 nt, synthetic construct
  source 1..20: mol_type = other RNA
gttcattttaataagcttcg

SEQ ID NO: 45815 - RNA, 20 nt, synthetic construct
  source 1..20: mol_type = other RNA
gttccaaacttctgaccttg

SEQ ID NO: 45816 - RNA, 20 nt, synthetic construct
  source 1..20: mol_type = other RNA
gttccaactgtataaatgtt

SEQ ID NO: 45817 - RNA, 20 nt, synthetic construct
  source 1..20: mol_type = other RNA
gttccaagattttcccaatc

SEQ ID NO: 45818 - RNA, 20 nt, synthetic construct
  source 1..20: mol_type = other RNA
gttccacatgttactcatta

SEQ ID NO: 45819 - RNA, 20 nt, synthetic construct
  source 1..20: mol_type = other RNA
gttccacctccatcactgac

SEQ ID NO: 45820 - RNA, 20 nt, synthetic construct
  source 1..20: mol_type = other RNA
gttccagacaaaaattttca

SEQ ID NO: 45821 - RNA, 20 nt, synthetic construct
  source 1..20: mol_type = other RNA
gttccagcagggtaaagtca

SEQ ID NO: 45822 - RNA, 20 nt, synthetic construct
  source 1..20: mol_type = other RNA
gttccaggcctcgctcttgg

SEQ ID NO: 45823 - RNA, 20 nt, synthetic construct
  source 1..20: mol_type = other RNA
gttccaggggggaaaaaacc

SEQ ID NO: 45824 - RNA, 20 nt, synthetic construct
  source 1..20: mol_type = other RNA
gttccagtcctttgtgtcaa

SEQ ID NO: 45825 - RNA, 20 nt, synthetic construct
  source 1..20: mol_type = other RNA
gttccatcagagaggctttt

SEQ ID NO: 45826 - RNA, 20 nt, synthetic construct
  source 1..20: mol_type = other RNA
gttccatcggtctgtatttc

SEQ ID NO: 45827 - RNA, 20 nt, synthetic construct
  source 1..20: mol_type = other RNA
gttccatctgttatagtgtg

SEQ ID NO: 45828 - RNA, 20 nt, synthetic construct
  source 1..20: mol_type = other RNA
gttccattattccataaaaa

SEQ ID NO: 45829 - RNA, 20 nt, synthetic construct
  source 1..20: mol_type = other RNA
gttccatttgttttgtgttt

SEQ ID NO: 45830 - RNA, 20 nt, synthetic construct
  source 1..20: mol_type = other RNA
gttcccaagcaagtgtggtg

SEQ ID NO: 45831 - RNA, 20 nt, synthetic construct
  source 1..20: mol_type = other RNA
gttcccagataacagtggtt

SEQ ID NO: 45832 - RNA, 20 nt, synthetic construct
  source 1..20: mol_type = other RNA
gttccccaagccaaattaat

SEQ ID NO: 45833 - RNA, 20 nt, synthetic construct
  source 1..20: mol_type = other RNA
gttccccattgacaatatag

SEQ ID NO: 45834 - RNA, 20 nt, synthetic construct
  source 1..20: mol_type = other RNA
gttcccctatactgtaaccc

SEQ ID NO: 45835 - RNA, 20 nt, synthetic construct
  source 1..20: mol_type = other RNA
gttcccggattggaaaacta

SEQ ID NO: 45836 - RNA, 20 nt, synthetic construct
  source 1..20: mol_type = other RNA
gttccctagaacttaaaata

SEQ ID NO: 45837 - RNA, 20 nt, synthetic construct
  source 1..20: mol_type = other RNA
gttccctcttcaatattttg

SEQ ID NO: 45838 - RNA, 20 nt, synthetic construct
  source 1..20: mol_type = other RNA
gttccctgtagagattttta

SEQ ID NO: 45839 - RNA, 20 nt, synthetic construct
  source 1..20: mol_type = other RNA
gttcccttcttaaatgtgaa

SEQ ID NO: 45840 - RNA, 20 nt, synthetic construct
  source 1..20: mol_type = other RNA
gttccgatttctcggccggg

SEQ ID NO: 45841 - RNA, 20 nt, synthetic construct
  source 1..20: mol_type = other RNA
gttccgattttacttactag

SEQ ID NO: 45842 - RNA, 20 nt, synthetic construct
  source 1..20: mol_type = other RNA
gttccgggatcctgtccagg

SEQ ID NO: 45843 - RNA, 20 nt, synthetic construct
  source 1..20: mol_type = other RNA
gttccggttctcaggagcct

SEQ ID NO: 45844 - RNA, 20 nt, synthetic construct
  source 1..20: mol_type = other RNA
gttcctagaaaatttaatac

SEQ ID NO: 45845 - RNA, 20 nt, synthetic construct
  source 1..20: mol_type = other RNA
gttcctatatttttccacat

SEQ ID NO: 45846 - RNA, 20 nt, synthetic construct
  source 1..20: mol_type = other RNA
gttcctccttttgtagaggg

SEQ ID NO: 45847 - RNA, 20 nt, synthetic construct
  source 1..20: mol_type = other RNA
gttcctgaagtctttggtga

SEQ ID NO: 45848 - RNA, 20 nt, synthetic construct
  source 1..20: mol_type = other RNA
gttcctgcttcccccaaaga

SEQ ID NO: 45849 - RNA, 20 nt, synthetic construct
  source 1..20: mol_type = other RNA
gttcctggactgtgatgact

SEQ ID NO: 45850 - RNA, 20 nt, synthetic construct
  source 1..20: mol_type = other RNA
gttcctgggttctcccttct

SEQ ID NO: 45851 - RNA, 20 nt, synthetic construct
  source 1..20: mol_type = other RNA
gttccttcctacacatatct

SEQ ID NO: 45852 - RNA, 20 nt, synthetic construct
  source 1..20: mol_type = other RNA
gttccttttaagggaaacac

SEQ ID NO: 45853 - RNA, 20 nt, synthetic construct
  source 1..20: mol_type = other RNA
gttcgtttgaggcttttcat

SEQ ID NO: 45854 - RNA, 20 nt, synthetic construct
  source 1..20: mol_type = other RNA
gttctaaagttagaagtatc

SEQ ID NO: 45855 - RNA, 20 nt, synthetic construct
  source 1..20: mol_type = other RNA
gttctaataaacgcggaatg

SEQ ID NO: 45856 - RNA, 20 nt, synthetic construct
  source 1..20: mol_type = other RNA
gttctaatttctttaaaacc

SEQ ID NO: 45857 - RNA, 20 nt, synthetic construct
  source 1..20: mol_type = other RNA
gttctaatttgtgaaccttg

SEQ ID NO: 45858 - RNA, 20 nt, synthetic construct
  source 1..20: mol_type = other RNA
gttctagctcctgggaaaag

SEQ ID NO: 45859 - RNA, 20 nt, synthetic construct
  source 1..20: mol_type = other RNA
gttctagctctgtctttttt

SEQ ID NO: 45860 - RNA, 20 nt, synthetic construct
  source 1..20: mol_type = other RNA
gttctagttctaataaacgc

SEQ ID NO: 45861 - RNA, 20 nt, synthetic construct
  source 1..20: mol_type = other RNA
gttctatttctttccattca

SEQ ID NO: 45862 - RNA, 20 nt, synthetic construct
  source 1..20: mol_type = other RNA
gttctcaccaacatccacag

SEQ ID NO: 45863 - RNA, 20 nt, synthetic construct
  source 1..20: mol_type = other RNA
gttctcaggagcctagtcat

SEQ ID NO: 45864 - RNA, 20 nt, synthetic construct
  source 1..20: mol_type = other RNA
gttctcaggggtaaagggga

SEQ ID NO: 45865 - RNA, 20 nt, synthetic construct
  source 1..20: mol_type = other RNA
gttctcagtatcctttcaag

SEQ ID NO: 45866 - RNA, 20 nt, synthetic construct
  source 1..20: mol_type = other RNA
gttctccaagttattacaaa

SEQ ID NO: 45867 - RNA, 20 nt, synthetic construct
  source 1..20: mol_type = other RNA
gttctccagtcccactgaca

SEQ ID NO: 45868 - RNA, 20 nt, synthetic construct
  source 1..20: mol_type = other RNA
gttctcccttctattccatt

SEQ ID NO: 45869 - RNA, 20 nt, synthetic construct
  source 1..20: mol_type = other RNA
gttctcctgtgtgcatgctc

SEQ ID NO: 45870 - RNA, 20 nt, synthetic construct
  source 1..20: mol_type = other RNA
gttctcgttcatgttcaagg

SEQ ID NO: 45871 - RNA, 20 nt, synthetic construct
  source 1..20: mol_type = other RNA
gttctctgccccgggcctgg

SEQ ID NO: 45872 - RNA, 20 nt, synthetic construct
  source 1..20: mol_type = other RNA
gttctctgtgtggtttgcct

SEQ ID NO: 45873 - RNA, 20 nt, synthetic construct
  source 1..20: mol_type = other RNA
gttctctttgtttatccttg

SEQ ID NO: 45874 - RNA, 20 nt, synthetic construct
  source 1..20: mol_type = other RNA
gttctcttttcctcgttttc

SEQ ID NO: 45875 - RNA, 20 nt, synthetic construct
  source 1..20: mol_type = other RNA
gttctctttttgacagatga

SEQ ID NO: 45876 - RNA, 20 nt, synthetic construct
  source 1..20: mol_type = other RNA
gttctgaaggctcagcccct

SEQ ID NO: 45877 - RNA, 20 nt, synthetic construct
  source 1..20: mol_type = other RNA
gttctgatttcaaagttaat

SEQ ID NO: 45878 - RNA, 20 nt, synthetic construct
  source 1..20: mol_type = other RNA
gttctgcctaatctctaggc

SEQ ID NO: 45879 - RNA, 20 nt, synthetic construct
  source 1..20: mol_type = other RNA
gttctgccttgaggtgattc

SEQ ID NO: 45880 - RNA, 20 nt, synthetic construct
  source 1..20: mol_type = other RNA
gttctgcgcaattgcagcca

SEQ ID NO: 45881 - RNA, 20 nt, synthetic construct
  source 1..20: mol_type = other RNA
gttctgcgtgttattttaat

SEQ ID NO: 45882 - RNA, 20 nt, synthetic construct
  source 1..20: mol_type = other RNA
gttctgctatgctgaaaggc

SEQ ID NO: 45883 - RNA, 20 nt, synthetic construct
  source 1..20: mol_type = other RNA
gttctgctgttgatggacgt

SEQ ID NO: 45884 - RNA, 20 nt, synthetic construct
  source 1..20: mol_type = other RNA
gttctgcttccacatttcta

SEQ ID NO: 45885 - RNA, 20 nt, synthetic construct
  source 1..20: mol_type = other RNA
gttctgggagttcattagaa

SEQ ID NO: 45886 - RNA, 20 nt, synthetic construct
  source 1..20: mol_type = other RNA
gttctggtgtcgtttatttc

SEQ ID NO: 45887 - RNA, 20 nt, synthetic construct
  source 1..20: mol_type = other RNA
gttctgtacccttacgcgtg

SEQ ID NO: 45888 - RNA, 20 nt, synthetic construct
  source 1..20: mol_type = other RNA
gttctgtcacatttgaaaga

SEQ ID NO: 45889 - RNA, 20 nt, synthetic construct
  source 1..20: mol_type = other RNA
gttctgtcacggtgccctac

SEQ ID NO: 45890 - RNA, 20 nt, synthetic construct
  source 1..20: mol_type = other RNA
gttctgtgaatttgattatg

SEQ ID NO: 45891 - RNA, 20 nt, synthetic construct
  source 1..20: mol_type = other RNA
gttctgtgctagatgctaaa

SEQ ID NO: 45892 - RNA, 20 nt, synthetic construct
  source 1..20: mol_type = other RNA
gttctgtgtttatgaatgat

SEQ ID NO: 45893 - RNA, 20 nt, synthetic construct
  source 1..20: mol_type = other RNA
gttctgttccatcggtctgt

SEQ ID NO: 45894 - RNA, 20 nt, synthetic construct
  source 1..20: mol_type = other RNA
gttcttaagttaaaacttgt

SEQ ID NO: 45895 - RNA, 20 nt, synthetic construct
  source 1..20: mol_type = other RNA
gttcttacctcaaaggagag

SEQ ID NO: 45896 - RNA, 20 nt, synthetic construct
  source 1..20: mol_type = other RNA
gttcttatgaggttattcaa

SEQ ID NO: 45897 - RNA, 20 nt, synthetic construct
  source 1..20: mol_type = other RNA
gttcttcaccgtgcaactag

SEQ ID NO: 45898 - RNA, 20 nt, synthetic construct
  source 1..20: mol_type = other RNA
gttcttcatcagtccctgtg

SEQ ID NO: 45899 - RNA, 20 nt, synthetic construct
  source 1..20: mol_type = other RNA
gttcttggaaattagaaatg

SEQ ID NO: 45900 - RNA, 20 nt, synthetic construct
  source 1..20: mol_type = other RNA
gttcttggttaatattacag

SEQ ID NO: 45901 - RNA, 20 nt, synthetic construct
  source 1..20: mol_type = other RNA
gttctttatagcatttgaaa

SEQ ID NO: 45902 - RNA, 20 nt, synthetic construct
  source 1..20: mol_type = other RNA
gttctttcggatatttacta

SEQ ID NO: 45903 - RNA, 20 nt, synthetic construct
  source 1..20: mol_type = other RNA
gttctttggagctgtatttt

SEQ ID NO: 45904 - RNA, 20 nt, synthetic construct
  source 1..20: mol_type = other RNA
gttctttgttagtttattca

SEQ ID NO: 45905 - RNA, 20 nt, synthetic construct
  source 1..20: mol_type = other RNA
gttcttttaaatgccaattt

SEQ ID NO: 45906 - RNA, 20 nt, synthetic construct
  source 1..20: mol_type = other RNA
gttcttttcaaaaacagcat

SEQ ID NO: 45907 - RNA, 20 nt, synthetic construct
  source 1..20: mol_type = other RNA
gttcttttccttcttaagac

SEQ ID NO: 45908 - RNA, 20 nt, synthetic construct
  source 1..20: mol_type = other RNA
gttcttttgtaatctaagga

SEQ ID NO: 45909 - RNA, 20 nt, synthetic construct
  source 1..20: mol_type = other RNA
gttgaaaacgaggaaaagag

SEQ ID NO: 45910 - RNA, 20 nt, synthetic construct
  source 1..20: mol_type = other RNA
gttgaaaactcaactgcctc

SEQ ID NO: 45911 - RNA, 20 nt, synthetic construct
  source 1..20: mol_type = other RNA
gttgaaaagtatggttgaag

SEQ ID NO: 45912 - RNA, 20 nt, synthetic construct
  source 1..20: mol_type = other RNA
gttgaaagttcagaatacca

SEQ ID NO: 45913 - RNA, 20 nt, synthetic construct
  source 1..20: mol_type = other RNA
gttgaacatcacccagctcg

SEQ ID NO: 45914 - RNA, 20 nt, synthetic construct
  source 1..20: mol_type = other RNA
gttgaagaaagtaggaatta

SEQ ID NO: 45915 - RNA, 20 nt, synthetic construct
  source 1..20: mol_type = other RNA
gttgaagacctgcagtctgc

SEQ ID NO: 45916 - RNA, 20 nt, synthetic construct
  source 1..20: mol_type = other RNA
gttgaagctctagtgagcta

SEQ ID NO: 45917 - RNA, 20 nt, synthetic construct
  source 1..20: mol_type = other RNA
gttgaagtctttggcccatt

SEQ ID NO: 45918 - RNA, 20 nt, synthetic construct
  source 1..20: mol_type = other RNA
gttgaatagcaactgttttt

SEQ ID NO: 45919 - RNA, 20 nt, synthetic construct
  source 1..20: mol_type = other RNA
gttgaatagggcctcaaatt

SEQ ID NO: 45920 - RNA, 20 nt, synthetic construct
  source 1..20: mol_type = other RNA
gttgaatcttaacatttctc

SEQ ID NO: 45921 - RNA, 20 nt, synthetic construct
  source 1..20: mol_type = other RNA
gttgaatgtggcagaattta

SEQ ID NO: 45922 - RNA, 20 nt, synthetic construct
  source 1..20: mol_type = other RNA
gttgaattgttgcgcgtcaa

SEQ ID NO: 45923 - RNA, 20 nt, synthetic construct
  source 1..20: mol_type = other RNA
gttgaattgttggagttctt

SEQ ID NO: 45924 - RNA, 20 nt, synthetic construct
  source 1..20: mol_type = other RNA
gttgaatttctgtccttgga

SEQ ID NO: 45925 - RNA, 20 nt, synthetic construct
  source 1..20: mol_type = other RNA
gttgacaaattaaatgacaa

SEQ ID NO: 45926 - RNA, 20 nt, synthetic construct
  source 1..20: mol_type = other RNA
gttgacatcctttaatttgg

SEQ ID NO: 45927 - RNA, 20 nt, synthetic construct
  source 1..20: mol_type = other RNA
gttgacatcctttgcgtctg

SEQ ID NO: 45928 - RNA, 20 nt, synthetic construct
  source 1..20: mol_type = other RNA
gttgacatcttgcataactc

SEQ ID NO: 45929 - RNA, 20 nt, synthetic construct
  source 1..20: mol_type = other RNA
gttgaccatttttatatctt

SEQ ID NO: 45930 - RNA, 20 nt, synthetic construct
  source 1..20: mol_type = other RNA
gttgacccaatcatgttctt

SEQ ID NO: 45931 - RNA, 20 nt, synthetic construct
  source 1..20: mol_type = other RNA
gttgacccataaactgaaca

SEQ ID NO: 45932 - RNA, 20 nt, synthetic construct
  source 1..20: mol_type = other RNA
gttgaccgctttcgtgaggg

SEQ ID NO: 45933 - RNA, 20 nt, synthetic construct
  source 1..20: mol_type = other RNA
gttgaccttagtggttgacc

SEQ ID NO: 45934 - RNA, 20 nt, synthetic construct
  source 1..20: mol_type = other RNA
gttgactaccatctctccaa

SEQ ID NO: 45935 - RNA, 20 nt, synthetic construct
  source 1..20: mol_type = other RNA
gttgactcctaaaacatggt

SEQ ID NO: 45936 - RNA, 20 nt, synthetic construct
  source 1..20: mol_type = other RNA
gttgactgaattaatctctt

SEQ ID NO: 45937 - RNA, 20 nt, synthetic construct
  source 1..20: mol_type = other RNA
gttgactgacataactgtaa

SEQ ID NO: 45938 - RNA, 20 nt, synthetic construct
  source 1..20: mol_type = other RNA
gttgagaaactatccaacat

SEQ ID NO: 45939 - RNA, 20 nt, synthetic construct
  source 1..20: mol_type = other RNA
gttgagaaagagggaagtac

SEQ ID NO: 45940 - RNA, 20 nt, synthetic construct
  source 1..20: mol_type = other RNA
gttgagaaagcacataaaaa

SEQ ID NO: 45941 - RNA, 20 nt, synthetic construct
  source 1..20: mol_type = other RNA
gttgagacaagaccacacca

SEQ ID NO: 45942 - RNA, 20 nt, synthetic construct
  source 1..20: mol_type = other RNA
gttgagacttagatttattt

SEQ ID NO: 45943 - RNA, 20 nt, synthetic construct
  source 1..20: mol_type = other RNA
gttgagagagaattctaaat

SEQ ID NO: 45944 - RNA, 20 nt, synthetic construct
  source 1..20: mol_type = other RNA
gttgagaggctttaagcaga

SEQ ID NO: 45945 - RNA, 20 nt, synthetic construct
  source 1..20: mol_type = other RNA
gttgagccatcatgcctggg

SEQ ID NO: 45946 - RNA, 20 nt, synthetic construct
  source 1..20: mol_type = other RNA
gttgaggatgactgtcctga

SEQ ID NO: 45947 - RNA, 20 nt, synthetic construct
  source 1..20: mol_type = other RNA
gttgaggctgggccctgtgg

SEQ ID NO: 45948 - RNA, 20 nt, synthetic construct
  source 1..20: mol_type = other RNA
gttgaggttgaagacctgca

SEQ ID NO: 45949 - RNA, 20 nt, synthetic construct
  source 1..20: mol_type = other RNA
gttgagtacctctgggatgc

SEQ ID NO: 45950 - RNA, 20 nt, synthetic construct
  source 1..20: mol_type = other RNA
gttgagtatcttttcatgtt

SEQ ID NO: 45951 - RNA, 20 nt, synthetic construct
  source 1..20: mol_type = other RNA
gttgagtcttgtttacccag

SEQ ID NO: 45952 - RNA, 20 nt, synthetic construct
  source 1..20: mol_type = other RNA
gttgagttttcaacctttgt

SEQ ID NO: 45953 - RNA, 20 nt, synthetic construct
  source 1..20: mol_type = other RNA
gttgataaatatgtgttaca

SEQ ID NO: 45954 - RNA, 20 nt, synthetic construct
  source 1..20: mol_type = other RNA
gttgataattacaataatgc

SEQ ID NO: 45955 - RNA, 20 nt, synthetic construct
  source 1..20: mol_type = other RNA
gttgatactagtttagtgca

SEQ ID NO: 45956 - RNA, 20 nt, synthetic construct
  source 1..20: mol_type = other RNA
gttgatgcaatttgttttcc

SEQ ID NO: 45957 - RNA, 20 nt, synthetic construct
  source 1..20: mol_type = other RNA
gttgatggctgtactaagcc

SEQ ID NO: 45958 - RNA, 20 nt, synthetic construct
  source 1..20: mol_type = other RNA
gttgatgtaatggatcaagg

SEQ ID NO: 45959 - RNA, 20 nt, synthetic construct
  source 1..20: mol_type = other RNA
gttgattatttttacccaac

SEQ ID NO: 45960 - RNA, 20 nt, synthetic construct
  source 1..20: mol_type = other RNA
gttgattgttgccatcattt

SEQ ID NO: 45961 - RNA, 20 nt, synthetic construct
  source 1..20: mol_type = other RNA
gttgatttagaaatacctgc

SEQ ID NO: 45962 - RNA, 20 nt, synthetic construct
  source 1..20: mol_type = other RNA
gttgattttgaggcagagag

SEQ ID NO: 45963 - RNA, 20 nt, synthetic construct
  source 1..20: mol_type = other RNA
gttgcaaaaatactacaaga

SEQ ID NO: 45964 - RNA, 20 nt, synthetic construct
  source 1..20: mol_type = other RNA
gttgcaaattattttcctcc

SEQ ID NO: 45965 - RNA, 20 nt, synthetic construct
  source 1..20: mol_type = other RNA
gttgcacaaaagtgaaaact

SEQ ID NO: 45966 - RNA, 20 nt, synthetic construct
  source 1..20: mol_type = other RNA
gttgcacaatgttgtggatg

SEQ ID NO: 45967 - RNA, 20 nt, synthetic construct
  source 1..20: mol_type = other RNA
gttgcacggtgaagaaccga

SEQ ID NO: 45968 - RNA, 20 nt, synthetic construct
  source 1..20: mol_type = other RNA
gttgcagagactggatagca

SEQ ID NO: 45969 - RNA, 20 nt, synthetic construct
  source 1..20: mol_type = other RNA
gttgcagattcatcttgact

SEQ ID NO: 45970 - RNA, 20 nt, synthetic construct
  source 1..20: mol_type = other RNA
gttgcagcatgctcactgtc

SEQ ID NO: 45971 - RNA, 20 nt, synthetic construct
  source 1..20: mol_type = other RNA
gttgcagtccccggtctttc

SEQ ID NO: 45972 - RNA, 20 nt, synthetic construct
  source 1..20: mol_type = other RNA
gttgcagtgagcccagagat

SEQ ID NO: 45973 - RNA, 20 nt, synthetic construct
  source 1..20: mol_type = other RNA
gttgcatacgtcgtccccca

SEQ ID NO: 45974 - RNA, 20 nt, synthetic construct
  source 1..20: mol_type = other RNA
gttgcatcacttgaggtgat

SEQ ID NO: 45975 - RNA, 20 nt, synthetic construct
  source 1..20: mol_type = other RNA
gttgcatccccattcaattg

SEQ ID NO: 45976 - RNA, 20 nt, synthetic construct
  source 1..20: mol_type = other RNA
gttgcatgaatttgttttct

SEQ ID NO: 45977 - RNA, 20 nt, synthetic construct
  source 1..20: mol_type = other RNA
gttgcattaatgcttcatat

SEQ ID NO: 45978 - RNA, 20 nt, synthetic construct
  source 1..20: mol_type = other RNA
gttgccaatatctatcaggg

SEQ ID NO: 45979 - RNA, 20 nt, synthetic construct
  source 1..20: mol_type = other RNA
gttgccaggtggacgcggcc

SEQ ID NO: 45980 - RNA, 20 nt, synthetic construct
  source 1..20: mol_type = other RNA
gttgccatcattttatgaaa

SEQ ID NO: 45981 - RNA, 20 nt, synthetic construct
  source 1..20: mol_type = other RNA
gttgcccagactggagttca

SEQ ID NO: 45982 - RNA, 20 nt, synthetic construct
  source 1..20: mol_type = other RNA
gttgcctactagccagtgat

SEQ ID NO: 45983 - RNA, 20 nt, synthetic construct
  source 1..20: mol_type = other RNA
gttgcctctgtgctagcctt

SEQ ID NO: 45984 - RNA, 20 nt, synthetic construct
  source 1..20: mol_type = other RNA
gttgcctgtagttttggtgt

SEQ ID NO: 45985 - RNA, 20 nt, synthetic construct
  source 1..20: mol_type = other RNA
gttgcgcgtcaaaagatgct

SEQ ID NO: 45986 - RNA, 20 nt, synthetic construct
  source 1..20: mol_type = other RNA
gttgcggtgacgtgagatca

SEQ ID NO: 45987 - RNA, 20 nt, synthetic construct
  source 1..20: mol_type = other RNA
gttgctatccagtctctgca

SEQ ID NO: 45988 - RNA, 20 nt, synthetic construct
  source 1..20: mol_type = other RNA
gttgctattgttgaattgtt

SEQ ID NO: 45989 - RNA, 20 nt, synthetic construct
  source 1..20: mol_type = other RNA
gttgctcagaaaattttctt

SEQ ID NO: 45990 - RNA, 20 nt, synthetic construct
  source 1..20: mol_type = other RNA
gttgctgacttcctggctct

SEQ ID NO: 45991 - RNA, 20 nt, synthetic construct
  source 1..20: mol_type = other RNA
gttgctgcatagtactccat

SEQ ID NO: 45992 - RNA, 20 nt, synthetic construct
  source 1..20: mol_type = other RNA
gttgcttaagtcactccatt

SEQ ID NO: 45993 - RNA, 20 nt, synthetic construct
  source 1..20: mol_type = other RNA
gttgcttaattgagctgtcc

SEQ ID NO: 45994 - RNA, 20 nt, synthetic construct
  source 1..20: mol_type = other RNA
gttgcttactctaatgggga

SEQ ID NO: 45995 - RNA, 20 nt, synthetic construct
  source 1..20: mol_type = other RNA
gttgcttgctctacaaacct

SEQ ID NO: 45996 - RNA, 20 nt, synthetic construct
  source 1..20: mol_type = other RNA
gttgcttggcacagaattat

SEQ ID NO: 45997 - RNA, 20 nt, synthetic construct
  source 1..20: mol_type = other RNA
gttgcttggtgttgactgaa

SEQ ID NO: 45998 - RNA, 20 nt, synthetic construct
  source 1..20: mol_type = other RNA
gttgctttaacctctggtat

SEQ ID NO: 45999 - RNA, 20 nt, synthetic construct
  source 1..20: mol_type = other RNA
gttgctttgcgaaatagtag

SEQ ID NO: 46000 - RNA, 20 nt, synthetic construct
  source 1..20: mol_type = other RNA
gttgcttttacttggctcct

SEQ ID NO: 46001 - RNA, 20 nt, synthetic construct
  source 1..20: mol_type = other RNA
gttgctttttcttcttgttt

SEQ ID NO: 46002 - RNA, 20 nt, synthetic construct
  source 1..20: mol_type = other RNA
gttggaaaaatcgtcctctt

SEQ ID NO: 46003 - RNA, 20 nt, synthetic construct
  source 1..20: mol_type = other RNA
gttggaaaacttttaactga

SEQ ID NO: 46004 - RNA, 20 nt, synthetic construct
  source 1..20: mol_type = other RNA
gttggaaaagaaagctgtgg

SEQ ID NO: 46005 - RNA, 20 nt, synthetic construct
  source 1..20: mol_type = other RNA
gttggaactcttgcggtctt

SEQ ID NO: 46006 - RNA, 20 nt, synthetic construct
  source 1..20: mol_type = other RNA
gttggaagtttctggaagtt

SEQ ID NO: 46007 - RNA, 20 nt, synthetic construct
  source 1..20: mol_type = other RNA
gttggacagctgggagaaag

SEQ ID NO: 46008 - RNA, 20 nt, synthetic construct
  source 1..20: mol_type = other RNA
gttggactccaccctgcccc

SEQ ID NO: 46009 - RNA, 20 nt, synthetic construct
  source 1..20: mol_type = other RNA
gttggagacagcctaaacca

SEQ ID NO: 46010 - RNA, 20 nt, synthetic construct
  source 1..20: mol_type = other RNA
gttggagagatggtagtcaa

SEQ ID NO: 46011 - RNA, 20 nt, synthetic construct
  source 1..20: mol_type = other RNA
gttggaggagaaggccttcc

SEQ ID NO: 46012 - RNA, 20 nt, synthetic construct
  source 1..20: mol_type = other RNA
gttggatagtttctcaactt

SEQ ID NO: 46013 - RNA, 20 nt, synthetic construct
  source 1..20: mol_type = other RNA
gttggattatatgttctaaa

SEQ ID NO: 46014 - RNA, 20 nt, synthetic construct
  source 1..20: mol_type = other RNA
gttggattcccaggtatttt

SEQ ID NO: 46015 - RNA, 20 nt, synthetic construct
  source 1..20: mol_type = other RNA
gttggatttatctttctaga

SEQ ID NO: 46016 - RNA, 20 nt, synthetic construct
  source 1..20: mol_type = other RNA
gttggcacagccagtcagtg

SEQ ID NO: 46017 - RNA, 20 nt, synthetic construct
  source 1..20: mol_type = other RNA
gttggcactgaagccagtcc

SEQ ID NO: 46018 - RNA, 20 nt, synthetic construct
  source 1..20: mol_type = other RNA
gttggcccaacatgctctta

SEQ ID NO: 46019 - RNA, 20 nt, synthetic construct
  source 1..20: mol_type = other RNA
gttggccgaggccagtccct

SEQ ID NO: 46020 - RNA, 20 nt, synthetic construct
  source 1..20: mol_type = other RNA
gttggcctggacacacacag

SEQ ID NO: 46021 - RNA, 20 nt, synthetic construct
  source 1..20: mol_type = other RNA
gttggccttgaggtgagaca

SEQ ID NO: 46022 - RNA, 20 nt, synthetic construct
  source 1..20: mol_type = other RNA
gttggctaaaagaccgcaag

SEQ ID NO: 46023 - RNA, 20 nt, synthetic construct
  source 1..20: mol_type = other RNA
gttgggaggtttttgattac

SEQ ID NO: 46024 - RNA, 20 nt, synthetic construct
  source 1..20: mol_type = other RNA
gttgggagtctatttctgaa

SEQ ID NO: 46025 - RNA, 20 nt, synthetic construct
  source 1..20: mol_type = other RNA
gttgggccaacttccagcaa

SEQ ID NO: 46026 - RNA, 20 nt, synthetic construct
  source 1..20: mol_type = other RNA
gttgggctattaagtattgc

SEQ ID NO: 46027 - RNA, 20 nt, synthetic construct
  source 1..20: mol_type = other RNA
gttgggcttaacatttgaac

SEQ ID NO: 46028 - RNA, 20 nt, synthetic construct
  source 1..20: mol_type = other RNA
gttgggcttatcagatggtg

SEQ ID NO: 46029 - RNA, 20 nt, synthetic construct
  source 1..20: mol_type = other RNA
gttgggcttggttggaaaag

SEQ ID NO: 46030 - RNA, 20 nt, synthetic construct
  source 1..20: mol_type = other RNA
gttggggactcttatggcta

SEQ ID NO: 46031 - RNA, 20 nt, synthetic construct
  source 1..20: mol_type = other RNA
gttggggaggccgcgggagg

SEQ ID NO: 46032 - RNA, 20 nt, synthetic construct
  source 1..20: mol_type = other RNA
gttgggggctgggtcggccg

SEQ ID NO: 46033 - RNA, 20 nt, synthetic construct
  source 1..20: mol_type = other RNA
gttggggtatgtttgattag

SEQ ID NO: 46034 - RNA, 20 nt, synthetic construct
  source 1..20: mol_type = other RNA
gttgggtaaaaataatcaac

SEQ ID NO: 46035 - RNA, 20 nt, synthetic construct
  source 1..20: mol_type = other RNA
gttgggtttaactgaggtgt

SEQ ID NO: 46036 - RNA, 20 nt, synthetic construct
  source 1..20: mol_type = other RNA
gttggtcagaaaaatggaat

SEQ ID NO: 46037 - RNA, 20 nt, synthetic construct
  source 1..20: mol_type = other RNA
gttggtcctgcatatgtttt

SEQ ID NO: 46038 - RNA, 20 nt, synthetic construct
  source 1..20: mol_type = other RNA
gttggtgaagagagcctgtg

SEQ ID NO: 46039 - RNA, 20 nt, synthetic construct
  source 1..20: mol_type = other RNA
gttggtgagaacccagtgtc

SEQ ID NO: 46040 - RNA, 20 nt, synthetic construct
  source 1..20: mol_type = other RNA
gttggtgcaaggataaacaa

SEQ ID NO: 46041 - RNA, 20 nt, synthetic construct
  source 1..20: mol_type = other RNA
gttggtgcatttgggacagc

SEQ ID NO: 46042 - RNA, 20 nt, synthetic construct
  source 1..20: mol_type = other RNA
gttggtgcttagctgcctct

SEQ ID NO: 46043 - RNA, 20 nt, synthetic construct
  source 1..20: mol_type = other RNA
gttggtgcttccttctctta

SEQ ID NO: 46044 - RNA, 20 nt, synthetic construct
  source 1..20: mol_type = other RNA
gttggtgtttctgacaggtg

SEQ ID NO: 46045 - RNA, 20 nt, synthetic construct
  source 1..20: mol_type = other RNA
gttggttagtgttgttttta

SEQ ID NO: 46046 - RNA, 20 nt, synthetic construct
  source 1..20: mol_type = other RNA
gttggtttgtgtgtttgtga

SEQ ID NO: 46047 - RNA, 20 nt, synthetic construct
  source 1..20: mol_type = other RNA
gttgtaacacatatttatca

SEQ ID NO: 46048 - RNA, 20 nt, synthetic construct
  source 1..20: mol_type = other RNA
gttgtaactacagacatgcc

SEQ ID NO: 46049 - RNA, 20 nt, synthetic construct
  source 1..20: mol_type = other RNA
gttgtaatgttacttctcag

SEQ ID NO: 46050 - RNA, 20 nt, synthetic construct
  source 1..20: mol_type = other RNA
gttgtaatttttaaaagagc

SEQ ID NO: 46051 - RNA, 20 nt, synthetic construct
  source 1..20: mol_type = other RNA
gttgtacatttaaaattgca

SEQ ID NO: 46052 - RNA, 20 nt, synthetic construct
  source 1..20: mol_type = other RNA
gttgtacttgacacaaagga

SEQ ID NO: 46053 - RNA, 20 nt, synthetic construct
  source 1..20: mol_type = other RNA
gttgtatagcagtaaaatga

SEQ ID NO: 46054 - RNA, 20 nt, synthetic construct
  source 1..20: mol_type = other RNA
gttgtatctgtgatccctga

SEQ ID NO: 46055 - RNA, 20 nt, synthetic construct
  source 1..20: mol_type = other RNA
gttgtatgccaaaaaattgg

SEQ ID NO: 46056 - RNA, 20 nt, synthetic construct
  source 1..20: mol_type = other RNA
gttgtattttacaccatgca

SEQ ID NO: 46057 - RNA, 20 nt, synthetic construct
  source 1..20: mol_type = other RNA
gttgtcagaattagaaagct

SEQ ID NO: 46058 - RNA, 20 nt, synthetic construct
  source 1..20: mol_type = other RNA
gttgtctgattcagtttgct

SEQ ID NO: 46059 - RNA, 20 nt, synthetic construct
  source 1..20: mol_type = other RNA
gttgtgaggattcgattaaa

SEQ ID NO: 46060 - RNA, 20 nt, synthetic construct
  source 1..20: mol_type = other RNA
gttgtgatatattatgaacc

SEQ ID NO: 46061 - RNA, 20 nt, synthetic construct
  source 1..20: mol_type = other RNA
gttgtgcacacatccacgcg

SEQ ID NO: 46062 - RNA, 20 nt, synthetic construct
  source 1..20: mol_type = other RNA
gttgtgctacctcaaattgt

SEQ ID NO: 46063 - RNA, 20 nt, synthetic construct
  source 1..20: mol_type = other RNA
gttgtgcttcgaggtcgcac

SEQ ID NO: 46064 - RNA, 20 nt, synthetic construct
  source 1..20: mol_type = other RNA
gttgtggaattaactccagg

SEQ ID NO: 46065 - RNA, 20 nt, synthetic construct
  source 1..20: mol_type = other RNA
gttgtggatgtccttaatgc

SEQ ID NO: 46066 - RNA, 20 nt, synthetic construct
  source 1..20: mol_type = other RNA
gttgtgtagaaatgtggaga

SEQ ID NO: 46067 - RNA, 20 nt, synthetic construct
  source 1..20: mol_type = other RNA
gttgtgtcatttttgtattc

SEQ ID NO: 46068 - RNA, 20 nt, synthetic construct
  source 1..20: mol_type = other RNA
gttgtgtgcacctaataaaa

SEQ ID NO: 46069 - RNA, 20 nt, synthetic construct
  source 1..20: mol_type = other RNA
gttgtgtgttaaatttgatt

SEQ ID NO: 46070 - RNA, 20 nt, synthetic construct
  source 1..20: mol_type = other RNA
gttgtgttttcattcgttca

SEQ ID NO: 46071 - RNA, 20 nt, synthetic construct
  source 1..20: mol_type = other RNA
gttgttcagttgaaaagtat

SEQ ID NO: 46072 - RNA, 20 nt, synthetic construct
  source 1..20: mol_type = other RNA
gttgttcttggttaatatta

SEQ ID NO: 46073 - RNA, 20 nt, synthetic construct
  source 1..20: mol_type = other RNA
gttgttcttttcaaaaacag

SEQ ID NO: 46074 - RNA, 20 nt, synthetic construct
  source 1..20: mol_type = other RNA
gttgttgaatgtggcagaat

SEQ ID NO: 46075 - RNA, 20 nt, synthetic construct
  source 1..20: mol_type = other RNA
gttgttggctaaaagaccgc

SEQ ID NO: 46076 - RNA, 20 nt, synthetic construct
  source 1..20: mol_type = other RNA
gttgttggtttgtgtgtttg

SEQ ID NO: 46077 - RNA, 20 nt, synthetic construct
  source 1..20: mol_type = other RNA
gttgttgttgtttctgagcc

SEQ ID NO: 46078 - RNA, 20 nt, synthetic construct
  source 1..20: mol_type = other RNA
gttgttgtttctgagccaga

SEQ ID NO: 46079 - RNA, 20 nt, synthetic construct
  source 1..20: mol_type = other RNA
gttgttgttttgtttttctt

SEQ ID NO: 46080 - RNA, 20 nt, synthetic construct
  source 1..20: mol_type = other RNA
gttgtttacttgggtataaa

SEQ ID NO: 46081 - RNA, 20 nt, synthetic construct
  source 1..20: mol_type = other RNA
gttgtttccactttgaggtt

SEQ ID NO: 46082 - RNA, 20 nt, synthetic construct
  source 1..20: mol_type = other RNA
gttgtttccatgtcttggct

SEQ ID NO: 46083 - RNA, 20 nt, synthetic construct
  source 1..20: mol_type = other RNA
gttgtttctgagccagagtt

SEQ ID NO: 46084 - RNA, 20 nt, synthetic construct
  source 1..20: mol_type = other RNA
gttgtttttaaacaatagga

SEQ ID NO: 46085 - RNA, 20 nt, synthetic construct
  source 1..20: mol_type = other RNA
gtttaaaaacaacactaacc

SEQ ID NO: 46086 - RNA, 20 nt, synthetic construct
  source 1..20: mol_type = other RNA
gtttaaaaagaaaaagctca

SEQ ID NO: 46087 - RNA, 20 nt, synthetic construct
  source 1..20: mol_type = other RNA
gtttaaaaatcaacacattc

SEQ ID NO: 46088 - RNA, 20 nt, synthetic construct
  source 1..20: mol_type = other RNA
gtttaaaagagtgcacattc

SEQ ID NO: 46089 - RNA, 20 nt, synthetic construct
  source 1..20: mol_type = other RNA
gtttaaaagtaaattcgcat

SEQ ID NO: 46090 - RNA, 20 nt, synthetic construct
  source 1..20: mol_type = other RNA
gtttaaagctttgtgactgt

SEQ ID NO: 46091 - RNA, 20 nt, synthetic construct
  source 1..20: mol_type = other RNA
gtttaacacatacaaaccaa

SEQ ID NO: 46092 - RNA, 20 nt, synthetic construct
  source 1..20: mol_type = other RNA
gtttaaccaattatgctgag

SEQ ID NO: 46093 - RNA, 20 nt, synthetic construct
  source 1..20: mol_type = other RNA
gtttaactatcctatgtggg

SEQ ID NO: 46094 - RNA, 20 nt, synthetic construct
  source 1..20: mol_type = other RNA
gtttaactgaggtgtttttc

SEQ ID NO: 46095 - RNA, 20 nt, synthetic construct
  source 1..20: mol_type = other RNA
gtttaactttgatgaattcc

SEQ ID NO: 46096 - RNA, 20 nt, synthetic construct
  source 1..20: mol_type = other RNA
gtttaaggtaagggtccagc

SEQ ID NO: 46097 - RNA, 20 nt, synthetic construct
  source 1..20: mol_type = other RNA
gtttaataaatactagtagg

SEQ ID NO: 46098 - RNA, 20 nt, synthetic construct
  source 1..20: mol_type = other RNA
gtttaattacccaggcatga

SEQ ID NO: 46099 - RNA, 20 nt, synthetic construct
  source 1..20: mol_type = other RNA
gtttaattagccgggtgtag

SEQ ID NO: 46100 - RNA, 20 nt, synthetic construct
  source 1..20: mol_type = other RNA
gtttaattcctactttcttc

SEQ ID NO: 46101 - RNA, 20 nt, synthetic construct
  source 1..20: mol_type = other RNA
gtttaattctgtttaccctt

SEQ ID NO: 46102 - RNA, 20 nt, synthetic construct
  source 1..20: mol_type = other RNA
gtttaattcttttgctgtat

SEQ ID NO: 46103 - RNA, 20 nt, synthetic construct
  source 1..20: mol_type = other RNA
gtttaattgggggaaaattg

SEQ ID NO: 46104 - RNA, 20 nt, synthetic construct
  source 1..20: mol_type = other RNA
gtttaatttccacccatgaa

SEQ ID NO: 46105 - RNA, 20 nt, synthetic construct
  source 1..20: mol_type = other RNA
gtttacaatggttcataata

SEQ ID NO: 46106 - RNA, 20 nt, synthetic construct
  source 1..20: mol_type = other RNA
gtttacacacctgaaattct

SEQ ID NO: 46107 - RNA, 20 nt, synthetic construct
  source 1..20: mol_type = other RNA
gtttacacgccttcgcgggc

SEQ ID NO: 46108 - RNA, 20 nt, synthetic construct
  source 1..20: mol_type = other RNA
gtttacactatggcttttga

SEQ ID NO: 46109 - RNA, 20 nt, synthetic construct
  source 1..20: mol_type = other RNA
gtttacagaaatatacctta

SEQ ID NO: 46110 - RNA, 20 nt, synthetic construct
  source 1..20: mol_type = other RNA
gtttacaggatatcagaagt

SEQ ID NO: 46111 - RNA, 20 nt, synthetic construct
  source 1..20: mol_type = other RNA
gtttacagtagccaaaggta

SEQ ID NO: 46112 - RNA, 20 nt, synthetic construct
  source 1..20: mol_type = other RNA
gtttacattagagaagaatg

SEQ ID NO: 46113 - RNA, 20 nt, synthetic construct
  source 1..20: mol_type = other RNA
gtttaccaagggtgtgttta

SEQ ID NO: 46114 - RNA, 20 nt, synthetic construct
  source 1..20: mol_type = other RNA
gtttacccagtgtgtttgtt

SEQ ID NO: 46115 - RNA, 20 nt, synthetic construct
  source 1..20: mol_type = other RNA
gtttacccttactaaatttt

SEQ ID NO: 46116 - RNA, 20 nt, synthetic construct
  source 1..20: mol_type = other RNA
gtttactccaagaaggctag

SEQ ID NO: 46117 - RNA, 20 nt, synthetic construct
  source 1..20: mol_type = other RNA
gtttacttggggagagtggg

SEQ ID NO: 46118 - RNA, 20 nt, synthetic construct
  source 1..20: mol_type = other RNA
gtttacttgggtataaatga

SEQ ID NO: 46119 - RNA, 20 nt, synthetic construct
  source 1..20: mol_type = other RNA
gtttagaaaacatatccttc

SEQ ID NO: 46120 - RNA, 20 nt, synthetic construct
  source 1..20: mol_type = other RNA
gtttagcaagattactggat

SEQ ID NO: 46121 - RNA, 20 nt, synthetic construct
  source 1..20: mol_type = other RNA
gtttagcaatccaaggacag

SEQ ID NO: 46122 - RNA, 20 nt, synthetic construct
  source 1..20: mol_type = other RNA
gtttagcatctagcacagaa

SEQ ID NO: 46123 - RNA, 20 nt, synthetic construct
  source 1..20: mol_type = other RNA
gtttagcggaatgactatag

SEQ ID NO: 46124 - RNA, 20 nt, synthetic construct
  source 1..20: mol_type = other RNA
gtttaggaagcacattcctt

SEQ ID NO: 46125 - RNA, 20 nt, synthetic construct
  source 1..20: mol_type = other RNA
gtttaggatataagagtggg

SEQ ID NO: 46126 - RNA, 20 nt, synthetic construct
  source 1..20: mol_type = other RNA
gtttaggctgtctccaacgc

SEQ ID NO: 46127 - RNA, 20 nt, synthetic construct
  source 1..20: mol_type = other RNA
gtttagggacgaatgcatgg

SEQ ID NO: 46128 - RNA, 20 nt, synthetic construct
  source 1..20: mol_type = other RNA
gtttaggtttttcttgtggg

SEQ ID NO: 46129 - RNA, 20 nt, synthetic construct
  source 1..20: mol_type = other RNA
gtttagtaaatctttggtga

SEQ ID NO: 46130 - RNA, 20 nt, synthetic construct
  source 1..20: mol_type = other RNA
gtttagtagaattctccagt

SEQ ID NO: 46131 - RNA, 20 nt, synthetic construct
  source 1..20: mol_type = other RNA
gtttagtagctgtctttaat

SEQ ID NO: 46132 - RNA, 20 nt, synthetic construct
  source 1..20: mol_type = other RNA
gtttagtgcagtatcttgaa

SEQ ID NO: 46133 - RNA, 20 nt, synthetic construct
  source 1..20: mol_type = other RNA
gtttagttactcaaatccaa

SEQ ID NO: 46134 - RNA, 20 nt, synthetic construct
  source 1..20: mol_type = other RNA
gtttagttattaaatgagac

SEQ ID NO: 46135 - RNA, 20 nt, synthetic construct
  source 1..20: mol_type = other RNA
gtttatatgcctagatgatt

SEQ ID NO: 46136 - RNA, 20 nt, synthetic construct
  source 1..20: mol_type = other RNA
gtttatattctaagtttgcc

SEQ ID NO: 46137 - RNA, 20 nt, synthetic construct
  source 1..20: mol_type = other RNA
gtttatcagtctccaatcct

SEQ ID NO: 46138 - RNA, 20 nt, synthetic construct
  source 1..20: mol_type = other RNA
gtttatccttgcaccaactc

SEQ ID NO: 46139 - RNA, 20 nt, synthetic construct
  source 1..20: mol_type = other RNA
gtttatctacagaggatttt

SEQ ID NO: 46140 - RNA, 20 nt, synthetic construct
  source 1..20: mol_type = other RNA
gtttatgaatgatgccatca

SEQ ID NO: 46141 - RNA, 20 nt, synthetic construct
  source 1..20: mol_type = other RNA
gtttatgacaaataaaagct

SEQ ID NO: 46142 - RNA, 20 nt, synthetic construct
  source 1..20: mol_type = other RNA
gtttatgcatttattagtag

SEQ ID NO: 46143 - RNA, 20 nt, synthetic construct
  source 1..20: mol_type = other RNA
gtttatgggtcaaccactaa

SEQ ID NO: 46144 - RNA, 20 nt, synthetic construct
  source 1..20: mol_type = other RNA
gtttattagaactagaactg

SEQ ID NO: 46145 - RNA, 20 nt, synthetic construct
  source 1..20: mol_type = other RNA
gtttattcatacgttaactg

SEQ ID NO: 46146 - RNA, 20 nt, synthetic construct
  source 1..20: mol_type = other RNA
gtttattcatataatggagt

SEQ ID NO: 46147 - RNA, 20 nt, synthetic construct
  source 1..20: mol_type = other RNA
gtttatttcttctccctctt

SEQ ID NO: 46148 - RNA, 20 nt, synthetic construct
  source 1..20: mol_type = other RNA
gtttatttgctgtcaggcaa

SEQ ID NO: 46149 - RNA, 20 nt, synthetic construct
  source 1..20: mol_type = other RNA
gtttattttctgcatttggt

SEQ ID NO: 46150 - RNA, 20 nt, synthetic construct
  source 1..20: mol_type = other RNA
gtttcaaaagctccccggat

SEQ ID NO: 46151 - RNA, 20 nt, synthetic construct
  source 1..20: mol_type = other RNA
gtttcaaactgtggtcactg

SEQ ID NO: 46152 - RNA, 20 nt, synthetic construct
  source 1..20: mol_type = other RNA
gtttcaagtgaaccaaaaac

SEQ ID NO: 46153 - RNA, 20 nt, synthetic construct
  source 1..20: mol_type = other RNA
gtttcaatattaagagtctc

SEQ ID NO: 46154 - RNA, 20 nt, synthetic construct
  source 1..20: mol_type = other RNA
gtttcaatgacttttatcaa

SEQ ID NO: 46155 - RNA, 20 nt, synthetic construct
  source 1..20: mol_type = other RNA
gtttcaatttagtcaataca

SEQ ID NO: 46156 - RNA, 20 nt, synthetic construct
  source 1..20: mol_type = other RNA
gtttcacacgcattgcattg

SEQ ID NO: 46157 - RNA, 20 nt, synthetic construct
  source 1..20: mol_type = other RNA
gtttcaccctgcgaaggcaa

SEQ ID NO: 46158 - RNA, 20 nt, synthetic construct
  source 1..20: mol_type = other RNA
gtttcacttcttagtaaata

SEQ ID NO: 46159 - RNA, 20 nt, synthetic construct
  source 1..20: mol_type = other RNA
gtttcacttttctggttttc

SEQ ID NO: 46160 - RNA, 20 nt, synthetic construct
  source 1..20: mol_type = other RNA
gtttcagattgcttgagaga

SEQ ID NO: 46161 - RNA, 20 nt, synthetic construct
  source 1..20: mol_type = other RNA
gtttcagcacaatactgtct

SEQ ID NO: 46162 - RNA, 20 nt, synthetic construct
  source 1..20: mol_type = other RNA
gtttcagtacacgaaaatat

SEQ ID NO: 46163 - RNA, 20 nt, synthetic construct
  source 1..20: mol_type = other RNA
gtttcagtccctcctttcta

SEQ ID NO: 46164 - RNA, 20 nt, synthetic construct
  source 1..20: mol_type = other RNA
gtttcagtgagtagggaagg

SEQ ID NO: 46165 - RNA, 20 nt, synthetic construct
  source 1..20: mol_type = other RNA
gtttcagtggttaatatatt

SEQ ID NO: 46166 - RNA, 20 nt, synthetic construct
  source 1..20: mol_type = other RNA
gtttcagtgtgtccacacaa

SEQ ID NO: 46167 - RNA, 20 nt, synthetic construct
  source 1..20: mol_type = other RNA
gtttcataaaatgatggcaa

SEQ ID NO: 46168 - RNA, 20 nt, synthetic construct
  source 1..20: mol_type = other RNA
gtttcatctatgtcccctgg

SEQ ID NO: 46169 - RNA, 20 nt, synthetic construct
  source 1..20: mol_type = other RNA
gtttcatggacttcctattt

SEQ ID NO: 46170 - RNA, 20 nt, synthetic construct
  source 1..20: mol_type = other RNA
gtttcatttacaaaaacaca

SEQ ID NO: 46171 - RNA, 20 nt, synthetic construct
  source 1..20: mol_type = other RNA
gtttccactttgaggttatt

SEQ ID NO: 46172 - RNA, 20 nt, synthetic construct
  source 1..20: mol_type = other RNA
gtttccagaaaactggcaat

SEQ ID NO: 46173 - RNA, 20 nt, synthetic construct
  source 1..20: mol_type = other RNA
gtttccagtggcccccctga

SEQ ID NO: 46174 - RNA, 20 nt, synthetic construct
  source 1..20: mol_type = other RNA
gtttccataaaaagcgttgg

SEQ ID NO: 46175 - RNA, 20 nt, synthetic construct
  source 1..20: mol_type = other RNA
gtttccatggaggggccagt

SEQ ID NO: 46176 - RNA, 20 nt, synthetic construct
  source 1..20: mol_type = other RNA
gtttccatgtcttggctatt

SEQ ID NO: 46177 - RNA, 20 nt, synthetic construct
  source 1..20: mol_type = other RNA
gtttccattctcttaatttt

SEQ ID NO: 46178 - RNA, 20 nt, synthetic construct
  source 1..20: mol_type = other RNA
gtttccctctgagagaagtc

SEQ ID NO: 46179 - RNA, 20 nt, synthetic construct
  source 1..20: mol_type = other RNA
gtttccctggggaataagat

SEQ ID NO: 46180 - RNA, 20 nt, synthetic construct
  source 1..20: mol_type = other RNA
gtttcccttaaaaggaacta

SEQ ID NO: 46181 - RNA, 20 nt, synthetic construct
  source 1..20: mol_type = other RNA
gtttcccttaatgttgacat

SEQ ID NO: 46182 - RNA, 20 nt, synthetic construct
  source 1..20: mol_type = other RNA
gtttccgttttgcaagatgc

SEQ ID NO: 46183 - RNA, 20 nt, synthetic construct
  source 1..20: mol_type = other RNA
gtttcctaatctaacatgtt

SEQ ID NO: 46184 - RNA, 20 nt, synthetic construct
  source 1..20: mol_type = other RNA
gtttcctacatactgcactc

SEQ ID NO: 46185 - RNA, 20 nt, synthetic construct
  source 1..20: mol_type = other RNA
gtttcctagaaaatcataca

SEQ ID NO: 46186 - RNA, 20 nt, synthetic construct
  source 1..20: mol_type = other RNA
gtttcctagattccctctgg

SEQ ID NO: 46187 - RNA, 20 nt, synthetic construct
  source 1..20: mol_type = other RNA
gtttcctcggtctacggacg

SEQ ID NO: 46188 - RNA, 20 nt, synthetic construct
  source 1..20: mol_type = other RNA
gtttcctgcacatgcacaag

SEQ ID NO: 46189 - RNA, 20 nt, synthetic construct
  source 1..20: mol_type = other RNA
gtttccttaccagtgcttgc

SEQ ID NO: 46190 - RNA, 20 nt, synthetic construct
  source 1..20: mol_type = other RNA
gtttccttacctttatcttt

SEQ ID NO: 46191 - RNA, 20 nt, synthetic construct
  source 1..20: mol_type = other RNA
gtttccttccagatgtttta

SEQ ID NO: 46192 - RNA, 20 nt, synthetic construct
  source 1..20: mol_type = other RNA
gtttcgcaaagtaaaaagca

SEQ ID NO: 46193 - RNA, 20 nt, synthetic construct
  source 1..20: mol_type = other RNA
gtttctacctttggctactg

SEQ ID NO: 46194 - RNA, 20 nt, synthetic construct
  source 1..20: mol_type = other RNA
gtttctagccataatcctta

SEQ ID NO: 46195 - RNA, 20 nt, synthetic construct
  source 1..20: mol_type = other RNA
gtttctcaacttagccttgg

SEQ ID NO: 46196 - RNA, 20 nt, synthetic construct
  source 1..20: mol_type = other RNA
gtttctcattcttctctaat

SEQ ID NO: 46197 - RNA, 20 nt, synthetic construct
  source 1..20: mol_type = other RNA
gtttctcatttttcaggggg

SEQ ID NO: 46198 - RNA, 20 nt, synthetic construct
  source 1..20: mol_type = other RNA
gtttctcctgcatggggagt

SEQ ID NO: 46199 - RNA, 20 nt, synthetic construct
  source 1..20: mol_type = other RNA
gtttctccttctgcaggctg

SEQ ID NO: 46200 - RNA, 20 nt, synthetic construct
  source 1..20: mol_type = other RNA
gtttctctacatctggatcc

SEQ ID NO: 46201 - RNA, 20 nt, synthetic construct
  source 1..20: mol_type = other RNA
gtttctctccaaggtacaat

SEQ ID NO: 46202 - RNA, 20 nt, synthetic construct
  source 1..20: mol_type = other RNA
gtttctctctccctgccctg

SEQ ID NO: 46203 - RNA, 20 nt, synthetic construct
  source 1..20: mol_type = other RNA
gtttctctgctttttcttgg

SEQ ID NO: 46204 - RNA, 20 nt, synthetic construct
  source 1..20: mol_type = other RNA
gtttctgacacccgacccac

SEQ ID NO: 46205 - RNA, 20 nt, synthetic construct
  source 1..20: mol_type = other RNA
gtttctgacaggtggtatgg

SEQ ID NO: 46206 - RNA, 20 nt, synthetic construct
  source 1..20: mol_type = other RNA
gtttctgagccagagtttca

SEQ ID NO: 46207 - RNA, 20 nt, synthetic construct
  source 1..20: mol_type = other RNA
gtttctgaggtggagttctg

SEQ ID NO: 46208 - RNA, 20 nt, synthetic construct
  source 1..20: mol_type = other RNA
gtttctgatttatctttctt

SEQ ID NO: 46209 - RNA, 20 nt, synthetic construct
  source 1..20: mol_type = other RNA
gtttctgcatacttagctaa

SEQ ID NO: 46210 - RNA, 20 nt, synthetic construct
  source 1..20: mol_type = other RNA
gtttctgctattctctttct

SEQ ID NO: 46211 - RNA, 20 nt, synthetic construct
  source 1..20: mol_type = other RNA
gtttctggaagtttcctgca

SEQ ID NO: 46212 - RNA, 20 nt, synthetic construct
  source 1..20: mol_type = other RNA
gtttctgtgaaaaaacaaaa

SEQ ID NO: 46213 - RNA, 20 nt, synthetic construct
  source 1..20: mol_type = other RNA
gtttctgtttggatgaaaaa

SEQ ID NO: 46214 - RNA, 20 nt, synthetic construct
  source 1..20: mol_type = other RNA
gtttcttagctatattcact

SEQ ID NO: 46215 - RNA, 20 nt, synthetic construct
  source 1..20: mol_type = other RNA
gtttcttcaagatactgcac

SEQ ID NO: 46216 - RNA, 20 nt, synthetic construct
  source 1..20: mol_type = other RNA
gtttcttcactcttaaaagg

SEQ ID NO: 46217 - RNA, 20 nt, synthetic construct
  source 1..20: mol_type = other RNA
gtttcttgaatctctctatc

SEQ ID NO: 46218 - RNA, 20 nt, synthetic construct
  source 1..20: mol_type = other RNA
gtttcttttcactctaatat

SEQ ID NO: 46219 - RNA, 20 nt, synthetic construct
  source 1..20: mol_type = other RNA
gtttctttttgttttctcct

SEQ ID NO: 46220 - RNA, 20 nt, synthetic construct
  source 1..20: mol_type = other RNA
gtttgaaaagtgtttgtcac

SEQ ID NO: 46221 - RNA, 20 nt, synthetic construct
  source 1..20: mol_type = other RNA
gtttgaaactttaagagtat

SEQ ID NO: 46222 - RNA, 20 nt, synthetic construct
  source 1..20: mol_type = other RNA
gtttgaaatgatcttttgta

SEQ ID NO: 46223 - RNA, 20 nt, synthetic construct
  source 1..20: mol_type = other RNA
gtttgaaatttaaagacgtt

SEQ ID NO: 46224 - RNA, 20 nt, synthetic construct
  source 1..20: mol_type = other RNA
gtttgaaccccagaaggtta

SEQ ID NO: 46225 - RNA, 20 nt, synthetic construct
  source 1..20: mol_type = other RNA
gtttgaagcttcacttctct

SEQ ID NO: 46226 - RNA, 20 nt, synthetic construct
  source 1..20: mol_type = other RNA
gtttgaattaagcaccacta

SEQ ID NO: 46227 - RNA, 20 nt, synthetic construct
  source 1..20: mol_type = other RNA
gtttgaattttccattcaca

SEQ ID NO: 46228 - RNA, 20 nt, synthetic construct
  source 1..20: mol_type = other RNA
gtttgacctgtaatttttct

SEQ ID NO: 46229 - RNA, 20 nt, synthetic construct
  source 1..20: mol_type = other RNA
gtttgagaagccacacagta

SEQ ID NO: 46230 - RNA, 20 nt, synthetic construct
  source 1..20: mol_type = other RNA
gtttgagaagtcttttccta

SEQ ID NO: 46231 - RNA, 20 nt, synthetic construct
  source 1..20: mol_type = other RNA
gtttgagaccagcgtgggca

SEQ ID NO: 46232 - RNA, 20 nt, synthetic construct
  source 1..20: mol_type = other RNA
gtttgagactgcagtgacct

SEQ ID NO: 46233 - RNA, 20 nt, synthetic construct
  source 1..20: mol_type = other RNA
gtttgagatctttcttattt

SEQ ID NO: 46234 - RNA, 20 nt, synthetic construct
  source 1..20: mol_type = other RNA
gtttgagctgaaagtaaaga

SEQ ID NO: 46235 - RNA, 20 nt, synthetic construct
  source 1..20: mol_type = other RNA
gtttgaggccgcagtgagcc

SEQ ID NO: 46236 - RNA, 20 nt, synthetic construct
  source 1..20: mol_type = other RNA
gtttgaggctgggagtacaa

SEQ ID NO: 46237 - RNA, 20 nt, synthetic construct
  source 1..20: mol_type = other RNA
gtttgaggcttttcatagtc

SEQ ID NO: 46238 - RNA, 20 nt, synthetic construct
  source 1..20: mol_type = other RNA
gtttgaggtgtacaattagg

SEQ ID NO: 46239 - RNA, 20 nt, synthetic construct
  source 1..20: mol_type = other RNA
gtttgagtatttcatgtact

SEQ ID NO: 46240 - RNA, 20 nt, synthetic construct
  source 1..20: mol_type = other RNA
gtttgagttgtttccacttt

SEQ ID NO: 46241 - RNA, 20 nt, synthetic construct
  source 1..20: mol_type = other RNA
gtttgagtttccagaaaact

SEQ ID NO: 46242 - RNA, 20 nt, synthetic construct
  source 1..20: mol_type = other RNA
gtttgatcccactagtggaa

SEQ ID NO: 46243 - RNA, 20 nt, synthetic construct
  source 1..20: mol_type = other RNA
gtttgatctggtcacaaaca

SEQ ID NO: 46244 - RNA, 20 nt, synthetic construct
  source 1..20: mol_type = other RNA
gtttgattagttgactccta

SEQ ID NO: 46245 - RNA, 20 nt, synthetic construct
  source 1..20: mol_type = other RNA
gtttgattgttccagggggg

SEQ ID NO: 46246 - RNA, 20 nt, synthetic construct
  source 1..20: mol_type = other RNA
gtttgcaaaaattttgttca

SEQ ID NO: 46247 - RNA, 20 nt, synthetic construct
  source 1..20: mol_type = other RNA
gtttgcaatacagttaacgt

SEQ ID NO: 46248 - RNA, 20 nt, synthetic construct
  source 1..20: mol_type = other RNA
gtttgcacgtttttagaaat

SEQ ID NO: 46249 - RNA, 20 nt, synthetic construct
  source 1..20: mol_type = other RNA
gtttgcactggcacagcact

SEQ ID NO: 46250 - RNA, 20 nt, synthetic construct
  source 1..20: mol_type = other RNA
gtttgcattacatgaatgga

SEQ ID NO: 46251 - RNA, 20 nt, synthetic construct
  source 1..20: mol_type = other RNA
gtttgccaaagattcttgtc

SEQ ID NO: 46252 - RNA, 20 nt, synthetic construct
  source 1..20: mol_type = other RNA
gtttgccatcttcaagattt

SEQ ID NO: 46253 - RNA, 20 nt, synthetic construct
  source 1..20: mol_type = other RNA
gtttgcctgcgtccgtagac

SEQ ID NO: 46254 - RNA, 20 nt, synthetic construct
  source 1..20: mol_type = other RNA
gtttgccttttcactcttag

SEQ ID NO: 46255 - RNA, 20 nt, synthetic construct
  source 1..20: mol_type = other RNA
gtttgctaataatgatgact

SEQ ID NO: 46256 - RNA, 20 nt, synthetic construct
  source 1..20: mol_type = other RNA
gtttgctagagctgctgtaa

SEQ ID NO: 46257 - RNA, 20 nt, synthetic construct
  source 1..20: mol_type = other RNA
gtttgctagtattttgttga

SEQ ID NO: 46258 - RNA, 20 nt, synthetic construct
  source 1..20: mol_type = other RNA
gtttgctagtggtaactaga

SEQ ID NO: 46259 - RNA, 20 nt, synthetic construct
  source 1..20: mol_type = other RNA
gtttgctctgcaaatgaggt

SEQ ID NO: 46260 - RNA, 20 nt, synthetic construct
  source 1..20: mol_type = other RNA
gtttgctttggagtcacagt

SEQ ID NO: 46261 - RNA, 20 nt, synthetic construct
  source 1..20: mol_type = other RNA
gtttgctttggagtgagagg

SEQ ID NO: 46262 - RNA, 20 nt, synthetic construct
  source 1..20: mol_type = other RNA
gtttggaaccagcctggcca

SEQ ID NO: 46263 - RNA, 20 nt, synthetic construct
  source 1..20: mol_type = other RNA
gtttggagtttgtagctcaa

SEQ ID NO: 46264 - RNA, 20 nt, synthetic construct
  source 1..20: mol_type = other RNA
gtttggatgaaaaagtactg

SEQ ID NO: 46265 - RNA, 20 nt, synthetic construct
  source 1..20: mol_type = other RNA
gtttggcaatttctcaaaaa

SEQ ID NO: 46266 - RNA, 20 nt, synthetic construct
  source 1..20: mol_type = other RNA
gtttggcagtttaagaatta

SEQ ID NO: 46267 - RNA, 20 nt, synthetic construct
  source 1..20: mol_type = other RNA
gtttggctcccatgattcaa

SEQ ID NO: 46268 - RNA, 20 nt, synthetic construct
  source 1..20: mol_type = other RNA
gtttggctccttaccactat

SEQ ID NO: 46269 - RNA, 20 nt, synthetic construct
  source 1..20: mol_type = other RNA
gtttggctgggagcttatca

SEQ ID NO: 46270 - RNA, 20 nt, synthetic construct
  source 1..20: mol_type = other RNA
gtttggggcttttgaacact

SEQ ID NO: 46271 - RNA, 20 nt, synthetic construct
  source 1..20: mol_type = other RNA
gtttgggtgacagagagaga

SEQ ID NO: 46272 - RNA, 20 nt, synthetic construct
  source 1..20: mol_type = other RNA
gtttggtagatttctgcata

SEQ ID NO: 46273 - RNA, 20 nt, synthetic construct
  source 1..20: mol_type = other RNA
gtttggtcaattgatctgcc

SEQ ID NO: 46274 - RNA, 20 nt, synthetic construct
  source 1..20: mol_type = other RNA
gtttggtgaattttattctt

SEQ ID NO: 46275 - RNA, 20 nt, synthetic construct
  source 1..20: mol_type = other RNA
gtttggtgactgaattccca

SEQ ID NO: 46276 - RNA, 20 nt, synthetic construct
  source 1..20: mol_type = other RNA
gtttggtgtatttagtatat

SEQ ID NO: 46277 - RNA, 20 nt, synthetic construct
  source 1..20: mol_type = other RNA
gtttggttcatttcaggaat

SEQ ID NO: 46278 - RNA, 20 nt, synthetic construct
  source 1..20: mol_type = other RNA
gtttggtttttatggaataa

SEQ ID NO: 46279 - RNA, 20 nt, synthetic construct
  source 1..20: mol_type = other RNA
gtttgtaacttgttcatgtt

SEQ ID NO: 46280 - RNA, 20 nt, synthetic construct
  source 1..20: mol_type = other RNA
gtttgtacttctaccttgaa

SEQ ID NO: 46281 - RNA, 20 nt, synthetic construct
  source 1..20: mol_type = other RNA
gtttgtagagcaagcaacac

SEQ ID NO: 46282 - RNA, 20 nt, synthetic construct
  source 1..20: mol_type = other RNA
gtttgtagctcaaagcatat

SEQ ID NO: 46283 - RNA, 20 nt, synthetic construct
  source 1..20: mol_type = other RNA
gtttgtatgtgttaaaccat

SEQ ID NO: 46284 - RNA, 20 nt, synthetic construct
  source 1..20: mol_type = other RNA
gtttgtcacatagaagcgct

SEQ ID NO: 46285 - RNA, 20 nt, synthetic construct
  source 1..20: mol_type = other RNA
gtttgtgaaaaatacaattg

SEQ ID NO: 46286 - RNA, 20 nt, synthetic construct
  source 1..20: mol_type = other RNA
gtttgtgaagatacaaatag

SEQ ID NO: 46287 - RNA, 20 nt, synthetic construct
  source 1..20: mol_type = other RNA
gtttgtgaccagatcaaacg

SEQ ID NO: 46288 - RNA, 20 nt, synthetic construct
  source 1..20: mol_type = other RNA
gtttgtgcttggatattcta

SEQ ID NO: 46289 - RNA, 20 nt, synthetic construct
  source 1..20: mol_type = other RNA
gtttgtggttttaacctctt

SEQ ID NO: 46290 - RNA, 20 nt, synthetic construct
  source 1..20: mol_type = other RNA
gtttgtgtgtttgtgaaaaa

SEQ ID NO: 46291 - RNA, 20 nt, synthetic construct
  source 1..20: mol_type = other RNA
gtttgtgttttcactctcaa

SEQ ID NO: 46292 - RNA, 20 nt, synthetic construct
  source 1..20: mol_type = other RNA
gtttgttagatctgggataa

SEQ ID NO: 46293 - RNA, 20 nt, synthetic construct
  source 1..20: mol_type = other RNA
gtttgttctgctgttgatgg

SEQ ID NO: 46294 - RNA, 20 nt, synthetic construct
  source 1..20: mol_type = other RNA
gtttgttctgtcacatttga

SEQ ID NO: 46295 - RNA, 20 nt, synthetic construct
  source 1..20: mol_type = other RNA
gtttgttgacccaatcatgt

SEQ ID NO: 46296 - RNA, 20 nt, synthetic construct
  source 1..20: mol_type = other RNA
gtttgttgggtttaactgag

SEQ ID NO: 46297 - RNA, 20 nt, synthetic construct
  source 1..20: mol_type = other RNA
gtttgtttaattagccgggt

SEQ ID NO: 46298 - RNA, 20 nt, synthetic construct
  source 1..20: mol_type = other RNA
gtttgtttctgaggtggagt

SEQ ID NO: 46299 - RNA, 20 nt, synthetic construct
  source 1..20: mol_type = other RNA
gtttgtttgctagagctgct

SEQ ID NO: 46300 - RNA, 20 nt, synthetic construct
  source 1..20: mol_type = other RNA
gtttgttttttgttttggtc

SEQ ID NO: 46301 - RNA, 20 nt, synthetic construct
  source 1..20: mol_type = other RNA
gttttaaagcagggaggggt

SEQ ID NO: 46302 - RNA, 20 nt, synthetic construct
  source 1..20: mol_type = other RNA
gttttaaatagataaggttg

SEQ ID NO: 46303 - RNA, 20 nt, synthetic construct
  source 1..20: mol_type = other RNA
gttttaacctcttgaagtca

SEQ ID NO: 46304 - RNA, 20 nt, synthetic construct
  source 1..20: mol_type = other RNA
gttttaactcttgcattaga

SEQ ID NO: 46305 - RNA, 20 nt, synthetic construct
  source 1..20: mol_type = other RNA
gttttaacttaagaactgtt

SEQ ID NO: 46306 - RNA, 20 nt, synthetic construct
  source 1..20: mol_type = other RNA
gttttaagaaaagaagttac

SEQ ID NO: 46307 - RNA, 20 nt, synthetic construct
  source 1..20: mol_type = other RNA
gttttaaggcagggcttggt

SEQ ID NO: 46308 - RNA, 20 nt, synthetic construct
  source 1..20: mol_type = other RNA
gttttaatgggcattagaag

SEQ ID NO: 46309 - RNA, 20 nt, synthetic construct
  source 1..20: mol_type = other RNA
gttttacacatgtcagccac

SEQ ID NO: 46310 - RNA, 20 nt, synthetic construct
  source 1..20: mol_type = other RNA
gttttacatgtttaactatc

SEQ ID NO: 46311 - RNA, 20 nt, synthetic construct
  source 1..20: mol_type = other RNA
gttttacattttccattgat

SEQ ID NO: 46312 - RNA, 20 nt, synthetic construct
  source 1..20: mol_type = other RNA
gttttaccatctaaagccag

SEQ ID NO: 46313 - RNA, 20 nt, synthetic construct
  source 1..20: mol_type = other RNA
gttttactactgtactgttt

SEQ ID NO: 46314 - RNA, 20 nt, synthetic construct
  source 1..20: mol_type = other RNA
gttttaggaaaatagagttc

SEQ ID NO: 46315 - RNA, 20 nt, synthetic construct
  source 1..20: mol_type = other RNA
gttttaggagtcaactaatc

SEQ ID NO: 46316 - RNA, 20 nt, synthetic construct
  source 1..20: mol_type = other RNA
gttttaggggggaaaacacc

SEQ ID NO: 46317 - RNA, 20 nt, synthetic construct
  source 1..20: mol_type = other RNA
gttttaggtagtcttgtcat

SEQ ID NO: 46318 - RNA, 20 nt, synthetic construct
  source 1..20: mol_type = other RNA
gttttagtggctcacagtgc

SEQ ID NO: 46319 - RNA, 20 nt, synthetic construct
  source 1..20: mol_type = other RNA
gttttatagtcttagctctt

SEQ ID NO: 46320 - RNA, 20 nt, synthetic construct
  source 1..20: mol_type = other RNA
gttttatcaattagttcctc

SEQ ID NO: 46321 - RNA, 20 nt, synthetic construct
  source 1..20: mol_type = other RNA
gttttatctctctcaagcaa

SEQ ID NO: 46322 - RNA, 20 nt, synthetic construct
  source 1..20: mol_type = other RNA
gttttatggtaactcctgtt

SEQ ID NO: 46323 - RNA, 20 nt, synthetic construct
  source 1..20: mol_type = other RNA
gttttatttagcccatgtct

SEQ ID NO: 46324 - RNA, 20 nt, synthetic construct
  source 1..20: mol_type = other RNA
gttttatttaggccctctat

SEQ ID NO: 46325 - RNA, 20 nt, synthetic construct
  source 1..20: mol_type = other RNA
gttttatttcttgacctcag

SEQ ID NO: 46326 - RNA, 20 nt, synthetic construct
  source 1..20: mol_type = other RNA
gttttatttggctgttacca

SEQ ID NO: 46327 - RNA, 20 nt, synthetic construct
  source 1..20: mol_type = other RNA
gttttcaaatgctataaaga

SEQ ID NO: 46328 - RNA, 20 nt, synthetic construct
  source 1..20: mol_type = other RNA
gttttcaacaaaggttgaaa

SEQ ID NO: 46329 - RNA, 20 nt, synthetic construct
  source 1..20: mol_type = other RNA
gttttcaacctttgttgaaa

SEQ ID NO: 46330 - RNA, 20 nt, synthetic construct
  source 1..20: mol_type = other RNA
gttttcactctcaatagtgt

SEQ ID NO: 46331 - RNA, 20 nt, synthetic construct
  source 1..20: mol_type = other RNA
gttttcacttttgtgcaaca

SEQ ID NO: 46332 - RNA, 20 nt, synthetic construct
  source 1..20: mol_type = other RNA
gttttcagttgcatgaattt

SEQ ID NO: 46333 - RNA, 20 nt, synthetic construct
  source 1..20: mol_type = other RNA
gttttcatgcgacatatcag

SEQ ID NO: 46334 - RNA, 20 nt, synthetic construct
  source 1..20: mol_type = other RNA
gttttcattcgttcaaaaca

SEQ ID NO: 46335 - RNA, 20 nt, synthetic construct
  source 1..20: mol_type = other RNA
gttttcatttattctgttgc

SEQ ID NO: 46336 - RNA, 20 nt, synthetic construct
  source 1..20: mol_type = other RNA
gttttccaaccactgaatca

SEQ ID NO: 46337 - RNA, 20 nt, synthetic construct
  source 1..20: mol_type = other RNA
gttttccaataagttaactg

SEQ ID NO: 46338 - RNA, 20 nt, synthetic construct
  source 1..20: mol_type = other RNA
gttttccaatccgggaacat

SEQ ID NO: 46339 - RNA, 20 nt, synthetic construct
  source 1..20: mol_type = other RNA
gttttccacagtgactttac

SEQ ID NO: 46340 - RNA, 20 nt, synthetic construct
  source 1..20: mol_type = other RNA
gttttccaggaaaagcaaat

SEQ ID NO: 46341 - RNA, 20 nt, synthetic construct
  source 1..20: mol_type = other RNA
gttttccagtatattcatag

SEQ ID NO: 46342 - RNA, 20 nt, synthetic construct
  source 1..20: mol_type = other RNA
gttttcccccctaaaacact

SEQ ID NO: 46343 - RNA, 20 nt, synthetic construct
  source 1..20: mol_type = other RNA
gttttccccctacacccagt

SEQ ID NO: 46344 - RNA, 20 nt, synthetic construct
  source 1..20: mol_type = other RNA
gttttccctgtgtatgtgta

SEQ ID NO: 46345 - RNA, 20 nt, synthetic construct
  source 1..20: mol_type = other RNA
gttttcccttttgtagctaa

SEQ ID NO: 46346 - RNA, 20 nt, synthetic construct
  source 1..20: mol_type = other RNA
gttttccgtgtgacaaaaag

SEQ ID NO: 46347 - RNA, 20 nt, synthetic construct
  source 1..20: mol_type = other RNA
gttttcctactaacaagaaa

SEQ ID NO: 46348 - RNA, 20 nt, synthetic construct
  source 1..20: mol_type = other RNA
gttttcctgatggacattct

SEQ ID NO: 46349 - RNA, 20 nt, synthetic construct
  source 1..20: mol_type = other RNA
gttttcgaccaagttactag

SEQ ID NO: 46350 - RNA, 20 nt, synthetic construct
  source 1..20: mol_type = other RNA
gttttctaaaccttaaaaga

SEQ ID NO: 46351 - RNA, 20 nt, synthetic construct
  source 1..20: mol_type = other RNA
gttttctagttagtttgttg

SEQ ID NO: 46352 - RNA, 20 nt, synthetic construct
  source 1..20: mol_type = other RNA
gttttctccttctggaagat

SEQ ID NO: 46353 - RNA, 20 nt, synthetic construct
  source 1..20: mol_type = other RNA
gttttctggaaactcaaacc

SEQ ID NO: 46354 - RNA, 20 nt, synthetic construct
  source 1..20: mol_type = other RNA
gttttctggaggctagaagt

SEQ ID NO: 46355 - RNA, 20 nt, synthetic construct
  source 1..20: mol_type = other RNA
gttttctgtagaatatccaa

SEQ ID NO: 46356 - RNA, 20 nt, synthetic construct
  source 1..20: mol_type = other RNA
gttttcttactgatttatag

SEQ ID NO: 46357 - RNA, 20 nt, synthetic construct
  source 1..20: mol_type = other RNA
gttttcttattttttcccag

SEQ ID NO: 46358 - RNA, 20 nt, synthetic construct
  source 1..20: mol_type = other RNA
gttttcttcatggactagac

SEQ ID NO: 46359 - RNA, 20 nt, synthetic construct
  source 1..20: mol_type = other RNA
gttttgaacgaatgaaaaca

SEQ ID NO: 46360 - RNA, 20 nt, synthetic construct
  source 1..20: mol_type = other RNA
gttttgaataacctcataag

SEQ ID NO: 46361 - RNA, 20 nt, synthetic construct
  source 1..20: mol_type = other RNA
gttttgaccaaaacaaaaaa

SEQ ID NO: 46362 - RNA, 20 nt, synthetic construct
  source 1..20: mol_type = other RNA
gttttgactcagtacttccc

SEQ ID NO: 46363 - RNA, 20 nt, synthetic construct
  source 1..20: mol_type = other RNA
gttttgagtggcatcatact

SEQ ID NO: 46364 - RNA, 20 nt, synthetic construct
  source 1..20: mol_type = other RNA
gttttgatagttgcagattc

SEQ ID NO: 46365 - RNA, 20 nt, synthetic construct
  source 1..20: mol_type = other RNA
gttttgatcatcgcattacg

SEQ ID NO: 46366 - RNA, 20 nt, synthetic construct
  source 1..20: mol_type = other RNA
gttttgcaagatgcataagt

SEQ ID NO: 46367 - RNA, 20 nt, synthetic construct
  source 1..20: mol_type = other RNA
gttttgcaagattaatcttg

SEQ ID NO: 46368 - RNA, 20 nt, synthetic construct
  source 1..20: mol_type = other RNA
gttttgcagagatgaggtct

SEQ ID NO: 46369 - RNA, 20 nt, synthetic construct
  source 1..20: mol_type = other RNA
gttttgcagttggggactct

SEQ ID NO: 46370 - RNA, 20 nt, synthetic construct
  source 1..20: mol_type = other RNA
gttttgcctctttgctaata

SEQ ID NO: 46371 - RNA, 20 nt, synthetic construct
  source 1..20: mol_type = other RNA
gttttgcttactgtagcatt

SEQ ID NO: 46372 - RNA, 20 nt, synthetic construct
  source 1..20: mol_type = other RNA
gttttgcttcgaagcttatt

SEQ ID NO: 46373 - RNA, 20 nt, synthetic construct
  source 1..20: mol_type = other RNA
gttttgggggaagagagcat

SEQ ID NO: 46374 - RNA, 20 nt, synthetic construct
  source 1..20: mol_type = other RNA
gttttggtaaaatgtggcaa

SEQ ID NO: 46375 - RNA, 20 nt, synthetic construct
  source 1..20: mol_type = other RNA
gttttggtaatgggaaagac

SEQ ID NO: 46376 - RNA, 20 nt, synthetic construct
  source 1..20: mol_type = other RNA
gttttggtatgttgtgtttt

SEQ ID NO: 46377 - RNA, 20 nt, synthetic construct
  source 1..20: mol_type = other RNA
gttttggtcaaaactgtatt

SEQ ID NO: 46378 - RNA, 20 nt, synthetic construct
  source 1..20: mol_type = other RNA
gttttggtgtcatttttaag

SEQ ID NO: 46379 - RNA, 20 nt, synthetic construct
  source 1..20: mol_type = other RNA
gttttgtatatggtttaagg

SEQ ID NO: 46380 - RNA, 20 nt, synthetic construct
  source 1..20: mol_type = other RNA
gttttgtgtttgtgaccaga

SEQ ID NO: 46381 - RNA, 20 nt, synthetic construct
  source 1..20: mol_type = other RNA
gttttgttctcgttcatgtt

SEQ ID NO: 46382 - RNA, 20 nt, synthetic construct
  source 1..20: mol_type = other RNA
gttttgttgaatcttaacat

SEQ ID NO: 46383 - RNA, 20 nt, synthetic construct
  source 1..20: mol_type = other RNA
gttttgttgctattgttgaa

SEQ ID NO: 46384 - RNA, 20 nt, synthetic construct
  source 1..20: mol_type = other RNA
gttttgttttgaataacctc

SEQ ID NO: 46385 - RNA, 20 nt, synthetic construct
  source 1..20: mol_type = other RNA
gttttgttttgttttttcac

SEQ ID NO: 46386 - RNA, 20 nt, synthetic construct
  source 1..20: mol_type = other RNA
gttttgtttttctctccttg

SEQ ID NO: 46387 - RNA, 20 nt, synthetic construct
  source 1..20: mol_type = other RNA
gttttgttttttcacagaaa

SEQ ID NO: 46388 - RNA, 20 nt, synthetic construct
  source 1..20: mol_type = other RNA
gtttttaaaagatgcattct

SEQ ID NO: 46389 - RNA, 20 nt, synthetic construct
  source 1..20: mol_type = other RNA
gtttttaattcttaaactgc

SEQ ID NO: 46390 - RNA, 20 nt, synthetic construct
  source 1..20: mol_type = other RNA
gtttttacatgtagttttcc

SEQ ID NO: 46391 - RNA, 20 nt, synthetic construct
  source 1..20: mol_type = other RNA
gtttttagaaatttacccat

SEQ ID NO: 46392 - RNA, 20 nt, synthetic construct
  source 1..20: mol_type = other RNA
gtttttagagagatgcctgt

SEQ ID NO: 46393 - RNA, 20 nt, synthetic construct
  source 1..20: mol_type = other RNA
gtttttatatgcattaagcc

SEQ ID NO: 46394 - RNA, 20 nt, synthetic construct
  source 1..20: mol_type = other RNA
gtttttatggaataatggaa

SEQ ID NO: 46395 - RNA, 20 nt, synthetic construct
  source 1..20: mol_type = other RNA
gtttttattttatgtacacg

SEQ ID NO: 46396 - RNA, 20 nt, synthetic construct
  source 1..20: mol_type = other RNA
gtttttcaaaatgagatctt

SEQ ID NO: 46397 - RNA, 20 nt, synthetic construct
  source 1..20: mol_type = other RNA
gtttttcagccctgatagat

SEQ ID NO: 46398 - RNA, 20 nt, synthetic construct
  source 1..20: mol_type = other RNA
gtttttcaggttcaagcgac

SEQ ID NO: 46399 - RNA, 20 nt, synthetic construct
  source 1..20: mol_type = other RNA
gtttttccgtctagccactt

SEQ ID NO: 46400 - RNA, 20 nt, synthetic construct
  source 1..20: mol_type = other RNA
gtttttctaggtagtttctt

SEQ ID NO: 46401 - RNA, 20 nt, synthetic construct
  source 1..20: mol_type = other RNA
gtttttctctccttgcacat

SEQ ID NO: 46402 - RNA, 20 nt, synthetic construct
  source 1..20: mol_type = other RNA
gtttttcttagtctagccaa

SEQ ID NO: 46403 - RNA, 20 nt, synthetic construct
  source 1..20: mol_type = other RNA
gtttttcttgtgggtatttt

SEQ ID NO: 46404 - RNA, 20 nt, synthetic construct
  source 1..20: mol_type = other RNA
gtttttcttttttgagttgg

SEQ ID NO: 46405 - RNA, 20 nt, synthetic construct
  source 1..20: mol_type = other RNA
gtttttgaaaagaacaacat

SEQ ID NO: 46406 - RNA, 20 nt, synthetic construct
  source 1..20: mol_type = other RNA
gtttttgaacaagagcgtcg

SEQ ID NO: 46407 - RNA, 20 nt, synthetic construct
  source 1..20: mol_type = other RNA
gtttttgaattctgcttatt

SEQ ID NO: 46408 - RNA, 20 nt, synthetic construct
  source 1..20: mol_type = other RNA
gtttttgattactgactcaa

SEQ ID NO: 46409 - RNA, 20 nt, synthetic construct
  source 1..20: mol_type = other RNA
gtttttggttcacttgaaac

SEQ ID NO: 46410 - RNA, 20 nt, synthetic construct
  source 1..20: mol_type = other RNA
gtttttgtaaatgaaacact

SEQ ID NO: 46411 - RNA, 20 nt, synthetic construct
  source 1..20: mol_type = other RNA
gttttttcacagaaacagaa

SEQ ID NO: 46412 - RNA, 20 nt, synthetic construct
  source 1..20: mol_type = other RNA
gttttttcattttactgcta

SEQ ID NO: 46413 - RNA, 20 nt, synthetic construct
  source 1..20: mol_type = other RNA
gttttttcccccctggaaca

SEQ ID NO: 46414 - RNA, 20 nt, synthetic construct
  source 1..20: mol_type = other RNA
gttttttcctcccttcagcc

SEQ ID NO: 46415 - RNA, 20 nt, synthetic construct
  source 1..20: mol_type = other RNA
gttttttccttcatttaaca

SEQ ID NO: 46416 - RNA, 20 nt, synthetic construct
  source 1..20: mol_type = other RNA
gttttttccttctttggggg

SEQ ID NO: 46417 - RNA, 20 nt, synthetic construct
  source 1..20: mol_type = other RNA
gttttttcctttgcctttca

SEQ ID NO: 46418 - RNA, 20 nt, synthetic construct
  source 1..20: mol_type = other RNA
gttttttggtagataccaga

SEQ ID NO: 46419 - RNA, 20 nt, synthetic construct
  source 1..20: mol_type = other RNA
gttttttgtccaccagacaa

SEQ ID NO: 46420 - RNA, 20 nt, synthetic construct
  source 1..20: mol_type = other RNA
gttttttgttttggtcaaaa

SEQ ID NO: 46421 - RNA, 20 nt, synthetic construct
  source 1..20: mol_type = other RNA
taaaaaaggaatctgggccg

SEQ ID NO: 46422 - RNA, 20 nt, synthetic construct
  source 1..20: mol_type = other RNA
taaaaaaggaccatctgtta

SEQ ID NO: 46423 - RNA, 20 nt, synthetic construct
  source 1..20: mol_type = other RNA
taaaaaatcaaaagaccaag

SEQ ID NO: 46424 - RNA, 20 nt, synthetic construct
  source 1..20: mol_type = other RNA
taaaaaatgcgcgtccgcga

SEQ ID NO: 46425 - RNA, 20 nt, synthetic construct
  source 1..20: mol_type = other RNA
taaaaacaacactaaccaac

SEQ ID NO: 46426 - RNA, 20 nt, synthetic construct
  source 1..20: mol_type = other RNA
taaaaacatatgcaggacca

SEQ ID NO: 46427 - RNA, 20 nt, synthetic construct
  source 1..20: mol_type = other RNA
taaaaacatccattactcgt

SEQ ID NO: 46428 - RNA, 20 nt, synthetic construct
  source 1..20: mol_type = other RNA
taaaaacattggaggataat

SEQ ID NO: 46429 - RNA, 20 nt, synthetic construct
  source 1..20: mol_type = other RNA
taaaaaccaaacactggaaa

SEQ ID NO: 46430 - RNA, 20 nt, synthetic construct
  source 1..20: mol_type = other RNA
taaaaacctttttgggatct

SEQ ID NO: 46431 - RNA, 20 nt, synthetic construct
  source 1..20: mol_type = other RNA
taaaaacgtgcaaactacca

SEQ ID NO: 46432 - RNA, 20 nt, synthetic construct
  source 1..20: mol_type = other RNA
taaaaactgagaccggatga

SEQ ID NO: 46433 - RNA, 20 nt, synthetic construct
  source 1..20: mol_type = other RNA
taaaaactgtttggctggga

SEQ ID NO: 46434 - RNA, 20 nt, synthetic construct
  source 1..20: mol_type = other RNA
taaaaacttaagtatctcag

SEQ ID NO: 46435 - RNA, 20 nt, synthetic construct
  source 1..20: mol_type = other RNA
taaaaacttaagtatctcgg

SEQ ID NO: 46436 - RNA, 20 nt, synthetic construct
  source 1..20: mol_type = other RNA
taaaaactttttgggccttt

SEQ ID NO: 46437 - RNA, 20 nt, synthetic construct
  source 1..20: mol_type = other RNA
taaaaagaaaaagctcacct

SEQ ID NO: 46438 - RNA, 20 nt, synthetic construct
  source 1..20: mol_type = other RNA
taaaaagaaaaagttgggct

SEQ ID NO: 46439 - RNA, 20 nt, synthetic construct
  source 1..20: mol_type = other RNA
taaaaagaaatctgcatcca

SEQ ID NO: 46440 - RNA, 20 nt, synthetic construct
  source 1..20: mol_type = other RNA
taaaaagacacaaaagagct

SEQ ID NO: 46441 - RNA, 20 nt, synthetic construct
  source 1..20: mol_type = other RNA
taaaaagcactatccacatt

SEQ ID NO: 46442 - RNA, 20 nt, synthetic construct
  source 1..20: mol_type = other RNA
taaaaagcagctacctgttg

SEQ ID NO: 46443 - RNA, 20 nt, synthetic construct
  source 1..20: mol_type = other RNA
taaaaagccatttatcagca

SEQ ID NO: 46444 - RNA, 20 nt, synthetic construct
  source 1..20: mol_type = other RNA
taaaaagcctctctgatgga

SEQ ID NO: 46445 - RNA, 20 nt, synthetic construct
  source 1..20: mol_type = other RNA
taaaaagcctctgtggacca

SEQ ID NO: 46446 - RNA, 20 nt, synthetic construct
  source 1..20: mol_type = other RNA
taaaaagcctgcttcagcct

SEQ ID NO: 46447 - RNA, 20 nt, synthetic construct
  source 1..20: mol_type = other RNA
taaaaagcgttggagacagc

SEQ ID NO: 46448 - RNA, 20 nt, synthetic construct
  source 1..20: mol_type = other RNA
taaaaaggagggaaaatgtt

SEQ ID NO: 46449 - RNA, 20 nt, synthetic construct
  source 1..20: mol_type = other RNA
taaaaagggagtcagtagag

SEQ ID NO: 46450 - RNA, 20 nt, synthetic construct
  source 1..20: mol_type = other RNA
taaaaagtatcgtgagacta

SEQ ID NO: 46451 - RNA, 20 nt, synthetic construct
  source 1..20: mol_type = other RNA
taaaaagtgacttctggatg

SEQ ID NO: 46452 - RNA, 20 nt, synthetic construct
  source 1..20: mol_type = other RNA
taaaaagtgcttctagtaac

SEQ ID NO: 46453 - RNA, 20 nt, synthetic construct
  source 1..20: mol_type = other RNA
taaaaataaagacttcacga

SEQ ID NO: 46454 - RNA, 20 nt, synthetic construct
  source 1..20: mol_type = other RNA
taaaaataacgggccgggcg

SEQ ID NO: 46455 - RNA, 20 nt, synthetic construct
  source 1..20: mol_type = other RNA
taaaaatatagaaggccaga

SEQ ID NO: 46456 - RNA, 20 nt, synthetic construct
  source 1..20: mol_type = other RNA
taaaaatcaacccatgaaaa

SEQ ID NO: 46457 - RNA, 20 nt, synthetic construct
  source 1..20: mol_type = other RNA
taaaaatctctacagggaac

SEQ ID NO: 46458 - RNA, 20 nt, synthetic construct
  source 1..20: mol_type = other RNA
taaaaatgacaccaaaacta

SEQ ID NO: 46459 - RNA, 20 nt, synthetic construct
  source 1..20: mol_type = other RNA
taaaaatggcacatactgca

SEQ ID NO: 46460 - RNA, 20 nt, synthetic construct
  source 1..20: mol_type = other RNA
taaaaatggtcaacatgaaa

SEQ ID NO: 46461 - RNA, 20 nt, synthetic construct
  source 1..20: mol_type = other RNA
taaaaattacaactggtttc

SEQ ID NO: 46462 - RNA, 20 nt, synthetic construct
  source 1..20: mol_type = other RNA
taaaaattccgctctggttt

SEQ ID NO: 46463 - RNA, 20 nt, synthetic construct
  source 1..20: mol_type = other RNA
taaaaattttctcccaaggt

SEQ ID NO: 46464 - RNA, 20 nt, synthetic construct
  source 1..20: mol_type = other RNA
taaaacaaattccctctaca

SEQ ID NO: 46465 - RNA, 20 nt, synthetic construct
  source 1..20: mol_type = other RNA
taaaacacaaggacaggtca

SEQ ID NO: 46466 - RNA, 20 nt, synthetic construct
  source 1..20: mol_type = other RNA
taaaacacatgtcatgggcc

SEQ ID NO: 46467 - RNA, 20 nt, synthetic construct
  source 1..20: mol_type = other RNA
taaaacactggaagtaattg

SEQ ID NO: 46468 - RNA, 20 nt, synthetic construct
  source 1..20: mol_type = other RNA
taaaacactggcaaaaatca

SEQ ID NO: 46469 - RNA, 20 nt, synthetic construct
  source 1..20: mol_type = other RNA
taaaacagacccttatgtcc

SEQ ID NO: 46470 - RNA, 20 nt, synthetic construct
  source 1..20: mol_type = other RNA
taaaacaggaagttgagaaa

SEQ ID NO: 46471 - RNA, 20 nt, synthetic construct
  source 1..20: mol_type = other RNA
taaaacatacatgagaaatg

SEQ ID NO: 46472 - RNA, 20 nt, synthetic construct
  source 1..20: mol_type = other RNA
taaaacatcaaagtcccctg

SEQ ID NO: 46473 - RNA, 20 nt, synthetic construct
  source 1..20: mol_type = other RNA
taaaacatctggaaggaaac

SEQ ID NO: 46474 - RNA, 20 nt, synthetic construct
  source 1..20: mol_type = other RNA
taaaacatggatatttggcc

SEQ ID NO: 46475 - RNA, 20 nt, synthetic construct
  source 1..20: mol_type = other RNA
taaaacatggccagtatctc

SEQ ID NO: 46476 - RNA, 20 nt, synthetic construct
  source 1..20: mol_type = other RNA
taaaacatggtccacagagg

SEQ ID NO: 46477 - RNA, 20 nt, synthetic construct
  source 1..20: mol_type = other RNA
taaaacatgttgtgtagaaa

SEQ ID NO: 46478 - RNA, 20 nt, synthetic construct
  source 1..20: mol_type = other RNA
taaaaccaaatgtggatagt

SEQ ID NO: 46479 - RNA, 20 nt, synthetic construct
  source 1..20: mol_type = other RNA
taaaaccacaaacatgaata

SEQ ID NO: 46480 - RNA, 20 nt, synthetic construct
  source 1..20: mol_type = other RNA
taaaaccagagcggaatttt

SEQ ID NO: 46481 - RNA, 20 nt, synthetic construct
  source 1..20: mol_type = other RNA
taaaacccatgatctttgga

SEQ ID NO: 46482 - RNA, 20 nt, synthetic construct
  source 1..20: mol_type = other RNA
taaaacctggaatgggttgg

SEQ ID NO: 46483 - RNA, 20 nt, synthetic construct
  source 1..20: mol_type = other RNA
taaaacctggtaataatgaa

SEQ ID NO: 46484 - RNA, 20 nt, synthetic construct
  source 1..20: mol_type = other RNA
taaaactcacaaaaagtgtg

SEQ ID NO: 46485 - RNA, 20 nt, synthetic construct
  source 1..20: mol_type = other RNA
taaaactccccatgcaggag

SEQ ID NO: 46486 - RNA, 20 nt, synthetic construct
  source 1..20: mol_type = other RNA
taaaactcttagcttagaag

SEQ ID NO: 46487 - RNA, 20 nt, synthetic construct
  source 1..20: mol_type = other RNA
taaaactgaagtttatcgta

SEQ ID NO: 46488 - RNA, 20 nt, synthetic construct
  source 1..20: mol_type = other RNA
taaaactgctgagtcttcta

SEQ ID NO: 46489 - RNA, 20 nt, synthetic construct
  source 1..20: mol_type = other RNA
taaaacttgtagaggaggag

SEQ ID NO: 46490 - RNA, 20 nt, synthetic construct
  source 1..20: mol_type = other RNA
taaaactttaggtcagaata

SEQ ID NO: 46491 - RNA, 20 nt, synthetic construct
  source 1..20: mol_type = other RNA
taaaagaaaatggccaagag

SEQ ID NO: 46492 - RNA, 20 nt, synthetic construct
  source 1..20: mol_type = other RNA
taaaagaaagctctcaatta

SEQ ID NO: 46493 - RNA, 20 nt, synthetic construct
  source 1..20: mol_type = other RNA
taaaagaacctctggaaagg

SEQ ID NO: 46494 - RNA, 20 nt, synthetic construct
  source 1..20: mol_type = other RNA
taaaagaagatgcagttgct

SEQ ID NO: 46495 - RNA, 20 nt, synthetic construct
  source 1..20: mol_type = other RNA
taaaagacatctttcctgtg

SEQ ID NO: 46496 - RNA, 20 nt, synthetic construct
  source 1..20: mol_type = other RNA
taaaagaccgcaagagttcc

SEQ ID NO: 46497 - RNA, 20 nt, synthetic construct
  source 1..20: mol_type = other RNA
taaaagagcgaagagggaga

SEQ ID NO: 46498 - RNA, 20 nt, synthetic construct
  source 1..20: mol_type = other RNA
taaaagagtgaaatgatttc

SEQ ID NO: 46499 - RNA, 20 nt, synthetic construct
  source 1..20: mol_type = other RNA
taaaagagtgcacattcctt

SEQ ID NO: 46500 - RNA, 20 nt, synthetic construct
  source 1..20: mol_type = other RNA
taaaagatacgaaaatccta

SEQ ID NO: 46501 - RNA, 20 nt, synthetic construct
  source 1..20: mol_type = other RNA
taaaagatatccacagtatg

SEQ ID NO: 46502 - RNA, 20 nt, synthetic construct
  source 1..20: mol_type = other RNA
taaaagatgcattctgtcac

SEQ ID NO: 46503 - RNA, 20 nt, synthetic construct
  source 1..20: mol_type = other RNA
taaaagattaaatacagagc

SEQ ID NO: 46504 - RNA, 20 nt, synthetic construct
  source 1..20: mol_type = other RNA
taaaagcaacctcatttgca

SEQ ID NO: 46505 - RNA, 20 nt, synthetic construct
  source 1..20: mol_type = other RNA
taaaagcacaagcacagagt

SEQ ID NO: 46506 - RNA, 20 nt, synthetic construct
  source 1..20: mol_type = other RNA
taaaagcctcatttgaactt

SEQ ID NO: 46507 - RNA, 20 nt, synthetic construct
  source 1..20: mol_type = other RNA
taaaagcgtactgtgattac

SEQ ID NO: 46508 - RNA, 20 nt, synthetic construct
  source 1..20: mol_type = other RNA
taaaagctaatctactttct

SEQ ID NO: 46509 - RNA, 20 nt, synthetic construct
  source 1..20: mol_type = other RNA
taaaagctctaatagttcac

SEQ ID NO: 46510 - RNA, 20 nt, synthetic construct
  source 1..20: mol_type = other RNA
taaaagctggagttatttgt

SEQ ID NO: 46511 - RNA, 20 nt, synthetic construct
  source 1..20: mol_type = other RNA
taaaagcttatgatcttggg

SEQ ID NO: 46512 - RNA, 20 nt, synthetic construct
  source 1..20: mol_type = other RNA
taaaaggaatataaacgtgt

SEQ ID NO: 46513 - RNA, 20 nt, synthetic construct
  source 1..20: mol_type = other RNA
taaaaggagatatacaggaa

SEQ ID NO: 46514 - RNA, 20 nt, synthetic construct
  source 1..20: mol_type = other RNA
taaaaggatatgggccaaag

SEQ ID NO: 46515 - RNA, 20 nt, synthetic construct
  source 1..20: mol_type = other RNA
taaaaggctaattttttctg

SEQ ID NO: 46516 - RNA, 20 nt, synthetic construct
  source 1..20: mol_type = other RNA
taaaaggtataaaggatgca

SEQ ID NO: 46517 - RNA, 20 nt, synthetic construct
  source 1..20: mol_type = other RNA
taaaaggttgcttaattgag

SEQ ID NO: 46518 - RNA, 20 nt, synthetic construct
  source 1..20: mol_type = other RNA
taaaagtaaatcagactgta

SEQ ID NO: 46519 - RNA, 20 nt, synthetic construct
  source 1..20: mol_type = other RNA
taaaagtaaattcgcataac

SEQ ID NO: 46520 - RNA, 20 nt, synthetic construct
  source 1..20: mol_type = other RNA
taaaagtacagataaccaat

SEQ ID NO: 46521 - RNA, 20 nt, synthetic construct
  source 1..20: mol_type = other RNA
taaaagtcagctaggcgtag

SEQ ID NO: 46522 - RNA, 20 nt, synthetic construct
  source 1..20: mol_type = other RNA
taaaagtcattgaaactcaa

SEQ ID NO: 46523 - RNA, 20 nt, synthetic construct
  source 1..20: mol_type = other RNA
taaaagtgctgcagtatgca

SEQ ID NO: 46524 - RNA, 20 nt, synthetic construct
  source 1..20: mol_type = other RNA
taaaagttacaaggattgaa

SEQ ID NO: 46525 - RNA, 20 nt, synthetic construct
  source 1..20: mol_type = other RNA
taaaagttagctggcaaaat

SEQ ID NO: 46526 - RNA, 20 nt, synthetic construct
  source 1..20: mol_type = other RNA
taaaagttccaagattttcc

SEQ ID NO: 46527 - RNA, 20 nt, synthetic construct
  source 1..20: mol_type = other RNA
taaaagttttccaaccactg

SEQ ID NO: 46528 - RNA, 20 nt, synthetic construct
  source 1..20: mol_type = other RNA
taaaataaacattttccctc

SEQ ID NO: 46529 - RNA, 20 nt, synthetic construct
  source 1..20: mol_type = other RNA
taaaataacacgcagaacca

SEQ ID NO: 46530 - RNA, 20 nt, synthetic construct
  source 1..20: mol_type = other RNA
taaaatacaacagcaccttt

SEQ ID NO: 46531 - RNA, 20 nt, synthetic construct
  source 1..20: mol_type = other RNA
taaaataccagaggttaaag

SEQ ID NO: 46532 - RNA, 20 nt, synthetic construct
  source 1..20: mol_type = other RNA
taaaatagcaggattcttgt

SEQ ID NO: 46533 - RNA, 20 nt, synthetic construct
  source 1..20: mol_type = other RNA
taaaataggaagtccatgaa

SEQ ID NO: 46534 - RNA, 20 nt, synthetic construct
  source 1..20: mol_type = other RNA
taaaataggcctaggtgtga

SEQ ID NO: 46535 - RNA, 20 nt, synthetic construct
  source 1..20: mol_type = other RNA
taaaatagtcaagtaacagt

SEQ ID NO: 46536 - RNA, 20 nt, synthetic construct
  source 1..20: mol_type = other RNA
taaaatatgtccttttgagt

SEQ ID NO: 46537 - RNA, 20 nt, synthetic construct
  source 1..20: mol_type = other RNA
taaaatcactaattcaagtg

SEQ ID NO: 46538 - RNA, 20 nt, synthetic construct
  source 1..20: mol_type = other RNA
taaaatcatcacagtatgca

SEQ ID NO: 46539 - RNA, 20 nt, synthetic construct
  source 1..20: mol_type = other RNA
taaaatcggaacaggctcaa

SEQ ID NO: 46540 - RNA, 20 nt, synthetic construct
  source 1..20: mol_type = other RNA
taaaatctaggttatctgtt

SEQ ID NO: 46541 - RNA, 20 nt, synthetic construct
  source 1..20: mol_type = other RNA
taaaatctgattcagtggtt

SEQ ID NO: 46542 - RNA, 20 nt, synthetic construct
  source 1..20: mol_type = other RNA
taaaatctgtatgagaagac

SEQ ID NO: 46543 - RNA, 20 nt, synthetic construct
  source 1..20: mol_type = other RNA
taaaatcttattccccaggg

SEQ ID NO: 46544 - RNA, 20 nt, synthetic construct
  source 1..20: mol_type = other RNA
taaaatgaaaaattcactcc

SEQ ID NO: 46545 - RNA, 20 nt, synthetic construct
  source 1..20: mol_type = other RNA
taaaatgaaaatgttccctc

SEQ ID NO: 46546 - RNA, 20 nt, synthetic construct
  source 1..20: mol_type = other RNA
taaaatgaacctgctttcta

SEQ ID NO: 46547 - RNA, 20 nt, synthetic construct
  source 1..20: mol_type = other RNA
taaaatgagggtaaaatagt

SEQ ID NO: 46548 - RNA, 20 nt, synthetic construct
  source 1..20: mol_type = other RNA
taaaatgatagcattatccc

SEQ ID NO: 46549 - RNA, 20 nt, synthetic construct
  source 1..20: mol_type = other RNA
taaaatgatggcaacaatca

SEQ ID NO: 46550 - RNA, 20 nt, synthetic construct
  source 1..20: mol_type = other RNA
taaaatgctggaaattttca

SEQ ID NO: 46551 - RNA, 20 nt, synthetic construct
  source 1..20: mol_type = other RNA
taaaatggaagactttatgg

SEQ ID NO: 46552 - RNA, 20 nt, synthetic construct
  source 1..20: mol_type = other RNA
taaaatggaatattgttcag

SEQ ID NO: 46553 - RNA, 20 nt, synthetic construct
  source 1..20: mol_type = other RNA
taaaatgtggcaaatttatg

SEQ ID NO: 46554 - RNA, 20 nt, synthetic construct
  source 1..20: mol_type = other RNA
taaaatgttgccaatatcta

SEQ ID NO: 46555 - RNA, 20 nt, synthetic construct
  source 1..20: mol_type = other RNA
taaaatgtttagcggaatga

SEQ ID NO: 46556 - RNA, 20 nt, synthetic construct
  source 1..20: mol_type = other RNA
taaaattcaccaaacacctt

SEQ ID NO: 46557 - RNA, 20 nt, synthetic construct
  source 1..20: mol_type = other RNA
taaaattcccttcagtgtag

SEQ ID NO: 46558 - RNA, 20 nt, synthetic construct
  source 1..20: mol_type = other RNA
taaaattccttcctttgatg

SEQ ID NO: 46559 - RNA, 20 nt, synthetic construct
  source 1..20: mol_type = other RNA
taaaattctgaccctttatt

SEQ ID NO: 46560 - RNA, 20 nt, synthetic construct
  source 1..20: mol_type = other RNA
taaaattctgatagcttgac

SEQ ID NO: 46561 - RNA, 20 nt, synthetic construct
  source 1..20: mol_type = other RNA
taaaattcttccagcctggt

SEQ ID NO: 46562 - RNA, 20 nt, synthetic construct
  source 1..20: mol_type = other RNA
taaaattgcagagtgttcaa

SEQ ID NO: 46563 - RNA, 20 nt, synthetic construct
  source 1..20: mol_type = other RNA
taaaatttatgtacatgacc

SEQ ID NO: 46564 - RNA, 20 nt, synthetic construct
  source 1..20: mol_type = other RNA
taaacaaacattttttgcag

SEQ ID NO: 46565 - RNA, 20 nt, synthetic construct
  source 1..20: mol_type = other RNA
taaacaaagagaacaatgga

SEQ ID NO: 46566 - RNA, 20 nt, synthetic construct
  source 1..20: mol_type = other RNA
taaacaaatcagatttcagg

SEQ ID NO: 46567 - RNA, 20 nt, synthetic construct
  source 1..20: mol_type = other RNA
taaacaactgactctaaagt

SEQ ID NO: 46568 - RNA, 20 nt, synthetic construct
  source 1..20: mol_type = other RNA
taaacaagactcaacatgtg

SEQ ID NO: 46569 - RNA, 20 nt, synthetic construct
  source 1..20: mol_type = other RNA
taaacaagtcacaaaaagac

SEQ ID NO: 46570 - RNA, 20 nt, synthetic construct
  source 1..20: mol_type = other RNA
taaacaatcttgaaaggggc

SEQ ID NO: 46571 - RNA, 20 nt, synthetic construct
  source 1..20: mol_type = other RNA
taaacaatgctgctatgaaa

SEQ ID NO: 46572 - RNA, 20 nt, synthetic construct
  source 1..20: mol_type = other RNA
taaacacacccttggtaaac

SEQ ID NO: 46573 - RNA, 20 nt, synthetic construct
  source 1..20: mol_type = other RNA
taaacacacgggctgggcgc

SEQ ID NO: 46574 - RNA, 20 nt, synthetic construct
  source 1..20: mol_type = other RNA
taaacacagaacactaaagg

SEQ ID NO: 46575 - RNA, 20 nt, synthetic construct
  source 1..20: mol_type = other RNA
taaacactgtagttcagttt

SEQ ID NO: 46576 - RNA, 20 nt, synthetic construct
  source 1..20: mol_type = other RNA
taaacactgttctgcgtggt

SEQ ID NO: 46577 - RNA, 20 nt, synthetic construct
  source 1..20: mol_type = other RNA
taaacacttagcatgttgct

SEQ ID NO: 46578 - RNA, 20 nt, synthetic construct
  source 1..20: mol_type = other RNA
taaacacttgaattagtgat

SEQ ID NO: 46579 - RNA, 20 nt, synthetic construct
  source 1..20: mol_type = other RNA
taaacagcagtcttaaccat

SEQ ID NO: 46580 - RNA, 20 nt, synthetic construct
  source 1..20: mol_type = other RNA
taaacagcatactgtggata

SEQ ID NO: 46581 - RNA, 20 nt, synthetic construct
  source 1..20: mol_type = other RNA
taaacaggtgtaagagatta

SEQ ID NO: 46582 - RNA, 20 nt, synthetic construct
  source 1..20: mol_type = other RNA
taaacagtacagtagtaaaa

SEQ ID NO: 46583 - RNA, 20 nt, synthetic construct
  source 1..20: mol_type = other RNA
taaacatgaacaagttacaa

SEQ ID NO: 46584 - RNA, 20 nt, synthetic construct
  source 1..20: mol_type = other RNA
taaacatgtaaaacagaccc

SEQ ID NO: 46585 - RNA, 20 nt, synthetic construct
  source 1..20: mol_type = other RNA
taaacatttctgaaaaatgg

SEQ ID NO: 46586 - RNA, 20 nt, synthetic construct
  source 1..20: mol_type = other RNA
taaacattttattaggtgca

SEQ ID NO: 46587 - RNA, 20 nt, synthetic construct
  source 1..20: mol_type = other RNA
taaacattttccctcctttt

SEQ ID NO: 46588 - RNA, 20 nt, synthetic construct
  source 1..20: mol_type = other RNA
taaaccaagtttggttcatt

SEQ ID NO: 46589 - RNA, 20 nt, synthetic construct
  source 1..20: mol_type = other RNA
taaaccacgcagtttgttct

SEQ ID NO: 46590 - RNA, 20 nt, synthetic construct
  source 1..20: mol_type = other RNA
taaaccatatacaaaactga

SEQ ID NO: 46591 - RNA, 20 nt, synthetic construct
  source 1..20: mol_type = other RNA
taaaccatatggttaatagt

SEQ ID NO: 46592 - RNA, 20 nt, synthetic construct
  source 1..20: mol_type = other RNA
taaaccattttcaatcttgg

SEQ ID NO: 46593 - RNA, 20 nt, synthetic construct
  source 1..20: mol_type = other RNA
taaacccaacaaacaattag

SEQ ID NO: 46594 - RNA, 20 nt, synthetic construct
  source 1..20: mol_type = other RNA
taaacccatttcatgccatc

SEQ ID NO: 46595 - RNA, 20 nt, synthetic construct
  source 1..20: mol_type = other RNA
taaacctcaagtcttttcct

SEQ ID NO: 46596 - RNA, 20 nt, synthetic construct
  source 1..20: mol_type = other RNA
taaacctgaggtctttaaaa

SEQ ID NO: 46597 - RNA, 20 nt, synthetic construct
  source 1..20: mol_type = other RNA
taaacctgctacgaatgaac

SEQ ID NO: 46598 - RNA, 20 nt, synthetic construct
  source 1..20: mol_type = other RNA
taaacctggaatcctctacc

SEQ ID NO: 46599 - RNA, 20 nt, synthetic construct
  source 1..20: mol_type = other RNA
taaacctgtgatttccagtg

SEQ ID NO: 46600 - RNA, 20 nt, synthetic construct
  source 1..20: mol_type = other RNA
taaacctgttacatggttct

SEQ ID NO: 46601 - RNA, 20 nt, synthetic construct
  source 1..20: mol_type = other RNA
taaaccttaaaagagtgaaa

SEQ ID NO: 46602 - RNA, 20 nt, synthetic construct
  source 1..20: mol_type = other RNA
taaacgacaccagaactaca

SEQ ID NO: 46603 - RNA, 20 nt, synthetic construct
  source 1..20: mol_type = other RNA
taaacgacagcaggaaaagc

SEQ ID NO: 46604 - RNA, 20 nt, synthetic construct
  source 1..20: mol_type = other RNA
taaacgcggaatgaagcagg

SEQ ID NO: 46605 - RNA, 20 nt, synthetic construct
  source 1..20: mol_type = other RNA
taaacgtcagagcagcactg

SEQ ID NO: 46606 - RNA, 20 nt, synthetic construct
  source 1..20: mol_type = other RNA
taaacgtgtgtgtaagcaca

SEQ ID NO: 46607 - RNA, 20 nt, synthetic construct
  source 1..20: mol_type = other RNA
taaacgttaactatttctct

SEQ ID NO: 46608 - RNA, 20 nt, synthetic construct
  source 1..20: mol_type = other RNA
taaacgtttggtgactgaat

SEQ ID NO: 46609 - RNA, 20 nt, synthetic construct
  source 1..20: mol_type = other RNA
taaactaacaaagaacagga

SEQ ID NO: 46610 - RNA, 20 nt, synthetic construct
  source 1..20: mol_type = other RNA
taaactagattaccttgaag

SEQ ID NO: 46611 - RNA, 20 nt, synthetic construct
  source 1..20: mol_type = other RNA
taaactagtatcaacctgca

SEQ ID NO: 46612 - RNA, 20 nt, synthetic construct
  source 1..20: mol_type = other RNA
taaactatagacccaaagca

SEQ ID NO: 46613 - RNA, 20 nt, synthetic construct
  source 1..20: mol_type = other RNA
taaactcattatcccagaca

SEQ ID NO: 46614 - RNA, 20 nt, synthetic construct
  source 1..20: mol_type = other RNA
taaactcttccttatccgat

SEQ ID NO: 46615 - RNA, 20 nt, synthetic construct
  source 1..20: mol_type = other RNA
taaactgaacatttatacag

SEQ ID NO: 46616 - RNA, 20 nt, synthetic construct
  source 1..20: mol_type = other RNA
taaactgaacgaagtgaaaa

SEQ ID NO: 46617 - RNA, 20 nt, synthetic construct
  source 1..20: mol_type = other RNA
taaactgccaaaccctacac

SEQ ID NO: 46618 - RNA, 20 nt, synthetic construct
  source 1..20: mol_type = other RNA
taaactggaaggaaataaga

SEQ ID NO: 46619 - RNA, 20 nt, synthetic construct
  source 1..20: mol_type = other RNA
taaactggaattcatcaaag

SEQ ID NO: 46620 - RNA, 20 nt, synthetic construct
  source 1..20: mol_type = other RNA
taaactggatgaatacaaag

SEQ ID NO: 46621 - RNA, 20 nt, synthetic construct
  source 1..20: mol_type = other RNA
taaactggttttcctgatgg

SEQ ID NO: 46622 - RNA, 20 nt, synthetic construct
  source 1..20: mol_type = other RNA
taaactgttccccaagccaa

SEQ ID NO: 46623 - RNA, 20 nt, synthetic construct
  source 1..20: mol_type = other RNA
taaactgttggaaaaatcgt

SEQ ID NO: 46624 - RNA, 20 nt, synthetic construct
  source 1..20: mol_type = other RNA
taaacttcaaggtaatctag

SEQ ID NO: 46625 - RNA, 20 nt, synthetic construct
  source 1..20: mol_type = other RNA
taaacttcagttttgagtgg

SEQ ID NO: 46626 - RNA, 20 nt, synthetic construct
  source 1..20: mol_type = other RNA
taaacttccctctcagtggt

SEQ ID NO: 46627 - RNA, 20 nt, synthetic construct
  source 1..20: mol_type = other RNA
taaacttggtctgggtgata

SEQ ID NO: 46628 - RNA, 20 nt, synthetic construct
  source 1..20: mol_type = other RNA
taaactttgagtagcaccct

SEQ ID NO: 46629 - RNA, 20 nt, synthetic construct
  source 1..20: mol_type = other RNA
taaagaaaggtctctctctg

SEQ ID NO: 46630 - RNA, 20 nt, synthetic construct
  source 1..20: mol_type = other RNA
taaagaaattagaacatctg

SEQ ID NO: 46631 - RNA, 20 nt, synthetic construct
  source 1..20: mol_type = other RNA
taaagaacatgattgggtca

SEQ ID NO: 46632 - RNA, 20 nt, synthetic construct
  source 1..20: mol_type = other RNA
taaagaactccaacaattca

SEQ ID NO: 46633 - RNA, 20 nt, synthetic construct
  source 1..20: mol_type = other RNA
taaagacagacatttggaat

SEQ ID NO: 46634 - RNA, 20 nt, synthetic construct
  source 1..20: mol_type = other RNA
taaagacagctactaaacaa

SEQ ID NO: 46635 - RNA, 20 nt, synthetic construct
  source 1..20: mol_type = other RNA
taaagacctcaggtttagaa

SEQ ID NO: 46636 - RNA, 20 nt, synthetic construct
  source 1..20: mol_type = other RNA
taaagacgttcagataacaa

SEQ ID NO: 46637 - RNA, 20 nt, synthetic construct
  source 1..20: mol_type = other RNA
taaagacttcacgatgctta

SEQ ID NO: 46638 - RNA, 20 nt, synthetic construct
  source 1..20: mol_type = other RNA
taaagagaaatagttaacgt

SEQ ID NO: 46639 - RNA, 20 nt, synthetic construct
  source 1..20: mol_type = other RNA
taaagagagtgacagctgag

SEQ ID NO: 46640 - RNA, 20 nt, synthetic construct
  source 1..20: mol_type = other RNA
taaagagcaggtggaaggcc

SEQ ID NO: 46641 - RNA, 20 nt, synthetic construct
  source 1..20: mol_type = other RNA
taaagatagccccttatcag

SEQ ID NO: 46642 - RNA, 20 nt, synthetic construct
  source 1..20: mol_type = other RNA
taaagatatgtgtaggaagg

SEQ ID NO: 46643 - RNA, 20 nt, synthetic construct
  source 1..20: mol_type = other RNA
taaagatcaagctcgccgtc

SEQ ID NO: 46644 - RNA, 20 nt, synthetic construct
  source 1..20: mol_type = other RNA
taaagatttgccaatcaata

SEQ ID NO: 46645 - RNA, 20 nt, synthetic construct
  source 1..20: mol_type = other RNA
taaagcaaatgtgactagaa

SEQ ID NO: 46646 - RNA, 20 nt, synthetic construct
  source 1..20: mol_type = other RNA
taaagcaacaggaagaggca

SEQ ID NO: 46647 - RNA, 20 nt, synthetic construct
  source 1..20: mol_type = other RNA
taaagcaagtatgagccact

SEQ ID NO: 46648 - RNA, 20 nt, synthetic construct
  source 1..20: mol_type = other RNA
taaagcagggaggggtcccc

SEQ ID NO: 46649 - RNA, 20 nt, synthetic construct
  source 1..20: mol_type = other RNA
taaagccaatcttcccaatc

SEQ ID NO: 46650 - RNA, 20 nt, synthetic construct
  source 1..20: mol_type = other RNA
taaagccacactcttggtct

SEQ ID NO: 46651 - RNA, 20 nt, synthetic construct
  source 1..20: mol_type = other RNA
taaagccaggctttcccagg

SEQ ID NO: 46652 - RNA, 20 nt, synthetic construct
  source 1..20: mol_type = other RNA
taaagccccattgtacacat

SEQ ID NO: 46653 - RNA, 20 nt, synthetic construct
  source 1..20: mol_type = other RNA
taaagccggattcctttcaa

SEQ ID NO: 46654 - RNA, 20 nt, synthetic construct
  source 1..20: mol_type = other RNA
taaagcctctcaacacttca

SEQ ID NO: 46655 - RNA, 20 nt, synthetic construct
  source 1..20: mol_type = other RNA
taaagcgctactcagctgtc

SEQ ID NO: 46656 - RNA, 20 nt, synthetic construct
  source 1..20: mol_type = other RNA
taaagctctaataaaagctg

SEQ ID NO: 46657 - RNA, 20 nt, synthetic construct
  source 1..20: mol_type = other RNA
taaagctctatggcatttga

SEQ ID NO: 46658 - RNA, 20 nt, synthetic construct
  source 1..20: mol_type = other RNA
taaagctgaactcctttctt

SEQ ID NO: 46659 - RNA, 20 nt, synthetic construct
  source 1..20: mol_type = other RNA
taaagctttgtgactgtgag

SEQ ID NO: 46660 - RNA, 20 nt, synthetic construct
  source 1..20: mol_type = other RNA
taaaggaaaagagatctagt

SEQ ID NO: 46661 - RNA, 20 nt, synthetic construct
  source 1..20: mol_type = other RNA
taaaggatgcacaagacaga

SEQ ID NO: 46662 - RNA, 20 nt, synthetic construct
  source 1..20: mol_type = other RNA
taaaggatgtcaactgaggc

SEQ ID NO: 46663 - RNA, 20 nt, synthetic construct
  source 1..20: mol_type = other RNA
taaaggcaatgctctcttcc

SEQ ID NO: 46664 - RNA, 20 nt, synthetic construct
  source 1..20: mol_type = other RNA
taaaggccctgatttaaagt

SEQ ID NO: 46665 - RNA, 20 nt, synthetic construct
  source 1..20: mol_type = other RNA
taaaggctggaaataatttc

SEQ ID NO: 46666 - RNA, 20 nt, synthetic construct
  source 1..20: mol_type = other RNA
taaaggctttcgtatggaag

SEQ ID NO: 46667 - RNA, 20 nt, synthetic construct
  source 1..20: mol_type = other RNA
taaagggataatgctatcca

SEQ ID NO: 46668 - RNA, 20 nt, synthetic construct
  source 1..20: mol_type = other RNA
taaaggggatgggggacgac

SEQ ID NO: 46669 - RNA, 20 nt, synthetic construct
  source 1..20: mol_type = other RNA
taaaggggatttcatgaaca

SEQ ID NO: 46670 - RNA, 20 nt, synthetic construct
  source 1..20: mol_type = other RNA
taaagggtaagaaaattgta

SEQ ID NO: 46671 - RNA, 20 nt, synthetic construct
  source 1..20: mol_type = other RNA
taaagggtcagaattttatt

SEQ ID NO: 46672 - RNA, 20 nt, synthetic construct
  source 1..20: mol_type = other RNA
taaagggtctggtatctacc

SEQ ID NO: 46673 - RNA, 20 nt, synthetic construct
  source 1..20: mol_type = other RNA
taaaggtaaggaaaccccag

SEQ ID NO: 46674 - RNA, 20 nt, synthetic construct
  source 1..20: mol_type = other RNA
taaaggtgctaattgtttgt

SEQ ID NO: 46675 - RNA, 20 nt, synthetic construct
  source 1..20: mol_type = other RNA
taaaggtttggagtttgtag

SEQ ID NO: 46676 - RNA, 20 nt, synthetic construct
  source 1..20: mol_type = other RNA
taaagtaatcaagtgaaatg

SEQ ID NO: 46677 - RNA, 20 nt, synthetic construct
  source 1..20: mol_type = other RNA
taaagtagaaggccctatgc

SEQ ID NO: 46678 - RNA, 20 nt, synthetic construct
  source 1..20: mol_type = other RNA
taaagtaggttgagacttag

SEQ ID NO: 46679 - RNA, 20 nt, synthetic construct
  source 1..20: mol_type = other RNA
taaagtataaatgaggtatc

SEQ ID NO: 46680 - RNA, 20 nt, synthetic construct
  source 1..20: mol_type = other RNA
taaagtcactgtggaaaaca

SEQ ID NO: 46681 - RNA, 20 nt, synthetic construct
  source 1..20: mol_type = other RNA
taaagtcagaggagcagtta

SEQ ID NO: 46682 - RNA, 20 nt, synthetic construct
  source 1..20: mol_type = other RNA
taaagtccacagatcttttt

SEQ ID NO: 46683 - RNA, 20 nt, synthetic construct
  source 1..20: mol_type = other RNA
taaagtctatgctcttggtt

SEQ ID NO: 46684 - RNA, 20 nt, synthetic construct
  source 1..20: mol_type = other RNA
taaagtcttccattttagat

SEQ ID NO: 46685 - RNA, 20 nt, synthetic construct
  source 1..20: mol_type = other RNA
taaagtcttgctggaagttg

SEQ ID NO: 46686 - RNA, 20 nt, synthetic construct
  source 1..20: mol_type = other RNA
taaagtgtaaagtttctctc

SEQ ID NO: 46687 - RNA, 20 nt, synthetic construct
  source 1..20: mol_type = other RNA
taaagttagaagtatcccag

SEQ ID NO: 46688 - RNA, 20 nt, synthetic construct
  source 1..20: mol_type = other RNA
taaagttagtgaagcagaga

SEQ ID NO: 46689 - RNA, 20 nt, synthetic construct
  source 1..20: mol_type = other RNA
taaagttccccattgacaat

SEQ ID NO: 46690 - RNA, 20 nt, synthetic construct
  source 1..20: mol_type = other RNA
taaagttgaggttgaagacc

SEQ ID NO: 46691 - RNA, 20 nt, synthetic construct
  source 1..20: mol_type = other RNA
taaagttggtcctgcatatg

SEQ ID NO: 46692 - RNA, 20 nt, synthetic construct
  source 1..20: mol_type = other RNA
taaagtttcaaactgtggtc

SEQ ID NO: 46693 - RNA, 20 nt, synthetic construct
  source 1..20: mol_type = other RNA
taaagtttccgttttgcaag

SEQ ID NO: 46694 - RNA, 20 nt, synthetic construct
  source 1..20: mol_type = other RNA
taaagtttcctagaaaatca

SEQ ID NO: 46695 - RNA, 20 nt, synthetic construct
  source 1..20: mol_type = other RNA
taaagtttctctctccctgc

SEQ ID NO: 46696 - RNA, 20 nt, synthetic construct
  source 1..20: mol_type = other RNA
taaataaaacacatgtcatg

SEQ ID NO: 46697 - RNA, 20 nt, synthetic construct
  source 1..20: mol_type = other RNA
taaataaaatgtctggccgg

SEQ ID NO: 46698 - RNA, 20 nt, synthetic construct
  source 1..20: mol_type = other RNA
taaataacttccatgagatt

SEQ ID NO: 46699 - RNA, 20 nt, synthetic construct
  source 1..20: mol_type = other RNA
taaataagggcattttcaag

SEQ ID NO: 46700 - RNA, 20 nt, synthetic construct
  source 1..20: mol_type = other RNA
taaatacacatgttgagtct

SEQ ID NO: 46701 - RNA, 20 nt, synthetic construct
  source 1..20: mol_type = other RNA
taaatacaccaaactcaaaa

SEQ ID NO: 46702 - RNA, 20 nt, synthetic construct
  source 1..20: mol_type = other RNA
taaatacagagcacagactc

SEQ ID NO: 46703 - RNA, 20 nt, synthetic construct
  source 1..20: mol_type = other RNA
taaataccacctgaaatctg

SEQ ID NO: 46704 - RNA, 20 nt, synthetic construct
  source 1..20: mol_type = other RNA
taaatacgataaacttcagt

SEQ ID NO: 46705 - RNA, 20 nt, synthetic construct
  source 1..20: mol_type = other RNA
taaatacgtatatgaaaagc

SEQ ID NO: 46706 - RNA, 20 nt, synthetic construct
  source 1..20: mol_type = other RNA
taaatacgtgtatactgggt

SEQ ID NO: 46707 - RNA, 20 nt, synthetic construct
  source 1..20: mol_type = other RNA
taaatactagtaggatgaat

SEQ ID NO: 46708 - RNA, 20 nt, synthetic construct
  source 1..20: mol_type = other RNA
taaatagataaggttgttct

SEQ ID NO: 46709 - RNA, 20 nt, synthetic construct
  source 1..20: mol_type = other RNA
taaatagggtgctactcaaa

SEQ ID NO: 46710 - RNA, 20 nt, synthetic construct
  source 1..20: mol_type = other RNA
taaataggtattcatgctgt

SEQ ID NO: 46711 - RNA, 20 nt, synthetic construct
  source 1..20: mol_type = other RNA
taaatatactgactagtggc

SEQ ID NO: 46712 - RNA, 20 nt, synthetic construct
  source 1..20: mol_type = other RNA
taaatatccgaaagaactga

SEQ ID NO: 46713 - RNA, 20 nt, synthetic construct
  source 1..20: mol_type = other RNA
taaatatgtgttacaactct

SEQ ID NO: 46714 - RNA, 20 nt, synthetic construct
  source 1..20: mol_type = other RNA
taaatatttaacaccatggc

SEQ ID NO: 46715 - RNA, 20 nt, synthetic construct
  source 1..20: mol_type = other RNA
taaatcaacagtgtactagt

SEQ ID NO: 46716 - RNA, 20 nt, synthetic construct
  source 1..20: mol_type = other RNA
taaatcaaggtacaatacac

SEQ ID NO: 46717 - RNA, 20 nt, synthetic construct
  source 1..20: mol_type = other RNA
taaatcaatctgtttcctaa

SEQ ID NO: 46718 - RNA, 20 nt, synthetic construct
  source 1..20: mol_type = other RNA
taaatcacaggaaagatgtc

SEQ ID NO: 46719 - RNA, 20 nt, synthetic construct
  source 1..20: mol_type = other RNA
taaatcagaaactgacagga

SEQ ID NO: 46720 - RNA, 20 nt, synthetic construct
  source 1..20: mol_type = other RNA
taaatcagactgtattacca

SEQ ID NO: 46721 - RNA, 20 nt, synthetic construct
  source 1..20: mol_type = other RNA
taaatcagcaccatctaaca

SEQ ID NO: 46722 - RNA, 20 nt, synthetic construct
  source 1..20: mol_type = other RNA
taaatcaggatgtctttggg

SEQ ID NO: 46723 - RNA, 20 nt, synthetic construct
  source 1..20: mol_type = other RNA
taaatcagggcctttaatca

SEQ ID NO: 46724 - RNA, 20 nt, synthetic construct
  source 1..20: mol_type = other RNA
taaatcagtaagaaaacaga

SEQ ID NO: 46725 - RNA, 20 nt, synthetic construct
  source 1..20: mol_type = other RNA
taaatcatgatgtttggctc

SEQ ID NO: 46726 - RNA, 20 nt, synthetic construct
  source 1..20: mol_type = other RNA
taaatcattcatctaaacgt

SEQ ID NO: 46727 - RNA, 20 nt, synthetic construct
  source 1..20: mol_type = other RNA
taaatccaacgaccggacgt

SEQ ID NO: 46728 - RNA, 20 nt, synthetic construct
  source 1..20: mol_type = other RNA
taaatcccacttgatccagg

SEQ ID NO: 46729 - RNA, 20 nt, synthetic construct
  source 1..20: mol_type = other RNA
taaatcccggccaggtgcgg

SEQ ID NO: 46730 - RNA, 20 nt, synthetic construct
  source 1..20: mol_type = other RNA
taaatccgagacaagttctc

SEQ ID NO: 46731 - RNA, 20 nt, synthetic construct
  source 1..20: mol_type = other RNA
taaatcctcacatgtttggt

SEQ ID NO: 46732 - RNA, 20 nt, synthetic construct
  source 1..20: mol_type = other RNA
taaatctaaagccaatcttc

SEQ ID NO: 46733 - RNA, 20 nt, synthetic construct
  source 1..20: mol_type = other RNA
taaatctaagtctcaaccta

SEQ ID NO: 46734 - RNA, 20 nt, synthetic construct
  source 1..20: mol_type = other RNA
taaatctaataaaaagcctc

SEQ ID NO: 46735 - RNA, 20 nt, synthetic construct
  source 1..20: mol_type = other RNA
taaatcttcaaaatctgatg

SEQ ID NO: 46736 - RNA, 20 nt, synthetic construct
  source 1..20: mol_type = other RNA
taaatctttggtgaaggttc

SEQ ID NO: 46737 - RNA, 20 nt, synthetic construct
  source 1..20: mol_type = other RNA
taaatgaaacacttgtgtaa

SEQ ID NO: 46738 - RNA, 20 nt, synthetic construct
  source 1..20: mol_type = other RNA
taaatgaaatttgaggccct

SEQ ID NO: 46739 - RNA, 20 nt, synthetic construct
  source 1..20: mol_type = other RNA
taaatgaagaaaatccaaga

SEQ ID NO: 46740 - RNA, 20 nt, synthetic construct
  source 1..20: mol_type = other RNA
taaatgaaggaaaaaacggg

SEQ ID NO: 46741 - RNA, 20 nt, synthetic construct
  source 1..20: mol_type = other RNA
taaatgaatattcgttccag

SEQ ID NO: 46742 - RNA, 20 nt, synthetic construct
  source 1..20: mol_type = other RNA
taaatgagacacctacaata

SEQ ID NO: 46743 - RNA, 20 nt, synthetic construct
  source 1..20: mol_type = other RNA
taaatgaggtatcatttcca

SEQ ID NO: 46744 - RNA, 20 nt, synthetic construct
  source 1..20: mol_type = other RNA
taaatgatctttcaaggggc

SEQ ID NO: 46745 - RNA, 20 nt, synthetic construct
  source 1..20: mol_type = other RNA
taaatgatgagctactgcat

SEQ ID NO: 46746 - RNA, 20 nt, synthetic construct
  source 1..20: mol_type = other RNA
taaatgcaatgcaggcgcct

SEQ ID NO: 46747 - RNA, 20 nt, synthetic construct
  source 1..20: mol_type = other RNA
taaatgcataaacgacagca

SEQ ID NO: 46748 - RNA, 20 nt, synthetic construct
  source 1..20: mol_type = other RNA
taaatgccaatttgggatat

SEQ ID NO: 46749 - RNA, 20 nt, synthetic construct
  source 1..20: mol_type = other RNA
taaatgccacataaatcaca

SEQ ID NO: 46750 - RNA, 20 nt, synthetic construct
  source 1..20: mol_type = other RNA
taaatgctcacatttagttt

SEQ ID NO: 46751 - RNA, 20 nt, synthetic construct
  source 1..20: mol_type = other RNA
taaatgctcagtgggttcaa

SEQ ID NO: 46752 - RNA, 20 nt, synthetic construct
  source 1..20: mol_type = other RNA
taaatggcatctttaagatt

SEQ ID NO: 46753 - RNA, 20 nt, synthetic construct
  source 1..20: mol_type = other RNA
taaatggctttttacgatga

SEQ ID NO: 46754 - RNA, 20 nt, synthetic construct
  source 1..20: mol_type = other RNA
taaatggtagcttgggctaa

SEQ ID NO: 46755 - RNA, 20 nt, synthetic construct
  source 1..20: mol_type = other RNA
taaatggtgcaggccagata

SEQ ID NO: 46756 - RNA, 20 nt, synthetic construct
  source 1..20: mol_type = other RNA
taaatggtgtgaagttgggc

SEQ ID NO: 46757 - RNA, 20 nt, synthetic construct
  source 1..20: mol_type = other RNA
taaatggtttctccttctgc

SEQ ID NO: 46758 - RNA, 20 nt, synthetic construct
  source 1..20: mol_type = other RNA
taaatgtacaacattcatcc

SEQ ID NO: 46759 - RNA, 20 nt, synthetic construct
  source 1..20: mol_type = other RNA
taaatgtccatcgagagatg

SEQ ID NO: 46760 - RNA, 20 nt, synthetic construct
  source 1..20: mol_type = other RNA
taaatgtgaattagatggct

SEQ ID NO: 46761 - RNA, 20 nt, synthetic construct
  source 1..20: mol_type = other RNA
taaatgtgagcatttagccc

SEQ ID NO: 46762 - RNA, 20 nt, synthetic construct
  source 1..20: mol_type = other RNA
taaatgttcagtttatgggt

SEQ ID NO: 46763 - RNA, 20 nt, synthetic construct
  source 1..20: mol_type = other RNA
taaatgttttgcagagatga

SEQ ID NO: 46764 - RNA, 20 nt, synthetic construct
  source 1..20: mol_type = other RNA
taaattaaaaactgagaccg

SEQ ID NO: 46765 - RNA, 20 nt, synthetic construct
  source 1..20: mol_type = other RNA
taaattaaaggctggaaata

SEQ ID NO: 46766 - RNA, 20 nt, synthetic construct
  source 1..20: mol_type = other RNA
taaattaagcttcgacagtc

SEQ ID NO: 46767 - RNA, 20 nt, synthetic construct
  source 1..20: mol_type = other RNA
taaattacaaaataggcagt

SEQ ID NO: 46768 - RNA, 20 nt, synthetic construct
  source 1..20: mol_type = other RNA
taaattacccaaagactttg

SEQ ID NO: 46769 - RNA, 20 nt, synthetic construct
  source 1..20: mol_type = other RNA
taaattactgtctgtgaaaa

SEQ ID NO: 46770 - RNA, 20 nt, synthetic construct
  source 1..20: mol_type = other RNA
taaattatagctccaaaagc

SEQ ID NO: 46771 - RNA, 20 nt, synthetic construct
  source 1..20: mol_type = other RNA
taaattattagcttgctagt

SEQ ID NO: 46772 - RNA, 20 nt, synthetic construct
  source 1..20: mol_type = other RNA
taaattcctaactcaagagt

SEQ ID NO: 46773 - RNA, 20 nt, synthetic construct
  source 1..20: mol_type = other RNA
taaattcgcataaccaaatt

SEQ ID NO: 46774 - RNA, 20 nt, synthetic construct
  source 1..20: mol_type = other RNA
taaattctgccacattcaac

SEQ ID NO: 46775 - RNA, 20 nt, synthetic construct
  source 1..20: mol_type = other RNA
taaattgaacagcctaaagt

SEQ ID NO: 46776 - RNA, 20 nt, synthetic construct
  source 1..20: mol_type = other RNA
taaattgcaaaaacagtttc

SEQ ID NO: 46777 - RNA, 20 nt, synthetic construct
  source 1..20: mol_type = other RNA
taaattggtcctggaaaaag

SEQ ID NO: 46778 - RNA, 20 nt, synthetic construct
  source 1..20: mol_type = other RNA
taaatttagtgtattgtacc

SEQ ID NO: 46779 - RNA, 20 nt, synthetic construct
  source 1..20: mol_type = other RNA
taaatttcattaggttgatg

SEQ ID NO: 46780 - RNA, 20 nt, synthetic construct
  source 1..20: mol_type = other RNA
taaatttctaaaaacgtgca

SEQ ID NO: 46781 - RNA, 20 nt, synthetic construct
  source 1..20: mol_type = other RNA
taaatttctaaggttctgct

SEQ ID NO: 46782 - RNA, 20 nt, synthetic construct
  source 1..20: mol_type = other RNA
taaatttctgttgcttaagt

SEQ ID NO: 46783 - RNA, 20 nt, synthetic construct
  source 1..20: mol_type = other RNA
taaatttgattgttagccac

SEQ ID NO: 46784 - RNA, 20 nt, synthetic construct
  source 1..20: mol_type = other RNA
taaatttgccacattttacc

SEQ ID NO: 46785 - RNA, 20 nt, synthetic construct
  source 1..20: mol_type = other RNA
taaattttaagtgcacaatg

SEQ ID NO: 46786 - RNA, 20 nt, synthetic construct
  source 1..20: mol_type = other RNA
taaattttctaggaaccata

SEQ ID NO: 46787 - RNA, 20 nt, synthetic construct
  source 1..20: mol_type = other RNA
taaattttgagacctcaggc

SEQ ID NO: 46788 - RNA, 20 nt, synthetic construct
  source 1..20: mol_type = other RNA
taaattttgaggcttttgga

SEQ ID NO: 46789 - RNA, 20 nt, synthetic construct
  source 1..20: mol_type = other RNA
taaatttttgagaaattgcc

SEQ ID NO: 46790 - RNA, 20 nt, synthetic construct
  source 1..20: mol_type = other RNA
taacaaaaatacgaaagtgc

SEQ ID NO: 46791 - RNA, 20 nt, synthetic construct
  source 1..20: mol_type = other RNA
taacaaaaatacttaagagc

SEQ ID NO: 46792 - RNA, 20 nt, synthetic construct
  source 1..20: mol_type = other RNA
taacaaaactaggctgtccc

SEQ ID NO: 46793 - RNA, 20 nt, synthetic construct
  source 1..20: mol_type = other RNA
taacaaaagatacacaagat

SEQ ID NO: 46794 - RNA, 20 nt, synthetic construct
  source 1..20: mol_type = other RNA
taacaaaaggtagaagataa

SEQ ID NO: 46795 - RNA, 20 nt, synthetic construct
  source 1..20: mol_type = other RNA
taacaaaataggattaagac

SEQ ID NO: 46796 - RNA, 20 nt, synthetic construct
  source 1..20: mol_type = other RNA
taacaaacgcattgtgatgt

SEQ ID NO: 46797 - RNA, 20 nt, synthetic construct
  source 1..20: mol_type = other RNA
taacaaagaacaggaaggga

SEQ ID NO: 46798 - RNA, 20 nt, synthetic construct
  source 1..20: mol_type = other RNA
taacaaagatgccacaaatg

SEQ ID NO: 46799 - RNA, 20 nt, synthetic construct
  source 1..20: mol_type = other RNA
taacaaagctctgatgcttt

SEQ ID NO: 46800 - RNA, 20 nt, synthetic construct
  source 1..20: mol_type = other RNA
taacaaagggcctgttccag

SEQ ID NO: 46801 - RNA, 20 nt, synthetic construct
  source 1..20: mol_type = other RNA
taacaaagggttcttggaaa

SEQ ID NO: 46802 - RNA, 20 nt, synthetic construct
  source 1..20: mol_type = other RNA
taacaaataagaagattgag

SEQ ID NO: 46803 - RNA, 20 nt, synthetic construct
  source 1..20: mol_type = other RNA
taacaagaaaatctgacaat

SEQ ID NO: 46804 - RNA, 20 nt, synthetic construct
  source 1..20: mol_type = other RNA
taacaagaaagggtagcttt

SEQ ID NO: 46805 - RNA, 20 nt, synthetic construct
  source 1..20: mol_type = other RNA
taacaagaagctgttttggt

SEQ ID NO: 46806 - RNA, 20 nt, synthetic construct
  source 1..20: mol_type = other RNA
taacaagaatcctgctattt

SEQ ID NO: 46807 - RNA, 20 nt, synthetic construct
  source 1..20: mol_type = other RNA
taacaattggtgaatctgag

SEQ ID NO: 46808 - RNA, 20 nt, synthetic construct
  source 1..20: mol_type = other RNA
taacacacaacaatgaattc

SEQ ID NO: 46809 - RNA, 20 nt, synthetic construct
  source 1..20: mol_type = other RNA
taacacagttctagttctaa

SEQ ID NO: 46810 - RNA, 20 nt, synthetic construct
  source 1..20: mol_type = other RNA
taacacatacaaaccaaaaa

SEQ ID NO: 46811 - RNA, 20 nt, synthetic construct
  source 1..20: mol_type = other RNA
taacacatatttatcaacac

SEQ ID NO: 46812 - RNA, 20 nt, synthetic construct
  source 1..20: mol_type = other RNA
taacaccagtaagattctgt

SEQ ID NO: 46813 - RNA, 20 nt, synthetic construct
  source 1..20: mol_type = other RNA
taacaccatagctgaaggca

SEQ ID NO: 46814 - RNA, 20 nt, synthetic construct
  source 1..20: mol_type = other RNA
taacaccatggcaggtttca

SEQ ID NO: 46815 - RNA, 20 nt, synthetic construct
  source 1..20: mol_type = other RNA
taacaccttgaactgggact

SEQ ID NO: 46816 - RNA, 20 nt, synthetic construct
  source 1..20: mol_type = other RNA
taacacctttgtattcatcc

SEQ ID NO: 46817 - RNA, 20 nt, synthetic construct
  source 1..20: mol_type = other RNA
taacacgcagaaccactgag

SEQ ID NO: 46818 - RNA, 20 nt, synthetic construct
  source 1..20: mol_type = other RNA
taacactaatccttctcata

SEQ ID NO: 46819 - RNA, 20 nt, synthetic construct
  source 1..20: mol_type = other RNA
taacactatgtgttgataaa

SEQ ID NO: 46820 - RNA, 20 nt, synthetic construct
  source 1..20: mol_type = other RNA
taacactcagaagtactact

SEQ ID NO: 46821 - RNA, 20 nt, synthetic construct
  source 1..20: mol_type = other RNA
taacagaagaagaattctat

SEQ ID NO: 46822 - RNA, 20 nt, synthetic construct
  source 1..20: mol_type = other RNA
taacagaagggtatatacaa

SEQ ID NO: 46823 - RNA, 20 nt, synthetic construct
  source 1..20: mol_type = other RNA
taacagacctctgaagagtc

SEQ ID NO: 46824 - RNA, 20 nt, synthetic construct
  source 1..20: mol_type = other RNA
taacagaggcatgcacggac

SEQ ID NO: 46825 - RNA, 20 nt, synthetic construct
  source 1..20: mol_type = other RNA
taacagatgaatgaacaaaa

SEQ ID NO: 46826 - RNA, 20 nt, synthetic construct
  source 1..20: mol_type = other RNA
taacagatggaactctattt

SEQ ID NO: 46827 - RNA, 20 nt, synthetic construct
  source 1..20: mol_type = other RNA
taacagatggtcctttttta

SEQ ID NO: 46828 - RNA, 20 nt, synthetic construct
  source 1..20: mol_type = other RNA
taacagccaaagaaattgga

SEQ ID NO: 46829 - RNA, 20 nt, synthetic construct
  source 1..20: mol_type = other RNA
taacagccaaataaaacaca

SEQ ID NO: 46830 - RNA, 20 nt, synthetic construct
  source 1..20: mol_type = other RNA
taacagccggcatatgtcac

SEQ ID NO: 46831 - RNA, 20 nt, synthetic construct
  source 1..20: mol_type = other RNA
taacagcctaagcaaatgta

SEQ ID NO: 46832 - RNA, 20 nt, synthetic construct
  source 1..20: mol_type = other RNA
taacagctcagaagctatag

SEQ ID NO: 46833 - RNA, 20 nt, synthetic construct
  source 1..20: mol_type = other RNA
taacagggtctacaaaaggt

SEQ ID NO: 46834 - RNA, 20 nt, synthetic construct
  source 1..20: mol_type = other RNA
taacagtattgtcttctaac

SEQ ID NO: 46835 - RNA, 20 nt, synthetic construct
  source 1..20: mol_type = other RNA
taacagtctcgtgaatttgg

SEQ ID NO: 46836 - RNA, 20 nt, synthetic construct
  source 1..20: mol_type = other RNA
taacagtgctgtgccagtgc

SEQ ID NO: 46837 - RNA, 20 nt, synthetic construct
  source 1..20: mol_type = other RNA
taacagtggttaggaaaata

SEQ ID NO: 46838 - RNA, 20 nt, synthetic construct
  source 1..20: mol_type = other RNA
taacagttcaatactactgc

SEQ ID NO: 46839 - RNA, 20 nt, synthetic construct
  source 1..20: mol_type = other RNA
taacataaaagcgtactgtg

SEQ ID NO: 46840 - RNA, 20 nt, synthetic construct
  source 1..20: mol_type = other RNA
taacataatcaaattcacag

SEQ ID NO: 46841 - RNA, 20 nt, synthetic construct
  source 1..20: mol_type = other RNA
taacatacacatcagatttt

SEQ ID NO: 46842 - RNA, 20 nt, synthetic construct
  source 1..20: mol_type = other RNA
taacataccgacggctcagg

SEQ ID NO: 46843 - RNA, 20 nt, synthetic construct
  source 1..20: mol_type = other RNA
taacatctatgaagtaattg

SEQ ID NO: 46844 - RNA, 20 nt, synthetic construct
  source 1..20: mol_type = other RNA
taacatgaactactcaaaga

SEQ ID NO: 46845 - RNA, 20 nt, synthetic construct
  source 1..20: mol_type = other RNA
taacatgcatatgtttgtaa

SEQ ID NO: 46846 - RNA, 20 nt, synthetic construct
  source 1..20: mol_type = other RNA
taacatgtcttggtgtgctc

SEQ ID NO: 46847 - RNA, 20 nt, synthetic construct
  source 1..20: mol_type = other RNA
taacatgtggaacataatct

SEQ ID NO: 46848 - RNA, 20 nt, synthetic construct
  source 1..20: mol_type = other RNA
taacatgttagattaggaaa

SEQ ID NO: 46849 - RNA, 20 nt, synthetic construct
  source 1..20: mol_type = other RNA
taacattacaacagcaaggc

SEQ ID NO: 46850 - RNA, 20 nt, synthetic construct
  source 1..20: mol_type = other RNA
taacattaccaataaaagcc

SEQ ID NO: 46851 - RNA, 20 nt, synthetic construct
  source 1..20: mol_type = other RNA
taacattatatttcacaacg

SEQ ID NO: 46852 - RNA, 20 nt, synthetic construct
  source 1..20: mol_type = other RNA
taacattatcttctaccttt

SEQ ID NO: 46853 - RNA, 20 nt, synthetic construct
  source 1..20: mol_type = other RNA
taacattgatacaatacttg

SEQ ID NO: 46854 - RNA, 20 nt, synthetic construct
  source 1..20: mol_type = other RNA
taacatttctcatgtatgtt

SEQ ID NO: 46855 - RNA, 20 nt, synthetic construct
  source 1..20: mol_type = other RNA
taacatttcttctagtcaca

SEQ ID NO: 46856 - RNA, 20 nt, synthetic construct
  source 1..20: mol_type = other RNA
taacatttgaactcactggc

SEQ ID NO: 46857 - RNA, 20 nt, synthetic construct
  source 1..20: mol_type = other RNA
taacattttctctacagtta

SEQ ID NO: 46858 - RNA, 20 nt, synthetic construct
  source 1..20: mol_type = other RNA
taaccaacattgagtttcaa

SEQ ID NO: 46859 - RNA, 20 nt, synthetic construct
  source 1..20: mol_type = other RNA
taaccaagaacaaccttatc

SEQ ID NO: 46860 - RNA, 20 nt, synthetic construct
  source 1..20: mol_type = other RNA
taaccaataagaagtgaaaa

SEQ ID NO: 46861 - RNA, 20 nt, synthetic construct
  source 1..20: mol_type = other RNA
taaccaatgtcagagatctg

SEQ ID NO: 46862 - RNA, 20 nt, synthetic construct
  source 1..20: mol_type = other RNA
taaccaattatgctgagtga

SEQ ID NO: 46863 - RNA, 20 nt, synthetic construct
  source 1..20: mol_type = other RNA
taaccacatgtggcttgtgg

SEQ ID NO: 46864 - RNA, 20 nt, synthetic construct
  source 1..20: mol_type = other RNA
taaccacgagtaatggatgt

SEQ ID NO: 46865 - RNA, 20 nt, synthetic construct
  source 1..20: mol_type = other RNA
taaccactgaaacttttctt

SEQ ID NO: 46866 - RNA, 20 nt, synthetic construct
  source 1..20: mol_type = other RNA
taaccactgttatctgggaa

SEQ ID NO: 46867 - RNA, 20 nt, synthetic construct
  source 1..20: mol_type = other RNA
taaccaggcccggggcagag

SEQ ID NO: 46868 - RNA, 20 nt, synthetic construct
  source 1..20: mol_type = other RNA
taaccatatggtttacaatg

SEQ ID NO: 46869 - RNA, 20 nt, synthetic construct
  source 1..20: mol_type = other RNA
taaccattaacagctcagaa

SEQ ID NO: 46870 - RNA, 20 nt, synthetic construct
  source 1..20: mol_type = other RNA
taaccattgagccaaagaag

SEQ ID NO: 46871 - RNA, 20 nt, synthetic construct
  source 1..20: mol_type = other RNA
taacccacagataatttctt

SEQ ID NO: 46872 - RNA, 20 nt, synthetic construct
  source 1..20: mol_type = other RNA
taacccatatctttgcttat

SEQ ID NO: 46873 - RNA, 20 nt, synthetic construct
  source 1..20: mol_type = other RNA
taaccccagagattgtcgtt

SEQ ID NO: 46874 - RNA, 20 nt, synthetic construct
  source 1..20: mol_type = other RNA
taacccgttttttccttcat

SEQ ID NO: 46875 - RNA, 20 nt, synthetic construct
  source 1..20: mol_type = other RNA
taaccctcaaatgccataga

SEQ ID NO: 46876 - RNA, 20 nt, synthetic construct
  source 1..20: mol_type = other RNA
taaccctcaatccccatctg

SEQ ID NO: 46877 - RNA, 20 nt, synthetic construct
  source 1..20: mol_type = other RNA
taaccctcctcctctacaag

SEQ ID NO: 46878 - RNA, 20 nt, synthetic construct
  source 1..20: mol_type = other RNA
taaccctgtttcccttaatg

SEQ ID NO: 46879 - RNA, 20 nt, synthetic construct
  source 1..20: mol_type = other RNA
taaccctgttttgtagatta

SEQ ID NO: 46880 - RNA, 20 nt, synthetic construct
  source 1..20: mol_type = other RNA
taacctaaagttgaggttga

SEQ ID NO: 46881 - RNA, 20 nt, synthetic construct
  source 1..20: mol_type = other RNA
taacctcaaagtggaaacaa

SEQ ID NO: 46882 - RNA, 20 nt, synthetic construct
  source 1..20: mol_type = other RNA
taacctcataagaactcctg

SEQ ID NO: 46883 - RNA, 20 nt, synthetic construct
  source 1..20: mol_type = other RNA
taacctccacctcccagatt

SEQ ID NO: 46884 - RNA, 20 nt, synthetic construct
  source 1..20: mol_type = other RNA
taacctctggtattttaaga

SEQ ID NO: 46885 - RNA, 20 nt, synthetic construct
  source 1..20: mol_type = other RNA
taacctcttgaagtcagtta

SEQ ID NO: 46886 - RNA, 20 nt, synthetic construct
  source 1..20: mol_type = other RNA
taaccttctggggttcaaac

SEQ ID NO: 46887 - RNA, 20 nt, synthetic construct
  source 1..20: mol_type = other RNA
taacctttttcttttcacat

SEQ ID NO: 46888 - RNA, 20 nt, synthetic construct
  source 1..20: mol_type = other RNA
taacgaattctttaaaactg

SEQ ID NO: 46889 - RNA, 20 nt, synthetic construct
  source 1..20: mol_type = other RNA
taacgatagtctcctatatt

SEQ ID NO: 46890 - RNA, 20 nt, synthetic construct
  source 1..20: mol_type = other RNA
taacgatccttactaccacc

SEQ ID NO: 46891 - RNA, 20 nt, synthetic construct
  source 1..20: mol_type = other RNA
taacgtatctgggaaaaaat

SEQ ID NO: 46892 - RNA, 20 nt, synthetic construct
  source 1..20: mol_type = other RNA
taacgtatgaataaactaac

SEQ ID NO: 46893 - RNA, 20 nt, synthetic construct
  source 1..20: mol_type = other RNA
taacgtgagctggaagtaag

SEQ ID NO: 46894 - RNA, 20 nt, synthetic construct
  source 1..20: mol_type = other RNA
taacgtgcttgctctgcggc

SEQ ID NO: 46895 - RNA, 20 nt, synthetic construct
  source 1..20: mol_type = other RNA
taacgtttatctacagagga

SEQ ID NO: 46896 - RNA, 20 nt, synthetic construct
  source 1..20: mol_type = other RNA
taactaaactttgagtagca

SEQ ID NO: 46897 - RNA, 20 nt, synthetic construct
  source 1..20: mol_type = other RNA
taactaatagccagtgcagc

SEQ ID NO: 46898 - RNA, 20 nt, synthetic construct
  source 1..20: mol_type = other RNA
taactaatgagaatttcaga

SEQ ID NO: 46899 - RNA, 20 nt, synthetic construct
  source 1..20: mol_type = other RNA
taactacacatcagtgctgc

SEQ ID NO: 46900 - RNA, 20 nt, synthetic construct
  source 1..20: mol_type = other RNA
taactacagacatgccacac

SEQ ID NO: 46901 - RNA, 20 nt, synthetic construct
  source 1..20: mol_type = other RNA
taactaccactgaggtcaag

SEQ ID NO: 46902 - RNA, 20 nt, synthetic construct
  source 1..20: mol_type = other RNA
taactagaaaaccgacagca

SEQ ID NO: 46903 - RNA, 20 nt, synthetic construct
  source 1..20: mol_type = other RNA
taactagaaacttcttctgt

SEQ ID NO: 46904 - RNA, 20 nt, synthetic construct
  source 1..20: mol_type = other RNA
taactagaattgactttacc

SEQ ID NO: 46905 - RNA, 20 nt, synthetic construct
  source 1..20: mol_type = other RNA
taactagatgcctcgaaggc

SEQ ID NO: 46906 - RNA, 20 nt, synthetic construct
  source 1..20: mol_type = other RNA
taactataggagttcattcg

SEQ ID NO: 46907 - RNA, 20 nt, synthetic construct
  source 1..20: mol_type = other RNA
taactatcctatgtggggaa

SEQ ID NO: 46908 - RNA, 20 nt, synthetic construct
  source 1..20: mol_type = other RNA
taactatggacatgaggaaa

SEQ ID NO: 46909 - RNA, 20 nt, synthetic construct
  source 1..20: mol_type = other RNA
taactatttctctttaaagc

SEQ ID NO: 46910 - RNA, 20 nt, synthetic construct
  source 1..20: mol_type = other RNA
taactcaaaatgttcataca

SEQ ID NO: 46911 - RNA, 20 nt, synthetic construct
  source 1..20: mol_type = other RNA
taactcaagagttacttctg

SEQ ID NO: 46912 - RNA, 20 nt, synthetic construct
  source 1..20: mol_type = other RNA
taactcatttaaacgtcaga

SEQ ID NO: 46913 - RNA, 20 nt, synthetic construct
  source 1..20: mol_type = other RNA
taactccagcttttattaga

SEQ ID NO: 46914 - RNA, 20 nt, synthetic construct
  source 1..20: mol_type = other RNA
taactccaggggacatgctc

SEQ ID NO: 46915 - RNA, 20 nt, synthetic construct
  source 1..20: mol_type = other RNA
taactccatcttcacgtggc

SEQ ID NO: 46916 - RNA, 20 nt, synthetic construct
  source 1..20: mol_type = other RNA
taactcctgttctttggagc

SEQ ID NO: 46917 - RNA, 20 nt, synthetic construct
  source 1..20: mol_type = other RNA
taactcgtaatgcgatgatc

SEQ ID NO: 46918 - RNA, 20 nt, synthetic construct
  source 1..20: mol_type = other RNA
taactcttgagttaggaatt

SEQ ID NO: 46919 - RNA, 20 nt, synthetic construct
  source 1..20: mol_type = other RNA
taactcttgcattagagccc

SEQ ID NO: 46920 - RNA, 20 nt, synthetic construct
  source 1..20: mol_type = other RNA
taactgaaatcgggagtaac

SEQ ID NO: 46921 - RNA, 20 nt, synthetic construct
  source 1..20: mol_type = other RNA
taactgaacatgtatgtttc

SEQ ID NO: 46922 - RNA, 20 nt, synthetic construct
  source 1..20: mol_type = other RNA
taactgacttacagacctta

SEQ ID NO: 46923 - RNA, 20 nt, synthetic construct
  source 1..20: mol_type = other RNA
taactgacttcaagaggtta

SEQ ID NO: 46924 - RNA, 20 nt, synthetic construct
  source 1..20: mol_type = other RNA
taactgaggtgtttttcagc

SEQ ID NO: 46925 - RNA, 20 nt, synthetic construct
  source 1..20: mol_type = other RNA
taactgatatgagggatgag

SEQ ID NO: 46926 - RNA, 20 nt, synthetic construct
  source 1..20: mol_type = other RNA
taactgatgtgaggatctgt

SEQ ID NO: 46927 - RNA, 20 nt, synthetic construct
  source 1..20: mol_type = other RNA
taactgcagaggtcaggaag

SEQ ID NO: 46928 - RNA, 20 nt, synthetic construct
  source 1..20: mol_type = other RNA
taactgcctaagtaatgctg

SEQ ID NO: 46929 - RNA, 20 nt, synthetic construct
  source 1..20: mol_type = other RNA
taactgctcctctgacttta

SEQ ID NO: 46930 - RNA, 20 nt, synthetic construct
  source 1..20: mol_type = other RNA
taactgggtgtgcacgtttg

SEQ ID NO: 46931 - RNA, 20 nt, synthetic construct
  source 1..20: mol_type = other RNA
taactggtccagatgaagca

SEQ ID NO: 46932 - RNA, 20 nt, synthetic construct
  source 1..20: mol_type = other RNA
taactggtctcctttctata

SEQ ID NO: 46933 - RNA, 20 nt, synthetic construct
  source 1..20: mol_type = other RNA
taactggtgcttttttggtg

SEQ ID NO: 46934 - RNA, 20 nt, synthetic construct
  source 1..20: mol_type = other RNA
taactgtaaagtaatcaagt

SEQ ID NO: 46935 - RNA, 20 nt, synthetic construct
  source 1..20: mol_type = other RNA
taactgtagagaaaatgtta

SEQ ID NO: 46936 - RNA, 20 nt, synthetic construct
  source 1..20: mol_type = other RNA
taactgtattgcaaactaag

SEQ ID NO: 46937 - RNA, 20 nt, synthetic construct
  source 1..20: mol_type = other RNA
taactgtcatcagcgtcctc

SEQ ID NO: 46938 - RNA, 20 nt, synthetic construct
  source 1..20: mol_type = other RNA
taactgtcctgaattctaac

SEQ ID NO: 46939 - RNA, 20 nt, synthetic construct
  source 1..20: mol_type = other RNA
taacttattggaaaactctg

SEQ ID NO: 46940 - RNA, 20 nt, synthetic construct
  source 1..20: mol_type = other RNA
taacttcacctctacacaaa

SEQ ID NO: 46941 - RNA, 20 nt, synthetic construct
  source 1..20: mol_type = other RNA
taacttccatgagattacat

SEQ ID NO: 46942 - RNA, 20 nt, synthetic construct
  source 1..20: mol_type = other RNA
taacttcccagacagggaat

SEQ ID NO: 46943 - RNA, 20 nt, synthetic construct
  source 1..20: mol_type = other RNA
taacttctaatgcccattaa

SEQ ID NO: 46944 - RNA, 20 nt, synthetic construct
  source 1..20: mol_type = other RNA
taacttgaattcagatggcc

SEQ ID NO: 46945 - RNA, 20 nt, synthetic construct
  source 1..20: mol_type = other RNA
taacttgcttaggctgaagc

SEQ ID NO: 46946 - RNA, 20 nt, synthetic construct
  source 1..20: mol_type = other RNA
taacttgctttgaatttgga

SEQ ID NO: 46947 - RNA, 20 nt, synthetic construct
  source 1..20: mol_type = other RNA
taacttggagaacttaaagg

SEQ ID NO: 46948 - RNA, 20 nt, synthetic construct
  source 1..20: mol_type = other RNA
taacttggtcgaaaacctga

SEQ ID NO: 46949 - RNA, 20 nt, synthetic construct
  source 1..20: mol_type = other RNA
taacttgttcatgtttacag

SEQ ID NO: 46950 - RNA, 20 nt, synthetic construct
  source 1..20: mol_type = other RNA
taactttaaagctctatggc

SEQ ID NO: 46951 - RNA, 20 nt, synthetic construct
  source 1..20: mol_type = other RNA
taactttaaattttgagacc

SEQ ID NO: 46952 - RNA, 20 nt, synthetic construct
  source 1..20: mol_type = other RNA
taactttaatcaccaggcgc

SEQ ID NO: 46953 - RNA, 20 nt, synthetic construct
  source 1..20: mol_type = other RNA
taactttctattcccctgga

SEQ ID NO: 46954 - RNA, 20 nt, synthetic construct
  source 1..20: mol_type = other RNA
taactttctgcttaaagcct

SEQ ID NO: 46955 - RNA, 20 nt, synthetic construct
  source 1..20: mol_type = other RNA
taactttgaaatcagaactt

SEQ ID NO: 46956 - RNA, 20 nt, synthetic construct
  source 1..20: mol_type = other RNA
taactttgatgaattccagt

SEQ ID NO: 46957 - RNA, 20 nt, synthetic construct
  source 1..20: mol_type = other RNA
taacttttaacccacagata

SEQ ID NO: 46958 - RNA, 20 nt, synthetic construct
  source 1..20: mol_type = other RNA
taagaaaaacagaagacaca

SEQ ID NO: 46959 - RNA, 20 nt, synthetic construct
  source 1..20: mol_type = other RNA
taagaaaaattccctcagca

SEQ ID NO: 46960 - RNA, 20 nt, synthetic construct
  source 1..20: mol_type = other RNA
taagaaaacaaattcatgca

SEQ ID NO: 46961 - RNA, 20 nt, synthetic construct
  source 1..20: mol_type = other RNA
taagaaaacagataacctag

SEQ ID NO: 46962 - RNA, 20 nt, synthetic construct
  source 1..20: mol_type = other RNA
taagaaaagaagttacggtt

SEQ ID NO: 46963 - RNA, 20 nt, synthetic construct
  source 1..20: mol_type = other RNA
taagaaaatcattgttcagg

SEQ ID NO: 46964 - RNA, 20 nt, synthetic construct
  source 1..20: mol_type = other RNA
taagaaaatgtgacattagt

SEQ ID NO: 46965 - RNA, 20 nt, synthetic construct
  source 1..20: mol_type = other RNA
taagaaagatctcaaacagc

SEQ ID NO: 46966 - RNA, 20 nt, synthetic construct
  source 1..20: mol_type = other RNA
taagaaaggagttcagcttt

SEQ ID NO: 46967 - RNA, 20 nt, synthetic construct
  source 1..20: mol_type = other RNA
taagaaagggtgtgtgaatg

SEQ ID NO: 46968 - RNA, 20 nt, synthetic construct
  source 1..20: mol_type = other RNA
taagaaaggtctagtgtgca

SEQ ID NO: 46969 - RNA, 20 nt, synthetic construct
  source 1..20: mol_type = other RNA
taagaaatcgttgtgaaata

SEQ ID NO: 46970 - RNA, 20 nt, synthetic construct
  source 1..20: mol_type = other RNA
taagaaatgccacatttttt

SEQ ID NO: 46971 - RNA, 20 nt, synthetic construct
  source 1..20: mol_type = other RNA
taagaacacttaacatgaga

SEQ ID NO: 46972 - RNA, 20 nt, synthetic construct
  source 1..20: mol_type = other RNA
taagaaccatacagtgcctt

SEQ ID NO: 46973 - RNA, 20 nt, synthetic construct
  source 1..20: mol_type = other RNA
taagaaccttcatactattt

SEQ ID NO: 46974 - RNA, 20 nt, synthetic construct
  source 1..20: mol_type = other RNA
taagaactcctggtctccca

SEQ ID NO: 46975 - RNA, 20 nt, synthetic construct
  source 1..20: mol_type = other RNA
taagaacttcttcaaaagac

SEQ ID NO: 46976 - RNA, 20 nt, synthetic construct
  source 1..20: mol_type = other RNA
taagaacttgtctttgtcta

SEQ ID NO: 46977 - RNA, 20 nt, synthetic construct
  source 1..20: mol_type = other RNA
taagaagatggttggaagtt

SEQ ID NO: 46978 - RNA, 20 nt, synthetic construct
  source 1..20: mol_type = other RNA
taagaagattgagtcagtaa

SEQ ID NO: 46979 - RNA, 20 nt, synthetic construct
  source 1..20: mol_type = other RNA
taagaaggaaaagaacacag

SEQ ID NO: 46980 - RNA, 20 nt, synthetic construct
  source 1..20: mol_type = other RNA
taagaagggaacactaagaa

SEQ ID NO: 46981 - RNA, 20 nt, synthetic construct
  source 1..20: mol_type = other RNA
taagaaggtttgtagagcaa

SEQ ID NO: 46982 - RNA, 20 nt, synthetic construct
  source 1..20: mol_type = other RNA
taagaagtgaaaaatgacct

SEQ ID NO: 46983 - RNA, 20 nt, synthetic construct
  source 1..20: mol_type = other RNA
taagaagtgaaactgctgga

SEQ ID NO: 46984 - RNA, 20 nt, synthetic construct
  source 1..20: mol_type = other RNA
taagaataccaaattcacga

SEQ ID NO: 46985 - RNA, 20 nt, synthetic construct
  source 1..20: mol_type = other RNA
taagaatgtcaagctgtttg

SEQ ID NO: 46986 - RNA, 20 nt, synthetic construct
  source 1..20: mol_type = other RNA
taagacaatgtctttggctc

SEQ ID NO: 46987 - RNA, 20 nt, synthetic construct
  source 1..20: mol_type = other RNA
taagacaatgtggagttggt

SEQ ID NO: 46988 - RNA, 20 nt, synthetic construct
  source 1..20: mol_type = other RNA
taagacacaaggaaggtcaa

SEQ ID NO: 46989 - RNA, 20 nt, synthetic construct
  source 1..20: mol_type = other RNA
taagacaccgctccacgccc

SEQ ID NO: 46990 - RNA, 20 nt, synthetic construct
  source 1..20: mol_type = other RNA
taagacactagctattgtct

SEQ ID NO: 46991 - RNA, 20 nt, synthetic construct
  source 1..20: mol_type = other RNA
taagacatttgggaatgtgg

SEQ ID NO: 46992 - RNA, 20 nt, synthetic construct
  source 1..20: mol_type = other RNA
taagaccaaaatggagaccc

SEQ ID NO: 46993 - RNA, 20 nt, synthetic construct
  source 1..20: mol_type = other RNA
taagaccacaaggattaatc

SEQ ID NO: 46994 - RNA, 20 nt, synthetic construct
  source 1..20: mol_type = other RNA
taagacccagtggctagtgt

SEQ ID NO: 46995 - RNA, 20 nt, synthetic construct
  source 1..20: mol_type = other RNA
taagaccccagtagaaatct

SEQ ID NO: 46996 - RNA, 20 nt, synthetic construct
  source 1..20: mol_type = other RNA
taagacccctcaggtgtcac

SEQ ID NO: 46997 - RNA, 20 nt, synthetic construct
  source 1..20: mol_type = other RNA
taagactataaaactcttag

SEQ ID NO: 46998 - RNA, 20 nt, synthetic construct
  source 1..20: mol_type = other RNA
taagactgctgtttaccaag

SEQ ID NO: 46999 - RNA, 20 nt, synthetic construct
  source 1..20: mol_type = other RNA
taagagaaggaagcaccaac

SEQ ID NO: 47000 - RNA, 20 nt, synthetic construct
  source 1..20: mol_type = other RNA
taagagaatggaaacttgcc

SEQ ID NO: 47001 - RNA, 20 nt, synthetic construct
  source 1..20: mol_type = other RNA
taagagactctcaagaaggt

SEQ ID NO: 47002 - RNA, 20 nt, synthetic construct
  source 1..20: mol_type = other RNA
taagagaggaagtgaccctg

SEQ ID NO: 47003 - RNA, 20 nt, synthetic construct
  source 1..20: mol_type = other RNA
taagagataactaatgagaa

SEQ ID NO: 47004 - RNA, 20 nt, synthetic construct
  source 1..20: mol_type = other RNA
taagagattaattcagtcaa

SEQ ID NO: 47005 - RNA, 20 nt, synthetic construct
  source 1..20: mol_type = other RNA
taagagcatgttgggccaac

SEQ ID NO: 47006 - RNA, 20 nt, synthetic construct
  source 1..20: mol_type = other RNA
taagagccaaagacattgtc

SEQ ID NO: 47007 - RNA, 20 nt, synthetic construct
  source 1..20: mol_type = other RNA
taagaggtatcaccatctga

SEQ ID NO: 47008 - RNA, 20 nt, synthetic construct
  source 1..20: mol_type = other RNA
taagagtatctttttcagca

SEQ ID NO: 47009 - RNA, 20 nt, synthetic construct
  source 1..20: mol_type = other RNA
taagagtccccaactgcaaa

SEQ ID NO: 47010 - RNA, 20 nt, synthetic construct
  source 1..20: mol_type = other RNA
taagagtctcatctgtcaaa

SEQ ID NO: 47011 - RNA, 20 nt, synthetic construct
  source 1..20: mol_type = other RNA
taagagtgaaaaggcaaacc

SEQ ID NO: 47012 - RNA, 20 nt, synthetic construct
  source 1..20: mol_type = other RNA
taagagtgaagaaacctttc

SEQ ID NO: 47013 - RNA, 20 nt, synthetic construct
  source 1..20: mol_type = other RNA
taagagtgggcaaaaaagtc

SEQ ID NO: 47014 - RNA, 20 nt, synthetic construct
  source 1..20: mol_type = other RNA
taagagtgtgctgactagta

SEQ ID NO: 47015 - RNA, 20 nt, synthetic construct
  source 1..20: mol_type = other RNA
taagataatgctgttctctg

SEQ ID NO: 47016 - RNA, 20 nt, synthetic construct
  source 1..20: mol_type = other RNA
taagatcatacacctggatc

SEQ ID NO: 47017 - RNA, 20 nt, synthetic construct
  source 1..20: mol_type = other RNA
taagatccaagtattgtatc

SEQ ID NO: 47018 - RNA, 20 nt, synthetic construct
  source 1..20: mol_type = other RNA
taagatcctggattgctagt

SEQ ID NO: 47019 - RNA, 20 nt, synthetic construct
  source 1..20: mol_type = other RNA
taagatctgtctttggccca

SEQ ID NO: 47020 - RNA, 20 nt, synthetic construct
  source 1..20: mol_type = other RNA
taagatgaggtctcagcctt

SEQ ID NO: 47021 - RNA, 20 nt, synthetic construct
  source 1..20: mol_type = other RNA
taagatgatctaaatggtgt

SEQ ID NO: 47022 - RNA, 20 nt, synthetic construct
  source 1..20: mol_type = other RNA
taagatgctattcaagacaa

SEQ ID NO: 47023 - RNA, 20 nt, synthetic construct
  source 1..20: mol_type = other RNA
taagatggaaagtggactat

SEQ ID NO: 47024 - RNA, 20 nt, synthetic construct
  source 1..20: mol_type = other RNA
taagatggatttttctgttt

SEQ ID NO: 47025 - RNA, 20 nt, synthetic construct
  source 1..20: mol_type = other RNA
taagattcaacaaaactggg

SEQ ID NO: 47026 - RNA, 20 nt, synthetic construct
  source 1..20: mol_type = other RNA
taagattccgtctcaaaaaa

SEQ ID NO: 47027 - RNA, 20 nt, synthetic construct
  source 1..20: mol_type = other RNA
taagattctctttagggaag

SEQ ID NO: 47028 - RNA, 20 nt, synthetic construct
  source 1..20: mol_type = other RNA
taagattctgtctctacaaa

SEQ ID NO: 47029 - RNA, 20 nt, synthetic construct
  source 1..20: mol_type = other RNA
taagattgtggtccagaaaa

SEQ ID NO: 47030 - RNA, 20 nt, synthetic construct
  source 1..20: mol_type = other RNA
taagattttttgttgttggt

SEQ ID NO: 47031 - RNA, 20 nt, synthetic construct
  source 1..20: mol_type = other RNA
taagcaaaatggaagtgctg

SEQ ID NO: 47032 - RNA, 20 nt, synthetic construct
  source 1..20: mol_type = other RNA
taagcaaaattgacaaaccc

SEQ ID NO: 47033 - RNA, 20 nt, synthetic construct
  source 1..20: mol_type = other RNA
taagcaaagatatgggttat

SEQ ID NO: 47034 - RNA, 20 nt, synthetic construct
  source 1..20: mol_type = other RNA
taagcaaccttttaggtgcc

SEQ ID NO: 47035 - RNA, 20 nt, synthetic construct
  source 1..20: mol_type = other RNA
taagcaactgcatcttcttt

SEQ ID NO: 47036 - RNA, 20 nt, synthetic construct
  source 1..20: mol_type = other RNA
taagcaagttacatgcttag

SEQ ID NO: 47037 - RNA, 20 nt, synthetic construct
  source 1..20: mol_type = other RNA
taagcacacatgaacctgca

SEQ ID NO: 47038 - RNA, 20 nt, synthetic construct
  source 1..20: mol_type = other RNA
taagcacagaattactatat

SEQ ID NO: 47039 - RNA, 20 nt, synthetic construct
  source 1..20: mol_type = other RNA
taagcacagactgtgccttg

SEQ ID NO: 47040 - RNA, 20 nt, synthetic construct
  source 1..20: mol_type = other RNA
taagcacatctgtcttgtgc

SEQ ID NO: 47041 - RNA, 20 nt, synthetic construct
  source 1..20: mol_type = other RNA
taagcacatggtgataactg

SEQ ID NO: 47042 - RNA, 20 nt, synthetic construct
  source 1..20: mol_type = other RNA
taagcaccaacagatcctca

SEQ ID NO: 47043 - RNA, 20 nt, synthetic construct
  source 1..20: mol_type = other RNA
taagcaccactagagtatta

SEQ ID NO: 47044 - RNA, 20 nt, synthetic construct
  source 1..20: mol_type = other RNA
taagcacctgtataaataaa

SEQ ID NO: 47045 - RNA, 20 nt, synthetic construct
  source 1..20: mol_type = other RNA
taagcactgcgccaagcagg

SEQ ID NO: 47046 - RNA, 20 nt, synthetic construct
  source 1..20: mol_type = other RNA
taagcagaaagttactattt

SEQ ID NO: 47047 - RNA, 20 nt, synthetic construct
  source 1..20: mol_type = other RNA
taagcagaaatgacaagtaa

SEQ ID NO: 47048 - RNA, 20 nt, synthetic construct
  source 1..20: mol_type = other RNA
taagcagaattcaaaaacac

SEQ ID NO: 47049 - RNA, 20 nt, synthetic construct
  source 1..20: mol_type = other RNA
taagcatagtttgagtattt

SEQ ID NO: 47050 - RNA, 20 nt, synthetic construct
  source 1..20: mol_type = other RNA
taagcatcccatatggaggc

SEQ ID NO: 47051 - RNA, 20 nt, synthetic construct
  source 1..20: mol_type = other RNA
taagcatcgtgaagtcttta

SEQ ID NO: 47052 - RNA, 20 nt, synthetic construct
  source 1..20: mol_type = other RNA
taagcatgagatactacgcc

SEQ ID NO: 47053 - RNA, 20 nt, synthetic construct
  source 1..20: mol_type = other RNA
taagcatgtaacttgcttag

SEQ ID NO: 47054 - RNA, 20 nt, synthetic construct
  source 1..20: mol_type = other RNA
taagcattttccggttgtat

SEQ ID NO: 47055 - RNA, 20 nt, synthetic construct
  source 1..20: mol_type = other RNA
taagccaatatccctgataa

SEQ ID NO: 47056 - RNA, 20 nt, synthetic construct
  source 1..20: mol_type = other RNA
taagccaccgcactcagcct

SEQ ID NO: 47057 - RNA, 20 nt, synthetic construct
  source 1..20: mol_type = other RNA
taagccagtcactaaaaatc

SEQ ID NO: 47058 - RNA, 20 nt, synthetic construct
  source 1..20: mol_type = other RNA
taagccatctaattcacatt

SEQ ID NO: 47059 - RNA, 20 nt, synthetic construct
  source 1..20: mol_type = other RNA
taagccatgtttctcctgca

SEQ ID NO: 47060 - RNA, 20 nt, synthetic construct
  source 1..20: mol_type = other RNA
taagccatttcaggttttcg

SEQ ID NO: 47061 - RNA, 20 nt, synthetic construct
  source 1..20: mol_type = other RNA
taagcccaacctgattagag

SEQ ID NO: 47062 - RNA, 20 nt, synthetic construct
  source 1..20: mol_type = other RNA
taagcccaacttcacaccat

SEQ ID NO: 47063 - RNA, 20 nt, synthetic construct
  source 1..20: mol_type = other RNA
taagccgttccatcagagag

SEQ ID NO: 47064 - RNA, 20 nt, synthetic construct
  source 1..20: mol_type = other RNA
taagcctacctcccttcaca

SEQ ID NO: 47065 - RNA, 20 nt, synthetic construct
  source 1..20: mol_type = other RNA
taagcctactgctctgtcct

SEQ ID NO: 47066 - RNA, 20 nt, synthetic construct
  source 1..20: mol_type = other RNA
taagcctagagattaggcag

SEQ ID NO: 47067 - RNA, 20 nt, synthetic construct
  source 1..20: mol_type = other RNA
taagcctatgtaagacaatg

SEQ ID NO: 47068 - RNA, 20 nt, synthetic construct
  source 1..20: mol_type = other RNA
taagctaagagttttatagt

SEQ ID NO: 47069 - RNA, 20 nt, synthetic construct
  source 1..20: mol_type = other RNA
taagctaatcccaaagtgag

SEQ ID NO: 47070 - RNA, 20 nt, synthetic construct
  source 1..20: mol_type = other RNA
taagctcccagccaaacagt

SEQ ID NO: 47071 - RNA, 20 nt, synthetic construct
  source 1..20: mol_type = other RNA
taagctgaactctgtggagt

SEQ ID NO: 47072 - RNA, 20 nt, synthetic construct
  source 1..20: mol_type = other RNA
taagctggtaatacagtctg

SEQ ID NO: 47073 - RNA, 20 nt, synthetic construct
  source 1..20: mol_type = other RNA
taagctgtgagtccttccag

SEQ ID NO: 47074 - RNA, 20 nt, synthetic construct
  source 1..20: mol_type = other RNA
taagcttaagagctaagact

SEQ ID NO: 47075 - RNA, 20 nt, synthetic construct
  source 1..20: mol_type = other RNA
taagcttaggtctttgatcc

SEQ ID NO: 47076 - RNA, 20 nt, synthetic construct
  source 1..20: mol_type = other RNA
taagcttcctctggctgacc

SEQ ID NO: 47077 - RNA, 20 nt, synthetic construct
  source 1..20: mol_type = other RNA
taagcttcgaagcaaaacat

SEQ ID NO: 47078 - RNA, 20 nt, synthetic construct
  source 1..20: mol_type = other RNA
taagcttcgacagtcccttg

SEQ ID NO: 47079 - RNA, 20 nt, synthetic construct
  source 1..20: mol_type = other RNA
taagcttgggtaggaagctg

SEQ ID NO: 47080 - RNA, 20 nt, synthetic construct
  source 1..20: mol_type = other RNA
taaggaaaagtcagtaaaaa

SEQ ID NO: 47081 - RNA, 20 nt, synthetic construct
  source 1..20: mol_type = other RNA
taaggaaacagagttttcca

SEQ ID NO: 47082 - RNA, 20 nt, synthetic construct
  source 1..20: mol_type = other RNA
taaggaaaccccagggatat

SEQ ID NO: 47083 - RNA, 20 nt, synthetic construct
  source 1..20: mol_type = other RNA
taaggaaagcacgtttgatc

SEQ ID NO: 47084 - RNA, 20 nt, synthetic construct
  source 1..20: mol_type = other RNA
taaggaaagctcaggaccag

SEQ ID NO: 47085 - RNA, 20 nt, synthetic construct
  source 1..20: mol_type = other RNA
taaggaaatacaaaaagtga

SEQ ID NO: 47086 - RNA, 20 nt, synthetic construct
  source 1..20: mol_type = other RNA
taaggaaatggacagcacat

SEQ ID NO: 47087 - RNA, 20 nt, synthetic construct
  source 1..20: mol_type = other RNA
taaggaagagtttatattct

SEQ ID NO: 47088 - RNA, 20 nt, synthetic construct
  source 1..20: mol_type = other RNA
taaggaatgcctataaaatg

SEQ ID NO: 47089 - RNA, 20 nt, synthetic construct
  source 1..20: mol_type = other RNA
taaggacatccacaacattg

SEQ ID NO: 47090 - RNA, 20 nt, synthetic construct
  source 1..20: mol_type = other RNA
taaggaccaggtatggcgac

SEQ ID NO: 47091 - RNA, 20 nt, synthetic construct
  source 1..20: mol_type = other RNA
taaggactgaagtcctttct

SEQ ID NO: 47092 - RNA, 20 nt, synthetic construct
  source 1..20: mol_type = other RNA
taaggagatggcacatacca

SEQ ID NO: 47093 - RNA, 20 nt, synthetic construct
  source 1..20: mol_type = other RNA
taaggagccaaacatcatga

SEQ ID NO: 47094 - RNA, 20 nt, synthetic construct
  source 1..20: mol_type = other RNA
taaggatcgttagtattttc

SEQ ID NO: 47095 - RNA, 20 nt, synthetic construct
  source 1..20: mol_type = other RNA
taaggattatggctagaaac

SEQ ID NO: 47096 - RNA, 20 nt, synthetic construct
  source 1..20: mol_type = other RNA
taaggcagggcttggtggcc

SEQ ID NO: 47097 - RNA, 20 nt, synthetic construct
  source 1..20: mol_type = other RNA
taaggcgcagacacaccatg

SEQ ID NO: 47098 - RNA, 20 nt, synthetic construct
  source 1..20: mol_type = other RNA
taaggctaaaacatacatga

SEQ ID NO: 47099 - RNA, 20 nt, synthetic construct
  source 1..20: mol_type = other RNA
taaggcttggaaaacaaatt

SEQ ID NO: 47100 - RNA, 20 nt, synthetic construct
  source 1..20: mol_type = other RNA
taagggaaacactcatacca

SEQ ID NO: 47101 - RNA, 20 nt, synthetic construct
  source 1..20: mol_type = other RNA
taagggaaacagggttacag

SEQ ID NO: 47102 - RNA, 20 nt, synthetic construct
  source 1..20: mol_type = other RNA
taagggaagagctaagatgc

SEQ ID NO: 47103 - RNA, 20 nt, synthetic construct
  source 1..20: mol_type = other RNA
taagggaagttttttcaaaa

SEQ ID NO: 47104 - RNA, 20 nt, synthetic construct
  source 1..20: mol_type = other RNA
taagggcattttcaaggtag

SEQ ID NO: 47105 - RNA, 20 nt, synthetic construct
  source 1..20: mol_type = other RNA
taagggccatttcatttctg

SEQ ID NO: 47106 - RNA, 20 nt, synthetic construct
  source 1..20: mol_type = other RNA
taaggggaatcatgcagtac

SEQ ID NO: 47107 - RNA, 20 nt, synthetic construct
  source 1..20: mol_type = other RNA
taaggggcagggtggagtcc

SEQ ID NO: 47108 - RNA, 20 nt, synthetic construct
  source 1..20: mol_type = other RNA
taaggggctatctttacttt

SEQ ID NO: 47109 - RNA, 20 nt, synthetic construct
  source 1..20: mol_type = other RNA
taagggggaatctactcttt

SEQ ID NO: 47110 - RNA, 20 nt, synthetic construct
  source 1..20: mol_type = other RNA
taaggggtaaatggtttctc

SEQ ID NO: 47111 - RNA, 20 nt, synthetic construct
  source 1..20: mol_type = other RNA
taagggtaaacagaattaaa

SEQ ID NO: 47112 - RNA, 20 nt, synthetic construct
  source 1..20: mol_type = other RNA
taagggtacagaactgctaa

SEQ ID NO: 47113 - RNA, 20 nt, synthetic construct
  source 1..20: mol_type = other RNA
taagggtccagcttcactct

SEQ ID NO: 47114 - RNA, 20 nt, synthetic construct
  source 1..20: mol_type = other RNA
taagggtctgttttacatgt

SEQ ID NO: 47115 - RNA, 20 nt, synthetic construct
  source 1..20: mol_type = other RNA
taagggtgataaaaaggagg

SEQ ID NO: 47116 - RNA, 20 nt, synthetic construct
  source 1..20: mol_type = other RNA
taaggtaagggtccagcttc

SEQ ID NO: 47117 - RNA, 20 nt, synthetic construct
  source 1..20: mol_type = other RNA
taaggtatatttctgtaaac

SEQ ID NO: 47118 - RNA, 20 nt, synthetic construct
  source 1..20: mol_type = other RNA
taaggtcaacacatcagcgc

SEQ ID NO: 47119 - RNA, 20 nt, synthetic construct
  source 1..20: mol_type = other RNA
taaggtcaagagagattaaa

SEQ ID NO: 47120 - RNA, 20 nt, synthetic construct
  source 1..20: mol_type = other RNA
taaggtcacattcagaggta

SEQ ID NO: 47121 - RNA, 20 nt, synthetic construct
  source 1..20: mol_type = other RNA
taaggtctgtaagtcagtta

SEQ ID NO: 47122 - RNA, 20 nt, synthetic construct
  source 1..20: mol_type = other RNA
taaggtgcacgctgtgaatg

SEQ ID NO: 47123 - RNA, 20 nt, synthetic construct
  source 1..20: mol_type = other RNA
taaggtggagtggtggatag

SEQ ID NO: 47124 - RNA, 20 nt, synthetic construct
  source 1..20: mol_type = other RNA
taaggtgtttggtgaatttt

SEQ ID NO: 47125 - RNA, 20 nt, synthetic construct
  source 1..20: mol_type = other RNA
taaggttctgctatgctgaa

SEQ ID NO: 47126 - RNA, 20 nt, synthetic construct
  source 1..20: mol_type = other RNA
taaggttgttcttggttaat

SEQ ID NO: 47127 - RNA, 20 nt, synthetic construct
  source 1..20: mol_type = other RNA
taaggtttagaaaacatatc

SEQ ID NO: 47128 - RNA, 20 nt, synthetic construct
  source 1..20: mol_type = other RNA
taaggtttccctggggaata

SEQ ID NO: 47129 - RNA, 20 nt, synthetic construct
  source 1..20: mol_type = other RNA
taaggtttttaaaagatgca

SEQ ID NO: 47130 - RNA, 20 nt, synthetic construct
  source 1..20: mol_type = other RNA
taagtaaaatcggaacaggc

SEQ ID NO: 47131 - RNA, 20 nt, synthetic construct
  source 1..20: mol_type = other RNA
taagtaatgctggccagtga

SEQ ID NO: 47132 - RNA, 20 nt, synthetic construct
  source 1..20: mol_type = other RNA
taagtagaaggtcaatctag

SEQ ID NO: 47133 - RNA, 20 nt, synthetic construct
  source 1..20: mol_type = other RNA
taagtagtggcagccccgct

SEQ ID NO: 47134 - RNA, 20 nt, synthetic construct
  source 1..20: mol_type = other RNA
taagtatctcagtcataatt

SEQ ID NO: 47135 - RNA, 20 nt, synthetic construct
  source 1..20: mol_type = other RNA
taagtatctcggtcattctg

SEQ ID NO: 47136 - RNA, 20 nt, synthetic construct
  source 1..20: mol_type = other RNA
taagtatgcagaaaccagtt

SEQ ID NO: 47137 - RNA, 20 nt, synthetic construct
  source 1..20: mol_type = other RNA
taagtcactccatttgtggc

SEQ ID NO: 47138 - RNA, 20 nt, synthetic construct
  source 1..20: mol_type = other RNA
taagtcagaattcactgtga

SEQ ID NO: 47139 - RNA, 20 nt, synthetic construct
  source 1..20: mol_type = other RNA
taagtcagcctgggcacacg

SEQ ID NO: 47140 - RNA, 20 nt, synthetic construct
  source 1..20: mol_type = other RNA
taagtcagttaacagtgctg

SEQ ID NO: 47141 - RNA, 20 nt, synthetic construct
  source 1..20: mol_type = other RNA
taagtcatcaaaggaaggaa

SEQ ID NO: 47142 - RNA, 20 nt, synthetic construct
  source 1..20: mol_type = other RNA
taagtccctaacagtctcgt

SEQ ID NO: 47143 - RNA, 20 nt, synthetic construct
  source 1..20: mol_type = other RNA
taagtctcaacctactttaa

SEQ ID NO: 47144 - RNA, 20 nt, synthetic construct
  source 1..20: mol_type = other RNA
taagtctgaaagcttctgag

SEQ ID NO: 47145 - RNA, 20 nt, synthetic construct
  source 1..20: mol_type = other RNA
taagtcttcttctaagctaa

SEQ ID NO: 47146 - RNA, 20 nt, synthetic construct
  source 1..20: mol_type = other RNA
taagtgagtttgacctgtaa

SEQ ID NO: 47147 - RNA, 20 nt, synthetic construct
  source 1..20: mol_type = other RNA
taagtgcacaatgcagtatt

SEQ ID NO: 47148 - RNA, 20 nt, synthetic construct
  source 1..20: mol_type = other RNA
taagtgcatttcggctctgt

SEQ ID NO: 47149 - RNA, 20 nt, synthetic construct
  source 1..20: mol_type = other RNA
taagtggaatcattccgtat

SEQ ID NO: 47150 - RNA, 20 nt, synthetic construct
  source 1..20: mol_type = other RNA
taagtggcgctgtttgcctg

SEQ ID NO: 47151 - RNA, 20 nt, synthetic construct
  source 1..20: mol_type = other RNA
taagtgggaggaggtcatac

SEQ ID NO: 47152 - RNA, 20 nt, synthetic construct
  source 1..20: mol_type = other RNA
taagtggtattctatcatca

SEQ ID NO: 47153 - RNA, 20 nt, synthetic construct
  source 1..20: mol_type = other RNA
taagtgtgaagattaagcac

SEQ ID NO: 47154 - RNA, 20 nt, synthetic construct
  source 1..20: mol_type = other RNA
taagtgtgagcaaaaataca

SEQ ID NO: 47155 - RNA, 20 nt, synthetic construct
  source 1..20: mol_type = other RNA
taagtgtttaggatataaga

SEQ ID NO: 47156 - RNA, 20 nt, synthetic construct
  source 1..20: mol_type = other RNA
taagtgtttgaaaagtgttt

SEQ ID NO: 47157 - RNA, 20 nt, synthetic construct
  source 1..20: mol_type = other RNA
taagttaaaacttgtagagg

SEQ ID NO: 47158 - RNA, 20 nt, synthetic construct
  source 1..20: mol_type = other RNA
taagttaactgaaatcggga

SEQ ID NO: 47159 - RNA, 20 nt, synthetic construct
  source 1..20: mol_type = other RNA
taagttactgattagaagga

SEQ ID NO: 47160 - RNA, 20 nt, synthetic construct
  source 1..20: mol_type = other RNA
taagttcaaagaaactacct

SEQ ID NO: 47161 - RNA, 20 nt, synthetic construct
  source 1..20: mol_type = other RNA
taagttcctggactgtgatg

SEQ ID NO: 47162 - RNA, 20 nt, synthetic construct
  source 1..20: mol_type = other RNA
taagttctccaagttattac

SEQ ID NO: 47163 - RNA, 20 nt, synthetic construct
  source 1..20: mol_type = other RNA
taagttgagaaactatccaa

SEQ ID NO: 47164 - RNA, 20 nt, synthetic construct
  source 1..20: mol_type = other RNA
taagttgcatacgtcgtccc

SEQ ID NO: 47165 - RNA, 20 nt, synthetic construct
  source 1..20: mol_type = other RNA
taagttggattcccaggtat

SEQ ID NO: 47166 - RNA, 20 nt, synthetic construct
  source 1..20: mol_type = other RNA
taagttgggagtctatttct

SEQ ID NO: 47167 - RNA, 20 nt, synthetic construct
  source 1..20: mol_type = other RNA
taagttgtgtcatttttgta

SEQ ID NO: 47168 - RNA, 20 nt, synthetic construct
  source 1..20: mol_type = other RNA
taagtttcatggacttccta

SEQ ID NO: 47169 - RNA, 20 nt, synthetic construct
  source 1..20: mol_type = other RNA
taagtttgccaaagattctt

SEQ ID NO: 47170 - RNA, 20 nt, synthetic construct
  source 1..20: mol_type = other RNA
taagttttgggggaagagag

SEQ ID NO: 47171 - RNA, 20 nt, synthetic construct
  source 1..20: mol_type = other RNA
taataaaaacatatgcagga

SEQ ID NO: 47172 - RNA, 20 nt, synthetic construct
  source 1..20: mol_type = other RNA
taataaaaagcctctctgat

SEQ ID NO: 47173 - RNA, 20 nt, synthetic construct
  source 1..20: mol_type = other RNA
taataaaagctggagttatt

SEQ ID NO: 47174 - RNA, 20 nt, synthetic construct
  source 1..20: mol_type = other RNA
taataaaatagcaggattct

SEQ ID NO: 47175 - RNA, 20 nt, synthetic construct
  source 1..20: mol_type = other RNA
taataaaatgtttagcggaa

SEQ ID NO: 47176 - RNA, 20 nt, synthetic construct
  source 1..20: mol_type = other RNA
taataaacgcggaatgaagc

SEQ ID NO: 47177 - RNA, 20 nt, synthetic construct
  source 1..20: mol_type = other RNA
taataaagcaagtatgagcc

SEQ ID NO: 47178 - RNA, 20 nt, synthetic construct
  source 1..20: mol_type = other RNA
taataaaggcaatgctctct

SEQ ID NO: 47179 - RNA, 20 nt, synthetic construct
  source 1..20: mol_type = other RNA
taataaaggtgctaattgtt

SEQ ID NO: 47180 - RNA, 20 nt, synthetic construct
  source 1..20: mol_type = other RNA
taataaatactagtaggatg

SEQ ID NO: 47181 - RNA, 20 nt, synthetic construct
  source 1..20: mol_type = other RNA
taataaatgcataaacgaca

SEQ ID NO: 47182 - RNA, 20 nt, synthetic construct
  source 1..20: mol_type = other RNA
taataacaaaaggtagaaga

SEQ ID NO: 47183 - RNA, 20 nt, synthetic construct
  source 1..20: mol_type = other RNA
taataacagcctaagcaaat

SEQ ID NO: 47184 - RNA, 20 nt, synthetic construct
  source 1..20: mol_type = other RNA
taataaccctgttttgtaga

SEQ ID NO: 47185 - RNA, 20 nt, synthetic construct
  source 1..20: mol_type = other RNA
taataacctcaaagtggaaa

SEQ ID NO: 47186 - RNA, 20 nt, synthetic construct
  source 1..20: mol_type = other RNA
taataactacacatcagtgc

SEQ ID NO: 47187 - RNA, 20 nt, synthetic construct
  source 1..20: mol_type = other RNA
taataactagaaacttcttc

SEQ ID NO: 47188 - RNA, 20 nt, synthetic construct
  source 1..20: mol_type = other RNA
taataactgcctaagtaatg

SEQ ID NO: 47189 - RNA, 20 nt, synthetic construct
  source 1..20: mol_type = other RNA
taataacttggagaacttaa

SEQ ID NO: 47190 - RNA, 20 nt, synthetic construct
  source 1..20: mol_type = other RNA
taataagatcatacacctgg

SEQ ID NO: 47191 - RNA, 20 nt, synthetic construct
  source 1..20: mol_type = other RNA
taataagcttcgaagcaaaa

SEQ ID NO: 47192 - RNA, 20 nt, synthetic construct
  source 1..20: mol_type = other RNA
taataagtgagtttgacctg

SEQ ID NO: 47193 - RNA, 20 nt, synthetic construct
  source 1..20: mol_type = other RNA
taataatgaaagctcccaat

SEQ ID NO: 47194 - RNA, 20 nt, synthetic construct
  source 1..20: mol_type = other RNA
taataattaagacaatgtgg

SEQ ID NO: 47195 - RNA, 20 nt, synthetic construct
  source 1..20: mol_type = other RNA
taataattgcttttgctgag

SEQ ID NO: 47196 - RNA, 20 nt, synthetic construct
  source 1..20: mol_type = other RNA
taataatttatcagatccca

SEQ ID NO: 47197 - RNA, 20 nt, synthetic construct
  source 1..20: mol_type = other RNA
taatacaaatgatgaagggt

SEQ ID NO: 47198 - RNA, 20 nt, synthetic construct
  source 1..20: mol_type = other RNA
taatacacttttcaggtatt

SEQ ID NO: 47199 - RNA, 20 nt, synthetic construct
  source 1..20: mol_type = other RNA
taatacagtaaagccccatt

SEQ ID NO: 47200 - RNA, 20 nt, synthetic construct
  source 1..20: mol_type = other RNA
taatacagtctgatttactt

SEQ ID NO: 47201 - RNA, 20 nt, synthetic construct
  source 1..20: mol_type = other RNA
taatacctaacagccggcat

SEQ ID NO: 47202 - RNA, 20 nt, synthetic construct
  source 1..20: mol_type = other RNA
taatactatgtatgtggctc

SEQ ID NO: 47203 - RNA, 20 nt, synthetic construct
  source 1..20: mol_type = other RNA
taatactctagtggtgctta

SEQ ID NO: 47204 - RNA, 20 nt, synthetic construct
  source 1..20: mol_type = other RNA
taatacttgtgtagcgggaa

SEQ ID NO: 47205 - RNA, 20 nt, synthetic construct
  source 1..20: mol_type = other RNA
taatactttcacactgattt

SEQ ID NO: 47206 - RNA, 20 nt, synthetic construct
  source 1..20: mol_type = other RNA
taatagaggtctgtctttca

SEQ ID NO: 47207 - RNA, 20 nt, synthetic construct
  source 1..20: mol_type = other RNA
taatagataggtcatgtaca

SEQ ID NO: 47208 - RNA, 20 nt, synthetic construct
  source 1..20: mol_type = other RNA
taatagccagtgcagcaagc

SEQ ID NO: 47209 - RNA, 20 nt, synthetic construct
  source 1..20: mol_type = other RNA
taatagcccaacagggtttt

SEQ ID NO: 47210 - RNA, 20 nt, synthetic construct
  source 1..20: mol_type = other RNA
taatagcctcctaagttttg

SEQ ID NO: 47211 - RNA, 20 nt, synthetic construct
  source 1..20: mol_type = other RNA
taatagctagtgatgttgag

SEQ ID NO: 47212 - RNA, 20 nt, synthetic construct
  source 1..20: mol_type = other RNA
taatagctatcctaatgggc

SEQ ID NO: 47213 - RNA, 20 nt, synthetic construct
  source 1..20: mol_type = other RNA
taataggaagtggctagacg

SEQ ID NO: 47214 - RNA, 20 nt, synthetic construct
  source 1..20: mol_type = other RNA
taatagtaataaaggcaatg

SEQ ID NO: 47215 - RNA, 20 nt, synthetic construct
  source 1..20: mol_type = other RNA
taatagtctcacgatacttt

SEQ ID NO: 47216 - RNA, 20 nt, synthetic construct
  source 1..20: mol_type = other RNA
taatagtgaccctttgaagt

SEQ ID NO: 47217 - RNA, 20 nt, synthetic construct
  source 1..20: mol_type = other RNA
taatagttcacctctccggg

SEQ ID NO: 47218 - RNA, 20 nt, synthetic construct
  source 1..20: mol_type = other RNA
taatataaaaattccgctct

SEQ ID NO: 47219 - RNA, 20 nt, synthetic construct
  source 1..20: mol_type = other RNA
taatatacttgtcaagttct

SEQ ID NO: 47220 - RNA, 20 nt, synthetic construct
  source 1..20: mol_type = other RNA
taatatctggactgaaaaga

SEQ ID NO: 47221 - RNA, 20 nt, synthetic construct
  source 1..20: mol_type = other RNA
taatatctttggggagatac

SEQ ID NO: 47222 - RNA, 20 nt, synthetic construct
  source 1..20: mol_type = other RNA
taatatgagttcctgcttcc

SEQ ID NO: 47223 - RNA, 20 nt, synthetic construct
  source 1..20: mol_type = other RNA
taatatgataccctcaaaag

SEQ ID NO: 47224 - RNA, 20 nt, synthetic construct
  source 1..20: mol_type = other RNA
taatatgcctcatgcatcca

SEQ ID NO: 47225 - RNA, 20 nt, synthetic construct
  source 1..20: mol_type = other RNA
taatatgctgtagtgattca

SEQ ID NO: 47226 - RNA, 20 nt, synthetic construct
  source 1..20: mol_type = other RNA
taatatggttcctagaaaat

SEQ ID NO: 47227 - RNA, 20 nt, synthetic construct
  source 1..20: mol_type = other RNA
taatatgtgtacaatggggc

SEQ ID NO: 47228 - RNA, 20 nt, synthetic construct
  source 1..20: mol_type = other RNA
taatattaaccaagaacaac

SEQ ID NO: 47229 - RNA, 20 nt, synthetic construct
  source 1..20: mol_type = other RNA
taatattataagttgggagt

SEQ ID NO: 47230 - RNA, 20 nt, synthetic construct
  source 1..20: mol_type = other RNA
taatattgaaacgatgcatt

SEQ ID NO: 47231 - RNA, 20 nt, synthetic construct
  source 1..20: mol_type = other RNA
taatattgtaggtgtctcat

SEQ ID NO: 47232 - RNA, 20 nt, synthetic construct
  source 1..20: mol_type = other RNA
taatattgtatatacccttc

SEQ ID NO: 47233 - RNA, 20 nt, synthetic construct
  source 1..20: mol_type = other RNA
taatcaaaaacctcccaaca

SEQ ID NO: 47234 - RNA, 20 nt, synthetic construct
  source 1..20: mol_type = other RNA
taatcaaacagtgtgatatt

SEQ ID NO: 47235 - RNA, 20 nt, synthetic construct
  source 1..20: mol_type = other RNA
taatcaaacataccccaacc

SEQ ID NO: 47236 - RNA, 20 nt, synthetic construct
  source 1..20: mol_type = other RNA
taatcaaattcacagaactg

SEQ ID NO: 47237 - RNA, 20 nt, synthetic construct
  source 1..20: mol_type = other RNA
taatcaactattccataaga

SEQ ID NO: 47238 - RNA, 20 nt, synthetic construct
  source 1..20: mol_type = other RNA
taatcaagccgcaaataatc

SEQ ID NO: 47239 - RNA, 20 nt, synthetic construct
  source 1..20: mol_type = other RNA
taatcaagtatctccctgtg

SEQ ID NO: 47240 - RNA, 20 nt, synthetic construct
  source 1..20: mol_type = other RNA
taatcaagtgaaatgatctt

SEQ ID NO: 47241 - RNA, 20 nt, synthetic construct
  source 1..20: mol_type = other RNA
taatcacagacgcaaaggat

SEQ ID NO: 47242 - RNA, 20 nt, synthetic construct
  source 1..20: mol_type = other RNA
taatcacagtacgcttttat

SEQ ID NO: 47243 - RNA, 20 nt, synthetic construct
  source 1..20: mol_type = other RNA
taatcaccaggcgcggtggc

SEQ ID NO: 47244 - RNA, 20 nt, synthetic construct
  source 1..20: mol_type = other RNA
taatcacctcaagtgatgca

SEQ ID NO: 47245 - RNA, 20 nt, synthetic construct
  source 1..20: mol_type = other RNA
taatcagccgtgattgcacc

SEQ ID NO: 47246 - RNA, 20 nt, synthetic construct
  source 1..20: mol_type = other RNA
taatcaggttgggcttatca

SEQ ID NO: 47247 - RNA, 20 nt, synthetic construct
  source 1..20: mol_type = other RNA
taatcagtctgtaagcacct

SEQ ID NO: 47248 - RNA, 20 nt, synthetic construct
  source 1..20: mol_type = other RNA
taatcattcttctaatagga

SEQ ID NO: 47249 - RNA, 20 nt, synthetic construct
  source 1..20: mol_type = other RNA
taatcattgttaggtgctgg

SEQ ID NO: 47250 - RNA, 20 nt, synthetic construct
  source 1..20: mol_type = other RNA
taatccaactgcagtctgtc

SEQ ID NO: 47251 - RNA, 20 nt, synthetic construct
  source 1..20: mol_type = other RNA
taatccagatggacaaatta

SEQ ID NO: 47252 - RNA, 20 nt, synthetic construct
  source 1..20: mol_type = other RNA
taatccattgggtacatacc

SEQ ID NO: 47253 - RNA, 20 nt, synthetic construct
  source 1..20: mol_type = other RNA
taatcccaaagtgagcagaa

SEQ ID NO: 47254 - RNA, 20 nt, synthetic construct
  source 1..20: mol_type = other RNA
taatcccgcaccttgatttt

SEQ ID NO: 47255 - RNA, 20 nt, synthetic construct
  source 1..20: mol_type = other RNA
taatcctgtttctctacatc

SEQ ID NO: 47256 - RNA, 20 nt, synthetic construct
  source 1..20: mol_type = other RNA
taatccttagattacaaaag

SEQ ID NO: 47257 - RNA, 20 nt, synthetic construct
  source 1..20: mol_type = other RNA
taatccttctcatagtcttc

SEQ ID NO: 47258 - RNA, 20 nt, synthetic construct
  source 1..20: mol_type = other RNA
taatccttgtggtcttaaga

SEQ ID NO: 47259 - RNA, 20 nt, synthetic construct
  source 1..20: mol_type = other RNA
taatcctttgcacacaccaa

SEQ ID NO: 47260 - RNA, 20 nt, synthetic construct
  source 1..20: mol_type = other RNA
taatcgaatcctcacaacag

SEQ ID NO: 47261 - RNA, 20 nt, synthetic construct
  source 1..20: mol_type = other RNA
taatctaaccctcctcctct

SEQ ID NO: 47262 - RNA, 20 nt, synthetic construct
  source 1..20: mol_type = other RNA
taatctaaggattatggcta

SEQ ID NO: 47263 - RNA, 20 nt, synthetic construct
  source 1..20: mol_type = other RNA
taatctacaaaacagggtta

SEQ ID NO: 47264 - RNA, 20 nt, synthetic construct
  source 1..20: mol_type = other RNA
taatctactttctaatcctt

SEQ ID NO: 47265 - RNA, 20 nt, synthetic construct
  source 1..20: mol_type = other RNA
taatctcaatcagggccttc

SEQ ID NO: 47266 - RNA, 20 nt, synthetic construct
  source 1..20: mol_type = other RNA
taatctcatccacaatgaga

SEQ ID NO: 47267 - RNA, 20 nt, synthetic construct
  source 1..20: mol_type = other RNA
taatctcatggaagttattt

SEQ ID NO: 47268 - RNA, 20 nt, synthetic construct
  source 1..20: mol_type = other RNA
taatctcctgagtagcaggg

SEQ ID NO: 47269 - RNA, 20 nt, synthetic construct
  source 1..20: mol_type = other RNA
taatctctaggcttaaaatt

SEQ ID NO: 47270 - RNA, 20 nt, synthetic construct
  source 1..20: mol_type = other RNA
taatctctcttgaccttagt

SEQ ID NO: 47271 - RNA, 20 nt, synthetic construct
  source 1..20: mol_type = other RNA
taatctcttacacctgttta

SEQ ID NO: 47272 - RNA, 20 nt, synthetic construct
  source 1..20: mol_type = other RNA
taatctgattttaatctgtc

SEQ ID NO: 47273 - RNA, 20 nt, synthetic construct
  source 1..20: mol_type = other RNA
taatctgatttttagtgact

SEQ ID NO: 47274 - RNA, 20 nt, synthetic construct
  source 1..20: mol_type = other RNA
taatctgtcagcagttcagc

SEQ ID NO: 47275 - RNA, 20 nt, synthetic construct
  source 1..20: mol_type = other RNA
taatctgtcctgaatactat

SEQ ID NO: 47276 - RNA, 20 nt, synthetic construct
  source 1..20: mol_type = other RNA
taatcttcacacttagttca

SEQ ID NO: 47277 - RNA, 20 nt, synthetic construct
  source 1..20: mol_type = other RNA
taatcttgcaaaacaatagc

SEQ ID NO: 47278 - RNA, 20 nt, synthetic construct
  source 1..20: mol_type = other RNA
taatcttgctaaacatgtat

SEQ ID NO: 47279 - RNA, 20 nt, synthetic construct
  source 1..20: mol_type = other RNA
taatctttctgaactcaaaa

SEQ ID NO: 47280 - RNA, 20 nt, synthetic construct
  source 1..20: mol_type = other RNA
taatctttggtgctgataaa

SEQ ID NO: 47281 - RNA, 20 nt, synthetic construct
  source 1..20: mol_type = other RNA
taatgaaaattagctggatg

SEQ ID NO: 47282 - RNA, 20 nt, synthetic construct
  source 1..20: mol_type = other RNA
taatgaaagctcccaatgct

SEQ ID NO: 47283 - RNA, 20 nt, synthetic construct
  source 1..20: mol_type = other RNA
taatgaactcccagaactcg

SEQ ID NO: 47284 - RNA, 20 nt, synthetic construct
  source 1..20: mol_type = other RNA
taatgacctggaaattattc

SEQ ID NO: 47285 - RNA, 20 nt, synthetic construct
  source 1..20: mol_type = other RNA
taatgagaatttcagaaaga

SEQ ID NO: 47286 - RNA, 20 nt, synthetic construct
  source 1..20: mol_type = other RNA
taatgagatagaccagatgc

SEQ ID NO: 47287 - RNA, 20 nt, synthetic construct
  source 1..20: mol_type = other RNA
taatgagctgagattgcccc

SEQ ID NO: 47288 - RNA, 20 nt, synthetic construct
  source 1..20: mol_type = other RNA
taatgagtaacatgtggaac

SEQ ID NO: 47289 - RNA, 20 nt, synthetic construct
  source 1..20: mol_type = other RNA
taatgagtagtacttctgag

SEQ ID NO: 47290 - RNA, 20 nt, synthetic construct
  source 1..20: mol_type = other RNA
taatgatgactatgaaaagc

SEQ ID NO: 47291 - RNA, 20 nt, synthetic construct
  source 1..20: mol_type = other RNA
taatgcaacctgctttcctc

SEQ ID NO: 47292 - RNA, 20 nt, synthetic construct
  source 1..20: mol_type = other RNA
taatgcaagagttaaaactc

SEQ ID NO: 47293 - RNA, 20 nt, synthetic construct
  source 1..20: mol_type = other RNA
taatgcacatgggcatgggt

SEQ ID NO: 47294 - RNA, 20 nt, synthetic construct
  source 1..20: mol_type = other RNA
taatgcccaatcaaatccag

SEQ ID NO: 47295 - RNA, 20 nt, synthetic construct
  source 1..20: mol_type = other RNA
taatgcccattaaaaccatg

SEQ ID NO: 47296 - RNA, 20 nt, synthetic construct
  source 1..20: mol_type = other RNA
taatgccccatgtgttggca

SEQ ID NO: 47297 - RNA, 20 nt, synthetic construct
  source 1..20: mol_type = other RNA
taatgcctcaaattagtcat

SEQ ID NO: 47298 - RNA, 20 nt, synthetic construct
  source 1..20: mol_type = other RNA
taatgcgatgatcaaaacca

SEQ ID NO: 47299 - RNA, 20 nt, synthetic construct
  source 1..20: mol_type = other RNA
taatgctatcattttaaagg

SEQ ID NO: 47300 - RNA, 20 nt, synthetic construct
  source 1..20: mol_type = other RNA
taatgctatccagaagagaa

SEQ ID NO: 47301 - RNA, 20 nt, synthetic construct
  source 1..20: mol_type = other RNA
taatgctggccagtgagttc

SEQ ID NO: 47302 - RNA, 20 nt, synthetic construct
  source 1..20: mol_type = other RNA
taatgctggcttcatgggtg

SEQ ID NO: 47303 - RNA, 20 nt, synthetic construct
  source 1..20: mol_type = other RNA
taatgctgttctctgtgtgg

SEQ ID NO: 47304 - RNA, 20 nt, synthetic construct
  source 1..20: mol_type = other RNA
taatgcttcatattttgtgg

SEQ ID NO: 47305 - RNA, 20 nt, synthetic construct
  source 1..20: mol_type = other RNA
taatggaactaagaaaaatg

SEQ ID NO: 47306 - RNA, 20 nt, synthetic construct
  source 1..20: mol_type = other RNA
taatggagtactatgcagca

SEQ ID NO: 47307 - RNA, 20 nt, synthetic construct
  source 1..20: mol_type = other RNA
taatggatcaaggcacagtc

SEQ ID NO: 47308 - RNA, 20 nt, synthetic construct
  source 1..20: mol_type = other RNA
taatggatgtttttagagag

SEQ ID NO: 47309 - RNA, 20 nt, synthetic construct
  source 1..20: mol_type = other RNA
taatgggaaagacaggtaga

SEQ ID NO: 47310 - RNA, 20 nt, synthetic construct
  source 1..20: mol_type = other RNA
taatgggcaatcagaaaaaa

SEQ ID NO: 47311 - RNA, 20 nt, synthetic construct
  source 1..20: mol_type = other RNA
taatgggcacttgggatgtt

SEQ ID NO: 47312 - RNA, 20 nt, synthetic construct
  source 1..20: mol_type = other RNA
taatgggcattagaagttaa

SEQ ID NO: 47313 - RNA, 20 nt, synthetic construct
  source 1..20: mol_type = other RNA
taatgggcgtggagcggtgt

SEQ ID NO: 47314 - RNA, 20 nt, synthetic construct
  source 1..20: mol_type = other RNA
taatggggaaatagatgcct

SEQ ID NO: 47315 - RNA, 20 nt, synthetic construct
  source 1..20: mol_type = other RNA
taatgggtacagggtttctg

SEQ ID NO: 47316 - RNA, 20 nt, synthetic construct
  source 1..20: mol_type = other RNA
taatggtccttgctgaagaa

SEQ ID NO: 47317 - RNA, 20 nt, synthetic construct
  source 1..20: mol_type = other RNA
taatggttagactgcacata

SEQ ID NO: 47318 - RNA, 20 nt, synthetic construct
  source 1..20: mol_type = other RNA
taatggttggccgaggccag

SEQ ID NO: 47319 - RNA, 20 nt, synthetic construct
  source 1..20: mol_type = other RNA
taatgtaaacagcatactgt

SEQ ID NO: 47320 - RNA, 20 nt, synthetic construct
  source 1..20: mol_type = other RNA
taatgtagatcctgaggaag

SEQ ID NO: 47321 - RNA, 20 nt, synthetic construct
  source 1..20: mol_type = other RNA
taatgtaggtgtctgatgtg

SEQ ID NO: 47322 - RNA, 20 nt, synthetic construct
  source 1..20: mol_type = other RNA
taatgtcacattttcttatc

SEQ ID NO: 47323 - RNA, 20 nt, synthetic construct
  source 1..20: mol_type = other RNA
taatgtccagaggaggaaga

SEQ ID NO: 47324 - RNA, 20 nt, synthetic construct
  source 1..20: mol_type = other RNA
taatgtccttttcctgttcc

SEQ ID NO: 47325 - RNA, 20 nt, synthetic construct
  source 1..20: mol_type = other RNA
taatgtctcctctttcatat

SEQ ID NO: 47326 - RNA, 20 nt, synthetic construct
  source 1..20: mol_type = other RNA
taatgtctttttacacttgg

SEQ ID NO: 47327 - RNA, 20 nt, synthetic construct
  source 1..20: mol_type = other RNA
taatgtgatatgccacattt

SEQ ID NO: 47328 - RNA, 20 nt, synthetic construct
  source 1..20: mol_type = other RNA
taatgtgcaaggagagaaaa

SEQ ID NO: 47329 - RNA, 20 nt, synthetic construct
  source 1..20: mol_type = other RNA
taatgtgctgtccatttcct

SEQ ID NO: 47330 - RNA, 20 nt, synthetic construct
  source 1..20: mol_type = other RNA
taatgtggcttgcaaggccc

SEQ ID NO: 47331 - RNA, 20 nt, synthetic construct
  source 1..20: mol_type = other RNA
taatgtgtaagaaatgccac

SEQ ID NO: 47332 - RNA, 20 nt, synthetic construct
  source 1..20: mol_type = other RNA
taatgtgtgaagaaggaatg

SEQ ID NO: 47333 - RNA, 20 nt, synthetic construct
  source 1..20: mol_type = other RNA
taatgtgtgttccagacaaa

SEQ ID NO: 47334 - RNA, 20 nt, synthetic construct
  source 1..20: mol_type = other RNA
taatgtgttgtctgattcag

SEQ ID NO: 47335 - RNA, 20 nt, synthetic construct
  source 1..20: mol_type = other RNA
taatgttacttctcagctat

SEQ ID NO: 47336 - RNA, 20 nt, synthetic construct
  source 1..20: mol_type = other RNA
taatgttagaattcaggaca

SEQ ID NO: 47337 - RNA, 20 nt, synthetic construct
  source 1..20: mol_type = other RNA
taatgttatatttccgtatc

SEQ ID NO: 47338 - RNA, 20 nt, synthetic construct
  source 1..20: mol_type = other RNA
taatgttatgaagcttttct

SEQ ID NO: 47339 - RNA, 20 nt, synthetic construct
  source 1..20: mol_type = other RNA
taatgttgacatcttgcata

SEQ ID NO: 47340 - RNA, 20 nt, synthetic construct
  source 1..20: mol_type = other RNA
taatgtttagtagaattctc

SEQ ID NO: 47341 - RNA, 20 nt, synthetic construct
  source 1..20: mol_type = other RNA
taatgtttgtacttctacct

SEQ ID NO: 47342 - RNA, 20 nt, synthetic construct
  source 1..20: mol_type = other RNA
taatgttttatttagcccat

SEQ ID NO: 47343 - RNA, 20 nt, synthetic construct
  source 1..20: mol_type = other RNA
taatgttttccgtgtgacaa

SEQ ID NO: 47344 - RNA, 20 nt, synthetic construct
  source 1..20: mol_type = other RNA
taattaacactatgtgttga

SEQ ID NO: 47345 - RNA, 20 nt, synthetic construct
  source 1..20: mol_type = other RNA
taattaagacaatgtggagt

SEQ ID NO: 47346 - RNA, 20 nt, synthetic construct
  source 1..20: mol_type = other RNA
taattacaataatgcacatg

SEQ ID NO: 47347 - RNA, 20 nt, synthetic construct
  source 1..20: mol_type = other RNA
taattacaatggaaatgaag

SEQ ID NO: 47348 - RNA, 20 nt, synthetic construct
  source 1..20: mol_type = other RNA
taattacaggggactttgat

SEQ ID NO: 47349 - RNA, 20 nt, synthetic construct
  source 1..20: mol_type = other RNA
taattacatacttcaaaggg

SEQ ID NO: 47350 - RNA, 20 nt, synthetic construct
  source 1..20: mol_type = other RNA
taattacccaggcatgatgg

SEQ ID NO: 47351 - RNA, 20 nt, synthetic construct
  source 1..20: mol_type = other RNA
taattactgtttcttagcta

SEQ ID NO: 47352 - RNA, 20 nt, synthetic construct
  source 1..20: mol_type = other RNA
taattagaaactggtgaact

SEQ ID NO: 47353 - RNA, 20 nt, synthetic construct
  source 1..20: mol_type = other RNA
taattagccgggtgtagtgg

SEQ ID NO: 47354 - RNA, 20 nt, synthetic construct
  source 1..20: mol_type = other RNA
taattagttacatgaggtca

SEQ ID NO: 47355 - RNA, 20 nt, synthetic construct
  source 1..20: mol_type = other RNA
taattatgagcattccccac

SEQ ID NO: 47356 - RNA, 20 nt, synthetic construct
  source 1..20: mol_type = other RNA
taattatttgtgcatactgt

SEQ ID NO: 47357 - RNA, 20 nt, synthetic construct
  source 1..20: mol_type = other RNA
taattcaattttcatgggtt

SEQ ID NO: 47358 - RNA, 20 nt, synthetic construct
  source 1..20: mol_type = other RNA
taattcacatttaagaaggg

SEQ ID NO: 47359 - RNA, 20 nt, synthetic construct
  source 1..20: mol_type = other RNA
taattcagtcaacaccaagc

SEQ ID NO: 47360 - RNA, 20 nt, synthetic construct
  source 1..20: mol_type = other RNA
taattcatcctactagtatt

SEQ ID NO: 47361 - RNA, 20 nt, synthetic construct
  source 1..20: mol_type = other RNA
taattcattgtacatgaagt

SEQ ID NO: 47362 - RNA, 20 nt, synthetic construct
  source 1..20: mol_type = other RNA
taattccaaattagctttct

SEQ ID NO: 47363 - RNA, 20 nt, synthetic construct
  source 1..20: mol_type = other RNA
taattccacaaccactgggg

SEQ ID NO: 47364 - RNA, 20 nt, synthetic construct
  source 1..20: mol_type = other RNA
taattcctactttcttcaac

SEQ ID NO: 47365 - RNA, 20 nt, synthetic construct
  source 1..20: mol_type = other RNA
taattcgaaaatgggccaaa

SEQ ID NO: 47366 - RNA, 20 nt, synthetic construct
  source 1..20: mol_type = other RNA
taattctaattagaaactgg

SEQ ID NO: 47367 - RNA, 20 nt, synthetic construct
  source 1..20: mol_type = other RNA
taattctatctgaactttcg

SEQ ID NO: 47368 - RNA, 20 nt, synthetic construct
  source 1..20: mol_type = other RNA
taattctccactttcatgat

SEQ ID NO: 47369 - RNA, 20 nt, synthetic construct
  source 1..20: mol_type = other RNA
taattctgacaactgggaga

SEQ ID NO: 47370 - RNA, 20 nt, synthetic construct
  source 1..20: mol_type = other RNA
taattctgaggcctcctgcc

SEQ ID NO: 47371 - RNA, 20 nt, synthetic construct
  source 1..20: mol_type = other RNA
taattctgccttcaatgttt

SEQ ID NO: 47372 - RNA, 20 nt, synthetic construct
  source 1..20: mol_type = other RNA
taattctgtgccaagcaact

SEQ ID NO: 47373 - RNA, 20 nt, synthetic construct
  source 1..20: mol_type = other RNA
taattctgtttacccttact

SEQ ID NO: 47374 - RNA, 20 nt, synthetic construct
  source 1..20: mol_type = other RNA
taattcttaaactgccaaac

SEQ ID NO: 47375 - RNA, 20 nt, synthetic construct
  source 1..20: mol_type = other RNA
taattcttcctgtcttggac

SEQ ID NO: 47376 - RNA, 20 nt, synthetic construct
  source 1..20: mol_type = other RNA
taattcttttgctgtatacc

SEQ ID NO: 47377 - RNA, 20 nt, synthetic construct
  source 1..20: mol_type = other RNA
taattgaacccactgagcat

SEQ ID NO: 47378 - RNA, 20 nt, synthetic construct
  source 1..20: mol_type = other RNA
taattgagagctttctttta

SEQ ID NO: 47379 - RNA, 20 nt, synthetic construct
  source 1..20: mol_type = other RNA
taattgagctgtccccaccg

SEQ ID NO: 47380 - RNA, 20 nt, synthetic construct
  source 1..20: mol_type = other RNA
taattgctgcagtttttcca

SEQ ID NO: 47381 - RNA, 20 nt, synthetic construct
  source 1..20: mol_type = other RNA
taattgcttttgctgaggga

SEQ ID NO: 47382 - RNA, 20 nt, synthetic construct
  source 1..20: mol_type = other RNA
taattgggatctgataaatt

SEQ ID NO: 47383 - RNA, 20 nt, synthetic construct
  source 1..20: mol_type = other RNA
taattgggggaaaattgaca

SEQ ID NO: 47384 - RNA, 20 nt, synthetic construct
  source 1..20: mol_type = other RNA
taattggttaaacttggtct

SEQ ID NO: 47385 - RNA, 20 nt, synthetic construct
  source 1..20: mol_type = other RNA
taattggttcgtttgaggct

SEQ ID NO: 47386 - RNA, 20 nt, synthetic construct
  source 1..20: mol_type = other RNA
taattgtacacctcaaacta

SEQ ID NO: 47387 - RNA, 20 nt, synthetic construct
  source 1..20: mol_type = other RNA
taattgtaccttggagagaa

SEQ ID NO: 47388 - RNA, 20 nt, synthetic construct
  source 1..20: mol_type = other RNA
taattgtagtttccatggag

SEQ ID NO: 47389 - RNA, 20 nt, synthetic construct
  source 1..20: mol_type = other RNA
taattgtttgttgggtttaa

SEQ ID NO: 47390 - RNA, 20 nt, synthetic construct
  source 1..20: mol_type = other RNA
taattgttttcccttttgta

SEQ ID NO: 47391 - RNA, 20 nt, synthetic construct
  source 1..20: mol_type = other RNA
taatttacatagtgctcttc

SEQ ID NO: 47392 - RNA, 20 nt, synthetic construct
  source 1..20: mol_type = other RNA
taatttacccacaaaagaaa

SEQ ID NO: 47393 - RNA, 20 nt, synthetic construct
  source 1..20: mol_type = other RNA
taatttagatgagagtggcc

SEQ ID NO: 47394 - RNA, 20 nt, synthetic construct
  source 1..20: mol_type = other RNA
taatttagcgttcatccaaa

SEQ ID NO: 47395 - RNA, 20 nt, synthetic construct
  source 1..20: mol_type = other RNA
taatttatcagatcccaatt

SEQ ID NO: 47396 - RNA, 20 nt, synthetic construct
  source 1..20: mol_type = other RNA
taatttatctccataagtcc

SEQ ID NO: 47397 - RNA, 20 nt, synthetic construct
  source 1..20: mol_type = other RNA
taatttcagagagacctgaa

SEQ ID NO: 47398 - RNA, 20 nt, synthetic construct
  source 1..20: mol_type = other RNA
taatttcatacaagttgtga

SEQ ID NO: 47399 - RNA, 20 nt, synthetic construct
  source 1..20: mol_type = other RNA
taatttccaagaaccctttg

SEQ ID NO: 47400 - RNA, 20 nt, synthetic construct
  source 1..20: mol_type = other RNA
taatttccacccatgaagcc

SEQ ID NO: 47401 - RNA, 20 nt, synthetic construct
  source 1..20: mol_type = other RNA
taatttccaggtcattacat

SEQ ID NO: 47402 - RNA, 20 nt, synthetic construct
  source 1..20: mol_type = other RNA
taatttccctcagaatttga

SEQ ID NO: 47403 - RNA, 20 nt, synthetic construct
  source 1..20: mol_type = other RNA
taatttctgagagtattgcc

SEQ ID NO: 47404 - RNA, 20 nt, synthetic construct
  source 1..20: mol_type = other RNA
taatttctttaaaaccagag

SEQ ID NO: 47405 - RNA, 20 nt, synthetic construct
  source 1..20: mol_type = other RNA
taatttgaggcattagtgaa

SEQ ID NO: 47406 - RNA, 20 nt, synthetic construct
  source 1..20: mol_type = other RNA
taatttgaggtctaggctaa

SEQ ID NO: 47407 - RNA, 20 nt, synthetic construct
  source 1..20: mol_type = other RNA
taatttggatgaacgctaaa

SEQ ID NO: 47408 - RNA, 20 nt, synthetic construct
  source 1..20: mol_type = other RNA
taatttggcaaaaaatgcag

SEQ ID NO: 47409 - RNA, 20 nt, synthetic construct
  source 1..20: mol_type = other RNA
taatttggcttggggaacag

SEQ ID NO: 47410 - RNA, 20 nt, synthetic construct
  source 1..20: mol_type = other RNA
taatttgggtttgagtttcc

SEQ ID NO: 47411 - RNA, 20 nt, synthetic construct
  source 1..20: mol_type = other RNA
taatttggttatgcgaattt

SEQ ID NO: 47412 - RNA, 20 nt, synthetic construct
  source 1..20: mol_type = other RNA
taatttgtccatctggatta

SEQ ID NO: 47413 - RNA, 20 nt, synthetic construct
  source 1..20: mol_type = other RNA
taatttgtgaaccttgaagt

SEQ ID NO: 47414 - RNA, 20 nt, synthetic construct
  source 1..20: mol_type = other RNA
taattttctgactctgtgct

SEQ ID NO: 47415 - RNA, 20 nt, synthetic construct
  source 1..20: mol_type = other RNA
taattttgagagtgcagtat

SEQ ID NO: 47416 - RNA, 20 nt, synthetic construct
  source 1..20: mol_type = other RNA
taattttggggccatctgaa

SEQ ID NO: 47417 - RNA, 20 nt, synthetic construct
  source 1..20: mol_type = other RNA
taatttttaaaagagcgaag

SEQ ID NO: 47418 - RNA, 20 nt, synthetic construct
  source 1..20: mol_type = other RNA
taatttttgtcaagtgactc

SEQ ID NO: 47419 - RNA, 20 nt, synthetic construct
  source 1..20: mol_type = other RNA
taattttttgagacggaatc

SEQ ID NO: 47420 - RNA, 20 nt, synthetic construct
  source 1..20: mol_type = other RNA
tacaaaaacacactgagctt

SEQ ID NO: 47421 - RNA, 20 nt, synthetic construct
  source 1..20: mol_type = other RNA
tacaaaaagcacctaccata

SEQ ID NO: 47422 - RNA, 20 nt, synthetic construct
  source 1..20: mol_type = other RNA
tacaaaaagtgataccataa

SEQ ID NO: 47423 - RNA, 20 nt, synthetic construct
  source 1..20: mol_type = other RNA
tacaaaaatgacacaactta

SEQ ID NO: 47424 - RNA, 20 nt, synthetic construct
  source 1..20: mol_type = other RNA
tacaaaacagggttattaac

SEQ ID NO: 47425 - RNA, 20 nt, synthetic construct
  source 1..20: mol_type = other RNA
tacaaaagaacaggactttt

SEQ ID NO: 47426 - RNA, 20 nt, synthetic construct
  source 1..20: mol_type = other RNA
tacaaaagatcatttcaaac

SEQ ID NO: 47427 - RNA, 20 nt, synthetic construct
  source 1..20: mol_type = other RNA
tacaaaaggaggaactaatt

SEQ ID NO: 47428 - RNA, 20 nt, synthetic construct
  source 1..20: mol_type = other RNA
tacaaaagggaaaacaatta

SEQ ID NO: 47429 - RNA, 20 nt, synthetic construct
  source 1..20: mol_type = other RNA
tacaaaaggtttccagtggc

SEQ ID NO: 47430 - RNA, 20 nt, synthetic construct
  source 1..20: mol_type = other RNA
tacaaaagtgctgttgaggc

SEQ ID NO: 47431 - RNA, 20 nt, synthetic construct
  source 1..20: mol_type = other RNA
tacaaaataggcagtcctct

SEQ ID NO: 47432 - RNA, 20 nt, synthetic construct
  source 1..20: mol_type = other RNA
tacaaaatatgtaatgacct

SEQ ID NO: 47433 - RNA, 20 nt, synthetic construct
  source 1..20: mol_type = other RNA
tacaaacatatgcatgttat

SEQ ID NO: 47434 - RNA, 20 nt, synthetic construct
  source 1..20: mol_type = other RNA
tacaaaccaaaaaatgtggc

SEQ ID NO: 47435 - RNA, 20 nt, synthetic construct
  source 1..20: mol_type = other RNA
tacaaaccttcttatttcct

SEQ ID NO: 47436 - RNA, 20 nt, synthetic construct
  source 1..20: mol_type = other RNA
tacaaactccaaacctttaa

SEQ ID NO: 47437 - RNA, 20 nt, synthetic construct
  source 1..20: mol_type = other RNA
tacaaagatttacccctact

SEQ ID NO: 47438 - RNA, 20 nt, synthetic construct
  source 1..20: mol_type = other RNA
tacaaaggtgttaagccgtt

SEQ ID NO: 47439 - RNA, 20 nt, synthetic construct
  source 1..20: mol_type = other RNA
tacaaataactccagctttt

SEQ ID NO: 47440 - RNA, 20 nt, synthetic construct
  source 1..20: mol_type = other RNA
tacaaatgaaagtcagctaa

SEQ ID NO: 47441 - RNA, 20 nt, synthetic construct
  source 1..20: mol_type = other RNA
tacaaatgatgaagggtttt

SEQ ID NO: 47442 - RNA, 20 nt, synthetic construct
  source 1..20: mol_type = other RNA
tacaacagcaaggctcctgc

SEQ ID NO: 47443 - RNA, 20 nt, synthetic construct
  source 1..20: mol_type = other RNA
tacaacagcaccttttttgg

SEQ ID NO: 47444 - RNA, 20 nt, synthetic construct
  source 1..20: mol_type = other RNA
tacaacattcatccctctaa

SEQ ID NO: 47445 - RNA, 20 nt, synthetic construct
  source 1..20: mol_type = other RNA
tacaaccggaaaatgcttaa

SEQ ID NO: 47446 - RNA, 20 nt, synthetic construct
  source 1..20: mol_type = other RNA
tacaactactcgggaggctg

SEQ ID NO: 47447 - RNA, 20 nt, synthetic construct
  source 1..20: mol_type = other RNA
tacaactctaataacagcct

SEQ ID NO: 47448 - RNA, 20 nt, synthetic construct
  source 1..20: mol_type = other RNA
tacaactctgaccattgtgt

SEQ ID NO: 47449 - RNA, 20 nt, synthetic construct
  source 1..20: mol_type = other RNA
tacaactgctcataatagtc

SEQ ID NO: 47450 - RNA, 20 nt, synthetic construct
  source 1..20: mol_type = other RNA
tacaactggtttctgcatac

SEQ ID NO: 47451 - RNA, 20 nt, synthetic construct
  source 1..20: mol_type = other RNA
tacaagagttcccctatact

SEQ ID NO: 47452 - RNA, 20 nt, synthetic construct
  source 1..20: mol_type = other RNA
tacaaggagacctactaaaa

SEQ ID NO: 47453 - RNA, 20 nt, synthetic construct
  source 1..20: mol_type = other RNA
tacaaggattgaatggaaag

SEQ ID NO: 47454 - RNA, 20 nt, synthetic construct
  source 1..20: mol_type = other RNA
tacaaggctagagctcacac

SEQ ID NO: 47455 - RNA, 20 nt, synthetic construct
  source 1..20: mol_type = other RNA
tacaagggtgacagagccga

SEQ ID NO: 47456 - RNA, 20 nt, synthetic construct
  source 1..20: mol_type = other RNA
tacaaggtcaatctgaaaaa

SEQ ID NO: 47457 - RNA, 20 nt, synthetic construct
  source 1..20: mol_type = other RNA
tacaagtacatgaaatactc

SEQ ID NO: 47458 - RNA, 20 nt, synthetic construct
  source 1..20: mol_type = other RNA
tacaataatatgcctcatgc

SEQ ID NO: 47459 - RNA, 20 nt, synthetic construct
  source 1..20: mol_type = other RNA
tacaataatgcacatgggca

SEQ ID NO: 47460 - RNA, 20 nt, synthetic construct
  source 1..20: mol_type = other RNA
tacaatacttggatcttatc

SEQ ID NO: 47461 - RNA, 20 nt, synthetic construct
  source 1..20: mol_type = other RNA
tacaatagtttagttactca

SEQ ID NO: 47462 - RNA, 20 nt, synthetic construct
  source 1..20: mol_type = other RNA
tacaatattacagtaaggtt

SEQ ID NO: 47463 - RNA, 20 nt, synthetic construct
  source 1..20: mol_type = other RNA
tacaatgaatatgtactacc

SEQ ID NO: 47464 - RNA, 20 nt, synthetic construct
  source 1..20: mol_type = other RNA
tacaatgaattagcaatgcg

SEQ ID NO: 47465 - RNA, 20 nt, synthetic construct
  source 1..20: mol_type = other RNA
tacaatggaaatgaagtatt

SEQ ID NO: 47466 - RNA, 20 nt, synthetic construct
  source 1..20: mol_type = other RNA
tacaatggggctttactgta

SEQ ID NO: 47467 - RNA, 20 nt, synthetic construct
  source 1..20: mol_type = other RNA
tacaatggttgaactagttt

SEQ ID NO: 47468 - RNA, 20 nt, synthetic construct
  source 1..20: mol_type = other RNA
tacaatgtaaggtgcacgct

SEQ ID NO: 47469 - RNA, 20 nt, synthetic construct
  source 1..20: mol_type = other RNA
tacaatgtgagccacataca

SEQ ID NO: 47470 - RNA, 20 nt, synthetic construct
  source 1..20: mol_type = other RNA
tacaattacacatctcccat

SEQ ID NO: 47471 - RNA, 20 nt, synthetic construct
  source 1..20: mol_type = other RNA
tacaattactgtacaaagat

SEQ ID NO: 47472 - RNA, 20 nt, synthetic construct
  source 1..20: mol_type = other RNA
tacaattaggctgtttgaga

SEQ ID NO: 47473 - RNA, 20 nt, synthetic construct
  source 1..20: mol_type = other RNA
tacaattcctttctaggcat

SEQ ID NO: 47474 - RNA, 20 nt, synthetic construct
  source 1..20: mol_type = other RNA
tacaattcggtggcattaag

SEQ ID NO: 47475 - RNA, 20 nt, synthetic construct
  source 1..20: mol_type = other RNA
tacaattgataccatgaaaa

SEQ ID NO: 47476 - RNA, 20 nt, synthetic construct
  source 1..20: mol_type = other RNA
tacaattttcttacccttta

SEQ ID NO: 47477 - RNA, 20 nt, synthetic construct
  source 1..20: mol_type = other RNA
tacacaaaaagatctgtgga

SEQ ID NO: 47478 - RNA, 20 nt, synthetic construct
  source 1..20: mol_type = other RNA
tacacaaaaatccagataaa

SEQ ID NO: 47479 - RNA, 20 nt, synthetic construct
  source 1..20: mol_type = other RNA
tacacaacatgttttatttc

SEQ ID NO: 47480 - RNA, 20 nt, synthetic construct
  source 1..20: mol_type = other RNA
tacacaagatctctatgcag

SEQ ID NO: 47481 - RNA, 20 nt, synthetic construct
  source 1..20: mol_type = other RNA
tacacaagtattaacgaatt

SEQ ID NO: 47482 - RNA, 20 nt, synthetic construct
  source 1..20: mol_type = other RNA
tacacaagtgtttcatttac

SEQ ID NO: 47483 - RNA, 20 nt, synthetic construct
  source 1..20: mol_type = other RNA
tacacacacctaccaccatg

SEQ ID NO: 47484 - RNA, 20 nt, synthetic construct
  source 1..20: mol_type = other RNA
tacacacacgtttatattcc

SEQ ID NO: 47485 - RNA, 20 nt, synthetic construct
  source 1..20: mol_type = other RNA
tacacacataagggggaatc

SEQ ID NO: 47486 - RNA, 20 nt, synthetic construct
  source 1..20: mol_type = other RNA
tacacacctgaaattctcaa

SEQ ID NO: 47487 - RNA, 20 nt, synthetic construct
  source 1..20: mol_type = other RNA
tacacagaaagcctcttcag

SEQ ID NO: 47488 - RNA, 20 nt, synthetic construct
  source 1..20: mol_type = other RNA
tacacagacatgaacaatcc

SEQ ID NO: 47489 - RNA, 20 nt, synthetic construct
  source 1..20: mol_type = other RNA
tacacagggaaaactacatg

SEQ ID NO: 47490 - RNA, 20 nt, synthetic construct
  source 1..20: mol_type = other RNA
tacacaggtagacatgtgcc

SEQ ID NO: 47491 - RNA, 20 nt, synthetic construct
  source 1..20: mol_type = other RNA
tacacatacacagggaaaac

SEQ ID NO: 47492 - RNA, 20 nt, synthetic construct
  source 1..20: mol_type = other RNA
tacacatatctttaggtgtt

SEQ ID NO: 47493 - RNA, 20 nt, synthetic construct
  source 1..20: mol_type = other RNA
tacacatcagtgctgctctg

SEQ ID NO: 47494 - RNA, 20 nt, synthetic construct
  source 1..20: mol_type = other RNA
tacacatccagaagtcactt

SEQ ID NO: 47495 - RNA, 20 nt, synthetic construct
  source 1..20: mol_type = other RNA
tacacatcctaatacagtaa

SEQ ID NO: 47496 - RNA, 20 nt, synthetic construct
  source 1..20: mol_type = other RNA
tacacatctcccataccacc

SEQ ID NO: 47497 - RNA, 20 nt, synthetic construct
  source 1..20: mol_type = other RNA
tacacatgtcagccacaaga

SEQ ID NO: 47498 - RNA, 20 nt, synthetic construct
  source 1..20: mol_type = other RNA
tacacatgttgagtcttgtt

SEQ ID NO: 47499 - RNA, 20 nt, synthetic construct
  source 1..20: mol_type = other RNA
tacacattaggctctgggtc

SEQ ID NO: 47500 - RNA, 20 nt, synthetic construct
  source 1..20: mol_type = other RNA
tacacattccagaccagcag

SEQ ID NO: 47501 - RNA, 20 nt, synthetic construct
  source 1..20: mol_type = other RNA
tacaccaaactcaaaaggac

SEQ ID NO: 47502 - RNA, 20 nt, synthetic construct
  source 1..20: mol_type = other RNA
tacaccatgcaggttcatgt

SEQ ID NO: 47503 - RNA, 20 nt, synthetic construct
  source 1..20: mol_type = other RNA
tacacccagttcaccagttt

SEQ ID NO: 47504 - RNA, 20 nt, synthetic construct
  source 1..20: mol_type = other RNA
tacacccatccacccacttg

SEQ ID NO: 47505 - RNA, 20 nt, synthetic construct
  source 1..20: mol_type = other RNA
tacacccggctaattaaaca

SEQ ID NO: 47506 - RNA, 20 nt, synthetic construct
  source 1..20: mol_type = other RNA
tacaccctaggtagggttgg

SEQ ID NO: 47507 - RNA, 20 nt, synthetic construct
  source 1..20: mol_type = other RNA
tacaccctgggaaagcctgg

SEQ ID NO: 47508 - RNA, 20 nt, synthetic construct
  source 1..20: mol_type = other RNA
tacacctcaaactagaaaaa

SEQ ID NO: 47509 - RNA, 20 nt, synthetic construct
  source 1..20: mol_type = other RNA
tacacctggatcaagtggga

SEQ ID NO: 47510 - RNA, 20 nt, synthetic construct
  source 1..20: mol_type = other RNA
tacacctgtttaaaaagaaa

SEQ ID NO: 47511 - RNA, 20 nt, synthetic construct
  source 1..20: mol_type = other RNA
tacacgaaaatatccctggg

SEQ ID NO: 47512 - RNA, 20 nt, synthetic construct
  source 1..20: mol_type = other RNA
tacacgagtgtgtttcgcaa

SEQ ID NO: 47513 - RNA, 20 nt, synthetic construct
  source 1..20: mol_type = other RNA
tacacgccttcgcgggcacc

SEQ ID NO: 47514 - RNA, 20 nt, synthetic construct
  source 1..20: mol_type = other RNA
tacacgtatttatattttgg

SEQ ID NO: 47515 - RNA, 20 nt, synthetic construct
  source 1..20: mol_type = other RNA
tacacgtcttgtcaataatt

SEQ ID NO: 47516 - RNA, 20 nt, synthetic construct
  source 1..20: mol_type = other RNA
tacacgtggctgtcaaaaat

SEQ ID NO: 47517 - RNA, 20 nt, synthetic construct
  source 1..20: mol_type = other RNA
tacacgttacaaaatatgta

SEQ ID NO: 47518 - RNA, 20 nt, synthetic construct
  source 1..20: mol_type = other RNA
tacactatggcttttgagtg

SEQ ID NO: 47519 - RNA, 20 nt, synthetic construct
  source 1..20: mol_type = other RNA
tacactcaaaagccatagtg

SEQ ID NO: 47520 - RNA, 20 nt, synthetic construct
  source 1..20: mol_type = other RNA
tacactcaatacacgtggct

SEQ ID NO: 47521 - RNA, 20 nt, synthetic construct
  source 1..20: mol_type = other RNA
tacactcatttcctttcagt

SEQ ID NO: 47522 - RNA, 20 nt, synthetic construct
  source 1..20: mol_type = other RNA
tacactgaagggaattttac

SEQ ID NO: 47523 - RNA, 20 nt, synthetic construct
  source 1..20: mol_type = other RNA
tacactgttgatttagaaat

SEQ ID NO: 47524 - RNA, 20 nt, synthetic construct
  source 1..20: mol_type = other RNA
tacacttccagtacatctca

SEQ ID NO: 47525 - RNA, 20 nt, synthetic construct
  source 1..20: mol_type = other RNA
tacacttctatccagtgaca

SEQ ID NO: 47526 - RNA, 20 nt, synthetic construct
  source 1..20: mol_type = other RNA
tacacttggagttttccccc

SEQ ID NO: 47527 - RNA, 20 nt, synthetic construct
  source 1..20: mol_type = other RNA
tacacttttcaggtattgag

SEQ ID NO: 47528 - RNA, 20 nt, synthetic construct
  source 1..20: mol_type = other RNA
tacagaaaaaattagccttt

SEQ ID NO: 47529 - RNA, 20 nt, synthetic construct
  source 1..20: mol_type = other RNA
tacagaaaacccttcatcat

SEQ ID NO: 47530 - RNA, 20 nt, synthetic construct
  source 1..20: mol_type = other RNA
tacagaaataaaacatgttg

SEQ ID NO: 47531 - RNA, 20 nt, synthetic construct
  source 1..20: mol_type = other RNA
tacagaaatataccttatgt

SEQ ID NO: 47532 - RNA, 20 nt, synthetic construct
  source 1..20: mol_type = other RNA
tacagaactgctaatggtcc

SEQ ID NO: 47533 - RNA, 20 nt, synthetic construct
  source 1..20: mol_type = other RNA
tacagaagaattaaaatctc

SEQ ID NO: 47534 - RNA, 20 nt, synthetic construct
  source 1..20: mol_type = other RNA
tacagaatgttcaagtattt

SEQ ID NO: 47535 - RNA, 20 nt, synthetic construct
  source 1..20: mol_type = other RNA
tacagacatgccacaccaca

SEQ ID NO: 47536 - RNA, 20 nt, synthetic construct
  source 1..20: mol_type = other RNA
tacagaccttattcaaataa

SEQ ID NO: 47537 - RNA, 20 nt, synthetic construct
  source 1..20: mol_type = other RNA
tacagactaatatgagttcc

SEQ ID NO: 47538 - RNA, 20 nt, synthetic construct
  source 1..20: mol_type = other RNA
tacagactcaataaccacat

SEQ ID NO: 47539 - RNA, 20 nt, synthetic construct
  source 1..20: mol_type = other RNA
tacagactgattaatttgag

SEQ ID NO: 47540 - RNA, 20 nt, synthetic construct
  source 1..20: mol_type = other RNA
tacagagcacagactcaagc

SEQ ID NO: 47541 - RNA, 20 nt, synthetic construct
  source 1..20: mol_type = other RNA
tacagaggattttggattgc

SEQ ID NO: 47542 - RNA, 20 nt, synthetic construct
  source 1..20: mol_type = other RNA
tacagataaccaataagaag

SEQ ID NO: 47543 - RNA, 20 nt, synthetic construct
  source 1..20: mol_type = other RNA
tacagatatcacccagacca

SEQ ID NO: 47544 - RNA, 20 nt, synthetic construct
  source 1..20: mol_type = other RNA
tacagattcaatgcaatact

SEQ ID NO: 47545 - RNA, 20 nt, synthetic construct
  source 1..20: mol_type = other RNA
tacagcaaaagaattaaact

SEQ ID NO: 47546 - RNA, 20 nt, synthetic construct
  source 1..20: mol_type = other RNA
tacagcaaatctctagaact

SEQ ID NO: 47547 - RNA, 20 nt, synthetic construct
  source 1..20: mol_type = other RNA
tacagcagatctgcttgcag

SEQ ID NO: 47548 - RNA, 20 nt, synthetic construct
  source 1..20: mol_type = other RNA
tacagcagctctagcaaaca

SEQ ID NO: 47549 - RNA, 20 nt, synthetic construct
  source 1..20: mol_type = other RNA
tacagcatattagctgtctg

SEQ ID NO: 47550 - RNA, 20 nt, synthetic construct
  source 1..20: mol_type = other RNA
tacagcatttcagccaaagc

SEQ ID NO: 47551 - RNA, 20 nt, synthetic construct
  source 1..20: mol_type = other RNA
tacagccatcaacctaatga

SEQ ID NO: 47552 - RNA, 20 nt, synthetic construct
  source 1..20: mol_type = other RNA
tacagctccaaagaacagga

SEQ ID NO: 47553 - RNA, 20 nt, synthetic construct
  source 1..20: mol_type = other RNA
tacagctcttctcagttgca

SEQ ID NO: 47554 - RNA, 20 nt, synthetic construct
  source 1..20: mol_type = other RNA
tacaggaagagactatctct

SEQ ID NO: 47555 - RNA, 20 nt, synthetic construct
  source 1..20: mol_type = other RNA
tacaggagttccgatttctc

SEQ ID NO: 47556 - RNA, 20 nt, synthetic construct
  source 1..20: mol_type = other RNA
tacaggatatcagaagtgct

SEQ ID NO: 47557 - RNA, 20 nt, synthetic construct
  source 1..20: mol_type = other RNA
tacaggcatgagccactgcg

SEQ ID NO: 47558 - RNA, 20 nt, synthetic construct
  source 1..20: mol_type = other RNA
tacaggcatgagtcgccata

SEQ ID NO: 47559 - RNA, 20 nt, synthetic construct
  source 1..20: mol_type = other RNA
tacaggcgcacgccatctcg

SEQ ID NO: 47560 - RNA, 20 nt, synthetic construct
  source 1..20: mol_type = other RNA
tacaggcgtgagccacctca

SEQ ID NO: 47561 - RNA, 20 nt, synthetic construct
  source 1..20: mol_type = other RNA
tacagggaaccgtaacttct

SEQ ID NO: 47562 - RNA, 20 nt, synthetic construct
  source 1..20: mol_type = other RNA
tacaggggactttgatgttt

SEQ ID NO: 47563 - RNA, 20 nt, synthetic construct
  source 1..20: mol_type = other RNA
tacaggggcattccctgtct

SEQ ID NO: 47564 - RNA, 20 nt, synthetic construct
  source 1..20: mol_type = other RNA
tacagggtttctgtttggat

SEQ ID NO: 47565 - RNA, 20 nt, synthetic construct
  source 1..20: mol_type = other RNA
tacaggtcaaactcacttat

SEQ ID NO: 47566 - RNA, 20 nt, synthetic construct
  source 1..20: mol_type = other RNA
tacaggtcggaaggaatgtg

SEQ ID NO: 47567 - RNA, 20 nt, synthetic construct
  source 1..20: mol_type = other RNA
tacaggtgcttacagactga

SEQ ID NO: 47568 - RNA, 20 nt, synthetic construct
  source 1..20: mol_type = other RNA
tacaggtgtgaaccacgcat

SEQ ID NO: 47569 - RNA, 20 nt, synthetic construct
  source 1..20: mol_type = other RNA
tacagtaaagccccattgta

SEQ ID NO: 47570 - RNA, 20 nt, synthetic construct
  source 1..20: mol_type = other RNA
tacagtaagatcctggattg

SEQ ID NO: 47571 - RNA, 20 nt, synthetic construct
  source 1..20: mol_type = other RNA
tacagtaaggtttccctggg

SEQ ID NO: 47572 - RNA, 20 nt, synthetic construct
  source 1..20: mol_type = other RNA
tacagtaatcaaacagtgtg

SEQ ID NO: 47573 - RNA, 20 nt, synthetic construct
  source 1..20: mol_type = other RNA
tacagtaattgtagtttcca

SEQ ID NO: 47574 - RNA, 20 nt, synthetic construct
  source 1..20: mol_type = other RNA
tacagtagccaaaggtagaa

SEQ ID NO: 47575 - RNA, 20 nt, synthetic construct
  source 1..20: mol_type = other RNA
tacagtagtaaaaccaaatg

SEQ ID NO: 47576 - RNA, 20 nt, synthetic construct
  source 1..20: mol_type = other RNA
tacagtataggggaactctt

SEQ ID NO: 47577 - RNA, 20 nt, synthetic construct
  source 1..20: mol_type = other RNA
tacagtattacacagaaagc

SEQ ID NO: 47578 - RNA, 20 nt, synthetic construct
  source 1..20: mol_type = other RNA
tacagtcacacaccactaca

SEQ ID NO: 47579 - RNA, 20 nt, synthetic construct
  source 1..20: mol_type = other RNA
tacagtcatcacagtccagg

SEQ ID NO: 47580 - RNA, 20 nt, synthetic construct
  source 1..20: mol_type = other RNA
tacagtctgatttactttta

SEQ ID NO: 47581 - RNA, 20 nt, synthetic construct
  source 1..20: mol_type = other RNA
tacagtgacatatgccggct

SEQ ID NO: 47582 - RNA, 20 nt, synthetic construct
  source 1..20: mol_type = other RNA
tacagtgagtagaagagtaa

SEQ ID NO: 47583 - RNA, 20 nt, synthetic construct
  source 1..20: mol_type = other RNA
tacagtgcataccaccacat

SEQ ID NO: 47584 - RNA, 20 nt, synthetic construct
  source 1..20: mol_type = other RNA
tacagtgccttcagctatgg

SEQ ID NO: 47585 - RNA, 20 nt, synthetic construct
  source 1..20: mol_type = other RNA
tacagtggcacgattttggc

SEQ ID NO: 47586 - RNA, 20 nt, synthetic construct
  source 1..20: mol_type = other RNA
tacagtggttccatttgttt

SEQ ID NO: 47587 - RNA, 20 nt, synthetic construct
  source 1..20: mol_type = other RNA
tacagtgtttagggacgaat

SEQ ID NO: 47588 - RNA, 20 nt, synthetic construct
  source 1..20: mol_type = other RNA
tacagtgtttttgaattctg

SEQ ID NO: 47589 - RNA, 20 nt, synthetic construct
  source 1..20: mol_type = other RNA
tacagttaacaatactgcat

SEQ ID NO: 47590 - RNA, 20 nt, synthetic construct
  source 1..20: mol_type = other RNA
tacagttaacgtatgaataa

SEQ ID NO: 47591 - RNA, 20 nt, synthetic construct
  source 1..20: mol_type = other RNA
tacagttatgtcagtcaaca

SEQ ID NO: 47592 - RNA, 20 nt, synthetic construct
  source 1..20: mol_type = other RNA
tacagttggaactcttgcgg

SEQ ID NO: 47593 - RNA, 20 nt, synthetic construct
  source 1..20: mol_type = other RNA
tacagttttgaccaaaacaa

SEQ ID NO: 47594 - RNA, 20 nt, synthetic construct
  source 1..20: mol_type = other RNA
tacataacttcccagacagg

SEQ ID NO: 47595 - RNA, 20 nt, synthetic construct
  source 1..20: mol_type = other RNA
tacatactgcactctcaaaa

SEQ ID NO: 47596 - RNA, 20 nt, synthetic construct
  source 1..20: mol_type = other RNA
tacatacttcaaagggtcac

SEQ ID NO: 47597 - RNA, 20 nt, synthetic construct
  source 1..20: mol_type = other RNA
tacatagcaaggaagcagaa

SEQ ID NO: 47598 - RNA, 20 nt, synthetic construct
  source 1..20: mol_type = other RNA
tacataggcttagtacagcc

SEQ ID NO: 47599 - RNA, 20 nt, synthetic construct
  source 1..20: mol_type = other RNA
tacatagtccactttccatc

SEQ ID NO: 47600 - RNA, 20 nt, synthetic construct
  source 1..20: mol_type = other RNA
tacatagtgctcttctgatc

SEQ ID NO: 47601 - RNA, 20 nt, synthetic construct
  source 1..20: mol_type = other RNA
tacatatagaagtaaatccc

SEQ ID NO: 47602 - RNA, 20 nt, synthetic construct
  source 1..20: mol_type = other RNA
tacatatggcaattccataa

SEQ ID NO: 47603 - RNA, 20 nt, synthetic construct
  source 1..20: mol_type = other RNA
tacatattttgtaacgtgta

SEQ ID NO: 47604 - RNA, 20 nt, synthetic construct
  source 1..20: mol_type = other RNA
tacatcacagacagggaatg

SEQ ID NO: 47605 - RNA, 20 nt, synthetic construct
  source 1..20: mol_type = other RNA
tacatcagcagtgaccatat

SEQ ID NO: 47606 - RNA, 20 nt, synthetic construct
  source 1..20: mol_type = other RNA
tacatccccccacccctgct

SEQ ID NO: 47607 - RNA, 20 nt, synthetic construct
  source 1..20: mol_type = other RNA
tacatctcaattcagaagct

SEQ ID NO: 47608 - RNA, 20 nt, synthetic construct
  source 1..20: mol_type = other RNA
tacatctggatcctgtctca

SEQ ID NO: 47609 - RNA, 20 nt, synthetic construct
  source 1..20: mol_type = other RNA
tacatgaaatactcaaacta

SEQ ID NO: 47610 - RNA, 20 nt, synthetic construct
  source 1..20: mol_type = other RNA
tacatgaagtcctcaatcat

SEQ ID NO: 47611 - RNA, 20 nt, synthetic construct
  source 1..20: mol_type = other RNA
tacatgaatggaaaattctt

SEQ ID NO: 47612 - RNA, 20 nt, synthetic construct
  source 1..20: mol_type = other RNA
tacatgacatggttttccta

SEQ ID NO: 47613 - RNA, 20 nt, synthetic construct
  source 1..20: mol_type = other RNA
tacatgacctatctattaac

SEQ ID NO: 47614 - RNA, 20 nt, synthetic construct
  source 1..20: mol_type = other RNA
tacatgagaaatgttaagat

SEQ ID NO: 47615 - RNA, 20 nt, synthetic construct
  source 1..20: mol_type = other RNA
tacatgaggcctctcccctt

SEQ ID NO: 47616 - RNA, 20 nt, synthetic construct
  source 1..20: mol_type = other RNA
tacatgaggtcacccaagcc

SEQ ID NO: 47617 - RNA, 20 nt, synthetic construct
  source 1..20: mol_type = other RNA
tacatgcttagccttccaga

SEQ ID NO: 47618 - RNA, 20 nt, synthetic construct
  source 1..20: mol_type = other RNA
tacatggttctgtgctagat

SEQ ID NO: 47619 - RNA, 20 nt, synthetic construct
  source 1..20: mol_type = other RNA
tacatgtaaaaactgtttgg

SEQ ID NO: 47620 - RNA, 20 nt, synthetic construct
  source 1..20: mol_type = other RNA
tacatgtacgccaattttca

SEQ ID NO: 47621 - RNA, 20 nt, synthetic construct
  source 1..20: mol_type = other RNA
tacatgtagatatgggagtc

SEQ ID NO: 47622 - RNA, 20 nt, synthetic construct
  source 1..20: mol_type = other RNA
tacatgtagttttccctgtg

SEQ ID NO: 47623 - RNA, 20 nt, synthetic construct
  source 1..20: mol_type = other RNA
tacatgtcatgttcccggat

SEQ ID NO: 47624 - RNA, 20 nt, synthetic construct
  source 1..20: mol_type = other RNA
tacatgttcagttataaaag

SEQ ID NO: 47625 - RNA, 20 nt, synthetic construct
  source 1..20: mol_type = other RNA
tacatgtttaactatcctat

SEQ ID NO: 47626 - RNA, 20 nt, synthetic construct
  source 1..20: mol_type = other RNA
tacatgtttagcaagattac

SEQ ID NO: 47627 - RNA, 20 nt, synthetic construct
  source 1..20: mol_type = other RNA
tacattaaagacagctacta

SEQ ID NO: 47628 - RNA, 20 nt, synthetic construct
  source 1..20: mol_type = other RNA
tacattaatctcatccacaa

SEQ ID NO: 47629 - RNA, 20 nt, synthetic construct
  source 1..20: mol_type = other RNA
tacattagagaagaatgaga

SEQ ID NO: 47630 - RNA, 20 nt, synthetic construct
  source 1..20: mol_type = other RNA
tacattgccttcaagttgct

SEQ ID NO: 47631 - RNA, 20 nt, synthetic construct
  source 1..20: mol_type = other RNA
tacattgccttcgcagggtg

SEQ ID NO: 47632 - RNA, 20 nt, synthetic construct
  source 1..20: mol_type = other RNA
tacattgtaatcctgtttct

SEQ ID NO: 47633 - RNA, 20 nt, synthetic construct
  source 1..20: mol_type = other RNA
tacatttaaaagaaaatggc

SEQ ID NO: 47634 - RNA, 20 nt, synthetic construct
  source 1..20: mol_type = other RNA
tacatttaaaattgcagagt

SEQ ID NO: 47635 - RNA, 20 nt, synthetic construct
  source 1..20: mol_type = other RNA
tacatttgcttaggctgtta

SEQ ID NO: 47636 - RNA, 20 nt, synthetic construct
  source 1..20: mol_type = other RNA
tacattttaccatatacaca

SEQ ID NO: 47637 - RNA, 20 nt, synthetic construct
  source 1..20: mol_type = other RNA
taccaaaaaactacgagtat

SEQ ID NO: 47638 - RNA, 20 nt, synthetic construct
  source 1..20: mol_type = other RNA
taccaaaaaaggtgctgttg

SEQ ID NO: 47639 - RNA, 20 nt, synthetic construct
  source 1..20: mol_type = other RNA
taccaaaacagcttcttgtt

SEQ ID NO: 47640 - RNA, 20 nt, synthetic construct
  source 1..20: mol_type = other RNA
taccaaaacccttgggatgc

SEQ ID NO: 47641 - RNA, 20 nt, synthetic construct
  source 1..20: mol_type = other RNA
taccaaaacctggtatgagt

SEQ ID NO: 47642 - RNA, 20 nt, synthetic construct
  source 1..20: mol_type = other RNA
taccaaaagtcctgttcttt

SEQ ID NO: 47643 - RNA, 20 nt, synthetic construct
  source 1..20: mol_type = other RNA
taccaaaatataaatacgtg

SEQ ID NO: 47644 - RNA, 20 nt, synthetic construct
  source 1..20: mol_type = other RNA
taccaaacattgaaggcaga

SEQ ID NO: 47645 - RNA, 20 nt, synthetic construct
  source 1..20: mol_type = other RNA
taccaaagcagaaatacaga

SEQ ID NO: 47646 - RNA, 20 nt, synthetic construct
  source 1..20: mol_type = other RNA
taccaaattcacgagactgt

SEQ ID NO: 47647 - RNA, 20 nt, synthetic construct
  source 1..20: mol_type = other RNA
taccaagcccggcacggtgg

SEQ ID NO: 47648 - RNA, 20 nt, synthetic construct
  source 1..20: mol_type = other RNA
taccaaggctaagttgagaa

SEQ ID NO: 47649 - RNA, 20 nt, synthetic construct
  source 1..20: mol_type = other RNA
taccaagggtgtgtttaatt

SEQ ID NO: 47650 - RNA, 20 nt, synthetic construct
  source 1..20: mol_type = other RNA
taccaagtgccgcgtttttt

SEQ ID NO: 47651 - RNA, 20 nt, synthetic construct
  source 1..20: mol_type = other RNA
taccaagttgaatttctgtc

SEQ ID NO: 47652 - RNA, 20 nt, synthetic construct
  source 1..20: mol_type = other RNA
taccaataaaagcctcattt

SEQ ID NO: 47653 - RNA, 20 nt, synthetic construct
  source 1..20: mol_type = other RNA
taccaattctccctgaaatt

SEQ ID NO: 47654 - RNA, 20 nt, synthetic construct
  source 1..20: mol_type = other RNA
taccaccaagaaaaagcaga

SEQ ID NO: 47655 - RNA, 20 nt, synthetic construct
  source 1..20: mol_type = other RNA
taccaccacattcggccaag

SEQ ID NO: 47656 - RNA, 20 nt, synthetic construct
  source 1..20: mol_type = other RNA
taccaccactaatgtcacat

SEQ ID NO: 47657 - RNA, 20 nt, synthetic construct
  source 1..20: mol_type = other RNA
taccacccgtccaatttctt

SEQ ID NO: 47658 - RNA, 20 nt, synthetic construct
  source 1..20: mol_type = other RNA
taccacctgaaatctgattt

SEQ ID NO: 47659 - RNA, 20 nt, synthetic construct
  source 1..20: mol_type = other RNA
taccacctgtcagaaacacc

SEQ ID NO: 47660 - RNA, 20 nt, synthetic construct
  source 1..20: mol_type = other RNA
taccactagcaaactactga

SEQ ID NO: 47661 - RNA, 20 nt, synthetic construct
  source 1..20: mol_type = other RNA
taccactataatccagatgg

SEQ ID NO: 47662 - RNA, 20 nt, synthetic construct
  source 1..20: mol_type = other RNA
taccactgaagtgttgagag

SEQ ID NO: 47663 - RNA, 20 nt, synthetic construct
  source 1..20: mol_type = other RNA
taccactgaggtcaagaaat

SEQ ID NO: 47664 - RNA, 20 nt, synthetic construct
  source 1..20: mol_type = other RNA
taccacttagtttgcaatac

SEQ ID NO: 47665 - RNA, 20 nt, synthetic construct
  source 1..20: mol_type = other RNA
taccagaccctttatcggat

SEQ ID NO: 47666 - RNA, 20 nt, synthetic construct
  source 1..20: mol_type = other RNA
taccagagattgggaaaatc

SEQ ID NO: 47667 - RNA, 20 nt, synthetic construct
  source 1..20: mol_type = other RNA
taccagaggttaaagcaaca

SEQ ID NO: 47668 - RNA, 20 nt, synthetic construct
  source 1..20: mol_type = other RNA
taccagcttacagcagatct

SEQ ID NO: 47669 - RNA, 20 nt, synthetic construct
  source 1..20: mol_type = other RNA
taccaggctggaagaatttt

SEQ ID NO: 47670 - RNA, 20 nt, synthetic construct
  source 1..20: mol_type = other RNA
taccaggtcagccagaggaa

SEQ ID NO: 47671 - RNA, 20 nt, synthetic construct
  source 1..20: mol_type = other RNA
taccaggttttggtaatggg

SEQ ID NO: 47672 - RNA, 20 nt, synthetic construct
  source 1..20: mol_type = other RNA
taccagtgcttgcagccttc

SEQ ID NO: 47673 - RNA, 20 nt, synthetic construct
  source 1..20: mol_type = other RNA
taccataaaaccatttttca

SEQ ID NO: 47674 - RNA, 20 nt, synthetic construct
  source 1..20: mol_type = other RNA
taccataaagtcagaggagc

SEQ ID NO: 47675 - RNA, 20 nt, synthetic construct
  source 1..20: mol_type = other RNA
taccataaagtcttccattt

SEQ ID NO: 47676 - RNA, 20 nt, synthetic construct
  source 1..20: mol_type = other RNA
taccatatacacaaaaagat

SEQ ID NO: 47677 - RNA, 20 nt, synthetic construct
  source 1..20: mol_type = other RNA
taccatctaaagccaggctt

SEQ ID NO: 47678 - RNA, 20 nt, synthetic construct
  source 1..20: mol_type = other RNA
taccatctctccaacagaag

SEQ ID NO: 47679 - RNA, 20 nt, synthetic construct
  source 1..20: mol_type = other RNA
taccatctgacatatgtttt

SEQ ID NO: 47680 - RNA, 20 nt, synthetic construct
  source 1..20: mol_type = other RNA
taccatgttgttcttttcaa

SEQ ID NO: 47681 - RNA, 20 nt, synthetic construct
  source 1..20: mol_type = other RNA
taccatgtttccataaaaag

SEQ ID NO: 47682 - RNA, 20 nt, synthetic construct
  source 1..20: mol_type = other RNA
taccattccccttgccaagg

SEQ ID NO: 47683 - RNA, 20 nt, synthetic construct
  source 1..20: mol_type = other RNA
taccatttattcctctcttg

SEQ ID NO: 47684 - RNA, 20 nt, synthetic construct
  source 1..20: mol_type = other RNA
taccatttgaccttccttgt

SEQ ID NO: 47685 - RNA, 20 nt, synthetic construct
  source 1..20: mol_type = other RNA
tacccaaagactttgttttg

SEQ ID NO: 47686 - RNA, 20 nt, synthetic construct
  source 1..20: mol_type = other RNA
tacccaacatgagagaaaat

SEQ ID NO: 47687 - RNA, 20 nt, synthetic construct
  source 1..20: mol_type = other RNA
tacccaagcttaggtcagat

SEQ ID NO: 47688 - RNA, 20 nt, synthetic construct
  source 1..20: mol_type = other RNA
tacccaagtaaacaactgac

SEQ ID NO: 47689 - RNA, 20 nt, synthetic construct
  source 1..20: mol_type = other RNA
tacccacaaaagaaaatttt

SEQ ID NO: 47690 - RNA, 20 nt, synthetic construct
  source 1..20: mol_type = other RNA
tacccacaagaaaaacctaa

SEQ ID NO: 47691 - RNA, 20 nt, synthetic construct
  source 1..20: mol_type = other RNA
tacccactattgaaagccct

SEQ ID NO: 47692 - RNA, 20 nt, synthetic construct
  source 1..20: mol_type = other RNA
tacccagcactctgaatcac

SEQ ID NO: 47693 - RNA, 20 nt, synthetic construct
  source 1..20: mol_type = other RNA
tacccaggcatgatggctca

SEQ ID NO: 47694 - RNA, 20 nt, synthetic construct
  source 1..20: mol_type = other RNA
tacccaggtgtgagattgat

SEQ ID NO: 47695 - RNA, 20 nt, synthetic construct
  source 1..20: mol_type = other RNA
tacccagtgtgtttgtttgc

SEQ ID NO: 47696 - RNA, 20 nt, synthetic construct
  source 1..20: mol_type = other RNA
tacccattagacactaactt

SEQ ID NO: 47697 - RNA, 20 nt, synthetic construct
  source 1..20: mol_type = other RNA
taccccaaccctacctaggg

SEQ ID NO: 47698 - RNA, 20 nt, synthetic construct
  source 1..20: mol_type = other RNA
taccccattcactcagcata

SEQ ID NO: 47699 - RNA, 20 nt, synthetic construct
  source 1..20: mol_type = other RNA
tacccccatcacactggtca

SEQ ID NO: 47700 - RNA, 20 nt, synthetic construct
  source 1..20: mol_type = other RNA
taccccctggaaataagttt

SEQ ID NO: 47701 - RNA, 20 nt, synthetic construct
  source 1..20: mol_type = other RNA
tacccctactttttgtcaca

SEQ ID NO: 47702 - RNA, 20 nt, synthetic construct
  source 1..20: mol_type = other RNA
tacccctccctacctggcag

SEQ ID NO: 47703 - RNA, 20 nt, synthetic construct
  source 1..20: mol_type = other RNA
tacccctgagaacttcagta

SEQ ID NO: 47704 - RNA, 20 nt, synthetic construct
  source 1..20: mol_type = other RNA
taccccttaaattccaaaag

SEQ ID NO: 47705 - RNA, 20 nt, synthetic construct
  source 1..20: mol_type = other RNA
tacccggagaggtgaactat

SEQ ID NO: 47706 - RNA, 20 nt, synthetic construct
  source 1..20: mol_type = other RNA
tacccgtggaaatacttgaa

SEQ ID NO: 47707 - RNA, 20 nt, synthetic construct
  source 1..20: mol_type = other RNA
tacccgtgtgttttgttgtt

SEQ ID NO: 47708 - RNA, 20 nt, synthetic construct
  source 1..20: mol_type = other RNA
taccctaataacaaaatagg

SEQ ID NO: 47709 - RNA, 20 nt, synthetic construct
  source 1..20: mol_type = other RNA
taccctcaaaagatgcagaa

SEQ ID NO: 47710 - RNA, 20 nt, synthetic construct
  source 1..20: mol_type = other RNA
taccctcacagtcacaaagc

SEQ ID NO: 47711 - RNA, 20 nt, synthetic construct
  source 1..20: mol_type = other RNA
taccctcattttataagggt

SEQ ID NO: 47712 - RNA, 20 nt, synthetic construct
  source 1..20: mol_type = other RNA
taccctcgagtaaaaagaat

SEQ ID NO: 47713 - RNA, 20 nt, synthetic construct
  source 1..20: mol_type = other RNA
taccctctagctccccattc

SEQ ID NO: 47714 - RNA, 20 nt, synthetic construct
  source 1..20: mol_type = other RNA
taccctctggaatgcccatc

SEQ ID NO: 47715 - RNA, 20 nt, synthetic construct
  source 1..20: mol_type = other RNA
taccctgaggatataacgat

SEQ ID NO: 47716 - RNA, 20 nt, synthetic construct
  source 1..20: mol_type = other RNA
taccctgccttccttgggca

SEQ ID NO: 47717 - RNA, 20 nt, synthetic construct
  source 1..20: mol_type = other RNA
taccctgctggaacgaatat

SEQ ID NO: 47718 - RNA, 20 nt, synthetic construct
  source 1..20: mol_type = other RNA
tacccttacgcgtggatgtg

SEQ ID NO: 47719 - RNA, 20 nt, synthetic construct
  source 1..20: mol_type = other RNA
tacccttactaaattttgag

SEQ ID NO: 47720 - RNA, 20 nt, synthetic construct
  source 1..20: mol_type = other RNA
tacccttctgttaatagata

SEQ ID NO: 47721 - RNA, 20 nt, synthetic construct
  source 1..20: mol_type = other RNA
taccctttactcagattcac

SEQ ID NO: 47722 - RNA, 20 nt, synthetic construct
  source 1..20: mol_type = other RNA
taccctttccaaattcaaag

SEQ ID NO: 47723 - RNA, 20 nt, synthetic construct
  source 1..20: mol_type = other RNA
taccctttcttgttagtagg

SEQ ID NO: 47724 - RNA, 20 nt, synthetic construct
  source 1..20: mol_type = other RNA
taccgacggctcaggcctgt

SEQ ID NO: 47725 - RNA, 20 nt, synthetic construct
  source 1..20: mol_type = other RNA
taccgagtaatgggatggct

SEQ ID NO: 47726 - RNA, 20 nt, synthetic construct
  source 1..20: mol_type = other RNA
taccggcatccgccaccacg

SEQ ID NO: 47727 - RNA, 20 nt, synthetic construct
  source 1..20: mol_type = other RNA
tacctaaaaagggagtcagt

SEQ ID NO: 47728 - RNA, 20 nt, synthetic construct
  source 1..20: mol_type = other RNA
tacctaacagccggcatatg

SEQ ID NO: 47729 - RNA, 20 nt, synthetic construct
  source 1..20: mol_type = other RNA
tacctaagcatcgtgaagtc

SEQ ID NO: 47730 - RNA, 20 nt, synthetic construct
  source 1..20: mol_type = other RNA
tacctagaaaaacaccaaaa

SEQ ID NO: 47731 - RNA, 20 nt, synthetic construct
  source 1..20: mol_type = other RNA
tacctagggtgtaaaaggct

SEQ ID NO: 47732 - RNA, 20 nt, synthetic construct
  source 1..20: mol_type = other RNA
tacctagtacgtaacctaaa

SEQ ID NO: 47733 - RNA, 20 nt, synthetic construct
  source 1..20: mol_type = other RNA
tacctagttttccaatccgg

SEQ ID NO: 47734 - RNA, 20 nt, synthetic construct
  source 1..20: mol_type = other RNA
tacctatagaattcttcttc

SEQ ID NO: 47735 - RNA, 20 nt, synthetic construct
  source 1..20: mol_type = other RNA
tacctatgaataggtgtgtg

SEQ ID NO: 47736 - RNA, 20 nt, synthetic construct
  source 1..20: mol_type = other RNA
tacctatttagagggatgaa

SEQ ID NO: 47737 - RNA, 20 nt, synthetic construct
  source 1..20: mol_type = other RNA
tacctcaaaggagagaagag

SEQ ID NO: 47738 - RNA, 20 nt, synthetic construct
  source 1..20: mol_type = other RNA
tacctcaaattgtgtgttct

SEQ ID NO: 47739 - RNA, 20 nt, synthetic construct
  source 1..20: mol_type = other RNA
tacctcccatgcattcgtcc

SEQ ID NO: 47740 - RNA, 20 nt, synthetic construct
  source 1..20: mol_type = other RNA
tacctcccttcacaaagccc

SEQ ID NO: 47741 - RNA, 20 nt, synthetic construct
  source 1..20: mol_type = other RNA
tacctctgggatgctcagtt

SEQ ID NO: 47742 - RNA, 20 nt, synthetic construct
  source 1..20: mol_type = other RNA
tacctcttactaaaaagaaa

SEQ ID NO: 47743 - RNA, 20 nt, synthetic construct
  source 1..20: mol_type = other RNA
tacctgaaaagtgtattatt

SEQ ID NO: 47744 - RNA, 20 nt, synthetic construct
  source 1..20: mol_type = other RNA
tacctgacttcaaactatac

SEQ ID NO: 47745 - RNA, 20 nt, synthetic construct
  source 1..20: mol_type = other RNA
tacctgcaggttgatactag

SEQ ID NO: 47746 - RNA, 20 nt, synthetic construct
  source 1..20: mol_type = other RNA
tacctggagcctgaggacac

SEQ ID NO: 47747 - RNA, 20 nt, synthetic construct
  source 1..20: mol_type = other RNA
tacctggcagtctaggaaaa

SEQ ID NO: 47748 - RNA, 20 nt, synthetic construct
  source 1..20: mol_type = other RNA
tacctggtccttaaatttct

SEQ ID NO: 47749 - RNA, 20 nt, synthetic construct
  source 1..20: mol_type = other RNA
tacctgtagaaaatagggac

SEQ ID NO: 47750 - RNA, 20 nt, synthetic construct
  source 1..20: mol_type = other RNA
tacctgtctttcccattacc

SEQ ID NO: 47751 - RNA, 20 nt, synthetic construct
  source 1..20: mol_type = other RNA
tacctgttgaatagcaactg

SEQ ID NO: 47752 - RNA, 20 nt, synthetic construct
  source 1..20: mol_type = other RNA
tacctgttgattgttgccat

SEQ ID NO: 47753 - RNA, 20 nt, synthetic construct
  source 1..20: mol_type = other RNA
taccttaaaccatatacaaa

SEQ ID NO: 47754 - RNA, 20 nt, synthetic construct
  source 1..20: mol_type = other RNA
taccttatagatgacgaaag

SEQ ID NO: 47755 - RNA, 20 nt, synthetic construct
  source 1..20: mol_type = other RNA
taccttatgtgaaagtagag

SEQ ID NO: 47756 - RNA, 20 nt, synthetic construct
  source 1..20: mol_type = other RNA
taccttccaaagtatgcata

SEQ ID NO: 47757 - RNA, 20 nt, synthetic construct
  source 1..20: mol_type = other RNA
taccttctaaaatcatcaca

SEQ ID NO: 47758 - RNA, 20 nt, synthetic construct
  source 1..20: mol_type = other RNA
taccttcttgagagtctctt

SEQ ID NO: 47759 - RNA, 20 nt, synthetic construct
  source 1..20: mol_type = other RNA
taccttgaaaatgcccttat

SEQ ID NO: 47760 - RNA, 20 nt, synthetic construct
  source 1..20: mol_type = other RNA
taccttgaaaggatactgag

SEQ ID NO: 47761 - RNA, 20 nt, synthetic construct
  source 1..20: mol_type = other RNA
taccttgatttatggcctaa

SEQ ID NO: 47762 - RNA, 20 nt, synthetic construct
  source 1..20: mol_type = other RNA
taccttggagagaaaccttg

SEQ ID NO: 47763 - RNA, 20 nt, synthetic construct
  source 1..20: mol_type = other RNA
tacctttatctttggatatc

SEQ ID NO: 47764 - RNA, 20 nt, synthetic construct
  source 1..20: mol_type = other RNA
tacctttcgctatcagtagt

SEQ ID NO: 47765 - RNA, 20 nt, synthetic construct
  source 1..20: mol_type = other RNA
tacctttggctactgtaaac

SEQ ID NO: 47766 - RNA, 20 nt, synthetic construct
  source 1..20: mol_type = other RNA
tacgaaagcctttatttttt

SEQ ID NO: 47767 - RNA, 20 nt, synthetic construct
  source 1..20: mol_type = other RNA
tacgaaagtgctctaccctt

SEQ ID NO: 47768 - RNA, 20 nt, synthetic construct
  source 1..20: mol_type = other RNA
tacgaagctacagtaatcaa

SEQ ID NO: 47769 - RNA, 20 nt, synthetic construct
  source 1..20: mol_type = other RNA
tacgaatgaactcctatagt

SEQ ID NO: 47770 - RNA, 20 nt, synthetic construct
  source 1..20: mol_type = other RNA
tacgacgctcttgttcaaaa

SEQ ID NO: 47771 - RNA, 20 nt, synthetic construct
  source 1..20: mol_type = other RNA
tacgaggacagactgcagtt

SEQ ID NO: 47772 - RNA, 20 nt, synthetic construct
  source 1..20: mol_type = other RNA
tacgagtatcatataaattg

SEQ ID NO: 47773 - RNA, 20 nt, synthetic construct
  source 1..20: mol_type = other RNA
tacgagttatgcaagatgtc

SEQ ID NO: 47774 - RNA, 20 nt, synthetic construct
  source 1..20: mol_type = other RNA
tacgataaacttcagtttta

SEQ ID NO: 47775 - RNA, 20 nt, synthetic construct
  source 1..20: mol_type = other RNA
tacgatgaaattgaccattc

SEQ ID NO: 47776 - RNA, 20 nt, synthetic construct
  source 1..20: mol_type = other RNA
tacgccaattttcatagcag

SEQ ID NO: 47777 - RNA, 20 nt, synthetic construct
  source 1..20: mol_type = other RNA
tacgcccggcccatgacatg

SEQ ID NO: 47778 - RNA, 20 nt, synthetic construct
  source 1..20: mol_type = other RNA
tacgcctagctgacttttaa

SEQ ID NO: 47779 - RNA, 20 nt, synthetic construct
  source 1..20: mol_type = other RNA
tacgcgtggatgtgtgcaca

SEQ ID NO: 47780 - RNA, 20 nt, synthetic construct
  source 1..20: mol_type = other RNA
tacgctccctcgcgcggcac

SEQ ID NO: 47781 - RNA, 20 nt, synthetic construct
  source 1..20: mol_type = other RNA
tacgctgccaaaagccaaga

SEQ ID NO: 47782 - RNA, 20 nt, synthetic construct
  source 1..20: mol_type = other RNA
tacgcttttatgttataatg

SEQ ID NO: 47783 - RNA, 20 nt, synthetic construct
  source 1..20: mol_type = other RNA
tacggaaatataacattacc

SEQ ID NO: 47784 - RNA, 20 nt, synthetic construct
  source 1..20: mol_type = other RNA
tacggaatgattccacttat

SEQ ID NO: 47785 - RNA, 20 nt, synthetic construct
  source 1..20: mol_type = other RNA
tacggacgcaggcaaacagc

SEQ ID NO: 47786 - RNA, 20 nt, synthetic construct
  source 1..20: mol_type = other RNA
tacggaggatgaggggctga

SEQ ID NO: 47787 - RNA, 20 nt, synthetic construct
  source 1..20: mol_type = other RNA
tacggagtctcgctctgtcc

SEQ ID NO: 47788 - RNA, 20 nt, synthetic construct
  source 1..20: mol_type = other RNA
tacggttccctgtagagatt

SEQ ID NO: 47789 - RNA, 20 nt, synthetic construct
  source 1..20: mol_type = other RNA
tacgtaacctaaagttgagg

SEQ ID NO: 47790 - RNA, 20 nt, synthetic construct
  source 1..20: mol_type = other RNA
tacgtactaggtatcacagt

SEQ ID NO: 47791 - RNA, 20 nt, synthetic construct
  source 1..20: mol_type = other RNA
tacgtatatgaaaagcccaa

SEQ ID NO: 47792 - RNA, 20 nt, synthetic construct
  source 1..20: mol_type = other RNA
tacgtatttatcatgtcttc

SEQ ID NO: 47793 - RNA, 20 nt, synthetic construct
  source 1..20: mol_type = other RNA
tacgtcgtcccccatcccct

SEQ ID NO: 47794 - RNA, 20 nt, synthetic construct
  source 1..20: mol_type = other RNA
tacgtgcagagcaggggtgg

SEQ ID NO: 47795 - RNA, 20 nt, synthetic construct
  source 1..20: mol_type = other RNA
tacgtgtatactgggtgtga

SEQ ID NO: 47796 - RNA, 20 nt, synthetic construct
  source 1..20: mol_type = other RNA
tacgttaaaggaaaagagat

SEQ ID NO: 47797 - RNA, 20 nt, synthetic construct
  source 1..20: mol_type = other RNA
tacgttaactgtattgcaaa

SEQ ID NO: 47798 - RNA, 20 nt, synthetic construct
  source 1..20: mol_type = other RNA
tactaaaaagaaaaagttgg

SEQ ID NO: 47799 - RNA, 20 nt, synthetic construct
  source 1..20: mol_type = other RNA
tactaaacaaatcagatttc

SEQ ID NO: 47800 - RNA, 20 nt, synthetic construct
  source 1..20: mol_type = other RNA
tactaaacattaaggaagaa

SEQ ID NO: 47801 - RNA, 20 nt, synthetic construct
  source 1..20: mol_type = other RNA
tactaaactgaacgaagtga

SEQ ID NO: 47802 - RNA, 20 nt, synthetic construct
  source 1..20: mol_type = other RNA
tactaaatacaccaaactca

SEQ ID NO: 47803 - RNA, 20 nt, synthetic construct
  source 1..20: mol_type = other RNA
tactaaatgatctttcaagg

SEQ ID NO: 47804 - RNA, 20 nt, synthetic construct
  source 1..20: mol_type = other RNA
tactaaattttgaggctttt

SEQ ID NO: 47805 - RNA, 20 nt, synthetic construct
  source 1..20: mol_type = other RNA
tactaacaagaaagggtagc

SEQ ID NO: 47806 - RNA, 20 nt, synthetic construct
  source 1..20: mol_type = other RNA
tactaacgatccttactacc

SEQ ID NO: 47807 - RNA, 20 nt, synthetic construct
  source 1..20: mol_type = other RNA
tactaagaagtgaaactgct

SEQ ID NO: 47808 - RNA, 20 nt, synthetic construct
  source 1..20: mol_type = other RNA
tactaagcctatgtaagaca

SEQ ID NO: 47809 - RNA, 20 nt, synthetic construct
  source 1..20: mol_type = other RNA
tactaataaatgcataaacg

SEQ ID NO: 47810 - RNA, 20 nt, synthetic construct
  source 1..20: mol_type = other RNA
tactacaaaagatcatttca

SEQ ID NO: 47811 - RNA, 20 nt, synthetic construct
  source 1..20: mol_type = other RNA
tactacaagagttcccctat

SEQ ID NO: 47812 - RNA, 20 nt, synthetic construct
  source 1..20: mol_type = other RNA
tactaccaccactaatgtca

SEQ ID NO: 47813 - RNA, 20 nt, synthetic construct
  source 1..20: mol_type = other RNA
tactacctatagaattcttc

SEQ ID NO: 47814 - RNA, 20 nt, synthetic construct
  source 1..20: mol_type = other RNA
tactacgaagctacagtaat

SEQ ID NO: 47815 - RNA, 20 nt, synthetic construct
  source 1..20: mol_type = other RNA
tactacgcctagctgacttt

SEQ ID NO: 47816 - RNA, 20 nt, synthetic construct
  source 1..20: mol_type = other RNA
tactactgacctgggagaaa

SEQ ID NO: 47817 - RNA, 20 nt, synthetic construct
  source 1..20: mol_type = other RNA
tactactgcaaatatccaat

SEQ ID NO: 47818 - RNA, 20 nt, synthetic construct
  source 1..20: mol_type = other RNA
tactactgcattttttgcca

SEQ ID NO: 47819 - RNA, 20 nt, synthetic construct
  source 1..20: mol_type = other RNA
tactactgtactgtttagca

SEQ ID NO: 47820 - RNA, 20 nt, synthetic construct
  source 1..20: mol_type = other RNA
tactacttgtcaggtgggca

SEQ ID NO: 47821 - RNA, 20 nt, synthetic construct
  source 1..20: mol_type = other RNA
tactagaagcactttttacc

SEQ ID NO: 47822 - RNA, 20 nt, synthetic construct
  source 1..20: mol_type = other RNA
tactagatcaagcccttcct

SEQ ID NO: 47823 - RNA, 20 nt, synthetic construct
  source 1..20: mol_type = other RNA
tactagcaaactgaatcaga

SEQ ID NO: 47824 - RNA, 20 nt, synthetic construct
  source 1..20: mol_type = other RNA
tactagcaagctaataattt

SEQ ID NO: 47825 - RNA, 20 nt, synthetic construct
  source 1..20: mol_type = other RNA
tactagccagtgattggata

SEQ ID NO: 47826 - RNA, 20 nt, synthetic construct
  source 1..20: mol_type = other RNA
tactaggtatcacagtgagg

SEQ ID NO: 47827 - RNA, 20 nt, synthetic construct
  source 1..20: mol_type = other RNA
tactagtagaaagcaggttc

SEQ ID NO: 47828 - RNA, 20 nt, synthetic construct
  source 1..20: mol_type = other RNA
tactagtaggatgaattaca

SEQ ID NO: 47829 - RNA, 20 nt, synthetic construct
  source 1..20: mol_type = other RNA
tactagtataagagaaggaa

SEQ ID NO: 47830 - RNA, 20 nt, synthetic construct
  source 1..20: mol_type = other RNA
tactagtcagcacactctta

SEQ ID NO: 47831 - RNA, 20 nt, synthetic construct
  source 1..20: mol_type = other RNA
tactagtctccatacaagga

SEQ ID NO: 47832 - RNA, 20 nt, synthetic construct
  source 1..20: mol_type = other RNA
tactagttgtgctacctcaa

SEQ ID NO: 47833 - RNA, 20 nt, synthetic construct
  source 1..20: mol_type = other RNA
tactagtttagtgcagtatc

SEQ ID NO: 47834 - RNA, 20 nt, synthetic construct
  source 1..20: mol_type = other RNA
tactatatgatccagcagtt

SEQ ID NO: 47835 - RNA, 20 nt, synthetic construct
  source 1..20: mol_type = other RNA
tactatcttccctaaagaga

SEQ ID NO: 47836 - RNA, 20 nt, synthetic construct
  source 1..20: mol_type = other RNA
tactatgaatatactggaaa

SEQ ID NO: 47837 - RNA, 20 nt, synthetic construct
  source 1..20: mol_type = other RNA
tactatgcagcaacggaaat

SEQ ID NO: 47838 - RNA, 20 nt, synthetic construct
  source 1..20: mol_type = other RNA
tactatgtatgtggctcaca

SEQ ID NO: 47839 - RNA, 20 nt, synthetic construct
  source 1..20: mol_type = other RNA
tactattccaggatcaaatc

SEQ ID NO: 47840 - RNA, 20 nt, synthetic construct
  source 1..20: mol_type = other RNA
tactatttcgcaaagcaaca

SEQ ID NO: 47841 - RNA, 20 nt, synthetic construct
  source 1..20: mol_type = other RNA
tactatttgtatcttcacaa

SEQ ID NO: 47842 - RNA, 20 nt, synthetic construct
  source 1..20: mol_type = other RNA
tactattttcataacaaagc

SEQ ID NO: 47843 - RNA, 20 nt, synthetic construct
  source 1..20: mol_type = other RNA
tactattttctatagtggct

SEQ ID NO: 47844 - RNA, 20 nt, synthetic construct
  source 1..20: mol_type = other RNA
tactcaaactatgcttaatc

SEQ ID NO: 47845 - RNA, 20 nt, synthetic construct
  source 1..20: mol_type = other RNA
tactcaaatccaaattcaca

SEQ ID NO: 47846 - RNA, 20 nt, synthetic construct
  source 1..20: mol_type = other RNA
tactcaacatcactagctat

SEQ ID NO: 47847 - RNA, 20 nt, synthetic construct
  source 1..20: mol_type = other RNA
tactcaacgacaatctctgg

SEQ ID NO: 47848 - RNA, 20 nt, synthetic construct
  source 1..20: mol_type = other RNA
tactcaagggctttcaatag

SEQ ID NO: 47849 - RNA, 20 nt, synthetic construct
  source 1..20: mol_type = other RNA
tactcaatcagtggccagtg

SEQ ID NO: 47850 - RNA, 20 nt, synthetic construct
  source 1..20: mol_type = other RNA
tactcactgaaaccctcacg

SEQ ID NO: 47851 - RNA, 20 nt, synthetic construct
  source 1..20: mol_type = other RNA
tactcactgtactactgacc

SEQ ID NO: 47852 - RNA, 20 nt, synthetic construct
  source 1..20: mol_type = other RNA
tactcagattcaccaattgt

SEQ ID NO: 47853 - RNA, 20 nt, synthetic construct
  source 1..20: mol_type = other RNA
tactcagccccctcgaagag

SEQ ID NO: 47854 - RNA, 20 nt, synthetic construct
  source 1..20: mol_type = other RNA
tactcagctgtcactctctt

SEQ ID NO: 47855 - RNA, 20 nt, synthetic construct
  source 1..20: mol_type = other RNA
tactcaggagattaaggctg

SEQ ID NO: 47856 - RNA, 20 nt, synthetic construct
  source 1..20: mol_type = other RNA
tactcagtctcgaaaaggaa

SEQ ID NO: 47857 - RNA, 20 nt, synthetic construct
  source 1..20: mol_type = other RNA
tactcatgcttgctccagag

SEQ ID NO: 47858 - RNA, 20 nt, synthetic construct
  source 1..20: mol_type = other RNA
tactcatgtctacctgtctt

SEQ ID NO: 47859 - RNA, 20 nt, synthetic construct
  source 1..20: mol_type = other RNA
tactcattatggttgttggc

SEQ ID NO: 47860 - RNA, 20 nt, synthetic construct
  source 1..20: mol_type = other RNA
tactccaagaaggctagcac

SEQ ID NO: 47861 - RNA, 20 nt, synthetic construct
  source 1..20: mol_type = other RNA
tactccaccagcatcttttg

SEQ ID NO: 47862 - RNA, 20 nt, synthetic construct
  source 1..20: mol_type = other RNA
tactcccagcctcaaacaat

SEQ ID NO: 47863 - RNA, 20 nt, synthetic construct
  source 1..20: mol_type = other RNA
tactcccgatttcagttaac

SEQ ID NO: 47864 - RNA, 20 nt, synthetic construct
  source 1..20: mol_type = other RNA
tactcctgagcaaggaagga

SEQ ID NO: 47865 - RNA, 20 nt, synthetic construct
  source 1..20: mol_type = other RNA
tactcgagggtagcttttcc

SEQ ID NO: 47866 - RNA, 20 nt, synthetic construct
  source 1..20: mol_type = other RNA
tactcggtatgtacccaatg

SEQ ID NO: 47867 - RNA, 20 nt, synthetic construct
  source 1..20: mol_type = other RNA
tactcgtagttttttggtag

SEQ ID NO: 47868 - RNA, 20 nt, synthetic construct
  source 1..20: mol_type = other RNA
tactcgtggttatagccata

SEQ ID NO: 47869 - RNA, 20 nt, synthetic construct
  source 1..20: mol_type = other RNA
tactcgtgtgtctcataaag

SEQ ID NO: 47870 - RNA, 20 nt, synthetic construct
  source 1..20: mol_type = other RNA
tactctaatggggaaataga

SEQ ID NO: 47871 - RNA, 20 nt, synthetic construct
  source 1..20: mol_type = other RNA
tactctagtggtgcttaatt

SEQ ID NO: 47872 - RNA, 20 nt, synthetic construct
  source 1..20: mol_type = other RNA
tactctcaaataatttggca

SEQ ID NO: 47873 - RNA, 20 nt, synthetic construct
  source 1..20: mol_type = other RNA
tactctcagaaattataagc

SEQ ID NO: 47874 - RNA, 20 nt, synthetic construct
  source 1..20: mol_type = other RNA
tactctctctgcctcggcac

SEQ ID NO: 47875 - RNA, 20 nt, synthetic construct
  source 1..20: mol_type = other RNA
tactctctttaattatgagc

SEQ ID NO: 47876 - RNA, 20 nt, synthetic construct
  source 1..20: mol_type = other RNA
tactctgagacaggatccag

SEQ ID NO: 47877 - RNA, 20 nt, synthetic construct
  source 1..20: mol_type = other RNA
tactctgcctcagttgacat

SEQ ID NO: 47878 - RNA, 20 nt, synthetic construct
  source 1..20: mol_type = other RNA
tactcttaaagtttcaaact

SEQ ID NO: 47879 - RNA, 20 nt, synthetic construct
  source 1..20: mol_type = other RNA
tactcttctactcactgtac

SEQ ID NO: 47880 - RNA, 20 nt, synthetic construct
  source 1..20: mol_type = other RNA
tactcttttgtttttggggg

SEQ ID NO: 47881 - RNA, 20 nt, synthetic construct
  source 1..20: mol_type = other RNA
tactgaaaccagtgctctcc

SEQ ID NO: 47882 - RNA, 20 nt, synthetic construct
  source 1..20: mol_type = other RNA
tactgaaagacagacctcta

SEQ ID NO: 47883 - RNA, 20 nt, synthetic construct
  source 1..20: mol_type = other RNA
tactgaaatcctagccccaa

SEQ ID NO: 47884 - RNA, 20 nt, synthetic construct
  source 1..20: mol_type = other RNA
tactgaaggcatagggcctt

SEQ ID NO: 47885 - RNA, 20 nt, synthetic construct
  source 1..20: mol_type = other RNA
tactgaagttctcaggggta

SEQ ID NO: 47886 - RNA, 20 nt, synthetic construct
  source 1..20: mol_type = other RNA
tactgacaatagccaagaca

SEQ ID NO: 47887 - RNA, 20 nt, synthetic construct
  source 1..20: mol_type = other RNA
tactgaccatctcagcacag

SEQ ID NO: 47888 - RNA, 20 nt, synthetic construct
  source 1..20: mol_type = other RNA
tactgacctgggagaaagac

SEQ ID NO: 47889 - RNA, 20 nt, synthetic construct
  source 1..20: mol_type = other RNA
tactgactagtggctcatac

SEQ ID NO: 47890 - RNA, 20 nt, synthetic construct
  source 1..20: mol_type = other RNA
tactgactcaatcttcttat

SEQ ID NO: 47891 - RNA, 20 nt, synthetic construct
  source 1..20: mol_type = other RNA
tactgactccctttttaggt

SEQ ID NO: 47892 - RNA, 20 nt, synthetic construct
  source 1..20: mol_type = other RNA
tactgacttttccttaaaaa

SEQ ID NO: 47893 - RNA, 20 nt, synthetic construct
  source 1..20: mol_type = other RNA
tactgagaacagaatttttt

SEQ ID NO: 47894 - RNA, 20 nt, synthetic construct
  source 1..20: mol_type = other RNA
tactgagtcaaaaccaaaga

SEQ ID NO: 47895 - RNA, 20 nt, synthetic construct
  source 1..20: mol_type = other RNA
tactgatagcgaaaggtacg

SEQ ID NO: 47896 - RNA, 20 nt, synthetic construct
  source 1..20: mol_type = other RNA
tactgatctgctcaagtttt

SEQ ID NO: 47897 - RNA, 20 nt, synthetic construct
  source 1..20: mol_type = other RNA
tactgatcttttctgacaat

SEQ ID NO: 47898 - RNA, 20 nt, synthetic construct
  source 1..20: mol_type = other RNA
tactgattagaaggattgtt

SEQ ID NO: 47899 - RNA, 20 nt, synthetic construct
  source 1..20: mol_type = other RNA
tactgatttatagtgtttcc

SEQ ID NO: 47900 - RNA, 20 nt, synthetic construct
  source 1..20: mol_type = other RNA
tactgcaaatatccaatcac

SEQ ID NO: 47901 - RNA, 20 nt, synthetic construct
  source 1..20: mol_type = other RNA
tactgcaacctccgtttttc

SEQ ID NO: 47902 - RNA, 20 nt, synthetic construct
  source 1..20: mol_type = other RNA
tactgcactaaactagtatc

SEQ ID NO: 47903 - RNA, 20 nt, synthetic construct
  source 1..20: mol_type = other RNA
tactgcactctcaaaattaa

SEQ ID NO: 47904 - RNA, 20 nt, synthetic construct
  source 1..20: mol_type = other RNA
tactgcagcacttttaaggc

SEQ ID NO: 47905 - RNA, 20 nt, synthetic construct
  source 1..20: mol_type = other RNA
tactgcatattgaagccagc

SEQ ID NO: 47906 - RNA, 20 nt, synthetic construct
  source 1..20: mol_type = other RNA
tactgcatgattccccttat

SEQ ID NO: 47907 - RNA, 20 nt, synthetic construct
  source 1..20: mol_type = other RNA
tactgcatgctaggggctgt

SEQ ID NO: 47908 - RNA, 20 nt, synthetic construct
  source 1..20: mol_type = other RNA
tactgcattgtgcacttaaa

SEQ ID NO: 47909 - RNA, 20 nt, synthetic construct
  source 1..20: mol_type = other RNA
tactgcattttttgccaaat

SEQ ID NO: 47910 - RNA, 20 nt, synthetic construct
  source 1..20: mol_type = other RNA
tactgcctccacaggctttg

SEQ ID NO: 47911 - RNA, 20 nt, synthetic construct
  source 1..20: mol_type = other RNA
tactgctataaacttccctc

SEQ ID NO: 47912 - RNA, 20 nt, synthetic construct
  source 1..20: mol_type = other RNA
tactgctatacaaccggaaa

SEQ ID NO: 47913 - RNA, 20 nt, synthetic construct
  source 1..20: mol_type = other RNA
tactgctctgtcctgtcagt

SEQ ID NO: 47914 - RNA, 20 nt, synthetic construct
  source 1..20: mol_type = other RNA
tactgcttgctgcactggct

SEQ ID NO: 47915 - RNA, 20 nt, synthetic construct
  source 1..20: mol_type = other RNA
tactggaaaactagagatgg

SEQ ID NO: 47916 - RNA, 20 nt, synthetic construct
  source 1..20: mol_type = other RNA
tactggaaatggacagcggg

SEQ ID NO: 47917 - RNA, 20 nt, synthetic construct
  source 1..20: mol_type = other RNA
tactggaaggactcacagct

SEQ ID NO: 47918 - RNA, 20 nt, synthetic construct
  source 1..20: mol_type = other RNA
tactggaagtgtaacataca

SEQ ID NO: 47919 - RNA, 20 nt, synthetic construct
  source 1..20: mol_type = other RNA
tactggatacaaggtcaatc

SEQ ID NO: 47920 - RNA, 20 nt, synthetic construct
  source 1..20: mol_type = other RNA
tactggccatgttttatttc

SEQ ID NO: 47921 - RNA, 20 nt, synthetic construct
  source 1..20: mol_type = other RNA
tactggggtcttagttctgc

SEQ ID NO: 47922 - RNA, 20 nt, synthetic construct
  source 1..20: mol_type = other RNA
tactgggtgtgatggcgcat

SEQ ID NO: 47923 - RNA, 20 nt, synthetic construct
  source 1..20: mol_type = other RNA
tactggtaccaaagcagaaa

SEQ ID NO: 47924 - RNA, 20 nt, synthetic construct
  source 1..20: mol_type = other RNA
tactggtgttaggcaatcct

SEQ ID NO: 47925 - RNA, 20 nt, synthetic construct
  source 1..20: mol_type = other RNA
tactgtaaacaatgctgcta

SEQ ID NO: 47926 - RNA, 20 nt, synthetic construct
  source 1..20: mol_type = other RNA
tactgtaaccctgtttccct

SEQ ID NO: 47927 - RNA, 20 nt, synthetic construct
  source 1..20: mol_type = other RNA
tactgtaagttcctggactg

SEQ ID NO: 47928 - RNA, 20 nt, synthetic construct
  source 1..20: mol_type = other RNA
tactgtacaaagatttaccc

SEQ ID NO: 47929 - RNA, 20 nt, synthetic construct
  source 1..20: mol_type = other RNA
tactgtactgtttagcatct

SEQ ID NO: 47930 - RNA, 20 nt, synthetic construct
  source 1..20: mol_type = other RNA
tactgtagaatgtttttccg

SEQ ID NO: 47931 - RNA, 20 nt, synthetic construct
  source 1..20: mol_type = other RNA
tactgtattaggatgtgtac

SEQ ID NO: 47932 - RNA, 20 nt, synthetic construct
  source 1..20: mol_type = other RNA
tactgtcacaggctttccta

SEQ ID NO: 47933 - RNA, 20 nt, synthetic construct
  source 1..20: mol_type = other RNA
tactgtccaaacagtgacca

SEQ ID NO: 47934 - RNA, 20 nt, synthetic construct
  source 1..20: mol_type = other RNA
tactgtctcagtcccaaatg

SEQ ID NO: 47935 - RNA, 20 nt, synthetic construct
  source 1..20: mol_type = other RNA
tactgtctgtgaaaataata

SEQ ID NO: 47936 - RNA, 20 nt, synthetic construct
  source 1..20: mol_type = other RNA
tactgtgaattcactaatgc

SEQ ID NO: 47937 - RNA, 20 nt, synthetic construct
  source 1..20: mol_type = other RNA
tactgtgatgattttagaag

SEQ ID NO: 47938 - RNA, 20 nt, synthetic construct
  source 1..20: mol_type = other RNA
tactgtgattacaattcctt

SEQ ID NO: 47939 - RNA, 20 nt, synthetic construct
  source 1..20: mol_type = other RNA
tactgtgcagtggatgacta

SEQ ID NO: 47940 - RNA, 20 nt, synthetic construct
  source 1..20: mol_type = other RNA
tactgtggatatcttttaaa

SEQ ID NO: 47941 - RNA, 20 nt, synthetic construct
  source 1..20: mol_type = other RNA
tactgtgtggcttctcaaac

SEQ ID NO: 47942 - RNA, 20 nt, synthetic construct
  source 1..20: mol_type = other RNA
tactgttatgacaagactac

SEQ ID NO: 47943 - RNA, 20 nt, synthetic construct
  source 1..20: mol_type = other RNA
tactgttctccagtcccact

SEQ ID NO: 47944 - RNA, 20 nt, synthetic construct
  source 1..20: mol_type = other RNA
tactgtttagcatctagcac

SEQ ID NO: 47945 - RNA, 20 nt, synthetic construct
  source 1..20: mol_type = other RNA
tactgtttcttagctatatt

SEQ ID NO: 47946 - RNA, 20 nt, synthetic construct
  source 1..20: mol_type = other RNA
tacttaagagcatgttgggc

SEQ ID NO: 47947 - RNA, 20 nt, synthetic construct
  source 1..20: mol_type = other RNA
tacttaatagcccaacaggg

SEQ ID NO: 47948 - RNA, 20 nt, synthetic construct
  source 1..20: mol_type = other RNA
tacttaatttacccacaaaa

SEQ ID NO: 47949 - RNA, 20 nt, synthetic construct
  source 1..20: mol_type = other RNA
tacttactagttgtgctacc

SEQ ID NO: 47950 - RNA, 20 nt, synthetic construct
  source 1..20: mol_type = other RNA
tacttagcccctgctgccag

SEQ ID NO: 47951 - RNA, 20 nt, synthetic construct
  source 1..20: mol_type = other RNA
tacttagctaatttcagaga

SEQ ID NO: 47952 - RNA, 20 nt, synthetic construct
  source 1..20: mol_type = other RNA
tacttaggcagttattaaga

SEQ ID NO: 47953 - RNA, 20 nt, synthetic construct
  source 1..20: mol_type = other RNA
tacttatcttttctagtttc

SEQ ID NO: 47954 - RNA, 20 nt, synthetic construct
  source 1..20: mol_type = other RNA
tacttcaaagggtcactatt

SEQ ID NO: 47955 - RNA, 20 nt, synthetic construct
  source 1..20: mol_type = other RNA
tacttcaaggttcacaaatt

SEQ ID NO: 47956 - RNA, 20 nt, synthetic construct
  source 1..20: mol_type = other RNA
tacttcaatgctacagtaag

SEQ ID NO: 47957 - RNA, 20 nt, synthetic construct
  source 1..20: mol_type = other RNA
tacttcagcgcttgaacaaa

SEQ ID NO: 47958 - RNA, 20 nt, synthetic construct
  source 1..20: mol_type = other RNA
tacttcatagatgttatgcc

SEQ ID NO: 47959 - RNA, 20 nt, synthetic construct
  source 1..20: mol_type = other RNA
tacttcatctttcctgatca

SEQ ID NO: 47960 - RNA, 20 nt, synthetic construct
  source 1..20: mol_type = other RNA
tacttcatttccattgtaat

SEQ ID NO: 47961 - RNA, 20 nt, synthetic construct
  source 1..20: mol_type = other RNA
tacttccagctcacgttacc

SEQ ID NO: 47962 - RNA, 20 nt, synthetic construct
  source 1..20: mol_type = other RNA
tacttccagtgttttagggg

SEQ ID NO: 47963 - RNA, 20 nt, synthetic construct
  source 1..20: mol_type = other RNA
tacttccctctttctcaact

SEQ ID NO: 47964 - RNA, 20 nt, synthetic construct
  source 1..20: mol_type = other RNA
tacttcccttctcgaagtgg

SEQ ID NO: 47965 - RNA, 20 nt, synthetic construct
  source 1..20: mol_type = other RNA
tacttcgtgtgtggagtggg

SEQ ID NO: 47966 - RNA, 20 nt, synthetic construct
  source 1..20: mol_type = other RNA
tacttctaactttagaacat

SEQ ID NO: 47967 - RNA, 20 nt, synthetic construct
  source 1..20: mol_type = other RNA
tacttctacagaatgttcaa

SEQ ID NO: 47968 - RNA, 20 nt, synthetic construct
  source 1..20: mol_type = other RNA
tacttctaccttgaaaatgc

SEQ ID NO: 47969 - RNA, 20 nt, synthetic construct
  source 1..20: mol_type = other RNA
tacttctcagctatagcttc

SEQ ID NO: 47970 - RNA, 20 nt, synthetic construct
  source 1..20: mol_type = other RNA
tacttctgagtgttacttga

SEQ ID NO: 47971 - RNA, 20 nt, synthetic construct
  source 1..20: mol_type = other RNA
tacttctggaaagttcaaat

SEQ ID NO: 47972 - RNA, 20 nt, synthetic construct
  source 1..20: mol_type = other RNA
tacttctttctctttcagcc

SEQ ID NO: 47973 - RNA, 20 nt, synthetic construct
  source 1..20: mol_type = other RNA
tacttgaaatcatttcactc

SEQ ID NO: 47974 - RNA, 20 nt, synthetic construct
  source 1..20: mol_type = other RNA
tacttgaacattctgtagaa

SEQ ID NO: 47975 - RNA, 20 nt, synthetic construct
  source 1..20: mol_type = other RNA
tacttgacacaaaggactgg

SEQ ID NO: 47976 - RNA, 20 nt, synthetic construct
  source 1..20: mol_type = other RNA
tacttgactattttaccctc

SEQ ID NO: 47977 - RNA, 20 nt, synthetic construct
  source 1..20: mol_type = other RNA
tacttgagagcagagacaca

SEQ ID NO: 47978 - RNA, 20 nt, synthetic construct
  source 1..20: mol_type = other RNA
tacttgagccccagaatagg

SEQ ID NO: 47979 - RNA, 20 nt, synthetic construct
  source 1..20: mol_type = other RNA
tacttgatctacatttagat

SEQ ID NO: 47980 - RNA, 20 nt, synthetic construct
  source 1..20: mol_type = other RNA
tacttgattacaagggtgac

SEQ ID NO: 47981 - RNA, 20 nt, synthetic construct
  source 1..20: mol_type = other RNA
tacttgcttggtttcacacg

SEQ ID NO: 47982 - RNA, 20 nt, synthetic construct
  source 1..20: mol_type = other RNA
tacttgctttattacttcag

SEQ ID NO: 47983 - RNA, 20 nt, synthetic construct
  source 1..20: mol_type = other RNA
tacttggacaggggacatga

SEQ ID NO: 47984 - RNA, 20 nt, synthetic construct
  source 1..20: mol_type = other RNA
tacttggatcttatctgctg

SEQ ID NO: 47985 - RNA, 20 nt, synthetic construct
  source 1..20: mol_type = other RNA
tacttggctcctcccggcta

SEQ ID NO: 47986 - RNA, 20 nt, synthetic construct
  source 1..20: mol_type = other RNA
tacttggggagagtgggccc

SEQ ID NO: 47987 - RNA, 20 nt, synthetic construct
  source 1..20: mol_type = other RNA
tacttgggtataaatgatga

SEQ ID NO: 47988 - RNA, 20 nt, synthetic construct
  source 1..20: mol_type = other RNA
tacttgtcaagttctgattt

SEQ ID NO: 47989 - RNA, 20 nt, synthetic construct
  source 1..20: mol_type = other RNA
tacttgtcaggtgggcactg

SEQ ID NO: 47990 - RNA, 20 nt, synthetic construct
  source 1..20: mol_type = other RNA
tacttgtcatttctgcttag

SEQ ID NO: 47991 - RNA, 20 nt, synthetic construct
  source 1..20: mol_type = other RNA
tacttgtctttttgtgactt

SEQ ID NO: 47992 - RNA, 20 nt, synthetic construct
  source 1..20: mol_type = other RNA
tacttgtgtagcgggaaaaa

SEQ ID NO: 47993 - RNA, 20 nt, synthetic construct
  source 1..20: mol_type = other RNA
tactttaaatcagggccttt

SEQ ID NO: 47994 - RNA, 20 nt, synthetic construct
  source 1..20: mol_type = other RNA
tactttacagttatgtcagt

SEQ ID NO: 47995 - RNA, 20 nt, synthetic construct
  source 1..20: mol_type = other RNA
tactttagacatgggctaaa

SEQ ID NO: 47996 - RNA, 20 nt, synthetic construct
  source 1..20: mol_type = other RNA
tactttcacactgattttct

SEQ ID NO: 47997 - RNA, 20 nt, synthetic construct
  source 1..20: mol_type = other RNA
tactttcacataaggtatat

SEQ ID NO: 47998 - RNA, 20 nt, synthetic construct
  source 1..20: mol_type = other RNA
tactttcagctcaaacagct

SEQ ID NO: 47999 - RNA, 20 nt, synthetic construct
  source 1..20: mol_type = other RNA
tactttcccatctctagttt

SEQ ID NO: 48000 - RNA, 20 nt, synthetic construct
  source 1..20: mol_type = other RNA
tactttctaatcctttgcac

SEQ ID NO: 48001 - RNA, 20 nt, synthetic construct
  source 1..20: mol_type = other RNA
tactttcttcaaccatactt

SEQ ID NO: 48002 - RNA, 20 nt, synthetic construct
  source 1..20: mol_type = other RNA
tactttgaatttaagacaca

SEQ ID NO: 48003 - RNA, 20 nt, synthetic construct
  source 1..20: mol_type = other RNA
tactttgcgaaacacactcg

SEQ ID NO: 48004 - RNA, 20 nt, synthetic construct
  source 1..20: mol_type = other RNA
tactttggaaggtaggaggg

SEQ ID NO: 48005 - RNA, 20 nt, synthetic construct
  source 1..20: mol_type = other RNA
tactttgtcaggcatgctaa

SEQ ID NO: 48006 - RNA, 20 nt, synthetic construct
  source 1..20: mol_type = other RNA
tacttttaaagaaaggtctc

SEQ ID NO: 48007 - RNA, 20 nt, synthetic construct
  source 1..20: mol_type = other RNA
tacttttagtttacactatg

SEQ ID NO: 48008 - RNA, 20 nt, synthetic construct
  source 1..20: mol_type = other RNA
tacttttcaactgaacaacg

SEQ ID NO: 48009 - RNA, 20 nt, synthetic construct
  source 1..20: mol_type = other RNA
tactttttcatccaaacaga

SEQ ID NO: 48010 - RNA, 20 nt, synthetic construct
  source 1..20: mol_type = other RNA
tactttttgtcacacggaaa

SEQ ID NO: 48011 - RNA, 20 nt, synthetic construct
  source 1..20: mol_type = other RNA
tacttttttgtagagacaga

SEQ ID NO: 48012 - RNA, 20 nt, synthetic construct
  source 1..20: mol_type = other RNA
tagaaaaacaccaaaaaagc

SEQ ID NO: 48013 - RNA, 20 nt, synthetic construct
  source 1..20: mol_type = other RNA
tagaaaacatatccttctac

SEQ ID NO: 48014 - RNA, 20 nt, synthetic construct
  source 1..20: mol_type = other RNA
tagaaaaccgacagcagata

SEQ ID NO: 48015 - RNA, 20 nt, synthetic construct
  source 1..20: mol_type = other RNA
tagaaaacttgagcagatca

SEQ ID NO: 48016 - RNA, 20 nt, synthetic construct
  source 1..20: mol_type = other RNA
tagaaaagacaatagctagt

SEQ ID NO: 48017 - RNA, 20 nt, synthetic construct
  source 1..20: mol_type = other RNA
tagaaaagataagtagaagg

SEQ ID NO: 48018 - RNA, 20 nt, synthetic construct
  source 1..20: mol_type = other RNA
tagaaaatacagttttgacc

SEQ ID NO: 48019 - RNA, 20 nt, synthetic construct
  source 1..20: mol_type = other RNA
tagaaaatagggacggcctt

SEQ ID NO: 48020 - RNA, 20 nt, synthetic construct
  source 1..20: mol_type = other RNA
tagaaaatagtatgaaggtt

SEQ ID NO: 48021 - RNA, 20 nt, synthetic construct
  source 1..20: mol_type = other RNA
tagaaaatcatacattttcc

SEQ ID NO: 48022 - RNA, 20 nt, synthetic construct
  source 1..20: mol_type = other RNA
tagaaaatccttacttccag

SEQ ID NO: 48023 - RNA, 20 nt, synthetic construct
  source 1..20: mol_type = other RNA
tagaaaatgcttatgtcttg

SEQ ID NO: 48024 - RNA, 20 nt, synthetic construct
  source 1..20: mol_type = other RNA
tagaaaattagctgactttc

SEQ ID NO: 48025 - RNA, 20 nt, synthetic construct
  source 1..20: mol_type = other RNA
tagaaacatcccaagtgccc

SEQ ID NO: 48026 - RNA, 20 nt, synthetic construct
  source 1..20: mol_type = other RNA
tagaaactggtgaactgggt

SEQ ID NO: 48027 - RNA, 20 nt, synthetic construct
  source 1..20: mol_type = other RNA
tagaaacttcttctgttgga

SEQ ID NO: 48028 - RNA, 20 nt, synthetic construct
  source 1..20: mol_type = other RNA
tagaaacttggattgtgtgt

SEQ ID NO: 48029 - RNA, 20 nt, synthetic construct
  source 1..20: mol_type = other RNA
tagaaagaaaatccaaaagc

SEQ ID NO: 48030 - RNA, 20 nt, synthetic construct
  source 1..20: mol_type = other RNA
tagaaagataaatccaacga

SEQ ID NO: 48031 - RNA, 20 nt, synthetic construct
  source 1..20: mol_type = other RNA
tagaaagcaccagggcctct

SEQ ID NO: 48032 - RNA, 20 nt, synthetic construct
  source 1..20: mol_type = other RNA
tagaaagcaggttcatttta

SEQ ID NO: 48033 - RNA, 20 nt, synthetic construct
  source 1..20: mol_type = other RNA
tagaaagctggactcattcc

SEQ ID NO: 48034 - RNA, 20 nt, synthetic construct
  source 1..20: mol_type = other RNA
tagaaaggaattgtaatcac

SEQ ID NO: 48035 - RNA, 20 nt, synthetic construct
  source 1..20: mol_type = other RNA
tagaaaggagaccagttagg

SEQ ID NO: 48036 - RNA, 20 nt, synthetic construct
  source 1..20: mol_type = other RNA
tagaaaggagggactgaaac

SEQ ID NO: 48037 - RNA, 20 nt, synthetic construct
  source 1..20: mol_type = other RNA
tagaaagtagattagctttt

SEQ ID NO: 48038 - RNA, 20 nt, synthetic construct
  source 1..20: mol_type = other RNA
tagaaagttagtgtctaatg

SEQ ID NO: 48039 - RNA, 20 nt, synthetic construct
  source 1..20: mol_type = other RNA
tagaaataactttaatcacc

SEQ ID NO: 48040 - RNA, 20 nt, synthetic construct
  source 1..20: mol_type = other RNA
tagaaatacctgcaggttga

SEQ ID NO: 48041 - RNA, 20 nt, synthetic construct
  source 1..20: mol_type = other RNA
tagaaatcatacacgagtgt

SEQ ID NO: 48042 - RNA, 20 nt, synthetic construct
  source 1..20: mol_type = other RNA
tagaaatcttccagaaggag

SEQ ID NO: 48043 - RNA, 20 nt, synthetic construct
  source 1..20: mol_type = other RNA
tagaaatgaagatggcctcc

SEQ ID NO: 48044 - RNA, 20 nt, synthetic construct
  source 1..20: mol_type = other RNA
tagaaatgtggaagcagaac

SEQ ID NO: 48045 - RNA, 20 nt, synthetic construct
  source 1..20: mol_type = other RNA
tagaaatgtggagataaaga

SEQ ID NO: 48046 - RNA, 20 nt, synthetic construct
  source 1..20: mol_type = other RNA
tagaaatttaaggaccaggt

SEQ ID NO: 48047 - RNA, 20 nt, synthetic construct
  source 1..20: mol_type = other RNA
tagaacaattttgaatgtgt

SEQ ID NO: 48048 - RNA, 20 nt, synthetic construct
  source 1..20: mol_type = other RNA
tagaacagaataaaaagtga

SEQ ID NO: 48049 - RNA, 20 nt, synthetic construct
  source 1..20: mol_type = other RNA
tagaacatataatccaactg

SEQ ID NO: 48050 - RNA, 20 nt, synthetic construct
  source 1..20: mol_type = other RNA
tagaacatctggcagcaggg

SEQ ID NO: 48051 - RNA, 20 nt, synthetic construct
  source 1..20: mol_type = other RNA
tagaactagaactgtgttac

SEQ ID NO: 48052 - RNA, 20 nt, synthetic construct
  source 1..20: mol_type = other RNA
tagaactagaatactccacc

SEQ ID NO: 48053 - RNA, 20 nt, synthetic construct
  source 1..20: mol_type = other RNA
tagaactgtcacaattcaca

SEQ ID NO: 48054 - RNA, 20 nt, synthetic construct
  source 1..20: mol_type = other RNA
tagaactgtgttacattgcc

SEQ ID NO: 48055 - RNA, 20 nt, synthetic construct
  source 1..20: mol_type = other RNA
tagaacttatgcatcttgca

SEQ ID NO: 48056 - RNA, 20 nt, synthetic construct
  source 1..20: mol_type = other RNA
tagaagaaatgggtaaattt

SEQ ID NO: 48057 - RNA, 20 nt, synthetic construct
  source 1..20: mol_type = other RNA
tagaagaagacttaggagaa

SEQ ID NO: 48058 - RNA, 20 nt, synthetic construct
  source 1..20: mol_type = other RNA
tagaagaatgattatttgcg

SEQ ID NO: 48059 - RNA, 20 nt, synthetic construct
  source 1..20: mol_type = other RNA
tagaagacaatactgttatg

SEQ ID NO: 48060 - RNA, 20 nt, synthetic construct
  source 1..20: mol_type = other RNA
tagaagacctcaaattctga

SEQ ID NO: 48061 - RNA, 20 nt, synthetic construct
  source 1..20: mol_type = other RNA
tagaagactcagcagtttta

SEQ ID NO: 48062 - RNA, 20 nt, synthetic construct
  source 1..20: mol_type = other RNA
tagaagagcagtgtgttctg

SEQ ID NO: 48063 - RNA, 20 nt, synthetic construct
  source 1..20: mol_type = other RNA
tagaagagtaatggttggcc

SEQ ID NO: 48064 - RNA, 20 nt, synthetic construct
  source 1..20: mol_type = other RNA
tagaagcactttttaccaag

SEQ ID NO: 48065 - RNA, 20 nt, synthetic construct
  source 1..20: mol_type = other RNA
tagaagcagcaagggtggct

SEQ ID NO: 48066 - RNA, 20 nt, synthetic construct
  source 1..20: mol_type = other RNA
tagaagcatctgatacactt

SEQ ID NO: 48067 - RNA, 20 nt, synthetic construct
  source 1..20: mol_type = other RNA
tagaagcgctcttcaagcat

SEQ ID NO: 48068 - RNA, 20 nt, synthetic construct
  source 1..20: mol_type = other RNA
tagaaggatatgttttctaa

SEQ ID NO: 48069 - RNA, 20 nt, synthetic construct
  source 1..20: mol_type = other RNA
tagaaggattgttcatgtct

SEQ ID NO: 48070 - RNA, 20 nt, synthetic construct
  source 1..20: mol_type = other RNA
tagaaggccagagggaatct

SEQ ID NO: 48071 - RNA, 20 nt, synthetic construct
  source 1..20: mol_type = other RNA
tagaaggccctatgccttca

SEQ ID NO: 48072 - RNA, 20 nt, synthetic construct
  source 1..20: mol_type = other RNA
tagaagggagaacccaggaa

SEQ ID NO: 48073 - RNA, 20 nt, synthetic construct
  source 1..20: mol_type = other RNA
tagaaggtaagaatgtcaag

SEQ ID NO: 48074 - RNA, 20 nt, synthetic construct
  source 1..20: mol_type = other RNA
tagaaggtcaatctaggagg

SEQ ID NO: 48075 - RNA, 20 nt, synthetic construct
  source 1..20: mol_type = other RNA
tagaagtaaatcccggccag

SEQ ID NO: 48076 - RNA, 20 nt, synthetic construct
  source 1..20: mol_type = other RNA
tagaagtacaaacattacag

SEQ ID NO: 48077 - RNA, 20 nt, synthetic construct
  source 1..20: mol_type = other RNA
tagaagtatcccagatgggg

SEQ ID NO: 48078 - RNA, 20 nt, synthetic construct
  source 1..20: mol_type = other RNA
tagaagtcccagttcaaggt

SEQ ID NO: 48079 - RNA, 20 nt, synthetic construct
  source 1..20: mol_type = other RNA
tagaagtgtatcagatgctt

SEQ ID NO: 48080 - RNA, 20 nt, synthetic construct
  source 1..20: mol_type = other RNA
tagaataatacacttttcag

SEQ ID NO: 48081 - RNA, 20 nt, synthetic construct
  source 1..20: mol_type = other RNA
tagaataccacttagtttgc

SEQ ID NO: 48082 - RNA, 20 nt, synthetic construct
  source 1..20: mol_type = other RNA
tagaatactccaccagcatc

SEQ ID NO: 48083 - RNA, 20 nt, synthetic construct
  source 1..20: mol_type = other RNA
tagaatataaactcttcctt

SEQ ID NO: 48084 - RNA, 20 nt, synthetic construct
  source 1..20: mol_type = other RNA
tagaatatccaagcacaaac

SEQ ID NO: 48085 - RNA, 20 nt, synthetic construct
  source 1..20: mol_type = other RNA
tagaatcatccggggagctt

SEQ ID NO: 48086 - RNA, 20 nt, synthetic construct
  source 1..20: mol_type = other RNA
tagaatgcatccctcctctg

SEQ ID NO: 48087 - RNA, 20 nt, synthetic construct
  source 1..20: mol_type = other RNA
tagaatgtgacttcgtcaag

SEQ ID NO: 48088 - RNA, 20 nt, synthetic construct
  source 1..20: mol_type = other RNA
tagaatgtttttccgtctag

SEQ ID NO: 48089 - RNA, 20 nt, synthetic construct
  source 1..20: mol_type = other RNA
tagaattacaggcatgagtc

SEQ ID NO: 48090 - RNA, 20 nt, synthetic construct
  source 1..20: mol_type = other RNA
tagaattcaggacagtcatc

SEQ ID NO: 48091 - RNA, 20 nt, synthetic construct
  source 1..20: mol_type = other RNA
tagaattcaggacagttatt

SEQ ID NO: 48092 - RNA, 20 nt, synthetic construct
  source 1..20: mol_type = other RNA
tagaattctctctcaactgg

SEQ ID NO: 48093 - RNA, 20 nt, synthetic construct
  source 1..20: mol_type = other RNA
tagaattcttcttctgttat

SEQ ID NO: 48094 - RNA, 20 nt, synthetic construct
  source 1..20: mol_type = other RNA
tagaattgactttaccctgc

SEQ ID NO: 48095 - RNA, 20 nt, synthetic construct
  source 1..20: mol_type = other RNA
tagaattttgcttttgcttt

SEQ ID NO: 48096 - RNA, 20 nt, synthetic construct
  source 1..20: mol_type = other RNA
tagacaaagacaagttctta

SEQ ID NO: 48097 - RNA, 20 nt, synthetic construct
  source 1..20: mol_type = other RNA
tagacacatttttgacagcc

SEQ ID NO: 48098 - RNA, 20 nt, synthetic construct
  source 1..20: mol_type = other RNA
tagacactaactttctattc

SEQ ID NO: 48099 - RNA, 20 nt, synthetic construct
  source 1..20: mol_type = other RNA
tagacagcatccccagaaag

SEQ ID NO: 48100 - RNA, 20 nt, synthetic construct
  source 1..20: mol_type = other RNA
tagacatgagtaaaaagaaa

SEQ ID NO: 48101 - RNA, 20 nt, synthetic construct
  source 1..20: mol_type = other RNA
tagacatgggctaaataaaa

SEQ ID NO: 48102 - RNA, 20 nt, synthetic construct
  source 1..20: mol_type = other RNA
tagaccagatgcgtggttca

SEQ ID NO: 48103 - RNA, 20 nt, synthetic construct
  source 1..20: mol_type = other RNA
tagaccatataatctaaccc

SEQ ID NO: 48104 - RNA, 20 nt, synthetic construct
  source 1..20: mol_type = other RNA
tagacccaaagcaaaagcaa

SEQ ID NO: 48105 - RNA, 20 nt, synthetic construct
  source 1..20: mol_type = other RNA
tagaccctgttagtccccta

SEQ ID NO: 48106 - RNA, 20 nt, synthetic construct
  source 1..20: mol_type = other RNA
tagaccgaggaaacccgctc

SEQ ID NO: 48107 - RNA, 20 nt, synthetic construct
  source 1..20: mol_type = other RNA
tagacctcaaattaatcagt

SEQ ID NO: 48108 - RNA, 20 nt, synthetic construct
  source 1..20: mol_type = other RNA
tagacctcctagattgacct

SEQ ID NO: 48109 - RNA, 20 nt, synthetic construct
  source 1..20: mol_type = other RNA
tagacctgaatgactgttgc

SEQ ID NO: 48110 - RNA, 20 nt, synthetic construct
  source 1..20: mol_type = other RNA
tagacctttcttaggtttct

SEQ ID NO: 48111 - RNA, 20 nt, synthetic construct
  source 1..20: mol_type = other RNA
tagacggaaaaacattctac

SEQ ID NO: 48112 - RNA, 20 nt, synthetic construct
  source 1..20: mol_type = other RNA
tagactaagaaaaacagaag

SEQ ID NO: 48113 - RNA, 20 nt, synthetic construct
  source 1..20: mol_type = other RNA
tagactcccaacttataata

SEQ ID NO: 48114 - RNA, 20 nt, synthetic construct
  source 1..20: mol_type = other RNA
tagactcttcagaggtctgt

SEQ ID NO: 48115 - RNA, 20 nt, synthetic construct
  source 1..20: mol_type = other RNA
tagactgcacataaaaggat

SEQ ID NO: 48116 - RNA, 20 nt, synthetic construct
  source 1..20: mol_type = other RNA
tagactgccaggtagggagg

SEQ ID NO: 48117 - RNA, 20 nt, synthetic construct
  source 1..20: mol_type = other RNA
tagactgcctgaggtctcaa

SEQ ID NO: 48118 - RNA, 20 nt, synthetic construct
  source 1..20: mol_type = other RNA
tagactggattaaggagatg

SEQ ID NO: 48119 - RNA, 20 nt, synthetic construct
  source 1..20: mol_type = other RNA
tagactgtaaaaattttctc

SEQ ID NO: 48120 - RNA, 20 nt, synthetic construct
  source 1..20: mol_type = other RNA
tagactttagagtcagttgt

SEQ ID NO: 48121 - RNA, 20 nt, synthetic construct
  source 1..20: mol_type = other RNA
tagagaaaatgttatacagc

SEQ ID NO: 48122 - RNA, 20 nt, synthetic construct
  source 1..20: mol_type = other RNA
tagagaaacaggattacaat

SEQ ID NO: 48123 - RNA, 20 nt, synthetic construct
  source 1..20: mol_type = other RNA
tagagaaagcatcagagctt

SEQ ID NO: 48124 - RNA, 20 nt, synthetic construct
  source 1..20: mol_type = other RNA
tagagaagaatgagaaacat

SEQ ID NO: 48125 - RNA, 20 nt, synthetic construct
  source 1..20: mol_type = other RNA
tagagaaggctttgtgttgg

SEQ ID NO: 48126 - RNA, 20 nt, synthetic construct
  source 1..20: mol_type = other RNA
tagagacagaatcttactgg

SEQ ID NO: 48127 - RNA, 20 nt, synthetic construct
  source 1..20: mol_type = other RNA
tagagactggatcctggagg

SEQ ID NO: 48128 - RNA, 20 nt, synthetic construct
  source 1..20: mol_type = other RNA
tagagagatgcctgtgcttg

SEQ ID NO: 48129 - RNA, 20 nt, synthetic construct
  source 1..20: mol_type = other RNA
tagagagattcaagaaacca

SEQ ID NO: 48130 - RNA, 20 nt, synthetic construct
  source 1..20: mol_type = other RNA
tagagatcttgtgtatcttt

SEQ ID NO: 48131 - RNA, 20 nt, synthetic construct
  source 1..20: mol_type = other RNA
tagagatgaggttttacgat

SEQ ID NO: 48132 - RNA, 20 nt, synthetic construct
  source 1..20: mol_type = other RNA
tagagatgggaaagtattcc

SEQ ID NO: 48133 - RNA, 20 nt, synthetic construct
  source 1..20: mol_type = other RNA
tagagattaggcagaaccac

SEQ ID NO: 48134 - RNA, 20 nt, synthetic construct
  source 1..20: mol_type = other RNA
tagagatttgctgtataaca

SEQ ID NO: 48135 - RNA, 20 nt, synthetic construct
  source 1..20: mol_type = other RNA
tagagcaagcaacaccagat

SEQ ID NO: 48136 - RNA, 20 nt, synthetic construct
  source 1..20: mol_type = other RNA
tagagcactttcgtattttt

SEQ ID NO: 48137 - RNA, 20 nt, synthetic construct
  source 1..20: mol_type = other RNA
tagagccaggaagtcagcaa

SEQ ID NO: 48138 - RNA, 20 nt, synthetic construct
  source 1..20: mol_type = other RNA
tagagccccaagaaagcagg

SEQ ID NO: 48139 - RNA, 20 nt, synthetic construct
  source 1..20: mol_type = other RNA
tagagctcacacgagaagga

SEQ ID NO: 48140 - RNA, 20 nt, synthetic construct
  source 1..20: mol_type = other RNA
tagagctgctgtaacaaaga

SEQ ID NO: 48141 - RNA, 20 nt, synthetic construct
  source 1..20: mol_type = other RNA
tagagcttcaacctcctggg

SEQ ID NO: 48142 - RNA, 20 nt, synthetic construct
  source 1..20: mol_type = other RNA
tagagcttttattttactct

SEQ ID NO: 48143 - RNA, 20 nt, synthetic construct
  source 1..20: mol_type = other RNA
tagaggactgcctattttgt

SEQ ID NO: 48144 - RNA, 20 nt, synthetic construct
  source 1..20: mol_type = other RNA
tagaggaggagggttagatt

SEQ ID NO: 48145 - RNA, 20 nt, synthetic construct
  source 1..20: mol_type = other RNA
tagaggatgggcattccaga

SEQ ID NO: 48146 - RNA, 20 nt, synthetic construct
  source 1..20: mol_type = other RNA
tagaggattccaggtttaca

SEQ ID NO: 48147 - RNA, 20 nt, synthetic construct
  source 1..20: mol_type = other RNA
tagaggcagttgagttttca

SEQ ID NO: 48148 - RNA, 20 nt, synthetic construct
  source 1..20: mol_type = other RNA
tagaggccgagggttgaaca

SEQ ID NO: 48149 - RNA, 20 nt, synthetic construct
  source 1..20: mol_type = other RNA
tagaggctgcaccctcctcc

SEQ ID NO: 48150 - RNA, 20 nt, synthetic construct
  source 1..20: mol_type = other RNA
tagaggctgtattgtaggaa

SEQ ID NO: 48151 - RNA, 20 nt, synthetic construct
  source 1..20: mol_type = other RNA
tagagggaatttgttttacc

SEQ ID NO: 48152 - RNA, 20 nt, synthetic construct
  source 1..20: mol_type = other RNA
tagagggagcatcttcccat

SEQ ID NO: 48153 - RNA, 20 nt, synthetic construct
  source 1..20: mol_type = other RNA
tagagggatgaatgttgtac

SEQ ID NO: 48154 - RNA, 20 nt, synthetic construct
  source 1..20: mol_type = other RNA
tagagggcctaaataaaaca

SEQ ID NO: 48155 - RNA, 20 nt, synthetic construct
  source 1..20: mol_type = other RNA
tagagggcttcatgctggga

SEQ ID NO: 48156 - RNA, 20 nt, synthetic construct
  source 1..20: mol_type = other RNA
tagagggtaagaccaaaatg

SEQ ID NO: 48157 - RNA, 20 nt, synthetic construct
  source 1..20: mol_type = other RNA
tagaggtctgtctttcagta

SEQ ID NO: 48158 - RNA, 20 nt, synthetic construct
  source 1..20: mol_type = other RNA
tagaggtgaagttaagggcc

SEQ ID NO: 48159 - RNA, 20 nt, synthetic construct
  source 1..20: mol_type = other RNA
tagagtaactgtcatcagcg

SEQ ID NO: 48160 - RNA, 20 nt, synthetic construct
  source 1..20: mol_type = other RNA
tagagtaagcaactgcatct

SEQ ID NO: 48161 - RNA, 20 nt, synthetic construct
  source 1..20: mol_type = other RNA
tagagtaccaggtcagccag

SEQ ID NO: 48162 - RNA, 20 nt, synthetic construct
  source 1..20: mol_type = other RNA
tagagtattacctatgaata

SEQ ID NO: 48163 - RNA, 20 nt, synthetic construct
  source 1..20: mol_type = other RNA
tagagtcagttgtttacttg

SEQ ID NO: 48164 - RNA, 20 nt, synthetic construct
  source 1..20: mol_type = other RNA
tagagtgaaaagaaacaagt

SEQ ID NO: 48165 - RNA, 20 nt, synthetic construct
  source 1..20: mol_type = other RNA
tagagttccatctgttatag

SEQ ID NO: 48166 - RNA, 20 nt, synthetic construct
  source 1..20: mol_type = other RNA
tagagttgtaacacatattt

SEQ ID NO: 48167 - RNA, 20 nt, synthetic construct
  source 1..20: mol_type = other RNA
tagagtttgcattacatgaa

SEQ ID NO: 48168 - RNA, 20 nt, synthetic construct
  source 1..20: mol_type = other RNA
tagataaactggaattcatc

SEQ ID NO: 48169 - RNA, 20 nt, synthetic construct
  source 1..20: mol_type = other RNA
tagataagaaaatgtgacat

SEQ ID NO: 48170 - RNA, 20 nt, synthetic construct
  source 1..20: mol_type = other RNA
tagataaggttgttcttggt

SEQ ID NO: 48171 - RNA, 20 nt, synthetic construct
  source 1..20: mol_type = other RNA
tagataccagaccctttatc

SEQ ID NO: 48172 - RNA, 20 nt, synthetic construct
  source 1..20: mol_type = other RNA
tagataggatgggcagactc

SEQ ID NO: 48173 - RNA, 20 nt, synthetic construct
  source 1..20: mol_type = other RNA
tagataggtcatgtacataa

SEQ ID NO: 48174 - RNA, 20 nt, synthetic construct
  source 1..20: mol_type = other RNA
tagatagtggtttgaagctt

SEQ ID NO: 48175 - RNA, 20 nt, synthetic construct
  source 1..20: mol_type = other RNA
tagatatcccatataagggg

SEQ ID NO: 48176 - RNA, 20 nt, synthetic construct
  source 1..20: mol_type = other RNA
tagatatgggagtccctgct

SEQ ID NO: 48177 - RNA, 20 nt, synthetic construct
  source 1..20: mol_type = other RNA
tagatatgtgatttgtagat

SEQ ID NO: 48178 - RNA, 20 nt, synthetic construct
  source 1..20: mol_type = other RNA
tagatattggcaacatttta

SEQ ID NO: 48179 - RNA, 20 nt, synthetic construct
  source 1..20: mol_type = other RNA
tagatattttctgtcattct

SEQ ID NO: 48180 - RNA, 20 nt, synthetic construct
  source 1..20: mol_type = other RNA
tagatcaagcccttccttgc

SEQ ID NO: 48181 - RNA, 20 nt, synthetic construct
  source 1..20: mol_type = other RNA
tagatcaagtatttcctatg

SEQ ID NO: 48182 - RNA, 20 nt, synthetic construct
  source 1..20: mol_type = other RNA
tagatcaagtcctttccaga

SEQ ID NO: 48183 - RNA, 20 nt, synthetic construct
  source 1..20: mol_type = other RNA
tagatcacaaggactggctt

SEQ ID NO: 48184 - RNA, 20 nt, synthetic construct
  source 1..20: mol_type = other RNA
tagatcaccaggggctgggg

SEQ ID NO: 48185 - RNA, 20 nt, synthetic construct
  source 1..20: mol_type = other RNA
tagatcctgaggaagctaat

SEQ ID NO: 48186 - RNA, 20 nt, synthetic construct
  source 1..20: mol_type = other RNA
tagatctcttttcctttaac

SEQ ID NO: 48187 - RNA, 20 nt, synthetic construct
  source 1..20: mol_type = other RNA
tagatctgggataatgctat

SEQ ID NO: 48188 - RNA, 20 nt, synthetic construct
  source 1..20: mol_type = other RNA
tagatgaaactaaatgtgag

SEQ ID NO: 48189 - RNA, 20 nt, synthetic construct
  source 1..20: mol_type = other RNA
tagatgacgaaagtgaagcc

SEQ ID NO: 48190 - RNA, 20 nt, synthetic construct
  source 1..20: mol_type = other RNA
tagatgagagtggcctaaat

SEQ ID NO: 48191 - RNA, 20 nt, synthetic construct
  source 1..20: mol_type = other RNA
tagatgagcccaggagttgc

SEQ ID NO: 48192 - RNA, 20 nt, synthetic construct
  source 1..20: mol_type = other RNA
tagatgatgttttgaacgaa

SEQ ID NO: 48193 - RNA, 20 nt, synthetic construct
  source 1..20: mol_type = other RNA
tagatgattcgcattgctaa

SEQ ID NO: 48194 - RNA, 20 nt, synthetic construct
  source 1..20: mol_type = other RNA
tagatgcctagaaaggaatt

SEQ ID NO: 48195 - RNA, 20 nt, synthetic construct
  source 1..20: mol_type = other RNA
tagatgcctcgaaggcctgc

SEQ ID NO: 48196 - RNA, 20 nt, synthetic construct
  source 1..20: mol_type = other RNA
tagatgctaaacagtacagt

SEQ ID NO: 48197 - RNA, 20 nt, synthetic construct
  source 1..20: mol_type = other RNA
tagatggcttaggatcacca

SEQ ID NO: 48198 - RNA, 20 nt, synthetic construct
  source 1..20: mol_type = other RNA
tagatggtaaaacaaattcc

SEQ ID NO: 48199 - RNA, 20 nt, synthetic construct
  source 1..20: mol_type = other RNA
tagatggtgctgatttaaaa

SEQ ID NO: 48200 - RNA, 20 nt, synthetic construct
  source 1..20: mol_type = other RNA
tagatgttatgccccctctt

SEQ ID NO: 48201 - RNA, 20 nt, synthetic construct
  source 1..20: mol_type = other RNA
tagattacaaaagaacagga

SEQ ID NO: 48202 - RNA, 20 nt, synthetic construct
  source 1..20: mol_type = other RNA
tagattaccttgaagtttaa

SEQ ID NO: 48203 - RNA, 20 nt, synthetic construct
  source 1..20: mol_type = other RNA
tagattagcttttacgagga

SEQ ID NO: 48204 - RNA, 20 nt, synthetic construct
  source 1..20: mol_type = other RNA
tagattaggaaacagattga

SEQ ID NO: 48205 - RNA, 20 nt, synthetic construct
  source 1..20: mol_type = other RNA
tagattatatggtctaccat

SEQ ID NO: 48206 - RNA, 20 nt, synthetic construct
  source 1..20: mol_type = other RNA
tagattcatatgctttgagc

SEQ ID NO: 48207 - RNA, 20 nt, synthetic construct
  source 1..20: mol_type = other RNA
tagattcccccttatgtgtg

SEQ ID NO: 48208 - RNA, 20 nt, synthetic construct
  source 1..20: mol_type = other RNA
tagattccctctggccttct

SEQ ID NO: 48209 - RNA, 20 nt, synthetic construct
  source 1..20: mol_type = other RNA
tagattgaccttctacttat

SEQ ID NO: 48210 - RNA, 20 nt, synthetic construct
  source 1..20: mol_type = other RNA
tagattgggcttttcatata

SEQ ID NO: 48211 - RNA, 20 nt, synthetic construct
  source 1..20: mol_type = other RNA
tagattgttttaggtagtct

SEQ ID NO: 48212 - RNA, 20 nt, synthetic construct
  source 1..20: mol_type = other RNA
tagattgttttgttgctatt

SEQ ID NO: 48213 - RNA, 20 nt, synthetic construct
  source 1..20: mol_type = other RNA
tagatttatcaatagcagtg

SEQ ID NO: 48214 - RNA, 20 nt, synthetic construct
  source 1..20: mol_type = other RNA
tagatttatttttacccgtg

SEQ ID NO: 48215 - RNA, 20 nt, synthetic construct
  source 1..20: mol_type = other RNA
tagatttcaatctggaatgc

SEQ ID NO: 48216 - RNA, 20 nt, synthetic construct
  source 1..20: mol_type = other RNA
tagatttctgcatagagatc

SEQ ID NO: 48217 - RNA, 20 nt, synthetic construct
  source 1..20: mol_type = other RNA
tagatttttcctttgcctaa

SEQ ID NO: 48218 - RNA, 20 nt, synthetic construct
  source 1..20: mol_type = other RNA
tagcaaacaaacacactggg

SEQ ID NO: 48219 - RNA, 20 nt, synthetic construct
  source 1..20: mol_type = other RNA
tagcaaacatttatggaatt

SEQ ID NO: 48220 - RNA, 20 nt, synthetic construct
  source 1..20: mol_type = other RNA
tagcaaactactgatagcga

SEQ ID NO: 48221 - RNA, 20 nt, synthetic construct
  source 1..20: mol_type = other RNA
tagcaaactgaatcagacaa

SEQ ID NO: 48222 - RNA, 20 nt, synthetic construct
  source 1..20: mol_type = other RNA
tagcaaagaggcaaaactcc

SEQ ID NO: 48223 - RNA, 20 nt, synthetic construct
  source 1..20: mol_type = other RNA
tagcaacaaaacaatctaat

SEQ ID NO: 48224 - RNA, 20 nt, synthetic construct
  source 1..20: mol_type = other RNA
tagcaactgttttttcctcc

SEQ ID NO: 48225 - RNA, 20 nt, synthetic construct
  source 1..20: mol_type = other RNA
tagcaacttgcagaagagtg

SEQ ID NO: 48226 - RNA, 20 nt, synthetic construct
  source 1..20: mol_type = other RNA
tagcaagattactggataca

SEQ ID NO: 48227 - RNA, 20 nt, synthetic construct
  source 1..20: mol_type = other RNA
tagcaagctaataatttatc

SEQ ID NO: 48228 - RNA, 20 nt, synthetic construct
  source 1..20: mol_type = other RNA
tagcaaggaagcagaatgtc

SEQ ID NO: 48229 - RNA, 20 nt, synthetic construct
  source 1..20: mol_type = other RNA
tagcaatccaaggacagaaa

SEQ ID NO: 48230 - RNA, 20 nt, synthetic construct
  source 1..20: mol_type = other RNA
tagcaatccaggatcttact

SEQ ID NO: 48231 - RNA, 20 nt, synthetic construct
  source 1..20: mol_type = other RNA
tagcaatgcgaatcatctag

SEQ ID NO: 48232 - RNA, 20 nt, synthetic construct
  source 1..20: mol_type = other RNA
tagcacaactagtaagtaaa

SEQ ID NO: 48233 - RNA, 20 nt, synthetic construct
  source 1..20: mol_type = other RNA
tagcacagaaccatgtaaca

SEQ ID NO: 48234 - RNA, 20 nt, synthetic construct
  source 1..20: mol_type = other RNA
tagcacagaggcaacagtca

SEQ ID NO: 48235 - RNA, 20 nt, synthetic construct
  source 1..20: mol_type = other RNA
tagcaccctatttatgttgc

SEQ ID NO: 48236 - RNA, 20 nt, synthetic construct
  source 1..20: mol_type = other RNA
tagcacctttattaactaga

SEQ ID NO: 48237 - RNA, 20 nt, synthetic construct
  source 1..20: mol_type = other RNA
tagcagaaacacaggactgt

SEQ ID NO: 48238 - RNA, 20 nt, synthetic construct
  source 1..20: mol_type = other RNA
tagcagaaccttagaaattt

SEQ ID NO: 48239 - RNA, 20 nt, synthetic construct
  source 1..20: mol_type = other RNA
tagcagaatccccaaataac

SEQ ID NO: 48240 - RNA, 20 nt, synthetic construct
  source 1..20: mol_type = other RNA
tagcagaatggccctgcgat

SEQ ID NO: 48241 - RNA, 20 nt, synthetic construct
  source 1..20: mol_type = other RNA
tagcagacactgggttctca

SEQ ID NO: 48242 - RNA, 20 nt, synthetic construct
  source 1..20: mol_type = other RNA
tagcagcattgtttacagta

SEQ ID NO: 48243 - RNA, 20 nt, synthetic construct
  source 1..20: mol_type = other RNA
tagcaggactggactccttc

SEQ ID NO: 48244 - RNA, 20 nt, synthetic construct
  source 1..20: mol_type = other RNA
tagcaggattcttgttaagc

SEQ ID NO: 48245 - RNA, 20 nt, synthetic construct
  source 1..20: mol_type = other RNA
tagcagggactacagtcaca

SEQ ID NO: 48246 - RNA, 20 nt, synthetic construct
  source 1..20: mol_type = other RNA
tagcagggtcatgcacacgc

SEQ ID NO: 48247 - RNA, 20 nt, synthetic construct
  source 1..20: mol_type = other RNA
tagcaggtttaggaagcaca

SEQ ID NO: 48248 - RNA, 20 nt, synthetic construct
  source 1..20: mol_type = other RNA
tagcagtaaaatgaaaaaac

SEQ ID NO: 48249 - RNA, 20 nt, synthetic construct
  source 1..20: mol_type = other RNA
tagcagtgctgaaagctaga

SEQ ID NO: 48250 - RNA, 20 nt, synthetic construct
  source 1..20: mol_type = other RNA
tagcagtgggaagtggagtg

SEQ ID NO: 48251 - RNA, 20 nt, synthetic construct
  source 1..20: mol_type = other RNA
tagcagttctgtacccttac

SEQ ID NO: 48252 - RNA, 20 nt, synthetic construct
  source 1..20: mol_type = other RNA
tagcataattcgaaataatc

SEQ ID NO: 48253 - RNA, 20 nt, synthetic construct
  source 1..20: mol_type = other RNA
tagcatcaccatcatcatca

SEQ ID NO: 48254 - RNA, 20 nt, synthetic construct
  source 1..20: mol_type = other RNA
tagcatctagcacagaacca

SEQ ID NO: 48255 - RNA, 20 nt, synthetic construct
  source 1..20: mol_type = other RNA
tagcatcttagctcttccct

SEQ ID NO: 48256 - RNA, 20 nt, synthetic construct
  source 1..20: mol_type = other RNA
tagcatgcagtagctcatca

SEQ ID NO: 48257 - RNA, 20 nt, synthetic construct
  source 1..20: mol_type = other RNA
tagcatgcctgacaaagtat

SEQ ID NO: 48258 - RNA, 20 nt, synthetic construct
  source 1..20: mol_type = other RNA
tagcatgttgctttgcgaaa

SEQ ID NO: 48259 - RNA, 20 nt, synthetic construct
  source 1..20: mol_type = other RNA
tagcattatcccagatctaa

SEQ ID NO: 48260 - RNA, 20 nt, synthetic construct
  source 1..20: mol_type = other RNA
tagcattatccctttaaaat

SEQ ID NO: 48261 - RNA, 20 nt, synthetic construct
  source 1..20: mol_type = other RNA
tagcattgaagtatagtttg

SEQ ID NO: 48262 - RNA, 20 nt, synthetic construct
  source 1..20: mol_type = other RNA
tagcatttgaaaacatgttt

SEQ ID NO: 48263 - RNA, 20 nt, synthetic construct
  source 1..20: mol_type = other RNA
tagccaaagcaagccttggc

SEQ ID NO: 48264 - RNA, 20 nt, synthetic construct
  source 1..20: mol_type = other RNA
tagccaaaggtagaaacatc

SEQ ID NO: 48265 - RNA, 20 nt, synthetic construct
  source 1..20: mol_type = other RNA
tagccaacaaccataatgag

SEQ ID NO: 48266 - RNA, 20 nt, synthetic construct
  source 1..20: mol_type = other RNA
tagccaagcatggtggtagg

SEQ ID NO: 48267 - RNA, 20 nt, synthetic construct
  source 1..20: mol_type = other RNA
tagccaagggtttgtcaatt

SEQ ID NO: 48268 - RNA, 20 nt, synthetic construct
  source 1..20: mol_type = other RNA
tagccacaagccacatgtgg

SEQ ID NO: 48269 - RNA, 20 nt, synthetic construct
  source 1..20: mol_type = other RNA
tagccacagcgttgttcagt

SEQ ID NO: 48270 - RNA, 20 nt, synthetic construct
  source 1..20: mol_type = other RNA
tagccactctgaattctctg

SEQ ID NO: 48271 - RNA, 20 nt, synthetic construct
  source 1..20: mol_type = other RNA
tagccactgggtcttatagg

SEQ ID NO: 48272 - RNA, 20 nt, synthetic construct
  source 1..20: mol_type = other RNA
tagccacttcctattagaag

SEQ ID NO: 48273 - RNA, 20 nt, synthetic construct
  source 1..20: mol_type = other RNA
tagccaggcatgggggcgcg

SEQ ID NO: 48274 - RNA, 20 nt, synthetic construct
  source 1..20: mol_type = other RNA
tagccaggcgtggtggcgga

SEQ ID NO: 48275 - RNA, 20 nt, synthetic construct
  source 1..20: mol_type = other RNA
tagccagtgattggatattt

SEQ ID NO: 48276 - RNA, 20 nt, synthetic construct
  source 1..20: mol_type = other RNA
tagccagtgcagcaagcagt

SEQ ID NO: 48277 - RNA, 20 nt, synthetic construct
  source 1..20: mol_type = other RNA
tagccataagagtccccaac

SEQ ID NO: 48278 - RNA, 20 nt, synthetic construct
  source 1..20: mol_type = other RNA
tagccataatccttagatta

SEQ ID NO: 48279 - RNA, 20 nt, synthetic construct
  source 1..20: mol_type = other RNA
tagcccaacagggttttgtt

SEQ ID NO: 48280 - RNA, 20 nt, synthetic construct
  source 1..20: mol_type = other RNA
tagcccaagctaccatttat

SEQ ID NO: 48281 - RNA, 20 nt, synthetic construct
  source 1..20: mol_type = other RNA
tagcccacttgttgatgggg

SEQ ID NO: 48282 - RNA, 20 nt, synthetic construct
  source 1..20: mol_type = other RNA
tagcccagcacttccatttt

SEQ ID NO: 48283 - RNA, 20 nt, synthetic construct
  source 1..20: mol_type = other RNA
tagcccagcttccgggactt

SEQ ID NO: 48284 - RNA, 20 nt, synthetic construct
  source 1..20: mol_type = other RNA
tagcccatgtctaaagtatt

SEQ ID NO: 48285 - RNA, 20 nt, synthetic construct
  source 1..20: mol_type = other RNA
tagccccaaatacctctgaa

SEQ ID NO: 48286 - RNA, 20 nt, synthetic construct
  source 1..20: mol_type = other RNA
tagccccctgaatacccctc

SEQ ID NO: 48287 - RNA, 20 nt, synthetic construct
  source 1..20: mol_type = other RNA
tagcccctgctgccagatgt

SEQ ID NO: 48288 - RNA, 20 nt, synthetic construct
  source 1..20: mol_type = other RNA
tagccccttatcaggaaagt

SEQ ID NO: 48289 - RNA, 20 nt, synthetic construct
  source 1..20: mol_type = other RNA
tagccgggaggagccaagta

SEQ ID NO: 48290 - RNA, 20 nt, synthetic construct
  source 1..20: mol_type = other RNA
tagccgggtgtagtggtgtg

SEQ ID NO: 48291 - RNA, 20 nt, synthetic construct
  source 1..20: mol_type = other RNA
tagcctagacctcaaattaa

SEQ ID NO: 48292 - RNA, 20 nt, synthetic construct
  source 1..20: mol_type = other RNA
tagcctccagaaaaccagaa

SEQ ID NO: 48293 - RNA, 20 nt, synthetic construct
  source 1..20: mol_type = other RNA
tagcctcctaagttttgggg

SEQ ID NO: 48294 - RNA, 20 nt, synthetic construct
  source 1..20: mol_type = other RNA
tagcctctctgggcttcact

SEQ ID NO: 48295 - RNA, 20 nt, synthetic construct
  source 1..20: mol_type = other RNA
tagccttccagagacaaagc

SEQ ID NO: 48296 - RNA, 20 nt, synthetic construct
  source 1..20: mol_type = other RNA
tagccttcttggagtaaacc

SEQ ID NO: 48297 - RNA, 20 nt, synthetic construct
  source 1..20: mol_type = other RNA
tagccttgccattctcccag

SEQ ID NO: 48298 - RNA, 20 nt, synthetic construct
  source 1..20: mol_type = other RNA
tagccttggtaaaatcacta

SEQ ID NO: 48299 - RNA, 20 nt, synthetic construct
  source 1..20: mol_type = other RNA
tagccttgtactgtgtggct

SEQ ID NO: 48300 - RNA, 20 nt, synthetic construct
  source 1..20: mol_type = other RNA
tagccttttacaccctaggt

SEQ ID NO: 48301 - RNA, 20 nt, synthetic construct
  source 1..20: mol_type = other RNA
tagcgaaagggattctggcc

SEQ ID NO: 48302 - RNA, 20 nt, synthetic construct
  source 1..20: mol_type = other RNA
tagcgaaaggtacgacgctc

SEQ ID NO: 48303 - RNA, 20 nt, synthetic construct
  source 1..20: mol_type = other RNA
tagcgagacctcatctctgc

SEQ ID NO: 48304 - RNA, 20 nt, synthetic construct
  source 1..20: mol_type = other RNA
tagcgctgatgtgttgacct

SEQ ID NO: 48305 - RNA, 20 nt, synthetic construct
  source 1..20: mol_type = other RNA
tagcgctggaggtcgggctg

SEQ ID NO: 48306 - RNA, 20 nt, synthetic construct
  source 1..20: mol_type = other RNA
tagcgctttaagcatcccat

SEQ ID NO: 48307 - RNA, 20 nt, synthetic construct
  source 1..20: mol_type = other RNA
tagcggaatgactatagaaa

SEQ ID NO: 48308 - RNA, 20 nt, synthetic construct
  source 1..20: mol_type = other RNA
tagcgggaaaaaataatatg

SEQ ID NO: 48309 - RNA, 20 nt, synthetic construct
  source 1..20: mol_type = other RNA
tagcgttcatccaaattatt

SEQ ID NO: 48310 - RNA, 20 nt, synthetic construct
  source 1..20: mol_type = other RNA
tagctaagaaacagtaatta

SEQ ID NO: 48311 - RNA, 20 nt, synthetic construct
  source 1..20: mol_type = other RNA
tagctaagtatgcagaaacc

SEQ ID NO: 48312 - RNA, 20 nt, synthetic construct
  source 1..20: mol_type = other RNA
tagctaatatctttggggag

SEQ ID NO: 48313 - RNA, 20 nt, synthetic construct
  source 1..20: mol_type = other RNA
tagctaatttcagagagacc

SEQ ID NO: 48314 - RNA, 20 nt, synthetic construct
  source 1..20: mol_type = other RNA
tagctacaaaagggaaaaca

SEQ ID NO: 48315 - RNA, 20 nt, synthetic construct
  source 1..20: mol_type = other RNA
tagctacttgggaggctgag

SEQ ID NO: 48316 - RNA, 20 nt, synthetic construct
  source 1..20: mol_type = other RNA
tagctaggaccataggcacg

SEQ ID NO: 48317 - RNA, 20 nt, synthetic construct
  source 1..20: mol_type = other RNA
tagctagtgatgttgagtat

SEQ ID NO: 48318 - RNA, 20 nt, synthetic construct
  source 1..20: mol_type = other RNA
tagctagtgtcttagtctga

SEQ ID NO: 48319 - RNA, 20 nt, synthetic construct
  source 1..20: mol_type = other RNA
tagctatatcccaaattggc

SEQ ID NO: 48320 - RNA, 20 nt, synthetic construct
  source 1..20: mol_type = other RNA
tagctatattcacttttgga

SEQ ID NO: 48321 - RNA, 20 nt, synthetic construct
  source 1..20: mol_type = other RNA
tagctatcctaatgggcgtg

SEQ ID NO: 48322 - RNA, 20 nt, synthetic construct
  source 1..20: mol_type = other RNA
tagctattagagaaatgcaa

SEQ ID NO: 48323 - RNA, 20 nt, synthetic construct
  source 1..20: mol_type = other RNA
tagctattatttgaaaaagg

SEQ ID NO: 48324 - RNA, 20 nt, synthetic construct
  source 1..20: mol_type = other RNA
tagctattgtcttttctatc

SEQ ID NO: 48325 - RNA, 20 nt, synthetic construct
  source 1..20: mol_type = other RNA
tagctcaaagcatatgaatc

SEQ ID NO: 48326 - RNA, 20 nt, synthetic construct
  source 1..20: mol_type = other RNA
tagctcactagagcttcaac

SEQ ID NO: 48327 - RNA, 20 nt, synthetic construct
  source 1..20: mol_type = other RNA
tagctcatcatttataccca

SEQ ID NO: 48328 - RNA, 20 nt, synthetic construct
  source 1..20: mol_type = other RNA
tagctccaaaagcgaaaggc

SEQ ID NO: 48329 - RNA, 20 nt, synthetic construct
  source 1..20: mol_type = other RNA
tagctccccattccctgtct

SEQ ID NO: 48330 - RNA, 20 nt, synthetic construct
  source 1..20: mol_type = other RNA
tagctcctgggaaaaggatt

SEQ ID NO: 48331 - RNA, 20 nt, synthetic construct
  source 1..20: mol_type = other RNA
tagctctcatgtcagagaca

SEQ ID NO: 48332 - RNA, 20 nt, synthetic construct
  source 1..20: mol_type = other RNA
tagctcttaagcttaggtct

SEQ ID NO: 48333 - RNA, 20 nt, synthetic construct
  source 1..20: mol_type = other RNA
tagctcttcccttaaccttt

SEQ ID NO: 48334 - RNA, 20 nt, synthetic construct
  source 1..20: mol_type = other RNA
tagctgaaggcactgtatgg

SEQ ID NO: 48335 - RNA, 20 nt, synthetic construct
  source 1..20: mol_type = other RNA
tagctgacccactggtttca

SEQ ID NO: 48336 - RNA, 20 nt, synthetic construct
  source 1..20: mol_type = other RNA
tagctgactttcatttgtaa

SEQ ID NO: 48337 - RNA, 20 nt, synthetic construct
  source 1..20: mol_type = other RNA
tagctgacttttaaaatatg

SEQ ID NO: 48338 - RNA, 20 nt, synthetic construct
  source 1..20: mol_type = other RNA
tagctgagaagtaacattac

SEQ ID NO: 48339 - RNA, 20 nt, synthetic construct
  source 1..20: mol_type = other RNA
tagctgcctcttcctgttgc

SEQ ID NO: 48340 - RNA, 20 nt, synthetic construct
  source 1..20: mol_type = other RNA
tagctggatgtggtgtggca

SEQ ID NO: 48341 - RNA, 20 nt, synthetic construct
  source 1..20: mol_type = other RNA
tagctggcaaaatggagaca

SEQ ID NO: 48342 - RNA, 20 nt, synthetic construct
  source 1..20: mol_type = other RNA
tagctgggatcacaggcgtt

SEQ ID NO: 48343 - RNA, 20 nt, synthetic construct
  source 1..20: mol_type = other RNA
tagctgggatggctgaaaga

SEQ ID NO: 48344 - RNA, 20 nt, synthetic construct
  source 1..20: mol_type = other RNA
tagctgggattacacacacc

SEQ ID NO: 48345 - RNA, 20 nt, synthetic construct
  source 1..20: mol_type = other RNA
tagctgggcgagatggcgtg

SEQ ID NO: 48346 - RNA, 20 nt, synthetic construct
  source 1..20: mol_type = other RNA
tagctggggcagcaaagcaa

SEQ ID NO: 48347 - RNA, 20 nt, synthetic construct
  source 1..20: mol_type = other RNA
tagctgtcgctctcctgtgc

SEQ ID NO: 48348 - RNA, 20 nt, synthetic construct
  source 1..20: mol_type = other RNA
tagctgtctggattgattcc

SEQ ID NO: 48349 - RNA, 20 nt, synthetic construct
  source 1..20: mol_type = other RNA
tagctgtctttaatgtaaaa

SEQ ID NO: 48350 - RNA, 20 nt, synthetic construct
  source 1..20: mol_type = other RNA
tagctgtgattaccggcatc

SEQ ID NO: 48351 - RNA, 20 nt, synthetic construct
  source 1..20: mol_type = other RNA
tagctgtggaagcacagtct

SEQ ID NO: 48352 - RNA, 20 nt, synthetic construct
  source 1..20: mol_type = other RNA
tagctgtggctcactcattt

SEQ ID NO: 48353 - RNA, 20 nt, synthetic construct
  source 1..20: mol_type = other RNA
tagctgttgaattgttgcgc

SEQ ID NO: 48354 - RNA, 20 nt, synthetic construct
  source 1..20: mol_type = other RNA
tagctgttttcatgcgacat

SEQ ID NO: 48355 - RNA, 20 nt, synthetic construct
  source 1..20: mol_type = other RNA
tagcttagaagaagacttag

SEQ ID NO: 48356 - RNA, 20 nt, synthetic construct
  source 1..20: mol_type = other RNA
tagcttattctttttctagt

SEQ ID NO: 48357 - RNA, 20 nt, synthetic construct
  source 1..20: mol_type = other RNA
tagcttcaatgagggcagag

SEQ ID NO: 48358 - RNA, 20 nt, synthetic construct
  source 1..20: mol_type = other RNA
tagcttcacgtgcattcata

SEQ ID NO: 48359 - RNA, 20 nt, synthetic construct
  source 1..20: mol_type = other RNA
tagcttcatataagtggaat

SEQ ID NO: 48360 - RNA, 20 nt, synthetic construct
  source 1..20: mol_type = other RNA
tagcttcctaagaaagggtg

SEQ ID NO: 48361 - RNA, 20 nt, synthetic construct
  source 1..20: mol_type = other RNA
tagcttcctcaggatctaca

SEQ ID NO: 48362 - RNA, 20 nt, synthetic construct
  source 1..20: mol_type = other RNA
tagcttctgaattgagatgt

SEQ ID NO: 48363 - RNA, 20 nt, synthetic construct
  source 1..20: mol_type = other RNA
tagcttctgagctgttaatg

SEQ ID NO: 48364 - RNA, 20 nt, synthetic construct
  source 1..20: mol_type = other RNA
tagcttgacaaaaggcccct

SEQ ID NO: 48365 - RNA, 20 nt, synthetic construct
  source 1..20: mol_type = other RNA
tagcttgctagtagcagaat

SEQ ID NO: 48366 - RNA, 20 nt, synthetic construct
  source 1..20: mol_type = other RNA
tagcttgggctaaggtggag

SEQ ID NO: 48367 - RNA, 20 nt, synthetic construct
  source 1..20: mol_type = other RNA
tagctttcagcactgctatt

SEQ ID NO: 48368 - RNA, 20 nt, synthetic construct
  source 1..20: mol_type = other RNA
tagctttctcccagctgtcc

SEQ ID NO: 48369 - RNA, 20 nt, synthetic construct
  source 1..20: mol_type = other RNA
tagctttgatgcccccaccc

SEQ ID NO: 48370 - RNA, 20 nt, synthetic construct
  source 1..20: mol_type = other RNA
tagcttttacgaggacagac

SEQ ID NO: 48371 - RNA, 20 nt, synthetic construct
  source 1..20: mol_type = other RNA
tagcttttcctgctgtcgtt

SEQ ID NO: 48372 - RNA, 20 nt, synthetic construct
  source 1..20: mol_type = other RNA
taggaaaaccatgtcatgta

SEQ ID NO: 48373 - RNA, 20 nt, synthetic construct
  source 1..20: mol_type = other RNA
taggaaaagacttctcaaac

SEQ ID NO: 48374 - RNA, 20 nt, synthetic construct
  source 1..20: mol_type = other RNA
taggaaaagacttgaggttt

SEQ ID NO: 48375 - RNA, 20 nt, synthetic construct
  source 1..20: mol_type = other RNA
taggaaaatacatgaggcct

SEQ ID NO: 48376 - RNA, 20 nt, synthetic construct
  source 1..20: mol_type = other RNA
taggaaaatagagttccatc

SEQ ID NO: 48377 - RNA, 20 nt, synthetic construct
  source 1..20: mol_type = other RNA
taggaaacactgctcagaag

SEQ ID NO: 48378 - RNA, 20 nt, synthetic construct
  source 1..20: mol_type = other RNA
taggaaacagattgatttat

SEQ ID NO: 48379 - RNA, 20 nt, synthetic construct
  source 1..20: mol_type = other RNA
taggaaactttgcattcctg

SEQ ID NO: 48380 - RNA, 20 nt, synthetic construct
  source 1..20: mol_type = other RNA
taggaaagcctgtgacagta

SEQ ID NO: 48381 - RNA, 20 nt, synthetic construct
  source 1..20: mol_type = other RNA
taggaaagtgacagatgaga

SEQ ID NO: 48382 - RNA, 20 nt, synthetic construct
  source 1..20: mol_type = other RNA
taggaaatacttgatctaca

SEQ ID NO: 48383 - RNA, 20 nt, synthetic construct
  source 1..20: mol_type = other RNA
taggaaccatattagagtga

SEQ ID NO: 48384 - RNA, 20 nt, synthetic construct
  source 1..20: mol_type = other RNA
taggaagcacattccttccg

SEQ ID NO: 48385 - RNA, 20 nt, synthetic construct
  source 1..20: mol_type = other RNA
taggaagccactgcattcat

SEQ ID NO: 48386 - RNA, 20 nt, synthetic construct
  source 1..20: mol_type = other RNA
taggaagctatggagcactg

SEQ ID NO: 48387 - RNA, 20 nt, synthetic construct
  source 1..20: mol_type = other RNA
taggaagctgatcaaggaag

SEQ ID NO: 48388 - RNA, 20 nt, synthetic construct
  source 1..20: mol_type = other RNA
taggaagcttccttgatcag

SEQ ID NO: 48389 - RNA, 20 nt, synthetic construct
  source 1..20: mol_type = other RNA
taggaaggaacacacaccta

SEQ ID NO: 48390 - RNA, 20 nt, synthetic construct
  source 1..20: mol_type = other RNA
taggaaggcggtggggacag

SEQ ID NO: 48391 - RNA, 20 nt, synthetic construct
  source 1..20: mol_type = other RNA
taggaagtccatgaaactta

SEQ ID NO: 48392 - RNA, 20 nt, synthetic construct
  source 1..20: mol_type = other RNA
taggaagtggctagacggaa

SEQ ID NO: 48393 - RNA, 20 nt, synthetic construct
  source 1..20: mol_type = other RNA
taggaatagtattcaggaca

SEQ ID NO: 48394 - RNA, 20 nt, synthetic construct
  source 1..20: mol_type = other RNA
taggaattaaacatttctga

SEQ ID NO: 48395 - RNA, 20 nt, synthetic construct
  source 1..20: mol_type = other RNA
taggaatttacatttccatt

SEQ ID NO: 48396 - RNA, 20 nt, synthetic construct
  source 1..20: mol_type = other RNA
taggacaaggaaaggatggt

SEQ ID NO: 48397 - RNA, 20 nt, synthetic construct
  source 1..20: mol_type = other RNA
taggaccataggcacgcgcc

SEQ ID NO: 48398 - RNA, 20 nt, synthetic construct
  source 1..20: mol_type = other RNA
taggagaaaagcttcataac

SEQ ID NO: 48399 - RNA, 20 nt, synthetic construct
  source 1..20: mol_type = other RNA
taggagactatcgttatatc

SEQ ID NO: 48400 - RNA, 20 nt, synthetic construct
  source 1..20: mol_type = other RNA
taggaggctattaactttga

SEQ ID NO: 48401 - RNA, 20 nt, synthetic construct
  source 1..20: mol_type = other RNA
taggagggtgtgatcaggaa

SEQ ID NO: 48402 - RNA, 20 nt, synthetic construct
  source 1..20: mol_type = other RNA
taggaggtctaagagataac

SEQ ID NO: 48403 - RNA, 20 nt, synthetic construct
  source 1..20: mol_type = other RNA
taggagtacagtgcatacca

SEQ ID NO: 48404 - RNA, 20 nt, synthetic construct
  source 1..20: mol_type = other RNA
taggagtcaactaatcaaac

SEQ ID NO: 48405 - RNA, 20 nt, synthetic construct
  source 1..20: mol_type = other RNA
taggagttcattcgtagcag

SEQ ID NO: 48406 - RNA, 20 nt, synthetic construct
  source 1..20: mol_type = other RNA
taggataatgtccagaggag

SEQ ID NO: 48407 - RNA, 20 nt, synthetic construct
  source 1..20: mol_type = other RNA
taggatagctattatttgaa

SEQ ID NO: 48408 - RNA, 20 nt, synthetic construct
  source 1..20: mol_type = other RNA
taggatagttaaacatgtaa

SEQ ID NO: 48409 - RNA, 20 nt, synthetic construct
  source 1..20: mol_type = other RNA
taggatataagagtgggcaa

SEQ ID NO: 48410 - RNA, 20 nt, synthetic construct
  source 1..20: mol_type = other RNA
taggatcaccaaagacttca

SEQ ID NO: 48411 - RNA, 20 nt, synthetic construct
  source 1..20: mol_type = other RNA
taggatcccagtcctttggg

SEQ ID NO: 48412 - RNA, 20 nt, synthetic construct
  source 1..20: mol_type = other RNA
taggatgaattacaaatgaa

SEQ ID NO: 48413 - RNA, 20 nt, synthetic construct
  source 1..20: mol_type = other RNA
taggatgggcagactccttc

SEQ ID NO: 48414 - RNA, 20 nt, synthetic construct
  source 1..20: mol_type = other RNA
taggatgtgtacccgtgtgt

SEQ ID NO: 48415 - RNA, 20 nt, synthetic construct
  source 1..20: mol_type = other RNA
taggattaagacactacaaa

SEQ ID NO: 48416 - RNA, 20 nt, synthetic construct
  source 1..20: mol_type = other RNA
taggatttcagtaaatgaaa

SEQ ID NO: 48417 - RNA, 20 nt, synthetic construct
  source 1..20: mol_type = other RNA
taggattttcgtatctttta

SEQ ID NO: 48418 - RNA, 20 nt, synthetic construct
  source 1..20: mol_type = other RNA
taggcaaaggaaaaatctaa

SEQ ID NO: 48419 - RNA, 20 nt, synthetic construct
  source 1..20: mol_type = other RNA
taggcaaattcatagatcac

SEQ ID NO: 48420 - RNA, 20 nt, synthetic construct
  source 1..20: mol_type = other RNA
taggcaacatccctatgcaa

SEQ ID NO: 48421 - RNA, 20 nt, synthetic construct
  source 1..20: mol_type = other RNA
taggcaagagagcaagactc

SEQ ID NO: 48422 - RNA, 20 nt, synthetic construct
  source 1..20: mol_type = other RNA
taggcaatccttccgcctca

SEQ ID NO: 48423 - RNA, 20 nt, synthetic construct
  source 1..20: mol_type = other RNA
taggcaatgagtctgacata

SEQ ID NO: 48424 - RNA, 20 nt, synthetic construct
  source 1..20: mol_type = other RNA
taggcaatttagaattctct

SEQ ID NO: 48425 - RNA, 20 nt, synthetic construct
  source 1..20: mol_type = other RNA
taggcacattcaagcagaaa

SEQ ID NO: 48426 - RNA, 20 nt, synthetic construct
  source 1..20: mol_type = other RNA
taggcacgcgcccccatgcc

SEQ ID NO: 48427 - RNA, 20 nt, synthetic construct
  source 1..20: mol_type = other RNA
taggcagaaccacctggggg

SEQ ID NO: 48428 - RNA, 20 nt, synthetic construct
  source 1..20: mol_type = other RNA
taggcagtcctctactttca

SEQ ID NO: 48429 - RNA, 20 nt, synthetic construct
  source 1..20: mol_type = other RNA
taggcagttattaagagtgt

SEQ ID NO: 48430 - RNA, 20 nt, synthetic construct
  source 1..20: mol_type = other RNA
taggcatataaactggaagg

SEQ ID NO: 48431 - RNA, 20 nt, synthetic construct
  source 1..20: mol_type = other RNA
taggcatataataagcagaa

SEQ ID NO: 48432 - RNA, 20 nt, synthetic construct
  source 1..20: mol_type = other RNA
taggcatctatttccccatt

SEQ ID NO: 48433 - RNA, 20 nt, synthetic construct
  source 1..20: mol_type = other RNA
taggcatctctcccttcctg

SEQ ID NO: 48434 - RNA, 20 nt, synthetic construct
  source 1..20: mol_type = other RNA
taggcattccttaatttttt

SEQ ID NO: 48435 - RNA, 20 nt, synthetic construct
  source 1..20: mol_type = other RNA
taggccactctcatctaaat

SEQ ID NO: 48436 - RNA, 20 nt, synthetic construct
  source 1..20: mol_type = other RNA
taggccataaatcaaggtac

SEQ ID NO: 48437 - RNA, 20 nt, synthetic construct
  source 1..20: mol_type = other RNA
taggccccgatgccatgtgt

SEQ ID NO: 48438 - RNA, 20 nt, synthetic construct
  source 1..20: mol_type = other RNA
taggccctaaccccagagat

SEQ ID NO: 48439 - RNA, 20 nt, synthetic construct
  source 1..20: mol_type = other RNA
taggccctctataattctgc

SEQ ID NO: 48440 - RNA, 20 nt, synthetic construct
  source 1..20: mol_type = other RNA
taggcctaggtgtgataact

SEQ ID NO: 48441 - RNA, 20 nt, synthetic construct
  source 1..20: mol_type = other RNA
taggcctattttaggctctg

SEQ ID NO: 48442 - RNA, 20 nt, synthetic construct
  source 1..20: mol_type = other RNA
taggcgaaatatctccctca

SEQ ID NO: 48443 - RNA, 20 nt, synthetic construct
  source 1..20: mol_type = other RNA
taggcgtagtatctcatgct

SEQ ID NO: 48444 - RNA, 20 nt, synthetic construct
  source 1..20: mol_type = other RNA
taggctaatgtgtgttccag

SEQ ID NO: 48445 - RNA, 20 nt, synthetic construct
  source 1..20: mol_type = other RNA
taggctcctgagaaccggaa

SEQ ID NO: 48446 - RNA, 20 nt, synthetic construct
  source 1..20: mol_type = other RNA
taggctctgggtcagaatcg

SEQ ID NO: 48447 - RNA, 20 nt, synthetic construct
  source 1..20: mol_type = other RNA
taggctctgtggtttcttga

SEQ ID NO: 48448 - RNA, 20 nt, synthetic construct
  source 1..20: mol_type = other RNA
taggctgaagcaggcttttt

SEQ ID NO: 48449 - RNA, 20 nt, synthetic construct
  source 1..20: mol_type = other RNA
taggctgtcccaaatgcacc

SEQ ID NO: 48450 - RNA, 20 nt, synthetic construct
  source 1..20: mol_type = other RNA
taggctgtctccaacgcttt

SEQ ID NO: 48451 - RNA, 20 nt, synthetic construct
  source 1..20: mol_type = other RNA
taggctgttattagagttgt

SEQ ID NO: 48452 - RNA, 20 nt, synthetic construct
  source 1..20: mol_type = other RNA
taggctgttcaatttagaaa

SEQ ID NO: 48453 - RNA, 20 nt, synthetic construct
  source 1..20: mol_type = other RNA
taggctgtttgagatctttc

SEQ ID NO: 48454 - RNA, 20 nt, synthetic construct
  source 1..20: mol_type = other RNA
taggcttaaaattcttccag

SEQ ID NO: 48455 - RNA, 20 nt, synthetic construct
  source 1..20: mol_type = other RNA
taggcttagataggatgggc

SEQ ID NO: 48456 - RNA, 20 nt, synthetic construct
  source 1..20: mol_type = other RNA
taggcttagatgagcccagg

SEQ ID NO: 48457 - RNA, 20 nt, synthetic construct
  source 1..20: mol_type = other RNA
taggcttagtacagccatca

SEQ ID NO: 48458 - RNA, 20 nt, synthetic construct
  source 1..20: mol_type = other RNA
tagggaagatagtactgacc

SEQ ID NO: 48459 - RNA, 20 nt, synthetic construct
  source 1..20: mol_type = other RNA
tagggaagcagttgatgcaa

SEQ ID NO: 48460 - RNA, 20 nt, synthetic construct
  source 1..20: mol_type = other RNA
tagggaaggtgcccgcgaag

SEQ ID NO: 48461 - RNA, 20 nt, synthetic construct
  source 1..20: mol_type = other RNA
tagggaatagacaaagacaa

SEQ ID NO: 48462 - RNA, 20 nt, synthetic construct
  source 1..20: mol_type = other RNA
tagggacgaatgcatgggag

SEQ ID NO: 48463 - RNA, 20 nt, synthetic construct
  source 1..20: mol_type = other RNA
tagggacggccttctttttt

SEQ ID NO: 48464 - RNA, 20 nt, synthetic construct
  source 1..20: mol_type = other RNA
tagggacggggttttgccat

SEQ ID NO: 48465 - RNA, 20 nt, synthetic construct
  source 1..20: mol_type = other RNA
tagggactggcctcggccaa

SEQ ID NO: 48466 - RNA, 20 nt, synthetic construct
  source 1..20: mol_type = other RNA
tagggacttatggagataaa

SEQ ID NO: 48467 - RNA, 20 nt, synthetic construct
  source 1..20: mol_type = other RNA
tagggagactttcactgctc

SEQ ID NO: 48468 - RNA, 20 nt, synthetic construct
  source 1..20: mol_type = other RNA
tagggagcatatatactctg

SEQ ID NO: 48469 - RNA, 20 nt, synthetic construct
  source 1..20: mol_type = other RNA
tagggagggggctgaggatt

SEQ ID NO: 48470 - RNA, 20 nt, synthetic construct
  source 1..20: mol_type = other RNA
tagggaggggtattcagggg

SEQ ID NO: 48471 - RNA, 20 nt, synthetic construct
  source 1..20: mol_type = other RNA
tagggataagaataccaaat

SEQ ID NO: 48472 - RNA, 20 nt, synthetic construct
  source 1..20: mol_type = other RNA
tagggatgttgcctactagc

SEQ ID NO: 48473 - RNA, 20 nt, synthetic construct
  source 1..20: mol_type = other RNA
tagggcaccgtgacagaaca

SEQ ID NO: 48474 - RNA, 20 nt, synthetic construct
  source 1..20: mol_type = other RNA
tagggcctagaaatcataca

SEQ ID NO: 48475 - RNA, 20 nt, synthetic construct
  source 1..20: mol_type = other RNA
tagggcctcaaatttcattt

SEQ ID NO: 48476 - RNA, 20 nt, synthetic construct
  source 1..20: mol_type = other RNA
tagggccttctactttaata

SEQ ID NO: 48477 - RNA, 20 nt, synthetic construct
  source 1..20: mol_type = other RNA
taggggaactcttgtagtat

SEQ ID NO: 48478 - RNA, 20 nt, synthetic construct
  source 1..20: mol_type = other RNA
taggggactaacagggtcta

SEQ ID NO: 48479 - RNA, 20 nt, synthetic construct
  source 1..20: mol_type = other RNA
taggggctgttcccagataa

SEQ ID NO: 48480 - RNA, 20 nt, synthetic construct
  source 1..20: mol_type = other RNA
tagggggaaaactccaagtg

SEQ ID NO: 48481 - RNA, 20 nt, synthetic construct
  source 1..20: mol_type = other RNA
taggggggaaaacacccttg

SEQ ID NO: 48482 - RNA, 20 nt, synthetic construct
  source 1..20: mol_type = other RNA
taggggtaaatctttgtaca

SEQ ID NO: 48483 - RNA, 20 nt, synthetic construct
  source 1..20: mol_type = other RNA
tagggtaatgctggcttcat

SEQ ID NO: 48484 - RNA, 20 nt, synthetic construct
  source 1..20: mol_type = other RNA
tagggtgactagtgtgaatg

SEQ ID NO: 48485 - RNA, 20 nt, synthetic construct
  source 1..20: mol_type = other RNA
tagggtgctactcaaagttt

SEQ ID NO: 48486 - RNA, 20 nt, synthetic construct
  source 1..20: mol_type = other RNA
tagggtgtaaaaggctaatt

SEQ ID NO: 48487 - RNA, 20 nt, synthetic construct
  source 1..20: mol_type = other RNA
tagggttggggtatgtttga

SEQ ID NO: 48488 - RNA, 20 nt, synthetic construct
  source 1..20: mol_type = other RNA
tagggtttggcagtttaaga

SEQ ID NO: 48489 - RNA, 20 nt, synthetic construct
  source 1..20: mol_type = other RNA
taggtaagaaaaattccctc

SEQ ID NO: 48490 - RNA, 20 nt, synthetic construct
  source 1..20: mol_type = other RNA
taggtaatactctagtggtg

SEQ ID NO: 48491 - RNA, 20 nt, synthetic construct
  source 1..20: mol_type = other RNA
taggtagggataagaatacc

SEQ ID NO: 48492 - RNA, 20 nt, synthetic construct
  source 1..20: mol_type = other RNA
taggtagggttggggtatgt

SEQ ID NO: 48493 - RNA, 20 nt, synthetic construct
  source 1..20: mol_type = other RNA
taggtagtacatattcattg

SEQ ID NO: 48494 - RNA, 20 nt, synthetic construct
  source 1..20: mol_type = other RNA
taggtagtcttgtcataaca

SEQ ID NO: 48495 - RNA, 20 nt, synthetic construct
  source 1..20: mol_type = other RNA
taggtagtttctttgaactt

SEQ ID NO: 48496 - RNA, 20 nt, synthetic construct
  source 1..20: mol_type = other RNA
taggtatcacagtgaggacg

SEQ ID NO: 48497 - RNA, 20 nt, synthetic construct
  source 1..20: mol_type = other RNA
taggtattattttcacagac

SEQ ID NO: 48498 - RNA, 20 nt, synthetic construct
  source 1..20: mol_type = other RNA
taggtattcatgctgtgaat

SEQ ID NO: 48499 - RNA, 20 nt, synthetic construct
  source 1..20: mol_type = other RNA
taggtatttgaaaaatgtca

SEQ ID NO: 48500 - RNA, 20 nt, synthetic construct
  source 1..20: mol_type = other RNA
taggtcactgcagtctcaaa

SEQ ID NO: 48501 - RNA, 20 nt, synthetic construct
  source 1..20: mol_type = other RNA
taggtcagaatacaaaaatg

SEQ ID NO: 48502 - RNA, 20 nt, synthetic construct
  source 1..20: mol_type = other RNA
taggtcatgtacataaattt

SEQ ID NO: 48503 - RNA, 20 nt, synthetic construct
  source 1..20: mol_type = other RNA
taggtcatttttcacttctt

SEQ ID NO: 48504 - RNA, 20 nt, synthetic construct
  source 1..20: mol_type = other RNA
taggtctccttgtatggaga

SEQ ID NO: 48505 - RNA, 20 nt, synthetic construct
  source 1..20: mol_type = other RNA
taggtgacctgccagagttg

SEQ ID NO: 48506 - RNA, 20 nt, synthetic construct
  source 1..20: mol_type = other RNA
taggtgagtgagatgggaag

SEQ ID NO: 48507 - RNA, 20 nt, synthetic construct
  source 1..20: mol_type = other RNA
taggtgcacacaacactcag

SEQ ID NO: 48508 - RNA, 20 nt, synthetic construct
  source 1..20: mol_type = other RNA
taggtgccccactccacaca

SEQ ID NO: 48509 - RNA, 20 nt, synthetic construct
  source 1..20: mol_type = other RNA
taggtgctggcttcaatatg

SEQ ID NO: 48510 - RNA, 20 nt, synthetic construct
  source 1..20: mol_type = other RNA
taggtgctttttgtatcctg

SEQ ID NO: 48511 - RNA, 20 nt, synthetic construct
  source 1..20: mol_type = other RNA
taggtggtttgaaccccaga

SEQ ID NO: 48512 - RNA, 20 nt, synthetic construct
  source 1..20: mol_type = other RNA
taggtgtctcatttaataac

SEQ ID NO: 48513 - RNA, 20 nt, synthetic construct
  source 1..20: mol_type = other RNA
taggtgtctgatgtgtgtct

SEQ ID NO: 48514 - RNA, 20 nt, synthetic construct
  source 1..20: mol_type = other RNA
taggtgtgataactgatatg

SEQ ID NO: 48515 - RNA, 20 nt, synthetic construct
  source 1..20: mol_type = other RNA
taggtgtgtgtaatcccagc

SEQ ID NO: 48516 - RNA, 20 nt, synthetic construct
  source 1..20: mol_type = other RNA
taggtgtgtgttccttccta

SEQ ID NO: 48517 - RNA, 20 nt, synthetic construct
  source 1..20: mol_type = other RNA
taggtgttttttccttcttt

SEQ ID NO: 48518 - RNA, 20 nt, synthetic construct
  source 1..20: mol_type = other RNA
taggttacgtactaggtatc

SEQ ID NO: 48519 - RNA, 20 nt, synthetic construct
  source 1..20: mol_type = other RNA
taggttatctgttttcttac

SEQ ID NO: 48520 - RNA, 20 nt, synthetic construct
  source 1..20: mol_type = other RNA
taggttgaaagttcagaata

SEQ ID NO: 48521 - RNA, 20 nt, synthetic construct
  source 1..20: mol_type = other RNA
taggttgaatagggcctcaa

SEQ ID NO: 48522 - RNA, 20 nt, synthetic construct
  source 1..20: mol_type = other RNA
taggttgagacttagattta

SEQ ID NO: 48523 - RNA, 20 nt, synthetic construct
  source 1..20: mol_type = other RNA
taggttgatggctgtactaa

SEQ ID NO: 48524 - RNA, 20 nt, synthetic construct
  source 1..20: mol_type = other RNA
taggtttctcatttttcagg

SEQ ID NO: 48525 - RNA, 20 nt, synthetic construct
  source 1..20: mol_type = other RNA
taggtttttcttgtgggtat

SEQ ID NO: 48526 - RNA, 20 nt, synthetic construct
  source 1..20: mol_type = other RNA
taggttttttcattttactg

SEQ ID NO: 48527 - RNA, 20 nt, synthetic construct
  source 1..20: mol_type = other RNA
tagtaaaaccaaatgtggat

SEQ ID NO: 48528 - RNA, 20 nt, synthetic construct
  source 1..20: mol_type = other RNA
tagtaaagcaaatgtgacta

SEQ ID NO: 48529 - RNA, 20 nt, synthetic construct
  source 1..20: mol_type = other RNA
tagtaaatatccgaaagaac

SEQ ID NO: 48530 - RNA, 20 nt, synthetic construct
  source 1..20: mol_type = other RNA
tagtaaatctttggtgaagg

SEQ ID NO: 48531 - RNA, 20 nt, synthetic construct
  source 1..20: mol_type = other RNA
tagtaacttggtcgaaaacc

SEQ ID NO: 48532 - RNA, 20 nt, synthetic construct
  source 1..20: mol_type = other RNA
tagtaactttctgcttaaag

SEQ ID NO: 48533 - RNA, 20 nt, synthetic construct
  source 1..20: mol_type = other RNA
tagtaagaggtatcaccatc

SEQ ID NO: 48534 - RNA, 20 nt, synthetic construct
  source 1..20: mol_type = other RNA
tagtaaggatcgttagtatt

SEQ ID NO: 48535 - RNA, 20 nt, synthetic construct
  source 1..20: mol_type = other RNA
tagtaagggtaaacagaatt

SEQ ID NO: 48536 - RNA, 20 nt, synthetic construct
  source 1..20: mol_type = other RNA
tagtaagtaaaatcggaaca

SEQ ID NO: 48537 - RNA, 20 nt, synthetic construct
  source 1..20: mol_type = other RNA
tagtaagtgtgagcaaaaat

SEQ ID NO: 48538 - RNA, 20 nt, synthetic construct
  source 1..20: mol_type = other RNA
tagtaagttgtgtcattttt

SEQ ID NO: 48539 - RNA, 20 nt, synthetic construct
  source 1..20: mol_type = other RNA
tagtaataaaggcaatgctc

SEQ ID NO: 48540 - RNA, 20 nt, synthetic construct
  source 1..20: mol_type = other RNA
tagtaattctccactttcat

SEQ ID NO: 48541 - RNA, 20 nt, synthetic construct
  source 1..20: mol_type = other RNA
tagtaattctgtgcttaaat

SEQ ID NO: 48542 - RNA, 20 nt, synthetic construct
  source 1..20: mol_type = other RNA
tagtacaaaagtgctgttga

SEQ ID NO: 48543 - RNA, 20 nt, synthetic construct
  source 1..20: mol_type = other RNA
tagtacactgttgatttaga

SEQ ID NO: 48544 - RNA, 20 nt, synthetic construct
  source 1..20: mol_type = other RNA
tagtacagccatcaacctaa

SEQ ID NO: 48545 - RNA, 20 nt, synthetic construct
  source 1..20: mol_type = other RNA
tagtacagtgagtagaagag

SEQ ID NO: 48546 - RNA, 20 nt, synthetic construct
  source 1..20: mol_type = other RNA
tagtacatattcattgtaag

SEQ ID NO: 48547 - RNA, 20 nt, synthetic construct
  source 1..20: mol_type = other RNA
tagtacgtaacctaaagttg

SEQ ID NO: 48548 - RNA, 20 nt, synthetic construct
  source 1..20: mol_type = other RNA
tagtacgtgcagagcagggg

SEQ ID NO: 48549 - RNA, 20 nt, synthetic construct
  source 1..20: mol_type = other RNA
tagtactccattatatgaat

SEQ ID NO: 48550 - RNA, 20 nt, synthetic construct
  source 1..20: mol_type = other RNA
tagtactgaccatctcagca

SEQ ID NO: 48551 - RNA, 20 nt, synthetic construct
  source 1..20: mol_type = other RNA
tagtacttctgagtgttact

SEQ ID NO: 48552 - RNA, 20 nt, synthetic construct
  source 1..20: mol_type = other RNA
tagtagaaagcaggttcatt

SEQ ID NO: 48553 - RNA, 20 nt, synthetic construct
  source 1..20: mol_type = other RNA
tagtagaattctccagtgaa

SEQ ID NO: 48554 - RNA, 20 nt, synthetic construct
  source 1..20: mol_type = other RNA
tagtagagatgaggttttac

SEQ ID NO: 48555 - RNA, 20 nt, synthetic construct
  source 1..20: mol_type = other RNA
tagtagcagaatccccaaat

SEQ ID NO: 48556 - RNA, 20 nt, synthetic construct
  source 1..20: mol_type = other RNA
tagtagctgtctttaatgta

SEQ ID NO: 48557 - RNA, 20 nt, synthetic construct
  source 1..20: mol_type = other RNA
tagtagctgttgaattgttg

SEQ ID NO: 48558 - RNA, 20 nt, synthetic construct
  source 1..20: mol_type = other RNA
tagtagcttcaatgagggca

SEQ ID NO: 48559 - RNA, 20 nt, synthetic construct
  source 1..20: mol_type = other RNA
tagtaggaaaaccatgtcat

SEQ ID NO: 48560 - RNA, 20 nt, synthetic construct
  source 1..20: mol_type = other RNA
tagtaggatgaattacaaat

SEQ ID NO: 48561 - RNA, 20 nt, synthetic construct
  source 1..20: mol_type = other RNA
tagtaggcaacatccctatg

SEQ ID NO: 48562 - RNA, 20 nt, synthetic construct
  source 1..20: mol_type = other RNA
tagtaggtctccttgtatgg

SEQ ID NO: 48563 - RNA, 20 nt, synthetic construct
  source 1..20: mol_type = other RNA
tagtagtaagttgtgtcatt

SEQ ID NO: 48564 - RNA, 20 nt, synthetic construct
  source 1..20: mol_type = other RNA
tagtagttaggtggtttgaa

SEQ ID NO: 48565 - RNA, 20 nt, synthetic construct
  source 1..20: mol_type = other RNA
tagtagttgctcagaaaatt

SEQ ID NO: 48566 - RNA, 20 nt, synthetic construct
  source 1..20: mol_type = other RNA
tagtataagagaaggaagca

SEQ ID NO: 48567 - RNA, 20 nt, synthetic construct
  source 1..20: mol_type = other RNA
tagtatacatgtttagcaag

SEQ ID NO: 48568 - RNA, 20 nt, synthetic construct
  source 1..20: mol_type = other RNA
tagtatattttcaaggcttg

SEQ ID NO: 48569 - RNA, 20 nt, synthetic construct
  source 1..20: mol_type = other RNA
tagtatcaacctgcaggtat

SEQ ID NO: 48570 - RNA, 20 nt, synthetic construct
  source 1..20: mol_type = other RNA
tagtatctcatgcttaggat

SEQ ID NO: 48571 - RNA, 20 nt, synthetic construct
  source 1..20: mol_type = other RNA
tagtatgaaggttcttaaaa

SEQ ID NO: 48572 - RNA, 20 nt, synthetic construct
  source 1..20: mol_type = other RNA
tagtattacctcccatgcat

SEQ ID NO: 48573 - RNA, 20 nt, synthetic construct
  source 1..20: mol_type = other RNA
tagtattcaggacagattaa

SEQ ID NO: 48574 - RNA, 20 nt, synthetic construct
  source 1..20: mol_type = other RNA
tagtattccatggtatgtgc

SEQ ID NO: 48575 - RNA, 20 nt, synthetic construct
  source 1..20: mol_type = other RNA
tagtattgaactgttacttg

SEQ ID NO: 48576 - RNA, 20 nt, synthetic construct
  source 1..20: mol_type = other RNA
tagtattttgttgacatcct

SEQ ID NO: 48577 - RNA, 20 nt, synthetic construct
  source 1..20: mol_type = other RNA
tagtcaacacttttccagtc

SEQ ID NO: 48578 - RNA, 20 nt, synthetic construct
  source 1..20: mol_type = other RNA
tagtcaagtaacagttcaat

SEQ ID NO: 48579 - RNA, 20 nt, synthetic construct
  source 1..20: mol_type = other RNA
tagtcaatacaaaaattgag

SEQ ID NO: 48580 - RNA, 20 nt, synthetic construct
  source 1..20: mol_type = other RNA
tagtcaatgcaatgcgtgtg

SEQ ID NO: 48581 - RNA, 20 nt, synthetic construct
  source 1..20: mol_type = other RNA
tagtcacatttgctttacta

SEQ ID NO: 48582 - RNA, 20 nt, synthetic construct
  source 1..20: mol_type = other RNA
tagtcaccctacagactcaa

SEQ ID NO: 48583 - RNA, 20 nt, synthetic construct
  source 1..20: mol_type = other RNA
tagtcagacacactagctga

SEQ ID NO: 48584 - RNA, 20 nt, synthetic construct
  source 1..20: mol_type = other RNA
tagtcagcacactcttaata

SEQ ID NO: 48585 - RNA, 20 nt, synthetic construct
  source 1..20: mol_type = other RNA
tagtcagtatatttactgct

SEQ ID NO: 48586 - RNA, 20 nt, synthetic construct
  source 1..20: mol_type = other RNA
tagtcagtgaagatgctgaa

SEQ ID NO: 48587 - RNA, 20 nt, synthetic construct
  source 1..20: mol_type = other RNA
tagtcatagcagtgggaagt

SEQ ID NO: 48588 - RNA, 20 nt, synthetic construct
  source 1..20: mol_type = other RNA
tagtcatcattattagcaaa

SEQ ID NO: 48589 - RNA, 20 nt, synthetic construct
  source 1..20: mol_type = other RNA
tagtcatccactgcacagta

SEQ ID NO: 48590 - RNA, 20 nt, synthetic construct
  source 1..20: mol_type = other RNA
tagtcattccgctaaacatt

SEQ ID NO: 48591 - RNA, 20 nt, synthetic construct
  source 1..20: mol_type = other RNA
tagtccactttccatcttag

SEQ ID NO: 48592 - RNA, 20 nt, synthetic construct
  source 1..20: mol_type = other RNA
tagtccatgaagaaaacact

SEQ ID NO: 48593 - RNA, 20 nt, synthetic construct
  source 1..20: mol_type = other RNA
tagtcccctagtggatgctg

SEQ ID NO: 48594 - RNA, 20 nt, synthetic construct
  source 1..20: mol_type = other RNA
tagtctcacgatacttttta

SEQ ID NO: 48595 - RNA, 20 nt, synthetic construct
  source 1..20: mol_type = other RNA
tagtctccatacaaggagac

SEQ ID NO: 48596 - RNA, 20 nt, synthetic construct
  source 1..20: mol_type = other RNA
tagtctcctatattgtcaat

SEQ ID NO: 48597 - RNA, 20 nt, synthetic construct
  source 1..20: mol_type = other RNA
tagtctcttcctgtatatct

SEQ ID NO: 48598 - RNA, 20 nt, synthetic construct
  source 1..20: mol_type = other RNA
tagtctgacttctctcagag

SEQ ID NO: 48599 - RNA, 20 nt, synthetic construct
  source 1..20: mol_type = other RNA
tagtctgtagcttcacgtgc

SEQ ID NO: 48600 - RNA, 20 nt, synthetic construct
  source 1..20: mol_type = other RNA
tagtcttagctcttaagctt

SEQ ID NO: 48601 - RNA, 20 nt, synthetic construct
  source 1..20: mol_type = other RNA
tagtcttccaaaatattgaa

SEQ ID NO: 48602 - RNA, 20 nt, synthetic construct
  source 1..20: mol_type = other RNA
tagtcttccaattgcagaaa

SEQ ID NO: 48603 - RNA, 20 nt, synthetic construct
  source 1..20: mol_type = other RNA
tagtcttctcagatctgttg

SEQ ID NO: 48604 - RNA, 20 nt, synthetic construct
  source 1..20: mol_type = other RNA
tagtcttgtcataacagtat

SEQ ID NO: 48605 - RNA, 20 nt, synthetic construct
  source 1..20: mol_type = other RNA
tagtcttgtcttttcttttt

SEQ ID NO: 48606 - RNA, 20 nt, synthetic construct
  source 1..20: mol_type = other RNA
tagtgaaatagttggtcaga

SEQ ID NO: 48607 - RNA, 20 nt, synthetic construct
  source 1..20: mol_type = other RNA
tagtgaagcagagagagaag

SEQ ID NO: 48608 - RNA, 20 nt, synthetic construct
  source 1..20: mol_type = other RNA
tagtgaagtcaatttcagat

SEQ ID NO: 48609 - RNA, 20 nt, synthetic construct
  source 1..20: mol_type = other RNA
tagtgaagtcccatcttcca

SEQ ID NO: 48610 - RNA, 20 nt, synthetic construct
  source 1..20: mol_type = other RNA
tagtgaatgagaccaaatgc

SEQ ID NO: 48611 - RNA, 20 nt, synthetic construct
  source 1..20: mol_type = other RNA
tagtgaattcacagtagaag

SEQ ID NO: 48612 - RNA, 20 nt, synthetic construct
  source 1..20: mol_type = other RNA
tagtgaccctttgaagtatg

SEQ ID NO: 48613 - RNA, 20 nt, synthetic construct
  source 1..20: mol_type = other RNA
tagtgactggcttaatgcat

SEQ ID NO: 48614 - RNA, 20 nt, synthetic construct
  source 1..20: mol_type = other RNA
tagtgagccaaaatcgtgcc

SEQ ID NO: 48615 - RNA, 20 nt, synthetic construct
  source 1..20: mol_type = other RNA
tagtgagggaggccatcttc

SEQ ID NO: 48616 - RNA, 20 nt, synthetic construct
  source 1..20: mol_type = other RNA
tagtgatgggagatggacac

SEQ ID NO: 48617 - RNA, 20 nt, synthetic construct
  source 1..20: mol_type = other RNA
tagtgatgtcttttgaagaa

SEQ ID NO: 48618 - RNA, 20 nt, synthetic construct
  source 1..20: mol_type = other RNA
tagtgattcacttttgagtt

SEQ ID NO: 48619 - RNA, 20 nt, synthetic construct
  source 1..20: mol_type = other RNA
tagtgattttaccaaggcta

SEQ ID NO: 48620 - RNA, 20 nt, synthetic construct
  source 1..20: mol_type = other RNA
tagtgcagtatcttgaagaa

SEQ ID NO: 48621 - RNA, 20 nt, synthetic construct
  source 1..20: mol_type = other RNA
tagtgccttcagaaggagtc

SEQ ID NO: 48622 - RNA, 20 nt, synthetic construct
  source 1..20: mol_type = other RNA
tagtgctcttctgatcacag

SEQ ID NO: 48623 - RNA, 20 nt, synthetic construct
  source 1..20: mol_type = other RNA
tagtgctttttactttgcga

SEQ ID NO: 48624 - RNA, 20 nt, synthetic construct
  source 1..20: mol_type = other RNA
tagtggaaaaactgcagcaa

SEQ ID NO: 48625 - RNA, 20 nt, synthetic construct
  source 1..20: mol_type = other RNA
tagtggaagaatcaggtctc

SEQ ID NO: 48626 - RNA, 20 nt, synthetic construct
  source 1..20: mol_type = other RNA
tagtggatgctggggacccc

SEQ ID NO: 48627 - RNA, 20 nt, synthetic construct
  source 1..20: mol_type = other RNA
tagtggcagccccgcttcag

SEQ ID NO: 48628 - RNA, 20 nt, synthetic construct
  source 1..20: mol_type = other RNA
tagtggctcacagtgctcca

SEQ ID NO: 48629 - RNA, 20 nt, synthetic construct
  source 1..20: mol_type = other RNA
tagtggctcatacttgcttt

SEQ ID NO: 48630 - RNA, 20 nt, synthetic construct
  source 1..20: mol_type = other RNA
tagtggctgcaccatttttt

SEQ ID NO: 48631 - RNA, 20 nt, synthetic construct
  source 1..20: mol_type = other RNA
tagtgggaccccgtctctgc

SEQ ID NO: 48632 - RNA, 20 nt, synthetic construct
  source 1..20: mol_type = other RNA
tagtgggatcaaaccatgtt

SEQ ID NO: 48633 - RNA, 20 nt, synthetic construct
  source 1..20: mol_type = other RNA
tagtgggtagaagcagcaag

SEQ ID NO: 48634 - RNA, 20 nt, synthetic construct
  source 1..20: mol_type = other RNA
tagtgggtcgggtgtcagaa

SEQ ID NO: 48635 - RNA, 20 nt, synthetic construct
  source 1..20: mol_type = other RNA
tagtggtaactagatgcctc

SEQ ID NO: 48636 - RNA, 20 nt, synthetic construct
  source 1..20: mol_type = other RNA
tagtggtaaggagccaaaca

SEQ ID NO: 48637 - RNA, 20 nt, synthetic construct
  source 1..20: mol_type = other RNA
tagtggtgcttaattcaaac

SEQ ID NO: 48638 - RNA, 20 nt, synthetic construct
  source 1..20: mol_type = other RNA
tagtggtggtagtaaggatc

SEQ ID NO: 48639 - RNA, 20 nt, synthetic construct
  source 1..20: mol_type = other RNA
tagtggtgtgtgactgtagt

SEQ ID NO: 48640 - RNA, 20 nt, synthetic construct
  source 1..20: mol_type = other RNA
tagtggttgacccataaact

SEQ ID NO: 48641 - RNA, 20 nt, synthetic construct
  source 1..20: mol_type = other RNA
tagtggtttgaagcttcact

SEQ ID NO: 48642 - RNA, 20 nt, synthetic construct
  source 1..20: mol_type = other RNA
tagtgtattgtaccttgatt

SEQ ID NO: 48643 - RNA, 20 nt, synthetic construct
  source 1..20: mol_type = other RNA
tagtgtcctcaggctccagg

SEQ ID NO: 48644 - RNA, 20 nt, synthetic construct
  source 1..20: mol_type = other RNA
tagtgtctaatgggtacagg

SEQ ID NO: 48645 - RNA, 20 nt, synthetic construct
  source 1..20: mol_type = other RNA
tagtgtctcagcctcccaag

SEQ ID NO: 48646 - RNA, 20 nt, synthetic construct
  source 1..20: mol_type = other RNA
tagtgtctccataccccctg

SEQ ID NO: 48647 - RNA, 20 nt, synthetic construct
  source 1..20: mol_type = other RNA
tagtgtcttaatcctatttt

SEQ ID NO: 48648 - RNA, 20 nt, synthetic construct
  source 1..20: mol_type = other RNA
tagtgtcttagtctgacttc

SEQ ID NO: 48649 - RNA, 20 nt, synthetic construct
  source 1..20: mol_type = other RNA
tagtgtgaatgaggagtgaa

SEQ ID NO: 48650 - RNA, 20 nt, synthetic construct
  source 1..20: mol_type = other RNA
tagtgtgcatgtgttgtgca

SEQ ID NO: 48651 - RNA, 20 nt, synthetic construct
  source 1..20: mol_type = other RNA
tagtgtgtctgactacactg

SEQ ID NO: 48652 - RNA, 20 nt, synthetic construct
  source 1..20: mol_type = other RNA
tagtgtgttgactgacataa

SEQ ID NO: 48653 - RNA, 20 nt, synthetic construct
  source 1..20: mol_type = other RNA
tagtgttaattatttgtgca

SEQ ID NO: 48654 - RNA, 20 nt, synthetic construct
  source 1..20: mol_type = other RNA
tagtgttaattcttccttaa

SEQ ID NO: 48655 - RNA, 20 nt, synthetic construct
  source 1..20: mol_type = other RNA
tagtgttcccttcttaaatg

SEQ ID NO: 48656 - RNA, 20 nt, synthetic construct
  source 1..20: mol_type = other RNA
tagtgttctgtgtttatgaa

SEQ ID NO: 48657 - RNA, 20 nt, synthetic construct
  source 1..20: mol_type = other RNA
tagtgttgcttggtgttgac

SEQ ID NO: 48658 - RNA, 20 nt, synthetic construct
  source 1..20: mol_type = other RNA
tagtgtttccttccagatgt

SEQ ID NO: 48659 - RNA, 20 nt, synthetic construct
  source 1..20: mol_type = other RNA
tagttaaacatgtaaaacag

SEQ ID NO: 48660 - RNA, 20 nt, synthetic construct
  source 1..20: mol_type = other RNA
tagttaaccttctggggttc

SEQ ID NO: 48661 - RNA, 20 nt, synthetic construct
  source 1..20: mol_type = other RNA
tagttaacgtttatctacag

SEQ ID NO: 48662 - RNA, 20 nt, synthetic construct
  source 1..20: mol_type = other RNA
tagttaagtctgaaagcttc

SEQ ID NO: 48663 - RNA, 20 nt, synthetic construct
  source 1..20: mol_type = other RNA
tagttaataaaggtgctaat

SEQ ID NO: 48664 - RNA, 20 nt, synthetic construct
  source 1..20: mol_type = other RNA
tagttaatgtgtgaagaagg

SEQ ID NO: 48665 - RNA, 20 nt, synthetic construct
  source 1..20: mol_type = other RNA
tagttacaactactcgggag

SEQ ID NO: 48666 - RNA, 20 nt, synthetic construct
  source 1..20: mol_type = other RNA
tagttacacaagtgtttcat

SEQ ID NO: 48667 - RNA, 20 nt, synthetic construct
  source 1..20: mol_type = other RNA
tagttacatgaggtcaccca

SEQ ID NO: 48668 - RNA, 20 nt, synthetic construct
  source 1..20: mol_type = other RNA
tagttaccactagcaaacta

SEQ ID NO: 48669 - RNA, 20 nt, synthetic construct
  source 1..20: mol_type = other RNA
tagttactcaaatccaaatt

SEQ ID NO: 48670 - RNA, 20 nt, synthetic construct
  source 1..20: mol_type = other RNA
tagttaggtggtttgaaccc

SEQ ID NO: 48671 - RNA, 20 nt, synthetic construct
  source 1..20: mol_type = other RNA
tagttagtttgttgacccaa

SEQ ID NO: 48672 - RNA, 20 nt, synthetic construct
  source 1..20: mol_type = other RNA
tagttatctcttagacctcc

SEQ ID NO: 48673 - RNA, 20 nt, synthetic construct
  source 1..20: mol_type = other RNA
tagttattaaatgagacacc

SEQ ID NO: 48674 - RNA, 20 nt, synthetic construct
  source 1..20: mol_type = other RNA
tagttattattgtcattacc

SEQ ID NO: 48675 - RNA, 20 nt, synthetic construct
  source 1..20: mol_type = other RNA
tagttcaagatgcataccaa

SEQ ID NO: 48676 - RNA, 20 nt, synthetic construct
  source 1..20: mol_type = other RNA
tagttcacctctccgggtaa

SEQ ID NO: 48677 - RNA, 20 nt, synthetic construct
  source 1..20: mol_type = other RNA
tagttcagtttttctttctt

SEQ ID NO: 48678 - RNA, 20 nt, synthetic construct
  source 1..20: mol_type = other RNA
tagttcatcagcataaataa

SEQ ID NO: 48679 - RNA, 20 nt, synthetic construct
  source 1..20: mol_type = other RNA
tagttcatgttagcataatt

SEQ ID NO: 48680 - RNA, 20 nt, synthetic construct
  source 1..20: mol_type = other RNA
tagttccattattccataaa

SEQ ID NO: 48681 - RNA, 20 nt, synthetic construct
  source 1..20: mol_type = other RNA
tagttcctccttttgtagag

SEQ ID NO: 48682 - RNA, 20 nt, synthetic construct
  source 1..20: mol_type = other RNA
tagttccttttaagggaaac

SEQ ID NO: 48683 - RNA, 20 nt, synthetic construct
  source 1..20: mol_type = other RNA
tagttctaataaacgcggaa

SEQ ID NO: 48684 - RNA, 20 nt, synthetic construct
  source 1..20: mol_type = other RNA
tagttctagctctgtctttt

SEQ ID NO: 48685 - RNA, 20 nt, synthetic construct
  source 1..20: mol_type = other RNA
tagttctgcttccacatttc

SEQ ID NO: 48686 - RNA, 20 nt, synthetic construct
  source 1..20: mol_type = other RNA
tagttctggtgtcgtttatt

SEQ ID NO: 48687 - RNA, 20 nt, synthetic construct
  source 1..20: mol_type = other RNA
tagttgactcctaaaacatg

SEQ ID NO: 48688 - RNA, 20 nt, synthetic construct
  source 1..20: mol_type = other RNA
tagttgattatttttaccca

SEQ ID NO: 48689 - RNA, 20 nt, synthetic construct
  source 1..20: mol_type = other RNA
tagttgcacggtgaagaacc

SEQ ID NO: 48690 - RNA, 20 nt, synthetic construct
  source 1..20: mol_type = other RNA
tagttgcagattcatcttga

SEQ ID NO: 48691 - RNA, 20 nt, synthetic construct
  source 1..20: mol_type = other RNA
tagttgctcagaaaattttc

SEQ ID NO: 48692 - RNA, 20 nt, synthetic construct
  source 1..20: mol_type = other RNA
tagttggtcagaaaaatgga

SEQ ID NO: 48693 - RNA, 20 nt, synthetic construct
  source 1..20: mol_type = other RNA
tagttgtaactacagacatg

SEQ ID NO: 48694 - RNA, 20 nt, synthetic construct
  source 1..20: mol_type = other RNA
tagttgtacttgacacaaag

SEQ ID NO: 48695 - RNA, 20 nt, synthetic construct
  source 1..20: mol_type = other RNA
tagttgtgctacctcaaatt

SEQ ID NO: 48696 - RNA, 20 nt, synthetic construct
  source 1..20: mol_type = other RNA
tagtttaattgggggaaaat

SEQ ID NO: 48697 - RNA, 20 nt, synthetic construct
  source 1..20: mol_type = other RNA
tagtttacactatggctttt

SEQ ID NO: 48698 - RNA, 20 nt, synthetic construct
  source 1..20: mol_type = other RNA
tagtttagtgcagtatcttg

SEQ ID NO: 48699 - RNA, 20 nt, synthetic construct
  source 1..20: mol_type = other RNA
tagtttagttactcaaatcc

SEQ ID NO: 48700 - RNA, 20 nt, synthetic construct
  source 1..20: mol_type = other RNA
tagtttattcatacgttaac

SEQ ID NO: 48701 - RNA, 20 nt, synthetic construct
  source 1..20: mol_type = other RNA
tagtttcatctatgtcccct

SEQ ID NO: 48702 - RNA, 20 nt, synthetic construct
  source 1..20: mol_type = other RNA
tagtttccatggaggggcca

SEQ ID NO: 48703 - RNA, 20 nt, synthetic construct
  source 1..20: mol_type = other RNA
tagtttctcaacttagcctt

SEQ ID NO: 48704 - RNA, 20 nt, synthetic construct
  source 1..20: mol_type = other RNA
tagtttctttttgttttctc

SEQ ID NO: 48705 - RNA, 20 nt, synthetic construct
  source 1..20: mol_type = other RNA
tagtttgaggtgtacaatta

SEQ ID NO: 48706 - RNA, 20 nt, synthetic construct
  source 1..20: mol_type = other RNA
tagtttgagtatttcatgta

SEQ ID NO: 48707 - RNA, 20 nt, synthetic construct
  source 1..20: mol_type = other RNA
tagtttgcaatacagttaac

SEQ ID NO: 48708 - RNA, 20 nt, synthetic construct
  source 1..20: mol_type = other RNA
tagtttgcacgtttttagaa

SEQ ID NO: 48709 - RNA, 20 nt, synthetic construct
  source 1..20: mol_type = other RNA
tagtttgctagtggtaacta

SEQ ID NO: 48710 - RNA, 20 nt, synthetic construct
  source 1..20: mol_type = other RNA
tagtttgttgacccaatcat

SEQ ID NO: 48711 - RNA, 20 nt, synthetic construct
  source 1..20: mol_type = other RNA
tagttttcacttttgtgcaa

SEQ ID NO: 48712 - RNA, 20 nt, synthetic construct
  source 1..20: mol_type = other RNA
tagttttccaatccgggaac

SEQ ID NO: 48713 - RNA, 20 nt, synthetic construct
  source 1..20: mol_type = other RNA
tagttttccagtatattcat

SEQ ID NO: 48714 - RNA, 20 nt, synthetic construct
  source 1..20: mol_type = other RNA
tagttttccctgtgtatgtg

SEQ ID NO: 48715 - RNA, 20 nt, synthetic construct
  source 1..20: mol_type = other RNA
tagttttggtgtcattttta

SEQ ID NO: 48716 - RNA, 20 nt, synthetic construct
  source 1..20: mol_type = other RNA
tagttttttggtagatacca

SEQ ID NO: 48717 - RNA, 20 nt, synthetic construct
  source 1..20: mol_type = other RNA
tataaaaagacacaaaagag

SEQ ID NO: 48718 - RNA, 20 nt, synthetic construct
  source 1..20: mol_type = other RNA
tataaaaagcctctgtggac

SEQ ID NO: 48719 - RNA, 20 nt, synthetic construct
  source 1..20: mol_type = other RNA
tataaaaatggcacatactg

SEQ ID NO: 48720 - RNA, 20 nt, synthetic construct
  source 1..20: mol_type = other RNA
tataaaaatggtcaacatga

SEQ ID NO: 48721 - RNA, 20 nt, synthetic construct
  source 1..20: mol_type = other RNA
tataaaaattccgctctggt

SEQ ID NO: 48722 - RNA, 20 nt, synthetic construct
  source 1..20: mol_type = other RNA
tataaaactcttagcttaga

SEQ ID NO: 48723 - RNA, 20 nt, synthetic construct
  source 1..20: mol_type = other RNA
tataaaataggaagtccatg

SEQ ID NO: 48724 - RNA, 20 nt, synthetic construct
  source 1..20: mol_type = other RNA
tataaacgtgtgtgtaagca

SEQ ID NO: 48725 - RNA, 20 nt, synthetic construct
  source 1..20: mol_type = other RNA
tataaactcttccttatccg

SEQ ID NO: 48726 - RNA, 20 nt, synthetic construct
  source 1..20: mol_type = other RNA
tataaactggaaggaaataa

SEQ ID NO: 48727 - RNA, 20 nt, synthetic construct
  source 1..20: mol_type = other RNA
tataaacttccctctcagtg

SEQ ID NO: 48728 - RNA, 20 nt, synthetic construct
  source 1..20: mol_type = other RNA
tataaagaacatgattgggt

SEQ ID NO: 48729 - RNA, 20 nt, synthetic construct
  source 1..20: mol_type = other RNA
tataaagaactccaacaatt

SEQ ID NO: 48730 - RNA, 20 nt, synthetic construct
  source 1..20: mol_type = other RNA
tataaaggatgcacaagaca

SEQ ID NO: 48731 - RNA, 20 nt, synthetic construct
  source 1..20: mol_type = other RNA
tataaagtttccgttttgca

SEQ ID NO: 48732 - RNA, 20 nt, synthetic construct
  source 1..20: mol_type = other RNA
tataaataaaatgtctggcc

SEQ ID NO: 48733 - RNA, 20 nt, synthetic construct
  source 1..20: mol_type = other RNA
tataaatacgtgtatactgg

SEQ ID NO: 48734 - RNA, 20 nt, synthetic construct
  source 1..20: mol_type = other RNA
tataaatcaatctgtttcct

SEQ ID NO: 48735 - RNA, 20 nt, synthetic construct
  source 1..20: mol_type = other RNA
tataaatgaggtatcatttc

SEQ ID NO: 48736 - RNA, 20 nt, synthetic construct
  source 1..20: mol_type = other RNA
tataaatgatgagctactgc

SEQ ID NO: 48737 - RNA, 20 nt, synthetic construct
  source 1..20: mol_type = other RNA
tataaatgctcagtgggttc

SEQ ID NO: 48738 - RNA, 20 nt, synthetic construct
  source 1..20: mol_type = other RNA
tataaatggcatctttaaga

SEQ ID NO: 48739 - RNA, 20 nt, synthetic construct
  source 1..20: mol_type = other RNA
tataaatgttcagtttatgg

SEQ ID NO: 48740 - RNA, 20 nt, synthetic construct
  source 1..20: mol_type = other RNA
tataaattactgtctgtgaa

SEQ ID NO: 48741 - RNA, 20 nt, synthetic construct
  source 1..20: mol_type = other RNA
tataacaagaaaatctgaca

SEQ ID NO: 48742 - RNA, 20 nt, synthetic construct
  source 1..20: mol_type = other RNA
tataacagatggaactctat

SEQ ID NO: 48743 - RNA, 20 nt, synthetic construct
  source 1..20: mol_type = other RNA
tataacataaaagcgtactg

SEQ ID NO: 48744 - RNA, 20 nt, synthetic construct
  source 1..20: mol_type = other RNA
tataacattttctctacagt

SEQ ID NO: 48745 - RNA, 20 nt, synthetic construct
  source 1..20: mol_type = other RNA
tataaccacgagtaatggat

SEQ ID NO: 48746 - RNA, 20 nt, synthetic construct
  source 1..20: mol_type = other RNA
tataacccgttttttccttc

SEQ ID NO: 48747 - RNA, 20 nt, synthetic construct
  source 1..20: mol_type = other RNA
tataacgatagtctcctata

SEQ ID NO: 48748 - RNA, 20 nt, synthetic construct
  source 1..20: mol_type = other RNA
tataactgaacatgtatgtt

SEQ ID NO: 48749 - RNA, 20 nt, synthetic construct
  source 1..20: mol_type = other RNA
tataagacccagtggctagt

SEQ ID NO: 48750 - RNA, 20 nt, synthetic construct
  source 1..20: mol_type = other RNA
tataagagaaggaagcacca

SEQ ID NO: 48751 - RNA, 20 nt, synthetic construct
  source 1..20: mol_type = other RNA
tataagagtgggcaaaaaag

SEQ ID NO: 48752 - RNA, 20 nt, synthetic construct
  source 1..20: mol_type = other RNA
tataagatgatctaaatggt

SEQ ID NO: 48753 - RNA, 20 nt, synthetic construct
  source 1..20: mol_type = other RNA
tataagcaaagatatgggtt

SEQ ID NO: 48754 - RNA, 20 nt, synthetic construct
  source 1..20: mol_type = other RNA
tataagccaatatccctgat

SEQ ID NO: 48755 - RNA, 20 nt, synthetic construct
  source 1..20: mol_type = other RNA
tataagcttcctctggctga

SEQ ID NO: 48756 - RNA, 20 nt, synthetic construct
  source 1..20: mol_type = other RNA
tataaggggaatcatgcagt

SEQ ID NO: 48757 - RNA, 20 nt, synthetic construct
  source 1..20: mol_type = other RNA
tataagggtgataaaaagga

SEQ ID NO: 48758 - RNA, 20 nt, synthetic construct
  source 1..20: mol_type = other RNA
tataagtggaatcattccgt

SEQ ID NO: 48759 - RNA, 20 nt, synthetic construct
  source 1..20: mol_type = other RNA
tataagttcaaagaaactac

SEQ ID NO: 48760 - RNA, 20 nt, synthetic construct
  source 1..20: mol_type = other RNA
tataagttgggagtctattt

SEQ ID NO: 48761 - RNA, 20 nt, synthetic construct
  source 1..20: mol_type = other RNA
tataatcagccgtgattgca

SEQ ID NO: 48762 - RNA, 20 nt, synthetic construct
  source 1..20: mol_type = other RNA
tataatccaactgcagtctg

SEQ ID NO: 48763 - RNA, 20 nt, synthetic construct
  source 1..20: mol_type = other RNA
tataatccagatggacaaat

SEQ ID NO: 48764 - RNA, 20 nt, synthetic construct
  source 1..20: mol_type = other RNA
tataatccattgggtacata

SEQ ID NO: 48765 - RNA, 20 nt, synthetic construct
  source 1..20: mol_type = other RNA
tataatctaaccctcctcct

SEQ ID NO: 48766 - RNA, 20 nt, synthetic construct
  source 1..20: mol_type = other RNA
tataatgagatagaccagat

SEQ ID NO: 48767 - RNA, 20 nt, synthetic construct
  source 1..20: mol_type = other RNA
tataatggagtactatgcag

SEQ ID NO: 48768 - RNA, 20 nt, synthetic construct
  source 1..20: mol_type = other RNA
tataatgggcaatcagaaaa

SEQ ID NO: 48769 - RNA, 20 nt, synthetic construct
  source 1..20: mol_type = other RNA
tataattcaattttcatggg

SEQ ID NO: 48770 - RNA, 20 nt, synthetic construct
  source 1..20: mol_type = other RNA
tataattctgccttcaatgt

SEQ ID NO: 48771 - RNA, 20 nt, synthetic construct
  source 1..20: mol_type = other RNA
tataatttctgagagtattg

SEQ ID NO: 48772 - RNA, 20 nt, synthetic construct
  source 1..20: mol_type = other RNA
tataattttttgagacggaa

SEQ ID NO: 48773 - RNA, 20 nt, synthetic construct
  source 1..20: mol_type = other RNA
tatacaaataactccagctt

SEQ ID NO: 48774 - RNA, 20 nt, synthetic construct
  source 1..20: mol_type = other RNA
tatacaaccggaaaatgctt

SEQ ID NO: 48775 - RNA, 20 nt, synthetic construct
  source 1..20: mol_type = other RNA
tatacaatattacagtaagg

SEQ ID NO: 48776 - RNA, 20 nt, synthetic construct
  source 1..20: mol_type = other RNA
tatacacaaaaagatctgtg

SEQ ID NO: 48777 - RNA, 20 nt, synthetic construct
  source 1..20: mol_type = other RNA
tatacacacataagggggaa

SEQ ID NO: 48778 - RNA, 20 nt, synthetic construct
  source 1..20: mol_type = other RNA
tatacacgttacaaaatatg

SEQ ID NO: 48779 - RNA, 20 nt, synthetic construct
  source 1..20: mol_type = other RNA
tatacagcaaatctctagaa

SEQ ID NO: 48780 - RNA, 20 nt, synthetic construct
  source 1..20: mol_type = other RNA
tatacaggaagagactatct

SEQ ID NO: 48781 - RNA, 20 nt, synthetic construct
  source 1..20: mol_type = other RNA
tatacaggtgcttacagact

SEQ ID NO: 48782 - RNA, 20 nt, synthetic construct
  source 1..20: mol_type = other RNA
tatacagttggaactcttgc

SEQ ID NO: 48783 - RNA, 20 nt, synthetic construct
  source 1..20: mol_type = other RNA
tatacatgacatggttttcc

SEQ ID NO: 48784 - RNA, 20 nt, synthetic construct
  source 1..20: mol_type = other RNA
tatacatgtttagcaagatt

SEQ ID NO: 48785 - RNA, 20 nt, synthetic construct
  source 1..20: mol_type = other RNA
tatacccaagtaaacaactg

SEQ ID NO: 48786 - RNA, 20 nt, synthetic construct
  source 1..20: mol_type = other RNA
tatacccaggtgtgagattg

SEQ ID NO: 48787 - RNA, 20 nt, synthetic construct
  source 1..20: mol_type = other RNA
tatacccttctgttaataga

SEQ ID NO: 48788 - RNA, 20 nt, synthetic construct
  source 1..20: mol_type = other RNA
tatacctgtagaaaataggg

SEQ ID NO: 48789 - RNA, 20 nt, synthetic construct
  source 1..20: mol_type = other RNA
tatacctgttgaatagcaac

SEQ ID NO: 48790 - RNA, 20 nt, synthetic construct
  source 1..20: mol_type = other RNA
tataccttatgtgaaagtag

SEQ ID NO: 48791 - RNA, 20 nt, synthetic construct
  source 1..20: mol_type = other RNA
tatacggaatgattccactt

SEQ ID NO: 48792 - RNA, 20 nt, synthetic construct
  source 1..20: mol_type = other RNA
tatacgtatttatcatgtct

SEQ ID NO: 48793 - RNA, 20 nt, synthetic construct
  source 1..20: mol_type = other RNA
tatactaaatacaccaaact

SEQ ID NO: 48794 - RNA, 20 nt, synthetic construct
  source 1..20: mol_type = other RNA
tatactagtagaaagcaggt

SEQ ID NO: 48795 - RNA, 20 nt, synthetic construct
  source 1..20: mol_type = other RNA
tatactctgagacaggatcc

SEQ ID NO: 48796 - RNA, 20 nt, synthetic construct
  source 1..20: mol_type = other RNA
tatactgaagttctcagggg

SEQ ID NO: 48797 - RNA, 20 nt, synthetic construct
  source 1..20: mol_type = other RNA
tatactgactagtggctcat

SEQ ID NO: 48798 - RNA, 20 nt, synthetic construct
  source 1..20: mol_type = other RNA
tatactggaaaactagagat

SEQ ID NO: 48799 - RNA, 20 nt, synthetic construct
  source 1..20: mol_type = other RNA
tatactgggtgtgatggcgc

SEQ ID NO: 48800 - RNA, 20 nt, synthetic construct
  source 1..20: mol_type = other RNA
tatactgtaaccctgtttcc

SEQ ID NO: 48801 - RNA, 20 nt, synthetic construct
  source 1..20: mol_type = other RNA
tatacttcaatgctacagta

SEQ ID NO: 48802 - RNA, 20 nt, synthetic construct
  source 1..20: mol_type = other RNA
tatacttcatctttcctgat

SEQ ID NO: 48803 - RNA, 20 nt, synthetic construct
  source 1..20: mol_type = other RNA
tatacttgtcaagttctgat

SEQ ID NO: 48804 - RNA, 20 nt, synthetic construct
  source 1..20: mol_type = other RNA
tatagaaaatagtatgaagg

SEQ ID NO: 48805 - RNA, 20 nt, synthetic construct
  source 1..20: mol_type = other RNA
tatagaaaggagaccagtta

SEQ ID NO: 48806 - RNA, 20 nt, synthetic construct
  source 1..20: mol_type = other RNA
tatagaaggccagagggaat

SEQ ID NO: 48807 - RNA, 20 nt, synthetic construct
  source 1..20: mol_type = other RNA
tatagaagtaaatcccggcc

SEQ ID NO: 48808 - RNA, 20 nt, synthetic construct
  source 1..20: mol_type = other RNA
tatagaattcttcttctgtt

SEQ ID NO: 48809 - RNA, 20 nt, synthetic construct
  source 1..20: mol_type = other RNA
tatagacagcatccccagaa

SEQ ID NO: 48810 - RNA, 20 nt, synthetic construct
  source 1..20: mol_type = other RNA
tatagacccaaagcaaaagc

SEQ ID NO: 48811 - RNA, 20 nt, synthetic construct
  source 1..20: mol_type = other RNA
tatagagggcctaaataaaa

SEQ ID NO: 48812 - RNA, 20 nt, synthetic construct
  source 1..20: mol_type = other RNA
tatagatgacgaaagtgaag

SEQ ID NO: 48813 - RNA, 20 nt, synthetic construct
  source 1..20: mol_type = other RNA
tatagcatttgaaaacatgt

SEQ ID NO: 48814 - RNA, 20 nt, synthetic construct
  source 1..20: mol_type = other RNA
tatagccataagagtcccca

SEQ ID NO: 48815 - RNA, 20 nt, synthetic construct
  source 1..20: mol_type = other RNA
tatagcgagacctcatctct

SEQ ID NO: 48816 - RNA, 20 nt, synthetic construct
  source 1..20: mol_type = other RNA
tatagctaagaaacagtaat

SEQ ID NO: 48817 - RNA, 20 nt, synthetic construct
  source 1..20: mol_type = other RNA
tatagctccaaaagcgaaag

SEQ ID NO: 48818 - RNA, 20 nt, synthetic construct
  source 1..20: mol_type = other RNA
tatagctgagaagtaacatt

SEQ ID NO: 48819 - RNA, 20 nt, synthetic construct
  source 1..20: mol_type = other RNA
tatagcttctgagctgttaa

SEQ ID NO: 48820 - RNA, 20 nt, synthetic construct
  source 1..20: mol_type = other RNA
tataggagactatcgttata

SEQ ID NO: 48821 - RNA, 20 nt, synthetic construct
  source 1..20: mol_type = other RNA
tataggagttcattcgtagc

SEQ ID NO: 48822 - RNA, 20 nt, synthetic construct
  source 1..20: mol_type = other RNA
tataggattttcgtatcttt

SEQ ID NO: 48823 - RNA, 20 nt, synthetic construct
  source 1..20: mol_type = other RNA
tataggcaatgagtctgaca

SEQ ID NO: 48824 - RNA, 20 nt, synthetic construct
  source 1..20: mol_type = other RNA
tataggcaatttagaattct

SEQ ID NO: 48825 - RNA, 20 nt, synthetic construct
  source 1..20: mol_type = other RNA
tataggcattccttaatttt

SEQ ID NO: 48826 - RNA, 20 nt, synthetic construct
  source 1..20: mol_type = other RNA
tataggggaactcttgtagt

SEQ ID NO: 48827 - RNA, 20 nt, synthetic construct
  source 1..20: mol_type = other RNA
tataggtagtacatattcat

SEQ ID NO: 48828 - RNA, 20 nt, synthetic construct
  source 1..20: mol_type = other RNA
tataggttgaatagggcctc

SEQ ID NO: 48829 - RNA, 20 nt, synthetic construct
  source 1..20: mol_type = other RNA
tatagtaattctgtgcttaa

SEQ ID NO: 48830 - RNA, 20 nt, synthetic construct
  source 1..20: mol_type = other RNA
tatagtattacctcccatgc

SEQ ID NO: 48831 - RNA, 20 nt, synthetic construct
  source 1..20: mol_type = other RNA
tatagtcattccgctaaaca

SEQ ID NO: 48832 - RNA, 20 nt, synthetic construct
  source 1..20: mol_type = other RNA
tatagtcttagctcttaagc

SEQ ID NO: 48833 - RNA, 20 nt, synthetic construct
  source 1..20: mol_type = other RNA
tatagtggctgcaccatttt

SEQ ID NO: 48834 - RNA, 20 nt, synthetic construct
  source 1..20: mol_type = other RNA
tatagtgggaccccgtctct

SEQ ID NO: 48835 - RNA, 20 nt, synthetic construct
  source 1..20: mol_type = other RNA
tatagtggtaaggagccaaa

SEQ ID NO: 48836 - RNA, 20 nt, synthetic construct
  source 1..20: mol_type = other RNA
tatagtgtttccttccagat

SEQ ID NO: 48837 - RNA, 20 nt, synthetic construct
  source 1..20: mol_type = other RNA
tatagttaagtctgaaagct

SEQ ID NO: 48838 - RNA, 20 nt, synthetic construct
  source 1..20: mol_type = other RNA
tatagtttaattgggggaaa

SEQ ID NO: 48839 - RNA, 20 nt, synthetic construct
  source 1..20: mol_type = other RNA
tatataaagaactccaacaa

SEQ ID NO: 48840 - RNA, 20 nt, synthetic construct
  source 1..20: mol_type = other RNA
tatataaatgctcagtgggt

SEQ ID NO: 48841 - RNA, 20 nt, synthetic construct
  source 1..20: mol_type = other RNA
tatataccacattttgttca

SEQ ID NO: 48842 - RNA, 20 nt, synthetic construct
  source 1..20: mol_type = other RNA
tatatacccttctgttaata

SEQ ID NO: 48843 - RNA, 20 nt, synthetic construct
  source 1..20: mol_type = other RNA
tatatacggaatgattccac

SEQ ID NO: 48844 - RNA, 20 nt, synthetic construct
  source 1..20: mol_type = other RNA
tatatactctgagacaggat

SEQ ID NO: 48845 - RNA, 20 nt, synthetic construct
  source 1..20: mol_type = other RNA
tatatactgaagttctcagg

SEQ ID NO: 48846 - RNA, 20 nt, synthetic construct
  source 1..20: mol_type = other RNA
tatataggattttcgtatct

SEQ ID NO: 48847 - RNA, 20 nt, synthetic construct
  source 1..20: mol_type = other RNA
tatatatcatagagtaccag

SEQ ID NO: 48848 - RNA, 20 nt, synthetic construct
  source 1..20: mol_type = other RNA
tatatatgatgatttttgcc

SEQ ID NO: 48849 - RNA, 20 nt, synthetic construct
  source 1..20: mol_type = other RNA
tatatatgctccctaaatac

SEQ ID NO: 48850 - RNA, 20 nt, synthetic construct
  source 1..20: mol_type = other RNA
tatatattttctaagagcca

SEQ ID NO: 48851 - RNA, 20 nt, synthetic construct
  source 1..20: mol_type = other RNA
tatatcacaacttgtatgaa

SEQ ID NO: 48852 - RNA, 20 nt, synthetic construct
  source 1..20: mol_type = other RNA
tatatcatagagtaccaggt

SEQ ID NO: 48853 - RNA, 20 nt, synthetic construct
  source 1..20: mol_type = other RNA
tatatcatcttaagaaccat

SEQ ID NO: 48854 - RNA, 20 nt, synthetic construct
  source 1..20: mol_type = other RNA
tatatccagattgatatctg

SEQ ID NO: 48855 - RNA, 20 nt, synthetic construct
  source 1..20: mol_type = other RNA
tatatcccaaattggcattt

SEQ ID NO: 48856 - RNA, 20 nt, synthetic construct
  source 1..20: mol_type = other RNA
tatatcctaaacacttagca

SEQ ID NO: 48857 - RNA, 20 nt, synthetic construct
  source 1..20: mol_type = other RNA
tatatcctcagggtaggaaa

SEQ ID NO: 48858 - RNA, 20 nt, synthetic construct
  source 1..20: mol_type = other RNA
tatatctccttttaagagtg

SEQ ID NO: 48859 - RNA, 20 nt, synthetic construct
  source 1..20: mol_type = other RNA
tatatctgtctgggataatg

SEQ ID NO: 48860 - RNA, 20 nt, synthetic construct
  source 1..20: mol_type = other RNA
tatatctttggaaaaatgtc

SEQ ID NO: 48861 - RNA, 20 nt, synthetic construct
  source 1..20: mol_type = other RNA
tatatgaaaagcccaatcta

SEQ ID NO: 48862 - RNA, 20 nt, synthetic construct
  source 1..20: mol_type = other RNA
tatatgaaaagcttcccccc

SEQ ID NO: 48863 - RNA, 20 nt, synthetic construct
  source 1..20: mol_type = other RNA
tatatgaataaaccacgcag

SEQ ID NO: 48864 - RNA, 20 nt, synthetic construct
  source 1..20: mol_type = other RNA
tatatgatactcgtagtttt

SEQ ID NO: 48865 - RNA, 20 nt, synthetic construct
  source 1..20: mol_type = other RNA
tatatgatccagcagtttca

SEQ ID NO: 48866 - RNA, 20 nt, synthetic construct
  source 1..20: mol_type = other RNA
tatatgatgatttttgccag

SEQ ID NO: 48867 - RNA, 20 nt, synthetic construct
  source 1..20: mol_type = other RNA
tatatgcattaagccagtca

SEQ ID NO: 48868 - RNA, 20 nt, synthetic construct
  source 1..20: mol_type = other RNA
tatatgcattcccatgttca

SEQ ID NO: 48869 - RNA, 20 nt, synthetic construct
  source 1..20: mol_type = other RNA
tatatgcctagatgattcgc

SEQ ID NO: 48870 - RNA, 20 nt, synthetic construct
  source 1..20: mol_type = other RNA
tatatgcctagatttcaatc

SEQ ID NO: 48871 - RNA, 20 nt, synthetic construct
  source 1..20: mol_type = other RNA
tatatgctccctaaatacac

SEQ ID NO: 48872 - RNA, 20 nt, synthetic construct
  source 1..20: mol_type = other RNA
tatatgctgtttttgaaaag

SEQ ID NO: 48873 - RNA, 20 nt, synthetic construct
  source 1..20: mol_type = other RNA
tatatgggatatctaacata

SEQ ID NO: 48874 - RNA, 20 nt, synthetic construct
  source 1..20: mol_type = other RNA
tatatggtctaccatgttgt

SEQ ID NO: 48875 - RNA, 20 nt, synthetic construct
  source 1..20: mol_type = other RNA
tatatggtttaaggtaaggg

SEQ ID NO: 48876 - RNA, 20 nt, synthetic construct
  source 1..20: mol_type = other RNA
tatatgttgatgtaatggat

SEQ ID NO: 48877 - RNA, 20 nt, synthetic construct
  source 1..20: mol_type = other RNA
tatattaaaacccatgatct

SEQ ID NO: 48878 - RNA, 20 nt, synthetic construct
  source 1..20: mol_type = other RNA
tatattaaccactgaaactt

SEQ ID NO: 48879 - RNA, 20 nt, synthetic construct
  source 1..20: mol_type = other RNA
tatattaattctgaggcctc

SEQ ID NO: 48880 - RNA, 20 nt, synthetic construct
  source 1..20: mol_type = other RNA
tatattatggtctttttcca

SEQ ID NO: 48881 - RNA, 20 nt, synthetic construct
  source 1..20: mol_type = other RNA
tatattatgtgcaagttctc

SEQ ID NO: 48882 - RNA, 20 nt, synthetic construct
  source 1..20: mol_type = other RNA
tatattcatagtagctgttg

SEQ ID NO: 48883 - RNA, 20 nt, synthetic construct
  source 1..20: mol_type = other RNA
tatattcatttccaaagatc

SEQ ID NO: 48884 - RNA, 20 nt, synthetic construct
  source 1..20: mol_type = other RNA
tatattctaaacctgaggtc

SEQ ID NO: 48885 - RNA, 20 nt, synthetic construct
  source 1..20: mol_type = other RNA
tatattctaagtttgccaaa

SEQ ID NO: 48886 - RNA, 20 nt, synthetic construct
  source 1..20: mol_type = other RNA
tatattctgtgaattgtgac

SEQ ID NO: 48887 - RNA, 20 nt, synthetic construct
  source 1..20: mol_type = other RNA
tatattgtcaatggggaact

SEQ ID NO: 48888 - RNA, 20 nt, synthetic construct
  source 1..20: mol_type = other RNA
tatatttactagatcaagcc

SEQ ID NO: 48889 - RNA, 20 nt, synthetic construct
  source 1..20: mol_type = other RNA
tatatttactgcttgctgca

SEQ ID NO: 48890 - RNA, 20 nt, synthetic construct
  source 1..20: mol_type = other RNA
tatatttcacaacgatttct

SEQ ID NO: 48891 - RNA, 20 nt, synthetic construct
  source 1..20: mol_type = other RNA
tatatttccgatgatacctt

SEQ ID NO: 48892 - RNA, 20 nt, synthetic construct
  source 1..20: mol_type = other RNA
tatatttccgtatccagtgg

SEQ ID NO: 48893 - RNA, 20 nt, synthetic construct
  source 1..20: mol_type = other RNA
tatattttaagttctaggga

SEQ ID NO: 48894 - RNA, 20 nt, synthetic construct
  source 1..20: mol_type = other RNA
tatattttcaaggcttgtgc

SEQ ID NO: 48895 - RNA, 20 nt, synthetic construct
  source 1..20: mol_type = other RNA
tatattttctaagagccaaa

SEQ ID NO: 48896 - RNA, 20 nt, synthetic construct
  source 1..20: mol_type = other RNA
tatattttggtagagatggg

SEQ ID NO: 48897 - RNA, 20 nt, synthetic construct
  source 1..20: mol_type = other RNA
tatcaaaacacttctgtgat

SEQ ID NO: 48898 - RNA, 20 nt, synthetic construct
  source 1..20: mol_type = other RNA
tatcaaaatcaaggtgcggg

SEQ ID NO: 48899 - RNA, 20 nt, synthetic construct
  source 1..20: mol_type = other RNA
tatcaacacatagtgttaat

SEQ ID NO: 48900 - RNA, 20 nt, synthetic construct
  source 1..20: mol_type = other RNA
tatcaacctgcaggtatttc

SEQ ID NO: 48901 - RNA, 20 nt, synthetic construct
  source 1..20: mol_type = other RNA
tatcaatagcagtgctgaaa

SEQ ID NO: 48902 - RNA, 20 nt, synthetic construct
  source 1..20: mol_type = other RNA
tatcaatctcacacctgggt

SEQ ID NO: 48903 - RNA, 20 nt, synthetic construct
  source 1..20: mol_type = other RNA
tatcaatctggatataacaa

SEQ ID NO: 48904 - RNA, 20 nt, synthetic construct
  source 1..20: mol_type = other RNA
tatcaattagttcctccttt

SEQ ID NO: 48905 - RNA, 20 nt, synthetic construct
  source 1..20: mol_type = other RNA
tatcacaacttgtatgaaat

SEQ ID NO: 48906 - RNA, 20 nt, synthetic construct
  source 1..20: mol_type = other RNA
tatcacacctaggcctattt

SEQ ID NO: 48907 - RNA, 20 nt, synthetic construct
  source 1..20: mol_type = other RNA
tatcacactgtttgattact

SEQ ID NO: 48908 - RNA, 20 nt, synthetic construct
  source 1..20: mol_type = other RNA
tatcacagtgaggacgctga

SEQ ID NO: 48909 - RNA, 20 nt, synthetic construct
  source 1..20: mol_type = other RNA
tatcaccatctgataagccc

SEQ ID NO: 48910 - RNA, 20 nt, synthetic construct
  source 1..20: mol_type = other RNA
tatcaccatgtgcttatcaa

SEQ ID NO: 48911 - RNA, 20 nt, synthetic construct
  source 1..20: mol_type = other RNA
tatcacccagaccaagttta

SEQ ID NO: 48912 - RNA, 20 nt, synthetic construct
  source 1..20: mol_type = other RNA
tatcacccttataaaatgag

SEQ ID NO: 48913 - RNA, 20 nt, synthetic construct
  source 1..20: mol_type = other RNA
tatcacgattctgacccaga

SEQ ID NO: 48914 - RNA, 20 nt, synthetic construct
  source 1..20: mol_type = other RNA
tatcactttttgtatttcct

SEQ ID NO: 48915 - RNA, 20 nt, synthetic construct
  source 1..20: mol_type = other RNA
tatcagaagcacaccaaggt

SEQ ID NO: 48916 - RNA, 20 nt, synthetic construct
  source 1..20: mol_type = other RNA
tatcagaagtgctgacttgg

SEQ ID NO: 48917 - RNA, 20 nt, synthetic construct
  source 1..20: mol_type = other RNA
tatcagagcatgtcccctgg

SEQ ID NO: 48918 - RNA, 20 nt, synthetic construct
  source 1..20: mol_type = other RNA
tatcagatcccaattacttc

SEQ ID NO: 48919 - RNA, 20 nt, synthetic construct
  source 1..20: mol_type = other RNA
tatcagatgcttctagccaa

SEQ ID NO: 48920 - RNA, 20 nt, synthetic construct
  source 1..20: mol_type = other RNA
tatcagatggtgatacctct

SEQ ID NO: 48921 - RNA, 20 nt, synthetic construct
  source 1..20: mol_type = other RNA
tatcagcaccaaagattatg

SEQ ID NO: 48922 - RNA, 20 nt, synthetic construct
  source 1..20: mol_type = other RNA
tatcaggaaagtgccagcca

SEQ ID NO: 48923 - RNA, 20 nt, synthetic construct
  source 1..20: mol_type = other RNA
tatcaggccttccacctgct

SEQ ID NO: 48924 - RNA, 20 nt, synthetic construct
  source 1..20: mol_type = other RNA
tatcaggcttgagtctgtgc

SEQ ID NO: 48925 - RNA, 20 nt, synthetic construct
  source 1..20: mol_type = other RNA
tatcagggatattggcttat

SEQ ID NO: 48926 - RNA, 20 nt, synthetic construct
  source 1..20: mol_type = other RNA
tatcagggatcacagataca

SEQ ID NO: 48927 - RNA, 20 nt, synthetic construct
  source 1..20: mol_type = other RNA
tatcagggctgaaaaacacc

SEQ ID NO: 48928 - RNA, 20 nt, synthetic construct
  source 1..20: mol_type = other RNA
tatcagtagtttgctagtgg

SEQ ID NO: 48929 - RNA, 20 nt, synthetic construct
  source 1..20: mol_type = other RNA
tatcagtctccaatcctcag

SEQ ID NO: 48930 - RNA, 20 nt, synthetic construct
  source 1..20: mol_type = other RNA
tatcagttatcacacctagg

SEQ ID NO: 48931 - RNA, 20 nt, synthetic construct
  source 1..20: mol_type = other RNA
tatcatagagtaccaggtca

SEQ ID NO: 48932 - RNA, 20 nt, synthetic construct
  source 1..20: mol_type = other RNA
tatcatatgatctatcaatc

SEQ ID NO: 48933 - RNA, 20 nt, synthetic construct
  source 1..20: mol_type = other RNA
tatcatattttccttatcca

SEQ ID NO: 48934 - RNA, 20 nt, synthetic construct
  source 1..20: mol_type = other RNA
tatcatcaagacagagctcc

SEQ ID NO: 48935 - RNA, 20 nt, synthetic construct
  source 1..20: mol_type = other RNA
tatcatcatcttatacttgg

SEQ ID NO: 48936 - RNA, 20 nt, synthetic construct
  source 1..20: mol_type = other RNA
tatcatcttaagaaccatac

SEQ ID NO: 48937 - RNA, 20 nt, synthetic construct
  source 1..20: mol_type = other RNA
tatcatgtcttcttggattt

SEQ ID NO: 48938 - RNA, 20 nt, synthetic construct
  source 1..20: mol_type = other RNA
tatcattgcaccactgcact

SEQ ID NO: 48939 - RNA, 20 nt, synthetic construct
  source 1..20: mol_type = other RNA
tatcatttccaagattgaaa

SEQ ID NO: 48940 - RNA, 20 nt, synthetic construct
  source 1..20: mol_type = other RNA
tatcatttgaatgatgcgaa

SEQ ID NO: 48941 - RNA, 20 nt, synthetic construct
  source 1..20: mol_type = other RNA
tatccaaagataaaggtaag

SEQ ID NO: 48942 - RNA, 20 nt, synthetic construct
  source 1..20: mol_type = other RNA
tatccaacatgccagctttg

SEQ ID NO: 48943 - RNA, 20 nt, synthetic construct
  source 1..20: mol_type = other RNA
tatccaagcacaaacctggc

SEQ ID NO: 48944 - RNA, 20 nt, synthetic construct
  source 1..20: mol_type = other RNA
tatccaatcactggctagta

SEQ ID NO: 48945 - RNA, 20 nt, synthetic construct
  source 1..20: mol_type = other RNA
tatccaattttttggcatac

SEQ ID NO: 48946 - RNA, 20 nt, synthetic construct
  source 1..20: mol_type = other RNA
tatccacagtatgctgttta

SEQ ID NO: 48947 - RNA, 20 nt, synthetic construct
  source 1..20: mol_type = other RNA
tatccacatttggttttact

SEQ ID NO: 48948 - RNA, 20 nt, synthetic construct
  source 1..20: mol_type = other RNA
tatccaccactccaccttag

SEQ ID NO: 48949 - RNA, 20 nt, synthetic construct
  source 1..20: mol_type = other RNA
tatccagaagagaatggctg

SEQ ID NO: 48950 - RNA, 20 nt, synthetic construct
  source 1..20: mol_type = other RNA
tatccagattgatatctgag

SEQ ID NO: 48951 - RNA, 20 nt, synthetic construct
  source 1..20: mol_type = other RNA
tatccagtaatcttgctaaa

SEQ ID NO: 48952 - RNA, 20 nt, synthetic construct
  source 1..20: mol_type = other RNA
tatccagtctctgcaacatt

SEQ ID NO: 48953 - RNA, 20 nt, synthetic construct
  source 1..20: mol_type = other RNA
tatccagtgacacctgaggg

SEQ ID NO: 48954 - RNA, 20 nt, synthetic construct
  source 1..20: mol_type = other RNA
tatccagtggttttttgttt

SEQ ID NO: 48955 - RNA, 20 nt, synthetic construct
  source 1..20: mol_type = other RNA
tatccattcatctctcgatg

SEQ ID NO: 48956 - RNA, 20 nt, synthetic construct
  source 1..20: mol_type = other RNA
tatcccaaattggcatttaa

SEQ ID NO: 48957 - RNA, 20 nt, synthetic construct
  source 1..20: mol_type = other RNA
tatcccagacagatatatgc

SEQ ID NO: 48958 - RNA, 20 nt, synthetic construct
  source 1..20: mol_type = other RNA
tatcccagatctaacaaacg

SEQ ID NO: 48959 - RNA, 20 nt, synthetic construct
  source 1..20: mol_type = other RNA
tatcccagatggggattgag

SEQ ID NO: 48960 - RNA, 20 nt, synthetic construct
  source 1..20: mol_type = other RNA
tatcccatataaggggaatc

SEQ ID NO: 48961 - RNA, 20 nt, synthetic construct
  source 1..20: mol_type = other RNA
tatccccatttttctcgaca

SEQ ID NO: 48962 - RNA, 20 nt, synthetic construct
  source 1..20: mol_type = other RNA
tatccctacctaaaaaggga

SEQ ID NO: 48963 - RNA, 20 nt, synthetic construct
  source 1..20: mol_type = other RNA
tatccctgataatcacagac

SEQ ID NO: 48964 - RNA, 20 nt, synthetic construct
  source 1..20: mol_type = other RNA
tatccctggggtttccttac

SEQ ID NO: 48965 - RNA, 20 nt, synthetic construct
  source 1..20: mol_type = other RNA
tatccctttaaaatgatagc

SEQ ID NO: 48966 - RNA, 20 nt, synthetic construct
  source 1..20: mol_type = other RNA
tatccgaaagaactgaaagc

SEQ ID NO: 48967 - RNA, 20 nt, synthetic construct
  source 1..20: mol_type = other RNA
tatccgataaagggtctggt

SEQ ID NO: 48968 - RNA, 20 nt, synthetic construct
  source 1..20: mol_type = other RNA
tatcctaaacacttagcatg

SEQ ID NO: 48969 - RNA, 20 nt, synthetic construct
  source 1..20: mol_type = other RNA
tatcctaatgggcgtggagc

SEQ ID NO: 48970 - RNA, 20 nt, synthetic construct
  source 1..20: mol_type = other RNA
tatcctatcagagcatgtcc

SEQ ID NO: 48971 - RNA, 20 nt, synthetic construct
  source 1..20: mol_type = other RNA
tatcctatgtggggaatgct

SEQ ID NO: 48972 - RNA, 20 nt, synthetic construct
  source 1..20: mol_type = other RNA
tatcctcagggtaggaaaag

SEQ ID NO: 48973 - RNA, 20 nt, synthetic construct
  source 1..20: mol_type = other RNA
tatcctccaatgtttttaat

SEQ ID NO: 48974 - RNA, 20 nt, synthetic construct
  source 1..20: mol_type = other RNA
tatcctcttctgaagaggct

SEQ ID NO: 48975 - RNA, 20 nt, synthetic construct
  source 1..20: mol_type = other RNA
tatcctgagacttaggcaaa

SEQ ID NO: 48976 - RNA, 20 nt, synthetic construct
  source 1..20: mol_type = other RNA
tatcctgtaaacctggaatc

SEQ ID NO: 48977 - RNA, 20 nt, synthetic construct
  source 1..20: mol_type = other RNA
tatcctgtttgagaagtctt

SEQ ID NO: 48978 - RNA, 20 nt, synthetic construct
  source 1..20: mol_type = other RNA
tatccttctacatcccccca

SEQ ID NO: 48979 - RNA, 20 nt, synthetic construct
  source 1..20: mol_type = other RNA
tatccttgcaccaactccac

SEQ ID NO: 48980 - RNA, 20 nt, synthetic construct
  source 1..20: mol_type = other RNA
tatcctttcaaggtatctcc

SEQ ID NO: 48981 - RNA, 20 nt, synthetic construct
  source 1..20: mol_type = other RNA
tatccttttatgtgcagtct

SEQ ID NO: 48982 - RNA, 20 nt, synthetic construct
  source 1..20: mol_type = other RNA
tatcggataaggaagagttt

SEQ ID NO: 48983 - RNA, 20 nt, synthetic construct
  source 1..20: mol_type = other RNA
tatcgtgagactattatgag

SEQ ID NO: 48984 - RNA, 20 nt, synthetic construct
  source 1..20: mol_type = other RNA
tatcgttatatcctcagggt

SEQ ID NO: 48985 - RNA, 20 nt, synthetic construct
  source 1..20: mol_type = other RNA
tatctaagcctactgctctg

SEQ ID NO: 48986 - RNA, 20 nt, synthetic construct
  source 1..20: mol_type = other RNA
tatctaataaaatagcagga

SEQ ID NO: 48987 - RNA, 20 nt, synthetic construct
  source 1..20: mol_type = other RNA
tatctaattaacatccagaa

SEQ ID NO: 48988 - RNA, 20 nt, synthetic construct
  source 1..20: mol_type = other RNA
tatctacaaatcacatatct

SEQ ID NO: 48989 - RNA, 20 nt, synthetic construct
  source 1..20: mol_type = other RNA
tatctacagaggattttgga

SEQ ID NO: 48990 - RNA, 20 nt, synthetic construct
  source 1..20: mol_type = other RNA
tatctacatgtacgccaatt

SEQ ID NO: 48991 - RNA, 20 nt, synthetic construct
  source 1..20: mol_type = other RNA
tatctaccaaaaaactacga

SEQ ID NO: 48992 - RNA, 20 nt, synthetic construct
  source 1..20: mol_type = other RNA
tatctaggagtacagtgcat

SEQ ID NO: 48993 - RNA, 20 nt, synthetic construct
  source 1..20: mol_type = other RNA
tatctaggcgaaatatctcc

SEQ ID NO: 48994 - RNA, 20 nt, synthetic construct
  source 1..20: mol_type = other RNA
tatctatcagggctgaaaaa

SEQ ID NO: 48995 - RNA, 20 nt, synthetic construct
  source 1..20: mol_type = other RNA
tatctattaacagaagggta

SEQ ID NO: 48996 - RNA, 20 nt, synthetic construct
  source 1..20: mol_type = other RNA
tatctcagtcataatttgtg

SEQ ID NO: 48997 - RNA, 20 nt, synthetic construct
  source 1..20: mol_type = other RNA
tatctcatgcttaggatccc

SEQ ID NO: 48998 - RNA, 20 nt, synthetic construct
  source 1..20: mol_type = other RNA
tatctcattaaaaatcaacc

SEQ ID NO: 48999 - RNA, 20 nt, synthetic construct
  source 1..20: mol_type = other RNA
tatctccacatttctacaca

SEQ ID NO: 49000 - RNA, 20 nt, synthetic construct
  source 1..20: mol_type = other RNA
tatctccataagtccctaac

SEQ ID NO: 49001 - RNA, 20 nt, synthetic construct
  source 1..20: mol_type = other RNA
tatctccccaaagatattag

SEQ ID NO: 49002 - RNA, 20 nt, synthetic construct
  source 1..20: mol_type = other RNA
tatctccctcacagtccact

SEQ ID NO: 49003 - RNA, 20 nt, synthetic construct
  source 1..20: mol_type = other RNA
tatctccctgtgcgtgaatc

SEQ ID NO: 49004 - RNA, 20 nt, synthetic construct
  source 1..20: mol_type = other RNA
tatctcctttccttccttgc

SEQ ID NO: 49005 - RNA, 20 nt, synthetic construct
  source 1..20: mol_type = other RNA
tatctccttttaagagtgaa

SEQ ID NO: 49006 - RNA, 20 nt, synthetic construct
  source 1..20: mol_type = other RNA
tatctcggtcattctggagt

SEQ ID NO: 49007 - RNA, 20 nt, synthetic construct
  source 1..20: mol_type = other RNA
tatctctcagatctgagttt

SEQ ID NO: 49008 - RNA, 20 nt, synthetic construct
  source 1..20: mol_type = other RNA
tatctctctcaagcaatctg

SEQ ID NO: 49009 - RNA, 20 nt, synthetic construct
  source 1..20: mol_type = other RNA
tatctctgccctcattgaag

SEQ ID NO: 49010 - RNA, 20 nt, synthetic construct
  source 1..20: mol_type = other RNA
tatctcttagacctcctaga

SEQ ID NO: 49011 - RNA, 20 nt, synthetic construct
  source 1..20: mol_type = other RNA
tatctcttcctcctctggac

SEQ ID NO: 49012 - RNA, 20 nt, synthetic construct
  source 1..20: mol_type = other RNA
tatctgaacattttagctgg

SEQ ID NO: 49013 - RNA, 20 nt, synthetic construct
  source 1..20: mol_type = other RNA
tatctgaacgtctttaaatt

SEQ ID NO: 49014 - RNA, 20 nt, synthetic construct
  source 1..20: mol_type = other RNA
tatctgaactttcgaagtgg

SEQ ID NO: 49015 - RNA, 20 nt, synthetic construct
  source 1..20: mol_type = other RNA
tatctgagtgttgtgtgcac

SEQ ID NO: 49016 - RNA, 20 nt, synthetic construct
  source 1..20: mol_type = other RNA
tatctgattttgtgtcttct

SEQ ID NO: 49017 - RNA, 20 nt, synthetic construct
  source 1..20: mol_type = other RNA
tatctgctgtcggttttcta

SEQ ID NO: 49018 - RNA, 20 nt, synthetic construct
  source 1..20: mol_type = other RNA
tatctggactgaaaagatac

SEQ ID NO: 49019 - RNA, 20 nt, synthetic construct
  source 1..20: mol_type = other RNA
tatctggatttttgtgtaga

SEQ ID NO: 49020 - RNA, 20 nt, synthetic construct
  source 1..20: mol_type = other RNA
tatctggcctgcaccattta

SEQ ID NO: 49021 - RNA, 20 nt, synthetic construct
  source 1..20: mol_type = other RNA
tatctgggaaaaaataagaa

SEQ ID NO: 49022 - RNA, 20 nt, synthetic construct
  source 1..20: mol_type = other RNA
tatctgggaacagcccctag

SEQ ID NO: 49023 - RNA, 20 nt, synthetic construct
  source 1..20: mol_type = other RNA
tatctggtgctggcagcctt

SEQ ID NO: 49024 - RNA, 20 nt, synthetic construct
  source 1..20: mol_type = other RNA
tatctggtgttgcttgctct

SEQ ID NO: 49025 - RNA, 20 nt, synthetic construct
  source 1..20: mol_type = other RNA
tatctgtaagtcatcaaagg

SEQ ID NO: 49026 - RNA, 20 nt, synthetic construct
  source 1..20: mol_type = other RNA
tatctgtctgggataatgag

SEQ ID NO: 49027 - RNA, 20 nt, synthetic construct
  source 1..20: mol_type = other RNA
tatctgtgatccctgatatg

SEQ ID NO: 49028 - RNA, 20 nt, synthetic construct
  source 1..20: mol_type = other RNA
tatctgtgggttaaaagtta

SEQ ID NO: 49029 - RNA, 20 nt, synthetic construct
  source 1..20: mol_type = other RNA
tatctgttttcttactgatt

SEQ ID NO: 49030 - RNA, 20 nt, synthetic construct
  source 1..20: mol_type = other RNA
tatcttaataacctcaaagt

SEQ ID NO: 49031 - RNA, 20 nt, synthetic construct
  source 1..20: mol_type = other RNA
tatcttcacaaacaaatcct

SEQ ID NO: 49032 - RNA, 20 nt, synthetic construct
  source 1..20: mol_type = other RNA
tatcttccctaaagagaatc

SEQ ID NO: 49033 - RNA, 20 nt, synthetic construct
  source 1..20: mol_type = other RNA
tatcttctaccttttgttat

SEQ ID NO: 49034 - RNA, 20 nt, synthetic construct
  source 1..20: mol_type = other RNA
tatcttgaagaaaccaagag

SEQ ID NO: 49035 - RNA, 20 nt, synthetic construct
  source 1..20: mol_type = other RNA
tatctttactttcagctcaa

SEQ ID NO: 49036 - RNA, 20 nt, synthetic construct
  source 1..20: mol_type = other RNA
tatctttaggtgttttttcc

SEQ ID NO: 49037 - RNA, 20 nt, synthetic construct
  source 1..20: mol_type = other RNA
tatctttctagattcatatg

SEQ ID NO: 49038 - RNA, 20 nt, synthetic construct
  source 1..20: mol_type = other RNA
tatctttgcttataacaaga

SEQ ID NO: 49039 - RNA, 20 nt, synthetic construct
  source 1..20: mol_type = other RNA
tatctttggaaaaatgtccg

SEQ ID NO: 49040 - RNA, 20 nt, synthetic construct
  source 1..20: mol_type = other RNA
tatctttggatatccccatt

SEQ ID NO: 49041 - RNA, 20 nt, synthetic construct
  source 1..20: mol_type = other RNA
tatctttgggaaaatctctg

SEQ ID NO: 49042 - RNA, 20 nt, synthetic construct
  source 1..20: mol_type = other RNA
tatctttggggagatacctt

SEQ ID NO: 49043 - RNA, 20 nt, synthetic construct
  source 1..20: mol_type = other RNA
tatcttttaacagatggtcc

SEQ ID NO: 49044 - RNA, 20 nt, synthetic construct
  source 1..20: mol_type = other RNA
tatcttttcaaaaacccaac

SEQ ID NO: 49045 - RNA, 20 nt, synthetic construct
  source 1..20: mol_type = other RNA
tatcttttcagtccagatat

SEQ ID NO: 49046 - RNA, 20 nt, synthetic construct
  source 1..20: mol_type = other RNA
tatcttttcatgttgaccat

SEQ ID NO: 49047 - RNA, 20 nt, synthetic construct
  source 1..20: mol_type = other RNA
tatctttttcagcagcagag

SEQ ID NO: 49048 - RNA, 20 nt, synthetic construct
  source 1..20: mol_type = other RNA
tatgaaaagcccaatctaca

SEQ ID NO: 49049 - RNA, 20 nt, synthetic construct
  source 1..20: mol_type = other RNA
tatgaaaagcctcaaacgaa

SEQ ID NO: 49050 - RNA, 20 nt, synthetic construct
  source 1..20: mol_type = other RNA
tatgaaaagcttcccccctc

SEQ ID NO: 49051 - RNA, 20 nt, synthetic construct
  source 1..20: mol_type = other RNA
tatgaaaattggcgtacatg

SEQ ID NO: 49052 - RNA, 20 nt, synthetic construct
  source 1..20: mol_type = other RNA
tatgaaaatttagcttctga

SEQ ID NO: 49053 - RNA, 20 nt, synthetic construct
  source 1..20: mol_type = other RNA
tatgaaagaggagacattac

SEQ ID NO: 49054 - RNA, 20 nt, synthetic construct
  source 1..20: mol_type = other RNA
tatgaaatcacacaatcttg

SEQ ID NO: 49055 - RNA, 20 nt, synthetic construct
  source 1..20: mol_type = other RNA
tatgaaatcttgaagatggc

SEQ ID NO: 49056 - RNA, 20 nt, synthetic construct
  source 1..20: mol_type = other RNA
tatgaaatgtggtttttggt

SEQ ID NO: 49057 - RNA, 20 nt, synthetic construct
  source 1..20: mol_type = other RNA
tatgaaccacactgacagga

SEQ ID NO: 49058 - RNA, 20 nt, synthetic construct
  source 1..20: mol_type = other RNA
tatgaaccattgtaaaccat

SEQ ID NO: 49059 - RNA, 20 nt, synthetic construct
  source 1..20: mol_type = other RNA
tatgaagcattaatgcaacc

SEQ ID NO: 49060 - RNA, 20 nt, synthetic construct
  source 1..20: mol_type = other RNA
tatgaagcttttctcctaag

SEQ ID NO: 49061 - RNA, 20 nt, synthetic construct
  source 1..20: mol_type = other RNA
tatgaataaaccacgcagtt

SEQ ID NO: 49062 - RNA, 20 nt, synthetic construct
  source 1..20: mol_type = other RNA
tatgaataggtgtgtgttcc

SEQ ID NO: 49063 - RNA, 20 nt, synthetic construct
  source 1..20: mol_type = other RNA
tatgaatatactggaaaact

SEQ ID NO: 49064 - RNA, 20 nt, synthetic construct
  source 1..20: mol_type = other RNA
tatgaatgatgccatcacat

SEQ ID NO: 49065 - RNA, 20 nt, synthetic construct
  source 1..20: mol_type = other RNA
tatgaatgcacgtgaagcta

SEQ ID NO: 49066 - RNA, 20 nt, synthetic construct
  source 1..20: mol_type = other RNA
tatgaatttgcctattctgg

SEQ ID NO: 49067 - RNA, 20 nt, synthetic construct
  source 1..20: mol_type = other RNA
tatgacaagactacctaaaa

SEQ ID NO: 49068 - RNA, 20 nt, synthetic construct
  source 1..20: mol_type = other RNA
tatgacctcctcccacttac

SEQ ID NO: 49069 - RNA, 20 nt, synthetic construct
  source 1..20: mol_type = other RNA
tatgactaatttgaggcatt

SEQ ID NO: 49070 - RNA, 20 nt, synthetic construct
  source 1..20: mol_type = other RNA
tatgactgagatacttaagt

SEQ ID NO: 49071 - RNA, 20 nt, synthetic construct
  source 1..20: mol_type = other RNA
tatgactggtgtccttctga

SEQ ID NO: 49072 - RNA, 20 nt, synthetic construct
  source 1..20: mol_type = other RNA
tatgagaaatgtctggtttg

SEQ ID NO: 49073 - RNA, 20 nt, synthetic construct
  source 1..20: mol_type = other RNA
tatgagaagactggaaaagt

SEQ ID NO: 49074 - RNA, 20 nt, synthetic construct
  source 1..20: mol_type = other RNA
tatgagaaggattagtgtta

SEQ ID NO: 49075 - RNA, 20 nt, synthetic construct
  source 1..20: mol_type = other RNA
tatgagaattcattgttgtg

SEQ ID NO: 49076 - RNA, 20 nt, synthetic construct
  source 1..20: mol_type = other RNA
tatgagacacacgagtattc

SEQ ID NO: 49077 - RNA, 20 nt, synthetic construct
  source 1..20: mol_type = other RNA
tatgagcagttgtatgccaa

SEQ ID NO: 49078 - RNA, 20 nt, synthetic construct
  source 1..20: mol_type = other RNA
tatgagcattccccacatag

SEQ ID NO: 49079 - RNA, 20 nt, synthetic construct
  source 1..20: mol_type = other RNA
tatgagccactagtcagtat

SEQ ID NO: 49080 - RNA, 20 nt, synthetic construct
  source 1..20: mol_type = other RNA
tatgagggatgaggaagagg

SEQ ID NO: 49081 - RNA, 20 nt, synthetic construct
  source 1..20: mol_type = other RNA
tatgaggttattcaaaacaa

SEQ ID NO: 49082 - RNA, 20 nt, synthetic construct
  source 1..20: mol_type = other RNA
tatgagtcttccgtctcaag

SEQ ID NO: 49083 - RNA, 20 nt, synthetic construct
  source 1..20: mol_type = other RNA
tatgagtgtttcccttaaaa

SEQ ID NO: 49084 - RNA, 20 nt, synthetic construct
  source 1..20: mol_type = other RNA
tatgagttcctgcttccccc

SEQ ID NO: 49085 - RNA, 20 nt, synthetic construct
  source 1..20: mol_type = other RNA
tatgataaaaataacgggcc

SEQ ID NO: 49086 - RNA, 20 nt, synthetic construct
  source 1..20: mol_type = other RNA
tatgataccctcaaaagatg

SEQ ID NO: 49087 - RNA, 20 nt, synthetic construct
  source 1..20: mol_type = other RNA
tatgatactcgtagtttttt

SEQ ID NO: 49088 - RNA, 20 nt, synthetic construct
  source 1..20: mol_type = other RNA
tatgatcaaagtgaaaggca

SEQ ID NO: 49089 - RNA, 20 nt, synthetic construct
  source 1..20: mol_type = other RNA
tatgatccagcagtttcact

SEQ ID NO: 49090 - RNA, 20 nt, synthetic construct
  source 1..20: mol_type = other RNA
tatgatctatcaatctcaca

SEQ ID NO: 49091 - RNA, 20 nt, synthetic construct
  source 1..20: mol_type = other RNA
tatgatcttgggaatacttt

SEQ ID NO: 49092 - RNA, 20 nt, synthetic construct
  source 1..20: mol_type = other RNA
tatgatgatttttgccagtg

SEQ ID NO: 49093 - RNA, 20 nt, synthetic construct
  source 1..20: mol_type = other RNA
tatgatgccactcaaaactg

SEQ ID NO: 49094 - RNA, 20 nt, synthetic construct
  source 1..20: mol_type = other RNA
tatgatttcacttacttgag

SEQ ID NO: 49095 - RNA, 20 nt, synthetic construct
  source 1..20: mol_type = other RNA
tatgatttctaggccctaac

SEQ ID NO: 49096 - RNA, 20 nt, synthetic construct
  source 1..20: mol_type = other RNA
tatgattttctaggaaactt

SEQ ID NO: 49097 - RNA, 20 nt, synthetic construct
  source 1..20: mol_type = other RNA
tatgcaacttactctcaaat

SEQ ID NO: 49098 - RNA, 20 nt, synthetic construct
  source 1..20: mol_type = other RNA
tatgcaagatggcaagtttc

SEQ ID NO: 49099 - RNA, 20 nt, synthetic construct
  source 1..20: mol_type = other RNA
tatgcaagatgtcaacatta

SEQ ID NO: 49100 - RNA, 20 nt, synthetic construct
  source 1..20: mol_type = other RNA
tatgcaataactcaaaatgt

SEQ ID NO: 49101 - RNA, 20 nt, synthetic construct
  source 1..20: mol_type = other RNA
tatgcacaaataattaacac

SEQ ID NO: 49102 - RNA, 20 nt, synthetic construct
  source 1..20: mol_type = other RNA
tatgcacaatggaatattac

SEQ ID NO: 49103 - RNA, 20 nt, synthetic construct
  source 1..20: mol_type = other RNA
tatgcactgtactcctagat

SEQ ID NO: 49104 - RNA, 20 nt, synthetic construct
  source 1..20: mol_type = other RNA
tatgcagaaaccagttgtaa

SEQ ID NO: 49105 - RNA, 20 nt, synthetic construct
  source 1..20: mol_type = other RNA
tatgcagaaatctaccaaac

SEQ ID NO: 49106 - RNA, 20 nt, synthetic construct
  source 1..20: mol_type = other RNA
tatgcagcaacggaaatgag

SEQ ID NO: 49107 - RNA, 20 nt, synthetic construct
  source 1..20: mol_type = other RNA
tatgcaggaccaactttaag

SEQ ID NO: 49108 - RNA, 20 nt, synthetic construct
  source 1..20: mol_type = other RNA
tatgcagggaaatcattcag

SEQ ID NO: 49109 - RNA, 20 nt, synthetic construct
  source 1..20: mol_type = other RNA
tatgcagtatgtgccatttt

SEQ ID NO: 49110 - RNA, 20 nt, synthetic construct
  source 1..20: mol_type = other RNA
tatgcatactgcagcacttt

SEQ ID NO: 49111 - RNA, 20 nt, synthetic construct
  source 1..20: mol_type = other RNA
tatgcatactttggaaggta

SEQ ID NO: 49112 - RNA, 20 nt, synthetic construct
  source 1..20: mol_type = other RNA
tatgcatagatcacaaggac

SEQ ID NO: 49113 - RNA, 20 nt, synthetic construct
  source 1..20: mol_type = other RNA
tatgcatagcagggtcatgc

SEQ ID NO: 49114 - RNA, 20 nt, synthetic construct
  source 1..20: mol_type = other RNA
tatgcatcttgaactaagtg

SEQ ID NO: 49115 - RNA, 20 nt, synthetic construct
  source 1..20: mol_type = other RNA
tatgcatcttgcaaaacgga

SEQ ID NO: 49116 - RNA, 20 nt, synthetic construct
  source 1..20: mol_type = other RNA
tatgcatgttatttggggat

SEQ ID NO: 49117 - RNA, 20 nt, synthetic construct
  source 1..20: mol_type = other RNA
tatgcattaagccagtcact

SEQ ID NO: 49118 - RNA, 20 nt, synthetic construct
  source 1..20: mol_type = other RNA
tatgcattcccatgttcact

SEQ ID NO: 49119 - RNA, 20 nt, synthetic construct
  source 1..20: mol_type = other RNA
tatgcatttggtctcattca

SEQ ID NO: 49120 - RNA, 20 nt, synthetic construct
  source 1..20: mol_type = other RNA
tatgccaatatcacactgtt

SEQ ID NO: 49121 - RNA, 20 nt, synthetic construct
  source 1..20: mol_type = other RNA
tatgccacattttttggttt

SEQ ID NO: 49122 - RNA, 20 nt, synthetic construct
  source 1..20: mol_type = other RNA
tatgccccctcttctctcct

SEQ ID NO: 49123 - RNA, 20 nt, synthetic construct
  source 1..20: mol_type = other RNA
tatgccgctggtgaaaaaat

SEQ ID NO: 49124 - RNA, 20 nt, synthetic construct
  source 1..20: mol_type = other RNA
tatgccggctgttaggtatt

SEQ ID NO: 49125 - RNA, 20 nt, synthetic construct
  source 1..20: mol_type = other RNA
tatgcctagatgattcgcat

SEQ ID NO: 49126 - RNA, 20 nt, synthetic construct
  source 1..20: mol_type = other RNA
tatgcctagatttcaatctg

SEQ ID NO: 49127 - RNA, 20 nt, synthetic construct
  source 1..20: mol_type = other RNA
tatgcctcatgcatccacat

SEQ ID NO: 49128 - RNA, 20 nt, synthetic construct
  source 1..20: mol_type = other RNA
tatgccttcagtatgaatgc

SEQ ID NO: 49129 - RNA, 20 nt, synthetic construct
  source 1..20: mol_type = other RNA
tatgcggggtttcagcacaa

SEQ ID NO: 49130 - RNA, 20 nt, synthetic construct
  source 1..20: mol_type = other RNA
tatgctaacatgaactactc

SEQ ID NO: 49131 - RNA, 20 nt, synthetic construct
  source 1..20: mol_type = other RNA
tatgctattataaatggcat

SEQ ID NO: 49132 - RNA, 20 nt, synthetic construct
  source 1..20: mol_type = other RNA
tatgctccctaaatacacat

SEQ ID NO: 49133 - RNA, 20 nt, synthetic construct
  source 1..20: mol_type = other RNA
tatgctcctgcctcagcctc

SEQ ID NO: 49134 - RNA, 20 nt, synthetic construct
  source 1..20: mol_type = other RNA
tatgctcttggtttcttcaa

SEQ ID NO: 49135 - RNA, 20 nt, synthetic construct
  source 1..20: mol_type = other RNA
tatgctgaaaggcatgaaat

SEQ ID NO: 49136 - RNA, 20 nt, synthetic construct
  source 1..20: mol_type = other RNA
tatgctgagtgaatggggta

SEQ ID NO: 49137 - RNA, 20 nt, synthetic construct
  source 1..20: mol_type = other RNA
tatgctgatgaactacacag

SEQ ID NO: 49138 - RNA, 20 nt, synthetic construct
  source 1..20: mol_type = other RNA
tatgctggtgggctttgaga

SEQ ID NO: 49139 - RNA, 20 nt, synthetic construct
  source 1..20: mol_type = other RNA
tatgctgtagtgattcactt

SEQ ID NO: 49140 - RNA, 20 nt, synthetic construct
  source 1..20: mol_type = other RNA
tatgctgtttacattagaga

SEQ ID NO: 49141 - RNA, 20 nt, synthetic construct
  source 1..20: mol_type = other RNA
tatgctgtttttgaaaagaa

SEQ ID NO: 49142 - RNA, 20 nt, synthetic construct
  source 1..20: mol_type = other RNA
tatgctttgagctacaaact

SEQ ID NO: 49143 - RNA, 20 nt, synthetic construct
  source 1..20: mol_type = other RNA
tatgctttgtctctggaagg

SEQ ID NO: 49144 - RNA, 20 nt, synthetic construct
  source 1..20: mol_type = other RNA
tatggaaacatggtaatttg

SEQ ID NO: 49145 - RNA, 20 nt, synthetic construct
  source 1..20: mol_type = other RNA
tatggaagatgggacttcac

SEQ ID NO: 49146 - RNA, 20 nt, synthetic construct
  source 1..20: mol_type = other RNA
tatggaataatggaactaag

SEQ ID NO: 49147 - RNA, 20 nt, synthetic construct
  source 1..20: mol_type = other RNA
tatggaattgccatatgtag

SEQ ID NO: 49148 - RNA, 20 nt, synthetic construct
  source 1..20: mol_type = other RNA
tatggacatgaggaaagcag

SEQ ID NO: 49149 - RNA, 20 nt, synthetic construct
  source 1..20: mol_type = other RNA
tatggagacactagggactg

SEQ ID NO: 49150 - RNA, 20 nt, synthetic construct
  source 1..20: mol_type = other RNA
tatggagactagtacactgt

SEQ ID NO: 49151 - RNA, 20 nt, synthetic construct
  source 1..20: mol_type = other RNA
tatggagataaattacccaa

SEQ ID NO: 49152 - RNA, 20 nt, synthetic construct
  source 1..20: mol_type = other RNA
tatggagcactgtgagccac

SEQ ID NO: 49153 - RNA, 20 nt, synthetic construct
  source 1..20: mol_type = other RNA
tatggaggcaatgttgattt

SEQ ID NO: 49154 - RNA, 20 nt, synthetic construct
  source 1..20: mol_type = other RNA
tatggatatctggcctgcac

SEQ ID NO: 49155 - RNA, 20 nt, synthetic construct
  source 1..20: mol_type = other RNA
tatggcaattccataaatgt

SEQ ID NO: 49156 - RNA, 20 nt, synthetic construct
  source 1..20: mol_type = other RNA
tatggcaggcaccttcagaa

SEQ ID NO: 49157 - RNA, 20 nt, synthetic construct
  source 1..20: mol_type = other RNA
tatggcatttgagggttaga

SEQ ID NO: 49158 - RNA, 20 nt, synthetic construct
  source 1..20: mol_type = other RNA
tatggcctaagatggaaagt

SEQ ID NO: 49159 - RNA, 20 nt, synthetic construct
  source 1..20: mol_type = other RNA
tatggcgactcatgcctgta

SEQ ID NO: 49160 - RNA, 20 nt, synthetic construct
  source 1..20: mol_type = other RNA
tatggctagaaacttggatt

SEQ ID NO: 49161 - RNA, 20 nt, synthetic construct
  source 1..20: mol_type = other RNA
tatggctataaccacgagta

SEQ ID NO: 49162 - RNA, 20 nt, synthetic construct
  source 1..20: mol_type = other RNA
tatggcttttgagtgtaagg

SEQ ID NO: 49163 - RNA, 20 nt, synthetic construct
  source 1..20: mol_type = other RNA
tatgggagatgtgtaattgt

SEQ ID NO: 49164 - RNA, 20 nt, synthetic construct
  source 1..20: mol_type = other RNA
tatgggagtccctgctttca

SEQ ID NO: 49165 - RNA, 20 nt, synthetic construct
  source 1..20: mol_type = other RNA
tatgggatatctaacataat

SEQ ID NO: 49166 - RNA, 20 nt, synthetic construct
  source 1..20: mol_type = other RNA
tatgggatgcttaaagcgct

SEQ ID NO: 49167 - RNA, 20 nt, synthetic construct
  source 1..20: mol_type = other RNA
tatgggccaaagacagatct

SEQ ID NO: 49168 - RNA, 20 nt, synthetic construct
  source 1..20: mol_type = other RNA
tatgggtcaaccactaaggt

SEQ ID NO: 49169 - RNA, 20 nt, synthetic construct
  source 1..20: mol_type = other RNA
tatgggtctccattttggtc

SEQ ID NO: 49170 - RNA, 20 nt, synthetic construct
  source 1..20: mol_type = other RNA
tatgggttattcacccaaga

SEQ ID NO: 49171 - RNA, 20 nt, synthetic construct
  source 1..20: mol_type = other RNA
tatggtaaaatgtacataac

SEQ ID NO: 49172 - RNA, 20 nt, synthetic construct
  source 1..20: mol_type = other RNA
tatggtaactcctgttcttt

SEQ ID NO: 49173 - RNA, 20 nt, synthetic construct
  source 1..20: mol_type = other RNA
tatggtaattggttcgtttg

SEQ ID NO: 49174 - RNA, 20 nt, synthetic construct
  source 1..20: mol_type = other RNA
tatggtaggtgctttttgta

SEQ ID NO: 49175 - RNA, 20 nt, synthetic construct
  source 1..20: mol_type = other RNA
tatggtatcactttttgtat

SEQ ID NO: 49176 - RNA, 20 nt, synthetic construct
  source 1..20: mol_type = other RNA
tatggtcactgctgatgtaa

SEQ ID NO: 49177 - RNA, 20 nt, synthetic construct
  source 1..20: mol_type = other RNA
tatggtctaccatgttgttc

SEQ ID NO: 49178 - RNA, 20 nt, synthetic construct
  source 1..20: mol_type = other RNA
tatggtctttttccaggacc

SEQ ID NO: 49179 - RNA, 20 nt, synthetic construct
  source 1..20: mol_type = other RNA
tatggtgttatttgttctgt

SEQ ID NO: 49180 - RNA, 20 nt, synthetic construct
  source 1..20: mol_type = other RNA
tatggttaatagtgaccctt

SEQ ID NO: 49181 - RNA, 20 nt, synthetic construct
  source 1..20: mol_type = other RNA
tatggttcctagaaaattta

SEQ ID NO: 49182 - RNA, 20 nt, synthetic construct
  source 1..20: mol_type = other RNA
tatggttcttaagatgatat

SEQ ID NO: 49183 - RNA, 20 nt, synthetic construct
  source 1..20: mol_type = other RNA
tatggttgaagaaagtagga

SEQ ID NO: 49184 - RNA, 20 nt, synthetic construct
  source 1..20: mol_type = other RNA
tatggttgttggctaaaaga

SEQ ID NO: 49185 - RNA, 20 nt, synthetic construct
  source 1..20: mol_type = other RNA
tatggtttaaggtaagggtc

SEQ ID NO: 49186 - RNA, 20 nt, synthetic construct
  source 1..20: mol_type = other RNA
tatggtttacaatggttcat

SEQ ID NO: 49187 - RNA, 20 nt, synthetic construct
  source 1..20: mol_type = other RNA
tatggttttttcccccctgg

SEQ ID NO: 49188 - RNA, 20 nt, synthetic construct
  source 1..20: mol_type = other RNA
tatgtaagacaatgtctttg

SEQ ID NO: 49189 - RNA, 20 nt, synthetic construct
  source 1..20: mol_type = other RNA
tatgtaatctcatggaagtt

SEQ ID NO: 49190 - RNA, 20 nt, synthetic construct
  source 1..20: mol_type = other RNA
tatgtaatgacctggaaatt

SEQ ID NO: 49191 - RNA, 20 nt, synthetic construct
  source 1..20: mol_type = other RNA
tatgtaattacaggggactt

SEQ ID NO: 49192 - RNA, 20 nt, synthetic construct
  source 1..20: mol_type = other RNA
tatgtacacgtcttgtcaat

SEQ ID NO: 49193 - RNA, 20 nt, synthetic construct
  source 1..20: mol_type = other RNA
tatgtacatgacctatctat

SEQ ID NO: 49194 - RNA, 20 nt, synthetic construct
  source 1..20: mol_type = other RNA
tatgtacccaatggattata

SEQ ID NO: 49195 - RNA, 20 nt, synthetic construct
  source 1..20: mol_type = other RNA
tatgtactacctatagaatt

SEQ ID NO: 49196 - RNA, 20 nt, synthetic construct
  source 1..20: mol_type = other RNA
tatgtagctgggatggctga

SEQ ID NO: 49197 - RNA, 20 nt, synthetic construct
  source 1..20: mol_type = other RNA
tatgtaggaaactttgcatt

SEQ ID NO: 49198 - RNA, 20 nt, synthetic construct
  source 1..20: mol_type = other RNA
tatgtaggcacattcaagca

SEQ ID NO: 49199 - RNA, 20 nt, synthetic construct
  source 1..20: mol_type = other RNA
tatgtagggcaccgtgacag

SEQ ID NO: 49200 - RNA, 20 nt, synthetic construct
  source 1..20: mol_type = other RNA
tatgtcactgtaagaataat

SEQ ID NO: 49201 - RNA, 20 nt, synthetic construct
  source 1..20: mol_type = other RNA
tatgtcagactcattgccta

SEQ ID NO: 49202 - RNA, 20 nt, synthetic construct
  source 1..20: mol_type = other RNA
tatgtcagatggtaaattgg

SEQ ID NO: 49203 - RNA, 20 nt, synthetic construct
  source 1..20: mol_type = other RNA
tatgtcagtcaacacactag

SEQ ID NO: 49204 - RNA, 20 nt, synthetic construct
  source 1..20: mol_type = other RNA
tatgtccagcccccagtttt

SEQ ID NO: 49205 - RNA, 20 nt, synthetic construct
  source 1..20: mol_type = other RNA
tatgtcccctggggcctcag

SEQ ID NO: 49206 - RNA, 20 nt, synthetic construct
  source 1..20: mol_type = other RNA
tatgtccttttgagtttggt

SEQ ID NO: 49207 - RNA, 20 nt, synthetic construct
  source 1..20: mol_type = other RNA
tatgtcgcatgaaaacagct

SEQ ID NO: 49208 - RNA, 20 nt, synthetic construct
  source 1..20: mol_type = other RNA
tatgtcttgtggctgacatg

SEQ ID NO: 49209 - RNA, 20 nt, synthetic construct
  source 1..20: mol_type = other RNA
tatgtgaaaagaaaaaggtt

SEQ ID NO: 49210 - RNA, 20 nt, synthetic construct
  source 1..20: mol_type = other RNA
tatgtgaaaatactaacgat

SEQ ID NO: 49211 - RNA, 20 nt, synthetic construct
  source 1..20: mol_type = other RNA
tatgtgaaagtagaggactg

SEQ ID NO: 49212 - RNA, 20 nt, synthetic construct
  source 1..20: mol_type = other RNA
tatgtgacaaacacttttca

SEQ ID NO: 49213 - RNA, 20 nt, synthetic construct
  source 1..20: mol_type = other RNA
tatgtgacagaatgcatctt

SEQ ID NO: 49214 - RNA, 20 nt, synthetic construct
  source 1..20: mol_type = other RNA
tatgtgcaagttctcttttt

SEQ ID NO: 49215 - RNA, 20 nt, synthetic construct
  source 1..20: mol_type = other RNA
tatgtgcagtctaaccatta

SEQ ID NO: 49216 - RNA, 20 nt, synthetic construct
  source 1..20: mol_type = other RNA
tatgtgccatctccttaatc

SEQ ID NO: 49217 - RNA, 20 nt, synthetic construct
  source 1..20: mol_type = other RNA
tatgtgctttctcaacactg

SEQ ID NO: 49218 - RNA, 20 nt, synthetic construct
  source 1..20: mol_type = other RNA
tatgtggaaaaatataggaa

SEQ ID NO: 49219 - RNA, 20 nt, synthetic construct
  source 1..20: mol_type = other RNA
tatgtggaaaatgtatgatt

SEQ ID NO: 49220 - RNA, 20 nt, synthetic construct
  source 1..20: mol_type = other RNA
tatgtggggaatgctcataa

SEQ ID NO: 49221 - RNA, 20 nt, synthetic construct
  source 1..20: mol_type = other RNA
tatgtgtacaatggggcttt

SEQ ID NO: 49222 - RNA, 20 nt, synthetic construct
  source 1..20: mol_type = other RNA
tatgtgtaggaaggaacaca

SEQ ID NO: 49223 - RNA, 20 nt, synthetic construct
  source 1..20: mol_type = other RNA
tatgtgtagtcagtgaagat

SEQ ID NO: 49224 - RNA, 20 nt, synthetic construct
  source 1..20: mol_type = other RNA
tatgtgtctctgacatgaga

SEQ ID NO: 49225 - RNA, 20 nt, synthetic construct
  source 1..20: mol_type = other RNA
tatgtgtgtataacccgttt

SEQ ID NO: 49226 - RNA, 20 nt, synthetic construct
  source 1..20: mol_type = other RNA
tatgtgttaaaccattcttg

SEQ ID NO: 49227 - RNA, 20 nt, synthetic construct
  source 1..20: mol_type = other RNA
tatgtgttacaactctaata

SEQ ID NO: 49228 - RNA, 20 nt, synthetic construct
  source 1..20: mol_type = other RNA
tatgtgttgataaatatgtg

SEQ ID NO: 49229 - RNA, 20 nt, synthetic construct
  source 1..20: mol_type = other RNA
tatgttaagtgtttgaaaag

SEQ ID NO: 49230 - RNA, 20 nt, synthetic construct
  source 1..20: mol_type = other RNA
tatgttaataaccctgtttt

SEQ ID NO: 49231 - RNA, 20 nt, synthetic construct
  source 1..20: mol_type = other RNA
tatgttacacttccagtaca

SEQ ID NO: 49232 - RNA, 20 nt, synthetic construct
  source 1..20: mol_type = other RNA
tatgttagatatcccatata

SEQ ID NO: 49233 - RNA, 20 nt, synthetic construct
  source 1..20: mol_type = other RNA
tatgttataatgagatagac

SEQ ID NO: 49234 - RNA, 20 nt, synthetic construct
  source 1..20: mol_type = other RNA
tatgttcatgaaccttcacc

SEQ ID NO: 49235 - RNA, 20 nt, synthetic construct
  source 1..20: mol_type = other RNA
tatgttccacatgttactca

SEQ ID NO: 49236 - RNA, 20 nt, synthetic construct
  source 1..20: mol_type = other RNA
tatgttcctatatttttcca

SEQ ID NO: 49237 - RNA, 20 nt, synthetic construct
  source 1..20: mol_type = other RNA
tatgttctaaagttagaagt

SEQ ID NO: 49238 - RNA, 20 nt, synthetic construct
  source 1..20: mol_type = other RNA
tatgttgatgtaatggatca

SEQ ID NO: 49239 - RNA, 20 nt, synthetic construct
  source 1..20: mol_type = other RNA
tatgttgcacaaaagtgaaa

SEQ ID NO: 49240 - RNA, 20 nt, synthetic construct
  source 1..20: mol_type = other RNA
tatgttgtgttttcattcgt

SEQ ID NO: 49241 - RNA, 20 nt, synthetic construct
  source 1..20: mol_type = other RNA
tatgtttctcattcttctct

SEQ ID NO: 49242 - RNA, 20 nt, synthetic construct
  source 1..20: mol_type = other RNA
tatgtttgattagttgactc

SEQ ID NO: 49243 - RNA, 20 nt, synthetic construct
  source 1..20: mol_type = other RNA
tatgtttgtaacttgttcat

SEQ ID NO: 49244 - RNA, 20 nt, synthetic construct
  source 1..20: mol_type = other RNA
tatgttttgcttcgaagctt

SEQ ID NO: 49245 - RNA, 20 nt, synthetic construct
  source 1..20: mol_type = other RNA
tattaaaacccatgatcttt

SEQ ID NO: 49246 - RNA, 20 nt, synthetic construct
  source 1..20: mol_type = other RNA
tattaaaagcacaagcacag

SEQ ID NO: 49247 - RNA, 20 nt, synthetic construct
  source 1..20: mol_type = other RNA
tattaaaatgaacctgcttt

SEQ ID NO: 49248 - RNA, 20 nt, synthetic construct
  source 1..20: mol_type = other RNA
tattaaacctgttacatggt

SEQ ID NO: 49249 - RNA, 20 nt, synthetic construct
  source 1..20: mol_type = other RNA
tattaaagtagaaggcccta

SEQ ID NO: 49250 - RNA, 20 nt, synthetic construct
  source 1..20: mol_type = other RNA
tattaaatcatgatgtttgg

SEQ ID NO: 49251 - RNA, 20 nt, synthetic construct
  source 1..20: mol_type = other RNA
tattaaatgagacacctaca

SEQ ID NO: 49252 - RNA, 20 nt, synthetic construct
  source 1..20: mol_type = other RNA
tattaaattttctaggaacc

SEQ ID NO: 49253 - RNA, 20 nt, synthetic construct
  source 1..20: mol_type = other RNA
tattaacagaagggtatata

SEQ ID NO: 49254 - RNA, 20 nt, synthetic construct
  source 1..20: mol_type = other RNA
tattaacataccgacggctc

SEQ ID NO: 49255 - RNA, 20 nt, synthetic construct
  source 1..20: mol_type = other RNA
tattaaccaagaacaacctt

SEQ ID NO: 49256 - RNA, 20 nt, synthetic construct
  source 1..20: mol_type = other RNA
tattaaccactgaaactttt

SEQ ID NO: 49257 - RNA, 20 nt, synthetic construct
  source 1..20: mol_type = other RNA
tattaaccatatggtttaca

SEQ ID NO: 49258 - RNA, 20 nt, synthetic construct
  source 1..20: mol_type = other RNA
tattaactcatttaaacgtc

SEQ ID NO: 49259 - RNA, 20 nt, synthetic construct
  source 1..20: mol_type = other RNA
tattaagagtctcatctgtc

SEQ ID NO: 49260 - RNA, 20 nt, synthetic construct
  source 1..20: mol_type = other RNA
tattaagagtgtgctgacta

SEQ ID NO: 49261 - RNA, 20 nt, synthetic construct
  source 1..20: mol_type = other RNA
tattaagataatgctgttct

SEQ ID NO: 49262 - RNA, 20 nt, synthetic construct
  source 1..20: mol_type = other RNA
tattaagcaaaatggaagtg

SEQ ID NO: 49263 - RNA, 20 nt, synthetic construct
  source 1..20: mol_type = other RNA
tattaatgtgttgtctgatt

SEQ ID NO: 49264 - RNA, 20 nt, synthetic construct
  source 1..20: mol_type = other RNA
tattaattctgaggcctcct

SEQ ID NO: 49265 - RNA, 20 nt, synthetic construct
  source 1..20: mol_type = other RNA
tattaatttggcttggggaa

SEQ ID NO: 49266 - RNA, 20 nt, synthetic construct
  source 1..20: mol_type = other RNA
tattacacagaaagcctctt

SEQ ID NO: 49267 - RNA, 20 nt, synthetic construct
  source 1..20: mol_type = other RNA
tattacagtaaggtttccct

SEQ ID NO: 49268 - RNA, 20 nt, synthetic construct
  source 1..20: mol_type = other RNA
tattaccagcttacagcaga

SEQ ID NO: 49269 - RNA, 20 nt, synthetic construct
  source 1..20: mol_type = other RNA
tattacctatgaataggtgt

SEQ ID NO: 49270 - RNA, 20 nt, synthetic construct
  source 1..20: mol_type = other RNA
tattacctcccatgcattcg

SEQ ID NO: 49271 - RNA, 20 nt, synthetic construct
  source 1..20: mol_type = other RNA
tattactcagtctcgaaaag

SEQ ID NO: 49272 - RNA, 20 nt, synthetic construct
  source 1..20: mol_type = other RNA
tattagaactagaactgtgt

SEQ ID NO: 49273 - RNA, 20 nt, synthetic construct
  source 1..20: mol_type = other RNA
tattagagtgaaaagaaaca

SEQ ID NO: 49274 - RNA, 20 nt, synthetic construct
  source 1..20: mol_type = other RNA
tattagagttgtaacacata

SEQ ID NO: 49275 - RNA, 20 nt, synthetic construct
  source 1..20: mol_type = other RNA
tattagatagtggtttgaag

SEQ ID NO: 49276 - RNA, 20 nt, synthetic construct
  source 1..20: mol_type = other RNA
tattagcaaacatttatgga

SEQ ID NO: 49277 - RNA, 20 nt, synthetic construct
  source 1..20: mol_type = other RNA
tattagcaaagaggcaaaac

SEQ ID NO: 49278 - RNA, 20 nt, synthetic construct
  source 1..20: mol_type = other RNA
tattagctacaaaagggaaa

SEQ ID NO: 49279 - RNA, 20 nt, synthetic construct
  source 1..20: mol_type = other RNA
tattagctgtctggattgat

SEQ ID NO: 49280 - RNA, 20 nt, synthetic construct
  source 1..20: mol_type = other RNA
tattagcttgctagtagcag

SEQ ID NO: 49281 - RNA, 20 nt, synthetic construct
  source 1..20: mol_type = other RNA
tattaggatgtgtacccgtg

SEQ ID NO: 49282 - RNA, 20 nt, synthetic construct
  source 1..20: mol_type = other RNA
tattagggtaatgctggctt

SEQ ID NO: 49283 - RNA, 20 nt, synthetic construct
  source 1..20: mol_type = other RNA
tattaggtgcacacaacact

SEQ ID NO: 49284 - RNA, 20 nt, synthetic construct
  source 1..20: mol_type = other RNA
tattagtagttaggtggttt

SEQ ID NO: 49285 - RNA, 20 nt, synthetic construct
  source 1..20: mol_type = other RNA
tattagtctgtagcttcacg

SEQ ID NO: 49286 - RNA, 20 nt, synthetic construct
  source 1..20: mol_type = other RNA
tattagttaaccttctgggg

SEQ ID NO: 49287 - RNA, 20 nt, synthetic construct
  source 1..20: mol_type = other RNA
tattagttgtacttgacaca

SEQ ID NO: 49288 - RNA, 20 nt, synthetic construct
  source 1..20: mol_type = other RNA
tattataagttgggagtcta

SEQ ID NO: 49289 - RNA, 20 nt, synthetic construct
  source 1..20: mol_type = other RNA
tattatatgcctagatttca

SEQ ID NO: 49290 - RNA, 20 nt, synthetic construct
  source 1..20: mol_type = other RNA
tattatcctccaatgttttt

SEQ ID NO: 49291 - RNA, 20 nt, synthetic construct
  source 1..20: mol_type = other RNA
tattatgaaccattgtaaac

SEQ ID NO: 49292 - RNA, 20 nt, synthetic construct
  source 1..20: mol_type = other RNA
tattatgagcagttgtatgc

SEQ ID NO: 49293 - RNA, 20 nt, synthetic construct
  source 1..20: mol_type = other RNA
tattatggtctttttccagg

SEQ ID NO: 49294 - RNA, 20 nt, synthetic construct
  source 1..20: mol_type = other RNA
tattatgtgcaagttctctt

SEQ ID NO: 49295 - RNA, 20 nt, synthetic construct
  source 1..20: mol_type = other RNA
tattattctaaacacacggg

SEQ ID NO: 49296 - RNA, 20 nt, synthetic construct
  source 1..20: mol_type = other RNA
tattatttctgtcatctgaa

SEQ ID NO: 49297 - RNA, 20 nt, synthetic construct
  source 1..20: mol_type = other RNA
tattattttcacagacagta

SEQ ID NO: 49298 - RNA, 20 nt, synthetic construct
  source 1..20: mol_type = other RNA
tattattttttcccgctaca

SEQ ID NO: 49299 - RNA, 20 nt, synthetic construct
  source 1..20: mol_type = other RNA
tattcaaaacaaaacacatg

SEQ ID NO: 49300 - RNA, 20 nt, synthetic construct
  source 1..20: mol_type = other RNA
tattcaaagatcatttcact

SEQ ID NO: 49301 - RNA, 20 nt, synthetic construct
  source 1..20: mol_type = other RNA
tattcaaataattgctgcag

SEQ ID NO: 49302 - RNA, 20 nt, synthetic construct
  source 1..20: mol_type = other RNA
tattcaacaggtataaagtt

SEQ ID NO: 49303 - RNA, 20 nt, synthetic construct
  source 1..20: mol_type = other RNA
tattcaacctataagaccca

SEQ ID NO: 49304 - RNA, 20 nt, synthetic construct
  source 1..20: mol_type = other RNA
tattcaagacaagcaaggaa

SEQ ID NO: 49305 - RNA, 20 nt, synthetic construct
  source 1..20: mol_type = other RNA
tattcaagtttcaccctgcg

SEQ ID NO: 49306 - RNA, 20 nt, synthetic construct
  source 1..20: mol_type = other RNA
tattcacactgctcctgcct

SEQ ID NO: 49307 - RNA, 20 nt, synthetic construct
  source 1..20: mol_type = other RNA
tattcacccaagaatttcat

SEQ ID NO: 49308 - RNA, 20 nt, synthetic construct
  source 1..20: mol_type = other RNA
tattcaggacagattaaaat

SEQ ID NO: 49309 - RNA, 20 nt, synthetic construct
  source 1..20: mol_type = other RNA
tattcagggggctaaatgct

SEQ ID NO: 49310 - RNA, 20 nt, synthetic construct
  source 1..20: mol_type = other RNA
tattcatacgttaactgtat

SEQ ID NO: 49311 - RNA, 20 nt, synthetic construct
  source 1..20: mol_type = other RNA
tattcataggtaatactcta

SEQ ID NO: 49312 - RNA, 20 nt, synthetic construct
  source 1..20: mol_type = other RNA
tattcatagtagctgttgaa

SEQ ID NO: 49313 - RNA, 20 nt, synthetic construct
  source 1..20: mol_type = other RNA
tattcatagtcatttgatct

SEQ ID NO: 49314 - RNA, 20 nt, synthetic construct
  source 1..20: mol_type = other RNA
tattcatataatggagtact

SEQ ID NO: 49315 - RNA, 20 nt, synthetic construct
  source 1..20: mol_type = other RNA
tattcatccagtttaaagct

SEQ ID NO: 49316 - RNA, 20 nt, synthetic construct
  source 1..20: mol_type = other RNA
tattcatgctgtgaatttgg

SEQ ID NO: 49317 - RNA, 20 nt, synthetic construct
  source 1..20: mol_type = other RNA
tattcatgtttgtggtttta

SEQ ID NO: 49318 - RNA, 20 nt, synthetic construct
  source 1..20: mol_type = other RNA
tattcattaccaggctggaa

SEQ ID NO: 49319 - RNA, 20 nt, synthetic construct
  source 1..20: mol_type = other RNA
tattcattctttttactcga

SEQ ID NO: 49320 - RNA, 20 nt, synthetic construct
  source 1..20: mol_type = other RNA
tattcatttccaaagatcat

SEQ ID NO: 49321 - RNA, 20 nt, synthetic construct
  source 1..20: mol_type = other RNA
tattccaaatgtctgtcttt

SEQ ID NO: 49322 - RNA, 20 nt, synthetic construct
  source 1..20: mol_type = other RNA
tattccagagaattcagagt

SEQ ID NO: 49323 - RNA, 20 nt, synthetic construct
  source 1..20: mol_type = other RNA
tattccaggatcaaatctgg

SEQ ID NO: 49324 - RNA, 20 nt, synthetic construct
  source 1..20: mol_type = other RNA
tattccataaaaaccaaaca

SEQ ID NO: 49325 - RNA, 20 nt, synthetic construct
  source 1..20: mol_type = other RNA
tattccataagatctgtctt

SEQ ID NO: 49326 - RNA, 20 nt, synthetic construct
  source 1..20: mol_type = other RNA
tattccatggtatgtgccat

SEQ ID NO: 49327 - RNA, 20 nt, synthetic construct
  source 1..20: mol_type = other RNA
tattccattgttctctttgt

SEQ ID NO: 49328 - RNA, 20 nt, synthetic construct
  source 1..20: mol_type = other RNA
tattccatttttctgaccaa

SEQ ID NO: 49329 - RNA, 20 nt, synthetic construct
  source 1..20: mol_type = other RNA
tattcccaagatcataagct

SEQ ID NO: 49330 - RNA, 20 nt, synthetic construct
  source 1..20: mol_type = other RNA
tattccccagggaaacctta

SEQ ID NO: 49331 - RNA, 20 nt, synthetic construct
  source 1..20: mol_type = other RNA
tattcccctggatcccccag

SEQ ID NO: 49332 - RNA, 20 nt, synthetic construct
  source 1..20: mol_type = other RNA
tattccctacattgccttca

SEQ ID NO: 49333 - RNA, 20 nt, synthetic construct
  source 1..20: mol_type = other RNA
tattcctatcagaagcacac

SEQ ID NO: 49334 - RNA, 20 nt, synthetic construct
  source 1..20: mol_type = other RNA
tattcctctcttggaatgtg

SEQ ID NO: 49335 - RNA, 20 nt, synthetic construct
  source 1..20: mol_type = other RNA
tattcgttccagcagggtaa

SEQ ID NO: 49336 - RNA, 20 nt, synthetic construct
  source 1..20: mol_type = other RNA
tattctaaacacacgggctg

SEQ ID NO: 49337 - RNA, 20 nt, synthetic construct
  source 1..20: mol_type = other RNA
tattctaaacctgaggtctt

SEQ ID NO: 49338 - RNA, 20 nt, synthetic construct
  source 1..20: mol_type = other RNA
tattctaagtttgccaaaga

SEQ ID NO: 49339 - RNA, 20 nt, synthetic construct
  source 1..20: mol_type = other RNA
tattctacagaaaacccttc

SEQ ID NO: 49340 - RNA, 20 nt, synthetic construct
  source 1..20: mol_type = other RNA
tattctagttctagctctgt

SEQ ID NO: 49341 - RNA, 20 nt, synthetic construct
  source 1..20: mol_type = other RNA
tattctatcatcaagacaga

SEQ ID NO: 49342 - RNA, 20 nt, synthetic construct
  source 1..20: mol_type = other RNA
tattctctttctgaaattct

SEQ ID NO: 49343 - RNA, 20 nt, synthetic construct
  source 1..20: mol_type = other RNA
tattctgaactttcaaccta

SEQ ID NO: 49344 - RNA, 20 nt, synthetic construct
  source 1..20: mol_type = other RNA
tattctgacctaaagtttta

SEQ ID NO: 49345 - RNA, 20 nt, synthetic construct
  source 1..20: mol_type = other RNA
tattctggatgttaattaga

SEQ ID NO: 49346 - RNA, 20 nt, synthetic construct
  source 1..20: mol_type = other RNA
tattctggggctcaagtaag

SEQ ID NO: 49347 - RNA, 20 nt, synthetic construct
  source 1..20: mol_type = other RNA
tattctgtgaattgtgacag

SEQ ID NO: 49348 - RNA, 20 nt, synthetic construct
  source 1..20: mol_type = other RNA
tattctgttctagctcctgg

SEQ ID NO: 49349 - RNA, 20 nt, synthetic construct
  source 1..20: mol_type = other RNA
tattcttacagtgacatatg

SEQ ID NO: 49350 - RNA, 20 nt, synthetic construct
  source 1..20: mol_type = other RNA
tattcttatccctacctaaa

SEQ ID NO: 49351 - RNA, 20 nt, synthetic construct
  source 1..20: mol_type = other RNA
tattcttcagcaaggaccat

SEQ ID NO: 49352 - RNA, 20 nt, synthetic construct
  source 1..20: mol_type = other RNA
tattcttgttttcttgagat

SEQ ID NO: 49353 - RNA, 20 nt, synthetic construct
  source 1..20: mol_type = other RNA
tattcttttagagtaactgt

SEQ ID NO: 49354 - RNA, 20 nt, synthetic construct
  source 1..20: mol_type = other RNA
tattctttttctagtttgag

SEQ ID NO: 49355 - RNA, 20 nt, synthetic construct
  source 1..20: mol_type = other RNA
tattgaaacgatgcattcca

SEQ ID NO: 49356 - RNA, 20 nt, synthetic construct
  source 1..20: mol_type = other RNA
tattgaaagcccttgagtat

SEQ ID NO: 49357 - RNA, 20 nt, synthetic construct
  source 1..20: mol_type = other RNA
tattgaactgttacttgact

SEQ ID NO: 49358 - RNA, 20 nt, synthetic construct
  source 1..20: mol_type = other RNA
tattgaagagggaacatttt

SEQ ID NO: 49359 - RNA, 20 nt, synthetic construct
  source 1..20: mol_type = other RNA
tattgaagccagcacctaac

SEQ ID NO: 49360 - RNA, 20 nt, synthetic construct
  source 1..20: mol_type = other RNA
tattgaataatttccaggtc

SEQ ID NO: 49361 - RNA, 20 nt, synthetic construct
  source 1..20: mol_type = other RNA
tattgacaagacgtgtacat

SEQ ID NO: 49362 - RNA, 20 nt, synthetic construct
  source 1..20: mol_type = other RNA
tattgagaagcagaaaatca

SEQ ID NO: 49363 - RNA, 20 nt, synthetic construct
  source 1..20: mol_type = other RNA
tattgagagtgaaaacacaa

SEQ ID NO: 49364 - RNA, 20 nt, synthetic construct
  source 1..20: mol_type = other RNA
tattgagcctgttccgattt

SEQ ID NO: 49365 - RNA, 20 nt, synthetic construct
  source 1..20: mol_type = other RNA
tattgagtctgtagggtgac

SEQ ID NO: 49366 - RNA, 20 nt, synthetic construct
  source 1..20: mol_type = other RNA
tattgagtgtagctgtggct

SEQ ID NO: 49367 - RNA, 20 nt, synthetic construct
  source 1..20: mol_type = other RNA
tattgataaatctaaagcca

SEQ ID NO: 49368 - RNA, 20 nt, synthetic construct
  source 1..20: mol_type = other RNA
tattgataagcacatggtga

SEQ ID NO: 49369 - RNA, 20 nt, synthetic construct
  source 1..20: mol_type = other RNA
tattgattcagatgacagaa

SEQ ID NO: 49370 - RNA, 20 nt, synthetic construct
  source 1..20: mol_type = other RNA
tattgattggcaaatcttta

SEQ ID NO: 49371 - RNA, 20 nt, synthetic construct
  source 1..20: mol_type = other RNA
tattgatttgaccatgggac

SEQ ID NO: 49372 - RNA, 20 nt, synthetic construct
  source 1..20: mol_type = other RNA
tattgcaaactaagtggtat

SEQ ID NO: 49373 - RNA, 20 nt, synthetic construct
  source 1..20: mol_type = other RNA
tattgcatagggatgttgcc

SEQ ID NO: 49374 - RNA, 20 nt, synthetic construct
  source 1..20: mol_type = other RNA
tattgccaggtttgtgcttg

SEQ ID NO: 49375 - RNA, 20 nt, synthetic construct
  source 1..20: mol_type = other RNA
tattggaaaactctgtttcc

SEQ ID NO: 49376 - RNA, 20 nt, synthetic construct
  source 1..20: mol_type = other RNA
tattggattaagggcccacc

SEQ ID NO: 49377 - RNA, 20 nt, synthetic construct
  source 1..20: mol_type = other RNA
tattggcaacattttaattc

SEQ ID NO: 49378 - RNA, 20 nt, synthetic construct
  source 1..20: mol_type = other RNA
tattggcataaagacagaca

SEQ ID NO: 49379 - RNA, 20 nt, synthetic construct
  source 1..20: mol_type = other RNA
tattggccaggctggttcca

SEQ ID NO: 49380 - RNA, 20 nt, synthetic construct
  source 1..20: mol_type = other RNA
tattggcttatagtgttctt

SEQ ID NO: 49381 - RNA, 20 nt, synthetic construct
  source 1..20: mol_type = other RNA
tattggttatctgtactttt

SEQ ID NO: 49382 - RNA, 20 nt, synthetic construct
  source 1..20: mol_type = other RNA
tattgtaacttgaattcaga

SEQ ID NO: 49383 - RNA, 20 nt, synthetic construct
  source 1..20: mol_type = other RNA
tattgtaccttgatttatgg

SEQ ID NO: 49384 - RNA, 20 nt, synthetic construct
  source 1..20: mol_type = other RNA
tattgtaggaaagcctgtga

SEQ ID NO: 49385 - RNA, 20 nt, synthetic construct
  source 1..20: mol_type = other RNA
tattgtaggtgtctcattta

SEQ ID NO: 49386 - RNA, 20 nt, synthetic construct
  source 1..20: mol_type = other RNA
tattgtatatacccttctgt

SEQ ID NO: 49387 - RNA, 20 nt, synthetic construct
  source 1..20: mol_type = other RNA
tattgtatgaacattttgag

SEQ ID NO: 49388 - RNA, 20 nt, synthetic construct
  source 1..20: mol_type = other RNA
tattgtcaaggtcatccttt

SEQ ID NO: 49389 - RNA, 20 nt, synthetic construct
  source 1..20: mol_type = other RNA
tattgtcaatggggaacttt

SEQ ID NO: 49390 - RNA, 20 nt, synthetic construct
  source 1..20: mol_type = other RNA
tattgtcagtaattctgcag

SEQ ID NO: 49391 - RNA, 20 nt, synthetic construct
  source 1..20: mol_type = other RNA
tattgtcattaccttataga

SEQ ID NO: 49392 - RNA, 20 nt, synthetic construct
  source 1..20: mol_type = other RNA
tattgtctgcaagcagatct

SEQ ID NO: 49393 - RNA, 20 nt, synthetic construct
  source 1..20: mol_type = other RNA
tattgtcttctaaccctcaa

SEQ ID NO: 49394 - RNA, 20 nt, synthetic construct
  source 1..20: mol_type = other RNA
tattgtcttttctatctgaa

SEQ ID NO: 49395 - RNA, 20 nt, synthetic construct
  source 1..20: mol_type = other RNA
tattgtgctgaaaccccgca

SEQ ID NO: 49396 - RNA, 20 nt, synthetic construct
  source 1..20: mol_type = other RNA
tattgttaactgtagagaaa

SEQ ID NO: 49397 - RNA, 20 nt, synthetic construct
  source 1..20: mol_type = other RNA
tattgttcagccttaaaaaa

SEQ ID NO: 49398 - RNA, 20 nt, synthetic construct
  source 1..20: mol_type = other RNA
tattgttgaattgttggagt

SEQ ID NO: 49399 - RNA, 20 nt, synthetic construct
  source 1..20: mol_type = other RNA
tattgtttcacttttctggt

SEQ ID NO: 49400 - RNA, 20 nt, synthetic construct
  source 1..20: mol_type = other RNA
tatttaacaccatggcaggt

SEQ ID NO: 49401 - RNA, 20 nt, synthetic construct
  source 1..20: mol_type = other RNA
tatttaatctctcttgacct

SEQ ID NO: 49402 - RNA, 20 nt, synthetic construct
  source 1..20: mol_type = other RNA
tatttaatctgtcagcagtt

SEQ ID NO: 49403 - RNA, 20 nt, synthetic construct
  source 1..20: mol_type = other RNA
tatttaatgagtagtacttc

SEQ ID NO: 49404 - RNA, 20 nt, synthetic construct
  source 1..20: mol_type = other RNA
tatttaatgtgctgtccatt

SEQ ID NO: 49405 - RNA, 20 nt, synthetic construct
  source 1..20: mol_type = other RNA
tatttactaagaagtgaaac

SEQ ID NO: 49406 - RNA, 20 nt, synthetic construct
  source 1..20: mol_type = other RNA
tatttactagatcaagccct

SEQ ID NO: 49407 - RNA, 20 nt, synthetic construct
  source 1..20: mol_type = other RNA
tatttactgcttgctgcact

SEQ ID NO: 49408 - RNA, 20 nt, synthetic construct
  source 1..20: mol_type = other RNA
tatttacttctacagaatgt

SEQ ID NO: 49409 - RNA, 20 nt, synthetic construct
  source 1..20: mol_type = other RNA
tatttagagggatgaatgtt

SEQ ID NO: 49410 - RNA, 20 nt, synthetic construct
  source 1..20: mol_type = other RNA
tatttagagtttgcattaca

SEQ ID NO: 49411 - RNA, 20 nt, synthetic construct
  source 1..20: mol_type = other RNA
tatttagcccatgtctaaag

SEQ ID NO: 49412 - RNA, 20 nt, synthetic construct
  source 1..20: mol_type = other RNA
tatttaggccctctataatt

SEQ ID NO: 49413 - RNA, 20 nt, synthetic construct
  source 1..20: mol_type = other RNA
tatttagggagcatatatac

SEQ ID NO: 49414 - RNA, 20 nt, synthetic construct
  source 1..20: mol_type = other RNA
tatttagtgaaatagttggt

SEQ ID NO: 49415 - RNA, 20 nt, synthetic construct
  source 1..20: mol_type = other RNA
tatttatacaggtgcttaca

SEQ ID NO: 49416 - RNA, 20 nt, synthetic construct
  source 1..20: mol_type = other RNA
tatttatcaacacatagtgt

SEQ ID NO: 49417 - RNA, 20 nt, synthetic construct
  source 1..20: mol_type = other RNA
tatttatcatgtcttcttgg

SEQ ID NO: 49418 - RNA, 20 nt, synthetic construct
  source 1..20: mol_type = other RNA
tatttatgctgatgaactac

SEQ ID NO: 49419 - RNA, 20 nt, synthetic construct
  source 1..20: mol_type = other RNA
tatttatgttgcacaaaagt

SEQ ID NO: 49420 - RNA, 20 nt, synthetic construct
  source 1..20: mol_type = other RNA
tatttatttccttaagccat

SEQ ID NO: 49421 - RNA, 20 nt, synthetic construct
  source 1..20: mol_type = other RNA
tatttcacaacgatttctta

SEQ ID NO: 49422 - RNA, 20 nt, synthetic construct
  source 1..20: mol_type = other RNA
tatttccacgggtaaaaata

SEQ ID NO: 49423 - RNA, 20 nt, synthetic construct
  source 1..20: mol_type = other RNA
tatttccagcctttaattta

SEQ ID NO: 49424 - RNA, 20 nt, synthetic construct
  source 1..20: mol_type = other RNA
tatttccagggggtatggag

SEQ ID NO: 49425 - RNA, 20 nt, synthetic construct
  source 1..20: mol_type = other RNA
tatttccccattagagtaag

SEQ ID NO: 49426 - RNA, 20 nt, synthetic construct
  source 1..20: mol_type = other RNA
tatttcccttttggatgcag

SEQ ID NO: 49427 - RNA, 20 nt, synthetic construct
  source 1..20: mol_type = other RNA
tatttccgatgataccttct

SEQ ID NO: 49428 - RNA, 20 nt, synthetic construct
  source 1..20: mol_type = other RNA
tatttccgtatccagtggtt

SEQ ID NO: 49429 - RNA, 20 nt, synthetic construct
  source 1..20: mol_type = other RNA
tatttccttaagccatttca

SEQ ID NO: 49430 - RNA, 20 nt, synthetic construct
  source 1..20: mol_type = other RNA
tatttccttatagtattacc

SEQ ID NO: 49431 - RNA, 20 nt, synthetic construct
  source 1..20: mol_type = other RNA
tatttccttccagtttatat

SEQ ID NO: 49432 - RNA, 20 nt, synthetic construct
  source 1..20: mol_type = other RNA
tatttcgaattatgctaaca

SEQ ID NO: 49433 - RNA, 20 nt, synthetic construct
  source 1..20: mol_type = other RNA
tatttcgcaaagcaacatgc

SEQ ID NO: 49434 - RNA, 20 nt, synthetic construct
  source 1..20: mol_type = other RNA
tatttcgcctagataagaaa

SEQ ID NO: 49435 - RNA, 20 nt, synthetic construct
  source 1..20: mol_type = other RNA
tatttctaaatcaacagtgt

SEQ ID NO: 49436 - RNA, 20 nt, synthetic construct
  source 1..20: mol_type = other RNA
tatttctcatctgtcacttt

SEQ ID NO: 49437 - RNA, 20 nt, synthetic construct
  source 1..20: mol_type = other RNA
tatttctctttaaagctgaa

SEQ ID NO: 49438 - RNA, 20 nt, synthetic construct
  source 1..20: mol_type = other RNA
tatttctgggctctctattc

SEQ ID NO: 49439 - RNA, 20 nt, synthetic construct
  source 1..20: mol_type = other RNA
tatttctgtaaacatgaaca

SEQ ID NO: 49440 - RNA, 20 nt, synthetic construct
  source 1..20: mol_type = other RNA
tatttctgtatcttttcagt

SEQ ID NO: 49441 - RNA, 20 nt, synthetic construct
  source 1..20: mol_type = other RNA
tatttctgtcatctgaatca

SEQ ID NO: 49442 - RNA, 20 nt, synthetic construct
  source 1..20: mol_type = other RNA
tatttctgttagatggtgct

SEQ ID NO: 49443 - RNA, 20 nt, synthetic construct
  source 1..20: mol_type = other RNA
tatttcttctccctcttcgc

SEQ ID NO: 49444 - RNA, 20 nt, synthetic construct
  source 1..20: mol_type = other RNA
tatttctttccattcaatcc

SEQ ID NO: 49445 - RNA, 20 nt, synthetic construct
  source 1..20: mol_type = other RNA
tatttctttttcttgctttg

SEQ ID NO: 49446 - RNA, 20 nt, synthetic construct
  source 1..20: mol_type = other RNA
tatttgaataaggtctgtaa

SEQ ID NO: 49447 - RNA, 20 nt, synthetic construct
  source 1..20: mol_type = other RNA
tatttgagagtaagttgcat

SEQ ID NO: 49448 - RNA, 20 nt, synthetic construct
  source 1..20: mol_type = other RNA
tatttgcagtagtattgaac

SEQ ID NO: 49449 - RNA, 20 nt, synthetic construct
  source 1..20: mol_type = other RNA
tatttgcggcttgattagct

SEQ ID NO: 49450 - RNA, 20 nt, synthetic construct
  source 1..20: mol_type = other RNA
tatttgctgtcaggcaaggg

SEQ ID NO: 49451 - RNA, 20 nt, synthetic construct
  source 1..20: mol_type = other RNA
tatttggaaatatggtcact

SEQ ID NO: 49452 - RNA, 20 nt, synthetic construct
  source 1..20: mol_type = other RNA
tatttggaagagagaaggct

SEQ ID NO: 49453 - RNA, 20 nt, synthetic construct
  source 1..20: mol_type = other RNA
tatttggctgttaccatttg

SEQ ID NO: 49454 - RNA, 20 nt, synthetic construct
  source 1..20: mol_type = other RNA
tatttggggattctgctact

SEQ ID NO: 49455 - RNA, 20 nt, synthetic construct
  source 1..20: mol_type = other RNA
tatttggggctaggatttca

SEQ ID NO: 49456 - RNA, 20 nt, synthetic construct
  source 1..20: mol_type = other RNA
tatttgtatcttcacaaaca

SEQ ID NO: 49457 - RNA, 20 nt, synthetic construct
  source 1..20: mol_type = other RNA
tatttgtgcatactgtgatg

SEQ ID NO: 49458 - RNA, 20 nt, synthetic construct
  source 1..20: mol_type = other RNA
tatttgttactgatctgctc

SEQ ID NO: 49459 - RNA, 20 nt, synthetic construct
  source 1..20: mol_type = other RNA
tatttgttcaagcgctgaag

SEQ ID NO: 49460 - RNA, 20 nt, synthetic construct
  source 1..20: mol_type = other RNA
tatttgttcagaaatagact

SEQ ID NO: 49461 - RNA, 20 nt, synthetic construct
  source 1..20: mol_type = other RNA
tatttgttctgtcacggtgc

SEQ ID NO: 49462 - RNA, 20 nt, synthetic construct
  source 1..20: mol_type = other RNA
tattttaaaagtcagctagg

SEQ ID NO: 49463 - RNA, 20 nt, synthetic construct
  source 1..20: mol_type = other RNA
tattttaagttctagggaac

SEQ ID NO: 49464 - RNA, 20 nt, synthetic construct
  source 1..20: mol_type = other RNA
tattttaatcgaatcctcac

SEQ ID NO: 49465 - RNA, 20 nt, synthetic construct
  source 1..20: mol_type = other RNA
tattttacaccatgcaggtt

SEQ ID NO: 49466 - RNA, 20 nt, synthetic construct
  source 1..20: mol_type = other RNA
tattttaggctctgtggttt

SEQ ID NO: 49467 - RNA, 20 nt, synthetic construct
  source 1..20: mol_type = other RNA
tattttataatgggcaatca

SEQ ID NO: 49468 - RNA, 20 nt, synthetic construct
  source 1..20: mol_type = other RNA
tattttatgctttgtctctg

SEQ ID NO: 49469 - RNA, 20 nt, synthetic construct
  source 1..20: mol_type = other RNA
tattttatgtacacgtcttg

SEQ ID NO: 49470 - RNA, 20 nt, synthetic construct
  source 1..20: mol_type = other RNA
tattttcaaggcttgtgcat

SEQ ID NO: 49471 - RNA, 20 nt, synthetic construct
  source 1..20: mol_type = other RNA
tattttcacagacagtaatt

SEQ ID NO: 49472 - RNA, 20 nt, synthetic construct
  source 1..20: mol_type = other RNA
tattttcataacaaagctct

SEQ ID NO: 49473 - RNA, 20 nt, synthetic construct
  source 1..20: mol_type = other RNA
tattttcatggtatcaattg

SEQ ID NO: 49474 - RNA, 20 nt, synthetic construct
  source 1..20: mol_type = other RNA
tattttcatggttttaatgg

SEQ ID NO: 49475 - RNA, 20 nt, synthetic construct
  source 1..20: mol_type = other RNA
tattttcctaaaactcccca

SEQ ID NO: 49476 - RNA, 20 nt, synthetic construct
  source 1..20: mol_type = other RNA
tattttcctaaccactgtta

SEQ ID NO: 49477 - RNA, 20 nt, synthetic construct
  source 1..20: mol_type = other RNA
tattttcctccttctgctca

SEQ ID NO: 49478 - RNA, 20 nt, synthetic construct
  source 1..20: mol_type = other RNA
tattttccttatccattcat

SEQ ID NO: 49479 - RNA, 20 nt, synthetic construct
  source 1..20: mol_type = other RNA
tattttcgtgtactgaaacc

SEQ ID NO: 49480 - RNA, 20 nt, synthetic construct
  source 1..20: mol_type = other RNA
tattttctaagagccaaaga

SEQ ID NO: 49481 - RNA, 20 nt, synthetic construct
  source 1..20: mol_type = other RNA
tattttctgcatttggtttg

SEQ ID NO: 49482 - RNA, 20 nt, synthetic construct
  source 1..20: mol_type = other RNA
tattttctgtcattctgcag

SEQ ID NO: 49483 - RNA, 20 nt, synthetic construct
  source 1..20: mol_type = other RNA
tattttctttgagtagttca

SEQ ID NO: 49484 - RNA, 20 nt, synthetic construct
  source 1..20: mol_type = other RNA
tattttgaaaaaacttccct

SEQ ID NO: 49485 - RNA, 20 nt, synthetic construct
  source 1..20: mol_type = other RNA
tattttggaagactatgaga

SEQ ID NO: 49486 - RNA, 20 nt, synthetic construct
  source 1..20: mol_type = other RNA
tattttgtaacgtgtatagc

SEQ ID NO: 49487 - RNA, 20 nt, synthetic construct
  source 1..20: mol_type = other RNA
tattttgtgggaattcagtc

SEQ ID NO: 49488 - RNA, 20 nt, synthetic construct
  source 1..20: mol_type = other RNA
tattttgttgacatcctttg

SEQ ID NO: 49489 - RNA, 20 nt, synthetic construct
  source 1..20: mol_type = other RNA
tattttgttgttgttgtttc

SEQ ID NO: 49490 - RNA, 20 nt, synthetic construct
  source 1..20: mol_type = other RNA
tatttttacccaacatgaga

SEQ ID NO: 49491 - RNA, 20 nt, synthetic construct
  source 1..20: mol_type = other RNA
tatttttacccgtggaaata

SEQ ID NO: 49492 - RNA, 20 nt, synthetic construct
  source 1..20: mol_type = other RNA
tatttttatgcatttggtct

SEQ ID NO: 49493 - RNA, 20 nt, synthetic construct
  source 1..20: mol_type = other RNA
tatttttcacaaacacacaa

SEQ ID NO: 49494 - RNA, 20 nt, synthetic construct
  source 1..20: mol_type = other RNA
tatttttcagattgaccttg

SEQ ID NO: 49495 - RNA, 20 nt, synthetic construct
  source 1..20: mol_type = other RNA
tatttttccacataaagtct

SEQ ID NO: 49496 - RNA, 20 nt, synthetic construct
  source 1..20: mol_type = other RNA
tatttttctgcaattggaag

SEQ ID NO: 49497 - RNA, 20 nt, synthetic construct
  source 1..20: mol_type = other RNA
tatttttgagacaggttgtt

SEQ ID NO: 49498 - RNA, 20 nt, synthetic construct
  source 1..20: mol_type = other RNA
tatttttgctcacacttact

SEQ ID NO: 49499 - RNA, 20 nt, synthetic construct
  source 1..20: mol_type = other RNA
tatttttgtctggtggacaa

SEQ ID NO: 49500 - RNA, 20 nt, synthetic construct
  source 1..20: mol_type = other RNA
tattttttcccagatacgtt

SEQ ID NO: 49501 - RNA, 20 nt, synthetic construct
  source 1..20: mol_type = other RNA
tattttttcccgctacacaa

SEQ ID NO: 49502 - RNA, 20 nt, synthetic construct
  source 1..20: mol_type = other RNA
tattttttcttcccatctca

SEQ ID NO: 49503 - RNA, 20 nt, synthetic construct
  source 1..20: mol_type = other RNA
tcaaaaacactgtattttga

SEQ ID NO: 49504 - RNA, 20 nt, synthetic construct
  source 1..20: mol_type = other RNA
tcaaaaacagcatatacatg

SEQ ID NO: 49505 - RNA, 20 nt, synthetic construct
  source 1..20: mol_type = other RNA
tcaaaaacccaactctttct

SEQ ID NO: 49506 - RNA, 20 nt, synthetic construct
  source 1..20: mol_type = other RNA
tcaaaaacctcccaacaggc

SEQ ID NO: 49507 - RNA, 20 nt, synthetic construct
  source 1..20: mol_type = other RNA
tcaaaaaccttttttaagga

SEQ ID NO: 49508 - RNA, 20 nt, synthetic construct
  source 1..20: mol_type = other RNA
tcaaaaagagaacacacaat

SEQ ID NO: 49509 - RNA, 20 nt, synthetic construct
  source 1..20: mol_type = other RNA
tcaaaaatactcaagggctt

SEQ ID NO: 49510 - RNA, 20 nt, synthetic construct
  source 1..20: mol_type = other RNA
tcaaaaatgtgtctagtgaa

SEQ ID NO: 49511 - RNA, 20 nt, synthetic construct
  source 1..20: mol_type = other RNA
tcaaaaatttaagcacagaa

SEQ ID NO: 49512 - RNA, 20 nt, synthetic construct
  source 1..20: mol_type = other RNA
tcaaaacaaaacacatggca

SEQ ID NO: 49513 - RNA, 20 nt, synthetic construct
  source 1..20: mol_type = other RNA
tcaaaacaaacaaacagaaa

SEQ ID NO: 49514 - RNA, 20 nt, synthetic construct
  source 1..20: mol_type = other RNA
tcaaaacaataagacaccgc

SEQ ID NO: 49515 - RNA, 20 nt, synthetic construct
  source 1..20: mol_type = other RNA
tcaaaacacttctgtgatca

SEQ ID NO: 49516 - RNA, 20 nt, synthetic construct
  source 1..20: mol_type = other RNA
tcaaaacatcatctaatttc

SEQ ID NO: 49517 - RNA, 20 nt, synthetic construct
  source 1..20: mol_type = other RNA
tcaaaaccaaagaaagggga

SEQ ID NO: 49518 - RNA, 20 nt, synthetic construct
  source 1..20: mol_type = other RNA
tcaaaaccaggaggtttgca

SEQ ID NO: 49519 - RNA, 20 nt, synthetic construct
  source 1..20: mol_type = other RNA
tcaaaactgaagtttatcag

SEQ ID NO: 49520 - RNA, 20 nt, synthetic construct
  source 1..20: mol_type = other RNA
tcaaaagacatcactaagag

SEQ ID NO: 49521 - RNA, 20 nt, synthetic construct
  source 1..20: mol_type = other RNA
tcaaaagaccaagaattttc

SEQ ID NO: 49522 - RNA, 20 nt, synthetic construct
  source 1..20: mol_type = other RNA
tcaaaagatgcagaaaaagc

SEQ ID NO: 49523 - RNA, 20 nt, synthetic construct
  source 1..20: mol_type = other RNA
tcaaaagatgctggtggagt

SEQ ID NO: 49524 - RNA, 20 nt, synthetic construct
  source 1..20: mol_type = other RNA
tcaaaagccatagtgtaaac

SEQ ID NO: 49525 - RNA, 20 nt, synthetic construct
  source 1..20: mol_type = other RNA
tcaaaagccccaaaccatca

SEQ ID NO: 49526 - RNA, 20 nt, synthetic construct
  source 1..20: mol_type = other RNA
tcaaaagctccccggatgat

SEQ ID NO: 49527 - RNA, 20 nt, synthetic construct
  source 1..20: mol_type = other RNA
tcaaaaggacatattttatg

SEQ ID NO: 49528 - RNA, 20 nt, synthetic construct
  source 1..20: mol_type = other RNA
tcaaaagtgaatcactacag

SEQ ID NO: 49529 - RNA, 20 nt, synthetic construct
  source 1..20: mol_type = other RNA
tcaaaatacagtgtttttga

SEQ ID NO: 49530 - RNA, 20 nt, synthetic construct
  source 1..20: mol_type = other RNA
tcaaaatcaacattgcctcc

SEQ ID NO: 49531 - RNA, 20 nt, synthetic construct
  source 1..20: mol_type = other RNA
tcaaaatcaaggtgcgggat

SEQ ID NO: 49532 - RNA, 20 nt, synthetic construct
  source 1..20: mol_type = other RNA
tcaaaatctgatgtgtatgt

SEQ ID NO: 49533 - RNA, 20 nt, synthetic construct
  source 1..20: mol_type = other RNA
tcaaaatggatcaaagacct

SEQ ID NO: 49534 - RNA, 20 nt, synthetic construct
  source 1..20: mol_type = other RNA
tcaaaatgtgatggcatcat

SEQ ID NO: 49535 - RNA, 20 nt, synthetic construct
  source 1..20: mol_type = other RNA
tcaaaatgttcatacaatag

SEQ ID NO: 49536 - RNA, 20 nt, synthetic construct
  source 1..20: mol_type = other RNA
tcaaaatttagtaagggtaa

SEQ ID NO: 49537 - RNA, 20 nt, synthetic construct
  source 1..20: mol_type = other RNA
tcaaacaaatcattaaaagg

SEQ ID NO: 49538 - RNA, 20 nt, synthetic construct
  source 1..20: mol_type = other RNA
tcaaacaattacttcataga

SEQ ID NO: 49539 - RNA, 20 nt, synthetic construct
  source 1..20: mol_type = other RNA
tcaaacagcctaattgtaca

SEQ ID NO: 49540 - RNA, 20 nt, synthetic construct
  source 1..20: mol_type = other RNA
tcaaacagcttgacattctt

SEQ ID NO: 49541 - RNA, 20 nt, synthetic construct
  source 1..20: mol_type = other RNA
tcaaacaggatacaaaaagc

SEQ ID NO: 49542 - RNA, 20 nt, synthetic construct
  source 1..20: mol_type = other RNA
tcaaacagtgtgatattggc

SEQ ID NO: 49543 - RNA, 20 nt, synthetic construct
  source 1..20: mol_type = other RNA
tcaaacataccccaacccta

SEQ ID NO: 49544 - RNA, 20 nt, synthetic construct
  source 1..20: mol_type = other RNA
tcaaacatgacagatcccaa

SEQ ID NO: 49545 - RNA, 20 nt, synthetic construct
  source 1..20: mol_type = other RNA
tcaaaccaatgttctctttt

SEQ ID NO: 49546 - RNA, 20 nt, synthetic construct
  source 1..20: mol_type = other RNA
tcaaaccacctaactactaa

SEQ ID NO: 49547 - RNA, 20 nt, synthetic construct
  source 1..20: mol_type = other RNA
tcaaaccactatctaataaa

SEQ ID NO: 49548 - RNA, 20 nt, synthetic construct
  source 1..20: mol_type = other RNA
tcaaaccatcctttccttgt

SEQ ID NO: 49549 - RNA, 20 nt, synthetic construct
  source 1..20: mol_type = other RNA
tcaaaccatgttcatgggaa

SEQ ID NO: 49550 - RNA, 20 nt, synthetic construct
  source 1..20: mol_type = other RNA
tcaaacccaaattaaaggat

SEQ ID NO: 49551 - RNA, 20 nt, synthetic construct
  source 1..20: mol_type = other RNA
tcaaacgaaccaattaccat

SEQ ID NO: 49552 - RNA, 20 nt, synthetic construct
  source 1..20: mol_type = other RNA
tcaaacgtccatcaacagca

SEQ ID NO: 49553 - RNA, 20 nt, synthetic construct
  source 1..20: mol_type = other RNA
tcaaacgtgctttccttatt

SEQ ID NO: 49554 - RNA, 20 nt, synthetic construct
  source 1..20: mol_type = other RNA
tcaaactatgcttaatctga

SEQ ID NO: 49555 - RNA, 20 nt, synthetic construct
  source 1..20: mol_type = other RNA
tcaaactcacttattagcaa

SEQ ID NO: 49556 - RNA, 20 nt, synthetic construct
  source 1..20: mol_type = other RNA
tcaaactccaagtctcatgc

SEQ ID NO: 49557 - RNA, 20 nt, synthetic construct
  source 1..20: mol_type = other RNA
tcaaactgtggtcactgttt

SEQ ID NO: 49558 - RNA, 20 nt, synthetic construct
  source 1..20: mol_type = other RNA
tcaaactgtgtgcttggagt

SEQ ID NO: 49559 - RNA, 20 nt, synthetic construct
  source 1..20: mol_type = other RNA
tcaaagaaactacctagaaa

SEQ ID NO: 49560 - RNA, 20 nt, synthetic construct
  source 1..20: mol_type = other RNA
tcaaagaaagagttgggttt

SEQ ID NO: 49561 - RNA, 20 nt, synthetic construct
  source 1..20: mol_type = other RNA
tcaaagacctaagcttaaga

SEQ ID NO: 49562 - RNA, 20 nt, synthetic construct
  source 1..20: mol_type = other RNA
tcaaagagaacaaaatacct

SEQ ID NO: 49563 - RNA, 20 nt, synthetic construct
  source 1..20: mol_type = other RNA
tcaaagagacctgattcttc

SEQ ID NO: 49564 - RNA, 20 nt, synthetic construct
  source 1..20: mol_type = other RNA
tcaaagatcatttcacttga

SEQ ID NO: 49565 - RNA, 20 nt, synthetic construct
  source 1..20: mol_type = other RNA
tcaaagcaagttaaaagaca

SEQ ID NO: 49566 - RNA, 20 nt, synthetic construct
  source 1..20: mol_type = other RNA
tcaaagcatatgaatctaga

SEQ ID NO: 49567 - RNA, 20 nt, synthetic construct
  source 1..20: mol_type = other RNA
tcaaagcccaccagcataag

SEQ ID NO: 49568 - RNA, 20 nt, synthetic construct
  source 1..20: mol_type = other RNA
tcaaagcctgtggaggcagt

SEQ ID NO: 49569 - RNA, 20 nt, synthetic construct
  source 1..20: mol_type = other RNA
tcaaagctaccctttcttgt

SEQ ID NO: 49570 - RNA, 20 nt, synthetic construct
  source 1..20: mol_type = other RNA
tcaaaggaaggaattttagg

SEQ ID NO: 49571 - RNA, 20 nt, synthetic construct
  source 1..20: mol_type = other RNA
tcaaaggagagaagaggggg

SEQ ID NO: 49572 - RNA, 20 nt, synthetic construct
  source 1..20: mol_type = other RNA
tcaaaggggcattccgtgga

SEQ ID NO: 49573 - RNA, 20 nt, synthetic construct
  source 1..20: mol_type = other RNA
tcaaagggtcactattaacc

SEQ ID NO: 49574 - RNA, 20 nt, synthetic construct
  source 1..20: mol_type = other RNA
tcaaagtcccctgtaattac

SEQ ID NO: 49575 - RNA, 20 nt, synthetic construct
  source 1..20: mol_type = other RNA
tcaaagtgaaaggcaaagga

SEQ ID NO: 49576 - RNA, 20 nt, synthetic construct
  source 1..20: mol_type = other RNA
tcaaagtggaaacaactcaa

SEQ ID NO: 49577 - RNA, 20 nt, synthetic construct
  source 1..20: mol_type = other RNA
tcaaagttaaacttttgtgc

SEQ ID NO: 49578 - RNA, 20 nt, synthetic construct
  source 1..20: mol_type = other RNA
tcaaagttaatagcctccta

SEQ ID NO: 49579 - RNA, 20 nt, synthetic construct
  source 1..20: mol_type = other RNA
tcaaagttatgtttatgaca

SEQ ID NO: 49580 - RNA, 20 nt, synthetic construct
  source 1..20: mol_type = other RNA
tcaaataatagctatcctaa

SEQ ID NO: 49581 - RNA, 20 nt, synthetic construct
  source 1..20: mol_type = other RNA
tcaaataattgctgcagttt

SEQ ID NO: 49582 - RNA, 20 nt, synthetic construct
  source 1..20: mol_type = other RNA
tcaaatacctagttttccaa

SEQ ID NO: 49583 - RNA, 20 nt, synthetic construct
  source 1..20: mol_type = other RNA
tcaaatcaatacttcatttc

SEQ ID NO: 49584 - RNA, 20 nt, synthetic construct
  source 1..20: mol_type = other RNA
tcaaatccaaattcacagca

SEQ ID NO: 49585 - RNA, 20 nt, synthetic construct
  source 1..20: mol_type = other RNA
tcaaatccagtcttcaggtc

SEQ ID NO: 49586 - RNA, 20 nt, synthetic construct
  source 1..20: mol_type = other RNA
tcaaatctggctgcagggct

SEQ ID NO: 49587 - RNA, 20 nt, synthetic construct
  source 1..20: mol_type = other RNA
tcaaatgaacaggttcttca

SEQ ID NO: 49588 - RNA, 20 nt, synthetic construct
  source 1..20: mol_type = other RNA
tcaaatgaggcttttattgg

SEQ ID NO: 49589 - RNA, 20 nt, synthetic construct
  source 1..20: mol_type = other RNA
tcaaatgatattcactgatt

SEQ ID NO: 49590 - RNA, 20 nt, synthetic construct
  source 1..20: mol_type = other RNA
tcaaatgccatagagcttta

SEQ ID NO: 49591 - RNA, 20 nt, synthetic construct
  source 1..20: mol_type = other RNA
tcaaatgctataaagaacat

SEQ ID NO: 49592 - RNA, 20 nt, synthetic construct
  source 1..20: mol_type = other RNA
tcaaatggccttctttcttt

SEQ ID NO: 49593 - RNA, 20 nt, synthetic construct
  source 1..20: mol_type = other RNA
tcaaatgggaaattagatga

SEQ ID NO: 49594 - RNA, 20 nt, synthetic construct
  source 1..20: mol_type = other RNA
tcaaatggtaacagccaaat

SEQ ID NO: 49595 - RNA, 20 nt, synthetic construct
  source 1..20: mol_type = other RNA
tcaaatgtctcattgtggat

SEQ ID NO: 49596 - RNA, 20 nt, synthetic construct
  source 1..20: mol_type = other RNA
tcaaatgtgacagaacaaac

SEQ ID NO: 49597 - RNA, 20 nt, synthetic construct
  source 1..20: mol_type = other RNA
tcaaatgttaagcccaactt

SEQ ID NO: 49598 - RNA, 20 nt, synthetic construct
  source 1..20: mol_type = other RNA
tcaaattaatcagtctgtaa

SEQ ID NO: 49599 - RNA, 20 nt, synthetic construct
  source 1..20: mol_type = other RNA
tcaaattagtcatagcagtg

SEQ ID NO: 49600 - RNA, 20 nt, synthetic construct
  source 1..20: mol_type = other RNA
tcaaattcacagaactgtca

SEQ ID NO: 49601 - RNA, 20 nt, synthetic construct
  source 1..20: mol_type = other RNA
tcaaattctgagggaaatta

SEQ ID NO: 49602 - RNA, 20 nt, synthetic construct
  source 1..20: mol_type = other RNA
tcaaattgtgtgttctcttt

SEQ ID NO: 49603 - RNA, 20 nt, synthetic construct
  source 1..20: mol_type = other RNA
tcaaatttaacacacaacaa

SEQ ID NO: 49604 - RNA, 20 nt, synthetic construct
  source 1..20: mol_type = other RNA
tcaaatttttcacattcttc

SEQ ID NO: 49605 - RNA, 20 nt, synthetic construct
  source 1..20: mol_type = other RNA
tcaacaaaactgggggctgg

SEQ ID NO: 49606 - RNA, 20 nt, synthetic construct
  source 1..20: mol_type = other RNA
tcaacaaactaactagaaaa

SEQ ID NO: 49607 - RNA, 20 nt, synthetic construct
  source 1..20: mol_type = other RNA
tcaacaaaggttgaaaactc

SEQ ID NO: 49608 - RNA, 20 nt, synthetic construct
  source 1..20: mol_type = other RNA
tcaacaagagaggacagttg

SEQ ID NO: 49609 - RNA, 20 nt, synthetic construct
  source 1..20: mol_type = other RNA
tcaacaatagcaacaaaaca

SEQ ID NO: 49610 - RNA, 20 nt, synthetic construct
  source 1..20: mol_type = other RNA
tcaacacactagccactggg

SEQ ID NO: 49611 - RNA, 20 nt, synthetic construct
  source 1..20: mol_type = other RNA
tcaacacatagtgttaatta

SEQ ID NO: 49612 - RNA, 20 nt, synthetic construct
  source 1..20: mol_type = other RNA
tcaacacatcagcgctaagt

SEQ ID NO: 49613 - RNA, 20 nt, synthetic construct
  source 1..20: mol_type = other RNA
tcaacacattcaaaattgtt

SEQ ID NO: 49614 - RNA, 20 nt, synthetic construct
  source 1..20: mol_type = other RNA
tcaacaccaagcaacactaa

SEQ ID NO: 49615 - RNA, 20 nt, synthetic construct
  source 1..20: mol_type = other RNA
tcaacactgtgttcttttcc

SEQ ID NO: 49616 - RNA, 20 nt, synthetic construct
  source 1..20: mol_type = other RNA
tcaacacttcagtggtaagg

SEQ ID NO: 49617 - RNA, 20 nt, synthetic construct
  source 1..20: mol_type = other RNA
tcaacacttttccagtcttc

SEQ ID NO: 49618 - RNA, 20 nt, synthetic construct
  source 1..20: mol_type = other RNA
tcaacagcacttttgtacta

SEQ ID NO: 49619 - RNA, 20 nt, synthetic construct
  source 1..20: mol_type = other RNA
tcaacagcagaacaaactgc

SEQ ID NO: 49620 - RNA, 20 nt, synthetic construct
  source 1..20: mol_type = other RNA
tcaacagctactatgaatat

SEQ ID NO: 49621 - RNA, 20 nt, synthetic construct
  source 1..20: mol_type = other RNA
tcaacagggtaagattccgt

SEQ ID NO: 49622 - RNA, 20 nt, synthetic construct
  source 1..20: mol_type = other RNA
tcaacaggtagctgcttttt

SEQ ID NO: 49623 - RNA, 20 nt, synthetic construct
  source 1..20: mol_type = other RNA
tcaacaggtataaagtttcc

SEQ ID NO: 49624 - RNA, 20 nt, synthetic construct
  source 1..20: mol_type = other RNA
tcaacagtgtactagtctcc

SEQ ID NO: 49625 - RNA, 20 nt, synthetic construct
  source 1..20: mol_type = other RNA
tcaacatataaatcaatctg

SEQ ID NO: 49626 - RNA, 20 nt, synthetic construct
  source 1..20: mol_type = other RNA
tcaacatcactagctattag

SEQ ID NO: 49627 - RNA, 20 nt, synthetic construct
  source 1..20: mol_type = other RNA
tcaacatgaaaagatactca

SEQ ID NO: 49628 - RNA, 20 nt, synthetic construct
  source 1..20: mol_type = other RNA
tcaacatgtgtatttaggga

SEQ ID NO: 49629 - RNA, 20 nt, synthetic construct
  source 1..20: mol_type = other RNA
tcaacattaagggaaacagg

SEQ ID NO: 49630 - RNA, 20 nt, synthetic construct
  source 1..20: mol_type = other RNA
tcaacattcattcatgacaa

SEQ ID NO: 49631 - RNA, 20 nt, synthetic construct
  source 1..20: mol_type = other RNA
tcaacattgcctccatatgg

SEQ ID NO: 49632 - RNA, 20 nt, synthetic construct
  source 1..20: mol_type = other RNA
tcaaccactaaggtcaacac

SEQ ID NO: 49633 - RNA, 20 nt, synthetic construct
  source 1..20: mol_type = other RNA
tcaaccatacttttcaactg

SEQ ID NO: 49634 - RNA, 20 nt, synthetic construct
  source 1..20: mol_type = other RNA
tcaacccatgaaaattgaat

SEQ ID NO: 49635 - RNA, 20 nt, synthetic construct
  source 1..20: mol_type = other RNA
tcaaccccatcaacaagtgg

SEQ ID NO: 49636 - RNA, 20 nt, synthetic construct
  source 1..20: mol_type = other RNA
tcaaccctcggcctctactg

SEQ ID NO: 49637 - RNA, 20 nt, synthetic construct
  source 1..20: mol_type = other RNA
tcaacctaacatgtcttggt

SEQ ID NO: 49638 - RNA, 20 nt, synthetic construct
  source 1..20: mol_type = other RNA
tcaacctaatgaaatttaac

SEQ ID NO: 49639 - RNA, 20 nt, synthetic construct
  source 1..20: mol_type = other RNA
tcaacctactttaaatcagg

SEQ ID NO: 49640 - RNA, 20 nt, synthetic construct
  source 1..20: mol_type = other RNA
tcaacctataagacccagtg

SEQ ID NO: 49641 - RNA, 20 nt, synthetic construct
  source 1..20: mol_type = other RNA
tcaacctcaactttaggtta

SEQ ID NO: 49642 - RNA, 20 nt, synthetic construct
  source 1..20: mol_type = other RNA
tcaacctgcaggtatttcta

SEQ ID NO: 49643 - RNA, 20 nt, synthetic construct
  source 1..20: mol_type = other RNA
tcaacctttgcctcctgggt

SEQ ID NO: 49644 - RNA, 20 nt, synthetic construct
  source 1..20: mol_type = other RNA
tcaacctttgttgaaaacga

SEQ ID NO: 49645 - RNA, 20 nt, synthetic construct
  source 1..20: mol_type = other RNA
tcaacgacaatctctggggt

SEQ ID NO: 49646 - RNA, 20 nt, synthetic construct
  source 1..20: mol_type = other RNA
tcaacgcacccagagcgggt

SEQ ID NO: 49647 - RNA, 20 nt, synthetic construct
  source 1..20: mol_type = other RNA
tcaacgcctgtgatcccagc

SEQ ID NO: 49648 - RNA, 20 nt, synthetic construct
  source 1..20: mol_type = other RNA
tcaacggacatttttccaaa

SEQ ID NO: 49649 - RNA, 20 nt, synthetic construct
  source 1..20: mol_type = other RNA
tcaactaatcaaacataccc

SEQ ID NO: 49650 - RNA, 20 nt, synthetic construct
  source 1..20: mol_type = other RNA
tcaactattccataagatct

SEQ ID NO: 49651 - RNA, 20 nt, synthetic construct
  source 1..20: mol_type = other RNA
tcaactgaacaacgctgtgg

SEQ ID NO: 49652 - RNA, 20 nt, synthetic construct
  source 1..20: mol_type = other RNA
tcaactgaggcagagtagag

SEQ ID NO: 49653 - RNA, 20 nt, synthetic construct
  source 1..20: mol_type = other RNA
tcaactgcctctacatcaca

SEQ ID NO: 49654 - RNA, 20 nt, synthetic construct
  source 1..20: mol_type = other RNA
tcaactgcttccctagccca

SEQ ID NO: 49655 - RNA, 20 nt, synthetic construct
  source 1..20: mol_type = other RNA
tcaactggcccctccatgga

SEQ ID NO: 49656 - RNA, 20 nt, synthetic construct
  source 1..20: mol_type = other RNA
tcaacttagccttggtaaaa

SEQ ID NO: 49657 - RNA, 20 nt, synthetic construct
  source 1..20: mol_type = other RNA
tcaacttcctgttttagtgg

SEQ ID NO: 49658 - RNA, 20 nt, synthetic construct
  source 1..20: mol_type = other RNA
tcaacttggtaaaaagtgct

SEQ ID NO: 49659 - RNA, 20 nt, synthetic construct
  source 1..20: mol_type = other RNA
tcaactttaggttacgtact

SEQ ID NO: 49660 - RNA, 20 nt, synthetic construct
  source 1..20: mol_type = other RNA
tcaacttttagtaggtctcc

SEQ ID NO: 49661 - RNA, 20 nt, synthetic construct
  source 1..20: mol_type = other RNA
tcaagaaaccacagagccta

SEQ ID NO: 49662 - RNA, 20 nt, synthetic construct
  source 1..20: mol_type = other RNA
tcaagaaggtatcatcggaa

SEQ ID NO: 49663 - RNA, 20 nt, synthetic construct
  source 1..20: mol_type = other RNA
tcaagaatgaagtcagagat

SEQ ID NO: 49664 - RNA, 20 nt, synthetic construct
  source 1..20: mol_type = other RNA
tcaagacaagcaaggaaggg

SEQ ID NO: 49665 - RNA, 20 nt, synthetic construct
  source 1..20: mol_type = other RNA
tcaagacagagctccctctc

SEQ ID NO: 49666 - RNA, 20 nt, synthetic construct
  source 1..20: mol_type = other RNA
tcaagagagattaaataact

SEQ ID NO: 49667 - RNA, 20 nt, synthetic construct
  source 1..20: mol_type = other RNA
tcaagagcggcctttgcctc

SEQ ID NO: 49668 - RNA, 20 nt, synthetic construct
  source 1..20: mol_type = other RNA
tcaagaggttaaaaccacaa

SEQ ID NO: 49669 - RNA, 20 nt, synthetic construct
  source 1..20: mol_type = other RNA
tcaagagttacttctggaaa

SEQ ID NO: 49670 - RNA, 20 nt, synthetic construct
  source 1..20: mol_type = other RNA
tcaagatactgcactaaact

SEQ ID NO: 49671 - RNA, 20 nt, synthetic construct
  source 1..20: mol_type = other RNA
tcaagatgaatctgcaacta

SEQ ID NO: 49672 - RNA, 20 nt, synthetic construct
  source 1..20: mol_type = other RNA
tcaagatgcataccaagccc

SEQ ID NO: 49673 - RNA, 20 nt, synthetic construct
  source 1..20: mol_type = other RNA
tcaagattgtgtgatttcat

SEQ ID NO: 49674 - RNA, 20 nt, synthetic construct
  source 1..20: mol_type = other RNA
tcaagattgtttaattctgt

SEQ ID NO: 49675 - RNA, 20 nt, synthetic construct
  source 1..20: mol_type = other RNA
tcaagatttcataggcatct

SEQ ID NO: 49676 - RNA, 20 nt, synthetic construct
  source 1..20: mol_type = other RNA
tcaagcaatctgaaacgacc

SEQ ID NO: 49677 - RNA, 20 nt, synthetic construct
  source 1..20: mol_type = other RNA
tcaagcaccacttcgagaag

SEQ ID NO: 49678 - RNA, 20 nt, synthetic construct
  source 1..20: mol_type = other RNA
tcaagcagaaatgagttcca

SEQ ID NO: 49679 - RNA, 20 nt, synthetic construct
  source 1..20: mol_type = other RNA
tcaagcagtcctgccttggc

SEQ ID NO: 49680 - RNA, 20 nt, synthetic construct
  source 1..20: mol_type = other RNA
tcaagcattgggagctttca

SEQ ID NO: 49681 - RNA, 20 nt, synthetic construct
  source 1..20: mol_type = other RNA
tcaagccatcctccagcctt

SEQ ID NO: 49682 - RNA, 20 nt, synthetic construct
  source 1..20: mol_type = other RNA
tcaagccccagttctgcgca

SEQ ID NO: 49683 - RNA, 20 nt, synthetic construct
  source 1..20: mol_type = other RNA
tcaagcccttccttgcttgt

SEQ ID NO: 49684 - RNA, 20 nt, synthetic construct
  source 1..20: mol_type = other RNA
tcaagccgcaaataatcatt

SEQ ID NO: 49685 - RNA, 20 nt, synthetic construct
  source 1..20: mol_type = other RNA
tcaagcctgataagctccca

SEQ ID NO: 49686 - RNA, 20 nt, synthetic construct
  source 1..20: mol_type = other RNA
tcaagcgctgaagtacttca

SEQ ID NO: 49687 - RNA, 20 nt, synthetic construct
  source 1..20: mol_type = other RNA
tcaagctatcagaattttat

SEQ ID NO: 49688 - RNA, 20 nt, synthetic construct
  source 1..20: mol_type = other RNA
tcaagctcgccgtctccctc

SEQ ID NO: 49689 - RNA, 20 nt, synthetic construct
  source 1..20: mol_type = other RNA
tcaagctgtttgagctgaaa

SEQ ID NO: 49690 - RNA, 20 nt, synthetic construct
  source 1..20: mol_type = other RNA
tcaaggaagcttcctaaaga

SEQ ID NO: 49691 - RNA, 20 nt, synthetic construct
  source 1..20: mol_type = other RNA
tcaaggcacagtctgtgctt

SEQ ID NO: 49692 - RNA, 20 nt, synthetic construct
  source 1..20: mol_type = other RNA
tcaaggcagaacacactgct

SEQ ID NO: 49693 - RNA, 20 nt, synthetic construct
  source 1..20: mol_type = other RNA
tcaaggccaactgtcctctc

SEQ ID NO: 49694 - RNA, 20 nt, synthetic construct
  source 1..20: mol_type = other RNA
tcaaggcttgtgcatcagaa

SEQ ID NO: 49695 - RNA, 20 nt, synthetic construct
  source 1..20: mol_type = other RNA
tcaagggctttcaatagtgg

SEQ ID NO: 49696 - RNA, 20 nt, synthetic construct
  source 1..20: mol_type = other RNA
tcaaggggagaggcctcatg

SEQ ID NO: 49697 - RNA, 20 nt, synthetic construct
  source 1..20: mol_type = other RNA
tcaaggggccttttgtcaag

SEQ ID NO: 49698 - RNA, 20 nt, synthetic construct
  source 1..20: mol_type = other RNA
tcaagggtggtgctggactg

SEQ ID NO: 49699 - RNA, 20 nt, synthetic construct
  source 1..20: mol_type = other RNA
tcaagggtgttttcccccct

SEQ ID NO: 49700 - RNA, 20 nt, synthetic construct
  source 1..20: mol_type = other RNA
tcaaggtaatctagtttatc

SEQ ID NO: 49701 - RNA, 20 nt, synthetic construct
  source 1..20: mol_type = other RNA
tcaaggtacaatacactaaa

SEQ ID NO: 49702 - RNA, 20 nt, synthetic construct
  source 1..20: mol_type = other RNA
tcaaggtagaagtacaaaca

SEQ ID NO: 49703 - RNA, 20 nt, synthetic construct
  source 1..20: mol_type = other RNA
tcaaggtatctccccaaaga

SEQ ID NO: 49704 - RNA, 20 nt, synthetic construct
  source 1..20: mol_type = other RNA
tcaaggtcatcctttccctt

SEQ ID NO: 49705 - RNA, 20 nt, synthetic construct
  source 1..20: mol_type = other RNA
tcaaggtgcgggattatttg

SEQ ID NO: 49706 - RNA, 20 nt, synthetic construct
  source 1..20: mol_type = other RNA
tcaaggtgttagcaggactg

SEQ ID NO: 49707 - RNA, 20 nt, synthetic construct
  source 1..20: mol_type = other RNA
tcaaggtgttcctgaagtct

SEQ ID NO: 49708 - RNA, 20 nt, synthetic construct
  source 1..20: mol_type = other RNA
tcaaggttataatcagccgt

SEQ ID NO: 49709 - RNA, 20 nt, synthetic construct
  source 1..20: mol_type = other RNA
tcaaggttcacaaattagaa

SEQ ID NO: 49710 - RNA, 20 nt, synthetic construct
  source 1..20: mol_type = other RNA
tcaagtaacactcagaagta

SEQ ID NO: 49711 - RNA, 20 nt, synthetic construct
  source 1..20: mol_type = other RNA
tcaagtaacagttcaatact

SEQ ID NO: 49712 - RNA, 20 nt, synthetic construct
  source 1..20: mol_type = other RNA
tcaagtaagtgaaatcataa

SEQ ID NO: 49713 - RNA, 20 nt, synthetic construct
  source 1..20: mol_type = other RNA
tcaagtaattgttttccctt

SEQ ID NO: 49714 - RNA, 20 nt, synthetic construct
  source 1..20: mol_type = other RNA
tcaagtacaactaataattg

SEQ ID NO: 49715 - RNA, 20 nt, synthetic construct
  source 1..20: mol_type = other RNA
tcaagtatctccctgtgcgt

SEQ ID NO: 49716 - RNA, 20 nt, synthetic construct
  source 1..20: mol_type = other RNA
tcaagtatttccacgggtaa

SEQ ID NO: 49717 - RNA, 20 nt, synthetic construct
  source 1..20: mol_type = other RNA
tcaagtatttcctatgaaaa

SEQ ID NO: 49718 - RNA, 20 nt, synthetic construct
  source 1..20: mol_type = other RNA
tcaagtcctttccagaggtt

SEQ ID NO: 49719 - RNA, 20 nt, synthetic construct
  source 1..20: mol_type = other RNA
tcaagtcttttcctagactg

SEQ ID NO: 49720 - RNA, 20 nt, synthetic construct
  source 1..20: mol_type = other RNA
tcaagtgaaatgatctttga

SEQ ID NO: 49721 - RNA, 20 nt, synthetic construct
  source 1..20: mol_type = other RNA
tcaagtgaaccaaaaaccac

SEQ ID NO: 49722 - RNA, 20 nt, synthetic construct
  source 1..20: mol_type = other RNA
tcaagtgactccaagcacac

SEQ ID NO: 49723 - RNA, 20 nt, synthetic construct
  source 1..20: mol_type = other RNA
tcaagtgatgcaactcctgg

SEQ ID NO: 49724 - RNA, 20 nt, synthetic construct
  source 1..20: mol_type = other RNA
tcaagtgtgatcccaaaaaa

SEQ ID NO: 49725 - RNA, 20 nt, synthetic construct
  source 1..20: mol_type = other RNA
tcaagtgtttatttagtgaa

SEQ ID NO: 49726 - RNA, 20 nt, synthetic construct
  source 1..20: mol_type = other RNA
tcaagttacaataatatgcc

SEQ ID NO: 49727 - RNA, 20 nt, synthetic construct
  source 1..20: mol_type = other RNA
tcaagttccggttctcagga

SEQ ID NO: 49728 - RNA, 20 nt, synthetic construct
  source 1..20: mol_type = other RNA
tcaagttctgatttcaaagt

SEQ ID NO: 49729 - RNA, 20 nt, synthetic construct
  source 1..20: mol_type = other RNA
tcaagttgcttggcacagaa

SEQ ID NO: 49730 - RNA, 20 nt, synthetic construct
  source 1..20: mol_type = other RNA
tcaagttgctttttcttctt

SEQ ID NO: 49731 - RNA, 20 nt, synthetic construct
  source 1..20: mol_type = other RNA
tcaagtttcaccctgcgaag

SEQ ID NO: 49732 - RNA, 20 nt, synthetic construct
  source 1..20: mol_type = other RNA
tcaagtttggctcccatgat

SEQ ID NO: 49733 - RNA, 20 nt, synthetic construct
  source 1..20: mol_type = other RNA
tcaataaggaaagcacgttt

SEQ ID NO: 49734 - RNA, 20 nt, synthetic construct
  source 1..20: mol_type = other RNA
tcaataattctgtgccaagc

SEQ ID NO: 49735 - RNA, 20 nt, synthetic construct
  source 1..20: mol_type = other RNA
tcaataatttggatgaacgc

SEQ ID NO: 49736 - RNA, 20 nt, synthetic construct
  source 1..20: mol_type = other RNA
tcaatacacgtggctgtcaa

SEQ ID NO: 49737 - RNA, 20 nt, synthetic construct
  source 1..20: mol_type = other RNA
tcaatacctgaaaagtgtat

SEQ ID NO: 49738 - RNA, 20 nt, synthetic construct
  source 1..20: mol_type = other RNA
tcaatactactgcaaatatc

SEQ ID NO: 49739 - RNA, 20 nt, synthetic construct
  source 1..20: mol_type = other RNA
tcaatacttcatttccattg

SEQ ID NO: 49740 - RNA, 20 nt, synthetic construct
  source 1..20: mol_type = other RNA
tcaatagcagtgctgaaagc

SEQ ID NO: 49741 - RNA, 20 nt, synthetic construct
  source 1..20: mol_type = other RNA
tcaatagtgggtagaagcag

SEQ ID NO: 49742 - RNA, 20 nt, synthetic construct
  source 1..20: mol_type = other RNA
tcaatatgcagtatgtgcca

SEQ ID NO: 49743 - RNA, 20 nt, synthetic construct
  source 1..20: mol_type = other RNA
tcaatatgttaaatgaagga

SEQ ID NO: 49744 - RNA, 20 nt, synthetic construct
  source 1..20: mol_type = other RNA
tcaatattaagagtctcatc

SEQ ID NO: 49745 - RNA, 20 nt, synthetic construct
  source 1..20: mol_type = other RNA
tcaatattttggaagactat

SEQ ID NO: 49746 - RNA, 20 nt, synthetic construct
  source 1..20: mol_type = other RNA
tcaatcagggccttcccaaa

SEQ ID NO: 49747 - RNA, 20 nt, synthetic construct
  source 1..20: mol_type = other RNA
tcaatcagtggccagtgacc

SEQ ID NO: 49748 - RNA, 20 nt, synthetic construct
  source 1..20: mol_type = other RNA
tcaatcatgtcaagaatgaa

SEQ ID NO: 49749 - RNA, 20 nt, synthetic construct
  source 1..20: mol_type = other RNA
tcaatccagacagctaatat

SEQ ID NO: 49750 - RNA, 20 nt, synthetic construct
  source 1..20: mol_type = other RNA
tcaatccccatctgggatac

SEQ ID NO: 49751 - RNA, 20 nt, synthetic construct
  source 1..20: mol_type = other RNA
tcaatcccttccccaccttt

SEQ ID NO: 49752 - RNA, 20 nt, synthetic construct
  source 1..20: mol_type = other RNA
tcaatccttgtaacttttat

SEQ ID NO: 49753 - RNA, 20 nt, synthetic construct
  source 1..20: mol_type = other RNA
tcaatctaggaggtctaaga

SEQ ID NO: 49754 - RNA, 20 nt, synthetic construct
  source 1..20: mol_type = other RNA
tcaatctcacacctgggtat

SEQ ID NO: 49755 - RNA, 20 nt, synthetic construct
  source 1..20: mol_type = other RNA
tcaatctcctgatccacctg

SEQ ID NO: 49756 - RNA, 20 nt, synthetic construct
  source 1..20: mol_type = other RNA
tcaatctggaatgcatcgtt

SEQ ID NO: 49757 - RNA, 20 nt, synthetic construct
  source 1..20: mol_type = other RNA
tcaatctggatataacaaat

SEQ ID NO: 49758 - RNA, 20 nt, synthetic construct
  source 1..20: mol_type = other RNA
tcaatctgtttcctaatcta

SEQ ID NO: 49759 - RNA, 20 nt, synthetic construct
  source 1..20: mol_type = other RNA
tcaatcttcttatttgttac

SEQ ID NO: 49760 - RNA, 20 nt, synthetic construct
  source 1..20: mol_type = other RNA
tcaatcttggaaatgatacc

SEQ ID NO: 49761 - RNA, 20 nt, synthetic construct
  source 1..20: mol_type = other RNA
tcaatgacttttatcaattc

SEQ ID NO: 49762 - RNA, 20 nt, synthetic construct
  source 1..20: mol_type = other RNA
tcaatgagggcagagataac

SEQ ID NO: 49763 - RNA, 20 nt, synthetic construct
  source 1..20: mol_type = other RNA
tcaatgatagactggattaa

SEQ ID NO: 49764 - RNA, 20 nt, synthetic construct
  source 1..20: mol_type = other RNA
tcaatgcaatacttaatagc

SEQ ID NO: 49765 - RNA, 20 nt, synthetic construct
  source 1..20: mol_type = other RNA
tcaatgcaatgcgtgtgaaa

SEQ ID NO: 49766 - RNA, 20 nt, synthetic construct
  source 1..20: mol_type = other RNA
tcaatgctacagtaagcaaa

SEQ ID NO: 49767 - RNA, 20 nt, synthetic construct
  source 1..20: mol_type = other RNA
tcaatggaaaatgtaaaaca

SEQ ID NO: 49768 - RNA, 20 nt, synthetic construct
  source 1..20: mol_type = other RNA
tcaatggggaactttatttt

SEQ ID NO: 49769 - RNA, 20 nt, synthetic construct
  source 1..20: mol_type = other RNA
tcaatggttaagactgctgt

SEQ ID NO: 49770 - RNA, 20 nt, synthetic construct
  source 1..20: mol_type = other RNA
tcaatgttggttagtgttgt

SEQ ID NO: 49771 - RNA, 20 nt, synthetic construct
  source 1..20: mol_type = other RNA
tcaatgtttggtagatttct

SEQ ID NO: 49772 - RNA, 20 nt, synthetic construct
  source 1..20: mol_type = other RNA
tcaattaagcaaccttttag

SEQ ID NO: 49773 - RNA, 20 nt, synthetic construct
  source 1..20: mol_type = other RNA
tcaattaatgcccaatcaaa

SEQ ID NO: 49774 - RNA, 20 nt, synthetic construct
  source 1..20: mol_type = other RNA
tcaattagttcctccttttg

SEQ ID NO: 49775 - RNA, 20 nt, synthetic construct
  source 1..20: mol_type = other RNA
tcaattcacaagattaatct

SEQ ID NO: 49776 - RNA, 20 nt, synthetic construct
  source 1..20: mol_type = other RNA
tcaattcagaagctaaattt

SEQ ID NO: 49777 - RNA, 20 nt, synthetic construct
  source 1..20: mol_type = other RNA
tcaattctagttaataaagg

SEQ ID NO: 49778 - RNA, 20 nt, synthetic construct
  source 1..20: mol_type = other RNA
tcaattgaccaaacatgtga

SEQ ID NO: 49779 - RNA, 20 nt, synthetic construct
  source 1..20: mol_type = other RNA
tcaattgatctgccaggaca

SEQ ID NO: 49780 - RNA, 20 nt, synthetic construct
  source 1..20: mol_type = other RNA
tcaattgtaatgtctcctct

SEQ ID NO: 49781 - RNA, 20 nt, synthetic construct
  source 1..20: mol_type = other RNA
tcaattgtcctggcagatca

SEQ ID NO: 49782 - RNA, 20 nt, synthetic construct
  source 1..20: mol_type = other RNA
tcaatttaacttctaatgcc

SEQ ID NO: 49783 - RNA, 20 nt, synthetic construct
  source 1..20: mol_type = other RNA
tcaatttcagatctctgaca

SEQ ID NO: 49784 - RNA, 20 nt, synthetic construct
  source 1..20: mol_type = other RNA
tcaatttcatcgtaaaaagc

SEQ ID NO: 49785 - RNA, 20 nt, synthetic construct
  source 1..20: mol_type = other RNA
tcaattttcatgggttgatt

SEQ ID NO: 49786 - RNA, 20 nt, synthetic construct
  source 1..20: mol_type = other RNA
tcaattttcccccaattaaa

SEQ ID NO: 49787 - RNA, 20 nt, synthetic construct
  source 1..20: mol_type = other RNA
tcacaaaaagacaagtactg

SEQ ID NO: 49788 - RNA, 20 nt, synthetic construct
  source 1..20: mol_type = other RNA
tcacaaaaagtgtgaccaca

SEQ ID NO: 49789 - RNA, 20 nt, synthetic construct
  source 1..20: mol_type = other RNA
tcacaaaatgtggatgcatg

SEQ ID NO: 49790 - RNA, 20 nt, synthetic construct
  source 1..20: mol_type = other RNA
tcacaaacaaatccttttcc

SEQ ID NO: 49791 - RNA, 20 nt, synthetic construct
  source 1..20: mol_type = other RNA
tcacaaacacaaaacaaatg

SEQ ID NO: 49792 - RNA, 20 nt, synthetic construct
  source 1..20: mol_type = other RNA
tcacaaacacacaaaccaac

SEQ ID NO: 49793 - RNA, 20 nt, synthetic construct
  source 1..20: mol_type = other RNA
tcacaaagccctcaggacca

SEQ ID NO: 49794 - RNA, 20 nt, synthetic construct
  source 1..20: mol_type = other RNA
tcacaaagctttaaactgga

SEQ ID NO: 49795 - RNA, 20 nt, synthetic construct
  source 1..20: mol_type = other RNA
tcacaacaggcctgagccgt

SEQ ID NO: 49796 - RNA, 20 nt, synthetic construct
  source 1..20: mol_type = other RNA
tcacaacgatttcttaaaaa

SEQ ID NO: 49797 - RNA, 20 nt, synthetic construct
  source 1..20: mol_type = other RNA
tcacaacttgtatgaaatta

SEQ ID NO: 49798 - RNA, 20 nt, synthetic construct
  source 1..20: mol_type = other RNA
tcacaagattaatcttgcaa

SEQ ID NO: 49799 - RNA, 20 nt, synthetic construct
  source 1..20: mol_type = other RNA
tcacaagccagggtctgtct

SEQ ID NO: 49800 - RNA, 20 nt, synthetic construct
  source 1..20: mol_type = other RNA
tcacaaggactggcttcagt

SEQ ID NO: 49801 - RNA, 20 nt, synthetic construct
  source 1..20: mol_type = other RNA
tcacaaggtcagaagtttgg

SEQ ID NO: 49802 - RNA, 20 nt, synthetic construct
  source 1..20: mol_type = other RNA
tcacaatgcgtttgttagat

SEQ ID NO: 49803 - RNA, 20 nt, synthetic construct
  source 1..20: mol_type = other RNA
tcacaattcacagaatatac

SEQ ID NO: 49804 - RNA, 20 nt, synthetic construct
  source 1..20: mol_type = other RNA
tcacacaatcttgagacgga

SEQ ID NO: 49805 - RNA, 20 nt, synthetic construct
  source 1..20: mol_type = other RNA
tcacacaccactacacccgg

SEQ ID NO: 49806 - RNA, 20 nt, synthetic construct
  source 1..20: mol_type = other RNA
tcacacaccctttcttagga

SEQ ID NO: 49807 - RNA, 20 nt, synthetic construct
  source 1..20: mol_type = other RNA
tcacacattaactatggaca

SEQ ID NO: 49808 - RNA, 20 nt, synthetic construct
  source 1..20: mol_type = other RNA
tcacaccatttagatcatct

SEQ ID NO: 49809 - RNA, 20 nt, synthetic construct
  source 1..20: mol_type = other RNA
tcacacccagtatacacgta

SEQ ID NO: 49810 - RNA, 20 nt, synthetic construct
  source 1..20: mol_type = other RNA
tcacaccctcctaccttcca

SEQ ID NO: 49811 - RNA, 20 nt, synthetic construct
  source 1..20: mol_type = other RNA
tcacaccgctgcattccagc

SEQ ID NO: 49812 - RNA, 20 nt, synthetic construct
  source 1..20: mol_type = other RNA
tcacacctaggcctatttta

SEQ ID NO: 49813 - RNA, 20 nt, synthetic construct
  source 1..20: mol_type = other RNA
tcacacctgggtatacagca

SEQ ID NO: 49814 - RNA, 20 nt, synthetic construct
  source 1..20: mol_type = other RNA
tcacacgagaaggacagctt

SEQ ID NO: 49815 - RNA, 20 nt, synthetic construct
  source 1..20: mol_type = other RNA
tcacacgcattgcattgact

SEQ ID NO: 49816 - RNA, 20 nt, synthetic construct
  source 1..20: mol_type = other RNA
tcacacggaaaacattattt

SEQ ID NO: 49817 - RNA, 20 nt, synthetic construct
  source 1..20: mol_type = other RNA
tcacactagtcaccctacag

SEQ ID NO: 49818 - RNA, 20 nt, synthetic construct
  source 1..20: mol_type = other RNA
tcacactataacagatggaa

SEQ ID NO: 49819 - RNA, 20 nt, synthetic construct
  source 1..20: mol_type = other RNA
tcacactcgcactccacttc

SEQ ID NO: 49820 - RNA, 20 nt, synthetic construct
  source 1..20: mol_type = other RNA
tcacactgattttctgcttc

SEQ ID NO: 49821 - RNA, 20 nt, synthetic construct
  source 1..20: mol_type = other RNA
tcacactgctcctgcctttg

SEQ ID NO: 49822 - RNA, 20 nt, synthetic construct
  source 1..20: mol_type = other RNA
tcacactggtcactggccac

SEQ ID NO: 49823 - RNA, 20 nt, synthetic construct
  source 1..20: mol_type = other RNA
tcacactgttgtccaggcca

SEQ ID NO: 49824 - RNA, 20 nt, synthetic construct
  source 1..20: mol_type = other RNA
tcacactgtttgattactgt

SEQ ID NO: 49825 - RNA, 20 nt, synthetic construct
  source 1..20: mol_type = other RNA
tcacacttactaaatgatct

SEQ ID NO: 49826 - RNA, 20 nt, synthetic construct
  source 1..20: mol_type = other RNA
tcacacttagttcaagatgc

SEQ ID NO: 49827 - RNA, 20 nt, synthetic construct
  source 1..20: mol_type = other RNA
tcacacttgatggtttgggg

SEQ ID NO: 49828 - RNA, 20 nt, synthetic construct
  source 1..20: mol_type = other RNA
tcacactttttgtgagtttt

SEQ ID NO: 49829 - RNA, 20 nt, synthetic construct
  source 1..20: mol_type = other RNA
tcacagaaacagaaaaatcc

SEQ ID NO: 49830 - RNA, 20 nt, synthetic construct
  source 1..20: mol_type = other RNA
tcacagaactgtcactgaca

SEQ ID NO: 49831 - RNA, 20 nt, synthetic construct
  source 1..20: mol_type = other RNA
tcacagaagtgttttgatag

SEQ ID NO: 49832 - RNA, 20 nt, synthetic construct
  source 1..20: mol_type = other RNA
tcacagaatatactcagaaa

SEQ ID NO: 49833 - RNA, 20 nt, synthetic construct
  source 1..20: mol_type = other RNA
tcacagacagggaatgggga

SEQ ID NO: 49834 - RNA, 20 nt, synthetic construct
  source 1..20: mol_type = other RNA
tcacagacagtaatttatac

SEQ ID NO: 49835 - RNA, 20 nt, synthetic construct
  source 1..20: mol_type = other RNA
tcacagacgcaaaggatgtc

SEQ ID NO: 49836 - RNA, 20 nt, synthetic construct
  source 1..20: mol_type = other RNA
tcacagatacaactctgacc

SEQ ID NO: 49837 - RNA, 20 nt, synthetic construct
  source 1..20: mol_type = other RNA
tcacagcatgaatacctatt

SEQ ID NO: 49838 - RNA, 20 nt, synthetic construct
  source 1..20: mol_type = other RNA
tcacagcgtgcaccttacat

SEQ ID NO: 49839 - RNA, 20 nt, synthetic construct
  source 1..20: mol_type = other RNA
tcacagcttaccaagtgccg

SEQ ID NO: 49840 - RNA, 20 nt, synthetic construct
  source 1..20: mol_type = other RNA
tcacaggaaagatgtctttt

SEQ ID NO: 49841 - RNA, 20 nt, synthetic construct
  source 1..20: mol_type = other RNA
tcacaggcgttgagccatca

SEQ ID NO: 49842 - RNA, 20 nt, synthetic construct
  source 1..20: mol_type = other RNA
tcacaggctttcctacaata

SEQ ID NO: 49843 - RNA, 20 nt, synthetic construct
  source 1..20: mol_type = other RNA
tcacagggcagggagagaga

SEQ ID NO: 49844 - RNA, 20 nt, synthetic construct
  source 1..20: mol_type = other RNA
tcacaggtttaggtttttct

SEQ ID NO: 49845 - RNA, 20 nt, synthetic construct
  source 1..20: mol_type = other RNA
tcacagtacgcttttatgtt

SEQ ID NO: 49846 - RNA, 20 nt, synthetic construct
  source 1..20: mol_type = other RNA
tcacagtagaagactcagca

SEQ ID NO: 49847 - RNA, 20 nt, synthetic construct
  source 1..20: mol_type = other RNA
tcacagtatgcacaaataat

SEQ ID NO: 49848 - RNA, 20 nt, synthetic construct
  source 1..20: mol_type = other RNA
tcacagtcacaaagctttaa

SEQ ID NO: 49849 - RNA, 20 nt, synthetic construct
  source 1..20: mol_type = other RNA
tcacagtccactcacctgtc

SEQ ID NO: 49850 - RNA, 20 nt, synthetic construct
  source 1..20: mol_type = other RNA
tcacagtccaggaacttaca

SEQ ID NO: 49851 - RNA, 20 nt, synthetic construct
  source 1..20: mol_type = other RNA
tcacagtgaattctgactta

SEQ ID NO: 49852 - RNA, 20 nt, synthetic construct
  source 1..20: mol_type = other RNA
tcacagtgaggacgctgatg

SEQ ID NO: 49853 - RNA, 20 nt, synthetic construct
  source 1..20: mol_type = other RNA
tcacagtgctccatagcttc

SEQ ID NO: 49854 - RNA, 20 nt, synthetic construct
  source 1..20: mol_type = other RNA
tcacataaatttgccacatt

SEQ ID NO: 49855 - RNA, 20 nt, synthetic construct
  source 1..20: mol_type = other RNA
tcacataaggtatatttctg

SEQ ID NO: 49856 - RNA, 20 nt, synthetic construct
  source 1..20: mol_type = other RNA
tcacatagaagcgctcttca

SEQ ID NO: 49857 - RNA, 20 nt, synthetic construct
  source 1..20: mol_type = other RNA
tcacatagacctgaatgact

SEQ ID NO: 49858 - RNA, 20 nt, synthetic construct
  source 1..20: mol_type = other RNA
tcacatatctaattaacatc

SEQ ID NO: 49859 - RNA, 20 nt, synthetic construct
  source 1..20: mol_type = other RNA
tcacatattttatgctttgt

SEQ ID NO: 49860 - RNA, 20 nt, synthetic construct
  source 1..20: mol_type = other RNA
tcacatcagttaccaccaag

SEQ ID NO: 49861 - RNA, 20 nt, synthetic construct
  source 1..20: mol_type = other RNA
tcacatgtttggtcaattga

SEQ ID NO: 49862 - RNA, 20 nt, synthetic construct
  source 1..20: mol_type = other RNA
tcacattcacagcgtgcacc

SEQ ID NO: 49863 - RNA, 20 nt, synthetic construct
  source 1..20: mol_type = other RNA
tcacattcagaggtatttgg

SEQ ID NO: 49864 - RNA, 20 nt, synthetic construct
  source 1..20: mol_type = other RNA
tcacattctagtgatgggag

SEQ ID NO: 49865 - RNA, 20 nt, synthetic construct
  source 1..20: mol_type = other RNA
tcacattctgcctgcagact

SEQ ID NO: 49866 - RNA, 20 nt, synthetic construct
  source 1..20: mol_type = other RNA
tcacattcttcaccattcca

SEQ ID NO: 49867 - RNA, 20 nt, synthetic construct
  source 1..20: mol_type = other RNA
tcacattgcacagtctcccc

SEQ ID NO: 49868 - RNA, 20 nt, synthetic construct
  source 1..20: mol_type = other RNA
tcacattgtatttctgttag

SEQ ID NO: 49869 - RNA, 20 nt, synthetic construct
  source 1..20: mol_type = other RNA
tcacatttaagaagggaaca

SEQ ID NO: 49870 - RNA, 20 nt, synthetic construct
  source 1..20: mol_type = other RNA
tcacatttagtttcatctat

SEQ ID NO: 49871 - RNA, 20 nt, synthetic construct
  source 1..20: mol_type = other RNA
tcacatttcgccttctcaga

SEQ ID NO: 49872 - RNA, 20 nt, synthetic construct
  source 1..20: mol_type = other RNA
tcacatttgaaagaaagaag

SEQ ID NO: 49873 - RNA, 20 nt, synthetic construct
  source 1..20: mol_type = other RNA
tcacatttgctttactactg

SEQ ID NO: 49874 - RNA, 20 nt, synthetic construct
  source 1..20: mol_type = other RNA
tcacattttcttatctaggc

SEQ ID NO: 49875 - RNA, 20 nt, synthetic construct
  source 1..20: mol_type = other RNA
tcacattttgaatcatggga

SEQ ID NO: 49876 - RNA, 20 nt, synthetic construct
  source 1..20: mol_type = other RNA
tcaccaaacaccttacactc

SEQ ID NO: 49877 - RNA, 20 nt, synthetic construct
  source 1..20: mol_type = other RNA
tcaccaaacgtttagatgaa

SEQ ID NO: 49878 - RNA, 20 nt, synthetic construct
  source 1..20: mol_type = other RNA
tcaccaaagacttcaggaac

SEQ ID NO: 49879 - RNA, 20 nt, synthetic construct
  source 1..20: mol_type = other RNA
tcaccaaagatttactaaac

SEQ ID NO: 49880 - RNA, 20 nt, synthetic construct
  source 1..20: mol_type = other RNA
tcaccaacatccacagcttt

SEQ ID NO: 49881 - RNA, 20 nt, synthetic construct
  source 1..20: mol_type = other RNA
tcaccaactgaagcggggct

SEQ ID NO: 49882 - RNA, 20 nt, synthetic construct
  source 1..20: mol_type = other RNA
tcaccaattgttaacatttc

SEQ ID NO: 49883 - RNA, 20 nt, synthetic construct
  source 1..20: mol_type = other RNA
tcaccagcggcatacaggag

SEQ ID NO: 49884 - RNA, 20 nt, synthetic construct
  source 1..20: mol_type = other RNA
tcaccaggctggaatgcagc

SEQ ID NO: 49885 - RNA, 20 nt, synthetic construct
  source 1..20: mol_type = other RNA
tcaccaggggctgggggatc

SEQ ID NO: 49886 - RNA, 20 nt, synthetic construct
  source 1..20: mol_type = other RNA
tcaccagtttctaattagaa

SEQ ID NO: 49887 - RNA, 20 nt, synthetic construct
  source 1..20: mol_type = other RNA
tcaccatcatcatcaggctg

SEQ ID NO: 49888 - RNA, 20 nt, synthetic construct
  source 1..20: mol_type = other RNA
tcaccatctgataagcccaa

SEQ ID NO: 49889 - RNA, 20 nt, synthetic construct
  source 1..20: mol_type = other RNA
tcaccatgtgcttatcaata

SEQ ID NO: 49890 - RNA, 20 nt, synthetic construct
  source 1..20: mol_type = other RNA
tcaccattccagccattctc

SEQ ID NO: 49891 - RNA, 20 nt, synthetic construct
  source 1..20: mol_type = other RNA
tcacccaagaatttcatgcc

SEQ ID NO: 49892 - RNA, 20 nt, synthetic construct
  source 1..20: mol_type = other RNA
tcacccaagccacagcgtgg

SEQ ID NO: 49893 - RNA, 20 nt, synthetic construct
  source 1..20: mol_type = other RNA
tcacccacgtggagtgcaat

SEQ ID NO: 49894 - RNA, 20 nt, synthetic construct
  source 1..20: mol_type = other RNA
tcacccagaccaagtttaac

SEQ ID NO: 49895 - RNA, 20 nt, synthetic construct
  source 1..20: mol_type = other RNA
tcacccagctcgaccagggg

SEQ ID NO: 49896 - RNA, 20 nt, synthetic construct
  source 1..20: mol_type = other RNA
tcaccctacagactcaataa

SEQ ID NO: 49897 - RNA, 20 nt, synthetic construct
  source 1..20: mol_type = other RNA
tcaccctcaggactctgctc

SEQ ID NO: 49898 - RNA, 20 nt, synthetic construct
  source 1..20: mol_type = other RNA
tcaccctgcgaaggcaatgt

SEQ ID NO: 49899 - RNA, 20 nt, synthetic construct
  source 1..20: mol_type = other RNA
tcacccttataaaatgaggg

SEQ ID NO: 49900 - RNA, 20 nt, synthetic construct
  source 1..20: mol_type = other RNA
tcacccttgtaatcaagtat

SEQ ID NO: 49901 - RNA, 20 nt, synthetic construct
  source 1..20: mol_type = other RNA
tcaccgcaacatctgcctcc

SEQ ID NO: 49902 - RNA, 20 nt, synthetic construct
  source 1..20: mol_type = other RNA
tcaccgtgcaactagagaaa

SEQ ID NO: 49903 - RNA, 20 nt, synthetic construct
  source 1..20: mol_type = other RNA
tcacctagcctctctgggct

SEQ ID NO: 49904 - RNA, 20 nt, synthetic construct
  source 1..20: mol_type = other RNA
tcacctagctgttttcatgc

SEQ ID NO: 49905 - RNA, 20 nt, synthetic construct
  source 1..20: mol_type = other RNA
tcacctcaaggcagaacaca

SEQ ID NO: 49906 - RNA, 20 nt, synthetic construct
  source 1..20: mol_type = other RNA
tcacctcaaggccaactgtc

SEQ ID NO: 49907 - RNA, 20 nt, synthetic construct
  source 1..20: mol_type = other RNA
tcacctcaagtgatgcaact

SEQ ID NO: 49908 - RNA, 20 nt, synthetic construct
  source 1..20: mol_type = other RNA
tcacctcacattcacagcgt

SEQ ID NO: 49909 - RNA, 20 nt, synthetic construct
  source 1..20: mol_type = other RNA
tcacctctacacaaaaatcc

SEQ ID NO: 49910 - RNA, 20 nt, synthetic construct
  source 1..20: mol_type = other RNA
tcacctctccgggtaaaaag

SEQ ID NO: 49911 - RNA, 20 nt, synthetic construct
  source 1..20: mol_type = other RNA
tcacctctggactcagggtc

SEQ ID NO: 49912 - RNA, 20 nt, synthetic construct
  source 1..20: mol_type = other RNA
tcacctgtcatgtcaaattt

SEQ ID NO: 49913 - RNA, 20 nt, synthetic construct
  source 1..20: mol_type = other RNA
tcaccttctgctgggcccac

SEQ ID NO: 49914 - RNA, 20 nt, synthetic construct
  source 1..20: mol_type = other RNA
tcacgaaagcggtcaacgca

SEQ ID NO: 49915 - RNA, 20 nt, synthetic construct
  source 1..20: mol_type = other RNA
tcacgagactgttagggact

SEQ ID NO: 49916 - RNA, 20 nt, synthetic construct
  source 1..20: mol_type = other RNA
tcacgatactttttattttc

SEQ ID NO: 49917 - RNA, 20 nt, synthetic construct
  source 1..20: mol_type = other RNA
tcacgatgcttaggtaagaa

SEQ ID NO: 49918 - RNA, 20 nt, synthetic construct
  source 1..20: mol_type = other RNA
tcacgattctgacccagagc

SEQ ID NO: 49919 - RNA, 20 nt, synthetic construct
  source 1..20: mol_type = other RNA
tcacgcacagggagatactt

SEQ ID NO: 49920 - RNA, 20 nt, synthetic construct
  source 1..20: mol_type = other RNA
tcacgccactgcattccgcc

SEQ ID NO: 49921 - RNA, 20 nt, synthetic construct
  source 1..20: mol_type = other RNA
tcacggctgattataacctt

SEQ ID NO: 49922 - RNA, 20 nt, synthetic construct
  source 1..20: mol_type = other RNA
tcacggtgccctacatatgg

SEQ ID NO: 49923 - RNA, 20 nt, synthetic construct
  source 1..20: mol_type = other RNA
tcacgtcaccgcaacctccg

SEQ ID NO: 49924 - RNA, 20 nt, synthetic construct
  source 1..20: mol_type = other RNA
tcacgtgcattcatactgaa

SEQ ID NO: 49925 - RNA, 20 nt, synthetic construct
  source 1..20: mol_type = other RNA
tcacgtggcgctccctctgt

SEQ ID NO: 49926 - RNA, 20 nt, synthetic construct
  source 1..20: mol_type = other RNA
tcacgttaccctctggaatg

SEQ ID NO: 49927 - RNA, 20 nt, synthetic construct
  source 1..20: mol_type = other RNA
tcactaaaaatcagattaag

SEQ ID NO: 49928 - RNA, 20 nt, synthetic construct
  source 1..20: mol_type = other RNA
tcactaaataaacacttgaa

SEQ ID NO: 49929 - RNA, 20 nt, synthetic construct
  source 1..20: mol_type = other RNA
tcactaagagtgaaaaggca

SEQ ID NO: 49930 - RNA, 20 nt, synthetic construct
  source 1..20: mol_type = other RNA
tcactaagtcagaattcact

SEQ ID NO: 49931 - RNA, 20 nt, synthetic construct
  source 1..20: mol_type = other RNA
tcactaatgcctcaaattag

SEQ ID NO: 49932 - RNA, 20 nt, synthetic construct
  source 1..20: mol_type = other RNA
tcactaattcaagtgtttat

SEQ ID NO: 49933 - RNA, 20 nt, synthetic construct
  source 1..20: mol_type = other RNA
tcactacagcatattagctg

SEQ ID NO: 49934 - RNA, 20 nt, synthetic construct
  source 1..20: mol_type = other RNA
tcactagaatgtgacttcgt

SEQ ID NO: 49935 - RNA, 20 nt, synthetic construct
  source 1..20: mol_type = other RNA
tcactagacacatttttgac

SEQ ID NO: 49936 - RNA, 20 nt, synthetic construct
  source 1..20: mol_type = other RNA
tcactagagcttcaacctcc

SEQ ID NO: 49937 - RNA, 20 nt, synthetic construct
  source 1..20: mol_type = other RNA
tcactagatctcttttcctt

SEQ ID NO: 49938 - RNA, 20 nt, synthetic construct
  source 1..20: mol_type = other RNA
tcactagctattagagaaat

SEQ ID NO: 49939 - RNA, 20 nt, synthetic construct
  source 1..20: mol_type = other RNA
tcactagtgggtcgggtgtc

SEQ ID NO: 49940 - RNA, 20 nt, synthetic construct
  source 1..20: mol_type = other RNA
tcactattaaccatatggtt

SEQ ID NO: 49941 - RNA, 20 nt, synthetic construct
  source 1..20: mol_type = other RNA
tcactcacctagctgttttc

SEQ ID NO: 49942 - RNA, 20 nt, synthetic construct
  source 1..20: mol_type = other RNA
tcactcactggcctgagctc

SEQ ID NO: 49943 - RNA, 20 nt, synthetic construct
  source 1..20: mol_type = other RNA
tcactcagcataattggtta

SEQ ID NO: 49944 - RNA, 20 nt, synthetic construct
  source 1..20: mol_type = other RNA
tcactcatttccgttgctgc

SEQ ID NO: 49945 - RNA, 20 nt, synthetic construct
  source 1..20: mol_type = other RNA
tcactccaaagcaaacgtgc

SEQ ID NO: 49946 - RNA, 20 nt, synthetic construct
  source 1..20: mol_type = other RNA
tcactccatttgtggcatct

SEQ ID NO: 49947 - RNA, 20 nt, synthetic construct
  source 1..20: mol_type = other RNA
tcactcctcattcacactag

SEQ ID NO: 49948 - RNA, 20 nt, synthetic construct
  source 1..20: mol_type = other RNA
tcactctaatatggttccta

SEQ ID NO: 49949 - RNA, 20 nt, synthetic construct
  source 1..20: mol_type = other RNA
tcactctcaatagtgtcctt

SEQ ID NO: 49950 - RNA, 20 nt, synthetic construct
  source 1..20: mol_type = other RNA
tcactctctttaggaagctt

SEQ ID NO: 49951 - RNA, 20 nt, synthetic construct
  source 1..20: mol_type = other RNA
tcactcttaaaaggagatat

SEQ ID NO: 49952 - RNA, 20 nt, synthetic construct
  source 1..20: mol_type = other RNA
tcactcttaccaaggctgga

SEQ ID NO: 49953 - RNA, 20 nt, synthetic construct
  source 1..20: mol_type = other RNA
tcactcttagtgatgtcttt

SEQ ID NO: 49954 - RNA, 20 nt, synthetic construct
  source 1..20: mol_type = other RNA
tcactcttctgcaagttgct

SEQ ID NO: 49955 - RNA, 20 nt, synthetic construct
  source 1..20: mol_type = other RNA
tcactcttttaaggtttaga

SEQ ID NO: 49956 - RNA, 20 nt, synthetic construct
  source 1..20: mol_type = other RNA
tcactgaaaccctcacgaaa

SEQ ID NO: 49957 - RNA, 20 nt, synthetic construct
  source 1..20: mol_type = other RNA
tcactgacacaggctgaagg

SEQ ID NO: 49958 - RNA, 20 nt, synthetic construct
  source 1..20: mol_type = other RNA
tcactgactacacatacaca

SEQ ID NO: 49959 - RNA, 20 nt, synthetic construct
  source 1..20: mol_type = other RNA
tcactgactggctgtgccaa

SEQ ID NO: 49960 - RNA, 20 nt, synthetic construct
  source 1..20: mol_type = other RNA
tcactgcaagctccgcctcc

SEQ ID NO: 49961 - RNA, 20 nt, synthetic construct
  source 1..20: mol_type = other RNA
tcactgcagaattactgaca

SEQ ID NO: 49962 - RNA, 20 nt, synthetic construct
  source 1..20: mol_type = other RNA
tcactgctcagtccctcacc

SEQ ID NO: 49963 - RNA, 20 nt, synthetic construct
  source 1..20: mol_type = other RNA
tcactgctgatgtaagtggg

SEQ ID NO: 49964 - RNA, 20 nt, synthetic construct
  source 1..20: mol_type = other RNA
tcactggagaattctactaa

SEQ ID NO: 49965 - RNA, 20 nt, synthetic construct
  source 1..20: mol_type = other RNA
tcactggatagaagtgtatc

SEQ ID NO: 49966 - RNA, 20 nt, synthetic construct
  source 1..20: mol_type = other RNA
tcactggccactgattgagt

SEQ ID NO: 49967 - RNA, 20 nt, synthetic construct
  source 1..20: mol_type = other RNA
tcactggccagcattactta

SEQ ID NO: 49968 - RNA, 20 nt, synthetic construct
  source 1..20: mol_type = other RNA
tcactggcctgagctctcag

SEQ ID NO: 49969 - RNA, 20 nt, synthetic construct
  source 1..20: mol_type = other RNA
tcactggctagtaggcaaca

SEQ ID NO: 49970 - RNA, 20 nt, synthetic construct
  source 1..20: mol_type = other RNA
tcactgtaagaataatgtct

SEQ ID NO: 49971 - RNA, 20 nt, synthetic construct
  source 1..20: mol_type = other RNA
tcactgtactactgacctgg

SEQ ID NO: 49972 - RNA, 20 nt, synthetic construct
  source 1..20: mol_type = other RNA
tcactgtctccatgtcctca

SEQ ID NO: 49973 - RNA, 20 nt, synthetic construct
  source 1..20: mol_type = other RNA
tcactgtgactccaaagcaa

SEQ ID NO: 49974 - RNA, 20 nt, synthetic construct
  source 1..20: mol_type = other RNA
tcactgtgatacctagtacg

SEQ ID NO: 49975 - RNA, 20 nt, synthetic construct
  source 1..20: mol_type = other RNA
tcactgtggaaaacagtttg

SEQ ID NO: 49976 - RNA, 20 nt, synthetic construct
  source 1..20: mol_type = other RNA
tcactgtttggacagtaaaa

SEQ ID NO: 49977 - RNA, 20 nt, synthetic construct
  source 1..20: mol_type = other RNA
tcacttacttgagccccaga

SEQ ID NO: 49978 - RNA, 20 nt, synthetic construct
  source 1..20: mol_type = other RNA
tcacttattagcaaagaggc

SEQ ID NO: 49979 - RNA, 20 nt, synthetic construct
  source 1..20: mol_type = other RNA
tcacttccaagtcccggaag

SEQ ID NO: 49980 - RNA, 20 nt, synthetic construct
  source 1..20: mol_type = other RNA
tcacttcctctcttaaatcc

SEQ ID NO: 49981 - RNA, 20 nt, synthetic construct
  source 1..20: mol_type = other RNA
tcacttcgttcagtttagta

SEQ ID NO: 49982 - RNA, 20 nt, synthetic construct
  source 1..20: mol_type = other RNA
tcacttctctgctgctgaaa

SEQ ID NO: 49983 - RNA, 20 nt, synthetic construct
  source 1..20: mol_type = other RNA
tcacttcttagtaaatatcc

SEQ ID NO: 49984 - RNA, 20 nt, synthetic construct
  source 1..20: mol_type = other RNA
tcacttcttattggttatct

SEQ ID NO: 49985 - RNA, 20 nt, synthetic construct
  source 1..20: mol_type = other RNA
tcacttgaaacctgccatgg

SEQ ID NO: 49986 - RNA, 20 nt, synthetic construct
  source 1..20: mol_type = other RNA
tcacttgaggtgattaaagg

SEQ ID NO: 49987 - RNA, 20 nt, synthetic construct
  source 1..20: mol_type = other RNA
tcacttgattactttacagt

SEQ ID NO: 49988 - RNA, 20 nt, synthetic construct
  source 1..20: mol_type = other RNA
tcacttgtttcttttcactc

SEQ ID NO: 49989 - RNA, 20 nt, synthetic construct
  source 1..20: mol_type = other RNA
tcactttcctattcacactg

SEQ ID NO: 49990 - RNA, 20 nt, synthetic construct
  source 1..20: mol_type = other RNA
tcactttcgtcatctataag

SEQ ID NO: 49991 - RNA, 20 nt, synthetic construct
  source 1..20: mol_type = other RNA
tcactttgatcatacacatc

SEQ ID NO: 49992 - RNA, 20 nt, synthetic construct
  source 1..20: mol_type = other RNA
tcactttgggattagcttat

SEQ ID NO: 49993 - RNA, 20 nt, synthetic construct
  source 1..20: mol_type = other RNA
tcactttgttgctcaggctg

SEQ ID NO: 49994 - RNA, 20 nt, synthetic construct
  source 1..20: mol_type = other RNA
tcacttttctggttttctgg

SEQ ID NO: 49995 - RNA, 20 nt, synthetic construct
  source 1..20: mol_type = other RNA
tcacttttgagttcagaaag

SEQ ID NO: 49996 - RNA, 20 nt, synthetic construct
  source 1..20: mol_type = other RNA
tcacttttggaatttaaggg

SEQ ID NO: 49997 - RNA, 20 nt, synthetic construct
  source 1..20: mol_type = other RNA
tcacttttgtgcaacataaa

SEQ ID NO: 49998 - RNA, 20 nt, synthetic construct
  source 1..20: mol_type = other RNA
tcactttttattctgttcta

SEQ ID NO: 49999 - RNA, 20 nt, synthetic construct
  source 1..20: mol_type = other RNA
tcactttttgtatttcctta

SEQ ID NO: 50000 - RNA, 20 nt, synthetic construct
  source 1..20: mol_type = other RNA
tcagaaaagatcagtaaaat

SEQ ID NO: 50001 - RNA, 20 nt, synthetic construct
  source 1..20: mol_type = other RNA
tcagaaaaggctgagacctc

SEQ ID NO: 50002 - RNA, 20 nt, synthetic construct
  source 1..20: mol_type = other RNA
tcagaaaattttcttttgtg

SEQ ID NO: 50003 - RNA, 20 nt, synthetic construct
  source 1..20: mol_type = other RNA
tcagaaacaacaacaacaaa

SEQ ID NO: 50004 - RNA, 20 nt, synthetic construct
  source 1..20: mol_type = other RNA
tcagaaacaccaacacaaag

SEQ ID NO: 50005 - RNA, 20 nt, synthetic construct
  source 1..20: mol_type = other RNA
tcagaaaccatcgttcacac

SEQ ID NO: 50006 - RNA, 20 nt, synthetic construct
  source 1..20: mol_type = other RNA
tcagaaactgacaggactcc

SEQ ID NO: 50007 - RNA, 20 nt, synthetic construct
  source 1..20: mol_type = other RNA
tcagaaagagaatagcagaa

SEQ ID NO: 50008 - RNA, 20 nt, synthetic construct
  source 1..20: mol_type = other RNA
tcagaaagattaatccttgt

SEQ ID NO: 50009 - RNA, 20 nt, synthetic construct
  source 1..20: mol_type = other RNA
tcagaaatagactcccaact

SEQ ID NO: 50010 - RNA, 20 nt, synthetic construct
  source 1..20: mol_type = other RNA
tcagaaatgtttaattccta

SEQ ID NO: 50011 - RNA, 20 nt, synthetic construct
  source 1..20: mol_type = other RNA
tcagaaattataagcttcct

SEQ ID NO: 50012 - RNA, 20 nt, synthetic construct
  source 1..20: mol_type = other RNA
tcagaactcttctccaagga

SEQ ID NO: 50013 - RNA, 20 nt, synthetic construct
  source 1..20: mol_type = other RNA
tcagaacttgacaagtatat

SEQ ID NO: 50014 - RNA, 20 nt, synthetic construct
  source 1..20: mol_type = other RNA
tcagaagaaattacttcttt

SEQ ID NO: 50015 - RNA, 20 nt, synthetic construct
  source 1..20: mol_type = other RNA
tcagaagagcactatgtaaa

SEQ ID NO: 50016 - RNA, 20 nt, synthetic construct
  source 1..20: mol_type = other RNA
tcagaagaggataaggggca

SEQ ID NO: 50017 - RNA, 20 nt, synthetic construct
  source 1..20: mol_type = other RNA
tcagaagcacaccaaggttt

SEQ ID NO: 50018 - RNA, 20 nt, synthetic construct
  source 1..20: mol_type = other RNA
tcagaagccctgcagccaga

SEQ ID NO: 50019 - RNA, 20 nt, synthetic construct
  source 1..20: mol_type = other RNA
tcagaagctaaattttcata

SEQ ID NO: 50020 - RNA, 20 nt, synthetic construct
  source 1..20: mol_type = other RNA
tcagaagctatagctgagaa

SEQ ID NO: 50021 - RNA, 20 nt, synthetic construct
  source 1..20: mol_type = other RNA
tcagaagctttcagacttaa

SEQ ID NO: 50022 - RNA, 20 nt, synthetic construct
  source 1..20: mol_type = other RNA
tcagaaggagtccagtcctg

SEQ ID NO: 50023 - RNA, 20 nt, synthetic construct
  source 1..20: mol_type = other RNA
tcagaagtactactcattaa

SEQ ID NO: 50024 - RNA, 20 nt, synthetic construct
  source 1..20: mol_type = other RNA
tcagaagtgctgacttggca

SEQ ID NO: 50025 - RNA, 20 nt, synthetic construct
  source 1..20: mol_type = other RNA
tcagaagtttggaaccagcc

SEQ ID NO: 50026 - RNA, 20 nt, synthetic construct
  source 1..20: mol_type = other RNA
tcagaatacaaaaatgacac

SEQ ID NO: 50027 - RNA, 20 nt, synthetic construct
  source 1..20: mol_type = other RNA
tcagaataccagagattggg

SEQ ID NO: 50028 - RNA, 20 nt, synthetic construct
  source 1..20: mol_type = other RNA
tcagaatcgtgatagtcttc

SEQ ID NO: 50029 - RNA, 20 nt, synthetic construct
  source 1..20: mol_type = other RNA
tcagaattagaaagctggac

SEQ ID NO: 50030 - RNA, 20 nt, synthetic construct
  source 1..20: mol_type = other RNA
tcagaattcactgtgactcc

SEQ ID NO: 50031 - RNA, 20 nt, synthetic construct
  source 1..20: mol_type = other RNA
tcagaattccatcagtggtt

SEQ ID NO: 50032 - RNA, 20 nt, synthetic construct
  source 1..20: mol_type = other RNA
tcagaattccattccttttc

SEQ ID NO: 50033 - RNA, 20 nt, synthetic construct
  source 1..20: mol_type = other RNA
tcagaatttgaggtcttcta

SEQ ID NO: 50034 - RNA, 20 nt, synthetic construct
  source 1..20: mol_type = other RNA
tcagacaacacattaataag

SEQ ID NO: 50035 - RNA, 20 nt, synthetic construct
  source 1..20: mol_type = other RNA
tcagacacactagctgaccc

SEQ ID NO: 50036 - RNA, 20 nt, synthetic construct
  source 1..20: mol_type = other RNA
tcagacacctacattaatct

SEQ ID NO: 50037 - RNA, 20 nt, synthetic construct
  source 1..20: mol_type = other RNA
tcagactaagacactagcta

SEQ ID NO: 50038 - RNA, 20 nt, synthetic construct
  source 1..20: mol_type = other RNA
tcagactcattgcctataga

SEQ ID NO: 50039 - RNA, 20 nt, synthetic construct
  source 1..20: mol_type = other RNA
tcagactgtattaccagctt

SEQ ID NO: 50040 - RNA, 20 nt, synthetic construct
  source 1..20: mol_type = other RNA
tcagacttaactataggagt

SEQ ID NO: 50041 - RNA, 20 nt, synthetic construct
  source 1..20: mol_type = other RNA
tcagagacacatactgaaag

SEQ ID NO: 50042 - RNA, 20 nt, synthetic construct
  source 1..20: mol_type = other RNA
tcagagagacctgaagactg

SEQ ID NO: 50043 - RNA, 20 nt, synthetic construct
  source 1..20: mol_type = other RNA
tcagagaggctttttattag

SEQ ID NO: 50044 - RNA, 20 nt, synthetic construct
  source 1..20: mol_type = other RNA
tcagagatctgaaattgact

SEQ ID NO: 50045 - RNA, 20 nt, synthetic construct
  source 1..20: mol_type = other RNA
tcagagattttcccaaagat

SEQ ID NO: 50046 - RNA, 20 nt, synthetic construct
  source 1..20: mol_type = other RNA
tcagagcagcactgatgtgt

SEQ ID NO: 50047 - RNA, 20 nt, synthetic construct
  source 1..20: mol_type = other RNA
tcagagcatgtcccctggag

SEQ ID NO: 50048 - RNA, 20 nt, synthetic construct
  source 1..20: mol_type = other RNA
tcagagctttgttatgaaaa

SEQ ID NO: 50049 - RNA, 20 nt, synthetic construct
  source 1..20: mol_type = other RNA
tcagaggagcagttactcct

SEQ ID NO: 50050 - RNA, 20 nt, synthetic construct
  source 1..20: mol_type = other RNA
tcagaggccctggtgctttc

SEQ ID NO: 50051 - RNA, 20 nt, synthetic construct
  source 1..20: mol_type = other RNA
tcagagggaaactgtttttg

SEQ ID NO: 50052 - RNA, 20 nt, synthetic construct
  source 1..20: mol_type = other RNA
tcagaggtatttggggctag

SEQ ID NO: 50053 - RNA, 20 nt, synthetic construct
  source 1..20: mol_type = other RNA
tcagaggtctgttactcccg

SEQ ID NO: 50054 - RNA, 20 nt, synthetic construct
  source 1..20: mol_type = other RNA
tcagagtatatatgctccct

SEQ ID NO: 50055 - RNA, 20 nt, synthetic construct
  source 1..20: mol_type = other RNA
tcagagtgaacaggcaacct

SEQ ID NO: 50056 - RNA, 20 nt, synthetic construct
  source 1..20: mol_type = other RNA
tcagagtgctgggtagagac

SEQ ID NO: 50057 - RNA, 20 nt, synthetic construct
  source 1..20: mol_type = other RNA
tcagagtggctaatgtggct

SEQ ID NO: 50058 - RNA, 20 nt, synthetic construct
  source 1..20: mol_type = other RNA
tcagagttgtatctgtgatc

SEQ ID NO: 50059 - RNA, 20 nt, synthetic construct
  source 1..20: mol_type = other RNA
tcagataacaaagggttctt

SEQ ID NO: 50060 - RNA, 20 nt, synthetic construct
  source 1..20: mol_type = other RNA
tcagatagaaaagacaatag

SEQ ID NO: 50061 - RNA, 20 nt, synthetic construct
  source 1..20: mol_type = other RNA
tcagatagaattaaatgaag

SEQ ID NO: 50062 - RNA, 20 nt, synthetic construct
  source 1..20: mol_type = other RNA
tcagatatcaatctggatat

SEQ ID NO: 50063 - RNA, 20 nt, synthetic construct
  source 1..20: mol_type = other RNA
tcagatatgaaagaggagac

SEQ ID NO: 50064 - RNA, 20 nt, synthetic construct
  source 1..20: mol_type = other RNA
tcagatcccaattacttcca

SEQ ID NO: 50065 - RNA, 20 nt, synthetic construct
  source 1..20: mol_type = other RNA
tcagatctctgacattggtt

SEQ ID NO: 50066 - RNA, 20 nt, synthetic construct
  source 1..20: mol_type = other RNA
tcagatctgagagatagaaa

SEQ ID NO: 50067 - RNA, 20 nt, synthetic construct
  source 1..20: mol_type = other RNA
tcagatctgagtttgctctg

SEQ ID NO: 50068 - RNA, 20 nt, synthetic construct
  source 1..20: mol_type = other RNA
tcagatctgttgcagtcccc

SEQ ID NO: 50069 - RNA, 20 nt, synthetic construct
  source 1..20: mol_type = other RNA
tcagatgacagaaataatac

SEQ ID NO: 50070 - RNA, 20 nt, synthetic construct
  source 1..20: mol_type = other RNA
tcagatgcttctagccaaag

SEQ ID NO: 50071 - RNA, 20 nt, synthetic construct
  source 1..20: mol_type = other RNA
tcagatggccccaaaattac

SEQ ID NO: 50072 - RNA, 20 nt, synthetic construct
  source 1..20: mol_type = other RNA
tcagatggtaaattggtcct

SEQ ID NO: 50073 - RNA, 20 nt, synthetic construct
  source 1..20: mol_type = other RNA
tcagatggtgatacctctta

SEQ ID NO: 50074 - RNA, 20 nt, synthetic construct
  source 1..20: mol_type = other RNA
tcagatgtctccattttgcc

SEQ ID NO: 50075 - RNA, 20 nt, synthetic construct
  source 1..20: mol_type = other RNA
tcagattaagcatagtttga

SEQ ID NO: 50076 - RNA, 20 nt, synthetic construct
  source 1..20: mol_type = other RNA
tcagattcaccaattgttaa

SEQ ID NO: 50077 - RNA, 20 nt, synthetic construct
  source 1..20: mol_type = other RNA
tcagattgaccttgtatcca

SEQ ID NO: 50078 - RNA, 20 nt, synthetic construct
  source 1..20: mol_type = other RNA
tcagattgcttgagagagat

SEQ ID NO: 50079 - RNA, 20 nt, synthetic construct
  source 1..20: mol_type = other RNA
tcagatttcaggtggtattt

SEQ ID NO: 50080 - RNA, 20 nt, synthetic construct
  source 1..20: mol_type = other RNA
tcagattttcttgttataag

SEQ ID NO: 50081 - RNA, 20 nt, synthetic construct
  source 1..20: mol_type = other RNA
tcagcaaaagcaattattag

SEQ ID NO: 50082 - RNA, 20 nt, synthetic construct
  source 1..20: mol_type = other RNA
tcagcaactcttggccattt

SEQ ID NO: 50083 - RNA, 20 nt, synthetic construct
  source 1..20: mol_type = other RNA
tcagcaaggaccattagcag

SEQ ID NO: 50084 - RNA, 20 nt, synthetic construct
  source 1..20: mol_type = other RNA
tcagcacaatactgtctcag

SEQ ID NO: 50085 - RNA, 20 nt, synthetic construct
  source 1..20: mol_type = other RNA
tcagcacactcttaataact

SEQ ID NO: 50086 - RNA, 20 nt, synthetic construct
  source 1..20: mol_type = other RNA
tcagcacagagccgaaatgc

SEQ ID NO: 50087 - RNA, 20 nt, synthetic construct
  source 1..20: mol_type = other RNA
tcagcaccaaagattatgtt

SEQ ID NO: 50088 - RNA, 20 nt, synthetic construct
  source 1..20: mol_type = other RNA
tcagcaccatctaacagaaa

SEQ ID NO: 50089 - RNA, 20 nt, synthetic construct
  source 1..20: mol_type = other RNA
tcagcaccctcaaatgtctc

SEQ ID NO: 50090 - RNA, 20 nt, synthetic construct
  source 1..20: mol_type = other RNA
tcagcactgctattgataaa

SEQ ID NO: 50091 - RNA, 20 nt, synthetic construct
  source 1..20: mol_type = other RNA
tcagcacttctgatatcctg

SEQ ID NO: 50092 - RNA, 20 nt, synthetic construct
  source 1..20: mol_type = other RNA
tcagcagcagagaagtgaag

SEQ ID NO: 50093 - RNA, 20 nt, synthetic construct
  source 1..20: mol_type = other RNA
tcagcagtgaccatatttcc

SEQ ID NO: 50094 - RNA, 20 nt, synthetic construct
  source 1..20: mol_type = other RNA
tcagcagttcagcctgcaga

SEQ ID NO: 50095 - RNA, 20 nt, synthetic construct
  source 1..20: mol_type = other RNA
tcagcagttttaaagaattc

SEQ ID NO: 50096 - RNA, 20 nt, synthetic construct
  source 1..20: mol_type = other RNA
tcagcataattggttaaact

SEQ ID NO: 50097 - RNA, 20 nt, synthetic construct
  source 1..20: mol_type = other RNA
tcagcatagcagaaccttag

SEQ ID NO: 50098 - RNA, 20 nt, synthetic construct
  source 1..20: mol_type = other RNA
tcagcatcttcactgactac

SEQ ID NO: 50099 - RNA, 20 nt, synthetic construct
  source 1..20: mol_type = other RNA
tcagcatgtcttcagaggcc

SEQ ID NO: 50100 - RNA, 20 nt, synthetic construct
  source 1..20: mol_type = other RNA
tcagccaaagctggcatgtt

SEQ ID NO: 50101 - RNA, 20 nt, synthetic construct
  source 1..20: mol_type = other RNA
tcagccacaagacataagca

SEQ ID NO: 50102 - RNA, 20 nt, synthetic construct
  source 1..20: mol_type = other RNA
tcagccagaggaagcttata

SEQ ID NO: 50103 - RNA, 20 nt, synthetic construct
  source 1..20: mol_type = other RNA
tcagccatcccagctacata

SEQ ID NO: 50104 - RNA, 20 nt, synthetic construct
  source 1..20: mol_type = other RNA
tcagccccctccctaccacc

SEQ ID NO: 50105 - RNA, 20 nt, synthetic construct
  source 1..20: mol_type = other RNA
tcagccccctcgaagagacc

SEQ ID NO: 50106 - RNA, 20 nt, synthetic construct
  source 1..20: mol_type = other RNA
tcagcccctcatcctccgta

SEQ ID NO: 50107 - RNA, 20 nt, synthetic construct
  source 1..20: mol_type = other RNA
tcagccctgatagatattgg

SEQ ID NO: 50108 - RNA, 20 nt, synthetic construct
  source 1..20: mol_type = other RNA
tcagccgccgcagaggccaa

SEQ ID NO: 50109 - RNA, 20 nt, synthetic construct
  source 1..20: mol_type = other RNA
tcagccgtgattgcaccact

SEQ ID NO: 50110 - RNA, 20 nt, synthetic construct
  source 1..20: mol_type = other RNA
tcagcctaagcaagttacat

SEQ ID NO: 50111 - RNA, 20 nt, synthetic construct
  source 1..20: mol_type = other RNA
tcagcctcccgagtagttgt

SEQ ID NO: 50112 - RNA, 20 nt, synthetic construct
  source 1..20: mol_type = other RNA
tcagcctgcagaaggagaaa

SEQ ID NO: 50113 - RNA, 20 nt, synthetic construct
  source 1..20: mol_type = other RNA
tcagcctgggcacacgccac

SEQ ID NO: 50114 - RNA, 20 nt, synthetic construct
  source 1..20: mol_type = other RNA
tcagcctgtgtcagtgacag

SEQ ID NO: 50115 - RNA, 20 nt, synthetic construct
  source 1..20: mol_type = other RNA
tcagcctgttgggaggtttt

SEQ ID NO: 50116 - RNA, 20 nt, synthetic construct
  source 1..20: mol_type = other RNA
tcagccttttctgatttgct

SEQ ID NO: 50117 - RNA, 20 nt, synthetic construct
  source 1..20: mol_type = other RNA
tcagcgctaagtgcatttcg

SEQ ID NO: 50118 - RNA, 20 nt, synthetic construct
  source 1..20: mol_type = other RNA
tcagcgcttgaacaaatatg

SEQ ID NO: 50119 - RNA, 20 nt, synthetic construct
  source 1..20: mol_type = other RNA
tcagcgtcctcactgtgata

SEQ ID NO: 50120 - RNA, 20 nt, synthetic construct
  source 1..20: mol_type = other RNA
tcagctaattttctaatctt

SEQ ID NO: 50121 - RNA, 20 nt, synthetic construct
  source 1..20: mol_type = other RNA
tcagctaggcgtagtatctc

SEQ ID NO: 50122 - RNA, 20 nt, synthetic construct
  source 1..20: mol_type = other RNA
tcagctagtgtgtctgacta

SEQ ID NO: 50123 - RNA, 20 nt, synthetic construct
  source 1..20: mol_type = other RNA
tcagctatagcttctgagct

SEQ ID NO: 50124 - RNA, 20 nt, synthetic construct
  source 1..20: mol_type = other RNA
tcagctatggtgttatttgt

SEQ ID NO: 50125 - RNA, 20 nt, synthetic construct
  source 1..20: mol_type = other RNA
tcagctcaaacagcttgaca

SEQ ID NO: 50126 - RNA, 20 nt, synthetic construct
  source 1..20: mol_type = other RNA
tcagctcattacagtctcga

SEQ ID NO: 50127 - RNA, 20 nt, synthetic construct
  source 1..20: mol_type = other RNA
tcagctcctcagaaggccaa

SEQ ID NO: 50128 - RNA, 20 nt, synthetic construct
  source 1..20: mol_type = other RNA
tcagctgtcactctctttag

SEQ ID NO: 50129 - RNA, 20 nt, synthetic construct
  source 1..20: mol_type = other RNA
tcagcttacagtcatcacag

SEQ ID NO: 50130 - RNA, 20 nt, synthetic construct
  source 1..20: mol_type = other RNA
tcagcttcctacccaagctt

SEQ ID NO: 50131 - RNA, 20 nt, synthetic construct
  source 1..20: mol_type = other RNA
tcagctttaaagagaaatag

SEQ ID NO: 50132 - RNA, 20 nt, synthetic construct
  source 1..20: mol_type = other RNA
tcaggaaaaccagtttagaa

SEQ ID NO: 50133 - RNA, 20 nt, synthetic construct
  source 1..20: mol_type = other RNA
tcaggaaagaccggggactg

SEQ ID NO: 50134 - RNA, 20 nt, synthetic construct
  source 1..20: mol_type = other RNA
tcaggaaagatgaagtatag

SEQ ID NO: 50135 - RNA, 20 nt, synthetic construct
  source 1..20: mol_type = other RNA
tcaggaaagtgccagccacc

SEQ ID NO: 50136 - RNA, 20 nt, synthetic construct
  source 1..20: mol_type = other RNA
tcaggaacaccttgaacatg

SEQ ID NO: 50137 - RNA, 20 nt, synthetic construct
  source 1..20: mol_type = other RNA
tcaggaaggcaggaggcctc

SEQ ID NO: 50138 - RNA, 20 nt, synthetic construct
  source 1..20: mol_type = other RNA
tcaggaagtatgagtcttcc

SEQ ID NO: 50139 - RNA, 20 nt, synthetic construct
  source 1..20: mol_type = other RNA
tcaggaatgcaaagtttcct

SEQ ID NO: 50140 - RNA, 20 nt, synthetic construct
  source 1..20: mol_type = other RNA
tcaggacactggaggtgcac

SEQ ID NO: 50141 - RNA, 20 nt, synthetic construct
  source 1..20: mol_type = other RNA
tcaggacagattaaaatcag

SEQ ID NO: 50142 - RNA, 20 nt, synthetic construct
  source 1..20: mol_type = other RNA
tcaggacagtcatcctcaac

SEQ ID NO: 50143 - RNA, 20 nt, synthetic construct
  source 1..20: mol_type = other RNA
tcaggacagttattcttcag

SEQ ID NO: 50144 - RNA, 20 nt, synthetic construct
  source 1..20: mol_type = other RNA
tcaggaccagatgacttcac

SEQ ID NO: 50145 - RNA, 20 nt, synthetic construct
  source 1..20: mol_type = other RNA
tcaggaccagcttgggcaag

SEQ ID NO: 50146 - RNA, 20 nt, synthetic construct
  source 1..20: mol_type = other RNA
tcaggaccaggcagtcctct

SEQ ID NO: 50147 - RNA, 20 nt, synthetic construct
  source 1..20: mol_type = other RNA
tcaggactcatgagagctgt

SEQ ID NO: 50148 - RNA, 20 nt, synthetic construct
  source 1..20: mol_type = other RNA
tcaggactctgctcaaaggg

SEQ ID NO: 50149 - RNA, 20 nt, synthetic construct
  source 1..20: mol_type = other RNA
tcaggagattaaggctggag

SEQ ID NO: 50150 - RNA, 20 nt, synthetic construct
  source 1..20: mol_type = other RNA
tcaggagcctagtcatccac

SEQ ID NO: 50151 - RNA, 20 nt, synthetic construct
  source 1..20: mol_type = other RNA
tcaggaggctgaggcaggag

SEQ ID NO: 50152 - RNA, 20 nt, synthetic construct
  source 1..20: mol_type = other RNA
tcaggagtaactgctcctct

SEQ ID NO: 50153 - RNA, 20 nt, synthetic construct
  source 1..20: mol_type = other RNA
tcaggagttttgcctctttg

SEQ ID NO: 50154 - RNA, 20 nt, synthetic construct
  source 1..20: mol_type = other RNA
tcaggatctacattaaaaaa

SEQ ID NO: 50155 - RNA, 20 nt, synthetic construct
  source 1..20: mol_type = other RNA
tcaggatgtctttgggaagg

SEQ ID NO: 50156 - RNA, 20 nt, synthetic construct
  source 1..20: mol_type = other RNA
tcaggcaagggactgtcgaa

SEQ ID NO: 50157 - RNA, 20 nt, synthetic construct
  source 1..20: mol_type = other RNA
tcaggcagtctagtccatga

SEQ ID NO: 50158 - RNA, 20 nt, synthetic construct
  source 1..20: mol_type = other RNA
tcaggcatgctaactgcaga

SEQ ID NO: 50159 - RNA, 20 nt, synthetic construct
  source 1..20: mol_type = other RNA
tcaggccagtgagtgatgaa

SEQ ID NO: 50160 - RNA, 20 nt, synthetic construct
  source 1..20: mol_type = other RNA
tcaggcctgttgtgaggatt

SEQ ID NO: 50161 - RNA, 20 nt, synthetic construct
  source 1..20: mol_type = other RNA
tcaggccttccacctgctct

SEQ ID NO: 50162 - RNA, 20 nt, synthetic construct
  source 1..20: mol_type = other RNA
tcaggctccaggtagaatga

SEQ ID NO: 50163 - RNA, 20 nt, synthetic construct
  source 1..20: mol_type = other RNA
tcaggctggctctttccact

SEQ ID NO: 50164 - RNA, 20 nt, synthetic construct
  source 1..20: mol_type = other RNA
tcaggcttgagtctgtgctc

SEQ ID NO: 50165 - RNA, 20 nt, synthetic construct
  source 1..20: mol_type = other RNA
tcagggaaggctgcaagcac

SEQ ID NO: 50166 - RNA, 20 nt, synthetic construct
  source 1..20: mol_type = other RNA
tcagggagaattggtagtca

SEQ ID NO: 50167 - RNA, 20 nt, synthetic construct
  source 1..20: mol_type = other RNA
tcagggatattggcttatag

SEQ ID NO: 50168 - RNA, 20 nt, synthetic construct
  source 1..20: mol_type = other RNA
tcagggatcacagatacaac

SEQ ID NO: 50169 - RNA, 20 nt, synthetic construct
  source 1..20: mol_type = other RNA
tcagggatttggccagaatc

SEQ ID NO: 50170 - RNA, 20 nt, synthetic construct
  source 1..20: mol_type = other RNA
tcagggcctgcttttggaag

SEQ ID NO: 50171 - RNA, 20 nt, synthetic construct
  source 1..20: mol_type = other RNA
tcagggccttcccaaagaca

SEQ ID NO: 50172 - RNA, 20 nt, synthetic construct
  source 1..20: mol_type = other RNA
tcagggcctttaatcacctc

SEQ ID NO: 50173 - RNA, 20 nt, synthetic construct
  source 1..20: mol_type = other RNA
tcagggctgaaaaacacctc

SEQ ID NO: 50174 - RNA, 20 nt, synthetic construct
  source 1..20: mol_type = other RNA
tcagggggctaaatgctcac

SEQ ID NO: 50175 - RNA, 20 nt, synthetic construct
  source 1..20: mol_type = other RNA
tcaggggggccactggaaac

SEQ ID NO: 50176 - RNA, 20 nt, synthetic construct
  source 1..20: mol_type = other RNA
tcaggggtaaaggggatggg

SEQ ID NO: 50177 - RNA, 20 nt, synthetic construct
  source 1..20: mol_type = other RNA
tcagggtaggaaaagacttc

SEQ ID NO: 50178 - RNA, 20 nt, synthetic construct
  source 1..20: mol_type = other RNA
tcagggtcacttcctctctt

SEQ ID NO: 50179 - RNA, 20 nt, synthetic construct
  source 1..20: mol_type = other RNA
tcagggtgcgacctcgaagc

SEQ ID NO: 50180 - RNA, 20 nt, synthetic construct
  source 1..20: mol_type = other RNA
tcaggtattgagcctgttcc

SEQ ID NO: 50181 - RNA, 20 nt, synthetic construct
  source 1..20: mol_type = other RNA
tcaggtctatgtgacagaat

SEQ ID NO: 50182 - RNA, 20 nt, synthetic construct
  source 1..20: mol_type = other RNA
tcaggtctctctgaaattag

SEQ ID NO: 50183 - RNA, 20 nt, synthetic construct
  source 1..20: mol_type = other RNA
tcaggtctctttgaaaggaa

SEQ ID NO: 50184 - RNA, 20 nt, synthetic construct
  source 1..20: mol_type = other RNA
tcaggtgcctcctgcctcag

SEQ ID NO: 50185 - RNA, 20 nt, synthetic construct
  source 1..20: mol_type = other RNA
tcaggtgggcactgggagcc

SEQ ID NO: 50186 - RNA, 20 nt, synthetic construct
  source 1..20: mol_type = other RNA
tcaggtggtatttaatctgt

SEQ ID NO: 50187 - RNA, 20 nt, synthetic construct
  source 1..20: mol_type = other RNA
tcaggtgtcactggatagaa

SEQ ID NO: 50188 - RNA, 20 nt, synthetic construct
  source 1..20: mol_type = other RNA
tcaggtgtgtaaacactgtt

SEQ ID NO: 50189 - RNA, 20 nt, synthetic construct
  source 1..20: mol_type = other RNA
tcaggttgggcttatcagat

SEQ ID NO: 50190 - RNA, 20 nt, synthetic construct
  source 1..20: mol_type = other RNA
tcaggttttcgaccaagtta

SEQ ID NO: 50191 - RNA, 20 nt, synthetic construct
  source 1..20: mol_type = other RNA
tcagtaaaaaaggaccatct

SEQ ID NO: 50192 - RNA, 20 nt, synthetic construct
  source 1..20: mol_type = other RNA
tcagtaaaattcccttcagt

SEQ ID NO: 50193 - RNA, 20 nt, synthetic construct
  source 1..20: mol_type = other RNA
tcagtaaatgaaatttgagg

SEQ ID NO: 50194 - RNA, 20 nt, synthetic construct
  source 1..20: mol_type = other RNA
tcagtaacaaataagaagat

SEQ ID NO: 50195 - RNA, 20 nt, synthetic construct
  source 1..20: mol_type = other RNA
tcagtaagaaaacagataac

SEQ ID NO: 50196 - RNA, 20 nt, synthetic construct
  source 1..20: mol_type = other RNA
tcagtaattctgcagtgaac

SEQ ID NO: 50197 - RNA, 20 nt, synthetic construct
  source 1..20: mol_type = other RNA
tcagtacacgaaaatatccc

SEQ ID NO: 50198 - RNA, 20 nt, synthetic construct
  source 1..20: mol_type = other RNA
tcagtactatcttccctaaa

SEQ ID NO: 50199 - RNA, 20 nt, synthetic construct
  source 1..20: mol_type = other RNA
tcagtacttccctctttctc

SEQ ID NO: 50200 - RNA, 20 nt, synthetic construct
  source 1..20: mol_type = other RNA
tcagtagaggccgagggttg

SEQ ID NO: 50201 - RNA, 20 nt, synthetic construct
  source 1..20: mol_type = other RNA
tcagtagtacagtgagtaga

SEQ ID NO: 50202 - RNA, 20 nt, synthetic construct
  source 1..20: mol_type = other RNA
tcagtagtttgctagtggta

SEQ ID NO: 50203 - RNA, 20 nt, synthetic construct
  source 1..20: mol_type = other RNA
tcagtatatttactgcttgc

SEQ ID NO: 50204 - RNA, 20 nt, synthetic construct
  source 1..20: mol_type = other RNA
tcagtatcctttcaaggtat

SEQ ID NO: 50205 - RNA, 20 nt, synthetic construct
  source 1..20: mol_type = other RNA
tcagtatgaatgcacgtgaa

SEQ ID NO: 50206 - RNA, 20 nt, synthetic construct
  source 1..20: mol_type = other RNA
tcagtatgtgtctctgacat

SEQ ID NO: 50207 - RNA, 20 nt, synthetic construct
  source 1..20: mol_type = other RNA
tcagtcaacacactagccac

SEQ ID NO: 50208 - RNA, 20 nt, synthetic construct
  source 1..20: mol_type = other RNA
tcagtcaacaccaagcaaca

SEQ ID NO: 50209 - RNA, 20 nt, synthetic construct
  source 1..20: mol_type = other RNA
tcagtcaccaaacgtttaga

SEQ ID NO: 50210 - RNA, 20 nt, synthetic construct
  source 1..20: mol_type = other RNA
tcagtcagttctctgccccg

SEQ ID NO: 50211 - RNA, 20 nt, synthetic construct
  source 1..20: mol_type = other RNA
tcagtcataatttgtgtcct

SEQ ID NO: 50212 - RNA, 20 nt, synthetic construct
  source 1..20: mol_type = other RNA
tcagtccagatattatcctc

SEQ ID NO: 50213 - RNA, 20 nt, synthetic construct
  source 1..20: mol_type = other RNA
tcagtcccaaatgggagcat

SEQ ID NO: 50214 - RNA, 20 nt, synthetic construct
  source 1..20: mol_type = other RNA
tcagtccctcaccttctgct

SEQ ID NO: 50215 - RNA, 20 nt, synthetic construct
  source 1..20: mol_type = other RNA
tcagtccctcctttctagaa

SEQ ID NO: 50216 - RNA, 20 nt, synthetic construct
  source 1..20: mol_type = other RNA
tcagtccttaccactgaagt

SEQ ID NO: 50217 - RNA, 20 nt, synthetic construct
  source 1..20: mol_type = other RNA
tcagtcggttcttcaccgtg

SEQ ID NO: 50218 - RNA, 20 nt, synthetic construct
  source 1..20: mol_type = other RNA
tcagtctccaatcctcagcc

SEQ ID NO: 50219 - RNA, 20 nt, synthetic construct
  source 1..20: mol_type = other RNA
tcagtctcgaaaaggaatgg

SEQ ID NO: 50220 - RNA, 20 nt, synthetic construct
  source 1..20: mol_type = other RNA
tcagtctgtaagcacctgta

SEQ ID NO: 50221 - RNA, 20 nt, synthetic construct
  source 1..20: mol_type = other RNA
tcagtctgtttgccatcttc

SEQ ID NO: 50222 - RNA, 20 nt, synthetic construct
  source 1..20: mol_type = other RNA
tcagtcttggtagtttgcac

SEQ ID NO: 50223 - RNA, 20 nt, synthetic construct
  source 1..20: mol_type = other RNA
tcagtgaagatgctgaactt

SEQ ID NO: 50224 - RNA, 20 nt, synthetic construct
  source 1..20: mol_type = other RNA
tcagtgaatatcatttgaat

SEQ ID NO: 50225 - RNA, 20 nt, synthetic construct
  source 1..20: mol_type = other RNA
tcagtgacagttctgtgaat

SEQ ID NO: 50226 - RNA, 20 nt, synthetic construct
  source 1..20: mol_type = other RNA
tcagtgagtagggaaggtgc

SEQ ID NO: 50227 - RNA, 20 nt, synthetic construct
  source 1..20: mol_type = other RNA
tcagtgatggaggtggaact

SEQ ID NO: 50228 - RNA, 20 nt, synthetic construct
  source 1..20: mol_type = other RNA
tcagtgccaacacatggggc

SEQ ID NO: 50229 - RNA, 20 nt, synthetic construct
  source 1..20: mol_type = other RNA
tcagtgctgctctgacgttt

SEQ ID NO: 50230 - RNA, 20 nt, synthetic construct
  source 1..20: mol_type = other RNA
tcagtggccagtgaccagtg

SEQ ID NO: 50231 - RNA, 20 nt, synthetic construct
  source 1..20: mol_type = other RNA
tcagtggccctgttggcctg

SEQ ID NO: 50232 - RNA, 20 nt, synthetic construct
  source 1..20: mol_type = other RNA
tcagtgggactggagaacag

SEQ ID NO: 50233 - RNA, 20 nt, synthetic construct
  source 1..20: mol_type = other RNA
tcagtgggttcaattatgtg

SEQ ID NO: 50234 - RNA, 20 nt, synthetic construct
  source 1..20: mol_type = other RNA
tcagtggtaaggactgaagt

SEQ ID NO: 50235 - RNA, 20 nt, synthetic construct
  source 1..20: mol_type = other RNA
tcagtggtagttacacaagt

SEQ ID NO: 50236 - RNA, 20 nt, synthetic construct
  source 1..20: mol_type = other RNA
tcagtggtgcaatcacggct

SEQ ID NO: 50237 - RNA, 20 nt, synthetic construct
  source 1..20: mol_type = other RNA
tcagtggtgcttttgctgca

SEQ ID NO: 50238 - RNA, 20 nt, synthetic construct
  source 1..20: mol_type = other RNA
tcagtggttaatatattttg

SEQ ID NO: 50239 - RNA, 20 nt, synthetic construct
  source 1..20: mol_type = other RNA
tcagtggttctgcgtgttat

SEQ ID NO: 50240 - RNA, 20 nt, synthetic construct
  source 1..20: mol_type = other RNA
tcagtggttggaaaactttt

SEQ ID NO: 50241 - RNA, 20 nt, synthetic construct
  source 1..20: mol_type = other RNA
tcagtggttgtgcttcgagg

SEQ ID NO: 50242 - RNA, 20 nt, synthetic construct
  source 1..20: mol_type = other RNA
tcagtgtagtcagacacact

SEQ ID NO: 50243 - RNA, 20 nt, synthetic construct
  source 1..20: mol_type = other RNA
tcagtgtgaaagtattaaaa

SEQ ID NO: 50244 - RNA, 20 nt, synthetic construct
  source 1..20: mol_type = other RNA
tcagtgtggttcatatttcc

SEQ ID NO: 50245 - RNA, 20 nt, synthetic construct
  source 1..20: mol_type = other RNA
tcagtgtgtccacacaatgg

SEQ ID NO: 50246 - RNA, 20 nt, synthetic construct
  source 1..20: mol_type = other RNA
tcagtgtgtttttgtaaatg

SEQ ID NO: 50247 - RNA, 20 nt, synthetic construct
  source 1..20: mol_type = other RNA
tcagttaaaagttttccaac

SEQ ID NO: 50248 - RNA, 20 nt, synthetic construct
  source 1..20: mol_type = other RNA
tcagttaaacccaacaaaca

SEQ ID NO: 50249 - RNA, 20 nt, synthetic construct
  source 1..20: mol_type = other RNA
tcagttaacagtgctgtgcc

SEQ ID NO: 50250 - RNA, 20 nt, synthetic construct
  source 1..20: mol_type = other RNA
tcagttaacttattggaaaa

SEQ ID NO: 50251 - RNA, 20 nt, synthetic construct
  source 1..20: mol_type = other RNA
tcagttacagcatttcagcc

SEQ ID NO: 50252 - RNA, 20 nt, synthetic construct
  source 1..20: mol_type = other RNA
tcagttaccaccaagaaaaa

SEQ ID NO: 50253 - RNA, 20 nt, synthetic construct
  source 1..20: mol_type = other RNA
tcagttatcacacctaggcc

SEQ ID NO: 50254 - RNA, 20 nt, synthetic construct
  source 1..20: mol_type = other RNA
tcagttctctgccccgggcc

SEQ ID NO: 50255 - RNA, 20 nt, synthetic construct
  source 1..20: mol_type = other RNA
tcagttctttcggatattta

SEQ ID NO: 50256 - RNA, 20 nt, synthetic construct
  source 1..20: mol_type = other RNA
tcagttgaaaagtatggttg

SEQ ID NO: 50257 - RNA, 20 nt, synthetic construct
  source 1..20: mol_type = other RNA
tcagttgacatcctttaatt

SEQ ID NO: 50258 - RNA, 20 nt, synthetic construct
  source 1..20: mol_type = other RNA
tcagttgcagcatgctcact

SEQ ID NO: 50259 - RNA, 20 nt, synthetic construct
  source 1..20: mol_type = other RNA
tcagttgcatgaatttgttt

SEQ ID NO: 50260 - RNA, 20 nt, synthetic construct
  source 1..20: mol_type = other RNA
tcagttggtgaagagagcct

SEQ ID NO: 50261 - RNA, 20 nt, synthetic construct
  source 1..20: mol_type = other RNA
tcagttgtttacttgggtat

SEQ ID NO: 50262 - RNA, 20 nt, synthetic construct
  source 1..20: mol_type = other RNA
tcagtttagtaaatctttgg

SEQ ID NO: 50263 - RNA, 20 nt, synthetic construct
  source 1..20: mol_type = other RNA
tcagtttatgggtcaaccac

SEQ ID NO: 50264 - RNA, 20 nt, synthetic construct
  source 1..20: mol_type = other RNA
tcagtttcaaaagctccccg

SEQ ID NO: 50265 - RNA, 20 nt, synthetic construct
  source 1..20: mol_type = other RNA
tcagtttctgatttatcttt

SEQ ID NO: 50266 - RNA, 20 nt, synthetic construct
  source 1..20: mol_type = other RNA
tcagtttgctagtattttgt

SEQ ID NO: 50267 - RNA, 20 nt, synthetic construct
  source 1..20: mol_type = other RNA
tcagttttatcaattagttc

SEQ ID NO: 50268 - RNA, 20 nt, synthetic construct
  source 1..20: mol_type = other RNA
tcagttttgagtggcatcat

SEQ ID NO: 50269 - RNA, 20 nt, synthetic construct
  source 1..20: mol_type = other RNA
tcagttttgtatatggttta

SEQ ID NO: 50270 - RNA, 20 nt, synthetic construct
  source 1..20: mol_type = other RNA
tcataaaatatgtccttttg

SEQ ID NO: 50271 - RNA, 20 nt, synthetic construct
  source 1..20: mol_type = other RNA
tcataaaatgatggcaacaa

SEQ ID NO: 50272 - RNA, 20 nt, synthetic construct
  source 1..20: mol_type = other RNA
tcataaacacagaacactaa

SEQ ID NO: 50273 - RNA, 20 nt, synthetic construct
  source 1..20: mol_type = other RNA
tcataaacataactttgaag

SEQ ID NO: 50274 - RNA, 20 nt, synthetic construct
  source 1..20: mol_type = other RNA
tcataaagccggattccttt

SEQ ID NO: 50275 - RNA, 20 nt, synthetic construct
  source 1..20: mol_type = other RNA
tcataacaaagctctgatgc

SEQ ID NO: 50276 - RNA, 20 nt, synthetic construct
  source 1..20: mol_type = other RNA
tcataacagtattgtcttct

SEQ ID NO: 50277 - RNA, 20 nt, synthetic construct
  source 1..20: mol_type = other RNA
tcataagaactcctggtctc

SEQ ID NO: 50278 - RNA, 20 nt, synthetic construct
  source 1..20: mol_type = other RNA
tcataagcttttatttgtca

SEQ ID NO: 50279 - RNA, 20 nt, synthetic construct
  source 1..20: mol_type = other RNA
tcataatagtctcacgatac

SEQ ID NO: 50280 - RNA, 20 nt, synthetic construct
  source 1..20: mol_type = other RNA
tcataatatatcacaacttg

SEQ ID NO: 50281 - RNA, 20 nt, synthetic construct
  source 1..20: mol_type = other RNA
tcataatttgtgtccttttt

SEQ ID NO: 50282 - RNA, 20 nt, synthetic construct
  source 1..20: mol_type = other RNA
tcatacaagttgtgatatat

SEQ ID NO: 50283 - RNA, 20 nt, synthetic construct
  source 1..20: mol_type = other RNA
tcatacaatagtttagttac

SEQ ID NO: 50284 - RNA, 20 nt, synthetic construct
  source 1..20: mol_type = other RNA
tcatacacatccagaagtca

SEQ ID NO: 50285 - RNA, 20 nt, synthetic construct
  source 1..20: mol_type = other RNA
tcatacacctggatcaagtg

SEQ ID NO: 50286 - RNA, 20 nt, synthetic construct
  source 1..20: mol_type = other RNA
tcatacacgagtgtgtttcg

SEQ ID NO: 50287 - RNA, 20 nt, synthetic construct
  source 1..20: mol_type = other RNA
tcatacattttccacatatt

SEQ ID NO: 50288 - RNA, 20 nt, synthetic construct
  source 1..20: mol_type = other RNA
tcataccaggttttggtaat

SEQ ID NO: 50289 - RNA, 20 nt, synthetic construct
  source 1..20: mol_type = other RNA
tcatacgttaactgtattgc

SEQ ID NO: 50290 - RNA, 20 nt, synthetic construct
  source 1..20: mol_type = other RNA
tcatactattttctatagtg

SEQ ID NO: 50291 - RNA, 20 nt, synthetic construct
  source 1..20: mol_type = other RNA
tcatactgaaggcatagggc

SEQ ID NO: 50292 - RNA, 20 nt, synthetic construct
  source 1..20: mol_type = other RNA
tcatactggaaggactcaca

SEQ ID NO: 50293 - RNA, 20 nt, synthetic construct
  source 1..20: mol_type = other RNA
tcatacttgctttattactt

SEQ ID NO: 50294 - RNA, 20 nt, synthetic construct
  source 1..20: mol_type = other RNA
tcatactttgtcaggcatgc

SEQ ID NO: 50295 - RNA, 20 nt, synthetic construct
  source 1..20: mol_type = other RNA
tcatagagtaccaggtcagc

SEQ ID NO: 50296 - RNA, 20 nt, synthetic construct
  source 1..20: mol_type = other RNA
tcatagatcaccaggggctg

SEQ ID NO: 50297 - RNA, 20 nt, synthetic construct
  source 1..20: mol_type = other RNA
tcatagatgttatgccccct

SEQ ID NO: 50298 - RNA, 20 nt, synthetic construct
  source 1..20: mol_type = other RNA
tcatagcagaatggccctgc

SEQ ID NO: 50299 - RNA, 20 nt, synthetic construct
  source 1..20: mol_type = other RNA
tcatagcagcattgtttaca

SEQ ID NO: 50300 - RNA, 20 nt, synthetic construct
  source 1..20: mol_type = other RNA
tcatagcagtgggaagtgga

SEQ ID NO: 50301 - RNA, 20 nt, synthetic construct
  source 1..20: mol_type = other RNA
tcatagctcactagagcttc

SEQ ID NO: 50302 - RNA, 20 nt, synthetic construct
  source 1..20: mol_type = other RNA
tcataggaaatacttgatct

SEQ ID NO: 50303 - RNA, 20 nt, synthetic construct
  source 1..20: mol_type = other RNA
tcataggcatctctcccttc

SEQ ID NO: 50304 - RNA, 20 nt, synthetic construct
  source 1..20: mol_type = other RNA
tcataggtaatactctagtg

SEQ ID NO: 50305 - RNA, 20 nt, synthetic construct
  source 1..20: mol_type = other RNA
tcatagtagctgttgaattg

SEQ ID NO: 50306 - RNA, 20 nt, synthetic construct
  source 1..20: mol_type = other RNA
tcatagtcatcattattagc

SEQ ID NO: 50307 - RNA, 20 nt, synthetic construct
  source 1..20: mol_type = other RNA
tcatagtcatttgatctttt

SEQ ID NO: 50308 - RNA, 20 nt, synthetic construct
  source 1..20: mol_type = other RNA
tcatagtcttccaaaatatt

SEQ ID NO: 50309 - RNA, 20 nt, synthetic construct
  source 1..20: mol_type = other RNA
tcatataagtggaatcattc

SEQ ID NO: 50310 - RNA, 20 nt, synthetic construct
  source 1..20: mol_type = other RNA
tcatataatggagtactatg

SEQ ID NO: 50311 - RNA, 20 nt, synthetic construct
  source 1..20: mol_type = other RNA
tcatatacgtatttatcatg

SEQ ID NO: 50312 - RNA, 20 nt, synthetic construct
  source 1..20: mol_type = other RNA
tcatatagtaattctgtgct

SEQ ID NO: 50313 - RNA, 20 nt, synthetic construct
  source 1..20: mol_type = other RNA
tcatatcagttatcacacct

SEQ ID NO: 50314 - RNA, 20 nt, synthetic construct
  source 1..20: mol_type = other RNA
tcatatcatcatcttatact

SEQ ID NO: 50315 - RNA, 20 nt, synthetic construct
  source 1..20: mol_type = other RNA
tcatatctgattttgtgtct

SEQ ID NO: 50316 - RNA, 20 nt, synthetic construct
  source 1..20: mol_type = other RNA
tcatatgaaatcacacaatc

SEQ ID NO: 50317 - RNA, 20 nt, synthetic construct
  source 1..20: mol_type = other RNA
tcatatgaattttaagatgg

SEQ ID NO: 50318 - RNA, 20 nt, synthetic construct
  source 1..20: mol_type = other RNA
tcatatgatctatcaatctc

SEQ ID NO: 50319 - RNA, 20 nt, synthetic construct
  source 1..20: mol_type = other RNA
tcatatgctttgagctacaa

SEQ ID NO: 50320 - RNA, 20 nt, synthetic construct
  source 1..20: mol_type = other RNA
tcatattagtctgtagcttc

SEQ ID NO: 50321 - RNA, 20 nt, synthetic construct
  source 1..20: mol_type = other RNA
tcatattattttttcccgct

SEQ ID NO: 50322 - RNA, 20 nt, synthetic construct
  source 1..20: mol_type = other RNA
tcatatttcccttttggatg

SEQ ID NO: 50323 - RNA, 20 nt, synthetic construct
  source 1..20: mol_type = other RNA
tcatatttgttcaagcgctg

SEQ ID NO: 50324 - RNA, 20 nt, synthetic construct
  source 1..20: mol_type = other RNA
tcatattttccttatccatt

SEQ ID NO: 50325 - RNA, 20 nt, synthetic construct
  source 1..20: mol_type = other RNA
tcatattttgtgggaattca

SEQ ID NO: 50326 - RNA, 20 nt, synthetic construct
  source 1..20: mol_type = other RNA
tcatcaaaggaaggaatttt

SEQ ID NO: 50327 - RNA, 20 nt, synthetic construct
  source 1..20: mol_type = other RNA
tcatcaaagttaaacttttg

SEQ ID NO: 50328 - RNA, 20 nt, synthetic construct
  source 1..20: mol_type = other RNA
tcatcaagacagagctccct

SEQ ID NO: 50329 - RNA, 20 nt, synthetic construct
  source 1..20: mol_type = other RNA
tcatcacagtatgcacaaat

SEQ ID NO: 50330 - RNA, 20 nt, synthetic construct
  source 1..20: mol_type = other RNA
tcatcacagtccaggaactt

SEQ ID NO: 50331 - RNA, 20 nt, synthetic construct
  source 1..20: mol_type = other RNA
tcatcactcactggcctgag

SEQ ID NO: 50332 - RNA, 20 nt, synthetic construct
  source 1..20: mol_type = other RNA
tcatcagcgtcctcactgtg

SEQ ID NO: 50333 - RNA, 20 nt, synthetic construct
  source 1..20: mol_type = other RNA
tcatcaggctggctctttcc

SEQ ID NO: 50334 - RNA, 20 nt, synthetic construct
  source 1..20: mol_type = other RNA
tcatcagtccctgtgttttt

SEQ ID NO: 50335 - RNA, 20 nt, synthetic construct
  source 1..20: mol_type = other RNA
tcatcatcaggctggctctt

SEQ ID NO: 50336 - RNA, 20 nt, synthetic construct
  source 1..20: mol_type = other RNA
tcatcatcttatacttggca

SEQ ID NO: 50337 - RNA, 20 nt, synthetic construct
  source 1..20: mol_type = other RNA
tcatcatcttttgcctggat

SEQ ID NO: 50338 - RNA, 20 nt, synthetic construct
  source 1..20: mol_type = other RNA
tcatcattattagcaaacat

SEQ ID NO: 50339 - RNA, 20 nt, synthetic construct
  source 1..20: mol_type = other RNA
tcatcatttatacccaagta

SEQ ID NO: 50340 - RNA, 20 nt, synthetic construct
  source 1..20: mol_type = other RNA
tcatccaaacagaaaccctg

SEQ ID NO: 50341 - RNA, 20 nt, synthetic construct
  source 1..20: mol_type = other RNA
tcatccaaattattgacaag

SEQ ID NO: 50342 - RNA, 20 nt, synthetic construct
  source 1..20: mol_type = other RNA
tcatccacaatgagacattt

SEQ ID NO: 50343 - RNA, 20 nt, synthetic construct
  source 1..20: mol_type = other RNA
tcatccactgcacagtatgc

SEQ ID NO: 50344 - RNA, 20 nt, synthetic construct
  source 1..20: mol_type = other RNA
tcatccaggcaaaagatgat

SEQ ID NO: 50345 - RNA, 20 nt, synthetic construct
  source 1..20: mol_type = other RNA
tcatccagtttaaagctttg

SEQ ID NO: 50346 - RNA, 20 nt, synthetic construct
  source 1..20: mol_type = other RNA
tcatccatgttgttgaatgt

SEQ ID NO: 50347 - RNA, 20 nt, synthetic construct
  source 1..20: mol_type = other RNA
tcatccctcatatcagttat

SEQ ID NO: 50348 - RNA, 20 nt, synthetic construct
  source 1..20: mol_type = other RNA
tcatccctctaaataggtat

SEQ ID NO: 50349 - RNA, 20 nt, synthetic construct
  source 1..20: mol_type = other RNA
tcatccggggagcttttgaa

SEQ ID NO: 50350 - RNA, 20 nt, synthetic construct
  source 1..20: mol_type = other RNA
tcatccggtctcagttttta

SEQ ID NO: 50351 - RNA, 20 nt, synthetic construct
  source 1..20: mol_type = other RNA
tcatcctactagtatttatt

SEQ ID NO: 50352 - RNA, 20 nt, synthetic construct
  source 1..20: mol_type = other RNA
tcatcctcaacaagagagga

SEQ ID NO: 50353 - RNA, 20 nt, synthetic construct
  source 1..20: mol_type = other RNA
tcatcctccgtagctgtcgc

SEQ ID NO: 50354 - RNA, 20 nt, synthetic construct
  source 1..20: mol_type = other RNA
tcatcctttcccttctgctc

SEQ ID NO: 50355 - RNA, 20 nt, synthetic construct
  source 1..20: mol_type = other RNA
tcatcgcattacgagttatg

SEQ ID NO: 50356 - RNA, 20 nt, synthetic construct
  source 1..20: mol_type = other RNA
tcatcggaaatataaaaagc

SEQ ID NO: 50357 - RNA, 20 nt, synthetic construct
  source 1..20: mol_type = other RNA
tcatcgtaaaaagccattta

SEQ ID NO: 50358 - RNA, 20 nt, synthetic construct
  source 1..20: mol_type = other RNA
tcatctaaacgtttggtgac

SEQ ID NO: 50359 - RNA, 20 nt, synthetic construct
  source 1..20: mol_type = other RNA
tcatctaaattaagcttcga

SEQ ID NO: 50360 - RNA, 20 nt, synthetic construct
  source 1..20: mol_type = other RNA
tcatctaagcctacctccct

SEQ ID NO: 50361 - RNA, 20 nt, synthetic construct
  source 1..20: mol_type = other RNA
tcatctaatttcccatttga

SEQ ID NO: 50362 - RNA, 20 nt, synthetic construct
  source 1..20: mol_type = other RNA
tcatctaggcatataaactg

SEQ ID NO: 50363 - RNA, 20 nt, synthetic construct
  source 1..20: mol_type = other RNA
tcatctataaggtaatgaca

SEQ ID NO: 50364 - RNA, 20 nt, synthetic construct
  source 1..20: mol_type = other RNA
tcatctatgtcccctggggc

SEQ ID NO: 50365 - RNA, 20 nt, synthetic construct
  source 1..20: mol_type = other RNA
tcatctctcgatggacattt

SEQ ID NO: 50366 - RNA, 20 nt, synthetic construct
  source 1..20: mol_type = other RNA
tcatctctgcaaaacattta

SEQ ID NO: 50367 - RNA, 20 nt, synthetic construct
  source 1..20: mol_type = other RNA
tcatctgaatcaataagaat

SEQ ID NO: 50368 - RNA, 20 nt, synthetic construct
  source 1..20: mol_type = other RNA
tcatctgcagtgtccatctc

SEQ ID NO: 50369 - RNA, 20 nt, synthetic construct
  source 1..20: mol_type = other RNA
tcatctggaccagttactct

SEQ ID NO: 50370 - RNA, 20 nt, synthetic construct
  source 1..20: mol_type = other RNA
tcatctggtcctgagctttc

SEQ ID NO: 50371 - RNA, 20 nt, synthetic construct
  source 1..20: mol_type = other RNA
tcatctgtcaaaaagagaac

SEQ ID NO: 50372 - RNA, 20 nt, synthetic construct
  source 1..20: mol_type = other RNA
tcatctgtcactttcctatt

SEQ ID NO: 50373 - RNA, 20 nt, synthetic construct
  source 1..20: mol_type = other RNA
tcatctgttaatgggcactt

SEQ ID NO: 50374 - RNA, 20 nt, synthetic construct
  source 1..20: mol_type = other RNA
tcatcttaagaaccatacag

SEQ ID NO: 50375 - RNA, 20 nt, synthetic construct
  source 1..20: mol_type = other RNA
tcatcttagccgggaggagc

SEQ ID NO: 50376 - RNA, 20 nt, synthetic construct
  source 1..20: mol_type = other RNA
tcatcttatacttggcaaaa

SEQ ID NO: 50377 - RNA, 20 nt, synthetic construct
  source 1..20: mol_type = other RNA
tcatcttctctctctgcttc

SEQ ID NO: 50378 - RNA, 20 nt, synthetic construct
  source 1..20: mol_type = other RNA
tcatcttgacttcacttcca

SEQ ID NO: 50379 - RNA, 20 nt, synthetic construct
  source 1..20: mol_type = other RNA
tcatctttcctgatcacacc

SEQ ID NO: 50380 - RNA, 20 nt, synthetic construct
  source 1..20: mol_type = other RNA
tcatcttttgcctggatgaa

SEQ ID NO: 50381 - RNA, 20 nt, synthetic construct
  source 1..20: mol_type = other RNA
tcatgaaagtggagaattac

SEQ ID NO: 50382 - RNA, 20 nt, synthetic construct
  source 1..20: mol_type = other RNA
tcatgaaatcccctttagtg

SEQ ID NO: 50383 - RNA, 20 nt, synthetic construct
  source 1..20: mol_type = other RNA
tcatgaacaattttctctca

SEQ ID NO: 50384 - RNA, 20 nt, synthetic construct
  source 1..20: mol_type = other RNA
tcatgaacataaatttgttc

SEQ ID NO: 50385 - RNA, 20 nt, synthetic construct
  source 1..20: mol_type = other RNA
tcatgaaccttcaccaaaga

SEQ ID NO: 50386 - RNA, 20 nt, synthetic construct
  source 1..20: mol_type = other RNA
tcatgaatgaatgttgagtt

SEQ ID NO: 50387 - RNA, 20 nt, synthetic construct
  source 1..20: mol_type = other RNA
tcatgacaagaatctttggc

SEQ ID NO: 50388 - RNA, 20 nt, synthetic construct
  source 1..20: mol_type = other RNA
tcatgacctgctttcttggg

SEQ ID NO: 50389 - RNA, 20 nt, synthetic construct
  source 1..20: mol_type = other RNA
tcatgacttttttgcccact

SEQ ID NO: 50390 - RNA, 20 nt, synthetic construct
  source 1..20: mol_type = other RNA
tcatgagagctgtgccgagg

SEQ ID NO: 50391 - RNA, 20 nt, synthetic construct
  source 1..20: mol_type = other RNA
tcatgagtcctgaaaattcc

SEQ ID NO: 50392 - RNA, 20 nt, synthetic construct
  source 1..20: mol_type = other RNA
tcatgatgtttggctcctta

SEQ ID NO: 50393 - RNA, 20 nt, synthetic construct
  source 1..20: mol_type = other RNA
tcatgattcagtcttggtag

SEQ ID NO: 50394 - RNA, 20 nt, synthetic construct
  source 1..20: mol_type = other RNA
tcatgatttaatagaggtct

SEQ ID NO: 50395 - RNA, 20 nt, synthetic construct
  source 1..20: mol_type = other RNA
tcatgatttggtgtgtgcaa

SEQ ID NO: 50396 - RNA, 20 nt, synthetic construct
  source 1..20: mol_type = other RNA
tcatgcaactgaaaacatct

SEQ ID NO: 50397 - RNA, 20 nt, synthetic construct
  source 1..20: mol_type = other RNA
tcatgcaattccccagcctc

SEQ ID NO: 50398 - RNA, 20 nt, synthetic construct
  source 1..20: mol_type = other RNA
tcatgcacacgctggaaggg

SEQ ID NO: 50399 - RNA, 20 nt, synthetic construct
  source 1..20: mol_type = other RNA
tcatgcagtacttgtctttt

SEQ ID NO: 50400 - RNA, 20 nt, synthetic construct
  source 1..20: mol_type = other RNA
tcatgcatccacattttgtg

SEQ ID NO: 50401 - RNA, 20 nt, synthetic construct
  source 1..20: mol_type = other RNA
tcatgccatcctggatttgg

SEQ ID NO: 50402 - RNA, 20 nt, synthetic construct
  source 1..20: mol_type = other RNA
tcatgcctgggtaattaaac

SEQ ID NO: 50403 - RNA, 20 nt, synthetic construct
  source 1..20: mol_type = other RNA
tcatgcctttcagcatagca

SEQ ID NO: 50404 - RNA, 20 nt, synthetic construct
  source 1..20: mol_type = other RNA
tcatgcgacatatcagggat

SEQ ID NO: 50405 - RNA, 20 nt, synthetic construct
  source 1..20: mol_type = other RNA
tcatgctgggagaccaggag

SEQ ID NO: 50406 - RNA, 20 nt, synthetic construct
  source 1..20: mol_type = other RNA
tcatgctgtgaatttggatt

SEQ ID NO: 50407 - RNA, 20 nt, synthetic construct
  source 1..20: mol_type = other RNA
tcatgcttaggatcccagtc

SEQ ID NO: 50408 - RNA, 20 nt, synthetic construct
  source 1..20: mol_type = other RNA
tcatgcttgctccagagaag

SEQ ID NO: 50409 - RNA, 20 nt, synthetic construct
  source 1..20: mol_type = other RNA
tcatggaagttatttaatct

SEQ ID NO: 50410 - RNA, 20 nt, synthetic construct
  source 1..20: mol_type = other RNA
tcatggactagactgcctga

SEQ ID NO: 50411 - RNA, 20 nt, synthetic construct
  source 1..20: mol_type = other RNA
tcatggacttcctattttat

SEQ ID NO: 50412 - RNA, 20 nt, synthetic construct
  source 1..20: mol_type = other RNA
tcatgggaagatgctccctc

SEQ ID NO: 50413 - RNA, 20 nt, synthetic construct
  source 1..20: mol_type = other RNA
tcatgggagccaaacttgaa

SEQ ID NO: 50414 - RNA, 20 nt, synthetic construct
  source 1..20: mol_type = other RNA
tcatgggccgggcgtagtgg

SEQ ID NO: 50415 - RNA, 20 nt, synthetic construct
  source 1..20: mol_type = other RNA
tcatgggtggaaattaaaca

SEQ ID NO: 50416 - RNA, 20 nt, synthetic construct
  source 1..20: mol_type = other RNA
tcatgggttgatttttaatg

SEQ ID NO: 50417 - RNA, 20 nt, synthetic construct
  source 1..20: mol_type = other RNA
tcatggtatcaattgtaatg

SEQ ID NO: 50418 - RNA, 20 nt, synthetic construct
  source 1..20: mol_type = other RNA
tcatggtgggccttgcaagc

SEQ ID NO: 50419 - RNA, 20 nt, synthetic construct
  source 1..20: mol_type = other RNA
tcatggtgtgtctgcgcctt

SEQ ID NO: 50420 - RNA, 20 nt, synthetic construct
  source 1..20: mol_type = other RNA
tcatggttttaatgggcatt

SEQ ID NO: 50421 - RNA, 20 nt, synthetic construct
  source 1..20: mol_type = other RNA
tcatgtaactaattactgtt

SEQ ID NO: 50422 - RNA, 20 nt, synthetic construct
  source 1..20: mol_type = other RNA
tcatgtaatgcaaactctaa

SEQ ID NO: 50423 - RNA, 20 nt, synthetic construct
  source 1..20: mol_type = other RNA
tcatgtacaatgaattagca

SEQ ID NO: 50424 - RNA, 20 nt, synthetic construct
  source 1..20: mol_type = other RNA
tcatgtatatgctgtttttg

SEQ ID NO: 50425 - RNA, 20 nt, synthetic construct
  source 1..20: mol_type = other RNA
tcatgtatgttttagcctta

SEQ ID NO: 50426 - RNA, 20 nt, synthetic construct
  source 1..20: mol_type = other RNA
tcatgtattttcctaaccac

SEQ ID NO: 50427 - RNA, 20 nt, synthetic construct
  source 1..20: mol_type = other RNA
tcatgtcaaatttttcacat

SEQ ID NO: 50428 - RNA, 20 nt, synthetic construct
  source 1..20: mol_type = other RNA
tcatgtcaagaatgaagtca

SEQ ID NO: 50429 - RNA, 20 nt, synthetic construct
  source 1..20: mol_type = other RNA
tcatgtcagagacacatact

SEQ ID NO: 50430 - RNA, 20 nt, synthetic construct
  source 1..20: mol_type = other RNA
tcatgtccatagttaatgtg

SEQ ID NO: 50431 - RNA, 20 nt, synthetic construct
  source 1..20: mol_type = other RNA
tcatgtcccctgtccaagta

SEQ ID NO: 50432 - RNA, 20 nt, synthetic construct
  source 1..20: mol_type = other RNA
tcatgtctacctgtctttcc

SEQ ID NO: 50433 - RNA, 20 nt, synthetic construct
  source 1..20: mol_type = other RNA
tcatgtctgtgtagttcatc

SEQ ID NO: 50434 - RNA, 20 nt, synthetic construct
  source 1..20: mol_type = other RNA
tcatgtcttcttggattttc

SEQ ID NO: 50435 - RNA, 20 nt, synthetic construct
  source 1..20: mol_type = other RNA
tcatgtggggactttgtggc

SEQ ID NO: 50436 - RNA, 20 nt, synthetic construct
  source 1..20: mol_type = other RNA
tcatgtgtgcttacacacac

SEQ ID NO: 50437 - RNA, 20 nt, synthetic construct
  source 1..20: mol_type = other RNA
tcatgttagcataattcgaa

SEQ ID NO: 50438 - RNA, 20 nt, synthetic construct
  source 1..20: mol_type = other RNA
tcatgttcaaggtgttcctg

SEQ ID NO: 50439 - RNA, 20 nt, synthetic construct
  source 1..20: mol_type = other RNA
tcatgttcccggattggaaa

SEQ ID NO: 50440 - RNA, 20 nt, synthetic construct
  source 1..20: mol_type = other RNA
tcatgttctttatagcattt

SEQ ID NO: 50441 - RNA, 20 nt, synthetic construct
  source 1..20: mol_type = other RNA
tcatgttgaccatttttata

SEQ ID NO: 50442 - RNA, 20 nt, synthetic construct
  source 1..20: mol_type = other RNA
tcatgttgggtaaaaataat

SEQ ID NO: 50443 - RNA, 20 nt, synthetic construct
  source 1..20: mol_type = other RNA
tcatgtttacagaaatatac

SEQ ID NO: 50444 - RNA, 20 nt, synthetic construct
  source 1..20: mol_type = other RNA
tcatgtttgaattttccatt

SEQ ID NO: 50445 - RNA, 20 nt, synthetic construct
  source 1..20: mol_type = other RNA
tcatgtttgtggttttaacc

SEQ ID NO: 50446 - RNA, 20 nt, synthetic construct
  source 1..20: mol_type = other RNA
tcattaaaaatcaacccatg

SEQ ID NO: 50447 - RNA, 20 nt, synthetic construct
  source 1..20: mol_type = other RNA
tcattaaaaggtataaagga

SEQ ID NO: 50448 - RNA, 20 nt, synthetic construct
  source 1..20: mol_type = other RNA
tcattacagtctcgaccccc

SEQ ID NO: 50449 - RNA, 20 nt, synthetic construct
  source 1..20: mol_type = other RNA
tcattacatattttgtaacg

SEQ ID NO: 50450 - RNA, 20 nt, synthetic construct
  source 1..20: mol_type = other RNA
tcattacatttgcttaggct

SEQ ID NO: 50451 - RNA, 20 nt, synthetic construct
  source 1..20: mol_type = other RNA
tcattaccaggctggaagaa

SEQ ID NO: 50452 - RNA, 20 nt, synthetic construct
  source 1..20: mol_type = other RNA
tcattaccttatagatgacg

SEQ ID NO: 50453 - RNA, 20 nt, synthetic construct
  source 1..20: mol_type = other RNA
tcattacttttttgtagaga

SEQ ID NO: 50454 - RNA, 20 nt, synthetic construct
  source 1..20: mol_type = other RNA
tcattagaattcaggacagt

SEQ ID NO: 50455 - RNA, 20 nt, synthetic construct
  source 1..20: mol_type = other RNA
tcattaggttgatggctgta

SEQ ID NO: 50456 - RNA, 20 nt, synthetic construct
  source 1..20: mol_type = other RNA
tcattagttatctcttagac

SEQ ID NO: 50457 - RNA, 20 nt, synthetic construct
  source 1..20: mol_type = other RNA
tcattataacataaaagcgt

SEQ ID NO: 50458 - RNA, 20 nt, synthetic construct
  source 1..20: mol_type = other RNA
tcattatcccagacagatat

SEQ ID NO: 50459 - RNA, 20 nt, synthetic construct
  source 1..20: mol_type = other RNA
tcattatggttgttggctaa

SEQ ID NO: 50460 - RNA, 20 nt, synthetic construct
  source 1..20: mol_type = other RNA
tcattattaccaggttttaa

SEQ ID NO: 50461 - RNA, 20 nt, synthetic construct
  source 1..20: mol_type = other RNA
tcattcaaatgatattcact

SEQ ID NO: 50462 - RNA, 20 nt, synthetic construct
  source 1..20: mol_type = other RNA
tcattcacactagtcaccct

SEQ ID NO: 50463 - RNA, 20 nt, synthetic construct
  source 1..20: mol_type = other RNA
tcattcactagacacatttt

SEQ ID NO: 50464 - RNA, 20 nt, synthetic construct
  source 1..20: mol_type = other RNA
tcattcaggacactggaggt

SEQ ID NO: 50465 - RNA, 20 nt, synthetic construct
  source 1..20: mol_type = other RNA
tcattcaggtctatgtgaca

SEQ ID NO: 50466 - RNA, 20 nt, synthetic construct
  source 1..20: mol_type = other RNA
tcattcataaacacagaaca

SEQ ID NO: 50467 - RNA, 20 nt, synthetic construct
  source 1..20: mol_type = other RNA
tcattcatatttgttcaagc

SEQ ID NO: 50468 - RNA, 20 nt, synthetic construct
  source 1..20: mol_type = other RNA
tcattcatctaaacgtttgg

SEQ ID NO: 50469 - RNA, 20 nt, synthetic construct
  source 1..20: mol_type = other RNA
tcattcatctgcagtgtcca

SEQ ID NO: 50470 - RNA, 20 nt, synthetic construct
  source 1..20: mol_type = other RNA
tcattcatctgttaatgggc

SEQ ID NO: 50471 - RNA, 20 nt, synthetic construct
  source 1..20: mol_type = other RNA
tcattcatgacaagaatctt

SEQ ID NO: 50472 - RNA, 20 nt, synthetic construct
  source 1..20: mol_type = other RNA
tcattccaatccttccttca

SEQ ID NO: 50473 - RNA, 20 nt, synthetic construct
  source 1..20: mol_type = other RNA
tcattccgcgtttattagaa

SEQ ID NO: 50474 - RNA, 20 nt, synthetic construct
  source 1..20: mol_type = other RNA
tcattccgctaaacatttta

SEQ ID NO: 50475 - RNA, 20 nt, synthetic construct
  source 1..20: mol_type = other RNA
tcattcgtagcaggtttagg

SEQ ID NO: 50476 - RNA, 20 nt, synthetic construct
  source 1..20: mol_type = other RNA
tcattcgttcaaaacatcat

SEQ ID NO: 50477 - RNA, 20 nt, synthetic construct
  source 1..20: mol_type = other RNA
tcattctacctggagcctga

SEQ ID NO: 50478 - RNA, 20 nt, synthetic construct
  source 1..20: mol_type = other RNA
tcattctgcagtttgtgttt

SEQ ID NO: 50479 - RNA, 20 nt, synthetic construct
  source 1..20: mol_type = other RNA
tcattctggagtgttttctt

SEQ ID NO: 50480 - RNA, 20 nt, synthetic construct
  source 1..20: mol_type = other RNA
tcattcttattgattcagat

SEQ ID NO: 50481 - RNA, 20 nt, synthetic construct
  source 1..20: mol_type = other RNA
tcattcttctaataggaagt

SEQ ID NO: 50482 - RNA, 20 nt, synthetic construct
  source 1..20: mol_type = other RNA
tcattcttctctaatgtaaa

SEQ ID NO: 50483 - RNA, 20 nt, synthetic construct
  source 1..20: mol_type = other RNA
tcattcttgacatgattgag

SEQ ID NO: 50484 - RNA, 20 nt, synthetic construct
  source 1..20: mol_type = other RNA
tcattctttttactcgaggg

SEQ ID NO: 50485 - RNA, 20 nt, synthetic construct
  source 1..20: mol_type = other RNA
tcattgaaactcaatgttgg

SEQ ID NO: 50486 - RNA, 20 nt, synthetic construct
  source 1..20: mol_type = other RNA
tcattgaagctactattcca

SEQ ID NO: 50487 - RNA, 20 nt, synthetic construct
  source 1..20: mol_type = other RNA
tcattgcaccactgcactcc

SEQ ID NO: 50488 - RNA, 20 nt, synthetic construct
  source 1..20: mol_type = other RNA
tcattgcctatagacagcat

SEQ ID NO: 50489 - RNA, 20 nt, synthetic construct
  source 1..20: mol_type = other RNA
tcattgtacatgaagtcctc

SEQ ID NO: 50490 - RNA, 20 nt, synthetic construct
  source 1..20: mol_type = other RNA
tcattgtagctatatcccaa

SEQ ID NO: 50491 - RNA, 20 nt, synthetic construct
  source 1..20: mol_type = other RNA
tcattgtggatgagattaat

SEQ ID NO: 50492 - RNA, 20 nt, synthetic construct
  source 1..20: mol_type = other RNA
tcattgtgttgcccacgctg

SEQ ID NO: 50493 - RNA, 20 nt, synthetic construct
  source 1..20: mol_type = other RNA
tcattgttaggtgctggctt

SEQ ID NO: 50494 - RNA, 20 nt, synthetic construct
  source 1..20: mol_type = other RNA
tcattgttcagggaaggctg

SEQ ID NO: 50495 - RNA, 20 nt, synthetic construct
  source 1..20: mol_type = other RNA
tcattgttgtgtgttaaatt

SEQ ID NO: 50496 - RNA, 20 nt, synthetic construct
  source 1..20: mol_type = other RNA
tcatttaaacgtcagagcag

SEQ ID NO: 50497 - RNA, 20 nt, synthetic construct
  source 1..20: mol_type = other RNA
tcatttaattctatctgaac

SEQ ID NO: 50498 - RNA, 20 nt, synthetic construct
  source 1..20: mol_type = other RNA
tcatttacaaaaacacactg

SEQ ID NO: 50499 - RNA, 20 nt, synthetic construct
  source 1..20: mol_type = other RNA
tcatttactgaaatcctagc

SEQ ID NO: 50500 - RNA, 20 nt, synthetic construct
  source 1..20: mol_type = other RNA
tcatttagtaagtgtgagca

SEQ ID NO: 50501 - RNA, 20 nt, synthetic construct
  source 1..20: mol_type = other RNA
tcatttatacccaagtaaac

SEQ ID NO: 50502 - RNA, 20 nt, synthetic construct
  source 1..20: mol_type = other RNA
tcatttattaaagtagaagg

SEQ ID NO: 50503 - RNA, 20 nt, synthetic construct
  source 1..20: mol_type = other RNA
tcatttattctgttgcaaat

SEQ ID NO: 50504 - RNA, 20 nt, synthetic construct
  source 1..20: mol_type = other RNA
tcatttcaaaccaatgttct

SEQ ID NO: 50505 - RNA, 20 nt, synthetic construct
  source 1..20: mol_type = other RNA
tcatttcactcttttaaggt

SEQ ID NO: 50506 - RNA, 20 nt, synthetic construct
  source 1..20: mol_type = other RNA
tcatttcacttgattacttt

SEQ ID NO: 50507 - RNA, 20 nt, synthetic construct
  source 1..20: mol_type = other RNA
tcatttcaggaatgcaaagt

SEQ ID NO: 50508 - RNA, 20 nt, synthetic construct
  source 1..20: mol_type = other RNA
tcatttccaaagatcatggg

SEQ ID NO: 50509 - RNA, 20 nt, synthetic construct
  source 1..20: mol_type = other RNA
tcatttccaagattgaaaat

SEQ ID NO: 50510 - RNA, 20 nt, synthetic construct
  source 1..20: mol_type = other RNA
tcatttccgttgctgcatag

SEQ ID NO: 50511 - RNA, 20 nt, synthetic construct
  source 1..20: mol_type = other RNA
tcatttcctttcagtcggtt

SEQ ID NO: 50512 - RNA, 20 nt, synthetic construct
  source 1..20: mol_type = other RNA
tcatttctaagccatgtttc

SEQ ID NO: 50513 - RNA, 20 nt, synthetic construct
  source 1..20: mol_type = other RNA
tcatttctgcttagtcttct

SEQ ID NO: 50514 - RNA, 20 nt, synthetic construct
  source 1..20: mol_type = other RNA
tcatttctgcttgaatgtgc

SEQ ID NO: 50515 - RNA, 20 nt, synthetic construct
  source 1..20: mol_type = other RNA
tcatttgaactttccagaag

SEQ ID NO: 50516 - RNA, 20 nt, synthetic construct
  source 1..20: mol_type = other RNA
tcatttgaatgatgcgaaag

SEQ ID NO: 50517 - RNA, 20 nt, synthetic construct
  source 1..20: mol_type = other RNA
tcatttgagaatttcaggtg

SEQ ID NO: 50518 - RNA, 20 nt, synthetic construct
  source 1..20: mol_type = other RNA
tcatttgatcttttttatgc

SEQ ID NO: 50519 - RNA, 20 nt, synthetic construct
  source 1..20: mol_type = other RNA
tcatttgcagagcaaactca

SEQ ID NO: 50520 - RNA, 20 nt, synthetic construct
  source 1..20: mol_type = other RNA
tcatttggcctctgcggcgg

SEQ ID NO: 50521 - RNA, 20 nt, synthetic construct
  source 1..20: mol_type = other RNA
tcatttgtaattcatcctac

SEQ ID NO: 50522 - RNA, 20 nt, synthetic construct
  source 1..20: mol_type = other RNA
tcatttgtattatttctgtc

SEQ ID NO: 50523 - RNA, 20 nt, synthetic construct
  source 1..20: mol_type = other RNA
tcattttaaagggataatgc

SEQ ID NO: 50524 - RNA, 20 nt, synthetic construct
  source 1..20: mol_type = other RNA
tcattttaataagcttcgaa

SEQ ID NO: 50525 - RNA, 20 nt, synthetic construct
  source 1..20: mol_type = other RNA
tcattttactgctatacaac

SEQ ID NO: 50526 - RNA, 20 nt, synthetic construct
  source 1..20: mol_type = other RNA
tcattttataagggtgataa

SEQ ID NO: 50527 - RNA, 20 nt, synthetic construct
  source 1..20: mol_type = other RNA
tcattttgaaaaacagatct

SEQ ID NO: 50528 - RNA, 20 nt, synthetic construct
  source 1..20: mol_type = other RNA
tcattttggcaaattgtcag

SEQ ID NO: 50529 - RNA, 20 nt, synthetic construct
  source 1..20: mol_type = other RNA
tcatttttaagaaatcgttg

SEQ ID NO: 50530 - RNA, 20 nt, synthetic construct
  source 1..20: mol_type = other RNA
tcatttttcacttcttattg

SEQ ID NO: 50531 - RNA, 20 nt, synthetic construct
  source 1..20: mol_type = other RNA
tcatttttcaggggggccac

SEQ ID NO: 50532 - RNA, 20 nt, synthetic construct
  source 1..20: mol_type = other RNA
tcatttttgtattctgacct

SEQ ID NO: 50533 - RNA, 20 nt, synthetic construct
  source 1..20: mol_type = other RNA
tccaaaagcaggccctgaga

SEQ ID NO: 50534 - RNA, 20 nt, synthetic construct
  source 1..20: mol_type = other RNA
tccaaaagcctcaaaattta

SEQ ID NO: 50535 - RNA, 20 nt, synthetic construct
  source 1..20: mol_type = other RNA
tccaaaagcgaaaggcaaaa

SEQ ID NO: 50536 - RNA, 20 nt, synthetic construct
  source 1..20: mol_type = other RNA
tccaaaagggaaatatgaac

SEQ ID NO: 50537 - RNA, 20 nt, synthetic construct
  source 1..20: mol_type = other RNA
tccaaaagtgaatatagcta

SEQ ID NO: 50538 - RNA, 20 nt, synthetic construct
  source 1..20: mol_type = other RNA
tccaaaatattgaagaggga

SEQ ID NO: 50539 - RNA, 20 nt, synthetic construct
  source 1..20: mol_type = other RNA
tccaaaatcctctgtagata

SEQ ID NO: 50540 - RNA, 20 nt, synthetic construct
  source 1..20: mol_type = other RNA
tccaaacagaaaccctgtac

SEQ ID NO: 50541 - RNA, 20 nt, synthetic construct
  source 1..20: mol_type = other RNA
tccaaacagtgaccacagtt

SEQ ID NO: 50542 - RNA, 20 nt, synthetic construct
  source 1..20: mol_type = other RNA
tccaaacctttaagttctcc

SEQ ID NO: 50543 - RNA, 20 nt, synthetic construct
  source 1..20: mol_type = other RNA
tccaaacttctgaccttgtg

SEQ ID NO: 50544 - RNA, 20 nt, synthetic construct
  source 1..20: mol_type = other RNA
tccaaagaacaggagttacc

SEQ ID NO: 50545 - RNA, 20 nt, synthetic construct
  source 1..20: mol_type = other RNA
tccaaagataaaggtaagga

SEQ ID NO: 50546 - RNA, 20 nt, synthetic construct
  source 1..20: mol_type = other RNA
tccaaagatataaaaatggt

SEQ ID NO: 50547 - RNA, 20 nt, synthetic construct
  source 1..20: mol_type = other RNA
tccaaagatcatgggtttta

SEQ ID NO: 50548 - RNA, 20 nt, synthetic construct
  source 1..20: mol_type = other RNA
tccaaagcaaaccagacatt

SEQ ID NO: 50549 - RNA, 20 nt, synthetic construct
  source 1..20: mol_type = other RNA
tccaaagcaaacgtgcacac

SEQ ID NO: 50550 - RNA, 20 nt, synthetic construct
  source 1..20: mol_type = other RNA
tccaaagtatgcatagcagg

SEQ ID NO: 50551 - RNA, 20 nt, synthetic construct
  source 1..20: mol_type = other RNA
tccaaataatcccgcacctt

SEQ ID NO: 50552 - RNA, 20 nt, synthetic construct
  source 1..20: mol_type = other RNA
tccaaatgtctgtctttatg

SEQ ID NO: 50553 - RNA, 20 nt, synthetic construct
  source 1..20: mol_type = other RNA
tccaaattagctttctccca

SEQ ID NO: 50554 - RNA, 20 nt, synthetic construct
  source 1..20: mol_type = other RNA
tccaaattattgacaagacg

SEQ ID NO: 50555 - RNA, 20 nt, synthetic construct
  source 1..20: mol_type = other RNA
tccaaattcaaagcaagtta

SEQ ID NO: 50556 - RNA, 20 nt, synthetic construct
  source 1..20: mol_type = other RNA
tccaaattcacagcatgaat

SEQ ID NO: 50557 - RNA, 20 nt, synthetic construct
  source 1..20: mol_type = other RNA
tccaacaagggttggtgctt

SEQ ID NO: 50558 - RNA, 20 nt, synthetic construct
  source 1..20: mol_type = other RNA
tccaacaattcaacaatagc

SEQ ID NO: 50559 - RNA, 20 nt, synthetic construct
  source 1..20: mol_type = other RNA
tccaacagaagaagtttcta

SEQ ID NO: 50560 - RNA, 20 nt, synthetic construct
  source 1..20: mol_type = other RNA
tccaacagtttacacgcctt

SEQ ID NO: 50561 - RNA, 20 nt, synthetic construct
  source 1..20: mol_type = other RNA
tccaacatgccagctttggc

SEQ ID NO: 50562 - RNA, 20 nt, synthetic construct
  source 1..20: mol_type = other RNA
tccaacatggcaaaaccccg

SEQ ID NO: 50563 - RNA, 20 nt, synthetic construct
  source 1..20: mol_type = other RNA
tccaaccaagcccaactttt

SEQ ID NO: 50564 - RNA, 20 nt, synthetic construct
  source 1..20: mol_type = other RNA
tccaaccaatcgcagggcca

SEQ ID NO: 50565 - RNA, 20 nt, synthetic construct
  source 1..20: mol_type = other RNA
tccaaccactgaatcagatt

SEQ ID NO: 50566 - RNA, 20 nt, synthetic construct
  source 1..20: mol_type = other RNA
tccaaccatcttcttagtgt

SEQ ID NO: 50567 - RNA, 20 nt, synthetic construct
  source 1..20: mol_type = other RNA
tccaacccattccaggtttt

SEQ ID NO: 50568 - RNA, 20 nt, synthetic construct
  source 1..20: mol_type = other RNA
tccaacgaccggacgtggtg

SEQ ID NO: 50569 - RNA, 20 nt, synthetic construct
  source 1..20: mol_type = other RNA
tccaacgctttttatggaaa

SEQ ID NO: 50570 - RNA, 20 nt, synthetic construct
  source 1..20: mol_type = other RNA
tccaactcaaaaaagaaaaa

SEQ ID NO: 50571 - RNA, 20 nt, synthetic construct
  source 1..20: mol_type = other RNA
tccaactgcagtctgtcctc

SEQ ID NO: 50572 - RNA, 20 nt, synthetic construct
  source 1..20: mol_type = other RNA
tccaactgtataaatgttca

SEQ ID NO: 50573 - RNA, 20 nt, synthetic construct
  source 1..20: mol_type = other RNA
tccaagaaccctttgttatc

SEQ ID NO: 50574 - RNA, 20 nt, synthetic construct
  source 1..20: mol_type = other RNA
tccaagaagacatgataaat

SEQ ID NO: 50575 - RNA, 20 nt, synthetic construct
  source 1..20: mol_type = other RNA
tccaagaaggctagcacaga

SEQ ID NO: 50576 - RNA, 20 nt, synthetic construct
  source 1..20: mol_type = other RNA
tccaagacaggaagaattat

SEQ ID NO: 50577 - RNA, 20 nt, synthetic construct
  source 1..20: mol_type = other RNA
tccaagagaggaataaatgg

SEQ ID NO: 50578 - RNA, 20 nt, synthetic construct
  source 1..20: mol_type = other RNA
tccaagattgaaaatggttt

SEQ ID NO: 50579 - RNA, 20 nt, synthetic construct
  source 1..20: mol_type = other RNA
tccaagattttcccaatctc

SEQ ID NO: 50580 - RNA, 20 nt, synthetic construct
  source 1..20: mol_type = other RNA
tccaagcacaaacctggcaa

SEQ ID NO: 50581 - RNA, 20 nt, synthetic construct
  source 1..20: mol_type = other RNA
tccaagcacacagtttgaga

SEQ ID NO: 50582 - RNA, 20 nt, synthetic construct
  source 1..20: mol_type = other RNA
tccaagccttaaaagtgctg

SEQ ID NO: 50583 - RNA, 20 nt, synthetic construct
  source 1..20: mol_type = other RNA
tccaaggaaagtgtgcttgg

SEQ ID NO: 50584 - RNA, 20 nt, synthetic construct
  source 1..20: mol_type = other RNA
tccaaggacagaaattcaac

SEQ ID NO: 50585 - RNA, 20 nt, synthetic construct
  source 1..20: mol_type = other RNA
tccaaggctgcccgctccgg

SEQ ID NO: 50586 - RNA, 20 nt, synthetic construct
  source 1..20: mol_type = other RNA
tccaaggtacaattacacat

SEQ ID NO: 50587 - RNA, 20 nt, synthetic construct
  source 1..20: mol_type = other RNA
tccaagtattgtatcaatgt

SEQ ID NO: 50588 - RNA, 20 nt, synthetic construct
  source 1..20: mol_type = other RNA
tccaagtatttctcatctgt

SEQ ID NO: 50589 - RNA, 20 nt, synthetic construct
  source 1..20: mol_type = other RNA
tccaagtcccggaagctggg

SEQ ID NO: 50590 - RNA, 20 nt, synthetic construct
  source 1..20: mol_type = other RNA
tccaagtctcatgcaattcc

SEQ ID NO: 50591 - RNA, 20 nt, synthetic construct
  source 1..20: mol_type = other RNA
tccaagtgtaaaaagacatt

SEQ ID NO: 50592 - RNA, 20 nt, synthetic construct
  source 1..20: mol_type = other RNA
tccaagtttctagccataat

SEQ ID NO: 50593 - RNA, 20 nt, synthetic construct
  source 1..20: mol_type = other RNA
tccaataagttaactgaaat

SEQ ID NO: 50594 - RNA, 20 nt, synthetic construct
  source 1..20: mol_type = other RNA
tccaatcactggctagtagg

SEQ ID NO: 50595 - RNA, 20 nt, synthetic construct
  source 1..20: mol_type = other RNA
tccaatccgggaacatgaca

SEQ ID NO: 50596 - RNA, 20 nt, synthetic construct
  source 1..20: mol_type = other RNA
tccaatcctcagccccctcc

SEQ ID NO: 50597 - RNA, 20 nt, synthetic construct
  source 1..20: mol_type = other RNA
tccaatccttccttcatgtc

SEQ ID NO: 50598 - RNA, 20 nt, synthetic construct
  source 1..20: mol_type = other RNA
tccaattgcagaaaaataga

SEQ ID NO: 50599 - RNA, 20 nt, synthetic construct
  source 1..20: mol_type = other RNA
tccaatttctttggctgtta

SEQ ID NO: 50600 - RNA, 20 nt, synthetic construct
  source 1..20: mol_type = other RNA
tccaattttttggcatacaa

SEQ ID NO: 50601 - RNA, 20 nt, synthetic construct
  source 1..20: mol_type = other RNA
tccacaacattgtgcaacca

SEQ ID NO: 50602 - RNA, 20 nt, synthetic construct
  source 1..20: mol_type = other RNA
tccacaaccactggggagtg

SEQ ID NO: 50603 - RNA, 20 nt, synthetic construct
  source 1..20: mol_type = other RNA
tccacaatgagacatttgag

SEQ ID NO: 50604 - RNA, 20 nt, synthetic construct
  source 1..20: mol_type = other RNA
tccacacaatggtcagagtt

SEQ ID NO: 50605 - RNA, 20 nt, synthetic construct
  source 1..20: mol_type = other RNA
tccacacacgaagtagtttt

SEQ ID NO: 50606 - RNA, 20 nt, synthetic construct
  source 1..20: mol_type = other RNA
tccacacctggcccctttca

SEQ ID NO: 50607 - RNA, 20 nt, synthetic construct
  source 1..20: mol_type = other RNA
tccacagaggctttttatat

SEQ ID NO: 50608 - RNA, 20 nt, synthetic construct
  source 1..20: mol_type = other RNA
tccacagagttcagcttaca

SEQ ID NO: 50609 - RNA, 20 nt, synthetic construct
  source 1..20: mol_type = other RNA
tccacagatctttttgtgta

SEQ ID NO: 50610 - RNA, 20 nt, synthetic construct
  source 1..20: mol_type = other RNA
tccacagctatcaggccttc

SEQ ID NO: 50611 - RNA, 20 nt, synthetic construct
  source 1..20: mol_type = other RNA
tccacagctttcttttccaa

SEQ ID NO: 50612 - RNA, 20 nt, synthetic construct
  source 1..20: mol_type = other RNA
tccacaggctttgacttctc

SEQ ID NO: 50613 - RNA, 20 nt, synthetic construct
  source 1..20: mol_type = other RNA
tccacagtatgctgtttaca

SEQ ID NO: 50614 - RNA, 20 nt, synthetic construct
  source 1..20: mol_type = other RNA
tccacagtgactttactgtt

SEQ ID NO: 50615 - RNA, 20 nt, synthetic construct
  source 1..20: mol_type = other RNA
tccacataaagtcttgctgg

SEQ ID NO: 50616 - RNA, 20 nt, synthetic construct
  source 1..20: mol_type = other RNA
tccacataattgaacccact

SEQ ID NO: 50617 - RNA, 20 nt, synthetic construct
  source 1..20: mol_type = other RNA
tccacatattttaaaagtca

SEQ ID NO: 50618 - RNA, 20 nt, synthetic construct
  source 1..20: mol_type = other RNA
tccacatccttgccaacagt

SEQ ID NO: 50619 - RNA, 20 nt, synthetic construct
  source 1..20: mol_type = other RNA
tccacatgttactcattatg

SEQ ID NO: 50620 - RNA, 20 nt, synthetic construct
  source 1..20: mol_type = other RNA
tccacattgtcttaattatt

SEQ ID NO: 50621 - RNA, 20 nt, synthetic construct
  source 1..20: mol_type = other RNA
tccacatttctaatttccaa

SEQ ID NO: 50622 - RNA, 20 nt, synthetic construct
  source 1..20: mol_type = other RNA
tccacatttctacacaacat

SEQ ID NO: 50623 - RNA, 20 nt, synthetic construct
  source 1..20: mol_type = other RNA
tccacatttggttttactac

SEQ ID NO: 50624 - RNA, 20 nt, synthetic construct
  source 1..20: mol_type = other RNA
tccacattttgtgacaagtt

SEQ ID NO: 50625 - RNA, 20 nt, synthetic construct
  source 1..20: mol_type = other RNA
tccaccactccaccttagcc

SEQ ID NO: 50626 - RNA, 20 nt, synthetic construct
  source 1..20: mol_type = other RNA
tccaccagacaaaaatagag

SEQ ID NO: 50627 - RNA, 20 nt, synthetic construct
  source 1..20: mol_type = other RNA
tccaccagcatcttttgacg

SEQ ID NO: 50628 - RNA, 20 nt, synthetic construct
  source 1..20: mol_type = other RNA
tccacccaagtggagcctgc

SEQ ID NO: 50629 - RNA, 20 nt, synthetic construct
  source 1..20: mol_type = other RNA
tccacccacttgtcccatgg

SEQ ID NO: 50630 - RNA, 20 nt, synthetic construct
  source 1..20: mol_type = other RNA
tccacccatgaagccagcat

SEQ ID NO: 50631 - RNA, 20 nt, synthetic construct
  source 1..20: mol_type = other RNA
tccaccctgccccttatcct

SEQ ID NO: 50632 - RNA, 20 nt, synthetic construct
  source 1..20: mol_type = other RNA
tccacctcagaaacaaacaa

SEQ ID NO: 50633 - RNA, 20 nt, synthetic construct
  source 1..20: mol_type = other RNA
tccacctccatcactgactg

SEQ ID NO: 50634 - RNA, 20 nt, synthetic construct
  source 1..20: mol_type = other RNA
tccacctgctctttatctcc

SEQ ID NO: 50635 - RNA, 20 nt, synthetic construct
  source 1..20: mol_type = other RNA
tccacctggcaacaaaggcg

SEQ ID NO: 50636 - RNA, 20 nt, synthetic construct
  source 1..20: mol_type = other RNA
tccaccttagcccaagctac

SEQ ID NO: 50637 - RNA, 20 nt, synthetic construct
  source 1..20: mol_type = other RNA
tccacgcccattaggatagc

SEQ ID NO: 50638 - RNA, 20 nt, synthetic construct
  source 1..20: mol_type = other RNA
tccacgcgtaagggtacaga

SEQ ID NO: 50639 - RNA, 20 nt, synthetic construct
  source 1..20: mol_type = other RNA
tccacgctgtggcttgggtg

SEQ ID NO: 50640 - RNA, 20 nt, synthetic construct
  source 1..20: mol_type = other RNA
tccacggaatgcccctttga

SEQ ID NO: 50641 - RNA, 20 nt, synthetic construct
  source 1..20: mol_type = other RNA
tccacgggtaaaaataaatc

SEQ ID NO: 50642 - RNA, 20 nt, synthetic construct
  source 1..20: mol_type = other RNA
tccacgtgggtgacagagca

SEQ ID NO: 50643 - RNA, 20 nt, synthetic construct
  source 1..20: mol_type = other RNA
tccactaatgtccttttcct

SEQ ID NO: 50644 - RNA, 20 nt, synthetic construct
  source 1..20: mol_type = other RNA
tccactaggggactaacagg

SEQ ID NO: 50645 - RNA, 20 nt, synthetic construct
  source 1..20: mol_type = other RNA
tccactagtgggatcaaacc

SEQ ID NO: 50646 - RNA, 20 nt, synthetic construct
  source 1..20: mol_type = other RNA
tccactcacctgtcatgtca

SEQ ID NO: 50647 - RNA, 20 nt, synthetic construct
  source 1..20: mol_type = other RNA
tccactccagcctgagcaac

SEQ ID NO: 50648 - RNA, 20 nt, synthetic construct
  source 1..20: mol_type = other RNA
tccactctctggctgcaatt

SEQ ID NO: 50649 - RNA, 20 nt, synthetic construct
  source 1..20: mol_type = other RNA
tccactgcacagtatgcggg

SEQ ID NO: 50650 - RNA, 20 nt, synthetic construct
  source 1..20: mol_type = other RNA
tccactgtcagtgggactgg

SEQ ID NO: 50651 - RNA, 20 nt, synthetic construct
  source 1..20: mol_type = other RNA
tccacttatatgaagctaaa

SEQ ID NO: 50652 - RNA, 20 nt, synthetic construct
  source 1..20: mol_type = other RNA
tccacttcccactgctatga

SEQ ID NO: 50653 - RNA, 20 nt, synthetic construct
  source 1..20: mol_type = other RNA
tccacttgggtggaagctgt

SEQ ID NO: 50654 - RNA, 20 nt, synthetic construct
  source 1..20: mol_type = other RNA
tccactttcatgatttggtg

SEQ ID NO: 50655 - RNA, 20 nt, synthetic construct
  source 1..20: mol_type = other RNA
tccactttccatcttaggcc

SEQ ID NO: 50656 - RNA, 20 nt, synthetic construct
  source 1..20: mol_type = other RNA
tccactttgaggttattaag

SEQ ID NO: 50657 - RNA, 20 nt, synthetic construct
  source 1..20: mol_type = other RNA
tccagaaaaccagaaaagtg

SEQ ID NO: 50658 - RNA, 20 nt, synthetic construct
  source 1..20: mol_type = other RNA
tccagaaaactggcaatcaa

SEQ ID NO: 50659 - RNA, 20 nt, synthetic construct
  source 1..20: mol_type = other RNA
tccagaaacttccaaccatc

SEQ ID NO: 50660 - RNA, 20 nt, synthetic construct
  source 1..20: mol_type = other RNA
tccagaagagaatggctgga

SEQ ID NO: 50661 - RNA, 20 nt, synthetic construct
  source 1..20: mol_type = other RNA
tccagaaggagaaaacaaaa

SEQ ID NO: 50662 - RNA, 20 nt, synthetic construct
  source 1..20: mol_type = other RNA
tccagaagtaactcttgagt

SEQ ID NO: 50663 - RNA, 20 nt, synthetic construct
  source 1..20: mol_type = other RNA
tccagaagtcactttttatt

SEQ ID NO: 50664 - RNA, 20 nt, synthetic construct
  source 1..20: mol_type = other RNA
tccagaatgaccgagatact

SEQ ID NO: 50665 - RNA, 20 nt, synthetic construct
  source 1..20: mol_type = other RNA
tccagacaaaaattttcatt

SEQ ID NO: 50666 - RNA, 20 nt, synthetic construct
  source 1..20: mol_type = other RNA
tccagacagctaatatgctg

SEQ ID NO: 50667 - RNA, 20 nt, synthetic construct
  source 1..20: mol_type = other RNA
tccagaccagcagttcaagc

SEQ ID NO: 50668 - RNA, 20 nt, synthetic construct
  source 1..20: mol_type = other RNA
tccagactgggcaacagaga

SEQ ID NO: 50669 - RNA, 20 nt, synthetic construct
  source 1..20: mol_type = other RNA
tccagagaagttttccagga

SEQ ID NO: 50670 - RNA, 20 nt, synthetic construct
  source 1..20: mol_type = other RNA
tccagagaattcagagtggc

SEQ ID NO: 50671 - RNA, 20 nt, synthetic construct
  source 1..20: mol_type = other RNA
tccagagacaaagcataaaa

SEQ ID NO: 50672 - RNA, 20 nt, synthetic construct
  source 1..20: mol_type = other RNA
tccagaggaggaagagatag

SEQ ID NO: 50673 - RNA, 20 nt, synthetic construct
  source 1..20: mol_type = other RNA
tccagagggtaacgtgagct

SEQ ID NO: 50674 - RNA, 20 nt, synthetic construct
  source 1..20: mol_type = other RNA
tccagaggtgagctttttct

SEQ ID NO: 50675 - RNA, 20 nt, synthetic construct
  source 1..20: mol_type = other RNA
tccagaggttcttttaaatg

SEQ ID NO: 50676 - RNA, 20 nt, synthetic construct
  source 1..20: mol_type = other RNA
tccagataaattatagctcc

SEQ ID NO: 50677 - RNA, 20 nt, synthetic construct
  source 1..20: mol_type = other RNA
tccagatattatcctccaat

SEQ ID NO: 50678 - RNA, 20 nt, synthetic construct
  source 1..20: mol_type = other RNA
tccagatgaagcagggaaat

SEQ ID NO: 50679 - RNA, 20 nt, synthetic construct
  source 1..20: mol_type = other RNA
tccagatggacaaattacca

SEQ ID NO: 50680 - RNA, 20 nt, synthetic construct
  source 1..20: mol_type = other RNA
tccagatgtagagaaacagg

SEQ ID NO: 50681 - RNA, 20 nt, synthetic construct
  source 1..20: mol_type = other RNA
tccagatgttttacacatgt

SEQ ID NO: 50682 - RNA, 20 nt, synthetic construct
  source 1..20: mol_type = other RNA
tccagattgaaatctaggca

SEQ ID NO: 50683 - RNA, 20 nt, synthetic construct
  source 1..20: mol_type = other RNA
tccagattgatatctgagtg

SEQ ID NO: 50684 - RNA, 20 nt, synthetic construct
  source 1..20: mol_type = other RNA
tccagcaagactttatgtgg

SEQ ID NO: 50685 - RNA, 20 nt, synthetic construct
  source 1..20: mol_type = other RNA
tccagcaccacccttgatgt

SEQ ID NO: 50686 - RNA, 20 nt, synthetic construct
  source 1..20: mol_type = other RNA
tccagcagggtaaagtcaat

SEQ ID NO: 50687 - RNA, 20 nt, synthetic construct
  source 1..20: mol_type = other RNA
tccagcagtttcacttctta

SEQ ID NO: 50688 - RNA, 20 nt, synthetic construct
  source 1..20: mol_type = other RNA
tccagcatccctccagtcca

SEQ ID NO: 50689 - RNA, 20 nt, synthetic construct
  source 1..20: mol_type = other RNA
tccagcattttataggcatt

SEQ ID NO: 50690 - RNA, 20 nt, synthetic construct
  source 1..20: mol_type = other RNA
tccagccattctcttctgga

SEQ ID NO: 50691 - RNA, 20 nt, synthetic construct
  source 1..20: mol_type = other RNA
tccagcccccagttttgttg

SEQ ID NO: 50692 - RNA, 20 nt, synthetic construct
  source 1..20: mol_type = other RNA
tccagcctggtaatgaatag

SEQ ID NO: 50693 - RNA, 20 nt, synthetic construct
  source 1..20: mol_type = other RNA
tccagcctggtcaacagggt

SEQ ID NO: 50694 - RNA, 20 nt, synthetic construct
  source 1..20: mol_type = other RNA
tccagccttaatctcctgag

SEQ ID NO: 50695 - RNA, 20 nt, synthetic construct
  source 1..20: mol_type = other RNA
tccagccttggtaagagtga

SEQ ID NO: 50696 - RNA, 20 nt, synthetic construct
  source 1..20: mol_type = other RNA
tccagcctttaatttagcgt

SEQ ID NO: 50697 - RNA, 20 nt, synthetic construct
  source 1..20: mol_type = other RNA
tccagcgctaagcactgcgc

SEQ ID NO: 50698 - RNA, 20 nt, synthetic construct
  source 1..20: mol_type = other RNA
tccagcgtgtgcatgaccct

SEQ ID NO: 50699 - RNA, 20 nt, synthetic construct
  source 1..20: mol_type = other RNA
tccagctaattttcattact

SEQ ID NO: 50700 - RNA, 20 nt, synthetic construct
  source 1..20: mol_type = other RNA
tccagctcacgttaccctct

SEQ ID NO: 50701 - RNA, 20 nt, synthetic construct
  source 1..20: mol_type = other RNA
tccagcttcactcttctgca

SEQ ID NO: 50702 - RNA, 20 nt, synthetic construct
  source 1..20: mol_type = other RNA
tccagctttctaattctgac

SEQ ID NO: 50703 - RNA, 20 nt, synthetic construct
  source 1..20: mol_type = other RNA
tccagcttttattagagctt

SEQ ID NO: 50704 - RNA, 20 nt, synthetic construct
  source 1..20: mol_type = other RNA
tccaggaaaagcaaatgtca

SEQ ID NO: 50705 - RNA, 20 nt, synthetic construct
  source 1..20: mol_type = other RNA
tccaggaacttacagtaaga

SEQ ID NO: 50706 - RNA, 20 nt, synthetic construct
  source 1..20: mol_type = other RNA
tccaggaccaatttaccatc

SEQ ID NO: 50707 - RNA, 20 nt, synthetic construct
  source 1..20: mol_type = other RNA
tccaggatcaaatctggctg

SEQ ID NO: 50708 - RNA, 20 nt, synthetic construct
  source 1..20: mol_type = other RNA
tccaggatccagtctctacc

SEQ ID NO: 50709 - RNA, 20 nt, synthetic construct
  source 1..20: mol_type = other RNA
tccaggatcttactgtaagt

SEQ ID NO: 50710 - RNA, 20 nt, synthetic construct
  source 1..20: mol_type = other RNA
tccaggatggcatgaaatgg

SEQ ID NO: 50711 - RNA, 20 nt, synthetic construct
  source 1..20: mol_type = other RNA
tccaggcaaaagatgatgaa

SEQ ID NO: 50712 - RNA, 20 nt, synthetic construct
  source 1..20: mol_type = other RNA
tccaggccaacagggccact

SEQ ID NO: 50713 - RNA, 20 nt, synthetic construct
  source 1..20: mol_type = other RNA
tccaggcctcgctcttggct

SEQ ID NO: 50714 - RNA, 20 nt, synthetic construct
  source 1..20: mol_type = other RNA
tccaggcgcctgcattgcat

SEQ ID NO: 50715 - RNA, 20 nt, synthetic construct
  source 1..20: mol_type = other RNA
tccagggaggaatccttcag

SEQ ID NO: 50716 - RNA, 20 nt, synthetic construct
  source 1..20: mol_type = other RNA
tccaggggaatagaaagtta

SEQ ID NO: 50717 - RNA, 20 nt, synthetic construct
  source 1..20: mol_type = other RNA
tccaggggacatgctctgat

SEQ ID NO: 50718 - RNA, 20 nt, synthetic construct
  source 1..20: mol_type = other RNA
tccaggggggaaaaaaccat

SEQ ID NO: 50719 - RNA, 20 nt, synthetic construct
  source 1..20: mol_type = other RNA
tccagggggtatggagacac

SEQ ID NO: 50720 - RNA, 20 nt, synthetic construct
  source 1..20: mol_type = other RNA
tccaggtagaatgaaaattt

SEQ ID NO: 50721 - RNA, 20 nt, synthetic construct
  source 1..20: mol_type = other RNA
tccaggtcattacatatttt

SEQ ID NO: 50722 - RNA, 20 nt, synthetic construct
  source 1..20: mol_type = other RNA
tccaggtgtatgatcttatt

SEQ ID NO: 50723 - RNA, 20 nt, synthetic construct
  source 1..20: mol_type = other RNA
tccaggttcatccatgttgt

SEQ ID NO: 50724 - RNA, 20 nt, synthetic construct
  source 1..20: mol_type = other RNA
tccaggtttacaggatatca

SEQ ID NO: 50725 - RNA, 20 nt, synthetic construct
  source 1..20: mol_type = other RNA
tccaggttttatctctctca

SEQ ID NO: 50726 - RNA, 20 nt, synthetic construct
  source 1..20: mol_type = other RNA
tccagtaatcttgctaaaca

SEQ ID NO: 50727 - RNA, 20 nt, synthetic construct
  source 1..20: mol_type = other RNA
tccagtacatctcaattcag

SEQ ID NO: 50728 - RNA, 20 nt, synthetic construct
  source 1..20: mol_type = other RNA
tccagtactttttcatccaa

SEQ ID NO: 50729 - RNA, 20 nt, synthetic construct
  source 1..20: mol_type = other RNA
tccagtatattcatagtagc

SEQ ID NO: 50730 - RNA, 20 nt, synthetic construct
  source 1..20: mol_type = other RNA
tccagtatgacctcctccca

SEQ ID NO: 50731 - RNA, 20 nt, synthetic construct
  source 1..20: mol_type = other RNA
tccagtatgatgccactcaa

SEQ ID NO: 50732 - RNA, 20 nt, synthetic construct
  source 1..20: mol_type = other RNA
tccagtccagcaccaccctt

SEQ ID NO: 50733 - RNA, 20 nt, synthetic construct
  source 1..20: mol_type = other RNA
tccagtcccactgacagtgg

SEQ ID NO: 50734 - RNA, 20 nt, synthetic construct
  source 1..20: mol_type = other RNA
tccagtcctgctaacacctt

SEQ ID NO: 50735 - RNA, 20 nt, synthetic construct
  source 1..20: mol_type = other RNA
tccagtcctttgtgtcaagt

SEQ ID NO: 50736 - RNA, 20 nt, synthetic construct
  source 1..20: mol_type = other RNA
tccagtctctacccagcact

SEQ ID NO: 50737 - RNA, 20 nt, synthetic construct
  source 1..20: mol_type = other RNA
tccagtctctgcaacatttg

SEQ ID NO: 50738 - RNA, 20 nt, synthetic construct
  source 1..20: mol_type = other RNA
tccagtcttcaggtctctct

SEQ ID NO: 50739 - RNA, 20 nt, synthetic construct
  source 1..20: mol_type = other RNA
tccagtcttctcatacagat

SEQ ID NO: 50740 - RNA, 20 nt, synthetic construct
  source 1..20: mol_type = other RNA
tccagtgaagtcatctggtc

SEQ ID NO: 50741 - RNA, 20 nt, synthetic construct
  source 1..20: mol_type = other RNA
tccagtgacacctgaggggt

SEQ ID NO: 50742 - RNA, 20 nt, synthetic construct
  source 1..20: mol_type = other RNA
tccagtggcccccctgaaaa

SEQ ID NO: 50743 - RNA, 20 nt, synthetic construct
  source 1..20: mol_type = other RNA
tccagtggttttttgttttt

SEQ ID NO: 50744 - RNA, 20 nt, synthetic construct
  source 1..20: mol_type = other RNA
tccagtgtcctgaatgattt

SEQ ID NO: 50745 - RNA, 20 nt, synthetic construct
  source 1..20: mol_type = other RNA
tccagtgtttggtttttatg

SEQ ID NO: 50746 - RNA, 20 nt, synthetic construct
  source 1..20: mol_type = other RNA
tccagtgttttaggggggaa

SEQ ID NO: 50747 - RNA, 20 nt, synthetic construct
  source 1..20: mol_type = other RNA
tccagtttaaagctttgtga

SEQ ID NO: 50748 - RNA, 20 nt, synthetic construct
  source 1..20: mol_type = other RNA
tccagtttatatgcctagat

SEQ ID NO: 50749 - RNA, 20 nt, synthetic construct
  source 1..20: mol_type = other RNA
tccagtttctctgctttttc

SEQ ID NO: 50750 - RNA, 20 nt, synthetic construct
  source 1..20: mol_type = other RNA
tccataaaaaccaaacactg

SEQ ID NO: 50751 - RNA, 20 nt, synthetic construct
  source 1..20: mol_type = other RNA
tccataaaaagcgttggaga

SEQ ID NO: 50752 - RNA, 20 nt, synthetic construct
  source 1..20: mol_type = other RNA
tccataaatgtttgctaata

SEQ ID NO: 50753 - RNA, 20 nt, synthetic construct
  source 1..20: mol_type = other RNA
tccataagatctgtctttgg

SEQ ID NO: 50754 - RNA, 20 nt, synthetic construct
  source 1..20: mol_type = other RNA
tccataagtccctaacagtc

SEQ ID NO: 50755 - RNA, 20 nt, synthetic construct
  source 1..20: mol_type = other RNA
tccatacaaggagacctact

SEQ ID NO: 50756 - RNA, 20 nt, synthetic construct
  source 1..20: mol_type = other RNA
tccataccccctggaaataa

SEQ ID NO: 50757 - RNA, 20 nt, synthetic construct
  source 1..20: mol_type = other RNA
tccatacgaaagcctttatt

SEQ ID NO: 50758 - RNA, 20 nt, synthetic construct
  source 1..20: mol_type = other RNA
tccatagcttcctaagaaag

SEQ ID NO: 50759 - RNA, 20 nt, synthetic construct
  source 1..20: mol_type = other RNA
tccatagttaatgtgtgaag

SEQ ID NO: 50760 - RNA, 20 nt, synthetic construct
  source 1..20: mol_type = other RNA
tccatatgggatgcttaaag

SEQ ID NO: 50761 - RNA, 20 nt, synthetic construct
  source 1..20: mol_type = other RNA
tccatcaacagcagaacaaa

SEQ ID NO: 50762 - RNA, 20 nt, synthetic construct
  source 1..20: mol_type = other RNA
tccatcactgactggctgtg

SEQ ID NO: 50763 - RNA, 20 nt, synthetic construct
  source 1..20: mol_type = other RNA
tccatcagagaggcttttta

SEQ ID NO: 50764 - RNA, 20 nt, synthetic construct
  source 1..20: mol_type = other RNA
tccatcaggaaaaccagttt

SEQ ID NO: 50765 - RNA, 20 nt, synthetic construct
  source 1..20: mol_type = other RNA
tccatcagtggttgtgcttc

SEQ ID NO: 50766 - RNA, 20 nt, synthetic construct
  source 1..20: mol_type = other RNA
tccatcgagagatgaatgga

SEQ ID NO: 50767 - RNA, 20 nt, synthetic construct
  source 1..20: mol_type = other RNA
tccatcggtctgtatttctg

SEQ ID NO: 50768 - RNA, 20 nt, synthetic construct
  source 1..20: mol_type = other RNA
tccatctcaagaaaacaaga

SEQ ID NO: 50769 - RNA, 20 nt, synthetic construct
  source 1..20: mol_type = other RNA
tccatctcccatcactagaa

SEQ ID NO: 50770 - RNA, 20 nt, synthetic construct
  source 1..20: mol_type = other RNA
tccatctggattatagtggt

SEQ ID NO: 50771 - RNA, 20 nt, synthetic construct
  source 1..20: mol_type = other RNA
tccatctgttatagtgtgaa

SEQ ID NO: 50772 - RNA, 20 nt, synthetic construct
  source 1..20: mol_type = other RNA
tccatcttaaaattcatatg

SEQ ID NO: 50773 - RNA, 20 nt, synthetic construct
  source 1..20: mol_type = other RNA
tccatcttaggccataaatc

SEQ ID NO: 50774 - RNA, 20 nt, synthetic construct
  source 1..20: mol_type = other RNA
tccatcttcacgtggcgctc

SEQ ID NO: 50775 - RNA, 20 nt, synthetic construct
  source 1..20: mol_type = other RNA
tccatgaaacttatttccag

SEQ ID NO: 50776 - RNA, 20 nt, synthetic construct
  source 1..20: mol_type = other RNA
tccatgaagaaaacactcca

SEQ ID NO: 50777 - RNA, 20 nt, synthetic construct
  source 1..20: mol_type = other RNA
tccatgagattacatagcaa

SEQ ID NO: 50778 - RNA, 20 nt, synthetic construct
  source 1..20: mol_type = other RNA
tccatggaaactacaattac

SEQ ID NO: 50779 - RNA, 20 nt, synthetic construct
  source 1..20: mol_type = other RNA
tccatggaggggccagttga

SEQ ID NO: 50780 - RNA, 20 nt, synthetic construct
  source 1..20: mol_type = other RNA
tccatggtatgtgccatctc

SEQ ID NO: 50781 - RNA, 20 nt, synthetic construct
  source 1..20: mol_type = other RNA
tccatgtcctcacctcacat

SEQ ID NO: 50782 - RNA, 20 nt, synthetic construct
  source 1..20: mol_type = other RNA
tccatgtcttggctattgtc

SEQ ID NO: 50783 - RNA, 20 nt, synthetic construct
  source 1..20: mol_type = other RNA
tccatgttgttgaatgtggc

SEQ ID NO: 50784 - RNA, 20 nt, synthetic construct
  source 1..20: mol_type = other RNA
tccattacatcaacatataa

SEQ ID NO: 50785 - RNA, 20 nt, synthetic construct
  source 1..20: mol_type = other RNA
tccattactcgtggttatag

SEQ ID NO: 50786 - RNA, 20 nt, synthetic construct
  source 1..20: mol_type = other RNA
tccattatatgaataaacca

SEQ ID NO: 50787 - RNA, 20 nt, synthetic construct
  source 1..20: mol_type = other RNA
tccattattccataaaaacc

SEQ ID NO: 50788 - RNA, 20 nt, synthetic construct
  source 1..20: mol_type = other RNA
tccattcaatccttgtaact

SEQ ID NO: 50789 - RNA, 20 nt, synthetic construct
  source 1..20: mol_type = other RNA
tccattcacacaccctttct

SEQ ID NO: 50790 - RNA, 20 nt, synthetic construct
  source 1..20: mol_type = other RNA
tccattcatattttcattac

SEQ ID NO: 50791 - RNA, 20 nt, synthetic construct
  source 1..20: mol_type = other RNA
tccattcatctctcgatgga

SEQ ID NO: 50792 - RNA, 20 nt, synthetic construct
  source 1..20: mol_type = other RNA
tccattcatgtaatgcaaac

SEQ ID NO: 50793 - RNA, 20 nt, synthetic construct
  source 1..20: mol_type = other RNA
tccattccttttcgagactg

SEQ ID NO: 50794 - RNA, 20 nt, synthetic construct
  source 1..20: mol_type = other RNA
tccattgggtacataccgag

SEQ ID NO: 50795 - RNA, 20 nt, synthetic construct
  source 1..20: mol_type = other RNA
tccattgttctctttgttta

SEQ ID NO: 50796 - RNA, 20 nt, synthetic construct
  source 1..20: mol_type = other RNA
tccatttccagtactttttc

SEQ ID NO: 50797 - RNA, 20 nt, synthetic construct
  source 1..20: mol_type = other RNA
tccatttccctgcttcatct

SEQ ID NO: 50798 - RNA, 20 nt, synthetic construct
  source 1..20: mol_type = other RNA
tccatttccttaagcacaga

SEQ ID NO: 50799 - RNA, 20 nt, synthetic construct
  source 1..20: mol_type = other RNA
tccatttgtggcatctttgt

SEQ ID NO: 50800 - RNA, 20 nt, synthetic construct
  source 1..20: mol_type = other RNA
tccatttgttttgtgtttgt

SEQ ID NO: 50801 - RNA, 20 nt, synthetic construct
  source 1..20: mol_type = other RNA
tccattttagatcaagtcct

SEQ ID NO: 50802 - RNA, 20 nt, synthetic construct
  source 1..20: mol_type = other RNA
tccattttattaatttggct

SEQ ID NO: 50803 - RNA, 20 nt, synthetic construct
  source 1..20: mol_type = other RNA
tccattttgccagctaactt

SEQ ID NO: 50804 - RNA, 20 nt, synthetic construct
  source 1..20: mol_type = other RNA
tccattttgcttaataattc

SEQ ID NO: 50805 - RNA, 20 nt, synthetic construct
  source 1..20: mol_type = other RNA
tccattttggtcttaccctc

SEQ ID NO: 50806 - RNA, 20 nt, synthetic construct
  source 1..20: mol_type = other RNA
tccatttttctgaccaacta

SEQ ID NO: 50807 - RNA, 20 nt, synthetic construct
  source 1..20: mol_type = other RNA
tcccaaaaaggtttttattt

SEQ ID NO: 50808 - RNA, 20 nt, synthetic construct
  source 1..20: mol_type = other RNA
tcccaaagacatcctgattt

SEQ ID NO: 50809 - RNA, 20 nt, synthetic construct
  source 1..20: mol_type = other RNA
tcccaaagatagactcttca

SEQ ID NO: 50810 - RNA, 20 nt, synthetic construct
  source 1..20: mol_type = other RNA
tcccaaaggactgggatcct

SEQ ID NO: 50811 - RNA, 20 nt, synthetic construct
  source 1..20: mol_type = other RNA
tcccaaagtgagcagaagga

SEQ ID NO: 50812 - RNA, 20 nt, synthetic construct
  source 1..20: mol_type = other RNA
tcccaaatccaggatggcat

SEQ ID NO: 50813 - RNA, 20 nt, synthetic construct
  source 1..20: mol_type = other RNA
tcccaaatgcaccaacacct

SEQ ID NO: 50814 - RNA, 20 nt, synthetic construct
  source 1..20: mol_type = other RNA
tcccaaatgggagcatgcac

SEQ ID NO: 50815 - RNA, 20 nt, synthetic construct
  source 1..20: mol_type = other RNA
tcccaaatgtcttaagaagg

SEQ ID NO: 50816 - RNA, 20 nt, synthetic construct
  source 1..20: mol_type = other RNA
tcccaaattggcatttaaaa

SEQ ID NO: 50817 - RNA, 20 nt, synthetic construct
  source 1..20: mol_type = other RNA
tcccaacaggctgagtgcgg

SEQ ID NO: 50818 - RNA, 20 nt, synthetic construct
  source 1..20: mol_type = other RNA
tcccaagatcataagctttt

SEQ ID NO: 50819 - RNA, 20 nt, synthetic construct
  source 1..20: mol_type = other RNA
tcccaagcaagtgtggtggt

SEQ ID NO: 50820 - RNA, 20 nt, synthetic construct
  source 1..20: mol_type = other RNA
tcccaagggttttggtatgt

SEQ ID NO: 50821 - RNA, 20 nt, synthetic construct
  source 1..20: mol_type = other RNA
tcccaaggttgcctgttcac

SEQ ID NO: 50822 - RNA, 20 nt, synthetic construct
  source 1..20: mol_type = other RNA
tcccaagtgcccattaacag

SEQ ID NO: 50823 - RNA, 20 nt, synthetic construct
  source 1..20: mol_type = other RNA
tcccaatcctttgtgcaggt

SEQ ID NO: 50824 - RNA, 20 nt, synthetic construct
  source 1..20: mol_type = other RNA
tcccaatctctggtattctg

SEQ ID NO: 50825 - RNA, 20 nt, synthetic construct
  source 1..20: mol_type = other RNA
tcccaatgcttgaagagcgc

SEQ ID NO: 50826 - RNA, 20 nt, synthetic construct
  source 1..20: mol_type = other RNA
tcccaattacttccagtgtt

SEQ ID NO: 50827 - RNA, 20 nt, synthetic construct
  source 1..20: mol_type = other RNA
tcccacaaaatatgaagcat

SEQ ID NO: 50828 - RNA, 20 nt, synthetic construct
  source 1..20: mol_type = other RNA
tcccaccatctctctgcctc

SEQ ID NO: 50829 - RNA, 20 nt, synthetic construct
  source 1..20: mol_type = other RNA
tcccacctcagccccacaag

SEQ ID NO: 50830 - RNA, 20 nt, synthetic construct
  source 1..20: mol_type = other RNA
tcccacctgcgagcggcggg

SEQ ID NO: 50831 - RNA, 20 nt, synthetic construct
  source 1..20: mol_type = other RNA
tcccactagtggaagaatca

SEQ ID NO: 50832 - RNA, 20 nt, synthetic construct
  source 1..20: mol_type = other RNA
tcccactgacagtggacaaa

SEQ ID NO: 50833 - RNA, 20 nt, synthetic construct
  source 1..20: mol_type = other RNA
tcccactgctatgactaatt

SEQ ID NO: 50834 - RNA, 20 nt, synthetic construct
  source 1..20: mol_type = other RNA
tcccacttacatcagcagtg

SEQ ID NO: 50835 - RNA, 20 nt, synthetic construct
  source 1..20: mol_type = other RNA
tcccacttcgaaagttcaga

SEQ ID NO: 50836 - RNA, 20 nt, synthetic construct
  source 1..20: mol_type = other RNA
tcccacttgatccaggtgta

SEQ ID NO: 50837 - RNA, 20 nt, synthetic construct
  source 1..20: mol_type = other RNA
tcccagaactcgaagccttc

SEQ ID NO: 50838 - RNA, 20 nt, synthetic construct
  source 1..20: mol_type = other RNA
tcccagacagatatatgcat

SEQ ID NO: 50839 - RNA, 20 nt, synthetic construct
  source 1..20: mol_type = other RNA
tcccagacagggaatgcccc

SEQ ID NO: 50840 - RNA, 20 nt, synthetic construct
  source 1..20: mol_type = other RNA
tcccagaggtactcaacgac

SEQ ID NO: 50841 - RNA, 20 nt, synthetic construct
  source 1..20: mol_type = other RNA
tcccagataacagtggttag

SEQ ID NO: 50842 - RNA, 20 nt, synthetic construct
  source 1..20: mol_type = other RNA
tcccagatacgttaaaggaa

SEQ ID NO: 50843 - RNA, 20 nt, synthetic construct
  source 1..20: mol_type = other RNA
tcccagatctaacaaacgca

SEQ ID NO: 50844 - RNA, 20 nt, synthetic construct
  source 1..20: mol_type = other RNA
tcccagatggggattgaggg

SEQ ID NO: 50845 - RNA, 20 nt, synthetic construct
  source 1..20: mol_type = other RNA
tcccagcatgaagccctcta

SEQ ID NO: 50846 - RNA, 20 nt, synthetic construct
  source 1..20: mol_type = other RNA
tcccagccaaacagttttta

SEQ ID NO: 50847 - RNA, 20 nt, synthetic construct
  source 1..20: mol_type = other RNA
tcccagcctcaaacaatcct

SEQ ID NO: 50848 - RNA, 20 nt, synthetic construct
  source 1..20: mol_type = other RNA
tcccagctacataacttccc

SEQ ID NO: 50849 - RNA, 20 nt, synthetic construct
  source 1..20: mol_type = other RNA
tcccagctgtccaacaaggg

SEQ ID NO: 50850 - RNA, 20 nt, synthetic construct
  source 1..20: mol_type = other RNA
tcccaggagctagaacagaa

SEQ ID NO: 50851 - RNA, 20 nt, synthetic construct
  source 1..20: mol_type = other RNA
tcccagggtgtagccacaag

SEQ ID NO: 50852 - RNA, 20 nt, synthetic construct
  source 1..20: mol_type = other RNA
tcccaggtattttgttctct

SEQ ID NO: 50853 - RNA, 20 nt, synthetic construct
  source 1..20: mol_type = other RNA
tcccaggtcagtagtacagt

SEQ ID NO: 50854 - RNA, 20 nt, synthetic construct
  source 1..20: mol_type = other RNA
tcccagtcctttgggaggtc

SEQ ID NO: 50855 - RNA, 20 nt, synthetic construct
  source 1..20: mol_type = other RNA
tcccagtgcccacctgacaa

SEQ ID NO: 50856 - RNA, 20 nt, synthetic construct
  source 1..20: mol_type = other RNA
tcccagttcaaggtgttagc

SEQ ID NO: 50857 - RNA, 20 nt, synthetic construct
  source 1..20: mol_type = other RNA
tcccagttgtcagaattaga

SEQ ID NO: 50858 - RNA, 20 nt, synthetic construct
  source 1..20: mol_type = other RNA
tcccataccacctgtcagaa

SEQ ID NO: 50859 - RNA, 20 nt, synthetic construct
  source 1..20: mol_type = other RNA
tcccatataaggggaatcat

SEQ ID NO: 50860 - RNA, 20 nt, synthetic construct
  source 1..20: mol_type = other RNA
tcccatatctacatgtacgc

SEQ ID NO: 50861 - RNA, 20 nt, synthetic construct
  source 1..20: mol_type = other RNA
tcccatatggaggcaatgtt

SEQ ID NO: 50862 - RNA, 20 nt, synthetic construct
  source 1..20: mol_type = other RNA
tcccatcactagaatgtgac

SEQ ID NO: 50863 - RNA, 20 nt, synthetic construct
  source 1..20: mol_type = other RNA
tcccatctcactcacctagc

SEQ ID NO: 50864 - RNA, 20 nt, synthetic construct
  source 1..20: mol_type = other RNA
tcccatctctagttttccag

SEQ ID NO: 50865 - RNA, 20 nt, synthetic construct
  source 1..20: mol_type = other RNA
tcccatcttccatacgaaag

SEQ ID NO: 50866 - RNA, 20 nt, synthetic construct
  source 1..20: mol_type = other RNA
tcccatgaacatggtttgat

SEQ ID NO: 50867 - RNA, 20 nt, synthetic construct
  source 1..20: mol_type = other RNA
tcccatgattcaaaatgtga

SEQ ID NO: 50868 - RNA, 20 nt, synthetic construct
  source 1..20: mol_type = other RNA
tcccatgcattcgtccctaa

SEQ ID NO: 50869 - RNA, 20 nt, synthetic construct
  source 1..20: mol_type = other RNA
tcccatggtcaaatcaatac

SEQ ID NO: 50870 - RNA, 20 nt, synthetic construct
  source 1..20: mol_type = other RNA
tcccatgttcactgcagaat

SEQ ID NO: 50871 - RNA, 20 nt, synthetic construct
  source 1..20: mol_type = other RNA
tcccattaccaaaacctggt

SEQ ID NO: 50872 - RNA, 20 nt, synthetic construct
  source 1..20: mol_type = other RNA
tcccattactcggtatgtac

SEQ ID NO: 50873 - RNA, 20 nt, synthetic construct
  source 1..20: mol_type = other RNA
tcccatttgatttcttcttt

SEQ ID NO: 50874 - RNA, 20 nt, synthetic construct
  source 1..20: mol_type = other RNA
tcccatttgggactgagaca

SEQ ID NO: 50875 - RNA, 20 nt, synthetic construct
  source 1..20: mol_type = other RNA
tcccatttgtaacatgttag

SEQ ID NO: 50876 - RNA, 20 nt, synthetic construct
  source 1..20: mol_type = other RNA
tccccaaagatattagctac

SEQ ID NO: 50877 - RNA, 20 nt, synthetic construct
  source 1..20: mol_type = other RNA
tccccaaataacatgcatat

SEQ ID NO: 50878 - RNA, 20 nt, synthetic construct
  source 1..20: mol_type = other RNA
tccccaacccccggccctgc

SEQ ID NO: 50879 - RNA, 20 nt, synthetic construct
  source 1..20: mol_type = other RNA
tccccaactgcaaaactttc

SEQ ID NO: 50880 - RNA, 20 nt, synthetic construct
  source 1..20: mol_type = other RNA
tccccaagccaaattaataa

SEQ ID NO: 50881 - RNA, 20 nt, synthetic construct
  source 1..20: mol_type = other RNA
tccccaagtaaacctcaagt

SEQ ID NO: 50882 - RNA, 20 nt, synthetic construct
  source 1..20: mol_type = other RNA
tccccacataggatagttaa

SEQ ID NO: 50883 - RNA, 20 nt, synthetic construct
  source 1..20: mol_type = other RNA
tccccacatgactggccatc

SEQ ID NO: 50884 - RNA, 20 nt, synthetic construct
  source 1..20: mol_type = other RNA
tccccaccgccttcctaccc

SEQ ID NO: 50885 - RNA, 20 nt, synthetic construct
  source 1..20: mol_type = other RNA
tccccacctttcctgcccct

SEQ ID NO: 50886 - RNA, 20 nt, synthetic construct
  source 1..20: mol_type = other RNA
tccccagaaagagagagggg

SEQ ID NO: 50887 - RNA, 20 nt, synthetic construct
  source 1..20: mol_type = other RNA
tccccagcatccactagggg

SEQ ID NO: 50888 - RNA, 20 nt, synthetic construct
  source 1..20: mol_type = other RNA
tccccagcctcagcctccca

SEQ ID NO: 50889 - RNA, 20 nt, synthetic construct
  source 1..20: mol_type = other RNA
tccccagggaaaccttactg

SEQ ID NO: 50890 - RNA, 20 nt, synthetic construct
  source 1..20: mol_type = other RNA
tccccagtggttgtggaatt

SEQ ID NO: 50891 - RNA, 20 nt, synthetic construct
  source 1..20: mol_type = other RNA
tccccatctgggatacttct

SEQ ID NO: 50892 - RNA, 20 nt, synthetic construct
  source 1..20: mol_type = other RNA
tccccatgcaggagaaacat

SEQ ID NO: 50893 - RNA, 20 nt, synthetic construct
  source 1..20: mol_type = other RNA
tccccattagagtaagcaac

SEQ ID NO: 50894 - RNA, 20 nt, synthetic construct
  source 1..20: mol_type = other RNA
tccccattcaattgtcctgg

SEQ ID NO: 50895 - RNA, 20 nt, synthetic construct
  source 1..20: mol_type = other RNA
tccccattccctgtctgtga

SEQ ID NO: 50896 - RNA, 20 nt, synthetic construct
  source 1..20: mol_type = other RNA
tccccattgacaatatagga

SEQ ID NO: 50897 - RNA, 20 nt, synthetic construct
  source 1..20: mol_type = other RNA
tccccatttttctcgacaca

SEQ ID NO: 50898 - RNA, 20 nt, synthetic construct
  source 1..20: mol_type = other RNA
tcccccaaaacttaggaggc

SEQ ID NO: 50899 - RNA, 20 nt, synthetic construct
  source 1..20: mol_type = other RNA
tcccccaaagaaggaaaaaa

SEQ ID NO: 50900 - RNA, 20 nt, synthetic construct
  source 1..20: mol_type = other RNA
tcccccaattaaactataga

SEQ ID NO: 50901 - RNA, 20 nt, synthetic construct
  source 1..20: mol_type = other RNA
tcccccagcccctggtgatc

SEQ ID NO: 50902 - RNA, 20 nt, synthetic construct
  source 1..20: mol_type = other RNA
tcccccaggtggttctgcct

SEQ ID NO: 50903 - RNA, 20 nt, synthetic construct
  source 1..20: mol_type = other RNA
tcccccatcccctttacccc

SEQ ID NO: 50904 - RNA, 20 nt, synthetic construct
  source 1..20: mol_type = other RNA
tccccccacccctgctctgc

SEQ ID NO: 50905 - RNA, 20 nt, synthetic construct
  source 1..20: mol_type = other RNA
tcccccctaaaacactggaa

SEQ ID NO: 50906 - RNA, 20 nt, synthetic construct
  source 1..20: mol_type = other RNA
tcccccctctctctttctgg

SEQ ID NO: 50907 - RNA, 20 nt, synthetic construct
  source 1..20: mol_type = other RNA
tcccccctggaacaatcaaa

SEQ ID NO: 50908 - RNA, 20 nt, synthetic construct
  source 1..20: mol_type = other RNA
tcccccgaatcctttgcttc

SEQ ID NO: 50909 - RNA, 20 nt, synthetic construct
  source 1..20: mol_type = other RNA
tcccccgcccgtccctgctt

SEQ ID NO: 50910 - RNA, 20 nt, synthetic construct
  source 1..20: mol_type = other RNA
tcccccgggacaatgccagg

SEQ ID NO: 50911 - RNA, 20 nt, synthetic construct
  source 1..20: mol_type = other RNA
tcccccggggctcgcagcat

SEQ ID NO: 50912 - RNA, 20 nt, synthetic construct
  source 1..20: mol_type = other RNA
tccccctacacccagttcac

SEQ ID NO: 50913 - RNA, 20 nt, synthetic construct
  source 1..20: mol_type = other RNA
tccccctccccctccctccc

SEQ ID NO: 50914 - RNA, 20 nt, synthetic construct
  source 1..20: mol_type = other RNA
tccccctccctccccccacg

SEQ ID NO: 50915 - RNA, 20 nt, synthetic construct
  source 1..20: mol_type = other RNA
tcccccttatgtgtgtataa

SEQ ID NO: 50916 - RNA, 20 nt, synthetic construct
  source 1..20: mol_type = other RNA
tccccgctgcgagaaaggcg

SEQ ID NO: 50917 - RNA, 20 nt, synthetic construct
  source 1..20: mol_type = other RNA
tccccgctgtccatttccag

SEQ ID NO: 50918 - RNA, 20 nt, synthetic construct
  source 1..20: mol_type = other RNA
tccccggaggaggtggcggc

SEQ ID NO: 50919 - RNA, 20 nt, synthetic construct
  source 1..20: mol_type = other RNA
tccccggatgattctaatgt

SEQ ID NO: 50920 - RNA, 20 nt, synthetic construct
  source 1..20: mol_type = other RNA
tccccggtctttcctgatca

SEQ ID NO: 50921 - RNA, 20 nt, synthetic construct
  source 1..20: mol_type = other RNA
tcccctagtggatgctgggg

SEQ ID NO: 50922 - RNA, 20 nt, synthetic construct
  source 1..20: mol_type = other RNA
tcccctatactgtaaccctg

SEQ ID NO: 50923 - RNA, 20 nt, synthetic construct
  source 1..20: mol_type = other RNA
tcccctgctgttcccaagca

SEQ ID NO: 50924 - RNA, 20 nt, synthetic construct
  source 1..20: mol_type = other RNA
tcccctggagttaattccac

SEQ ID NO: 50925 - RNA, 20 nt, synthetic construct
  source 1..20: mol_type = other RNA
tcccctggatcccccagccc

SEQ ID NO: 50926 - RNA, 20 nt, synthetic construct
  source 1..20: mol_type = other RNA
tcccctggggcctcagcatg

SEQ ID NO: 50927 - RNA, 20 nt, synthetic construct
  source 1..20: mol_type = other RNA
tcccctggtcgagctgggtg

SEQ ID NO: 50928 - RNA, 20 nt, synthetic construct
  source 1..20: mol_type = other RNA
tcccctgtaattacatactt

SEQ ID NO: 50929 - RNA, 20 nt, synthetic construct
  source 1..20: mol_type = other RNA
tcccctgtccaagtatttct

SEQ ID NO: 50930 - RNA, 20 nt, synthetic construct
  source 1..20: mol_type = other RNA
tccccttatatgggatatct

SEQ ID NO: 50931 - RNA, 20 nt, synthetic construct
  source 1..20: mol_type = other RNA
tccccttgacgaagtcacat

SEQ ID NO: 50932 - RNA, 20 nt, synthetic construct
  source 1..20: mol_type = other RNA
tccccttgccaaggcttgct

SEQ ID NO: 50933 - RNA, 20 nt, synthetic construct
  source 1..20: mol_type = other RNA
tcccctttacccctgagaac

SEQ ID NO: 50934 - RNA, 20 nt, synthetic construct
  source 1..20: mol_type = other RNA
tcccctttagtgttctgtgt

SEQ ID NO: 50935 - RNA, 20 nt, synthetic construct
  source 1..20: mol_type = other RNA
tcccctttctttggttttga

SEQ ID NO: 50936 - RNA, 20 nt, synthetic construct
  source 1..20: mol_type = other RNA
tcccgagtagttgtaactac

SEQ ID NO: 50937 - RNA, 20 nt, synthetic construct
  source 1..20: mol_type = other RNA
tcccgagtatctaggagtac

SEQ ID NO: 50938 - RNA, 20 nt, synthetic construct
  source 1..20: mol_type = other RNA
tcccgatttcagttaactta

SEQ ID NO: 50939 - RNA, 20 nt, synthetic construct
  source 1..20: mol_type = other RNA
tcccgcaccttgattttgat

SEQ ID NO: 50940 - RNA, 20 nt, synthetic construct
  source 1..20: mol_type = other RNA
tcccgccggagtccgcggct

SEQ ID NO: 50941 - RNA, 20 nt, synthetic construct
  source 1..20: mol_type = other RNA
tcccgcggcctccccaaccc

SEQ ID NO: 50942 - RNA, 20 nt, synthetic construct
  source 1..20: mol_type = other RNA
tcccgctacacaagtattaa

SEQ ID NO: 50943 - RNA, 20 nt, synthetic construct
  source 1..20: mol_type = other RNA
tcccggaacaggaaaaggac

SEQ ID NO: 50944 - RNA, 20 nt, synthetic construct
  source 1..20: mol_type = other RNA
tcccggaagctgggctagag

SEQ ID NO: 50945 - RNA, 20 nt, synthetic construct
  source 1..20: mol_type = other RNA
tcccggattggaaaactagg

SEQ ID NO: 50946 - RNA, 20 nt, synthetic construct
  source 1..20: mol_type = other RNA
tcccggcatgcctctcccac

SEQ ID NO: 50947 - RNA, 20 nt, synthetic construct
  source 1..20: mol_type = other RNA
tcccggccaggtgcggtggc

SEQ ID NO: 50948 - RNA, 20 nt, synthetic construct
  source 1..20: mol_type = other RNA
tcccggctaagatgaggtct

SEQ ID NO: 50949 - RNA, 20 nt, synthetic construct
  source 1..20: mol_type = other RNA
tcccgggtccaggcagttct

SEQ ID NO: 50950 - RNA, 20 nt, synthetic construct
  source 1..20: mol_type = other RNA
tcccgggtttaagcgattct

SEQ ID NO: 50951 - RNA, 20 nt, synthetic construct
  source 1..20: mol_type = other RNA
tccctaaacactgtagttca

SEQ ID NO: 50952 - RNA, 20 nt, synthetic construct
  source 1..20: mol_type = other RNA
tccctaaagagaatcttaaa

SEQ ID NO: 50953 - RNA, 20 nt, synthetic construct
  source 1..20: mol_type = other RNA
tccctaaatacacatgttga

SEQ ID NO: 50954 - RNA, 20 nt, synthetic construct
  source 1..20: mol_type = other RNA
tccctaacagtctcgtgaat

SEQ ID NO: 50955 - RNA, 20 nt, synthetic construct
  source 1..20: mol_type = other RNA
tccctaaccaggcccggggc

SEQ ID NO: 50956 - RNA, 20 nt, synthetic construct
  source 1..20: mol_type = other RNA
tccctacattgccttcaagt

SEQ ID NO: 50957 - RNA, 20 nt, synthetic construct
  source 1..20: mol_type = other RNA
tccctaccacccgtccaatt

SEQ ID NO: 50958 - RNA, 20 nt, synthetic construct
  source 1..20: mol_type = other RNA
tccctacctaaaaagggagt

SEQ ID NO: 50959 - RNA, 20 nt, synthetic construct
  source 1..20: mol_type = other RNA
tccctacctggcagtctagg

SEQ ID NO: 50960 - RNA, 20 nt, synthetic construct
  source 1..20: mol_type = other RNA
tccctactcactgaaaccct

SEQ ID NO: 50961 - RNA, 20 nt, synthetic construct
  source 1..20: mol_type = other RNA
tccctagaacttaaaatata

SEQ ID NO: 50962 - RNA, 20 nt, synthetic construct
  source 1..20: mol_type = other RNA
tccctagcccagcacttcca

SEQ ID NO: 50963 - RNA, 20 nt, synthetic construct
  source 1..20: mol_type = other RNA
tccctagtgtctccataccc

SEQ ID NO: 50964 - RNA, 20 nt, synthetic construct
  source 1..20: mol_type = other RNA
tccctatgcaataactcaaa

SEQ ID NO: 50965 - RNA, 20 nt, synthetic construct
  source 1..20: mol_type = other RNA
tccctattttctacaggtat

SEQ ID NO: 50966 - RNA, 20 nt, synthetic construct
  source 1..20: mol_type = other RNA
tccctcacagtccactcacc

SEQ ID NO: 50967 - RNA, 20 nt, synthetic construct
  source 1..20: mol_type = other RNA
tccctcaccttctgctgggc

SEQ ID NO: 50968 - RNA, 20 nt, synthetic construct
  source 1..20: mol_type = other RNA
tccctcactaagtcagaatt

SEQ ID NO: 50969 - RNA, 20 nt, synthetic construct
  source 1..20: mol_type = other RNA
tccctcagaatttgaggtct

SEQ ID NO: 50970 - RNA, 20 nt, synthetic construct
  source 1..20: mol_type = other RNA
tccctcagcaaaagcaatta

SEQ ID NO: 50971 - RNA, 20 nt, synthetic construct
  source 1..20: mol_type = other RNA
tccctcatatcagttatcac

SEQ ID NO: 50972 - RNA, 20 nt, synthetic construct
  source 1..20: mol_type = other RNA
tccctccagtccagcaccac

SEQ ID NO: 50973 - RNA, 20 nt, synthetic construct
  source 1..20: mol_type = other RNA
tccctccccccacggtctcc

SEQ ID NO: 50974 - RNA, 20 nt, synthetic construct
  source 1..20: mol_type = other RNA
tccctcctctggccctccat

SEQ ID NO: 50975 - RNA, 20 nt, synthetic construct
  source 1..20: mol_type = other RNA
tccctcctttctagaatgca

SEQ ID NO: 50976 - RNA, 20 nt, synthetic construct
  source 1..20: mol_type = other RNA
tccctcctttttatcaccct

SEQ ID NO: 50977 - RNA, 20 nt, synthetic construct
  source 1..20: mol_type = other RNA
tccctcggccacagcagggc

SEQ ID NO: 50978 - RNA, 20 nt, synthetic construct
  source 1..20: mol_type = other RNA
tccctctaaataggtattca

SEQ ID NO: 50979 - RNA, 20 nt, synthetic construct
  source 1..20: mol_type = other RNA
tccctctacaaaaggaggaa

SEQ ID NO: 50980 - RNA, 20 nt, synthetic construct
  source 1..20: mol_type = other RNA
tccctctatggcaggcacct

SEQ ID NO: 50981 - RNA, 20 nt, synthetic construct
  source 1..20: mol_type = other RNA
tccctctcagtggtgctttt

SEQ ID NO: 50982 - RNA, 20 nt, synthetic construct
  source 1..20: mol_type = other RNA
tccctctgagagaagtcaga

SEQ ID NO: 50983 - RNA, 20 nt, synthetic construct
  source 1..20: mol_type = other RNA
tccctctgccgcctggggcc

SEQ ID NO: 50984 - RNA, 20 nt, synthetic construct
  source 1..20: mol_type = other RNA
tccctctggccttctatatt

SEQ ID NO: 50985 - RNA, 20 nt, synthetic construct
  source 1..20: mol_type = other RNA
tccctctgtgtgcatgcatg

SEQ ID NO: 50986 - RNA, 20 nt, synthetic construct
  source 1..20: mol_type = other RNA
tccctcttcaatattttgga

SEQ ID NO: 50987 - RNA, 20 nt, synthetic construct
  source 1..20: mol_type = other RNA
tccctcttcgctcttttaaa

SEQ ID NO: 50988 - RNA, 20 nt, synthetic construct
  source 1..20: mol_type = other RNA
tccctctttctcaacttcct

SEQ ID NO: 50989 - RNA, 20 nt, synthetic construct
  source 1..20: mol_type = other RNA
tccctgaaattgtcagaaaa

SEQ ID NO: 50990 - RNA, 20 nt, synthetic construct
  source 1..20: mol_type = other RNA
tccctgaacaatgattttct

SEQ ID NO: 50991 - RNA, 20 nt, synthetic construct
  source 1..20: mol_type = other RNA
tccctgataatcacagacgc

SEQ ID NO: 50992 - RNA, 20 nt, synthetic construct
  source 1..20: mol_type = other RNA
tccctgatatgtcgcatgaa

SEQ ID NO: 50993 - RNA, 20 nt, synthetic construct
  source 1..20: mol_type = other RNA
tccctgatcaagttgcttgg

SEQ ID NO: 50994 - RNA, 20 nt, synthetic construct
  source 1..20: mol_type = other RNA
tccctgcatacactcatttc

SEQ ID NO: 50995 - RNA, 20 nt, synthetic construct
  source 1..20: mol_type = other RNA
tccctgccctgtgaaaatca

SEQ ID NO: 50996 - RNA, 20 nt, synthetic construct
  source 1..20: mol_type = other RNA
tccctgccgcgcgcgaaggc

SEQ ID NO: 50997 - RNA, 20 nt, synthetic construct
  source 1..20: mol_type = other RNA
tccctgctactcaggagatt

SEQ ID NO: 50998 - RNA, 20 nt, synthetic construct
  source 1..20: mol_type = other RNA
tccctgctacttgtggggct

SEQ ID NO: 50999 - RNA, 20 nt, synthetic construct
  source 1..20: mol_type = other RNA
tccctgcttcatctggacca

SEQ ID NO: 51000 - RNA, 20 nt, synthetic construct
  source 1..20: mol_type = other RNA
tccctgcttggcgcagtgct

SEQ ID NO: 51001 - RNA, 20 nt, synthetic construct
  source 1..20: mol_type = other RNA
tccctgctttaaaacactgg

SEQ ID NO: 51002 - RNA, 20 nt, synthetic construct
  source 1..20: mol_type = other RNA
tccctgctttcagttctttc

SEQ ID NO: 51003 - RNA, 20 nt, synthetic construct
  source 1..20: mol_type = other RNA
tccctggagaggcaaaggcc

SEQ ID NO: 51004 - RNA, 20 nt, synthetic construct
  source 1..20: mol_type = other RNA
tccctggggaataagatttt

SEQ ID NO: 51005 - RNA, 20 nt, synthetic construct
  source 1..20: mol_type = other RNA
tccctggggtttccttacct

SEQ ID NO: 51006 - RNA, 20 nt, synthetic construct
  source 1..20: mol_type = other RNA
tccctggttcaagctatgct

SEQ ID NO: 51007 - RNA, 20 nt, synthetic construct
  source 1..20: mol_type = other RNA
tccctgtagagatttttatc

SEQ ID NO: 51008 - RNA, 20 nt, synthetic construct
  source 1..20: mol_type = other RNA
tccctgtctgggaagttatg

SEQ ID NO: 51009 - RNA, 20 nt, synthetic construct
  source 1..20: mol_type = other RNA
tccctgtctgtgatgtagag

SEQ ID NO: 51010 - RNA, 20 nt, synthetic construct
  source 1..20: mol_type = other RNA
tccctgtctttctgtctgct

SEQ ID NO: 51011 - RNA, 20 nt, synthetic construct
  source 1..20: mol_type = other RNA
tccctgtgcgtgaatctgtt

SEQ ID NO: 51012 - RNA, 20 nt, synthetic construct
  source 1..20: mol_type = other RNA
tccctgtgtatgtgtagtca

SEQ ID NO: 51013 - RNA, 20 nt, synthetic construct
  source 1..20: mol_type = other RNA
tcccttaaaaggaactaatt

SEQ ID NO: 51014 - RNA, 20 nt, synthetic construct
  source 1..20: mol_type = other RNA
tcccttaacctttttctttt

SEQ ID NO: 51015 - RNA, 20 nt, synthetic construct
  source 1..20: mol_type = other RNA
tcccttaatgttgacatctt

SEQ ID NO: 51016 - RNA, 20 nt, synthetic construct
  source 1..20: mol_type = other RNA
tcccttagctctcatgtcag

SEQ ID NO: 51017 - RNA, 20 nt, synthetic construct
  source 1..20: mol_type = other RNA
tcccttcacaaagccctcag

SEQ ID NO: 51018 - RNA, 20 nt, synthetic construct
  source 1..20: mol_type = other RNA
tcccttcagcctgtgtcagt

SEQ ID NO: 51019 - RNA, 20 nt, synthetic construct
  source 1..20: mol_type = other RNA
tcccttcagtgtagtcagac

SEQ ID NO: 51020 - RNA, 20 nt, synthetic construct
  source 1..20: mol_type = other RNA
tcccttccagcgtgtgcatg

SEQ ID NO: 51021 - RNA, 20 nt, synthetic construct
  source 1..20: mol_type = other RNA
tcccttccccacctttcctg

SEQ ID NO: 51022 - RNA, 20 nt, synthetic construct
  source 1..20: mol_type = other RNA
tcccttcctgttctttgtta

SEQ ID NO: 51023 - RNA, 20 nt, synthetic construct
  source 1..20: mol_type = other RNA
tcccttctattccattgttc

SEQ ID NO: 51024 - RNA, 20 nt, synthetic construct
  source 1..20: mol_type = other RNA
tcccttctcgaagtggtgct

SEQ ID NO: 51025 - RNA, 20 nt, synthetic construct
  source 1..20: mol_type = other RNA
tcccttctgctcggctctgt

SEQ ID NO: 51026 - RNA, 20 nt, synthetic construct
  source 1..20: mol_type = other RNA
tcccttcttaaatgtgaatt

SEQ ID NO: 51027 - RNA, 20 nt, synthetic construct
  source 1..20: mol_type = other RNA
tcccttgcctgacagcaaat

SEQ ID NO: 51028 - RNA, 20 nt, synthetic construct
  source 1..20: mol_type = other RNA
tcccttgtgcacctcgggtt

SEQ ID NO: 51029 - RNA, 20 nt, synthetic construct
  source 1..20: mol_type = other RNA
tccctttaaaatgatagcat

SEQ ID NO: 51030 - RNA, 20 nt, synthetic construct
  source 1..20: mol_type = other RNA
tccctttcgctaatctcaat

SEQ ID NO: 51031 - RNA, 20 nt, synthetic construct
  source 1..20: mol_type = other RNA
tcccttttggatgcagattt

SEQ ID NO: 51032 - RNA, 20 nt, synthetic construct
  source 1..20: mol_type = other RNA
tcccttttgtagctaatatc

SEQ ID NO: 51033 - RNA, 20 nt, synthetic construct
  source 1..20: mol_type = other RNA
tccctttttaggtagggata

SEQ ID NO: 51034 - RNA, 20 nt, synthetic construct
  source 1..20: mol_type = other RNA
tccgaaagaactgaaagcag

SEQ ID NO: 51035 - RNA, 20 nt, synthetic construct
  source 1..20: mol_type = other RNA
tccgacctgtagattgggct

SEQ ID NO: 51036 - RNA, 20 nt, synthetic construct
  source 1..20: mol_type = other RNA
tccgagacaagttctcctgt

SEQ ID NO: 51037 - RNA, 20 nt, synthetic construct
  source 1..20: mol_type = other RNA
tccgataaagggtctggtat

SEQ ID NO: 51038 - RNA, 20 nt, synthetic construct
  source 1..20: mol_type = other RNA
tccgatgataccttcttgag

SEQ ID NO: 51039 - RNA, 20 nt, synthetic construct
  source 1..20: mol_type = other RNA
tccgatttctcggccgggcg

SEQ ID NO: 51040 - RNA, 20 nt, synthetic construct
  source 1..20: mol_type = other RNA
tccgattttacttactagtt

SEQ ID NO: 51041 - RNA, 20 nt, synthetic construct
  source 1..20: mol_type = other RNA
tccgcctccctggttcaagc

SEQ ID NO: 51042 - RNA, 20 nt, synthetic construct
  source 1..20: mol_type = other RNA
tccgcctcctggtgggttca

SEQ ID NO: 51043 - RNA, 20 nt, synthetic construct
  source 1..20: mol_type = other RNA
tccgcctcggccgacccagc

SEQ ID NO: 51044 - RNA, 20 nt, synthetic construct
  source 1..20: mol_type = other RNA
tccgcggctgggctttctcc

SEQ ID NO: 51045 - RNA, 20 nt, synthetic construct
  source 1..20: mol_type = other RNA
tccgcgtttattagaactag

SEQ ID NO: 51046 - RNA, 20 nt, synthetic construct
  source 1..20: mol_type = other RNA
tccgctaaacattttattag

SEQ ID NO: 51047 - RNA, 20 nt, synthetic construct
  source 1..20: mol_type = other RNA
tccgctctggttttaaagaa

SEQ ID NO: 51048 - RNA, 20 nt, synthetic construct
  source 1..20: mol_type = other RNA
tccggcgggagaggagcgcc

SEQ ID NO: 51049 - RNA, 20 nt, synthetic construct
  source 1..20: mol_type = other RNA
tccggctctgcggcgggtct

SEQ ID NO: 51050 - RNA, 20 nt, synthetic construct
  source 1..20: mol_type = other RNA
tccggctttatgagacacac

SEQ ID NO: 51051 - RNA, 20 nt, synthetic construct
  source 1..20: mol_type = other RNA
tccgggaacatgacatgtat

SEQ ID NO: 51052 - RNA, 20 nt, synthetic construct
  source 1..20: mol_type = other RNA
tccgggacttggaagtgaag

SEQ ID NO: 51053 - RNA, 20 nt, synthetic construct
  source 1..20: mol_type = other RNA
tccgggatcctgtccaggcg

SEQ ID NO: 51054 - RNA, 20 nt, synthetic construct
  source 1..20: mol_type = other RNA
tccgggcctcccacctgcga

SEQ ID NO: 51055 - RNA, 20 nt, synthetic construct
  source 1..20: mol_type = other RNA
tccggggacccagtgccccc

SEQ ID NO: 51056 - RNA, 20 nt, synthetic construct
  source 1..20: mol_type = other RNA
tccggggagcttttgaaact

SEQ ID NO: 51057 - RNA, 20 nt, synthetic construct
  source 1..20: mol_type = other RNA
tccgggtaaaaagcctgctt

SEQ ID NO: 51058 - RNA, 20 nt, synthetic construct
  source 1..20: mol_type = other RNA
tccggtcgttggatttatct

SEQ ID NO: 51059 - RNA, 20 nt, synthetic construct
  source 1..20: mol_type = other RNA
tccggtctcagtttttaatt

SEQ ID NO: 51060 - RNA, 20 nt, synthetic construct
  source 1..20: mol_type = other RNA
tccggttctcaggagcctag

SEQ ID NO: 51061 - RNA, 20 nt, synthetic construct
  source 1..20: mol_type = other RNA
tccggttgtatagcagtaaa

SEQ ID NO: 51062 - RNA, 20 nt, synthetic construct
  source 1..20: mol_type = other RNA
tccgtagaccgaggaaaccc

SEQ ID NO: 51063 - RNA, 20 nt, synthetic construct
  source 1..20: mol_type = other RNA
tccgtagctgtcgctctcct

SEQ ID NO: 51064 - RNA, 20 nt, synthetic construct
  source 1..20: mol_type = other RNA
tccgtatatatttttatgca

SEQ ID NO: 51065 - RNA, 20 nt, synthetic construct
  source 1..20: mol_type = other RNA
tccgtatccagtggtttttt

SEQ ID NO: 51066 - RNA, 20 nt, synthetic construct
  source 1..20: mol_type = other RNA
tccgtctagccacttcctat

SEQ ID NO: 51067 - RNA, 20 nt, synthetic construct
  source 1..20: mol_type = other RNA
tccgtctcaaaaaattataa

SEQ ID NO: 51068 - RNA, 20 nt, synthetic construct
  source 1..20: mol_type = other RNA
tccgtctcaagattgtgtga

SEQ ID NO: 51069 - RNA, 20 nt, synthetic construct
  source 1..20: mol_type = other RNA
tccgtgcatgcctctgttac

SEQ ID NO: 51070 - RNA, 20 nt, synthetic construct
  source 1..20: mol_type = other RNA
tccgtggaaggccttctcct

SEQ ID NO: 51071 - RNA, 20 nt, synthetic construct
  source 1..20: mol_type = other RNA
tccgtgtgacaaaaagtagg

SEQ ID NO: 51072 - RNA, 20 nt, synthetic construct
  source 1..20: mol_type = other RNA
tccgttgaagtctttggccc

SEQ ID NO: 51073 - RNA, 20 nt, synthetic construct
  source 1..20: mol_type = other RNA
tccgttgctgcatagtactc

SEQ ID NO: 51074 - RNA, 20 nt, synthetic construct
  source 1..20: mol_type = other RNA
tccgttttgcaagatgcata

SEQ ID NO: 51075 - RNA, 20 nt, synthetic construct
  source 1..20: mol_type = other RNA
tccgtttttcaggttcaagc

SEQ ID NO: 51076 - RNA, 20 nt, synthetic construct
  source 1..20: mol_type = other RNA
tcctaaaacatggtccacag

SEQ ID NO: 51077 - RNA, 20 nt, synthetic construct
  source 1..20: mol_type = other RNA
tcctaaaactccccatgcag

SEQ ID NO: 51078 - RNA, 20 nt, synthetic construct
  source 1..20: mol_type = other RNA
tcctaaaattccttcctttg

SEQ ID NO: 51079 - RNA, 20 nt, synthetic construct
  source 1..20: mol_type = other RNA
tcctaaacacttagcatgtt

SEQ ID NO: 51080 - RNA, 20 nt, synthetic construct
  source 1..20: mol_type = other RNA
tcctaaacctgctacgaatg

SEQ ID NO: 51081 - RNA, 20 nt, synthetic construct
  source 1..20: mol_type = other RNA
tcctaaagagagtgacagct

SEQ ID NO: 51082 - RNA, 20 nt, synthetic construct
  source 1..20: mol_type = other RNA
tcctaaccactgttatctgg

SEQ ID NO: 51083 - RNA, 20 nt, synthetic construct
  source 1..20: mol_type = other RNA
tcctaactcaagagttactt

SEQ ID NO: 51084 - RNA, 20 nt, synthetic construct
  source 1..20: mol_type = other RNA
tcctaactggtctcctttct

SEQ ID NO: 51085 - RNA, 20 nt, synthetic construct
  source 1..20: mol_type = other RNA
tcctaagaaagggtgtgtga

SEQ ID NO: 51086 - RNA, 20 nt, synthetic construct
  source 1..20: mol_type = other RNA
tcctaagcatgagatactac

SEQ ID NO: 51087 - RNA, 20 nt, synthetic construct
  source 1..20: mol_type = other RNA
tcctaagccatctaattcac

SEQ ID NO: 51088 - RNA, 20 nt, synthetic construct
  source 1..20: mol_type = other RNA
tcctaagtcttcttctaagc

SEQ ID NO: 51089 - RNA, 20 nt, synthetic construct
  source 1..20: mol_type = other RNA
tcctaagttttgggggaaga

SEQ ID NO: 51090 - RNA, 20 nt, synthetic construct
  source 1..20: mol_type = other RNA
tcctaatacagtaaagcccc

SEQ ID NO: 51091 - RNA, 20 nt, synthetic construct
  source 1..20: mol_type = other RNA
tcctaatctaacatgttaca

SEQ ID NO: 51092 - RNA, 20 nt, synthetic construct
  source 1..20: mol_type = other RNA
tcctaatgggcgtggagcgg

SEQ ID NO: 51093 - RNA, 20 nt, synthetic construct
  source 1..20: mol_type = other RNA
tcctacacatatctttaggt

SEQ ID NO: 51094 - RNA, 20 nt, synthetic construct
  source 1..20: mol_type = other RNA
tcctacatactgcactctca

SEQ ID NO: 51095 - RNA, 20 nt, synthetic construct
  source 1..20: mol_type = other RNA
tcctacccaagcttaggtca

SEQ ID NO: 51096 - RNA, 20 nt, synthetic construct
  source 1..20: mol_type = other RNA
tcctaccctgaggatataac

SEQ ID NO: 51097 - RNA, 20 nt, synthetic construct
  source 1..20: mol_type = other RNA
tcctaccctgccttccttgg

SEQ ID NO: 51098 - RNA, 20 nt, synthetic construct
  source 1..20: mol_type = other RNA
tcctaccttccaaagtatgc

SEQ ID NO: 51099 - RNA, 20 nt, synthetic construct
  source 1..20: mol_type = other RNA
tcctactaacaagaaagggt

SEQ ID NO: 51100 - RNA, 20 nt, synthetic construct
  source 1..20: mol_type = other RNA
tcctactttcttcaaccata

SEQ ID NO: 51101 - RNA, 20 nt, synthetic construct
  source 1..20: mol_type = other RNA
tcctagaaaatcatacattt

SEQ ID NO: 51102 - RNA, 20 nt, synthetic construct
  source 1..20: mol_type = other RNA
tcctagactgccaggtaggg

SEQ ID NO: 51103 - RNA, 20 nt, synthetic construct
  source 1..20: mol_type = other RNA
tcctagattccctctggcct

SEQ ID NO: 51104 - RNA, 20 nt, synthetic construct
  source 1..20: mol_type = other RNA
tcctagattgaccttctact

SEQ ID NO: 51105 - RNA, 20 nt, synthetic construct
  source 1..20: mol_type = other RNA
tcctagccccaaatacctct

SEQ ID NO: 51106 - RNA, 20 nt, synthetic construct
  source 1..20: mol_type = other RNA
tcctatagttaagtctgaaa

SEQ ID NO: 51107 - RNA, 20 nt, synthetic construct
  source 1..20: mol_type = other RNA
tcctatattgtcaatgggga

SEQ ID NO: 51108 - RNA, 20 nt, synthetic construct
  source 1..20: mol_type = other RNA
tcctatatttttccacataa

SEQ ID NO: 51109 - RNA, 20 nt, synthetic construct
  source 1..20: mol_type = other RNA
tcctatcagaagcacaccaa

SEQ ID NO: 51110 - RNA, 20 nt, synthetic construct
  source 1..20: mol_type = other RNA
tcctatcagagcatgtcccc

SEQ ID NO: 51111 - RNA, 20 nt, synthetic construct
  source 1..20: mol_type = other RNA
tcctatctaagcctactgct

SEQ ID NO: 51112 - RNA, 20 nt, synthetic construct
  source 1..20: mol_type = other RNA
tcctatgaaaatttagcttc

SEQ ID NO: 51113 - RNA, 20 nt, synthetic construct
  source 1..20: mol_type = other RNA
tcctatgtggggaatgctca

SEQ ID NO: 51114 - RNA, 20 nt, synthetic construct
  source 1..20: mol_type = other RNA
tcctattagaagaatgatta

SEQ ID NO: 51115 - RNA, 20 nt, synthetic construct
  source 1..20: mol_type = other RNA
tcctattcacactgctcctg

SEQ ID NO: 51116 - RNA, 20 nt, synthetic construct
  source 1..20: mol_type = other RNA
tcctattgtttaaaaacaac

SEQ ID NO: 51117 - RNA, 20 nt, synthetic construct
  source 1..20: mol_type = other RNA
tcctattttataatgggcaa

SEQ ID NO: 51118 - RNA, 20 nt, synthetic construct
  source 1..20: mol_type = other RNA
tcctattttgttattagggt

SEQ ID NO: 51119 - RNA, 20 nt, synthetic construct
  source 1..20: mol_type = other RNA
tcctcaacaagagaggacag

SEQ ID NO: 51120 - RNA, 20 nt, synthetic construct
  source 1..20: mol_type = other RNA
tcctcaatcatgtcaagaat

SEQ ID NO: 51121 - RNA, 20 nt, synthetic construct
  source 1..20: mol_type = other RNA
tcctcacaacaggcctgagc

SEQ ID NO: 51122 - RNA, 20 nt, synthetic construct
  source 1..20: mol_type = other RNA
tcctcacatcagttaccacc

SEQ ID NO: 51123 - RNA, 20 nt, synthetic construct
  source 1..20: mol_type = other RNA
tcctcacatgtttggtcaat

SEQ ID NO: 51124 - RNA, 20 nt, synthetic construct
  source 1..20: mol_type = other RNA
tcctcacctcacattcacag

SEQ ID NO: 51125 - RNA, 20 nt, synthetic construct
  source 1..20: mol_type = other RNA
tcctcactgtgatacctagt

SEQ ID NO: 51126 - RNA, 20 nt, synthetic construct
  source 1..20: mol_type = other RNA
tcctcagaaggccaaggcag

SEQ ID NO: 51127 - RNA, 20 nt, synthetic construct
  source 1..20: mol_type = other RNA
tcctcagccccctccctacc

SEQ ID NO: 51128 - RNA, 20 nt, synthetic construct
  source 1..20: mol_type = other RNA
tcctcaggatctacattaaa

SEQ ID NO: 51129 - RNA, 20 nt, synthetic construct
  source 1..20: mol_type = other RNA
tcctcaggctccaggtagaa

SEQ ID NO: 51130 - RNA, 20 nt, synthetic construct
  source 1..20: mol_type = other RNA
tcctcagggtaggaaaagac

SEQ ID NO: 51131 - RNA, 20 nt, synthetic construct
  source 1..20: mol_type = other RNA
tcctcatccctcatatcagt

SEQ ID NO: 51132 - RNA, 20 nt, synthetic construct
  source 1..20: mol_type = other RNA
tcctcatgtccatagttaat

SEQ ID NO: 51133 - RNA, 20 nt, synthetic construct
  source 1..20: mol_type = other RNA
tcctcattcacactagtcac

SEQ ID NO: 51134 - RNA, 20 nt, synthetic construct
  source 1..20: mol_type = other RNA
tcctccaacccattccaggt

SEQ ID NO: 51135 - RNA, 20 nt, synthetic construct
  source 1..20: mol_type = other RNA
tcctccaaggctgcccgctc

SEQ ID NO: 51136 - RNA, 20 nt, synthetic construct
  source 1..20: mol_type = other RNA
tcctccaatgtttttaattc

SEQ ID NO: 51137 - RNA, 20 nt, synthetic construct
  source 1..20: mol_type = other RNA
tcctccagccttaatctcct

SEQ ID NO: 51138 - RNA, 20 nt, synthetic construct
  source 1..20: mol_type = other RNA
tcctcccacttacatcagca

SEQ ID NO: 51139 - RNA, 20 nt, synthetic construct
  source 1..20: mol_type = other RNA
tcctcccggctaagatgagg

SEQ ID NO: 51140 - RNA, 20 nt, synthetic construct
  source 1..20: mol_type = other RNA
tcctccctggagaggcaaag

SEQ ID NO: 51141 - RNA, 20 nt, synthetic construct
  source 1..20: mol_type = other RNA
tcctcccttcagcctgtgtc

SEQ ID NO: 51142 - RNA, 20 nt, synthetic construct
  source 1..20: mol_type = other RNA
tcctccggggacccagtgcc

SEQ ID NO: 51143 - RNA, 20 nt, synthetic construct
  source 1..20: mol_type = other RNA
tcctccgtagctgtcgctct

SEQ ID NO: 51144 - RNA, 20 nt, synthetic construct
  source 1..20: mol_type = other RNA
tcctcctcctggccacatgc

SEQ ID NO: 51145 - RNA, 20 nt, synthetic construct
  source 1..20: mol_type = other RNA
tcctcctctacaagttttaa

SEQ ID NO: 51146 - RNA, 20 nt, synthetic construct
  source 1..20: mol_type = other RNA
tcctcctctggacattatcc

SEQ ID NO: 51147 - RNA, 20 nt, synthetic construct
  source 1..20: mol_type = other RNA
tcctcctgccttggccttct

SEQ ID NO: 51148 - RNA, 20 nt, synthetic construct
  source 1..20: mol_type = other RNA
tcctcctggccacatgcttc

SEQ ID NO: 51149 - RNA, 20 nt, synthetic construct
  source 1..20: mol_type = other RNA
tcctccttctgctcactttg

SEQ ID NO: 51150 - RNA, 20 nt, synthetic construct
  source 1..20: mol_type = other RNA
tcctccttttgtagagggaa

SEQ ID NO: 51151 - RNA, 20 nt, synthetic construct
  source 1..20: mol_type = other RNA
tcctcggtctacggacgcag

SEQ ID NO: 51152 - RNA, 20 nt, synthetic construct
  source 1..20: mol_type = other RNA
tcctcgtaaaagctaatcta

SEQ ID NO: 51153 - RNA, 20 nt, synthetic construct
  source 1..20: mol_type = other RNA
tcctcgttttcaacaaaggt

SEQ ID NO: 51154 - RNA, 20 nt, synthetic construct
  source 1..20: mol_type = other RNA
tcctctacaagttttaactt

SEQ ID NO: 51155 - RNA, 20 nt, synthetic construct
  source 1..20: mol_type = other RNA
tcctctactttcacataagg

SEQ ID NO: 51156 - RNA, 20 nt, synthetic construct
  source 1..20: mol_type = other RNA
tcctctatttttgtctggtg

SEQ ID NO: 51157 - RNA, 20 nt, synthetic construct
  source 1..20: mol_type = other RNA
tcctctcactccaaagcaaa

SEQ ID NO: 51158 - RNA, 20 nt, synthetic construct
  source 1..20: mol_type = other RNA
tcctctcccgccggagtccg

SEQ ID NO: 51159 - RNA, 20 nt, synthetic construct
  source 1..20: mol_type = other RNA
tcctctcttaaatccgagac

SEQ ID NO: 51160 - RNA, 20 nt, synthetic construct
  source 1..20: mol_type = other RNA
tcctctcttggaatgtgcac

SEQ ID NO: 51161 - RNA, 20 nt, synthetic construct
  source 1..20: mol_type = other RNA
tcctctcttgttgaggatga

SEQ ID NO: 51162 - RNA, 20 nt, synthetic construct
  source 1..20: mol_type = other RNA
tcctctgactttatggtatc

SEQ ID NO: 51163 - RNA, 20 nt, synthetic construct
  source 1..20: mol_type = other RNA
tcctctggacattatcctat

SEQ ID NO: 51164 - RNA, 20 nt, synthetic construct
  source 1..20: mol_type = other RNA
tcctctggccctccatttcc

SEQ ID NO: 51165 - RNA, 20 nt, synthetic construct
  source 1..20: mol_type = other RNA
tcctctggctgacctggtac

SEQ ID NO: 51166 - RNA, 20 nt, synthetic construct
  source 1..20: mol_type = other RNA
tcctctgtagataaacgtta

SEQ ID NO: 51167 - RNA, 20 nt, synthetic construct
  source 1..20: mol_type = other RNA
tcctcttcctcatccctcat

SEQ ID NO: 51168 - RNA, 20 nt, synthetic construct
  source 1..20: mol_type = other RNA
tcctcttcgggtgtcagaat

SEQ ID NO: 51169 - RNA, 20 nt, synthetic construct
  source 1..20: mol_type = other RNA
tcctcttctgaagaggcttt

SEQ ID NO: 51170 - RNA, 20 nt, synthetic construct
  source 1..20: mol_type = other RNA
tcctctttcatatctgattt

SEQ ID NO: 51171 - RNA, 20 nt, synthetic construct
  source 1..20: mol_type = other RNA
tcctgaaaattccttcccct

SEQ ID NO: 51172 - RNA, 20 nt, synthetic construct
  source 1..20: mol_type = other RNA
tcctgaaatgaaccaaactt

SEQ ID NO: 51173 - RNA, 20 nt, synthetic construct
  source 1..20: mol_type = other RNA
tcctgaacaaaatttttgca

SEQ ID NO: 51174 - RNA, 20 nt, synthetic construct
  source 1..20: mol_type = other RNA
tcctgaactcgtggcctcaa

SEQ ID NO: 51175 - RNA, 20 nt, synthetic construct
  source 1..20: mol_type = other RNA
tcctgaagtctttggtgatc

SEQ ID NO: 51176 - RNA, 20 nt, synthetic construct
  source 1..20: mol_type = other RNA
tcctgaatactattcctatt

SEQ ID NO: 51177 - RNA, 20 nt, synthetic construct
  source 1..20: mol_type = other RNA
tcctgaatgatttccctgca

SEQ ID NO: 51178 - RNA, 20 nt, synthetic construct
  source 1..20: mol_type = other RNA
tcctgaattctaacattatc

SEQ ID NO: 51179 - RNA, 20 nt, synthetic construct
  source 1..20: mol_type = other RNA
tcctgaattctaatgaactc

SEQ ID NO: 51180 - RNA, 20 nt, synthetic construct
  source 1..20: mol_type = other RNA
tcctgacctcaagcgatcca

SEQ ID NO: 51181 - RNA, 20 nt, synthetic construct
  source 1..20: mol_type = other RNA
tcctgacctcagatatccac

SEQ ID NO: 51182 - RNA, 20 nt, synthetic construct
  source 1..20: mol_type = other RNA
tcctgacctctgcagttagc

SEQ ID NO: 51183 - RNA, 20 nt, synthetic construct
  source 1..20: mol_type = other RNA
tcctgagaaccggaacttga

SEQ ID NO: 51184 - RNA, 20 nt, synthetic construct
  source 1..20: mol_type = other RNA
tcctgagacttaggcaaagg

SEQ ID NO: 51185 - RNA, 20 nt, synthetic construct
  source 1..20: mol_type = other RNA
tcctgagcaaggaaggaaag

SEQ ID NO: 51186 - RNA, 20 nt, synthetic construct
  source 1..20: mol_type = other RNA
tcctgagctttccttagttc

SEQ ID NO: 51187 - RNA, 20 nt, synthetic construct
  source 1..20: mol_type = other RNA
tcctgaggaagctaatcaag

SEQ ID NO: 51188 - RNA, 20 nt, synthetic construct
  source 1..20: mol_type = other RNA
tcctgagggctttgtgaagg

SEQ ID NO: 51189 - RNA, 20 nt, synthetic construct
  source 1..20: mol_type = other RNA
tcctgagggtgagaccacca

SEQ ID NO: 51190 - RNA, 20 nt, synthetic construct
  source 1..20: mol_type = other RNA
tcctgataaggggctatctt

SEQ ID NO: 51191 - RNA, 20 nt, synthetic construct
  source 1..20: mol_type = other RNA
tcctgatcacaccctcctac

SEQ ID NO: 51192 - RNA, 20 nt, synthetic construct
  source 1..20: mol_type = other RNA
tcctgatcagcaccctcaaa

SEQ ID NO: 51193 - RNA, 20 nt, synthetic construct
  source 1..20: mol_type = other RNA
tcctgatggacattctgctt

SEQ ID NO: 51194 - RNA, 20 nt, synthetic construct
  source 1..20: mol_type = other RNA
tcctgatttaggccactctc

SEQ ID NO: 51195 - RNA, 20 nt, synthetic construct
  source 1..20: mol_type = other RNA
tcctgcacatgcacaaggtc

SEQ ID NO: 51196 - RNA, 20 nt, synthetic construct
  source 1..20: mol_type = other RNA
tcctgcactcaagcaatcct

SEQ ID NO: 51197 - RNA, 20 nt, synthetic construct
  source 1..20: mol_type = other RNA
tcctgcagacatgcacgaga

SEQ ID NO: 51198 - RNA, 20 nt, synthetic construct
  source 1..20: mol_type = other RNA
tcctgcatatgtttttatta

SEQ ID NO: 51199 - RNA, 20 nt, synthetic construct
  source 1..20: mol_type = other RNA
tcctgcatggggagttttag

SEQ ID NO: 51200 - RNA, 20 nt, synthetic construct
  source 1..20: mol_type = other RNA
tcctgcccctccactccaca

SEQ ID NO: 51201 - RNA, 20 nt, synthetic construct
  source 1..20: mol_type = other RNA
tcctgccttcctgacctctg

SEQ ID NO: 51202 - RNA, 20 nt, synthetic construct
  source 1..20: mol_type = other RNA
tcctgccttggccttctgag

SEQ ID NO: 51203 - RNA, 20 nt, synthetic construct
  source 1..20: mol_type = other RNA
tcctgcctttgttcatcatc

SEQ ID NO: 51204 - RNA, 20 nt, synthetic construct
  source 1..20: mol_type = other RNA
tcctgctaacaccttgaact

SEQ ID NO: 51205 - RNA, 20 nt, synthetic construct
  source 1..20: mol_type = other RNA
tcctgctattttattagata

SEQ ID NO: 51206 - RNA, 20 nt, synthetic construct
  source 1..20: mol_type = other RNA
tcctgctgggctattgtttt

SEQ ID NO: 51207 - RNA, 20 nt, synthetic construct
  source 1..20: mol_type = other RNA
tcctgctgtcgtttatgcat

SEQ ID NO: 51208 - RNA, 20 nt, synthetic construct
  source 1..20: mol_type = other RNA
tcctgcttcccccaaagaag

SEQ ID NO: 51209 - RNA, 20 nt, synthetic construct
  source 1..20: mol_type = other RNA
tcctggaaaaagaccataat

SEQ ID NO: 51210 - RNA, 20 nt, synthetic construct
  source 1..20: mol_type = other RNA
tcctggaaaacttctctgga

SEQ ID NO: 51211 - RNA, 20 nt, synthetic construct
  source 1..20: mol_type = other RNA
tcctggaatagtagcttcaa

SEQ ID NO: 51212 - RNA, 20 nt, synthetic construct
  source 1..20: mol_type = other RNA
tcctggactgtgatgactgt

SEQ ID NO: 51213 - RNA, 20 nt, synthetic construct
  source 1..20: mol_type = other RNA
tcctggagggctcccagtgc

SEQ ID NO: 51214 - RNA, 20 nt, synthetic construct
  source 1..20: mol_type = other RNA
tcctggattgctagtgtcct

SEQ ID NO: 51215 - RNA, 20 nt, synthetic construct
  source 1..20: mol_type = other RNA
tcctggatttgggaaggatg

SEQ ID NO: 51216 - RNA, 20 nt, synthetic construct
  source 1..20: mol_type = other RNA
tcctggcagatcaattgacc

SEQ ID NO: 51217 - RNA, 20 nt, synthetic construct
  source 1..20: mol_type = other RNA
tcctggccacatgcttccaa

SEQ ID NO: 51218 - RNA, 20 nt, synthetic construct
  source 1..20: mol_type = other RNA
tcctggctctagcccagctt

SEQ ID NO: 51219 - RNA, 20 nt, synthetic construct
  source 1..20: mol_type = other RNA
tcctgggaaaaggatttgtt

SEQ ID NO: 51220 - RNA, 20 nt, synthetic construct
  source 1..20: mol_type = other RNA
tcctgggctcatctaagcct

SEQ ID NO: 51221 - RNA, 20 nt, synthetic construct
  source 1..20: mol_type = other RNA
tcctgggttcaggtgcctcc

SEQ ID NO: 51222 - RNA, 20 nt, synthetic construct
  source 1..20: mol_type = other RNA
tcctgggttctcccttctat

SEQ ID NO: 51223 - RNA, 20 nt, synthetic construct
  source 1..20: mol_type = other RNA
tcctggtctcccagcatgaa

SEQ ID NO: 51224 - RNA, 20 nt, synthetic construct
  source 1..20: mol_type = other RNA
tcctggtgggttcatgccat

SEQ ID NO: 51225 - RNA, 20 nt, synthetic construct
  source 1..20: mol_type = other RNA
tcctggttttgatcatcgca

SEQ ID NO: 51226 - RNA, 20 nt, synthetic construct
  source 1..20: mol_type = other RNA
tcctgtaaacctggaatcct

SEQ ID NO: 51227 - RNA, 20 nt, synthetic construct
  source 1..20: mol_type = other RNA
tcctgtatatctccttttaa

SEQ ID NO: 51228 - RNA, 20 nt, synthetic construct
  source 1..20: mol_type = other RNA
tcctgtatgccgctggtgaa

SEQ ID NO: 51229 - RNA, 20 nt, synthetic construct
  source 1..20: mol_type = other RNA
tcctgtcagtgtggttcata

SEQ ID NO: 51230 - RNA, 20 nt, synthetic construct
  source 1..20: mol_type = other RNA
tcctgtcagtttctgattta

SEQ ID NO: 51231 - RNA, 20 nt, synthetic construct
  source 1..20: mol_type = other RNA
tcctgtccaggcgcctgcat

SEQ ID NO: 51232 - RNA, 20 nt, synthetic construct
  source 1..20: mol_type = other RNA
tcctgtctcagagtatatat

SEQ ID NO: 51233 - RNA, 20 nt, synthetic construct
  source 1..20: mol_type = other RNA
tcctgtcttggacccatgcc

SEQ ID NO: 51234 - RNA, 20 nt, synthetic construct
  source 1..20: mol_type = other RNA
tcctgtgatttatgtggcat

SEQ ID NO: 51235 - RNA, 20 nt, synthetic construct
  source 1..20: mol_type = other RNA
tcctgtgccaagtccgtgca

SEQ ID NO: 51236 - RNA, 20 nt, synthetic construct
  source 1..20: mol_type = other RNA
tcctgtgtgcatgctcccat

SEQ ID NO: 51237 - RNA, 20 nt, synthetic construct
  source 1..20: mol_type = other RNA
tcctgtgtttctgctattct

SEQ ID NO: 51238 - RNA, 20 nt, synthetic construct
  source 1..20: mol_type = other RNA
tcctgttccgggatcctgtc

SEQ ID NO: 51239 - RNA, 20 nt, synthetic construct
  source 1..20: mol_type = other RNA
tcctgttctttggagctgta

SEQ ID NO: 51240 - RNA, 20 nt, synthetic construct
  source 1..20: mol_type = other RNA
tcctgttctttgttagttta

SEQ ID NO: 51241 - RNA, 20 nt, synthetic construct
  source 1..20: mol_type = other RNA
tcctgttcttttgtaatcta

SEQ ID NO: 51242 - RNA, 20 nt, synthetic construct
  source 1..20: mol_type = other RNA
tcctgttgctttaacctctg

SEQ ID NO: 51243 - RNA, 20 nt, synthetic construct
  source 1..20: mol_type = other RNA
tcctgtttctctacatctgg

SEQ ID NO: 51244 - RNA, 20 nt, synthetic construct
  source 1..20: mol_type = other RNA
tcctgtttgagaagtctttt

SEQ ID NO: 51245 - RNA, 20 nt, synthetic construct
  source 1..20: mol_type = other RNA
tcctgttttagtggctcaca

SEQ ID NO: 51246 - RNA, 20 nt, synthetic construct
  source 1..20: mol_type = other RNA
tccttaaaaaaggtttttga

SEQ ID NO: 51247 - RNA, 20 nt, synthetic construct
  source 1..20: mol_type = other RNA
tccttaaatttctaaggttc

SEQ ID NO: 51248 - RNA, 20 nt, synthetic construct
  source 1..20: mol_type = other RNA
tccttaagcacagactgtgc

SEQ ID NO: 51249 - RNA, 20 nt, synthetic construct
  source 1..20: mol_type = other RNA
tccttaagccatttcaggtt

SEQ ID NO: 51250 - RNA, 20 nt, synthetic construct
  source 1..20: mol_type = other RNA
tccttaatgccaccgaattg

SEQ ID NO: 51251 - RNA, 20 nt, synthetic construct
  source 1..20: mol_type = other RNA
tccttaatgtttagtagaat

SEQ ID NO: 51252 - RNA, 20 nt, synthetic construct
  source 1..20: mol_type = other RNA
tccttaccactataatccag

SEQ ID NO: 51253 - RNA, 20 nt, synthetic construct
  source 1..20: mol_type = other RNA
tccttaccactgaagtgttg

SEQ ID NO: 51254 - RNA, 20 nt, synthetic construct
  source 1..20: mol_type = other RNA
tccttaccagtgcttgcagc

SEQ ID NO: 51255 - RNA, 20 nt, synthetic construct
  source 1..20: mol_type = other RNA
tccttacctttatctttgga

SEQ ID NO: 51256 - RNA, 20 nt, synthetic construct
  source 1..20: mol_type = other RNA
tccttactaccaccactaat

SEQ ID NO: 51257 - RNA, 20 nt, synthetic construct
  source 1..20: mol_type = other RNA
tccttacttccagctcacgt

SEQ ID NO: 51258 - RNA, 20 nt, synthetic construct
  source 1..20: mol_type = other RNA
tccttagattacaaaagaac

SEQ ID NO: 51259 - RNA, 20 nt, synthetic construct
  source 1..20: mol_type = other RNA
tccttagttcgaagtttttt

SEQ ID NO: 51260 - RNA, 20 nt, synthetic construct
  source 1..20: mol_type = other RNA
tccttatagtattacctccc

SEQ ID NO: 51261 - RNA, 20 nt, synthetic construct
  source 1..20: mol_type = other RNA
tccttatccattcatctctc

SEQ ID NO: 51262 - RNA, 20 nt, synthetic construct
  source 1..20: mol_type = other RNA
tccttatccgataaagggtc

SEQ ID NO: 51263 - RNA, 20 nt, synthetic construct
  source 1..20: mol_type = other RNA
tccttatggatatctggcct

SEQ ID NO: 51264 - RNA, 20 nt, synthetic construct
  source 1..20: mol_type = other RNA
tccttattgagaagcagaaa

SEQ ID NO: 51265 - RNA, 20 nt, synthetic construct
  source 1..20: mol_type = other RNA
tccttcagtcagttctctgc

SEQ ID NO: 51266 - RNA, 20 nt, synthetic construct
  source 1..20: mol_type = other RNA
tccttcatgtcccctgtcca

SEQ ID NO: 51267 - RNA, 20 nt, synthetic construct
  source 1..20: mol_type = other RNA
tccttcatttaacatattga

SEQ ID NO: 51268 - RNA, 20 nt, synthetic construct
  source 1..20: mol_type = other RNA
tccttccagatgttttacac

SEQ ID NO: 51269 - RNA, 20 nt, synthetic construct
  source 1..20: mol_type = other RNA
tccttccagtatgatgccac

SEQ ID NO: 51270 - RNA, 20 nt, synthetic construct
  source 1..20: mol_type = other RNA
tccttccagtttatatgcct

SEQ ID NO: 51271 - RNA, 20 nt, synthetic construct
  source 1..20: mol_type = other RNA
tccttcccaaatccaggatg

SEQ ID NO: 51272 - RNA, 20 nt, synthetic construct
  source 1..20: mol_type = other RNA
tccttcccctggtcgagctg

SEQ ID NO: 51273 - RNA, 20 nt, synthetic construct
  source 1..20: mol_type = other RNA
tccttcccctttctttggtt

SEQ ID NO: 51274 - RNA, 20 nt, synthetic construct
  source 1..20: mol_type = other RNA
tccttccgacctgtagattg

SEQ ID NO: 51275 - RNA, 20 nt, synthetic construct
  source 1..20: mol_type = other RNA
tccttcctacacatatcttt

SEQ ID NO: 51276 - RNA, 20 nt, synthetic construct
  source 1..20: mol_type = other RNA
tccttccttcatgtcccctg

SEQ ID NO: 51277 - RNA, 20 nt, synthetic construct
  source 1..20: mol_type = other RNA
tccttccttgctcaggagta

SEQ ID NO: 51278 - RNA, 20 nt, synthetic construct
  source 1..20: mol_type = other RNA
tccttcctttgatgacttac

SEQ ID NO: 51279 - RNA, 20 nt, synthetic construct
  source 1..20: mol_type = other RNA
tccttctaatcagtaactta

SEQ ID NO: 51280 - RNA, 20 nt, synthetic construct
  source 1..20: mol_type = other RNA
tccttctacatccccccacc

SEQ ID NO: 51281 - RNA, 20 nt, synthetic construct
  source 1..20: mol_type = other RNA
tccttctcatagtcttccaa

SEQ ID NO: 51282 - RNA, 20 nt, synthetic construct
  source 1..20: mol_type = other RNA
tccttctcgtgtgagctcta

SEQ ID NO: 51283 - RNA, 20 nt, synthetic construct
  source 1..20: mol_type = other RNA
tccttctcttatactagtag

SEQ ID NO: 51284 - RNA, 20 nt, synthetic construct
  source 1..20: mol_type = other RNA
tccttctgaaggcactaaca

SEQ ID NO: 51285 - RNA, 20 nt, synthetic construct
  source 1..20: mol_type = other RNA
tccttctgagaaggcgaaat

SEQ ID NO: 51286 - RNA, 20 nt, synthetic construct
  source 1..20: mol_type = other RNA
tccttctgcaggctgaactg

SEQ ID NO: 51287 - RNA, 20 nt, synthetic construct
  source 1..20: mol_type = other RNA
tccttctgccttgacctccc

SEQ ID NO: 51288 - RNA, 20 nt, synthetic construct
  source 1..20: mol_type = other RNA
tccttctgctcactttggga

SEQ ID NO: 51289 - RNA, 20 nt, synthetic construct
  source 1..20: mol_type = other RNA
tccttctggaagatttctac

SEQ ID NO: 51290 - RNA, 20 nt, synthetic construct
  source 1..20: mol_type = other RNA
tccttcttaagacatttggg

SEQ ID NO: 51291 - RNA, 20 nt, synthetic construct
  source 1..20: mol_type = other RNA
tccttcttcacacattaact

SEQ ID NO: 51292 - RNA, 20 nt, synthetic construct
  source 1..20: mol_type = other RNA
tccttctttgggggaagcag

SEQ ID NO: 51293 - RNA, 20 nt, synthetic construct
  source 1..20: mol_type = other RNA
tccttgatcagcttcctacc

SEQ ID NO: 51294 - RNA, 20 nt, synthetic construct
  source 1..20: mol_type = other RNA
tccttgcacattagaatcat

SEQ ID NO: 51295 - RNA, 20 nt, synthetic construct
  source 1..20: mol_type = other RNA
tccttgcaccaactccacat

SEQ ID NO: 51296 - RNA, 20 nt, synthetic construct
  source 1..20: mol_type = other RNA
tccttgccaacagttacttt

SEQ ID NO: 51297 - RNA, 20 nt, synthetic construct
  source 1..20: mol_type = other RNA
tccttgctatgtaatctcat

SEQ ID NO: 51298 - RNA, 20 nt, synthetic construct
  source 1..20: mol_type = other RNA
tccttgctcaggagtaactg

SEQ ID NO: 51299 - RNA, 20 nt, synthetic construct
  source 1..20: mol_type = other RNA
tccttgctgaagaataactg

SEQ ID NO: 51300 - RNA, 20 nt, synthetic construct
  source 1..20: mol_type = other RNA
tccttgcttgtcttgaatag

SEQ ID NO: 51301 - RNA, 20 nt, synthetic construct
  source 1..20: mol_type = other RNA
tccttggagaagagttctga

SEQ ID NO: 51302 - RNA, 20 nt, synthetic construct
  source 1..20: mol_type = other RNA
tccttggattgctaaactgt

SEQ ID NO: 51303 - RNA, 20 nt, synthetic construct
  source 1..20: mol_type = other RNA
tccttgggcacactccccag

SEQ ID NO: 51304 - RNA, 20 nt, synthetic construct
  source 1..20: mol_type = other RNA
tccttgtaacttttatttct

SEQ ID NO: 51305 - RNA, 20 nt, synthetic construct
  source 1..20: mol_type = other RNA
tccttgtatggagactagta

SEQ ID NO: 51306 - RNA, 20 nt, synthetic construct
  source 1..20: mol_type = other RNA
tccttgtcctaaaattcctt

SEQ ID NO: 51307 - RNA, 20 nt, synthetic construct
  source 1..20: mol_type = other RNA
tccttgtgatctatgcatac

SEQ ID NO: 51308 - RNA, 20 nt, synthetic construct
  source 1..20: mol_type = other RNA
tccttgtggtcttaagagac

SEQ ID NO: 51309 - RNA, 20 nt, synthetic construct
  source 1..20: mol_type = other RNA
tccttgtgtcttaaattcaa

SEQ ID NO: 51310 - RNA, 20 nt, synthetic construct
  source 1..20: mol_type = other RNA
tccttgtgttttatttggct

SEQ ID NO: 51311 - RNA, 20 nt, synthetic construct
  source 1..20: mol_type = other RNA
tcctttaacgtatctgggaa

SEQ ID NO: 51312 - RNA, 20 nt, synthetic construct
  source 1..20: mol_type = other RNA
tcctttaatttgggtttgag

SEQ ID NO: 51313 - RNA, 20 nt, synthetic construct
  source 1..20: mol_type = other RNA
tcctttataccttttaatga

SEQ ID NO: 51314 - RNA, 20 nt, synthetic construct
  source 1..20: mol_type = other RNA
tcctttcaaagagacctgat

SEQ ID NO: 51315 - RNA, 20 nt, synthetic construct
  source 1..20: mol_type = other RNA
tcctttcaaggtatctcccc

SEQ ID NO: 51316 - RNA, 20 nt, synthetic construct
  source 1..20: mol_type = other RNA
tcctttcagtcggttcttca

SEQ ID NO: 51317 - RNA, 20 nt, synthetic construct
  source 1..20: mol_type = other RNA
tcctttccagaggttctttt

SEQ ID NO: 51318 - RNA, 20 nt, synthetic construct
  source 1..20: mol_type = other RNA
tcctttcccttctgctcggc

SEQ ID NO: 51319 - RNA, 20 nt, synthetic construct
  source 1..20: mol_type = other RNA
tcctttccttccttgctcag

SEQ ID NO: 51320 - RNA, 20 nt, synthetic construct
  source 1..20: mol_type = other RNA
tcctttccttgtcctaaaat

SEQ ID NO: 51321 - RNA, 20 nt, synthetic construct
  source 1..20: mol_type = other RNA
tcctttctagaatgcatccc

SEQ ID NO: 51322 - RNA, 20 nt, synthetic construct
  source 1..20: mol_type = other RNA
tcctttctaggcatctattt

SEQ ID NO: 51323 - RNA, 20 nt, synthetic construct
  source 1..20: mol_type = other RNA
tcctttctatacttcatctt

SEQ ID NO: 51324 - RNA, 20 nt, synthetic construct
  source 1..20: mol_type = other RNA
tcctttcttaccctcacagt

SEQ ID NO: 51325 - RNA, 20 nt, synthetic construct
  source 1..20: mol_type = other RNA
tcctttcttggtctgcagac

SEQ ID NO: 51326 - RNA, 20 nt, synthetic construct
  source 1..20: mol_type = other RNA
tcctttgaggtaagaacttg

SEQ ID NO: 51327 - RNA, 20 nt, synthetic construct
  source 1..20: mol_type = other RNA
tcctttgatgacttacagat

SEQ ID NO: 51328 - RNA, 20 nt, synthetic construct
  source 1..20: mol_type = other RNA
tcctttgatgcacaaaagtt

SEQ ID NO: 51329 - RNA, 20 nt, synthetic construct
  source 1..20: mol_type = other RNA
tcctttgcacacaccaaatc

SEQ ID NO: 51330 - RNA, 20 nt, synthetic construct
  source 1..20: mol_type = other RNA
tcctttgcctaagtctcagg

SEQ ID NO: 51331 - RNA, 20 nt, synthetic construct
  source 1..20: mol_type = other RNA
tcctttgcctttcactttga

SEQ ID NO: 51332 - RNA, 20 nt, synthetic construct
  source 1..20: mol_type = other RNA
tcctttgcgtctgtgattat

SEQ ID NO: 51333 - RNA, 20 nt, synthetic construct
  source 1..20: mol_type = other RNA
tcctttgcttcccacttcga

SEQ ID NO: 51334 - RNA, 20 nt, synthetic construct
  source 1..20: mol_type = other RNA
tcctttgggaggtcaaggca

SEQ ID NO: 51335 - RNA, 20 nt, synthetic construct
  source 1..20: mol_type = other RNA
tcctttgtgcaggtctgggt

SEQ ID NO: 51336 - RNA, 20 nt, synthetic construct
  source 1..20: mol_type = other RNA
tcctttgtgtcaagtacaac

SEQ ID NO: 51337 - RNA, 20 nt, synthetic construct
  source 1..20: mol_type = other RNA
tccttttaagagtgaagaaa

SEQ ID NO: 51338 - RNA, 20 nt, synthetic construct
  source 1..20: mol_type = other RNA
tccttttaagggaaacactc

SEQ ID NO: 51339 - RNA, 20 nt, synthetic construct
  source 1..20: mol_type = other RNA
tccttttatgtgcagtctaa

SEQ ID NO: 51340 - RNA, 20 nt, synthetic construct
  source 1..20: mol_type = other RNA
tccttttcccaggagctaga

SEQ ID NO: 51341 - RNA, 20 nt, synthetic construct
  source 1..20: mol_type = other RNA
tccttttcctgttccgggat

SEQ ID NO: 51342 - RNA, 20 nt, synthetic construct
  source 1..20: mol_type = other RNA
tccttttcgagactgagtaa

SEQ ID NO: 51343 - RNA, 20 nt, synthetic construct
  source 1..20: mol_type = other RNA
tccttttgagtttggtgtat

SEQ ID NO: 51344 - RNA, 20 nt, synthetic construct
  source 1..20: mol_type = other RNA
tccttttgtagagggaattt

SEQ ID NO: 51345 - RNA, 20 nt, synthetic construct
  source 1..20: mol_type = other RNA
tcctttttatcacccttata

SEQ ID NO: 51346 - RNA, 20 nt, synthetic construct
  source 1..20: mol_type = other RNA
tcctttttcaaataatagct

SEQ ID NO: 51347 - RNA, 20 nt, synthetic construct
  source 1..20: mol_type = other RNA
tccttttttactgacttttc

SEQ ID NO: 51348 - RNA, 20 nt, synthetic construct
  source 1..20: mol_type = other RNA
tccttttttatgtgctttct

SEQ ID NO: 51349 - RNA, 20 nt, synthetic construct
  source 1..20: mol_type = other RNA
tcgaaaacctgaaatggctt

SEQ ID NO: 51350 - RNA, 20 nt, synthetic construct
  source 1..20: mol_type = other RNA
tcgaaaaggaatggaattct

SEQ ID NO: 51351 - RNA, 20 nt, synthetic construct
  source 1..20: mol_type = other RNA
tcgaaaatgggccaaagact

SEQ ID NO: 51352 - RNA, 20 nt, synthetic construct
  source 1..20: mol_type = other RNA
tcgaaagttcagatagaatt

SEQ ID NO: 51353 - RNA, 20 nt, synthetic construct
  source 1..20: mol_type = other RNA
tcgaaataatcattgttagg

SEQ ID NO: 51354 - RNA, 20 nt, synthetic construct
  source 1..20: mol_type = other RNA
tcgaactaaggaaagctcag

SEQ ID NO: 51355 - RNA, 20 nt, synthetic construct
  source 1..20: mol_type = other RNA
tcgaactctcgacctcgtga

SEQ ID NO: 51356 - RNA, 20 nt, synthetic construct
  source 1..20: mol_type = other RNA
tcgaagagaccacaggctct

SEQ ID NO: 51357 - RNA, 20 nt, synthetic construct
  source 1..20: mol_type = other RNA
tcgaagcaaaacatatgtca

SEQ ID NO: 51358 - RNA, 20 nt, synthetic construct
  source 1..20: mol_type = other RNA
tcgaagcacaaccactgatg

SEQ ID NO: 51359 - RNA, 20 nt, synthetic construct
  source 1..20: mol_type = other RNA
tcgaagccttcccctgctgt

SEQ ID NO: 51360 - RNA, 20 nt, synthetic construct
  source 1..20: mol_type = other RNA
tcgaagcttaatttagatga

SEQ ID NO: 51361 - RNA, 20 nt, synthetic construct
  source 1..20: mol_type = other RNA
tcgaagcttattaaaatgaa

SEQ ID NO: 51362 - RNA, 20 nt, synthetic construct
  source 1..20: mol_type = other RNA
tcgaaggcctgcttcattcc

SEQ ID NO: 51363 - RNA, 20 nt, synthetic construct
  source 1..20: mol_type = other RNA
tcgaagtgggaagcaaagga

SEQ ID NO: 51364 - RNA, 20 nt, synthetic construct
  source 1..20: mol_type = other RNA
tcgaagtggtgcttgaactg

SEQ ID NO: 51365 - RNA, 20 nt, synthetic construct
  source 1..20: mol_type = other RNA
tcgaatcctcacaacaggcc

SEQ ID NO: 51366 - RNA, 20 nt, synthetic construct
  source 1..20: mol_type = other RNA
tcgaattagattgttttgtt

SEQ ID NO: 51367 - RNA, 20 nt, synthetic construct
  source 1..20: mol_type = other RNA
tcgaattatgctaacatgaa

SEQ ID NO: 51368 - RNA, 20 nt, synthetic construct
  source 1..20: mol_type = other RNA
tcgacacacaatccaagttt

SEQ ID NO: 51369 - RNA, 20 nt, synthetic construct
  source 1..20: mol_type = other RNA
tcgacagtcccttgcctgac

SEQ ID NO: 51370 - RNA, 20 nt, synthetic construct
  source 1..20: mol_type = other RNA
tcgaccaagttactagaagc

SEQ ID NO: 51371 - RNA, 20 nt, synthetic construct
  source 1..20: mol_type = other RNA
tcgaccaggggaaggagtct

SEQ ID NO: 51372 - RNA, 20 nt, synthetic construct
  source 1..20: mol_type = other RNA
tcgaccccctgggctcaagc

SEQ ID NO: 51373 - RNA, 20 nt, synthetic construct
  source 1..20: mol_type = other RNA
tcgagaaaaatggggatatc

SEQ ID NO: 51374 - RNA, 20 nt, synthetic construct
  source 1..20: mol_type = other RNA
tcgagaagggaagtaaagat

SEQ ID NO: 51375 - RNA, 20 nt, synthetic construct
  source 1..20: mol_type = other RNA
tcgagactgagtaatattcc

SEQ ID NO: 51376 - RNA, 20 nt, synthetic construct
  source 1..20: mol_type = other RNA
tcgagactgtaatgagctga

SEQ ID NO: 51377 - RNA, 20 nt, synthetic construct
  source 1..20: mol_type = other RNA
tcgagagatgaatggataag

SEQ ID NO: 51378 - RNA, 20 nt, synthetic construct
  source 1..20: mol_type = other RNA
tcgagctcctgacctcagat

SEQ ID NO: 51379 - RNA, 20 nt, synthetic construct
  source 1..20: mol_type = other RNA
tcgagctgggtgatgttcaa

SEQ ID NO: 51380 - RNA, 20 nt, synthetic construct
  source 1..20: mol_type = other RNA
tcgaggcatctagttaccac

SEQ ID NO: 51381 - RNA, 20 nt, synthetic construct
  source 1..20: mol_type = other RNA
tcgagggggctgagtatggg

SEQ ID NO: 51382 - RNA, 20 nt, synthetic construct
  source 1..20: mol_type = other RNA
tcgagggtagcttttcctgc

SEQ ID NO: 51383 - RNA, 20 nt, synthetic construct
  source 1..20: mol_type = other RNA
tcgaggtcgcaccctgagca

SEQ ID NO: 51384 - RNA, 20 nt, synthetic construct
  source 1..20: mol_type = other RNA
tcgagtaaaaagaatgaata

SEQ ID NO: 51385 - RNA, 20 nt, synthetic construct
  source 1..20: mol_type = other RNA
tcgagttctgggagttcatt

SEQ ID NO: 51386 - RNA, 20 nt, synthetic construct
  source 1..20: mol_type = other RNA
tcgatggacatttaggttgt

SEQ ID NO: 51387 - RNA, 20 nt, synthetic construct
  source 1..20: mol_type = other RNA
tcgattaaaataacacgcag

SEQ ID NO: 51388 - RNA, 20 nt, synthetic construct
  source 1..20: mol_type = other RNA
tcgcaaagcaacatgctaag

SEQ ID NO: 51389 - RNA, 20 nt, synthetic construct
  source 1..20: mol_type = other RNA
tcgcaaagtaaaaagcacta

SEQ ID NO: 51390 - RNA, 20 nt, synthetic construct
  source 1..20: mol_type = other RNA
tcgcaatccaaaatcctctg

SEQ ID NO: 51391 - RNA, 20 nt, synthetic construct
  source 1..20: mol_type = other RNA
tcgcaccctgagcatccccg

SEQ ID NO: 51392 - RNA, 20 nt, synthetic construct
  source 1..20: mol_type = other RNA
tcgcactccacttcccactg

SEQ ID NO: 51393 - RNA, 20 nt, synthetic construct
  source 1..20: mol_type = other RNA
tcgcagcatccctgccgcgc

SEQ ID NO: 51394 - RNA, 20 nt, synthetic construct
  source 1..20: mol_type = other RNA
tcgcagcggggatgctcagg

SEQ ID NO: 51395 - RNA, 20 nt, synthetic construct
  source 1..20: mol_type = other RNA
tcgcagggccattctgctat

SEQ ID NO: 51396 - RNA, 20 nt, synthetic construct
  source 1..20: mol_type = other RNA
tcgcagggtgaaacttgaat

SEQ ID NO: 51397 - RNA, 20 nt, synthetic construct
  source 1..20: mol_type = other RNA
tcgcaggtgggaggcccgga

SEQ ID NO: 51398 - RNA, 20 nt, synthetic construct
  source 1..20: mol_type = other RNA
tcgcataaccaaattatttc

SEQ ID NO: 51399 - RNA, 20 nt, synthetic construct
  source 1..20: mol_type = other RNA
tcgcatcattcaaatgatat

SEQ ID NO: 51400 - RNA, 20 nt, synthetic construct
  source 1..20: mol_type = other RNA
tcgcatgaaaacagctaggt

SEQ ID NO: 51401 - RNA, 20 nt, synthetic construct
  source 1..20: mol_type = other RNA
tcgcattacgagttatgcaa

SEQ ID NO: 51402 - RNA, 20 nt, synthetic construct
  source 1..20: mol_type = other RNA
tcgcattgctaattcattgt

SEQ ID NO: 51403 - RNA, 20 nt, synthetic construct
  source 1..20: mol_type = other RNA
tcgccatacctggtccttaa

SEQ ID NO: 51404 - RNA, 20 nt, synthetic construct
  source 1..20: mol_type = other RNA
tcgcccaggcggaatgcagt

SEQ ID NO: 51405 - RNA, 20 nt, synthetic construct
  source 1..20: mol_type = other RNA
tcgcccaggctggagctcac

SEQ ID NO: 51406 - RNA, 20 nt, synthetic construct
  source 1..20: mol_type = other RNA
tcgccgtctccctcggccac

SEQ ID NO: 51407 - RNA, 20 nt, synthetic construct
  source 1..20: mol_type = other RNA
tcgcctagataagaaaatgt

SEQ ID NO: 51408 - RNA, 20 nt, synthetic construct
  source 1..20: mol_type = other RNA
tcgccttctcagaaggacac

SEQ ID NO: 51409 - RNA, 20 nt, synthetic construct
  source 1..20: mol_type = other RNA
tcgcctttctcgcagcgggg

SEQ ID NO: 51410 - RNA, 20 nt, synthetic construct
  source 1..20: mol_type = other RNA
tcgcctttgttgccaggtgg

SEQ ID NO: 51411 - RNA, 20 nt, synthetic construct
  source 1..20: mol_type = other RNA
tcgcgcccagcccgtgtgtt

SEQ ID NO: 51412 - RNA, 20 nt, synthetic construct
  source 1..20: mol_type = other RNA
tcgcgcgcggcagggatgct

SEQ ID NO: 51413 - RNA, 20 nt, synthetic construct
  source 1..20: mol_type = other RNA
tcgcggacgcgcatttttta

SEQ ID NO: 51414 - RNA, 20 nt, synthetic construct
  source 1..20: mol_type = other RNA
tcgcgggcaccttccctact

SEQ ID NO: 51415 - RNA, 20 nt, synthetic construct
  source 1..20: mol_type = other RNA
tcgctaatctcaatcagggc

SEQ ID NO: 51416 - RNA, 20 nt, synthetic construct
  source 1..20: mol_type = other RNA
tcgctatcagtagtttgcta

SEQ ID NO: 51417 - RNA, 20 nt, synthetic construct
  source 1..20: mol_type = other RNA
tcgctctcctgtgccaagtc

SEQ ID NO: 51418 - RNA, 20 nt, synthetic construct
  source 1..20: mol_type = other RNA
tcgctctgtcgcccaggcgg

SEQ ID NO: 51419 - RNA, 20 nt, synthetic construct
  source 1..20: mol_type = other RNA
tcgctcttggcttttggcag

SEQ ID NO: 51420 - RNA, 20 nt, synthetic construct
  source 1..20: mol_type = other RNA
tcgctcttttaaaaattaca

SEQ ID NO: 51421 - RNA, 20 nt, synthetic construct
  source 1..20: mol_type = other RNA
tcgcttgaacctgaaaaacg

SEQ ID NO: 51422 - RNA, 20 nt, synthetic construct
  source 1..20: mol_type = other RNA
tcgcttttggagctataatt

SEQ ID NO: 51423 - RNA, 20 nt, synthetic construct
  source 1..20: mol_type = other RNA
tcggaaatataaaaagcctc

SEQ ID NO: 51424 - RNA, 20 nt, synthetic construct
  source 1..20: mol_type = other RNA
tcggaacaggctcaatacct

SEQ ID NO: 51425 - RNA, 20 nt, synthetic construct
  source 1..20: mol_type = other RNA
tcggaactcctgtatgccgc

SEQ ID NO: 51426 - RNA, 20 nt, synthetic construct
  source 1..20: mol_type = other RNA
tcggaaggaatgtgcttcct

SEQ ID NO: 51427 - RNA, 20 nt, synthetic construct
  source 1..20: mol_type = other RNA
tcggataaggaagagtttat

SEQ ID NO: 51428 - RNA, 20 nt, synthetic construct
  source 1..20: mol_type = other RNA
tcggatatttactaagaagt

SEQ ID NO: 51429 - RNA, 20 nt, synthetic construct
  source 1..20: mol_type = other RNA
tcggatttaagagaggaagt

SEQ ID NO: 51430 - RNA, 20 nt, synthetic construct
  source 1..20: mol_type = other RNA
tcggcacagctctcatgagt

SEQ ID NO: 51431 - RNA, 20 nt, synthetic construct
  source 1..20: mol_type = other RNA
tcggccaaccattactcttc

SEQ ID NO: 51432 - RNA, 20 nt, synthetic construct
  source 1..20: mol_type = other RNA
tcggccaagatctgtttttc

SEQ ID NO: 51433 - RNA, 20 nt, synthetic construct
  source 1..20: mol_type = other RNA
tcggccacagcagggctcct

SEQ ID NO: 51434 - RNA, 20 nt, synthetic construct
  source 1..20: mol_type = other RNA
tcggccgacccagcccccaa

SEQ ID NO: 51435 - RNA, 20 nt, synthetic construct
  source 1..20: mol_type = other RNA
tcggcctctactgactccct

SEQ ID NO: 51436 - RNA, 20 nt, synthetic construct
  source 1..20: mol_type = other RNA
tcggctccgggcctcccacc

SEQ ID NO: 51437 - RNA, 20 nt, synthetic construct
  source 1..20: mol_type = other RNA
tcggctctgtcacccttgta

SEQ ID NO: 51438 - RNA, 20 nt, synthetic construct
  source 1..20: mol_type = other RNA
tcggctctgtgctgagatgg

SEQ ID NO: 51439 - RNA, 20 nt, synthetic construct
  source 1..20: mol_type = other RNA
tcggcttactgcaacctccg

SEQ ID NO: 51440 - RNA, 20 nt, synthetic construct
  source 1..20: mol_type = other RNA
tcgggagtaacagacctctg

SEQ ID NO: 51441 - RNA, 20 nt, synthetic construct
  source 1..20: mol_type = other RNA
tcgggctgcctcagccgccg

SEQ ID NO: 51442 - RNA, 20 nt, synthetic construct
  source 1..20: mol_type = other RNA
tcggggcctacagtggttcc

SEQ ID NO: 51443 - RNA, 20 nt, synthetic construct
  source 1..20: mol_type = other RNA
tcgggggagagcactggttt

SEQ ID NO: 51444 - RNA, 20 nt, synthetic construct
  source 1..20: mol_type = other RNA
tcgggtgtcagaaaccatcg

SEQ ID NO: 51445 - RNA, 20 nt, synthetic construct
  source 1..20: mol_type = other RNA
tcgggtgtcagaattccatc

SEQ ID NO: 51446 - RNA, 20 nt, synthetic construct
  source 1..20: mol_type = other RNA
tcgggttcaagccccagttc

SEQ ID NO: 51447 - RNA, 20 nt, synthetic construct
  source 1..20: mol_type = other RNA
tcggtatgtacccaatggat

SEQ ID NO: 51448 - RNA, 20 nt, synthetic construct
  source 1..20: mol_type = other RNA
tcggtatgttaataaccctg

SEQ ID NO: 51449 - RNA, 20 nt, synthetic construct
  source 1..20: mol_type = other RNA
tcggtcattctggagtgttt

SEQ ID NO: 51450 - RNA, 20 nt, synthetic construct
  source 1..20: mol_type = other RNA
tcggtctacggacgcaggca

SEQ ID NO: 51451 - RNA, 20 nt, synthetic construct
  source 1..20: mol_type = other RNA
tcggtctcaaaacaaacaaa

SEQ ID NO: 51452 - RNA, 20 nt, synthetic construct
  source 1..20: mol_type = other RNA
tcggtctgtatttctgcttt

SEQ ID NO: 51453 - RNA, 20 nt, synthetic construct
  source 1..20: mol_type = other RNA
tcggtggcattaaggacatc

SEQ ID NO: 51454 - RNA, 20 nt, synthetic construct
  source 1..20: mol_type = other RNA
tcggttcttcaccgtgcaac

SEQ ID NO: 51455 - RNA, 20 nt, synthetic construct
  source 1..20: mol_type = other RNA
tcggttttctagttagtttg

SEQ ID NO: 51456 - RNA, 20 nt, synthetic construct
  source 1..20: mol_type = other RNA
tcgtaaaaagccatttatca

SEQ ID NO: 51457 - RNA, 20 nt, synthetic construct
  source 1..20: mol_type = other RNA
tcgtaaaacctcatctctac

SEQ ID NO: 51458 - RNA, 20 nt, synthetic construct
  source 1..20: mol_type = other RNA
tcgtaaaagctaatctactt

SEQ ID NO: 51459 - RNA, 20 nt, synthetic construct
  source 1..20: mol_type = other RNA
tcgtaatgcgatgatcaaaa

SEQ ID NO: 51460 - RNA, 20 nt, synthetic construct
  source 1..20: mol_type = other RNA
tcgtacctttcgctatcagt

SEQ ID NO: 51461 - RNA, 20 nt, synthetic construct
  source 1..20: mol_type = other RNA
tcgtagcaggtttaggaagc

SEQ ID NO: 51462 - RNA, 20 nt, synthetic construct
  source 1..20: mol_type = other RNA
tcgtagttttttggtagata

SEQ ID NO: 51463 - RNA, 20 nt, synthetic construct
  source 1..20: mol_type = other RNA
tcgtatcttttaacagatgg

SEQ ID NO: 51464 - RNA, 20 nt, synthetic construct
  source 1..20: mol_type = other RNA
tcgtatggaagatgggactt

SEQ ID NO: 51465 - RNA, 20 nt, synthetic construct
  source 1..20: mol_type = other RNA
tcgtcaaggggagaggcctc

SEQ ID NO: 51466 - RNA, 20 nt, synthetic construct
  source 1..20: mol_type = other RNA
tcgtcatctataaggtaatg

SEQ ID NO: 51467 - RNA, 20 nt, synthetic construct
  source 1..20: mol_type = other RNA
tcgtcccccatcccctttac

SEQ ID NO: 51468 - RNA, 20 nt, synthetic construct
  source 1..20: mol_type = other RNA
tcgtccctaaacactgtagt

SEQ ID NO: 51469 - RNA, 20 nt, synthetic construct
  source 1..20: mol_type = other RNA
tcgtcctcttcgggtgtcag

SEQ ID NO: 51470 - RNA, 20 nt, synthetic construct
  source 1..20: mol_type = other RNA
tcgtgaagtctttattttta

SEQ ID NO: 51471 - RNA, 20 nt, synthetic construct
  source 1..20: mol_type = other RNA
tcgtgaatttggtattctta

SEQ ID NO: 51472 - RNA, 20 nt, synthetic construct
  source 1..20: mol_type = other RNA
tcgtgagactattatgagca

SEQ ID NO: 51473 - RNA, 20 nt, synthetic construct
  source 1..20: mol_type = other RNA
tcgtgagggtttcagtgagt

SEQ ID NO: 51474 - RNA, 20 nt, synthetic construct
  source 1..20: mol_type = other RNA
tcgtgatagtcttccaattg

SEQ ID NO: 51475 - RNA, 20 nt, synthetic construct
  source 1..20: mol_type = other RNA
tcgtgcatgtctgcaggagc

SEQ ID NO: 51476 - RNA, 20 nt, synthetic construct
  source 1..20: mol_type = other RNA
tcgtggcctcaagcagtcct

SEQ ID NO: 51477 - RNA, 20 nt, synthetic construct
  source 1..20: mol_type = other RNA
tcgtggttatagccataaga

SEQ ID NO: 51478 - RNA, 20 nt, synthetic construct
  source 1..20: mol_type = other RNA
tcgtgtactgaaaccagtgc

SEQ ID NO: 51479 - RNA, 20 nt, synthetic construct
  source 1..20: mol_type = other RNA
tcgtgtatgatttctaggcc

SEQ ID NO: 51480 - RNA, 20 nt, synthetic construct
  source 1..20: mol_type = other RNA
tcgtgtgagctctagccttg

SEQ ID NO: 51481 - RNA, 20 nt, synthetic construct
  source 1..20: mol_type = other RNA
tcgtgtgtctcataaagccg

SEQ ID NO: 51482 - RNA, 20 nt, synthetic construct
  source 1..20: mol_type = other RNA
tcgtgtgtggagtggggcac

SEQ ID NO: 51483 - RNA, 20 nt, synthetic construct
  source 1..20: mol_type = other RNA
tcgttaatacttgtgtagcg

SEQ ID NO: 51484 - RNA, 20 nt, synthetic construct
  source 1..20: mol_type = other RNA
tcgttagtattttcacatat

SEQ ID NO: 51485 - RNA, 20 nt, synthetic construct
  source 1..20: mol_type = other RNA
tcgttatatcctcagggtag

SEQ ID NO: 51486 - RNA, 20 nt, synthetic construct
  source 1..20: mol_type = other RNA
tcgttcaaaacatcatctaa

SEQ ID NO: 51487 - RNA, 20 nt, synthetic construct
  source 1..20: mol_type = other RNA
tcgttcacactcgcactcca

SEQ ID NO: 51488 - RNA, 20 nt, synthetic construct
  source 1..20: mol_type = other RNA
tcgttcagtttagtaaatct

SEQ ID NO: 51489 - RNA, 20 nt, synthetic construct
  source 1..20: mol_type = other RNA
tcgttcatgttcaaggtgtt

SEQ ID NO: 51490 - RNA, 20 nt, synthetic construct
  source 1..20: mol_type = other RNA
tcgttccagcagggtaaagt

SEQ ID NO: 51491 - RNA, 20 nt, synthetic construct
  source 1..20: mol_type = other RNA
tcgttgagtacctctgggat

SEQ ID NO: 51492 - RNA, 20 nt, synthetic construct
  source 1..20: mol_type = other RNA
tcgttggatttatctttcta

SEQ ID NO: 51493 - RNA, 20 nt, synthetic construct
  source 1..20: mol_type = other RNA
tcgttgtgaaatataatgtt

SEQ ID NO: 51494 - RNA, 20 nt, synthetic construct
  source 1..20: mol_type = other RNA
tcgtttatgcatttattagt

SEQ ID NO: 51495 - RNA, 20 nt, synthetic construct
  source 1..20: mol_type = other RNA
tcgtttatttcttctccctc

SEQ ID NO: 51496 - RNA, 20 nt, synthetic construct
  source 1..20: mol_type = other RNA
tcgtttcaatattaagagtc

SEQ ID NO: 51497 - RNA, 20 nt, synthetic construct
  source 1..20: mol_type = other RNA
tcgtttcagattgcttgaga

SEQ ID NO: 51498 - RNA, 20 nt, synthetic construct
  source 1..20: mol_type = other RNA
tcgtttgaggcttttcatag

SEQ ID NO: 51499 - RNA, 20 nt, synthetic construct
  source 1..20: mol_type = other RNA
tcgttttcaacaaaggttga

SEQ ID NO: 51500 - RNA, 20 nt, synthetic construct
  source 1..20: mol_type = other RNA
tctaaaaacatccattactc

SEQ ID NO: 51501 - RNA, 20 nt, synthetic construct
  source 1..20: mol_type = other RNA
tctaaaaacgtgcaaactac

SEQ ID NO: 51502 - RNA, 20 nt, synthetic construct
  source 1..20: mol_type = other RNA
tctaaaataacagaagaaga

SEQ ID NO: 51503 - RNA, 20 nt, synthetic construct
  source 1..20: mol_type = other RNA
tctaaaatcatcacagtatg

SEQ ID NO: 51504 - RNA, 20 nt, synthetic construct
  source 1..20: mol_type = other RNA
tctaaaatggaagactttat

SEQ ID NO: 51505 - RNA, 20 nt, synthetic construct
  source 1..20: mol_type = other RNA
tctaaacacacgggctgggc

SEQ ID NO: 51506 - RNA, 20 nt, synthetic construct
  source 1..20: mol_type = other RNA
tctaaacctgaggtctttaa

SEQ ID NO: 51507 - RNA, 20 nt, synthetic construct
  source 1..20: mol_type = other RNA
tctaaaccttaaaagagtga

SEQ ID NO: 51508 - RNA, 20 nt, synthetic construct
  source 1..20: mol_type = other RNA
tctaaacgtttggtgactga

SEQ ID NO: 51509 - RNA, 20 nt, synthetic construct
  source 1..20: mol_type = other RNA
tctaaactagttcaaccatt

SEQ ID NO: 51510 - RNA, 20 nt, synthetic construct
  source 1..20: mol_type = other RNA
tctaaactggttttcctgat

SEQ ID NO: 51511 - RNA, 20 nt, synthetic construct
  source 1..20: mol_type = other RNA
tctaaagccaatcttcccaa

SEQ ID NO: 51512 - RNA, 20 nt, synthetic construct
  source 1..20: mol_type = other RNA
tctaaagccaggctttccca

SEQ ID NO: 51513 - RNA, 20 nt, synthetic construct
  source 1..20: mol_type = other RNA
tctaaagtctatgctcttgg

SEQ ID NO: 51514 - RNA, 20 nt, synthetic construct
  source 1..20: mol_type = other RNA
tctaaagttagaagtatccc

SEQ ID NO: 51515 - RNA, 20 nt, synthetic construct
  source 1..20: mol_type = other RNA
tctaaataaatctaagtctc

SEQ ID NO: 51516 - RNA, 20 nt, synthetic construct
  source 1..20: mol_type = other RNA
tctaaataggtattcatgct

SEQ ID NO: 51517 - RNA, 20 nt, synthetic construct
  source 1..20: mol_type = other RNA
tctaaatcaacagtgtacta

SEQ ID NO: 51518 - RNA, 20 nt, synthetic construct
  source 1..20: mol_type = other RNA
tctaaatggtgtgaagttgg

SEQ ID NO: 51519 - RNA, 20 nt, synthetic construct
  source 1..20: mol_type = other RNA
tctaaatgtagatcaagtat

SEQ ID NO: 51520 - RNA, 20 nt, synthetic construct
  source 1..20: mol_type = other RNA
tctaaattaagcttcgacag

SEQ ID NO: 51521 - RNA, 20 nt, synthetic construct
  source 1..20: mol_type = other RNA
tctaaattgaacagcctaaa

SEQ ID NO: 51522 - RNA, 20 nt, synthetic construct
  source 1..20: mol_type = other RNA
tctaaattgcctataattca

SEQ ID NO: 51523 - RNA, 20 nt, synthetic construct
  source 1..20: mol_type = other RNA
tctaaattttaagtgcacaa

SEQ ID NO: 51524 - RNA, 20 nt, synthetic construct
  source 1..20: mol_type = other RNA
tctaacaaaactaggctgtc

SEQ ID NO: 51525 - RNA, 20 nt, synthetic construct
  source 1..20: mol_type = other RNA
tctaacaaaagatacacaag

SEQ ID NO: 51526 - RNA, 20 nt, synthetic construct
  source 1..20: mol_type = other RNA
tctaacaaacgcattgtgat

SEQ ID NO: 51527 - RNA, 20 nt, synthetic construct
  source 1..20: mol_type = other RNA
tctaacaagaagctgttttg

SEQ ID NO: 51528 - RNA, 20 nt, synthetic construct
  source 1..20: mol_type = other RNA
tctaacagaaatacaatgtg

SEQ ID NO: 51529 - RNA, 20 nt, synthetic construct
  source 1..20: mol_type = other RNA
tctaacataatcaaattcac

SEQ ID NO: 51530 - RNA, 20 nt, synthetic construct
  source 1..20: mol_type = other RNA
tctaacattatcttctacct

SEQ ID NO: 51531 - RNA, 20 nt, synthetic construct
  source 1..20: mol_type = other RNA
tctaaccattaacagctcag

SEQ ID NO: 51532 - RNA, 20 nt, synthetic construct
  source 1..20: mol_type = other RNA
tctaaccctcaaatgccata

SEQ ID NO: 51533 - RNA, 20 nt, synthetic construct
  source 1..20: mol_type = other RNA
tctaaccctcaatccccatc

SEQ ID NO: 51534 - RNA, 20 nt, synthetic construct
  source 1..20: mol_type = other RNA
tctaaccctcctcctctaca

SEQ ID NO: 51535 - RNA, 20 nt, synthetic construct
  source 1..20: mol_type = other RNA
tctaagagataactaatgag

SEQ ID NO: 51536 - RNA, 20 nt, synthetic construct
  source 1..20: mol_type = other RNA
tctaagagccaaagacattg

SEQ ID NO: 51537 - RNA, 20 nt, synthetic construct
  source 1..20: mol_type = other RNA
tctaagccatgtttctcctg

SEQ ID NO: 51538 - RNA, 20 nt, synthetic construct
  source 1..20: mol_type = other RNA
tctaagcctacctcccttca

SEQ ID NO: 51539 - RNA, 20 nt, synthetic construct
  source 1..20: mol_type = other RNA
tctaagcctactgctctgtc

SEQ ID NO: 51540 - RNA, 20 nt, synthetic construct
  source 1..20: mol_type = other RNA
tctaagctaagagttttata

SEQ ID NO: 51541 - RNA, 20 nt, synthetic construct
  source 1..20: mol_type = other RNA
tctaaggattatggctagaa

SEQ ID NO: 51542 - RNA, 20 nt, synthetic construct
  source 1..20: mol_type = other RNA
tctaaggttctgctatgctg

SEQ ID NO: 51543 - RNA, 20 nt, synthetic construct
  source 1..20: mol_type = other RNA
tctaagtcagcctgggcaca

SEQ ID NO: 51544 - RNA, 20 nt, synthetic construct
  source 1..20: mol_type = other RNA
tctaagtctcaacctacttt

SEQ ID NO: 51545 - RNA, 20 nt, synthetic construct
  source 1..20: mol_type = other RNA
tctaagtttgccaaagattc

SEQ ID NO: 51546 - RNA, 20 nt, synthetic construct
  source 1..20: mol_type = other RNA
tctaataaaaagcctctctg

SEQ ID NO: 51547 - RNA, 20 nt, synthetic construct
  source 1..20: mol_type = other RNA
tctaataaaagctggagtta

SEQ ID NO: 51548 - RNA, 20 nt, synthetic construct
  source 1..20: mol_type = other RNA
tctaataaaatagcaggatt

SEQ ID NO: 51549 - RNA, 20 nt, synthetic construct
  source 1..20: mol_type = other RNA
tctaataaacgcggaatgaa

SEQ ID NO: 51550 - RNA, 20 nt, synthetic construct
  source 1..20: mol_type = other RNA
tctaataacagcctaagcaa

SEQ ID NO: 51551 - RNA, 20 nt, synthetic construct
  source 1..20: mol_type = other RNA
tctaatagctagtgatgttg

SEQ ID NO: 51552 - RNA, 20 nt, synthetic construct
  source 1..20: mol_type = other RNA
tctaataggaagtggctaga

SEQ ID NO: 51553 - RNA, 20 nt, synthetic construct
  source 1..20: mol_type = other RNA
tctaatagttcacctctccg

SEQ ID NO: 51554 - RNA, 20 nt, synthetic construct
  source 1..20: mol_type = other RNA
tctaatatggttcctagaaa

SEQ ID NO: 51555 - RNA, 20 nt, synthetic construct
  source 1..20: mol_type = other RNA
tctaatcaggttgggcttat

SEQ ID NO: 51556 - RNA, 20 nt, synthetic construct
  source 1..20: mol_type = other RNA
tctaatcctttgcacacacc

SEQ ID NO: 51557 - RNA, 20 nt, synthetic construct
  source 1..20: mol_type = other RNA
tctaatgaactcccagaact

SEQ ID NO: 51558 - RNA, 20 nt, synthetic construct
  source 1..20: mol_type = other RNA
tctaatgcaagagttaaaac

SEQ ID NO: 51559 - RNA, 20 nt, synthetic construct
  source 1..20: mol_type = other RNA
tctaatgcccattaaaacca

SEQ ID NO: 51560 - RNA, 20 nt, synthetic construct
  source 1..20: mol_type = other RNA
tctaatggggaaatagatgc

SEQ ID NO: 51561 - RNA, 20 nt, synthetic construct
  source 1..20: mol_type = other RNA
tctaatgggtacagggtttc

SEQ ID NO: 51562 - RNA, 20 nt, synthetic construct
  source 1..20: mol_type = other RNA
tctaatgtaaacagcatact

SEQ ID NO: 51563 - RNA, 20 nt, synthetic construct
  source 1..20: mol_type = other RNA
tctaatgtgcaaggagagaa

SEQ ID NO: 51564 - RNA, 20 nt, synthetic construct
  source 1..20: mol_type = other RNA
tctaattaacatccagaata

SEQ ID NO: 51565 - RNA, 20 nt, synthetic construct
  source 1..20: mol_type = other RNA
tctaattagaaactggtgaa

SEQ ID NO: 51566 - RNA, 20 nt, synthetic construct
  source 1..20: mol_type = other RNA
tctaattcacatttaagaag

SEQ ID NO: 51567 - RNA, 20 nt, synthetic construct
  source 1..20: mol_type = other RNA
tctaattcgaaaatgggcca

SEQ ID NO: 51568 - RNA, 20 nt, synthetic construct
  source 1..20: mol_type = other RNA
tctaattctgacaactggga

SEQ ID NO: 51569 - RNA, 20 nt, synthetic construct
  source 1..20: mol_type = other RNA
tctaatttccaagaaccctt

SEQ ID NO: 51570 - RNA, 20 nt, synthetic construct
  source 1..20: mol_type = other RNA
tctaatttcccatttgattt

SEQ ID NO: 51571 - RNA, 20 nt, synthetic construct
  source 1..20: mol_type = other RNA
tctaatttctttaaaaccag

SEQ ID NO: 51572 - RNA, 20 nt, synthetic construct
  source 1..20: mol_type = other RNA
tctaatttgtgaaccttgaa

SEQ ID NO: 51573 - RNA, 20 nt, synthetic construct
  source 1..20: mol_type = other RNA
tctaattttttagtcttgtc

SEQ ID NO: 51574 - RNA, 20 nt, synthetic construct
  source 1..20: mol_type = other RNA
tctacaaaacagggttatta

SEQ ID NO: 51575 - RNA, 20 nt, synthetic construct
  source 1..20: mol_type = other RNA
tctacaaaaggaggaactaa

SEQ ID NO: 51576 - RNA, 20 nt, synthetic construct
  source 1..20: mol_type = other RNA
tctacaaaaggtttccagtg

SEQ ID NO: 51577 - RNA, 20 nt, synthetic construct
  source 1..20: mol_type = other RNA
tctacaaaccttcttatttc

SEQ ID NO: 51578 - RNA, 20 nt, synthetic construct
  source 1..20: mol_type = other RNA
tctacaaatcacatatctaa

SEQ ID NO: 51579 - RNA, 20 nt, synthetic construct
  source 1..20: mol_type = other RNA
tctacaagttttaacttaag

SEQ ID NO: 51580 - RNA, 20 nt, synthetic construct
  source 1..20: mol_type = other RNA
tctacaatggttgaactagt

SEQ ID NO: 51581 - RNA, 20 nt, synthetic construct
  source 1..20: mol_type = other RNA
tctacacaaaaatccagata

SEQ ID NO: 51582 - RNA, 20 nt, synthetic construct
  source 1..20: mol_type = other RNA
tctacacaacatgttttatt

SEQ ID NO: 51583 - RNA, 20 nt, synthetic construct
  source 1..20: mol_type = other RNA
tctacagaaaacccttcatc

SEQ ID NO: 51584 - RNA, 20 nt, synthetic construct
  source 1..20: mol_type = other RNA
tctacagaatgttcaagtat

SEQ ID NO: 51585 - RNA, 20 nt, synthetic construct
  source 1..20: mol_type = other RNA
tctacagaggattttggatt

SEQ ID NO: 51586 - RNA, 20 nt, synthetic construct
  source 1..20: mol_type = other RNA
tctacagattcaatgcaata

SEQ ID NO: 51587 - RNA, 20 nt, synthetic construct
  source 1..20: mol_type = other RNA
tctacagggaaccgtaactt

SEQ ID NO: 51588 - RNA, 20 nt, synthetic construct
  source 1..20: mol_type = other RNA
tctacaggtcggaaggaatg

SEQ ID NO: 51589 - RNA, 20 nt, synthetic construct
  source 1..20: mol_type = other RNA
tctacagtattacacagaaa

SEQ ID NO: 51590 - RNA, 20 nt, synthetic construct
  source 1..20: mol_type = other RNA
tctacagttaacaatactgc

SEQ ID NO: 51591 - RNA, 20 nt, synthetic construct
  source 1..20: mol_type = other RNA
tctacatcacagacagggaa

SEQ ID NO: 51592 - RNA, 20 nt, synthetic construct
  source 1..20: mol_type = other RNA
tctacatccccccacccctg

SEQ ID NO: 51593 - RNA, 20 nt, synthetic construct
  source 1..20: mol_type = other RNA
tctacatctggatcctgtct

SEQ ID NO: 51594 - RNA, 20 nt, synthetic construct
  source 1..20: mol_type = other RNA
tctacatgtacgccaatttt

SEQ ID NO: 51595 - RNA, 20 nt, synthetic construct
  source 1..20: mol_type = other RNA
tctaccaaaaaactacgagt

SEQ ID NO: 51596 - RNA, 20 nt, synthetic construct
  source 1..20: mol_type = other RNA
tctaccaaaatataaatacg

SEQ ID NO: 51597 - RNA, 20 nt, synthetic construct
  source 1..20: mol_type = other RNA
tctaccaaacattgaaggca

SEQ ID NO: 51598 - RNA, 20 nt, synthetic construct
  source 1..20: mol_type = other RNA
tctaccatgttgttcttttc

SEQ ID NO: 51599 - RNA, 20 nt, synthetic construct
  source 1..20: mol_type = other RNA
tctacccactattgaaagcc

SEQ ID NO: 51600 - RNA, 20 nt, synthetic construct
  source 1..20: mol_type = other RNA
tctacccagcactctgaatc

SEQ ID NO: 51601 - RNA, 20 nt, synthetic construct
  source 1..20: mol_type = other RNA
tctaccctttccaaattcaa

SEQ ID NO: 51602 - RNA, 20 nt, synthetic construct
  source 1..20: mol_type = other RNA
tctacctggagcctgaggac

SEQ ID NO: 51603 - RNA, 20 nt, synthetic construct
  source 1..20: mol_type = other RNA
tctacctgtctttcccatta

SEQ ID NO: 51604 - RNA, 20 nt, synthetic construct
  source 1..20: mol_type = other RNA
tctaccttgaaaatgccctt

SEQ ID NO: 51605 - RNA, 20 nt, synthetic construct
  source 1..20: mol_type = other RNA
tctacctttggctactgtaa

SEQ ID NO: 51606 - RNA, 20 nt, synthetic construct
  source 1..20: mol_type = other RNA
tctacggacgcaggcaaaca

SEQ ID NO: 51607 - RNA, 20 nt, synthetic construct
  source 1..20: mol_type = other RNA
tctactaaacattaaggaag

SEQ ID NO: 51608 - RNA, 20 nt, synthetic construct
  source 1..20: mol_type = other RNA
tctactagtataagagaagg

SEQ ID NO: 51609 - RNA, 20 nt, synthetic construct
  source 1..20: mol_type = other RNA
tctactcactgtactactga

SEQ ID NO: 51610 - RNA, 20 nt, synthetic construct
  source 1..20: mol_type = other RNA
tctactctgcctcagttgac

SEQ ID NO: 51611 - RNA, 20 nt, synthetic construct
  source 1..20: mol_type = other RNA
tctactcttttgtttttggg

SEQ ID NO: 51612 - RNA, 20 nt, synthetic construct
  source 1..20: mol_type = other RNA
tctactgactccctttttag

SEQ ID NO: 51613 - RNA, 20 nt, synthetic construct
  source 1..20: mol_type = other RNA
tctactggggtcttagttct

SEQ ID NO: 51614 - RNA, 20 nt, synthetic construct
  source 1..20: mol_type = other RNA
tctactgtgaattcactaat

SEQ ID NO: 51615 - RNA, 20 nt, synthetic construct
  source 1..20: mol_type = other RNA
tctacttatcttttctagtt

SEQ ID NO: 51616 - RNA, 20 nt, synthetic construct
  source 1..20: mol_type = other RNA
tctactttcacataaggtat

SEQ ID NO: 51617 - RNA, 20 nt, synthetic construct
  source 1..20: mol_type = other RNA
tctactttctaatcctttgc

SEQ ID NO: 51618 - RNA, 20 nt, synthetic construct
  source 1..20: mol_type = other RNA
tctagaaagataaatccaac

SEQ ID NO: 51619 - RNA, 20 nt, synthetic construct
  source 1..20: mol_type = other RNA
tctagaaaggagggactgaa

SEQ ID NO: 51620 - RNA, 20 nt, synthetic construct
  source 1..20: mol_type = other RNA
tctagaacttatgcatcttg

SEQ ID NO: 51621 - RNA, 20 nt, synthetic construct
  source 1..20: mol_type = other RNA
tctagaatgcatccctcctc

SEQ ID NO: 51622 - RNA, 20 nt, synthetic construct
  source 1..20: mol_type = other RNA
tctagagatttgctgtataa

SEQ ID NO: 51623 - RNA, 20 nt, synthetic construct
  source 1..20: mol_type = other RNA
tctagattcatatgctttga

SEQ ID NO: 51624 - RNA, 20 nt, synthetic construct
  source 1..20: mol_type = other RNA
tctagcaaacaaacacactg

SEQ ID NO: 51625 - RNA, 20 nt, synthetic construct
  source 1..20: mol_type = other RNA
tctagcacagaaccatgtaa

SEQ ID NO: 51626 - RNA, 20 nt, synthetic construct
  source 1..20: mol_type = other RNA
tctagccaaagcaagccttg

SEQ ID NO: 51627 - RNA, 20 nt, synthetic construct
  source 1..20: mol_type = other RNA
tctagccaagggtttgtcaa

SEQ ID NO: 51628 - RNA, 20 nt, synthetic construct
  source 1..20: mol_type = other RNA
tctagccacttcctattaga

SEQ ID NO: 51629 - RNA, 20 nt, synthetic construct
  source 1..20: mol_type = other RNA
tctagccataatccttagat

SEQ ID NO: 51630 - RNA, 20 nt, synthetic construct
  source 1..20: mol_type = other RNA
tctagcccagcttccgggac

SEQ ID NO: 51631 - RNA, 20 nt, synthetic construct
  source 1..20: mol_type = other RNA
tctagcctccagaaaaccag

SEQ ID NO: 51632 - RNA, 20 nt, synthetic construct
  source 1..20: mol_type = other RNA
tctagccttgtactgtgtgg

SEQ ID NO: 51633 - RNA, 20 nt, synthetic construct
  source 1..20: mol_type = other RNA
tctagctccccattccctgt

SEQ ID NO: 51634 - RNA, 20 nt, synthetic construct
  source 1..20: mol_type = other RNA
tctagctcctgggaaaagga

SEQ ID NO: 51635 - RNA, 20 nt, synthetic construct
  source 1..20: mol_type = other RNA
tctagctttcagcactgcta

SEQ ID NO: 51636 - RNA, 20 nt, synthetic construct
  source 1..20: mol_type = other RNA
tctaggaaaagacttgaggt

SEQ ID NO: 51637 - RNA, 20 nt, synthetic construct
  source 1..20: mol_type = other RNA
tctaggaaacactgctcaga

SEQ ID NO: 51638 - RNA, 20 nt, synthetic construct
  source 1..20: mol_type = other RNA
tctaggaaccatattagagt

SEQ ID NO: 51639 - RNA, 20 nt, synthetic construct
  source 1..20: mol_type = other RNA
tctaggaggtctaagagata

SEQ ID NO: 51640 - RNA, 20 nt, synthetic construct
  source 1..20: mol_type = other RNA
tctaggagtacagtgcatac

SEQ ID NO: 51641 - RNA, 20 nt, synthetic construct
  source 1..20: mol_type = other RNA
tctaggcatataaactggaa

SEQ ID NO: 51642 - RNA, 20 nt, synthetic construct
  source 1..20: mol_type = other RNA
tctaggcatataataagcag

SEQ ID NO: 51643 - RNA, 20 nt, synthetic construct
  source 1..20: mol_type = other RNA
tctaggcatctatttcccca

SEQ ID NO: 51644 - RNA, 20 nt, synthetic construct
  source 1..20: mol_type = other RNA
tctaggccctaaccccagag

SEQ ID NO: 51645 - RNA, 20 nt, synthetic construct
  source 1..20: mol_type = other RNA
tctaggcgaaatatctccct

SEQ ID NO: 51646 - RNA, 20 nt, synthetic construct
  source 1..20: mol_type = other RNA
tctaggctaatgtgtgttcc

SEQ ID NO: 51647 - RNA, 20 nt, synthetic construct
  source 1..20: mol_type = other RNA
tctaggcttaaaattcttcc

SEQ ID NO: 51648 - RNA, 20 nt, synthetic construct
  source 1..20: mol_type = other RNA
tctaggtagtttctttgaac

SEQ ID NO: 51649 - RNA, 20 nt, synthetic construct
  source 1..20: mol_type = other RNA
tctaggttatctgttttctt

SEQ ID NO: 51650 - RNA, 20 nt, synthetic construct
  source 1..20: mol_type = other RNA
tctagtaacttggtcgaaaa

SEQ ID NO: 51651 - RNA, 20 nt, synthetic construct
  source 1..20: mol_type = other RNA
tctagtcacatttgctttac

SEQ ID NO: 51652 - RNA, 20 nt, synthetic construct
  source 1..20: mol_type = other RNA
tctagtccatgaagaaaaca

SEQ ID NO: 51653 - RNA, 20 nt, synthetic construct
  source 1..20: mol_type = other RNA
tctagtgaagtcaatttcag

SEQ ID NO: 51654 - RNA, 20 nt, synthetic construct
  source 1..20: mol_type = other RNA
tctagtgaatgagaccaaat

SEQ ID NO: 51655 - RNA, 20 nt, synthetic construct
  source 1..20: mol_type = other RNA
tctagtgatgggagatggac

SEQ ID NO: 51656 - RNA, 20 nt, synthetic construct
  source 1..20: mol_type = other RNA
tctagtggtgcttaattcaa

SEQ ID NO: 51657 - RNA, 20 nt, synthetic construct
  source 1..20: mol_type = other RNA
tctagtgtgcatgtgttgtg

SEQ ID NO: 51658 - RNA, 20 nt, synthetic construct
  source 1..20: mol_type = other RNA
tctagttaataaaggtgcta

SEQ ID NO: 51659 - RNA, 20 nt, synthetic construct
  source 1..20: mol_type = other RNA
tctagttaccactagcaaac

SEQ ID NO: 51660 - RNA, 20 nt, synthetic construct
  source 1..20: mol_type = other RNA
tctagttagtttgttgaccc

SEQ ID NO: 51661 - RNA, 20 nt, synthetic construct
  source 1..20: mol_type = other RNA
tctagttctaataaacgcgg

SEQ ID NO: 51662 - RNA, 20 nt, synthetic construct
  source 1..20: mol_type = other RNA
tctagttctagctctgtctt

SEQ ID NO: 51663 - RNA, 20 nt, synthetic construct
  source 1..20: mol_type = other RNA
tctagttgcacggtgaagaa

SEQ ID NO: 51664 - RNA, 20 nt, synthetic construct
  source 1..20: mol_type = other RNA
tctagtttctttttgttttc

SEQ ID NO: 51665 - RNA, 20 nt, synthetic construct
  source 1..20: mol_type = other RNA
tctagtttgaggtgtacaat

SEQ ID NO: 51666 - RNA, 20 nt, synthetic construct
  source 1..20: mol_type = other RNA
tctagttttccagtatattc

SEQ ID NO: 51667 - RNA, 20 nt, synthetic construct
  source 1..20: mol_type = other RNA
tctataaggtaatgacaata

SEQ ID NO: 51668 - RNA, 20 nt, synthetic construct
  source 1..20: mol_type = other RNA
tctataattctgccttcaat

SEQ ID NO: 51669 - RNA, 20 nt, synthetic construct
  source 1..20: mol_type = other RNA
tctatacttcatctttcctg

SEQ ID NO: 51670 - RNA, 20 nt, synthetic construct
  source 1..20: mol_type = other RNA
tctataggcaatgagtctga

SEQ ID NO: 51671 - RNA, 20 nt, synthetic construct
  source 1..20: mol_type = other RNA
tctataggtagtacatattc

SEQ ID NO: 51672 - RNA, 20 nt, synthetic construct
  source 1..20: mol_type = other RNA
tctatagtcattccgctaaa

SEQ ID NO: 51673 - RNA, 20 nt, synthetic construct
  source 1..20: mol_type = other RNA
tctatagtggctgcaccatt

SEQ ID NO: 51674 - RNA, 20 nt, synthetic construct
  source 1..20: mol_type = other RNA
tctatagtttaattggggga

SEQ ID NO: 51675 - RNA, 20 nt, synthetic construct
  source 1..20: mol_type = other RNA
tctatcaatctcacacctgg

SEQ ID NO: 51676 - RNA, 20 nt, synthetic construct
  source 1..20: mol_type = other RNA
tctatcagggctgaaaaaca

SEQ ID NO: 51677 - RNA, 20 nt, synthetic construct
  source 1..20: mol_type = other RNA
tctatcatcaagacagagct

SEQ ID NO: 51678 - RNA, 20 nt, synthetic construct
  source 1..20: mol_type = other RNA
tctatccaccactccacctt

SEQ ID NO: 51679 - RNA, 20 nt, synthetic construct
  source 1..20: mol_type = other RNA
tctatccagtgacacctgag

SEQ ID NO: 51680 - RNA, 20 nt, synthetic construct
  source 1..20: mol_type = other RNA
tctatctctcagatctgagt

SEQ ID NO: 51681 - RNA, 20 nt, synthetic construct
  source 1..20: mol_type = other RNA
tctatctgaacattttagct

SEQ ID NO: 51682 - RNA, 20 nt, synthetic construct
  source 1..20: mol_type = other RNA
tctatctgaactttcgaagt

SEQ ID NO: 51683 - RNA, 20 nt, synthetic construct
  source 1..20: mol_type = other RNA
tctatctttgggaaaatctc

SEQ ID NO: 51684 - RNA, 20 nt, synthetic construct
  source 1..20: mol_type = other RNA
tctatgaagtaattgtttga

SEQ ID NO: 51685 - RNA, 20 nt, synthetic construct
  source 1..20: mol_type = other RNA
tctatgaatttgcctattct

SEQ ID NO: 51686 - RNA, 20 nt, synthetic construct
  source 1..20: mol_type = other RNA
tctatgcagaaatctaccaa

SEQ ID NO: 51687 - RNA, 20 nt, synthetic construct
  source 1..20: mol_type = other RNA
tctatgcatactgcagcact

SEQ ID NO: 51688 - RNA, 20 nt, synthetic construct
  source 1..20: mol_type = other RNA
tctatgctcttggtttcttc

SEQ ID NO: 51689 - RNA, 20 nt, synthetic construct
  source 1..20: mol_type = other RNA
tctatggcaggcaccttcag

SEQ ID NO: 51690 - RNA, 20 nt, synthetic construct
  source 1..20: mol_type = other RNA
tctatggcatttgagggtta

SEQ ID NO: 51691 - RNA, 20 nt, synthetic construct
  source 1..20: mol_type = other RNA
tctatgtcccctggggcctc

SEQ ID NO: 51692 - RNA, 20 nt, synthetic construct
  source 1..20: mol_type = other RNA
tctatgtgacaaacactttt

SEQ ID NO: 51693 - RNA, 20 nt, synthetic construct
  source 1..20: mol_type = other RNA
tctatgtgacagaatgcatc

SEQ ID NO: 51694 - RNA, 20 nt, synthetic construct
  source 1..20: mol_type = other RNA
tctattaacagaagggtata

SEQ ID NO: 51695 - RNA, 20 nt, synthetic construct
  source 1..20: mol_type = other RNA
tctattcattaccaggctgg

SEQ ID NO: 51696 - RNA, 20 nt, synthetic construct
  source 1..20: mol_type = other RNA
tctattccaaatgtctgtct

SEQ ID NO: 51697 - RNA, 20 nt, synthetic construct
  source 1..20: mol_type = other RNA
tctattccagagaattcaga

SEQ ID NO: 51698 - RNA, 20 nt, synthetic construct
  source 1..20: mol_type = other RNA
tctattccattgttctcttt

SEQ ID NO: 51699 - RNA, 20 nt, synthetic construct
  source 1..20: mol_type = other RNA
tctattcccctggatccccc

SEQ ID NO: 51700 - RNA, 20 nt, synthetic construct
  source 1..20: mol_type = other RNA
tctattccctacattgcctt

SEQ ID NO: 51701 - RNA, 20 nt, synthetic construct
  source 1..20: mol_type = other RNA
tctatttccccattagagta

SEQ ID NO: 51702 - RNA, 20 nt, synthetic construct
  source 1..20: mol_type = other RNA
tctatttctgaacaaatatc

SEQ ID NO: 51703 - RNA, 20 nt, synthetic construct
  source 1..20: mol_type = other RNA
tctatttctttccattcaat

SEQ ID NO: 51704 - RNA, 20 nt, synthetic construct
  source 1..20: mol_type = other RNA
tctattttcctaaaactccc

SEQ ID NO: 51705 - RNA, 20 nt, synthetic construct
  source 1..20: mol_type = other RNA
tctatttttctgcaattgga

SEQ ID NO: 51706 - RNA, 20 nt, synthetic construct
  source 1..20: mol_type = other RNA
tctatttttgtctggtggac

SEQ ID NO: 51707 - RNA, 20 nt, synthetic construct
  source 1..20: mol_type = other RNA
tctcaaaaatttaagcacag

SEQ ID NO: 51708 - RNA, 20 nt, synthetic construct
  source 1..20: mol_type = other RNA
tctcaaaacaaacaaacaga

SEQ ID NO: 51709 - RNA, 20 nt, synthetic construct
  source 1..20: mol_type = other RNA
tctcaaacagcctaattgta

SEQ ID NO: 51710 - RNA, 20 nt, synthetic construct
  source 1..20: mol_type = other RNA
tctcaaacaggatacaaaaa

SEQ ID NO: 51711 - RNA, 20 nt, synthetic construct
  source 1..20: mol_type = other RNA
tctcaaactccaagtctcat

SEQ ID NO: 51712 - RNA, 20 nt, synthetic construct
  source 1..20: mol_type = other RNA
tctcaaactgtgtgcttgga

SEQ ID NO: 51713 - RNA, 20 nt, synthetic construct
  source 1..20: mol_type = other RNA
tctcaaagcccaccagcata

SEQ ID NO: 51714 - RNA, 20 nt, synthetic construct
  source 1..20: mol_type = other RNA
tctcaaataatttggcaaaa

SEQ ID NO: 51715 - RNA, 20 nt, synthetic construct
  source 1..20: mol_type = other RNA
tctcaaatgaacaggttctt

SEQ ID NO: 51716 - RNA, 20 nt, synthetic construct
  source 1..20: mol_type = other RNA
tctcaacactgtgttctttt

SEQ ID NO: 51717 - RNA, 20 nt, synthetic construct
  source 1..20: mol_type = other RNA
tctcaacacttcagtggtaa

SEQ ID NO: 51718 - RNA, 20 nt, synthetic construct
  source 1..20: mol_type = other RNA
tctcaacctactttaaatca

SEQ ID NO: 51719 - RNA, 20 nt, synthetic construct
  source 1..20: mol_type = other RNA
tctcaacctttgcctcctgg

SEQ ID NO: 51720 - RNA, 20 nt, synthetic construct
  source 1..20: mol_type = other RNA
tctcaactggcccctccatg

SEQ ID NO: 51721 - RNA, 20 nt, synthetic construct
  source 1..20: mol_type = other RNA
tctcaacttagccttggtaa

SEQ ID NO: 51722 - RNA, 20 nt, synthetic construct
  source 1..20: mol_type = other RNA
tctcaacttcctgttttagt

SEQ ID NO: 51723 - RNA, 20 nt, synthetic construct
  source 1..20: mol_type = other RNA
tctcaagaaaacaagaataa

SEQ ID NO: 51724 - RNA, 20 nt, synthetic construct
  source 1..20: mol_type = other RNA
tctcaagaaggtatcatcgg

SEQ ID NO: 51725 - RNA, 20 nt, synthetic construct
  source 1..20: mol_type = other RNA
tctcaagattgtgtgatttc

SEQ ID NO: 51726 - RNA, 20 nt, synthetic construct
  source 1..20: mol_type = other RNA
tctcaagcaatctgaaacga

SEQ ID NO: 51727 - RNA, 20 nt, synthetic construct
  source 1..20: mol_type = other RNA
tctcaagtaattgttttccc

SEQ ID NO: 51728 - RNA, 20 nt, synthetic construct
  source 1..20: mol_type = other RNA
tctcaataaggaaagcacgt

SEQ ID NO: 51729 - RNA, 20 nt, synthetic construct
  source 1..20: mol_type = other RNA
tctcaatagtgtcctttgat

SEQ ID NO: 51730 - RNA, 20 nt, synthetic construct
  source 1..20: mol_type = other RNA
tctcaatcagggccttccca

SEQ ID NO: 51731 - RNA, 20 nt, synthetic construct
  source 1..20: mol_type = other RNA
tctcaatcccttccccacct

SEQ ID NO: 51732 - RNA, 20 nt, synthetic construct
  source 1..20: mol_type = other RNA
tctcaatctcctgatccacc

SEQ ID NO: 51733 - RNA, 20 nt, synthetic construct
  source 1..20: mol_type = other RNA
tctcaattaatgcccaatca

SEQ ID NO: 51734 - RNA, 20 nt, synthetic construct
  source 1..20: mol_type = other RNA
tctcaatttttgtattgact

SEQ ID NO: 51735 - RNA, 20 nt, synthetic construct
  source 1..20: mol_type = other RNA
tctcacacctgggtatacag

SEQ ID NO: 51736 - RNA, 20 nt, synthetic construct
  source 1..20: mol_type = other RNA
tctcacactgttgtccaggc

SEQ ID NO: 51737 - RNA, 20 nt, synthetic construct
  source 1..20: mol_type = other RNA
tctcaccaacatccacagct

SEQ ID NO: 51738 - RNA, 20 nt, synthetic construct
  source 1..20: mol_type = other RNA
tctcaccctcaggactctgc

SEQ ID NO: 51739 - RNA, 20 nt, synthetic construct
  source 1..20: mol_type = other RNA
tctcacctcaaggccaactg

SEQ ID NO: 51740 - RNA, 20 nt, synthetic construct
  source 1..20: mol_type = other RNA
tctcacgatactttttattt

SEQ ID NO: 51741 - RNA, 20 nt, synthetic construct
  source 1..20: mol_type = other RNA
tctcacgtcaccgcaacctc

SEQ ID NO: 51742 - RNA, 20 nt, synthetic construct
  source 1..20: mol_type = other RNA
tctcactcacctagctgttt

SEQ ID NO: 51743 - RNA, 20 nt, synthetic construct
  source 1..20: mol_type = other RNA
tctcactccaaagcaaacgt

SEQ ID NO: 51744 - RNA, 20 nt, synthetic construct
  source 1..20: mol_type = other RNA
tctcactcttaccaaggctg

SEQ ID NO: 51745 - RNA, 20 nt, synthetic construct
  source 1..20: mol_type = other RNA
tctcagaaattataagcttc

SEQ ID NO: 51746 - RNA, 20 nt, synthetic construct
  source 1..20: mol_type = other RNA
tctcagagggaaactgtttt

SEQ ID NO: 51747 - RNA, 20 nt, synthetic construct
  source 1..20: mol_type = other RNA
tctcagagtatatatgctcc

SEQ ID NO: 51748 - RNA, 20 nt, synthetic construct
  source 1..20: mol_type = other RNA
tctcagatctgagtttgctc

SEQ ID NO: 51749 - RNA, 20 nt, synthetic construct
  source 1..20: mol_type = other RNA
tctcagatctgttgcagtcc

SEQ ID NO: 51750 - RNA, 20 nt, synthetic construct
  source 1..20: mol_type = other RNA
tctcagatgtctccattttg

SEQ ID NO: 51751 - RNA, 20 nt, synthetic construct
  source 1..20: mol_type = other RNA
tctcagcacagagccgaaat

SEQ ID NO: 51752 - RNA, 20 nt, synthetic construct
  source 1..20: mol_type = other RNA
tctcagccttttctgatttg

SEQ ID NO: 51753 - RNA, 20 nt, synthetic construct
  source 1..20: mol_type = other RNA
tctcagctatagcttctgag

SEQ ID NO: 51754 - RNA, 20 nt, synthetic construct
  source 1..20: mol_type = other RNA
tctcagctcattacagtctc

SEQ ID NO: 51755 - RNA, 20 nt, synthetic construct
  source 1..20: mol_type = other RNA
tctcagctcctcagaaggcc

SEQ ID NO: 51756 - RNA, 20 nt, synthetic construct
  source 1..20: mol_type = other RNA
tctcaggagcctagtcatcc

SEQ ID NO: 51757 - RNA, 20 nt, synthetic construct
  source 1..20: mol_type = other RNA
tctcagggcctgcttttgga

SEQ ID NO: 51758 - RNA, 20 nt, synthetic construct
  source 1..20: mol_type = other RNA
tctcaggggtaaaggggatg

SEQ ID NO: 51759 - RNA, 20 nt, synthetic construct
  source 1..20: mol_type = other RNA
tctcagtatcctttcaaggt

SEQ ID NO: 51760 - RNA, 20 nt, synthetic construct
  source 1..20: mol_type = other RNA
tctcagtcataatttgtgtc

SEQ ID NO: 51761 - RNA, 20 nt, synthetic construct
  source 1..20: mol_type = other RNA
tctcagtcccaaatgggagc

SEQ ID NO: 51762 - RNA, 20 nt, synthetic construct
  source 1..20: mol_type = other RNA
tctcagtggccctgttggcc

SEQ ID NO: 51763 - RNA, 20 nt, synthetic construct
  source 1..20: mol_type = other RNA
tctcagtggtgcttttgctg

SEQ ID NO: 51764 - RNA, 20 nt, synthetic construct
  source 1..20: mol_type = other RNA
tctcagttgcagcatgctca

SEQ ID NO: 51765 - RNA, 20 nt, synthetic construct
  source 1..20: mol_type = other RNA
tctcataaagccggattcct

SEQ ID NO: 51766 - RNA, 20 nt, synthetic construct
  source 1..20: mol_type = other RNA
tctcatactttgtcaggcat

SEQ ID NO: 51767 - RNA, 20 nt, synthetic construct
  source 1..20: mol_type = other RNA
tctcatagtcttccaaaata

SEQ ID NO: 51768 - RNA, 20 nt, synthetic construct
  source 1..20: mol_type = other RNA
tctcatattattttttcccg

SEQ ID NO: 51769 - RNA, 20 nt, synthetic construct
  source 1..20: mol_type = other RNA
tctcatccacaatgagacat

SEQ ID NO: 51770 - RNA, 20 nt, synthetic construct
  source 1..20: mol_type = other RNA
tctcatctaaattaagcttc

SEQ ID NO: 51771 - RNA, 20 nt, synthetic construct
  source 1..20: mol_type = other RNA
tctcatctgtcaaaaagaga

SEQ ID NO: 51772 - RNA, 20 nt, synthetic construct
  source 1..20: mol_type = other RNA
tctcatctgtcactttccta

SEQ ID NO: 51773 - RNA, 20 nt, synthetic construct
  source 1..20: mol_type = other RNA
tctcatgagtcctgaaaatt

SEQ ID NO: 51774 - RNA, 20 nt, synthetic construct
  source 1..20: mol_type = other RNA
tctcatgcaattccccagcc

SEQ ID NO: 51775 - RNA, 20 nt, synthetic construct
  source 1..20: mol_type = other RNA
tctcatgcttaggatcccag

SEQ ID NO: 51776 - RNA, 20 nt, synthetic construct
  source 1..20: mol_type = other RNA
tctcatggaagttatttaat

SEQ ID NO: 51777 - RNA, 20 nt, synthetic construct
  source 1..20: mol_type = other RNA
tctcatgtatgttttagcct

SEQ ID NO: 51778 - RNA, 20 nt, synthetic construct
  source 1..20: mol_type = other RNA
tctcatgtcagagacacata

SEQ ID NO: 51779 - RNA, 20 nt, synthetic construct
  source 1..20: mol_type = other RNA
tctcatgttgggtaaaaata

SEQ ID NO: 51780 - RNA, 20 nt, synthetic construct
  source 1..20: mol_type = other RNA
tctcattaaaaatcaaccca

SEQ ID NO: 51781 - RNA, 20 nt, synthetic construct
  source 1..20: mol_type = other RNA
tctcattagttatctcttag

SEQ ID NO: 51782 - RNA, 20 nt, synthetic construct
  source 1..20: mol_type = other RNA
tctcattataacataaaagc

SEQ ID NO: 51783 - RNA, 20 nt, synthetic construct
  source 1..20: mol_type = other RNA
tctcattcactagacacatt

SEQ ID NO: 51784 - RNA, 20 nt, synthetic construct
  source 1..20: mol_type = other RNA
tctcattcttctctaatgta

SEQ ID NO: 51785 - RNA, 20 nt, synthetic construct
  source 1..20: mol_type = other RNA
tctcattgtggatgagatta

SEQ ID NO: 51786 - RNA, 20 nt, synthetic construct
  source 1..20: mol_type = other RNA
tctcattttgaaaaacagat

SEQ ID NO: 51787 - RNA, 20 nt, synthetic construct
  source 1..20: mol_type = other RNA
tctcatttttcaggggggcc

SEQ ID NO: 51788 - RNA, 20 nt, synthetic construct
  source 1..20: mol_type = other RNA
tctccaacagaagaagtttc

SEQ ID NO: 51789 - RNA, 20 nt, synthetic construct
  source 1..20: mol_type = other RNA
tctccaacgctttttatgga

SEQ ID NO: 51790 - RNA, 20 nt, synthetic construct
  source 1..20: mol_type = other RNA
tctccaaggaaagtgtgctt

SEQ ID NO: 51791 - RNA, 20 nt, synthetic construct
  source 1..20: mol_type = other RNA
tctccaaggtacaattacac

SEQ ID NO: 51792 - RNA, 20 nt, synthetic construct
  source 1..20: mol_type = other RNA
tctccaagttattacaaaaa

SEQ ID NO: 51793 - RNA, 20 nt, synthetic construct
  source 1..20: mol_type = other RNA
tctccaatcctcagccccct

SEQ ID NO: 51794 - RNA, 20 nt, synthetic construct
  source 1..20: mol_type = other RNA
tctccacatccttgccaaca

SEQ ID NO: 51795 - RNA, 20 nt, synthetic construct
  source 1..20: mol_type = other RNA
tctccacatttctacacaac

SEQ ID NO: 51796 - RNA, 20 nt, synthetic construct
  source 1..20: mol_type = other RNA
tctccactttcatgatttgg

SEQ ID NO: 51797 - RNA, 20 nt, synthetic construct
  source 1..20: mol_type = other RNA
tctccagggaggaatccttc

SEQ ID NO: 51798 - RNA, 20 nt, synthetic construct
  source 1..20: mol_type = other RNA
tctccagtcccactgacagt

SEQ ID NO: 51799 - RNA, 20 nt, synthetic construct
  source 1..20: mol_type = other RNA
tctccagtgaagtcatctgg

SEQ ID NO: 51800 - RNA, 20 nt, synthetic construct
  source 1..20: mol_type = other RNA
tctccataagtccctaacag

SEQ ID NO: 51801 - RNA, 20 nt, synthetic construct
  source 1..20: mol_type = other RNA
tctccatacaaggagaccta

SEQ ID NO: 51802 - RNA, 20 nt, synthetic construct
  source 1..20: mol_type = other RNA
tctccataccccctggaaat

SEQ ID NO: 51803 - RNA, 20 nt, synthetic construct
  source 1..20: mol_type = other RNA
tctccatgtcctcacctcac

SEQ ID NO: 51804 - RNA, 20 nt, synthetic construct
  source 1..20: mol_type = other RNA
tctccattttgccagctaac

SEQ ID NO: 51805 - RNA, 20 nt, synthetic construct
  source 1..20: mol_type = other RNA
tctccattttggtcttaccc

SEQ ID NO: 51806 - RNA, 20 nt, synthetic construct
  source 1..20: mol_type = other RNA
tctcccaaggttgcctgttc

SEQ ID NO: 51807 - RNA, 20 nt, synthetic construct
  source 1..20: mol_type = other RNA
tctcccaccatctctctgcc

SEQ ID NO: 51808 - RNA, 20 nt, synthetic construct
  source 1..20: mol_type = other RNA
tctcccagcatgaagccctc

SEQ ID NO: 51809 - RNA, 20 nt, synthetic construct
  source 1..20: mol_type = other RNA
tctcccagctgtccaacaag

SEQ ID NO: 51810 - RNA, 20 nt, synthetic construct
  source 1..20: mol_type = other RNA
tctcccaggtcagtagtaca

SEQ ID NO: 51811 - RNA, 20 nt, synthetic construct
  source 1..20: mol_type = other RNA
tctcccagttgtcagaatta

SEQ ID NO: 51812 - RNA, 20 nt, synthetic construct
  source 1..20: mol_type = other RNA
tctcccataccacctgtcag

SEQ ID NO: 51813 - RNA, 20 nt, synthetic construct
  source 1..20: mol_type = other RNA
tctcccatcactagaatgtg

SEQ ID NO: 51814 - RNA, 20 nt, synthetic construct
  source 1..20: mol_type = other RNA
tctccccaaagatattagct

SEQ ID NO: 51815 - RNA, 20 nt, synthetic construct
  source 1..20: mol_type = other RNA
tctccccaagtaaacctcaa

SEQ ID NO: 51816 - RNA, 20 nt, synthetic construct
  source 1..20: mol_type = other RNA
tctcccccaggtggttctgc

SEQ ID NO: 51817 - RNA, 20 nt, synthetic construct
  source 1..20: mol_type = other RNA
tctcccccgaatcctttgct

SEQ ID NO: 51818 - RNA, 20 nt, synthetic construct
  source 1..20: mol_type = other RNA
tctccccttgacgaagtcac

SEQ ID NO: 51819 - RNA, 20 nt, synthetic construct
  source 1..20: mol_type = other RNA
tctcccgccggagtccgcgg

SEQ ID NO: 51820 - RNA, 20 nt, synthetic construct
  source 1..20: mol_type = other RNA
tctccctaaccaggcccggg

SEQ ID NO: 51821 - RNA, 20 nt, synthetic construct
  source 1..20: mol_type = other RNA
tctccctcacagtccactca

SEQ ID NO: 51822 - RNA, 20 nt, synthetic construct
  source 1..20: mol_type = other RNA
tctccctcggccacagcagg

SEQ ID NO: 51823 - RNA, 20 nt, synthetic construct
  source 1..20: mol_type = other RNA
tctccctcttcgctctttta

SEQ ID NO: 51824 - RNA, 20 nt, synthetic construct
  source 1..20: mol_type = other RNA
tctccctgaaattgtcagaa

SEQ ID NO: 51825 - RNA, 20 nt, synthetic construct
  source 1..20: mol_type = other RNA
tctccctgccctgtgaaaat

SEQ ID NO: 51826 - RNA, 20 nt, synthetic construct
  source 1..20: mol_type = other RNA
tctccctgtctttctgtctg

SEQ ID NO: 51827 - RNA, 20 nt, synthetic construct
  source 1..20: mol_type = other RNA
tctccctgtgcgtgaatctg

SEQ ID NO: 51828 - RNA, 20 nt, synthetic construct
  source 1..20: mol_type = other RNA
tctcccttcctgttctttgt

SEQ ID NO: 51829 - RNA, 20 nt, synthetic construct
  source 1..20: mol_type = other RNA
tctcccttctattccattgt

SEQ ID NO: 51830 - RNA, 20 nt, synthetic construct
  source 1..20: mol_type = other RNA
tctccgggtaaaaagcctgc

SEQ ID NO: 51831 - RNA, 20 nt, synthetic construct
  source 1..20: mol_type = other RNA
tctcctaagtcttcttctaa

SEQ ID NO: 51832 - RNA, 20 nt, synthetic construct
  source 1..20: mol_type = other RNA
tctcctatattgtcaatggg

SEQ ID NO: 51833 - RNA, 20 nt, synthetic construct
  source 1..20: mol_type = other RNA
tctcctccaacccattccag

SEQ ID NO: 51834 - RNA, 20 nt, synthetic construct
  source 1..20: mol_type = other RNA
tctcctctttcatatctgat

SEQ ID NO: 51835 - RNA, 20 nt, synthetic construct
  source 1..20: mol_type = other RNA
tctcctgcatggggagtttt

SEQ ID NO: 51836 - RNA, 20 nt, synthetic construct
  source 1..20: mol_type = other RNA
tctcctgtgccaagtccgtg

SEQ ID NO: 51837 - RNA, 20 nt, synthetic construct
  source 1..20: mol_type = other RNA
tctcctgtgtgcatgctccc

SEQ ID NO: 51838 - RNA, 20 nt, synthetic construct
  source 1..20: mol_type = other RNA
tctccttaatccagtctatc

SEQ ID NO: 51839 - RNA, 20 nt, synthetic construct
  source 1..20: mol_type = other RNA
tctccttctgcaggctgaac

SEQ ID NO: 51840 - RNA, 20 nt, synthetic construct
  source 1..20: mol_type = other RNA
tctccttctggaagatttct

SEQ ID NO: 51841 - RNA, 20 nt, synthetic construct
  source 1..20: mol_type = other RNA
tctccttgcacattagaatc

SEQ ID NO: 51842 - RNA, 20 nt, synthetic construct
  source 1..20: mol_type = other RNA
tctccttgtatggagactag

SEQ ID NO: 51843 - RNA, 20 nt, synthetic construct
  source 1..20: mol_type = other RNA
tctcctttccttccttgctc

SEQ ID NO: 51844 - RNA, 20 nt, synthetic construct
  source 1..20: mol_type = other RNA
tctcctttctatacttcatc

SEQ ID NO: 51845 - RNA, 20 nt, synthetic construct
  source 1..20: mol_type = other RNA
tctcctttgaggtaagaact

SEQ ID NO: 51846 - RNA, 20 nt, synthetic construct
  source 1..20: mol_type = other RNA
tctccttttaagagtgaaga

SEQ ID NO: 51847 - RNA, 20 nt, synthetic construct
  source 1..20: mol_type = other RNA
tctcgaaaaggaatggaatt

SEQ ID NO: 51848 - RNA, 20 nt, synthetic construct
  source 1..20: mol_type = other RNA
tctcgaactctcgacctcgt

SEQ ID NO: 51849 - RNA, 20 nt, synthetic construct
  source 1..20: mol_type = other RNA
tctcgaagtggtgcttgaac

SEQ ID NO: 51850 - RNA, 20 nt, synthetic construct
  source 1..20: mol_type = other RNA
tctcgacacacaatccaagt

SEQ ID NO: 51851 - RNA, 20 nt, synthetic construct
  source 1..20: mol_type = other RNA
tctcgaccccctgggctcaa

SEQ ID NO: 51852 - RNA, 20 nt, synthetic construct
  source 1..20: mol_type = other RNA
tctcgagctcctgacctcag

SEQ ID NO: 51853 - RNA, 20 nt, synthetic construct
  source 1..20: mol_type = other RNA
tctcgatggacatttaggtt

SEQ ID NO: 51854 - RNA, 20 nt, synthetic construct
  source 1..20: mol_type = other RNA
tctcgcagcggggatgctca

SEQ ID NO: 51855 - RNA, 20 nt, synthetic construct
  source 1..20: mol_type = other RNA
tctcgctctgtcgcccaggc

SEQ ID NO: 51856 - RNA, 20 nt, synthetic construct
  source 1..20: mol_type = other RNA
tctcggatttaagagaggaa

SEQ ID NO: 51857 - RNA, 20 nt, synthetic construct
  source 1..20: mol_type = other RNA
tctcggcttactgcaacctc

SEQ ID NO: 51858 - RNA, 20 nt, synthetic construct
  source 1..20: mol_type = other RNA
tctcggtcattctggagtgt

SEQ ID NO: 51859 - RNA, 20 nt, synthetic construct
  source 1..20: mol_type = other RNA
tctcgtgaatttggtattct

SEQ ID NO: 51860 - RNA, 20 nt, synthetic construct
  source 1..20: mol_type = other RNA
tctcgtgcatgtctgcagga

SEQ ID NO: 51861 - RNA, 20 nt, synthetic construct
  source 1..20: mol_type = other RNA
tctcgtgtgagctctagcct

SEQ ID NO: 51862 - RNA, 20 nt, synthetic construct
  source 1..20: mol_type = other RNA
tctcgttcatgttcaaggtg

SEQ ID NO: 51863 - RNA, 20 nt, synthetic construct
  source 1..20: mol_type = other RNA
tctctaaaaacatccattac

SEQ ID NO: 51864 - RNA, 20 nt, synthetic construct
  source 1..20: mol_type = other RNA
tctctaatagctagtgatgt

SEQ ID NO: 51865 - RNA, 20 nt, synthetic construct
  source 1..20: mol_type = other RNA
tctctaatgtaaacagcata

SEQ ID NO: 51866 - RNA, 20 nt, synthetic construct
  source 1..20: mol_type = other RNA
tctctacagggaaccgtaac

SEQ ID NO: 51867 - RNA, 20 nt, synthetic construct
  source 1..20: mol_type = other RNA
tctctacagttaacaatact

SEQ ID NO: 51868 - RNA, 20 nt, synthetic construct
  source 1..20: mol_type = other RNA
tctctacatctggatcctgt

SEQ ID NO: 51869 - RNA, 20 nt, synthetic construct
  source 1..20: mol_type = other RNA
tctctacccagcactctgaa

SEQ ID NO: 51870 - RNA, 20 nt, synthetic construct
  source 1..20: mol_type = other RNA
tctctactctgcctcagttg

SEQ ID NO: 51871 - RNA, 20 nt, synthetic construct
  source 1..20: mol_type = other RNA
tctctagaacttatgcatct

SEQ ID NO: 51872 - RNA, 20 nt, synthetic construct
  source 1..20: mol_type = other RNA
tctctaggcttaaaattctt

SEQ ID NO: 51873 - RNA, 20 nt, synthetic construct
  source 1..20: mol_type = other RNA
tctctagttgcacggtgaag

SEQ ID NO: 51874 - RNA, 20 nt, synthetic construct
  source 1..20: mol_type = other RNA
tctctagttttccagtatat

SEQ ID NO: 51875 - RNA, 20 nt, synthetic construct
  source 1..20: mol_type = other RNA
tctctatccaccactccacc

SEQ ID NO: 51876 - RNA, 20 nt, synthetic construct
  source 1..20: mol_type = other RNA
tctctatgcagaaatctacc

SEQ ID NO: 51877 - RNA, 20 nt, synthetic construct
  source 1..20: mol_type = other RNA
tctctattccaaatgtctgt

SEQ ID NO: 51878 - RNA, 20 nt, synthetic construct
  source 1..20: mol_type = other RNA
tctctcaactggcccctcca

SEQ ID NO: 51879 - RNA, 20 nt, synthetic construct
  source 1..20: mol_type = other RNA
tctctcaagcaatctgaaac

SEQ ID NO: 51880 - RNA, 20 nt, synthetic construct
  source 1..20: mol_type = other RNA
tctctcagagggaaactgtt

SEQ ID NO: 51881 - RNA, 20 nt, synthetic construct
  source 1..20: mol_type = other RNA
tctctcagatctgagtttgc

SEQ ID NO: 51882 - RNA, 20 nt, synthetic construct
  source 1..20: mol_type = other RNA
tctctcatgttgggtaaaaa

SEQ ID NO: 51883 - RNA, 20 nt, synthetic construct
  source 1..20: mol_type = other RNA
tctctccaacagaagaagtt

SEQ ID NO: 51884 - RNA, 20 nt, synthetic construct
  source 1..20: mol_type = other RNA
tctctccaaggtacaattac

SEQ ID NO: 51885 - RNA, 20 nt, synthetic construct
  source 1..20: mol_type = other RNA
tctctccctgccctgtgaaa

SEQ ID NO: 51886 - RNA, 20 nt, synthetic construct
  source 1..20: mol_type = other RNA
tctctccctgtctttctgtc

SEQ ID NO: 51887 - RNA, 20 nt, synthetic construct
  source 1..20: mol_type = other RNA
tctctcccttcctgttcttt

SEQ ID NO: 51888 - RNA, 20 nt, synthetic construct
  source 1..20: mol_type = other RNA
tctctccttgcacattagaa

SEQ ID NO: 51889 - RNA, 20 nt, synthetic construct
  source 1..20: mol_type = other RNA
tctctcctttgaggtaagaa

SEQ ID NO: 51890 - RNA, 20 nt, synthetic construct
  source 1..20: mol_type = other RNA
tctctcgatggacatttagg

SEQ ID NO: 51891 - RNA, 20 nt, synthetic construct
  source 1..20: mol_type = other RNA
tctctctaaaaacatccatt

SEQ ID NO: 51892 - RNA, 20 nt, synthetic construct
  source 1..20: mol_type = other RNA
tctctctatccaccactcca

SEQ ID NO: 51893 - RNA, 20 nt, synthetic construct
  source 1..20: mol_type = other RNA
tctctctcaactggcccctc

SEQ ID NO: 51894 - RNA, 20 nt, synthetic construct
  source 1..20: mol_type = other RNA
tctctctcaagcaatctgaa

SEQ ID NO: 51895 - RNA, 20 nt, synthetic construct
  source 1..20: mol_type = other RNA
tctctctccctgccctgtga

SEQ ID NO: 51896 - RNA, 20 nt, synthetic construct
  source 1..20: mol_type = other RNA
tctctctccctgtctttctg

SEQ ID NO: 51897 - RNA, 20 nt, synthetic construct
  source 1..20: mol_type = other RNA
tctctctctccctgtctttc

SEQ ID NO: 51898 - RNA, 20 nt, synthetic construct
  source 1..20: mol_type = other RNA
tctctctctgcttcactaac

SEQ ID NO: 51899 - RNA, 20 nt, synthetic construct
  source 1..20: mol_type = other RNA
tctctctgaaattagctaag

SEQ ID NO: 51900 - RNA, 20 nt, synthetic construct
  source 1..20: mol_type = other RNA
tctctctgcctcaaaatcaa

SEQ ID NO: 51901 - RNA, 20 nt, synthetic construct
  source 1..20: mol_type = other RNA
tctctctgcctcggcacagc

SEQ ID NO: 51902 - RNA, 20 nt, synthetic construct
  source 1..20: mol_type = other RNA
tctctctgcttcactaactt

SEQ ID NO: 51903 - RNA, 20 nt, synthetic construct
  source 1..20: mol_type = other RNA
tctctcttccaaataatccc

SEQ ID NO: 51904 - RNA, 20 nt, synthetic construct
  source 1..20: mol_type = other RNA
tctctcttgaccttagtttt

SEQ ID NO: 51905 - RNA, 20 nt, synthetic construct
  source 1..20: mol_type = other RNA
tctctctttctggggatgct

SEQ ID NO: 51906 - RNA, 20 nt, synthetic construct
  source 1..20: mol_type = other RNA
tctctgaaattagctaagta

SEQ ID NO: 51907 - RNA, 20 nt, synthetic construct
  source 1..20: mol_type = other RNA
tctctgacatgagagctaag

SEQ ID NO: 51908 - RNA, 20 nt, synthetic construct
  source 1..20: mol_type = other RNA
tctctgacattggttattca

SEQ ID NO: 51909 - RNA, 20 nt, synthetic construct
  source 1..20: mol_type = other RNA
tctctgacttcattcttgac

SEQ ID NO: 51910 - RNA, 20 nt, synthetic construct
  source 1..20: mol_type = other RNA
tctctgatggaacggcttaa

SEQ ID NO: 51911 - RNA, 20 nt, synthetic construct
  source 1..20: mol_type = other RNA
tctctgcaaaaaatgtttgt

SEQ ID NO: 51912 - RNA, 20 nt, synthetic construct
  source 1..20: mol_type = other RNA
tctctgcaacatttgttgca

SEQ ID NO: 51913 - RNA, 20 nt, synthetic construct
  source 1..20: mol_type = other RNA
tctctgcagagcaggctcca

SEQ ID NO: 51914 - RNA, 20 nt, synthetic construct
  source 1..20: mol_type = other RNA
tctctgccccgggcctggtt

SEQ ID NO: 51915 - RNA, 20 nt, synthetic construct
  source 1..20: mol_type = other RNA
tctctgccctcattgaagct

SEQ ID NO: 51916 - RNA, 20 nt, synthetic construct
  source 1..20: mol_type = other RNA
tctctgcctcaaaatcaaca

SEQ ID NO: 51917 - RNA, 20 nt, synthetic construct
  source 1..20: mol_type = other RNA
tctctgcctcggcacagctc

SEQ ID NO: 51918 - RNA, 20 nt, synthetic construct
  source 1..20: mol_type = other RNA
tctctgctctcaagtaattg

SEQ ID NO: 51919 - RNA, 20 nt, synthetic construct
  source 1..20: mol_type = other RNA
tctctgctgctgaaaaagat

SEQ ID NO: 51920 - RNA, 20 nt, synthetic construct
  source 1..20: mol_type = other RNA
tctctgcttcactaacttta

SEQ ID NO: 51921 - RNA, 20 nt, synthetic construct
  source 1..20: mol_type = other RNA
tctctgctttttcttggtgg

SEQ ID NO: 51922 - RNA, 20 nt, synthetic construct
  source 1..20: mol_type = other RNA
tctctggaaggctaagcatg

SEQ ID NO: 51923 - RNA, 20 nt, synthetic construct
  source 1..20: mol_type = other RNA
tctctggaatagaagagcag

SEQ ID NO: 51924 - RNA, 20 nt, synthetic construct
  source 1..20: mol_type = other RNA
tctctggagcaagcatgagt

SEQ ID NO: 51925 - RNA, 20 nt, synthetic construct
  source 1..20: mol_type = other RNA
tctctggctgcaattgcgca

SEQ ID NO: 51926 - RNA, 20 nt, synthetic construct
  source 1..20: mol_type = other RNA
tctctgggctcactgcaact

SEQ ID NO: 51927 - RNA, 20 nt, synthetic construct
  source 1..20: mol_type = other RNA
tctctgggcttcactttcgt

SEQ ID NO: 51928 - RNA, 20 nt, synthetic construct
  source 1..20: mol_type = other RNA
tctctggggttagggcctag

SEQ ID NO: 51929 - RNA, 20 nt, synthetic construct
  source 1..20: mol_type = other RNA
tctctggtattctgaacttt

SEQ ID NO: 51930 - RNA, 20 nt, synthetic construct
  source 1..20: mol_type = other RNA
tctctgtctctgttgcccag

SEQ ID NO: 51931 - RNA, 20 nt, synthetic construct
  source 1..20: mol_type = other RNA
tctctgtgtggtttgccttt

SEQ ID NO: 51932 - RNA, 20 nt, synthetic construct
  source 1..20: mol_type = other RNA
tctcttaaatccgagacaag

SEQ ID NO: 51933 - RNA, 20 nt, synthetic construct
  source 1..20: mol_type = other RNA
tctcttaagaccacaaggat

SEQ ID NO: 51934 - RNA, 20 nt, synthetic construct
  source 1..20: mol_type = other RNA
tctcttacacctgtttaaaa

SEQ ID NO: 51935 - RNA, 20 nt, synthetic construct
  source 1..20: mol_type = other RNA
tctcttagacctcctagatt

SEQ ID NO: 51936 - RNA, 20 nt, synthetic construct
  source 1..20: mol_type = other RNA
tctcttatactagtagaaag

SEQ ID NO: 51937 - RNA, 20 nt, synthetic construct
  source 1..20: mol_type = other RNA
tctcttcaccaactgaagcg

SEQ ID NO: 51938 - RNA, 20 nt, synthetic construct
  source 1..20: mol_type = other RNA
tctcttccaaataatcccgc

SEQ ID NO: 51939 - RNA, 20 nt, synthetic construct
  source 1..20: mol_type = other RNA
tctcttcccccaaaacttag

SEQ ID NO: 51940 - RNA, 20 nt, synthetic construct
  source 1..20: mol_type = other RNA
tctcttcctcctctggacat

SEQ ID NO: 51941 - RNA, 20 nt, synthetic construct
  source 1..20: mol_type = other RNA
tctcttcctgtatatctcct

SEQ ID NO: 51942 - RNA, 20 nt, synthetic construct
  source 1..20: mol_type = other RNA
tctcttcgagggggctgagt

SEQ ID NO: 51943 - RNA, 20 nt, synthetic construct
  source 1..20: mol_type = other RNA
tctcttctggatagcattat

SEQ ID NO: 51944 - RNA, 20 nt, synthetic construct
  source 1..20: mol_type = other RNA
tctcttgaccttagttttca

SEQ ID NO: 51945 - RNA, 20 nt, synthetic construct
  source 1..20: mol_type = other RNA
tctcttgcccaagctggtcc

SEQ ID NO: 51946 - RNA, 20 nt, synthetic construct
  source 1..20: mol_type = other RNA
tctcttgcctaggctggagt

SEQ ID NO: 51947 - RNA, 20 nt, synthetic construct
  source 1..20: mol_type = other RNA
tctcttggaatgtgcacctc

SEQ ID NO: 51948 - RNA, 20 nt, synthetic construct
  source 1..20: mol_type = other RNA
tctcttgttgaggatgactg

SEQ ID NO: 51949 - RNA, 20 nt, synthetic construct
  source 1..20: mol_type = other RNA
tctctttaaagctgaactcc

SEQ ID NO: 51950 - RNA, 20 nt, synthetic construct
  source 1..20: mol_type = other RNA
tctctttaattatgagcatt

SEQ ID NO: 51951 - RNA, 20 nt, synthetic construct
  source 1..20: mol_type = other RNA
tctctttaggaagcttcctt

SEQ ID NO: 51952 - RNA, 20 nt, synthetic construct
  source 1..20: mol_type = other RNA
tctctttagggaagatagta

SEQ ID NO: 51953 - RNA, 20 nt, synthetic construct
  source 1..20: mol_type = other RNA
tctctttcagccatcccagc

SEQ ID NO: 51954 - RNA, 20 nt, synthetic construct
  source 1..20: mol_type = other RNA
tctctttctgaaattctcat

SEQ ID NO: 51955 - RNA, 20 nt, synthetic construct
  source 1..20: mol_type = other RNA
tctctttctggggatgctgt

SEQ ID NO: 51956 - RNA, 20 nt, synthetic construct
  source 1..20: mol_type = other RNA
tctctttgaaaggaatccgg

SEQ ID NO: 51957 - RNA, 20 nt, synthetic construct
  source 1..20: mol_type = other RNA
tctctttgtttatccttgca

SEQ ID NO: 51958 - RNA, 20 nt, synthetic construct
  source 1..20: mol_type = other RNA
tctcttttcctcgttttcaa

SEQ ID NO: 51959 - RNA, 20 nt, synthetic construct
  source 1..20: mol_type = other RNA
tctcttttcctttaacgtat

SEQ ID NO: 51960 - RNA, 20 nt, synthetic construct
  source 1..20: mol_type = other RNA
tctctttttgacagatgaga

SEQ ID NO: 51961 - RNA, 20 nt, synthetic construct
  source 1..20: mol_type = other RNA
tctgaaaaatggttttatgg

SEQ ID NO: 51962 - RNA, 20 nt, synthetic construct
  source 1..20: mol_type = other RNA
tctgaaacgaccttgctcat

SEQ ID NO: 51963 - RNA, 20 nt, synthetic construct
  source 1..20: mol_type = other RNA
tctgaaagcttctgagcagt

SEQ ID NO: 51964 - RNA, 20 nt, synthetic construct
  source 1..20: mol_type = other RNA
tctgaaattagctaagtatg

SEQ ID NO: 51965 - RNA, 20 nt, synthetic construct
  source 1..20: mol_type = other RNA
tctgaaattctcattagtta

SEQ ID NO: 51966 - RNA, 20 nt, synthetic construct
  source 1..20: mol_type = other RNA
tctgaaattgacttcactag

SEQ ID NO: 51967 - RNA, 20 nt, synthetic construct
  source 1..20: mol_type = other RNA
tctgaacaaatatcaaaaga

SEQ ID NO: 51968 - RNA, 20 nt, synthetic construct
  source 1..20: mol_type = other RNA
tctgaacattttagctgggg

SEQ ID NO: 51969 - RNA, 20 nt, synthetic construct
  source 1..20: mol_type = other RNA
tctgaacgtctttaaatttc

SEQ ID NO: 51970 - RNA, 20 nt, synthetic construct
  source 1..20: mol_type = other RNA
tctgaactcaaaagtgaatc

SEQ ID NO: 51971 - RNA, 20 nt, synthetic construct
  source 1..20: mol_type = other RNA
tctgaactttcaacctaaca

SEQ ID NO: 51972 - RNA, 20 nt, synthetic construct
  source 1..20: mol_type = other RNA
tctgaactttcgaagtggga

SEQ ID NO: 51973 - RNA, 20 nt, synthetic construct
  source 1..20: mol_type = other RNA
tctgaagaaattatctgtgg

SEQ ID NO: 51974 - RNA, 20 nt, synthetic construct
  source 1..20: mol_type = other RNA
tctgaagacatgctgaggcc

SEQ ID NO: 51975 - RNA, 20 nt, synthetic construct
  source 1..20: mol_type = other RNA
tctgaagaggctttctgtgt

SEQ ID NO: 51976 - RNA, 20 nt, synthetic construct
  source 1..20: mol_type = other RNA
tctgaagagtctatctttgg

SEQ ID NO: 51977 - RNA, 20 nt, synthetic construct
  source 1..20: mol_type = other RNA
tctgaaggcactaacaaagg

SEQ ID NO: 51978 - RNA, 20 nt, synthetic construct
  source 1..20: mol_type = other RNA
tctgaaggctcagcccctca

SEQ ID NO: 51979 - RNA, 20 nt, synthetic construct
  source 1..20: mol_type = other RNA
tctgaaggtgcctgccatag

SEQ ID NO: 51980 - RNA, 20 nt, synthetic construct
  source 1..20: mol_type = other RNA
tctgaatcaataagaatgat

SEQ ID NO: 51981 - RNA, 20 nt, synthetic construct
  source 1..20: mol_type = other RNA
tctgaatcacctcaaggcag

SEQ ID NO: 51982 - RNA, 20 nt, synthetic construct
  source 1..20: mol_type = other RNA
tctgaattcaagttacaata

SEQ ID NO: 51983 - RNA, 20 nt, synthetic construct
  source 1..20: mol_type = other RNA
tctgaattctctggaataga

SEQ ID NO: 51984 - RNA, 20 nt, synthetic construct
  source 1..20: mol_type = other RNA
tctgaattgagatgtactgg

SEQ ID NO: 51985 - RNA, 20 nt, synthetic construct
  source 1..20: mol_type = other RNA
tctgacaactgggagaatgg

SEQ ID NO: 51986 - RNA, 20 nt, synthetic construct
  source 1..20: mol_type = other RNA
tctgacaatttcagggagaa

SEQ ID NO: 51987 - RNA, 20 nt, synthetic construct
  source 1..20: mol_type = other RNA
tctgacaatttgccaaaatg

SEQ ID NO: 51988 - RNA, 20 nt, synthetic construct
  source 1..20: mol_type = other RNA
tctgacacccgaagaggacg

SEQ ID NO: 51989 - RNA, 20 nt, synthetic construct
  source 1..20: mol_type = other RNA
tctgacacccgacccactag

SEQ ID NO: 51990 - RNA, 20 nt, synthetic construct
  source 1..20: mol_type = other RNA
tctgacaggtggtatgggag

SEQ ID NO: 51991 - RNA, 20 nt, synthetic construct
  source 1..20: mol_type = other RNA
tctgacatactgtcacaggc

SEQ ID NO: 51992 - RNA, 20 nt, synthetic construct
  source 1..20: mol_type = other RNA
tctgacatatgttttgcttc

SEQ ID NO: 51993 - RNA, 20 nt, synthetic construct
  source 1..20: mol_type = other RNA
tctgacatgagagctaaggg

SEQ ID NO: 51994 - RNA, 20 nt, synthetic construct
  source 1..20: mol_type = other RNA
tctgacattggttattcatg

SEQ ID NO: 51995 - RNA, 20 nt, synthetic construct
  source 1..20: mol_type = other RNA
tctgaccaactatttcacta

SEQ ID NO: 51996 - RNA, 20 nt, synthetic construct
  source 1..20: mol_type = other RNA
tctgaccattgtgtggacac

SEQ ID NO: 51997 - RNA, 20 nt, synthetic construct
  source 1..20: mol_type = other RNA
tctgacccagagcctaatgt

SEQ ID NO: 51998 - RNA, 20 nt, synthetic construct
  source 1..20: mol_type = other RNA
tctgaccctttattcaaaga

SEQ ID NO: 51999 - RNA, 20 nt, synthetic construct
  source 1..20: mol_type = other RNA
tctgacctaaagttttaaga

SEQ ID NO: 52000 - RNA, 20 nt, synthetic construct
  source 1..20: mol_type = other RNA
tctgacctaagcttgggtag

SEQ ID NO: 52001 - RNA, 20 nt, synthetic construct
  source 1..20: mol_type = other RNA
tctgacgtttaaatgagtta

SEQ ID NO: 52002 - RNA, 20 nt, synthetic construct
  source 1..20: mol_type = other RNA
tctgactacactgaagggaa

SEQ ID NO: 52003 - RNA, 20 nt, synthetic construct
  source 1..20: mol_type = other RNA
tctgactctgtgcttgtgct

SEQ ID NO: 52004 - RNA, 20 nt, synthetic construct
  source 1..20: mol_type = other RNA
tctgacttagtgagggaggc

SEQ ID NO: 52005 - RNA, 20 nt, synthetic construct
  source 1..20: mol_type = other RNA
tctgacttcattcttgacat

SEQ ID NO: 52006 - RNA, 20 nt, synthetic construct
  source 1..20: mol_type = other RNA
tctgacttctctcagaggga

SEQ ID NO: 52007 - RNA, 20 nt, synthetic construct
  source 1..20: mol_type = other RNA
tctgactttatggtatcact

SEQ ID NO: 52008 - RNA, 20 nt, synthetic construct
  source 1..20: mol_type = other RNA
tctgagaagactaagcagaa

SEQ ID NO: 52009 - RNA, 20 nt, synthetic construct
  source 1..20: mol_type = other RNA
tctgagaaggcgaaatgtga

SEQ ID NO: 52010 - RNA, 20 nt, synthetic construct
  source 1..20: mol_type = other RNA
tctgagacaggatccagatg

SEQ ID NO: 52011 - RNA, 20 nt, synthetic construct
  source 1..20: mol_type = other RNA
tctgagacatcacaatgcgt

SEQ ID NO: 52012 - RNA, 20 nt, synthetic construct
  source 1..20: mol_type = other RNA
tctgagagaagtcagactaa

SEQ ID NO: 52013 - RNA, 20 nt, synthetic construct
  source 1..20: mol_type = other RNA
tctgagagatagaaagcacc

SEQ ID NO: 52014 - RNA, 20 nt, synthetic construct
  source 1..20: mol_type = other RNA
tctgagagtattgccaggtt

SEQ ID NO: 52015 - RNA, 20 nt, synthetic construct
  source 1..20: mol_type = other RNA
tctgagcaactactatttcg

SEQ ID NO: 52016 - RNA, 20 nt, synthetic construct
  source 1..20: mol_type = other RNA
tctgagcagtgtttcctaga

SEQ ID NO: 52017 - RNA, 20 nt, synthetic construct
  source 1..20: mol_type = other RNA
tctgagccagagtttcactc

SEQ ID NO: 52018 - RNA, 20 nt, synthetic construct
  source 1..20: mol_type = other RNA
tctgagctgttaatggttag

SEQ ID NO: 52019 - RNA, 20 nt, synthetic construct
  source 1..20: mol_type = other RNA
tctgaggagctgagaccaca

SEQ ID NO: 52020 - RNA, 20 nt, synthetic construct
  source 1..20: mol_type = other RNA
tctgaggcctcctgccttcc

SEQ ID NO: 52021 - RNA, 20 nt, synthetic construct
  source 1..20: mol_type = other RNA
tctgagggaaattatttcca

SEQ ID NO: 52022 - RNA, 20 nt, synthetic construct
  source 1..20: mol_type = other RNA
tctgaggtggagttctgctc

SEQ ID NO: 52023 - RNA, 20 nt, synthetic construct
  source 1..20: mol_type = other RNA
tctgagtaaagggtaagaaa

SEQ ID NO: 52024 - RNA, 20 nt, synthetic construct
  source 1..20: mol_type = other RNA
tctgagtatattctgtgaat

SEQ ID NO: 52025 - RNA, 20 nt, synthetic construct
  source 1..20: mol_type = other RNA
tctgagtgttacttgaaatc

SEQ ID NO: 52026 - RNA, 20 nt, synthetic construct
  source 1..20: mol_type = other RNA
tctgagtgttgtgtgcacct

SEQ ID NO: 52027 - RNA, 20 nt, synthetic construct
  source 1..20: mol_type = other RNA
tctgagtttgctctgcaaat

SEQ ID NO: 52028 - RNA, 20 nt, synthetic construct
  source 1..20: mol_type = other RNA
tctgataaattattagcttg

SEQ ID NO: 52029 - RNA, 20 nt, synthetic construct
  source 1..20: mol_type = other RNA
tctgataagcccaacctgat

SEQ ID NO: 52030 - RNA, 20 nt, synthetic construct
  source 1..20: mol_type = other RNA
tctgatacacttctatccag

SEQ ID NO: 52031 - RNA, 20 nt, synthetic construct
  source 1..20: mol_type = other RNA
tctgatagcttgacaaaagg

SEQ ID NO: 52032 - RNA, 20 nt, synthetic construct
  source 1..20: mol_type = other RNA
tctgataggaatatcgtctt

SEQ ID NO: 52033 - RNA, 20 nt, synthetic construct
  source 1..20: mol_type = other RNA
tctgataggataatgtccag

SEQ ID NO: 52034 - RNA, 20 nt, synthetic construct
  source 1..20: mol_type = other RNA
tctgatatcctgtaaacctg

SEQ ID NO: 52035 - RNA, 20 nt, synthetic construct
  source 1..20: mol_type = other RNA
tctgatcacagaagtgtttt

SEQ ID NO: 52036 - RNA, 20 nt, synthetic construct
  source 1..20: mol_type = other RNA
tctgatgcacaagccttgaa

SEQ ID NO: 52037 - RNA, 20 nt, synthetic construct
  source 1..20: mol_type = other RNA
tctgatgctttctctagttg

SEQ ID NO: 52038 - RNA, 20 nt, synthetic construct
  source 1..20: mol_type = other RNA
tctgatggaacggcttaaca

SEQ ID NO: 52039 - RNA, 20 nt, synthetic construct
  source 1..20: mol_type = other RNA
tctgatgtgtatgttacact

SEQ ID NO: 52040 - RNA, 20 nt, synthetic construct
  source 1..20: mol_type = other RNA
tctgatgtgtgtctctgctc

SEQ ID NO: 52041 - RNA, 20 nt, synthetic construct
  source 1..20: mol_type = other RNA
tctgattcagtggttggaaa

SEQ ID NO: 52042 - RNA, 20 nt, synthetic construct
  source 1..20: mol_type = other RNA
tctgattgcccattataaaa

SEQ ID NO: 52043 - RNA, 20 nt, synthetic construct
  source 1..20: mol_type = other RNA
tctgatttcaaagttaatag

SEQ ID NO: 52044 - RNA, 20 nt, synthetic construct
  source 1..20: mol_type = other RNA
tctgatttgctggctcagtc

SEQ ID NO: 52045 - RNA, 20 nt, synthetic construct
  source 1..20: mol_type = other RNA
tctgatttgtttagtagctg

SEQ ID NO: 52046 - RNA, 20 nt, synthetic construct
  source 1..20: mol_type = other RNA
tctgattttaatctgtcctg

SEQ ID NO: 52047 - RNA, 20 nt, synthetic construct
  source 1..20: mol_type = other RNA
tctgattttgtgtcttctgt

SEQ ID NO: 52048 - RNA, 20 nt, synthetic construct
  source 1..20: mol_type = other RNA
tctgatttttagtgactggc

SEQ ID NO: 52049 - RNA, 20 nt, synthetic construct
  source 1..20: mol_type = other RNA
tctgcaaaaaatgtttgttt

SEQ ID NO: 52050 - RNA, 20 nt, synthetic construct
  source 1..20: mol_type = other RNA
tctgcaaatgaggttgcttt

SEQ ID NO: 52051 - RNA, 20 nt, synthetic construct
  source 1..20: mol_type = other RNA
tctgcaacatttgttgcatc

SEQ ID NO: 52052 - RNA, 20 nt, synthetic construct
  source 1..20: mol_type = other RNA
tctgcaactatcaaaacact

SEQ ID NO: 52053 - RNA, 20 nt, synthetic construct
  source 1..20: mol_type = other RNA
tctgcaagcagatctgctgt

SEQ ID NO: 52054 - RNA, 20 nt, synthetic construct
  source 1..20: mol_type = other RNA
tctgcaagttgctatccagt

SEQ ID NO: 52055 - RNA, 20 nt, synthetic construct
  source 1..20: mol_type = other RNA
tctgcaattggaagactatc

SEQ ID NO: 52056 - RNA, 20 nt, synthetic construct
  source 1..20: mol_type = other RNA
tctgcaattttaaatgtaca

SEQ ID NO: 52057 - RNA, 20 nt, synthetic construct
  source 1..20: mol_type = other RNA
tctgcacgtactagtcagca

SEQ ID NO: 52058 - RNA, 20 nt, synthetic construct
  source 1..20: mol_type = other RNA
tctgcagaccaagaaaggac

SEQ ID NO: 52059 - RNA, 20 nt, synthetic construct
  source 1..20: mol_type = other RNA
tctgcagactcttgtcccgg

SEQ ID NO: 52060 - RNA, 20 nt, synthetic construct
  source 1..20: mol_type = other RNA
tctgcagagactgtgcttcc

SEQ ID NO: 52061 - RNA, 20 nt, synthetic construct
  source 1..20: mol_type = other RNA
tctgcagagcaggctccact

SEQ ID NO: 52062 - RNA, 20 nt, synthetic construct
  source 1..20: mol_type = other RNA
tctgcaggagccttgctgtt

SEQ ID NO: 52063 - RNA, 20 nt, synthetic construct
  source 1..20: mol_type = other RNA
tctgcaggcagaatgtgacc

SEQ ID NO: 52064 - RNA, 20 nt, synthetic construct
  source 1..20: mol_type = other RNA
tctgcaggctgaactgctga

SEQ ID NO: 52065 - RNA, 20 nt, synthetic construct
  source 1..20: mol_type = other RNA
tctgcagtgaacatgggaat

SEQ ID NO: 52066 - RNA, 20 nt, synthetic construct
  source 1..20: mol_type = other RNA
tctgcagtgtccatctccca

SEQ ID NO: 52067 - RNA, 20 nt, synthetic construct
  source 1..20: mol_type = other RNA
tctgcagttagcatgcctga

SEQ ID NO: 52068 - RNA, 20 nt, synthetic construct
  source 1..20: mol_type = other RNA
tctgcagtttgtgttttcac

SEQ ID NO: 52069 - RNA, 20 nt, synthetic construct
  source 1..20: mol_type = other RNA
tctgcatacttagctaattt

SEQ ID NO: 52070 - RNA, 20 nt, synthetic construct
  source 1..20: mol_type = other RNA
tctgcatagagatcttgtgt

SEQ ID NO: 52071 - RNA, 20 nt, synthetic construct
  source 1..20: mol_type = other RNA
tctgcatccaaaagggaaat

SEQ ID NO: 52072 - RNA, 20 nt, synthetic construct
  source 1..20: mol_type = other RNA
tctgcatcttttgagggtat

SEQ ID NO: 52073 - RNA, 20 nt, synthetic construct
  source 1..20: mol_type = other RNA
tctgcatttggtttgcaaaa

SEQ ID NO: 52074 - RNA, 20 nt, synthetic construct
  source 1..20: mol_type = other RNA
tctgccacattcaacaacat

SEQ ID NO: 52075 - RNA, 20 nt, synthetic construct
  source 1..20: mol_type = other RNA
tctgccaggacaattgaatg

SEQ ID NO: 52076 - RNA, 20 nt, synthetic construct
  source 1..20: mol_type = other RNA
tctgcccatcctatctaagc

SEQ ID NO: 52077 - RNA, 20 nt, synthetic construct
  source 1..20: mol_type = other RNA
tctgccccgggcctggttag

SEQ ID NO: 52078 - RNA, 20 nt, synthetic construct
  source 1..20: mol_type = other RNA
tctgccctcattgaagctac

SEQ ID NO: 52079 - RNA, 20 nt, synthetic construct
  source 1..20: mol_type = other RNA
tctgccgcctggggccgggt

SEQ ID NO: 52080 - RNA, 20 nt, synthetic construct
  source 1..20: mol_type = other RNA
tctgcctaatctctaggctt

SEQ ID NO: 52081 - RNA, 20 nt, synthetic construct
  source 1..20: mol_type = other RNA
tctgcctcaaaatcaacatt

SEQ ID NO: 52082 - RNA, 20 nt, synthetic construct
  source 1..20: mol_type = other RNA
tctgcctcagttgacatcct

SEQ ID NO: 52083 - RNA, 20 nt, synthetic construct
  source 1..20: mol_type = other RNA
tctgcctcccgggtccaggc

SEQ ID NO: 52084 - RNA, 20 nt, synthetic construct
  source 1..20: mol_type = other RNA
tctgcctcggcacagctctc

SEQ ID NO: 52085 - RNA, 20 nt, synthetic construct
  source 1..20: mol_type = other RNA
tctgcctgcagactgcaggt

SEQ ID NO: 52086 - RNA, 20 nt, synthetic construct
  source 1..20: mol_type = other RNA
tctgccttcaatgtttggta

SEQ ID NO: 52087 - RNA, 20 nt, synthetic construct
  source 1..20: mol_type = other RNA
tctgccttgacctcccaaag

SEQ ID NO: 52088 - RNA, 20 nt, synthetic construct
  source 1..20: mol_type = other RNA
tctgccttgaggtgattcag

SEQ ID NO: 52089 - RNA, 20 nt, synthetic construct
  source 1..20: mol_type = other RNA
tctgcgcaattgcagccaga

SEQ ID NO: 52090 - RNA, 20 nt, synthetic construct
  source 1..20: mol_type = other RNA
tctgcgccttaaagccacac

SEQ ID NO: 52091 - RNA, 20 nt, synthetic construct
  source 1..20: mol_type = other RNA
tctgcggcaggcattgtgct

SEQ ID NO: 52092 - RNA, 20 nt, synthetic construct
  source 1..20: mol_type = other RNA
tctgcggcggctgaggcagc

SEQ ID NO: 52093 - RNA, 20 nt, synthetic construct
  source 1..20: mol_type = other RNA
tctgcggcgggtctggcgcg

SEQ ID NO: 52094 - RNA, 20 nt, synthetic construct
  source 1..20: mol_type = other RNA
tctgcgtgttattttaatcg

SEQ ID NO: 52095 - RNA, 20 nt, synthetic construct
  source 1..20: mol_type = other RNA
tctgctaataaaaacatatg

SEQ ID NO: 52096 - RNA, 20 nt, synthetic construct
  source 1..20: mol_type = other RNA
tctgctacaggggcattccc

SEQ ID NO: 52097 - RNA, 20 nt, synthetic construct
  source 1..20: mol_type = other RNA
tctgctactagcaagctaat

SEQ ID NO: 52098 - RNA, 20 nt, synthetic construct
  source 1..20: mol_type = other RNA
tctgctatgaaatgtggttt

SEQ ID NO: 52099 - RNA, 20 nt, synthetic construct
  source 1..20: mol_type = other RNA
tctgctatgctgaaaggcat

SEQ ID NO: 52100 - RNA, 20 nt, synthetic construct
  source 1..20: mol_type = other RNA
tctgctattctctttctgaa

SEQ ID NO: 52101 - RNA, 20 nt, synthetic construct
  source 1..20: mol_type = other RNA
tctgctcaaaggggcattcc

SEQ ID NO: 52102 - RNA, 20 nt, synthetic construct
  source 1..20: mol_type = other RNA
tctgctcaccgcaacatctg

SEQ ID NO: 52103 - RNA, 20 nt, synthetic construct
  source 1..20: mol_type = other RNA
tctgctcactttgggattag

SEQ ID NO: 52104 - RNA, 20 nt, synthetic construct
  source 1..20: mol_type = other RNA
tctgctcggctctgtcaccc

SEQ ID NO: 52105 - RNA, 20 nt, synthetic construct
  source 1..20: mol_type = other RNA
tctgctctcaagtaattgtt

SEQ ID NO: 52106 - RNA, 20 nt, synthetic construct
  source 1..20: mol_type = other RNA
tctgctgctgaaaaagatac

SEQ ID NO: 52107 - RNA, 20 nt, synthetic construct
  source 1..20: mol_type = other RNA
tctgctgggcccactctccc

SEQ ID NO: 52108 - RNA, 20 nt, synthetic construct
  source 1..20: mol_type = other RNA
tctgctgtaagctggtaata

SEQ ID NO: 52109 - RNA, 20 nt, synthetic construct
  source 1..20: mol_type = other RNA
tctgctgtcggttttctagt

SEQ ID NO: 52110 - RNA, 20 nt, synthetic construct
  source 1..20: mol_type = other RNA
tctgctgttgatggacgttt

SEQ ID NO: 52111 - RNA, 20 nt, synthetic construct
  source 1..20: mol_type = other RNA
tctgcttaaagcctctcaac

SEQ ID NO: 52112 - RNA, 20 nt, synthetic construct
  source 1..20: mol_type = other RNA
tctgcttagtcttctcagat

SEQ ID NO: 52113 - RNA, 20 nt, synthetic construct
  source 1..20: mol_type = other RNA
tctgcttattatatgcctag

SEQ ID NO: 52114 - RNA, 20 nt, synthetic construct
  source 1..20: mol_type = other RNA
tctgcttcactaactttaaa

SEQ ID NO: 52115 - RNA, 20 nt, synthetic construct
  source 1..20: mol_type = other RNA
tctgcttccacatttctaat

SEQ ID NO: 52116 - RNA, 20 nt, synthetic construct
  source 1..20: mol_type = other RNA
tctgcttccttgctatgtaa

SEQ ID NO: 52117 - RNA, 20 nt, synthetic construct
  source 1..20: mol_type = other RNA
tctgcttctcaataaggaaa

SEQ ID NO: 52118 - RNA, 20 nt, synthetic construct
  source 1..20: mol_type = other RNA
tctgcttgaatgtgcctaca

SEQ ID NO: 52119 - RNA, 20 nt, synthetic construct
  source 1..20: mol_type = other RNA
tctgcttgcagacaataatt

SEQ ID NO: 52120 - RNA, 20 nt, synthetic construct
  source 1..20: mol_type = other RNA
tctgctttttcttggtggta

SEQ ID NO: 52121 - RNA, 20 nt, synthetic construct
  source 1..20: mol_type = other RNA
tctggaaactcaaacccaaa

SEQ ID NO: 52122 - RNA, 20 nt, synthetic construct
  source 1..20: mol_type = other RNA
tctggaaaggacttgatcta

SEQ ID NO: 52123 - RNA, 20 nt, synthetic construct
  source 1..20: mol_type = other RNA
tctggaaagttcaaatgagg

SEQ ID NO: 52124 - RNA, 20 nt, synthetic construct
  source 1..20: mol_type = other RNA
tctggaacacacattagcct

SEQ ID NO: 52125 - RNA, 20 nt, synthetic construct
  source 1..20: mol_type = other RNA
tctggaagatttctactggg

SEQ ID NO: 52126 - RNA, 20 nt, synthetic construct
  source 1..20: mol_type = other RNA
tctggaaggaaacactataa

SEQ ID NO: 52127 - RNA, 20 nt, synthetic construct
  source 1..20: mol_type = other RNA
tctggaaggctaagcatgta

SEQ ID NO: 52128 - RNA, 20 nt, synthetic construct
  source 1..20: mol_type = other RNA
tctggaagtttcctgcacat

SEQ ID NO: 52129 - RNA, 20 nt, synthetic construct
  source 1..20: mol_type = other RNA
tctggaatagaagagcagtg

SEQ ID NO: 52130 - RNA, 20 nt, synthetic construct
  source 1..20: mol_type = other RNA
tctggaatgcatcgtttcaa

SEQ ID NO: 52131 - RNA, 20 nt, synthetic construct
  source 1..20: mol_type = other RNA
tctggaatgcccatcctcta

SEQ ID NO: 52132 - RNA, 20 nt, synthetic construct
  source 1..20: mol_type = other RNA
tctggaatgtgtagttctgg

SEQ ID NO: 52133 - RNA, 20 nt, synthetic construct
  source 1..20: mol_type = other RNA
tctggacattatcctatcag

SEQ ID NO: 52134 - RNA, 20 nt, synthetic construct
  source 1..20: mol_type = other RNA
tctggaccacaatcttaccc

SEQ ID NO: 52135 - RNA, 20 nt, synthetic construct
  source 1..20: mol_type = other RNA
tctggaccagttactctctc

SEQ ID NO: 52136 - RNA, 20 nt, synthetic construct
  source 1..20: mol_type = other RNA
tctggactcagggtcacttc

SEQ ID NO: 52137 - RNA, 20 nt, synthetic construct
  source 1..20: mol_type = other RNA
tctggactgaaaagatacag

SEQ ID NO: 52138 - RNA, 20 nt, synthetic construct
  source 1..20: mol_type = other RNA
tctggagcaagcatgagtat

SEQ ID NO: 52139 - RNA, 20 nt, synthetic construct
  source 1..20: mol_type = other RNA
tctggaggctagaagtccca

SEQ ID NO: 52140 - RNA, 20 nt, synthetic construct
  source 1..20: mol_type = other RNA
tctggagtgttttcttcatg

SEQ ID NO: 52141 - RNA, 20 nt, synthetic construct
  source 1..20: mol_type = other RNA
tctggatagcattatccctt

SEQ ID NO: 52142 - RNA, 20 nt, synthetic construct
  source 1..20: mol_type = other RNA
tctggatataacaaatcaat

SEQ ID NO: 52143 - RNA, 20 nt, synthetic construct
  source 1..20: mol_type = other RNA
tctggatcctgtctcagagt

SEQ ID NO: 52144 - RNA, 20 nt, synthetic construct
  source 1..20: mol_type = other RNA
tctggatgtgtatgatcaaa

SEQ ID NO: 52145 - RNA, 20 nt, synthetic construct
  source 1..20: mol_type = other RNA
tctggatgttaattagatat

SEQ ID NO: 52146 - RNA, 20 nt, synthetic construct
  source 1..20: mol_type = other RNA
tctggattatagtggtaagg

SEQ ID NO: 52147 - RNA, 20 nt, synthetic construct
  source 1..20: mol_type = other RNA
tctggattgattccagtttc

SEQ ID NO: 52148 - RNA, 20 nt, synthetic construct
  source 1..20: mol_type = other RNA
tctggatttttgtgtagagg

SEQ ID NO: 52149 - RNA, 20 nt, synthetic construct
  source 1..20: mol_type = other RNA
tctggcagcaggggctaagt

SEQ ID NO: 52150 - RNA, 20 nt, synthetic construct
  source 1..20: mol_type = other RNA
tctggcaggtcacctagcct

SEQ ID NO: 52151 - RNA, 20 nt, synthetic construct
  source 1..20: mol_type = other RNA
tctggccaaatccctgatca

SEQ ID NO: 52152 - RNA, 20 nt, synthetic construct
  source 1..20: mol_type = other RNA
tctggccctccatttccctg

SEQ ID NO: 52153 - RNA, 20 nt, synthetic construct
  source 1..20: mol_type = other RNA
tctggcctgcaccatttatt

SEQ ID NO: 52154 - RNA, 20 nt, synthetic construct
  source 1..20: mol_type = other RNA
tctggcctggacaacagtgt

SEQ ID NO: 52155 - RNA, 20 nt, synthetic construct
  source 1..20: mol_type = other RNA
tctggccttctatattttta

SEQ ID NO: 52156 - RNA, 20 nt, synthetic construct
  source 1..20: mol_type = other RNA
tctggctcagaaacaacaac

SEQ ID NO: 52157 - RNA, 20 nt, synthetic construct
  source 1..20: mol_type = other RNA
tctggctgacctggtactct

SEQ ID NO: 52158 - RNA, 20 nt, synthetic construct
  source 1..20: mol_type = other RNA
tctggctgcaattgcgcaga

SEQ ID NO: 52159 - RNA, 20 nt, synthetic construct
  source 1..20: mol_type = other RNA
tctggctgcagggcttctga

SEQ ID NO: 52160 - RNA, 20 nt, synthetic construct
  source 1..20: mol_type = other RNA
tctgggaaaaaataagaaaa

SEQ ID NO: 52161 - RNA, 20 nt, synthetic construct
  source 1..20: mol_type = other RNA
tctgggaacagcccctagca

SEQ ID NO: 52162 - RNA, 20 nt, synthetic construct
  source 1..20: mol_type = other RNA
tctgggaagttatgtagctg

SEQ ID NO: 52163 - RNA, 20 nt, synthetic construct
  source 1..20: mol_type = other RNA
tctgggagttcattagaatt

SEQ ID NO: 52164 - RNA, 20 nt, synthetic construct
  source 1..20: mol_type = other RNA
tctgggataatgagtttaat

SEQ ID NO: 52165 - RNA, 20 nt, synthetic construct
  source 1..20: mol_type = other RNA
tctgggataatgctatcatt

SEQ ID NO: 52166 - RNA, 20 nt, synthetic construct
  source 1..20: mol_type = other RNA
tctgggatacttctaacttt

SEQ ID NO: 52167 - RNA, 20 nt, synthetic construct
  source 1..20: mol_type = other RNA
tctgggatgctcagtttcaa

SEQ ID NO: 52168 - RNA, 20 nt, synthetic construct
  source 1..20: mol_type = other RNA
tctgggctcactgcaacttc

SEQ ID NO: 52169 - RNA, 20 nt, synthetic construct
  source 1..20: mol_type = other RNA
tctgggctctctattccaaa

SEQ ID NO: 52170 - RNA, 20 nt, synthetic construct
  source 1..20: mol_type = other RNA
tctgggcttcactttcgtca

SEQ ID NO: 52171 - RNA, 20 nt, synthetic construct
  source 1..20: mol_type = other RNA
tctggggatgctgtctatag

SEQ ID NO: 52172 - RNA, 20 nt, synthetic construct
  source 1..20: mol_type = other RNA
tctggggctcaagtaagtga

SEQ ID NO: 52173 - RNA, 20 nt, synthetic construct
  source 1..20: mol_type = other RNA
tctggggttagggcctagaa

SEQ ID NO: 52174 - RNA, 20 nt, synthetic construct
  source 1..20: mol_type = other RNA
tctggggttcaaaccaccta

SEQ ID NO: 52175 - RNA, 20 nt, synthetic construct
  source 1..20: mol_type = other RNA
tctgggtcagaatcgtgata

SEQ ID NO: 52176 - RNA, 20 nt, synthetic construct
  source 1..20: mol_type = other RNA
tctgggtgatatctgtaagt

SEQ ID NO: 52177 - RNA, 20 nt, synthetic construct
  source 1..20: mol_type = other RNA
tctgggtgcgttgaccgctt

SEQ ID NO: 52178 - RNA, 20 nt, synthetic construct
  source 1..20: mol_type = other RNA
tctggtatctaccaaaaaac

SEQ ID NO: 52179 - RNA, 20 nt, synthetic construct
  source 1..20: mol_type = other RNA
tctggtattctgaactttca

SEQ ID NO: 52180 - RNA, 20 nt, synthetic construct
  source 1..20: mol_type = other RNA
tctggtattttaagattctc

SEQ ID NO: 52181 - RNA, 20 nt, synthetic construct
  source 1..20: mol_type = other RNA
tctggtcacaaacacaaaac

SEQ ID NO: 52182 - RNA, 20 nt, synthetic construct
  source 1..20: mol_type = other RNA
tctggtcctgagctttcctt

SEQ ID NO: 52183 - RNA, 20 nt, synthetic construct
  source 1..20: mol_type = other RNA
tctggtctatctcattataa

SEQ ID NO: 52184 - RNA, 20 nt, synthetic construct
  source 1..20: mol_type = other RNA
tctggtgctggcagccttct

SEQ ID NO: 52185 - RNA, 20 nt, synthetic construct
  source 1..20: mol_type = other RNA
tctggtggacaaaaaacgcg

SEQ ID NO: 52186 - RNA, 20 nt, synthetic construct
  source 1..20: mol_type = other RNA
tctggtgtcgtttatttctt

SEQ ID NO: 52187 - RNA, 20 nt, synthetic construct
  source 1..20: mol_type = other RNA
tctggtgttgcttgctctac

SEQ ID NO: 52188 - RNA, 20 nt, synthetic construct
  source 1..20: mol_type = other RNA
tctggtttgctttggagtca

SEQ ID NO: 52189 - RNA, 20 nt, synthetic construct
  source 1..20: mol_type = other RNA
tctggttttaaagaaattag

SEQ ID NO: 52190 - RNA, 20 nt, synthetic construct
  source 1..20: mol_type = other RNA
tctggttttctggaggctag

SEQ ID NO: 52191 - RNA, 20 nt, synthetic construct
  source 1..20: mol_type = other RNA
tctgtaaacatgaacaagtt

SEQ ID NO: 52192 - RNA, 20 nt, synthetic construct
  source 1..20: mol_type = other RNA
tctgtaagcacctgtataaa

SEQ ID NO: 52193 - RNA, 20 nt, synthetic construct
  source 1..20: mol_type = other RNA
tctgtaagtcagttaacagt

SEQ ID NO: 52194 - RNA, 20 nt, synthetic construct
  source 1..20: mol_type = other RNA
tctgtaagtcatcaaaggaa

SEQ ID NO: 52195 - RNA, 20 nt, synthetic construct
  source 1..20: mol_type = other RNA
tctgtaatattaaccaagaa

SEQ ID NO: 52196 - RNA, 20 nt, synthetic construct
  source 1..20: mol_type = other RNA
tctgtaatgtttgtacttct

SEQ ID NO: 52197 - RNA, 20 nt, synthetic construct
  source 1..20: mol_type = other RNA
tctgtacccttacgcgtgga

SEQ ID NO: 52198 - RNA, 20 nt, synthetic construct
  source 1..20: mol_type = other RNA
tctgtagaatatccaagcac

SEQ ID NO: 52199 - RNA, 20 nt, synthetic construct
  source 1..20: mol_type = other RNA
tctgtagataaacgttaact

SEQ ID NO: 52200 - RNA, 20 nt, synthetic construct
  source 1..20: mol_type = other RNA
tctgtagattgttttaggta

SEQ ID NO: 52201 - RNA, 20 nt, synthetic construct
  source 1..20: mol_type = other RNA
tctgtagcttcacgtgcatt

SEQ ID NO: 52202 - RNA, 20 nt, synthetic construct
  source 1..20: mol_type = other RNA
tctgtagggtgactagtgtg

SEQ ID NO: 52203 - RNA, 20 nt, synthetic construct
  source 1..20: mol_type = other RNA
tctgtagttacaactactcg

SEQ ID NO: 52204 - RNA, 20 nt, synthetic construct
  source 1..20: mol_type = other RNA
tctgtatatgaaaagcttcc

SEQ ID NO: 52205 - RNA, 20 nt, synthetic construct
  source 1..20: mol_type = other RNA
tctgtatcttttcagtccag

SEQ ID NO: 52206 - RNA, 20 nt, synthetic construct
  source 1..20: mol_type = other RNA
tctgtatgagaagactggaa

SEQ ID NO: 52207 - RNA, 20 nt, synthetic construct
  source 1..20: mol_type = other RNA
tctgtatttctgctttggta

SEQ ID NO: 52208 - RNA, 20 nt, synthetic construct
  source 1..20: mol_type = other RNA
tctgtcaaaaagagaacaca

SEQ ID NO: 52209 - RNA, 20 nt, synthetic construct
  source 1..20: mol_type = other RNA
tctgtcacatagacctgaat

SEQ ID NO: 52210 - RNA, 20 nt, synthetic construct
  source 1..20: mol_type = other RNA
tctgtcacatttgaaagaaa

SEQ ID NO: 52211 - RNA, 20 nt, synthetic construct
  source 1..20: mol_type = other RNA
tctgtcacccacgtggagtg

SEQ ID NO: 52212 - RNA, 20 nt, synthetic construct
  source 1..20: mol_type = other RNA
tctgtcacccttgtaatcaa

SEQ ID NO: 52213 - RNA, 20 nt, synthetic construct
  source 1..20: mol_type = other RNA
tctgtcacggtgccctacat

SEQ ID NO: 52214 - RNA, 20 nt, synthetic construct
  source 1..20: mol_type = other RNA
tctgtcactttcctattcac

SEQ ID NO: 52215 - RNA, 20 nt, synthetic construct
  source 1..20: mol_type = other RNA
tctgtcagcagttcagcctg

SEQ ID NO: 52216 - RNA, 20 nt, synthetic construct
  source 1..20: mol_type = other RNA
tctgtcatctgaatcaataa

SEQ ID NO: 52217 - RNA, 20 nt, synthetic construct
  source 1..20: mol_type = other RNA
tctgtcatggtgtgtctgcg

SEQ ID NO: 52218 - RNA, 20 nt, synthetic construct
  source 1..20: mol_type = other RNA
tctgtcatgtttgaattttc

SEQ ID NO: 52219 - RNA, 20 nt, synthetic construct
  source 1..20: mol_type = other RNA
tctgtcattctgcagtttgt

SEQ ID NO: 52220 - RNA, 20 nt, synthetic construct
  source 1..20: mol_type = other RNA
tctgtcctcgtaaaagctaa

SEQ ID NO: 52221 - RNA, 20 nt, synthetic construct
  source 1..20: mol_type = other RNA
tctgtcctgaatactattcc

SEQ ID NO: 52222 - RNA, 20 nt, synthetic construct
  source 1..20: mol_type = other RNA
tctgtcctgtcagtgtggtt

SEQ ID NO: 52223 - RNA, 20 nt, synthetic construct
  source 1..20: mol_type = other RNA
tctgtccttggattgctaaa

SEQ ID NO: 52224 - RNA, 20 nt, synthetic construct
  source 1..20: mol_type = other RNA
tctgtcgcccaggcggaatg

SEQ ID NO: 52225 - RNA, 20 nt, synthetic construct
  source 1..20: mol_type = other RNA
tctgtctcacctcaaggcca

SEQ ID NO: 52226 - RNA, 20 nt, synthetic construct
  source 1..20: mol_type = other RNA
tctgtctctacaaaaaagta

SEQ ID NO: 52227 - RNA, 20 nt, synthetic construct
  source 1..20: mol_type = other RNA
tctgtctgggataatgagtt

SEQ ID NO: 52228 - RNA, 20 nt, synthetic construct
  source 1..20: mol_type = other RNA
tctgtctgttcacatttcgc

SEQ ID NO: 52229 - RNA, 20 nt, synthetic construct
  source 1..20: mol_type = other RNA
tctgtcttgatgatagaata

SEQ ID NO: 52230 - RNA, 20 nt, synthetic construct
  source 1..20: mol_type = other RNA
tctgtcttgtgcatccttta

SEQ ID NO: 52231 - RNA, 20 nt, synthetic construct
  source 1..20: mol_type = other RNA
tctgtctttcagtatgtgtc

SEQ ID NO: 52232 - RNA, 20 nt, synthetic construct
  source 1..20: mol_type = other RNA
tctgtctttggcccatatcc

SEQ ID NO: 52233 - RNA, 20 nt, synthetic construct
  source 1..20: mol_type = other RNA
tctgtgaaaaaacaaaacaa

SEQ ID NO: 52234 - RNA, 20 nt, synthetic construct
  source 1..20: mol_type = other RNA
tctgtgaaaataatacctaa

SEQ ID NO: 52235 - RNA, 20 nt, synthetic construct
  source 1..20: mol_type = other RNA
tctgtgaattgtgacagttc

SEQ ID NO: 52236 - RNA, 20 nt, synthetic construct
  source 1..20: mol_type = other RNA
tctgtgaatttgattatgtt

SEQ ID NO: 52237 - RNA, 20 nt, synthetic construct
  source 1..20: mol_type = other RNA
tctgtgatcagaagagcact

SEQ ID NO: 52238 - RNA, 20 nt, synthetic construct
  source 1..20: mol_type = other RNA
tctgtgatccctgatatgtc

SEQ ID NO: 52239 - RNA, 20 nt, synthetic construct
  source 1..20: mol_type = other RNA
tctgtgatgtagaggcagtt

SEQ ID NO: 52240 - RNA, 20 nt, synthetic construct
  source 1..20: mol_type = other RNA
tctgtgattatcagggatat

SEQ ID NO: 52241 - RNA, 20 nt, synthetic construct
  source 1..20: mol_type = other RNA
tctgtgccaagcaacttgat

SEQ ID NO: 52242 - RNA, 20 nt, synthetic construct
  source 1..20: mol_type = other RNA
tctgtgctagatgctaaaca

SEQ ID NO: 52243 - RNA, 20 nt, synthetic construct
  source 1..20: mol_type = other RNA
tctgtgctagccttcttgga

SEQ ID NO: 52244 - RNA, 20 nt, synthetic construct
  source 1..20: mol_type = other RNA
tctgtgctctgtatttaatc

SEQ ID NO: 52245 - RNA, 20 nt, synthetic construct
  source 1..20: mol_type = other RNA
tctgtgctgagatggtcagt

SEQ ID NO: 52246 - RNA, 20 nt, synthetic construct
  source 1..20: mol_type = other RNA
tctgtgcttaaatttttgag

SEQ ID NO: 52247 - RNA, 20 nt, synthetic construct
  source 1..20: mol_type = other RNA
tctgtgcttaaggaaatgga

SEQ ID NO: 52248 - RNA, 20 nt, synthetic construct
  source 1..20: mol_type = other RNA
tctgtgcttgtgcttttaat

SEQ ID NO: 52249 - RNA, 20 nt, synthetic construct
  source 1..20: mol_type = other RNA
tctgtggaccatgttttagg

SEQ ID NO: 52250 - RNA, 20 nt, synthetic construct
  source 1..20: mol_type = other RNA
tctgtggactttaggctgtt

SEQ ID NO: 52251 - RNA, 20 nt, synthetic construct
  source 1..20: mol_type = other RNA
tctgtggagtcctgtcagtt

SEQ ID NO: 52252 - RNA, 20 nt, synthetic construct
  source 1..20: mol_type = other RNA
tctgtgggttaaaagttagc

SEQ ID NO: 52253 - RNA, 20 nt, synthetic construct
  source 1..20: mol_type = other RNA
tctgtggtctcagctcctca

SEQ ID NO: 52254 - RNA, 20 nt, synthetic construct
  source 1..20: mol_type = other RNA
tctgtggtttcttgaatctc

SEQ ID NO: 52255 - RNA, 20 nt, synthetic construct
  source 1..20: mol_type = other RNA
tctgtgtaatactgtagaat

SEQ ID NO: 52256 - RNA, 20 nt, synthetic construct
  source 1..20: mol_type = other RNA
tctgtgtagttcatcagcat

SEQ ID NO: 52257 - RNA, 20 nt, synthetic construct
  source 1..20: mol_type = other RNA
tctgtgtgcatgcatgtctg

SEQ ID NO: 52258 - RNA, 20 nt, synthetic construct
  source 1..20: mol_type = other RNA
tctgtgtggtttgccttttc

SEQ ID NO: 52259 - RNA, 20 nt, synthetic construct
  source 1..20: mol_type = other RNA
tctgtgtttatgaatgatgc

SEQ ID NO: 52260 - RNA, 20 nt, synthetic construct
  source 1..20: mol_type = other RNA
tctgttaaaagatacgaaaa

SEQ ID NO: 52261 - RNA, 20 nt, synthetic construct
  source 1..20: mol_type = other RNA
tctgttaatagataggtcat

SEQ ID NO: 52262 - RNA, 20 nt, synthetic construct
  source 1..20: mol_type = other RNA
tctgttaatgggcacttggg

SEQ ID NO: 52263 - RNA, 20 nt, synthetic construct
  source 1..20: mol_type = other RNA
tctgttaatgtgatatgcca

SEQ ID NO: 52264 - RNA, 20 nt, synthetic construct
  source 1..20: mol_type = other RNA
tctgttacagctcttctcag

SEQ ID NO: 52265 - RNA, 20 nt, synthetic construct
  source 1..20: mol_type = other RNA
tctgttactcccgatttcag

SEQ ID NO: 52266 - RNA, 20 nt, synthetic construct
  source 1..20: mol_type = other RNA
tctgttagatggtgctgatt

SEQ ID NO: 52267 - RNA, 20 nt, synthetic construct
  source 1..20: mol_type = other RNA
tctgttatagtgtgaaaaaa

SEQ ID NO: 52268 - RNA, 20 nt, synthetic construct
  source 1..20: mol_type = other RNA
tctgttcacatttcgccttc

SEQ ID NO: 52269 - RNA, 20 nt, synthetic construct
  source 1..20: mol_type = other RNA
tctgttccatcggtctgtat

SEQ ID NO: 52270 - RNA, 20 nt, synthetic construct
  source 1..20: mol_type = other RNA
tctgttcctgggttctccct

SEQ ID NO: 52271 - RNA, 20 nt, synthetic construct
  source 1..20: mol_type = other RNA
tctgttctagctcctgggaa

SEQ ID NO: 52272 - RNA, 20 nt, synthetic construct
  source 1..20: mol_type = other RNA
tctgttctcagtatcctttc

SEQ ID NO: 52273 - RNA, 20 nt, synthetic construct
  source 1..20: mol_type = other RNA
tctgttctgttccatcggtc

SEQ ID NO: 52274 - RNA, 20 nt, synthetic construct
  source 1..20: mol_type = other RNA
tctgttgcaaattattttcc

SEQ ID NO: 52275 - RNA, 20 nt, synthetic construct
  source 1..20: mol_type = other RNA
tctgttgcagtccccggtct

SEQ ID NO: 52276 - RNA, 20 nt, synthetic construct
  source 1..20: mol_type = other RNA
tctgttgcccagactggagt

SEQ ID NO: 52277 - RNA, 20 nt, synthetic construct
  source 1..20: mol_type = other RNA
tctgttgcttaagtcactcc

SEQ ID NO: 52278 - RNA, 20 nt, synthetic construct
  source 1..20: mol_type = other RNA
tctgttggagagatggtagt

SEQ ID NO: 52279 - RNA, 20 nt, synthetic construct
  source 1..20: mol_type = other RNA
tctgttggtgcttagctgcc

SEQ ID NO: 52280 - RNA, 20 nt, synthetic construct
  source 1..20: mol_type = other RNA
tctgtttacccttactaaat

SEQ ID NO: 52281 - RNA, 20 nt, synthetic construct
  source 1..20: mol_type = other RNA
tctgtttcctaatctaacat

SEQ ID NO: 52282 - RNA, 20 nt, synthetic construct
  source 1..20: mol_type = other RNA
tctgtttccttaccagtgct

SEQ ID NO: 52283 - RNA, 20 nt, synthetic construct
  source 1..20: mol_type = other RNA
tctgtttctgtgaaaaaaca

SEQ ID NO: 52284 - RNA, 20 nt, synthetic construct
  source 1..20: mol_type = other RNA
tctgtttgccatcttcaaga

SEQ ID NO: 52285 - RNA, 20 nt, synthetic construct
  source 1..20: mol_type = other RNA
tctgtttggatgaaaaagta

SEQ ID NO: 52286 - RNA, 20 nt, synthetic construct
  source 1..20: mol_type = other RNA
tctgtttgtttgttttgaga

SEQ ID NO: 52287 - RNA, 20 nt, synthetic construct
  source 1..20: mol_type = other RNA
tctgttttacatgtttaact

SEQ ID NO: 52288 - RNA, 20 nt, synthetic construct
  source 1..20: mol_type = other RNA
tctgttttcatttattctgt

SEQ ID NO: 52289 - RNA, 20 nt, synthetic construct
  source 1..20: mol_type = other RNA
tctgttttcttactgattta

SEQ ID NO: 52290 - RNA, 20 nt, synthetic construct
  source 1..20: mol_type = other RNA
tctgtttttcaaaatgagat

SEQ ID NO: 52291 - RNA, 20 nt, synthetic construct
  source 1..20: mol_type = other RNA
tctgtttttcttagtctagc

SEQ ID NO: 52292 - RNA, 20 nt, synthetic construct
  source 1..20: mol_type = other RNA
tcttaaaaatgacaccaaaa

SEQ ID NO: 52293 - RNA, 20 nt, synthetic construct
  source 1..20: mol_type = other RNA
tcttaaaactttaggtcaga

SEQ ID NO: 52294 - RNA, 20 nt, synthetic construct
  source 1..20: mol_type = other RNA
tcttaaaaggagatatacag

SEQ ID NO: 52295 - RNA, 20 nt, synthetic construct
  source 1..20: mol_type = other RNA
tcttaaaataccagaggtta

SEQ ID NO: 52296 - RNA, 20 nt, synthetic construct
  source 1..20: mol_type = other RNA
tcttaaactgccaaacccta

SEQ ID NO: 52297 - RNA, 20 nt, synthetic construct
  source 1..20: mol_type = other RNA
tcttaaagatgccatttata

SEQ ID NO: 52298 - RNA, 20 nt, synthetic construct
  source 1..20: mol_type = other RNA
tcttaaagtttcaaactgtg

SEQ ID NO: 52299 - RNA, 20 nt, synthetic construct
  source 1..20: mol_type = other RNA
tcttaaatccgagacaagtt

SEQ ID NO: 52300 - RNA, 20 nt, synthetic construct
  source 1..20: mol_type = other RNA
tcttaaatgtgaattagatg

SEQ ID NO: 52301 - RNA, 20 nt, synthetic construct
  source 1..20: mol_type = other RNA
tcttaacatttctcatgtat

SEQ ID NO: 52302 - RNA, 20 nt, synthetic construct
  source 1..20: mol_type = other RNA
tcttaaccattgagccaaag

SEQ ID NO: 52303 - RNA, 20 nt, synthetic construct
  source 1..20: mol_type = other RNA
tcttaagaaccatacagtgc

SEQ ID NO: 52304 - RNA, 20 nt, synthetic construct
  source 1..20: mol_type = other RNA
tcttaagaaggaaaagaaca

SEQ ID NO: 52305 - RNA, 20 nt, synthetic construct
  source 1..20: mol_type = other RNA
tcttaagacatttgggaatg

SEQ ID NO: 52306 - RNA, 20 nt, synthetic construct
  source 1..20: mol_type = other RNA
tcttaagaccacaaggatta

SEQ ID NO: 52307 - RNA, 20 nt, synthetic construct
  source 1..20: mol_type = other RNA
tcttaagagactctcaagaa

SEQ ID NO: 52308 - RNA, 20 nt, synthetic construct
  source 1..20: mol_type = other RNA
tcttaagcttaggtctttga

SEQ ID NO: 52309 - RNA, 20 nt, synthetic construct
  source 1..20: mol_type = other RNA
tcttaagttaaaacttgtag

SEQ ID NO: 52310 - RNA, 20 nt, synthetic construct
  source 1..20: mol_type = other RNA
tcttaataacctcaaagtgg

SEQ ID NO: 52311 - RNA, 20 nt, synthetic construct
  source 1..20: mol_type = other RNA
tcttaataactgcctaagta

SEQ ID NO: 52312 - RNA, 20 nt, synthetic construct
  source 1..20: mol_type = other RNA
tcttaatattgaaacgatgc

SEQ ID NO: 52313 - RNA, 20 nt, synthetic construct
  source 1..20: mol_type = other RNA
tcttacaatgaatatgtact

SEQ ID NO: 52314 - RNA, 20 nt, synthetic construct
  source 1..20: mol_type = other RNA
tcttacacattaggctctgg

SEQ ID NO: 52315 - RNA, 20 nt, synthetic construct
  source 1..20: mol_type = other RNA
tcttacacctgtttaaaaag

SEQ ID NO: 52316 - RNA, 20 nt, synthetic construct
  source 1..20: mol_type = other RNA
tcttacagtgacatatgccg

SEQ ID NO: 52317 - RNA, 20 nt, synthetic construct
  source 1..20: mol_type = other RNA
tcttacataggcttagtaca

SEQ ID NO: 52318 - RNA, 20 nt, synthetic construct
  source 1..20: mol_type = other RNA
tcttacccccatcacactgg

SEQ ID NO: 52319 - RNA, 20 nt, synthetic construct
  source 1..20: mol_type = other RNA
tcttaccctcacagtcacaa

SEQ ID NO: 52320 - RNA, 20 nt, synthetic construct
  source 1..20: mol_type = other RNA
tcttaccctctagctcccca

SEQ ID NO: 52321 - RNA, 20 nt, synthetic construct
  source 1..20: mol_type = other RNA
tcttaccctttactcagatt

SEQ ID NO: 52322 - RNA, 20 nt, synthetic construct
  source 1..20: mol_type = other RNA
tcttacctaagcatcgtgaa

SEQ ID NO: 52323 - RNA, 20 nt, synthetic construct
  source 1..20: mol_type = other RNA
tcttacctcaaaggagagaa

SEQ ID NO: 52324 - RNA, 20 nt, synthetic construct
  source 1..20: mol_type = other RNA
tcttaccttctaaaatcatc

SEQ ID NO: 52325 - RNA, 20 nt, synthetic construct
  source 1..20: mol_type = other RNA
tcttactgatttatagtgtt

SEQ ID NO: 52326 - RNA, 20 nt, synthetic construct
  source 1..20: mol_type = other RNA
tcttactggtgttaggcaat

SEQ ID NO: 52327 - RNA, 20 nt, synthetic construct
  source 1..20: mol_type = other RNA
tcttactgtaagttcctgga

SEQ ID NO: 52328 - RNA, 20 nt, synthetic construct
  source 1..20: mol_type = other RNA
tcttagacctcctagattga

SEQ ID NO: 52329 - RNA, 20 nt, synthetic construct
  source 1..20: mol_type = other RNA
tcttagccgggaggagccaa

SEQ ID NO: 52330 - RNA, 20 nt, synthetic construct
  source 1..20: mol_type = other RNA
tcttagctatattcactttt

SEQ ID NO: 52331 - RNA, 20 nt, synthetic construct
  source 1..20: mol_type = other RNA
tcttagctcttaagcttagg

SEQ ID NO: 52332 - RNA, 20 nt, synthetic construct
  source 1..20: mol_type = other RNA
tcttagctcttcccttaacc

SEQ ID NO: 52333 - RNA, 20 nt, synthetic construct
  source 1..20: mol_type = other RNA
tcttagcttagaagaagact

SEQ ID NO: 52334 - RNA, 20 nt, synthetic construct
  source 1..20: mol_type = other RNA
tcttaggaagctatggagca

SEQ ID NO: 52335 - RNA, 20 nt, synthetic construct
  source 1..20: mol_type = other RNA
tcttaggccataaatcaagg

SEQ ID NO: 52336 - RNA, 20 nt, synthetic construct
  source 1..20: mol_type = other RNA
tcttaggtttctcatttttc

SEQ ID NO: 52337 - RNA, 20 nt, synthetic construct
  source 1..20: mol_type = other RNA
tcttagtaaatatccgaaag

SEQ ID NO: 52338 - RNA, 20 nt, synthetic construct
  source 1..20: mol_type = other RNA
tcttagtctgacttctctca

SEQ ID NO: 52339 - RNA, 20 nt, synthetic construct
  source 1..20: mol_type = other RNA
tcttagtgatgtcttttgaa

SEQ ID NO: 52340 - RNA, 20 nt, synthetic construct
  source 1..20: mol_type = other RNA
tcttagtgttcccttcttaa

SEQ ID NO: 52341 - RNA, 20 nt, synthetic construct
  source 1..20: mol_type = other RNA
tcttagttccattattccat

SEQ ID NO: 52342 - RNA, 20 nt, synthetic construct
  source 1..20: mol_type = other RNA
tcttagttctgcttccacat

SEQ ID NO: 52343 - RNA, 20 nt, synthetic construct
  source 1..20: mol_type = other RNA
tcttatactagtagaaagca

SEQ ID NO: 52344 - RNA, 20 nt, synthetic construct
  source 1..20: mol_type = other RNA
tcttataggttgaatagggc

SEQ ID NO: 52345 - RNA, 20 nt, synthetic construct
  source 1..20: mol_type = other RNA
tcttatatcctaaacactta

SEQ ID NO: 52346 - RNA, 20 nt, synthetic construct
  source 1..20: mol_type = other RNA
tcttatattaattctgaggc

SEQ ID NO: 52347 - RNA, 20 nt, synthetic construct
  source 1..20: mol_type = other RNA
tcttatccctacctaaaaag

SEQ ID NO: 52348 - RNA, 20 nt, synthetic construct
  source 1..20: mol_type = other RNA
tcttatctaggcgaaatatc

SEQ ID NO: 52349 - RNA, 20 nt, synthetic construct
  source 1..20: mol_type = other RNA
tcttatctgctgtcggtttt

SEQ ID NO: 52350 - RNA, 20 nt, synthetic construct
  source 1..20: mol_type = other RNA
tcttatgaggttattcaaaa

SEQ ID NO: 52351 - RNA, 20 nt, synthetic construct
  source 1..20: mol_type = other RNA
tcttatgctggtgggctttg

SEQ ID NO: 52352 - RNA, 20 nt, synthetic construct
  source 1..20: mol_type = other RNA
tcttatggaatagttgatta

SEQ ID NO: 52353 - RNA, 20 nt, synthetic construct
  source 1..20: mol_type = other RNA
tcttatggctataaccacga

SEQ ID NO: 52354 - RNA, 20 nt, synthetic construct
  source 1..20: mol_type = other RNA
tcttattaatgtgttgtctg

SEQ ID NO: 52355 - RNA, 20 nt, synthetic construct
  source 1..20: mol_type = other RNA
tcttattccccagggaaacc

SEQ ID NO: 52356 - RNA, 20 nt, synthetic construct
  source 1..20: mol_type = other RNA
tcttattgattcagatgaca

SEQ ID NO: 52357 - RNA, 20 nt, synthetic construct
  source 1..20: mol_type = other RNA
tcttattggttatctgtact

SEQ ID NO: 52358 - RNA, 20 nt, synthetic construct
  source 1..20: mol_type = other RNA
tcttatttccttccagttta

SEQ ID NO: 52359 - RNA, 20 nt, synthetic construct
  source 1..20: mol_type = other RNA
tcttatttgttactgatctg

SEQ ID NO: 52360 - RNA, 20 nt, synthetic construct
  source 1..20: mol_type = other RNA
tcttattttttcccagatac

SEQ ID NO: 52361 - RNA, 20 nt, synthetic construct
  source 1..20: mol_type = other RNA
tcttcaaaagacatcactaa

SEQ ID NO: 52362 - RNA, 20 nt, synthetic construct
  source 1..20: mol_type = other RNA
tcttcaaaatctgatgtgta

SEQ ID NO: 52363 - RNA, 20 nt, synthetic construct
  source 1..20: mol_type = other RNA
tcttcaaagttatgtttatg

SEQ ID NO: 52364 - RNA, 20 nt, synthetic construct
  source 1..20: mol_type = other RNA
tcttcaaccatacttttcaa

SEQ ID NO: 52365 - RNA, 20 nt, synthetic construct
  source 1..20: mol_type = other RNA
tcttcaacctcaactttagg

SEQ ID NO: 52366 - RNA, 20 nt, synthetic construct
  source 1..20: mol_type = other RNA
tcttcaagatactgcactaa

SEQ ID NO: 52367 - RNA, 20 nt, synthetic construct
  source 1..20: mol_type = other RNA
tcttcaagatttcataggca

SEQ ID NO: 52368 - RNA, 20 nt, synthetic construct
  source 1..20: mol_type = other RNA
tcttcaagcattgggagctt

SEQ ID NO: 52369 - RNA, 20 nt, synthetic construct
  source 1..20: mol_type = other RNA
tcttcaatattttggaagac

SEQ ID NO: 52370 - RNA, 20 nt, synthetic construct
  source 1..20: mol_type = other RNA
tcttcacaaacaaatccttt

SEQ ID NO: 52371 - RNA, 20 nt, synthetic construct
  source 1..20: mol_type = other RNA
tcttcacacattaactatgg

SEQ ID NO: 52372 - RNA, 20 nt, synthetic construct
  source 1..20: mol_type = other RNA
tcttcacacttagttcaaga

SEQ ID NO: 52373 - RNA, 20 nt, synthetic construct
  source 1..20: mol_type = other RNA
tcttcaccaactgaagcggg

SEQ ID NO: 52374 - RNA, 20 nt, synthetic construct
  source 1..20: mol_type = other RNA
tcttcaccattccagccatt

SEQ ID NO: 52375 - RNA, 20 nt, synthetic construct
  source 1..20: mol_type = other RNA
tcttcaccgtgcaactagag

SEQ ID NO: 52376 - RNA, 20 nt, synthetic construct
  source 1..20: mol_type = other RNA
tcttcacgtggcgctccctc

SEQ ID NO: 52377 - RNA, 20 nt, synthetic construct
  source 1..20: mol_type = other RNA
tcttcactcttaaaaggaga

SEQ ID NO: 52378 - RNA, 20 nt, synthetic construct
  source 1..20: mol_type = other RNA
tcttcactgactacacatac

SEQ ID NO: 52379 - RNA, 20 nt, synthetic construct
  source 1..20: mol_type = other RNA
tcttcagaagaaattacttc

SEQ ID NO: 52380 - RNA, 20 nt, synthetic construct
  source 1..20: mol_type = other RNA
tcttcagaagaggataaggg

SEQ ID NO: 52381 - RNA, 20 nt, synthetic construct
  source 1..20: mol_type = other RNA
tcttcagaggccctggtgct

SEQ ID NO: 52382 - RNA, 20 nt, synthetic construct
  source 1..20: mol_type = other RNA
tcttcagaggtctgttactc

SEQ ID NO: 52383 - RNA, 20 nt, synthetic construct
  source 1..20: mol_type = other RNA
tcttcagcaaggaccattag

SEQ ID NO: 52384 - RNA, 20 nt, synthetic construct
  source 1..20: mol_type = other RNA
tcttcaggtctctctgaaat

SEQ ID NO: 52385 - RNA, 20 nt, synthetic construct
  source 1..20: mol_type = other RNA
tcttcatcagtccctgtgtt

SEQ ID NO: 52386 - RNA, 20 nt, synthetic construct
  source 1..20: mol_type = other RNA
tcttcatggactagactgcc

SEQ ID NO: 52387 - RNA, 20 nt, synthetic construct
  source 1..20: mol_type = other RNA
tcttcatttaattctatctg

SEQ ID NO: 52388 - RNA, 20 nt, synthetic construct
  source 1..20: mol_type = other RNA
tcttcatttctaagccatgt

SEQ ID NO: 52389 - RNA, 20 nt, synthetic construct
  source 1..20: mol_type = other RNA
tcttccaaaatattgaagag

SEQ ID NO: 52390 - RNA, 20 nt, synthetic construct
  source 1..20: mol_type = other RNA
tcttccaaataatcccgcac

SEQ ID NO: 52391 - RNA, 20 nt, synthetic construct
  source 1..20: mol_type = other RNA
tcttccaattgcagaaaaat

SEQ ID NO: 52392 - RNA, 20 nt, synthetic construct
  source 1..20: mol_type = other RNA
tcttccactagtgggatcaa

SEQ ID NO: 52393 - RNA, 20 nt, synthetic construct
  source 1..20: mol_type = other RNA
tcttccagaaggagaaaaca

SEQ ID NO: 52394 - RNA, 20 nt, synthetic construct
  source 1..20: mol_type = other RNA
tcttccagcctggtaatgaa

SEQ ID NO: 52395 - RNA, 20 nt, synthetic construct
  source 1..20: mol_type = other RNA
tcttccatacgaaagccttt

SEQ ID NO: 52396 - RNA, 20 nt, synthetic construct
  source 1..20: mol_type = other RNA
tcttccattttagatcaagt

SEQ ID NO: 52397 - RNA, 20 nt, synthetic construct
  source 1..20: mol_type = other RNA
tcttcccaatcctttgtgca

SEQ ID NO: 52398 - RNA, 20 nt, synthetic construct
  source 1..20: mol_type = other RNA
tcttcccatctcactcacct

SEQ ID NO: 52399 - RNA, 20 nt, synthetic construct
  source 1..20: mol_type = other RNA
tcttcccatgaacatggttt

SEQ ID NO: 52400 - RNA, 20 nt, synthetic construct
  source 1..20: mol_type = other RNA
tcttcccccaaaacttagga

SEQ ID NO: 52401 - RNA, 20 nt, synthetic construct
  source 1..20: mol_type = other RNA
tcttccctaaagagaatctt

SEQ ID NO: 52402 - RNA, 20 nt, synthetic construct
  source 1..20: mol_type = other RNA
tcttcccttaacctttttct

SEQ ID NO: 52403 - RNA, 20 nt, synthetic construct
  source 1..20: mol_type = other RNA
tcttcccttgtgcacctcgg

SEQ ID NO: 52404 - RNA, 20 nt, synthetic construct
  source 1..20: mol_type = other RNA
tcttccgtctcaagattgtg

SEQ ID NO: 52405 - RNA, 20 nt, synthetic construct
  source 1..20: mol_type = other RNA
tcttcctcatccctcatatc

SEQ ID NO: 52406 - RNA, 20 nt, synthetic construct
  source 1..20: mol_type = other RNA
tcttcctcctctggacatta

SEQ ID NO: 52407 - RNA, 20 nt, synthetic construct
  source 1..20: mol_type = other RNA
tcttcctgtatatctccttt

SEQ ID NO: 52408 - RNA, 20 nt, synthetic construct
  source 1..20: mol_type = other RNA
tcttcctgtcttggacccat

SEQ ID NO: 52409 - RNA, 20 nt, synthetic construct
  source 1..20: mol_type = other RNA
tcttcctgttgctttaacct

SEQ ID NO: 52410 - RNA, 20 nt, synthetic construct
  source 1..20: mol_type = other RNA
tcttccttaatgtttagtag

SEQ ID NO: 52411 - RNA, 20 nt, synthetic construct
  source 1..20: mol_type = other RNA
tcttccttatccgataaagg

SEQ ID NO: 52412 - RNA, 20 nt, synthetic construct
  source 1..20: mol_type = other RNA
tcttcgagggggctgagtat

SEQ ID NO: 52413 - RNA, 20 nt, synthetic construct
  source 1..20: mol_type = other RNA
tcttcgctcttttaaaaatt

SEQ ID NO: 52414 - RNA, 20 nt, synthetic construct
  source 1..20: mol_type = other RNA
tcttcgggtgtcagaattcc

SEQ ID NO: 52415 - RNA, 20 nt, synthetic construct
  source 1..20: mol_type = other RNA
tcttctaaccctcaaatgcc

SEQ ID NO: 52416 - RNA, 20 nt, synthetic construct
  source 1..20: mol_type = other RNA
tcttctaagctaagagtttt

SEQ ID NO: 52417 - RNA, 20 nt, synthetic construct
  source 1..20: mol_type = other RNA
tcttctaataggaagtggct

SEQ ID NO: 52418 - RNA, 20 nt, synthetic construct
  source 1..20: mol_type = other RNA
tcttctaccttttgttatta

SEQ ID NO: 52419 - RNA, 20 nt, synthetic construct
  source 1..20: mol_type = other RNA
tcttctactcactgtactac

SEQ ID NO: 52420 - RNA, 20 nt, synthetic construct
  source 1..20: mol_type = other RNA
tcttctactgtgaattcact

SEQ ID NO: 52421 - RNA, 20 nt, synthetic construct
  source 1..20: mol_type = other RNA
tcttctagctttcagcactg

SEQ ID NO: 52422 - RNA, 20 nt, synthetic construct
  source 1..20: mol_type = other RNA
tcttctagtcacatttgctt

SEQ ID NO: 52423 - RNA, 20 nt, synthetic construct
  source 1..20: mol_type = other RNA
tcttctattccagagaattc

SEQ ID NO: 52424 - RNA, 20 nt, synthetic construct
  source 1..20: mol_type = other RNA
tcttctcagatctgttgcag

SEQ ID NO: 52425 - RNA, 20 nt, synthetic construct
  source 1..20: mol_type = other RNA
tcttctcagttgcagcatgc

SEQ ID NO: 52426 - RNA, 20 nt, synthetic construct
  source 1..20: mol_type = other RNA
tcttctcatacagattttat

SEQ ID NO: 52427 - RNA, 20 nt, synthetic construct
  source 1..20: mol_type = other RNA
tcttctccaaggaaagtgtg

SEQ ID NO: 52428 - RNA, 20 nt, synthetic construct
  source 1..20: mol_type = other RNA
tcttctccctcttcgctctt

SEQ ID NO: 52429 - RNA, 20 nt, synthetic construct
  source 1..20: mol_type = other RNA
tcttctctaatgtaaacagc

SEQ ID NO: 52430 - RNA, 20 nt, synthetic construct
  source 1..20: mol_type = other RNA
tcttctctcctttgaggtaa

SEQ ID NO: 52431 - RNA, 20 nt, synthetic construct
  source 1..20: mol_type = other RNA
tcttctctctctgcttcact

SEQ ID NO: 52432 - RNA, 20 nt, synthetic construct
  source 1..20: mol_type = other RNA
tcttctgaagaaattatctg

SEQ ID NO: 52433 - RNA, 20 nt, synthetic construct
  source 1..20: mol_type = other RNA
tcttctgaagaggctttctg

SEQ ID NO: 52434 - RNA, 20 nt, synthetic construct
  source 1..20: mol_type = other RNA
tcttctgatcacagaagtgt

SEQ ID NO: 52435 - RNA, 20 nt, synthetic construct
  source 1..20: mol_type = other RNA
tcttctgcaagttgctatcc

SEQ ID NO: 52436 - RNA, 20 nt, synthetic construct
  source 1..20: mol_type = other RNA
tcttctggatagcattatcc

SEQ ID NO: 52437 - RNA, 20 nt, synthetic construct
  source 1..20: mol_type = other RNA
tcttctgtaatattaaccaa

SEQ ID NO: 52438 - RNA, 20 nt, synthetic construct
  source 1..20: mol_type = other RNA
tcttctgtattaaatcttca

SEQ ID NO: 52439 - RNA, 20 nt, synthetic construct
  source 1..20: mol_type = other RNA
tcttctgttattttagaaag

SEQ ID NO: 52440 - RNA, 20 nt, synthetic construct
  source 1..20: mol_type = other RNA
tcttctgttggagagatggt

SEQ ID NO: 52441 - RNA, 20 nt, synthetic construct
  source 1..20: mol_type = other RNA
tcttctgtttttcttagtct

SEQ ID NO: 52442 - RNA, 20 nt, synthetic construct
  source 1..20: mol_type = other RNA
tcttcttagtgttcccttct

SEQ ID NO: 52443 - RNA, 20 nt, synthetic construct
  source 1..20: mol_type = other RNA
tcttcttatttgttactgat

SEQ ID NO: 52444 - RNA, 20 nt, synthetic construct
  source 1..20: mol_type = other RNA
tcttcttctaagctaagagt

SEQ ID NO: 52445 - RNA, 20 nt, synthetic construct
  source 1..20: mol_type = other RNA
tcttcttctgttattttaga

SEQ ID NO: 52446 - RNA, 20 nt, synthetic construct
  source 1..20: mol_type = other RNA
tcttcttggattttcttcat

SEQ ID NO: 52447 - RNA, 20 nt, synthetic construct
  source 1..20: mol_type = other RNA
tcttcttgttttgttctcgt

SEQ ID NO: 52448 - RNA, 20 nt, synthetic construct
  source 1..20: mol_type = other RNA
tcttctttggctcaatggtt

SEQ ID NO: 52449 - RNA, 20 nt, synthetic construct
  source 1..20: mol_type = other RNA
tcttcttttacttgcttggt

SEQ ID NO: 52450 - RNA, 20 nt, synthetic construct
  source 1..20: mol_type = other RNA
tcttgaaaggggccaggtgt

SEQ ID NO: 52451 - RNA, 20 nt, synthetic construct
  source 1..20: mol_type = other RNA
tcttgaactaagtgtgaaga

SEQ ID NO: 52452 - RNA, 20 nt, synthetic construct
  source 1..20: mol_type = other RNA
tcttgaagaaaccaagagca

SEQ ID NO: 52453 - RNA, 20 nt, synthetic construct
  source 1..20: mol_type = other RNA
tcttgaagatggcaaacaga

SEQ ID NO: 52454 - RNA, 20 nt, synthetic construct
  source 1..20: mol_type = other RNA
tcttgaagtcagttacagca

SEQ ID NO: 52455 - RNA, 20 nt, synthetic construct
  source 1..20: mol_type = other RNA
tcttgaatagcatcttagct

SEQ ID NO: 52456 - RNA, 20 nt, synthetic construct
  source 1..20: mol_type = other RNA
tcttgaatctctctatccac

SEQ ID NO: 52457 - RNA, 20 nt, synthetic construct
  source 1..20: mol_type = other RNA
tcttgacatgattgaggact

SEQ ID NO: 52458 - RNA, 20 nt, synthetic construct
  source 1..20: mol_type = other RNA
tcttgacctcagtggtagtt

SEQ ID NO: 52459 - RNA, 20 nt, synthetic construct
  source 1..20: mol_type = other RNA
tcttgaccttagttttcact

SEQ ID NO: 52460 - RNA, 20 nt, synthetic construct
  source 1..20: mol_type = other RNA
tcttgaccttgtgcatgtgc

SEQ ID NO: 52461 - RNA, 20 nt, synthetic construct
  source 1..20: mol_type = other RNA
tcttgacttcacttccaagt

SEQ ID NO: 52462 - RNA, 20 nt, synthetic construct
  source 1..20: mol_type = other RNA
tcttgagacggaagactcat

SEQ ID NO: 52463 - RNA, 20 nt, synthetic construct
  source 1..20: mol_type = other RNA
tcttgagagtctcttaagac

SEQ ID NO: 52464 - RNA, 20 nt, synthetic construct
  source 1..20: mol_type = other RNA
tcttgagttaggaatttaca

SEQ ID NO: 52465 - RNA, 20 nt, synthetic construct
  source 1..20: mol_type = other RNA
tcttgatgatagaataccac

SEQ ID NO: 52466 - RNA, 20 nt, synthetic construct
  source 1..20: mol_type = other RNA
tcttgcaaaacaatagccca

SEQ ID NO: 52467 - RNA, 20 nt, synthetic construct
  source 1..20: mol_type = other RNA
tcttgcaaaacggaaacttt

SEQ ID NO: 52468 - RNA, 20 nt, synthetic construct
  source 1..20: mol_type = other RNA
tcttgcataactcgtaatgc

SEQ ID NO: 52469 - RNA, 20 nt, synthetic construct
  source 1..20: mol_type = other RNA
tcttgcattagagccccaag

SEQ ID NO: 52470 - RNA, 20 nt, synthetic construct
  source 1..20: mol_type = other RNA
tcttgcccaagctggtcctg

SEQ ID NO: 52471 - RNA, 20 nt, synthetic construct
  source 1..20: mol_type = other RNA
tcttgcctaggctggagtgc

SEQ ID NO: 52472 - RNA, 20 nt, synthetic construct
  source 1..20: mol_type = other RNA
tcttgcggtcttttagccaa

SEQ ID NO: 52473 - RNA, 20 nt, synthetic construct
  source 1..20: mol_type = other RNA
tcttgctaaacatgtatact

SEQ ID NO: 52474 - RNA, 20 nt, synthetic construct
  source 1..20: mol_type = other RNA
tcttgctctgtcacccacgt

SEQ ID NO: 52475 - RNA, 20 nt, synthetic construct
  source 1..20: mol_type = other RNA
tcttgctggaagttggccca

SEQ ID NO: 52476 - RNA, 20 nt, synthetic construct
  source 1..20: mol_type = other RNA
tcttgctttgctgccccagc

SEQ ID NO: 52477 - RNA, 20 nt, synthetic construct
  source 1..20: mol_type = other RNA
tcttggaaatgatacctcat

SEQ ID NO: 52478 - RNA, 20 nt, synthetic construct
  source 1..20: mol_type = other RNA
tcttggaaattagaaatgtg

SEQ ID NO: 52479 - RNA, 20 nt, synthetic construct
  source 1..20: mol_type = other RNA
tcttggaatgtgcacctcca

SEQ ID NO: 52480 - RNA, 20 nt, synthetic construct
  source 1..20: mol_type = other RNA
tcttggacccatgcccatgt

SEQ ID NO: 52481 - RNA, 20 nt, synthetic construct
  source 1..20: mol_type = other RNA
tcttggagtaaacctgcaat

SEQ ID NO: 52482 - RNA, 20 nt, synthetic construct
  source 1..20: mol_type = other RNA
tcttggattttcttcattta

SEQ ID NO: 52483 - RNA, 20 nt, synthetic construct
  source 1..20: mol_type = other RNA
tcttggccattttcttttaa

SEQ ID NO: 52484 - RNA, 20 nt, synthetic construct
  source 1..20: mol_type = other RNA
tcttggccgaatgtggtggt

SEQ ID NO: 52485 - RNA, 20 nt, synthetic construct
  source 1..20: mol_type = other RNA
tcttggctattgtcagtaat

SEQ ID NO: 52486 - RNA, 20 nt, synthetic construct
  source 1..20: mol_type = other RNA
tcttggcttttggcagcgta

SEQ ID NO: 52487 - RNA, 20 nt, synthetic construct
  source 1..20: mol_type = other RNA
tcttgggaatactttcccat

SEQ ID NO: 52488 - RNA, 20 nt, synthetic construct
  source 1..20: mol_type = other RNA
tcttggggctctaatgcaag

SEQ ID NO: 52489 - RNA, 20 nt, synthetic construct
  source 1..20: mol_type = other RNA
tcttgggtgaataacccata

SEQ ID NO: 52490 - RNA, 20 nt, synthetic construct
  source 1..20: mol_type = other RNA
tcttggtagtttgcacgttt

SEQ ID NO: 52491 - RNA, 20 nt, synthetic construct
  source 1..20: mol_type = other RNA
tcttggtctgcagactcttg

SEQ ID NO: 52492 - RNA, 20 nt, synthetic construct
  source 1..20: mol_type = other RNA
tcttggtctttctcccaggt

SEQ ID NO: 52493 - RNA, 20 nt, synthetic construct
  source 1..20: mol_type = other RNA
tcttggtcttttgatttttt

SEQ ID NO: 52494 - RNA, 20 nt, synthetic construct
  source 1..20: mol_type = other RNA
tcttggtggtaactgatgtg

SEQ ID NO: 52495 - RNA, 20 nt, synthetic construct
  source 1..20: mol_type = other RNA
tcttggtgtgctcttttcat

SEQ ID NO: 52496 - RNA, 20 nt, synthetic construct
  source 1..20: mol_type = other RNA
tcttggttaatattacagaa

SEQ ID NO: 52497 - RNA, 20 nt, synthetic construct
  source 1..20: mol_type = other RNA
tcttggtttcttcaagatac

SEQ ID NO: 52498 - RNA, 20 nt, synthetic construct
  source 1..20: mol_type = other RNA
tcttgtactcccagcctcaa

SEQ ID NO: 52499 - RNA, 20 nt, synthetic construct
  source 1..20: mol_type = other RNA
tcttgtagtatttttgcaac

SEQ ID NO: 52500 - RNA, 20 nt, synthetic construct
  source 1..20: mol_type = other RNA
tcttgtcaataatttggatg

SEQ ID NO: 52501 - RNA, 20 nt, synthetic construct
  source 1..20: mol_type = other RNA
tcttgtcataacagtattgt

SEQ ID NO: 52502 - RNA, 20 nt, synthetic construct
  source 1..20: mol_type = other RNA
tcttgtcatgaatgaatgtt

SEQ ID NO: 52503 - RNA, 20 nt, synthetic construct
  source 1..20: mol_type = other RNA
tcttgtcccggcatgcctct

SEQ ID NO: 52504 - RNA, 20 nt, synthetic construct
  source 1..20: mol_type = other RNA
tcttgtctcaacctttgcct

SEQ ID NO: 52505 - RNA, 20 nt, synthetic construct
  source 1..20: mol_type = other RNA
tcttgtcttttctttttctt

SEQ ID NO: 52506 - RNA, 20 nt, synthetic construct
  source 1..20: mol_type = other RNA
tcttgtgaattgataaaagt

SEQ ID NO: 52507 - RNA, 20 nt, synthetic construct
  source 1..20: mol_type = other RNA
tcttgtgcatcctttatacc

SEQ ID NO: 52508 - RNA, 20 nt, synthetic construct
  source 1..20: mol_type = other RNA
tcttgtggctgacatgtgta

SEQ ID NO: 52509 - RNA, 20 nt, synthetic construct
  source 1..20: mol_type = other RNA
tcttgtgggtattttgttgt

SEQ ID NO: 52510 - RNA, 20 nt, synthetic construct
  source 1..20: mol_type = other RNA
tcttgtgtatcttttgttag

SEQ ID NO: 52511 - RNA, 20 nt, synthetic construct
  source 1..20: mol_type = other RNA
tcttgttaagcattttccgg

SEQ ID NO: 52512 - RNA, 20 nt, synthetic construct
  source 1..20: mol_type = other RNA
tcttgttagaattttgcttt

SEQ ID NO: 52513 - RNA, 20 nt, synthetic construct
  source 1..20: mol_type = other RNA
tcttgttagtaggaaaacca

SEQ ID NO: 52514 - RNA, 20 nt, synthetic construct
  source 1..20: mol_type = other RNA
tcttgttataagcaaagata

SEQ ID NO: 52515 - RNA, 20 nt, synthetic construct
  source 1..20: mol_type = other RNA
tcttgttcaaaaaccttttt

SEQ ID NO: 52516 - RNA, 20 nt, synthetic construct
  source 1..20: mol_type = other RNA
tcttgttgaggatgactgtc

SEQ ID NO: 52517 - RNA, 20 nt, synthetic construct
  source 1..20: mol_type = other RNA
tcttgtttacccagtgtgtt

SEQ ID NO: 52518 - RNA, 20 nt, synthetic construct
  source 1..20: mol_type = other RNA
tcttgttttcttgagatgga

SEQ ID NO: 52519 - RNA, 20 nt, synthetic construct
  source 1..20: mol_type = other RNA
tcttgttttgttctcgttca

SEQ ID NO: 52520 - RNA, 20 nt, synthetic construct
  source 1..20: mol_type = other RNA
tctttaaaaccagagcggaa

SEQ ID NO: 52521 - RNA, 20 nt, synthetic construct
  source 1..20: mol_type = other RNA
tctttaaaactgctgagtct

SEQ ID NO: 52522 - RNA, 20 nt, synthetic construct
  source 1..20: mol_type = other RNA
tctttaaaagaaagctctca

SEQ ID NO: 52523 - RNA, 20 nt, synthetic construct
  source 1..20: mol_type = other RNA
tctttaaagctgaactcctt

SEQ ID NO: 52524 - RNA, 20 nt, synthetic construct
  source 1..20: mol_type = other RNA
tctttaattatgagcattcc

SEQ ID NO: 52525 - RNA, 20 nt, synthetic construct
  source 1..20: mol_type = other RNA
tctttacttcccttctcgaa

SEQ ID NO: 52526 - RNA, 20 nt, synthetic construct
  source 1..20: mol_type = other RNA
tctttactttcagctcaaac

SEQ ID NO: 52527 - RNA, 20 nt, synthetic construct
  source 1..20: mol_type = other RNA
tctttaggaagcttccttga

SEQ ID NO: 52528 - RNA, 20 nt, synthetic construct
  source 1..20: mol_type = other RNA
tctttagggaagatagtact

SEQ ID NO: 52529 - RNA, 20 nt, synthetic construct
  source 1..20: mol_type = other RNA
tctttaggtgttttttcctt

SEQ ID NO: 52530 - RNA, 20 nt, synthetic construct
  source 1..20: mol_type = other RNA
tctttagtgttgcttggtgt

SEQ ID NO: 52531 - RNA, 20 nt, synthetic construct
  source 1..20: mol_type = other RNA
tctttatagcatttgaaaac

SEQ ID NO: 52532 - RNA, 20 nt, synthetic construct
  source 1..20: mol_type = other RNA
tctttatatattctggatgt

SEQ ID NO: 52533 - RNA, 20 nt, synthetic construct
  source 1..20: mol_type = other RNA
tctttatctccacatttcta

SEQ ID NO: 52534 - RNA, 20 nt, synthetic construct
  source 1..20: mol_type = other RNA
tctttatgccaatatcacac

SEQ ID NO: 52535 - RNA, 20 nt, synthetic construct
  source 1..20: mol_type = other RNA
tctttcaaatgtgacagaac

SEQ ID NO: 52536 - RNA, 20 nt, synthetic construct
  source 1..20: mol_type = other RNA
tctttcaaggggccttttgt

SEQ ID NO: 52537 - RNA, 20 nt, synthetic construct
  source 1..20: mol_type = other RNA
tctttcagccatcccagcta

SEQ ID NO: 52538 - RNA, 20 nt, synthetic construct
  source 1..20: mol_type = other RNA
tctttcagtatgtgtctctg

SEQ ID NO: 52539 - RNA, 20 nt, synthetic construct
  source 1..20: mol_type = other RNA
tctttcatatctgattttgt

SEQ ID NO: 52540 - RNA, 20 nt, synthetic construct
  source 1..20: mol_type = other RNA
tctttccactctctggctgc

SEQ ID NO: 52541 - RNA, 20 nt, synthetic construct
  source 1..20: mol_type = other RNA
tctttccattcaatccttgt

SEQ ID NO: 52542 - RNA, 20 nt, synthetic construct
  source 1..20: mol_type = other RNA
tctttcccattaccaaaacc

SEQ ID NO: 52543 - RNA, 20 nt, synthetic construct
  source 1..20: mol_type = other RNA
tctttcctgatcacaccctc

SEQ ID NO: 52544 - RNA, 20 nt, synthetic construct
  source 1..20: mol_type = other RNA
tctttcctgatcagcaccct

SEQ ID NO: 52545 - RNA, 20 nt, synthetic construct
  source 1..20: mol_type = other RNA
tctttcctgtgatttatgtg

SEQ ID NO: 52546 - RNA, 20 nt, synthetic construct
  source 1..20: mol_type = other RNA
tctttcgcatcattcaaatg

SEQ ID NO: 52547 - RNA, 20 nt, synthetic construct
  source 1..20: mol_type = other RNA
tctttcggatatttactaag

SEQ ID NO: 52548 - RNA, 20 nt, synthetic construct
  source 1..20: mol_type = other RNA
tctttctaaaataacagaag

SEQ ID NO: 52549 - RNA, 20 nt, synthetic construct
  source 1..20: mol_type = other RNA
tctttctagattcatatgct

SEQ ID NO: 52550 - RNA, 20 nt, synthetic construct
  source 1..20: mol_type = other RNA
tctttctcaacttcctgttt

SEQ ID NO: 52551 - RNA, 20 nt, synthetic construct
  source 1..20: mol_type = other RNA
tctttctcccaggtcagtag

SEQ ID NO: 52552 - RNA, 20 nt, synthetic construct
  source 1..20: mol_type = other RNA
tctttctctttcagccatcc

SEQ ID NO: 52553 - RNA, 20 nt, synthetic construct
  source 1..20: mol_type = other RNA
tctttctgaaattctcatta

SEQ ID NO: 52554 - RNA, 20 nt, synthetic construct
  source 1..20: mol_type = other RNA
tctttctgaactcaaaagtg

SEQ ID NO: 52555 - RNA, 20 nt, synthetic construct
  source 1..20: mol_type = other RNA
tctttctggggatgctgtct

SEQ ID NO: 52556 - RNA, 20 nt, synthetic construct
  source 1..20: mol_type = other RNA
tctttctttcaaatgtgaca

SEQ ID NO: 52557 - RNA, 20 nt, synthetic construct
  source 1..20: mol_type = other RNA
tctttgaaaggaatccggct

SEQ ID NO: 52558 - RNA, 20 nt, synthetic construct
  source 1..20: mol_type = other RNA
tctttgaataaagggtcaga

SEQ ID NO: 52559 - RNA, 20 nt, synthetic construct
  source 1..20: mol_type = other RNA
tctttgagtagttcatgtta

SEQ ID NO: 52560 - RNA, 20 nt, synthetic construct
  source 1..20: mol_type = other RNA
tctttgatccattttgagtt

SEQ ID NO: 52561 - RNA, 20 nt, synthetic construct
  source 1..20: mol_type = other RNA
tctttgctaataagtgagtt

SEQ ID NO: 52562 - RNA, 20 nt, synthetic construct
  source 1..20: mol_type = other RNA
tctttgcttataacaagaaa

SEQ ID NO: 52563 - RNA, 20 nt, synthetic construct
  source 1..20: mol_type = other RNA
tctttggaaaaatgtccgtt

SEQ ID NO: 52564 - RNA, 20 nt, synthetic construct
  source 1..20: mol_type = other RNA
tctttggagctgtatttttg

SEQ ID NO: 52565 - RNA, 20 nt, synthetic construct
  source 1..20: mol_type = other RNA
tctttggatatccccatttt

SEQ ID NO: 52566 - RNA, 20 nt, synthetic construct
  source 1..20: mol_type = other RNA
tctttggcaaacttagaata

SEQ ID NO: 52567 - RNA, 20 nt, synthetic construct
  source 1..20: mol_type = other RNA
tctttggcccatatcctttt

SEQ ID NO: 52568 - RNA, 20 nt, synthetic construct
  source 1..20: mol_type = other RNA
tctttggcccattttcgaat

SEQ ID NO: 52569 - RNA, 20 nt, synthetic construct
  source 1..20: mol_type = other RNA
tctttggctcaatggttaag

SEQ ID NO: 52570 - RNA, 20 nt, synthetic construct
  source 1..20: mol_type = other RNA
tctttggctcttagaaaata

SEQ ID NO: 52571 - RNA, 20 nt, synthetic construct
  source 1..20: mol_type = other RNA
tctttggctgttagccttgc

SEQ ID NO: 52572 - RNA, 20 nt, synthetic construct
  source 1..20: mol_type = other RNA
tctttgggaaaatctctgac

SEQ ID NO: 52573 - RNA, 20 nt, synthetic construct
  source 1..20: mol_type = other RNA
tctttgggaaggccctgatt

SEQ ID NO: 52574 - RNA, 20 nt, synthetic construct
  source 1..20: mol_type = other RNA
tctttggggagataccttga

SEQ ID NO: 52575 - RNA, 20 nt, synthetic construct
  source 1..20: mol_type = other RNA
tctttgggggaagcaggaac

SEQ ID NO: 52576 - RNA, 20 nt, synthetic construct
  source 1..20: mol_type = other RNA
tctttgggtaatttatctcc

SEQ ID NO: 52577 - RNA, 20 nt, synthetic construct
  source 1..20: mol_type = other RNA
tctttggtgaaggttcatga

SEQ ID NO: 52578 - RNA, 20 nt, synthetic construct
  source 1..20: mol_type = other RNA
tctttggtgatcctaagcca

SEQ ID NO: 52579 - RNA, 20 nt, synthetic construct
  source 1..20: mol_type = other RNA
tctttggtgctgataaatgg

SEQ ID NO: 52580 - RNA, 20 nt, synthetic construct
  source 1..20: mol_type = other RNA
tctttggttttgactcagta

SEQ ID NO: 52581 - RNA, 20 nt, synthetic construct
  source 1..20: mol_type = other RNA
tctttgtacagtaattgtag

SEQ ID NO: 52582 - RNA, 20 nt, synthetic construct
  source 1..20: mol_type = other RNA
tctttgtctattccctacat

SEQ ID NO: 52583 - RNA, 20 nt, synthetic construct
  source 1..20: mol_type = other RNA
tctttgttacagcagctcta

SEQ ID NO: 52584 - RNA, 20 nt, synthetic construct
  source 1..20: mol_type = other RNA
tctttgtttatccttgcacc

SEQ ID NO: 52585 - RNA, 20 nt, synthetic construct
  source 1..20: mol_type = other RNA
tcttttaaacccatttcatg

SEQ ID NO: 52586 - RNA, 20 nt, synthetic construct
  source 1..20: mol_type = other RNA
tcttttaaagacctcaggtt

SEQ ID NO: 52587 - RNA, 20 nt, synthetic construct
  source 1..20: mol_type = other RNA
tcttttaaatgccaatttgg

SEQ ID NO: 52588 - RNA, 20 nt, synthetic construct
  source 1..20: mol_type = other RNA
tcttttaacagatggtcctt

SEQ ID NO: 52589 - RNA, 20 nt, synthetic construct
  source 1..20: mol_type = other RNA
tcttttaacttgctttgaat

SEQ ID NO: 52590 - RNA, 20 nt, synthetic construct
  source 1..20: mol_type = other RNA
tcttttaaggtttagaaaac

SEQ ID NO: 52591 - RNA, 20 nt, synthetic construct
  source 1..20: mol_type = other RNA
tcttttacttgcttggtttc

SEQ ID NO: 52592 - RNA, 20 nt, synthetic construct
  source 1..20: mol_type = other RNA
tcttttagagtaactgtcat

SEQ ID NO: 52593 - RNA, 20 nt, synthetic construct
  source 1..20: mol_type = other RNA
tcttttagccaacaaccata

SEQ ID NO: 52594 - RNA, 20 nt, synthetic construct
  source 1..20: mol_type = other RNA
tcttttataactgaacatgt

SEQ ID NO: 52595 - RNA, 20 nt, synthetic construct
  source 1..20: mol_type = other RNA
tcttttcaaaaacagcatat

SEQ ID NO: 52596 - RNA, 20 nt, synthetic construct
  source 1..20: mol_type = other RNA
tcttttcaaaaacccaactc

SEQ ID NO: 52597 - RNA, 20 nt, synthetic construct
  source 1..20: mol_type = other RNA
tcttttcacataaatttgcc

SEQ ID NO: 52598 - RNA, 20 nt, synthetic construct
  source 1..20: mol_type = other RNA
tcttttcactctaatatggt

SEQ ID NO: 52599 - RNA, 20 nt, synthetic construct
  source 1..20: mol_type = other RNA
tcttttcagtccagatatta

SEQ ID NO: 52600 - RNA, 20 nt, synthetic construct
  source 1..20: mol_type = other RNA
tcttttcatcactcactggc

SEQ ID NO: 52601 - RNA, 20 nt, synthetic construct
  source 1..20: mol_type = other RNA
tcttttcatgttgaccattt

SEQ ID NO: 52602 - RNA, 20 nt, synthetic construct
  source 1..20: mol_type = other RNA
tcttttccaaccaagcccaa

SEQ ID NO: 52603 - RNA, 20 nt, synthetic construct
  source 1..20: mol_type = other RNA
tcttttcctaccctgaggat

SEQ ID NO: 52604 - RNA, 20 nt, synthetic construct
  source 1..20: mol_type = other RNA
tcttttcctagactgccagg

SEQ ID NO: 52605 - RNA, 20 nt, synthetic construct
  source 1..20: mol_type = other RNA
tcttttcctcgttttcaaca

SEQ ID NO: 52606 - RNA, 20 nt, synthetic construct
  source 1..20: mol_type = other RNA
tcttttccttcttaagacat

SEQ ID NO: 52607 - RNA, 20 nt, synthetic construct
  source 1..20: mol_type = other RNA
tcttttcctttaacgtatct

SEQ ID NO: 52608 - RNA, 20 nt, synthetic construct
  source 1..20: mol_type = other RNA
tcttttctagtttctttttg

SEQ ID NO: 52609 - RNA, 20 nt, synthetic construct
  source 1..20: mol_type = other RNA
tcttttctatctgaacattt

SEQ ID NO: 52610 - RNA, 20 nt, synthetic construct
  source 1..20: mol_type = other RNA
tcttttctgacaatttcagg

SEQ ID NO: 52611 - RNA, 20 nt, synthetic construct
  source 1..20: mol_type = other RNA
tcttttcttaaaactttagg

SEQ ID NO: 52612 - RNA, 20 nt, synthetic construct
  source 1..20: mol_type = other RNA
tcttttgaagaagttcttaa

SEQ ID NO: 52613 - RNA, 20 nt, synthetic construct
  source 1..20: mol_type = other RNA
tcttttgacgcgcaacaatt

SEQ ID NO: 52614 - RNA, 20 nt, synthetic construct
  source 1..20: mol_type = other RNA
tcttttgagggtatcatatt

SEQ ID NO: 52615 - RNA, 20 nt, synthetic construct
  source 1..20: mol_type = other RNA
tcttttgatatttgttcaga

SEQ ID NO: 52616 - RNA, 20 nt, synthetic construct
  source 1..20: mol_type = other RNA
tcttttgcctggatgaatgc

SEQ ID NO: 52617 - RNA, 20 nt, synthetic construct
  source 1..20: mol_type = other RNA
tcttttgctgtatacccagg

SEQ ID NO: 52618 - RNA, 20 nt, synthetic construct
  source 1..20: mol_type = other RNA
tcttttgtaatctaaggatt

SEQ ID NO: 52619 - RNA, 20 nt, synthetic construct
  source 1..20: mol_type = other RNA
tcttttgtgggtaaattaag

SEQ ID NO: 52620 - RNA, 20 nt, synthetic construct
  source 1..20: mol_type = other RNA
tcttttgttgcctgtagttt

SEQ ID NO: 52621 - RNA, 20 nt, synthetic construct
  source 1..20: mol_type = other RNA
tctttttaaacaggtgtaag

SEQ ID NO: 52622 - RNA, 20 nt, synthetic construct
  source 1..20: mol_type = other RNA
tctttttacacttggagttt

SEQ ID NO: 52623 - RNA, 20 nt, synthetic construct
  source 1..20: mol_type = other RNA
tctttttactcatgtctacc

SEQ ID NO: 52624 - RNA, 20 nt, synthetic construct
  source 1..20: mol_type = other RNA
tctttttactcgagggtagc

SEQ ID NO: 52625 - RNA, 20 nt, synthetic construct
  source 1..20: mol_type = other RNA
tctttttagtaagaggtatc

SEQ ID NO: 52626 - RNA, 20 nt, synthetic construct
  source 1..20: mol_type = other RNA
tctttttcagcagcagagaa

SEQ ID NO: 52627 - RNA, 20 nt, synthetic construct
  source 1..20: mol_type = other RNA
tctttttccaggaccaattt

SEQ ID NO: 52628 - RNA, 20 nt, synthetic construct
  source 1..20: mol_type = other RNA
tctttttctagtttgaggtg

SEQ ID NO: 52629 - RNA, 20 nt, synthetic construct
  source 1..20: mol_type = other RNA
tctttttcttgctttgctgc

SEQ ID NO: 52630 - RNA, 20 nt, synthetic construct
  source 1..20: mol_type = other RNA
tctttttgacagatgagact

SEQ ID NO: 52631 - RNA, 20 nt, synthetic construct
  source 1..20: mol_type = other RNA
tctttttgtgacttgtttat

SEQ ID NO: 52632 - RNA, 20 nt, synthetic construct
  source 1..20: mol_type = other RNA
tctttttgtgtatatggtaa

SEQ ID NO: 52633 - RNA, 20 nt, synthetic construct
  source 1..20: mol_type = other RNA
tctttttgttttctccttct

SEQ ID NO: 52634 - RNA, 20 nt, synthetic construct
  source 1..20: mol_type = other RNA
tgaaaaaacaaaacaaaacc

SEQ ID NO: 52635 - RNA, 20 nt, synthetic construct
  source 1..20: mol_type = other RNA
tgaaaaaacttcccttagct

SEQ ID NO: 52636 - RNA, 20 nt, synthetic construct
  source 1..20: mol_type = other RNA
tgaaaaaatggtgcagccac

SEQ ID NO: 52637 - RNA, 20 nt, synthetic construct
  source 1..20: mol_type = other RNA
tgaaaaacacctcagttaaa

SEQ ID NO: 52638 - RNA, 20 nt, synthetic construct
  source 1..20: mol_type = other RNA
tgaaaaacagatcttggccg

SEQ ID NO: 52639 - RNA, 20 nt, synthetic construct
  source 1..20: mol_type = other RNA
tgaaaaacggaggttgcagt

SEQ ID NO: 52640 - RNA, 20 nt, synthetic construct
  source 1..20: mol_type = other RNA
tgaaaaagatactcttaaag

SEQ ID NO: 52641 - RNA, 20 nt, synthetic construct
  source 1..20: mol_type = other RNA
tgaaaaaggaaagtaactgt

SEQ ID NO: 52642 - RNA, 20 nt, synthetic construct
  source 1..20: mol_type = other RNA
tgaaaaagtactggaaatgg

SEQ ID NO: 52643 - RNA, 20 nt, synthetic construct
  source 1..20: mol_type = other RNA
tgaaaaatgacctaaaatct

SEQ ID NO: 52644 - RNA, 20 nt, synthetic construct
  source 1..20: mol_type = other RNA
tgaaaaatgagaaacctaag

SEQ ID NO: 52645 - RNA, 20 nt, synthetic construct
  source 1..20: mol_type = other RNA
tgaaaaatggttttatggta

SEQ ID NO: 52646 - RNA, 20 nt, synthetic construct
  source 1..20: mol_type = other RNA
tgaaaaatgtcaattttccc

SEQ ID NO: 52647 - RNA, 20 nt, synthetic construct
  source 1..20: mol_type = other RNA
tgaaaaattcactcctcatt

SEQ ID NO: 52648 - RNA, 20 nt, synthetic construct
  source 1..20: mol_type = other RNA
tgaaaaatttgacatgacag

SEQ ID NO: 52649 - RNA, 20 nt, synthetic construct
  source 1..20: mol_type = other RNA
tgaaaacacaaactgcagaa

SEQ ID NO: 52650 - RNA, 20 nt, synthetic construct
  source 1..20: mol_type = other RNA
tgaaaacacaacataccaaa

SEQ ID NO: 52651 - RNA, 20 nt, synthetic construct
  source 1..20: mol_type = other RNA
tgaaaacagctaggtgagtg

SEQ ID NO: 52652 - RNA, 20 nt, synthetic construct
  source 1..20: mol_type = other RNA
tgaaaacatgttttgttgtt

SEQ ID NO: 52653 - RNA, 20 nt, synthetic construct
  source 1..20: mol_type = other RNA
tgaaaacgaggaaaagagaa

SEQ ID NO: 52654 - RNA, 20 nt, synthetic construct
  source 1..20: mol_type = other RNA
tgaaaactaaggtcaagaga

SEQ ID NO: 52655 - RNA, 20 nt, synthetic construct
  source 1..20: mol_type = other RNA
tgaaaactcaactgcctcta

SEQ ID NO: 52656 - RNA, 20 nt, synthetic construct
  source 1..20: mol_type = other RNA
tgaaaagaaaaaggttaagg

SEQ ID NO: 52657 - RNA, 20 nt, synthetic construct
  source 1..20: mol_type = other RNA
tgaaaagaacaacatggtag

SEQ ID NO: 52658 - RNA, 20 nt, synthetic construct
  source 1..20: mol_type = other RNA
tgaaaagagcacaccaagac

SEQ ID NO: 52659 - RNA, 20 nt, synthetic construct
  source 1..20: mol_type = other RNA
tgaaaagcccaatctacagg

SEQ ID NO: 52660 - RNA, 20 nt, synthetic construct
  source 1..20: mol_type = other RNA
tgaaaagcctcaaacgaacc

SEQ ID NO: 52661 - RNA, 20 nt, synthetic construct
  source 1..20: mol_type = other RNA
tgaaaagctcaaaaatactc

SEQ ID NO: 52662 - RNA, 20 nt, synthetic construct
  source 1..20: mol_type = other RNA
tgaaaagcttcccccctctc

SEQ ID NO: 52663 - RNA, 20 nt, synthetic construct
  source 1..20: mol_type = other RNA
tgaaaaggcaaaccacacag

SEQ ID NO: 52664 - RNA, 20 nt, synthetic construct
  source 1..20: mol_type = other RNA
tgaaaagtatggttgaagaa

SEQ ID NO: 52665 - RNA, 20 nt, synthetic construct
  source 1..20: mol_type = other RNA
tgaaaagtgtttgtcacata

SEQ ID NO: 52666 - RNA, 20 nt, synthetic construct
  source 1..20: mol_type = other RNA
tgaaaataaaaagtatcgtg

SEQ ID NO: 52667 - RNA, 20 nt, synthetic construct
  source 1..20: mol_type = other RNA
tgaaaataatacctaacagc

SEQ ID NO: 52668 - RNA, 20 nt, synthetic construct
  source 1..20: mol_type = other RNA
tgaaaatactaacgatcctt

SEQ ID NO: 52669 - RNA, 20 nt, synthetic construct
  source 1..20: mol_type = other RNA
tgaaaatagtaactttctgc

SEQ ID NO: 52670 - RNA, 20 nt, synthetic construct
  source 1..20: mol_type = other RNA
tgaaaatatgaatggaaatg

SEQ ID NO: 52671 - RNA, 20 nt, synthetic construct
  source 1..20: mol_type = other RNA
tgaaaatcattttggcaaat

SEQ ID NO: 52672 - RNA, 20 nt, synthetic construct
  source 1..20: mol_type = other RNA
tgaaaatgcccttatttaat

SEQ ID NO: 52673 - RNA, 20 nt, synthetic construct
  source 1..20: mol_type = other RNA
tgaaaatggtttaggctgtc

SEQ ID NO: 52674 - RNA, 20 nt, synthetic construct
  source 1..20: mol_type = other RNA
tgaaaatgttccctcttcaa

SEQ ID NO: 52675 - RNA, 20 nt, synthetic construct
  source 1..20: mol_type = other RNA
tgaaaattagctggatgtgg

SEQ ID NO: 52676 - RNA, 20 nt, synthetic construct
  source 1..20: mol_type = other RNA
tgaaaattccttcccctttc

SEQ ID NO: 52677 - RNA, 20 nt, synthetic construct
  source 1..20: mol_type = other RNA
tgaaaattgaattataggca

SEQ ID NO: 52678 - RNA, 20 nt, synthetic construct
  source 1..20: mol_type = other RNA
tgaaaattggcgtacatgta

SEQ ID NO: 52679 - RNA, 20 nt, synthetic construct
  source 1..20: mol_type = other RNA
tgaaaatttccagcatttta

SEQ ID NO: 52680 - RNA, 20 nt, synthetic construct
  source 1..20: mol_type = other RNA
tgaaaatttttgtctggaac

SEQ ID NO: 52681 - RNA, 20 nt, synthetic construct
  source 1..20: mol_type = other RNA
tgaaacaatactttagacat

SEQ ID NO: 52682 - RNA, 20 nt, synthetic construct
  source 1..20: mol_type = other RNA
tgaaacaatcgcaatccaaa

SEQ ID NO: 52683 - RNA, 20 nt, synthetic construct
  source 1..20: mol_type = other RNA
tgaaacacttgtgtaactac

SEQ ID NO: 52684 - RNA, 20 nt, synthetic construct
  source 1..20: mol_type = other RNA
tgaaaccaagcaagtaaaag

SEQ ID NO: 52685 - RNA, 20 nt, synthetic construct
  source 1..20: mol_type = other RNA
tgaaaccagtgctctccccc

SEQ ID NO: 52686 - RNA, 20 nt, synthetic construct
  source 1..20: mol_type = other RNA
tgaaaccagtgggtcagcta

SEQ ID NO: 52687 - RNA, 20 nt, synthetic construct
  source 1..20: mol_type = other RNA
tgaaaccccgcatactgtgc

SEQ ID NO: 52688 - RNA, 20 nt, synthetic construct
  source 1..20: mol_type = other RNA
tgaaaccctcacgaaagcgg

SEQ ID NO: 52689 - RNA, 20 nt, synthetic construct
  source 1..20: mol_type = other RNA
tgaaacctgccatggtgtta

SEQ ID NO: 52690 - RNA, 20 nt, synthetic construct
  source 1..20: mol_type = other RNA
tgaaacgaccttgctcattc

SEQ ID NO: 52691 - RNA, 20 nt, synthetic construct
  source 1..20: mol_type = other RNA
tgaaacgatgcattccagat

SEQ ID NO: 52692 - RNA, 20 nt, synthetic construct
  source 1..20: mol_type = other RNA
tgaaactaaatgtgagcatt

SEQ ID NO: 52693 - RNA, 20 nt, synthetic construct
  source 1..20: mol_type = other RNA
tgaaactcaatgttggttag

SEQ ID NO: 52694 - RNA, 20 nt, synthetic construct
  source 1..20: mol_type = other RNA
tgaaactctggctcagaaac

SEQ ID NO: 52695 - RNA, 20 nt, synthetic construct
  source 1..20: mol_type = other RNA
tgaaactgagcatcccagag

SEQ ID NO: 52696 - RNA, 20 nt, synthetic construct
  source 1..20: mol_type = other RNA
tgaaacttatttccaggggg

SEQ ID NO: 52697 - RNA, 20 nt, synthetic construct
  source 1..20: mol_type = other RNA
tgaaacttgaatactcgtgt

SEQ ID NO: 52698 - RNA, 20 nt, synthetic construct
  source 1..20: mol_type = other RNA
tgaaactttaagagtatctt

SEQ ID NO: 52699 - RNA, 20 nt, synthetic construct
  source 1..20: mol_type = other RNA
tgaaagaaagaaggccattt

SEQ ID NO: 52700 - RNA, 20 nt, synthetic construct
  source 1..20: mol_type = other RNA
tgaaagacagacctctatta

SEQ ID NO: 52701 - RNA, 20 nt, synthetic construct
  source 1..20: mol_type = other RNA
tgaaagagaaagaagtaatt

SEQ ID NO: 52702 - RNA, 20 nt, synthetic construct
  source 1..20: mol_type = other RNA
tgaaagatcatttagtaagt

SEQ ID NO: 52703 - RNA, 20 nt, synthetic construct
  source 1..20: mol_type = other RNA
tgaaagcagggactcccata

SEQ ID NO: 52704 - RNA, 20 nt, synthetic construct
  source 1..20: mol_type = other RNA
tgaaagcccttgagtatttt

SEQ ID NO: 52705 - RNA, 20 nt, synthetic construct
  source 1..20: mol_type = other RNA
tgaaagctagaagacctcaa

SEQ ID NO: 52706 - RNA, 20 nt, synthetic construct
  source 1..20: mol_type = other RNA
tgaaagctcccaatgcttga

SEQ ID NO: 52707 - RNA, 20 nt, synthetic construct
  source 1..20: mol_type = other RNA
tgaaagcttctgagcagtgt

SEQ ID NO: 52708 - RNA, 20 nt, synthetic construct
  source 1..20: mol_type = other RNA
tgaaaggaaatgagtgtatg

SEQ ID NO: 52709 - RNA, 20 nt, synthetic construct
  source 1..20: mol_type = other RNA
tgaaaggaatccggctttat

SEQ ID NO: 52710 - RNA, 20 nt, synthetic construct
  source 1..20: mol_type = other RNA
tgaaaggatactgagaacag

SEQ ID NO: 52711 - RNA, 20 nt, synthetic construct
  source 1..20: mol_type = other RNA
tgaaaggcaaaggaaaaaac

SEQ ID NO: 52712 - RNA, 20 nt, synthetic construct
  source 1..20: mol_type = other RNA
tgaaaggcatgaaattcttg

SEQ ID NO: 52713 - RNA, 20 nt, synthetic construct
  source 1..20: mol_type = other RNA
tgaaaggcgtcggggctgct

SEQ ID NO: 52714 - RNA, 20 nt, synthetic construct
  source 1..20: mol_type = other RNA
tgaaaggggccaggtgtgga

SEQ ID NO: 52715 - RNA, 20 nt, synthetic construct
  source 1..20: mol_type = other RNA
tgaaagtaaagatagcccct

SEQ ID NO: 52716 - RNA, 20 nt, synthetic construct
  source 1..20: mol_type = other RNA
tgaaagtagaggactgccta

SEQ ID NO: 52717 - RNA, 20 nt, synthetic construct
  source 1..20: mol_type = other RNA
tgaaagtattaaaagcacaa

SEQ ID NO: 52718 - RNA, 20 nt, synthetic construct
  source 1..20: mol_type = other RNA
tgaaagtcagctaattttct

SEQ ID NO: 52719 - RNA, 20 nt, synthetic construct
  source 1..20: mol_type = other RNA
tgaaagtctccctaaccagg

SEQ ID NO: 52720 - RNA, 20 nt, synthetic construct
  source 1..20: mol_type = other RNA
tgaaagtggagaattactaa

SEQ ID NO: 52721 - RNA, 20 nt, synthetic construct
  source 1..20: mol_type = other RNA
tgaaagttcagaataccaga

SEQ ID NO: 52722 - RNA, 20 nt, synthetic construct
  source 1..20: mol_type = other RNA
tgaaataatttggttatgcg

SEQ ID NO: 52723 - RNA, 20 nt, synthetic construct
  source 1..20: mol_type = other RNA
tgaaatactcaaactatgct

SEQ ID NO: 52724 - RNA, 20 nt, synthetic construct
  source 1..20: mol_type = other RNA
tgaaatagttggtcagaaaa

SEQ ID NO: 52725 - RNA, 20 nt, synthetic construct
  source 1..20: mol_type = other RNA
tgaaatcacacaatcttgag

SEQ ID NO: 52726 - RNA, 20 nt, synthetic construct
  source 1..20: mol_type = other RNA
tgaaatcagaacttgacaag

SEQ ID NO: 52727 - RNA, 20 nt, synthetic construct
  source 1..20: mol_type = other RNA
tgaaatcaggaagtatgagt

SEQ ID NO: 52728 - RNA, 20 nt, synthetic construct
  source 1..20: mol_type = other RNA
tgaaatcataaaatatgtcc

SEQ ID NO: 52729 - RNA, 20 nt, synthetic construct
  source 1..20: mol_type = other RNA
tgaaatcatttcactctttt

SEQ ID NO: 52730 - RNA, 20 nt, synthetic construct
  source 1..20: mol_type = other RNA
tgaaatcccctttagtgttc

SEQ ID NO: 52731 - RNA, 20 nt, synthetic construct
  source 1..20: mol_type = other RNA
tgaaatcctagccccaaata

SEQ ID NO: 52732 - RNA, 20 nt, synthetic construct
  source 1..20: mol_type = other RNA
tgaaatcgggagtaacagac

SEQ ID NO: 52733 - RNA, 20 nt, synthetic construct
  source 1..20: mol_type = other RNA
tgaaatctaaatgtagatca

SEQ ID NO: 52734 - RNA, 20 nt, synthetic construct
  source 1..20: mol_type = other RNA
tgaaatctaggcatataata

SEQ ID NO: 52735 - RNA, 20 nt, synthetic construct
  source 1..20: mol_type = other RNA
tgaaatctgatttgtttagt

SEQ ID NO: 52736 - RNA, 20 nt, synthetic construct
  source 1..20: mol_type = other RNA
tgaaatcttgaagatggcaa

SEQ ID NO: 52737 - RNA, 20 nt, synthetic construct
  source 1..20: mol_type = other RNA
tgaaatgaaccaaacttggt

SEQ ID NO: 52738 - RNA, 20 nt, synthetic construct
  source 1..20: mol_type = other RNA
tgaaatgatcttttgtagta

SEQ ID NO: 52739 - RNA, 20 nt, synthetic construct
  source 1..20: mol_type = other RNA
tgaaatgatttcaagtaaca

SEQ ID NO: 52740 - RNA, 20 nt, synthetic construct
  source 1..20: mol_type = other RNA
tgaaatgctgtaactgactt

SEQ ID NO: 52741 - RNA, 20 nt, synthetic construct
  source 1..20: mol_type = other RNA
tgaaatggcccttaacttca

SEQ ID NO: 52742 - RNA, 20 nt, synthetic construct
  source 1..20: mol_type = other RNA
tgaaatggcttaaggaaata

SEQ ID NO: 52743 - RNA, 20 nt, synthetic construct
  source 1..20: mol_type = other RNA
tgaaatgggtttaaaagagt

SEQ ID NO: 52744 - RNA, 20 nt, synthetic construct
  source 1..20: mol_type = other RNA
tgaaatgtggtttttggttc

SEQ ID NO: 52745 - RNA, 20 nt, synthetic construct
  source 1..20: mol_type = other RNA
tgaaattagctaagtatgca

SEQ ID NO: 52746 - RNA, 20 nt, synthetic construct
  source 1..20: mol_type = other RNA
tgaaattagttccttttaag

SEQ ID NO: 52747 - RNA, 20 nt, synthetic construct
  source 1..20: mol_type = other RNA
tgaaattctcaaatgaacag

SEQ ID NO: 52748 - RNA, 20 nt, synthetic construct
  source 1..20: mol_type = other RNA
tgaaattctcattagttatc

SEQ ID NO: 52749 - RNA, 20 nt, synthetic construct
  source 1..20: mol_type = other RNA
tgaaattcttgggtgaataa

SEQ ID NO: 52750 - RNA, 20 nt, synthetic construct
  source 1..20: mol_type = other RNA
tgaaattgaccattccacgc

SEQ ID NO: 52751 - RNA, 20 nt, synthetic construct
  source 1..20: mol_type = other RNA
tgaaattgacttcactagat

SEQ ID NO: 52752 - RNA, 20 nt, synthetic construct
  source 1..20: mol_type = other RNA
tgaaattgtcagaaaagatc

SEQ ID NO: 52753 - RNA, 20 nt, synthetic construct
  source 1..20: mol_type = other RNA
tgaaatttaaagacgttcag

SEQ ID NO: 52754 - RNA, 20 nt, synthetic construct
  source 1..20: mol_type = other RNA
tgaaatttgaggccctattc

SEQ ID NO: 52755 - RNA, 20 nt, synthetic construct
  source 1..20: mol_type = other RNA
tgaacaaaatgtggtatata

SEQ ID NO: 52756 - RNA, 20 nt, synthetic construct
  source 1..20: mol_type = other RNA
tgaacaaaatttttgcaaac

SEQ ID NO: 52757 - RNA, 20 nt, synthetic construct
  source 1..20: mol_type = other RNA
tgaacaaaggcaggagcagt

SEQ ID NO: 52758 - RNA, 20 nt, synthetic construct
  source 1..20: mol_type = other RNA
tgaacaacgctgtggctaac

SEQ ID NO: 52759 - RNA, 20 nt, synthetic construct
  source 1..20: mol_type = other RNA
tgaacaagagcgtcgtacct

SEQ ID NO: 52760 - RNA, 20 nt, synthetic construct
  source 1..20: mol_type = other RNA
tgaacaagttacaaacatat

SEQ ID NO: 52761 - RNA, 20 nt, synthetic construct
  source 1..20: mol_type = other RNA
tgaacaatccttctaatcag

SEQ ID NO: 52762 - RNA, 20 nt, synthetic construct
  source 1..20: mol_type = other RNA
tgaacaattttctctcatgt

SEQ ID NO: 52763 - RNA, 20 nt, synthetic construct
  source 1..20: mol_type = other RNA
tgaacactctgcaattttaa

SEQ ID NO: 52764 - RNA, 20 nt, synthetic construct
  source 1..20: mol_type = other RNA
tgaacagacagacatgcatg

SEQ ID NO: 52765 - RNA, 20 nt, synthetic construct
  source 1..20: mol_type = other RNA
tgaacagcctaaagtccaca

SEQ ID NO: 52766 - RNA, 20 nt, synthetic construct
  source 1..20: mol_type = other RNA
tgaacaggcaaccttgggag

SEQ ID NO: 52767 - RNA, 20 nt, synthetic construct
  source 1..20: mol_type = other RNA
tgaacaggttcttcatcagt

SEQ ID NO: 52768 - RNA, 20 nt, synthetic construct
  source 1..20: mol_type = other RNA
tgaacatcacccagctcgac

SEQ ID NO: 52769 - RNA, 20 nt, synthetic construct
  source 1..20: mol_type = other RNA
tgaacatgaacgagaacaaa

SEQ ID NO: 52770 - RNA, 20 nt, synthetic construct
  source 1..20: mol_type = other RNA
tgaacatgggaatgcatata

SEQ ID NO: 52771 - RNA, 20 nt, synthetic construct
  source 1..20: mol_type = other RNA
tgaacatggtttgatcccac

SEQ ID NO: 52772 - RNA, 20 nt, synthetic construct
  source 1..20: mol_type = other RNA
tgaacatgtatgtttctcat

SEQ ID NO: 52773 - RNA, 20 nt, synthetic construct
  source 1..20: mol_type = other RNA
tgaacattctgtagaagtaa

SEQ ID NO: 52774 - RNA, 20 nt, synthetic construct
  source 1..20: mol_type = other RNA
tgaacatttatacagttgga

SEQ ID NO: 52775 - RNA, 20 nt, synthetic construct
  source 1..20: mol_type = other RNA
tgaacattttagctggggca

SEQ ID NO: 52776 - RNA, 20 nt, synthetic construct
  source 1..20: mol_type = other RNA
tgaacattttgagttattgc

SEQ ID NO: 52777 - RNA, 20 nt, synthetic construct
  source 1..20: mol_type = other RNA
tgaaccaaaaaccacatttc

SEQ ID NO: 52778 - RNA, 20 nt, synthetic construct
  source 1..20: mol_type = other RNA
tgaaccaaacttggtttatt

SEQ ID NO: 52779 - RNA, 20 nt, synthetic construct
  source 1..20: mol_type = other RNA
tgaaccacactgacaggaca

SEQ ID NO: 52780 - RNA, 20 nt, synthetic construct
  source 1..20: mol_type = other RNA
tgaaccacgcatctggtcta

SEQ ID NO: 52781 - RNA, 20 nt, synthetic construct
  source 1..20: mol_type = other RNA
tgaaccattgtaaaccatat

SEQ ID NO: 52782 - RNA, 20 nt, synthetic construct
  source 1..20: mol_type = other RNA
tgaacccaccaggaggcgga

SEQ ID NO: 52783 - RNA, 20 nt, synthetic construct
  source 1..20: mol_type = other RNA
tgaacccactgagcatttat

SEQ ID NO: 52784 - RNA, 20 nt, synthetic construct
  source 1..20: mol_type = other RNA
tgaacccaggaggcaaaggt

SEQ ID NO: 52785 - RNA, 20 nt, synthetic construct
  source 1..20: mol_type = other RNA
tgaaccccagaaggttaact

SEQ ID NO: 52786 - RNA, 20 nt, synthetic construct
  source 1..20: mol_type = other RNA
tgaacccgaggtgcacaagg

SEQ ID NO: 52787 - RNA, 20 nt, synthetic construct
  source 1..20: mol_type = other RNA
tgaacctgaaaaacggaggt

SEQ ID NO: 52788 - RNA, 20 nt, synthetic construct
  source 1..20: mol_type = other RNA
tgaacctgcatggtgtaaaa

SEQ ID NO: 52789 - RNA, 20 nt, synthetic construct
  source 1..20: mol_type = other RNA
tgaacctgctttctactagt

SEQ ID NO: 52790 - RNA, 20 nt, synthetic construct
  source 1..20: mol_type = other RNA
tgaaccttcaccaaagattt

SEQ ID NO: 52791 - RNA, 20 nt, synthetic construct
  source 1..20: mol_type = other RNA
tgaaccttcctcttcctcat

SEQ ID NO: 52792 - RNA, 20 nt, synthetic construct
  source 1..20: mol_type = other RNA
tgaaccttgaagtacttcag

SEQ ID NO: 52793 - RNA, 20 nt, synthetic construct
  source 1..20: mol_type = other RNA
tgaacgaatgaaaacacaac

SEQ ID NO: 52794 - RNA, 20 nt, synthetic construct
  source 1..20: mol_type = other RNA
tgaacgagaacaaaacaaga

SEQ ID NO: 52795 - RNA, 20 nt, synthetic construct
  source 1..20: mol_type = other RNA
tgaacgatggtttctgacac

SEQ ID NO: 52796 - RNA, 20 nt, synthetic construct
  source 1..20: mol_type = other RNA
tgaacgctaaattaaaggct

SEQ ID NO: 52797 - RNA, 20 nt, synthetic construct
  source 1..20: mol_type = other RNA
tgaacgtctttaaatttcaa

SEQ ID NO: 52798 - RNA, 20 nt, synthetic construct
  source 1..20: mol_type = other RNA
tgaactaagtgtgaagatta

SEQ ID NO: 52799 - RNA, 20 nt, synthetic construct
  source 1..20: mol_type = other RNA
tgaactacacagacatgaac

SEQ ID NO: 52800 - RNA, 20 nt, synthetic construct
  source 1..20: mol_type = other RNA
tgaactacagtgtttaggga

SEQ ID NO: 52801 - RNA, 20 nt, synthetic construct
  source 1..20: mol_type = other RNA
tgaactactcaaagaaaata

SEQ ID NO: 52802 - RNA, 20 nt, synthetic construct
  source 1..20: mol_type = other RNA
tgaactattagagcttttat

SEQ ID NO: 52803 - RNA, 20 nt, synthetic construct
  source 1..20: mol_type = other RNA
tgaactcaaaagtgaatcac

SEQ ID NO: 52804 - RNA, 20 nt, synthetic construct
  source 1..20: mol_type = other RNA
tgaactcactggccagcatt

SEQ ID NO: 52805 - RNA, 20 nt, synthetic construct
  source 1..20: mol_type = other RNA
tgaactcccagaactcgaag

SEQ ID NO: 52806 - RNA, 20 nt, synthetic construct
  source 1..20: mol_type = other RNA
tgaactcctatagttaagtc

SEQ ID NO: 52807 - RNA, 20 nt, synthetic construct
  source 1..20: mol_type = other RNA
tgaactcctttcttaccctc

SEQ ID NO: 52808 - RNA, 20 nt, synthetic construct
  source 1..20: mol_type = other RNA
tgaactcgtggcctcaagca

SEQ ID NO: 52809 - RNA, 20 nt, synthetic construct
  source 1..20: mol_type = other RNA
tgaactctgtggagtcctgt

SEQ ID NO: 52810 - RNA, 20 nt, synthetic construct
  source 1..20: mol_type = other RNA
tgaactgctgacagattaaa

SEQ ID NO: 52811 - RNA, 20 nt, synthetic construct
  source 1..20: mol_type = other RNA
tgaactgctggtctggaatg

SEQ ID NO: 52812 - RNA, 20 nt, synthetic construct
  source 1..20: mol_type = other RNA
tgaactgggacttctagcct

SEQ ID NO: 52813 - RNA, 20 nt, synthetic construct
  source 1..20: mol_type = other RNA
tgaactgggtgtagggggaa

SEQ ID NO: 52814 - RNA, 20 nt, synthetic construct
  source 1..20: mol_type = other RNA
tgaactgttacttgactatt

SEQ ID NO: 52815 - RNA, 20 nt, synthetic construct
  source 1..20: mol_type = other RNA
tgaacttatataaatgctca

SEQ ID NO: 52816 - RNA, 20 nt, synthetic construct
  source 1..20: mol_type = other RNA
tgaacttgtcacaaaatgtg

SEQ ID NO: 52817 - RNA, 20 nt, synthetic construct
  source 1..20: mol_type = other RNA
tgaactttcaacctaacatg

SEQ ID NO: 52818 - RNA, 20 nt, synthetic construct
  source 1..20: mol_type = other RNA
tgaactttccagaagtaact

SEQ ID NO: 52819 - RNA, 20 nt, synthetic construct
  source 1..20: mol_type = other RNA
tgaactttcgaagtgggaag

SEQ ID NO: 52820 - RNA, 20 nt, synthetic construct
  source 1..20: mol_type = other RNA
tgaagaaaacactccagaat

SEQ ID NO: 52821 - RNA, 20 nt, synthetic construct
  source 1..20: mol_type = other RNA
tgaagaaaatccaagaagac

SEQ ID NO: 52822 - RNA, 20 nt, synthetic construct
  source 1..20: mol_type = other RNA
tgaagaaaccaagagcatag

SEQ ID NO: 52823 - RNA, 20 nt, synthetic construct
  source 1..20: mol_type = other RNA
tgaagaaacctttctcaaag

SEQ ID NO: 52824 - RNA, 20 nt, synthetic construct
  source 1..20: mol_type = other RNA
tgaagaaagtaggaattaaa

SEQ ID NO: 52825 - RNA, 20 nt, synthetic construct
  source 1..20: mol_type = other RNA
tgaagaaagttttgcagttg

SEQ ID NO: 52826 - RNA, 20 nt, synthetic construct
  source 1..20: mol_type = other RNA
tgaagaaattatctgtgggt

SEQ ID NO: 52827 - RNA, 20 nt, synthetic construct
  source 1..20: mol_type = other RNA
tgaagaaccgactgaaagga

SEQ ID NO: 52828 - RNA, 20 nt, synthetic construct
  source 1..20: mol_type = other RNA
tgaagaacctgttcatttga

SEQ ID NO: 52829 - RNA, 20 nt, synthetic construct
  source 1..20: mol_type = other RNA
tgaagaaggaatgtgcactc

SEQ ID NO: 52830 - RNA, 20 nt, synthetic construct
  source 1..20: mol_type = other RNA
tgaagaataactgtcctgaa

SEQ ID NO: 52831 - RNA, 20 nt, synthetic construct
  source 1..20: mol_type = other RNA
tgaagaatgtgaaaaatttg

SEQ ID NO: 52832 - RNA, 20 nt, synthetic construct
  source 1..20: mol_type = other RNA
tgaagacatgctgaggcccc

SEQ ID NO: 52833 - RNA, 20 nt, synthetic construct
  source 1..20: mol_type = other RNA
tgaagacctgcagtctgcag

SEQ ID NO: 52834 - RNA, 20 nt, synthetic construct
  source 1..20: mol_type = other RNA
tgaagactggatttgattgg

SEQ ID NO: 52835 - RNA, 20 nt, synthetic construct
  source 1..20: mol_type = other RNA
tgaagagagcctgtggtctc

SEQ ID NO: 52836 - RNA, 20 nt, synthetic construct
  source 1..20: mol_type = other RNA
tgaagagcgcttctatgtga

SEQ ID NO: 52837 - RNA, 20 nt, synthetic construct
  source 1..20: mol_type = other RNA
tgaagaggctttctgtgtaa

SEQ ID NO: 52838 - RNA, 20 nt, synthetic construct
  source 1..20: mol_type = other RNA
tgaagagggaacattttcat

SEQ ID NO: 52839 - RNA, 20 nt, synthetic construct
  source 1..20: mol_type = other RNA
tgaagagtctatctttggga

SEQ ID NO: 52840 - RNA, 20 nt, synthetic construct
  source 1..20: mol_type = other RNA
tgaagatgctgaacttgtca

SEQ ID NO: 52841 - RNA, 20 nt, synthetic construct
  source 1..20: mol_type = other RNA
tgaagatggagttacgctgc

SEQ ID NO: 52842 - RNA, 20 nt, synthetic construct
  source 1..20: mol_type = other RNA
tgaagatggcaaacagactg

SEQ ID NO: 52843 - RNA, 20 nt, synthetic construct
  source 1..20: mol_type = other RNA
tgaagatggcctccctcact

SEQ ID NO: 52844 - RNA, 20 nt, synthetic construct
  source 1..20: mol_type = other RNA
tgaagattaagcacatctgt

SEQ ID NO: 52845 - RNA, 20 nt, synthetic construct
  source 1..20: mol_type = other RNA
tgaagattagaaaattagct

SEQ ID NO: 52846 - RNA, 20 nt, synthetic construct
  source 1..20: mol_type = other RNA
tgaagatttaatacagaaga

SEQ ID NO: 52847 - RNA, 20 nt, synthetic construct
  source 1..20: mol_type = other RNA
tgaagcagagagagaagatg

SEQ ID NO: 52848 - RNA, 20 nt, synthetic construct
  source 1..20: mol_type = other RNA
tgaagcaggccttcgaggca

SEQ ID NO: 52849 - RNA, 20 nt, synthetic construct
  source 1..20: mol_type = other RNA
tgaagcaggctttttacccg

SEQ ID NO: 52850 - RNA, 20 nt, synthetic construct
  source 1..20: mol_type = other RNA
tgaagcagggaaatggaggg

SEQ ID NO: 52851 - RNA, 20 nt, synthetic construct
  source 1..20: mol_type = other RNA
tgaagcattaatgcaacctg

SEQ ID NO: 52852 - RNA, 20 nt, synthetic construct
  source 1..20: mol_type = other RNA
tgaagccagcacctaacaat

SEQ ID NO: 52853 - RNA, 20 nt, synthetic construct
  source 1..20: mol_type = other RNA
tgaagccagtccttgtgatc

SEQ ID NO: 52854 - RNA, 20 nt, synthetic construct
  source 1..20: mol_type = other RNA
tgaagcccagagaggctagg

SEQ ID NO: 52855 - RNA, 20 nt, synthetic construct
  source 1..20: mol_type = other RNA
tgaagccctctaagtcagcc

SEQ ID NO: 52856 - RNA, 20 nt, synthetic construct
  source 1..20: mol_type = other RNA
tgaagcggggctgccactac

SEQ ID NO: 52857 - RNA, 20 nt, synthetic construct
  source 1..20: mol_type = other RNA
tgaagctacagactaatatg

SEQ ID NO: 52858 - RNA, 20 nt, synthetic construct
  source 1..20: mol_type = other RNA
tgaagctactattccaggat

SEQ ID NO: 52859 - RNA, 20 nt, synthetic construct
  source 1..20: mol_type = other RNA
tgaagctctagtgagctatg

SEQ ID NO: 52860 - RNA, 20 nt, synthetic construct
  source 1..20: mol_type = other RNA
tgaagctggacccttacctt

SEQ ID NO: 52861 - RNA, 20 nt, synthetic construct
  source 1..20: mol_type = other RNA
tgaagcttcaaaccactatc

SEQ ID NO: 52862 - RNA, 20 nt, synthetic construct
  source 1..20: mol_type = other RNA
tgaagcttcacttctctgct

SEQ ID NO: 52863 - RNA, 20 nt, synthetic construct
  source 1..20: mol_type = other RNA
tgaagcttttctcctaagtc

SEQ ID NO: 52864 - RNA, 20 nt, synthetic construct
  source 1..20: mol_type = other RNA
tgaaggaaaaaacgggttat

SEQ ID NO: 52865 - RNA, 20 nt, synthetic construct
  source 1..20: mol_type = other RNA
tgaaggaaggattggaatga

SEQ ID NO: 52866 - RNA, 20 nt, synthetic construct
  source 1..20: mol_type = other RNA
tgaaggacaaaaataatatg

SEQ ID NO: 52867 - RNA, 20 nt, synthetic construct
  source 1..20: mol_type = other RNA
tgaaggattcctccctggag

SEQ ID NO: 52868 - RNA, 20 nt, synthetic construct
  source 1..20: mol_type = other RNA
tgaaggcaatgtagggaata

SEQ ID NO: 52869 - RNA, 20 nt, synthetic construct
  source 1..20: mol_type = other RNA
tgaaggcactaacaaagggc

SEQ ID NO: 52870 - RNA, 20 nt, synthetic construct
  source 1..20: mol_type = other RNA
tgaaggcactgtatggttct

SEQ ID NO: 52871 - RNA, 20 nt, synthetic construct
  source 1..20: mol_type = other RNA
tgaaggcagaattatagagg

SEQ ID NO: 52872 - RNA, 20 nt, synthetic construct
  source 1..20: mol_type = other RNA
tgaaggcatagggccttcta

SEQ ID NO: 52873 - RNA, 20 nt, synthetic construct
  source 1..20: mol_type = other RNA
tgaaggctcagcccctcatc

SEQ ID NO: 52874 - RNA, 20 nt, synthetic construct
  source 1..20: mol_type = other RNA
tgaagggaattttactgatc

SEQ ID NO: 52875 - RNA, 20 nt, synthetic construct
  source 1..20: mol_type = other RNA
tgaagggaggaaaaaacagt

SEQ ID NO: 52876 - RNA, 20 nt, synthetic construct
  source 1..20: mol_type = other RNA
tgaagggaggtaggcttaga

SEQ ID NO: 52877 - RNA, 20 nt, synthetic construct
  source 1..20: mol_type = other RNA
tgaagggttttctgtagaat

SEQ ID NO: 52878 - RNA, 20 nt, synthetic construct
  source 1..20: mol_type = other RNA
tgaaggtgcctgccatagag

SEQ ID NO: 52879 - RNA, 20 nt, synthetic construct
  source 1..20: mol_type = other RNA
tgaaggttcatgaacataaa

SEQ ID NO: 52880 - RNA, 20 nt, synthetic construct
  source 1..20: mol_type = other RNA
tgaagtaataaagcaagtat

SEQ ID NO: 52881 - RNA, 20 nt, synthetic construct
  source 1..20: mol_type = other RNA
tgaagtacttcaaggttcac

SEQ ID NO: 52882 - RNA, 20 nt, synthetic construct
  source 1..20: mol_type = other RNA
tgaagtacttcagcgcttga

SEQ ID NO: 52883 - RNA, 20 nt, synthetic construct
  source 1..20: mol_type = other RNA
tgaagtatagaaaggagacc

SEQ ID NO: 52884 - RNA, 20 nt, synthetic construct
  source 1..20: mol_type = other RNA
tgaagtatgtaattacaggg

SEQ ID NO: 52885 - RNA, 20 nt, synthetic construct
  source 1..20: mol_type = other RNA
tgaagtattgatttgaccat

SEQ ID NO: 52886 - RNA, 20 nt, synthetic construct
  source 1..20: mol_type = other RNA
tgaagtcaagatgaatctgc

SEQ ID NO: 52887 - RNA, 20 nt, synthetic construct
  source 1..20: mol_type = other RNA
tgaagtcaatttcagatctc

SEQ ID NO: 52888 - RNA, 20 nt, synthetic construct
  source 1..20: mol_type = other RNA
tgaagtcagagattttccca

SEQ ID NO: 52889 - RNA, 20 nt, synthetic construct
  source 1..20: mol_type = other RNA
tgaagtcagttacagcattt

SEQ ID NO: 52890 - RNA, 20 nt, synthetic construct
  source 1..20: mol_type = other RNA
tgaagtcatctggtcctgag

SEQ ID NO: 52891 - RNA, 20 nt, synthetic construct
  source 1..20: mol_type = other RNA
tgaagtcccatcttccatac

SEQ ID NO: 52892 - RNA, 20 nt, synthetic construct
  source 1..20: mol_type = other RNA
tgaagtcctcaatcatgtca

SEQ ID NO: 52893 - RNA, 20 nt, synthetic construct
  source 1..20: mol_type = other RNA
tgaagtcctttcttggtctg

SEQ ID NO: 52894 - RNA, 20 nt, synthetic construct
  source 1..20: mol_type = other RNA
tgaagtctttggcccatttt

SEQ ID NO: 52895 - RNA, 20 nt, synthetic construct
  source 1..20: mol_type = other RNA
tgaagtctttggtgatccta

SEQ ID NO: 52896 - RNA, 20 nt, synthetic construct
  source 1..20: mol_type = other RNA
tgaagtgttgagaggcttta

SEQ ID NO: 52897 - RNA, 20 nt, synthetic construct
  source 1..20: mol_type = other RNA
tgaagttaagggccatttca

SEQ ID NO: 52898 - RNA, 20 nt, synthetic construct
  source 1..20: mol_type = other RNA
tgaagttctcaggggtaaag

SEQ ID NO: 52899 - RNA, 20 nt, synthetic construct
  source 1..20: mol_type = other RNA
tgaagttgggcttaacattt

SEQ ID NO: 52900 - RNA, 20 nt, synthetic construct
  source 1..20: mol_type = other RNA
tgaagtttatcagtctccaa

SEQ ID NO: 52901 - RNA, 20 nt, synthetic construct
  source 1..20: mol_type = other RNA
tgaagtttatcgtatttatc

SEQ ID NO: 52902 - RNA, 20 nt, synthetic construct
  source 1..20: mol_type = other RNA
tgaataaaattctgatagct

SEQ ID NO: 52903 - RNA, 20 nt, synthetic construct
  source 1..20: mol_type = other RNA
tgaataaaccacgcagtttg

SEQ ID NO: 52904 - RNA, 20 nt, synthetic construct
  source 1..20: mol_type = other RNA
tgaataaactaacaaagaac

SEQ ID NO: 52905 - RNA, 20 nt, synthetic construct
  source 1..20: mol_type = other RNA
tgaataaagggtcagaattt

SEQ ID NO: 52906 - RNA, 20 nt, synthetic construct
  source 1..20: mol_type = other RNA
tgaataaccaatgtcagaga

SEQ ID NO: 52907 - RNA, 20 nt, synthetic construct
  source 1..20: mol_type = other RNA
tgaataacccatatctttgc

SEQ ID NO: 52908 - RNA, 20 nt, synthetic construct
  source 1..20: mol_type = other RNA
tgaataacctcataagaact

SEQ ID NO: 52909 - RNA, 20 nt, synthetic construct
  source 1..20: mol_type = other RNA
tgaataaggtctgtaagtca

SEQ ID NO: 52910 - RNA, 20 nt, synthetic construct
  source 1..20: mol_type = other RNA
tgaataatttccaggtcatt

SEQ ID NO: 52911 - RNA, 20 nt, synthetic construct
  source 1..20: mol_type = other RNA
tgaatacaaaggtgttaagc

SEQ ID NO: 52912 - RNA, 20 nt, synthetic construct
  source 1..20: mol_type = other RNA
tgaatacccctccctacctg

SEQ ID NO: 52913 - RNA, 20 nt, synthetic construct
  source 1..20: mol_type = other RNA
tgaatacctatttagaggga

SEQ ID NO: 52914 - RNA, 20 nt, synthetic construct
  source 1..20: mol_type = other RNA
tgaatactattcctattgtt

SEQ ID NO: 52915 - RNA, 20 nt, synthetic construct
  source 1..20: mol_type = other RNA
tgaatactcgtgtgtctcat

SEQ ID NO: 52916 - RNA, 20 nt, synthetic construct
  source 1..20: mol_type = other RNA
tgaatagaaaatccttactt

SEQ ID NO: 52917 - RNA, 20 nt, synthetic construct
  source 1..20: mol_type = other RNA
tgaatagcaactgttttttc

SEQ ID NO: 52918 - RNA, 20 nt, synthetic construct
  source 1..20: mol_type = other RNA
tgaatagcatcttagctctt

SEQ ID NO: 52919 - RNA, 20 nt, synthetic construct
  source 1..20: mol_type = other RNA
tgaataggaaagtgacagat

SEQ ID NO: 52920 - RNA, 20 nt, synthetic construct
  source 1..20: mol_type = other RNA
tgaatagggcctcaaatttc

SEQ ID NO: 52921 - RNA, 20 nt, synthetic construct
  source 1..20: mol_type = other RNA
tgaataggtgtgtgttcctt

SEQ ID NO: 52922 - RNA, 20 nt, synthetic construct
  source 1..20: mol_type = other RNA
tgaatatactggaaaactag

SEQ ID NO: 52923 - RNA, 20 nt, synthetic construct
  source 1..20: mol_type = other RNA
tgaatatagctaagaaacag

SEQ ID NO: 52924 - RNA, 20 nt, synthetic construct
  source 1..20: mol_type = other RNA
tgaatatcatttgaatgatg

SEQ ID NO: 52925 - RNA, 20 nt, synthetic construct
  source 1..20: mol_type = other RNA
tgaatatgtactacctatag

SEQ ID NO: 52926 - RNA, 20 nt, synthetic construct
  source 1..20: mol_type = other RNA
tgaatattcgttccagcagg

SEQ ID NO: 52927 - RNA, 20 nt, synthetic construct
  source 1..20: mol_type = other RNA
tgaatcacctcaaggcagaa

SEQ ID NO: 52928 - RNA, 20 nt, synthetic construct
  source 1..20: mol_type = other RNA
tgaatcactacagcatatta

SEQ ID NO: 52929 - RNA, 20 nt, synthetic construct
  source 1..20: mol_type = other RNA
tgaatcagacaacacattaa

SEQ ID NO: 52930 - RNA, 20 nt, synthetic construct
  source 1..20: mol_type = other RNA
tgaatcatgggagccaaact

SEQ ID NO: 52931 - RNA, 20 nt, synthetic construct
  source 1..20: mol_type = other RNA
tgaatctagaaagataaatc

SEQ ID NO: 52932 - RNA, 20 nt, synthetic construct
  source 1..20: mol_type = other RNA
tgaatctctctatccaccac

SEQ ID NO: 52933 - RNA, 20 nt, synthetic construct
  source 1..20: mol_type = other RNA
tgaatctgagtaaagggtaa

SEQ ID NO: 52934 - RNA, 20 nt, synthetic construct
  source 1..20: mol_type = other RNA
tgaatctgcaactatcaaaa

SEQ ID NO: 52935 - RNA, 20 nt, synthetic construct
  source 1..20: mol_type = other RNA
tgaatctgttcctgggttct

SEQ ID NO: 52936 - RNA, 20 nt, synthetic construct
  source 1..20: mol_type = other RNA
tgaatcttaacatttctcat

SEQ ID NO: 52937 - RNA, 20 nt, synthetic construct
  source 1..20: mol_type = other RNA
tgaatgaacaaaatgtggta

SEQ ID NO: 52938 - RNA, 20 nt, synthetic construct
  source 1..20: mol_type = other RNA
tgaatgaatgttgagttttt

SEQ ID NO: 52939 - RNA, 20 nt, synthetic construct
  source 1..20: mol_type = other RNA
tgaatgactgttgcctctgt

SEQ ID NO: 52940 - RNA, 20 nt, synthetic construct
  source 1..20: mol_type = other RNA
tgaatgagaccaaatgcata

SEQ ID NO: 52941 - RNA, 20 nt, synthetic construct
  source 1..20: mol_type = other RNA
tgaatgagcaaggtcgtttc

SEQ ID NO: 52942 - RNA, 20 nt, synthetic construct
  source 1..20: mol_type = other RNA
tgaatgaggagtgaattttt

SEQ ID NO: 52943 - RNA, 20 nt, synthetic construct
  source 1..20: mol_type = other RNA
tgaatgatgccatcacattt

SEQ ID NO: 52944 - RNA, 20 nt, synthetic construct
  source 1..20: mol_type = other RNA
tgaatgatgcgaaagaaaaa

SEQ ID NO: 52945 - RNA, 20 nt, synthetic construct
  source 1..20: mol_type = other RNA
tgaatgatttccctgcatac

SEQ ID NO: 52946 - RNA, 20 nt, synthetic construct
  source 1..20: mol_type = other RNA
tgaatgcacgtgaagctaca

SEQ ID NO: 52947 - RNA, 20 nt, synthetic construct
  source 1..20: mol_type = other RNA
tgaatgcagtggcttcctaa

SEQ ID NO: 52948 - RNA, 20 nt, synthetic construct
  source 1..20: mol_type = other RNA
tgaatggaaaattcaaacat

SEQ ID NO: 52949 - RNA, 20 nt, synthetic construct
  source 1..20: mol_type = other RNA
tgaatggaaaattcttggtc

SEQ ID NO: 52950 - RNA, 20 nt, synthetic construct
  source 1..20: mol_type = other RNA
tgaatggaaagaaatagaac

SEQ ID NO: 52951 - RNA, 20 nt, synthetic construct
  source 1..20: mol_type = other RNA
tgaatggaaatgtaaattcc

SEQ ID NO: 52952 - RNA, 20 nt, synthetic construct
  source 1..20: mol_type = other RNA
tgaatggataaggaaaatat

SEQ ID NO: 52953 - RNA, 20 nt, synthetic construct
  source 1..20: mol_type = other RNA
tgaatggggatgcaacaaat

SEQ ID NO: 52954 - RNA, 20 nt, synthetic construct
  source 1..20: mol_type = other RNA
tgaatggggtaattttgggg

SEQ ID NO: 52955 - RNA, 20 nt, synthetic construct
  source 1..20: mol_type = other RNA
tgaatgtgaggtgaggacat

SEQ ID NO: 52956 - RNA, 20 nt, synthetic construct
  source 1..20: mol_type = other RNA
tgaatgtgcctacatagtcc

SEQ ID NO: 52957 - RNA, 20 nt, synthetic construct
  source 1..20: mol_type = other RNA
tgaatgtggcagaatttaca

SEQ ID NO: 52958 - RNA, 20 nt, synthetic construct
  source 1..20: mol_type = other RNA
tgaattaagcaccactagag

SEQ ID NO: 52959 - RNA, 20 nt, synthetic construct
  source 1..20: mol_type = other RNA
tgaattaatctcttacacct

SEQ ID NO: 52960 - RNA, 20 nt, synthetic construct
  source 1..20: mol_type = other RNA
tgaattacaaatgaaagtca

SEQ ID NO: 52961 - RNA, 20 nt, synthetic construct
  source 1..20: mol_type = other RNA
tgaattagatggcttaggat

SEQ ID NO: 52962 - RNA, 20 nt, synthetic construct
  source 1..20: mol_type = other RNA
tgaattagcaatgcgaatca

SEQ ID NO: 52963 - RNA, 20 nt, synthetic construct
  source 1..20: mol_type = other RNA
tgaattagtgattttaccaa

SEQ ID NO: 52964 - RNA, 20 nt, synthetic construct
  source 1..20: mol_type = other RNA
tgaattataggcaatttaga

SEQ ID NO: 52965 - RNA, 20 nt, synthetic construct
  source 1..20: mol_type = other RNA
tgaattattaagcaaaatgg

SEQ ID NO: 52966 - RNA, 20 nt, synthetic construct
  source 1..20: mol_type = other RNA
tgaattcacagtagaagact

SEQ ID NO: 52967 - RNA, 20 nt, synthetic construct
  source 1..20: mol_type = other RNA
tgaattcactaatgcctcaa

SEQ ID NO: 52968 - RNA, 20 nt, synthetic construct
  source 1..20: mol_type = other RNA
tgaattcagatggccccaaa

SEQ ID NO: 52969 - RNA, 20 nt, synthetic construct
  source 1..20: mol_type = other RNA
tgaattccagtttatctatt

SEQ ID NO: 52970 - RNA, 20 nt, synthetic construct
  source 1..20: mol_type = other RNA
tgaattcccacaaaatatga

SEQ ID NO: 52971 - RNA, 20 nt, synthetic construct
  source 1..20: mol_type = other RNA
tgaattctaacattatcttc

SEQ ID NO: 52972 - RNA, 20 nt, synthetic construct
  source 1..20: mol_type = other RNA
tgaattctaatgaactccca

SEQ ID NO: 52973 - RNA, 20 nt, synthetic construct
  source 1..20: mol_type = other RNA
tgaattctctggaatagaag

SEQ ID NO: 52974 - RNA, 20 nt, synthetic construct
  source 1..20: mol_type = other RNA
tgaattctgacttagtgagg

SEQ ID NO: 52975 - RNA, 20 nt, synthetic construct
  source 1..20: mol_type = other RNA
tgaattctgcttattatatg

SEQ ID NO: 52976 - RNA, 20 nt, synthetic construct
  source 1..20: mol_type = other RNA
tgaattgagatgtactggaa

SEQ ID NO: 52977 - RNA, 20 nt, synthetic construct
  source 1..20: mol_type = other RNA
tgaattgataaaagtcattg

SEQ ID NO: 52978 - RNA, 20 nt, synthetic construct
  source 1..20: mol_type = other RNA
tgaattgtgacagttctatt

SEQ ID NO: 52979 - RNA, 20 nt, synthetic construct
  source 1..20: mol_type = other RNA
tgaattgttgcgcgtcaaaa

SEQ ID NO: 52980 - RNA, 20 nt, synthetic construct
  source 1..20: mol_type = other RNA
tgaattgttggagttcttta

SEQ ID NO: 52981 - RNA, 20 nt, synthetic construct
  source 1..20: mol_type = other RNA
tgaatttaagacacaaggaa

SEQ ID NO: 52982 - RNA, 20 nt, synthetic construct
  source 1..20: mol_type = other RNA
tgaatttaattttgagagtg

SEQ ID NO: 52983 - RNA, 20 nt, synthetic construct
  source 1..20: mol_type = other RNA
tgaatttctgtccttggatt

SEQ ID NO: 52984 - RNA, 20 nt, synthetic construct
  source 1..20: mol_type = other RNA
tgaatttgcctattctgggg

SEQ ID NO: 52985 - RNA, 20 nt, synthetic construct
  source 1..20: mol_type = other RNA
tgaatttggaaagggtagag

SEQ ID NO: 52986 - RNA, 20 nt, synthetic construct
  source 1..20: mol_type = other RNA
tgaatttggatttgagtaac

SEQ ID NO: 52987 - RNA, 20 nt, synthetic construct
  source 1..20: mol_type = other RNA
tgaatttggtattcttatcc

SEQ ID NO: 52988 - RNA, 20 nt, synthetic construct
  source 1..20: mol_type = other RNA
tgaattttccattcacacac

SEQ ID NO: 52989 - RNA, 20 nt, synthetic construct
  source 1..20: mol_type = other RNA
tgacaaaaagtaggggtaaa

SEQ ID NO: 52990 - RNA, 20 nt, synthetic construct
  source 1..20: mol_type = other RNA
tgacaaaaggccccttgaaa

SEQ ID NO: 52991 - RNA, 20 nt, synthetic construct
  source 1..20: mol_type = other RNA
tgacaaacacttttcaaaca

SEQ ID NO: 52992 - RNA, 20 nt, synthetic construct
  source 1..20: mol_type = other RNA
tgacaaagtatgagaaatgt

SEQ ID NO: 52993 - RNA, 20 nt, synthetic construct
  source 1..20: mol_type = other RNA
tgacaaataaaagcttatga

SEQ ID NO: 52994 - RNA, 20 nt, synthetic construct
  source 1..20: mol_type = other RNA
tgacaactgggagaatggca

SEQ ID NO: 52995 - RNA, 20 nt, synthetic construct
  source 1..20: mol_type = other RNA
tgacaagaatctttggcaaa

SEQ ID NO: 52996 - RNA, 20 nt, synthetic construct
  source 1..20: mol_type = other RNA
tgacaagacgtgtacataaa

SEQ ID NO: 52997 - RNA, 20 nt, synthetic construct
  source 1..20: mol_type = other RNA
tgacaagactacctaaaaca

SEQ ID NO: 52998 - RNA, 20 nt, synthetic construct
  source 1..20: mol_type = other RNA
tgacaagtaaatgcaatgca

SEQ ID NO: 52999 - RNA, 20 nt, synthetic construct
  source 1..20: mol_type = other RNA
tgacaagtagtacaaaagtg

SEQ ID NO: 53000 - RNA, 20 nt, synthetic construct
  source 1..20: mol_type = other RNA
tgacaagttcagcatcttca

SEQ ID NO: 53001 - RNA, 20 nt, synthetic construct
  source 1..20: mol_type = other RNA
tgacaataaatggtgcaggc

SEQ ID NO: 53002 - RNA, 20 nt, synthetic construct
  source 1..20: mol_type = other RNA
tgacaataataactacacat

SEQ ID NO: 53003 - RNA, 20 nt, synthetic construct
  source 1..20: mol_type = other RNA
tgacaatagccaagacatgg

SEQ ID NO: 53004 - RNA, 20 nt, synthetic construct
  source 1..20: mol_type = other RNA
tgacaatataggagactatc

SEQ ID NO: 53005 - RNA, 20 nt, synthetic construct
  source 1..20: mol_type = other RNA
tgacaatttcagggagaatt

SEQ ID NO: 53006 - RNA, 20 nt, synthetic construct
  source 1..20: mol_type = other RNA
tgacaatttgccaaaatgat

SEQ ID NO: 53007 - RNA, 20 nt, synthetic construct
  source 1..20: mol_type = other RNA
tgacacaaaggactggaact

SEQ ID NO: 53008 - RNA, 20 nt, synthetic construct
  source 1..20: mol_type = other RNA
tgacacaacttactactaaa

SEQ ID NO: 53009 - RNA, 20 nt, synthetic construct
  source 1..20: mol_type = other RNA
tgacacaggctgaagggagg

SEQ ID NO: 53010 - RNA, 20 nt, synthetic construct
  source 1..20: mol_type = other RNA
tgacaccaaaactacaggca

SEQ ID NO: 53011 - RNA, 20 nt, synthetic construct
  source 1..20: mol_type = other RNA
tgacacccgaagaggacgat

SEQ ID NO: 53012 - RNA, 20 nt, synthetic construct
  source 1..20: mol_type = other RNA
tgacacccgacccactagtg

SEQ ID NO: 53013 - RNA, 20 nt, synthetic construct
  source 1..20: mol_type = other RNA
tgacacctgaggggtcttat

SEQ ID NO: 53014 - RNA, 20 nt, synthetic construct
  source 1..20: mol_type = other RNA
tgacagaaaatatctacaaa

SEQ ID NO: 53015 - RNA, 20 nt, synthetic construct
  source 1..20: mol_type = other RNA
tgacagaaataatacaaatg

SEQ ID NO: 53016 - RNA, 20 nt, synthetic construct
  source 1..20: mol_type = other RNA
tgacagaacaaactcaagtt

SEQ ID NO: 53017 - RNA, 20 nt, synthetic construct
  source 1..20: mol_type = other RNA
tgacagaacaaataacacca

SEQ ID NO: 53018 - RNA, 20 nt, synthetic construct
  source 1..20: mol_type = other RNA
tgacagaatgcatcttttaa

SEQ ID NO: 53019 - RNA, 20 nt, synthetic construct
  source 1..20: mol_type = other RNA
tgacagagagagacctttct

SEQ ID NO: 53020 - RNA, 20 nt, synthetic construct
  source 1..20: mol_type = other RNA
tgacagagccgagcagaagg

SEQ ID NO: 53021 - RNA, 20 nt, synthetic construct
  source 1..20: mol_type = other RNA
tgacagagttccacctccat

SEQ ID NO: 53022 - RNA, 20 nt, synthetic construct
  source 1..20: mol_type = other RNA
tgacagatcccaaaaaggtt

SEQ ID NO: 53023 - RNA, 20 nt, synthetic construct
  source 1..20: mol_type = other RNA
tgacagatgagaaatacttg

SEQ ID NO: 53024 - RNA, 20 nt, synthetic construct
  source 1..20: mol_type = other RNA
tgacagatgagactcttaat

SEQ ID NO: 53025 - RNA, 20 nt, synthetic construct
  source 1..20: mol_type = other RNA
tgacagattaaataccacct

SEQ ID NO: 53026 - RNA, 20 nt, synthetic construct
  source 1..20: mol_type = other RNA
tgacagcaaataaacaaaat

SEQ ID NO: 53027 - RNA, 20 nt, synthetic construct
  source 1..20: mol_type = other RNA
tgacagccacgtgtattgag

SEQ ID NO: 53028 - RNA, 20 nt, synthetic construct
  source 1..20: mol_type = other RNA
tgacagctgagtagcgcttt

SEQ ID NO: 53029 - RNA, 20 nt, synthetic construct
  source 1..20: mol_type = other RNA
tgacaggacagagcagtagg

SEQ ID NO: 53030 - RNA, 20 nt, synthetic construct
  source 1..20: mol_type = other RNA
tgacaggactccacagagtt

SEQ ID NO: 53031 - RNA, 20 nt, synthetic construct
  source 1..20: mol_type = other RNA
tgacaggtgagtggactgtg

SEQ ID NO: 53032 - RNA, 20 nt, synthetic construct
  source 1..20: mol_type = other RNA
tgacaggtggtatgggagat

SEQ ID NO: 53033 - RNA, 20 nt, synthetic construct
  source 1..20: mol_type = other RNA
tgacagtatgtcagactcat

SEQ ID NO: 53034 - RNA, 20 nt, synthetic construct
  source 1..20: mol_type = other RNA
tgacagtggacaaaggttcc

SEQ ID NO: 53035 - RNA, 20 nt, synthetic construct
  source 1..20: mol_type = other RNA
tgacagttactctaaaagaa

SEQ ID NO: 53036 - RNA, 20 nt, synthetic construct
  source 1..20: mol_type = other RNA
tgacagttctatttctttcc

SEQ ID NO: 53037 - RNA, 20 nt, synthetic construct
  source 1..20: mol_type = other RNA
tgacagttctgtgaatttga

SEQ ID NO: 53038 - RNA, 20 nt, synthetic construct
  source 1..20: mol_type = other RNA
tgacataactgtaaagtaat

SEQ ID NO: 53039 - RNA, 20 nt, synthetic construct
  source 1..20: mol_type = other RNA
tgacatactgtcacaggctt

SEQ ID NO: 53040 - RNA, 20 nt, synthetic construct
  source 1..20: mol_type = other RNA
tgacatatgccggctgttag

SEQ ID NO: 53041 - RNA, 20 nt, synthetic construct
  source 1..20: mol_type = other RNA
tgacatatgttttgcttcga

SEQ ID NO: 53042 - RNA, 20 nt, synthetic construct
  source 1..20: mol_type = other RNA
tgacatcaagggtggtgctg

SEQ ID NO: 53043 - RNA, 20 nt, synthetic construct
  source 1..20: mol_type = other RNA
tgacatcctttaatttgggt

SEQ ID NO: 53044 - RNA, 20 nt, synthetic construct
  source 1..20: mol_type = other RNA
tgacatcctttgcgtctgtg

SEQ ID NO: 53045 - RNA, 20 nt, synthetic construct
  source 1..20: mol_type = other RNA
tgacatcttgcataactcgt

SEQ ID NO: 53046 - RNA, 20 nt, synthetic construct
  source 1..20: mol_type = other RNA
tgacatgacaggtgagtgga

SEQ ID NO: 53047 - RNA, 20 nt, synthetic construct
  source 1..20: mol_type = other RNA
tgacatgagagctaagggaa

SEQ ID NO: 53048 - RNA, 20 nt, synthetic construct
  source 1..20: mol_type = other RNA
tgacatgattgaggacttca

SEQ ID NO: 53049 - RNA, 20 nt, synthetic construct
  source 1..20: mol_type = other RNA
tgacatggttttcctactaa

SEQ ID NO: 53050 - RNA, 20 nt, synthetic construct
  source 1..20: mol_type = other RNA
tgacatgtgtaaaacatctg

SEQ ID NO: 53051 - RNA, 20 nt, synthetic construct
  source 1..20: mol_type = other RNA
tgacatgtgttttatttagg

SEQ ID NO: 53052 - RNA, 20 nt, synthetic construct
  source 1..20: mol_type = other RNA
tgacattagtggtggtagta

SEQ ID NO: 53053 - RNA, 20 nt, synthetic construct
  source 1..20: mol_type = other RNA
tgacattcttaccttctaaa

SEQ ID NO: 53054 - RNA, 20 nt, synthetic construct
  source 1..20: mol_type = other RNA
tgacattggttattcatgtt

SEQ ID NO: 53055 - RNA, 20 nt, synthetic construct
  source 1..20: mol_type = other RNA
tgacatttgcttttcctgga

SEQ ID NO: 53056 - RNA, 20 nt, synthetic construct
  source 1..20: mol_type = other RNA
tgacatttttcaaataccta

SEQ ID NO: 53057 - RNA, 20 nt, synthetic construct
  source 1..20: mol_type = other RNA
tgaccaaaacaaaaaacaaa

SEQ ID NO: 53058 - RNA, 20 nt, synthetic construct
  source 1..20: mol_type = other RNA
tgaccaaacatgtgaggatt

SEQ ID NO: 53059 - RNA, 20 nt, synthetic construct
  source 1..20: mol_type = other RNA
tgaccaactatttcactaaa

SEQ ID NO: 53060 - RNA, 20 nt, synthetic construct
  source 1..20: mol_type = other RNA
tgaccacagtttgaaacttt

SEQ ID NO: 53061 - RNA, 20 nt, synthetic construct
  source 1..20: mol_type = other RNA
tgaccacattcccaaatgtc

SEQ ID NO: 53062 - RNA, 20 nt, synthetic construct
  source 1..20: mol_type = other RNA
tgaccagatcaaacgtgctt

SEQ ID NO: 53063 - RNA, 20 nt, synthetic construct
  source 1..20: mol_type = other RNA
tgaccagtgtgatgggggta

SEQ ID NO: 53064 - RNA, 20 nt, synthetic construct
  source 1..20: mol_type = other RNA
tgaccatctcagcacagagc

SEQ ID NO: 53065 - RNA, 20 nt, synthetic construct
  source 1..20: mol_type = other RNA
tgaccatgggacaagtgggt

SEQ ID NO: 53066 - RNA, 20 nt, synthetic construct
  source 1..20: mol_type = other RNA
tgaccattccacgctgtggc

SEQ ID NO: 53067 - RNA, 20 nt, synthetic construct
  source 1..20: mol_type = other RNA
tgaccattgtgtggacacac

SEQ ID NO: 53068 - RNA, 20 nt, synthetic construct
  source 1..20: mol_type = other RNA
tgaccatttttatatctttg

SEQ ID NO: 53069 - RNA, 20 nt, synthetic construct
  source 1..20: mol_type = other RNA
tgacccaatcatgttcttta

SEQ ID NO: 53070 - RNA, 20 nt, synthetic construct
  source 1..20: mol_type = other RNA
tgacccactggtttcagtcc

SEQ ID NO: 53071 - RNA, 20 nt, synthetic construct
  source 1..20: mol_type = other RNA
tgacccagagcctaatgtgt

SEQ ID NO: 53072 - RNA, 20 nt, synthetic construct
  source 1..20: mol_type = other RNA
tgacccataaactgaacatt

SEQ ID NO: 53073 - RNA, 20 nt, synthetic construct
  source 1..20: mol_type = other RNA
tgaccctgagtccagaggtg

SEQ ID NO: 53074 - RNA, 20 nt, synthetic construct
  source 1..20: mol_type = other RNA
tgaccctgctatgcatactt

SEQ ID NO: 53075 - RNA, 20 nt, synthetic construct
  source 1..20: mol_type = other RNA
tgaccctttattcaaagatc

SEQ ID NO: 53076 - RNA, 20 nt, synthetic construct
  source 1..20: mol_type = other RNA
tgaccctttgaagtatgtaa

SEQ ID NO: 53077 - RNA, 20 nt, synthetic construct
  source 1..20: mol_type = other RNA
tgaccgagatacttaagttt

SEQ ID NO: 53078 - RNA, 20 nt, synthetic construct
  source 1..20: mol_type = other RNA
tgaccgctttcgtgagggtt

SEQ ID NO: 53079 - RNA, 20 nt, synthetic construct
  source 1..20: mol_type = other RNA
tgacctaaaatcttattccc

SEQ ID NO: 53080 - RNA, 20 nt, synthetic construct
  source 1..20: mol_type = other RNA
tgacctaaagttttaagaaa

SEQ ID NO: 53081 - RNA, 20 nt, synthetic construct
  source 1..20: mol_type = other RNA
tgacctaagcttgggtagga

SEQ ID NO: 53082 - RNA, 20 nt, synthetic construct
  source 1..20: mol_type = other RNA
tgacctatctattaacagaa

SEQ ID NO: 53083 - RNA, 20 nt, synthetic construct
  source 1..20: mol_type = other RNA
tgacctcaagcgatccagcc

SEQ ID NO: 53084 - RNA, 20 nt, synthetic construct
  source 1..20: mol_type = other RNA
tgacctcagtggtagttaca

SEQ ID NO: 53085 - RNA, 20 nt, synthetic construct
  source 1..20: mol_type = other RNA
tgacctcatgtaactaatta

SEQ ID NO: 53086 - RNA, 20 nt, synthetic construct
  source 1..20: mol_type = other RNA
tgacctcccaaaggactggg

SEQ ID NO: 53087 - RNA, 20 nt, synthetic construct
  source 1..20: mol_type = other RNA
tgacctcctcccacttacat

SEQ ID NO: 53088 - RNA, 20 nt, synthetic construct
  source 1..20: mol_type = other RNA
tgacctctgcagttagcatg

SEQ ID NO: 53089 - RNA, 20 nt, synthetic construct
  source 1..20: mol_type = other RNA
tgacctgccagagttggcac

SEQ ID NO: 53090 - RNA, 20 nt, synthetic construct
  source 1..20: mol_type = other RNA
tgacctgctttcttggggct

SEQ ID NO: 53091 - RNA, 20 nt, synthetic construct
  source 1..20: mol_type = other RNA
tgacctggaaattattcaat

SEQ ID NO: 53092 - RNA, 20 nt, synthetic construct
  source 1..20: mol_type = other RNA
tgacctgggagaaagaccaa

SEQ ID NO: 53093 - RNA, 20 nt, synthetic construct
  source 1..20: mol_type = other RNA
tgacctggtactctatgata

SEQ ID NO: 53094 - RNA, 20 nt, synthetic construct
  source 1..20: mol_type = other RNA
tgacctgtaatttttctctt

SEQ ID NO: 53095 - RNA, 20 nt, synthetic construct
  source 1..20: mol_type = other RNA
tgacctgtccttgtgtttta

SEQ ID NO: 53096 - RNA, 20 nt, synthetic construct
  source 1..20: mol_type = other RNA
tgaccttagtggttgaccca

SEQ ID NO: 53097 - RNA, 20 nt, synthetic construct
  source 1..20: mol_type = other RNA
tgaccttagttttcactttt

SEQ ID NO: 53098 - RNA, 20 nt, synthetic construct
  source 1..20: mol_type = other RNA
tgaccttccttgtgtcttaa

SEQ ID NO: 53099 - RNA, 20 nt, synthetic construct
  source 1..20: mol_type = other RNA
tgaccttctacttatctttt

SEQ ID NO: 53100 - RNA, 20 nt, synthetic construct
  source 1..20: mol_type = other RNA
tgaccttgacaataaatggt

SEQ ID NO: 53101 - RNA, 20 nt, synthetic construct
  source 1..20: mol_type = other RNA
tgaccttgtatccagtaatc

SEQ ID NO: 53102 - RNA, 20 nt, synthetic construct
  source 1..20: mol_type = other RNA
tgaccttgtgcatgtgcagg

SEQ ID NO: 53103 - RNA, 20 nt, synthetic construct
  source 1..20: mol_type = other RNA
tgacgaaagtgaagcccaga

SEQ ID NO: 53104 - RNA, 20 nt, synthetic construct
  source 1..20: mol_type = other RNA
tgacgaagtcacattctagt

SEQ ID NO: 53105 - RNA, 20 nt, synthetic construct
  source 1..20: mol_type = other RNA
tgacgcgcaacaattcaaca

SEQ ID NO: 53106 - RNA, 20 nt, synthetic construct
  source 1..20: mol_type = other RNA
tgacgtgagatcatgccact

SEQ ID NO: 53107 - RNA, 20 nt, synthetic construct
  source 1..20: mol_type = other RNA
tgacgtttaaatgagttaat

SEQ ID NO: 53108 - RNA, 20 nt, synthetic construct
  source 1..20: mol_type = other RNA
tgactaaattgaaacaatac

SEQ ID NO: 53109 - RNA, 20 nt, synthetic construct
  source 1..20: mol_type = other RNA
tgactaatttgaggcattag

SEQ ID NO: 53110 - RNA, 20 nt, synthetic construct
  source 1..20: mol_type = other RNA
tgactacacatacacaggga

SEQ ID NO: 53111 - RNA, 20 nt, synthetic construct
  source 1..20: mol_type = other RNA
tgactacactgaagggaatt

SEQ ID NO: 53112 - RNA, 20 nt, synthetic construct
  source 1..20: mol_type = other RNA
tgactaccaattctccctga

SEQ ID NO: 53113 - RNA, 20 nt, synthetic construct
  source 1..20: mol_type = other RNA
tgactaccatctctccaaca

SEQ ID NO: 53114 - RNA, 20 nt, synthetic construct
  source 1..20: mol_type = other RNA
tgactagaagaaatgttaac

SEQ ID NO: 53115 - RNA, 20 nt, synthetic construct
  source 1..20: mol_type = other RNA
tgactaggctcctgagaacc

SEQ ID NO: 53116 - RNA, 20 nt, synthetic construct
  source 1..20: mol_type = other RNA
tgactagtacgtgcagagca

SEQ ID NO: 53117 - RNA, 20 nt, synthetic construct
  source 1..20: mol_type = other RNA
tgactagtggctcatacttg

SEQ ID NO: 53118 - RNA, 20 nt, synthetic construct
  source 1..20: mol_type = other RNA
tgactagtgtgaatgaggag

SEQ ID NO: 53119 - RNA, 20 nt, synthetic construct
  source 1..20: mol_type = other RNA
tgactatgaaaagcctcaaa

SEQ ID NO: 53120 - RNA, 20 nt, synthetic construct
  source 1..20: mol_type = other RNA
tgactatgaataaatctaac

SEQ ID NO: 53121 - RNA, 20 nt, synthetic construct
  source 1..20: mol_type = other RNA
tgactattttaccctcattt

SEQ ID NO: 53122 - RNA, 20 nt, synthetic construct
  source 1..20: mol_type = other RNA
tgactcaatcttcttatttg

SEQ ID NO: 53123 - RNA, 20 nt, synthetic construct
  source 1..20: mol_type = other RNA
tgactcagtacttccctctt

SEQ ID NO: 53124 - RNA, 20 nt, synthetic construct
  source 1..20: mol_type = other RNA
tgactccaaagcaaaccaga

SEQ ID NO: 53125 - RNA, 20 nt, synthetic construct
  source 1..20: mol_type = other RNA
tgactccaagcacacagttt

SEQ ID NO: 53126 - RNA, 20 nt, synthetic construct
  source 1..20: mol_type = other RNA
tgactccctttttaggtagg

SEQ ID NO: 53127 - RNA, 20 nt, synthetic construct
  source 1..20: mol_type = other RNA
tgactcctaaaacatggtcc

SEQ ID NO: 53128 - RNA, 20 nt, synthetic construct
  source 1..20: mol_type = other RNA
tgactctaaagtctatgctc

SEQ ID NO: 53129 - RNA, 20 nt, synthetic construct
  source 1..20: mol_type = other RNA
tgactctgtgcttgtgcttt

SEQ ID NO: 53130 - RNA, 20 nt, synthetic construct
  source 1..20: mol_type = other RNA
tgactgaaggattcctccct

SEQ ID NO: 53131 - RNA, 20 nt, synthetic construct
  source 1..20: mol_type = other RNA
tgactgaattaatctcttac

SEQ ID NO: 53132 - RNA, 20 nt, synthetic construct
  source 1..20: mol_type = other RNA
tgactgaattcccacaaaat

SEQ ID NO: 53133 - RNA, 20 nt, synthetic construct
  source 1..20: mol_type = other RNA
tgactgacataactgtaaag

SEQ ID NO: 53134 - RNA, 20 nt, synthetic construct
  source 1..20: mol_type = other RNA
tgactgagatacttaagttt

SEQ ID NO: 53135 - RNA, 20 nt, synthetic construct
  source 1..20: mol_type = other RNA
tgactggccatccttcccaa

SEQ ID NO: 53136 - RNA, 20 nt, synthetic construct
  source 1..20: mol_type = other RNA
tgactggctgtgccaactct

SEQ ID NO: 53137 - RNA, 20 nt, synthetic construct
  source 1..20: mol_type = other RNA
tgactggcttaatgcatata

SEQ ID NO: 53138 - RNA, 20 nt, synthetic construct
  source 1..20: mol_type = other RNA
tgactggtgtccttctgaga

SEQ ID NO: 53139 - RNA, 20 nt, synthetic construct
  source 1..20: mol_type = other RNA
tgactgtaagctgaactctg

SEQ ID NO: 53140 - RNA, 20 nt, synthetic construct
  source 1..20: mol_type = other RNA
tgactgtagtccctgctact

SEQ ID NO: 53141 - RNA, 20 nt, synthetic construct
  source 1..20: mol_type = other RNA
tgactgtcctgaattctaat

SEQ ID NO: 53142 - RNA, 20 nt, synthetic construct
  source 1..20: mol_type = other RNA
tgactgtgagggtaagaaag

SEQ ID NO: 53143 - RNA, 20 nt, synthetic construct
  source 1..20: mol_type = other RNA
tgactgttgcctctgtgcta

SEQ ID NO: 53144 - RNA, 20 nt, synthetic construct
  source 1..20: mol_type = other RNA
tgacttaagcaacagaaatt

SEQ ID NO: 53145 - RNA, 20 nt, synthetic construct
  source 1..20: mol_type = other RNA
tgacttacagaccttattca

SEQ ID NO: 53146 - RNA, 20 nt, synthetic construct
  source 1..20: mol_type = other RNA
tgacttacagatatcaccca

SEQ ID NO: 53147 - RNA, 20 nt, synthetic construct
  source 1..20: mol_type = other RNA
tgacttagagggcttcatgc

SEQ ID NO: 53148 - RNA, 20 nt, synthetic construct
  source 1..20: mol_type = other RNA
tgacttagtgagggaggcca

SEQ ID NO: 53149 - RNA, 20 nt, synthetic construct
  source 1..20: mol_type = other RNA
tgacttcaaactatacttca

SEQ ID NO: 53150 - RNA, 20 nt, synthetic construct
  source 1..20: mol_type = other RNA
tgacttcaagaggttaaaac

SEQ ID NO: 53151 - RNA, 20 nt, synthetic construct
  source 1..20: mol_type = other RNA
tgacttcactagatctcttt

SEQ ID NO: 53152 - RNA, 20 nt, synthetic construct
  source 1..20: mol_type = other RNA
tgacttcactggagaattct

SEQ ID NO: 53153 - RNA, 20 nt, synthetic construct
  source 1..20: mol_type = other RNA
tgacttcacttccaagtccc

SEQ ID NO: 53154 - RNA, 20 nt, synthetic construct
  source 1..20: mol_type = other RNA
tgacttcattcttgacatga

SEQ ID NO: 53155 - RNA, 20 nt, synthetic construct
  source 1..20: mol_type = other RNA
tgacttcctggctctagccc

SEQ ID NO: 53156 - RNA, 20 nt, synthetic construct
  source 1..20: mol_type = other RNA
tgacttcgtcaaggggagag

SEQ ID NO: 53157 - RNA, 20 nt, synthetic construct
  source 1..20: mol_type = other RNA
tgacttctcagggcctgctt

SEQ ID NO: 53158 - RNA, 20 nt, synthetic construct
  source 1..20: mol_type = other RNA
tgacttctctcagagggaaa

SEQ ID NO: 53159 - RNA, 20 nt, synthetic construct
  source 1..20: mol_type = other RNA
tgacttctggatgtgtatga

SEQ ID NO: 53160 - RNA, 20 nt, synthetic construct
  source 1..20: mol_type = other RNA
tgactttaccctgctggaac

SEQ ID NO: 53161 - RNA, 20 nt, synthetic construct
  source 1..20: mol_type = other RNA
tgactttactgttctccagt

SEQ ID NO: 53162 - RNA, 20 nt, synthetic construct
  source 1..20: mol_type = other RNA
tgactttatggtatcacttt

SEQ ID NO: 53163 - RNA, 20 nt, synthetic construct
  source 1..20: mol_type = other RNA
tgactttcatttgtaattca

SEQ ID NO: 53164 - RNA, 20 nt, synthetic construct
  source 1..20: mol_type = other RNA
tgacttttaaaatatgtgga

SEQ ID NO: 53165 - RNA, 20 nt, synthetic construct
  source 1..20: mol_type = other RNA
tgacttttatcaattcacaa

SEQ ID NO: 53166 - RNA, 20 nt, synthetic construct
  source 1..20: mol_type = other RNA
tgacttttccttaaaaaagg

SEQ ID NO: 53167 - RNA, 20 nt, synthetic construct
  source 1..20: mol_type = other RNA
tgacttttttgcccactctt

SEQ ID NO: 53168 - RNA, 20 nt, synthetic construct
  source 1..20: mol_type = other RNA
tgagaaacatacatgttcag

SEQ ID NO: 53169 - RNA, 20 nt, synthetic construct
  source 1..20: mol_type = other RNA
tgagaaacctaagaaaggtc

SEQ ID NO: 53170 - RNA, 20 nt, synthetic construct
  source 1..20: mol_type = other RNA
tgagaaactatccaacatgc

SEQ ID NO: 53171 - RNA, 20 nt, synthetic construct
  source 1..20: mol_type = other RNA
tgagaaagagggaagtactg

SEQ ID NO: 53172 - RNA, 20 nt, synthetic construct
  source 1..20: mol_type = other RNA
tgagaaagcacataaaaaag

SEQ ID NO: 53173 - RNA, 20 nt, synthetic construct
  source 1..20: mol_type = other RNA
tgagaaaggtttcttcactc

SEQ ID NO: 53174 - RNA, 20 nt, synthetic construct
  source 1..20: mol_type = other RNA
tgagaaatacttggacaggg

SEQ ID NO: 53175 - RNA, 20 nt, synthetic construct
  source 1..20: mol_type = other RNA
tgagaaatgtctggtttgct

SEQ ID NO: 53176 - RNA, 20 nt, synthetic construct
  source 1..20: mol_type = other RNA
tgagaaatgttaagattcaa

SEQ ID NO: 53177 - RNA, 20 nt, synthetic construct
  source 1..20: mol_type = other RNA
tgagaacccagtgtctgcta

SEQ ID NO: 53178 - RNA, 20 nt, synthetic construct
  source 1..20: mol_type = other RNA
tgagaaccggaacttgagtt

SEQ ID NO: 53179 - RNA, 20 nt, synthetic construct
  source 1..20: mol_type = other RNA
tgagaacttcagtatatatt

SEQ ID NO: 53180 - RNA, 20 nt, synthetic construct
  source 1..20: mol_type = other RNA
tgagaagactaagcagaaat

SEQ ID NO: 53181 - RNA, 20 nt, synthetic construct
  source 1..20: mol_type = other RNA
tgagaagactggaaaagtgt

SEQ ID NO: 53182 - RNA, 20 nt, synthetic construct
  source 1..20: mol_type = other RNA
tgagaagagctgtaacagag

SEQ ID NO: 53183 - RNA, 20 nt, synthetic construct
  source 1..20: mol_type = other RNA
tgagaagcagaaaatcagtg

SEQ ID NO: 53184 - RNA, 20 nt, synthetic construct
  source 1..20: mol_type = other RNA
tgagaagccacacagtacaa

SEQ ID NO: 53185 - RNA, 20 nt, synthetic construct
  source 1..20: mol_type = other RNA
tgagaaggcgaaatgtgaac

SEQ ID NO: 53186 - RNA, 20 nt, synthetic construct
  source 1..20: mol_type = other RNA
tgagaagtaacattacaaca

SEQ ID NO: 53187 - RNA, 20 nt, synthetic construct
  source 1..20: mol_type = other RNA
tgagaagtcaaagcctgtgg

SEQ ID NO: 53188 - RNA, 20 nt, synthetic construct
  source 1..20: mol_type = other RNA
tgagaagtcttttcctaccc

SEQ ID NO: 53189 - RNA, 20 nt, synthetic construct
  source 1..20: mol_type = other RNA
tgagaattcattgttgtgtg

SEQ ID NO: 53190 - RNA, 20 nt, synthetic construct
  source 1..20: mol_type = other RNA
tgagaatttcagaaagagaa

SEQ ID NO: 53191 - RNA, 20 nt, synthetic construct
  source 1..20: mol_type = other RNA
tgagaatttcaggtgtgtaa

SEQ ID NO: 53192 - RNA, 20 nt, synthetic construct
  source 1..20: mol_type = other RNA
tgagacacacgagtattcaa

SEQ ID NO: 53193 - RNA, 20 nt, synthetic construct
  source 1..20: mol_type = other RNA
tgagacacctacaatattaa

SEQ ID NO: 53194 - RNA, 20 nt, synthetic construct
  source 1..20: mol_type = other RNA
tgagacacggtctcacactg

SEQ ID NO: 53195 - RNA, 20 nt, synthetic construct
  source 1..20: mol_type = other RNA
tgagacagaccctggcttgt

SEQ ID NO: 53196 - RNA, 20 nt, synthetic construct
  source 1..20: mol_type = other RNA
tgagacagattctctgtctc

SEQ ID NO: 53197 - RNA, 20 nt, synthetic construct
  source 1..20: mol_type = other RNA
tgagacaggatccagatgta

SEQ ID NO: 53198 - RNA, 20 nt, synthetic construct
  source 1..20: mol_type = other RNA
tgagacagggtctcactctt

SEQ ID NO: 53199 - RNA, 20 nt, synthetic construct
  source 1..20: mol_type = other RNA
tgagacagtattgtgctgaa

SEQ ID NO: 53200 - RNA, 20 nt, synthetic construct
  source 1..20: mol_type = other RNA
tgagacatcacaatgcgttt

SEQ ID NO: 53201 - RNA, 20 nt, synthetic construct
  source 1..20: mol_type = other RNA
tgagacatttgagggtgctg

SEQ ID NO: 53202 - RNA, 20 nt, synthetic construct
  source 1..20: mol_type = other RNA
tgagaccaaatgcataaaaa

SEQ ID NO: 53203 - RNA, 20 nt, synthetic construct
  source 1..20: mol_type = other RNA
tgagaccacagacgtgcagc

SEQ ID NO: 53204 - RNA, 20 nt, synthetic construct
  source 1..20: mol_type = other RNA
tgagaccaccacacttgctt

SEQ ID NO: 53205 - RNA, 20 nt, synthetic construct
  source 1..20: mol_type = other RNA
tgagaccagcgtgggcaaca

SEQ ID NO: 53206 - RNA, 20 nt, synthetic construct
  source 1..20: mol_type = other RNA
tgagaccccatctctaccaa

SEQ ID NO: 53207 - RNA, 20 nt, synthetic construct
  source 1..20: mol_type = other RNA
tgagaccggatgaggtggct

SEQ ID NO: 53208 - RNA, 20 nt, synthetic construct
  source 1..20: mol_type = other RNA
tgagacctcaggcagtctag

SEQ ID NO: 53209 - RNA, 20 nt, synthetic construct
  source 1..20: mol_type = other RNA
tgagacctcatcttagccgg

SEQ ID NO: 53210 - RNA, 20 nt, synthetic construct
  source 1..20: mol_type = other RNA
tgagacggaagactcatact

SEQ ID NO: 53211 - RNA, 20 nt, synthetic construct
  source 1..20: mol_type = other RNA
tgagacggaatcttaccctg

SEQ ID NO: 53212 - RNA, 20 nt, synthetic construct
  source 1..20: mol_type = other RNA
tgagactattatgagcagtt

SEQ ID NO: 53213 - RNA, 20 nt, synthetic construct
  source 1..20: mol_type = other RNA
tgagactcttaatattgaaa

SEQ ID NO: 53214 - RNA, 20 nt, synthetic construct
  source 1..20: mol_type = other RNA
tgagactgcagtgacctatc

SEQ ID NO: 53215 - RNA, 20 nt, synthetic construct
  source 1..20: mol_type = other RNA
tgagacttagatttatttag

SEQ ID NO: 53216 - RNA, 20 nt, synthetic construct
  source 1..20: mol_type = other RNA
tgagacttaggcaaaggaaa

SEQ ID NO: 53217 - RNA, 20 nt, synthetic construct
  source 1..20: mol_type = other RNA
tgagagaaaattgttcatga

SEQ ID NO: 53218 - RNA, 20 nt, synthetic construct
  source 1..20: mol_type = other RNA
tgagagaagtcagactaaga

SEQ ID NO: 53219 - RNA, 20 nt, synthetic construct
  source 1..20: mol_type = other RNA
tgagagagaattctaaattg

SEQ ID NO: 53220 - RNA, 20 nt, synthetic construct
  source 1..20: mol_type = other RNA
tgagagagataaaacctgga

SEQ ID NO: 53221 - RNA, 20 nt, synthetic construct
  source 1..20: mol_type = other RNA
tgagagatagaaagcaccag

SEQ ID NO: 53222 - RNA, 20 nt, synthetic construct
  source 1..20: mol_type = other RNA
tgagagcagagacacacatc

SEQ ID NO: 53223 - RNA, 20 nt, synthetic construct
  source 1..20: mol_type = other RNA
tgagagctaagggaagtttt

SEQ ID NO: 53224 - RNA, 20 nt, synthetic construct
  source 1..20: mol_type = other RNA
tgagagctcaggccagtgag

SEQ ID NO: 53225 - RNA, 20 nt, synthetic construct
  source 1..20: mol_type = other RNA
tgagagctgtgccgaggcag

SEQ ID NO: 53226 - RNA, 20 nt, synthetic construct
  source 1..20: mol_type = other RNA
tgagagctttcttttaaaga

SEQ ID NO: 53227 - RNA, 20 nt, synthetic construct
  source 1..20: mol_type = other RNA
tgagaggactgcctggtcct

SEQ ID NO: 53228 - RNA, 20 nt, synthetic construct
  source 1..20: mol_type = other RNA
tgagaggctttaagcagaaa

SEQ ID NO: 53229 - RNA, 20 nt, synthetic construct
  source 1..20: mol_type = other RNA
tgagagggagaccgtggggg

SEQ ID NO: 53230 - RNA, 20 nt, synthetic construct
  source 1..20: mol_type = other RNA
tgagagtaagttgcatacgt

SEQ ID NO: 53231 - RNA, 20 nt, synthetic construct
  source 1..20: mol_type = other RNA
tgagagtattgccaggtttg

SEQ ID NO: 53232 - RNA, 20 nt, synthetic construct
  source 1..20: mol_type = other RNA
tgagagtctcttaagaccac

SEQ ID NO: 53233 - RNA, 20 nt, synthetic construct
  source 1..20: mol_type = other RNA
tgagagtgaaaacacaaact

SEQ ID NO: 53234 - RNA, 20 nt, synthetic construct
  source 1..20: mol_type = other RNA
tgagagtgcagtatgtagga

SEQ ID NO: 53235 - RNA, 20 nt, synthetic construct
  source 1..20: mol_type = other RNA
tgagagtggcctaaatcagg

SEQ ID NO: 53236 - RNA, 20 nt, synthetic construct
  source 1..20: mol_type = other RNA
tgagataaactagattacct

SEQ ID NO: 53237 - RNA, 20 nt, synthetic construct
  source 1..20: mol_type = other RNA
tgagatactacgcctagctg

SEQ ID NO: 53238 - RNA, 20 nt, synthetic construct
  source 1..20: mol_type = other RNA
tgagatagaccagatgcgtg

SEQ ID NO: 53239 - RNA, 20 nt, synthetic construct
  source 1..20: mol_type = other RNA
tgagatctaaattttaagtg

SEQ ID NO: 53240 - RNA, 20 nt, synthetic construct
  source 1..20: mol_type = other RNA
tgagatgggaagaaaaaata

SEQ ID NO: 53241 - RNA, 20 nt, synthetic construct
  source 1..20: mol_type = other RNA
tgagatggtcagtactatct

SEQ ID NO: 53242 - RNA, 20 nt, synthetic construct
  source 1..20: mol_type = other RNA
tgagatgtactggaagtgta

SEQ ID NO: 53243 - RNA, 20 nt, synthetic construct
  source 1..20: mol_type = other RNA
tgagattaatgtaggtgtct

SEQ ID NO: 53244 - RNA, 20 nt, synthetic construct
  source 1..20: mol_type = other RNA
tgagattacagatgtgagcc

SEQ ID NO: 53245 - RNA, 20 nt, synthetic construct
  source 1..20: mol_type = other RNA
tgagattacatagcaaggaa

SEQ ID NO: 53246 - RNA, 20 nt, synthetic construct
  source 1..20: mol_type = other RNA
tgagattagcgaaagggatt

SEQ ID NO: 53247 - RNA, 20 nt, synthetic construct
  source 1..20: mol_type = other RNA
tgagattgatagatcatatg

SEQ ID NO: 53248 - RNA, 20 nt, synthetic construct
  source 1..20: mol_type = other RNA
tgagattgccccattgcact

SEQ ID NO: 53249 - RNA, 20 nt, synthetic construct
  source 1..20: mol_type = other RNA
tgagattgtgccagtgaact

SEQ ID NO: 53250 - RNA, 20 nt, synthetic construct
  source 1..20: mol_type = other RNA
tgagatttgagtcttgctct

SEQ ID NO: 53251 - RNA, 20 nt, synthetic construct
  source 1..20: mol_type = other RNA
tgagattttaattcttctgt

SEQ ID NO: 53252 - RNA, 20 nt, synthetic construct
  source 1..20: mol_type = other RNA
tgagcaaaaatacagctcca

SEQ ID NO: 53253 - RNA, 20 nt, synthetic construct
  source 1..20: mol_type = other RNA
tgagcaactactatttcgca

SEQ ID NO: 53254 - RNA, 20 nt, synthetic construct
  source 1..20: mol_type = other RNA
tgagcaaggaaggaaaggag

SEQ ID NO: 53255 - RNA, 20 nt, synthetic construct
  source 1..20: mol_type = other RNA
tgagcaaggtcgtttcagat

SEQ ID NO: 53256 - RNA, 20 nt, synthetic construct
  source 1..20: mol_type = other RNA
tgagcacaatgcctgccgca

SEQ ID NO: 53257 - RNA, 20 nt, synthetic construct
  source 1..20: mol_type = other RNA
tgagcagaaggaggaaaata

SEQ ID NO: 53258 - RNA, 20 nt, synthetic construct
  source 1..20: mol_type = other RNA
tgagcagagtcctgagggtg

SEQ ID NO: 53259 - RNA, 20 nt, synthetic construct
  source 1..20: mol_type = other RNA
tgagcagatcagtaacaaat

SEQ ID NO: 53260 - RNA, 20 nt, synthetic construct
  source 1..20: mol_type = other RNA
tgagcagtgaaagtctccct

SEQ ID NO: 53261 - RNA, 20 nt, synthetic construct
  source 1..20: mol_type = other RNA
tgagcagtgtttcctagatt

SEQ ID NO: 53262 - RNA, 20 nt, synthetic construct
  source 1..20: mol_type = other RNA
tgagcagttgtatgccaaaa

SEQ ID NO: 53263 - RNA, 20 nt, synthetic construct
  source 1..20: mol_type = other RNA
tgagcatcccagaggtactc

SEQ ID NO: 53264 - RNA, 20 nt, synthetic construct
  source 1..20: mol_type = other RNA
tgagcatccccgctgcgaga

SEQ ID NO: 53265 - RNA, 20 nt, synthetic construct
  source 1..20: mol_type = other RNA
tgagcatgctgcaactgaga

SEQ ID NO: 53266 - RNA, 20 nt, synthetic construct
  source 1..20: mol_type = other RNA
tgagcattccccacatagga

SEQ ID NO: 53267 - RNA, 20 nt, synthetic construct
  source 1..20: mol_type = other RNA
tgagcatttagccccctgaa

SEQ ID NO: 53268 - RNA, 20 nt, synthetic construct
  source 1..20: mol_type = other RNA
tgagcatttatataagttca

SEQ ID NO: 53269 - RNA, 20 nt, synthetic construct
  source 1..20: mol_type = other RNA
tgagccaaagaagaaatcaa

SEQ ID NO: 53270 - RNA, 20 nt, synthetic construct
  source 1..20: mol_type = other RNA
tgagccacagcgcccggccc

SEQ ID NO: 53271 - RNA, 20 nt, synthetic construct
  source 1..20: mol_type = other RNA
tgagccacagctacactcaa

SEQ ID NO: 53272 - RNA, 20 nt, synthetic construct
  source 1..20: mol_type = other RNA
tgagccacagggcccagcct

SEQ ID NO: 53273 - RNA, 20 nt, synthetic construct
  source 1..20: mol_type = other RNA
tgagccacatacatagtatt

SEQ ID NO: 53274 - RNA, 20 nt, synthetic construct
  source 1..20: mol_type = other RNA
tgagccaccacgtccggtcg

SEQ ID NO: 53275 - RNA, 20 nt, synthetic construct
  source 1..20: mol_type = other RNA
tgagccaccactcccggccg

SEQ ID NO: 53276 - RNA, 20 nt, synthetic construct
  source 1..20: mol_type = other RNA
tgagccaccgcgcctggtga

SEQ ID NO: 53277 - RNA, 20 nt, synthetic construct
  source 1..20: mol_type = other RNA
tgagccaccgtgccgggctt

SEQ ID NO: 53278 - RNA, 20 nt, synthetic construct
  source 1..20: mol_type = other RNA
tgagccacctcatccggtct

SEQ ID NO: 53279 - RNA, 20 nt, synthetic construct
  source 1..20: mol_type = other RNA
tgagccactaaaacaggaag

SEQ ID NO: 53280 - RNA, 20 nt, synthetic construct
  source 1..20: mol_type = other RNA
tgagccactacgcccggccc

SEQ ID NO: 53281 - RNA, 20 nt, synthetic construct
  source 1..20: mol_type = other RNA
tgagccactagtcagtatat

SEQ ID NO: 53282 - RNA, 20 nt, synthetic construct
  source 1..20: mol_type = other RNA
tgagccactgcgggcccagc

SEQ ID NO: 53283 - RNA, 20 nt, synthetic construct
  source 1..20: mol_type = other RNA
tgagccagagtttcactctg

SEQ ID NO: 53284 - RNA, 20 nt, synthetic construct
  source 1..20: mol_type = other RNA
tgagccagcaaatcagaaaa

SEQ ID NO: 53285 - RNA, 20 nt, synthetic construct
  source 1..20: mol_type = other RNA
tgagccaggcatggtggtgg

SEQ ID NO: 53286 - RNA, 20 nt, synthetic construct
  source 1..20: mol_type = other RNA
tgagccatcatgcctgggta

SEQ ID NO: 53287 - RNA, 20 nt, synthetic construct
  source 1..20: mol_type = other RNA
tgagccatcgcgcccagccc

SEQ ID NO: 53288 - RNA, 20 nt, synthetic construct
  source 1..20: mol_type = other RNA
tgagcccagagatcccacca

SEQ ID NO: 53289 - RNA, 20 nt, synthetic construct
  source 1..20: mol_type = other RNA
tgagcccaggaggttgaagc

SEQ ID NO: 53290 - RNA, 20 nt, synthetic construct
  source 1..20: mol_type = other RNA
tgagcccaggagttgcatca

SEQ ID NO: 53291 - RNA, 20 nt, synthetic construct
  source 1..20: mol_type = other RNA
tgagcccagggggtcgagac

SEQ ID NO: 53292 - RNA, 20 nt, synthetic construct
  source 1..20: mol_type = other RNA
tgagccccagaataggcaaa

SEQ ID NO: 53293 - RNA, 20 nt, synthetic construct
  source 1..20: mol_type = other RNA
tgagccgtcggtatgttaat

SEQ ID NO: 53294 - RNA, 20 nt, synthetic construct
  source 1..20: mol_type = other RNA
tgagcctccacacctggccc

SEQ ID NO: 53295 - RNA, 20 nt, synthetic construct
  source 1..20: mol_type = other RNA
tgagcctggaagttcaaggt

SEQ ID NO: 53296 - RNA, 20 nt, synthetic construct
  source 1..20: mol_type = other RNA
tgagcctgttccgattttac

SEQ ID NO: 53297 - RNA, 20 nt, synthetic construct
  source 1..20: mol_type = other RNA
tgagccttcagaactcttct

SEQ ID NO: 53298 - RNA, 20 nt, synthetic construct
  source 1..20: mol_type = other RNA
tgagctacaaactccaaacc

SEQ ID NO: 53299 - RNA, 20 nt, synthetic construct
  source 1..20: mol_type = other RNA
tgagctactgcatgctaggg

SEQ ID NO: 53300 - RNA, 20 nt, synthetic construct
  source 1..20: mol_type = other RNA
tgagctctagccttgtactg

SEQ ID NO: 53301 - RNA, 20 nt, synthetic construct
  source 1..20: mol_type = other RNA
tgagctctcagtggccctgt

SEQ ID NO: 53302 - RNA, 20 nt, synthetic construct
  source 1..20: mol_type = other RNA
tgagctgaaagtaaagatag

SEQ ID NO: 53303 - RNA, 20 nt, synthetic construct
  source 1..20: mol_type = other RNA
tgagctggaagtaaggattt

SEQ ID NO: 53304 - RNA, 20 nt, synthetic construct
  source 1..20: mol_type = other RNA
tgagctgtccccaccgcctt

SEQ ID NO: 53305 - RNA, 20 nt, synthetic construct
  source 1..20: mol_type = other RNA
tgagctgttaatggttagac

SEQ ID NO: 53306 - RNA, 20 nt, synthetic construct
  source 1..20: mol_type = other RNA
tgagctttccttagttcgaa

SEQ ID NO: 53307 - RNA, 20 nt, synthetic construct
  source 1..20: mol_type = other RNA
tgagctttttctttttaaac

SEQ ID NO: 53308 - RNA, 20 nt, synthetic construct
  source 1..20: mol_type = other RNA
tgaggaaagcaggttgcatt

SEQ ID NO: 53309 - RNA, 20 nt, synthetic construct
  source 1..20: mol_type = other RNA
tgaggaagaggaaggttcaa

SEQ ID NO: 53310 - RNA, 20 nt, synthetic construct
  source 1..20: mol_type = other RNA
tgaggaagctaatcaagccg

SEQ ID NO: 53311 - RNA, 20 nt, synthetic construct
  source 1..20: mol_type = other RNA
tgaggaaggagaatcgctta

SEQ ID NO: 53312 - RNA, 20 nt, synthetic construct
  source 1..20: mol_type = other RNA
tgaggacactagcaatccag

SEQ ID NO: 53313 - RNA, 20 nt, synthetic construct
  source 1..20: mol_type = other RNA
tgaggacatggagacagtga

SEQ ID NO: 53314 - RNA, 20 nt, synthetic construct
  source 1..20: mol_type = other RNA
tgaggacgctgatgacagtt

SEQ ID NO: 53315 - RNA, 20 nt, synthetic construct
  source 1..20: mol_type = other RNA
tgaggacttcatgtacaatg

SEQ ID NO: 53316 - RNA, 20 nt, synthetic construct
  source 1..20: mol_type = other RNA
tgaggagctgagaccacaga

SEQ ID NO: 53317 - RNA, 20 nt, synthetic construct
  source 1..20: mol_type = other RNA
tgaggagtgaatttttcatt

SEQ ID NO: 53318 - RNA, 20 nt, synthetic construct
  source 1..20: mol_type = other RNA
tgaggatataacgatagtct

SEQ ID NO: 53319 - RNA, 20 nt, synthetic construct
  source 1..20: mol_type = other RNA
tgaggatctgttggtgctta

SEQ ID NO: 53320 - RNA, 20 nt, synthetic construct
  source 1..20: mol_type = other RNA
tgaggatgactgtcctgaat

SEQ ID NO: 53321 - RNA, 20 nt, synthetic construct
  source 1..20: mol_type = other RNA
tgaggattcgattaaaataa

SEQ ID NO: 53322 - RNA, 20 nt, synthetic construct
  source 1..20: mol_type = other RNA
tgaggattggagactgataa

SEQ ID NO: 53323 - RNA, 20 nt, synthetic construct
  source 1..20: mol_type = other RNA
tgaggcagagagatggtggg

SEQ ID NO: 53324 - RNA, 20 nt, synthetic construct
  source 1..20: mol_type = other RNA
tgaggcagagtagagaaggc

SEQ ID NO: 53325 - RNA, 20 nt, synthetic construct
  source 1..20: mol_type = other RNA
tgaggcagcccgacctccag

SEQ ID NO: 53326 - RNA, 20 nt, synthetic construct
  source 1..20: mol_type = other RNA
tgaggcaggagaactgcctg

SEQ ID NO: 53327 - RNA, 20 nt, synthetic construct
  source 1..20: mol_type = other RNA
tgaggcaggagcatagcttg

SEQ ID NO: 53328 - RNA, 20 nt, synthetic construct
  source 1..20: mol_type = other RNA
tgaggcaggaggcacctgaa

SEQ ID NO: 53329 - RNA, 20 nt, synthetic construct
  source 1..20: mol_type = other RNA
tgaggcatattattgtaact

SEQ ID NO: 53330 - RNA, 20 nt, synthetic construct
  source 1..20: mol_type = other RNA
tgaggcattagtgaattcac

SEQ ID NO: 53331 - RNA, 20 nt, synthetic construct
  source 1..20: mol_type = other RNA
tgaggccccaggggacatag

SEQ ID NO: 53332 - RNA, 20 nt, synthetic construct
  source 1..20: mol_type = other RNA
tgaggccctattcaacctat

SEQ ID NO: 53333 - RNA, 20 nt, synthetic construct
  source 1..20: mol_type = other RNA
tgaggccgcagtgagccatg

SEQ ID NO: 53334 - RNA, 20 nt, synthetic construct
  source 1..20: mol_type = other RNA
tgaggccggaggattgcttg

SEQ ID NO: 53335 - RNA, 20 nt, synthetic construct
  source 1..20: mol_type = other RNA
tgaggcctcctgccttcctg

SEQ ID NO: 53336 - RNA, 20 nt, synthetic construct
  source 1..20: mol_type = other RNA
tgaggcctctccccttgacg

SEQ ID NO: 53337 - RNA, 20 nt, synthetic construct
  source 1..20: mol_type = other RNA
tgaggcggaaggattgccta

SEQ ID NO: 53338 - RNA, 20 nt, synthetic construct
  source 1..20: mol_type = other RNA
tgaggcggctggatcgcttg

SEQ ID NO: 53339 - RNA, 20 nt, synthetic construct
  source 1..20: mol_type = other RNA
tgaggctgggagtacaagac

SEQ ID NO: 53340 - RNA, 20 nt, synthetic construct
  source 1..20: mol_type = other RNA
tgaggctgggccctgtggct

SEQ ID NO: 53341 - RNA, 20 nt, synthetic construct
  source 1..20: mol_type = other RNA
tgaggctggggaattgcatg

SEQ ID NO: 53342 - RNA, 20 nt, synthetic construct
  source 1..20: mol_type = other RNA
tgaggcttttattggtaatg

SEQ ID NO: 53343 - RNA, 20 nt, synthetic construct
  source 1..20: mol_type = other RNA
tgaggcttttcatagtcatc

SEQ ID NO: 53344 - RNA, 20 nt, synthetic construct
  source 1..20: mol_type = other RNA
tgaggcttttggattttctt

SEQ ID NO: 53345 - RNA, 20 nt, synthetic construct
  source 1..20: mol_type = other RNA
tgagggaaattatttccagc

SEQ ID NO: 53346 - RNA, 20 nt, synthetic construct
  source 1..20: mol_type = other RNA
tgagggaatttttcttacct

SEQ ID NO: 53347 - RNA, 20 nt, synthetic construct
  source 1..20: mol_type = other RNA
tgagggactgagcagtgaaa

SEQ ID NO: 53348 - RNA, 20 nt, synthetic construct
  source 1..20: mol_type = other RNA
tgagggagatatttcgccta

SEQ ID NO: 53349 - RNA, 20 nt, synthetic construct
  source 1..20: mol_type = other RNA
tgagggaggccatcttcatt

SEQ ID NO: 53350 - RNA, 20 nt, synthetic construct
  source 1..20: mol_type = other RNA
tgagggatgaggaagaggaa

SEQ ID NO: 53351 - RNA, 20 nt, synthetic construct
  source 1..20: mol_type = other RNA
tgagggcagagataactggg

SEQ ID NO: 53352 - RNA, 20 nt, synthetic construct
  source 1..20: mol_type = other RNA
tgagggctttgtgaagggag

SEQ ID NO: 53353 - RNA, 20 nt, synthetic construct
  source 1..20: mol_type = other RNA
tgaggggctgagccttcaga

SEQ ID NO: 53354 - RNA, 20 nt, synthetic construct
  source 1..20: mol_type = other RNA
tgaggggtcttatgctggtg

SEQ ID NO: 53355 - RNA, 20 nt, synthetic construct
  source 1..20: mol_type = other RNA
tgagggtaaaatagtcaagt

SEQ ID NO: 53356 - RNA, 20 nt, synthetic construct
  source 1..20: mol_type = other RNA
tgagggtaagaaaggagttc

SEQ ID NO: 53357 - RNA, 20 nt, synthetic construct
  source 1..20: mol_type = other RNA
tgagggtatcatattatttt

SEQ ID NO: 53358 - RNA, 20 nt, synthetic construct
  source 1..20: mol_type = other RNA
tgagggtgagaccaccacac

SEQ ID NO: 53359 - RNA, 20 nt, synthetic construct
  source 1..20: mol_type = other RNA
tgagggtgctgatcaggaaa

SEQ ID NO: 53360 - RNA, 20 nt, synthetic construct
  source 1..20: mol_type = other RNA
tgagggttagaagacaatac

SEQ ID NO: 53361 - RNA, 20 nt, synthetic construct
  source 1..20: mol_type = other RNA
tgagggttagatttttcctt

SEQ ID NO: 53362 - RNA, 20 nt, synthetic construct
  source 1..20: mol_type = other RNA
tgagggtttcagtgagtagg

SEQ ID NO: 53363 - RNA, 20 nt, synthetic construct
  source 1..20: mol_type = other RNA
tgaggtaagaacttgtcttt

SEQ ID NO: 53364 - RNA, 20 nt, synthetic construct
  source 1..20: mol_type = other RNA
tgaggtagcacaactagtaa

SEQ ID NO: 53365 - RNA, 20 nt, synthetic construct
  source 1..20: mol_type = other RNA
tgaggtatcatttccaagat

SEQ ID NO: 53366 - RNA, 20 nt, synthetic construct
  source 1..20: mol_type = other RNA
tgaggtcaagaaataaaaca

SEQ ID NO: 53367 - RNA, 20 nt, synthetic construct
  source 1..20: mol_type = other RNA
tgaggtcacccaagccacag

SEQ ID NO: 53368 - RNA, 20 nt, synthetic construct
  source 1..20: mol_type = other RNA
tgaggtctaggctaatgtgt

SEQ ID NO: 53369 - RNA, 20 nt, synthetic construct
  source 1..20: mol_type = other RNA
tgaggtctcaaaatttaaag

SEQ ID NO: 53370 - RNA, 20 nt, synthetic construct
  source 1..20: mol_type = other RNA
tgaggtctcagccttttctg

SEQ ID NO: 53371 - RNA, 20 nt, synthetic construct
  source 1..20: mol_type = other RNA
tgaggtcttctagctttcag

SEQ ID NO: 53372 - RNA, 20 nt, synthetic construct
  source 1..20: mol_type = other RNA
tgaggtctttaaaagaaagc

SEQ ID NO: 53373 - RNA, 20 nt, synthetic construct
  source 1..20: mol_type = other RNA
tgaggtgagacagaccctgg

SEQ ID NO: 53374 - RNA, 20 nt, synthetic construct
  source 1..20: mol_type = other RNA
tgaggtgaggacatggagac

SEQ ID NO: 53375 - RNA, 20 nt, synthetic construct
  source 1..20: mol_type = other RNA
tgaggtgattaaaggccctg

SEQ ID NO: 53376 - RNA, 20 nt, synthetic construct
  source 1..20: mol_type = other RNA
tgaggtgattcagagtgctg

SEQ ID NO: 53377 - RNA, 20 nt, synthetic construct
  source 1..20: mol_type = other RNA
tgaggtggagttctgctctt

SEQ ID NO: 53378 - RNA, 20 nt, synthetic construct
  source 1..20: mol_type = other RNA
tgaggtgtacaattaggctg

SEQ ID NO: 53379 - RNA, 20 nt, synthetic construct
  source 1..20: mol_type = other RNA
tgaggtgtttttcagccctg

SEQ ID NO: 53380 - RNA, 20 nt, synthetic construct
  source 1..20: mol_type = other RNA
tgaggttattaagataatgc

SEQ ID NO: 53381 - RNA, 20 nt, synthetic construct
  source 1..20: mol_type = other RNA
tgaggttattcaaaacaaaa

SEQ ID NO: 53382 - RNA, 20 nt, synthetic construct
  source 1..20: mol_type = other RNA
tgaggttgaagacctgcagt

SEQ ID NO: 53383 - RNA, 20 nt, synthetic construct
  source 1..20: mol_type = other RNA
tgaggttgcttttacttggc

SEQ ID NO: 53384 - RNA, 20 nt, synthetic construct
  source 1..20: mol_type = other RNA
tgaggtttacttggggagag

SEQ ID NO: 53385 - RNA, 20 nt, synthetic construct
  source 1..20: mol_type = other RNA
tgaggttttacgatgttggc

SEQ ID NO: 53386 - RNA, 20 nt, synthetic construct
  source 1..20: mol_type = other RNA
tgagtaaaaagaaatctgca

SEQ ID NO: 53387 - RNA, 20 nt, synthetic construct
  source 1..20: mol_type = other RNA
tgagtaaagggtaagaaaat

SEQ ID NO: 53388 - RNA, 20 nt, synthetic construct
  source 1..20: mol_type = other RNA
tgagtaacatgtggaacata

SEQ ID NO: 53389 - RNA, 20 nt, synthetic construct
  source 1..20: mol_type = other RNA
tgagtaactaaactattgta

SEQ ID NO: 53390 - RNA, 20 nt, synthetic construct
  source 1..20: mol_type = other RNA
tgagtacctctgggatgctc

SEQ ID NO: 53391 - RNA, 20 nt, synthetic construct
  source 1..20: mol_type = other RNA
tgagtagaagagtaatggtt

SEQ ID NO: 53392 - RNA, 20 nt, synthetic construct
  source 1..20: mol_type = other RNA
tgagtagcaccctatttatg

SEQ ID NO: 53393 - RNA, 20 nt, synthetic construct
  source 1..20: mol_type = other RNA
tgagtagcgctttaagcatc

SEQ ID NO: 53394 - RNA, 20 nt, synthetic construct
  source 1..20: mol_type = other RNA
tgagtagctgtgattaccgg

SEQ ID NO: 53395 - RNA, 20 nt, synthetic construct
  source 1..20: mol_type = other RNA
tgagtagggaaggtgcccgc

SEQ ID NO: 53396 - RNA, 20 nt, synthetic construct
  source 1..20: mol_type = other RNA
tgagtagtacttctgagtgt

SEQ ID NO: 53397 - RNA, 20 nt, synthetic construct
  source 1..20: mol_type = other RNA
tgagtagttcatgttagcat

SEQ ID NO: 53398 - RNA, 20 nt, synthetic construct
  source 1..20: mol_type = other RNA
tgagtatattctgtgaattg

SEQ ID NO: 53399 - RNA, 20 nt, synthetic construct
  source 1..20: mol_type = other RNA
tgagtatctggtgctggcag

SEQ ID NO: 53400 - RNA, 20 nt, synthetic construct
  source 1..20: mol_type = other RNA
tgagtatctggtgttgcttg

SEQ ID NO: 53401 - RNA, 20 nt, synthetic construct
  source 1..20: mol_type = other RNA
tgagtatcttttcatgttga

SEQ ID NO: 53402 - RNA, 20 nt, synthetic construct
  source 1..20: mol_type = other RNA
tgagtatgggtctccatttt

SEQ ID NO: 53403 - RNA, 20 nt, synthetic construct
  source 1..20: mol_type = other RNA
tgagtatttcatgtacttgt

SEQ ID NO: 53404 - RNA, 20 nt, synthetic construct
  source 1..20: mol_type = other RNA
tgagtatttttgagcttttc

SEQ ID NO: 53405 - RNA, 20 nt, synthetic construct
  source 1..20: mol_type = other RNA
tgagtcaaaaccaaagaaag

SEQ ID NO: 53406 - RNA, 20 nt, synthetic construct
  source 1..20: mol_type = other RNA
tgagtcagtaatcaaaaacc

SEQ ID NO: 53407 - RNA, 20 nt, synthetic construct
  source 1..20: mol_type = other RNA
tgagtccagaggtgagcttt

SEQ ID NO: 53408 - RNA, 20 nt, synthetic construct
  source 1..20: mol_type = other RNA
tgagtccagctttctaattc

SEQ ID NO: 53409 - RNA, 20 nt, synthetic construct
  source 1..20: mol_type = other RNA
tgagtcctgaaaattccttc

SEQ ID NO: 53410 - RNA, 20 nt, synthetic construct
  source 1..20: mol_type = other RNA
tgagtccttccagtatgatg

SEQ ID NO: 53411 - RNA, 20 nt, synthetic construct
  source 1..20: mol_type = other RNA
tgagtcgccatacctggtcc

SEQ ID NO: 53412 - RNA, 20 nt, synthetic construct
  source 1..20: mol_type = other RNA
tgagtctgacatactgtcac

SEQ ID NO: 53413 - RNA, 20 nt, synthetic construct
  source 1..20: mol_type = other RNA
tgagtctgtagggtgactag

SEQ ID NO: 53414 - RNA, 20 nt, synthetic construct
  source 1..20: mol_type = other RNA
tgagtctgtgctctgtattt

SEQ ID NO: 53415 - RNA, 20 nt, synthetic construct
  source 1..20: mol_type = other RNA
tgagtcttccgtctcaagat

SEQ ID NO: 53416 - RNA, 20 nt, synthetic construct
  source 1..20: mol_type = other RNA
tgagtcttctactgtgaatt

SEQ ID NO: 53417 - RNA, 20 nt, synthetic construct
  source 1..20: mol_type = other RNA
tgagtcttgctctcttgcct

SEQ ID NO: 53418 - RNA, 20 nt, synthetic construct
  source 1..20: mol_type = other RNA
tgagtcttgtttacccagtg

SEQ ID NO: 53419 - RNA, 20 nt, synthetic construct
  source 1..20: mol_type = other RNA
tgagtgaatggggtaatttt

SEQ ID NO: 53420 - RNA, 20 nt, synthetic construct
  source 1..20: mol_type = other RNA
tgagtgagatgggaagaaaa

SEQ ID NO: 53421 - RNA, 20 nt, synthetic construct
  source 1..20: mol_type = other RNA
tgagtgagccacagctacac

SEQ ID NO: 53422 - RNA, 20 nt, synthetic construct
  source 1..20: mol_type = other RNA
tgagtgatgaaaagagcaca

SEQ ID NO: 53423 - RNA, 20 nt, synthetic construct
  source 1..20: mol_type = other RNA
tgagtggactgtgagggaga

SEQ ID NO: 53424 - RNA, 20 nt, synthetic construct
  source 1..20: mol_type = other RNA
tgagtggatcatttgaggtc

SEQ ID NO: 53425 - RNA, 20 nt, synthetic construct
  source 1..20: mol_type = other RNA
tgagtggcatcatactggaa

SEQ ID NO: 53426 - RNA, 20 nt, synthetic construct
  source 1..20: mol_type = other RNA
tgagtgtaaggtgtttggtg

SEQ ID NO: 53427 - RNA, 20 nt, synthetic construct
  source 1..20: mol_type = other RNA
tgagtgtagctgtggctcac

SEQ ID NO: 53428 - RNA, 20 nt, synthetic construct
  source 1..20: mol_type = other RNA
tgagtgtatgcagggaaatc

SEQ ID NO: 53429 - RNA, 20 nt, synthetic construct
  source 1..20: mol_type = other RNA
tgagtgttacttgaaatcat

SEQ ID NO: 53430 - RNA, 20 nt, synthetic construct
  source 1..20: mol_type = other RNA
tgagtgttgtgtgcacctaa

SEQ ID NO: 53431 - RNA, 20 nt, synthetic construct
  source 1..20: mol_type = other RNA
tgagtgtttcccttaaaagg

SEQ ID NO: 53432 - RNA, 20 nt, synthetic construct
  source 1..20: mol_type = other RNA
tgagttaggaatttacattt

SEQ ID NO: 53433 - RNA, 20 nt, synthetic construct
  source 1..20: mol_type = other RNA
tgagttattgcatagggatg

SEQ ID NO: 53434 - RNA, 20 nt, synthetic construct
  source 1..20: mol_type = other RNA
tgagttcaaatgttaagccc

SEQ ID NO: 53435 - RNA, 20 nt, synthetic construct
  source 1..20: mol_type = other RNA
tgagttcagaaagattaatc

SEQ ID NO: 53436 - RNA, 20 nt, synthetic construct
  source 1..20: mol_type = other RNA
tgagttcagttttgtatatg

SEQ ID NO: 53437 - RNA, 20 nt, synthetic construct
  source 1..20: mol_type = other RNA
tgagttccagtcctttgtgt

SEQ ID NO: 53438 - RNA, 20 nt, synthetic construct
  source 1..20: mol_type = other RNA
tgagttcctgcttcccccaa

SEQ ID NO: 53439 - RNA, 20 nt, synthetic construct
  source 1..20: mol_type = other RNA
tgagttgtttccactttgag

SEQ ID NO: 53440 - RNA, 20 nt, synthetic construct
  source 1..20: mol_type = other RNA
tgagtttaattcttttgctg

SEQ ID NO: 53441 - RNA, 20 nt, synthetic construct
  source 1..20: mol_type = other RNA
tgagtttcaatgacttttat

SEQ ID NO: 53442 - RNA, 20 nt, synthetic construct
  source 1..20: mol_type = other RNA
tgagtttccagaaaactggc

SEQ ID NO: 53443 - RNA, 20 nt, synthetic construct
  source 1..20: mol_type = other RNA
tgagtttgacctgtaatttt

SEQ ID NO: 53444 - RNA, 20 nt, synthetic construct
  source 1..20: mol_type = other RNA
tgagtttgctctgcaaatga

SEQ ID NO: 53445 - RNA, 20 nt, synthetic construct
  source 1..20: mol_type = other RNA
tgagtttggtgtatttagta

SEQ ID NO: 53446 - RNA, 20 nt, synthetic construct
  source 1..20: mol_type = other RNA
tgagtttgttctgtcacatt

SEQ ID NO: 53447 - RNA, 20 nt, synthetic construct
  source 1..20: mol_type = other RNA
tgagttttaactcttgcatt

SEQ ID NO: 53448 - RNA, 20 nt, synthetic construct
  source 1..20: mol_type = other RNA
tgagttttcaacctttgttg

SEQ ID NO: 53449 - RNA, 20 nt, synthetic construct
  source 1..20: mol_type = other RNA
tgataaaaaggagggaaaat

SEQ ID NO: 53450 - RNA, 20 nt, synthetic construct
  source 1..20: mol_type = other RNA
tgataaaaataacgggccgg

SEQ ID NO: 53451 - RNA, 20 nt, synthetic construct
  source 1..20: mol_type = other RNA
tgataaaaatctctacaggg

SEQ ID NO: 53452 - RNA, 20 nt, synthetic construct
  source 1..20: mol_type = other RNA
tgataaaactgaagtttatc

SEQ ID NO: 53453 - RNA, 20 nt, synthetic construct
  source 1..20: mol_type = other RNA
tgataaaagtcattgaaact

SEQ ID NO: 53454 - RNA, 20 nt, synthetic construct
  source 1..20: mol_type = other RNA
tgataaacttcagttttgag

SEQ ID NO: 53455 - RNA, 20 nt, synthetic construct
  source 1..20: mol_type = other RNA
tgataaatacgataaacttc

SEQ ID NO: 53456 - RNA, 20 nt, synthetic construct
  source 1..20: mol_type = other RNA
tgataaatatgtgttacaac

SEQ ID NO: 53457 - RNA, 20 nt, synthetic construct
  source 1..20: mol_type = other RNA
tgataaatctaaagccaatc

SEQ ID NO: 53458 - RNA, 20 nt, synthetic construct
  source 1..20: mol_type = other RNA
tgataaatggctttttacga

SEQ ID NO: 53459 - RNA, 20 nt, synthetic construct
  source 1..20: mol_type = other RNA
tgataaattattagcttgct

SEQ ID NO: 53460 - RNA, 20 nt, synthetic construct
  source 1..20: mol_type = other RNA
tgataactgatatgagggat

SEQ ID NO: 53461 - RNA, 20 nt, synthetic construct
  source 1..20: mol_type = other RNA
tgataactggtgcttttttg

SEQ ID NO: 53462 - RNA, 20 nt, synthetic construct
  source 1..20: mol_type = other RNA
tgataagcacatggtgataa

SEQ ID NO: 53463 - RNA, 20 nt, synthetic construct
  source 1..20: mol_type = other RNA
tgataagcccaacctgatta

SEQ ID NO: 53464 - RNA, 20 nt, synthetic construct
  source 1..20: mol_type = other RNA
tgataagctcccagccaaac

SEQ ID NO: 53465 - RNA, 20 nt, synthetic construct
  source 1..20: mol_type = other RNA
tgataaggggctatctttac

SEQ ID NO: 53466 - RNA, 20 nt, synthetic construct
  source 1..20: mol_type = other RNA
tgataatcacagacgcaaag

SEQ ID NO: 53467 - RNA, 20 nt, synthetic construct
  source 1..20: mol_type = other RNA
tgataattacaataatgcac

SEQ ID NO: 53468 - RNA, 20 nt, synthetic construct
  source 1..20: mol_type = other RNA
tgatacaatacttggatctt

SEQ ID NO: 53469 - RNA, 20 nt, synthetic construct
  source 1..20: mol_type = other RNA
tgatacacttctatccagtg

SEQ ID NO: 53470 - RNA, 20 nt, synthetic construct
  source 1..20: mol_type = other RNA
tgataccataaagtcagagg

SEQ ID NO: 53471 - RNA, 20 nt, synthetic construct
  source 1..20: mol_type = other RNA
tgataccctcaaaagatgca

SEQ ID NO: 53472 - RNA, 20 nt, synthetic construct
  source 1..20: mol_type = other RNA
tgatacctagtacgtaacct

SEQ ID NO: 53473 - RNA, 20 nt, synthetic construct
  source 1..20: mol_type = other RNA
tgatacctcatttatacttt

SEQ ID NO: 53474 - RNA, 20 nt, synthetic construct
  source 1..20: mol_type = other RNA
tgatacctcttactaaaaag

SEQ ID NO: 53475 - RNA, 20 nt, synthetic construct
  source 1..20: mol_type = other RNA
tgataccttcttgagagtct

SEQ ID NO: 53476 - RNA, 20 nt, synthetic construct
  source 1..20: mol_type = other RNA
tgatacggagtctcgctctg

SEQ ID NO: 53477 - RNA, 20 nt, synthetic construct
  source 1..20: mol_type = other RNA
tgatactagtttagtgcagt

SEQ ID NO: 53478 - RNA, 20 nt, synthetic construct
  source 1..20: mol_type = other RNA
tgatactcgtagttttttgg

SEQ ID NO: 53479 - RNA, 20 nt, synthetic construct
  source 1..20: mol_type = other RNA
tgatagaataccacttagtt

SEQ ID NO: 53480 - RNA, 20 nt, synthetic construct
  source 1..20: mol_type = other RNA
tgatagactggattaaggag

SEQ ID NO: 53481 - RNA, 20 nt, synthetic construct
  source 1..20: mol_type = other RNA
tgatagatattggcaacatt

SEQ ID NO: 53482 - RNA, 20 nt, synthetic construct
  source 1..20: mol_type = other RNA
tgatagcattatcccagatc

SEQ ID NO: 53483 - RNA, 20 nt, synthetic construct
  source 1..20: mol_type = other RNA
tgatagcgaaaggtacgacg

SEQ ID NO: 53484 - RNA, 20 nt, synthetic construct
  source 1..20: mol_type = other RNA
tgatagctgtggaagcacag

SEQ ID NO: 53485 - RNA, 20 nt, synthetic construct
  source 1..20: mol_type = other RNA
tgatagcttgacaaaaggcc

SEQ ID NO: 53486 - RNA, 20 nt, synthetic construct
  source 1..20: mol_type = other RNA
tgataggaatatcgtctttt

SEQ ID NO: 53487 - RNA, 20 nt, synthetic construct
  source 1..20: mol_type = other RNA
tgataggataatgtccagag

SEQ ID NO: 53488 - RNA, 20 nt, synthetic construct
  source 1..20: mol_type = other RNA
tgataggtcactgcagtctc

SEQ ID NO: 53489 - RNA, 20 nt, synthetic construct
  source 1..20: mol_type = other RNA
tgatagtcttccaattgcag

SEQ ID NO: 53490 - RNA, 20 nt, synthetic construct
  source 1..20: mol_type = other RNA
tgatagttgcagattcatct

SEQ ID NO: 53491 - RNA, 20 nt, synthetic construct
  source 1..20: mol_type = other RNA
tgatatattatgaaccattg

SEQ ID NO: 53492 - RNA, 20 nt, synthetic construct
  source 1..20: mol_type = other RNA
tgatatcctgtaaacctgga

SEQ ID NO: 53493 - RNA, 20 nt, synthetic construct
  source 1..20: mol_type = other RNA
tgatatctgagtgttgtgtg

SEQ ID NO: 53494 - RNA, 20 nt, synthetic construct
  source 1..20: mol_type = other RNA
tgatatctgtaagtcatcaa

SEQ ID NO: 53495 - RNA, 20 nt, synthetic construct
  source 1..20: mol_type = other RNA
tgatatgagggatgaggaag

SEQ ID NO: 53496 - RNA, 20 nt, synthetic construct
  source 1..20: mol_type = other RNA
tgatatgccacattttttgg

SEQ ID NO: 53497 - RNA, 20 nt, synthetic construct
  source 1..20: mol_type = other RNA
tgatatgtcgcatgaaaaca

SEQ ID NO: 53498 - RNA, 20 nt, synthetic construct
  source 1..20: mol_type = other RNA
tgatattggcataaagacag

SEQ ID NO: 53499 - RNA, 20 nt, synthetic construct
  source 1..20: mol_type = other RNA
tgatatttgttcagaaatag

SEQ ID NO: 53500 - RNA, 20 nt, synthetic construct
  source 1..20: mol_type = other RNA
tgatatttttcagattgacc

SEQ ID NO: 53501 - RNA, 20 nt, synthetic construct
  source 1..20: mol_type = other RNA
tgatcaaaaccaggaggttt

SEQ ID NO: 53502 - RNA, 20 nt, synthetic construct
  source 1..20: mol_type = other RNA
tgatcaaagtgaaaggcaaa

SEQ ID NO: 53503 - RNA, 20 nt, synthetic construct
  source 1..20: mol_type = other RNA
tgatcaaggaagcttcctaa

SEQ ID NO: 53504 - RNA, 20 nt, synthetic construct
  source 1..20: mol_type = other RNA
tgatcaagttgcttggcaca

SEQ ID NO: 53505 - RNA, 20 nt, synthetic construct
  source 1..20: mol_type = other RNA
tgatcacaccctcctacctt

SEQ ID NO: 53506 - RNA, 20 nt, synthetic construct
  source 1..20: mol_type = other RNA
tgatcacagaagtgttttga

SEQ ID NO: 53507 - RNA, 20 nt, synthetic construct
  source 1..20: mol_type = other RNA
tgatcagaagagcactatgt

SEQ ID NO: 53508 - RNA, 20 nt, synthetic construct
  source 1..20: mol_type = other RNA
tgatcagcaccctcaaatgt

SEQ ID NO: 53509 - RNA, 20 nt, synthetic construct
  source 1..20: mol_type = other RNA
tgatcagcttcctacccaag

SEQ ID NO: 53510 - RNA, 20 nt, synthetic construct
  source 1..20: mol_type = other RNA
tgatcaggaaagaccgggga

SEQ ID NO: 53511 - RNA, 20 nt, synthetic construct
  source 1..20: mol_type = other RNA
tgatcaggaaagatgaagta

SEQ ID NO: 53512 - RNA, 20 nt, synthetic construct
  source 1..20: mol_type = other RNA
tgatcagggatttggccaga

SEQ ID NO: 53513 - RNA, 20 nt, synthetic construct
  source 1..20: mol_type = other RNA
tgatcatacacatccagaag

SEQ ID NO: 53514 - RNA, 20 nt, synthetic construct
  source 1..20: mol_type = other RNA
tgatcatcgcattacgagtt

SEQ ID NO: 53515 - RNA, 20 nt, synthetic construct
  source 1..20: mol_type = other RNA
tgatccagcagtttcacttc

SEQ ID NO: 53516 - RNA, 20 nt, synthetic construct
  source 1..20: mol_type = other RNA
tgatccaggtgtatgatctt

SEQ ID NO: 53517 - RNA, 20 nt, synthetic construct
  source 1..20: mol_type = other RNA
tgatccattacatcaacata

SEQ ID NO: 53518 - RNA, 20 nt, synthetic construct
  source 1..20: mol_type = other RNA
tgatcccactagtggaagaa

SEQ ID NO: 53519 - RNA, 20 nt, synthetic construct
  source 1..20: mol_type = other RNA
tgatccctgatatgtcgcat

SEQ ID NO: 53520 - RNA, 20 nt, synthetic construct
  source 1..20: mol_type = other RNA
tgatcctaagccatctaatt

SEQ ID NO: 53521 - RNA, 20 nt, synthetic construct
  source 1..20: mol_type = other RNA
tgatcctggaatagtagctt

SEQ ID NO: 53522 - RNA, 20 nt, synthetic construct
  source 1..20: mol_type = other RNA
tgatctaaaatggaagactt

SEQ ID NO: 53523 - RNA, 20 nt, synthetic construct
  source 1..20: mol_type = other RNA
tgatctaaatggtgtgaagt

SEQ ID NO: 53524 - RNA, 20 nt, synthetic construct
  source 1..20: mol_type = other RNA
tgatctacatttagatttca

SEQ ID NO: 53525 - RNA, 20 nt, synthetic construct
  source 1..20: mol_type = other RNA
tgatctatcaatctcacacc

SEQ ID NO: 53526 - RNA, 20 nt, synthetic construct
  source 1..20: mol_type = other RNA
tgatctatgaatttgcctat

SEQ ID NO: 53527 - RNA, 20 nt, synthetic construct
  source 1..20: mol_type = other RNA
tgatctatgcatactgcagc

SEQ ID NO: 53528 - RNA, 20 nt, synthetic construct
  source 1..20: mol_type = other RNA
tgatctcacgtcaccgcaac

SEQ ID NO: 53529 - RNA, 20 nt, synthetic construct
  source 1..20: mol_type = other RNA
tgatctctgctcaccgcaac

SEQ ID NO: 53530 - RNA, 20 nt, synthetic construct
  source 1..20: mol_type = other RNA
tgatctgccaggacaattga

SEQ ID NO: 53531 - RNA, 20 nt, synthetic construct
  source 1..20: mol_type = other RNA
tgatctgctcaagttttcta

SEQ ID NO: 53532 - RNA, 20 nt, synthetic construct
  source 1..20: mol_type = other RNA
tgatctggtcacaaacacaa

SEQ ID NO: 53533 - RNA, 20 nt, synthetic construct
  source 1..20: mol_type = other RNA
tgatcttattaatgtgttgt

SEQ ID NO: 53534 - RNA, 20 nt, synthetic construct
  source 1..20: mol_type = other RNA
tgatcttgggaatactttcc

SEQ ID NO: 53535 - RNA, 20 nt, synthetic construct
  source 1..20: mol_type = other RNA
tgatctttacttcccttctc

SEQ ID NO: 53536 - RNA, 20 nt, synthetic construct
  source 1..20: mol_type = other RNA
tgatctttcaaggggccttt

SEQ ID NO: 53537 - RNA, 20 nt, synthetic construct
  source 1..20: mol_type = other RNA
tgatctttgaataaagggtc

SEQ ID NO: 53538 - RNA, 20 nt, synthetic construct
  source 1..20: mol_type = other RNA
tgatctttggaaatgaatat

SEQ ID NO: 53539 - RNA, 20 nt, synthetic construct
  source 1..20: mol_type = other RNA
tgatcttttctgacaatttc

SEQ ID NO: 53540 - RNA, 20 nt, synthetic construct
  source 1..20: mol_type = other RNA
tgatgaaaagagcacaccaa

SEQ ID NO: 53541 - RNA, 20 nt, synthetic construct
  source 1..20: mol_type = other RNA
tgatgaacaaaggcaggagc

SEQ ID NO: 53542 - RNA, 20 nt, synthetic construct
  source 1..20: mol_type = other RNA
tgatgaactacacagacatg

SEQ ID NO: 53543 - RNA, 20 nt, synthetic construct
  source 1..20: mol_type = other RNA
tgatgaagaacctgttcatt

SEQ ID NO: 53544 - RNA, 20 nt, synthetic construct
  source 1..20: mol_type = other RNA
tgatgaagggttttctgtag

SEQ ID NO: 53545 - RNA, 20 nt, synthetic construct
  source 1..20: mol_type = other RNA
tgatgaattccagtttatct

SEQ ID NO: 53546 - RNA, 20 nt, synthetic construct
  source 1..20: mol_type = other RNA
tgatgacagttactctaaaa

SEQ ID NO: 53547 - RNA, 20 nt, synthetic construct
  source 1..20: mol_type = other RNA
tgatgactatgaaaagcctc

SEQ ID NO: 53548 - RNA, 20 nt, synthetic construct
  source 1..20: mol_type = other RNA
tgatgactgtaagctgaact

SEQ ID NO: 53549 - RNA, 20 nt, synthetic construct
  source 1..20: mol_type = other RNA
tgatgacttacagatatcac

SEQ ID NO: 53550 - RNA, 20 nt, synthetic construct
  source 1..20: mol_type = other RNA
tgatgagctactgcatgcta

SEQ ID NO: 53551 - RNA, 20 nt, synthetic construct
  source 1..20: mol_type = other RNA
tgatgatagaataccactta

SEQ ID NO: 53552 - RNA, 20 nt, synthetic construct
  source 1..20: mol_type = other RNA
tgatgatgatggtgatgcta

SEQ ID NO: 53553 - RNA, 20 nt, synthetic construct
  source 1..20: mol_type = other RNA
tgatgatggtgatgctaacg

SEQ ID NO: 53554 - RNA, 20 nt, synthetic construct
  source 1..20: mol_type = other RNA
tgatgattttagaaggtaag

SEQ ID NO: 53555 - RNA, 20 nt, synthetic construct
  source 1..20: mol_type = other RNA
tgatgatttttgccagtgtt

SEQ ID NO: 53556 - RNA, 20 nt, synthetic construct
  source 1..20: mol_type = other RNA
tgatgcaactcctgggctca

SEQ ID NO: 53557 - RNA, 20 nt, synthetic construct
  source 1..20: mol_type = other RNA
tgatgcaatttgttttccaa

SEQ ID NO: 53558 - RNA, 20 nt, synthetic construct
  source 1..20: mol_type = other RNA
tgatgcacaaaagtttaact

SEQ ID NO: 53559 - RNA, 20 nt, synthetic construct
  source 1..20: mol_type = other RNA
tgatgcacaagccttgaaaa

SEQ ID NO: 53560 - RNA, 20 nt, synthetic construct
  source 1..20: mol_type = other RNA
tgatgcagcccctgccacac

SEQ ID NO: 53561 - RNA, 20 nt, synthetic construct
  source 1..20: mol_type = other RNA
tgatgccactcaaaactgaa

SEQ ID NO: 53562 - RNA, 20 nt, synthetic construct
  source 1..20: mol_type = other RNA
tgatgccatcacattttgaa

SEQ ID NO: 53563 - RNA, 20 nt, synthetic construct
  source 1..20: mol_type = other RNA
tgatgcccccaccctttttt

SEQ ID NO: 53564 - RNA, 20 nt, synthetic construct
  source 1..20: mol_type = other RNA
tgatgctaacgtgcttgctc

SEQ ID NO: 53565 - RNA, 20 nt, synthetic construct
  source 1..20: mol_type = other RNA
tgatgctttctctagttgca

SEQ ID NO: 53566 - RNA, 20 nt, synthetic construct
  source 1..20: mol_type = other RNA
tgatggaacggcttaacacc

SEQ ID NO: 53567 - RNA, 20 nt, synthetic construct
  source 1..20: mol_type = other RNA
tgatggaattctgacacccg

SEQ ID NO: 53568 - RNA, 20 nt, synthetic construct
  source 1..20: mol_type = other RNA
tgatggacattctgcttcct

SEQ ID NO: 53569 - RNA, 20 nt, synthetic construct
  source 1..20: mol_type = other RNA
tgatggaggtggaactctgt

SEQ ID NO: 53570 - RNA, 20 nt, synthetic construct
  source 1..20: mol_type = other RNA
tgatggcaacaatcaacagg

SEQ ID NO: 53571 - RNA, 20 nt, synthetic construct
  source 1..20: mol_type = other RNA
tgatggcatcattcataaac

SEQ ID NO: 53572 - RNA, 20 nt, synthetic construct
  source 1..20: mol_type = other RNA
tgatggcgcatgcctgtggt

SEQ ID NO: 53573 - RNA, 20 nt, synthetic construct
  source 1..20: mol_type = other RNA
tgatggctcaacgcctgtga

SEQ ID NO: 53574 - RNA, 20 nt, synthetic construct
  source 1..20: mol_type = other RNA
tgatggctgtactaagccta

SEQ ID NO: 53575 - RNA, 20 nt, synthetic construct
  source 1..20: mol_type = other RNA
tgatgggagatggacactgc

SEQ ID NO: 53576 - RNA, 20 nt, synthetic construct
  source 1..20: mol_type = other RNA
tgatgggggtaagattgtgg

SEQ ID NO: 53577 - RNA, 20 nt, synthetic construct
  source 1..20: mol_type = other RNA
tgatggtgatgctaacgtgc

SEQ ID NO: 53578 - RNA, 20 nt, synthetic construct
  source 1..20: mol_type = other RNA
tgatggtttggggcttttga

SEQ ID NO: 53579 - RNA, 20 nt, synthetic construct
  source 1..20: mol_type = other RNA
tgatgtaagtgggaggaggt

SEQ ID NO: 53580 - RNA, 20 nt, synthetic construct
  source 1..20: mol_type = other RNA
tgatgtaatggatcaaggca

SEQ ID NO: 53581 - RNA, 20 nt, synthetic construct
  source 1..20: mol_type = other RNA
tgatgtagaggcagttgagt

SEQ ID NO: 53582 - RNA, 20 nt, synthetic construct
  source 1..20: mol_type = other RNA
tgatgtcacaagccagggtc

SEQ ID NO: 53583 - RNA, 20 nt, synthetic construct
  source 1..20: mol_type = other RNA
tgatgtctcagatgtctcca

SEQ ID NO: 53584 - RNA, 20 nt, synthetic construct
  source 1..20: mol_type = other RNA
tgatgtcttttgaagaagtt

SEQ ID NO: 53585 - RNA, 20 nt, synthetic construct
  source 1..20: mol_type = other RNA
tgatgtgaggatctgttggt

SEQ ID NO: 53586 - RNA, 20 nt, synthetic construct
  source 1..20: mol_type = other RNA
tgatgtgtagttattattgt

SEQ ID NO: 53587 - RNA, 20 nt, synthetic construct
  source 1..20: mol_type = other RNA
tgatgtgtatgttacacttc

SEQ ID NO: 53588 - RNA, 20 nt, synthetic construct
  source 1..20: mol_type = other RNA
tgatgtgtgtctctgctctc

SEQ ID NO: 53589 - RNA, 20 nt, synthetic construct
  source 1..20: mol_type = other RNA
tgatgtgttgaccttagtgg

SEQ ID NO: 53590 - RNA, 20 nt, synthetic construct
  source 1..20: mol_type = other RNA
tgatgttcaaccctcggcct

SEQ ID NO: 53591 - RNA, 20 nt, synthetic construct
  source 1..20: mol_type = other RNA
tgatgttgagtatcttttca

SEQ ID NO: 53592 - RNA, 20 nt, synthetic construct
  source 1..20: mol_type = other RNA
tgatgtttggctccttacca

SEQ ID NO: 53593 - RNA, 20 nt, synthetic construct
  source 1..20: mol_type = other RNA
tgatgttttacattttccat

SEQ ID NO: 53594 - RNA, 20 nt, synthetic construct
  source 1..20: mol_type = other RNA
tgatgttttgaacgaatgaa

SEQ ID NO: 53595 - RNA, 20 nt, synthetic construct
  source 1..20: mol_type = other RNA
tgattaaaggccctgattta

SEQ ID NO: 53596 - RNA, 20 nt, synthetic construct
  source 1..20: mol_type = other RNA
tgattaatttgaggtctagg

SEQ ID NO: 53597 - RNA, 20 nt, synthetic construct
  source 1..20: mol_type = other RNA
tgattacaagggtgacagag

SEQ ID NO: 53598 - RNA, 20 nt, synthetic construct
  source 1..20: mol_type = other RNA
tgattacaattcctttctag

SEQ ID NO: 53599 - RNA, 20 nt, synthetic construct
  source 1..20: mol_type = other RNA
tgattaccggcatccgccac

SEQ ID NO: 53600 - RNA, 20 nt, synthetic construct
  source 1..20: mol_type = other RNA
tgattactgactcaatcttc

SEQ ID NO: 53601 - RNA, 20 nt, synthetic construct
  source 1..20: mol_type = other RNA
tgattactttacagttatgt

SEQ ID NO: 53602 - RNA, 20 nt, synthetic construct
  source 1..20: mol_type = other RNA
tgattagaaggattgttcat

SEQ ID NO: 53603 - RNA, 20 nt, synthetic construct
  source 1..20: mol_type = other RNA
tgattagaggctgcaccctc

SEQ ID NO: 53604 - RNA, 20 nt, synthetic construct
  source 1..20: mol_type = other RNA
tgattagcttcctcaggatc

SEQ ID NO: 53605 - RNA, 20 nt, synthetic construct
  source 1..20: mol_type = other RNA
tgattagttgactcctaaaa

SEQ ID NO: 53606 - RNA, 20 nt, synthetic construct
  source 1..20: mol_type = other RNA
tgattataaccttgaacttc

SEQ ID NO: 53607 - RNA, 20 nt, synthetic construct
  source 1..20: mol_type = other RNA
tgattatcagggatattggc

SEQ ID NO: 53608 - RNA, 20 nt, synthetic construct
  source 1..20: mol_type = other RNA
tgattatgttagatatccca

SEQ ID NO: 53609 - RNA, 20 nt, synthetic construct
  source 1..20: mol_type = other RNA
tgattatttcgaattatgct

SEQ ID NO: 53610 - RNA, 20 nt, synthetic construct
  source 1..20: mol_type = other RNA
tgattatttgcggcttgatt

SEQ ID NO: 53611 - RNA, 20 nt, synthetic construct
  source 1..20: mol_type = other RNA
tgattatttttacccaacat

SEQ ID NO: 53612 - RNA, 20 nt, synthetic construct
  source 1..20: mol_type = other RNA
tgattcaaaatgtgatggca

SEQ ID NO: 53613 - RNA, 20 nt, synthetic construct
  source 1..20: mol_type = other RNA
tgattcacttttgagttcag

SEQ ID NO: 53614 - RNA, 20 nt, synthetic construct
  source 1..20: mol_type = other RNA
tgattcagagtgctgggtag

SEQ ID NO: 53615 - RNA, 20 nt, synthetic construct
  source 1..20: mol_type = other RNA
tgattcagatgacagaaata

SEQ ID NO: 53616 - RNA, 20 nt, synthetic construct
  source 1..20: mol_type = other RNA
tgattcagtcttggtagttt

SEQ ID NO: 53617 - RNA, 20 nt, synthetic construct
  source 1..20: mol_type = other RNA
tgattcagtggttggaaaac

SEQ ID NO: 53618 - RNA, 20 nt, synthetic construct
  source 1..20: mol_type = other RNA
tgattccacttatatgaagc

SEQ ID NO: 53619 - RNA, 20 nt, synthetic construct
  source 1..20: mol_type = other RNA
tgattccagtttctctgctt

SEQ ID NO: 53620 - RNA, 20 nt, synthetic construct
  source 1..20: mol_type = other RNA
tgattccccttatatgggat

SEQ ID NO: 53621 - RNA, 20 nt, synthetic construct
  source 1..20: mol_type = other RNA
tgattcgcattgctaattca

SEQ ID NO: 53622 - RNA, 20 nt, synthetic construct
  source 1..20: mol_type = other RNA
tgattctaatgtgcaaggag

SEQ ID NO: 53623 - RNA, 20 nt, synthetic construct
  source 1..20: mol_type = other RNA
tgattcttccactagtggga

SEQ ID NO: 53624 - RNA, 20 nt, synthetic construct
  source 1..20: mol_type = other RNA
tgattcttttataactgaac

SEQ ID NO: 53625 - RNA, 20 nt, synthetic construct
  source 1..20: mol_type = other RNA
tgattgagattagcgaaagg

SEQ ID NO: 53626 - RNA, 20 nt, synthetic construct
  source 1..20: mol_type = other RNA
tgattgaggacttcatgtac

SEQ ID NO: 53627 - RNA, 20 nt, synthetic construct
  source 1..20: mol_type = other RNA
tgattgagtatctggtgctg

SEQ ID NO: 53628 - RNA, 20 nt, synthetic construct
  source 1..20: mol_type = other RNA
tgattgcaggtgtgggccac

SEQ ID NO: 53629 - RNA, 20 nt, synthetic construct
  source 1..20: mol_type = other RNA
tgattgccagttttctggaa

SEQ ID NO: 53630 - RNA, 20 nt, synthetic construct
  source 1..20: mol_type = other RNA
tgattgcccattataaaata

SEQ ID NO: 53631 - RNA, 20 nt, synthetic construct
  source 1..20: mol_type = other RNA
tgattggatatttgcagtag

SEQ ID NO: 53632 - RNA, 20 nt, synthetic construct
  source 1..20: mol_type = other RNA
tgattggcaaatctttagtg

SEQ ID NO: 53633 - RNA, 20 nt, synthetic construct
  source 1..20: mol_type = other RNA
tgattgggcattaattgaga

SEQ ID NO: 53634 - RNA, 20 nt, synthetic construct
  source 1..20: mol_type = other RNA
tgattgggtcaacaaactaa

SEQ ID NO: 53635 - RNA, 20 nt, synthetic construct
  source 1..20: mol_type = other RNA
tgattgttagccacagcgtt

SEQ ID NO: 53636 - RNA, 20 nt, synthetic construct
  source 1..20: mol_type = other RNA
tgattgttccaggggggaaa

SEQ ID NO: 53637 - RNA, 20 nt, synthetic construct
  source 1..20: mol_type = other RNA
tgattgttgccatcatttta

SEQ ID NO: 53638 - RNA, 20 nt, synthetic construct
  source 1..20: mol_type = other RNA
tgatttaaagtaggttgaga

SEQ ID NO: 53639 - RNA, 20 nt, synthetic construct
  source 1..20: mol_type = other RNA
tgatttaatagaggtctgtc

SEQ ID NO: 53640 - RNA, 20 nt, synthetic construct
  source 1..20: mol_type = other RNA
tgatttagaaatacctgcag

SEQ ID NO: 53641 - RNA, 20 nt, synthetic construct
  source 1..20: mol_type = other RNA
tgatttaggccactctcatc

SEQ ID NO: 53642 - RNA, 20 nt, synthetic construct
  source 1..20: mol_type = other RNA
tgatttataatccattgggt

SEQ ID NO: 53643 - RNA, 20 nt, synthetic construct
  source 1..20: mol_type = other RNA
tgatttatagtgtttccttc

SEQ ID NO: 53644 - RNA, 20 nt, synthetic construct
  source 1..20: mol_type = other RNA
tgatttatggcctaagatgg

SEQ ID NO: 53645 - RNA, 20 nt, synthetic construct
  source 1..20: mol_type = other RNA
tgatttatgtggcatttaaa

SEQ ID NO: 53646 - RNA, 20 nt, synthetic construct
  source 1..20: mol_type = other RNA
tgatttcaaagttaatagcc

SEQ ID NO: 53647 - RNA, 20 nt, synthetic construct
  source 1..20: mol_type = other RNA
tgatttcaagtaacactcag

SEQ ID NO: 53648 - RNA, 20 nt, synthetic construct
  source 1..20: mol_type = other RNA
tgatttcacttacttgagcc

SEQ ID NO: 53649 - RNA, 20 nt, synthetic construct
  source 1..20: mol_type = other RNA
tgatttccagtgtttggttt

SEQ ID NO: 53650 - RNA, 20 nt, synthetic construct
  source 1..20: mol_type = other RNA
tgatttccctgcatacactc

SEQ ID NO: 53651 - RNA, 20 nt, synthetic construct
  source 1..20: mol_type = other RNA
tgatttctaggccctaaccc

SEQ ID NO: 53652 - RNA, 20 nt, synthetic construct
  source 1..20: mol_type = other RNA
tgatttcttctttggctcaa

SEQ ID NO: 53653 - RNA, 20 nt, synthetic construct
  source 1..20: mol_type = other RNA
tgatttgaccatgggacaag

SEQ ID NO: 53654 - RNA, 20 nt, synthetic construct
  source 1..20: mol_type = other RNA
tgatttgcatttctctaata

SEQ ID NO: 53655 - RNA, 20 nt, synthetic construct
  source 1..20: mol_type = other RNA
tgatttgctggctcagtctg

SEQ ID NO: 53656 - RNA, 20 nt, synthetic construct
  source 1..20: mol_type = other RNA
tgatttggtgtgtgcaaagg

SEQ ID NO: 53657 - RNA, 20 nt, synthetic construct
  source 1..20: mol_type = other RNA
tgatttgtagatattttctg

SEQ ID NO: 53658 - RNA, 20 nt, synthetic construct
  source 1..20: mol_type = other RNA
tgatttgttatatccagatt

SEQ ID NO: 53659 - RNA, 20 nt, synthetic construct
  source 1..20: mol_type = other RNA
tgatttgtttagtagctgtc

SEQ ID NO: 53660 - RNA, 20 nt, synthetic construct
  source 1..20: mol_type = other RNA
tgatttgtttgaattaagca

SEQ ID NO: 53661 - RNA, 20 nt, synthetic construct
  source 1..20: mol_type = other RNA
tgattttaatctgtcctgaa

SEQ ID NO: 53662 - RNA, 20 nt, synthetic construct
  source 1..20: mol_type = other RNA
tgattttaccaaggctaagt

SEQ ID NO: 53663 - RNA, 20 nt, synthetic construct
  source 1..20: mol_type = other RNA
tgattttagaaggtaagaat

SEQ ID NO: 53664 - RNA, 20 nt, synthetic construct
  source 1..20: mol_type = other RNA
tgattttcacagggcaggga

SEQ ID NO: 53665 - RNA, 20 nt, synthetic construct
  source 1..20: mol_type = other RNA
tgattttctaggaaacttta

SEQ ID NO: 53666 - RNA, 20 nt, synthetic construct
  source 1..20: mol_type = other RNA
tgattttctgcttctcaata

SEQ ID NO: 53667 - RNA, 20 nt, synthetic construct
  source 1..20: mol_type = other RNA
tgattttgaggcagagagat

SEQ ID NO: 53668 - RNA, 20 nt, synthetic construct
  source 1..20: mol_type = other RNA
tgattttgtatcctgagact

SEQ ID NO: 53669 - RNA, 20 nt, synthetic construct
  source 1..20: mol_type = other RNA
tgattttgtgtcttctgttt

SEQ ID NO: 53670 - RNA, 20 nt, synthetic construct
  source 1..20: mol_type = other RNA
tgattttgtttatttgctgt

SEQ ID NO: 53671 - RNA, 20 nt, synthetic construct
  source 1..20: mol_type = other RNA
tgatttttagtgactggctt

SEQ ID NO: 53672 - RNA, 20 nt, synthetic construct
  source 1..20: mol_type = other RNA
tgatttttgccagtgtttta

SEQ ID NO: 53673 - RNA, 20 nt, synthetic construct
  source 1..20: mol_type = other RNA
tgcaaaaacagtttccctct

SEQ ID NO: 53674 - RNA, 20 nt, synthetic construct
  source 1..20: mol_type = other RNA
tgcaaaaatactacaagagt

SEQ ID NO: 53675 - RNA, 20 nt, synthetic construct
  source 1..20: mol_type = other RNA
tgcaaaaattttgttcagga

SEQ ID NO: 53676 - RNA, 20 nt, synthetic construct
  source 1..20: mol_type = other RNA
tgcaaaacaatagcccagca

SEQ ID NO: 53677 - RNA, 20 nt, synthetic construct
  source 1..20: mol_type = other RNA
tgcaaaacggaaactttata

SEQ ID NO: 53678 - RNA, 20 nt, synthetic construct
  source 1..20: mol_type = other RNA
tgcaaaactttcttcaaaat

SEQ ID NO: 53679 - RNA, 20 nt, synthetic construct
  source 1..20: mol_type = other RNA
tgcaaaccaaatgcagaaaa

SEQ ID NO: 53680 - RNA, 20 nt, synthetic construct
  source 1..20: mol_type = other RNA
tgcaaacctcctggttttga

SEQ ID NO: 53681 - RNA, 20 nt, synthetic construct
  source 1..20: mol_type = other RNA
tgcaaactaagtggtattct

SEQ ID NO: 53682 - RNA, 20 nt, synthetic construct
  source 1..20: mol_type = other RNA
tgcaaactaccaagactgaa

SEQ ID NO: 53683 - RNA, 20 nt, synthetic construct
  source 1..20: mol_type = other RNA
tgcaaactctaaataatagg

SEQ ID NO: 53684 - RNA, 20 nt, synthetic construct
  source 1..20: mol_type = other RNA
tgcaaaggattagaaagtag

SEQ ID NO: 53685 - RNA, 20 nt, synthetic construct
  source 1..20: mol_type = other RNA
tgcaaagtttcctacatact

SEQ ID NO: 53686 - RNA, 20 nt, synthetic construct
  source 1..20: mol_type = other RNA
tgcaaatatccaatcactgg

SEQ ID NO: 53687 - RNA, 20 nt, synthetic construct
  source 1..20: mol_type = other RNA
tgcaaatcaaaacaataaga

SEQ ID NO: 53688 - RNA, 20 nt, synthetic construct
  source 1..20: mol_type = other RNA
tgcaaatgaggttgctttta

SEQ ID NO: 53689 - RNA, 20 nt, synthetic construct
  source 1..20: mol_type = other RNA
tgcaaattattttcctcctt

SEQ ID NO: 53690 - RNA, 20 nt, synthetic construct
  source 1..20: mol_type = other RNA
tgcaacaaatgttgcagaga

SEQ ID NO: 53691 - RNA, 20 nt, synthetic construct
  source 1..20: mol_type = other RNA
tgcaacagaataaatgaaaa

SEQ ID NO: 53692 - RNA, 20 nt, synthetic construct
  source 1..20: mol_type = other RNA
tgcaacagatctgagaagac

SEQ ID NO: 53693 - RNA, 20 nt, synthetic construct
  source 1..20: mol_type = other RNA
tgcaacataaatagggtgct

SEQ ID NO: 53694 - RNA, 20 nt, synthetic construct
  source 1..20: mol_type = other RNA
tgcaacatttgttgcatccc

SEQ ID NO: 53695 - RNA, 20 nt, synthetic construct
  source 1..20: mol_type = other RNA
tgcaaccatccccgctgtcc

SEQ ID NO: 53696 - RNA, 20 nt, synthetic construct
  source 1..20: mol_type = other RNA
tgcaacctccgtttttcagg

SEQ ID NO: 53697 - RNA, 20 nt, synthetic construct
  source 1..20: mol_type = other RNA
tgcaacctgctttcctcatg

SEQ ID NO: 53698 - RNA, 20 nt, synthetic construct
  source 1..20: mol_type = other RNA
tgcaactagagaaagcatca

SEQ ID NO: 53699 - RNA, 20 nt, synthetic construct
  source 1..20: mol_type = other RNA
tgcaactatcaaaacacttc

SEQ ID NO: 53700 - RNA, 20 nt, synthetic construct
  source 1..20: mol_type = other RNA
tgcaactcctgggctcatct

SEQ ID NO: 53701 - RNA, 20 nt, synthetic construct
  source 1..20: mol_type = other RNA
tgcaactgaaaacatctttt

SEQ ID NO: 53702 - RNA, 20 nt, synthetic construct
  source 1..20: mol_type = other RNA
tgcaactgagaagagctgta

SEQ ID NO: 53703 - RNA, 20 nt, synthetic construct
  source 1..20: mol_type = other RNA
tgcaacttactctcaaataa

SEQ ID NO: 53704 - RNA, 20 nt, synthetic construct
  source 1..20: mol_type = other RNA
tgcaagaatggtttaacaca

SEQ ID NO: 53705 - RNA, 20 nt, synthetic construct
  source 1..20: mol_type = other RNA
tgcaagagttaaaactcaca

SEQ ID NO: 53706 - RNA, 20 nt, synthetic construct
  source 1..20: mol_type = other RNA
tgcaagatgcataagttcta

SEQ ID NO: 53707 - RNA, 20 nt, synthetic construct
  source 1..20: mol_type = other RNA
tgcaagatggcaagtttcca

SEQ ID NO: 53708 - RNA, 20 nt, synthetic construct
  source 1..20: mol_type = other RNA
tgcaagatgtcaacattaag

SEQ ID NO: 53709 - RNA, 20 nt, synthetic construct
  source 1..20: mol_type = other RNA
tgcaagattaatcttgtgaa

SEQ ID NO: 53710 - RNA, 20 nt, synthetic construct
  source 1..20: mol_type = other RNA
tgcaagcactggtaaggaaa

SEQ ID NO: 53711 - RNA, 20 nt, synthetic construct
  source 1..20: mol_type = other RNA
tgcaagcagatctgctgtaa

SEQ ID NO: 53712 - RNA, 20 nt, synthetic construct
  source 1..20: mol_type = other RNA
tgcaagccacattagccact

SEQ ID NO: 53713 - RNA, 20 nt, synthetic construct
  source 1..20: mol_type = other RNA
tgcaagctccgcctcctggt

SEQ ID NO: 53714 - RNA, 20 nt, synthetic construct
  source 1..20: mol_type = other RNA
tgcaaggagagaaaaacaaa

SEQ ID NO: 53715 - RNA, 20 nt, synthetic construct
  source 1..20: mol_type = other RNA
tgcaaggataaacaaagaga

SEQ ID NO: 53716 - RNA, 20 nt, synthetic construct
  source 1..20: mol_type = other RNA
tgcaaggcccaccatgatgc

SEQ ID NO: 53717 - RNA, 20 nt, synthetic construct
  source 1..20: mol_type = other RNA
tgcaagttgctatccagtct

SEQ ID NO: 53718 - RNA, 20 nt, synthetic construct
  source 1..20: mol_type = other RNA
tgcaataactcaaaatgttc

SEQ ID NO: 53719 - RNA, 20 nt, synthetic construct
  source 1..20: mol_type = other RNA
tgcaatacagttaacgtatg

SEQ ID NO: 53720 - RNA, 20 nt, synthetic construct
  source 1..20: mol_type = other RNA
tgcaatacttaatagcccaa

SEQ ID NO: 53721 - RNA, 20 nt, synthetic construct
  source 1..20: mol_type = other RNA
tgcaatcacagcacttgggg

SEQ ID NO: 53722 - RNA, 20 nt, synthetic construct
  source 1..20: mol_type = other RNA
tgcaatcacggctgattata

SEQ ID NO: 53723 - RNA, 20 nt, synthetic construct
  source 1..20: mol_type = other RNA
tgcaatgataggtcactgca

SEQ ID NO: 53724 - RNA, 20 nt, synthetic construct
  source 1..20: mol_type = other RNA
tgcaatgcaggcgcctggac

SEQ ID NO: 53725 - RNA, 20 nt, synthetic construct
  source 1..20: mol_type = other RNA
tgcaatgcgtgtgaaaccaa

SEQ ID NO: 53726 - RNA, 20 nt, synthetic construct
  source 1..20: mol_type = other RNA
tgcaatggggcaatctcagc

SEQ ID NO: 53727 - RNA, 20 nt, synthetic construct
  source 1..20: mol_type = other RNA
tgcaatggtgggatctctgg

SEQ ID NO: 53728 - RNA, 20 nt, synthetic construct
  source 1..20: mol_type = other RNA
tgcaattccccagcctcagc

SEQ ID NO: 53729 - RNA, 20 nt, synthetic construct
  source 1..20: mol_type = other RNA
tgcaattgcgcagaactggg

SEQ ID NO: 53730 - RNA, 20 nt, synthetic construct
  source 1..20: mol_type = other RNA
tgcaattggaagactatcac

SEQ ID NO: 53731 - RNA, 20 nt, synthetic construct
  source 1..20: mol_type = other RNA
tgcaatttatatgatactcg

SEQ ID NO: 53732 - RNA, 20 nt, synthetic construct
  source 1..20: mol_type = other RNA
tgcaatttgttttccaagcc

SEQ ID NO: 53733 - RNA, 20 nt, synthetic construct
  source 1..20: mol_type = other RNA
tgcaattttaaatgtacaac

SEQ ID NO: 53734 - RNA, 20 nt, synthetic construct
  source 1..20: mol_type = other RNA
tgcacaaaagtgaaaactaa

SEQ ID NO: 53735 - RNA, 20 nt, synthetic construct
  source 1..20: mol_type = other RNA
tgcacaaaagtttaactttg

SEQ ID NO: 53736 - RNA, 20 nt, synthetic construct
  source 1..20: mol_type = other RNA
tgcacaaaggattgggaaga

SEQ ID NO: 53737 - RNA, 20 nt, synthetic construct
  source 1..20: mol_type = other RNA
tgcacaaataattaacacta

SEQ ID NO: 53738 - RNA, 20 nt, synthetic construct
  source 1..20: mol_type = other RNA
tgcacaacacatgcacacta

SEQ ID NO: 53739 - RNA, 20 nt, synthetic construct
  source 1..20: mol_type = other RNA
tgcacaagacagatgtgctt

SEQ ID NO: 53740 - RNA, 20 nt, synthetic construct
  source 1..20: mol_type = other RNA
tgcacaagccttgaaaatat

SEQ ID NO: 53741 - RNA, 20 nt, synthetic construct
  source 1..20: mol_type = other RNA
tgcacaagggaagaggccac

SEQ ID NO: 53742 - RNA, 20 nt, synthetic construct
  source 1..20: mol_type = other RNA
tgcacaaggtcaagagcggc

SEQ ID NO: 53743 - RNA, 20 nt, synthetic construct
  source 1..20: mol_type = other RNA
tgcacaatgcagtattgtta

SEQ ID NO: 53744 - RNA, 20 nt, synthetic construct
  source 1..20: mol_type = other RNA
tgcacaatggaatattactc

SEQ ID NO: 53745 - RNA, 20 nt, synthetic construct
  source 1..20: mol_type = other RNA
tgcacaatgttgtggatgtc

SEQ ID NO: 53746 - RNA, 20 nt, synthetic construct
  source 1..20: mol_type = other RNA
tgcacacaacactcagatat

SEQ ID NO: 53747 - RNA, 20 nt, synthetic construct
  source 1..20: mol_type = other RNA
tgcacacaccaaatcatgaa

SEQ ID NO: 53748 - RNA, 20 nt, synthetic construct
  source 1..20: mol_type = other RNA
tgcacacagagggagcgcca

SEQ ID NO: 53749 - RNA, 20 nt, synthetic construct
  source 1..20: mol_type = other RNA
tgcacacaggagaacttgtc

SEQ ID NO: 53750 - RNA, 20 nt, synthetic construct
  source 1..20: mol_type = other RNA
tgcacacatccacgcgtaag

SEQ ID NO: 53751 - RNA, 20 nt, synthetic construct
  source 1..20: mol_type = other RNA
tgcacacccagttatctctg

SEQ ID NO: 53752 - RNA, 20 nt, synthetic construct
  source 1..20: mol_type = other RNA
tgcacacgctggaagggagc

SEQ ID NO: 53753 - RNA, 20 nt, synthetic construct
  source 1..20: mol_type = other RNA
tgcacactagacctttctta

SEQ ID NO: 53754 - RNA, 20 nt, synthetic construct
  source 1..20: mol_type = other RNA
tgcacagtatgcggggtttc

SEQ ID NO: 53755 - RNA, 20 nt, synthetic construct
  source 1..20: mol_type = other RNA
tgcacagtctcccccaggtg

SEQ ID NO: 53756 - RNA, 20 nt, synthetic construct
  source 1..20: mol_type = other RNA
tgcacataaaaggatatggg

SEQ ID NO: 53757 - RNA, 20 nt, synthetic construct
  source 1..20: mol_type = other RNA
tgcacataatataaaaagac

SEQ ID NO: 53758 - RNA, 20 nt, synthetic construct
  source 1..20: mol_type = other RNA
tgcacatgcacaaggtcaag

SEQ ID NO: 53759 - RNA, 20 nt, synthetic construct
  source 1..20: mol_type = other RNA
tgcacatgggcatgggtcca

SEQ ID NO: 53760 - RNA, 20 nt, synthetic construct
  source 1..20: mol_type = other RNA
tgcacatgttccctagaact

SEQ ID NO: 53761 - RNA, 20 nt, synthetic construct
  source 1..20: mol_type = other RNA
tgcacattagaatcatccgg

SEQ ID NO: 53762 - RNA, 20 nt, synthetic construct
  source 1..20: mol_type = other RNA
tgcacattccaagagaggaa

SEQ ID NO: 53763 - RNA, 20 nt, synthetic construct
  source 1..20: mol_type = other RNA
tgcacattccttcttcacac

SEQ ID NO: 53764 - RNA, 20 nt, synthetic construct
  source 1..20: mol_type = other RNA
tgcaccaacacctgcagtgg

SEQ ID NO: 53765 - RNA, 20 nt, synthetic construct
  source 1..20: mol_type = other RNA
tgcaccaactccacattgtc

SEQ ID NO: 53766 - RNA, 20 nt, synthetic construct
  source 1..20: mol_type = other RNA
tgcaccatttattgtcaagg

SEQ ID NO: 53767 - RNA, 20 nt, synthetic construct
  source 1..20: mol_type = other RNA
tgcaccattttttcaccagc

SEQ ID NO: 53768 - RNA, 20 nt, synthetic construct
  source 1..20: mol_type = other RNA
tgcaccctcctcctcctggc

SEQ ID NO: 53769 - RNA, 20 nt, synthetic construct
  source 1..20: mol_type = other RNA
tgcacctaataaaatgttta

SEQ ID NO: 53770 - RNA, 20 nt, synthetic construct
  source 1..20: mol_type = other RNA
tgcacctccagtgtcctgaa

SEQ ID NO: 53771 - RNA, 20 nt, synthetic construct
  source 1..20: mol_type = other RNA
tgcacctcgggttcaagccc

SEQ ID NO: 53772 - RNA, 20 nt, synthetic construct
  source 1..20: mol_type = other RNA
tgcaccttacattgtaatcc

SEQ ID NO: 53773 - RNA, 20 nt, synthetic construct
  source 1..20: mol_type = other RNA
tgcacgagaaaagcacaggc

SEQ ID NO: 53774 - RNA, 20 nt, synthetic construct
  source 1..20: mol_type = other RNA
tgcacgctgtgaatgtgagg

SEQ ID NO: 53775 - RNA, 20 nt, synthetic construct
  source 1..20: mol_type = other RNA
tgcacggacttggcacagga

SEQ ID NO: 53776 - RNA, 20 nt, synthetic construct
  source 1..20: mol_type = other RNA
tgcacggtgaagaaccgact

SEQ ID NO: 53777 - RNA, 20 nt, synthetic construct
  source 1..20: mol_type = other RNA
tgcacgtactagtcagcaca

SEQ ID NO: 53778 - RNA, 20 nt, synthetic construct
  source 1..20: mol_type = other RNA
tgcacgtctgtggtctcagc

SEQ ID NO: 53779 - RNA, 20 nt, synthetic construct
  source 1..20: mol_type = other RNA
tgcacgtgaagctacagact

SEQ ID NO: 53780 - RNA, 20 nt, synthetic construct
  source 1..20: mol_type = other RNA
tgcacgtttgctttggagtg

SEQ ID NO: 53781 - RNA, 20 nt, synthetic construct
  source 1..20: mol_type = other RNA
tgcacgtttttagaaattta

SEQ ID NO: 53782 - RNA, 20 nt, synthetic construct
  source 1..20: mol_type = other RNA
tgcactaaactagtatcaac

SEQ ID NO: 53783 - RNA, 20 nt, synthetic construct
  source 1..20: mol_type = other RNA
tgcactcaagcaatcctccg

SEQ ID NO: 53784 - RNA, 20 nt, synthetic construct
  source 1..20: mol_type = other RNA
tgcactccacgtgggtgaca

SEQ ID NO: 53785 - RNA, 20 nt, synthetic construct
  source 1..20: mol_type = other RNA
tgcactccagccttggtaag

SEQ ID NO: 53786 - RNA, 20 nt, synthetic construct
  source 1..20: mol_type = other RNA
tgcactctcaaaattaaatt

SEQ ID NO: 53787 - RNA, 20 nt, synthetic construct
  source 1..20: mol_type = other RNA
tgcactctggcctggacaac

SEQ ID NO: 53788 - RNA, 20 nt, synthetic construct
  source 1..20: mol_type = other RNA
tgcactcttttaaacccatt

SEQ ID NO: 53789 - RNA, 20 nt, synthetic construct
  source 1..20: mol_type = other RNA
tgcactggcacagcactgtt

SEQ ID NO: 53790 - RNA, 20 nt, synthetic construct
  source 1..20: mol_type = other RNA
tgcactggctattagttaac

SEQ ID NO: 53791 - RNA, 20 nt, synthetic construct
  source 1..20: mol_type = other RNA
tgcactgtactcctagatac

SEQ ID NO: 53792 - RNA, 20 nt, synthetic construct
  source 1..20: mol_type = other RNA
tgcacttaaaatttagatct

SEQ ID NO: 53793 - RNA, 20 nt, synthetic construct
  source 1..20: mol_type = other RNA
tgcacttagcgctgatgtgt

SEQ ID NO: 53794 - RNA, 20 nt, synthetic construct
  source 1..20: mol_type = other RNA
tgcagaaaataaaccaagtt

SEQ ID NO: 53795 - RNA, 20 nt, synthetic construct
  source 1..20: mol_type = other RNA
tgcagaaaccagttgtaatt

SEQ ID NO: 53796 - RNA, 20 nt, synthetic construct
  source 1..20: mol_type = other RNA
tgcagaaatctaccaaacat

SEQ ID NO: 53797 - RNA, 20 nt, synthetic construct
  source 1..20: mol_type = other RNA
tgcagaagagtgaagctgga

SEQ ID NO: 53798 - RNA, 20 nt, synthetic construct
  source 1..20: mol_type = other RNA
tgcagaaggagaaaccattt

SEQ ID NO: 53799 - RNA, 20 nt, synthetic construct
  source 1..20: mol_type = other RNA
tgcagaatgacagaaaatat

SEQ ID NO: 53800 - RNA, 20 nt, synthetic construct
  source 1..20: mol_type = other RNA
tgcagaattactgacaatag

SEQ ID NO: 53801 - RNA, 20 nt, synthetic construct
  source 1..20: mol_type = other RNA
tgcagacaataattcttcct

SEQ ID NO: 53802 - RNA, 20 nt, synthetic construct
  source 1..20: mol_type = other RNA
tgcagacatgcacgagaaaa

SEQ ID NO: 53803 - RNA, 20 nt, synthetic construct
  source 1..20: mol_type = other RNA
tgcagaccaagaaaggactt

SEQ ID NO: 53804 - RNA, 20 nt, synthetic construct
  source 1..20: mol_type = other RNA
tgcagactcttgtcccggca

SEQ ID NO: 53805 - RNA, 20 nt, synthetic construct
  source 1..20: mol_type = other RNA
tgcagactgcaggtcttcaa

SEQ ID NO: 53806 - RNA, 20 nt, synthetic construct
  source 1..20: mol_type = other RNA
tgcagagacggggtcccact

SEQ ID NO: 53807 - RNA, 20 nt, synthetic construct
  source 1..20: mol_type = other RNA
tgcagagactggatagcaac

SEQ ID NO: 53808 - RNA, 20 nt, synthetic construct
  source 1..20: mol_type = other RNA
tgcagagactgtgcttccac

SEQ ID NO: 53809 - RNA, 20 nt, synthetic construct
  source 1..20: mol_type = other RNA
tgcagagcaaactcagatct

SEQ ID NO: 53810 - RNA, 20 nt, synthetic construct
  source 1..20: mol_type = other RNA
tgcagagcaggctccacttg

SEQ ID NO: 53811 - RNA, 20 nt, synthetic construct
  source 1..20: mol_type = other RNA
tgcagagcaggggtgggggg

SEQ ID NO: 53812 - RNA, 20 nt, synthetic construct
  source 1..20: mol_type = other RNA
tgcagaggtcaggaaggcag

SEQ ID NO: 53813 - RNA, 20 nt, synthetic construct
  source 1..20: mol_type = other RNA
tgcagagtgttcaaaagccc

SEQ ID NO: 53814 - RNA, 20 nt, synthetic construct
  source 1..20: mol_type = other RNA
tgcagatgaatgagcaaggt

SEQ ID NO: 53815 - RNA, 20 nt, synthetic construct
  source 1..20: mol_type = other RNA
tgcagattcatcttgacttc

SEQ ID NO: 53816 - RNA, 20 nt, synthetic construct
  source 1..20: mol_type = other RNA
tgcagatttctttttactca

SEQ ID NO: 53817 - RNA, 20 nt, synthetic construct
  source 1..20: mol_type = other RNA
tgcagcaaaagcaccactga

SEQ ID NO: 53818 - RNA, 20 nt, synthetic construct
  source 1..20: mol_type = other RNA
tgcagcaacggaaatgagtg

SEQ ID NO: 53819 - RNA, 20 nt, synthetic construct
  source 1..20: mol_type = other RNA
tgcagcaagcagtaaatata

SEQ ID NO: 53820 - RNA, 20 nt, synthetic construct
  source 1..20: mol_type = other RNA
tgcagcaattatttgaataa

SEQ ID NO: 53821 - RNA, 20 nt, synthetic construct
  source 1..20: mol_type = other RNA
tgcagcatgctcactgtctc

SEQ ID NO: 53822 - RNA, 20 nt, synthetic construct
  source 1..20: mol_type = other RNA
tgcagccactatagaaaata

SEQ ID NO: 53823 - RNA, 20 nt, synthetic construct
  source 1..20: mol_type = other RNA
tgcagccagagagtggaaag

SEQ ID NO: 53824 - RNA, 20 nt, synthetic construct
  source 1..20: mol_type = other RNA
tgcagccagatttgatcctg

SEQ ID NO: 53825 - RNA, 20 nt, synthetic construct
  source 1..20: mol_type = other RNA
tgcagcccctgccacactcc

SEQ ID NO: 53826 - RNA, 20 nt, synthetic construct
  source 1..20: mol_type = other RNA
tgcagcctctaatcaggttg

SEQ ID NO: 53827 - RNA, 20 nt, synthetic construct
  source 1..20: mol_type = other RNA
tgcagccttccctgaacaat

SEQ ID NO: 53828 - RNA, 20 nt, synthetic construct
  source 1..20: mol_type = other RNA
tgcaggaaacttccagaaac

SEQ ID NO: 53829 - RNA, 20 nt, synthetic construct
  source 1..20: mol_type = other RNA
tgcaggaccaactttaagca

SEQ ID NO: 53830 - RNA, 20 nt, synthetic construct
  source 1..20: mol_type = other RNA
tgcaggagaaacatggctta

SEQ ID NO: 53831 - RNA, 20 nt, synthetic construct
  source 1..20: mol_type = other RNA
tgcaggagccttgctgttgt

SEQ ID NO: 53832 - RNA, 20 nt, synthetic construct
  source 1..20: mol_type = other RNA
tgcaggagtttgagactgca

SEQ ID NO: 53833 - RNA, 20 nt, synthetic construct
  source 1..20: mol_type = other RNA
tgcaggcagaatgtgacctg

SEQ ID NO: 53834 - RNA, 20 nt, synthetic construct
  source 1..20: mol_type = other RNA
tgcaggccagatatccataa

SEQ ID NO: 53835 - RNA, 20 nt, synthetic construct
  source 1..20: mol_type = other RNA
tgcaggcgcctggacaggat

SEQ ID NO: 53836 - RNA, 20 nt, synthetic construct
  source 1..20: mol_type = other RNA
tgcaggctgaactgctgaca

SEQ ID NO: 53837 - RNA, 20 nt, synthetic construct
  source 1..20: mol_type = other RNA
tgcagggaaatcattcagga

SEQ ID NO: 53838 - RNA, 20 nt, synthetic construct
  source 1..20: mol_type = other RNA
tgcagggcttctgaaggtgc

SEQ ID NO: 53839 - RNA, 20 nt, synthetic construct
  source 1..20: mol_type = other RNA
tgcaggtatttctaaatcaa

SEQ ID NO: 53840 - RNA, 20 nt, synthetic construct
  source 1..20: mol_type = other RNA
tgcaggtcttcaacctcaac

SEQ ID NO: 53841 - RNA, 20 nt, synthetic construct
  source 1..20: mol_type = other RNA
tgcaggtgtgggccaccaag

SEQ ID NO: 53842 - RNA, 20 nt, synthetic construct
  source 1..20: mol_type = other RNA
tgcaggtgttggtgcatttg

SEQ ID NO: 53843 - RNA, 20 nt, synthetic construct
  source 1..20: mol_type = other RNA
tgcaggttcatgtgtgctta

SEQ ID NO: 53844 - RNA, 20 nt, synthetic construct
  source 1..20: mol_type = other RNA
tgcaggttgatactagttta

SEQ ID NO: 53845 - RNA, 20 nt, synthetic construct
  source 1..20: mol_type = other RNA
tgcaggtttactccaagaag

SEQ ID NO: 53846 - RNA, 20 nt, synthetic construct
  source 1..20: mol_type = other RNA
tgcagtacttgtctttttgt

SEQ ID NO: 53847 - RNA, 20 nt, synthetic construct
  source 1..20: mol_type = other RNA
tgcagtagctcatcatttat

SEQ ID NO: 53848 - RNA, 20 nt, synthetic construct
  source 1..20: mol_type = other RNA
tgcagtagtaaagcaaatgt

SEQ ID NO: 53849 - RNA, 20 nt, synthetic construct
  source 1..20: mol_type = other RNA
tgcagtagtattgaactgtt

SEQ ID NO: 53850 - RNA, 20 nt, synthetic construct
  source 1..20: mol_type = other RNA
tgcagtatcttgaagaaacc

SEQ ID NO: 53851 - RNA, 20 nt, synthetic construct
  source 1..20: mol_type = other RNA
tgcagtatgcatagatcaca

SEQ ID NO: 53852 - RNA, 20 nt, synthetic construct
  source 1..20: mol_type = other RNA
tgcagtatgtaggaaacttt

SEQ ID NO: 53853 - RNA, 20 nt, synthetic construct
  source 1..20: mol_type = other RNA
tgcagtatgtgccattttta

SEQ ID NO: 53854 - RNA, 20 nt, synthetic construct
  source 1..20: mol_type = other RNA
tgcagtattgttaactgtag

SEQ ID NO: 53855 - RNA, 20 nt, synthetic construct
  source 1..20: mol_type = other RNA
tgcagtccccggtctttcct

SEQ ID NO: 53856 - RNA, 20 nt, synthetic construct
  source 1..20: mol_type = other RNA
tgcagtctaaccattaacag

SEQ ID NO: 53857 - RNA, 20 nt, synthetic construct
  source 1..20: mol_type = other RNA
tgcagtctcaaactcctgca

SEQ ID NO: 53858 - RNA, 20 nt, synthetic construct
  source 1..20: mol_type = other RNA
tgcagtctgcaggcagaatg

SEQ ID NO: 53859 - RNA, 20 nt, synthetic construct
  source 1..20: mol_type = other RNA
tgcagtctgtcctcgtaaaa

SEQ ID NO: 53860 - RNA, 20 nt, synthetic construct
  source 1..20: mol_type = other RNA
tgcagtgaacatgggaatgc

SEQ ID NO: 53861 - RNA, 20 nt, synthetic construct
  source 1..20: mol_type = other RNA
tgcagtgagcccagagatcc

SEQ ID NO: 53862 - RNA, 20 nt, synthetic construct
  source 1..20: mol_type = other RNA
tgcagtggatgactaggctc

SEQ ID NO: 53863 - RNA, 20 nt, synthetic construct
  source 1..20: mol_type = other RNA
tgcagtggcgtgtgcccagg

SEQ ID NO: 53864 - RNA, 20 nt, synthetic construct
  source 1..20: mol_type = other RNA
tgcagtggcttcctaactgg

SEQ ID NO: 53865 - RNA, 20 nt, synthetic construct
  source 1..20: mol_type = other RNA
tgcagtggtgtggtcttgtc

SEQ ID NO: 53866 - RNA, 20 nt, synthetic construct
  source 1..20: mol_type = other RNA
tgcagtgtccatctcccatc

SEQ ID NO: 53867 - RNA, 20 nt, synthetic construct
  source 1..20: mol_type = other RNA
tgcagttagcatgcctgaca

SEQ ID NO: 53868 - RNA, 20 nt, synthetic construct
  source 1..20: mol_type = other RNA
tgcagttgcttactctaatg

SEQ ID NO: 53869 - RNA, 20 nt, synthetic construct
  source 1..20: mol_type = other RNA
tgcagttggattatatgttc

SEQ ID NO: 53870 - RNA, 20 nt, synthetic construct
  source 1..20: mol_type = other RNA
tgcagttggggactcttatg

SEQ ID NO: 53871 - RNA, 20 nt, synthetic construct
  source 1..20: mol_type = other RNA
tgcagtttgtgttttcactc

SEQ ID NO: 53872 - RNA, 20 nt, synthetic construct
  source 1..20: mol_type = other RNA
tgcagtttttccactaatgt

SEQ ID NO: 53873 - RNA, 20 nt, synthetic construct
  source 1..20: mol_type = other RNA
tgcataaaaatatatacgga

SEQ ID NO: 53874 - RNA, 20 nt, synthetic construct
  source 1..20: mol_type = other RNA
tgcataaacgacagcaggaa

SEQ ID NO: 53875 - RNA, 20 nt, synthetic construct
  source 1..20: mol_type = other RNA
tgcataactcgtaatgcgat

SEQ ID NO: 53876 - RNA, 20 nt, synthetic construct
  source 1..20: mol_type = other RNA
tgcataagttctagagattt

SEQ ID NO: 53877 - RNA, 20 nt, synthetic construct
  source 1..20: mol_type = other RNA
tgcatacactcatttccttt

SEQ ID NO: 53878 - RNA, 20 nt, synthetic construct
  source 1..20: mol_type = other RNA
tgcataccaagcccggcacg

SEQ ID NO: 53879 - RNA, 20 nt, synthetic construct
  source 1..20: mol_type = other RNA
tgcataccaccacattcggc

SEQ ID NO: 53880 - RNA, 20 nt, synthetic construct
  source 1..20: mol_type = other RNA
tgcatacgtcgtcccccatc

SEQ ID NO: 53881 - RNA, 20 nt, synthetic construct
  source 1..20: mol_type = other RNA
tgcatactgcagcactttta

SEQ ID NO: 53882 - RNA, 20 nt, synthetic construct
  source 1..20: mol_type = other RNA
tgcatactgtgatgatttta

SEQ ID NO: 53883 - RNA, 20 nt, synthetic construct
  source 1..20: mol_type = other RNA
tgcatacttagctaatttca

SEQ ID NO: 53884 - RNA, 20 nt, synthetic construct
  source 1..20: mol_type = other RNA
tgcatactttggaaggtagg

SEQ ID NO: 53885 - RNA, 20 nt, synthetic construct
  source 1..20: mol_type = other RNA
tgcatagagatcttgtgtat

SEQ ID NO: 53886 - RNA, 20 nt, synthetic construct
  source 1..20: mol_type = other RNA
tgcatagatcacaaggactg

SEQ ID NO: 53887 - RNA, 20 nt, synthetic construct
  source 1..20: mol_type = other RNA
tgcatagcagggtcatgcac

SEQ ID NO: 53888 - RNA, 20 nt, synthetic construct
  source 1..20: mol_type = other RNA
tgcatagggatgttgcctac

SEQ ID NO: 53889 - RNA, 20 nt, synthetic construct
  source 1..20: mol_type = other RNA
tgcatagtactccattatat

SEQ ID NO: 53890 - RNA, 20 nt, synthetic construct
  source 1..20: mol_type = other RNA
tgcatatataccacattttg

SEQ ID NO: 53891 - RNA, 20 nt, synthetic construct
  source 1..20: mol_type = other RNA
tgcatatatctgtctgggat

SEQ ID NO: 53892 - RNA, 20 nt, synthetic construct
  source 1..20: mol_type = other RNA
tgcatatgtttgtaacttgt

SEQ ID NO: 53893 - RNA, 20 nt, synthetic construct
  source 1..20: mol_type = other RNA
tgcatatgtttttattagca

SEQ ID NO: 53894 - RNA, 20 nt, synthetic construct
  source 1..20: mol_type = other RNA
tgcatattgaagccagcacc

SEQ ID NO: 53895 - RNA, 20 nt, synthetic construct
  source 1..20: mol_type = other RNA
tgcatcaaaggacactattg

SEQ ID NO: 53896 - RNA, 20 nt, synthetic construct
  source 1..20: mol_type = other RNA
tgcatcaactgcttccctag

SEQ ID NO: 53897 - RNA, 20 nt, synthetic construct
  source 1..20: mol_type = other RNA
tgcatcacttgaggtgatta

SEQ ID NO: 53898 - RNA, 20 nt, synthetic construct
  source 1..20: mol_type = other RNA
tgcatcagaattccattcct

SEQ ID NO: 53899 - RNA, 20 nt, synthetic construct
  source 1..20: mol_type = other RNA
tgcatcatggtgggccttgc

SEQ ID NO: 53900 - RNA, 20 nt, synthetic construct
  source 1..20: mol_type = other RNA
tgcatccaaaagggaaatat

SEQ ID NO: 53901 - RNA, 20 nt, synthetic construct
  source 1..20: mol_type = other RNA
tgcatccacattttgtgaca

SEQ ID NO: 53902 - RNA, 20 nt, synthetic construct
  source 1..20: mol_type = other RNA
tgcatcccaagggttttggt

SEQ ID NO: 53903 - RNA, 20 nt, synthetic construct
  source 1..20: mol_type = other RNA
tgcatccccattcaattgtc

SEQ ID NO: 53904 - RNA, 20 nt, synthetic construct
  source 1..20: mol_type = other RNA
tgcatccctcctctggccct

SEQ ID NO: 53905 - RNA, 20 nt, synthetic construct
  source 1..20: mol_type = other RNA
tgcatcctttatacctttta

SEQ ID NO: 53906 - RNA, 20 nt, synthetic construct
  source 1..20: mol_type = other RNA
tgcatcgtttcaatattaag

SEQ ID NO: 53907 - RNA, 20 nt, synthetic construct
  source 1..20: mol_type = other RNA
tgcatcttcttttacttgct

SEQ ID NO: 53908 - RNA, 20 nt, synthetic construct
  source 1..20: mol_type = other RNA
tgcatcttgaactaagtgtg

SEQ ID NO: 53909 - RNA, 20 nt, synthetic construct
  source 1..20: mol_type = other RNA
tgcatcttgcaaaacggaaa

SEQ ID NO: 53910 - RNA, 20 nt, synthetic construct
  source 1..20: mol_type = other RNA
tgcatcttttaaaaacctta

SEQ ID NO: 53911 - RNA, 20 nt, synthetic construct
  source 1..20: mol_type = other RNA
tgcatcttttgagggtatca

SEQ ID NO: 53912 - RNA, 20 nt, synthetic construct
  source 1..20: mol_type = other RNA
tgcatgaatttgttttctta

SEQ ID NO: 53913 - RNA, 20 nt, synthetic construct
  source 1..20: mol_type = other RNA
tgcatgaccctgctatgcat

SEQ ID NO: 53914 - RNA, 20 nt, synthetic construct
  source 1..20: mol_type = other RNA
tgcatgagacttggagtttg

SEQ ID NO: 53915 - RNA, 20 nt, synthetic construct
  source 1..20: mol_type = other RNA
tgcatgaggcatattattgt

SEQ ID NO: 53916 - RNA, 20 nt, synthetic construct
  source 1..20: mol_type = other RNA
tgcatgattccccttatatg

SEQ ID NO: 53917 - RNA, 20 nt, synthetic construct
  source 1..20: mol_type = other RNA
tgcatgcacacagagggagc

SEQ ID NO: 53918 - RNA, 20 nt, synthetic construct
  source 1..20: mol_type = other RNA
tgcatgcatgtctgtctgtt

SEQ ID NO: 53919 - RNA, 20 nt, synthetic construct
  source 1..20: mol_type = other RNA
tgcatgcctctgttacagct

SEQ ID NO: 53920 - RNA, 20 nt, synthetic construct
  source 1..20: mol_type = other RNA
tgcatgctaggggctgttcc

SEQ ID NO: 53921 - RNA, 20 nt, synthetic construct
  source 1..20: mol_type = other RNA
tgcatgctcccatttgggac

SEQ ID NO: 53922 - RNA, 20 nt, synthetic construct
  source 1..20: mol_type = other RNA
tgcatgggaggtaatactat

SEQ ID NO: 53923 - RNA, 20 nt, synthetic construct
  source 1..20: mol_type = other RNA
tgcatggggagttttaggaa

SEQ ID NO: 53924 - RNA, 20 nt, synthetic construct
  source 1..20: mol_type = other RNA
tgcatggtgtaaaatacaac

SEQ ID NO: 53925 - RNA, 20 nt, synthetic construct
  source 1..20: mol_type = other RNA
tgcatgtctgcaggagcctt

SEQ ID NO: 53926 - RNA, 20 nt, synthetic construct
  source 1..20: mol_type = other RNA
tgcatgtctgtctgttcaca

SEQ ID NO: 53927 - RNA, 20 nt, synthetic construct
  source 1..20: mol_type = other RNA
tgcatgtgcaggaaacttcc

SEQ ID NO: 53928 - RNA, 20 nt, synthetic construct
  source 1..20: mol_type = other RNA
tgcatgtgttgtgcacacat

SEQ ID NO: 53929 - RNA, 20 nt, synthetic construct
  source 1..20: mol_type = other RNA
tgcatgttatttggggattc

SEQ ID NO: 53930 - RNA, 20 nt, synthetic construct
  source 1..20: mol_type = other RNA
tgcattaagccagtcactaa

SEQ ID NO: 53931 - RNA, 20 nt, synthetic construct
  source 1..20: mol_type = other RNA
tgcattaatgcttcatattt

SEQ ID NO: 53932 - RNA, 20 nt, synthetic construct
  source 1..20: mol_type = other RNA
tgcattacatgaatggaaaa

SEQ ID NO: 53933 - RNA, 20 nt, synthetic construct
  source 1..20: mol_type = other RNA
tgcattagagccccaagaaa

SEQ ID NO: 53934 - RNA, 20 nt, synthetic construct
  source 1..20: mol_type = other RNA
tgcattcatactgaaggcat

SEQ ID NO: 53935 - RNA, 20 nt, synthetic construct
  source 1..20: mol_type = other RNA
tgcattcatccaggcaaaag

SEQ ID NO: 53936 - RNA, 20 nt, synthetic construct
  source 1..20: mol_type = other RNA
tgcattccagattgaaatct

SEQ ID NO: 53937 - RNA, 20 nt, synthetic construct
  source 1..20: mol_type = other RNA
tgcattccgcctgggcgaca

SEQ ID NO: 53938 - RNA, 20 nt, synthetic construct
  source 1..20: mol_type = other RNA
tgcattcctgaaatgaacca

SEQ ID NO: 53939 - RNA, 20 nt, synthetic construct
  source 1..20: mol_type = other RNA
tgcattcgtccctaaacact

SEQ ID NO: 53940 - RNA, 20 nt, synthetic construct
  source 1..20: mol_type = other RNA
tgcattctagaaaggaggga

SEQ ID NO: 53941 - RNA, 20 nt, synthetic construct
  source 1..20: mol_type = other RNA
tgcattctgtcacatagacc

SEQ ID NO: 53942 - RNA, 20 nt, synthetic construct
  source 1..20: mol_type = other RNA
tgcattgactaccaattctc

SEQ ID NO: 53943 - RNA, 20 nt, synthetic construct
  source 1..20: mol_type = other RNA
tgcattgcatttacttgtca

SEQ ID NO: 53944 - RNA, 20 nt, synthetic construct
  source 1..20: mol_type = other RNA
tgcattgtgcacttaaaatt

SEQ ID NO: 53945 - RNA, 20 nt, synthetic construct
  source 1..20: mol_type = other RNA
tgcatttacttgtcatttct

SEQ ID NO: 53946 - RNA, 20 nt, synthetic construct
  source 1..20: mol_type = other RNA
tgcatttattagtagttagg

SEQ ID NO: 53947 - RNA, 20 nt, synthetic construct
  source 1..20: mol_type = other RNA
tgcatttcggctctgtgctg

SEQ ID NO: 53948 - RNA, 20 nt, synthetic construct
  source 1..20: mol_type = other RNA
tgcatttctctaatagctag

SEQ ID NO: 53949 - RNA, 20 nt, synthetic construct
  source 1..20: mol_type = other RNA
tgcatttgggacagcctagt

SEQ ID NO: 53950 - RNA, 20 nt, synthetic construct
  source 1..20: mol_type = other RNA
tgcatttggtctcattcact

SEQ ID NO: 53951 - RNA, 20 nt, synthetic construct
  source 1..20: mol_type = other RNA
tgcatttggtttgcaaaaat

SEQ ID NO: 53952 - RNA, 20 nt, synthetic construct
  source 1..20: mol_type = other RNA
tgcattttttgccaaattat

SEQ ID NO: 53953 - RNA, 20 nt, synthetic construct
  source 1..20: mol_type = other RNA
tgccaaaagccaagagcgag

SEQ ID NO: 53954 - RNA, 20 nt, synthetic construct
  source 1..20: mol_type = other RNA
tgccaaaatgattttcacag

SEQ ID NO: 53955 - RNA, 20 nt, synthetic construct
  source 1..20: mol_type = other RNA
tgccaaaccctacacccatc

SEQ ID NO: 53956 - RNA, 20 nt, synthetic construct
  source 1..20: mol_type = other RNA
tgccaaactgttttccacag

SEQ ID NO: 53957 - RNA, 20 nt, synthetic construct
  source 1..20: mol_type = other RNA
tgccaaagattcttgtcatg

SEQ ID NO: 53958 - RNA, 20 nt, synthetic construct
  source 1..20: mol_type = other RNA
tgccaaattatttgagagta

SEQ ID NO: 53959 - RNA, 20 nt, synthetic construct
  source 1..20: mol_type = other RNA
tgccaacacatggggcatta

SEQ ID NO: 53960 - RNA, 20 nt, synthetic construct
  source 1..20: mol_type = other RNA
tgccaacagttactttcctt

SEQ ID NO: 53961 - RNA, 20 nt, synthetic construct
  source 1..20: mol_type = other RNA
tgccaactctggcaggtcac

SEQ ID NO: 53962 - RNA, 20 nt, synthetic construct
  source 1..20: mol_type = other RNA
tgccaagcaacttgatcagg

SEQ ID NO: 53963 - RNA, 20 nt, synthetic construct
  source 1..20: mol_type = other RNA
tgccaaggcttgctttggct

SEQ ID NO: 53964 - RNA, 20 nt, synthetic construct
  source 1..20: mol_type = other RNA
tgccaagtataagatgatga

SEQ ID NO: 53965 - RNA, 20 nt, synthetic construct
  source 1..20: mol_type = other RNA
tgccaagtcagcacttctga

SEQ ID NO: 53966 - RNA, 20 nt, synthetic construct
  source 1..20: mol_type = other RNA
tgccaagtccgtgcatgcct

SEQ ID NO: 53967 - RNA, 20 nt, synthetic construct
  source 1..20: mol_type = other RNA
tgccaatatcacactgtttg

SEQ ID NO: 53968 - RNA, 20 nt, synthetic construct
  source 1..20: mol_type = other RNA
tgccaatatctatcagggct

SEQ ID NO: 53969 - RNA, 20 nt, synthetic construct
  source 1..20: mol_type = other RNA
tgccaatcaataattctgtg

SEQ ID NO: 53970 - RNA, 20 nt, synthetic construct
  source 1..20: mol_type = other RNA
tgccaatttgggatatagct

SEQ ID NO: 53971 - RNA, 20 nt, synthetic construct
  source 1..20: mol_type = other RNA
tgccacaaatggagtgactt

SEQ ID NO: 53972 - RNA, 20 nt, synthetic construct
  source 1..20: mol_type = other RNA
tgccacaccacatccagcta

SEQ ID NO: 53973 - RNA, 20 nt, synthetic construct
  source 1..20: mol_type = other RNA
tgccacactccagcatccct

SEQ ID NO: 53974 - RNA, 20 nt, synthetic construct
  source 1..20: mol_type = other RNA
tgccacataaatcacaggaa

SEQ ID NO: 53975 - RNA, 20 nt, synthetic construct
  source 1..20: mol_type = other RNA
tgccacattcaacaacatgg

SEQ ID NO: 53976 - RNA, 20 nt, synthetic construct
  source 1..20: mol_type = other RNA
tgccacattttaccaaaaca

SEQ ID NO: 53977 - RNA, 20 nt, synthetic construct
  source 1..20: mol_type = other RNA
tgccacattttttggtttgt

SEQ ID NO: 53978 - RNA, 20 nt, synthetic construct
  source 1..20: mol_type = other RNA
tgccactacttagcccctgc

SEQ ID NO: 53979 - RNA, 20 nt, synthetic construct
  source 1..20: mol_type = other RNA
tgccactcaaaactgaagtt

SEQ ID NO: 53980 - RNA, 20 nt, synthetic construct
  source 1..20: mol_type = other RNA
tgccagagttggcacagcca

SEQ ID NO: 53981 - RNA, 20 nt, synthetic construct
  source 1..20: mol_type = other RNA
tgccagatgttctaatttct

SEQ ID NO: 53982 - RNA, 20 nt, synthetic construct
  source 1..20: mol_type = other RNA
tgccagcaccagatactcaa

SEQ ID NO: 53983 - RNA, 20 nt, synthetic construct
  source 1..20: mol_type = other RNA
tgccagccacccttgctgct

SEQ ID NO: 53984 - RNA, 20 nt, synthetic construct
  source 1..20: mol_type = other RNA
tgccagctaacttttaaccc

SEQ ID NO: 53985 - RNA, 20 nt, synthetic construct
  source 1..20: mol_type = other RNA
tgccagctttggctgaaatg

SEQ ID NO: 53986 - RNA, 20 nt, synthetic construct
  source 1..20: mol_type = other RNA
tgccaggacaattgaatggg

SEQ ID NO: 53987 - RNA, 20 nt, synthetic construct
  source 1..20: mol_type = other RNA
tgccagggcgctcctctccc

SEQ ID NO: 53988 - RNA, 20 nt, synthetic construct
  source 1..20: mol_type = other RNA
tgccaggtagggaggggtat

SEQ ID NO: 53989 - RNA, 20 nt, synthetic construct
  source 1..20: mol_type = other RNA
tgccaggtggacgcggcccc

SEQ ID NO: 53990 - RNA, 20 nt, synthetic construct
  source 1..20: mol_type = other RNA
tgccaggtttgtgcttggat

SEQ ID NO: 53991 - RNA, 20 nt, synthetic construct
  source 1..20: mol_type = other RNA
tgccagtgaactccagtctg

SEQ ID NO: 53992 - RNA, 20 nt, synthetic construct
  source 1..20: mol_type = other RNA
tgccagtgcaaacctcctgg

SEQ ID NO: 53993 - RNA, 20 nt, synthetic construct
  source 1..20: mol_type = other RNA
tgccagtgttttaaagcagg

SEQ ID NO: 53994 - RNA, 20 nt, synthetic construct
  source 1..20: mol_type = other RNA
tgccagttttctggaaactc

SEQ ID NO: 53995 - RNA, 20 nt, synthetic construct
  source 1..20: mol_type = other RNA
tgccatagagctttaaagtt

SEQ ID NO: 53996 - RNA, 20 nt, synthetic construct
  source 1..20: mol_type = other RNA
tgccatagagggagcatctt

SEQ ID NO: 53997 - RNA, 20 nt, synthetic construct
  source 1..20: mol_type = other RNA
tgccatatgtagggcaccgt

SEQ ID NO: 53998 - RNA, 20 nt, synthetic construct
  source 1..20: mol_type = other RNA
tgccatcacattttgaatca

SEQ ID NO: 53999 - RNA, 20 nt, synthetic construct
  source 1..20: mol_type = other RNA
tgccatcattttatgaaacc

SEQ ID NO: 54000 - RNA, 20 nt, synthetic construct
  source 1..20: mol_type = other RNA
tgccatcctggatttgggaa

SEQ ID NO: 54001 - RNA, 20 nt, synthetic construct
  source 1..20: mol_type = other RNA
tgccatctccttaatccagt

SEQ ID NO: 54002 - RNA, 20 nt, synthetic construct
  source 1..20: mol_type = other RNA
tgccatcttcaagatttcat

SEQ ID NO: 54003 - RNA, 20 nt, synthetic construct
  source 1..20: mol_type = other RNA
tgccatcttgcataagtttt

SEQ ID NO: 54004 - RNA, 20 nt, synthetic construct
  source 1..20: mol_type = other RNA
tgccatggtgttaaatattt

SEQ ID NO: 54005 - RNA, 20 nt, synthetic construct
  source 1..20: mol_type = other RNA
tgccatgtgttttgttttga

SEQ ID NO: 54006 - RNA, 20 nt, synthetic construct
  source 1..20: mol_type = other RNA
tgccattctcccagttgtca

SEQ ID NO: 54007 - RNA, 20 nt, synthetic construct
  source 1..20: mol_type = other RNA
tgccatttataatagcataa

SEQ ID NO: 54008 - RNA, 20 nt, synthetic construct
  source 1..20: mol_type = other RNA
tgcccaaggaaggcagggta

SEQ ID NO: 54009 - RNA, 20 nt, synthetic construct
  source 1..20: mol_type = other RNA
tgcccaatcaaatccagtct

SEQ ID NO: 54010 - RNA, 20 nt, synthetic construct
  source 1..20: mol_type = other RNA
tgcccacctgacaagtagta

SEQ ID NO: 54011 - RNA, 20 nt, synthetic construct
  source 1..20: mol_type = other RNA
tgcccactcttatatcctaa

SEQ ID NO: 54012 - RNA, 20 nt, synthetic construct
  source 1..20: mol_type = other RNA
tgcccagactggagttcact

SEQ ID NO: 54013 - RNA, 20 nt, synthetic construct
  source 1..20: mol_type = other RNA
tgcccaggctgacttagagg

SEQ ID NO: 54014 - RNA, 20 nt, synthetic construct
  source 1..20: mol_type = other RNA
tgcccaggctggtcttgtac

SEQ ID NO: 54015 - RNA, 20 nt, synthetic construct
  source 1..20: mol_type = other RNA
tgcccatcctatctaagcct

SEQ ID NO: 54016 - RNA, 20 nt, synthetic construct
  source 1..20: mol_type = other RNA
tgcccatcctctatttttgt

SEQ ID NO: 54017 - RNA, 20 nt, synthetic construct
  source 1..20: mol_type = other RNA
tgcccatgtgcattattgta

SEQ ID NO: 54018 - RNA, 20 nt, synthetic construct
  source 1..20: mol_type = other RNA
tgcccattaaaaccatgaaa

SEQ ID NO: 54019 - RNA, 20 nt, synthetic construct
  source 1..20: mol_type = other RNA
tgcccattaacagatgaatg

SEQ ID NO: 54020 - RNA, 20 nt, synthetic construct
  source 1..20: mol_type = other RNA
tgcccattataaaataggaa

SEQ ID NO: 54021 - RNA, 20 nt, synthetic construct
  source 1..20: mol_type = other RNA
tgccccactccacacacgaa

SEQ ID NO: 54022 - RNA, 20 nt, synthetic construct
  source 1..20: mol_type = other RNA
tgccccagctaaaatgttca

SEQ ID NO: 54023 - RNA, 20 nt, synthetic construct
  source 1..20: mol_type = other RNA
tgccccatgtgttggcactg

SEQ ID NO: 54024 - RNA, 20 nt, synthetic construct
  source 1..20: mol_type = other RNA
tgccccattgcactccacgt

SEQ ID NO: 54025 - RNA, 20 nt, synthetic construct
  source 1..20: mol_type = other RNA
tgccccctcttctctccttt

SEQ ID NO: 54026 - RNA, 20 nt, synthetic construct
  source 1..20: mol_type = other RNA
tgccccgggcctggttaggg

SEQ ID NO: 54027 - RNA, 20 nt, synthetic construct
  source 1..20: mol_type = other RNA
tgcccctccactccacaaag

SEQ ID NO: 54028 - RNA, 20 nt, synthetic construct
  source 1..20: mol_type = other RNA
tgcccctgtagcagacactg

SEQ ID NO: 54029 - RNA, 20 nt, synthetic construct
  source 1..20: mol_type = other RNA
tgccccttatcctcttctga

SEQ ID NO: 54030 - RNA, 20 nt, synthetic construct
  source 1..20: mol_type = other RNA
tgcccctttgagcagagtcc

SEQ ID NO: 54031 - RNA, 20 nt, synthetic construct
  source 1..20: mol_type = other RNA
tgcccgcgaaggcgtgtaaa

SEQ ID NO: 54032 - RNA, 20 nt, synthetic construct
  source 1..20: mol_type = other RNA
tgcccggccagacattttat

SEQ ID NO: 54033 - RNA, 20 nt, synthetic construct
  source 1..20: mol_type = other RNA
tgccctacatatggcaattc

SEQ ID NO: 54034 - RNA, 20 nt, synthetic construct
  source 1..20: mol_type = other RNA
tgccctcattgaagctacta

SEQ ID NO: 54035 - RNA, 20 nt, synthetic construct
  source 1..20: mol_type = other RNA
tgccctgtgaaaatcatttt

SEQ ID NO: 54036 - RNA, 20 nt, synthetic construct
  source 1..20: mol_type = other RNA
tgcccttatttaatgtgctg

SEQ ID NO: 54037 - RNA, 20 nt, synthetic construct
  source 1..20: mol_type = other RNA
tgccgaggcagagagagtaa

SEQ ID NO: 54038 - RNA, 20 nt, synthetic construct
  source 1..20: mol_type = other RNA
tgccgcagagcaagcacgtt

SEQ ID NO: 54039 - RNA, 20 nt, synthetic construct
  source 1..20: mol_type = other RNA
tgccgcgcgagggagcgtac

SEQ ID NO: 54040 - RNA, 20 nt, synthetic construct
  source 1..20: mol_type = other RNA
tgccgcgttttttgtccacc

SEQ ID NO: 54041 - RNA, 20 nt, synthetic construct
  source 1..20: mol_type = other RNA
tgccgctggtgaaaaaatgg

SEQ ID NO: 54042 - RNA, 20 nt, synthetic construct
  source 1..20: mol_type = other RNA
tgccgcttcgcctttctcgc

SEQ ID NO: 54043 - RNA, 20 nt, synthetic construct
  source 1..20: mol_type = other RNA
tgccggctgttaggtattat

SEQ ID NO: 54044 - RNA, 20 nt, synthetic construct
  source 1..20: mol_type = other RNA
tgccgggacaagagtctgca

SEQ ID NO: 54045 - RNA, 20 nt, synthetic construct
  source 1..20: mol_type = other RNA
tgccgggcttggtatgcatc

SEQ ID NO: 54046 - RNA, 20 nt, synthetic construct
  source 1..20: mol_type = other RNA
tgccggtaatcacagctact

SEQ ID NO: 54047 - RNA, 20 nt, synthetic construct
  source 1..20: mol_type = other RNA
tgcctaacaccagtaagatt

SEQ ID NO: 54048 - RNA, 20 nt, synthetic construct
  source 1..20: mol_type = other RNA
tgcctaagtaatgctggcca

SEQ ID NO: 54049 - RNA, 20 nt, synthetic construct
  source 1..20: mol_type = other RNA
tgcctaagtctcaggataca

SEQ ID NO: 54050 - RNA, 20 nt, synthetic construct
  source 1..20: mol_type = other RNA
tgcctaatctctaggcttaa

SEQ ID NO: 54051 - RNA, 20 nt, synthetic construct
  source 1..20: mol_type = other RNA
tgcctacatagtccactttc

SEQ ID NO: 54052 - RNA, 20 nt, synthetic construct
  source 1..20: mol_type = other RNA
tgcctactagccagtgattg

SEQ ID NO: 54053 - RNA, 20 nt, synthetic construct
  source 1..20: mol_type = other RNA
tgcctagaaaggaattgtaa

SEQ ID NO: 54054 - RNA, 20 nt, synthetic construct
  source 1..20: mol_type = other RNA
tgcctagatgattcgcattg

SEQ ID NO: 54055 - RNA, 20 nt, synthetic construct
  source 1..20: mol_type = other RNA
tgcctagatttcaatctgga

SEQ ID NO: 54056 - RNA, 20 nt, synthetic construct
  source 1..20: mol_type = other RNA
tgcctataaaatgctggaaa

SEQ ID NO: 54057 - RNA, 20 nt, synthetic construct
  source 1..20: mol_type = other RNA
tgcctataattcaattttca

SEQ ID NO: 54058 - RNA, 20 nt, synthetic construct
  source 1..20: mol_type = other RNA
tgcctatagacagcatcccc

SEQ ID NO: 54059 - RNA, 20 nt, synthetic construct
  source 1..20: mol_type = other RNA
tgcctatgaaatcttgaaga

SEQ ID NO: 54060 - RNA, 20 nt, synthetic construct
  source 1..20: mol_type = other RNA
tgcctattctggggctcaag

SEQ ID NO: 54061 - RNA, 20 nt, synthetic construct
  source 1..20: mol_type = other RNA
tgcctcaaaatcaacattgc

SEQ ID NO: 54062 - RNA, 20 nt, synthetic construct
  source 1..20: mol_type = other RNA
tgcctcaaattagtcatagc

SEQ ID NO: 54063 - RNA, 20 nt, synthetic construct
  source 1..20: mol_type = other RNA
tgcctcagccgccgcagagg

SEQ ID NO: 54064 - RNA, 20 nt, synthetic construct
  source 1..20: mol_type = other RNA
tgcctcagttgacatccttt

SEQ ID NO: 54065 - RNA, 20 nt, synthetic construct
  source 1..20: mol_type = other RNA
tgcctcatgcatccacattt

SEQ ID NO: 54066 - RNA, 20 nt, synthetic construct
  source 1..20: mol_type = other RNA
tgcctccacaggctttgact

SEQ ID NO: 54067 - RNA, 20 nt, synthetic construct
  source 1..20: mol_type = other RNA
tgcctccatatgggatgctt

SEQ ID NO: 54068 - RNA, 20 nt, synthetic construct
  source 1..20: mol_type = other RNA
tgcctcccgggtccaggcag

SEQ ID NO: 54069 - RNA, 20 nt, synthetic construct
  source 1..20: mol_type = other RNA
tgcctcctgggttcaggtgc

SEQ ID NO: 54070 - RNA, 20 nt, synthetic construct
  source 1..20: mol_type = other RNA
tgcctcgaaggcctgcttca

SEQ ID NO: 54071 - RNA, 20 nt, synthetic construct
  source 1..20: mol_type = other RNA
tgcctcggcacagctctcat

SEQ ID NO: 54072 - RNA, 20 nt, synthetic construct
  source 1..20: mol_type = other RNA
tgcctctacatcacagacag

SEQ ID NO: 54073 - RNA, 20 nt, synthetic construct
  source 1..20: mol_type = other RNA
tgcctctccagggaggaatc

SEQ ID NO: 54074 - RNA, 20 nt, synthetic construct
  source 1..20: mol_type = other RNA
tgcctctcccaccatctctc

SEQ ID NO: 54075 - RNA, 20 nt, synthetic construct
  source 1..20: mol_type = other RNA
tgcctctgtgctagccttct

SEQ ID NO: 54076 - RNA, 20 nt, synthetic construct
  source 1..20: mol_type = other RNA
tgcctctgttacagctcttc

SEQ ID NO: 54077 - RNA, 20 nt, synthetic construct
  source 1..20: mol_type = other RNA
tgcctcttcctgttgcttta

SEQ ID NO: 54078 - RNA, 20 nt, synthetic construct
  source 1..20: mol_type = other RNA
tgcctctttgctaataagtg

SEQ ID NO: 54079 - RNA, 20 nt, synthetic construct
  source 1..20: mol_type = other RNA
tgcctgacaaagtatgagaa

SEQ ID NO: 54080 - RNA, 20 nt, synthetic construct
  source 1..20: mol_type = other RNA
tgcctgacagcaaataaaca

SEQ ID NO: 54081 - RNA, 20 nt, synthetic construct
  source 1..20: mol_type = other RNA
tgcctgaggtctcaaaattt

SEQ ID NO: 54082 - RNA, 20 nt, synthetic construct
  source 1..20: mol_type = other RNA
tgcctgcagactgcaggtct

SEQ ID NO: 54083 - RNA, 20 nt, synthetic construct
  source 1..20: mol_type = other RNA
tgcctgccatagagggagca

SEQ ID NO: 54084 - RNA, 20 nt, synthetic construct
  source 1..20: mol_type = other RNA
tgcctgccgcagagcaagca

SEQ ID NO: 54085 - RNA, 20 nt, synthetic construct
  source 1..20: mol_type = other RNA
tgcctgcgtccgtagaccga

SEQ ID NO: 54086 - RNA, 20 nt, synthetic construct
  source 1..20: mol_type = other RNA
tgcctggacccgggaggcag

SEQ ID NO: 54087 - RNA, 20 nt, synthetic construct
  source 1..20: mol_type = other RNA
tgcctggatgaatgcagtgg

SEQ ID NO: 54088 - RNA, 20 nt, synthetic construct
  source 1..20: mol_type = other RNA
tgcctgggtaattaaacatt

SEQ ID NO: 54089 - RNA, 20 nt, synthetic construct
  source 1..20: mol_type = other RNA
tgcctggtcctgagggcttt

SEQ ID NO: 54090 - RNA, 20 nt, synthetic construct
  source 1..20: mol_type = other RNA
tgcctgtagttttggtgtca

SEQ ID NO: 54091 - RNA, 20 nt, synthetic construct
  source 1..20: mol_type = other RNA
tgcctgtgcttgtctctctc

SEQ ID NO: 54092 - RNA, 20 nt, synthetic construct
  source 1..20: mol_type = other RNA
tgcctgtgcttttctcgtgc

SEQ ID NO: 54093 - RNA, 20 nt, synthetic construct
  source 1..20: mol_type = other RNA
tgccttcaagttgctttttc

SEQ ID NO: 54094 - RNA, 20 nt, synthetic construct
  source 1..20: mol_type = other RNA
tgccttcaatgtttggtaga

SEQ ID NO: 54095 - RNA, 20 nt, synthetic construct
  source 1..20: mol_type = other RNA
tgccttcagaaggagtccag

SEQ ID NO: 54096 - RNA, 20 nt, synthetic construct
  source 1..20: mol_type = other RNA
tgccttcagctatggtgtta

SEQ ID NO: 54097 - RNA, 20 nt, synthetic construct
  source 1..20: mol_type = other RNA
tgccttcagtatgaatgcac

SEQ ID NO: 54098 - RNA, 20 nt, synthetic construct
  source 1..20: mol_type = other RNA
tgccttcctgacctctgcag

SEQ ID NO: 54099 - RNA, 20 nt, synthetic construct
  source 1..20: mol_type = other RNA
tgccttccttgggcacactc

SEQ ID NO: 54100 - RNA, 20 nt, synthetic construct
  source 1..20: mol_type = other RNA
tgccttcgcagggtgaaact

SEQ ID NO: 54101 - RNA, 20 nt, synthetic construct
  source 1..20: mol_type = other RNA
tgccttgacctcccaaagga

SEQ ID NO: 54102 - RNA, 20 nt, synthetic construct
  source 1..20: mol_type = other RNA
tgccttgaggtgattcagag

SEQ ID NO: 54103 - RNA, 20 nt, synthetic construct
  source 1..20: mol_type = other RNA
tgccttgatccattacatca

SEQ ID NO: 54104 - RNA, 20 nt, synthetic construct
  source 1..20: mol_type = other RNA
tgccttggccttctgaggag

SEQ ID NO: 54105 - RNA, 20 nt, synthetic construct
  source 1..20: mol_type = other RNA
tgcctttcactttgatcata

SEQ ID NO: 54106 - RNA, 20 nt, synthetic construct
  source 1..20: mol_type = other RNA
tgcctttcagcatagcagaa

SEQ ID NO: 54107 - RNA, 20 nt, synthetic construct
  source 1..20: mol_type = other RNA
tgcctttcgcttttggagct

SEQ ID NO: 54108 - RNA, 20 nt, synthetic construct
  source 1..20: mol_type = other RNA
tgcctttgttcatcatcttt

SEQ ID NO: 54109 - RNA, 20 nt, synthetic construct
  source 1..20: mol_type = other RNA
tgccttttcactcttagtga

SEQ ID NO: 54110 - RNA, 20 nt, synthetic construct
  source 1..20: mol_type = other RNA
tgcgaaacacactcgtgtat

SEQ ID NO: 54111 - RNA, 20 nt, synthetic construct
  source 1..20: mol_type = other RNA
tgcgaaatagtagttgctca

SEQ ID NO: 54112 - RNA, 20 nt, synthetic construct
  source 1..20: mol_type = other RNA
tgcgaaggcaatgtaacaca

SEQ ID NO: 54113 - RNA, 20 nt, synthetic construct
  source 1..20: mol_type = other RNA
tgcgaatcatctaggcatat

SEQ ID NO: 54114 - RNA, 20 nt, synthetic construct
  source 1..20: mol_type = other RNA
tgcgaatttacttttaaact

SEQ ID NO: 54115 - RNA, 20 nt, synthetic construct
  source 1..20: mol_type = other RNA
tgcgacatatcagggatcac

SEQ ID NO: 54116 - RNA, 20 nt, synthetic construct
  source 1..20: mol_type = other RNA
tgcgacctcgaagcacaacc

SEQ ID NO: 54117 - RNA, 20 nt, synthetic construct
  source 1..20: mol_type = other RNA
tgcgagaaaggcgaagcggc

SEQ ID NO: 54118 - RNA, 20 nt, synthetic construct
  source 1..20: mol_type = other RNA
tgcgagccccgggggagctc

SEQ ID NO: 54119 - RNA, 20 nt, synthetic construct
  source 1..20: mol_type = other RNA
tgcgagcggcgggcttcgcc

SEQ ID NO: 54120 - RNA, 20 nt, synthetic construct
  source 1..20: mol_type = other RNA
tgcgagtgtgaacgatggtt

SEQ ID NO: 54121 - RNA, 20 nt, synthetic construct
  source 1..20: mol_type = other RNA
tgcgatgatcaaaaccagga

SEQ ID NO: 54122 - RNA, 20 nt, synthetic construct
  source 1..20: mol_type = other RNA
tgcgattggttggactccac

SEQ ID NO: 54123 - RNA, 20 nt, synthetic construct
  source 1..20: mol_type = other RNA
tgcgattgtttcagtgtgtc

SEQ ID NO: 54124 - RNA, 20 nt, synthetic construct
  source 1..20: mol_type = other RNA
tgcgcaattgcagccagaga

SEQ ID NO: 54125 - RNA, 20 nt, synthetic construct
  source 1..20: mol_type = other RNA
tgcgcagaactggggcttga

SEQ ID NO: 54126 - RNA, 20 nt, synthetic construct
  source 1..20: mol_type = other RNA
tgcgccaagcagggacgggc

SEQ ID NO: 54127 - RNA, 20 nt, synthetic construct
  source 1..20: mol_type = other RNA
tgcgccatcacacccagtat

SEQ ID NO: 54128 - RNA, 20 nt, synthetic construct
  source 1..20: mol_type = other RNA
tgcgccttaaagccacactc

SEQ ID NO: 54129 - RNA, 20 nt, synthetic construct
  source 1..20: mol_type = other RNA
tgcgcgtcaaaagatgctgg

SEQ ID NO: 54130 - RNA, 20 nt, synthetic construct
  source 1..20: mol_type = other RNA
tgcggcaggcattgtgctca

SEQ ID NO: 54131 - RNA, 20 nt, synthetic construct
  source 1..20: mol_type = other RNA
tgcggcggctgaggcagccc

SEQ ID NO: 54132 - RNA, 20 nt, synthetic construct
  source 1..20: mol_type = other RNA
tgcggcttgattagcttcct

SEQ ID NO: 54133 - RNA, 20 nt, synthetic construct
  source 1..20: mol_type = other RNA
tgcgggattatttggaagag

SEQ ID NO: 54134 - RNA, 20 nt, synthetic construct
  source 1..20: mol_type = other RNA
tgcgggcccagctcttttgt

SEQ ID NO: 54135 - RNA, 20 nt, synthetic construct
  source 1..20: mol_type = other RNA
tgcggggtttcagcacaata

SEQ ID NO: 54136 - RNA, 20 nt, synthetic construct
  source 1..20: mol_type = other RNA
tgcggtcttttagccaacaa

SEQ ID NO: 54137 - RNA, 20 nt, synthetic construct
  source 1..20: mol_type = other RNA
tgcggtgacgtgagatcatg

SEQ ID NO: 54138 - RNA, 20 nt, synthetic construct
  source 1..20: mol_type = other RNA
tgcgtccgtagaccgaggaa

SEQ ID NO: 54139 - RNA, 20 nt, synthetic construct
  source 1..20: mol_type = other RNA
tgcgtctgtgattatcaggg

SEQ ID NO: 54140 - RNA, 20 nt, synthetic construct
  source 1..20: mol_type = other RNA
tgcgtgaatctgttcctggg

SEQ ID NO: 54141 - RNA, 20 nt, synthetic construct
  source 1..20: mol_type = other RNA
tgcgtggttcacacctgtag

SEQ ID NO: 54142 - RNA, 20 nt, synthetic construct
  source 1..20: mol_type = other RNA
tgcgtggtttattcatataa

SEQ ID NO: 54143 - RNA, 20 nt, synthetic construct
  source 1..20: mol_type = other RNA
tgcgtgtgaaaccaagcaag

SEQ ID NO: 54144 - RNA, 20 nt, synthetic construct
  source 1..20: mol_type = other RNA
tgcgtgttattttaatcgaa

SEQ ID NO: 54145 - RNA, 20 nt, synthetic construct
  source 1..20: mol_type = other RNA
tgcgttgaccgctttcgtga

SEQ ID NO: 54146 - RNA, 20 nt, synthetic construct
  source 1..20: mol_type = other RNA
tgcgtttgttagatctggga

SEQ ID NO: 54147 - RNA, 20 nt, synthetic construct
  source 1..20: mol_type = other RNA
tgctaaacagtacagtagta

SEQ ID NO: 54148 - RNA, 20 nt, synthetic construct
  source 1..20: mol_type = other RNA
tgctaaacatgtatactaat

SEQ ID NO: 54149 - RNA, 20 nt, synthetic construct
  source 1..20: mol_type = other RNA
tgctaaactgttccccaagc

SEQ ID NO: 54150 - RNA, 20 nt, synthetic construct
  source 1..20: mol_type = other RNA
tgctaacaccttgaactggg

SEQ ID NO: 54151 - RNA, 20 nt, synthetic construct
  source 1..20: mol_type = other RNA
tgctaacatgaactactcaa

SEQ ID NO: 54152 - RNA, 20 nt, synthetic construct
  source 1..20: mol_type = other RNA
tgctaacgtgcttgctctgc

SEQ ID NO: 54153 - RNA, 20 nt, synthetic construct
  source 1..20: mol_type = other RNA
tgctaactgcagaggtcagg

SEQ ID NO: 54154 - RNA, 20 nt, synthetic construct
  source 1..20: mol_type = other RNA
tgctaagtaaaataaacaag

SEQ ID NO: 54155 - RNA, 20 nt, synthetic construct
  source 1..20: mol_type = other RNA
tgctaagtgtttaggatata

SEQ ID NO: 54156 - RNA, 20 nt, synthetic construct
  source 1..20: mol_type = other RNA
tgctaataaaaacatatgca

SEQ ID NO: 54157 - RNA, 20 nt, synthetic construct
  source 1..20: mol_type = other RNA
tgctaataagtgagtttgac

SEQ ID NO: 54158 - RNA, 20 nt, synthetic construct
  source 1..20: mol_type = other RNA
tgctaataatgatgactatg

SEQ ID NO: 54159 - RNA, 20 nt, synthetic construct
  source 1..20: mol_type = other RNA
tgctaatggtccttgctgaa

SEQ ID NO: 54160 - RNA, 20 nt, synthetic construct
  source 1..20: mol_type = other RNA
tgctaattcattgtacatga

SEQ ID NO: 54161 - RNA, 20 nt, synthetic construct
  source 1..20: mol_type = other RNA
tgctaattgtttgttgggtt

SEQ ID NO: 54162 - RNA, 20 nt, synthetic construct
  source 1..20: mol_type = other RNA
tgctacaggggcattccctg

SEQ ID NO: 54163 - RNA, 20 nt, synthetic construct
  source 1..20: mol_type = other RNA
tgctacctcaaattgtgtgt

SEQ ID NO: 54164 - RNA, 20 nt, synthetic construct
  source 1..20: mol_type = other RNA
tgctacgaatgaactcctat

SEQ ID NO: 54165 - RNA, 20 nt, synthetic construct
  source 1..20: mol_type = other RNA
tgctactagcaagctaataa

SEQ ID NO: 54166 - RNA, 20 nt, synthetic construct
  source 1..20: mol_type = other RNA
tgctactcaaagtttagtta

SEQ ID NO: 54167 - RNA, 20 nt, synthetic construct
  source 1..20: mol_type = other RNA
tgctactcaggagattaagg

SEQ ID NO: 54168 - RNA, 20 nt, synthetic construct
  source 1..20: mol_type = other RNA
tgctacttgtggggctgagg

SEQ ID NO: 54169 - RNA, 20 nt, synthetic construct
  source 1..20: mol_type = other RNA
tgctagagctgctgtaacaa

SEQ ID NO: 54170 - RNA, 20 nt, synthetic construct
  source 1..20: mol_type = other RNA
tgctagatgctaaacagtac

SEQ ID NO: 54171 - RNA, 20 nt, synthetic construct
  source 1..20: mol_type = other RNA
tgctagccttcttggagtaa

SEQ ID NO: 54172 - RNA, 20 nt, synthetic construct
  source 1..20: mol_type = other RNA
tgctaggggctgttcccaga

SEQ ID NO: 54173 - RNA, 20 nt, synthetic construct
  source 1..20: mol_type = other RNA
tgctagtagcagaatcccca

SEQ ID NO: 54174 - RNA, 20 nt, synthetic construct
  source 1..20: mol_type = other RNA
tgctagtattttgttgacat

SEQ ID NO: 54175 - RNA, 20 nt, synthetic construct
  source 1..20: mol_type = other RNA
tgctagtggtaactagatgc

SEQ ID NO: 54176 - RNA, 20 nt, synthetic construct
  source 1..20: mol_type = other RNA
tgctagtgtcctcaggctcc

SEQ ID NO: 54177 - RNA, 20 nt, synthetic construct
  source 1..20: mol_type = other RNA
tgctataaacttccctctca

SEQ ID NO: 54178 - RNA, 20 nt, synthetic construct
  source 1..20: mol_type = other RNA
tgctataaagaacatgattg

SEQ ID NO: 54179 - RNA, 20 nt, synthetic construct
  source 1..20: mol_type = other RNA
tgctatacaaccggaaaatg

SEQ ID NO: 54180 - RNA, 20 nt, synthetic construct
  source 1..20: mol_type = other RNA
tgctatcattttaaagggat

SEQ ID NO: 54181 - RNA, 20 nt, synthetic construct
  source 1..20: mol_type = other RNA
tgctatccagaagagaatgg

SEQ ID NO: 54182 - RNA, 20 nt, synthetic construct
  source 1..20: mol_type = other RNA
tgctatccagtctctgcaac

SEQ ID NO: 54183 - RNA, 20 nt, synthetic construct
  source 1..20: mol_type = other RNA
tgctatgaaaattggcgtac

SEQ ID NO: 54184 - RNA, 20 nt, synthetic construct
  source 1..20: mol_type = other RNA
tgctatgaaatgtggttttt

SEQ ID NO: 54185 - RNA, 20 nt, synthetic construct
  source 1..20: mol_type = other RNA
tgctatgactaatttgaggc

SEQ ID NO: 54186 - RNA, 20 nt, synthetic construct
  source 1..20: mol_type = other RNA
tgctatgcatactttggaag

SEQ ID NO: 54187 - RNA, 20 nt, synthetic construct
  source 1..20: mol_type = other RNA
tgctatgctgaaaggcatga

SEQ ID NO: 54188 - RNA, 20 nt, synthetic construct
  source 1..20: mol_type = other RNA
tgctatgtaatctcatggaa

SEQ ID NO: 54189 - RNA, 20 nt, synthetic construct
  source 1..20: mol_type = other RNA
tgctattataaatggcatct

SEQ ID NO: 54190 - RNA, 20 nt, synthetic construct
  source 1..20: mol_type = other RNA
tgctattcaacaggtataaa

SEQ ID NO: 54191 - RNA, 20 nt, synthetic construct
  source 1..20: mol_type = other RNA
tgctattcaagacaagcaag

SEQ ID NO: 54192 - RNA, 20 nt, synthetic construct
  source 1..20: mol_type = other RNA
tgctattctctttctgaaat

SEQ ID NO: 54193 - RNA, 20 nt, synthetic construct
  source 1..20: mol_type = other RNA
tgctattgataaatctaaag

SEQ ID NO: 54194 - RNA, 20 nt, synthetic construct
  source 1..20: mol_type = other RNA
tgctattgttgaattgttgg

SEQ ID NO: 54195 - RNA, 20 nt, synthetic construct
  source 1..20: mol_type = other RNA
tgctattttattagatagtg

SEQ ID NO: 54196 - RNA, 20 nt, synthetic construct
  source 1..20: mol_type = other RNA
tgctcaaaggggcattccgt

SEQ ID NO: 54197 - RNA, 20 nt, synthetic construct
  source 1..20: mol_type = other RNA
tgctcacacttactaaatga

SEQ ID NO: 54198 - RNA, 20 nt, synthetic construct
  source 1..20: mol_type = other RNA
tgctcacatttagtttcatc

SEQ ID NO: 54199 - RNA, 20 nt, synthetic construct
  source 1..20: mol_type = other RNA
tgctcaccgcaacatctgcc

SEQ ID NO: 54200 - RNA, 20 nt, synthetic construct
  source 1..20: mol_type = other RNA
tgctcactgcaacctttgtc

SEQ ID NO: 54201 - RNA, 20 nt, synthetic construct
  source 1..20: mol_type = other RNA
tgctcactgtctccatgtcc

SEQ ID NO: 54202 - RNA, 20 nt, synthetic construct
  source 1..20: mol_type = other RNA
tgctcactttgggattagct

SEQ ID NO: 54203 - RNA, 20 nt, synthetic construct
  source 1..20: mol_type = other RNA
tgctcagaaaattttctttt

SEQ ID NO: 54204 - RNA, 20 nt, synthetic construct
  source 1..20: mol_type = other RNA
tgctcagaagctttcagact

SEQ ID NO: 54205 - RNA, 20 nt, synthetic construct
  source 1..20: mol_type = other RNA
tgctcaggagtaactgctcc

SEQ ID NO: 54206 - RNA, 20 nt, synthetic construct
  source 1..20: mol_type = other RNA
tgctcagggtgcgacctcga

SEQ ID NO: 54207 - RNA, 20 nt, synthetic construct
  source 1..20: mol_type = other RNA
tgctcagtccctcaccttct

SEQ ID NO: 54208 - RNA, 20 nt, synthetic construct
  source 1..20: mol_type = other RNA
tgctcagtgggttcaattat

SEQ ID NO: 54209 - RNA, 20 nt, synthetic construct
  source 1..20: mol_type = other RNA
tgctcagtggttctgcgtgt

SEQ ID NO: 54210 - RNA, 20 nt, synthetic construct
  source 1..20: mol_type = other RNA
tgctcagtttcaaaagctcc

SEQ ID NO: 54211 - RNA, 20 nt, synthetic construct
  source 1..20: mol_type = other RNA
tgctcataatagtctcacga

SEQ ID NO: 54212 - RNA, 20 nt, synthetic construct
  source 1..20: mol_type = other RNA
tgctcataattaaagagagt

SEQ ID NO: 54213 - RNA, 20 nt, synthetic construct
  source 1..20: mol_type = other RNA
tgctcattcatctgcagtgt

SEQ ID NO: 54214 - RNA, 20 nt, synthetic construct
  source 1..20: mol_type = other RNA
tgctccagagaagttttcca

SEQ ID NO: 54215 - RNA, 20 nt, synthetic construct
  source 1..20: mol_type = other RNA
tgctccagtatgacctcctc

SEQ ID NO: 54216 - RNA, 20 nt, synthetic construct
  source 1..20: mol_type = other RNA
tgctccatagcttcctaaga

SEQ ID NO: 54217 - RNA, 20 nt, synthetic construct
  source 1..20: mol_type = other RNA
tgctcccatttgggactgag

SEQ ID NO: 54218 - RNA, 20 nt, synthetic construct
  source 1..20: mol_type = other RNA
tgctccctaaatacacatgt

SEQ ID NO: 54219 - RNA, 20 nt, synthetic construct
  source 1..20: mol_type = other RNA
tgctccctctatggcaggca

SEQ ID NO: 54220 - RNA, 20 nt, synthetic construct
  source 1..20: mol_type = other RNA
tgctccctctgccgcctggg

SEQ ID NO: 54221 - RNA, 20 nt, synthetic construct
  source 1..20: mol_type = other RNA
tgctcctctgactttatggt

SEQ ID NO: 54222 - RNA, 20 nt, synthetic construct
  source 1..20: mol_type = other RNA
tgctcctgcctttgttcatc

SEQ ID NO: 54223 - RNA, 20 nt, synthetic construct
  source 1..20: mol_type = other RNA
tgctcggctctgtcaccctt

SEQ ID NO: 54224 - RNA, 20 nt, synthetic construct
  source 1..20: mol_type = other RNA
tgctctacaaaccttcttat

SEQ ID NO: 54225 - RNA, 20 nt, synthetic construct
  source 1..20: mol_type = other RNA
tgctctaccctttccaaatt

SEQ ID NO: 54226 - RNA, 20 nt, synthetic construct
  source 1..20: mol_type = other RNA
tgctctcaagtaattgtttt

SEQ ID NO: 54227 - RNA, 20 nt, synthetic construct
  source 1..20: mol_type = other RNA
tgctctcccccgaatccttt

SEQ ID NO: 54228 - RNA, 20 nt, synthetic construct
  source 1..20: mol_type = other RNA
tgctctcttcccccaaaact

SEQ ID NO: 54229 - RNA, 20 nt, synthetic construct
  source 1..20: mol_type = other RNA
tgctctcttgcccaagctgg

SEQ ID NO: 54230 - RNA, 20 nt, synthetic construct
  source 1..20: mol_type = other RNA
tgctctgacgtttaaatgag

SEQ ID NO: 54231 - RNA, 20 nt, synthetic construct
  source 1..20: mol_type = other RNA
tgctctgataggataatgtc

SEQ ID NO: 54232 - RNA, 20 nt, synthetic construct
  source 1..20: mol_type = other RNA
tgctctgcaaatgaggttgc

SEQ ID NO: 54233 - RNA, 20 nt, synthetic construct
  source 1..20: mol_type = other RNA
tgctctgcacgtactagtca

SEQ ID NO: 54234 - RNA, 20 nt, synthetic construct
  source 1..20: mol_type = other RNA
tgctctgcagagactgtgct

SEQ ID NO: 54235 - RNA, 20 nt, synthetic construct
  source 1..20: mol_type = other RNA
tgctctgcggcaggcattgt

SEQ ID NO: 54236 - RNA, 20 nt, synthetic construct
  source 1..20: mol_type = other RNA
tgctctgtatttaatctttt

SEQ ID NO: 54237 - RNA, 20 nt, synthetic construct
  source 1..20: mol_type = other RNA
tgctctgtcacccacgtgga

SEQ ID NO: 54238 - RNA, 20 nt, synthetic construct
  source 1..20: mol_type = other RNA
tgctctgtcctgtcagtgtg

SEQ ID NO: 54239 - RNA, 20 nt, synthetic construct
  source 1..20: mol_type = other RNA
tgctcttaagtatttttgtt

SEQ ID NO: 54240 - RNA, 20 nt, synthetic construct
  source 1..20: mol_type = other RNA
tgctcttctattccagagaa

SEQ ID NO: 54241 - RNA, 20 nt, synthetic construct
  source 1..20: mol_type = other RNA
tgctcttctgatcacagaag

SEQ ID NO: 54242 - RNA, 20 nt, synthetic construct
  source 1..20: mol_type = other RNA
tgctcttggtttcttcaaga

SEQ ID NO: 54243 - RNA, 20 nt, synthetic construct
  source 1..20: mol_type = other RNA
tgctctttatctccacattt

SEQ ID NO: 54244 - RNA, 20 nt, synthetic construct
  source 1..20: mol_type = other RNA
tgctcttttcatcactcact

SEQ ID NO: 54245 - RNA, 20 nt, synthetic construct
  source 1..20: mol_type = other RNA
tgctgaaaaagatactctta

SEQ ID NO: 54246 - RNA, 20 nt, synthetic construct
  source 1..20: mol_type = other RNA
tgctgaaaccccgcatactg

SEQ ID NO: 54247 - RNA, 20 nt, synthetic construct
  source 1..20: mol_type = other RNA
tgctgaaagctagaagacct

SEQ ID NO: 54248 - RNA, 20 nt, synthetic construct
  source 1..20: mol_type = other RNA
tgctgaaaggcatgaaattc

SEQ ID NO: 54249 - RNA, 20 nt, synthetic construct
  source 1..20: mol_type = other RNA
tgctgaacttgtcacaaaat

SEQ ID NO: 54250 - RNA, 20 nt, synthetic construct
  source 1..20: mol_type = other RNA
tgctgaagaataactgtcct

SEQ ID NO: 54251 - RNA, 20 nt, synthetic construct
  source 1..20: mol_type = other RNA
tgctgacagattaaatacca

SEQ ID NO: 54252 - RNA, 20 nt, synthetic construct
  source 1..20: mol_type = other RNA
tgctgactagtacgtgcaga

SEQ ID NO: 54253 - RNA, 20 nt, synthetic construct
  source 1..20: mol_type = other RNA
tgctgacttcctggctctag

SEQ ID NO: 54254 - RNA, 20 nt, synthetic construct
  source 1..20: mol_type = other RNA
tgctgagatggtcagtacta

SEQ ID NO: 54255 - RNA, 20 nt, synthetic construct
  source 1..20: mol_type = other RNA
tgctgagattacagatgtga

SEQ ID NO: 54256 - RNA, 20 nt, synthetic construct
  source 1..20: mol_type = other RNA
tgctgaggccccaggggaca

SEQ ID NO: 54257 - RNA, 20 nt, synthetic construct
  source 1..20: mol_type = other RNA
tgctgagggaatttttctta

SEQ ID NO: 54258 - RNA, 20 nt, synthetic construct
  source 1..20: mol_type = other RNA
tgctgagtcttctactgtga

SEQ ID NO: 54259 - RNA, 20 nt, synthetic construct
  source 1..20: mol_type = other RNA
tgctgagtgaatggggtaat

SEQ ID NO: 54260 - RNA, 20 nt, synthetic construct
  source 1..20: mol_type = other RNA
tgctgataaatggcttttta

SEQ ID NO: 54261 - RNA, 20 nt, synthetic construct
  source 1..20: mol_type = other RNA
tgctgatcaggaaagaccgg

SEQ ID NO: 54262 - RNA, 20 nt, synthetic construct
  source 1..20: mol_type = other RNA
tgctgatgaactacacagac

SEQ ID NO: 54263 - RNA, 20 nt, synthetic construct
  source 1..20: mol_type = other RNA
tgctgatgtaagtgggagga

SEQ ID NO: 54264 - RNA, 20 nt, synthetic construct
  source 1..20: mol_type = other RNA
tgctgatttaaaattttgct

SEQ ID NO: 54265 - RNA, 20 nt, synthetic construct
  source 1..20: mol_type = other RNA
tgctgcaactgagaagagct

SEQ ID NO: 54266 - RNA, 20 nt, synthetic construct
  source 1..20: mol_type = other RNA
tgctgcacgtctgtggtctc

SEQ ID NO: 54267 - RNA, 20 nt, synthetic construct
  source 1..20: mol_type = other RNA
tgctgcactggctattagtt

SEQ ID NO: 54268 - RNA, 20 nt, synthetic construct
  source 1..20: mol_type = other RNA
tgctgcagtatgcatagatc

SEQ ID NO: 54269 - RNA, 20 nt, synthetic construct
  source 1..20: mol_type = other RNA
tgctgcagtttttccactaa

SEQ ID NO: 54270 - RNA, 20 nt, synthetic construct
  source 1..20: mol_type = other RNA
tgctgcatagtactccatta

SEQ ID NO: 54271 - RNA, 20 nt, synthetic construct
  source 1..20: mol_type = other RNA
tgctgcatcccaagggtttt

SEQ ID NO: 54272 - RNA, 20 nt, synthetic construct
  source 1..20: mol_type = other RNA
tgctgccaagtcagcacttc

SEQ ID NO: 54273 - RNA, 20 nt, synthetic construct
  source 1..20: mol_type = other RNA
tgctgccagatgttctaatt

SEQ ID NO: 54274 - RNA, 20 nt, synthetic construct
  source 1..20: mol_type = other RNA
tgctgccccagctaaaatgt

SEQ ID NO: 54275 - RNA, 20 nt, synthetic construct
  source 1..20: mol_type = other RNA
tgctgcgagccccgggggag

SEQ ID NO: 54276 - RNA, 20 nt, synthetic construct
  source 1..20: mol_type = other RNA
tgctgctatgaaaattggcg

SEQ ID NO: 54277 - RNA, 20 nt, synthetic construct
  source 1..20: mol_type = other RNA
tgctgctctgacgtttaaat

SEQ ID NO: 54278 - RNA, 20 nt, synthetic construct
  source 1..20: mol_type = other RNA
tgctgctgaaaaagatactc

SEQ ID NO: 54279 - RNA, 20 nt, synthetic construct
  source 1..20: mol_type = other RNA
tgctgcttctacccactatt

SEQ ID NO: 54280 - RNA, 20 nt, synthetic construct
  source 1..20: mol_type = other RNA
tgctggaaattttcaagggt

SEQ ID NO: 54281 - RNA, 20 nt, synthetic construct
  source 1..20: mol_type = other RNA
tgctggaacgaatattcatt

SEQ ID NO: 54282 - RNA, 20 nt, synthetic construct
  source 1..20: mol_type = other RNA
tgctggaagttggcccaaca

SEQ ID NO: 54283 - RNA, 20 nt, synthetic construct
  source 1..20: mol_type = other RNA
tgctggactggagggatgct

SEQ ID NO: 54284 - RNA, 20 nt, synthetic construct
  source 1..20: mol_type = other RNA
tgctggagtgtggcaggggc

SEQ ID NO: 54285 - RNA, 20 nt, synthetic construct
  source 1..20: mol_type = other RNA
tgctggatcatatagtaatt

SEQ ID NO: 54286 - RNA, 20 nt, synthetic construct
  source 1..20: mol_type = other RNA
tgctggcagccttctctctt

SEQ ID NO: 54287 - RNA, 20 nt, synthetic construct
  source 1..20: mol_type = other RNA
tgctggccagtgagttcaaa

SEQ ID NO: 54288 - RNA, 20 nt, synthetic construct
  source 1..20: mol_type = other RNA
tgctggctcagtctgtttgc

SEQ ID NO: 54289 - RNA, 20 nt, synthetic construct
  source 1..20: mol_type = other RNA
tgctggcttcaatatgcagt

SEQ ID NO: 54290 - RNA, 20 nt, synthetic construct
  source 1..20: mol_type = other RNA
tgctggcttcatgggtggaa

SEQ ID NO: 54291 - RNA, 20 nt, synthetic construct
  source 1..20: mol_type = other RNA
tgctgggagaccaggagttc

SEQ ID NO: 54292 - RNA, 20 nt, synthetic construct
  source 1..20: mol_type = other RNA
tgctgggcccactctcccca

SEQ ID NO: 54293 - RNA, 20 nt, synthetic construct
  source 1..20: mol_type = other RNA
tgctgggctagggaagcagt

SEQ ID NO: 54294 - RNA, 20 nt, synthetic construct
  source 1..20: mol_type = other RNA
tgctgggctattgttttgca

SEQ ID NO: 54295 - RNA, 20 nt, synthetic construct
  source 1..20: mol_type = other RNA
tgctggggacccctccctgc

SEQ ID NO: 54296 - RNA, 20 nt, synthetic construct
  source 1..20: mol_type = other RNA
tgctgggtagagactggatc

SEQ ID NO: 54297 - RNA, 20 nt, synthetic construct
  source 1..20: mol_type = other RNA
tgctggtctggaatgtgtag

SEQ ID NO: 54298 - RNA, 20 nt, synthetic construct
  source 1..20: mol_type = other RNA
tgctggtggagtattctagt

SEQ ID NO: 54299 - RNA, 20 nt, synthetic construct
  source 1..20: mol_type = other RNA
tgctggtgggctttgagaaa

SEQ ID NO: 54300 - RNA, 20 nt, synthetic construct
  source 1..20: mol_type = other RNA
tgctgtaacaaagatgccac

SEQ ID NO: 54301 - RNA, 20 nt, synthetic construct
  source 1..20: mol_type = other RNA
tgctgtaactgacttcaaga

SEQ ID NO: 54302 - RNA, 20 nt, synthetic construct
  source 1..20: mol_type = other RNA
tgctgtaagctggtaataca

SEQ ID NO: 54303 - RNA, 20 nt, synthetic construct
  source 1..20: mol_type = other RNA
tgctgtagtgattcactttt

SEQ ID NO: 54304 - RNA, 20 nt, synthetic construct
  source 1..20: mol_type = other RNA
tgctgtataacattttctct

SEQ ID NO: 54305 - RNA, 20 nt, synthetic construct
  source 1..20: mol_type = other RNA
tgctgtatacccaggtgtga

SEQ ID NO: 54306 - RNA, 20 nt, synthetic construct
  source 1..20: mol_type = other RNA
tgctgtcaggcaagggactg

SEQ ID NO: 54307 - RNA, 20 nt, synthetic construct
  source 1..20: mol_type = other RNA
tgctgtccatttccttaagc

SEQ ID NO: 54308 - RNA, 20 nt, synthetic construct
  source 1..20: mol_type = other RNA
tgctgtcggttttctagtta

SEQ ID NO: 54309 - RNA, 20 nt, synthetic construct
  source 1..20: mol_type = other RNA
tgctgtcgtttatgcattta

SEQ ID NO: 54310 - RNA, 20 nt, synthetic construct
  source 1..20: mol_type = other RNA
tgctgtctataggcaatgag

SEQ ID NO: 54311 - RNA, 20 nt, synthetic construct
  source 1..20: mol_type = other RNA
tgctgtgaatttggatttga

SEQ ID NO: 54312 - RNA, 20 nt, synthetic construct
  source 1..20: mol_type = other RNA
tgctgtgattgcaggtgtgg

SEQ ID NO: 54313 - RNA, 20 nt, synthetic construct
  source 1..20: mol_type = other RNA
tgctgtgccagtgcaaacct

SEQ ID NO: 54314 - RNA, 20 nt, synthetic construct
  source 1..20: mol_type = other RNA
tgctgtggccgagggagacg

SEQ ID NO: 54315 - RNA, 20 nt, synthetic construct
  source 1..20: mol_type = other RNA
tgctgttcccaagcaagtgt

SEQ ID NO: 54316 - RNA, 20 nt, synthetic construct
  source 1..20: mol_type = other RNA
tgctgttctctgtgtggttt

SEQ ID NO: 54317 - RNA, 20 nt, synthetic construct
  source 1..20: mol_type = other RNA
tgctgttgaggctgggccct

SEQ ID NO: 54318 - RNA, 20 nt, synthetic construct
  source 1..20: mol_type = other RNA
tgctgttgatggacgtttga

SEQ ID NO: 54319 - RNA, 20 nt, synthetic construct
  source 1..20: mol_type = other RNA
tgctgttgtaatgttacttc

SEQ ID NO: 54320 - RNA, 20 nt, synthetic construct
  source 1..20: mol_type = other RNA
tgctgttgtattttacacca

SEQ ID NO: 54321 - RNA, 20 nt, synthetic construct
  source 1..20: mol_type = other RNA
tgctgtttacattagagaag

SEQ ID NO: 54322 - RNA, 20 nt, synthetic construct
  source 1..20: mol_type = other RNA
tgctgtttaccaagggtgtg

SEQ ID NO: 54323 - RNA, 20 nt, synthetic construct
  source 1..20: mol_type = other RNA
tgctgttttgcttactgtag

SEQ ID NO: 54324 - RNA, 20 nt, synthetic construct
  source 1..20: mol_type = other RNA
tgctgtttttgaaaagaaca

SEQ ID NO: 54325 - RNA, 20 nt, synthetic construct
  source 1..20: mol_type = other RNA
tgcttaaagcctctcaacac

SEQ ID NO: 54326 - RNA, 20 nt, synthetic construct
  source 1..20: mol_type = other RNA
tgcttaaagcgctactcagc

SEQ ID NO: 54327 - RNA, 20 nt, synthetic construct
  source 1..20: mol_type = other RNA
tgcttaaagttggtcctgca

SEQ ID NO: 54328 - RNA, 20 nt, synthetic construct
  source 1..20: mol_type = other RNA
tgcttaacaagaatcctgct

SEQ ID NO: 54329 - RNA, 20 nt, synthetic construct
  source 1..20: mol_type = other RNA
tgcttaaggaaatggacagc

SEQ ID NO: 54330 - RNA, 20 nt, synthetic construct
  source 1..20: mol_type = other RNA
tgcttaagtcactccatttg

SEQ ID NO: 54331 - RNA, 20 nt, synthetic construct
  source 1..20: mol_type = other RNA
tgcttaatctgatttttagt

SEQ ID NO: 54332 - RNA, 20 nt, synthetic construct
  source 1..20: mol_type = other RNA
tgcttaatcttcacacttag

SEQ ID NO: 54333 - RNA, 20 nt, synthetic construct
  source 1..20: mol_type = other RNA
tgcttaattcaaacaaatca

SEQ ID NO: 54334 - RNA, 20 nt, synthetic construct
  source 1..20: mol_type = other RNA
tgcttaattgagctgtcccc

SEQ ID NO: 54335 - RNA, 20 nt, synthetic construct
  source 1..20: mol_type = other RNA
tgcttacacacacgtttata

SEQ ID NO: 54336 - RNA, 20 nt, synthetic construct
  source 1..20: mol_type = other RNA
tgcttacagactgattaatt

SEQ ID NO: 54337 - RNA, 20 nt, synthetic construct
  source 1..20: mol_type = other RNA
tgcttactctaatggggaaa

SEQ ID NO: 54338 - RNA, 20 nt, synthetic construct
  source 1..20: mol_type = other RNA
tgcttactgtagcattgaag

SEQ ID NO: 54339 - RNA, 20 nt, synthetic construct
  source 1..20: mol_type = other RNA
tgcttagccttccagagaca

SEQ ID NO: 54340 - RNA, 20 nt, synthetic construct
  source 1..20: mol_type = other RNA
tgcttagcgctggaggtcgg

SEQ ID NO: 54341 - RNA, 20 nt, synthetic construct
  source 1..20: mol_type = other RNA
tgcttagctgcctcttcctg

SEQ ID NO: 54342 - RNA, 20 nt, synthetic construct
  source 1..20: mol_type = other RNA
tgcttaggatcccagtcctt

SEQ ID NO: 54343 - RNA, 20 nt, synthetic construct
  source 1..20: mol_type = other RNA
tgcttaggctgaagcaggct

SEQ ID NO: 54344 - RNA, 20 nt, synthetic construct
  source 1..20: mol_type = other RNA
tgcttaggctgttattagag

SEQ ID NO: 54345 - RNA, 20 nt, synthetic construct
  source 1..20: mol_type = other RNA
tgcttaggtaagaaaaattc

SEQ ID NO: 54346 - RNA, 20 nt, synthetic construct
  source 1..20: mol_type = other RNA
tgcttagtcttctcagatct

SEQ ID NO: 54347 - RNA, 20 nt, synthetic construct
  source 1..20: mol_type = other RNA
tgcttataacaagaaaatct

SEQ ID NO: 54348 - RNA, 20 nt, synthetic construct
  source 1..20: mol_type = other RNA
tgcttatgtcttgtggctga

SEQ ID NO: 54349 - RNA, 20 nt, synthetic construct
  source 1..20: mol_type = other RNA
tgcttattatatgcctagat

SEQ ID NO: 54350 - RNA, 20 nt, synthetic construct
  source 1..20: mol_type = other RNA
tgcttcaaagagaacaaaat

SEQ ID NO: 54351 - RNA, 20 nt, synthetic construct
  source 1..20: mol_type = other RNA
tgcttcactaactttaaatt

SEQ ID NO: 54352 - RNA, 20 nt, synthetic construct
  source 1..20: mol_type = other RNA
tgcttcagcctaagcaagtt

SEQ ID NO: 54353 - RNA, 20 nt, synthetic construct
  source 1..20: mol_type = other RNA
tgcttcatattttgtgggaa

SEQ ID NO: 54354 - RNA, 20 nt, synthetic construct
  source 1..20: mol_type = other RNA
tgcttcatctggaccagtta

SEQ ID NO: 54355 - RNA, 20 nt, synthetic construct
  source 1..20: mol_type = other RNA
tgcttcattccgcgtttatt

SEQ ID NO: 54356 - RNA, 20 nt, synthetic construct
  source 1..20: mol_type = other RNA
tgcttccaaaagcaggccct

SEQ ID NO: 54357 - RNA, 20 nt, synthetic construct
  source 1..20: mol_type = other RNA
tgcttccacagctatcaggc

SEQ ID NO: 54358 - RNA, 20 nt, synthetic construct
  source 1..20: mol_type = other RNA
tgcttccacatttctaattt

SEQ ID NO: 54359 - RNA, 20 nt, synthetic construct
  source 1..20: mol_type = other RNA
tgcttcccacttcgaaagtt

SEQ ID NO: 54360 - RNA, 20 nt, synthetic construct
  source 1..20: mol_type = other RNA
tgcttcccccaaagaaggaa

SEQ ID NO: 54361 - RNA, 20 nt, synthetic construct
  source 1..20: mol_type = other RNA
tgcttccctagcccagcact

SEQ ID NO: 54362 - RNA, 20 nt, synthetic construct
  source 1..20: mol_type = other RNA
tgcttcctaaacctgctacg

SEQ ID NO: 54363 - RNA, 20 nt, synthetic construct
  source 1..20: mol_type = other RNA
tgcttccttctcttatacta

SEQ ID NO: 54364 - RNA, 20 nt, synthetic construct
  source 1..20: mol_type = other RNA
tgcttccttgctatgtaatc

SEQ ID NO: 54365 - RNA, 20 nt, synthetic construct
  source 1..20: mol_type = other RNA
tgcttcgaagcttattaaaa

SEQ ID NO: 54366 - RNA, 20 nt, synthetic construct
  source 1..20: mol_type = other RNA
tgcttcgaggtcgcaccctg

SEQ ID NO: 54367 - RNA, 20 nt, synthetic construct
  source 1..20: mol_type = other RNA
tgcttctacccactattgaa

SEQ ID NO: 54368 - RNA, 20 nt, synthetic construct
  source 1..20: mol_type = other RNA
tgcttctagccaaagcaagc

SEQ ID NO: 54369 - RNA, 20 nt, synthetic construct
  source 1..20: mol_type = other RNA
tgcttctagtaacttggtcg

SEQ ID NO: 54370 - RNA, 20 nt, synthetic construct
  source 1..20: mol_type = other RNA
tgcttctcaataaggaaagc

SEQ ID NO: 54371 - RNA, 20 nt, synthetic construct
  source 1..20: mol_type = other RNA
tgcttctgataggaatatcg

SEQ ID NO: 54372 - RNA, 20 nt, synthetic construct
  source 1..20: mol_type = other RNA
tgcttgaactgctggtctgg

SEQ ID NO: 54373 - RNA, 20 nt, synthetic construct
  source 1..20: mol_type = other RNA
tgcttgaagagcgcttctat

SEQ ID NO: 54374 - RNA, 20 nt, synthetic construct
  source 1..20: mol_type = other RNA
tgcttgaatgtgcctacata

SEQ ID NO: 54375 - RNA, 20 nt, synthetic construct
  source 1..20: mol_type = other RNA
tgcttgagagagataaaacc

SEQ ID NO: 54376 - RNA, 20 nt, synthetic construct
  source 1..20: mol_type = other RNA
tgcttgaggccacgagttca

SEQ ID NO: 54377 - RNA, 20 nt, synthetic construct
  source 1..20: mol_type = other RNA
tgcttgagtgcaggagtttg

SEQ ID NO: 54378 - RNA, 20 nt, synthetic construct
  source 1..20: mol_type = other RNA
tgcttgcagacaataattct

SEQ ID NO: 54379 - RNA, 20 nt, synthetic construct
  source 1..20: mol_type = other RNA
tgcttgcagccttccctgaa

SEQ ID NO: 54380 - RNA, 20 nt, synthetic construct
  source 1..20: mol_type = other RNA
tgcttgctccagagaagttt

SEQ ID NO: 54381 - RNA, 20 nt, synthetic construct
  source 1..20: mol_type = other RNA
tgcttgctctacaaaccttc

SEQ ID NO: 54382 - RNA, 20 nt, synthetic construct
  source 1..20: mol_type = other RNA
tgcttgctctgcggcaggca

SEQ ID NO: 54383 - RNA, 20 nt, synthetic construct
  source 1..20: mol_type = other RNA
tgcttgctgcactggctatt

SEQ ID NO: 54384 - RNA, 20 nt, synthetic construct
  source 1..20: mol_type = other RNA
tgcttggagtcacttgacaa

SEQ ID NO: 54385 - RNA, 20 nt, synthetic construct
  source 1..20: mol_type = other RNA
tgcttggatattctacagaa

SEQ ID NO: 54386 - RNA, 20 nt, synthetic construct
  source 1..20: mol_type = other RNA
tgcttggcacagaattattg

SEQ ID NO: 54387 - RNA, 20 nt, synthetic construct
  source 1..20: mol_type = other RNA
tgcttggcgcagtgcttagc

SEQ ID NO: 54388 - RNA, 20 nt, synthetic construct
  source 1..20: mol_type = other RNA
tgcttgggaacagcagggga

SEQ ID NO: 54389 - RNA, 20 nt, synthetic construct
  source 1..20: mol_type = other RNA
tgcttgggctcccttccagc

SEQ ID NO: 54390 - RNA, 20 nt, synthetic construct
  source 1..20: mol_type = other RNA
tgcttggtgttgactgaatt

SEQ ID NO: 54391 - RNA, 20 nt, synthetic construct
  source 1..20: mol_type = other RNA
tgcttggtttcacacgcatt

SEQ ID NO: 54392 - RNA, 20 nt, synthetic construct
  source 1..20: mol_type = other RNA
tgcttgtctctctctttctc

SEQ ID NO: 54393 - RNA, 20 nt, synthetic construct
  source 1..20: mol_type = other RNA
tgcttgtcttgaatagcatc

SEQ ID NO: 54394 - RNA, 20 nt, synthetic construct
  source 1..20: mol_type = other RNA
tgcttgtgcttttaatactt

SEQ ID NO: 54395 - RNA, 20 nt, synthetic construct
  source 1..20: mol_type = other RNA
tgctttaaaacactggcaaa

SEQ ID NO: 54396 - RNA, 20 nt, synthetic construct
  source 1..20: mol_type = other RNA
tgctttaacctctggtattt

SEQ ID NO: 54397 - RNA, 20 nt, synthetic construct
  source 1..20: mol_type = other RNA
tgctttactactgcattttt

SEQ ID NO: 54398 - RNA, 20 nt, synthetic construct
  source 1..20: mol_type = other RNA
tgctttattacttcagtttt

SEQ ID NO: 54399 - RNA, 20 nt, synthetic construct
  source 1..20: mol_type = other RNA
tgctttcagttctttcggat

SEQ ID NO: 54400 - RNA, 20 nt, synthetic construct
  source 1..20: mol_type = other RNA
tgctttcctcatgtccatag

SEQ ID NO: 54401 - RNA, 20 nt, synthetic construct
  source 1..20: mol_type = other RNA
tgctttccttattgagaagc

SEQ ID NO: 54402 - RNA, 20 nt, synthetic construct
  source 1..20: mol_type = other RNA
tgctttctactagtataaga

SEQ ID NO: 54403 - RNA, 20 nt, synthetic construct
  source 1..20: mol_type = other RNA
tgctttctatctctcagatc

SEQ ID NO: 54404 - RNA, 20 nt, synthetic construct
  source 1..20: mol_type = other RNA
tgctttctcaacactgtgtt

SEQ ID NO: 54405 - RNA, 20 nt, synthetic construct
  source 1..20: mol_type = other RNA
tgctttctctagttgcacgg

SEQ ID NO: 54406 - RNA, 20 nt, synthetic construct
  source 1..20: mol_type = other RNA
tgctttcttggggctctaat

SEQ ID NO: 54407 - RNA, 20 nt, synthetic construct
  source 1..20: mol_type = other RNA
tgctttgaatttggaaaggg

SEQ ID NO: 54408 - RNA, 20 nt, synthetic construct
  source 1..20: mol_type = other RNA
tgctttgagctacaaactcc

SEQ ID NO: 54409 - RNA, 20 nt, synthetic construct
  source 1..20: mol_type = other RNA
tgctttgcgaaatagtagtt

SEQ ID NO: 54410 - RNA, 20 nt, synthetic construct
  source 1..20: mol_type = other RNA
tgctttgctgccccagctaa

SEQ ID NO: 54411 - RNA, 20 nt, synthetic construct
  source 1..20: mol_type = other RNA
tgctttggagtcacagtgaa

SEQ ID NO: 54412 - RNA, 20 nt, synthetic construct
  source 1..20: mol_type = other RNA
tgctttggagtgagaggact

SEQ ID NO: 54413 - RNA, 20 nt, synthetic construct
  source 1..20: mol_type = other RNA
tgctttggctagaagcatct

SEQ ID NO: 54414 - RNA, 20 nt, synthetic construct
  source 1..20: mol_type = other RNA
tgctttgggtctatagttta

SEQ ID NO: 54415 - RNA, 20 nt, synthetic construct
  source 1..20: mol_type = other RNA
tgctttgtctctggaaggct

SEQ ID NO: 54416 - RNA, 20 nt, synthetic construct
  source 1..20: mol_type = other RNA
tgcttttaatactttcacac

SEQ ID NO: 54417 - RNA, 20 nt, synthetic construct
  source 1..20: mol_type = other RNA
tgcttttacttggctcctcc

SEQ ID NO: 54418 - RNA, 20 nt, synthetic construct
  source 1..20: mol_type = other RNA
tgcttttcctggaaaacttc

SEQ ID NO: 54419 - RNA, 20 nt, synthetic construct
  source 1..20: mol_type = other RNA
tgcttttctcgtgcatgtct

SEQ ID NO: 54420 - RNA, 20 nt, synthetic construct
  source 1..20: mol_type = other RNA
tgcttttgctgagggaattt

SEQ ID NO: 54421 - RNA, 20 nt, synthetic construct
  source 1..20: mol_type = other RNA
tgcttttgctgcatcccaag

SEQ ID NO: 54422 - RNA, 20 nt, synthetic construct
  source 1..20: mol_type = other RNA
tgcttttgctttgggtctat

SEQ ID NO: 54423 - RNA, 20 nt, synthetic construct
  source 1..20: mol_type = other RNA
tgcttttggaagcatgtggc

SEQ ID NO: 54424 - RNA, 20 nt, synthetic construct
  source 1..20: mol_type = other RNA
tgctttttactttgcgaaac

SEQ ID NO: 54425 - RNA, 20 nt, synthetic construct
  source 1..20: mol_type = other RNA
tgctttttctgcatcttttg

SEQ ID NO: 54426 - RNA, 20 nt, synthetic construct
  source 1..20: mol_type = other RNA
tgctttttcttcttgttttg

SEQ ID NO: 54427 - RNA, 20 nt, synthetic construct
  source 1..20: mol_type = other RNA
tgctttttcttggtggtaac

SEQ ID NO: 54428 - RNA, 20 nt, synthetic construct
  source 1..20: mol_type = other RNA
tgctttttgtatcctgtttg

SEQ ID NO: 54429 - RNA, 20 nt, synthetic construct
  source 1..20: mol_type = other RNA
tgcttttttggtgtttttct

SEQ ID NO: 54430 - RNA, 20 nt, synthetic construct
  source 1..20: mol_type = other RNA
tggaaaaactgcagcaatta

SEQ ID NO: 54431 - RNA, 20 nt, synthetic construct
  source 1..20: mol_type = other RNA
tggaaaaagaccataatata

SEQ ID NO: 54432 - RNA, 20 nt, synthetic construct
  source 1..20: mol_type = other RNA
tggaaaaatataggaacata

SEQ ID NO: 54433 - RNA, 20 nt, synthetic construct
  source 1..20: mol_type = other RNA
tggaaaaatcgtcctcttcg

SEQ ID NO: 54434 - RNA, 20 nt, synthetic construct
  source 1..20: mol_type = other RNA
tggaaaaatgtccgttgaag

SEQ ID NO: 54435 - RNA, 20 nt, synthetic construct
  source 1..20: mol_type = other RNA
tggaaaacaaattgcatcaa

SEQ ID NO: 54436 - RNA, 20 nt, synthetic construct
  source 1..20: mol_type = other RNA
tggaaaactagagatgggaa

SEQ ID NO: 54437 - RNA, 20 nt, synthetic construct
  source 1..20: mol_type = other RNA
tggaaaactaggtatttgaa

SEQ ID NO: 54438 - RNA, 20 nt, synthetic construct
  source 1..20: mol_type = other RNA
tggaaaactctgtttcctta

SEQ ID NO: 54439 - RNA, 20 nt, synthetic construct
  source 1..20: mol_type = other RNA
tggaaaacttctctggagca

SEQ ID NO: 54440 - RNA, 20 nt, synthetic construct
  source 1..20: mol_type = other RNA
tggaaaacttttaactgaaa

SEQ ID NO: 54441 - RNA, 20 nt, synthetic construct
  source 1..20: mol_type = other RNA
tggaaaagaaagctgtggat

SEQ ID NO: 54442 - RNA, 20 nt, synthetic construct
  source 1..20: mol_type = other RNA
tggaaaagtgttgactacca

SEQ ID NO: 54443 - RNA, 20 nt, synthetic construct
  source 1..20: mol_type = other RNA
tggaaaatgtaaaacatcaa

SEQ ID NO: 54444 - RNA, 20 nt, synthetic construct
  source 1..20: mol_type = other RNA
tggaaaatgtatgattttct

SEQ ID NO: 54445 - RNA, 20 nt, synthetic construct
  source 1..20: mol_type = other RNA
tggaaaattcaaacatgaca

SEQ ID NO: 54446 - RNA, 20 nt, synthetic construct
  source 1..20: mol_type = other RNA
tggaaaattcttggtctttt

SEQ ID NO: 54447 - RNA, 20 nt, synthetic construct
  source 1..20: mol_type = other RNA
tggaaacaacctaaatgtcc

SEQ ID NO: 54448 - RNA, 20 nt, synthetic construct
  source 1..20: mol_type = other RNA
tggaaacatggtaatttgtc

SEQ ID NO: 54449 - RNA, 20 nt, synthetic construct
  source 1..20: mol_type = other RNA
tggaaaccttttgtagaccc

SEQ ID NO: 54450 - RNA, 20 nt, synthetic construct
  source 1..20: mol_type = other RNA
tggaaactacaattactgta

SEQ ID NO: 54451 - RNA, 20 nt, synthetic construct
  source 1..20: mol_type = other RNA
tggaaactcaaacccaaatt

SEQ ID NO: 54452 - RNA, 20 nt, synthetic construct
  source 1..20: mol_type = other RNA
tggaaacttgccatcttgca

SEQ ID NO: 54453 - RNA, 20 nt, synthetic construct
  source 1..20: mol_type = other RNA
tggaaagaaatagaactgtc

SEQ ID NO: 54454 - RNA, 20 nt, synthetic construct
  source 1..20: mol_type = other RNA
tggaaagagccagcctgatg

SEQ ID NO: 54455 - RNA, 20 nt, synthetic construct
  source 1..20: mol_type = other RNA
tggaaaggacttgatctaaa

SEQ ID NO: 54456 - RNA, 20 nt, synthetic construct
  source 1..20: mol_type = other RNA
tggaaagggtagagcacttt

SEQ ID NO: 54457 - RNA, 20 nt, synthetic construct
  source 1..20: mol_type = other RNA
tggaaagtggactatgtagg

SEQ ID NO: 54458 - RNA, 20 nt, synthetic construct
  source 1..20: mol_type = other RNA
tggaaagttcaaatgaggct

SEQ ID NO: 54459 - RNA, 20 nt, synthetic construct
  source 1..20: mol_type = other RNA
tggaaataagtttcatggac

SEQ ID NO: 54460 - RNA, 20 nt, synthetic construct
  source 1..20: mol_type = other RNA
tggaaataatttccctcaga

SEQ ID NO: 54461 - RNA, 20 nt, synthetic construct
  source 1..20: mol_type = other RNA
tggaaatacttgaacattct

SEQ ID NO: 54462 - RNA, 20 nt, synthetic construct
  source 1..20: mol_type = other RNA
tggaaatatggtcactgctg

SEQ ID NO: 54463 - RNA, 20 nt, synthetic construct
  source 1..20: mol_type = other RNA
tggaaatcacaggtttaggt

SEQ ID NO: 54464 - RNA, 20 nt, synthetic construct
  source 1..20: mol_type = other RNA
tggaaatgaagtattgattt

SEQ ID NO: 54465 - RNA, 20 nt, synthetic construct
  source 1..20: mol_type = other RNA
tggaaatgatacctcattta

SEQ ID NO: 54466 - RNA, 20 nt, synthetic construct
  source 1..20: mol_type = other RNA
tggaaatggacagcggggat

SEQ ID NO: 54467 - RNA, 20 nt, synthetic construct
  source 1..20: mol_type = other RNA
tggaaatgtaaattcctaac

SEQ ID NO: 54468 - RNA, 20 nt, synthetic construct
  source 1..20: mol_type = other RNA
tggaaattaaacacaccctt

SEQ ID NO: 54469 - RNA, 20 nt, synthetic construct
  source 1..20: mol_type = other RNA
tggaaattagaaatgtggaa

SEQ ID NO: 54470 - RNA, 20 nt, synthetic construct
  source 1..20: mol_type = other RNA
tggaaattttcaagggtgtt

SEQ ID NO: 54471 - RNA, 20 nt, synthetic construct
  source 1..20: mol_type = other RNA
tggaacaatcaaaccatcct

SEQ ID NO: 54472 - RNA, 20 nt, synthetic construct
  source 1..20: mol_type = other RNA
tggaacacacattagcctag

SEQ ID NO: 54473 - RNA, 20 nt, synthetic construct
  source 1..20: mol_type = other RNA
tggaacaggccctttgttag

SEQ ID NO: 54474 - RNA, 20 nt, synthetic construct
  source 1..20: mol_type = other RNA
tggaacataatctttggtgc

SEQ ID NO: 54475 - RNA, 20 nt, synthetic construct
  source 1..20: mol_type = other RNA
tggaaccactgtaggccccg

SEQ ID NO: 54476 - RNA, 20 nt, synthetic construct
  source 1..20: mol_type = other RNA
tggaacctttgtccactgtc

SEQ ID NO: 54477 - RNA, 20 nt, synthetic construct
  source 1..20: mol_type = other RNA
tggaacgaatattcatttat

SEQ ID NO: 54478 - RNA, 20 nt, synthetic construct
  source 1..20: mol_type = other RNA
tggaacggcttaacaccttt

SEQ ID NO: 54479 - RNA, 20 nt, synthetic construct
  source 1..20: mol_type = other RNA
tggaactaagaaaaatgttt

SEQ ID NO: 54480 - RNA, 20 nt, synthetic construct
  source 1..20: mol_type = other RNA
tggaactcatttctgcttga

SEQ ID NO: 54481 - RNA, 20 nt, synthetic construct
  source 1..20: mol_type = other RNA
tggaactctattttcctaaa

SEQ ID NO: 54482 - RNA, 20 nt, synthetic construct
  source 1..20: mol_type = other RNA
tggaactctgtcatggtgtg

SEQ ID NO: 54483 - RNA, 20 nt, synthetic construct
  source 1..20: mol_type = other RNA
tggaactcttgcggtctttt

SEQ ID NO: 54484 - RNA, 20 nt, synthetic construct
  source 1..20: mol_type = other RNA
tggaagaatcaggtctcttt

SEQ ID NO: 54485 - RNA, 20 nt, synthetic construct
  source 1..20: mol_type = other RNA
tggaagaattttaagcctag

SEQ ID NO: 54486 - RNA, 20 nt, synthetic construct
  source 1..20: mol_type = other RNA
tggaagactatcacgattct

SEQ ID NO: 54487 - RNA, 20 nt, synthetic construct
  source 1..20: mol_type = other RNA
tggaagactatgagaaggat

SEQ ID NO: 54488 - RNA, 20 nt, synthetic construct
  source 1..20: mol_type = other RNA
tggaagactttatggtaatt

SEQ ID NO: 54489 - RNA, 20 nt, synthetic construct
  source 1..20: mol_type = other RNA
tggaagagagaaggctgcca

SEQ ID NO: 54490 - RNA, 20 nt, synthetic construct
  source 1..20: mol_type = other RNA
tggaagatgggacttcacta

SEQ ID NO: 54491 - RNA, 20 nt, synthetic construct
  source 1..20: mol_type = other RNA
tggaagatttctactggggt

SEQ ID NO: 54492 - RNA, 20 nt, synthetic construct
  source 1..20: mol_type = other RNA
tggaagcacagtctctgcag

SEQ ID NO: 54493 - RNA, 20 nt, synthetic construct
  source 1..20: mol_type = other RNA
tggaagcagaactaagaccc

SEQ ID NO: 54494 - RNA, 20 nt, synthetic construct
  source 1..20: mol_type = other RNA
tggaagcatgtggccaggag

SEQ ID NO: 54495 - RNA, 20 nt, synthetic construct
  source 1..20: mol_type = other RNA
tggaagctgtccttctcgtg

SEQ ID NO: 54496 - RNA, 20 nt, synthetic construct
  source 1..20: mol_type = other RNA
tggaaggaaacactataaat

SEQ ID NO: 54497 - RNA, 20 nt, synthetic construct
  source 1..20: mol_type = other RNA
tggaaggaaataagaaggtt

SEQ ID NO: 54498 - RNA, 20 nt, synthetic construct
  source 1..20: mol_type = other RNA
tggaaggactcacagcttac

SEQ ID NO: 54499 - RNA, 20 nt, synthetic construct
  source 1..20: mol_type = other RNA
tggaaggcctgatagctgtg

SEQ ID NO: 54500 - RNA, 20 nt, synthetic construct
  source 1..20: mol_type = other RNA
tggaaggccttctcctccaa

SEQ ID NO: 54501 - RNA, 20 nt, synthetic construct
  source 1..20: mol_type = other RNA
tggaaggctaagcatgtaac

SEQ ID NO: 54502 - RNA, 20 nt, synthetic construct
  source 1..20: mol_type = other RNA
tggaagggagcccaagcaca

SEQ ID NO: 54503 - RNA, 20 nt, synthetic construct
  source 1..20: mol_type = other RNA
tggaaggtaggagggtgtga

SEQ ID NO: 54504 - RNA, 20 nt, synthetic construct
  source 1..20: mol_type = other RNA
tggaagtaaggattttctat

SEQ ID NO: 54505 - RNA, 20 nt, synthetic construct
  source 1..20: mol_type = other RNA
tggaagtaattgggatctga

SEQ ID NO: 54506 - RNA, 20 nt, synthetic construct
  source 1..20: mol_type = other RNA
tggaagtgaagtcaagatga

SEQ ID NO: 54507 - RNA, 20 nt, synthetic construct
  source 1..20: mol_type = other RNA
tggaagtgctgggctaggga

SEQ ID NO: 54508 - RNA, 20 nt, synthetic construct
  source 1..20: mol_type = other RNA
tggaagtgtaacatacacat

SEQ ID NO: 54509 - RNA, 20 nt, synthetic construct
  source 1..20: mol_type = other RNA
tggaagttatttaatctctc

SEQ ID NO: 54510 - RNA, 20 nt, synthetic construct
  source 1..20: mol_type = other RNA
tggaagttcaaggttataat

SEQ ID NO: 54511 - RNA, 20 nt, synthetic construct
  source 1..20: mol_type = other RNA
tggaagttggcccaacatgc

SEQ ID NO: 54512 - RNA, 20 nt, synthetic construct
  source 1..20: mol_type = other RNA
tggaagtttcctgcacatgc

SEQ ID NO: 54513 - RNA, 20 nt, synthetic construct
  source 1..20: mol_type = other RNA
tggaagtttctggaagtttc

SEQ ID NO: 54514 - RNA, 20 nt, synthetic construct
  source 1..20: mol_type = other RNA
tggaataatggaactaagaa

SEQ ID NO: 54515 - RNA, 20 nt, synthetic construct
  source 1..20: mol_type = other RNA
tggaatagaagagcagtgtg

SEQ ID NO: 54516 - RNA, 20 nt, synthetic construct
  source 1..20: mol_type = other RNA
tggaatagaagggagaaccc

SEQ ID NO: 54517 - RNA, 20 nt, synthetic construct
  source 1..20: mol_type = other RNA
tggaatagtagcttcaatga

SEQ ID NO: 54518 - RNA, 20 nt, synthetic construct
  source 1..20: mol_type = other RNA
tggaatattactcagtctcg

SEQ ID NO: 54519 - RNA, 20 nt, synthetic construct
  source 1..20: mol_type = other RNA
tggaatcaatccagacagct

SEQ ID NO: 54520 - RNA, 20 nt, synthetic construct
  source 1..20: mol_type = other RNA
tggaatcattccgtatatat

SEQ ID NO: 54521 - RNA, 20 nt, synthetic construct
  source 1..20: mol_type = other RNA
tggaatcctctaccaaaaaa

SEQ ID NO: 54522 - RNA, 20 nt, synthetic construct
  source 1..20: mol_type = other RNA
tggaatgagtccagctttct

SEQ ID NO: 54523 - RNA, 20 nt, synthetic construct
  source 1..20: mol_type = other RNA
tggaatgcatcgtttcaata

SEQ ID NO: 54524 - RNA, 20 nt, synthetic construct
  source 1..20: mol_type = other RNA
tggaatgcccatcctctatt

SEQ ID NO: 54525 - RNA, 20 nt, synthetic construct
  source 1..20: mol_type = other RNA
tggaatgggttggaggagaa

SEQ ID NO: 54526 - RNA, 20 nt, synthetic construct
  source 1..20: mol_type = other RNA
tggaatggtcaatttcatcg

SEQ ID NO: 54527 - RNA, 20 nt, synthetic construct
  source 1..20: mol_type = other RNA
tggaatggtgaagaatgtga

SEQ ID NO: 54528 - RNA, 20 nt, synthetic construct
  source 1..20: mol_type = other RNA
tggaatgtgcacctccagtg

SEQ ID NO: 54529 - RNA, 20 nt, synthetic construct
  source 1..20: mol_type = other RNA
tggaatgtgtagttctggtg

SEQ ID NO: 54530 - RNA, 20 nt, synthetic construct
  source 1..20: mol_type = other RNA
tggaattaaaatgttgccaa

SEQ ID NO: 54531 - RNA, 20 nt, synthetic construct
  source 1..20: mol_type = other RNA
tggaattaactccaggggac

SEQ ID NO: 54532 - RNA, 20 nt, synthetic construct
  source 1..20: mol_type = other RNA
tggaattcatcaaagttaaa

SEQ ID NO: 54533 - RNA, 20 nt, synthetic construct
  source 1..20: mol_type = other RNA
tggaattctgacacccgaag

SEQ ID NO: 54534 - RNA, 20 nt, synthetic construct
  source 1..20: mol_type = other RNA
tggaattctgatgcacaagc

SEQ ID NO: 54535 - RNA, 20 nt, synthetic construct
  source 1..20: mol_type = other RNA
tggaattgccatatgtaggg

SEQ ID NO: 54536 - RNA, 20 nt, synthetic construct
  source 1..20: mol_type = other RNA
tggaatttaaggggtaaatg

SEQ ID NO: 54537 - RNA, 20 nt, synthetic construct
  source 1..20: mol_type = other RNA
tggaattttagtaattctcc

SEQ ID NO: 54538 - RNA, 20 nt, synthetic construct
  source 1..20: mol_type = other RNA
tggacaaaaaacgcggcact

SEQ ID NO: 54539 - RNA, 20 nt, synthetic construct
  source 1..20: mol_type = other RNA
tggacaaattaccatgtttc

SEQ ID NO: 54540 - RNA, 20 nt, synthetic construct
  source 1..20: mol_type = other RNA
tggacaacagtgtgagaccg

SEQ ID NO: 54541 - RNA, 20 nt, synthetic construct
  source 1..20: mol_type = other RNA
tggacacacacagtcctgtg

SEQ ID NO: 54542 - RNA, 20 nt, synthetic construct
  source 1..20: mol_type = other RNA
tggacacactgaaacaatcg

SEQ ID NO: 54543 - RNA, 20 nt, synthetic construct
  source 1..20: mol_type = other RNA
tggacactgcagatgaatga

SEQ ID NO: 54544 - RNA, 20 nt, synthetic construct
  source 1..20: mol_type = other RNA
tggacagcacattaaataag

SEQ ID NO: 54545 - RNA, 20 nt, synthetic construct
  source 1..20: mol_type = other RNA
tggacagcggggatggttgc

SEQ ID NO: 54546 - RNA, 20 nt, synthetic construct
  source 1..20: mol_type = other RNA
tggacagctgggagaaagct

SEQ ID NO: 54547 - RNA, 20 nt, synthetic construct
  source 1..20: mol_type = other RNA
tggacaggatcccggaacag

SEQ ID NO: 54548 - RNA, 20 nt, synthetic construct
  source 1..20: mol_type = other RNA
tggacaggggacatgaagga

SEQ ID NO: 54549 - RNA, 20 nt, synthetic construct
  source 1..20: mol_type = other RNA
tggacataagggtctgtttt

SEQ ID NO: 54550 - RNA, 20 nt, synthetic construct
  source 1..20: mol_type = other RNA
tggacatgaggaaagcaggt

SEQ ID NO: 54551 - RNA, 20 nt, synthetic construct
  source 1..20: mol_type = other RNA
tggacattatcctatcagag

SEQ ID NO: 54552 - RNA, 20 nt, synthetic construct
  source 1..20: mol_type = other RNA
tggacattctgcttccttgc

SEQ ID NO: 54553 - RNA, 20 nt, synthetic construct
  source 1..20: mol_type = other RNA
tggaccacaatcttaccccc

SEQ ID NO: 54554 - RNA, 20 nt, synthetic construct
  source 1..20: mol_type = other RNA
tggaccagttactctctctg

SEQ ID NO: 54555 - RNA, 20 nt, synthetic construct
  source 1..20: mol_type = other RNA
tggaccatgttttaggagtc

SEQ ID NO: 54556 - RNA, 20 nt, synthetic construct
  source 1..20: mol_type = other RNA
tggacccatgcccatgtgca

SEQ ID NO: 54557 - RNA, 20 nt, synthetic construct
  source 1..20: mol_type = other RNA
tggacccgggaggcagatgt

SEQ ID NO: 54558 - RNA, 20 nt, synthetic construct
  source 1..20: mol_type = other RNA
tggacccttaccttaaacca

SEQ ID NO: 54559 - RNA, 20 nt, synthetic construct
  source 1..20: mol_type = other RNA
tggacgcggccccggccttc

SEQ ID NO: 54560 - RNA, 20 nt, synthetic construct
  source 1..20: mol_type = other RNA
tggacgggtggtagggaggg

SEQ ID NO: 54561 - RNA, 20 nt, synthetic construct
  source 1..20: mol_type = other RNA
tggacgtttgagttgtttcc

SEQ ID NO: 54562 - RNA, 20 nt, synthetic construct
  source 1..20: mol_type = other RNA
tggactagactgcctgaggt

SEQ ID NO: 54563 - RNA, 20 nt, synthetic construct
  source 1..20: mol_type = other RNA
tggactatgtaggcacattc

SEQ ID NO: 54564 - RNA, 20 nt, synthetic construct
  source 1..20: mol_type = other RNA
tggactcagggtcacttcct

SEQ ID NO: 54565 - RNA, 20 nt, synthetic construct
  source 1..20: mol_type = other RNA
tggactcattccaatccttc

SEQ ID NO: 54566 - RNA, 20 nt, synthetic construct
  source 1..20: mol_type = other RNA
tggactccaccctgcccctt

SEQ ID NO: 54567 - RNA, 20 nt, synthetic construct
  source 1..20: mol_type = other RNA
tggactccttctgaaggcac

SEQ ID NO: 54568 - RNA, 20 nt, synthetic construct
  source 1..20: mol_type = other RNA
tggactgaaaagatacagaa

SEQ ID NO: 54569 - RNA, 20 nt, synthetic construct
  source 1..20: mol_type = other RNA
tggactggagggatgctgga

SEQ ID NO: 54570 - RNA, 20 nt, synthetic construct
  source 1..20: mol_type = other RNA
tggactgtgagggagatatt

SEQ ID NO: 54571 - RNA, 20 nt, synthetic construct
  source 1..20: mol_type = other RNA
tggactgtgatgactgtaag

SEQ ID NO: 54572 - RNA, 20 nt, synthetic construct
  source 1..20: mol_type = other RNA
tggacttcctattttataat

SEQ ID NO: 54573 - RNA, 20 nt, synthetic construct
  source 1..20: mol_type = other RNA
tggactttaggctgttcaat

SEQ ID NO: 54574 - RNA, 20 nt, synthetic construct
  source 1..20: mol_type = other RNA
tggagaaagcccagccgcgg

SEQ ID NO: 54575 - RNA, 20 nt, synthetic construct
  source 1..20: mol_type = other RNA
tggagaacagtaaagtcact

SEQ ID NO: 54576 - RNA, 20 nt, synthetic construct
  source 1..20: mol_type = other RNA
tggagaacttaaaggtttgg

SEQ ID NO: 54577 - RNA, 20 nt, synthetic construct
  source 1..20: mol_type = other RNA
tggagaagagttctgaaggc

SEQ ID NO: 54578 - RNA, 20 nt, synthetic construct
  source 1..20: mol_type = other RNA
tggagaattactaaaattcc

SEQ ID NO: 54579 - RNA, 20 nt, synthetic construct
  source 1..20: mol_type = other RNA
tggagaattctactaaacat

SEQ ID NO: 54580 - RNA, 20 nt, synthetic construct
  source 1..20: mol_type = other RNA
tggagacactagggactggc

SEQ ID NO: 54581 - RNA, 20 nt, synthetic construct
  source 1..20: mol_type = other RNA
tggagacagcctaaaccatt

SEQ ID NO: 54582 - RNA, 20 nt, synthetic construct
  source 1..20: mol_type = other RNA
tggagacagtgagcatgctg

SEQ ID NO: 54583 - RNA, 20 nt, synthetic construct
  source 1..20: mol_type = other RNA
tggagacatctgagacatca

SEQ ID NO: 54584 - RNA, 20 nt, synthetic construct
  source 1..20: mol_type = other RNA
tggagacccatactcagccc

SEQ ID NO: 54585 - RNA, 20 nt, synthetic construct
  source 1..20: mol_type = other RNA
tggagactagtacactgttg

SEQ ID NO: 54586 - RNA, 20 nt, synthetic construct
  source 1..20: mol_type = other RNA
tggagactgataaacttcag

SEQ ID NO: 54587 - RNA, 20 nt, synthetic construct
  source 1..20: mol_type = other RNA
tggagagaaaccttggtgtg

SEQ ID NO: 54588 - RNA, 20 nt, synthetic construct
  source 1..20: mol_type = other RNA
tggagagatggtagtcaaca

SEQ ID NO: 54589 - RNA, 20 nt, synthetic construct
  source 1..20: mol_type = other RNA
tggagaggcaaaggccgctc

SEQ ID NO: 54590 - RNA, 20 nt, synthetic construct
  source 1..20: mol_type = other RNA
tggagataaagagcaggtgg

SEQ ID NO: 54591 - RNA, 20 nt, synthetic construct
  source 1..20: mol_type = other RNA
tggagataaattacccaaag

SEQ ID NO: 54592 - RNA, 20 nt, synthetic construct
  source 1..20: mol_type = other RNA
tggagatggggacttgctct

SEQ ID NO: 54593 - RNA, 20 nt, synthetic construct
  source 1..20: mol_type = other RNA
tggagcaagcatgagtatct

SEQ ID NO: 54594 - RNA, 20 nt, synthetic construct
  source 1..20: mol_type = other RNA
tggagcactgtgagccacta

SEQ ID NO: 54595 - RNA, 20 nt, synthetic construct
  source 1..20: mol_type = other RNA
tggagcctgaggacactagc

SEQ ID NO: 54596 - RNA, 20 nt, synthetic construct
  source 1..20: mol_type = other RNA
tggagcctgctctgcagaga

SEQ ID NO: 54597 - RNA, 20 nt, synthetic construct
  source 1..20: mol_type = other RNA
tggagcggtgtcttattgtt

SEQ ID NO: 54598 - RNA, 20 nt, synthetic construct
  source 1..20: mol_type = other RNA
tggagctataatttatctgg

SEQ ID NO: 54599 - RNA, 20 nt, synthetic construct
  source 1..20: mol_type = other RNA
tggagctcactgcagcctca

SEQ ID NO: 54600 - RNA, 20 nt, synthetic construct
  source 1..20: mol_type = other RNA
tggagctgtatttttgctca

SEQ ID NO: 54601 - RNA, 20 nt, synthetic construct
  source 1..20: mol_type = other RNA
tggaggagaaggccttccac

SEQ ID NO: 54602 - RNA, 20 nt, synthetic construct
  source 1..20: mol_type = other RNA
tggaggagccctgctgtggc

SEQ ID NO: 54603 - RNA, 20 nt, synthetic construct
  source 1..20: mol_type = other RNA
tggaggataatatctggact

SEQ ID NO: 54604 - RNA, 20 nt, synthetic construct
  source 1..20: mol_type = other RNA
tggaggatggcttgagccca

SEQ ID NO: 54605 - RNA, 20 nt, synthetic construct
  source 1..20: mol_type = other RNA
tggaggcaatgttgattttg

SEQ ID NO: 54606 - RNA, 20 nt, synthetic construct
  source 1..20: mol_type = other RNA
tggaggcagtaccattcccc

SEQ ID NO: 54607 - RNA, 20 nt, synthetic construct
  source 1..20: mol_type = other RNA
tggaggctagaagtcccagt

SEQ ID NO: 54608 - RNA, 20 nt, synthetic construct
  source 1..20: mol_type = other RNA
tggagggatgctggagtgtg

SEQ ID NO: 54609 - RNA, 20 nt, synthetic construct
  source 1..20: mol_type = other RNA
tggagggccagaggagggat

SEQ ID NO: 54610 - RNA, 20 nt, synthetic construct
  source 1..20: mol_type = other RNA
tggagggctcccagtgccca

SEQ ID NO: 54611 - RNA, 20 nt, synthetic construct
  source 1..20: mol_type = other RNA
tggaggggcaggaaaggtgg

SEQ ID NO: 54612 - RNA, 20 nt, synthetic construct
  source 1..20: mol_type = other RNA
tggaggggccagttgagaga

SEQ ID NO: 54613 - RNA, 20 nt, synthetic construct
  source 1..20: mol_type = other RNA
tggaggtcgggctgcctcag

SEQ ID NO: 54614 - RNA, 20 nt, synthetic construct
  source 1..20: mol_type = other RNA
tggaggtgcacattccaaga

SEQ ID NO: 54615 - RNA, 20 nt, synthetic construct
  source 1..20: mol_type = other RNA
tggaggtggaactctgtcat

SEQ ID NO: 54616 - RNA, 20 nt, synthetic construct
  source 1..20: mol_type = other RNA
tggagtaaacctgcaatttt

SEQ ID NO: 54617 - RNA, 20 nt, synthetic construct
  source 1..20: mol_type = other RNA
tggagtactatgcagcaacg

SEQ ID NO: 54618 - RNA, 20 nt, synthetic construct
  source 1..20: mol_type = other RNA
tggagtattctagttctagc

SEQ ID NO: 54619 - RNA, 20 nt, synthetic construct
  source 1..20: mol_type = other RNA
tggagtcacagtgaattctg

SEQ ID NO: 54620 - RNA, 20 nt, synthetic construct
  source 1..20: mol_type = other RNA
tggagtcacttgacaaaaat

SEQ ID NO: 54621 - RNA, 20 nt, synthetic construct
  source 1..20: mol_type = other RNA
tggagtccaaccaatcgcag

SEQ ID NO: 54622 - RNA, 20 nt, synthetic construct
  source 1..20: mol_type = other RNA
tggagtcctgtcagtttctg

SEQ ID NO: 54623 - RNA, 20 nt, synthetic construct
  source 1..20: mol_type = other RNA
tggagtgacttaagcaacag

SEQ ID NO: 54624 - RNA, 20 nt, synthetic construct
  source 1..20: mol_type = other RNA
tggagtgagaggactgcctg

SEQ ID NO: 54625 - RNA, 20 nt, synthetic construct
  source 1..20: mol_type = other RNA
tggagtgcaatggtgggatc

SEQ ID NO: 54626 - RNA, 20 nt, synthetic construct
  source 1..20: mol_type = other RNA
tggagtgcgagtgtgaacga

SEQ ID NO: 54627 - RNA, 20 nt, synthetic construct
  source 1..20: mol_type = other RNA
tggagtggaggggcaggaaa

SEQ ID NO: 54628 - RNA, 20 nt, synthetic construct
  source 1..20: mol_type = other RNA
tggagtggagtggcatgatc

SEQ ID NO: 54629 - RNA, 20 nt, synthetic construct
  source 1..20: mol_type = other RNA
tggagtggcatgatctcacg

SEQ ID NO: 54630 - RNA, 20 nt, synthetic construct
  source 1..20: mol_type = other RNA
tggagtggggcacctaaaag

SEQ ID NO: 54631 - RNA, 20 nt, synthetic construct
  source 1..20: mol_type = other RNA
tggagtggtggatagagaga

SEQ ID NO: 54632 - RNA, 20 nt, synthetic construct
  source 1..20: mol_type = other RNA
tggagtgtggcaggggctgc

SEQ ID NO: 54633 - RNA, 20 nt, synthetic construct
  source 1..20: mol_type = other RNA
tggagtgttttcttcatgga

SEQ ID NO: 54634 - RNA, 20 nt, synthetic construct
  source 1..20: mol_type = other RNA
tggagttaattccacaacca

SEQ ID NO: 54635 - RNA, 20 nt, synthetic construct
  source 1..20: mol_type = other RNA
tggagttacgctgccaaaag

SEQ ID NO: 54636 - RNA, 20 nt, synthetic construct
  source 1..20: mol_type = other RNA
tggagttggtgcaaggataa

SEQ ID NO: 54637 - RNA, 20 nt, synthetic construct
  source 1..20: mol_type = other RNA
tggagtttgtagctcaaagc

SEQ ID NO: 54638 - RNA, 20 nt, synthetic construct
  source 1..20: mol_type = other RNA
tggagttttccccctacacc

SEQ ID NO: 54639 - RNA, 20 nt, synthetic construct
  source 1..20: mol_type = other RNA
tggataaggaaaatatgata

SEQ ID NO: 54640 - RNA, 20 nt, synthetic construct
  source 1..20: mol_type = other RNA
tggatacaaggtcaatctga

SEQ ID NO: 54641 - RNA, 20 nt, synthetic construct
  source 1..20: mol_type = other RNA
tggatacggaaatataacat

SEQ ID NO: 54642 - RNA, 20 nt, synthetic construct
  source 1..20: mol_type = other RNA
tggatagaagtgtatcagat

SEQ ID NO: 54643 - RNA, 20 nt, synthetic construct
  source 1..20: mol_type = other RNA
tggatagagagattcaagaa

SEQ ID NO: 54644 - RNA, 20 nt, synthetic construct
  source 1..20: mol_type = other RNA
tggatagcaacttgcagaag

SEQ ID NO: 54645 - RNA, 20 nt, synthetic construct
  source 1..20: mol_type = other RNA
tggatagcattatcccttta

SEQ ID NO: 54646 - RNA, 20 nt, synthetic construct
  source 1..20: mol_type = other RNA
tggatagtgctttttacttt

SEQ ID NO: 54647 - RNA, 20 nt, synthetic construct
  source 1..20: mol_type = other RNA
tggatagtttctcaacttag

SEQ ID NO: 54648 - RNA, 20 nt, synthetic construct
  source 1..20: mol_type = other RNA
tggatatccccatttttctc

SEQ ID NO: 54649 - RNA, 20 nt, synthetic construct
  source 1..20: mol_type = other RNA
tggatatctgaggtcaggag

SEQ ID NO: 54650 - RNA, 20 nt, synthetic construct
  source 1..20: mol_type = other RNA
tggatatctggcctgcacca

SEQ ID NO: 54651 - RNA, 20 nt, synthetic construct
  source 1..20: mol_type = other RNA
tggatattctacagaaaacc

SEQ ID NO: 54652 - RNA, 20 nt, synthetic construct
  source 1..20: mol_type = other RNA
tggatatttgcagtagtatt

SEQ ID NO: 54653 - RNA, 20 nt, synthetic construct
  source 1..20: mol_type = other RNA
tggatatttggccgggcgcg

SEQ ID NO: 54654 - RNA, 20 nt, synthetic construct
  source 1..20: mol_type = other RNA
tggatcaaagacctaagctt

SEQ ID NO: 54655 - RNA, 20 nt, synthetic construct
  source 1..20: mol_type = other RNA
tggatcaaggcacagtctgt

SEQ ID NO: 54656 - RNA, 20 nt, synthetic construct
  source 1..20: mol_type = other RNA
tggatcaagtgggatttatc

SEQ ID NO: 54657 - RNA, 20 nt, synthetic construct
  source 1..20: mol_type = other RNA
tggatcatatagtaattctg

SEQ ID NO: 54658 - RNA, 20 nt, synthetic construct
  source 1..20: mol_type = other RNA
tggatcccccagcccctggt

SEQ ID NO: 54659 - RNA, 20 nt, synthetic construct
  source 1..20: mol_type = other RNA
tggatcctggagggctccca

SEQ ID NO: 54660 - RNA, 20 nt, synthetic construct
  source 1..20: mol_type = other RNA
tggatcctgtctcagagtat

SEQ ID NO: 54661 - RNA, 20 nt, synthetic construct
  source 1..20: mol_type = other RNA
tggatcttatctgctgtcgg

SEQ ID NO: 54662 - RNA, 20 nt, synthetic construct
  source 1..20: mol_type = other RNA
tggatgaaaaagtactggaa

SEQ ID NO: 54663 - RNA, 20 nt, synthetic construct
  source 1..20: mol_type = other RNA
tggatgaacgctaaattaaa

SEQ ID NO: 54664 - RNA, 20 nt, synthetic construct
  source 1..20: mol_type = other RNA
tggatgaatacaaaggtgtt

SEQ ID NO: 54665 - RNA, 20 nt, synthetic construct
  source 1..20: mol_type = other RNA
tggatgaatgcagtggcttc

SEQ ID NO: 54666 - RNA, 20 nt, synthetic construct
  source 1..20: mol_type = other RNA
tggatgactaggctcctgag

SEQ ID NO: 54667 - RNA, 20 nt, synthetic construct
  source 1..20: mol_type = other RNA
tggatgagattaatgtaggt

SEQ ID NO: 54668 - RNA, 20 nt, synthetic construct
  source 1..20: mol_type = other RNA
tggatgcagatttcttttta

SEQ ID NO: 54669 - RNA, 20 nt, synthetic construct
  source 1..20: mol_type = other RNA
tggatgcatgaggcatatta

SEQ ID NO: 54670 - RNA, 20 nt, synthetic construct
  source 1..20: mol_type = other RNA
tggatgctggggacccctcc

SEQ ID NO: 54671 - RNA, 20 nt, synthetic construct
  source 1..20: mol_type = other RNA
tggatgggtgtagggtttgg

SEQ ID NO: 54672 - RNA, 20 nt, synthetic construct
  source 1..20: mol_type = other RNA
tggatgtccttaatgccacc

SEQ ID NO: 54673 - RNA, 20 nt, synthetic construct
  source 1..20: mol_type = other RNA
tggatgtggtgtggcatgtc

SEQ ID NO: 54674 - RNA, 20 nt, synthetic construct
  source 1..20: mol_type = other RNA
tggatgtgtatgatcaaagt

SEQ ID NO: 54675 - RNA, 20 nt, synthetic construct
  source 1..20: mol_type = other RNA
tggatgtgtgcacaacacat

SEQ ID NO: 54676 - RNA, 20 nt, synthetic construct
  source 1..20: mol_type = other RNA
tggatgttaattagatatgt

SEQ ID NO: 54677 - RNA, 20 nt, synthetic construct
  source 1..20: mol_type = other RNA
tggatgttggtgagaaccca

SEQ ID NO: 54678 - RNA, 20 nt, synthetic construct
  source 1..20: mol_type = other RNA
tggatgtttttagagagatg

SEQ ID NO: 54679 - RNA, 20 nt, synthetic construct
  source 1..20: mol_type = other RNA
tggattaaggagatggcaca

SEQ ID NO: 54680 - RNA, 20 nt, synthetic construct
  source 1..20: mol_type = other RNA
tggattaagggcccaccctg

SEQ ID NO: 54681 - RNA, 20 nt, synthetic construct
  source 1..20: mol_type = other RNA
tggattatagtggtaaggag

SEQ ID NO: 54682 - RNA, 20 nt, synthetic construct
  source 1..20: mol_type = other RNA
tggattatatgttctaaagt

SEQ ID NO: 54683 - RNA, 20 nt, synthetic construct
  source 1..20: mol_type = other RNA
tggattcccaggtattttgt

SEQ ID NO: 54684 - RNA, 20 nt, synthetic construct
  source 1..20: mol_type = other RNA
tggattgattccagtttctc

SEQ ID NO: 54685 - RNA, 20 nt, synthetic construct
  source 1..20: mol_type = other RNA
tggattgcgattgtttcagt

SEQ ID NO: 54686 - RNA, 20 nt, synthetic construct
  source 1..20: mol_type = other RNA
tggattgctaaactgttccc

SEQ ID NO: 54687 - RNA, 20 nt, synthetic construct
  source 1..20: mol_type = other RNA
tggattgctagtgtcctcag

SEQ ID NO: 54688 - RNA, 20 nt, synthetic construct
  source 1..20: mol_type = other RNA
tggattgtgtgtcgagaaaa

SEQ ID NO: 54689 - RNA, 20 nt, synthetic construct
  source 1..20: mol_type = other RNA
tggatttatctttctagatt

SEQ ID NO: 54690 - RNA, 20 nt, synthetic construct
  source 1..20: mol_type = other RNA
tggatttgagtaactaaact

SEQ ID NO: 54691 - RNA, 20 nt, synthetic construct
  source 1..20: mol_type = other RNA
tggatttgattgggcattaa

SEQ ID NO: 54692 - RNA, 20 nt, synthetic construct
  source 1..20: mol_type = other RNA
tggatttgggaaggatggcc

SEQ ID NO: 54693 - RNA, 20 nt, synthetic construct
  source 1..20: mol_type = other RNA
tggatttttctgtttctgtg

SEQ ID NO: 54694 - RNA, 20 nt, synthetic construct
  source 1..20: mol_type = other RNA
tggatttttgtgtagaggtg

SEQ ID NO: 54695 - RNA, 20 nt, synthetic construct
  source 1..20: mol_type = other RNA
tggcaaaaaatgcagtagta

SEQ ID NO: 54696 - RNA, 20 nt, synthetic construct
  source 1..20: mol_type = other RNA
tggcaaaaatcatcatatat

SEQ ID NO: 54697 - RNA, 20 nt, synthetic construct
  source 1..20: mol_type = other RNA
tggcaaaatggagacatctg

SEQ ID NO: 54698 - RNA, 20 nt, synthetic construct
  source 1..20: mol_type = other RNA
tggcaaacagactgagccag

SEQ ID NO: 54699 - RNA, 20 nt, synthetic construct
  source 1..20: mol_type = other RNA
tggcaaacttagaatataaa

SEQ ID NO: 54700 - RNA, 20 nt, synthetic construct
  source 1..20: mol_type = other RNA
tggcaaatctttagtgttgc

SEQ ID NO: 54701 - RNA, 20 nt, synthetic construct
  source 1..20: mol_type = other RNA
tggcaaattgtcagattttc

SEQ ID NO: 54702 - RNA, 20 nt, synthetic construct
  source 1..20: mol_type = other RNA
tggcaaatttatgtgaaaag

SEQ ID NO: 54703 - RNA, 20 nt, synthetic construct
  source 1..20: mol_type = other RNA
tggcaacaaaggcgaagccc

SEQ ID NO: 54704 - RNA, 20 nt, synthetic construct
  source 1..20: mol_type = other RNA
tggcaacaatcaacaggtag

SEQ ID NO: 54705 - RNA, 20 nt, synthetic construct
  source 1..20: mol_type = other RNA
tggcaacattttaattccaa

SEQ ID NO: 54706 - RNA, 20 nt, synthetic construct
  source 1..20: mol_type = other RNA
tggcaaggctaacagccaaa

SEQ ID NO: 54707 - RNA, 20 nt, synthetic construct
  source 1..20: mol_type = other RNA
tggcaaggggaatggtactg

SEQ ID NO: 54708 - RNA, 20 nt, synthetic construct
  source 1..20: mol_type = other RNA
tggcaagtttccattctctt

SEQ ID NO: 54709 - RNA, 20 nt, synthetic construct
  source 1..20: mol_type = other RNA
tggcaatactctcagaaatt

SEQ ID NO: 54710 - RNA, 20 nt, synthetic construct
  source 1..20: mol_type = other RNA
tggcaatcaaatggccttct

SEQ ID NO: 54711 - RNA, 20 nt, synthetic construct
  source 1..20: mol_type = other RNA
tggcaattccataaatgttt

SEQ ID NO: 54712 - RNA, 20 nt, synthetic construct
  source 1..20: mol_type = other RNA
tggcaatttctcaaaaattt

SEQ ID NO: 54713 - RNA, 20 nt, synthetic construct
  source 1..20: mol_type = other RNA
tggcacaatcatagctcact

SEQ ID NO: 54714 - RNA, 20 nt, synthetic construct
  source 1..20: mol_type = other RNA
tggcacagaattattgattg

SEQ ID NO: 54715 - RNA, 20 nt, synthetic construct
  source 1..20: mol_type = other RNA
tggcacagcactgttaactg

SEQ ID NO: 54716 - RNA, 20 nt, synthetic construct
  source 1..20: mol_type = other RNA
tggcacagccagtcagtgat

SEQ ID NO: 54717 - RNA, 20 nt, synthetic construct
  source 1..20: mol_type = other RNA
tggcacaggagagcgacagc

SEQ ID NO: 54718 - RNA, 20 nt, synthetic construct
  source 1..20: mol_type = other RNA
tggcacatactgcatattga

SEQ ID NO: 54719 - RNA, 20 nt, synthetic construct
  source 1..20: mol_type = other RNA
tggcactgaagccagtcctt

SEQ ID NO: 54720 - RNA, 20 nt, synthetic construct
  source 1..20: mol_type = other RNA
tggcactttcctgataaggg

SEQ ID NO: 54721 - RNA, 20 nt, synthetic construct
  source 1..20: mol_type = other RNA
tggcagaatttacatttttt

SEQ ID NO: 54722 - RNA, 20 nt, synthetic construct
  source 1..20: mol_type = other RNA
tggcagatcaattgaccaaa

SEQ ID NO: 54723 - RNA, 20 nt, synthetic construct
  source 1..20: mol_type = other RNA
tggcagcaggggctaagtag

SEQ ID NO: 54724 - RNA, 20 nt, synthetic construct
  source 1..20: mol_type = other RNA
tggcagccccgcttcagttg

SEQ ID NO: 54725 - RNA, 20 nt, synthetic construct
  source 1..20: mol_type = other RNA
tggcagccttctctcttcca

SEQ ID NO: 54726 - RNA, 20 nt, synthetic construct
  source 1..20: mol_type = other RNA
tggcagcgtaactccatctt

SEQ ID NO: 54727 - RNA, 20 nt, synthetic construct
  source 1..20: mol_type = other RNA
tggcaggcaccttcagaagc

SEQ ID NO: 54728 - RNA, 20 nt, synthetic construct
  source 1..20: mol_type = other RNA
tggcaggggctgcatcatgg

SEQ ID NO: 54729 - RNA, 20 nt, synthetic construct
  source 1..20: mol_type = other RNA
tggcaggtcacctagcctct

SEQ ID NO: 54730 - RNA, 20 nt, synthetic construct
  source 1..20: mol_type = other RNA
tggcaggtttcaagtgaacc

SEQ ID NO: 54731 - RNA, 20 nt, synthetic construct
  source 1..20: mol_type = other RNA
tggcagtctaggaaaagact

SEQ ID NO: 54732 - RNA, 20 nt, synthetic construct
  source 1..20: mol_type = other RNA
tggcagtttaagaattaaaa

SEQ ID NO: 54733 - RNA, 20 nt, synthetic construct
  source 1..20: mol_type = other RNA
tggcataaagacagacattt

SEQ ID NO: 54734 - RNA, 20 nt, synthetic construct
  source 1..20: mol_type = other RNA
tggcatacaactgctcataa

SEQ ID NO: 54735 - RNA, 20 nt, synthetic construct
  source 1..20: mol_type = other RNA
tggcatcatactggaaggac

SEQ ID NO: 54736 - RNA, 20 nt, synthetic construct
  source 1..20: mol_type = other RNA
tggcatcattcataaacaca

SEQ ID NO: 54737 - RNA, 20 nt, synthetic construct
  source 1..20: mol_type = other RNA
tggcatcggggcctacagtg

SEQ ID NO: 54738 - RNA, 20 nt, synthetic construct
  source 1..20: mol_type = other RNA
tggcatctttaagatttttt

SEQ ID NO: 54739 - RNA, 20 nt, synthetic construct
  source 1..20: mol_type = other RNA
tggcatctttgttacagcag

SEQ ID NO: 54740 - RNA, 20 nt, synthetic construct
  source 1..20: mol_type = other RNA
tggcatgaaatgggtttaaa

SEQ ID NO: 54741 - RNA, 20 nt, synthetic construct
  source 1..20: mol_type = other RNA
tggcatgaacccaccaggag

SEQ ID NO: 54742 - RNA, 20 nt, synthetic construct
  source 1..20: mol_type = other RNA
tggcatgatctcacgtcacc

SEQ ID NO: 54743 - RNA, 20 nt, synthetic construct
  source 1..20: mol_type = other RNA
tggcatgtctgtagttacaa

SEQ ID NO: 54744 - RNA, 20 nt, synthetic construct
  source 1..20: mol_type = other RNA
tggcatgttggatagtttct

SEQ ID NO: 54745 - RNA, 20 nt, synthetic construct
  source 1..20: mol_type = other RNA
tggcattaaggacatccaca

SEQ ID NO: 54746 - RNA, 20 nt, synthetic construct
  source 1..20: mol_type = other RNA
tggcattgtcccgggggagg

SEQ ID NO: 54747 - RNA, 20 nt, synthetic construct
  source 1..20: mol_type = other RNA
tggcatttaaaagaacctct

SEQ ID NO: 54748 - RNA, 20 nt, synthetic construct
  source 1..20: mol_type = other RNA
tggcatttcttacacattag

SEQ ID NO: 54749 - RNA, 20 nt, synthetic construct
  source 1..20: mol_type = other RNA
tggcatttgagggttagaag

SEQ ID NO: 54750 - RNA, 20 nt, synthetic construct
  source 1..20: mol_type = other RNA
tggccaaatccctgatcaag

SEQ ID NO: 54751 - RNA, 20 nt, synthetic construct
  source 1..20: mol_type = other RNA
tggccaacatcgtaaaacct

SEQ ID NO: 54752 - RNA, 20 nt, synthetic construct
  source 1..20: mol_type = other RNA
tggccaagagttgctgactt

SEQ ID NO: 54753 - RNA, 20 nt, synthetic construct
  source 1..20: mol_type = other RNA
tggccacatgcttccaaaag

SEQ ID NO: 54754 - RNA, 20 nt, synthetic construct
  source 1..20: mol_type = other RNA
tggccactgattgagtatct

SEQ ID NO: 54755 - RNA, 20 nt, synthetic construct
  source 1..20: mol_type = other RNA
tggccagaatccctttcgct

SEQ ID NO: 54756 - RNA, 20 nt, synthetic construct
  source 1..20: mol_type = other RNA
tggccagcattacttaggca

SEQ ID NO: 54757 - RNA, 20 nt, synthetic construct
  source 1..20: mol_type = other RNA
tggccaggaggaggagggtg

SEQ ID NO: 54758 - RNA, 20 nt, synthetic construct
  source 1..20: mol_type = other RNA
tggccaggctggttccaaac

SEQ ID NO: 54759 - RNA, 20 nt, synthetic construct
  source 1..20: mol_type = other RNA
tggccagtatctcctttcct

SEQ ID NO: 54760 - RNA, 20 nt, synthetic construct
  source 1..20: mol_type = other RNA
tggccagtcatgtggggact

SEQ ID NO: 54761 - RNA, 20 nt, synthetic construct
  source 1..20: mol_type = other RNA
tggccagtgaccagtgtgat

SEQ ID NO: 54762 - RNA, 20 nt, synthetic construct
  source 1..20: mol_type = other RNA
tggccagtgagttcaaatgt

SEQ ID NO: 54763 - RNA, 20 nt, synthetic construct
  source 1..20: mol_type = other RNA
tggccatccttcccaaatcc

SEQ ID NO: 54764 - RNA, 20 nt, synthetic construct
  source 1..20: mol_type = other RNA
tggccatgttttatttcttg

SEQ ID NO: 54765 - RNA, 20 nt, synthetic construct
  source 1..20: mol_type = other RNA
tggccattttcttttaaatg

SEQ ID NO: 54766 - RNA, 20 nt, synthetic construct
  source 1..20: mol_type = other RNA
tggcccaacatgctcttaag

SEQ ID NO: 54767 - RNA, 20 nt, synthetic construct
  source 1..20: mol_type = other RNA
tggcccacacctgcaatcac

SEQ ID NO: 54768 - RNA, 20 nt, synthetic construct
  source 1..20: mol_type = other RNA
tggcccagccatcccattac

SEQ ID NO: 54769 - RNA, 20 nt, synthetic construct
  source 1..20: mol_type = other RNA
tggcccatatccttttatgt

SEQ ID NO: 54770 - RNA, 20 nt, synthetic construct
  source 1..20: mol_type = other RNA
tggcccattttcgaattaga

SEQ ID NO: 54771 - RNA, 20 nt, synthetic construct
  source 1..20: mol_type = other RNA
tggccccaaaattaccccat

SEQ ID NO: 54772 - RNA, 20 nt, synthetic construct
  source 1..20: mol_type = other RNA
tggcccccctgaaaaatgag

SEQ ID NO: 54773 - RNA, 20 nt, synthetic construct
  source 1..20: mol_type = other RNA
tggcccctccatggaaacta

SEQ ID NO: 54774 - RNA, 20 nt, synthetic construct
  source 1..20: mol_type = other RNA
tggcccctttcaagattgtt

SEQ ID NO: 54775 - RNA, 20 nt, synthetic construct
  source 1..20: mol_type = other RNA
tggccctccatttccctgct

SEQ ID NO: 54776 - RNA, 20 nt, synthetic construct
  source 1..20: mol_type = other RNA
tggccctgcgattggttgga

SEQ ID NO: 54777 - RNA, 20 nt, synthetic construct
  source 1..20: mol_type = other RNA
tggccctgttggcctggaca

SEQ ID NO: 54778 - RNA, 20 nt, synthetic construct
  source 1..20: mol_type = other RNA
tggcccttaacttcacctct

SEQ ID NO: 54779 - RNA, 20 nt, synthetic construct
  source 1..20: mol_type = other RNA
tggccgaatgtggtggtatg

SEQ ID NO: 54780 - RNA, 20 nt, synthetic construct
  source 1..20: mol_type = other RNA
tggccgaggccagtccctag

SEQ ID NO: 54781 - RNA, 20 nt, synthetic construct
  source 1..20: mol_type = other RNA
tggccgagggagacggcgag

SEQ ID NO: 54782 - RNA, 20 nt, synthetic construct
  source 1..20: mol_type = other RNA
tggccgggatttacttctat

SEQ ID NO: 54783 - RNA, 20 nt, synthetic construct
  source 1..20: mol_type = other RNA
tggcctaaatcaggatgtct

SEQ ID NO: 54784 - RNA, 20 nt, synthetic construct
  source 1..20: mol_type = other RNA
tggcctaagatggaaagtgg

SEQ ID NO: 54785 - RNA, 20 nt, synthetic construct
  source 1..20: mol_type = other RNA
tggcctccccaagtgctgtg

SEQ ID NO: 54786 - RNA, 20 nt, synthetic construct
  source 1..20: mol_type = other RNA
tggcctccctcactaagtca

SEQ ID NO: 54787 - RNA, 20 nt, synthetic construct
  source 1..20: mol_type = other RNA
tggcctcggccaaccattac

SEQ ID NO: 54788 - RNA, 20 nt, synthetic construct
  source 1..20: mol_type = other RNA
tggcctctgcggcggctgag

SEQ ID NO: 54789 - RNA, 20 nt, synthetic construct
  source 1..20: mol_type = other RNA
tggcctcttcccttgtgcac

SEQ ID NO: 54790 - RNA, 20 nt, synthetic construct
  source 1..20: mol_type = other RNA
tggcctgagctctcagtggc

SEQ ID NO: 54791 - RNA, 20 nt, synthetic construct
  source 1..20: mol_type = other RNA
tggcctgcaccatttattgt

SEQ ID NO: 54792 - RNA, 20 nt, synthetic construct
  source 1..20: mol_type = other RNA
tggcctggacaacagtgtga

SEQ ID NO: 54793 - RNA, 20 nt, synthetic construct
  source 1..20: mol_type = other RNA
tggcctggacacacacagtc

SEQ ID NO: 54794 - RNA, 20 nt, synthetic construct
  source 1..20: mol_type = other RNA
tggccttctatatttttaca

SEQ ID NO: 54795 - RNA, 20 nt, synthetic construct
  source 1..20: mol_type = other RNA
tggccttctgaggagctgag

SEQ ID NO: 54796 - RNA, 20 nt, synthetic construct
  source 1..20: mol_type = other RNA
tggccttctttctttcaaat

SEQ ID NO: 54797 - RNA, 20 nt, synthetic construct
  source 1..20: mol_type = other RNA
tggccttgaggtgagacaga

SEQ ID NO: 54798 - RNA, 20 nt, synthetic construct
  source 1..20: mol_type = other RNA
tggcgactcatgcctgtaat

SEQ ID NO: 54799 - RNA, 20 nt, synthetic construct
  source 1..20: mol_type = other RNA
tggcgcagccatggctcact

SEQ ID NO: 54800 - RNA, 20 nt, synthetic construct
  source 1..20: mol_type = other RNA
tggcgcagtgcttagcgctg

SEQ ID NO: 54801 - RNA, 20 nt, synthetic construct
  source 1..20: mol_type = other RNA
tggcgctccctctgtgtgca

SEQ ID NO: 54802 - RNA, 20 nt, synthetic construct
  source 1..20: mol_type = other RNA
tggcgctgtttgcctgcgtc

SEQ ID NO: 54803 - RNA, 20 nt, synthetic construct
  source 1..20: mol_type = other RNA
tggcggatgccggtaatcac

SEQ ID NO: 54804 - RNA, 20 nt, synthetic construct
  source 1..20: mol_type = other RNA
tggcggctttgtggagtgga

SEQ ID NO: 54805 - RNA, 20 nt, synthetic construct
  source 1..20: mol_type = other RNA
tggcgtacatgtagatatgg

SEQ ID NO: 54806 - RNA, 20 nt, synthetic construct
  source 1..20: mol_type = other RNA
tggcgtgtgcccaggctgac

SEQ ID NO: 54807 - RNA, 20 nt, synthetic construct
  source 1..20: mol_type = other RNA
tggctaaaagaccgcaagag

SEQ ID NO: 54808 - RNA, 20 nt, synthetic construct
  source 1..20: mol_type = other RNA
tggctaacaatcaaatttaa

SEQ ID NO: 54809 - RNA, 20 nt, synthetic construct
  source 1..20: mol_type = other RNA
tggctaatgtggcttgcaag

SEQ ID NO: 54810 - RNA, 20 nt, synthetic construct
  source 1..20: mol_type = other RNA
tggctacaccctgggaaagc

SEQ ID NO: 54811 - RNA, 20 nt, synthetic construct
  source 1..20: mol_type = other RNA
tggctactgtaaacaatgct

SEQ ID NO: 54812 - RNA, 20 nt, synthetic construct
  source 1..20: mol_type = other RNA
tggctagaaacttggattgt

SEQ ID NO: 54813 - RNA, 20 nt, synthetic construct
  source 1..20: mol_type = other RNA
tggctagaagcatctgatac

SEQ ID NO: 54814 - RNA, 20 nt, synthetic construct
  source 1..20: mol_type = other RNA
tggctagacggaaaaacatt

SEQ ID NO: 54815 - RNA, 20 nt, synthetic construct
  source 1..20: mol_type = other RNA
tggctagactaagaaaaaca

SEQ ID NO: 54816 - RNA, 20 nt, synthetic construct
  source 1..20: mol_type = other RNA
tggctagtaggcaacatccc

SEQ ID NO: 54817 - RNA, 20 nt, synthetic construct
  source 1..20: mol_type = other RNA
tggctagtgtgttgactgac

SEQ ID NO: 54818 - RNA, 20 nt, synthetic construct
  source 1..20: mol_type = other RNA
tggctataaccacgagtaat

SEQ ID NO: 54819 - RNA, 20 nt, synthetic construct
  source 1..20: mol_type = other RNA
tggctattagttaaccttct

SEQ ID NO: 54820 - RNA, 20 nt, synthetic construct
  source 1..20: mol_type = other RNA
tggctattgtcagtaattct

SEQ ID NO: 54821 - RNA, 20 nt, synthetic construct
  source 1..20: mol_type = other RNA
tggctcaacgcctgtgatcc

SEQ ID NO: 54822 - RNA, 20 nt, synthetic construct
  source 1..20: mol_type = other RNA
tggctcaatggttaagactg

SEQ ID NO: 54823 - RNA, 20 nt, synthetic construct
  source 1..20: mol_type = other RNA
tggctcacagtgctccatag

SEQ ID NO: 54824 - RNA, 20 nt, synthetic construct
  source 1..20: mol_type = other RNA
tggctcacattgtatttctg

SEQ ID NO: 54825 - RNA, 20 nt, synthetic construct
  source 1..20: mol_type = other RNA
tggctcactcatttccgttg

SEQ ID NO: 54826 - RNA, 20 nt, synthetic construct
  source 1..20: mol_type = other RNA
tggctcagaaacaacaacaa

SEQ ID NO: 54827 - RNA, 20 nt, synthetic construct
  source 1..20: mol_type = other RNA
tggctcagtctgtttgccat

SEQ ID NO: 54828 - RNA, 20 nt, synthetic construct
  source 1..20: mol_type = other RNA
tggctcatacttgctttatt

SEQ ID NO: 54829 - RNA, 20 nt, synthetic construct
  source 1..20: mol_type = other RNA
tggctcccatgattcaaaat

SEQ ID NO: 54830 - RNA, 20 nt, synthetic construct
  source 1..20: mol_type = other RNA
tggctcctcccggctaagat

SEQ ID NO: 54831 - RNA, 20 nt, synthetic construct
  source 1..20: mol_type = other RNA
tggctccttaccactataat

SEQ ID NO: 54832 - RNA, 20 nt, synthetic construct
  source 1..20: mol_type = other RNA
tggctctagcccagcttccg

SEQ ID NO: 54833 - RNA, 20 nt, synthetic construct
  source 1..20: mol_type = other RNA
tggctcttagaaaatatata

SEQ ID NO: 54834 - RNA, 20 nt, synthetic construct
  source 1..20: mol_type = other RNA
tggctctttccactctctgg

SEQ ID NO: 54835 - RNA, 20 nt, synthetic construct
  source 1..20: mol_type = other RNA
tggctgaaagagaaagaagt

SEQ ID NO: 54836 - RNA, 20 nt, synthetic construct
  source 1..20: mol_type = other RNA
tggctgaaatgctgtaactg

SEQ ID NO: 54837 - RNA, 20 nt, synthetic construct
  source 1..20: mol_type = other RNA
tggctgacatgtgtaaaaca

SEQ ID NO: 54838 - RNA, 20 nt, synthetic construct
  source 1..20: mol_type = other RNA
tggctgacctggtactctat

SEQ ID NO: 54839 - RNA, 20 nt, synthetic construct
  source 1..20: mol_type = other RNA
tggctgcaattgcgcagaac

SEQ ID NO: 54840 - RNA, 20 nt, synthetic construct
  source 1..20: mol_type = other RNA
tggctgcaccattttttcac

SEQ ID NO: 54841 - RNA, 20 nt, synthetic construct
  source 1..20: mol_type = other RNA
tggctgcagggcttctgaag

SEQ ID NO: 54842 - RNA, 20 nt, synthetic construct
  source 1..20: mol_type = other RNA
tggctgcgccactgcactcc

SEQ ID NO: 54843 - RNA, 20 nt, synthetic construct
  source 1..20: mol_type = other RNA
tggctggaatggtgaagaat

SEQ ID NO: 54844 - RNA, 20 nt, synthetic construct
  source 1..20: mol_type = other RNA
tggctggcactttcctgata

SEQ ID NO: 54845 - RNA, 20 nt, synthetic construct
  source 1..20: mol_type = other RNA
tggctgggagcttatcaggc

SEQ ID NO: 54846 - RNA, 20 nt, synthetic construct
  source 1..20: mol_type = other RNA
tggctgtactaagcctatgt

SEQ ID NO: 54847 - RNA, 20 nt, synthetic construct
  source 1..20: mol_type = other RNA
tggctgtcaaaaatgtgtct

SEQ ID NO: 54848 - RNA, 20 nt, synthetic construct
  source 1..20: mol_type = other RNA
tggctgtgccaactctggca

SEQ ID NO: 54849 - RNA, 20 nt, synthetic construct
  source 1..20: mol_type = other RNA
tggctgttaccatttgacct

SEQ ID NO: 54850 - RNA, 20 nt, synthetic construct
  source 1..20: mol_type = other RNA
tggctgttagccttgccatt

SEQ ID NO: 54851 - RNA, 20 nt, synthetic construct
  source 1..20: mol_type = other RNA
tggcttaaggaaataaatat

SEQ ID NO: 54852 - RNA, 20 nt, synthetic construct
  source 1..20: mol_type = other RNA
tggcttaatgcatataaaaa

SEQ ID NO: 54853 - RNA, 20 nt, synthetic construct
  source 1..20: mol_type = other RNA
tggcttagaaatgaagatgg

SEQ ID NO: 54854 - RNA, 20 nt, synthetic construct
  source 1..20: mol_type = other RNA
tggcttaggatcaccaaaga

SEQ ID NO: 54855 - RNA, 20 nt, synthetic construct
  source 1..20: mol_type = other RNA
tggcttatagtgttcttttt

SEQ ID NO: 54856 - RNA, 20 nt, synthetic construct
  source 1..20: mol_type = other RNA
tggcttcaatatgcagtatg

SEQ ID NO: 54857 - RNA, 20 nt, synthetic construct
  source 1..20: mol_type = other RNA
tggcttcagtgccaacacat

SEQ ID NO: 54858 - RNA, 20 nt, synthetic construct
  source 1..20: mol_type = other RNA
tggcttcatgggtggaaatt

SEQ ID NO: 54859 - RNA, 20 nt, synthetic construct
  source 1..20: mol_type = other RNA
tggcttcctaactggtctcc

SEQ ID NO: 54860 - RNA, 20 nt, synthetic construct
  source 1..20: mol_type = other RNA
tggcttctcaaactgtgtgc

SEQ ID NO: 54861 - RNA, 20 nt, synthetic construct
  source 1..20: mol_type = other RNA
tggcttgagcccagggggtc

SEQ ID NO: 54862 - RNA, 20 nt, synthetic construct
  source 1..20: mol_type = other RNA
tggcttgcaaggcccaccat

SEQ ID NO: 54863 - RNA, 20 nt, synthetic construct
  source 1..20: mol_type = other RNA
tggcttggggaacagtttag

SEQ ID NO: 54864 - RNA, 20 nt, synthetic construct
  source 1..20: mol_type = other RNA
tggcttgggtgacctcatgt

SEQ ID NO: 54865 - RNA, 20 nt, synthetic construct
  source 1..20: mol_type = other RNA
tggcttgtgacatcaagggt

SEQ ID NO: 54866 - RNA, 20 nt, synthetic construct
  source 1..20: mol_type = other RNA
tggcttgtggctacaccctg

SEQ ID NO: 54867 - RNA, 20 nt, synthetic construct
  source 1..20: mol_type = other RNA
tggctttaaggcgcagacac

SEQ ID NO: 54868 - RNA, 20 nt, synthetic construct
  source 1..20: mol_type = other RNA
tggctttagatggtaaaaca

SEQ ID NO: 54869 - RNA, 20 nt, synthetic construct
  source 1..20: mol_type = other RNA
tggctttagatttatcaata

SEQ ID NO: 54870 - RNA, 20 nt, synthetic construct
  source 1..20: mol_type = other RNA
tggcttttgagtgtaaggtg

SEQ ID NO: 54871 - RNA, 20 nt, synthetic construct
  source 1..20: mol_type = other RNA
tggcttttggcagcgtaact

SEQ ID NO: 54872 - RNA, 20 nt, synthetic construct
  source 1..20: mol_type = other RNA
tggctttttacgatgaaatt

SEQ ID NO: 54873 - RNA, 20 nt, synthetic construct
  source 1..20: mol_type = other RNA
tgggaaaaaataagaaaaca

SEQ ID NO: 54874 - RNA, 20 nt, synthetic construct
  source 1..20: mol_type = other RNA
tgggaaaaggatttgtttgt

SEQ ID NO: 54875 - RNA, 20 nt, synthetic construct
  source 1..20: mol_type = other RNA
tgggaaaatctctgacttca

SEQ ID NO: 54876 - RNA, 20 nt, synthetic construct
  source 1..20: mol_type = other RNA
tgggaaaatcttggaacttt

SEQ ID NO: 54877 - RNA, 20 nt, synthetic construct
  source 1..20: mol_type = other RNA
tgggaaagacaggtagacat

SEQ ID NO: 54878 - RNA, 20 nt, synthetic construct
  source 1..20: mol_type = other RNA
tgggaaagcctggctttaga

SEQ ID NO: 54879 - RNA, 20 nt, synthetic construct
  source 1..20: mol_type = other RNA
tgggaaagtattcccaagat

SEQ ID NO: 54880 - RNA, 20 nt, synthetic construct
  source 1..20: mol_type = other RNA
tgggaaattagatgatgttt

SEQ ID NO: 54881 - RNA, 20 nt, synthetic construct
  source 1..20: mol_type = other RNA
tgggaacagcaggggaaggc

SEQ ID NO: 54882 - RNA, 20 nt, synthetic construct
  source 1..20: mol_type = other RNA
tgggaacagcccctagcatg

SEQ ID NO: 54883 - RNA, 20 nt, synthetic construct
  source 1..20: mol_type = other RNA
tgggaagaaaaaataaaggc

SEQ ID NO: 54884 - RNA, 20 nt, synthetic construct
  source 1..20: mol_type = other RNA
tgggaagatgctccctctat

SEQ ID NO: 54885 - RNA, 20 nt, synthetic construct
  source 1..20: mol_type = other RNA
tgggaagattggctttagat

SEQ ID NO: 54886 - RNA, 20 nt, synthetic construct
  source 1..20: mol_type = other RNA
tgggaagcaaaggattcggg

SEQ ID NO: 54887 - RNA, 20 nt, synthetic construct
  source 1..20: mol_type = other RNA
tgggaaggatggccagtcat

SEQ ID NO: 54888 - RNA, 20 nt, synthetic construct
  source 1..20: mol_type = other RNA
tgggaaggccctgattgaga

SEQ ID NO: 54889 - RNA, 20 nt, synthetic construct
  source 1..20: mol_type = other RNA
tgggaagtggagtgcgagtg

SEQ ID NO: 54890 - RNA, 20 nt, synthetic construct
  source 1..20: mol_type = other RNA
tgggaagttatgtagctggg

SEQ ID NO: 54891 - RNA, 20 nt, synthetic construct
  source 1..20: mol_type = other RNA
tgggaatactttcccatctc

SEQ ID NO: 54892 - RNA, 20 nt, synthetic construct
  source 1..20: mol_type = other RNA
tgggaatgcatatatctgtc

SEQ ID NO: 54893 - RNA, 20 nt, synthetic construct
  source 1..20: mol_type = other RNA
tgggaatgtggtcacacttt

SEQ ID NO: 54894 - RNA, 20 nt, synthetic construct
  source 1..20: mol_type = other RNA
tgggaattcagtcaccaaac

SEQ ID NO: 54895 - RNA, 20 nt, synthetic construct
  source 1..20: mol_type = other RNA
tgggacaagtgggtggatgg

SEQ ID NO: 54896 - RNA, 20 nt, synthetic construct
  source 1..20: mol_type = other RNA
tgggacagagcgagactccg

SEQ ID NO: 54897 - RNA, 20 nt, synthetic construct
  source 1..20: mol_type = other RNA
tgggaccccgtctctgcaaa

SEQ ID NO: 54898 - RNA, 20 nt, synthetic construct
  source 1..20: mol_type = other RNA
tgggactacaggtgtgaacc

SEQ ID NO: 54899 - RNA, 20 nt, synthetic construct
  source 1..20: mol_type = other RNA
tgggactgagacagtattgt

SEQ ID NO: 54900 - RNA, 20 nt, synthetic construct
  source 1..20: mol_type = other RNA
tgggactggagaacagtaaa

SEQ ID NO: 54901 - RNA, 20 nt, synthetic construct
  source 1..20: mol_type = other RNA
tgggacttcactagtgggtc

SEQ ID NO: 54902 - RNA, 20 nt, synthetic construct
  source 1..20: mol_type = other RNA
tgggacttctagcctccaga

SEQ ID NO: 54903 - RNA, 20 nt, synthetic construct
  source 1..20: mol_type = other RNA
tgggagaaagaccaagagtg

SEQ ID NO: 54904 - RNA, 20 nt, synthetic construct
  source 1..20: mol_type = other RNA
tgggagaaagctaatttgga

SEQ ID NO: 54905 - RNA, 20 nt, synthetic construct
  source 1..20: mol_type = other RNA
tgggagaatggcaaggctaa

SEQ ID NO: 54906 - RNA, 20 nt, synthetic construct
  source 1..20: mol_type = other RNA
tgggagaccaggagttctta

SEQ ID NO: 54907 - RNA, 20 nt, synthetic construct
  source 1..20: mol_type = other RNA
tgggagaggcatgccgggac

SEQ ID NO: 54908 - RNA, 20 nt, synthetic construct
  source 1..20: mol_type = other RNA
tgggagatggacactgcaga

SEQ ID NO: 54909 - RNA, 20 nt, synthetic construct
  source 1..20: mol_type = other RNA
tgggagatgtgtaattgtac

SEQ ID NO: 54910 - RNA, 20 nt, synthetic construct
  source 1..20: mol_type = other RNA
tgggagcatgcacacaggag

SEQ ID NO: 54911 - RNA, 20 nt, synthetic construct
  source 1..20: mol_type = other RNA
tgggagccaaacttgaacct

SEQ ID NO: 54912 - RNA, 20 nt, synthetic construct
  source 1..20: mol_type = other RNA
tgggagccctccaggatcca

SEQ ID NO: 54913 - RNA, 20 nt, synthetic construct
  source 1..20: mol_type = other RNA
tgggagcttatcaggcttga

SEQ ID NO: 54914 - RNA, 20 nt, synthetic construct
  source 1..20: mol_type = other RNA
tgggagctttcattattacc

SEQ ID NO: 54915 - RNA, 20 nt, synthetic construct
  source 1..20: mol_type = other RNA
tgggaggaggtcatactgga

SEQ ID NO: 54916 - RNA, 20 nt, synthetic construct
  source 1..20: mol_type = other RNA
tgggaggcccggagccgagg

SEQ ID NO: 54917 - RNA, 20 nt, synthetic construct
  source 1..20: mol_type = other RNA
tgggaggctgaggcggaagg

SEQ ID NO: 54918 - RNA, 20 nt, synthetic construct
  source 1..20: mol_type = other RNA
tgggaggctgaggctgggga

SEQ ID NO: 54919 - RNA, 20 nt, synthetic construct
  source 1..20: mol_type = other RNA
tgggaggtaatactataagg

SEQ ID NO: 54920 - RNA, 20 nt, synthetic construct
  source 1..20: mol_type = other RNA
tgggagtacaagaccagcct

SEQ ID NO: 54921 - RNA, 20 nt, synthetic construct
  source 1..20: mol_type = other RNA
tgggagtccctgctttcagt

SEQ ID NO: 54922 - RNA, 20 nt, synthetic construct
  source 1..20: mol_type = other RNA
tgggagtctatttctgaaca

SEQ ID NO: 54923 - RNA, 20 nt, synthetic construct
  source 1..20: mol_type = other RNA
tgggagttcattagaattca

SEQ ID NO: 54924 - RNA, 20 nt, synthetic construct
  source 1..20: mol_type = other RNA
tgggataatgagtttaattc

SEQ ID NO: 54925 - RNA, 20 nt, synthetic construct
  source 1..20: mol_type = other RNA
tgggataatgctatcatttt

SEQ ID NO: 54926 - RNA, 20 nt, synthetic construct
  source 1..20: mol_type = other RNA
tgggatacttctaactttag

SEQ ID NO: 54927 - RNA, 20 nt, synthetic construct
  source 1..20: mol_type = other RNA
tgggatatagctacaatgat

SEQ ID NO: 54928 - RNA, 20 nt, synthetic construct
  source 1..20: mol_type = other RNA
tgggatatctaacataatca

SEQ ID NO: 54929 - RNA, 20 nt, synthetic construct
  source 1..20: mol_type = other RNA
tgggatcaaaccatgttcat

SEQ ID NO: 54930 - RNA, 20 nt, synthetic construct
  source 1..20: mol_type = other RNA
tgggatcacacttgatggtt

SEQ ID NO: 54931 - RNA, 20 nt, synthetic construct
  source 1..20: mol_type = other RNA
tgggatcacaggcgttgagc

SEQ ID NO: 54932 - RNA, 20 nt, synthetic construct
  source 1..20: mol_type = other RNA
tgggatcctaagcatgagat

SEQ ID NO: 54933 - RNA, 20 nt, synthetic construct
  source 1..20: mol_type = other RNA
tgggatctctgggctcactg

SEQ ID NO: 54934 - RNA, 20 nt, synthetic construct
  source 1..20: mol_type = other RNA
tgggatctgataaattatta

SEQ ID NO: 54935 - RNA, 20 nt, synthetic construct
  source 1..20: mol_type = other RNA
tgggatctgtcatgtttgaa

SEQ ID NO: 54936 - RNA, 20 nt, synthetic construct
  source 1..20: mol_type = other RNA
tgggatgcaagaatggttta

SEQ ID NO: 54937 - RNA, 20 nt, synthetic construct
  source 1..20: mol_type = other RNA
tgggatgcagcaaaagcacc

SEQ ID NO: 54938 - RNA, 20 nt, synthetic construct
  source 1..20: mol_type = other RNA
tgggatgctcagtttcaaaa

SEQ ID NO: 54939 - RNA, 20 nt, synthetic construct
  source 1..20: mol_type = other RNA
tgggatgcttaaagcgctac

SEQ ID NO: 54940 - RNA, 20 nt, synthetic construct
  source 1..20: mol_type = other RNA
tgggatggctgaaagagaaa

SEQ ID NO: 54941 - RNA, 20 nt, synthetic construct
  source 1..20: mol_type = other RNA
tgggatgtttctacctttgg

SEQ ID NO: 54942 - RNA, 20 nt, synthetic construct
  source 1..20: mol_type = other RNA
tgggattacacacacctacc

SEQ ID NO: 54943 - RNA, 20 nt, synthetic construct
  source 1..20: mol_type = other RNA
tgggattacaggcgcacgcc

SEQ ID NO: 54944 - RNA, 20 nt, synthetic construct
  source 1..20: mol_type = other RNA
tgggattagcttattctttt

SEQ ID NO: 54945 - RNA, 20 nt, synthetic construct
  source 1..20: mol_type = other RNA
tgggcaaaaaagtcatgacc

SEQ ID NO: 54946 - RNA, 20 nt, synthetic construct
  source 1..20: mol_type = other RNA
tgggcaacagagacagagaa

SEQ ID NO: 54947 - RNA, 20 nt, synthetic construct
  source 1..20: mol_type = other RNA
tgggcaagagagcaagtccc

SEQ ID NO: 54948 - RNA, 20 nt, synthetic construct
  source 1..20: mol_type = other RNA
tgggcacacgccactgcagg

SEQ ID NO: 54949 - RNA, 20 nt, synthetic construct
  source 1..20: mol_type = other RNA
tgggcacactccccagtggt

SEQ ID NO: 54950 - RNA, 20 nt, synthetic construct
  source 1..20: mol_type = other RNA
tgggcactgggagccctcca

SEQ ID NO: 54951 - RNA, 20 nt, synthetic construct
  source 1..20: mol_type = other RNA
tgggcacttgggatgtttct

SEQ ID NO: 54952 - RNA, 20 nt, synthetic construct
  source 1..20: mol_type = other RNA
tgggcagactccttcccctg

SEQ ID NO: 54953 - RNA, 20 nt, synthetic construct
  source 1..20: mol_type = other RNA
tgggcatgggtccaagacag

SEQ ID NO: 54954 - RNA, 20 nt, synthetic construct
  source 1..20: mol_type = other RNA
tgggcattaattgagagctt

SEQ ID NO: 54955 - RNA, 20 nt, synthetic construct
  source 1..20: mol_type = other RNA
tgggcattagaagttaaatt

SEQ ID NO: 54956 - RNA, 20 nt, synthetic construct
  source 1..20: mol_type = other RNA
tgggcattccagagggtaac

SEQ ID NO: 54957 - RNA, 20 nt, synthetic construct
  source 1..20: mol_type = other RNA
tgggccaaagacagatctta

SEQ ID NO: 54958 - RNA, 20 nt, synthetic construct
  source 1..20: mol_type = other RNA
tgggccaaagacttcaacgg

SEQ ID NO: 54959 - RNA, 20 nt, synthetic construct
  source 1..20: mol_type = other RNA
tgggccaacttccagcaaga

SEQ ID NO: 54960 - RNA, 20 nt, synthetic construct
  source 1..20: mol_type = other RNA
tgggccaccaagccctgcct

SEQ ID NO: 54961 - RNA, 20 nt, synthetic construct
  source 1..20: mol_type = other RNA
tgggcccactctccccaagt

SEQ ID NO: 54962 - RNA, 20 nt, synthetic construct
  source 1..20: mol_type = other RNA
tgggcccagcagaaggtgag

SEQ ID NO: 54963 - RNA, 20 nt, synthetic construct
  source 1..20: mol_type = other RNA
tgggcccgcagtggctcatg

SEQ ID NO: 54964 - RNA, 20 nt, synthetic construct
  source 1..20: mol_type = other RNA
tgggccttgcaagccacatt

SEQ ID NO: 54965 - RNA, 20 nt, synthetic construct
  source 1..20: mol_type = other RNA
tgggcctttctgtttgtttg

SEQ ID NO: 54966 - RNA, 20 nt, synthetic construct
  source 1..20: mol_type = other RNA
tgggcgacaagagcagaact

SEQ ID NO: 54967 - RNA, 20 nt, synthetic construct
  source 1..20: mol_type = other RNA
tgggcgacagagtgaaactc

SEQ ID NO: 54968 - RNA, 20 nt, synthetic construct
  source 1..20: mol_type = other RNA
tgggcgagatggcgtgcgcc

SEQ ID NO: 54969 - RNA, 20 nt, synthetic construct
  source 1..20: mol_type = other RNA
tgggcgtggagcggtgtctt

SEQ ID NO: 54970 - RNA, 20 nt, synthetic construct
  source 1..20: mol_type = other RNA
tgggctaaataaaacattaa

SEQ ID NO: 54971 - RNA, 20 nt, synthetic construct
  source 1..20: mol_type = other RNA
tgggctaaggtggagtggtg

SEQ ID NO: 54972 - RNA, 20 nt, synthetic construct
  source 1..20: mol_type = other RNA
tgggctagagccaggaagtc

SEQ ID NO: 54973 - RNA, 20 nt, synthetic construct
  source 1..20: mol_type = other RNA
tgggctagggaagcagttga

SEQ ID NO: 54974 - RNA, 20 nt, synthetic construct
  source 1..20: mol_type = other RNA
tgggctattaagtattgcat

SEQ ID NO: 54975 - RNA, 20 nt, synthetic construct
  source 1..20: mol_type = other RNA
tgggctattgttttgcaaga

SEQ ID NO: 54976 - RNA, 20 nt, synthetic construct
  source 1..20: mol_type = other RNA
tgggctcactgcaacttccg

SEQ ID NO: 54977 - RNA, 20 nt, synthetic construct
  source 1..20: mol_type = other RNA
tgggctcatctaagcctacc

SEQ ID NO: 54978 - RNA, 20 nt, synthetic construct
  source 1..20: mol_type = other RNA
tgggctcccttccagcgtgt

SEQ ID NO: 54979 - RNA, 20 nt, synthetic construct
  source 1..20: mol_type = other RNA
tgggctctctattccaaatg

SEQ ID NO: 54980 - RNA, 20 nt, synthetic construct
  source 1..20: mol_type = other RNA
tgggcttaacatttgaactc

SEQ ID NO: 54981 - RNA, 20 nt, synthetic construct
  source 1..20: mol_type = other RNA
tgggcttatcagatggtgat

SEQ ID NO: 54982 - RNA, 20 nt, synthetic construct
  source 1..20: mol_type = other RNA
tgggcttcactttcgtcatc

SEQ ID NO: 54983 - RNA, 20 nt, synthetic construct
  source 1..20: mol_type = other RNA
tgggcttggttggaaaagaa

SEQ ID NO: 54984 - RNA, 20 nt, synthetic construct
  source 1..20: mol_type = other RNA
tgggctttctccaggggcgg

SEQ ID NO: 54985 - RNA, 20 nt, synthetic construct
  source 1..20: mol_type = other RNA
tgggctttgagaaaggtttc

SEQ ID NO: 54986 - RNA, 20 nt, synthetic construct
  source 1..20: mol_type = other RNA
tgggcttttcatatacgtat

SEQ ID NO: 54987 - RNA, 20 nt, synthetic construct
  source 1..20: mol_type = other RNA
tggggaaatagatgcctaga

SEQ ID NO: 54988 - RNA, 20 nt, synthetic construct
  source 1..20: mol_type = other RNA
tggggaacagtttagcaatc

SEQ ID NO: 54989 - RNA, 20 nt, synthetic construct
  source 1..20: mol_type = other RNA
tggggaataagattttaggt

SEQ ID NO: 54990 - RNA, 20 nt, synthetic construct
  source 1..20: mol_type = other RNA
tggggaatgctcataattaa

SEQ ID NO: 54991 - RNA, 20 nt, synthetic construct
  source 1..20: mol_type = other RNA
tggggaattgcatgagactt

SEQ ID NO: 54992 - RNA, 20 nt, synthetic construct
  source 1..20: mol_type = other RNA
tggggacagctcaattaagc

SEQ ID NO: 54993 - RNA, 20 nt, synthetic construct
  source 1..20: mol_type = other RNA
tggggacccctccctgcttt

SEQ ID NO: 54994 - RNA, 20 nt, synthetic construct
  source 1..20: mol_type = other RNA
tggggactcttatggctata

SEQ ID NO: 54995 - RNA, 20 nt, synthetic construct
  source 1..20: mol_type = other RNA
tggggacttgctctcttgcc

SEQ ID NO: 54996 - RNA, 20 nt, synthetic construct
  source 1..20: mol_type = other RNA
tggggactttgtggcctctt

SEQ ID NO: 54997 - RNA, 20 nt, synthetic construct
  source 1..20: mol_type = other RNA
tggggagagtgggcccagca

SEQ ID NO: 54998 - RNA, 20 nt, synthetic construct
  source 1..20: mol_type = other RNA
tggggagataccttgaaagg

SEQ ID NO: 54999 - RNA, 20 nt, synthetic construct
  source 1..20: mol_type = other RNA
tggggagctagagggtaaga

SEQ ID NO: 55000 - RNA, 20 nt, synthetic construct
  source 1..20: mol_type = other RNA
tggggaggccaaggcaggac

SEQ ID NO: 55001 - RNA, 20 nt, synthetic construct
  source 1..20: mol_type = other RNA
tggggagtgtgcccaaggaa

SEQ ID NO: 55002 - RNA, 20 nt, synthetic construct
  source 1..20: mol_type = other RNA
tggggagttttaggaaaata

SEQ ID NO: 55003 - RNA, 20 nt, synthetic construct
  source 1..20: mol_type = other RNA
tggggatatccaaagataaa

SEQ ID NO: 55004 - RNA, 20 nt, synthetic construct
  source 1..20: mol_type = other RNA
tggggatgcaacaaatgttg

SEQ ID NO: 55005 - RNA, 20 nt, synthetic construct
  source 1..20: mol_type = other RNA
tggggatgctgtctataggc

SEQ ID NO: 55006 - RNA, 20 nt, synthetic construct
  source 1..20: mol_type = other RNA
tggggattctgctactagca

SEQ ID NO: 55007 - RNA, 20 nt, synthetic construct
  source 1..20: mol_type = other RNA
tggggattgagggttagatt

SEQ ID NO: 55008 - RNA, 20 nt, synthetic construct
  source 1..20: mol_type = other RNA
tggggcaatctcagctcatt

SEQ ID NO: 55009 - RNA, 20 nt, synthetic construct
  source 1..20: mol_type = other RNA
tggggcacctaaaaggttgc

SEQ ID NO: 55010 - RNA, 20 nt, synthetic construct
  source 1..20: mol_type = other RNA
tggggcagcaaagcaagaaa

SEQ ID NO: 55011 - RNA, 20 nt, synthetic construct
  source 1..20: mol_type = other RNA
tggggccatctgaattcaag

SEQ ID NO: 55012 - RNA, 20 nt, synthetic construct
  source 1..20: mol_type = other RNA
tggggcctcagcatgtcttc

SEQ ID NO: 55013 - RNA, 20 nt, synthetic construct
  source 1..20: mol_type = other RNA
tggggcgatcttggctcacc

SEQ ID NO: 55014 - RNA, 20 nt, synthetic construct
  source 1..20: mol_type = other RNA
tggggctaggatttcagtaa

SEQ ID NO: 55015 - RNA, 20 nt, synthetic construct
  source 1..20: mol_type = other RNA
tggggctcaagtaagtgaaa

SEQ ID NO: 55016 - RNA, 20 nt, synthetic construct
  source 1..20: mol_type = other RNA
tggggctctaatgcaagagt

SEQ ID NO: 55017 - RNA, 20 nt, synthetic construct
  source 1..20: mol_type = other RNA
tggggcttgaacccgaggtg

SEQ ID NO: 55018 - RNA, 20 nt, synthetic construct
  source 1..20: mol_type = other RNA
tggggctttactgtattagg

SEQ ID NO: 55019 - RNA, 20 nt, synthetic construct
  source 1..20: mol_type = other RNA
tggggcttttgaacactctg

SEQ ID NO: 55020 - RNA, 20 nt, synthetic construct
  source 1..20: mol_type = other RNA
tgggggaaaattgacatttt

SEQ ID NO: 55021 - RNA, 20 nt, synthetic construct
  source 1..20: mol_type = other RNA
tgggggaagagagcattgcc

SEQ ID NO: 55022 - RNA, 20 nt, synthetic construct
  source 1..20: mol_type = other RNA
tgggggaagcaggaactcat

SEQ ID NO: 55023 - RNA, 20 nt, synthetic construct
  source 1..20: mol_type = other RNA
tgggggacgacgtatgcaac

SEQ ID NO: 55024 - RNA, 20 nt, synthetic construct
  source 1..20: mol_type = other RNA
tgggggagactgtgcaatgt

SEQ ID NO: 55025 - RNA, 20 nt, synthetic construct
  source 1..20: mol_type = other RNA
tgggggatccaggggaatag

SEQ ID NO: 55026 - RNA, 20 nt, synthetic construct
  source 1..20: mol_type = other RNA
tgggggcatcaaagctaccc

SEQ ID NO: 55027 - RNA, 20 nt, synthetic construct
  source 1..20: mol_type = other RNA
tgggggcgcgtgcctatggt

SEQ ID NO: 55028 - RNA, 20 nt, synthetic construct
  source 1..20: mol_type = other RNA
tgggggctcacatctgtaat

SEQ ID NO: 55029 - RNA, 20 nt, synthetic construct
  source 1..20: mol_type = other RNA
tgggggctggacataagggt

SEQ ID NO: 55030 - RNA, 20 nt, synthetic construct
  source 1..20: mol_type = other RNA
tgggggctgggtcggccgag

SEQ ID NO: 55031 - RNA, 20 nt, synthetic construct
  source 1..20: mol_type = other RNA
tggggggagggagggggagg

SEQ ID NO: 55032 - RNA, 20 nt, synthetic construct
  source 1..20: mol_type = other RNA
tggggggatgtagaaggata

SEQ ID NO: 55033 - RNA, 20 nt, synthetic construct
  source 1..20: mol_type = other RNA
tgggggtaagattgtggtcc

SEQ ID NO: 55034 - RNA, 20 nt, synthetic construct
  source 1..20: mol_type = other RNA
tggggtaattttggggccat

SEQ ID NO: 55035 - RNA, 20 nt, synthetic construct
  source 1..20: mol_type = other RNA
tggggtatgtttgattagtt

SEQ ID NO: 55036 - RNA, 20 nt, synthetic construct
  source 1..20: mol_type = other RNA
tggggtctcattgtgttgcc

SEQ ID NO: 55037 - RNA, 20 nt, synthetic construct
  source 1..20: mol_type = other RNA
tggggtcttagttctgcttc

SEQ ID NO: 55038 - RNA, 20 nt, synthetic construct
  source 1..20: mol_type = other RNA
tggggttagggcctagaaat

SEQ ID NO: 55039 - RNA, 20 nt, synthetic construct
  source 1..20: mol_type = other RNA
tggggttcaaaccacctaac

SEQ ID NO: 55040 - RNA, 20 nt, synthetic construct
  source 1..20: mol_type = other RNA
tggggtttccttacctttat

SEQ ID NO: 55041 - RNA, 20 nt, synthetic construct
  source 1..20: mol_type = other RNA
tggggtttgtccatgttggt

SEQ ID NO: 55042 - RNA, 20 nt, synthetic construct
  source 1..20: mol_type = other RNA
tggggtttttatggttttaa

SEQ ID NO: 55043 - RNA, 20 nt, synthetic construct
  source 1..20: mol_type = other RNA
tgggtaaaaataatcaacta

SEQ ID NO: 55044 - RNA, 20 nt, synthetic construct
  source 1..20: mol_type = other RNA
tgggtaaacaagactcaaca

SEQ ID NO: 55045 - RNA, 20 nt, synthetic construct
  source 1..20: mol_type = other RNA
tgggtaaatttctaaaaacg

SEQ ID NO: 55046 - RNA, 20 nt, synthetic construct
  source 1..20: mol_type = other RNA
tgggtaatttatctccataa

SEQ ID NO: 55047 - RNA, 20 nt, synthetic construct
  source 1..20: mol_type = other RNA
tgggtacagggtttctgttt

SEQ ID NO: 55048 - RNA, 20 nt, synthetic construct
  source 1..20: mol_type = other RNA
tgggtagaagcagcaagggt

SEQ ID NO: 55049 - RNA, 20 nt, synthetic construct
  source 1..20: mol_type = other RNA
tgggtagagactggatcctg

SEQ ID NO: 55050 - RNA, 20 nt, synthetic construct
  source 1..20: mol_type = other RNA
tgggtaggaagctgatcaag

SEQ ID NO: 55051 - RNA, 20 nt, synthetic construct
  source 1..20: mol_type = other RNA
tgggtataaatgatgagcta

SEQ ID NO: 55052 - RNA, 20 nt, synthetic construct
  source 1..20: mol_type = other RNA
tgggtatacagcaaaagaat

SEQ ID NO: 55053 - RNA, 20 nt, synthetic construct
  source 1..20: mol_type = other RNA
tgggtattttgttgttgttg

SEQ ID NO: 55054 - RNA, 20 nt, synthetic construct
  source 1..20: mol_type = other RNA
tgggtcaacaaactaactag

SEQ ID NO: 55055 - RNA, 20 nt, synthetic construct
  source 1..20: mol_type = other RNA
tgggtcaaccactaaggtca

SEQ ID NO: 55056 - RNA, 20 nt, synthetic construct
  source 1..20: mol_type = other RNA
tgggtcagaatcgtgatagt

SEQ ID NO: 55057 - RNA, 20 nt, synthetic construct
  source 1..20: mol_type = other RNA
tgggtcagctagtgtgtctg

SEQ ID NO: 55058 - RNA, 20 nt, synthetic construct
  source 1..20: mol_type = other RNA
tgggtccaagacaggaagaa

SEQ ID NO: 55059 - RNA, 20 nt, synthetic construct
  source 1..20: mol_type = other RNA
tgggtccccggaggaggtgg

SEQ ID NO: 55060 - RNA, 20 nt, synthetic construct
  source 1..20: mol_type = other RNA
tgggtcggccgaggcggacg

SEQ ID NO: 55061 - RNA, 20 nt, synthetic construct
  source 1..20: mol_type = other RNA
tgggtcgggtgtcagaaacc

SEQ ID NO: 55062 - RNA, 20 nt, synthetic construct
  source 1..20: mol_type = other RNA
tgggtctatagtttaattgg

SEQ ID NO: 55063 - RNA, 20 nt, synthetic construct
  source 1..20: mol_type = other RNA
tgggtctccattttggtctt

SEQ ID NO: 55064 - RNA, 20 nt, synthetic construct
  source 1..20: mol_type = other RNA
tgggtcttataggttgaata

SEQ ID NO: 55065 - RNA, 20 nt, synthetic construct
  source 1..20: mol_type = other RNA
tgggtgaataacccatatct

SEQ ID NO: 55066 - RNA, 20 nt, synthetic construct
  source 1..20: mol_type = other RNA
tgggtgacagagagagacct

SEQ ID NO: 55067 - RNA, 20 nt, synthetic construct
  source 1..20: mol_type = other RNA
tgggtgacctcatgtaacta

SEQ ID NO: 55068 - RNA, 20 nt, synthetic construct
  source 1..20: mol_type = other RNA
tgggtgatatctgtaagtca

SEQ ID NO: 55069 - RNA, 20 nt, synthetic construct
  source 1..20: mol_type = other RNA
tgggtgatgttcaaccctcg

SEQ ID NO: 55070 - RNA, 20 nt, synthetic construct
  source 1..20: mol_type = other RNA
tgggtgcgttgaccgctttc

SEQ ID NO: 55071 - RNA, 20 nt, synthetic construct
  source 1..20: mol_type = other RNA
tgggtggaaattaaacacac

SEQ ID NO: 55072 - RNA, 20 nt, synthetic construct
  source 1..20: mol_type = other RNA
tgggtggaagctgtccttct

SEQ ID NO: 55073 - RNA, 20 nt, synthetic construct
  source 1..20: mol_type = other RNA
tgggtggatgggtgtagggt

SEQ ID NO: 55074 - RNA, 20 nt, synthetic construct
  source 1..20: mol_type = other RNA
tgggtgtagggggaaaactc

SEQ ID NO: 55075 - RNA, 20 nt, synthetic construct
  source 1..20: mol_type = other RNA
tgggtgtagggtttggcagt

SEQ ID NO: 55076 - RNA, 20 nt, synthetic construct
  source 1..20: mol_type = other RNA
tgggtgtgcacgtttgcttt

SEQ ID NO: 55077 - RNA, 20 nt, synthetic construct
  source 1..20: mol_type = other RNA
tgggttaaaagttagctggc

SEQ ID NO: 55078 - RNA, 20 nt, synthetic construct
  source 1..20: mol_type = other RNA
tgggttattcacccaagaat

SEQ ID NO: 55079 - RNA, 20 nt, synthetic construct
  source 1..20: mol_type = other RNA
tgggttcaattatgtggaaa

SEQ ID NO: 55080 - RNA, 20 nt, synthetic construct
  source 1..20: mol_type = other RNA
tgggttcaggtgcctcctgc

SEQ ID NO: 55081 - RNA, 20 nt, synthetic construct
  source 1..20: mol_type = other RNA
tgggttctcaccaacatcca

SEQ ID NO: 55082 - RNA, 20 nt, synthetic construct
  source 1..20: mol_type = other RNA
tgggttctcccttctattcc

SEQ ID NO: 55083 - RNA, 20 nt, synthetic construct
  source 1..20: mol_type = other RNA
tgggttgatttttaatgaga

SEQ ID NO: 55084 - RNA, 20 nt, synthetic construct
  source 1..20: mol_type = other RNA
tgggttggaggagaaggcct

SEQ ID NO: 55085 - RNA, 20 nt, synthetic construct
  source 1..20: mol_type = other RNA
tgggtttaaaagagtgcaca

SEQ ID NO: 55086 - RNA, 20 nt, synthetic construct
  source 1..20: mol_type = other RNA
tgggtttaactgaggtgttt

SEQ ID NO: 55087 - RNA, 20 nt, synthetic construct
  source 1..20: mol_type = other RNA
tgggtttgagtttccagaaa

SEQ ID NO: 55088 - RNA, 20 nt, synthetic construct
  source 1..20: mol_type = other RNA
tggtaaaaagtgcttctagt

SEQ ID NO: 55089 - RNA, 20 nt, synthetic construct
  source 1..20: mol_type = other RNA
tggtaaaacaaattccctct

SEQ ID NO: 55090 - RNA, 20 nt, synthetic construct
  source 1..20: mol_type = other RNA
tggtaaaatcactaattcaa

SEQ ID NO: 55091 - RNA, 20 nt, synthetic construct
  source 1..20: mol_type = other RNA
tggtaaaatgtacataacaa

SEQ ID NO: 55092 - RNA, 20 nt, synthetic construct
  source 1..20: mol_type = other RNA
tggtaaaatgtggcaaattt

SEQ ID NO: 55093 - RNA, 20 nt, synthetic construct
  source 1..20: mol_type = other RNA
tggtaaacagcagtcttaac

SEQ ID NO: 55094 - RNA, 20 nt, synthetic construct
  source 1..20: mol_type = other RNA
tggtaaattggtcctggaaa

SEQ ID NO: 55095 - RNA, 20 nt, synthetic construct
  source 1..20: mol_type = other RNA
tggtaacagccaaataaaac

SEQ ID NO: 55096 - RNA, 20 nt, synthetic construct
  source 1..20: mol_type = other RNA
tggtaactagatgcctcgaa

SEQ ID NO: 55097 - RNA, 20 nt, synthetic construct
  source 1..20: mol_type = other RNA
tggtaactcctgttctttgg

SEQ ID NO: 55098 - RNA, 20 nt, synthetic construct
  source 1..20: mol_type = other RNA
tggtaactgatgtgaggatc

SEQ ID NO: 55099 - RNA, 20 nt, synthetic construct
  source 1..20: mol_type = other RNA
tggtaagagtgagaccctgt

SEQ ID NO: 55100 - RNA, 20 nt, synthetic construct
  source 1..20: mol_type = other RNA
tggtaagctgtgagtccttc

SEQ ID NO: 55101 - RNA, 20 nt, synthetic construct
  source 1..20: mol_type = other RNA
tggtaaggaaacagagtttt

SEQ ID NO: 55102 - RNA, 20 nt, synthetic construct
  source 1..20: mol_type = other RNA
tggtaaggactgaagtcctt

SEQ ID NO: 55103 - RNA, 20 nt, synthetic construct
  source 1..20: mol_type = other RNA
tggtaaggagccaaacatca

SEQ ID NO: 55104 - RNA, 20 nt, synthetic construct
  source 1..20: mol_type = other RNA
tggtaataatgaaagctccc

SEQ ID NO: 55105 - RNA, 20 nt, synthetic construct
  source 1..20: mol_type = other RNA
tggtaatacagtctgattta

SEQ ID NO: 55106 - RNA, 20 nt, synthetic construct
  source 1..20: mol_type = other RNA
tggtaatgaatagaaaatcc

SEQ ID NO: 55107 - RNA, 20 nt, synthetic construct
  source 1..20: mol_type = other RNA
tggtaatgggaaagacaggt

SEQ ID NO: 55108 - RNA, 20 nt, synthetic construct
  source 1..20: mol_type = other RNA
tggtaatgttatatttccgt

SEQ ID NO: 55109 - RNA, 20 nt, synthetic construct
  source 1..20: mol_type = other RNA
tggtaattggttcgtttgag

SEQ ID NO: 55110 - RNA, 20 nt, synthetic construct
  source 1..20: mol_type = other RNA
tggtaatttgtccatctgga

SEQ ID NO: 55111 - RNA, 20 nt, synthetic construct
  source 1..20: mol_type = other RNA
tggtaccaaagcagaaatac

SEQ ID NO: 55112 - RNA, 20 nt, synthetic construct
  source 1..20: mol_type = other RNA
tggtactctatgatatatac

SEQ ID NO: 55113 - RNA, 20 nt, synthetic construct
  source 1..20: mol_type = other RNA
tggtactgcctccacaggct

SEQ ID NO: 55114 - RNA, 20 nt, synthetic construct
  source 1..20: mol_type = other RNA
tggtactggtaccaaagcag

SEQ ID NO: 55115 - RNA, 20 nt, synthetic construct
  source 1..20: mol_type = other RNA
tggtagaccatataatctaa

SEQ ID NO: 55116 - RNA, 20 nt, synthetic construct
  source 1..20: mol_type = other RNA
tggtagaggattccaggttt

SEQ ID NO: 55117 - RNA, 20 nt, synthetic construct
  source 1..20: mol_type = other RNA
tggtagataccagacccttt

SEQ ID NO: 55118 - RNA, 20 nt, synthetic construct
  source 1..20: mol_type = other RNA
tggtagatttctgcatagag

SEQ ID NO: 55119 - RNA, 20 nt, synthetic construct
  source 1..20: mol_type = other RNA
tggtagcttgggctaaggtg

SEQ ID NO: 55120 - RNA, 20 nt, synthetic construct
  source 1..20: mol_type = other RNA
tggtaggccaaggcgggagg

SEQ ID NO: 55121 - RNA, 20 nt, synthetic construct
  source 1..20: mol_type = other RNA
tggtagggagggggctgagg

SEQ ID NO: 55122 - RNA, 20 nt, synthetic construct
  source 1..20: mol_type = other RNA
tggtaggtgctttttgtatc

SEQ ID NO: 55123 - RNA, 20 nt, synthetic construct
  source 1..20: mol_type = other RNA
tggtaggtgtgtgtaatccc

SEQ ID NO: 55124 - RNA, 20 nt, synthetic construct
  source 1..20: mol_type = other RNA
tggtagtaaggatcgttagt

SEQ ID NO: 55125 - RNA, 20 nt, synthetic construct
  source 1..20: mol_type = other RNA
tggtagtcaacacttttcca

SEQ ID NO: 55126 - RNA, 20 nt, synthetic construct
  source 1..20: mol_type = other RNA
tggtagtcaatgcaatgcgt

SEQ ID NO: 55127 - RNA, 20 nt, synthetic construct
  source 1..20: mol_type = other RNA
tggtagttacacaagtgttt

SEQ ID NO: 55128 - RNA, 20 nt, synthetic construct
  source 1..20: mol_type = other RNA
tggtagtttgcacgttttta

SEQ ID NO: 55129 - RNA, 20 nt, synthetic construct
  source 1..20: mol_type = other RNA
tggtatcactttttgtattt

SEQ ID NO: 55130 - RNA, 20 nt, synthetic construct
  source 1..20: mol_type = other RNA
tggtatctaccaaaaaacta

SEQ ID NO: 55131 - RNA, 20 nt, synthetic construct
  source 1..20: mol_type = other RNA
tggtatgagtgtttccctta

SEQ ID NO: 55132 - RNA, 20 nt, synthetic construct
  source 1..20: mol_type = other RNA
tggtatgcactgtactccta

SEQ ID NO: 55133 - RNA, 20 nt, synthetic construct
  source 1..20: mol_type = other RNA
tggtatgcatcttgaactaa

SEQ ID NO: 55134 - RNA, 20 nt, synthetic construct
  source 1..20: mol_type = other RNA
tggtatgggagatgtgtaat

SEQ ID NO: 55135 - RNA, 20 nt, synthetic construct
  source 1..20: mol_type = other RNA
tggtatgtgccatctcctta

SEQ ID NO: 55136 - RNA, 20 nt, synthetic construct
  source 1..20: mol_type = other RNA
tggtatgttgtgttttcatt

SEQ ID NO: 55137 - RNA, 20 nt, synthetic construct
  source 1..20: mol_type = other RNA
tggtattctatcatcaagac

SEQ ID NO: 55138 - RNA, 20 nt, synthetic construct
  source 1..20: mol_type = other RNA
tggtattctgaactttcaac

SEQ ID NO: 55139 - RNA, 20 nt, synthetic construct
  source 1..20: mol_type = other RNA
tggtattcttatccctacct

SEQ ID NO: 55140 - RNA, 20 nt, synthetic construct
  source 1..20: mol_type = other RNA
tggtatttaatctgtcagca

SEQ ID NO: 55141 - RNA, 20 nt, synthetic construct
  source 1..20: mol_type = other RNA
tggtattttaagattctctt

SEQ ID NO: 55142 - RNA, 20 nt, synthetic construct
  source 1..20: mol_type = other RNA
tggtattttttagagacagg

SEQ ID NO: 55143 - RNA, 20 nt, synthetic construct
  source 1..20: mol_type = other RNA
tggtcaaaactgtattttct

SEQ ID NO: 55144 - RNA, 20 nt, synthetic construct
  source 1..20: mol_type = other RNA
tggtcaaatcaatacttcat

SEQ ID NO: 55145 - RNA, 20 nt, synthetic construct
  source 1..20: mol_type = other RNA
tggtcaacagggtaagattc

SEQ ID NO: 55146 - RNA, 20 nt, synthetic construct
  source 1..20: mol_type = other RNA
tggtcaacatgaaaagatac

SEQ ID NO: 55147 - RNA, 20 nt, synthetic construct
  source 1..20: mol_type = other RNA
tggtcaattgatctgccagg

SEQ ID NO: 55148 - RNA, 20 nt, synthetic construct
  source 1..20: mol_type = other RNA
tggtcaatttcatcgtaaaa

SEQ ID NO: 55149 - RNA, 20 nt, synthetic construct
  source 1..20: mol_type = other RNA
tggtcacaaacacaaaacaa

SEQ ID NO: 55150 - RNA, 20 nt, synthetic construct
  source 1..20: mol_type = other RNA
tggtcacactttttgtgagt

SEQ ID NO: 55151 - RNA, 20 nt, synthetic construct
  source 1..20: mol_type = other RNA
tggtcactgctgatgtaagt

SEQ ID NO: 55152 - RNA, 20 nt, synthetic construct
  source 1..20: mol_type = other RNA
tggtcactggccactgattg

SEQ ID NO: 55153 - RNA, 20 nt, synthetic construct
  source 1..20: mol_type = other RNA
tggtcactgtttggacagta

SEQ ID NO: 55154 - RNA, 20 nt, synthetic construct
  source 1..20: mol_type = other RNA
tggtcagaaaaatggaatat

SEQ ID NO: 55155 - RNA, 20 nt, synthetic construct
  source 1..20: mol_type = other RNA
tggtcagagttgtatctgtg

SEQ ID NO: 55156 - RNA, 20 nt, synthetic construct
  source 1..20: mol_type = other RNA
tggtcagtactatcttccct

SEQ ID NO: 55157 - RNA, 20 nt, synthetic construct
  source 1..20: mol_type = other RNA
tggtccacagaggcttttta

SEQ ID NO: 55158 - RNA, 20 nt, synthetic construct
  source 1..20: mol_type = other RNA
tggtccagatgaagcaggga

SEQ ID NO: 55159 - RNA, 20 nt, synthetic construct
  source 1..20: mol_type = other RNA
tggtccctgctactcaggag

SEQ ID NO: 55160 - RNA, 20 nt, synthetic construct
  source 1..20: mol_type = other RNA
tggtcctgaactcgtggcct

SEQ ID NO: 55161 - RNA, 20 nt, synthetic construct
  source 1..20: mol_type = other RNA
tggtcctgagctttccttag

SEQ ID NO: 55162 - RNA, 20 nt, synthetic construct
  source 1..20: mol_type = other RNA
tggtcctgagggctttgtga

SEQ ID NO: 55163 - RNA, 20 nt, synthetic construct
  source 1..20: mol_type = other RNA
tggtcctgcatatgttttta

SEQ ID NO: 55164 - RNA, 20 nt, synthetic construct
  source 1..20: mol_type = other RNA
tggtcctggaaaaagaccat

SEQ ID NO: 55165 - RNA, 20 nt, synthetic construct
  source 1..20: mol_type = other RNA
tggtccttaaatttctaagg

SEQ ID NO: 55166 - RNA, 20 nt, synthetic construct
  source 1..20: mol_type = other RNA
tggtccttgctgaagaataa

SEQ ID NO: 55167 - RNA, 20 nt, synthetic construct
  source 1..20: mol_type = other RNA
tggtccttttttactgactt

SEQ ID NO: 55168 - RNA, 20 nt, synthetic construct
  source 1..20: mol_type = other RNA
tggtcgaaaacctgaaatgg

SEQ ID NO: 55169 - RNA, 20 nt, synthetic construct
  source 1..20: mol_type = other RNA
tggtcgagctgggtgatgtt

SEQ ID NO: 55170 - RNA, 20 nt, synthetic construct
  source 1..20: mol_type = other RNA
tggtctaccatgttgttctt

SEQ ID NO: 55171 - RNA, 20 nt, synthetic construct
  source 1..20: mol_type = other RNA
tggtctatctcattataaca

SEQ ID NO: 55172 - RNA, 20 nt, synthetic construct
  source 1..20: mol_type = other RNA
tggtctcaaactccaagtct

SEQ ID NO: 55173 - RNA, 20 nt, synthetic construct
  source 1..20: mol_type = other RNA
tggtctcaatctcctgatcc

SEQ ID NO: 55174 - RNA, 20 nt, synthetic construct
  source 1..20: mol_type = other RNA
tggtctcaccctcaggactc

SEQ ID NO: 55175 - RNA, 20 nt, synthetic construct
  source 1..20: mol_type = other RNA
tggtctcagctcctcagaag

SEQ ID NO: 55176 - RNA, 20 nt, synthetic construct
  source 1..20: mol_type = other RNA
tggtctcattcactagacac

SEQ ID NO: 55177 - RNA, 20 nt, synthetic construct
  source 1..20: mol_type = other RNA
tggtctcccagcatgaagcc

SEQ ID NO: 55178 - RNA, 20 nt, synthetic construct
  source 1..20: mol_type = other RNA
tggtctcctttctatacttc

SEQ ID NO: 55179 - RNA, 20 nt, synthetic construct
  source 1..20: mol_type = other RNA
tggtctcttcgagggggctg

SEQ ID NO: 55180 - RNA, 20 nt, synthetic construct
  source 1..20: mol_type = other RNA
tggtctgcagactcttgtcc

SEQ ID NO: 55181 - RNA, 20 nt, synthetic construct
  source 1..20: mol_type = other RNA
tggtctggaatgtgtagttc

SEQ ID NO: 55182 - RNA, 20 nt, synthetic construct
  source 1..20: mol_type = other RNA
tggtctgggtgatatctgta

SEQ ID NO: 55183 - RNA, 20 nt, synthetic construct
  source 1..20: mol_type = other RNA
tggtcttaagagactctcaa

SEQ ID NO: 55184 - RNA, 20 nt, synthetic construct
  source 1..20: mol_type = other RNA
tggtcttaccctctagctcc

SEQ ID NO: 55185 - RNA, 20 nt, synthetic construct
  source 1..20: mol_type = other RNA
tggtcttgtactcccagcct

SEQ ID NO: 55186 - RNA, 20 nt, synthetic construct
  source 1..20: mol_type = other RNA
tggtcttgtctcaacctttg

SEQ ID NO: 55187 - RNA, 20 nt, synthetic construct
  source 1..20: mol_type = other RNA
tggtctttctcccaggtcag

SEQ ID NO: 55188 - RNA, 20 nt, synthetic construct
  source 1..20: mol_type = other RNA
tggtcttttgattttttaac

SEQ ID NO: 55189 - RNA, 20 nt, synthetic construct
  source 1..20: mol_type = other RNA
tggtctttttccaggaccaa

SEQ ID NO: 55190 - RNA, 20 nt, synthetic construct
  source 1..20: mol_type = other RNA
tggtgaaaaaatggtgcagc

SEQ ID NO: 55191 - RNA, 20 nt, synthetic construct
  source 1..20: mol_type = other RNA
tggtgaactgggtgtagggg

SEQ ID NO: 55192 - RNA, 20 nt, synthetic construct
  source 1..20: mol_type = other RNA
tggtgaagaatgtgaaaaat

SEQ ID NO: 55193 - RNA, 20 nt, synthetic construct
  source 1..20: mol_type = other RNA
tggtgaagagagcctgtggt

SEQ ID NO: 55194 - RNA, 20 nt, synthetic construct
  source 1..20: mol_type = other RNA
tggtgaaggttcatgaacat

SEQ ID NO: 55195 - RNA, 20 nt, synthetic construct
  source 1..20: mol_type = other RNA
tggtgaatctgagtaaaggg

SEQ ID NO: 55196 - RNA, 20 nt, synthetic construct
  source 1..20: mol_type = other RNA
tggtgactgaattcccacaa

SEQ ID NO: 55197 - RNA, 20 nt, synthetic construct
  source 1..20: mol_type = other RNA
tggtgagaacccagtgtctg

SEQ ID NO: 55198 - RNA, 20 nt, synthetic construct
  source 1..20: mol_type = other RNA
tggtgataactggtgctttt

SEQ ID NO: 55199 - RNA, 20 nt, synthetic construct
  source 1..20: mol_type = other RNA
tggtgatacctcttactaaa

SEQ ID NO: 55200 - RNA, 20 nt, synthetic construct
  source 1..20: mol_type = other RNA
tggtgatcctaagccatcta

SEQ ID NO: 55201 - RNA, 20 nt, synthetic construct
  source 1..20: mol_type = other RNA
tggtgatctatgaatttgcc

SEQ ID NO: 55202 - RNA, 20 nt, synthetic construct
  source 1..20: mol_type = other RNA
tggtgatgctaacgtgcttg

SEQ ID NO: 55203 - RNA, 20 nt, synthetic construct
  source 1..20: mol_type = other RNA
tggtgattaaagttatttct

SEQ ID NO: 55204 - RNA, 20 nt, synthetic construct
  source 1..20: mol_type = other RNA
tggtgcaaggataaacaaag

SEQ ID NO: 55205 - RNA, 20 nt, synthetic construct
  source 1..20: mol_type = other RNA
tggtgcaatcacggctgatt

SEQ ID NO: 55206 - RNA, 20 nt, synthetic construct
  source 1..20: mol_type = other RNA
tggtgcaatgataggtcact

SEQ ID NO: 55207 - RNA, 20 nt, synthetic construct
  source 1..20: mol_type = other RNA
tggtgcagccactatagaaa

SEQ ID NO: 55208 - RNA, 20 nt, synthetic construct
  source 1..20: mol_type = other RNA
tggtgcaggccagatatcca

SEQ ID NO: 55209 - RNA, 20 nt, synthetic construct
  source 1..20: mol_type = other RNA
tggtgcatttgggacagcct

SEQ ID NO: 55210 - RNA, 20 nt, synthetic construct
  source 1..20: mol_type = other RNA
tggtgctgataaatggcttt

SEQ ID NO: 55211 - RNA, 20 nt, synthetic construct
  source 1..20: mol_type = other RNA
tggtgctgatttaaaatttt

SEQ ID NO: 55212 - RNA, 20 nt, synthetic construct
  source 1..20: mol_type = other RNA
tggtgctgcacgtctgtggt

SEQ ID NO: 55213 - RNA, 20 nt, synthetic construct
  source 1..20: mol_type = other RNA
tggtgctggactggagggat

SEQ ID NO: 55214 - RNA, 20 nt, synthetic construct
  source 1..20: mol_type = other RNA
tggtgctggcagccttctct

SEQ ID NO: 55215 - RNA, 20 nt, synthetic construct
  source 1..20: mol_type = other RNA
tggtgcttaattcaaacaaa

SEQ ID NO: 55216 - RNA, 20 nt, synthetic construct
  source 1..20: mol_type = other RNA
tggtgcttagctgcctcttc

SEQ ID NO: 55217 - RNA, 20 nt, synthetic construct
  source 1..20: mol_type = other RNA
tggtgcttccttctcttata

SEQ ID NO: 55218 - RNA, 20 nt, synthetic construct
  source 1..20: mol_type = other RNA
tggtgcttgaactgctggtc

SEQ ID NO: 55219 - RNA, 20 nt, synthetic construct
  source 1..20: mol_type = other RNA
tggtgctttctatctctcag

SEQ ID NO: 55220 - RNA, 20 nt, synthetic construct
  source 1..20: mol_type = other RNA
tggtgcttttgctgcatccc

SEQ ID NO: 55221 - RNA, 20 nt, synthetic construct
  source 1..20: mol_type = other RNA
tggtgcttttttggtgtttt

SEQ ID NO: 55222 - RNA, 20 nt, synthetic construct
  source 1..20: mol_type = other RNA
tggtggacaaaaaacgcggc

SEQ ID NO: 55223 - RNA, 20 nt, synthetic construct
  source 1..20: mol_type = other RNA
tggtggagtattctagttct

SEQ ID NO: 55224 - RNA, 20 nt, synthetic construct
  source 1..20: mol_type = other RNA
tggtggatagagagattcaa

SEQ ID NO: 55225 - RNA, 20 nt, synthetic construct
  source 1..20: mol_type = other RNA
tggtggcccacacctgcaat

SEQ ID NO: 55226 - RNA, 20 nt, synthetic construct
  source 1..20: mol_type = other RNA
tggtggcggatgccggtaat

SEQ ID NO: 55227 - RNA, 20 nt, synthetic construct
  source 1..20: mol_type = other RNA
tggtgggagaggcatgccgg

SEQ ID NO: 55228 - RNA, 20 nt, synthetic construct
  source 1..20: mol_type = other RNA
tggtgggatctctgggctca

SEQ ID NO: 55229 - RNA, 20 nt, synthetic construct
  source 1..20: mol_type = other RNA
tggtgggccttgcaagccac

SEQ ID NO: 55230 - RNA, 20 nt, synthetic construct
  source 1..20: mol_type = other RNA
tggtgggctttgagaaaggt

SEQ ID NO: 55231 - RNA, 20 nt, synthetic construct
  source 1..20: mol_type = other RNA
tggtgggttcatgccattct

SEQ ID NO: 55232 - RNA, 20 nt, synthetic construct
  source 1..20: mol_type = other RNA
tggtggtaactgatgtgagg

SEQ ID NO: 55233 - RNA, 20 nt, synthetic construct
  source 1..20: mol_type = other RNA
tggtggtaggtgtgtgtaat

SEQ ID NO: 55234 - RNA, 20 nt, synthetic construct
  source 1..20: mol_type = other RNA
tggtggtagtaaggatcgtt

SEQ ID NO: 55235 - RNA, 20 nt, synthetic construct
  source 1..20: mol_type = other RNA
tggtggtatgcactgtactc

SEQ ID NO: 55236 - RNA, 20 nt, synthetic construct
  source 1..20: mol_type = other RNA
tggtggtctcaccctcagga

SEQ ID NO: 55237 - RNA, 20 nt, synthetic construct
  source 1..20: mol_type = other RNA
tggtgtaaaatacaacagca

SEQ ID NO: 55238 - RNA, 20 nt, synthetic construct
  source 1..20: mol_type = other RNA
tggtgtcatttttaagaaat

SEQ ID NO: 55239 - RNA, 20 nt, synthetic construct
  source 1..20: mol_type = other RNA
tggtgtccttctgagaaggc

SEQ ID NO: 55240 - RNA, 20 nt, synthetic construct
  source 1..20: mol_type = other RNA
tggtgtcgtttatttcttct

SEQ ID NO: 55241 - RNA, 20 nt, synthetic construct
  source 1..20: mol_type = other RNA
tggtgtgaagttgggcttaa

SEQ ID NO: 55242 - RNA, 20 nt, synthetic construct
  source 1..20: mol_type = other RNA
tggtgtgatctctgctcacc

SEQ ID NO: 55243 - RNA, 20 nt, synthetic construct
  source 1..20: mol_type = other RNA
tggtgtgctcttttcatcac

SEQ ID NO: 55244 - RNA, 20 nt, synthetic construct
  source 1..20: mol_type = other RNA
tggtgtgcttctgataggaa

SEQ ID NO: 55245 - RNA, 20 nt, synthetic construct
  source 1..20: mol_type = other RNA
tggtgtggcatgtctgtagt

SEQ ID NO: 55246 - RNA, 20 nt, synthetic construct
  source 1..20: mol_type = other RNA
tggtgtggtcttgtctcaac

SEQ ID NO: 55247 - RNA, 20 nt, synthetic construct
  source 1..20: mol_type = other RNA
tggtgtgtctgcgccttaaa

SEQ ID NO: 55248 - RNA, 20 nt, synthetic construct
  source 1..20: mol_type = other RNA
tggtgtgtgactgtagtccc

SEQ ID NO: 55249 - RNA, 20 nt, synthetic construct
  source 1..20: mol_type = other RNA
tggtgtgtgcaaaggattag

SEQ ID NO: 55250 - RNA, 20 nt, synthetic construct
  source 1..20: mol_type = other RNA
tggtgttaaatatttactac

SEQ ID NO: 55251 - RNA, 20 nt, synthetic construct
  source 1..20: mol_type = other RNA
tggtgttaggcaatccttcc

SEQ ID NO: 55252 - RNA, 20 nt, synthetic construct
  source 1..20: mol_type = other RNA
tggtgttatttgttctgtca

SEQ ID NO: 55253 - RNA, 20 nt, synthetic construct
  source 1..20: mol_type = other RNA
tggtgttgactgaattaatc

SEQ ID NO: 55254 - RNA, 20 nt, synthetic construct
  source 1..20: mol_type = other RNA
tggtgttgcttgctctacaa

SEQ ID NO: 55255 - RNA, 20 nt, synthetic construct
  source 1..20: mol_type = other RNA
tggtgtttctgacaggtggt

SEQ ID NO: 55256 - RNA, 20 nt, synthetic construct
  source 1..20: mol_type = other RNA
tggtgtttttctaggtagtt

SEQ ID NO: 55257 - RNA, 20 nt, synthetic construct
  source 1..20: mol_type = other RNA
tggttaaacttggtctgggt

SEQ ID NO: 55258 - RNA, 20 nt, synthetic construct
  source 1..20: mol_type = other RNA
tggttaagactgctgtttac

SEQ ID NO: 55259 - RNA, 20 nt, synthetic construct
  source 1..20: mol_type = other RNA
tggttaatagtgaccctttg

SEQ ID NO: 55260 - RNA, 20 nt, synthetic construct
  source 1..20: mol_type = other RNA
tggttaatattacagaagaa

SEQ ID NO: 55261 - RNA, 20 nt, synthetic construct
  source 1..20: mol_type = other RNA
tggttagactgcacataaaa

SEQ ID NO: 55262 - RNA, 20 nt, synthetic construct
  source 1..20: mol_type = other RNA
tggttaggaaaatacatgag

SEQ ID NO: 55263 - RNA, 20 nt, synthetic construct
  source 1..20: mol_type = other RNA
tggttagggagactttcact

SEQ ID NO: 55264 - RNA, 20 nt, synthetic construct
  source 1..20: mol_type = other RNA
tggttagtgttgtttttaaa

SEQ ID NO: 55265 - RNA, 20 nt, synthetic construct
  source 1..20: mol_type = other RNA
tggttatagccataagagtc

SEQ ID NO: 55266 - RNA, 20 nt, synthetic construct
  source 1..20: mol_type = other RNA
tggttatctgtacttttaaa

SEQ ID NO: 55267 - RNA, 20 nt, synthetic construct
  source 1..20: mol_type = other RNA
tggttatgcgaatttacttt

SEQ ID NO: 55268 - RNA, 20 nt, synthetic construct
  source 1..20: mol_type = other RNA
tggttattcatgtttgtggt

SEQ ID NO: 55269 - RNA, 20 nt, synthetic construct
  source 1..20: mol_type = other RNA
tggttattgagtctgtaggg

SEQ ID NO: 55270 - RNA, 20 nt, synthetic construct
  source 1..20: mol_type = other RNA
tggttcaagctatgctcctg

SEQ ID NO: 55271 - RNA, 20 nt, synthetic construct
  source 1..20: mol_type = other RNA
tggttcacacctgtagtccc

SEQ ID NO: 55272 - RNA, 20 nt, synthetic construct
  source 1..20: mol_type = other RNA
tggttcacttgaaacctgcc

SEQ ID NO: 55273 - RNA, 20 nt, synthetic construct
  source 1..20: mol_type = other RNA
tggttcataatatatcacaa

SEQ ID NO: 55274 - RNA, 20 nt, synthetic construct
  source 1..20: mol_type = other RNA
tggttcatatttcccttttg

SEQ ID NO: 55275 - RNA, 20 nt, synthetic construct
  source 1..20: mol_type = other RNA
tggttcatttcaggaatgca

SEQ ID NO: 55276 - RNA, 20 nt, synthetic construct
  source 1..20: mol_type = other RNA
tggttccaaacttctgacct

SEQ ID NO: 55277 - RNA, 20 nt, synthetic construct
  source 1..20: mol_type = other RNA
tggttccatttgttttgtgt

SEQ ID NO: 55278 - RNA, 20 nt, synthetic construct
  source 1..20: mol_type = other RNA
tggttcctagaaaatttaat

SEQ ID NO: 55279 - RNA, 20 nt, synthetic construct
  source 1..20: mol_type = other RNA
tggttcgtttgaggcttttc

SEQ ID NO: 55280 - RNA, 20 nt, synthetic construct
  source 1..20: mol_type = other RNA
tggttctgcctaatctctag

SEQ ID NO: 55281 - RNA, 20 nt, synthetic construct
  source 1..20: mol_type = other RNA
tggttctgcgtgttatttta

SEQ ID NO: 55282 - RNA, 20 nt, synthetic construct
  source 1..20: mol_type = other RNA
tggttctgtgctagatgcta

SEQ ID NO: 55283 - RNA, 20 nt, synthetic construct
  source 1..20: mol_type = other RNA
tggttcttaagatgatataa

SEQ ID NO: 55284 - RNA, 20 nt, synthetic construct
  source 1..20: mol_type = other RNA
tggttgaagaaagtaggaat

SEQ ID NO: 55285 - RNA, 20 nt, synthetic construct
  source 1..20: mol_type = other RNA
tggttgacccataaactgaa

SEQ ID NO: 55286 - RNA, 20 nt, synthetic construct
  source 1..20: mol_type = other RNA
tggttgcacaatgttgtgga

SEQ ID NO: 55287 - RNA, 20 nt, synthetic construct
  source 1..20: mol_type = other RNA
tggttggaaaacttttaact

SEQ ID NO: 55288 - RNA, 20 nt, synthetic construct
  source 1..20: mol_type = other RNA
tggttggaaaagaaagctgt

SEQ ID NO: 55289 - RNA, 20 nt, synthetic construct
  source 1..20: mol_type = other RNA
tggttggaagtttctggaag

SEQ ID NO: 55290 - RNA, 20 nt, synthetic construct
  source 1..20: mol_type = other RNA
tggttggactccaccctgcc

SEQ ID NO: 55291 - RNA, 20 nt, synthetic construct
  source 1..20: mol_type = other RNA
tggttggccgaggccagtcc

SEQ ID NO: 55292 - RNA, 20 nt, synthetic construct
  source 1..20: mol_type = other RNA
tggttgtgcttcgaggtcgc

SEQ ID NO: 55293 - RNA, 20 nt, synthetic construct
  source 1..20: mol_type = other RNA
tggttgtggaattaactcca

SEQ ID NO: 55294 - RNA, 20 nt, synthetic construct
  source 1..20: mol_type = other RNA
tggttgttggctaaaagacc

SEQ ID NO: 55295 - RNA, 20 nt, synthetic construct
  source 1..20: mol_type = other RNA
tggtttaacacatacaaacc

SEQ ID NO: 55296 - RNA, 20 nt, synthetic construct
  source 1..20: mol_type = other RNA
tggtttaaggtaagggtcca

SEQ ID NO: 55297 - RNA, 20 nt, synthetic construct
  source 1..20: mol_type = other RNA
tggtttacaatggttcataa

SEQ ID NO: 55298 - RNA, 20 nt, synthetic construct
  source 1..20: mol_type = other RNA
tggtttaggctgtctccaac

SEQ ID NO: 55299 - RNA, 20 nt, synthetic construct
  source 1..20: mol_type = other RNA
tggtttattcatataatgga

SEQ ID NO: 55300 - RNA, 20 nt, synthetic construct
  source 1..20: mol_type = other RNA
tggtttattttctgcatttg

SEQ ID NO: 55301 - RNA, 20 nt, synthetic construct
  source 1..20: mol_type = other RNA
tggtttcacacgcattgcat

SEQ ID NO: 55302 - RNA, 20 nt, synthetic construct
  source 1..20: mol_type = other RNA
tggtttcagtacacgaaaat

SEQ ID NO: 55303 - RNA, 20 nt, synthetic construct
  source 1..20: mol_type = other RNA
tggtttcagtccctcctttc

SEQ ID NO: 55304 - RNA, 20 nt, synthetic construct
  source 1..20: mol_type = other RNA
tggtttcataaaatgatggc

SEQ ID NO: 55305 - RNA, 20 nt, synthetic construct
  source 1..20: mol_type = other RNA
tggtttctccttctgcaggc

SEQ ID NO: 55306 - RNA, 20 nt, synthetic construct
  source 1..20: mol_type = other RNA
tggtttctgacacccgaccc

SEQ ID NO: 55307 - RNA, 20 nt, synthetic construct
  source 1..20: mol_type = other RNA
tggtttctgcatacttagct

SEQ ID NO: 55308 - RNA, 20 nt, synthetic construct
  source 1..20: mol_type = other RNA
tggtttcttcaagatactgc

SEQ ID NO: 55309 - RNA, 20 nt, synthetic construct
  source 1..20: mol_type = other RNA
tggtttcttgaatctctcta

SEQ ID NO: 55310 - RNA, 20 nt, synthetic construct
  source 1..20: mol_type = other RNA
tggtttgaaatgatcttttg

SEQ ID NO: 55311 - RNA, 20 nt, synthetic construct
  source 1..20: mol_type = other RNA
tggtttgaaccccagaaggt

SEQ ID NO: 55312 - RNA, 20 nt, synthetic construct
  source 1..20: mol_type = other RNA
tggtttgaagcttcacttct

SEQ ID NO: 55313 - RNA, 20 nt, synthetic construct
  source 1..20: mol_type = other RNA
tggtttgatcccactagtgg

SEQ ID NO: 55314 - RNA, 20 nt, synthetic construct
  source 1..20: mol_type = other RNA
tggtttgattgttccagggg

SEQ ID NO: 55315 - RNA, 20 nt, synthetic construct
  source 1..20: mol_type = other RNA
tggtttgcaaaaattttgtt

SEQ ID NO: 55316 - RNA, 20 nt, synthetic construct
  source 1..20: mol_type = other RNA
tggtttgccttttcactctt

SEQ ID NO: 55317 - RNA, 20 nt, synthetic construct
  source 1..20: mol_type = other RNA
tggtttgctttggagtcaca

SEQ ID NO: 55318 - RNA, 20 nt, synthetic construct
  source 1..20: mol_type = other RNA
tggtttggggcttttgaaca

SEQ ID NO: 55319 - RNA, 20 nt, synthetic construct
  source 1..20: mol_type = other RNA
tggtttgtatgtgttaaacc

SEQ ID NO: 55320 - RNA, 20 nt, synthetic construct
  source 1..20: mol_type = other RNA
tggtttgtgtgtttgtgaaa

SEQ ID NO: 55321 - RNA, 20 nt, synthetic construct
  source 1..20: mol_type = other RNA
tggttttaacctcttgaagt

SEQ ID NO: 55322 - RNA, 20 nt, synthetic construct
  source 1..20: mol_type = other RNA
tggttttaatgggcattaga

SEQ ID NO: 55323 - RNA, 20 nt, synthetic construct
  source 1..20: mol_type = other RNA
tggttttactactgtactgt

SEQ ID NO: 55324 - RNA, 20 nt, synthetic construct
  source 1..20: mol_type = other RNA
tggttttatggtaactcctg

SEQ ID NO: 55325 - RNA, 20 nt, synthetic construct
  source 1..20: mol_type = other RNA
tggttttcctactaacaaga

SEQ ID NO: 55326 - RNA, 20 nt, synthetic construct
  source 1..20: mol_type = other RNA
tggttttcctgatggacatt

SEQ ID NO: 55327 - RNA, 20 nt, synthetic construct
  source 1..20: mol_type = other RNA
tggttttctggaggctagaa

SEQ ID NO: 55328 - RNA, 20 nt, synthetic construct
  source 1..20: mol_type = other RNA
tggttttgactcagtacttc

SEQ ID NO: 55329 - RNA, 20 nt, synthetic construct
  source 1..20: mol_type = other RNA
tggttttgatcatcgcatta

SEQ ID NO: 55330 - RNA, 20 nt, synthetic construct
  source 1..20: mol_type = other RNA
tggtttttatggaataatgg

SEQ ID NO: 55331 - RNA, 20 nt, synthetic construct
  source 1..20: mol_type = other RNA
tggtttttggttcacttgaa

SEQ ID NO: 55332 - RNA, 20 nt, synthetic construct
  source 1..20: mol_type = other RNA
tggttttttcccccctggaa

SEQ ID NO: 55333 - RNA, 20 nt, synthetic construct
  source 1..20: mol_type = other RNA
tgtaaaaactgtttggctgg

SEQ ID NO: 55334 - RNA, 20 nt, synthetic construct
  source 1..20: mol_type = other RNA
tgtaaaaatatagaaggcca

SEQ ID NO: 55335 - RNA, 20 nt, synthetic construct
  source 1..20: mol_type = other RNA
tgtaaaaattttctcccaag

SEQ ID NO: 55336 - RNA, 20 nt, synthetic construct
  source 1..20: mol_type = other RNA
tgtaaaacagacccttatgt

SEQ ID NO: 55337 - RNA, 20 nt, synthetic construct
  source 1..20: mol_type = other RNA
tgtaaaacatcaaagtcccc

SEQ ID NO: 55338 - RNA, 20 nt, synthetic construct
  source 1..20: mol_type = other RNA
tgtaaaacatctggaaggaa

SEQ ID NO: 55339 - RNA, 20 nt, synthetic construct
  source 1..20: mol_type = other RNA
tgtaaaaggctaattttttc

SEQ ID NO: 55340 - RNA, 20 nt, synthetic construct
  source 1..20: mol_type = other RNA
tgtaaaatacaacagcacct

SEQ ID NO: 55341 - RNA, 20 nt, synthetic construct
  source 1..20: mol_type = other RNA
tgtaaacaatgctgctatga

SEQ ID NO: 55342 - RNA, 20 nt, synthetic construct
  source 1..20: mol_type = other RNA
tgtaaacactgttctgcgtg

SEQ ID NO: 55343 - RNA, 20 nt, synthetic construct
  source 1..20: mol_type = other RNA
tgtaaacagcatactgtgga

SEQ ID NO: 55344 - RNA, 20 nt, synthetic construct
  source 1..20: mol_type = other RNA
tgtaaacatgaacaagttac

SEQ ID NO: 55345 - RNA, 20 nt, synthetic construct
  source 1..20: mol_type = other RNA
tgtaaaccatatggttaata

SEQ ID NO: 55346 - RNA, 20 nt, synthetic construct
  source 1..20: mol_type = other RNA
tgtaaacctggaatcctcta

SEQ ID NO: 55347 - RNA, 20 nt, synthetic construct
  source 1..20: mol_type = other RNA
tgtaaactgttggaaaaatc

SEQ ID NO: 55348 - RNA, 20 nt, synthetic construct
  source 1..20: mol_type = other RNA
tgtaaagtaatcaagtgaaa

SEQ ID NO: 55349 - RNA, 20 nt, synthetic construct
  source 1..20: mol_type = other RNA
tgtaaagtttctctctccct

SEQ ID NO: 55350 - RNA, 20 nt, synthetic construct
  source 1..20: mol_type = other RNA
tgtaaatgaaacacttgtgt

SEQ ID NO: 55351 - RNA, 20 nt, synthetic construct
  source 1..20: mol_type = other RNA
tgtaaattcctaactcaaga

SEQ ID NO: 55352 - RNA, 20 nt, synthetic construct
  source 1..20: mol_type = other RNA
tgtaaattctgccacattca

SEQ ID NO: 55353 - RNA, 20 nt, synthetic construct
  source 1..20: mol_type = other RNA
tgtaacaaagatgccacaaa

SEQ ID NO: 55354 - RNA, 20 nt, synthetic construct
  source 1..20: mol_type = other RNA
tgtaacacagttctagttct

SEQ ID NO: 55355 - RNA, 20 nt, synthetic construct
  source 1..20: mol_type = other RNA
tgtaacacatatttatcaac

SEQ ID NO: 55356 - RNA, 20 nt, synthetic construct
  source 1..20: mol_type = other RNA
tgtaacagaggcatgcacgg

SEQ ID NO: 55357 - RNA, 20 nt, synthetic construct
  source 1..20: mol_type = other RNA
tgtaacatacacatcagatt

SEQ ID NO: 55358 - RNA, 20 nt, synthetic construct
  source 1..20: mol_type = other RNA
tgtaacatgttagattagga

SEQ ID NO: 55359 - RNA, 20 nt, synthetic construct
  source 1..20: mol_type = other RNA
tgtaaccctgtttcccttaa

SEQ ID NO: 55360 - RNA, 20 nt, synthetic construct
  source 1..20: mol_type = other RNA
tgtaacctccacctcccaga

SEQ ID NO: 55361 - RNA, 20 nt, synthetic construct
  source 1..20: mol_type = other RNA
tgtaacgtgtatagcttttt

SEQ ID NO: 55362 - RNA, 20 nt, synthetic construct
  source 1..20: mol_type = other RNA
tgtaactaattactgtttct

SEQ ID NO: 55363 - RNA, 20 nt, synthetic construct
  source 1..20: mol_type = other RNA
tgtaactacagacatgccac

SEQ ID NO: 55364 - RNA, 20 nt, synthetic construct
  source 1..20: mol_type = other RNA
tgtaactgacttcaagaggt

SEQ ID NO: 55365 - RNA, 20 nt, synthetic construct
  source 1..20: mol_type = other RNA
tgtaacttgaattcagatgg

SEQ ID NO: 55366 - RNA, 20 nt, synthetic construct
  source 1..20: mol_type = other RNA
tgtaacttgcttaggctgaa

SEQ ID NO: 55367 - RNA, 20 nt, synthetic construct
  source 1..20: mol_type = other RNA
tgtaacttgttcatgtttac

SEQ ID NO: 55368 - RNA, 20 nt, synthetic construct
  source 1..20: mol_type = other RNA
tgtaagaaatgccacatttt

SEQ ID NO: 55369 - RNA, 20 nt, synthetic construct
  source 1..20: mol_type = other RNA
tgtaagacaatgtctttggc

SEQ ID NO: 55370 - RNA, 20 nt, synthetic construct
  source 1..20: mol_type = other RNA
tgtaagagattaattcagtc

SEQ ID NO: 55371 - RNA, 20 nt, synthetic construct
  source 1..20: mol_type = other RNA
tgtaagcacacatgaacctg

SEQ ID NO: 55372 - RNA, 20 nt, synthetic construct
  source 1..20: mol_type = other RNA
tgtaagcacctgtataaata

SEQ ID NO: 55373 - RNA, 20 nt, synthetic construct
  source 1..20: mol_type = other RNA
tgtaagctgaactctgtgga

SEQ ID NO: 55374 - RNA, 20 nt, synthetic construct
  source 1..20: mol_type = other RNA
tgtaagctggtaatacagtc

SEQ ID NO: 55375 - RNA, 20 nt, synthetic construct
  source 1..20: mol_type = other RNA
tgtaaggtgcacgctgtgaa

SEQ ID NO: 55376 - RNA, 20 nt, synthetic construct
  source 1..20: mol_type = other RNA
tgtaaggtgtttggtgaatt

SEQ ID NO: 55377 - RNA, 20 nt, synthetic construct
  source 1..20: mol_type = other RNA
tgtaagtcagttaacagtgc

SEQ ID NO: 55378 - RNA, 20 nt, synthetic construct
  source 1..20: mol_type = other RNA
tgtaagtcatcaaaggaagg

SEQ ID NO: 55379 - RNA, 20 nt, synthetic construct
  source 1..20: mol_type = other RNA
tgtaagtgggaggaggtcat

SEQ ID NO: 55380 - RNA, 20 nt, synthetic construct
  source 1..20: mol_type = other RNA
tgtaagttcctggactgtga

SEQ ID NO: 55381 - RNA, 20 nt, synthetic construct
  source 1..20: mol_type = other RNA
tgtaagttggattcccaggt

SEQ ID NO: 55382 - RNA, 20 nt, synthetic construct
  source 1..20: mol_type = other RNA
tgtaataacttggagaactt

SEQ ID NO: 55383 - RNA, 20 nt, synthetic construct
  source 1..20: mol_type = other RNA
tgtaatactgtagaatgttt

SEQ ID NO: 55384 - RNA, 20 nt, synthetic construct
  source 1..20: mol_type = other RNA
tgtaatatacttgtcaagtt

SEQ ID NO: 55385 - RNA, 20 nt, synthetic construct
  source 1..20: mol_type = other RNA
tgtaatattaaccaagaaca

SEQ ID NO: 55386 - RNA, 20 nt, synthetic construct
  source 1..20: mol_type = other RNA
tgtaatattgtatataccct

SEQ ID NO: 55387 - RNA, 20 nt, synthetic construct
  source 1..20: mol_type = other RNA
tgtaatcaagtatctccctg

SEQ ID NO: 55388 - RNA, 20 nt, synthetic construct
  source 1..20: mol_type = other RNA
tgtaatcacagtacgctttt

SEQ ID NO: 55389 - RNA, 20 nt, synthetic construct
  source 1..20: mol_type = other RNA
tgtaatcctgtttctctaca

SEQ ID NO: 55390 - RNA, 20 nt, synthetic construct
  source 1..20: mol_type = other RNA
tgtaatctaaggattatggc

SEQ ID NO: 55391 - RNA, 20 nt, synthetic construct
  source 1..20: mol_type = other RNA
tgtaatctcatggaagttat

SEQ ID NO: 55392 - RNA, 20 nt, synthetic construct
  source 1..20: mol_type = other RNA
tgtaatgaaaatatgaatgg

SEQ ID NO: 55393 - RNA, 20 nt, synthetic construct
  source 1..20: mol_type = other RNA
tgtaatgacctggaaattat

SEQ ID NO: 55394 - RNA, 20 nt, synthetic construct
  source 1..20: mol_type = other RNA
tgtaatgagctgagattgcc

SEQ ID NO: 55395 - RNA, 20 nt, synthetic construct
  source 1..20: mol_type = other RNA
tgtaatgcaaactctaaata

SEQ ID NO: 55396 - RNA, 20 nt, synthetic construct
  source 1..20: mol_type = other RNA
tgtaatggatcaaggcacag

SEQ ID NO: 55397 - RNA, 20 nt, synthetic construct
  source 1..20: mol_type = other RNA
tgtaatgtctcctctttcat

SEQ ID NO: 55398 - RNA, 20 nt, synthetic construct
  source 1..20: mol_type = other RNA
tgtaatgttacttctcagct

SEQ ID NO: 55399 - RNA, 20 nt, synthetic construct
  source 1..20: mol_type = other RNA
tgtaatgtttgtacttctac

SEQ ID NO: 55400 - RNA, 20 nt, synthetic construct
  source 1..20: mol_type = other RNA
tgtaattacaggggactttg

SEQ ID NO: 55401 - RNA, 20 nt, synthetic construct
  source 1..20: mol_type = other RNA
tgtaattacatacttcaaag

SEQ ID NO: 55402 - RNA, 20 nt, synthetic construct
  source 1..20: mol_type = other RNA
tgtaattcatcctactagta

SEQ ID NO: 55403 - RNA, 20 nt, synthetic construct
  source 1..20: mol_type = other RNA
tgtaattgtaccttggagag

SEQ ID NO: 55404 - RNA, 20 nt, synthetic construct
  source 1..20: mol_type = other RNA
tgtaatttttaaaagagcga

SEQ ID NO: 55405 - RNA, 20 nt, synthetic construct
  source 1..20: mol_type = other RNA
tgtacaaagatttaccccta

SEQ ID NO: 55406 - RNA, 20 nt, synthetic construct
  source 1..20: mol_type = other RNA
tgtacaacattcatccctct

SEQ ID NO: 55407 - RNA, 20 nt, synthetic construct
  source 1..20: mol_type = other RNA
tgtacaatgaattagcaatg

SEQ ID NO: 55408 - RNA, 20 nt, synthetic construct
  source 1..20: mol_type = other RNA
tgtacaatggggctttactg

SEQ ID NO: 55409 - RNA, 20 nt, synthetic construct
  source 1..20: mol_type = other RNA
tgtacaattaggctgtttga

SEQ ID NO: 55410 - RNA, 20 nt, synthetic construct
  source 1..20: mol_type = other RNA
tgtacaattcggtggcatta

SEQ ID NO: 55411 - RNA, 20 nt, synthetic construct
  source 1..20: mol_type = other RNA
tgtacaattttcttaccctt

SEQ ID NO: 55412 - RNA, 20 nt, synthetic construct
  source 1..20: mol_type = other RNA
tgtacacctcaaactagaaa

SEQ ID NO: 55413 - RNA, 20 nt, synthetic construct
  source 1..20: mol_type = other RNA
tgtacacgtcttgtcaataa

SEQ ID NO: 55414 - RNA, 20 nt, synthetic construct
  source 1..20: mol_type = other RNA
tgtacacttaaaaacagtta

SEQ ID NO: 55415 - RNA, 20 nt, synthetic construct
  source 1..20: mol_type = other RNA
tgtacagtaattgtagtttc

SEQ ID NO: 55416 - RNA, 20 nt, synthetic construct
  source 1..20: mol_type = other RNA
tgtacatgaagtcctcaatc

SEQ ID NO: 55417 - RNA, 20 nt, synthetic construct
  source 1..20: mol_type = other RNA
tgtacatgacctatctatta

SEQ ID NO: 55418 - RNA, 20 nt, synthetic construct
  source 1..20: mol_type = other RNA
tgtacatttaaaattgcaga

SEQ ID NO: 55419 - RNA, 20 nt, synthetic construct
  source 1..20: mol_type = other RNA
tgtacattttaccatataca

SEQ ID NO: 55420 - RNA, 20 nt, synthetic construct
  source 1..20: mol_type = other RNA
tgtaccaaaagtcctgttct

SEQ ID NO: 55421 - RNA, 20 nt, synthetic construct
  source 1..20: mol_type = other RNA
tgtacccaatggattataaa

SEQ ID NO: 55422 - RNA, 20 nt, synthetic construct
  source 1..20: mol_type = other RNA
tgtacccattagacactaac

SEQ ID NO: 55423 - RNA, 20 nt, synthetic construct
  source 1..20: mol_type = other RNA
tgtacccgtgtgttttgttg

SEQ ID NO: 55424 - RNA, 20 nt, synthetic construct
  source 1..20: mol_type = other RNA
tgtacccttacgcgtggatg

SEQ ID NO: 55425 - RNA, 20 nt, synthetic construct
  source 1..20: mol_type = other RNA
tgtaccttgatttatggcct

SEQ ID NO: 55426 - RNA, 20 nt, synthetic construct
  source 1..20: mol_type = other RNA
tgtaccttggagagaaacct

SEQ ID NO: 55427 - RNA, 20 nt, synthetic construct
  source 1..20: mol_type = other RNA
tgtacgccaattttcatagc

SEQ ID NO: 55428 - RNA, 20 nt, synthetic construct
  source 1..20: mol_type = other RNA
tgtactaagcctatgtaaga

SEQ ID NO: 55429 - RNA, 20 nt, synthetic construct
  source 1..20: mol_type = other RNA
tgtactacctatagaattct

SEQ ID NO: 55430 - RNA, 20 nt, synthetic construct
  source 1..20: mol_type = other RNA
tgtactactgacctgggaga

SEQ ID NO: 55431 - RNA, 20 nt, synthetic construct
  source 1..20: mol_type = other RNA
tgtactacttgtcaggtggg

SEQ ID NO: 55432 - RNA, 20 nt, synthetic construct
  source 1..20: mol_type = other RNA
tgtactagtctccatacaag

SEQ ID NO: 55433 - RNA, 20 nt, synthetic construct
  source 1..20: mol_type = other RNA
tgtactcccagcctcaaaca

SEQ ID NO: 55434 - RNA, 20 nt, synthetic construct
  source 1..20: mol_type = other RNA
tgtactgaaaccagtgctct

SEQ ID NO: 55435 - RNA, 20 nt, synthetic construct
  source 1..20: mol_type = other RNA
tgtactggaagtgtaacata

SEQ ID NO: 55436 - RNA, 20 nt, synthetic construct
  source 1..20: mol_type = other RNA
tgtactgtgtggcttctcaa

SEQ ID NO: 55437 - RNA, 20 nt, synthetic construct
  source 1..20: mol_type = other RNA
tgtactgtttagcatctagc

SEQ ID NO: 55438 - RNA, 20 nt, synthetic construct
  source 1..20: mol_type = other RNA
tgtacttctaccttgaaaat

SEQ ID NO: 55439 - RNA, 20 nt, synthetic construct
  source 1..20: mol_type = other RNA
tgtacttgacacaaaggact

SEQ ID NO: 55440 - RNA, 20 nt, synthetic construct
  source 1..20: mol_type = other RNA
tgtagaaaatagggacggcc

SEQ ID NO: 55441 - RNA, 20 nt, synthetic construct
  source 1..20: mol_type = other RNA
tgtagaaatgtggagataaa

SEQ ID NO: 55442 - RNA, 20 nt, synthetic construct
  source 1..20: mol_type = other RNA
tgtagaaggatatgttttct

SEQ ID NO: 55443 - RNA, 20 nt, synthetic construct
  source 1..20: mol_type = other RNA
tgtagaatatccaagcacaa

SEQ ID NO: 55444 - RNA, 20 nt, synthetic construct
  source 1..20: mol_type = other RNA
tgtagaatgtttttccgtct

SEQ ID NO: 55445 - RNA, 20 nt, synthetic construct
  source 1..20: mol_type = other RNA
tgtagaccctgttagtcccc

SEQ ID NO: 55446 - RNA, 20 nt, synthetic construct
  source 1..20: mol_type = other RNA
tgtagagaaaatgttataca

SEQ ID NO: 55447 - RNA, 20 nt, synthetic construct
  source 1..20: mol_type = other RNA
tgtagagaaacaggattaca

SEQ ID NO: 55448 - RNA, 20 nt, synthetic construct
  source 1..20: mol_type = other RNA
tgtagagacagaatcttact

SEQ ID NO: 55449 - RNA, 20 nt, synthetic construct
  source 1..20: mol_type = other RNA
tgtagagcaagcaacaccag

SEQ ID NO: 55450 - RNA, 20 nt, synthetic construct
  source 1..20: mol_type = other RNA
tgtagaggaggagggttaga

SEQ ID NO: 55451 - RNA, 20 nt, synthetic construct
  source 1..20: mol_type = other RNA
tgtagaggcagttgagtttt

SEQ ID NO: 55452 - RNA, 20 nt, synthetic construct
  source 1..20: mol_type = other RNA
tgtagagggaatttgtttta

SEQ ID NO: 55453 - RNA, 20 nt, synthetic construct
  source 1..20: mol_type = other RNA
tgtagaggtgaagttaaggg

SEQ ID NO: 55454 - RNA, 20 nt, synthetic construct
  source 1..20: mol_type = other RNA
tgtagataaacgttaactat

SEQ ID NO: 55455 - RNA, 20 nt, synthetic construct
  source 1..20: mol_type = other RNA
tgtagatatgggagtccctg

SEQ ID NO: 55456 - RNA, 20 nt, synthetic construct
  source 1..20: mol_type = other RNA
tgtagatattttctgtcatt

SEQ ID NO: 55457 - RNA, 20 nt, synthetic construct
  source 1..20: mol_type = other RNA
tgtagatcaagtatttccta

SEQ ID NO: 55458 - RNA, 20 nt, synthetic construct
  source 1..20: mol_type = other RNA
tgtagatcctgaggaagcta

SEQ ID NO: 55459 - RNA, 20 nt, synthetic construct
  source 1..20: mol_type = other RNA
tgtagattgggcttttcata

SEQ ID NO: 55460 - RNA, 20 nt, synthetic construct
  source 1..20: mol_type = other RNA
tgtagattgttttaggtagt

SEQ ID NO: 55461 - RNA, 20 nt, synthetic construct
  source 1..20: mol_type = other RNA
tgtagcagacactgggttct

SEQ ID NO: 55462 - RNA, 20 nt, synthetic construct
  source 1..20: mol_type = other RNA
tgtagccacaagccacatgt

SEQ ID NO: 55463 - RNA, 20 nt, synthetic construct
  source 1..20: mol_type = other RNA
tgtagcgggaaaaaataata

SEQ ID NO: 55464 - RNA, 20 nt, synthetic construct
  source 1..20: mol_type = other RNA
tgtagctaatatctttgggg

SEQ ID NO: 55465 - RNA, 20 nt, synthetic construct
  source 1..20: mol_type = other RNA
tgtagctatatcccaaattg

SEQ ID NO: 55466 - RNA, 20 nt, synthetic construct
  source 1..20: mol_type = other RNA
tgtagctcaaagcatatgaa

SEQ ID NO: 55467 - RNA, 20 nt, synthetic construct
  source 1..20: mol_type = other RNA
tgtagctgggatggctgaaa

SEQ ID NO: 55468 - RNA, 20 nt, synthetic construct
  source 1..20: mol_type = other RNA
tgtagctgtggctcactcat

SEQ ID NO: 55469 - RNA, 20 nt, synthetic construct
  source 1..20: mol_type = other RNA
tgtagcttcacgtgcattca

SEQ ID NO: 55470 - RNA, 20 nt, synthetic construct
  source 1..20: mol_type = other RNA
tgtaggaaactttgcattcc

SEQ ID NO: 55471 - RNA, 20 nt, synthetic construct
  source 1..20: mol_type = other RNA
tgtaggaaagcctgtgacag

SEQ ID NO: 55472 - RNA, 20 nt, synthetic construct
  source 1..20: mol_type = other RNA
tgtaggaaggaacacacacc

SEQ ID NO: 55473 - RNA, 20 nt, synthetic construct
  source 1..20: mol_type = other RNA
tgtaggcacattcaagcaga

SEQ ID NO: 55474 - RNA, 20 nt, synthetic construct
  source 1..20: mol_type = other RNA
tgtaggccccgatgccatgt

SEQ ID NO: 55475 - RNA, 20 nt, synthetic construct
  source 1..20: mol_type = other RNA
tgtagggaatagacaaagac

SEQ ID NO: 55476 - RNA, 20 nt, synthetic construct
  source 1..20: mol_type = other RNA
tgtagggcaccgtgacagaa

SEQ ID NO: 55477 - RNA, 20 nt, synthetic construct
  source 1..20: mol_type = other RNA
tgtagggggaaaactccaag

SEQ ID NO: 55478 - RNA, 20 nt, synthetic construct
  source 1..20: mol_type = other RNA
tgtagggtgactagtgtgaa

SEQ ID NO: 55479 - RNA, 20 nt, synthetic construct
  source 1..20: mol_type = other RNA
tgtagggtttggcagtttaa

SEQ ID NO: 55480 - RNA, 20 nt, synthetic construct
  source 1..20: mol_type = other RNA
tgtaggtgtctcatttaata

SEQ ID NO: 55481 - RNA, 20 nt, synthetic construct
  source 1..20: mol_type = other RNA
tgtaggtgtctgatgtgtgt

SEQ ID NO: 55482 - RNA, 20 nt, synthetic construct
  source 1..20: mol_type = other RNA
tgtagtaaatatttaacacc

SEQ ID NO: 55483 - RNA, 20 nt, synthetic construct
  source 1..20: mol_type = other RNA
tgtagtatttttgcaacttt

SEQ ID NO: 55484 - RNA, 20 nt, synthetic construct
  source 1..20: mol_type = other RNA
tgtagtcagacacactagct

SEQ ID NO: 55485 - RNA, 20 nt, synthetic construct
  source 1..20: mol_type = other RNA
tgtagtcagtgaagatgctg

SEQ ID NO: 55486 - RNA, 20 nt, synthetic construct
  source 1..20: mol_type = other RNA
tgtagtgattcacttttgag

SEQ ID NO: 55487 - RNA, 20 nt, synthetic construct
  source 1..20: mol_type = other RNA
tgtagtggtgtgtgactgta

SEQ ID NO: 55488 - RNA, 20 nt, synthetic construct
  source 1..20: mol_type = other RNA
tgtagtgtcttaatcctatt

SEQ ID NO: 55489 - RNA, 20 nt, synthetic construct
  source 1..20: mol_type = other RNA
tgtagttacaactactcggg

SEQ ID NO: 55490 - RNA, 20 nt, synthetic construct
  source 1..20: mol_type = other RNA
tgtagttcagtttttctttc

SEQ ID NO: 55491 - RNA, 20 nt, synthetic construct
  source 1..20: mol_type = other RNA
tgtagttcatcagcataaat

SEQ ID NO: 55492 - RNA, 20 nt, synthetic construct
  source 1..20: mol_type = other RNA
tgtagttctggtgtcgttta

SEQ ID NO: 55493 - RNA, 20 nt, synthetic construct
  source 1..20: mol_type = other RNA
tgtagtttccatggaggggc

SEQ ID NO: 55494 - RNA, 20 nt, synthetic construct
  source 1..20: mol_type = other RNA
tgtagttttccctgtgtatg

SEQ ID NO: 55495 - RNA, 20 nt, synthetic construct
  source 1..20: mol_type = other RNA
tgtagttttggtgtcatttt

SEQ ID NO: 55496 - RNA, 20 nt, synthetic construct
  source 1..20: mol_type = other RNA
tgtataaataaaatgtctgg

SEQ ID NO: 55497 - RNA, 20 nt, synthetic construct
  source 1..20: mol_type = other RNA
tgtataaattactgtctgtg

SEQ ID NO: 55498 - RNA, 20 nt, synthetic construct
  source 1..20: mol_type = other RNA
tgtataacattttctctaca

SEQ ID NO: 55499 - RNA, 20 nt, synthetic construct
  source 1..20: mol_type = other RNA
tgtataacccgttttttcct

SEQ ID NO: 55500 - RNA, 20 nt, synthetic construct
  source 1..20: mol_type = other RNA
tgtatacccaggtgtgagat

SEQ ID NO: 55501 - RNA, 20 nt, synthetic construct
  source 1..20: mol_type = other RNA
tgtatactgggtgtgatggc

SEQ ID NO: 55502 - RNA, 20 nt, synthetic construct
  source 1..20: mol_type = other RNA
tgtatagcagtaaaatgaaa

SEQ ID NO: 55503 - RNA, 20 nt, synthetic construct
  source 1..20: mol_type = other RNA
tgtatatacccttctgttaa

SEQ ID NO: 55504 - RNA, 20 nt, synthetic construct
  source 1..20: mol_type = other RNA
tgtatatctccttttaagag

SEQ ID NO: 55505 - RNA, 20 nt, synthetic construct
  source 1..20: mol_type = other RNA
tgtatatgaaaagcttcccc

SEQ ID NO: 55506 - RNA, 20 nt, synthetic construct
  source 1..20: mol_type = other RNA
tgtatatgctgtttttgaaa

SEQ ID NO: 55507 - RNA, 20 nt, synthetic construct
  source 1..20: mol_type = other RNA
tgtatatggtaaaatgtaca

SEQ ID NO: 55508 - RNA, 20 nt, synthetic construct
  source 1..20: mol_type = other RNA
tgtatatggtttaaggtaag

SEQ ID NO: 55509 - RNA, 20 nt, synthetic construct
  source 1..20: mol_type = other RNA
tgtatcagatgcttctagcc

SEQ ID NO: 55510 - RNA, 20 nt, synthetic construct
  source 1..20: mol_type = other RNA
tgtatccagtaatcttgcta

SEQ ID NO: 55511 - RNA, 20 nt, synthetic construct
  source 1..20: mol_type = other RNA
tgtatcctgagacttaggca

SEQ ID NO: 55512 - RNA, 20 nt, synthetic construct
  source 1..20: mol_type = other RNA
tgtatcctgtttgagaagtc

SEQ ID NO: 55513 - RNA, 20 nt, synthetic construct
  source 1..20: mol_type = other RNA
tgtatctgtgatccctgata

SEQ ID NO: 55514 - RNA, 20 nt, synthetic construct
  source 1..20: mol_type = other RNA
tgtatcttcacaaacaaatc

SEQ ID NO: 55515 - RNA, 20 nt, synthetic construct
  source 1..20: mol_type = other RNA
tgtatcttttcagtccagat

SEQ ID NO: 55516 - RNA, 20 nt, synthetic construct
  source 1..20: mol_type = other RNA
tgtatgaaattagttccttt

SEQ ID NO: 55517 - RNA, 20 nt, synthetic construct
  source 1..20: mol_type = other RNA
tgtatgaacattttgagtta

SEQ ID NO: 55518 - RNA, 20 nt, synthetic construct
  source 1..20: mol_type = other RNA
tgtatgagaagactggaaaa

SEQ ID NO: 55519 - RNA, 20 nt, synthetic construct
  source 1..20: mol_type = other RNA
tgtatgatcaaagtgaaagg

SEQ ID NO: 55520 - RNA, 20 nt, synthetic construct
  source 1..20: mol_type = other RNA
tgtatgatcttattaatgtg

SEQ ID NO: 55521 - RNA, 20 nt, synthetic construct
  source 1..20: mol_type = other RNA
tgtatgatttctaggcccta

SEQ ID NO: 55522 - RNA, 20 nt, synthetic construct
  source 1..20: mol_type = other RNA
tgtatgattttctaggaaac

SEQ ID NO: 55523 - RNA, 20 nt, synthetic construct
  source 1..20: mol_type = other RNA
tgtatgcagggaaatcattc

SEQ ID NO: 55524 - RNA, 20 nt, synthetic construct
  source 1..20: mol_type = other RNA
tgtatgccgctggtgaaaaa

SEQ ID NO: 55525 - RNA, 20 nt, synthetic construct
  source 1..20: mol_type = other RNA
tgtatggagactagtacact

SEQ ID NO: 55526 - RNA, 20 nt, synthetic construct
  source 1..20: mol_type = other RNA
tgtatggttcttaagatgat

SEQ ID NO: 55527 - RNA, 20 nt, synthetic construct
  source 1..20: mol_type = other RNA
tgtatgtggctcacattgta

SEQ ID NO: 55528 - RNA, 20 nt, synthetic construct
  source 1..20: mol_type = other RNA
tgtatgtgtagtcagtgaag

SEQ ID NO: 55529 - RNA, 20 nt, synthetic construct
  source 1..20: mol_type = other RNA
tgtatgtgttaaaccattct

SEQ ID NO: 55530 - RNA, 20 nt, synthetic construct
  source 1..20: mol_type = other RNA
tgtatgttacacttccagta

SEQ ID NO: 55531 - RNA, 20 nt, synthetic construct
  source 1..20: mol_type = other RNA
tgtatgtttctcattcttct

SEQ ID NO: 55532 - RNA, 20 nt, synthetic construct
  source 1..20: mol_type = other RNA
tgtatgttttagccttaaaa

SEQ ID NO: 55533 - RNA, 20 nt, synthetic construct
  source 1..20: mol_type = other RNA
tgtattaccagcttacagca

SEQ ID NO: 55534 - RNA, 20 nt, synthetic construct
  source 1..20: mol_type = other RNA
tgtattaggatgtgtacccg

SEQ ID NO: 55535 - RNA, 20 nt, synthetic construct
  source 1..20: mol_type = other RNA
tgtattattctaaacacacg

SEQ ID NO: 55536 - RNA, 20 nt, synthetic construct
  source 1..20: mol_type = other RNA
tgtattatttctgtcatctg

SEQ ID NO: 55537 - RNA, 20 nt, synthetic construct
  source 1..20: mol_type = other RNA
tgtattcatccagtttaaag

SEQ ID NO: 55538 - RNA, 20 nt, synthetic construct
  source 1..20: mol_type = other RNA
tgtattctgacctaaagttt

SEQ ID NO: 55539 - RNA, 20 nt, synthetic construct
  source 1..20: mol_type = other RNA
tgtattgactaaattgaaac

SEQ ID NO: 55540 - RNA, 20 nt, synthetic construct
  source 1..20: mol_type = other RNA
tgtattgagtgtagctgtgg

SEQ ID NO: 55541 - RNA, 20 nt, synthetic construct
  source 1..20: mol_type = other RNA
tgtattgcaaactaagtggt

SEQ ID NO: 55542 - RNA, 20 nt, synthetic construct
  source 1..20: mol_type = other RNA
tgtattgtaccttgatttat

SEQ ID NO: 55543 - RNA, 20 nt, synthetic construct
  source 1..20: mol_type = other RNA
tgtattgtaggaaagcctgt

SEQ ID NO: 55544 - RNA, 20 nt, synthetic construct
  source 1..20: mol_type = other RNA
tgtatttagggagcatatat

SEQ ID NO: 55545 - RNA, 20 nt, synthetic construct
  source 1..20: mol_type = other RNA
tgtatttctgctttggtacc

SEQ ID NO: 55546 - RNA, 20 nt, synthetic construct
  source 1..20: mol_type = other RNA
tgtatttctgttagatggtg

SEQ ID NO: 55547 - RNA, 20 nt, synthetic construct
  source 1..20: mol_type = other RNA
tgtattttacaccatgcagg

SEQ ID NO: 55548 - RNA, 20 nt, synthetic construct
  source 1..20: mol_type = other RNA
tgtattttcctaaccactgt

SEQ ID NO: 55549 - RNA, 20 nt, synthetic construct
  source 1..20: mol_type = other RNA
tgtatttttcacaaacacac

SEQ ID NO: 55550 - RNA, 20 nt, synthetic construct
  source 1..20: mol_type = other RNA
tgtatttttgctcacactta

SEQ ID NO: 55551 - RNA, 20 nt, synthetic construct
  source 1..20: mol_type = other RNA
tgtcaaaaagagaacacaca

SEQ ID NO: 55552 - RNA, 20 nt, synthetic construct
  source 1..20: mol_type = other RNA
tgtcaaaaatgtgtctagtg

SEQ ID NO: 55553 - RNA, 20 nt, synthetic construct
  source 1..20: mol_type = other RNA
tgtcaaatttttcacattct

SEQ ID NO: 55554 - RNA, 20 nt, synthetic construct
  source 1..20: mol_type = other RNA
tgtcaacattaagggaaaca

SEQ ID NO: 55555 - RNA, 20 nt, synthetic construct
  source 1..20: mol_type = other RNA
tgtcaactgaggcagagtag

SEQ ID NO: 55556 - RNA, 20 nt, synthetic construct
  source 1..20: mol_type = other RNA
tgtcaacttttagtaggtct

SEQ ID NO: 55557 - RNA, 20 nt, synthetic construct
  source 1..20: mol_type = other RNA
tgtcaagaatgaagtcagag

SEQ ID NO: 55558 - RNA, 20 nt, synthetic construct
  source 1..20: mol_type = other RNA
tgtcaagctatcagaatttt

SEQ ID NO: 55559 - RNA, 20 nt, synthetic construct
  source 1..20: mol_type = other RNA
tgtcaagctgtttgagctga

SEQ ID NO: 55560 - RNA, 20 nt, synthetic construct
  source 1..20: mol_type = other RNA
tgtcaaggtcatcctttccc

SEQ ID NO: 55561 - RNA, 20 nt, synthetic construct
  source 1..20: mol_type = other RNA
tgtcaagtacaactaataat

SEQ ID NO: 55562 - RNA, 20 nt, synthetic construct
  source 1..20: mol_type = other RNA
tgtcaagtgactccaagcac

SEQ ID NO: 55563 - RNA, 20 nt, synthetic construct
  source 1..20: mol_type = other RNA
tgtcaagttctgatttcaaa

SEQ ID NO: 55564 - RNA, 20 nt, synthetic construct
  source 1..20: mol_type = other RNA
tgtcaataatttggatgaac

SEQ ID NO: 55565 - RNA, 20 nt, synthetic construct
  source 1..20: mol_type = other RNA
tgtcaatggggaactttatt

SEQ ID NO: 55566 - RNA, 20 nt, synthetic construct
  source 1..20: mol_type = other RNA
tgtcaattttcccccaatta

SEQ ID NO: 55567 - RNA, 20 nt, synthetic construct
  source 1..20: mol_type = other RNA
tgtcacaaaatgtggatgca

SEQ ID NO: 55568 - RNA, 20 nt, synthetic construct
  source 1..20: mol_type = other RNA
tgtcacaagccagggtctgt

SEQ ID NO: 55569 - RNA, 20 nt, synthetic construct
  source 1..20: mol_type = other RNA
tgtcacaattcacagaatat

SEQ ID NO: 55570 - RNA, 20 nt, synthetic construct
  source 1..20: mol_type = other RNA
tgtcacacggaaaacattat

SEQ ID NO: 55571 - RNA, 20 nt, synthetic construct
  source 1..20: mol_type = other RNA
tgtcacaggctttcctacaa

SEQ ID NO: 55572 - RNA, 20 nt, synthetic construct
  source 1..20: mol_type = other RNA
tgtcacatagaagcgctctt

SEQ ID NO: 55573 - RNA, 20 nt, synthetic construct
  source 1..20: mol_type = other RNA
tgtcacatagacctgaatga

SEQ ID NO: 55574 - RNA, 20 nt, synthetic construct
  source 1..20: mol_type = other RNA
tgtcacatttgaaagaaaga

SEQ ID NO: 55575 - RNA, 20 nt, synthetic construct
  source 1..20: mol_type = other RNA
tgtcacattttcttatctag

SEQ ID NO: 55576 - RNA, 20 nt, synthetic construct
  source 1..20: mol_type = other RNA
tgtcaccaggctggaatgca

SEQ ID NO: 55577 - RNA, 20 nt, synthetic construct
  source 1..20: mol_type = other RNA
tgtcacccacgtggagtgca

SEQ ID NO: 55578 - RNA, 20 nt, synthetic construct
  source 1..20: mol_type = other RNA
tgtcacccttgtaatcaagt

SEQ ID NO: 55579 - RNA, 20 nt, synthetic construct
  source 1..20: mol_type = other RNA
tgtcacggtgccctacatat

SEQ ID NO: 55580 - RNA, 20 nt, synthetic construct
  source 1..20: mol_type = other RNA
tgtcactctctttaggaagc

SEQ ID NO: 55581 - RNA, 20 nt, synthetic construct
  source 1..20: mol_type = other RNA
tgtcactgacacaggctgaa

SEQ ID NO: 55582 - RNA, 20 nt, synthetic construct
  source 1..20: mol_type = other RNA
tgtcactggatagaagtgta

SEQ ID NO: 55583 - RNA, 20 nt, synthetic construct
  source 1..20: mol_type = other RNA
tgtcactgtaagaataatgt

SEQ ID NO: 55584 - RNA, 20 nt, synthetic construct
  source 1..20: mol_type = other RNA
tgtcactttcctattcacac

SEQ ID NO: 55585 - RNA, 20 nt, synthetic construct
  source 1..20: mol_type = other RNA
tgtcagaaaagatcagtaaa

SEQ ID NO: 55586 - RNA, 20 nt, synthetic construct
  source 1..20: mol_type = other RNA
tgtcagaaacaccaacacaa

SEQ ID NO: 55587 - RNA, 20 nt, synthetic construct
  source 1..20: mol_type = other RNA
tgtcagaaaccatcgttcac

SEQ ID NO: 55588 - RNA, 20 nt, synthetic construct
  source 1..20: mol_type = other RNA
tgtcagaattagaaagctgg

SEQ ID NO: 55589 - RNA, 20 nt, synthetic construct
  source 1..20: mol_type = other RNA
tgtcagaattccatcagtgg

SEQ ID NO: 55590 - RNA, 20 nt, synthetic construct
  source 1..20: mol_type = other RNA
tgtcagactcattgcctata

SEQ ID NO: 55591 - RNA, 20 nt, synthetic construct
  source 1..20: mol_type = other RNA
tgtcagagacacatactgaa

SEQ ID NO: 55592 - RNA, 20 nt, synthetic construct
  source 1..20: mol_type = other RNA
tgtcagagatctgaaattga

SEQ ID NO: 55593 - RNA, 20 nt, synthetic construct
  source 1..20: mol_type = other RNA
tgtcagatggtaaattggtc

SEQ ID NO: 55594 - RNA, 20 nt, synthetic construct
  source 1..20: mol_type = other RNA
tgtcagattttcttgttata

SEQ ID NO: 55595 - RNA, 20 nt, synthetic construct
  source 1..20: mol_type = other RNA
tgtcagcagttcagcctgca

SEQ ID NO: 55596 - RNA, 20 nt, synthetic construct
  source 1..20: mol_type = other RNA
tgtcagccacaagacataag

SEQ ID NO: 55597 - RNA, 20 nt, synthetic construct
  source 1..20: mol_type = other RNA
tgtcaggcaagggactgtcg

SEQ ID NO: 55598 - RNA, 20 nt, synthetic construct
  source 1..20: mol_type = other RNA
tgtcaggcatgctaactgca

SEQ ID NO: 55599 - RNA, 20 nt, synthetic construct
  source 1..20: mol_type = other RNA
tgtcaggtgggcactgggag

SEQ ID NO: 55600 - RNA, 20 nt, synthetic construct
  source 1..20: mol_type = other RNA
tgtcagtaattctgcagtga

SEQ ID NO: 55601 - RNA, 20 nt, synthetic construct
  source 1..20: mol_type = other RNA
tgtcagtcaacacactagcc

SEQ ID NO: 55602 - RNA, 20 nt, synthetic construct
  source 1..20: mol_type = other RNA
tgtcagtgacagttctgtga

SEQ ID NO: 55603 - RNA, 20 nt, synthetic construct
  source 1..20: mol_type = other RNA
tgtcagtgggactggagaac

SEQ ID NO: 55604 - RNA, 20 nt, synthetic construct
  source 1..20: mol_type = other RNA
tgtcagtgtggttcatattt

SEQ ID NO: 55605 - RNA, 20 nt, synthetic construct
  source 1..20: mol_type = other RNA
tgtcagtttctgatttatct

SEQ ID NO: 55606 - RNA, 20 nt, synthetic construct
  source 1..20: mol_type = other RNA
tgtcataaacataactttga

SEQ ID NO: 55607 - RNA, 20 nt, synthetic construct
  source 1..20: mol_type = other RNA
tgtcataacagtattgtctt

SEQ ID NO: 55608 - RNA, 20 nt, synthetic construct
  source 1..20: mol_type = other RNA
tgtcatcagcgtcctcactg

SEQ ID NO: 55609 - RNA, 20 nt, synthetic construct
  source 1..20: mol_type = other RNA
tgtcatctgaatcaataaga

SEQ ID NO: 55610 - RNA, 20 nt, synthetic construct
  source 1..20: mol_type = other RNA
tgtcatcttctctctctgct

SEQ ID NO: 55611 - RNA, 20 nt, synthetic construct
  source 1..20: mol_type = other RNA
tgtcatgaatgaatgttgag

SEQ ID NO: 55612 - RNA, 20 nt, synthetic construct
  source 1..20: mol_type = other RNA
tgtcatgggccgggcgtagt

SEQ ID NO: 55613 - RNA, 20 nt, synthetic construct
  source 1..20: mol_type = other RNA
tgtcatggtgtgtctgcgcc

SEQ ID NO: 55614 - RNA, 20 nt, synthetic construct
  source 1..20: mol_type = other RNA
tgtcatgtatatgctgtttt

SEQ ID NO: 55615 - RNA, 20 nt, synthetic construct
  source 1..20: mol_type = other RNA
tgtcatgtcaaatttttcac

SEQ ID NO: 55616 - RNA, 20 nt, synthetic construct
  source 1..20: mol_type = other RNA
tgtcatgttcccggattgga

SEQ ID NO: 55617 - RNA, 20 nt, synthetic construct
  source 1..20: mol_type = other RNA
tgtcatgtttgaattttcca

SEQ ID NO: 55618 - RNA, 20 nt, synthetic construct
  source 1..20: mol_type = other RNA
tgtcattaccttatagatga

SEQ ID NO: 55619 - RNA, 20 nt, synthetic construct
  source 1..20: mol_type = other RNA
tgtcattctgcagtttgtgt

SEQ ID NO: 55620 - RNA, 20 nt, synthetic construct
  source 1..20: mol_type = other RNA
tgtcatttaatttgtcaact

SEQ ID NO: 55621 - RNA, 20 nt, synthetic construct
  source 1..20: mol_type = other RNA
tgtcatttctgcttagtctt

SEQ ID NO: 55622 - RNA, 20 nt, synthetic construct
  source 1..20: mol_type = other RNA
tgtcatttttaagaaatcgt

SEQ ID NO: 55623 - RNA, 20 nt, synthetic construct
  source 1..20: mol_type = other RNA
tgtcatttttgtattctgac

SEQ ID NO: 55624 - RNA, 20 nt, synthetic construct
  source 1..20: mol_type = other RNA
tgtccaaacagtgaccacag

SEQ ID NO: 55625 - RNA, 20 nt, synthetic construct
  source 1..20: mol_type = other RNA
tgtccaacaagggttggtgc

SEQ ID NO: 55626 - RNA, 20 nt, synthetic construct
  source 1..20: mol_type = other RNA
tgtccaacatggcaaaaccc

SEQ ID NO: 55627 - RNA, 20 nt, synthetic construct
  source 1..20: mol_type = other RNA
tgtccaagtatttctcatct

SEQ ID NO: 55628 - RNA, 20 nt, synthetic construct
  source 1..20: mol_type = other RNA
tgtccacacaatggtcagag

SEQ ID NO: 55629 - RNA, 20 nt, synthetic construct
  source 1..20: mol_type = other RNA
tgtccaccagacaaaaatag

SEQ ID NO: 55630 - RNA, 20 nt, synthetic construct
  source 1..20: mol_type = other RNA
tgtccactgtcagtgggact

SEQ ID NO: 55631 - RNA, 20 nt, synthetic construct
  source 1..20: mol_type = other RNA
tgtccagaggaggaagagat

SEQ ID NO: 55632 - RNA, 20 nt, synthetic construct
  source 1..20: mol_type = other RNA
tgtccagcccccagttttgt

SEQ ID NO: 55633 - RNA, 20 nt, synthetic construct
  source 1..20: mol_type = other RNA
tgtccaggccaacagggcca

SEQ ID NO: 55634 - RNA, 20 nt, synthetic construct
  source 1..20: mol_type = other RNA
tgtccaggcgcctgcattgc

SEQ ID NO: 55635 - RNA, 20 nt, synthetic construct
  source 1..20: mol_type = other RNA
tgtccatagttaatgtgtga

SEQ ID NO: 55636 - RNA, 20 nt, synthetic construct
  source 1..20: mol_type = other RNA
tgtccatcaggaaaaccagt

SEQ ID NO: 55637 - RNA, 20 nt, synthetic construct
  source 1..20: mol_type = other RNA
tgtccatcgagagatgaatg

SEQ ID NO: 55638 - RNA, 20 nt, synthetic construct
  source 1..20: mol_type = other RNA
tgtccatctcccatcactag

SEQ ID NO: 55639 - RNA, 20 nt, synthetic construct
  source 1..20: mol_type = other RNA
tgtccatctggattatagtg

SEQ ID NO: 55640 - RNA, 20 nt, synthetic construct
  source 1..20: mol_type = other RNA
tgtccatttccagtactttt

SEQ ID NO: 55641 - RNA, 20 nt, synthetic construct
  source 1..20: mol_type = other RNA
tgtccatttccttaagcaca

SEQ ID NO: 55642 - RNA, 20 nt, synthetic construct
  source 1..20: mol_type = other RNA
tgtcccaaatgcaccaacac

SEQ ID NO: 55643 - RNA, 20 nt, synthetic construct
  source 1..20: mol_type = other RNA
tgtcccatggtcaaatcaat

SEQ ID NO: 55644 - RNA, 20 nt, synthetic construct
  source 1..20: mol_type = other RNA
tgtccccaccgccttcctac

SEQ ID NO: 55645 - RNA, 20 nt, synthetic construct
  source 1..20: mol_type = other RNA
tgtcccctggagttaattcc

SEQ ID NO: 55646 - RNA, 20 nt, synthetic construct
  source 1..20: mol_type = other RNA
tgtcccctggggcctcagca

SEQ ID NO: 55647 - RNA, 20 nt, synthetic construct
  source 1..20: mol_type = other RNA
tgtcccctgtccaagtattt

SEQ ID NO: 55648 - RNA, 20 nt, synthetic construct
  source 1..20: mol_type = other RNA
tgtcccggcatgcctctccc

SEQ ID NO: 55649 - RNA, 20 nt, synthetic construct
  source 1..20: mol_type = other RNA
tgtccgttgaagtctttggc

SEQ ID NO: 55650 - RNA, 20 nt, synthetic construct
  source 1..20: mol_type = other RNA
tgtcctaaaattccttcctt

SEQ ID NO: 55651 - RNA, 20 nt, synthetic construct
  source 1..20: mol_type = other RNA
tgtcctcacctcacattcac

SEQ ID NO: 55652 - RNA, 20 nt, synthetic construct
  source 1..20: mol_type = other RNA
tgtcctcaggctccaggtag

SEQ ID NO: 55653 - RNA, 20 nt, synthetic construct
  source 1..20: mol_type = other RNA
tgtcctcgtaaaagctaatc

SEQ ID NO: 55654 - RNA, 20 nt, synthetic construct
  source 1..20: mol_type = other RNA
tgtcctctcttgttgaggat

SEQ ID NO: 55655 - RNA, 20 nt, synthetic construct
  source 1..20: mol_type = other RNA
tgtcctgaatactattccta

SEQ ID NO: 55656 - RNA, 20 nt, synthetic construct
  source 1..20: mol_type = other RNA
tgtcctgaatgatttccctg

SEQ ID NO: 55657 - RNA, 20 nt, synthetic construct
  source 1..20: mol_type = other RNA
tgtcctgaattctaacatta

SEQ ID NO: 55658 - RNA, 20 nt, synthetic construct
  source 1..20: mol_type = other RNA
tgtcctgaattctaatgaac

SEQ ID NO: 55659 - RNA, 20 nt, synthetic construct
  source 1..20: mol_type = other RNA
tgtcctggcagatcaattga

SEQ ID NO: 55660 - RNA, 20 nt, synthetic construct
  source 1..20: mol_type = other RNA
tgtcctgtcagtgtggttca

SEQ ID NO: 55661 - RNA, 20 nt, synthetic construct
  source 1..20: mol_type = other RNA
tgtccttaatgccaccgaat

SEQ ID NO: 55662 - RNA, 20 nt, synthetic construct
  source 1..20: mol_type = other RNA
tgtccttctcgtgtgagctc

SEQ ID NO: 55663 - RNA, 20 nt, synthetic construct
  source 1..20: mol_type = other RNA
tgtccttctgagaaggcgaa

SEQ ID NO: 55664 - RNA, 20 nt, synthetic construct
  source 1..20: mol_type = other RNA
tgtccttggattgctaaact

SEQ ID NO: 55665 - RNA, 20 nt, synthetic construct
  source 1..20: mol_type = other RNA
tgtccttgtgttttatttgg

SEQ ID NO: 55666 - RNA, 20 nt, synthetic construct
  source 1..20: mol_type = other RNA
tgtcctttgatgcacaaaag

SEQ ID NO: 55667 - RNA, 20 nt, synthetic construct
  source 1..20: mol_type = other RNA
tgtccttttcctgttccggg

SEQ ID NO: 55668 - RNA, 20 nt, synthetic construct
  source 1..20: mol_type = other RNA
tgtccttttgagtttggtgt

SEQ ID NO: 55669 - RNA, 20 nt, synthetic construct
  source 1..20: mol_type = other RNA
tgtcgaagcttaatttagat

SEQ ID NO: 55670 - RNA, 20 nt, synthetic construct
  source 1..20: mol_type = other RNA
tgtcgagaaaaatggggata

SEQ ID NO: 55671 - RNA, 20 nt, synthetic construct
  source 1..20: mol_type = other RNA
tgtcgcatgaaaacagctag

SEQ ID NO: 55672 - RNA, 20 nt, synthetic construct
  source 1..20: mol_type = other RNA
tgtcgcccaggcggaatgca

SEQ ID NO: 55673 - RNA, 20 nt, synthetic construct
  source 1..20: mol_type = other RNA
tgtcgctctcctgtgccaag

SEQ ID NO: 55674 - RNA, 20 nt, synthetic construct
  source 1..20: mol_type = other RNA
tgtcggttttctagttagtt

SEQ ID NO: 55675 - RNA, 20 nt, synthetic construct
  source 1..20: mol_type = other RNA
tgtcgttgagtacctctggg

SEQ ID NO: 55676 - RNA, 20 nt, synthetic construct
  source 1..20: mol_type = other RNA
tgtcgtttatgcatttatta

SEQ ID NO: 55677 - RNA, 20 nt, synthetic construct
  source 1..20: mol_type = other RNA
tgtcgtttatttcttctccc

SEQ ID NO: 55678 - RNA, 20 nt, synthetic construct
  source 1..20: mol_type = other RNA
tgtctaaagtattgtttcaa

SEQ ID NO: 55679 - RNA, 20 nt, synthetic construct
  source 1..20: mol_type = other RNA
tgtctaatgggtacagggtt

SEQ ID NO: 55680 - RNA, 20 nt, synthetic construct
  source 1..20: mol_type = other RNA
tgtctaattttttagtcttg

SEQ ID NO: 55681 - RNA, 20 nt, synthetic construct
  source 1..20: mol_type = other RNA
tgtctacctgtctttcccat

SEQ ID NO: 55682 - RNA, 20 nt, synthetic construct
  source 1..20: mol_type = other RNA
tgtctagtgaatgagaccaa

SEQ ID NO: 55683 - RNA, 20 nt, synthetic construct
  source 1..20: mol_type = other RNA
tgtctataggcaatgagtct

SEQ ID NO: 55684 - RNA, 20 nt, synthetic construct
  source 1..20: mol_type = other RNA
tgtctattccctacattgcc

SEQ ID NO: 55685 - RNA, 20 nt, synthetic construct
  source 1..20: mol_type = other RNA
tgtctcaacctttgcctcct

SEQ ID NO: 55686 - RNA, 20 nt, synthetic construct
  source 1..20: mol_type = other RNA
tgtctcacctcaaggccaac

SEQ ID NO: 55687 - RNA, 20 nt, synthetic construct
  source 1..20: mol_type = other RNA
tgtctcagagtatatatgct

SEQ ID NO: 55688 - RNA, 20 nt, synthetic construct
  source 1..20: mol_type = other RNA
tgtctcagatgtctccattt

SEQ ID NO: 55689 - RNA, 20 nt, synthetic construct
  source 1..20: mol_type = other RNA
tgtctcagtcccaaatggga

SEQ ID NO: 55690 - RNA, 20 nt, synthetic construct
  source 1..20: mol_type = other RNA
tgtctcataaagccggattc

SEQ ID NO: 55691 - RNA, 20 nt, synthetic construct
  source 1..20: mol_type = other RNA
tgtctcattgtggatgagat

SEQ ID NO: 55692 - RNA, 20 nt, synthetic construct
  source 1..20: mol_type = other RNA
tgtctccaacgctttttatg

SEQ ID NO: 55693 - RNA, 20 nt, synthetic construct
  source 1..20: mol_type = other RNA
tgtctccataccccctggaa

SEQ ID NO: 55694 - RNA, 20 nt, synthetic construct
  source 1..20: mol_type = other RNA
tgtctccatgtcctcacctc

SEQ ID NO: 55695 - RNA, 20 nt, synthetic construct
  source 1..20: mol_type = other RNA
tgtctccattttgccagcta

SEQ ID NO: 55696 - RNA, 20 nt, synthetic construct
  source 1..20: mol_type = other RNA
tgtctcctctttcatatctg

SEQ ID NO: 55697 - RNA, 20 nt, synthetic construct
  source 1..20: mol_type = other RNA
tgtctcggatttaagagagg

SEQ ID NO: 55698 - RNA, 20 nt, synthetic construct
  source 1..20: mol_type = other RNA
tgtctctaaaaaataccaaa

SEQ ID NO: 55699 - RNA, 20 nt, synthetic construct
  source 1..20: mol_type = other RNA
tgtctctgacatgagagcta

SEQ ID NO: 55700 - RNA, 20 nt, synthetic construct
  source 1..20: mol_type = other RNA
tgtctctgctctcaagtaat

SEQ ID NO: 55701 - RNA, 20 nt, synthetic construct
  source 1..20: mol_type = other RNA
tgtctctggaaggctaagca

SEQ ID NO: 55702 - RNA, 20 nt, synthetic construct
  source 1..20: mol_type = other RNA
tgtctgactacactgaaggg

SEQ ID NO: 55703 - RNA, 20 nt, synthetic construct
  source 1..20: mol_type = other RNA
tgtctgatgtgtgtctctgc

SEQ ID NO: 55704 - RNA, 20 nt, synthetic construct
  source 1..20: mol_type = other RNA
tgtctgcaagcagatctgct

SEQ ID NO: 55705 - RNA, 20 nt, synthetic construct
  source 1..20: mol_type = other RNA
tgtctgcaggagccttgctg

SEQ ID NO: 55706 - RNA, 20 nt, synthetic construct
  source 1..20: mol_type = other RNA
tgtctgcgccttaaagccac

SEQ ID NO: 55707 - RNA, 20 nt, synthetic construct
  source 1..20: mol_type = other RNA
tgtctgctacaggggcattc

SEQ ID NO: 55708 - RNA, 20 nt, synthetic construct
  source 1..20: mol_type = other RNA
tgtctggaacacacattagc

SEQ ID NO: 55709 - RNA, 20 nt, synthetic construct
  source 1..20: mol_type = other RNA
tgtctggattgattccagtt

SEQ ID NO: 55710 - RNA, 20 nt, synthetic construct
  source 1..20: mol_type = other RNA
tgtctgggaagttatgtagc

SEQ ID NO: 55711 - RNA, 20 nt, synthetic construct
  source 1..20: mol_type = other RNA
tgtctgggataatgagttta

SEQ ID NO: 55712 - RNA, 20 nt, synthetic construct
  source 1..20: mol_type = other RNA
tgtctggtggacaaaaaacg

SEQ ID NO: 55713 - RNA, 20 nt, synthetic construct
  source 1..20: mol_type = other RNA
tgtctggtttgctttggagt

SEQ ID NO: 55714 - RNA, 20 nt, synthetic construct
  source 1..20: mol_type = other RNA
tgtctgtagttacaactact

SEQ ID NO: 55715 - RNA, 20 nt, synthetic construct
  source 1..20: mol_type = other RNA
tgtctgtctgttcacatttc

SEQ ID NO: 55716 - RNA, 20 nt, synthetic construct
  source 1..20: mol_type = other RNA
tgtctgtgaaaataatacct

SEQ ID NO: 55717 - RNA, 20 nt, synthetic construct
  source 1..20: mol_type = other RNA
tgtctgtgatgtagaggcag

SEQ ID NO: 55718 - RNA, 20 nt, synthetic construct
  source 1..20: mol_type = other RNA
tgtctgtgtagttcatcagc

SEQ ID NO: 55719 - RNA, 20 nt, synthetic construct
  source 1..20: mol_type = other RNA
tgtctgttcacatttcgcct

SEQ ID NO: 55720 - RNA, 20 nt, synthetic construct
  source 1..20: mol_type = other RNA
tgtcttaagaaggaaaagaa

SEQ ID NO: 55721 - RNA, 20 nt, synthetic construct
  source 1..20: mol_type = other RNA
tgtcttaatcctattttgtt

SEQ ID NO: 55722 - RNA, 20 nt, synthetic construct
  source 1..20: mol_type = other RNA
tgtcttacataggcttagta

SEQ ID NO: 55723 - RNA, 20 nt, synthetic construct
  source 1..20: mol_type = other RNA
tgtcttagtctgacttctct

SEQ ID NO: 55724 - RNA, 20 nt, synthetic construct
  source 1..20: mol_type = other RNA
tgtcttattgttttgatttg

SEQ ID NO: 55725 - RNA, 20 nt, synthetic construct
  source 1..20: mol_type = other RNA
tgtcttcagaggccctggtg

SEQ ID NO: 55726 - RNA, 20 nt, synthetic construct
  source 1..20: mol_type = other RNA
tgtcttctaaccctcaaatg

SEQ ID NO: 55727 - RNA, 20 nt, synthetic construct
  source 1..20: mol_type = other RNA
tgtcttctgtttttcttagt

SEQ ID NO: 55728 - RNA, 20 nt, synthetic construct
  source 1..20: mol_type = other RNA
tgtcttcttggattttcttc

SEQ ID NO: 55729 - RNA, 20 nt, synthetic construct
  source 1..20: mol_type = other RNA
tgtcttgaatagcatcttag

SEQ ID NO: 55730 - RNA, 20 nt, synthetic construct
  source 1..20: mol_type = other RNA
tgtcttgatgatagaatacc

SEQ ID NO: 55731 - RNA, 20 nt, synthetic construct
  source 1..20: mol_type = other RNA
tgtcttggacccatgcccat

SEQ ID NO: 55732 - RNA, 20 nt, synthetic construct
  source 1..20: mol_type = other RNA
tgtcttggctattgtcagta

SEQ ID NO: 55733 - RNA, 20 nt, synthetic construct
  source 1..20: mol_type = other RNA
tgtcttggtgtgctcttttc

SEQ ID NO: 55734 - RNA, 20 nt, synthetic construct
  source 1..20: mol_type = other RNA
tgtcttgtgcatcctttata

SEQ ID NO: 55735 - RNA, 20 nt, synthetic construct
  source 1..20: mol_type = other RNA
tgtcttgtggctgacatgtg

SEQ ID NO: 55736 - RNA, 20 nt, synthetic construct
  source 1..20: mol_type = other RNA
tgtctttcagtatgtgtctc

SEQ ID NO: 55737 - RNA, 20 nt, synthetic construct
  source 1..20: mol_type = other RNA
tgtctttcccattaccaaaa

SEQ ID NO: 55738 - RNA, 20 nt, synthetic construct
  source 1..20: mol_type = other RNA
tgtctttctgtctgcttttt

SEQ ID NO: 55739 - RNA, 20 nt, synthetic construct
  source 1..20: mol_type = other RNA
tgtctttggcccatatcctt

SEQ ID NO: 55740 - RNA, 20 nt, synthetic construct
  source 1..20: mol_type = other RNA
tgtctttggctcttagaaaa

SEQ ID NO: 55741 - RNA, 20 nt, synthetic construct
  source 1..20: mol_type = other RNA
tgtctttgggaaggccctga

SEQ ID NO: 55742 - RNA, 20 nt, synthetic construct
  source 1..20: mol_type = other RNA
tgtctttgtctattccctac

SEQ ID NO: 55743 - RNA, 20 nt, synthetic construct
  source 1..20: mol_type = other RNA
tgtcttttaacttgctttga

SEQ ID NO: 55744 - RNA, 20 nt, synthetic construct
  source 1..20: mol_type = other RNA
tgtcttttctatctgaacat

SEQ ID NO: 55745 - RNA, 20 nt, synthetic construct
  source 1..20: mol_type = other RNA
tgtcttttgaagaagttctt

SEQ ID NO: 55746 - RNA, 20 nt, synthetic construct
  source 1..20: mol_type = other RNA
tgtctttttacacttggagt

SEQ ID NO: 55747 - RNA, 20 nt, synthetic construct
  source 1..20: mol_type = other RNA
tgtctttttatattatgtgc

SEQ ID NO: 55748 - RNA, 20 nt, synthetic construct
  source 1..20: mol_type = other RNA
tgtctttttgtgacttgttt

SEQ ID NO: 55749 - RNA, 20 nt, synthetic construct
  source 1..20: mol_type = other RNA
tgtgaaaaatttgacatgac

SEQ ID NO: 55750 - RNA, 20 nt, synthetic construct
  source 1..20: mol_type = other RNA
tgtgaaaagaaaaaggttaa

SEQ ID NO: 55751 - RNA, 20 nt, synthetic construct
  source 1..20: mol_type = other RNA
tgtgaaaataatacctaaca

SEQ ID NO: 55752 - RNA, 20 nt, synthetic construct
  source 1..20: mol_type = other RNA
tgtgaaaatactaacgatcc

SEQ ID NO: 55753 - RNA, 20 nt, synthetic construct
  source 1..20: mol_type = other RNA
tgtgaaaatcattttggcaa

SEQ ID NO: 55754 - RNA, 20 nt, synthetic construct
  source 1..20: mol_type = other RNA
tgtgaaaccaagcaagtaaa

SEQ ID NO: 55755 - RNA, 20 nt, synthetic construct
  source 1..20: mol_type = other RNA
tgtgaaagtagaggactgcc

SEQ ID NO: 55756 - RNA, 20 nt, synthetic construct
  source 1..20: mol_type = other RNA
tgtgaaagtattaaaagcac

SEQ ID NO: 55757 - RNA, 20 nt, synthetic construct
  source 1..20: mol_type = other RNA
tgtgaaatatattatggtct

SEQ ID NO: 55758 - RNA, 20 nt, synthetic construct
  source 1..20: mol_type = other RNA
tgtgaacagacagacatgca

SEQ ID NO: 55759 - RNA, 20 nt, synthetic construct
  source 1..20: mol_type = other RNA
tgtgaaccacgcatctggtc

SEQ ID NO: 55760 - RNA, 20 nt, synthetic construct
  source 1..20: mol_type = other RNA
tgtgaaccttgaagtacttc

SEQ ID NO: 55761 - RNA, 20 nt, synthetic construct
  source 1..20: mol_type = other RNA
tgtgaacgatggtttctgac

SEQ ID NO: 55762 - RNA, 20 nt, synthetic construct
  source 1..20: mol_type = other RNA
tgtgaagaaggaatgtgcac

SEQ ID NO: 55763 - RNA, 20 nt, synthetic construct
  source 1..20: mol_type = other RNA
tgtgaagatacaaatagtaa

SEQ ID NO: 55764 - RNA, 20 nt, synthetic construct
  source 1..20: mol_type = other RNA
tgtgaagattaagcacatct

SEQ ID NO: 55765 - RNA, 20 nt, synthetic construct
  source 1..20: mol_type = other RNA
tgtgaagggaggtaggctta

SEQ ID NO: 55766 - RNA, 20 nt, synthetic construct
  source 1..20: mol_type = other RNA
tgtgaagttgggcttaacat

SEQ ID NO: 55767 - RNA, 20 nt, synthetic construct
  source 1..20: mol_type = other RNA
tgtgaataggaaagtgacag

SEQ ID NO: 55768 - RNA, 20 nt, synthetic construct
  source 1..20: mol_type = other RNA
tgtgaatgaggagtgaattt

SEQ ID NO: 55769 - RNA, 20 nt, synthetic construct
  source 1..20: mol_type = other RNA
tgtgaatggaaaattcaaac

SEQ ID NO: 55770 - RNA, 20 nt, synthetic construct
  source 1..20: mol_type = other RNA
tgtgaatgtgaggtgaggac

SEQ ID NO: 55771 - RNA, 20 nt, synthetic construct
  source 1..20: mol_type = other RNA
tgtgaattagatggcttagg

SEQ ID NO: 55772 - RNA, 20 nt, synthetic construct
  source 1..20: mol_type = other RNA
tgtgaattcactaatgcctc

SEQ ID NO: 55773 - RNA, 20 nt, synthetic construct
  source 1..20: mol_type = other RNA
tgtgaattgataaaagtcat

SEQ ID NO: 55774 - RNA, 20 nt, synthetic construct
  source 1..20: mol_type = other RNA
tgtgaattgtgacagttcta

SEQ ID NO: 55775 - RNA, 20 nt, synthetic construct
  source 1..20: mol_type = other RNA
tgtgaatttgattatgttag

SEQ ID NO: 55776 - RNA, 20 nt, synthetic construct
  source 1..20: mol_type = other RNA
tgtgaatttggatttgagta

SEQ ID NO: 55777 - RNA, 20 nt, synthetic construct
  source 1..20: mol_type = other RNA
tgtgacaaaaagtaggggta

SEQ ID NO: 55778 - RNA, 20 nt, synthetic construct
  source 1..20: mol_type = other RNA
tgtgacaaacacttttcaaa

SEQ ID NO: 55779 - RNA, 20 nt, synthetic construct
  source 1..20: mol_type = other RNA
tgtgacaagttcagcatctt

SEQ ID NO: 55780 - RNA, 20 nt, synthetic construct
  source 1..20: mol_type = other RNA
tgtgacagaacaaactcaag

SEQ ID NO: 55781 - RNA, 20 nt, synthetic construct
  source 1..20: mol_type = other RNA
tgtgacagaatgcatctttt

SEQ ID NO: 55782 - RNA, 20 nt, synthetic construct
  source 1..20: mol_type = other RNA
tgtgacagtatgtcagactc

SEQ ID NO: 55783 - RNA, 20 nt, synthetic construct
  source 1..20: mol_type = other RNA
tgtgacagttctatttcttt

SEQ ID NO: 55784 - RNA, 20 nt, synthetic construct
  source 1..20: mol_type = other RNA
tgtgacatcaagggtggtgc

SEQ ID NO: 55785 - RNA, 20 nt, synthetic construct
  source 1..20: mol_type = other RNA
tgtgacattagtggtggtag

SEQ ID NO: 55786 - RNA, 20 nt, synthetic construct
  source 1..20: mol_type = other RNA
tgtgaccacattcccaaatg

SEQ ID NO: 55787 - RNA, 20 nt, synthetic construct
  source 1..20: mol_type = other RNA
tgtgaccagatcaaacgtgc

SEQ ID NO: 55788 - RNA, 20 nt, synthetic construct
  source 1..20: mol_type = other RNA
tgtgacctgtccttgtgttt

SEQ ID NO: 55789 - RNA, 20 nt, synthetic construct
  source 1..20: mol_type = other RNA
tgtgactagaagaaatgtta

SEQ ID NO: 55790 - RNA, 20 nt, synthetic construct
  source 1..20: mol_type = other RNA
tgtgactccaaagcaaacca

SEQ ID NO: 55791 - RNA, 20 nt, synthetic construct
  source 1..20: mol_type = other RNA
tgtgactgtagtccctgcta

SEQ ID NO: 55792 - RNA, 20 nt, synthetic construct
  source 1..20: mol_type = other RNA
tgtgactgtgagggtaagaa

SEQ ID NO: 55793 - RNA, 20 nt, synthetic construct
  source 1..20: mol_type = other RNA
tgtgacttcgtcaaggggag

SEQ ID NO: 55794 - RNA, 20 nt, synthetic construct
  source 1..20: mol_type = other RNA
tgtgacttgtttattttact

SEQ ID NO: 55795 - RNA, 20 nt, synthetic construct
  source 1..20: mol_type = other RNA
tgtgagattgatagatcata

SEQ ID NO: 55796 - RNA, 20 nt, synthetic construct
  source 1..20: mol_type = other RNA
tgtgagcaaaaatacagctc

SEQ ID NO: 55797 - RNA, 20 nt, synthetic construct
  source 1..20: mol_type = other RNA
tgtgagcatttagccccctg

SEQ ID NO: 55798 - RNA, 20 nt, synthetic construct
  source 1..20: mol_type = other RNA
tgtgagccacatacatagta

SEQ ID NO: 55799 - RNA, 20 nt, synthetic construct
  source 1..20: mol_type = other RNA
tgtgagccaccgtgccgggc

SEQ ID NO: 55800 - RNA, 20 nt, synthetic construct
  source 1..20: mol_type = other RNA
tgtgagccactaaaacagga

SEQ ID NO: 55801 - RNA, 20 nt, synthetic construct
  source 1..20: mol_type = other RNA
tgtgagccactacgcccggc

SEQ ID NO: 55802 - RNA, 20 nt, synthetic construct
  source 1..20: mol_type = other RNA
tgtgagcccccacgcccggc

SEQ ID NO: 55803 - RNA, 20 nt, synthetic construct
  source 1..20: mol_type = other RNA
tgtgagctctagccttgtac

SEQ ID NO: 55804 - RNA, 20 nt, synthetic construct
  source 1..20: mol_type = other RNA
tgtgaggatctgttggtgct

SEQ ID NO: 55805 - RNA, 20 nt, synthetic construct
  source 1..20: mol_type = other RNA
tgtgaggattcgattaaaat

SEQ ID NO: 55806 - RNA, 20 nt, synthetic construct
  source 1..20: mol_type = other RNA
tgtgagggagatatttcgcc

SEQ ID NO: 55807 - RNA, 20 nt, synthetic construct
  source 1..20: mol_type = other RNA
tgtgagggtaagaaaggagt

SEQ ID NO: 55808 - RNA, 20 nt, synthetic construct
  source 1..20: mol_type = other RNA
tgtgaggtgaggacatggag

SEQ ID NO: 55809 - RNA, 20 nt, synthetic construct
  source 1..20: mol_type = other RNA
tgtgagtccttccagtatga

SEQ ID NO: 55810 - RNA, 20 nt, synthetic construct
  source 1..20: mol_type = other RNA
tgtgagttttaactcttgca

SEQ ID NO: 55811 - RNA, 20 nt, synthetic construct
  source 1..20: mol_type = other RNA
tgtgataactgatatgaggg

SEQ ID NO: 55812 - RNA, 20 nt, synthetic construct
  source 1..20: mol_type = other RNA
tgtgatacctagtacgtaac

SEQ ID NO: 55813 - RNA, 20 nt, synthetic construct
  source 1..20: mol_type = other RNA
tgtgatatattatgaaccat

SEQ ID NO: 55814 - RNA, 20 nt, synthetic construct
  source 1..20: mol_type = other RNA
tgtgatatgccacatttttt

SEQ ID NO: 55815 - RNA, 20 nt, synthetic construct
  source 1..20: mol_type = other RNA
tgtgatcagaagagcactat

SEQ ID NO: 55816 - RNA, 20 nt, synthetic construct
  source 1..20: mol_type = other RNA
tgtgatcaggaaagatgaag

SEQ ID NO: 55817 - RNA, 20 nt, synthetic construct
  source 1..20: mol_type = other RNA
tgtgatccctgatatgtcgc

SEQ ID NO: 55818 - RNA, 20 nt, synthetic construct
  source 1..20: mol_type = other RNA
tgtgatctatgcatactgca

SEQ ID NO: 55819 - RNA, 20 nt, synthetic construct
  source 1..20: mol_type = other RNA
tgtgatctctgctcaccgca

SEQ ID NO: 55820 - RNA, 20 nt, synthetic construct
  source 1..20: mol_type = other RNA
tgtgatgactgtaagctgaa

SEQ ID NO: 55821 - RNA, 20 nt, synthetic construct
  source 1..20: mol_type = other RNA
tgtgatgattttagaaggta

SEQ ID NO: 55822 - RNA, 20 nt, synthetic construct
  source 1..20: mol_type = other RNA
tgtgatggcatcattcataa

SEQ ID NO: 55823 - RNA, 20 nt, synthetic construct
  source 1..20: mol_type = other RNA
tgtgatggcgcatgcctgtg

SEQ ID NO: 55824 - RNA, 20 nt, synthetic construct
  source 1..20: mol_type = other RNA
tgtgatgggggtaagattgt

SEQ ID NO: 55825 - RNA, 20 nt, synthetic construct
  source 1..20: mol_type = other RNA
tgtgatgtagaggcagttga

SEQ ID NO: 55826 - RNA, 20 nt, synthetic construct
  source 1..20: mol_type = other RNA
tgtgatgtctcagatgtctc

SEQ ID NO: 55827 - RNA, 20 nt, synthetic construct
  source 1..20: mol_type = other RNA
tgtgattacaattcctttct

SEQ ID NO: 55828 - RNA, 20 nt, synthetic construct
  source 1..20: mol_type = other RNA
tgtgattaccggcatccgcc

SEQ ID NO: 55829 - RNA, 20 nt, synthetic construct
  source 1..20: mol_type = other RNA
tgtgattatcagggatattg

SEQ ID NO: 55830 - RNA, 20 nt, synthetic construct
  source 1..20: mol_type = other RNA
tgtgattgcaggtgtgggcc

SEQ ID NO: 55831 - RNA, 20 nt, synthetic construct
  source 1..20: mol_type = other RNA
tgtgatttatgtggcattta

SEQ ID NO: 55832 - RNA, 20 nt, synthetic construct
  source 1..20: mol_type = other RNA
tgtgatttccagtgtttggt

SEQ ID NO: 55833 - RNA, 20 nt, synthetic construct
  source 1..20: mol_type = other RNA
tgtgatttgtagatattttc

SEQ ID NO: 55834 - RNA, 20 nt, synthetic construct
  source 1..20: mol_type = other RNA
tgtgcaaaggattagaaagt

SEQ ID NO: 55835 - RNA, 20 nt, synthetic construct
  source 1..20: mol_type = other RNA
tgtgcaacataaatagggtg

SEQ ID NO: 55836 - RNA, 20 nt, synthetic construct
  source 1..20: mol_type = other RNA
tgtgcaaccatccccgctgt

SEQ ID NO: 55837 - RNA, 20 nt, synthetic construct
  source 1..20: mol_type = other RNA
tgtgcaaggagagaaaaaca

SEQ ID NO: 55838 - RNA, 20 nt, synthetic construct
  source 1..20: mol_type = other RNA
tgtgcacaacacatgcacac

SEQ ID NO: 55839 - RNA, 20 nt, synthetic construct
  source 1..20: mol_type = other RNA
tgtgcacacatccacgcgta

SEQ ID NO: 55840 - RNA, 20 nt, synthetic construct
  source 1..20: mol_type = other RNA
tgtgcacctaataaaatgtt

SEQ ID NO: 55841 - RNA, 20 nt, synthetic construct
  source 1..20: mol_type = other RNA
tgtgcacctccagtgtcctg

SEQ ID NO: 55842 - RNA, 20 nt, synthetic construct
  source 1..20: mol_type = other RNA
tgtgcacctcgggttcaagc

SEQ ID NO: 55843 - RNA, 20 nt, synthetic construct
  source 1..20: mol_type = other RNA
tgtgcacgtttgctttggag

SEQ ID NO: 55844 - RNA, 20 nt, synthetic construct
  source 1..20: mol_type = other RNA
tgtgcactcttttaaaccca

SEQ ID NO: 55845 - RNA, 20 nt, synthetic construct
  source 1..20: mol_type = other RNA
tgtgcacttaaaatttagat

SEQ ID NO: 55846 - RNA, 20 nt, synthetic construct
  source 1..20: mol_type = other RNA
tgtgcaggaaacttccagaa

SEQ ID NO: 55847 - RNA, 20 nt, synthetic construct
  source 1..20: mol_type = other RNA
tgtgcaggtctgggtttttt

SEQ ID NO: 55848 - RNA, 20 nt, synthetic construct
  source 1..20: mol_type = other RNA
tgtgcagtctaaccattaac

SEQ ID NO: 55849 - RNA, 20 nt, synthetic construct
  source 1..20: mol_type = other RNA
tgtgcagtggatgactaggc

SEQ ID NO: 55850 - RNA, 20 nt, synthetic construct
  source 1..20: mol_type = other RNA
tgtgcatactgtgatgattt

SEQ ID NO: 55851 - RNA, 20 nt, synthetic construct
  source 1..20: mol_type = other RNA
tgtgcatatataccacattt

SEQ ID NO: 55852 - RNA, 20 nt, synthetic construct
  source 1..20: mol_type = other RNA
tgtgcatcaaaggacactat

SEQ ID NO: 55853 - RNA, 20 nt, synthetic construct
  source 1..20: mol_type = other RNA
tgtgcatcagaattccattc

SEQ ID NO: 55854 - RNA, 20 nt, synthetic construct
  source 1..20: mol_type = other RNA
tgtgcatcctttataccttt

SEQ ID NO: 55855 - RNA, 20 nt, synthetic construct
  source 1..20: mol_type = other RNA
tgtgcatgaccctgctatgc

SEQ ID NO: 55856 - RNA, 20 nt, synthetic construct
  source 1..20: mol_type = other RNA
tgtgcatgcatgtctgtctg

SEQ ID NO: 55857 - RNA, 20 nt, synthetic construct
  source 1..20: mol_type = other RNA
tgtgcatgctcccatttggg

SEQ ID NO: 55858 - RNA, 20 nt, synthetic construct
  source 1..20: mol_type = other RNA
tgtgcatgtgcaggaaactt

SEQ ID NO: 55859 - RNA, 20 nt, synthetic construct
  source 1..20: mol_type = other RNA
tgtgcatgtgttgtgcacac

SEQ ID NO: 55860 - RNA, 20 nt, synthetic construct
  source 1..20: mol_type = other RNA
tgtgcattattgtaattatc

SEQ ID NO: 55861 - RNA, 20 nt, synthetic construct
  source 1..20: mol_type = other RNA
tgtgccaactctggcaggtc

SEQ ID NO: 55862 - RNA, 20 nt, synthetic construct
  source 1..20: mol_type = other RNA
tgtgccaagcaacttgatca

SEQ ID NO: 55863 - RNA, 20 nt, synthetic construct
  source 1..20: mol_type = other RNA
tgtgccaagtccgtgcatgc

SEQ ID NO: 55864 - RNA, 20 nt, synthetic construct
  source 1..20: mol_type = other RNA
tgtgccagtgaactccagtc

SEQ ID NO: 55865 - RNA, 20 nt, synthetic construct
  source 1..20: mol_type = other RNA
tgtgccagtgcaaacctcct

SEQ ID NO: 55866 - RNA, 20 nt, synthetic construct
  source 1..20: mol_type = other RNA
tgtgccatctccttaatcca

SEQ ID NO: 55867 - RNA, 20 nt, synthetic construct
  source 1..20: mol_type = other RNA
tgtgcccaaggaaggcaggg

SEQ ID NO: 55868 - RNA, 20 nt, synthetic construct
  source 1..20: mol_type = other RNA
tgtgcccaggctgacttaga

SEQ ID NO: 55869 - RNA, 20 nt, synthetic construct
  source 1..20: mol_type = other RNA
tgtgccgaggcagagagagt

SEQ ID NO: 55870 - RNA, 20 nt, synthetic construct
  source 1..20: mol_type = other RNA
tgtgcctacatagtccactt

SEQ ID NO: 55871 - RNA, 20 nt, synthetic construct
  source 1..20: mol_type = other RNA
tgtgccttgatccattacat

SEQ ID NO: 55872 - RNA, 20 nt, synthetic construct
  source 1..20: mol_type = other RNA
tgtgcgtgaatctgttcctg

SEQ ID NO: 55873 - RNA, 20 nt, synthetic construct
  source 1..20: mol_type = other RNA
tgtgctacctcaaattgtgt

SEQ ID NO: 55874 - RNA, 20 nt, synthetic construct
  source 1..20: mol_type = other RNA
tgtgctagatgctaaacagt

SEQ ID NO: 55875 - RNA, 20 nt, synthetic construct
  source 1..20: mol_type = other RNA
tgtgctagccttcttggagt

SEQ ID NO: 55876 - RNA, 20 nt, synthetic construct
  source 1..20: mol_type = other RNA
tgtgctcagtggttctgcgt

SEQ ID NO: 55877 - RNA, 20 nt, synthetic construct
  source 1..20: mol_type = other RNA
tgtgctctgtatttaatctt

SEQ ID NO: 55878 - RNA, 20 nt, synthetic construct
  source 1..20: mol_type = other RNA
tgtgctcttttcatcactca

SEQ ID NO: 55879 - RNA, 20 nt, synthetic construct
  source 1..20: mol_type = other RNA
tgtgctgaaaccccgcatac

SEQ ID NO: 55880 - RNA, 20 nt, synthetic construct
  source 1..20: mol_type = other RNA
tgtgctgactagtacgtgca

SEQ ID NO: 55881 - RNA, 20 nt, synthetic construct
  source 1..20: mol_type = other RNA
tgtgctgagatggtcagtac

SEQ ID NO: 55882 - RNA, 20 nt, synthetic construct
  source 1..20: mol_type = other RNA
tgtgctgtccatttccttaa

SEQ ID NO: 55883 - RNA, 20 nt, synthetic construct
  source 1..20: mol_type = other RNA
tgtgcttaaatttttgagaa

SEQ ID NO: 55884 - RNA, 20 nt, synthetic construct
  source 1..20: mol_type = other RNA
tgtgcttaaggaaatggaca

SEQ ID NO: 55885 - RNA, 20 nt, synthetic construct
  source 1..20: mol_type = other RNA
tgtgcttaatcttcacactt

SEQ ID NO: 55886 - RNA, 20 nt, synthetic construct
  source 1..20: mol_type = other RNA
tgtgcttacacacacgttta

SEQ ID NO: 55887 - RNA, 20 nt, synthetic construct
  source 1..20: mol_type = other RNA
tgtgcttccacagctatcag

SEQ ID NO: 55888 - RNA, 20 nt, synthetic construct
  source 1..20: mol_type = other RNA
tgtgcttcctaaacctgcta

SEQ ID NO: 55889 - RNA, 20 nt, synthetic construct
  source 1..20: mol_type = other RNA
tgtgcttcgaggtcgcaccc

SEQ ID NO: 55890 - RNA, 20 nt, synthetic construct
  source 1..20: mol_type = other RNA
tgtgcttctgataggaatat

SEQ ID NO: 55891 - RNA, 20 nt, synthetic construct
  source 1..20: mol_type = other RNA
tgtgcttggagtcacttgac

SEQ ID NO: 55892 - RNA, 20 nt, synthetic construct
  source 1..20: mol_type = other RNA
tgtgcttggatattctacag

SEQ ID NO: 55893 - RNA, 20 nt, synthetic construct
  source 1..20: mol_type = other RNA
tgtgcttgggctcccttcca

SEQ ID NO: 55894 - RNA, 20 nt, synthetic construct
  source 1..20: mol_type = other RNA
tgtgcttgtctctctctttc

SEQ ID NO: 55895 - RNA, 20 nt, synthetic construct
  source 1..20: mol_type = other RNA
tgtgcttgtgcttttaatac

SEQ ID NO: 55896 - RNA, 20 nt, synthetic construct
  source 1..20: mol_type = other RNA
tgtgctttctcaacactgtg

SEQ ID NO: 55897 - RNA, 20 nt, synthetic construct
  source 1..20: mol_type = other RNA
tgtgcttttaatactttcac

SEQ ID NO: 55898 - RNA, 20 nt, synthetic construct
  source 1..20: mol_type = other RNA
tgtgcttttctcgtgcatgt

SEQ ID NO: 55899 - RNA, 20 nt, synthetic construct
  source 1..20: mol_type = other RNA
tgtggaaaaatataggaaca

SEQ ID NO: 55900 - RNA, 20 nt, synthetic construct
  source 1..20: mol_type = other RNA
tgtggaaaatgtatgatttt

SEQ ID NO: 55901 - RNA, 20 nt, synthetic construct
  source 1..20: mol_type = other RNA
tgtggaacataatctttggt

SEQ ID NO: 55902 - RNA, 20 nt, synthetic construct
  source 1..20: mol_type = other RNA
tgtggaagcacagtctctgc

SEQ ID NO: 55903 - RNA, 20 nt, synthetic construct
  source 1..20: mol_type = other RNA
tgtggaagcagaactaagac

SEQ ID NO: 55904 - RNA, 20 nt, synthetic construct
  source 1..20: mol_type = other RNA
tgtggaattaactccagggg

SEQ ID NO: 55905 - RNA, 20 nt, synthetic construct
  source 1..20: mol_type = other RNA
tgtggacacactgaaacaat

SEQ ID NO: 55906 - RNA, 20 nt, synthetic construct
  source 1..20: mol_type = other RNA
tgtggaccatgttttaggag

SEQ ID NO: 55907 - RNA, 20 nt, synthetic construct
  source 1..20: mol_type = other RNA
tgtggactttaggctgttca

SEQ ID NO: 55908 - RNA, 20 nt, synthetic construct
  source 1..20: mol_type = other RNA
tgtggagataaagagcaggt

SEQ ID NO: 55909 - RNA, 20 nt, synthetic construct
  source 1..20: mol_type = other RNA
tgtggagatggggacttgct

SEQ ID NO: 55910 - RNA, 20 nt, synthetic construct
  source 1..20: mol_type = other RNA
tgtggaggcagtaccattcc

SEQ ID NO: 55911 - RNA, 20 nt, synthetic construct
  source 1..20: mol_type = other RNA
tgtggagtcctgtcagtttc

SEQ ID NO: 55912 - RNA, 20 nt, synthetic construct
  source 1..20: mol_type = other RNA
tgtggagtggaggggcagga

SEQ ID NO: 55913 - RNA, 20 nt, synthetic construct
  source 1..20: mol_type = other RNA
tgtggagtggggcacctaaa

SEQ ID NO: 55914 - RNA, 20 nt, synthetic construct
  source 1..20: mol_type = other RNA
tgtggagttggtgcaaggat

SEQ ID NO: 55915 - RNA, 20 nt, synthetic construct
  source 1..20: mol_type = other RNA
tgtggatagtgctttttact

SEQ ID NO: 55916 - RNA, 20 nt, synthetic construct
  source 1..20: mol_type = other RNA
tgtggatgagattaatgtag

SEQ ID NO: 55917 - RNA, 20 nt, synthetic construct
  source 1..20: mol_type = other RNA
tgtggatgcatgaggcatat

SEQ ID NO: 55918 - RNA, 20 nt, synthetic construct
  source 1..20: mol_type = other RNA
tgtggatgtccttaatgcca

SEQ ID NO: 55919 - RNA, 20 nt, synthetic construct
  source 1..20: mol_type = other RNA
tgtggatgttggtgagaacc

SEQ ID NO: 55920 - RNA, 20 nt, synthetic construct
  source 1..20: mol_type = other RNA
tgtggcaaatttatgtgaaa

SEQ ID NO: 55921 - RNA, 20 nt, synthetic construct
  source 1..20: mol_type = other RNA
tgtggcagaatttacatttt

SEQ ID NO: 55922 - RNA, 20 nt, synthetic construct
  source 1..20: mol_type = other RNA
tgtggcaggggctgcatcat

SEQ ID NO: 55923 - RNA, 20 nt, synthetic construct
  source 1..20: mol_type = other RNA
tgtggcatctttgttacagc

SEQ ID NO: 55924 - RNA, 20 nt, synthetic construct
  source 1..20: mol_type = other RNA
tgtggcatgtctgtagttac

SEQ ID NO: 55925 - RNA, 20 nt, synthetic construct
  source 1..20: mol_type = other RNA
tgtggcatttcttacacatt

SEQ ID NO: 55926 - RNA, 20 nt, synthetic construct
  source 1..20: mol_type = other RNA
tgtggccaggaggaggaggg

SEQ ID NO: 55927 - RNA, 20 nt, synthetic construct
  source 1..20: mol_type = other RNA
tgtggccgagggagacggcg

SEQ ID NO: 55928 - RNA, 20 nt, synthetic construct
  source 1..20: mol_type = other RNA
tgtggcctcttcccttgtgc

SEQ ID NO: 55929 - RNA, 20 nt, synthetic construct
  source 1..20: mol_type = other RNA
tgtggctaacaatcaaattt

SEQ ID NO: 55930 - RNA, 20 nt, synthetic construct
  source 1..20: mol_type = other RNA
tgtggctacaccctgggaaa

SEQ ID NO: 55931 - RNA, 20 nt, synthetic construct
  source 1..20: mol_type = other RNA
tgtggctcactcatttccgt

SEQ ID NO: 55932 - RNA, 20 nt, synthetic construct
  source 1..20: mol_type = other RNA
tgtggctgacatgtgtaaaa

SEQ ID NO: 55933 - RNA, 20 nt, synthetic construct
  source 1..20: mol_type = other RNA
tgtggcttctcaaactgtgt

SEQ ID NO: 55934 - RNA, 20 nt, synthetic construct
  source 1..20: mol_type = other RNA
tgtggcttgcaaggcccacc

SEQ ID NO: 55935 - RNA, 20 nt, synthetic construct
  source 1..20: mol_type = other RNA
tgtggcttgggtgacctcat

SEQ ID NO: 55936 - RNA, 20 nt, synthetic construct
  source 1..20: mol_type = other RNA
tgtggcttgtggctacaccc

SEQ ID NO: 55937 - RNA, 20 nt, synthetic construct
  source 1..20: mol_type = other RNA
tgtggctttaaggcgcagac

SEQ ID NO: 55938 - RNA, 20 nt, synthetic construct
  source 1..20: mol_type = other RNA
tgtgggaattcagtcaccaa

SEQ ID NO: 55939 - RNA, 20 nt, synthetic construct
  source 1..20: mol_type = other RNA
tgtgggccaccaagccctgc

SEQ ID NO: 55940 - RNA, 20 nt, synthetic construct
  source 1..20: mol_type = other RNA
tgtggggaatgctcataatt

SEQ ID NO: 55941 - RNA, 20 nt, synthetic construct
  source 1..20: mol_type = other RNA
tgtggggactttgtggcctc

SEQ ID NO: 55942 - RNA, 20 nt, synthetic construct
  source 1..20: mol_type = other RNA
tgtgggtaaattaagtaaaa

SEQ ID NO: 55943 - RNA, 20 nt, synthetic construct
  source 1..20: mol_type = other RNA
tgtgggtattttgttgttgt

SEQ ID NO: 55944 - RNA, 20 nt, synthetic construct
  source 1..20: mol_type = other RNA
tgtgggttaaaagttagctg

SEQ ID NO: 55945 - RNA, 20 nt, synthetic construct
  source 1..20: mol_type = other RNA
tgtggtcacactttttgtga

SEQ ID NO: 55946 - RNA, 20 nt, synthetic construct
  source 1..20: mol_type = other RNA
tgtggtcactgtttggacag

SEQ ID NO: 55947 - RNA, 20 nt, synthetic construct
  source 1..20: mol_type = other RNA
tgtggtccctgctactcagg

SEQ ID NO: 55948 - RNA, 20 nt, synthetic construct
  source 1..20: mol_type = other RNA
tgtggtctcagctcctcaga

SEQ ID NO: 55949 - RNA, 20 nt, synthetic construct
  source 1..20: mol_type = other RNA
tgtggtctcttcgagggggc

SEQ ID NO: 55950 - RNA, 20 nt, synthetic construct
  source 1..20: mol_type = other RNA
tgtggtcttaagagactctc

SEQ ID NO: 55951 - RNA, 20 nt, synthetic construct
  source 1..20: mol_type = other RNA
tgtggtcttgtctcaacctt

SEQ ID NO: 55952 - RNA, 20 nt, synthetic construct
  source 1..20: mol_type = other RNA
tgtggtgctgcacgtctgtg

SEQ ID NO: 55953 - RNA, 20 nt, synthetic construct
  source 1..20: mol_type = other RNA
tgtggtggtatgcactgtac

SEQ ID NO: 55954 - RNA, 20 nt, synthetic construct
  source 1..20: mol_type = other RNA
tgtggtggtctcaccctcag

SEQ ID NO: 55955 - RNA, 20 nt, synthetic construct
  source 1..20: mol_type = other RNA
tgtggtgtggcatgtctgta

SEQ ID NO: 55956 - RNA, 20 nt, synthetic construct
  source 1..20: mol_type = other RNA
tgtggttattgagtctgtag

SEQ ID NO: 55957 - RNA, 20 nt, synthetic construct
  source 1..20: mol_type = other RNA
tgtggttcatatttcccttt

SEQ ID NO: 55958 - RNA, 20 nt, synthetic construct
  source 1..20: mol_type = other RNA
tgtggtttcttgaatctctc

SEQ ID NO: 55959 - RNA, 20 nt, synthetic construct
  source 1..20: mol_type = other RNA
tgtggtttgccttttcactc

SEQ ID NO: 55960 - RNA, 20 nt, synthetic construct
  source 1..20: mol_type = other RNA
tgtggttttaacctcttgaa

SEQ ID NO: 55961 - RNA, 20 nt, synthetic construct
  source 1..20: mol_type = other RNA
tgtggtttttggttcacttg

SEQ ID NO: 55962 - RNA, 20 nt, synthetic construct
  source 1..20: mol_type = other RNA
tgtgtaaaacatctggaagg

SEQ ID NO: 55963 - RNA, 20 nt, synthetic construct
  source 1..20: mol_type = other RNA
tgtgtaaacactgttctgcg

SEQ ID NO: 55964 - RNA, 20 nt, synthetic construct
  source 1..20: mol_type = other RNA
tgtgtaactaccactgaggt

SEQ ID NO: 55965 - RNA, 20 nt, synthetic construct
  source 1..20: mol_type = other RNA
tgtgtaagaaatgccacatt

SEQ ID NO: 55966 - RNA, 20 nt, synthetic construct
  source 1..20: mol_type = other RNA
tgtgtaagcacacatgaacc

SEQ ID NO: 55967 - RNA, 20 nt, synthetic construct
  source 1..20: mol_type = other RNA
tgtgtaatactgtagaatgt

SEQ ID NO: 55968 - RNA, 20 nt, synthetic construct
  source 1..20: mol_type = other RNA
tgtgtaattgtaccttggag

SEQ ID NO: 55969 - RNA, 20 nt, synthetic construct
  source 1..20: mol_type = other RNA
tgtgtacaatggggctttac

SEQ ID NO: 55970 - RNA, 20 nt, synthetic construct
  source 1..20: mol_type = other RNA
tgtgtaccaaaagtcctgtt

SEQ ID NO: 55971 - RNA, 20 nt, synthetic construct
  source 1..20: mol_type = other RNA
tgtgtacccgtgtgttttgt

SEQ ID NO: 55972 - RNA, 20 nt, synthetic construct
  source 1..20: mol_type = other RNA
tgtgtagaaatgtggagata

SEQ ID NO: 55973 - RNA, 20 nt, synthetic construct
  source 1..20: mol_type = other RNA
tgtgtagaggtgaagttaag

SEQ ID NO: 55974 - RNA, 20 nt, synthetic construct
  source 1..20: mol_type = other RNA
tgtgtagcgggaaaaaataa

SEQ ID NO: 55975 - RNA, 20 nt, synthetic construct
  source 1..20: mol_type = other RNA
tgtgtaggaaggaacacaca

SEQ ID NO: 55976 - RNA, 20 nt, synthetic construct
  source 1..20: mol_type = other RNA
tgtgtagtcagtgaagatgc

SEQ ID NO: 55977 - RNA, 20 nt, synthetic construct
  source 1..20: mol_type = other RNA
tgtgtagttattattgtcat

SEQ ID NO: 55978 - RNA, 20 nt, synthetic construct
  source 1..20: mol_type = other RNA
tgtgtagttcatcagcataa

SEQ ID NO: 55979 - RNA, 20 nt, synthetic construct
  source 1..20: mol_type = other RNA
tgtgtagttctggtgtcgtt

SEQ ID NO: 55980 - RNA, 20 nt, synthetic construct
  source 1..20: mol_type = other RNA
tgtgtataacccgttttttc

SEQ ID NO: 55981 - RNA, 20 nt, synthetic construct
  source 1..20: mol_type = other RNA
tgtgtatatggtaaaatgta

SEQ ID NO: 55982 - RNA, 20 nt, synthetic construct
  source 1..20: mol_type = other RNA
tgtgtatcttttgttagatt

SEQ ID NO: 55983 - RNA, 20 nt, synthetic construct
  source 1..20: mol_type = other RNA
tgtgtatgatcaaagtgaaa

SEQ ID NO: 55984 - RNA, 20 nt, synthetic construct
  source 1..20: mol_type = other RNA
tgtgtatgtgtagtcagtga

SEQ ID NO: 55985 - RNA, 20 nt, synthetic construct
  source 1..20: mol_type = other RNA
tgtgtatgttacacttccag

SEQ ID NO: 55986 - RNA, 20 nt, synthetic construct
  source 1..20: mol_type = other RNA
tgtgtatttagggagcatat

SEQ ID NO: 55987 - RNA, 20 nt, synthetic construct
  source 1..20: mol_type = other RNA
tgtgtcaagtacaactaata

SEQ ID NO: 55988 - RNA, 20 nt, synthetic construct
  source 1..20: mol_type = other RNA
tgtgtcagtgacagttctgt

SEQ ID NO: 55989 - RNA, 20 nt, synthetic construct
  source 1..20: mol_type = other RNA
tgtgtcatttttgtattctg

SEQ ID NO: 55990 - RNA, 20 nt, synthetic construct
  source 1..20: mol_type = other RNA
tgtgtccacacaatggtcag

SEQ ID NO: 55991 - RNA, 20 nt, synthetic construct
  source 1..20: mol_type = other RNA
tgtgtccaggccaacagggc

SEQ ID NO: 55992 - RNA, 20 nt, synthetic construct
  source 1..20: mol_type = other RNA
tgtgtcgagaaaaatgggga

SEQ ID NO: 55993 - RNA, 20 nt, synthetic construct
  source 1..20: mol_type = other RNA
tgtgtctagtgaatgagacc

SEQ ID NO: 55994 - RNA, 20 nt, synthetic construct
  source 1..20: mol_type = other RNA
tgtgtctcataaagccggat

SEQ ID NO: 55995 - RNA, 20 nt, synthetic construct
  source 1..20: mol_type = other RNA
tgtgtctctgacatgagagc

SEQ ID NO: 55996 - RNA, 20 nt, synthetic construct
  source 1..20: mol_type = other RNA
tgtgtctctgctctcaagta

SEQ ID NO: 55997 - RNA, 20 nt, synthetic construct
  source 1..20: mol_type = other RNA
tgtgtctgactacactgaag

SEQ ID NO: 55998 - RNA, 20 nt, synthetic construct
  source 1..20: mol_type = other RNA
tgtgtctgcgccttaaagcc

SEQ ID NO: 55999 - RNA, 20 nt, synthetic construct
  source 1..20: mol_type = other RNA
tgtgtcttaaattcaaagta

SEQ ID NO: 56000 - RNA, 20 nt, synthetic construct
  source 1..20: mol_type = other RNA
tgtgtcttctgtttttctta

SEQ ID NO: 56001 - RNA, 20 nt, synthetic construct
  source 1..20: mol_type = other RNA
tgtgtgaagaaggaatgtgc

SEQ ID NO: 56002 - RNA, 20 nt, synthetic construct
  source 1..20: mol_type = other RNA
tgtgtgaatggaaaattcaa

SEQ ID NO: 56003 - RNA, 20 nt, synthetic construct
  source 1..20: mol_type = other RNA
tgtgtgactgtagtccctgc

SEQ ID NO: 56004 - RNA, 20 nt, synthetic construct
  source 1..20: mol_type = other RNA
tgtgtgatttcatatgaatt

SEQ ID NO: 56005 - RNA, 20 nt, synthetic construct
  source 1..20: mol_type = other RNA
tgtgtgcaaaggattagaaa

SEQ ID NO: 56006 - RNA, 20 nt, synthetic construct
  source 1..20: mol_type = other RNA
tgtgtgcacaacacatgcac

SEQ ID NO: 56007 - RNA, 20 nt, synthetic construct
  source 1..20: mol_type = other RNA
tgtgtgcacctaataaaatg

SEQ ID NO: 56008 - RNA, 20 nt, synthetic construct
  source 1..20: mol_type = other RNA
tgtgtgcatgcatgtctgtc

SEQ ID NO: 56009 - RNA, 20 nt, synthetic construct
  source 1..20: mol_type = other RNA
tgtgtgcatgctcccatttg

SEQ ID NO: 56010 - RNA, 20 nt, synthetic construct
  source 1..20: mol_type = other RNA
tgtgtgcttacacacacgtt

SEQ ID NO: 56011 - RNA, 20 nt, synthetic construct
  source 1..20: mol_type = other RNA
tgtgtgcttggagtcacttg

SEQ ID NO: 56012 - RNA, 20 nt, synthetic construct
  source 1..20: mol_type = other RNA
tgtgtggacacactgaaaca

SEQ ID NO: 56013 - RNA, 20 nt, synthetic construct
  source 1..20: mol_type = other RNA
tgtgtggagtggggcaccta

SEQ ID NO: 56014 - RNA, 20 nt, synthetic construct
  source 1..20: mol_type = other RNA
tgtgtggcttctcaaactgt

SEQ ID NO: 56015 - RNA, 20 nt, synthetic construct
  source 1..20: mol_type = other RNA
tgtgtggtttgccttttcac

SEQ ID NO: 56016 - RNA, 20 nt, synthetic construct
  source 1..20: mol_type = other RNA
tgtgtgtaagcacacatgaa

SEQ ID NO: 56017 - RNA, 20 nt, synthetic construct
  source 1..20: mol_type = other RNA
tgtgtgtataacccgttttt

SEQ ID NO: 56018 - RNA, 20 nt, synthetic construct
  source 1..20: mol_type = other RNA
tgtgtgtccaggccaacagg

SEQ ID NO: 56019 - RNA, 20 nt, synthetic construct
  source 1..20: mol_type = other RNA
tgtgtgtcgagaaaaatggg

SEQ ID NO: 56020 - RNA, 20 nt, synthetic construct
  source 1..20: mol_type = other RNA
tgtgtgtctctgctctcaag

SEQ ID NO: 56021 - RNA, 20 nt, synthetic construct
  source 1..20: mol_type = other RNA
tgtgtgtgtccaggccaaca

SEQ ID NO: 56022 - RNA, 20 nt, synthetic construct
  source 1..20: mol_type = other RNA
tgtgtgttaaatttgattgt

SEQ ID NO: 56023 - RNA, 20 nt, synthetic construct
  source 1..20: mol_type = other RNA
tgtgtgttccagacaaaaat

SEQ ID NO: 56024 - RNA, 20 nt, synthetic construct
  source 1..20: mol_type = other RNA
tgtgtgttccttcctacaca

SEQ ID NO: 56025 - RNA, 20 nt, synthetic construct
  source 1..20: mol_type = other RNA
tgtgtgttctctttttgaca

SEQ ID NO: 56026 - RNA, 20 nt, synthetic construct
  source 1..20: mol_type = other RNA
tgtgtgtttgtgaaaaatac

SEQ ID NO: 56027 - RNA, 20 nt, synthetic construct
  source 1..20: mol_type = other RNA
tgtgttaaaccattcttgca

SEQ ID NO: 56028 - RNA, 20 nt, synthetic construct
  source 1..20: mol_type = other RNA
tgtgttacaactctaataac

SEQ ID NO: 56029 - RNA, 20 nt, synthetic construct
  source 1..20: mol_type = other RNA
tgtgttacattgccttcgca

SEQ ID NO: 56030 - RNA, 20 nt, synthetic construct
  source 1..20: mol_type = other RNA
tgtgttccagacaaaaattt

SEQ ID NO: 56031 - RNA, 20 nt, synthetic construct
  source 1..20: mol_type = other RNA
tgtgttccttcctacacata

SEQ ID NO: 56032 - RNA, 20 nt, synthetic construct
  source 1..20: mol_type = other RNA
tgtgttctctttttgacaga

SEQ ID NO: 56033 - RNA, 20 nt, synthetic construct
  source 1..20: mol_type = other RNA
tgtgttctgccttgaggtga

SEQ ID NO: 56034 - RNA, 20 nt, synthetic construct
  source 1..20: mol_type = other RNA
tgtgttcttttccttcttaa

SEQ ID NO: 56035 - RNA, 20 nt, synthetic construct
  source 1..20: mol_type = other RNA
tgtgttgaccttagtggttg

SEQ ID NO: 56036 - RNA, 20 nt, synthetic construct
  source 1..20: mol_type = other RNA
tgtgttgactgacataactg

SEQ ID NO: 56037 - RNA, 20 nt, synthetic construct
  source 1..20: mol_type = other RNA
tgtgttgataaatatgtgtt

SEQ ID NO: 56038 - RNA, 20 nt, synthetic construct
  source 1..20: mol_type = other RNA
tgtgttggcactgaagccag

SEQ ID NO: 56039 - RNA, 20 nt, synthetic construct
  source 1..20: mol_type = other RNA
tgtgttggtgtttctgacag

SEQ ID NO: 56040 - RNA, 20 nt, synthetic construct
  source 1..20: mol_type = other RNA
tgtgttgtctgattcagttt

SEQ ID NO: 56041 - RNA, 20 nt, synthetic construct
  source 1..20: mol_type = other RNA
tgtgttgtgcacacatccac

SEQ ID NO: 56042 - RNA, 20 nt, synthetic construct
  source 1..20: mol_type = other RNA
tgtgtttaatttccacccat

SEQ ID NO: 56043 - RNA, 20 nt, synthetic construct
  source 1..20: mol_type = other RNA
tgtgtttagaataatacact

SEQ ID NO: 56044 - RNA, 20 nt, synthetic construct
  source 1..20: mol_type = other RNA
tgtgtttatgaatgatgcca

SEQ ID NO: 56045 - RNA, 20 nt, synthetic construct
  source 1..20: mol_type = other RNA
tgtgtttcgcaaagtaaaaa

SEQ ID NO: 56046 - RNA, 20 nt, synthetic construct
  source 1..20: mol_type = other RNA
tgtgtttctgctattctctt

SEQ ID NO: 56047 - RNA, 20 nt, synthetic construct
  source 1..20: mol_type = other RNA
tgtgtttgtgaaaaatacaa

SEQ ID NO: 56048 - RNA, 20 nt, synthetic construct
  source 1..20: mol_type = other RNA
tgtgtttgtgaccagatcaa

SEQ ID NO: 56049 - RNA, 20 nt, synthetic construct
  source 1..20: mol_type = other RNA
tgtgtttgtttgctagagct

SEQ ID NO: 56050 - RNA, 20 nt, synthetic construct
  source 1..20: mol_type = other RNA
tgtgttttatttaggccctc

SEQ ID NO: 56051 - RNA, 20 nt, synthetic construct
  source 1..20: mol_type = other RNA
tgtgttttatttggctgtta

SEQ ID NO: 56052 - RNA, 20 nt, synthetic construct
  source 1..20: mol_type = other RNA
tgtgttttcactctcaatag

SEQ ID NO: 56053 - RNA, 20 nt, synthetic construct
  source 1..20: mol_type = other RNA
tgtgttttcattcgttcaaa

SEQ ID NO: 56054 - RNA, 20 nt, synthetic construct
  source 1..20: mol_type = other RNA
tgtgttttgttttgaataac

SEQ ID NO: 56055 - RNA, 20 nt, synthetic construct
  source 1..20: mol_type = other RNA
tgtgtttttgtaaatgaaac

SEQ ID NO: 56056 - RNA, 20 nt, synthetic construct
  source 1..20: mol_type = other RNA
tgttaaaaaatcaaaagacc

SEQ ID NO: 56057 - RNA, 20 nt, synthetic construct
  source 1..20: mol_type = other RNA
tgttaaaagatacgaaaatc

SEQ ID NO: 56058 - RNA, 20 nt, synthetic construct
  source 1..20: mol_type = other RNA
tgttaaatgaaggaaaaaac

SEQ ID NO: 56059 - RNA, 20 nt, synthetic construct
  source 1..20: mol_type = other RNA
tgttaaatttcattaggttg

SEQ ID NO: 56060 - RNA, 20 nt, synthetic construct
  source 1..20: mol_type = other RNA
tgttaaatttgattgttagc

SEQ ID NO: 56061 - RNA, 20 nt, synthetic construct
  source 1..20: mol_type = other RNA
tgttaacaattggtgaatct

SEQ ID NO: 56062 - RNA, 20 nt, synthetic construct
  source 1..20: mol_type = other RNA
tgttaacatttcttctagtc

SEQ ID NO: 56063 - RNA, 20 nt, synthetic construct
  source 1..20: mol_type = other RNA
tgttaactgacttacagacc

SEQ ID NO: 56064 - RNA, 20 nt, synthetic construct
  source 1..20: mol_type = other RNA
tgttaactgtagagaaaatg

SEQ ID NO: 56065 - RNA, 20 nt, synthetic construct
  source 1..20: mol_type = other RNA
tgttaagattcaacaaaact

SEQ ID NO: 56066 - RNA, 20 nt, synthetic construct
  source 1..20: mol_type = other RNA
tgttaagcattttccggttg

SEQ ID NO: 56067 - RNA, 20 nt, synthetic construct
  source 1..20: mol_type = other RNA
tgttaagcccaacttcacac

SEQ ID NO: 56068 - RNA, 20 nt, synthetic construct
  source 1..20: mol_type = other RNA
tgttaagccgttccatcaga

SEQ ID NO: 56069 - RNA, 20 nt, synthetic construct
  source 1..20: mol_type = other RNA
tgttaagtgtttgaaaagtg

SEQ ID NO: 56070 - RNA, 20 nt, synthetic construct
  source 1..20: mol_type = other RNA
tgttaataaccctgttttgt

SEQ ID NO: 56071 - RNA, 20 nt, synthetic construct
  source 1..20: mol_type = other RNA
tgttaatagataggtcatgt

SEQ ID NO: 56072 - RNA, 20 nt, synthetic construct
  source 1..20: mol_type = other RNA
tgttaatgggcacttgggat

SEQ ID NO: 56073 - RNA, 20 nt, synthetic construct
  source 1..20: mol_type = other RNA
tgttaatggttagactgcac

SEQ ID NO: 56074 - RNA, 20 nt, synthetic construct
  source 1..20: mol_type = other RNA
tgttaatgtgatatgccaca

SEQ ID NO: 56075 - RNA, 20 nt, synthetic construct
  source 1..20: mol_type = other RNA
tgttaattatttgtgcatac

SEQ ID NO: 56076 - RNA, 20 nt, synthetic construct
  source 1..20: mol_type = other RNA
tgttaattcttccttaatgt

SEQ ID NO: 56077 - RNA, 20 nt, synthetic construct
  source 1..20: mol_type = other RNA
tgttacaactctaataacag

SEQ ID NO: 56078 - RNA, 20 nt, synthetic construct
  source 1..20: mol_type = other RNA
tgttacacttccagtacatc

SEQ ID NO: 56079 - RNA, 20 nt, synthetic construct
  source 1..20: mol_type = other RNA
tgttacagcagctctagcaa

SEQ ID NO: 56080 - RNA, 20 nt, synthetic construct
  source 1..20: mol_type = other RNA
tgttacagctcttctcagtt

SEQ ID NO: 56081 - RNA, 20 nt, synthetic construct
  source 1..20: mol_type = other RNA
tgttacatggttctgtgcta

SEQ ID NO: 56082 - RNA, 20 nt, synthetic construct
  source 1..20: mol_type = other RNA
tgttacattgccttcgcagg

SEQ ID NO: 56083 - RNA, 20 nt, synthetic construct
  source 1..20: mol_type = other RNA
tgttaccatttgaccttcct

SEQ ID NO: 56084 - RNA, 20 nt, synthetic construct
  source 1..20: mol_type = other RNA
tgttactcattatggttgtt

SEQ ID NO: 56085 - RNA, 20 nt, synthetic construct
  source 1..20: mol_type = other RNA
tgttactcccgatttcagtt

SEQ ID NO: 56086 - RNA, 20 nt, synthetic construct
  source 1..20: mol_type = other RNA
tgttactgatctgctcaagt

SEQ ID NO: 56087 - RNA, 20 nt, synthetic construct
  source 1..20: mol_type = other RNA
tgttacttctcagctatagc

SEQ ID NO: 56088 - RNA, 20 nt, synthetic construct
  source 1..20: mol_type = other RNA
tgttacttgaaatcatttca

SEQ ID NO: 56089 - RNA, 20 nt, synthetic construct
  source 1..20: mol_type = other RNA
tgttacttgactattttacc

SEQ ID NO: 56090 - RNA, 20 nt, synthetic construct
  source 1..20: mol_type = other RNA
tgttagaacaattttgaatg

SEQ ID NO: 56091 - RNA, 20 nt, synthetic construct
  source 1..20: mol_type = other RNA
tgttagaattacaggcatga

SEQ ID NO: 56092 - RNA, 20 nt, synthetic construct
  source 1..20: mol_type = other RNA
tgttagaattcaggacagtt

SEQ ID NO: 56093 - RNA, 20 nt, synthetic construct
  source 1..20: mol_type = other RNA
tgttagaattttgcttttgc

SEQ ID NO: 56094 - RNA, 20 nt, synthetic construct
  source 1..20: mol_type = other RNA
tgttagatatcccatataag

SEQ ID NO: 56095 - RNA, 20 nt, synthetic construct
  source 1..20: mol_type = other RNA
tgttagatctgggataatgc

SEQ ID NO: 56096 - RNA, 20 nt, synthetic construct
  source 1..20: mol_type = other RNA
tgttagatggtgctgattta

SEQ ID NO: 56097 - RNA, 20 nt, synthetic construct
  source 1..20: mol_type = other RNA
tgttagattaggaaacagat

SEQ ID NO: 56098 - RNA, 20 nt, synthetic construct
  source 1..20: mol_type = other RNA
tgttagatttattcatagtc

SEQ ID NO: 56099 - RNA, 20 nt, synthetic construct
  source 1..20: mol_type = other RNA
tgttagcaggactggactcc

SEQ ID NO: 56100 - RNA, 20 nt, synthetic construct
  source 1..20: mol_type = other RNA
tgttagcataattcgaaata

SEQ ID NO: 56101 - RNA, 20 nt, synthetic construct
  source 1..20: mol_type = other RNA
tgttagccacagcgttgttc

SEQ ID NO: 56102 - RNA, 20 nt, synthetic construct
  source 1..20: mol_type = other RNA
tgttagccttgccattctcc

SEQ ID NO: 56103 - RNA, 20 nt, synthetic construct
  source 1..20: mol_type = other RNA
tgttaggcaatccttccgcc

SEQ ID NO: 56104 - RNA, 20 nt, synthetic construct
  source 1..20: mol_type = other RNA
tgttagggacttatggagat

SEQ ID NO: 56105 - RNA, 20 nt, synthetic construct
  source 1..20: mol_type = other RNA
tgttaggtattattttcaca

SEQ ID NO: 56106 - RNA, 20 nt, synthetic construct
  source 1..20: mol_type = other RNA
tgttaggtgctggcttcaat

SEQ ID NO: 56107 - RNA, 20 nt, synthetic construct
  source 1..20: mol_type = other RNA
tgttaggttgaaagttcaga

SEQ ID NO: 56108 - RNA, 20 nt, synthetic construct
  source 1..20: mol_type = other RNA
tgttagtaggaaaaccatgt

SEQ ID NO: 56109 - RNA, 20 nt, synthetic construct
  source 1..20: mol_type = other RNA
tgttagtcccctagtggatg

SEQ ID NO: 56110 - RNA, 20 nt, synthetic construct
  source 1..20: mol_type = other RNA
tgttagtgccttcagaagga

SEQ ID NO: 56111 - RNA, 20 nt, synthetic construct
  source 1..20: mol_type = other RNA
tgttagtttattcatacgtt

SEQ ID NO: 56112 - RNA, 20 nt, synthetic construct
  source 1..20: mol_type = other RNA
tgttataagcaaagatatgg

SEQ ID NO: 56113 - RNA, 20 nt, synthetic construct
  source 1..20: mol_type = other RNA
tgttataatgagatagacca

SEQ ID NO: 56114 - RNA, 20 nt, synthetic construct
  source 1..20: mol_type = other RNA
tgttatatccagattgatat

SEQ ID NO: 56115 - RNA, 20 nt, synthetic construct
  source 1..20: mol_type = other RNA
tgttatatttccgtatccag

SEQ ID NO: 56116 - RNA, 20 nt, synthetic construct
  source 1..20: mol_type = other RNA
tgttatctgaacgtctttaa

SEQ ID NO: 56117 - RNA, 20 nt, synthetic construct
  source 1..20: mol_type = other RNA
tgttatctgggaacagcccc

SEQ ID NO: 56118 - RNA, 20 nt, synthetic construct
  source 1..20: mol_type = other RNA
tgttatgaagcttttctcct

SEQ ID NO: 56119 - RNA, 20 nt, synthetic construct
  source 1..20: mol_type = other RNA
tgttatgacaagactaccta

SEQ ID NO: 56120 - RNA, 20 nt, synthetic construct
  source 1..20: mol_type = other RNA
tgttatgccccctcttctct

SEQ ID NO: 56121 - RNA, 20 nt, synthetic construct
  source 1..20: mol_type = other RNA
tgttatggtaggtgcttttt

SEQ ID NO: 56122 - RNA, 20 nt, synthetic construct
  source 1..20: mol_type = other RNA
tgttatgtacattttaccat

SEQ ID NO: 56123 - RNA, 20 nt, synthetic construct
  source 1..20: mol_type = other RNA
tgttattagagttgtaacac

SEQ ID NO: 56124 - RNA, 20 nt, synthetic construct
  source 1..20: mol_type = other RNA
tgttatttggggattctgct

SEQ ID NO: 56125 - RNA, 20 nt, synthetic construct
  source 1..20: mol_type = other RNA
tgttatttgttctgtcacgg

SEQ ID NO: 56126 - RNA, 20 nt, synthetic construct
  source 1..20: mol_type = other RNA
tgttattttaatcgaatcct

SEQ ID NO: 56127 - RNA, 20 nt, synthetic construct
  source 1..20: mol_type = other RNA
tgttcaaaagccccaaacca

SEQ ID NO: 56128 - RNA, 20 nt, synthetic construct
  source 1..20: mol_type = other RNA
tgttcaaaatacagtgtttt

SEQ ID NO: 56129 - RNA, 20 nt, synthetic construct
  source 1..20: mol_type = other RNA
tgttcaaccctcggcctcta

SEQ ID NO: 56130 - RNA, 20 nt, synthetic construct
  source 1..20: mol_type = other RNA
tgttcaagcgctgaagtact

SEQ ID NO: 56131 - RNA, 20 nt, synthetic construct
  source 1..20: mol_type = other RNA
tgttcaaggtgttcctgaag

SEQ ID NO: 56132 - RNA, 20 nt, synthetic construct
  source 1..20: mol_type = other RNA
tgttcaagtatttccacggg

SEQ ID NO: 56133 - RNA, 20 nt, synthetic construct
  source 1..20: mol_type = other RNA
tgttcaatttagaaaatgct

SEQ ID NO: 56134 - RNA, 20 nt, synthetic construct
  source 1..20: mol_type = other RNA
tgttcacatttcgccttctc

SEQ ID NO: 56135 - RNA, 20 nt, synthetic construct
  source 1..20: mol_type = other RNA
tgttcactgcagaattactg

SEQ ID NO: 56136 - RNA, 20 nt, synthetic construct
  source 1..20: mol_type = other RNA
tgttcagaaatagactccca

SEQ ID NO: 56137 - RNA, 20 nt, synthetic construct
  source 1..20: mol_type = other RNA
tgttcagatagaaaagacaa

SEQ ID NO: 56138 - RNA, 20 nt, synthetic construct
  source 1..20: mol_type = other RNA
tgttcaggagttttgcctct

SEQ ID NO: 56139 - RNA, 20 nt, synthetic construct
  source 1..20: mol_type = other RNA
tgttcagggaaggctgcaag

SEQ ID NO: 56140 - RNA, 20 nt, synthetic construct
  source 1..20: mol_type = other RNA
tgttcagttataaaagaatc

SEQ ID NO: 56141 - RNA, 20 nt, synthetic construct
  source 1..20: mol_type = other RNA
tgttcagttgaaaagtatgg

SEQ ID NO: 56142 - RNA, 20 nt, synthetic construct
  source 1..20: mol_type = other RNA
tgttcagtttatgggtcaac

SEQ ID NO: 56143 - RNA, 20 nt, synthetic construct
  source 1..20: mol_type = other RNA
tgttcatacaatagtttagt

SEQ ID NO: 56144 - RNA, 20 nt, synthetic construct
  source 1..20: mol_type = other RNA
tgttcatcatcttttgcctg

SEQ ID NO: 56145 - RNA, 20 nt, synthetic construct
  source 1..20: mol_type = other RNA
tgttcatgaaatccccttta

SEQ ID NO: 56146 - RNA, 20 nt, synthetic construct
  source 1..20: mol_type = other RNA
tgttcatgaaccttcaccaa

SEQ ID NO: 56147 - RNA, 20 nt, synthetic construct
  source 1..20: mol_type = other RNA
tgttcatgggaagatgctcc

SEQ ID NO: 56148 - RNA, 20 nt, synthetic construct
  source 1..20: mol_type = other RNA
tgttcatgtctgtgtagttc

SEQ ID NO: 56149 - RNA, 20 nt, synthetic construct
  source 1..20: mol_type = other RNA
tgttcatgtttacagaaata

SEQ ID NO: 56150 - RNA, 20 nt, synthetic construct
  source 1..20: mol_type = other RNA
tgttcattcatctgttaatg

SEQ ID NO: 56151 - RNA, 20 nt, synthetic construct
  source 1..20: mol_type = other RNA
tgttcatttgagaatttcag

SEQ ID NO: 56152 - RNA, 20 nt, synthetic construct
  source 1..20: mol_type = other RNA
tgttccacatgttactcatt

SEQ ID NO: 56153 - RNA, 20 nt, synthetic construct
  source 1..20: mol_type = other RNA
tgttccagacaaaaattttc

SEQ ID NO: 56154 - RNA, 20 nt, synthetic construct
  source 1..20: mol_type = other RNA
tgttccaggcctcgctcttg

SEQ ID NO: 56155 - RNA, 20 nt, synthetic construct
  source 1..20: mol_type = other RNA
tgttccaggggggaaaaaac

SEQ ID NO: 56156 - RNA, 20 nt, synthetic construct
  source 1..20: mol_type = other RNA
tgttccatcggtctgtattt

SEQ ID NO: 56157 - RNA, 20 nt, synthetic construct
  source 1..20: mol_type = other RNA
tgttcccaagcaagtgtggt

SEQ ID NO: 56158 - RNA, 20 nt, synthetic construct
  source 1..20: mol_type = other RNA
tgttcccagataacagtggt

SEQ ID NO: 56159 - RNA, 20 nt, synthetic construct
  source 1..20: mol_type = other RNA
tgttccccaagccaaattaa

SEQ ID NO: 56160 - RNA, 20 nt, synthetic construct
  source 1..20: mol_type = other RNA
tgttcccggattggaaaact

SEQ ID NO: 56161 - RNA, 20 nt, synthetic construct
  source 1..20: mol_type = other RNA
tgttccctagaacttaaaat

SEQ ID NO: 56162 - RNA, 20 nt, synthetic construct
  source 1..20: mol_type = other RNA
tgttccctcttcaatatttt

SEQ ID NO: 56163 - RNA, 20 nt, synthetic construct
  source 1..20: mol_type = other RNA
tgttcccttcttaaatgtga

SEQ ID NO: 56164 - RNA, 20 nt, synthetic construct
  source 1..20: mol_type = other RNA
tgttccgattttacttacta

SEQ ID NO: 56165 - RNA, 20 nt, synthetic construct
  source 1..20: mol_type = other RNA
tgttccgggatcctgtccag

SEQ ID NO: 56166 - RNA, 20 nt, synthetic construct
  source 1..20: mol_type = other RNA
tgttcctatatttttccaca

SEQ ID NO: 56167 - RNA, 20 nt, synthetic construct
  source 1..20: mol_type = other RNA
tgttcctgaagtctttggtg

SEQ ID NO: 56168 - RNA, 20 nt, synthetic construct
  source 1..20: mol_type = other RNA
tgttcctgggttctcccttc

SEQ ID NO: 56169 - RNA, 20 nt, synthetic construct
  source 1..20: mol_type = other RNA
tgttccttcctacacatatc

SEQ ID NO: 56170 - RNA, 20 nt, synthetic construct
  source 1..20: mol_type = other RNA
tgttctaaagttagaagtat

SEQ ID NO: 56171 - RNA, 20 nt, synthetic construct
  source 1..20: mol_type = other RNA
tgttctaatttgtgaacctt

SEQ ID NO: 56172 - RNA, 20 nt, synthetic construct
  source 1..20: mol_type = other RNA
tgttctagctcctgggaaaa

SEQ ID NO: 56173 - RNA, 20 nt, synthetic construct
  source 1..20: mol_type = other RNA
tgttctcagtatcctttcaa

SEQ ID NO: 56174 - RNA, 20 nt, synthetic construct
  source 1..20: mol_type = other RNA
tgttctccagtcccactgac

SEQ ID NO: 56175 - RNA, 20 nt, synthetic construct
  source 1..20: mol_type = other RNA
tgttctcgttcatgttcaag

SEQ ID NO: 56176 - RNA, 20 nt, synthetic construct
  source 1..20: mol_type = other RNA
tgttctctgtgtggtttgcc

SEQ ID NO: 56177 - RNA, 20 nt, synthetic construct
  source 1..20: mol_type = other RNA
tgttctctttgtttatcctt

SEQ ID NO: 56178 - RNA, 20 nt, synthetic construct
  source 1..20: mol_type = other RNA
tgttctcttttcctcgtttt

SEQ ID NO: 56179 - RNA, 20 nt, synthetic construct
  source 1..20: mol_type = other RNA
tgttctctttttgacagatg

SEQ ID NO: 56180 - RNA, 20 nt, synthetic construct
  source 1..20: mol_type = other RNA
tgttctgccttgaggtgatt

SEQ ID NO: 56181 - RNA, 20 nt, synthetic construct
  source 1..20: mol_type = other RNA
tgttctgctgttgatggacg

SEQ ID NO: 56182 - RNA, 20 nt, synthetic construct
  source 1..20: mol_type = other RNA
tgttctgtcacatttgaaag

SEQ ID NO: 56183 - RNA, 20 nt, synthetic construct
  source 1..20: mol_type = other RNA
tgttctgtcacggtgcccta

SEQ ID NO: 56184 - RNA, 20 nt, synthetic construct
  source 1..20: mol_type = other RNA
tgttctgtgtttatgaatga

SEQ ID NO: 56185 - RNA, 20 nt, synthetic construct
  source 1..20: mol_type = other RNA
tgttctgttccatcggtctg

SEQ ID NO: 56186 - RNA, 20 nt, synthetic construct
  source 1..20: mol_type = other RNA
tgttcttggttaatattaca

SEQ ID NO: 56187 - RNA, 20 nt, synthetic construct
  source 1..20: mol_type = other RNA
tgttctttatagcatttgaa

SEQ ID NO: 56188 - RNA, 20 nt, synthetic construct
  source 1..20: mol_type = other RNA
tgttctttggagctgtattt

SEQ ID NO: 56189 - RNA, 20 nt, synthetic construct
  source 1..20: mol_type = other RNA
tgttctttgttagtttattc

SEQ ID NO: 56190 - RNA, 20 nt, synthetic construct
  source 1..20: mol_type = other RNA
tgttcttttcaaaaacagca

SEQ ID NO: 56191 - RNA, 20 nt, synthetic construct
  source 1..20: mol_type = other RNA
tgttcttttccttcttaaga

SEQ ID NO: 56192 - RNA, 20 nt, synthetic construct
  source 1..20: mol_type = other RNA
tgttcttttgtaatctaagg

SEQ ID NO: 56193 - RNA, 20 nt, synthetic construct
  source 1..20: mol_type = other RNA
tgttgaaaacgaggaaaaga

SEQ ID NO: 56194 - RNA, 20 nt, synthetic construct
  source 1..20: mol_type = other RNA
tgttgaatagcaactgtttt

SEQ ID NO: 56195 - RNA, 20 nt, synthetic construct
  source 1..20: mol_type = other RNA
tgttgaatcttaacatttct

SEQ ID NO: 56196 - RNA, 20 nt, synthetic construct
  source 1..20: mol_type = other RNA
tgttgaatgtggcagaattt

SEQ ID NO: 56197 - RNA, 20 nt, synthetic construct
  source 1..20: mol_type = other RNA
tgttgaattgttgcgcgtca

SEQ ID NO: 56198 - RNA, 20 nt, synthetic construct
  source 1..20: mol_type = other RNA
tgttgaattgttggagttct

SEQ ID NO: 56199 - RNA, 20 nt, synthetic construct
  source 1..20: mol_type = other RNA
tgttgacatcctttgcgtct

SEQ ID NO: 56200 - RNA, 20 nt, synthetic construct
  source 1..20: mol_type = other RNA
tgttgacatcttgcataact

SEQ ID NO: 56201 - RNA, 20 nt, synthetic construct
  source 1..20: mol_type = other RNA
tgttgaccatttttatatct

SEQ ID NO: 56202 - RNA, 20 nt, synthetic construct
  source 1..20: mol_type = other RNA
tgttgacccaatcatgttct

SEQ ID NO: 56203 - RNA, 20 nt, synthetic construct
  source 1..20: mol_type = other RNA
tgttgaccttagtggttgac

SEQ ID NO: 56204 - RNA, 20 nt, synthetic construct
  source 1..20: mol_type = other RNA
tgttgactaccatctctcca

SEQ ID NO: 56205 - RNA, 20 nt, synthetic construct
  source 1..20: mol_type = other RNA
tgttgactgaattaatctct

SEQ ID NO: 56206 - RNA, 20 nt, synthetic construct
  source 1..20: mol_type = other RNA
tgttgactgacataactgta

SEQ ID NO: 56207 - RNA, 20 nt, synthetic construct
  source 1..20: mol_type = other RNA
tgttgagaaagcacataaaa

SEQ ID NO: 56208 - RNA, 20 nt, synthetic construct
  source 1..20: mol_type = other RNA
tgttgagaggctttaagcag

SEQ ID NO: 56209 - RNA, 20 nt, synthetic construct
  source 1..20: mol_type = other RNA
tgttgaggatgactgtcctg

SEQ ID NO: 56210 - RNA, 20 nt, synthetic construct
  source 1..20: mol_type = other RNA
tgttgaggctgggccctgtg

SEQ ID NO: 56211 - RNA, 20 nt, synthetic construct
  source 1..20: mol_type = other RNA
tgttgagtatcttttcatgt

SEQ ID NO: 56212 - RNA, 20 nt, synthetic construct
  source 1..20: mol_type = other RNA
tgttgagtcttgtttaccca

SEQ ID NO: 56213 - RNA, 20 nt, synthetic construct
  source 1..20: mol_type = other RNA
tgttgataaatatgtgttac

SEQ ID NO: 56214 - RNA, 20 nt, synthetic construct
  source 1..20: mol_type = other RNA
tgttgatggacgtttgagtt

SEQ ID NO: 56215 - RNA, 20 nt, synthetic construct
  source 1..20: mol_type = other RNA
tgttgatgtaatggatcaag

SEQ ID NO: 56216 - RNA, 20 nt, synthetic construct
  source 1..20: mol_type = other RNA
tgttgattgttgccatcatt

SEQ ID NO: 56217 - RNA, 20 nt, synthetic construct
  source 1..20: mol_type = other RNA
tgttgatttagaaatacctg

SEQ ID NO: 56218 - RNA, 20 nt, synthetic construct
  source 1..20: mol_type = other RNA
tgttgattttgaggcagaga

SEQ ID NO: 56219 - RNA, 20 nt, synthetic construct
  source 1..20: mol_type = other RNA
tgttgcaaattattttcctc

SEQ ID NO: 56220 - RNA, 20 nt, synthetic construct
  source 1..20: mol_type = other RNA
tgttgcacaaaagtgaaaac

SEQ ID NO: 56221 - RNA, 20 nt, synthetic construct
  source 1..20: mol_type = other RNA
tgttgcagagactggatagc

SEQ ID NO: 56222 - RNA, 20 nt, synthetic construct
  source 1..20: mol_type = other RNA
tgttgcagtccccggtcttt

SEQ ID NO: 56223 - RNA, 20 nt, synthetic construct
  source 1..20: mol_type = other RNA
tgttgcatccccattcaatt

SEQ ID NO: 56224 - RNA, 20 nt, synthetic construct
  source 1..20: mol_type = other RNA
tgttgccaatatctatcagg

SEQ ID NO: 56225 - RNA, 20 nt, synthetic construct
  source 1..20: mol_type = other RNA
tgttgccaggtggacgcggc

SEQ ID NO: 56226 - RNA, 20 nt, synthetic construct
  source 1..20: mol_type = other RNA
tgttgccatcattttatgaa

SEQ ID NO: 56227 - RNA, 20 nt, synthetic construct
  source 1..20: mol_type = other RNA
tgttgcccagactggagttc

SEQ ID NO: 56228 - RNA, 20 nt, synthetic construct
  source 1..20: mol_type = other RNA
tgttgcctactagccagtga

SEQ ID NO: 56229 - RNA, 20 nt, synthetic construct
  source 1..20: mol_type = other RNA
tgttgcctctgtgctagcct

SEQ ID NO: 56230 - RNA, 20 nt, synthetic construct
  source 1..20: mol_type = other RNA
tgttgcctgtagttttggtg

SEQ ID NO: 56231 - RNA, 20 nt, synthetic construct
  source 1..20: mol_type = other RNA
tgttgcgcgtcaaaagatgc

SEQ ID NO: 56232 - RNA, 20 nt, synthetic construct
  source 1..20: mol_type = other RNA
tgttgcggtgagcagagatc

SEQ ID NO: 56233 - RNA, 20 nt, synthetic construct
  source 1..20: mol_type = other RNA
tgttgctattgttgaattgt

SEQ ID NO: 56234 - RNA, 20 nt, synthetic construct
  source 1..20: mol_type = other RNA
tgttgcttaagtcactccat

SEQ ID NO: 56235 - RNA, 20 nt, synthetic construct
  source 1..20: mol_type = other RNA
tgttgcttgctctacaaacc

SEQ ID NO: 56236 - RNA, 20 nt, synthetic construct
  source 1..20: mol_type = other RNA
tgttgcttggtgttgactga

SEQ ID NO: 56237 - RNA, 20 nt, synthetic construct
  source 1..20: mol_type = other RNA
tgttgctttaacctctggta

SEQ ID NO: 56238 - RNA, 20 nt, synthetic construct
  source 1..20: mol_type = other RNA
tgttgctttgcgaaatagta

SEQ ID NO: 56239 - RNA, 20 nt, synthetic construct
  source 1..20: mol_type = other RNA
tgttggaaaaatcgtcctct

SEQ ID NO: 56240 - RNA, 20 nt, synthetic construct
  source 1..20: mol_type = other RNA
tgttggacagctgggagaaa

SEQ ID NO: 56241 - RNA, 20 nt, synthetic construct
  source 1..20: mol_type = other RNA
tgttggagagatggtagtca

SEQ ID NO: 56242 - RNA, 20 nt, synthetic construct
  source 1..20: mol_type = other RNA
tgttggatagtttctcaact

SEQ ID NO: 56243 - RNA, 20 nt, synthetic construct
  source 1..20: mol_type = other RNA
tgttggcactgaagccagtc

SEQ ID NO: 56244 - RNA, 20 nt, synthetic construct
  source 1..20: mol_type = other RNA
tgttggcctggacacacaca

SEQ ID NO: 56245 - RNA, 20 nt, synthetic construct
  source 1..20: mol_type = other RNA
tgttggctaaaagaccgcaa

SEQ ID NO: 56246 - RNA, 20 nt, synthetic construct
  source 1..20: mol_type = other RNA
tgttgggccaacttccagca

SEQ ID NO: 56247 - RNA, 20 nt, synthetic construct
  source 1..20: mol_type = other RNA
tgttgggctattaagtattg

SEQ ID NO: 56248 - RNA, 20 nt, synthetic construct
  source 1..20: mol_type = other RNA
tgttgggtaaaaataatcaa

SEQ ID NO: 56249 - RNA, 20 nt, synthetic construct
  source 1..20: mol_type = other RNA
tgttgggtttaactgaggtg

SEQ ID NO: 56250 - RNA, 20 nt, synthetic construct
  source 1..20: mol_type = other RNA
tgttggtgagaacccagtgt

SEQ ID NO: 56251 - RNA, 20 nt, synthetic construct
  source 1..20: mol_type = other RNA
tgttggtgcatttgggacag

SEQ ID NO: 56252 - RNA, 20 nt, synthetic construct
  source 1..20: mol_type = other RNA
tgttggtgcttagctgcctc

SEQ ID NO: 56253 - RNA, 20 nt, synthetic construct
  source 1..20: mol_type = other RNA
tgttggtgtttctgacaggt

SEQ ID NO: 56254 - RNA, 20 nt, synthetic construct
  source 1..20: mol_type = other RNA
tgttggttagtgttgttttt

SEQ ID NO: 56255 - RNA, 20 nt, synthetic construct
  source 1..20: mol_type = other RNA
tgttggtttgtgtgtttgtg

SEQ ID NO: 56256 - RNA, 20 nt, synthetic construct
  source 1..20: mol_type = other RNA
tgttgtaatgttacttctca

SEQ ID NO: 56257 - RNA, 20 nt, synthetic construct
  source 1..20: mol_type = other RNA
tgttgtacatttaaaattgc

SEQ ID NO: 56258 - RNA, 20 nt, synthetic construct
  source 1..20: mol_type = other RNA
tgttgtattttacaccatgc

SEQ ID NO: 56259 - RNA, 20 nt, synthetic construct
  source 1..20: mol_type = other RNA
tgttgtctgattcagtttgc

SEQ ID NO: 56260 - RNA, 20 nt, synthetic construct
  source 1..20: mol_type = other RNA
tgttgtgaggattcgattaa

SEQ ID NO: 56261 - RNA, 20 nt, synthetic construct
  source 1..20: mol_type = other RNA
tgttgtgcacacatccacgc

SEQ ID NO: 56262 - RNA, 20 nt, synthetic construct
  source 1..20: mol_type = other RNA
tgttgtggatgtccttaatg

SEQ ID NO: 56263 - RNA, 20 nt, synthetic construct
  source 1..20: mol_type = other RNA
tgttgtgtagaaatgtggag

SEQ ID NO: 56264 - RNA, 20 nt, synthetic construct
  source 1..20: mol_type = other RNA
tgttgtgtgcacctaataaa

SEQ ID NO: 56265 - RNA, 20 nt, synthetic construct
  source 1..20: mol_type = other RNA
tgttgtgtgttaaatttgat

SEQ ID NO: 56266 - RNA, 20 nt, synthetic construct
  source 1..20: mol_type = other RNA
tgttgtgttttcattcgttc

SEQ ID NO: 56267 - RNA, 20 nt, synthetic construct
  source 1..20: mol_type = other RNA
tgttgttcttttcaaaaaca

SEQ ID NO: 56268 - RNA, 20 nt, synthetic construct
  source 1..20: mol_type = other RNA
tgttgttgaatgtggcagaa

SEQ ID NO: 56269 - RNA, 20 nt, synthetic construct
  source 1..20: mol_type = other RNA
tgttgttggtttgtgtgttt

SEQ ID NO: 56270 - RNA, 20 nt, synthetic construct
  source 1..20: mol_type = other RNA
tgttgttgttgtttctgagc

SEQ ID NO: 56271 - RNA, 20 nt, synthetic construct
  source 1..20: mol_type = other RNA
tgttgttgtttctgagccag

SEQ ID NO: 56272 - RNA, 20 nt, synthetic construct
  source 1..20: mol_type = other RNA
tgttgttgttttgtttttct

SEQ ID NO: 56273 - RNA, 20 nt, synthetic construct
  source 1..20: mol_type = other RNA
tgttgtttctgagccagagt

SEQ ID NO: 56274 - RNA, 20 nt, synthetic construct
  source 1..20: mol_type = other RNA
tgttgtttttaaacaatagg

SEQ ID NO: 56275 - RNA, 20 nt, synthetic construct
  source 1..20: mol_type = other RNA
tgtttaaaaacaacactaac

SEQ ID NO: 56276 - RNA, 20 nt, synthetic construct
  source 1..20: mol_type = other RNA
tgtttaaaaagaaaaagctc

SEQ ID NO: 56277 - RNA, 20 nt, synthetic construct
  source 1..20: mol_type = other RNA
tgtttaactatcctatgtgg

SEQ ID NO: 56278 - RNA, 20 nt, synthetic construct
  source 1..20: mol_type = other RNA
tgtttaattacccaggcatg

SEQ ID NO: 56279 - RNA, 20 nt, synthetic construct
  source 1..20: mol_type = other RNA
tgtttaattagccgggtgta

SEQ ID NO: 56280 - RNA, 20 nt, synthetic construct
  source 1..20: mol_type = other RNA
tgtttaattcctactttctt

SEQ ID NO: 56281 - RNA, 20 nt, synthetic construct
  source 1..20: mol_type = other RNA
tgtttaattctgtttaccct

SEQ ID NO: 56282 - RNA, 20 nt, synthetic construct
  source 1..20: mol_type = other RNA
tgtttaatttccacccatga

SEQ ID NO: 56283 - RNA, 20 nt, synthetic construct
  source 1..20: mol_type = other RNA
tgtttacacacctgaaattc

SEQ ID NO: 56284 - RNA, 20 nt, synthetic construct
  source 1..20: mol_type = other RNA
tgtttacagaaatatacctt

SEQ ID NO: 56285 - RNA, 20 nt, synthetic construct
  source 1..20: mol_type = other RNA
tgtttacagtagccaaaggt

SEQ ID NO: 56286 - RNA, 20 nt, synthetic construct
  source 1..20: mol_type = other RNA
tgtttacattagagaagaat

SEQ ID NO: 56287 - RNA, 20 nt, synthetic construct
  source 1..20: mol_type = other RNA
tgtttaccaagggtgtgttt

SEQ ID NO: 56288 - RNA, 20 nt, synthetic construct
  source 1..20: mol_type = other RNA
tgtttacccagtgtgtttgt

SEQ ID NO: 56289 - RNA, 20 nt, synthetic construct
  source 1..20: mol_type = other RNA
tgtttacccttactaaattt

SEQ ID NO: 56290 - RNA, 20 nt, synthetic construct
  source 1..20: mol_type = other RNA
tgtttacttgggtataaatg

SEQ ID NO: 56291 - RNA, 20 nt, synthetic construct
  source 1..20: mol_type = other RNA
tgtttagcaagattactgga

SEQ ID NO: 56292 - RNA, 20 nt, synthetic construct
  source 1..20: mol_type = other RNA
tgtttagcatctagcacaga

SEQ ID NO: 56293 - RNA, 20 nt, synthetic construct
  source 1..20: mol_type = other RNA
tgtttagcggaatgactata

SEQ ID NO: 56294 - RNA, 20 nt, synthetic construct
  source 1..20: mol_type = other RNA
tgtttaggatataagagtgg

SEQ ID NO: 56295 - RNA, 20 nt, synthetic construct
  source 1..20: mol_type = other RNA
tgtttagggacgaatgcatg

SEQ ID NO: 56296 - RNA, 20 nt, synthetic construct
  source 1..20: mol_type = other RNA
tgtttagtagaattctccag

SEQ ID NO: 56297 - RNA, 20 nt, synthetic construct
  source 1..20: mol_type = other RNA
tgtttagtagctgtctttaa

SEQ ID NO: 56298 - RNA, 20 nt, synthetic construct
  source 1..20: mol_type = other RNA
tgtttatccttgcaccaact

SEQ ID NO: 56299 - RNA, 20 nt, synthetic construct
  source 1..20: mol_type = other RNA
tgtttatgaatgatgccatc

SEQ ID NO: 56300 - RNA, 20 nt, synthetic construct
  source 1..20: mol_type = other RNA
tgtttatgacaaataaaagc

SEQ ID NO: 56301 - RNA, 20 nt, synthetic construct
  source 1..20: mol_type = other RNA
tgtttatttgctgtcaggca

SEQ ID NO: 56302 - RNA, 20 nt, synthetic construct
  source 1..20: mol_type = other RNA
tgtttcaatttagtcaatac

SEQ ID NO: 56303 - RNA, 20 nt, synthetic construct
  source 1..20: mol_type = other RNA
tgtttcacttttctggtttt

SEQ ID NO: 56304 - RNA, 20 nt, synthetic construct
  source 1..20: mol_type = other RNA
tgtttcagtgtgtccacaca

SEQ ID NO: 56305 - RNA, 20 nt, synthetic construct
  source 1..20: mol_type = other RNA
tgtttcatttacaaaaacac

SEQ ID NO: 56306 - RNA, 20 nt, synthetic construct
  source 1..20: mol_type = other RNA
tgtttccactttgaggttat

SEQ ID NO: 56307 - RNA, 20 nt, synthetic construct
  source 1..20: mol_type = other RNA
tgtttccataaaaagcgttg

SEQ ID NO: 56308 - RNA, 20 nt, synthetic construct
  source 1..20: mol_type = other RNA
tgtttccatgtcttggctat

SEQ ID NO: 56309 - RNA, 20 nt, synthetic construct
  source 1..20: mol_type = other RNA
tgtttcccttaaaaggaact

SEQ ID NO: 56310 - RNA, 20 nt, synthetic construct
  source 1..20: mol_type = other RNA
tgtttcccttaatgttgaca

SEQ ID NO: 56311 - RNA, 20 nt, synthetic construct
  source 1..20: mol_type = other RNA
tgtttcctaatctaacatgt

SEQ ID NO: 56312 - RNA, 20 nt, synthetic construct
  source 1..20: mol_type = other RNA
tgtttcctagattccctctg

SEQ ID NO: 56313 - RNA, 20 nt, synthetic construct
  source 1..20: mol_type = other RNA
tgtttccttaccagtgcttg

SEQ ID NO: 56314 - RNA, 20 nt, synthetic construct
  source 1..20: mol_type = other RNA
tgtttccttccagatgtttt

SEQ ID NO: 56315 - RNA, 20 nt, synthetic construct
  source 1..20: mol_type = other RNA
tgtttcgcaaagtaaaaagc

SEQ ID NO: 56316 - RNA, 20 nt, synthetic construct
  source 1..20: mol_type = other RNA
tgtttctacctttggctact

SEQ ID NO: 56317 - RNA, 20 nt, synthetic construct
  source 1..20: mol_type = other RNA
tgtttctcattcttctctaa

SEQ ID NO: 56318 - RNA, 20 nt, synthetic construct
  source 1..20: mol_type = other RNA
tgtttctcctgcatggggag

SEQ ID NO: 56319 - RNA, 20 nt, synthetic construct
  source 1..20: mol_type = other RNA
tgtttctctacatctggatc

SEQ ID NO: 56320 - RNA, 20 nt, synthetic construct
  source 1..20: mol_type = other RNA
tgtttctgacaggtggtatg

SEQ ID NO: 56321 - RNA, 20 nt, synthetic construct
  source 1..20: mol_type = other RNA
tgtttctgagccagagtttc

SEQ ID NO: 56322 - RNA, 20 nt, synthetic construct
  source 1..20: mol_type = other RNA
tgtttctgaggtggagttct

SEQ ID NO: 56323 - RNA, 20 nt, synthetic construct
  source 1..20: mol_type = other RNA
tgtttctgctattctctttc

SEQ ID NO: 56324 - RNA, 20 nt, synthetic construct
  source 1..20: mol_type = other RNA
tgtttctgtgaaaaaacaaa

SEQ ID NO: 56325 - RNA, 20 nt, synthetic construct
  source 1..20: mol_type = other RNA
tgtttcttagctatattcac

SEQ ID NO: 56326 - RNA, 20 nt, synthetic construct
  source 1..20: mol_type = other RNA
tgtttcttttcactctaata

SEQ ID NO: 56327 - RNA, 20 nt, synthetic construct
  source 1..20: mol_type = other RNA
tgtttgaaaagtgtttgtca

SEQ ID NO: 56328 - RNA, 20 nt, synthetic construct
  source 1..20: mol_type = other RNA
tgtttgaaatttaaagacgt

SEQ ID NO: 56329 - RNA, 20 nt, synthetic construct
  source 1..20: mol_type = other RNA
tgtttgaattaagcaccact

SEQ ID NO: 56330 - RNA, 20 nt, synthetic construct
  source 1..20: mol_type = other RNA
tgtttgaattttccattcac

SEQ ID NO: 56331 - RNA, 20 nt, synthetic construct
  source 1..20: mol_type = other RNA
tgtttgagaagtcttttcct

SEQ ID NO: 56332 - RNA, 20 nt, synthetic construct
  source 1..20: mol_type = other RNA
tgtttgagatctttcttatt

SEQ ID NO: 56333 - RNA, 20 nt, synthetic construct
  source 1..20: mol_type = other RNA
tgtttgagctgaaagtaaag

SEQ ID NO: 56334 - RNA, 20 nt, synthetic construct
  source 1..20: mol_type = other RNA
tgtttgaggctgggagtaca

SEQ ID NO: 56335 - RNA, 20 nt, synthetic construct
  source 1..20: mol_type = other RNA
tgtttgattactgtagcttc

SEQ ID NO: 56336 - RNA, 20 nt, synthetic construct
  source 1..20: mol_type = other RNA
tgtttgattagttgactcct

SEQ ID NO: 56337 - RNA, 20 nt, synthetic construct
  source 1..20: mol_type = other RNA
tgtttgccatcttcaagatt

SEQ ID NO: 56338 - RNA, 20 nt, synthetic construct
  source 1..20: mol_type = other RNA
tgtttgcctgcgtccgtaga

SEQ ID NO: 56339 - RNA, 20 nt, synthetic construct
  source 1..20: mol_type = other RNA
tgtttgctaataatgatgac

SEQ ID NO: 56340 - RNA, 20 nt, synthetic construct
  source 1..20: mol_type = other RNA
tgtttgctagagctgctgta

SEQ ID NO: 56341 - RNA, 20 nt, synthetic construct
  source 1..20: mol_type = other RNA
tgtttggatgaaaaagtact

SEQ ID NO: 56342 - RNA, 20 nt, synthetic construct
  source 1..20: mol_type = other RNA
tgtttggctccttaccacta

SEQ ID NO: 56343 - RNA, 20 nt, synthetic construct
  source 1..20: mol_type = other RNA
tgtttggctgggagcttatc

SEQ ID NO: 56344 - RNA, 20 nt, synthetic construct
  source 1..20: mol_type = other RNA
tgtttggtagatttctgcat

SEQ ID NO: 56345 - RNA, 20 nt, synthetic construct
  source 1..20: mol_type = other RNA
tgtttggtcaattgatctgc

SEQ ID NO: 56346 - RNA, 20 nt, synthetic construct
  source 1..20: mol_type = other RNA
tgtttggtgaattttattct

SEQ ID NO: 56347 - RNA, 20 nt, synthetic construct
  source 1..20: mol_type = other RNA
tgtttggtttttatggaata

SEQ ID NO: 56348 - RNA, 20 nt, synthetic construct
  source 1..20: mol_type = other RNA
tgtttgtaacttgttcatgt

SEQ ID NO: 56349 - RNA, 20 nt, synthetic construct
  source 1..20: mol_type = other RNA
tgtttgtacttctaccttga

SEQ ID NO: 56350 - RNA, 20 nt, synthetic construct
  source 1..20: mol_type = other RNA
tgtttgtcacatagaagcgc

SEQ ID NO: 56351 - RNA, 20 nt, synthetic construct
  source 1..20: mol_type = other RNA
tgtttgtgaagatacaaata

SEQ ID NO: 56352 - RNA, 20 nt, synthetic construct
  source 1..20: mol_type = other RNA
tgtttgtgaccagatcaaac

SEQ ID NO: 56353 - RNA, 20 nt, synthetic construct
  source 1..20: mol_type = other RNA
tgtttgtggttttaacctct

SEQ ID NO: 56354 - RNA, 20 nt, synthetic construct
  source 1..20: mol_type = other RNA
tgtttgttgggtttaactga

SEQ ID NO: 56355 - RNA, 20 nt, synthetic construct
  source 1..20: mol_type = other RNA
tgtttgtttaattagccggg

SEQ ID NO: 56356 - RNA, 20 nt, synthetic construct
  source 1..20: mol_type = other RNA
tgtttgtttctgaggtggag

SEQ ID NO: 56357 - RNA, 20 nt, synthetic construct
  source 1..20: mol_type = other RNA
tgtttgtttgctagagctgc

SEQ ID NO: 56358 - RNA, 20 nt, synthetic construct
  source 1..20: mol_type = other RNA
tgttttaaagcagggagggg

SEQ ID NO: 56359 - RNA, 20 nt, synthetic construct
  source 1..20: mol_type = other RNA
tgttttaaggcagggcttgg

SEQ ID NO: 56360 - RNA, 20 nt, synthetic construct
  source 1..20: mol_type = other RNA
tgttttacacatgtcagcca

SEQ ID NO: 56361 - RNA, 20 nt, synthetic construct
  source 1..20: mol_type = other RNA
tgttttacattttccattga

SEQ ID NO: 56362 - RNA, 20 nt, synthetic construct
  source 1..20: mol_type = other RNA
tgttttaccatctaaagcca

SEQ ID NO: 56363 - RNA, 20 nt, synthetic construct
  source 1..20: mol_type = other RNA
tgttttaggagtcaactaat

SEQ ID NO: 56364 - RNA, 20 nt, synthetic construct
  source 1..20: mol_type = other RNA
tgttttaggggggaaaacac

SEQ ID NO: 56365 - RNA, 20 nt, synthetic construct
  source 1..20: mol_type = other RNA
tgttttaggtagtcttgtca

SEQ ID NO: 56366 - RNA, 20 nt, synthetic construct
  source 1..20: mol_type = other RNA
tgttttagtggctcacagtg

SEQ ID NO: 56367 - RNA, 20 nt, synthetic construct
  source 1..20: mol_type = other RNA
tgttttatttagcccatgtc

SEQ ID NO: 56368 - RNA, 20 nt, synthetic construct
  source 1..20: mol_type = other RNA
tgttttatttaggccctcta

SEQ ID NO: 56369 - RNA, 20 nt, synthetic construct
  source 1..20: mol_type = other RNA
tgttttatttcttgacctca

SEQ ID NO: 56370 - RNA, 20 nt, synthetic construct
  source 1..20: mol_type = other RNA
tgttttatttggctgttacc

SEQ ID NO: 56371 - RNA, 20 nt, synthetic construct
  source 1..20: mol_type = other RNA
tgttttcaaatgctataaag

SEQ ID NO: 56372 - RNA, 20 nt, synthetic construct
  source 1..20: mol_type = other RNA
tgttttcactctcaatagtg

SEQ ID NO: 56373 - RNA, 20 nt, synthetic construct
  source 1..20: mol_type = other RNA
tgttttcagttgcatgaatt

SEQ ID NO: 56374 - RNA, 20 nt, synthetic construct
  source 1..20: mol_type = other RNA
tgttttcatgcgacatatca

SEQ ID NO: 56375 - RNA, 20 nt, synthetic construct
  source 1..20: mol_type = other RNA
tgttttcattcgttcaaaac

SEQ ID NO: 56376 - RNA, 20 nt, synthetic construct
  source 1..20: mol_type = other RNA
tgttttcatttattctgttg

SEQ ID NO: 56377 - RNA, 20 nt, synthetic construct
  source 1..20: mol_type = other RNA
tgttttccacagtgacttta

SEQ ID NO: 56378 - RNA, 20 nt, synthetic construct
  source 1..20: mol_type = other RNA
tgttttcccccctaaaacac

SEQ ID NO: 56379 - RNA, 20 nt, synthetic construct
  source 1..20: mol_type = other RNA
tgttttcccttttgtagcta

SEQ ID NO: 56380 - RNA, 20 nt, synthetic construct
  source 1..20: mol_type = other RNA
tgttttccgtgtgacaaaaa

SEQ ID NO: 56381 - RNA, 20 nt, synthetic construct
  source 1..20: mol_type = other RNA
tgttttctaaaccttaaaag

SEQ ID NO: 56382 - RNA, 20 nt, synthetic construct
  source 1..20: mol_type = other RNA
tgttttctccttctggaaga

SEQ ID NO: 56383 - RNA, 20 nt, synthetic construct
  source 1..20: mol_type = other RNA
tgttttcttattttttccca

SEQ ID NO: 56384 - RNA, 20 nt, synthetic construct
  source 1..20: mol_type = other RNA
tgttttcttcatggactaga

SEQ ID NO: 56385 - RNA, 20 nt, synthetic construct
  source 1..20: mol_type = other RNA
tgttttgaacgaatgaaaac

SEQ ID NO: 56386 - RNA, 20 nt, synthetic construct
  source 1..20: mol_type = other RNA
tgttttgaataacctcataa

SEQ ID NO: 56387 - RNA, 20 nt, synthetic construct
  source 1..20: mol_type = other RNA
tgttttgatagttgcagatt

SEQ ID NO: 56388 - RNA, 20 nt, synthetic construct
  source 1..20: mol_type = other RNA
tgttttgatttgcatttctc

SEQ ID NO: 56389 - RNA, 20 nt, synthetic construct
  source 1..20: mol_type = other RNA
tgttttgcaagattaatctt

SEQ ID NO: 56390 - RNA, 20 nt, synthetic construct
  source 1..20: mol_type = other RNA
tgttttgcagagatgaggtc

SEQ ID NO: 56391 - RNA, 20 nt, synthetic construct
  source 1..20: mol_type = other RNA
tgttttgcttactgtagcat

SEQ ID NO: 56392 - RNA, 20 nt, synthetic construct
  source 1..20: mol_type = other RNA
tgttttgcttcgaagcttat

SEQ ID NO: 56393 - RNA, 20 nt, synthetic construct
  source 1..20: mol_type = other RNA
tgttttggtaaaatgtggca

SEQ ID NO: 56394 - RNA, 20 nt, synthetic construct
  source 1..20: mol_type = other RNA
tgttttggtcaaaactgtat

SEQ ID NO: 56395 - RNA, 20 nt, synthetic construct
  source 1..20: mol_type = other RNA
tgttttgtgtttgtgaccag

SEQ ID NO: 56396 - RNA, 20 nt, synthetic construct
  source 1..20: mol_type = other RNA
tgttttgttctcgttcatgt

SEQ ID NO: 56397 - RNA, 20 nt, synthetic construct
  source 1..20: mol_type = other RNA
tgttttgttgctattgttga

SEQ ID NO: 56398 - RNA, 20 nt, synthetic construct
  source 1..20: mol_type = other RNA
tgttttgttttgaataacct

SEQ ID NO: 56399 - RNA, 20 nt, synthetic construct
  source 1..20: mol_type = other RNA
tgttttgtttttctctcctt

SEQ ID NO: 56400 - RNA, 20 nt, synthetic construct
  source 1..20: mol_type = other RNA
tgttttgttttttcacagaa

SEQ ID NO: 56401 - RNA, 20 nt, synthetic construct
  source 1..20: mol_type = other RNA
tgtttttagagagatgcctg

SEQ ID NO: 56402 - RNA, 20 nt, synthetic construct
  source 1..20: mol_type = other RNA
tgtttttatatgcattaagc

SEQ ID NO: 56403 - RNA, 20 nt, synthetic construct
  source 1..20: mol_type = other RNA
tgtttttcaaaatgagatct

SEQ ID NO: 56404 - RNA, 20 nt, synthetic construct
  source 1..20: mol_type = other RNA
tgtttttcagccctgataga

SEQ ID NO: 56405 - RNA, 20 nt, synthetic construct
  source 1..20: mol_type = other RNA
tgtttttccgtctagccact

SEQ ID NO: 56406 - RNA, 20 nt, synthetic construct
  source 1..20: mol_type = other RNA
tgtttttctaggtagtttct

SEQ ID NO: 56407 - RNA, 20 nt, synthetic construct
  source 1..20: mol_type = other RNA
tgtttttctctccttgcaca

SEQ ID NO: 56408 - RNA, 20 nt, synthetic construct
  source 1..20: mol_type = other RNA
tgtttttcttagtctagcca

SEQ ID NO: 56409 - RNA, 20 nt, synthetic construct
  source 1..20: mol_type = other RNA
tgtttttcttttttgagttg

SEQ ID NO: 56410 - RNA, 20 nt, synthetic construct
  source 1..20: mol_type = other RNA
tgtttttgaaaagaacaaca

SEQ ID NO: 56411 - RNA, 20 nt, synthetic construct
  source 1..20: mol_type = other RNA
tgtttttgaattctgcttat

SEQ ID NO: 56412 - RNA, 20 nt, synthetic construct
  source 1..20: mol_type = other RNA
tgtttttgtaaatgaaacac

SEQ ID NO: 56413 - RNA, 20 nt, synthetic construct
  source 1..20: mol_type = other RNA
tgttttttcacagaaacaga

SEQ ID NO: 56414 - RNA, 20 nt, synthetic construct
  source 1..20: mol_type = other RNA
tgttttttcctcccttcagc

SEQ ID NO: 56415 - RNA, 20 nt, synthetic construct
  source 1..20: mol_type = other RNA
tgttttttccttctttgggg

SEQ ID NO: 56416 - RNA, 20 nt, synthetic construct
  source 1..20: mol_type = other RNA
tgttttttgttttggtcaaa

SEQ ID NO: 56417 - RNA, 20 nt, synthetic construct
  source 1..20: mol_type = other RNA
ttaaaaaatgcgcgtccgcg

SEQ ID NO: 56418 - RNA, 20 nt, synthetic construct
  source 1..20: mol_type = other RNA
ttaaaaacaacactaaccaa

SEQ ID NO: 56419 - RNA, 20 nt, synthetic construct
  source 1..20: mol_type = other RNA
ttaaaaacattggaggataa

SEQ ID NO: 56420 - RNA, 20 nt, synthetic construct
  source 1..20: mol_type = other RNA
ttaaaaactgagaccggatg

SEQ ID NO: 56421 - RNA, 20 nt, synthetic construct
  source 1..20: mol_type = other RNA
ttaaaaacttaagtatctcg

SEQ ID NO: 56422 - RNA, 20 nt, synthetic construct
  source 1..20: mol_type = other RNA
ttaaaaactttttgggcctt

SEQ ID NO: 56423 - RNA, 20 nt, synthetic construct
  source 1..20: mol_type = other RNA
ttaaaaagaaaaagctcacc

SEQ ID NO: 56424 - RNA, 20 nt, synthetic construct
  source 1..20: mol_type = other RNA
ttaaaaagcagctacctgtt

SEQ ID NO: 56425 - RNA, 20 nt, synthetic construct
  source 1..20: mol_type = other RNA
ttaaaaatcaacccatgaaa

SEQ ID NO: 56426 - RNA, 20 nt, synthetic construct
  source 1..20: mol_type = other RNA
ttaaaaatgacaccaaaact

SEQ ID NO: 56427 - RNA, 20 nt, synthetic construct
  source 1..20: mol_type = other RNA
ttaaaacactggcaaaaatc

SEQ ID NO: 56428 - RNA, 20 nt, synthetic construct
  source 1..20: mol_type = other RNA
ttaaaacatggatatttggc

SEQ ID NO: 56429 - RNA, 20 nt, synthetic construct
  source 1..20: mol_type = other RNA
ttaaaaccacaaacatgaat

SEQ ID NO: 56430 - RNA, 20 nt, synthetic construct
  source 1..20: mol_type = other RNA
ttaaaaccagagcggaattt

SEQ ID NO: 56431 - RNA, 20 nt, synthetic construct
  source 1..20: mol_type = other RNA
ttaaaacccatgatctttgg

SEQ ID NO: 56432 - RNA, 20 nt, synthetic construct
  source 1..20: mol_type = other RNA
ttaaaacctggtaataatga

SEQ ID NO: 56433 - RNA, 20 nt, synthetic construct
  source 1..20: mol_type = other RNA
ttaaaactcacaaaaagtgt

SEQ ID NO: 56434 - RNA, 20 nt, synthetic construct
  source 1..20: mol_type = other RNA
ttaaaactgctgagtcttct

SEQ ID NO: 56435 - RNA, 20 nt, synthetic construct
  source 1..20: mol_type = other RNA
ttaaaacttgtagaggagga

SEQ ID NO: 56436 - RNA, 20 nt, synthetic construct
  source 1..20: mol_type = other RNA
ttaaaactttaggtcagaat

SEQ ID NO: 56437 - RNA, 20 nt, synthetic construct
  source 1..20: mol_type = other RNA
ttaaaagaaaatggccaaga

SEQ ID NO: 56438 - RNA, 20 nt, synthetic construct
  source 1..20: mol_type = other RNA
ttaaaagaaagctctcaatt

SEQ ID NO: 56439 - RNA, 20 nt, synthetic construct
  source 1..20: mol_type = other RNA
ttaaaagaacctctggaaag

SEQ ID NO: 56440 - RNA, 20 nt, synthetic construct
  source 1..20: mol_type = other RNA
ttaaaagacatctttcctgt

SEQ ID NO: 56441 - RNA, 20 nt, synthetic construct
  source 1..20: mol_type = other RNA
ttaaaagagcgaagagggag

SEQ ID NO: 56442 - RNA, 20 nt, synthetic construct
  source 1..20: mol_type = other RNA
ttaaaagagtgcacattcct

SEQ ID NO: 56443 - RNA, 20 nt, synthetic construct
  source 1..20: mol_type = other RNA
ttaaaagatacgaaaatcct

SEQ ID NO: 56444 - RNA, 20 nt, synthetic construct
  source 1..20: mol_type = other RNA
ttaaaagatatccacagtat

SEQ ID NO: 56445 - RNA, 20 nt, synthetic construct
  source 1..20: mol_type = other RNA
ttaaaagatgcattctgtca

SEQ ID NO: 56446 - RNA, 20 nt, synthetic construct
  source 1..20: mol_type = other RNA
ttaaaagcacaagcacagag

SEQ ID NO: 56447 - RNA, 20 nt, synthetic construct
  source 1..20: mol_type = other RNA
ttaaaaggagatatacagga

SEQ ID NO: 56448 - RNA, 20 nt, synthetic construct
  source 1..20: mol_type = other RNA
ttaaaaggtataaaggatgc

SEQ ID NO: 56449 - RNA, 20 nt, synthetic construct
  source 1..20: mol_type = other RNA
ttaaaagtaaatcagactgt

SEQ ID NO: 56450 - RNA, 20 nt, synthetic construct
  source 1..20: mol_type = other RNA
ttaaaagtacagataaccaa

SEQ ID NO: 56451 - RNA, 20 nt, synthetic construct
  source 1..20: mol_type = other RNA
ttaaaagtcagctaggcgta

SEQ ID NO: 56452 - RNA, 20 nt, synthetic construct
  source 1..20: mol_type = other RNA
ttaaaagtgctgcagtatgc

SEQ ID NO: 56453 - RNA, 20 nt, synthetic construct
  source 1..20: mol_type = other RNA
ttaaaagttagctggcaaaa

SEQ ID NO: 56454 - RNA, 20 nt, synthetic construct
  source 1..20: mol_type = other RNA
ttaaaagttttccaaccact

SEQ ID NO: 56455 - RNA, 20 nt, synthetic construct
  source 1..20: mol_type = other RNA
ttaaaataacacgcagaacc

SEQ ID NO: 56456 - RNA, 20 nt, synthetic construct
  source 1..20: mol_type = other RNA
ttaaaataccagaggttaaa

SEQ ID NO: 56457 - RNA, 20 nt, synthetic construct
  source 1..20: mol_type = other RNA
ttaaaatctaggttatctgt

SEQ ID NO: 56458 - RNA, 20 nt, synthetic construct
  source 1..20: mol_type = other RNA
ttaaaatctgattcagtggt

SEQ ID NO: 56459 - RNA, 20 nt, synthetic construct
  source 1..20: mol_type = other RNA
ttaaaatgaaaatgttccct

SEQ ID NO: 56460 - RNA, 20 nt, synthetic construct
  source 1..20: mol_type = other RNA
ttaaaatgaacctgctttct

SEQ ID NO: 56461 - RNA, 20 nt, synthetic construct
  source 1..20: mol_type = other RNA
ttaaaatgatagcattatcc

SEQ ID NO: 56462 - RNA, 20 nt, synthetic construct
  source 1..20: mol_type = other RNA
ttaaaatgttgccaatatct

SEQ ID NO: 56463 - RNA, 20 nt, synthetic construct
  source 1..20: mol_type = other RNA
ttaaaattcttccagcctgg

SEQ ID NO: 56464 - RNA, 20 nt, synthetic construct
  source 1..20: mol_type = other RNA
ttaaaattgcagagtgttca

SEQ ID NO: 56465 - RNA, 20 nt, synthetic construct
  source 1..20: mol_type = other RNA
ttaaacaatcttgaaagggg

SEQ ID NO: 56466 - RNA, 20 nt, synthetic construct
  source 1..20: mol_type = other RNA
ttaaacacacccttggtaaa

SEQ ID NO: 56467 - RNA, 20 nt, synthetic construct
  source 1..20: mol_type = other RNA
ttaaacaggtgtaagagatt

SEQ ID NO: 56468 - RNA, 20 nt, synthetic construct
  source 1..20: mol_type = other RNA
ttaaacatgtaaaacagacc

SEQ ID NO: 56469 - RNA, 20 nt, synthetic construct
  source 1..20: mol_type = other RNA
ttaaaccatatacaaaactg

SEQ ID NO: 56470 - RNA, 20 nt, synthetic construct
  source 1..20: mol_type = other RNA
ttaaacccaacaaacaatta

SEQ ID NO: 56471 - RNA, 20 nt, synthetic construct
  source 1..20: mol_type = other RNA
ttaaacccatttcatgccat

SEQ ID NO: 56472 - RNA, 20 nt, synthetic construct
  source 1..20: mol_type = other RNA
ttaaacctgttacatggttc

SEQ ID NO: 56473 - RNA, 20 nt, synthetic construct
  source 1..20: mol_type = other RNA
ttaaacgtcagagcagcact

SEQ ID NO: 56474 - RNA, 20 nt, synthetic construct
  source 1..20: mol_type = other RNA
ttaaactatagacccaaagc

SEQ ID NO: 56475 - RNA, 20 nt, synthetic construct
  source 1..20: mol_type = other RNA
ttaaactcattatcccagac

SEQ ID NO: 56476 - RNA, 20 nt, synthetic construct
  source 1..20: mol_type = other RNA
ttaaactgccaaaccctaca

SEQ ID NO: 56477 - RNA, 20 nt, synthetic construct
  source 1..20: mol_type = other RNA
ttaaactggatgaatacaaa

SEQ ID NO: 56478 - RNA, 20 nt, synthetic construct
  source 1..20: mol_type = other RNA
ttaaacttcaaggtaatcta

SEQ ID NO: 56479 - RNA, 20 nt, synthetic construct
  source 1..20: mol_type = other RNA
ttaaacttggtctgggtgat

SEQ ID NO: 56480 - RNA, 20 nt, synthetic construct
  source 1..20: mol_type = other RNA
ttaaagaaaggtctctctct

SEQ ID NO: 56481 - RNA, 20 nt, synthetic construct
  source 1..20: mol_type = other RNA
ttaaagacagctactaaaca

SEQ ID NO: 56482 - RNA, 20 nt, synthetic construct
  source 1..20: mol_type = other RNA
ttaaagacctcaggtttaga

SEQ ID NO: 56483 - RNA, 20 nt, synthetic construct
  source 1..20: mol_type = other RNA
ttaaagacgttcagataaca

SEQ ID NO: 56484 - RNA, 20 nt, synthetic construct
  source 1..20: mol_type = other RNA
ttaaagagaaatagttaacg

SEQ ID NO: 56485 - RNA, 20 nt, synthetic construct
  source 1..20: mol_type = other RNA
ttaaagcaacaggaagaggc

SEQ ID NO: 56486 - RNA, 20 nt, synthetic construct
  source 1..20: mol_type = other RNA
ttaaagcagggaggggtccc

SEQ ID NO: 56487 - RNA, 20 nt, synthetic construct
  source 1..20: mol_type = other RNA
ttaaagccacactcttggtc

SEQ ID NO: 56488 - RNA, 20 nt, synthetic construct
  source 1..20: mol_type = other RNA
ttaaagcctctcaacacttc

SEQ ID NO: 56489 - RNA, 20 nt, synthetic construct
  source 1..20: mol_type = other RNA
ttaaagcgctactcagctgt

SEQ ID NO: 56490 - RNA, 20 nt, synthetic construct
  source 1..20: mol_type = other RNA
ttaaagctctaataaaagct

SEQ ID NO: 56491 - RNA, 20 nt, synthetic construct
  source 1..20: mol_type = other RNA
ttaaagctctatggcatttg

SEQ ID NO: 56492 - RNA, 20 nt, synthetic construct
  source 1..20: mol_type = other RNA
ttaaagctgaactcctttct

SEQ ID NO: 56493 - RNA, 20 nt, synthetic construct
  source 1..20: mol_type = other RNA
ttaaagctttgtgactgtga

SEQ ID NO: 56494 - RNA, 20 nt, synthetic construct
  source 1..20: mol_type = other RNA
ttaaaggaaaagagatctag

SEQ ID NO: 56495 - RNA, 20 nt, synthetic construct
  source 1..20: mol_type = other RNA
ttaaaggatgtcaactgagg

SEQ ID NO: 56496 - RNA, 20 nt, synthetic construct
  source 1..20: mol_type = other RNA
ttaaaggccctgatttaaag

SEQ ID NO: 56497 - RNA, 20 nt, synthetic construct
  source 1..20: mol_type = other RNA
ttaaaggctggaaataattt

SEQ ID NO: 56498 - RNA, 20 nt, synthetic construct
  source 1..20: mol_type = other RNA
ttaaagggataatgctatcc

SEQ ID NO: 56499 - RNA, 20 nt, synthetic construct
  source 1..20: mol_type = other RNA
ttaaaggtttggagtttgta

SEQ ID NO: 56500 - RNA, 20 nt, synthetic construct
  source 1..20: mol_type = other RNA
ttaaagtagaaggccctatg

SEQ ID NO: 56501 - RNA, 20 nt, synthetic construct
  source 1..20: mol_type = other RNA
ttaaagtaggttgagactta

SEQ ID NO: 56502 - RNA, 20 nt, synthetic construct
  source 1..20: mol_type = other RNA
ttaaagtgtaaagtttctct

SEQ ID NO: 56503 - RNA, 20 nt, synthetic construct
  source 1..20: mol_type = other RNA
ttaaagttagtgaagcagag

SEQ ID NO: 56504 - RNA, 20 nt, synthetic construct
  source 1..20: mol_type = other RNA
ttaaagttggtcctgcatat

SEQ ID NO: 56505 - RNA, 20 nt, synthetic construct
  source 1..20: mol_type = other RNA
ttaaagtttcaaactgtggt

SEQ ID NO: 56506 - RNA, 20 nt, synthetic construct
  source 1..20: mol_type = other RNA
ttaaagtttcctagaaaatc

SEQ ID NO: 56507 - RNA, 20 nt, synthetic construct
  source 1..20: mol_type = other RNA
ttaaataacttccatgagat

SEQ ID NO: 56508 - RNA, 20 nt, synthetic construct
  source 1..20: mol_type = other RNA
ttaaataagggcattttcaa

SEQ ID NO: 56509 - RNA, 20 nt, synthetic construct
  source 1..20: mol_type = other RNA
ttaaatacagagcacagact

SEQ ID NO: 56510 - RNA, 20 nt, synthetic construct
  source 1..20: mol_type = other RNA
ttaaataccacctgaaatct

SEQ ID NO: 56511 - RNA, 20 nt, synthetic construct
  source 1..20: mol_type = other RNA
ttaaatagataaggttgttc

SEQ ID NO: 56512 - RNA, 20 nt, synthetic construct
  source 1..20: mol_type = other RNA
ttaaatcagcaccatctaac

SEQ ID NO: 56513 - RNA, 20 nt, synthetic construct
  source 1..20: mol_type = other RNA
ttaaatcagggcctttaatc

SEQ ID NO: 56514 - RNA, 20 nt, synthetic construct
  source 1..20: mol_type = other RNA
ttaaatcatgatgtttggct

SEQ ID NO: 56515 - RNA, 20 nt, synthetic construct
  source 1..20: mol_type = other RNA
ttaaatcattcatctaaacg

SEQ ID NO: 56516 - RNA, 20 nt, synthetic construct
  source 1..20: mol_type = other RNA
ttaaatccgagacaagttct

SEQ ID NO: 56517 - RNA, 20 nt, synthetic construct
  source 1..20: mol_type = other RNA
ttaaatgaagaaaatccaag

SEQ ID NO: 56518 - RNA, 20 nt, synthetic construct
  source 1..20: mol_type = other RNA
ttaaatgaaggaaaaaacgg

SEQ ID NO: 56519 - RNA, 20 nt, synthetic construct
  source 1..20: mol_type = other RNA
ttaaatgagacacctacaat

SEQ ID NO: 56520 - RNA, 20 nt, synthetic construct
  source 1..20: mol_type = other RNA
ttaaatgccaatttgggata

SEQ ID NO: 56521 - RNA, 20 nt, synthetic construct
  source 1..20: mol_type = other RNA
ttaaatgccacataaatcac

SEQ ID NO: 56522 - RNA, 20 nt, synthetic construct
  source 1..20: mol_type = other RNA
ttaaatgtacaacattcatc

SEQ ID NO: 56523 - RNA, 20 nt, synthetic construct
  source 1..20: mol_type = other RNA
ttaaatgtgaattagatggc

SEQ ID NO: 56524 - RNA, 20 nt, synthetic construct
  source 1..20: mol_type = other RNA
ttaaatgttttgcagagatg

SEQ ID NO: 56525 - RNA, 20 nt, synthetic construct
  source 1..20: mol_type = other RNA
ttaaattaaaaactgagacc

SEQ ID NO: 56526 - RNA, 20 nt, synthetic construct
  source 1..20: mol_type = other RNA
ttaaatttctaaggttctgc

SEQ ID NO: 56527 - RNA, 20 nt, synthetic construct
  source 1..20: mol_type = other RNA
ttaaatttgattgttagcca

SEQ ID NO: 56528 - RNA, 20 nt, synthetic construct
  source 1..20: mol_type = other RNA
ttaaattttctaggaaccat

SEQ ID NO: 56529 - RNA, 20 nt, synthetic construct
  source 1..20: mol_type = other RNA
ttaaattttgagacctcagg

SEQ ID NO: 56530 - RNA, 20 nt, synthetic construct
  source 1..20: mol_type = other RNA
ttaacaagaatcctgctatt

SEQ ID NO: 56531 - RNA, 20 nt, synthetic construct
  source 1..20: mol_type = other RNA
ttaacaatactgcattgtgc

SEQ ID NO: 56532 - RNA, 20 nt, synthetic construct
  source 1..20: mol_type = other RNA
ttaacaattggtgaatctga

SEQ ID NO: 56533 - RNA, 20 nt, synthetic construct
  source 1..20: mol_type = other RNA
ttaacacacaacaatgaatt

SEQ ID NO: 56534 - RNA, 20 nt, synthetic construct
  source 1..20: mol_type = other RNA
ttaacacatacaaaccaaaa

SEQ ID NO: 56535 - RNA, 20 nt, synthetic construct
  source 1..20: mol_type = other RNA
ttaacaccatggcaggtttc

SEQ ID NO: 56536 - RNA, 20 nt, synthetic construct
  source 1..20: mol_type = other RNA
ttaacacctttgtattcatc

SEQ ID NO: 56537 - RNA, 20 nt, synthetic construct
  source 1..20: mol_type = other RNA
ttaacactaatccttctcat

SEQ ID NO: 56538 - RNA, 20 nt, synthetic construct
  source 1..20: mol_type = other RNA
ttaacactatgtgttgataa

SEQ ID NO: 56539 - RNA, 20 nt, synthetic construct
  source 1..20: mol_type = other RNA
ttaacagaagggtatataca

SEQ ID NO: 56540 - RNA, 20 nt, synthetic construct
  source 1..20: mol_type = other RNA
ttaacagatgaatgaacaaa

SEQ ID NO: 56541 - RNA, 20 nt, synthetic construct
  source 1..20: mol_type = other RNA
ttaacagatggtcctttttt

SEQ ID NO: 56542 - RNA, 20 nt, synthetic construct
  source 1..20: mol_type = other RNA
ttaacagctcagaagctata

SEQ ID NO: 56543 - RNA, 20 nt, synthetic construct
  source 1..20: mol_type = other RNA
ttaacagtgctgtgccagtg

SEQ ID NO: 56544 - RNA, 20 nt, synthetic construct
  source 1..20: mol_type = other RNA
ttaacataccgacggctcag

SEQ ID NO: 56545 - RNA, 20 nt, synthetic construct
  source 1..20: mol_type = other RNA
ttaacatttctcatgtatgt

SEQ ID NO: 56546 - RNA, 20 nt, synthetic construct
  source 1..20: mol_type = other RNA
ttaacatttcttctagtcac

SEQ ID NO: 56547 - RNA, 20 nt, synthetic construct
  source 1..20: mol_type = other RNA
ttaacatttgaactcactgg

SEQ ID NO: 56548 - RNA, 20 nt, synthetic construct
  source 1..20: mol_type = other RNA
ttaaccaagaacaaccttat

SEQ ID NO: 56549 - RNA, 20 nt, synthetic construct
  source 1..20: mol_type = other RNA
ttaaccaattatgctgagtg

SEQ ID NO: 56550 - RNA, 20 nt, synthetic construct
  source 1..20: mol_type = other RNA
ttaaccactgaaacttttct

SEQ ID NO: 56551 - RNA, 20 nt, synthetic construct
  source 1..20: mol_type = other RNA
ttaaccatatggtttacaat

SEQ ID NO: 56552 - RNA, 20 nt, synthetic construct
  source 1..20: mol_type = other RNA
ttaaccattgagccaaagaa

SEQ ID NO: 56553 - RNA, 20 nt, synthetic construct
  source 1..20: mol_type = other RNA
ttaacccacagataatttct

SEQ ID NO: 56554 - RNA, 20 nt, synthetic construct
  source 1..20: mol_type = other RNA
ttaacctctggtattttaag

SEQ ID NO: 56555 - RNA, 20 nt, synthetic construct
  source 1..20: mol_type = other RNA
ttaacctcttgaagtcagtt

SEQ ID NO: 56556 - RNA, 20 nt, synthetic construct
  source 1..20: mol_type = other RNA
ttaaccttctggggttcaaa

SEQ ID NO: 56557 - RNA, 20 nt, synthetic construct
  source 1..20: mol_type = other RNA
ttaacctttttcttttcaca

SEQ ID NO: 56558 - RNA, 20 nt, synthetic construct
  source 1..20: mol_type = other RNA
ttaacgtatctgggaaaaaa

SEQ ID NO: 56559 - RNA, 20 nt, synthetic construct
  source 1..20: mol_type = other RNA
ttaacgtttatctacagagg

SEQ ID NO: 56560 - RNA, 20 nt, synthetic construct
  source 1..20: mol_type = other RNA
ttaactaatagccagtgcag

SEQ ID NO: 56561 - RNA, 20 nt, synthetic construct
  source 1..20: mol_type = other RNA
ttaactagaattgactttac

SEQ ID NO: 56562 - RNA, 20 nt, synthetic construct
  source 1..20: mol_type = other RNA
ttaactataggagttcattc

SEQ ID NO: 56563 - RNA, 20 nt, synthetic construct
  source 1..20: mol_type = other RNA
ttaactatcctatgtgggga

SEQ ID NO: 56564 - RNA, 20 nt, synthetic construct
  source 1..20: mol_type = other RNA
ttaactatggacatgaggaa

SEQ ID NO: 56565 - RNA, 20 nt, synthetic construct
  source 1..20: mol_type = other RNA
ttaactcatttaaacgtcag

SEQ ID NO: 56566 - RNA, 20 nt, synthetic construct
  source 1..20: mol_type = other RNA
ttaactccaggggacatgct

SEQ ID NO: 56567 - RNA, 20 nt, synthetic construct
  source 1..20: mol_type = other RNA
ttaactcttgcattagagcc

SEQ ID NO: 56568 - RNA, 20 nt, synthetic construct
  source 1..20: mol_type = other RNA
ttaactgaaatcgggagtaa

SEQ ID NO: 56569 - RNA, 20 nt, synthetic construct
  source 1..20: mol_type = other RNA
ttaactgacttacagacctt

SEQ ID NO: 56570 - RNA, 20 nt, synthetic construct
  source 1..20: mol_type = other RNA
ttaactgaggtgtttttcag

SEQ ID NO: 56571 - RNA, 20 nt, synthetic construct
  source 1..20: mol_type = other RNA
ttaactgtagagaaaatgtt

SEQ ID NO: 56572 - RNA, 20 nt, synthetic construct
  source 1..20: mol_type = other RNA
ttaactgtattgcaaactaa

SEQ ID NO: 56573 - RNA, 20 nt, synthetic construct
  source 1..20: mol_type = other RNA
ttaacttattggaaaactct

SEQ ID NO: 56574 - RNA, 20 nt, synthetic construct
  source 1..20: mol_type = other RNA
ttaacttcacctctacacaa

SEQ ID NO: 56575 - RNA, 20 nt, synthetic construct
  source 1..20: mol_type = other RNA
ttaacttctaatgcccatta

SEQ ID NO: 56576 - RNA, 20 nt, synthetic construct
  source 1..20: mol_type = other RNA
ttaacttgctttgaatttgg

SEQ ID NO: 56577 - RNA, 20 nt, synthetic construct
  source 1..20: mol_type = other RNA
ttaactttaaagctctatgg

SEQ ID NO: 56578 - RNA, 20 nt, synthetic construct
  source 1..20: mol_type = other RNA
ttaactttgaaatcagaact

SEQ ID NO: 56579 - RNA, 20 nt, synthetic construct
  source 1..20: mol_type = other RNA
ttaactttgatgaattccag

SEQ ID NO: 56580 - RNA, 20 nt, synthetic construct
  source 1..20: mol_type = other RNA
ttaagaaaagaagttacggt

SEQ ID NO: 56581 - RNA, 20 nt, synthetic construct
  source 1..20: mol_type = other RNA
ttaagaaaatcattgttcag

SEQ ID NO: 56582 - RNA, 20 nt, synthetic construct
  source 1..20: mol_type = other RNA
ttaagaaatcgttgtgaaat

SEQ ID NO: 56583 - RNA, 20 nt, synthetic construct
  source 1..20: mol_type = other RNA
ttaagaaccatacagtgcct

SEQ ID NO: 56584 - RNA, 20 nt, synthetic construct
  source 1..20: mol_type = other RNA
ttaagaaccttcatactatt

SEQ ID NO: 56585 - RNA, 20 nt, synthetic construct
  source 1..20: mol_type = other RNA
ttaagaacttcttcaaaaga

SEQ ID NO: 56586 - RNA, 20 nt, synthetic construct
  source 1..20: mol_type = other RNA
ttaagaaggaaaagaacaca

SEQ ID NO: 56587 - RNA, 20 nt, synthetic construct
  source 1..20: mol_type = other RNA
ttaagaagggaacactaaga

SEQ ID NO: 56588 - RNA, 20 nt, synthetic construct
  source 1..20: mol_type = other RNA
ttaagacaatgtggagttgg

SEQ ID NO: 56589 - RNA, 20 nt, synthetic construct
  source 1..20: mol_type = other RNA
ttaagacacaaggaaggtca

SEQ ID NO: 56590 - RNA, 20 nt, synthetic construct
  source 1..20: mol_type = other RNA
ttaagacatttgggaatgtg

SEQ ID NO: 56591 - RNA, 20 nt, synthetic construct
  source 1..20: mol_type = other RNA
ttaagaccacaaggattaat

SEQ ID NO: 56592 - RNA, 20 nt, synthetic construct
  source 1..20: mol_type = other RNA
ttaagactgctgtttaccaa

SEQ ID NO: 56593 - RNA, 20 nt, synthetic construct
  source 1..20: mol_type = other RNA
ttaagagaatggaaacttgc

SEQ ID NO: 56594 - RNA, 20 nt, synthetic construct
  source 1..20: mol_type = other RNA
ttaagagactctcaagaagg

SEQ ID NO: 56595 - RNA, 20 nt, synthetic construct
  source 1..20: mol_type = other RNA
ttaagagaggaagtgaccct

SEQ ID NO: 56596 - RNA, 20 nt, synthetic construct
  source 1..20: mol_type = other RNA
ttaagagcatgttgggccaa

SEQ ID NO: 56597 - RNA, 20 nt, synthetic construct
  source 1..20: mol_type = other RNA
ttaagagctaagactataaa

SEQ ID NO: 56598 - RNA, 20 nt, synthetic construct
  source 1..20: mol_type = other RNA
ttaagagtatctttttcagc

SEQ ID NO: 56599 - RNA, 20 nt, synthetic construct
  source 1..20: mol_type = other RNA
ttaagagtctcatctgtcaa

SEQ ID NO: 56600 - RNA, 20 nt, synthetic construct
  source 1..20: mol_type = other RNA
ttaagagtgaagaaaccttt

SEQ ID NO: 56601 - RNA, 20 nt, synthetic construct
  source 1..20: mol_type = other RNA
ttaagagtgtgctgactagt

SEQ ID NO: 56602 - RNA, 20 nt, synthetic construct
  source 1..20: mol_type = other RNA
ttaagataatgctgttctct

SEQ ID NO: 56603 - RNA, 20 nt, synthetic construct
  source 1..20: mol_type = other RNA
ttaagatggatttttctgtt

SEQ ID NO: 56604 - RNA, 20 nt, synthetic construct
  source 1..20: mol_type = other RNA
ttaagattcaacaaaactgg

SEQ ID NO: 56605 - RNA, 20 nt, synthetic construct
  source 1..20: mol_type = other RNA
ttaagattctctttagggaa

SEQ ID NO: 56606 - RNA, 20 nt, synthetic construct
  source 1..20: mol_type = other RNA
ttaagattttttgttgttgg

SEQ ID NO: 56607 - RNA, 20 nt, synthetic construct
  source 1..20: mol_type = other RNA
ttaagcaaaatggaagtgct

SEQ ID NO: 56608 - RNA, 20 nt, synthetic construct
  source 1..20: mol_type = other RNA
ttaagcaaccttttaggtgc

SEQ ID NO: 56609 - RNA, 20 nt, synthetic construct
  source 1..20: mol_type = other RNA
ttaagcacagaattactata

SEQ ID NO: 56610 - RNA, 20 nt, synthetic construct
  source 1..20: mol_type = other RNA
ttaagcacagactgtgcctt

SEQ ID NO: 56611 - RNA, 20 nt, synthetic construct
  source 1..20: mol_type = other RNA
ttaagcacatctgtcttgtg

SEQ ID NO: 56612 - RNA, 20 nt, synthetic construct
  source 1..20: mol_type = other RNA
ttaagcaccactagagtatt

SEQ ID NO: 56613 - RNA, 20 nt, synthetic construct
  source 1..20: mol_type = other RNA
ttaagcagaaagttactatt

SEQ ID NO: 56614 - RNA, 20 nt, synthetic construct
  source 1..20: mol_type = other RNA
ttaagcatagtttgagtatt

SEQ ID NO: 56615 - RNA, 20 nt, synthetic construct
  source 1..20: mol_type = other RNA
ttaagcatcccatatggagg

SEQ ID NO: 56616 - RNA, 20 nt, synthetic construct
  source 1..20: mol_type = other RNA
ttaagcattttccggttgta

SEQ ID NO: 56617 - RNA, 20 nt, synthetic construct
  source 1..20: mol_type = other RNA
ttaagccagtcactaaaaat

SEQ ID NO: 56618 - RNA, 20 nt, synthetic construct
  source 1..20: mol_type = other RNA
ttaagccatttcaggttttc

SEQ ID NO: 56619 - RNA, 20 nt, synthetic construct
  source 1..20: mol_type = other RNA
ttaagcccaacttcacacca

SEQ ID NO: 56620 - RNA, 20 nt, synthetic construct
  source 1..20: mol_type = other RNA
ttaagccgttccatcagaga

SEQ ID NO: 56621 - RNA, 20 nt, synthetic construct
  source 1..20: mol_type = other RNA
ttaagcctagagattaggca

SEQ ID NO: 56622 - RNA, 20 nt, synthetic construct
  source 1..20: mol_type = other RNA
ttaagcttaggtctttgatc

SEQ ID NO: 56623 - RNA, 20 nt, synthetic construct
  source 1..20: mol_type = other RNA
ttaagcttcgacagtccctt

SEQ ID NO: 56624 - RNA, 20 nt, synthetic construct
  source 1..20: mol_type = other RNA
ttaaggaaaagtcagtaaaa

SEQ ID NO: 56625 - RNA, 20 nt, synthetic construct
  source 1..20: mol_type = other RNA
ttaaggaaatggacagcaca

SEQ ID NO: 56626 - RNA, 20 nt, synthetic construct
  source 1..20: mol_type = other RNA
ttaaggaatgcctataaaat

SEQ ID NO: 56627 - RNA, 20 nt, synthetic construct
  source 1..20: mol_type = other RNA
ttaaggacatccacaacatt

SEQ ID NO: 56628 - RNA, 20 nt, synthetic construct
  source 1..20: mol_type = other RNA
ttaaggaccaggtatggcga

SEQ ID NO: 56629 - RNA, 20 nt, synthetic construct
  source 1..20: mol_type = other RNA
ttaaggagatggcacatacc

SEQ ID NO: 56630 - RNA, 20 nt, synthetic construct
  source 1..20: mol_type = other RNA
ttaaggcagggcttggtggc

SEQ ID NO: 56631 - RNA, 20 nt, synthetic construct
  source 1..20: mol_type = other RNA
ttaaggcgcagacacaccat

SEQ ID NO: 56632 - RNA, 20 nt, synthetic construct
  source 1..20: mol_type = other RNA
ttaaggctaaaacatacatg

SEQ ID NO: 56633 - RNA, 20 nt, synthetic construct
  source 1..20: mol_type = other RNA
ttaaggctgaacaatattcc

SEQ ID NO: 56634 - RNA, 20 nt, synthetic construct
  source 1..20: mol_type = other RNA
ttaaggctggaggatggctt

SEQ ID NO: 56635 - RNA, 20 nt, synthetic construct
  source 1..20: mol_type = other RNA
ttaaggcttggaaaacaaat

SEQ ID NO: 56636 - RNA, 20 nt, synthetic construct
  source 1..20: mol_type = other RNA
ttaagggaaacactcatacc

SEQ ID NO: 56637 - RNA, 20 nt, synthetic construct
  source 1..20: mol_type = other RNA
ttaagggaaacagggttaca

SEQ ID NO: 56638 - RNA, 20 nt, synthetic construct
  source 1..20: mol_type = other RNA
ttaagggaagagctaagatg

SEQ ID NO: 56639 - RNA, 20 nt, synthetic construct
  source 1..20: mol_type = other RNA
ttaagggccatttcatttct

SEQ ID NO: 56640 - RNA, 20 nt, synthetic construct
  source 1..20: mol_type = other RNA
ttaaggggtaaatggtttct

SEQ ID NO: 56641 - RNA, 20 nt, synthetic construct
  source 1..20: mol_type = other RNA
ttaaggtaagggtccagctt

SEQ ID NO: 56642 - RNA, 20 nt, synthetic construct
  source 1..20: mol_type = other RNA
ttaaggtttttaaaagatgc

SEQ ID NO: 56643 - RNA, 20 nt, synthetic construct
  source 1..20: mol_type = other RNA
ttaagtatctcagtcataat

SEQ ID NO: 56644 - RNA, 20 nt, synthetic construct
  source 1..20: mol_type = other RNA
ttaagtatctcggtcattct

SEQ ID NO: 56645 - RNA, 20 nt, synthetic construct
  source 1..20: mol_type = other RNA
ttaagtattgcattgaatct

SEQ ID NO: 56646 - RNA, 20 nt, synthetic construct
  source 1..20: mol_type = other RNA
ttaagtcactccatttgtgg

SEQ ID NO: 56647 - RNA, 20 nt, synthetic construct
  source 1..20: mol_type = other RNA
ttaagtctgaaagcttctga

SEQ ID NO: 56648 - RNA, 20 nt, synthetic construct
  source 1..20: mol_type = other RNA
ttaagtgcacaatgcagtat

SEQ ID NO: 56649 - RNA, 20 nt, synthetic construct
  source 1..20: mol_type = other RNA
ttaagtggcgctgtttgcct

SEQ ID NO: 56650 - RNA, 20 nt, synthetic construct
  source 1..20: mol_type = other RNA
ttaagtgtttgaaaagtgtt

SEQ ID NO: 56651 - RNA, 20 nt, synthetic construct
  source 1..20: mol_type = other RNA
ttaagttaaaacttgtagag

SEQ ID NO: 56652 - RNA, 20 nt, synthetic construct
  source 1..20: mol_type = other RNA
ttaagttactgattagaagg

SEQ ID NO: 56653 - RNA, 20 nt, synthetic construct
  source 1..20: mol_type = other RNA
ttaagttctccaagttatta

SEQ ID NO: 56654 - RNA, 20 nt, synthetic construct
  source 1..20: mol_type = other RNA
ttaataaaggtgctaattgt

SEQ ID NO: 56655 - RNA, 20 nt, synthetic construct
  source 1..20: mol_type = other RNA
ttaataacaaaaggtagaag

SEQ ID NO: 56656 - RNA, 20 nt, synthetic construct
  source 1..20: mol_type = other RNA
ttaataaccctgttttgtag

SEQ ID NO: 56657 - RNA, 20 nt, synthetic construct
  source 1..20: mol_type = other RNA
ttaataacctcaaagtggaa

SEQ ID NO: 56658 - RNA, 20 nt, synthetic construct
  source 1..20: mol_type = other RNA
ttaataactgcctaagtaat

SEQ ID NO: 56659 - RNA, 20 nt, synthetic construct
  source 1..20: mol_type = other RNA
ttaataagatcatacacctg

SEQ ID NO: 56660 - RNA, 20 nt, synthetic construct
  source 1..20: mol_type = other RNA
ttaataagcttcgaagcaaa

SEQ ID NO: 56661 - RNA, 20 nt, synthetic construct
  source 1..20: mol_type = other RNA
ttaatactatgtatgtggct

SEQ ID NO: 56662 - RNA, 20 nt, synthetic construct
  source 1..20: mol_type = other RNA
ttaatacttgtgtagcggga

SEQ ID NO: 56663 - RNA, 20 nt, synthetic construct
  source 1..20: mol_type = other RNA
ttaatactttcacactgatt

SEQ ID NO: 56664 - RNA, 20 nt, synthetic construct
  source 1..20: mol_type = other RNA
ttaatagaggtctgtctttc

SEQ ID NO: 56665 - RNA, 20 nt, synthetic construct
  source 1..20: mol_type = other RNA
ttaatagataggtcatgtac

SEQ ID NO: 56666 - RNA, 20 nt, synthetic construct
  source 1..20: mol_type = other RNA
ttaatagcccaacagggttt

SEQ ID NO: 56667 - RNA, 20 nt, synthetic construct
  source 1..20: mol_type = other RNA
ttaatagcctcctaagtttt

SEQ ID NO: 56668 - RNA, 20 nt, synthetic construct
  source 1..20: mol_type = other RNA
ttaatagtgaccctttgaag

SEQ ID NO: 56669 - RNA, 20 nt, synthetic construct
  source 1..20: mol_type = other RNA
ttaatataaaaattccgctc

SEQ ID NO: 56670 - RNA, 20 nt, synthetic construct
  source 1..20: mol_type = other RNA
ttaatatgtgtacaatgggg

SEQ ID NO: 56671 - RNA, 20 nt, synthetic construct
  source 1..20: mol_type = other RNA
ttaatattataagttgggag

SEQ ID NO: 56672 - RNA, 20 nt, synthetic construct
  source 1..20: mol_type = other RNA
ttaatattgaaacgatgcat

SEQ ID NO: 56673 - RNA, 20 nt, synthetic construct
  source 1..20: mol_type = other RNA
ttaatattgtaggtgtctca

SEQ ID NO: 56674 - RNA, 20 nt, synthetic construct
  source 1..20: mol_type = other RNA
ttaatcaccaggcgcggtgg

SEQ ID NO: 56675 - RNA, 20 nt, synthetic construct
  source 1..20: mol_type = other RNA
ttaatcacctcaagtgatgc

SEQ ID NO: 56676 - RNA, 20 nt, synthetic construct
  source 1..20: mol_type = other RNA
ttaatcagtctgtaagcacc

SEQ ID NO: 56677 - RNA, 20 nt, synthetic construct
  source 1..20: mol_type = other RNA
ttaatccttgtggtcttaag

SEQ ID NO: 56678 - RNA, 20 nt, synthetic construct
  source 1..20: mol_type = other RNA
ttaatcgaatcctcacaaca

SEQ ID NO: 56679 - RNA, 20 nt, synthetic construct
  source 1..20: mol_type = other RNA
ttaatctacaaaacagggtt

SEQ ID NO: 56680 - RNA, 20 nt, synthetic construct
  source 1..20: mol_type = other RNA
ttaatctcatccacaatgag

SEQ ID NO: 56681 - RNA, 20 nt, synthetic construct
  source 1..20: mol_type = other RNA
ttaatctcctgagtagcagg

SEQ ID NO: 56682 - RNA, 20 nt, synthetic construct
  source 1..20: mol_type = other RNA
ttaatctctcttgaccttag

SEQ ID NO: 56683 - RNA, 20 nt, synthetic construct
  source 1..20: mol_type = other RNA
ttaatctcttacacctgttt

SEQ ID NO: 56684 - RNA, 20 nt, synthetic construct
  source 1..20: mol_type = other RNA
ttaatctgatttttagtgac

SEQ ID NO: 56685 - RNA, 20 nt, synthetic construct
  source 1..20: mol_type = other RNA
ttaatctgtcagcagttcag

SEQ ID NO: 56686 - RNA, 20 nt, synthetic construct
  source 1..20: mol_type = other RNA
ttaatctgtcctgaatacta

SEQ ID NO: 56687 - RNA, 20 nt, synthetic construct
  source 1..20: mol_type = other RNA
ttaatcttcacacttagttc

SEQ ID NO: 56688 - RNA, 20 nt, synthetic construct
  source 1..20: mol_type = other RNA
ttaatcttgcaaaacaatag

SEQ ID NO: 56689 - RNA, 20 nt, synthetic construct
  source 1..20: mol_type = other RNA
ttaatctttctgaactcaaa

SEQ ID NO: 56690 - RNA, 20 nt, synthetic construct
  source 1..20: mol_type = other RNA
ttaatgagtagtacttctga

SEQ ID NO: 56691 - RNA, 20 nt, synthetic construct
  source 1..20: mol_type = other RNA
ttaatgcaacctgctttcct

SEQ ID NO: 56692 - RNA, 20 nt, synthetic construct
  source 1..20: mol_type = other RNA
ttaatgcccaatcaaatcca

SEQ ID NO: 56693 - RNA, 20 nt, synthetic construct
  source 1..20: mol_type = other RNA
ttaatgccccatgtgttggc

SEQ ID NO: 56694 - RNA, 20 nt, synthetic construct
  source 1..20: mol_type = other RNA
ttaatgcttcatattttgtg

SEQ ID NO: 56695 - RNA, 20 nt, synthetic construct
  source 1..20: mol_type = other RNA
ttaatgggcacttgggatgt

SEQ ID NO: 56696 - RNA, 20 nt, synthetic construct
  source 1..20: mol_type = other RNA
ttaatgggcattagaagtta

SEQ ID NO: 56697 - RNA, 20 nt, synthetic construct
  source 1..20: mol_type = other RNA
ttaatggttagactgcacat

SEQ ID NO: 56698 - RNA, 20 nt, synthetic construct
  source 1..20: mol_type = other RNA
ttaatgtagatcctgaggaa

SEQ ID NO: 56699 - RNA, 20 nt, synthetic construct
  source 1..20: mol_type = other RNA
ttaatgtaggtgtctgatgt

SEQ ID NO: 56700 - RNA, 20 nt, synthetic construct
  source 1..20: mol_type = other RNA
ttaatgtgatatgccacatt

SEQ ID NO: 56701 - RNA, 20 nt, synthetic construct
  source 1..20: mol_type = other RNA
ttaatgtgctgtccatttcc

SEQ ID NO: 56702 - RNA, 20 nt, synthetic construct
  source 1..20: mol_type = other RNA
ttaatgtgtgaagaaggaat

SEQ ID NO: 56703 - RNA, 20 nt, synthetic construct
  source 1..20: mol_type = other RNA
ttaatgtgttgtctgattca

SEQ ID NO: 56704 - RNA, 20 nt, synthetic construct
  source 1..20: mol_type = other RNA
ttaatgttgacatcttgcat

SEQ ID NO: 56705 - RNA, 20 nt, synthetic construct
  source 1..20: mol_type = other RNA
ttaatgttttatttagccca

SEQ ID NO: 56706 - RNA, 20 nt, synthetic construct
  source 1..20: mol_type = other RNA
ttaattacccaggcatgatg

SEQ ID NO: 56707 - RNA, 20 nt, synthetic construct
  source 1..20: mol_type = other RNA
ttaattagccgggtgtagtg

SEQ ID NO: 56708 - RNA, 20 nt, synthetic construct
  source 1..20: mol_type = other RNA
ttaattatgagcattcccca

SEQ ID NO: 56709 - RNA, 20 nt, synthetic construct
  source 1..20: mol_type = other RNA
ttaattatttgtgcatactg

SEQ ID NO: 56710 - RNA, 20 nt, synthetic construct
  source 1..20: mol_type = other RNA
ttaattcagtcaacaccaag

SEQ ID NO: 56711 - RNA, 20 nt, synthetic construct
  source 1..20: mol_type = other RNA
ttaattccaaattagctttc

SEQ ID NO: 56712 - RNA, 20 nt, synthetic construct
  source 1..20: mol_type = other RNA
ttaattccacaaccactggg

SEQ ID NO: 56713 - RNA, 20 nt, synthetic construct
  source 1..20: mol_type = other RNA
ttaattcctactttcttcaa

SEQ ID NO: 56714 - RNA, 20 nt, synthetic construct
  source 1..20: mol_type = other RNA
ttaattctatctgaactttc

SEQ ID NO: 56715 - RNA, 20 nt, synthetic construct
  source 1..20: mol_type = other RNA
ttaattctgaggcctcctgc

SEQ ID NO: 56716 - RNA, 20 nt, synthetic construct
  source 1..20: mol_type = other RNA
ttaattctgtttacccttac

SEQ ID NO: 56717 - RNA, 20 nt, synthetic construct
  source 1..20: mol_type = other RNA
ttaattcttaaactgccaaa

SEQ ID NO: 56718 - RNA, 20 nt, synthetic construct
  source 1..20: mol_type = other RNA
ttaattcttttgctgtatac

SEQ ID NO: 56719 - RNA, 20 nt, synthetic construct
  source 1..20: mol_type = other RNA
ttaattgagagctttctttt

SEQ ID NO: 56720 - RNA, 20 nt, synthetic construct
  source 1..20: mol_type = other RNA
ttaattgagctgtccccacc

SEQ ID NO: 56721 - RNA, 20 nt, synthetic construct
  source 1..20: mol_type = other RNA
ttaattgggggaaaattgac

SEQ ID NO: 56722 - RNA, 20 nt, synthetic construct
  source 1..20: mol_type = other RNA
ttaatttacccacaaaagaa

SEQ ID NO: 56723 - RNA, 20 nt, synthetic construct
  source 1..20: mol_type = other RNA
ttaatttagatgagagtggc

SEQ ID NO: 56724 - RNA, 20 nt, synthetic construct
  source 1..20: mol_type = other RNA
ttaatttagcgttcatccaa

SEQ ID NO: 56725 - RNA, 20 nt, synthetic construct
  source 1..20: mol_type = other RNA
ttaatttccacccatgaagc

SEQ ID NO: 56726 - RNA, 20 nt, synthetic construct
  source 1..20: mol_type = other RNA
ttaatttgaggtctaggcta

SEQ ID NO: 56727 - RNA, 20 nt, synthetic construct
  source 1..20: mol_type = other RNA
ttaatttggcttggggaaca

SEQ ID NO: 56728 - RNA, 20 nt, synthetic construct
  source 1..20: mol_type = other RNA
ttaatttgggtttgagtttc

SEQ ID NO: 56729 - RNA, 20 nt, synthetic construct
  source 1..20: mol_type = other RNA
ttaattttctgactctgtgc

SEQ ID NO: 56730 - RNA, 20 nt, synthetic construct
  source 1..20: mol_type = other RNA
ttaattttgagagtgcagta

SEQ ID NO: 56731 - RNA, 20 nt, synthetic construct
  source 1..20: mol_type = other RNA
ttaatttttgtcaagtgact

SEQ ID NO: 56732 - RNA, 20 nt, synthetic construct
  source 1..20: mol_type = other RNA
ttacaaaaacacactgagct

SEQ ID NO: 56733 - RNA, 20 nt, synthetic construct
  source 1..20: mol_type = other RNA
ttacaaaagaacaggacttt

SEQ ID NO: 56734 - RNA, 20 nt, synthetic construct
  source 1..20: mol_type = other RNA
ttacaaaataggcagtcctc

SEQ ID NO: 56735 - RNA, 20 nt, synthetic construct
  source 1..20: mol_type = other RNA
ttacaaaatatgtaatgacc

SEQ ID NO: 56736 - RNA, 20 nt, synthetic construct
  source 1..20: mol_type = other RNA
ttacaaacatatgcatgtta

SEQ ID NO: 56737 - RNA, 20 nt, synthetic construct
  source 1..20: mol_type = other RNA
ttacaaatgaaagtcagcta

SEQ ID NO: 56738 - RNA, 20 nt, synthetic construct
  source 1..20: mol_type = other RNA
ttacaacagcaaggctcctg

SEQ ID NO: 56739 - RNA, 20 nt, synthetic construct
  source 1..20: mol_type = other RNA
ttacaactactcgggaggct

SEQ ID NO: 56740 - RNA, 20 nt, synthetic construct
  source 1..20: mol_type = other RNA
ttacaactctaataacagcc

SEQ ID NO: 56741 - RNA, 20 nt, synthetic construct
  source 1..20: mol_type = other RNA
ttacaactggtttctgcata

SEQ ID NO: 56742 - RNA, 20 nt, synthetic construct
  source 1..20: mol_type = other RNA
ttacaaggattgaatggaaa

SEQ ID NO: 56743 - RNA, 20 nt, synthetic construct
  source 1..20: mol_type = other RNA
ttacaagggtgacagagccg

SEQ ID NO: 56744 - RNA, 20 nt, synthetic construct
  source 1..20: mol_type = other RNA
ttacaagtacatgaaatact

SEQ ID NO: 56745 - RNA, 20 nt, synthetic construct
  source 1..20: mol_type = other RNA
ttacaataatatgcctcatg

SEQ ID NO: 56746 - RNA, 20 nt, synthetic construct
  source 1..20: mol_type = other RNA
ttacaataatgcacatgggc

SEQ ID NO: 56747 - RNA, 20 nt, synthetic construct
  source 1..20: mol_type = other RNA
ttacaatgaatatgtactac

SEQ ID NO: 56748 - RNA, 20 nt, synthetic construct
  source 1..20: mol_type = other RNA
ttacaatggaaatgaagtat

SEQ ID NO: 56749 - RNA, 20 nt, synthetic construct
  source 1..20: mol_type = other RNA
ttacaatgtaaggtgcacgc

SEQ ID NO: 56750 - RNA, 20 nt, synthetic construct
  source 1..20: mol_type = other RNA
ttacaattcctttctaggca

SEQ ID NO: 56751 - RNA, 20 nt, synthetic construct
  source 1..20: mol_type = other RNA
ttacaattgataccatgaaa

SEQ ID NO: 56752 - RNA, 20 nt, synthetic construct
  source 1..20: mol_type = other RNA
ttacacaagtgtttcattta

SEQ ID NO: 56753 - RNA, 20 nt, synthetic construct
  source 1..20: mol_type = other RNA
ttacacacacctaccaccat

SEQ ID NO: 56754 - RNA, 20 nt, synthetic construct
  source 1..20: mol_type = other RNA
ttacacacacgtttatattc

SEQ ID NO: 56755 - RNA, 20 nt, synthetic construct
  source 1..20: mol_type = other RNA
ttacacacctgaaattctca

SEQ ID NO: 56756 - RNA, 20 nt, synthetic construct
  source 1..20: mol_type = other RNA
ttacacagaaagcctcttca

SEQ ID NO: 56757 - RNA, 20 nt, synthetic construct
  source 1..20: mol_type = other RNA
ttacacaggtagacatgtgc

SEQ ID NO: 56758 - RNA, 20 nt, synthetic construct
  source 1..20: mol_type = other RNA
ttacacatctcccataccac

SEQ ID NO: 56759 - RNA, 20 nt, synthetic construct
  source 1..20: mol_type = other RNA
ttacacatgtcagccacaag

SEQ ID NO: 56760 - RNA, 20 nt, synthetic construct
  source 1..20: mol_type = other RNA
ttacacattaggctctgggt

SEQ ID NO: 56761 - RNA, 20 nt, synthetic construct
  source 1..20: mol_type = other RNA
ttacaccatgcaggttcatg

SEQ ID NO: 56762 - RNA, 20 nt, synthetic construct
  source 1..20: mol_type = other RNA
ttacaccctaggtagggttg

SEQ ID NO: 56763 - RNA, 20 nt, synthetic construct
  source 1..20: mol_type = other RNA
ttacacctgtttaaaaagaa

SEQ ID NO: 56764 - RNA, 20 nt, synthetic construct
  source 1..20: mol_type = other RNA
ttacacgccttcgcgggcac

SEQ ID NO: 56765 - RNA, 20 nt, synthetic construct
  source 1..20: mol_type = other RNA
ttacactatggcttttgagt

SEQ ID NO: 56766 - RNA, 20 nt, synthetic construct
  source 1..20: mol_type = other RNA
ttacactcaaaagccatagt

SEQ ID NO: 56767 - RNA, 20 nt, synthetic construct
  source 1..20: mol_type = other RNA
ttacacttccagtacatctc

SEQ ID NO: 56768 - RNA, 20 nt, synthetic construct
  source 1..20: mol_type = other RNA
ttacacttggagttttcccc

SEQ ID NO: 56769 - RNA, 20 nt, synthetic construct
  source 1..20: mol_type = other RNA
ttacagaaaaaattagcctt

SEQ ID NO: 56770 - RNA, 20 nt, synthetic construct
  source 1..20: mol_type = other RNA
ttacagaaatataccttatg

SEQ ID NO: 56771 - RNA, 20 nt, synthetic construct
  source 1..20: mol_type = other RNA
ttacagaccttattcaaata

SEQ ID NO: 56772 - RNA, 20 nt, synthetic construct
  source 1..20: mol_type = other RNA
ttacagactgattaatttga

SEQ ID NO: 56773 - RNA, 20 nt, synthetic construct
  source 1..20: mol_type = other RNA
ttacagatatcacccagacc

SEQ ID NO: 56774 - RNA, 20 nt, synthetic construct
  source 1..20: mol_type = other RNA
ttacagcagatctgcttgca

SEQ ID NO: 56775 - RNA, 20 nt, synthetic construct
  source 1..20: mol_type = other RNA
ttacagcagctctagcaaac

SEQ ID NO: 56776 - RNA, 20 nt, synthetic construct
  source 1..20: mol_type = other RNA
ttacagcatttcagccaaag

SEQ ID NO: 56777 - RNA, 20 nt, synthetic construct
  source 1..20: mol_type = other RNA
ttacagctcttctcagttgc

SEQ ID NO: 56778 - RNA, 20 nt, synthetic construct
  source 1..20: mol_type = other RNA
ttacaggatatcagaagtgc

SEQ ID NO: 56779 - RNA, 20 nt, synthetic construct
  source 1..20: mol_type = other RNA
ttacaggcatgagccactgc

SEQ ID NO: 56780 - RNA, 20 nt, synthetic construct
  source 1..20: mol_type = other RNA
ttacaggcatgagtcgccat

SEQ ID NO: 56781 - RNA, 20 nt, synthetic construct
  source 1..20: mol_type = other RNA
ttacaggcgcacgccatctc

SEQ ID NO: 56782 - RNA, 20 nt, synthetic construct
  source 1..20: mol_type = other RNA
ttacaggggactttgatgtt

SEQ ID NO: 56783 - RNA, 20 nt, synthetic construct
  source 1..20: mol_type = other RNA
ttacaggtcaaactcactta

SEQ ID NO: 56784 - RNA, 20 nt, synthetic construct
  source 1..20: mol_type = other RNA
ttacagtaagatcctggatt

SEQ ID NO: 56785 - RNA, 20 nt, synthetic construct
  source 1..20: mol_type = other RNA
ttacagtaaggtttccctgg

SEQ ID NO: 56786 - RNA, 20 nt, synthetic construct
  source 1..20: mol_type = other RNA
ttacagtagccaaaggtaga

SEQ ID NO: 56787 - RNA, 20 nt, synthetic construct
  source 1..20: mol_type = other RNA
ttacagtataggggaactct

SEQ ID NO: 56788 - RNA, 20 nt, synthetic construct
  source 1..20: mol_type = other RNA
ttacagtcatcacagtccag

SEQ ID NO: 56789 - RNA, 20 nt, synthetic construct
  source 1..20: mol_type = other RNA
ttacagtctcgaccccctgg

SEQ ID NO: 56790 - RNA, 20 nt, synthetic construct
  source 1..20: mol_type = other RNA
ttacagtgacatatgccggc

SEQ ID NO: 56791 - RNA, 20 nt, synthetic construct
  source 1..20: mol_type = other RNA
ttacagttatgtcagtcaac

SEQ ID NO: 56792 - RNA, 20 nt, synthetic construct
  source 1..20: mol_type = other RNA
ttacatacttcaaagggtca

SEQ ID NO: 56793 - RNA, 20 nt, synthetic construct
  source 1..20: mol_type = other RNA
ttacatagcaaggaagcaga

SEQ ID NO: 56794 - RNA, 20 nt, synthetic construct
  source 1..20: mol_type = other RNA
ttacataggcttagtacagc

SEQ ID NO: 56795 - RNA, 20 nt, synthetic construct
  source 1..20: mol_type = other RNA
ttacatagtgctcttctgat

SEQ ID NO: 56796 - RNA, 20 nt, synthetic construct
  source 1..20: mol_type = other RNA
ttacatatagaagtaaatcc

SEQ ID NO: 56797 - RNA, 20 nt, synthetic construct
  source 1..20: mol_type = other RNA
ttacatattttgtaacgtgt

SEQ ID NO: 56798 - RNA, 20 nt, synthetic construct
  source 1..20: mol_type = other RNA
ttacatcagcagtgaccata

SEQ ID NO: 56799 - RNA, 20 nt, synthetic construct
  source 1..20: mol_type = other RNA
ttacatgaatggaaaattct

SEQ ID NO: 56800 - RNA, 20 nt, synthetic construct
  source 1..20: mol_type = other RNA
ttacatgaggtcacccaagc

SEQ ID NO: 56801 - RNA, 20 nt, synthetic construct
  source 1..20: mol_type = other RNA
ttacatgcttagccttccag

SEQ ID NO: 56802 - RNA, 20 nt, synthetic construct
  source 1..20: mol_type = other RNA
ttacatggttctgtgctaga

SEQ ID NO: 56803 - RNA, 20 nt, synthetic construct
  source 1..20: mol_type = other RNA
ttacatgtagttttccctgt

SEQ ID NO: 56804 - RNA, 20 nt, synthetic construct
  source 1..20: mol_type = other RNA
ttacatgtttaactatccta

SEQ ID NO: 56805 - RNA, 20 nt, synthetic construct
  source 1..20: mol_type = other RNA
ttacattaaagacagctact

SEQ ID NO: 56806 - RNA, 20 nt, synthetic construct
  source 1..20: mol_type = other RNA
ttacattagagaagaatgag

SEQ ID NO: 56807 - RNA, 20 nt, synthetic construct
  source 1..20: mol_type = other RNA
ttacattgccttcgcagggt

SEQ ID NO: 56808 - RNA, 20 nt, synthetic construct
  source 1..20: mol_type = other RNA
ttacattgtaatcctgtttc

SEQ ID NO: 56809 - RNA, 20 nt, synthetic construct
  source 1..20: mol_type = other RNA
ttacatttgcttaggctgtt

SEQ ID NO: 56810 - RNA, 20 nt, synthetic construct
  source 1..20: mol_type = other RNA
ttaccaaaacagcttcttgt

SEQ ID NO: 56811 - RNA, 20 nt, synthetic construct
  source 1..20: mol_type = other RNA
ttaccaaaacctggtatgag

SEQ ID NO: 56812 - RNA, 20 nt, synthetic construct
  source 1..20: mol_type = other RNA
ttaccaaggctaagttgaga

SEQ ID NO: 56813 - RNA, 20 nt, synthetic construct
  source 1..20: mol_type = other RNA
ttaccaagggtgtgtttaat

SEQ ID NO: 56814 - RNA, 20 nt, synthetic construct
  source 1..20: mol_type = other RNA
ttaccaagtgccgcgttttt

SEQ ID NO: 56815 - RNA, 20 nt, synthetic construct
  source 1..20: mol_type = other RNA
ttaccaagttgaatttctgt

SEQ ID NO: 56816 - RNA, 20 nt, synthetic construct
  source 1..20: mol_type = other RNA
ttaccaataaaagcctcatt

SEQ ID NO: 56817 - RNA, 20 nt, synthetic construct
  source 1..20: mol_type = other RNA
ttaccaccaagaaaaagcag

SEQ ID NO: 56818 - RNA, 20 nt, synthetic construct
  source 1..20: mol_type = other RNA
ttaccactagcaaactactg

SEQ ID NO: 56819 - RNA, 20 nt, synthetic construct
  source 1..20: mol_type = other RNA
ttaccactataatccagatg

SEQ ID NO: 56820 - RNA, 20 nt, synthetic construct
  source 1..20: mol_type = other RNA
ttaccactgaagtgttgaga

SEQ ID NO: 56821 - RNA, 20 nt, synthetic construct
  source 1..20: mol_type = other RNA
ttaccagcttacagcagatc

SEQ ID NO: 56822 - RNA, 20 nt, synthetic construct
  source 1..20: mol_type = other RNA
ttaccaggctggaagaattt

SEQ ID NO: 56823 - RNA, 20 nt, synthetic construct
  source 1..20: mol_type = other RNA
ttaccagtgcttgcagcctt

SEQ ID NO: 56824 - RNA, 20 nt, synthetic construct
  source 1..20: mol_type = other RNA
ttaccataaaaccatttttc

SEQ ID NO: 56825 - RNA, 20 nt, synthetic construct
  source 1..20: mol_type = other RNA
ttaccataaagtcttccatt

SEQ ID NO: 56826 - RNA, 20 nt, synthetic construct
  source 1..20: mol_type = other RNA
ttaccatatacacaaaaaga

SEQ ID NO: 56827 - RNA, 20 nt, synthetic construct
  source 1..20: mol_type = other RNA
ttaccatctaaagccaggct

SEQ ID NO: 56828 - RNA, 20 nt, synthetic construct
  source 1..20: mol_type = other RNA
ttaccatctgacatatgttt

SEQ ID NO: 56829 - RNA, 20 nt, synthetic construct
  source 1..20: mol_type = other RNA
ttaccatgtttccataaaaa

SEQ ID NO: 56830 - RNA, 20 nt, synthetic construct
  source 1..20: mol_type = other RNA
ttaccatttgaccttccttg

SEQ ID NO: 56831 - RNA, 20 nt, synthetic construct
  source 1..20: mol_type = other RNA
ttacccaaagactttgtttt

SEQ ID NO: 56832 - RNA, 20 nt, synthetic construct
  source 1..20: mol_type = other RNA
ttacccaacatgagagaaaa

SEQ ID NO: 56833 - RNA, 20 nt, synthetic construct
  source 1..20: mol_type = other RNA
ttacccacaaaagaaaattt

SEQ ID NO: 56834 - RNA, 20 nt, synthetic construct
  source 1..20: mol_type = other RNA
ttacccaggcatgatggctc

SEQ ID NO: 56835 - RNA, 20 nt, synthetic construct
  source 1..20: mol_type = other RNA
ttacccagtgtgtttgtttg

SEQ ID NO: 56836 - RNA, 20 nt, synthetic construct
  source 1..20: mol_type = other RNA
ttaccccattcactcagcat

SEQ ID NO: 56837 - RNA, 20 nt, synthetic construct
  source 1..20: mol_type = other RNA
ttacccccatcacactggtc

SEQ ID NO: 56838 - RNA, 20 nt, synthetic construct
  source 1..20: mol_type = other RNA
ttacccctactttttgtcac

SEQ ID NO: 56839 - RNA, 20 nt, synthetic construct
  source 1..20: mol_type = other RNA
ttacccctgagaacttcagt

SEQ ID NO: 56840 - RNA, 20 nt, synthetic construct
  source 1..20: mol_type = other RNA
ttaccccttaaattccaaaa

SEQ ID NO: 56841 - RNA, 20 nt, synthetic construct
  source 1..20: mol_type = other RNA
ttacccggagaggtgaacta

SEQ ID NO: 56842 - RNA, 20 nt, synthetic construct
  source 1..20: mol_type = other RNA
ttacccgtggaaatacttga

SEQ ID NO: 56843 - RNA, 20 nt, synthetic construct
  source 1..20: mol_type = other RNA
ttaccctaataacaaaatag

SEQ ID NO: 56844 - RNA, 20 nt, synthetic construct
  source 1..20: mol_type = other RNA
ttaccctcacagtcacaaag

SEQ ID NO: 56845 - RNA, 20 nt, synthetic construct
  source 1..20: mol_type = other RNA
ttaccctcattttataaggg

SEQ ID NO: 56846 - RNA, 20 nt, synthetic construct
  source 1..20: mol_type = other RNA
ttaccctctagctccccatt

SEQ ID NO: 56847 - RNA, 20 nt, synthetic construct
  source 1..20: mol_type = other RNA
ttaccctctggaatgcccat

SEQ ID NO: 56848 - RNA, 20 nt, synthetic construct
  source 1..20: mol_type = other RNA
ttaccctgctggaacgaata

SEQ ID NO: 56849 - RNA, 20 nt, synthetic construct
  source 1..20: mol_type = other RNA
ttacccttactaaattttga

SEQ ID NO: 56850 - RNA, 20 nt, synthetic construct
  source 1..20: mol_type = other RNA
ttaccctttactcagattca

SEQ ID NO: 56851 - RNA, 20 nt, synthetic construct
  source 1..20: mol_type = other RNA
ttaccggcatccgccaccac

SEQ ID NO: 56852 - RNA, 20 nt, synthetic construct
  source 1..20: mol_type = other RNA
ttacctaagcatcgtgaagt

SEQ ID NO: 56853 - RNA, 20 nt, synthetic construct
  source 1..20: mol_type = other RNA
ttacctatgaataggtgtgt

SEQ ID NO: 56854 - RNA, 20 nt, synthetic construct
  source 1..20: mol_type = other RNA
ttacctcaaaggagagaaga

SEQ ID NO: 56855 - RNA, 20 nt, synthetic construct
  source 1..20: mol_type = other RNA
ttacctcccatgcattcgtc

SEQ ID NO: 56856 - RNA, 20 nt, synthetic construct
  source 1..20: mol_type = other RNA
ttaccttaaaccatatacaa

SEQ ID NO: 56857 - RNA, 20 nt, synthetic construct
  source 1..20: mol_type = other RNA
ttaccttatagatgacgaaa

SEQ ID NO: 56858 - RNA, 20 nt, synthetic construct
  source 1..20: mol_type = other RNA
ttaccttctaaaatcatcac

SEQ ID NO: 56859 - RNA, 20 nt, synthetic construct
  source 1..20: mol_type = other RNA
ttacctttatctttggatat

SEQ ID NO: 56860 - RNA, 20 nt, synthetic construct
  source 1..20: mol_type = other RNA
ttacgaggacagactgcagt

SEQ ID NO: 56861 - RNA, 20 nt, synthetic construct
  source 1..20: mol_type = other RNA
ttacgagttatgcaagatgt

SEQ ID NO: 56862 - RNA, 20 nt, synthetic construct
  source 1..20: mol_type = other RNA
ttacgatgaaattgaccatt

SEQ ID NO: 56863 - RNA, 20 nt, synthetic construct
  source 1..20: mol_type = other RNA
ttacgcgtggatgtgtgcac

SEQ ID NO: 56864 - RNA, 20 nt, synthetic construct
  source 1..20: mol_type = other RNA
ttacgctgccaaaagccaag

SEQ ID NO: 56865 - RNA, 20 nt, synthetic construct
  source 1..20: mol_type = other RNA
ttacggttccctgtagagat

SEQ ID NO: 56866 - RNA, 20 nt, synthetic construct
  source 1..20: mol_type = other RNA
ttacgtactaggtatcacag

SEQ ID NO: 56867 - RNA, 20 nt, synthetic construct
  source 1..20: mol_type = other RNA
ttactaaactgaacgaagtg

SEQ ID NO: 56868 - RNA, 20 nt, synthetic construct
  source 1..20: mol_type = other RNA
ttactaaatgatctttcaag

SEQ ID NO: 56869 - RNA, 20 nt, synthetic construct
  source 1..20: mol_type = other RNA
ttactaaattttgaggcttt

SEQ ID NO: 56870 - RNA, 20 nt, synthetic construct
  source 1..20: mol_type = other RNA
ttactaagaagtgaaactgc

SEQ ID NO: 56871 - RNA, 20 nt, synthetic construct
  source 1..20: mol_type = other RNA
ttactacaaaagatcatttc

SEQ ID NO: 56872 - RNA, 20 nt, synthetic construct
  source 1..20: mol_type = other RNA
ttactaccaccactaatgtc

SEQ ID NO: 56873 - RNA, 20 nt, synthetic construct
  source 1..20: mol_type = other RNA
ttactactgcattttttgcc

SEQ ID NO: 56874 - RNA, 20 nt, synthetic construct
  source 1..20: mol_type = other RNA
ttactactgtactgtttagc

SEQ ID NO: 56875 - RNA, 20 nt, synthetic construct
  source 1..20: mol_type = other RNA
ttactagaagcactttttac

SEQ ID NO: 56876 - RNA, 20 nt, synthetic construct
  source 1..20: mol_type = other RNA
ttactagatcaagcccttcc

SEQ ID NO: 56877 - RNA, 20 nt, synthetic construct
  source 1..20: mol_type = other RNA
ttactagttgtgctacctca

SEQ ID NO: 56878 - RNA, 20 nt, synthetic construct
  source 1..20: mol_type = other RNA
ttactatttgtatcttcaca

SEQ ID NO: 56879 - RNA, 20 nt, synthetic construct
  source 1..20: mol_type = other RNA
ttactcaaatccaaattcac

SEQ ID NO: 56880 - RNA, 20 nt, synthetic construct
  source 1..20: mol_type = other RNA
ttactcagattcaccaattg

SEQ ID NO: 56881 - RNA, 20 nt, synthetic construct
  source 1..20: mol_type = other RNA
ttactcagtctcgaaaagga

SEQ ID NO: 56882 - RNA, 20 nt, synthetic construct
  source 1..20: mol_type = other RNA
ttactcatgtctacctgtct

SEQ ID NO: 56883 - RNA, 20 nt, synthetic construct
  source 1..20: mol_type = other RNA
ttactcattatggttgttgg

SEQ ID NO: 56884 - RNA, 20 nt, synthetic construct
  source 1..20: mol_type = other RNA
ttactccaagaaggctagca

SEQ ID NO: 56885 - RNA, 20 nt, synthetic construct
  source 1..20: mol_type = other RNA
ttactcccgatttcagttaa

SEQ ID NO: 56886 - RNA, 20 nt, synthetic construct
  source 1..20: mol_type = other RNA
ttactcctgagcaaggaagg

SEQ ID NO: 56887 - RNA, 20 nt, synthetic construct
  source 1..20: mol_type = other RNA
ttactcgagggtagcttttc

SEQ ID NO: 56888 - RNA, 20 nt, synthetic construct
  source 1..20: mol_type = other RNA
ttactcggtatgtacccaat

SEQ ID NO: 56889 - RNA, 20 nt, synthetic construct
  source 1..20: mol_type = other RNA
ttactcgtggttatagccat

SEQ ID NO: 56890 - RNA, 20 nt, synthetic construct
  source 1..20: mol_type = other RNA
ttactctaatggggaaatag

SEQ ID NO: 56891 - RNA, 20 nt, synthetic construct
  source 1..20: mol_type = other RNA
ttactctcaaataatttggc

SEQ ID NO: 56892 - RNA, 20 nt, synthetic construct
  source 1..20: mol_type = other RNA
ttactctctctgcctcggca

SEQ ID NO: 56893 - RNA, 20 nt, synthetic construct
  source 1..20: mol_type = other RNA
ttactctctttaattatgag

SEQ ID NO: 56894 - RNA, 20 nt, synthetic construct
  source 1..20: mol_type = other RNA
ttactcttctactcactgta

SEQ ID NO: 56895 - RNA, 20 nt, synthetic construct
  source 1..20: mol_type = other RNA
ttactgaaatcctagcccca

SEQ ID NO: 56896 - RNA, 20 nt, synthetic construct
  source 1..20: mol_type = other RNA
ttactgacaatagccaagac

SEQ ID NO: 56897 - RNA, 20 nt, synthetic construct
  source 1..20: mol_type = other RNA
ttactgactcaatcttctta

SEQ ID NO: 56898 - RNA, 20 nt, synthetic construct
  source 1..20: mol_type = other RNA
ttactgacttttccttaaaa

SEQ ID NO: 56899 - RNA, 20 nt, synthetic construct
  source 1..20: mol_type = other RNA
ttactgatctgctcaagttt

SEQ ID NO: 56900 - RNA, 20 nt, synthetic construct
  source 1..20: mol_type = other RNA
ttactgatcttttctgacaa

SEQ ID NO: 56901 - RNA, 20 nt, synthetic construct
  source 1..20: mol_type = other RNA
ttactgattagaaggattgt

SEQ ID NO: 56902 - RNA, 20 nt, synthetic construct
  source 1..20: mol_type = other RNA
ttactgatttatagtgtttc

SEQ ID NO: 56903 - RNA, 20 nt, synthetic construct
  source 1..20: mol_type = other RNA
ttactgcaacctccgttttt

SEQ ID NO: 56904 - RNA, 20 nt, synthetic construct
  source 1..20: mol_type = other RNA
ttactgctatacaaccggaa

SEQ ID NO: 56905 - RNA, 20 nt, synthetic construct
  source 1..20: mol_type = other RNA
ttactgcttgctgcactggc

SEQ ID NO: 56906 - RNA, 20 nt, synthetic construct
  source 1..20: mol_type = other RNA
ttactggatacaaggtcaat

SEQ ID NO: 56907 - RNA, 20 nt, synthetic construct
  source 1..20: mol_type = other RNA
ttactggtgttaggcaatcc

SEQ ID NO: 56908 - RNA, 20 nt, synthetic construct
  source 1..20: mol_type = other RNA
ttactgtaagttcctggact

SEQ ID NO: 56909 - RNA, 20 nt, synthetic construct
  source 1..20: mol_type = other RNA
ttactgtacaaagatttacc

SEQ ID NO: 56910 - RNA, 20 nt, synthetic construct
  source 1..20: mol_type = other RNA
ttactgtattaggatgtgta

SEQ ID NO: 56911 - RNA, 20 nt, synthetic construct
  source 1..20: mol_type = other RNA
ttactgtccaaacagtgacc

SEQ ID NO: 56912 - RNA, 20 nt, synthetic construct
  source 1..20: mol_type = other RNA
ttactgtctgtgaaaataat

SEQ ID NO: 56913 - RNA, 20 nt, synthetic construct
  source 1..20: mol_type = other RNA
ttactgttctccagtcccac

SEQ ID NO: 56914 - RNA, 20 nt, synthetic construct
  source 1..20: mol_type = other RNA
ttactgtttcttagctatat

SEQ ID NO: 56915 - RNA, 20 nt, synthetic construct
  source 1..20: mol_type = other RNA
ttacttaatttacccacaaa

SEQ ID NO: 56916 - RNA, 20 nt, synthetic construct
  source 1..20: mol_type = other RNA
ttacttactagttgtgctac

SEQ ID NO: 56917 - RNA, 20 nt, synthetic construct
  source 1..20: mol_type = other RNA
ttacttaggcagttattaag

SEQ ID NO: 56918 - RNA, 20 nt, synthetic construct
  source 1..20: mol_type = other RNA
ttacttcatagatgttatgc

SEQ ID NO: 56919 - RNA, 20 nt, synthetic construct
  source 1..20: mol_type = other RNA
ttacttccagctcacgttac

SEQ ID NO: 56920 - RNA, 20 nt, synthetic construct
  source 1..20: mol_type = other RNA
ttacttccagtgttttaggg

SEQ ID NO: 56921 - RNA, 20 nt, synthetic construct
  source 1..20: mol_type = other RNA
ttacttcccttctcgaagtg

SEQ ID NO: 56922 - RNA, 20 nt, synthetic construct
  source 1..20: mol_type = other RNA
ttacttctacagaatgttca

SEQ ID NO: 56923 - RNA, 20 nt, synthetic construct
  source 1..20: mol_type = other RNA
ttacttctcagctatagctt

SEQ ID NO: 56924 - RNA, 20 nt, synthetic construct
  source 1..20: mol_type = other RNA
ttacttctggaaagttcaaa

SEQ ID NO: 56925 - RNA, 20 nt, synthetic construct
  source 1..20: mol_type = other RNA
ttacttctttctctttcagc

SEQ ID NO: 56926 - RNA, 20 nt, synthetic construct
  source 1..20: mol_type = other RNA
ttacttgaaatcatttcact

SEQ ID NO: 56927 - RNA, 20 nt, synthetic construct
  source 1..20: mol_type = other RNA
ttacttgactattttaccct

SEQ ID NO: 56928 - RNA, 20 nt, synthetic construct
  source 1..20: mol_type = other RNA
ttacttgagagcagagacac

SEQ ID NO: 56929 - RNA, 20 nt, synthetic construct
  source 1..20: mol_type = other RNA
ttacttgagccccagaatag

SEQ ID NO: 56930 - RNA, 20 nt, synthetic construct
  source 1..20: mol_type = other RNA
ttacttgcttggtttcacac

SEQ ID NO: 56931 - RNA, 20 nt, synthetic construct
  source 1..20: mol_type = other RNA
ttacttggctcctcccggct

SEQ ID NO: 56932 - RNA, 20 nt, synthetic construct
  source 1..20: mol_type = other RNA
ttacttggggagagtgggcc

SEQ ID NO: 56933 - RNA, 20 nt, synthetic construct
  source 1..20: mol_type = other RNA
ttacttgggtataaatgatg

SEQ ID NO: 56934 - RNA, 20 nt, synthetic construct
  source 1..20: mol_type = other RNA
ttacttgtcatttctgctta

SEQ ID NO: 56935 - RNA, 20 nt, synthetic construct
  source 1..20: mol_type = other RNA
ttactttacagttatgtcag

SEQ ID NO: 56936 - RNA, 20 nt, synthetic construct
  source 1..20: mol_type = other RNA
ttactttcagctcaaacagc

SEQ ID NO: 56937 - RNA, 20 nt, synthetic construct
  source 1..20: mol_type = other RNA
ttactttgaatttaagacac

SEQ ID NO: 56938 - RNA, 20 nt, synthetic construct
  source 1..20: mol_type = other RNA
ttactttgcgaaacacactc

SEQ ID NO: 56939 - RNA, 20 nt, synthetic construct
  source 1..20: mol_type = other RNA
ttacttttaaagaaaggtct

SEQ ID NO: 56940 - RNA, 20 nt, synthetic construct
  source 1..20: mol_type = other RNA
ttacttttttgtagagacag

SEQ ID NO: 56941 - RNA, 20 nt, synthetic construct
  source 1..20: mol_type = other RNA
ttagaaaacatatccttcta

SEQ ID NO: 56942 - RNA, 20 nt, synthetic construct
  source 1..20: mol_type = other RNA
ttagaaaatacagttttgac

SEQ ID NO: 56943 - RNA, 20 nt, synthetic construct
  source 1..20: mol_type = other RNA
ttagaaaatgcttatgtctt

SEQ ID NO: 56944 - RNA, 20 nt, synthetic construct
  source 1..20: mol_type = other RNA
ttagaaaattagctgacttt

SEQ ID NO: 56945 - RNA, 20 nt, synthetic construct
  source 1..20: mol_type = other RNA
ttagaaactggtgaactggg

SEQ ID NO: 56946 - RNA, 20 nt, synthetic construct
  source 1..20: mol_type = other RNA
ttagaaagaaaatccaaaag

SEQ ID NO: 56947 - RNA, 20 nt, synthetic construct
  source 1..20: mol_type = other RNA
ttagaaagctggactcattc

SEQ ID NO: 56948 - RNA, 20 nt, synthetic construct
  source 1..20: mol_type = other RNA
ttagaaagtagattagcttt

SEQ ID NO: 56949 - RNA, 20 nt, synthetic construct
  source 1..20: mol_type = other RNA
ttagaaatacctgcaggttg

SEQ ID NO: 56950 - RNA, 20 nt, synthetic construct
  source 1..20: mol_type = other RNA
ttagaaatgaagatggcctc

SEQ ID NO: 56951 - RNA, 20 nt, synthetic construct
  source 1..20: mol_type = other RNA
ttagaaatgtggaagcagaa

SEQ ID NO: 56952 - RNA, 20 nt, synthetic construct
  source 1..20: mol_type = other RNA
ttagaaatttaaggaccagg

SEQ ID NO: 56953 - RNA, 20 nt, synthetic construct
  source 1..20: mol_type = other RNA
ttagaaatttacccatttct

SEQ ID NO: 56954 - RNA, 20 nt, synthetic construct
  source 1..20: mol_type = other RNA
ttagaacaattttgaatgtg

SEQ ID NO: 56955 - RNA, 20 nt, synthetic construct
  source 1..20: mol_type = other RNA
ttagaacatataatccaact

SEQ ID NO: 56956 - RNA, 20 nt, synthetic construct
  source 1..20: mol_type = other RNA
ttagaacatctggcagcagg

SEQ ID NO: 56957 - RNA, 20 nt, synthetic construct
  source 1..20: mol_type = other RNA
ttagaactagaactgtgtta

SEQ ID NO: 56958 - RNA, 20 nt, synthetic construct
  source 1..20: mol_type = other RNA
ttagaagaagacttaggaga

SEQ ID NO: 56959 - RNA, 20 nt, synthetic construct
  source 1..20: mol_type = other RNA
ttagaagaatgattatttgc

SEQ ID NO: 56960 - RNA, 20 nt, synthetic construct
  source 1..20: mol_type = other RNA
ttagaagacaatactgttat

SEQ ID NO: 56961 - RNA, 20 nt, synthetic construct
  source 1..20: mol_type = other RNA
ttagaaggattgttcatgtc

SEQ ID NO: 56962 - RNA, 20 nt, synthetic construct
  source 1..20: mol_type = other RNA
ttagaaggtaagaatgtcaa

SEQ ID NO: 56963 - RNA, 20 nt, synthetic construct
  source 1..20: mol_type = other RNA
ttagaagtatcccagatggg

SEQ ID NO: 56964 - RNA, 20 nt, synthetic construct
  source 1..20: mol_type = other RNA
ttagaatataaactcttcct

SEQ ID NO: 56965 - RNA, 20 nt, synthetic construct
  source 1..20: mol_type = other RNA
ttagaatcatccggggagct

SEQ ID NO: 56966 - RNA, 20 nt, synthetic construct
  source 1..20: mol_type = other RNA
ttagaattacaggcatgagt

SEQ ID NO: 56967 - RNA, 20 nt, synthetic construct
  source 1..20: mol_type = other RNA
ttagaattcaggacagtcat

SEQ ID NO: 56968 - RNA, 20 nt, synthetic construct
  source 1..20: mol_type = other RNA
ttagaattcaggacagttat

SEQ ID NO: 56969 - RNA, 20 nt, synthetic construct
  source 1..20: mol_type = other RNA
ttagaattctctctcaactg

SEQ ID NO: 56970 - RNA, 20 nt, synthetic construct
  source 1..20: mol_type = other RNA
ttagaattttgcttttgctt

SEQ ID NO: 56971 - RNA, 20 nt, synthetic construct
  source 1..20: mol_type = other RNA
ttagacactaactttctatt

SEQ ID NO: 56972 - RNA, 20 nt, synthetic construct
  source 1..20: mol_type = other RNA
ttagacatgggctaaataaa

SEQ ID NO: 56973 - RNA, 20 nt, synthetic construct
  source 1..20: mol_type = other RNA
ttagacctcctagattgacc

SEQ ID NO: 56974 - RNA, 20 nt, synthetic construct
  source 1..20: mol_type = other RNA
ttagactgcacataaaagga

SEQ ID NO: 56975 - RNA, 20 nt, synthetic construct
  source 1..20: mol_type = other RNA
ttagagaagaatgagaaaca

SEQ ID NO: 56976 - RNA, 20 nt, synthetic construct
  source 1..20: mol_type = other RNA
ttagagagatgcctgtgctt

SEQ ID NO: 56977 - RNA, 20 nt, synthetic construct
  source 1..20: mol_type = other RNA
ttagagccccaagaaagcag

SEQ ID NO: 56978 - RNA, 20 nt, synthetic construct
  source 1..20: mol_type = other RNA
ttagagcttttattttactc

SEQ ID NO: 56979 - RNA, 20 nt, synthetic construct
  source 1..20: mol_type = other RNA
ttagaggctgcaccctcctc

SEQ ID NO: 56980 - RNA, 20 nt, synthetic construct
  source 1..20: mol_type = other RNA
ttagagggatgaatgttgta

SEQ ID NO: 56981 - RNA, 20 nt, synthetic construct
  source 1..20: mol_type = other RNA
ttagagggcttcatgctggg

SEQ ID NO: 56982 - RNA, 20 nt, synthetic construct
  source 1..20: mol_type = other RNA
ttagagtaactgtcatcagc

SEQ ID NO: 56983 - RNA, 20 nt, synthetic construct
  source 1..20: mol_type = other RNA
ttagagtaagcaactgcatc

SEQ ID NO: 56984 - RNA, 20 nt, synthetic construct
  source 1..20: mol_type = other RNA
ttagagtcagttgtttactt

SEQ ID NO: 56985 - RNA, 20 nt, synthetic construct
  source 1..20: mol_type = other RNA
ttagagtgaaaagaaacaag

SEQ ID NO: 56986 - RNA, 20 nt, synthetic construct
  source 1..20: mol_type = other RNA
ttagagttgtaacacatatt

SEQ ID NO: 56987 - RNA, 20 nt, synthetic construct
  source 1..20: mol_type = other RNA
ttagagtttgcattacatga

SEQ ID NO: 56988 - RNA, 20 nt, synthetic construct
  source 1..20: mol_type = other RNA
ttagataggatgggcagact

SEQ ID NO: 56989 - RNA, 20 nt, synthetic construct
  source 1..20: mol_type = other RNA
ttagatagtggtttgaagct

SEQ ID NO: 56990 - RNA, 20 nt, synthetic construct
  source 1..20: mol_type = other RNA
ttagatatcccatataaggg

SEQ ID NO: 56991 - RNA, 20 nt, synthetic construct
  source 1..20: mol_type = other RNA
ttagatatgtgatttgtaga

SEQ ID NO: 56992 - RNA, 20 nt, synthetic construct
  source 1..20: mol_type = other RNA
ttagatcaagtcctttccag

SEQ ID NO: 56993 - RNA, 20 nt, synthetic construct
  source 1..20: mol_type = other RNA
ttagatctgggataatgcta

SEQ ID NO: 56994 - RNA, 20 nt, synthetic construct
  source 1..20: mol_type = other RNA
ttagatgagagtggcctaaa

SEQ ID NO: 56995 - RNA, 20 nt, synthetic construct
  source 1..20: mol_type = other RNA
ttagatgagcccaggagttg

SEQ ID NO: 56996 - RNA, 20 nt, synthetic construct
  source 1..20: mol_type = other RNA
ttagatgatgttttgaacga

SEQ ID NO: 56997 - RNA, 20 nt, synthetic construct
  source 1..20: mol_type = other RNA
ttagatggcttaggatcacc

SEQ ID NO: 56998 - RNA, 20 nt, synthetic construct
  source 1..20: mol_type = other RNA
ttagatggtaaaacaaattc

SEQ ID NO: 56999 - RNA, 20 nt, synthetic construct
  source 1..20: mol_type = other RNA
ttagatggtgctgatttaaa

SEQ ID NO: 57000 - RNA, 20 nt, synthetic construct
  source 1..20: mol_type = other RNA
ttagattacaaaagaacagg

SEQ ID NO: 57001 - RNA, 20 nt, synthetic construct
  source 1..20: mol_type = other RNA
ttagattaggaaacagattg

SEQ ID NO: 57002 - RNA, 20 nt, synthetic construct
  source 1..20: mol_type = other RNA
ttagattatatggtctacca

SEQ ID NO: 57003 - RNA, 20 nt, synthetic construct
  source 1..20: mol_type = other RNA
ttagattgttttgttgctat

SEQ ID NO: 57004 - RNA, 20 nt, synthetic construct
  source 1..20: mol_type = other RNA
ttagatttatcaatagcagt

SEQ ID NO: 57005 - RNA, 20 nt, synthetic construct
  source 1..20: mol_type = other RNA
ttagatttatttttacccgt

SEQ ID NO: 57006 - RNA, 20 nt, synthetic construct
  source 1..20: mol_type = other RNA
ttagatttttcctttgccta

SEQ ID NO: 57007 - RNA, 20 nt, synthetic construct
  source 1..20: mol_type = other RNA
ttagcaaacatttatggaat

SEQ ID NO: 57008 - RNA, 20 nt, synthetic construct
  source 1..20: mol_type = other RNA
ttagcaaagaggcaaaactc

SEQ ID NO: 57009 - RNA, 20 nt, synthetic construct
  source 1..20: mol_type = other RNA
ttagcaagattactggatac

SEQ ID NO: 57010 - RNA, 20 nt, synthetic construct
  source 1..20: mol_type = other RNA
ttagcaatccaaggacagaa

SEQ ID NO: 57011 - RNA, 20 nt, synthetic construct
  source 1..20: mol_type = other RNA
ttagcaatgcgaatcatcta

SEQ ID NO: 57012 - RNA, 20 nt, synthetic construct
  source 1..20: mol_type = other RNA
ttagcacctttattaactag

SEQ ID NO: 57013 - RNA, 20 nt, synthetic construct
  source 1..20: mol_type = other RNA
ttagcaggactggactcctt

SEQ ID NO: 57014 - RNA, 20 nt, synthetic construct
  source 1..20: mol_type = other RNA
ttagcagttctgtaccctta

SEQ ID NO: 57015 - RNA, 20 nt, synthetic construct
  source 1..20: mol_type = other RNA
ttagcatcaccatcatcatc

SEQ ID NO: 57016 - RNA, 20 nt, synthetic construct
  source 1..20: mol_type = other RNA
ttagcatctagcacagaacc

SEQ ID NO: 57017 - RNA, 20 nt, synthetic construct
  source 1..20: mol_type = other RNA
ttagcatgcctgacaaagta

SEQ ID NO: 57018 - RNA, 20 nt, synthetic construct
  source 1..20: mol_type = other RNA
ttagcatgttgctttgcgaa

SEQ ID NO: 57019 - RNA, 20 nt, synthetic construct
  source 1..20: mol_type = other RNA
ttagccaacaaccataatga

SEQ ID NO: 57020 - RNA, 20 nt, synthetic construct
  source 1..20: mol_type = other RNA
ttagccaagcatggtggtag

SEQ ID NO: 57021 - RNA, 20 nt, synthetic construct
  source 1..20: mol_type = other RNA
ttagccacagcgttgttcag

SEQ ID NO: 57022 - RNA, 20 nt, synthetic construct
  source 1..20: mol_type = other RNA
ttagccactctgaattctct

SEQ ID NO: 57023 - RNA, 20 nt, synthetic construct
  source 1..20: mol_type = other RNA
ttagccaggcgtggtggcgg

SEQ ID NO: 57024 - RNA, 20 nt, synthetic construct
  source 1..20: mol_type = other RNA
ttagcccaagctaccattta

SEQ ID NO: 57025 - RNA, 20 nt, synthetic construct
  source 1..20: mol_type = other RNA
ttagcccacttgttgatggg

SEQ ID NO: 57026 - RNA, 20 nt, synthetic construct
  source 1..20: mol_type = other RNA
ttagcccatgtctaaagtat

SEQ ID NO: 57027 - RNA, 20 nt, synthetic construct
  source 1..20: mol_type = other RNA
ttagccccctgaatacccct

SEQ ID NO: 57028 - RNA, 20 nt, synthetic construct
  source 1..20: mol_type = other RNA
ttagcccctgctgccagatg

SEQ ID NO: 57029 - RNA, 20 nt, synthetic construct
  source 1..20: mol_type = other RNA
ttagccgggaggagccaagt

SEQ ID NO: 57030 - RNA, 20 nt, synthetic construct
  source 1..20: mol_type = other RNA
ttagccgggtgtagtggtgt

SEQ ID NO: 57031 - RNA, 20 nt, synthetic construct
  source 1..20: mol_type = other RNA
ttagcctagacctcaaatta

SEQ ID NO: 57032 - RNA, 20 nt, synthetic construct
  source 1..20: mol_type = other RNA
ttagccttccagagacaaag

SEQ ID NO: 57033 - RNA, 20 nt, synthetic construct
  source 1..20: mol_type = other RNA
ttagccttgccattctccca

SEQ ID NO: 57034 - RNA, 20 nt, synthetic construct
  source 1..20: mol_type = other RNA
ttagccttggtaaaatcact

SEQ ID NO: 57035 - RNA, 20 nt, synthetic construct
  source 1..20: mol_type = other RNA
ttagccttttacaccctagg

SEQ ID NO: 57036 - RNA, 20 nt, synthetic construct
  source 1..20: mol_type = other RNA
ttagcgaaagggattctggc

SEQ ID NO: 57037 - RNA, 20 nt, synthetic construct
  source 1..20: mol_type = other RNA
ttagcgctgatgtgttgacc

SEQ ID NO: 57038 - RNA, 20 nt, synthetic construct
  source 1..20: mol_type = other RNA
ttagcgctggaggtcgggct

SEQ ID NO: 57039 - RNA, 20 nt, synthetic construct
  source 1..20: mol_type = other RNA
ttagcggaatgactatagaa

SEQ ID NO: 57040 - RNA, 20 nt, synthetic construct
  source 1..20: mol_type = other RNA
ttagcgttcatccaaattat

SEQ ID NO: 57041 - RNA, 20 nt, synthetic construct
  source 1..20: mol_type = other RNA
ttagctaagtatgcagaaac

SEQ ID NO: 57042 - RNA, 20 nt, synthetic construct
  source 1..20: mol_type = other RNA
ttagctaatttcagagagac

SEQ ID NO: 57043 - RNA, 20 nt, synthetic construct
  source 1..20: mol_type = other RNA
ttagctacaaaagggaaaac

SEQ ID NO: 57044 - RNA, 20 nt, synthetic construct
  source 1..20: mol_type = other RNA
ttagctatattcacttttgg

SEQ ID NO: 57045 - RNA, 20 nt, synthetic construct
  source 1..20: mol_type = other RNA
ttagctctcatgtcagagac

SEQ ID NO: 57046 - RNA, 20 nt, synthetic construct
  source 1..20: mol_type = other RNA
ttagctcttcccttaacctt

SEQ ID NO: 57047 - RNA, 20 nt, synthetic construct
  source 1..20: mol_type = other RNA
ttagctgactttcatttgta

SEQ ID NO: 57048 - RNA, 20 nt, synthetic construct
  source 1..20: mol_type = other RNA
ttagctgcctcttcctgttg

SEQ ID NO: 57049 - RNA, 20 nt, synthetic construct
  source 1..20: mol_type = other RNA
ttagctggatgtggtgtggc

SEQ ID NO: 57050 - RNA, 20 nt, synthetic construct
  source 1..20: mol_type = other RNA
ttagctggcaaaatggagac

SEQ ID NO: 57051 - RNA, 20 nt, synthetic construct
  source 1..20: mol_type = other RNA
ttagctgggcgagatggcgt

SEQ ID NO: 57052 - RNA, 20 nt, synthetic construct
  source 1..20: mol_type = other RNA
ttagctggggcagcaaagca

SEQ ID NO: 57053 - RNA, 20 nt, synthetic construct
  source 1..20: mol_type = other RNA
ttagctgtctggattgattc

SEQ ID NO: 57054 - RNA, 20 nt, synthetic construct
  source 1..20: mol_type = other RNA
ttagcttagaagaagactta

SEQ ID NO: 57055 - RNA, 20 nt, synthetic construct
  source 1..20: mol_type = other RNA
ttagcttattctttttctag

SEQ ID NO: 57056 - RNA, 20 nt, synthetic construct
  source 1..20: mol_type = other RNA
ttagcttcatataagtggaa

SEQ ID NO: 57057 - RNA, 20 nt, synthetic construct
  source 1..20: mol_type = other RNA
ttagcttcctcaggatctac

SEQ ID NO: 57058 - RNA, 20 nt, synthetic construct
  source 1..20: mol_type = other RNA
ttagcttctgaattgagatg

SEQ ID NO: 57059 - RNA, 20 nt, synthetic construct
  source 1..20: mol_type = other RNA
ttagcttgctagtagcagaa

SEQ ID NO: 57060 - RNA, 20 nt, synthetic construct
  source 1..20: mol_type = other RNA
ttagctttctcccagctgtc

SEQ ID NO: 57061 - RNA, 20 nt, synthetic construct
  source 1..20: mol_type = other RNA
ttagcttttacgaggacaga

SEQ ID NO: 57062 - RNA, 20 nt, synthetic construct
  source 1..20: mol_type = other RNA
ttaggaaaatacatgaggcc

SEQ ID NO: 57063 - RNA, 20 nt, synthetic construct
  source 1..20: mol_type = other RNA
ttaggaaaatagagttccat

SEQ ID NO: 57064 - RNA, 20 nt, synthetic construct
  source 1..20: mol_type = other RNA
ttaggaaacagattgattta

SEQ ID NO: 57065 - RNA, 20 nt, synthetic construct
  source 1..20: mol_type = other RNA
ttaggaagcacattccttcc

SEQ ID NO: 57066 - RNA, 20 nt, synthetic construct
  source 1..20: mol_type = other RNA
ttaggaagccactgcattca

SEQ ID NO: 57067 - RNA, 20 nt, synthetic construct
  source 1..20: mol_type = other RNA
ttaggaagctatggagcact

SEQ ID NO: 57068 - RNA, 20 nt, synthetic construct
  source 1..20: mol_type = other RNA
ttaggaagcttccttgatca

SEQ ID NO: 57069 - RNA, 20 nt, synthetic construct
  source 1..20: mol_type = other RNA
ttaggaatttacatttccat

SEQ ID NO: 57070 - RNA, 20 nt, synthetic construct
  source 1..20: mol_type = other RNA
ttaggacaaggaaaggatgg

SEQ ID NO: 57071 - RNA, 20 nt, synthetic construct
  source 1..20: mol_type = other RNA
ttaggagaaaagcttcataa

SEQ ID NO: 57072 - RNA, 20 nt, synthetic construct
  source 1..20: mol_type = other RNA
ttaggaggctattaactttg

SEQ ID NO: 57073 - RNA, 20 nt, synthetic construct
  source 1..20: mol_type = other RNA
ttaggagtcaactaatcaaa

SEQ ID NO: 57074 - RNA, 20 nt, synthetic construct
  source 1..20: mol_type = other RNA
ttaggatagctattatttga

SEQ ID NO: 57075 - RNA, 20 nt, synthetic construct
  source 1..20: mol_type = other RNA
ttaggatataagagtgggca

SEQ ID NO: 57076 - RNA, 20 nt, synthetic construct
  source 1..20: mol_type = other RNA
ttaggatcaccaaagacttc

SEQ ID NO: 57077 - RNA, 20 nt, synthetic construct
  source 1..20: mol_type = other RNA
ttaggatcccagtcctttgg

SEQ ID NO: 57078 - RNA, 20 nt, synthetic construct
  source 1..20: mol_type = other RNA
ttaggatgtgtacccgtgtg

SEQ ID NO: 57079 - RNA, 20 nt, synthetic construct
  source 1..20: mol_type = other RNA
ttaggcaaaggaaaaatcta

SEQ ID NO: 57080 - RNA, 20 nt, synthetic construct
  source 1..20: mol_type = other RNA
ttaggcaatccttccgcctc

SEQ ID NO: 57081 - RNA, 20 nt, synthetic construct
  source 1..20: mol_type = other RNA
ttaggcagaaccacctgggg

SEQ ID NO: 57082 - RNA, 20 nt, synthetic construct
  source 1..20: mol_type = other RNA
ttaggcagttattaagagtg

SEQ ID NO: 57083 - RNA, 20 nt, synthetic construct
  source 1..20: mol_type = other RNA
ttaggccactctcatctaaa

SEQ ID NO: 57084 - RNA, 20 nt, synthetic construct
  source 1..20: mol_type = other RNA
ttaggccataaatcaaggta

SEQ ID NO: 57085 - RNA, 20 nt, synthetic construct
  source 1..20: mol_type = other RNA
ttaggccctctataattctg

SEQ ID NO: 57086 - RNA, 20 nt, synthetic construct
  source 1..20: mol_type = other RNA
ttaggctctgggtcagaatc

SEQ ID NO: 57087 - RNA, 20 nt, synthetic construct
  source 1..20: mol_type = other RNA
ttaggctctgtggtttcttg

SEQ ID NO: 57088 - RNA, 20 nt, synthetic construct
  source 1..20: mol_type = other RNA
ttaggctgaagcaggctttt

SEQ ID NO: 57089 - RNA, 20 nt, synthetic construct
  source 1..20: mol_type = other RNA
ttaggctgtctccaacgctt

SEQ ID NO: 57090 - RNA, 20 nt, synthetic construct
  source 1..20: mol_type = other RNA
ttaggctgttattagagttg

SEQ ID NO: 57091 - RNA, 20 nt, synthetic construct
  source 1..20: mol_type = other RNA
ttaggctgttcaatttagaa

SEQ ID NO: 57092 - RNA, 20 nt, synthetic construct
  source 1..20: mol_type = other RNA
ttaggctgtttgagatcttt

SEQ ID NO: 57093 - RNA, 20 nt, synthetic construct
  source 1..20: mol_type = other RNA
ttagggaagatagtactgac

SEQ ID NO: 57094 - RNA, 20 nt, synthetic construct
  source 1..20: mol_type = other RNA
ttagggacgaatgcatggga

SEQ ID NO: 57095 - RNA, 20 nt, synthetic construct
  source 1..20: mol_type = other RNA
ttagggacttatggagataa

SEQ ID NO: 57096 - RNA, 20 nt, synthetic construct
  source 1..20: mol_type = other RNA
ttagggagactttcactgct

SEQ ID NO: 57097 - RNA, 20 nt, synthetic construct
  source 1..20: mol_type = other RNA
ttagggagcatatatactct

SEQ ID NO: 57098 - RNA, 20 nt, synthetic construct
  source 1..20: mol_type = other RNA
ttagggcctagaaatcatac

SEQ ID NO: 57099 - RNA, 20 nt, synthetic construct
  source 1..20: mol_type = other RNA
ttaggggggaaaacaccctt

SEQ ID NO: 57100 - RNA, 20 nt, synthetic construct
  source 1..20: mol_type = other RNA
ttagggtaatgctggcttca

SEQ ID NO: 57101 - RNA, 20 nt, synthetic construct
  source 1..20: mol_type = other RNA
ttaggtaagaaaaattccct

SEQ ID NO: 57102 - RNA, 20 nt, synthetic construct
  source 1..20: mol_type = other RNA
ttaggtagggataagaatac

SEQ ID NO: 57103 - RNA, 20 nt, synthetic construct
  source 1..20: mol_type = other RNA
ttaggtagtcttgtcataac

SEQ ID NO: 57104 - RNA, 20 nt, synthetic construct
  source 1..20: mol_type = other RNA
ttaggtattattttcacaga

SEQ ID NO: 57105 - RNA, 20 nt, synthetic construct
  source 1..20: mol_type = other RNA
ttaggtcagaatacaaaaat

SEQ ID NO: 57106 - RNA, 20 nt, synthetic construct
  source 1..20: mol_type = other RNA
ttaggtcagattcctttttt

SEQ ID NO: 57107 - RNA, 20 nt, synthetic construct
  source 1..20: mol_type = other RNA
ttaggtcatttttcacttct

SEQ ID NO: 57108 - RNA, 20 nt, synthetic construct
  source 1..20: mol_type = other RNA
ttaggtgcacacaacactca

SEQ ID NO: 57109 - RNA, 20 nt, synthetic construct
  source 1..20: mol_type = other RNA
ttaggtgccccactccacac

SEQ ID NO: 57110 - RNA, 20 nt, synthetic construct
  source 1..20: mol_type = other RNA
ttaggtgctggcttcaatat

SEQ ID NO: 57111 - RNA, 20 nt, synthetic construct
  source 1..20: mol_type = other RNA
ttaggtggtttgaaccccag

SEQ ID NO: 57112 - RNA, 20 nt, synthetic construct
  source 1..20: mol_type = other RNA
ttaggtgttttttccttctt

SEQ ID NO: 57113 - RNA, 20 nt, synthetic construct
  source 1..20: mol_type = other RNA
ttaggttacgtactaggtat

SEQ ID NO: 57114 - RNA, 20 nt, synthetic construct
  source 1..20: mol_type = other RNA
ttaggttgaaagttcagaat

SEQ ID NO: 57115 - RNA, 20 nt, synthetic construct
  source 1..20: mol_type = other RNA
ttaggttgatggctgtacta

SEQ ID NO: 57116 - RNA, 20 nt, synthetic construct
  source 1..20: mol_type = other RNA
ttaggtttctcatttttcag

SEQ ID NO: 57117 - RNA, 20 nt, synthetic construct
  source 1..20: mol_type = other RNA
ttaggtttttcttgtgggta

SEQ ID NO: 57118 - RNA, 20 nt, synthetic construct
  source 1..20: mol_type = other RNA
ttagtaaatatccgaaagaa

SEQ ID NO: 57119 - RNA, 20 nt, synthetic construct
  source 1..20: mol_type = other RNA
ttagtaaatctttggtgaag

SEQ ID NO: 57120 - RNA, 20 nt, synthetic construct
  source 1..20: mol_type = other RNA
ttagtaagaggtatcaccat

SEQ ID NO: 57121 - RNA, 20 nt, synthetic construct
  source 1..20: mol_type = other RNA
ttagtaagggtaaacagaat

SEQ ID NO: 57122 - RNA, 20 nt, synthetic construct
  source 1..20: mol_type = other RNA
ttagtaagtgtgagcaaaaa

SEQ ID NO: 57123 - RNA, 20 nt, synthetic construct
  source 1..20: mol_type = other RNA
ttagtaattctccactttca

SEQ ID NO: 57124 - RNA, 20 nt, synthetic construct
  source 1..20: mol_type = other RNA
ttagtacagccatcaaccta

SEQ ID NO: 57125 - RNA, 20 nt, synthetic construct
  source 1..20: mol_type = other RNA
ttagtagaattctccagtga

SEQ ID NO: 57126 - RNA, 20 nt, synthetic construct
  source 1..20: mol_type = other RNA
ttagtagagatgaggtttta

SEQ ID NO: 57127 - RNA, 20 nt, synthetic construct
  source 1..20: mol_type = other RNA
ttagtagctgtctttaatgt

SEQ ID NO: 57128 - RNA, 20 nt, synthetic construct
  source 1..20: mol_type = other RNA
ttagtaggaaaaccatgtca

SEQ ID NO: 57129 - RNA, 20 nt, synthetic construct
  source 1..20: mol_type = other RNA
ttagtaggtctccttgtatg

SEQ ID NO: 57130 - RNA, 20 nt, synthetic construct
  source 1..20: mol_type = other RNA
ttagtagtaagttgtgtcat

SEQ ID NO: 57131 - RNA, 20 nt, synthetic construct
  source 1..20: mol_type = other RNA
ttagtagttaggtggtttga

SEQ ID NO: 57132 - RNA, 20 nt, synthetic construct
  source 1..20: mol_type = other RNA
ttagtatacatgtttagcaa

SEQ ID NO: 57133 - RNA, 20 nt, synthetic construct
  source 1..20: mol_type = other RNA
ttagtatattttcaaggctt

SEQ ID NO: 57134 - RNA, 20 nt, synthetic construct
  source 1..20: mol_type = other RNA
ttagtcatagcagtgggaag

SEQ ID NO: 57135 - RNA, 20 nt, synthetic construct
  source 1..20: mol_type = other RNA
ttagtcccctagtggatgct

SEQ ID NO: 57136 - RNA, 20 nt, synthetic construct
  source 1..20: mol_type = other RNA
ttagtctgacttctctcaga

SEQ ID NO: 57137 - RNA, 20 nt, synthetic construct
  source 1..20: mol_type = other RNA
ttagtctgtagcttcacgtg

SEQ ID NO: 57138 - RNA, 20 nt, synthetic construct
  source 1..20: mol_type = other RNA
ttagtcttctcagatctgtt

SEQ ID NO: 57139 - RNA, 20 nt, synthetic construct
  source 1..20: mol_type = other RNA
ttagtcttgtcttttctttt

SEQ ID NO: 57140 - RNA, 20 nt, synthetic construct
  source 1..20: mol_type = other RNA
ttagtgaaatagttggtcag

SEQ ID NO: 57141 - RNA, 20 nt, synthetic construct
  source 1..20: mol_type = other RNA
ttagtgaagcagagagagaa

SEQ ID NO: 57142 - RNA, 20 nt, synthetic construct
  source 1..20: mol_type = other RNA
ttagtgaattcacagtagaa

SEQ ID NO: 57143 - RNA, 20 nt, synthetic construct
  source 1..20: mol_type = other RNA
ttagtgactggcttaatgca

SEQ ID NO: 57144 - RNA, 20 nt, synthetic construct
  source 1..20: mol_type = other RNA
ttagtgagggaggccatctt

SEQ ID NO: 57145 - RNA, 20 nt, synthetic construct
  source 1..20: mol_type = other RNA
ttagtgatgtcttttgaaga

SEQ ID NO: 57146 - RNA, 20 nt, synthetic construct
  source 1..20: mol_type = other RNA
ttagtgattttaccaaggct

SEQ ID NO: 57147 - RNA, 20 nt, synthetic construct
  source 1..20: mol_type = other RNA
ttagtgcagtatcttgaaga

SEQ ID NO: 57148 - RNA, 20 nt, synthetic construct
  source 1..20: mol_type = other RNA
ttagtgccttcagaaggagt

SEQ ID NO: 57149 - RNA, 20 nt, synthetic construct
  source 1..20: mol_type = other RNA
ttagtggaaaaactgcagca

SEQ ID NO: 57150 - RNA, 20 nt, synthetic construct
  source 1..20: mol_type = other RNA
ttagtggctcacagtgctcc

SEQ ID NO: 57151 - RNA, 20 nt, synthetic construct
  source 1..20: mol_type = other RNA
ttagtggtggtagtaaggat

SEQ ID NO: 57152 - RNA, 20 nt, synthetic construct
  source 1..20: mol_type = other RNA
ttagtggttgacccataaac

SEQ ID NO: 57153 - RNA, 20 nt, synthetic construct
  source 1..20: mol_type = other RNA
ttagtgtattgtaccttgat

SEQ ID NO: 57154 - RNA, 20 nt, synthetic construct
  source 1..20: mol_type = other RNA
ttagtgtctaatgggtacag

SEQ ID NO: 57155 - RNA, 20 nt, synthetic construct
  source 1..20: mol_type = other RNA
ttagtgttaattcttcctta

SEQ ID NO: 57156 - RNA, 20 nt, synthetic construct
  source 1..20: mol_type = other RNA
ttagtgttcccttcttaaat

SEQ ID NO: 57157 - RNA, 20 nt, synthetic construct
  source 1..20: mol_type = other RNA
ttagtgttctgtgtttatga

SEQ ID NO: 57158 - RNA, 20 nt, synthetic construct
  source 1..20: mol_type = other RNA
ttagtgttgcttggtgttga

SEQ ID NO: 57159 - RNA, 20 nt, synthetic construct
  source 1..20: mol_type = other RNA
ttagttaaccttctggggtt

SEQ ID NO: 57160 - RNA, 20 nt, synthetic construct
  source 1..20: mol_type = other RNA
ttagttacatgaggtcaccc

SEQ ID NO: 57161 - RNA, 20 nt, synthetic construct
  source 1..20: mol_type = other RNA
ttagttactcaaatccaaat

SEQ ID NO: 57162 - RNA, 20 nt, synthetic construct
  source 1..20: mol_type = other RNA
ttagttatctcttagacctc

SEQ ID NO: 57163 - RNA, 20 nt, synthetic construct
  source 1..20: mol_type = other RNA
ttagttattaaatgagacac

SEQ ID NO: 57164 - RNA, 20 nt, synthetic construct
  source 1..20: mol_type = other RNA
ttagttcaagatgcatacca

SEQ ID NO: 57165 - RNA, 20 nt, synthetic construct
  source 1..20: mol_type = other RNA
ttagttccattattccataa

SEQ ID NO: 57166 - RNA, 20 nt, synthetic construct
  source 1..20: mol_type = other RNA
ttagttcctccttttgtaga

SEQ ID NO: 57167 - RNA, 20 nt, synthetic construct
  source 1..20: mol_type = other RNA
ttagttccttttaagggaaa

SEQ ID NO: 57168 - RNA, 20 nt, synthetic construct
  source 1..20: mol_type = other RNA
ttagttctgcttccacattt

SEQ ID NO: 57169 - RNA, 20 nt, synthetic construct
  source 1..20: mol_type = other RNA
ttagttgactcctaaaacat

SEQ ID NO: 57170 - RNA, 20 nt, synthetic construct
  source 1..20: mol_type = other RNA
ttagttgtacttgacacaaa

SEQ ID NO: 57171 - RNA, 20 nt, synthetic construct
  source 1..20: mol_type = other RNA
ttagtttacactatggcttt

SEQ ID NO: 57172 - RNA, 20 nt, synthetic construct
  source 1..20: mol_type = other RNA
ttagtttcatctatgtcccc

SEQ ID NO: 57173 - RNA, 20 nt, synthetic construct
  source 1..20: mol_type = other RNA
ttagtttgcaatacagttaa

SEQ ID NO: 57174 - RNA, 20 nt, synthetic construct
  source 1..20: mol_type = other RNA
ttagtttgttgacccaatca

SEQ ID NO: 57175 - RNA, 20 nt, synthetic construct
  source 1..20: mol_type = other RNA
ttagttttcacttttgtgca

SEQ ID NO: 57176 - RNA, 20 nt, synthetic construct
  source 1..20: mol_type = other RNA
ttataaaaatggcacatact

SEQ ID NO: 57177 - RNA, 20 nt, synthetic construct
  source 1..20: mol_type = other RNA
ttataaaataggaagtccat

SEQ ID NO: 57178 - RNA, 20 nt, synthetic construct
  source 1..20: mol_type = other RNA
ttataaatggcatctttaag

SEQ ID NO: 57179 - RNA, 20 nt, synthetic construct
  source 1..20: mol_type = other RNA
ttataacaagaaaatctgac

SEQ ID NO: 57180 - RNA, 20 nt, synthetic construct
  source 1..20: mol_type = other RNA
ttataacataaaagcgtact

SEQ ID NO: 57181 - RNA, 20 nt, synthetic construct
  source 1..20: mol_type = other RNA
ttataaccttgaacttccag

SEQ ID NO: 57182 - RNA, 20 nt, synthetic construct
  source 1..20: mol_type = other RNA
ttataactgaacatgtatgt

SEQ ID NO: 57183 - RNA, 20 nt, synthetic construct
  source 1..20: mol_type = other RNA
ttataagcaaagatatgggt

SEQ ID NO: 57184 - RNA, 20 nt, synthetic construct
  source 1..20: mol_type = other RNA
ttataagcttcctctggctg

SEQ ID NO: 57185 - RNA, 20 nt, synthetic construct
  source 1..20: mol_type = other RNA
ttataagggtgataaaaagg

SEQ ID NO: 57186 - RNA, 20 nt, synthetic construct
  source 1..20: mol_type = other RNA
ttataagttgggagtctatt

SEQ ID NO: 57187 - RNA, 20 nt, synthetic construct
  source 1..20: mol_type = other RNA
ttataatcagccgtgattgc

SEQ ID NO: 57188 - RNA, 20 nt, synthetic construct
  source 1..20: mol_type = other RNA
ttataatccattgggtacat

SEQ ID NO: 57189 - RNA, 20 nt, synthetic construct
  source 1..20: mol_type = other RNA
ttataatgagatagaccaga

SEQ ID NO: 57190 - RNA, 20 nt, synthetic construct
  source 1..20: mol_type = other RNA
ttataatgggcaatcagaaa

SEQ ID NO: 57191 - RNA, 20 nt, synthetic construct
  source 1..20: mol_type = other RNA
ttataattttttgagacgga

SEQ ID NO: 57192 - RNA, 20 nt, synthetic construct
  source 1..20: mol_type = other RNA
ttatacaaataactccagct

SEQ ID NO: 57193 - RNA, 20 nt, synthetic construct
  source 1..20: mol_type = other RNA
ttatacacacataaggggga

SEQ ID NO: 57194 - RNA, 20 nt, synthetic construct
  source 1..20: mol_type = other RNA
ttatacagcaaatctctaga

SEQ ID NO: 57195 - RNA, 20 nt, synthetic construct
  source 1..20: mol_type = other RNA
ttatacaggtgcttacagac

SEQ ID NO: 57196 - RNA, 20 nt, synthetic construct
  source 1..20: mol_type = other RNA
ttatacagttggaactcttg

SEQ ID NO: 57197 - RNA, 20 nt, synthetic construct
  source 1..20: mol_type = other RNA
ttatacccaagtaaacaact

SEQ ID NO: 57198 - RNA, 20 nt, synthetic construct
  source 1..20: mol_type = other RNA
ttatacctgttgaatagcaa

SEQ ID NO: 57199 - RNA, 20 nt, synthetic construct
  source 1..20: mol_type = other RNA
ttatactagtagaaagcagg

SEQ ID NO: 57200 - RNA, 20 nt, synthetic construct
  source 1..20: mol_type = other RNA
ttatagagggcctaaataaa

SEQ ID NO: 57201 - RNA, 20 nt, synthetic construct
  source 1..20: mol_type = other RNA
ttatagatgacgaaagtgaa

SEQ ID NO: 57202 - RNA, 20 nt, synthetic construct
  source 1..20: mol_type = other RNA
ttatagcatttgaaaacatg

SEQ ID NO: 57203 - RNA, 20 nt, synthetic construct
  source 1..20: mol_type = other RNA
ttatagccataagagtcccc

SEQ ID NO: 57204 - RNA, 20 nt, synthetic construct
  source 1..20: mol_type = other RNA
ttatagctccaaaagcgaaa

SEQ ID NO: 57205 - RNA, 20 nt, synthetic construct
  source 1..20: mol_type = other RNA
ttataggcaatttagaattc

SEQ ID NO: 57206 - RNA, 20 nt, synthetic construct
  source 1..20: mol_type = other RNA
ttataggcattccttaattt

SEQ ID NO: 57207 - RNA, 20 nt, synthetic construct
  source 1..20: mol_type = other RNA
ttataggttgaatagggcct

SEQ ID NO: 57208 - RNA, 20 nt, synthetic construct
  source 1..20: mol_type = other RNA
ttatagtattacctcccatg

SEQ ID NO: 57209 - RNA, 20 nt, synthetic construct
  source 1..20: mol_type = other RNA
ttatagtcttagctcttaag

SEQ ID NO: 57210 - RNA, 20 nt, synthetic construct
  source 1..20: mol_type = other RNA
ttatagtggtaaggagccaa

SEQ ID NO: 57211 - RNA, 20 nt, synthetic construct
  source 1..20: mol_type = other RNA
ttatagtgtttccttccaga

SEQ ID NO: 57212 - RNA, 20 nt, synthetic construct
  source 1..20: mol_type = other RNA
ttatataaatgctcagtggg

SEQ ID NO: 57213 - RNA, 20 nt, synthetic construct
  source 1..20: mol_type = other RNA
ttatatcatcttaagaacca

SEQ ID NO: 57214 - RNA, 20 nt, synthetic construct
  source 1..20: mol_type = other RNA
ttatatccagattgatatct

SEQ ID NO: 57215 - RNA, 20 nt, synthetic construct
  source 1..20: mol_type = other RNA
ttatatcctaaacacttagc

SEQ ID NO: 57216 - RNA, 20 nt, synthetic construct
  source 1..20: mol_type = other RNA
ttatatcctcagggtaggaa

SEQ ID NO: 57217 - RNA, 20 nt, synthetic construct
  source 1..20: mol_type = other RNA
ttatatgaataaaccacgca

SEQ ID NO: 57218 - RNA, 20 nt, synthetic construct
  source 1..20: mol_type = other RNA
ttatatgatactcgtagttt

SEQ ID NO: 57219 - RNA, 20 nt, synthetic construct
  source 1..20: mol_type = other RNA
ttatatgcattaagccagtc

SEQ ID NO: 57220 - RNA, 20 nt, synthetic construct
  source 1..20: mol_type = other RNA
ttatatgcctagatgattcg

SEQ ID NO: 57221 - RNA, 20 nt, synthetic construct
  source 1..20: mol_type = other RNA
ttatatgcctagatttcaat

SEQ ID NO: 57222 - RNA, 20 nt, synthetic construct
  source 1..20: mol_type = other RNA
ttatatgggatatctaacat

SEQ ID NO: 57223 - RNA, 20 nt, synthetic construct
  source 1..20: mol_type = other RNA
ttatatggtctaccatgttg

SEQ ID NO: 57224 - RNA, 20 nt, synthetic construct
  source 1..20: mol_type = other RNA
ttatatgttgatgtaatgga

SEQ ID NO: 57225 - RNA, 20 nt, synthetic construct
  source 1..20: mol_type = other RNA
ttatattaaaacccatgatc

SEQ ID NO: 57226 - RNA, 20 nt, synthetic construct
  source 1..20: mol_type = other RNA
ttatattaattctgaggcct

SEQ ID NO: 57227 - RNA, 20 nt, synthetic construct
  source 1..20: mol_type = other RNA
ttatattatgtgcaagttct

SEQ ID NO: 57228 - RNA, 20 nt, synthetic construct
  source 1..20: mol_type = other RNA
ttatattctaagtttgccaa

SEQ ID NO: 57229 - RNA, 20 nt, synthetic construct
  source 1..20: mol_type = other RNA
ttatatttactagatcaagc

SEQ ID NO: 57230 - RNA, 20 nt, synthetic construct
  source 1..20: mol_type = other RNA
ttatatttcacaacgatttc

SEQ ID NO: 57231 - RNA, 20 nt, synthetic construct
  source 1..20: mol_type = other RNA
ttatatttccgatgatacct

SEQ ID NO: 57232 - RNA, 20 nt, synthetic construct
  source 1..20: mol_type = other RNA
ttatatttccgtatccagtg

SEQ ID NO: 57233 - RNA, 20 nt, synthetic construct
  source 1..20: mol_type = other RNA
ttatattttaagttctaggg

SEQ ID NO: 57234 - RNA, 20 nt, synthetic construct
  source 1..20: mol_type = other RNA
ttatattttggtagagatgg

SEQ ID NO: 57235 - RNA, 20 nt, synthetic construct
  source 1..20: mol_type = other RNA
ttatcaaaatcaaggtgcgg

SEQ ID NO: 57236 - RNA, 20 nt, synthetic construct
  source 1..20: mol_type = other RNA
ttatcaacacatagtgttaa

SEQ ID NO: 57237 - RNA, 20 nt, synthetic construct
  source 1..20: mol_type = other RNA
ttatcaatagcagtgctgaa

SEQ ID NO: 57238 - RNA, 20 nt, synthetic construct
  source 1..20: mol_type = other RNA
ttatcaattagttcctcctt

SEQ ID NO: 57239 - RNA, 20 nt, synthetic construct
  source 1..20: mol_type = other RNA
ttatcacacctaggcctatt

SEQ ID NO: 57240 - RNA, 20 nt, synthetic construct
  source 1..20: mol_type = other RNA
ttatcaccatgtgcttatca

SEQ ID NO: 57241 - RNA, 20 nt, synthetic construct
  source 1..20: mol_type = other RNA
ttatcacccttataaaatga

SEQ ID NO: 57242 - RNA, 20 nt, synthetic construct
  source 1..20: mol_type = other RNA
ttatcagatcccaattactt

SEQ ID NO: 57243 - RNA, 20 nt, synthetic construct
  source 1..20: mol_type = other RNA
ttatcagatggtgatacctc

SEQ ID NO: 57244 - RNA, 20 nt, synthetic construct
  source 1..20: mol_type = other RNA
ttatcagcaccaaagattat

SEQ ID NO: 57245 - RNA, 20 nt, synthetic construct
  source 1..20: mol_type = other RNA
ttatcaggaaagtgccagcc

SEQ ID NO: 57246 - RNA, 20 nt, synthetic construct
  source 1..20: mol_type = other RNA
ttatcaggcttgagtctgtg

SEQ ID NO: 57247 - RNA, 20 nt, synthetic construct
  source 1..20: mol_type = other RNA
ttatcagggatattggctta

SEQ ID NO: 57248 - RNA, 20 nt, synthetic construct
  source 1..20: mol_type = other RNA
ttatcagtctccaatcctca

SEQ ID NO: 57249 - RNA, 20 nt, synthetic construct
  source 1..20: mol_type = other RNA
ttatcatgtcttcttggatt

SEQ ID NO: 57250 - RNA, 20 nt, synthetic construct
  source 1..20: mol_type = other RNA
ttatccaattttttggcata

SEQ ID NO: 57251 - RNA, 20 nt, synthetic construct
  source 1..20: mol_type = other RNA
ttatccattcatctctcgat

SEQ ID NO: 57252 - RNA, 20 nt, synthetic construct
  source 1..20: mol_type = other RNA
ttatcccagacagatatatg

SEQ ID NO: 57253 - RNA, 20 nt, synthetic construct
  source 1..20: mol_type = other RNA
ttatcccagatctaacaaac

SEQ ID NO: 57254 - RNA, 20 nt, synthetic construct
  source 1..20: mol_type = other RNA
ttatccctacctaaaaaggg

SEQ ID NO: 57255 - RNA, 20 nt, synthetic construct
  source 1..20: mol_type = other RNA
ttatccctttaaaatgatag

SEQ ID NO: 57256 - RNA, 20 nt, synthetic construct
  source 1..20: mol_type = other RNA
ttatccgataaagggtctgg

SEQ ID NO: 57257 - RNA, 20 nt, synthetic construct
  source 1..20: mol_type = other RNA
ttatcctatcagagcatgtc

SEQ ID NO: 57258 - RNA, 20 nt, synthetic construct
  source 1..20: mol_type = other RNA
ttatcctccaatgtttttaa

SEQ ID NO: 57259 - RNA, 20 nt, synthetic construct
  source 1..20: mol_type = other RNA
ttatcctcttctgaagaggc

SEQ ID NO: 57260 - RNA, 20 nt, synthetic construct
  source 1..20: mol_type = other RNA
ttatccttgcaccaactcca

SEQ ID NO: 57261 - RNA, 20 nt, synthetic construct
  source 1..20: mol_type = other RNA
ttatcggataaggaagagtt

SEQ ID NO: 57262 - RNA, 20 nt, synthetic construct
  source 1..20: mol_type = other RNA
ttatctacagaggattttgg

SEQ ID NO: 57263 - RNA, 20 nt, synthetic construct
  source 1..20: mol_type = other RNA
ttatctaggcgaaatatctc

SEQ ID NO: 57264 - RNA, 20 nt, synthetic construct
  source 1..20: mol_type = other RNA
ttatctccacatttctacac

SEQ ID NO: 57265 - RNA, 20 nt, synthetic construct
  source 1..20: mol_type = other RNA
ttatctccataagtccctaa

SEQ ID NO: 57266 - RNA, 20 nt, synthetic construct
  source 1..20: mol_type = other RNA
ttatctctctcaagcaatct

SEQ ID NO: 57267 - RNA, 20 nt, synthetic construct
  source 1..20: mol_type = other RNA
ttatctctgccctcattgaa

SEQ ID NO: 57268 - RNA, 20 nt, synthetic construct
  source 1..20: mol_type = other RNA
ttatctcttagacctcctag

SEQ ID NO: 57269 - RNA, 20 nt, synthetic construct
  source 1..20: mol_type = other RNA
ttatctgaacgtctttaaat

SEQ ID NO: 57270 - RNA, 20 nt, synthetic construct
  source 1..20: mol_type = other RNA
ttatctgctgtcggttttct

SEQ ID NO: 57271 - RNA, 20 nt, synthetic construct
  source 1..20: mol_type = other RNA
ttatctggatttttgtgtag

SEQ ID NO: 57272 - RNA, 20 nt, synthetic construct
  source 1..20: mol_type = other RNA
ttatctgggaacagccccta

SEQ ID NO: 57273 - RNA, 20 nt, synthetic construct
  source 1..20: mol_type = other RNA
ttatctgtgggttaaaagtt

SEQ ID NO: 57274 - RNA, 20 nt, synthetic construct
  source 1..20: mol_type = other RNA
ttatctgttttcttactgat

SEQ ID NO: 57275 - RNA, 20 nt, synthetic construct
  source 1..20: mol_type = other RNA
ttatcttaataacctcaaag

SEQ ID NO: 57276 - RNA, 20 nt, synthetic construct
  source 1..20: mol_type = other RNA
ttatcttctaccttttgtta

SEQ ID NO: 57277 - RNA, 20 nt, synthetic construct
  source 1..20: mol_type = other RNA
ttatctttggatatccccat

SEQ ID NO: 57278 - RNA, 20 nt, synthetic construct
  source 1..20: mol_type = other RNA
ttatcttttcaaaaacccaa

SEQ ID NO: 57279 - RNA, 20 nt, synthetic construct
  source 1..20: mol_type = other RNA
ttatgaaccattgtaaacca

SEQ ID NO: 57280 - RNA, 20 nt, synthetic construct
  source 1..20: mol_type = other RNA
ttatgaagcttttctcctaa

SEQ ID NO: 57281 - RNA, 20 nt, synthetic construct
  source 1..20: mol_type = other RNA
ttatgaatgatgccatcaca

SEQ ID NO: 57282 - RNA, 20 nt, synthetic construct
  source 1..20: mol_type = other RNA
ttatgacaagactacctaaa

SEQ ID NO: 57283 - RNA, 20 nt, synthetic construct
  source 1..20: mol_type = other RNA
ttatgactgagatacttaag

SEQ ID NO: 57284 - RNA, 20 nt, synthetic construct
  source 1..20: mol_type = other RNA
ttatgagacacacgagtatt

SEQ ID NO: 57285 - RNA, 20 nt, synthetic construct
  source 1..20: mol_type = other RNA
ttatgagcagttgtatgcca

SEQ ID NO: 57286 - RNA, 20 nt, synthetic construct
  source 1..20: mol_type = other RNA
ttatgagcattccccacata

SEQ ID NO: 57287 - RNA, 20 nt, synthetic construct
  source 1..20: mol_type = other RNA
ttatgaggttattcaaaaca

SEQ ID NO: 57288 - RNA, 20 nt, synthetic construct
  source 1..20: mol_type = other RNA
ttatgataaaaataacgggc

SEQ ID NO: 57289 - RNA, 20 nt, synthetic construct
  source 1..20: mol_type = other RNA
ttatgatcttgggaatactt

SEQ ID NO: 57290 - RNA, 20 nt, synthetic construct
  source 1..20: mol_type = other RNA
ttatgatttcacttacttga

SEQ ID NO: 57291 - RNA, 20 nt, synthetic construct
  source 1..20: mol_type = other RNA
ttatgcaagatggcaagttt

SEQ ID NO: 57292 - RNA, 20 nt, synthetic construct
  source 1..20: mol_type = other RNA
ttatgcaagatgtcaacatt

SEQ ID NO: 57293 - RNA, 20 nt, synthetic construct
  source 1..20: mol_type = other RNA
ttatgcatcttgcaaaacgg

SEQ ID NO: 57294 - RNA, 20 nt, synthetic construct
  source 1..20: mol_type = other RNA
ttatgcatttggtctcattc

SEQ ID NO: 57295 - RNA, 20 nt, synthetic construct
  source 1..20: mol_type = other RNA
ttatgccaatatcacactgt

SEQ ID NO: 57296 - RNA, 20 nt, synthetic construct
  source 1..20: mol_type = other RNA
ttatgccccctcttctctcc

SEQ ID NO: 57297 - RNA, 20 nt, synthetic construct
  source 1..20: mol_type = other RNA
ttatgctaacatgaactact

SEQ ID NO: 57298 - RNA, 20 nt, synthetic construct
  source 1..20: mol_type = other RNA
ttatgctattataaatggca

SEQ ID NO: 57299 - RNA, 20 nt, synthetic construct
  source 1..20: mol_type = other RNA
ttatgctgagtgaatggggt

SEQ ID NO: 57300 - RNA, 20 nt, synthetic construct
  source 1..20: mol_type = other RNA
ttatgctgatgaactacaca

SEQ ID NO: 57301 - RNA, 20 nt, synthetic construct
  source 1..20: mol_type = other RNA
ttatgctggtgggctttgag

SEQ ID NO: 57302 - RNA, 20 nt, synthetic construct
  source 1..20: mol_type = other RNA
ttatgctttgtctctggaag

SEQ ID NO: 57303 - RNA, 20 nt, synthetic construct
  source 1..20: mol_type = other RNA
ttatggaaacatggtaattt

SEQ ID NO: 57304 - RNA, 20 nt, synthetic construct
  source 1..20: mol_type = other RNA
ttatggaataatggaactaa

SEQ ID NO: 57305 - RNA, 20 nt, synthetic construct
  source 1..20: mol_type = other RNA
ttatggaattgccatatgta

SEQ ID NO: 57306 - RNA, 20 nt, synthetic construct
  source 1..20: mol_type = other RNA
ttatggagataaattaccca

SEQ ID NO: 57307 - RNA, 20 nt, synthetic construct
  source 1..20: mol_type = other RNA
ttatggatatctggcctgca

SEQ ID NO: 57308 - RNA, 20 nt, synthetic construct
  source 1..20: mol_type = other RNA
ttatggcctaagatggaaag

SEQ ID NO: 57309 - RNA, 20 nt, synthetic construct
  source 1..20: mol_type = other RNA
ttatggctagaaacttggat

SEQ ID NO: 57310 - RNA, 20 nt, synthetic construct
  source 1..20: mol_type = other RNA
ttatggctataaccacgagt

SEQ ID NO: 57311 - RNA, 20 nt, synthetic construct
  source 1..20: mol_type = other RNA
ttatgggtcaaccactaagg

SEQ ID NO: 57312 - RNA, 20 nt, synthetic construct
  source 1..20: mol_type = other RNA
ttatggtaactcctgttctt

SEQ ID NO: 57313 - RNA, 20 nt, synthetic construct
  source 1..20: mol_type = other RNA
ttatggtaattggttcgttt

SEQ ID NO: 57314 - RNA, 20 nt, synthetic construct
  source 1..20: mol_type = other RNA
ttatggtaggtgctttttgt

SEQ ID NO: 57315 - RNA, 20 nt, synthetic construct
  source 1..20: mol_type = other RNA
ttatggtatcactttttgta

SEQ ID NO: 57316 - RNA, 20 nt, synthetic construct
  source 1..20: mol_type = other RNA
ttatggtctttttccaggac

SEQ ID NO: 57317 - RNA, 20 nt, synthetic construct
  source 1..20: mol_type = other RNA
ttatggttgttggctaaaag

SEQ ID NO: 57318 - RNA, 20 nt, synthetic construct
  source 1..20: mol_type = other RNA
ttatggttttttcccccctg

SEQ ID NO: 57319 - RNA, 20 nt, synthetic construct
  source 1..20: mol_type = other RNA
ttatgtacacgtcttgtcaa

SEQ ID NO: 57320 - RNA, 20 nt, synthetic construct
  source 1..20: mol_type = other RNA
ttatgtacatgacctatcta

SEQ ID NO: 57321 - RNA, 20 nt, synthetic construct
  source 1..20: mol_type = other RNA
ttatgtagctgggatggctg

SEQ ID NO: 57322 - RNA, 20 nt, synthetic construct
  source 1..20: mol_type = other RNA
ttatgtcagtcaacacacta

SEQ ID NO: 57323 - RNA, 20 nt, synthetic construct
  source 1..20: mol_type = other RNA
ttatgtccagcccccagttt

SEQ ID NO: 57324 - RNA, 20 nt, synthetic construct
  source 1..20: mol_type = other RNA
ttatgtcttgtggctgacat

SEQ ID NO: 57325 - RNA, 20 nt, synthetic construct
  source 1..20: mol_type = other RNA
ttatgtgaaaagaaaaaggt

SEQ ID NO: 57326 - RNA, 20 nt, synthetic construct
  source 1..20: mol_type = other RNA
ttatgtgaaagtagaggact

SEQ ID NO: 57327 - RNA, 20 nt, synthetic construct
  source 1..20: mol_type = other RNA
ttatgtgcaagttctctttt

SEQ ID NO: 57328 - RNA, 20 nt, synthetic construct
  source 1..20: mol_type = other RNA
ttatgtgcagtctaaccatt

SEQ ID NO: 57329 - RNA, 20 nt, synthetic construct
  source 1..20: mol_type = other RNA
ttatgtgctttctcaacact

SEQ ID NO: 57330 - RNA, 20 nt, synthetic construct
  source 1..20: mol_type = other RNA
ttatgtggaaaaatatagga

SEQ ID NO: 57331 - RNA, 20 nt, synthetic construct
  source 1..20: mol_type = other RNA
ttatgtgtgtataacccgtt

SEQ ID NO: 57332 - RNA, 20 nt, synthetic construct
  source 1..20: mol_type = other RNA
ttatgttagatatcccatat

SEQ ID NO: 57333 - RNA, 20 nt, synthetic construct
  source 1..20: mol_type = other RNA
ttatgttcatgaaccttcac

SEQ ID NO: 57334 - RNA, 20 nt, synthetic construct
  source 1..20: mol_type = other RNA
ttatgttccacatgttactc

SEQ ID NO: 57335 - RNA, 20 nt, synthetic construct
  source 1..20: mol_type = other RNA
ttatgttgcacaaaagtgaa

SEQ ID NO: 57336 - RNA, 20 nt, synthetic construct
  source 1..20: mol_type = other RNA
ttattaaaatgaacctgctt

SEQ ID NO: 57337 - RNA, 20 nt, synthetic construct
  source 1..20: mol_type = other RNA
ttattaaacctgttacatgg

SEQ ID NO: 57338 - RNA, 20 nt, synthetic construct
  source 1..20: mol_type = other RNA
ttattaaagtagaaggccct

SEQ ID NO: 57339 - RNA, 20 nt, synthetic construct
  source 1..20: mol_type = other RNA
ttattaaatgagacacctac

SEQ ID NO: 57340 - RNA, 20 nt, synthetic construct
  source 1..20: mol_type = other RNA
ttattaacataccgacggct

SEQ ID NO: 57341 - RNA, 20 nt, synthetic construct
  source 1..20: mol_type = other RNA
ttattaagagtgtgctgact

SEQ ID NO: 57342 - RNA, 20 nt, synthetic construct
  source 1..20: mol_type = other RNA
ttattaagataatgctgttc

SEQ ID NO: 57343 - RNA, 20 nt, synthetic construct
  source 1..20: mol_type = other RNA
ttattaagcaaaatggaagt

SEQ ID NO: 57344 - RNA, 20 nt, synthetic construct
  source 1..20: mol_type = other RNA
ttattaatgtgttgtctgat

SEQ ID NO: 57345 - RNA, 20 nt, synthetic construct
  source 1..20: mol_type = other RNA
ttattaatttggcttgggga

SEQ ID NO: 57346 - RNA, 20 nt, synthetic construct
  source 1..20: mol_type = other RNA
ttattagaactagaactgtg

SEQ ID NO: 57347 - RNA, 20 nt, synthetic construct
  source 1..20: mol_type = other RNA
ttattagagttgtaacacat

SEQ ID NO: 57348 - RNA, 20 nt, synthetic construct
  source 1..20: mol_type = other RNA
ttattagatagtggtttgaa

SEQ ID NO: 57349 - RNA, 20 nt, synthetic construct
  source 1..20: mol_type = other RNA
ttattagcaaacatttatgg

SEQ ID NO: 57350 - RNA, 20 nt, synthetic construct
  source 1..20: mol_type = other RNA
ttattagcaaagaggcaaaa

SEQ ID NO: 57351 - RNA, 20 nt, synthetic construct
  source 1..20: mol_type = other RNA
ttattagcttgctagtagca

SEQ ID NO: 57352 - RNA, 20 nt, synthetic construct
  source 1..20: mol_type = other RNA
ttattagggtaatgctggct

SEQ ID NO: 57353 - RNA, 20 nt, synthetic construct
  source 1..20: mol_type = other RNA
ttattaggtgcacacaacac

SEQ ID NO: 57354 - RNA, 20 nt, synthetic construct
  source 1..20: mol_type = other RNA
ttattagtagttaggtggtt

SEQ ID NO: 57355 - RNA, 20 nt, synthetic construct
  source 1..20: mol_type = other RNA
ttattagttgtacttgacac

SEQ ID NO: 57356 - RNA, 20 nt, synthetic construct
  source 1..20: mol_type = other RNA
ttattatatgcctagatttc

SEQ ID NO: 57357 - RNA, 20 nt, synthetic construct
  source 1..20: mol_type = other RNA
ttattcaaagatcatttcac

SEQ ID NO: 57358 - RNA, 20 nt, synthetic construct
  source 1..20: mol_type = other RNA
ttattcaaataattgctgca

SEQ ID NO: 57359 - RNA, 20 nt, synthetic construct
  source 1..20: mol_type = other RNA
ttattcacccaagaatttca

SEQ ID NO: 57360 - RNA, 20 nt, synthetic construct
  source 1..20: mol_type = other RNA
ttattcatacgttaactgta

SEQ ID NO: 57361 - RNA, 20 nt, synthetic construct
  source 1..20: mol_type = other RNA
ttattcatagtcatttgatc

SEQ ID NO: 57362 - RNA, 20 nt, synthetic construct
  source 1..20: mol_type = other RNA
ttattcatataatggagtac

SEQ ID NO: 57363 - RNA, 20 nt, synthetic construct
  source 1..20: mol_type = other RNA
ttattcatgtttgtggtttt

SEQ ID NO: 57364 - RNA, 20 nt, synthetic construct
  source 1..20: mol_type = other RNA
ttattcattctttttactcg

SEQ ID NO: 57365 - RNA, 20 nt, synthetic construct
  source 1..20: mol_type = other RNA
ttattccataaaaaccaaac

SEQ ID NO: 57366 - RNA, 20 nt, synthetic construct
  source 1..20: mol_type = other RNA
ttattccccagggaaacctt

SEQ ID NO: 57367 - RNA, 20 nt, synthetic construct
  source 1..20: mol_type = other RNA
ttattcctctcttggaatgt

SEQ ID NO: 57368 - RNA, 20 nt, synthetic construct
  source 1..20: mol_type = other RNA
ttattctaaacacacgggct

SEQ ID NO: 57369 - RNA, 20 nt, synthetic construct
  source 1..20: mol_type = other RNA
ttattctgttctagctcctg

SEQ ID NO: 57370 - RNA, 20 nt, synthetic construct
  source 1..20: mol_type = other RNA
ttattcttacagtgacatat

SEQ ID NO: 57371 - RNA, 20 nt, synthetic construct
  source 1..20: mol_type = other RNA
ttattcttcagcaaggacca

SEQ ID NO: 57372 - RNA, 20 nt, synthetic construct
  source 1..20: mol_type = other RNA
ttattcttgttttcttgaga

SEQ ID NO: 57373 - RNA, 20 nt, synthetic construct
  source 1..20: mol_type = other RNA
ttattcttttagagtaactg

SEQ ID NO: 57374 - RNA, 20 nt, synthetic construct
  source 1..20: mol_type = other RNA
ttattgacaagacgtgtaca

SEQ ID NO: 57375 - RNA, 20 nt, synthetic construct
  source 1..20: mol_type = other RNA
ttattgagaagcagaaaatc

SEQ ID NO: 57376 - RNA, 20 nt, synthetic construct
  source 1..20: mol_type = other RNA
ttattgagtctgtagggtga

SEQ ID NO: 57377 - RNA, 20 nt, synthetic construct
  source 1..20: mol_type = other RNA
ttattgataagcacatggtg

SEQ ID NO: 57378 - RNA, 20 nt, synthetic construct
  source 1..20: mol_type = other RNA
ttattgattcagatgacaga

SEQ ID NO: 57379 - RNA, 20 nt, synthetic construct
  source 1..20: mol_type = other RNA
ttattgattggcaaatcttt

SEQ ID NO: 57380 - RNA, 20 nt, synthetic construct
  source 1..20: mol_type = other RNA
ttattgcatagggatgttgc

SEQ ID NO: 57381 - RNA, 20 nt, synthetic construct
  source 1..20: mol_type = other RNA
ttattggaaaactctgtttc

SEQ ID NO: 57382 - RNA, 20 nt, synthetic construct
  source 1..20: mol_type = other RNA
ttattggttatctgtacttt

SEQ ID NO: 57383 - RNA, 20 nt, synthetic construct
  source 1..20: mol_type = other RNA
ttattgtaacttgaattcag

SEQ ID NO: 57384 - RNA, 20 nt, synthetic construct
  source 1..20: mol_type = other RNA
ttattgtcaaggtcatcctt

SEQ ID NO: 57385 - RNA, 20 nt, synthetic construct
  source 1..20: mol_type = other RNA
ttattgtcattaccttatag

SEQ ID NO: 57386 - RNA, 20 nt, synthetic construct
  source 1..20: mol_type = other RNA
ttattgtctgcaagcagatc

SEQ ID NO: 57387 - RNA, 20 nt, synthetic construct
  source 1..20: mol_type = other RNA
ttattgtttcacttttctgg

SEQ ID NO: 57388 - RNA, 20 nt, synthetic construct
  source 1..20: mol_type = other RNA
ttatttaatctctcttgacc

SEQ ID NO: 57389 - RNA, 20 nt, synthetic construct
  source 1..20: mol_type = other RNA
ttatttaatgtgctgtccat

SEQ ID NO: 57390 - RNA, 20 nt, synthetic construct
  source 1..20: mol_type = other RNA
ttatttagagtttgcattac

SEQ ID NO: 57391 - RNA, 20 nt, synthetic construct
  source 1..20: mol_type = other RNA
ttatttagcccatgtctaaa

SEQ ID NO: 57392 - RNA, 20 nt, synthetic construct
  source 1..20: mol_type = other RNA
ttatttaggccctctataat

SEQ ID NO: 57393 - RNA, 20 nt, synthetic construct
  source 1..20: mol_type = other RNA
ttatttagtgaaatagttgg

SEQ ID NO: 57394 - RNA, 20 nt, synthetic construct
  source 1..20: mol_type = other RNA
ttatttatacaggtgcttac

SEQ ID NO: 57395 - RNA, 20 nt, synthetic construct
  source 1..20: mol_type = other RNA
ttatttatgctgatgaacta

SEQ ID NO: 57396 - RNA, 20 nt, synthetic construct
  source 1..20: mol_type = other RNA
ttatttccagcctttaattt

SEQ ID NO: 57397 - RNA, 20 nt, synthetic construct
  source 1..20: mol_type = other RNA
ttatttccagggggtatgga

SEQ ID NO: 57398 - RNA, 20 nt, synthetic construct
  source 1..20: mol_type = other RNA
ttatttccttaagccatttc

SEQ ID NO: 57399 - RNA, 20 nt, synthetic construct
  source 1..20: mol_type = other RNA
ttatttccttccagtttata

SEQ ID NO: 57400 - RNA, 20 nt, synthetic construct
  source 1..20: mol_type = other RNA
ttatttcgaattatgctaac

SEQ ID NO: 57401 - RNA, 20 nt, synthetic construct
  source 1..20: mol_type = other RNA
ttatttctgggctctctatt

SEQ ID NO: 57402 - RNA, 20 nt, synthetic construct
  source 1..20: mol_type = other RNA
ttatttctgtatcttttcag

SEQ ID NO: 57403 - RNA, 20 nt, synthetic construct
  source 1..20: mol_type = other RNA
ttatttctgtcatctgaatc

SEQ ID NO: 57404 - RNA, 20 nt, synthetic construct
  source 1..20: mol_type = other RNA
ttatttcttctccctcttcg

SEQ ID NO: 57405 - RNA, 20 nt, synthetic construct
  source 1..20: mol_type = other RNA
ttatttcttgacctcagtgg

SEQ ID NO: 57406 - RNA, 20 nt, synthetic construct
  source 1..20: mol_type = other RNA
ttatttgaataaggtctgta

SEQ ID NO: 57407 - RNA, 20 nt, synthetic construct
  source 1..20: mol_type = other RNA
ttatttgagagtaagttgca

SEQ ID NO: 57408 - RNA, 20 nt, synthetic construct
  source 1..20: mol_type = other RNA
ttatttgcggcttgattagc

SEQ ID NO: 57409 - RNA, 20 nt, synthetic construct
  source 1..20: mol_type = other RNA
ttatttgctgtcaggcaagg

SEQ ID NO: 57410 - RNA, 20 nt, synthetic construct
  source 1..20: mol_type = other RNA
ttatttggaaatatggtcac

SEQ ID NO: 57411 - RNA, 20 nt, synthetic construct
  source 1..20: mol_type = other RNA
ttatttggaagagagaaggc

SEQ ID NO: 57412 - RNA, 20 nt, synthetic construct
  source 1..20: mol_type = other RNA
ttatttggctgttaccattt

SEQ ID NO: 57413 - RNA, 20 nt, synthetic construct
  source 1..20: mol_type = other RNA
ttatttggggattctgctac

SEQ ID NO: 57414 - RNA, 20 nt, synthetic construct
  source 1..20: mol_type = other RNA
ttatttgtgcatactgtgat

SEQ ID NO: 57415 - RNA, 20 nt, synthetic construct
  source 1..20: mol_type = other RNA
ttatttgttactgatctgct

SEQ ID NO: 57416 - RNA, 20 nt, synthetic construct
  source 1..20: mol_type = other RNA
ttatttgttctgtcacggtg

SEQ ID NO: 57417 - RNA, 20 nt, synthetic construct
  source 1..20: mol_type = other RNA
ttattttaatcgaatcctca

SEQ ID NO: 57418 - RNA, 20 nt, synthetic construct
  source 1..20: mol_type = other RNA
ttattttatgtacacgtctt

SEQ ID NO: 57419 - RNA, 20 nt, synthetic construct
  source 1..20: mol_type = other RNA
ttattttcacagacagtaat

SEQ ID NO: 57420 - RNA, 20 nt, synthetic construct
  source 1..20: mol_type = other RNA
ttattttcctccttctgctc

SEQ ID NO: 57421 - RNA, 20 nt, synthetic construct
  source 1..20: mol_type = other RNA
ttattttctgcatttggttt

SEQ ID NO: 57422 - RNA, 20 nt, synthetic construct
  source 1..20: mol_type = other RNA
ttattttctttgagtagttc

SEQ ID NO: 57423 - RNA, 20 nt, synthetic construct
  source 1..20: mol_type = other RNA
ttatttttacccaacatgag

SEQ ID NO: 57424 - RNA, 20 nt, synthetic construct
  source 1..20: mol_type = other RNA
ttatttttacccgtggaaat

SEQ ID NO: 57425 - RNA, 20 nt, synthetic construct
  source 1..20: mol_type = other RNA
ttatttttgagacaggttgt

SEQ ID NO: 57426 - RNA, 20 nt, synthetic construct
  source 1..20: mol_type = other RNA
ttattttttcccagatacgt

SEQ ID NO: 57427 - RNA, 20 nt, synthetic construct
  source 1..20: mol_type = other RNA
ttattttttcccgctacaca

SEQ ID NO: 57428 - RNA, 20 nt, synthetic construct
  source 1..20: mol_type = other RNA
ttattttttcttcccatctc

SEQ ID NO: 57429 - RNA, 20 nt, synthetic construct
  source 1..20: mol_type = other RNA
ttcaaaaacactgtattttg

SEQ ID NO: 57430 - RNA, 20 nt, synthetic construct
  source 1..20: mol_type = other RNA
ttcaaaaacagcatatacat

SEQ ID NO: 57431 - RNA, 20 nt, synthetic construct
  source 1..20: mol_type = other RNA
ttcaaaaacccaactctttc

SEQ ID NO: 57432 - RNA, 20 nt, synthetic construct
  source 1..20: mol_type = other RNA
ttcaaaaaccttttttaagg

SEQ ID NO: 57433 - RNA, 20 nt, synthetic construct
  source 1..20: mol_type = other RNA
ttcaaaacaaaacacatggc

SEQ ID NO: 57434 - RNA, 20 nt, synthetic construct
  source 1..20: mol_type = other RNA
ttcaaaagacatcactaaga

SEQ ID NO: 57435 - RNA, 20 nt, synthetic construct
  source 1..20: mol_type = other RNA
ttcaaaagccccaaaccatc

SEQ ID NO: 57436 - RNA, 20 nt, synthetic construct
  source 1..20: mol_type = other RNA
ttcaaaagctccccggatga

SEQ ID NO: 57437 - RNA, 20 nt, synthetic construct
  source 1..20: mol_type = other RNA
ttcaaaatacagtgtttttg

SEQ ID NO: 57438 - RNA, 20 nt, synthetic construct
  source 1..20: mol_type = other RNA
ttcaaaatctgatgtgtatg

SEQ ID NO: 57439 - RNA, 20 nt, synthetic construct
  source 1..20: mol_type = other RNA
ttcaaaatgtgatggcatca

SEQ ID NO: 57440 - RNA, 20 nt, synthetic construct
  source 1..20: mol_type = other RNA
ttcaaacaattacttcatag

SEQ ID NO: 57441 - RNA, 20 nt, synthetic construct
  source 1..20: mol_type = other RNA
ttcaaacatgacagatccca

SEQ ID NO: 57442 - RNA, 20 nt, synthetic construct
  source 1..20: mol_type = other RNA
ttcaaaccaatgttctcttt

SEQ ID NO: 57443 - RNA, 20 nt, synthetic construct
  source 1..20: mol_type = other RNA
ttcaaaccacctaactacta

SEQ ID NO: 57444 - RNA, 20 nt, synthetic construct
  source 1..20: mol_type = other RNA
ttcaaaccactatctaataa

SEQ ID NO: 57445 - RNA, 20 nt, synthetic construct
  source 1..20: mol_type = other RNA
ttcaaactgtggtcactgtt

SEQ ID NO: 57446 - RNA, 20 nt, synthetic construct
  source 1..20: mol_type = other RNA
ttcaaagaaactacctagaa

SEQ ID NO: 57447 - RNA, 20 nt, synthetic construct
  source 1..20: mol_type = other RNA
ttcaaagagaacaaaatacc

SEQ ID NO: 57448 - RNA, 20 nt, synthetic construct
  source 1..20: mol_type = other RNA
ttcaaagagacctgattctt

SEQ ID NO: 57449 - RNA, 20 nt, synthetic construct
  source 1..20: mol_type = other RNA
ttcaaagatcatttcacttg

SEQ ID NO: 57450 - RNA, 20 nt, synthetic construct
  source 1..20: mol_type = other RNA
ttcaaagcaagttaaaagac

SEQ ID NO: 57451 - RNA, 20 nt, synthetic construct
  source 1..20: mol_type = other RNA
ttcaaagggtcactattaac

SEQ ID NO: 57452 - RNA, 20 nt, synthetic construct
  source 1..20: mol_type = other RNA
ttcaaagttaatagcctcct

SEQ ID NO: 57453 - RNA, 20 nt, synthetic construct
  source 1..20: mol_type = other RNA
ttcaaagttatgtttatgac

SEQ ID NO: 57454 - RNA, 20 nt, synthetic construct
  source 1..20: mol_type = other RNA
ttcaaataatagctatccta

SEQ ID NO: 57455 - RNA, 20 nt, synthetic construct
  source 1..20: mol_type = other RNA
ttcaaataattgctgcagtt

SEQ ID NO: 57456 - RNA, 20 nt, synthetic construct
  source 1..20: mol_type = other RNA
ttcaaatacctagttttcca

SEQ ID NO: 57457 - RNA, 20 nt, synthetic construct
  source 1..20: mol_type = other RNA
ttcaaatgaggcttttattg

SEQ ID NO: 57458 - RNA, 20 nt, synthetic construct
  source 1..20: mol_type = other RNA
ttcaaatgatattcactgat

SEQ ID NO: 57459 - RNA, 20 nt, synthetic construct
  source 1..20: mol_type = other RNA
ttcaaatgctataaagaaca

SEQ ID NO: 57460 - RNA, 20 nt, synthetic construct
  source 1..20: mol_type = other RNA
ttcaaatgtgacagaacaaa

SEQ ID NO: 57461 - RNA, 20 nt, synthetic construct
  source 1..20: mol_type = other RNA
ttcaaatgttaagcccaact

SEQ ID NO: 57462 - RNA, 20 nt, synthetic construct
  source 1..20: mol_type = other RNA
ttcaacaaaactgggggctg

SEQ ID NO: 57463 - RNA, 20 nt, synthetic construct
  source 1..20: mol_type = other RNA
ttcaacaaaggttgaaaact

SEQ ID NO: 57464 - RNA, 20 nt, synthetic construct
  source 1..20: mol_type = other RNA
ttcaacaatagcaacaaaac

SEQ ID NO: 57465 - RNA, 20 nt, synthetic construct
  source 1..20: mol_type = other RNA
ttcaacagctactatgaata

SEQ ID NO: 57466 - RNA, 20 nt, synthetic construct
  source 1..20: mol_type = other RNA
ttcaacaggtataaagtttc

SEQ ID NO: 57467 - RNA, 20 nt, synthetic construct
  source 1..20: mol_type = other RNA
ttcaaccatacttttcaact

SEQ ID NO: 57468 - RNA, 20 nt, synthetic construct
  source 1..20: mol_type = other RNA
ttcaaccctcggcctctact

SEQ ID NO: 57469 - RNA, 20 nt, synthetic construct
  source 1..20: mol_type = other RNA
ttcaacctaacatgtcttgg

SEQ ID NO: 57470 - RNA, 20 nt, synthetic construct
  source 1..20: mol_type = other RNA
ttcaacctataagacccagt

SEQ ID NO: 57471 - RNA, 20 nt, synthetic construct
  source 1..20: mol_type = other RNA
ttcaacctcaactttaggtt

SEQ ID NO: 57472 - RNA, 20 nt, synthetic construct
  source 1..20: mol_type = other RNA
ttcaacctcctgggctcaaa

SEQ ID NO: 57473 - RNA, 20 nt, synthetic construct
  source 1..20: mol_type = other RNA
ttcaacctttgttgaaaacg

SEQ ID NO: 57474 - RNA, 20 nt, synthetic construct
  source 1..20: mol_type = other RNA
ttcaacggacatttttccaa

SEQ ID NO: 57475 - RNA, 20 nt, synthetic construct
  source 1..20: mol_type = other RNA
ttcaactgaacaacgctgtg

SEQ ID NO: 57476 - RNA, 20 nt, synthetic construct
  source 1..20: mol_type = other RNA
ttcaacttggtaaaaagtgc

SEQ ID NO: 57477 - RNA, 20 nt, synthetic construct
  source 1..20: mol_type = other RNA
ttcaagaaaccacagagcct

SEQ ID NO: 57478 - RNA, 20 nt, synthetic construct
  source 1..20: mol_type = other RNA
ttcaagacaagcaaggaagg

SEQ ID NO: 57479 - RNA, 20 nt, synthetic construct
  source 1..20: mol_type = other RNA
ttcaagaggttaaaaccaca

SEQ ID NO: 57480 - RNA, 20 nt, synthetic construct
  source 1..20: mol_type = other RNA
ttcaagatactgcactaaac

SEQ ID NO: 57481 - RNA, 20 nt, synthetic construct
  source 1..20: mol_type = other RNA
ttcaagatgcataccaagcc

SEQ ID NO: 57482 - RNA, 20 nt, synthetic construct
  source 1..20: mol_type = other RNA
ttcaagattgtttaattctg

SEQ ID NO: 57483 - RNA, 20 nt, synthetic construct
  source 1..20: mol_type = other RNA
ttcaagatttcataggcatc

SEQ ID NO: 57484 - RNA, 20 nt, synthetic construct
  source 1..20: mol_type = other RNA
ttcaagcaccacttcgagaa

SEQ ID NO: 57485 - RNA, 20 nt, synthetic construct
  source 1..20: mol_type = other RNA
ttcaagcagaaatgagttcc

SEQ ID NO: 57486 - RNA, 20 nt, synthetic construct
  source 1..20: mol_type = other RNA
ttcaagcattgggagctttc

SEQ ID NO: 57487 - RNA, 20 nt, synthetic construct
  source 1..20: mol_type = other RNA
ttcaagccccagttctgcgc

SEQ ID NO: 57488 - RNA, 20 nt, synthetic construct
  source 1..20: mol_type = other RNA
ttcaagcgctgaagtacttc

SEQ ID NO: 57489 - RNA, 20 nt, synthetic construct
  source 1..20: mol_type = other RNA
ttcaaggcttgtgcatcaga

SEQ ID NO: 57490 - RNA, 20 nt, synthetic construct
  source 1..20: mol_type = other RNA
ttcaaggggccttttgtcaa

SEQ ID NO: 57491 - RNA, 20 nt, synthetic construct
  source 1..20: mol_type = other RNA
ttcaagggtgttttcccccc

SEQ ID NO: 57492 - RNA, 20 nt, synthetic construct
  source 1..20: mol_type = other RNA
ttcaaggtaatctagtttat

SEQ ID NO: 57493 - RNA, 20 nt, synthetic construct
  source 1..20: mol_type = other RNA
ttcaaggtagaagtacaaac

SEQ ID NO: 57494 - RNA, 20 nt, synthetic construct
  source 1..20: mol_type = other RNA
ttcaaggtatctccccaaag

SEQ ID NO: 57495 - RNA, 20 nt, synthetic construct
  source 1..20: mol_type = other RNA
ttcaaggtgttagcaggact

SEQ ID NO: 57496 - RNA, 20 nt, synthetic construct
  source 1..20: mol_type = other RNA
ttcaaggtgttcctgaagtc

SEQ ID NO: 57497 - RNA, 20 nt, synthetic construct
  source 1..20: mol_type = other RNA
ttcaaggttataatcagccg

SEQ ID NO: 57498 - RNA, 20 nt, synthetic construct
  source 1..20: mol_type = other RNA
ttcaaggttcacaaattaga

SEQ ID NO: 57499 - RNA, 20 nt, synthetic construct
  source 1..20: mol_type = other RNA
ttcaagtaacactcagaagt

SEQ ID NO: 57500 - RNA, 20 nt, synthetic construct
  source 1..20: mol_type = other RNA
ttcaagtatttccacgggta

SEQ ID NO: 57501 - RNA, 20 nt, synthetic construct
  source 1..20: mol_type = other RNA
ttcaagtgaaccaaaaacca

SEQ ID NO: 57502 - RNA, 20 nt, synthetic construct
  source 1..20: mol_type = other RNA
ttcaagtgtttatttagtga

SEQ ID NO: 57503 - RNA, 20 nt, synthetic construct
  source 1..20: mol_type = other RNA
ttcaagttacaataatatgc

SEQ ID NO: 57504 - RNA, 20 nt, synthetic construct
  source 1..20: mol_type = other RNA
ttcaagttgctttttcttct

SEQ ID NO: 57505 - RNA, 20 nt, synthetic construct
  source 1..20: mol_type = other RNA
ttcaagtttcaccctgcgaa

SEQ ID NO: 57506 - RNA, 20 nt, synthetic construct
  source 1..20: mol_type = other RNA
ttcaagtttggctcccatga

SEQ ID NO: 57507 - RNA, 20 nt, synthetic construct
  source 1..20: mol_type = other RNA
ttcaatactactgcaaatat

SEQ ID NO: 57508 - RNA, 20 nt, synthetic construct
  source 1..20: mol_type = other RNA
ttcaatagtgggtagaagca

SEQ ID NO: 57509 - RNA, 20 nt, synthetic construct
  source 1..20: mol_type = other RNA
ttcaatatgcagtatgtgcc

SEQ ID NO: 57510 - RNA, 20 nt, synthetic construct
  source 1..20: mol_type = other RNA
ttcaatatgttaaatgaagg

SEQ ID NO: 57511 - RNA, 20 nt, synthetic construct
  source 1..20: mol_type = other RNA
ttcaatattaagagtctcat

SEQ ID NO: 57512 - RNA, 20 nt, synthetic construct
  source 1..20: mol_type = other RNA
ttcaatattttggaagacta

SEQ ID NO: 57513 - RNA, 20 nt, synthetic construct
  source 1..20: mol_type = other RNA
ttcaatccttgtaactttta

SEQ ID NO: 57514 - RNA, 20 nt, synthetic construct
  source 1..20: mol_type = other RNA
ttcaatctggaatgcatcgt

SEQ ID NO: 57515 - RNA, 20 nt, synthetic construct
  source 1..20: mol_type = other RNA
ttcaatcttggaaatgatac

SEQ ID NO: 57516 - RNA, 20 nt, synthetic construct
  source 1..20: mol_type = other RNA
ttcaatgagggcagagataa

SEQ ID NO: 57517 - RNA, 20 nt, synthetic construct
  source 1..20: mol_type = other RNA
ttcaatgcaatacttaatag

SEQ ID NO: 57518 - RNA, 20 nt, synthetic construct
  source 1..20: mol_type = other RNA
ttcaatgctacagtaagcaa

SEQ ID NO: 57519 - RNA, 20 nt, synthetic construct
  source 1..20: mol_type = other RNA
ttcaatgtttggtagatttc

SEQ ID NO: 57520 - RNA, 20 nt, synthetic construct
  source 1..20: mol_type = other RNA
ttcaattgtcctggcagatc

SEQ ID NO: 57521 - RNA, 20 nt, synthetic construct
  source 1..20: mol_type = other RNA
ttcaattttcatgggttgat

SEQ ID NO: 57522 - RNA, 20 nt, synthetic construct
  source 1..20: mol_type = other RNA
ttcacaaacaaatccttttc

SEQ ID NO: 57523 - RNA, 20 nt, synthetic construct
  source 1..20: mol_type = other RNA
ttcacaaacacacaaaccaa

SEQ ID NO: 57524 - RNA, 20 nt, synthetic construct
  source 1..20: mol_type = other RNA
ttcacaaagccctcaggacc

SEQ ID NO: 57525 - RNA, 20 nt, synthetic construct
  source 1..20: mol_type = other RNA
ttcacaacgatttcttaaaa

SEQ ID NO: 57526 - RNA, 20 nt, synthetic construct
  source 1..20: mol_type = other RNA
ttcacaagattaatcttgca

SEQ ID NO: 57527 - RNA, 20 nt, synthetic construct
  source 1..20: mol_type = other RNA
ttcacacaccctttcttagg

SEQ ID NO: 57528 - RNA, 20 nt, synthetic construct
  source 1..20: mol_type = other RNA
ttcacacattaactatggac

SEQ ID NO: 57529 - RNA, 20 nt, synthetic construct
  source 1..20: mol_type = other RNA
ttcacaccatttagatcatc

SEQ ID NO: 57530 - RNA, 20 nt, synthetic construct
  source 1..20: mol_type = other RNA
ttcacacctgtagtcccagc

SEQ ID NO: 57531 - RNA, 20 nt, synthetic construct
  source 1..20: mol_type = other RNA
ttcacacgcattgcattgac

SEQ ID NO: 57532 - RNA, 20 nt, synthetic construct
  source 1..20: mol_type = other RNA
ttcacactagtcaccctaca

SEQ ID NO: 57533 - RNA, 20 nt, synthetic construct
  source 1..20: mol_type = other RNA
ttcacactataacagatgga

SEQ ID NO: 57534 - RNA, 20 nt, synthetic construct
  source 1..20: mol_type = other RNA
ttcacactcgcactccactt

SEQ ID NO: 57535 - RNA, 20 nt, synthetic construct
  source 1..20: mol_type = other RNA
ttcacactgattttctgctt

SEQ ID NO: 57536 - RNA, 20 nt, synthetic construct
  source 1..20: mol_type = other RNA
ttcacactgctcctgccttt

SEQ ID NO: 57537 - RNA, 20 nt, synthetic construct
  source 1..20: mol_type = other RNA
ttcacacttagttcaagatg

SEQ ID NO: 57538 - RNA, 20 nt, synthetic construct
  source 1..20: mol_type = other RNA
ttcacagaaacagaaaaatc

SEQ ID NO: 57539 - RNA, 20 nt, synthetic construct
  source 1..20: mol_type = other RNA
ttcacagaactgtcactgac

SEQ ID NO: 57540 - RNA, 20 nt, synthetic construct
  source 1..20: mol_type = other RNA
ttcacagaatatactcagaa

SEQ ID NO: 57541 - RNA, 20 nt, synthetic construct
  source 1..20: mol_type = other RNA
ttcacagacagtaatttata

SEQ ID NO: 57542 - RNA, 20 nt, synthetic construct
  source 1..20: mol_type = other RNA
ttcacagcatgaatacctat

SEQ ID NO: 57543 - RNA, 20 nt, synthetic construct
  source 1..20: mol_type = other RNA
ttcacagcgtgcaccttaca

SEQ ID NO: 57544 - RNA, 20 nt, synthetic construct
  source 1..20: mol_type = other RNA
ttcacagggcagggagagag

SEQ ID NO: 57545 - RNA, 20 nt, synthetic construct
  source 1..20: mol_type = other RNA
ttcacagtagaagactcagc

SEQ ID NO: 57546 - RNA, 20 nt, synthetic construct
  source 1..20: mol_type = other RNA
ttcacataaatttgccacat

SEQ ID NO: 57547 - RNA, 20 nt, synthetic construct
  source 1..20: mol_type = other RNA
ttcacataaggtatatttct

SEQ ID NO: 57548 - RNA, 20 nt, synthetic construct
  source 1..20: mol_type = other RNA
ttcacatattttatgctttg

SEQ ID NO: 57549 - RNA, 20 nt, synthetic construct
  source 1..20: mol_type = other RNA
ttcacattcttcaccattcc

SEQ ID NO: 57550 - RNA, 20 nt, synthetic construct
  source 1..20: mol_type = other RNA
ttcacattgcacagtctccc

SEQ ID NO: 57551 - RNA, 20 nt, synthetic construct
  source 1..20: mol_type = other RNA
ttcacatttaagaagggaac

SEQ ID NO: 57552 - RNA, 20 nt, synthetic construct
  source 1..20: mol_type = other RNA
ttcacatttcgccttctcag

SEQ ID NO: 57553 - RNA, 20 nt, synthetic construct
  source 1..20: mol_type = other RNA
ttcaccaaacaccttacact

SEQ ID NO: 57554 - RNA, 20 nt, synthetic construct
  source 1..20: mol_type = other RNA
ttcaccaaagatttactaaa

SEQ ID NO: 57555 - RNA, 20 nt, synthetic construct
  source 1..20: mol_type = other RNA
ttcaccaactgaagcggggc

SEQ ID NO: 57556 - RNA, 20 nt, synthetic construct
  source 1..20: mol_type = other RNA
ttcaccaattgttaacattt

SEQ ID NO: 57557 - RNA, 20 nt, synthetic construct
  source 1..20: mol_type = other RNA
ttcaccagcggcatacagga

SEQ ID NO: 57558 - RNA, 20 nt, synthetic construct
  source 1..20: mol_type = other RNA
ttcaccagtttctaattaga

SEQ ID NO: 57559 - RNA, 20 nt, synthetic construct
  source 1..20: mol_type = other RNA
ttcaccattccagccattct

SEQ ID NO: 57560 - RNA, 20 nt, synthetic construct
  source 1..20: mol_type = other RNA
ttcacccaagaatttcatgc

SEQ ID NO: 57561 - RNA, 20 nt, synthetic construct
  source 1..20: mol_type = other RNA
ttcaccctgcgaaggcaatg

SEQ ID NO: 57562 - RNA, 20 nt, synthetic construct
  source 1..20: mol_type = other RNA
ttcaccgtgcaactagagaa

SEQ ID NO: 57563 - RNA, 20 nt, synthetic construct
  source 1..20: mol_type = other RNA
ttcacctctacacaaaaatc

SEQ ID NO: 57564 - RNA, 20 nt, synthetic construct
  source 1..20: mol_type = other RNA
ttcacctctccgggtaaaaa

SEQ ID NO: 57565 - RNA, 20 nt, synthetic construct
  source 1..20: mol_type = other RNA
ttcacgagactgttagggac

SEQ ID NO: 57566 - RNA, 20 nt, synthetic construct
  source 1..20: mol_type = other RNA
ttcacgatgcttaggtaaga

SEQ ID NO: 57567 - RNA, 20 nt, synthetic construct
  source 1..20: mol_type = other RNA
ttcacgcacagggagatact

SEQ ID NO: 57568 - RNA, 20 nt, synthetic construct
  source 1..20: mol_type = other RNA
ttcacgtgcattcatactga

SEQ ID NO: 57569 - RNA, 20 nt, synthetic construct
  source 1..20: mol_type = other RNA
ttcacgtggcgctccctctg

SEQ ID NO: 57570 - RNA, 20 nt, synthetic construct
  source 1..20: mol_type = other RNA
ttcactaaataaacacttga

SEQ ID NO: 57571 - RNA, 20 nt, synthetic construct
  source 1..20: mol_type = other RNA
ttcactaatgcctcaaatta

SEQ ID NO: 57572 - RNA, 20 nt, synthetic construct
  source 1..20: mol_type = other RNA
ttcactagacacatttttga

SEQ ID NO: 57573 - RNA, 20 nt, synthetic construct
  source 1..20: mol_type = other RNA
ttcactagatctcttttcct

SEQ ID NO: 57574 - RNA, 20 nt, synthetic construct
  source 1..20: mol_type = other RNA
ttcactagtgggtcgggtgt

SEQ ID NO: 57575 - RNA, 20 nt, synthetic construct
  source 1..20: mol_type = other RNA
ttcactcagcataattggtt

SEQ ID NO: 57576 - RNA, 20 nt, synthetic construct
  source 1..20: mol_type = other RNA
ttcactcctcattcacacta

SEQ ID NO: 57577 - RNA, 20 nt, synthetic construct
  source 1..20: mol_type = other RNA
ttcactctaatatggttcct

SEQ ID NO: 57578 - RNA, 20 nt, synthetic construct
  source 1..20: mol_type = other RNA
ttcactctcaatagtgtcct

SEQ ID NO: 57579 - RNA, 20 nt, synthetic construct
  source 1..20: mol_type = other RNA
ttcactctgtcgcccaggct

SEQ ID NO: 57580 - RNA, 20 nt, synthetic construct
  source 1..20: mol_type = other RNA
ttcactcttaaaaggagata

SEQ ID NO: 57581 - RNA, 20 nt, synthetic construct
  source 1..20: mol_type = other RNA
ttcactcttagtgatgtctt

SEQ ID NO: 57582 - RNA, 20 nt, synthetic construct
  source 1..20: mol_type = other RNA
ttcactcttctgcaagttgc

SEQ ID NO: 57583 - RNA, 20 nt, synthetic construct
  source 1..20: mol_type = other RNA
ttcactcttttaaggtttag

SEQ ID NO: 57584 - RNA, 20 nt, synthetic construct
  source 1..20: mol_type = other RNA
ttcactgactacacatacac

SEQ ID NO: 57585 - RNA, 20 nt, synthetic construct
  source 1..20: mol_type = other RNA
ttcactgcagaattactgac

SEQ ID NO: 57586 - RNA, 20 nt, synthetic construct
  source 1..20: mol_type = other RNA
ttcactgctcagtccctcac

SEQ ID NO: 57587 - RNA, 20 nt, synthetic construct
  source 1..20: mol_type = other RNA
ttcactgtgactccaaagca

SEQ ID NO: 57588 - RNA, 20 nt, synthetic construct
  source 1..20: mol_type = other RNA
ttcacttacttgagccccag

SEQ ID NO: 57589 - RNA, 20 nt, synthetic construct
  source 1..20: mol_type = other RNA
ttcacttccaagtcccggaa

SEQ ID NO: 57590 - RNA, 20 nt, synthetic construct
  source 1..20: mol_type = other RNA
ttcacttcgttcagtttagt

SEQ ID NO: 57591 - RNA, 20 nt, synthetic construct
  source 1..20: mol_type = other RNA
ttcacttctctgctgctgaa

SEQ ID NO: 57592 - RNA, 20 nt, synthetic construct
  source 1..20: mol_type = other RNA
ttcacttcttagtaaatatc

SEQ ID NO: 57593 - RNA, 20 nt, synthetic construct
  source 1..20: mol_type = other RNA
ttcacttcttattggttatc

SEQ ID NO: 57594 - RNA, 20 nt, synthetic construct
  source 1..20: mol_type = other RNA
ttcacttgaaacctgccatg

SEQ ID NO: 57595 - RNA, 20 nt, synthetic construct
  source 1..20: mol_type = other RNA
ttcacttgattactttacag

SEQ ID NO: 57596 - RNA, 20 nt, synthetic construct
  source 1..20: mol_type = other RNA
ttcacttgtttcttttcact

SEQ ID NO: 57597 - RNA, 20 nt, synthetic construct
  source 1..20: mol_type = other RNA
ttcactttcgtcatctataa

SEQ ID NO: 57598 - RNA, 20 nt, synthetic construct
  source 1..20: mol_type = other RNA
ttcactttgatcatacacat

SEQ ID NO: 57599 - RNA, 20 nt, synthetic construct
  source 1..20: mol_type = other RNA
ttcacttttctggttttctg

SEQ ID NO: 57600 - RNA, 20 nt, synthetic construct
  source 1..20: mol_type = other RNA
ttcacttttgagttcagaaa

SEQ ID NO: 57601 - RNA, 20 nt, synthetic construct
  source 1..20: mol_type = other RNA
ttcacttttggaatttaagg

SEQ ID NO: 57602 - RNA, 20 nt, synthetic construct
  source 1..20: mol_type = other RNA
ttcacttttgtgcaacataa

SEQ ID NO: 57603 - RNA, 20 nt, synthetic construct
  source 1..20: mol_type = other RNA
ttcagaaagagaatagcaga

SEQ ID NO: 57604 - RNA, 20 nt, synthetic construct
  source 1..20: mol_type = other RNA
ttcagaaagattaatccttg

SEQ ID NO: 57605 - RNA, 20 nt, synthetic construct
  source 1..20: mol_type = other RNA
ttcagaaatagactcccaac

SEQ ID NO: 57606 - RNA, 20 nt, synthetic construct
  source 1..20: mol_type = other RNA
ttcagaaatgtttaattcct

SEQ ID NO: 57607 - RNA, 20 nt, synthetic construct
  source 1..20: mol_type = other RNA
ttcagaactcttctccaagg

SEQ ID NO: 57608 - RNA, 20 nt, synthetic construct
  source 1..20: mol_type = other RNA
ttcagaagaaattacttctt

SEQ ID NO: 57609 - RNA, 20 nt, synthetic construct
  source 1..20: mol_type = other RNA
ttcagaagaggataaggggc

SEQ ID NO: 57610 - RNA, 20 nt, synthetic construct
  source 1..20: mol_type = other RNA
ttcagaagccctgcagccag

SEQ ID NO: 57611 - RNA, 20 nt, synthetic construct
  source 1..20: mol_type = other RNA
ttcagaagctaaattttcat

SEQ ID NO: 57612 - RNA, 20 nt, synthetic construct
  source 1..20: mol_type = other RNA
ttcagaaggagtccagtcct

SEQ ID NO: 57613 - RNA, 20 nt, synthetic construct
  source 1..20: mol_type = other RNA
ttcagaataccagagattgg

SEQ ID NO: 57614 - RNA, 20 nt, synthetic construct
  source 1..20: mol_type = other RNA
ttcagacttaactataggag

SEQ ID NO: 57615 - RNA, 20 nt, synthetic construct
  source 1..20: mol_type = other RNA
ttcagagagacctgaagact

SEQ ID NO: 57616 - RNA, 20 nt, synthetic construct
  source 1..20: mol_type = other RNA
ttcagaggccctggtgcttt

SEQ ID NO: 57617 - RNA, 20 nt, synthetic construct
  source 1..20: mol_type = other RNA
ttcagaggtatttggggcta

SEQ ID NO: 57618 - RNA, 20 nt, synthetic construct
  source 1..20: mol_type = other RNA
ttcagaggtctgttactccc

SEQ ID NO: 57619 - RNA, 20 nt, synthetic construct
  source 1..20: mol_type = other RNA
ttcagagtgctgggtagaga

SEQ ID NO: 57620 - RNA, 20 nt, synthetic construct
  source 1..20: mol_type = other RNA
ttcagagtggctaatgtggc

SEQ ID NO: 57621 - RNA, 20 nt, synthetic construct
  source 1..20: mol_type = other RNA
ttcagataacaaagggttct

SEQ ID NO: 57622 - RNA, 20 nt, synthetic construct
  source 1..20: mol_type = other RNA
ttcagatagaaaagacaata

SEQ ID NO: 57623 - RNA, 20 nt, synthetic construct
  source 1..20: mol_type = other RNA
ttcagatctctgacattggt

SEQ ID NO: 57624 - RNA, 20 nt, synthetic construct
  source 1..20: mol_type = other RNA
ttcagatgacagaaataata

SEQ ID NO: 57625 - RNA, 20 nt, synthetic construct
  source 1..20: mol_type = other RNA
ttcagatggccccaaaatta

SEQ ID NO: 57626 - RNA, 20 nt, synthetic construct
  source 1..20: mol_type = other RNA
ttcagattgaccttgtatcc

SEQ ID NO: 57627 - RNA, 20 nt, synthetic construct
  source 1..20: mol_type = other RNA
ttcagattgcttgagagaga

SEQ ID NO: 57628 - RNA, 20 nt, synthetic construct
  source 1..20: mol_type = other RNA
ttcagcaaggaccattagca

SEQ ID NO: 57629 - RNA, 20 nt, synthetic construct
  source 1..20: mol_type = other RNA
ttcagcacaatactgtctca

SEQ ID NO: 57630 - RNA, 20 nt, synthetic construct
  source 1..20: mol_type = other RNA
ttcagcactgctattgataa

SEQ ID NO: 57631 - RNA, 20 nt, synthetic construct
  source 1..20: mol_type = other RNA
ttcagcagcagagaagtgaa

SEQ ID NO: 57632 - RNA, 20 nt, synthetic construct
  source 1..20: mol_type = other RNA
ttcagcatagcagaacctta

SEQ ID NO: 57633 - RNA, 20 nt, synthetic construct
  source 1..20: mol_type = other RNA
ttcagcatcttcactgacta

SEQ ID NO: 57634 - RNA, 20 nt, synthetic construct
  source 1..20: mol_type = other RNA
ttcagccaaagctggcatgt

SEQ ID NO: 57635 - RNA, 20 nt, synthetic construct
  source 1..20: mol_type = other RNA
ttcagccatcccagctacat

SEQ ID NO: 57636 - RNA, 20 nt, synthetic construct
  source 1..20: mol_type = other RNA
ttcagccctgatagatattg

SEQ ID NO: 57637 - RNA, 20 nt, synthetic construct
  source 1..20: mol_type = other RNA
ttcagcctaagcaagttaca

SEQ ID NO: 57638 - RNA, 20 nt, synthetic construct
  source 1..20: mol_type = other RNA
ttcagcctgcagaaggagaa

SEQ ID NO: 57639 - RNA, 20 nt, synthetic construct
  source 1..20: mol_type = other RNA
ttcagcctgtgtcagtgaca

SEQ ID NO: 57640 - RNA, 20 nt, synthetic construct
  source 1..20: mol_type = other RNA
ttcagcgcttgaacaaatat

SEQ ID NO: 57641 - RNA, 20 nt, synthetic construct
  source 1..20: mol_type = other RNA
ttcagctatggtgttatttg

SEQ ID NO: 57642 - RNA, 20 nt, synthetic construct
  source 1..20: mol_type = other RNA
ttcagctcaaacagcttgac

SEQ ID NO: 57643 - RNA, 20 nt, synthetic construct
  source 1..20: mol_type = other RNA
ttcagcttacagtcatcaca

SEQ ID NO: 57644 - RNA, 20 nt, synthetic construct
  source 1..20: mol_type = other RNA
ttcagctttaaagagaaata

SEQ ID NO: 57645 - RNA, 20 nt, synthetic construct
  source 1..20: mol_type = other RNA
ttcaggaacaccttgaacat

SEQ ID NO: 57646 - RNA, 20 nt, synthetic construct
  source 1..20: mol_type = other RNA
ttcaggaatgcaaagtttcc

SEQ ID NO: 57647 - RNA, 20 nt, synthetic construct
  source 1..20: mol_type = other RNA
ttcaggacactggaggtgca

SEQ ID NO: 57648 - RNA, 20 nt, synthetic construct
  source 1..20: mol_type = other RNA
ttcaggacagattaaaatca

SEQ ID NO: 57649 - RNA, 20 nt, synthetic construct
  source 1..20: mol_type = other RNA
ttcaggacagtcatcctcaa

SEQ ID NO: 57650 - RNA, 20 nt, synthetic construct
  source 1..20: mol_type = other RNA
ttcaggacagttattcttca

SEQ ID NO: 57651 - RNA, 20 nt, synthetic construct
  source 1..20: mol_type = other RNA
ttcaggaccagcttgggcaa

SEQ ID NO: 57652 - RNA, 20 nt, synthetic construct
  source 1..20: mol_type = other RNA
ttcaggactcatgagagctg

SEQ ID NO: 57653 - RNA, 20 nt, synthetic construct
  source 1..20: mol_type = other RNA
ttcaggagttttgcctcttt

SEQ ID NO: 57654 - RNA, 20 nt, synthetic construct
  source 1..20: mol_type = other RNA
ttcagggaaggctgcaagca

SEQ ID NO: 57655 - RNA, 20 nt, synthetic construct
  source 1..20: mol_type = other RNA
ttcagggagaattggtagtc

SEQ ID NO: 57656 - RNA, 20 nt, synthetic construct
  source 1..20: mol_type = other RNA
ttcagggggctaaatgctca

SEQ ID NO: 57657 - RNA, 20 nt, synthetic construct
  source 1..20: mol_type = other RNA
ttcaggggggccactggaaa

SEQ ID NO: 57658 - RNA, 20 nt, synthetic construct
  source 1..20: mol_type = other RNA
ttcaggtattgagcctgttc

SEQ ID NO: 57659 - RNA, 20 nt, synthetic construct
  source 1..20: mol_type = other RNA
ttcaggtctatgtgacagaa

SEQ ID NO: 57660 - RNA, 20 nt, synthetic construct
  source 1..20: mol_type = other RNA
ttcaggtctctctgaaatta

SEQ ID NO: 57661 - RNA, 20 nt, synthetic construct
  source 1..20: mol_type = other RNA
ttcaggtgcctcctgcctca

SEQ ID NO: 57662 - RNA, 20 nt, synthetic construct
  source 1..20: mol_type = other RNA
ttcaggtggtatttaatctg

SEQ ID NO: 57663 - RNA, 20 nt, synthetic construct
  source 1..20: mol_type = other RNA
ttcaggtgtgtaaacactgt

SEQ ID NO: 57664 - RNA, 20 nt, synthetic construct
  source 1..20: mol_type = other RNA
ttcaggttcaagcgactctc

SEQ ID NO: 57665 - RNA, 20 nt, synthetic construct
  source 1..20: mol_type = other RNA
ttcaggttttcgaccaagtt

SEQ ID NO: 57666 - RNA, 20 nt, synthetic construct
  source 1..20: mol_type = other RNA
ttcagtaaatgaaatttgag

SEQ ID NO: 57667 - RNA, 20 nt, synthetic construct
  source 1..20: mol_type = other RNA
ttcagtacacgaaaatatcc

SEQ ID NO: 57668 - RNA, 20 nt, synthetic construct
  source 1..20: mol_type = other RNA
ttcagtatgaatgcacgtga

SEQ ID NO: 57669 - RNA, 20 nt, synthetic construct
  source 1..20: mol_type = other RNA
ttcagtatgtgtctctgaca

SEQ ID NO: 57670 - RNA, 20 nt, synthetic construct
  source 1..20: mol_type = other RNA
ttcagtcaacaccaagcaac

SEQ ID NO: 57671 - RNA, 20 nt, synthetic construct
  source 1..20: mol_type = other RNA
ttcagtcaccaaacgtttag

SEQ ID NO: 57672 - RNA, 20 nt, synthetic construct
  source 1..20: mol_type = other RNA
ttcagtcagttctctgcccc

SEQ ID NO: 57673 - RNA, 20 nt, synthetic construct
  source 1..20: mol_type = other RNA
ttcagtccagatattatcct

SEQ ID NO: 57674 - RNA, 20 nt, synthetic construct
  source 1..20: mol_type = other RNA
ttcagtccctcctttctaga

SEQ ID NO: 57675 - RNA, 20 nt, synthetic construct
  source 1..20: mol_type = other RNA
ttcagtccttaccactgaag

SEQ ID NO: 57676 - RNA, 20 nt, synthetic construct
  source 1..20: mol_type = other RNA
ttcagtcggttcttcaccgt

SEQ ID NO: 57677 - RNA, 20 nt, synthetic construct
  source 1..20: mol_type = other RNA
ttcagtcttggtagtttgca

SEQ ID NO: 57678 - RNA, 20 nt, synthetic construct
  source 1..20: mol_type = other RNA
ttcagtgagtagggaaggtg

SEQ ID NO: 57679 - RNA, 20 nt, synthetic construct
  source 1..20: mol_type = other RNA
ttcagtgccaacacatgggg

SEQ ID NO: 57680 - RNA, 20 nt, synthetic construct
  source 1..20: mol_type = other RNA
ttcagtggtaaggactgaag

SEQ ID NO: 57681 - RNA, 20 nt, synthetic construct
  source 1..20: mol_type = other RNA
ttcagtggtgcaatcacggc

SEQ ID NO: 57682 - RNA, 20 nt, synthetic construct
  source 1..20: mol_type = other RNA
ttcagtggttggaaaacttt

SEQ ID NO: 57683 - RNA, 20 nt, synthetic construct
  source 1..20: mol_type = other RNA
ttcagtgtagtcagacacac

SEQ ID NO: 57684 - RNA, 20 nt, synthetic construct
  source 1..20: mol_type = other RNA
ttcagtgtgtccacacaatg

SEQ ID NO: 57685 - RNA, 20 nt, synthetic construct
  source 1..20: mol_type = other RNA
ttcagttaaaagttttccaa

SEQ ID NO: 57686 - RNA, 20 nt, synthetic construct
  source 1..20: mol_type = other RNA
ttcagttaacttattggaaa

SEQ ID NO: 57687 - RNA, 20 nt, synthetic construct
  source 1..20: mol_type = other RNA
ttcagttctttcggatattt

SEQ ID NO: 57688 - RNA, 20 nt, synthetic construct
  source 1..20: mol_type = other RNA
ttcagttgaaaagtatggtt

SEQ ID NO: 57689 - RNA, 20 nt, synthetic construct
  source 1..20: mol_type = other RNA
ttcagttgcatgaatttgtt

SEQ ID NO: 57690 - RNA, 20 nt, synthetic construct
  source 1..20: mol_type = other RNA
ttcagttggtgaagagagcc

SEQ ID NO: 57691 - RNA, 20 nt, synthetic construct
  source 1..20: mol_type = other RNA
ttcagtttagtaaatctttg

SEQ ID NO: 57692 - RNA, 20 nt, synthetic construct
  source 1..20: mol_type = other RNA
ttcagtttatgggtcaacca

SEQ ID NO: 57693 - RNA, 20 nt, synthetic construct
  source 1..20: mol_type = other RNA
ttcagttttgagtggcatca

SEQ ID NO: 57694 - RNA, 20 nt, synthetic construct
  source 1..20: mol_type = other RNA
ttcagttttgtatatggttt

SEQ ID NO: 57695 - RNA, 20 nt, synthetic construct
  source 1..20: mol_type = other RNA
ttcataaaatgatggcaaca

SEQ ID NO: 57696 - RNA, 20 nt, synthetic construct
  source 1..20: mol_type = other RNA
ttcataaacacagaacacta

SEQ ID NO: 57697 - RNA, 20 nt, synthetic construct
  source 1..20: mol_type = other RNA
ttcataacaaagctctgatg

SEQ ID NO: 57698 - RNA, 20 nt, synthetic construct
  source 1..20: mol_type = other RNA
ttcatacaagttgtgatata

SEQ ID NO: 57699 - RNA, 20 nt, synthetic construct
  source 1..20: mol_type = other RNA
ttcatacgttaactgtattg

SEQ ID NO: 57700 - RNA, 20 nt, synthetic construct
  source 1..20: mol_type = other RNA
ttcatactgaaggcataggg

SEQ ID NO: 57701 - RNA, 20 nt, synthetic construct
  source 1..20: mol_type = other RNA
ttcatagatcaccaggggct

SEQ ID NO: 57702 - RNA, 20 nt, synthetic construct
  source 1..20: mol_type = other RNA
ttcatagatgttatgccccc

SEQ ID NO: 57703 - RNA, 20 nt, synthetic construct
  source 1..20: mol_type = other RNA
ttcatagcagaatggccctg

SEQ ID NO: 57704 - RNA, 20 nt, synthetic construct
  source 1..20: mol_type = other RNA
ttcatagcagcattgtttac

SEQ ID NO: 57705 - RNA, 20 nt, synthetic construct
  source 1..20: mol_type = other RNA
ttcataggaaatacttgatc

SEQ ID NO: 57706 - RNA, 20 nt, synthetic construct
  source 1..20: mol_type = other RNA
ttcataggcatctctccctt

SEQ ID NO: 57707 - RNA, 20 nt, synthetic construct
  source 1..20: mol_type = other RNA
ttcataggtaatactctagt

SEQ ID NO: 57708 - RNA, 20 nt, synthetic construct
  source 1..20: mol_type = other RNA
ttcatagtagctgttgaatt

SEQ ID NO: 57709 - RNA, 20 nt, synthetic construct
  source 1..20: mol_type = other RNA
ttcatagtcatcattattag

SEQ ID NO: 57710 - RNA, 20 nt, synthetic construct
  source 1..20: mol_type = other RNA
ttcatagtcatttgatcttt

SEQ ID NO: 57711 - RNA, 20 nt, synthetic construct
  source 1..20: mol_type = other RNA
ttcatataagtggaatcatt

SEQ ID NO: 57712 - RNA, 20 nt, synthetic construct
  source 1..20: mol_type = other RNA
ttcatataatggagtactat

SEQ ID NO: 57713 - RNA, 20 nt, synthetic construct
  source 1..20: mol_type = other RNA
ttcatatcatcatcttatac

SEQ ID NO: 57714 - RNA, 20 nt, synthetic construct
  source 1..20: mol_type = other RNA
ttcatatctgattttgtgtc

SEQ ID NO: 57715 - RNA, 20 nt, synthetic construct
  source 1..20: mol_type = other RNA
ttcatatgaaatcacacaat

SEQ ID NO: 57716 - RNA, 20 nt, synthetic construct
  source 1..20: mol_type = other RNA
ttcatatgctttgagctaca

SEQ ID NO: 57717 - RNA, 20 nt, synthetic construct
  source 1..20: mol_type = other RNA
ttcatatttcccttttggat

SEQ ID NO: 57718 - RNA, 20 nt, synthetic construct
  source 1..20: mol_type = other RNA
ttcatatttgttcaagcgct

SEQ ID NO: 57719 - RNA, 20 nt, synthetic construct
  source 1..20: mol_type = other RNA
ttcatattttgtgggaattc

SEQ ID NO: 57720 - RNA, 20 nt, synthetic construct
  source 1..20: mol_type = other RNA
ttcatcactcactggcctga

SEQ ID NO: 57721 - RNA, 20 nt, synthetic construct
  source 1..20: mol_type = other RNA
ttcatcagtccctgtgtttt

SEQ ID NO: 57722 - RNA, 20 nt, synthetic construct
  source 1..20: mol_type = other RNA
ttcatcatcttttgcctgga

SEQ ID NO: 57723 - RNA, 20 nt, synthetic construct
  source 1..20: mol_type = other RNA
ttcatccaaacagaaaccct

SEQ ID NO: 57724 - RNA, 20 nt, synthetic construct
  source 1..20: mol_type = other RNA
ttcatccaaattattgacaa

SEQ ID NO: 57725 - RNA, 20 nt, synthetic construct
  source 1..20: mol_type = other RNA
ttcatccaggcaaaagatga

SEQ ID NO: 57726 - RNA, 20 nt, synthetic construct
  source 1..20: mol_type = other RNA
ttcatccagtttaaagcttt

SEQ ID NO: 57727 - RNA, 20 nt, synthetic construct
  source 1..20: mol_type = other RNA
ttcatccatgttgttgaatg

SEQ ID NO: 57728 - RNA, 20 nt, synthetic construct
  source 1..20: mol_type = other RNA
ttcatccctctaaataggta

SEQ ID NO: 57729 - RNA, 20 nt, synthetic construct
  source 1..20: mol_type = other RNA
ttcatcctactagtatttat

SEQ ID NO: 57730 - RNA, 20 nt, synthetic construct
  source 1..20: mol_type = other RNA
ttcatcgtaaaaagccattt

SEQ ID NO: 57731 - RNA, 20 nt, synthetic construct
  source 1..20: mol_type = other RNA
ttcatctaaacgtttggtga

SEQ ID NO: 57732 - RNA, 20 nt, synthetic construct
  source 1..20: mol_type = other RNA
ttcatctatgtcccctgggg

SEQ ID NO: 57733 - RNA, 20 nt, synthetic construct
  source 1..20: mol_type = other RNA
ttcatctctcgatggacatt

SEQ ID NO: 57734 - RNA, 20 nt, synthetic construct
  source 1..20: mol_type = other RNA
ttcatctgcagtgtccatct

SEQ ID NO: 57735 - RNA, 20 nt, synthetic construct
  source 1..20: mol_type = other RNA
ttcatctggaccagttactc

SEQ ID NO: 57736 - RNA, 20 nt, synthetic construct
  source 1..20: mol_type = other RNA
ttcatctgttaatgggcact

SEQ ID NO: 57737 - RNA, 20 nt, synthetic construct
  source 1..20: mol_type = other RNA
ttcatcttgacttcacttcc

SEQ ID NO: 57738 - RNA, 20 nt, synthetic construct
  source 1..20: mol_type = other RNA
ttcatctttcctgatcacac

SEQ ID NO: 57739 - RNA, 20 nt, synthetic construct
  source 1..20: mol_type = other RNA
ttcatgaaatcccctttagt

SEQ ID NO: 57740 - RNA, 20 nt, synthetic construct
  source 1..20: mol_type = other RNA
ttcatgaacaattttctctc

SEQ ID NO: 57741 - RNA, 20 nt, synthetic construct
  source 1..20: mol_type = other RNA
ttcatgaaccttcaccaaag

SEQ ID NO: 57742 - RNA, 20 nt, synthetic construct
  source 1..20: mol_type = other RNA
ttcatgacaagaatctttgg

SEQ ID NO: 57743 - RNA, 20 nt, synthetic construct
  source 1..20: mol_type = other RNA
ttcatgattcagtcttggta

SEQ ID NO: 57744 - RNA, 20 nt, synthetic construct
  source 1..20: mol_type = other RNA
ttcatgatttggtgtgtgca

SEQ ID NO: 57745 - RNA, 20 nt, synthetic construct
  source 1..20: mol_type = other RNA
ttcatgcaactgaaaacatc

SEQ ID NO: 57746 - RNA, 20 nt, synthetic construct
  source 1..20: mol_type = other RNA
ttcatgccatcctggatttg

SEQ ID NO: 57747 - RNA, 20 nt, synthetic construct
  source 1..20: mol_type = other RNA
ttcatgcctttcagcatagc

SEQ ID NO: 57748 - RNA, 20 nt, synthetic construct
  source 1..20: mol_type = other RNA
ttcatgcgacatatcaggga

SEQ ID NO: 57749 - RNA, 20 nt, synthetic construct
  source 1..20: mol_type = other RNA
ttcatgctgggagaccagga

SEQ ID NO: 57750 - RNA, 20 nt, synthetic construct
  source 1..20: mol_type = other RNA
ttcatgctgtgaatttggat

SEQ ID NO: 57751 - RNA, 20 nt, synthetic construct
  source 1..20: mol_type = other RNA
ttcatggactagactgcctg

SEQ ID NO: 57752 - RNA, 20 nt, synthetic construct
  source 1..20: mol_type = other RNA
ttcatggacttcctatttta

SEQ ID NO: 57753 - RNA, 20 nt, synthetic construct
  source 1..20: mol_type = other RNA
ttcatgggaagatgctccct

SEQ ID NO: 57754 - RNA, 20 nt, synthetic construct
  source 1..20: mol_type = other RNA
ttcatgggtggaaattaaac

SEQ ID NO: 57755 - RNA, 20 nt, synthetic construct
  source 1..20: mol_type = other RNA
ttcatgggttgatttttaat

SEQ ID NO: 57756 - RNA, 20 nt, synthetic construct
  source 1..20: mol_type = other RNA
ttcatggtatcaattgtaat

SEQ ID NO: 57757 - RNA, 20 nt, synthetic construct
  source 1..20: mol_type = other RNA
ttcatggttttaatgggcat

SEQ ID NO: 57758 - RNA, 20 nt, synthetic construct
  source 1..20: mol_type = other RNA
ttcatgtaatgcaaactcta

SEQ ID NO: 57759 - RNA, 20 nt, synthetic construct
  source 1..20: mol_type = other RNA
ttcatgtacaatgaattagc

SEQ ID NO: 57760 - RNA, 20 nt, synthetic construct
  source 1..20: mol_type = other RNA
ttcatgtcccctgtccaagt

SEQ ID NO: 57761 - RNA, 20 nt, synthetic construct
  source 1..20: mol_type = other RNA
ttcatgtctgtgtagttcat

SEQ ID NO: 57762 - RNA, 20 nt, synthetic construct
  source 1..20: mol_type = other RNA
ttcatgtgtgcttacacaca

SEQ ID NO: 57763 - RNA, 20 nt, synthetic construct
  source 1..20: mol_type = other RNA
ttcatgttagcataattcga

SEQ ID NO: 57764 - RNA, 20 nt, synthetic construct
  source 1..20: mol_type = other RNA
ttcatgttcaaggtgttcct

SEQ ID NO: 57765 - RNA, 20 nt, synthetic construct
  source 1..20: mol_type = other RNA
ttcatgttgaccatttttat

SEQ ID NO: 57766 - RNA, 20 nt, synthetic construct
  source 1..20: mol_type = other RNA
ttcatgtttgtggttttaac

SEQ ID NO: 57767 - RNA, 20 nt, synthetic construct
  source 1..20: mol_type = other RNA
ttcattacatttgcttaggc

SEQ ID NO: 57768 - RNA, 20 nt, synthetic construct
  source 1..20: mol_type = other RNA
ttcattaccaggctggaaga

SEQ ID NO: 57769 - RNA, 20 nt, synthetic construct
  source 1..20: mol_type = other RNA
ttcattacttttttgtagag

SEQ ID NO: 57770 - RNA, 20 nt, synthetic construct
  source 1..20: mol_type = other RNA
ttcattagaattcaggacag

SEQ ID NO: 57771 - RNA, 20 nt, synthetic construct
  source 1..20: mol_type = other RNA
ttcattaggttgatggctgt

SEQ ID NO: 57772 - RNA, 20 nt, synthetic construct
  source 1..20: mol_type = other RNA
ttcattattaccaggtttta

SEQ ID NO: 57773 - RNA, 20 nt, synthetic construct
  source 1..20: mol_type = other RNA
ttcattcatatttgttcaag

SEQ ID NO: 57774 - RNA, 20 nt, synthetic construct
  source 1..20: mol_type = other RNA
ttcattcatctgttaatggg

SEQ ID NO: 57775 - RNA, 20 nt, synthetic construct
  source 1..20: mol_type = other RNA
ttcattcatgacaagaatct

SEQ ID NO: 57776 - RNA, 20 nt, synthetic construct
  source 1..20: mol_type = other RNA
ttcattccgcgtttattaga

SEQ ID NO: 57777 - RNA, 20 nt, synthetic construct
  source 1..20: mol_type = other RNA
ttcattcgtagcaggtttag

SEQ ID NO: 57778 - RNA, 20 nt, synthetic construct
  source 1..20: mol_type = other RNA
ttcattcgttcaaaacatca

SEQ ID NO: 57779 - RNA, 20 nt, synthetic construct
  source 1..20: mol_type = other RNA
ttcattctacctggagcctg

SEQ ID NO: 57780 - RNA, 20 nt, synthetic construct
  source 1..20: mol_type = other RNA
ttcattcttgacatgattga

SEQ ID NO: 57781 - RNA, 20 nt, synthetic construct
  source 1..20: mol_type = other RNA
ttcattctttttactcgagg

SEQ ID NO: 57782 - RNA, 20 nt, synthetic construct
  source 1..20: mol_type = other RNA
ttcattgtacatgaagtcct

SEQ ID NO: 57783 - RNA, 20 nt, synthetic construct
  source 1..20: mol_type = other RNA
ttcattgttgtgtgttaaat

SEQ ID NO: 57784 - RNA, 20 nt, synthetic construct
  source 1..20: mol_type = other RNA
ttcatttacaaaaacacact

SEQ ID NO: 57785 - RNA, 20 nt, synthetic construct
  source 1..20: mol_type = other RNA
ttcatttactgaaatcctag

SEQ ID NO: 57786 - RNA, 20 nt, synthetic construct
  source 1..20: mol_type = other RNA
ttcatttattctgttgcaaa

SEQ ID NO: 57787 - RNA, 20 nt, synthetic construct
  source 1..20: mol_type = other RNA
ttcatttcaggaatgcaaag

SEQ ID NO: 57788 - RNA, 20 nt, synthetic construct
  source 1..20: mol_type = other RNA
ttcatttccaaagatcatgg

SEQ ID NO: 57789 - RNA, 20 nt, synthetic construct
  source 1..20: mol_type = other RNA
ttcatttctaagccatgttt

SEQ ID NO: 57790 - RNA, 20 nt, synthetic construct
  source 1..20: mol_type = other RNA
ttcatttgagaatttcaggt

SEQ ID NO: 57791 - RNA, 20 nt, synthetic construct
  source 1..20: mol_type = other RNA
ttcatttggcctctgcggcg

SEQ ID NO: 57792 - RNA, 20 nt, synthetic construct
  source 1..20: mol_type = other RNA
ttcatttgtaattcatccta

SEQ ID NO: 57793 - RNA, 20 nt, synthetic construct
  source 1..20: mol_type = other RNA
ttcattttaataagcttcga

SEQ ID NO: 57794 - RNA, 20 nt, synthetic construct
  source 1..20: mol_type = other RNA
ttcattttactgctatacaa

SEQ ID NO: 57795 - RNA, 20 nt, synthetic construct
  source 1..20: mol_type = other RNA
ttccaaaagcaggccctgag

SEQ ID NO: 57796 - RNA, 20 nt, synthetic construct
  source 1..20: mol_type = other RNA
ttccaaaagtgaatatagct

SEQ ID NO: 57797 - RNA, 20 nt, synthetic construct
  source 1..20: mol_type = other RNA
ttccaaaatattgaagaggg

SEQ ID NO: 57798 - RNA, 20 nt, synthetic construct
  source 1..20: mol_type = other RNA
ttccaaacttctgaccttgt

SEQ ID NO: 57799 - RNA, 20 nt, synthetic construct
  source 1..20: mol_type = other RNA
ttccaaagatataaaaatgg

SEQ ID NO: 57800 - RNA, 20 nt, synthetic construct
  source 1..20: mol_type = other RNA
ttccaaagatcatgggtttt

SEQ ID NO: 57801 - RNA, 20 nt, synthetic construct
  source 1..20: mol_type = other RNA
ttccaaagtatgcatagcag

SEQ ID NO: 57802 - RNA, 20 nt, synthetic construct
  source 1..20: mol_type = other RNA
ttccaaataatcccgcacct

SEQ ID NO: 57803 - RNA, 20 nt, synthetic construct
  source 1..20: mol_type = other RNA
ttccaaatgtctgtctttat

SEQ ID NO: 57804 - RNA, 20 nt, synthetic construct
  source 1..20: mol_type = other RNA
ttccaaattagctttctccc

SEQ ID NO: 57805 - RNA, 20 nt, synthetic construct
  source 1..20: mol_type = other RNA
ttccaaattcaaagcaagtt

SEQ ID NO: 57806 - RNA, 20 nt, synthetic construct
  source 1..20: mol_type = other RNA
ttccaacagtttacacgcct

SEQ ID NO: 57807 - RNA, 20 nt, synthetic construct
  source 1..20: mol_type = other RNA
ttccaaccaagcccaacttt

SEQ ID NO: 57808 - RNA, 20 nt, synthetic construct
  source 1..20: mol_type = other RNA
ttccaaccactgaatcagat

SEQ ID NO: 57809 - RNA, 20 nt, synthetic construct
  source 1..20: mol_type = other RNA
ttccaaccatcttcttagtg

SEQ ID NO: 57810 - RNA, 20 nt, synthetic construct
  source 1..20: mol_type = other RNA
ttccaactgtataaatgttc

SEQ ID NO: 57811 - RNA, 20 nt, synthetic construct
  source 1..20: mol_type = other RNA
ttccaagaaccctttgttat

SEQ ID NO: 57812 - RNA, 20 nt, synthetic construct
  source 1..20: mol_type = other RNA
ttccaagagaggaataaatg

SEQ ID NO: 57813 - RNA, 20 nt, synthetic construct
  source 1..20: mol_type = other RNA
ttccaagattgaaaatggtt

SEQ ID NO: 57814 - RNA, 20 nt, synthetic construct
  source 1..20: mol_type = other RNA
ttccaagattttcccaatct

SEQ ID NO: 57815 - RNA, 20 nt, synthetic construct
  source 1..20: mol_type = other RNA
ttccaagccttaaaagtgct

SEQ ID NO: 57816 - RNA, 20 nt, synthetic construct
  source 1..20: mol_type = other RNA
ttccaagtcccggaagctgg

SEQ ID NO: 57817 - RNA, 20 nt, synthetic construct
  source 1..20: mol_type = other RNA
ttccaataagttaactgaaa

SEQ ID NO: 57818 - RNA, 20 nt, synthetic construct
  source 1..20: mol_type = other RNA
ttccaatccgggaacatgac

SEQ ID NO: 57819 - RNA, 20 nt, synthetic construct
  source 1..20: mol_type = other RNA
ttccaatccttccttcatgt

SEQ ID NO: 57820 - RNA, 20 nt, synthetic construct
  source 1..20: mol_type = other RNA
ttccaattgcagaaaaatag

SEQ ID NO: 57821 - RNA, 20 nt, synthetic construct
  source 1..20: mol_type = other RNA
ttccacaaccactggggagt

SEQ ID NO: 57822 - RNA, 20 nt, synthetic construct
  source 1..20: mol_type = other RNA
ttccacagctatcaggcctt

SEQ ID NO: 57823 - RNA, 20 nt, synthetic construct
  source 1..20: mol_type = other RNA
ttccacagtgactttactgt

SEQ ID NO: 57824 - RNA, 20 nt, synthetic construct
  source 1..20: mol_type = other RNA
ttccacataaagtcttgctg

SEQ ID NO: 57825 - RNA, 20 nt, synthetic construct
  source 1..20: mol_type = other RNA
ttccacataattgaacccac

SEQ ID NO: 57826 - RNA, 20 nt, synthetic construct
  source 1..20: mol_type = other RNA
ttccacatattttaaaagtc

SEQ ID NO: 57827 - RNA, 20 nt, synthetic construct
  source 1..20: mol_type = other RNA
ttccacatgttactcattat

SEQ ID NO: 57828 - RNA, 20 nt, synthetic construct
  source 1..20: mol_type = other RNA
ttccacatttctaatttcca

SEQ ID NO: 57829 - RNA, 20 nt, synthetic construct
  source 1..20: mol_type = other RNA
ttccacccaagtggagcctg

SEQ ID NO: 57830 - RNA, 20 nt, synthetic construct
  source 1..20: mol_type = other RNA
ttccacccatgaagccagca

SEQ ID NO: 57831 - RNA, 20 nt, synthetic construct
  source 1..20: mol_type = other RNA
ttccacctccatcactgact

SEQ ID NO: 57832 - RNA, 20 nt, synthetic construct
  source 1..20: mol_type = other RNA
ttccacctgctctttatctc

SEQ ID NO: 57833 - RNA, 20 nt, synthetic construct
  source 1..20: mol_type = other RNA
ttccacgctgtggcttgggt

SEQ ID NO: 57834 - RNA, 20 nt, synthetic construct
  source 1..20: mol_type = other RNA
ttccacggaatgcccctttg

SEQ ID NO: 57835 - RNA, 20 nt, synthetic construct
  source 1..20: mol_type = other RNA
ttccacgggtaaaaataaat

SEQ ID NO: 57836 - RNA, 20 nt, synthetic construct
  source 1..20: mol_type = other RNA
ttccactagtgggatcaaac

SEQ ID NO: 57837 - RNA, 20 nt, synthetic construct
  source 1..20: mol_type = other RNA
ttccactctctggctgcaat

SEQ ID NO: 57838 - RNA, 20 nt, synthetic construct
  source 1..20: mol_type = other RNA
ttccacttatatgaagctaa

SEQ ID NO: 57839 - RNA, 20 nt, synthetic construct
  source 1..20: mol_type = other RNA
ttccactttgaggttattaa

SEQ ID NO: 57840 - RNA, 20 nt, synthetic construct
  source 1..20: mol_type = other RNA
ttccagaaaactggcaatca

SEQ ID NO: 57841 - RNA, 20 nt, synthetic construct
  source 1..20: mol_type = other RNA
ttccagaaacttccaaccat

SEQ ID NO: 57842 - RNA, 20 nt, synthetic construct
  source 1..20: mol_type = other RNA
ttccagaaggagaaaacaaa

SEQ ID NO: 57843 - RNA, 20 nt, synthetic construct
  source 1..20: mol_type = other RNA
ttccagaagtaactcttgag

SEQ ID NO: 57844 - RNA, 20 nt, synthetic construct
  source 1..20: mol_type = other RNA
ttccagacaaaaattttcat

SEQ ID NO: 57845 - RNA, 20 nt, synthetic construct
  source 1..20: mol_type = other RNA
ttccagaccagcagttcaag

SEQ ID NO: 57846 - RNA, 20 nt, synthetic construct
  source 1..20: mol_type = other RNA
ttccagagaattcagagtgg

SEQ ID NO: 57847 - RNA, 20 nt, synthetic construct
  source 1..20: mol_type = other RNA
ttccagagacaaagcataaa

SEQ ID NO: 57848 - RNA, 20 nt, synthetic construct
  source 1..20: mol_type = other RNA
ttccagagggtaacgtgagc

SEQ ID NO: 57849 - RNA, 20 nt, synthetic construct
  source 1..20: mol_type = other RNA
ttccagaggttcttttaaat

SEQ ID NO: 57850 - RNA, 20 nt, synthetic construct
  source 1..20: mol_type = other RNA
ttccagatgttttacacatg

SEQ ID NO: 57851 - RNA, 20 nt, synthetic construct
  source 1..20: mol_type = other RNA
ttccagattgaaatctaggc

SEQ ID NO: 57852 - RNA, 20 nt, synthetic construct
  source 1..20: mol_type = other RNA
ttccagcaagactttatgtg

SEQ ID NO: 57853 - RNA, 20 nt, synthetic construct
  source 1..20: mol_type = other RNA
ttccagcagggtaaagtcaa

SEQ ID NO: 57854 - RNA, 20 nt, synthetic construct
  source 1..20: mol_type = other RNA
ttccagcattttataggcat

SEQ ID NO: 57855 - RNA, 20 nt, synthetic construct
  source 1..20: mol_type = other RNA
ttccagccattctcttctgg

SEQ ID NO: 57856 - RNA, 20 nt, synthetic construct
  source 1..20: mol_type = other RNA
ttccagcctggtaatgaata

SEQ ID NO: 57857 - RNA, 20 nt, synthetic construct
  source 1..20: mol_type = other RNA
ttccagcctttaatttagcg

SEQ ID NO: 57858 - RNA, 20 nt, synthetic construct
  source 1..20: mol_type = other RNA
ttccagcgtgtgcatgaccc

SEQ ID NO: 57859 - RNA, 20 nt, synthetic construct
  source 1..20: mol_type = other RNA
ttccagctcacgttaccctc

SEQ ID NO: 57860 - RNA, 20 nt, synthetic construct
  source 1..20: mol_type = other RNA
ttccaggaaaagcaaatgtc

SEQ ID NO: 57861 - RNA, 20 nt, synthetic construct
  source 1..20: mol_type = other RNA
ttccaggaccaatttaccat

SEQ ID NO: 57862 - RNA, 20 nt, synthetic construct
  source 1..20: mol_type = other RNA
ttccaggatcaaatctggct

SEQ ID NO: 57863 - RNA, 20 nt, synthetic construct
  source 1..20: mol_type = other RNA
ttccaggcctcgctcttggc

SEQ ID NO: 57864 - RNA, 20 nt, synthetic construct
  source 1..20: mol_type = other RNA
ttccaggggggaaaaaacca

SEQ ID NO: 57865 - RNA, 20 nt, synthetic construct
  source 1..20: mol_type = other RNA
ttccagggggtatggagaca

SEQ ID NO: 57866 - RNA, 20 nt, synthetic construct
  source 1..20: mol_type = other RNA
ttccaggtcattacatattt

SEQ ID NO: 57867 - RNA, 20 nt, synthetic construct
  source 1..20: mol_type = other RNA
ttccaggtttacaggatatc

SEQ ID NO: 57868 - RNA, 20 nt, synthetic construct
  source 1..20: mol_type = other RNA
ttccaggttttatctctctc

SEQ ID NO: 57869 - RNA, 20 nt, synthetic construct
  source 1..20: mol_type = other RNA
ttccagtacatctcaattca

SEQ ID NO: 57870 - RNA, 20 nt, synthetic construct
  source 1..20: mol_type = other RNA
ttccagtactttttcatcca

SEQ ID NO: 57871 - RNA, 20 nt, synthetic construct
  source 1..20: mol_type = other RNA
ttccagtatattcatagtag

SEQ ID NO: 57872 - RNA, 20 nt, synthetic construct
  source 1..20: mol_type = other RNA
ttccagtatgatgccactca

SEQ ID NO: 57873 - RNA, 20 nt, synthetic construct
  source 1..20: mol_type = other RNA
ttccagtcctttgtgtcaag

SEQ ID NO: 57874 - RNA, 20 nt, synthetic construct
  source 1..20: mol_type = other RNA
ttccagtcttctcatacaga

SEQ ID NO: 57875 - RNA, 20 nt, synthetic construct
  source 1..20: mol_type = other RNA
ttccagtggcccccctgaaa

SEQ ID NO: 57876 - RNA, 20 nt, synthetic construct
  source 1..20: mol_type = other RNA
ttccagtgtttggtttttat

SEQ ID NO: 57877 - RNA, 20 nt, synthetic construct
  source 1..20: mol_type = other RNA
ttccagtgttttagggggga

SEQ ID NO: 57878 - RNA, 20 nt, synthetic construct
  source 1..20: mol_type = other RNA
ttccagtttatatgcctaga

SEQ ID NO: 57879 - RNA, 20 nt, synthetic construct
  source 1..20: mol_type = other RNA
ttccagtttctctgcttttt

SEQ ID NO: 57880 - RNA, 20 nt, synthetic construct
  source 1..20: mol_type = other RNA
ttccataaaaaccaaacact

SEQ ID NO: 57881 - RNA, 20 nt, synthetic construct
  source 1..20: mol_type = other RNA
ttccataaaaagcgttggag

SEQ ID NO: 57882 - RNA, 20 nt, synthetic construct
  source 1..20: mol_type = other RNA
ttccataaatgtttgctaat

SEQ ID NO: 57883 - RNA, 20 nt, synthetic construct
  source 1..20: mol_type = other RNA
ttccataagatctgtctttg

SEQ ID NO: 57884 - RNA, 20 nt, synthetic construct
  source 1..20: mol_type = other RNA
ttccatacgaaagcctttat

SEQ ID NO: 57885 - RNA, 20 nt, synthetic construct
  source 1..20: mol_type = other RNA
ttccatcagagaggcttttt

SEQ ID NO: 57886 - RNA, 20 nt, synthetic construct
  source 1..20: mol_type = other RNA
ttccatcagtggttgtgctt

SEQ ID NO: 57887 - RNA, 20 nt, synthetic construct
  source 1..20: mol_type = other RNA
ttccatcggtctgtatttct

SEQ ID NO: 57888 - RNA, 20 nt, synthetic construct
  source 1..20: mol_type = other RNA
ttccatctgttatagtgtga

SEQ ID NO: 57889 - RNA, 20 nt, synthetic construct
  source 1..20: mol_type = other RNA
ttccatcttaggccataaat

SEQ ID NO: 57890 - RNA, 20 nt, synthetic construct
  source 1..20: mol_type = other RNA
ttccatgagattacatagca

SEQ ID NO: 57891 - RNA, 20 nt, synthetic construct
  source 1..20: mol_type = other RNA
ttccatggaggggccagttg

SEQ ID NO: 57892 - RNA, 20 nt, synthetic construct
  source 1..20: mol_type = other RNA
ttccatggtatgtgccatct

SEQ ID NO: 57893 - RNA, 20 nt, synthetic construct
  source 1..20: mol_type = other RNA
ttccatgtcttggctattgt

SEQ ID NO: 57894 - RNA, 20 nt, synthetic construct
  source 1..20: mol_type = other RNA
ttccattattccataaaaac

SEQ ID NO: 57895 - RNA, 20 nt, synthetic construct
  source 1..20: mol_type = other RNA
ttccattcaatccttgtaac

SEQ ID NO: 57896 - RNA, 20 nt, synthetic construct
  source 1..20: mol_type = other RNA
ttccattcacacaccctttc

SEQ ID NO: 57897 - RNA, 20 nt, synthetic construct
  source 1..20: mol_type = other RNA
ttccattcatgtaatgcaaa

SEQ ID NO: 57898 - RNA, 20 nt, synthetic construct
  source 1..20: mol_type = other RNA
ttccattccttttcgagact

SEQ ID NO: 57899 - RNA, 20 nt, synthetic construct
  source 1..20: mol_type = other RNA
ttccattgttctctttgttt

SEQ ID NO: 57900 - RNA, 20 nt, synthetic construct
  source 1..20: mol_type = other RNA
ttccatttgttttgtgtttg

SEQ ID NO: 57901 - RNA, 20 nt, synthetic construct
  source 1..20: mol_type = other RNA
ttccattttagatcaagtcc

SEQ ID NO: 57902 - RNA, 20 nt, synthetic construct
  source 1..20: mol_type = other RNA
ttccattttattaatttggc

SEQ ID NO: 57903 - RNA, 20 nt, synthetic construct
  source 1..20: mol_type = other RNA
ttccatttttctgaccaact

SEQ ID NO: 57904 - RNA, 20 nt, synthetic construct
  source 1..20: mol_type = other RNA
ttcccaaagacatcctgatt

SEQ ID NO: 57905 - RNA, 20 nt, synthetic construct
  source 1..20: mol_type = other RNA
ttcccaaagatagactcttc

SEQ ID NO: 57906 - RNA, 20 nt, synthetic construct
  source 1..20: mol_type = other RNA
ttcccaaatccaggatggca

SEQ ID NO: 57907 - RNA, 20 nt, synthetic construct
  source 1..20: mol_type = other RNA
ttcccaaatgtcttaagaag

SEQ ID NO: 57908 - RNA, 20 nt, synthetic construct
  source 1..20: mol_type = other RNA
ttcccaagatcataagcttt

SEQ ID NO: 57909 - RNA, 20 nt, synthetic construct
  source 1..20: mol_type = other RNA
ttcccaagcaagtgtggtgg

SEQ ID NO: 57910 - RNA, 20 nt, synthetic construct
  source 1..20: mol_type = other RNA
ttcccaatcctttgtgcagg

SEQ ID NO: 57911 - RNA, 20 nt, synthetic construct
  source 1..20: mol_type = other RNA
ttcccaatctctggtattct

SEQ ID NO: 57912 - RNA, 20 nt, synthetic construct
  source 1..20: mol_type = other RNA
ttcccacaaaatatgaagca

SEQ ID NO: 57913 - RNA, 20 nt, synthetic construct
  source 1..20: mol_type = other RNA
ttcccactgctatgactaat

SEQ ID NO: 57914 - RNA, 20 nt, synthetic construct
  source 1..20: mol_type = other RNA
ttcccacttcgaaagttcag

SEQ ID NO: 57915 - RNA, 20 nt, synthetic construct
  source 1..20: mol_type = other RNA
ttcccagacagggaatgccc

SEQ ID NO: 57916 - RNA, 20 nt, synthetic construct
  source 1..20: mol_type = other RNA
ttcccagataacagtggtta

SEQ ID NO: 57917 - RNA, 20 nt, synthetic construct
  source 1..20: mol_type = other RNA
ttcccagatacgttaaagga

SEQ ID NO: 57918 - RNA, 20 nt, synthetic construct
  source 1..20: mol_type = other RNA
ttcccaggagctagaacaga

SEQ ID NO: 57919 - RNA, 20 nt, synthetic construct
  source 1..20: mol_type = other RNA
ttcccagggtgtagccacaa

SEQ ID NO: 57920 - RNA, 20 nt, synthetic construct
  source 1..20: mol_type = other RNA
ttcccaggtattttgttctc

SEQ ID NO: 57921 - RNA, 20 nt, synthetic construct
  source 1..20: mol_type = other RNA
ttcccatctcactcacctag

SEQ ID NO: 57922 - RNA, 20 nt, synthetic construct
  source 1..20: mol_type = other RNA
ttcccatctctagttttcca

SEQ ID NO: 57923 - RNA, 20 nt, synthetic construct
  source 1..20: mol_type = other RNA
ttcccatgaacatggtttga

SEQ ID NO: 57924 - RNA, 20 nt, synthetic construct
  source 1..20: mol_type = other RNA
ttcccatgttcactgcagaa

SEQ ID NO: 57925 - RNA, 20 nt, synthetic construct
  source 1..20: mol_type = other RNA
ttcccattaccaaaacctgg

SEQ ID NO: 57926 - RNA, 20 nt, synthetic construct
  source 1..20: mol_type = other RNA
ttcccatttgatttcttctt

SEQ ID NO: 57927 - RNA, 20 nt, synthetic construct
  source 1..20: mol_type = other RNA
ttccccaagccaaattaata

SEQ ID NO: 57928 - RNA, 20 nt, synthetic construct
  source 1..20: mol_type = other RNA
ttccccacataggatagtta

SEQ ID NO: 57929 - RNA, 20 nt, synthetic construct
  source 1..20: mol_type = other RNA
ttccccacctttcctgcccc

SEQ ID NO: 57930 - RNA, 20 nt, synthetic construct
  source 1..20: mol_type = other RNA
ttccccagcctcagcctccc

SEQ ID NO: 57931 - RNA, 20 nt, synthetic construct
  source 1..20: mol_type = other RNA
ttccccagggaaaccttact

SEQ ID NO: 57932 - RNA, 20 nt, synthetic construct
  source 1..20: mol_type = other RNA
ttccccattagagtaagcaa

SEQ ID NO: 57933 - RNA, 20 nt, synthetic construct
  source 1..20: mol_type = other RNA
ttccccattgacaatatagg

SEQ ID NO: 57934 - RNA, 20 nt, synthetic construct
  source 1..20: mol_type = other RNA
ttcccccaaaacttaggagg

SEQ ID NO: 57935 - RNA, 20 nt, synthetic construct
  source 1..20: mol_type = other RNA
ttcccccaaagaaggaaaaa

SEQ ID NO: 57936 - RNA, 20 nt, synthetic construct
  source 1..20: mol_type = other RNA
ttcccccaattaaactatag

SEQ ID NO: 57937 - RNA, 20 nt, synthetic construct
  source 1..20: mol_type = other RNA
ttcccccctaaaacactgga

SEQ ID NO: 57938 - RNA, 20 nt, synthetic construct
  source 1..20: mol_type = other RNA
ttcccccctctctctttctg

SEQ ID NO: 57939 - RNA, 20 nt, synthetic construct
  source 1..20: mol_type = other RNA
ttcccccctggaacaatcaa

SEQ ID NO: 57940 - RNA, 20 nt, synthetic construct
  source 1..20: mol_type = other RNA
ttccccctacacccagttca

SEQ ID NO: 57941 - RNA, 20 nt, synthetic construct
  source 1..20: mol_type = other RNA
ttcccccttatgtgtgtata

SEQ ID NO: 57942 - RNA, 20 nt, synthetic construct
  source 1..20: mol_type = other RNA
ttcccctatactgtaaccct

SEQ ID NO: 57943 - RNA, 20 nt, synthetic construct
  source 1..20: mol_type = other RNA
ttcccctgctgttcccaagc

SEQ ID NO: 57944 - RNA, 20 nt, synthetic construct
  source 1..20: mol_type = other RNA
ttcccctggatcccccagcc

SEQ ID NO: 57945 - RNA, 20 nt, synthetic construct
  source 1..20: mol_type = other RNA
ttcccctggtcgagctgggt

SEQ ID NO: 57946 - RNA, 20 nt, synthetic construct
  source 1..20: mol_type = other RNA
ttccccttatatgggatatc

SEQ ID NO: 57947 - RNA, 20 nt, synthetic construct
  source 1..20: mol_type = other RNA
ttccccttgccaaggcttgc

SEQ ID NO: 57948 - RNA, 20 nt, synthetic construct
  source 1..20: mol_type = other RNA
ttcccctttctttggttttg

SEQ ID NO: 57949 - RNA, 20 nt, synthetic construct
  source 1..20: mol_type = other RNA
ttcccgctacacaagtatta

SEQ ID NO: 57950 - RNA, 20 nt, synthetic construct
  source 1..20: mol_type = other RNA
ttcccggattggaaaactag

SEQ ID NO: 57951 - RNA, 20 nt, synthetic construct
  source 1..20: mol_type = other RNA
ttccctaaagagaatcttaa

SEQ ID NO: 57952 - RNA, 20 nt, synthetic construct
  source 1..20: mol_type = other RNA
ttccctacattgccttcaag

SEQ ID NO: 57953 - RNA, 20 nt, synthetic construct
  source 1..20: mol_type = other RNA
ttccctactcactgaaaccc

SEQ ID NO: 57954 - RNA, 20 nt, synthetic construct
  source 1..20: mol_type = other RNA
ttccctagaacttaaaatat

SEQ ID NO: 57955 - RNA, 20 nt, synthetic construct
  source 1..20: mol_type = other RNA
ttccctagcccagcacttcc

SEQ ID NO: 57956 - RNA, 20 nt, synthetic construct
  source 1..20: mol_type = other RNA
ttccctcagaatttgaggtc

SEQ ID NO: 57957 - RNA, 20 nt, synthetic construct
  source 1..20: mol_type = other RNA
ttccctcagcaaaagcaatt

SEQ ID NO: 57958 - RNA, 20 nt, synthetic construct
  source 1..20: mol_type = other RNA
ttccctcctttttatcaccc

SEQ ID NO: 57959 - RNA, 20 nt, synthetic construct
  source 1..20: mol_type = other RNA
ttccctctacaaaaggagga

SEQ ID NO: 57960 - RNA, 20 nt, synthetic construct
  source 1..20: mol_type = other RNA
ttccctctcagtggtgcttt

SEQ ID NO: 57961 - RNA, 20 nt, synthetic construct
  source 1..20: mol_type = other RNA
ttccctctgagagaagtcag

SEQ ID NO: 57962 - RNA, 20 nt, synthetic construct
  source 1..20: mol_type = other RNA
ttccctctggccttctatat

SEQ ID NO: 57963 - RNA, 20 nt, synthetic construct
  source 1..20: mol_type = other RNA
ttccctcttcaatattttgg

SEQ ID NO: 57964 - RNA, 20 nt, synthetic construct
  source 1..20: mol_type = other RNA
ttccctctttctcaacttcc

SEQ ID NO: 57965 - RNA, 20 nt, synthetic construct
  source 1..20: mol_type = other RNA
ttccctgaacaatgattttc

SEQ ID NO: 57966 - RNA, 20 nt, synthetic construct
  source 1..20: mol_type = other RNA
ttccctgcatacactcattt

SEQ ID NO: 57967 - RNA, 20 nt, synthetic construct
  source 1..20: mol_type = other RNA
ttccctgcttcatctggacc

SEQ ID NO: 57968 - RNA, 20 nt, synthetic construct
  source 1..20: mol_type = other RNA
ttccctggggaataagattt

SEQ ID NO: 57969 - RNA, 20 nt, synthetic construct
  source 1..20: mol_type = other RNA
ttccctgtagagatttttat

SEQ ID NO: 57970 - RNA, 20 nt, synthetic construct
  source 1..20: mol_type = other RNA
ttccctgtctgggaagttat

SEQ ID NO: 57971 - RNA, 20 nt, synthetic construct
  source 1..20: mol_type = other RNA
ttccctgtctgtgatgtaga

SEQ ID NO: 57972 - RNA, 20 nt, synthetic construct
  source 1..20: mol_type = other RNA
ttccctgtgtatgtgtagtc

SEQ ID NO: 57973 - RNA, 20 nt, synthetic construct
  source 1..20: mol_type = other RNA
ttcccttaaaaggaactaat

SEQ ID NO: 57974 - RNA, 20 nt, synthetic construct
  source 1..20: mol_type = other RNA
ttcccttaacctttttcttt

SEQ ID NO: 57975 - RNA, 20 nt, synthetic construct
  source 1..20: mol_type = other RNA
ttcccttaatgttgacatct

SEQ ID NO: 57976 - RNA, 20 nt, synthetic construct
  source 1..20: mol_type = other RNA
ttcccttagctctcatgtca

SEQ ID NO: 57977 - RNA, 20 nt, synthetic construct
  source 1..20: mol_type = other RNA
ttcccttcagtgtagtcaga

SEQ ID NO: 57978 - RNA, 20 nt, synthetic construct
  source 1..20: mol_type = other RNA
ttcccttctcgaagtggtgc

SEQ ID NO: 57979 - RNA, 20 nt, synthetic construct
  source 1..20: mol_type = other RNA
ttcccttctgctcggctctg

SEQ ID NO: 57980 - RNA, 20 nt, synthetic construct
  source 1..20: mol_type = other RNA
ttcccttcttaaatgtgaat

SEQ ID NO: 57981 - RNA, 20 nt, synthetic construct
  source 1..20: mol_type = other RNA
ttcccttgtgcacctcgggt

SEQ ID NO: 57982 - RNA, 20 nt, synthetic construct
  source 1..20: mol_type = other RNA
ttcccttttggatgcagatt

SEQ ID NO: 57983 - RNA, 20 nt, synthetic construct
  source 1..20: mol_type = other RNA
ttcccttttgtagctaatat

SEQ ID NO: 57984 - RNA, 20 nt, synthetic construct
  source 1..20: mol_type = other RNA
ttccgacctgtagattgggc

SEQ ID NO: 57985 - RNA, 20 nt, synthetic construct
  source 1..20: mol_type = other RNA
ttccgatgataccttcttga

SEQ ID NO: 57986 - RNA, 20 nt, synthetic construct
  source 1..20: mol_type = other RNA
ttccgatttctcggccgggc

SEQ ID NO: 57987 - RNA, 20 nt, synthetic construct
  source 1..20: mol_type = other RNA
ttccgattttacttactagt

SEQ ID NO: 57988 - RNA, 20 nt, synthetic construct
  source 1..20: mol_type = other RNA
ttccgcgtttattagaacta

SEQ ID NO: 57989 - RNA, 20 nt, synthetic construct
  source 1..20: mol_type = other RNA
ttccgctaaacattttatta

SEQ ID NO: 57990 - RNA, 20 nt, synthetic construct
  source 1..20: mol_type = other RNA
ttccgctctggttttaaaga

SEQ ID NO: 57991 - RNA, 20 nt, synthetic construct
  source 1..20: mol_type = other RNA
ttccgggacttggaagtgaa

SEQ ID NO: 57992 - RNA, 20 nt, synthetic construct
  source 1..20: mol_type = other RNA
ttccgggatcctgtccaggc

SEQ ID NO: 57993 - RNA, 20 nt, synthetic construct
  source 1..20: mol_type = other RNA
ttccggttctcaggagccta

SEQ ID NO: 57994 - RNA, 20 nt, synthetic construct
  source 1..20: mol_type = other RNA
ttccggttgtatagcagtaa

SEQ ID NO: 57995 - RNA, 20 nt, synthetic construct
  source 1..20: mol_type = other RNA
ttccgtatatatttttatgc

SEQ ID NO: 57996 - RNA, 20 nt, synthetic construct
  source 1..20: mol_type = other RNA
ttccgtatccagtggttttt

SEQ ID NO: 57997 - RNA, 20 nt, synthetic construct
  source 1..20: mol_type = other RNA
ttccgtctagccacttccta

SEQ ID NO: 57998 - RNA, 20 nt, synthetic construct
  source 1..20: mol_type = other RNA
ttccgtctcaaaaaattata

SEQ ID NO: 57999 - RNA, 20 nt, synthetic construct
  source 1..20: mol_type = other RNA
ttccgtctcaagattgtgtg

SEQ ID NO: 58000 - RNA, 20 nt, synthetic construct
  source 1..20: mol_type = other RNA
ttccgtggaaggccttctcc

SEQ ID NO: 58001 - RNA, 20 nt, synthetic construct
  source 1..20: mol_type = other RNA
ttccgtgtgacaaaaagtag

SEQ ID NO: 58002 - RNA, 20 nt, synthetic construct
  source 1..20: mol_type = other RNA
ttccgttgctgcatagtact

SEQ ID NO: 58003 - RNA, 20 nt, synthetic construct
  source 1..20: mol_type = other RNA
ttccgttttgcaagatgcat

SEQ ID NO: 58004 - RNA, 20 nt, synthetic construct
  source 1..20: mol_type = other RNA
ttcctaaaactccccatgca

SEQ ID NO: 58005 - RNA, 20 nt, synthetic construct
  source 1..20: mol_type = other RNA
ttcctaaacctgctacgaat

SEQ ID NO: 58006 - RNA, 20 nt, synthetic construct
  source 1..20: mol_type = other RNA
ttcctaaagagagtgacagc

SEQ ID NO: 58007 - RNA, 20 nt, synthetic construct
  source 1..20: mol_type = other RNA
ttcctaaccactgttatctg

SEQ ID NO: 58008 - RNA, 20 nt, synthetic construct
  source 1..20: mol_type = other RNA
ttcctaactcaagagttact

SEQ ID NO: 58009 - RNA, 20 nt, synthetic construct
  source 1..20: mol_type = other RNA
ttcctaactggtctcctttc

SEQ ID NO: 58010 - RNA, 20 nt, synthetic construct
  source 1..20: mol_type = other RNA
ttcctaagaaagggtgtgtg

SEQ ID NO: 58011 - RNA, 20 nt, synthetic construct
  source 1..20: mol_type = other RNA
ttcctaatctaacatgttac

SEQ ID NO: 58012 - RNA, 20 nt, synthetic construct
  source 1..20: mol_type = other RNA
ttcctacacatatctttagg

SEQ ID NO: 58013 - RNA, 20 nt, synthetic construct
  source 1..20: mol_type = other RNA
ttcctacatactgcactctc

SEQ ID NO: 58014 - RNA, 20 nt, synthetic construct
  source 1..20: mol_type = other RNA
ttcctacccaagcttaggtc

SEQ ID NO: 58015 - RNA, 20 nt, synthetic construct
  source 1..20: mol_type = other RNA
ttcctaccctgaggatataa

SEQ ID NO: 58016 - RNA, 20 nt, synthetic construct
  source 1..20: mol_type = other RNA
ttcctaccctgccttccttg

SEQ ID NO: 58017 - RNA, 20 nt, synthetic construct
  source 1..20: mol_type = other RNA
ttcctactaacaagaaaggg

SEQ ID NO: 58018 - RNA, 20 nt, synthetic construct
  source 1..20: mol_type = other RNA
ttcctactttcttcaaccat

SEQ ID NO: 58019 - RNA, 20 nt, synthetic construct
  source 1..20: mol_type = other RNA
ttcctagaaaatcatacatt

SEQ ID NO: 58020 - RNA, 20 nt, synthetic construct
  source 1..20: mol_type = other RNA
ttcctagactgccaggtagg

SEQ ID NO: 58021 - RNA, 20 nt, synthetic construct
  source 1..20: mol_type = other RNA
ttcctagattccctctggcc

SEQ ID NO: 58022 - RNA, 20 nt, synthetic construct
  source 1..20: mol_type = other RNA
ttcctatatttttccacata

SEQ ID NO: 58023 - RNA, 20 nt, synthetic construct
  source 1..20: mol_type = other RNA
ttcctatcagaagcacacca

SEQ ID NO: 58024 - RNA, 20 nt, synthetic construct
  source 1..20: mol_type = other RNA
ttcctatgaaaatttagctt

SEQ ID NO: 58025 - RNA, 20 nt, synthetic construct
  source 1..20: mol_type = other RNA
ttcctattagaagaatgatt

SEQ ID NO: 58026 - RNA, 20 nt, synthetic construct
  source 1..20: mol_type = other RNA
ttcctattcacactgctcct

SEQ ID NO: 58027 - RNA, 20 nt, synthetic construct
  source 1..20: mol_type = other RNA
ttcctattttataatgggca

SEQ ID NO: 58028 - RNA, 20 nt, synthetic construct
  source 1..20: mol_type = other RNA
ttcctcaggatctacattaa

SEQ ID NO: 58029 - RNA, 20 nt, synthetic construct
  source 1..20: mol_type = other RNA
ttcctcatccctcatatcag

SEQ ID NO: 58030 - RNA, 20 nt, synthetic construct
  source 1..20: mol_type = other RNA
ttcctcatgtccatagttaa

SEQ ID NO: 58031 - RNA, 20 nt, synthetic construct
  source 1..20: mol_type = other RNA
ttcctccctggagaggcaaa

SEQ ID NO: 58032 - RNA, 20 nt, synthetic construct
  source 1..20: mol_type = other RNA
ttcctcccttcagcctgtgt

SEQ ID NO: 58033 - RNA, 20 nt, synthetic construct
  source 1..20: mol_type = other RNA
ttcctcctctggacattatc

SEQ ID NO: 58034 - RNA, 20 nt, synthetic construct
  source 1..20: mol_type = other RNA
ttcctccttctgctcacttt

SEQ ID NO: 58035 - RNA, 20 nt, synthetic construct
  source 1..20: mol_type = other RNA
ttcctccttttgtagaggga

SEQ ID NO: 58036 - RNA, 20 nt, synthetic construct
  source 1..20: mol_type = other RNA
ttcctcggtctacggacgca

SEQ ID NO: 58037 - RNA, 20 nt, synthetic construct
  source 1..20: mol_type = other RNA
ttcctcgttttcaacaaagg

SEQ ID NO: 58038 - RNA, 20 nt, synthetic construct
  source 1..20: mol_type = other RNA
ttcctctcttaaatccgaga

SEQ ID NO: 58039 - RNA, 20 nt, synthetic construct
  source 1..20: mol_type = other RNA
ttcctctcttggaatgtgca

SEQ ID NO: 58040 - RNA, 20 nt, synthetic construct
  source 1..20: mol_type = other RNA
ttcctctggctgacctggta

SEQ ID NO: 58041 - RNA, 20 nt, synthetic construct
  source 1..20: mol_type = other RNA
ttcctcttcctcatccctca

SEQ ID NO: 58042 - RNA, 20 nt, synthetic construct
  source 1..20: mol_type = other RNA
ttcctgaaatgaaccaaact

SEQ ID NO: 58043 - RNA, 20 nt, synthetic construct
  source 1..20: mol_type = other RNA
ttcctgaagtctttggtgat

SEQ ID NO: 58044 - RNA, 20 nt, synthetic construct
  source 1..20: mol_type = other RNA
ttcctgacctctgcagttag

SEQ ID NO: 58045 - RNA, 20 nt, synthetic construct
  source 1..20: mol_type = other RNA
ttcctgataaggggctatct

SEQ ID NO: 58046 - RNA, 20 nt, synthetic construct
  source 1..20: mol_type = other RNA
ttcctgatcacaccctccta

SEQ ID NO: 58047 - RNA, 20 nt, synthetic construct
  source 1..20: mol_type = other RNA
ttcctgatcagcaccctcaa

SEQ ID NO: 58048 - RNA, 20 nt, synthetic construct
  source 1..20: mol_type = other RNA
ttcctgatggacattctgct

SEQ ID NO: 58049 - RNA, 20 nt, synthetic construct
  source 1..20: mol_type = other RNA
ttcctgcacatgcacaaggt

SEQ ID NO: 58050 - RNA, 20 nt, synthetic construct
  source 1..20: mol_type = other RNA
ttcctgcccctccactccac

SEQ ID NO: 58051 - RNA, 20 nt, synthetic construct
  source 1..20: mol_type = other RNA
ttcctgctgtcgtttatgca

SEQ ID NO: 58052 - RNA, 20 nt, synthetic construct
  source 1..20: mol_type = other RNA
ttcctgcttcccccaaagaa

SEQ ID NO: 58053 - RNA, 20 nt, synthetic construct
  source 1..20: mol_type = other RNA
ttcctggaaaacttctctgg

SEQ ID NO: 58054 - RNA, 20 nt, synthetic construct
  source 1..20: mol_type = other RNA
ttcctggactgtgatgactg

SEQ ID NO: 58055 - RNA, 20 nt, synthetic construct
  source 1..20: mol_type = other RNA
ttcctggctctagcccagct

SEQ ID NO: 58056 - RNA, 20 nt, synthetic construct
  source 1..20: mol_type = other RNA
ttcctgggttctcccttcta

SEQ ID NO: 58057 - RNA, 20 nt, synthetic construct
  source 1..20: mol_type = other RNA
ttcctgtatatctcctttta

SEQ ID NO: 58058 - RNA, 20 nt, synthetic construct
  source 1..20: mol_type = other RNA
ttcctgtcttggacccatgc

SEQ ID NO: 58059 - RNA, 20 nt, synthetic construct
  source 1..20: mol_type = other RNA
ttcctgtgatttatgtggca

SEQ ID NO: 58060 - RNA, 20 nt, synthetic construct
  source 1..20: mol_type = other RNA
ttcctgttccgggatcctgt

SEQ ID NO: 58061 - RNA, 20 nt, synthetic construct
  source 1..20: mol_type = other RNA
ttcctgttctttgttagttt

SEQ ID NO: 58062 - RNA, 20 nt, synthetic construct
  source 1..20: mol_type = other RNA
ttcctgttgctttaacctct

SEQ ID NO: 58063 - RNA, 20 nt, synthetic construct
  source 1..20: mol_type = other RNA
ttcctgttttagtggctcac

SEQ ID NO: 58064 - RNA, 20 nt, synthetic construct
  source 1..20: mol_type = other RNA
ttccttaaaaaaggtttttg

SEQ ID NO: 58065 - RNA, 20 nt, synthetic construct
  source 1..20: mol_type = other RNA
ttccttaagcacagactgtg

SEQ ID NO: 58066 - RNA, 20 nt, synthetic construct
  source 1..20: mol_type = other RNA
ttccttaagccatttcaggt

SEQ ID NO: 58067 - RNA, 20 nt, synthetic construct
  source 1..20: mol_type = other RNA
ttccttaatgtttagtagaa

SEQ ID NO: 58068 - RNA, 20 nt, synthetic construct
  source 1..20: mol_type = other RNA
ttccttaccagtgcttgcag

SEQ ID NO: 58069 - RNA, 20 nt, synthetic construct
  source 1..20: mol_type = other RNA
ttccttacctttatctttgg

SEQ ID NO: 58070 - RNA, 20 nt, synthetic construct
  source 1..20: mol_type = other RNA
ttccttagttcgaagttttt

SEQ ID NO: 58071 - RNA, 20 nt, synthetic construct
  source 1..20: mol_type = other RNA
ttccttatagtattacctcc

SEQ ID NO: 58072 - RNA, 20 nt, synthetic construct
  source 1..20: mol_type = other RNA
ttccttatccattcatctct

SEQ ID NO: 58073 - RNA, 20 nt, synthetic construct
  source 1..20: mol_type = other RNA
ttccttatccgataaagggt

SEQ ID NO: 58074 - RNA, 20 nt, synthetic construct
  source 1..20: mol_type = other RNA
ttccttatggatatctggcc

SEQ ID NO: 58075 - RNA, 20 nt, synthetic construct
  source 1..20: mol_type = other RNA
ttccttattgagaagcagaa

SEQ ID NO: 58076 - RNA, 20 nt, synthetic construct
  source 1..20: mol_type = other RNA
ttccttcatgtcccctgtcc

SEQ ID NO: 58077 - RNA, 20 nt, synthetic construct
  source 1..20: mol_type = other RNA
ttccttcatttaacatattg

SEQ ID NO: 58078 - RNA, 20 nt, synthetic construct
  source 1..20: mol_type = other RNA
ttccttccagatgttttaca

SEQ ID NO: 58079 - RNA, 20 nt, synthetic construct
  source 1..20: mol_type = other RNA
ttccttccagtttatatgcc

SEQ ID NO: 58080 - RNA, 20 nt, synthetic construct
  source 1..20: mol_type = other RNA
ttccttcccctttctttggt

SEQ ID NO: 58081 - RNA, 20 nt, synthetic construct
  source 1..20: mol_type = other RNA
ttccttccgacctgtagatt

SEQ ID NO: 58082 - RNA, 20 nt, synthetic construct
  source 1..20: mol_type = other RNA
ttccttcctacacatatctt

SEQ ID NO: 58083 - RNA, 20 nt, synthetic construct
  source 1..20: mol_type = other RNA
ttccttccttgctcaggagt

SEQ ID NO: 58084 - RNA, 20 nt, synthetic construct
  source 1..20: mol_type = other RNA
ttccttcctttgatgactta

SEQ ID NO: 58085 - RNA, 20 nt, synthetic construct
  source 1..20: mol_type = other RNA
ttccttctcttatactagta

SEQ ID NO: 58086 - RNA, 20 nt, synthetic construct
  source 1..20: mol_type = other RNA
ttccttcttaagacatttgg

SEQ ID NO: 58087 - RNA, 20 nt, synthetic construct
  source 1..20: mol_type = other RNA
ttccttcttcacacattaac

SEQ ID NO: 58088 - RNA, 20 nt, synthetic construct
  source 1..20: mol_type = other RNA
ttccttctttgggggaagca

SEQ ID NO: 58089 - RNA, 20 nt, synthetic construct
  source 1..20: mol_type = other RNA
ttccttgatcagcttcctac

SEQ ID NO: 58090 - RNA, 20 nt, synthetic construct
  source 1..20: mol_type = other RNA
ttccttgctatgtaatctca

SEQ ID NO: 58091 - RNA, 20 nt, synthetic construct
  source 1..20: mol_type = other RNA
ttccttgctcaggagtaact

SEQ ID NO: 58092 - RNA, 20 nt, synthetic construct
  source 1..20: mol_type = other RNA
ttccttgcttgtcttgaata

SEQ ID NO: 58093 - RNA, 20 nt, synthetic construct
  source 1..20: mol_type = other RNA
ttccttggagaagagttctg

SEQ ID NO: 58094 - RNA, 20 nt, synthetic construct
  source 1..20: mol_type = other RNA
ttccttgggcacactcccca

SEQ ID NO: 58095 - RNA, 20 nt, synthetic construct
  source 1..20: mol_type = other RNA
ttccttgtcctaaaattcct

SEQ ID NO: 58096 - RNA, 20 nt, synthetic construct
  source 1..20: mol_type = other RNA
ttccttgtgtcttaaattca

SEQ ID NO: 58097 - RNA, 20 nt, synthetic construct
  source 1..20: mol_type = other RNA
ttcctttaacgtatctggga

SEQ ID NO: 58098 - RNA, 20 nt, synthetic construct
  source 1..20: mol_type = other RNA
ttcctttcaaagagacctga

SEQ ID NO: 58099 - RNA, 20 nt, synthetic construct
  source 1..20: mol_type = other RNA
ttcctttcagtcggttcttc

SEQ ID NO: 58100 - RNA, 20 nt, synthetic construct
  source 1..20: mol_type = other RNA
ttcctttctaggcatctatt

SEQ ID NO: 58101 - RNA, 20 nt, synthetic construct
  source 1..20: mol_type = other RNA
ttcctttgatgacttacaga

SEQ ID NO: 58102 - RNA, 20 nt, synthetic construct
  source 1..20: mol_type = other RNA
ttcctttgcctaagtctcag

SEQ ID NO: 58103 - RNA, 20 nt, synthetic construct
  source 1..20: mol_type = other RNA
ttcctttgcctttcactttg

SEQ ID NO: 58104 - RNA, 20 nt, synthetic construct
  source 1..20: mol_type = other RNA
ttccttttaagggaaacact

SEQ ID NO: 58105 - RNA, 20 nt, synthetic construct
  source 1..20: mol_type = other RNA
ttccttttcgagactgagta

SEQ ID NO: 58106 - RNA, 20 nt, synthetic construct
  source 1..20: mol_type = other RNA
ttcctttttcaaataatagc

SEQ ID NO: 58107 - RNA, 20 nt, synthetic construct
  source 1..20: mol_type = other RNA
ttccttttttatgtgctttc

SEQ ID NO: 58108 - RNA, 20 nt, synthetic construct
  source 1..20: mol_type = other RNA
ttcgaaaatgggccaaagac

SEQ ID NO: 58109 - RNA, 20 nt, synthetic construct
  source 1..20: mol_type = other RNA
ttcgaaagttcagatagaat

SEQ ID NO: 58110 - RNA, 20 nt, synthetic construct
  source 1..20: mol_type = other RNA
ttcgaaataatcattgttag

SEQ ID NO: 58111 - RNA, 20 nt, synthetic construct
  source 1..20: mol_type = other RNA
ttcgaactaaggaaagctca

SEQ ID NO: 58112 - RNA, 20 nt, synthetic construct
  source 1..20: mol_type = other RNA
ttcgaagcaaaacatatgtc

SEQ ID NO: 58113 - RNA, 20 nt, synthetic construct
  source 1..20: mol_type = other RNA
ttcgaagcttattaaaatga

SEQ ID NO: 58114 - RNA, 20 nt, synthetic construct
  source 1..20: mol_type = other RNA
ttcgaagtgggaagcaaagg

SEQ ID NO: 58115 - RNA, 20 nt, synthetic construct
  source 1..20: mol_type = other RNA
ttcgaattagattgttttgt

SEQ ID NO: 58116 - RNA, 20 nt, synthetic construct
  source 1..20: mol_type = other RNA
ttcgaattatgctaacatga

SEQ ID NO: 58117 - RNA, 20 nt, synthetic construct
  source 1..20: mol_type = other RNA
ttcgacagtcccttgcctga

SEQ ID NO: 58118 - RNA, 20 nt, synthetic construct
  source 1..20: mol_type = other RNA
ttcgaccaagttactagaag

SEQ ID NO: 58119 - RNA, 20 nt, synthetic construct
  source 1..20: mol_type = other RNA
ttcgagaagggaagtaaaga

SEQ ID NO: 58120 - RNA, 20 nt, synthetic construct
  source 1..20: mol_type = other RNA
ttcgagactgagtaatattc

SEQ ID NO: 58121 - RNA, 20 nt, synthetic construct
  source 1..20: mol_type = other RNA
ttcgaggcatctagttacca

SEQ ID NO: 58122 - RNA, 20 nt, synthetic construct
  source 1..20: mol_type = other RNA
ttcgagggggctgagtatgg

SEQ ID NO: 58123 - RNA, 20 nt, synthetic construct
  source 1..20: mol_type = other RNA
ttcgaggtcgcaccctgagc

SEQ ID NO: 58124 - RNA, 20 nt, synthetic construct
  source 1..20: mol_type = other RNA
ttcgagttctgggagttcat

SEQ ID NO: 58125 - RNA, 20 nt, synthetic construct
  source 1..20: mol_type = other RNA
ttcgattaaaataacacgca

SEQ ID NO: 58126 - RNA, 20 nt, synthetic construct
  source 1..20: mol_type = other RNA
ttcgcaaagcaacatgctaa

SEQ ID NO: 58127 - RNA, 20 nt, synthetic construct
  source 1..20: mol_type = other RNA
ttcgcaaagtaaaaagcact

SEQ ID NO: 58128 - RNA, 20 nt, synthetic construct
  source 1..20: mol_type = other RNA
ttcgcagggtgaaacttgaa

SEQ ID NO: 58129 - RNA, 20 nt, synthetic construct
  source 1..20: mol_type = other RNA
ttcgcataaccaaattattt

SEQ ID NO: 58130 - RNA, 20 nt, synthetic construct
  source 1..20: mol_type = other RNA
ttcgcatcattcaaatgata

SEQ ID NO: 58131 - RNA, 20 nt, synthetic construct
  source 1..20: mol_type = other RNA
ttcgcattgctaattcattg

SEQ ID NO: 58132 - RNA, 20 nt, synthetic construct
  source 1..20: mol_type = other RNA
ttcgcctagataagaaaatg

SEQ ID NO: 58133 - RNA, 20 nt, synthetic construct
  source 1..20: mol_type = other RNA
ttcgccttctcagaaggaca

SEQ ID NO: 58134 - RNA, 20 nt, synthetic construct
  source 1..20: mol_type = other RNA
ttcgcctttctcgcagcggg

SEQ ID NO: 58135 - RNA, 20 nt, synthetic construct
  source 1..20: mol_type = other RNA
ttcgcctttgttgccaggtg

SEQ ID NO: 58136 - RNA, 20 nt, synthetic construct
  source 1..20: mol_type = other RNA
ttcgcgcgcggcagggatgc

SEQ ID NO: 58137 - RNA, 20 nt, synthetic construct
  source 1..20: mol_type = other RNA
ttcgcgggcaccttccctac

SEQ ID NO: 58138 - RNA, 20 nt, synthetic construct
  source 1..20: mol_type = other RNA
ttcgctaatctcaatcaggg

SEQ ID NO: 58139 - RNA, 20 nt, synthetic construct
  source 1..20: mol_type = other RNA
ttcgctatcagtagtttgct

SEQ ID NO: 58140 - RNA, 20 nt, synthetic construct
  source 1..20: mol_type = other RNA
ttcgctcttttaaaaattac

SEQ ID NO: 58141 - RNA, 20 nt, synthetic construct
  source 1..20: mol_type = other RNA
ttcgcttttggagctataat

SEQ ID NO: 58142 - RNA, 20 nt, synthetic construct
  source 1..20: mol_type = other RNA
ttcggatatttactaagaag

SEQ ID NO: 58143 - RNA, 20 nt, synthetic construct
  source 1..20: mol_type = other RNA
ttcggccaagatctgttttt

SEQ ID NO: 58144 - RNA, 20 nt, synthetic construct
  source 1..20: mol_type = other RNA
ttcggctctgtgctgagatg

SEQ ID NO: 58145 - RNA, 20 nt, synthetic construct
  source 1..20: mol_type = other RNA
ttcgggggagagcactggtt

SEQ ID NO: 58146 - RNA, 20 nt, synthetic construct
  source 1..20: mol_type = other RNA
ttcgggtgtcagaattccat

SEQ ID NO: 58147 - RNA, 20 nt, synthetic construct
  source 1..20: mol_type = other RNA
ttcggtggcattaaggacat

SEQ ID NO: 58148 - RNA, 20 nt, synthetic construct
  source 1..20: mol_type = other RNA
ttcgtagcaggtttaggaag

SEQ ID NO: 58149 - RNA, 20 nt, synthetic construct
  source 1..20: mol_type = other RNA
ttcgtatcttttaacagatg

SEQ ID NO: 58150 - RNA, 20 nt, synthetic construct
  source 1..20: mol_type = other RNA
ttcgtatggaagatgggact

SEQ ID NO: 58151 - RNA, 20 nt, synthetic construct
  source 1..20: mol_type = other RNA
ttcgtcaaggggagaggcct

SEQ ID NO: 58152 - RNA, 20 nt, synthetic construct
  source 1..20: mol_type = other RNA
ttcgtcatctataaggtaat

SEQ ID NO: 58153 - RNA, 20 nt, synthetic construct
  source 1..20: mol_type = other RNA
ttcgtccctaaacactgtag

SEQ ID NO: 58154 - RNA, 20 nt, synthetic construct
  source 1..20: mol_type = other RNA
ttcgtgagggtttcagtgag

SEQ ID NO: 58155 - RNA, 20 nt, synthetic construct
  source 1..20: mol_type = other RNA
ttcgtgtactgaaaccagtg

SEQ ID NO: 58156 - RNA, 20 nt, synthetic construct
  source 1..20: mol_type = other RNA
ttcgtgtgtggagtggggca

SEQ ID NO: 58157 - RNA, 20 nt, synthetic construct
  source 1..20: mol_type = other RNA
ttcgttaatacttgtgtagc

SEQ ID NO: 58158 - RNA, 20 nt, synthetic construct
  source 1..20: mol_type = other RNA
ttcgttcaaaacatcatcta

SEQ ID NO: 58159 - RNA, 20 nt, synthetic construct
  source 1..20: mol_type = other RNA
ttcgttcagtttagtaaatc

SEQ ID NO: 58160 - RNA, 20 nt, synthetic construct
  source 1..20: mol_type = other RNA
ttcgttccagcagggtaaag

SEQ ID NO: 58161 - RNA, 20 nt, synthetic construct
  source 1..20: mol_type = other RNA
ttcgtttgaggcttttcata

SEQ ID NO: 58162 - RNA, 20 nt, synthetic construct
  source 1..20: mol_type = other RNA
ttctaaaaacgtgcaaacta

SEQ ID NO: 58163 - RNA, 20 nt, synthetic construct
  source 1..20: mol_type = other RNA
ttctaaaataacagaagaag

SEQ ID NO: 58164 - RNA, 20 nt, synthetic construct
  source 1..20: mol_type = other RNA
ttctaaaatcatcacagtat

SEQ ID NO: 58165 - RNA, 20 nt, synthetic construct
  source 1..20: mol_type = other RNA
ttctaaacacacgggctggg

SEQ ID NO: 58166 - RNA, 20 nt, synthetic construct
  source 1..20: mol_type = other RNA
ttctaaacctgaggtcttta

SEQ ID NO: 58167 - RNA, 20 nt, synthetic construct
  source 1..20: mol_type = other RNA
ttctaaaccttaaaagagtg

SEQ ID NO: 58168 - RNA, 20 nt, synthetic construct
  source 1..20: mol_type = other RNA
ttctaaactggttttcctga

SEQ ID NO: 58169 - RNA, 20 nt, synthetic construct
  source 1..20: mol_type = other RNA
ttctaaagttagaagtatcc

SEQ ID NO: 58170 - RNA, 20 nt, synthetic construct
  source 1..20: mol_type = other RNA
ttctaaatcaacagtgtact

SEQ ID NO: 58171 - RNA, 20 nt, synthetic construct
  source 1..20: mol_type = other RNA
ttctaaattgaacagcctaa

SEQ ID NO: 58172 - RNA, 20 nt, synthetic construct
  source 1..20: mol_type = other RNA
ttctaaattgcctataattc

SEQ ID NO: 58173 - RNA, 20 nt, synthetic construct
  source 1..20: mol_type = other RNA
ttctaacaagaagctgtttt

SEQ ID NO: 58174 - RNA, 20 nt, synthetic construct
  source 1..20: mol_type = other RNA
ttctaacattatcttctacc

SEQ ID NO: 58175 - RNA, 20 nt, synthetic construct
  source 1..20: mol_type = other RNA
ttctaaccctcaaatgccat

SEQ ID NO: 58176 - RNA, 20 nt, synthetic construct
  source 1..20: mol_type = other RNA
ttctaagagccaaagacatt

SEQ ID NO: 58177 - RNA, 20 nt, synthetic construct
  source 1..20: mol_type = other RNA
ttctaagccatgtttctcct

SEQ ID NO: 58178 - RNA, 20 nt, synthetic construct
  source 1..20: mol_type = other RNA
ttctaagctaagagttttat

SEQ ID NO: 58179 - RNA, 20 nt, synthetic construct
  source 1..20: mol_type = other RNA
ttctaaggttctgctatgct

SEQ ID NO: 58180 - RNA, 20 nt, synthetic construct
  source 1..20: mol_type = other RNA
ttctaagtttgccaaagatt

SEQ ID NO: 58181 - RNA, 20 nt, synthetic construct
  source 1..20: mol_type = other RNA
ttctaataaacgcggaatga

SEQ ID NO: 58182 - RNA, 20 nt, synthetic construct
  source 1..20: mol_type = other RNA
ttctaataggaagtggctag

SEQ ID NO: 58183 - RNA, 20 nt, synthetic construct
  source 1..20: mol_type = other RNA
ttctaatcctttgcacacac

SEQ ID NO: 58184 - RNA, 20 nt, synthetic construct
  source 1..20: mol_type = other RNA
ttctaatgaactcccagaac

SEQ ID NO: 58185 - RNA, 20 nt, synthetic construct
  source 1..20: mol_type = other RNA
ttctaatgcccattaaaacc

SEQ ID NO: 58186 - RNA, 20 nt, synthetic construct
  source 1..20: mol_type = other RNA
ttctaatgtgcaaggagaga

SEQ ID NO: 58187 - RNA, 20 nt, synthetic construct
  source 1..20: mol_type = other RNA
ttctaattagaaactggtga

SEQ ID NO: 58188 - RNA, 20 nt, synthetic construct
  source 1..20: mol_type = other RNA
ttctaattctgacaactggg

SEQ ID NO: 58189 - RNA, 20 nt, synthetic construct
  source 1..20: mol_type = other RNA
ttctaatttccaagaaccct

SEQ ID NO: 58190 - RNA, 20 nt, synthetic construct
  source 1..20: mol_type = other RNA
ttctaatttgtgaaccttga

SEQ ID NO: 58191 - RNA, 20 nt, synthetic construct
  source 1..20: mol_type = other RNA
ttctacaatggttgaactag

SEQ ID NO: 58192 - RNA, 20 nt, synthetic construct
  source 1..20: mol_type = other RNA
ttctacacaacatgttttat

SEQ ID NO: 58193 - RNA, 20 nt, synthetic construct
  source 1..20: mol_type = other RNA
ttctacagaaaacccttcat

SEQ ID NO: 58194 - RNA, 20 nt, synthetic construct
  source 1..20: mol_type = other RNA
ttctacagaatgttcaagta

SEQ ID NO: 58195 - RNA, 20 nt, synthetic construct
  source 1..20: mol_type = other RNA
ttctacagtattacacagaa

SEQ ID NO: 58196 - RNA, 20 nt, synthetic construct
  source 1..20: mol_type = other RNA
ttctacatccccccacccct

SEQ ID NO: 58197 - RNA, 20 nt, synthetic construct
  source 1..20: mol_type = other RNA
ttctacccactattgaaagc

SEQ ID NO: 58198 - RNA, 20 nt, synthetic construct
  source 1..20: mol_type = other RNA
ttctacctggagcctgagga

SEQ ID NO: 58199 - RNA, 20 nt, synthetic construct
  source 1..20: mol_type = other RNA
ttctaccttgaaaatgccct

SEQ ID NO: 58200 - RNA, 20 nt, synthetic construct
  source 1..20: mol_type = other RNA
ttctacctttggctactgta

SEQ ID NO: 58201 - RNA, 20 nt, synthetic construct
  source 1..20: mol_type = other RNA
ttctactaaacattaaggaa

SEQ ID NO: 58202 - RNA, 20 nt, synthetic construct
  source 1..20: mol_type = other RNA
ttctactagtataagagaag

SEQ ID NO: 58203 - RNA, 20 nt, synthetic construct
  source 1..20: mol_type = other RNA
ttctactcactgtactactg

SEQ ID NO: 58204 - RNA, 20 nt, synthetic construct
  source 1..20: mol_type = other RNA
ttctactggggtcttagttc

SEQ ID NO: 58205 - RNA, 20 nt, synthetic construct
  source 1..20: mol_type = other RNA
ttctactgtgaattcactaa

SEQ ID NO: 58206 - RNA, 20 nt, synthetic construct
  source 1..20: mol_type = other RNA
ttctacttatcttttctagt

SEQ ID NO: 58207 - RNA, 20 nt, synthetic construct
  source 1..20: mol_type = other RNA
ttctagaaaggagggactga

SEQ ID NO: 58208 - RNA, 20 nt, synthetic construct
  source 1..20: mol_type = other RNA
ttctagaatgcatccctcct

SEQ ID NO: 58209 - RNA, 20 nt, synthetic construct
  source 1..20: mol_type = other RNA
ttctagagatttgctgtata

SEQ ID NO: 58210 - RNA, 20 nt, synthetic construct
  source 1..20: mol_type = other RNA
ttctagattcatatgctttg

SEQ ID NO: 58211 - RNA, 20 nt, synthetic construct
  source 1..20: mol_type = other RNA
ttctagccaaagcaagcctt

SEQ ID NO: 58212 - RNA, 20 nt, synthetic construct
  source 1..20: mol_type = other RNA
ttctagccataatccttaga

SEQ ID NO: 58213 - RNA, 20 nt, synthetic construct
  source 1..20: mol_type = other RNA
ttctagcctccagaaaacca

SEQ ID NO: 58214 - RNA, 20 nt, synthetic construct
  source 1..20: mol_type = other RNA
ttctagctcctgggaaaagg

SEQ ID NO: 58215 - RNA, 20 nt, synthetic construct
  source 1..20: mol_type = other RNA
ttctagctttcagcactgct

SEQ ID NO: 58216 - RNA, 20 nt, synthetic construct
  source 1..20: mol_type = other RNA
ttctaggaaccatattagag

SEQ ID NO: 58217 - RNA, 20 nt, synthetic construct
  source 1..20: mol_type = other RNA
ttctaggcatctatttcccc

SEQ ID NO: 58218 - RNA, 20 nt, synthetic construct
  source 1..20: mol_type = other RNA
ttctaggccctaaccccaga

SEQ ID NO: 58219 - RNA, 20 nt, synthetic construct
  source 1..20: mol_type = other RNA
ttctaggtagtttctttgaa

SEQ ID NO: 58220 - RNA, 20 nt, synthetic construct
  source 1..20: mol_type = other RNA
ttctagtaacttggtcgaaa

SEQ ID NO: 58221 - RNA, 20 nt, synthetic construct
  source 1..20: mol_type = other RNA
ttctagtcacatttgcttta

SEQ ID NO: 58222 - RNA, 20 nt, synthetic construct
  source 1..20: mol_type = other RNA
ttctagtgatgggagatgga

SEQ ID NO: 58223 - RNA, 20 nt, synthetic construct
  source 1..20: mol_type = other RNA
ttctagttaataaaggtgct

SEQ ID NO: 58224 - RNA, 20 nt, synthetic construct
  source 1..20: mol_type = other RNA
ttctagttagtttgttgacc

SEQ ID NO: 58225 - RNA, 20 nt, synthetic construct
  source 1..20: mol_type = other RNA
ttctagttctaataaacgcg

SEQ ID NO: 58226 - RNA, 20 nt, synthetic construct
  source 1..20: mol_type = other RNA
ttctagttctagctctgtct

SEQ ID NO: 58227 - RNA, 20 nt, synthetic construct
  source 1..20: mol_type = other RNA
ttctagtttgaggtgtacaa

SEQ ID NO: 58228 - RNA, 20 nt, synthetic construct
  source 1..20: mol_type = other RNA
ttctatacttcatctttcct

SEQ ID NO: 58229 - RNA, 20 nt, synthetic construct
  source 1..20: mol_type = other RNA
ttctataggtagtacatatt

SEQ ID NO: 58230 - RNA, 20 nt, synthetic construct
  source 1..20: mol_type = other RNA
ttctatagtcattccgctaa

SEQ ID NO: 58231 - RNA, 20 nt, synthetic construct
  source 1..20: mol_type = other RNA
ttctatagtggctgcaccat

SEQ ID NO: 58232 - RNA, 20 nt, synthetic construct
  source 1..20: mol_type = other RNA
ttctatcatcaagacagagc

SEQ ID NO: 58233 - RNA, 20 nt, synthetic construct
  source 1..20: mol_type = other RNA
ttctatccagtgacacctga

SEQ ID NO: 58234 - RNA, 20 nt, synthetic construct
  source 1..20: mol_type = other RNA
ttctatctctcagatctgag

SEQ ID NO: 58235 - RNA, 20 nt, synthetic construct
  source 1..20: mol_type = other RNA
ttctatctgaacattttagc

SEQ ID NO: 58236 - RNA, 20 nt, synthetic construct
  source 1..20: mol_type = other RNA
ttctatctgaactttcgaag

SEQ ID NO: 58237 - RNA, 20 nt, synthetic construct
  source 1..20: mol_type = other RNA
ttctatgtgacaaacacttt

SEQ ID NO: 58238 - RNA, 20 nt, synthetic construct
  source 1..20: mol_type = other RNA
ttctattcattaccaggctg

SEQ ID NO: 58239 - RNA, 20 nt, synthetic construct
  source 1..20: mol_type = other RNA
ttctattccagagaattcag

SEQ ID NO: 58240 - RNA, 20 nt, synthetic construct
  source 1..20: mol_type = other RNA
ttctattccattgttctctt

SEQ ID NO: 58241 - RNA, 20 nt, synthetic construct
  source 1..20: mol_type = other RNA
ttctattcccctggatcccc

SEQ ID NO: 58242 - RNA, 20 nt, synthetic construct
  source 1..20: mol_type = other RNA
ttctatttctttccattcaa

SEQ ID NO: 58243 - RNA, 20 nt, synthetic construct
  source 1..20: mol_type = other RNA
ttctatttttctgcaattgg

SEQ ID NO: 58244 - RNA, 20 nt, synthetic construct
  source 1..20: mol_type = other RNA
ttctcaaaaatttaagcaca

SEQ ID NO: 58245 - RNA, 20 nt, synthetic construct
  source 1..20: mol_type = other RNA
ttctcaaacaggatacaaaa

SEQ ID NO: 58246 - RNA, 20 nt, synthetic construct
  source 1..20: mol_type = other RNA
ttctcaaactgtgtgcttgg

SEQ ID NO: 58247 - RNA, 20 nt, synthetic construct
  source 1..20: mol_type = other RNA
ttctcaaagcccaccagcat

SEQ ID NO: 58248 - RNA, 20 nt, synthetic construct
  source 1..20: mol_type = other RNA
ttctcaaatgaacaggttct

SEQ ID NO: 58249 - RNA, 20 nt, synthetic construct
  source 1..20: mol_type = other RNA
ttctcaacactgtgttcttt

SEQ ID NO: 58250 - RNA, 20 nt, synthetic construct
  source 1..20: mol_type = other RNA
ttctcaacttagccttggta

SEQ ID NO: 58251 - RNA, 20 nt, synthetic construct
  source 1..20: mol_type = other RNA
ttctcaacttcctgttttag

SEQ ID NO: 58252 - RNA, 20 nt, synthetic construct
  source 1..20: mol_type = other RNA
ttctcaataaggaaagcacg

SEQ ID NO: 58253 - RNA, 20 nt, synthetic construct
  source 1..20: mol_type = other RNA
ttctcaatcccttccccacc

SEQ ID NO: 58254 - RNA, 20 nt, synthetic construct
  source 1..20: mol_type = other RNA
ttctcaccaacatccacagc

SEQ ID NO: 58255 - RNA, 20 nt, synthetic construct
  source 1..20: mol_type = other RNA
ttctcagatctgttgcagtc

SEQ ID NO: 58256 - RNA, 20 nt, synthetic construct
  source 1..20: mol_type = other RNA
ttctcagctatagcttctga

SEQ ID NO: 58257 - RNA, 20 nt, synthetic construct
  source 1..20: mol_type = other RNA
ttctcaggagcctagtcatc

SEQ ID NO: 58258 - RNA, 20 nt, synthetic construct
  source 1..20: mol_type = other RNA
ttctcagggcctgcttttgg

SEQ ID NO: 58259 - RNA, 20 nt, synthetic construct
  source 1..20: mol_type = other RNA
ttctcaggggtaaaggggat

SEQ ID NO: 58260 - RNA, 20 nt, synthetic construct
  source 1..20: mol_type = other RNA
ttctcagtatcctttcaagg

SEQ ID NO: 58261 - RNA, 20 nt, synthetic construct
  source 1..20: mol_type = other RNA
ttctcagttgcagcatgctc

SEQ ID NO: 58262 - RNA, 20 nt, synthetic construct
  source 1..20: mol_type = other RNA
ttctcatactttgtcaggca

SEQ ID NO: 58263 - RNA, 20 nt, synthetic construct
  source 1..20: mol_type = other RNA
ttctcatagtcttccaaaat

SEQ ID NO: 58264 - RNA, 20 nt, synthetic construct
  source 1..20: mol_type = other RNA
ttctcatattattttttccc

SEQ ID NO: 58265 - RNA, 20 nt, synthetic construct
  source 1..20: mol_type = other RNA
ttctcatctgtcactttcct

SEQ ID NO: 58266 - RNA, 20 nt, synthetic construct
  source 1..20: mol_type = other RNA
ttctcatgtatgttttagcc

SEQ ID NO: 58267 - RNA, 20 nt, synthetic construct
  source 1..20: mol_type = other RNA
ttctcattagttatctctta

SEQ ID NO: 58268 - RNA, 20 nt, synthetic construct
  source 1..20: mol_type = other RNA
ttctcattcttctctaatgt

SEQ ID NO: 58269 - RNA, 20 nt, synthetic construct
  source 1..20: mol_type = other RNA
ttctcatttttcaggggggc

SEQ ID NO: 58270 - RNA, 20 nt, synthetic construct
  source 1..20: mol_type = other RNA
ttctccaaggaaagtgtgct

SEQ ID NO: 58271 - RNA, 20 nt, synthetic construct
  source 1..20: mol_type = other RNA
ttctccaagttattacaaaa

SEQ ID NO: 58272 - RNA, 20 nt, synthetic construct
  source 1..20: mol_type = other RNA
ttctccacatccttgccaac

SEQ ID NO: 58273 - RNA, 20 nt, synthetic construct
  source 1..20: mol_type = other RNA
ttctccactttcatgatttg

SEQ ID NO: 58274 - RNA, 20 nt, synthetic construct
  source 1..20: mol_type = other RNA
ttctccaggggcggccccgc

SEQ ID NO: 58275 - RNA, 20 nt, synthetic construct
  source 1..20: mol_type = other RNA
ttctccagtcccactgacag

SEQ ID NO: 58276 - RNA, 20 nt, synthetic construct
  source 1..20: mol_type = other RNA
ttctcccaaggttgcctgtt

SEQ ID NO: 58277 - RNA, 20 nt, synthetic construct
  source 1..20: mol_type = other RNA
ttctcccagctgtccaacaa

SEQ ID NO: 58278 - RNA, 20 nt, synthetic construct
  source 1..20: mol_type = other RNA
ttctcccaggtcagtagtac

SEQ ID NO: 58279 - RNA, 20 nt, synthetic construct
  source 1..20: mol_type = other RNA
ttctcccagttgtcagaatt

SEQ ID NO: 58280 - RNA, 20 nt, synthetic construct
  source 1..20: mol_type = other RNA
ttctccctcttcgctctttt

SEQ ID NO: 58281 - RNA, 20 nt, synthetic construct
  source 1..20: mol_type = other RNA
ttctccctgaaattgtcaga

SEQ ID NO: 58282 - RNA, 20 nt, synthetic construct
  source 1..20: mol_type = other RNA
ttctcccttctattccattg

SEQ ID NO: 58283 - RNA, 20 nt, synthetic construct
  source 1..20: mol_type = other RNA
ttctcctaagtcttcttcta

SEQ ID NO: 58284 - RNA, 20 nt, synthetic construct
  source 1..20: mol_type = other RNA
ttctcctccaacccattcca

SEQ ID NO: 58285 - RNA, 20 nt, synthetic construct
  source 1..20: mol_type = other RNA
ttctcctgcatggggagttt

SEQ ID NO: 58286 - RNA, 20 nt, synthetic construct
  source 1..20: mol_type = other RNA
ttctcctgtgtgcatgctcc

SEQ ID NO: 58287 - RNA, 20 nt, synthetic construct
  source 1..20: mol_type = other RNA
ttctccttctgcaggctgaa

SEQ ID NO: 58288 - RNA, 20 nt, synthetic construct
  source 1..20: mol_type = other RNA
ttctccttctggaagatttc

SEQ ID NO: 58289 - RNA, 20 nt, synthetic construct
  source 1..20: mol_type = other RNA
ttctcgaagtggtgcttgaa

SEQ ID NO: 58290 - RNA, 20 nt, synthetic construct
  source 1..20: mol_type = other RNA
ttctcgacacacaatccaag

SEQ ID NO: 58291 - RNA, 20 nt, synthetic construct
  source 1..20: mol_type = other RNA
ttctcgcagcggggatgctc

SEQ ID NO: 58292 - RNA, 20 nt, synthetic construct
  source 1..20: mol_type = other RNA
ttctcgtgcatgtctgcagg

SEQ ID NO: 58293 - RNA, 20 nt, synthetic construct
  source 1..20: mol_type = other RNA
ttctcgtgtgagctctagcc

SEQ ID NO: 58294 - RNA, 20 nt, synthetic construct
  source 1..20: mol_type = other RNA
ttctcgttcatgttcaaggt

SEQ ID NO: 58295 - RNA, 20 nt, synthetic construct
  source 1..20: mol_type = other RNA
ttctctaatagctagtgatg

SEQ ID NO: 58296 - RNA, 20 nt, synthetic construct
  source 1..20: mol_type = other RNA
ttctctaatgtaaacagcat

SEQ ID NO: 58297 - RNA, 20 nt, synthetic construct
  source 1..20: mol_type = other RNA
ttctctacagttaacaatac

SEQ ID NO: 58298 - RNA, 20 nt, synthetic construct
  source 1..20: mol_type = other RNA
ttctctacatctggatcctg

SEQ ID NO: 58299 - RNA, 20 nt, synthetic construct
  source 1..20: mol_type = other RNA
ttctctactctgcctcagtt

SEQ ID NO: 58300 - RNA, 20 nt, synthetic construct
  source 1..20: mol_type = other RNA
ttctctagttgcacggtgaa

SEQ ID NO: 58301 - RNA, 20 nt, synthetic construct
  source 1..20: mol_type = other RNA
ttctctcagagggaaactgt

SEQ ID NO: 58302 - RNA, 20 nt, synthetic construct
  source 1..20: mol_type = other RNA
ttctctcatgttgggtaaaa

SEQ ID NO: 58303 - RNA, 20 nt, synthetic construct
  source 1..20: mol_type = other RNA
ttctctccaaggtacaatta

SEQ ID NO: 58304 - RNA, 20 nt, synthetic construct
  source 1..20: mol_type = other RNA
ttctctccttgcacattaga

SEQ ID NO: 58305 - RNA, 20 nt, synthetic construct
  source 1..20: mol_type = other RNA
ttctctcctttgaggtaaga

SEQ ID NO: 58306 - RNA, 20 nt, synthetic construct
  source 1..20: mol_type = other RNA
ttctctctcaactggcccct

SEQ ID NO: 58307 - RNA, 20 nt, synthetic construct
  source 1..20: mol_type = other RNA
ttctctctccctgccctgtg

SEQ ID NO: 58308 - RNA, 20 nt, synthetic construct
  source 1..20: mol_type = other RNA
ttctctctctgcttcactaa

SEQ ID NO: 58309 - RNA, 20 nt, synthetic construct
  source 1..20: mol_type = other RNA
ttctctcttccaaataatcc

SEQ ID NO: 58310 - RNA, 20 nt, synthetic construct
  source 1..20: mol_type = other RNA
ttctctgccccgggcctggt

SEQ ID NO: 58311 - RNA, 20 nt, synthetic construct
  source 1..20: mol_type = other RNA
ttctctgctgctgaaaaaga

SEQ ID NO: 58312 - RNA, 20 nt, synthetic construct
  source 1..20: mol_type = other RNA
ttctctgctttttcttggtg

SEQ ID NO: 58313 - RNA, 20 nt, synthetic construct
  source 1..20: mol_type = other RNA
ttctctggaatagaagagca

SEQ ID NO: 58314 - RNA, 20 nt, synthetic construct
  source 1..20: mol_type = other RNA
ttctctggagcaagcatgag

SEQ ID NO: 58315 - RNA, 20 nt, synthetic construct
  source 1..20: mol_type = other RNA
ttctctgtctctgttgccca

SEQ ID NO: 58316 - RNA, 20 nt, synthetic construct
  source 1..20: mol_type = other RNA
ttctctgtgtggtttgcctt

SEQ ID NO: 58317 - RNA, 20 nt, synthetic construct
  source 1..20: mol_type = other RNA
ttctcttatactagtagaaa

SEQ ID NO: 58318 - RNA, 20 nt, synthetic construct
  source 1..20: mol_type = other RNA
ttctcttctggatagcatta

SEQ ID NO: 58319 - RNA, 20 nt, synthetic construct
  source 1..20: mol_type = other RNA
ttctctttaaagctgaactc

SEQ ID NO: 58320 - RNA, 20 nt, synthetic construct
  source 1..20: mol_type = other RNA
ttctctttagggaagatagt

SEQ ID NO: 58321 - RNA, 20 nt, synthetic construct
  source 1..20: mol_type = other RNA
ttctctttcagccatcccag

SEQ ID NO: 58322 - RNA, 20 nt, synthetic construct
  source 1..20: mol_type = other RNA
ttctctttctgaaattctca

SEQ ID NO: 58323 - RNA, 20 nt, synthetic construct
  source 1..20: mol_type = other RNA
ttctctttgtttatccttgc

SEQ ID NO: 58324 - RNA, 20 nt, synthetic construct
  source 1..20: mol_type = other RNA
ttctcttttcctcgttttca

SEQ ID NO: 58325 - RNA, 20 nt, synthetic construct
  source 1..20: mol_type = other RNA
ttctctttttgacagatgag

SEQ ID NO: 58326 - RNA, 20 nt, synthetic construct
  source 1..20: mol_type = other RNA
ttctgaaaaatggttttatg

SEQ ID NO: 58327 - RNA, 20 nt, synthetic construct
  source 1..20: mol_type = other RNA
ttctgaaattctcattagtt

SEQ ID NO: 58328 - RNA, 20 nt, synthetic construct
  source 1..20: mol_type = other RNA
ttctgaacaaatatcaaaag

SEQ ID NO: 58329 - RNA, 20 nt, synthetic construct
  source 1..20: mol_type = other RNA
ttctgaactcaaaagtgaat

SEQ ID NO: 58330 - RNA, 20 nt, synthetic construct
  source 1..20: mol_type = other RNA
ttctgaactttcaacctaac

SEQ ID NO: 58331 - RNA, 20 nt, synthetic construct
  source 1..20: mol_type = other RNA
ttctgaagaaattatctgtg

SEQ ID NO: 58332 - RNA, 20 nt, synthetic construct
  source 1..20: mol_type = other RNA
ttctgaagaggctttctgtg

SEQ ID NO: 58333 - RNA, 20 nt, synthetic construct
  source 1..20: mol_type = other RNA
ttctgaaggcactaacaaag

SEQ ID NO: 58334 - RNA, 20 nt, synthetic construct
  source 1..20: mol_type = other RNA
ttctgaaggctcagcccctc

SEQ ID NO: 58335 - RNA, 20 nt, synthetic construct
  source 1..20: mol_type = other RNA
ttctgaaggtgcctgccata

SEQ ID NO: 58336 - RNA, 20 nt, synthetic construct
  source 1..20: mol_type = other RNA
ttctgaattgagatgtactg

SEQ ID NO: 58337 - RNA, 20 nt, synthetic construct
  source 1..20: mol_type = other RNA
ttctgacaactgggagaatg

SEQ ID NO: 58338 - RNA, 20 nt, synthetic construct
  source 1..20: mol_type = other RNA
ttctgacaatttcagggaga

SEQ ID NO: 58339 - RNA, 20 nt, synthetic construct
  source 1..20: mol_type = other RNA
ttctgacacccgaagaggac

SEQ ID NO: 58340 - RNA, 20 nt, synthetic construct
  source 1..20: mol_type = other RNA
ttctgacacccgacccacta

SEQ ID NO: 58341 - RNA, 20 nt, synthetic construct
  source 1..20: mol_type = other RNA
ttctgacaggtggtatggga

SEQ ID NO: 58342 - RNA, 20 nt, synthetic construct
  source 1..20: mol_type = other RNA
ttctgaccaactatttcact

SEQ ID NO: 58343 - RNA, 20 nt, synthetic construct
  source 1..20: mol_type = other RNA
ttctgacccagagcctaatg

SEQ ID NO: 58344 - RNA, 20 nt, synthetic construct
  source 1..20: mol_type = other RNA
ttctgaccctttattcaaag

SEQ ID NO: 58345 - RNA, 20 nt, synthetic construct
  source 1..20: mol_type = other RNA
ttctgacctaaagttttaag

SEQ ID NO: 58346 - RNA, 20 nt, synthetic construct
  source 1..20: mol_type = other RNA
ttctgactctgtgcttgtgc

SEQ ID NO: 58347 - RNA, 20 nt, synthetic construct
  source 1..20: mol_type = other RNA
ttctgacttagtgagggagg

SEQ ID NO: 58348 - RNA, 20 nt, synthetic construct
  source 1..20: mol_type = other RNA
ttctgagaaggcgaaatgtg

SEQ ID NO: 58349 - RNA, 20 nt, synthetic construct
  source 1..20: mol_type = other RNA
ttctgagagtattgccaggt

SEQ ID NO: 58350 - RNA, 20 nt, synthetic construct
  source 1..20: mol_type = other RNA
ttctgagcaactactatttc

SEQ ID NO: 58351 - RNA, 20 nt, synthetic construct
  source 1..20: mol_type = other RNA
ttctgagcagtgtttcctag

SEQ ID NO: 58352 - RNA, 20 nt, synthetic construct
  source 1..20: mol_type = other RNA
ttctgagccagagtttcact

SEQ ID NO: 58353 - RNA, 20 nt, synthetic construct
  source 1..20: mol_type = other RNA
ttctgagctgttaatggtta

SEQ ID NO: 58354 - RNA, 20 nt, synthetic construct
  source 1..20: mol_type = other RNA
ttctgaggagctgagaccac

SEQ ID NO: 58355 - RNA, 20 nt, synthetic construct
  source 1..20: mol_type = other RNA
ttctgaggcctcctgccttc

SEQ ID NO: 58356 - RNA, 20 nt, synthetic construct
  source 1..20: mol_type = other RNA
ttctgagggaaattatttcc

SEQ ID NO: 58357 - RNA, 20 nt, synthetic construct
  source 1..20: mol_type = other RNA
ttctgaggtggagttctgct

SEQ ID NO: 58358 - RNA, 20 nt, synthetic construct
  source 1..20: mol_type = other RNA
ttctgagtatattctgtgaa

SEQ ID NO: 58359 - RNA, 20 nt, synthetic construct
  source 1..20: mol_type = other RNA
ttctgagtgttacttgaaat

SEQ ID NO: 58360 - RNA, 20 nt, synthetic construct
  source 1..20: mol_type = other RNA
ttctgatagcttgacaaaag

SEQ ID NO: 58361 - RNA, 20 nt, synthetic construct
  source 1..20: mol_type = other RNA
ttctgataggaatatcgtct

SEQ ID NO: 58362 - RNA, 20 nt, synthetic construct
  source 1..20: mol_type = other RNA
ttctgatatcctgtaaacct

SEQ ID NO: 58363 - RNA, 20 nt, synthetic construct
  source 1..20: mol_type = other RNA
ttctgatcacagaagtgttt

SEQ ID NO: 58364 - RNA, 20 nt, synthetic construct
  source 1..20: mol_type = other RNA
ttctgatgcacaagccttga

SEQ ID NO: 58365 - RNA, 20 nt, synthetic construct
  source 1..20: mol_type = other RNA
ttctgattgcccattataaa

SEQ ID NO: 58366 - RNA, 20 nt, synthetic construct
  source 1..20: mol_type = other RNA
ttctgatttgctggctcagt

SEQ ID NO: 58367 - RNA, 20 nt, synthetic construct
  source 1..20: mol_type = other RNA
ttctgcaagttgctatccag

SEQ ID NO: 58368 - RNA, 20 nt, synthetic construct
  source 1..20: mol_type = other RNA
ttctgcaattggaagactat

SEQ ID NO: 58369 - RNA, 20 nt, synthetic construct
  source 1..20: mol_type = other RNA
ttctgcaggctgaactgctg

SEQ ID NO: 58370 - RNA, 20 nt, synthetic construct
  source 1..20: mol_type = other RNA
ttctgcagtgaacatgggaa

SEQ ID NO: 58371 - RNA, 20 nt, synthetic construct
  source 1..20: mol_type = other RNA
ttctgcagtttgtgttttca

SEQ ID NO: 58372 - RNA, 20 nt, synthetic construct
  source 1..20: mol_type = other RNA
ttctgcatacttagctaatt

SEQ ID NO: 58373 - RNA, 20 nt, synthetic construct
  source 1..20: mol_type = other RNA
ttctgcatagagatcttgtg

SEQ ID NO: 58374 - RNA, 20 nt, synthetic construct
  source 1..20: mol_type = other RNA
ttctgcatcttttgagggta

SEQ ID NO: 58375 - RNA, 20 nt, synthetic construct
  source 1..20: mol_type = other RNA
ttctgcatttggtttgcaaa

SEQ ID NO: 58376 - RNA, 20 nt, synthetic construct
  source 1..20: mol_type = other RNA
ttctgccacattcaacaaca

SEQ ID NO: 58377 - RNA, 20 nt, synthetic construct
  source 1..20: mol_type = other RNA
ttctgcctaatctctaggct

SEQ ID NO: 58378 - RNA, 20 nt, synthetic construct
  source 1..20: mol_type = other RNA
ttctgcctgcagactgcagg

SEQ ID NO: 58379 - RNA, 20 nt, synthetic construct
  source 1..20: mol_type = other RNA
ttctgccttcaatgtttggt

SEQ ID NO: 58380 - RNA, 20 nt, synthetic construct
  source 1..20: mol_type = other RNA
ttctgccttgacctcccaaa

SEQ ID NO: 58381 - RNA, 20 nt, synthetic construct
  source 1..20: mol_type = other RNA
ttctgccttgaggtgattca

SEQ ID NO: 58382 - RNA, 20 nt, synthetic construct
  source 1..20: mol_type = other RNA
ttctgcgcaattgcagccag

SEQ ID NO: 58383 - RNA, 20 nt, synthetic construct
  source 1..20: mol_type = other RNA
ttctgcgtgttattttaatc

SEQ ID NO: 58384 - RNA, 20 nt, synthetic construct
  source 1..20: mol_type = other RNA
ttctgctactagcaagctaa

SEQ ID NO: 58385 - RNA, 20 nt, synthetic construct
  source 1..20: mol_type = other RNA
ttctgctatgaaatgtggtt

SEQ ID NO: 58386 - RNA, 20 nt, synthetic construct
  source 1..20: mol_type = other RNA
ttctgctatgctgaaaggca

SEQ ID NO: 58387 - RNA, 20 nt, synthetic construct
  source 1..20: mol_type = other RNA
ttctgctattctctttctga

SEQ ID NO: 58388 - RNA, 20 nt, synthetic construct
  source 1..20: mol_type = other RNA
ttctgctcactttgggatta

SEQ ID NO: 58389 - RNA, 20 nt, synthetic construct
  source 1..20: mol_type = other RNA
ttctgctcggctctgtcacc

SEQ ID NO: 58390 - RNA, 20 nt, synthetic construct
  source 1..20: mol_type = other RNA
ttctgctgggcccactctcc

SEQ ID NO: 58391 - RNA, 20 nt, synthetic construct
  source 1..20: mol_type = other RNA
ttctgctgttgatggacgtt

SEQ ID NO: 58392 - RNA, 20 nt, synthetic construct
  source 1..20: mol_type = other RNA
ttctgcttaaagcctctcaa

SEQ ID NO: 58393 - RNA, 20 nt, synthetic construct
  source 1..20: mol_type = other RNA
ttctgcttagtcttctcaga

SEQ ID NO: 58394 - RNA, 20 nt, synthetic construct
  source 1..20: mol_type = other RNA
ttctgcttattatatgccta

SEQ ID NO: 58395 - RNA, 20 nt, synthetic construct
  source 1..20: mol_type = other RNA
ttctgcttccacatttctaa

SEQ ID NO: 58396 - RNA, 20 nt, synthetic construct
  source 1..20: mol_type = other RNA
ttctgcttccttgctatgta

SEQ ID NO: 58397 - RNA, 20 nt, synthetic construct
  source 1..20: mol_type = other RNA
ttctgcttctcaataaggaa

SEQ ID NO: 58398 - RNA, 20 nt, synthetic construct
  source 1..20: mol_type = other RNA
ttctgcttgaatgtgcctac

SEQ ID NO: 58399 - RNA, 20 nt, synthetic construct
  source 1..20: mol_type = other RNA
ttctggaaactcaaacccaa

SEQ ID NO: 58400 - RNA, 20 nt, synthetic construct
  source 1..20: mol_type = other RNA
ttctggaaagttcaaatgag

SEQ ID NO: 58401 - RNA, 20 nt, synthetic construct
  source 1..20: mol_type = other RNA
ttctggaagatttctactgg

SEQ ID NO: 58402 - RNA, 20 nt, synthetic construct
  source 1..20: mol_type = other RNA
ttctggaagtttcctgcaca

SEQ ID NO: 58403 - RNA, 20 nt, synthetic construct
  source 1..20: mol_type = other RNA
ttctggaccacaatcttacc

SEQ ID NO: 58404 - RNA, 20 nt, synthetic construct
  source 1..20: mol_type = other RNA
ttctggaggctagaagtccc

SEQ ID NO: 58405 - RNA, 20 nt, synthetic construct
  source 1..20: mol_type = other RNA
ttctggagtgttttcttcat

SEQ ID NO: 58406 - RNA, 20 nt, synthetic construct
  source 1..20: mol_type = other RNA
ttctggatagcattatccct

SEQ ID NO: 58407 - RNA, 20 nt, synthetic construct
  source 1..20: mol_type = other RNA
ttctggatgtgtatgatcaa

SEQ ID NO: 58408 - RNA, 20 nt, synthetic construct
  source 1..20: mol_type = other RNA
ttctggatgttaattagata

SEQ ID NO: 58409 - RNA, 20 nt, synthetic construct
  source 1..20: mol_type = other RNA
ttctggccaaatccctgatc

SEQ ID NO: 58410 - RNA, 20 nt, synthetic construct
  source 1..20: mol_type = other RNA
ttctgggagttcattagaat

SEQ ID NO: 58411 - RNA, 20 nt, synthetic construct
  source 1..20: mol_type = other RNA
ttctgggctctctattccaa

SEQ ID NO: 58412 - RNA, 20 nt, synthetic construct
  source 1..20: mol_type = other RNA
ttctggggatgctgtctata

SEQ ID NO: 58413 - RNA, 20 nt, synthetic construct
  source 1..20: mol_type = other RNA
ttctggggctcaagtaagtg

SEQ ID NO: 58414 - RNA, 20 nt, synthetic construct
  source 1..20: mol_type = other RNA
ttctggggttcaaaccacct

SEQ ID NO: 58415 - RNA, 20 nt, synthetic construct
  source 1..20: mol_type = other RNA
ttctggtgtcgtttatttct

SEQ ID NO: 58416 - RNA, 20 nt, synthetic construct
  source 1..20: mol_type = other RNA
ttctggttttctggaggcta

SEQ ID NO: 58417 - RNA, 20 nt, synthetic construct
  source 1..20: mol_type = other RNA
ttctgtaaacatgaacaagt

SEQ ID NO: 58418 - RNA, 20 nt, synthetic construct
  source 1..20: mol_type = other RNA
ttctgtaatattaaccaaga

SEQ ID NO: 58419 - RNA, 20 nt, synthetic construct
  source 1..20: mol_type = other RNA
ttctgtaatgtttgtacttc

SEQ ID NO: 58420 - RNA, 20 nt, synthetic construct
  source 1..20: mol_type = other RNA
ttctgtacccttacgcgtgg

SEQ ID NO: 58421 - RNA, 20 nt, synthetic construct
  source 1..20: mol_type = other RNA
ttctgtagaatatccaagca

SEQ ID NO: 58422 - RNA, 20 nt, synthetic construct
  source 1..20: mol_type = other RNA
ttctgtatcttttcagtcca

SEQ ID NO: 58423 - RNA, 20 nt, synthetic construct
  source 1..20: mol_type = other RNA
ttctgtcacatagacctgaa

SEQ ID NO: 58424 - RNA, 20 nt, synthetic construct
  source 1..20: mol_type = other RNA
ttctgtcacatttgaaagaa

SEQ ID NO: 58425 - RNA, 20 nt, synthetic construct
  source 1..20: mol_type = other RNA
ttctgtcacggtgccctaca

SEQ ID NO: 58426 - RNA, 20 nt, synthetic construct
  source 1..20: mol_type = other RNA
ttctgtcatctgaatcaata

SEQ ID NO: 58427 - RNA, 20 nt, synthetic construct
  source 1..20: mol_type = other RNA
ttctgtcattctgcagtttg

SEQ ID NO: 58428 - RNA, 20 nt, synthetic construct
  source 1..20: mol_type = other RNA
ttctgtccttggattgctaa

SEQ ID NO: 58429 - RNA, 20 nt, synthetic construct
  source 1..20: mol_type = other RNA
ttctgtctctacaaaaaagt

SEQ ID NO: 58430 - RNA, 20 nt, synthetic construct
  source 1..20: mol_type = other RNA
ttctgtgaaaaaacaaaaca

SEQ ID NO: 58431 - RNA, 20 nt, synthetic construct
  source 1..20: mol_type = other RNA
ttctgtgaattgtgacagtt

SEQ ID NO: 58432 - RNA, 20 nt, synthetic construct
  source 1..20: mol_type = other RNA
ttctgtgaatttgattatgt

SEQ ID NO: 58433 - RNA, 20 nt, synthetic construct
  source 1..20: mol_type = other RNA
ttctgtgatcagaagagcac

SEQ ID NO: 58434 - RNA, 20 nt, synthetic construct
  source 1..20: mol_type = other RNA
ttctgtgccaagcaacttga

SEQ ID NO: 58435 - RNA, 20 nt, synthetic construct
  source 1..20: mol_type = other RNA
ttctgtgctagatgctaaac

SEQ ID NO: 58436 - RNA, 20 nt, synthetic construct
  source 1..20: mol_type = other RNA
ttctgtgcttaaatttttga

SEQ ID NO: 58437 - RNA, 20 nt, synthetic construct
  source 1..20: mol_type = other RNA
ttctgtgtaatactgtagaa

SEQ ID NO: 58438 - RNA, 20 nt, synthetic construct
  source 1..20: mol_type = other RNA
ttctgtgtttatgaatgatg

SEQ ID NO: 58439 - RNA, 20 nt, synthetic construct
  source 1..20: mol_type = other RNA
ttctgttaatagataggtca

SEQ ID NO: 58440 - RNA, 20 nt, synthetic construct
  source 1..20: mol_type = other RNA
ttctgttaatgtgatatgcc

SEQ ID NO: 58441 - RNA, 20 nt, synthetic construct
  source 1..20: mol_type = other RNA
ttctgttagatggtgctgat

SEQ ID NO: 58442 - RNA, 20 nt, synthetic construct
  source 1..20: mol_type = other RNA
ttctgttccatcggtctgta

SEQ ID NO: 58443 - RNA, 20 nt, synthetic construct
  source 1..20: mol_type = other RNA
ttctgttctagctcctggga

SEQ ID NO: 58444 - RNA, 20 nt, synthetic construct
  source 1..20: mol_type = other RNA
ttctgttctcagtatccttt

SEQ ID NO: 58445 - RNA, 20 nt, synthetic construct
  source 1..20: mol_type = other RNA
ttctgttgcaaattattttc

SEQ ID NO: 58446 - RNA, 20 nt, synthetic construct
  source 1..20: mol_type = other RNA
ttctgttgcttaagtcactc

SEQ ID NO: 58447 - RNA, 20 nt, synthetic construct
  source 1..20: mol_type = other RNA
ttctgttggagagatggtag

SEQ ID NO: 58448 - RNA, 20 nt, synthetic construct
  source 1..20: mol_type = other RNA
ttctgtttacccttactaaa

SEQ ID NO: 58449 - RNA, 20 nt, synthetic construct
  source 1..20: mol_type = other RNA
ttctgtttctgtgaaaaaac

SEQ ID NO: 58450 - RNA, 20 nt, synthetic construct
  source 1..20: mol_type = other RNA
ttctgtttggatgaaaaagt

SEQ ID NO: 58451 - RNA, 20 nt, synthetic construct
  source 1..20: mol_type = other RNA
ttctgtttgtttgttttgag

SEQ ID NO: 58452 - RNA, 20 nt, synthetic construct
  source 1..20: mol_type = other RNA
ttctgttttcatttattctg

SEQ ID NO: 58453 - RNA, 20 nt, synthetic construct
  source 1..20: mol_type = other RNA
ttctgtttttcttagtctag

SEQ ID NO: 58454 - RNA, 20 nt, synthetic construct
  source 1..20: mol_type = other RNA
ttcttaaaaatgacaccaaa

SEQ ID NO: 58455 - RNA, 20 nt, synthetic construct
  source 1..20: mol_type = other RNA
ttcttaaaactttaggtcag

SEQ ID NO: 58456 - RNA, 20 nt, synthetic construct
  source 1..20: mol_type = other RNA
ttcttaaactgccaaaccct

SEQ ID NO: 58457 - RNA, 20 nt, synthetic construct
  source 1..20: mol_type = other RNA
ttcttaagacatttgggaat

SEQ ID NO: 58458 - RNA, 20 nt, synthetic construct
  source 1..20: mol_type = other RNA
ttcttacaatgaatatgtac

SEQ ID NO: 58459 - RNA, 20 nt, synthetic construct
  source 1..20: mol_type = other RNA
ttcttacacattaggctctg

SEQ ID NO: 58460 - RNA, 20 nt, synthetic construct
  source 1..20: mol_type = other RNA
ttcttacagtgacatatgcc

SEQ ID NO: 58461 - RNA, 20 nt, synthetic construct
  source 1..20: mol_type = other RNA
ttcttaccctcacagtcaca

SEQ ID NO: 58462 - RNA, 20 nt, synthetic construct
  source 1..20: mol_type = other RNA
ttcttaccctttactcagat

SEQ ID NO: 58463 - RNA, 20 nt, synthetic construct
  source 1..20: mol_type = other RNA
ttcttacctaagcatcgtga

SEQ ID NO: 58464 - RNA, 20 nt, synthetic construct
  source 1..20: mol_type = other RNA
ttcttacctcaaaggagaga

SEQ ID NO: 58465 - RNA, 20 nt, synthetic construct
  source 1..20: mol_type = other RNA
ttcttaccttctaaaatcat

SEQ ID NO: 58466 - RNA, 20 nt, synthetic construct
  source 1..20: mol_type = other RNA
ttcttactgatttatagtgt

SEQ ID NO: 58467 - RNA, 20 nt, synthetic construct
  source 1..20: mol_type = other RNA
ttcttagctatattcacttt

SEQ ID NO: 58468 - RNA, 20 nt, synthetic construct
  source 1..20: mol_type = other RNA
ttcttaggaagctatggagc

SEQ ID NO: 58469 - RNA, 20 nt, synthetic construct
  source 1..20: mol_type = other RNA
ttcttaggtttctcattttt

SEQ ID NO: 58470 - RNA, 20 nt, synthetic construct
  source 1..20: mol_type = other RNA
ttcttagtaaatatccgaaa

SEQ ID NO: 58471 - RNA, 20 nt, synthetic construct
  source 1..20: mol_type = other RNA
ttcttagtgttcccttctta

SEQ ID NO: 58472 - RNA, 20 nt, synthetic construct
  source 1..20: mol_type = other RNA
ttcttagttccattattcca

SEQ ID NO: 58473 - RNA, 20 nt, synthetic construct
  source 1..20: mol_type = other RNA
ttcttatccctacctaaaaa

SEQ ID NO: 58474 - RNA, 20 nt, synthetic construct
  source 1..20: mol_type = other RNA
ttcttatctaggcgaaatat

SEQ ID NO: 58475 - RNA, 20 nt, synthetic construct
  source 1..20: mol_type = other RNA
ttcttatgaggttattcaaa

SEQ ID NO: 58476 - RNA, 20 nt, synthetic construct
  source 1..20: mol_type = other RNA
ttcttattgattcagatgac

SEQ ID NO: 58477 - RNA, 20 nt, synthetic construct
  source 1..20: mol_type = other RNA
ttcttattggttatctgtac

SEQ ID NO: 58478 - RNA, 20 nt, synthetic construct
  source 1..20: mol_type = other RNA
ttcttatttccttccagttt

SEQ ID NO: 58479 - RNA, 20 nt, synthetic construct
  source 1..20: mol_type = other RNA
ttcttatttgttactgatct

SEQ ID NO: 58480 - RNA, 20 nt, synthetic construct
  source 1..20: mol_type = other RNA
ttcttattttttcccagata

SEQ ID NO: 58481 - RNA, 20 nt, synthetic construct
  source 1..20: mol_type = other RNA
ttcttcaaaagacatcacta

SEQ ID NO: 58482 - RNA, 20 nt, synthetic construct
  source 1..20: mol_type = other RNA
ttcttcaaccatacttttca

SEQ ID NO: 58483 - RNA, 20 nt, synthetic construct
  source 1..20: mol_type = other RNA
ttcttcaagatactgcacta

SEQ ID NO: 58484 - RNA, 20 nt, synthetic construct
  source 1..20: mol_type = other RNA
ttcttcacacattaactatg

SEQ ID NO: 58485 - RNA, 20 nt, synthetic construct
  source 1..20: mol_type = other RNA
ttcttcaccattccagccat

SEQ ID NO: 58486 - RNA, 20 nt, synthetic construct
  source 1..20: mol_type = other RNA
ttcttcaccgtgcaactaga

SEQ ID NO: 58487 - RNA, 20 nt, synthetic construct
  source 1..20: mol_type = other RNA
ttcttcactcttaaaaggag

SEQ ID NO: 58488 - RNA, 20 nt, synthetic construct
  source 1..20: mol_type = other RNA
ttcttcagaagaaattactt

SEQ ID NO: 58489 - RNA, 20 nt, synthetic construct
  source 1..20: mol_type = other RNA
ttcttcagcaaggaccatta

SEQ ID NO: 58490 - RNA, 20 nt, synthetic construct
  source 1..20: mol_type = other RNA
ttcttcatcagtccctgtgt

SEQ ID NO: 58491 - RNA, 20 nt, synthetic construct
  source 1..20: mol_type = other RNA
ttcttcatggactagactgc

SEQ ID NO: 58492 - RNA, 20 nt, synthetic construct
  source 1..20: mol_type = other RNA
ttcttccactagtgggatca

SEQ ID NO: 58493 - RNA, 20 nt, synthetic construct
  source 1..20: mol_type = other RNA
ttcttccagcctggtaatga

SEQ ID NO: 58494 - RNA, 20 nt, synthetic construct
  source 1..20: mol_type = other RNA
ttcttcccatctcactcacc

SEQ ID NO: 58495 - RNA, 20 nt, synthetic construct
  source 1..20: mol_type = other RNA
ttcttcctgtcttggaccca

SEQ ID NO: 58496 - RNA, 20 nt, synthetic construct
  source 1..20: mol_type = other RNA
ttcttccttaatgtttagta

SEQ ID NO: 58497 - RNA, 20 nt, synthetic construct
  source 1..20: mol_type = other RNA
ttcttctaagctaagagttt

SEQ ID NO: 58498 - RNA, 20 nt, synthetic construct
  source 1..20: mol_type = other RNA
ttcttctaataggaagtggc

SEQ ID NO: 58499 - RNA, 20 nt, synthetic construct
  source 1..20: mol_type = other RNA
ttcttctagtcacatttgct

SEQ ID NO: 58500 - RNA, 20 nt, synthetic construct
  source 1..20: mol_type = other RNA
ttcttctccctcttcgctct

SEQ ID NO: 58501 - RNA, 20 nt, synthetic construct
  source 1..20: mol_type = other RNA
ttcttctctaatgtaaacag

SEQ ID NO: 58502 - RNA, 20 nt, synthetic construct
  source 1..20: mol_type = other RNA
ttcttctgaagaaattatct

SEQ ID NO: 58503 - RNA, 20 nt, synthetic construct
  source 1..20: mol_type = other RNA
ttcttctgtaatattaacca

SEQ ID NO: 58504 - RNA, 20 nt, synthetic construct
  source 1..20: mol_type = other RNA
ttcttctgtattaaatcttc

SEQ ID NO: 58505 - RNA, 20 nt, synthetic construct
  source 1..20: mol_type = other RNA
ttcttctgttggagagatgg

SEQ ID NO: 58506 - RNA, 20 nt, synthetic construct
  source 1..20: mol_type = other RNA
ttcttcttctgttattttag

SEQ ID NO: 58507 - RNA, 20 nt, synthetic construct
  source 1..20: mol_type = other RNA
ttcttcttgttttgttctcg

SEQ ID NO: 58508 - RNA, 20 nt, synthetic construct
  source 1..20: mol_type = other RNA
ttcttctttggctcaatggt

SEQ ID NO: 58509 - RNA, 20 nt, synthetic construct
  source 1..20: mol_type = other RNA
ttcttgaatctctctatcca

SEQ ID NO: 58510 - RNA, 20 nt, synthetic construct
  source 1..20: mol_type = other RNA
ttcttgacatgattgaggac

SEQ ID NO: 58511 - RNA, 20 nt, synthetic construct
  source 1..20: mol_type = other RNA
ttcttgacctcaaatgatcc

SEQ ID NO: 58512 - RNA, 20 nt, synthetic construct
  source 1..20: mol_type = other RNA
ttcttgacctcagtggtagt

SEQ ID NO: 58513 - RNA, 20 nt, synthetic construct
  source 1..20: mol_type = other RNA
ttcttgagagtctcttaaga

SEQ ID NO: 58514 - RNA, 20 nt, synthetic construct
  source 1..20: mol_type = other RNA
ttcttgctttgctgccccag

SEQ ID NO: 58515 - RNA, 20 nt, synthetic construct
  source 1..20: mol_type = other RNA
ttcttggaaattagaaatgt

SEQ ID NO: 58516 - RNA, 20 nt, synthetic construct
  source 1..20: mol_type = other RNA
ttcttggagtaaacctgcaa

SEQ ID NO: 58517 - RNA, 20 nt, synthetic construct
  source 1..20: mol_type = other RNA
ttcttggattttcttcattt

SEQ ID NO: 58518 - RNA, 20 nt, synthetic construct
  source 1..20: mol_type = other RNA
ttcttggggctctaatgcaa

SEQ ID NO: 58519 - RNA, 20 nt, synthetic construct
  source 1..20: mol_type = other RNA
ttcttgggtgaataacccat

SEQ ID NO: 58520 - RNA, 20 nt, synthetic construct
  source 1..20: mol_type = other RNA
ttcttggtctgcagactctt

SEQ ID NO: 58521 - RNA, 20 nt, synthetic construct
  source 1..20: mol_type = other RNA
ttcttggtcttttgattttt

SEQ ID NO: 58522 - RNA, 20 nt, synthetic construct
  source 1..20: mol_type = other RNA
ttcttggtggtaactgatgt

SEQ ID NO: 58523 - RNA, 20 nt, synthetic construct
  source 1..20: mol_type = other RNA
ttcttggttaatattacaga

SEQ ID NO: 58524 - RNA, 20 nt, synthetic construct
  source 1..20: mol_type = other RNA
ttcttgtcatgaatgaatgt

SEQ ID NO: 58525 - RNA, 20 nt, synthetic construct
  source 1..20: mol_type = other RNA
ttcttgtgggtattttgttg

SEQ ID NO: 58526 - RNA, 20 nt, synthetic construct
  source 1..20: mol_type = other RNA
ttcttgttaagcattttccg

SEQ ID NO: 58527 - RNA, 20 nt, synthetic construct
  source 1..20: mol_type = other RNA
ttcttgttagaattttgctt

SEQ ID NO: 58528 - RNA, 20 nt, synthetic construct
  source 1..20: mol_type = other RNA
ttcttgttagtaggaaaacc

SEQ ID NO: 58529 - RNA, 20 nt, synthetic construct
  source 1..20: mol_type = other RNA
ttcttgttataagcaaagat

SEQ ID NO: 58530 - RNA, 20 nt, synthetic construct
  source 1..20: mol_type = other RNA
ttcttgttttgttctcgttc

SEQ ID NO: 58531 - RNA, 20 nt, synthetic construct
  source 1..20: mol_type = other RNA
ttctttaaaaccagagcgga

SEQ ID NO: 58532 - RNA, 20 nt, synthetic construct
  source 1..20: mol_type = other RNA
ttctttaaaactgctgagtc

SEQ ID NO: 58533 - RNA, 20 nt, synthetic construct
  source 1..20: mol_type = other RNA
ttctttcaaatgtgacagaa

SEQ ID NO: 58534 - RNA, 20 nt, synthetic construct
  source 1..20: mol_type = other RNA
ttctttccattcaatccttg

SEQ ID NO: 58535 - RNA, 20 nt, synthetic construct
  source 1..20: mol_type = other RNA
ttctttcgcatcattcaaat

SEQ ID NO: 58536 - RNA, 20 nt, synthetic construct
  source 1..20: mol_type = other RNA
ttctttcggatatttactaa

SEQ ID NO: 58537 - RNA, 20 nt, synthetic construct
  source 1..20: mol_type = other RNA
ttctttctctttcagccatc

SEQ ID NO: 58538 - RNA, 20 nt, synthetic construct
  source 1..20: mol_type = other RNA
ttctttctttcaaatgtgac

SEQ ID NO: 58539 - RNA, 20 nt, synthetic construct
  source 1..20: mol_type = other RNA
ttctttgagtagttcatgtt

SEQ ID NO: 58540 - RNA, 20 nt, synthetic construct
  source 1..20: mol_type = other RNA
ttctttggagctgtattttt

SEQ ID NO: 58541 - RNA, 20 nt, synthetic construct
  source 1..20: mol_type = other RNA
ttctttggctcaatggttaa

SEQ ID NO: 58542 - RNA, 20 nt, synthetic construct
  source 1..20: mol_type = other RNA
ttctttggctgttagccttg

SEQ ID NO: 58543 - RNA, 20 nt, synthetic construct
  source 1..20: mol_type = other RNA
ttctttgggggaagcaggaa

SEQ ID NO: 58544 - RNA, 20 nt, synthetic construct
  source 1..20: mol_type = other RNA
ttctttggttttgactcagt

SEQ ID NO: 58545 - RNA, 20 nt, synthetic construct
  source 1..20: mol_type = other RNA
ttcttttaaagacctcaggt

SEQ ID NO: 58546 - RNA, 20 nt, synthetic construct
  source 1..20: mol_type = other RNA
ttcttttaaatgccaatttg

SEQ ID NO: 58547 - RNA, 20 nt, synthetic construct
  source 1..20: mol_type = other RNA
ttcttttacttgcttggttt

SEQ ID NO: 58548 - RNA, 20 nt, synthetic construct
  source 1..20: mol_type = other RNA
ttcttttagagtaactgtca

SEQ ID NO: 58549 - RNA, 20 nt, synthetic construct
  source 1..20: mol_type = other RNA
ttcttttataactgaacatg

SEQ ID NO: 58550 - RNA, 20 nt, synthetic construct
  source 1..20: mol_type = other RNA
ttcttttcaaaaacagcata

SEQ ID NO: 58551 - RNA, 20 nt, synthetic construct
  source 1..20: mol_type = other RNA
ttcttttcacataaatttgc

SEQ ID NO: 58552 - RNA, 20 nt, synthetic construct
  source 1..20: mol_type = other RNA
ttcttttcactctaatatgg

SEQ ID NO: 58553 - RNA, 20 nt, synthetic construct
  source 1..20: mol_type = other RNA
ttcttttccaaccaagccca

SEQ ID NO: 58554 - RNA, 20 nt, synthetic construct
  source 1..20: mol_type = other RNA
ttcttttccttcttaagaca

SEQ ID NO: 58555 - RNA, 20 nt, synthetic construct
  source 1..20: mol_type = other RNA
ttcttttgatatttgttcag

SEQ ID NO: 58556 - RNA, 20 nt, synthetic construct
  source 1..20: mol_type = other RNA
ttcttttgctgtatacccag

SEQ ID NO: 58557 - RNA, 20 nt, synthetic construct
  source 1..20: mol_type = other RNA
ttcttttgtaatctaaggat

SEQ ID NO: 58558 - RNA, 20 nt, synthetic construct
  source 1..20: mol_type = other RNA
ttcttttgtgggtaaattaa

SEQ ID NO: 58559 - RNA, 20 nt, synthetic construct
  source 1..20: mol_type = other RNA
ttcttttgttgcctgtagtt

SEQ ID NO: 58560 - RNA, 20 nt, synthetic construct
  source 1..20: mol_type = other RNA
ttctttttaaacaggtgtaa

SEQ ID NO: 58561 - RNA, 20 nt, synthetic construct
  source 1..20: mol_type = other RNA
ttctttttactcatgtctac

SEQ ID NO: 58562 - RNA, 20 nt, synthetic construct
  source 1..20: mol_type = other RNA
ttctttttactcgagggtag

SEQ ID NO: 58563 - RNA, 20 nt, synthetic construct
  source 1..20: mol_type = other RNA
ttctttttagtaagaggtat

SEQ ID NO: 58564 - RNA, 20 nt, synthetic construct
  source 1..20: mol_type = other RNA
ttctttttctagtttgaggt

SEQ ID NO: 58565 - RNA, 20 nt, synthetic construct
  source 1..20: mol_type = other RNA
ttctttttcttgctttgctg

SEQ ID NO: 58566 - RNA, 20 nt, synthetic construct
  source 1..20: mol_type = other RNA
ttctttttgttttctccttc

SEQ ID NO: 58567 - RNA, 20 nt, synthetic construct
  source 1..20: mol_type = other RNA
ttgaaaaaacttcccttagc

SEQ ID NO: 58568 - RNA, 20 nt, synthetic construct
  source 1..20: mol_type = other RNA
ttgaaaaacagatcttggcc

SEQ ID NO: 58569 - RNA, 20 nt, synthetic construct
  source 1..20: mol_type = other RNA
ttgaaaaaggaaagtaactg

SEQ ID NO: 58570 - RNA, 20 nt, synthetic construct
  source 1..20: mol_type = other RNA
ttgaaaaatgtcaattttcc

SEQ ID NO: 58571 - RNA, 20 nt, synthetic construct
  source 1..20: mol_type = other RNA
ttgaaaacatgttttgttgt

SEQ ID NO: 58572 - RNA, 20 nt, synthetic construct
  source 1..20: mol_type = other RNA
ttgaaaacgaggaaaagaga

SEQ ID NO: 58573 - RNA, 20 nt, synthetic construct
  source 1..20: mol_type = other RNA
ttgaaaactcaactgcctct

SEQ ID NO: 58574 - RNA, 20 nt, synthetic construct
  source 1..20: mol_type = other RNA
ttgaaaagaacaacatggta

SEQ ID NO: 58575 - RNA, 20 nt, synthetic construct
  source 1..20: mol_type = other RNA
ttgaaaagctcaaaaatact

SEQ ID NO: 58576 - RNA, 20 nt, synthetic construct
  source 1..20: mol_type = other RNA
ttgaaaagtatggttgaaga

SEQ ID NO: 58577 - RNA, 20 nt, synthetic construct
  source 1..20: mol_type = other RNA
ttgaaaagtgtttgtcacat

SEQ ID NO: 58578 - RNA, 20 nt, synthetic construct
  source 1..20: mol_type = other RNA
ttgaaaatgcccttatttaa

SEQ ID NO: 58579 - RNA, 20 nt, synthetic construct
  source 1..20: mol_type = other RNA
ttgaaaatggtttaggctgt

SEQ ID NO: 58580 - RNA, 20 nt, synthetic construct
  source 1..20: mol_type = other RNA
ttgaaaatttccagcatttt

SEQ ID NO: 58581 - RNA, 20 nt, synthetic construct
  source 1..20: mol_type = other RNA
ttgaaacaatactttagaca

SEQ ID NO: 58582 - RNA, 20 nt, synthetic construct
  source 1..20: mol_type = other RNA
ttgaaacctgccatggtgtt

SEQ ID NO: 58583 - RNA, 20 nt, synthetic construct
  source 1..20: mol_type = other RNA
ttgaaacgatgcattccaga

SEQ ID NO: 58584 - RNA, 20 nt, synthetic construct
  source 1..20: mol_type = other RNA
ttgaaactcaatgttggtta

SEQ ID NO: 58585 - RNA, 20 nt, synthetic construct
  source 1..20: mol_type = other RNA
ttgaaactgagcatcccaga

SEQ ID NO: 58586 - RNA, 20 nt, synthetic construct
  source 1..20: mol_type = other RNA
ttgaaactttaagagtatct

SEQ ID NO: 58587 - RNA, 20 nt, synthetic construct
  source 1..20: mol_type = other RNA
ttgaaagaaagaaggccatt

SEQ ID NO: 58588 - RNA, 20 nt, synthetic construct
  source 1..20: mol_type = other RNA
ttgaaagatcatttagtaag

SEQ ID NO: 58589 - RNA, 20 nt, synthetic construct
  source 1..20: mol_type = other RNA
ttgaaagcccttgagtattt

SEQ ID NO: 58590 - RNA, 20 nt, synthetic construct
  source 1..20: mol_type = other RNA
ttgaaaggaatccggcttta

SEQ ID NO: 58591 - RNA, 20 nt, synthetic construct
  source 1..20: mol_type = other RNA
ttgaaaggatactgagaaca

SEQ ID NO: 58592 - RNA, 20 nt, synthetic construct
  source 1..20: mol_type = other RNA
ttgaaaggggccaggtgtgg

SEQ ID NO: 58593 - RNA, 20 nt, synthetic construct
  source 1..20: mol_type = other RNA
ttgaaagttcagaataccag

SEQ ID NO: 58594 - RNA, 20 nt, synthetic construct
  source 1..20: mol_type = other RNA
ttgaaatcagaacttgacaa

SEQ ID NO: 58595 - RNA, 20 nt, synthetic construct
  source 1..20: mol_type = other RNA
ttgaaatcatttcactcttt

SEQ ID NO: 58596 - RNA, 20 nt, synthetic construct
  source 1..20: mol_type = other RNA
ttgaaatctaggcatataat

SEQ ID NO: 58597 - RNA, 20 nt, synthetic construct
  source 1..20: mol_type = other RNA
ttgaaatgatcttttgtagt

SEQ ID NO: 58598 - RNA, 20 nt, synthetic construct
  source 1..20: mol_type = other RNA
ttgaaatttaaagacgttca

SEQ ID NO: 58599 - RNA, 20 nt, synthetic construct
  source 1..20: mol_type = other RNA
ttgaacaagagcgtcgtacc

SEQ ID NO: 58600 - RNA, 20 nt, synthetic construct
  source 1..20: mol_type = other RNA
ttgaacactctgcaatttta

SEQ ID NO: 58601 - RNA, 20 nt, synthetic construct
  source 1..20: mol_type = other RNA
ttgaacagcctaaagtccac

SEQ ID NO: 58602 - RNA, 20 nt, synthetic construct
  source 1..20: mol_type = other RNA
ttgaacatcacccagctcga

SEQ ID NO: 58603 - RNA, 20 nt, synthetic construct
  source 1..20: mol_type = other RNA
ttgaacatgaacgagaacaa

SEQ ID NO: 58604 - RNA, 20 nt, synthetic construct
  source 1..20: mol_type = other RNA
ttgaacattctgtagaagta

SEQ ID NO: 58605 - RNA, 20 nt, synthetic construct
  source 1..20: mol_type = other RNA
ttgaacccactgagcattta

SEQ ID NO: 58606 - RNA, 20 nt, synthetic construct
  source 1..20: mol_type = other RNA
ttgaaccccagaaggttaac

SEQ ID NO: 58607 - RNA, 20 nt, synthetic construct
  source 1..20: mol_type = other RNA
ttgaacccgaggtgcacaag

SEQ ID NO: 58608 - RNA, 20 nt, synthetic construct
  source 1..20: mol_type = other RNA
ttgaacctgaaaaacggagg

SEQ ID NO: 58609 - RNA, 20 nt, synthetic construct
  source 1..20: mol_type = other RNA
ttgaaccttcctcttcctca

SEQ ID NO: 58610 - RNA, 20 nt, synthetic construct
  source 1..20: mol_type = other RNA
ttgaacgaatgaaaacacaa

SEQ ID NO: 58611 - RNA, 20 nt, synthetic construct
  source 1..20: mol_type = other RNA
ttgaactaagtgtgaagatt

SEQ ID NO: 58612 - RNA, 20 nt, synthetic construct
  source 1..20: mol_type = other RNA
ttgaactcactggccagcat

SEQ ID NO: 58613 - RNA, 20 nt, synthetic construct
  source 1..20: mol_type = other RNA
ttgaactgctggtctggaat

SEQ ID NO: 58614 - RNA, 20 nt, synthetic construct
  source 1..20: mol_type = other RNA
ttgaactgggacttctagcc

SEQ ID NO: 58615 - RNA, 20 nt, synthetic construct
  source 1..20: mol_type = other RNA
ttgaactgttacttgactat

SEQ ID NO: 58616 - RNA, 20 nt, synthetic construct
  source 1..20: mol_type = other RNA
ttgaacttatataaatgctc

SEQ ID NO: 58617 - RNA, 20 nt, synthetic construct
  source 1..20: mol_type = other RNA
ttgaactttccagaagtaac

SEQ ID NO: 58618 - RNA, 20 nt, synthetic construct
  source 1..20: mol_type = other RNA
ttgaagaaaccaagagcata

SEQ ID NO: 58619 - RNA, 20 nt, synthetic construct
  source 1..20: mol_type = other RNA
ttgaagaaagtaggaattaa

SEQ ID NO: 58620 - RNA, 20 nt, synthetic construct
  source 1..20: mol_type = other RNA
ttgaagaaagttttgcagtt

SEQ ID NO: 58621 - RNA, 20 nt, synthetic construct
  source 1..20: mol_type = other RNA
ttgaagacctgcagtctgca

SEQ ID NO: 58622 - RNA, 20 nt, synthetic construct
  source 1..20: mol_type = other RNA
ttgaagagcgcttctatgtg

SEQ ID NO: 58623 - RNA, 20 nt, synthetic construct
  source 1..20: mol_type = other RNA
ttgaagagggaacattttca

SEQ ID NO: 58624 - RNA, 20 nt, synthetic construct
  source 1..20: mol_type = other RNA
ttgaagatggcaaacagact

SEQ ID NO: 58625 - RNA, 20 nt, synthetic construct
  source 1..20: mol_type = other RNA
ttgaagatttaatacagaag

SEQ ID NO: 58626 - RNA, 20 nt, synthetic construct
  source 1..20: mol_type = other RNA
ttgaagccagcacctaacaa

SEQ ID NO: 58627 - RNA, 20 nt, synthetic construct
  source 1..20: mol_type = other RNA
ttgaagctactattccagga

SEQ ID NO: 58628 - RNA, 20 nt, synthetic construct
  source 1..20: mol_type = other RNA
ttgaagctctagtgagctat

SEQ ID NO: 58629 - RNA, 20 nt, synthetic construct
  source 1..20: mol_type = other RNA
ttgaagcttcacttctctgc

SEQ ID NO: 58630 - RNA, 20 nt, synthetic construct
  source 1..20: mol_type = other RNA
ttgaaggcaatgtagggaat

SEQ ID NO: 58631 - RNA, 20 nt, synthetic construct
  source 1..20: mol_type = other RNA
ttgaaggcagaattatagag

SEQ ID NO: 58632 - RNA, 20 nt, synthetic construct
  source 1..20: mol_type = other RNA
ttgaagtacttcagcgcttg

SEQ ID NO: 58633 - RNA, 20 nt, synthetic construct
  source 1..20: mol_type = other RNA
ttgaagtatgtaattacagg

SEQ ID NO: 58634 - RNA, 20 nt, synthetic construct
  source 1..20: mol_type = other RNA
ttgaagtcagttacagcatt

SEQ ID NO: 58635 - RNA, 20 nt, synthetic construct
  source 1..20: mol_type = other RNA
ttgaagtctttggcccattt

SEQ ID NO: 58636 - RNA, 20 nt, synthetic construct
  source 1..20: mol_type = other RNA
ttgaataaagggtcagaatt

SEQ ID NO: 58637 - RNA, 20 nt, synthetic construct
  source 1..20: mol_type = other RNA
ttgaataacctcataagaac

SEQ ID NO: 58638 - RNA, 20 nt, synthetic construct
  source 1..20: mol_type = other RNA
ttgaataaggtctgtaagtc

SEQ ID NO: 58639 - RNA, 20 nt, synthetic construct
  source 1..20: mol_type = other RNA
ttgaataatttccaggtcat

SEQ ID NO: 58640 - RNA, 20 nt, synthetic construct
  source 1..20: mol_type = other RNA
ttgaatactcgtgtgtctca

SEQ ID NO: 58641 - RNA, 20 nt, synthetic construct
  source 1..20: mol_type = other RNA
ttgaatagcaactgtttttt

SEQ ID NO: 58642 - RNA, 20 nt, synthetic construct
  source 1..20: mol_type = other RNA
ttgaatagcatcttagctct

SEQ ID NO: 58643 - RNA, 20 nt, synthetic construct
  source 1..20: mol_type = other RNA
ttgaatagggcctcaaattt

SEQ ID NO: 58644 - RNA, 20 nt, synthetic construct
  source 1..20: mol_type = other RNA
ttgaatcatgggagccaaac

SEQ ID NO: 58645 - RNA, 20 nt, synthetic construct
  source 1..20: mol_type = other RNA
ttgaatctctctatccacca

SEQ ID NO: 58646 - RNA, 20 nt, synthetic construct
  source 1..20: mol_type = other RNA
ttgaatcttaacatttctca

SEQ ID NO: 58647 - RNA, 20 nt, synthetic construct
  source 1..20: mol_type = other RNA
ttgaatgatgcgaaagaaaa

SEQ ID NO: 58648 - RNA, 20 nt, synthetic construct
  source 1..20: mol_type = other RNA
ttgaatggaaagaaatagaa

SEQ ID NO: 58649 - RNA, 20 nt, synthetic construct
  source 1..20: mol_type = other RNA
ttgaatggggatgcaacaaa

SEQ ID NO: 58650 - RNA, 20 nt, synthetic construct
  source 1..20: mol_type = other RNA
ttgaatgtgcctacatagtc

SEQ ID NO: 58651 - RNA, 20 nt, synthetic construct
  source 1..20: mol_type = other RNA
ttgaatgtggcagaatttac

SEQ ID NO: 58652 - RNA, 20 nt, synthetic construct
  source 1..20: mol_type = other RNA
ttgaattaagcaccactaga

SEQ ID NO: 58653 - RNA, 20 nt, synthetic construct
  source 1..20: mol_type = other RNA
ttgaattagtgattttacca

SEQ ID NO: 58654 - RNA, 20 nt, synthetic construct
  source 1..20: mol_type = other RNA
ttgaattataggcaatttag

SEQ ID NO: 58655 - RNA, 20 nt, synthetic construct
  source 1..20: mol_type = other RNA
ttgaattcagatggccccaa

SEQ ID NO: 58656 - RNA, 20 nt, synthetic construct
  source 1..20: mol_type = other RNA
ttgaattgttgcgcgtcaaa

SEQ ID NO: 58657 - RNA, 20 nt, synthetic construct
  source 1..20: mol_type = other RNA
ttgaattgttggagttcttt

SEQ ID NO: 58658 - RNA, 20 nt, synthetic construct
  source 1..20: mol_type = other RNA
ttgaatttaagacacaagga

SEQ ID NO: 58659 - RNA, 20 nt, synthetic construct
  source 1..20: mol_type = other RNA
ttgaatttctgtccttggat

SEQ ID NO: 58660 - RNA, 20 nt, synthetic construct
  source 1..20: mol_type = other RNA
ttgaatttggaaagggtaga

SEQ ID NO: 58661 - RNA, 20 nt, synthetic construct
  source 1..20: mol_type = other RNA
ttgaattttccattcacaca

SEQ ID NO: 58662 - RNA, 20 nt, synthetic construct
  source 1..20: mol_type = other RNA
ttgacaaaaggccccttgaa

SEQ ID NO: 58663 - RNA, 20 nt, synthetic construct
  source 1..20: mol_type = other RNA
ttgacaagacgtgtacataa

SEQ ID NO: 58664 - RNA, 20 nt, synthetic construct
  source 1..20: mol_type = other RNA
ttgacaataaatggtgcagg

SEQ ID NO: 58665 - RNA, 20 nt, synthetic construct
  source 1..20: mol_type = other RNA
ttgacaatataggagactat

SEQ ID NO: 58666 - RNA, 20 nt, synthetic construct
  source 1..20: mol_type = other RNA
ttgacacaaaggactggaac

SEQ ID NO: 58667 - RNA, 20 nt, synthetic construct
  source 1..20: mol_type = other RNA
ttgacagatgagactcttaa

SEQ ID NO: 58668 - RNA, 20 nt, synthetic construct
  source 1..20: mol_type = other RNA
ttgacagccacgtgtattga

SEQ ID NO: 58669 - RNA, 20 nt, synthetic construct
  source 1..20: mol_type = other RNA
ttgacatcctttaatttggg

SEQ ID NO: 58670 - RNA, 20 nt, synthetic construct
  source 1..20: mol_type = other RNA
ttgacatcctttgcgtctgt

SEQ ID NO: 58671 - RNA, 20 nt, synthetic construct
  source 1..20: mol_type = other RNA
ttgacatcttgcataactcg

SEQ ID NO: 58672 - RNA, 20 nt, synthetic construct
  source 1..20: mol_type = other RNA
ttgacatgacaggtgagtgg

SEQ ID NO: 58673 - RNA, 20 nt, synthetic construct
  source 1..20: mol_type = other RNA
ttgacatgattgaggacttc

SEQ ID NO: 58674 - RNA, 20 nt, synthetic construct
  source 1..20: mol_type = other RNA
ttgacattcttaccttctaa

SEQ ID NO: 58675 - RNA, 20 nt, synthetic construct
  source 1..20: mol_type = other RNA
ttgacatttttcaaatacct

SEQ ID NO: 58676 - RNA, 20 nt, synthetic construct
  source 1..20: mol_type = other RNA
ttgaccaaaacaaaaaacaa

SEQ ID NO: 58677 - RNA, 20 nt, synthetic construct
  source 1..20: mol_type = other RNA
ttgaccaaacatgtgaggat

SEQ ID NO: 58678 - RNA, 20 nt, synthetic construct
  source 1..20: mol_type = other RNA
ttgaccatgggacaagtggg

SEQ ID NO: 58679 - RNA, 20 nt, synthetic construct
  source 1..20: mol_type = other RNA
ttgaccattccacgctgtgg

SEQ ID NO: 58680 - RNA, 20 nt, synthetic construct
  source 1..20: mol_type = other RNA
ttgacccaatcatgttcttt

SEQ ID NO: 58681 - RNA, 20 nt, synthetic construct
  source 1..20: mol_type = other RNA
ttgacccataaactgaacat

SEQ ID NO: 58682 - RNA, 20 nt, synthetic construct
  source 1..20: mol_type = other RNA
ttgaccgctttcgtgagggt

SEQ ID NO: 58683 - RNA, 20 nt, synthetic construct
  source 1..20: mol_type = other RNA
ttgacctcagtggtagttac

SEQ ID NO: 58684 - RNA, 20 nt, synthetic construct
  source 1..20: mol_type = other RNA
ttgacctcccaaaggactgg

SEQ ID NO: 58685 - RNA, 20 nt, synthetic construct
  source 1..20: mol_type = other RNA
ttgacctgtaatttttctct

SEQ ID NO: 58686 - RNA, 20 nt, synthetic construct
  source 1..20: mol_type = other RNA
ttgaccttagtggttgaccc

SEQ ID NO: 58687 - RNA, 20 nt, synthetic construct
  source 1..20: mol_type = other RNA
ttgaccttagttttcacttt

SEQ ID NO: 58688 - RNA, 20 nt, synthetic construct
  source 1..20: mol_type = other RNA
ttgaccttccttgtgtctta

SEQ ID NO: 58689 - RNA, 20 nt, synthetic construct
  source 1..20: mol_type = other RNA
ttgaccttctacttatcttt

SEQ ID NO: 58690 - RNA, 20 nt, synthetic construct
  source 1..20: mol_type = other RNA
ttgaccttgtatccagtaat

SEQ ID NO: 58691 - RNA, 20 nt, synthetic construct
  source 1..20: mol_type = other RNA
ttgaccttgtgcatgtgcag

SEQ ID NO: 58692 - RNA, 20 nt, synthetic construct
  source 1..20: mol_type = other RNA
ttgacgaagtcacattctag

SEQ ID NO: 58693 - RNA, 20 nt, synthetic construct
  source 1..20: mol_type = other RNA
ttgacgcgcaacaattcaac

SEQ ID NO: 58694 - RNA, 20 nt, synthetic construct
  source 1..20: mol_type = other RNA
ttgactaccaattctccctg

SEQ ID NO: 58695 - RNA, 20 nt, synthetic construct
  source 1..20: mol_type = other RNA
ttgactaccatctctccaac

SEQ ID NO: 58696 - RNA, 20 nt, synthetic construct
  source 1..20: mol_type = other RNA
ttgactattttaccctcatt

SEQ ID NO: 58697 - RNA, 20 nt, synthetic construct
  source 1..20: mol_type = other RNA
ttgactcagtacttccctct

SEQ ID NO: 58698 - RNA, 20 nt, synthetic construct
  source 1..20: mol_type = other RNA
ttgactcctaaaacatggtc

SEQ ID NO: 58699 - RNA, 20 nt, synthetic construct
  source 1..20: mol_type = other RNA
ttgactgaattaatctctta

SEQ ID NO: 58700 - RNA, 20 nt, synthetic construct
  source 1..20: mol_type = other RNA
ttgactgacataactgtaaa

SEQ ID NO: 58701 - RNA, 20 nt, synthetic construct
  source 1..20: mol_type = other RNA
ttgacttcactagatctctt

SEQ ID NO: 58702 - RNA, 20 nt, synthetic construct
  source 1..20: mol_type = other RNA
ttgacttcacttccaagtcc

SEQ ID NO: 58703 - RNA, 20 nt, synthetic construct
  source 1..20: mol_type = other RNA
ttgacttctcagggcctgct

SEQ ID NO: 58704 - RNA, 20 nt, synthetic construct
  source 1..20: mol_type = other RNA
ttgactttaccctgctggaa

SEQ ID NO: 58705 - RNA, 20 nt, synthetic construct
  source 1..20: mol_type = other RNA
ttgagaaactatccaacatg

SEQ ID NO: 58706 - RNA, 20 nt, synthetic construct
  source 1..20: mol_type = other RNA
ttgagaaagagggaagtact

SEQ ID NO: 58707 - RNA, 20 nt, synthetic construct
  source 1..20: mol_type = other RNA
ttgagaaagcacataaaaaa

SEQ ID NO: 58708 - RNA, 20 nt, synthetic construct
  source 1..20: mol_type = other RNA
ttgagaaaggtttcttcact

SEQ ID NO: 58709 - RNA, 20 nt, synthetic construct
  source 1..20: mol_type = other RNA
ttgagaagcagaaaatcagt

SEQ ID NO: 58710 - RNA, 20 nt, synthetic construct
  source 1..20: mol_type = other RNA
ttgagaagccacacagtaca

SEQ ID NO: 58711 - RNA, 20 nt, synthetic construct
  source 1..20: mol_type = other RNA
ttgagaagtcttttcctacc

SEQ ID NO: 58712 - RNA, 20 nt, synthetic construct
  source 1..20: mol_type = other RNA
ttgagaatttcaggtgtgta

SEQ ID NO: 58713 - RNA, 20 nt, synthetic construct
  source 1..20: mol_type = other RNA
ttgagacaagaccacaccac

SEQ ID NO: 58714 - RNA, 20 nt, synthetic construct
  source 1..20: mol_type = other RNA
ttgagacacggtctcacact

SEQ ID NO: 58715 - RNA, 20 nt, synthetic construct
  source 1..20: mol_type = other RNA
ttgagacagattctctgtct

SEQ ID NO: 58716 - RNA, 20 nt, synthetic construct
  source 1..20: mol_type = other RNA
ttgagacagggtctcactct

SEQ ID NO: 58717 - RNA, 20 nt, synthetic construct
  source 1..20: mol_type = other RNA
ttgagaccagcgtgggcaac

SEQ ID NO: 58718 - RNA, 20 nt, synthetic construct
  source 1..20: mol_type = other RNA
ttgagacctcaggcagtcta

SEQ ID NO: 58719 - RNA, 20 nt, synthetic construct
  source 1..20: mol_type = other RNA
ttgagacggaagactcatac

SEQ ID NO: 58720 - RNA, 20 nt, synthetic construct
  source 1..20: mol_type = other RNA
ttgagacggaatcttaccct

SEQ ID NO: 58721 - RNA, 20 nt, synthetic construct
  source 1..20: mol_type = other RNA
ttgagactgcagtgacctat

SEQ ID NO: 58722 - RNA, 20 nt, synthetic construct
  source 1..20: mol_type = other RNA
ttgagagagaattctaaatt

SEQ ID NO: 58723 - RNA, 20 nt, synthetic construct
  source 1..20: mol_type = other RNA
ttgagagagataaaacctgg

SEQ ID NO: 58724 - RNA, 20 nt, synthetic construct
  source 1..20: mol_type = other RNA
ttgagagcagagacacacat

SEQ ID NO: 58725 - RNA, 20 nt, synthetic construct
  source 1..20: mol_type = other RNA
ttgagagctttcttttaaag

SEQ ID NO: 58726 - RNA, 20 nt, synthetic construct
  source 1..20: mol_type = other RNA
ttgagaggctttaagcagaa

SEQ ID NO: 58727 - RNA, 20 nt, synthetic construct
  source 1..20: mol_type = other RNA
ttgagagtaagttgcatacg

SEQ ID NO: 58728 - RNA, 20 nt, synthetic construct
  source 1..20: mol_type = other RNA
ttgagagtctcttaagacca

SEQ ID NO: 58729 - RNA, 20 nt, synthetic construct
  source 1..20: mol_type = other RNA
ttgagagtgaaaacacaaac

SEQ ID NO: 58730 - RNA, 20 nt, synthetic construct
  source 1..20: mol_type = other RNA
ttgagagtgcagtatgtagg

SEQ ID NO: 58731 - RNA, 20 nt, synthetic construct
  source 1..20: mol_type = other RNA
ttgagatgtactggaagtgt

SEQ ID NO: 58732 - RNA, 20 nt, synthetic construct
  source 1..20: mol_type = other RNA
ttgagattagcgaaagggat

SEQ ID NO: 58733 - RNA, 20 nt, synthetic construct
  source 1..20: mol_type = other RNA
ttgagatttgagtcttgctc

SEQ ID NO: 58734 - RNA, 20 nt, synthetic construct
  source 1..20: mol_type = other RNA
ttgagattttaattcttctg

SEQ ID NO: 58735 - RNA, 20 nt, synthetic construct
  source 1..20: mol_type = other RNA
ttgagcagagtcctgagggt

SEQ ID NO: 58736 - RNA, 20 nt, synthetic construct
  source 1..20: mol_type = other RNA
ttgagcagatcagtaacaaa

SEQ ID NO: 58737 - RNA, 20 nt, synthetic construct
  source 1..20: mol_type = other RNA
ttgagccaaagaagaaatca

SEQ ID NO: 58738 - RNA, 20 nt, synthetic construct
  source 1..20: mol_type = other RNA
ttgagccatcatgcctgggt

SEQ ID NO: 58739 - RNA, 20 nt, synthetic construct
  source 1..20: mol_type = other RNA
ttgagcccaggaggttgaag

SEQ ID NO: 58740 - RNA, 20 nt, synthetic construct
  source 1..20: mol_type = other RNA
ttgagcccagggggtcgaga

SEQ ID NO: 58741 - RNA, 20 nt, synthetic construct
  source 1..20: mol_type = other RNA
ttgagccccagaataggcaa

SEQ ID NO: 58742 - RNA, 20 nt, synthetic construct
  source 1..20: mol_type = other RNA
ttgagcctggaagttcaagg

SEQ ID NO: 58743 - RNA, 20 nt, synthetic construct
  source 1..20: mol_type = other RNA
ttgagcctgttccgatttta

SEQ ID NO: 58744 - RNA, 20 nt, synthetic construct
  source 1..20: mol_type = other RNA
ttgagctacaaactccaaac

SEQ ID NO: 58745 - RNA, 20 nt, synthetic construct
  source 1..20: mol_type = other RNA
ttgagctgaaagtaaagata

SEQ ID NO: 58746 - RNA, 20 nt, synthetic construct
  source 1..20: mol_type = other RNA
ttgagctgtccccaccgcct

SEQ ID NO: 58747 - RNA, 20 nt, synthetic construct
  source 1..20: mol_type = other RNA
ttgaggacttcatgtacaat

SEQ ID NO: 58748 - RNA, 20 nt, synthetic construct
  source 1..20: mol_type = other RNA
ttgaggatgactgtcctgaa

SEQ ID NO: 58749 - RNA, 20 nt, synthetic construct
  source 1..20: mol_type = other RNA
ttgaggcagagagatggtgg

SEQ ID NO: 58750 - RNA, 20 nt, synthetic construct
  source 1..20: mol_type = other RNA
ttgaggcattagtgaattca

SEQ ID NO: 58751 - RNA, 20 nt, synthetic construct
  source 1..20: mol_type = other RNA
ttgaggccctattcaaccta

SEQ ID NO: 58752 - RNA, 20 nt, synthetic construct
  source 1..20: mol_type = other RNA
ttgaggccgcagtgagccat

SEQ ID NO: 58753 - RNA, 20 nt, synthetic construct
  source 1..20: mol_type = other RNA
ttgaggctgggagtacaaga

SEQ ID NO: 58754 - RNA, 20 nt, synthetic construct
  source 1..20: mol_type = other RNA
ttgaggctgggccctgtggc

SEQ ID NO: 58755 - RNA, 20 nt, synthetic construct
  source 1..20: mol_type = other RNA
ttgaggcttttcatagtcat

SEQ ID NO: 58756 - RNA, 20 nt, synthetic construct
  source 1..20: mol_type = other RNA
ttgaggcttttggattttct

SEQ ID NO: 58757 - RNA, 20 nt, synthetic construct
  source 1..20: mol_type = other RNA
ttgagggtatcatattattt

SEQ ID NO: 58758 - RNA, 20 nt, synthetic construct
  source 1..20: mol_type = other RNA
ttgagggtgctgatcaggaa

SEQ ID NO: 58759 - RNA, 20 nt, synthetic construct
  source 1..20: mol_type = other RNA
ttgagggttagaagacaata

SEQ ID NO: 58760 - RNA, 20 nt, synthetic construct
  source 1..20: mol_type = other RNA
ttgagggttagatttttcct

SEQ ID NO: 58761 - RNA, 20 nt, synthetic construct
  source 1..20: mol_type = other RNA
ttgaggtaagaacttgtctt

SEQ ID NO: 58762 - RNA, 20 nt, synthetic construct
  source 1..20: mol_type = other RNA
ttgaggtagcacaactagta

SEQ ID NO: 58763 - RNA, 20 nt, synthetic construct
  source 1..20: mol_type = other RNA
ttgaggtctaggctaatgtg

SEQ ID NO: 58764 - RNA, 20 nt, synthetic construct
  source 1..20: mol_type = other RNA
ttgaggtcttctagctttca

SEQ ID NO: 58765 - RNA, 20 nt, synthetic construct
  source 1..20: mol_type = other RNA
ttgaggtgagacagaccctg

SEQ ID NO: 58766 - RNA, 20 nt, synthetic construct
  source 1..20: mol_type = other RNA
ttgaggtgattaaaggccct

SEQ ID NO: 58767 - RNA, 20 nt, synthetic construct
  source 1..20: mol_type = other RNA
ttgaggtgattcagagtgct

SEQ ID NO: 58768 - RNA, 20 nt, synthetic construct
  source 1..20: mol_type = other RNA
ttgaggtgtacaattaggct

SEQ ID NO: 58769 - RNA, 20 nt, synthetic construct
  source 1..20: mol_type = other RNA
ttgaggttattaagataatg

SEQ ID NO: 58770 - RNA, 20 nt, synthetic construct
  source 1..20: mol_type = other RNA
ttgaggttgaagacctgcag

SEQ ID NO: 58771 - RNA, 20 nt, synthetic construct
  source 1..20: mol_type = other RNA
ttgaggtttacttggggaga

SEQ ID NO: 58772 - RNA, 20 nt, synthetic construct
  source 1..20: mol_type = other RNA
ttgagtaactaaactattgt

SEQ ID NO: 58773 - RNA, 20 nt, synthetic construct
  source 1..20: mol_type = other RNA
ttgagtacctctgggatgct

SEQ ID NO: 58774 - RNA, 20 nt, synthetic construct
  source 1..20: mol_type = other RNA
ttgagtagcaccctatttat

SEQ ID NO: 58775 - RNA, 20 nt, synthetic construct
  source 1..20: mol_type = other RNA
ttgagtagttcatgttagca

SEQ ID NO: 58776 - RNA, 20 nt, synthetic construct
  source 1..20: mol_type = other RNA
ttgagtatctggtgctggca

SEQ ID NO: 58777 - RNA, 20 nt, synthetic construct
  source 1..20: mol_type = other RNA
ttgagtatcttttcatgttg

SEQ ID NO: 58778 - RNA, 20 nt, synthetic construct
  source 1..20: mol_type = other RNA
ttgagtatttcatgtacttg

SEQ ID NO: 58779 - RNA, 20 nt, synthetic construct
  source 1..20: mol_type = other RNA
ttgagtatttttgagctttt

SEQ ID NO: 58780 - RNA, 20 nt, synthetic construct
  source 1..20: mol_type = other RNA
ttgagtctgtagggtgacta

SEQ ID NO: 58781 - RNA, 20 nt, synthetic construct
  source 1..20: mol_type = other RNA
ttgagtctgtgctctgtatt

SEQ ID NO: 58782 - RNA, 20 nt, synthetic construct
  source 1..20: mol_type = other RNA
ttgagtcttgctctcttgcc

SEQ ID NO: 58783 - RNA, 20 nt, synthetic construct
  source 1..20: mol_type = other RNA
ttgagtcttgtttacccagt

SEQ ID NO: 58784 - RNA, 20 nt, synthetic construct
  source 1..20: mol_type = other RNA
ttgagtgcaggagtttgaga

SEQ ID NO: 58785 - RNA, 20 nt, synthetic construct
  source 1..20: mol_type = other RNA
ttgagtggcatcatactgga

SEQ ID NO: 58786 - RNA, 20 nt, synthetic construct
  source 1..20: mol_type = other RNA
ttgagtgtaaggtgtttggt

SEQ ID NO: 58787 - RNA, 20 nt, synthetic construct
  source 1..20: mol_type = other RNA
ttgagtgtagctgtggctca

SEQ ID NO: 58788 - RNA, 20 nt, synthetic construct
  source 1..20: mol_type = other RNA
ttgagttaggaatttacatt

SEQ ID NO: 58789 - RNA, 20 nt, synthetic construct
  source 1..20: mol_type = other RNA
ttgagttattgcatagggat

SEQ ID NO: 58790 - RNA, 20 nt, synthetic construct
  source 1..20: mol_type = other RNA
ttgagttcagaaagattaat

SEQ ID NO: 58791 - RNA, 20 nt, synthetic construct
  source 1..20: mol_type = other RNA
ttgagttcagttttgtatat

SEQ ID NO: 58792 - RNA, 20 nt, synthetic construct
  source 1..20: mol_type = other RNA
ttgagttcatgtcctttgta

SEQ ID NO: 58793 - RNA, 20 nt, synthetic construct
  source 1..20: mol_type = other RNA
ttgagttgtttccactttga

SEQ ID NO: 58794 - RNA, 20 nt, synthetic construct
  source 1..20: mol_type = other RNA
ttgagtttcaatgactttta

SEQ ID NO: 58795 - RNA, 20 nt, synthetic construct
  source 1..20: mol_type = other RNA
ttgagtttccagaaaactgg

SEQ ID NO: 58796 - RNA, 20 nt, synthetic construct
  source 1..20: mol_type = other RNA
ttgagtttggtgtatttagt

SEQ ID NO: 58797 - RNA, 20 nt, synthetic construct
  source 1..20: mol_type = other RNA
ttgagtttgttctgtcacat

SEQ ID NO: 58798 - RNA, 20 nt, synthetic construct
  source 1..20: mol_type = other RNA
ttgagttttcaacctttgtt

SEQ ID NO: 58799 - RNA, 20 nt, synthetic construct
  source 1..20: mol_type = other RNA
ttgataaaaatctctacagg

SEQ ID NO: 58800 - RNA, 20 nt, synthetic construct
  source 1..20: mol_type = other RNA
ttgataaaagtcattgaaac

SEQ ID NO: 58801 - RNA, 20 nt, synthetic construct
  source 1..20: mol_type = other RNA
ttgataaatctaaagccaat

SEQ ID NO: 58802 - RNA, 20 nt, synthetic construct
  source 1..20: mol_type = other RNA
ttgataagcacatggtgata

SEQ ID NO: 58803 - RNA, 20 nt, synthetic construct
  source 1..20: mol_type = other RNA
ttgatacaatacttggatct

SEQ ID NO: 58804 - RNA, 20 nt, synthetic construct
  source 1..20: mol_type = other RNA
ttgatacggagtctcgctct

SEQ ID NO: 58805 - RNA, 20 nt, synthetic construct
  source 1..20: mol_type = other RNA
ttgatactagtttagtgcag

SEQ ID NO: 58806 - RNA, 20 nt, synthetic construct
  source 1..20: mol_type = other RNA
ttgatagttgcagattcatc

SEQ ID NO: 58807 - RNA, 20 nt, synthetic construct
  source 1..20: mol_type = other RNA
ttgatatctgagtgttgtgt

SEQ ID NO: 58808 - RNA, 20 nt, synthetic construct
  source 1..20: mol_type = other RNA
ttgatatttttcagattgac

SEQ ID NO: 58809 - RNA, 20 nt, synthetic construct
  source 1..20: mol_type = other RNA
ttgatcagcttcctacccaa

SEQ ID NO: 58810 - RNA, 20 nt, synthetic construct
  source 1..20: mol_type = other RNA
ttgatcagggatttggccag

SEQ ID NO: 58811 - RNA, 20 nt, synthetic construct
  source 1..20: mol_type = other RNA
ttgatcatacacatccagaa

SEQ ID NO: 58812 - RNA, 20 nt, synthetic construct
  source 1..20: mol_type = other RNA
ttgatcatcgcattacgagt

SEQ ID NO: 58813 - RNA, 20 nt, synthetic construct
  source 1..20: mol_type = other RNA
ttgatccaggtgtatgatct

SEQ ID NO: 58814 - RNA, 20 nt, synthetic construct
  source 1..20: mol_type = other RNA
ttgatccattacatcaacat

SEQ ID NO: 58815 - RNA, 20 nt, synthetic construct
  source 1..20: mol_type = other RNA
ttgatccattttgagttcag

SEQ ID NO: 58816 - RNA, 20 nt, synthetic construct
  source 1..20: mol_type = other RNA
ttgatcccactagtggaaga

SEQ ID NO: 58817 - RNA, 20 nt, synthetic construct
  source 1..20: mol_type = other RNA
ttgatcctggaatagtagct

SEQ ID NO: 58818 - RNA, 20 nt, synthetic construct
  source 1..20: mol_type = other RNA
ttgatctaaaatggaagact

SEQ ID NO: 58819 - RNA, 20 nt, synthetic construct
  source 1..20: mol_type = other RNA
ttgatctacatttagatttc

SEQ ID NO: 58820 - RNA, 20 nt, synthetic construct
  source 1..20: mol_type = other RNA
ttgatctgccaggacaattg

SEQ ID NO: 58821 - RNA, 20 nt, synthetic construct
  source 1..20: mol_type = other RNA
ttgatctggtcacaaacaca

SEQ ID NO: 58822 - RNA, 20 nt, synthetic construct
  source 1..20: mol_type = other RNA
ttgatctttacttcccttct

SEQ ID NO: 58823 - RNA, 20 nt, synthetic construct
  source 1..20: mol_type = other RNA
ttgatgaattccagtttatc

SEQ ID NO: 58824 - RNA, 20 nt, synthetic construct
  source 1..20: mol_type = other RNA
ttgatgacttacagatatca

SEQ ID NO: 58825 - RNA, 20 nt, synthetic construct
  source 1..20: mol_type = other RNA
ttgatgatagaataccactt

SEQ ID NO: 58826 - RNA, 20 nt, synthetic construct
  source 1..20: mol_type = other RNA
ttgatgcaatttgttttcca

SEQ ID NO: 58827 - RNA, 20 nt, synthetic construct
  source 1..20: mol_type = other RNA
ttgatgcacaaaagtttaac

SEQ ID NO: 58828 - RNA, 20 nt, synthetic construct
  source 1..20: mol_type = other RNA
ttgatgcccccacccttttt

SEQ ID NO: 58829 - RNA, 20 nt, synthetic construct
  source 1..20: mol_type = other RNA
ttgatggctgtactaagcct

SEQ ID NO: 58830 - RNA, 20 nt, synthetic construct
  source 1..20: mol_type = other RNA
ttgatggtttggggcttttg

SEQ ID NO: 58831 - RNA, 20 nt, synthetic construct
  source 1..20: mol_type = other RNA
ttgatgtaatggatcaaggc

SEQ ID NO: 58832 - RNA, 20 nt, synthetic construct
  source 1..20: mol_type = other RNA
ttgatgtcacaagccagggt

SEQ ID NO: 58833 - RNA, 20 nt, synthetic construct
  source 1..20: mol_type = other RNA
ttgatgttttacattttcca

SEQ ID NO: 58834 - RNA, 20 nt, synthetic construct
  source 1..20: mol_type = other RNA
ttgattacaagggtgacaga

SEQ ID NO: 58835 - RNA, 20 nt, synthetic construct
  source 1..20: mol_type = other RNA
ttgattactgactcaatctt

SEQ ID NO: 58836 - RNA, 20 nt, synthetic construct
  source 1..20: mol_type = other RNA
ttgattactttacagttatg

SEQ ID NO: 58837 - RNA, 20 nt, synthetic construct
  source 1..20: mol_type = other RNA
ttgattagcttcctcaggat

SEQ ID NO: 58838 - RNA, 20 nt, synthetic construct
  source 1..20: mol_type = other RNA
ttgattagttgactcctaaa

SEQ ID NO: 58839 - RNA, 20 nt, synthetic construct
  source 1..20: mol_type = other RNA
ttgattatgttagatatccc

SEQ ID NO: 58840 - RNA, 20 nt, synthetic construct
  source 1..20: mol_type = other RNA
ttgattatttttacccaaca

SEQ ID NO: 58841 - RNA, 20 nt, synthetic construct
  source 1..20: mol_type = other RNA
ttgattcagatgacagaaat

SEQ ID NO: 58842 - RNA, 20 nt, synthetic construct
  source 1..20: mol_type = other RNA
ttgattccagtttctctgct

SEQ ID NO: 58843 - RNA, 20 nt, synthetic construct
  source 1..20: mol_type = other RNA
ttgattgccagttttctgga

SEQ ID NO: 58844 - RNA, 20 nt, synthetic construct
  source 1..20: mol_type = other RNA
ttgattggcaaatctttagt

SEQ ID NO: 58845 - RNA, 20 nt, synthetic construct
  source 1..20: mol_type = other RNA
ttgattgggcattaattgag

SEQ ID NO: 58846 - RNA, 20 nt, synthetic construct
  source 1..20: mol_type = other RNA
ttgattgttagccacagcgt

SEQ ID NO: 58847 - RNA, 20 nt, synthetic construct
  source 1..20: mol_type = other RNA
ttgattgttccaggggggaa

SEQ ID NO: 58848 - RNA, 20 nt, synthetic construct
  source 1..20: mol_type = other RNA
ttgattgttgccatcatttt

SEQ ID NO: 58849 - RNA, 20 nt, synthetic construct
  source 1..20: mol_type = other RNA
ttgatttagaaatacctgca

SEQ ID NO: 58850 - RNA, 20 nt, synthetic construct
  source 1..20: mol_type = other RNA
ttgatttatggcctaagatg

SEQ ID NO: 58851 - RNA, 20 nt, synthetic construct
  source 1..20: mol_type = other RNA
ttgatttcttctttggctca

SEQ ID NO: 58852 - RNA, 20 nt, synthetic construct
  source 1..20: mol_type = other RNA
ttgatttgaccatgggacaa

SEQ ID NO: 58853 - RNA, 20 nt, synthetic construct
  source 1..20: mol_type = other RNA
ttgatttgcatttctctaat

SEQ ID NO: 58854 - RNA, 20 nt, synthetic construct
  source 1..20: mol_type = other RNA
ttgatttgttatatccagat

SEQ ID NO: 58855 - RNA, 20 nt, synthetic construct
  source 1..20: mol_type = other RNA
ttgattttgaggcagagaga

SEQ ID NO: 58856 - RNA, 20 nt, synthetic construct
  source 1..20: mol_type = other RNA
ttgattttgtatcctgagac

SEQ ID NO: 58857 - RNA, 20 nt, synthetic construct
  source 1..20: mol_type = other RNA
ttgattttgtttatttgctg

SEQ ID NO: 58858 - RNA, 20 nt, synthetic construct
  source 1..20: mol_type = other RNA
ttgcaaaaacagtttccctc

SEQ ID NO: 58859 - RNA, 20 nt, synthetic construct
  source 1..20: mol_type = other RNA
ttgcaaaaatactacaagag

SEQ ID NO: 58860 - RNA, 20 nt, synthetic construct
  source 1..20: mol_type = other RNA
ttgcaaaaattttgttcagg

SEQ ID NO: 58861 - RNA, 20 nt, synthetic construct
  source 1..20: mol_type = other RNA
ttgcaaaacaatagcccagc

SEQ ID NO: 58862 - RNA, 20 nt, synthetic construct
  source 1..20: mol_type = other RNA
ttgcaaaacggaaactttat

SEQ ID NO: 58863 - RNA, 20 nt, synthetic construct
  source 1..20: mol_type = other RNA
ttgcaaaccaaatgcagaaa

SEQ ID NO: 58864 - RNA, 20 nt, synthetic construct
  source 1..20: mol_type = other RNA
ttgcaaactaagtggtattc

SEQ ID NO: 58865 - RNA, 20 nt, synthetic construct
  source 1..20: mol_type = other RNA
ttgcaaattattttcctcct

SEQ ID NO: 58866 - RNA, 20 nt, synthetic construct
  source 1..20: mol_type = other RNA
ttgcaacagaataaatgaaa

SEQ ID NO: 58867 - RNA, 20 nt, synthetic construct
  source 1..20: mol_type = other RNA
ttgcaagatgcataagttct

SEQ ID NO: 58868 - RNA, 20 nt, synthetic construct
  source 1..20: mol_type = other RNA
ttgcaagattaatcttgtga

SEQ ID NO: 58869 - RNA, 20 nt, synthetic construct
  source 1..20: mol_type = other RNA
ttgcaagccacattagccac

SEQ ID NO: 58870 - RNA, 20 nt, synthetic construct
  source 1..20: mol_type = other RNA
ttgcaaggcccaccatgatg

SEQ ID NO: 58871 - RNA, 20 nt, synthetic construct
  source 1..20: mol_type = other RNA
ttgcaatacagttaacgtat

SEQ ID NO: 58872 - RNA, 20 nt, synthetic construct
  source 1..20: mol_type = other RNA
ttgcaatttatatgatactc

SEQ ID NO: 58873 - RNA, 20 nt, synthetic construct
  source 1..20: mol_type = other RNA
ttgcacaaaagtgaaaacta

SEQ ID NO: 58874 - RNA, 20 nt, synthetic construct
  source 1..20: mol_type = other RNA
ttgcacaatgttgtggatgt

SEQ ID NO: 58875 - RNA, 20 nt, synthetic construct
  source 1..20: mol_type = other RNA
ttgcacacaccaaatcatga

SEQ ID NO: 58876 - RNA, 20 nt, synthetic construct
  source 1..20: mol_type = other RNA
ttgcacagtctcccccaggt

SEQ ID NO: 58877 - RNA, 20 nt, synthetic construct
  source 1..20: mol_type = other RNA
ttgcacattagaatcatccg

SEQ ID NO: 58878 - RNA, 20 nt, synthetic construct
  source 1..20: mol_type = other RNA
ttgcaccaactccacattgt

SEQ ID NO: 58879 - RNA, 20 nt, synthetic construct
  source 1..20: mol_type = other RNA
ttgcacggtgaagaaccgac

SEQ ID NO: 58880 - RNA, 20 nt, synthetic construct
  source 1..20: mol_type = other RNA
ttgcacgtttttagaaattt

SEQ ID NO: 58881 - RNA, 20 nt, synthetic construct
  source 1..20: mol_type = other RNA
ttgcactccacgtgggtgac

SEQ ID NO: 58882 - RNA, 20 nt, synthetic construct
  source 1..20: mol_type = other RNA
ttgcactggcacagcactgt

SEQ ID NO: 58883 - RNA, 20 nt, synthetic construct
  source 1..20: mol_type = other RNA
ttgcagaagagtgaagctgg

SEQ ID NO: 58884 - RNA, 20 nt, synthetic construct
  source 1..20: mol_type = other RNA
ttgcagacaataattcttcc

SEQ ID NO: 58885 - RNA, 20 nt, synthetic construct
  source 1..20: mol_type = other RNA
ttgcagagacggggtcccac

SEQ ID NO: 58886 - RNA, 20 nt, synthetic construct
  source 1..20: mol_type = other RNA
ttgcagagactggatagcaa

SEQ ID NO: 58887 - RNA, 20 nt, synthetic construct
  source 1..20: mol_type = other RNA
ttgcagagcaaactcagatc

SEQ ID NO: 58888 - RNA, 20 nt, synthetic construct
  source 1..20: mol_type = other RNA
ttgcagagtgttcaaaagcc

SEQ ID NO: 58889 - RNA, 20 nt, synthetic construct
  source 1..20: mol_type = other RNA
ttgcagattcatcttgactt

SEQ ID NO: 58890 - RNA, 20 nt, synthetic construct
  source 1..20: mol_type = other RNA
ttgcagcatgctcactgtct

SEQ ID NO: 58891 - RNA, 20 nt, synthetic construct
  source 1..20: mol_type = other RNA
ttgcagccagagagtggaaa

SEQ ID NO: 58892 - RNA, 20 nt, synthetic construct
  source 1..20: mol_type = other RNA
ttgcagccttccctgaacaa

SEQ ID NO: 58893 - RNA, 20 nt, synthetic construct
  source 1..20: mol_type = other RNA
ttgcaggtgtgggccaccaa

SEQ ID NO: 58894 - RNA, 20 nt, synthetic construct
  source 1..20: mol_type = other RNA
ttgcaggtttactccaagaa

SEQ ID NO: 58895 - RNA, 20 nt, synthetic construct
  source 1..20: mol_type = other RNA
ttgcagtagtattgaactgt

SEQ ID NO: 58896 - RNA, 20 nt, synthetic construct
  source 1..20: mol_type = other RNA
ttgcagtccccggtctttcc

SEQ ID NO: 58897 - RNA, 20 nt, synthetic construct
  source 1..20: mol_type = other RNA
ttgcagtgagcccagagatc

SEQ ID NO: 58898 - RNA, 20 nt, synthetic construct
  source 1..20: mol_type = other RNA
ttgcagttggggactcttat

SEQ ID NO: 58899 - RNA, 20 nt, synthetic construct
  source 1..20: mol_type = other RNA
ttgcataactcgtaatgcga

SEQ ID NO: 58900 - RNA, 20 nt, synthetic construct
  source 1..20: mol_type = other RNA
ttgcatacgtcgtcccccat

SEQ ID NO: 58901 - RNA, 20 nt, synthetic construct
  source 1..20: mol_type = other RNA
ttgcatagggatgttgccta

SEQ ID NO: 58902 - RNA, 20 nt, synthetic construct
  source 1..20: mol_type = other RNA
ttgcatcaactgcttcccta

SEQ ID NO: 58903 - RNA, 20 nt, synthetic construct
  source 1..20: mol_type = other RNA
ttgcatcacttgaggtgatt

SEQ ID NO: 58904 - RNA, 20 nt, synthetic construct
  source 1..20: mol_type = other RNA
ttgcatccccattcaattgt

SEQ ID NO: 58905 - RNA, 20 nt, synthetic construct
  source 1..20: mol_type = other RNA
ttgcatgaatttgttttctt

SEQ ID NO: 58906 - RNA, 20 nt, synthetic construct
  source 1..20: mol_type = other RNA
ttgcatgagacttggagttt

SEQ ID NO: 58907 - RNA, 20 nt, synthetic construct
  source 1..20: mol_type = other RNA
ttgcattaatgcttcatatt

SEQ ID NO: 58908 - RNA, 20 nt, synthetic construct
  source 1..20: mol_type = other RNA
ttgcattacatgaatggaaa

SEQ ID NO: 58909 - RNA, 20 nt, synthetic construct
  source 1..20: mol_type = other RNA
ttgcattagagccccaagaa

SEQ ID NO: 58910 - RNA, 20 nt, synthetic construct
  source 1..20: mol_type = other RNA
ttgcattcctgaaatgaacc

SEQ ID NO: 58911 - RNA, 20 nt, synthetic construct
  source 1..20: mol_type = other RNA
ttgcattgactaccaattct

SEQ ID NO: 58912 - RNA, 20 nt, synthetic construct
  source 1..20: mol_type = other RNA
ttgcatttacttgtcatttc

SEQ ID NO: 58913 - RNA, 20 nt, synthetic construct
  source 1..20: mol_type = other RNA
ttgcatttctctaatagcta

SEQ ID NO: 58914 - RNA, 20 nt, synthetic construct
  source 1..20: mol_type = other RNA
ttgccaaaatgattttcaca

SEQ ID NO: 58915 - RNA, 20 nt, synthetic construct
  source 1..20: mol_type = other RNA
ttgccaaactgttttccaca

SEQ ID NO: 58916 - RNA, 20 nt, synthetic construct
  source 1..20: mol_type = other RNA
ttgccaaagattcttgtcat

SEQ ID NO: 58917 - RNA, 20 nt, synthetic construct
  source 1..20: mol_type = other RNA
ttgccaaattatttgagagt

SEQ ID NO: 58918 - RNA, 20 nt, synthetic construct
  source 1..20: mol_type = other RNA
ttgccaacagttactttcct

SEQ ID NO: 58919 - RNA, 20 nt, synthetic construct
  source 1..20: mol_type = other RNA
ttgccaaggcttgctttggc

SEQ ID NO: 58920 - RNA, 20 nt, synthetic construct
  source 1..20: mol_type = other RNA
ttgccaagtataagatgatg

SEQ ID NO: 58921 - RNA, 20 nt, synthetic construct
  source 1..20: mol_type = other RNA
ttgccaatatctatcagggc

SEQ ID NO: 58922 - RNA, 20 nt, synthetic construct
  source 1..20: mol_type = other RNA
ttgccaatcaataattctgt

SEQ ID NO: 58923 - RNA, 20 nt, synthetic construct
  source 1..20: mol_type = other RNA
ttgccacattttaccaaaac

SEQ ID NO: 58924 - RNA, 20 nt, synthetic construct
  source 1..20: mol_type = other RNA
ttgccagctaacttttaacc

SEQ ID NO: 58925 - RNA, 20 nt, synthetic construct
  source 1..20: mol_type = other RNA
ttgccaggtggacgcggccc

SEQ ID NO: 58926 - RNA, 20 nt, synthetic construct
  source 1..20: mol_type = other RNA
ttgccaggtttgtgcttgga

SEQ ID NO: 58927 - RNA, 20 nt, synthetic construct
  source 1..20: mol_type = other RNA
ttgccagtgttttaaagcag

SEQ ID NO: 58928 - RNA, 20 nt, synthetic construct
  source 1..20: mol_type = other RNA
ttgccagttttctggaaact

SEQ ID NO: 58929 - RNA, 20 nt, synthetic construct
  source 1..20: mol_type = other RNA
ttgccatatgtagggcaccg

SEQ ID NO: 58930 - RNA, 20 nt, synthetic construct
  source 1..20: mol_type = other RNA
ttgccatcattttatgaaac

SEQ ID NO: 58931 - RNA, 20 nt, synthetic construct
  source 1..20: mol_type = other RNA
ttgccatcttcaagatttca

SEQ ID NO: 58932 - RNA, 20 nt, synthetic construct
  source 1..20: mol_type = other RNA
ttgccatcttgcataagttt

SEQ ID NO: 58933 - RNA, 20 nt, synthetic construct
  source 1..20: mol_type = other RNA
ttgccattctcccagttgtc

SEQ ID NO: 58934 - RNA, 20 nt, synthetic construct
  source 1..20: mol_type = other RNA
ttgcccactcttatatccta

SEQ ID NO: 58935 - RNA, 20 nt, synthetic construct
  source 1..20: mol_type = other RNA
ttgcccagactggagttcac

SEQ ID NO: 58936 - RNA, 20 nt, synthetic construct
  source 1..20: mol_type = other RNA
ttgcccaggctggtcttgta

SEQ ID NO: 58937 - RNA, 20 nt, synthetic construct
  source 1..20: mol_type = other RNA
ttgcccattataaaatagga

SEQ ID NO: 58938 - RNA, 20 nt, synthetic construct
  source 1..20: mol_type = other RNA
ttgccccattgcactccacg

SEQ ID NO: 58939 - RNA, 20 nt, synthetic construct
  source 1..20: mol_type = other RNA
ttgcctaacaccagtaagat

SEQ ID NO: 58940 - RNA, 20 nt, synthetic construct
  source 1..20: mol_type = other RNA
ttgcctaagtctcaggatac

SEQ ID NO: 58941 - RNA, 20 nt, synthetic construct
  source 1..20: mol_type = other RNA
ttgcctactagccagtgatt

SEQ ID NO: 58942 - RNA, 20 nt, synthetic construct
  source 1..20: mol_type = other RNA
ttgcctataattcaattttc

SEQ ID NO: 58943 - RNA, 20 nt, synthetic construct
  source 1..20: mol_type = other RNA
ttgcctatagacagcatccc

SEQ ID NO: 58944 - RNA, 20 nt, synthetic construct
  source 1..20: mol_type = other RNA
ttgcctattctggggctcaa

SEQ ID NO: 58945 - RNA, 20 nt, synthetic construct
  source 1..20: mol_type = other RNA
ttgcctccatatgggatgct

SEQ ID NO: 58946 - RNA, 20 nt, synthetic construct
  source 1..20: mol_type = other RNA
ttgcctcctgggttcaggtg

SEQ ID NO: 58947 - RNA, 20 nt, synthetic construct
  source 1..20: mol_type = other RNA
ttgcctctccagggaggaat

SEQ ID NO: 58948 - RNA, 20 nt, synthetic construct
  source 1..20: mol_type = other RNA
ttgcctctgtgctagccttc

SEQ ID NO: 58949 - RNA, 20 nt, synthetic construct
  source 1..20: mol_type = other RNA
ttgcctctttgctaataagt

SEQ ID NO: 58950 - RNA, 20 nt, synthetic construct
  source 1..20: mol_type = other RNA
ttgcctgacagcaaataaac

SEQ ID NO: 58951 - RNA, 20 nt, synthetic construct
  source 1..20: mol_type = other RNA
ttgcctgcgtccgtagaccg

SEQ ID NO: 58952 - RNA, 20 nt, synthetic construct
  source 1..20: mol_type = other RNA
ttgcctggatgaatgcagtg

SEQ ID NO: 58953 - RNA, 20 nt, synthetic construct
  source 1..20: mol_type = other RNA
ttgcctgtagttttggtgtc

SEQ ID NO: 58954 - RNA, 20 nt, synthetic construct
  source 1..20: mol_type = other RNA
ttgccttcaagttgcttttt

SEQ ID NO: 58955 - RNA, 20 nt, synthetic construct
  source 1..20: mol_type = other RNA
ttgccttcgcagggtgaaac

SEQ ID NO: 58956 - RNA, 20 nt, synthetic construct
  source 1..20: mol_type = other RNA
ttgcctttcactttgatcat

SEQ ID NO: 58957 - RNA, 20 nt, synthetic construct
  source 1..20: mol_type = other RNA
ttgcctttcgcttttggagc

SEQ ID NO: 58958 - RNA, 20 nt, synthetic construct
  source 1..20: mol_type = other RNA
ttgccttttcactcttagtg

SEQ ID NO: 58959 - RNA, 20 nt, synthetic construct
  source 1..20: mol_type = other RNA
ttgcgaaacacactcgtgta

SEQ ID NO: 58960 - RNA, 20 nt, synthetic construct
  source 1..20: mol_type = other RNA
ttgcgaaatagtagttgctc

SEQ ID NO: 58961 - RNA, 20 nt, synthetic construct
  source 1..20: mol_type = other RNA
ttgcgattgtttcagtgtgt

SEQ ID NO: 58962 - RNA, 20 nt, synthetic construct
  source 1..20: mol_type = other RNA
ttgcgcagaactggggcttg

SEQ ID NO: 58963 - RNA, 20 nt, synthetic construct
  source 1..20: mol_type = other RNA
ttgcgcgtcaaaagatgctg

SEQ ID NO: 58964 - RNA, 20 nt, synthetic construct
  source 1..20: mol_type = other RNA
ttgcggcttgattagcttcc

SEQ ID NO: 58965 - RNA, 20 nt, synthetic construct
  source 1..20: mol_type = other RNA
ttgcggtcttttagccaaca

SEQ ID NO: 58966 - RNA, 20 nt, synthetic construct
  source 1..20: mol_type = other RNA
ttgcggtgacgtgagatcat

SEQ ID NO: 58967 - RNA, 20 nt, synthetic construct
  source 1..20: mol_type = other RNA
ttgcgtctgtgattatcagg

SEQ ID NO: 58968 - RNA, 20 nt, synthetic construct
  source 1..20: mol_type = other RNA
ttgctaaacatgtatactaa

SEQ ID NO: 58969 - RNA, 20 nt, synthetic construct
  source 1..20: mol_type = other RNA
ttgctaaactgttccccaag

SEQ ID NO: 58970 - RNA, 20 nt, synthetic construct
  source 1..20: mol_type = other RNA
ttgctaataagtgagtttga

SEQ ID NO: 58971 - RNA, 20 nt, synthetic construct
  source 1..20: mol_type = other RNA
ttgctaataatgatgactat

SEQ ID NO: 58972 - RNA, 20 nt, synthetic construct
  source 1..20: mol_type = other RNA
ttgctaattcattgtacatg

SEQ ID NO: 58973 - RNA, 20 nt, synthetic construct
  source 1..20: mol_type = other RNA
ttgctagagctgctgtaaca

SEQ ID NO: 58974 - RNA, 20 nt, synthetic construct
  source 1..20: mol_type = other RNA
ttgctagtagcagaatcccc

SEQ ID NO: 58975 - RNA, 20 nt, synthetic construct
  source 1..20: mol_type = other RNA
ttgctagtattttgttgaca

SEQ ID NO: 58976 - RNA, 20 nt, synthetic construct
  source 1..20: mol_type = other RNA
ttgctagtggtaactagatg

SEQ ID NO: 58977 - RNA, 20 nt, synthetic construct
  source 1..20: mol_type = other RNA
ttgctagtgtcctcaggctc

SEQ ID NO: 58978 - RNA, 20 nt, synthetic construct
  source 1..20: mol_type = other RNA
ttgctatccagtctctgcaa

SEQ ID NO: 58979 - RNA, 20 nt, synthetic construct
  source 1..20: mol_type = other RNA
ttgctatgtaatctcatgga

SEQ ID NO: 58980 - RNA, 20 nt, synthetic construct
  source 1..20: mol_type = other RNA
ttgctattgttgaattgttg

SEQ ID NO: 58981 - RNA, 20 nt, synthetic construct
  source 1..20: mol_type = other RNA
ttgctcacacttactaaatg

SEQ ID NO: 58982 - RNA, 20 nt, synthetic construct
  source 1..20: mol_type = other RNA
ttgctcagaaaattttcttt

SEQ ID NO: 58983 - RNA, 20 nt, synthetic construct
  source 1..20: mol_type = other RNA
ttgctcaggagtaactgctc

SEQ ID NO: 58984 - RNA, 20 nt, synthetic construct
  source 1..20: mol_type = other RNA
ttgctcattcatctgcagtg

SEQ ID NO: 58985 - RNA, 20 nt, synthetic construct
  source 1..20: mol_type = other RNA
ttgctccagagaagttttcc

SEQ ID NO: 58986 - RNA, 20 nt, synthetic construct
  source 1..20: mol_type = other RNA
ttgctctacaaaccttctta

SEQ ID NO: 58987 - RNA, 20 nt, synthetic construct
  source 1..20: mol_type = other RNA
ttgctctcttgcccaagctg

SEQ ID NO: 58988 - RNA, 20 nt, synthetic construct
  source 1..20: mol_type = other RNA
ttgctctgcaaatgaggttg

SEQ ID NO: 58989 - RNA, 20 nt, synthetic construct
  source 1..20: mol_type = other RNA
ttgctctgcggcaggcattg

SEQ ID NO: 58990 - RNA, 20 nt, synthetic construct
  source 1..20: mol_type = other RNA
ttgctctgtcacccacgtgg

SEQ ID NO: 58991 - RNA, 20 nt, synthetic construct
  source 1..20: mol_type = other RNA
ttgctgaagaataactgtcc

SEQ ID NO: 58992 - RNA, 20 nt, synthetic construct
  source 1..20: mol_type = other RNA
ttgctgacttcctggctcta

SEQ ID NO: 58993 - RNA, 20 nt, synthetic construct
  source 1..20: mol_type = other RNA
ttgctgagggaatttttctt

SEQ ID NO: 58994 - RNA, 20 nt, synthetic construct
  source 1..20: mol_type = other RNA
ttgctgcactggctattagt

SEQ ID NO: 58995 - RNA, 20 nt, synthetic construct
  source 1..20: mol_type = other RNA
ttgctgcagtttttccacta

SEQ ID NO: 58996 - RNA, 20 nt, synthetic construct
  source 1..20: mol_type = other RNA
ttgctgcatagtactccatt

SEQ ID NO: 58997 - RNA, 20 nt, synthetic construct
  source 1..20: mol_type = other RNA
ttgctgcatcccaagggttt

SEQ ID NO: 58998 - RNA, 20 nt, synthetic construct
  source 1..20: mol_type = other RNA
ttgctgccaagtcagcactt

SEQ ID NO: 58999 - RNA, 20 nt, synthetic construct
  source 1..20: mol_type = other RNA
ttgctgccccagctaaaatg

SEQ ID NO: 59000 - RNA, 20 nt, synthetic construct
  source 1..20: mol_type = other RNA
ttgctgcttctacccactat

SEQ ID NO: 59001 - RNA, 20 nt, synthetic construct
  source 1..20: mol_type = other RNA
ttgctggaagttggcccaac

SEQ ID NO: 59002 - RNA, 20 nt, synthetic construct
  source 1..20: mol_type = other RNA
ttgctggctcagtctgtttg

SEQ ID NO: 59003 - RNA, 20 nt, synthetic construct
  source 1..20: mol_type = other RNA
ttgctgtataacattttctc

SEQ ID NO: 59004 - RNA, 20 nt, synthetic construct
  source 1..20: mol_type = other RNA
ttgctgtatacccaggtgtg

SEQ ID NO: 59005 - RNA, 20 nt, synthetic construct
  source 1..20: mol_type = other RNA
ttgctgtcaggcaagggact

SEQ ID NO: 59006 - RNA, 20 nt, synthetic construct
  source 1..20: mol_type = other RNA
ttgctgttgtaatgttactt

SEQ ID NO: 59007 - RNA, 20 nt, synthetic construct
  source 1..20: mol_type = other RNA
ttgcttaaagttggtcctgc

SEQ ID NO: 59008 - RNA, 20 nt, synthetic construct
  source 1..20: mol_type = other RNA
ttgcttaagtcactccattt

SEQ ID NO: 59009 - RNA, 20 nt, synthetic construct
  source 1..20: mol_type = other RNA
ttgcttaattgagctgtccc

SEQ ID NO: 59010 - RNA, 20 nt, synthetic construct
  source 1..20: mol_type = other RNA
ttgcttactctaatggggaa

SEQ ID NO: 59011 - RNA, 20 nt, synthetic construct
  source 1..20: mol_type = other RNA
ttgcttactgtagcattgaa

SEQ ID NO: 59012 - RNA, 20 nt, synthetic construct
  source 1..20: mol_type = other RNA
ttgcttaggctgaagcaggc

SEQ ID NO: 59013 - RNA, 20 nt, synthetic construct
  source 1..20: mol_type = other RNA
ttgcttaggctgttattaga

SEQ ID NO: 59014 - RNA, 20 nt, synthetic construct
  source 1..20: mol_type = other RNA
ttgcttataacaagaaaatc

SEQ ID NO: 59015 - RNA, 20 nt, synthetic construct
  source 1..20: mol_type = other RNA
ttgcttcaaagagaacaaaa

SEQ ID NO: 59016 - RNA, 20 nt, synthetic construct
  source 1..20: mol_type = other RNA
ttgcttcccacttcgaaagt

SEQ ID NO: 59017 - RNA, 20 nt, synthetic construct
  source 1..20: mol_type = other RNA
ttgcttcgaagcttattaaa

SEQ ID NO: 59018 - RNA, 20 nt, synthetic construct
  source 1..20: mol_type = other RNA
ttgcttgagagagataaaac

SEQ ID NO: 59019 - RNA, 20 nt, synthetic construct
  source 1..20: mol_type = other RNA
ttgcttgctctacaaacctt

SEQ ID NO: 59020 - RNA, 20 nt, synthetic construct
  source 1..20: mol_type = other RNA
ttgcttggcacagaattatt

SEQ ID NO: 59021 - RNA, 20 nt, synthetic construct
  source 1..20: mol_type = other RNA
ttgcttgggaacagcagggg

SEQ ID NO: 59022 - RNA, 20 nt, synthetic construct
  source 1..20: mol_type = other RNA
ttgcttggtgttgactgaat

SEQ ID NO: 59023 - RNA, 20 nt, synthetic construct
  source 1..20: mol_type = other RNA
ttgcttggtttcacacgcat

SEQ ID NO: 59024 - RNA, 20 nt, synthetic construct
  source 1..20: mol_type = other RNA
ttgcttgtcttgaatagcat

SEQ ID NO: 59025 - RNA, 20 nt, synthetic construct
  source 1..20: mol_type = other RNA
ttgctttaacctctggtatt

SEQ ID NO: 59026 - RNA, 20 nt, synthetic construct
  source 1..20: mol_type = other RNA
ttgctttactactgcatttt

SEQ ID NO: 59027 - RNA, 20 nt, synthetic construct
  source 1..20: mol_type = other RNA
ttgctttattacttcagttt

SEQ ID NO: 59028 - RNA, 20 nt, synthetic construct
  source 1..20: mol_type = other RNA
ttgctttgaatttggaaagg

SEQ ID NO: 59029 - RNA, 20 nt, synthetic construct
  source 1..20: mol_type = other RNA
ttgctttgcgaaatagtagt

SEQ ID NO: 59030 - RNA, 20 nt, synthetic construct
  source 1..20: mol_type = other RNA
ttgctttgctgccccagcta

SEQ ID NO: 59031 - RNA, 20 nt, synthetic construct
  source 1..20: mol_type = other RNA
ttgctttggagtcacagtga

SEQ ID NO: 59032 - RNA, 20 nt, synthetic construct
  source 1..20: mol_type = other RNA
ttgctttggagtgagaggac

SEQ ID NO: 59033 - RNA, 20 nt, synthetic construct
  source 1..20: mol_type = other RNA
ttgctttggctagaagcatc

SEQ ID NO: 59034 - RNA, 20 nt, synthetic construct
  source 1..20: mol_type = other RNA
ttgctttgggtctatagttt

SEQ ID NO: 59035 - RNA, 20 nt, synthetic construct
  source 1..20: mol_type = other RNA
ttgcttttacttggctcctc

SEQ ID NO: 59036 - RNA, 20 nt, synthetic construct
  source 1..20: mol_type = other RNA
ttgcttttcctggaaaactt

SEQ ID NO: 59037 - RNA, 20 nt, synthetic construct
  source 1..20: mol_type = other RNA
ttgcttttgctgagggaatt

SEQ ID NO: 59038 - RNA, 20 nt, synthetic construct
  source 1..20: mol_type = other RNA
ttgcttttgctttgggtcta

SEQ ID NO: 59039 - RNA, 20 nt, synthetic construct
  source 1..20: mol_type = other RNA
ttgctttttcttcttgtttt

SEQ ID NO: 59040 - RNA, 20 nt, synthetic construct
  source 1..20: mol_type = other RNA
ttggaaaaatcgtcctcttc

SEQ ID NO: 59041 - RNA, 20 nt, synthetic construct
  source 1..20: mol_type = other RNA
ttggaaaaatgtccgttgaa

SEQ ID NO: 59042 - RNA, 20 nt, synthetic construct
  source 1..20: mol_type = other RNA
ttggaaaacaaattgcatca

SEQ ID NO: 59043 - RNA, 20 nt, synthetic construct
  source 1..20: mol_type = other RNA
ttggaaaactaggtatttga

SEQ ID NO: 59044 - RNA, 20 nt, synthetic construct
  source 1..20: mol_type = other RNA
ttggaaaactctgtttcctt

SEQ ID NO: 59045 - RNA, 20 nt, synthetic construct
  source 1..20: mol_type = other RNA
ttggaaaacttttaactgaa

SEQ ID NO: 59046 - RNA, 20 nt, synthetic construct
  source 1..20: mol_type = other RNA
ttggaaaagaaagctgtgga

SEQ ID NO: 59047 - RNA, 20 nt, synthetic construct
  source 1..20: mol_type = other RNA
ttggaaagggtagagcactt

SEQ ID NO: 59048 - RNA, 20 nt, synthetic construct
  source 1..20: mol_type = other RNA
ttggaaatatggtcactgct

SEQ ID NO: 59049 - RNA, 20 nt, synthetic construct
  source 1..20: mol_type = other RNA
ttggaaatgatacctcattt

SEQ ID NO: 59050 - RNA, 20 nt, synthetic construct
  source 1..20: mol_type = other RNA
ttggaaattagaaatgtgga

SEQ ID NO: 59051 - RNA, 20 nt, synthetic construct
  source 1..20: mol_type = other RNA
ttggaacctttgtccactgt

SEQ ID NO: 59052 - RNA, 20 nt, synthetic construct
  source 1..20: mol_type = other RNA
ttggaactcttgcggtcttt

SEQ ID NO: 59053 - RNA, 20 nt, synthetic construct
  source 1..20: mol_type = other RNA
ttggaagactatcacgattc

SEQ ID NO: 59054 - RNA, 20 nt, synthetic construct
  source 1..20: mol_type = other RNA
ttggaagactatgagaagga

SEQ ID NO: 59055 - RNA, 20 nt, synthetic construct
  source 1..20: mol_type = other RNA
ttggaagagagaaggctgcc

SEQ ID NO: 59056 - RNA, 20 nt, synthetic construct
  source 1..20: mol_type = other RNA
ttggaagcatgtggccagga

SEQ ID NO: 59057 - RNA, 20 nt, synthetic construct
  source 1..20: mol_type = other RNA
ttggaaggtaggagggtgtg

SEQ ID NO: 59058 - RNA, 20 nt, synthetic construct
  source 1..20: mol_type = other RNA
ttggaagtgaagtcaagatg

SEQ ID NO: 59059 - RNA, 20 nt, synthetic construct
  source 1..20: mol_type = other RNA
ttggaagtttctggaagttt

SEQ ID NO: 59060 - RNA, 20 nt, synthetic construct
  source 1..20: mol_type = other RNA
ttggaatagagagcccagaa

SEQ ID NO: 59061 - RNA, 20 nt, synthetic construct
  source 1..20: mol_type = other RNA
ttggaatgagtccagctttc

SEQ ID NO: 59062 - RNA, 20 nt, synthetic construct
  source 1..20: mol_type = other RNA
ttggaatgtgcacctccagt

SEQ ID NO: 59063 - RNA, 20 nt, synthetic construct
  source 1..20: mol_type = other RNA
ttggaattaaaatgttgcca

SEQ ID NO: 59064 - RNA, 20 nt, synthetic construct
  source 1..20: mol_type = other RNA
ttggaatttaaggggtaaat

SEQ ID NO: 59065 - RNA, 20 nt, synthetic construct
  source 1..20: mol_type = other RNA
ttggaattttagtaattctc

SEQ ID NO: 59066 - RNA, 20 nt, synthetic construct
  source 1..20: mol_type = other RNA
ttggacagctgggagaaagc

SEQ ID NO: 59067 - RNA, 20 nt, synthetic construct
  source 1..20: mol_type = other RNA
ttggacaggggacatgaagg

SEQ ID NO: 59068 - RNA, 20 nt, synthetic construct
  source 1..20: mol_type = other RNA
ttggacccatgcccatgtgc

SEQ ID NO: 59069 - RNA, 20 nt, synthetic construct
  source 1..20: mol_type = other RNA
ttggacgggtggtagggagg

SEQ ID NO: 59070 - RNA, 20 nt, synthetic construct
  source 1..20: mol_type = other RNA
ttggactccaccctgcccct

SEQ ID NO: 59071 - RNA, 20 nt, synthetic construct
  source 1..20: mol_type = other RNA
ttggagaacttaaaggtttg

SEQ ID NO: 59072 - RNA, 20 nt, synthetic construct
  source 1..20: mol_type = other RNA
ttggagaagagttctgaagg

SEQ ID NO: 59073 - RNA, 20 nt, synthetic construct
  source 1..20: mol_type = other RNA
ttggagacagcctaaaccat

SEQ ID NO: 59074 - RNA, 20 nt, synthetic construct
  source 1..20: mol_type = other RNA
ttggagactgataaacttca

SEQ ID NO: 59075 - RNA, 20 nt, synthetic construct
  source 1..20: mol_type = other RNA
ttggagagaaaccttggtgt

SEQ ID NO: 59076 - RNA, 20 nt, synthetic construct
  source 1..20: mol_type = other RNA
ttggagagatggtagtcaac

SEQ ID NO: 59077 - RNA, 20 nt, synthetic construct
  source 1..20: mol_type = other RNA
ttggagctataatttatctg

SEQ ID NO: 59078 - RNA, 20 nt, synthetic construct
  source 1..20: mol_type = other RNA
ttggagctgtatttttgctc

SEQ ID NO: 59079 - RNA, 20 nt, synthetic construct
  source 1..20: mol_type = other RNA
ttggaggagaaggccttcca

SEQ ID NO: 59080 - RNA, 20 nt, synthetic construct
  source 1..20: mol_type = other RNA
ttggaggagccctgctgtgg

SEQ ID NO: 59081 - RNA, 20 nt, synthetic construct
  source 1..20: mol_type = other RNA
ttggaggataatatctggac

SEQ ID NO: 59082 - RNA, 20 nt, synthetic construct
  source 1..20: mol_type = other RNA
ttggagtaaacctgcaattt

SEQ ID NO: 59083 - RNA, 20 nt, synthetic construct
  source 1..20: mol_type = other RNA
ttggagtcacagtgaattct

SEQ ID NO: 59084 - RNA, 20 nt, synthetic construct
  source 1..20: mol_type = other RNA
ttggagtcacttgacaaaaa

SEQ ID NO: 59085 - RNA, 20 nt, synthetic construct
  source 1..20: mol_type = other RNA
ttggagtgagaggactgcct

SEQ ID NO: 59086 - RNA, 20 nt, synthetic construct
  source 1..20: mol_type = other RNA
ttggagtttgtagctcaaag

SEQ ID NO: 59087 - RNA, 20 nt, synthetic construct
  source 1..20: mol_type = other RNA
ttggagttttccccctacac

SEQ ID NO: 59088 - RNA, 20 nt, synthetic construct
  source 1..20: mol_type = other RNA
ttggatagtttctcaactta

SEQ ID NO: 59089 - RNA, 20 nt, synthetic construct
  source 1..20: mol_type = other RNA
ttggatatccccatttttct

SEQ ID NO: 59090 - RNA, 20 nt, synthetic construct
  source 1..20: mol_type = other RNA
ttggatattctacagaaaac

SEQ ID NO: 59091 - RNA, 20 nt, synthetic construct
  source 1..20: mol_type = other RNA
ttggatatttgcagtagtat

SEQ ID NO: 59092 - RNA, 20 nt, synthetic construct
  source 1..20: mol_type = other RNA
ttggatcttatctgctgtcg

SEQ ID NO: 59093 - RNA, 20 nt, synthetic construct
  source 1..20: mol_type = other RNA
ttggatgaaaaagtactgga

SEQ ID NO: 59094 - RNA, 20 nt, synthetic construct
  source 1..20: mol_type = other RNA
ttggatgaacgctaaattaa

SEQ ID NO: 59095 - RNA, 20 nt, synthetic construct
  source 1..20: mol_type = other RNA
ttggatgcagatttcttttt

SEQ ID NO: 59096 - RNA, 20 nt, synthetic construct
  source 1..20: mol_type = other RNA
ttggattatatgttctaaag

SEQ ID NO: 59097 - RNA, 20 nt, synthetic construct
  source 1..20: mol_type = other RNA
ttggattcccaggtattttg

SEQ ID NO: 59098 - RNA, 20 nt, synthetic construct
  source 1..20: mol_type = other RNA
ttggattgcgattgtttcag

SEQ ID NO: 59099 - RNA, 20 nt, synthetic construct
  source 1..20: mol_type = other RNA
ttggattgctaaactgttcc

SEQ ID NO: 59100 - RNA, 20 nt, synthetic construct
  source 1..20: mol_type = other RNA
ttggattgtgtgtcgagaaa

SEQ ID NO: 59101 - RNA, 20 nt, synthetic construct
  source 1..20: mol_type = other RNA
ttggatttatctttctagat

SEQ ID NO: 59102 - RNA, 20 nt, synthetic construct
  source 1..20: mol_type = other RNA
ttggatttgagtaactaaac

SEQ ID NO: 59103 - RNA, 20 nt, synthetic construct
  source 1..20: mol_type = other RNA
ttggcaaaaaatgcagtagt

SEQ ID NO: 59104 - RNA, 20 nt, synthetic construct
  source 1..20: mol_type = other RNA
ttggcaaacttagaatataa

SEQ ID NO: 59105 - RNA, 20 nt, synthetic construct
  source 1..20: mol_type = other RNA
ttggcaaatctttagtgttg

SEQ ID NO: 59106 - RNA, 20 nt, synthetic construct
  source 1..20: mol_type = other RNA
ttggcaaattgtcagatttt

SEQ ID NO: 59107 - RNA, 20 nt, synthetic construct
  source 1..20: mol_type = other RNA
ttggcaacattttaattcca

SEQ ID NO: 59108 - RNA, 20 nt, synthetic construct
  source 1..20: mol_type = other RNA
ttggcaaggggaatggtact

SEQ ID NO: 59109 - RNA, 20 nt, synthetic construct
  source 1..20: mol_type = other RNA
ttggcaatttctcaaaaatt

SEQ ID NO: 59110 - RNA, 20 nt, synthetic construct
  source 1..20: mol_type = other RNA
ttggcacagaattattgatt

SEQ ID NO: 59111 - RNA, 20 nt, synthetic construct
  source 1..20: mol_type = other RNA
ttggcacagccagtcagtga

SEQ ID NO: 59112 - RNA, 20 nt, synthetic construct
  source 1..20: mol_type = other RNA
ttggcacaggagagcgacag

SEQ ID NO: 59113 - RNA, 20 nt, synthetic construct
  source 1..20: mol_type = other RNA
ttggcactgaagccagtcct

SEQ ID NO: 59114 - RNA, 20 nt, synthetic construct
  source 1..20: mol_type = other RNA
ttggcagcgtaactccatct

SEQ ID NO: 59115 - RNA, 20 nt, synthetic construct
  source 1..20: mol_type = other RNA
ttggcagtttaagaattaaa

SEQ ID NO: 59116 - RNA, 20 nt, synthetic construct
  source 1..20: mol_type = other RNA
ttggcataaagacagacatt

SEQ ID NO: 59117 - RNA, 20 nt, synthetic construct
  source 1..20: mol_type = other RNA
ttggcatacaactgctcata

SEQ ID NO: 59118 - RNA, 20 nt, synthetic construct
  source 1..20: mol_type = other RNA
ttggcatttaaaagaacctc

SEQ ID NO: 59119 - RNA, 20 nt, synthetic construct
  source 1..20: mol_type = other RNA
ttggccaacatggcgaaacg

SEQ ID NO: 59120 - RNA, 20 nt, synthetic construct
  source 1..20: mol_type = other RNA
ttggccagaatccctttcgc

SEQ ID NO: 59121 - RNA, 20 nt, synthetic construct
  source 1..20: mol_type = other RNA
ttggccattttcttttaaat

SEQ ID NO: 59122 - RNA, 20 nt, synthetic construct
  source 1..20: mol_type = other RNA
ttggcccaacatgctcttaa

SEQ ID NO: 59123 - RNA, 20 nt, synthetic construct
  source 1..20: mol_type = other RNA
ttggcccagccatcccatta

SEQ ID NO: 59124 - RNA, 20 nt, synthetic construct
  source 1..20: mol_type = other RNA
ttggcccatatccttttatg

SEQ ID NO: 59125 - RNA, 20 nt, synthetic construct
  source 1..20: mol_type = other RNA
ttggcccattttcgaattag

SEQ ID NO: 59126 - RNA, 20 nt, synthetic construct
  source 1..20: mol_type = other RNA
ttggccgaatgtggtggtat

SEQ ID NO: 59127 - RNA, 20 nt, synthetic construct
  source 1..20: mol_type = other RNA
ttggccgaggccagtcccta

SEQ ID NO: 59128 - RNA, 20 nt, synthetic construct
  source 1..20: mol_type = other RNA
ttggcctccccaagtgctgt

SEQ ID NO: 59129 - RNA, 20 nt, synthetic construct
  source 1..20: mol_type = other RNA
ttggcctctgcggcggctga

SEQ ID NO: 59130 - RNA, 20 nt, synthetic construct
  source 1..20: mol_type = other RNA
ttggcctggacacacacagt

SEQ ID NO: 59131 - RNA, 20 nt, synthetic construct
  source 1..20: mol_type = other RNA
ttggccttctgaggagctga

SEQ ID NO: 59132 - RNA, 20 nt, synthetic construct
  source 1..20: mol_type = other RNA
ttggccttgaggtgagacag

SEQ ID NO: 59133 - RNA, 20 nt, synthetic construct
  source 1..20: mol_type = other RNA
ttggcgcagtgcttagcgct

SEQ ID NO: 59134 - RNA, 20 nt, synthetic construct
  source 1..20: mol_type = other RNA
ttggcgtacatgtagatatg

SEQ ID NO: 59135 - RNA, 20 nt, synthetic construct
  source 1..20: mol_type = other RNA
ttggctaaaagaccgcaaga

SEQ ID NO: 59136 - RNA, 20 nt, synthetic construct
  source 1..20: mol_type = other RNA
ttggctactgtaaacaatgc

SEQ ID NO: 59137 - RNA, 20 nt, synthetic construct
  source 1..20: mol_type = other RNA
ttggctagaagcatctgata

SEQ ID NO: 59138 - RNA, 20 nt, synthetic construct
  source 1..20: mol_type = other RNA
ttggctagactaagaaaaac

SEQ ID NO: 59139 - RNA, 20 nt, synthetic construct
  source 1..20: mol_type = other RNA
ttggctattgtcagtaattc

SEQ ID NO: 59140 - RNA, 20 nt, synthetic construct
  source 1..20: mol_type = other RNA
ttggctcaatggttaagact

SEQ ID NO: 59141 - RNA, 20 nt, synthetic construct
  source 1..20: mol_type = other RNA
ttggctcccatgattcaaaa

SEQ ID NO: 59142 - RNA, 20 nt, synthetic construct
  source 1..20: mol_type = other RNA
ttggctcctcccggctaaga

SEQ ID NO: 59143 - RNA, 20 nt, synthetic construct
  source 1..20: mol_type = other RNA
ttggctccttaccactataa

SEQ ID NO: 59144 - RNA, 20 nt, synthetic construct
  source 1..20: mol_type = other RNA
ttggctcttagaaaatatat

SEQ ID NO: 59145 - RNA, 20 nt, synthetic construct
  source 1..20: mol_type = other RNA
ttggctgaaatgctgtaact

SEQ ID NO: 59146 - RNA, 20 nt, synthetic construct
  source 1..20: mol_type = other RNA
ttggctgggagcttatcagg

SEQ ID NO: 59147 - RNA, 20 nt, synthetic construct
  source 1..20: mol_type = other RNA
ttggctgttaccatttgacc

SEQ ID NO: 59148 - RNA, 20 nt, synthetic construct
  source 1..20: mol_type = other RNA
ttggctgttagccttgccat

SEQ ID NO: 59149 - RNA, 20 nt, synthetic construct
  source 1..20: mol_type = other RNA
ttggcttatagtgttctttt

SEQ ID NO: 59150 - RNA, 20 nt, synthetic construct
  source 1..20: mol_type = other RNA
ttggcttggggaacagttta

SEQ ID NO: 59151 - RNA, 20 nt, synthetic construct
  source 1..20: mol_type = other RNA
ttggctttagatttatcaat

SEQ ID NO: 59152 - RNA, 20 nt, synthetic construct
  source 1..20: mol_type = other RNA
ttggcttttggcagcgtaac

SEQ ID NO: 59153 - RNA, 20 nt, synthetic construct
  source 1..20: mol_type = other RNA
ttgggaaaatctctgacttc

SEQ ID NO: 59154 - RNA, 20 nt, synthetic construct
  source 1..20: mol_type = other RNA
ttgggaaaatcttggaactt

SEQ ID NO: 59155 - RNA, 20 nt, synthetic construct
  source 1..20: mol_type = other RNA
ttgggaacagcaggggaagg

SEQ ID NO: 59156 - RNA, 20 nt, synthetic construct
  source 1..20: mol_type = other RNA
ttgggaagattggctttaga

SEQ ID NO: 59157 - RNA, 20 nt, synthetic construct
  source 1..20: mol_type = other RNA
ttgggaaggatggccagtca

SEQ ID NO: 59158 - RNA, 20 nt, synthetic construct
  source 1..20: mol_type = other RNA
ttgggaaggccctgattgag

SEQ ID NO: 59159 - RNA, 20 nt, synthetic construct
  source 1..20: mol_type = other RNA
ttgggaatactttcccatct

SEQ ID NO: 59160 - RNA, 20 nt, synthetic construct
  source 1..20: mol_type = other RNA
ttgggaatgtggtcacactt

SEQ ID NO: 59161 - RNA, 20 nt, synthetic construct
  source 1..20: mol_type = other RNA
ttgggactgagacagtattg

SEQ ID NO: 59162 - RNA, 20 nt, synthetic construct
  source 1..20: mol_type = other RNA
ttgggagaaaatttttacag

SEQ ID NO: 59163 - RNA, 20 nt, synthetic construct
  source 1..20: mol_type = other RNA
ttgggagctttcattattac

SEQ ID NO: 59164 - RNA, 20 nt, synthetic construct
  source 1..20: mol_type = other RNA
ttgggaggtttttgattact

SEQ ID NO: 59165 - RNA, 20 nt, synthetic construct
  source 1..20: mol_type = other RNA
ttgggagtctatttctgaac

SEQ ID NO: 59166 - RNA, 20 nt, synthetic construct
  source 1..20: mol_type = other RNA
ttgggatatagctacaatga

SEQ ID NO: 59167 - RNA, 20 nt, synthetic construct
  source 1..20: mol_type = other RNA
ttgggatcacacttgatggt

SEQ ID NO: 59168 - RNA, 20 nt, synthetic construct
  source 1..20: mol_type = other RNA
ttgggatctgataaattatt

SEQ ID NO: 59169 - RNA, 20 nt, synthetic construct
  source 1..20: mol_type = other RNA
ttgggatctgtcatgtttga

SEQ ID NO: 59170 - RNA, 20 nt, synthetic construct
  source 1..20: mol_type = other RNA
ttgggatgcagcaaaagcac

SEQ ID NO: 59171 - RNA, 20 nt, synthetic construct
  source 1..20: mol_type = other RNA
ttgggatgtttctacctttg

SEQ ID NO: 59172 - RNA, 20 nt, synthetic construct
  source 1..20: mol_type = other RNA
ttgggattagcttattcttt

SEQ ID NO: 59173 - RNA, 20 nt, synthetic construct
  source 1..20: mol_type = other RNA
ttgggcaagagagcaagtcc

SEQ ID NO: 59174 - RNA, 20 nt, synthetic construct
  source 1..20: mol_type = other RNA
ttgggcacactccccagtgg

SEQ ID NO: 59175 - RNA, 20 nt, synthetic construct
  source 1..20: mol_type = other RNA
ttgggcattaattgagagct

SEQ ID NO: 59176 - RNA, 20 nt, synthetic construct
  source 1..20: mol_type = other RNA
ttgggccaacttccagcaag

SEQ ID NO: 59177 - RNA, 20 nt, synthetic construct
  source 1..20: mol_type = other RNA
ttgggcctttctgtttgttt

SEQ ID NO: 59178 - RNA, 20 nt, synthetic construct
  source 1..20: mol_type = other RNA
ttgggctaaggtggagtggt

SEQ ID NO: 59179 - RNA, 20 nt, synthetic construct
  source 1..20: mol_type = other RNA
ttgggctattaagtattgca

SEQ ID NO: 59180 - RNA, 20 nt, synthetic construct
  source 1..20: mol_type = other RNA
ttgggctcccttccagcgtg

SEQ ID NO: 59181 - RNA, 20 nt, synthetic construct
  source 1..20: mol_type = other RNA
ttgggcttaacatttgaact

SEQ ID NO: 59182 - RNA, 20 nt, synthetic construct
  source 1..20: mol_type = other RNA
ttgggcttatcagatggtga

SEQ ID NO: 59183 - RNA, 20 nt, synthetic construct
  source 1..20: mol_type = other RNA
ttgggcttggttggaaaaga

SEQ ID NO: 59184 - RNA, 20 nt, synthetic construct
  source 1..20: mol_type = other RNA
ttgggcttttcatatacgta

SEQ ID NO: 59185 - RNA, 20 nt, synthetic construct
  source 1..20: mol_type = other RNA
ttggggaacagtttagcaat

SEQ ID NO: 59186 - RNA, 20 nt, synthetic construct
  source 1..20: mol_type = other RNA
ttggggactcttatggctat

SEQ ID NO: 59187 - RNA, 20 nt, synthetic construct
  source 1..20: mol_type = other RNA
ttggggagagtgggcccagc

SEQ ID NO: 59188 - RNA, 20 nt, synthetic construct
  source 1..20: mol_type = other RNA
ttggggagataccttgaaag

SEQ ID NO: 59189 - RNA, 20 nt, synthetic construct
  source 1..20: mol_type = other RNA
ttggggaggccaaggcagga

SEQ ID NO: 59190 - RNA, 20 nt, synthetic construct
  source 1..20: mol_type = other RNA
ttggggaggccgcgggaggg

SEQ ID NO: 59191 - RNA, 20 nt, synthetic construct
  source 1..20: mol_type = other RNA
ttggggattctgctactagc

SEQ ID NO: 59192 - RNA, 20 nt, synthetic construct
  source 1..20: mol_type = other RNA
ttggggccatctgaattcaa

SEQ ID NO: 59193 - RNA, 20 nt, synthetic construct
  source 1..20: mol_type = other RNA
ttggggctaggatttcagta

SEQ ID NO: 59194 - RNA, 20 nt, synthetic construct
  source 1..20: mol_type = other RNA
ttggggctctaatgcaagag

SEQ ID NO: 59195 - RNA, 20 nt, synthetic construct
  source 1..20: mol_type = other RNA
ttggggcttttgaacactct

SEQ ID NO: 59196 - RNA, 20 nt, synthetic construct
  source 1..20: mol_type = other RNA
ttgggggaaaattgacattt

SEQ ID NO: 59197 - RNA, 20 nt, synthetic construct
  source 1..20: mol_type = other RNA
ttgggggaagagagcattgc

SEQ ID NO: 59198 - RNA, 20 nt, synthetic construct
  source 1..20: mol_type = other RNA
ttgggggaagcaggaactca

SEQ ID NO: 59199 - RNA, 20 nt, synthetic construct
  source 1..20: mol_type = other RNA
ttgggggctgggtcggccga

SEQ ID NO: 59200 - RNA, 20 nt, synthetic construct
  source 1..20: mol_type = other RNA
ttggggtatgtttgattagt

SEQ ID NO: 59201 - RNA, 20 nt, synthetic construct
  source 1..20: mol_type = other RNA
ttgggtaaaaataatcaact

SEQ ID NO: 59202 - RNA, 20 nt, synthetic construct
  source 1..20: mol_type = other RNA
ttgggtaatttatctccata

SEQ ID NO: 59203 - RNA, 20 nt, synthetic construct
  source 1..20: mol_type = other RNA
ttgggtaggaagctgatcaa

SEQ ID NO: 59204 - RNA, 20 nt, synthetic construct
  source 1..20: mol_type = other RNA
ttgggtataaatgatgagct

SEQ ID NO: 59205 - RNA, 20 nt, synthetic construct
  source 1..20: mol_type = other RNA
ttgggtcaacaaactaacta

SEQ ID NO: 59206 - RNA, 20 nt, synthetic construct
  source 1..20: mol_type = other RNA
ttgggtctatagtttaattg

SEQ ID NO: 59207 - RNA, 20 nt, synthetic construct
  source 1..20: mol_type = other RNA
ttgggtgaataacccatatc

SEQ ID NO: 59208 - RNA, 20 nt, synthetic construct
  source 1..20: mol_type = other RNA
ttgggtgacagagagagacc

SEQ ID NO: 59209 - RNA, 20 nt, synthetic construct
  source 1..20: mol_type = other RNA
ttgggtgacctcatgtaact

SEQ ID NO: 59210 - RNA, 20 nt, synthetic construct
  source 1..20: mol_type = other RNA
ttgggtggaagctgtccttc

SEQ ID NO: 59211 - RNA, 20 nt, synthetic construct
  source 1..20: mol_type = other RNA
ttgggtttaactgaggtgtt

SEQ ID NO: 59212 - RNA, 20 nt, synthetic construct
  source 1..20: mol_type = other RNA
ttgggtttgagtttccagaa

SEQ ID NO: 59213 - RNA, 20 nt, synthetic construct
  source 1..20: mol_type = other RNA
ttggtaaaaagtgcttctag

SEQ ID NO: 59214 - RNA, 20 nt, synthetic construct
  source 1..20: mol_type = other RNA
ttggtaaaatcactaattca

SEQ ID NO: 59215 - RNA, 20 nt, synthetic construct
  source 1..20: mol_type = other RNA
ttggtaaaatgtggcaaatt

SEQ ID NO: 59216 - RNA, 20 nt, synthetic construct
  source 1..20: mol_type = other RNA
ttggtaaacagcagtcttaa

SEQ ID NO: 59217 - RNA, 20 nt, synthetic construct
  source 1..20: mol_type = other RNA
ttggtaagagtgagaccctg

SEQ ID NO: 59218 - RNA, 20 nt, synthetic construct
  source 1..20: mol_type = other RNA
ttggtaagctgtgagtcctt

SEQ ID NO: 59219 - RNA, 20 nt, synthetic construct
  source 1..20: mol_type = other RNA
ttggtaatgggaaagacagg

SEQ ID NO: 59220 - RNA, 20 nt, synthetic construct
  source 1..20: mol_type = other RNA
ttggtaatgttatatttccg

SEQ ID NO: 59221 - RNA, 20 nt, synthetic construct
  source 1..20: mol_type = other RNA
ttggtagaggattccaggtt

SEQ ID NO: 59222 - RNA, 20 nt, synthetic construct
  source 1..20: mol_type = other RNA
ttggtagataccagaccctt

SEQ ID NO: 59223 - RNA, 20 nt, synthetic construct
  source 1..20: mol_type = other RNA
ttggtagatttctgcataga

SEQ ID NO: 59224 - RNA, 20 nt, synthetic construct
  source 1..20: mol_type = other RNA
ttggtagtcaatgcaatgcg

SEQ ID NO: 59225 - RNA, 20 nt, synthetic construct
  source 1..20: mol_type = other RNA
ttggtagtttgcacgttttt

SEQ ID NO: 59226 - RNA, 20 nt, synthetic construct
  source 1..20: mol_type = other RNA
ttggtatgcatcttgaacta

SEQ ID NO: 59227 - RNA, 20 nt, synthetic construct
  source 1..20: mol_type = other RNA
ttggtatgttgtgttttcat

SEQ ID NO: 59228 - RNA, 20 nt, synthetic construct
  source 1..20: mol_type = other RNA
ttggtattcttatccctacc

SEQ ID NO: 59229 - RNA, 20 nt, synthetic construct
  source 1..20: mol_type = other RNA
ttggtattttttagagacag

SEQ ID NO: 59230 - RNA, 20 nt, synthetic construct
  source 1..20: mol_type = other RNA
ttggtcaaaactgtattttc

SEQ ID NO: 59231 - RNA, 20 nt, synthetic construct
  source 1..20: mol_type = other RNA
ttggtcaattgatctgccag

SEQ ID NO: 59232 - RNA, 20 nt, synthetic construct
  source 1..20: mol_type = other RNA
ttggtcagaaaaatggaata

SEQ ID NO: 59233 - RNA, 20 nt, synthetic construct
  source 1..20: mol_type = other RNA
ttggtcctgcatatgttttt

SEQ ID NO: 59234 - RNA, 20 nt, synthetic construct
  source 1..20: mol_type = other RNA
ttggtcctggaaaaagacca

SEQ ID NO: 59235 - RNA, 20 nt, synthetic construct
  source 1..20: mol_type = other RNA
ttggtcgaaaacctgaaatg

SEQ ID NO: 59236 - RNA, 20 nt, synthetic construct
  source 1..20: mol_type = other RNA
ttggtctcattcactagaca

SEQ ID NO: 59237 - RNA, 20 nt, synthetic construct
  source 1..20: mol_type = other RNA
ttggtctgcagactcttgtc

SEQ ID NO: 59238 - RNA, 20 nt, synthetic construct
  source 1..20: mol_type = other RNA
ttggtctgggtgatatctgt

SEQ ID NO: 59239 - RNA, 20 nt, synthetic construct
  source 1..20: mol_type = other RNA
ttggtcttaccctctagctc

SEQ ID NO: 59240 - RNA, 20 nt, synthetic construct
  source 1..20: mol_type = other RNA
ttggtctttctcccaggtca

SEQ ID NO: 59241 - RNA, 20 nt, synthetic construct
  source 1..20: mol_type = other RNA
ttggtgaagagagcctgtgg

SEQ ID NO: 59242 - RNA, 20 nt, synthetic construct
  source 1..20: mol_type = other RNA
ttggtgaaggttcatgaaca

SEQ ID NO: 59243 - RNA, 20 nt, synthetic construct
  source 1..20: mol_type = other RNA
ttggtgaatctgagtaaagg

SEQ ID NO: 59244 - RNA, 20 nt, synthetic construct
  source 1..20: mol_type = other RNA
ttggtgactgaattcccaca

SEQ ID NO: 59245 - RNA, 20 nt, synthetic construct
  source 1..20: mol_type = other RNA
ttggtgagaacccagtgtct

SEQ ID NO: 59246 - RNA, 20 nt, synthetic construct
  source 1..20: mol_type = other RNA
ttggtgatcctaagccatct

SEQ ID NO: 59247 - RNA, 20 nt, synthetic construct
  source 1..20: mol_type = other RNA
ttggtgcaaggataaacaaa

SEQ ID NO: 59248 - RNA, 20 nt, synthetic construct
  source 1..20: mol_type = other RNA
ttggtgcatttgggacagcc

SEQ ID NO: 59249 - RNA, 20 nt, synthetic construct
  source 1..20: mol_type = other RNA
ttggtgctgataaatggctt

SEQ ID NO: 59250 - RNA, 20 nt, synthetic construct
  source 1..20: mol_type = other RNA
ttggtgcttagctgcctctt

SEQ ID NO: 59251 - RNA, 20 nt, synthetic construct
  source 1..20: mol_type = other RNA
ttggtgcttccttctcttat

SEQ ID NO: 59252 - RNA, 20 nt, synthetic construct
  source 1..20: mol_type = other RNA
ttggtggcccacacctgcaa

SEQ ID NO: 59253 - RNA, 20 nt, synthetic construct
  source 1..20: mol_type = other RNA
ttggtggtaactgatgtgag

SEQ ID NO: 59254 - RNA, 20 nt, synthetic construct
  source 1..20: mol_type = other RNA
ttggtgtcatttttaagaaa

SEQ ID NO: 59255 - RNA, 20 nt, synthetic construct
  source 1..20: mol_type = other RNA
ttggtgtgctcttttcatca

SEQ ID NO: 59256 - RNA, 20 nt, synthetic construct
  source 1..20: mol_type = other RNA
ttggtgtgcttctgatagga

SEQ ID NO: 59257 - RNA, 20 nt, synthetic construct
  source 1..20: mol_type = other RNA
ttggtgtgtgcaaaggatta

SEQ ID NO: 59258 - RNA, 20 nt, synthetic construct
  source 1..20: mol_type = other RNA
ttggtgttgactgaattaat

SEQ ID NO: 59259 - RNA, 20 nt, synthetic construct
  source 1..20: mol_type = other RNA
ttggtgtttctgacaggtgg

SEQ ID NO: 59260 - RNA, 20 nt, synthetic construct
  source 1..20: mol_type = other RNA
ttggtgtttttctaggtagt

SEQ ID NO: 59261 - RNA, 20 nt, synthetic construct
  source 1..20: mol_type = other RNA
ttggttaaacttggtctggg

SEQ ID NO: 59262 - RNA, 20 nt, synthetic construct
  source 1..20: mol_type = other RNA
ttggttaatattacagaaga

SEQ ID NO: 59263 - RNA, 20 nt, synthetic construct
  source 1..20: mol_type = other RNA
ttggttagtgttgtttttaa

SEQ ID NO: 59264 - RNA, 20 nt, synthetic construct
  source 1..20: mol_type = other RNA
ttggttatctgtacttttaa

SEQ ID NO: 59265 - RNA, 20 nt, synthetic construct
  source 1..20: mol_type = other RNA
ttggttatgcgaatttactt

SEQ ID NO: 59266 - RNA, 20 nt, synthetic construct
  source 1..20: mol_type = other RNA
ttggttattcatgtttgtgg

SEQ ID NO: 59267 - RNA, 20 nt, synthetic construct
  source 1..20: mol_type = other RNA
ttggttcacttgaaacctgc

SEQ ID NO: 59268 - RNA, 20 nt, synthetic construct
  source 1..20: mol_type = other RNA
ttggttcgtttgaggctttt

SEQ ID NO: 59269 - RNA, 20 nt, synthetic construct
  source 1..20: mol_type = other RNA
ttggttggaaaagaaagctg

SEQ ID NO: 59270 - RNA, 20 nt, synthetic construct
  source 1..20: mol_type = other RNA
ttggttggactccaccctgc

SEQ ID NO: 59271 - RNA, 20 nt, synthetic construct
  source 1..20: mol_type = other RNA
ttggtttattttctgcattt

SEQ ID NO: 59272 - RNA, 20 nt, synthetic construct
  source 1..20: mol_type = other RNA
ttggtttcacacgcattgca

SEQ ID NO: 59273 - RNA, 20 nt, synthetic construct
  source 1..20: mol_type = other RNA
ttggtttcttcaagatactg

SEQ ID NO: 59274 - RNA, 20 nt, synthetic construct
  source 1..20: mol_type = other RNA
ttggtttgaaatgatctttt

SEQ ID NO: 59275 - RNA, 20 nt, synthetic construct
  source 1..20: mol_type = other RNA
ttggtttgcaaaaattttgt

SEQ ID NO: 59276 - RNA, 20 nt, synthetic construct
  source 1..20: mol_type = other RNA
ttggtttgtatgtgttaaac

SEQ ID NO: 59277 - RNA, 20 nt, synthetic construct
  source 1..20: mol_type = other RNA
ttggtttgtgtgtttgtgaa

SEQ ID NO: 59278 - RNA, 20 nt, synthetic construct
  source 1..20: mol_type = other RNA
ttggttttactactgtactg

SEQ ID NO: 59279 - RNA, 20 nt, synthetic construct
  source 1..20: mol_type = other RNA
ttggttttgactcagtactt

SEQ ID NO: 59280 - RNA, 20 nt, synthetic construct
  source 1..20: mol_type = other RNA
ttggtttttatggaataatg

SEQ ID NO: 59281 - RNA, 20 nt, synthetic construct
  source 1..20: mol_type = other RNA
ttgtaaaccatatggttaat

SEQ ID NO: 59282 - RNA, 20 nt, synthetic construct
  source 1..20: mol_type = other RNA
ttgtaaatgaaacacttgtg

SEQ ID NO: 59283 - RNA, 20 nt, synthetic construct
  source 1..20: mol_type = other RNA
ttgtaacatgttagattagg

SEQ ID NO: 59284 - RNA, 20 nt, synthetic construct
  source 1..20: mol_type = other RNA
ttgtaacgtgtatagctttt

SEQ ID NO: 59285 - RNA, 20 nt, synthetic construct
  source 1..20: mol_type = other RNA
ttgtaactacagacatgcca

SEQ ID NO: 59286 - RNA, 20 nt, synthetic construct
  source 1..20: mol_type = other RNA
ttgtaacttgaattcagatg

SEQ ID NO: 59287 - RNA, 20 nt, synthetic construct
  source 1..20: mol_type = other RNA
ttgtaacttgttcatgttta

SEQ ID NO: 59288 - RNA, 20 nt, synthetic construct
  source 1..20: mol_type = other RNA
ttgtaataacttggagaact

SEQ ID NO: 59289 - RNA, 20 nt, synthetic construct
  source 1..20: mol_type = other RNA
ttgtaatatacttgtcaagt

SEQ ID NO: 59290 - RNA, 20 nt, synthetic construct
  source 1..20: mol_type = other RNA
ttgtaatcaagtatctccct

SEQ ID NO: 59291 - RNA, 20 nt, synthetic construct
  source 1..20: mol_type = other RNA
ttgtaatcacagtacgcttt

SEQ ID NO: 59292 - RNA, 20 nt, synthetic construct
  source 1..20: mol_type = other RNA
ttgtaatcctgtttctctac

SEQ ID NO: 59293 - RNA, 20 nt, synthetic construct
  source 1..20: mol_type = other RNA
ttgtaatctaaggattatgg

SEQ ID NO: 59294 - RNA, 20 nt, synthetic construct
  source 1..20: mol_type = other RNA
ttgtaatgtctcctctttca

SEQ ID NO: 59295 - RNA, 20 nt, synthetic construct
  source 1..20: mol_type = other RNA
ttgtaatgttacttctcagc

SEQ ID NO: 59296 - RNA, 20 nt, synthetic construct
  source 1..20: mol_type = other RNA
ttgtaattcatcctactagt

SEQ ID NO: 59297 - RNA, 20 nt, synthetic construct
  source 1..20: mol_type = other RNA
ttgtaatttttaaaagagcg

SEQ ID NO: 59298 - RNA, 20 nt, synthetic construct
  source 1..20: mol_type = other RNA
ttgtacaattttcttaccct

SEQ ID NO: 59299 - RNA, 20 nt, synthetic construct
  source 1..20: mol_type = other RNA
ttgtacacctcaaactagaa

SEQ ID NO: 59300 - RNA, 20 nt, synthetic construct
  source 1..20: mol_type = other RNA
ttgtacagtaattgtagttt

SEQ ID NO: 59301 - RNA, 20 nt, synthetic construct
  source 1..20: mol_type = other RNA
ttgtacatgaagtcctcaat

SEQ ID NO: 59302 - RNA, 20 nt, synthetic construct
  source 1..20: mol_type = other RNA
ttgtacatttaaaattgcag

SEQ ID NO: 59303 - RNA, 20 nt, synthetic construct
  source 1..20: mol_type = other RNA
ttgtaccttgatttatggcc

SEQ ID NO: 59304 - RNA, 20 nt, synthetic construct
  source 1..20: mol_type = other RNA
ttgtaccttggagagaaacc

SEQ ID NO: 59305 - RNA, 20 nt, synthetic construct
  source 1..20: mol_type = other RNA
ttgtactacttgtcaggtgg

SEQ ID NO: 59306 - RNA, 20 nt, synthetic construct
  source 1..20: mol_type = other RNA
ttgtactcccagcctcaaac

SEQ ID NO: 59307 - RNA, 20 nt, synthetic construct
  source 1..20: mol_type = other RNA
ttgtactgtgtggcttctca

SEQ ID NO: 59308 - RNA, 20 nt, synthetic construct
  source 1..20: mol_type = other RNA
ttgtacttctaccttgaaaa

SEQ ID NO: 59309 - RNA, 20 nt, synthetic construct
  source 1..20: mol_type = other RNA
ttgtacttgacacaaaggac

SEQ ID NO: 59310 - RNA, 20 nt, synthetic construct
  source 1..20: mol_type = other RNA
ttgtagaccctgttagtccc

SEQ ID NO: 59311 - RNA, 20 nt, synthetic construct
  source 1..20: mol_type = other RNA
ttgtagagacagaatcttac

SEQ ID NO: 59312 - RNA, 20 nt, synthetic construct
  source 1..20: mol_type = other RNA
ttgtagagcaagcaacacca

SEQ ID NO: 59313 - RNA, 20 nt, synthetic construct
  source 1..20: mol_type = other RNA
ttgtagaggaggagggttag

SEQ ID NO: 59314 - RNA, 20 nt, synthetic construct
  source 1..20: mol_type = other RNA
ttgtagagggaatttgtttt

SEQ ID NO: 59315 - RNA, 20 nt, synthetic construct
  source 1..20: mol_type = other RNA
ttgtagatattttctgtcat

SEQ ID NO: 59316 - RNA, 20 nt, synthetic construct
  source 1..20: mol_type = other RNA
ttgtagctaatatctttggg

SEQ ID NO: 59317 - RNA, 20 nt, synthetic construct
  source 1..20: mol_type = other RNA
ttgtagctatatcccaaatt

SEQ ID NO: 59318 - RNA, 20 nt, synthetic construct
  source 1..20: mol_type = other RNA
ttgtagctcaaagcatatga

SEQ ID NO: 59319 - RNA, 20 nt, synthetic construct
  source 1..20: mol_type = other RNA
ttgtaggaaagcctgtgaca

SEQ ID NO: 59320 - RNA, 20 nt, synthetic construct
  source 1..20: mol_type = other RNA
ttgtaggtgtctcatttaat

SEQ ID NO: 59321 - RNA, 20 nt, synthetic construct
  source 1..20: mol_type = other RNA
ttgtagtatttttgcaactt

SEQ ID NO: 59322 - RNA, 20 nt, synthetic construct
  source 1..20: mol_type = other RNA
ttgtagtgtcttaatcctat

SEQ ID NO: 59323 - RNA, 20 nt, synthetic construct
  source 1..20: mol_type = other RNA
ttgtagtttccatggagggg

SEQ ID NO: 59324 - RNA, 20 nt, synthetic construct
  source 1..20: mol_type = other RNA
ttgtataaattactgtctgt

SEQ ID NO: 59325 - RNA, 20 nt, synthetic construct
  source 1..20: mol_type = other RNA
ttgtatagcagtaaaatgaa

SEQ ID NO: 59326 - RNA, 20 nt, synthetic construct
  source 1..20: mol_type = other RNA
ttgtatatacccttctgtta

SEQ ID NO: 59327 - RNA, 20 nt, synthetic construct
  source 1..20: mol_type = other RNA
ttgtatatggtttaaggtaa

SEQ ID NO: 59328 - RNA, 20 nt, synthetic construct
  source 1..20: mol_type = other RNA
ttgtatccagtaatcttgct

SEQ ID NO: 59329 - RNA, 20 nt, synthetic construct
  source 1..20: mol_type = other RNA
ttgtatcctgagacttaggc

SEQ ID NO: 59330 - RNA, 20 nt, synthetic construct
  source 1..20: mol_type = other RNA
ttgtatcctgtttgagaagt

SEQ ID NO: 59331 - RNA, 20 nt, synthetic construct
  source 1..20: mol_type = other RNA
ttgtatctgtgatccctgat

SEQ ID NO: 59332 - RNA, 20 nt, synthetic construct
  source 1..20: mol_type = other RNA
ttgtatcttcacaaacaaat

SEQ ID NO: 59333 - RNA, 20 nt, synthetic construct
  source 1..20: mol_type = other RNA
ttgtatgaaattagttcctt

SEQ ID NO: 59334 - RNA, 20 nt, synthetic construct
  source 1..20: mol_type = other RNA
ttgtatgaacattttgagtt

SEQ ID NO: 59335 - RNA, 20 nt, synthetic construct
  source 1..20: mol_type = other RNA
ttgtatggagactagtacac

SEQ ID NO: 59336 - RNA, 20 nt, synthetic construct
  source 1..20: mol_type = other RNA
ttgtatgtgttaaaccattc

SEQ ID NO: 59337 - RNA, 20 nt, synthetic construct
  source 1..20: mol_type = other RNA
ttgtattatttctgtcatct

SEQ ID NO: 59338 - RNA, 20 nt, synthetic construct
  source 1..20: mol_type = other RNA
ttgtattcatccagtttaaa

SEQ ID NO: 59339 - RNA, 20 nt, synthetic construct
  source 1..20: mol_type = other RNA
ttgtattctgacctaaagtt

SEQ ID NO: 59340 - RNA, 20 nt, synthetic construct
  source 1..20: mol_type = other RNA
ttgtatttctgttagatggt

SEQ ID NO: 59341 - RNA, 20 nt, synthetic construct
  source 1..20: mol_type = other RNA
ttgtattttacaccatgcag

SEQ ID NO: 59342 - RNA, 20 nt, synthetic construct
  source 1..20: mol_type = other RNA
ttgtatttttcacaaacaca

SEQ ID NO: 59343 - RNA, 20 nt, synthetic construct
  source 1..20: mol_type = other RNA
ttgtcaacttttagtaggtc

SEQ ID NO: 59344 - RNA, 20 nt, synthetic construct
  source 1..20: mol_type = other RNA
ttgtcaagctatcagaattt

SEQ ID NO: 59345 - RNA, 20 nt, synthetic construct
  source 1..20: mol_type = other RNA
ttgtcaaggtcatcctttcc

SEQ ID NO: 59346 - RNA, 20 nt, synthetic construct
  source 1..20: mol_type = other RNA
ttgtcaagtgactccaagca

SEQ ID NO: 59347 - RNA, 20 nt, synthetic construct
  source 1..20: mol_type = other RNA
ttgtcaagttctgatttcaa

SEQ ID NO: 59348 - RNA, 20 nt, synthetic construct
  source 1..20: mol_type = other RNA
ttgtcaataatttggatgaa

SEQ ID NO: 59349 - RNA, 20 nt, synthetic construct
  source 1..20: mol_type = other RNA
ttgtcaatggggaactttat

SEQ ID NO: 59350 - RNA, 20 nt, synthetic construct
  source 1..20: mol_type = other RNA
ttgtcacaaaatgtggatgc

SEQ ID NO: 59351 - RNA, 20 nt, synthetic construct
  source 1..20: mol_type = other RNA
ttgtcacacggaaaacatta

SEQ ID NO: 59352 - RNA, 20 nt, synthetic construct
  source 1..20: mol_type = other RNA
ttgtcacatagaagcgctct

SEQ ID NO: 59353 - RNA, 20 nt, synthetic construct
  source 1..20: mol_type = other RNA
ttgtcagaaaagatcagtaa

SEQ ID NO: 59354 - RNA, 20 nt, synthetic construct
  source 1..20: mol_type = other RNA
ttgtcagaattagaaagctg

SEQ ID NO: 59355 - RNA, 20 nt, synthetic construct
  source 1..20: mol_type = other RNA
ttgtcagattttcttgttat

SEQ ID NO: 59356 - RNA, 20 nt, synthetic construct
  source 1..20: mol_type = other RNA
ttgtcaggcatgctaactgc

SEQ ID NO: 59357 - RNA, 20 nt, synthetic construct
  source 1..20: mol_type = other RNA
ttgtcaggtgggcactggga

SEQ ID NO: 59358 - RNA, 20 nt, synthetic construct
  source 1..20: mol_type = other RNA
ttgtcagtaattctgcagtg

SEQ ID NO: 59359 - RNA, 20 nt, synthetic construct
  source 1..20: mol_type = other RNA
ttgtcataaacataactttg

SEQ ID NO: 59360 - RNA, 20 nt, synthetic construct
  source 1..20: mol_type = other RNA
ttgtcataacagtattgtct

SEQ ID NO: 59361 - RNA, 20 nt, synthetic construct
  source 1..20: mol_type = other RNA
ttgtcatgaatgaatgttga

SEQ ID NO: 59362 - RNA, 20 nt, synthetic construct
  source 1..20: mol_type = other RNA
ttgtcattaccttatagatg

SEQ ID NO: 59363 - RNA, 20 nt, synthetic construct
  source 1..20: mol_type = other RNA
ttgtcatttaatttgtcaac

SEQ ID NO: 59364 - RNA, 20 nt, synthetic construct
  source 1..20: mol_type = other RNA
ttgtcatttctgcttagtct

SEQ ID NO: 59365 - RNA, 20 nt, synthetic construct
  source 1..20: mol_type = other RNA
ttgtccaccagacaaaaata

SEQ ID NO: 59366 - RNA, 20 nt, synthetic construct
  source 1..20: mol_type = other RNA
ttgtccactgtcagtgggac

SEQ ID NO: 59367 - RNA, 20 nt, synthetic construct
  source 1..20: mol_type = other RNA
ttgtccatctggattatagt

SEQ ID NO: 59368 - RNA, 20 nt, synthetic construct
  source 1..20: mol_type = other RNA
ttgtcccatggtcaaatcaa

SEQ ID NO: 59369 - RNA, 20 nt, synthetic construct
  source 1..20: mol_type = other RNA
ttgtcccggcatgcctctcc

SEQ ID NO: 59370 - RNA, 20 nt, synthetic construct
  source 1..20: mol_type = other RNA
ttgtcccgggggagggcggg

SEQ ID NO: 59371 - RNA, 20 nt, synthetic construct
  source 1..20: mol_type = other RNA
ttgtcctaaaattccttcct

SEQ ID NO: 59372 - RNA, 20 nt, synthetic construct
  source 1..20: mol_type = other RNA
ttgtcctggcagatcaattg

SEQ ID NO: 59373 - RNA, 20 nt, synthetic construct
  source 1..20: mol_type = other RNA
ttgtcgttgagtacctctgg

SEQ ID NO: 59374 - RNA, 20 nt, synthetic construct
  source 1..20: mol_type = other RNA
ttgtctattccctacattgc

SEQ ID NO: 59375 - RNA, 20 nt, synthetic construct
  source 1..20: mol_type = other RNA
ttgtctcaacctttgcctcc

SEQ ID NO: 59376 - RNA, 20 nt, synthetic construct
  source 1..20: mol_type = other RNA
ttgtctcggatttaagagag

SEQ ID NO: 59377 - RNA, 20 nt, synthetic construct
  source 1..20: mol_type = other RNA
ttgtctctggaaggctaagc

SEQ ID NO: 59378 - RNA, 20 nt, synthetic construct
  source 1..20: mol_type = other RNA
ttgtctgattcagtttgcta

SEQ ID NO: 59379 - RNA, 20 nt, synthetic construct
  source 1..20: mol_type = other RNA
ttgtctgcaagcagatctgc

SEQ ID NO: 59380 - RNA, 20 nt, synthetic construct
  source 1..20: mol_type = other RNA
ttgtctggaacacacattag

SEQ ID NO: 59381 - RNA, 20 nt, synthetic construct
  source 1..20: mol_type = other RNA
ttgtctggtggacaaaaaac

SEQ ID NO: 59382 - RNA, 20 nt, synthetic construct
  source 1..20: mol_type = other RNA
ttgtcttacataggcttagt

SEQ ID NO: 59383 - RNA, 20 nt, synthetic construct
  source 1..20: mol_type = other RNA
ttgtcttctaaccctcaaat

SEQ ID NO: 59384 - RNA, 20 nt, synthetic construct
  source 1..20: mol_type = other RNA
ttgtcttgaatagcatctta

SEQ ID NO: 59385 - RNA, 20 nt, synthetic construct
  source 1..20: mol_type = other RNA
ttgtctttgtctattcccta

SEQ ID NO: 59386 - RNA, 20 nt, synthetic construct
  source 1..20: mol_type = other RNA
ttgtcttttctatctgaaca

SEQ ID NO: 59387 - RNA, 20 nt, synthetic construct
  source 1..20: mol_type = other RNA
ttgtctttttgtgacttgtt

SEQ ID NO: 59388 - RNA, 20 nt, synthetic construct
  source 1..20: mol_type = other RNA
ttgtgaaatatattatggtc

SEQ ID NO: 59389 - RNA, 20 nt, synthetic construct
  source 1..20: mol_type = other RNA
ttgtgaaccttgaagtactt

SEQ ID NO: 59390 - RNA, 20 nt, synthetic construct
  source 1..20: mol_type = other RNA
ttgtgaagatacaaatagta

SEQ ID NO: 59391 - RNA, 20 nt, synthetic construct
  source 1..20: mol_type = other RNA
ttgtgaagggaggtaggctt

SEQ ID NO: 59392 - RNA, 20 nt, synthetic construct
  source 1..20: mol_type = other RNA
ttgtgaattgataaaagtca

SEQ ID NO: 59393 - RNA, 20 nt, synthetic construct
  source 1..20: mol_type = other RNA
ttgtgacaagttcagcatct

SEQ ID NO: 59394 - RNA, 20 nt, synthetic construct
  source 1..20: mol_type = other RNA
ttgtgacagttctatttctt

SEQ ID NO: 59395 - RNA, 20 nt, synthetic construct
  source 1..20: mol_type = other RNA
ttgtgacatcaagggtggtg

SEQ ID NO: 59396 - RNA, 20 nt, synthetic construct
  source 1..20: mol_type = other RNA
ttgtgaccagatcaaacgtg

SEQ ID NO: 59397 - RNA, 20 nt, synthetic construct
  source 1..20: mol_type = other RNA
ttgtgactgtgagggtaaga

SEQ ID NO: 59398 - RNA, 20 nt, synthetic construct
  source 1..20: mol_type = other RNA
ttgtgacttgtttattttac

SEQ ID NO: 59399 - RNA, 20 nt, synthetic construct
  source 1..20: mol_type = other RNA
ttgtgaggattcgattaaaa

SEQ ID NO: 59400 - RNA, 20 nt, synthetic construct
  source 1..20: mol_type = other RNA
ttgtgagttttaactcttgc

SEQ ID NO: 59401 - RNA, 20 nt, synthetic construct
  source 1..20: mol_type = other RNA
ttgtgatatattatgaacca

SEQ ID NO: 59402 - RNA, 20 nt, synthetic construct
  source 1..20: mol_type = other RNA
ttgtgatctatgcatactgc

SEQ ID NO: 59403 - RNA, 20 nt, synthetic construct
  source 1..20: mol_type = other RNA
ttgtgatgtctcagatgtct

SEQ ID NO: 59404 - RNA, 20 nt, synthetic construct
  source 1..20: mol_type = other RNA
ttgtgcaacataaatagggt

SEQ ID NO: 59405 - RNA, 20 nt, synthetic construct
  source 1..20: mol_type = other RNA
ttgtgcaaccatccccgctg

SEQ ID NO: 59406 - RNA, 20 nt, synthetic construct
  source 1..20: mol_type = other RNA
ttgtgcacacatccacgcgt

SEQ ID NO: 59407 - RNA, 20 nt, synthetic construct
  source 1..20: mol_type = other RNA
ttgtgcacctcgggttcaag

SEQ ID NO: 59408 - RNA, 20 nt, synthetic construct
  source 1..20: mol_type = other RNA
ttgtgcacttaaaatttaga

SEQ ID NO: 59409 - RNA, 20 nt, synthetic construct
  source 1..20: mol_type = other RNA
ttgtgcaggtctgggttttt

SEQ ID NO: 59410 - RNA, 20 nt, synthetic construct
  source 1..20: mol_type = other RNA
ttgtgcatactgtgatgatt

SEQ ID NO: 59411 - RNA, 20 nt, synthetic construct
  source 1..20: mol_type = other RNA
ttgtgcatatataccacatt

SEQ ID NO: 59412 - RNA, 20 nt, synthetic construct
  source 1..20: mol_type = other RNA
ttgtgcatcaaaggacacta

SEQ ID NO: 59413 - RNA, 20 nt, synthetic construct
  source 1..20: mol_type = other RNA
ttgtgcatcagaattccatt

SEQ ID NO: 59414 - RNA, 20 nt, synthetic construct
  source 1..20: mol_type = other RNA
ttgtgcatcctttatacctt

SEQ ID NO: 59415 - RNA, 20 nt, synthetic construct
  source 1..20: mol_type = other RNA
ttgtgcatgtgcaggaaact

SEQ ID NO: 59416 - RNA, 20 nt, synthetic construct
  source 1..20: mol_type = other RNA
ttgtgccagtgaactccagt

SEQ ID NO: 59417 - RNA, 20 nt, synthetic construct
  source 1..20: mol_type = other RNA
ttgtgctacctcaaattgtg

SEQ ID NO: 59418 - RNA, 20 nt, synthetic construct
  source 1..20: mol_type = other RNA
ttgtgctcagtggttctgcg

SEQ ID NO: 59419 - RNA, 20 nt, synthetic construct
  source 1..20: mol_type = other RNA
ttgtgctgaaaccccgcata

SEQ ID NO: 59420 - RNA, 20 nt, synthetic construct
  source 1..20: mol_type = other RNA
ttgtgcttcgaggtcgcacc

SEQ ID NO: 59421 - RNA, 20 nt, synthetic construct
  source 1..20: mol_type = other RNA
ttgtgcttggatattctaca

SEQ ID NO: 59422 - RNA, 20 nt, synthetic construct
  source 1..20: mol_type = other RNA
ttgtgcttttaatactttca

SEQ ID NO: 59423 - RNA, 20 nt, synthetic construct
  source 1..20: mol_type = other RNA
ttgtggaattaactccaggg

SEQ ID NO: 59424 - RNA, 20 nt, synthetic construct
  source 1..20: mol_type = other RNA
ttgtggagatggggacttgc

SEQ ID NO: 59425 - RNA, 20 nt, synthetic construct
  source 1..20: mol_type = other RNA
ttgtggagtggaggggcagg

SEQ ID NO: 59426 - RNA, 20 nt, synthetic construct
  source 1..20: mol_type = other RNA
ttgtggatgagattaatgta

SEQ ID NO: 59427 - RNA, 20 nt, synthetic construct
  source 1..20: mol_type = other RNA
ttgtggatgtccttaatgcc

SEQ ID NO: 59428 - RNA, 20 nt, synthetic construct
  source 1..20: mol_type = other RNA
ttgtggcatctttgttacag

SEQ ID NO: 59429 - RNA, 20 nt, synthetic construct
  source 1..20: mol_type = other RNA
ttgtggcctcttcccttgtg

SEQ ID NO: 59430 - RNA, 20 nt, synthetic construct
  source 1..20: mol_type = other RNA
ttgtggctacaccctgggaa

SEQ ID NO: 59431 - RNA, 20 nt, synthetic construct
  source 1..20: mol_type = other RNA
ttgtggctgacatgtgtaaa

SEQ ID NO: 59432 - RNA, 20 nt, synthetic construct
  source 1..20: mol_type = other RNA
ttgtgggaattcagtcacca

SEQ ID NO: 59433 - RNA, 20 nt, synthetic construct
  source 1..20: mol_type = other RNA
ttgtgggtaaattaagtaaa

SEQ ID NO: 59434 - RNA, 20 nt, synthetic construct
  source 1..20: mol_type = other RNA
ttgtgggtattttgttgttg

SEQ ID NO: 59435 - RNA, 20 nt, synthetic construct
  source 1..20: mol_type = other RNA
ttgtggtcttaagagactct

SEQ ID NO: 59436 - RNA, 20 nt, synthetic construct
  source 1..20: mol_type = other RNA
ttgtggttttaacctcttga

SEQ ID NO: 59437 - RNA, 20 nt, synthetic construct
  source 1..20: mol_type = other RNA
ttgtgtaactaccactgagg

SEQ ID NO: 59438 - RNA, 20 nt, synthetic construct
  source 1..20: mol_type = other RNA
ttgtgtagaaatgtggagat

SEQ ID NO: 59439 - RNA, 20 nt, synthetic construct
  source 1..20: mol_type = other RNA
ttgtgtagaggtgaagttaa

SEQ ID NO: 59440 - RNA, 20 nt, synthetic construct
  source 1..20: mol_type = other RNA
ttgtgtagcgggaaaaaata

SEQ ID NO: 59441 - RNA, 20 nt, synthetic construct
  source 1..20: mol_type = other RNA
ttgtgtatatggtaaaatgt

SEQ ID NO: 59442 - RNA, 20 nt, synthetic construct
  source 1..20: mol_type = other RNA
ttgtgtatcttttgttagat

SEQ ID NO: 59443 - RNA, 20 nt, synthetic construct
  source 1..20: mol_type = other RNA
ttgtgtcaagtacaactaat

SEQ ID NO: 59444 - RNA, 20 nt, synthetic construct
  source 1..20: mol_type = other RNA
ttgtgtcatttttgtattct

SEQ ID NO: 59445 - RNA, 20 nt, synthetic construct
  source 1..20: mol_type = other RNA
ttgtgtcttaaattcaaagt

SEQ ID NO: 59446 - RNA, 20 nt, synthetic construct
  source 1..20: mol_type = other RNA
ttgtgtcttctgtttttctt

SEQ ID NO: 59447 - RNA, 20 nt, synthetic construct
  source 1..20: mol_type = other RNA
ttgtgtgatttcatatgaat

SEQ ID NO: 59448 - RNA, 20 nt, synthetic construct
  source 1..20: mol_type = other RNA
ttgtgtgcacctaataaaat

SEQ ID NO: 59449 - RNA, 20 nt, synthetic construct
  source 1..20: mol_type = other RNA
ttgtgtggacacactgaaac

SEQ ID NO: 59450 - RNA, 20 nt, synthetic construct
  source 1..20: mol_type = other RNA
ttgtgtgtcgagaaaaatgg

SEQ ID NO: 59451 - RNA, 20 nt, synthetic construct
  source 1..20: mol_type = other RNA
ttgtgtgttaaatttgattg

SEQ ID NO: 59452 - RNA, 20 nt, synthetic construct
  source 1..20: mol_type = other RNA
ttgtgtgttctctttttgac

SEQ ID NO: 59453 - RNA, 20 nt, synthetic construct
  source 1..20: mol_type = other RNA
ttgtgtgtttgtgaaaaata

SEQ ID NO: 59454 - RNA, 20 nt, synthetic construct
  source 1..20: mol_type = other RNA
ttgtgttgcccacgctggtc

SEQ ID NO: 59455 - RNA, 20 nt, synthetic construct
  source 1..20: mol_type = other RNA
ttgtgttggtgtttctgaca

SEQ ID NO: 59456 - RNA, 20 nt, synthetic construct
  source 1..20: mol_type = other RNA
ttgtgtttgtgaccagatca

SEQ ID NO: 59457 - RNA, 20 nt, synthetic construct
  source 1..20: mol_type = other RNA
ttgtgttttatttggctgtt

SEQ ID NO: 59458 - RNA, 20 nt, synthetic construct
  source 1..20: mol_type = other RNA
ttgtgttttcactctcaata

SEQ ID NO: 59459 - RNA, 20 nt, synthetic construct
  source 1..20: mol_type = other RNA
ttgtgttttcattcgttcaa

SEQ ID NO: 59460 - RNA, 20 nt, synthetic construct
  source 1..20: mol_type = other RNA
ttgttaacatttcttctagt

SEQ ID NO: 59461 - RNA, 20 nt, synthetic construct
  source 1..20: mol_type = other RNA
ttgttaactgtagagaaaat

SEQ ID NO: 59462 - RNA, 20 nt, synthetic construct
  source 1..20: mol_type = other RNA
ttgttaagcattttccggtt

SEQ ID NO: 59463 - RNA, 20 nt, synthetic construct
  source 1..20: mol_type = other RNA
ttgttacagcagctctagca

SEQ ID NO: 59464 - RNA, 20 nt, synthetic construct
  source 1..20: mol_type = other RNA
ttgttactgatctgctcaag

SEQ ID NO: 59465 - RNA, 20 nt, synthetic construct
  source 1..20: mol_type = other RNA
ttgttagaattttgcttttg

SEQ ID NO: 59466 - RNA, 20 nt, synthetic construct
  source 1..20: mol_type = other RNA
ttgttagatctgggataatg

SEQ ID NO: 59467 - RNA, 20 nt, synthetic construct
  source 1..20: mol_type = other RNA
ttgttagccacagcgttgtt

SEQ ID NO: 59468 - RNA, 20 nt, synthetic construct
  source 1..20: mol_type = other RNA
ttgttaggtgctggcttcaa

SEQ ID NO: 59469 - RNA, 20 nt, synthetic construct
  source 1..20: mol_type = other RNA
ttgttagtaggaaaaccatg

SEQ ID NO: 59470 - RNA, 20 nt, synthetic construct
  source 1..20: mol_type = other RNA
ttgttagtgccttcagaagg

SEQ ID NO: 59471 - RNA, 20 nt, synthetic construct
  source 1..20: mol_type = other RNA
ttgttagtttattcatacgt

SEQ ID NO: 59472 - RNA, 20 nt, synthetic construct
  source 1..20: mol_type = other RNA
ttgttataagcaaagatatg

SEQ ID NO: 59473 - RNA, 20 nt, synthetic construct
  source 1..20: mol_type = other RNA
ttgttatatccagattgata

SEQ ID NO: 59474 - RNA, 20 nt, synthetic construct
  source 1..20: mol_type = other RNA
ttgttatctgaacgtcttta

SEQ ID NO: 59475 - RNA, 20 nt, synthetic construct
  source 1..20: mol_type = other RNA
ttgttatggtaggtgctttt

SEQ ID NO: 59476 - RNA, 20 nt, synthetic construct
  source 1..20: mol_type = other RNA
ttgttatgtacattttacca

SEQ ID NO: 59477 - RNA, 20 nt, synthetic construct
  source 1..20: mol_type = other RNA
ttgttcaaaatacagtgttt

SEQ ID NO: 59478 - RNA, 20 nt, synthetic construct
  source 1..20: mol_type = other RNA
ttgttcaagcgctgaagtac

SEQ ID NO: 59479 - RNA, 20 nt, synthetic construct
  source 1..20: mol_type = other RNA
ttgttcagaaatagactccc

SEQ ID NO: 59480 - RNA, 20 nt, synthetic construct
  source 1..20: mol_type = other RNA
ttgttcaggagttttgcctc

SEQ ID NO: 59481 - RNA, 20 nt, synthetic construct
  source 1..20: mol_type = other RNA
ttgttcagggaaggctgcaa

SEQ ID NO: 59482 - RNA, 20 nt, synthetic construct
  source 1..20: mol_type = other RNA
ttgttcagttgaaaagtatg

SEQ ID NO: 59483 - RNA, 20 nt, synthetic construct
  source 1..20: mol_type = other RNA
ttgttcatcatcttttgcct

SEQ ID NO: 59484 - RNA, 20 nt, synthetic construct
  source 1..20: mol_type = other RNA
ttgttcatgaaatccccttt

SEQ ID NO: 59485 - RNA, 20 nt, synthetic construct
  source 1..20: mol_type = other RNA
ttgttcatgtctgtgtagtt

SEQ ID NO: 59486 - RNA, 20 nt, synthetic construct
  source 1..20: mol_type = other RNA
ttgttcatgtttacagaaat

SEQ ID NO: 59487 - RNA, 20 nt, synthetic construct
  source 1..20: mol_type = other RNA
ttgttcattcatctgttaat

SEQ ID NO: 59488 - RNA, 20 nt, synthetic construct
  source 1..20: mol_type = other RNA
ttgttccaggggggaaaaaa

SEQ ID NO: 59489 - RNA, 20 nt, synthetic construct
  source 1..20: mol_type = other RNA
ttgttctaatttgtgaacct

SEQ ID NO: 59490 - RNA, 20 nt, synthetic construct
  source 1..20: mol_type = other RNA
ttgttctcgttcatgttcaa

SEQ ID NO: 59491 - RNA, 20 nt, synthetic construct
  source 1..20: mol_type = other RNA
ttgttctctttgtttatcct

SEQ ID NO: 59492 - RNA, 20 nt, synthetic construct
  source 1..20: mol_type = other RNA
ttgttctgctgttgatggac

SEQ ID NO: 59493 - RNA, 20 nt, synthetic construct
  source 1..20: mol_type = other RNA
ttgttctgtcacatttgaaa

SEQ ID NO: 59494 - RNA, 20 nt, synthetic construct
  source 1..20: mol_type = other RNA
ttgttctgtcacggtgccct

SEQ ID NO: 59495 - RNA, 20 nt, synthetic construct
  source 1..20: mol_type = other RNA
ttgttcttggttaatattac

SEQ ID NO: 59496 - RNA, 20 nt, synthetic construct
  source 1..20: mol_type = other RNA
ttgttcttttcaaaaacagc

SEQ ID NO: 59497 - RNA, 20 nt, synthetic construct
  source 1..20: mol_type = other RNA
ttgttgaaaacgaggaaaag

SEQ ID NO: 59498 - RNA, 20 nt, synthetic construct
  source 1..20: mol_type = other RNA
ttgttgaatcttaacatttc

SEQ ID NO: 59499 - RNA, 20 nt, synthetic construct
  source 1..20: mol_type = other RNA
ttgttgaatgtggcagaatt

SEQ ID NO: 59500 - RNA, 20 nt, synthetic construct
  source 1..20: mol_type = other RNA
ttgttgaattgttggagttc

SEQ ID NO: 59501 - RNA, 20 nt, synthetic construct
  source 1..20: mol_type = other RNA
ttgttgacatcctttgcgtc

SEQ ID NO: 59502 - RNA, 20 nt, synthetic construct
  source 1..20: mol_type = other RNA
ttgttgacccaatcatgttc

SEQ ID NO: 59503 - RNA, 20 nt, synthetic construct
  source 1..20: mol_type = other RNA
ttgttgaggatgactgtcct

SEQ ID NO: 59504 - RNA, 20 nt, synthetic construct
  source 1..20: mol_type = other RNA
ttgttgcatccccattcaat

SEQ ID NO: 59505 - RNA, 20 nt, synthetic construct
  source 1..20: mol_type = other RNA
ttgttgccaggtggacgcgg

SEQ ID NO: 59506 - RNA, 20 nt, synthetic construct
  source 1..20: mol_type = other RNA
ttgttgccatcattttatga

SEQ ID NO: 59507 - RNA, 20 nt, synthetic construct
  source 1..20: mol_type = other RNA
ttgttgcctgtagttttggt

SEQ ID NO: 59508 - RNA, 20 nt, synthetic construct
  source 1..20: mol_type = other RNA
ttgttgcgcgtcaaaagatg

SEQ ID NO: 59509 - RNA, 20 nt, synthetic construct
  source 1..20: mol_type = other RNA
ttgttgctattgttgaattg

SEQ ID NO: 59510 - RNA, 20 nt, synthetic construct
  source 1..20: mol_type = other RNA
ttgttggacagctgggagaa

SEQ ID NO: 59511 - RNA, 20 nt, synthetic construct
  source 1..20: mol_type = other RNA
ttgttggctaaaagaccgca

SEQ ID NO: 59512 - RNA, 20 nt, synthetic construct
  source 1..20: mol_type = other RNA
ttgttgggtttaactgaggt

SEQ ID NO: 59513 - RNA, 20 nt, synthetic construct
  source 1..20: mol_type = other RNA
ttgttggtttgtgtgtttgt

SEQ ID NO: 59514 - RNA, 20 nt, synthetic construct
  source 1..20: mol_type = other RNA
ttgttgtgtgttaaatttga

SEQ ID NO: 59515 - RNA, 20 nt, synthetic construct
  source 1..20: mol_type = other RNA
ttgttgttggtttgtgtgtt

SEQ ID NO: 59516 - RNA, 20 nt, synthetic construct
  source 1..20: mol_type = other RNA
ttgttgttgttgtttctgag

SEQ ID NO: 59517 - RNA, 20 nt, synthetic construct
  source 1..20: mol_type = other RNA
ttgttgttgtttctgagcca

SEQ ID NO: 59518 - RNA, 20 nt, synthetic construct
  source 1..20: mol_type = other RNA
ttgttgtttctgagccagag

SEQ ID NO: 59519 - RNA, 20 nt, synthetic construct
  source 1..20: mol_type = other RNA
ttgtttaattagccgggtgt

SEQ ID NO: 59520 - RNA, 20 nt, synthetic construct
  source 1..20: mol_type = other RNA
ttgtttaattctgtttaccc

SEQ ID NO: 59521 - RNA, 20 nt, synthetic construct
  source 1..20: mol_type = other RNA
ttgtttacagtagccaaagg

SEQ ID NO: 59522 - RNA, 20 nt, synthetic construct
  source 1..20: mol_type = other RNA
ttgtttacccagtgtgtttg

SEQ ID NO: 59523 - RNA, 20 nt, synthetic construct
  source 1..20: mol_type = other RNA
ttgtttacttgggtataaat

SEQ ID NO: 59524 - RNA, 20 nt, synthetic construct
  source 1..20: mol_type = other RNA
ttgtttagtagctgtcttta

SEQ ID NO: 59525 - RNA, 20 nt, synthetic construct
  source 1..20: mol_type = other RNA
ttgtttatccttgcaccaac

SEQ ID NO: 59526 - RNA, 20 nt, synthetic construct
  source 1..20: mol_type = other RNA
ttgtttatttgctgtcaggc

SEQ ID NO: 59527 - RNA, 20 nt, synthetic construct
  source 1..20: mol_type = other RNA
ttgtttcacttttctggttt

SEQ ID NO: 59528 - RNA, 20 nt, synthetic construct
  source 1..20: mol_type = other RNA
ttgtttcagtgtgtccacac

SEQ ID NO: 59529 - RNA, 20 nt, synthetic construct
  source 1..20: mol_type = other RNA
ttgtttccactttgaggtta

SEQ ID NO: 59530 - RNA, 20 nt, synthetic construct
  source 1..20: mol_type = other RNA
ttgtttccatgtcttggcta

SEQ ID NO: 59531 - RNA, 20 nt, synthetic construct
  source 1..20: mol_type = other RNA
ttgtttctgagccagagttt

SEQ ID NO: 59532 - RNA, 20 nt, synthetic construct
  source 1..20: mol_type = other RNA
ttgtttctgaggtggagttc

SEQ ID NO: 59533 - RNA, 20 nt, synthetic construct
  source 1..20: mol_type = other RNA
ttgtttcttttcactctaat

SEQ ID NO: 59534 - RNA, 20 nt, synthetic construct
  source 1..20: mol_type = other RNA
ttgtttgaaatttaaagacg

SEQ ID NO: 59535 - RNA, 20 nt, synthetic construct
  source 1..20: mol_type = other RNA
ttgtttgaattaagcaccac

SEQ ID NO: 59536 - RNA, 20 nt, synthetic construct
  source 1..20: mol_type = other RNA
ttgtttgaggctgggagtac

SEQ ID NO: 59537 - RNA, 20 nt, synthetic construct
  source 1..20: mol_type = other RNA
ttgtttgctagagctgctgt

SEQ ID NO: 59538 - RNA, 20 nt, synthetic construct
  source 1..20: mol_type = other RNA
ttgtttgtgaagatacaaat

SEQ ID NO: 59539 - RNA, 20 nt, synthetic construct
  source 1..20: mol_type = other RNA
ttgtttgttgggtttaactg

SEQ ID NO: 59540 - RNA, 20 nt, synthetic construct
  source 1..20: mol_type = other RNA
ttgtttgtttctgaggtgga

SEQ ID NO: 59541 - RNA, 20 nt, synthetic construct
  source 1..20: mol_type = other RNA
ttgttttaccatctaaagcc

SEQ ID NO: 59542 - RNA, 20 nt, synthetic construct
  source 1..20: mol_type = other RNA
ttgttttaggtagtcttgtc

SEQ ID NO: 59543 - RNA, 20 nt, synthetic construct
  source 1..20: mol_type = other RNA
ttgttttcccttttgtagct

SEQ ID NO: 59544 - RNA, 20 nt, synthetic construct
  source 1..20: mol_type = other RNA
ttgttttctccttctggaag

SEQ ID NO: 59545 - RNA, 20 nt, synthetic construct
  source 1..20: mol_type = other RNA
ttgttttcttattttttccc

SEQ ID NO: 59546 - RNA, 20 nt, synthetic construct
  source 1..20: mol_type = other RNA
ttgttttgaataacctcata

SEQ ID NO: 59547 - RNA, 20 nt, synthetic construct
  source 1..20: mol_type = other RNA
ttgttttgcaagattaatct

SEQ ID NO: 59548 - RNA, 20 nt, synthetic construct
  source 1..20: mol_type = other RNA
ttgttttggtcaaaactgta

SEQ ID NO: 59549 - RNA, 20 nt, synthetic construct
  source 1..20: mol_type = other RNA
ttgttttgtgtttgtgacca

SEQ ID NO: 59550 - RNA, 20 nt, synthetic construct
  source 1..20: mol_type = other RNA
ttgttttgttctcgttcatg

SEQ ID NO: 59551 - RNA, 20 nt, synthetic construct
  source 1..20: mol_type = other RNA
ttgttttgttgctattgttg

SEQ ID NO: 59552 - RNA, 20 nt, synthetic construct
  source 1..20: mol_type = other RNA
ttgttttgtttttctctcct

SEQ ID NO: 59553 - RNA, 20 nt, synthetic construct
  source 1..20: mol_type = other RNA
ttgttttgttttttcacaga

SEQ ID NO: 59554 - RNA, 20 nt, synthetic construct
  source 1..20: mol_type = other RNA
ttgtttttctctccttgcac

SEQ ID NO: 59555 - RNA, 20 nt, synthetic construct
  source 1..20: mol_type = other RNA
ttgttttttcacagaaacag

SEQ ID NO: 59556 - RNA, 20 nt, synthetic construct
  source 1..20: mol_type = other RNA
ttgttttttgttttggtcaa

SEQ ID NO: 59557 - RNA, 20 nt, synthetic construct
  source 1..20: mol_type = other RNA
tttaaaaacaacactaacca

SEQ ID NO: 59558 - RNA, 20 nt, synthetic construct
  source 1..20: mol_type = other RNA
tttaaaaactttttgggcct

SEQ ID NO: 59559 - RNA, 20 nt, synthetic construct
  source 1..20: mol_type = other RNA
tttaaaaagaaaaagctcac

SEQ ID NO: 59560 - RNA, 20 nt, synthetic construct
  source 1..20: mol_type = other RNA
tttaaaaagcagctacctgt

SEQ ID NO: 59561 - RNA, 20 nt, synthetic construct
  source 1..20: mol_type = other RNA
tttaaaacactggcaaaaat

SEQ ID NO: 59562 - RNA, 20 nt, synthetic construct
  source 1..20: mol_type = other RNA
tttaaaaccagagcggaatt

SEQ ID NO: 59563 - RNA, 20 nt, synthetic construct
  source 1..20: mol_type = other RNA
tttaaaactgctgagtcttc

SEQ ID NO: 59564 - RNA, 20 nt, synthetic construct
  source 1..20: mol_type = other RNA
tttaaaagaaaatggccaag

SEQ ID NO: 59565 - RNA, 20 nt, synthetic construct
  source 1..20: mol_type = other RNA
tttaaaagaaagctctcaat

SEQ ID NO: 59566 - RNA, 20 nt, synthetic construct
  source 1..20: mol_type = other RNA
tttaaaagaacctctggaaa

SEQ ID NO: 59567 - RNA, 20 nt, synthetic construct
  source 1..20: mol_type = other RNA
tttaaaagagcgaagaggga

SEQ ID NO: 59568 - RNA, 20 nt, synthetic construct
  source 1..20: mol_type = other RNA
tttaaaagagtgcacattcc

SEQ ID NO: 59569 - RNA, 20 nt, synthetic construct
  source 1..20: mol_type = other RNA
tttaaaagatatccacagta

SEQ ID NO: 59570 - RNA, 20 nt, synthetic construct
  source 1..20: mol_type = other RNA
tttaaaagatgcattctgtc

SEQ ID NO: 59571 - RNA, 20 nt, synthetic construct
  source 1..20: mol_type = other RNA
tttaaaagtaaatcagactg

SEQ ID NO: 59572 - RNA, 20 nt, synthetic construct
  source 1..20: mol_type = other RNA
tttaaaagtacagataacca

SEQ ID NO: 59573 - RNA, 20 nt, synthetic construct
  source 1..20: mol_type = other RNA
tttaaaagtcagctaggcgt

SEQ ID NO: 59574 - RNA, 20 nt, synthetic construct
  source 1..20: mol_type = other RNA
tttaaaatctaggttatctg

SEQ ID NO: 59575 - RNA, 20 nt, synthetic construct
  source 1..20: mol_type = other RNA
tttaaaatctgattcagtgg

SEQ ID NO: 59576 - RNA, 20 nt, synthetic construct
  source 1..20: mol_type = other RNA
tttaaaattgcagagtgttc

SEQ ID NO: 59577 - RNA, 20 nt, synthetic construct
  source 1..20: mol_type = other RNA
tttaaacaggtgtaagagat

SEQ ID NO: 59578 - RNA, 20 nt, synthetic construct
  source 1..20: mol_type = other RNA
tttaaacccatttcatgcca

SEQ ID NO: 59579 - RNA, 20 nt, synthetic construct
  source 1..20: mol_type = other RNA
tttaaacgtcagagcagcac

SEQ ID NO: 59580 - RNA, 20 nt, synthetic construct
  source 1..20: mol_type = other RNA
tttaaactggatgaatacaa

SEQ ID NO: 59581 - RNA, 20 nt, synthetic construct
  source 1..20: mol_type = other RNA
tttaaagaaaggtctctctc

SEQ ID NO: 59582 - RNA, 20 nt, synthetic construct
  source 1..20: mol_type = other RNA
tttaaagacctcaggtttag

SEQ ID NO: 59583 - RNA, 20 nt, synthetic construct
  source 1..20: mol_type = other RNA
tttaaagacgttcagataac

SEQ ID NO: 59584 - RNA, 20 nt, synthetic construct
  source 1..20: mol_type = other RNA
tttaaagcagggaggggtcc

SEQ ID NO: 59585 - RNA, 20 nt, synthetic construct
  source 1..20: mol_type = other RNA
tttaaagctctaataaaagc

SEQ ID NO: 59586 - RNA, 20 nt, synthetic construct
  source 1..20: mol_type = other RNA
tttaaagctctatggcattt

SEQ ID NO: 59587 - RNA, 20 nt, synthetic construct
  source 1..20: mol_type = other RNA
tttaaagctgaactcctttc

SEQ ID NO: 59588 - RNA, 20 nt, synthetic construct
  source 1..20: mol_type = other RNA
tttaaagctttgtgactgtg

SEQ ID NO: 59589 - RNA, 20 nt, synthetic construct
  source 1..20: mol_type = other RNA
tttaaagggataatgctatc

SEQ ID NO: 59590 - RNA, 20 nt, synthetic construct
  source 1..20: mol_type = other RNA
tttaaagtaggttgagactt

SEQ ID NO: 59591 - RNA, 20 nt, synthetic construct
  source 1..20: mol_type = other RNA
tttaaagtgtaaagtttctc

SEQ ID NO: 59592 - RNA, 20 nt, synthetic construct
  source 1..20: mol_type = other RNA
tttaaagttagtgaagcaga

SEQ ID NO: 59593 - RNA, 20 nt, synthetic construct
  source 1..20: mol_type = other RNA
tttaaatcagcaccatctaa

SEQ ID NO: 59594 - RNA, 20 nt, synthetic construct
  source 1..20: mol_type = other RNA
tttaaatcagggcctttaat

SEQ ID NO: 59595 - RNA, 20 nt, synthetic construct
  source 1..20: mol_type = other RNA
tttaaatgccaatttgggat

SEQ ID NO: 59596 - RNA, 20 nt, synthetic construct
  source 1..20: mol_type = other RNA
tttaaatgccacataaatca

SEQ ID NO: 59597 - RNA, 20 nt, synthetic construct
  source 1..20: mol_type = other RNA
tttaaatgttttgcagagat

SEQ ID NO: 59598 - RNA, 20 nt, synthetic construct
  source 1..20: mol_type = other RNA
tttaaattttgagacctcag

SEQ ID NO: 59599 - RNA, 20 nt, synthetic construct
  source 1..20: mol_type = other RNA
tttaacacacaacaatgaat

SEQ ID NO: 59600 - RNA, 20 nt, synthetic construct
  source 1..20: mol_type = other RNA
tttaacacatacaaaccaaa

SEQ ID NO: 59601 - RNA, 20 nt, synthetic construct
  source 1..20: mol_type = other RNA
tttaacaccatggcaggttt

SEQ ID NO: 59602 - RNA, 20 nt, synthetic construct
  source 1..20: mol_type = other RNA
tttaacagatggtccttttt

SEQ ID NO: 59603 - RNA, 20 nt, synthetic construct
  source 1..20: mol_type = other RNA
tttaaccaattatgctgagt

SEQ ID NO: 59604 - RNA, 20 nt, synthetic construct
  source 1..20: mol_type = other RNA
tttaacccacagataatttc

SEQ ID NO: 59605 - RNA, 20 nt, synthetic construct
  source 1..20: mol_type = other RNA
tttaacctctggtattttaa

SEQ ID NO: 59606 - RNA, 20 nt, synthetic construct
  source 1..20: mol_type = other RNA
tttaacctcttgaagtcagt

SEQ ID NO: 59607 - RNA, 20 nt, synthetic construct
  source 1..20: mol_type = other RNA
tttaacgtatctgggaaaaa

SEQ ID NO: 59608 - RNA, 20 nt, synthetic construct
  source 1..20: mol_type = other RNA
tttaactatcctatgtgggg

SEQ ID NO: 59609 - RNA, 20 nt, synthetic construct
  source 1..20: mol_type = other RNA
tttaactcttgcattagagc

SEQ ID NO: 59610 - RNA, 20 nt, synthetic construct
  source 1..20: mol_type = other RNA
tttaactgaggtgtttttca

SEQ ID NO: 59611 - RNA, 20 nt, synthetic construct
  source 1..20: mol_type = other RNA
tttaacttctaatgcccatt

SEQ ID NO: 59612 - RNA, 20 nt, synthetic construct
  source 1..20: mol_type = other RNA
tttaacttgctttgaatttg

SEQ ID NO: 59613 - RNA, 20 nt, synthetic construct
  source 1..20: mol_type = other RNA
tttaactttgatgaattcca

SEQ ID NO: 59614 - RNA, 20 nt, synthetic construct
  source 1..20: mol_type = other RNA
tttaagaaaagaagttacgg

SEQ ID NO: 59615 - RNA, 20 nt, synthetic construct
  source 1..20: mol_type = other RNA
tttaagaaatcgttgtgaaa

SEQ ID NO: 59616 - RNA, 20 nt, synthetic construct
  source 1..20: mol_type = other RNA
tttaagaaccttcatactat

SEQ ID NO: 59617 - RNA, 20 nt, synthetic construct
  source 1..20: mol_type = other RNA
tttaagaagggaacactaag

SEQ ID NO: 59618 - RNA, 20 nt, synthetic construct
  source 1..20: mol_type = other RNA
tttaagacacaaggaaggtc

SEQ ID NO: 59619 - RNA, 20 nt, synthetic construct
  source 1..20: mol_type = other RNA
tttaagagaggaagtgaccc

SEQ ID NO: 59620 - RNA, 20 nt, synthetic construct
  source 1..20: mol_type = other RNA
tttaagagtatctttttcag

SEQ ID NO: 59621 - RNA, 20 nt, synthetic construct
  source 1..20: mol_type = other RNA
tttaagagtgaagaaacctt

SEQ ID NO: 59622 - RNA, 20 nt, synthetic construct
  source 1..20: mol_type = other RNA
tttaagatggatttttctgt

SEQ ID NO: 59623 - RNA, 20 nt, synthetic construct
  source 1..20: mol_type = other RNA
tttaagattctctttaggga

SEQ ID NO: 59624 - RNA, 20 nt, synthetic construct
  source 1..20: mol_type = other RNA
tttaagcacagaattactat

SEQ ID NO: 59625 - RNA, 20 nt, synthetic construct
  source 1..20: mol_type = other RNA
tttaagcagaaagttactat

SEQ ID NO: 59626 - RNA, 20 nt, synthetic construct
  source 1..20: mol_type = other RNA
tttaagcatcccatatggag

SEQ ID NO: 59627 - RNA, 20 nt, synthetic construct
  source 1..20: mol_type = other RNA
tttaagcctagagattaggc

SEQ ID NO: 59628 - RNA, 20 nt, synthetic construct
  source 1..20: mol_type = other RNA
tttaaggaaaagtcagtaaa

SEQ ID NO: 59629 - RNA, 20 nt, synthetic construct
  source 1..20: mol_type = other RNA
tttaaggaccaggtatggcg

SEQ ID NO: 59630 - RNA, 20 nt, synthetic construct
  source 1..20: mol_type = other RNA
tttaaggcagggcttggtgg

SEQ ID NO: 59631 - RNA, 20 nt, synthetic construct
  source 1..20: mol_type = other RNA
tttaaggcgcagacacacca

SEQ ID NO: 59632 - RNA, 20 nt, synthetic construct
  source 1..20: mol_type = other RNA
tttaaggctaaaacatacat

SEQ ID NO: 59633 - RNA, 20 nt, synthetic construct
  source 1..20: mol_type = other RNA
tttaaggctgaacaatattc

SEQ ID NO: 59634 - RNA, 20 nt, synthetic construct
  source 1..20: mol_type = other RNA
tttaaggcttggaaaacaaa

SEQ ID NO: 59635 - RNA, 20 nt, synthetic construct
  source 1..20: mol_type = other RNA
tttaagggaaacactcatac

SEQ ID NO: 59636 - RNA, 20 nt, synthetic construct
  source 1..20: mol_type = other RNA
tttaaggggtaaatggtttc

SEQ ID NO: 59637 - RNA, 20 nt, synthetic construct
  source 1..20: mol_type = other RNA
tttaaggtaagggtccagct

SEQ ID NO: 59638 - RNA, 20 nt, synthetic construct
  source 1..20: mol_type = other RNA
tttaagtggcgctgtttgcc

SEQ ID NO: 59639 - RNA, 20 nt, synthetic construct
  source 1..20: mol_type = other RNA
tttaagttactgattagaag

SEQ ID NO: 59640 - RNA, 20 nt, synthetic construct
  source 1..20: mol_type = other RNA
tttaagttctccaagttatt

SEQ ID NO: 59641 - RNA, 20 nt, synthetic construct
  source 1..20: mol_type = other RNA
tttaataagcttcgaagcaa

SEQ ID NO: 59642 - RNA, 20 nt, synthetic construct
  source 1..20: mol_type = other RNA
tttaatactatgtatgtggc

SEQ ID NO: 59643 - RNA, 20 nt, synthetic construct
  source 1..20: mol_type = other RNA
tttaatactttcacactgat

SEQ ID NO: 59644 - RNA, 20 nt, synthetic construct
  source 1..20: mol_type = other RNA
tttaatagaggtctgtcttt

SEQ ID NO: 59645 - RNA, 20 nt, synthetic construct
  source 1..20: mol_type = other RNA
tttaatatgtgtacaatggg

SEQ ID NO: 59646 - RNA, 20 nt, synthetic construct
  source 1..20: mol_type = other RNA
tttaatcaccaggcgcggtg

SEQ ID NO: 59647 - RNA, 20 nt, synthetic construct
  source 1..20: mol_type = other RNA
tttaatcacctcaagtgatg

SEQ ID NO: 59648 - RNA, 20 nt, synthetic construct
  source 1..20: mol_type = other RNA
tttaatcgaatcctcacaac

SEQ ID NO: 59649 - RNA, 20 nt, synthetic construct
  source 1..20: mol_type = other RNA
tttaatctacaaaacagggt

SEQ ID NO: 59650 - RNA, 20 nt, synthetic construct
  source 1..20: mol_type = other RNA
tttaatctctcttgacctta

SEQ ID NO: 59651 - RNA, 20 nt, synthetic construct
  source 1..20: mol_type = other RNA
tttaatctgtcagcagttca

SEQ ID NO: 59652 - RNA, 20 nt, synthetic construct
  source 1..20: mol_type = other RNA
tttaatctgtcctgaatact

SEQ ID NO: 59653 - RNA, 20 nt, synthetic construct
  source 1..20: mol_type = other RNA
tttaatgagtagtacttctg

SEQ ID NO: 59654 - RNA, 20 nt, synthetic construct
  source 1..20: mol_type = other RNA
tttaatgggcattagaagtt

SEQ ID NO: 59655 - RNA, 20 nt, synthetic construct
  source 1..20: mol_type = other RNA
tttaatgtagatcctgagga

SEQ ID NO: 59656 - RNA, 20 nt, synthetic construct
  source 1..20: mol_type = other RNA
tttaatgtgctgtccatttc

SEQ ID NO: 59657 - RNA, 20 nt, synthetic construct
  source 1..20: mol_type = other RNA
tttaatgttttatttagccc

SEQ ID NO: 59658 - RNA, 20 nt, synthetic construct
  source 1..20: mol_type = other RNA
tttaattacccaggcatgat

SEQ ID NO: 59659 - RNA, 20 nt, synthetic construct
  source 1..20: mol_type = other RNA
tttaattagccgggtgtagt

SEQ ID NO: 59660 - RNA, 20 nt, synthetic construct
  source 1..20: mol_type = other RNA
tttaattatgagcattcccc

SEQ ID NO: 59661 - RNA, 20 nt, synthetic construct
  source 1..20: mol_type = other RNA
tttaattcctactttcttca

SEQ ID NO: 59662 - RNA, 20 nt, synthetic construct
  source 1..20: mol_type = other RNA
tttaattctgtttaccctta

SEQ ID NO: 59663 - RNA, 20 nt, synthetic construct
  source 1..20: mol_type = other RNA
tttaattcttaaactgccaa

SEQ ID NO: 59664 - RNA, 20 nt, synthetic construct
  source 1..20: mol_type = other RNA
tttaattgggggaaaattga

SEQ ID NO: 59665 - RNA, 20 nt, synthetic construct
  source 1..20: mol_type = other RNA
tttaatttagcgttcatcca

SEQ ID NO: 59666 - RNA, 20 nt, synthetic construct
  source 1..20: mol_type = other RNA
tttaatttccacccatgaag

SEQ ID NO: 59667 - RNA, 20 nt, synthetic construct
  source 1..20: mol_type = other RNA
tttaatttgggtttgagttt

SEQ ID NO: 59668 - RNA, 20 nt, synthetic construct
  source 1..20: mol_type = other RNA
tttaattttctgactctgtg

SEQ ID NO: 59669 - RNA, 20 nt, synthetic construct
  source 1..20: mol_type = other RNA
tttaattttgagagtgcagt

SEQ ID NO: 59670 - RNA, 20 nt, synthetic construct
  source 1..20: mol_type = other RNA
tttaatttttgtcaagtgac

SEQ ID NO: 59671 - RNA, 20 nt, synthetic construct
  source 1..20: mol_type = other RNA
tttacaaaaacacactgagc

SEQ ID NO: 59672 - RNA, 20 nt, synthetic construct
  source 1..20: mol_type = other RNA
tttacaagtacatgaaatac

SEQ ID NO: 59673 - RNA, 20 nt, synthetic construct
  source 1..20: mol_type = other RNA
tttacacacctgaaattctc

SEQ ID NO: 59674 - RNA, 20 nt, synthetic construct
  source 1..20: mol_type = other RNA
tttacacatgtcagccacaa

SEQ ID NO: 59675 - RNA, 20 nt, synthetic construct
  source 1..20: mol_type = other RNA
tttacaccatgcaggttcat

SEQ ID NO: 59676 - RNA, 20 nt, synthetic construct
  source 1..20: mol_type = other RNA
tttacaccctaggtagggtt

SEQ ID NO: 59677 - RNA, 20 nt, synthetic construct
  source 1..20: mol_type = other RNA
tttacacgccttcgcgggca

SEQ ID NO: 59678 - RNA, 20 nt, synthetic construct
  source 1..20: mol_type = other RNA
tttacactatggcttttgag

SEQ ID NO: 59679 - RNA, 20 nt, synthetic construct
  source 1..20: mol_type = other RNA
tttacacttggagttttccc

SEQ ID NO: 59680 - RNA, 20 nt, synthetic construct
  source 1..20: mol_type = other RNA
tttacaggatatcagaagtg

SEQ ID NO: 59681 - RNA, 20 nt, synthetic construct
  source 1..20: mol_type = other RNA
tttacagtagccaaaggtag

SEQ ID NO: 59682 - RNA, 20 nt, synthetic construct
  source 1..20: mol_type = other RNA
tttacagttatgtcagtcaa

SEQ ID NO: 59683 - RNA, 20 nt, synthetic construct
  source 1..20: mol_type = other RNA
tttacatagtgctcttctga

SEQ ID NO: 59684 - RNA, 20 nt, synthetic construct
  source 1..20: mol_type = other RNA
tttacatgtagttttccctg

SEQ ID NO: 59685 - RNA, 20 nt, synthetic construct
  source 1..20: mol_type = other RNA
tttacatgtttaactatcct

SEQ ID NO: 59686 - RNA, 20 nt, synthetic construct
  source 1..20: mol_type = other RNA
tttacattaaagacagctac

SEQ ID NO: 59687 - RNA, 20 nt, synthetic construct
  source 1..20: mol_type = other RNA
tttacattagagaagaatga

SEQ ID NO: 59688 - RNA, 20 nt, synthetic construct
  source 1..20: mol_type = other RNA
tttaccaaaacagcttcttg

SEQ ID NO: 59689 - RNA, 20 nt, synthetic construct
  source 1..20: mol_type = other RNA
tttaccaaggctaagttgag

SEQ ID NO: 59690 - RNA, 20 nt, synthetic construct
  source 1..20: mol_type = other RNA
tttaccaagggtgtgtttaa

SEQ ID NO: 59691 - RNA, 20 nt, synthetic construct
  source 1..20: mol_type = other RNA
tttaccaagttgaatttctg

SEQ ID NO: 59692 - RNA, 20 nt, synthetic construct
  source 1..20: mol_type = other RNA
tttaccatatacacaaaaag

SEQ ID NO: 59693 - RNA, 20 nt, synthetic construct
  source 1..20: mol_type = other RNA
tttaccatctaaagccaggc

SEQ ID NO: 59694 - RNA, 20 nt, synthetic construct
  source 1..20: mol_type = other RNA
tttaccatctgacatatgtt

SEQ ID NO: 59695 - RNA, 20 nt, synthetic construct
  source 1..20: mol_type = other RNA
tttacccaacatgagagaaa

SEQ ID NO: 59696 - RNA, 20 nt, synthetic construct
  source 1..20: mol_type = other RNA
tttacccacaaaagaaaatt

SEQ ID NO: 59697 - RNA, 20 nt, synthetic construct
  source 1..20: mol_type = other RNA
tttacccagtgtgtttgttt

SEQ ID NO: 59698 - RNA, 20 nt, synthetic construct
  source 1..20: mol_type = other RNA
tttacccctactttttgtca

SEQ ID NO: 59699 - RNA, 20 nt, synthetic construct
  source 1..20: mol_type = other RNA
tttacccctgagaacttcag

SEQ ID NO: 59700 - RNA, 20 nt, synthetic construct
  source 1..20: mol_type = other RNA
tttaccccttaaattccaaa

SEQ ID NO: 59701 - RNA, 20 nt, synthetic construct
  source 1..20: mol_type = other RNA
tttacccggagaggtgaact

SEQ ID NO: 59702 - RNA, 20 nt, synthetic construct
  source 1..20: mol_type = other RNA
tttacccgtggaaatacttg

SEQ ID NO: 59703 - RNA, 20 nt, synthetic construct
  source 1..20: mol_type = other RNA
tttaccctcattttataagg

SEQ ID NO: 59704 - RNA, 20 nt, synthetic construct
  source 1..20: mol_type = other RNA
tttaccctgctggaacgaat

SEQ ID NO: 59705 - RNA, 20 nt, synthetic construct
  source 1..20: mol_type = other RNA
tttacccttactaaattttg

SEQ ID NO: 59706 - RNA, 20 nt, synthetic construct
  source 1..20: mol_type = other RNA
tttacgaggacagactgcag

SEQ ID NO: 59707 - RNA, 20 nt, synthetic construct
  source 1..20: mol_type = other RNA
tttacgatgaaattgaccat

SEQ ID NO: 59708 - RNA, 20 nt, synthetic construct
  source 1..20: mol_type = other RNA
tttactaaactgaacgaagt

SEQ ID NO: 59709 - RNA, 20 nt, synthetic construct
  source 1..20: mol_type = other RNA
tttactaagaagtgaaactg

SEQ ID NO: 59710 - RNA, 20 nt, synthetic construct
  source 1..20: mol_type = other RNA
tttactactgcattttttgc

SEQ ID NO: 59711 - RNA, 20 nt, synthetic construct
  source 1..20: mol_type = other RNA
tttactactgtactgtttag

SEQ ID NO: 59712 - RNA, 20 nt, synthetic construct
  source 1..20: mol_type = other RNA
tttactagatcaagcccttc

SEQ ID NO: 59713 - RNA, 20 nt, synthetic construct
  source 1..20: mol_type = other RNA
tttactatttgtatcttcac

SEQ ID NO: 59714 - RNA, 20 nt, synthetic construct
  source 1..20: mol_type = other RNA
tttactcagattcaccaatt

SEQ ID NO: 59715 - RNA, 20 nt, synthetic construct
  source 1..20: mol_type = other RNA
tttactcatgtctacctgtc

SEQ ID NO: 59716 - RNA, 20 nt, synthetic construct
  source 1..20: mol_type = other RNA
tttactccaagaaggctagc

SEQ ID NO: 59717 - RNA, 20 nt, synthetic construct
  source 1..20: mol_type = other RNA
tttactcgagggtagctttt

SEQ ID NO: 59718 - RNA, 20 nt, synthetic construct
  source 1..20: mol_type = other RNA
tttactgaaatcctagcccc

SEQ ID NO: 59719 - RNA, 20 nt, synthetic construct
  source 1..20: mol_type = other RNA
tttactgacttttccttaaa

SEQ ID NO: 59720 - RNA, 20 nt, synthetic construct
  source 1..20: mol_type = other RNA
tttactgatcttttctgaca

SEQ ID NO: 59721 - RNA, 20 nt, synthetic construct
  source 1..20: mol_type = other RNA
tttactgctatacaaccgga

SEQ ID NO: 59722 - RNA, 20 nt, synthetic construct
  source 1..20: mol_type = other RNA
tttactgcttgctgcactgg

SEQ ID NO: 59723 - RNA, 20 nt, synthetic construct
  source 1..20: mol_type = other RNA
tttactgtattaggatgtgt

SEQ ID NO: 59724 - RNA, 20 nt, synthetic construct
  source 1..20: mol_type = other RNA
tttactgtccaaacagtgac

SEQ ID NO: 59725 - RNA, 20 nt, synthetic construct
  source 1..20: mol_type = other RNA
tttactgttctccagtccca

SEQ ID NO: 59726 - RNA, 20 nt, synthetic construct
  source 1..20: mol_type = other RNA
tttacttaatttacccacaa

SEQ ID NO: 59727 - RNA, 20 nt, synthetic construct
  source 1..20: mol_type = other RNA
tttacttactagttgtgcta

SEQ ID NO: 59728 - RNA, 20 nt, synthetic construct
  source 1..20: mol_type = other RNA
tttacttcccttctcgaagt

SEQ ID NO: 59729 - RNA, 20 nt, synthetic construct
  source 1..20: mol_type = other RNA
tttacttctacagaatgttc

SEQ ID NO: 59730 - RNA, 20 nt, synthetic construct
  source 1..20: mol_type = other RNA
tttacttgcttggtttcaca

SEQ ID NO: 59731 - RNA, 20 nt, synthetic construct
  source 1..20: mol_type = other RNA
tttacttggctcctcccggc

SEQ ID NO: 59732 - RNA, 20 nt, synthetic construct
  source 1..20: mol_type = other RNA
tttacttggggagagtgggc

SEQ ID NO: 59733 - RNA, 20 nt, synthetic construct
  source 1..20: mol_type = other RNA
tttacttgggtataaatgat

SEQ ID NO: 59734 - RNA, 20 nt, synthetic construct
  source 1..20: mol_type = other RNA
tttacttgtcatttctgctt

SEQ ID NO: 59735 - RNA, 20 nt, synthetic construct
  source 1..20: mol_type = other RNA
tttactttcagctcaaacag

SEQ ID NO: 59736 - RNA, 20 nt, synthetic construct
  source 1..20: mol_type = other RNA
tttactttgcgaaacacact

SEQ ID NO: 59737 - RNA, 20 nt, synthetic construct
  source 1..20: mol_type = other RNA
tttagaaaacatatccttct

SEQ ID NO: 59738 - RNA, 20 nt, synthetic construct
  source 1..20: mol_type = other RNA
tttagaaaatgcttatgtct

SEQ ID NO: 59739 - RNA, 20 nt, synthetic construct
  source 1..20: mol_type = other RNA
tttagaaatacctgcaggtt

SEQ ID NO: 59740 - RNA, 20 nt, synthetic construct
  source 1..20: mol_type = other RNA
tttagaaatttacccatttc

SEQ ID NO: 59741 - RNA, 20 nt, synthetic construct
  source 1..20: mol_type = other RNA
tttagaacatataatccaac

SEQ ID NO: 59742 - RNA, 20 nt, synthetic construct
  source 1..20: mol_type = other RNA
tttagaaggtaagaatgtca

SEQ ID NO: 59743 - RNA, 20 nt, synthetic construct
  source 1..20: mol_type = other RNA
tttagaattctctctcaact

SEQ ID NO: 59744 - RNA, 20 nt, synthetic construct
  source 1..20: mol_type = other RNA
tttagacatgggctaaataa

SEQ ID NO: 59745 - RNA, 20 nt, synthetic construct
  source 1..20: mol_type = other RNA
tttagagagatgcctgtgct

SEQ ID NO: 59746 - RNA, 20 nt, synthetic construct
  source 1..20: mol_type = other RNA
tttagagggatgaatgttgt

SEQ ID NO: 59747 - RNA, 20 nt, synthetic construct
  source 1..20: mol_type = other RNA
tttagagtaactgtcatcag

SEQ ID NO: 59748 - RNA, 20 nt, synthetic construct
  source 1..20: mol_type = other RNA
tttagagtcagttgtttact

SEQ ID NO: 59749 - RNA, 20 nt, synthetic construct
  source 1..20: mol_type = other RNA
tttagagtttgcattacatg

SEQ ID NO: 59750 - RNA, 20 nt, synthetic construct
  source 1..20: mol_type = other RNA
tttagatcaagtcctttcca

SEQ ID NO: 59751 - RNA, 20 nt, synthetic construct
  source 1..20: mol_type = other RNA
tttagatctcatgttaagtg

SEQ ID NO: 59752 - RNA, 20 nt, synthetic construct
  source 1..20: mol_type = other RNA
tttagatgagagtggcctaa

SEQ ID NO: 59753 - RNA, 20 nt, synthetic construct
  source 1..20: mol_type = other RNA
tttagatttatcaatagcag

SEQ ID NO: 59754 - RNA, 20 nt, synthetic construct
  source 1..20: mol_type = other RNA
tttagcaagattactggata

SEQ ID NO: 59755 - RNA, 20 nt, synthetic construct
  source 1..20: mol_type = other RNA
tttagcaatccaaggacaga

SEQ ID NO: 59756 - RNA, 20 nt, synthetic construct
  source 1..20: mol_type = other RNA
tttagcatctagcacagaac

SEQ ID NO: 59757 - RNA, 20 nt, synthetic construct
  source 1..20: mol_type = other RNA
tttagccaacaaccataatg

SEQ ID NO: 59758 - RNA, 20 nt, synthetic construct
  source 1..20: mol_type = other RNA
tttagcccatgtctaaagta

SEQ ID NO: 59759 - RNA, 20 nt, synthetic construct
  source 1..20: mol_type = other RNA
tttagccccctgaatacccc

SEQ ID NO: 59760 - RNA, 20 nt, synthetic construct
  source 1..20: mol_type = other RNA
tttagcggaatgactataga

SEQ ID NO: 59761 - RNA, 20 nt, synthetic construct
  source 1..20: mol_type = other RNA
tttagcgttcatccaaatta

SEQ ID NO: 59762 - RNA, 20 nt, synthetic construct
  source 1..20: mol_type = other RNA
tttagctggggcagcaaagc

SEQ ID NO: 59763 - RNA, 20 nt, synthetic construct
  source 1..20: mol_type = other RNA
tttagcttcatataagtgga

SEQ ID NO: 59764 - RNA, 20 nt, synthetic construct
  source 1..20: mol_type = other RNA
tttagcttctgaattgagat

SEQ ID NO: 59765 - RNA, 20 nt, synthetic construct
  source 1..20: mol_type = other RNA
tttaggaaaatagagttcca

SEQ ID NO: 59766 - RNA, 20 nt, synthetic construct
  source 1..20: mol_type = other RNA
tttaggaagcacattccttc

SEQ ID NO: 59767 - RNA, 20 nt, synthetic construct
  source 1..20: mol_type = other RNA
tttaggaagcttccttgatc

SEQ ID NO: 59768 - RNA, 20 nt, synthetic construct
  source 1..20: mol_type = other RNA
tttaggacaaggaaaggatg

SEQ ID NO: 59769 - RNA, 20 nt, synthetic construct
  source 1..20: mol_type = other RNA
tttaggagtcaactaatcaa

SEQ ID NO: 59770 - RNA, 20 nt, synthetic construct
  source 1..20: mol_type = other RNA
tttaggatataagagtgggc

SEQ ID NO: 59771 - RNA, 20 nt, synthetic construct
  source 1..20: mol_type = other RNA
tttaggccactctcatctaa

SEQ ID NO: 59772 - RNA, 20 nt, synthetic construct
  source 1..20: mol_type = other RNA
tttaggccctctataattct

SEQ ID NO: 59773 - RNA, 20 nt, synthetic construct
  source 1..20: mol_type = other RNA
tttaggctctgtggtttctt

SEQ ID NO: 59774 - RNA, 20 nt, synthetic construct
  source 1..20: mol_type = other RNA
tttaggctgtctccaacgct

SEQ ID NO: 59775 - RNA, 20 nt, synthetic construct
  source 1..20: mol_type = other RNA
tttaggctgttcaatttaga

SEQ ID NO: 59776 - RNA, 20 nt, synthetic construct
  source 1..20: mol_type = other RNA
tttagggaagatagtactga

SEQ ID NO: 59777 - RNA, 20 nt, synthetic construct
  source 1..20: mol_type = other RNA
tttagggacgaatgcatggg

SEQ ID NO: 59778 - RNA, 20 nt, synthetic construct
  source 1..20: mol_type = other RNA
tttagggagcatatatactc

SEQ ID NO: 59779 - RNA, 20 nt, synthetic construct
  source 1..20: mol_type = other RNA
tttaggggggaaaacaccct

SEQ ID NO: 59780 - RNA, 20 nt, synthetic construct
  source 1..20: mol_type = other RNA
tttaggtagggataagaata

SEQ ID NO: 59781 - RNA, 20 nt, synthetic construct
  source 1..20: mol_type = other RNA
tttaggtagtcttgtcataa

SEQ ID NO: 59782 - RNA, 20 nt, synthetic construct
  source 1..20: mol_type = other RNA
tttaggtcagaatacaaaaa

SEQ ID NO: 59783 - RNA, 20 nt, synthetic construct
  source 1..20: mol_type = other RNA
tttaggtcatttttcacttc

SEQ ID NO: 59784 - RNA, 20 nt, synthetic construct
  source 1..20: mol_type = other RNA
tttaggtgccccactccaca

SEQ ID NO: 59785 - RNA, 20 nt, synthetic construct
  source 1..20: mol_type = other RNA
tttaggtgttttttccttct

SEQ ID NO: 59786 - RNA, 20 nt, synthetic construct
  source 1..20: mol_type = other RNA
tttaggttacgtactaggta

SEQ ID NO: 59787 - RNA, 20 nt, synthetic construct
  source 1..20: mol_type = other RNA
tttaggtttttcttgtgggt

SEQ ID NO: 59788 - RNA, 20 nt, synthetic construct
  source 1..20: mol_type = other RNA
tttagtaaatctttggtgaa

SEQ ID NO: 59789 - RNA, 20 nt, synthetic construct
  source 1..20: mol_type = other RNA
tttagtaagaggtatcacca

SEQ ID NO: 59790 - RNA, 20 nt, synthetic construct
  source 1..20: mol_type = other RNA
tttagtaagggtaaacagaa

SEQ ID NO: 59791 - RNA, 20 nt, synthetic construct
  source 1..20: mol_type = other RNA
tttagtaagtgtgagcaaaa

SEQ ID NO: 59792 - RNA, 20 nt, synthetic construct
  source 1..20: mol_type = other RNA
tttagtaattctccactttc

SEQ ID NO: 59793 - RNA, 20 nt, synthetic construct
  source 1..20: mol_type = other RNA
tttagtagaattctccagtg

SEQ ID NO: 59794 - RNA, 20 nt, synthetic construct
  source 1..20: mol_type = other RNA
tttagtagagatgaggtttt

SEQ ID NO: 59795 - RNA, 20 nt, synthetic construct
  source 1..20: mol_type = other RNA
tttagtagctgtctttaatg

SEQ ID NO: 59796 - RNA, 20 nt, synthetic construct
  source 1..20: mol_type = other RNA
tttagtaggtctccttgtat

SEQ ID NO: 59797 - RNA, 20 nt, synthetic construct
  source 1..20: mol_type = other RNA
tttagtagtaagttgtgtca

SEQ ID NO: 59798 - RNA, 20 nt, synthetic construct
  source 1..20: mol_type = other RNA
tttagtatattttcaaggct

SEQ ID NO: 59799 - RNA, 20 nt, synthetic construct
  source 1..20: mol_type = other RNA
tttagtcttgtcttttcttt

SEQ ID NO: 59800 - RNA, 20 nt, synthetic construct
  source 1..20: mol_type = other RNA
tttagtgaaatagttggtca

SEQ ID NO: 59801 - RNA, 20 nt, synthetic construct
  source 1..20: mol_type = other RNA
tttagtgactggcttaatgc

SEQ ID NO: 59802 - RNA, 20 nt, synthetic construct
  source 1..20: mol_type = other RNA
tttagtgcagtatcttgaag

SEQ ID NO: 59803 - RNA, 20 nt, synthetic construct
  source 1..20: mol_type = other RNA
tttagtggctcacagtgctc

SEQ ID NO: 59804 - RNA, 20 nt, synthetic construct
  source 1..20: mol_type = other RNA
tttagtgtattgtaccttga

SEQ ID NO: 59805 - RNA, 20 nt, synthetic construct
  source 1..20: mol_type = other RNA
tttagtgttctgtgtttatg

SEQ ID NO: 59806 - RNA, 20 nt, synthetic construct
  source 1..20: mol_type = other RNA
tttagtgttgcttggtgttg

SEQ ID NO: 59807 - RNA, 20 nt, synthetic construct
  source 1..20: mol_type = other RNA
tttagttactcaaatccaaa

SEQ ID NO: 59808 - RNA, 20 nt, synthetic construct
  source 1..20: mol_type = other RNA
tttagtttacactatggctt

SEQ ID NO: 59809 - RNA, 20 nt, synthetic construct
  source 1..20: mol_type = other RNA
tttagtttcatctatgtccc

SEQ ID NO: 59810 - RNA, 20 nt, synthetic construct
  source 1..20: mol_type = other RNA
tttataaaaatggcacatac

SEQ ID NO: 59811 - RNA, 20 nt, synthetic construct
  source 1..20: mol_type = other RNA
tttataactgaacatgtatg

SEQ ID NO: 59812 - RNA, 20 nt, synthetic construct
  source 1..20: mol_type = other RNA
tttataagggtgataaaaag

SEQ ID NO: 59813 - RNA, 20 nt, synthetic construct
  source 1..20: mol_type = other RNA
tttataatccattgggtaca

SEQ ID NO: 59814 - RNA, 20 nt, synthetic construct
  source 1..20: mol_type = other RNA
tttataatgggcaatcagaa

SEQ ID NO: 59815 - RNA, 20 nt, synthetic construct
  source 1..20: mol_type = other RNA
tttatacaaataactccagc

SEQ ID NO: 59816 - RNA, 20 nt, synthetic construct
  source 1..20: mol_type = other RNA
tttatacaggtgcttacaga

SEQ ID NO: 59817 - RNA, 20 nt, synthetic construct
  source 1..20: mol_type = other RNA
tttatacagttggaactctt

SEQ ID NO: 59818 - RNA, 20 nt, synthetic construct
  source 1..20: mol_type = other RNA
tttatacccaagtaaacaac

SEQ ID NO: 59819 - RNA, 20 nt, synthetic construct
  source 1..20: mol_type = other RNA
tttatacctgttgaatagca

SEQ ID NO: 59820 - RNA, 20 nt, synthetic construct
  source 1..20: mol_type = other RNA
tttataggcattccttaatt

SEQ ID NO: 59821 - RNA, 20 nt, synthetic construct
  source 1..20: mol_type = other RNA
tttatagtcttagctcttaa

SEQ ID NO: 59822 - RNA, 20 nt, synthetic construct
  source 1..20: mol_type = other RNA
tttatagtgtttccttccag

SEQ ID NO: 59823 - RNA, 20 nt, synthetic construct
  source 1..20: mol_type = other RNA
tttatatgatactcgtagtt

SEQ ID NO: 59824 - RNA, 20 nt, synthetic construct
  source 1..20: mol_type = other RNA
tttatatgcattaagccagt

SEQ ID NO: 59825 - RNA, 20 nt, synthetic construct
  source 1..20: mol_type = other RNA
tttatatgcctagatgattc

SEQ ID NO: 59826 - RNA, 20 nt, synthetic construct
  source 1..20: mol_type = other RNA
tttatatgttgatgtaatgg

SEQ ID NO: 59827 - RNA, 20 nt, synthetic construct
  source 1..20: mol_type = other RNA
tttatattatgtgcaagttc

SEQ ID NO: 59828 - RNA, 20 nt, synthetic construct
  source 1..20: mol_type = other RNA
tttatattctaagtttgcca

SEQ ID NO: 59829 - RNA, 20 nt, synthetic construct
  source 1..20: mol_type = other RNA
tttatatttccgatgatacc

SEQ ID NO: 59830 - RNA, 20 nt, synthetic construct
  source 1..20: mol_type = other RNA
tttatattttggtagagatg

SEQ ID NO: 59831 - RNA, 20 nt, synthetic construct
  source 1..20: mol_type = other RNA
tttatcaaaatcaaggtgcg

SEQ ID NO: 59832 - RNA, 20 nt, synthetic construct
  source 1..20: mol_type = other RNA
tttatcaacacatagtgtta

SEQ ID NO: 59833 - RNA, 20 nt, synthetic construct
  source 1..20: mol_type = other RNA
tttatcaatagcagtgctga

SEQ ID NO: 59834 - RNA, 20 nt, synthetic construct
  source 1..20: mol_type = other RNA
tttatcaattagttcctcct

SEQ ID NO: 59835 - RNA, 20 nt, synthetic construct
  source 1..20: mol_type = other RNA
tttatcacccttataaaatg

SEQ ID NO: 59836 - RNA, 20 nt, synthetic construct
  source 1..20: mol_type = other RNA
tttatcagatcccaattact

SEQ ID NO: 59837 - RNA, 20 nt, synthetic construct
  source 1..20: mol_type = other RNA
tttatcagcaccaaagatta

SEQ ID NO: 59838 - RNA, 20 nt, synthetic construct
  source 1..20: mol_type = other RNA
tttatcagtctccaatcctc

SEQ ID NO: 59839 - RNA, 20 nt, synthetic construct
  source 1..20: mol_type = other RNA
tttatcatgtcttcttggat

SEQ ID NO: 59840 - RNA, 20 nt, synthetic construct
  source 1..20: mol_type = other RNA
tttatccttgcaccaactcc

SEQ ID NO: 59841 - RNA, 20 nt, synthetic construct
  source 1..20: mol_type = other RNA
tttatcggataaggaagagt

SEQ ID NO: 59842 - RNA, 20 nt, synthetic construct
  source 1..20: mol_type = other RNA
tttatctacagaggattttg

SEQ ID NO: 59843 - RNA, 20 nt, synthetic construct
  source 1..20: mol_type = other RNA
tttatctccacatttctaca

SEQ ID NO: 59844 - RNA, 20 nt, synthetic construct
  source 1..20: mol_type = other RNA
tttatctccataagtcccta

SEQ ID NO: 59845 - RNA, 20 nt, synthetic construct
  source 1..20: mol_type = other RNA
tttatctctctcaagcaatc

SEQ ID NO: 59846 - RNA, 20 nt, synthetic construct
  source 1..20: mol_type = other RNA
tttatctggatttttgtgta

SEQ ID NO: 59847 - RNA, 20 nt, synthetic construct
  source 1..20: mol_type = other RNA
tttatctttggatatcccca

SEQ ID NO: 59848 - RNA, 20 nt, synthetic construct
  source 1..20: mol_type = other RNA
tttatgaatgatgccatcac

SEQ ID NO: 59849 - RNA, 20 nt, synthetic construct
  source 1..20: mol_type = other RNA
tttatgagacacacgagtat

SEQ ID NO: 59850 - RNA, 20 nt, synthetic construct
  source 1..20: mol_type = other RNA
tttatgatttcacttacttg

SEQ ID NO: 59851 - RNA, 20 nt, synthetic construct
  source 1..20: mol_type = other RNA
tttatgcatttggtctcatt

SEQ ID NO: 59852 - RNA, 20 nt, synthetic construct
  source 1..20: mol_type = other RNA
tttatgccaatatcacactg

SEQ ID NO: 59853 - RNA, 20 nt, synthetic construct
  source 1..20: mol_type = other RNA
tttatgctattataaatggc

SEQ ID NO: 59854 - RNA, 20 nt, synthetic construct
  source 1..20: mol_type = other RNA
tttatgctgatgaactacac

SEQ ID NO: 59855 - RNA, 20 nt, synthetic construct
  source 1..20: mol_type = other RNA
tttatgctttgtctctggaa

SEQ ID NO: 59856 - RNA, 20 nt, synthetic construct
  source 1..20: mol_type = other RNA
tttatggaaacatggtaatt

SEQ ID NO: 59857 - RNA, 20 nt, synthetic construct
  source 1..20: mol_type = other RNA
tttatggaataatggaacta

SEQ ID NO: 59858 - RNA, 20 nt, synthetic construct
  source 1..20: mol_type = other RNA
tttatggaattgccatatgt

SEQ ID NO: 59859 - RNA, 20 nt, synthetic construct
  source 1..20: mol_type = other RNA
tttatggcctaagatggaaa

SEQ ID NO: 59860 - RNA, 20 nt, synthetic construct
  source 1..20: mol_type = other RNA
tttatgggtcaaccactaag

SEQ ID NO: 59861 - RNA, 20 nt, synthetic construct
  source 1..20: mol_type = other RNA
tttatggtaactcctgttct

SEQ ID NO: 59862 - RNA, 20 nt, synthetic construct
  source 1..20: mol_type = other RNA
tttatggtaattggttcgtt

SEQ ID NO: 59863 - RNA, 20 nt, synthetic construct
  source 1..20: mol_type = other RNA
tttatggtatcactttttgt

SEQ ID NO: 59864 - RNA, 20 nt, synthetic construct
  source 1..20: mol_type = other RNA
tttatggttttttcccccct

SEQ ID NO: 59865 - RNA, 20 nt, synthetic construct
  source 1..20: mol_type = other RNA
tttatgtacacgtcttgtca

SEQ ID NO: 59866 - RNA, 20 nt, synthetic construct
  source 1..20: mol_type = other RNA
tttatgtacatgacctatct

SEQ ID NO: 59867 - RNA, 20 nt, synthetic construct
  source 1..20: mol_type = other RNA
tttatgtgaaaagaaaaagg

SEQ ID NO: 59868 - RNA, 20 nt, synthetic construct
  source 1..20: mol_type = other RNA
tttatgtgcagtctaaccat

SEQ ID NO: 59869 - RNA, 20 nt, synthetic construct
  source 1..20: mol_type = other RNA
tttatgtgctttctcaacac

SEQ ID NO: 59870 - RNA, 20 nt, synthetic construct
  source 1..20: mol_type = other RNA
tttatgtggaaaaatatagg

SEQ ID NO: 59871 - RNA, 20 nt, synthetic construct
  source 1..20: mol_type = other RNA
tttatgttcatgaaccttca

SEQ ID NO: 59872 - RNA, 20 nt, synthetic construct
  source 1..20: mol_type = other RNA
tttatgttgcacaaaagtga

SEQ ID NO: 59873 - RNA, 20 nt, synthetic construct
  source 1..20: mol_type = other RNA
tttattaaacctgttacatg

SEQ ID NO: 59874 - RNA, 20 nt, synthetic construct
  source 1..20: mol_type = other RNA
tttattaaagtagaaggccc

SEQ ID NO: 59875 - RNA, 20 nt, synthetic construct
  source 1..20: mol_type = other RNA
tttattaatttggcttgggg

SEQ ID NO: 59876 - RNA, 20 nt, synthetic construct
  source 1..20: mol_type = other RNA
tttattagaactagaactgt

SEQ ID NO: 59877 - RNA, 20 nt, synthetic construct
  source 1..20: mol_type = other RNA
tttattagatagtggtttga

SEQ ID NO: 59878 - RNA, 20 nt, synthetic construct
  source 1..20: mol_type = other RNA
tttattaggtgcacacaaca

SEQ ID NO: 59879 - RNA, 20 nt, synthetic construct
  source 1..20: mol_type = other RNA
tttattagtagttaggtggt

SEQ ID NO: 59880 - RNA, 20 nt, synthetic construct
  source 1..20: mol_type = other RNA
tttattcatacgttaactgt

SEQ ID NO: 59881 - RNA, 20 nt, synthetic construct
  source 1..20: mol_type = other RNA
tttattcctctcttggaatg

SEQ ID NO: 59882 - RNA, 20 nt, synthetic construct
  source 1..20: mol_type = other RNA
tttattctgttctagctcct

SEQ ID NO: 59883 - RNA, 20 nt, synthetic construct
  source 1..20: mol_type = other RNA
tttattcttgttttcttgag

SEQ ID NO: 59884 - RNA, 20 nt, synthetic construct
  source 1..20: mol_type = other RNA
tttattgataagcacatggt

SEQ ID NO: 59885 - RNA, 20 nt, synthetic construct
  source 1..20: mol_type = other RNA
tttattgtcaaggtcatcct

SEQ ID NO: 59886 - RNA, 20 nt, synthetic construct
  source 1..20: mol_type = other RNA
tttattgtttcacttttctg

SEQ ID NO: 59887 - RNA, 20 nt, synthetic construct
  source 1..20: mol_type = other RNA
tttatttagcccatgtctaa

SEQ ID NO: 59888 - RNA, 20 nt, synthetic construct
  source 1..20: mol_type = other RNA
tttatttaggccctctataa

SEQ ID NO: 59889 - RNA, 20 nt, synthetic construct
  source 1..20: mol_type = other RNA
tttatttatacaggtgctta

SEQ ID NO: 59890 - RNA, 20 nt, synthetic construct
  source 1..20: mol_type = other RNA
tttatttatgctgatgaact

SEQ ID NO: 59891 - RNA, 20 nt, synthetic construct
  source 1..20: mol_type = other RNA
tttatttccttaagccattt

SEQ ID NO: 59892 - RNA, 20 nt, synthetic construct
  source 1..20: mol_type = other RNA
tttatttctgggctctctat

SEQ ID NO: 59893 - RNA, 20 nt, synthetic construct
  source 1..20: mol_type = other RNA
tttatttcttctccctcttc

SEQ ID NO: 59894 - RNA, 20 nt, synthetic construct
  source 1..20: mol_type = other RNA
tttatttcttgacctcagtg

SEQ ID NO: 59895 - RNA, 20 nt, synthetic construct
  source 1..20: mol_type = other RNA
tttatttgctgtcaggcaag

SEQ ID NO: 59896 - RNA, 20 nt, synthetic construct
  source 1..20: mol_type = other RNA
tttatttggctgttaccatt

SEQ ID NO: 59897 - RNA, 20 nt, synthetic construct
  source 1..20: mol_type = other RNA
tttattttatgtacacgtct

SEQ ID NO: 59898 - RNA, 20 nt, synthetic construct
  source 1..20: mol_type = other RNA
tttattttctgcatttggtt

SEQ ID NO: 59899 - RNA, 20 nt, synthetic construct
  source 1..20: mol_type = other RNA
tttatttttacccgtggaaa

SEQ ID NO: 59900 - RNA, 20 nt, synthetic construct
  source 1..20: mol_type = other RNA
tttatttttgagacaggttg

SEQ ID NO: 59901 - RNA, 20 nt, synthetic construct
  source 1..20: mol_type = other RNA
tttattttttcttcccatct

SEQ ID NO: 59902 - RNA, 20 nt, synthetic construct
  source 1..20: mol_type = other RNA
tttcaaaaacagcatataca

SEQ ID NO: 59903 - RNA, 20 nt, synthetic construct
  source 1..20: mol_type = other RNA
tttcaaaaacccaactcttt

SEQ ID NO: 59904 - RNA, 20 nt, synthetic construct
  source 1..20: mol_type = other RNA
tttcaaaagctccccggatg

SEQ ID NO: 59905 - RNA, 20 nt, synthetic construct
  source 1..20: mol_type = other RNA
tttcaaaccaatgttctctt

SEQ ID NO: 59906 - RNA, 20 nt, synthetic construct
  source 1..20: mol_type = other RNA
tttcaaactgtggtcactgt

SEQ ID NO: 59907 - RNA, 20 nt, synthetic construct
  source 1..20: mol_type = other RNA
tttcaaagagacctgattct

SEQ ID NO: 59908 - RNA, 20 nt, synthetic construct
  source 1..20: mol_type = other RNA
tttcaaagttaatagcctcc

SEQ ID NO: 59909 - RNA, 20 nt, synthetic construct
  source 1..20: mol_type = other RNA
tttcaaataatagctatcct

SEQ ID NO: 59910 - RNA, 20 nt, synthetic construct
  source 1..20: mol_type = other RNA
tttcaaatacctagttttcc

SEQ ID NO: 59911 - RNA, 20 nt, synthetic construct
  source 1..20: mol_type = other RNA
tttcaaatgctataaagaac

SEQ ID NO: 59912 - RNA, 20 nt, synthetic construct
  source 1..20: mol_type = other RNA
tttcaaatgtgacagaacaa

SEQ ID NO: 59913 - RNA, 20 nt, synthetic construct
  source 1..20: mol_type = other RNA
tttcaacaaaggttgaaaac

SEQ ID NO: 59914 - RNA, 20 nt, synthetic construct
  source 1..20: mol_type = other RNA
tttcaacctaacatgtcttg

SEQ ID NO: 59915 - RNA, 20 nt, synthetic construct
  source 1..20: mol_type = other RNA
tttcaacctttgttgaaaac

SEQ ID NO: 59916 - RNA, 20 nt, synthetic construct
  source 1..20: mol_type = other RNA
tttcaactgaacaacgctgt

SEQ ID NO: 59917 - RNA, 20 nt, synthetic construct
  source 1..20: mol_type = other RNA
tttcaaggcttgtgcatcag

SEQ ID NO: 59918 - RNA, 20 nt, synthetic construct
  source 1..20: mol_type = other RNA
tttcaaggggccttttgtca

SEQ ID NO: 59919 - RNA, 20 nt, synthetic construct
  source 1..20: mol_type = other RNA
tttcaagggtgttttccccc

SEQ ID NO: 59920 - RNA, 20 nt, synthetic construct
  source 1..20: mol_type = other RNA
tttcaaggtagaagtacaaa

SEQ ID NO: 59921 - RNA, 20 nt, synthetic construct
  source 1..20: mol_type = other RNA
tttcaaggtatctccccaaa

SEQ ID NO: 59922 - RNA, 20 nt, synthetic construct
  source 1..20: mol_type = other RNA
tttcaagtaacactcagaag

SEQ ID NO: 59923 - RNA, 20 nt, synthetic construct
  source 1..20: mol_type = other RNA
tttcaagtgaaccaaaaacc

SEQ ID NO: 59924 - RNA, 20 nt, synthetic construct
  source 1..20: mol_type = other RNA
tttcaatagtgggtagaagc

SEQ ID NO: 59925 - RNA, 20 nt, synthetic construct
  source 1..20: mol_type = other RNA
tttcaatattaagagtctca

SEQ ID NO: 59926 - RNA, 20 nt, synthetic construct
  source 1..20: mol_type = other RNA
tttcaatctggaatgcatcg

SEQ ID NO: 59927 - RNA, 20 nt, synthetic construct
  source 1..20: mol_type = other RNA
tttcaatcttggaaatgata

SEQ ID NO: 59928 - RNA, 20 nt, synthetic construct
  source 1..20: mol_type = other RNA
tttcacaaacacacaaacca

SEQ ID NO: 59929 - RNA, 20 nt, synthetic construct
  source 1..20: mol_type = other RNA
tttcacaacgatttcttaaa

SEQ ID NO: 59930 - RNA, 20 nt, synthetic construct
  source 1..20: mol_type = other RNA
tttcacacgcattgcattga

SEQ ID NO: 59931 - RNA, 20 nt, synthetic construct
  source 1..20: mol_type = other RNA
tttcacactataacagatgg

SEQ ID NO: 59932 - RNA, 20 nt, synthetic construct
  source 1..20: mol_type = other RNA
tttcacactgattttctgct

SEQ ID NO: 59933 - RNA, 20 nt, synthetic construct
  source 1..20: mol_type = other RNA
tttcacagaaacagaaaaat

SEQ ID NO: 59934 - RNA, 20 nt, synthetic construct
  source 1..20: mol_type = other RNA
tttcacagacagtaatttat

SEQ ID NO: 59935 - RNA, 20 nt, synthetic construct
  source 1..20: mol_type = other RNA
tttcacagggcagggagaga

SEQ ID NO: 59936 - RNA, 20 nt, synthetic construct
  source 1..20: mol_type = other RNA
tttcacataaatttgccaca

SEQ ID NO: 59937 - RNA, 20 nt, synthetic construct
  source 1..20: mol_type = other RNA
tttcacataaggtatatttc

SEQ ID NO: 59938 - RNA, 20 nt, synthetic construct
  source 1..20: mol_type = other RNA
tttcacattcttcaccattc

SEQ ID NO: 59939 - RNA, 20 nt, synthetic construct
  source 1..20: mol_type = other RNA
tttcacattgcacagtctcc

SEQ ID NO: 59940 - RNA, 20 nt, synthetic construct
  source 1..20: mol_type = other RNA
tttcaccagcggcatacagg

SEQ ID NO: 59941 - RNA, 20 nt, synthetic construct
  source 1..20: mol_type = other RNA
tttcaccctgcgaaggcaat

SEQ ID NO: 59942 - RNA, 20 nt, synthetic construct
  source 1..20: mol_type = other RNA
tttcactaaataaacacttg

SEQ ID NO: 59943 - RNA, 20 nt, synthetic construct
  source 1..20: mol_type = other RNA
tttcactctaatatggttcc

SEQ ID NO: 59944 - RNA, 20 nt, synthetic construct
  source 1..20: mol_type = other RNA
tttcactcttagtgatgtct

SEQ ID NO: 59945 - RNA, 20 nt, synthetic construct
  source 1..20: mol_type = other RNA
tttcactcttttaaggttta

SEQ ID NO: 59946 - RNA, 20 nt, synthetic construct
  source 1..20: mol_type = other RNA
tttcactgctcagtccctca

SEQ ID NO: 59947 - RNA, 20 nt, synthetic construct
  source 1..20: mol_type = other RNA
tttcacttacttgagcccca

SEQ ID NO: 59948 - RNA, 20 nt, synthetic construct
  source 1..20: mol_type = other RNA
tttcacttcgttcagtttag

SEQ ID NO: 59949 - RNA, 20 nt, synthetic construct
  source 1..20: mol_type = other RNA
tttcacttcttattggttat

SEQ ID NO: 59950 - RNA, 20 nt, synthetic construct
  source 1..20: mol_type = other RNA
tttcacttgattactttaca

SEQ ID NO: 59951 - RNA, 20 nt, synthetic construct
  source 1..20: mol_type = other RNA
tttcacttgtttcttttcac

SEQ ID NO: 59952 - RNA, 20 nt, synthetic construct
  source 1..20: mol_type = other RNA
tttcactttgatcatacaca

SEQ ID NO: 59953 - RNA, 20 nt, synthetic construct
  source 1..20: mol_type = other RNA
tttcacttttctggttttct

SEQ ID NO: 59954 - RNA, 20 nt, synthetic construct
  source 1..20: mol_type = other RNA
tttcacttttgtgcaacata

SEQ ID NO: 59955 - RNA, 20 nt, synthetic construct
  source 1..20: mol_type = other RNA
tttcagaaagagaatagcag

SEQ ID NO: 59956 - RNA, 20 nt, synthetic construct
  source 1..20: mol_type = other RNA
tttcagaaatgtttaattcc

SEQ ID NO: 59957 - RNA, 20 nt, synthetic construct
  source 1..20: mol_type = other RNA
tttcagacttaactatagga

SEQ ID NO: 59958 - RNA, 20 nt, synthetic construct
  source 1..20: mol_type = other RNA
tttcagagagacctgaagac

SEQ ID NO: 59959 - RNA, 20 nt, synthetic construct
  source 1..20: mol_type = other RNA
tttcagatctctgacattgg

SEQ ID NO: 59960 - RNA, 20 nt, synthetic construct
  source 1..20: mol_type = other RNA
tttcagattgaccttgtatc

SEQ ID NO: 59961 - RNA, 20 nt, synthetic construct
  source 1..20: mol_type = other RNA
tttcagattgcttgagagag

SEQ ID NO: 59962 - RNA, 20 nt, synthetic construct
  source 1..20: mol_type = other RNA
tttcagcacaatactgtctc

SEQ ID NO: 59963 - RNA, 20 nt, synthetic construct
  source 1..20: mol_type = other RNA
tttcagcactgctattgata

SEQ ID NO: 59964 - RNA, 20 nt, synthetic construct
  source 1..20: mol_type = other RNA
tttcagcagcagagaagtga

SEQ ID NO: 59965 - RNA, 20 nt, synthetic construct
  source 1..20: mol_type = other RNA
tttcagcatagcagaacctt

SEQ ID NO: 59966 - RNA, 20 nt, synthetic construct
  source 1..20: mol_type = other RNA
tttcagccaaagctggcatg

SEQ ID NO: 59967 - RNA, 20 nt, synthetic construct
  source 1..20: mol_type = other RNA
tttcagccatcccagctaca

SEQ ID NO: 59968 - RNA, 20 nt, synthetic construct
  source 1..20: mol_type = other RNA
tttcagccctgatagatatt

SEQ ID NO: 59969 - RNA, 20 nt, synthetic construct
  source 1..20: mol_type = other RNA
tttcagctcaaacagcttga

SEQ ID NO: 59970 - RNA, 20 nt, synthetic construct
  source 1..20: mol_type = other RNA
tttcaggaatgcaaagtttc

SEQ ID NO: 59971 - RNA, 20 nt, synthetic construct
  source 1..20: mol_type = other RNA
tttcaggactcatgagagct

SEQ ID NO: 59972 - RNA, 20 nt, synthetic construct
  source 1..20: mol_type = other RNA
tttcagggagaattggtagt

SEQ ID NO: 59973 - RNA, 20 nt, synthetic construct
  source 1..20: mol_type = other RNA
tttcaggggggccactggaa

SEQ ID NO: 59974 - RNA, 20 nt, synthetic construct
  source 1..20: mol_type = other RNA
tttcaggtattgagcctgtt

SEQ ID NO: 59975 - RNA, 20 nt, synthetic construct
  source 1..20: mol_type = other RNA
tttcaggtggtatttaatct

SEQ ID NO: 59976 - RNA, 20 nt, synthetic construct
  source 1..20: mol_type = other RNA
tttcaggtgtgtaaacactg

SEQ ID NO: 59977 - RNA, 20 nt, synthetic construct
  source 1..20: mol_type = other RNA
tttcaggttcaagcgactct

SEQ ID NO: 59978 - RNA, 20 nt, synthetic construct
  source 1..20: mol_type = other RNA
tttcaggttttcgaccaagt

SEQ ID NO: 59979 - RNA, 20 nt, synthetic construct
  source 1..20: mol_type = other RNA
tttcagtacacgaaaatatc

SEQ ID NO: 59980 - RNA, 20 nt, synthetic construct
  source 1..20: mol_type = other RNA
tttcagtatgtgtctctgac

SEQ ID NO: 59981 - RNA, 20 nt, synthetic construct
  source 1..20: mol_type = other RNA
tttcagtccagatattatcc

SEQ ID NO: 59982 - RNA, 20 nt, synthetic construct
  source 1..20: mol_type = other RNA
tttcagtccctcctttctag

SEQ ID NO: 59983 - RNA, 20 nt, synthetic construct
  source 1..20: mol_type = other RNA
tttcagtcggttcttcaccg

SEQ ID NO: 59984 - RNA, 20 nt, synthetic construct
  source 1..20: mol_type = other RNA
tttcagtgagtagggaaggt

SEQ ID NO: 59985 - RNA, 20 nt, synthetic construct
  source 1..20: mol_type = other RNA
tttcagtgtgtccacacaat

SEQ ID NO: 59986 - RNA, 20 nt, synthetic construct
  source 1..20: mol_type = other RNA
tttcagttaaaagttttcca

SEQ ID NO: 59987 - RNA, 20 nt, synthetic construct
  source 1..20: mol_type = other RNA
tttcagttaacttattggaa

SEQ ID NO: 59988 - RNA, 20 nt, synthetic construct
  source 1..20: mol_type = other RNA
tttcagttctttcggatatt

SEQ ID NO: 59989 - RNA, 20 nt, synthetic construct
  source 1..20: mol_type = other RNA
tttcagttgcatgaatttgt

SEQ ID NO: 59990 - RNA, 20 nt, synthetic construct
  source 1..20: mol_type = other RNA
tttcataaaatgatggcaac

SEQ ID NO: 59991 - RNA, 20 nt, synthetic construct
  source 1..20: mol_type = other RNA
tttcataacaaagctctgat

SEQ ID NO: 59992 - RNA, 20 nt, synthetic construct
  source 1..20: mol_type = other RNA
tttcatacaagttgtgatat

SEQ ID NO: 59993 - RNA, 20 nt, synthetic construct
  source 1..20: mol_type = other RNA
tttcatagcagaatggccct

SEQ ID NO: 59994 - RNA, 20 nt, synthetic construct
  source 1..20: mol_type = other RNA
tttcatagcagcattgttta

SEQ ID NO: 59995 - RNA, 20 nt, synthetic construct
  source 1..20: mol_type = other RNA
tttcataggaaatacttgat

SEQ ID NO: 59996 - RNA, 20 nt, synthetic construct
  source 1..20: mol_type = other RNA
tttcataggcatctctccct

SEQ ID NO: 59997 - RNA, 20 nt, synthetic construct
  source 1..20: mol_type = other RNA
tttcatatctgattttgtgt

SEQ ID NO: 59998 - RNA, 20 nt, synthetic construct
  source 1..20: mol_type = other RNA
tttcatcactcactggcctg

SEQ ID NO: 59999 - RNA, 20 nt, synthetic construct
  source 1..20: mol_type = other RNA
tttcatccaaacagaaaccc

SEQ ID NO: 60000 - RNA, 20 nt, synthetic construct
  source 1..20: mol_type = other RNA
tttcatcgtaaaaagccatt

SEQ ID NO: 60001 - RNA, 20 nt, synthetic construct
  source 1..20: mol_type = other RNA
tttcatctatgtcccctggg

SEQ ID NO: 60002 - RNA, 20 nt, synthetic construct
  source 1..20: mol_type = other RNA
tttcatgaacaattttctct

SEQ ID NO: 60003 - RNA, 20 nt, synthetic construct
  source 1..20: mol_type = other RNA
tttcatgatttggtgtgtgc

SEQ ID NO: 60004 - RNA, 20 nt, synthetic construct
  source 1..20: mol_type = other RNA
tttcatgccatcctggattt

SEQ ID NO: 60005 - RNA, 20 nt, synthetic construct
  source 1..20: mol_type = other RNA
tttcatgcctttcagcatag

SEQ ID NO: 60006 - RNA, 20 nt, synthetic construct
  source 1..20: mol_type = other RNA
tttcatgcgacatatcaggg

SEQ ID NO: 60007 - RNA, 20 nt, synthetic construct
  source 1..20: mol_type = other RNA
tttcatggacttcctatttt

SEQ ID NO: 60008 - RNA, 20 nt, synthetic construct
  source 1..20: mol_type = other RNA
tttcatgggttgatttttaa

SEQ ID NO: 60009 - RNA, 20 nt, synthetic construct
  source 1..20: mol_type = other RNA
tttcatggtatcaattgtaa

SEQ ID NO: 60010 - RNA, 20 nt, synthetic construct
  source 1..20: mol_type = other RNA
tttcatggttttaatgggca

SEQ ID NO: 60011 - RNA, 20 nt, synthetic construct
  source 1..20: mol_type = other RNA
tttcatgttgaccattttta

SEQ ID NO: 60012 - RNA, 20 nt, synthetic construct
  source 1..20: mol_type = other RNA
tttcattacatttgcttagg

SEQ ID NO: 60013 - RNA, 20 nt, synthetic construct
  source 1..20: mol_type = other RNA
tttcattaggttgatggctg

SEQ ID NO: 60014 - RNA, 20 nt, synthetic construct
  source 1..20: mol_type = other RNA
tttcattattaccaggtttt

SEQ ID NO: 60015 - RNA, 20 nt, synthetic construct
  source 1..20: mol_type = other RNA
tttcattcgttcaaaacatc

SEQ ID NO: 60016 - RNA, 20 nt, synthetic construct
  source 1..20: mol_type = other RNA
tttcattctacctggagcct

SEQ ID NO: 60017 - RNA, 20 nt, synthetic construct
  source 1..20: mol_type = other RNA
tttcatttacaaaaacacac

SEQ ID NO: 60018 - RNA, 20 nt, synthetic construct
  source 1..20: mol_type = other RNA
tttcatttactgaaatccta

SEQ ID NO: 60019 - RNA, 20 nt, synthetic construct
  source 1..20: mol_type = other RNA
tttcatttattctgttgcaa

SEQ ID NO: 60020 - RNA, 20 nt, synthetic construct
  source 1..20: mol_type = other RNA
tttcatttggcctctgcggc

SEQ ID NO: 60021 - RNA, 20 nt, synthetic construct
  source 1..20: mol_type = other RNA
tttcatttgtaattcatcct

SEQ ID NO: 60022 - RNA, 20 nt, synthetic construct
  source 1..20: mol_type = other RNA
tttcattttactgctataca

SEQ ID NO: 60023 - RNA, 20 nt, synthetic construct
  source 1..20: mol_type = other RNA
tttccaaagatcatgggttt

SEQ ID NO: 60024 - RNA, 20 nt, synthetic construct
  source 1..20: mol_type = other RNA
tttccaaattcaaagcaagt

SEQ ID NO: 60025 - RNA, 20 nt, synthetic construct
  source 1..20: mol_type = other RNA
tttccaacagtttacacgcc

SEQ ID NO: 60026 - RNA, 20 nt, synthetic construct
  source 1..20: mol_type = other RNA
tttccaaccaagcccaactt

SEQ ID NO: 60027 - RNA, 20 nt, synthetic construct
  source 1..20: mol_type = other RNA
tttccaaccactgaatcaga

SEQ ID NO: 60028 - RNA, 20 nt, synthetic construct
  source 1..20: mol_type = other RNA
tttccaagaaccctttgtta

SEQ ID NO: 60029 - RNA, 20 nt, synthetic construct
  source 1..20: mol_type = other RNA
tttccaagattgaaaatggt

SEQ ID NO: 60030 - RNA, 20 nt, synthetic construct
  source 1..20: mol_type = other RNA
tttccaataagttaactgaa

SEQ ID NO: 60031 - RNA, 20 nt, synthetic construct
  source 1..20: mol_type = other RNA
tttccaatccgggaacatga

SEQ ID NO: 60032 - RNA, 20 nt, synthetic construct
  source 1..20: mol_type = other RNA
tttccacagtgactttactg

SEQ ID NO: 60033 - RNA, 20 nt, synthetic construct
  source 1..20: mol_type = other RNA
tttccacataaagtcttgct

SEQ ID NO: 60034 - RNA, 20 nt, synthetic construct
  source 1..20: mol_type = other RNA
tttccacataattgaaccca

SEQ ID NO: 60035 - RNA, 20 nt, synthetic construct
  source 1..20: mol_type = other RNA
tttccacccatgaagccagc

SEQ ID NO: 60036 - RNA, 20 nt, synthetic construct
  source 1..20: mol_type = other RNA
tttccacgggtaaaaataaa

SEQ ID NO: 60037 - RNA, 20 nt, synthetic construct
  source 1..20: mol_type = other RNA
tttccactctctggctgcaa

SEQ ID NO: 60038 - RNA, 20 nt, synthetic construct
  source 1..20: mol_type = other RNA
tttccactttgaggttatta

SEQ ID NO: 60039 - RNA, 20 nt, synthetic construct
  source 1..20: mol_type = other RNA
tttccagaaaactggcaatc

SEQ ID NO: 60040 - RNA, 20 nt, synthetic construct
  source 1..20: mol_type = other RNA
tttccagaagtaactcttga

SEQ ID NO: 60041 - RNA, 20 nt, synthetic construct
  source 1..20: mol_type = other RNA
tttccagaggttcttttaaa

SEQ ID NO: 60042 - RNA, 20 nt, synthetic construct
  source 1..20: mol_type = other RNA
tttccagcattttataggca

SEQ ID NO: 60043 - RNA, 20 nt, synthetic construct
  source 1..20: mol_type = other RNA
tttccagcctttaatttagc

SEQ ID NO: 60044 - RNA, 20 nt, synthetic construct
  source 1..20: mol_type = other RNA
tttccaggaaaagcaaatgt

SEQ ID NO: 60045 - RNA, 20 nt, synthetic construct
  source 1..20: mol_type = other RNA
tttccaggaccaatttacca

SEQ ID NO: 60046 - RNA, 20 nt, synthetic construct
  source 1..20: mol_type = other RNA
tttccagggggtatggagac

SEQ ID NO: 60047 - RNA, 20 nt, synthetic construct
  source 1..20: mol_type = other RNA
tttccaggtcattacatatt

SEQ ID NO: 60048 - RNA, 20 nt, synthetic construct
  source 1..20: mol_type = other RNA
tttccagtactttttcatcc

SEQ ID NO: 60049 - RNA, 20 nt, synthetic construct
  source 1..20: mol_type = other RNA
tttccagtatattcatagta

SEQ ID NO: 60050 - RNA, 20 nt, synthetic construct
  source 1..20: mol_type = other RNA
tttccagtcttctcatacag

SEQ ID NO: 60051 - RNA, 20 nt, synthetic construct
  source 1..20: mol_type = other RNA
tttccagtggcccccctgaa

SEQ ID NO: 60052 - RNA, 20 nt, synthetic construct
  source 1..20: mol_type = other RNA
tttccagtgtttggttttta

SEQ ID NO: 60053 - RNA, 20 nt, synthetic construct
  source 1..20: mol_type = other RNA
tttccataaaaagcgttgga

SEQ ID NO: 60054 - RNA, 20 nt, synthetic construct
  source 1..20: mol_type = other RNA
tttccatcttaggccataaa

SEQ ID NO: 60055 - RNA, 20 nt, synthetic construct
  source 1..20: mol_type = other RNA
tttccatggaggggccagtt

SEQ ID NO: 60056 - RNA, 20 nt, synthetic construct
  source 1..20: mol_type = other RNA
tttccatgtcttggctattg

SEQ ID NO: 60057 - RNA, 20 nt, synthetic construct
  source 1..20: mol_type = other RNA
tttccattcaatccttgtaa

SEQ ID NO: 60058 - RNA, 20 nt, synthetic construct
  source 1..20: mol_type = other RNA
tttccattcacacacccttt

SEQ ID NO: 60059 - RNA, 20 nt, synthetic construct
  source 1..20: mol_type = other RNA
tttccattcatgtaatgcaa

SEQ ID NO: 60060 - RNA, 20 nt, synthetic construct
  source 1..20: mol_type = other RNA
tttcccaaagatagactctt

SEQ ID NO: 60061 - RNA, 20 nt, synthetic construct
  source 1..20: mol_type = other RNA
tttcccaatctctggtattc

SEQ ID NO: 60062 - RNA, 20 nt, synthetic construct
  source 1..20: mol_type = other RNA
tttcccagatacgttaaagg

SEQ ID NO: 60063 - RNA, 20 nt, synthetic construct
  source 1..20: mol_type = other RNA
tttcccaggagctagaacag

SEQ ID NO: 60064 - RNA, 20 nt, synthetic construct
  source 1..20: mol_type = other RNA
tttcccagggtgtagccaca

SEQ ID NO: 60065 - RNA, 20 nt, synthetic construct
  source 1..20: mol_type = other RNA
tttcccatctctagttttcc

SEQ ID NO: 60066 - RNA, 20 nt, synthetic construct
  source 1..20: mol_type = other RNA
tttcccattaccaaaacctg

SEQ ID NO: 60067 - RNA, 20 nt, synthetic construct
  source 1..20: mol_type = other RNA
tttcccatttgatttcttct

SEQ ID NO: 60068 - RNA, 20 nt, synthetic construct
  source 1..20: mol_type = other RNA
tttccccattagagtaagca

SEQ ID NO: 60069 - RNA, 20 nt, synthetic construct
  source 1..20: mol_type = other RNA
tttcccccaattaaactata

SEQ ID NO: 60070 - RNA, 20 nt, synthetic construct
  source 1..20: mol_type = other RNA
tttcccccctaaaacactgg

SEQ ID NO: 60071 - RNA, 20 nt, synthetic construct
  source 1..20: mol_type = other RNA
tttcccccctggaacaatca

SEQ ID NO: 60072 - RNA, 20 nt, synthetic construct
  source 1..20: mol_type = other RNA
tttccccctacacccagttc

SEQ ID NO: 60073 - RNA, 20 nt, synthetic construct
  source 1..20: mol_type = other RNA
tttcccgctacacaagtatt

SEQ ID NO: 60074 - RNA, 20 nt, synthetic construct
  source 1..20: mol_type = other RNA
tttccctcagaatttgaggt

SEQ ID NO: 60075 - RNA, 20 nt, synthetic construct
  source 1..20: mol_type = other RNA
tttccctcctttttatcacc

SEQ ID NO: 60076 - RNA, 20 nt, synthetic construct
  source 1..20: mol_type = other RNA
tttccctctgagagaagtca

SEQ ID NO: 60077 - RNA, 20 nt, synthetic construct
  source 1..20: mol_type = other RNA
tttccctgcatacactcatt

SEQ ID NO: 60078 - RNA, 20 nt, synthetic construct
  source 1..20: mol_type = other RNA
tttccctgcttcatctggac

SEQ ID NO: 60079 - RNA, 20 nt, synthetic construct
  source 1..20: mol_type = other RNA
tttccctggggaataagatt

SEQ ID NO: 60080 - RNA, 20 nt, synthetic construct
  source 1..20: mol_type = other RNA
tttccctgtgtatgtgtagt

SEQ ID NO: 60081 - RNA, 20 nt, synthetic construct
  source 1..20: mol_type = other RNA
tttcccttaaaaggaactaa

SEQ ID NO: 60082 - RNA, 20 nt, synthetic construct
  source 1..20: mol_type = other RNA
tttcccttaatgttgacatc

SEQ ID NO: 60083 - RNA, 20 nt, synthetic construct
  source 1..20: mol_type = other RNA
tttcccttctgctcggctct

SEQ ID NO: 60084 - RNA, 20 nt, synthetic construct
  source 1..20: mol_type = other RNA
tttcccttttggatgcagat

SEQ ID NO: 60085 - RNA, 20 nt, synthetic construct
  source 1..20: mol_type = other RNA
tttcccttttgtagctaata

SEQ ID NO: 60086 - RNA, 20 nt, synthetic construct
  source 1..20: mol_type = other RNA
tttccgatgataccttcttg

SEQ ID NO: 60087 - RNA, 20 nt, synthetic construct
  source 1..20: mol_type = other RNA
tttccggttgtatagcagta

SEQ ID NO: 60088 - RNA, 20 nt, synthetic construct
  source 1..20: mol_type = other RNA
tttccgtatccagtggtttt

SEQ ID NO: 60089 - RNA, 20 nt, synthetic construct
  source 1..20: mol_type = other RNA
tttccgtctagccacttcct

SEQ ID NO: 60090 - RNA, 20 nt, synthetic construct
  source 1..20: mol_type = other RNA
tttccgtgtgacaaaaagta

SEQ ID NO: 60091 - RNA, 20 nt, synthetic construct
  source 1..20: mol_type = other RNA
tttccgttgctgcatagtac

SEQ ID NO: 60092 - RNA, 20 nt, synthetic construct
  source 1..20: mol_type = other RNA
tttccgttttgcaagatgca

SEQ ID NO: 60093 - RNA, 20 nt, synthetic construct
  source 1..20: mol_type = other RNA
tttcctaaaactccccatgc

SEQ ID NO: 60094 - RNA, 20 nt, synthetic construct
  source 1..20: mol_type = other RNA
tttcctaaccactgttatct

SEQ ID NO: 60095 - RNA, 20 nt, synthetic construct
  source 1..20: mol_type = other RNA
tttcctaatctaacatgtta

SEQ ID NO: 60096 - RNA, 20 nt, synthetic construct
  source 1..20: mol_type = other RNA
tttcctacatactgcactct

SEQ ID NO: 60097 - RNA, 20 nt, synthetic construct
  source 1..20: mol_type = other RNA
tttcctaccctgaggatata

SEQ ID NO: 60098 - RNA, 20 nt, synthetic construct
  source 1..20: mol_type = other RNA
tttcctactaacaagaaagg

SEQ ID NO: 60099 - RNA, 20 nt, synthetic construct
  source 1..20: mol_type = other RNA
tttcctagaaaatcatacat

SEQ ID NO: 60100 - RNA, 20 nt, synthetic construct
  source 1..20: mol_type = other RNA
tttcctagactgccaggtag

SEQ ID NO: 60101 - RNA, 20 nt, synthetic construct
  source 1..20: mol_type = other RNA
tttcctagattccctctggc

SEQ ID NO: 60102 - RNA, 20 nt, synthetic construct
  source 1..20: mol_type = other RNA
tttcctatgaaaatttagct

SEQ ID NO: 60103 - RNA, 20 nt, synthetic construct
  source 1..20: mol_type = other RNA
tttcctattcacactgctcc

SEQ ID NO: 60104 - RNA, 20 nt, synthetic construct
  source 1..20: mol_type = other RNA
tttcctcatgtccatagtta

SEQ ID NO: 60105 - RNA, 20 nt, synthetic construct
  source 1..20: mol_type = other RNA
tttcctcccttcagcctgtg

SEQ ID NO: 60106 - RNA, 20 nt, synthetic construct
  source 1..20: mol_type = other RNA
tttcctccttctgctcactt

SEQ ID NO: 60107 - RNA, 20 nt, synthetic construct
  source 1..20: mol_type = other RNA
tttcctcggtctacggacgc

SEQ ID NO: 60108 - RNA, 20 nt, synthetic construct
  source 1..20: mol_type = other RNA
tttcctcgttttcaacaaag

SEQ ID NO: 60109 - RNA, 20 nt, synthetic construct
  source 1..20: mol_type = other RNA
tttcctgataaggggctatc

SEQ ID NO: 60110 - RNA, 20 nt, synthetic construct
  source 1..20: mol_type = other RNA
tttcctgatcacaccctcct

SEQ ID NO: 60111 - RNA, 20 nt, synthetic construct
  source 1..20: mol_type = other RNA
tttcctgatcagcaccctca

SEQ ID NO: 60112 - RNA, 20 nt, synthetic construct
  source 1..20: mol_type = other RNA
tttcctgatggacattctgc

SEQ ID NO: 60113 - RNA, 20 nt, synthetic construct
  source 1..20: mol_type = other RNA
tttcctgcacatgcacaagg

SEQ ID NO: 60114 - RNA, 20 nt, synthetic construct
  source 1..20: mol_type = other RNA
tttcctgcccctccactcca

SEQ ID NO: 60115 - RNA, 20 nt, synthetic construct
  source 1..20: mol_type = other RNA
tttcctgctgtcgtttatgc

SEQ ID NO: 60116 - RNA, 20 nt, synthetic construct
  source 1..20: mol_type = other RNA
tttcctggaaaacttctctg

SEQ ID NO: 60117 - RNA, 20 nt, synthetic construct
  source 1..20: mol_type = other RNA
tttcctgtgatttatgtggc

SEQ ID NO: 60118 - RNA, 20 nt, synthetic construct
  source 1..20: mol_type = other RNA
tttcctgttccgggatcctg

SEQ ID NO: 60119 - RNA, 20 nt, synthetic construct
  source 1..20: mol_type = other RNA
tttccttaagcacagactgt

SEQ ID NO: 60120 - RNA, 20 nt, synthetic construct
  source 1..20: mol_type = other RNA
tttccttaagccatttcagg

SEQ ID NO: 60121 - RNA, 20 nt, synthetic construct
  source 1..20: mol_type = other RNA
tttccttaccagtgcttgca

SEQ ID NO: 60122 - RNA, 20 nt, synthetic construct
  source 1..20: mol_type = other RNA
tttccttacctttatctttg

SEQ ID NO: 60123 - RNA, 20 nt, synthetic construct
  source 1..20: mol_type = other RNA
tttccttagttcgaagtttt

SEQ ID NO: 60124 - RNA, 20 nt, synthetic construct
  source 1..20: mol_type = other RNA
tttccttatagtattacctc

SEQ ID NO: 60125 - RNA, 20 nt, synthetic construct
  source 1..20: mol_type = other RNA
tttccttatccattcatctc

SEQ ID NO: 60126 - RNA, 20 nt, synthetic construct
  source 1..20: mol_type = other RNA
tttccttatggatatctggc

SEQ ID NO: 60127 - RNA, 20 nt, synthetic construct
  source 1..20: mol_type = other RNA
tttccttattgagaagcaga

SEQ ID NO: 60128 - RNA, 20 nt, synthetic construct
  source 1..20: mol_type = other RNA
tttccttccagatgttttac

SEQ ID NO: 60129 - RNA, 20 nt, synthetic construct
  source 1..20: mol_type = other RNA
tttccttccagtttatatgc

SEQ ID NO: 60130 - RNA, 20 nt, synthetic construct
  source 1..20: mol_type = other RNA
tttccttccttgctcaggag

SEQ ID NO: 60131 - RNA, 20 nt, synthetic construct
  source 1..20: mol_type = other RNA
tttccttcttaagacatttg

SEQ ID NO: 60132 - RNA, 20 nt, synthetic construct
  source 1..20: mol_type = other RNA
tttccttctttgggggaagc

SEQ ID NO: 60133 - RNA, 20 nt, synthetic construct
  source 1..20: mol_type = other RNA
tttccttggagaagagttct

SEQ ID NO: 60134 - RNA, 20 nt, synthetic construct
  source 1..20: mol_type = other RNA
tttccttgtcctaaaattcc

SEQ ID NO: 60135 - RNA, 20 nt, synthetic construct
  source 1..20: mol_type = other RNA
tttcctttaacgtatctggg

SEQ ID NO: 60136 - RNA, 20 nt, synthetic construct
  source 1..20: mol_type = other RNA
tttcctttcagtcggttctt

SEQ ID NO: 60137 - RNA, 20 nt, synthetic construct
  source 1..20: mol_type = other RNA
tttcctttgcctaagtctca

SEQ ID NO: 60138 - RNA, 20 nt, synthetic construct
  source 1..20: mol_type = other RNA
tttcctttgcctttcacttt

SEQ ID NO: 60139 - RNA, 20 nt, synthetic construct
  source 1..20: mol_type = other RNA
tttcgaagtgggaagcaaag

SEQ ID NO: 60140 - RNA, 20 nt, synthetic construct
  source 1..20: mol_type = other RNA
tttcgaattagattgttttg

SEQ ID NO: 60141 - RNA, 20 nt, synthetic construct
  source 1..20: mol_type = other RNA
tttcgaattatgctaacatg

SEQ ID NO: 60142 - RNA, 20 nt, synthetic construct
  source 1..20: mol_type = other RNA
tttcgaccaagttactagaa

SEQ ID NO: 60143 - RNA, 20 nt, synthetic construct
  source 1..20: mol_type = other RNA
tttcgagactgagtaatatt

SEQ ID NO: 60144 - RNA, 20 nt, synthetic construct
  source 1..20: mol_type = other RNA
tttcgcaaagcaacatgcta

SEQ ID NO: 60145 - RNA, 20 nt, synthetic construct
  source 1..20: mol_type = other RNA
tttcgcaaagtaaaaagcac

SEQ ID NO: 60146 - RNA, 20 nt, synthetic construct
  source 1..20: mol_type = other RNA
tttcgcatcattcaaatgat

SEQ ID NO: 60147 - RNA, 20 nt, synthetic construct
  source 1..20: mol_type = other RNA
tttcgcctagataagaaaat

SEQ ID NO: 60148 - RNA, 20 nt, synthetic construct
  source 1..20: mol_type = other RNA
tttcgccttctcagaaggac

SEQ ID NO: 60149 - RNA, 20 nt, synthetic construct
  source 1..20: mol_type = other RNA
tttcgctaatctcaatcagg

SEQ ID NO: 60150 - RNA, 20 nt, synthetic construct
  source 1..20: mol_type = other RNA
tttcgctatcagtagtttgc

SEQ ID NO: 60151 - RNA, 20 nt, synthetic construct
  source 1..20: mol_type = other RNA
tttcgcttttggagctataa

SEQ ID NO: 60152 - RNA, 20 nt, synthetic construct
  source 1..20: mol_type = other RNA
tttcggatatttactaagaa

SEQ ID NO: 60153 - RNA, 20 nt, synthetic construct
  source 1..20: mol_type = other RNA
tttcggctctgtgctgagat

SEQ ID NO: 60154 - RNA, 20 nt, synthetic construct
  source 1..20: mol_type = other RNA
tttcgtatcttttaacagat

SEQ ID NO: 60155 - RNA, 20 nt, synthetic construct
  source 1..20: mol_type = other RNA
tttcgtatggaagatgggac

SEQ ID NO: 60156 - RNA, 20 nt, synthetic construct
  source 1..20: mol_type = other RNA
tttcgtcatctataaggtaa

SEQ ID NO: 60157 - RNA, 20 nt, synthetic construct
  source 1..20: mol_type = other RNA
tttcgtgagggtttcagtga

SEQ ID NO: 60158 - RNA, 20 nt, synthetic construct
  source 1..20: mol_type = other RNA
tttcgtgtactgaaaccagt

SEQ ID NO: 60159 - RNA, 20 nt, synthetic construct
  source 1..20: mol_type = other RNA
tttctaaaaacgtgcaaact

SEQ ID NO: 60160 - RNA, 20 nt, synthetic construct
  source 1..20: mol_type = other RNA
tttctaaaccttaaaagagt

SEQ ID NO: 60161 - RNA, 20 nt, synthetic construct
  source 1..20: mol_type = other RNA
tttctaaactggttttcctg

SEQ ID NO: 60162 - RNA, 20 nt, synthetic construct
  source 1..20: mol_type = other RNA
tttctaaatcaacagtgtac

SEQ ID NO: 60163 - RNA, 20 nt, synthetic construct
  source 1..20: mol_type = other RNA
tttctaaattgaacagccta

SEQ ID NO: 60164 - RNA, 20 nt, synthetic construct
  source 1..20: mol_type = other RNA
tttctaagagccaaagacat

SEQ ID NO: 60165 - RNA, 20 nt, synthetic construct
  source 1..20: mol_type = other RNA
tttctaagccatgtttctcc

SEQ ID NO: 60166 - RNA, 20 nt, synthetic construct
  source 1..20: mol_type = other RNA
tttctaaggttctgctatgc

SEQ ID NO: 60167 - RNA, 20 nt, synthetic construct
  source 1..20: mol_type = other RNA
tttctaatcctttgcacaca

SEQ ID NO: 60168 - RNA, 20 nt, synthetic construct
  source 1..20: mol_type = other RNA
tttctaattctgacaactgg

SEQ ID NO: 60169 - RNA, 20 nt, synthetic construct
  source 1..20: mol_type = other RNA
tttctaatttccaagaaccc

SEQ ID NO: 60170 - RNA, 20 nt, synthetic construct
  source 1..20: mol_type = other RNA
tttctacacaacatgtttta

SEQ ID NO: 60171 - RNA, 20 nt, synthetic construct
  source 1..20: mol_type = other RNA
tttctacctttggctactgt

SEQ ID NO: 60172 - RNA, 20 nt, synthetic construct
  source 1..20: mol_type = other RNA
tttctactagtataagagaa

SEQ ID NO: 60173 - RNA, 20 nt, synthetic construct
  source 1..20: mol_type = other RNA
tttctactggggtcttagtt

SEQ ID NO: 60174 - RNA, 20 nt, synthetic construct
  source 1..20: mol_type = other RNA
tttctagaatgcatccctcc

SEQ ID NO: 60175 - RNA, 20 nt, synthetic construct
  source 1..20: mol_type = other RNA
tttctagattcatatgcttt

SEQ ID NO: 60176 - RNA, 20 nt, synthetic construct
  source 1..20: mol_type = other RNA
tttctagccataatccttag

SEQ ID NO: 60177 - RNA, 20 nt, synthetic construct
  source 1..20: mol_type = other RNA
tttctaggaaccatattaga

SEQ ID NO: 60178 - RNA, 20 nt, synthetic construct
  source 1..20: mol_type = other RNA
tttctaggcatctatttccc

SEQ ID NO: 60179 - RNA, 20 nt, synthetic construct
  source 1..20: mol_type = other RNA
tttctaggccctaaccccag

SEQ ID NO: 60180 - RNA, 20 nt, synthetic construct
  source 1..20: mol_type = other RNA
tttctaggtagtttctttga

SEQ ID NO: 60181 - RNA, 20 nt, synthetic construct
  source 1..20: mol_type = other RNA
tttctagttagtttgttgac

SEQ ID NO: 60182 - RNA, 20 nt, synthetic construct
  source 1..20: mol_type = other RNA
tttctagtttgaggtgtaca

SEQ ID NO: 60183 - RNA, 20 nt, synthetic construct
  source 1..20: mol_type = other RNA
tttctatacttcatctttcc

SEQ ID NO: 60184 - RNA, 20 nt, synthetic construct
  source 1..20: mol_type = other RNA
tttctatagtcattccgcta

SEQ ID NO: 60185 - RNA, 20 nt, synthetic construct
  source 1..20: mol_type = other RNA
tttctatagtggctgcacca

SEQ ID NO: 60186 - RNA, 20 nt, synthetic construct
  source 1..20: mol_type = other RNA
tttctatctctcagatctga

SEQ ID NO: 60187 - RNA, 20 nt, synthetic construct
  source 1..20: mol_type = other RNA
tttctatctgaacattttag

SEQ ID NO: 60188 - RNA, 20 nt, synthetic construct
  source 1..20: mol_type = other RNA
tttctattcattaccaggct

SEQ ID NO: 60189 - RNA, 20 nt, synthetic construct
  source 1..20: mol_type = other RNA
tttctattcccctggatccc

SEQ ID NO: 60190 - RNA, 20 nt, synthetic construct
  source 1..20: mol_type = other RNA
tttctcaaaaatttaagcac

SEQ ID NO: 60191 - RNA, 20 nt, synthetic construct
  source 1..20: mol_type = other RNA
tttctcaaagcccaccagca

SEQ ID NO: 60192 - RNA, 20 nt, synthetic construct
  source 1..20: mol_type = other RNA
tttctcaacactgtgttctt

SEQ ID NO: 60193 - RNA, 20 nt, synthetic construct
  source 1..20: mol_type = other RNA
tttctcaacttagccttggt

SEQ ID NO: 60194 - RNA, 20 nt, synthetic construct
  source 1..20: mol_type = other RNA
tttctcaacttcctgtttta

SEQ ID NO: 60195 - RNA, 20 nt, synthetic construct
  source 1..20: mol_type = other RNA
tttctcatactttgtcaggc

SEQ ID NO: 60196 - RNA, 20 nt, synthetic construct
  source 1..20: mol_type = other RNA
tttctcatctgtcactttcc

SEQ ID NO: 60197 - RNA, 20 nt, synthetic construct
  source 1..20: mol_type = other RNA
tttctcatgtatgttttagc

SEQ ID NO: 60198 - RNA, 20 nt, synthetic construct
  source 1..20: mol_type = other RNA
tttctcattcttctctaatg

SEQ ID NO: 60199 - RNA, 20 nt, synthetic construct
  source 1..20: mol_type = other RNA
tttctcatttttcagggggg

SEQ ID NO: 60200 - RNA, 20 nt, synthetic construct
  source 1..20: mol_type = other RNA
tttctccaggggcggccccg

SEQ ID NO: 60201 - RNA, 20 nt, synthetic construct
  source 1..20: mol_type = other RNA
tttctcccaaggttgcctgt

SEQ ID NO: 60202 - RNA, 20 nt, synthetic construct
  source 1..20: mol_type = other RNA
tttctcccagctgtccaaca

SEQ ID NO: 60203 - RNA, 20 nt, synthetic construct
  source 1..20: mol_type = other RNA
tttctcccaggtcagtagta

SEQ ID NO: 60204 - RNA, 20 nt, synthetic construct
  source 1..20: mol_type = other RNA
tttctcctaagtcttcttct

SEQ ID NO: 60205 - RNA, 20 nt, synthetic construct
  source 1..20: mol_type = other RNA
tttctcctgcatggggagtt

SEQ ID NO: 60206 - RNA, 20 nt, synthetic construct
  source 1..20: mol_type = other RNA
tttctccttctgcaggctga

SEQ ID NO: 60207 - RNA, 20 nt, synthetic construct
  source 1..20: mol_type = other RNA
tttctccttctggaagattt

SEQ ID NO: 60208 - RNA, 20 nt, synthetic construct
  source 1..20: mol_type = other RNA
tttctcgacacacaatccaa

SEQ ID NO: 60209 - RNA, 20 nt, synthetic construct
  source 1..20: mol_type = other RNA
tttctcgcagcggggatgct

SEQ ID NO: 60210 - RNA, 20 nt, synthetic construct
  source 1..20: mol_type = other RNA
tttctcggccgggcgcggtg

SEQ ID NO: 60211 - RNA, 20 nt, synthetic construct
  source 1..20: mol_type = other RNA
tttctcgtgcatgtctgcag

SEQ ID NO: 60212 - RNA, 20 nt, synthetic construct
  source 1..20: mol_type = other RNA
tttctctaatagctagtgat

SEQ ID NO: 60213 - RNA, 20 nt, synthetic construct
  source 1..20: mol_type = other RNA
tttctctacagttaacaata

SEQ ID NO: 60214 - RNA, 20 nt, synthetic construct
  source 1..20: mol_type = other RNA
tttctctacatctggatcct

SEQ ID NO: 60215 - RNA, 20 nt, synthetic construct
  source 1..20: mol_type = other RNA
tttctctagttgcacggtga

SEQ ID NO: 60216 - RNA, 20 nt, synthetic construct
  source 1..20: mol_type = other RNA
tttctctcatgttgggtaaa

SEQ ID NO: 60217 - RNA, 20 nt, synthetic construct
  source 1..20: mol_type = other RNA
tttctctccaaggtacaatt

SEQ ID NO: 60218 - RNA, 20 nt, synthetic construct
  source 1..20: mol_type = other RNA
tttctctccttgcacattag

SEQ ID NO: 60219 - RNA, 20 nt, synthetic construct
  source 1..20: mol_type = other RNA
tttctctctccctgccctgt

SEQ ID NO: 60220 - RNA, 20 nt, synthetic construct
  source 1..20: mol_type = other RNA
tttctctgctttttcttggt

SEQ ID NO: 60221 - RNA, 20 nt, synthetic construct
  source 1..20: mol_type = other RNA
tttctctttaaagctgaact

SEQ ID NO: 60222 - RNA, 20 nt, synthetic construct
  source 1..20: mol_type = other RNA
tttctctttcagccatccca

SEQ ID NO: 60223 - RNA, 20 nt, synthetic construct
  source 1..20: mol_type = other RNA
tttctgaaattctcattagt

SEQ ID NO: 60224 - RNA, 20 nt, synthetic construct
  source 1..20: mol_type = other RNA
tttctgaactcaaaagtgaa

SEQ ID NO: 60225 - RNA, 20 nt, synthetic construct
  source 1..20: mol_type = other RNA
tttctgacaatttcagggag

SEQ ID NO: 60226 - RNA, 20 nt, synthetic construct
  source 1..20: mol_type = other RNA
tttctgacacccgacccact

SEQ ID NO: 60227 - RNA, 20 nt, synthetic construct
  source 1..20: mol_type = other RNA
tttctgacaggtggtatggg

SEQ ID NO: 60228 - RNA, 20 nt, synthetic construct
  source 1..20: mol_type = other RNA
tttctgaccaactatttcac

SEQ ID NO: 60229 - RNA, 20 nt, synthetic construct
  source 1..20: mol_type = other RNA
tttctgactctgtgcttgtg

SEQ ID NO: 60230 - RNA, 20 nt, synthetic construct
  source 1..20: mol_type = other RNA
tttctgagagtattgccagg

SEQ ID NO: 60231 - RNA, 20 nt, synthetic construct
  source 1..20: mol_type = other RNA
tttctgagcaactactattt

SEQ ID NO: 60232 - RNA, 20 nt, synthetic construct
  source 1..20: mol_type = other RNA
tttctgagccagagtttcac

SEQ ID NO: 60233 - RNA, 20 nt, synthetic construct
  source 1..20: mol_type = other RNA
tttctgaggtggagttctgc

SEQ ID NO: 60234 - RNA, 20 nt, synthetic construct
  source 1..20: mol_type = other RNA
tttctgagtatattctgtga

SEQ ID NO: 60235 - RNA, 20 nt, synthetic construct
  source 1..20: mol_type = other RNA
tttctgattgcccattataa

SEQ ID NO: 60236 - RNA, 20 nt, synthetic construct
  source 1..20: mol_type = other RNA
tttctgatttgctggctcag

SEQ ID NO: 60237 - RNA, 20 nt, synthetic construct
  source 1..20: mol_type = other RNA
tttctgcaattggaagacta

SEQ ID NO: 60238 - RNA, 20 nt, synthetic construct
  source 1..20: mol_type = other RNA
tttctgcatacttagctaat

SEQ ID NO: 60239 - RNA, 20 nt, synthetic construct
  source 1..20: mol_type = other RNA
tttctgcatagagatcttgt

SEQ ID NO: 60240 - RNA, 20 nt, synthetic construct
  source 1..20: mol_type = other RNA
tttctgcatcttttgagggt

SEQ ID NO: 60241 - RNA, 20 nt, synthetic construct
  source 1..20: mol_type = other RNA
tttctgcatttggtttgcaa

SEQ ID NO: 60242 - RNA, 20 nt, synthetic construct
  source 1..20: mol_type = other RNA
tttctgctattctctttctg

SEQ ID NO: 60243 - RNA, 20 nt, synthetic construct
  source 1..20: mol_type = other RNA
tttctgcttaaagcctctca

SEQ ID NO: 60244 - RNA, 20 nt, synthetic construct
  source 1..20: mol_type = other RNA
tttctgcttagtcttctcag

SEQ ID NO: 60245 - RNA, 20 nt, synthetic construct
  source 1..20: mol_type = other RNA
tttctgcttctcaataagga

SEQ ID NO: 60246 - RNA, 20 nt, synthetic construct
  source 1..20: mol_type = other RNA
tttctgcttgaatgtgccta

SEQ ID NO: 60247 - RNA, 20 nt, synthetic construct
  source 1..20: mol_type = other RNA
tttctggaaactcaaaccca

SEQ ID NO: 60248 - RNA, 20 nt, synthetic construct
  source 1..20: mol_type = other RNA
tttctggaagtttcctgcac

SEQ ID NO: 60249 - RNA, 20 nt, synthetic construct
  source 1..20: mol_type = other RNA
tttctggaccacaatcttac

SEQ ID NO: 60250 - RNA, 20 nt, synthetic construct
  source 1..20: mol_type = other RNA
tttctggaggctagaagtcc

SEQ ID NO: 60251 - RNA, 20 nt, synthetic construct
  source 1..20: mol_type = other RNA
tttctgggctctctattcca

SEQ ID NO: 60252 - RNA, 20 nt, synthetic construct
  source 1..20: mol_type = other RNA
tttctggggatgctgtctat

SEQ ID NO: 60253 - RNA, 20 nt, synthetic construct
  source 1..20: mol_type = other RNA
tttctggttttctggaggct

SEQ ID NO: 60254 - RNA, 20 nt, synthetic construct
  source 1..20: mol_type = other RNA
tttctgtaaacatgaacaag

SEQ ID NO: 60255 - RNA, 20 nt, synthetic construct
  source 1..20: mol_type = other RNA
tttctgtaatgtttgtactt

SEQ ID NO: 60256 - RNA, 20 nt, synthetic construct
  source 1..20: mol_type = other RNA
tttctgtagaatatccaagc

SEQ ID NO: 60257 - RNA, 20 nt, synthetic construct
  source 1..20: mol_type = other RNA
tttctgtatcttttcagtcc

SEQ ID NO: 60258 - RNA, 20 nt, synthetic construct
  source 1..20: mol_type = other RNA
tttctgtcatctgaatcaat

SEQ ID NO: 60259 - RNA, 20 nt, synthetic construct
  source 1..20: mol_type = other RNA
tttctgtcattctgcagttt

SEQ ID NO: 60260 - RNA, 20 nt, synthetic construct
  source 1..20: mol_type = other RNA
tttctgtccttggattgcta

SEQ ID NO: 60261 - RNA, 20 nt, synthetic construct
  source 1..20: mol_type = other RNA
tttctgtgaaaaaacaaaac

SEQ ID NO: 60262 - RNA, 20 nt, synthetic construct
  source 1..20: mol_type = other RNA
tttctgtgtaatactgtaga

SEQ ID NO: 60263 - RNA, 20 nt, synthetic construct
  source 1..20: mol_type = other RNA
tttctgttagatggtgctga

SEQ ID NO: 60264 - RNA, 20 nt, synthetic construct
  source 1..20: mol_type = other RNA
tttctgttgcttaagtcact

SEQ ID NO: 60265 - RNA, 20 nt, synthetic construct
  source 1..20: mol_type = other RNA
tttctgtttctgtgaaaaaa

SEQ ID NO: 60266 - RNA, 20 nt, synthetic construct
  source 1..20: mol_type = other RNA
tttctgtttggatgaaaaag

SEQ ID NO: 60267 - RNA, 20 nt, synthetic construct
  source 1..20: mol_type = other RNA
tttctgtttgtttgttttga

SEQ ID NO: 60268 - RNA, 20 nt, synthetic construct
  source 1..20: mol_type = other RNA
tttcttaaaaatgacaccaa

SEQ ID NO: 60269 - RNA, 20 nt, synthetic construct
  source 1..20: mol_type = other RNA
tttcttaaaactttaggtca

SEQ ID NO: 60270 - RNA, 20 nt, synthetic construct
  source 1..20: mol_type = other RNA
tttcttacacattaggctct

SEQ ID NO: 60271 - RNA, 20 nt, synthetic construct
  source 1..20: mol_type = other RNA
tttcttaccctcacagtcac

SEQ ID NO: 60272 - RNA, 20 nt, synthetic construct
  source 1..20: mol_type = other RNA
tttcttaccctttactcaga

SEQ ID NO: 60273 - RNA, 20 nt, synthetic construct
  source 1..20: mol_type = other RNA
tttcttacctaagcatcgtg

SEQ ID NO: 60274 - RNA, 20 nt, synthetic construct
  source 1..20: mol_type = other RNA
tttcttactgatttatagtg

SEQ ID NO: 60275 - RNA, 20 nt, synthetic construct
  source 1..20: mol_type = other RNA
tttcttagctatattcactt

SEQ ID NO: 60276 - RNA, 20 nt, synthetic construct
  source 1..20: mol_type = other RNA
tttcttaggaagctatggag

SEQ ID NO: 60277 - RNA, 20 nt, synthetic construct
  source 1..20: mol_type = other RNA
tttcttaggtttctcatttt

SEQ ID NO: 60278 - RNA, 20 nt, synthetic construct
  source 1..20: mol_type = other RNA
tttcttagttccattattcc

SEQ ID NO: 60279 - RNA, 20 nt, synthetic construct
  source 1..20: mol_type = other RNA
tttcttatctaggcgaaata

SEQ ID NO: 60280 - RNA, 20 nt, synthetic construct
  source 1..20: mol_type = other RNA
tttcttattttttcccagat

SEQ ID NO: 60281 - RNA, 20 nt, synthetic construct
  source 1..20: mol_type = other RNA
tttcttcaaccatacttttc

SEQ ID NO: 60282 - RNA, 20 nt, synthetic construct
  source 1..20: mol_type = other RNA
tttcttcaagatactgcact

SEQ ID NO: 60283 - RNA, 20 nt, synthetic construct
  source 1..20: mol_type = other RNA
tttcttcactcttaaaagga

SEQ ID NO: 60284 - RNA, 20 nt, synthetic construct
  source 1..20: mol_type = other RNA
tttcttcagaagaaattact

SEQ ID NO: 60285 - RNA, 20 nt, synthetic construct
  source 1..20: mol_type = other RNA
tttcttcatggactagactg

SEQ ID NO: 60286 - RNA, 20 nt, synthetic construct
  source 1..20: mol_type = other RNA
tttcttcccatctcactcac

SEQ ID NO: 60287 - RNA, 20 nt, synthetic construct
  source 1..20: mol_type = other RNA
tttcttctagtcacatttgc

SEQ ID NO: 60288 - RNA, 20 nt, synthetic construct
  source 1..20: mol_type = other RNA
tttcttctccctcttcgctc

SEQ ID NO: 60289 - RNA, 20 nt, synthetic construct
  source 1..20: mol_type = other RNA
tttcttctgaagaaattatc

SEQ ID NO: 60290 - RNA, 20 nt, synthetic construct
  source 1..20: mol_type = other RNA
tttcttcttgttttgttctc

SEQ ID NO: 60291 - RNA, 20 nt, synthetic construct
  source 1..20: mol_type = other RNA
tttcttctttggctcaatgg

SEQ ID NO: 60292 - RNA, 20 nt, synthetic construct
  source 1..20: mol_type = other RNA
tttcttgaatctctctatcc

SEQ ID NO: 60293 - RNA, 20 nt, synthetic construct
  source 1..20: mol_type = other RNA
tttcttgacctcagtggtag

SEQ ID NO: 60294 - RNA, 20 nt, synthetic construct
  source 1..20: mol_type = other RNA
tttcttgctttgctgcccca

SEQ ID NO: 60295 - RNA, 20 nt, synthetic construct
  source 1..20: mol_type = other RNA
tttcttggggctctaatgca

SEQ ID NO: 60296 - RNA, 20 nt, synthetic construct
  source 1..20: mol_type = other RNA
tttcttggtctgcagactct

SEQ ID NO: 60297 - RNA, 20 nt, synthetic construct
  source 1..20: mol_type = other RNA
tttcttggtggtaactgatg

SEQ ID NO: 60298 - RNA, 20 nt, synthetic construct
  source 1..20: mol_type = other RNA
tttcttgtgggtattttgtt

SEQ ID NO: 60299 - RNA, 20 nt, synthetic construct
  source 1..20: mol_type = other RNA
tttcttgttagtaggaaaac

SEQ ID NO: 60300 - RNA, 20 nt, synthetic construct
  source 1..20: mol_type = other RNA
tttcttgttataagcaaaga

SEQ ID NO: 60301 - RNA, 20 nt, synthetic construct
  source 1..20: mol_type = other RNA
tttctttaaaaccagagcgg

SEQ ID NO: 60302 - RNA, 20 nt, synthetic construct
  source 1..20: mol_type = other RNA
tttctttcaaatgtgacaga

SEQ ID NO: 60303 - RNA, 20 nt, synthetic construct
  source 1..20: mol_type = other RNA
tttctttccattcaatcctt

SEQ ID NO: 60304 - RNA, 20 nt, synthetic construct
  source 1..20: mol_type = other RNA
tttctttcgcatcattcaaa

SEQ ID NO: 60305 - RNA, 20 nt, synthetic construct
  source 1..20: mol_type = other RNA
tttctttgagtagttcatgt

SEQ ID NO: 60306 - RNA, 20 nt, synthetic construct
  source 1..20: mol_type = other RNA
tttctttggctgttagcctt

SEQ ID NO: 60307 - RNA, 20 nt, synthetic construct
  source 1..20: mol_type = other RNA
tttctttggttttgactcag

SEQ ID NO: 60308 - RNA, 20 nt, synthetic construct
  source 1..20: mol_type = other RNA
tttcttttaaagacctcagg

SEQ ID NO: 60309 - RNA, 20 nt, synthetic construct
  source 1..20: mol_type = other RNA
tttcttttcactctaatatg

SEQ ID NO: 60310 - RNA, 20 nt, synthetic construct
  source 1..20: mol_type = other RNA
tttcttttccaaccaagccc

SEQ ID NO: 60311 - RNA, 20 nt, synthetic construct
  source 1..20: mol_type = other RNA
tttcttttgtgggtaaatta

SEQ ID NO: 60312 - RNA, 20 nt, synthetic construct
  source 1..20: mol_type = other RNA
tttctttttaaacaggtgta

SEQ ID NO: 60313 - RNA, 20 nt, synthetic construct
  source 1..20: mol_type = other RNA
tttctttttactcatgtcta

SEQ ID NO: 60314 - RNA, 20 nt, synthetic construct
  source 1..20: mol_type = other RNA
tttctttttagtaagaggta

SEQ ID NO: 60315 - RNA, 20 nt, synthetic construct
  source 1..20: mol_type = other RNA
tttctttttcttgctttgct

SEQ ID NO: 60316 - RNA, 20 nt, synthetic construct
  source 1..20: mol_type = other RNA
tttctttttgttttctcctt

SEQ ID NO: 60317 - RNA, 20 nt, synthetic construct
  source 1..20: mol_type = other RNA
tttgaaaaaacttcccttag

SEQ ID NO: 60318 - RNA, 20 nt, synthetic construct
  source 1..20: mol_type = other RNA
tttgaaaaacagatcttggc

SEQ ID NO: 60319 - RNA, 20 nt, synthetic construct
  source 1..20: mol_type = other RNA
tttgaaaaaggaaagtaact

SEQ ID NO: 60320 - RNA, 20 nt, synthetic construct
  source 1..20: mol_type = other RNA
tttgaaaacatgttttgttg

SEQ ID NO: 60321 - RNA, 20 nt, synthetic construct
  source 1..20: mol_type = other RNA
tttgaaaagaacaacatggt

SEQ ID NO: 60322 - RNA, 20 nt, synthetic construct
  source 1..20: mol_type = other RNA
tttgaaaagctcaaaaatac

SEQ ID NO: 60323 - RNA, 20 nt, synthetic construct
  source 1..20: mol_type = other RNA
tttgaaaagtgtttgtcaca

SEQ ID NO: 60324 - RNA, 20 nt, synthetic construct
  source 1..20: mol_type = other RNA
tttgaaactgagcatcccag

SEQ ID NO: 60325 - RNA, 20 nt, synthetic construct
  source 1..20: mol_type = other RNA
tttgaaactttaagagtatc

SEQ ID NO: 60326 - RNA, 20 nt, synthetic construct
  source 1..20: mol_type = other RNA
tttgaaagaaagaaggccat

SEQ ID NO: 60327 - RNA, 20 nt, synthetic construct
  source 1..20: mol_type = other RNA
tttgaaaggaatccggcttt

SEQ ID NO: 60328 - RNA, 20 nt, synthetic construct
  source 1..20: mol_type = other RNA
tttgaaatcagaacttgaca

SEQ ID NO: 60329 - RNA, 20 nt, synthetic construct
  source 1..20: mol_type = other RNA
tttgaaatgatcttttgtag

SEQ ID NO: 60330 - RNA, 20 nt, synthetic construct
  source 1..20: mol_type = other RNA
tttgaaatttaaagacgttc

SEQ ID NO: 60331 - RNA, 20 nt, synthetic construct
  source 1..20: mol_type = other RNA
tttgaacaagagcgtcgtac

SEQ ID NO: 60332 - RNA, 20 nt, synthetic construct
  source 1..20: mol_type = other RNA
tttgaacactctgcaatttt

SEQ ID NO: 60333 - RNA, 20 nt, synthetic construct
  source 1..20: mol_type = other RNA
tttgaaccccagaaggttaa

SEQ ID NO: 60334 - RNA, 20 nt, synthetic construct
  source 1..20: mol_type = other RNA
tttgaacgaatgaaaacaca

SEQ ID NO: 60335 - RNA, 20 nt, synthetic construct
  source 1..20: mol_type = other RNA
tttgaactcactggccagca

SEQ ID NO: 60336 - RNA, 20 nt, synthetic construct
  source 1..20: mol_type = other RNA
tttgaactttccagaagtaa

SEQ ID NO: 60337 - RNA, 20 nt, synthetic construct
  source 1..20: mol_type = other RNA
tttgaagaaagttttgcagt

SEQ ID NO: 60338 - RNA, 20 nt, synthetic construct
  source 1..20: mol_type = other RNA
tttgaagcttcacttctctg

SEQ ID NO: 60339 - RNA, 20 nt, synthetic construct
  source 1..20: mol_type = other RNA
tttgaagtatgtaattacag

SEQ ID NO: 60340 - RNA, 20 nt, synthetic construct
  source 1..20: mol_type = other RNA
tttgaataaagggtcagaat

SEQ ID NO: 60341 - RNA, 20 nt, synthetic construct
  source 1..20: mol_type = other RNA
tttgaataacctcataagaa

SEQ ID NO: 60342 - RNA, 20 nt, synthetic construct
  source 1..20: mol_type = other RNA
tttgaataaggtctgtaagt

SEQ ID NO: 60343 - RNA, 20 nt, synthetic construct
  source 1..20: mol_type = other RNA
tttgaatcatgggagccaaa

SEQ ID NO: 60344 - RNA, 20 nt, synthetic construct
  source 1..20: mol_type = other RNA
tttgaatgatgcgaaagaaa

SEQ ID NO: 60345 - RNA, 20 nt, synthetic construct
  source 1..20: mol_type = other RNA
tttgaattaagcaccactag

SEQ ID NO: 60346 - RNA, 20 nt, synthetic construct
  source 1..20: mol_type = other RNA
tttgaatttaagacacaagg

SEQ ID NO: 60347 - RNA, 20 nt, synthetic construct
  source 1..20: mol_type = other RNA
tttgaatttggaaagggtag

SEQ ID NO: 60348 - RNA, 20 nt, synthetic construct
  source 1..20: mol_type = other RNA
tttgaattttccattcacac

SEQ ID NO: 60349 - RNA, 20 nt, synthetic construct
  source 1..20: mol_type = other RNA
tttgacagatgagactctta

SEQ ID NO: 60350 - RNA, 20 nt, synthetic construct
  source 1..20: mol_type = other RNA
tttgacagccacgtgtattg

SEQ ID NO: 60351 - RNA, 20 nt, synthetic construct
  source 1..20: mol_type = other RNA
tttgacatgacaggtgagtg

SEQ ID NO: 60352 - RNA, 20 nt, synthetic construct
  source 1..20: mol_type = other RNA
tttgaccaaaacaaaaaaca

SEQ ID NO: 60353 - RNA, 20 nt, synthetic construct
  source 1..20: mol_type = other RNA
tttgaccatgggacaagtgg

SEQ ID NO: 60354 - RNA, 20 nt, synthetic construct
  source 1..20: mol_type = other RNA
tttgacctgtaatttttctc

SEQ ID NO: 60355 - RNA, 20 nt, synthetic construct
  source 1..20: mol_type = other RNA
tttgaccttccttgtgtctt

SEQ ID NO: 60356 - RNA, 20 nt, synthetic construct
  source 1..20: mol_type = other RNA
tttgacgcgcaacaattcaa

SEQ ID NO: 60357 - RNA, 20 nt, synthetic construct
  source 1..20: mol_type = other RNA
tttgactcagtacttccctc

SEQ ID NO: 60358 - RNA, 20 nt, synthetic construct
  source 1..20: mol_type = other RNA
tttgacttctcagggcctgc

SEQ ID NO: 60359 - RNA, 20 nt, synthetic construct
  source 1..20: mol_type = other RNA
tttgagaaaggtttcttcac

SEQ ID NO: 60360 - RNA, 20 nt, synthetic construct
  source 1..20: mol_type = other RNA
tttgagaagccacacagtac

SEQ ID NO: 60361 - RNA, 20 nt, synthetic construct
  source 1..20: mol_type = other RNA
tttgagaagtcttttcctac

SEQ ID NO: 60362 - RNA, 20 nt, synthetic construct
  source 1..20: mol_type = other RNA
tttgagaatttcaggtgtgt

SEQ ID NO: 60363 - RNA, 20 nt, synthetic construct
  source 1..20: mol_type = other RNA
tttgagacacggtctcacac

SEQ ID NO: 60364 - RNA, 20 nt, synthetic construct
  source 1..20: mol_type = other RNA
tttgagacagattctctgtc

SEQ ID NO: 60365 - RNA, 20 nt, synthetic construct
  source 1..20: mol_type = other RNA
tttgagacagggtctcactc

SEQ ID NO: 60366 - RNA, 20 nt, synthetic construct
  source 1..20: mol_type = other RNA
tttgagaccagcgtgggcaa

SEQ ID NO: 60367 - RNA, 20 nt, synthetic construct
  source 1..20: mol_type = other RNA
tttgagacctcaggcagtct

SEQ ID NO: 60368 - RNA, 20 nt, synthetic construct
  source 1..20: mol_type = other RNA
tttgagacggaatcttaccc

SEQ ID NO: 60369 - RNA, 20 nt, synthetic construct
  source 1..20: mol_type = other RNA
tttgagactgcagtgaccta

SEQ ID NO: 60370 - RNA, 20 nt, synthetic construct
  source 1..20: mol_type = other RNA
tttgagagtaagttgcatac

SEQ ID NO: 60371 - RNA, 20 nt, synthetic construct
  source 1..20: mol_type = other RNA
tttgagagtgcagtatgtag

SEQ ID NO: 60372 - RNA, 20 nt, synthetic construct
  source 1..20: mol_type = other RNA
tttgagatttgagtcttgct

SEQ ID NO: 60373 - RNA, 20 nt, synthetic construct
  source 1..20: mol_type = other RNA
tttgagcagagtcctgaggg

SEQ ID NO: 60374 - RNA, 20 nt, synthetic construct
  source 1..20: mol_type = other RNA
tttgagcccaggaggttgaa

SEQ ID NO: 60375 - RNA, 20 nt, synthetic construct
  source 1..20: mol_type = other RNA
tttgagctacaaactccaaa

SEQ ID NO: 60376 - RNA, 20 nt, synthetic construct
  source 1..20: mol_type = other RNA
tttgagctgaaagtaaagat

SEQ ID NO: 60377 - RNA, 20 nt, synthetic construct
  source 1..20: mol_type = other RNA
tttgaggcagagagatggtg

SEQ ID NO: 60378 - RNA, 20 nt, synthetic construct
  source 1..20: mol_type = other RNA
tttgaggcattagtgaattc

SEQ ID NO: 60379 - RNA, 20 nt, synthetic construct
  source 1..20: mol_type = other RNA
tttgaggccctattcaacct

SEQ ID NO: 60380 - RNA, 20 nt, synthetic construct
  source 1..20: mol_type = other RNA
tttgaggccgcagtgagcca

SEQ ID NO: 60381 - RNA, 20 nt, synthetic construct
  source 1..20: mol_type = other RNA
tttgaggctgggagtacaag

SEQ ID NO: 60382 - RNA, 20 nt, synthetic construct
  source 1..20: mol_type = other RNA
tttgaggcttttcatagtca

SEQ ID NO: 60383 - RNA, 20 nt, synthetic construct
  source 1..20: mol_type = other RNA
tttgaggcttttggattttc

SEQ ID NO: 60384 - RNA, 20 nt, synthetic construct
  source 1..20: mol_type = other RNA
tttgagggtatcatattatt

SEQ ID NO: 60385 - RNA, 20 nt, synthetic construct
  source 1..20: mol_type = other RNA
tttgagggtgctgatcagga

SEQ ID NO: 60386 - RNA, 20 nt, synthetic construct
  source 1..20: mol_type = other RNA
tttgagggttagaagacaat

SEQ ID NO: 60387 - RNA, 20 nt, synthetic construct
  source 1..20: mol_type = other RNA
tttgaggtaagaacttgtct

SEQ ID NO: 60388 - RNA, 20 nt, synthetic construct
  source 1..20: mol_type = other RNA
tttgaggtagcacaactagt

SEQ ID NO: 60389 - RNA, 20 nt, synthetic construct
  source 1..20: mol_type = other RNA
tttgaggtctaggctaatgt

SEQ ID NO: 60390 - RNA, 20 nt, synthetic construct
  source 1..20: mol_type = other RNA
tttgaggtcttctagctttc

SEQ ID NO: 60391 - RNA, 20 nt, synthetic construct
  source 1..20: mol_type = other RNA
tttgaggtgtacaattaggc

SEQ ID NO: 60392 - RNA, 20 nt, synthetic construct
  source 1..20: mol_type = other RNA
tttgagtaactaaactattg

SEQ ID NO: 60393 - RNA, 20 nt, synthetic construct
  source 1..20: mol_type = other RNA
tttgagtagcaccctattta

SEQ ID NO: 60394 - RNA, 20 nt, synthetic construct
  source 1..20: mol_type = other RNA
tttgagtagttcatgttagc

SEQ ID NO: 60395 - RNA, 20 nt, synthetic construct
  source 1..20: mol_type = other RNA
tttgagtatttcatgtactt

SEQ ID NO: 60396 - RNA, 20 nt, synthetic construct
  source 1..20: mol_type = other RNA
tttgagtcttgctctcttgc

SEQ ID NO: 60397 - RNA, 20 nt, synthetic construct
  source 1..20: mol_type = other RNA
tttgagtggcatcatactgg

SEQ ID NO: 60398 - RNA, 20 nt, synthetic construct
  source 1..20: mol_type = other RNA
tttgagtgtaaggtgtttgg

SEQ ID NO: 60399 - RNA, 20 nt, synthetic construct
  source 1..20: mol_type = other RNA
tttgagttattgcataggga

SEQ ID NO: 60400 - RNA, 20 nt, synthetic construct
  source 1..20: mol_type = other RNA
tttgagttcagaaagattaa

SEQ ID NO: 60401 - RNA, 20 nt, synthetic construct
  source 1..20: mol_type = other RNA
tttgagttcagttttgtata

SEQ ID NO: 60402 - RNA, 20 nt, synthetic construct
  source 1..20: mol_type = other RNA
tttgagttgtttccactttg

SEQ ID NO: 60403 - RNA, 20 nt, synthetic construct
  source 1..20: mol_type = other RNA
tttgagtttccagaaaactg

SEQ ID NO: 60404 - RNA, 20 nt, synthetic construct
  source 1..20: mol_type = other RNA
tttgagtttggtgtatttag

SEQ ID NO: 60405 - RNA, 20 nt, synthetic construct
  source 1..20: mol_type = other RNA
tttgataaaaatctctacag

SEQ ID NO: 60406 - RNA, 20 nt, synthetic construct
  source 1..20: mol_type = other RNA
tttgatagttgcagattcat

SEQ ID NO: 60407 - RNA, 20 nt, synthetic construct
  source 1..20: mol_type = other RNA
tttgatcatacacatccaga

SEQ ID NO: 60408 - RNA, 20 nt, synthetic construct
  source 1..20: mol_type = other RNA
tttgatcatcgcattacgag

SEQ ID NO: 60409 - RNA, 20 nt, synthetic construct
  source 1..20: mol_type = other RNA
tttgatccattttgagttca

SEQ ID NO: 60410 - RNA, 20 nt, synthetic construct
  source 1..20: mol_type = other RNA
tttgatcccactagtggaag

SEQ ID NO: 60411 - RNA, 20 nt, synthetic construct
  source 1..20: mol_type = other RNA
tttgatcctggaatagtagc

SEQ ID NO: 60412 - RNA, 20 nt, synthetic construct
  source 1..20: mol_type = other RNA
tttgatctggtcacaaacac

SEQ ID NO: 60413 - RNA, 20 nt, synthetic construct
  source 1..20: mol_type = other RNA
tttgatgaattccagtttat

SEQ ID NO: 60414 - RNA, 20 nt, synthetic construct
  source 1..20: mol_type = other RNA
tttgatgacttacagatatc

SEQ ID NO: 60415 - RNA, 20 nt, synthetic construct
  source 1..20: mol_type = other RNA
tttgatgcacaaaagtttaa

SEQ ID NO: 60416 - RNA, 20 nt, synthetic construct
  source 1..20: mol_type = other RNA
tttgatgcccccaccctttt

SEQ ID NO: 60417 - RNA, 20 nt, synthetic construct
  source 1..20: mol_type = other RNA
tttgatgttttacattttcc

SEQ ID NO: 60418 - RNA, 20 nt, synthetic construct
  source 1..20: mol_type = other RNA
tttgattactgactcaatct

SEQ ID NO: 60419 - RNA, 20 nt, synthetic construct
  source 1..20: mol_type = other RNA
tttgattagttgactcctaa

SEQ ID NO: 60420 - RNA, 20 nt, synthetic construct
  source 1..20: mol_type = other RNA
tttgattatgttagatatcc

SEQ ID NO: 60421 - RNA, 20 nt, synthetic construct
  source 1..20: mol_type = other RNA
tttgattgccagttttctgg

SEQ ID NO: 60422 - RNA, 20 nt, synthetic construct
  source 1..20: mol_type = other RNA
tttgattgggcattaattga

SEQ ID NO: 60423 - RNA, 20 nt, synthetic construct
  source 1..20: mol_type = other RNA
tttgattgttagccacagcg

SEQ ID NO: 60424 - RNA, 20 nt, synthetic construct
  source 1..20: mol_type = other RNA
tttgattgttccagggggga

SEQ ID NO: 60425 - RNA, 20 nt, synthetic construct
  source 1..20: mol_type = other RNA
tttgatttcttctttggctc

SEQ ID NO: 60426 - RNA, 20 nt, synthetic construct
  source 1..20: mol_type = other RNA
tttgatttgcatttctctaa

SEQ ID NO: 60427 - RNA, 20 nt, synthetic construct
  source 1..20: mol_type = other RNA
tttgcaaaaattttgttcag

SEQ ID NO: 60428 - RNA, 20 nt, synthetic construct
  source 1..20: mol_type = other RNA
tttgcaaaccaaatgcagaa

SEQ ID NO: 60429 - RNA, 20 nt, synthetic construct
  source 1..20: mol_type = other RNA
tttgcaacagaataaatgaa

SEQ ID NO: 60430 - RNA, 20 nt, synthetic construct
  source 1..20: mol_type = other RNA
tttgcaagatgcataagttc

SEQ ID NO: 60431 - RNA, 20 nt, synthetic construct
  source 1..20: mol_type = other RNA
tttgcaagattaatcttgtg

SEQ ID NO: 60432 - RNA, 20 nt, synthetic construct
  source 1..20: mol_type = other RNA
tttgcaatacagttaacgta

SEQ ID NO: 60433 - RNA, 20 nt, synthetic construct
  source 1..20: mol_type = other RNA
tttgcacacaccaaatcatg

SEQ ID NO: 60434 - RNA, 20 nt, synthetic construct
  source 1..20: mol_type = other RNA
tttgcacgtttttagaaatt

SEQ ID NO: 60435 - RNA, 20 nt, synthetic construct
  source 1..20: mol_type = other RNA
tttgcactggcacagcactg

SEQ ID NO: 60436 - RNA, 20 nt, synthetic construct
  source 1..20: mol_type = other RNA
tttgcagagacggggtccca

SEQ ID NO: 60437 - RNA, 20 nt, synthetic construct
  source 1..20: mol_type = other RNA
tttgcagagcaaactcagat

SEQ ID NO: 60438 - RNA, 20 nt, synthetic construct
  source 1..20: mol_type = other RNA
tttgcagtagtattgaactg

SEQ ID NO: 60439 - RNA, 20 nt, synthetic construct
  source 1..20: mol_type = other RNA
tttgcagttggggactctta

SEQ ID NO: 60440 - RNA, 20 nt, synthetic construct
  source 1..20: mol_type = other RNA
tttgcattacatgaatggaa

SEQ ID NO: 60441 - RNA, 20 nt, synthetic construct
  source 1..20: mol_type = other RNA
tttgcattcctgaaatgaac

SEQ ID NO: 60442 - RNA, 20 nt, synthetic construct
  source 1..20: mol_type = other RNA
tttgcatttctctaatagct

SEQ ID NO: 60443 - RNA, 20 nt, synthetic construct
  source 1..20: mol_type = other RNA
tttgccaaaatgattttcac

SEQ ID NO: 60444 - RNA, 20 nt, synthetic construct
  source 1..20: mol_type = other RNA
tttgccaaagattcttgtca

SEQ ID NO: 60445 - RNA, 20 nt, synthetic construct
  source 1..20: mol_type = other RNA
tttgccaaattatttgagag

SEQ ID NO: 60446 - RNA, 20 nt, synthetic construct
  source 1..20: mol_type = other RNA
tttgccaagtataagatgat

SEQ ID NO: 60447 - RNA, 20 nt, synthetic construct
  source 1..20: mol_type = other RNA
tttgccaatcaataattctg

SEQ ID NO: 60448 - RNA, 20 nt, synthetic construct
  source 1..20: mol_type = other RNA
tttgccacattttaccaaaa

SEQ ID NO: 60449 - RNA, 20 nt, synthetic construct
  source 1..20: mol_type = other RNA
tttgccagctaacttttaac

SEQ ID NO: 60450 - RNA, 20 nt, synthetic construct
  source 1..20: mol_type = other RNA
tttgccagtgttttaaagca

SEQ ID NO: 60451 - RNA, 20 nt, synthetic construct
  source 1..20: mol_type = other RNA
tttgccatcttcaagatttc

SEQ ID NO: 60452 - RNA, 20 nt, synthetic construct
  source 1..20: mol_type = other RNA
tttgcccactcttatatcct

SEQ ID NO: 60453 - RNA, 20 nt, synthetic construct
  source 1..20: mol_type = other RNA
tttgcctaagtctcaggata

SEQ ID NO: 60454 - RNA, 20 nt, synthetic construct
  source 1..20: mol_type = other RNA
tttgcctattctggggctca

SEQ ID NO: 60455 - RNA, 20 nt, synthetic construct
  source 1..20: mol_type = other RNA
tttgcctcctgggttcaggt

SEQ ID NO: 60456 - RNA, 20 nt, synthetic construct
  source 1..20: mol_type = other RNA
tttgcctctccagggaggaa

SEQ ID NO: 60457 - RNA, 20 nt, synthetic construct
  source 1..20: mol_type = other RNA
tttgcctctttgctaataag

SEQ ID NO: 60458 - RNA, 20 nt, synthetic construct
  source 1..20: mol_type = other RNA
tttgcctgcgtccgtagacc

SEQ ID NO: 60459 - RNA, 20 nt, synthetic construct
  source 1..20: mol_type = other RNA
tttgcctggatgaatgcagt

SEQ ID NO: 60460 - RNA, 20 nt, synthetic construct
  source 1..20: mol_type = other RNA
tttgcctttcactttgatca

SEQ ID NO: 60461 - RNA, 20 nt, synthetic construct
  source 1..20: mol_type = other RNA
tttgcctttcgcttttggag

SEQ ID NO: 60462 - RNA, 20 nt, synthetic construct
  source 1..20: mol_type = other RNA
tttgccttttcactcttagt

SEQ ID NO: 60463 - RNA, 20 nt, synthetic construct
  source 1..20: mol_type = other RNA
tttgcgaaacacactcgtgt

SEQ ID NO: 60464 - RNA, 20 nt, synthetic construct
  source 1..20: mol_type = other RNA
tttgcgaaatagtagttgct

SEQ ID NO: 60465 - RNA, 20 nt, synthetic construct
  source 1..20: mol_type = other RNA
tttgcggcttgattagcttc

SEQ ID NO: 60466 - RNA, 20 nt, synthetic construct
  source 1..20: mol_type = other RNA
tttgcgtctgtgattatcag

SEQ ID NO: 60467 - RNA, 20 nt, synthetic construct
  source 1..20: mol_type = other RNA
tttgctaataagtgagtttg

SEQ ID NO: 60468 - RNA, 20 nt, synthetic construct
  source 1..20: mol_type = other RNA
tttgctaataatgatgacta

SEQ ID NO: 60469 - RNA, 20 nt, synthetic construct
  source 1..20: mol_type = other RNA
tttgctagagctgctgtaac

SEQ ID NO: 60470 - RNA, 20 nt, synthetic construct
  source 1..20: mol_type = other RNA
tttgctagtattttgttgac

SEQ ID NO: 60471 - RNA, 20 nt, synthetic construct
  source 1..20: mol_type = other RNA
tttgctagtggtaactagat

SEQ ID NO: 60472 - RNA, 20 nt, synthetic construct
  source 1..20: mol_type = other RNA
tttgctcacacttactaaat

SEQ ID NO: 60473 - RNA, 20 nt, synthetic construct
  source 1..20: mol_type = other RNA
tttgctctgcaaatgaggtt

SEQ ID NO: 60474 - RNA, 20 nt, synthetic construct
  source 1..20: mol_type = other RNA
tttgctgagggaatttttct

SEQ ID NO: 60475 - RNA, 20 nt, synthetic construct
  source 1..20: mol_type = other RNA
tttgctgcatcccaagggtt

SEQ ID NO: 60476 - RNA, 20 nt, synthetic construct
  source 1..20: mol_type = other RNA
tttgctgccaagtcagcact

SEQ ID NO: 60477 - RNA, 20 nt, synthetic construct
  source 1..20: mol_type = other RNA
tttgctgccccagctaaaat

SEQ ID NO: 60478 - RNA, 20 nt, synthetic construct
  source 1..20: mol_type = other RNA
tttgctggctcagtctgttt

SEQ ID NO: 60479 - RNA, 20 nt, synthetic construct
  source 1..20: mol_type = other RNA
tttgctgtataacattttct

SEQ ID NO: 60480 - RNA, 20 nt, synthetic construct
  source 1..20: mol_type = other RNA
tttgctgtatacccaggtgt

SEQ ID NO: 60481 - RNA, 20 nt, synthetic construct
  source 1..20: mol_type = other RNA
tttgctgtcaggcaagggac

SEQ ID NO: 60482 - RNA, 20 nt, synthetic construct
  source 1..20: mol_type = other RNA
tttgcttaaagttggtcctg

SEQ ID NO: 60483 - RNA, 20 nt, synthetic construct
  source 1..20: mol_type = other RNA
tttgcttactgtagcattga

SEQ ID NO: 60484 - RNA, 20 nt, synthetic construct
  source 1..20: mol_type = other RNA
tttgcttaggctgttattag

SEQ ID NO: 60485 - RNA, 20 nt, synthetic construct
  source 1..20: mol_type = other RNA
tttgcttcccacttcgaaag

SEQ ID NO: 60486 - RNA, 20 nt, synthetic construct
  source 1..20: mol_type = other RNA
tttgcttcgaagcttattaa

SEQ ID NO: 60487 - RNA, 20 nt, synthetic construct
  source 1..20: mol_type = other RNA
tttgctttactactgcattt

SEQ ID NO: 60488 - RNA, 20 nt, synthetic construct
  source 1..20: mol_type = other RNA
tttgctttggagtcacagtg

SEQ ID NO: 60489 - RNA, 20 nt, synthetic construct
  source 1..20: mol_type = other RNA
tttgctttggagtgagagga

SEQ ID NO: 60490 - RNA, 20 nt, synthetic construct
  source 1..20: mol_type = other RNA
tttgctttgggtctatagtt

SEQ ID NO: 60491 - RNA, 20 nt, synthetic construct
  source 1..20: mol_type = other RNA
tttgcttttcctggaaaact

SEQ ID NO: 60492 - RNA, 20 nt, synthetic construct
  source 1..20: mol_type = other RNA
tttgcttttgctttgggtct

SEQ ID NO: 60493 - RNA, 20 nt, synthetic construct
  source 1..20: mol_type = other RNA
tttggaaaaatgtccgttga

SEQ ID NO: 60494 - RNA, 20 nt, synthetic construct
  source 1..20: mol_type = other RNA
tttggaaagggtagagcact

SEQ ID NO: 60495 - RNA, 20 nt, synthetic construct
  source 1..20: mol_type = other RNA
tttggaaatatggtcactgc

SEQ ID NO: 60496 - RNA, 20 nt, synthetic construct
  source 1..20: mol_type = other RNA
tttggaaccagcctggccaa

SEQ ID NO: 60497 - RNA, 20 nt, synthetic construct
  source 1..20: mol_type = other RNA
tttggaagactatgagaagg

SEQ ID NO: 60498 - RNA, 20 nt, synthetic construct
  source 1..20: mol_type = other RNA
tttggaagagagaaggctgc

SEQ ID NO: 60499 - RNA, 20 nt, synthetic construct
  source 1..20: mol_type = other RNA
tttggaagcatgtggccagg

SEQ ID NO: 60500 - RNA, 20 nt, synthetic construct
  source 1..20: mol_type = other RNA
tttggaaggtaggagggtgt

SEQ ID NO: 60501 - RNA, 20 nt, synthetic construct
  source 1..20: mol_type = other RNA
tttggaatagagagcccaga

SEQ ID NO: 60502 - RNA, 20 nt, synthetic construct
  source 1..20: mol_type = other RNA
tttggaattaaaatgttgcc

SEQ ID NO: 60503 - RNA, 20 nt, synthetic construct
  source 1..20: mol_type = other RNA
tttggaatttaaggggtaaa

SEQ ID NO: 60504 - RNA, 20 nt, synthetic construct
  source 1..20: mol_type = other RNA
tttggagctataatttatct

SEQ ID NO: 60505 - RNA, 20 nt, synthetic construct
  source 1..20: mol_type = other RNA
tttggagctgtatttttgct

SEQ ID NO: 60506 - RNA, 20 nt, synthetic construct
  source 1..20: mol_type = other RNA
tttggagtcacagtgaattc

SEQ ID NO: 60507 - RNA, 20 nt, synthetic construct
  source 1..20: mol_type = other RNA
tttggagtgagaggactgcc

SEQ ID NO: 60508 - RNA, 20 nt, synthetic construct
  source 1..20: mol_type = other RNA
tttggagtttgtagctcaaa

SEQ ID NO: 60509 - RNA, 20 nt, synthetic construct
  source 1..20: mol_type = other RNA
tttggatatccccatttttc

SEQ ID NO: 60510 - RNA, 20 nt, synthetic construct
  source 1..20: mol_type = other RNA
tttggatgaaaaagtactgg

SEQ ID NO: 60511 - RNA, 20 nt, synthetic construct
  source 1..20: mol_type = other RNA
tttggatgaacgctaaatta

SEQ ID NO: 60512 - RNA, 20 nt, synthetic construct
  source 1..20: mol_type = other RNA
tttggatgcagatttctttt

SEQ ID NO: 60513 - RNA, 20 nt, synthetic construct
  source 1..20: mol_type = other RNA
tttggattgcgattgtttca

SEQ ID NO: 60514 - RNA, 20 nt, synthetic construct
  source 1..20: mol_type = other RNA
tttggatttgagtaactaaa

SEQ ID NO: 60515 - RNA, 20 nt, synthetic construct
  source 1..20: mol_type = other RNA
tttggcaaaaaatgcagtag

SEQ ID NO: 60516 - RNA, 20 nt, synthetic construct
  source 1..20: mol_type = other RNA
tttggcaaacttagaatata

SEQ ID NO: 60517 - RNA, 20 nt, synthetic construct
  source 1..20: mol_type = other RNA
tttggcaaattgtcagattt

SEQ ID NO: 60518 - RNA, 20 nt, synthetic construct
  source 1..20: mol_type = other RNA
tttggcaatttctcaaaaat

SEQ ID NO: 60519 - RNA, 20 nt, synthetic construct
  source 1..20: mol_type = other RNA
tttggcagcgtaactccatc

SEQ ID NO: 60520 - RNA, 20 nt, synthetic construct
  source 1..20: mol_type = other RNA
tttggcagtttaagaattaa

SEQ ID NO: 60521 - RNA, 20 nt, synthetic construct
  source 1..20: mol_type = other RNA
tttggcatacaactgctcat

SEQ ID NO: 60522 - RNA, 20 nt, synthetic construct
  source 1..20: mol_type = other RNA
tttggccagaatccctttcg

SEQ ID NO: 60523 - RNA, 20 nt, synthetic construct
  source 1..20: mol_type = other RNA
tttggcccagccatcccatt

SEQ ID NO: 60524 - RNA, 20 nt, synthetic construct
  source 1..20: mol_type = other RNA
tttggcccatatccttttat

SEQ ID NO: 60525 - RNA, 20 nt, synthetic construct
  source 1..20: mol_type = other RNA
tttggcccattttcgaatta

SEQ ID NO: 60526 - RNA, 20 nt, synthetic construct
  source 1..20: mol_type = other RNA
tttggcctctgcggcggctg

SEQ ID NO: 60527 - RNA, 20 nt, synthetic construct
  source 1..20: mol_type = other RNA
tttggctactgtaaacaatg

SEQ ID NO: 60528 - RNA, 20 nt, synthetic construct
  source 1..20: mol_type = other RNA
tttggctagaagcatctgat

SEQ ID NO: 60529 - RNA, 20 nt, synthetic construct
  source 1..20: mol_type = other RNA
tttggctcaatggttaagac

SEQ ID NO: 60530 - RNA, 20 nt, synthetic construct
  source 1..20: mol_type = other RNA
tttggctcccatgattcaaa

SEQ ID NO: 60531 - RNA, 20 nt, synthetic construct
  source 1..20: mol_type = other RNA
tttggctccttaccactata

SEQ ID NO: 60532 - RNA, 20 nt, synthetic construct
  source 1..20: mol_type = other RNA
tttggctcttagaaaatata

SEQ ID NO: 60533 - RNA, 20 nt, synthetic construct
  source 1..20: mol_type = other RNA
tttggctgaaatgctgtaac

SEQ ID NO: 60534 - RNA, 20 nt, synthetic construct
  source 1..20: mol_type = other RNA
tttggctgggagcttatcag

SEQ ID NO: 60535 - RNA, 20 nt, synthetic construct
  source 1..20: mol_type = other RNA
tttggctgttaccatttgac

SEQ ID NO: 60536 - RNA, 20 nt, synthetic construct
  source 1..20: mol_type = other RNA
tttggctgttagccttgcca

SEQ ID NO: 60537 - RNA, 20 nt, synthetic construct
  source 1..20: mol_type = other RNA
tttggcttggggaacagttt

SEQ ID NO: 60538 - RNA, 20 nt, synthetic construct
  source 1..20: mol_type = other RNA
tttgggaaaatctctgactt

SEQ ID NO: 60539 - RNA, 20 nt, synthetic construct
  source 1..20: mol_type = other RNA
tttgggaaggatggccagtc

SEQ ID NO: 60540 - RNA, 20 nt, synthetic construct
  source 1..20: mol_type = other RNA
tttgggaaggccctgattga

SEQ ID NO: 60541 - RNA, 20 nt, synthetic construct
  source 1..20: mol_type = other RNA
tttgggaatgtggtcacact

SEQ ID NO: 60542 - RNA, 20 nt, synthetic construct
  source 1..20: mol_type = other RNA
tttgggactgagacagtatt

SEQ ID NO: 60543 - RNA, 20 nt, synthetic construct
  source 1..20: mol_type = other RNA
tttgggatatagctacaatg

SEQ ID NO: 60544 - RNA, 20 nt, synthetic construct
  source 1..20: mol_type = other RNA
tttgggatcacacttgatgg

SEQ ID NO: 60545 - RNA, 20 nt, synthetic construct
  source 1..20: mol_type = other RNA
tttgggatctgtcatgtttg

SEQ ID NO: 60546 - RNA, 20 nt, synthetic construct
  source 1..20: mol_type = other RNA
tttgggattagcttattctt

SEQ ID NO: 60547 - RNA, 20 nt, synthetic construct
  source 1..20: mol_type = other RNA
tttgggcctttctgtttgtt

SEQ ID NO: 60548 - RNA, 20 nt, synthetic construct
  source 1..20: mol_type = other RNA
tttggggagataccttgaaa

SEQ ID NO: 60549 - RNA, 20 nt, synthetic construct
  source 1..20: mol_type = other RNA
tttggggattctgctactag

SEQ ID NO: 60550 - RNA, 20 nt, synthetic construct
  source 1..20: mol_type = other RNA
tttggggccatctgaattca

SEQ ID NO: 60551 - RNA, 20 nt, synthetic construct
  source 1..20: mol_type = other RNA
tttggggctaggatttcagt

SEQ ID NO: 60552 - RNA, 20 nt, synthetic construct
  source 1..20: mol_type = other RNA
tttggggcttttgaacactc

SEQ ID NO: 60553 - RNA, 20 nt, synthetic construct
  source 1..20: mol_type = other RNA
tttgggggaagagagcattg

SEQ ID NO: 60554 - RNA, 20 nt, synthetic construct
  source 1..20: mol_type = other RNA
tttgggggaagcaggaactc

SEQ ID NO: 60555 - RNA, 20 nt, synthetic construct
  source 1..20: mol_type = other RNA
tttgggtaatttatctccat

SEQ ID NO: 60556 - RNA, 20 nt, synthetic construct
  source 1..20: mol_type = other RNA
tttgggtctatagtttaatt

SEQ ID NO: 60557 - RNA, 20 nt, synthetic construct
  source 1..20: mol_type = other RNA
tttgggtgacagagagagac

SEQ ID NO: 60558 - RNA, 20 nt, synthetic construct
  source 1..20: mol_type = other RNA
tttgggtttgagtttccaga

SEQ ID NO: 60559 - RNA, 20 nt, synthetic construct
  source 1..20: mol_type = other RNA
tttggtaaaatgtggcaaat

SEQ ID NO: 60560 - RNA, 20 nt, synthetic construct
  source 1..20: mol_type = other RNA
tttggtaatgggaaagacag

SEQ ID NO: 60561 - RNA, 20 nt, synthetic construct
  source 1..20: mol_type = other RNA
tttggtagaggattccaggt

SEQ ID NO: 60562 - RNA, 20 nt, synthetic construct
  source 1..20: mol_type = other RNA
tttggtagataccagaccct

SEQ ID NO: 60563 - RNA, 20 nt, synthetic construct
  source 1..20: mol_type = other RNA
tttggtagatttctgcatag

SEQ ID NO: 60564 - RNA, 20 nt, synthetic construct
  source 1..20: mol_type = other RNA
tttggtatgttgtgttttca

SEQ ID NO: 60565 - RNA, 20 nt, synthetic construct
  source 1..20: mol_type = other RNA
tttggtattcttatccctac

SEQ ID NO: 60566 - RNA, 20 nt, synthetic construct
  source 1..20: mol_type = other RNA
tttggtcaaaactgtatttt

SEQ ID NO: 60567 - RNA, 20 nt, synthetic construct
  source 1..20: mol_type = other RNA
tttggtcaattgatctgcca

SEQ ID NO: 60568 - RNA, 20 nt, synthetic construct
  source 1..20: mol_type = other RNA
tttggtctcattcactagac

SEQ ID NO: 60569 - RNA, 20 nt, synthetic construct
  source 1..20: mol_type = other RNA
tttggtcttaccctctagct

SEQ ID NO: 60570 - RNA, 20 nt, synthetic construct
  source 1..20: mol_type = other RNA
tttggtgaaggttcatgaac

SEQ ID NO: 60571 - RNA, 20 nt, synthetic construct
  source 1..20: mol_type = other RNA
tttggtgactgaattcccac

SEQ ID NO: 60572 - RNA, 20 nt, synthetic construct
  source 1..20: mol_type = other RNA
tttggtgatcctaagccatc

SEQ ID NO: 60573 - RNA, 20 nt, synthetic construct
  source 1..20: mol_type = other RNA
tttggtgctgataaatggct

SEQ ID NO: 60574 - RNA, 20 nt, synthetic construct
  source 1..20: mol_type = other RNA
tttggtgtcatttttaagaa

SEQ ID NO: 60575 - RNA, 20 nt, synthetic construct
  source 1..20: mol_type = other RNA
tttggtgtgtgcaaaggatt

SEQ ID NO: 60576 - RNA, 20 nt, synthetic construct
  source 1..20: mol_type = other RNA
tttggtgtttttctaggtag

SEQ ID NO: 60577 - RNA, 20 nt, synthetic construct
  source 1..20: mol_type = other RNA
tttggttatgcgaatttact

SEQ ID NO: 60578 - RNA, 20 nt, synthetic construct
  source 1..20: mol_type = other RNA
tttggttcacttgaaacctg

SEQ ID NO: 60579 - RNA, 20 nt, synthetic construct
  source 1..20: mol_type = other RNA
tttggtttgcaaaaattttg

SEQ ID NO: 60580 - RNA, 20 nt, synthetic construct
  source 1..20: mol_type = other RNA
tttggtttgtatgtgttaaa

SEQ ID NO: 60581 - RNA, 20 nt, synthetic construct
  source 1..20: mol_type = other RNA
tttggttttactactgtact

SEQ ID NO: 60582 - RNA, 20 nt, synthetic construct
  source 1..20: mol_type = other RNA
tttggttttgactcagtact

SEQ ID NO: 60583 - RNA, 20 nt, synthetic construct
  source 1..20: mol_type = other RNA
tttgtaaatgaaacacttgt

SEQ ID NO: 60584 - RNA, 20 nt, synthetic construct
  source 1..20: mol_type = other RNA
tttgtaacatgttagattag

SEQ ID NO: 60585 - RNA, 20 nt, synthetic construct
  source 1..20: mol_type = other RNA
tttgtaacgtgtatagcttt

SEQ ID NO: 60586 - RNA, 20 nt, synthetic construct
  source 1..20: mol_type = other RNA
tttgtaacttgttcatgttt

SEQ ID NO: 60587 - RNA, 20 nt, synthetic construct
  source 1..20: mol_type = other RNA
tttgtaataacttggagaac

SEQ ID NO: 60588 - RNA, 20 nt, synthetic construct
  source 1..20: mol_type = other RNA
tttgtaatatacttgtcaag

SEQ ID NO: 60589 - RNA, 20 nt, synthetic construct
  source 1..20: mol_type = other RNA
tttgtaatctaaggattatg

SEQ ID NO: 60590 - RNA, 20 nt, synthetic construct
  source 1..20: mol_type = other RNA
tttgtaattcatcctactag

SEQ ID NO: 60591 - RNA, 20 nt, synthetic construct
  source 1..20: mol_type = other RNA
tttgtacagtaattgtagtt

SEQ ID NO: 60592 - RNA, 20 nt, synthetic construct
  source 1..20: mol_type = other RNA
tttgtactacttgtcaggtg

SEQ ID NO: 60593 - RNA, 20 nt, synthetic construct
  source 1..20: mol_type = other RNA
tttgtacttctaccttgaaa

SEQ ID NO: 60594 - RNA, 20 nt, synthetic construct
  source 1..20: mol_type = other RNA
tttgtagaccctgttagtcc

SEQ ID NO: 60595 - RNA, 20 nt, synthetic construct
  source 1..20: mol_type = other RNA
tttgtagagacagaatctta

SEQ ID NO: 60596 - RNA, 20 nt, synthetic construct
  source 1..20: mol_type = other RNA
tttgtagagcaagcaacacc

SEQ ID NO: 60597 - RNA, 20 nt, synthetic construct
  source 1..20: mol_type = other RNA
tttgtagagggaatttgttt

SEQ ID NO: 60598 - RNA, 20 nt, synthetic construct
  source 1..20: mol_type = other RNA
tttgtagatattttctgtca

SEQ ID NO: 60599 - RNA, 20 nt, synthetic construct
  source 1..20: mol_type = other RNA
tttgtagctaatatctttgg

SEQ ID NO: 60600 - RNA, 20 nt, synthetic construct
  source 1..20: mol_type = other RNA
tttgtagctcaaagcatatg

SEQ ID NO: 60601 - RNA, 20 nt, synthetic construct
  source 1..20: mol_type = other RNA
tttgtagtgtcttaatccta

SEQ ID NO: 60602 - RNA, 20 nt, synthetic construct
  source 1..20: mol_type = other RNA
tttgtataaattactgtctg

SEQ ID NO: 60603 - RNA, 20 nt, synthetic construct
  source 1..20: mol_type = other RNA
tttgtatatggtttaaggta

SEQ ID NO: 60604 - RNA, 20 nt, synthetic construct
  source 1..20: mol_type = other RNA
tttgtatcctgagacttagg

SEQ ID NO: 60605 - RNA, 20 nt, synthetic construct
  source 1..20: mol_type = other RNA
tttgtatcctgtttgagaag

SEQ ID NO: 60606 - RNA, 20 nt, synthetic construct
  source 1..20: mol_type = other RNA
tttgtatcttcacaaacaaa

SEQ ID NO: 60607 - RNA, 20 nt, synthetic construct
  source 1..20: mol_type = other RNA
tttgtatgtgttaaaccatt

SEQ ID NO: 60608 - RNA, 20 nt, synthetic construct
  source 1..20: mol_type = other RNA
tttgtattatttctgtcatc

SEQ ID NO: 60609 - RNA, 20 nt, synthetic construct
  source 1..20: mol_type = other RNA
tttgtattcatccagtttaa

SEQ ID NO: 60610 - RNA, 20 nt, synthetic construct
  source 1..20: mol_type = other RNA
tttgtattctgacctaaagt

SEQ ID NO: 60611 - RNA, 20 nt, synthetic construct
  source 1..20: mol_type = other RNA
tttgtcaacttttagtaggt

SEQ ID NO: 60612 - RNA, 20 nt, synthetic construct
  source 1..20: mol_type = other RNA
tttgtcaagctatcagaatt

SEQ ID NO: 60613 - RNA, 20 nt, synthetic construct
  source 1..20: mol_type = other RNA
tttgtcaagtgactccaagc

SEQ ID NO: 60614 - RNA, 20 nt, synthetic construct
  source 1..20: mol_type = other RNA
tttgtcacacggaaaacatt

SEQ ID NO: 60615 - RNA, 20 nt, synthetic construct
  source 1..20: mol_type = other RNA
tttgtcacatagaagcgctc

SEQ ID NO: 60616 - RNA, 20 nt, synthetic construct
  source 1..20: mol_type = other RNA
tttgtcaggcatgctaactg

SEQ ID NO: 60617 - RNA, 20 nt, synthetic construct
  source 1..20: mol_type = other RNA
tttgtccaccagacaaaaat

SEQ ID NO: 60618 - RNA, 20 nt, synthetic construct
  source 1..20: mol_type = other RNA
tttgtccactgtcagtggga

SEQ ID NO: 60619 - RNA, 20 nt, synthetic construct
  source 1..20: mol_type = other RNA
tttgtccatctggattatag

SEQ ID NO: 60620 - RNA, 20 nt, synthetic construct
  source 1..20: mol_type = other RNA
tttgtctattccctacattg

SEQ ID NO: 60621 - RNA, 20 nt, synthetic construct
  source 1..20: mol_type = other RNA
tttgtctctggaaggctaag

SEQ ID NO: 60622 - RNA, 20 nt, synthetic construct
  source 1..20: mol_type = other RNA
tttgtctggaacacacatta

SEQ ID NO: 60623 - RNA, 20 nt, synthetic construct
  source 1..20: mol_type = other RNA
tttgtctggtggacaaaaaa

SEQ ID NO: 60624 - RNA, 20 nt, synthetic construct
  source 1..20: mol_type = other RNA
tttgtgaaccttgaagtact

SEQ ID NO: 60625 - RNA, 20 nt, synthetic construct
  source 1..20: mol_type = other RNA
tttgtgaagatacaaatagt

SEQ ID NO: 60626 - RNA, 20 nt, synthetic construct
  source 1..20: mol_type = other RNA
tttgtgaagggaggtaggct

SEQ ID NO: 60627 - RNA, 20 nt, synthetic construct
  source 1..20: mol_type = other RNA
tttgtgacaagttcagcatc

SEQ ID NO: 60628 - RNA, 20 nt, synthetic construct
  source 1..20: mol_type = other RNA
tttgtgaccagatcaaacgt

SEQ ID NO: 60629 - RNA, 20 nt, synthetic construct
  source 1..20: mol_type = other RNA
tttgtgactgtgagggtaag

SEQ ID NO: 60630 - RNA, 20 nt, synthetic construct
  source 1..20: mol_type = other RNA
tttgtgagttttaactcttg

SEQ ID NO: 60631 - RNA, 20 nt, synthetic construct
  source 1..20: mol_type = other RNA
tttgtgcaacataaataggg

SEQ ID NO: 60632 - RNA, 20 nt, synthetic construct
  source 1..20: mol_type = other RNA
tttgtgcaggtctgggtttt

SEQ ID NO: 60633 - RNA, 20 nt, synthetic construct
  source 1..20: mol_type = other RNA
tttgtgcatactgtgatgat

SEQ ID NO: 60634 - RNA, 20 nt, synthetic construct
  source 1..20: mol_type = other RNA
tttgtgcatcaaaggacact

SEQ ID NO: 60635 - RNA, 20 nt, synthetic construct
  source 1..20: mol_type = other RNA
tttgtgcttggatattctac

SEQ ID NO: 60636 - RNA, 20 nt, synthetic construct
  source 1..20: mol_type = other RNA
tttgtggagatggggacttg

SEQ ID NO: 60637 - RNA, 20 nt, synthetic construct
  source 1..20: mol_type = other RNA
tttgtggagtggaggggcag

SEQ ID NO: 60638 - RNA, 20 nt, synthetic construct
  source 1..20: mol_type = other RNA
tttgtggcatctttgttaca

SEQ ID NO: 60639 - RNA, 20 nt, synthetic construct
  source 1..20: mol_type = other RNA
tttgtggcctcttcccttgt

SEQ ID NO: 60640 - RNA, 20 nt, synthetic construct
  source 1..20: mol_type = other RNA
tttgtgggaattcagtcacc

SEQ ID NO: 60641 - RNA, 20 nt, synthetic construct
  source 1..20: mol_type = other RNA
tttgtgggtaaattaagtaa

SEQ ID NO: 60642 - RNA, 20 nt, synthetic construct
  source 1..20: mol_type = other RNA
tttgtggttttaacctcttg

SEQ ID NO: 60643 - RNA, 20 nt, synthetic construct
  source 1..20: mol_type = other RNA
tttgtgtagaggtgaagtta

SEQ ID NO: 60644 - RNA, 20 nt, synthetic construct
  source 1..20: mol_type = other RNA
tttgtgtatatggtaaaatg

SEQ ID NO: 60645 - RNA, 20 nt, synthetic construct
  source 1..20: mol_type = other RNA
tttgtgtcaagtacaactaa

SEQ ID NO: 60646 - RNA, 20 nt, synthetic construct
  source 1..20: mol_type = other RNA
tttgtgtcttctgtttttct

SEQ ID NO: 60647 - RNA, 20 nt, synthetic construct
  source 1..20: mol_type = other RNA
tttgtgtgtttgtgaaaaat

SEQ ID NO: 60648 - RNA, 20 nt, synthetic construct
  source 1..20: mol_type = other RNA
tttgtgttggtgtttctgac

SEQ ID NO: 60649 - RNA, 20 nt, synthetic construct
  source 1..20: mol_type = other RNA
tttgtgtttgtgaccagatc

SEQ ID NO: 60650 - RNA, 20 nt, synthetic construct
  source 1..20: mol_type = other RNA
tttgtgttttcactctcaat

SEQ ID NO: 60651 - RNA, 20 nt, synthetic construct
  source 1..20: mol_type = other RNA
tttgttacagcagctctagc

SEQ ID NO: 60652 - RNA, 20 nt, synthetic construct
  source 1..20: mol_type = other RNA
tttgttactgatctgctcaa

SEQ ID NO: 60653 - RNA, 20 nt, synthetic construct
  source 1..20: mol_type = other RNA
tttgttagatctgggataat

SEQ ID NO: 60654 - RNA, 20 nt, synthetic construct
  source 1..20: mol_type = other RNA
tttgttagtgccttcagaag

SEQ ID NO: 60655 - RNA, 20 nt, synthetic construct
  source 1..20: mol_type = other RNA
tttgttagtttattcatacg

SEQ ID NO: 60656 - RNA, 20 nt, synthetic construct
  source 1..20: mol_type = other RNA
tttgttatatccagattgat

SEQ ID NO: 60657 - RNA, 20 nt, synthetic construct
  source 1..20: mol_type = other RNA
tttgttatctgaacgtcttt

SEQ ID NO: 60658 - RNA, 20 nt, synthetic construct
  source 1..20: mol_type = other RNA
tttgttatggtaggtgcttt

SEQ ID NO: 60659 - RNA, 20 nt, synthetic construct
  source 1..20: mol_type = other RNA
tttgttatgtacattttacc

SEQ ID NO: 60660 - RNA, 20 nt, synthetic construct
  source 1..20: mol_type = other RNA
tttgttcaaaatacagtgtt

SEQ ID NO: 60661 - RNA, 20 nt, synthetic construct
  source 1..20: mol_type = other RNA
tttgttcaagcgctgaagta

SEQ ID NO: 60662 - RNA, 20 nt, synthetic construct
  source 1..20: mol_type = other RNA
tttgttcagaaatagactcc

SEQ ID NO: 60663 - RNA, 20 nt, synthetic construct
  source 1..20: mol_type = other RNA
tttgttcaggagttttgcct

SEQ ID NO: 60664 - RNA, 20 nt, synthetic construct
  source 1..20: mol_type = other RNA
tttgttcatcatcttttgcc

SEQ ID NO: 60665 - RNA, 20 nt, synthetic construct
  source 1..20: mol_type = other RNA
tttgttcattcatctgttaa

SEQ ID NO: 60666 - RNA, 20 nt, synthetic construct
  source 1..20: mol_type = other RNA
tttgttctaatttgtgaacc

SEQ ID NO: 60667 - RNA, 20 nt, synthetic construct
  source 1..20: mol_type = other RNA
tttgttctcgttcatgttca

SEQ ID NO: 60668 - RNA, 20 nt, synthetic construct
  source 1..20: mol_type = other RNA
tttgttctgctgttgatgga

SEQ ID NO: 60669 - RNA, 20 nt, synthetic construct
  source 1..20: mol_type = other RNA
tttgttctgtcacatttgaa

SEQ ID NO: 60670 - RNA, 20 nt, synthetic construct
  source 1..20: mol_type = other RNA
tttgttctgtcacggtgccc

SEQ ID NO: 60671 - RNA, 20 nt, synthetic construct
  source 1..20: mol_type = other RNA
tttgttgaaaacgaggaaaa

SEQ ID NO: 60672 - RNA, 20 nt, synthetic construct
  source 1..20: mol_type = other RNA
tttgttgacatcctttgcgt

SEQ ID NO: 60673 - RNA, 20 nt, synthetic construct
  source 1..20: mol_type = other RNA
tttgttgacccaatcatgtt

SEQ ID NO: 60674 - RNA, 20 nt, synthetic construct
  source 1..20: mol_type = other RNA
tttgttgcatccccattcaa

SEQ ID NO: 60675 - RNA, 20 nt, synthetic construct
  source 1..20: mol_type = other RNA
tttgttgccaggtggacgcg

SEQ ID NO: 60676 - RNA, 20 nt, synthetic construct
  source 1..20: mol_type = other RNA
tttgttgcctgtagttttgg

SEQ ID NO: 60677 - RNA, 20 nt, synthetic construct
  source 1..20: mol_type = other RNA
tttgttgctattgttgaatt

SEQ ID NO: 60678 - RNA, 20 nt, synthetic construct
  source 1..20: mol_type = other RNA
tttgttgggtttaactgagg

SEQ ID NO: 60679 - RNA, 20 nt, synthetic construct
  source 1..20: mol_type = other RNA
tttgttgttggtttgtgtgt

SEQ ID NO: 60680 - RNA, 20 nt, synthetic construct
  source 1..20: mol_type = other RNA
tttgttgttgttgtttctga

SEQ ID NO: 60681 - RNA, 20 nt, synthetic construct
  source 1..20: mol_type = other RNA
tttgtttaattagccgggtg

SEQ ID NO: 60682 - RNA, 20 nt, synthetic construct
  source 1..20: mol_type = other RNA
tttgtttagtagctgtcttt

SEQ ID NO: 60683 - RNA, 20 nt, synthetic construct
  source 1..20: mol_type = other RNA
tttgtttatccttgcaccaa

SEQ ID NO: 60684 - RNA, 20 nt, synthetic construct
  source 1..20: mol_type = other RNA
tttgtttatttgctgtcagg

SEQ ID NO: 60685 - RNA, 20 nt, synthetic construct
  source 1..20: mol_type = other RNA
tttgtttctgaggtggagtt

SEQ ID NO: 60686 - RNA, 20 nt, synthetic construct
  source 1..20: mol_type = other RNA
tttgtttgaattaagcacca

SEQ ID NO: 60687 - RNA, 20 nt, synthetic construct
  source 1..20: mol_type = other RNA
tttgtttgctagagctgctg

SEQ ID NO: 60688 - RNA, 20 nt, synthetic construct
  source 1..20: mol_type = other RNA
tttgtttgtgaagatacaaa

SEQ ID NO: 60689 - RNA, 20 nt, synthetic construct
  source 1..20: mol_type = other RNA
tttgtttgtttctgaggtgg

SEQ ID NO: 60690 - RNA, 20 nt, synthetic construct
  source 1..20: mol_type = other RNA
tttgttttaccatctaaagc

SEQ ID NO: 60691 - RNA, 20 nt, synthetic construct
  source 1..20: mol_type = other RNA
tttgttttccaagccttaaa

SEQ ID NO: 60692 - RNA, 20 nt, synthetic construct
  source 1..20: mol_type = other RNA
tttgttttctccttctggaa

SEQ ID NO: 60693 - RNA, 20 nt, synthetic construct
  source 1..20: mol_type = other RNA
tttgttttgaataacctcat

SEQ ID NO: 60694 - RNA, 20 nt, synthetic construct
  source 1..20: mol_type = other RNA
tttgttttggtcaaaactgt

SEQ ID NO: 60695 - RNA, 20 nt, synthetic construct
  source 1..20: mol_type = other RNA
tttgttttgtgtttgtgacc

SEQ ID NO: 60696 - RNA, 20 nt, synthetic construct
  source 1..20: mol_type = other RNA
tttgttttgtttttctctcc

SEQ ID NO: 60697 - RNA, 20 nt, synthetic construct
  source 1..20: mol_type = other RNA
tttgttttgttttttcacag

SEQ ID NO: 60698 - RNA, 20 nt, synthetic construct
  source 1..20: mol_type = other RNA
tttgtttttctctccttgca

SEQ ID NO: 60699 - RNA, 20 nt, synthetic construct
  source 1..20: mol_type = other RNA
tttgttttttcacagaaaca

SEQ ID NO: 60700 - RNA, 20 nt, synthetic construct
  source 1..20: mol_type = other RNA
tttgttttttgttttggtca

SEQ ID NO: 60701 - RNA, 20 nt, synthetic construct
  source 1..20: mol_type = other RNA
ttttaaaaactttttgggcc

SEQ ID NO: 60702 - RNA, 20 nt, synthetic construct
  source 1..20: mol_type = other RNA
ttttaaaaagcagctacctg

SEQ ID NO: 60703 - RNA, 20 nt, synthetic construct
  source 1..20: mol_type = other RNA
ttttaaaagagcgaagaggg

SEQ ID NO: 60704 - RNA, 20 nt, synthetic construct
  source 1..20: mol_type = other RNA
ttttaaaagatatccacagt

SEQ ID NO: 60705 - RNA, 20 nt, synthetic construct
  source 1..20: mol_type = other RNA
ttttaaaagatgcattctgt

SEQ ID NO: 60706 - RNA, 20 nt, synthetic construct
  source 1..20: mol_type = other RNA
ttttaaaagtcagctaggcg

SEQ ID NO: 60707 - RNA, 20 nt, synthetic construct
  source 1..20: mol_type = other RNA
ttttaaacaggtgtaagaga

SEQ ID NO: 60708 - RNA, 20 nt, synthetic construct
  source 1..20: mol_type = other RNA
ttttaaacccatttcatgcc

SEQ ID NO: 60709 - RNA, 20 nt, synthetic construct
  source 1..20: mol_type = other RNA
ttttaaagaaaggtctctct

SEQ ID NO: 60710 - RNA, 20 nt, synthetic construct
  source 1..20: mol_type = other RNA
ttttaaagacctcaggttta

SEQ ID NO: 60711 - RNA, 20 nt, synthetic construct
  source 1..20: mol_type = other RNA
ttttaaagcagggaggggtc

SEQ ID NO: 60712 - RNA, 20 nt, synthetic construct
  source 1..20: mol_type = other RNA
ttttaaagggataatgctat

SEQ ID NO: 60713 - RNA, 20 nt, synthetic construct
  source 1..20: mol_type = other RNA
ttttaaatcagcaccatcta

SEQ ID NO: 60714 - RNA, 20 nt, synthetic construct
  source 1..20: mol_type = other RNA
ttttaaatgccaatttggga

SEQ ID NO: 60715 - RNA, 20 nt, synthetic construct
  source 1..20: mol_type = other RNA
ttttaaatgttttgcagaga

SEQ ID NO: 60716 - RNA, 20 nt, synthetic construct
  source 1..20: mol_type = other RNA
ttttaacagatggtcctttt

SEQ ID NO: 60717 - RNA, 20 nt, synthetic construct
  source 1..20: mol_type = other RNA
ttttaacccacagataattt

SEQ ID NO: 60718 - RNA, 20 nt, synthetic construct
  source 1..20: mol_type = other RNA
ttttaacctcttgaagtcag

SEQ ID NO: 60719 - RNA, 20 nt, synthetic construct
  source 1..20: mol_type = other RNA
ttttaactcttgcattagag

SEQ ID NO: 60720 - RNA, 20 nt, synthetic construct
  source 1..20: mol_type = other RNA
ttttaagaaaagaagttacg

SEQ ID NO: 60721 - RNA, 20 nt, synthetic construct
  source 1..20: mol_type = other RNA
ttttaagaaatcgttgtgaa

SEQ ID NO: 60722 - RNA, 20 nt, synthetic construct
  source 1..20: mol_type = other RNA
ttttaagaaccttcatacta

SEQ ID NO: 60723 - RNA, 20 nt, synthetic construct
  source 1..20: mol_type = other RNA
ttttaagagtgaagaaacct

SEQ ID NO: 60724 - RNA, 20 nt, synthetic construct
  source 1..20: mol_type = other RNA
ttttaagatggatttttctg

SEQ ID NO: 60725 - RNA, 20 nt, synthetic construct
  source 1..20: mol_type = other RNA
ttttaagattctctttaggg

SEQ ID NO: 60726 - RNA, 20 nt, synthetic construct
  source 1..20: mol_type = other RNA
ttttaagcctagagattagg

SEQ ID NO: 60727 - RNA, 20 nt, synthetic construct
  source 1..20: mol_type = other RNA
ttttaaggaaaagtcagtaa

SEQ ID NO: 60728 - RNA, 20 nt, synthetic construct
  source 1..20: mol_type = other RNA
ttttaaggcagggcttggtg

SEQ ID NO: 60729 - RNA, 20 nt, synthetic construct
  source 1..20: mol_type = other RNA
ttttaaggctaaaacataca

SEQ ID NO: 60730 - RNA, 20 nt, synthetic construct
  source 1..20: mol_type = other RNA
ttttaaggcttggaaaacaa

SEQ ID NO: 60731 - RNA, 20 nt, synthetic construct
  source 1..20: mol_type = other RNA
ttttaagggaaacactcata

SEQ ID NO: 60732 - RNA, 20 nt, synthetic construct
  source 1..20: mol_type = other RNA
ttttaagtggcgctgtttgc

SEQ ID NO: 60733 - RNA, 20 nt, synthetic construct
  source 1..20: mol_type = other RNA
ttttaagttctagggaacat

SEQ ID NO: 60734 - RNA, 20 nt, synthetic construct
  source 1..20: mol_type = other RNA
ttttaataagcttcgaagca

SEQ ID NO: 60735 - RNA, 20 nt, synthetic construct
  source 1..20: mol_type = other RNA
ttttaatactttcacactga

SEQ ID NO: 60736 - RNA, 20 nt, synthetic construct
  source 1..20: mol_type = other RNA
ttttaatcgaatcctcacaa

SEQ ID NO: 60737 - RNA, 20 nt, synthetic construct
  source 1..20: mol_type = other RNA
ttttaatctacaaaacaggg

SEQ ID NO: 60738 - RNA, 20 nt, synthetic construct
  source 1..20: mol_type = other RNA
ttttaatctgtcctgaatac

SEQ ID NO: 60739 - RNA, 20 nt, synthetic construct
  source 1..20: mol_type = other RNA
ttttaatgggcattagaagt

SEQ ID NO: 60740 - RNA, 20 nt, synthetic construct
  source 1..20: mol_type = other RNA
ttttaatgtagatcctgagg

SEQ ID NO: 60741 - RNA, 20 nt, synthetic construct
  source 1..20: mol_type = other RNA
ttttaattcttaaactgcca

SEQ ID NO: 60742 - RNA, 20 nt, synthetic construct
  source 1..20: mol_type = other RNA
ttttacacatgtcagccaca

SEQ ID NO: 60743 - RNA, 20 nt, synthetic construct
  source 1..20: mol_type = other RNA
ttttacaccatgcaggttca

SEQ ID NO: 60744 - RNA, 20 nt, synthetic construct
  source 1..20: mol_type = other RNA
ttttacaccctaggtagggt

SEQ ID NO: 60745 - RNA, 20 nt, synthetic construct
  source 1..20: mol_type = other RNA
ttttacacttggagttttcc

SEQ ID NO: 60746 - RNA, 20 nt, synthetic construct
  source 1..20: mol_type = other RNA
ttttacatgtagttttccct

SEQ ID NO: 60747 - RNA, 20 nt, synthetic construct
  source 1..20: mol_type = other RNA
ttttacatgtttaactatcc

SEQ ID NO: 60748 - RNA, 20 nt, synthetic construct
  source 1..20: mol_type = other RNA
ttttacattaaagacagcta

SEQ ID NO: 60749 - RNA, 20 nt, synthetic construct
  source 1..20: mol_type = other RNA
ttttaccaaaacagcttctt

SEQ ID NO: 60750 - RNA, 20 nt, synthetic construct
  source 1..20: mol_type = other RNA
ttttaccaaggctaagttga

SEQ ID NO: 60751 - RNA, 20 nt, synthetic construct
  source 1..20: mol_type = other RNA
ttttaccaagttgaatttct

SEQ ID NO: 60752 - RNA, 20 nt, synthetic construct
  source 1..20: mol_type = other RNA
ttttaccatctaaagccagg

SEQ ID NO: 60753 - RNA, 20 nt, synthetic construct
  source 1..20: mol_type = other RNA
ttttacccaacatgagagaa

SEQ ID NO: 60754 - RNA, 20 nt, synthetic construct
  source 1..20: mol_type = other RNA
ttttacccggagaggtgaac

SEQ ID NO: 60755 - RNA, 20 nt, synthetic construct
  source 1..20: mol_type = other RNA
ttttacccgtggaaatactt

SEQ ID NO: 60756 - RNA, 20 nt, synthetic construct
  source 1..20: mol_type = other RNA
ttttaccctcattttataag

SEQ ID NO: 60757 - RNA, 20 nt, synthetic construct
  source 1..20: mol_type = other RNA
ttttacgaggacagactgca

SEQ ID NO: 60758 - RNA, 20 nt, synthetic construct
  source 1..20: mol_type = other RNA
ttttacgatgaaattgacca

SEQ ID NO: 60759 - RNA, 20 nt, synthetic construct
  source 1..20: mol_type = other RNA
ttttactactgtactgttta

SEQ ID NO: 60760 - RNA, 20 nt, synthetic construct
  source 1..20: mol_type = other RNA
ttttactcatgtctacctgt

SEQ ID NO: 60761 - RNA, 20 nt, synthetic construct
  source 1..20: mol_type = other RNA
ttttactcgagggtagcttt

SEQ ID NO: 60762 - RNA, 20 nt, synthetic construct
  source 1..20: mol_type = other RNA
ttttactgacttttccttaa

SEQ ID NO: 60763 - RNA, 20 nt, synthetic construct
  source 1..20: mol_type = other RNA
ttttactgatcttttctgac

SEQ ID NO: 60764 - RNA, 20 nt, synthetic construct
  source 1..20: mol_type = other RNA
ttttactgctatacaaccgg

SEQ ID NO: 60765 - RNA, 20 nt, synthetic construct
  source 1..20: mol_type = other RNA
ttttactgtccaaacagtga

SEQ ID NO: 60766 - RNA, 20 nt, synthetic construct
  source 1..20: mol_type = other RNA
ttttacttaatttacccaca

SEQ ID NO: 60767 - RNA, 20 nt, synthetic construct
  source 1..20: mol_type = other RNA
ttttacttactagttgtgct

SEQ ID NO: 60768 - RNA, 20 nt, synthetic construct
  source 1..20: mol_type = other RNA
ttttacttgcttggtttcac

SEQ ID NO: 60769 - RNA, 20 nt, synthetic construct
  source 1..20: mol_type = other RNA
ttttacttggctcctcccgg

SEQ ID NO: 60770 - RNA, 20 nt, synthetic construct
  source 1..20: mol_type = other RNA
ttttactttgcgaaacacac

SEQ ID NO: 60771 - RNA, 20 nt, synthetic construct
  source 1..20: mol_type = other RNA
ttttagaaggtaagaatgtc

SEQ ID NO: 60772 - RNA, 20 nt, synthetic construct
  source 1..20: mol_type = other RNA
ttttagagagatgcctgtgc

SEQ ID NO: 60773 - RNA, 20 nt, synthetic construct
  source 1..20: mol_type = other RNA
ttttagagtaactgtcatca

SEQ ID NO: 60774 - RNA, 20 nt, synthetic construct
  source 1..20: mol_type = other RNA
ttttagatcaagtcctttcc

SEQ ID NO: 60775 - RNA, 20 nt, synthetic construct
  source 1..20: mol_type = other RNA
ttttagccaacaaccataat

SEQ ID NO: 60776 - RNA, 20 nt, synthetic construct
  source 1..20: mol_type = other RNA
ttttagctggggcagcaaag

SEQ ID NO: 60777 - RNA, 20 nt, synthetic construct
  source 1..20: mol_type = other RNA
ttttagcttcatataagtgg

SEQ ID NO: 60778 - RNA, 20 nt, synthetic construct
  source 1..20: mol_type = other RNA
ttttaggaaaatagagttcc

SEQ ID NO: 60779 - RNA, 20 nt, synthetic construct
  source 1..20: mol_type = other RNA
ttttaggacaaggaaaggat

SEQ ID NO: 60780 - RNA, 20 nt, synthetic construct
  source 1..20: mol_type = other RNA
ttttaggagtcaactaatca

SEQ ID NO: 60781 - RNA, 20 nt, synthetic construct
  source 1..20: mol_type = other RNA
ttttaggctctgtggtttct

SEQ ID NO: 60782 - RNA, 20 nt, synthetic construct
  source 1..20: mol_type = other RNA
ttttaggggggaaaacaccc

SEQ ID NO: 60783 - RNA, 20 nt, synthetic construct
  source 1..20: mol_type = other RNA
ttttaggtagggataagaat

SEQ ID NO: 60784 - RNA, 20 nt, synthetic construct
  source 1..20: mol_type = other RNA
ttttaggtagtcttgtcata

SEQ ID NO: 60785 - RNA, 20 nt, synthetic construct
  source 1..20: mol_type = other RNA
ttttaggtcatttttcactt

SEQ ID NO: 60786 - RNA, 20 nt, synthetic construct
  source 1..20: mol_type = other RNA
ttttaggtgccccactccac

SEQ ID NO: 60787 - RNA, 20 nt, synthetic construct
  source 1..20: mol_type = other RNA
ttttagtaagaggtatcacc

SEQ ID NO: 60788 - RNA, 20 nt, synthetic construct
  source 1..20: mol_type = other RNA
ttttagtaattctccacttt

SEQ ID NO: 60789 - RNA, 20 nt, synthetic construct
  source 1..20: mol_type = other RNA
ttttagtagagatgaggttt

SEQ ID NO: 60790 - RNA, 20 nt, synthetic construct
  source 1..20: mol_type = other RNA
ttttagtaggtctccttgta

SEQ ID NO: 60791 - RNA, 20 nt, synthetic construct
  source 1..20: mol_type = other RNA
ttttagtagtaagttgtgtc

SEQ ID NO: 60792 - RNA, 20 nt, synthetic construct
  source 1..20: mol_type = other RNA
ttttagtcttgtcttttctt

SEQ ID NO: 60793 - RNA, 20 nt, synthetic construct
  source 1..20: mol_type = other RNA
ttttagtgactggcttaatg

SEQ ID NO: 60794 - RNA, 20 nt, synthetic construct
  source 1..20: mol_type = other RNA
ttttagtggctcacagtgct

SEQ ID NO: 60795 - RNA, 20 nt, synthetic construct
  source 1..20: mol_type = other RNA
ttttagtttacactatggct

SEQ ID NO: 60796 - RNA, 20 nt, synthetic construct
  source 1..20: mol_type = other RNA
ttttataatgggcaatcaga

SEQ ID NO: 60797 - RNA, 20 nt, synthetic construct
  source 1..20: mol_type = other RNA
ttttataggcattccttaat

SEQ ID NO: 60798 - RNA, 20 nt, synthetic construct
  source 1..20: mol_type = other RNA
ttttatagtcttagctctta

SEQ ID NO: 60799 - RNA, 20 nt, synthetic construct
  source 1..20: mol_type = other RNA
ttttatatgcattaagccag

SEQ ID NO: 60800 - RNA, 20 nt, synthetic construct
  source 1..20: mol_type = other RNA
ttttatatttccgatgatac

SEQ ID NO: 60801 - RNA, 20 nt, synthetic construct
  source 1..20: mol_type = other RNA
ttttatcaaaatcaaggtgc

SEQ ID NO: 60802 - RNA, 20 nt, synthetic construct
  source 1..20: mol_type = other RNA
ttttatcaattagttcctcc

SEQ ID NO: 60803 - RNA, 20 nt, synthetic construct
  source 1..20: mol_type = other RNA
ttttatctctctcaagcaat

SEQ ID NO: 60804 - RNA, 20 nt, synthetic construct
  source 1..20: mol_type = other RNA
ttttatgcatttggtctcat

SEQ ID NO: 60805 - RNA, 20 nt, synthetic construct
  source 1..20: mol_type = other RNA
ttttatgctttgtctctgga

SEQ ID NO: 60806 - RNA, 20 nt, synthetic construct
  source 1..20: mol_type = other RNA
ttttatggaaacatggtaat

SEQ ID NO: 60807 - RNA, 20 nt, synthetic construct
  source 1..20: mol_type = other RNA
ttttatggaataatggaact

SEQ ID NO: 60808 - RNA, 20 nt, synthetic construct
  source 1..20: mol_type = other RNA
ttttatggtaactcctgttc

SEQ ID NO: 60809 - RNA, 20 nt, synthetic construct
  source 1..20: mol_type = other RNA
ttttatggttttttcccccc

SEQ ID NO: 60810 - RNA, 20 nt, synthetic construct
  source 1..20: mol_type = other RNA
ttttatgtacacgtcttgtc

SEQ ID NO: 60811 - RNA, 20 nt, synthetic construct
  source 1..20: mol_type = other RNA
ttttatgtgcagtctaacca

SEQ ID NO: 60812 - RNA, 20 nt, synthetic construct
  source 1..20: mol_type = other RNA
ttttatgtgctttctcaaca

SEQ ID NO: 60813 - RNA, 20 nt, synthetic construct
  source 1..20: mol_type = other RNA
ttttattaatttggcttggg

SEQ ID NO: 60814 - RNA, 20 nt, synthetic construct
  source 1..20: mol_type = other RNA
ttttattagatagtggtttg

SEQ ID NO: 60815 - RNA, 20 nt, synthetic construct
  source 1..20: mol_type = other RNA
ttttattaggtgcacacaac

SEQ ID NO: 60816 - RNA, 20 nt, synthetic construct
  source 1..20: mol_type = other RNA
ttttattctgttctagctcc

SEQ ID NO: 60817 - RNA, 20 nt, synthetic construct
  source 1..20: mol_type = other RNA
ttttattgataagcacatgg

SEQ ID NO: 60818 - RNA, 20 nt, synthetic construct
  source 1..20: mol_type = other RNA
ttttatttagcccatgtcta

SEQ ID NO: 60819 - RNA, 20 nt, synthetic construct
  source 1..20: mol_type = other RNA
ttttatttaggccctctata

SEQ ID NO: 60820 - RNA, 20 nt, synthetic construct
  source 1..20: mol_type = other RNA
ttttatttatacaggtgctt

SEQ ID NO: 60821 - RNA, 20 nt, synthetic construct
  source 1..20: mol_type = other RNA
ttttatttcttgacctcagt

SEQ ID NO: 60822 - RNA, 20 nt, synthetic construct
  source 1..20: mol_type = other RNA
ttttatttggctgttaccat

SEQ ID NO: 60823 - RNA, 20 nt, synthetic construct
  source 1..20: mol_type = other RNA
ttttattttatgtacacgtc

SEQ ID NO: 60824 - RNA, 20 nt, synthetic construct
  source 1..20: mol_type = other RNA
ttttcaaaaacagcatatac

SEQ ID NO: 60825 - RNA, 20 nt, synthetic construct
  source 1..20: mol_type = other RNA
ttttcaaaaacccaactctt

SEQ ID NO: 60826 - RNA, 20 nt, synthetic construct
  source 1..20: mol_type = other RNA
ttttcaaataatagctatcc

SEQ ID NO: 60827 - RNA, 20 nt, synthetic construct
  source 1..20: mol_type = other RNA
ttttcaaatacctagttttc

SEQ ID NO: 60828 - RNA, 20 nt, synthetic construct
  source 1..20: mol_type = other RNA
ttttcaacaaaggttgaaaa

SEQ ID NO: 60829 - RNA, 20 nt, synthetic construct
  source 1..20: mol_type = other RNA
ttttcaacctttgttgaaaa

SEQ ID NO: 60830 - RNA, 20 nt, synthetic construct
  source 1..20: mol_type = other RNA
ttttcaactgaacaacgctg

SEQ ID NO: 60831 - RNA, 20 nt, synthetic construct
  source 1..20: mol_type = other RNA
ttttcaaggcttgtgcatca

SEQ ID NO: 60832 - RNA, 20 nt, synthetic construct
  source 1..20: mol_type = other RNA
ttttcaagggtgttttcccc

SEQ ID NO: 60833 - RNA, 20 nt, synthetic construct
  source 1..20: mol_type = other RNA
ttttcaaggtagaagtacaa

SEQ ID NO: 60834 - RNA, 20 nt, synthetic construct
  source 1..20: mol_type = other RNA
ttttcaatcttggaaatgat

SEQ ID NO: 60835 - RNA, 20 nt, synthetic construct
  source 1..20: mol_type = other RNA
ttttcacaaacacacaaacc

SEQ ID NO: 60836 - RNA, 20 nt, synthetic construct
  source 1..20: mol_type = other RNA
ttttcacactataacagatg

SEQ ID NO: 60837 - RNA, 20 nt, synthetic construct
  source 1..20: mol_type = other RNA
ttttcacagaaacagaaaaa

SEQ ID NO: 60838 - RNA, 20 nt, synthetic construct
  source 1..20: mol_type = other RNA
ttttcacagacagtaattta

SEQ ID NO: 60839 - RNA, 20 nt, synthetic construct
  source 1..20: mol_type = other RNA
ttttcacagggcagggagag

SEQ ID NO: 60840 - RNA, 20 nt, synthetic construct
  source 1..20: mol_type = other RNA
ttttcacataaatttgccac

SEQ ID NO: 60841 - RNA, 20 nt, synthetic construct
  source 1..20: mol_type = other RNA
ttttcacattcttcaccatt

SEQ ID NO: 60842 - RNA, 20 nt, synthetic construct
  source 1..20: mol_type = other RNA
ttttcacattgcacagtctc

SEQ ID NO: 60843 - RNA, 20 nt, synthetic construct
  source 1..20: mol_type = other RNA
ttttcaccagcggcatacag

SEQ ID NO: 60844 - RNA, 20 nt, synthetic construct
  source 1..20: mol_type = other RNA
ttttcactctaatatggttc

SEQ ID NO: 60845 - RNA, 20 nt, synthetic construct
  source 1..20: mol_type = other RNA
ttttcactcttagtgatgtc

SEQ ID NO: 60846 - RNA, 20 nt, synthetic construct
  source 1..20: mol_type = other RNA
ttttcacttcgttcagttta

SEQ ID NO: 60847 - RNA, 20 nt, synthetic construct
  source 1..20: mol_type = other RNA
ttttcacttcttattggtta

SEQ ID NO: 60848 - RNA, 20 nt, synthetic construct
  source 1..20: mol_type = other RNA
ttttcacttttgtgcaacat

SEQ ID NO: 60849 - RNA, 20 nt, synthetic construct
  source 1..20: mol_type = other RNA
ttttcagattgaccttgtat

SEQ ID NO: 60850 - RNA, 20 nt, synthetic construct
  source 1..20: mol_type = other RNA
ttttcagcagcagagaagtg

SEQ ID NO: 60851 - RNA, 20 nt, synthetic construct
  source 1..20: mol_type = other RNA
ttttcagccctgatagatat

SEQ ID NO: 60852 - RNA, 20 nt, synthetic construct
  source 1..20: mol_type = other RNA
ttttcaggactcatgagagc

SEQ ID NO: 60853 - RNA, 20 nt, synthetic construct
  source 1..20: mol_type = other RNA
ttttcaggggggccactgga

SEQ ID NO: 60854 - RNA, 20 nt, synthetic construct
  source 1..20: mol_type = other RNA
ttttcaggtattgagcctgt

SEQ ID NO: 60855 - RNA, 20 nt, synthetic construct
  source 1..20: mol_type = other RNA
ttttcaggttcaagcgactc

SEQ ID NO: 60856 - RNA, 20 nt, synthetic construct
  source 1..20: mol_type = other RNA
ttttcagtccagatattatc

SEQ ID NO: 60857 - RNA, 20 nt, synthetic construct
  source 1..20: mol_type = other RNA
ttttcagttgcatgaatttg

SEQ ID NO: 60858 - RNA, 20 nt, synthetic construct
  source 1..20: mol_type = other RNA
ttttcataacaaagctctga

SEQ ID NO: 60859 - RNA, 20 nt, synthetic construct
  source 1..20: mol_type = other RNA
ttttcatagcagcattgttt

SEQ ID NO: 60860 - RNA, 20 nt, synthetic construct
  source 1..20: mol_type = other RNA
ttttcataggaaatacttga

SEQ ID NO: 60861 - RNA, 20 nt, synthetic construct
  source 1..20: mol_type = other RNA
ttttcatcactcactggcct

SEQ ID NO: 60862 - RNA, 20 nt, synthetic construct
  source 1..20: mol_type = other RNA
ttttcatccaaacagaaacc

SEQ ID NO: 60863 - RNA, 20 nt, synthetic construct
  source 1..20: mol_type = other RNA
ttttcatgcgacatatcagg

SEQ ID NO: 60864 - RNA, 20 nt, synthetic construct
  source 1..20: mol_type = other RNA
ttttcatgggttgattttta

SEQ ID NO: 60865 - RNA, 20 nt, synthetic construct
  source 1..20: mol_type = other RNA
ttttcatggtatcaattgta

SEQ ID NO: 60866 - RNA, 20 nt, synthetic construct
  source 1..20: mol_type = other RNA
ttttcatggttttaatgggc

SEQ ID NO: 60867 - RNA, 20 nt, synthetic construct
  source 1..20: mol_type = other RNA
ttttcatgttgaccattttt

SEQ ID NO: 60868 - RNA, 20 nt, synthetic construct
  source 1..20: mol_type = other RNA
ttttcattacatttgcttag

SEQ ID NO: 60869 - RNA, 20 nt, synthetic construct
  source 1..20: mol_type = other RNA
ttttcattcgttcaaaacat

SEQ ID NO: 60870 - RNA, 20 nt, synthetic construct
  source 1..20: mol_type = other RNA
ttttcattctacctggagcc

SEQ ID NO: 60871 - RNA, 20 nt, synthetic construct
  source 1..20: mol_type = other RNA
ttttcatttattctgttgca

SEQ ID NO: 60872 - RNA, 20 nt, synthetic construct
  source 1..20: mol_type = other RNA
ttttcattttactgctatac

SEQ ID NO: 60873 - RNA, 20 nt, synthetic construct
  source 1..20: mol_type = other RNA
ttttccaacagtttacacgc

SEQ ID NO: 60874 - RNA, 20 nt, synthetic construct
  source 1..20: mol_type = other RNA
ttttccaaccaagcccaact

SEQ ID NO: 60875 - RNA, 20 nt, synthetic construct
  source 1..20: mol_type = other RNA
ttttccaaccactgaatcag

SEQ ID NO: 60876 - RNA, 20 nt, synthetic construct
  source 1..20: mol_type = other RNA
ttttccaataagttaactga

SEQ ID NO: 60877 - RNA, 20 nt, synthetic construct
  source 1..20: mol_type = other RNA
ttttccaatccgggaacatg

SEQ ID NO: 60878 - RNA, 20 nt, synthetic construct
  source 1..20: mol_type = other RNA
ttttccacagtgactttact

SEQ ID NO: 60879 - RNA, 20 nt, synthetic construct
  source 1..20: mol_type = other RNA
ttttccacataaagtcttgc

SEQ ID NO: 60880 - RNA, 20 nt, synthetic construct
  source 1..20: mol_type = other RNA
ttttccacataattgaaccc

SEQ ID NO: 60881 - RNA, 20 nt, synthetic construct
  source 1..20: mol_type = other RNA
ttttccaggaaaagcaaatg

SEQ ID NO: 60882 - RNA, 20 nt, synthetic construct
  source 1..20: mol_type = other RNA
ttttccaggaccaatttacc

SEQ ID NO: 60883 - RNA, 20 nt, synthetic construct
  source 1..20: mol_type = other RNA
ttttccagtatattcatagt

SEQ ID NO: 60884 - RNA, 20 nt, synthetic construct
  source 1..20: mol_type = other RNA
ttttccagtcttctcataca

SEQ ID NO: 60885 - RNA, 20 nt, synthetic construct
  source 1..20: mol_type = other RNA
ttttccattcacacaccctt

SEQ ID NO: 60886 - RNA, 20 nt, synthetic construct
  source 1..20: mol_type = other RNA
ttttccattcatgtaatgca

SEQ ID NO: 60887 - RNA, 20 nt, synthetic construct
  source 1..20: mol_type = other RNA
ttttcccaaagatagactct

SEQ ID NO: 60888 - RNA, 20 nt, synthetic construct
  source 1..20: mol_type = other RNA
ttttcccaatctctggtatt

SEQ ID NO: 60889 - RNA, 20 nt, synthetic construct
  source 1..20: mol_type = other RNA
ttttcccagatacgttaaag

SEQ ID NO: 60890 - RNA, 20 nt, synthetic construct
  source 1..20: mol_type = other RNA
ttttcccaggagctagaaca

SEQ ID NO: 60891 - RNA, 20 nt, synthetic construct
  source 1..20: mol_type = other RNA
ttttcccccaattaaactat

SEQ ID NO: 60892 - RNA, 20 nt, synthetic construct
  source 1..20: mol_type = other RNA
ttttcccccctaaaacactg

SEQ ID NO: 60893 - RNA, 20 nt, synthetic construct
  source 1..20: mol_type = other RNA
ttttcccccctggaacaatc

SEQ ID NO: 60894 - RNA, 20 nt, synthetic construct
  source 1..20: mol_type = other RNA
ttttccccctacacccagtt

SEQ ID NO: 60895 - RNA, 20 nt, synthetic construct
  source 1..20: mol_type = other RNA
ttttcccgctacacaagtat

SEQ ID NO: 60896 - RNA, 20 nt, synthetic construct
  source 1..20: mol_type = other RNA
ttttccctcctttttatcac

SEQ ID NO: 60897 - RNA, 20 nt, synthetic construct
  source 1..20: mol_type = other RNA
ttttccctgtgtatgtgtag

SEQ ID NO: 60898 - RNA, 20 nt, synthetic construct
  source 1..20: mol_type = other RNA
ttttcccttttgtagctaat

SEQ ID NO: 60899 - RNA, 20 nt, synthetic construct
  source 1..20: mol_type = other RNA
ttttccggttgtatagcagt

SEQ ID NO: 60900 - RNA, 20 nt, synthetic construct
  source 1..20: mol_type = other RNA
ttttccgtctagccacttcc

SEQ ID NO: 60901 - RNA, 20 nt, synthetic construct
  source 1..20: mol_type = other RNA
ttttccgtgtgacaaaaagt

SEQ ID NO: 60902 - RNA, 20 nt, synthetic construct
  source 1..20: mol_type = other RNA
ttttcctaaaactccccatg

SEQ ID NO: 60903 - RNA, 20 nt, synthetic construct
  source 1..20: mol_type = other RNA
ttttcctaaccactgttatc

SEQ ID NO: 60904 - RNA, 20 nt, synthetic construct
  source 1..20: mol_type = other RNA
ttttcctaccctgaggatat

SEQ ID NO: 60905 - RNA, 20 nt, synthetic construct
  source 1..20: mol_type = other RNA
ttttcctactaacaagaaag

SEQ ID NO: 60906 - RNA, 20 nt, synthetic construct
  source 1..20: mol_type = other RNA
ttttcctagactgccaggta

SEQ ID NO: 60907 - RNA, 20 nt, synthetic construct
  source 1..20: mol_type = other RNA
ttttcctcccttcagcctgt

SEQ ID NO: 60908 - RNA, 20 nt, synthetic construct
  source 1..20: mol_type = other RNA
ttttcctccttctgctcact

SEQ ID NO: 60909 - RNA, 20 nt, synthetic construct
  source 1..20: mol_type = other RNA
ttttcctcgttttcaacaaa

SEQ ID NO: 60910 - RNA, 20 nt, synthetic construct
  source 1..20: mol_type = other RNA
ttttcctgatggacattctg

SEQ ID NO: 60911 - RNA, 20 nt, synthetic construct
  source 1..20: mol_type = other RNA
ttttcctgctgtcgtttatg

SEQ ID NO: 60912 - RNA, 20 nt, synthetic construct
  source 1..20: mol_type = other RNA
ttttcctggaaaacttctct

SEQ ID NO: 60913 - RNA, 20 nt, synthetic construct
  source 1..20: mol_type = other RNA
ttttcctgttccgggatcct

SEQ ID NO: 60914 - RNA, 20 nt, synthetic construct
  source 1..20: mol_type = other RNA
ttttccttatccattcatct

SEQ ID NO: 60915 - RNA, 20 nt, synthetic construct
  source 1..20: mol_type = other RNA
ttttccttatggatatctgg

SEQ ID NO: 60916 - RNA, 20 nt, synthetic construct
  source 1..20: mol_type = other RNA
ttttccttcttaagacattt

SEQ ID NO: 60917 - RNA, 20 nt, synthetic construct
  source 1..20: mol_type = other RNA
ttttccttctttgggggaag

SEQ ID NO: 60918 - RNA, 20 nt, synthetic construct
  source 1..20: mol_type = other RNA
ttttcctttaacgtatctgg

SEQ ID NO: 60919 - RNA, 20 nt, synthetic construct
  source 1..20: mol_type = other RNA
ttttcctttgcctaagtctc

SEQ ID NO: 60920 - RNA, 20 nt, synthetic construct
  source 1..20: mol_type = other RNA
ttttcctttgcctttcactt

SEQ ID NO: 60921 - RNA, 20 nt, synthetic construct
  source 1..20: mol_type = other RNA
ttttcgaccaagttactaga

SEQ ID NO: 60922 - RNA, 20 nt, synthetic construct
  source 1..20: mol_type = other RNA
ttttcgagactgagtaatat

SEQ ID NO: 60923 - RNA, 20 nt, synthetic construct
  source 1..20: mol_type = other RNA
ttttcgtatcttttaacaga

SEQ ID NO: 60924 - RNA, 20 nt, synthetic construct
  source 1..20: mol_type = other RNA
ttttcgtgtactgaaaccag

SEQ ID NO: 60925 - RNA, 20 nt, synthetic construct
  source 1..20: mol_type = other RNA
ttttctaaaccttaaaagag

SEQ ID NO: 60926 - RNA, 20 nt, synthetic construct
  source 1..20: mol_type = other RNA
ttttctaaactggttttcct

SEQ ID NO: 60927 - RNA, 20 nt, synthetic construct
  source 1..20: mol_type = other RNA
ttttctaaattgaacagcct

SEQ ID NO: 60928 - RNA, 20 nt, synthetic construct
  source 1..20: mol_type = other RNA
ttttctaagagccaaagaca

SEQ ID NO: 60929 - RNA, 20 nt, synthetic construct
  source 1..20: mol_type = other RNA
ttttctaggaaccatattag

SEQ ID NO: 60930 - RNA, 20 nt, synthetic construct
  source 1..20: mol_type = other RNA
ttttctaggtagtttctttg

SEQ ID NO: 60931 - RNA, 20 nt, synthetic construct
  source 1..20: mol_type = other RNA
ttttctagttagtttgttga

SEQ ID NO: 60932 - RNA, 20 nt, synthetic construct
  source 1..20: mol_type = other RNA
ttttctagtttgaggtgtac

SEQ ID NO: 60933 - RNA, 20 nt, synthetic construct
  source 1..20: mol_type = other RNA
ttttctatagtggctgcacc

SEQ ID NO: 60934 - RNA, 20 nt, synthetic construct
  source 1..20: mol_type = other RNA
ttttctattcattaccaggc

SEQ ID NO: 60935 - RNA, 20 nt, synthetic construct
  source 1..20: mol_type = other RNA
ttttctcccaaggttgcctg

SEQ ID NO: 60936 - RNA, 20 nt, synthetic construct
  source 1..20: mol_type = other RNA
ttttctcctaagtcttcttc

SEQ ID NO: 60937 - RNA, 20 nt, synthetic construct
  source 1..20: mol_type = other RNA
ttttctccttctggaagatt

SEQ ID NO: 60938 - RNA, 20 nt, synthetic construct
  source 1..20: mol_type = other RNA
ttttctcgacacacaatcca

SEQ ID NO: 60939 - RNA, 20 nt, synthetic construct
  source 1..20: mol_type = other RNA
ttttctcgtgcatgtctgca

SEQ ID NO: 60940 - RNA, 20 nt, synthetic construct
  source 1..20: mol_type = other RNA
ttttctctacagttaacaat

SEQ ID NO: 60941 - RNA, 20 nt, synthetic construct
  source 1..20: mol_type = other RNA
ttttctctcatgttgggtaa

SEQ ID NO: 60942 - RNA, 20 nt, synthetic construct
  source 1..20: mol_type = other RNA
ttttctctccttgcacatta

SEQ ID NO: 60943 - RNA, 20 nt, synthetic construct
  source 1..20: mol_type = other RNA
ttttctgacaatttcaggga

SEQ ID NO: 60944 - RNA, 20 nt, synthetic construct
  source 1..20: mol_type = other RNA
ttttctgaccaactatttca

SEQ ID NO: 60945 - RNA, 20 nt, synthetic construct
  source 1..20: mol_type = other RNA
ttttctgactctgtgcttgt

SEQ ID NO: 60946 - RNA, 20 nt, synthetic construct
  source 1..20: mol_type = other RNA
ttttctgagcaactactatt

SEQ ID NO: 60947 - RNA, 20 nt, synthetic construct
  source 1..20: mol_type = other RNA
ttttctgagtatattctgtg

SEQ ID NO: 60948 - RNA, 20 nt, synthetic construct
  source 1..20: mol_type = other RNA
ttttctgattgcccattata

SEQ ID NO: 60949 - RNA, 20 nt, synthetic construct
  source 1..20: mol_type = other RNA
ttttctgatttgctggctca

SEQ ID NO: 60950 - RNA, 20 nt, synthetic construct
  source 1..20: mol_type = other RNA
ttttctgcaattggaagact

SEQ ID NO: 60951 - RNA, 20 nt, synthetic construct
  source 1..20: mol_type = other RNA
ttttctgcatcttttgaggg

SEQ ID NO: 60952 - RNA, 20 nt, synthetic construct
  source 1..20: mol_type = other RNA
ttttctgcatttggtttgca

SEQ ID NO: 60953 - RNA, 20 nt, synthetic construct
  source 1..20: mol_type = other RNA
ttttctgcttctcaataagg

SEQ ID NO: 60954 - RNA, 20 nt, synthetic construct
  source 1..20: mol_type = other RNA
ttttctggaaactcaaaccc

SEQ ID NO: 60955 - RNA, 20 nt, synthetic construct
  source 1..20: mol_type = other RNA
ttttctggaccacaatctta

SEQ ID NO: 60956 - RNA, 20 nt, synthetic construct
  source 1..20: mol_type = other RNA
ttttctggaggctagaagtc

SEQ ID NO: 60957 - RNA, 20 nt, synthetic construct
  source 1..20: mol_type = other RNA
ttttctggttttctggaggc

SEQ ID NO: 60958 - RNA, 20 nt, synthetic construct
  source 1..20: mol_type = other RNA
ttttctgtaatgtttgtact

SEQ ID NO: 60959 - RNA, 20 nt, synthetic construct
  source 1..20: mol_type = other RNA
ttttctgtagaatatccaag

SEQ ID NO: 60960 - RNA, 20 nt, synthetic construct
  source 1..20: mol_type = other RNA
ttttctgtcattctgcagtt

SEQ ID NO: 60961 - RNA, 20 nt, synthetic construct
  source 1..20: mol_type = other RNA
ttttctgtttctgtgaaaaa

SEQ ID NO: 60962 - RNA, 20 nt, synthetic construct
  source 1..20: mol_type = other RNA
ttttcttaaaactttaggtc

SEQ ID NO: 60963 - RNA, 20 nt, synthetic construct
  source 1..20: mol_type = other RNA
ttttcttaccctttactcag

SEQ ID NO: 60964 - RNA, 20 nt, synthetic construct
  source 1..20: mol_type = other RNA
ttttcttacctaagcatcgt

SEQ ID NO: 60965 - RNA, 20 nt, synthetic construct
  source 1..20: mol_type = other RNA
ttttcttagttccattattc

SEQ ID NO: 60966 - RNA, 20 nt, synthetic construct
  source 1..20: mol_type = other RNA
ttttcttatctaggcgaaat

SEQ ID NO: 60967 - RNA, 20 nt, synthetic construct
  source 1..20: mol_type = other RNA
ttttcttattttttcccaga

SEQ ID NO: 60968 - RNA, 20 nt, synthetic construct
  source 1..20: mol_type = other RNA
ttttcttcatggactagact

SEQ ID NO: 60969 - RNA, 20 nt, synthetic construct
  source 1..20: mol_type = other RNA
ttttcttcccatctcactca

SEQ ID NO: 60970 - RNA, 20 nt, synthetic construct
  source 1..20: mol_type = other RNA
ttttcttcttgttttgttct

SEQ ID NO: 60971 - RNA, 20 nt, synthetic construct
  source 1..20: mol_type = other RNA
ttttcttgctttgctgcccc

SEQ ID NO: 60972 - RNA, 20 nt, synthetic construct
  source 1..20: mol_type = other RNA
ttttcttggtggtaactgat

SEQ ID NO: 60973 - RNA, 20 nt, synthetic construct
  source 1..20: mol_type = other RNA
ttttcttgtgggtattttgt

SEQ ID NO: 60974 - RNA, 20 nt, synthetic construct
  source 1..20: mol_type = other RNA
ttttcttgttataagcaaag

SEQ ID NO: 60975 - RNA, 20 nt, synthetic construct
  source 1..20: mol_type = other RNA
ttttctttcgcatcattcaa

SEQ ID NO: 60976 - RNA, 20 nt, synthetic construct
  source 1..20: mol_type = other RNA
ttttctttgagtagttcatg

SEQ ID NO: 60977 - RNA, 20 nt, synthetic construct
  source 1..20: mol_type = other RNA
ttttcttttgtgggtaaatt

SEQ ID NO: 60978 - RNA, 20 nt, synthetic construct
  source 1..20: mol_type = other RNA
ttttctttttaaacaggtgt

SEQ ID NO: 60979 - RNA, 20 nt, synthetic construct
  source 1..20: mol_type = other RNA
ttttctttttagtaagaggt

SEQ ID NO: 60980 - RNA, 20 nt, synthetic construct
  source 1..20: mol_type = other RNA
ttttgaaaaaacttccctta

SEQ ID NO: 60981 - RNA, 20 nt, synthetic construct
  source 1..20: mol_type = other RNA
ttttgaaaaacagatcttgg

SEQ ID NO: 60982 - RNA, 20 nt, synthetic construct
  source 1..20: mol_type = other RNA
ttttgaaaagaacaacatgg

SEQ ID NO: 60983 - RNA, 20 nt, synthetic construct
  source 1..20: mol_type = other RNA
ttttgaaactgagcatccca

SEQ ID NO: 60984 - RNA, 20 nt, synthetic construct
  source 1..20: mol_type = other RNA
ttttgaacaagagcgtcgta

SEQ ID NO: 60985 - RNA, 20 nt, synthetic construct
  source 1..20: mol_type = other RNA
ttttgaacactctgcaattt

SEQ ID NO: 60986 - RNA, 20 nt, synthetic construct
  source 1..20: mol_type = other RNA
ttttgaacgaatgaaaacac

SEQ ID NO: 60987 - RNA, 20 nt, synthetic construct
  source 1..20: mol_type = other RNA
ttttgaagaaagttttgcag

SEQ ID NO: 60988 - RNA, 20 nt, synthetic construct
  source 1..20: mol_type = other RNA
ttttgaataacctcataaga

SEQ ID NO: 60989 - RNA, 20 nt, synthetic construct
  source 1..20: mol_type = other RNA
ttttgaatcatgggagccaa

SEQ ID NO: 60990 - RNA, 20 nt, synthetic construct
  source 1..20: mol_type = other RNA
ttttgacagatgagactctt

SEQ ID NO: 60991 - RNA, 20 nt, synthetic construct
  source 1..20: mol_type = other RNA
ttttgacagccacgtgtatt

SEQ ID NO: 60992 - RNA, 20 nt, synthetic construct
  source 1..20: mol_type = other RNA
ttttgaccaaaacaaaaaac

SEQ ID NO: 60993 - RNA, 20 nt, synthetic construct
  source 1..20: mol_type = other RNA
ttttgacgcgcaacaattca

SEQ ID NO: 60994 - RNA, 20 nt, synthetic construct
  source 1..20: mol_type = other RNA
ttttgactcagtacttccct

SEQ ID NO: 60995 - RNA, 20 nt, synthetic construct
  source 1..20: mol_type = other RNA
ttttgagacacggtctcaca

SEQ ID NO: 60996 - RNA, 20 nt, synthetic construct
  source 1..20: mol_type = other RNA
ttttgagacagattctctgt

SEQ ID NO: 60997 - RNA, 20 nt, synthetic construct
  source 1..20: mol_type = other RNA
ttttgagacctcaggcagtc

SEQ ID NO: 60998 - RNA, 20 nt, synthetic construct
  source 1..20: mol_type = other RNA
ttttgagacggaatcttacc

SEQ ID NO: 60999 - RNA, 20 nt, synthetic construct
  source 1..20: mol_type = other RNA
ttttgagagtgcagtatgta

SEQ ID NO: 61000 - RNA, 20 nt, synthetic construct
  source 1..20: mol_type = other RNA
ttttgagatttgagtcttgc

SEQ ID NO: 61001 - RNA, 20 nt, synthetic construct
  source 1..20: mol_type = other RNA
ttttgaggcagagagatggt

SEQ ID NO: 61002 - RNA, 20 nt, synthetic construct
  source 1..20: mol_type = other RNA
ttttgaggcttttggatttt

SEQ ID NO: 61003 - RNA, 20 nt, synthetic construct
  source 1..20: mol_type = other RNA
ttttgagggtatcatattat

SEQ ID NO: 61004 - RNA, 20 nt, synthetic construct
  source 1..20: mol_type = other RNA
ttttgagtggcatcatactg

SEQ ID NO: 61005 - RNA, 20 nt, synthetic construct
  source 1..20: mol_type = other RNA
ttttgagtgtaaggtgtttg

SEQ ID NO: 61006 - RNA, 20 nt, synthetic construct
  source 1..20: mol_type = other RNA
ttttgagttattgcataggg

SEQ ID NO: 61007 - RNA, 20 nt, synthetic construct
  source 1..20: mol_type = other RNA
ttttgagttcagaaagatta

SEQ ID NO: 61008 - RNA, 20 nt, synthetic construct
  source 1..20: mol_type = other RNA
ttttgagttcagttttgtat

SEQ ID NO: 61009 - RNA, 20 nt, synthetic construct
  source 1..20: mol_type = other RNA
ttttgagtttggtgtattta

SEQ ID NO: 61010 - RNA, 20 nt, synthetic construct
  source 1..20: mol_type = other RNA
ttttgatagttgcagattca

SEQ ID NO: 61011 - RNA, 20 nt, synthetic construct
  source 1..20: mol_type = other RNA
ttttgatcatcgcattacga

SEQ ID NO: 61012 - RNA, 20 nt, synthetic construct
  source 1..20: mol_type = other RNA
ttttgattactgactcaatc

SEQ ID NO: 61013 - RNA, 20 nt, synthetic construct
  source 1..20: mol_type = other RNA
ttttgcaaaccaaatgcaga

SEQ ID NO: 61014 - RNA, 20 nt, synthetic construct
  source 1..20: mol_type = other RNA
ttttgcaagatgcataagtt

SEQ ID NO: 61015 - RNA, 20 nt, synthetic construct
  source 1..20: mol_type = other RNA
ttttgcaagattaatcttgt

SEQ ID NO: 61016 - RNA, 20 nt, synthetic construct
  source 1..20: mol_type = other RNA
ttttgcagagacggggtccc

SEQ ID NO: 61017 - RNA, 20 nt, synthetic construct
  source 1..20: mol_type = other RNA
ttttgcagagatgaggtctc

SEQ ID NO: 61018 - RNA, 20 nt, synthetic construct
  source 1..20: mol_type = other RNA
ttttgcagttggggactctt

SEQ ID NO: 61019 - RNA, 20 nt, synthetic construct
  source 1..20: mol_type = other RNA
ttttgccaaattatttgaga

SEQ ID NO: 61020 - RNA, 20 nt, synthetic construct
  source 1..20: mol_type = other RNA
ttttgccaagtataagatga

SEQ ID NO: 61021 - RNA, 20 nt, synthetic construct
  source 1..20: mol_type = other RNA
ttttgccagctaacttttaa

SEQ ID NO: 61022 - RNA, 20 nt, synthetic construct
  source 1..20: mol_type = other RNA
ttttgccagtgttttaaagc

SEQ ID NO: 61023 - RNA, 20 nt, synthetic construct
  source 1..20: mol_type = other RNA
ttttgcccactcttatatcc

SEQ ID NO: 61024 - RNA, 20 nt, synthetic construct
  source 1..20: mol_type = other RNA
ttttgcctctttgctaataa

SEQ ID NO: 61025 - RNA, 20 nt, synthetic construct
  source 1..20: mol_type = other RNA
ttttgcctggatgaatgcag

SEQ ID NO: 61026 - RNA, 20 nt, synthetic construct
  source 1..20: mol_type = other RNA
ttttgcctttcgcttttgga

SEQ ID NO: 61027 - RNA, 20 nt, synthetic construct
  source 1..20: mol_type = other RNA
ttttgctcacacttactaaa

SEQ ID NO: 61028 - RNA, 20 nt, synthetic construct
  source 1..20: mol_type = other RNA
ttttgctgagggaatttttc

SEQ ID NO: 61029 - RNA, 20 nt, synthetic construct
  source 1..20: mol_type = other RNA
ttttgctgcatcccaagggt

SEQ ID NO: 61030 - RNA, 20 nt, synthetic construct
  source 1..20: mol_type = other RNA
ttttgctgccaagtcagcac

SEQ ID NO: 61031 - RNA, 20 nt, synthetic construct
  source 1..20: mol_type = other RNA
ttttgctgtatacccaggtg

SEQ ID NO: 61032 - RNA, 20 nt, synthetic construct
  source 1..20: mol_type = other RNA
ttttgcttaaagttggtcct

SEQ ID NO: 61033 - RNA, 20 nt, synthetic construct
  source 1..20: mol_type = other RNA
ttttgcttactgtagcattg

SEQ ID NO: 61034 - RNA, 20 nt, synthetic construct
  source 1..20: mol_type = other RNA
ttttgcttcgaagcttatta

SEQ ID NO: 61035 - RNA, 20 nt, synthetic construct
  source 1..20: mol_type = other RNA
ttttgctttgggtctatagt

SEQ ID NO: 61036 - RNA, 20 nt, synthetic construct
  source 1..20: mol_type = other RNA
ttttgcttttgctttgggtc

SEQ ID NO: 61037 - RNA, 20 nt, synthetic construct
  source 1..20: mol_type = other RNA
ttttggaagactatgagaag

SEQ ID NO: 61038 - RNA, 20 nt, synthetic construct
  source 1..20: mol_type = other RNA
ttttggaagcatgtggccag

SEQ ID NO: 61039 - RNA, 20 nt, synthetic construct
  source 1..20: mol_type = other RNA
ttttggaatttaaggggtaa

SEQ ID NO: 61040 - RNA, 20 nt, synthetic construct
  source 1..20: mol_type = other RNA
ttttggagctataatttatc

SEQ ID NO: 61041 - RNA, 20 nt, synthetic construct
  source 1..20: mol_type = other RNA
ttttggatgcagatttcttt

SEQ ID NO: 61042 - RNA, 20 nt, synthetic construct
  source 1..20: mol_type = other RNA
ttttggattgcgattgtttc

SEQ ID NO: 61043 - RNA, 20 nt, synthetic construct
  source 1..20: mol_type = other RNA
ttttggcaaattgtcagatt

SEQ ID NO: 61044 - RNA, 20 nt, synthetic construct
  source 1..20: mol_type = other RNA
ttttggcagcgtaactccat

SEQ ID NO: 61045 - RNA, 20 nt, synthetic construct
  source 1..20: mol_type = other RNA
ttttggcatacaactgctca

SEQ ID NO: 61046 - RNA, 20 nt, synthetic construct
  source 1..20: mol_type = other RNA
ttttgggatcacacttgatg

SEQ ID NO: 61047 - RNA, 20 nt, synthetic construct
  source 1..20: mol_type = other RNA
ttttgggatctgtcatgttt

SEQ ID NO: 61048 - RNA, 20 nt, synthetic construct
  source 1..20: mol_type = other RNA
ttttgggcctttctgtttgt

SEQ ID NO: 61049 - RNA, 20 nt, synthetic construct
  source 1..20: mol_type = other RNA
ttttggggccatctgaattc

SEQ ID NO: 61050 - RNA, 20 nt, synthetic construct
  source 1..20: mol_type = other RNA
ttttgggggaagagagcatt

SEQ ID NO: 61051 - RNA, 20 nt, synthetic construct
  source 1..20: mol_type = other RNA
ttttggtaaaatgtggcaaa

SEQ ID NO: 61052 - RNA, 20 nt, synthetic construct
  source 1..20: mol_type = other RNA
ttttggtaatgggaaagaca

SEQ ID NO: 61053 - RNA, 20 nt, synthetic construct
  source 1..20: mol_type = other RNA
ttttggtacacatctttttt

SEQ ID NO: 61054 - RNA, 20 nt, synthetic construct
  source 1..20: mol_type = other RNA
ttttggtagaggattccagg

SEQ ID NO: 61055 - RNA, 20 nt, synthetic construct
  source 1..20: mol_type = other RNA
ttttggtagataccagaccc

SEQ ID NO: 61056 - RNA, 20 nt, synthetic construct
  source 1..20: mol_type = other RNA
ttttggtatgttgtgttttc

SEQ ID NO: 61057 - RNA, 20 nt, synthetic construct
  source 1..20: mol_type = other RNA
ttttggtattttttagagac

SEQ ID NO: 61058 - RNA, 20 nt, synthetic construct
  source 1..20: mol_type = other RNA
ttttggtcaaaactgtattt

SEQ ID NO: 61059 - RNA, 20 nt, synthetic construct
  source 1..20: mol_type = other RNA
ttttggtcttaccctctagc

SEQ ID NO: 61060 - RNA, 20 nt, synthetic construct
  source 1..20: mol_type = other RNA
ttttggtgtcatttttaaga

SEQ ID NO: 61061 - RNA, 20 nt, synthetic construct
  source 1..20: mol_type = other RNA
ttttggtgtttttctaggta

SEQ ID NO: 61062 - RNA, 20 nt, synthetic construct
  source 1..20: mol_type = other RNA
ttttggttcacttgaaacct

SEQ ID NO: 61063 - RNA, 20 nt, synthetic construct
  source 1..20: mol_type = other RNA
ttttggtttgtatgtgttaa

SEQ ID NO: 61064 - RNA, 20 nt, synthetic construct
  source 1..20: mol_type = other RNA
ttttgtaaatgaaacacttg

SEQ ID NO: 61065 - RNA, 20 nt, synthetic construct
  source 1..20: mol_type = other RNA
ttttgtaacgtgtatagctt

SEQ ID NO: 61066 - RNA, 20 nt, synthetic construct
  source 1..20: mol_type = other RNA
ttttgtaataacttggagaa

SEQ ID NO: 61067 - RNA, 20 nt, synthetic construct
  source 1..20: mol_type = other RNA
ttttgtactacttgtcaggt

SEQ ID NO: 61068 - RNA, 20 nt, synthetic construct
  source 1..20: mol_type = other RNA
ttttgtagaccctgttagtc

SEQ ID NO: 61069 - RNA, 20 nt, synthetic construct
  source 1..20: mol_type = other RNA
ttttgtagagacagaatctt

SEQ ID NO: 61070 - RNA, 20 nt, synthetic construct
  source 1..20: mol_type = other RNA
ttttgtagagggaatttgtt

SEQ ID NO: 61071 - RNA, 20 nt, synthetic construct
  source 1..20: mol_type = other RNA
ttttgtagctaatatctttg

SEQ ID NO: 61072 - RNA, 20 nt, synthetic construct
  source 1..20: mol_type = other RNA
ttttgtagtgtcttaatcct

SEQ ID NO: 61073 - RNA, 20 nt, synthetic construct
  source 1..20: mol_type = other RNA
ttttgtatatggtttaaggt

SEQ ID NO: 61074 - RNA, 20 nt, synthetic construct
  source 1..20: mol_type = other RNA
ttttgtatcctgagacttag

SEQ ID NO: 61075 - RNA, 20 nt, synthetic construct
  source 1..20: mol_type = other RNA
ttttgtatcctgtttgagaa

SEQ ID NO: 61076 - RNA, 20 nt, synthetic construct
  source 1..20: mol_type = other RNA
ttttgtattctgacctaaag

SEQ ID NO: 61077 - RNA, 20 nt, synthetic construct
  source 1..20: mol_type = other RNA
ttttgtcaagctatcagaat

SEQ ID NO: 61078 - RNA, 20 nt, synthetic construct
  source 1..20: mol_type = other RNA
ttttgtcaagtgactccaag

SEQ ID NO: 61079 - RNA, 20 nt, synthetic construct
  source 1..20: mol_type = other RNA
ttttgtcacacggaaaacat

SEQ ID NO: 61080 - RNA, 20 nt, synthetic construct
  source 1..20: mol_type = other RNA
ttttgtccaccagacaaaaa

SEQ ID NO: 61081 - RNA, 20 nt, synthetic construct
  source 1..20: mol_type = other RNA
ttttgtctggaacacacatt

SEQ ID NO: 61082 - RNA, 20 nt, synthetic construct
  source 1..20: mol_type = other RNA
ttttgtctggtggacaaaaa

SEQ ID NO: 61083 - RNA, 20 nt, synthetic construct
  source 1..20: mol_type = other RNA
ttttgtgacaagttcagcat

SEQ ID NO: 61084 - RNA, 20 nt, synthetic construct
  source 1..20: mol_type = other RNA
ttttgtgagttttaactctt

SEQ ID NO: 61085 - RNA, 20 nt, synthetic construct
  source 1..20: mol_type = other RNA
ttttgtgcaacataaatagg

SEQ ID NO: 61086 - RNA, 20 nt, synthetic construct
  source 1..20: mol_type = other RNA
ttttgtggagatggggactt

SEQ ID NO: 61087 - RNA, 20 nt, synthetic construct
  source 1..20: mol_type = other RNA
ttttgtgggaattcagtcac

SEQ ID NO: 61088 - RNA, 20 nt, synthetic construct
  source 1..20: mol_type = other RNA
ttttgtgggtaaattaagta

SEQ ID NO: 61089 - RNA, 20 nt, synthetic construct
  source 1..20: mol_type = other RNA
ttttgtgtagaggtgaagtt

SEQ ID NO: 61090 - RNA, 20 nt, synthetic construct
  source 1..20: mol_type = other RNA
ttttgtgtcttctgtttttc

SEQ ID NO: 61091 - RNA, 20 nt, synthetic construct
  source 1..20: mol_type = other RNA
ttttgtgtttgtgaccagat

SEQ ID NO: 61092 - RNA, 20 nt, synthetic construct
  source 1..20: mol_type = other RNA
ttttgttatggtaggtgctt

SEQ ID NO: 61093 - RNA, 20 nt, synthetic construct
  source 1..20: mol_type = other RNA
ttttgttcaggagttttgcc

SEQ ID NO: 61094 - RNA, 20 nt, synthetic construct
  source 1..20: mol_type = other RNA
ttttgttcattcatctgtta

SEQ ID NO: 61095 - RNA, 20 nt, synthetic construct
  source 1..20: mol_type = other RNA
ttttgttctcgttcatgttc

SEQ ID NO: 61096 - RNA, 20 nt, synthetic construct
  source 1..20: mol_type = other RNA
ttttgttgacatcctttgcg

SEQ ID NO: 61097 - RNA, 20 nt, synthetic construct
  source 1..20: mol_type = other RNA
ttttgttgcctgtagttttg

SEQ ID NO: 61098 - RNA, 20 nt, synthetic construct
  source 1..20: mol_type = other RNA
ttttgttgctattgttgaat

SEQ ID NO: 61099 - RNA, 20 nt, synthetic construct
  source 1..20: mol_type = other RNA
ttttgttgttggtttgtgtg

SEQ ID NO: 61100 - RNA, 20 nt, synthetic construct
  source 1..20: mol_type = other RNA
ttttgttgttgttgtttctg

SEQ ID NO: 61101 - RNA, 20 nt, synthetic construct
  source 1..20: mol_type = other RNA
ttttgtttatttgctgtcag

SEQ ID NO: 61102 - RNA, 20 nt, synthetic construct
  source 1..20: mol_type = other RNA
ttttgtttgtttctgaggtg

SEQ ID NO: 61103 - RNA, 20 nt, synthetic construct
  source 1..20: mol_type = other RNA
ttttgttttctccttctgga

SEQ ID NO: 61104 - RNA, 20 nt, synthetic construct
  source 1..20: mol_type = other RNA
ttttgttttgaataacctca

SEQ ID NO: 61105 - RNA, 20 nt, synthetic construct
  source 1..20: mol_type = other RNA
ttttgttttggtcaaaactg

SEQ ID NO: 61106 - RNA, 20 nt, synthetic construct
  source 1..20: mol_type = other RNA
ttttgtttttctctccttgc

SEQ ID NO: 61107 - RNA, 20 nt, synthetic construct
  source 1..20: mol_type = other RNA
ttttgttttttcacagaaac

SEQ ID NO: 61108 - RNA, 20 nt, synthetic construct
  source 1..20: mol_type = other RNA
tttttaaaaactttttgggc

SEQ ID NO: 61109 - RNA, 20 nt, synthetic construct
  source 1..20: mol_type = other RNA
tttttaaaaagcagctacct

SEQ ID NO: 61110 - RNA, 20 nt, synthetic construct
  source 1..20: mol_type = other RNA
tttttaaaagagcgaagagg

SEQ ID NO: 61111 - RNA, 20 nt, synthetic construct
  source 1..20: mol_type = other RNA
tttttaaaagatatccacag

SEQ ID NO: 61112 - RNA, 20 nt, synthetic construct
  source 1..20: mol_type = other RNA
tttttaaaagatgcattctg

SEQ ID NO: 61113 - RNA, 20 nt, synthetic construct
  source 1..20: mol_type = other RNA
tttttaaacaggtgtaagag

SEQ ID NO: 61114 - RNA, 20 nt, synthetic construct
  source 1..20: mol_type = other RNA
tttttaaatgttttgcagag

SEQ ID NO: 61115 - RNA, 20 nt, synthetic construct
  source 1..20: mol_type = other RNA
tttttaagaaatcgttgtga

SEQ ID NO: 61116 - RNA, 20 nt, synthetic construct
  source 1..20: mol_type = other RNA
tttttaagaaccttcatact

SEQ ID NO: 61117 - RNA, 20 nt, synthetic construct
  source 1..20: mol_type = other RNA
tttttaaggaaaagtcagta

SEQ ID NO: 61118 - RNA, 20 nt, synthetic construct
  source 1..20: mol_type = other RNA
tttttaaggctaaaacatac

SEQ ID NO: 61119 - RNA, 20 nt, synthetic construct
  source 1..20: mol_type = other RNA
tttttaagtggcgctgtttg

SEQ ID NO: 61120 - RNA, 20 nt, synthetic construct
  source 1..20: mol_type = other RNA
tttttaatctacaaaacagg

SEQ ID NO: 61121 - RNA, 20 nt, synthetic construct
  source 1..20: mol_type = other RNA
tttttaatgtagatcctgag

SEQ ID NO: 61122 - RNA, 20 nt, synthetic construct
  source 1..20: mol_type = other RNA
tttttaattcttaaactgcc

SEQ ID NO: 61123 - RNA, 20 nt, synthetic construct
  source 1..20: mol_type = other RNA
tttttacacttggagttttc

SEQ ID NO: 61124 - RNA, 20 nt, synthetic construct
  source 1..20: mol_type = other RNA
tttttacatgtagttttccc

SEQ ID NO: 61125 - RNA, 20 nt, synthetic construct
  source 1..20: mol_type = other RNA
tttttacattaaagacagct

SEQ ID NO: 61126 - RNA, 20 nt, synthetic construct
  source 1..20: mol_type = other RNA
tttttaccaagttgaatttc

SEQ ID NO: 61127 - RNA, 20 nt, synthetic construct
  source 1..20: mol_type = other RNA
tttttacccaacatgagaga

SEQ ID NO: 61128 - RNA, 20 nt, synthetic construct
  source 1..20: mol_type = other RNA
tttttacccggagaggtgaa

SEQ ID NO: 61129 - RNA, 20 nt, synthetic construct
  source 1..20: mol_type = other RNA
tttttacccgtggaaatact

SEQ ID NO: 61130 - RNA, 20 nt, synthetic construct
  source 1..20: mol_type = other RNA
tttttacgatgaaattgacc

SEQ ID NO: 61131 - RNA, 20 nt, synthetic construct
  source 1..20: mol_type = other RNA
tttttactcatgtctacctg

SEQ ID NO: 61132 - RNA, 20 nt, synthetic construct
  source 1..20: mol_type = other RNA
tttttactcgagggtagctt

SEQ ID NO: 61133 - RNA, 20 nt, synthetic construct
  source 1..20: mol_type = other RNA
tttttactgacttttcctta

SEQ ID NO: 61134 - RNA, 20 nt, synthetic construct
  source 1..20: mol_type = other RNA
tttttactgtccaaacagtg

SEQ ID NO: 61135 - RNA, 20 nt, synthetic construct
  source 1..20: mol_type = other RNA
tttttactttgcgaaacaca

SEQ ID NO: 61136 - RNA, 20 nt, synthetic construct
  source 1..20: mol_type = other RNA
tttttagagagatgcctgtg

SEQ ID NO: 61137 - RNA, 20 nt, synthetic construct
  source 1..20: mol_type = other RNA
tttttagcttcatataagtg

SEQ ID NO: 61138 - RNA, 20 nt, synthetic construct
  source 1..20: mol_type = other RNA
tttttaggtagggataagaa

SEQ ID NO: 61139 - RNA, 20 nt, synthetic construct
  source 1..20: mol_type = other RNA
tttttagtaagaggtatcac

SEQ ID NO: 61140 - RNA, 20 nt, synthetic construct
  source 1..20: mol_type = other RNA
tttttagtagagatgaggtt

SEQ ID NO: 61141 - RNA, 20 nt, synthetic construct
  source 1..20: mol_type = other RNA
tttttagtagtaagttgtgt

SEQ ID NO: 61142 - RNA, 20 nt, synthetic construct
  source 1..20: mol_type = other RNA
tttttagtcttgtcttttct

SEQ ID NO: 61143 - RNA, 20 nt, synthetic construct
  source 1..20: mol_type = other RNA
tttttagtgactggcttaat

SEQ ID NO: 61144 - RNA, 20 nt, synthetic construct
  source 1..20: mol_type = other RNA
tttttatatgcattaagcca

SEQ ID NO: 61145 - RNA, 20 nt, synthetic construct
  source 1..20: mol_type = other RNA
tttttatcaaaatcaaggtg

SEQ ID NO: 61146 - RNA, 20 nt, synthetic construct
  source 1..20: mol_type = other RNA
tttttatgcatttggtctca

SEQ ID NO: 61147 - RNA, 20 nt, synthetic construct
  source 1..20: mol_type = other RNA
tttttatggaaacatggtaa

SEQ ID NO: 61148 - RNA, 20 nt, synthetic construct
  source 1..20: mol_type = other RNA
tttttatggaataatggaac

SEQ ID NO: 61149 - RNA, 20 nt, synthetic construct
  source 1..20: mol_type = other RNA
tttttatgtgctttctcaac

SEQ ID NO: 61150 - RNA, 20 nt, synthetic construct
  source 1..20: mol_type = other RNA
tttttattctgttctagctc

SEQ ID NO: 61151 - RNA, 20 nt, synthetic construct
  source 1..20: mol_type = other RNA
tttttcacaaacacacaaac

SEQ ID NO: 61152 - RNA, 20 nt, synthetic construct
  source 1..20: mol_type = other RNA
tttttcacactataacagat

SEQ ID NO: 61153 - RNA, 20 nt, synthetic construct
  source 1..20: mol_type = other RNA
tttttcacagaaacagaaaa

SEQ ID NO: 61154 - RNA, 20 nt, synthetic construct
  source 1..20: mol_type = other RNA
tttttcacattcttcaccat

SEQ ID NO: 61155 - RNA, 20 nt, synthetic construct
  source 1..20: mol_type = other RNA
tttttcacattgcacagtct

SEQ ID NO: 61156 - RNA, 20 nt, synthetic construct
  source 1..20: mol_type = other RNA
tttttcaccagcggcataca

SEQ ID NO: 61157 - RNA, 20 nt, synthetic construct
  source 1..20: mol_type = other RNA
tttttcacttcgttcagttt

SEQ ID NO: 61158 - RNA, 20 nt, synthetic construct
  source 1..20: mol_type = other RNA
tttttcacttcttattggtt

SEQ ID NO: 61159 - RNA, 20 nt, synthetic construct
  source 1..20: mol_type = other RNA
tttttcagattgaccttgta

SEQ ID NO: 61160 - RNA, 20 nt, synthetic construct
  source 1..20: mol_type = other RNA
tttttcagcagcagagaagt

SEQ ID NO: 61161 - RNA, 20 nt, synthetic construct
  source 1..20: mol_type = other RNA
tttttcagccctgatagata

SEQ ID NO: 61162 - RNA, 20 nt, synthetic construct
  source 1..20: mol_type = other RNA
tttttcaggggggccactgg

SEQ ID NO: 61163 - RNA, 20 nt, synthetic construct
  source 1..20: mol_type = other RNA
tttttcaggttcaagcgact

SEQ ID NO: 61164 - RNA, 20 nt, synthetic construct
  source 1..20: mol_type = other RNA
tttttcatccaaacagaaac

SEQ ID NO: 61165 - RNA, 20 nt, synthetic construct
  source 1..20: mol_type = other RNA
tttttccaacagtttacacg

SEQ ID NO: 61166 - RNA, 20 nt, synthetic construct
  source 1..20: mol_type = other RNA
tttttccacataaagtcttg

SEQ ID NO: 61167 - RNA, 20 nt, synthetic construct
  source 1..20: mol_type = other RNA
tttttccacataattgaacc

SEQ ID NO: 61168 - RNA, 20 nt, synthetic construct
  source 1..20: mol_type = other RNA
tttttccaggaccaatttac

SEQ ID NO: 61169 - RNA, 20 nt, synthetic construct
  source 1..20: mol_type = other RNA
tttttcccagatacgttaaa

SEQ ID NO: 61170 - RNA, 20 nt, synthetic construct
  source 1..20: mol_type = other RNA
tttttcccccctggaacaat

SEQ ID NO: 61171 - RNA, 20 nt, synthetic construct
  source 1..20: mol_type = other RNA
tttttcccgctacacaagta

SEQ ID NO: 61172 - RNA, 20 nt, synthetic construct
  source 1..20: mol_type = other RNA
tttttccgtctagccacttc

SEQ ID NO: 61173 - RNA, 20 nt, synthetic construct
  source 1..20: mol_type = other RNA
tttttcctcccttcagcctg

SEQ ID NO: 61174 - RNA, 20 nt, synthetic construct
  source 1..20: mol_type = other RNA
tttttccttatggatatctg

SEQ ID NO: 61175 - RNA, 20 nt, synthetic construct
  source 1..20: mol_type = other RNA
tttttccttctttgggggaa

SEQ ID NO: 61176 - RNA, 20 nt, synthetic construct
  source 1..20: mol_type = other RNA
tttttcctttgcctaagtct

SEQ ID NO: 61177 - RNA, 20 nt, synthetic construct
  source 1..20: mol_type = other RNA
tttttcctttgcctttcact

SEQ ID NO: 61178 - RNA, 20 nt, synthetic construct
  source 1..20: mol_type = other RNA
tttttctaaactggttttcc

SEQ ID NO: 61179 - RNA, 20 nt, synthetic construct
  source 1..20: mol_type = other RNA
tttttctaggtagtttcttt

SEQ ID NO: 61180 - RNA, 20 nt, synthetic construct
  source 1..20: mol_type = other RNA
tttttctagtttgaggtgta

SEQ ID NO: 61181 - RNA, 20 nt, synthetic construct
  source 1..20: mol_type = other RNA
tttttctcgacacacaatcc

SEQ ID NO: 61182 - RNA, 20 nt, synthetic construct
  source 1..20: mol_type = other RNA
tttttctctccttgcacatt

SEQ ID NO: 61183 - RNA, 20 nt, synthetic construct
  source 1..20: mol_type = other RNA
tttttctgaccaactatttc

SEQ ID NO: 61184 - RNA, 20 nt, synthetic construct
  source 1..20: mol_type = other RNA
tttttctgagtatattctgt

SEQ ID NO: 61185 - RNA, 20 nt, synthetic construct
  source 1..20: mol_type = other RNA
tttttctgattgcccattat

SEQ ID NO: 61186 - RNA, 20 nt, synthetic construct
  source 1..20: mol_type = other RNA
tttttctgcaattggaagac

SEQ ID NO: 61187 - RNA, 20 nt, synthetic construct
  source 1..20: mol_type = other RNA
tttttctgcatcttttgagg

SEQ ID NO: 61188 - RNA, 20 nt, synthetic construct
  source 1..20: mol_type = other RNA
tttttctggaccacaatctt

SEQ ID NO: 61189 - RNA, 20 nt, synthetic construct
  source 1..20: mol_type = other RNA
tttttctgtaatgtttgtac

SEQ ID NO: 61190 - RNA, 20 nt, synthetic construct
  source 1..20: mol_type = other RNA
tttttctgtttctgtgaaaa

SEQ ID NO: 61191 - RNA, 20 nt, synthetic construct
  source 1..20: mol_type = other RNA
tttttcttacctaagcatcg

SEQ ID NO: 61192 - RNA, 20 nt, synthetic construct
  source 1..20: mol_type = other RNA
tttttcttcccatctcactc

SEQ ID NO: 61193 - RNA, 20 nt, synthetic construct
  source 1..20: mol_type = other RNA
tttttcttcttgttttgttc

SEQ ID NO: 61194 - RNA, 20 nt, synthetic construct
  source 1..20: mol_type = other RNA
tttttcttgctttgctgccc

SEQ ID NO: 61195 - RNA, 20 nt, synthetic construct
  source 1..20: mol_type = other RNA
tttttcttggtggtaactga

SEQ ID NO: 61196 - RNA, 20 nt, synthetic construct
  source 1..20: mol_type = other RNA
tttttcttgtgggtattttg

SEQ ID NO: 61197 - RNA, 20 nt, synthetic construct
  source 1..20: mol_type = other RNA
tttttctttcgcatcattca

SEQ ID NO: 61198 - RNA, 20 nt, synthetic construct
  source 1..20: mol_type = other RNA
tttttctttttaaacaggtg

SEQ ID NO: 61199 - RNA, 20 nt, synthetic construct
  source 1..20: mol_type = other RNA
tttttctttttagtaagagg

SEQ ID NO: 61200 - RNA, 20 nt, synthetic construct
  source 1..20: mol_type = other RNA
tttttgaaaagaacaacatg

SEQ ID NO: 61201 - RNA, 20 nt, synthetic construct
  source 1..20: mol_type = other RNA
tttttgaacaagagcgtcgt

SEQ ID NO: 61202 - RNA, 20 nt, synthetic construct
  source 1..20: mol_type = other RNA
tttttgacagatgagactct

SEQ ID NO: 61203 - RNA, 20 nt, synthetic construct
  source 1..20: mol_type = other RNA
tttttgacagccacgtgtat

SEQ ID NO: 61204 - RNA, 20 nt, synthetic construct
  source 1..20: mol_type = other RNA
tttttgagacacggtctcac

SEQ ID NO: 61205 - RNA, 20 nt, synthetic construct
  source 1..20: mol_type = other RNA
tttttgagacagattctctg

SEQ ID NO: 61206 - RNA, 20 nt, synthetic construct
  source 1..20: mol_type = other RNA
tttttgagacggaatcttac

SEQ ID NO: 61207 - RNA, 20 nt, synthetic construct
  source 1..20: mol_type = other RNA
tttttgagatttgagtcttg

SEQ ID NO: 61208 - RNA, 20 nt, synthetic construct
  source 1..20: mol_type = other RNA
tttttgattactgactcaat

SEQ ID NO: 61209 - RNA, 20 nt, synthetic construct
  source 1..20: mol_type = other RNA
tttttgcaaaccaaatgcag

SEQ ID NO: 61210 - RNA, 20 nt, synthetic construct
  source 1..20: mol_type = other RNA
tttttgcagagacggggtcc

SEQ ID NO: 61211 - RNA, 20 nt, synthetic construct
  source 1..20: mol_type = other RNA
tttttgccaaattatttgag

SEQ ID NO: 61212 - RNA, 20 nt, synthetic construct
  source 1..20: mol_type = other RNA
tttttgccaagtataagatg

SEQ ID NO: 61213 - RNA, 20 nt, synthetic construct
  source 1..20: mol_type = other RNA
tttttgccagtgttttaaag

SEQ ID NO: 61214 - RNA, 20 nt, synthetic construct
  source 1..20: mol_type = other RNA
tttttgcccactcttatatc

SEQ ID NO: 61215 - RNA, 20 nt, synthetic construct
  source 1..20: mol_type = other RNA
tttttgcctttcgcttttgg

SEQ ID NO: 61216 - RNA, 20 nt, synthetic construct
  source 1..20: mol_type = other RNA
tttttgctcacacttactaa

SEQ ID NO: 61217 - RNA, 20 nt, synthetic construct
  source 1..20: mol_type = other RNA
tttttggcatacaactgctc

SEQ ID NO: 61218 - RNA, 20 nt, synthetic construct
  source 1..20: mol_type = other RNA
tttttgggatcacacttgat

SEQ ID NO: 61219 - RNA, 20 nt, synthetic construct
  source 1..20: mol_type = other RNA
tttttgggatctgtcatgtt

SEQ ID NO: 61220 - RNA, 20 nt, synthetic construct
  source 1..20: mol_type = other RNA
tttttgggcctttctgtttg

SEQ ID NO: 61221 - RNA, 20 nt, synthetic construct
  source 1..20: mol_type = other RNA
tttttggtagaggattccag

SEQ ID NO: 61222 - RNA, 20 nt, synthetic construct
  source 1..20: mol_type = other RNA
tttttggtagataccagacc

SEQ ID NO: 61223 - RNA, 20 nt, synthetic construct
  source 1..20: mol_type = other RNA
tttttggtgtttttctaggt

SEQ ID NO: 61224 - RNA, 20 nt, synthetic construct
  source 1..20: mol_type = other RNA
tttttggttcacttgaaacc

SEQ ID NO: 61225 - RNA, 20 nt, synthetic construct
  source 1..20: mol_type = other RNA
tttttggtttgtatgtgtta

SEQ ID NO: 61226 - RNA, 20 nt, synthetic construct
  source 1..20: mol_type = other RNA
tttttgtaataacttggaga

SEQ ID NO: 61227 - RNA, 20 nt, synthetic construct
  source 1..20: mol_type = other RNA
tttttgtagagacagaatct

SEQ ID NO: 61228 - RNA, 20 nt, synthetic construct
  source 1..20: mol_type = other RNA
tttttgtagtgtcttaatcc

SEQ ID NO: 61229 - RNA, 20 nt, synthetic construct
  source 1..20: mol_type = other RNA
tttttgtatcctgtttgaga

SEQ ID NO: 61230 - RNA, 20 nt, synthetic construct
  source 1..20: mol_type = other RNA
tttttgtattctgacctaaa

SEQ ID NO: 61231 - RNA, 20 nt, synthetic construct
  source 1..20: mol_type = other RNA
tttttgtcaagtgactccaa

SEQ ID NO: 61232 - RNA, 20 nt, synthetic construct
  source 1..20: mol_type = other RNA
tttttgtcacacggaaaaca

SEQ ID NO: 61233 - RNA, 20 nt, synthetic construct
  source 1..20: mol_type = other RNA
tttttgtccaccagacaaaa

SEQ ID NO: 61234 - RNA, 20 nt, synthetic construct
  source 1..20: mol_type = other RNA
tttttgtctggaacacacat

SEQ ID NO: 61235 - RNA, 20 nt, synthetic construct
  source 1..20: mol_type = other RNA
tttttgtctggtggacaaaa

SEQ ID NO: 61236 - RNA, 20 nt, synthetic construct
  source 1..20: mol_type = other RNA
tttttgtgagttttaactct

SEQ ID NO: 61237 - RNA, 20 nt, synthetic construct
  source 1..20: mol_type = other RNA
tttttgtggagatggggact

SEQ ID NO: 61238 - RNA, 20 nt, synthetic construct
  source 1..20: mol_type = other RNA
tttttgtgtagaggtgaagt

SEQ ID NO: 61239 - RNA, 20 nt, synthetic construct
  source 1..20: mol_type = other RNA
tttttgttatggtaggtgct

SEQ ID NO: 61240 - RNA, 20 nt, synthetic construct
  source 1..20: mol_type = other RNA
tttttgttgttggtttgtgt

SEQ ID NO: 61241 - RNA, 20 nt, synthetic construct
  source 1..20: mol_type = other RNA
tttttgtttgtttctgaggt

SEQ ID NO: 61242 - RNA, 20 nt, synthetic construct
  source 1..20: mol_type = other RNA
tttttgttttctccttctgg

SEQ ID NO: 61243 - RNA, 20 nt, synthetic construct
  source 1..20: mol_type = other RNA
tttttgttttggtcaaaact

SEQ ID NO: 61244 - RNA, 20 nt, synthetic construct
  source 1..20: mol_type = other RNA
ttttttaagaaccttcatac

SEQ ID NO: 61245 - RNA, 20 nt, synthetic construct
  source 1..20: mol_type = other RNA
ttttttaaggaaaagtcagt

SEQ ID NO: 61246 - RNA, 20 nt, synthetic construct
  source 1..20: mol_type = other RNA
ttttttaagtggcgctgttt

SEQ ID NO: 61247 - RNA, 20 nt, synthetic construct
  source 1..20: mol_type = other RNA
ttttttaatgtagatcctga

SEQ ID NO: 61248 - RNA, 20 nt, synthetic construct
  source 1..20: mol_type = other RNA
ttttttactgacttttcctt

SEQ ID NO: 61249 - RNA, 20 nt, synthetic construct
  source 1..20: mol_type = other RNA
ttttttactgtccaaacagt

SEQ ID NO: 61250 - RNA, 20 nt, synthetic construct
  source 1..20: mol_type = other RNA
ttttttagtagtaagttgtg

SEQ ID NO: 61251 - RNA, 20 nt, synthetic construct
  source 1..20: mol_type = other RNA
ttttttagtcttgtcttttc

SEQ ID NO: 61252 - RNA, 20 nt, synthetic construct
  source 1..20: mol_type = other RNA
ttttttatgtgctttctcaa

SEQ ID NO: 61253 - RNA, 20 nt, synthetic construct
  source 1..20: mol_type = other RNA
ttttttcacactataacaga

SEQ ID NO: 61254 - RNA, 20 nt, synthetic construct
  source 1..20: mol_type = other RNA
ttttttcacagaaacagaaa

SEQ ID NO: 61255 - RNA, 20 nt, synthetic construct
  source 1..20: mol_type = other RNA
ttttttcacattgcacagtc

SEQ ID NO: 61256 - RNA, 20 nt, synthetic construct
  source 1..20: mol_type = other RNA
ttttttcaccagcggcatac

SEQ ID NO: 61257 - RNA, 20 nt, synthetic construct
  source 1..20: mol_type = other RNA
ttttttcacttcgttcagtt

SEQ ID NO: 61258 - RNA, 20 nt, synthetic construct
  source 1..20: mol_type = other RNA
ttttttccacataattgaac

SEQ ID NO: 61259 - RNA, 20 nt, synthetic construct
  source 1..20: mol_type = other RNA
ttttttcccagatacgttaa

SEQ ID NO: 61260 - RNA, 20 nt, synthetic construct
  source 1..20: mol_type = other RNA
ttttttcccccctggaacaa

SEQ ID NO: 61261 - RNA, 20 nt, synthetic construct
  source 1..20: mol_type = other RNA
ttttttcccgctacacaagt

SEQ ID NO: 61262 - RNA, 20 nt, synthetic construct
  source 1..20: mol_type = other RNA
ttttttcctcccttcagcct

SEQ ID NO: 61263 - RNA, 20 nt, synthetic construct
  source 1..20: mol_type = other RNA
ttttttccttatggatatct

SEQ ID NO: 61264 - RNA, 20 nt, synthetic construct
  source 1..20: mol_type = other RNA
ttttttccttctttggggga

SEQ ID NO: 61265 - RNA, 20 nt, synthetic construct
  source 1..20: mol_type = other RNA
ttttttcctttgcctttcac

SEQ ID NO: 61266 - RNA, 20 nt, synthetic construct
  source 1..20: mol_type = other RNA
ttttttctgattgcccatta

SEQ ID NO: 61267 - RNA, 20 nt, synthetic construct
  source 1..20: mol_type = other RNA
ttttttctggaccacaatct

SEQ ID NO: 61268 - RNA, 20 nt, synthetic construct
  source 1..20: mol_type = other RNA
ttttttcttcccatctcact

SEQ ID NO: 61269 - RNA, 20 nt, synthetic construct
  source 1..20: mol_type = other RNA
ttttttctttcgcatcattc

SEQ ID NO: 61270 - RNA, 20 nt, synthetic construct
  source 1..20: mol_type = other RNA
ttttttgagacagattctct

SEQ ID NO: 61271 - RNA, 20 nt, synthetic construct
  source 1..20: mol_type = other RNA
ttttttgagacggaatctta

SEQ ID NO: 61272 - RNA, 20 nt, synthetic construct
  source 1..20: mol_type = other RNA
ttttttgagatttgagtctt
